(19) United States
(12) Patent Application Publication
(10) Pub. No.: US 2004/0259086 A1
(43) Pub. Date: Dec. 23, 2004

(54) Novel genes, compositions, kits, and methods for identification, assessment, prevention, and therapy of human prostate cancer

(75) Inventors: Robert Schlegel, Auburndale, MA (US); Wilson O. Endege, Norwood, MA (US); John E. Monahan, Walpole, MA (US)

Correspondence Address: LAHIVE & COCKFIELD, LLP., 28 STATE STREET, BOSTON, MA, 02109, US

(73) Assignee: Millennium Pharmaceuticals, Inc.

(21) Appl. No.: 10/357,930

(22) Filed: Feb. 4, 2003

Related U.S. Application Data
(63) Continuation of application No. 09/785,276, filed on Feb. 16, 2001, now abandoned.
(60) Provisional application No. 60/219,007, filed on Jul. 18, 2000.
(60) Provisional application No. 60/255,281, filed on Dec. 13, 2000.
(60) Provisional application No. 60/183,319, filed on Feb. 17, 2000.
(60) Provisional application No. 60/189,862, filed on Mar. 16, 2000.
(60) Provisional application No. 60/207,454, filed on May 25, 2000.
(60) Provisional application No. 60/211,314, filed on Jun. 9, 2000.

(51) Int. Cl. C12Q 1/68; C07H 21/04; C12N 9/00; C07K 16/40

(52) U.S. Cl. 435/6; 435/69.1; 435/183; 435/320.1; 435/325; 530/388.1; 536/23.2

(57) ABSTRACT

The invention relates to compositions, kits, and methods for detecting, characterizing, preventing, and treating human prostate cancers. A variety of novel markers are provided, wherein changes in the levels of expression of one or more of the markers is correlated with the presence of prostate cancer.

### RELATED APPLICATIONS

[0001] The present application claims priority to U.S. provisional patent application Ser. No. 60/183,319, filed on Feb. 17, 2000, U.S. provisional patent application Ser. No. 60/189,862, filed on Mar. 16, 2000, U.S. provisional patent application Ser. No. 60/207,454, filed on May 25, 2000, U.S. provisional patent application Ser. No. 60/211,314, filed on Jun. 9, 2000 U.S. provisional patent application Ser. No. 60/219,007, filed on Jul. 18, 2000, and U.S. provisional patent application Ser. No. 60/255,281, filed on Dec. 13, 2000, all of which are expressly incorporated by reference.

### FIELD OF THE INVENTION

[0002] The field of the invention is prostate cancer, including diagnosis, characterization, management, and therapy of prostate cancer.

### BACKGROUND OF THE INVENTION

[0003] The increased number of cancer cases reported in the United States, and, indeed, around the world, is a major concern. Currently there are only a handful of treatments available for specific types of cancer, and these provide no absolute guarantee of success. In order to be most effective, these treatments require not only an early detection of the malignancy, but also a reliable assessment of the severity of the malignancy.

[0004] Carcinoma of the prostate (PCA) is the most frequently diagnosed cancer in men in the United States, and is the second leading cause of male cancer deaths (Karp et al., 1996, Cancer Res. 56:5547-5556). The acute susceptibility of this organ to cancer in men is not understood. Skenes glands represent a tissue in females that is homologous to the male prostate, but not a site where significant neoplastic transformation is observed.

[0005] An unusual challenge presented by prostate cancer is that most prostate tumors do not represent life threatening conditions. Projections from autopsy surveys indicate that as many as 11 million American men have prostate cancer (Dhom, 1983, J. Cancer Res. Clin. Oncol., 106:210-218). These figures are consistent with clinical observations of prostate carcinomas, which normally exhibit a slow and lingering course of progression. Such disease progression results in relatively few prostate tumors developing into cases of clinical concern during the lifetime of the patient. If, upon detection with available methods, the cancer appears well-differentiated, organ-confined and focal, treatment normally can not extend the life expectancy of older patients.

[0006] Unfortunately, the prostate carcinomas that are progressive in nature frequently have already metastasized by the time of clinical detection with available methods. Survival rates for individuals with metastatic prostate cancer are quite low. Between these two extremes are patients with prostate tumors that will metastasize during their lifetimes, but have not yet done so. For these patients, surgical removal of the prostate is curative and extends life expectancy. Therefore, accurate determination of which group a newly diagnosed patient falls into is critical in determining optimal treatment and patient survival.

[0007] Currently there is at least one early and noninvasive test available to the physician for detecting asymptomatic disease. The presence of Prostate Specific Antigen (PSA) can be measured with relative ease from blood samples using standard antibody-based detection kits. Abnormally high levels of this antigen in a patient's serum indicate a likelihood of prostate disease, possibly either a carcinoma, Benign Prostatic Hyperplasia (BPH) or prostatitis. In the majority of cases, PSA elevation is due to BPH or prostatitis rather than carcinoma.

[0008] Although clinical and pathologic stage and histological grading systems (e.g., Gleason's) have been used to indicate prognosis for groups of patients based on the degree of tumor differentiation or the type of glandular pattern (Carter and Coffey, In: J. P. Karr and H. Yamanak (eds.), Prostate Cancer: The Second Tokyo Symposium, pp. 19-27, New York: Elsevier, 1989.; Diamond et al., J. Urol., 128: 729-734, 1982), these systems do not adequately predict the progression rate of the cancer. While the use of computer-system image analysis of histologic sections of primary lesions for “nuclear roundness” has been suggested as an aide in the management of individual patients (Diamond et al., 1982, J. Urol., 128:729-734), this method is of limited use in studying the progression of the disease.

[0009] The analysis of DNA content/ploidy using flow cytometry and FISH has been demonstrated to have utility predicting prostate cancer aggressiveness (Pearsons et al., 1993, J. Urol., 150:120-125; Macoska et al., 1994, Cancer Res., 54: 3824-3830; Visakorpi et al., 1994, Am. J. Pathol., 145:1-7; Takahashi et al., 1994, Cancer Res., 54:3574-3579; Alcaraz et al., Cancer Res., 55:3998-4002, 1994), but these methods are expensive, time-consuming, and the latter methodology requires the construction of centromere-specific probes for analysis. There also exist specific nuclear matrix proteins whose expression has been reported to be associated with prostate cancer. However, these protein markers apparently do not distinguish between BPH and prostate cancer (Partin et al., 1993, Cancer Res., 53:744-746). Unfortunately, markers that cannot distinguish between benign and malignant prostate tumors are of little value.

[0010] It would therefore be beneficial to provide specific methods and reagents for the diagnosis, staging, prognosis, monitoring, and treatment of diseases associated with prostate cancer, or to indicate a predisposition to such for preventative medicine.

### SUMMARY OF THE INVENTION

[0011] The invention relates to novel genes associated with prostate cancer as well as methods of assessing whether a patient is afflicted with or has higher than normal risk for developing prostate cancer. The method of the present invention comprises the step of comparing the level of expression of a marker (listed within Tables 1-9) in a patient sample with the normal level of expression of the marker in a control, e.g., a sample from a patient without prostate cancer. A significant difference between the level of expression of the marker in the patient sample and the normal level is an indication that the patient is afflicted with prostate cancer or has higher than normal risk for developing prostate cancer.

[0012] In one embodiment of the methods of the present invention, the sample comprises cells obtained from the patient. The cells may be found in a prostate tissue sample collected, for example, by a prostate tissue biopsy or histology section, or a bone marrow biopsy. In another embodiment, the patient sample is a prostate-associated body fluid. Such fluids include, for example, blood fluids, lymph, urine, prostatic fluid and semen.

[0013] In accordance with the methods of the present invention, the presence and/or level of expression of the marker in a sample can be assessed, for example, by detecting the presence in the sample of:

[0014] a protein or protein fragment corresponding to the marker (e.g. using a reagent, such as an antibody, an antibody derivative, or an antibody fragment, which binds specifically with the protein or protein fragment)

[0015] a transcribed polynucleotide (e.g. an mRNA or a cDNA), or fragment thereof, having at least a portion with which the marker is substantially homologous (e.g. by contacting a mixture of transcribed polynucleotides obtained from the sample with a substrate having one or more of the markers listed within Tables 1-9 fixed thereto at selected positions)

[0016] a metabolite which is produced directly (i.e., catalyzed) or indirectly by a protein corresponding to the marker

[0017] a transcribed polynucleotide or fragment thereof, wherein the polynucleotide anneals with the marker under stringent hybridization conditions.

[0018] The methods of the present invention are useful for further diagnosing patients having an identified prostate mass or symptoms associated with prostate cancer, e.g. abnormally high levels of PSA. The methods of the present invention can further be of particular use with patients having an enhanced risk of developing prostate cancer (e.g., patients having a familial history of prostate cancer and patients identified as having a mutant oncogene). The methods of the present invention may further be of particular use in monitoring the efficacy of treatment of a prostate cancer patient (e.g. the efficacy of chemotherapy).

[0019] All cancers have staging schemes that are used to describe the degree to which the cancer has progressed. The TNM staging approach assigns the primary tumor (T) to one of four stages (and to additional substages within these categories) based on the size and location of the primary tumor within the prostate. A T1 designation indicates a microscopic tumor which cannot be detected by a digital rectal exam. A T2NO designation refers to a tumor palpable upon a digital rectal exam but are contained within the prostate capsule (local disease). In all forms of stage T3 disease the tumors have extended through the prostate capsule into the surrounding connective tissue or seminal vesicles. The T4 designation refers to tumors that have escaped from the prostate and can be found in the pelvic region. The N stage refers to whether the primary tumor has spread to the regional lymph nodes (pelvic lymph nodes). The M stage refers to whether the tumor cells have metastasized to distant sites.

[0020] The methods of the present invention may be performed using a plurality (e.g. 2, 3, 5, or 10 or more) of markers. According to a method involving a plurality of markers, the level of expression in the sample of each of a plurality of markers independently selected from the markers listed in Tables 1-9 is compared with the normal level of expression of each of the plurality of markers in samples of the same type obtained from control humans not afflicted with prostate cancer. A significantly altered level of expression in the sample of one or more of the markers listed in Tables 1-9, or some combination thereof, relative to that marker's corresponding normal levels, is an indication that the patient is afflicted with prostate cancer. The markers of Tables 1-9 may also be used in combination with known prostate cancer markers in the methods of the present invention, e.g. PSA analysis.

[0021] In a preferred method of assessing whether a patient is afflicted with prostate cancer (e.g., new detection (“screening”), detection of recurrence, reflex testing), the method comprises comparing:

[0022] a) the level of expression of a marker in a patient sample, wherein at least one marker is selected from the markers of Tables 1-9, and

[0023] b) the normal level of expression of the marker in a control non-prostate cancer sample.

[0024] A significant difference between the level of expression of the marker in the patient sample and the normal level is an indication that the patient is afflicted with prostate cancer.

[0025] The invention further relates to a method of assessing the efficacy of a therapy for inhibiting prostate cancer in a patient. This method comprises comparing:

[0026] a) expression of a marker in a first sample obtained from the patient prior to providing at least a portion of the therapy to the patient, wherein the marker is selected from the group consisting of the markers listed within Tables 1-9, and

[0027] b) expression of the marker in a second sample obtained from the patient following provision of the portion of the therapy. A significant difference between the level of expression of the marker in the second sample, relative to the first sample, is an indication that the therapy is efficacious for inhibiting prostate cancer in the patient.

[0028] It will be appreciated that in this method the “therapy” may be any therapy for treating prostate cancer including, but not limited to, chemotherapy, immunotherapy, gene therapy, radiation therapy and surgical removal of tissue. Thus, the methods of the invention may be used to evaluate a patient before, during and after therapy, for example, to evaluate the reduction in tumor burden.

[0029] The present invention therefore further comprises a method for monitoring the progression of prostate cancer in a patient, the method comprising:

[0030] a) detecting in a patient sample at a first time point, the expression of a marker, wherein the marker is selected from the group consisting of the markers listed in Tables 1-9;

[0031] b) repeating step a) at a subsequent time point in time; and

[0032] c) comparing the level of expression detected in steps a) and b), and therefrom monitoring the progression of prostate cancer in the patient.

[0033] The present invention also includes a method for assessing the aggressiveness or indolence of prostate cancer (e.g., staging), the method comprising comparing:

[0034] a) the level of expression of a marker in a patient sample, wherein at least one marker is selected from the markers of Tables 1-9, and

[0035] b) the normal level of expression of the marker in a control sample.

[0036] A significant difference between the level of expression in the sample and the normal level is an indication that the cancer is aggressive or indolent.

[0037] The present invention further includes a method for determining whether prostate cancer has metastasized or is likely to metastasize in the future, the method comprising comparing:

[0038] a) the level of expression of a marker in a patent sample, wherein at least one marker is selected from the markers of Tables 1-9 and

[0039] b) the normal level (or non-metastatic level) of expression of the marker in a control sample. A significant difference between the level of expression in the patient sample and the normal level (or non-metastatic level) is an indication that the prostate cancer has metastasized or is likely to metastasize in the future.

[0040] The invention also includes a method of selecting a composition for inhibiting prostate cancer in a patient. This method comprises the steps of:

[0041] a) obtaining a sample comprising cancer cells from the patient;

[0042] b) separately maintaining aliquots of the sample in the presence of a plurality of test compositions;

[0043] c) comparing expression of a marker listed within Tables 1-9 in each of the aliquots; and

[0044] d) selecting one of the test compositions which alters the level of expression of the marker in the aliquot containing that test composition, relative to other test compositions.

[0045] In addition, the invention includes a method of inhibiting prostate cancer in a patient. This method comprises the steps of:

[0046] a) obtaining a sample comprising cancer cells from the patient;

[0047] b) separately maintaining aliquots of the sample in the presence of a plurality of test compositions;

[0048] c) comparing expression of a marker listed within Tables 1-9 in each of the aliquots; and

[0049] d) administering to the patient at least one of the test compositions which alters the level of expression of the marker in the aliquot containing that test composition, relative to other test compositions.

[0050] The invention also includes a kit for assessing whether a patient is afflicted with prostate cancer. This kit comprises reagents for assessing expression of a marker listed within Tables 1-9.

[0051] In another aspect, the invention relates to a kit for assessing the suitability of each of a plurality of compounds for inhibiting a prostate cancer in a patient. The kit comprises a reagent for assessing expression of a marker listed within Tables 1-9, and may also comprise a plurality of compounds.

[0052] In another aspect, the invention relates to a kit for assessing the presence of prostate cancer cells. This kit comprises an antibody, wherein the antibody binds specifically with a protein or protein fragment corresponding to a marker listed within Tables 1-9. The kit may also comprise a plurality of antibodies, wherein the plurality binds specifically with a protein or protein fragment corresponding to a different marker listed within Tables 1-9.

[0053] The invention also includes a kit for assessing the presence of prostate cancer cells, wherein the kit comprises a nucleic acid probe. The probe binds specifically with a transcribed polynucleotide corresponding to a marker listed within Tables 1-9. The kit may also comprise a plurality of probes, wherein each of the probes binds specifically with a transcribed polynucleotide corresponding to a different marker listed within Tables 1-9.

[0054] The invention further relates to a method of making an isolated hybridoma which produces an antibody useful for assessing whether a patient is afflicted with prostate cancer. The method comprises isolating a protein or protein fragment corresponding to a marker listed within Tables 1-9, immunizing a mammal using the isolated protein or protein fragment, isolating splenocytes from the immunized mammal, fusing the isolated splenocytes with an immortalized cell line to form hybridomas, and screening individual hybridomas for production of an antibody which specifically binds with the protein or protein fragment, to isolate the hybridoma. The invention also includes an antibody produced by this method.

[0055] The invention further includes a method of assessing the prostate carcinogenic potential of a test compound. This method comprises the steps of;

[0056] a) maintaining separate aliquots of prostate cells in the presence and absence of the test compound; and

[0057] b) comparing expression of a marker in each of the aliquots.

[0058] The marker is selected from those listed within Tables 1-9. A significant difference between the level of expression of the marker in the aliquot maintained in the presence of (or exposed to) the test compound, relative to the aliquot maintained in the absence of the test compound, is an indication that the test compound possesses prostate carcinogenic potential.

[0059] Additionally, the invention includes a kit for assessing the prostate carcinogenic potential of a test compound. The kit comprises prostate cells and a reagent for assessing expression of a marker in each of the aliquots. The marker is selected from those listed within Tables 1-9.

[0060] The invention further relates to a method of treating a patient afflicted with prostate cancer. This method comprises providing to cells of the patient an antisense oligonucleotide complementary to a polynucleotide corresponding to a marker listed within Tables 1-9, which is overexpressed in prostate cancer. In an alternative method, expression of a gene corresponding to a marker selected from the markers listed in Tables 1-9 which is underexpressed in prostate cancer, is increased.

[0061] The invention includes a method of inhibiting prostate cancer in a patient at risk for developing prostate cancer. This method comprises inhibiting or increasing expression (or overexpression) of a gene corresponding to a marker listed within Tables 1-9, that is either overexpressed or underexpressed, respectively, in prostate cancer.

[0062] It will be appreciated that the methods and kits of the present invention may also include known cancer markers including known prostate cancer markers. It will further be appreciated that the methods and kits may be used to identify cancers other than prostate cancer.

### DETAILED DESCRIPTION OF THE INVENTION

[0063] The invention relates to newly discovered genes associated with the cancerous state of prostate cells. It has been discovered that the level of expression of these individual genes, also referred to as markers, and combinations of these genes, correlates with the presence of prostate cancer or a pre-malignant condition in a patient. Methods are provided for detecting the presence of prostate cancer in a sample, the absence of prostate cancer in a sample, the stage of a prostate cancer, the metastatic potential of a prostate cancer, the indolence or aggressiveness of the cancer, and other characteristics of prostate cancer that are relevant to prevention, diagnosis, characterization and therapy of prostate cancer in a patient.

[0064] Definitions

[0065] As used herein, each of the following terms has the meaning associated with it in this section.

[0066] The articles “a” and “an” are used herein to refer to one or to more than one (i.e. to at least one) of the grammatical object of the article. By way of example, “an element” means one element or more than one element.

[0067] A “marker” is a naturally-occurring polymer corresponding to at least one of the novel nucleic acids listed within Tables 1-9. For example, markers include, without limitation, sense and anti-sense strands of genomic DNA (i.e. including any introns occurring therein), RNA generated by transcription of genomic DNA (i.e. prior to splicing), RNA generated by splicing of RNA transcribed from genomic DNA, and proteins generated by translation of spliced RNA (i.e. including proteins both before and after cleavage of normally cleaved regions such as transmembrane signal sequences). As used herein, “marker” may also include a cDNA made by reverse transcription of an RNA generated by transcription of genomic DNA (including spliced RNA).

[0068] As used herein a polynucleotide “corresponds to” another (a first) polynucleotide if it is related to the first polynucleotide by any of the following relationships: The second polynucleotide comprises the first polynucleotide and the second polynucleotide encodes a gene product; 2) The second polynucleotide is 5′ or 3′ to the first polynucleotide in cDNA, RNA, genomic DNA, or fragment of any of these polynucleotides. For example, a second polynucleotide may be a fragment of a gene that includes the first and second polynucleotides. The first and second polynucleotides are related in that they are components of the gene coding for a gene product, such as a protein or antibody. However, it is not necessary that the second polynucleotide comprises or overlaps with the first polynucleotide to be encompassed within the definition of “corresponding to” as used herein. For example, the first polynucleotide may be a fragment of a 3′ untranslated region of the second polynucleotide. The first and second polynucleotide may be fragments of a gene coding for a gene product. The second polynucleotide may be an exon of the gene while the first polynucleotide may be an intron of the gene; 3) The second polynucleotide is the complement of the first polynucleotide.

[0069] The term “probe” refers to any molecule which is capable of selectively binding to a specifically intended target molecule, for example a marker of the invention. Probes can be either synthesized by one skilled in the art, or derived from appropriate biological preparations. For purposes of detection of the target molecule, probes may be specifically designed to be labeled, as described herein. Examples of molecules that can be utilized as probes include, but are not limited to, RNA, DNA, cDNA, proteins, antibodies, and organic monomers.

[0070] A “prostate-associated” body fluid is a fluid which, when in the body of a patient, contacts or passes through prostate cells or into which cells or proteins shed from prostate cells are capable of passing. Exemplary prostate-associated body fluids include blood fluids, semen, prostate fluid, lymph and urine.

[0071] The “normal” level of expression of a marker is the level of expression of the marker in prostate cells or prostate-associated body fluids of a patient, e.g. a human, not afflicted with prostate cancer.

[0072] “Over-expression” and “under-expression” of a marker refer to expression of the marker of a patient at a greater or lesser level, respectively, than normal level of expression of the marker (e.g. at least two-fold greater or lesser level).

[0073] As used herein, the term “promoter/regulatory sequence” means a nucleic acid sequence which is required for expression of a gene product operably linked to the promoter/regulatory sequence. In some instances, this sequence may be the core promoter sequence and in other instances, this sequence may also include an enhancer sequence and other regulatory elements which are required for expression of the gene product. The promoter/regulatory sequence may, for example, be one which expresses the gene product in a tissue-specific manner.

[0074] A “constitutive” promoter is a nucleotide sequence which, when operably linked with a polynucleotide which encodes or specifies a gene product, causes the gene product to be produced in a living human cell under most or all physiological conditions of the cell.

[0075] An “inducible” promoter is a nucleotide sequence which, when operably linked with a polynucleotide which encodes or specifies a gene product, causes the gene product to be produced in a living human cell substantially only when an inducer which corresponds to the promoter is present in the cell.

[0076] A “tissue-specific” promoter is a nucleotide sequence which, when operably linked with a polynucleotide which encodes or specifies a gene product, causes the gene product to be produced in a living human cell substantially only if the cell is a cell of the tissue type corresponding to the promoter.

[0077] A “transcribed polynucleotide” is a polynucleotide (e.g. an RNA, a cDNA, or an analog of one of an RNA or cDNA) which is complementary to or homologous with all or a portion of a mature RNA made by transcription of a genomic DNA corresponding to a marker of the invention and normal post-transcriptional processing (e.g. splicing), if any, of the transcript.

[0078] “Complementary” refers to the broad concept of sequence complementarity between regions of two nucleic acid strands or between two regions of the same nucleic acid strand. It is known that an adenine residue of a first nucleic acid region is capable of forming specific hydrogen bonds (“base pairing”) with a residue of a second nucleic acid region which is antiparallel to the first region if the residue is thymine or uracil. Similarly, it is known that a cytosine residue of a first nucleic acid strand is capable of base pairing with a residue of a second nucleic acid strand which is antiparallel to the first strand if the residue is guanine. A first region of a nucleic acid is complementary to a second region of the same or a different nucleic acid if, when the two regions are arranged in an antiparallel fashion, at least one nucleotide residue of the first region is capable of base pairing with a residue of the second region. Preferably, the first region comprises a first portion and the second region comprises a second portion, whereby, when the first and second portions are arranged in an antiparallel fashion, at least about 50%, and preferably at least about 75%, at least about 90%, or at least about 95% of the nucleotide residues of the first portion are capable of base pairing with nucleotide residues in the second portion. More preferably, all nucleotide residues of the first portion are capable of base pairing with nucleotide residues in the second portion.

[0079] “Homologous” as used herein, refers to nucleotide sequence similarity between two regions of the same nucleic acid strand or between regions of two different nucleic acid strands. Homology between two regions is expressed in terms of the proportion of nucleotide residue positions of the two regions that are occupied by the same nucleotide residue. By way of example, a region having the nucleotide sequence 5′-ATTGCC-3′ and a region having the nucleotide sequence 5′-TATGGC-3′ share 50% homology. Preferably, the first region comprises a first portion and the second region comprises a second portion, whereby, at least about 50%, and preferably at least about 75%, at least about 90%, or at least about 95% of the nucleotide residue positions of each of the portions are occupied by the same nucleotide residue. More preferably, all nucleotide residue positions of each of the portions are occupied by the same nucleotide residue.

[0080] A marker is “fixed” to a substrate if it is covalently or non-covalently associated with the substrate such that the substrate can be rinsed with a fluid (e.g. standard saline citrate, pH 7.4) without a substantial fraction of the marker dissociating from the substrate.

[0081] As used herein, a “naturally-occurring” nucleic acid molecule refers to an RNA or DNA molecule having a nucleotide sequence that occurs in nature.

[0082] Expression of a marker in a patient is “significantly” higher than the normal level of expression of a marker if the level of expression of the marker is greater than the normal level by an amount greater than the standard error of the assay employed to assess expression, and preferably at least twice, and more preferably three, four, five or ten times that amount. Alternately, expression of the marker in the patient can be considered “significantly” higher or lower than the normal level of expression if the level of expression is at least about two, and preferably at least about three, four, or five times, higher or lower, respectively, than the normal level of expression of the marker.

[0083] Prostate cancer is “inhibited” if at least one symptom of the cancer is alleviated, terminated, slowed, or prevented. As used herein, prostate cancer is also “inhibited” if recurrence or metastasis of the cancer is reduced, slowed, delayed, or prevented.

[0084] A kit is any manufacture (e.g. a package or container) comprising at least one reagent, e.g. a probe, for specifically detecting a marker of the invention, the manufacture being promoted, distributed, or sold as a unit for performing the methods of the present invention.

[0085] Description

[0086] The present invention is based, in part, on identification of novel markers which are differentially expressed in prostate cancer cells when compared with normal (i.e. non-cancerous) prostate cells. The markers of the invention correspond to DNA, RNA, and polypeptide molecules which can be detected in one or both of normal and cancerous prostate cells. The presence, absence, or level of expression of one or more of these markers in prostate cells is herein correlated with the cancerous state of the tissue. The invention thus includes compositions, kits, and methods for assessing the cancerous state of prostate cells (e.g. cells obtained from a human, cultured human cells, archived or preserved human cells and in vivo cells).

[0087] The compositions, kits, and methods of the invention have the following uses, among others:

[0088] 1) assessing whether a patient is afflicted with prostate cancer;

[0089] 2) assessing the stage of prostate cancer in a human patient;

[0090] 3) assessing the grade of prostate cancer in a patient;

[0091] 4) assessing the benign or malignant nature of prostate cancer in a patient;

[0092] 5) assessing the metastatic potential of prostate cancer in a patient;

[0093] 6) assessing the histological type of neoplasm (e.g. Adenocarcinoma) associated with prostate cancer in a patient;

[0094] 7) assessing the indolent or aggressive nature of prostate cancer in a patient;

[0095] 8) making an isolated hybridoma which produces: an antibody useful for assessing whether a patient is afflicted with prostate cancer;

[0096] 9) assessing the presence of prostate cancer cells;

[0097] 10) assessing the efficacy of one or more test compounds for inhibiting prostate cancer in a patient;

[0098] 11) assessing the efficacy of a therapy for inhibiting prostate cancer in a patient;

[0099] 12) monitoring the progression of prostate cancer in a patient;

[0100] 13) selecting a composition or therapy for inhibiting prostate cancer in a patient;

[0101] 14) treating a patient afflicted with prostate cancer;

[0102] 15) inhibiting prostate cancer in a patient;

[0103] 16) assessing the prostate carcinogenic potential of a test compound; and

[0104] 17) inhibiting prostate cancer in a patient at risk for developing prostate cancer.

[0105] The invention thus includes a method of assessing whether a patient is afflicted with prostate cancer which includes assessing whether the patient has pre-metastasized prostate cancer. This method comprises comparing the level of expression of a marker in a patient sample and the normal level of expression of the marker in a control, e.g., a non-prostate cancer sample. A significant difference between the level of expression of the marker in the patient sample and the normal level is an indication that the patient is afflicted with prostate cancer. The marker is selected from the group consisting of the markers listed within Tables 1-9. Although one or more molecules corresponding to the markers listed within Tables 1-9 may have been described by others, the significance of the level of expression of these markers with regard to the cancerous state of prostate cells has not previously been recognized.

[0106] The polynucleotides set forth in Tables 1-9 represent previously unidentified nucleotide sequences. These nucleotide sequences were identified through subtracted library experiments described herein. Also provided by this invention are polynucleotides that correspond to the polynucleotides of Tables 1-9. In one embodiment, these polynucleotides are obtained by identification of a larger fragment or full-length coding sequence of these polynucleotides. Gene delivery vehicles, host cells, compositions and databases (all described herein) containing these polynucleotides are also provided by this invention.

[0107] The invention also encompasses polynucleotides which differ from that of the polynucleotides described herein, but which produce the same phenotypic effect, such as an allelic variant. These altered, but phenotypically equivalent polynucleotides are referred to as “equivalent nucleic acids.” This invention also encompasses polynucleotides characterized by changes in non-coding regions that do not after the polypeptide produced therefrom when compared to the polynucleotide herein. This invention further encompasses polynucleotides, which hybridize to the polynucleotides of the subject invention under conditions of moderate or high stringency. Alternatively, the polynucleotides are at least 85%, or at least 90%, or more preferably, greater or equal to 95% identical as determined by a sequence alignment program when run under default parameters.

[0108] Any marker or combination of markers listed within Tables 1-9, as well as any known markers in combination with the markers set forth within Tables 1-9, may be used in the compositions, kits, and methods of the present invention. In general, it is preferable to use markers for which the difference between the level of expression of the marker in prostate cancer cells or prostate-associated body fluids and the level of expression of the same marker in normal prostate cells or prostate-associated body fluids is as great as possible. Although this difference can be as small as the limit of detection of the method for assessing expression of the marker, it is preferred that the difference be at least greater than the standard error of the assessment method, and preferably a difference of at least 2-, 3-, 4-, 5-, 6-, 7-, 8-, 9-, 10-, 15-, 20-, 25-, 100-, 500-, 1000-fold or greater.

[0109] It will be appreciated that patient samples containing prostate cells may be used in the methods of the present invention. In these embodiments, the level of expression of the marker can be assessed by assessing the amount (e.g. absolute amount or concentration) of the marker in a prostate cell sample, e.g., prostate tissue sample obtained from a patient. The cell sample can, of course, be subjected to a variety of well-known post-collection preparative and storage techniques (e.g. fixation, storage, freezing, lysis, homogenization, DNA or RNA extraction, ultrafiltration, concentration, evaporation, centrifugation, etc.) prior to assessing the amount of the marker in the sample.

[0110] It will also be appreciated that certain markers correspond to proteins which are secreted from prostate cells (i.e. one or both of normal and cancerous cells) to the extracellular space surrounding the cells. These markers are preferably used in certain embodiments of the compositions, kits, and methods of the invention, owing to the fact that the protein corresponding to each of these markers can be detected in a prostate-associated body fluid sample. In addition, preferred in vivo techniques for detection of a protein corresponding to a marker of the invention include introducing into a subject a labeled antibody directed against the protein. For example, the antibody can be labeled with a radioactive marker whose presence and location in a subject can be detected by standard imaging techniques.

[0111] Although not every marker corresponding to a secreted protein is indicated as such herein, it is a simple matter for the skilled artisan to determine whether any particular marker corresponds to a secreted protein. In order to make this determination, the protein corresponding to a marker is expressed in a test cell (e.g. a cell of a prostate cell line), extracellular fluid is collected, and the presence or absence of the protein in the extracellular fluid is assessed (e.g. using a labeled antibody which binds specifically with the protein).

[0112] The following is an example of a method which can be used to detect secretion of a protein corresponding to a marker of the invention. About 8×^{10 293}T cells are incubated at 37° C. in wells containing growth medium (Dulbecco's modified Eagle's medium {DMEM} supplemented with 10% fetal bovine serum) under a 5% (v/v) CO₂, 95% air atmosphere to about 60-70% confluence. The cells are then transfected using a standard transfection mixture comprising 2 micrograms of DNA comprising an expression vector encoding the protein and 10 microliters of LipofectAMINE™ (GIBCO/BRL Catalog no. 18342-012) per well. The transfection mixture is maintained for about 5 hours, and then replaced with fresh growth medium and maintained in an air atmosphere. Each well is gently rinsed twice with DMEM which does not contain methionine or cysteine (DMEM-MC; ICN Catalog no. 16-424-54). About 1 milliliter of DMEM-MC and about 50 microcuries of Trans-³⁵S™ reagent (ICN Catalog no. 51006) are added to each well. The wells are maintained under the 5% CO₂ atmosphere described above and incubated at 37° C. for a selected period. Following incubation, 150 microliters of conditioned medium is removed and centrifuged to remove floating cells and debris. The presence of the protein in the supernatant is an indication that the protein is secreted.

[0113] Examples of prostate-associated body fluids include blood fluids (e.g. whole blood, blood serum, blood having platelets removed therefrom, lymph, urine, prostatic fluid and semen. Many prostate-associated body fluids (i.e. usually excluding urine) can have prostate cells therein, particularly when the prostate cells are cancerous, and, more particularly, when the prostate cancer is metastasizing. Cell-containing fluids which can contain prostate cancer cells include, but are not limited to, whole blood, blood having platelets removed therefrom, lymph, prostatic fluid, and semen. Thus, the compositions, kits, and methods of the invention can be used to detect expression of markers corresponding to proteins having at least one portion which is displayed on the surface of cells which express it. Although the proteins having at least one cell-surface portion are not set forth herein, it is a simple matter for the skilled artisan to determine whether the protein corresponding to any particular marker comprises a cell-surface protein. For example, immunological methods may be used to detect such proteins on whole cells, or well known computer-based sequence analysis methods (e.g. the SIGNALP program; Nielsen et al., 1997, Protein Engineering 10:1-6) may be used to predict the presence of at least one extracellular domain (i.e. including both secreted proteins and proteins having at least one cell-surface domain). Expression of a marker corresponding to a protein having at least one portion which is displayed on the surface of a cell which expresses it may be detected without necessarily lysing the cell (e.g. using a labeled antibody which binds specifically with a cell-surface domain of the protein).

[0114] Expression of a marker of the invention may be assessed by any of a wide variety of well known methods for detecting expression of a transcribed molecule or protein. Non-limiting examples of such methods include immunological methods for detection of secreted, cell-surface, cytoplasmic, or nuclear proteins, protein purification methods, protein function or activity assays, nucleic acid hybridization methods, nucleic acid reverse transcription methods, and nucleic acid amplification methods.

[0115] In another preferred embodiment, expression of a marker is assessed using an antibody (e.g. a radio-labeled, chromophore-labeled, fluorophore-labeled, or enzyme-labeled antibody), an antibody derivative (e.g. an antibody conjugated with a substrate or with the protein or ligand of a protein-ligand pair {e.g. biotin-streptavidin}), or an antibody fragment (e.g. a single-chain antibody, an isolated antibody hypervariable domain, etc.) which binds specifically with a protein or protein fragment corresponding to the marker, such as the protein encoded by the open reading frame corresponding to the marker or such a protein which has undergone all or a portion of its normal post-translational modification.

[0116] In another preferred embodiment, expression of a marker is assessed by preparing mRNA/cDNA (i.e. a transcribed polynucleotide) from cells in a patient sample, and by hybridizing the mRNA/cDNA with a reference polynucleotide which is a complement of a polynucleotide comprising the marker, and fragments thereof. cDNA can, optionally, be amplified using any of a variety of polymerase chain reaction methods prior to hybridization with the reference polynucleotide. Expression of one or more markers can likewise be detected using quantitative PCR to assess the level of expression of the marker(s). Alternatively, any of the many known methods of detecting mutations or variants (e.g. single nucleotide polymorphisms, deletions, etc.) of a marker of the invention may be used to detect occurrence of a marker in a patient.

[0117] In a related embodiment, a mixture of transcribed polynucleotides obtained from the sample is contacted with a substrate having fixed thereto a polynucleotide complementary to or homologous with at least a portion (e.g. at least 7, 10, 15, 20, 25, 30, 40, 50, 100, 500, or more nucleotide residues) of a marker of the invention. If polynucleotides complementary to or homologous with a marker of the invention are differentially detectable on the substrate (e.g. detectable using radioactivity, different chromophores or fluorophores), are fixed to different selected positions, then the levels of expression of a plurality of markers can be assessed simultaneously using a single substrate (e.g. a “gene chip” microarray of polynucleotides fixed at selected positions). When a method of assessing marker expression is used which involves hybridization of one nucleic acid with another, it is preferred that the hybridization be performed under stringent hybridization conditions.

[0118] Because the compositions, kits, and methods of the invention rely on detection of a difference in expression levels of one or more markers of the invention, it is preferable that the level of expression of the marker is significantly greater than the minimum detection limit of the method used to assess expression in at least one of normal prostate cells and cancerous prostate cells.

[0119] It is understood that by routine screening of additional patient samples using one or more of the markers of the invention, it will be realized that certain of the markers are over- or underexpressed in cancers of various types, including specific prostate cancers, as well as other cancers such as breast or ovarian cancers. For example, it will be confirmed that some of the markers of the invention are over-expressed in most (i.e. 50% or more) or substantially all (i.e. 80% or more) of prostate cancer. Furthermore, it will be confirmed that certain of the markers of the invention are associated with prostate cancer of various stages.

[0120] It will be appreciated that as a greater number of patient samples are assessed for expression of the markers of the invention and the outcomes of the individual patients from whom the samples were obtained are correlated, it will also be confirmed that altered expression of certain of the markers of the invention are strongly correlated with malignant cancers and that altered expression of other markers of the invention are strongly correlated with benign tumors. The compositions, kits, and methods of the invention are thus useful for characterizing one or more of the stage, grade, histological type, metastatic potential, indolent vs. aggressive phenotype and benign/malignant nature of prostate cancer in patients.

[0121] When the compositions, kits, and methods of the invention are used for characterizing one or more of the stage, grade, histological type, metastatic potential, indolent vs. aggressive phenotype and benign/malignant nature of prostate cancer in a patient, it is preferred that the marker or panel of markers of the invention is selected such that a positive result is obtained in at least about 20%, and preferably at least about 40%, 60%, or 80%, and more preferably in substantially all patients afflicted with a prostate cancer of the corresponding stage, grade, histological type, metastatic potential, indolent vs. aggressive phenotype or benign/malignant nature. Preferably, the marker or panel of markers of the invention is selected such that a positive predictive value (PPV) of greater than about 10% is obtained for the general population.

[0122] When a plurality of markers of the invention are used in the compositions, kits, and methods of the invention, the level of expression of each marker in a patient sample can be compared with the normal level of expression of each of the plurality of markers in non-cancerous samples of the same type, either in a single reaction mixture (i.e. using reagents, such as different fluorescent probes, for each marker or a mixture of similiarly labeled probes to access a plurality of markers that are fixed to a single substrate at different positions) or in individual reaction mixtures corresponding to one or more of the markers. In one embodiment, a significantly enhanced level of expression of more than one of the plurality of markers in the sample, relative to the corresponding normal levels, is an indication that the patient is afflicted with prostate cancer. When a plurality of markers is used, it is preferred that 2, 3, 4, 5, 8, 10, 12, 15, 20, 30, or 50 or more individual markers be used, wherein fewer markers are preferred.

[0123] In order to maximize the sensitivity of the compositions, kits, and methods of the invention (i.e. by interference attributable to cells of non-prostate origin in a patient sample), it is preferable that the marker of the invention used therein be a marker which has a restricted tissue distribution, e.g., normally not expressed in non-prostate tissue.

[0124] Only a small number of markers are known to be associated with prostate cancers (e.g. PSA, PSMA, PAP, PCA3, PCTA-1, PSCA and STEAP). These markers are not, of course, included among the markers of the invention, although they may be used together with one or more markers of the invention in a panel of markers, for example. It is well known that certain types of genes, such as oncogenes, tumor suppressor genes, growth factor-like genes, protease-like genes, and protein kinase-like genes are often involved with development of cancers of various types. Thus, among the markers of the invention, use of those which correspond to proteins which resemble known proteins encoded by known oncogenes and tumor suppressor genes, and those which correspond to proteins which resemble growth factors, proteases, and protein kinases are preferred.

[0125] Known oncogenes and tumor suppressor genes include, for example, abl, abr, akT2NO, apc, bcl2α, bcl2β, bcl3, bcr, brca1, brca2, cbl, ccnd1, cdc42, cdk4, crk-II, csf1r/fms, dbl, dcc, dpc4/smad4, e-cad, e2f1/rbap, egfr/erbb-I, elk1, elk3, eph, erg, ets1, ets2, fer, fgr/src2, fli1/ergb2, fos, fps/fes, fra1, fra2, fyn, hck, hek, her2/erbb-2/neu, her3/erbb-3, her4/erbb-4, hras1, hsT2NO, hstf1, igfbp2, ink4a, ink4b, inT2NO/fgf3, jun, junb, jund, kip2, kit, kras2a, kras2b, lck, lyn, mas, max, mcc, mdm2, met, mlh1, mmp10, mos, msh2, msh3, msh6, myb, myba, mybb, myc, mycl1, mycn, nf1, nf2, nme2, nras, p53, pdgfb, phb, pim1, pms1, pms2, ptc, pten, raf1, rap1a, rb1, rel, ret, ros1, ski, src1, tal1, tgfbr2, tgfb3, tgfbr3, thra1, thrb, tiam1, timp3, tjp1, tp53, trk, vav, vhl, vil2, waf1, wnt1, wnT2NO, wt1, and yes1(Hesketh, 1997, In: The Oncogene and Tumour Suppressor Gene Facts Book, 2nd Ed., Academic Press; Fishel et al., 1994, Science 266:1403-1405).

[0126] Known growth factors include platelet-derived growth factor alpha, platelet-derived growth factor beta (simian sarcoma viral {v-sis} oncogene homolog), thrombopoietin (myeloproliferative leukemia virus oncogene ligand, megakaryocyte growth and development factor), erythropoietin, B cell growth factor, macrophage stimulating factor 1 (hepatocyte growth factor-like protein), hepatocyte growth factor (hepapoietin A), insulin-like growth factor 1 (somatomedia C), hepatoma-derived growth factor, amphiregulin (schwannoma-derived growth factor), bone morphogenetic proteins 1, 2, 3, 3 beta, and 4, bone morphogenetic protein 7 (osteogenic protein 1), bone morphogenetic protein 8 (osteogenic protein 2), connective tissue growth factor, connective tissue activation peptide 3, epidermal growth factor (EGF), teratocarcinoma-derived growth factor 1, endothelin, endothelin 2, endothelin 3, stromal cell-derived factor 1, vascular endothelial growth factor (VEGF), VEGF-B, VEGF-C, placental growth factor (vascular endothelial growth factor-related protein), transforming growth factor alpha, transforming growth factor beta 1 and its precursors, transforming growth factor beta 2 and its precursors, fibroblast growth factor 1 (acidic), fibroblast growth factor 2 (basic), fibroblast growth factor 5 and its precursors, fibroblast growth factor 6 and its precursors, fibroblast growth factor 7 (keratinocyte growth factor), fibroblast growth factor 8 (androgen-induced), fibroblast growth factor 9 (glia-activating factor), pleiotrophin (heparin binding growth factor 8, neurite growth-promoting factor 1), brain-derived neurotrophic factor, and recombinant glial growth factor 2.

[0127] Known proteases include interleukin-1 beta convertase and its precursors, Mch6 and its precursors, Mch2 isoform alpha, Mch4, Cpp32 isoform alpha, Lice2 gamma cysteine protease, Ich-1S, Ich-1L, Ich-2 and its precursors, TY protease, matrix metalloproteinase 1 (interstitial collagenase), matrix metalloproteinase 2 (gelatinase A, 72 kD gelatinase, 72 kD type IV collagenase), matrix metalloproteinase 7 (matrilysin), matrix metalloproteinase 8 (neutrophil collagenase), matrix metalloproteinase 12; (macrophage elastase), matrix metalloproteinase 13 (collagenase 3), metallopeptidase 1, cysteine-rich metalloprotease (disintegrin) and its precursors, subtilisin-like protease Pc8 and its precursors, chymotrypsin, snake venom-like protease, cathepsin 1, cathepsin D (lysosomal aspartyl protease), stromelysin, aminopeptidase N, plasminogen, tissue plasminogen activator, plasminogen activator inhibitor type II, and urokinase-type plasminogen activator.

[0128] Known protein kinases include DAP kinase, serine/threonine protein kinases NIK, PK428, Krs-2, SAK, and EMK, interferon-inducible double stranded RNA dependent protein kinase, FAST kinase, AIM1, IPL1-like midbody-associated protein kinase-1, NIMA-like protein kinase 1 (NLK1), the cyclin-dependent kinases (cdk1-10), checkpoint kinase Chk1, Nek3 protein kinase, BMK1 beta kinase, Clk1, Clk2, Clk3, extracellular signal-regulated kinases 1, 3, and 6, cdc28 protein kinase 1, cdc28 protein kinase 2, pLK, Myt1, c-Jun N-terminal kinase 2, Cam kinase 1, the MAP kinases, insulin-stimulated protein kinase 1, beta-adrenergic receptor kinase 2, ribosomal protein S6 kinase, kinase suppressor of ras-1 (KSR1), putative serine/threonine protein kinase Prk, PkB kinase, cAMP-dependent protein kinase, cGMP-dependent protein kinase, type II cGMP-dependent protein kinase, protein kinases Dyrk2, Dyrk3, and Dyrk4, Rho-associated coiled-coil containing protein kinase p160ROCK, protein tyrosine kinase t-Ror1, Ste20-related kinases, cell adhesion kinase beta, protein kinase 3, stress-activated protein kinase 4, protein kinase Zpk, serine kinase hPAK65, dual specificity mitogen-activated protein kinases 1 and 2, casein kinase I gamma 2, p21-activated protein kinase Pak1, lipid-activated protein kinase PRK2, focal adhesion kinase, dual-specificity tyrosine-phosphorylation regulated kinase, myosin light chain kinase, serine kinases SRPK2, TESK1, and VRK2, B lymphocyte serine/threonine protein kinase, stress-activated protein kinases JNK1 and JNK2, phosphorylase kinase, protein tyrosine kinase Tec, Jak2 kinase, protein kinase Ndr, MEK kinase 3, SHB adaptor protein (a Src homology 2 protein), agammaglobulinaemia protein-tyrosine kinase (Atk), protein kinase ATR, guanylate kinase 1, thrombopoeitin receptor and its precursors, DAG kinase epsilon, and kinases encoded by oncogenes or viral oncogenes such as v-fgr (Gardner-Rasheed), v-abl (Abelson murine leukemia viral oncogene homolog 1), v-arg (Abelson murine leukemia viral oncogene homolog, Abelson-related gene), v-fes and v-fps (feline sarcoma viral oncogene and Fujinami avian sarcoma viral oncogene-homologs), proto-oncogene c-cot, oncogene pim-1, and oncogene mas1.

[0129] It is recognized that the compositions, kits, and methods of the invention will be of particular utility to patients having an enhanced risk of developing prostate cancer and their medical advisors. Patients recognized as having an enhanced risk of developing prostate cancer include, for example, patients having a familial history of prostate cancer, patients identified as having a mutant oncogene (i.e. at least one allele), and patients determined through any other established medical criteria to be at risk for cancer or other malignancy.

[0130] The level of expression of a marker in normal (i.e. non-cancerous) human prostate tissue can be assessed in a variety of ways. In one embodiment, this normal level of expression is assessed by assessing the level of expression of the marker in a portion of prostate cells which appears to be non-cancerous and by comparing this normal level of expression with the level of expression in a portion of the prostate cells which is suspected of being cancerous. For example, the normal level of expression of a marker may be assessed using a non-affected portion of the prostate and this normal level of expression may be compared with the level of expression of the same marker in an affected portion of the prostate. Alternately, and particularly as further information becomes available as a result of routine performance of the methods described herein, population-average values for normal expression of the markers of the invention may be used. In other embodiments, the ‘normal’ level of expression of a marker may be determined by assessing expression of the marker in a patient sample obtained from a non-cancer-afflicted patient, from a patient sample obtained from a patient before the suspected onset of prostate cancer in the patient, from archived patient samples, and the like.

[0131] The invention includes compositions, kits, and methods for assessing the presence of prostate cancer cells in a sample (e.g. an archived tissue sample or a sample obtained from a patient). These compositions, kits, and methods are substantially the same as those described above, except that, where necessary, the compositions, kits, and methods are adapted for use with samples other than patient samples. For example, when the sample to be used is a parafinized, archived human tissue sample, it can be necessary to adjust the ratio of compounds in the compositions of the invention, in the kits of the invention, or the methods used to assess levels of marker expression in the sample. Such methods are well known in the art and within the skill of the ordinary artisan.

[0132] The invention includes a kit for assessing the presence of prostate cancer cells (e.g. in a sample such as a patient sample). The kit comprises a plurality of reagents, each of which is capable of binding specifically with a nucleic acid or polypeptide corresponding to a marker of the invention. Suitable reagents for binding with a polypeptide corresponding to a marker of the invention include antibodies, antibody derivatives, antibody fragments, and the like. Suitable reagents for binding with a nucleic acid (e.g. a genomic DNA, an mRNA, a spliced mRNA, a cDNA, or the like) include complementary nucleic acids. For example, the nucleic acid reagents may include oligonucleotides (labeled or non-labeled) fixed to a substrate, labeled oligonucleotides not bound with a substrate, pairs of PCR primers, molecular beacon probes, and the like.

[0133] The kit of the invention may optionally comprise additional components useful for performing the methods of the invention. By way of example, the kit may comprise fluids (e.g. SSC buffer) suitable for annealing complementary nucleic acids or for binding an antibody with a protein with which it specifically binds, one or more sample compartments, an instructional material which describes performance of a method of the invention, a sample of normal prostate cells, a sample of prostate cancer cells, and the like.

[0134] The invention also includes a method of making an isolated hybridoma which produces an antibody useful for assessing whether a patient is afflicted with prostate cancer. In this method, a protein or protein fragment corresponding to a marker of the invention is isolated (e.g. by purification from a cell in which it is expressed or by transcription and translation of a nucleic acid encoding the protein in vivo or in vitro using known methods). A vertebrate, preferably a mammal such as a mouse, rat, rabbit, or sheep, is immunized using the isolated protein or protein fragment. The vertebrate may optionally (and preferably) be immunized at least one additional time with the isolated protein or protein fragment, so that the vertebrate exhibits a robust immune response to the protein or protein fragment. Splenocytes are isolated from the immunized vertebrate and fused with an immortalized cell line to form hybridomas, using any of a variety of methods well known in the art. Hybridomas formed in this manner are then screened using standard methods to identify one or more hybridomas which produce an antibody which specifically binds with the protein or protein fragment. The invention also includes hybridomas made by this method and antibodies made using such hybridomas.

[0135] The invention also includes a method of assessing the efficacy of a test compound for inhibiting prostate cancer cells. As described above, differences in the level of expression of the markers of the invention correlate with the cancerous state of prostate cells. Although it is recognized that changes in the levels of expression of certain of the markers of the invention likely result from the cancerous state of prostate cells, it is likewise recognized that changes in the levels of expression of other of the markers of the invention induce, maintain, and promote the cancerous state of those cells. Thus, compounds which inhibit prostate cancer in a patient will cause the level of expression of one or more of the markers of the invention to change to a level nearer the normal level of expression for that marker (i.e. the level of expression for the marker in non-cancerous prostate cells).

[0136] This method thus comprises comparing expression of a marker in a first prostate cell sample and maintained in the presence of the test compound and expression of the marker in a second prostate cell sample and maintained in the absence of the test compound. A significant altered level of expression of a marker listed within Tables 1-9 is an indication that the test compound inhibits prostate cancer. The prostate cell samples may, for example, be aliquots of a single sample of normal prostate cells obtained from a patient, pooled samples of normal prostate cells obtained from a patient, cells of a normal prostate cell line, aliquots of a single sample of prostate cancer cells obtained from a patient, pooled samples of prostate cancer cells obtained from a patient, cells of a prostate cancer cell line, or the like. In one embodiment, the samples are prostate cancer cells obtained from a patient and a plurality of compounds known to be effective for inhibiting various prostate cancers are tested in order to identify the compound which is likely to best inhibit the prostate cancer in the patient.

[0137] This method may likewise be used to assess the efficacy of a therapy for inhibiting prostate cancer in a patient. In this method, the level of expression of one or more markers of the invention in a pair of samples (one subjected to the therapy, the other not subjected to the therapy) is assessed. As with the method of assessing the efficacy of test compounds, if the therapy induces a significant alteration in the level of expression of a marker listed within Tables 1-9 then the therapy is efficacious for inhibiting prostate cancer. As above, if samples from a selected patient are used in this method, then alternative therapies can be assessed in vitro in order to select a therapy most likely to be efficacious for inhibiting prostate cancer in the patient.

[0138] As described herein, prostate cancer in patients is associated with an altered level of expression of one or more markers listed within Tables 1-9. While, as discussed above, some of these changes in expression level result from occurrence of the prostate cancer, others of these changes induce, maintain, and promote the cancerous state of prostate cancer cells. Thus, prostate cancer characterized by an altered the level of expression of one or more markers listed within Tables 1-9 can be controlled or suppressed by altering expression of those markers.

[0139] Expression of a marker listed within Tables 1-9 can be inhibited in a number of ways generally known in the art. For example, an antisense oligonucleotide can be provided to the prostate cancer cells in order to inhibit transcription, translation, or both, of the marker(s). Alternately, a polynucleotide encoding an antibody, an antibody derivative, or an antibody fragment, and operably linked with an appropriate promoter/regulator region, can be provided to the cell in order to generate intracellular antibodies which will inhibit the function or activity of the protein corresponding to the marker(s). Using the methods described herein, a variety of molecules, particularly including molecules sufficiently small that they are able to cross the cell membrane, can be screened in order to identify molecules which inhibit expression of the marker(s). The compound so identified can be provided to the patient in order to inhibit expression of the marker(s) in the prostate cancer cells of the patient.

[0140] Expression of a marker listed in within Tables 1-9 can be enhanced in a number of ways generally known in the art. For example, a polynucleotide encoding the marker and operably linked with an appropriate promoter/regulator region can be provided to prostate cancer cells of the patient in order to induce enhanced expression of the protein (and mRNA) corresponding to the marker therein. Alternatively, if the protein is capable of crossing the cell membrane, inserting itself in the cell membrane, or is normally a secreted protein, then expression.of~the protein can be enhanced by providing the protein (e.g. directly or by way of the bloodstream or another prostate-associated fluid) to prostate cancer cells in the patient.

[0141] As described above, the cancerous state of human prostate cells is correlated with changes in the levels of expression of the markers of the invention. Thus, compounds which alter expression of one or more of the markers listed in within Tables 1-9 can induce prostate cell carcinogenesis. The invention thus includes a method for assessing the human prostate cell carcinogenic potential of a test compound. This method comprises maintaining separate aliquots of human prostate cells in the presence and absence of the test compound. Expression of a marker of the invention in each of the aliquots is compared. A significant alteration in the level of expression of a marker listed within Tables 1-9 in the aliquot maintained in the presence of the test compound (relative to the aliquot maintained in the absence of the test compound) is an indication that the test compound possesses human prostate cell carcinogenic potential. The relative carcinogenic potentials of various test compounds can be assessed by comparing the degree of enhancement or inhibition of the level of expression of the relevant markers, by comparing the number of markers for which the level of expression is enhanced or inhibited, or by comparing both.

[0142] Various aspects of the invention are described in further detail in the following subsections.

[0143] I. Isolated Nucleic Acid Molecules

[0144] One aspect of the invention pertains to novel isolated nucleic acid molecules that correspond to a marker of the invention, including nucleic acids which encode a polypeptide corresponding to a marker of the invention or a portion of such a polypeptide. Isolated nucleic acids of the invention also include nucleic acid molecules sufficient for use as hybridization probes to identify nucleic acid molecules that correspond to a marker of the invention, including nucleic acids which encode a polypeptide corresponding to a marker of the invention, and fragments of such nucleic acid molecules, e.g., those suitable for use as PCR primers for the amplification or mutation of nucleic acid molecules. As used herein, the term “nucleic acid molecule” is intended to include DNA molecules (e.g., cDNA or genomic DNA) and RNA molecules (e.g., mRNA) and analogs of the DNA or, RNA generated using nucleotide analogs. The nucleic acid molecule can be single-stranded or double-stranded, but preferably is double-stranded DNA.

[0145] An “isolated” nucleic acid molecule is one which is separated from other nucleic acid molecules which are present in the natural source of the nucleic acid molecule. Preferably, an “isolated” nucleic acid molecule is free of sequences (preferably protein-encoding sequences) which naturally flank the nucleic acid (i.e., sequences located at the 5′ and 3′ ends of the nucleic acid) in the genomic DNA of the organism from which the nucleic acid is derived. For example, in various embodiments, the isolated nucleic acid molecule can contain less than about 5 kB, 4 kB, 3 kB, 2 kB, 1 kB, 0.5 kB or 0.1 kB of nucleotide sequences which naturally flank the nucleic acid molecule in genomic DNA of the cell from which the nucleic acid is derived. Moreover, an “isolated” nucleic acid molecule, such as a cDNA molecule, can be substantially free of other cellular material, or culture medium when produced by recombinant techniques, or substantially free of chemical precursors or other chemicals when chemically synthesized.

[0146] A nucleic acid molecule of the present invention, e.g., a nucleic acid encoding a protein corresponding to a marker listed in one or more of Tables 1-9, can be isolated using standard molecular biology techniques and the sequence information in the database records described herein. Using all or a portion of such nucleic acid sequences, nucleic acid molecules of the invention can be isolated using standard hybridization and cloning techniques (e.g., as described in Sambrook et al., ed., Molecular Cloning: A Laboratory Manual, 2nd ed., Cold Spring Harbor Laboratory Press, Cold Spring Harbor, N.Y., 1989).

[0147] A process for identifying a larger fragment or the full-length coding sequence of a marker of the present invention is thus also provided. Any conventional recombinant DNA techniques applicable for isolating polynucleotides may be employed. One such method involves the 5′-RACE-PCR technique, in which the poly-A mRNA that contains the coding sequence of particular interest is first reverse transcribed with a 3 ′-primer comprising a sequence disclosed herein. The newly synthesized cDNA strand is then tagged with an anchor primer with a known sequence, which preferably contains a convenient cloning restriction site attached at the 5′end. The tagged cDNA is then amplified with the 3′-primer (or a nested primer sharing sequence homology to the internal sequences of the coding region) and the 5′-anchor primer. The amplification may be conducted under conditions of various levels of stringency to optimize the amplification specificity. 5′-RACE-PCR can be readily performed using commercial kits (available from, e.g., BRL Life Technologies Inc., Clotech) according to the manufacturer's instructions.

[0148] Isolating the complete coding sequence of a gene can also be carried out in a hybridization assay using a suitable probe. The probe preferably comprises at least 10 nucleotides, and more preferably exhibits sequence homology to the polynucleotides of the markers of the present invention. Other high throughput screens for cDNAs, such as those involving gene chip technology, can also be employed in obtaining the complete cDNA sequence.

[0149] In addition, databases exist that reduce the complexity of ESTs by assembling contiguous EST sequences into tentative genes. For example, TIGR has assembled human ESTs into a database called THC for tentative human consensus sequences. The THC database allows for a more definitive assignment compared to ESTs alone. Software programs exist (TIGR assembler and TIGEM EST assembly machine and contig assembly program (see Huang, X., 1996, Genomes 33:21-23)) that allow for assembling ESTs into contiguous sequences from any organism.

[0150] Alternatively, mRNA from a sample preparation is used to construct cDNA library in the ZAP Express vector following the procedure described in Velculescu et al., 1997, Science 270:484. The ZAP Express cDNA synthesis kit (Stratagene) is used accordingly to the manufacturer's protocol. Plates containing 250 to 2000 plaques are hybridized as described in Rupert et al., 1988, Mol. Cell. Bio. 8:3104 to oligonucleotide probes with the same conditions previously described for standard probes except that the hybridization temperature is reduced to a room temperature. Washes are performed in 6× standard-saline-citrate 0.1% SDS for 30 minutes at room temperature. The probes are labeled with ³²P-ATP trough use of T4 polynucleotide kinase.

[0151] A partial cDNA (3′ fragment) can be isolated by 3′ directed PCR reaction. This procedure is a modification of the protocol described in Polyak et al., 1997, Nature 389:300. Briefly, the procedure uses SAGE tags in PCR reaction such that the resultant PCR product contains the SAGE tag of interest as well as additional cDNA, the length of which is defined by the position of the tag with respect to the 3′ end of the cDNA. The cDNA product derived from such a transcript driven PCR reaction can be used for many applications.

[0152] RNA from a source to express the cDNA corresponding to a given tag is first converted to double-stranded cDNA using any standard cDNA protocol. Similar conditions used to generate cDNA for SAGE library construction can be employed except that a modified oligo-dT primer is used to derive the first strand synthesis. For example, the oligonucleotide of composition 5′-B-TCC GGC GCG CCG TTT TCC CAG TCA CGA(30)-3′, contains a poly-T stretch at the 3′ end for hybridization and priming from poly-A tails, an M13 priming site for use in subsequent PCR steps, a 5′ Biotin label (B) for capture to strepavidin-coated magnetic beads, and an AscI restriction endonuclease site for releasing the cDNA from the strepavidin-coated magnetic beads. Theoretically, any sufficiently-sized DNA region capable of hybridizing to a PCR primer can be used as well as any other 8 base pair recognizing endonuclease.

[0153] cDNA constructed utilizing this or similar modified oligo-dT primer is then processed as described in U.S. Pat. No. 5,695,937 up until adapter ligation where only one adapter is ligated to the cDNA pool. After adapter ligation, the cDNA is released from the streptavidin-coated magnetic beads and is then used as a template for cDNA amplification.

[0154] Various PCR protocols can be employed using PCR priming sites within the 3′ modified oligo-dT primer and the SAGE tag. The SAGE tag-derived PCR primer employed can be of varying length dictated by 5′ extension of the tag into the adaptor sequence. cDNA products are now available for a variety of applications.

[0155] This technique can be further modified by: (1) altering the length and/or content of the modified oligo-dT primer; (2) ligating adaptors other than that previously employed within the SAGE protocol; (3) performing PCR from template retained on the streptavidin-coated magnetic beads; and (4) priming first strand cDNA synthesis with non-oligo-dT based primers.

[0156] Gene trapper technology can also be used. The reagents and manufacturer's instructions for this technology are commercially available from Life Technologies, Inc., Gaithsburg, Md. Briefly, a complex population of single-stranded phagemid DNA containing directional cDNA inserts is enriched for the target sequence by hybridization in solution to a biotinylated oligonucleotide probe complementary to the target sequence. The hybrids are captured on streptavidin-coated paramagnetic beads. A magnet retrieves the paramagnetic beads from the solution, leaving nonhybridized single-stranded DNAs behind. Subsequently, the captured single-stranded DNA target is released from the biotinylated oligonucleotide. After release, the cDNA clone is further enriched by using a nonbiotinylated target oligonucleotide to specifically prime conversion of the single-stranded DNA. Following transformation and plating, typically 20% to 100% of the colonies represent the cDNA clone of interest. To identify the desired cDNA clone, the colonies may be screened by colony hybridization using the ³²P-labeled oligonucleotide, or alternatively by DNA sequencing and alignment of all sequences obtained from numerous clones to determine a consensus sequence.

[0157] A nucleic acid molecule of the invention can be amplified using cDNA, mRNA, or genomic DNA as a template and appropriate oligonucleotide primers according to standard PCR amplification techniques. The nucleic acid so amplified can be cloned into an appropriate vector and characterized by DNA sequence analysis. Furthermore, oligonucleotides corresponding to all or a portion of a nucleic acid molecule of the invention can be prepared by standard synthetic techniques, e.g., using an automated DNA synthesizer.

[0158] In another preferred embodiment, an isolated nucleic acid molecule of the invention comprises a nucleic acid molecule which has a nucleotide sequence complementary to the nucleotide sequence of a nucleic acid corresponding to a marker of the invention or to the nucleotide sequence of a nucleic acid encoding a protein which corresponds to a marker of the invention. A nucleic acid molecule which is complementary to a given nucleotide sequence is one which is sufficiently complementary to the given nucleotide sequence that it can hybridize to the given nucleotide sequence thereby forming a stable duplex.

[0159] Moreover, a nucleic acid molecule of the invention can comprise only a portion of a nucleic acid sequence, wherein the full length nucleic acid sequence comprises a marker of the invention or which encodes a polypeptide corresponding to a marker of the invention. Such nucleic acids can be used, for example, as a probe or primer. The probe/primer typically is used as one or more substantially purified oligonucleotides. The oligonucleotide typically comprises a region of nucleotide sequence that hybridizes under stringent conditions to at least about 7, preferably about 15, more preferably about 25, 50, 75, 100, 125, 150, 175, 200, 250, 300, 350, or 400 or more consecutive nucleotides of a nucleic acid of the invention.

[0160] Probes based on the sequence of a nucleic acid molecule of the invention can be used to detect transcripts or genomic sequences corresponding to one or more markers of the invention. The probe comprises a label group attached thereto, e.g., a radioisotope, a fluorescent compound, an enzyme, or an enzyme co-factor. Such probes can be used as part of a diagnostic test kit for identifying cells or tissues which mis-express the protein, such as by measuring levels of a nucleic acid molecule encoding the protein in a sample of cells from a subject, e.g., detecting mRNA levels or determining whether a gene encoding the protein has been mutated or deleted.

[0161] The invention further encompasses nucleic acid molecules that differ, due to degeneracy of the genetic code, from the nucleotide sequence of nucleic acids encoding a protein which corresponds to a marker of the invention, and thus encode the same protein.

[0162] In addition to the nucleotide sequences in Tables 1-9, it will be appreciated by those skilled in the art that DNA sequence polymorphisms that lead to changes in the amino acid sequence can exist within a population (e.g., the human population). Such genetic polymorphisms can exist among individuals within a population due to natural allelic variation. An allele is one of a group of genes which.occur alternatively at a given genetic locus. In addition, it will be appreciated that DNA polymorphisms that affect RNA expression levels can also exist that may affect the overall expression level of that gene (e.g., by affecting regulation or degradation).

[0163] As used herein, the phrase “allelic variant” refers to a nucleotide sequence which occurs at a given locus or to a polypeptide encoded by the nucleotide sequence.

[0164] As used herein, the terms “gene” and “recombinant gene” refer to nucleic acid molecules comprising an open reading frame encoding a polypeptide corresponding to a marker of the invention. Such natural allelic variations can typically result in 1-5% variance in the nucleotide sequence of a given gene. Alternative alleles can be identified by sequencing the gene of interest in a number of different individuals. This can be readily carried out by using hybridization probes to identify the same genetic locus in a variety of individuals. Any and all such nucleotide variations and resulting amino acid polymorphisms or variations that are the result of natural allelic variation and that do not alter the functional activity are intended to be within the scope of the invention.

[0165] In another embodiment, an isolated nucleic acid molecule of the invention is at least 7, 15, 20, 25, 30, 40, 60, 80, 100, 150, 200, 250, 300, 350, 400, 450, 550, 650, 700, 800, 900, 1000, 1200, 1400, 1600, 1800, 2000, 2200, 2400, 2600, 2800, 3000, 3500, 4000, 4500, or more nucleotides in length and hybridizes under stringent conditions to a nucleic acid corresponding to a marker of the invention or to a nucleic acid encoding a protein corresponding to a marker of the invention. As used herein, the term “hybridizes under stringent conditions” is intended to describe conditions for hybridization and washing under which nucleotide sequences at least 75% (80%, 85%, preferably 90%) identical to each other typically remain hybridized to each other. Such stringent conditions are known to those skilled in the art and can be found in sections 6.3.1-6.3.6 of Current Protocols in Molecular Biology, John Wiley & Sons, N.Y. (1989). A preferred, non-limiting example of stringent hybridization conditions for annealing two single-stranded DNA each of which is at least about 100 bases in length and/or for annealing a single-stranded DNA and a single-stranded RNA each of which is at least about 100 bases in length, are hybridization in 6× sodium chloride/sodium citrate (SSC) at about 45° C., followed by one or more washes in 0.2×SSC, 0.1% SDS at 50-65° C. Further preferred hybridization conditions are taught in Lockhart, et al., Nature Biotechnology, Volume 14, 1996 August: 1675-1680; Breslauer, et al., Proc. Natl. Acad. Sci. USA, Volume 83, 1986 June: 3746-3750; Van Ness, et al., Nucleic Acids Research, Volume 19, No. 19, 1991 September: 5143-5151; McGraw, et al., BioTechniques, Volume 8, No. 6 1990: 674-678; and Milner, et al., Nature Biotechnology, Volume 15, 1997 June: 537-541, all expressly incorporated by reference.

[0166] In addition to naturally-occurring allelic variants of a nucleic acid molecule of the invention that can exist in the population, the skilled artisan will further appreciate that sequence changes can be introduced by mutation thereby leading to changes in the amino acid sequence of the encoded protein, without altering the biological activity of the protein encoded thereby. For example, one can make nucleotide substitutions leading to amino acid substitutions at “non-essential” amino acid residues. A “non-essential” amino acid residue is a residue that can be altered from the wild-type sequence without altering the biological activity, whereas an “essential” amino acid residue is required for biological activity. For example, amino acid residues that are not conserved or only semi-conserved among homologs of various species may be non-essential for activity and thus would be likely targets for alteration. Alternatively, amino acid residues that are conserved among the homologs of various species (e.g., murine and human) may be essential for activity and thus would not be likely targets for alteration.

[0167] Accordingly, another aspect of the invention pertains to nucleic acid molecules encoding a polypeptide of the invention that contain changes in amino acid residues that are not essential for activity. Such polypeptides differ in amino acid sequence from the naturally-occurring proteins which correspond to the markers of the invention, yet retain biological activity. In one embodiment, such a protein has an amino acid sequence that is at least about 40% identical, 50%, 60%, 70%, 80%, 90%, 95%, or 98% identical to the amino acid sequence of one of the proteins which correspond to the markers of the invention.

[0168] An isolated nucleic acid molecule encoding a variant protein can be created by introducing one or more nucleotide substitutions, additions or deletions into the nucleotide sequence of nucleic acids of the invention, such that one or more amino acid residue substitutions, additions, or deletions are introduced into the encoded protein. Mutations can be introduced by standard techniques, such as site-directed mutagenesis and PCR-mediated mutagenesis. Preferably, conservative amino acid substitutions are made at one or more predicted non-essential amino acid residues. A “conservative amino acid substitution” is one in which the amino acid residue is replaced with an amino acid residue having a similar side chain. Families of amino acid residues having similar side chains have been defined in the art. These families include amino acids with basic side chains (e.g., lysine, arginine, histidine), acidic side chains (e.g., aspartic acid, glutamic acid), uncharged polar side chains (e.g., glycine, asparagine, glutamine, serine, threonine, tyrosine, cysteine), non-polar side chains (e.g., alanine, valine, leucine, isoleucine, proline, phenylalanine, methionine, tryptophan), beta-branched side chains (e.g., threonine, valine, isoleucine) and aromatic side chains (e.g., tyrosine, phenylalanine, tryptophan, histidine).i Alternatively, mutations can be introduced randomly along all or part of the coding sequence, such as by saturation mutagenesis, and the resultant mutants can be screened for biological activity to identify mutants that retain activity. Following mutagenesis, the encoded protein can be expressed recombinantly and the activity of the protein can be determined.

[0169] The present invention encompasses antisense nucleic acid molecules, i.e., molecules which are complementary to a sense nucleic acid of the invention, e.g., complementary to the coding strand of a double-stranded cDNA molecule corresponding to a marker of the invention or complementary to an mRNA sequence corresponding to a marker of the invention. Accordingly, an antisense nucleic acid of the invention can hydrogen bond to (i.e. anneal with) a sense nucleic acid of the invention. The antisense nucleic acid can be complementary to an entire coding strand, or to only a portion thereof, e.g., all or part of the protein coding region (or open reading frame). An antisense nucleic acid molecule can also be antisense to all or part of a non-coding region of the coding strand of a nucleotide sequence encoding a polypeptide of the invention. The non-coding regions (“5′ and 3′ untranslated regions”) are the 5′ and 3′ sequences which flank the coding region and are not translated into amino acids.

[0170] An antisense oligonucleotide can be, for example, about 5, 10, 15, 20, 25, 30, 35, 40, 45, or 50 or more nucleotides in length. An antisense nucleic acid of the invention can be constructed using chemical synthesis and enzymatic ligation reactions using procedures known in the art. For example, an antisense nucleic acid (e.g., an antisense oligonucleotide) can be chemically synthesized using naturally occurring nucleotides or variously modified nucleotides designed to increase the biological stability of the molecules or to increase the physical stability of the duplex formed between the antisense and sense nucleic acids, e.g., phosphorothioate derivatives and acridine substituted nucleotides can be used. Examples of modified nucleotides which can be used to generate the antisense nucleic acid include 5-fluorouracil, 5-bromouracil, 5-chlorouracil, 5-iodouracil, hypoxanthine, xanthine, 4-acetylcytosine, 5-(carboxyhydroxylmethyl) uracil, 5-carboxymethylaminomethyl-2-thiouridine, 5-carboxymethylaminomethyluracil, dihydrouracil, beta-D-galactosylqueosine, inosine, N6-isopentenyladenine, 1-methylguanine, 1-methylinosine, 2,2-dimethylguanine, 2-methyladenine, 2-methylguanine, 3-methylcytosine, 5-methylcytosine, N6-adenine, 7-methylguanine, 5-methylaminomethyluracil, 5-methoxyaminomethyl-2-thiouracil, beta-D-mannosylqueosine, 5′-methoxycarboxymethyluracil, 5-methoxyuracil, 2-methylthio-N6-isopentenyladenine, uracil-5-oxyacetic acid (v), wybutoxosine, pseudouracil, queosine, 2-thiocytosine, 5-methyl-2-thiouracil, 2-thiouracil, 4-thiouracil, 5-methyluracil, uracil-5-oxyacetic acid methylester, uracil-5-oxyacetic acid (v), 5-methyl-2-thiouracil, 3-(3-amino-3-N-2-carboxypropyl) uracil, (acp3)w, and 2,6-diaminopurine. Alternatively, the antisense nucleic acid can be produced biologically using an expression vector into which a nucleic acid has been sub-cloned in an antisense orientation (i.e., RNA transcribed from the inserted nucleic acid will be of an antisense orientation to a target nucleic acid of interest, described further in the following subsection).

[0171] The antisense nucleic acid molecules of the invention are typically administered to a subject or generated in situ such that they hybridize with or bind to cellular mRNA and/or genomic DNA encoding a polypeptide corresponding to a selected marker of the invention to thereby inhibit expression of the marker, e.g., by inhibiting transcription and/or translation. The hybridization can be by conventional nucleotide complementarity to form a stable duplex, or, for example, in the case of an antisense nucleic acid molecule which binds to DNA duplexes, through specific interactions in the major groove of the double helix. Examples of a route of administration of antisense nucleic acid molecules of the invention includes direct injection at a tissue site or infusion of the antisense nucleic acid into a prostate-associated body fluid. Alternatively, antisense nucleic acid molecules can be modified to target selected cells and then administered systemically. For example, for systemic administration, antisense molecules can be modified such that they specifically bind to receptors or antigens expressed on a selected cell surface, e.g., by linking the antisense nucleic acid molecules to peptides or antibodies which bind to cell surface receptors or antigens. The antisense nucleic acid molecules can also be delivered to cells using the vectors described herein. To achieve sufficient intracellular concentrations of the antisense molecules, vector constructs in which the antisense nucleic acid molecule is placed under the control of a strong pol II or pol III promoter are preferred.

[0172] An antisense nucleic acid molecule of the invention can be an α-anomeric nucleic acid molecule. An α-anomeric nucleic acid molecule forms specific double-stranded hybrids with complementary RNA in which, contrary to the usual α-units, the strands run parallel to each other (Gaultier et al., 1987, Nucleic Acids Res. 15:6625-6641). The antisense nucleic acid molecule can also comprise a 2′-o-methylribonucleotide (Inoue et al., 1987, Nucleic Acids Res. 15:6131-6148) or a chimeric RNA-DNA analogue (Inoue et al., 1987, FEBS Lett. 215:327-330).

[0173] The invention also encompasses ribozymes. Ribozymes are catalytic RNA molecules with ribonuclease activity which are capable of cleaving a single-stranded nucleic acid, such as an mRNA, to which they have a complementary region. Thus, ribozymes (e.g., hammerhead ribozymes as described in Haselhoff and Gerlach, 1988, Nature 334:585-591) can be used to catalytically cleave mRNA transcripts to thereby inhibit translation of the protein encoded by the mRNA. A ribozyme having specificity for a nucleic acid molecule encoding a polypeptide corresponding to a marker of the invention can be designed based upon the nucleotide sequence of a cDNA corresponding to the marker. For example, a derivative of a Tetrahymena L-19 IVS RNA can be constructed in which the nucleotide sequence of the active site is complementary to the nucleotide sequence to be cleaved (see Cech et al. U.S. Pat. No. 4,987,071; and Cech et al. U.S. Pat. No. 5,116,742). Alternatively, an mRNA encoding a polypeptide of the invention can be used to select a catalytic RNA having a specific ribonuclease activity from a pool of RNA molecules (see, e.g., Bartel and Szostak, 1993, Science 261:1411-1418).

[0174] The invention also encompasses nucleic acid molecules which form triple helical structures. For example, expression of a polypeptide of the invention can be inhibited by targeting nucleotide sequences complementary to the regulatory region of the gene encoding the polypeptide (e.g., the promoter and/or enhancer) to form triple helical structures that prevent transcription of the gene in target cells. See generally Helene (1991) Anticancer Drug Des. 6(6):569-84; Helene (1992) Ann. N.Y. Acad. Sci. 660:27-36; and Maher (1992) Bioassays 14(12):807-15.

[0175] In various embodiments, the nucleic acid molecules of the invention can be modified at the base moiety, sugar moiety or phosphate backbone to improve, e.g., the stability, hybridization, or solubility of the molecule. For example, the deoxyribose phosphate backbone of the nucleic acids can be modified to generate peptide nucleic acids (see Hyrup et al., 1996, Bioorganic & Medicinal Chemistry 4(1): 5-23). As used herein, the terms “peptide nucleic acids” or “PNAs” refer to nucleic acid mimics, e.g., DNA mimics, in which the deoxyribose phosphate backbone is replaced by a pseudopeptide backbone and only the four natural nucleobases are retained. The neutral backbone of PNAs has been shown to allow for specific hybridization to DNA and RNA under conditions of low ionic strength. The synthesis of PNA oligomers can be performed using standard solid phase peptide synthesis protocols as described in Hyrup et al. (1996), supra; Perry-O'Keefe et al. (1996) Proc. Natl. Acad. Sci. USA 93:14670-675.

[0176] PNAs can be used in therapeutic and diagnostic applications. For example, PNAs can be used as antisense or antigene agents for sequence-specific modulation of gene expression by, e.g., inducing transcription or translation arrest or inhibiting replication. PNAs can also be used, e.g., in the analysis of single base pair mutations in a gene by, e.g., PNA directed PCR clamping; as artificial restriction enzymes when used in combination with other enzymes, e.g., S1 nucleases (Hyrup (1996), supra; or as probes or primers for DNA sequence and hybridization (Hyrup, 1996, supra; Perry-O'Keefe et al., 1996, Proc. Natl. Acad. Sci. USA 93:14670-675).

[0177] In another embodiment, PNAs can be modified, e.g., to enhance their stability or cellular uptake, by attaching lipophilic or other helper groups to PNA, by the formation of PNA-DNA chimeras, or by the use of liposomes or other techniques of drug delivery known in the art. For example, PNA-DNA chimeras can be generated which can combine the advantageous properties of PNA and DNA. Such chimeras allow DNA recognition enzymes, e.g., RNASE H and DNA polymerases, to interact with the DNA portion while the PNA portion would provide high binding affinity and specificity. PNA-DNA chimeras can be linked using linkers of appropriate lengths selected in terms of base stacking, number of bonds between the nucleobases, and orientation (Hyrup, 1996, supra). The synthesis of PNA-DNA chimeras can be performed as described in Hyrup (1996), supra, and Finn et al. (1996) Nucleic Acids Res. 24(17):3357-63. For example, a DNA chain can be synthesized on a solid support using standard phosphoramidite coupling chemistry and modified nucleoside analogs. Compounds such as 5′-(4-methoxytrityl)amino-5′-deoxy-thymidine phosphoramidite can be used as a link between the PNA and the 5′ end of DNA (Mag et al., 1989, Nucleic Acids Res. 17:5973-88). PNA monomers are then coupled in a step-wise manner to produce a chimeric molecule with a 5′ PNA segment and a 3′ DNA segment (Finn et al., 1996, Nucleic Acids Res. 24(17):3357-63). Alternatively, chimeric molecules can be synthesized with a 5′ DNA segment and a 3′ PNA segment (Peterser et al., 1975, Bioorganic Med. Chem. Lett. 5:1119-11124).

[0178] In other embodiments, the oligonucleotide can include other appended groups such as peptides (e.g., for targeting host cell receptors in vivo), or agents facilitating transport across the cell membrane (see, e.g., Letsinger et al., 1989, Proc. Natl. Acad. Sci. USA 86:6553-6556; Lemaitre et al., 1987, Proc. Natl. Acad. Sci. USA 84:648-652; PCT Publication No. WO 88/09810) or the blood-brain barrier (see, e.g., PCT Publication No. WO 89/10134). In addition, oligonucleotides can be modified with hybridization-triggered cleavage agents (see, e.g., Krol et al., 1988, Bio/Techniques 6:958-976) or intercalating agents (see, e.g., Zon, 1988, Pharm. Res. 5:539-549). To this end, the oligonucleotide can be conjugated to another molecule, e.g., a peptide, hybridization triggered cross-linking agent, transport agent, hybridization-triggered cleavage agent, etc.

[0179] The invention also includes molecular beacon nucleic acids having at least one region which is complementary to a nucleic acid of the invention, such that the molecular beacon is useful for quantitating the presence of the nucleic acid of the invention in a sample. A “molecular beacon” nucleic acid is a nucleic acid comprising a pair of complementary regions and having a fluorophore and a fluorescent quencher associated therewith. The fluorophore and quencher are associated with different portions of the nucleic acid in such an orientation that when the complementary regions are annealed with one another, fluorescence of the fluorophore is quenched by the quencher. When the complementary regions of the nucleic acid are not annealed with one another, fluorescence of the fluorophore is quenched to a lesser degree. Molecular beacon nucleic acids are described, for example, in U.S. Pat. No. 5,876,930.

[0180] II. Isolated Proteins and Antibodies

[0181] One aspect of the invention pertains to novel isolated proteins which correspond to individual markers of the invention, and biologically active portions thereof, as well as polypeptide fragments suitable for use as immunogens to raise antibodies directed against a polypeptide corresponding to a marker of the invention. In one embodiment, the native polypeptide corresponding to a marker can be isolated from cells or tissue sources by an appropriate purification scheme using standard protein purification techniques. In another embodiment, polypeptides corresponding to a marker of the invention are produced by recombinant DNA techniques. Alternative to recombinant expression, a polypeptide corresponding to a marker of the invention can be synthesized chemically using standard peptide synthesis techniques.

[0182] An “isolated” or “purified” protein or biologically active portion thereof is substantially free of cellular material or other contaminating proteins from the cell or tissue source from which the protein is derived, or substantially free of chemical precursors or other chemicals when chemically synthesized. The language “substantially free of cellular material” includes preparations of protein in which the protein is separated from cellular components of the cells from which it is isolated or recombinantly produced. Thus, protein that is substantially free of cellular material includes preparations of protein having less than about 30%, 20%, 10%, or 5% (by dry weight) of heterologous protein (also referred to herein as a “contaminating protein”). When the protein or biologically active portion thereof is recombinantly produced, it is also preferably substantially free of culture medium, i.e., culture medium represents less than about 20%, 10%, or 5% of the volume of the protein preparation. When the protein is produced by chemical synthesis, it is preferably substantially free of chemical precursors or other chemicals, i.e., it is separated from chemical precursors or other chemicals which are involved in the synthesis of the protein. Accordingly such preparations of the protein have less than about 30%, 20%, 10%, 5% (by dry weight) of chemical precursors or compounds other than the polypeptide of interest.

[0183] Biologically active portions of a polypeptide corresponding to a marker of the invention include polypeptides comprising amino acid sequences sufficiently identical to or derived from the amino acid sequence of the protein corresponding to the marker which include fewer amino acids than the full length protein, and exhibit at least one activity of the corresponding full-length protein. Typically, biologically active portions comprise a domain or motif with at least one activity of the corresponding protein. A biologically active portion of a protein of the invention can be a polypeptide which is, for example, 10, 25, 50, 100 or more amino acids in length. Moreover, other biologically active portions, in which other regions of the protein are deleted, can be prepared by recombinant techniques and evaluated for one or more of the functional activities of the native form of a polypeptide of the invention.

[0184] Preferred polypeptides are encoded by the nucleotide sequences of Tables 1-9. Other useful proteins are substantially identical (e.g., at least about 40%, preferably, 50%, 60%, 70%, 80%, 90%, 95%, or 99%) to one of these sequences and retain the functional activity of the protein of the corresponding naturally-occurring protein yet differ in amino acid sequence due to natural allelic variation or mutagenesis.

[0185] To determine the percent identity of two amino acid sequences or of two nucleic acids, the sequences are aligned for optimal comparison purposes (e.g., gaps can be introduced in the sequence of a first amino acid or nucleic acid sequence for optimal alignment with a second amino or nucleic acid sequence). The amino acid residues or nucleotides at corresponding amino acid positions or nucleotide positions are then compared. When a position in the first sequence is occupied by the same amino acid residue or nucleotide as the corresponding position in the second sequence, then the molecules are identical at that position. The percent identity between the two sequences is a function of the number of identical positions shared by the sequences (i.e., % identity=# of identical positions/total # of positions (e.g., overlapping positions)×100). In one embodiment the two sequences are the same length.

[0186] The determination of percent identity between two sequences can be accomplished using a mathematical algorithm. A preferred, non-limiting example of a mathematical algorithm utilized for the comparison of two sequences is the algorithm of Karlin and Altschul (1990) Proc. Natl. Acad. Sci. USA 87:2264-2268, modified as in Karlin and Altschul (1993) Proc. Natl. Acad. Sci. USA 90:5873-5877. Such an algorithm is incorporated into the NBLAST and XBLAST programs of Altschul, et al. (1990) J. Mol. Biol. 215:403-410. BLAST nucleotide searches can be performed with the NBLAST program, score=100, wordlength=12 to obtain nucleotide sequences homologous to a nucleic acid molecules of the invention. BLAST protein searches can be performed with the XBLAST program, score=50, wordlength=3 to obtain amino acid sequences homologous to a protein molecules of the invention. To obtain gapped alignments for comparison purposes, Gapped BLAST can be utilized as described in Altschul et al (1997) Nucleic Acids Res. 25:3389-3402. Alternatively, PSI-Blast can be used to perform an iterated search which detects distant relationships between molecules. When utilizing BLAST, Gapped BLAST, and PSI-Blast programs, the default parameters of the respective programs (e.g., XBLAST and NBLAST) can be used. See http://www.ncbi.nlm.nih.gov. Another preferred, non-limiting example of a mathematical algorithm utilized for the comparison of sequences is the algorithm of, Myers and Miller, (1988) CABIOS 4:11-17. Such an algorithm is incorporated into the is ALIGN program (version 2.0) which is part of the GCG sequence alignment software package. When utilizing the ALIGN program for comparing amino acid sequences, a PAM120 weight residue table, a gap length penalty of 12, and a gap penalty of 4 can be used. Yet another useful algorithm for identifying regions of local sequence similarity and alignment is the FASTA algorithm as described in Pearson and Lipman (1988) Proc. Natl. Acad. Sci. USA 85:2444-2448. When using the FASTA algorithm for comparing nucleotide or amino acid sequences, a PAM120 weight residue table can, for example, be used with a k-tuple value of 2.

[0187] The percent identity between two sequences can be determined using techniques similar to those described above, with or without allowing gaps. In calculating percent identity, only exact matches are counted.

[0188] The invention also provides chimeric or fusion proteins corresponding to a marker of the invention. As used herein, a “chimeric protein” or “fusion protein” comprises all or part (preferably a biologically active part) of a polypeptide corresponding to a marker of the invention operably linked to a heterologous polypeptide (i.e., a polypeptide other than the polypeptide corresponding to the marker). Within the fusion protein, the term “operably linked” is intended to indicate that the polypeptide of the invention and the heterologous polypeptide are fused in-frame to each other. The heterologous polypeptide can be fused to the amino-terminus or the carboxyl-terminus of the polypeptide of the invention.

[0189] One useful fusion protein is a GST fusion protein in which a polypeptide corresponding to a marker of the invention is fused to the carboxyl terminus of GST sequences. Such fusion proteins can facilitate the purification of a recombinant polypeptide of the invention.

[0190] In another embodiment, the fusion protein contains a heterologous signal sequence at its amino terminus. For example, the native signal sequence of a polypeptide corresponding to a marker of the invention can be removed and replaced with a signal sequence from another protein. For example, the gp67 secretory sequence of the baculovirus envelope protein can be used as a heterologous signal sequence (Ausubel et al., ed., Current Protocols in Molecular Biology, John Wiley & Sons, NY, 1992). Other examples of eukaryotic heterologous signal sequences include the secretory sequences of melittin and human placental alkaline phosphatase (Stratagene; La Jolla, Calif.). In yet another example, useful prokaryotic heterologous signal sequences include the phoA secretory signal (Sambrook et al., supra) and the protein A secretory signal (Pharmacia Biotech; Piscataway, N.J.).

[0191] In yet another embodiment, the fusion protein is an immunoglobulin fusion protein in which all or part of a polypeptide corresponding to a marker of the invention is fused to sequences derived from a member of the immunoglobulin protein family. The immunoglobulin fusion proteins of the invention can be incorporated into pharmaceutical compositions and administered to a subject to inhibit an interaction between a ligand (soluble or membrane-bound) and a protein on the surface of a cell (receptor), to thereby suppress signal transduction in vivo. The immunoglobulin fusion protein can be used to affect the bioavailability of a cognate ligand of a polypeptide of the invention. Inhibition of ligand/receptor interaction can be useful therapeutically, both for treating proliferative and differentiative disorders and for modulating (e.g. promoting or inhibiting) cell survival. Moreover, the immunoglobulin fusion proteins of the invention can be used as immunogens to produce antibodies directed against a polypeptide of the invention in a subject, to purify ligands and in screening assays to identify molecules which inhibit the interaction of receptors with ligands.

[0192] Chimeric and fusion proteins of the invention can be produced by standard recombinant DNA techniques. In another embodiment, the fusion gene can be synthesized by conventional techniques including automated DNA synthesizers. Alternatively, PCR amplification of gene fragments can be carried out using anchor primers which give rise to complementary overhangs between two consecutive gene fragments which can subsequently be annealed and re-amplified to generate a chimeric gene sequence (see, e.g., Ausubel et al., supra). Moreover, many expression vectors are commercially available that already encode a fusion moiety (e.g., a GST polypeptide). A nucleic acid encoding a polypeptide of the invention can be cloned into such an expression vector such that the fusion moiety is linked in-frame to the polypeptide of the invention.

[0193] A signal sequence can be used to facilitate secretion and isolation of the secreted protein or other proteins of interest. Signal sequences are typically characterized by a core of hydrophobic amino acids which are generally cleaved from the mature protein during secretion in one or more cleavage events. Such signal peptides contain processing sites that allow cleavage of the signal sequence from the mature proteins as they pass through the secretory pathway. Thus, the invention pertains to the described polypeptides having a signal sequence, as well as to polypeptides from which the signal sequence has been proteolytically cleaved (i.e., the cleavage products). In one embodiment, a nucleic acid sequence encoding a signal sequence can be operably linked in an expression vector to a protein of interest, such as a protein which is ordinarily not secreted or is otherwise difficult to isolate. The signal sequence directs secretion of the protein, such as from a eukaryotic host into which the expression vector is transformed, and the signal sequence is subsequently or concurrently cleaved. The protein can then be readily purified from the extracellular medium by art recognized methods. Alternatively, the signal sequence can be linked to the protein of interest using a sequence which facilitates purification, such as with a GST domain.

[0194] The present invention also pertains to variants of the polypeptides corresponding to individual markers of the invention. Such variants have an altered amino acid sequence which can function as either agonists (mimetics) or as antagonists. Variants can be generated by mutagenesis, e.g., discrete point mutation or truncation. An agonist can retain substantially the same, or a subset, of the biological activities of the naturally occurring form of the protein. An antagonist of a protein can inhibit one or more of the activities of the naturally occurring form of the protein by, for example, competitively binding to a downstream or upstream member of a cellular signaling cascade which includes the protein of interest. Thus, specific biological effects can be elicited by treatment with a variant of limited function. Treatment of a subject with a variant having a subset of the biological activities of the naturally occurring form of the protein can have fewer side effects in a subject relative to treatment with the naturally occurring form of the protein.

[0195] Variants of a protein of the invention which function as either agonists (mimetics) or as antagonists can be identified by screening combinatorial libraries of mutants, e.g., truncation mutants, of the protein of the invention for agonist or antagonist activity. In one embodiment, a variegated library of variants is generated by combinatorial mutagenesis at the nucleic acid level and is encoded by a variegated gene library. A variegated library of variants can be produced by, for example, enzymatically ligating a mixture of synthetic oligonucleotides into gene sequences such that a degenerate set of potential protein sequences is expressible as individual polypeptides, or alternatively, as a set of larger fusion proteins (e.g., for phage display). There are a variety of methods which can be used to produce libraries of potential variants of the polypeptides of the invention from a degenerate oligonucleotide sequence. Methods for synthesizing degenerate oligonucleotides are known in the art (see, e.g., Narang, 1983, Tetrahedron 39:3; Itakura et al., 1984, Annu. Rev. Biochem. 53:323; Itakura et al., 1984, Science 198:1056; Ike et al., 1983 Nucleic Acid Res. 11:477).

[0196] In addition, libraries of fragments of the coding sequence of a polypeptide corresponding to a marker of the invention can be used to generate a variegated population of polypeptides for screening and subsequent selection of variants. For example, a library of coding sequence fragments can be generated by treating a double stranded PCR fragment of the coding sequence of interest with a nuclease under conditions wherein nicking occurs only about once per molecule, denaturing the double stranded DNA, renaturing the DNA to form double stranded DNA which can include sense/antisense pairs from different nicked products, removing single stranded portions from reformed duplexes by treatment with S1 nuclease, and ligating the resulting fragment library into an expression vector. By this method, an expression library can be derived which encodes amino terminal and internal fragments of various sizes of the protein of interest.

[0197] Several techniques are known in the art for screening gene products of combinatorial libraries made by point mutations or truncation, and for screening cDNA libraries for gene products having a selected property. The most widely used techniques, which are amenable to high through-put analysis, for screening large gene libraries typically include cloning the gene library into replicable expression vectors, transforming appropriate cells with the resulting library of vectors, and expressing the combinatorial genes under conditions in which detection of a desired activity facilitates isolation of the vector encoding the gene whose product was detected. Recursive ensemble mutagenesis (REM), a technique which enhances the frequency of functional mutants in the libraries, can be used in combination with the screening assays to identify variants of a protein of the invention (Arkin and Yourvan, 1992, Proc. Natl. Acad. Sci. USA 89:7811-7815; Delgrave et al., 1993, Protein Engineering 6(3):327-331).

[0198] An isolated polypeptide corresponding to a marker of the invention, or a fragment thereof, can be used as an immunogen to generate antibodies using standard techniques for polyclonal and monoclonal antibody preparation. The full-length polypeptide or protein can be used or, alternatively, the invention provides antigenic peptide fragments for use as immunogens. The antigenic peptide of a protein of the invention comprises at least 8 (preferably 10, 15, 20, or 30 or more) amino acid residues of the amino acid sequence of one of the polypeptides of the invention, and encompasses an epitope of the protein such that an antibody raised against the peptide forms a specific immune complex with a marker of the invention to which the protein corresponds. Preferred epitopes encompassed by the antigenic peptide are regions that are located on the surface of the protein, e.g., hydrophilic regions. Hydrophobicity sequence analysis, hydrophilicity sequence analysis, or similar analyses can be used to identify hydrophilic regions.

[0199] An immunogen typically is used to prepare antibodies by immunizing a suitable (i.e. immunocompetent) subject such as a rabbit, goat, mouse, or other mammal or vertebrate. An appropriate immunogenic preparation can contain, for example, recombinantly-expressed or chemically-synthesized polypeptide. The preparation can further include an adjuvant, such as Freund's complete or incomplete adjuvant, or a similar immunostimulatory agent.

[0200] Accordingly, another aspect of the invention pertains to antibodies directed against a polypeptide of the invention. The terms “antibody” and “antibody substance” as used interchangeably herein refer to immunoglobulin molecules and immunologically active portions of immunoglobulin molecules, i.e., molecules that contain an antigen binding site which specifically binds an antigen, such as a polypeptide of the invention, e.g., an epitope of a polypeptide of the invention. A molecule which specifically binds to a given polypeptide of the invention is a molecule which binds the polypeptide, but does not substantially bind other molecules in a sample, e.g., a biological sample, which naturally contains the polypeptide. Examples of immunologically active portions of immunoglobulin molecules include F(ab) and F(ab′)₂ fragments which can be generated by treating the antibody with an enzyme such as pepsin. The invention provides polyclonal and monoclonal antibodies. The term “monoclonal antibody” or “monoclonal antibody composition”, as used herein, refers to a population of antibody molecules that contain only one species of an antigen binding site capable of immunoreacting with a particular epitope.

[0201] Polyclonal antibodies can be prepared as described above by immunizing a suitable subject with a polypeptide of the invention as an immunogen. Preferred polyclonal antibody compositions are ones that have been selected for antibodies directed against a polypeptide or polypeptides of the invention. Particularly preferred polyclonal antibody preparations are ones that contain only antibodies directed against a polypeptide or polypeptides of the invention. Particularly preferred immunogen compositions are those that contain no other human proteins such as, for example, immunogen compositions made using a non-human host cell for recombinant expression of a polypeptide of the invention. In such a manner, the only human epitope or epitopes recognized by the resulting antibody compositions raised against this immunogen will be present as part of a polypeptide or polypeptides of the invention.

[0202] The antibody titer in the immunized subject can be monitored over time by standard techniques, such as with an enzyme linked immunosorbent assay (ELISA) using immobilized polypeptide. If desired, the antibody molecules can be harvested or isolated from the subject (e.g., from the blood or serum of the subject) and further purified by well-known techniques, such as protein A chromatography to obtain the IgG fraction. Alternatively, antibodies specific for a protein or polypeptide of the invention can be selected or (e.g., partially purified) or purified by, e.g., affinity chromatography. For example, a recombinantly expressed and purified (or partially purified) protein of the invention is produced as described herein, and covalently or non-covalently coupled to a solid support such as, for example, a chromatography column. The column can then be used to affinity purify antibodies specific for the proteins of the invention from a sample containing antibodies directed against a large number of different epitopes, thereby generating a substantially purified antibody composition, i.e., one that is substantially free of contaminating antibodies. By a substantially purified antibody composition is meant, in this context, that the antibody sample contains at most only 30% (by dry weight) of contaminating antibodies directed against epitopes other than those of the desired protein or polypeptide of the invention, and preferably at most 20%, yet more preferably at most 10%, and most preferably at most 5% (by dry weight) of the sample is contaminating antibodies. A purified antibody composition means that at least 99% of the antibodies in the composition are directed against the desired protein or polypeptide of the invention.

[0203] At an appropriate time after immunization, e.g., when the specific antibody titers are highest, antibody-producing cells can be obtained from the subject and used to prepare monoclonal antibodies by standard techniques, such as the hybridoma technique originally described by Kohler and Milstein (1975) Nature 256:495-497, the human B cell hybridoma technique (see Kozbor et al., 1983, Immunol. Today 4:72), the EBV-hybridoma technique (see Cole et al., pp. 77-96 In Monoclonal Antibodies and Cancer Therapy, Alan R. Liss, Inc., 1985) or trioma techniques. The technology for producing hybridomas is well known (see generally Current Protocols in Immunology, Coligan et al. ed., John Wiley & Sons, New York, 1994). Hybridoma cells producing a monoclonal antibody of the invention are detected by screening the hybridoma culture supernatants for antibodies that bind the polypeptide of interest, e.g., using a standard ELISA assay.

[0204] Alternative to preparing monoclonal antibody-secreting hybridomas, a monoclonal antibody directed against a polypeptide of the invention can be identified and isolated by screening a recombinant combinatorial immunoglobulin library (e.g., an antibody phage display library) with the polypeptide of interest. Kits for generating and screening phage display libraries are commercially available (e.g., the Pharmacia Recombinant Phage Antibody System, Catalog No. 27-9400-01; and the Stratagene SurfZAP Phage Display Kit, Catalog No. 240612). Additionally, examples of methods and reagents particularly amenable for use in generating and screening antibody display library can be found in, for example, U.S. Pat. No. 5,223,409; PCT Publication No. WO 92/18619; PCT Publication No. WO 91/17271; PCT Publication No. WO 92/20791; PCT Publication No. WO 92/15679; PCT Publication No. WO 93/01288; PCT Publication No. WO 92/01047; PCT Publication No. WO 92/09690; PCT Publication No. WO 90/02809; Fuchs et al. (1991) Bio/Technology 9:1370-1372; Hay et al. (1992) Hum. Antibod. Hybridomas 3:81-85; Huse et al. (1989) Science 246:1275-1281; Griffiths et al. (1993) EMBO J. 12:725-734.

[0205] Additionally, recombinant antibodies, such as chimeric and humanized monoclonal antibodies, comprising both human and non-human portions, which can be made using standard recombinant DNA techniques, are within the scope of the invention. A chimeric antibody is a molecule in which different portions are derived from different animal species, such as those having a variable region derived from a murine mAb and a human immunoglobulin constant region. (See, e.g., Cabilly et al., U.S. Pat. No. 4,816,567; and Boss et al., U.S. Pat. No. 4,816,397, which are incorporated herein by reference in their entirety.) Humanized antibodies are antibody molecules from non-human species having one or more complementarily determining regions (CDRs) from the non-human species and a framework region from a human immunoglobulin molecule. (See, e.g., Queen, U.S. Pat. No. 5,585,089, which is incorporated herein by reference in its entirety.) Such chimeric and humanized monoclonal antibodies can be produced by recombinant DNA techniques known in the art, for example using methods described in PCT Publication No. WO 87/02671; European Patent Application 184,187; European Patent Application 171,496; European Patent Application 173,494; PCT Publication No. WO 86/01533; U.S. Pat. No. 4,816,567; European Patent Application 125,023; Better et al. (1988) Science 240:1041-1043; Liu et al. (1987) Proc. Natl. Acad. Sci. USA 84:3439-3443; Liu et al. (1987) J. Immunol. 139:3521-3526; Sun et al. (1987) Proc. Natl. Acad. Sci. USA 84:214-218; Nishimura et al. (1987) Cancer Res. 47:999-1005; Wood et al. (1985) Nature 314:446-449; and Shaw et al. (1988) J. Natl. Cancer Inst. 80:1553-1559); Morrison (1985) Science 229:1202-1207; Oi et al. (1986) Bio/Techniques 4:214; U.S. Pat. No. 5,225,539; Jones et al. (1986) Nature 321:552-525; Verhoeyan et al. (1988) Science 239:1534; and Beidler et al. (1988) J. Immunol. 141:4053-4060.

[0206] Antibodies of the invention may be used as therapeutic agents in treating cancers. In a preferred embodiment, completely human antibodies of the invention are used for therapeutic treatment of human cancer patients, particularly those having prostate cancer. Such antibodies can be produced, for example, using transgenic mice which are incapable of expressing endogenous immunoglobulin heavy and light chains genes, but which can express human heavy and light chain genes. The transgenic mice are immunized in the normal fashion with a selected antigen, e.g., all or a portion of a polypeptide corresponding to a marker of the invention. Monoclonal antibodies directed against the antigen can be obtained using conventional hybridoma technology. The human immunoglobulin transgenes harbored by the transgenic mice rearrange during B cell differentiation, and subsequently undergo class switching and somatic mutation.

[0207] Thus, using such a technique, it is possible to produce therapeutically useful IgG, IgA and IgE antibodies. For an overview of this technology for producing human antibodies, see Lonberg and Huszar (1995) Int. Rev. Immunol. 13:65-93). For a detailed discussion of this technology for producing human antibodies and human monoclonal antibodies and protocols for producing such antibodies, see, e.g., U.S. Pat. No. 5,625,126; U.S. Pat. No. 5,633,425; U.S. Pat. No. 5,569,825; U.S. Pat. No. 5,661,016; and U.S. Pat. No. 5,545,806. In addition, companies such as Abgenix, Inc. (Freemont, Calif.), can be engaged to provide human antibodies directed against a selected antigen using technology similar to that described above.

[0208] Completely human antibodies which recognize a selected epitope can be generated using a technique referred to as “guided selection.” In this approach a selected non-human monoclonal antibody, e.g., a murine antibody, is used to guide the selection of a completely human antibody recognizing the same epitope (Jespers et al., 1994, Bio/technology 12:899-903).

[0209] An antibody directed against a polypeptide corresponding to a marker of the invention (e.g., a monoclonal antibody) can be used to isolate the polypeptide by standard techniques, such as affinity chromatography or immunoprecipitation. Moreover, such an antibody can be used to detect the marker (e.g., in a cellular lysate or cell supernatant) in order to evaluate the level and pattern of expression of the marker. The antibodies can also be used diagnostically to monitor protein levels in tissues or body fluids (e.g. in an ovary-associated body fluid) as part of a clinical testing procedure, e.g., to, for example, determine the efficacy of a given treatment regimen. Detection can be facilitated by coupling the antibody to a detectable substance. Examples of detectable substances include various enzymes, prosthetic groups, fluorescent materials, luminescent materials, bioluminescent materials, and radioactive materials. Examples of suitable enzymes include horseradish peroxidase, alkaline phosphatase, β-galactosidase, or acetylcholinesterase; examples of suitable prosthetic group complexes include streptavidin/biotin and avidin/biotin; examples of suitable fluorescent materials include umbelliferone, fluorescein, fluorescein isothiocyanate, rhodamine, dichlorotriazinylamine fluorescein, dansyl chloride or phycoerythrin; an example of a luminescent material includes luminol; examples of bioluminescent materials include luciferase, luciferin, and aequorin, and examples of suitable radioactive material include ¹²⁵I, ¹³¹I, ³⁵S or ³H.

[0210] Further, an antibody (or fragment thereof) can be conjugated to a therapeutic moiety such as a cytotoxin, a therapeutic agent or a radioactive metal ion. A cytotoxin or cytotoxic agent includes any agent that is detrimental to cells. Examples include taxol, cytochalasin B, gramicidin D, ethidium bromide, emetine, mitomycin, etoposide, tenoposide, vincristine, vinblastine, colchicin, doxorubicin, daunorubicin, dihydroxy anthracin dione, mitoxantrone, mithramycin, actinomycin D, 1-dehydrotestosterone, glucocorticoids, procaine, tetracaine, lidocaine, propranolol, and puromycin and analogs or homologs thereof. Therapeutic agents include, but are not limited to, antimetabolites (e.g., methotrexate, 6-mercaptopurine, 6-thioguanine, cytarabine, 5-fluorouracil decarbazine), alkylating agents (e.g., mechlorethamine, thioepa chlorambucil, melphalan, carmustine (BSNU) and lomustine (CCNU), cyclothosphamide, busulfan, dibromomannitol, streptozotocin, mitomycin C, and cis-dichlorodiamine platinum (II) (DDP) cisplatin), anthracyclines (e.g., daunorubicin (formerly daunomycin) and doxorubicin), antibiotics (e.g., dactinomycin (formerly actinomycin), bleomycin, mithramycin, and anthramycin (AMC)), and anti-mitotic agents (e.g., vincristine and vinblastine).

[0211] The conjugates of the invention can be used for modifying a given biological response, the drug moiety is not to be construed as limited to classical chemical therapeutic agents. For example, the drug moiety may be a protein or polypeptide possessing a desired biological activity. Such proteins may include, for example, a toxin such as abrin, ricin A, pseudomonas exotoxin, or diphtheria toxin; a protein such as tumor necrosis factor, .alpha.-interferon, .beta.-interferon, nerve growth factor, platelet derived growth factor, tissue plasminogen activator; or, biological response modifiers such as, for example, lymphokines, interleukin-1 (“IL-1”), interleukin-2 (“IL-2”), interleukin-6 (“IL-6”), granulocyte macrophase colony stimulating factor (“GM-CSF”), granulocyte colony stimulating factor (“G-CSF”), or other growth factors.

[0212] Techniques for conjugating such therapeutic moiety to antibodies are well known, see, e.g., Arnon et al., “Monoclonal Antibodies For Immunotargeting Of Drugs In Cancer Therapy”, in Monoclonal Antibodies And Cancer Therapy, Reisfeld et al. (eds.), pp. 243-56 (Alan R. Liss, Inc. 1985); Hellstrom et al., “Antibodies For Drug Delivery”, in Controlled Drug Delivery (2nd Ed.), Robinson et al. (eds.), pp. 623-53 (Marcel Dekker, Inc. 1987); Thorpe, “Antibody Carriers Of Cytotoxic Agents In Cancer Therapy: A Review”, in Monoclonal Antibodies '84: Biological And Clinical Applications, Pinchera et al. (eds.), pp. 475-506 (1985); “Analysis, Results, And Future Prospective Of The Therapeutic Use Of Radiolabeled Antibody In Cancer Therapy”, in Monoclonal Antibodies For Cancer Detection And Therapy, Baldwin et al. (eds.), pp. 303-16 (Academic Press 1985), and Thorpe et al., “The Preparation And Cytotoxic Properties Of Antibody-Toxin Conjugates”, Immunol. Rev., 62:119-58 (1982). Alternatively, an antibody can be conjugated to a second antibody to form an antibody heteroconjugate as described by Segal in U.S. Pat. No. 4,676,980.

[0213] Accordingly, in one aspect, the invention provides substantially purified antibodies or fragments thereof, and non-human antibodies or fragments thereof, which antibodies or fragments specifically bind to a polypeptide comprising an amino acid sequence selected from the group consisting of the amino acid sequences of the present invention, an amino acid sequence encoded by the cDNA of the present invention, a fragment of at least 15 amino acid residues of an amino acid sequence of the present invention, an amino acid sequence which is at least 95% identical to the amino acid sequence of the present invention (wherein the percent identity is determined using the ALIGN program of the GCG software package with a PAM120 weight residue table, a gap length penalty of 12, and a gap penalty of 4) and an amino acid sequence which is encoded by a nucleic acid molecule which hybridizes to a nucleic acid molecule consisting of the nucleic acid molecules of the present invention, or a complement thereof, under conditions of hybridization of 6×SSC at 45° C. and washing in 0.2×SSC, 0.1% SDS at 65° C. In various embodiments, the substantially purified antibodies of the invention, or fragments thereof, can be human, non-human, chimeric and/or humanized antibodies.

[0214] In another aspect, the invention provides non-human antibodies or fragments thereof, which antibodies or fragments specifically bind to a polypeptide comprising an amino acid sequence selected from the group consisting of: the amino acid sequence of the present invention, an amino acid sequence encoded by the cDNA of the present invention, a fragment of at least 15 amino acid residues of the amino acid sequence of the present invention, an amino acid sequence which is at least 95% identical to the amino acid sequence of the present invention (wherein the percent identity is determined using the ALIGN program of the GCG software package with a PAM120 weight residue table, a gap length penalty of 12, and a gap penalty of 4) and an amino acid sequence which is encoded by a nucleic acid molecule which hybridizes to a nucleic acid molecule consisting of the nucleic acid molecules of the present invention, or a complement thereof, under conditions of hybridization of 6×SSC at 45° C. and washing in 0.2×SSC, 0.1% SDS at 65° C. Such non-human antibodies can be goat, mouse, sheep, horse, chicken, rabbit, or rat antibodies. Alternatively, the non-human antibodies of the invention can be chimeric and/or humanized antibodies. In addition, the non-human antibodies of the invention can be polyclonal antibodies or monoclonal antibodies.

[0215] In still a further aspect, the invention provides monoclonal antibodies or fragments thereof, which antibodies or fragments specifically bind to a polypeptide comprising an amino acid sequence selected from the group consisting of the amino acid sequences of the present invention, an amino acid sequence encoded by the cDNA of the present invention, a fragment of at least 15 amino acid residues of an amino acid sequence of the present invention, an amino acid sequence which is at least 95% identical to an amino acid sequence of the present invention (wherein the percent identity is determined using the ALIGN program of the GCG software package with a PAM120 weight residue table, a gap length penalty of 12, and a gap penalty of 4) and an amino acid sequence which is encoded by a nucleic acid molecule which hybridizes to a nucleic acid molecule consisting of the nucleic acid molecules of the present invention, or a complement thereof, under conditions of hybridization of 6×SSC at 45□C and washing in 0.2×SSC, 0.1% SDS at 65° C. The monoclonal antibodies can be human, humanized, chimeric and/or non-human antibodies.

[0216] The substantially purified antibodies or fragments thereof may specifically bind to a signal peptide, a secreted sequence, an extracellular domain, a transmembrane or a cytoplasmic domain or cytoplasmic membrane of a polypeptide of the invention. In a particularly preferred embodiment, the substantially purified antibodies or fragments thereof, the non-human antibodies or fragments thereof, and/or the monoclonal antibodies or fragments thereof, of the invention specifically bind to a secreted sequence or an extracellular domain of the amino acid sequences of the present invention.

[0217] Any of the antibodies of the invention can be conjugated to a therapeutic moiety or to a detectable substance. Non-limiting examples of detectable substances that can be conjugated to the antibodies of the invention are an enzyme, a prosthetic group, a fluorescent material, a luminescent material, a bioluminescent material, and a radioactive material.

[0218] The invention also provides a kit containing an antibody of the invention conjugated to a detectable substance, and instructions for use. Still another aspect of the invention is a pharmaceutical composition comprising an antibody of the invention and a pharmaceutically acceptable carrier. In preferred embodiments, the pharmaceutical composition contains an antibody of the invention, a therapeutic moiety, and a pharmaceutically acceptable carrier.

[0219] Still another aspect of the invention is a method of making an antibody that specifically recognizes a polypeptide of the present invention, the method comprising immunizing a mammal with a polypeptide. The polypeptide used as an immungen comprises an amino acid sequence selected from the group consisting of the amino acid sequence of the present invention, an amino acid sequence encoded by the cDNA of the nucleic acid molecules of the present invention, a fragment of at least 15 amino acid residues of the amino acid sequence of the present invention, an amino acid sequence which is at least 95% identical to the amino acid sequence of the present invention (wherein the percent identity is determined using the ALIGN program of the GCG software package with a PAM120 weight residue table, a gap length penalty of 12, and a gap penalty of 4) and an amino acid sequence which is encoded by a nucleic acid molecule which hybridizes to a nucleic acid molecule consisting of the nucleic acid molecules of the present invention, or a complement thereof, under conditions of hybridization of 6×SSC at 45° C. and washing in 0.2×SSC, 0.1% SDS at 65° C.

[0220] After immunization, a sample is collected from the mammal that contains an antibody that specifically recognizes the polypeptide. Preferably, the polypeptide is recombinantly produced using a non-human host cell. Optionally, the antibodies can be further purified from the sample using techniques well known to those of skill in the art. The method can further comprise producing a monoclonal antibody-producing cell from the cells of the mammal. Optionally, antibodies are collected from the antibody-producing cell.

[0221] III. Recombinant Expression Vectors and Host Cells

[0222] Another aspect of the invention pertains to vectors, preferably expression vectors, containing a nucleic acid encoding a polypeptide corresponding to a marker of the invention (or a portion of such a polypeptide). As used herein, the term “vector” refers to a nucleic acid molecule capable of transporting another nucleic acid to which it has been linked. One type of vector is a “plasmid”, which refers to a circular double stranded DNA loop into which additional DNA segments can be ligated. Another type of vector is a viral vector, wherein additional DNA segments can be ligated into the viral genome. Certain vectors are capable of autonomous replication in a host cell into which they are introduced (e.g., bacterial vectors having a bacterial origin of replication and episomal mammalian vectors). Other vectors (e.g., non-episomal mammalian vectors) are integrated into the genome of a host cell upon introduction into the host cell, and thereby are replicated along with the host genome. Moreover, certain vectors, namely expression vectors, are capable of directing the expression of genes to which they are operably linked. In general, expression vectors of utility in recombinant DNA techniques are often in the form of plasmids (vectors). However, the invention is intended to include such other forms of expression vectors, such as viral vectors (e.g., replication defective retroviruses, adenoviruses and adeno-associated viruses), which serve equivalent functions.

[0223] The recombinant expression vectors of the invention comprise a nucleic acid of the invention in a form suitable for expression of the nucleic acid in a host cell. This means that the recombinant expression vectors include one or more regulatory sequences, selected on the basis of the host cells to be used for expression, which is operably linked to the nucleic acid sequence to be expressed. Within a recombinant expression vector, “operably linked” is intended to mean that the nucleotide sequence of interest is linked to the regulatory sequence(s) in a manner which allows for expression of the nucleotide sequence (e.g., in an in vitro transcription/translation system or in a host cell when the vector is introduced into the host cell). The term “regulatory sequence” is intended to include promoters, enhancers and other expression control elements (e.g., polyadenylation signals), Such regulatory sequences are described, for example, in Goeddel, Methods in Enzymology: Gene Expression Technology vol. 185, Academic Press, San Diego, Calif. (1991). Regulatory sequences include those which direct constitutive expression of a nucleotide sequence in many types of host cell and those which direct expression of the nucleotide sequence only in certain host cells (e.g., tissue-specific regulatory sequences). It will be appreciated by those skilled in the art that the design of the expression vector can depend on such factors as the choice of the host cell to be transformed, the level of expression of protein desired, and the like. The expression vectors of the invention can be introduced into host cells to thereby produce proteins or peptides, including fusion proteins or peptides, encoded by nucleic acids as described herein.

[0224] The recombinant expression vectors of the invention can be designed for expression of a polypeptide corresponding to a marker of the invention in prokaryotic (e.g., E. coli) or eukaryotic cells (e.g., insect cells {using baculovirus expression vectors}, yeast cells or mammalian cells). Suitable host cells are discussed further in Goeddel, supra. Alternatively, the recombinant expression vector can be transcribed and translated in vitro, for example using T7 promoter regulatory sequences and T7 polymerase.

[0225] Expression of proteins in prokaryotes is most often carried out in E. coli with vectors containing constitutive or inducible promoters directing the expression of either fusion or non-fusion proteins. Fusion vectors add a number of amino acids to a protein encoded therein, usually to the amino terminus of the recombinant protein. Such fusion vectors typically serve three purposes: 1) to increase expression of recombinant protein; 2) to increase the solubility of the recombinant protein; and 3) to aid in the purification of the recombinant protein by acting as a ligand in affinity purification. Often, in fusion expression vectors, a proteolytic cleavage site is introduced at the junction of the fusion moiety and the recombinant protein to enable separation of the recombinant protein from the fusion moiety subsequent to purification of the fusion protein. Such enzymes, and their cognate recognition sequences, include Factor Xa, thrombin and enterokinase. Typical fusion expression vectors include pGEX (Pharmacia Biotech Inc; Smith and Johnson, 1988, Gene 67:31-40), pMAL (New England Biolabs, Beverly, Mass.) and pRIT5 (Pharmacia, Piscataway, N.J.) which fuse glutathione S-transferase (GST), maltose E binding protein, or protein A, respectively, to the target recombinant protein.

[0226] Examples of suitable inducible non-fusion E. coli expression vectors include pTrc (Amann et al., 1988, Gene 69:301-315) and pET 11d (Studier et al., p. 60-89, In Gene Expression Technology: Methods in Enzymology vol.185, Academic Press, San Diego, Calif., 1991). Target gene expression from the ptrc vector relies on host RNA polymerase transcription from a hybrid trp-lac fusion promoter. Target gene expression from the pET 11d vector relies on transcription from a T7 gn10-lac fusion promoter mediated by a co-expressed viral RNA polymerase (T7 gn1). This viral polymerase is supplied by host strains BL21(DE3) or HMS174(DE3) from a resident prophage harboring a T7 gn1 gene under the transcriptional control of the lacUV 5 promoter.

[0227] One strategy to maximize recombinant protein expression in E. coli is to express the protein in a host bacteria with an impaired capacity to proteolytically cleave the recombinant protein (Gottesman, p. 119-128, In Gene Expression Technology: Methods in Enzymologyvol. 185, Academic Press, San Diego, Calif., 1990. Another strategy is to alter the nucleic acid sequence of the nucleic acid to be inserted into an expression vector so that the individual codons for each amino acid are those preferentially utilized in E. coli (Wada et al., 1992, Nucleic Acids Res. 20:2111-2118). Such alteration of nucleic acid sequences of the invention can be carried out by standard DNA synthesis techniques.

[0228] In another embodiment, the expression vector is a yeast expression vector. Examples of vectors for expression in yeast S. cerevisiae include pYepSec1 (Baldari et al., 1987, EMBO J. 6:229-234), pMFa (Kudjan and Herskowitz, 1982, Cell 30:933-943), pJRY88 (Schultz et al., 1987, Gene 54:113-123), pYES2 (Invitrogen Corporation, San Diego, Calif.), and pPicZ (Invitrogen Corp, San Diego, Calif.).

[0229] Alternatively, the expression vector is a baculovirus expression vector. Baculovirus vectors available for expression of proteins in cultured insect cells (e.g., Sf 9 cells) include the pAc series (Smith et al., 1983, Mol. Cell Biol. 3:2156-2165) and the pVL series (Lucklow and Summers, 1989, Virology 170:31-39).

[0230] In yet another embodiment, a nucleic acid of the invention is expressed in mammalian cells using a mammalian expression vector. Examples of mammalian expression vectors include pCDM8 (Seed, 1987, Nature 329:840) and pMT2NOPC (Kaufman et al., 1987, EMBO J. 6:187-195). When used in mammalian cells, the expression vector's control functions are often provided by viral regulatory elements. For example, commonly used promoters are derived from polyoma, Adenovirus 2, cytomegalovirus and Simian Virus 40. For other suitable expression systems for both prokaryotic and eukaryotic cells see chapters 16 and 17 of Sambrook et al, supra.

[0231] In another embodiment, the recombinant mammalian expression vector is capable of directing expression of the nucleic acid preferentially in a particular cell type (e.g., tissue-specific regulatory elements are used to express the nucleic acid). Tissue-specific regulatory elements are known in the art. Non-limiting examples of suitable tissue-specific promoters include the albumin promoter (liver-specific; Pinkert et al., 1987, Genes Dev. 1:268-277), lymphoid-specific promoters (Calame and Eaton, 1988, Adv. Immunol. 43:235-275), in particular promoters of T cell receptors (Winoto and Baltimore, 1989, EMBO J. 8:729-733) and immunoglobulins (Banerji et al., 1983, Cell 33:729-740; Queen and Baltimore, 1983, Cell 33:741-748), neuron-specific promoters (e.g., the neurofilament promoter; Byrne and Ruddle, 1989, Proc. Natl. Acad. Sci. USA 86:5473-5477), pancreas-specific promoters (Edlund et al., 1985, Science 230:912-916), and mammary gland-specific promoters (e.g., milk whey promoter; U.S. Pat. No. 4,873,316 and European Application Publication No. 264,166). Developmentally-regulated promoters are also encompassed, for example the murine hox promoters (Kessel and Gruss, 1990, Science 249:374-379) and the α-fetoprotein promoter (Camper and Tilghman, 1989, Genes Dev. 3:537-546).

[0232] The invention further provides a recombinant expression vector comprising a DNA molecule of the invention cloned into the expression vector in an antisense orientation. That is, the DNA molecule is operably linked to a regulatory sequence in a manner which allows for expression (by transcription of the DNA molecule) of an RNA molecule which is antisense to the mRNA encoding a polypeptide of the invention. Regulatory sequences operably linked to a nucleic acid cloned in the antisense orientation can be chosen which direct the continuous expression of the antisense RNA molecule in a variety of cell types, for instance viral promoters and/or enhancers, or regulatory sequences can be chosen which direct constitutive, tissue-specific or cell type specific expression of antisense RNA. The antisense expression vector can be in the form of a recombinant plasmid, phagemid, or attenuated virus in which antisense nucleic acids are produced under the control of a high efficiency regulatory region, the activity of which can be determined by the cell type into which the vector is introduced. For a discussion of the regulation of gene expression using antisense genes see Weintraub et al., 1986, Trends in Genetics, Vol. 1(1).

[0233] Another aspect of the invention pertains to host cells into which a recombinant expression vector of the invention has been introduced. The terms “host cell” and “recombinant host cell” are used interchangeably herein. It is understood that such terms refer not only to the particular subject cell but to the progeny or potential progeny of such a cell. Because certain modifications may occur in succeeding generations due to either mutation or environmental influences, such progeny may not, in fact, be identical to the parent cell, but are still included within the scope of the term as used herein.

[0234] A host cell can be any prokaryotic (e.g., E. coli) or eukaryotic cell (e.g., insect cells, yeast or mammalian cells).

[0235] Vector DNA can be introduced into prokaryotic or eukaryotic cells via conventional transformation or transfection techniques. As used herein, the terms “transformation” and “transfection” are intended to refer to a variety of art-recognized techniques for introducing foreign nucleic acid into a host cell, including calcium phosphate or calcium chloride co-precipitation, DEAE-dextran-mediated transfection, lipofection, or electroporation. Suitable methods for transforming or transfecting host cells can be found in Sambrook, et al. (supra), and other laboratory manuals.

[0236] For stable transfection of mammalian cells, it is known that, depending upon the expression vector and transfection technique used, only a small fraction of cells may integrate the foreign DNA into their genome. In order to identify and select these integrants, a gene that encodes a selectable marker (e.g., for resistance to antibiotics) is generally introduced into the host cells along with the gene of interest. Preferred selectable markers include those which confer resistance to drugs, such as G418, hygromycin and methotrexate. Cells stably transfected with the introduced nucleic acid can be identified by drug selection (e.g., cells that have incorporated the selectable marker gene will survive, while the other cells die).

[0237] A host cell of the invention, such as a prokaryotic or eukaryotic host cell in culture, can be used to produce a polypeptide corresponding to a marker of the invention. Accordingly, the invention further provides methods for producing a polypeptide corresponding to a marker of the invention using the host cells of the invention. In one embodiment, the method comprises culturing the host cell of invention (into which a recombinant expression vector encoding a polypeptide of the invention has been introduced) in a suitable medium such that the marker is produced.

[0238] In another embodiment, the method further comprises isolating the marker polypeptide from the medium or the host cell.

[0239] The host cells of the invention can also be used to produce nonhuman transgenic animals. For example, in one embodiment, a host cell of the invention is a fertilized oocyte or an embryonic stem cell into which a sequences encoding a polypeptide corresponding to a marker of the invention have been introduced. Such host cells can then be used to create non-human transgenic animals in which exogenous sequences encoding a marker protein of the invention have been introduced into their genome or homologous recombinant animals in which endogenous gene(s) encoding a polypeptide corresponding to a marker of the invention sequences have been altered. Such animals are useful for studying the function and/or activity of the polypeptide corresponding to the marker and for identifying and/or evaluating modulators of polypeptide activity. As used herein, a “transgenic animal” is a non-human animal, preferably a mammal, more preferably a rodent such as a rat or mouse, in which one or more of the cells of the animal includes a transgene. Other examples of transgenic animals include non-human primates, sheep, dogs, cows, goats, chickens, amphibians, etc. A transgene is exogenous DNA which is integrated into the genome of a cell from which a transgenic animal develops and which remains in the genome of the mature animal, thereby directing the expression of an encoded gene product in one or more cell types or tissues of the transgenic animal. As used herein, an “homologous recombinant animal” is a non-human animal, preferably a mammal, more preferably a mouse, in which an endogenous gene has been altered by homologous recombination between the endogenous gene and an exogenous DNA molecule introduced into a cell of the animal, e.g., an embryonic to cell of the animal, prior to development of the animal.

[0240] A transgenic animal of the invention can be created by introducing a nucleic acid encoding a polypeptide corresponding to a marker of the invention into the male pronuclei of a fertilized oocyte, e.g., by microinjection, retroviral infection, and allowing the oocyte to develop in a pseudopregnant female foster animal. Intronic sequences and polyadenylation signals can also be included in the transgene to increase the efficiency of expression of the transgene. A tissue-specific regulatory sequence(s) can be operably linked to the transgene to direct expression of the polypeptide of the invention to particular cells. Methods for generating transgenic animals via embryo manipulation and microinjection, particularly animals such as mice, have become conventional in the art and are described, for example, in U.S. Pat. Nos. 4,736,866 and 4,870,009, U.S. Pat. No. 4,873,191 and in Hogan, Manipulating the Mouse Embryo, Cold Spring Harbor Laboratory Press, Cold Spring Harbor, N.Y., 1986. Similar methods are used for production of other transgenic animals. A transgenic founder animal can be identified based upon the presence of the transgene in its genome and/or expression of mRNA encoding the transgene in tissues or cells of the animals. A transgenic founder animal can then be used to breed additional animals carrying the transgene. Moreover, transgenic animals carrying the transgene can further be bred to other transgenic animals carrying other transgenes.

[0241] To create an homologous recombinant animal, a vector is prepared which contains at least a portion of a gene encoding a polypeptide corresponding to a marker of the invention into which a deletion, addition or substitution has been introduced to thereby alter, e.g., functionally disrupt, the gene. In a preferred embodiment, the vector is designed such that, upon homologous recombination, the endogenous gene is functionally disrupted (i.e., no longer encodes a functional protein; also referred to as a “knock out” vector). Alternatively, the vector can be designed such that, upon homologous recombination, the endogenous gene is mutated or otherwise altered but still encodes functional protein (e.g., the upstream regulatory region can be altered to thereby alter the expression of the endogenous protein). In the homologous recombination vector, the altered portion of the gene is flanked at its 5′ and 3′ ends by additional nucleic acid of the gene to allow for homologous recombination to occur between the exogenous gene carried by the vector and an endogenous gene in an embryonic stem cell. The additional flanking nucleic acid sequences are of sufficient length for successful homologous recombination with the endogenous gene. Typically, several kilobases of flanking DNA (both at the 5′ and 3′ ends) are included in the vector (see,. e.g., Thomas and Capecchi, 1987, Cell 51:503 for a description of homologous recombination vectors). The vector is introduced into an embryonic stem cell line (e.g., by electroporation) and cells in which the introduced gene has homologously recombined with the endogenous gene are selected (see, e.g., Li et al., 1992, Cell 69:915). The selected cells are then injected into a blastocyst of an animal (e.g., a mouse) to form aggregation chimeras (see, e.g., Bradley, Teratocarcinomas and Embryonic Stem Cells: A Practical Approach, Robertson, Ed., IRL, Oxford, 1987, pp. 113-152). A chimeric embryo can then be implanted into a suitable pseudopregnant female foster animal and the embryo brought to term. Progeny harboring the homologously recombined DNA in their germ cells can be used to breed animals in which all cells of the animal contain the homologously recombined DNA by germline transmission of the transgene. Methods for constructing homologous recombination vectors and homologous recombinant animals are described further in Bradley (1991) Current Opinion in Bio/Technology 2:823-829 and in PCT Publication NOS. WO 90/11354, WO 91/01140, WO 92/0968, and WO 93/04169.

[0242] In another embodiment, transgenic non-human animals can be produced which contain selected systems which allow for regulated expression of the transgene. One example of such a system is the cre/loxP recombinase system of bacteriophage P1. For a description of the cre/loxP recombinase system, see, e.g., Lakso et al. (1992) Proc. Natl. Acad. Sci. USA 89:6232-6236. Another example of a recombinase system is the FLP recombinase system of Saccharomyces cerevisiae (O'Gorman et al., 1991, Science 251:1351-1355). If a cre/loxP recombinase system is used to regulate expression of the transgene, animals containing transgenes encoding both the Cre recombinase and a selected protein are required. Such animals can be provided through the construction of “double” transgenic animals, e.g., by mating two transgenic animals, one containing a transgene encoding a selected protein and the other containing a transgene encoding a recombinase.

[0243] Clones of the non-human transgenic animals described herein can also be produced according to the methods described in Wilmut et al. (1997) Nature 385:810-813 and PCT Publication NOS. WO 97/07668 and WO 97/07669.

[0244] IV. Pharmaceutical Compositions

[0245] The nucleic acid molecules, polypeptides, and antibodies (also referred to herein as “active compounds”) corresponding to a marker of the invention can be incorporated into pharmaceutical compositions suitable for administration. Such compositions typically comprise the nucleic acid molecule, protein, or antibody and a pharmaceutically acceptable carrier. As used herein the language “pharmaceutically acceptable carrier” is intended to include any and all solvents, dispersion media, coatings, antibacterial and antifungal agents, isotonic and absorption delaying agents, and the like, compatible with pharmaceutical administration. The use of such media and agents for pharmaceutically active substances is well known in the art. Except insofar as any conventional media or agent is incompatible with the active compound, use thereof in the compositions is contemplated. Supplementary active compounds can also be incorporated into the compositions.

[0246] The invention includes methods for preparing pharmaceutical compositions for modulating the expression or activity of a polypeptide or nucleic acid corresponding to a marker of the invention. Such methods comprise formulating a pharmaceutically acceptable carrier with an agent which modulates expression or activity of a polypeptide or nucleic acid corresponding to a marker of the invention. Such compositions can further include additional active agents. Thus, the invention further includes methods for preparing a pharmaceutical composition by formulating a pharmaceutically acceptable carrier with an agent which modulates expression or activity of a polypeptide or nucleic acid corresponding to a marker of the invention and one or more additional active compounds.

[0247] The invention also provides methods (also referred to herein as “screening assays”) for identifying modulators, i.e., candidate or test compounds or agents (e.g., peptides, peptidomimetics, peptoids, small molecules or other drugs) which (a) bind to the marker, or (b) have a modulatory (e.g., stimulatory or inhibitory) effect on the activity of the marker or, more specifically, (c) have a modulatory effect on the interactions of the marker with one or more of its natural substrates (e.g., peptide, protein, hormone, co-factor, or nucleic acid), or (d) have a modulatory effect on the expression of the marker. Such assays typically comprise a reaction between the marker and one or more assay components. The other components may be either the test compound itself, or a combination of test compound and a natural binding partner of the marker.

[0248] The test compounds of the present invention may be obtained from any available source, including systematic libraries of natural and/or synthetic compounds. Test compounds may also be obtained by any of the numerous approaches in combinatorial library methods known in the art, including: biological libraries; peptoid libraries (libraries of molecules having the functionalities of peptides, but with a novel, non-peptide backbone which are resistant to enzymatic degradation but which nevertheless remain bioactive; see, e.g., Zuckermann et al., 1994, J. Med. Chem. 37:2678-85); spatially addressable parallel solid phase or solution phase libraries; synthetic library methods requiring deconvolution; the ‘one-bead one-compound’ library method; and synthetic library methods using affinity chromatography selection. The biological library and peptoid library approaches are limited to peptide libraries, while the other four approaches are applicable to peptide, non-peptide oligomer or small molecule libraries of compounds (Lam, 1997, Anticancer Drug Des. 12:145).

[0249] Examples of methods for the synthesis of molecular libraries can be found in the art, for example in: DeWitt et al. (1993) Proc. Natl. Acad. Sci. U.S.A. 90:6909; Erb et al. (1994) Proc. Natl. Acad. Sci. USA 91:11422; Zuckermann et al. (1994). J. Med. Chem. 37:2678; Cho et al. (1993) Science 261:1303; Carrell et al. (1994) Angew. Chem. Int. Ed. Engl. 33:2059; Carell et al. (1994) Angew. Chem. Int. Ed. Engl. 33:2061; and in Gallop et al. (1994) J. Med. Chem. 37:1233. Libraries of compounds may be presented in solution (e.g., Houghten, 1992, Biotechniques 13:412-421), or on beads (Lam, 1991, Nature 354:82-84), chips (Fodor, 1993, Nature 364:555-556), bacteria and/or spores, (Ladner, U.S. Pat. No. 5,223,409), plasmids (Cull et al, 1992, Proc Natl Acad Sci USA 89:1865-1869) or on phage (Scott and Smith, 1990, Science 249:386-390; Devlin, 1990, Science 249:404-406; Cwirla et al, 1990, Proc. Natl. Acad. Sci. 87:6378-6382; Felici, 1991, J. Mol. Biol. 222:301-310; Ladner, supra.).

[0250] In one embodiment, the invention provides assays for screening candidate or test compounds which are substrates of a marker or biologically active portion thereof. In another embodiment, the invention provides assays for screening candidate or test compounds which bind to a marker or biologically active portion thereof. Determining the ability of the test compound to directly bind to a marker can be accomplished, for example, by coupling the compound with a radioisotope or enzymatic label such that binding of the compound to the marker can be determined by detecting the labeled marker compound in a complex. For example, compounds (e.g., marker substrates) can be labeled with ¹²⁵I, ³⁵S, ¹⁴C, or ³H, either directly or indirectly, and the radioisotope detected by direct counting of radioemission or by scintillation counting. Alternatively, assay components can be enzymatically labeled with, for example, horseradish peroxidase, alkaline phosphatase, or luciferase, and the enzymatic label detected by determination of conversion of an appropriate substrate to product.

[0251] In another embodiment, the invention provides assays for screening candidate or test compounds which modulate the activity of a marker or a biologically active portion thereof. In all likelihood, the marker can, in vivo, interact with one or more molecules, such as but not limited to, peptides, proteins, hormones, cofactors and nucleic acids. For the purposes of this discussion, such cellular and extracellular molecules are referred to herein as “binding partners” or marker “substrate”.

[0252] One necessary embodiment of the invention in order to facilitate such screening is the use of the marker to identify its natural in vivo binding partners. There are many ways to accomplish this which are known to one skilled in the art. One example is the use of the marker protein as “bait protein” in a two-hybrid assay or three-hybrid assay (see, e.g., U.S. Pat. No. 5,283,317; Zervos et al, 1993, Cell 72:223-232; Madura et al, 1993, J. Biol. Chem. 268:12046-12054; Bartel et al, 1993, Biotechniques 14:920-924; Iwabuchi et al, 1993 Oncogene 8:1693-1696; Brent WO94/10300) in order to identify other proteins which bind to or interact with the marker (binding partners) and, therefore, are possibly involved in the natural function of the marker. Such marker binding partners are also likely to be involved in the propagation of signals by the marker or downstream elements of a marker-mediated signaling pathway. Alternatively, such marker binding partners may also be found to be inhibitors of the marker.

[0253] The two-hybrid system is based on the modular nature of most transcription factors, which consist of separable DNA-binding and activation domains. Briefly, the assay utilizes two different DNA constructs. In one construct, the gene that encodes a marker protein fused to a gene encoding the DNA binding domain of a known transcription factor (e.g., GAL-4). In the other construct, a DNA sequence, from a library of DNA sequences, that encodes an unidentified protein (“prey” or “sample”) is fused to a gene that codes for the activation domain of the known transcription factor. If the “bait” and the “prey” proteins are able to interact, in vivo, forming a marker-dependent complex, the DNA-binding and activation domains of the transcription factor are brought into close proximity. This proximity allows transcription of a reporter gene (e.g., LacZ) which is operably linked to a transcriptional regulatory site responsive to the transcription factor. Expression of the reporter gene can be readily detected and cell colonies containing the functional transcription factor can be isolated and used to obtain the cloned gene which encodes the protein which interacts with the marker protein. In a further embodiment, assays may be devised through the use of the invention for the purpose of identifying compounds which modulate (e.g., affect either positively or negatively) interactions between a marker and its substrates and/or binding partners. Such compounds can include, but are not limited to, molecules such as antibodies, peptides, hormones, oligonucleotides, nucleic acids, and analogs thereof. Such compounds may also be obtained from any available source, including systematic libraries of natural and/or synthetic compounds. The preferred assay components for use in this embodiment is an prostate cancer marker identified herein, the known binding partner and/or substrate of same, and the test compound. Test compounds can be supplied from any source.

[0254] The basic principle of the assay systems used to identify compounds that interfere with the interaction between the marker and its binding partner involves preparing a reaction mixture containing the marker and its binding partner under conditions and for a time sufficient to allow the two products to interact and bind, thus forming a complex. In order to test an agent for inhibitory activity, the reaction mixture is prepared in the presence and absence of the test compound. The test compound can be initially included in the reaction mixture, or can be added at a time subsequent to the addition of the marker and its binding partner. Control reaction mixtures are incubated without the test compound or with a placebo. The formation of any complexes between the marker and its binding partner is then detected. The formation of a complex in the control reaction, but less or no such formation in the reaction mixture containing the test compound, indicates that the compound interferes with the interaction of the marker and its binding partner. Conversely, the formation of more complex in the presence of compound than in the control reaction indicates that the compound may enhance interaction of the marker and its binding-partner.

[0255] The assay for compounds that interfere with the interaction of the marker with its binding partner may be conducted in a heterogeneous or homogeneous format. Heterogeneous assays involve anchoring either the marker or its binding partner onto a solid phase and detecting complexes anchored to the solid phase at the end of the reaction. In homogeneous assays, the entire reaction is carried out in a liquid phase. In either approach, the order of addition of reactants can be varied to obtain different information about the compounds being tested. For example, test compounds that interfere with the interaction between the markers and the binding partners (e.g., by competition) can be identified by conducting the reaction in the presence of the test substance, i.e., by adding the test substance to the reaction mixture prior to or simultaneously with the marker and its interactive binding partner. Alternatively, test compounds that disrupt preformed complexes, e.g., compounds with higher binding constants that displace one of the components from the complex, can be tested by adding the test compound to the reaction mixture after complexes have been formed. The various formats are briefly described below.

[0256] In a heterogeneous assay system, either the marker or its binding partner is anchored onto a solid surface or matrix, while the other corresponding non-anchored component may be labeled, either directly or indirectly. In practice, microtitre plates are often utilized for this approach. The anchored species can be immobilized by a number of methods, either non-covalent or covalent, that are typically well known to one who practices the art. Non-covalent attachment can often be accomplished simply by coating the solid surface with a solution of the marker or its binding partner and drying. Alternatively, an immobilized antibody specific for the assay component to be anchored can be used for this purpose. Such surfaces can often be prepared in advance and stored.

[0257] In related embodiments, a fusion protein can be provided which adds a domain that allows one or both of the assay components to be anchored to a matrix. For example, glutathione-S-transferase/marker fusion proteins or glutathione-S-transferase/binding partner can be adsorbed onto glutathione sepharose beads (Sigma Chemical, St. Louis, Mo.) or glutathione derivatized microtiter plates, which are then combined with the test compound or the test compound and either the non-adsorbed marker or its binding partner, and the mixture incubated under conditions conducive to complex formation (e.g., physiological conditions). Following incubation, the beads or microtiter plate wells are washed to remove any unbound assay components, the immobilized complex assessed either directly or indirectly, for example, as described above. Alternatively, the complexes can be dissociated from the matrix, and the level of marker binding or activity determined using standard techniques.

[0258] Other techniques for immobilizing proteins on matrices can also be used in the screening assays of the invention. For example, either a marker or a marker binding partner can be immobilized utilizing conjugation of biotin and streptavidin. Biotinylated marker protein or target molecules can be prepared from biotin-NHS (N-hydroxy-succinimide) using techniques known in the art (e.g., biotinylation kit, Pierce Chemicals, Rockford, Ill.), and immobilized in the wells of streptavidin-coated 96 well plates (Pierce Chemical). In certain embodiments, the protein-immobilized surfaces can be prepared in advance and stored.

[0259] In order to conduct the assay, the corresponding partner of the immobilized assay component is exposed to the coated surface with or without the test compound. After the reaction is complete, unreacted assay components are removed (e.g., by washing) and any complexes formed will remain immobilized on the solid surface. The detection of complexes anchored on the solid surface can be accomplished in a number of ways. Where the non-immobilized component is pre-labeled, the detection of label immobilized on the surface indicates that complexes were formed. Where the non-immobilized component is not pre-labeled, an indirect label can be used to detect complexes anchored on the surface; e.g., using a labeled antibody specific for the initially non-immobilized species (the antibody, in turn, can be directly labeled or indirectly labeled with, e.g., a labeled anti-Ig antibody). Depending upon the order of addition of reaction components, test compounds which modulate (inhibit or enhance) complex formation or which disrupt preformed complexes can be detected.

[0260] In an alternate embodiment of the invention, a homogeneous assay may be used. This is typically a reaction, analogous to those mentioned above, which is conducted in a liquid phase in the presence or absence of the test compound. The formed complexes are then separated from unreacted components, and the amount of complex formed is determined. As mentioned for heterogeneous assay systems, the order of addition of reactants to the liquid phase can yield information about which test compounds modulate (inhibit or enhance) complex formation and which disrupt preformed complexes.

[0261] In such a homogeneous assay, the reaction products may be separated from unreacted assay components by any of a number of standard techniques, including but not limited to: differential centrifugation, chromatography, electrophoresis and immunoprecipitation. In differential centrifugation, complexes of molecules may be separated from uncomplexed molecules through a series of centrifugal steps, due to the different sedimentation equilibria of complexes based on their different sizes and densities (see, for example, Rivas, G., and Minton, A. P., Trends Biochem Sci 1993 August;18(8):284-7). Standard chromatographic techniques may also be utilized to separate complexed molecules from uncomplexed ones. For example, gel filtration chromatography separates molecules based on size, and through the utilization of an appropriate gel filtration resin in a column format, for example, the relatively larger complex may be separated from the relatively smaller uncomplexed components. Similarly, the relatively different charge properties of the complex as compared to the uncomplexed molecules may be exploited to differentially separate the complex from the remaining individual reactants, for example through the use of ion-exchange chromatography resins. Such resins and chromatographic techniques are well known to one skilled in the art (see, e.g., Heegaard, 1998, J Mol. Recognit. 11:141-148; Hage and Tweed, 1997, J. Chromatogr. B. Biomed. Sci. Appl., 699:499-525). Gel electrophoresis may also be employed to separate complexed molecules from unbound species (see, e.g., Ausubel et al (eds.), In: Current Protocols in Molecular Biology, J. Wiley & Sons, New York. 1999). In this technique, protein or nucleic acid complexes are separated based on size or charge, for example. In order to maintain the binding interaction during the electrophoretic process, nondenaturing gels in the absence of reducing agent are typically preferred, but conditions appropriate to the particular interactants will be well known to one skilled in the art. Immunoprecipitation is another common technique utilized for the isolation of a protein-protein complex from solution (see, e.g., Ausubel et al (eds.), In: Current Protocols in Molecular Biology, J. Wiley & Sons, New York. 1999). In this technique, all proteins binding to an antibody specific to one of the binding molecules are precipitated from solution by conjugating the antibody to a polymer bead that may be readily collected by centrifugation. The bound assay components are released from the beads (through a specific proteolysis event or other technique well known in the art which will not disturb the protein-protein interaction in the complex), and a second immunoprecipitation step is performed, this time utilizing antibodies specific for the correspondingly different interacting assay component. In this manner, only formed complexes should remain attached to the beads. Variations in complex formation in both the presence and the absence of a test compound can be compared, thus offering information about the ability of the compound to modulate interactions between the marker and its binding partner.

[0262] Also within the scope of the present invention are methods for direct detection of interactions between the marker and its natural binding partner and/or a test compound in a homogeneous or heterogeneous assay system without further sample manipulation. For example, the technique of fluorescence energy transfer may be utilized (see, e.g., Lakowicz et al, U.S. Pat. No. 5,631,169; Stavrianopoulos et al, U.S. Pat. No. 4,868,103). Generally, this technique involves the addition of a fluorophore label on a first ‘donor’ molecule (e.g., marker or test compound) such that its emitted fluorescent energy will be absorbed by a fluorescent label on a second, ‘acceptor’ molecule (e.g., marker or test compound), which in turn is able to fluoresce due to the absorbed energy. Alternately, the ‘donor’ protein molecule may simply utilize the natural fluorescent energy of tryptophan residues. Labels are chosen that emit different wavelengths of light, such that the ‘acceptor’ molecule label may be differentiated from that of the ‘donor’. Since the efficiency of energy transfer between the labels is related to the distance separating the molecules, spatial relationships between the molecules can be assessed. In a situation in which binding occurs between the molecules, the fluorescent emission of the ‘acceptor’ molecule label in the assay should be maximal. An FET binding event can be conveniently measured through standard fluorometric detection means well known in the art (e.g., using a fluorimeter). A test substance which either enhances or hinders participation of one of the species in the preformed complex will result in the generation of a signal variant to that of background. In this way, test substances that modulate interactions between a marker and its binding partner can be identified in controlled assays.

[0263] In another embodiment, modulators of marker expression are identified in a method wherein a cell is contacted with a candidate compound and the expression of mRNA or protein, corresponding to a marker in the cell, is determined. The level of expression of mRNA or protein in the presence of the candidate compound is compared to the level of expression of mRNA or protein in the absence of the candidate compound. The candidate compound can then be identified as a modulator of marker expression based on this comparison. For example, when expression of marker mRNA or protein is greater (statistically significantly greater) in the presence of the candidate compound than in its absence, the candidate compound is identified as a stimulator of marker mRNA or protein expression. Conversely, when expression of marker mRNA or protein is less (statistically significantly less) in the presence of the candidate compound than in its absence, the candidate compound is identified as an inhibitor of marker mRNA or protein expression. The level of marker mRNA or protein expression in the cells can be determined by methods described herein for detecting marker mRNA or protein.

[0264] In another aspect, the invention pertains to a combination of two or more of the assays described herein. For example, a modulating agent can be identified using a cell-based or a cell free assay, and the ability of the agent to modulate the activity of a marker protein can be further confirmed in vivo, e.g., in a whole animal model for cellular transformation and/or tumorigenesis.

[0265] This invention further pertains to novel agents identified by the above-described screening assays. Accordingly, it is within the scope of this invention to further use an agent identified as described herein in an appropriate animal model. For example, an agent identified as described herein (e.g., an marker modulating agent, an antisense marker nucleic acid molecule, an marker-specific antibody, or an marker-binding partner) can be used in an animal model to determine the efficacy, toxicity, or side effects of treatment with such an agent. Alternatively, an agent identified as described herein can be used in an animal model to determine the mechanism of action of such an agent. Furthermore, this invention pertains to uses of novel agents identified by the above-described screening assays for treatments as described herein.

[0266] It is understood that appropriate doses of small molecule agents and protein or polypeptide agents depends upon a number of factors within the knowledge of the ordinarily skilled physician, veterinarian, or researcher. The dose(s) of these agents will vary, for example, depending upon the identity, size, and condition of the subject or sample being treated, further depending upon the route by which the composition is to be administered, if applicable, and the effect which the practitioner desires the agent to have upon the nucleic acid or polypeptide of the invention. Exemplary doses of a small molecule include milligram or microgram amounts per kilogram of subject or sample weight (e.g. about 1 microgram per kilogram to about 500 milligrams per kilogram, about 100 micrograms per kilogram to about 5 milligrams per kilogram, or about 1 microgram per kilogram to about 50 micrograms per kilogram). Exemplary doses of a protein or polypeptide include gram, milligram or microgram amounts per kilogram of subject or sample weight (e.g. about 1 microgram per kilogram to about 5 grams per kilogram, about 100 micrograms per kilogram to about 500 milligrams per kilogram, or about 1 milligram per kilogram to about 50 milligrams per kilogram). It is furthermore understood that appropriate doses of one of these agents depend upon the potency of the agent with respect to the expression or activity to be modulated. Such appropriate doses can be determined using the assays described herein. When one or more of these agents is to be administered to an animal (e.g. a human) in order to modulate expression or activity of a polypeptide or nucleic acid of the invention, a physician, veterinarian, or researcher can, for example, prescribe a relatively low dose at first, subsequently increasing the dose until an appropriate response is obtained. In addition, it is understood that the specific dose level for any particular animal subject will depend upon a variety of factors including the activity of the specific agent employed, the age, body weight, general health, gender, and diet of the subject, the time of administration, the route of administration, the rate of excretion, any drug combination, and the degree of expression or activity to be modulated.

[0267] A pharmaceutical composition of the invention is formulated to be compatible with its intended route of administration. Examples of routes of administration include parenteral, e.g., intravenous, intradermal, subcutaneous, oral (e.g., inhalation), transdermal (topical), transmucosal, and rectal administration. Solutions or suspensions used for parenteral, intradermal, or subcutaneous application can include the following components: a sterile diluent such as water for injection, saline solution, fixed oils, polyethylene glycols, glycerine, propylene glycol or other synthetic solvents; antibacterial agents such as benzyl alcohol or methyl parabens; antioxidants such as ascorbic acid or sodium bisulfite; chelating agents such as ethylenediamine-tetraacetic acid; buffers such as acetates, citrates or phosphates and agents for the adjustment of tonicity such as sodium chloride or dextrose. pH can be adjusted with acids or bases, such as hydrochloric acid or sodium hydroxide. The parenteral preparation can be enclosed in ampules, disposable syringes or multiple dose vials made of glass or plastic.

[0268] Pharmaceutical compositions suitable for injectable use include sterile aqueous solutions (where water soluble) or dispersions and sterile powders for the extemporaneous preparation of sterile injectable solutions or dispersions. For intravenous administration, suitable carriers include physiological saline, bacteriostatic water, Cremophor EL (BASF; Parsippany, N.J.) or phosphate buffered saline (PBS). In all cases, the composition must be sterile and should be fluid to the extent that easy syringability exists. It must be stable under the conditions of manufacture and storage and must be preserved against the contaminating action of microorganisms such as bacteria and fungi. The carrier can be a solvent or dispersion medium containing, for example, water, ethanol, polyol (for example, glycerol, propylene glycol, and liquid polyethylene glycol, and the like), and suitable mixtures thereof. The proper fluidity can be maintained, for example, by the use of a coating such as lecithin, by the maintenance of the required particle size in the case of dispersion and by the use of surfactants. Prevention of the action of microorganisms can be achieved by various antibacterial and antifungal agents, for example, parabens, chlorobutanol, phenol, ascorbic acid, thimerosal, and the like. In many cases, it will be preferable to include isotonic agents, for example, sugars, polyalcohols such as mannitol, sorbitol, or sodium chloride in the composition. Prolonged absorption of the injectable compositions can be brought about by including in the composition an agent which delays absorption, for example, aluminum monostearate and gelatin.

[0269] Sterile injectable solutions can be prepared by incorporating the active compound (e.g., a polypeptide or antibody) in the required amount in an appropriate solvent with one or a combination of ingredients enumerated above, as required, followed by filtered sterilization. Generally, dispersions are prepared by incorporating the active compound into a sterile vehicle which contains a basic dispersion medium, and then incorporating the required other ingredients from those enumerated above. In the case of sterile powders for the preparation of sterile injectable solutions, the preferred methods of preparation are vacuum drying and freeze-drying which yields a powder of the active ingredient plus any additional desired ingredient from a previously sterile-filtered solution thereof.

[0270] Oral compositions generally include an inert diluent or an edible carrier. They can be enclosed in gelatin capsules or compressed into tablets. For the purpose of oral therapeutic administration, the active compound can be incorporated with excipients and used in the form of tablets, troches, or capsules. Oral compositions can also be prepared using a fluid carrier for use as a mouthwash, wherein the compound in the fluid carrier is applied orally and swished and expectorated or swallowed.

[0271] Pharmaceutically compatible binding agents, and/or adjuvant materials can be included as part of the composition. The tablets, pills, capsules, troches, and the like can contain any of the following ingredients, or compounds of a similar nature: a binder such as microcrystalline cellulose, gum tragacanth or gelatin; an excipient such as starch or lactose, a disintegrating agent such as alginic acid, Primogel, or corn starch; a lubricant such as magnesium stearate or Sterotes; a glidant such as colloidal silicon dioxide; a sweetening agent such as sucrose or saccharin; or a flavoring agent such as peppermint, methyl salicylate, or orange flavoring.

[0272] For administration by inhalation, the compounds are delivered in the form of an aerosol spray from a pressurized container or dispenser which contains a suitable propellant, e.g., a gas such as carbon dioxide, or a nebulizer.

[0273] Systemic administration can also be by transmucosal or transdermal means. For transmucosal or transdermal administration, penetrants appropriate to the barrier to be permeated are used in the formulation. Such penetrants are generally known in the art, and include, for example, for transmucosal administration, detergents, bile salts, and fusidic acid derivatives. Transmucosal administration can be accomplished through the use of nasal sprays or suppositories. For transdermal administration, the active compounds are formulated into ointments, salves, gels, or creams as generally known in the art.

[0274] The compounds can also be prepared in the form of suppositories (e.g., with conventional suppository bases such as cocoa butter and other glycerides) or retention enemas for rectal delivery.

[0275] In one embodiment, the active compounds are prepared with carriers that will protect the compound against rapid elimination from the body, such as a controlled release formulation, including implants and microencapsulated delivery systems. Biodegradable, biocompatible polymers can be used, such as ethylene vinyl acetate, polyanhydrides, polyglycolic acid, collagen, polyorthoesters, and polylactic acid. Methods for preparation of such formulations will be apparent to those skilled in the art. The materials can also be obtained-commercially from Alza Corporation and Nova Pharmaceuticals, Inc. Liposomal suspensions (including liposomes having monoclonal antibodies incorporated therein or thereon) can also be used as pharmaceutically acceptable carriers. These can be prepared according to methods known to those skilled in the art, for example, as described in U.S. Pat. No. 4,522,811.

[0276] It is especially advantageous to formulate oral or parenteral compositions in dosage unit form for ease of administration and uniformity of dosage. Dosage unit form as used herein refers to physically discrete units suited as unitary dosages for the subject to be treated; each unit containing a predetermined quantity of active compound calculated to produce the desired therapeutic effect in association with the required pharmaceutical carrier. The specification for the dosage unit forms of the invention are dictated by and directly dependent on the unique characteristics of the active compound and the particular therapeutic effect to be achieved, and the limitations inherent in the art of compounding such an active compound for the treatment of individuals.

[0277] For antibodies, the preferred dosage is 0.1 mg/kg to 100 mg/kg of body weight (generally 10 mg/kg to 20 mg/kg). If the antibody is to act in the brain, a dosage of 50 mg/kg to 100 mg/kg is usually appropriate. Generally, partially human antibodies and fully human antibodies have a longer half-life within the human body than other antibodies. Accordingly, lower dosages and less frequent administration is often possible. Modifications such as lipidation can be used to stabilize antibodies and to enhance uptake and tissue penetration (e.g., into the prostate epithelium). A method for lipidation of antibodies is described by Cruikshank et al. (1997) J. Acquired Immune Deficiency Syndromes and Human Retrovirology 14:193.

[0278] The nucleic acid molecules corresponding to a marker of the invention can be inserted into vectors and used as gene therapy vectors. Gene therapy vectors can be delivered to a subject by, for example, intravenous injection, local administration (U.S. Pat. No. 5,328,470), or by stereotactic injection (see, e.g., Chen et al., 1994, Proc. Natl. Acad. Sci. USA 91:3054-3057). The pharmaceutical preparation of the gene therapy vector can include the gene therapy vector in an acceptable diluent, or can comprise a slow release matrix in which the gene delivery vehicle is imbedded. Alternatively, where the complete gene delivery vector can be produced intact from recombinant cells, e.g. retroviral vectors, the pharmaceutical preparation can include one or more cells which produce the gene delivery system.

[0279] The pharmaceutical compositions can be included in a container, pack, or dispenser together with instructions for administration.

[0280] V. Electronic Apparatus Readable Media and Arrays

[0281] Electronic apparatus readable media comprising a prostate cancer marker of the present invention is also provided. As used herein, “electronic apparatus readable media” refers to any suitable medium for storing, holding or containing data or information that can be read and accessed directly by an electronic apparatus. Such media can include, but are not limited to: magnetic storage media, such as floppy discs, hard disc storage medium, and magnetic tape; optical storage media such as compact disc; electronic storage media such as RAM, ROM, EPROM, EEPROM and the like; general hard disks and hybrids of these categories such as magnetic/optical storage media. The medium is adapted or configured for having recorded thereon a marker of the present invention.

[0282] As used herein, the term “electronic apparatus” is intended to include any suitable computing or processing apparatus or other device configured or adapted for storing data or information. Examples of electronic apparatus suitable for use with the present invention include stand-alone computing apparatus; networks, including a local area network (LAN), a wide area network (WAN) Internet, Intranet, and Extranet; electronic appliances such as a personal digital assistants (PDAs), cellular phone, pager and the like; and local and distributed processing systems.

[0283] As used herein, “recorded” refers to a process for storing or encoding information on the electronic apparatus readable medium. Those skilled in the art can readily adopt any of the presently known methods for recording information on known media to generate manufactures.comprising the markers of the present invention.

[0284] A variety of software programs and formats can be used to store the marker information of the present invention on the electronic apparatus readable medium. For example, the nucleic acid sequence corresponding to the markers can be represented in a word processing text file, formatted in commercially-available software such as WordPerfect and MicroSoft Word, or represented in the form of an ASCII file, stored in a database application, such as DB2, Sybase, Oracle, or the like, as well as in other forms. Any number of dataprocessor structuring formats (e.g., text file or database) may be employed in order to obtain or create a medium having recorded thereon the markers of the present invention.

[0285] By providing the markers of the invention in readable form, one can routinely access the marker sequence information for a variety of purposes. For example, one skilled in the art can use the nucleotide or amino acid sequences of the present invention in readable form to compare a target sequence or target structural motif with the sequence information stored within the data storage means. Search means are used to identify fragments or regions of the sequences of the invention which match a particular target sequence or target motif.

[0286] The present invention therefore provides a medium for holding instructions for performing a method for determining whether a subject has prostate cancer or a pre-disposition to prostate cancer, wherein the method comprises the steps of determining the presence or absence of a prostate cancer marker and based on the presence or absence of the prostate cancer marker, determining whether the subject has prostate cancer or a pre-disposition to prostate cancer and/or recommending a particular treatment for the prostate cancer or pre-prostate cancer condition.

[0287] The present invention further provides in an electronic system and/or in a network, a method for determining whether a subject has prostate cancer or a pre-disposition to prostate cancer associated with a prostate cancer marker wherein the method comprises the steps of determining the presence or absence of the prostate cancer marker, and based on the presence or absence of the prostate cancer marker, determining whether the subject has prostate cancer or a pre-disposition to prostate cancer, and/or recommending a particular treatment for the prostate cancer or pre-prostate cancer condition. The method may further comprise the step of receiving phenotypic information associated with the subject and/or acquiring from a network phenotypic information associated with the subject.

[0288] The present invention also provides in a network, a method for determining whether a subject has prostate cancer or a pre-disposition to prostate cancer associated with a prostate cancer marker, said method comprising the steps of receiving information associated with the prostate cancer marker receiving phenotypic information associated with the subject, acquiring information from the network corresponding to the prostate cancer marker and/or prostate cancer, and based on one or more of the phenotypic information, the prostate cancer marker, and the acquired information, determining whether the subject has prostate cancer or a pre-disposition to prostate cancer. The method may further comprise the step of recommending a particular treatment for the prostate cancer or pre-prostate cancer condition.

[0289] The present invention also provides a business method for determining whether a subject has prostate cancer or a pre-disposition to prostate cancer, said method comprising the steps of receiving information associated with the prostate cancer marker, receiving phenotypic information associated with the subject, acquiring information from the network corresponding to the prostate cancer marker and/or prostate cancer, and based on one or more of the phenotypic information, the prostate cancer marker, and the acquired information, determining whether the subject has prostate cancer or a pre-disposition to prostate cancer. The method may further comprise the step of recommending a particular treatment for the prostate cancer or pre-prostate cancer condition.

[0290] The invention also includes an array comprising a prostate cancer marker of the present invention. The array can be used to assay expression of one or more genes in the array. In one embodiment, the array can be used to assay gene expression in a tissue to ascertain tissue specificity of genes in the array. In this manner, up to about 7600 genes can be simultaneously assayed for expression. This allows a profile to be developed showing a battery of genes specifically expressed in one or more tissues.

[0291] In addition to such qualitative determination, the invention allows the quantitation of gene expression. Thus, not only tissue specificity, but also the level of expression of a battery of genes in the tissue is ascertainable. Thus, genes can be grouped on the basis of their tissue expression per se and level of expression in that tissue. This is useful, for example, in ascertaining the relationship of gene expression between or among tissues. Thus, one tissue can be perturbed and the effect on gene expression in a second tissue can be determined. In this context, the effect of one cell type on another cell type in response to a biological stimulus can be determined. Such a determination is useful, for example, to know the effect of cell-cell interaction at the level of gene expression. If an agent is administered therapeutically to treat one cell type but has an undesirable effect on another cell type, the invention provides an assay to determine the molecular basis of the undesirable effect and thus provides the opportunity to co-administer a counteracting agent or otherwise treat the undesired effect. Similarly, even within a single cell type, undesirable biological effects can be determined at the molecular level. Thus, the effects of an agent on expression of other than the target gene can be ascertained and counteracted.

[0292] In another embodiment, the array can be used to monitor the time course of expression of one or more genes in the array. This can occur in various biological contexts, as disclosed herein, for example development of prostate cancer, progression of prostate cancer, and processes, such a cellular transformation associated with prostate cancer.

[0293] The array is also useful for ascertaining the effect of the expression of a gene on the expression of other genes in the same cell or in different cells. This provides, for example, for a selection of alternate molecular targets for therapeutic intervention if the ultimate or downstream target cannot be regulated.

[0294] The array is also useful for ascertaining differential expression patterns of one or more genes in normal and abnormal cells. This provides a battery of genes that could serve as a molecular target for diagnosis or therapeutic intervention.

[0295] VI. Predictive Medicine

[0296] The present invention pertains to the field of predictive medicine in which diagnostic assays, prognostic assays, pharmacogenomics, and monitoring clinical trails are used for prognostic (predictive) purposes to thereby treat an individual prophylactically. Accordingly, one aspect of the present invention relates to diagnostic assays for determining the level of expression of polypeptides or nucleic acids corresponding to one or more markers of the invention, in order to determine whether an individual is at risk of developing prostate cancer. Such assays can be used for prognostic or predictive purposes to thereby prophylactically treat an individual prior to the onset of the cancer.

[0297] Yet another aspect of the invention pertains to monitoring the influence of agents (e.g., drugs or other compounds administered either to inhibit prostate cancer or to treat or prevent any other disorder {i.e. in order to understand any prostate carcinogenic effects that such treatment may have }) on the expression or activity of a marker of the invention in clinical trials. These and other agents are described in further detail in the following sections.

[0298] A. Diagnostic Assays

[0299] An exemplary method for detecting the presence or absence of a polypeptide or nucleic acid corresponding to a marker of the invention in a biological sample involves obtaining a biological sample (e.g. a prostate smear) from a test subject and contacting the biological sample with a compound or an agent capable of detecting the polypeptide or nucleic acid (e.g., mRNA, genomic DNA, or cDNA). The detection methods of the invention can thus be used to detect mRNA, protein, cDNA, or genomic DNA, for example, in a biological sample in vitro as well as in vivo. For example, in vitro techniques for detection of mRNA include Northern hybridizations and in situ hybridizations. In vitro techniques for detection of a polypeptide corresponding to a marker of the invention include enzyme linked immunosorbent assays (ELISAs), Western blots, immunoprecipitations, immunohistochemistry and immunofluorescence. In vitro techniques for detection of genomic DNA include Southern hybridizations. Furthermore, in vivo techniques for detection of a polypeptide corresponding to a marker of the invention include introducing into a subject a labeled antibody directed against the polypeptide. For example, the antibody can be labeled with a radioactive marker whose presence and location in a subject can be detected by standard imaging techniques.

[0300] A general principle of such diagnostic and prognostic assays involves preparing a sample or reaction mixture that may contain a marker, and a probe, under appropriate conditions and for a time sufficient to allow the marker and probe to interact and bind, thus forming a complex that can be removed and/or detected in the reaction mixture. These assays can be conducted in a variety of ways.

[0301] For example, one method to conduct such an assay would involve anchoring the marker or probe onto a solid phase support, also referred to as a substrate, and detecting target marker/probe complexes anchored on the solid phase at the end of the reaction. In one embodiment of such a method, a sample from a subject, which is to be assayed for presence and/or concentration of marker, can be anchored onto a carrier or solid phase support. In another embodiment, the reverse situation is possible, in which the probe can be anchored to a solid phase and a sample from a subject can be allowed to react as an unanchored component of the assay.

[0302] There are many established methods for anchoring assay components to a solid phase. These include, without limitation, marker or probe molecules which are immobilized through conjugation of biotin and streptavidin. Such biotinylated assay components can be prepared from biotin-NHS (N-hydroxy-succinimide) using techniques known in the art (e.g., biotinylation kit, Pierce Chemicals, Rockford, Ill.), and immobilized in the wells of streptavidin-coated 96 well plates (Pierce Chemical). In certain embodiments, the surfaces with immobilized assay components can be prepared in advance and stored.

[0303] Other suitable carriers or solid phase supports for such assays include any material capable of binding the class of molecule to which the marker or probe belongs. Well-known supports or carriers include, but are not limited to, glass, polystyrene, nylon, polypropylene, nylon, polyethylene, dextran, amylases, natural and modified celluloses, polyacrylamides, gabbros, and magnetite.

[0304] In order to conduct assays with the above mentioned approaches, the non-immobilized component is added to the solid phase upon which the second component is anchored. After the reaction is complete, uncomplexed components may be removed (e.g., by washing) under conditions such that any complexes formed will remain immobilized upon the solid phase. The detection of marker/probe complexes anchored to the solid phase can be accomplished in a number of methods outlined herein.

[0305] In a preferred embodiment, the probe, when it is the unanchored assay component, can be labeled for the purpose of detection and readout of the assay, either directly or indirectly, with detectable labels discussed herein and which are well-known to one skilled in the art.

[0306] It is also possible to directly detect marker/probe complex formation without further manipulation or labeling of either component (marker or probe), for example by utilizing the technique of fluorescence energy transfer (see, for example, Lakowicz et al., U.S. Pat. No. 5,631,169; Stavrianopoulos, et al., U.S. Pat. No. 4,868,103). A fluorophore label on the first, ‘donor’ molecule is selected such that, upon excitation with incident light of appropriate wavelength, its emitted fluorescent energy will be absorbed by a fluorescent label on a second ‘acceptor’ molecule, which in turn is able to fluoresce due to the absorbed energy. Alternately, the ‘donor’ protein molecule may simply utilize the natural fluorescent energy of tryptophan residues. Labels are chosen that emit different wavelengths of light, such that the ‘acceptor’ molecule label may be differentiated from that of the ‘donor’. Since the efficiency of energy transfer between the labels is related to the distance separating the molecules, spatial relationships between the molecules can be assessed. In a situation in which binding occurs between the molecules, the fluorescent emission of the ‘acceptor’ molecule label in the assay should be maximal. An FET binding event can be conveniently measured through standard fluorometric detection means well known in the art (e.g., using a fluorimeter).

[0307] In another embodiment, determination of the ability of a probe to recognize a marker can be accomplished without labeling either assay component (probe or marker) by utilizing a technology such as real-time Biomolecular Interaction Analysis (BIA) (see, e.g., Sjolander, S. and Urbaniczky, C., 1991, Anal. Chem. 63:2338-2345 and Szabo et al., 1995, Curr. Opin. Struct. Biol. 5:699-705). As used herein, “BIA” or “surface plasmon resonance” is a technology for studying biospecific interactions in real time, without labeling any of the interactants (e.g., BIAcore). Changes in the mass at the binding surface (indicative of a binding event) result in alterations of the refractive index of light near the surface (the optical phenomenon of surface plasmon resonance (SPR)), resulting in a detectable signal which can be used as an indication of real-time reactions between biological molecules.

[0308] Alternatively, in another embodiment, analogous diagnostic and prognostic assays can be conducted with marker and probe as solutes in a liquid phase. In such an assay, the complexed marker and probe are separated from uncomplexed components by any of a number of standard techniques, including but not limited to: differential centrifugation, chromatography, electrophoresis and immunoprecipitation. In differential centrifugation, marker/probe complexes may be separated from uncomplexed assay components through a series of centrifugal steps, due to the different sedimentation equilibria of complexes based on their different sizes and densities (see, for example, Rivas, G., and Minton, A. P., 1993, Trends Biochem Sci. 18(8):284-7). Standard chromatographic techniques may also be utilized to separate complexed molecules from uncomplexed ones. For example, gel filtration chromatography separates molecules based on size, and through the utilization of an appropriate gel filtration resin in a column format, for example, the relatively larger complex may be separated from the relatively smaller uncomplexed components. Similarly, the relatively different charge properties of the marker/probe complex as compared to the uncomplexed components may be exploited to differentiate the complex from uncomplexed components, for example through the utilization of ion-exchange chromatography resins. Such resins and chromatographic techniques are well known to one skilled in the art (see, e.g., Heegaard, N. H., 1998, J. Mol. Recognit. Winter 11(1-6):14_; Hage, D. S., and Tweed, S. A. J Chromatogr B Biomed Sci Appl 1997 Oct. 10;699(1-2):499-525). Gel electrophoresis may also be employed to separate complexed assay components from unbound components (see, e.g., Ausubel et al., ed., Current Protocols in Molecular Biology, John Wiley & Sons, New York, 1987-1999). In this technique, protein or nucleic acid complexes are separated based on size or charge, for example. In order to maintain the binding interaction during the electrophoretic process, non-denaturing gel matrix materials and conditions in the absence of reducing agent are typically preferred. Appropriate conditions to the particular assay and components thereof will be well known to one skilled in the art.

[0309] In a particular embodiment, the level of mRNA corresponding to the marker can be determined both by in situ and by in vitro formats in a biological sample using methods known in the art. The term “biological sample” is intended to include tissues, cells, biological fluids and isolates thereof, isolated from a subject, as well as tissues, cells and fluids present within a subject. Many expression detection methods use isolated RNA. For in vitro methods, any RNA isolation technique that does not select against the isolation of mRNA can be utilized for the purification of RNA from prostate cells (see, e.g., Ausubel et al., ed., Current Protocols in Molecular Biology, John Wiley & Sons, New York 1987-1999). Additionally, large numbers of tissue samples can readily be processed using techniques well known to those of skill in the art, such as, for example, the single-step RNA isolation process of Chomczynski (1989, U.S. Pat. No. 4,843,155).

[0310] The isolated mRNA can be used in hybridization or amplification assays that include, but are not limited to, Southern or Northern analyses, polymerase chain reaction analyses and probe arrays. One preferred diagnostic method for the detection of mRNA levels involves contacting the isolated mRNA with a nucleic acid molecule (probe) that can hybridize to the mRNA encoded by the gene being detected. The nucleic acid probe can be, for example, a full-length cDNA, or a portion thereof, such as an oligonucleotide of at least 7, 15, 30, 50, 100, 250 or 500 nucleotides in length and sufficient to specifically hybridize under stringent conditions to a mRNA or genomic DNA encoding a marker of the present invention. Other suitable probes for use in the diagnostic assays of the invention are described herein. Hybridization of an mRNA with the probe indicates that the marker in question is being expressed.

[0311] In one format, the mRNA is immobilized on a solid surface and contacted with a probe, for example by running the isolated mRNA on an agarose gel and transferring the mRNA from the gel to a membrane, such as nitrocellulose. In an alternative format, the probe(s) are immobilized on a solid surface and the mRNA is contacted with the probe(s), for example, in an Affymetrix gene chip array. A skilled artisan can readily adapt known mRNA detection methods for use in detecting the level of mRNA encoded by the markers of the present invention.

[0312] An alternative method for determining the level of mRNA corresponding to a marker of the present invention in a sample involves the process of nucleic acid amplification, e.g., by rtPCR (the experimental embodiment set forth in Mullis, 1987, U.S. Pat. No. 4,683,202), ligase chain reaction (Barany, 1991, Proc. Natl. Acad. Sci. USA, 88:189-193), self sustained sequence replication (Guatelli et al., 1990, Proc. Natl. Acad Sci. USA 87:1874-1878), transcriptional amplification system (Kwoh et al., 1989, Proc. Natl. Acad. Sci. USA 86:1173-1177), Q-Beta Replicase (Lizardi et al., 1988, Bio/Technology 6:1197), rolling circle replication (Lizardi et al., U.S. Pat. No. 5,854,033) or any other nucleic acid amplification method, followed by the detection of the amplified molecules using techniques well known to those of skill in the art. These detection schemes are especially useful for the detection of nucleic acid molecules if such molecules are present in very low numbers. As used herein, amplification primers are defined as being a pair of nucleic acid molecules that can anneal to 5′ or 3′ regions of a gene (plus and minus strands, respectively, or vice-versa) and contain a short region in between. In general, amplification primers are from about 10 to 30 nucleotides in length and flank a region from about 50 to 200 nucleotides in length. Under appropriate conditions and with appropriate reagents, such primers permit the amplification of a nucleic acid molecule comprising the nucleotide sequence flanked by the primers.

[0313] For in situ methods, mRNA does not need to be isolated from the prostate cells prior to detection. In such methods, a cell or tissue sample is prepared/processed using known histological methods. The sample is then immobilized on a support, typically a glass slide, and then contacted with a probe that can hybridize to mRNA that encodes the marker.

[0314] As an alternative to making determinations based on the absolute expression level of the marker, determinations may be based on the normalized expression level of the marker. Expression levels are normalized by correcting the absolute expression level of a marker by comparing its expression to the expression of a gene that is not a marker, e.g., a housekeeping gene that is constitutively expressed. Suitable genes for normalization include housekeeping genes such as the actin gene, or epithelial cell-specific genes. This normalization allows the comparison of the expression level in one sample, e.g., a patient sample, to another sample, e.g., a non-prostate cancer sample, or between samples from different sources.

[0315] Alternatively, the expression level can be provided as a relative expression level. To determine a relative expression level of a marker, the level of expression of the marker is determined for 10 or more samples of normal versus cancer cell isolates, preferably 50 or more samples, prior to the determination of the expression level for the sample in question. The mean expression level of each of the genes assayed in the larger number of samples is determined and this is used as a baseline expression level for the marker. The expression level of the marker determined for the test sample (absolute level of expression) is then divided by the mean expression value obtained for that marker. This provides a relative expression level.

[0316] Preferably, the samples used in the baseline determination will be from prostate cancer or from non-prostate cancer cells of prostate tissue. The choice of the cell source is dependent on the use of the relative expression level. Using expression found in normal tissues as a mean expression score aids in validating whether the marker assayed is prostate specific (versus normal cells). In addition, as more data is accumulated, the mean expression value can be revised, providing improved relative expression values based on accumulated data. Expression data from prostate cells provides a means for grading the severity of the prostate cancer state.

[0317] In another embodiment of the present invention, a polypeptide corresponding to a marker is detected. A preferred agent for detecting a polypeptide of the invention is an antibody capable of binding to a polypeptide corresponding to a marker of the invention, preferably an antibody with a detectable label. Antibodies can be polyclonal, or more preferably, monoclonal. An intact antibody, or a fragment thereof (e.g., Fab or F(ab′)₂) can be used. The term “labeled”, with regard to the probe or antibody, is intended to encompass direct labeling of the probe or antibody by coupling (i.e., physically linking) a detectable substance to the probe or antibody, as well as indirect labeling of the probe or antibody by reactivity with another reagent that is directly labeled. Examples of indirect labeling include detection of a primary antibody using a fluorescently labeled secondary antibody and end-labeling of a DNA probe with biotin such that it can be detected with fluorescently labeled streptavidin.

[0318] Proteins from prostate cells can be isolated using techniques that are well known to those of skill in the art. The protein isolation methods employed can, for example, be such as those described in Harlow and Lane (Harlow and Lane, 1988, Antibodies: A Laboratory Manual, Cold Spring Harbor Laboratory Press, Cold Spring Harbor, N.Y.).

[0319] A variety of formats can be employed to determine whether a sample contains a protein that binds to a given antibody. Examples of such formats include, but are not limited to, enzyme immunoassay (EIA), radioimmunoassay (RIA), Western blot analysis, immunohistochemistry and enzyme linked immunoabsorbant assay (ELISA). A skilled artisan can readily adapt known protein/antibody detection methods for use in determining whether prostate cells express a marker of the present invention.

[0320] In one format, antibodies, or antibody fragments, can be used in methods such as Western blots, immunohistochemistry or immunofluorescence techniques to detect the expressed proteins. In such uses, it is generally preferable to immobilize either the antibody, proteins, or cells containing proteins, on a solid support. Well-known supports or carriers include glass, polystyrene, polypropylene, polyethylene, dextran, nylon, amylases, natural and modified celluloses, polyacrylamides, gabbros, and magnetite.

[0321] One skilled in the art will know many other suitable carriers for binding antibody or antigen, and will be able to adapt such support for use with the present invention. For example, protein isolated from prostate cells can be run on a polyacrylamide gel electrophoresis and immobilized onto a solid phase support such as nitrocellulose. The support can then be washed with suitable buffers followed by treatment with the detectably labeled antibody. The solid phase support can then be washed with the buffer a second time to remove unbound antibody. The amount of bound label on the solid support can then be detected by conventional means.

[0322] The invention also encompasses kits for detecting the presence of a polypeptide or nucleic acid corresponding to a marker of the invention in a biological sample. Such kits can be used to determine if a subject is suffering from or is at increased risk of developing prostate cancer. For example, the kit can comprise a labeled compound or agent capable of detecting a polypeptide or an mRNA encoding a polypeptide corresponding to a marker of the invention in a biological sample and means for determining the amount of the polypeptide or mRNA in the sample (e.g., an antibody which binds the polypeptide or an oligonucleotide probe which binds to DNA or mRNA encoding the polypeptide). Kits can also include instructions for interpreting the results obtained using the kit.

[0323] For antibody-based kits, the kit can comprise, for example: (1) a first antibody (e.g., attached to a solid support) which binds to a polypeptide corresponding to a marker of the invention; and, optionally, (2) a second, different antibody which binds to either the polypeptide or the first antibody and is conjugated to a detectable label.

[0324] For oligonucleotide-based kits, the kit can comprise, for example: (1) an oligonucleotide, e.g., a detectably labeled oligonucleotide, which hybridizes to a nucleic acid sequence encoding a polypeptide corresponding to a marker of the invention or (2) a pair of primers useful for amplifying a nucleic acid molecule corresponding to a marker of the.invention. The kit can also comprise, e.g., a buffering agent, a preservative, or a protein stabilizing agent. The kit can further comprise components necessary for detecting the detectable label (e.g., an enzyme or a substrate). The kit can also contain a control sample or a series of control samples which can be assayed and compared to the test sample. Each component of the kit can be enclosed within an individual container and all of the various containers can be within a single package, along with instructions for interpreting the results of the assays performed using the kit.

[0325] B. Pharmacogenomics

[0326] Agents or modulators which have a stimulatory or inhibitory effect on expression of a marker of the invention can be administered to individuals to treat (prophylactically or therapeutically) prostate cancer in the patient. In conjunction with such treatment, the pharmacogenomics (i.e., the study of the relationship between an individual's genotype and that individual's response to a foreign compound or drug) of the individual may be considered. Differences in metabolism of therapeutics can lead to severe toxicity or therapeutic failure by altering the relation between dose and blood concentration of the pharmacologically active drug. Thus, the pharmacogenomics of the individual permits the selection of effective agents (e.g., drugs) for prophylactic or therapeutic treatments based on a consideration of the individual's genotype. Such pharmacogenomics can further be used to determine appropriate dosages and therapeutic regimens. Accordingly, the level of expression of a marker of the invention in an individual can be determined to thereby select appropriate agent(s) for therapeutic or prophylactic treatment of the individual.

[0327] Pharmacogenomics deals with clinically significant variations in the response to drugs due to altered drug disposition and abnormal action in affected persons. See, e.g., Linder (1997) Clin. Chem. 43(2):254-266. In general, two types of pharmacogenetic conditions can be differentiated. Genetic conditions transmitted as a single factor altering the way drugs act on the body are referred to as “altered drug action.” Genetic conditions transmitted as single factors altering the way the body acts on drugs are referred to as “altered drug metabolism”. These pharmacogenetic conditions can occur either as rare defects or as polymorphisms. For example, glucose-6-phosphate dehydrogenase (G6PD) deficiency is a common inherited enzymopathy in which the main clinical complication is hemolysis after ingestion of oxidant drugs (anti-malarials, sulfonamides, analgesics, nitrofurans) and consumption of fava beans.

[0328] As an illustrative embodiment, the activity of drug metabolizing enzymes is a major determinant of both the intensity and duration of drug action. The discovery of genetic polymorphisms of drug metabolizing enzymes (e.g., N-acetyltransferase 2 (NAT 2) and cytochrome P450 enzymes CYP2D6 and CYP2C19) has provided an explanation as to why some patients do not obtain the expected drug effects or show exaggerated drug response and serious toxicity after taking the standard and safe dose of a drug. These polymorphisms are expressed in two phenotypes in the population, the extensive metabolizer (EM) and poor metabolizer (PM). The prevalence of PM is different among different populations. For example, the gene coding for CYP2D6 is highly polymorphic and several mutations have been identified in PM, which all lead to the absence of functional CYP2D6. Poor metabolizers of CYP2D6 and CYP2C 19 quite frequently experience exaggerated drug response and side effects when they receive standard doses. If a metabolite is the active therapeutic moiety, a PM will show no therapeutic response, as demonstrated for the analgesic effect of codeine mediated by its CYP2D6-formed metabolite morphine. The other extreme are the so called ultra-rapid metabolizers who do not respond to standard doses. Recently, the molecular basis of ultra-rapid metabolism has been identified to be due to CYP2D6 gene amplification.

[0329] Thus, the level of expression of a marker of the invention in an individual can be determined to thereby select appropriate agent(s) for therapeutic or prophylactic treatment of the individual. In addition, pharmacogenetic studies can be used to apply genotyping of polymorphic alleles encoding drug-metabolizing enzymes to the identification of an individual's drug responsiveness phenotype. This knowledge, when applied to dosing or drug selection, can avoid adverse reactions or therapeutic failure and thus enhance therapeutic or prophylactic efficiency when treating a subject with a modulator of expression of a marker of the invention.

[0330] This invention also provides a process for preparing a database comprising at least one of the markers set forth in Tables 1-9. For example, th9 polynucleotide sequences are stored in a digital storage medium such that a data processing system for standardized representation of the genes that identify a prostate cancer cell is compiled. The data processing system is useful to analyze gene expression between two-cells by first selecting a cell suspected of being of a neoplastic phenotype or genotype and then isolating polynucleotides from the cell. The isolated polynucleotides are sequenced. The sequences from the sample are compared with the sequence(s) present in the database using homology search techniques. Greater than 90%, more preferably greater than 95% and more preferably, greater than or equal to 97% sequence identity between the test sequence and the polynucleotides of the present invention is a positive indication that the polynucleotide has been isolated from a prostate cancer cell as defined above.

[0331] In an alternative embodiment, the polynucleotides of this invention are sequenced and the information regarding sequence and in some embodiments, relative expression, is stored in any functionally relevant program, e.g., in Compare Report using the SAGE software (available though Dr. Ken Kinzler at John Hopkins University). The Compare Report provides a tabulation of the polynucleotide sequences and their abundance for the samples normalized to a defined number of polynucleotides per library (say 25,000). This is then imported into MS-ACCESS either directly or via copying the data into an Excel spreadsheet first and then from there into MS-ACCESS for additional manipulations. Other programs such as SYBASE or Oracle that permit the comparison of polynucleotide numbers could be used as alternatives to MS-ACCESS. Enhancements to the software can be designed to incorporate these additional functions. These functions consist in standard Boolean, algebraic, and text search operations, applied in various combinations to reduce a large input set of polynucleotides to a manageable subset of a polynucleotide of specifically defined interest.

[0332] One skilled in the art may create groups containing one or more project(s) by combining the counts of specific polynucleotides within a group (e.g., GroupNormal=Normal1+Normal2, GroupTumor1+TumorCellLine). Additional characteristic values are also calculated for each tag in the group (e.g., average count, minimum count, maximum count). One skilled in the art may calculate individual tag count ratios between groups, for example the ratio of the average GroupNormal count to the average GroupTumor count for each polynucleotide. A statistical measure of the significance of observed differences in tag counts between groups may be calculated.

[0333] C. Monitoring Clinical Trials

[0334] Monitoring the influence of agents (e.g., drug compounds) on the level of expression of a marker of the invention can be applied not only in basic drug screening, but also in clinical trials. For example, the effectiveness of an agent to affect marker expression can be monitored in clinical trials of subjects receiving treatment for prostate cancer. In a preferred embodiment, the present invention provides a method for monitoring the effectiveness of treatment of a subject with an agent (e.g., an agonist, antagonist, peptidomimetic, protein, peptide, nucleic acid, small molecule, or other drug candidate) comprising the steps of (i) obtaining a pre-administration sample from a subject prior to administration of the agent; (ii) detecting the level of expression of one or more selected markers of the invention in the pre-administration sample; (iii) obtaining one or more post-administration samples from the subject; (iv) detecting the level of expression of the marker(s) in the post-administration samples; (v) comparing the level of expression of the marker(s) in the pre-administration sample with the level of expression of the marker(s) in the post-administration sample or samples; and (vi) altering the administration of the agent to the subject accordingly. For example, increased administration of the agent can be desirable to increase expression of the marker(s) to higher levels than detected, i.e., to increase the effectiveness of the agent. Alternatively, decreased administration of the agent can be desirable to decrease expression of the marker(s) to lower levels than detected, i.e., to decrease the effectiveness of the agent.

[0335] D. Surrogate Markers

[0336] The markers of the invention may serve as surrogate markers for one or more disorders or disease states or for conditions leading up to disease states, and in particular, prostate cancer. As used herein, a “surrogate marker” is an objective biochemical marker which correlates with the absence or presence of a disease or disorder, or with the progression of a disease or disorder (e.g., with the presence or absence of a tumor). The presence or quantity of such markers is independent of the disease. Therefore, these markers may serve to indicate whether a particular course of treatment is effective in lessening a disease state or disorder. Surrogate markers are of particular use when the presence or extent of a disease state or disorder is difficult to assess through standard methodologies (e.g., early stage tumors), or when an assessment of disease progression is desired before a potentially dangerous clinical endpoint is reached (e.g., an assessment of cardiovascular disease may be made using cholesterol levels as a surrogate marker, and an analysis of HIV infection may be made using HIV RNA levels as a surrogate marker, well in advance of the undesirable clinical outcomes of myocardial infarction or fully-developed AIDS). Examples of the use of surrogate markers in the art include: Koomen et al. (2000) J. Mass. Spectrom. 35: 258-264; and James (1994) AIDS Treatment News Archive 209.

[0337] The markers of the invention are also useful as pharmacodynamic markers. As used herein, a “pharmacodynamic marker” is an objective biochemical marker which correlates specifically with drug effects. The presence or quantity of a pharmacodynamic marker is not related to the disease state or disorder for which the drug is being administered; therefore, the presence or quantity of the marker is indicative of the presence or activity of the drug in a subject. For example, a pharmacodynamic marker may be indicative of the concentration of the drug in a biological tissue, in that the marker is either expressed or transcribed or not expressed or transcribed in that tissue in relationship to the level of the drug. In this fashion, the distribution or uptake of the drug may be monitored by the pharmacodynamic marker. Similarly, the presence or quantity of the pharmacodynamic marker may be related to the presence or quantity of the metabolic product of a drug, such that the presence or quantity of the marker is indicative of the relative breakdown rate of the drug in vivo. Pharmacodynamic markers are of particular use in increasing the sensitivity of detection of drug effects, particularly when the drug is administered in low doses. Since even a small amount of a drug may be sufficient to activate multiple rounds of marker transcription or expression, the amplified marker may be in a quantity which is more readily detectable than the drug itself. Also, the marker may be more easily detected due to the nature of the marker itself; for example, using the methods described herein, antibodies may be employed in an immune-based detection system for a protein marker, or marker-specific radiolabeled probes may be used to detect a mRNA marker. Furthermore, the use of a pharmacodynamic marker may offer mechanism-based prediction of risk due to drug treatment beyond the range of possible direct observations. Examples of the use of pharmacodynamic markers in the art include: Matsuda et al. U.S. Pat. No. 6,033,862; Hattis et al. (1991) Env. Health Perspect. 90: 229-238; Schentag (1999) Am. J. Health-Syst. Pharm. 56 Suppl. 3: S21-S24; and Nicolau (1999) Am, J. Health-Syst. Pharm. 56 Suppl. 3: S16-S20.

[0338] The markers of the invention are also useful as pharmacogenomic markers. As used herein, a “pharmacogenomic marker” is an objective biochemical marker which correlates with a specific clinical drug response or susceptibility in a subject (see, e.g., McLeod et al. (1999) Eur. J. Cancer 35(12): 1650-1652). The presence or quantity of the pharmacogenomic marker is related to the predicted response of the subject to a specific drug or class of drugs prior to administration of the drug. By assessing the presence or quantity of one or more pharmacogenomic markers in a subject, a drug therapy which is most appropriate for the subject, or which is predicted to have a greater degree of success, may be selected. For example, based on the presence or quantity of RNA or protein for specific tumor markers in a subject, a drug or course of treatment may be selected that is optimized for the treatment of the specific tumor likely to be present in the subject. Similarly, the presence or absence of a specific sequence mutation in marker DNA may correlate with drug response. The use of pharmacogenomic markers therefore permits the application of the most appropriate treatment for each subject without having to administer the therapy.

[0339] VII. Experimental Protocol

[0340] Subtracted Libraries

[0341] Subtracted libraries are generated using a PCR based method that allows the isolation of clones expressed at higher levels in one population of mRNA (tester) compared to another population (driver). Both tester and driver mRNA populations are converted into cDNA by reverse transcription, and then PCR amplified using the SMART PCR kit from Clontech. Tester and driver cDNAs are then hybridized using the PCR-Select cDNA subtraction kit from Clontech. This technique results in both subtraction and normalization, which is an equalization of copy number of low-abundance and high-abundance sequences. After generation of the subtractive libraries, a group of 96 or more clones from each library is tested to confirm differential expression by reverse Southern hybridization.

[0342] SEQ ID NOS: 1-5846 (Tables 1 and 3) were identified through the above-described subtractive library hybridization techniques. In Tables 1 and 3, SEQ ID NOS: 1-468, 2033-2047, 2077-2309, and 3663-4013 were from Library cMhqaa; SEQ ID NOS: 469-1453, 2048-2065, 2310-3121, and 4014-4739 were from Library cMhqab; SEQ ID NOS: 1454-1755, 2066-2075, 3122-3433, and 4740-5258 were from Libraries cMhqac and cMhqag; SEQ ID NOS: 1756-1877, 2076, 3434-3662, and 5259-5572 were from Library cMhqad; SEQ ID NOS: 1878-2032 and 5573-5846 were from Library cMhqaf.

[0343] The “tester” source for two of these subtracted libraries, cMhqaa and cMhqab, was comprised of cDNA generated from stage T3NO tumors. The “driver” source for the library-designated cMhqaa was cDNA prepared from benign prostate hyperplasia and activated lymphocytes [B cells, T cells (CD4 and CD8)]. The driver cDNA for the cMhqab library was prepared from benign prostate hyperplasia cDNA. The “tester” source for the cMhqac and cMhqag subtracted libraries was stage T2 and T3 cDNA derived from prostate cancer patients with poor clinical outcome, whose cancer had recurred following surgery. The “driver” source for these subtracted libraries (cMhqac and cMhqag) was activated lymphocytes and stage T2 tumor cDNA that was obtained from patients who had a good clinical outcome and their disease had not recurred after surgery. The cMhqad subtracted library was prepared using stage T2 tumor cDNA from patients that had a good clinical outcome as tester. The driver source for this library (cMhqad) was obtained from activated lymphocytes and stage T2 and T3 tumor samples recovered from patients whose cancer had recurred following surgery. The tester for the cMhqaf library was cDNA obtained from the prostate cancer cell lines, DU145, LNCaP and PC3. The “driver” source for the cMhqaf-subtracted library was comprised of cDNA generated from a normal prostate cell strain, PrEC.

[0344] In Tables 2 and 4, SEQ ID NOS: 1-207, 617-621, 644-899, 1482-2026, 3097, 3141-3142 and 3195 were from Library cMhqsb; SEQ ID NOS: 208-346, 622-627, 900-1128, 2027-2461, 3098-3128, 3143-3181 and 3196-3274 were from Library cMhqsc; SEQ ID NOS: 347-468, 628-635, 1129-1310, 2462-2790, 3129-3140, 3182-3194 and 3275-3323 were from Library cMhqsd; SEQ ID NOS: 469-616, 636-643, 1311-1481, and 2791-3096 were from Library cMhqse. SEQ ID NOS: 1-3323 (Tables 2 and 4) were identified through the above-described subtractive library hybridization techniques, the “tester” source for these four subtracted libraries was comprised of cDNA generated from RNA derived from five prostate stage T2 tumors. Each subtracted library was prepared with a different driver RNA pool. The library designated as cMhqsb was prepared using RNA derived from benign prostatic hyperplasia and activated lymphocytes [B cells, T cells (CD4 & CD8)]. The library designated as cMhqsc was prepared using RNA derived from benign prostatic hyperplasia and a pool of normal tissues including Colon, Liver, Lung, Skeletal Muscle, Spleen, and White Blood Cells. The library designated as cMhqsd was prepared using RNA derived from normal prostate and a pool of normal tissues including Colon, Liver, Lung, Skeletal Muscle, Spleen, and White Blood Cells. The library designated as cMhqse was prepared using RNA derived only from benign prostatic hyperplasia tissue. SEQ ID NOS: 5847-10246 (Table 5) were identified through the above-identified subtractive library hybridization techniques. SEQ ID NOS: 5847-6369 were from Library cMhqae. The “tester” source for Library cMhqae was comprised of cDNA generated from metastatic prostate cancer cell lines (Du145, PC3 and LNCaP). The “driver” source was cDNA prepared from PrEC, a normal prostate epithelial cell strain.

[0345] SEQ ID NOS: 6370-6736, 7793-7803, 7838-7992 and 8513-8950 were from Library cMhqah; SEQ ID NOS: 6737-7133, 7804-7816, 7993-8160 and 8951-9376 were from Library cMhqai; and SEQ ID NOS: 7134-7792, 7817-7837, 8161-8512 and 9377-10246 were from Library cMhqak. The “tester” source for these libraries was comprised of cDNA generated from metastatic prostate cancer cell line LNCaP. This “tester” DNA was synthesized from membrane-associated polypomes mRNA separated from other mRNAs (i.e., cytosolic, nuclear, etc.) by density sedimentation equilbrium. The “driver” source was cDNA prepared from the non-membrane bound fraction (free cytosolic polysomes) obtained from the same density sedimentation equilibrium experiment. This mRNA was shown to be depleted of both secreted and membrane-bound protein by profiling it on the same 20K array.

[0346] SEQ ID NOs:10247-22286 (Table 8) were identified through the above-identified subtraction library hybridization techniques. SEQ ID NOs:10247-10637, 14547-14566, 14696-14899 and 16687-17423 were from Library cMhqao. SEQ ID NOs:10638-11858, 14567-14586, 14900-15442 and 17424-18147 were from Library cMhqap. SEQ ID NOs-11859-13576, 14587-14670, 15443-16193 and 18148-18996 were from Library cMhqaq. SEQ ID NOs:13577-14546, 14671-14695, 16194-16686 and 18997-19662 were from Library cMhqar. SEQ ID NOs:19663-19808, 20576-20594, 20626-20695 and 21009-21352 were from Library cMhqaj. SEQ ID NOs:19809-20575, 20595-20625, 20696-21008 and 21353-22286 were from Library cMhqal.

[0347] The “tester” source for libraries cMhqao and cMhqap was comprised of cDNA obtained from prostate cancer lymph node metastasis RNA. The “tester” source for the library cMhqaq was comprised of cDNA obtained from prostate cancer liver metastasis RNA. The “tester” source for the library cMhqar was comprised of cDNA obtained from prostate cancer bone metastasis RNA. The “tester” source for the library cMhqaj was the same cDNA as that for the cMhqao library, but it was digested with Rsal restriction endonuclease. The “tester” source for the library cMhqal was the same cDNA as that for the cMhqap library, but it was also digested with Rsal restriction endonuclease.

[0348] The “driver” source for the cMhqao, cMhqap, cMhqaj and cMhqal libraries was comprised of cDNA obtained from good clinical outcome RNA, normal lymph node RNA and tonsil RNA, mixed in a 3:1: 0.5 ratio, respectively. The “driver” source for the cMhqaq library was comprised of cDNA obtained from good clinical outcome RNA and normal liver RNA mixed in a 3:1 ratio. The “driver” source for the cMhqar library was comprised of cDNA obtained from good clinical outcome RNA. By “good clinical outcome RNA” is meant RNA obtained from tumor samples that were not metastatic.

[0349] SEQ ID NOs:22287-22548 (Table 9) are novel genes found, through transcriptional profiling, to be expressed at least 2-fold or greater in the following sample comparisons:

[0350] a) normal lymph nodes, normal liver and normal prostate samples, compared to primary prostate tumor samples of good clinical outcome and liver metastasis samples (prostate cancer that has metastasized to the liver);

[0351] b) normal lymph nodes, normal liver and normal prostate samples compared to primary prostate tumor samples of good clinical outcome and bone metastasis samples (prostate cancer that has metastasized to the bone); and

[0352] c) normal lymph nodes and normal prostate samples compared to primary prostate tumor samples of good clinical outcome and lymph node samples from two different sample sources (prostate cancer that has metastasized to the lymph nodes)

[0353] These sequences are therefore indicative of metastatic prostate cancer.

[0354] Proteomics

[0355] Proteins that are secreted by normal and transformed cells in culture are analyzed to identify those proteins that are likely to be secreted by cancerous cells into body fluids. Supernatants are isolated and MWT-CO filters are used to simplify the mixture of proteins. The proteins are then digested with trypsin. The tryptic peptides are loaded onto a microcapillary HPLC column where they are separated, and eluted directly into an ion trap mass spectrometer, through a custom-made electrospray ionization source. Throughout the gradient, sequence data is acquired through fragmentation of the four most intense ions (peptides) that elute off the column, while dynamically excluding those that have already been fragmented. In this way, approximately 2000 scans worth of sequence data are obtained, corresponding to approximately 50 to 200 different proteins in the sample. These data are searched against databases using correlation analysis tools, such as MS-Tag, to identify the proteins in the supernatants.

[0356] VIII. Summary of the Data Provided in the Tables

[0357] Table 1 shows 5846 novel nucleotide sequences and Table 2 shows 3323 novel nucleotide sequences identified through subtracted library experiments. The sequences of Tables 1 and 2 were re-interpreted and those sequences are set forth in Tables 3 and 4, respectively.

[0358] The sequences of Tables 1 and 2 were re-interpreted (as in Tables 3 and 4) and vector sequence removed and those sequences are set forth in Table 7. (See, for example, the first sequence in Table 7, identified as referring to sequence 1 from Table 1).

[0359] Table 6 shows sequences from Tables 1-4 with additional sequence. (See, for example, the first sequence in Table 6, identified as referring to sequence 2 from Table 1).

[0360] Table 5 shows 4400 novel nucleotide sequences and Table 8 shows 12040 novel nucleotide sequences identified through subtractive library experiments. Table 9 shows 262 novel nucleotide sequences.

[0361] The sequences of the present invention were determined to be novel through various BLAST searches of available databases.

[0362] In Tables 1 and 3, SEQ ID NOS: 2077-5663 are preferred, SEQ ID NOS: 2033-5580 are more preferred and SEQ ID NOS: 1-2032 are most preferred. In Tables 2 and 4, SEQ ID NOS: 644-1481 and 3141-3194 are preferred, SEQ ID NOS: 617-643 are more preferred and SEQ ID NOS: 1-616 and 3097-3140 are most preferred. In Table 5, SEQ ID NOS: 5969-6106 and 7838-8512 are preferred, SEQ ID NOS: 5959-5968 and 7793-7837 are more preferred and SEQ ID NOS: 5847-5958 and 6370-7792 are most preferred. In Table 8, SEQ ID NOs: 14696-16686 and 20626-21008 are preferred, SEQ ID NOs:14547-14695 and 20576-20625 are more preferred and SEQ ID NOs:10247-14546 and 19663-20575 are most preferred.

[0363] The contents of all references, patents, published patent applications, and databases cited throughout this application are hereby incorporated by reference.

[0364] Other Embodiments

[0365] Those skilled in the art will recognize, or be able to ascertain using no more than routine experimentation, many equivalents to the specific embodiments of the invention described herein. Such equivalents are intended to be encompassed by the following claims.

What is claimed is:

1. An isolated nucleic acid molecule comprising a nucleotide sequence of Tables 1-9, or a complement thereof.

2. A vector which contains the nucleic acid molecule of claim 1.

3. A host cell which contains the nucleic acid molecule of claim 1.

4. An isolated polypeptide which is encoded by a nucleic acid molecule comprising a nucleotide sequence of Tables 1-9.

5. An antibody which selectively binds to a polypeptide of claim 4.

6. A method for producing a polypeptide comprising culturing the host cell of claim 3 under conditions in which the nucleic acid molecule is expressed.

7. A method for detecting the presence of a polypeptide of claim 4 in a sample comprising:
a) contacting the sample with a compound which selectively binds to the polypeptide; and
b) determining whether the compound binds to the polypeptide in the sample to thereby detect the presence of a polypeptide of claim 4 in the sample.

8. A kit comprising a compound which selectively binds to the polypeptide of claim 4.

9. A method for detecting the presence of a nucleic acid molecule of claim 1 in a sample comprising:
a) contacting the sample with a nucleic acid probe or primer which selectively hybridizes to the nucleic acid molecule; and
b) determining whether the nucleic acid probe or primer binds to a nucleic acid molecule in the sample to thereby detect the presence of a nucleic acid molecule of claim 1 in the sample.

10. The method of claim 9, wherein the sample comprises mRNA molecules and is contacted with a nucleic acid probe.

11. The method of claim 9, wherein the sample is isolated from prostate tissue.

12. The method of claim 9, wherein the sample is a tumor sample.

13. A kit comprising a compound which selectively hybridizes to a nucleic acid molecule of claim 1.

14. A method of assessing whether a patient is afflicted with prostate cancer, the method comprising comparing:
a) the level of expression of a marker in a patient sample, wherein the marker is selected from the group consisting of the markers listed in Tables 1-9, and
b) the normal level of expression of the marker in a control non-prostate cancer sample,
wherein a significant difference between the level of expression of the marker in the patient sample and the normal level is an indication that the patient is afflicted with prostate cancer.

15. The method of claim 14, wherein the marker corresponds to a secreted protein.

16. The method of claim 14, wherein the marker corresponds to a transcribed polynucleotide or portion thereof, wherein the polynucleotide comprises the marker.

17. The method of claim 14, wherein the sample comprises cells obtained from the patient.

18. The method of claim 17, wherein the sample is a prostate tissue sample.

19. The method of claim 17, wherein the cells are in a fluid selected from the group consisting of blood fluids, semen, prostate fluid, lymph and urine.

20. The method of claim 14, wherein the level of expression of the marker in the sample is assessed by detecting the presence in the sample of a protein or protein fragment corresponding to the marker.

21. The method of claim 20, wherein the presence of the protein or protein fragment is detected using a reagent which specifically binds with the protein or protein fragment.

22. The method of claim 21, wherein the reagent is selected from the group consisting of an antibody, an antibody derivative, and an antibody fragment.

23. The method of claim 14, wherein the level of expression of the marker in the sample is assessed by detecting the presence in the sample of a transcribed polynucleotide or portion thereof, wherein the transcribed polynucleotide comprises the marker.

24. The method of claim 23, wherein the transcribed polynucleotide is an mRNA.

25. The method of claim 23, wherein the transcribed polynucleotide is a cDNA.

26. The method of claim 23, wherein the step of detecting further comprises amplifying the transcribed polynucleotide.

27. The method of claim 14, wherein the level of expression of the marker in the sample is assessed by detecting the presence in the sample of a transcribed polynucleotide which anneals with the marker or anneals with a portion of a polynucleotide wherein the polynucleotide comprises the marker, under stringent hybridization conditions.

28. The method of claim 14, wherein the level of expression of the marker in the sample differs from the normal level of expression of the marker in a patient not afflicted with prostate cancer by a factor of at least about 2.

29. The method of claim 14, wherein the level of expression of the marker in the sample differs from the normal level of expression of the marker in a patient not afflicted with prostate cancer by a factor of at least about 5.

30. The method of claim 14, comprising comparing:
a) the level of expression in the sample of each of a plurality of markers independently selected from the markers listed in Tables 1-9, and
b) the normal level of expression of each of the plurality of markers in samples of the same type obtained from control humans not afflicted with prostate cancer,
wherein the level of expression of more than one of the markers is significantly altered, relative to the corresponding normal levels of expression of the markers, is an indication that the patient is afflicted with prostate cancer.

31. The method of claim 30, wherein the level of expression of each of the markers is significantly altered, relative to the corresponding normal levels of expression of the markers, is an indication that the patient is afflicted with prostate cancer.

32. The method of claim 30, wherein the plurality comprises at least three of the markers.

33. The method of claim 30, wherein the plurality comprises at least five of the markers.

34. A method for monitoring the progression of prostate cancer in a patient, the method comprising:
a) detecting in a patient sample at a first point in time, the expression of a marker, wherein the marker is selected from the group consisting of the markers listed in Tables 1-9;
b) repeating step a) at a subsequent point in time; and
c) comparing the level of expression detected in steps a) and b), and therefrom monitoring the progression of prostate cancer.

35. The method of claim 34, wherein the marker corresponds to a secreted protein.

36. The method of claim 34, wherein the marker corresponds to a transcribed polynucleotide or portion thereof, wherein the polynucleotide comprises the marker.

37. The method of claim 34, wherein the sample comprises cells obtained from the patient.

38. The method of claim 37, wherein the patient sample is a prostate tissue sample.

39. The method of claim 34, wherein between the first point in time and the subsequent point in time, the patient has undergone surgery to remove prostate tissue.

40. A method of assessing the efficacy of a test compound for inhibiting prostate cancer in a patient, the method comprising comparing:
a) expression of a marker in a first sample obtained from the patient and exposed to the test compound, wherein the marker is selected from the group consisting of the markers listed in Tables 1-9, and
b) expression of the marker in a second sample obtained from the patient, wherein the sample is not exposed to the test compound,
wherein a significantly lower level of expression of the marker in the first sample, relative to the second sample, is an indication that the test compound is efficacious for inhibiting prostate cancer in the patient.

41. The method of claim 40, wherein the first and second samples are portions of a single sample obtained from the patient.

42. The method of claim 40, wherein the first and second samples are portions of pooled samples obtained from the patient.

43. A method of assessing the efficacy of a therapy for inhibiting prostate cancer in a patient, the method comprising comparing:
a) expression of a marker in the first sample obtained from the patient prior to providing at least a portion of the therapy to the patient, wherein the marker is selected from the group consisting of the markers listed in Tables 1-9, and
b) expression of the marker in a second sample obtained from the patient following provision of the portion of the therapy,
wherein a significantly lower level of expression of the marker in the second sample, relative to the first sample, is an indication that the therapy is efficacious for inhibiting prostate cancer in the patient.

44. A method of selecting a composition for inhibiting prostate cancer in a patient, the method comprising:
a) obtaining a sample comprising cancer cells from the patient;
b) separately exposing aliquots of the sample in the presence of a plurality of test compositions;
c) comparing expression of a marker in each of the aliquots, wherein the marker is selected from the group consisting of the markers listed in Tables 1-9; and
d) selecting one of the test compositions which alters the level of expression of the marker in the aliquot containing that test composition, relative to other test compositions.

45. A method of inhibiting prostate cancer in a patient, the method comprising:
a) obtaining a sample comprising cancer cells from the patient;
b) separately maintaining aliquots of the sample in the presence of a plurality of test compositions;
c) comparing expression of a marker in each of the aliquots, wherein the marker is selected from the group consisting of the markers listed in Tables 1-9; and
d) administering to the patient at least one of the test compositions which alters the level of expression of the marker in the aliquot containing that test composition, relative to other test compositions.

46. A kit for assessing whether a patient is afflicted with prostate cancer, the kit comprising reagents for assessing expression of a marker selected from the group consisting of the markers listed in Tables 1-9.

47. A kit for assessing the presence of prostate cancer cells, the kit comprising a nucleic acid probe wherein the probe specifically binds with a transcribed polynucleotide corresponding to a marker selected from the group consisting of the markers listed in Tables 1-9.

48. A kit for assessing the suitability of each of a plurality of compounds for inhibiting prostate cancer in a patient, the kit comprising:
a) the plurality of compounds; and
b) a reagent for assessing expression of a marker selected from the group consisting of the markers listed in Tables 1-9.

49. A method of making an isolated hybridoma which produces an antibody useful for assessing whether a patient is afflicted with prostate cancer, the method comprising:
isolating a protein or protein fragment corresponding to a marker selected from the group consisting of the markers listed in Tables 1-9;
immunizing a mammal using the isolated protein or protein fragment;
isolating splenocytes from the immunized mammal;
fusing the isolated splenocytes with an immortalized cell line to form hybridomas; and
screening individual hybridomas for production of an antibody which specifically binds with the protein or protein fragment to isolate the hybridoma.

50. An antibody produced by a hybridoma made by the method of claim 42.

51. A kit for assessing the presence of human prostate cancer cells, the kit comprising an antibody, wherein the antibody specifically binds with a protein or protein fragment corresponding to a marker selected from the group consisting of the markers listed in Tables 1-9.

52. A method of assessing the prostate cell carcinogenic potential of a test compound, the method comprising:
a) maintaining separate aliquots of prostate cells in the presence and absence of the test compound; and
b) comparing expression of a marker in each of the aliquots, wherein the marker is selected from the group consisting of the markers listed in Tables 1-9,
wherein a significantly altered level of expression of the marker in the aliquot maintained in the presence of the test compound, relative to the aliquot maintained in the absence of the test compound, is an indication that the test compound possesses human prostate cell carcinogenic potential.

53. A kit for assessing the prostate cell carcinogenic potential of a test compound, the kit comprising prostate cells and a reagent for assessing expression of a marker, wherein the marker is selected from the group consisting of the markers listed in Tables 1-9.

54. A method of inhibiting prostate cancer in a patient at risk for developing prostate cancer, the method comprising inhibiting expression of a gene corresponding to a marker selected from the markers listed in Tables 1-9.

55. A method of treating a patient afflicted with prostate cancer, the method comprising providing to cells of the patient an antisense oligonucleotide complementary to a polynucleotide corresponding to a marker selected from the markers listed in Tables 1-9.

56. A method of inhibiting prostate cancer in a patient at risk for developing prostate cancer, the method comprising increasing expression of a gene corresponding to a marker selected from the markers listed in Tables 1-9.

57. A method for determining whether prostate cancer has metastasized in a patient, the method comprising comparing:
a) the level of expression of a marker in a patient sample, wherein the marker is selected from the group consisting of the markers listed in Tables 1-9, and
b) the normal level or non-metastatic level of expression of the marker in a control sample
wherein a significant difference between he level of expression in the patient sample and the normal level or non-metastatic level is an indication that the prostate cancer has mestastasized.

58. The method of claim 57, wherein the marker corresponds to a secreted protein.

59. The method of claim 57, wherein the marker corresponds to a transcribed polynucleotide or portion thereof, wherein the polynucleotide comprises the marker.

60. The method of claim 57, wherein the sample comprises cells obtained from the patient.

61. The method of claim 60, wherein the patient sample is a prostate tissue sample.

62. A method for assessing the aggressiveness or indolence of prostate cancer comprising comparing:
a) the level of expression of a marker in a sample, wherein at least one marker is selected from the markers of Tables 1-9, and
b) the normal level of expression of the marker in a control sample,
wherein a significant difference between the level of expression in the sample and the normal level is an indication that the cancer is aggressive or indolent.

63. The method of claim 62, wherein the marker corresponds to a secreted protein.

64. The method of claim 62, wherein marker corresponds to a transcribed polynucleotide or portion thereof, wherein the polynucleotide comprises the marker.

65. The method of claim 62, wherein the sample comprises cells obtained from the patient.

66. The method of claim 65, wherein the patient sample is a prostate tissue sample.

The application's sequence listing, which the Patent Office published only in electronic form, follows.

SEQUENCE LISTING (62232 sequences)

SEQ ID NO: 1 - DNA, 310 bp, Homo sapiens
  misc_feature 110, 253: n = A,T,C or G
aggtacatgactgtgtgtgtatgtgtgtgtgtgtataattctttgttgttttggtaaaatcagaggagtgggttataagtgctaatttccttgggaaattaatgaactanggcaagtatagcatcccatgcataaaattagcacagggacatcagaattgtatgggtcttcttttttctttttttctttttttttgagatggagtctcgctctgttgccaggtttgagtgcagtggcgcaatctcagctcagngcaacctccgcctcccaggttcaaccgattcccctgccttagcctttcgagtagctg

SEQ ID NO: 2 - DNA, 429 bp, Homo sapiens
  misc_feature 1, 3, 46, 54, 388: n = A,T,C or G
ngnggcggccgcccgggcagttacaggcacgtgtcaccatgcctgntttatttntgtatttttttggtagagatggggtttcaccatgttggccaggctggtctcattaaactccgacctcaggtgatccacctgccttggcctcccaaagtcctgggattataggcgtgagccaccacatgcggcaaccccacagttttaacagattgtttatactttgatttggttttgcagatgatatgcatactaaggctttaaaaaattatctaaatgtttaataattttttgtttttgtgattgggaattatttacttctgggagtcatgatcctaaagaaacagtaaattggctgtttagagtgggaaaaaaaaacttcaggtaactttgntacttaaatcctgtctcttaattcataggttaagaccttaa

SEQ ID NO: 3 - DNA, 447 bp, Homo sapiens
  misc_feature 52, 376, 386, 393, 394: n = A,T,C or G
tactatagggcgaattggttctccccgcggtggcggccgaggtaccacgacntctcgggagatacttcaggggattaccggaagattctgctgaagatctgtggtggcaatgactgaacagtgactggtgactcacttctgcccacctgccggcaacaccagtgccaggaaagggccaaaagaatgtctgtttctaacaaatccacaaatagccccgagattcaccgtcctagagcttaggcctgtcttccacccctcctgacccgtatagtgtgccacaggacctgggtcggtctagaactctctcaggatgccttttctaccccatccctcacagcctcttgctgctaaaataggatgtttcatttttccaaanaaaaaaaaanaaaaatnnagggtaccttgcccggggccggccggttctagaactaggtggatcccccgggg

SEQ ID NO: 4 - DNA, 187 bp, Homo sapiens
  misc_feature 114, 136, 162, 175: n = A,T,C or G
aggtaccatatagatcaaaagctttgtaaccacgggaaaaaataaactcttccattccttaaagaatagaatagtttgtccctctcatgggaattgggctgtatgtatattggntcttcctcctttagaattttangaggataccaagagtttctaccttangaactttttcatnggacacaatttt

SEQ ID NO: 5 - DNA, 433 bp, Homo sapiens
  misc_feature 9, 26, 40: n = A,T,C or G
atagggcgnttggagctccccgcggnggcggccgcccggncaggtacctcaacatatttgcctttttttgcctaacttagcttttctaatataccttaatagagttaagttatgtaatactcaattctgatttggaaaagtctaacttttcttttagctctggttaggatgagtgtaaggtgggatgagtggggttttgtttctgcatgtgtccacactaattttaaacacacatctgaacaatagcttttcattatctaagttgaatatcttagatactgaatattactaaaatttactaacaatattaatactaaataataccatcttatacttatgcaaaatgttacatttgcagagctccttctcacacgtttgaccattacaactctctaaagacaggctggacaagggaaaactggctctggctttc

SEQ ID NO: 6 - DNA, 390 bp, Homo sapiens
  misc_feature 57, 274, 379, 390: n = A,T,C or G
ctccccgcggtggcggccgaggtactgttaacttctccccctcctggatctttgttnactaaatcagccctaaccctttctcttcagtctctttctcttgactttcccctagatcttgcccctagaccatcactcagctggttcctcttcattgcctccatcttagttcaaatgtttcttctttggacagtttggagttttgctccccctcttccctgccattctatagtaggttttttttttcttaaaatagtgcatatcatctgggtgcggngggctcatggcctataatcccagcactttggggaggctgagggggtgtatcaccgagggttaggagataaagaccatcctggccaacatggtaaaaccctgtctntactaaaaatn

SEQ ID NO: 7 - DNA, 340 bp, Homo sapiens
  misc_feature 5: n = A,T,C or G
ccggncaggtacagtcgtttgagctccatggaaaacagtggggaaatgtttcagtggcatttactgtgagtatttcttgagtttggcaagtccactacagcatgctcattggtggtcgagggcaggagaaaggggaggtcttggtgcattgctctcaagggagggcttttgcttctagtgccttccccaagacctcatggaccgttgacttgtttcatcatgtggagcttcatcttatgcaagctgaagaaacagtatgccggtttcattgctgcaagataattgaccccttgtgacttcatccagaaggtagcagcaacatgtgctcttagtgaaagat

SEQ ID NO: 8 - DNA, 191 bp, Homo sapiens
  misc_feature 84, 88, 89, 113, 122, 140, 142, 145, 151: n = A,T,C or G
tgattgagtggacatgatcactctggataccacaatgaatgaaacttaaatggactaatccaatgaatgaaatataaaatgaanatannatgagaaatgtaagatacaggaanagaatactnatttttgaaatcacagtntngtngtattngctgataaaacctatctaatagtatcaataggttctttca

SEQ ID NO: 9 - DNA, 505 bp, Homo sapiens
  misc_feature 498: n = A,T,C or G
ctacttagggcgaattggagctccccgcggtggcggccgaggtactttttttttcttttcttttcttttttttgatacagagtcttagtcacccagactagaggtcagtggcaggatctcagctcactgcaacctctgcctcctgggctcaagagaccagcccacctccgcctccaagtagctgggactacaggcgtgcgccaccatgcccggctacttcttgtattttttgtagagacggatcgtcaccatatttcttaggctggcctttaacttctgagctcaagagatgcactcccctcagcctcccaaagtgctgggattacaggcggccaggcctattttcaattttcaagtattgcatatcattgtgaataacattgtaaatcctttttatattaagtaacagggtaggttaatccatttctaatgaataattttaagggttttaatcctttccaagtggtacctgcccgggcggccgctctagaactaggngggatcc

SEQ ID NO: 10 - DNA, 465 bp, Homo sapiens
  misc_feature 389: n = A,T,C or G
ccgcggtggcggccgaggtactagtcagtatgctgtagtattaatcagtaggtcaagttcagtgaagtaaaggagaattgaattcttgaagttcacatttaggcaaaaatttggcgttttaggaggtgagtataagacatgatctttatagaaaacgctgatgataaaaacagcgctctctgttaggtgcctttatgcttgactccattgtcatcttttcttaagaaactaagctcaggactgggtgcaatggctcatgtctgtaatcccagcactttgggaggctgaggctataggatcagttgagctcaaggagttcaagatcagcctgggcaacatagctagaccctcgtctctactaaaaaacaaacaaacaaaaaacaaaaaanaacccccaaaaaaaccaacaaaccagcttgcatgggtgggtgcgtgccttgtggtcccagctgctcaagaaagctg

SEQ ID NO: 11 - DNA, 436 bp, Homo sapiens
  misc_feature 408: n = A,T,C or G
ccgcggtggcggccgcccgggcaggacgcggggggctctcaaaaaatggtggccattattattatttgctcatggaccagtatttcaatgatggaaatactttagtgcctctaaaaatcagctctagtgttaacacacttaaggaaacccagtcaggtcacctctgactctgtaaagcattataaagaaaataatgaactcataagtgagttcttgtgagtcattcaggttttaagaagccactgctttgattttgaaaacagacaaaaaaatctcagaatctacttggactagggttcatttattctgcctgtttcaagtcagagcaaatactcctggaatgaccctctcctgtttcctgagtttgagcccgatcctatttgggcactgcaagacaggggagaagtnggatgtttgaaggacagatggggaggtg

SEQ ID NO: 12 - DNA, 461 bp, Homo sapiens
  misc_feature 418: n = A,T,C or G
ccgcggtggcggccggaggagagatggactgagttttggcgataggtcgcacaccttaccaacagcaggcggcgagggctccccacgctgctcgtttccagaggtgcctcgtattattgagaaggccgtgcagtgaatgaaaatgtgtccacacagctcctgctctgcctgtgacattgggttgctgtatattagctgggatagtatatttcaaattgctttctcaattgcaaagtatggtagaaataaatattcgctttaatttagtaactagaacttagaaaagttcctcctgtttcctgattgccaagtcgggatgagaaatagatttcataattatgatacaacttgatatcttgagataaatggttaactttggaaagttaaacatggtattttttaaactttatcattttgngttcattttgcacatctctatacctccaattttgaaaagaatt

SEQ ID NO: 13 - DNA, 414 bp, Homo sapiens
ctatagggcgaattggagctccccgcggtggcggccgcccgggcaggtactcatcgccgttctttttaaaaatgtagacaaattatatttttcccctcaactttttttctccagaggtgtttatttcctttaactttcctcctttggaaccccgttctcttatttcttaacaactgatctagattgctcattcaaaccagggctgaaaatcaatcagaaaaagcagttctgtttcccttgaagaaaaggcttactttttaaactatgcaaaggtgaaagggggaatattttgcagtccattcgtggtaaatcaattataaaaatagctagtatttattgagcaactactctgtcagttacttgttctacatttcatagaacttaaagttctacaaaatagaatttaaaatagaa

SEQ ID NO: 14 - DNA, 465 bp, Homo sapiens
  misc_feature 10: n = A,T,C or G
acttagggcnattggagctccccgcggtggcggccgaggtacatgtctgttggtatactttttcaagtatctgtttgcaatttctagaagtggaacttctattcaaagggctgtatacctaattttgacgtataatgcttaaatatccttcaaaaaggttgcatccagttactttctaactaccatcacctaagcagacctgtttccctcatgctctcaccaataccagtattaaagcttttatagtaaaataaagttcacctttaaacaccacctcaattgccaaacgcagctcaaattgtccagtgcttttttttccctcatgctgttcaccaatccaacagagccctggctaggtgacccatgggggaaaagcatgcttttcacaggggattcgctctactggtccttcttgcctctttaacacaaacacgtggcatgtgctcaaggattcaccgaacaaaa

SEQ ID NO: 15 - DNA, 553 bp, Homo sapiens
  misc_feature 44, 45, 538: n = A,T,C or G
aggtacagattaggatcaaacacagaacatgttcagatcatacnnttatatctggtgtcagaatccatctgcagatatggctgttagctccctggaggtgaacttgaaaggaaaaacatgtaaattacatcatgctaattgtaataggagaaaacacagtggcagagcctttcttgatacttagccctaagtaaaattcaaaaacagacgttgcttcaggagctgctgaggtcgttcagggctattagaatggtgcctccgccacacttaatccattctgccgaattcaagaatatttatttccctgaaatgaactcacaagttgccctagaggaaaacttggagaactagagctgctcactgtgcagatgccatcctgatgaccccagagatgtttacatcagtgaaacctctgggaatagtgagccccctggctagttttcaaaggacttggggaagagggtagagctaaatcctgtgttctcaacacaggaaataatataacccccattgggatgaaaattcattcttgggtggngacaaaatcttaaac

SEQ ID NO: 16 - DNA, 443 bp, Homo sapiens
  misc_feature 14, 17, 58, 60, 87, 114, 191, 235, 262, 285, 290, 304, 313,333, 348, 350, 357, 379, 398, 405, 410, 411, 420: n = A,T,C or G
gctcccccgggggnggncgaggtacccagccttttttctattttgttcttgtcttgtntnttttacattttatagcttttcatgttnctgaaaccacttaccacatttaggccnaaaggcgggaataataaaaaataaaaccaacctcacctaaaaaaaagtttaaggattaagtatttccatataccagngttgaacagatttgaacaatatatttgattttatgctctccagntgctaaagtgaggaaaagaaacagaancatattgttttcgtgtgctgacncccgnaagccatgtccttntaaactttnggcaaaacccaaacctgttnactggggaaactaangntttgaanaaaaaaaaattttatttcgggngggggccttttttttgttnaaaaaanaaccnntttgggaanaaaaaccccccttttttttttaa

SEQ ID NO: 17 - DNA, 343 bp, Homo sapiens
  misc_feature 3, 167: n = A,T,C or G
ttnaacagactaaaggcaggttgactgtgaggggtggcaggaagcttttgggtgatagatggtgagtggtctgtagtgctggttattccatatagacttttgccaaagctcatggaagtgtttgtttaaaatgggtaaatttattacatatgttatacttcactagngaaatctttaaaaactatgctggtggcttcctgtcatcttctgaataaaccctgattcttctttttcaaggtaaacaagaacttctggtgtgccttccacctttcccatacctccctccatcctcacctctaacctctccacttcaaattgccatctgcacctcagttgcgagctg

SEQ ID NO: 18 - DNA, 430 bp, Homo sapiens
ccgcggtggcggccgaggtactgcgatcctgcaacaacaggagaatgtctgaaggacagtcccacacactggaaagctgggctatgggtggagatgcacagagattcgggtgctgatgaagagagggcacagaaacagtgaggacgattcacacatgcatgcacacttacgctcccccttcatttgagggtttacacacacctacctcacaggtctttgctaggaactgtgggggtgcaaagaagagcctgccctaaaaggaatcaataatctatttgtggacacggtctatcgagcggccgcccgggcaggtactatgcctagctaattttttttattttttgtagcgatgcattctcactatgttgcccaggctggtcttgaactcctggcttaaagtgatcctcccgtctttaccttcaaaagggtt

SEQ ID NO: 19 - DNA, 359 bp, Homo sapiens
  misc_feature 24, 54, 87: n = A,T,C or G
agctccccgcggtggcggccgagntactatttgaaaatcattacggtttggttntatagggatgaacaaaacaagtcccctgccctnttagatattatagatcattgagggaagaaacaaagtaaatggcacttttcacagtaaggatcgatgaaggaaaagaagagcgtggatgagaagatggcaagggaaccaaaattagaacatggaatttgggggatgctgccagggaagcttagctacgtggaagtagctaatggtgaagctcattctgtaagaaaaccatatgtgaaagcacagataatgagggggaacaagacttggcctccaagtaagaaataatactggaaaataattac

SEQ ID NO: 20 - DNA, 343 bp, Homo sapiens
ccgggcaggtacctggaagcaacatctacatctttttcagcaatctagatgctggggacacaaggtccaccttccaggaatatggccatgacaccagaaatcacaaacatgatgagaatggaatgactggggaagaagtgccagatgcttcacttgtaaatgaagacccagcctctggggatgcagataccacctccctgaagaagctgaatatctgcagataagtggagttcaccaatgatgaggagcgggatggagaaaggaggtagggagagtcatccaaggaacatgagcaacatgttaaaagaattgaaccagagtccggtgaatatcagcactggga

SEQ ID NO: 21 - DNA, 754 bp, Homo sapiens
  misc_feature 15, 27, 90, 575, 600, 609, 636, 639, 648, 690, 705, 715,718, 725, 746: n = A,T,C or G
attttccggcgactnggagctccccgnggtggcggccgaggtcccagccttttttctattttgttcttgtcttgtatattttacattttnttgcttttcatgtttctgaaaccacttaccacatttaggccaaaaggcaaaataataaaaaataaaaccaacctcacctaaaaaaaagtttagattaagtatttccatataccagtgttgaacagatttgaacaatatatttgattttatgctctccagttgctaaagtgaggaaaagaaacagaattatattgttttcatgtgctgacagccggaagcatgtaaacatctgcagaaaccaaacgtttcctggaactaagcttgagcagaaatctatcacgtggacctttgtttaaagaaccttgtgaaaaaccacagttatgtaaaagatccaggagcgcagttcatgtggattaagattctctaggaggcagagagtctaaggagatcaaagaaaacaacgacttgggaagtgcatgtgctgagcgctggagccaaactagcagaaaggagttttaagaggcactgaatccaggtctctgggnttttggggactggaataaaagaaanggagttgangcctggtgccagtggctcatccctttnggncccattacntttgggaaggcttaaggcttggaagaatggtttgaggcttgnaagtcaaggaccagnctggggcacnaancaaggancccttttttaaaaaaaaaatnaaaaaaat

SEQ ID NO: 22 - DNA, 190 bp, Homo sapiens
  misc_feature 71, 87, 142, 157: n = A,T,C or G
ccgggcaggtactaccttattgaattcttacaactattattgttccatattacaaaggaggaaaccaaagnctggagtggtcaagtnacttgcccaagcccatatagctggtaaatgctggtgttattataacccaacccanagccctactggcctnttgaccactttgtttctactgtgtccattatca

SEQ ID NO: 23 - DNA, 302 bp, Homo sapiens
  misc_feature 160, 252: n = A,T,C or G
gctatattactttattgaacaagtatttgctgaatgcctactgtgtgccagatgcaatgctaagcactaggtgaacagacactggtccccaccctccaaacaagtaagcatacatttatcactgcaacttgtaattatttgagggaaagtaaatcaaggngctatgagagacaaaaagagcttatgttagttagacttactgaagaggaaaggcaactttgaaaagggacacaacccaagtagagaacaggnggccaggtgtggtggctcacgcctgtaatcccagcactttgggaggctga

SEQ ID NO: 24 - DNA, 493 bp, Homo sapiens
  misc_feature 331, 378, 421, 435, 467, 480: n = A,T,C or G
ttagggcaattggagctccccgcggtggcggccgcccgggcaggtactctcgaatgctgtttacacagtgttttatacttgcaaaggactttacggaatgttatggcagtcttagagaaaggtggagaagtcctgacaggggtgtaggtgtatgtttagaactgcatgactacctgtatagtgtttgtcttttggattatgaatatagtaagcattttccatgtttcatagattcacatatttggtcttgtttaccttcacaacttcaaagtgaacctgctatgggagcactatcttccatgcataggcaaacttgtccaaagtcactcancatcctcgatccatggaattataaaatgtgatggttatccagttcanctccccactggctatatgaatccctgacagtgtcctcctttancttcacctcaaaanctttcctgccatgaggaaaagcttttagacancatcattcttttntaaaaacaacttt

SEQ ID NO: 25 - DNA, 469 bp, Homo sapiens
  misc_feature 430, 444, 446, 465: n = A,T,C or G
ccgcggtggcggccgaggtacggggcagtcctgcacagtctcactctgacaacccaagttggaaatgctgcaaaaccaaggcccaggacagtgtgtggattatcaccaagagacctcagcctgcaagggcctttaaggtcacacaggcctgtgcacagcatcctctggagtcagcctctgcatggacataaggagcactcaaaatacttgctcgtggcagccttgactgctgtgaatccaacacaccacataacagctgcctccaccttgccttccacaggggagtccgagtatttgggggaggtcacagcctcttcaggctcaacatccgtctctttcccaactccacacacacccaggggggttgttagcaagtgtgcccacctgcattcctttcgttgggaatggaaccgtgcaaaagggcaaagtngggtgggtcttggntnaattgggaaaagtgccaancggg

SEQ ID NO: 26 - DNA, 373 bp, Homo sapiens
  misc_feature 70: n = A,T,C or G
acttagggcaattggagctccccgcggtggcggccgcccgggcaggtacttttttttttttttttttganatggagttttgctcttgttgcctaggctggagtgcaatggcgaatcccggctcacggcaacctccgccttccaggttcaagcaattctcctgtttcagcctcccaagtaactgggactacagcaagtgaaattactttacttttaaagagaaaaatatctattagtagcaagacagtttattggggatttgagcttattattgaaattaacaagtatgtaatgctcacatgatactctcaaatgaacttaaaattgaatggaggcagacaagttcaaaatagttgagaaaatgatccgtacct

SEQ ID NO: 27 - DNA, 429 bp, Homo sapiens
  misc_feature 142, 168, 184, 234, 258, 358, 403, 417: n = A,T,C or G
ccgcggtggcggccgcccgggcaggtacttaagtttttttttttttttcttttttttgagacagggtctcgctgcactccagcttggacgacagagtgagaccccgtctcaaaaaaaaaaaaaaaaaaactaaaaaactgancaatggctgactaggacctttataanacaaattaggcctcanaagttttctgggggccgcagcttgccttccttcccatcctccatgtctgngacttccactagaggccaattcanaatgtctgggggtggggctcatttaaaaagtatttccaggcccgggtgccggtgtctcatgcctgtaatcccagcactttgggaggcccaggtgggccanatcacttgaggtcaggagttcgagaccagccatggccaacatggnggaaatcccttttnaaaaaaaaaaaa

SEQ ID NO: 28 - DNA, 376 bp, Homo sapiens
ctacttagggcgaattggagctccccgcggtggcggccgaggtaccagctctggctgttgcccccatgcttatattcaaactcttttgcttaactacaaaagcccttggttatctagacctatctatggcttcgaccgaactcattgttttctcacttttctccagtaagatgatatattgctatctttgcaacactttcctttcagctccacaaacatgtgtttctgaatggtggagtgaattagcaagtaatttcacattccattttctcagaaggagatggagctaggaaaaataacaaaacctcatctaataaagatgacgctactcttccagaggggcaaagaggcaacctggatggcaaatgtagggttg

SEQ ID NO: 29 - DNA, 293 bp, Homo sapiens
  misc_feature 152, 177, 180, 280: n = A,T,C or G
acttagggcgaattggagctccccgcggtggcggccgaggtacgcgggatttttttgattgttgtttggcaagaaatattaatagtaacttttgtgtgtttgattattttcggggccggagcagcatctgtccagcacctttgggatttggnggttattgatttaggcacagggctnctnagatcagaacttggttcttcttcccacaagtgctctgttttggaaatgtgctaatgacacacattgaattatgtcagaggcttgtggccttaagttgtcnagggaggtgtttt

SEQ ID NO: 30 - DNA, 448 bp, Homo sapiens
  misc_feature 156: n = A,T,C or G
ccgcggtggcggccgcccgggcaggtacagaatacctggacaaagacaaaggtcagcctctagaatttgccagaaatgggccagcaaagtgcagcatcttaataactgagtgatactggcaggaagatttctccaaagactaactatggtgttttnaaatacgcctgtaaattatttgacactcatcccttcaaaaggtggggactaatttctgtccctttgagtgtagactacccttaatgacttgattctaacaaataaattgtgacagaaatcatggtttatgatttcagggactacatcctaaaaagcatgtcttactctctcttcaatcactcactgtaggggaagctagatgccatgtcatgaggacactcaggcagtcctatggggacatatcgatggcaaagagctgggtcttattgacaatagccagcattagcttttc

SEQ ID NO: 31 - DNA, 440 bp, Homo sapiens
  misc_feature 54: n = A,T,C or G
cccgcggtggcggccgcccgggcagttactattaaatttaatgagaggtaactnatgcaccggcaggaagttcaaggggacagaaggggcttgctccactctggagccctatctcctctcacctccttccttctagtttgacatgcgatcttgtctctctcttttataaagtgcttccaggcccttttgattaggatgctgtcctaaatccttcctaaagagaggttttggagccaccaacactgcttcactgtggaataaactttccttattaagattcttcattcactcataatcatctcctttttcctcactgctcattcatttatggagatagcacccatatcatagctacttggtcaaatcatggtgatactccccacttaggagaggaagatgactaggttatagctcttgcctttaggaaattaaaaaccctg

SEQ ID NO: 32 - DNA, 396 bp, Homo sapiens
ggcgaattggagctccccgcggtggcggccgaggtacatctgaattacaatagatgtgctaagatggtatgtttcggtgtgtattctttggttgcaagcaccaggcatgagttttggtgaatttaatcaagagagtaattcgttacaagaacttggggtttctgtgcaacccaagaaaagtctgaaaataaccaaatttagaaaatgtaaggaatcagggggtttcaagactctagatagcaagaagtggaaaatcctgtctccagggaacctcctcaggggagaatcagctccagctggtttatatccaagtgccattctccccaacctccaggagtgagagtttctttagtatgtcttggatcctatgcccactttgtgaccagggcaagaggg

SEQ ID NO: 33 - DNA, 312 bp, Homo sapiens
  misc_feature 1, 72, 173, 178, 199, 200, 239, 261, 292, 298, 303: n = A,T,C or G
nattggagctccccgcggtggcggccgaggtacacaatctcatttttgttctctcatatcgatccccaaagnggctggtatctatattcccattggccagatgaagaagctgcgggccagcaagcatgttacggctggaataattagctcagcaatcactgtttcgaagaatngcatnaagggcacttttgtatcatgnntattgaaggctccttcttttggaaaggtggggaccagtntgaaggcaaccaaagccctctntgcttggaagttttcaaattggtcccatccncatacnaattnattaaatcc

SEQ ID NO: 34 - DNA, 440 bp, Homo sapiens
  misc_feature 18, 36, 53, 56, 60, 62, 73, 84, 94, 117, 121, 127, 134, 140,151, 180, 181, 195, 196, 199, 206, 214, 229, 232, 238, 253,255, 263, 265, 271, 274, 284, 296, 304, 314, 332, 333, 349,358, 359, 380, 386, 387, 395, 396, 399, 403, 411: n = A,T,C or G
  misc_feature 413, 420, 424, 427: n = A,T,C or G
agccccggcggccgaggnacagagtaagcaggcggnggttgaaaccaaagggnttngaancngggaccaaaangacaggagggngaggggcggnggaggacgggggagggcccgcanaaanacaggnaaaaaanggagcncggaaaggcanccgggaggccaaaagaccggaaaagggannggaagaggggaaannagncaagcanaggaaaanggggcccgggggccnganaagaanaaggggcccgcaggnancaaacaangnggggcngcngccccggggnaaaaaagaaaanaaaggaancaacaggggngggggggaaagggaaaannccaaaaaaggccaccnggggaaggnnaaaggaaaaaaggaaaaaccnacaaannaaaccgcnnaangggngggggggnanagggaanaaanggncaaaaggggggaa

SEQ ID NO: 35 - DNA, 359 bp, Homo sapiens
  misc_feature 47: n = A,T,C or G
ccgcggtggcggccgcccgggcaggtacctcctagccatccaattanagaggctttccctaggatactgcttgcccttgcagggaatgagatctacacagcccatacaccttaagagtccagtattgatgtcggtgttttcatcattcctcaaagccatttctggaccattcttcctctagccccttataaaaatgcttgttcacctgagctcaaatcaacactatcaccttttaccaactatttctcaactgtctacctcttcagtcacttttccctccttcattaagactttacacccatatcagtcctcctcaccacctcaaagtttgccatttaacagcttgatctttctcttct

SEQ ID NO: 36 - DNA, 525 bp, Homo sapiens
  misc_feature 319, 321, 323, 336, 357, 358, 361, 371, 381, 393, 416, 425,437, 441, 445, 452, 457, 479, 485, 491, 506: n = A,T,C or G
ctatagggcgaattggagctccccgcggtggcggccgaggtactcctttacattcttaaaaatcattaaggaccccaaagaatgtttgtttacaagggttacttacattgataattaccacatttgaaatgaaaactgagaaacttagtattaattcatttaaaagtaagaaaacaattacttatctacataaatgaaaaagctattttccaaaacaaaaaatgaaaatttagtaagatgaatagccttgctttatgtttatacatctcttaatgtttggcttaatagaagactggctgggattcttaccatatgcttntngncattcatttcctngtggccaatgggggttggtcnntgncctggaaggnggtttgaaanaaaaatggggcntttccccccaaaccccgtttttngggaaaaangggaggaccttnaatngggnttttttnaaaanaaactggggggacctttttttnttttgnttcctncccccaaaccttaanagggggggggggggttttt

SEQ ID NO: 37 - DNA, 618 bp, Homo sapiens
  misc_feature 51, 77: n = A,T,C or G
aggtacagtctaactctagaagacagggctgggggctgcggaagtgggacntttttccctactacactggtcaggcnggcaatggcgccttatgctacatgttggttctctgcagtatgtgactaatcaggtcctacacaaacccagggaaatcggtttacttccccatgggacacccaagaatcatctgaatgaggttaactaatatccaaggagcagacataatttgttctccatcccccacctagtgtggcaacaccaaataccacacatacgtccagcagcaggaagtaacacacaggcaggagtggtttccaactcccagacagtctttttgtgtgagatcacacagacgttctcagcctgccactgtgctctgaggtgtctggtgaagccactccagatcccactgctccaatgcttcctatgcgctcagaaagtctcaacaggcattctgcctcacaatctgaaccccaaaatgagaggagataggaatggcacctaaagtttctcagacttcccaaagagcatggacttctgactacacagatctaagttgaaagaactggtgaacattcagcattcaagaatctaaaactggtaactggtaaaaaaaga

SEQ ID NO: 38 - DNA, 324 bp, Homo sapiens
  misc_feature 2: n = A,T,C or G
ancactacttagggcgaattggagctccccgcggtggcggttatggtggtcgctagcattctcattttcaagaccactctgttcctttcttagaccatgtttctcatcttaagcagtcatgcccgagctggagacaggaaaccagacagcagtctgccctgataagggacagcattgtctgaaggcggggaatagccctgcttttacccccaactcagctctctttgcttgaaatttagtagtcatagaagaggcacaatgctgttgacagtttctgaaccaaaactaggattcatttcttccaaagcaaaaaaatagtgtcct

SEQ ID NO: 39 - DNA, 449 bp, Homo sapiens
  misc_feature 2, 383, 395: n = A,T,C or G
gngctccccgcggtggcggccgcccgggcaggtacatacattctatgacagactctaaaagttctcttcatgacaggcatcatttttaacattagacaattgtatgatcatgcatattttacatgtttaatgcagtatctgttatggcaagtagcaggaagtattgtattttgtttgaaatgtcatatttattgttgttgaggacgacaacatgttagatatttttaagaagagataccttttgaaatatgcacgattgaattttttcgtgtatatgatttgtttttcctgctcagtcacccgagttaatggccacatggacataaaagatcagcttggatgtaaagagggttatgtgaagggttttctattaaaaatggttntttttataccgngtctgccctttaagttggaaattgcttggcaaaataaggacctttttttttaaa

SEQ ID NO: 40 - DNA, 422 bp, Homo sapiens
  misc_feature 43, 82, 233, 246, 248, 256, 261, 271, 286, 295, 310, 329,331: n = A,T,C or G
ttttaaaaggtaggtgacccttgacacaatgaaacacagtagnttgtgaattagggctcttgacagtaactgattggtattnccttgtcacaagactacacatgtgccttgcctagacaccaaaactaattagagtagtctattttcccatggaaacctgaagacttcaagaattacttattgtcctatattttacttttttgaggggagtaggagatttagggaggaaaatnttactatgctttnangcacattnttttntcattcactnagaacagattactangagaatatnacttaactcttaagnggaatgttagatgagacantnccactagccaatttctaatggcaaaacaaactttttacaacagtaataatggtaataataattactagcatacctgaatgcctacccggaa

SEQ ID NO: 41 - DNA, 332 bp, Homo sapiens
  misc_feature 304: n = A,T,C or G
ccgggcaggtactattacaggattttttgagatttataatagggatagcacttagcctattctgggttagtcttaagaaagcatatagaaacacagtgaaacacttttgagtcaagatttcagcatcatgggtttctacgtagtgtgattctcagtggtgtcttattttaaaaaggatacggctgggtgcagtggctcatgcttgtgataccaacacattggaaggctgaggtgggaggattgcttgagcctaggagtttgagggagctatgatcctgccattgcattccagcctggtcaacanagtgagatcctgtctctatttggaagaa

SEQ ID NO: 42 - DNA, 283 bp, Homo sapiens
  misc_feature 2: n = A,T,C or G
cnaattggagctccccgcggtggcgccgggggccattgagactgccatggaagacttgaaagggtcacgtagctgagacttctggagagaccattcaaggcttctggctcttgacaaagatagaccactggaacaatgagaaggagagaattctactggtcacagacaagactctcttgatctgcaaatacgacttcatcatgctgagttgtgtgcagctgcagcggattcctctgagcgctgtctatcgcatctgcctgggccaagttcaccttccctgggg

SEQ ID NO: 43 - DNA, 401 bp, Homo sapiens
  misc_feature 65, 153, 182, 255, 295, 308: n = A,T,C or G
ggcgaattggagctccccgcggtggcggccgacgtaccaaaagaaaaaaacctgcttctctgtgnttcatgcatgacgcacacacaggactggtctaacaagtcctgatctctcaggccaggccgcctccttctcctcccccattatccatgngcctctccaaggccctccactgggacagntcacactgagttttctctaatcctgagaagagactgagttacttacctggatccctgtgcaaccttgccaaanacacctcacctagccctaaaaggagaaagcagggctttanggagaggccgatnaggaaacaaagataagagggaggggcagaaaaacagaggaaggtgttagactaaaggaaggggaagaggccaaatgcctttctccttcctaca

SEQ ID NO: 44 - DNA, 450 bp, Homo sapiens
  misc_feature 14: n = A,T,C or G
ccgcggtggcggcncgcccgggcaggtactatcacctggctataagttctgagtttaaatcttaggtgcagaactttctagctctatggccttgggcagattgcctaacttcagtgaatctcagtttcctctttggccaaatgcagacagaccagctacacctaacctggcgtgaagtttaaattacatgggatgacaaagaaagcatttagcacccgctctacacacagctacaaataaccaagcactgattattatggtccaacaaagtgggagaaaaaaagaacaaaatatggtttttaagagaaatctaccaaacgcttcagtaatctgaggaaattttagcttgagtttgacagaaatctcaagaatgctcagaagtcgtggcctctttctttagagggttccttgactcctgcaatgtgaagcctcaccatcatgtacctcggc

SEQ ID NO: 45 - DNA, 473 bp, Homo sapiens
  misc_feature 1, 396: n = A,T,C or G
nggcgaattggagctccccgcggtggcggccgaggtacacacatggcattcacacccccaatacacacttcctccttctatctccctgtctgatttccactcatccattctcagctcctgtttgtctgaggccacatgcaactggatttgtcaagcccccttttcacaacttgttgtcacagtccattaccaaattgcatatagttatatattccactaattaggcttctaaaatatcattaacatgtctcttgatcattagcataacgtatgaggccgaccgtcgttaggcacgactcgagtttgttaaccgtggtaatgaaaggcacaaggcaggctctgcaggaaccaagaagcacaggagaagtggggaatattccaagcaccaagatgctngccacaaaggcatagacagagacacagagagacaaaggcaagcacagagaggagatgcaaggcacgaggaaaagggc

SEQ ID NO: 46 - DNA, 333 bp, Homo sapiens
  misc_feature 19, 55, 222: n = A,T,C or G
caagctctgagaccacctnttctgcaaagccttcctgattctgcaaagaacaggnaggcatttcatccttgggacctcacagcaattcaggacacatttgtgtcccagccctgcttggcttggctgtctccatgaatatacactttgcaacttctgcaccaggcatcataccaagcacacaggaggcactcctgtgttttttgaataagtgactatatcatnaccacatttcaaatgcggaatatatgagctactagaaaagacataagggtaggattttacatctttattgtatcctagatatacaagtctattactgccttttcccatgtt

SEQ ID NO: 47 - DNA, 452 bp, Homo sapiens
  misc_feature 1: n = A,T,C or G
nctacttagggcgaattggagctccccgcgggggcggccgaggtacttgattgttctgaaattccttatgcatgattagagaaagagtaaatgacgtattttaggattgtgtttaacaaaagtgagatgctaattcttgaaaattaggcctctctatggggactgcacgtaatcacattaccctagatcttgagttagcgagagaatattctgtcaggtgattcactgaccttgcctataacttgaaaccaatagcaaatccaagatgtagtttcactggccttttgaagtccagggcaaaaagacaaaagcgtgactccctgtctccccattgcatcctggattgtctccctgtccagggacagaataaatatcctcaagacattgactcttttcacaggtgaagaagcttgagggtgggaagctttggcctcatctctaatagggttcat

SEQ ID NO: 48 - DNA, 441 bp, Homo sapiens
  misc_feature 357, 401, 403, 407, 411, 434: n = A,T,C or G
ccgcggtggcggccgcccgggcaggtacttagggtaagcattaacaatattattcaaaatgttatatagagttcaactgtatacaatagagcatttattaaagtgtgtccaaagcgcttataaataaagcatcttcgaggcaggcggctcacttgaggttaggaggaaagcagactggccaacatggtgaaaccccgtctctactgaaaatacaaaaaaattagccaggcgtcatggcgcacccgtagtcccagctactggggaggctgagacacgagaatcgcttgaacctgggaggtgggaaggttgcagtgagccaagattgcaccactgcactccagcctgggttgacagagnggggactctgtctcaaaaaaaagaaagaaagaaagagaaattancncttntttntgtagggaaggtttgggagaaantaaaaaa

SEQ ID NO: 49 - DNA, 384 bp, Homo sapiens
  misc_feature 3, 50, 304, 320, 333: n = A,T,C or G
ggnggcggccgcccgggcaggtacaaaatggtcctctgagaattttgttnctctttgtcattgcaaagagatgcattctagctggatgttttcatttatactcccaaattctaagactcttgtttctcctccagtgtttcacacagatggttagtgaaaaagtcctttctttccccccgaccaaataaacttgattttctgtctggtcctattcggttcagcttagcaagtaacagggcaaattttttttcttctttgggacttgaagtatggtgttttataattcactgagtgattacagagngcccagaactttatgnaaattatttttgnttctcaaaactcatctgtgtagtaagatattagtgttcccattacatagat

SEQ ID NO: 50 - DNA, 502 bp, Homo sapiens
  misc_feature 15, 72, 90, 372: n = A,T,C or G
cccactatagggcgntttggagctccacccgcggtggcggccgaggtacatagttgccatttatattatttntctagtttcccatctttntaccagactacatttcctagaaaatcctggacctctttaccactcagcaatgattctccaaacatcgtatataatataggacacagtcccaagctatgaaatctgcttaccctttctggcgttttaaagaattcagagagctccgttaatatcttctttcaagtattcatgttctacgaactgcagtaagacaatctacccaggaacccacaatataagcctccctaagtttttctccctcttttaatttttaaaataagatttttttactattattatcgnagagacggagtctcactatcttgccgcgtggtctcaaactcctgagctcaagtaatcctcctaccttggtctcccaaagtgctgggattataggtatgtacctgcccgggcggccgctctagaactaggg

SEQ ID NO: 51 - DNA, 444 bp, Homo sapiens
  misc_feature 209: n = A,T,C or G
acactacttagggcgaattggagctccccgcggtggcggccgaggtacctgggattacaggtgcatgccaccacacctggctaatttttgtatttttagtagagacagggtttcaccatgttggccaggctggtcttgaactcctgacctcaggtgatccacccacctcggcctcccaaagtgctaggattacaggcgtaagccaccgngcctggttttgtctgccatttttaatgttcactctgagaatcagagggcgcatcccaggatgaaggtgactctgggacatgctgaccgcagctaccctccctgacttaccacttacatagatcaggccatgggctctcccctactttcactcagccttcaaaccaccagctccaccagcttcctcatcaaacttgctttctccaggcacatccctgagcagaattcacttaaaag

SEQ ID NO: 52 - DNA, 344 bp, Homo sapiens
ccgggcaggtacgcggggcaaagctggccttcctcatgaagctctgagagggatctggctatctcacaggaactgtgtgacatccaaccgtgaccttacaagcttgtttcttatcaagttttaaagctccccatccatcataggactttcagtaacttcctgtttctggatagagggaccagtagttctcatctgcagaggggagaaaatggacatgacttccattcaataactgatcagctcattcaggcccttgttacctcttacttccccagttgctttattcacctggcagaatcctgtgcatttttagatactcaataggatagtattttcccaggaaa

SEQ ID NO: 53 - DNA, 453 bp, Homo sapiens
  misc_feature 20, 21, 33, 34, 102, 105, 128: n = A,T,C or G
tttccaattttccggcgacnnggagctccccgnngtggcggccgcccgggcaggtacttctttttttttaactgggaaattatcagagtatatactttttcnttntgaaattaatgtaacttacggcngttataagttcataatcatgcaatataaaaatggctcactgagtaaataattatcaagtgctaggcagagcaggccctagcaatacaacaatgaaagatgcagttcttgatctctgcataaaggagacagataattacttataatcagtgttattataaagacatagtcaaagtgctaagaatatgatagagaagagcagatttgattttgtgtggtcaggttgtcaaggagggctcctcagagtagtcatttgtgtaagctgaaccttagtaggatctagtgttaaagcatttgcgttagagagaatactgactggctagacca

SEQ ID NO: 54 - DNA, 320 bp, Homo sapiens
ccgggcaggtactttcaaagtgaaacctcctctcctccacccagcttgccatcatctcacactgcttaagctcctgctgcctttcatgtctgcacattgactccaccaacctcatctggccttgttagttaatctacatgtctcctggaggagaacctccaaagggaaggatctctaacttagacattccactatctttgttgtacctcacacagtgggttttatgctcaaatattggttgaatgaataaaagtagtcaaattgcatataaatgcacacaggagacatttatcccctctctgaccctgatgagttttcat

SEQ ID NO: 55 - DNA, 353 bp, Homo sapiens
ccgcggtggcggccgaggtactcatacaataagaccctatacaagcatttaagtaacgatgcaatacaatatttaccaaactgacgacatgtccatgttatattgctaagctacaaaaaaaagtcatataacacatactctaagattccctttttaaaataatataaacatgcccatatacaaaagaataggaagataaatatatcactgcatggtattatagattactattttcttcttttcatttatgtatatcgtctccattttcacagtgaatatatacctattagtaagagaaaatccaatgaatatcttttttcttttttttttgagatggaatctcactggctgcc

SEQ ID NO: 56 - DNA, 327 bp, Homo sapiens
  misc_feature 43, 66, 67, 69, 231, 239, 245, 246, 247, 252, 255, 258, 263,268, 269, 270, 289, 298, 299, 305, 313, 317, 318: n = A,T,C or G
cctagggcgaattggagctccccgcggtggcggccgaggtacncggggggagaacgtcagaaagtnntnaattggctgttgtcctacaatcctttgtggcttcgaattggtctagagacaacttatggagaactcatatctttggaagataacagtgatgtcacagggttggctatgtttattctgaatcgcctactttggaatcctgatttaccagctgaagtataaacnccccactngttccnnnccctnttnaanaaatngggcnnnaaaaaaaaccttttttccnaattttttnntttttnaaaaaaantttnnggggggggg

SEQ ID NO: 57 - DNA, 353 bp, Homo sapiens
  misc_feature 37, 57, 146, 157, 231, 272, 273: n = A,T,C or G
cccgcggcggcggccgcccgggcaggtactcactttngggtcctctcaaaatttttntcagataaagatttttccgggccatggatataagaaataacccactcttaccgataaagggaagttagtgttgtaaaggaacaaatggngattcaggttngggagactttggaggtattcattctccactaagctatatcccaataccatcattatctgggtcagcctccgatncagcctcatcctgtgcttcagcagtggggtaaaacaaatgnnacttgttagctgcttcttcatgaccttcataagactatgcattaatttgaagccctgcccccaaaaataagtgcttgggg

SEQ ID NO: 58 - DNA, 358 bp, Homo sapiens
aggtaccattaaggaaaagagatttaaatgcaatgtgcctacattctatctagagggcccattcttcagttctgacttcaacaacaggactaggtttactggcattcatgtccagtgaaaggaaggcggttaggaggagtcgcaataactttctcttctgttaagagctcccgtagcactcagccactcctggtggtgtatccttgtgttgggtaagctacccatatgccaaatgctttctagtagaggtccagacacatacaggattgaggtcagagtcattcacagacattcgaagatatgaataaaaaaacaaatcctctcaaatacgcagaagatagggtagggtttccattat

SEQ ID NO: 59 - DNA, 428 bp, Homo sapiens
tccaagccaggcattaaatgcttagaaatgtatgggttaaatgctttccatacatgatcttgtttaatacttatgatgatcctatgatgtaaaaatgttatctccctttccatgatgggaaaacagaaatgtcaagagattaagtaacaaactggtaaatgatagcactgggatttgaccccagactctgtggtcctaaccattttttttagggtggtcccgggtctgggtttgtttggacagccctggttgtgtctgttgtctcaaagtgattgttaatagtaataatagaacctgttttcaatcttaaaactgtcacaatttgtatgataagttatatgatcactttagtgattctgccccgaagatgagaaatgggtgaagtcattcaatggacatttataatcagaatgctttggggaaaggcc

SEQ ID NO: 60 - DNA, 500 bp, Homo sapiens
actacttagggcaattggagctccccgcggtggcggccgaggtacttcctctggatgggtgataaagttgagctttgtagatggggaagcagggagcaaggagaacaggaagaggctgaattctatattgactttggaaatgctattagttccctggcctgggacaaacaatctgttccttcttcccaccagcaaagggttgtcctggagcaggaagaagagaaaagtggaggctggggacctaccttgtagtagtcatagagcaggccgagggcagcagcactgtcctcatcaccattaatgctcatcatggccttggtggctgctgtcaggggattctccaagtatgacttccaggcttcatcctcactggtgtaggctcttcgggtattgaatgggagggtcactgggcatgggcactaaggccactagtcttttattactgtaaaaacaagagaaatgtgagggtcatttttaaaagagagcaaattttttacccc

SEQ ID NO: 61 - DNA, 406 bp, Homo sapiens
  misc_feature 65: n = A,T,C or G
cgaattggagctccccgcggtggcggccgaggtacaaaaattagctgggcatagtggcacatgcntgtagtcccagctactcgggaggctgatgaacaagaatcacttgaacctgggaggaggaggttgcagtgagctgagatcgtgccactgcactccagcctgagcgacagagcaagactgtctcaaaaaaataaaaaagaaaaaaataataaaaaggaaaacaaagcctttagaaaaacaaagcctttgaaaaaggatgtaaaattgaatatatagatacaattatttttaaaaagttttatagaaaaatatcctggattgtttgatggttgttttaatatattttaatcatttttgtattaatggccatgtataaatatgttataatggaaagtaaaaaaaa

SEQ ID NO: 62 - DNA, 433 bp, Homo sapiens
  misc_feature 2: n = A,T,C or G
tnctatagggcgaattggagctccccgcggtggcggccgcccgggcaggtactcaagcacaaaagtgagcacagtgttgagcgattctgacactgactgcatgacaaccacagactctgtatccaaacactcgcagacaagaagctaattgcagtgatgaaaggcactccactaaaagcatgagtaatcgctgcagtgatgcacagataaccctctctcctttactaccagggtgctgcggcatttatctcaaacctgtctctacccaatctgacaaccttttgtctctctgaccaatggaaaatggaaatgatttttcactactgttcccgcagcagtgaagggtctcttctgagtgtggagattttagttcaacagttgagtataaaacaaatgcaaaagctggacatttgacatccatggcagaaataaa

SEQ ID NO: 63 - DNA, 492 bp, Homo sapiens
ttggagctccccgcggtggcggccgccgggcaggtacatactgagttcttaataatgttaattgaattaatagataacccaaagtatcattttaaagtccaattagtatttcttggagagggtggttatttcgttaacttccagtccttctaagacttttaaaataggtttaagtcacagttcattgaaatttattatttctcctcttcccattactctctttaccacttagagatgaccctgtcatacctctcccctgatggctccttcatatgttttaaaggacccatcctggctgggtgtggtgactcacacctgtaattccagcactttgggaggctgaggcaggcagatcacttgaggtcaggaatttgagacgagcctgccaacatggtgaaaccccgtctctcctaaaaatacaaaaattagccatgcgtggtggtgggcacctgtaatcccagctaattgggaggctgaggtggagaattgctt

SEQ ID NO: 64 - DNA, 314 bp, Homo sapiens
  misc_feature 311: n = A,T,C or G
cgcccgggcaggtactcttacttggcatgcagacatgtctgactccagagttgctgcttggagaataggagaaaacagtcccttgaagattaaacttgataatttgagtcatgtctcatctttgaactaaatgcttaggtttctggggtcaaaaagaagtgaagacagggaaatgattacttttccagattttgggcttcaagtcatgaactctgtaagacccttgccctgttttctgttactagaacaacatcatactcttagctcttcttcctcatttcttcaagagaagaatggatcatacattctanaaa

SEQ ID NO: 65 - DNA, 360 bp, Homo sapiens
  misc_feature 317: n = A,T,C or G
gctatcactacttagggcgaattggagctccccgcggtggcggccgaggtacgcgggggagatggaggcttgcaggacctggtggttggggagggccagtgaccaggtgtttagaagcagcacctcctgtgattggggctgagggtgaactctgctttcaagcagaggtggtttgtcgtgggtcttccatgatgacaccaggtcaagagcctccagatgctcagagtcttgcaggctcagaacaagaattgtcaacttgccaagatgaatctgtctctcgggggaggacccacacagaacaaaccgtttgaagcaanaagtttgcttggtaaacatggaatcggaacatggggaattggg

SEQ ID NO: 66 - DNA, 434 bp, Homo sapiens
  misc_feature 424: n = A,T,C or G
ctatagggcgaattggagctccccgcggtggcggccgaggtactggtctataattagaaaaactgttttaaattagatgttcccattatttatttaaacagctttttgctgagaaagcttagtggattaatgaggcagagggtgttttgaaatccaataaatagttcccacaggctgggtgtggtggcttatgcctgtaatcccagcactttcggaggccgaggtgggtggatcatgaggtcaataaattgagaccatcctggccaacatggtgaaaccccatctctactaaaaacacaaaaattagctgggccgtggtggcgcacaccttgtagtcccagctactcgggaggctgaggcaggaagaatgggccgtgaacccgggaggcagagcttgcaagtgaccgggagatcatgccactgnactccagcct

SEQ ID NO: 67 - DNA, 439 bp, Homo sapiens
ccgcggtggcggccgaggtactccaacgctctgagaccacctcttctgcaaagccttcctgattctgcaaagaacaggtaggcatttcatccttgggacctcacagcaattcaggacacatttgtgtcccagccctgcttggcttggctgtctccatgaatatacactttgcaacttctgcaccaggcatcataccaagcacacagtaggcactcctgtgttttttgaataagtgactatatcatcaccacatttcaaatgcggaatatatgagctactagaaaagacataagggtagattttacatctttattgtatcctagatatacaagtctattactgccttttcccatgttctgtcaacatagcataaagaatgtggatttacctgttagaaattgaataaagcggccgctctagaactagggggatcccccgg

SEQ ID NO: 68 - DNA, 486 bp, Homo sapiens
ccgcggtggcggccgcccgggcaggtactggattaaacccaaagtataaaataaatatgtccatagtgatataaataaatagaaatgacaactcttccttttagaattccagttaataaatgcagaaggaatacagagaagagaccatctctgctagaacactaccataagaattgcggcagatgcattctaaatggatgcaaaaactagagggagaagtttaaggagaaacaggatatttacatggtctcaaagtatctctccccacttaaaaataattaattaaaaagagaaaaacagtcactttataatgaagaaatctggcagataccaccctgacaatgtgattgaggttaacatgaccagtgacacgaaaaatagccagagggggaacgtaaggtcagagtgctcactcaaaactctgcctcctttatactcacagcgtcgttaaaaaaagaaaacaaaccaaaacattccccaaaatct

SEQ ID NO: 69 - DNA, 314 bp, Homo sapiens
aggtacgcgggatactcatttgggtatatacccagtaatgggatggagacttttcaatacaagttcttttccattgggagcatttgggtgccaatggcagggcattcagggaggggagcgaactcttcgtggggcagtcctctgtgtctcaggctgctgaaacatctaaattccttctctgttataattgggcaccagcctgccactttttcctttcgctgtaacttccagcaaccaaagttaaagcccctgcctcccagcggagggaaattacaatgtcaggaatacgatagaagtaaaaaaaaaaaaaaaaa

SEQ ID NO: 70 - DNA, 350 bp, Homo sapiens
  misc_feature 243: n = A,T,C or G
gctccccgcggtggcggccggaggagaagatggactgagttttggcgataggtcgcacaccttaccaacagcaggcggcgagggctccccacgctgctcgtttccagaggtgcctcgtattattgagaaggccgtgcagtgaatgaaaatgtgtccacacagctcctgctctgcctgtgacattgggttgctgtatattagctgggatagtatatttcaaattgctttctcaattgcaaagtntggtagaaataaatattcgctttaatttagtaactagaacttagaaaagttcctcctgtttcctgattgccaagtcgggatgagaaatagatttcataattatgata

SEQ ID NO: 71 - DNA, 349 bp, Homo sapiens
aggtacttgggtctggaaaagtttggttttcaaggggtccctattagaatgcaaatatttgggaacccaggtgttcttcagctgattttcttgattaacacatttgtgtcagaggatgtctgagcagtgaggcagtgtgagtcagatccctcaggtcctgatggttttacttgattgttcctgggaaatctaaatttcaccttctcttatctatttcaaggaaagtaatttattaaatgtaaactgaatgtaattcatttgaaaagatttgcaagatttaatatagtgaaatccacatatcagaaaaataatttatcaagccatttttcccaattttttcctgtagaaa

SEQ ID NO: 72 - DNA, 363 bp, Homo sapiens
ccgggcaggtacaaaagcttgtccaaacaaggaaacttggcaaatttttcagaagaaaaaacttaaaataataaaagagatactgctattagggtgaggtttggcatgcaaagtttcaacactgagcaagttttatggccaagctatatgtccttaaaaatagggctttataaatggaagcactggcacaaccttcactatagtattgcaaacagtaacgctattttatataacctagacaagaacgtctttttaaaatcaaaaagctggtctattttaatatgttgggctcaaaaatttttaacaaaaataattggaaccactattttgtttaaaatatcaaaggtgaaaagtcctggaaca

SEQ ID NO: 73 - DNA, 422 bp, Homo sapiens
  misc_feature 267, 404, 412, 418: n = A,T,C or G
ccgcggtggcggccgaggtacacgtcttgttgcttgttgcttcttttgtttgtggtttgcatccagctgtgcaaattgctgttccctttgagtgtcacaccacttaatttcatgagacaagttgtcttcaggaaagtctgttcccatgcccccaccctccaggaacccagctaacacccagagcttagctgtcaagacagatttctaatttttacccttcgatggcagaactttaatgttgtgtccctagaaatccttcagccctanaaaatgttggaaagtaggccaggggcagtggctcactcctgtgatcctggcactttgggaggccaaggtgggagaatcactttgagcccaggagtttgagaccatcctatggaggacttagcaagaccctgtttctncaaagatnaaaatnaaga

SEQ ID NO: 74 - DNA, 349 bp, Homo sapiens
aggtacaaaaaattagccaggcgtggtggcaggcgcctgtagtcccagctactcaggagagtgaggaaggagaatggcgtgaacctgggaagcagagcttgcaatgagccgagatcgcgccactgcactccagcctgggtgacagagcaagactctgtctcaaaacataataataataataaaaggtattagtgtaactgctgtgtggagaatgaattaggatggctgaaagagtgaacactgatttaccaaataggaagttctcacagtagttgaaacacaagttatggtggctaggactgggaggggactatgaagataaaaaaaagcggtctattttgaaatagaa

SEQ ID NO: 75 - DNA, 462 bp, Homo sapiens
  misc_feature 1, 269, 346, 407, 411, 425, 447: n = A,T,C or G
nctatagggcgaattggagctccccgcggtggcggccgagggtggatctttaaagtgttcttatctacacaaaaaatttcagactcccaggagagagaatcaggttggcttaagtaggttcaaatatctacacctataggttggataatgggtctggaaactagagctattgtaactaccattacagtggtctagataggagatgatggtaatttggattatagttgcagtggagacagagaaaagtggatgaatatgttaatgggcanaagccatcgggatttatagaataaagtgattgtgaagatagaaggaaaaaggaaagagaatcatgaatgatgcctanatttggggctcaaataactggtggaaggtggagccatttactgagattggaagaatttttnaggngggaattttttttntggggggttgggggaaaaaacngaaaacttttttttt

SEQ ID NO: 76 - DNA, 420 bp, Homo sapiens
  misc_feature 60, 228, 261, 362, 374, 386, 388, 394, 402, 405, 409: n = A,T,C or G
ccgggcaggtactacaggagcatgccagagtgcccaactaatttttcaaattttttgtanacacagagtcttggtttgttgcccaggctggtcttgaacccctggctttcaagcaatccttccttcctcatactcccaaagtgctgagattaccaggtgtgaaccatggcacccaaccccaattagttgtcttaaatgtatattcagaaacatgccttctcctctacnttaaaaagttaggtaaaaataagggccaggacnaccaggaaaggaaaattattacctggcattaaatcctttactttaacaattggtggaaaaatatttttttaaaaaaaaggttttgccattattattataanaaaccacgaaantaagaaaaaaangntgggtncaacccanggnaagntggaagggaaa

SEQ ID NO: 77 - DNA, 524 bp, Homo sapiens
  misc_feature 456, 464, 508, 509: n = A,T,C or G
agggctaattggagctccccgcggtggcggccgcccgggcaggtactgactgtctcaaattctttgatagctgtccctcatgtcacctagctgctgagagctttgtgatcctaacaggtgatgactcagaccgacactgcattggtaggaattccacaaataggtgcctcaatgtgcctagattgaaatatcagcctttcccagactgacctgatgggttgacttcaggtgtggtgtaaacacctacattttaatgtaaacatttcagtgtaatcaatgagaactatcattctgctttaatcaccatgagttctgaaataacaaaggatttgtctgacattcattctaagaaattcattcttacctgactaagaaactttttttaacctggcacaaataattaagaaatgacctgtaagtacctcggccgctctagaactaagtgggatccccccnggctgcanggaatttcgattatcaaagcttattcgatacccgtcgaccctcnnaggggggggggcccc

SEQ ID NO: 78 - DNA, 360 bp, Homo sapiens
ccgggcaggtaccttccagctgtgacaaccaaaagtgttcccagacatagccaggtgtcctctgaagggcagaattgtccccagttgagaaccactgcattaactcataggattagcaggatacattaaataactgtgtgaaaatacaagacatcatggttgtcttcctccttctctggcattccagtcttctctgattgtctatacttacgtagaagcagaaagaagaaacagcatattctatccacatccctatgtggtccagcaagtgacttgttacgtccatgctttcacatcatgcgattcaggtaagtttgtccttttctaatgggcttgatatttactgtgtgtgaagagcca

SEQ ID NO: 79 - DNA, 362 bp, Homo sapiens
  misc_feature 77, 78, 131, 354: n = A,T,C or G
tcaataaatattccaattgttaaatagtgctaaagtgtggtaatctgaaaaatgctgaccataaatattaaaatgtnnataagagaaatggacttctaaaacccacacacaatacacacaatacaaaactnacactcataccaagaaacaaataaattatttctatagtaatattgttcttttcaatgtacagaaaattttccaagaaattaaaaatacaaaatgttaggtctgtagaccaattacacaagtacataagtctgtagatcaattacacaagtatattcaaatctaaatatagttataatatgctaatatattaatatcaatgaaaatattattctaatatttggngaaactat

SEQ ID NO: 80 - DNA, 406 bp, Homo sapiens
  misc_feature 7, 339, 365, 373, 378, 387: n = A,T,C or G
ccgcggnggcggccgcccgggcacggtccgggcaggtactgtggagattttacaagtaggaacttaagatgcatcccctggaggtcttgccagcagcgagtgacttcatttaattcaatagatagtcatgttaaagtattggcactttccaatggttgttaacaagaggtagtggaaagtgccttaactttctaatcagaaagcattcatcctgttgagtcaaggtcctcataggaaatagatggcacaccgaaattaggatgagtgtgatacagcagaccatcaagggacattgcagtaacccatatgtacctcggccgctctagaactagtgggatncccccggctgcaaggaattccatatnaaagcttntcgantacccgtcnacccttgaggggggggccc

SEQ ID NO: 81 - DNA, 385 bp, Homo sapiens
  misc_feature 76: n = A,T,C or G
ttagggcgaattggagctccccgcggtggcggccgcccgggcaggtaccccaaacctaaaataaatgttggaattnaaataaaactcatattaaagttttaaaaaagggctttgtattaggtaattttacctaaacgtaggctaatgtgttctgagcatgtttaaaatgagactagccgggccaggtgtgatagctcacatctgtgatcccagtgctttgggaggccgaggcgggcagattgcttgagcttaggagttgaaaaccagcctggacaacataacgagaccctgtctctacaaaaatgagctgggtgtggcagtgtgctcctgtagtcccagccatttgtagggctgaggtgggaggattgcttgggcctgggagctg

SEQ ID NO: 82 - DNA, 457 bp, Homo sapiens
  misc_feature 3, 45: n = A,T,C or G
cgnggtggcggccgcccgggcaggtacatgataagatgggagganatggggtgtgtatgcactgttgggagagcatctgaatttggggagacatctgttgaagcctgtatagaaggattaacatcaaaaacattggccattgactctggaacaagggggaaaatcaaaccatctcacccaaacactgtgacagtgtttgaagaatatgtgaaccaaacatttgactatatcttcatcacaagccctctctcttttatagaattgcctactcctaatattgaagaacacaattgtattcatcttatggatcttcaggggaattatccagtatcaggtttttaaaagctggctcctgtgacacacctaaaaaattccactccctagtgatatgaaataataaatgaatgagtgaaatgaatgaaaacagatgaaaactgaatgagagaaattcaaataa

SEQ ID NO: 83 - DNA, 333 bp, Homo sapiens
ccgcggtggcggccgcccgggcaggtacatcttttcatttttttcaacgttgaatcctgtcagtgtattttctaccccaaaaattaatgtaaaaacttcatctgcatttcacacctacatcaatagtagtgtgtgtcacccacgagcagctgcttggaacgtgccctctctgagaggttacaaattggtctgtgccacctcacacacaaccgggatgtcagcatggaggacagagctggaaggaacctcaaaggtcagcagcaggatgatttctaagcctggctgagaaacataatcacctgaggggagctcactaaaaacacaggttcctgg

SEQ ID NO: 84 - DNA, 396 bp, Homo sapiens
  misc_feature 47, 72, 73: n = A,T,C or G
gggcgaattggagctccccgcggtggcggccgaggtacaggaaatancaatattgggagagccaaaggactnnctaagaactctagacaccacatatcctacaggaacaggtgacaaaagtaagagaagagggtaatgcactgtttgtatttaatatgggaagtaaaaacagatgaggctcctattgaggatatgaatctcacacagcacatgagggagaaactgttcaaaaagtaaaattacttctccatattctccaaccttacccatatccctttcccaacgcgtttccccttgactcatcgtaaagcagtgtgaacgtaatagaaaataacattctcttcttcttccccatcacagtgtgagtacctgcccgggcggccgctctagaactag

SEQ ID NO: 85 - DNA, 358 bp, Homo sapiens
  misc_feature 53, 66: n = A,T,C or G
gcgaattttagctccccgcggtggcggccgaggtacatttttgtcttccaggngaacttcaacatnttgttacttttgatccctcagttttaattcagtgtctaaagcctgagaaatgccagtggcctgacagcagcagacattgcacaaacccagggtttccaagagtgtgcccagtttctcttgaacctccagaattgtcatctgaaccatttctataacaatggcatcttaaatgggggtcatcagaatgtatttcctaatcatattagtgtgggaacaaatcgaaagagatgcttggaggactcagaagactttggagtaaagaaagctagaactgaagctcaaagcttggatt

SEQ ID NO: 86 - DNA, 483 bp, Homo sapiens
  misc_feature 6, 48: n = A,T,C or G
agggcnattggagctccccgcggtggcggccgcccgggcaggtacttnaggggtcttaggtgggaggattgcttgaggacaggagtcagagaccagcctggtcaacatagcggaagaccctgtctctacaaaaaatttaaaaattagccaagcatagtggtatacgcccgtagtcctagctactcaggaggctgatgcagaaagatctcttgagcccaggaggtggaggatgcagtgagctataattgtgccactgtattccagcctggataacagagcaagaccctatctcttaaaaaaagagttcttaggactattttcacccgaaaactgaaaacacacaaatctttgaaatgaaatgcctatgctacctactcctagatttgccagatttcaatttaaagtttaaaaagtgctatcctttttcaataacaggtaataaaattgagtttatagaattatacatacttttcccattccaga

SEQ ID NO: 87 - DNA, 370 bp, Homo sapiens
  misc_feature 69, 118, 157, 323, 332, 359: n = A,T,C or G
aattggagctccccgcggtggcggccgaggtactttaatgtatacgctatctggaatgcttgggaccanggtgtgttttaaaaattcaggtttcagattgtagaaaggtaatatgcancatataccacatagattgtgatatctccactgggatcangatgcagcatccggtgatcaaataatattaacatttctgcagttgaaacatgagtattcacactaagaataagatgaggaccattaaaggccttacaccagtcaggtgcagtttggctgccctgggagtttaggactgtctgaatactgccaagcgagttttatcntaatcaagngaattattgataaaactttgatttccnagctttttgga

SEQ ID NO: 88 - DNA, 290 bp, Homo sapiens
  misc_feature 4, 16, 19, 21, 27, 31, 33, 67, 71, 85, 93, 101, 107, 120,171, 185, 190, 197, 209, 243, 269, 273: n = A,T,C or G
aggnacaaaggtcttnggngngtgctnaaancncaacaccaaggaagtgatatgaaataaatagtgntggnatccaccaacgganagaaattnccacaacnatgtgnggggagagacagngcaaacagaagaaacagaatgagctaaaacacgaagcatgttccagcaatngagtccttgggctngaagnatagggnatgggaagaagnaagactggagagactaatgccattcttggcgagncctaaaagcagacttaggacttaatncaanaagcaataggaagccat

SEQ ID NO: 89 - DNA, 292 bp, Homo sapiens
ccgggcaggtacctggagccaccaggactccctctgagcccacaaaggagtgtcttctcaccaccccgattatactggtctagttatgctttggagttaaagccaggctgctattgcagggctgctgcaatccttgcaagcacagttgttctttgcttgcgcttgctctcgctctcgctctcactctcactcttgctcgctctctttctctctctctgacttcagtttaactttttaaacttcagtaataagtgttcctcaaaatagatggtcttcctggttgtaggtacct

SEQ ID NO: 90 - DNA, 400 bp, Homo sapiens
  misc_feature 376: n = A,T,C or G
atagggcgaattggagctccccgcggtggcggccgcccgggcaggtaccacttcctgacttaagtcagagatgaccagcattctgagttaggacataatcactcagggtcctgacccactggtgaatggattgagagaggtagtgtggctgcacttgcatcaggagcaaacctgacatgactctaagctcagctgcttttctccttcttctcagaaaagctcagctgcagccaggtgcaggggctcatagctataatcccggcactttgggaggccaaggtgggagaatcgctggagctcgggagttcaagaccaacctgggcaacatagtgagaccctgtctctatttattaaaacatattaataaacaaaacanaaaaaaaaaaaaaaaaaagtacct

SEQ ID NO: 91 - DNA, 400 bp, Homo sapiens
  misc_feature 32: n = A,T,C or G
tcgggcgaattggagctccccgcggtggcggncgaggtacattaagcaaaactcttttagtttcattttccaaagatctatttgattttaatcaaacagccccaaaaaccataacgtaaacatgaaccagaatcagcgttttatactcttaaaaactagggaagctttgccttaaagaatggctagattcacaggctcaaggaaattttcaggacaccgtatctctcacctctcacctgtttttcacttagttggccctgtttattctcaggtaaaatgaatgccaacaacatgcttgaccccaactccaagtttgtaacaaagaagggatttgttcttaaaaattcaaatacaagtcctaggtctgacactcattacccaaaattggatcgtacctgcc

SEQ ID NO: 92 - DNA, 338 bp, Homo sapiens
  misc_feature 182: n = A,T,C or G
tgtatttctgtaaagcataaaatattgtttttaagttagttttcatatcatgttacttaattcatcatttcaagattaaatcagtatctagtaaattgatctgcctacctagcgattggtttccatcactaatgataaaagttttgatgcttctccctttttcaaggtgctacatactatantccttagaacatcttaagaaataaaaaggcaaggctggggcacagtggctcacacctgtaatctcagcaccttgggaggccaaggtgggcggatcacgagatcgagaccatcctggccaacacaatgaaaccccatctctactaaaaatacaaaaa

SEQ ID NO: 93 - DNA, 392 bp, Homo sapiens
  misc_feature 10, 59, 60, 62, 71, 232, 261, 290, 301, 329, 332, 373, 375: n = A,T,C or G
tttgagctcnccgcggtggcggccgaggtacttttttttttttttttttcagttctggnntncatgtgcanaacgtgcaggtttattacataggtatacatgtgtgggaaggggaggcaaaaccatgtagagttgtgcaggcaattgtcagggctttagctttgactctgagtgagatggaaagctactggtaagttctgaacagaggagtggccgtgattttttttttatnatctttccagttctgggatacatgtgcanaacgtgcaggtttattacataggtatacntgtgccatggnggtttgctgagaatgatggtttccagcnttnatccacggtccctgcaaagtcctttggtcttttttataaananccagtaaatttcccatt

SEQ ID NO: 94 - DNA, 221 bp, Homo sapiens
  misc_feature 61, 65, 81, 125, 142, 185, 208, 219: n = A,T,C or G
gcgggggcggccgaggtacatcagacaaggttctctagtgtcaagtgtaataaaataattntaangactgaagatccctancaatgagcaaactgaagctacaagagattatgtgacttaatgtntacatgataaattaatnaatttaaccaatatctattgagttaccattaatatttattacngtccttgctttataatccacagntctttctactnta

SEQ ID NO: 95 - DNA, 569 bp, Homo sapiens
  misc_feature 364, 481, 488, 542: n = A,T,C or G
cgaggtacatgccatgaaggacatatacaaggtaatgggaaccacccaataaaaagtagtcttactatccttttgttttgggcatacaaaagcagattaaggataatcgtcttgttcatttatttatctatatacttatttatattctgtctctaggactgaaaaagccaaaagatcagggacctagttttgtttcttgctctttctcaagcatgaggacactgcctggcacatagagggctcacagtaaatatttcctcaatacatttgttgattaagtgaaggtgatagaaactgacagggaccttgaacaagattagagtattttatctgtatctatattgcatttgtttttgaaattctntccttatttgagctaatacaatttaacagaagacattttttatgtggagaagctataggaaataaaacctcataatgttgtaactcatgagagctaggatacatgtttgaacaaatntcttggnttgtctttatttctagatatgacatttgctttcttttttacaattcacctaaanggctgcttatttttaaatggtggtatt

SEQ ID NO: 96 - DNA, 500 bp, Homo sapiens
  misc_feature 419, 429, 430, 457, 489: n = A,T,C or G
ccgcggtggcggccgaggtacatcatgtatgagaggcagactcgtcgctgacaaaagggctgacccctggaaaaccagcacagagccagctcttctgtctgaatccactctctccaaaacataacataagtcatggaaagaaatgagtctcaagaaatgagactcttaccgtgatgagagggggacattgaaaagctactttagtgattagggagagaagtccccttttgcatcccaaatcaagcagaggactggtagtccaaatataattttggaataacctgagtcacctgggccttgaggaatcctggcctcttagtccacatttgcagaaatatcaggaggtcaatcaggaagctgtttaggcatctcaacacagggtcaaaaagctcctagggtacctgcccgggcggccgctntagaactagnnggatcccccgggctgcaggaaattcgnatattcaagccttttcgatacccgtcgacccncgagggggggg

SEQ ID NO: 97 - DNA, 330 bp, Homo sapiens
aggtacatgccaccatgcctagctaagttttgtatttttagcagagacagggtttcaccatgttggccaggctggcctcgaactcctgaccttaggtgatccaccctcctaggtctctcaaagtgctggaattacggtgtgagccactgcgcccggcccttagtagcatcttttaatggaggtagagttgagatttcagtgactaacaactaaaggtattaaaggtaggggtttatatgatacatttgcattttagaaaactgatctaagcttcaatgtgaagaacagattgaaatggaagggggagaagactagaagcagaaacattac

SEQ ID NO: 98 - DNA, 546 bp, Homo sapiens
  misc_feature 481, 487, 498, 531, 534, 546: n = A,T,C or G
ccgcggtggcggcccgaggtacagtttttcagtttagttctcttagacttaaattgtccaacatctggagagcagagagaggcactcacacatttatacacattccttttgagtggattgaagggaaggtgggcagccattgctttgggggtcatcttccagacagctgcctgctagggagccctttgcattcggcgatgctgctgctgttcattgtctggccatgggagtaacaattttggacatcattgatgatgtctggaattctttggtgtctaagtgcatggtagtttttttttctttgtgttaggctggtttcaaaaatggactgtcaccatattttgttgctagcacttaacagtgagcttttaagagccctctatgtcttgaattttgggctccatagcccacttgtcccaaagtgagtcatttctttgaaagaaaaataaaagggaggaggattttgctttggtttctattnctgttncatcttgctgnttcagcttttgctgtacaaaaggtttatgtaangcnccacaaaaaaan

SEQ ID NO: 99 - DNA, 342 bp, Homo sapiens
aggtaccaggagggtattgatgtttgaggtccaaactgaaaacccatcacctccttcccactgctatagcagcgttagccctggggttcattatctagccagttcacaccttctaaagtggggctctgaaaatgtcttacttccctcacagacaaagcaattctcaagcctcctgagatcacccaccaaccagagcaactgctgtcacttggaggtgcagctgaattcttctaattgtgacacaaactcttgaaactgtaaatgctgaaagattaaatgaggttataacactcagaaggttttacaagtaaaagtaagtcaaatcaataggtctttatttca

SEQ ID NO: 100 - DNA, 409 bp, Homo sapiens
aggtaccattcttatctcagaatgctgtaaaccatcagtagaagcagtttagatttggactgcatggtaaaatgaaaagtaataaccctccaaccacaacctagtcagggtattaataattatatgtagcaagaaaacaaagaagaaaataatattgaaaaaatggagattccccaaccagtttcatatttgaaggatctgagttgtatttttattaaggaaattttttttctgaatactgtcttccaaaatgttaacattaaaatctgaatcagaggactctgaatggaaaagaagtttgatcactgacacctagggctctgaagcgtgtgtggccacgtggaaaagtcgaaggatgccgctgtcgaatctcctttgtcttcactccatagacaattgggttgagcac

SEQ ID NO: 101 - DNA, 362 bp, Homo sapiens
aggtactaaagcccattcttgctgaaaatctaggatgacaaacaactcacagggcaaaacccatgtggttaggtgggtgtttgttttgatgcgaagcctccagttttgttcctgtctaggcctgtcccacagtcatctgacattcctgcaaaaacttgtctttattttggatggacacacaagcaatggaattggcactgaaatttcagcttatggtgcagggtatgttaggatacaatttccccctgaagtaaatactgaaacactgacatgtgggtttgttttacttttttacttctaaaaatttgcaaacgggcacggcggctcatgcctgtaatcccactagtttgggaggcccaggc

SEQ ID NO: 102 - DNA, 515 bp, Homo sapiens
  misc_feature 18, 194, 225, 253, 266, 279, 290, 323, 331, 406, 412, 419,436, 441, 466, 470, 477, 481: n = A,T,C or G
cgcccggccaggtacatnaccctgctgagggacatccaggacaaggtcaccacactctacaaaggcagtcaactacatgacacattccgcttctgcctggtcaccaacttgacgatggactccgtgttggtcactgtcaaggcattgttctcctccaatttggaccccagcctggtggagcaagtctttctagnataagaccctgaatgcctcattccatttggnctgggcttccaccctaccagtttggtgngacatcccattgntgacaggaaatgngagtcatcagntttattcaacccaacaaagtcaagctcccaggncacccaanccacttttctaccctggaaattttcacccaattcaccaaccttaaccattatttccccaagggaccaaaaaggcncccagnccccagngccaacccaccccaaantttanccccaggaaggggaaaccaaaaaangggnaaattantttnggaggggaattggcccgccttcaaaaccccaaac

SEQ ID NO: 103 - DNA, 465 bp, Homo sapiens
  misc_feature 249, 250, 252, 262, 265, 271, 277, 278, 287, 301, 317, 340,358, 425, 428: n = A,T,C or G
ccgcggtggcggccgcccgggcaggtacgcggggacaagtagtaagcctcattactcagttgtgagggggaaggtagactctttccagacctttgataaaggggctgctcaaaaaagccacgaccttgggcctctgctaaaaccatggctttaagtaaggagggagcagatatataaaaaaccttatccctctttctaatctcttatgtcctgtgagtgtcacccattgagtaaacccaaggggaaatnnangggaaagganctnggatgntggcannctttacagntcccagtaaagatntcatttgccattttgngtgaaaaaaggagaataattctnatccaaaccgcctgtctntggaaataagaaaagctctggaggggtctcccaaagttaccagaggaaggcctggaattttatgggngantgataatatttcccagcttatggaagaaaaaaatatc

SEQ ID NO: 104 - DNA, 406 bp, Homo sapiens
  misc_feature 1: n = A,T,C or G
nctatagggcgaattggagctccccgcggtggcggccgcccgggcaggtactatatggacaccaacatggagcagaaaatgagggcagcagtgtccaatctcattccaggtgagaagttgcacagtgtccaataggtgcatacatctccttagtaagtagttgtgattaacaatgaaatagaaatgaaaaatatatttttttatttatgtgtattatatttttcaagcagctaataagttggtaggacataatatttaattcgttggggacctaattatttataaattgaatggttagatatttcttttggcctaagccaccatgaaaaaatcactgaggcgctaagggaaacatgaactaagaagcccttctgagtctctgttttctcaactgtaagatgaagaa

SEQ ID NO: 105 - DNA, 321 bp, Homo sapiens
cactacttagggcgaattggagctccccgcggtggcggccgaggtactccctttccctgactcagccttttattgatgaaggcagggatgggatggggagagctcacctggcaaagactccacacaggtgtgcagcacaccctgatggggccagaaaatgtcactgtgagccctaggggtgaaagacacagtgatgggctgctgggcaactaccaagtgtagagatcctgagtgcccagagagttaccaaccacttcccttccctgtgcagatcagtggaggcagatacatacacaaaatgggaaggggaaagaaaacggc

SEQ ID NO: 106 - DNA, 572 bp, Homo sapiens
  misc_feature 29, 61, 452, 458, 489, 503, 518, 539, 560: n = A,T,C or G
ggtggcggcccgcccgggcaggtacgttnttggggaatggctgcagggacccctggctaanacatttgcatgtttctccttgttggtcagtagcgaactgtagggagcatcctcatcataggcttgcgggcaaagatgatcttgttatagttttcaagttggacagtctctggaatccgcctgtaaagtgtgtgggttctgggatcatggtaggagccatggccaataccgaataagcgccccacattgataacgtggattctgacagcgtgtccctgaacacagctttgccagaagacttggaagacttcctccttttcggctgaatgacgctggaaggtttattctgccttgatgcccagggtctttcctcgagggcacgcatgcattccagttctctagttttgctttttctcaatgagtcttttcactgtcttgaaaaggtataggtnacatangcccggccagggggtcatgtttttcaagtancttcccgggaagtncaagtgttttctggngaaacccttcttcttttcttnatccttctttggcatccattnttcttttttaaa

SEQ ID NO: 107 - DNA, 431 bp, Homo sapiens
  misc_feature 1, 3, 85: n = A,T,C or G
ncnggcgaattggagctccccgcggtggcggccgcccgggcaggtaccatggatggaagtggggctttggcaaaggccctagcanttttgcctggcactgtggactcggtgttgtctagcagagaggccttgaggaagtggcccagcagtgtgcttgcgtttccaagatatctatcacccaaaagacttcgagatagacaagctttgttccctgccaaagtgacaaatgtcagcttgctggaaaagtttgaacgaagtgagagtggtgggaagattatgacccctgaaagcttatcatatccaagttgtctgaaacacgacagtgagatgaagccccaaacatctccagcttgccaggatcataacaaggcaggacaggaaatgtgctatgtatgtttggaacgagcacaacgaaattccctgttgtacct

SEQ ID NO: 108 - DNA, 484 bp, Homo sapiens
ccgcggtgggcggccgaggtacgtatgttgaaagaggtaaataaatgtatgaaaatataaagcattcagaagacaattgtccataaaaaagaaccaagtgggtatcctggaaattcaaaatacaatgtctgaagttgagaattagatttgttacaaaccagatggcacacgtcagaaatctgaatgagaaaactcagaagcaagttaacagaaaatatccaaactgaatcacagaagaagactaaaagagagcatgggagttatgtgagacacagacaaaagttccaacatcgatgaaattggaatcctggaagaagagagaggggaagggcaagagaaatatttaaagaaaaaagtaattgagaattttccagatctgatgagaaactttaaatcactgaatcaaaaagttcactaagcccaacagggtggacacaagtgcacacacaaacatacacacaaaacccatccaagtacctgcccg

SEQ ID NO: 109 - DNA, 638 bp, Homo sapiens
  misc_feature 125, 182, 184, 186, 189, 190, 193, 203, 215, 220, 223, 269,271, 274, 283, 288, 290, 293, 295, 298, 310, 312, 314, 323,329, 338, 341, 352, 394, 413, 435, 440, 441, 443, 448, 451,456, 466, 470, 474, 484, 492, 495, 498, 499, 509, 512: n = A,T,C or G
  misc_feature 513, 521, 533, 535, 547, 552, 555, 572, 573, 574, 577, 583,616, 622: n = A,T,C or G
gcgaattggagctccccgcggtggcggccgaggtacctggaaagatgaacaggattgcagcagatagagacaggtagaaggagagagattccaagtggaaggataaaggagagggaagagaagcnaagagcgcaacttccaagaagattttctggtttctggcactggccatagatagctcntncnganncangcaaagaggnttttcctgtganattantgnaatgccttttgaggtcttgagaatgggcacaaaagtgggatatgantntcngtctgggcnaatgncnctntngtngttgtagattcntnanttctctccnttatgntcccccctnttncctagtaagtntaacccttgaaaggatcttgagatgcttcccagccttgttcncagatccccttgggcccanaatcactttcttatgaaaaacncgtcnntnttccnttntttgncttccctctnttgntttntttatcatcnattaattnttnctnnttttttcctngtnnatttggtnccatattttttngncattttctttcnctttnttnttccccctgggcttgcnnngantttctntatcacagctttatcgattacccgtcctccctntagggnggggcccctgtcccct

SEQ ID NO: 110 - DNA, 352 bp, Homo sapiens
aggtactccaaggctctagcaagaaatgaatttagggacctctgcctttgatatgtgcttcttcacaccccaccctctctaaaggaaaaacacacagaccactgaaaagaacactcttaaaaagattctgaaaactagcagtgaagaaagtttcaactagtgcttctcatattctctaactgtagaatccctttcctgagcatatcaggcccccaaaccaatttcaaggggcctctgaaatttctaaattggtttccaaaataaaattatcaaaatatttcacagaaaaacccagatttctgtcttctcttgcaaaaatgtggatgtgcaggcagctgtgggcttgtatctc

SEQ ID NO: 111 - DNA, 484 bp, Homo sapiens
  misc_feature 401, 457, 459: n = A,T,C or G
tagggcgaattggagctccccgcggtggcggccgaggtacctagtcacttctaaagcagaagggagcttttggctgggaaacctaagaatggaattcataggttttttcctggtcattgtgtctgctagctcacagggaaacacactgtataggtgaccatgagaatggccttcagactaaccatcagtaggtatttctaattgtaactactgatgggagagttccagttgaacatcgcagaaagaaaccctcacttgacatgcacatctttcaagtatcaaaacacctgttcagatccctattgaaagggagacaggatgactactcattttgtgtctgcaggtgtttcccacatgtctccaaggctcacccaattaatccattttgtcaaaatcctcanaggaagtatgaggtagaggaatgagcttgcaattggcagcctgaacaactctattntntaagctggactctggggtcttggct

SEQ ID NO: 112 - DNA, 435 bp, Homo sapiens
  misc_feature 6, 68, 282, 345, 400: n = A,T,C or G
gggcgnggtacctaaatcaataaaggaaacatcaaccagacacaaatccaggaacaagtgcaaatacntcacttgtcctgttcaaaatgctaatataagaaagacaaagcaagaagcaaagaatcgttcaaaataaaaggacgtgggccaggcgtggtgactcatgcccgtaatcccagcactttgggaggccgaggcagccggatcacgaggtcaggagatcaagaccatcctggctaacatggtgaaaccccgtctctactaaaaatacaaaaaaattanccaggtgtggtggcgggcgcctgtagtcccagctactcaggaggctgagacaggagaatggcngtgaacctgggaggcggagcttgcagtgaactgagattgcaccactgcactccancctgggtgacagaatgagactccgtcttaaaaaaa

SEQ ID NO: 113 - DNA, 430 bp, Homo sapiens
  misc_feature 338: n = A,T,C or G
aattggagctccccgcggtggcgtacccggcctctctccagtttccagttggaatccaagggaagtaagtttaagataaagttacgattttgaaatctttggattcagaagaatttgtcacctttaacacctagagttgaacgttcatacctggagagccttaacattaagccctagccagcctccagcaagtggacattggtcaggtttggcaggattcgtcccctgaagtggactgagagccacaccctggcctgtcaccatacccatcccctatccttagtgaagcaaaactcctttgttcccttctccttctcctagtgacaggaaatattggngatcctaaagaatgaaaatagcttgtcacctcgtggcctcaggcctcttgacttaaggcgggtctgtttaatcaagtgacatcttcccgagg

SEQ ID NO: 114 - DNA, 343 bp, Homo sapiens
ccgggcaggtacatgtgtgcttttttgcatgtgtattacatgccaagggctttatatatgttatgtctgatccttctgacaccaccacgaagtaatattaattgtccccattttataaataagcaaactgatgcccaaaagattcattcaagcaaggctgtgcaactagtaaatggcaggaccaactttggcctgatgttcttttcaccgcaccacgctacctctttcagatgtccaagatggagccacatagcttggttatggggttccattagtctgccctcttatcttatttcagcacctaccctgtggccatgaaccattgattcataattttcctgta

SEQ ID NO: 115 - DNA, 586 bp, Homo sapiens
  misc_feature 18, 34, 35, 53, 56, 61, 62, 97, 346, 449, 476, 545, 547,557, 568: n = A,T,C or G
aagcggtttggaattttntgatgaacagggcacnnattcgtggctggtttttnaangaggnngcagatgtgaatagaccagatcagaaagaaccttnaggcaaggccaaggaacttgagcttcatgctctaaggcagggccccactgagggcttgcaccctccagagtgatggggcaagattatagctggcatgctcagaaccgtgcatgagcgaatgaacctctgaatgcacatacatatgagcatgcacattagcaggagaaaaaggtgcaggaccacagctgaagagtaacggggaagcacagaggaatttaagcaggagggtgccattgttagctttgtgtntaaaaagccctttctagttatagtatggaacatgggctgggtaaggcagggagattgggaaaaggcaggaaagtgggaatgggagacagggagaaaaggttangaagtggtgataggcaaggcaagaggngatgaggcctggaccaggaaagagatagaaggagtaagaaggggagagaagggatattttgggacctanangctactatgnctttggggggncaacctgttggggggggg

SEQ ID NO: 116 - DNA, 436 bp, Homo sapiens
  misc_feature 2, 3, 50, 54, 97, 339, 422: n = A,T,C or G
cnnggcggccgcttattcaatttctaacagggatttccacattctttttnctangttgacagaacatgggaaaaggcagtaatagacttgtatatcnaggatacaataaagatgtaaaatctacccttatgtcttttctagtagctcatatattccgcatttgaaatgtggtgatgatatagtcacttattcaaaaaacacaggagtgcctactgtgtgcttggtatgatgcctggtgcagaagttgcaaagtgtatattcatggagacagccaagccaagcagggctgggacacaaatgtgtcctgaattgctgtgaggtcccaaggatgaaatgccnacctgttctttgcagaatcaggaaggctttgcagaagaggtggtctcagagcttggagtacctcggccgctctagaactaggnggatcccccgggct

SEQ ID NO: 117 - DNA, 316 bp, Homo sapiens
ccgcggtggcggccgcccgggcaggtactatgaatgttctaaggcccttccaaacctgtaaattctatgattcaatgaattacagaatatattcaaagaattatagaacagaacatatattccacgttcatgtgctctaccagaacacatttatttgctctattcaattcaacaaatatttaggtccggcatggtagctcacgcctgtaatcccagcattttgggaggctgaggcgggtggctcacttgaggtcaggagttctagaccagcctgggcaacatggcaaaaccccgtctctactaaaaatacaaaaat

SEQ ID NO: 118 - DNA, 370 bp, Homo sapiens
ccgcggtggcggccgaggtacctggtgttgattagcctgtgtgagaaagataaggagagctggtaattataattgagcatgtgccatatgccaggcgttatgttaactgctttacatgcattacctctttaatccttataatcctcatagtgctattattatgaatatttaacagctgaggaaacataggcctacaaaggttaagtagcttgcttaaaatcattcaaaagtgatgtggtcagaattaaattctaagcctgtcagttctcagagcacatgttatataaactctctctgttatactgtctgcaagataggcagcttttaatatttgaaggctgtcaataaagattatatgagagtagttcca

SEQ ID NO: 119 - DNA, 541 bp, Homo sapiens
agggcgaattggagctccccgcggtggcggccgaggtacatgaacttgaatggaaataaaaaggttaaaagcaagtaagtggtgctaacaacaacaaaaaggaacaaatctgaagaagtgggaacgtgatgaacaaaccccagccccctgagcctcggggacagcacagatgcgtgtgtattgcagcacagaggggcagggactaaggacagaagatgcatttgaagacatggtctaaaacttcccaaatttggtgaaagacaaatttatagattcaagatgccaaagtgcaataaatgcaaagaaaatcacaccgaggcacctacgtgcaaactgctaaaaaccaaatctttagattgttaaaaaaaaaaaaaaagaaaaataaattaaaaaaagagtcaacccataattctagatatccagcaaaatacccttcaagaataaaggcaaaatataaatcttagagaaatgaacactaagtgctttgctagcagcagacctgagaactgcattaaccatgacttgttccgggtagggctcc

SEQ ID NO: 120 - DNA, 386 bp, Homo sapiens
  misc_feature 8, 245: n = A,T,C or G
atagggcnattggagctccccgcggtggcggccgcccgggcaggtactgttcattcaatttttctgaatatttgaaaaattttaacataaaatcttgagaaaaagtaaactgtagatgctaatagcatacaaagtgcagtcagtgtggagaacagaagagaaagatgaattccaatgaagagattcagcaggtttgtggaggagatgggattgagcagaaacttaacagattgggccttttaggnggaggagacaatataggaaaggcacaaacctggggaaatgcacaatgtatgctgaccaagaagtggtctggcgggtagagtaaggctgggaagagactctgggagaggaacatgaggaggtcccagggctctgaaccaggg

SEQ ID NO: 121 - DNA, 292 bp, Homo sapiens
  misc_feature 34: n = A,T,C or G
aggtacgcggggattttttgaaaacaaagcgatnttattttgacatccttaaaatagttagcatttgccttctatgtatttgtgaatgagatctcaaaatataatacttttcataagaaaggtcgcagaaataatatatgtcagcattttaagaaggggtatgattcgttttctataatgctaatcaagtaaaatgagagtctcagtgaagtggcacataataaaaatcttaaaatttttcatatccttttatcacagtaagacaaatgtttgttaagaaggaaagaaacta

SEQ ID NO: 122 - DNA, 466 bp, Homo sapiens
ccgcggtggcggccgcccgggcaggtacagacagggaaggacttgctgttggccatctttggagattgctgaccctggtttgcagattcttcttaggaactgtgatctttgtggttggggagtcatatgatctgattctttaacctgctgaaccttgagaagctaagagcagcaaagaaggggccagaagtagagaaagaaagaaaattagagaggcacagaggaaaggataaaaggggaatgaagtcagagaagtggagtctcaggaaccatggatatgcaactttgtttacaacgaactttctgctgcctttctaatcttcaaattaaaatttattttggccaccttattcccaaggggcatagccagatctggttcctggaccagttcaccttattggaccaataaatcttcatgtgtcacatgatccactgactggtttctcttgtgactctgtccctgggt

SEQ ID NO: 123 - DNA, 236 bp, Homo sapiens
  misc_feature 216: n = A,T,C or G
cgattggagctccccgcggtggtgacctaagtgtatatttatccaaacatctaatttattccagctttagatcttctcgcatctgagttattaaaatacacatttaatttacaatacctactagtatttatcaaaaatttactgaaattattcatggtatttggggggaaacactatctaaaaaggacccatgattgattatttgtttatttattnatttagtgcacttgattttg

SEQ ID NO: 124 - DNA, 523 bp, Homo sapiens
  misc_feature 26, 436, 454, 455, 456, 465, 466, 472: n = A,T,C or G
cactacttagggcgaattggagctcnccgcggtggcggccgcccgggcaggtactccaacccaagcaacagagcaagaccctgtctcaaaacaaaacaaaacaaaacaaacaaaaaaaaatgaggtaggcatgttttattcccatcttacagatgaggagactgaggcaataataattcaatggcttatctaaagtcacaaagctagtaaggagcaaatccagttctgtctgcttccaacccaccttgtcccacttgcttctttattggagaaggggcagatatttactctgcagtccagggagcatggagagtcaagtagagaatcaaagtcagcaaagctgaacaccactgagagactgagaggaatgaaagatgacaagagacaggggttggggattagtccattaggagccagcccttaacagcactgttgngctgggggttggaagaannngaggagccnngcccgngaagagccagaggaacaagctgtgaagggaaacatgacattacaaacccct

SEQ ID NO: 125 - DNA, 396 bp, Homo sapiens
ccgggcaggtacatcaccctgctgaggggacatccaggacaaggtcaccacactctacaaaggcagtcaactacatgacacattccgcttctgcctggtcaccaacttgacgatggactccgtgttggtcactgtcaaggcattgttctcctccaatttggaccccagcctggtggagcaagtctttctagataagaccctgaatgcctcattccattggctgggctccacctaccagttggtggacatccatgtgacagaaatggagtcatcagtttatcaaccaacaagcagctccagcacccagcacttctacctgaatttcaccatcaccaacctaccatattcccaggacaaagcccagccaggcaccaccaattaccagaggaacaaaag

SEQ ID NO: 126 - DNA, 360 bp, Homo sapiens
aggtacctggatttgaaaacattacctgagagaaaggtgaattattggggttcaggtcaattctgggcaggatctcatcagagtcagaatgtggtcacaaagtccttcatagtggacagaggaaaactaggaatgtggttgatgagatgaggggaaaaaaaagaatagtgacatgaaagaaaatctttgcctaaataacaactttatataaagctagctttgtgcctcagaagggagaatttcctgtctgcttcccttctgccagctgccagcattcacacagttggtattgatggttaggtttctgtgggctaatctgggattgtaattgccatttataattccaattccagagggaaa

SEQ ID NO: 127 - DNA, 289 bp, Homo sapiens
cccgcggtggcggcccgcccgggcaggtaccgcggggtcttgaaggaatcccttttttgcacgtctcccgttttcttttcacatcaatgcagagtccctctgtgaatttacaacacccaacacccatgagttcagtccttaagaaggaaaattgagcaagtatttaattggttggacattgcataaaagaggtccatatccaggctaactctagaaattttattctcaaacttagttggcctcttttttttctgtcagaggaccattcttagtggcactggggaaatct

SEQ ID NO: 128 - DNA, 443 bp, Homo sapiens
  misc_feature 10, 42, 45: n = A,T,C or G
gggcgaattntagctccccgcggtggcggccgaggtacgcgnttnatctatacatttccactttttttttaatcccataatttttctatagggaacaacagatctgtcatatactagcttatgcttttcttattctaagtggattttacagtttagaaaattccaagtaatcttgacacatcattattacccaaacaattacttccaagtcattgtttaaatagatgaaacccattacaacagaggtctcagaccttcttgcctcaggggccagagagatgacataactgaaatagctcagctttagccagcaattgcttaatggaaatgtgggatctttgttgctagctctgatttaaaaaagacagaaagaaagaaagccaggtagggcatggtggctcatgcctgtattcccagcactttggaaacacttttggaaggcc

SEQ ID NO: 129 - DNA, 379 bp, Homo sapiens
ccgcggtggcggccgcccgggcaggtacagccactattgtgcgtcctttcaagggacatcagggcagcagcacagcttaccctggggtccccctgggcaccccagcataagcagtgatgtgctagacagccaccaaaaccaaagtataactacaaaaccttgttccaaagggttctgggggagattcagggggaaaagttacatattcttaaaattttgatcactggtggatgcactcaaaatcctgctcctctctgggagcgattttcatgctgttcctgaaagctcagaaagaataggaaaattttatgttcagtgatagatgggctagacaatgggaaacctgcactgaaccagacacaaaggacctagcagaggt

SEQ ID NO: 130 - DNA, 455 bp, Homo sapiens
  misc_feature 352: n = A,T,C or G
ctacttagggcgaattggagctccccgcggtggcggccgaggtaccacatgatcattcaaacactcaagcttgtttctgttgaagaggagagtcagaaaaagtagagcctaaaaagtccccaaaccagttaagtcacactgaggccagaactgtcatatagtatacacactccagggacaagaaattccgagggctcaaacagaagactcctcagagtggctcagcatggtctgtgataaacagacagaaacactatgagggaagtgctcttcacactacactcagaggttttccctcccacttacacatggattgttgccatctcagacttttcatagtaagtttttttgnttcgttttgttttggtttttgagaccggattctcactctgtcccccaggcttggagttgcagtgggccgtggatctcaaaaaaaaaaaaaaaaatagccggaa

SEQ ID NO: 131 - DNA, 412 bp, Homo sapiens
  misc_feature 5, 16, 382: n = A,T,C or G
gactnctatagggcgnattggagctccccgcggtggcggccgaggtacatatacttgaggcatgaatttaaaggaaaagtcagcccatggtttggtgcaattccattttctactgttaaataaccaagttcttttttttctttatcatcttcgacagggtcatcagacctttttttttttcagaacctgaagtgggacatggggagtgaactcgatcttgctcttttgcaaattcaacgactaaagtatgacctaaaagtttcagttgatggagtcttgtcaatgcctttatagctgcttttcattaggggaatgtggcaaaagctggtatgtttcagtcgccccttatctgacaggacccgcacagactgagccccgaagntacctgcccggggcggccgctctagaacta

SEQ ID NO: 132 - DNA, 352 bp, Homo sapiens
gccaggattcaaaccagggagtctgctccagcactccggctcttaacctcaaccgtctgcctctccacaaacaccaggatcaaccacctagaccaaaaaaacagtctcacaaaccatcaaacattgcacttggtggctcaggaccttagcttcgtcttaaaggtccctgttatgctttttctgagtgccccagtgtggagtggtcttcgtgtttgtgagtgcaggggtcaggggttgtgtcttttcttcttgtccccttccaagaggtgacatgtatccttgatactggaagggcccttaaggtctagcactggctctctgtctcccttcatggcacatcagccaagtacct

SEQ ID NO: 133 - DNA, 342 bp, Homo sapiens
  misc_feature 30: n = A,T,C or G
ccgcggtggcggccgcccgggcaggtacanggtggtaactgcaggggtgattaaaatgtctaagctgtctaaaagcaggaaaagcaaatagatttcatctcttatgttaacaccaatgagaaagtagtgagtattgagttgagtatgattcttctgtgggctggaaggaaagagcttgctgggggtctctgcttcttggtcaggaagaatggcctcaacttcacttagctatccctgtttgaaaataagttctttcctctgtagatgttttccttgttaatttctgtgcatgcctttaggacctctgccatttctttcctgtccgcttttcacttttttctt

SEQ ID NO: 134 - DNA, 407 bp, Homo sapiens
  misc_feature 232, 276, 297, 376, 407: n = A,T,C or G
gggctgaattggagctccccgcggtggcggccgcccgggcaggtacctatagcacaagctgatgatagctggcaactgaacatttggcttcaatgtcagagtaatagagtgtggcaaactgcagagctcatgctccgcctaaaaggggcagctgctgctcagctcctgccaattccaccattgcaggaaatttgggcctagtgtgctcagctcctcctgtttttttaccagnaagctagggaatctggggttttttatggtgaaattggccctaantttttttaaatgttaagcatncactcttgaaaaaaaagcaaaaacacccgttgtgggccaaataaaacatttgcttggccaaatgcagcctgatttgctntgttttcaacccctggcacaagaattttggn

SEQ ID NO: 135 - DNA, 377 bp, Homo sapiens
  misc_feature 4, 18, 79, 245, 266, 279: n = A,T,C or G
ggantcccgggcgaattngagctccccgcgggggcggccgggggccattgagactgccatggaagacttgatttttttncgtagctgagacttctggagagaccattcaaggcttctggctcttgacaaagatagaccactggaacaatgagaaggagagaattctactggtcacagacaagactctcttgatctgcaaatacgacttcatcatgctgagttgtgtgcagctgcagcggattccnctgagcgctgtctatcgcatntgcctgggcaagntcaccttccctgggatgtccctggacaagagacaaggagaaggccttaggatctactgggggagtccggaggagcagtctcttctgtcccgctggaac

SEQ ID NO: 136 - DNA, 459 bp, Homo sapiens
  misc_feature 40, 180, 184, 220, 238, 252, 314, 403: n = A,T,C or G
ggcgaatttagctccccgcggtggcggccgcccgggcagntacactgatttatcctcaggagcaacttaactctcagttcatatttgggagaaagagattccataatatgccaaaccaaaaatgaagttattgtttaaatgtgatcatgtccataattaatctccctaggattccctatngttngttctatctgcaactgaacaaagtgttctatcatanggaatcaaaggaattatnggctgggcacaggnggttcacgcctgtaatcccagcactttggaaggccgaggcaggccagatcacctgaggtcanggagttcaataccagactgaccaacatggagaaaccccctctccactaaaagtataaaattagcttggcatggtggcgggcacctgtantcccagctactcgggaggctgaaatctgctctttaatttaggaagtaacatcaata

SEQ ID NO: 137 - DNA, 342 bp, Homo sapiens
aggtaccgcatgctggatatggacagcagccttagttcagaaacatactccaagcaaatcatagagaatgtcacctcctttaagcttccatttctttataagaaaaaaaaaacattttgtagggttacataagaaggcaataaaataataaagagaaagcatagagcctggcatatactacatgttcaatatgggacagaatgtaagcaggagcaataacaaaagtggtagaaatttggataagtcaaagaataagatgtggaaactcgggaaagggagccgattaattctgacctaggctgcacctagccattttggagaaagtgatacaaatagaatttt

SEQ ID NO: 138 - DNA, 396 bp, Homo sapiens
  misc_feature 50, 53, 333: n = A,T,C or G
ccgggcaggtaccatggatggaagtggggctttggcaaaggccctagcanttnggcctggcactgtggactcggtgttgtctagcagagaggccttgaggaagtggcccagcagtgtgcttgcgtttccaagatatctatcacccaaaagacttcgagatagacaagctttgttccctgccaaagtgacaaatgtcagcttgctggaaaagtttgaacgaagtgagagtggtgggaagattatgacccctgaaagcttatcatatccaagttgtctgaaacacgacagtgagatgaagccccaaacatctccagcttgccaggatcataacanggcaggacaggaaatgtgctatgtatgtttggaacgagcacaacgaaattccctgttgtacct

SEQ ID NO: 139 - DNA, 349 bp, Homo sapiens
ccgggcaggcacttcttccaaggcagtggtcattagggcaatgtggtattgacacagggagagacaaataggccaatgggacaggattgagcattgggaaacagcccacacaaatatggaagcttgctgtgtatcagaggtggcctgcacatcctgggaagagcatggacttttcaatcaaatgttcaggagcagttggatacccacactggaaaaacattaagttggacccttaattacctcacatcatataccaaaaattcattcttgtcattctaggggattgaagacctaactatgaaaagcataactataaaggtcacatgactgaatatagaagaatatctta

SEQ ID NO: 140 - DNA, 240 bp, Homo sapiens
ccgcggtggcggccgaggtacagtagttggatgtcgaggtttgattagattctggggttggtttgtttgttttggtggattgtttttgagtcgactttacagagggttgtttatccaccagaaggcacatgtgcttgcctgtgtcttttttgttattgttttgagacagagcctcgctctgtcttccaggctggaatgtagtggcacaatcttggctcactgcaacctccacctcccagg

SEQ ID NO: 141 - DNA, 281 bp, Homo sapiens
  misc_feature 4, 17, 32: n = A,T,C or G
actncttagggcgaatnggagctccccgcggnggcggccgaggtacctctgtaaaatgaccttacacagaataaaagtctaggccttatgagtttatgtgaggtaaaaagttaatgtgatgctgagaagttatgttaaaagtatacttttatggtaagatttttgctcccctccatgtttacatagcatttccttactatcccatattggtttatgagaaaaatctccctaaattgaagattcttcacatcttccatttggtctctttttttggagacagg

SEQ ID NO: 142 - DNA, 405 bp, Homo sapiens
  misc_feature 11, 228, 246, 249, 260, 270, 278, 287, 306, 309, 313, 321,322, 340, 342, 392, 397: n = A,T,C or G
gtatacgactnctatagggcgaattggagctccccgcggtggcggccgaggtacttttccactttgtcttctttcctgccacacaccctatcctttcaggctgtgttgggatggacaaaagcagttctggagtcctaaggagaagatgagtgggatatgtttctgtgacctgcagtcattttaaagtttagctgttgctagctgactccatgtaagaataccttccangaatttgatggctgtgcnctncggcagtgcanctggcatggntatagggngcttggccnaaaggtttgcataaccatnttnaacncattctannacacatttagccaacacntngaagactgtggggttatgggaccagaaaacccaagatttgaccttttttncaaangtttttta

SEQ ID NO: 143 - DNA, 249 bp, Homo sapiens
ccgcggtgggcggccgaggtcattctacaaacttttctttaagcttctaattaaagaagaaaaaaaattaggtgaaatgctcataaatcaagggcactgtgacccagtaaatcagcaggcattagcatgacataatagaaagtgtcccaactctgataagtcctagctccataatgaacagctatttgttcttggacaactttcttctcttaggctcaatgtcttcttctacccccgtgtacttttttt

SEQ ID NO: 144 - DNA, 561 bp, Homo sapiens
  misc_feature 489: n = A,T,C or G
aggtactaccctccttgggggtcatttatgaatgtgggcagggatgaaacgattgggtgttacaatcctggggagcactgcagggactctgtgagggccccagagatgcttaaaatgctttaagtggggcagtcctacacaatgaaaaattgggccacccaagtgcccaaatcaccacaccagaggaacacgtgataacccacccctctccttggacaatggggaaaccaaggccttggctggttagcagcagggtcaattctaaaacctaggcttctttgcccccagttcagcagttattctgtgataacatacagaaaacaaacaataaagctgggtatcatgttacacacttagcttattcaagaaacaaaacttcctgcttaaatccagttgcctttttttctgactcatttttcttcttctggcactagaaccagattaccacccagccaaatcagggcacaggccctgaccttcacacacctncctcttcaaataccacatgggaccatttgttagcctgaatacaggaccactgcaattagaagaggctttagt

SEQ ID NO: 145 - DNA, 311 bp, Homo sapiens
gaacaaagtaaaagccaccatgagtcacaaacatatattctttactctcatcatctttgccacagaacttttgcacttgatcttacttttgtttttctgataatttggagttttttcctttcttaaatggctctaagttaactcttattagaaagtttcaaacccccttctctcatcatcatgccccaaaatttgtcaaaaaaaagtttcagagatattatattgagttatttaggccaaaggcaataaatggctcttacaataagactttgaaaataatgtaatactctacaataggcatggtgtatcat

SEQ ID NO: 146 - DNA, 269 bp, Homo sapiens
  misc_feature 163: n = A,T,C or G
gaattggagctccccgcggtggcggccgcccgggcatggtaccaccatccccagcacatattttaaagttattcagacgcacctcagaactagggtaagtgcagtttaggatctcaactatgaaaaccagaggcaactggcacactttcattattaactgcantgaaccatttaccaaccagctaattgctttctcctcaatctcctcccatttcttgtgccacttatgtcagggaattgaataggatgaataaatcactttagtacct

SEQ ID NO: 147 - DNA, 491 bp, Homo sapiens
  misc_feature 66, 417, 433, 458, 469, 477: n = A,T,C or G
tagggcgaattggagctccccgcggtggcggccgaggtacgcgggatagttgctcagcatttcttnttgcatgaaataatctttgttgtttttgccaaactctttaaattccttgaaaatgtgtattcttactaaacaaccttttctcctgagtctttggcatcagttaagaagttaaaaagcactgcaagttttttgtaatcctgaagaggaggaaaagatgccaaaccagagtttattcaagataataagtggtatttttgagagatttattctctctcctctgaagcctgtttctactttagtttcacttccattttcctgcttctttgataggcagtgagatgatttttaatagcacatacactctgtcctgtttataggttgctatcatttaatgagaagaaagtcaaatangacaaaaccgcaaatntttgaaacaaaactagaaagccatnatgggggcctnggcatagngggctcatgccttt

SEQ ID NO: 148 - DNA, 186 bp, Homo sapiens
  misc_feature 2, 85: n = A,T,C or G
tnggagctccccgcggtggcggccgaggtacacttagattgatttttttctaccagaagaaatttctatgtaaaatgcttaaaanccaggtcatcaatttgatttctgtagcattggatatagagtgtgagcttttaaggtttttaatgtgttgccaaatgttatttcccaaaaggcttcatcggt

SEQ ID NO: 149 - DNA, 479 bp, Homo sapiens
  misc_feature 395, 456: n = A,T,C or G
tatagggcgaattggagctccccgcggtggcggccgaggtaccttcaattccagtcacatggctcgacctatcctcaaacttcttaaatgtgtagctttcttcttcaatagtgagaagtcttgctcctattgtctttaatatatttatatgttttcttattctactttacaaaaccaatattttgatacacatgccataaccttctcagctttaacattgctagtcatctctaatcataccctcagatttgactctgaatggtccttgttgtctcttcagccccagttgtttctttggcactggccgtcctcctgacctctactgtctccttggccctcaccctgaaagtccttccagactcacttgcctctggctctataagaccctgggtatnaccagggcctctgctccctccatagaacccgtgtccctgaggccctcactggctttaagcntacattcaaaagagagggggaaa

SEQ ID NO: 150 - DNA, 349 bp, Homo sapiens
acttagggcgattggagctccccgcggtggcggccgaggtactacggagaggtcctgtgacctttccagtgcctcagagagtgagaatgggaaagaggagtggatgaagtagggcttaccctcctgtgggtcacctctcttccctgctgcttctgaaccccactcagcctccttccctcttccccagcaactatcccaaagctgttacatcgtgtggcaaacgtttactgaggcttttagggataatataagtggtttctttacaaccattccttcacagccagaacgcacgtaatttaaaactgtgtcattttcacacacgtcccataatgtctccttcatggggagc

SEQ ID NO: 151 - DNA, 466 bp, Homo sapiens
  misc_feature 4, 20, 21, 46, 48, 81, 283, 297, 301, 306, 307, 441: n = A,T,C or G
cggnggcggccgcccgggcnngtacaagttttttttctcatggaantnttggcatattaattgatccacacaatcaaatanattagaaatggtgttcataaaagccctctaagggaaacagtagaaatctttttttcaaaacccttctgtgaaagcttgctgttaccacaaattataataaaagaccaaaacacataccagttatcatctatagactaccgtccctgagcaaattacttgactcaaactgttcatttggattaggaacatttttttgtttttnttggaaaagaaatntccnggggnnttttctattagaggcaatataattagaccgatctgcttggtgttaatgctttctataaaaccccacataaatgaataaaaaggatagcttatccattttaccttggattataaaaatcttgaccaggtgcgggnggctcacacttgtaatcccagcact

SEQ ID NO: 152 - DNA, 364 bp, Homo sapiens
  misc_feature 7, 64, 307, 312, 322, 326, 342: n = A,T,C or G
gaattgnagctccccgcggtggcggccgaggtaccatgtcaggatgactgtctacgtaatgganttccctgtcgccagcttttcagcttcctttcaaattcccccaactccttcttttttcacgcagcaacttgtctctttccatggaaatgctggggatttaaagaaggcggggactcaagctttgcttccactgcgcagccccagatacaggctgcaggagtcccagccaccttcctctcattatgctttcttccagggacagagttatggcccctaggagagggttttgttccaccgggaacangttanttactaatgnggcntcatggctggcttttncacccctgggtccccagccatt

SEQ ID NO: 153 - DNA, 735 bp, Homo sapiens
  misc_feature 638, 653, 673, 689, 698, 705, 706: n = A,T,C or G
tatagggcgaattggagctccccgcggtggcggccgaggtactttctctttaaatcactacaggatgggattccaccctcatcatgcctcttgtcacaacccccatgttgtccaatccaataatttttctgtcttcttacttgacctcagtgacatctgacaattgagcttccttcctctttctagaaacttcctctcttgccttctaagacattatgttccccatttttctcccacctactggctcacaatctcagtttccttcctctagtcctcctcttctaataaacctcttaatatcaagttttttcaaggattcatcctgtttctctcccttcccctaagtcacaggtttgcaaaaaagacaaaaccaactcctaaagctttgcaaaaaagacagaaccaactccaactcctaaagaagctttagacatttctagcagtggttttggggaaaatagtaattgcattaagtgaggaagggccagagatgccaggtattcttcaatgcaagagagttcccaacaatgaagacttttaccatgtcatgatttcaaatgtgccactagataatcacatgggtaagaaacctacctagaagaccaggtgtggtggctcacacctggaaaacctagaantttggaaaggatgangcgggaggattgctcgaggncaggagttcaagaccngcttggccnacatggnnaaaacaccgtcttttcctaaaaatttaaa

SEQ ID NO: 154 - DNA, 501 bp, Homo sapiens
  misc_feature 339, 340, 484: n = A,T,C or G
acttagggcgaattggagctccccgcggtggcggccgaggtacttagcatgagctcattgacggtgaaattggccatttatacataggcaaatctataaggaaattaacaatatttcacatttcttctaattaatggtctttttgtgaacatgcactgcctactaatgtcagcttatctatgatttgaatgtatagctttctaaagcgtagcaatttttttgcatatttatgtgtcctaagagagtccccccgcttcatttttccatctctcagcctcatgaaaggctcctctatctagaatttgtgacagaggaagctgagttttgggggtggatggnnttcttcctggttacaatctagaactatcaggagttttgcaatgatagtaacagcaatgactaacccttgcttggaatagtagcctttaatcattatcctcagtttctatctgggaaaactgagtgctattttcaagcagtcttnctgctagtagtggcaaa

SEQ ID NO: 155 - DNA, 429 bp, Homo sapiens
  misc_feature 6: n = A,T,C or G
cgattngagctccccgcggtggcggccgaggtacaaaatagacggtgacaacatgcaactatttttttccaggacgcgctgaaacagatccaatgttaagataaaaataaactaaaatgattttcctctggtttgatttaggtagataatcaaggccataacatgccgatgtggaaaaatgtcccaaccatccccaggaatgaagaaaactaataggcaacaaaattgttaaaaaaaaaaaaaaaacccagctcttcttaggacattctttgctttcttttggtcttcctctttctatttaagccctgtattgttgcccaatacaccctatttaggtctcattttcttatctatgtcccacatactgagcctttcagtttcctttttactttaaaaagctatgtccaagtgtcatgctcttgattgaag

SEQ ID NO: 156 - DNA, 340 bp, Homo sapiens
ccgggcaggtacgcggggggctgaaaatcctctgggttggcaattgtaatcctgtggacattggtaatacccgaggatgcaaaatttccccaaaacaagcagaaaattttccatgaattgctgctataaagctgaattcctctccccaccccaacattttataaagagcaagtgacttttacagcctctgggtattgcccaatagcgatctggaaacaggctgctcttcgtttaaatgactgaacacacggttggggatctgttctgaaaggtggagggtgcccgcttgggaatagggacattataaatactggacaattgaagacaatatttctgaagt

SEQ ID NO: 157 - DNA, 642 bp, Homo sapiens
  misc_feature 48, 50, 55, 77, 503, 591, 595, 609, 638: n = A,T,C or G
ccgggcaggtactcactttatttctatgatcacctcactgtagctttnanttttntttcccagtaggaacagttaanagaagctgggtgaagacaactggggattattatatcttagcctttgggaggcatttcatagcgttttccatttagaaacattctcagacccagaactgttagtagaacaaaagtttccatccccaaagtgacttgtaaggataaaaataatcttaaacttttaattttctctcatttgtcaaaatcagtattttctatttttaaatgtctaagactagaataattttctttgagttaaaacacagggccaggcatgatgcctcatgcctgtaatcccagtgctttgggaggctgaggtggaaggattgcttgaggccaggagtttgagaccagcctgggcaaaatagcaggaccccgtctctacaaaaaaatatatttttaaaaagctaggcataatggtgcacacctgtagtcccagctgctcangaggctgagggaggaggactgcttgagcccaggagtttgaggccacagaagagccatgattgcccactgcacccagcctgggcaacanaagnagaccttcttctcncccaaaaaccaaacaaaccaaccaaccancaac

SEQ ID NO: 158 - DNA, 261 bp, Homo sapiens
ccgcggtggcggccgcccgggcaggtacttgattgttctgaaattccttatgcatgattagagaaagagtaaatgaccgtattttaggattgtgtttaacaaaagtgagatgctaattcttgaaaattaggcctctctatggggactgcacgtaatcacattaccctagatcttgagttagcgagagaatattcactgtcaggtgattcactgaccttgcctataacttgaaaccaataagcaaatccagatgtagtttca

SEQ ID NO: 159 - DNA, 390 bp, Homo sapiens
aggtacttaggccatctcaatcatcttcatccttttaactaagttattctaagacaatggtagccctgcactgaccactaagaaagcacacaccttgagccatccatccaactattataacctgggacttggtatctagtgatttcaaatctagtgattatcactgggctttcatattttcccccatgcagccaattcactctattgaactaataatctgactcactgggtggaatagccactcaatcttaagctctattcttgctggtgattggaaccctcctactcttggacagaatttcaagttgaccactgcctacctgtagtggactcacaagtattatctgactctctatctacttgtttttaaatcttgtgctaacaataagc

SEQ ID NO: 160 - DNA, 472 bp, Homo sapiens
  misc_feature 365, 370, 371, 372, 373, 393, 398, 403, 450: n = A,T,C or G
atagggcgaattggagctccccgcggtggcggccgaggtacattaaaaaaatgcacggtgtgataacccacaatctactcaaaaccagagcttaattgtaaaaaatttaaattctctcatttttgattgtcataagcctaaatgaaggcatactaagcagttagacatattttaatacactttctcccagtttattttcttaactaaagtcaataagaagccaatgggttttcttaattgaattcccctttagtttgtgttatgggaggtgctttaaatctagacactagggcaggcaaggaattcccctgacaattttattttcataggttgtgctgtgctggccaatatatattaaatattgnggggnnnnttttttttttcttctctttncatgntattngaaccccgatcgaaaacaaaaataactgctgggaaaattaaactctnggaaatttaattttctcccggg

SEQ ID NO: 161 - DNA, 492 bp, Homo sapiens
ctacttagggcgaattggagctccccgcggtggcggccgcccgggcaggacgcggggggtatagatgttttaatataggggtttgcattctagacattaaactgctgggcttgattctgtatttttgactgctacagtgtaaaaatatttttgctcagagaaggattaaggacagaaatggtttgtttcagtcttagaattttatttagaatttcactagggttgagcatgggcaatgcttgccttttcctctaggaagccatagctcctcagttggaatctgcaaacttttgctctgaggtcttgggagaaactgagaccttgggaatgcatcccggactccagagagccctattcctcagggtcaggatgtctcaagatgaaaaattatctaaaaattatgtttcaactctaatatttatttagctgcattttccactcaggcacaggcaaagaaaagtgccagaaataaaaagaccaggggatttttca

SEQ ID NO: 162 - DNA, 520 bp, Homo sapiens
  misc_feature 415, 507, 511: n = A,T,C or G
ccgcggtggcggccgaggtacaattcaatggtttttagtatattcgcagttgtgcaagtccttcaatttttgagataaattagtaattgcataaaggttctctctcacttaagttttttatataaagagcagcagcatacttctactcactcagatggggttgtttttgcaatggtaaaagaaaatggacaggcctgttaggttcaagaactctcctgctctatatgggtgatccatgaagcagaataataaccacagatctaataagttaactttgcctctcaagttggaactttaagttttgtccattactcttatgctacatttcccaaataaaagaaaggaaaaaggaaacacaaggggtaggccttctcttgcagcaagccctaaatgaatccatccacttcaaaaatgnatactgctatgtatttcaaataaggtaagaatcttcaagctggtaattttcccccggaaagaaaattactggagccaagggtcccaaggcangtanaaaaggggg

SEQ ID NO: 163 - DNA, 384 bp, Homo sapiens
  misc_feature 32, 64: n = A,T,C or G
ggcgaattggagctccccgcggtggcggccgnggtacattttttaaaaagtgaaacaatttacnttaaaacagcttgaaaaaatgatactgaaatacagatgcagtcaccaataaacgttagaaacgaaatattttaaggatacatttcctatttgtgtgtcttgatcttatgactacagaagagctctaaagcatttaggaaggagaaagagtctttgaattagtcatttattttagagtagtatttccataatcccctgggggtcttgtagaaaagtaaaattttgagtcccacttctctgaaattctgattcattaattttggggcagaactagataactggtatgtttaaaaaaattctcaaagtacctgcccgggcggc

SEQ ID NO: 164 - DNA, 312 bp, Homo sapiens
  misc_feature 24, 52, 80: n = A,T,C or G
ctccccgcggtggcggccgaggtnctcataccaggcttgctgcatttgtttntttttggtattttacattcagctgctgntagcccatgctctggaaaaattacaaatgaaccaatgcagtggaattttcacttctggccaagactgagtaacaaggtctggatttaccctcccagctgaaacagtttgaaaactaggtttccaagacattgggcctcaggcatggacagtgatccttgcaagaggagaaacagatggtgagctgtatgattgccccaggatagagtttccaagaagggaaaacccaggtgg

SEQ ID NO: 165 - DNA, 360 bp, Homo sapiens
  misc_feature 31, 45, 72, 95, 96, 99, 116, 141, 197, 290, 345: n = A,T,C or G
ccgcggtggcggccgcccggccaggtactgntttaagatattggntggagaataataaattcctttttattngcctactatgtgccaaacattgnntgntatcttttaatcttaanaataactgaaatgtatgtggggctngtttcattttacagggaaaataaaaaaagactgtgaggttaggtaacacacccaanagtaggaggagctctggtctgacttcaaagccccatttattatccagccaacctccttttattttatttgataaattaattttgcgatgaagnctgcactccagtctgggtgactaagacggtgtcttcaaaaaacaaaaaaaaagtncagtgctgacccctg

SEQ ID NO: 166 - DNA, 471 bp, Homo sapiens
  misc_feature 2, 71, 457: n = A,T,C or G
tnctatagggcgaattggagctccccgcggtggcggccgaggtacaaacaagtgagtgtcaggattcaaanaaggaggttttgctccagaggcctcctgaatttaaccactgtgctagagacacagggacattcaatggagcattaatgtcccgagctggtgacaggtcgagctgaggctatagatgtgttgaggagtcagcatcagtggaggaggaaagagatgcggatggagggagactcggtgtctttgaaatatataagagagagagacaatgtaatggtttccacttggcacagaaagaaatgccttactaattagaggaccagggagacacaagaggagcctaagaagaatggaatgaattagaatcatcactgtggagtctgtgatagggagtcaactaaaagtggaaataagtaattaccaaataacaatgaggggtcagcatcggccnaaggaatattgttt

SEQ ID NO: 167 - DNA, 727 bp, Homo sapiens
  misc_feature 494, 550, 558, 562, 589, 600, 613, 627, 650, 657, 662, 664,665, 669, 673, 676, 677, 678, 679, 684, 696, 697, 701, 720,724: n = A,T,C or G
tatgggcgaattggagctccccgcggtggcggccgaggtacataaaatacctgagaaatatattaaaaggacaattacagaactaactgaagagatagaaaactataaaatcttattgagggacataaaaaatatctgaacaaaaagaaaggcagtagcccaatcttgcctgaaagagtttaatacacttggctgctaaaggcttatgtaaagtaaaaaaataaaataaaagactcagtataataaatacgtaaatgtaatacaattcaaactgtagccccagtagggtttttgagggaggagagggctctaggttgggggtagaattgataaaattttcttaaaatcaagtagcacaataaatgcctgaaaatagccaagaaagctatagaaaagaaagagtaatgaagaggttcttgccttactagctggaaagcatactgtaaagtaatatggaaacaagtgtggcactggccccagaatagacagagatncatgaggggttatgaaaggtaagaaaaaaaaaaaaagaattgaccaatggatttgnggaacatnctanaaagcccagtagaagcccttaacaatntagtcatttgnggcctggcgcggnggcttatgccctgnatcccacactttgggaggcttgngggggcnaatcntnnggcngggnttnnnngaccngcctggcccacnntggngaacccctttttcttaaantccnaaa

SEQ ID NO: 168 - DNA, 343 bp, Homo sapiens
aggtactaagagattgtattgattcttttgttgaaaaatatttaaaaggctaccaagtgatctgtatctgaaaaatctcttaaatatctatttcccagggggtgtttcccagttggactcctttgccttgagataggtggaaagctatttatgcaaatttcatggctctatctctaatttctatttcactcattgtttacccatatatcatttttaactatggaattctctccagagaagcaaattaacagattttaatattttatcagacaattcaagttgtgggttacaaattagagaggattaaaatcttgtcctttcacagcctttgaaatgttattca

SEQ ID NO: 169 - DNA, 454 bp, Homo sapiens
  misc_feature 4, 20, 26, 31: n = A,T,C or G
ttanggccaattggagcttnccgcgnaggcngccgaggtacccaatagtttataaggccctgttagtcaaataattttattatgaaggccataagaagccagacaggttaaacacagtcttccttgtgatgctggtgaacagccatatacttactgatggatctcacctcccaactcagactcttatggtcagaggcatatttagtgctttcataggctgtgatctactaaggatcacaatttttttcctataagtgttcatcatcatagattctgtgttacactgcccaaggattcattgctcctagctcttggaaatttgtttgacatcactcagctagcaacccctttgggaattattttggcagaaggagagtcacctttgccttatccatggtcatactccctaccagggggcagactacgtccaatgactgggctaataaaaaagggc

SEQ ID NO: 170 - DNA, 465 bp, Homo sapiens
  misc_feature 456: n = A,T,C or G
tacttagggcgaattggagctccccgcggtggcggccgcccgggcaggtacatgaagaaaataaagtggatgaggagcgtatgcaaacaaggcaattgtttatttttctataaggctttttttagtcatctaaaactatttaatactttatattcttaaacatttatacatacagataacacaaatatcctatattttttaaaaccttaaattactttaaaatgaaaactgcttaggacatgtctttttatgatatgatggaacgtgtatatagtaacatttatttaaacttcattatacattttgcttctctgtgaccttgggcaagttacttaagctgactcaattttcccttctataaaatggagataactatacctttttttttttgagacggattcccactgcactccagcctgagcgagagagcgggactctgtcccagaaaaaaaaaanaaaaaaaga

SEQ ID NO: 171 - DNA, 338 bp, Homo sapiens
ccgggcaggtacccactccctcaattttctctaaaggtctcatttcagacatttaaatgaatattatgctacacaacagggaaactcagatgtccatcccctccttattcattcaaacatttccactgccataatatggcagctgcaacaccaagaaagaagaaaggaaaaaagactaaaagaggtgaagaatgaaaaagacctcaaagaaatttttttttaagagactgggtcttactctgtcacctagggtggagtccagtggtaggatcatagttcattgtaaccttgaactcttgggctcaggcaatcctctcacctcagcctcccaagtagct

SEQ ID NO: 172 - DNA, 358 bp, Homo sapiens
ccgggcaggtacacaaactcctacttccagaagagaattgtttaggtttttctggcctaaattttatgcaatgaataaaaatttaaatctcttcatccatgatctactgcagttcaggatccttggcatcagatggtagtgataaaaaccggatattggggtgctgccggtggagaaaaatggaagaagccagaggtcagcaagaaggggaggctagtaggagaaagagagattaaagagaaacctaagaaggtgaaaaaaagaaaagttagaggggcagaggaaataaaatgtagaagagatgagaaaatattcaactggatagcaggagaaggggaaaactgtaaggagggtggaa

SEQ ID NO: 173 - DNA, 317 bp, Homo sapiens
  misc_feature 8, 64, 257: n = A,T,C or G
gcgaattngagctccccgcggtggcggccgaggtacccagaggacacagttgaaatgaggcacntttaggaaaaactaggctgtttaatatccatattgagtagctttgcaagttactttcacaaacttccctacagaattggttctaacagaactgttcaaggccaaggatttgttttttctgggtctgggggagtcatctttataattttaatattccattaaaatgccttgacactagaaggagggtccatctnaatcacatcaataaatttgatcccaacctttataaacaataagcttggatagaaaggaaa

SEQ ID NO: 174 - DNA, 759 bp, Homo sapiens
  misc_feature 6, 22, 44, 58, 75, 85, 99, 110, 111, 133, 138, 142, 175,199, 206, 207, 222, 278, 280, 297, 298, 349, 355, 415, 417,490, 509, 526, 536, 548, 549, 556, 559, 587, 647, 664, 676,728, 750: n = A,T,C or G
gaattntagctccaccgcgcgngggccggccgggcatttctttncaagggggaatccncgtgttgcaacccttcnggtttttttnctggcggaggcggngggaataattnnaaaagggggggcgtggggaaanatggnggcnaaaaaaaaaccatggggccacttactttaaagnaccaattattatttgggcccatcntttggcnntggttttcctaaggngggaatggttaaaatttaattcctccaatttttcaaggcaagaaatggttggtggngnccctccaagaatggggnnaaaaaagttcaagccaagccccttttcttataattttcctcaacccttctnggtaantcaatacaagggttcccttttcccaaccaatggccaagaaatcctttcccttggggtccntncccttccgggccttggccaaggccccaaccaccaaaaaattcctccccccctcctggggttttttcctggaangggccccaaggcctttacntcggggcacctttggcnttatatttcnttcccccggcgnnaaccccntcngggccccggctttcttaaggaaaacctnaagggtgggggaatccccccccccggggggccttgggcaaggggaaaattttccggaatnattccaaaagggccttnaattccggaatnaaccccgggtcccgaacccttcgggaagggggggggggggccccccggggtnacccccaagcctttttttgggntcccccttt

SEQ ID NO: 175 - DNA, 371 bp, Homo sapiens
  misc_feature 70, 71, 323: n = A,T,C or G
ttagggcgaattggagctccccgcggtggcggccgcccgggcaggtactgccaggcatgctcctgccttnngcagagtgtatatgtgtgagtgcacctgcccttcccacagcctagaacgttcctcctccagacagcacacatggcctgctctctcatttccttaaggtctttattcaaaagtgactttctcagtgaagccctgtctgctcaccctgcgtaaaatttcagctcttctttctatctctcttcccagatttttttttctccttcatgttcgttggtgtctaaggtttatcatctatttcgctaatggtcaagtanaatgtaacctccacgtaagcaaggagttttgtctgttttgttcatgtc

SEQ ID NO: 176 - DNA, 404 bp, Homo sapiens
  misc_feature 4, 45, 72, 348, 386: n = A,T,C or G
ggcnaattggagctccccgcggtggcggccgaggtacattcagantccatttgaaacttctctcaacataantcaaaaatgtaagtcaaagccagctgcaaaaatttgtagatttggcccgagaaagtgcctggattttacaacaggaagatacagatcgaccttccatatcaagtaatcggccctgggggctggtatccctattgctaccatctgctccaaacagaaagtcctttaccaagaagaaaagcaataagtttgcaattgaaacagtcaaaaacttgctagaatctttaaaaggtaacagaacagaaaatttcacaaaaaccagtgggggaagagaacaanttagtacctgcccgggcggcccgctctaaaactaggtnggatcccccgggctgcag

SEQ ID NO: 177 - DNA, 483 bp, Homo sapiens
ccgcggtggcggccgtccgggcaggtactttttgcatcggtggtagcttggtgctgggggtatgttattccccctctgtttccgcaggcgcccctctgagagaagagtggtcacagaatgttttctctatgctgagtaagccatcgaaagaaaagcacatgtgacttcttcagctcggtattaaccgagacaggtgtgaatagaagcggatttattcttcagctcccatcgaaccctaagtgttgatttcgccttcaacagtagttttttctaaccaaattcttcagtgtgtttggatgtgtccccagagtgagttaatatactgagggtcttagcagctgttgatagatttgtggtgtatatgaagttttctcaggcatgtgtattctcactgagtagaaattctctcttgaccctggaatagttacttttattaggaatgtgtgatgtttctagattgtacctcggcccgctctagaacta

SEQ ID NO: 178 - DNA, 351 bp, Homo sapiens
ccgggcaggtacgcgggggggcggtaaaccacagggactcagtcaaaagcagaatcaaagaaatgcagaggaagtaaaaagacacagacataggctgactcaggaccctagagatgaacatgagattgacaggggcaccagccgacattcggaatctgctgccaagataagaacagcgaggctgggcgctgtggcttacgcctgtaatcccagcactttgggaggctgacgtgggcggatcacaaggtcaggagttcgagaccagcctgactaacatggtgaaaccctgtctctactaaaaatacaaaaattagctgggcatggtggtccgtgcctctaatcccagctact

SEQ ID NO: 179 - DNA, 388 bp, Homo sapiens
  misc_feature 1, 177, 322, 370, 388: n = A,T,C or G
nctatagggcgaattggagctccccgcggtggcggccgcccgggcaggtacttttttttttttttttttttttagatggactctcactctctcaccaggctggagtgctgtggcgagatctcagctcactgcaacctctgacttcttggtccaagcgattctcctgaataatacggngggcattcaaaaatgctgttgaataaatctgtctggaaaaccgagcaattcaagatgacagaagacaagatgcttgctcatcagcaaataccactgaggtcatgtcatgagtgaggagccatgtgagacacagaaagcaacctanacagaaggaatggggtgtgtctctaactctggaagaactccagctttntgctagatctagtacctn

SEQ ID NO: 180 - DNA, 341 bp, Homo sapiens
ccgggcaggtacgcgggggaagcaaacccggcctcaccttttcctgcccgaagcagaagattctcgcagtcctggtttctccctccagaagacccccacccaaatcctctgtagctcctggtagtgccctgacccctgctgccaccgtccttcagagagcaacggaagagcttcccggagggcgaggaaaagagggaaagtagccagcaatgtcgaacgcagtgtataataagatgtggcatcagacccaagaagccctcggtgctttactcgataaagagcctcagaagatgattgaaccacaaagaaatcaggttttcatctttcaaacattagccacc

SEQ ID NO: 181 - DNA, 299 bp, Homo sapiens
ccgcggtggcggccgaggtacttgttaaaaattgtaatcagcctcttgacaatgtatgtgatttagacagcaaaacacaaaggttagatctgggctgataggaaggagacggcctatttgcactctggtgggcagggtggaggggtaagggaaagggtagcagagatgagccattttatagaggaggctctgtgaagccccaggcctcaaaccttggtgagtgggtagcagaaattcattcctggagaaatcctgtagccaaggctcgggaaggaagggcttctcgtccagaattcttt

SEQ ID NO: 182 - DNA, 515 bp, Homo sapiens
cgcccgggcaggtacacaactattgagttttcaagaacagaaaaaagagagaaagtgagaatgagagtggtgttatctgtctttctttggaaactaatcaatcttcaaaaggaaaggaaagggacctctctcttccaacgaaggctgactgaaatgagccccaagccctattacccttgtaagaatggactgaatggatcccacctcagggagctttgccggccagaatcaacctgcttcctggagagataatgaggaggtgcagcagtgaaaaagaggcaaccatcctcaaagcccattctctcctcaccccaaacactgatggcaaagataggggccaaggtcagggacctgtcagaagccttcagtgaactgagttattcctggcagatggaagaaagccgggagaaataaatgctaaaatctttcacttcagaacttttcttgaatcagtcaagatgacagcagagaactagttatgtccaaatataaacattgtatttgaaagttatttg

SEQ ID NO: 183 - DNA, 333 bp, Homo sapiens
aggtactaagagattgtattgattcttttgttgaaaaatatttaaaaggctaccaagtgatctgtatctgaaaaatctcttaaatatctatttcccagggggtgtttcccagttggactcctttgccttgagataggtggaaagctatttatgcaaatttcatggctctatctctaatttctatttcactcattgtttacccatatatcatttttaactatggaattctctccagagaagcaaattaacagattttaatattttatcagacaattcaagttgtgggttacaaattagagaggattaaaatcttgtcctttcacagcctttgaa

SEQ ID NO: 184 - DNA, 354 bp, Homo sapiens
aggtacaaaaattctgttatgaatgacctgggtcattctccctgcctgactgacatcctggagtgtgtcattgaaaaccttcactttgctggcatcttcccaaatttctcagacaccctctctttgaacctggagcctcctggggaagtattaagagccaaccagctatgaaaacaatgtgctcttccctgtgctaagtgcctcttcttaggcagtaaaatgcttcagtggtatgaacatatggcatcaacatggcctctgaaaaccatgctgggtgtttaacaagcatggagggatggggacaggctgtgatgagctctggaggcttacagaacaggacctcccctcccccag

SEQ ID NO: 185 - DNA, 387 bp, Homo sapiens
  misc_feature 17: n = A,T,C or G
ccgggcaggtactcganggacacagaaggtttacaggcataagcacaaatgcctagagctccttttcaggtaattgcctgaaacaaatgggctaccatttagggcttctgtcacacaggaagtcagataacttaatactactgtatgtttgcagcaggactagatctagagatctagagaaggagtggcccactgtcctttcctagcactgggttgtgggtaagcagacacacttagttcccatccagcgttgatcgctgtcctctcttctttggaaggccagacgttaatctgctccgtagattgtcatcgttgggacacagttctgggcatgaggcttgtagtaacaagcaacataaacctggtcctggtcctcattgggctgaa

SEQ ID NO: 186 - DNA, 698 bp, Homo sapiens
  misc_feature 15, 17, 52, 85, 170, 558, 580, 590, 600, 611, 612, 635, 655,658, 687: n = A,T,C or G
cttggagctccaccntngtggcggccgcccggcaggtacgcggggttttttntaaattctttttagattacatagcagtttcttnccctcaccatgattggatcacctggacagccataaaaatatggatgtctgttccccttataggccaacatggtggaaccctgctnctaaaaatacaaaaattggctgagtgtggtggtgggcgcctgtagtcccggcttctggggaggctgagacaggagagtcgcttgaacctgggaggcggaggttgcagtgagccgaaattgtgccactgcactccagcctgggcgacagagtgagactccgtctcaaaaaaaaaaaaaaaaaaaaagtttttctggaaagcagtttcacaagcagagcaacaaggctgaaattgccccagtcagcctttgctggctgacttccctttttccgttaataagcaccaccacacccagtaactaaggcttgcgtcctcaattatctgcacgtagggaagagtctggtcagtgataaaaggtagttggtcaagttgccacgtcttgactggangcacgcaatggatttcagattncaacccaagncaatcactgnaaggctttatnntttacaaggcatagctttggtgntttctggtccaaaacctttnggnggcatttttttttgggaatttaatacctntccttttcctg

SEQ ID NO: 187 - DNA, 647 bp, Homo sapiens
  misc_feature 153, 428, 438, 618: n = A,T,C or G
cgaggtaccaggtaatgaggaaggtgatcccggcccccattccctgatggaacctagacttcactaagggattcagatggaggaggagatgttcaagaagccaggaaggatcaacaacagggtgccctcaattcactggggccacgttagtgnccgattactaaatgtcagaccaactgcagtagccgctgtcatggccactcatctctccgggatttcttcccttccaagccagctaggttcaaccttctcatttacttttaatacaccacctcttatatgatctttcttctctacttagaaccctcccataagccgaacccaatctgccttttcaccatcttcccatcttcctactgcctccatagttattcttcgggatctagctaaagtaaactctaagttattctcccatgttttcctagcanctaacatatnagttccccctcccccccattttcttccacatacggaggctcaataaataataagttaaatgaggctgggtgtggtggcacatgtctgtaatcctggcactttgggaggctgaggcaggaggatcgcttgagcccaggaagttcaagaccagcctaggcaatatagtgagacccatatctntacagggaaacaaaaagaaaaaccaccac

SEQ ID NO: 188 - DNA, 304 bp, Homo sapiens
ccgggcaggtacaaaaacttttcatggacagaccatggattttaagttcctgaggataggggccatatattgttcactttcattttcagctcttagcacagaagtttgctgaactacattttaaaagaagatttttcactgttaatggtatccatagctgccatgacaacaaaaggatacgttaacagcatttcaattctgtgcatggtttacaaaatctatacattttatagctgtaaatactctagaataattatccagtccagttgcctcaatttatcaatgaaaaaaagagatcaggcca

SEQ ID NO: 189 - DNA, 546 bp, Homo sapiens
  misc_feature 289: n = A,T,C or G
cgaggtactttgggtttggtgttttaattacggaatgatctttgtaatataaccaagagaaaattagacgcttttcctttactattttctattactactttttaaaaaggtatcctttttctttttttctttttgagacagtcttgtgttgcccaggctgaggcaggaggatcgcttgaggcaaggagtttaagaccaacatgggcagaccaatacagtaagactccgtctctaccaaaaaaaaaaaaaaattagccaggcatggtggcgtgtgccagctactcaggangatgaggtgggaggattacttgagcctgggaggtccaggctgaaagtgagtcatgatcgcgccactgcactccaacctgagccgttggagtgagactctgtctcaaaaacaaaaaaattggtgtattttggcaatcatgacttattttttgtgcataggtcttgccttctcaacctaattttaaagcttgtgaagggtgaggggtcaatgcaattgattatttttaaagaataaatattttctctttatattaaccc

SEQ ID NO: 190 - DNA, 341 bp, Homo sapiens
  misc_feature 31, 34, 93, 102, 142, 150, 182, 204, 275: n = A,T,C or G
aggtactctttctttttgtctggaataaatnccntaccactttccactatcacctagtttactgagtctcacgtattaggattgggtttaaangtaacctgnattgcctcacccagaaagcctttccagtctacccctgctntgattatntccctatcctctatgctgcctttgttccctgngtgtctctccacaacagcaatnagagcacatatgatttattatctcacatattggtctcaactttcagtctatgaagtctctgcgcacagaanctcatgagcgttttcttcctttctgtggattacctttgcaaaggcccgagaccaccagagaacctg

SEQ ID NO: 191 - DNA, 401 bp, Homo sapiens
ctatagggcgattggagctccccgcggtggcggccgcccgggcaggtacagacatagcatgtggcaatgacggaaaagatggagctaagaatggtggggctgtagattaagaatacacaaactttaaataaacgtattattggcacttataacaagaaatggctcaataagcttcctaaagttggctccacagagatctgccatcaagcttttcctttctagcagaatttaggtttcttaaatggtgacaagaaattgttaataggccgggcacagtggctattaactataatcccagcactttgggagaccgaggcgggtggatcacctgatgtcaggagttcaagagcagcctgcccaacatagtgaaagcccatctccactaaaaaaatacaaaaaat

SEQ ID NO: 192 - DNA, 325 bp, Homo sapiens
ccgggcaggtacccagaggaccagatgattgatgggttctaccacgagcatctaatagcgactgctgcagaactggtgtggaaaaggtttctattttataaaagaaagtatccagaaggctaaaggcagttgtggaatttatttcttcccagtgctctgattgtcaaaatttgaataaagctcagtgaaaggaggacagtaattaatgacttgatagccaaacatcgtaatgatgatttagtgatatactagactggatgaaagagaggtcactgtcttttcactatggattcatcataaacagtatcattcttctcaggaagaa

SEQ ID NO: 193 - DNA, 340 bp, Homo sapiens
ccgggcaggtacctttggttttcttaaagtgaaagtcagctatatctatcaacctttgtatttgaatagtcccgctttacactctaagaagggtcataaacagtaatttaatataattatgaccatgctaatgtgaattcttaggctttactatatttacaacagcacaattttgattcaaaatcagctcttccaactgtaataactatcttcaaaaactggtttccaggccaggcacagtggctcacgccagtaatcccagcactttaggaggccaaggcaggaggatcacttgaggccacaaattcaaaaccagcctgggcaacagagcaagattcca

SEQ ID NO: 194 - DNA, 449 bp, Homo sapiens
gagcttatagcttaaaatgagatatatatgagataaatgagaaaggtttataccacagaataacattatgtaaatcaatttaaccaaataacaacaccagagggaaaggacttttagctaccactcatattatgtcccaatataatgttccagttcatgttgcaaatagggcagcaccctggctattgtgtggtagtctgtaagtagtgaaatagctgtggggtaaggcagtgagtctttcaccttagggagggtgccgagcccagacccacttgaccatctatcacaaatcttgctgaagttctaagatccctttcaactacaaattttcatgcttccatagaatcatccctgacctcaggaaaaaatacaaaaatggaacaaacaaaacagaatagtaaaacctgaagtaagaaaaaaagaaatgaatttgacattgtacctgcccg

SEQ ID NO: 195 - DNA, 404 bp, Homo sapiens
  misc_feature 401: n = A,T,C or G
atggtatgacaggagtttgctggaccctctgcagcctcacactgactacctctgcggtagcatattattttgagaacgccatttaacctcttagtctcaggtttccacatccatggaatgggtgactctagagagctctgatctgactccatattccatgggttgtgagccccaacatgatccctgccaaagcctagattcctaggacactaggcaggtggaacatttataaaagaaaattctttttcattgttatggcagctctaatttctcctatgaatccttatatctttcctagatggtcatgtaaaactggttatggtggtgttaacgttaccctccatcaatcaagttgaattgcagaaggcaaactgagaggaaaaaaaaaaaaaaaaaaagtncct

SEQ ID NO: 196 - DNA, 347 bp, Homo sapiens
aggtaccaggtaatgaggaaggtgatcccggcccccattccctgatggaacctagacttcactaagggattcagatggaggaggagatgttcaagaagccaggaaggatcaacaacagggtgccctcaattcactggggccacgttagtggccgattactaaatgtcagaccaactgcagtagcgctgtcatggccactcatctctccgggatttcttcccttccaagccagctaggttcaaccttctcatttacttttaatacaccacctcttatatgatctttcttctctacttagaaccctcccataagccgaacccaatctgccttttcaccatcttcccatc

SEQ ID NO: 197 - DNA, 330 bp, Homo sapiens
  misc_feature 309: n = A,T,C or G
ccgggcaggtactttattttctatgtttcagaacccacagggatatttactatgtagctaaagatgcttaaggtgcagaatagctcagtcacaaatgtctccttctcaagctctgagtgttctctgggacaaaaaataagagagaagaggatcccatcatgggtagagagtgagagagataccccagcctgggaaaattttctttgttttggtagtaatcctggagctgcagatgaagacgatggttgacagaatgacttcctcgcccacccctccccacacagcaacatgttctcatgacgtcctggngcatctggaccccattttttg

SEQ ID NO: 198 - DNA, 541 bp, Homo sapiens
  misc_feature 11, 424, 454, 465, 528: n = A,T,C or G
gcgggcaggtncacttctgttctcctcctgagagaggggcttataactaaaccgtctcctggtccatcccccacaatttccgtttttttttttttttggtttggttgaatgtttgcctgcctgggaactgcagccggccatccaaatctgcaaatcttcctctagactttgggagacagaaaagtagctcctacttcaagaggttagaatcctcagatgtggcactttcaaggaaaagggttgtttacctgagtgataagaatatctggaggagagctcatcactagtcggtgtgtagttgctgtgactccgtctgtcctggcaatttctaatctggtcctgcctgtgaattgcagagtgctccacggtgttctccaacaccccgtgaagaaaagcctgtgatgggattgcaagttcggtctgnctttgctatgaatggcttggctggtcctgnggcttctaagnggctcttttccttgctggaagtaagaagtttccttttttgctactttaacttgctatttcttnaaaaataaataaa

SEQ ID NO: 199 - DNA, 398 bp, Homo sapiens
  misc_feature 6, 63, 65: n = A,T,C or G
gaattngagctccccgcggtggcggccgaggtacactaggacttgactggaaaattttacaantncaagaaagcaagggacttctgttcctcttacctcctagtctttctgtctcctagggaaagagaaaaattacaaagaagaaatctctctctctctccattttaaagcaaaaatagagtcgggtgtggtggtgcatgcagatactctggaggctgaggtggaaggattgcttgatctcaggaggtcgaggctgcagtgagccatgatcgtgccactgcactccagcctgggtgacagagcgagaccccatcttgaatgaatgagtgaacggaatgaatgaatgagtgaacggaatgaatgaatgaatcattctctgccttctgggtagtaaccct

SEQ ID NO: 200 - DNA, 361 bp, Homo sapiens
aggtaccatacacaaggacatagcacctttgattagaagtatgttcaatacattattgtgaactacactaaaaataatgatttttcataagcaaaattctcagagtaacctgcaaaaacatccaccagatgaactgggttgaaaacatttaacagttccctctctaatgcaagttgcttctcagtattgggcaagttttctgtcttggtgtttaagtaaaaaggcatcttttatttgtgttaattccttgcaaacatagtgaatgttgtgagtagttattttcactactgcccagacaaaaggaaaataaacttttttagttaatgcttttgtagtttttcaaattagatcttttagtagc

SEQ ID NO: 201 - DNA, 360 bp, Homo sapiens
  misc_feature 250, 251: n = A,T,C or G
aggtacagcattcttgtattgctgtgtttggctatcctagtatagtttgtgtttaggcttcatcacaaaatagtaacatgcagggaaaaatcaatgaaccaacgtgattccatgttatattgatgccattcccttattcactaatttcacatgagctcaatcacatcgcagaaacacatcctttcacaaaataaactgtatacttggatctacttatttttttctatatgaatgtagcatgtcagttctnntgttaatgaacaactatgtcttaaattttgtattttagaaaatgtaatgagcaacttattcatatctgtgataccttgccttcccagggtgggcttcagttgctgcttt

SEQ ID NO: 202 - DNA, 333 bp, Homo sapiens
  misc_feature 26: n = A,T,C or G
ggcggccgcccgggcaggtactttanggctgagaaataaatttaaggtgagaaaaaagaacagtctttatagtcagtaagagtgaaaagagaaagatggtagttggggaaagacagatggggagaaaggttggctggttgttaataaaacagtagaggatgagcatgtattataaatgctggtgggaagaaaccttgtggcaaggagggtggtagtgttggagaagaaagagaggatatagtagaaagttaaagaggaactggaagcaggtgggatccaggacataggaaggggaagagccttgggcagaggtgagacatctgcaggagggaa

SEQ ID NO: 203 - DNA, 330 bp, Homo sapiens
aggtaccactacactccagcctggtcaacaaagcaagaccctgcctcaaaaaaaaaaaaattcactgcaaagagagaaaaaagaaagataaattgacccccataattgtgcttaatctggccaaaagttgaactgaaatgggattatcgttcctgttctggttaccaagtattacataacaagctaccccaaaacaattttgtaggtcatgaatttaagcagaactcagttggagaattctgttccatgaggcattggtggaggacacttggcattgatctggcacgtagagtggtgtggcgggtccaagctggtttccctcgtatttct

SEQ ID NO: 204 - DNA, 311 bp, Homo sapiens
  misc_feature 14, 46: n = A,T,C or G
ctcctatagggcgnattggagctccccgcggtggcggccgcccggncaggtactaggacaagcactggaatttcaagataaagatgatacggtccgcccctcaacaactgtatgctataatctgaaaaaacaaacaggcaattcccatacagagtcatacatacaatgacgagcataagacagcacttattggaagacatagaagggatactagcccagatttgtgtcaatattgtaggctttttggtagaggcaattcatagggttggtatttggaggggaaggaaaacacatgtaggatagagggaaag

SEQ ID NO: 205 - DNA, 379 bp, Homo sapiens
  misc_feature 203: n = A,T,C or G
ccgggcaggtacctgtctctgagactgaagttgttttgttttgtttttttttgttttgttttgtttttagagtcaggtcttactgtcacccaggatggagtgcagtgatgcaatcacagaagctcactgcaacctcaaattcctgggctcaagtgatcctctcacctcaggctcccaagtggctatgatcatcaagaaataantcaaaataagagttcaagaatacaatgtgtgaactcaacagttccccttctaaatattcatccaagagaaagaaatataaccacccaatgacttacacaacattgttcaaagcaactttctttgcagcagctcaaaccagaaataatttaaattgcattccacttgagaatggatg

SEQ ID NO: 206 - DNA, 595 bp, Homo sapiens
ccgggcaggtactaggagaggtcctgtgacctttccagtgcctcagagagtgagaatgggaaagaggagtggatgaagtagggcttaccctcctgtgggtcacctctcttccctgctgcttctgaaccccactcagcctccttccctcttccccagcaactatcccaaagctgttacatcgtgtggcaaacgtttactgaggcttttagggataatataagtggtttctttacaaccattccttcacagccagaacgcacgtaatttaaaactgtgtcattttcacacacgtcccataatgtctccttcatggggagcttctcatggccttggtctctccccagaggctgcctatggccatatttctgggatccaattctcacacactgggcccctcattcttgggcttcccacattcagttacctcattcttgggctgcccacaaacagtcaaaatccttattttctaagctgaagcagttgagctctctcacttacccttacaaatctaggttttgcctagaagtagtcaaaaaagcaagacagagacatcttcatcaaccacaaagtctcatcaaagtattttactccatca

SEQ ID NO: 207 - DNA, 555 bp, Homo sapiens
  misc_feature 160, 527, 531, 539: n = A,T,C or G
ccgcggtggcggccgcccggcaggtacatttgttgggggcgtgacattaacatataaccacttagagtggacatgcagttagagaaaagtcaatgagctggaaccaagctgggaattccaacatgtagaagttaaacacaagaggaggagccagcaaagnaacagaaacagagcttccagcaggtggggggcatttggaagaaaacgatgccatagaagccaagatgaaatagacatcaaggagaaggaagtagtcaattgttttgaatgctatgaagaaagataagaataggtaaatagtccttatatttgataacagaggtcactagtgatcttgatgaggggtttcaatagaatggtgggattatatacctccctggattcaactgaggtaaggaaggcatacagaatagagacaggcactataaacagctctcataattgcattctagcaattagcacactgtctgatggggaggtggctcaatctttcttgcataactgaatgaatgagtaaactatctatncatncatctatncatcattccttcaccc

SEQ ID NO: 208 - DNA, 447 bp, Homo sapiens
  misc_feature 3, 418, 438: n = A,T,C or G
ctnctatagggcgaattggagctccccgcggtggcggccgcccgggcaggtactcataccaggcttgctgcatttgcttgtgtttggtattttacattcagctgctgttagcccatgctctggaaaaattacaaatgaaccaatgcagtggaattttcactttctggccaagacttgagtaacaaggtctggatttaccctcccagctgaaacagtttgaaaactaggtttccaagacattgggcctcaggcatggacagtgatccttgcaagaggagaaacagatggtgagctgtatgattgccccaggatagagtttccaagaagggaaaacccaggtggaggcccgtggtctctctgagctggggagatgggagctgcaagttcagcggaggctaatgtggctggaattggcagnagcagaactcccataaaaanaaaaagttt

SEQ ID NO: 209 - DNA, 416 bp, Homo sapiens
  misc_feature 382: n = A,T,C or G
agggcaattggagctccccgcggtggcggccgcccgggcaggtactttctaaaaacacgagaggcatttgaatggattgaattcattatttccgtaagactcatctgctgtcgtagcaagtgaaaagaattttttacaagacctccagttccagatggaagacctcctgcatcatgggcaaatgctcttgcacctcgatcatcatgtggtggtatgttttttgtctgaaaatagggaatatcctttacctggaatatatcatttatatccaccgggagagcaagaccaatgtaatcatctgaacccccatatgtggcactggacaccatggaccgcactgagggaagatcgttgcagggtatttttgattaataggactcantaaatcttctttatctaatgatgcataacttaag

SEQ ID NO: 210 - DNA, 335 bp, Homo sapiens
aggtactctgttgtcttaaaaagcatggtttagtggtggtaacattgacctaggtgacaggcttcagtttagtttctggcactggtcatgaaactttgaacaagttaactcctctcttaggaccttatctttatgtagagaaagttggactaaatggctgttaaggtcttttcgggccttcaaatgctgtgtttctgtaataccacccttgtttaagccacagtcatctcttgtctggactcacaggagcttcctaacttgttttcatttttgtccttccccacattattttctacccagaatacaaagagacctttttaaaaatgtaaatcaga

SEQ ID NO: 211 - DNA, 452 bp, Homo sapiens
  misc_feature 346, 399, 433, 438: n = A,T,C or G
aaggggccatgatccaaactgatgagatgatggacactgacttgaccacaccgacatctttcctggtgtcaaacatcctgaaaggggggctggtttttaaaaagcaaacagctgtggagggcaataagctggcttttccagcaatcaaaaagaaaagcaaaaaaaaagaaaaaaagctgaaggcagaggagtggccaatacaccccagtctgccaggatagattcaggttacagcttctgtcctgggacaatttgtgtgcccccttcactttaataagtcagcctaatgctgatggataaatgaaagatggtcaagtgagccaacctgtctaaggtcctaaagagnaaaagcaagtcctagcccccgcagctcatggacctgtgtggctttgccaaaantttctggcacttgtggctcacccttgcttttaanggggngtttcaaatttttt

SEQ ID NO: 212 - DNA, 360 bp, Homo sapiens
  misc_feature 319: n = A,T,C or G
aggtacagcattcttgtattgctgtgtttggctatcctagtatagtttgtgtttaggcttcatcacaaaatagtaacatgcagggaaaaatcaatgaaccaacgtgattccatgttatattgatgccattcccttattcactaatttcacatgagctcaatcacatcgcagaaacacatcctttcacaaaataaactgtatacttggatctacttatttttttctatatgaatgtagcatgtcagttctgtgttaatgaacaactatgtcttaaattttgtattttagaaaatgtaatgagcaacttattcatatctgngataccttgccttcccagggtgggcttcagttgctgctttt

SEQ ID NO: 213 - DNA, 368 bp, Homo sapiens
  misc_feature 330, 335: n = A,T,C or G
ctatagggcgaattggagctccccgcggtggcggccgcccgggcaggtacgcgggggcctttaaagtgagagagggaggcagaagaggaagtcagagcgatgtgctgtgaaatctactaccgtttgctggttttgaaaatggagaaaaagagtgaggaactgagaaacatggatggccttgggaacgtggaaaaggaacttcctatgtcatgaagacactcaaggaactctatcgagaaattcatgtatcaagaaactgaggcctactgccaatagccatatgagcgaatcatctcaaaagtgattttatagcccctgtaaagccttcanatgantgcaaccttatgagatatcctgagccagtacct

SEQ ID NO: 214 - DNA, 722 bp, Homo sapiens
  misc_feature 406, 415, 424, 445, 454, 472, 590, 646, 697: n = A,T,C or G
cgaggtcactaagaacatggtgtagcaaacctatgaaatccacactggttctgcactcccagtgcacacagaggaacatatatgcacacacaagcataattacctgcactgccatcctcctctgaggagccattgagtgtcaaacaggtcggctcacacagggcctccgaggagatcctgccatgccacagctgtgaaaacctcccactggatggagcaaattatttagtgcaagcctggcaacactttggaggacagctagaaacacaggttctccagattcaatccatggagagagacacaagaattgaacagcaagaaccctggagtaagaggcgggagaaccaggttccagcactagttctgccactcacgaactcggtgcctttggccatcactctacctntcagggccntaacttttnaagaggggatataataaaggnttgcccttncacaatcctggagttacngcaagagccatgaggcaagagagagaaaagaggtcttgaaaattaaaaggcaagtataatgtgagttacaaagaagttttaaagatcagtttgggtgtcacgctctgtctgatgggangccattctttagatgcccaggactgtcctttacgttgcagggtctttttgcatctnaccaatgcccaatctatggggtccttttcacaacaccccattccattttgngtaaaaaaaaaaaaaaaaaaaaaaa

SEQ ID NO: 215 - DNA, 229 bp, Homo sapiens
  misc_feature 50, 114, 127, 154, 159, 187, 195, 196: n = A,T,C or G
acctactgagtattaggagatattagtttcaattatctgttctcacattncttttggtctggcaggttgcagtgcgaaagcaaggacagaccagccctgccatcataagccctntgaataccactgncaggtcaggtcatctggcctgctgcanacccnactattgaccttgatgtccttgtccttnaaatgtcnncctatcttttgtcttccagttttccaggggctc

SEQ ID NO: 216 - DNA, 327 bp, Homo sapiens
ccgggcaggtacgcggggattctcaatcctacccatgatgcagacagattgcctcatttcagctcaataaaacatcaccaaattcccttaggcagaaaaagggtggggagtgccctttcttgaaggaatcccttaagtgcacgtctctcgttttcttttcacatcaatgcagagtccctctgtgaatttacaacacccaacacccatgagttcagtccttaagaaggaaaattgagcaagtatttaattggttggacattgcataaaagaggtccatatccaggctaactctagaaattttattctcaaacttagttggcctctttt

SEQ ID NO: 217 - DNA, 354 bp, Homo sapiens
  misc_feature 31, 50, 158, 287: n = A,T,C or G
ccgcggtggcggccgcccggcaggtactttnttttttttttttttttttntttggcatttttagtagagacagggtttcaccgtgttagccaggatggtctcgatctcctgacctcttgatccgcccacctcggcctcccaaagtgctgggattcagngtgagccacccatcccggcctaacgagacttatttttactcaactagatggcgttcattcatttgcttactcagctgtgccaggagttaagttgggcactgggaattccaaaaccaacaagacattctntgtcatcagggaactcacagcctagtatgagagataaacaaatgaacatgaaattataattcagtaa

SEQ ID NO: 218 - DNA, 342 bp, Homo sapiens
ggtggcggccgaattacgttccttctaattagcactagactctgctatatttttcagaaaataacagaggctgaaacaggtaaagattattctctcatatgaagttattaggctaggcaaatcaggctagcacttttggaggccaaggtgggaggatcacttgaagtcaagagttcaagaccagcctgggaaacatagtgagacactgtctctaccaaataaaaattagccaggcatgatggcacatgcctgtattcctagctactcaggaggctgaggccagaggatcccctgaacacaggattcaaggttacagtgagccatgattgcaccactgtacct

SEQ ID NO: 219 - DNA, 403 bp, Homo sapiens
  misc_feature 23, 49, 70, 78, 133, 241, 311, 348, 350: n = A,T,C or G
gcggcggcggccgaggacctttntatgggatgctgattcaacacgaaanttcttgcattctattcctccngatctctnaccctttcttctctatttttcatctaggtctctttaggtgtatctttcattttgncatccctttcactgtatctaatctgcttaatcaatatgttacactgtaaattttaaattaccatatatgtatcatttacaaatccctttggttccaaacctacttggncaactttgattctcttcatcccacatcatattttctatctcctcttattttagtctacacctgggtaatnctaatatctgtaatctctttgagagtttaggtaattngntgtatttgctgactgtctcagggtagcttgtttccacataggtccatttatat

SEQ ID NO: 220 - DNA, 512 bp, Homo sapiens
  misc_feature 4, 408, 415, 494, 497: n = A,T,C or G
actnctatagggcgaattggagctccccgcggtggcggccgcccgggcaaggtacctggactcctaagcctcagggatttactgaaataccattctattttataataatccttaaccaagaattttaaggatcttaaatttttctgtggttctattgttatctgatatatagatgatctgctgccatatcctaaagagcagatgaggccgggtgtagtggctcacgcctgtaatcccagcactttgggaggcagacgaaggtggatcacctaaggtcaggagtttgagaccagcctggccaacatggtgaaaccccatctctactaaaaatacaaaaattagctgggtgtggtggtgggcacctgtaatcccagctctaggaaggatgaggcagggagaattcacttnaacccangagcgggaggttgcaagtgagcttgagatttgcacccctgcacttcatcctggggcaaacaagagccaaaacttttttnttnaaaaaaaaaaaaaaa

SEQ ID NO: 221 - DNA, 428 bp, Homo sapiens
ccgcggtggcggccgcccgggcaggtactcatagcaggtagcttcatcaagggtagttttcaatgcattttctgttgggtaaaaaactttcccctcaaaaatctgatgacaggcttctgctaacagtgaagcattggacagagctgccctcagaaaacgtttattctcccataactcagtattgtaaacaaatacaaaaatcagggcagagataagagacgcgctaaaaagacagtgcttccaagagcccatcattcacaaccaggaaatgagtaaaatatctctctcttgagataggatcaggagtgtagatatatttaacttacattttctccaggttccgaaatcatcctcgtgatggctgaagctctcgtctggctgttccctggtcctttcagtcacggttctgggcctttttctttcttctt

SEQ ID NO: 222 - DNA, 419 bp, Homo sapiens
ctatagggcgaattggagctccccgcggtggcggccgcccgggcaggtacatattcactatggaaaagttggacaatatgggtatataataagaacaaaattaaaatcttactactgaaggataccactattgtatttctctgtttctatatctgaatccagtttgaaccatacaaaatgtaattttgtaaaaaaaaaaatcgtcaaatgttgacaattttatacaatttagcacatacacacacagcacactttcatttggtaatttccaacttgaattttagacacagataagaatgtcttccctccagagatcagggataattttgatagaatattcattttttttagcacttgctcacttgccatgtgttgctgaacaatcaagttatttttagtttaccctgcactaaaggagt

SEQ ID NO: 223 - DNA, 713 bp, Homo sapiens
  misc_feature 154, 259, 265, 267, 271, 293, 298, 300, 309, 336, 357, 358,389, 417, 422, 425, 434, 442, 444, 451, 471, 487, 488, 489,494, 498, 511, 513, 548, 573, 576, 586, 602, 608, 621, 622,640, 645, 655, 656, 678, 683, 687, 692: n = A,T,C or G
tagggcgaattggagctccccgcggtggcggccgcccgggcaggtactggagaaatgctcaagggaaccactggcctcaaatctcacctggctttggggcaggactgttcctcctcacttcccaaaagcctgagaagagagataaaggtggtangactttctttttttctcccagccataaagaaaaaaatgatacccagggggagggcctcctcatcccttttcccttatttgtcctcccgtttttaaaggccttggntcgagngnaaanaaaattgggattgttatgaaanggccnanaccaggggnttgcccacccaaaaaaaaccaataaantttccctcaaggcaaaaaatnnccaaaaaaattgggaaaaccgaattgggttnaaaaaaatggggggccacctttttggtngttgnttnttaaaaagnccctggantnaaaaagnttggggcccaaaatttttcncctttcccaaaaaaannnccacnttgnaaaaaaaggttcnanccttggggtccaaccaattgggattggttttttcntggaaaatttaaccccaaaaaaatnggnaaaaccttgnaaaaaaaaatttcccncaaagnaagttccacccannggtttaaaggggttcttngttcnttttaaaaanngtttacccttttggggccccgnctttntaangaaancttaagtttggggaattcccc

SEQ ID NO: 224 - DNA, 306 bp, Homo sapiens
  misc_feature 37, 187: n = A,T,C or G
ccgggcaggtactttttttttttttttttttcagtanagacggggtttcaccatgttgctcaaggctggtttcgaactcctgacctcaggtgattgcctgcctgggtctcccaaagtgctgggattataggtgtgagccaccacgccaggcctaataactccacttttaaagttttatgttgtttanattgtagtttactctttaattaccagtgtttaagattagtaacaaaagatgttaactactaaaattcattcattctttcacaattttattggtcttcacaaataaatgaaaaagtacct

SEQ ID NO: 225 - DNA, 573 bp, Homo sapiens
  misc_feature 543, 546, 552: n = A,T,C or G
gcctcacacacagagccacctgccacctcttgacagctacgtgcacaggaaagaagtttcttttaatggagcccatgtgctatgagtctctgttatagcagctgagccaggaagtgcaggcttcttctgattccttgccctatttcttcttctctcagctctgaggctgagaccttaaatctgagaggaggtagatttactagtctctgattcatttattttttacttctttatttgagacagaggtcttgctatatcacccagtctagtcttgaactcctgggttaaggcaatcctcccaccgcagcctcctgagtagctgggactacaggcacgtgccactgtggccagcctctgactcatttaaaccatgtttctcagcctcaacacgactgacatttgggacagggtaacacattgtgagatgtttagcagcctcctcccaaatgccagtagcactttcctgttcagctataacaataaaaatgtcttcagacattgccaaatgacccctgttgtggggcaaaacattacaaccttggncgntctaanaactaagtgggatcccccggg

SEQ ID NO: 226 - DNA, 305 bp, Homo sapiens
  misc_feature 15, 21, 73: n = A,T,C or G
cttagggcgaattgnagctcnccgcggtggcggccgaggtacacctccacgaacttctccccggccagagggntccaggcaaagggactctcagatgtgggcaacggaggctgttcgggaaccggattatttaattccaagctggcagcaatacatctttctttatgtccaaagggtccgaagaagacttcatcatcttcatttgcactcgaagaagacaacgaaagatcgaagtcaaatttttcatcggccaaaagaagaatgtcttccttcttagggtcatccatgttcacgtcccctgcccg

SEQ ID NO: 227 - DNA, 396 bp, Homo sapiens
acttagggcgattggagctccccgcggtggcggccgaggtacaaattcctaagctacaattagggaaatgaggtagaaatgccatttataagctttttccaacataactgattcaaaggcactgagttcacagtaatgagcaggagtgtcaggtggggtgaggtcgggagcgaggcaccatttctaaacagtgacaatacattattgagcacagcttgaattaagtccaaagctgcacatatccaattcactttttaagaaaataggaaagaaacaaaacaatgtataaataagcacaaaggaaacagcatcatttaggggtgatttttacgagcttcaaggcaatttcaaagtgaactacaccaaaagtatttcatatgcttggaaagacaaagt

SEQ ID NO: 228 - DNA, 491 bp, Homo sapiens
  misc_feature 241, 244, 245, 251, 260, 264, 266, 271, 276, 285, 295, 298,300, 310, 327, 329, 333, 340, 365, 378, 379, 392, 393, 394,408, 410, 417, 428, 429, 430, 431, 432, 433, 439, 440, 442,444, 451, 461, 463, 464, 466, 467, 471, 475, 485: n = A,T,C or G
tagggcgaattggagctccccgcggtggcggccgaggtacccctcttgtgctcatagtctgggccttctctataccagagtttagaataaaattatatgattattgccagataagtttgagtcttacgtaaggggagcttctgcaattcaggaaatccttttagccttcaagacaatcaaaagctacacattcactttctgctattgctttatggcttccttcctggaggcaaagccttcnttnngtgganggggggggncacncncaaanaaaanggggaaaangtttttaaancantntaaacaaccncttttttttaaaaaaantntttnggggggnttttaaaaacccatttttttccccncaaaaattttttnnccccccttttttnnnaaaaaaaaaaaggncnccccccnaaaaaataaannnnnntttttnngngnaaaaacnctttttgaananngnntttnttcncccccccccngggggg

SEQ ID NO: 229 - DNA, 505 bp, Homo sapiens
  misc_feature 31, 446: n = A,T,C or G
tccccgcggtggcggcccgcccgggcaggtnccccgaatgcataaacaataaatgcatgtgaatccaaagaaattcaggataaaaaaggtcactggaggattcaaaatagaatgatgttgagtagaggggcagggtttaaaatggcagcaacaggaaacacaggtatagatgtgagttaagattaaattcaatttaagaaattctctttggctgggcacggtggctcacgcctgtaatcccagcactttgggaggccgaggcaggtgtatcacctgagtttgagaccagcctgaccaacacggagaaaccccgtctctactaaaaatcaaaattagccaggtgtggtggtgcatgcctgtaatcccagctactcggaggctgaggcagcagaatcgcttgaacccaggaggtggaggttgcagtttagcccagatcacacccattnccttccagcctgggcaacaagagcaaaacttccgtctcaaaaaaaaaaaaaaagtacct

SEQ ID NO: 230 - DNA, 403 bp, Homo sapiens
ccgggcaggtactgatctcccttaatccagaagtcagggaggaagttggctgtgtcatcatagtttctgggaaggcaggagttgatgtggaaacacttgtattccccagagtggaggtggtagccattggagatgtgggttttgttgtcactaagtcagccaaaacagaggaaggggatagatgtttataaatcacagtccctacattgactacaggtgtgtttgaggagggatgaattttctctctatctttggtgacttcagacgtggctaatatttcagctgaggtgctgctcaaatttggaggtgaactggtttcaggttctgagcttgtgcgcaacatgtctgtggtcttcactgggccaagggtgagaagtgcagtcacaggatgaggagaggagga

SEQ ID NO: 231 - DNA, 491 bp, Homo sapiens
  misc_feature 9, 444, 457, 472: n = A,T,C or G
ttagggcgnattggagctccccgcggtggcggccgaggtacgggacttgtctccaggagacatgtttgggaagaagagctagactggagaatcatgagcatgttcaggtgaaaacatgtgagtggataagagcaagagggtgagaacacagaccaaggggctaagggacagactgtgttcagtatttgggtatggaacttgtttttgctacttgctagttctaagaccaggctcagactctaacttctctgtaatgtgggaataatgacagcacttaccttataagattttacaaagattaaaatatcatatataacagcacttaacacaagtaagaattcagtaaatgttgactgttattactattgtctgggtcgttataagttttgaagacacaattgcataaactgtcatcattaaaaggaaaacagagaaaagtagttntggaaggagtctnagagggcattgccangaaggttagggggaaaaat

SEQ ID NO: 232 - DNA, 343 bp, Homo sapiens
ccgggcaggtacgggacttgtctccaggagacatgtctgggaagaagagctagactggagaatcatgagcatgttcaggtgaaaacatgtgagtggataagagcaagagggtgagaacacagaccaaggggctaagggacagactgtgttcagtatttgggtatggaacttgtttttgctacttgctagttctaagaccaggctcagactctaacttctctgtaatgtgggaataatgacagcacttaccttataagattttacaaagattaaaatatcatatataacagcacttaacacaagtaagaattcagtaaatgttgactgttattactattgtctg

SEQ ID NO: 233 - DNA, 377 bp, Homo sapiens
  misc_feature 291, 324, 356: n = A,T,C or G
ccgggcaggtacaatgtaacgcttttatcatcttgcatgtgtcctctgagaggttcacatttttgaggccttgtctcatggaaactgggaaatgagcttctggaattcagacccaggatctggctgcattccagaaataaatatacatgttgggcgttgagatagacaattaaaagaataggagagtgtgcaaacttttgagaatgagaaggcagaaaatagactcttttctctcatgctttgctttgcttttgtttattttttatatttttacttttgagtatcagccantgggtagcagggcaaaaacaaagcagccattgntctaagtgtaaggcagcaggaggaaggttaanagaatgagtgttattctttag

SEQ ID NO: 234 - DNA, 493 bp, Homo sapiens
  misc_feature 1, 84, 110, 194, 285, 307, 313, 355, 365, 385: n = A,T,C or G
nggcggccgaggtactaatatcccttaatggcacgaatgtgataatcatggaattaattattgctaaagtagtttccagggtanaaccaagaaaaaagaaaacaaaacanattaaacttgacacaatctgaccaaacacgtgtcaatttacaatttcaaggttattttacaaaatacctacatttacacaatangctcccggcagcatttccagacaaatgttcttttaatttatcctgacatgctataaatgaataaattacactatttaaaaattatcatcantaagttttcctttctcatgggncagagnaaaagaaatgagccgtgcaaagaagattgagaggaaagcgcncgcacacagnttactttaaagaagcaggangggctgggggagggtttcaacaatcactggaacctcacacagtggtgatggctctccaaggggtggaaagtcaactgcttatagccatttcaaaaagtattttaaaag

SEQ ID NO: 235 - DNA, 289 bp, Homo sapiens
  misc_feature 2, 33, 60, 61, 65: n = A,T,C or G
gnatttagctccccgcggtggcggccgcccggncagtacatcatgtagagaggcagactnntttncgacaaaagggctgacccctggaaaaccagcacagagccagctcttctgtctgaatccactctctccaaaacataacataagtcatggaaaagaaatgagtctcaagaaatgagactcttaccatgatgagagggggacattgaaaagctactttagtgattagggagagaagtccccttttgcatcccaaatcaagcagaggactggtagtccaaatataatt

SEQ ID NO: 236 - DNA, 354 bp, Homo sapiens
  misc_feature 200: n = A,T,C or G
aggtactttttttttttttttttttggtagagatggggtttcaccatgttgcccagcctggtcttgaactcctgacctcaggtgttctgcccgtctcagcctcccaaagtgcagggattacagctgtgagccaccatccctggcatatttttgtaaatttatataaactgtttgttttccataaactaggatcatgctgnatatattggtctatttactgactttccaactcatcaaaaatgtcttggagagctctgtctgcacctgcaaatctctcccagggcttggcacactatggtccttgggctgaataaggcccacagcctgtatttggaaattttttttttttttttt

SEQ ID NO: 237 - DNA, 353 bp, Homo sapiens
ccgggcaggtacatcagcaacctttgaaaatacaacatgatgaaaatacagcatgacctggtgcctagccttatccttttattgaatatggagggaaagagggtgggactgcagaggttaagaccagtcggcggtctattggtcttttaatgtttctgggtctcagttttattcatatttaagcaagtaagcctgtgtagacttctctcagaggaaaatcagcaagttgtataaatgaaagcagattaagcatatgaatcctttcaggagaaaagttagttggggtgtctgttgttttgtatgaatctgaactaggaaagtcagacaaactagagaaggataaaaagtgtcct

SEQ ID NO: 238 - DNA, 412 bp, Homo sapiens
  misc_feature 2, 347: n = A,T,C or G
cnattggagctccccgcggtggcggccgaggtacttgaaaggcaaatttcagtgcttttgttatgttggaggagggcttactgatgcgtgctaagaccgatttctgattgagggatgaaccttgggctcatttttttcttgtgaagtctctttctagaaaattttttggttttgttctttttaaaaaatacatacttttttgaatgtatcatgtcttcattaacaacagaaaatccacatggtgtttactaaacttgtttacgacattaaaaacttcctttttatttttagcagcccaggttgagtttttcacaagagatttttttcttagctgaggtataggttgnatagcaagaagaattaagccagatttttgtgtgtggaaaggacagttttctatccacgtcttttt

SEQ ID NO: 239 - DNA, 469 bp, Homo sapiens
  misc_feature 64, 65, 293, 330, 346, 369, 371, 379, 383, 394, 403, 406,410, 433, 439: n = A,T,C or G
gaattgtagctccccgcggtggcggccgaggtacctggatttgactgatgtggtccccatcatnntctgatagagttctttttgctgggatcctggaagatgatcttggtttatacatgaagaatctggggtccagtgaaagtgacttggtaaaacccacagatctgtgccgaaagccttggtcagctgccccttggcctgatgctcttttctctgcatcagtgcattgcttcacctcttcttcaaggactctgattaactggaagtggacataaactggtggttatttatgnggggatttgttttccttcctacatccttagtttgggntcactgaatatactcnagttctttataaggtgatttttnanttttctgnttcngcgaacctttntgaaaaaangcngccnttaaagccctttggaggaggtantggctntttaaccctattaaaattttttttgttttt

SEQ ID NO: 240 - DNA, 360 bp, Homo sapiens
  misc_feature 138, 231, 246, 302: n = A,T,C or G
tggcggccgcccgggcaggtacaaaacgcaactttgtcactctaaaatactatgcagatgtgtggaattatctcatttattacttccaatagccgagtggtttgtgtagatgggaagatggggagagttgttttaaantggacctgcttcagatcccactgcagatctgtcttagtcctatgctcatgagattacactgcaatcaccacaagcttctattctaaagggttntaatcattctttcanataggaaagggtgttgtccccaattcaccaccagaggacatctctgagagttagcncgtgatattcctgggcttgataggacatggagcccatgctagccttttcatctaaatg

SEQ ID NO: 241 - DNA, 443 bp, Homo sapiens
atacactacttagggcgaattggagctccccgcggtggcggccgcccgggcaggtactttttttttttttttttttgtatttttagtagagacggggtttcaccatgttagccaggatggtctcaatctcctgaccttgtgatccacccgcctcggcctcccaaagtgctgtgattacaggtgtgagccaccgcgcccggcctttacgttgaattctttaaattcagcttgtgactttgcacttcaggattctgagtgttctctgtcttcttcctgcattgtttttcttataccatacaggtttttcattggccttgactttttgttgttaactcattcttctttgggtttattttcatttgtttctgctgaatattatttgtttcaaactaaaaataacattccacattttaattgatgtgcggactcttaatctacttaaa

SEQ ID NO: 242 - DNA, 743 bp, Homo sapiens
  misc_feature 231, 555, 593, 608, 626, 644, 733: n = A,T,C or G
ccgggcagggtactagtggacgagtgggaagttaagttagaagaaaagggaagataaaagtagctagtagatgggcaattactaagccctggaacctctaataccatattgctagtggtaagatgatgagcaatgagactgaagaccgcctcagaatggctttgtgtcataagctaagaagtttgagccttgtcctgaaaatgttgggataccattaaaaatcttctttanggggtcttctgctatggtttccctatttttattatctgatcatttgaattttgaaatccaaatatctcattttcttatatttaaagctcttccttaggtgtagtatacatgaatttttaatgtttaatatatcattggaccaaaatgggtagaactattctaagaaagagtagggaactgcatttaagcacctactgggagccatgacctgtgtcaaacaccgttttttaattctctcaatgatctattggagtgttcatctctggtttatagataaagaaagtgagcatcaagcaggtaaaggaatttgcccaagggtagaangctaataaatattggatcgatcccagatttgagcccangtctgtctgaatctnaaccctttataggctctnaactatactggctttctngagttgaatttgaaactaaagtcatatgaattttatttatatgggatcaaaaatttttaatcaagtaagcccctgaatagtccctgggncggtttaaac

SEQ ID NO: 243 - DNA, 415 bp, Homo sapiens
  misc_feature 27, 99, 100, 156, 163, 211, 273, 274, 316, 318, 344, 390: n = A,T,C or G
attggagctccccgcggtggcggccgnggtacactaggaaatgcacggaagaaaattatttgcccagatactgcaaagattttctagctatgtgagaanngaaaatgcatttttgccatatttggtaaactgaatgttattaacaggacaaacctnatgtaanaaaggagataagcagaaactgatttgaatattattgcagagcaaagtnaataatcatgatgcattcaacctttataaatgtgcaaaaacagattaattttcccaattacnngccttaataatattaaatgactttaaacacatgaagtagggnangaaatagatagcaatgataatacacnagtgtgttataagggatattaatgaataattgggtacaccaaaaanagggagggggatgggagaaaaaagg

SEQ ID NO: 244 - DNA, 484 bp, Homo sapiens
  misc_feature 82: n = A,T,C or G
agctccaccgcggtggcggcccgaggtacagctcccattgttacctgattaaacatgcatgcagcactgatcacactcttcntatctgatgtggatctgtggctgccacaatggacacttcatctgatgggctagcctggcatcctataaatgtgccagctggcttaagattacaccacctctatcaaaatagtttttgaggctgggcacagtggctcaagtaaaagcgggcggatcacaaggtcaggagattgagaccatcctggctaacacggtgaaaccccgtctttactaaaaatacacaaaattagccaggcgtggtggtgggcgactgtagtcccagctactcaggaagctgagacaggaaaatggtgtgaacccaggaggtggagcttgcagtgaaccgagattgtgccactgcactccagtctgggggacagggcgagactctgtctcaaaaaaaaaaaaaaaaaagtcctgcccg

SEQ ID NO: 245 - DNA, 322 bp, Homo sapiens
  misc_feature 1, 3, 21, 31, 36, 44, 53, 77, 98, 131, 168, 198, 271: n = A,T,C or G
ngnggcggccgcccgggcagntacttattcncattnatgaaacntttttttgnttgacaggatgtccgaacaaaggnccaaaatgaacattcacaagnaaccgccgtttagaaggttgtgctaaacatcanaagagtaaaactccagaccagagatgagacaattatntttggattctactacaaagcaagcacattncctatgctactcaaatattcccttaaaccagaagcaatggtgaaggggaaaggacagattgaacccccctacncacctgcaagagattggtaagcaagatgagtgtctgcttccggatgaatgg

SEQ ID NO: 246 - DNA, 331 bp, Homo sapiens
  misc_feature 5, 21, 33, 49, 50, 54, 73, 75, 76, 79, 84, 162, 197, 234,241, 247, 256, 303, 306: n = A,T,C or G
gaggnactttgcacatacttnggcaaaaggatncacccggattattttnngccngaggacacaactccaattnannagnttctngataccctcccaaagcacctagcacagggctaaagtctagagaatgcttttgaaatatctctcaaagcagaaacttgngtgtatatattgggggaaagaaaataggtctactntcttaaaaaaaaaaaagccttgacctacttgaatgcnatgatgntagggngcttcaacntcctcaaatgcttgatatccgcctcattctgggtctctcactttctnganggccacctcttccgcccggaacttg

SEQ ID NO: 247 - DNA, 397 bp, Homo sapiens
  misc_feature 15, 23, 24, 31, 56, 57, 58, 59, 60, 62, 63, 64, 65, 66, 70,75, 83, 85, 87, 91, 101, 102, 111, 119, 134, 140, 171, 173,175, 187, 195, 203, 208, 217, 222, 225, 254, 266, 274, 282,292, 295, 299, 302, 307, 309, 313, 325, 328, 333, 334: n = A,T,C or G
  misc_feature 343, 355, 358, 377, 381, 382, 386: n = A,T,C or G
cgcccgggcaggttntttttttnngggtttnaacccccagtttttaaccccccccnnnnncnnnnnttgnggggntttttttnantncaanggccgaggannaaaaaaacngggggaanaaaaaaaaaccaganaaaccncacccaggcctaacttaaaaaaagggaaaanangnaaaaaggaaccnaaaagganaaaagggncaaanaaaaaaaanaaaanccnaaaaacccgggaaaaaaaaatccaaaaancccccccaaatncaaagcanagggaggnaaaggggganggnaacnaangcccncnaaanaatctaaaaaanggnttggnnggggcaaanagaaaggaaaanagncaaaaaacggaccaaaaangggnngaanggggggggaaa

SEQ ID NO: 248 - DNA, 360 bp, Homo sapiens
  misc_feature 2: n = A,T,C or G
tnctatagggcgaattggagctccccgcggtggcggccgaggtacttgcttaacagaagtctttaatgttagtgaatgaatgtataaaattataaactacgcattttcaaagagtagcatgtattttgtatcgaatccaagtaaatttttttcatagctacctaccacaactgcaaattattcaaaataaacttggatacatatccttatggggatatgggaagcccatctatattctcctacttgatgtttttaaagattgaaactttattctgaaacatcaggctctaaaaaattccatcattaagatgaataaatgggaaatggtttatttgttacttcgtaagcataaatgggaaa

SEQ ID NO: 249 - DNA, 476 bp, Homo sapiens
  misc_feature 78, 80, 84, 115, 129, 148, 203, 209, 232, 237, 239, 242,269, 290, 364, 375, 459: n = A,T,C or G
ctacttagggcgaattggagctccccgcggtggcggccgcccgggcaggtactttttttttttttttttttttttcgnanaganggtgtctcactttgttgcctaggctggtctnacactcctggcctnaagctgatccttccacctnagcctcccaaagcactggggttgctggcgtgagccaccatacccagctgaaaagngatttnttataagccaagcaatcagcctntgcananaanacaggaccctcagcacatatctagctntgtaattcctcaactcaagtngggcattactatcacccctacattaacatgttctcattaggaatatgaccaagaccaggacagagtcacaaganaaacagtcagnggatcatgtgacacatgagatttattggtccaataaggtgaactggtcaggaaccagatctgctatgccccttgggaataaggnggccaaaataaattttt

SEQ ID NO: 250 - DNA, 332 bp, Homo sapiens
ccgggcaggtacgcgggggattgaaggagggctgggaaagcacaagacaggaagagtctgtgccaaaagaccctggataggaagaaacacaagaaaaaatttatccaaagtcaagattgagtgggagcccagaggaacgttgcattcaaatgacaaagaatatgaagccgatagggataaagtgagtaacccaaggtcacaagacaagagagctggtccaggacaagaacttggtgctcatgtcaggttctctctgccacatcttgagaatacgtgcatcctttgaattcttgcccttttcagtagaaagcatcgtgggaaaacatacagag

SEQ ID NO: 251 - DNA, 305 bp, Homo sapiens
ctatagggcgaattggagctccccgcggtggcggccgaggtactggaaagaggagtgctttggacttacagctgaacttgtagtcgataaagccatggagttaaggtttgtgggtggcgtctatggtggcaacataaaaccaacaccctttctgtgtttaaccttgaagatgcttcaaattcaacccgagaaggatatcattgtagagtttatcaaaaatgaagatttcaagtatgtccgcatgctgggggcactttacatgaggctgacaggcactgcaattgattgctacaagtacctgcccg

SEQ ID NO: 252 - DNA, 393 bp, Homo sapiens
  misc_feature 1, 48, 76: n = A,T,C or G
ngggcggccgaggtacaatggaaagcagccagcacctattcttggttntggctgaaaggaaccacatggagatctnttgagcaggcctggaggtgaaatactcccctttattgcagctgttggttaatgaagatatgttgagggaatttcacagctctggcatcaggtaggagactcacactgattctgtatgattctgacccagttgtcaaaacatagtctcccagcaggactgtgctttgctccctggtgactgtattctccatttttacaaactgctgtttgcacaggaagcctgccttggtcttgcccttgtcctccaagattagcattcgactctgaactccaacatcaagcctgttccctggaaatcaatgacagggttctttttgt

SEQ ID NO: 253 - DNA, 369 bp, Homo sapiens
  misc_feature 46, 298, 304, 305: n = A,T,C or G
ccgcggtggcggccgaggtacgcgggtgaaaatgtgagagctctgntcacatctgacaggtctattggttgaagtttcaagtggcaactggtttgttagaaccagtctcttccagtgaagaaagttgttcactatttagcaaacgctaaggaggaagttcatgtaattcagataattcctatggtgtctccacagatactatgtggaaaagatggggagtagtgagagaaaacacaagaatatgtgaacccttcaggtctgtgagggatggaaggattgggattattggagaaaaatnaggatnncattccagctgggcagatctaattcgagaataaacaggatgtgcctgtagatcaattgaaaaga

SEQ ID NO: 254 - DNA, 367 bp, Homo sapiens
  misc_feature 357: n = A,T,C or G
ccgcggtggcggccgaggtactccagcctgtgtgacagagcaagactctgtctgaaaaggaaaaaaaaaaaagaaaaatcatatggatcaaagtaattataatcaacattgtcaactgactttattaatcttttcaaatgaagtagctgtaaactttctttgctgtctccattaatttgttgtttttaacattagctaaggtataatggaaagagaacaaaaagaagggagaacaaaagaaggggaaagaagagagctagggcctgccttctcctggctctgtcacttgctaacggtgtgactttggacagggagatgtcccctctaggccctggtgaattagggagcttggcaaantacctgcccg

SEQ ID NO: 255 - DNA, 502 bp, Homo sapiens
  misc_feature 77, 360: n = A,T,C or G
tacactcctatagggcgaattggagctccccgcggtggcggccgcccgggcaggtactttgagaaggaaatactgtnttgtaatcatggataaaatatgcaggggaggggaggagattatagatattaatatagagtttagggtggcattaggcaaggatgacatctgaatatctaacttccattttacattgccatgtaagtctttttgcccagtgggtttgggggacattgaggcagaactcctggaaaatagaaggaagtgaaaggtcactggtctctccaataatcttgatgggaaggactagacaacaccattagcaaaatgtgcctcttaaaaactcaagacacaagcattatnttcatctcactgaaataacagctacatcctttattaacatgagaaaatcgaaaagcttaagaaaattggtcctgaaattgggaatattggtaataatttgccagatccactaaatctaccttcctggaaacagtaaacactt

SEQ ID NO: 256 - DNA, 360 bp, Homo sapiens
  misc_feature 5: n = A,T,C or G
gggcnattggagctccccgcggtggcggccgaggtacatgatgataaggaacacaaggcctgggataaaacaggatctttttttaaaacaagcacaaatagtgtctggaccagaatacaaaaatcacatcaatctttagaacaaaataaagacccgaaggaaactgcaagcagacaacttctggtgatgaccattagtcccttctcggtagttttggagagttttttttaaaaaaagtttgagaagcaatgatataacttaacaattatgcaaaacaaggtagggtgggcagtaggagatggaaacagaagagaaactataagcgtaactgagagccagttataaacttaactattaaaa

SEQ ID NO: 257 - DNA, 519 bp, Homo sapiens
  misc_feature 18, 57, 487, 492, 496, 497, 498, 499, 500, 503, 504, 505,506, 507, 508: n = A,T,C or G
tttcccactatagggcgntttggagctccacccgcggtggcggccgaggtaccaggnttccctctcagcgggcccgttcccctgcatctttttacaacttaggtttattcactcctactgcagacagtcttttcccatactctggaagacatgggtgtaaaccaccatcaacccttccatagctcacacacaggaaggcatggccctctgccccacaagcttgtataggatatcctgagggaggaccctcctaggccctccttaagtcagtttttccctctatgtgggctgtcactcccacaacacccactatgtcctgggaaattaccctgaatcaagtggttttcactaagactgattgggatgggaatgcaatttcccagcgaagaggtgggttttgtattcagaaagaaaaaaggtttaaaatactatatttccattctacatgggctgtggctttctcagtttgtgtgaaggccaaaagaanaaaanaaannnnnaannnnnnggtcctgcccg

SEQ ID NO: 258 - DNA, 320 bp, Homo sapiens
ccgcggtggcggccgaggtacttttttttttttttttttttttgccgactaagatcccagaagtatctgagaacttgggctgcgcagggaatgctggtgtgggagaagcaagccaactgagctgagctgcggccctgtttgtccttagctctccaaaacttgctgtctatgtcacttggaaggaatctgattcttttctgcaaggcactgacaataccttacaacagagctgggagataaaatgcagagcttgtgaaagtcatcagaaagttgaacacagatggtccccggcttaaaacggttcaacttgatgatttttc

SEQ ID NO: 259 - DNA, 469 bp, Homo sapiens
  misc_feature 6, 7, 407, 446: n = A,T,C or G
gaattnnagctccccgcggtggcggccgaggtacaatgtcctatatttacgaggaccttactacttttaaatcgctgtcgttcaaaaacaaaacaatttttttcagcgtgttcttatatgcccattactgagctggtccctggggatgcaaagacacatggacctcattgttttcctccaggaattcacttggaaaaagaaacacgggagatgctgcctagaatccttgatgcctccgaagttagactggagttggattaacccggcctctctctgtggaaataggagatggctagaagagtgacatcaatcagccacaactgcttcagcctcataacgtcggagcaatggtatcagacttgatgcagagactacccgggcatatgtggcttttttttttaaaatgnagtgaaaaattccaagtcacagcccccaacactgaactnttaaaagatcatttcatgttttg

SEQ ID NO: 260 - DNA, 429 bp, Homo sapiens
  misc_feature 3, 22, 24, 36, 51, 77, 79, 88, 146, 278, 282, 340, 387, 403,421: n = A,T,C or G
gcnggggcggccgaggtacgcntngggagaacgtcngaaagccctgatttngctgttgtcctacaatcctttgtggntncgaattggnctagagacaacttatggagaactcatatctttggaagataacagtgatgtcacagggntggctatgtttattctgaatcgcctactttggaatcctgatatagcagctgagtatagacaccccactgttcctcacctgtatagagatggtcatgaagaagctttgtccaagtttacattgaaaaagtaantgtngctggtctgttttcttgattatgctaaaatttccagactcattgatcatgatccttgnctcttctggaaagatgccgaattcaaggctagcaaagaaatcctttnggctttttcacgaganttcctaagtggtgaaggngacctttc

SEQ ID NO: 261 - DNA, 257 bp, Homo sapiens
  misc_feature 7, 67, 183, 192, 211, 217: n = A,T,C or G
cgaattntagctccccgcggtggcggccgcccgggcaggtacgcggggaagcaggtcatccaccttnccctgtgaaggggtcctccctcagggaggtagagaagataatgttaatcccctcctatccaagaaacaggctcccaccagtgccaagtgcagctttcagtgagcatggcttccagngggcatgtntgcctaggaatcagtagtnctatanccacaaaacagtcaaagacctggaacccaatggaacaggt

SEQ ID NO: 262 - DNA, 427 bp, Homo sapiens
ccgcggtggcggccgaggtacagtggcacaatctcagctcactgcaacatccacctcccaggttcaagtgattcttctgcctcagcctcctgagtagcttcgactacacacgcatgccaccatgcccagctaagttttatatttttttgtggagacagggtttcaccatgttgcccaggctggtttcaaactcctgagctcaagtgatccacctgcctcggtctaccaaagtgctaggatgacaggtgtgagccaccatgactggcctattttttgaggaacaattccagtctgctgaggatcttgcctgtcttcctttattagagtcttttaaaagctccatttagcacagatatattttcattttgaatacctgcacaatggagatcttcaaagtatctccacttctctttttataatctggtta

SEQ ID NO: 263 - DNA, 361 bp, Homo sapiens
ccgggcaggtacaacttctataatcttagttatatggtttgtgtctctctaaattataaaggggagagtaattacaataggtaggttaaacggcaacagcaagaagtggtagctactacaagcttgaaaaagggaaggaggccaggcatggtggctcacgcttaaaatcctaagctttaggaggctgaggcaggcagattgcttgagcccaggagctcgagaccagtctgggcaacatggtgaaactccatctctaaaaaaatgcaaaaattggctgggcccaggaggctgaggcagggacatcgattgagtctgggaggtcgaggctgcagtgagccatgatcacaccagtgaaccccag

SEQ ID NO: 264 - DNA, 320 bp, Homo sapiens
  misc_feature 50, 81, 262, 295: n = A,T,C or G
gcggtggcggccgcccgggcaggtactaacaaagaagccctattcttcantctgaatcttctgttaaagaatttgagtttngaagttgctaaagcaatgcagtgaacagtgtacagccttctgacgtgctcaagaaaataagccttgcatattaagggagaacttatttcaactttttcataatcgtatttaatgaaaacactattaaaccttataataaattacaatttgggttttgaaacacatgccatcttgtttaagnttatctgctgaaatatagaaacaaaatcagcancagatagaacaactaaaatgataca

SEQ ID NO: 265 - DNA, 347 bp, Homo sapiens
tacttagggcgaattggagctccccgcggtggcggccgaggtaccaagggtggtatggattggcagagccactcaggaaactgtcaatgacttatacttcctgggtctgggaacaagccagctatgttgctactgaattgagcagcaataggaaatgaactcgactccgaagttgcagttctaaccaaaagacaagaagatcaatattaggagaagtgggaaaaataacaaccagggcattggagatgagagaacgctggaaaaagattactattctggaaatcagtctcttgaagatggaattattgatctaagaggaagtgagtacctgcccgggggccgctcga

SEQ ID NO: 266 - DNA, 367 bp, Homo sapiens
  misc_feature 329: n = A,T,C or G
aattggagctccccgcggtggcggccgaggtactctttctctttgtctggaataaattccttaccactttccactatcacctagtttactgagtctcacgtattaggattgggtttaaatgtaacctgtattgcctcacccagaaagcctttccagtctacccctgctttgattatttccctatcctctatgctgcctttgttccctgtgtgtctctccacaacagcaattagagcacatatgatttattatctcacatattggtctcaactttcagtctatgaagtctctgcgcacagaagctcatggagcgttttcttcttttctgngggattacctttgcaaaggcccgagaccaccagagaac

SEQ ID NO: 267 - DNA, 403 bp, Homo sapiens
  misc_feature 72: n = A,T,C or G
acactacttagggcgaattggagctccccgcggtggcggccgaggtacttagaaatacaattctgcaaattntatctttagggagttttatttcttgggaggatgattcaagaatatagtcacagatatttatttttgtctacagagaaaataatcatttaaatgaaaaacttttccactcaactgaatatgcactccacttagcacagtgagtggctgatgagcacaacacccgccaccccagcaggcttacacggcacttactatgtgccaggcacggttccaagaaaggtcactagttacattgcctcacacaatcctcacaacaaagtaggtaatattaacatccctcttttacagatgggaaaactgagacatgaaagaggtttaaaagctcacccaa

SEQ ID NO: 268 - DNA, 400 bp, Homo sapiens
  misc_feature 310, 359: n = A,T,C or G
ccgcggtggcggccgcccgggcaggtactaattttaataccatttattccacagagcatacaccatattatattacttacttgttttttaaatgtctgataccctgaaatatatttaaattcctcaaaggggatgcatattcctttgaatatgggtccacagatgagtttcagagtgtctgaaggacccttgacattttacgtagagacctagaaacactttctaggaacagggtctgtaactttttttctttttttttttttttgagaccggagtctcgctctgtcgcccaggctggagttgcagtggncggggatctcggctcactgcaagctccgcctccccgggtttcacgccanttctcctgcctcagcctcccaatcgatactgggttttaaaa

SEQ ID NO: 269 - DNA, 318 bp, Homo sapiens
  misc_feature 7, 86: n = A,T,C or G
tagggcnaattggagctccccgcggtggcggcccggggaccacaggctttagtcggttttgcctctgcagtatggaggaagctatngcctttggatattttgaaagatctttttgcctttagaaccctatcatattcctatctctgctttgaggaatctcaatgtggggcataattggttatcattcagtccttttaaatcaataacagccacatactttaaagattctattctgaagggcacatctcaatggcccgtcaaagctgtggtttactgtttttgatgccacatgaagctaaagttgtatatcctttctca

SEQ ID NO: 270 - DNA, 281 bp, Homo sapiens
  misc_feature 122: n = A,T,C or G
agatggggtttcaccgaactcctgagctcaggcaatccacccgcctcggcctcccaaagtgctaggattacaggcatgagccactgtgcccaggcttaggaacttttaataacacccctganaagttactgtaagacacccttagtctgtggaatgccacccatgaatggacatgatttttctagatcaggacttctcttttcacccatgggccacaggccacacttggaaaagcttttgggaaggaattgtttgaatctgaagcatgaatagcctggagt

SEQ ID NO: 271 - DNA, 278 bp, Homo sapiens
  misc_feature 5, 229, 251, 253: n = A,T,C or G
cccgnggtggcggccgaggtacaaggagtagtctaaaacaatgtgactttactacttattcttctgcatgtccttaccagcttcttaccttcttcaggttgagcatgagatcagcttcacaggggatgggtccttaagggtttttttccatactagtttcagccttaacaatgagttttcaacccttaaacatgaaaaataaatagtgcgaaagaggggaggatggtanaaatgctttaaaattacctttngnaaattttactttgtttatgttttaa

SEQ ID NO: 272 - DNA, 424 bp, Homo sapiens
  misc_feature 208, 348, 351, 358, 372: n = A,T,C or G
tacttagggcgaattggagctccccgcggtggcggccgaggtacactgtgaaaactgaatttggagcacagctaggtcggcatccagggacctcttggctggcagtaatttctgggtcacacaaatttgtctttgcttctcagcaatcttcattttcaggaattggatcttttcttccagtagatgtatttcaatttctccatttagnttcatcttctcttggatatttattttttcataaaaaatgcatattccttcttcccgctctatcagctgaacgccactatggtcaaattcagaggcggaggctaagtgggcattgagaccaccgttttactagtcaatggnggntccctcnggctttggatgcangatatacacaacatagcatacttccaggaggatcacaggataggcaccaatg

SEQ ID NO: 273 - DNA, 515 bp, Homo sapiens
  misc_feature 1, 4, 17, 20, 77, 89, 115, 139: n = A,T,C or G
nccnggcgaattggganttncacccgcggtggcggccgcccgggcaggtacgtacttttaaaatctggcaactaaangctgaagtatgntttaaaatttaaaccaaatccccatnaacatataaaaaacagcccagccngtttcttccccaaatttgtctgtttattccatcgactaatgaaagtctctgtttcagactccgagatgcatatctgtgaattagtgctcagtttcccaaaactaaagttaaccttctttcctgcctctcactcttcatttgtccttgatccttccataaaaccccaaatccagaagcaatgattaggaaactgtagactctagtaaaagtaatttcactagtgtcagagaaagagaaaggttacccaattaaaagaactaaggcttggcatcagaaacagaagttgtgaacatgacaaataacatgaacaaatggagatggagaatgttatttaagcctaatgggaatcggtgcaaaatatgtccacctagtacct

SEQ ID NO: 274 - DNA, 418 bp, Homo sapiens
  misc_feature 17: n = A,T,C or G
actatagggcgaattgnagctccccgcggtggcggccgaggtactgttagtgtcatttcaccaaagacaaccataactagaacactccttagctagcataccaaacttttataaaaacagaaattctgaggctaaaagaaagcttttactatttgacaattggtagttaaaatacctagttcctatctagccaaacaatattttaagaagtatttgagaatgcacattctttcaacaccatcatcacagatcacagaaaccatggtatctaggcaccagagactcataaaaagaatggtaaatcattcagagagccttattttgaataggaaccgttcatgccgatgatatcctgaaatgatttagagtatgtgataatgctggcatgtagttaagaagcctggagaggagataaagg

SEQ ID NO: 275 - DNA, 329 bp, Homo sapiens
  misc_feature 20, 46, 50: n = A,T,C or G
cgcggtggcggccgcccggncaggtacaaggaagactggctgaagnttantttgagaacaaagcaggtctacagaggaaggagcagtgactagcctggtccctgaacgggtgaaatgggaaagtagctctggctccccactgccaaaaggcctcagtgatcttgctgtttggggttattagagcaccttttacccttttcaacaaagcccaattttacttaatctagttagaatttctactccttgaaaccaagagagacaaagcaaaatcaactataatttaaccattcctcctactttgagagcatgtaggttatttttaatttttt

SEQ ID NO: 276 - DNA, 360 bp, Homo sapiens
aggtacaagtgctcatgggtggcatcaggaaataatgagacctttctctcaagattttctacatatttaggttctgtcacatcaaggatgctgatatttaaatataaacctttttagaatgtatttgacagaatttcggggcatgaggcaatatatcatagcgctttaagagcatgggctcaggaaccagactgccagggttaaagcaaacctatgagttgtgtgactctcttggcttctgttttcttacttgtgaagataggtgtctcaaggtgtgttttaaggagaccatggatcggtgctcttaggacagtgtctggtgcacagtgaatgctctgtaagcagccaccgtggttctgg

SEQ ID NO: 277 - DNA, 283 bp, Homo sapiens
  misc_feature 55, 164: n = A,T,C or G
ccgcggtggcggccgaggtacatactctctctggagttaatttttcacattcagngatttttggtgaccctttcaaccccaacaatgtgagacaggtgagagaggccttgctttttatagtgggctggatataaataaataaggtgagactcagctttatttgnttttaatgtagaccatggtttggataaccttcatatgtcaagcagaaaatattgtagacatttaaaaaatatccatgggtatgttctttgtttccttgtgcaagcctttaaaggattac

SEQ ID NO: 278 - DNA, 420 bp, Homo sapiens
  misc_feature 14, 19, 39, 67, 227: n = A,T,C or G
gcgaatttagctcnccgcngtggcggccgcccgggcagntactttttttttttttgtttttaagatntagggtctcatggtattacccaggctgctacacagtagctattcacagggacaatgccactactgatcagcacgggagtttgaacttgctcccttatattttattataaatattaactaaaatgggctcaaactgtccgtctgtccctatgtttctcagnggatgctaccacgcaccttcttcctgggctgctggccatgaagccacatgcatccacctgggcagttactggtggcctgtttcccactgcagggacagagaggccacaactgagattgcccactgtcactgagctttagaatgttgccagttatagacacgcaaacaatgccgggatgaacttgtcagtacct

SEQ ID NO: 279 - DNA, 486 bp, Homo sapiens
  misc_feature 1: n = A,T,C or G
nctatagggcgaattggagctccccgcggtggcggccgcccgggcaggtacatgggagtttgttttcatattctgtctccttttggaaatgtttgagattttccagtgtcttctttctccagtgtgctgagctattggtctgcccaaaaatctgatgttttccctttgttcccatgcagtgttccaagagctgccagggtggctttcgggtccgggaagtgcggtgtctgtctgatgacatgactctaagtaacctctgtgaccctcagttgaaaccagaagagagagaatcttgtaaccctcaggactgtgtccctgaagttggtaagtagagatttcaatcatgggggaaaggtttggtgttttttaagcttgtcagattctccggtgtgacaataacaaagcctcttctaggtctttctgtgaccttgcacacagtcatgggagttcagagggttgaggtgcttttgggattataaatttcat

SEQ ID NO: 280 - DNA, 626 bp, Homo sapiens
  misc_feature 54, 415, 445, 514, 558, 606, 618, 620, 624, 626: n = A,T,C or G
ccgggcaggtacactggagactctctgttgtccccttttgatggggtggttttnggggagctactcttgctgcccagcatcgtgagagtgtatcattctgcatgtcactagctaggaagtgagcagaattcaaaactcaagtatggtttgaatgtgcattgctgtcacattattgcaaaatcagaaaatcctaagtcagggactgcctgtatgtgggaggaaaacaatggagtgagttttgtgaattgctctgggctgataagggtccagagaccccgtgtgtaaaggagaatttatatactgcccatataaataaagaaaagggaaaggatagacagagctttttctctgtttgctgctgcttgttaattgtctgctttaactgtcttcccagaaataatttttatgtcagagncatattttggtgttaacataagtatcctgngatagtcagttttaaatcaggaagtatgaagttctcctcctgccctttggtctttttaaaaaatagttnggctattctgggtcccttgtatttccatatgaaatttaagaatnaatgccaatttctgcaagaaaaaaaaagccatcttggaattttgaaangggattgatctngncctngn

SEQ ID NO: 281 - DNA, 423 bp, Homo sapiens
  misc_feature 18, 42, 72, 94, 371, 375: n = A,T,C or G
gcggccgcccgggcagtncgcggggatgttcacccaacacantttgaccgctcagagctgtaatgcatcaancattgaccacatgcttccatgntaaacattaggaataaaggcaaagcactaagttattcgaaagtttaattatatcaatacttgctattcaaaacatttaaaattattttaatgcaaataattacactcaatataattttaaatcttcaagaagcaatctcctactacttttatcctacatacaaataaattatccaattattttaactttggattattctctataatgaacactctgaataatttaactcatgacagggattcatacaattaacccttttaaacatttggcttatagnttanatcacatttggattacccctttttatcaagaatctcaagtagccaccc

SEQ ID NO: 282 - DNA, 372 bp, Homo sapiens
  misc_feature 37, 38, 49, 66, 85, 96, 127, 160, 163, 164, 173, 184, 215,217, 223, 255, 260, 298, 303, 313, 316, 326, 328, 339, 348,353, 355: n = A,T,C or G
aggtacttttaagacagaccttacctgtgactctttnnaatttttcagntccatttggtaattcanaaacatcatgtgaccagtngacctttcagngctttttggaaggatattggccacttttatnagctttatacacacaaagtgcccattttaccgncgnntccattttngcatttttgcntgaggacttatgtttttggtggcaccctgtntngccttntacattcatttcttccttcaccagccttaaancgganacgatagggaaagggatgagagcctccctgggtatcanttttntttatggctnganaaaaaagaantntacccaccttntatctgctnttctnanacttttttgggaagtgg

SEQ ID NO: 283 - DNA, 385 bp, Homo sapiens
ccgcggtggcggccgcccgggcaggtacgcgggaagaaaataaagagtttagaccccaaatccagccctcattccccaataatatggtgtctgtaaagttaaaacaaattattttccgggtcacaggacaggtggcactaagtttttggattggtggcaaaaaggatctgagccactatctgatgatgaacaggaacagagggcagtgcttttaaaacgttaatcacagcactttgggaggctgaggcgagagaattgcctgagggctggattttgagactagcctgggcagcataatagggccccatctcttaaaaaaaaaaaaagccaagcatggtagtgcattcctatagtcccagctactagggagagactgaagtgggaa

SEQ ID NO: 284 - DNA, 231 bp, Homo sapiens
  misc_feature 124: n = A,T,C or G
ctttttgatcccacatggttttattctttaaactggtggtctctgaactggtaaataccactggagctatcaagaaagatcatttagtgttcaagatgaaaatgctggaattctttttctaatnataatttcatctagaacagatacaaaagacacttaactctattaatgtttacaacacagatggtttctggcatccttcctctattgaaagtcagaagttgggtgtca

SEQ ID NO: 285 - DNA, 276 bp, Homo sapiens
  misc_feature 163, 254, 260, 262, 263: n = A,T,C or G
cctatagggcgaattggagctccccgcggtggcggccgaggtacgcgggatagtaatcttttaaatatataaggtattagcattaataatctaatagtaaaatctgttggtttattttttgcttagtccttgaaagttggtgtggtttgttctgaaaaaaaanagaagaagattaaaaattatcttaatgatcataactctgggtggcccctgttggggaggctcaccaggctggggtctggctcttggcaaanccccancnnctctgtgaccttg

SEQ ID NO: 286 - DNA, 343 bp, Homo sapiens
  misc_feature 52: n = A,T,C or G
ccgcggtggcggccgaggtacaaaaaaaattttcacgaccatgctttttccnattataacatttcataatctcttccttgttttgtccctgcacctctacctccattaaccaggtctcatcaagttgtgacataagccaggtttcatcaagttgtgacaggtgacagaggcgtcacatgacaggggacctgattaggaaatccatatcctcataggatgcactttaacatcttcttgagctgtcttgatattttgagacatacggcaaagattccatatactgttccagtgaccagtgaccttgagaacatatttaaaactatagatttctgtgccccaccca

SEQ ID NO: 287 - DNA, 432 bp, Homo sapiens
  misc_feature 342, 397: n = A,T,C or G
tatagggcgaattggagctccccgcggtggcggccgcccgggcaggtactaagacccctgaatgtatataattatttaccaaaaccccaaacaaacaaaatcccaacattctgttagcgtaggtgatcctctgttaaataattgtaagctttgggatttaacggaagttgacggtgacttctgaccttactacgcttccaactactgacttagccaaactcctcaagtttacagaggtgaaagcccaagaaatcttttatttctatactcctaatgactttaattttctgccttgtttcttacaggatcttaataaatatccatttgtcttaccagaagctngcatcctgggttgtatggaaagaattcaaaagattcatgacttggatgtcatgtnggaaaccaaaatacataatatctgtccagtaggtt

SEQ ID NO: 288 - DNA, 445 bp, Homo sapiens
  misc_feature 369: n = A,T,C or G
ccgcggtggcggccgcccgggcaggtacctctgcagtccataaagttaggctggactgaggcctatcattgatggattgaagctgtcatccagcttcccctggtgctgggaactgggtgtgtctccttacccctgtagggttgggctggccttcgagtggcagaaatgccagctatactgaccccacagctcacacagacgacaccatgtccttcaagccagtatgacaggggttattgtcccacgtttcaggtgggaagacagatgcatgatgaactgttataataataccagctgctgatcacagagcactgactaagtgacaggaaccatgccaagggcactactaggtcatcctctcaagaaatnctcatcacaacaccatgaggtagggaatcaatcatccacatttcacagatgaggctccaaagaaggtaaaatgact

SEQ ID NO: 289 - DNA, 410 bp, Homo sapiens
ccgcggtggcggcccgcccgggcaggtacctgctactaaataaaaacaccaggaatgggtagtttttgctgttcttaacccaaaggaagaaagagcccttctctgaatggtttttgttgtttagttaagaaaatgccaactgaccaatgtcccagaaaccaaatgggtgtagagccctagcatgcttcatttcaacacctttcacaaacagtagttttggcactttgcctaccaagctgtgagctaggcaactttccccttatattttgtgtgcctctgaaaacatctccagaattcaaatgacgatttttgacataagttatcccttcctcccctctgattgcaagggcagcatcactctttctgccatgcataagtcaacatttggagtcaatagccctcttgtacct

SEQ ID NO: 290 - DNA, 435 bp, Homo sapiens
  misc_feature 10, 284, 321, 328, 349, 355, 381, 386: n = A,T,C or G
agctccccgnggtggcggccgaggtacaggtccaaaagaaaaggtccaagaactaaatcctgactaactcaaattttaaaagtgggcataagagaaataaccagaaaaagagaaagccaaagagtagggggaaaaaatcaggagactgggggagtcctgaagcccagtaaagaaagcgcatgatggaaaaagtgtcaaatgtgtcaaaaaaaaaaaaaaaacgctgctattaggtcaatgaaggtgagaaacataagctgaccactggatttggcaacatgganataactggtgaacttgaaaagtagcgtgatggaaaanagtgtcnaatgtgttcaaaaaacgctgnttttanggtcaatgaaaggtggagaaaatatnagctncccattgggatttggcggcatggagataatttggtgcaccttgaaaaac

SEQ ID NO: 291 - DNA, 444 bp, Homo sapiens
  misc_feature 411: n = A,T,C or G
ttagggcgaattggagctccccgcggtggcggccgaggtacactaggaaatgcaggaagaaaattatttgcccagatactgcaaagattttctagctatgtgagaaatgaaaatgcatttttgccatatttggtaaactgaatgttattaagaggacaaacctcatgtaaaaaggagataagcagaaactgatttgaatattattgcagagcaaagtaaataatcatgatgcattcaacctttataaatgtgcaaaaacagattaattttcccaattacaagccttaataatattaaatgactttaaacacatgaagtagggtaagaaatagatagcaatgataatacacgagtgtgttataagggatattaatgaataacttggttacacaaaagagggagggggatggnagaaaaaaggggaaaatgctggatttaaagtta

SEQ ID NO: 292 - DNA, 408 bp, Homo sapiens
  misc_feature 170, 177, 221, 228, 233, 238, 241, 244, 247, 255, 275, 298,316, 329, 330, 384, 385: n = A,T,C or G
actacttagggcgaattggagctccccgcggtggcggccgaggtactatagtctgaatgtctgtgtctcagaatgggattagtgaccttataaatgagggagcttgtttgtcccttccactacatgaggttacagcaaaaagatggctgtctatgaaccagcaagtaggncctttgncagacccaaatcttcaaactacctgatctttgacttttcatctncaccaantttanaaatnaantanctngtggttantcaaccactcagttaatggntttttttgttatagcagcctganctaaaacaccaggttagntcttaaggcatanntacaatttaaagtctttccatgctcagaatctccatctgctggccagattaaanngggttcgcaacttgtaaatcctg

SEQ ID NO: 293 - DNA, 342 bp, Homo sapiens
ccgggcaggtacatatatacaatatagcaaatatatgaatagcatgcttgtaaagtccaggatcctaaaacaggccaataagaaactaaaacaaatgaaaaagcagaacacatttttaaaggaaaaatcacccactcattgaagatctcacttcctactgcccccaggaaattcaaatagtggcaagcaatatgtaagaagaaacagagacagaacaagatctgaggctccaagcaaaacagtcctgcatgtcatctcttcctcttataaagtagtaactaacttcacatgaacagatatgtagatgctgagtagccacaactgagaaactcatccttaatc

SEQ ID NO: 294 - DNA, 449 bp, Homo sapiens
  misc_feature 86: n = A,T,C or G
cgggcgaattggatttccccgcggtggcggccgaggtacaaaagaaatggtattgtattgtttgtttcacaggattattgtgaatngacttaactccatgagaaaaagtgttgtgaactccaaatcacatgtataagatcagcctgactgggtgcagtggctcacacctgtaatcagcactctgggaggctgagacaggaggatcactcgagcccaggagttcaagacccgcctgggcaacacagtgaaaccctgtttctaccaaaagtttaaaaactagccagacatgtgcctgtagtcctagctactcaggaggctgaggctgaaggataacctgagcccaggagttggaggttacagtagcttatgattgtgccactgtattccagcctggttgatagagcaagaccccgtctcaaaaaaaaaaaaaaaaagagaagtcctgcccg

SEQ ID NO: 295 - DNA, 361 bp, Homo sapiens
aggtacttgctgaaacacagagcaaggaaacgttatttcaataaatcaattttatgcagctttaaagtttagaaccttagagatgttgagctggaaagtataccaacaaccattttgtctttcattttacagagggaaaagttgaggactggggaagttaaatgattaatctcaggtcacaaagctattttggtaaaggatcaaatctcatgttttcttctgcataatccttttctcctcttatccactgtcactaaaacgagtcaaaaagtccattagatctaaaagaaataagacactttaaatcatgttttaaaacaggaggaagccgggtgcggtggctcacacttgtaatccccac

SEQ ID NO: 296 - DNA, 611 bp, Homo sapiens
  misc_feature 3, 5, 91, 113: n = A,T,C or G
ctncnggcgaattggagctccccgcggtggcggccgcccgggcaggtactattttgtctattggctaaaatgccattatatttactttttngcaaccacttcattatttatancaccaagaataattctaaatcctttctccctgaatttattccctctctcttccaaagacctggtctcatttatagaccacaatctacaaacatctgccccaaataagctacgcccataattccatttctcacgagagtccctggaaagtaacaaggcacctaaatgacactgaaagataaaatccttattttatcctatcattattttagaacgtgagttatatcatttttttactctaaatgaaccacccaaacatttttaagaaaaaagcacttcatatgtttatatatccaaccgggacagacattacaatttacactatcattttgctgtcacactgtttagaaacattttccatagaagataacccctgaaaactttctgtataaataaatactagcagaccctctgcacttctatttatgttcaagtttactgagactcagtgcaaagctatcttgcttttaaacaaagcactcataggataacaagtacct

SEQ ID NO: 297 - DNA, 357 bp, Homo sapiens
ctacttagggcgaattggagctccccgcggtggcggccgaggtactgtgagtgtttattgggcacgtgttgacaggagcttcagtctcagaagaaggataggaaattgctctcagactctgaaccctaagatgtgctgctatgttacatttctgcccctaatcctgatggtttctcctgctcaatgaagagcacctttaccaagtagtcacctgagtattagggctagaggaggtccgagggtatgacagcttcccattttatgagacgagatttgtctggagataaaatgagcatgtggtgtttggcagggctgcatgtgtaggtggtagccatcgctcatgatgttcatggtctt

SEQ ID NO: 298 - DNA, 450 bp, Homo sapiens
  misc_feature 142, 169, 208, 209, 223, 231, 240, 244, 251, 298, 303, 322,381, 387, 396, 425, 439: n = A,T,C or G
aggtacccagggaccaacagggaggcccgagtggcttgagcaagagagtgatcagtgagtaggagaaggcagcaggagaagctagagacgactgaactttacaggccacaaaagactaaggctttgggggaggaagaggaanagaaaaaaaaattaaaattaaaaaagnattttttaaaaaaagggttcctggctgttcttattctannagggatgggggttngccattgnaaaggggcncctngggttgncaaggggtgaaccagggcccctggtcttaatggttacccgggccttncccanccatccaaattggggccantggttgggccttggggacttcttctaaaaaaggccaattcttggttgaaaaggggaacnttggcnaaaccaaanaacttggccaccaaaaaaaggttggttcntaaccaaggaaccncccaaggcccc

SEQ ID NO: 299 - DNA, 279 bp, Homo sapiens
ccgggcaggtacttctttagggctggttaattggttcaaataatttttaatttcctttctagtatcttctcaagttggaaaaatatacatacagtcctccttcaccttactctgtatttatattacccataactagcaagaagttcttgttctagattttttgtttgtttagttataacagagtaacataccatttaattacaatttttagccagaaaagtccccactattttactaacttgttaaaagatatctatataaattgcctggccttatatt

SEQ ID NO: 300 - DNA, 404 bp, Homo sapiens
  misc_feature 2, 371: n = A,T,C or G
anagggcgaattggagctccccgcggtggcggccgcccgggcaggtacaaagggaatggagaacttaggttggttacctgagagagagttacatctactgaacaattaagtgctcctcatcacgaaagaaaaggaaagaatgcggactgaatcctgtgccctgaaagtcgaatcagcatatacctgctgtttctatgtcaccaagaggctgattccaggtccaatgcagagacgatgaccactaggggtcagactttttacattactcctcttgaaagaaggaacccaagtcttggattttttaactggggaaaaactagagaggtccgtctatcctgcatctggccggcccatgtgtaaacagaatgaanagtcagcatggggaaagaatctgaatgcccccg

SEQ ID NO: 301 - DNA, 442 bp, Homo sapiens
  misc_feature 67, 328, 332, 364, 367, 421, 423: n = A,T,C or G
cgaattttagctccccgcggtggcggccgcccgggcaggtactgaagattttgcaccatcacttttntttttctcataaattctttatgaggctattagtctctagggtgctcttctgaaaccagaaggaaatttggctcacacacacacacaaaaaaagttgccatataaaggcaactgcaaaatatagtgggaagttggtggaggatggagtttcactgagaatgggacagcaacatgatggaaagaacatgaacttgaatttcagttctaccacttactagaaagatgcctttgaacaagtctcaatttctgaatcttcatttgntgcnctgtaaaatggggtcatattatctcacaaagntgncacaataattaaaatgagatcttgttttctaaagtcacccgacctatattaagngngaaatcattttttctttcc

SEQ ID NO: 302 - DNA, 447 bp, Homo sapiens
  misc_feature 348, 432: n = A,T,C or G
ctacttagggcgaattggagctccccgcggtggcggccgcccgggcaggtacctcctagccatccaattaaagaggctttccctaggatactgcttgcccttgcagggaatgggatctacacagcccatacaccttaagagtccagtattgatgttggtgttttcatcattcctcaaagccatttctggaccattcttcctctagccccttataaaaatgcttgttcacctgagctcaaatcaacactatcaccttttaccaactatttctcaactgtctacctcttcagtcacttttccctccttcattaagactttacacccatatcaggtcctcctcaccacctnaaagtttgccatttaacaagctttggatcctttctcttctttgacctcaattatcacccaggcaaggttcttttccaattcttnatcctttggtttaaa

SEQ ID NO: 303 - DNA, 356 bp, Homo sapiens
aggtacatgccatgaaggacatatacaaggtaatggaaccacccaataaaaagtagtcttactatccttttgttttgggcatacaaaagcagattaaggataatcgtcttgttcatttatttatctatatacttatttatattctgtctctaggactgaaaaagccaaaagatcagggacctagttttgtttcttgctctttctcaagcatgaggacactgcctggcacatagagggctcacagtaaatatttcctcaatacatttgttgattaagtgaaggtgatagaaactgacagggaccttgaacaagattagagtattttatctgtatctatattgcatttgtttttgaaa

SEQ ID NO: 304 - DNA, 349 bp, Homo sapiens
  misc_feature 51, 156, 225, 227, 298, 314: n = A,T,C or G
atttgatgatatagctaaaagcacataaaaaattctaaatcaatatctatntttcatttaacagcagaatactatttgaggaagatgcccaagcattcacaaattccagaggtctgcagtatttttacccattgcaccatatgactgagatgtatnccatagactttgtccctaaagttctgccaggagcatttacttggccttaaatcctcagtggataaagtngnctacttattgctagatgggagaggctgattaccttcacctgcccttcttgtacattgatttgagtactctntacagttatcagtttncaattttttgactatcttaatgcatggttattggt

SEQ ID NO: 305 - DNA, 420 bp, Homo sapiens
ccgcggtggcggccgaggtaccaatggttttataatcttacagccttctttctggggctcttagaactgaccagaactaggaactgaaggccagccttttcttaaatatacagcatgacagtatgaccatccaacttcttaaaggtgttgtttatctatggtctaggtcagctaccggtttgccctgcatgtttgacatcacagatataacacgccacctggactacttccttcttcagggccttttaagactcttcagaggaaggccagctcctattggctctgcaaatccactttacagtgccagtgcccaaggctgtaagccctggagcttggagagaaatttggaagaaaagcaagagaaacagcaaccaaattgtcttagaatgtagaatgtctttggggttgttttctcttttc

SEQ ID NO: 306 - DNA, 433 bp, Homo sapiens
  misc_feature 1, 366: n = A,T,C or G
nctacttagggcgaattggagctccccgcggtggcggccgggcaggtacaggtcccctaatggcaggcacggttgtagtgaccacactttccagctttggctgggacagcctagcttttgcctattgtcctaggacggtcattaatacagcctcttttcactctcctagtgcgtggatttggaccatcacctatatatacaatatggtcactgtttttaaagtggtagcaaagagagagtcatgagtgagagatgaatcccacaccaaggaggttgagaaacagttacatttaaggccaccgtagcccttctgccagtcacttaagctcctctctcctcctagataggtctacattttgtctttangggtagggggcaatgatccaacagcccctcagaaaaaaaatcgtgtgccattcgggtgctttccaag

SEQ ID NO: 307 - DNA, 426 bp, Homo sapiens
  misc_feature 50, 425: n = A,T,C or G
ccgcggtggcggccgcccgggcaggtactgtatttcaaagctgacatttntttcccaaaatgtgcacctgtgaacactgcaaaaactgcaagtgcaaatgcacttgcaggtcatgaaattttgaggttttgtgcattgtaaaatcctggagcgattatatattagtcataatttcaatgaaaaagtaacgccagcagccttgagtattggcctgaatgtaatgctaaatgatgtgcgtccagggaactgttgctttttaagcgatggctttttgtcagtagctgctgtgactgaaatgaagttacaacttcaatacctctgtgcagaagcagtatcaggaattctctgccctttggcagagctctgcctttcctcgttctttcagatgtaagacagcccaaatctctgacatgaagccagtttana

SEQ ID NO: 308 - DNA, 222 bp, Homo sapiens
  misc_feature 36, 54, 75, 182, 185, 192, 202, 206: n = A,T,C or G
atagggcgaattggactccccgcggtggcggccgangtaccattcttatctcanaatgctgtaaaccatcagtanaagcagtttagatttggactgcatggtgaaatgaaaagtaataaccctccaaccacaacctagtcagggtattaataattatatgtagcaagaaaacaaacaagaanatnttattgnaaaaatgganattncccaaccagtttcata

SEQ ID NO: 309 - DNA, 516 bp, Homo sapiens
  misc_feature 15, 505: n = A,T,C or G
actcctatagggcgnattggagctccccgcggtggcggccgaggtactaaaggtcatttcattttcattcatttaagtcatttaatttttaaaatcaagtggataaaaacaaataaatgtggctttgataataattttgacttgccaaatgcctcttttccattgacccctggagctgttcagtgttgtgagccctaccatgtgttagggccacatctctttttctcacaaagggaaactggccacgaggtgggagtcataggagcgttggcttatgaatgatgaatagggtagagttggccatagtgatcacaaatcagatctgcaatattctgctatttatatactgaacccagcatcatattaagtgagaatttcattcataagcgcgcatttctcattacattccaaaaatcagaccatgaaaaaaacagctttgggaaacatttgagagactgttgcttgagtacctgcccgggcggccgctctagaactaggtgggatnccccgggctgc

SEQ ID NO: 310 - DNA, 440 bp, Homo sapiens
  misc_feature 5, 358: n = A,T,C or G
gactnctatagggcgaattggagctccccgcggtggcggccgaggtaccctaccactcaattttttaaaattcagataccaaacaaaggacaatatatcagctgtcaaatagcacataaaagtgtgtttatcatcattagtcatcagcaaaatgcaaattaaaagcacaatgagataccactaaacacccactagaatgactaaaattaaaaacacaaacatgttcaaggctgcagcgagcttttgatcacaccactgcactccaacctaggaaacaaagtgagaccctgtctctttaaaaaaaaaaagatgaacaccaaaatgtaagatccagacctaccaaattctcacacactgntgctggggaatgtaaaatggcacaaccaccaggggaaaagggtttggacagggtcttaaacacttaatcctatgtctaccct

SEQ ID NO: 311 - DNA, 461 bp, Homo sapiens
  misc_feature 153, 311, 402, 424: n = A,T,C or G
acttagggcgaattggagctccccgcggtggcggccgcccgggcaggtacgcgggtatcaacatttgaaaacttggggaattactaatattactgtagcgataaaatggaaattttgatgatacagacaatagtccacagagaattatgactnaaaatttattctttcctaccaaccattttaagttagtttgccatcttatgttggtgctcttggaggcttacaaattattattatttgagacaggatctccctctgtcacccgggtggactgcgatcacggctcactgcagccttgagctcctggtctnaggtgatcctctagagtagccaagaaccacaggcgtgagccacagcgcctggccaggaagcttacagattattaatgaaacttttgttaanaacccttttaccttactgacanccagaaaaagtaatttcactggtttgggggaattaaa

SEQ ID NO: 312 - DNA, 336 bp, Homo sapiens
  misc_feature 13: n = A,T,C or G
aggtactttgatntttagggaataaacactccttagctggacagcaacacaaataactcttaaatgaactgcgtctgttacacacacacaggcacgcatagagtttcaatggggtttattgaaataaagtggcctctacactgaagaattgtaaggactgtattctatccatttcctgtttacttctccatttatttgtattcataggtaaggtttactagcacatcattaagatactgtaaaacagcattaaaatcctaccttttaatttcctcaggtaagcgcctctcttgtcttagcaatgcctcggttctcaggccttgtttatctttctct

SEQ ID NO: 313 - DNA, 320 bp, Homo sapiens
  misc_feature 197: n = A,T,C or G
ccgggcaggtactgccagcaggaagtggttggtgccttagtgacccatatctgcagtgggaatgaagctgaagttgatactgccttagatgtccttctagagttggtagtgttaaacccatctgctatgatgatgaatgctgtctttgtaaagggcattttagattatctggataacataccccctcagcaaatacnaaaactcttctatgttctcagcacactggcatttagcaaacagaatgaagccagcagccacatccaggatgacatgcacttggtgataagaaagcagctctctagcaccgtattcaagtacct

SEQ ID NO: 314 - DNA, 441 bp, Homo sapiens
  misc_feature 28, 31, 37, 44: n = A,T,C or G
ggcgattggagctccccgcggtggcggnccngggacnaaggtgnaattggggtttatatgtaattacaggtttcattgggctttatggggtttatatctgcgttccagaaattgttgtttcctttctaaatctctaaacttttaccattactggaaaacaccaacagagggcatcaggatttaattctggggagagagcattacttctttaaatcaccatagcactgtgtgcaagccactttctctgagtgattcttcagctttaaaatggagtgatggcaaagaacgtatgttatttcctccatgaaacactacttcttaagagctcaagtccagaacccttcattcttccagacataaaagtcagcctggatggctaccaccactaatcagatttgtctgctgatgcaaggcccttcagtcattccagaactggtaaat

SEQ ID NO: 315 - DNA, 377 bp, Homo sapiens
  misc_feature 45, 56, 57, 62, 121, 148, 150, 169, 219, 240, 246, 282, 297,304, 305, 317, 318: n = A,T,C or G
aggtactgacactcattcaagattggaaggatggaggggaatccnttctttttttnngagangaaacatctggcatgctgaaagactgaggcaggaactgctaggaagggaaactctttanagaagtaatattttaggtcaggcacgnancttgtgcaaagcccaggangaaaagggggaaagagaaagtgggtgggagggagaaatgagaaaaacggngggggacagaaaaaattgcangtcacnggcaagagactggtggactggaaactggcaaggcancggatattgaagcangtcttgnntgacacactaannttgcccttaatcttatgggccatggggagcaactaaaggtggctgtcctgcccgggcgg

SEQ ID NO: 316 - DNA, 342 bp, Homo sapiens
aggtacatttgttgggggcgtgacattaacatataaccacttagagtggacatgcagttagagaaaagtcaatgagctggaaccaagctgggaattccaacatgtagaagttaaacacaagaggaggagccagcaaaggaaacagaaacagagcttccagcaggtggggggcatttggaagaaaacgatgccatagaagccaagatgaaatagacatcaaggagaaggaagtagtcaattgttttgaatgctatgaagaaagataagaataggtaaatagtccttatatttgataacagaggtcactagtgatcttgatgaggggtttcaatagaatggtgg

SEQ ID NO: 317 - DNA, 367 bp, Homo sapiens
ccgggcaggtacgtgcagctgcatccttgcccattgacggtgagattatattggcaactttgaaaaaccaaatattattgaaatactgacccattttccctttacaataacatctttggctgggataattttacccacctataattctcgaagaaaaatgacttcaattatgtcacaaaatttaaaaaatcttaggattggaagagacattaaagagcaattccgagcctagcacagtggctcattcttgtaatcccagcactttgagaggccaaggcaggctaatttgcttgaggctgggagctcaagaccagcctgggcaacatagcaagaccctgtctctactaaaaacaaaaaaaaaaaaaaa

SEQ ID NO: 318 - DNA, 385 bp, Homo sapiens
  misc_feature 1, 66, 94: n = A,T,C or G
ntagggcgaattggagctccccgcggtggcggccgaggtacagcaaaatgaatggagatgttgganttagaatacaggtaggcaaggtaatcanagacatagaaagcattgggaaagccactgctccccaagaagtcatatgacctgtgggatctctagaggggacctcaagagaatggtgtgtgtcaggcactgcactagtgactttatgtagattgcttcatttgttcctgccaacagcccactgaaataagtattaaaattctgtgcccagtgaagaaacagagagggtgtttgtgatgctcggaaaccaataatattgtgtgtagctctcaactcaagttcagggtatgctgacaccttgccatttgtctcctcaaatggt

SEQ ID NO: 319 - DNA, 319 bp, Homo sapiens
  misc_feature 2, 22, 23, 35, 42, 46, 50, 89, 95, 305: n = A,T,C or G
cngtggcggccgaggtacgcgnnacgtgcattccnctctagnttantttnttgagtaatgagtggtatgataccatagctttaaaaggnatattnatgcaaatgatctcaagtttaaatttccagttcagatcttctctccatattccaggcttatagcttaactgccgtcttgacttctctacctgtaaaatttaacgttcagtgctacactcaggctggacatggaggctcgcgcctgtaatcccagctacactggaggctgagtcaggagaatcacttgaacgtgggaggcagaggttgcancgaggggagatcgc

SEQ ID NO: 320 - DNA, 339 bp, Homo sapiens
  misc_feature 308, 323, 333: n = A,T,C or G
ccgcggtggcggccgcccgggcaggtacgtaacaggacatcaataaatattagttgaatggaagattaaatcaacaaaatggtgagttcctgatgatcataggtatgtgccacctgggttctattccagtaaggaatgggagattggctgccggaggcaagaacgtgtttcatttacatttacgcatttgaccctgaaaaatgtcaccagattttacaagttatttacaatggtgtcttggaatgactgcaggctcgtaaataaccaggaaagataaggctgaaaaaaaaaaaaaaaaaaaaaaaaangtacctcggccgctntagaactagnggatcc

SEQ ID NO: 321 - DNA, 208 bp, Homo sapiens
  misc_feature 2: n = A,T,C or G
cnattggagctccccgcggtggcggccgcccgggcaggtacgcgggaaataaactaggtgtctaatgtaacttaaaatacagagaaggacatatgagaacagaagtaaaaatagccaagtaaaggaaagcaaaataaagaaatagaagtcaatagggaaagtgatagatacagaagttaggcaaagataagcatgtctacacgtgtgt

SEQ ID NO: 322 - DNA, 243 bp, Homo sapiens
  misc_feature 203: n = A,T,C or G
ctatagggcgaattggagctccccgcggtggcggccgaggtactatatgctagaaacttggctgaatgatttgacattatcctatttaatgttcatgacaatccaataacgtaaccactcatatctcccttttgtgcagataacaaactgaggcccagagaaatcaaatatgttgcaaaatctacatcgttgaagagatgggnttcaaatccaggtcggcttggcccttgccacgacttcata

SEQ ID NO: 323 - DNA, 317 bp, Homo sapiens
  misc_feature 60, 71, 118, 147, 160, 171, 191, 261, 293, 299: n = A,T,C or G
gaaagctagacagatctgatgctagccaagcattttagccatcagtaatgttcattactnggcacagagtnggtatttcctaataaattttaaaataacactatgcgatatccagtanaaaataatatattcaaaatctactttaangcatttacatcanaatatcacaancccatgtaaaaattacccanggttacactgactactgaaaattagcatttcccctatgtttttgtctccactctagttcccttacattanatgttattactccacactttaaaacctctagngctggngagacttacaagtaagga

SEQ ID NO: 324 - DNA, 387 bp, Homo sapiens
  misc_feature 49, 326: n = A,T,C or G
cccgcggtggcggccgaggtacttggctgatgtgccatgaagggagacnttttttcagtgctagaccttaagggcccttccagtatcaaggatacatgtcacctcttggaaggggacaagaagaaaagacacaacccctgacccctgcactcacaaacacgaagaccactccacactggggcactcagaaaaagcataacagggacctttaagacgaagctaaggtcctgagccaccaagtgcaatgtttgatggtttgtgagactgttttttggtctaggtggttgatcctggtgtttgtggagaggcacacggttgaggttaanagccggagtgctggagcagactccctggtttgaatcctggccggccgctctagaactagtg

SEQ ID NO: 325 - DNA, 457 bp, Homo sapiens
ccgcggtggcggccgaggtacagatcaatccctatcaaaatccaagatggctttttttttcttgcagaaattggcaattaatcttaaaattcatatggaaatacaagggacccagaatagccaaactaattttaaaaaagaacaaagggacaggaggagaactcatacttcctgatttaaaattgactatcacaggatactatgttaacaccaaaatatgactctgacataaaaattatttctgggaagacagttaaagcagacaattaacaagcagcagcaaacagagaaaaagctctgtctatcctttcccttttctttatttatatggggcagtatataaattctcctttacacaccggggtctctggacccttatcagcccagagcaattcacaaaactcactccattgttttcctcccacatacaggcagtccctgacttaggattttctga

SEQ ID NO: 326 - DNA, 416 bp, Homo sapiens
  misc_feature 7, 387, 408: n = A,T,C or G
gaattgnagctccccgcggtggcggccgaggtacccacagcattggctgttcttcataggagactcagagaagacttcataggagactcattattgtttactggacatcaggtgctatattgtatagcattcacattccacaggtgaggaaacaggctcagaggaataagtggcatgccaagatcattgagtatatcggtagcagaattaggattcagactttgttaggcctaactccaaagccctggcttttttttttttgagatggaatcttactctgtcaccgggctggagtgcagtggcatgatctcagctcactgcaatctctgcctcctgggttcaagtgattcccctgccttaagcctcctgagtagcctggggactacnggcatgcaccaccacgcccanctaatttt

SEQ ID NO: 327 - DNA, 351 bp, Homo sapiens
  misc_feature 15: n = A,T,C or G
ctccccgcggtggcngccgcccgagggtacttctggaggtgcttgaaatctgactactctactggagactacacaaaaaggctacaaggagggggaggtgcaggtgcccagctgagcccagactcttagccataccctccaaagcaccacacatcttccagccccagttgccacctgactacaacaaagcacttactcaacggtctcgaggtgtccttaaaaaaaagaaagaaaacaaaacaaagcatcacacacgttccagcctcagctgcacctgacttaacagctgcatgacaaaccacgaaaccacaagaactatccaactcagcctatcatcccactgaatgaaaa

SEQ ID NO: 328 - DNA, 500 bp, Homo sapiens
tctatagggcgaattggagctccccgcggtggcggccgaggtacaaagggatatagaacctgtaaataaatccgtgtgtctgtggtcaattgattttttgataaaataactaaaaatacacagtgaagaaagaaaattattttcaataaatggtgtagacaaaactgactatccacatacagaagaataaaatttgacttttattttgctctttatacaagcatcaaatcaaaattaaagtttaaatgtaaaactactacaaggaaatatagaaggagactgtatgacattggcctgagctatgattttctgtagattattccaaaaggcaacaaaagcaaaacacacaaatgagactgcataaaacttaaaacttttccacaggaaaagaagcaatgatagaattaagagaacccacaaatgggataatatttttaaaccatacatcagataaggggctcatataataatatatagccactcaacctacttcaaaataa

SEQ ID NO: 329 - DNA, 336 bp, Homo sapiens
  misc_feature 62, 71: n = A,T,C or G
cctatagggcttttggagctccccgcggtggcggccgcccgttcaggtacttagtttgctcncaacatttnattctctgacaaaccctaagtgtaactcagaaaaaagctacactaactaaatgcagattgaattaacataatctcccataatcagaagtttcctaaagacttttcatttttctttgttaacatttatgtctataatacctattgtcattactcctaagaaatccaactttaaaatataacaagcaagttttttgcaatgaaattggcagagtaaggagttttataaccaaagggatctgtgtttaaattatgcactctctgccac

SEQ ID NO: 330 - DNA, 219 bp, Homo sapiens
  misc_feature 5, 71, 121, 188, 201, 203, 206: n = A,T,C or G
cccgnggtggcggccgcccgggcaggtacatgagtgtattccgtttattaatgaatatatgtgcacagcangcctgagttgctcaaaccctgcacatgccaaagacaggcccttgaccagntcctgaaagagaacctttaagcccttggaatatgccacctgataagagtgtttttttatgctgaggncttgggccacgcngnatnggtttggcttctg

SEQ ID NO: 331 - DNA, 362 bp, Homo sapiens
  misc_feature 1: n = A,T,C or G
nctatagggcgaattggagctccccgcggtggcggccgaggtacatactatagacataaacttgtttcgaataatttcagaataagtcgcacactcatgtcccttatcccaaaatatctgtatttcctaaaattaaaaatattttattatataatcaaaatgcaaatgattctgattatatacaataaatttaacactgataaaaataattgtaatctaacctactatctttattgcagttttgtcaactgatcccatatgtgtcttttttttttttgagacagggtctttctctgttggcccagactgggagtgcaagtggtgccgatcttggctccccacaacctccgcctcccaggctc

SEQ ID NO: 332 - DNA, 376 bp, Homo sapiens
  misc_feature 20, 93, 94, 98, 101, 103: n = A,T,C or G
tccaattttcccggcgcctnggagctccccgcggtggcggccgcccggcaggtacgcggggggcctcattctccttggctgaaaacagaccgnntttnatntnactggtgaattagaaattctatccagccactcctggagattgattttccgtctggggatctgacctcttgcttcactagcagagggtcagactgttctgagaggagtcaacgagctggccctcagaaaagccttctctttcttttttgttcttttttttcttttcttttttttttttttttaactgtatgtttcaaagggaaagtctgattactttggggacttaacactaccagtttgaattcttcttggtacctcggccgctctagaacta

SEQ ID NO: 333 - DNA, 325 bp, Homo sapiens
aggtacttttttttttttgtagagacagggtcttgttttatttcccaagctggtctcaaactcctagcctcaagtgatccttctgccttggcctcccacagcactgggattacaggcgtgagccaccacactaggcttggaacaattcttaagttcactctgacctctccctttcttatcacttcatgggagtttagttagtgctgtgatctttccacagaaggagctcatgcagaagaatatcatttcaacaaacatcatttcaagactgccggacttcctaggttacaacacctactgatggctctaactattagcaggtata

SEQ ID NO: 334 - DNA, 461 bp, Homo sapiens
  misc_feature 68, 70, 413: n = A,T,C or G
ggagctccccgcggtggcggccgaggtactgggatcgttgttctccttccacagctacaaaatcagtntntcccaacccagtagctgtaacttcaccttttctccaattcttccccactcacaccaacatttttcatctggaagagtcaactgtgaatgggacaagagcttttttttttttttgatacagagtctcgctctgttgcccaggctggagcacaatggcgcgatctcagcccactgaaagctctgcctcctgggttcaccccattctcctgcctcagcctcccgagtggctgggattgtaggcgcctgccaccacgcccggcgaatttttgtgtctttagtagagatggggtttcgccatgttggtcaggctggtttataggaccactgtcatatatgcagtccgncatatacacttgggcaacagagtgaggaagaaagaaagggaaagaaag

SEQ ID NO: 335 - DNA, 519 bp, Homo sapiens
  misc_feature 304: n = A,T,C or G
atgggcgaattggagctccccgcggtggcggccgaggtacgcggggggagaacgtcagaaagtcctgaattggctgttgtcctacaatcctttgtggcttcgaattggtctagagacaacttatggagaactcatatctttggaagataacagtgatgtcacagggttggctatgttattctgaatcgcctactttggaatcctgatatagcagctgagtatagacaccccactgttcctcacctgtatagagatggtcatgaagaagctttgtccaagtttacattgaaaaagttattgttgntggtctgttttcttgattatgctaaaaattccagactcattgacatgatccttgctcttctgtaaagatgccgaattcaaaggctagtaaagaaatccttttggctttttcacgagatttcctaagtggtgaaggtgacctttcccgtcaccttggcttattgggattacctgttaaccatgttcagacaccatttgatgaatttgattttgccc

SEQ ID NO: 336 - DNA, 657 bp, Homo sapiens
  misc_feature 396, 503, 544, 592, 635: n = A,T,C or G
aggtacgtaacaggacatcaataaatattagttgaatggaagatttaatcaacaaaatggtgagttcctgatgatcataggtatgtgccacctgggttctattccagtaaggaatgggagattggctgcggaggcaagaacgtgtttcatttacatttacgcatttgaccctgaaaaatgtcaccagattttacaagttatttacaatggtgtcttggaatgactgcaggctcgtaaataaccaggaaagataaggctgaaaaaaaaaaaaaaaacagttgaagaatcagttgcttgttttaaaaactcatttcacaatgcgttattttcttccaaagaggcaggaagctcaatgtctataaaactttaaagtaagcatttccctttaaaatgaanacacactcttaaacctctctgtgaaccaatctctccataaaaatttatgatgtattttgaattagagcatgctaatttaagtgtgatgcacaaaaagccctgcaaangaaaaaacaaacctttaattttatttaatctcaaataatanctaataatttgcacaagaaataatcaggatctttgaaaaatataagcngtcattttacattgcccattggtagcttaaatgtgtagcccancaatcagaacaaggggtcaaag

SEQ ID NO: 337 - DNA, 354 bp, Homo sapiens
  misc_feature 13: n = A,T,C or G
gaggagagatggnctgagttttggcgataggtcgcacaccttaccaacagcaggcggcgagggctccccacgctgctcgtttccagaggtgcctcgtattattgagaaggcgtgcagtgaatgaaaatgtgtccacacagctcctgctctgcctgtgacattgggttgctgtatattagctgggatagtatatttcaaattgctttctcaattgcaaagtatggtagaaataaatattcgctttaatttagtaactagaacttagaaaagttcctcctgtttcctgattgccaagtcgggatgagaaatagatttcataattatgatacaacttgatatcttgagataaatgtt

SEQ ID NO: 338 - DNA, 378 bp, Homo sapiens
tagggcgaattggagctccccgcggtggcggccgaggtaccattcttatctcagaatgctgtaaaccatcagtagaagcagtttagatttggactgcatggtaaaatgaaaagtaataaccctccaaccacaacctagtcagggtattaataattatatgtagcaagaaaacaaagaagaaaataatattgaaaaaatggagatcccccaaccagtttcatatttgaaggatctgagttgtatttttattaaggaaattttttttctgaatactgtcttccaaaatgttaacattaaaatctgaatcagaggactctgaatggaaaagaagtttgatcactgacacctagggctctgaagcgtgtgtggccacatgga

SEQ ID NO: 339 - DNA, 502 bp, Homo sapiens
  misc_feature 446, 495: n = A,T,C or G
actacttagggcgaattggagctccccgcggtggcggccgcccgggcaggtacgttaacatacaaggtatgtaaatgaaaatcaatgcacttgtcatttcagcacaattccttattgcttacattcaacattttaaatacattttatttaaacactaataacttttgttcttgtcttggaagtctaatgatcttcttggctccctgcccctacagccctctaatcttcacagccgtggccacttagcccccatctggaggttcaggcttattctgcatcttggagctaatcttgtccctatgctgggggcatacaagatatcatagccaagagctaactgatttagcactcagctttgctgctggtttcattctgatcttgtaatttatttctcaagatgtaggctatgcttctcccagcaacttgtaaccaaggcttggctttgnttaccagttgcaatatctatcaggcttttcggtttcagttcttggaccnagttttt

SEQ ID NO: 340 - DNA, 347 bp, Homo sapiens
aggtaccaggagggtattgatgtttgaggtccaaactgaaaacccatcacctccttcccactgctatagcagcgttagccctggggttcattatctagccagttcacgccttctaaagtggggctctgaaaatgtcttacttccctcacagacaaagcaattctcaagcctcctgagatcacccaccaaccagagcaactgctgtcacttggaggtgcagctgaattcttctaattgtgacacaaactcttgaaactgtaaatgctgaaagattaaatgaggttataacactcagaaggttttacaagtaaaagtaagtcaaatcaataggcctttatttcatatct

SEQ ID NO: 341 - DNA, 433 bp, Homo sapiens
  misc_feature 433: n = A,T,C or G
tagggcgaattggagctccccgcggtggcggccgcccgggcaggtaccaactcttgtcaggctcagtggcagcttctacgacctgatggatggaaaaaaatcaaactctgtgactctatggttgactgccacctctgcaaccttgactcatctgctgaaaaggcaagaagaagaaagggcagcaagccctgttttagggactacataagatgaggggagataagggggacatagatgagttctttaggattgcgtgtgttttgagtttttgtttctaactgaagaaatctatcaatattaaatagggtgggaaaatggtttcttggaataactgttcaactggtgtgtaaataggggaaagttttcaatgagtattacttatttggaattaatgccagaaggacttcccccagtccaaaaaaaaaaaaaaaan

SEQ ID NO: 342 - DNA, 357 bp, Homo sapiens
  misc_feature 7, 23: n = A,T,C or G
actatanggcgaattggagctcnccgcggtggcggccgcccgggcaggtacagagggtgccaggcactgtggtgcacacctgtagtcccagctacttgggaggcttgaggcgggcggatgcttgaggccaggagtttgaggctgcagtgtgctgtgattgctcctgtgagtagccactgcacttcagccctggcaacatagcaagaccctgactctaaatataaaaaaaagtatagcgggcacaaatggggcgaagccagggtgggatgcagagtctagagggagatgaagctggagaggcaggcagtggtcaacatgtggccatggaaaatagtttaaggtttggattctgatggc

SEQ ID NO: 343 - DNA, 372 bp, Homo sapiens
ggagctccccgcggtggcggccgaggtacacataaacacacacatatgtatgcatacgcacatatatgagatagaaatttctcctttaagtgccactctgtaggacctaagatatttctggattttgtttgtttatttttgttttacatctgtgagttggtatcaacttacctagcaaagtaaggggagaggcgcagaaaaaaggcgcctttgcactttctggaaactagccacctttgactcaccttctgcctccagctcccagactcaggctctgagattagcaaggaataaatctccctgcctgcaggcagggtcacattcacaccctccgacactcagaatctgctccctttacaaagtcttagaaaa

SEQ ID NO: 344 - DNA, 338 bp, Homo sapiens
ggggccattgagactgccatggaagacttgaaaggtcacgtagctgagacttctggagagaccattcaaggcttctggctcttgacaaagatagaccactggaacaatgagaaggagagaattctactggtcacagacaagactctcttgatctgcaaatacgacttcatcatgctgagttgtgtgcagctgcagcggattcctctgagcgctgtctatcgcatctgcctgggcaagttcaccttccctgggatgtccctggacaagagacaaggagaaggccttaggatctactgggggagtccggaggagcagtctcttctgtcccgctggaaccc

SEQ ID NO: 345 - DNA, 391 bp, Homo sapiens
aggtacaacgtttcagccactggtggtttgccaaactggctgattacccataaacacacaacatggttctgttttgctcctagcaatccttaaaccattgcatgtctaacattctcagactaattcacaaatcagaaacatctgatgcccaacccataccaaatgcatttcagggcaaaaattatgctcctataatgtctggcttcctgtcttcaaggcactttgcttacatgactgaatcctcactgtgaggtgtagctatccatcatttttgagcaagaaagccaagatggataaataagtgactttcccaagacaactagagtggttggcaccatgatgggattggttgtcttatttttcagttggtcctgcccgggcggccgctcta

SEQ ID NO: 346 - DNA, 473 bp, Homo sapiens
  misc_feature 8, 160, 380: n = A,T,C or G
atagggcnaattggagctccccgcggtggcggccgaggtacattttaaaagtcaggaagaaaataaaatctgactcttgtagcatttagctttgtattggagtggcctttgcaggtaatgccaacttccacgacatttagaagattcataaagtgctggncaaaataatggaaaaaatagcagctgtcatttgatcagaatctgtgtgcaaaccaattaaaagccctgtcataactatttaagcatgtaaggtgatttatgattacctttcataaattaatgaattctaccaataagagcagggtgctacattgggtgctcctgttctcgcaagagtttacagctacacattacatgaggactgctccaggttttgctgngtttaaatgattgacaaggcagaaactttgccttttcttcaactgattgggcactatctacttataacttataacttaacttatttttcactc

SEQ ID NO: 347 - DNA, 406 bp, Homo sapiens
  misc_feature 9, 65, 345: n = A,T,C or G
ggcgaattngagctccccgcggtggcggccgcccgggcaggtacgcgggggaccttgggcctctnttaaaaccatggctttaagtaaggagggagcagatatataaaaaaccttatccctctttctaatctcttatgtcctgtgagtgtcacccattgagtaaacccaagtggaagtcagcaggaaagtagctgggatgatgcagtctttacagataccagtaaagatgtcatctggccaatttgtgtgaaaaaagagaataattctcatccaaaccgcctgtctctggaaataagaaaagctctgagggtctccaaagttaccagaggaaggctgaattttatnagtctagtcctcaactctaaccaaagtaaaggaaactggaaagacacacgcttttttagtc

SEQ ID NO: 348 - DNA, 524 bp, Homo sapiens
  misc_feature 85: n = A,T,C or G
gcgaattggagctccccgcggtggcggccgagaagtcaagtctttcaggacatacctaaagaagatagcatccatggtgcatgtngcatgtgcctcaccaggcatcaccatacccaccacagctcatgcgtgcggatgcctttgctacccaggacggccatacaaggaagccattggcagtcctgtgcacaaacggcatgtcaagaaattaaatgatttcctcagggccccgcaattaccttcagcaaagctgagattcccagccttctctccgctccctgagactgactctgaattgcttttctgctggagatgaaaacaagaacagaaacagtggaaactaatcacatttttaaaagttttacataaccacttaattataatacgcctgccccaaaagcactcctaacgtcctaacacatggtaacttatttgtttaattttataagtattttcagggacatggtgggagggagagcatcaggataaaagagctaatgcatgtgaggcttaatacccaggtg

SEQ ID NO: 349 - DNA, 465 bp, Homo sapiens
cactacttagggcgaattggagctccccgcggtggcggccgaggtactccaagctctgagaccacctcttctgcaaagccttcctgattctgcaaagaacaggtaggcatttcatccttgggacctcacagcaattcaggacacatttgtgtcccagccctgcttggcttggctgtctccatgaatatacactttgcaacttctgcaccaggcatcataccaagcacacagtaggcactcctgtgttttttgaataagtgactatatcatcaccacatttcaaatgcggaatatatgagctactagaaaagacataagggtaggattttacatctttattgtatcctagatatacaagtctattactgccttttcccatggttctgtcaacataagcataaagaagggggggatttacctggttaggaaattgaataagcggcccgctctagactaggggggatc

SEQ ID NO: 350 - DNA, 268 bp, Homo sapiens
  misc_feature 12, 14: n = A,T,C or G
aggtacatggtntntgtaaggaaggggtccagtttcagtcttccagagcagaactttctaacttgtgtgtgggtgttgtgctctgggcaggttaacagatccctccaactcgaggagtctgggtggctggagctctgcactggtcacctttggggtgagtagcctggccccaaagtgacatacaaacatcattttctgtgtgtgtcacagcctggagaaaggtgagaagtcccagatgatatcagtctaagagttttgtacctgcccg

SEQ ID NO: 351 - DNA, 364 bp, Homo sapiens
  misc_feature 34, 139, 216, 345, 350, 351, 353: n = A,T,C or G
cgcctccccgcggtggcggccgcccgggcaggtnctagaagtataattctattatcatgatagtttatgactatctgtatagtcagattaaaggtaactttagaacaatggataggtttttcaaatgcagaatcaaggntgcaattttgtagcatataagctctcaaatctctagggggaaatgtagaaaaataaaaacttactgaagtaaggcantgtgcatcctacattattatgggcaacaaatcgataatggtattacaataaaatctggtgtaatcacattttccttcttcgtattgcacgtattaatctctgtctgatgggagatgagatgaatcacangatgnntnatgggaatgca

SEQ ID NO: 352 - DNA, 420 bp, Homo sapiens
  misc_feature 76, 280: n = A,T,C or G
tagggcgaattggagctccccgcggtggcggccgcccgggcaggtaccttgaattagagcctgaaatgggggaaantgcagccataaaagacattctcagacaattggagactttcctgagttgtgataatggagttatgaatatgtaggagaatgtctacatagattttatgaagatgcatgtggcaacatatctgcagcttattccaaaaaaggtccaagaaaaaaaggaaaggaaagaaaataggaaaaactcggtcgagccaccatgccaagcctnactgtttctaataaccaaattgttcctgtatttattgagtctctgtttcatgccagacactctgctatagtctgaatatgttatttctgttaattctcataacagttctgtgagcaagaacaattaatatcaccctttta

SEQ ID NO: 353 - DNA, 287 bp, Homo sapiens
  misc_feature 39, 47, 60, 68, 82, 122, 206: n = A,T,C or G
agggcgatttggagctccccgcggtggcggccgcccggncaggtacncggggattacggngagttttntaacagctactggnaatatttttgcaaatcacgtgaaagcattggagcaactgncttggaaaatgctctttaaacttcaaaccccagtatgttttggtagtagtggatattacacatatatgctgctcttttcagtgntcttttattgtgcgaaaacatttttaaaacatttgatttatcaataggatttatttttaataggattgttaataggattta

SEQ ID NO: 354 - DNA, 461 bp, Homo sapiens
  misc_feature 2, 427, 460: n = A,T,C or G
cnaattggagctccccgcggtggcggccgaggtacgcggggctatgttgtgtatatcttgcatccaaagccagagggaaccacaatgactagtaaaacggtggtctcaatgcccacttagcctctgcctctgaatttgaccatagtggcgttcagctgatagagcgggaagaagaaatatgcattttttatgaaaaaataaatatccaagagaagatgaaactaaatggagaaattgaaatacatctactggaagaaaagatccaattcctgaaaatgaagattgctgagaagcaaagacaaatttgtgtgacccagaaattactgccagccaaagaggtccctggatgccgactaagctgtgctccaattcaagttttaccagtggtacctgccccgggcggcccgctcgacccgggcaggtaccncgggagggaaaatgattgactatgcccatcttng

SEQ ID NO: 355 - DNA, 226 bp, Homo sapiens
  misc_feature 196: n = A,T,C or G
cgcggtggcggccgaggtactgagcatgtggcttcaacacaccagtgcctaagctattaaatgttacggttggcatctcactgtccttttatttctgaacaaacacttaatgatgcccactctatgccaggagcaactctattgccagagatgtttctgtggataatccacagtgccagatgttaaggattcccangcgagggacaggggccagataaatttccaa

SEQ ID NO: 356 - DNA, 411 bp, Homo sapiens
  misc_feature 107, 400: n = A,T,C or G
ttagggcgattggagctccccgcggtggcggccgcccgggcaggtacagatttagatgaagaagatcagaatgttgggtttctaggtttttatctttttagtagagncggggtttcaccatattggccagggccgaacttctaacctcaagtgatccacccgcctcagcctcccaaagtgttaggatcacaggcatgagccaccgtgcccactgagaatttaatacactttatgtaagttaattttttatgatagttatctagctttgccagaccaattttgttagtaaatttaaaacattaaaaaattttgaatcctcctaattctgtgtctctaatttagtaattttaagttttgatccttgtttcattctatcatttcttttatttaaaaaaattgncattggctttt

SEQ ID NO: 357 - DNA, 448 bp, Homo sapiens
  misc_feature 415, 417: n = A,T,C or G
tcgggcgatttagctccccgcggtggcggccgaggtacgcggggacagagagaaggttaagagcaacatgatgggaggcagctgcatggaacctgtcccactgaggaagtaaaacaggaatccaaaataataccgtttgctgggaattataaagaatttcattgagaaagtaaaaaagaaaaatctatgcaaaggaagtgattctgttgtttaatgccatcacctgtcattctgtctcttaccatggctggcttggctagtggcaccacgaacagatccctacagaccccaacaccaagaaaagtaggtttttcttctttctttgcagttctttggtatagattggatgttctaggggtggtgggaaggccattcgtgtgagaaaagattaccttagtattgaggaatggggtgnanggaatgacttcctttttcttaccctaatatg

SEQ ID NO: 358 - DNA, 621 bp, Homo sapiens
  misc_feature 585, 594: n = A,T,C or G
ccgcggtggcggcccgaggtacaacatacactgtgtgtgtgtgtttcaagaagggacagcccagataaagggaggttactgaagcaggctaagtttcagcaaaatgtaaccttcaccttagaaaccaggaaccagagtaattagattacaatctttccaacactatgggagagatttgatcaattaaagccaagatcagttacattatttggtttacctaagtaatggacccttaaatgcaatcaatacttctctaggctgtgagtcttcaagacctgagatgcattcaaaaaacacaaatggattttcaaagggcctcgggatgttcatcacaggctgaggaggaggattgcagagggtggggggcagaaggaaacagacaacagacctgagcttgctgtatgaagtcttcatttccttccctcactgatgtgctgctttcatgttcattttgtagttcatgtatgaattaaatttgttttaccaaagaaccttaatctagggatgagcagccatgtcactcaattcattttaaaattgcagcattaaaactcatttaataggataaagaatacgaataaaganttctattgngtttctgaaaatccacaaaacttacat

SEQ ID NO: 359 - DNA, 383 bp, Homo sapiens
ctatagggcgaattggagctccccgcggtggcggccgaggtacccctttcagactggcttctttcacttaggaatatgcatttaaggttcctccatgtcttttcatgtcttgatagctcactggataatatttctttcttttttctttttctttctttttttttttgaaatggactttgctccagcctgggcaacagagtgagaccctgtctcaaaaaaaaagaaaaaagaaactaaacgtctctgaatcatgggagtcagttctaccactagcactgagtaaacaccacaatggttatttcaccaccatgagcttcagtttatttgtctgtgaaatgggatcattggtaagagaaccccagactccctttcctagcgattgt

SEQ ID NO: 360 - DNA, 618 bp, Homo sapiens
  misc_feature 600, 601: n = A,T,C or G
ccgcggtggcggcccgcccgggcaggtacttttaacttagatacatttactttttatccactcagctgaaaaaagaggagaaaaataaaagtaggtcaggtcaatctgtttcctttcccatttaatgaattcatgcccaggagtgagtgagaaatgggaggactgaatctgctgttctccaagactagcttaggagtttctgacatcatgggcatcccagcaagccaacggtcacattagtcaccacgtatttttcatatcacgtgatccctctatcagtgtatcagcctttgctgtataatgaacaatcctaaacatcaatggcttaaaacaaaatcacttattagcacataatttggtaggttcatattttgggctggcccgcaggtaggttttgcagatttcacctggtcttgtcattttgctgcagtcggctggcattttgaccagggctggaggactatccatgtgtgacaggaagctggttggctggggtgcctagtttcttcttggttctcttccatgtgggcttgggctttggtcaaaatggtcttgggtttctctatgcaggaaagagaggacagccccaattaacaagtnngttttaacggtttggct

SEQ ID NO: 361 - DNA, 353 bp, Homo sapiens
  misc_feature 20, 66, 71, 72, 306, 320, 322, 324, 342: n = A,T,C or G
ggcgaatttagctccccgcngtggcggccgcccgggcaggtacaagtggggtatccctggggaggnttgcnnagatatcaaagcttacgttttgcaggcttcacagaacagatgatatagtagaatagcggtttccttctcatccacccccgcctggcttcctgtccataagtgaatagcatctgccttgatcttcctgaaatattttgtctttaatataacctctaagtatgctagccccaagaatggaaacaaggaattttcattaggaaaataacatttatgggagcctttcttttaagcagngtgtatatgtgtgntngngtgtgtgtgtgtgtgtgngagagagagag

SEQ ID NO: 362 - DNA, 451 bp, Homo sapiens
tagggcgaattggagctccccgcggtggcggccgcccgggcatggtacttctagaaatgccacagaaatcaccacattcgccccaaatcaccaaatctcttaattcagattatacatgtccagaatatccagttctcctagaaacaaaatgacacttttatgtttccctaagtttgaaatatttttgaagtattaaaataagcagagccatagtcccacactgtatttttctactgagaatacaacaccagaagctaatctcatgaaattagcccatgtgaagaacaggctgttaactactgttgtgatggtaagtccagaagccctgtgcaaaatgtgctcctggaaccagctgggccagcatcacttcctaaatcagaatccctgcaggtggggcccagccagctttgtcttaaagaagtcctccaggtgattctgatgccgtgcctga

SEQ ID NO: 363 - DNA, 724 bp, Homo sapiens
  misc_feature 28, 44, 45, 48, 49, 59, 63, 66, 107, 315, 602, 637, 649, 650: n = A,T,C or G
ccgcccggcaggacactgttgagctttntttacataaaaaggtnntgnnaattttcctntttnttnctatccaaagtgacttgaggaataatatgtaattaacttgnagagagaaagcagaaggagcagaattggttggagaaacaatcttgatgccaaagagatgggttaggtctagagaagtgcacttgaaaatagagataatagttgaggtttgtggataaataaaatcgctcaaggagagtaatacattggaaagaagggaggtgtagagcagaacctgtggattagcagtaagggagactgagaagtggntagctgaagaaggaccaagtataccaagaaaaaagtagggtagataaaaatcacaaattggaagaatgttttggggacctgattgtttgcagaagattttctgtattatttttttctacaccatatgtatgtataattagaaaattattttaaaatcgattgggtttcgtgtaattaacagtcctatattgttacctgggcaagttaaaatagtcctaattgtccctggagttggtaagaagaatggtttggggaaccacctccagcacagaccttggccaggatangggtttttggtttttgctttttttgaaggaccctngggccgctctannaactaaggggatccccccgggctgcaaggaattcgatatcaagccttatcgataccgccaccctcgaggggggg

SEQ ID NO: 364 - DNA, 343 bp, Homo sapiens
aggtaccttaccaccccatccccagagcattgcatggggtgtttggcacacagtaggtgctcaatgtagacgtgtgcactgtgacatgttagagccagacaggatctcatccagcccgttctctgcacccctccctcccctctccaagtagccctgctgtgggttcaagtaaagaggggctggggcgctggtctgattgtgtgggtgatttggggagatctcttcctcttccggaaccccaaaaggttgggacaaacacagcaacaagcccagctccctgaatttcagtgattcatttgtgcgataaaggagtgaatgataaagtgaaggacgattgtccccg

SEQ ID NO: 365 - DNA, 433 bp, Homo sapiens
  misc_feature 16: n = A,T,C or G
acttagggcgaattgnagctccccgcggtggcggccgaggtacagggacccacttttttttcttttacctcactagtcctggcacagtgcttagcaaacacaagtagctcaataaataaatacttattgatggacataaggaagagaactggacactgtgcaaagcctgtctcagtatgaaaagccaaaactcccagcagggcaactgatctcagtcacctttccagagttctccctggcccaagagagccaatgtgaatcccaggactccctgtgttacaggaataaagtagctctggcaaaaacaggcctttgcagcaaatgctctaagagatcagggaataagcaccatagggttccatctaggaaaaatattaattttccttgaggagcaaagtgcacatgaagggcttcctgtgcatgggcccagctt

SEQ ID NO: 366 - DNA, 324 bp, Homo sapiens
  misc_feature 231, 233, 234, 246, 252, 259, 265, 268, 285, 289, 290, 292,299, 302, 308, 309: n = A,T,C or G
ctatagggcgaattggagctccccgcggtggcggccgaggtaccatggacaataccatcagagtttccaaaaggctggttctcactcttctcctgccacatgctttccctcacacccctggtgtggaataaatgttaaggaaagctaagacacaattggggaggaggggcacaggcctttcactcaagccaaatccttgcaaaatggcctgggtgcccaccaaaggaattngnnagaagaaccctntttaancggggangcgggngcnttaaaaaaaagaattgntttnncnttccaanggngaaaannaaaaggggggggggc

SEQ ID NO: 367 - DNA, 454 bp, Homo sapiens
  misc_feature 54, 82: n = A,T,C or G
ctttttagggcgaattggagcttcccgcggtggcggccgaggtacttttaaatntaattttaataaattattcaagttattnatgccaatagcaaaaaattcaaatgaaacaaaaagcaagtttaagaagttaaagttccctttatcctttaccattcacatccagaattccccacaccaggcaataatcaaaattttggtagccacccttctatagatgggtagtattaacatcatttctatcctacaaatgataaaactaagtatcggccaggcacggtggctcacgcctgtaattccagcactttgggaggccaaggcagggtggatcacctgaggtcgggagttcgagaccagcctgaccaacatggagaaactccgtctctactaaaaatacaaaaaaattagccggattatggtgccacatgcctgtaagcccagctacttgggaggc

SEQ ID NO: 368 - DNA, 418 bp, Homo sapiens
ccgcggtggcggccgcccgggcaggtactactgacttacctgccatgggctttctcaagacaagtcctgcaggagaggcacactcacttctagcgtcaactattgaaccagccactgccttcactcctcatctctcagcagcagtggtcactggatccagtgctacatcagaagccagtcttctcactacgagtgaaagcaaagccattcattcttcaccacagaccccaactacacccacctctggagcaaactgggaaacttcagctactcctgagagccttttgggtagtcactgagacttcagacacaacacttacctcaaagattttggtcacagataccatcttgttttcaacctgtgtccacgccaccttctaaatttccaaggtacctcggccgctctagaaactaggtg

SEQ ID NO: 369 - DNA, 351 bp, Homo sapiens
ccgggcaggtactttttacctttagaaaaacttgtaggtaaaaaccaacaggtgcattcaaaccaatcacacgccaacttttaccacccaccaccgtcttaccttctgctgctgtgttggctcattattttgcgcggacccgaaatgaaggctgtctcgtcctttctgtttaattggagcgcctggagagcacaggtgagttgttaaaaacccggtgaatcctgcatggatttgcaaaccaaactacatggagaaatcagttaaattctcaggtttcagggttgcagctgccactgagaagtgtatttaggcaggttctggcaacagacttggtgttgggcttgagtggga

SEQ ID NO: 370 - DNA, 278 bp, Homo sapiens
  misc_feature 197, 232, 263, 264, 266: n = A,T,C or G
ctatagggcgaattggagctccccgcggtggcggccgaggtacccagcagaattctcacatgtgcttattttgaaattaaaccaatgcaaaagtttttaccctgaggtgttgctaattcatgaacctattctcttgacagtttttccctccaatataacctatatcttattaaatgtcttttcttcttctagattgntttcccaatagtagcttcaatttttagcttttgtntcagggctccaaattaggaaaaaccgctgannantagccaaatatt

SEQ ID NO: 371 - DNA, 361 bp, Homo sapiens
ccgggcaggtacgcgggggtagctgggactacaggtgcccgccgccatgcctggctaattttttatattttttagtagagacggtgtttcaccgtgttagtcaggatggtctcgatcttctgacatcgtgatccacccgcctcggcctcccaaagtgctaggattacaggcgtgagtcactgcactcagtcaggttttcaggtgctggttccatggctcttcctgagccgaaaataaggaaactccatagaccttgtccactggaactcgttcccatctaccctccactctatccaggtaagaaaccaaccatctcaggaaaggaaccaggcaggagtcagaggggaagatgggcactgaa

SEQ ID NO: 372 - DNA, 448 bp, Homo sapiens
  misc_feature 3, 51, 52, 352, 424, 431, 442: n = A,T,C or G
gcngtggcggccgaggtacgcggggttgtggggacccagagaatggttttnntttaatagtgcgattgttgttgttgtatgcagctcaatcagaaaaacaggaatcctaatcaggaaagggctagagggatgtttactcaaggggaaatctagatggttactgttctgtattgataagaatgtcacctgttaagtgaagtcagccttttaattcagaataagttcagagaaggagacacaaaaactcagatttaaaaaatttgaatggtaaggatgatattgattaggcaccctaagaagtagattgcttttcgactttgatcccaaaataaagcttggcattttcttttgnacctgcccgggcggcccgtctagaactagtgggatccccccggctgcaggaatttcgatatcaagcttatcngatcccncgaccctcgangggggg

SEQ ID NO: 373 - DNA, 528 bp, Homo sapiens
  misc_feature 3: n = A,T,C or G
ctnctatagggcgaattggagctccccgcggtggcggccgaggtacttagcatgagctcattgacggtgaaattggccatttatacataggcaaatctataaggaaattaacaatatttcacatttcttctaattaatggtctttttgtgaacatgcactgcctactaatgtcagcttatctatgatttgaatgtatagctttctaaagcgtagcaatttttttgcatatttatgtgtcctaagagagtccccccgcttcatttttccatctctcagcctcatgaaaggctacctctatctagaatttgtgacagaggaagctgagttttgtggttgattgtatcttcctggttacaatctagaactatcaagagttttgcaatgatagtaacagcaatgactaacccttgcttggaataataagcctttaatcattatcctcagtttctatctgggaaaactgagtgctattttcaaagcagtcttcctgctagtagtggcaagaatggagacataaatccatcctt

SEQ ID NO: 374 - DNA, 466 bp, Homo sapiens
ccgcggtggcggccgaggtacgtgtcaacatgtgacttaagatggttaatatatgtgtagaaacgatacgtatttcttttaggctgtgcctttaaaggaaatgagcaaacattcccctgccactttcccatttttgctggctagtaaataatgaaagagctggagcagatatcttggacccaaatatgggtggcagatgttgaggatgatagagccatcttactaattcttgcttgccaacatctggactgttatatgagagaaaaatgaaattttagatgcagtaagttgcaaaagcactattattttatgtaacctcaagaagaaaaatatacatacccagttaaactatgacataatgcttgaatgacattgattacaaaacacatttccatttcagaattgtttacaagtgaaaattttgtattttaaaacaatacatttcttgtttaagccactgcacctg

SEQ ID NO: 375 - DNA, 429 bp, Homo sapiens
ccgcggtggcggccgaggtacttttttttttttttttttttttgtttcagtgaaagaacatcagtgtatcagcacagcaaatattccaaatgccaggctggattccctccaattaccaggacctccaggcttctcctcctttcaagaactttctgaccctggatccagtctaaatgttggttataaactcacctgacatccacagggcccttccaaaatactgtcaagtaagtgattcttaaatttagttcaacaaacaccagttgttggaccttggttgcatccaggattagttttcacaacaatcccatgaggtaggtggggggctgggcactttgccccattttatagataaagatgcctctcggaggctcaaatggcatgtgcacagccagttagggggcagacctgagactgcattaaaatctg

SEQ ID NO: 376 - DNA, 396 bp, Homo sapiens
  misc_feature 2: n = A,T,C or G
tnctatagggcgaattggagctccccgcggtggcggccgcttattcaatttctaacaggtaaatccacattctttatgctatgttgacagaacatgggaaaaggcagtaatagacttgtatatctaggatacaataaagatgtaaaatctacccttatgtcttttctagtagctcatatattccgcatttgaaatgtggtgatgatatagtcacttattcaaaaaacacaggagtgcctactgtgtgcttggtatgatgcctggtgcagaagttgcaaagtgtatattcatggagacagccaagccaagcagtgggctgggacacaaatgtgtcctgaattgctgtggaggtcccaaaggatgaaatgcctacctgttctttggcagaatcaggga

SEQ ID NO: 377 - DNA, 440 bp, Homo sapiens
  misc_feature 7, 8, 14, 258: n = A,T,C or G
cgaattnnagctcnccgcggtggcggccgcccgggcaggtactactgacttacctgccatgggtttttttaagacaagtcctgcaggagaggcacactcacttctagcgtcaactattgaaccagccactgccttcactcctcatctctcagcagcagtggtcactggatccagtgctacatcagaagccagtcttctcactacgagtgaaagcaaagccattcattcttcaccacaggccccaactacacccacctntggagcaaactgggaaacttcagctactcctgagagccttttggtagtcactgagacttcagacacaacacttacctcaaagattttggtcacagataccatcttgttttcaactgtgtccacgccaccttctaaatttccaagtacctcggccgctctagaactaggtggatcccccgggc

SEQ ID NO: 378 - DNA, 358 bp, Homo sapiens
aggtacttagcagctgtgtgacctagagcacagtgctttgagtttttgagtcttagcttctgtgtctataaaatggggttcacacaactcaccttacagggctgtaagattagattacacagaaaatatattttttggctgtgggggctggaagtgttgctgattagcatttgaaatcccatcctgtgggtgagaaaaccccaccttatgacttggtgggaaacaaagccaacctcccactgatgaagctgaaagtagcagaaccttgcttctactgcctcccttgcagctagaggcaggcacaggactagcctgtcaattggatgcaaatgctccaggccttgaatcacaacctggt

SEQ ID NO: 379 - DNA, 633 bp, Homo sapiens
  misc_feature 519, 556, 575, 584, 621: n = A,T,C or G
gggcgaattggagctccccgcggtggccggccgcccggcaggtacagacatacaaatatggctccaccacttatttcactcatctttacatatttcttggagtctcagtttcttcattagtaaaattaagataattcacctcattgttagcacaaattagatgatgcatgttaaatctaacacagtgctagtcacaaaaaactcaataaatgtcagttatttttatgataagacaattctaagttaaacaaactggaggtataggtttgatcagcagaagagtagaacacacgagcatatgcaacaaaaaaattaaatagggtttaacttccaaaagatcaaatatatcattaattggaacaatcaagacctagtagctggggataggaagaaattagttacctcattccaagtaactaagtgataactagttctaagaaatcaaagaatttagaatgaaattttatttcactaacttattatttcactagaatttaaaatatactatttatgggatgnattcccaggggggggggaatacctggaactttattcnttatttaatacaggcaagncttcaatcncttagatatttattttaaataaaaattaagaaattgnccaattatggtt

SEQ ID NO: 380 - DNA, 398 bp, Homo sapiens
  misc_feature 30: n = A,T,C or G
aggtaccctgcccagagatttctccaaaangagctcttgtgaatgcaggcaagctaaagccacacaatgaagctgaaattcattcagcttagcttctcctgagagccttctttttgtgggggtaacattgcccttttgtttcacagcgaggtctgcgctaagacttgctacttagggagtcaaagctaataaaacataccgtctagaaatacagacataactggtagaactatacaagaaaaagaaagggcagaggaagaagaggaatgtgattgtgaaagaggtatgaaggggattacaaatccctgcttctcagagcgtggtccatggactagccagtgtggacatcacttttcaaatctattagaaaatgtgaaatcttacacgcaaacccaaga

SEQ ID NO: 381 - DNA, 469 bp, Homo sapiens
  misc_feature 42: n = A,T,C or G
cgcggtggcggccgaggtacttgattgttctgaaattccttntgcatgattagtttaagagtaaatgacgtattttaggattgtgtttaacaaaagtgagatgctaattcttgaaaattaggcctctctatggggactgcacgtaatcacattaccctagatcttgagttagcgagagaatattctgtcaggtgattcactgaccttgcctataacttgaaaccaatagcaaatccagatgtagtttcactggcctttgaagtccagggcaaaaagacaaagcgtgactccctgtctccccattgcatcctgattgtctccctgtccagggacagaataaatatcctcaagacattgactcttttcacagtgaagaagctgagggtgggagctttggcctcatctctataggttcatgctgcatctctggatctctacaggcagggaggaagggctttcctgctcccct

SEQ ID NO: 382 - DNA, 509 bp, Homo sapiens
  misc_feature 489: n = A,T,C or G
cgccgggcaggtacttttttttcttttccttctttttttttttttttgagacggaatcttgctctgtcacccaggctggagtgcagtggcgcaatctcggctcactgtaagctccacctcctgggttcacgccattctcctgctcagcctcttgagtagctgggactacaggtgcccaccaccacgcctggctacttttttgtatttttattagagacggggtttcactgtgttggccaaggatagtctcgatctcctgaccttgtgatctgcccgccttggcctcgtagctctttttgaccctcagggacagtcactgaattatgtcttgggagcccatgcttctgaggcaggcttagggagcaggagagcatacaggtgtagcagcctttccagctgatccccatgccctgctgcacctggagggctggagcaagctattctcatattggggaaaagggctgatggggacctcaagtcatgtggcangagaatctgaaagccagaag

SEQ ID NO: 383 - DNA, 466 bp, Homo sapiens
  misc_feature 113, 274, 295, 318, 321, 346, 414, 455, 456: n = A,T,C or G
cgcccgggcaggtacaaagtccctgaggcaaaagcatgcttgctgtgttctaggaaaagcaaggaagacagcatgtctatagcagtgggaggtggaaggataataaacagtangtgaggttagaggggaccaaatcatgtattttccatccagaggttcccaaccttggctgcacattagatttattctaaggagcttttaaaaaataccaatgactgggtcccagcctagtagtgattaaatcagaatctctggaggtagacttgagaatctnatgtttgcaagtttcctaggnaagtcaaggctgaggaagactgntgnaggccattgtaagagccaggcgttnatctcattcaacctttccctcagctcttctagagaccagccagcattctcttatggcacaaatacagnctttcaccctttcagaaagacacaggacaacaaattcaatnnattaattcac

SEQ ID NO: 384 - DNA, 416 bp, Homo sapiens
  misc_feature 1, 168: n = A,T,C or G
ncttagggcgaattggagctccccgcggtggcggccgaggtacgcgggacaaaaaaggaatcctaatgctacagaactgccactcctaccacctcctccaagcctacccaccattggagcagagactagacgtagaaaagcacgacggaaagagctagagatggagcngcatgaatgaggcttcagaggagaataatgaccagcaatcacaagaagttccagaaaaagtaactgtatccagtgatcatgaggaagtagacaatccagaagaaaaaccagaagaagagaaagaagaggttatagatgaccaggagaacctagctcatagcaggaggaccagggaagatagaaaggtagaagccatcatgcatgcttttgaaaacttagagaaaagaaagaagcggcggggatcagcc

SEQ ID NO: 385 - DNA, 292 bp, Homo sapiens
  misc_feature 23, 67, 163, 238, 273: n = A,T,C or G
ggcgaattggagctccccgcggnggcggccgcccgggcaggtactgaagattttgcaccatcatttntgtttttctcataaattctttatgaggctattagtctctagggtgctcttctgaaaccagaaggaaatttggctcacacacacacacaaaaaaagntgccatataaaggcaactgcaaaatatagtgggaagttggtggaggatggagtttcactgagaatgggacagcancatgatggaaagaacatgaacttgaatttcagttntaccacttactagaaagat

SEQ ID NO: 386 - DNA, 230 bp, Homo sapiens
  misc_feature 10, 66, 206: n = A,T,C or G
atagggcganttggagctccccgcggtggcggccgcccgggcaggtactaagggatcaagggactntttccaaggctgagcaggtttaaggaaaacatctaggtgaaacatctaagggctagctagcaataggagagccattatcactctttttttttttttttttttttatttttttttttttttttttttttttttttttcctncttttttttttttttttttttttt

SEQ ID NO: 387 - DNA, 363 bp, Homo sapiens
  misc_feature 274, 282, 288, 327: n = A,T,C or G
tagggcgaattggagctccccgcggtggcggccgcccgggcaaggtactttgttcttctctcccctacaagagggcaggaacctggtcttagtcatttgtgtatccaacagcatcaagcaggtatgtaaagagtgcttgttgaataaaacttaatataaaaatttaagttagctctacgcaacattgatgtaagagacagaagtgccatgtctctgttccaattagttttattacttaggcatgagggttcaggttccaagttcccaggtcggngttaatgncactgntgaatttaccttggagaaggcaccaaagctaaccacagnagagacattgtcactcacagcagtgttgtgattagc

SEQ ID NO: 388 - DNA, 402 bp, Homo sapiens
  misc_feature 3, 369, 381, 391: n = A,T,C or G
gtntgaagatttgatcttcatgatgatgttaatctgtgtttcctagtcttgagaaatggattttaggctgggttctagagagctgaagtgatagtgagctgtgctggtggaggtgaagatgtagagtgttctagaggtgactagcattttaagctaaggattgttggcaaatagaagatgaaagaataggaaataattccaagatcttcaactcttctgcattacaatatgtaaccaaatgatcttaattgtctagtcaaccaaagtttacaaaaaataaattctgccataactgtgactcaaatatatgcgaattgcataaaatatgggtaagaaagtgaatttgaggcttgaacacaggtaattaanaggatcttatangaattgcccnagacttgatgg

SEQ ID NO: 389 - DNA, 404 bp, Homo sapiens
  misc_feature 72, 135, 350: n = A,T,C or G
gcgaattggatctccccgcggtggcggccgaggtacatacttcagaggctatgttggcaggagtcactattnttaatccatgcacagtgttcagcccagtgcctggcacacagtgggtgctcaaacaacagcttntctccctgcatgttggtcattagggtcacaggctctgaagtcaggctcctagggtaatatcctgtccctatcactttcaattgtaggaagatgggcaaattacatacccccataagctttaattttcttactataaaacagagataataattgtatctaccttatgggttattgcaagcagcacatacaggtcacccaaataaagtatataagantttcttgtaagtccccaagtaagtgctcactcctatgatatttgaatgttcccc

SEQ ID NO: 390 - DNA, 433 bp, Homo sapiens
  misc_feature 389, 405, 408: n = A,T,C or G
ccgcggtggcggccgcccgggcaggtacgcgggtgatctaggtcctgggaatacagcagtgatcccaacagacaaagccttgtcctcacagagcttaccttctagaacgaacaaagaaacacataaacacacaaaatgtcagatggtgggatgtgctacggggaaataaagcaagcattccctaccctacacttccttgtaagaggtaagagtgggttgctagtttgtatcaggtgttcagggaaggccttactgacatttgacctaaaagaaaggtaagaatgtgacacctgatgataaatagggaaagagtatttcaggcaggagaatcacttgaacccagggggccggaagttgcagtgagccaagatcacaccgctgcactccancctggcaacagagtgnganttccatttttaaaaaaaaaaaaaaa

SEQ ID NO: 391 - DNA, 430 bp, Homo sapiens
  misc_feature 70: n = A,T,C or G
attggagctccccgcggtggcggccgcccgggccagggtccccagcaaggtggagggaagtcagcttttnagcaagggttggtttaagctattcaggatcacacagcaggttggctacacgccaggactgggtggggcccacagtgggtgaaactgtgaggaaatccacaagcacctctaggtgctcaggatcggctcctacagattctagtccaatctcattcatgacctcatttgcttttcagtttaacagtgcttggttttggtttactatttttcccatggaaacattttttaattatgtcttatcagttattctccatttatcccaaagggtcggttttgtgattttaaaattgacactatgtaagacctttatctttcatcatacgcaaaaatcaactcacaatgagtttaaagacttaaacat

SEQ ID NO: 392 - DNA, 330 bp, Homo sapiens
  misc_feature 66, 88, 100, 128, 147, 288, 303: n = A,T,C or G
taagatgaaatgcatgaagaacattctgaaaaaagtgaaattttctccagtgcttggctttatcgngagctgatcttgtgatttctgncactcaggctgnggatgcaagttaaaaagcatcagctgtnaccagtcacaggaggattnctgagttgggctggggtaggggagagagatttctgctttgggtccccatagtttctgtaactctggtttagtttccttgtcactggatcctgcattccttgagggcagccattgtattttatctttcagctttactaaagnatatgaaaagccggncatgctaaagtctacctgcccgggcgg

SEQ ID NO: 393 - DNA, 263 bp, Homo sapiens
  misc_feature 228, 239: n = A,T,C or G
ccgcggtggcggccgcccgggcaggtacgcggggagttgtgaggtggaaggtagactctttccagacctttgataaaggggctgctcaaaaaagccacgaccttgggcctctgctaaaaccatggctttaagtaaggagggagcagatatataaaaaaccttatccctctttctaatctcttatgtcctgtgagtgtcacccattgagtaaacccaagtggaagtcancaggaaagtanctgggatgatgcaagtctttacag

SEQ ID NO: 394 - DNA, 461 bp, Homo sapiens
  misc_feature 50, 56, 62, 91: n = A,T,C or G
gaatttagctccccgcggtggcggccgaggtacgcgtggggagaacgtcngaaagncctganttggctgttgtcctacaatcctttgtggnttcgaattggtctagagacaacttatggagaactcatatctttggaagataacagtgatgtcacagggttggctatgtttattctgaatcgcctactttggaatcctgatatagcagctgagtatagacaccccactgttcctcacctgtatagagatggtcatgaagaagctttgtccaagtttacattgaaaaagttattgttgttggtctgttttcttgattatgctaaaatttccagactcattgatcatgatccttgtctcttctgtaaagatgccgaattcaaggctagtaaagaaatccttttggctttttcacgagatttcctaagtggtgaaggtgacctttcccgtcaccttggcttatt

SEQ ID NO: 395 - DNA, 483 bp, Homo sapiens
  misc_feature 326: n = A,T,C or G
ccgcggtggcggccgaggtacatggccagctcctcatggtgattgttgccgtgaggaaatgtgaccacttttgctagatctagttttttcaaaagatgcccgcattttgaaatgtaatgtaaattatcctaatatttaactctagacaatttaagtaaaaaccaacaaccaaccaaatgaacctcaacacaggacgggtatggcccgtgggccaccagtctgagacagctaatctagaattgcagtcagcccggagtgacttgtattttcacggttctggagtgtaacacccacagttccactttagagttgaagaaacttgacgnggggggagttaataattgaggctaggcaatgggtaaacattaaaggtttcaattggcgggtgtgtctggattgtgaacgcccaaggtttttttccatctcactggctctaaggcaaaggagggagattaataatgggagaagataaaagggagaaat

SEQ ID NO: 396 - DNA, 438 bp, Homo sapiens
  misc_feature 53, 65, 68: n = A,T,C or G
ggcgaatttgagctccccgcggtggcggccgaggtactcttggcagacatcantaatccatcacnttntgccttcccactgatcacagatgtagcttcagggcattcgagttaccacttaagatggatatgagtgaccctcccttatctcactcttctcctttcacagaagcaggatctgaggcccagagagggaagctataataaactcccctaagtcaggtcccttctaagaggcagaggtaggtttagaactcaggcctcagaaacttccagaagccaagccatttgggctgtagttggtggacagtctatcagcgctctgcagatgtttcttctcagttagggaacttggaaaatgcagaaagaaagattctgtctctaagactctgtgtatgatcctactcggtaatctgcctgcttggagaaaaaatcattt

SEQ ID NO: 397 - DNA, 471 bp, Homo sapiens
  misc_feature 10, 19, 82, 83, 418, 460: n = A,T,C or G
tccccgcggnggcggccgnggtactaaagaaggtctcccaaattacctaaattttacaatagggcttagatttatgaagttnnatattttttcctccttataaaaagctctttttataaagaatatccatgtaatactaaaacggggaaatctcctaaataatatattttttaatattacttttttaaaaagctagggtgagcacctcacaatcaaaatttaatgtatttgtcatattgaaatgcagggttttttgaaggaaacatggtaggtaaacattttagttcccaactcctgatcgttaaaatgcaaaattgggcctggtgtggtggctcacgcctgtaatcccagcactttgggagaccaaggcgggtggatcacgaggtcaggagttcaagaccagcctggcctaaatggngaaatcccgtcttactaaaaatccaaaaattagcccggcctngggggcaaccc

SEQ ID NO: 398 - DNA, 309 bp, Homo sapiens
ctatagggcgaattggagctccccgcggtggcggccgcccgggcaggtactgagcaatttttagagtcctagttctcatggaaattattgttctgtaaagaaaataaatataccaactattacaaaaaataagttataacattacagaagcaatagaaactttaaggggcaattaaatttgtcaaataggtcaggaaacatatggcatatagcatcacagatttgaatttagccttataccctaaaatacacatgtatatttactatgctataaactacacaagcaagatataagtgtgtgtgttgtgg

SEQ ID NO: 399 - DNA, 340 bp, Homo sapiens
aggtactcatataagagtatactaataatgatcgctagggcaatagtggtagaaaaggaaagaaagaatagatttcagagatatttcattggcattaaaaattacataactggatgttttgagctggaaaagtgtttagagatcatctagcccattacgaaaaacaaaacattaatgtagtctttccagaaagcttttacctcaaaacttaagttgcatttcaacctcaacctttttcctctagctgagtctagcatatcccccactgctcctggccccaccaggctaatactactgccgtatcagggattttattttattacctcttacttaaatactc

SEQ ID NO: 400 - DNA, 347 bp, Homo sapiens
  misc_feature 2, 187: n = A,T,C or G
angtacccaatacttcataaggccctgagagtcaaataatacaattattgaaggccataagaagccagacaggttaaacacagtcttccttgtgatgctggtgaacagccatatacttactgatggatctcacctcccaactcagactcttatgggcagaggcatatttagtgctttcataggctgngatctactaaggatcacaatttttttcctataagtgttcatcatcatagattctgtgttacactgcccaaggattcattgctcctagctcttggaaatttgtttgacatcactcagctagcaacccctttgggaattattttggcagaagagagtcacct

SEQ ID NO: 401 - DNA, 361 bp, Homo sapiens
tctaacagtagaaggttgcccaggcagagctgtggtagcagttgtgaagaacgaaggagtaggagcttgttgagtgttgatttacaagtaagagaccattatttagcacaaaatataaattgtatgattagcttaagagatttgcctgggaaaactgtttattgagatggttaagtcataaaggaggagtttcatttttatttgatttgatttttgtagagacagggtcttgctgtgttgcccagactggatcaaattcctgggctcaagcagtcttcctgcctcagcctctaaagccaccaaggccagctttttaaaactttattttatatataaaaaaagagtttaaaggattacaaag

SEQ ID NO: 402 - DNA, 364 bp, Homo sapiens
aggtacctgaacaaatcccatcaaggacagattctcagtcttgaagaggcagcacagtaaaggggaaagatcatgagttttggggccaggttcccttggatattgtggggtccccacacttctggatgatgttggataactctttgagacttaggcttcacatctgtaaaatggaaatacttatttttcagagttgtcataaacactaaatgatttgacttatatcaacctaattcctactggctcattgaactcagctcagctgtcccctctgttcggatgccttccccagtggggcttagttaggtatccctgctggataccctgccaagctcttacacattccctctgccataacactcat

SEQ ID NO: 403 - DNA, 435 bp, Homo sapiens
  misc_feature 7, 66: n = A,T,C or G
cgaattngagctccccgcggtggcggccgaggtactttccaatttaggttttacctgattgacttntgttcctaagaatgatattcagccaagacttttgggaaaatccattatttgattccctgcacagcaaaagcccacctgatacaaacataagatgctttatggaatagataaatccaggttgggggagaaaggagaaaatggctttaaaatatcactttgccaactcaagatgagagttttaagatgagggcatcccttgtaactgtaagcacatagggaaggctcaataaatgcttaccaggtgaaattcttctcatgtaagctacgaaagcatctcttaaatatttttacaactgatttcctgttcaagctcatgcttgccagtgaagatacacttttctatctcatgctaacaacttaattttttat

SEQ ID NO: 404 - DNA, 417 bp, Homo sapiens
  misc_feature 1, 18, 38, 44, 48, 75: n = A,T,C or G
nggcggccgaggtactgnttgtctcaaattcttggatngctgtntttnatgtcacctagctgctgagagctttgngatcctaacaggtgatgactcagaccgacactgcattggtaggaattccacaaataggtgcctcaatgtgcctagattgaaatatcagcctttcccagactgacccgatgggttgacttcaggtgtggcgtaaacacctacattttaatgtaaacatttcagtgtaatcaatgagaactatcattctgctttaatcaccatgagttctgaaataacaaaggatttgtctgacattcattctaagaaattcattcttacctgactaagaaacttttttaacctggcacaataataagaaatgacctgtaagtacctgcccgggcggccgctctagaactaggg

SEQ ID NO: 405 - DNA, 377 bp, Homo sapiens
ccgcggtggcggccgaggtacatgtctgtggtcccagctactcgggaggctgaggcaggagaattgcttgaacccgggaggcggaggttgcagtgagctgagattgctccactgccttccaacctggacgatggaacgagactgcatctccaaaaaaaaaaaaaaaaaaaaaatcaaaccacatgaaatattttggactcttatactaattccaacactttgaagatctggggagaacaaactagattggtgctttccttggcttagtatgttctgtttttataggggagagcaaattattgttcaccagcactattaaaatagctacaacaggatgggccatggtggctcacacctgtaatcccaacactttggga

SEQ ID NO: 406 - DNA, 722 bp, Homo sapiens
  misc_feature 559, 595, 622, 635, 661: n = A,T,C or G
ccgcggtggcggccgcccgggcaggtacaaaaagactaagtcaaaaaatttcagctgtgcacagtggctcatgcttgtaatcccagcactttgggtggccaagggaggaagattgcctgaggccagcagttcgagaccagtataggcaacatagcaagagcccatctctaaaaaaacaaaaccaaaccaaattagccaggtgtggcggctggcacctgtgttccaactacttgggagactcatgtgacaggaagatcacttgagcccaggagttagaagctgcagtgagccgtgatcttgccactgcactccagtctgggcaacacggcaagatactgtgtcaaaaaaattttttttgataaaaaataaaagagttacatgacattcagagaccatccaaaaaacctgtgggttcccggctgggctcagtggctcatgcctgtggtcccagcactttgggaggccaaagtgggtggatcacttgaggccaggagtttgagaccagcctggacaacatggtgaaaccccgtctctactagaaatacagaaaattggccangcatggtggtggatgcctgtaatcgcaactactcangaagagggcgctggaaaaatcgcttgnactcatggtgccncaggtttgcaagggaacccaaaaatngcacccatttgtgcttccaacctgggccaccaagaaccaaaacttccttcccaaaaaaaaa

SEQ ID NO: 407 - DNA, 296 bp, Homo sapiens
  misc_feature 61: n = A,T,C or G
ccgcggtggcggccgcccgggcaggtactctgcatagatggcatgattacaggatggatanggagaaagtgtttaacattccaccccacatcatcgcgcaatctgaggcagcaccacaaaatctgatgccagtagccctggagtaatatcaggacaccaggaaatttgagttgattgagacactatggctccagagttctgctaacaaccacctgaaacaaacttagtaggagaagaccagccttccaaaaaattattattttaatggaatataaagaatgaactaggaatagaat

SEQ ID NO: 408 - DNA, 284 bp, Homo sapiens
  misc_feature 172: n = A,T,C or G
cgggatatggaaacttcctacatcactttgctgtgtgtgtttacacaggtggattttgctttacttgcactgacagcacacaggagggcagcacacaccccaacccacatcaactgccattaaagaaaagaaatttcagcccataatttcatgtccagcaaaattaggcatnataagtgaaggagaaataagatccttttcagacaagcaaatgctgagggaattcaatatcaccagatctaccttacaagagctcctgaaggaagcactaaatatggaaaaga

SEQ ID NO: 409 - DNA, 364 bp, Homo sapiens
ccgggcaggtaccattcttatctcagaatgctgtaaaccatcagtagaagcagtttagatttggactgcatggtaaaatgaaaagtaataaccctccaaccacaacctagtcagggtattaataattatatgtagcaagaaaacaaagaagaaaataatattgaaaaaatggagattccccaaccagtttcatatttgaaggatctgagttgtatttttattaaggaaattttttttctgaatactgtcttccaaaatgttaacattaaaatctgaatcagaggactctgaatggaaaagaagtttgatcactgacacctagggctctgaagcgtgtgtggccacatggaaaagtcgaaggatg

SEQ ID NO: 410 - DNA, 460 bp, Homo sapiens
  misc_feature 69, 94, 96, 114, 148, 184, 309, 400, 430: n = A,T,C or G
gggcgaattggagctccccgcgggggcggccgcccgggcaggtaccaagtgctttacatgaattatttnatttcattcatgaagttgattcctngntgattatattaagcactntttcttttggtttgtttacttatctagtatctgncttacttacttacaggagggcaaggagcatgtctgntttattctctgctatataccagtgccttatacctcaatcaatgtttgctgaattaataaattaatgaatctgtgaaagaaaggatgagccctctagaaatgatctttgactctcttctatcaagngctcttgattctttcacaagcagcatttctgggatgcattcatttctttatcattcctacagccataggcctgctcctgactgtcaccggncttaagtctggactgtggcagccacatcgnaattcttatgtgggtctagcttcttctcac

SEQ ID NO: 411 - DNA, 375 bp, Homo sapiens
  misc_feature 330: n = A,T,C or G
caccgcggtggcggccgaggtacctggaacatagtggtatttggcaaatatttgttgaatgaatgaaatgaatttactaagctctatttgccctatattcttctgtgtgatttatattttatagcccctttgtttcctaatagcaccctaattaccgtcattcctcagctgaggaaactgaggtttggtgaggtcaagtgacttcttcaagacacttttttttttagacggaatttcactcttcttgcccaggctagagtgcgatggcgcgatctcggctcactgcaacctccatctcccaggttcaagcgattctcccgcctcagcctnccaagtagctgggactacaggcatgcccatcacgcctggctaatt

SEQ ID NO: 412 - DNA, 349 bp, Homo sapiens
ccgggcaggtactagctgaggtcattaattccccttaccttcacgtttggccaaaaatgaagagaaaaatattttctgtttttttttttaaataccacagtgttcaggttcttgatatgagtaaatcacttttgacggagaaaaaaagaatcgttaatgttgactgtttccactagtcaaattacttgtttatcagactttagattataggaatctaaagaaaagagtaacatttcaaaataattttgataactgttcaagccttagtgagctcttctcaaacaagaaaagccacatccacttgaacacattgtaggaaaaattaggaagagttttttttatttattgt

SEQ ID NO: 413 - DNA, 309 bp, Homo sapiens
ccgggcaggtactgcaatgaattcagaaaagaatcaggcctgttactctccgaaggcctttctctttctttatcctctgaagtaaagctgaggactgctttttgggtgaactaacacttaggagttgagagtttcagaaaaagggcttgcaatgtcatgtcctattgccactgaagaagaaaaaggcacaccaacttcacactcagctactccaagttcagtttcaattaaacataaagagacagctgggccgggcacgttggctcacacctgtaatcccagcactttgggaggccgaggtgggcggat

SEQ ID NO: 414 - DNA, 549 bp, Homo sapiens
  misc_feature 1, 464, 467, 501: n = A,T,C or G
nagctccccgcggtggcggccgcccgggcaggtacctacttgaaggacttcataagcaaattacgatttaatttacaagaacactatgtcacacgtatacacacaggtttttatatttgttgtcttttccgtgattatctcttacagtgttgtatatttaatatattcattttattttaattttatgtaggttcctcattccttcatatgtgtattacatttccctggaactatcacgtattttatatacttagcaatggaaagctcctggtttcagttgtctgtgcagcaggcagggggaggagaagaaaatgggtcacactcctgaccctgcctgcatagccacaggttcccaaaagcagaggtccctgctgtgcaccttccctgggacaactttcttattgatgggtcttgtgtttaattaatgagagtttgttttaaggggtatgggcccaagggccagnttnccgaatccagtgcaagaagtgggaaataagcttncaaaacagtatcacctgagagagaactgagtccatccctgtagtacct

SEQ ID NO: 415 - DNA, 400 bp, Homo sapiens
cgactcctatagggcgaattggagctccccgcggtggcggccgaggtactggatatttttgcatataaacttgcagtaatagttcaaaaattaatagtttttgacattggcttttctgagaagagaaattgaaagtgtcacaaaataaaaaaagatgaaatgaagcatataattgtcaattttttcaattttctagccaacagagaatcgaaggattctgttcaaatattagtaaaaattgaaaataaacttgtgcttatattttgtttgcaacacactagttaatttaacctgtgactagttatctctaccgaaggtggatgtgtagtttctggttttaaaattcaagcaaactggaaaataatccatctaattatgctttctttcccaagaagttttt

SEQ ID NO: 416 - DNA, 359 bp, Homo sapiens
aggtactctagtttattattattttttttttcttttaaggcgtagcattactagaagtatagctttgggaaccttgtagcatcttaaagacttttaaagggttgacagctattggcaaattgactaatacagagaactaaactttggttcatgtattcaatgtctaaatgaaaaatgggaagataaaagagctaagaatgaaatgtgatttcatgtgcttctcctttttagctcttataatagattgaacagatttgatatttgtggtaaatacactcaggcagagtgacagaggcttggttgtcatttagcctttagggccttagtggagttaatgagaactgcaaatggtcatcaag

SEQ ID NO: 417 - DNA, 406 bp, Homo sapiens
ccgcggtggcggccgaggtacttcaatcctaagatgccactgaatggtctcttacagtcctttatggactattaagaaaaacagattgctagttcaattgtcacatgctatcagttgcaagtggtaaaactatacatctcagaatcagtaaagtgtggtatctggaataacagttacaggtaaattttttttaatgatttttatgatgaattacatacatagaattaaaagttcaaaaacctaccttaaaggggtaagatacgttacttttctatgctagtagggaattcaaatccttgaatgataaagccatttagagtcttattccaagggtcctgctgacagagcctggatgtcaccgatttccatgacataatcttgtaacctttgtaaaaggcttttcttt

SEQ ID NO: 418 - DNA, 450 bp, Homo sapiens
actcctatagggcgaattggagctccccgcggtggcggccgaggtacttgagttttttcccttacaacttatatagtctgtgagggattagataggtatgccttaacatgatgctaaagatgtggctagggttgcatatttcttatatgacttagttaactttgccctcttccaaggtcacagattttgtccctgaccccaatcaccatgcacatgtgcacatgcacgttcaacatgcctttggtaaaataaaagaggaccaggagaaagtgttcaaacttgccacttcctgacttctagaaaatagctgaaagcccatgccctgctgatggcatatcctcagattcaagatctaaaatgccgtcgtaacaaaacacagtttgttttgctagcttttctttttccaagtggtatctataaacatttgcgaatggcagctaaattgggttt

SEQ ID NO: 419 - DNA, 363 bp, Homo sapiens
aggtactgaattcaggcaagggcacgaaatccttaaagccaagcctatcgccttttctgacttctgctagcgagcaggcccacgacactgtaggcacaaggcagagatcccaatattttgataaataacgtagcagatgtcctaaagcttcccagagactctgttaactcttggaataaagttttcactttaaatcctgtatatatcaggaaattcaaacataatggtatatggatttctctttcatctgaaaaacaccaatgcaatagattaaatgctaccaccaagccagatgcagccccgcctccaacctgcaaggaacccattccctcgacatagacctgtgctggcgacatggctgac

SEQ ID NO: 420 - DNA, 421 bp, Homo sapiens
  misc_feature 7, 71: n = A,T,C or G
tagggcnaattggagctccccgcggtggcggccgaggtactagtcagtatgctgtagtattaatcagtagntcaagttcagtgaagtaaaggagaattgaattcttgaagttcacatttaggcaaaaatttggcgttttaggaggtgagtataagacatgatctttatagaaaacgctgatgataaaaacagcgctctctgttaggtgcctttatgcttgactccattgtcatcttttcttaagaaactaagctcaggactgggtgcaatggctcatgtctgtaatcccagcactttgggaggctgaggctataggatcagttgagctcaggagttcaagatcagcctgggcaacatagctagacctcgtctctactaaaaaacaaacaaacaaaaaaacaaaaaaaaacgtacctgcccg

SEQ ID NO: 421 - DNA, 449 bp, Homo sapiens
  misc_feature 82, 134, 386, 393, 402, 403, 404, 405, 406, 407, 410, 411,412, 415, 417, 438: n = A,T,C or G
cactacttagggcgaattggagctccccgcggtggcggccgcccgggcaaggtacttttttttttttttttttttttttggnatagatggggtcttgctatgctgtccaggctggtctcgaattcctggcaagngatccgcttgcctaggtccctcaaagtgctgggattacaggtgtgagctatcgctcccacactgacgatttttggtgggagtgaggggcagggatgcccttcatcagaagagactgagaagagggagaagagggacagctgtggacaaggccttataagaaggccttggatttgggaaccagagggtccctgtgctgggtcaggccttcaagtttacatcccaaaagatgtgggctgtaaaggaaaggtggnggggggnggtagtttnnnnnnaannnttntnccaggaaaaccacaatgccangggaaatactt

SEQ ID NO: 422 - DNA, 322 bp, Homo sapiens
ccgggcaggtacttcaccttagaagtggagcttaacgcatgatacagtgttacatgaaaaatgtaacttatgaaagattcttcggtgtttgttgctcgacgtgatttggaaaaaaatcagcttatttgatcattctttattcaactcagtatcctggcaaaataaactattccattttctccgtatattaatataacctggcatgccctacttcagtgcccataatgattctctttcctccataagagagatgtgttcctttcatcttaacctttttaaatgttgtttgttccatccacacctgaattaattcccgatttta

SEQ ID NO: 423 - DNA, 362 bp, Homo sapiens
ccgggcaggtacattgctacacggccgggggccattgagactgccatggaagacttgaaaggtcacgtagctgagacttctggagagaccattcaaggcttctggctcttgacaaagataggccactggaacaatgagaaggagagaattctactggtcacagacaagactctcttgatctgcaaatacgacttcatcatgctgagttgtgtgcagctgcagcggattcctctgagcgctgtctatcgcatctgcctgggcaagttcaccttccctgggatgtccctggacaagagacaaggagaaggccttaggatctactgggggagtccggaggagcagtctcttctgtcccgctggaa

SEQ ID NO: 424 - DNA, 331 bp, Homo sapiens
  misc_feature 141, 171, 243, 306: n = A,T,C or G
aggtacatagtagccatttatattatttttctagtttcccatctctataccagactacatttcctagaaaatcctggacctctttaccactcagcaatgattctccaaacatcgtatataatataggacacagtcccaagntatgaaatctgcttaccctttctggcgttntaaagaattcagagagctccgataatatcttctttcaagtattcatgttctacgaactgcagtaagacaatntacccaggaacccacaatataagcctccctaagtttttctccctcttttaatttttaaaatanatttttttactattattatcgtaga

SEQ ID NO: 425 - DNA, 332 bp, Homo sapiens
ccgcggtggcggccgcccgggcaggtaccattcttatctcagaatgctgtaaaccatcagtagaagcagtttagatttggactgcatggtaaaatgaaaagtaataaccctccaaccacaacctagtcagggtattaataattatatgtagcaagaaaacaaagaagaaaataatattgaaaaaatggagattccccaaccagtttcatatttgaaggatctgagttgtatttttattaaggaaattttttttctgaatactgtcttccaaaatgttaacattaaaatctgaatcagaggactctgaatggaaaagaagtttgatcactgac

SEQ ID NO: 426 - DNA, 266 bp, Homo sapiens
  misc_feature 22, 27, 29, 100, 109, 115, 237, 251: n = A,T,C or G
gcggcggccgcccgggccggtncaatntnctaaaagcagaggaaaatccttcccaagaaaataaacactcccaaacaactgtcccattctgttacctatntggattacntaattnttatgaaggtcaagactttcttactgacacgccaaaaaagacctctcatctcataagctgaactgcctttttctccactatccaaagttccaaaaaatctccaagtccctaaaaagcaatcnccactgctcactgnaatggtcatgaaaaa

SEQ ID NO: 427 - DNA, 347 bp, Homo sapiens
attggagcctccccgcggtggcggccgcccgggcaggtaccgtatttttaaattaaggagttttagttataatgaaattgatttgtagtctgttttgccgtaaacttgtttttctttaaattgttcttacagtgatatcttactatttttaactgtctggggtttctgatatggggatttcagcccctggttaatcagtcttgtccctacaagtccctgatgcagtatgtttatttgtgatgtttaaagaacatttcttggctgggcgctgcggcttgcgcctgtaatctcagcactttgggaggctgaggtgggtggatcacctgaggttgggagttcgagaccag

SEQ ID NO: 428 - DNA, 449 bp, Homo sapiens
aggtacgcgggatattagggctggttaagaaaaattacaaaccaggtgaagataatctttgactttttccacctggaatttaacactttttcttttctcggaacatacagcacctagaatccttaaacactgcttaggctgccccgagacccacatgtgacctccattagccctgagctccactttatgatgctatcttcttctttgcccatcaaaatggccctctggtgccacttcctatctggcctcctgacctcctttcagtgagttataataggtgataaaaggtattaaccagccaaaggagttttcctctggaaggtagcattatctcaaacctgtttctccaaacttatgtgccacagaatgatggtttgggaaatggaaatagatgggcaggaaaatgatttctgtggtcaaatgtttgcaaaatgctgtgtacctgcccg

SEQ ID NO: 429 - DNA, 445 bp, Homo sapiens
  misc_feature 1: n = A,T,C or G
ncgaggtctttaaaattgctgcactgagagtggaagaaagacagaagtaacagggctgtggataggggaaagggaatgtattgggaagagagacgcaccatggagtcacgtccccacaaatacacagcacatttccagaaagaaaggagcaggcactggccaaccaaaacgagtttgaggaaaaatctataaaaggttctgtgccacacaggaaagactgcctgacaaattagctaatgaggacaaggcatctgtccttggaggtctcctccagatgcaaattggcccaaatttgaggccaactgacctctatggaaaaagcaaaaccaaagtcagattcctgtcatccggagaacaactgtcaccttgatcacactccaaaatcaagataaaagcttggctttccaagggtcacaatgggcttacaataaatgagcccatgtag

SEQ ID NO: 430 - DNA, 403 bp, Homo sapiens
  misc_feature 50, 65, 66, 116: n = A,T,C or G
gggctaattggagctccccgcggtggcggccgaggtacgcgggggtggcnaaggcggctttagtnncatgcatgaagcgcaccccgactgccgaggaacgagagcgcgaagctaanaaactgaggcttcttgaagagcttgaagacactttggctcccttatctgacccccaaagatgatgaattctatcagcagtggcagctgaaatatcctaaactaattctccgagaagccagcagtgtatctgaggagctccataaagaggttcaagaagcctttctcacactgcacaagcatggctgcttatttcgggacctggttaggatccaaggcaaaagatctgctcactccggtatctcgcatcctcattggtaatccaggctgcacctacaagtacctgccc

SEQ ID NO: 431 - DNA, 339 bp, Homo sapiens
aggtacaatggtttcctggaacattctgagtaaagaaatgggaaaccaatacagcttacctagcttgttaccttctatgaacgctggcattaaaagtaaaaggcagccttgggaggaagaaatgcaaacacagagggagaacatagcttccccttgtctctctctgccacaaaagcctggccaaagtgactctactaggttgaagcagcctgcataataaaacgcttaaccttggctaagttaacctcctcagccattaaaaaaagggagggtgggggaagggctagcaaaatcaagcttacgggaaataaacctaatcaaagccgagtagtaacaaag

SEQ ID NO: 432 - DNA, 394 bp, Homo sapiens
ccgcggtggcggccgggcaggtacgtgatctttcggcaagttgattgagggaggtgggggaactgttttcctctggcaatggggagaagcttctttggctggcccagagggttcaagattctccagcttaactacacgaatacccccacaccaggtttcgtagtcccacccttactcgttagggctctgattgtgacatacgagacaggtcgaggctgcacatttgacctactttgaaaatttaccacatggaaaagtcatgatctgggtctgattttcagtgcagttggccctgaagctgcaggagacaagagtctctttttctatggatacagaatctttgcacttttagaatatgcctgaagccagcaattagctgctttgggttcatttt

SEQ ID NO: 433 - DNA, 365 bp, Homo sapiens
aggtacttgagttttttcccttacaacttatatagtctgtgagggattagataggtatgccttaacatgatgctaaagatgtggctagggttgcatatttcttatatgacttagttaactttgccctcttccaaggtcacagattttgtccctgaccccaatcaccatgcacatgtacacatgtacgttcaacatgcctttggtaaaataaaagaggaccaggagaaagtgttcaaacttgccacttcctgacttctagaaaatagctgaaagcccgtgccctgctgatggcatatcctcagattcaagatctaaaatgccgtcgtaacaaaacacagtttgttttgctagcttttctttttcca

SEQ ID NO: 434 - DNA, 275 bp, Homo sapiens
  misc_feature 1, 6, 35, 75, 77, 80: n = A,T,C or G
ntactnctatagggcgaattggagctccccgcggnggcggccgaggtactgggattataggcgtgagccaccgcntntgncctctaacgagatatttctaaaggttaggccttcagtcaagaattttaaagctggatcttagaggttatctaaactaacctccccatttcatagataaggaaagtgagtcccagaaaagcactggtttggacaagttcagaaagctaaacagtgactgtggatgtatgattctgtctcttaactcctaatccaaa

SEQ ID NO: 435 - DNA, 199 bp, Homo sapiens
  misc_feature 57, 184, 190: n = A,T,C or G
ccgggcaggtacaacctgaatgcttgtaattagatttcataggagggaaaaattttntttatcaacctctttgaatttatttgatttgtaacgctccacatttccacctagacttttttttgttttttaattttttgttttgaaacagaatcttcgctctgttgcccatgctggaccgccagtnggttgntatctcagc

SEQ ID NO: 436 - DNA, 449 bp, Homo sapiens
  misc_feature 22, 79, 80: n = A,T,C or G
ttttacgactcctatagggcgnattggagctccccgcggtggcggccgaggtaccacagttacttctaaaatgtgttgnnaaatgtagaaatctctatccccattgacttctcagttggaaattagttcatgacctagagactgagagcaccccggctgtgctttcagagcaggagtccttggatgtagctgtggaatgagcagcgttggaggatttgaaaaaatcctggacctgaaacgtaagctggcctgtgtttccctgatgtgccctatgccttttattgtgctgatttctactatcttaataaatagtaacattaaagttctttctgtgttcaaaaccttttccttgttttcctatcaaactgtttttgaaagcctatttcatctattttgagcaacactgataactgatgttcatcgaaggcagaaaggttggaggaactttg

SEQ ID NO: 437 - DNA, 311 bp, Homo sapiens
aggtacagctgctcagcagcaaagccgcaggttacttagacacctcttctcctctgaaagccagagccagttttccttgtccagcctgtcttagagagttgtaatggtcaaacgtgtgagaaggagctctgcaaatgtaacattttgcataagtataagatggtattatttagtattaatattgttagtaaattttagtaatattcagtatctaagatattcaacttagatatccaatggttattcattatctaagtccaatatcaggggtatggctctagatatcaatagatattggacttagataatga

SEQ ID NO: 438 - DNA, 538 bp, Homo sapiens
  misc_feature 26, 32, 61, 67, 498, 501: n = A,T,C or G
ggcggcccgcccggcaggtacataanatcacntatgagttaaatcttaatcacatgaattntacttnacatcactgaggtagaaggaacaatatttaatagacagctgcaataaatatttttgtgaagaattcttttgtcataaatcaaaatctgaccttagttctgaaaaagaaaaattatatcaaataatggtaaatacaatattggatcaaaatttttttgtctttttacgttacaaaatttatgttacttatagcaagtatatttattctctaatatgagattttttaaatgtagagttcacttgaagtaagacaaactaatattcttaattttattatgatgtagattcttgatacatgcataaacatgagaaatgtcatacatttattaaaccacagtgtgcttggaacacactagacattgggatgaagacatttaaaggaagattcctggcttcactagacttacaatctagttgaggaaaccagactgntgnatacaaactgacattaatcataattttaacttgggtc

SEQ ID NO: 439 - DNA, 445 bp, Homo sapiens
  misc_feature 1: n = A,T,C or G
nctatagggcgaattggagctccccgcggtggcggccgaggtacgcgggggggctgaggtgggtggatcatctgaggccaggagttcgagaccggcctggccaacgtggcggaactgcatctctactaaaaatacaaaaattatctgggtgtggtggtgcacacctgtgatcccagctactcgggtggctgaggcaagagaatcgcttgaacccaggaggcagaggtttcagtgagccgagatcgtgccactgcactccagcctgggcgacagagcgagactcccatctcaaaacaaaacaaaggtgggtgtcttgagtgccttttgagtataggccttcagactttctgaggattgggaaagcatttttttttaaccttaaaatatttattgaataaagaatggcaaagatcagaaaaataagctctggttaggatttgatgtg

SEQ ID NO: 440 - DNA, 684 bp, Homo sapiens
  misc_feature 447, 502, 586, 647, 673: n = A,T,C or G
ggcgaattggagctccccgcggtggcggccgaggtaccaggtaatgaggaaggtgatcccggcccccattccctgatgggaacctagacttcactaagggattcagatggaggaggagatgttcaagaagccaggaaggatcaacaacagggtgccctcaattcactggggccacgttagtggcgattctaaatgtcagaccaactgcagtagcgctgtcatggccactcatctctccgggatttcttcccttccaagccagctaggttcaaccttctcatttacttttaatacaccacctcttatatgatctttcttctctacttagaaccctcccataagccgaacccaatctgccttttcaccatcttcccatcttcctactgcctccatagttattcttcgggatctagctaagtaaactctaagttattcttccatgttttnctagcaccctaacattatcagtttccccctccacccccattttcttccacatacngaggctcaataaataatagttaaaatgaggctgggtgtggtggcacatgtctgtaatcctggcactttgggaggcttgaggcangaggatcgcttgagcccaggaagttaagaaccagcctaggcaatatagtgagacccatatntttcaggaaaaccaaaaggaaaaacnaccaccaaaaa

SEQ ID NO: 441 - DNA, 599 bp, Homo sapiens
  misc_feature 6, 20, 76, 87, 90: n = A,T,C or G
ggcgcnttggagctcccctnggtggcggccgcccggcaggtacctggaaagatgaacaggattgcagcagataganacaggtagaanttnagagattccaagtggaaggataaaggagaggggagagaagcaaagagtgcaacttccaagaagattttctggtttctggcactgtctagatagcttgggaggaaacaggcagagagggttttggagaaacagagctgcaaagccaagttagatgttaggtgagttgaaaaaataacttagggcaaaagcagagggagggaggtatttactctgaacagagatgacagggtggggaggacagattgttttgagtaggcaaaggccaggagcatgaagcaagctaggaattgggaggctggcctagaagcatgggccacctgggaaagggacaaaagttaaagtatgacaaaccctttgtgttcaccaaatttcttttctggagtccttaaccatttgatcttactggaatagaagttatactagaactcactgcaaagtgggagtaaggcttacagagggaaaacagcagagggcctaatgcaagattaaccttctcagggacccctgca

SEQ ID NO: 442 - DNA, 374 bp, Homo sapiens
  misc_feature 1, 32, 47, 74, 248, 344, 345, 362: n = A,T,C or G
nggcggccgcccgggcagttacatttgttggnggcgcgacatttttntataaccacttagagtggacatgcagntagagaaaagtcaatgagctggaaccaagctgggaattccaacatgtagaagttaaacacaagaggaggagccagcaaaggaaacagaaacagagcttccagcaggtggggggcatttggaagaaaacgatgccatagaagccaagatgaaatagacatcaaggagaaggaagnagtcaattgttttgaatgctatgaagaaagataagaataggtaaatagtccttatatttgatgacagaggtcactagtgatcttgatgaggggttnnaatagaatggtgggatnatatacctccct

SEQ ID NO: 443 - DNA, 353 bp, Homo sapiens
ccgggcaggtacctggactcctaagcctcagggatttactgaaataccattctattttataataatccttaaccaagaattttaaggatcttaaatttttctgtggttctattgttatctgatatatagatgatctgctgccatatcctaaagagcaggtgaggccgggtgtagtggctcacgcctgtaatcccagcactttgggaggcagacgaaggtggatcacctaaggtcaggagtttgagaccagcctggccaacatggtgaaaccccatctctactaaaaatacaaaaattagctgggtgtggtggtgggcacctgtaatcccagctactaggaaggatgaggcagg

SEQ ID NO: 444 - DNA, 473 bp, Homo sapiens
  misc_feature 441, 450, 452: n = A,T,C or G
ccgcggtggcggccgaggtacttagcccctgacagtcacattcatttgtctgttactctctgtctctctccactggatgcaagctctacgagaccatcctttctgttgtccctgcactagtcacaaggcctggaccagtgtctggcatataataggcgcttaataaaccacagataaatggacggataccggaaactacaacaatggaaaatgcacactgcagaggaataaaaaattgttctggaaggttagcagtaggtatcattatgagctattttgaggtagagggtcaagaggagaatgaaggaaggttagtatgaaattcagaagaaagatgactaagacagggtccgctgtgctttatatgcaagtcacttgtcaatttgaaagcaggtggtgtcaccatgtagggagaagctttacaagacagacatgaccttnaagatgcanangacatgcaaaatcagcctggg

SEQ ID NO: 445 - DNA, 486 bp, Homo sapiens
  misc_feature 71, 73, 74, 75, 342, 383, 386, 389, 426, 433, 434, 441, 447,457, 465, 470, 474, 475, 476: n = A,T,C or G
acttagggcgaattggagctccccgcggtggcggccgcccgggcaggtacgcggggaggaagaaaattgcntnnntcaagaaaataaccaagaatgtcagtcacaggagagctgctgtgtatagatgtctggttttttaaggagtgatgataatttaatcagcggtgcaaaggtgcgatctaaatactgcataaacctaatcatcttattctcaacctttctcaatactccacccacttaaagaggtgggtgtggccttcacagattcttataaaaggacatagaagagacaagctcagttttcttcaaaggagaaggagccgcacttagaggaagcttgtntttttgggtggaccctgaaacttcagtacctttgggccggnttntanaactaggtgggaatccccccggggccttgcagggaanttccatnnttcaaancctttntttcgaatancccgtccnaaccnttcnnngggggggggg

SEQ ID NO: 446 - DNA, 433 bp, Homo sapiens
  misc_feature 6: n = A,T,C or G
tcactncttagggcgaattggagctccccgcggtggcggccgaggtactatatgctagaaacttggctgaatgatttgacattatcctatttaatgttcatgacaatccaataacgtaaccactcatatctcccttttgtgcaaataacaaactgaggcccagagaaatcaaatatgttgtcaaaatctacatcgttgaagagatgggtttcaaatccaggtcggcttggcccttgccacgacttcataatgaaattccatgggtgagtgttaccagtttctggtccatccttgcttatttcaagggtctcatcatcccatccactgtatcactttttttgttacaggctttactcttttctaccatggaaaagactaatgatatttttttctccataagcttgggaaatattatcaatcaccataaaaattc

SEQ ID NO: 447 - DNA, 341 bp, Homo sapiens
  misc_feature 2: n = A,T,C or G
tnacaactacaaacttcatctctatatgctttaaacagataaaagagaataatgcagtgataaggtagtaaatatggccagatagtttgaggtataaattcctctgtgttgcttgctttaaaagaaacaaaatacctgttacagatttcctctgtatataaaaatattacaagtcttttcttttgtggctctacctaaacaaagccaccatgtccattttgttatttcacttgttttgattttatgatagtcagtttatgatcaatggctatatgctagttcttcaccattttacgctgaagaattaaatttaatccattaactaatatttaaaaaagcaa

SEQ ID NO: 448 - DNA, 328 bp, Homo sapiens
  misc_feature 143, 157, 205, 244, 317: n = A,T,C or G
ccgggcaggtacaacaatatcttattaaaaatagtagcagcatatgatgatttgaatttttaaaaaactaataaaaaagttctgtaatatacagaatacccatatcacaaggcaggcaggggaaggagtaaagaataaaatanatcaaacgatccanaagatgaaacaatatacattaatctaagttaatataaaaatagtatanaactcagccaggcacgctggctcacacctgtaatcccancactttggaaggccgaggtgggcggatcacctgagctcaggagtttgagaccagcctgtctctactaacaatntaaaaattagc

SEQ ID NO: 449 - DNA, 628 bp, Homo sapiens
  misc_feature 38, 50, 100, 112, 168, 253, 260, 283, 293, 299, 300, 303,326, 333, 360, 387, 389, 428, 458, 519, 540, 545, 558, 574,587, 602, 613, 614, 618: n = A,T,C or G
attggagctccccgcggtggcgcccgaggtccttaggnctgagaattaantagagggtgagaaaaaggaccggtctttatggccagtaaaagtgaaaagngaaagatggtanttggggaaagacagatgggagaaaaggttggctggttgttaataaaacagtagagntgagcatgtattataaatgctggtggggaagaaacccttgtggccaaggagggtggtagtgttggagaaagaaagagaggatatngtataangttaaagagggaactggaagcangtgggatccnaggacnntangaaggggaagagccttgggccanaggtganacatcttcaggaagggaaggaactganagaagggaaaggtgtgccaatgtggcnangaggagttttgagttaagttccatctgatatccctctantttctctgtaaatcattctgaatgaaagtnttgagaccaaagaagatcaaaggctttgagaaaaaaaagaaaattttgaaaaaaaaaagtnccctgccccgggccgggccgntcttngaacttgttggantccccccgggcttgcngggaattccgatntccaagccttattcngatccccttcnncctngagggggggg

SEQ ID NO: 450 - DNA, 192 bp, Homo sapiens
ttgagctccccgcggtggcggccgaggtacttatgactcactaatccagccacatgaaagtgatcattcatctgaataaataaataaacagttttcattattttctccatgaaaaggtctgaattaattgatgcggatttcctgccagcttacttttatctttaaggatttaaggaataaactcaaattcag

SEQ ID NO: 451 - DNA, 527 bp, Homo sapiens
  misc_feature 466, 486: n = A,T,C or G
tatagggcgaattggagctccccgcggtggcggcccgcccgggcaggtacctgaacaaaatcccatcaaggacagattctcagtcttgaagaggcagcacggtaaaggggaaagatcatgagttttggggccaggttcccttggatattgtggggtccccacacttctggatgatgttggataactctttgagactaggcttcacatctgtaaaatggaaatacttatttttcagagttgtcataaacactaaatgatttgacttatatcaacctaattcctactggctcattgaactcagctcagctgtcccctctgttcggatgccttccccagtggggcttagttaggtatccctgctggataccctgccaagctcttacacattccctctgccataacactcattctttgttactgaattataatttcatgttcatttgtttatctctcatactaaggctgngagttcccttgatgacaganaaatgtcttggttggttttggaattcccagtgcccaactta

SEQ ID NO: 452 - DNA, 440 bp, Homo sapiens
ccgcggtggcggccgaggtacttttttttttttttttttttgtagagacgaggtctcgctatcttgcccaggctggtcttgaactcctgggctcaagtgatcctcccaccttggccttccaaagtgctggaattacaggcaagagccagtgcacctggcctttgaattttcttaccctcaataagtttctttcatgctgctaaagtgtatcactctctgtgaattgtctcagttatttttgagtcttgtagggaacctgaggaactcctgaaatgcctcacacttaatacccaatccatttcttccttttcctctttctcttttttttcttatcaccccgcctccattttgctgcaggacatccttaaagttatggactggggcaaagacaaaacacaaaaacgaaattcctgcccgggcggccgctctagaactaggtg

SEQ ID NO: 453 - DNA, 328 bp, Homo sapiens
ccgggcaggtacgcggggattctcaatcctacccatgatgcagacagattgcctcatttcagctcaataaaacatcaccaaattcccttaggcagaaaaagggtggggagtgccctttcttgaaggaatcccttaagtgcacgtctctcgttttcttttcacatcaatgcagagtccctctgtgaatttacaacacccaacacccatgagttcagtccttaagaaggaaaattgagcaagtatttaattggttggacattgcataaaagaggtccatatccaggctaactctagaaattttattctcaaacttagttggcctcttttt

SEQ ID NO: 454 - DNA, 458 bp, Homo sapiens
  misc_feature 6, 51, 65: n = A,T,C or G
gggcgnattggagctccccgcggtggcggccgcccgggcaggtacaaaatnaatttgctcatttngttatgagtatggttattgattagggggctaagcatttagttactgcatggggcagccaataataaaatcacagccctgtgtatttacctccacagtgtgtgctgataagtgcaaaaggtttgtgcaaattcttttgaagttatattgtaaccatggtatatgtattgaaaacttggccattttaccccattcctatgaatgaaaactatttggtgaatcagaggatagtctgaattgggatatgaaggccagtataagtgtcagttagcaaagtcagctctagtttagtttttttttttttcttttaaggcgtagcattactagaagtatagctttgggaaccttgtagcatcttaaagacttttaaaggggtttgacagctattggcaaat

SEQ ID NO: 455 - DNA, 457 bp, Homo sapiens
  misc_feature 10, 37, 69: n = A,T,C or G
ggcgaattgnagctccccgcggtggcggccgcccggncaggtacaggcacgtgccaccatgcctggttnatttttgtatttttttggtagagatggggtttcaccatgttggccaggctggtctcattaaactccgacctcaggtgatccacctgccttggcctcccaaagtcctgggattataggcgtgagccaccacatgcggcaaccccacagttttaacagattgtttatactttgatttggttttgcagatgatatgcatactaaggctttaaaaaattatctaaatgtttaataattttttgtttttgtgattgggaattatttacttctgggagtcatgatcctaaagaaacagtaaattggctgtttagagtgggaaaaaaaaacttcaggtaactttgttacttaaatcctgtctcttaattcataggttaagaccttaattttgcct

SEQ ID NO: 456 - DNA, 479 bp, Homo sapiens
actacttagggcgaattggagctccccgcggtggcggccgaggtaccatttcaaattcggtttgttataaggaaagggtggggaaacctttggaagaagagagactaatagccaggagacttaactttttcattgtgttctgtcactttacatcctaaggctgtgctctcacctcacttttctttactcagttgggcagattacctttttggttttcccctgtttggttctcagttactttgatttcatattccttattgttcattcctgctgccactctctctggttaaaccaaattcccttaagggggagatggggaaggaaagagggaaatatcccataaagcaaaatagcttttgctgtcttggagaaattttattttgatttatttatttttttgagatggaatcttactctgttgcccaggtttggagtgcagtggcgaatctcagctcgctgcatcctccgcctcctgggct

SEQ ID NO: 457 - DNA, 449 bp, Homo sapiens
  misc_feature 246, 410, 441: n = A,T,C or G
ccgcggtggcggccgcccgggcaggtaccttttttttttttttttttttaagagacagggccttgctctgtcaaccaggctggaatgtagtggcacgattattgctcaccacagcctccaactcctgggctcaagtgatcctcccaccttagcctcctgtgtaagaatccaaccctatttataatactcttttgtcagacattcagatgatttctattttttaatattataagcagtgctatgtanaataatcttacagctgaacatttgcaaacaagtatgatatttccataggaattattggaagtaggttgctttgttaaagggtattccaaacatcaaggcttttaatacatactgccaaacttatccagaaaaagtttaccaaggcattgcagctgcaaaaattntatgagagcaccctgggaaacctatattttntttagttt

SEQ ID NO: 458 - DNA, 443 bp, Homo sapiens
  misc_feature 380: n = A,T,C or G
actacttagggcgaattggagctccccgcggtggcggccgcccgggcaggtactgtcacccatggccctgatatggaaacagatggcatattcaagctggataatttgaagaggattaaatgaaacaagtattcacaaataggtgggcagagtttagaaaatcaacaagagatattgtagtatcctgggctagcaacagagaggatgggaatattgccccatagacctgaagtgcaaagagaaggagtgctacctcaaaaagagagctttgtggagaaggctgcctgatagcagctgtagtcccaggtagagggtgagccaccacgcccggcggttattacatagttttaaaagtgactcctcttaagggaaatttttanttaagagaaaaatatcctagaactatgattaggggtcaaaacagtatctatgttcttttaggt

SEQ ID NO: 459 - DNA, 302 bp, Homo sapiens
  misc_feature 49: n = A,T,C or G
cggcggccggccgggcaggttcatgacctgcagaacttagccaagagtntgggtctccgggccaacctgagggcagacaagttgttaaaagccttgaaaggctacattaaacatgaggcaagaaaaggaaatgagaatcaggatgaaagtcaaacttctgcatcctcttgtgatgagactgagatacagatcagcaaccaggaagaagctgagagacagccacttggccatgtcaccaaaacaaggagaaggtgcaagactgtccgtgtggaccctgactcacagaatcatgaaaagcagga

SEQ ID NO: 460 - DNA, 215 bp, Homo sapiens
  misc_feature 3, 61, 67, 68: n = A,T,C or G
cgnattgtagctccccgcggtggcggccgcccgggcaggtacgtccacggtcagccttgcngtaatnnttgtgtgcttagaggaacccagggtaacgatggggcaaactgaaagtaaatatgcctcttatctcagctttattaaaattcttttaagaagagggggagttagagcttctacagaaaatctaattacgctatttcaaacaatagaac

SEQ ID NO: 461 - DNA, 405 bp, Homo sapiens
  misc_feature 22: n = A,T,C or G
gcccgggcaggtacagactttnttttcagaaagttccatgtatatgtttcttaattcccataaaaagtttcatctttgcttttccatgttttctatttgcacttcctagaaggggaattctaaggttttatttctatcctacaggaatgtaaaaaacttgatttcatataatctactggcaagtgtagttcctgagtggggagacgggctacaaaggattctgaagtagattggcttttatttcgtggctggtgatccaaactgagtattcctcataagagtcttaaggggatgggtggtgtttaccaaccagttgtcttggcagttaatggaggggggggccatcagggtgacccaggctggggttagccctaagcttcttgggatccaggcattcaaaattgg

SEQ ID NO: 462 - DNA, 464 bp, Homo sapiens
ccgcggtggcggccgaggtacttttttttttttttttttttttgccgactaagatcccagaagtatctgagaacttgggctgcgcagggaatgctggtgtgggagaagcaagccaactgagctgagctgcggccctgtttgtccttagctctccaaaacttgctgtctatgtcacttggaaggaatctgattcttttctgcaaggcactgacaataccttacaacagagctgggagataaaatgcagagcttgtgaaagtcatcagaaagttgaacacagatggtccccggcttaaaacggttcaacttgatgatttttcgacttgatgatggtgtgaacacgatacacattcagtagaaactgtatcgataagggctgctttattcaccagaagtgaaaaacacgatggttgtgtgagtatcttgaagtacctgcccgggcggccgtctagaactagggggat

SEQ ID NO: 463 - DNA, 479 bp, Homo sapiens
ccgcggtggcggccgcgcgggcaggtactgagacctttttcataacttacaggtgccttggcataacttacaggtgccttgatttgctctgttttttcttacatcagtaacttttaagtgaattctgctcagggatgtgcctggagaaagcaagtttgatgaggaagctggtggagctggtggtttgaaggctgagtgaaagtaggggagagcccatggcctgatctatgtaagtggtaagtcagggagggtagctgcggtcagcatgtcccagagtcaccttcatcctgggatgcgccctctgattctcagagtgaacattaaaaatggcagacaaaaccaggcacggtggcttacgcctgtaatcctagcactttgggaggccgaggtgggtggatcacctgaggtcaggagttcaagaccagcctggccaacatggtgaaaccctgtctctactaaaaatacaaaaattagccagg

SEQ ID NO: 464 - DNA, 462 bp, Homo sapiens
  misc_feature 10: n = A,T,C or G
acttagggcnattggagctccccgcggtggcggccgaggtacaattatttaactgtgtcaggaaattaactttattacaatactattgcccaatctagcaatttaatacaatattattgcttagttgctcaatctagagacgatattcaaatttcatcagtaacacttttttccaatgcagaacgcagcccgcagtcatgcgttgcagttacagttggagcgtgtcccttcgtctcttttaatctgaactcattcctcagtcattctttgtctttcatttttaaagagtgctgatcagttgttaactagaatgtcactccatttgtgtttgcctgatatttcctccttgttaaattcaggttataggttctgtcaaggatagcacagcagcaatggctgattccagggctggaccaggcaaaagtggtacctgcccgggcggcccgctctagaactaaggtg

SEQ ID NO: 465 - DNA, 271 bp, Homo sapiens
  misc_feature 6, 64, 65: n = A,T,C or G
gaattntagctccccgcggtggcggccgaggtacctggatttgactgatgtggtccccatcatnntctgatagagttctttttgctgggatcctggaagatgatcttggtttatacatgaagaatctggggtccagtgaaagtgacttggtaaaacccacagatctgtgccgaaagccttggtcagctgccccttggcctgatgctcttttctctgcatcagtgcattgcttcacctcttcttcaaggactctgattaactggaagtggac

SEQ ID NO: 466 - DNA, 618 bp, Homo sapiens
  misc_feature 567, 608: n = A,T,C or G
ttagggcgaattggagctccccgcggtggcggccgccgggcaggtaccctaatgttttatataattatttactaaaccattccaggtgacttaattacaattgttgttttacatacatatatatacctatctctttatgtatctgtgaatacttactctattacagttcctagaaaacaaaatgccttaagcattgcatagttacaactcacttggcctgcttacttccttttaaaggagggaatgctttagggagggggaagatgcaggatggtttttaacccctatgtgctattcattcattggacatcttataatgtaattgtgttaaaactgcctggaaattcctaacagttcttagctttttatttgaagaaattttggagtgatgaaaatatagtttatttagggaaattcaaaagaaagggttaacatgaatccagcaaaacaaccttatccatagtgggtaaaaaaaccaaatctgctctgcaacctgaccctacttcaagagttttctcctagttccttttccctactggtactttcccagtccttgctcctaccctncttgtctaatggaccgtgattgaattaccatttaagaatgncctttttctt

SEQ ID NO: 467 - DNA, 343 bp, Homo sapiens; identical to SEQ ID NO: 232

SEQ ID NO: 468 - DNA, 391 bp, Homo sapiens
  misc_feature 1, 28, 49, 57, 263, 274, 376: n = A,T,C or G
nggcggccgaggtaccacttcagatctnttttcactggatagactccgnaatttttngctgtagctcgtatccatccctagtcactttgccaggatgaatgctgttgggcagcagtagcctaagttacggaaggggagcagattgaatggggttttgagacatcttctctgataccttagctttccttctgctctggtcgctatccactcagtcgtgtgctagaaatgtttaacaaccaggatctctggggtgggggtggggnggggagccctnaatttgtagcattttgctgcaaatataaattataaataaaattctaatataaattagaattttatatcaaattctttgatataaattagttactcctcctgnggcccgattttcaaa

SEQ ID NO: 469 - DNA, 595 bp, Homo sapiens
gggcgaattggagctccccgcggtggcggccgccggcaggtactatgcacttcccatgctcctagggttaggaatagtttcaaacatgattggcagacataacaacggcaaatactcggactggggcataggactccagagtaggaaaaagacaaaagatttggcagctgccaggcaacctacccctctctccagcctctttatgaaactgtttgtctgccagtcctgccctaaggcagaagatgaattgaagatgctgtgcatgtttcctaagtccttgagcaatcatggtggtgacaattgccacaagggatatgaggccagtgccaccagagggtgggccaagtgccacatccttccgatccattcccctctgcatcctcggagcaccccagtttgcctttgatgtgtccgctgtgtatgttagctgaattttgatgagcaaaatttcctgagcgaaacactccaaagagataggaaaacttgccgcctcttcttttttgtcccttaatcaaaactcaaataagcttaaaaaaaatccatggaagaacatggacatgtgaaatgagcatttttttcttttctttcttttttt

SEQ ID NO: 470 - DNA, 379 bp, Homo sapiens
  misc_feature 213, 214, 328, 351, 366: n = A,T,C or G
gattctatctttgtcaaggcaagatgacttgtttgacagggctctggtttttcacctctgaaaagctactcatccacagagcttgggattgaggggagaggaaagggggaggagatctggcttctctctccaactctgaacagattggatcagaaataagggcccttctaccatccctagccaagatgccttgggccttggcagttgtcccannacataggacaatggggtctgatggcagctttctcagaccttggctttccctgggcaagaggcttttcctgaggctggcaatgccatttcttcagactcagaaaaagggatttangggagggggaaatggggactgcnaatgaaggcaaactnttgacagcttacc

SEQ ID NO: 471 - DNA, 254 bp, Homo sapiens
  misc_feature 232: n = A,T,C or G
ccgggcaggtaccccatatatgctggtggtttctaaacctaaattgttgtcccagcccattcctacttgcagctcggatgtgccttgctagcctggcttctctacctggcacctcacactcaggatgccaaaaaaagttctgttttctttccccgaaatcctgttctctgctgctgctccactgccacctgttttcttttcttttggttgctggttcccaccagccattcangattccagccggacacacggga

SEQ ID NO: 472 - DNA, 325 bp, Homo sapiens
  misc_feature 54, 173: n = A,T,C or G
ccgcggtggcggccgcccgggcaggtactgggattataggcgtgagccaccgcntctggcctctaacgagatatttctaaaggttaggccttcagtcaagaattttaaagctggatcttagaggttatctaaactaacctctccatttcatagataaggaaagtgagtcccanaaaagcactggtttggacaagttcagaaagctaaacagtgactgtggatgtatgattctgtctcttaactcctaatccaaatgtcttctcactagataaggctgtgccttctacatttgaaggctcaaaccccatggatggatggagggaag

SEQ ID NO: 473 - DNA, 408 bp, Homo sapiens
atagggcgaattggagctccccgcggtggcggccgaggtacataaaataaaaacataaatagtaaatggcacttttcttcatgtgaggcagggtgcagaataggtttgaggaaaaaagtaagtaaaaccagtgaatggaagcacaaatagtaagtggctgtgcttctcttaatttttctgtagaattttttctcaaattcttattattgaaatgcctattatgatgtagcaaacactgaggagatactaaggcttagagtttaagaaatctaattaaatagctaaacagagcacaatgtaaactcccacaatctgattccagattctgagtccaatcatctcattatttgtctcattatgggaaggaataaccaataccaaccaagtggaaaatgcctaaaactctag

SEQ ID NO: 474 - DNA, 153 bp, Homo sapiens
  misc_feature 4, 113: n = A,T,C or G
aggnacttactaggaccaaagtcgaattttttaaattctgatatttttcttcataattttctcaaaataaaagggaaataaagaataaaaataaaatatgatggataagatanaagtcacttatgtcttccttatcattttgaaggctttctt

SEQ ID NO: 475 - DNA, 343 bp, Homo sapiens
  misc_feature 159, 183, 197, 200, 210, 229, 235, 237, 262, 270, 291, 311,319, 324, 341, 343: n = A,T,C or G
tcgcggtggcggccgaggtacaagcagccacttcagttttaccacattcatcttccacacactgatgaaccatatggaggcagcaggaattgaagtagaaccagagggagtagttaggacagacattctgattcattcattctgattctcactatttgncaagtcggaggttaaaagggttcncatatggaaatttnttntcctttctgnatgaaaatacaaaatgggntccagntnttctcttcaagttggccaagtgggncatttacnttttttggggaaaagtaggcnatgcccttccttaaaaaagnaacctttntaacnttaccttggaattttangn

SEQ ID NO: 476 - DNA, 411 bp, Homo sapiens
  misc_feature 231, 320: n = A,T,C or G
ccgcggtggcggccgaggtactttggcttttgtttctagaacaccaatgagtatatgctcattaagatagtttgatgcaataaatccttattttacttgcctctattactgcattgtaaactgttgtctactttgtcttcttgaaatcctacacctcccccagcccccacattttggcctatggaacattactttatcctgattttccccctaaccttctggcaatgcctntcagactccttccagaactacttttctctgttttccttttaatgatgacagttttatgcaattgtgtcttcaaacttataacgacccanacaatagtaataaacagtcaacattttactgaattcttactttgtggttaaagtgcctgttatatatggatatttttaatccttttgtaaa

SEQ ID NO: 477 - DNA, 439 bp, Homo sapiens
  misc_feature 192, 266, 319, 415: n = A,T,C or G
ctatagggcgaattggagctccccgcggtggcggccgaggtacatgtggcctttcagctagcgcagaggatggaaaccagagtgggctgatgattggatgccaggcctgagccgggtgagtcctgttctcattatactgtaaagtgagctgctccaagcctccctgattcttagcactcccagtccctgcangggtccctgagaaggttaatcttgcattaggccctctgctgttttccctctgtaagccttactccactttgcantgagttctagtataacttctattccagtaagatcaaatggttaaggactccanaaaagaaatttggtgaacacaaagggtttgtcatactttaacttttgtccctttcccaggtggcccatgcttctaggccagcctcccaattcctancttgcttcatgctcctggcctttg

SEQ ID NO: 478 - DNA, 416 bp, Homo sapiens
aggtacttgagggctgctgggtgccccgcactgtgccaggaaatgtggagattagacaagcagtgcagggctgatgtatagtttagttaggaaggaaaaagccagacacagaagaggtcagattatagccttggacaacatggaagacaactcaaggcaacaagtgattggattggttcagacagtgctgtaaagtcctctcttccccttttccaaaatagtttatcttttccaacataaaaattacatggaggccgtgcatagtggctcacgcctgtaatcccaacactttgggaagccgagatgggtgggtcacttgaggccaggagtttgagaccagcctggccaacatggtgaaaccccatctctactaaaaatgcaaaagttagccaggcgtggtggcacatgcttgcaat

SEQ ID NO: 479 - DNA, 577 bp, Homo sapiens
  misc_feature 454, 523, 545: n = A,T,C or G
gagctccccgcggtggcggccgccgggcaggtacccaccttgtattaagctgagtgactttggttaaggacagttacttaattatcctgggcctcagtttctctctttgaaaaacagattcattcactaaaataatatttatgaagtattcattttgtgatagcactagtctagctaccggggatatacatttacaaaacagattttaaaatatcctgtcctggtggacctcacattaccgttcattactaacagggataatttcagtgcctctctcataggattgttgcaagaattaaattgatgaatacataccgtaacacttataacagtgtcacaaaatgagagctcagtaaaagccatcatcaccataatcaaatatttaattttcataaaaagttttcctttatgttttcccattccttgtttccttggaacttagaaataatagatntaagttataaaataataagtgttaatgtaagtatcactaagacctcaatttccttacctataaaatggngatatccccctctacagtggtngggataaaaataaaatgaaacaatttaaatga

SEQ ID NO: 480 - DNA, 168 bp, Homo sapiens
  misc_feature 18, 21, 23: n = A,T,C or G
tatagggcgaattggagntcncngcggtggcggccgcccgggcaggtacgcggggaggtttaaactgggaaatctgagaaatggtatggttgtatgtgggttggcattcttgcatgatgggagtggccacctgctttcatattctgaagtcagagtgttccagacaga

SEQ ID NO: 481 - DNA, 333 bp, Homo sapiens
  misc_feature 259, 279, 316: n = A,T,C or G
atattaaagaattccaaggaaggggagagaagacgcctttctggaagaggtatgctttaaaattgagaaatgtttaggtaaggagagaggcaccgaagacattgtgctaaatgtaaacaaagaaccttgatttatataaataaagtgaactcggtttttcttggacagtttattattttcttcttgtctaaggatgtctgttccatgacttttgaaacagattttgttccaatgtggaatatacctagtaggaataggntatgtcttgaaacaaggtanagctaattaagtttttaatttaagaatgtgtgcctgnaattttttagttcaaca

SEQ ID NO: 482 - DNA, 338 bp, Homo sapiens
  misc_feature 38, 52, 53, 67, 110: n = A,T,C or G
gcgttttggagctccccgcggtggcggccgcccgggcnggtactcaacaagnnggtaaagctcattnaagctcgtaaactcatgctggctaggtttggtgaacgacgtantaaggtgtctggtaactcattagttgtataaatgacactatactaaaccaaggcaatataattttaaacattcagatagaaaaaaagttttatttgagttactctttttgtttcagttttttctaaataagatgaattattttgatttaaaattaatatatagtaattgtagaaaatttggcatagaaaattcatgaaatacagtaaaaaaattaaaaatggataatt

SEQ ID NO: 483 - DNA, 311 bp, Homo sapiens
  misc_feature 131, 166, 232, 254, 286: n = A,T,C or G
actacttagggcgaattggagctccccgcggtggcggccgaggtaccacgtcattactgttacctgggggaaaaaagtaaaaagcactgctcccagctagcactggtttcgtccccacactcaactgtgtntggctccgataatggggcacattttttttttgganaatcctttctttactattctgatgggcaaagattgaaaactggcaataaaaagaaattaaagctgnactttttcataaacagatggcnaaattttatgtgtatgggtgtatgcatacaanaaagggaaatcaagggccgggcgcg

SEQ ID NO: 484 - DNA, 255 bp, Homo sapiens
  misc_feature 89, 96, 102, 107, 109, 111, 159, 174, 225, 226: n = A,T,C or G
ccgcggtggcggccgcccgggcaggtacaattattaatacttccagtccttgctcttttacacccaaagtgaggaaccaagagggttangaagccngggaanatganantngccatagtgggcatggaagggtaatgctgaaaacaccgaaaaggacangtgttcggatagaanataggagccagtgtgcactccctccagctgggtttttacacccctgggatnnactttgtgctgggcagggctggatttcat

SEQ ID NO: 485 - DNA, 422 bp, Homo sapiens
  misc_feature 1, 14: n = A,T,C or G
nggcgaattggatntccccgcggtggcggccgcccgggcaggtacattttattcatccgtcgtttgggtcagggtctgcgggcagacacaggtagctactgccctgttgtgagaagcaatacctcaattggtgccccatgtgaggagagctgtgtgaggacagtcaggggtctgcagaaacagaccttccgcagtcggagcccctttgtaaggcaagctttgaaggaagtgtaaggaccgctttcatgaggaaagctgcaaaggaagcctgaggaatgcgacgggcccccgggaaacaaaggtgaagaaaaaccgcgtggtcaagtcagtgagtaactagtaagtcattggtgcccactcaaggttaccaaagttctgggggaaaggttggttcaagctgagatttcatcatggggacaaca

SEQ ID NO: 486 - DNA, 422 bp, Homo sapiens
ctatagggcgaattggagctccccgcggtggcggccgcccgggcaggtacatcttttcttgcctcacatcacctattttcctcaatcactgcttggatttataccccttgaagtgtcaacattataatctgtgcatcaggctctgctttccagcagatgcagcctaggatactcaggctaaaatccattatacctagtaggacaatgttaatgttttctcctttaatctcttagatattaatatggtgacagatagatagatagatattgatacacaaatctatctttcacttcttcattcctgaaataaattcttctcgtattttttaaaacactagatttttttatatgttagcattttatttaggaattattcatttatggtcttaaataagatcagtcattaagaaattattttactg

SEQ ID NO: 487 - DNA, 577 bp, Homo sapiens
  misc_feature 17, 31, 47, 179, 188, 197, 200, 226, 242, 248, 253, 274,289, 297, 302, 320, 333, 349, 400, 413, 440, 444, 446, 458,474, 480, 494, 499, 550, 551, 553, 577: n = A,T,C or G
ttcaccgcggtggcggnccgaggtactattnttaagaaaacactgtnggcatctaatatatagaaatgtatacattttgaaagtgtaatgtttggctttgaaactcttctcccagttattgagtaagcaccaattcagaagccacccatcagggagtattaagggaatttttttttctnaggaccttnaaatggtanttntatattggcttttaagccaaacaagnccggtaggaaagggtntggatngaatntggaagttaaggggaagccgnaaaccaccacccagncttttaanaaacncctttaagggcctttttngggggaggaaaanttccggtaaaggggtnccccaattaaggttccccttcccaaaaaataggttggcccgcttggttggnaaaaaaaccaaanggcccaaggccttaaaaaaacccggtngggnanggaaaaaaaccncaatttgggaaggtgncccttnggaaggtttttggnaaccnaaaaccccctttttaaaaaggattattggggggtttccaatttgggaaatnntngggaaaggggggggaaaaaaaatn

SEQ ID NO: 488 - DNA, 445 bp, Homo sapiens
  misc_feature 177, 203, 207, 209, 213, 215, 230, 244, 248, 259, 269, 274,276, 279, 282, 285, 335, 354, 362, 373, 375, 380, 389, 391,394, 395, 402, 410, 412, 413, 418, 433: n = A,T,C or G
aggtacaattgaagtatgtgcagtttattgcatgtaaataaaccttttaaaaattaaccgatacaagttgacttacatgaccagaaagctcttgaaaaactctcctgttttctcccctatttttattcttgcatgcccttatagacttgtgttaacacatttcctcatcttaccggnttcttcttgtgatctaacatttctcncagngntcanantattaacctattcancccataatgttctntggnttatctccttntagtctcatncacgnanatntantgnagataaattggtactttggaaaaatggtataaaatggattaatggttttncatagccaactttccaagnaaaattcncttcattggcntncttcnccggaaatncntanncaataanaattaagntnnggaanattttaattggcctnggttccaaaacc

SEQ ID NO: 489 - DNA, 416 bp, Homo sapiens
ccgcggtggcggccgaggtactacataaactgggctctttgttctctggctttaaatcgggttcaataaatgagaagcaacaaccagggtctctctggactcccacaactactctctccctttgcccttgctgggccaaatatggtgcaacttcctatcattgctagtccctaggtgctgcactattccttgctggattcccgtaacccttcccataccattgtaaatacctgcttcattacactctttgacctaattaagagtgttacttgtttcctatcaggatactaatagagagggacacctaactcagtctggggaagcctgggaagaattctcagaggagatgatgcttcagctacgttttttgtttgtttgttttttgagacttgagtctcaatctgtggcccaggctg

SEQ ID NO: 490 - DNA, 449 bp, Homo sapiens
  misc_feature 210, 212, 213, 215, 217, 226, 230, 352, 357, 362, 380, 422: n = A,T,C or G
gggagtcacgcgtaagacgtgttttggcgaattggagctccccgcggtggcggccgaggtacttagcagctgtgtgacctagagcacagtgctttgagtttttgagtcttagcttctgtgtctataaaatggggttcacacaactcaccttacagggctgtgagattagattacacagaaaatatattttttggctgtgggggctggaananntngnttgatttancatnttgaaatcccatcctgtgggtgagaaaaccccaccttatgacttggtgggaaacaaagccaacctcccactgatgaagctgaaagtagcagaaccttgcttctactgcctcccttgcagctngaggnaggcncaggaactagcctgtcanattggatgcaaatgctccaggccttgaaatcacaacctggtngactttgcacccaagtctattactatt

SEQ ID NO: 491 - DNA, 416 bp, Homo sapiens
  misc_feature 29, 60, 353: n = A,T,C or G
ccgggcaggtacagcagaactgcatgatnaggtaagtgtgctgagctgttgatcctcctnattcctgagctgggtgtgtagagacaagagcaggagactaggggctgatgatcttttagtcacatccatttaccccagagtgctctatacaaatagcatttttatgtattccccggcatgaaaaagctggaaagcaccaagagaaggttggtgttaaacaacatgaagttttggaatctcagaaagtctgaatgagttaatttttttgagctttagcatacttatcattttataatgaggataattccttaaagcaattctgtccaatagaactttgagatgatagaaatgtntctgtatctgagctgtccaatggtgtagccactagtcaccatgtggcttttcagcatttaaaa

SEQ ID NO: 492 - DNA, 429 bp, Homo sapiens
actcctatagggcgaattggagctccccgcggtggcggccgaggtaccagctgctaagcatacaaagattcaaggttaaaaaaatcctctcttcattcaaaaagttcagcgtctagtaggatgaataaatgaatgaatgaataaaccaagtgaaacactgccaagtgctattgtttagatctaaaccaaagcctgcagagggaacagtggactctacctgggaagattaagaagatcttacccaagtggggacagggaacaaggtctcaaggtgtgagatgtcttccaggtgaagaagcgagagagggccattctaggcaaggagaaccccagagatggggtcaaacaaggaggttgggaagtaagtagggaaaaaatagttgaaggggtggaaaaagatatctgtcatttttaaaatattaattaaaa

SEQ ID NO: 493 - DNA, 392 bp, Homo sapiens
  misc_feature 4: n = A,T,C or G
actncttagggcgatttggagctccccgcggtggcggccgaggtacatgagtctcttttttttaagaattttaattttcctagtttcttatctttttaatgattattctttaagtggtatagctccattctccaagacatttaagacatgcgcttttaagagcagctgaaaattattggttgtttactatgggttttatccatttgtatactgtttttttttctcagctatcttcaaaatagccataggaggtagattccattattattttactctaaaaagagaaaactgagttttaaagtgttaaagtggcaggaccaagatgaagatacgaggtgaaagtaactaaaggttgttagcataacaattcaaccaaagatgcaattgaaaca

SEQ ID NO: 494 - DNA, 382 bp, Homo sapiens
tacttagggcgaattggagctccccgcggtggcggccgcccgggcaggtacgcggggtaatctcagttacttgggaggctgaggcagaactgcttgatcccgggaagtggaggttgcagtgagccaaggtcgcaccactgaactctagcctgggcaacagagtgagactcagtctcaaaaaataaaaaatagaacgactgacaggccatcttccaatgttctgatctcccctgactctgtgggtccaacaggaccattctgagcaggtcgcagtcctgggcctggacaagtttgactggtcccatgccagttttttctctgcttttactcaatgccccaatgcccctcaagttgcctttgggttgaattcaacccaaaatgg

SEQ ID NO: 495 - DNA, 458 bp, Homo sapiens
  misc_feature 273, 316, 406: n = A,T,C or G
tagggcgaattggagctccccgcggtggcggccgaggtacttttttttttttttttttttttttagatggagtcttgctctgtcaccagcctggtgtataatggtgctatctcagctcactgcaacatctgacatccttgttcaagcaattctcctgcctcagcctcccaaagtgctgggtttacaggcgtgagccaccgcgcccagccaactttttgcttttatatgtctttcagtaagggtctgttgctagtaaacttagtcctgattggngtgaaaatatatcttaaaccccacacttgaattaatttcaggngcagggttattttccatcagcattttgacactattatgccatcatctattattactaagccattgttctaaatataaagttggtggtganagtgcctgcttttctttcacggataacctgcttttctctctgggatcatttt

SEQ ID NO: 496 - DNA, 402 bp, Homo sapiens
ccgcggtggcggccgaggtacctttagtccttctttttgcctggaacatggactcaggaggtggaagagccaggatgtgttcatgagaacatgcagtgacacgccaaggagagcagaacaagactctagaaggctcccaagcctgtgatgaattgtaagtgcatgtttattagcccaggacctcttcctctggagttgttccatgagaaaaacagtatctcttttggttaaaccactctagggtttctgtggcaaggagaatgtcatcgctaattgacacaactcaggttttgtcttttatttttatattcaacaaatattagcacatatgcctgtagctatgtgccagtaactacgacagatactaaaagacagtcctacctcgaggcacttgtggtctgg

SEQ ID NO: 497 - DNA, 105 bp, Homo sapiens
  misc_feature 42: n = A,T,C or G
ccgggcaggtacaagatttcttagggcgaatccaattccatnaatacctggggaaacacaaaaacctggtgcagctggaaggctgctgcactgaaaagctgccac

SEQ ID NO: 498 - DNA, 501 bp, Homo sapiens
ccgcggtggcggccgcccgggcaggtactaactctaccactcttattctactgattctattactgctattaataattctattattactgattctccttgttattaggcaatattgataaaaagggggcggaaatgacacacacaattacttctttttcgagcacaaatacatatggacccttctgggtgctttccttataaaatgaaatggacctatccattttaggtgtgacatctacttttaaaattaaaaaaaaaaaaactatacacatgtttcagaaaagtttgtaactgtcacagttataatgcaacttgtttagtccatcagtataaatatactttttttggtcaaaaatctctggatggaaaaatgtgtgaattattcttaaaactgtgccttacaacgtggtagaaaattaagccaaaacacaagacagaatgaccaaaaccaccagatgttttcatagaatgcagacattgctctaatgaatttcatcccta

SEQ ID NO: 499 - DNA, 411 bp, Homo sapiens
actacttagggcgaattggagctccccgcggtggcggccgaggtactttgggcttgatcattttaagtttcaattgcaaaaaaaaatttttgacggagtgttgctctgtcactcaggttggagtgcagtggtgcgatctcagctcactgcaacttccacctcccaggttcaagcgattcttatgcctcagtctcctgagctaaattttttttttttttgtatttttagtagagacagggtttcaccatgttggtcaggcgggtctcgaactcctgacctcgtgatccacctgcctcggccttccaaagtgctgggattacaagtttgagccactgcacctggctaacttgccctattttaaagtcaagcaatgggaaggaataacaagattatatagtaatcagttttcat

SEQ ID NO: 500 - DNA, 523 bp, Homo sapiens
  misc_feature 35: n = A,T,C or G
ctagctagctcattggtttagatacgggtgccggngaaggtttgtggcttaggaggtagattagatatttatttccattggactgaggcttaagctcagtttaatgctcatggatatggataacttattttgattcacctccagaaattgtcgttaagcaatttgtgtttgtgcaagtgttaccatctctcacaaaggatatgagtttctgaacactgatattttatagtttctgtatcattatactttgcaagattttggtcaaaaagaccaaaagctttatgtcaaaatgggaaagtagtgataataaaaagttactcagtatctttttctttgcattaattcccatgaatggattaaactaagagattaaccatacttaggggaaatgcaaacttttttctgttttcttttttttgagacagtgttgctctgttccgcatgagtgcagtggtgcagtcatggttctctcacctcctggggctcaacctgtctttccatctcagctttccttgctctttta

SEQ ID NO: 501 - DNA, 350 bp, Homo sapiens
ccgggcaggtacttttatctgacagaggcttcatttttctcaaatattcctttgaatcaaagacatccatcatattaaaaagagtaaaatcatttcagggaggattgctagaggatacagagggcagggatttagccttccaggtgacctctgctggggtcccaaggggtgggacagggtttttagtcactaatttaaaagtataaaaaggtttccaatgctttataagttaacaaacccatatcctgagaattcaaagaatactgaatggcaacattataaatagtaacatttgctattaaaaaaggcagtaagactctagctacctgaaaccaaaataagcagttaag

SEQ ID NO: 502 - DNA, 433 bp, Homo sapiens
cttagggcgaattggagctccccgcggtggcggccgaggtacattcagggtcttcaatcttaagcttgccattatctcctcaaaataataaccaagtgatgcttactaggtattcaaattgagctgtcaccagaagtcttgttgaatattttctcacttccctaagcaagttgaaccaagcaggacagatatggagaatggatgattgctgatcacccaggtcattattgaagggcaaattgaaatgggttggtgcttgctaagaaggtagaagaggccgggcacagtggctcacggctgtaatcccagcattttgggaggccagggcgagtggagcacttgagttcagctcaagaccagcatggccaacatggtgaaaccctatctctactaaaaatacaaaaaattagctgggacgttagtggcacgcccc

SEQ ID NO: 503 - DNA, 414 bp, Homo sapiens
ccgcggtggcggccgaggtactcaaagtcaaatcatttatattttcatcatgtattattttcaccttaaatttcaaataaactacagtgaatgaaatatgtatctattatttacaaattaatttttactttgctatacttcccccaaattcagaaagccaaattaagatactgtttctttgtaaagtaatgcttaatacgccgttatcttctaaatatagtatggctttacagactaaactggttttaaaaaattctttgcatcttatctcatataagccttagagttaacaaagtcatttcccctttttaaaataaatttagtgacacaaagtttgcatgagcaaaaaagttattaccttacgtgaatgtcttacaaattgctctcttatcaacagggagacaatttcaaaat

SEQ ID NO: 504 - DNA, 408 bp, Homo sapiens
gggcgaattggagctccccgcggtggcggccgcccgggcaggtacttcaaaactattcataacgcaaaaatcagtgtcaaaaatatttagtaacttaaaaaaaacaaaaagtataagtagagacggacaagaactcctcctgctttctcccactgggctcatcgtatttctgttccattacataagagactaaaactgacaaactctgttttatcgctaacacctaaaagcaataaatgtgatttgttaccatattatgataaaatttaaccaaaaaattttaaagatcggatattctgcagtttacagtgacatttatgtatatatgcctaaaagctacatataaaccttgaattcatttaaaattatttccaaagaataaatgaaggctgctttttgaagtgccag

SEQ ID NO: 505 - DNA, 435 bp, Homo sapiens
  misc_feature 3: n = A,T,C or G
ctnctatagggcgaattggagctccccgcggtggcggccgcccgggcaggtacctgctaagaatattttcagctacgagtatcagaaaactagcctagaggatcttaaacaaatagggtttttcacatgtaacaagaagtttctggtttgcgtcagctgctccatatcaccaccaggagcccagattctttcttaccttttttctcccctccctagagagctttctgcatttttgtgttcatggttgttgccccctggacacagaatttgacagaattgccaaatgtatcaacattttaggcaggaaaaatcgtaacgggcagaaggctgtatcatccatgtctgaaatccttttttagaggacaaaattttgtccctacaacactgctcagttgatttctgcttatatctcaatggccatttaatggccagtgt

SEQ ID NO: 506 - DNA, 440 bp, Homo sapiens
  misc_feature 203, 317, 418: n = A,T,C or G
ctacttagggcgaattggagctccccgcggtggcggccgcccgggcaggtacatcttgagccagttgtcacagctctgtgttaaagaacccaactaatggttcctagtttttaagaaggttaaggactaactagtctctagaccattatgagattaagataatcctgaaataaataataccgaagaaagtaaccttttcttangaaacatacagcccagaaatgactgttagaattctcgcctcagatgctattcatagcttataagtagccttgctcttctcaccatgaggatttccataacattatttttaaagncaggcacttctaaaacaccatgtgtgaaaacaccctaggccaatgcatgtaagaaaaatgtggaaccatatttgatcatcagacttacatcacgtgggagnggggcttctctctttctctttt

SEQ ID NO: 507 - DNA, 437 bp, Homo sapiens
  misc_feature 53, 373: n = A,T,C or G
tcactacttagggcgaattggagctccccgcggtgggcgggccgagggtacgncgggtgctgagtaaagtctataaagagcagttgagaatccatggccagaaaataggttagagacaaaactggtgttggaacctacacgtcttgtcttgtaattcaggagcctcatcaagtcaccttgaagtctaccttggataagataacacaagacccatgacaaattgaagtgtatcacttaacaatgcctgtgaaaaagactttctctttagtaaccagaacacttttacagcaagagattttatttcaggatgttcataattatttataaaagagacaactacataacccactttgctttgttaacagtggacagntgaggaccatcttggaagaggggaaggtggtgggtctcttttagattggggcaggtcttaaact

SEQ ID NO: 508 - DNA, 428 bp, Homo sapiens
ccttagggcgaattggagctccccgcggtggcggccgaggtacatttcaggctgaagaaatggcaaatcctaaggccctaaagcaggagcaaaattgacatgtttgaagaagacgagtgtgactggacctctgtgattggggggaagcggcgcaggatgaaacgagggaggtatgtaaggaccaaaacatggaaggaaagcaagatttccagaaaaagtggatgggagaggcactatccatgaatatgatccagttgtccaagaaagttaatttagcagaaagaaatggaatgttaatgttggttcagatgcagaatctaatatgtgttttattttaaataagggagagttaagccatcgtttaaagacataagaaaaagagaaagctgactcctttttcttccagtgaccattagttaaccgtattc

SEQ ID NO: 509 - DNA, 303 bp, Homo sapiens
  misc_feature 158, 214, 280: n = A,T,C or G
ccgcggtggcggccgaggtacttttttttttttttttttttttgttttgttttaactttgttgactaagatctcagaagtatctgagaacttgggctgcgcagggaatgctggtgtgggagaagcaagccaactgagctgagctgcggccctgtttgnccttagctctccaaaacttgctgtctatgtcacttggaaggaatttgattcttttntgcaaggcactgacaataccttacaacagagctgggagataaaatgcagagcttgtgaaagtcatnagaaagttgaacacagatggtcc

SEQ ID NO: 510 - DNA, 362 bp, Homo sapiens
  misc_feature 181, 185, 196, 244, 251, 272, 278, 292, 313: n = A,T,C or G
gaattggttctccccgcggtggcggccgcccgggcaggacgcgggcaaatacttcaagctgttttggtgtttgattatgtcaaattttaagaaaaggcagaggatcagttcaggtattcaaaaggccaacatatccaaaaggtattcaaaaggccaagacaagagctgcttctgtgtgggntcanggtagaaagtncaagggacttgtatttctttgtccatttgatttacaaaaagaaattantgtccantcaccttttccaggcactctntataanatactactttattnagaagactttacattttaagntttgacctttttgttccaaggcttagattatttcacggggtcaccttct

SEQ ID NO: 511 - DNA, 308 bp, Homo sapiens
  misc_feature 172, 187, 189: n = A,T,C or G
ggcgaattggagctccccgcggtggcggccgcccgggcaggtactgggattataggcgtgagccaccgcgtctggcctctaacgagatatttctaaaggttaggccttcagtcaagaattttaaagctggatcttagaggttatctaaactaacctctccatttcatagatnaggaaagtgagtccnanaaaagcactggtttggacaagttcagaaagctaaacagtgactgtggatgtatgattctgtctcttaactcctaatccaaatgtcttctcactatgataaggctgtgccttctacattt

SEQ ID NO: 512 - DNA, 403 bp, Homo sapiens
ccgggcaggtaccgcatgcaaccagtttacatgaatctaccccagttgtcaagatggcacacccttccacctgcacattagtttcatccctgagccctacttacaggctggagccaggagagctggtggccttggaaccaaacagactgggccttgaactctggttttgatgctccccagctgttcaactatacaagcttcttaatctctctgggcctcagttcccatcatgttaggattgtctgaggattaaatgaaactgtcactgaagcacctggcacgtagcaggtgctctatccatgtggcagtcattatttttactattcagcgtctggttctgttgaggccctgcctagcccagtggctatttcatcagtctgtccctggagttgctgtgtttgtc

SEQ ID NO: 513 - DNA, 376 bp, Homo sapiens
  misc_feature 151, 172: n = A,T,C or G
ccgcggtggcggccgaggtaccctgagattgcatgtgcgcacgccctttctaatcttctgactttgagtgtggctggtctgtagcttttgctcattcttcctaatgaccatgggaataagggagtggggtggggggcaagaatggctgcangtagtggggagtagtttgaangtgtgcaaaactgtgtctgcacccagcctgacccccaagagtcctgggcaggccccatggtttgggtgtgagtcctggtgagtgtttgctcaaaatctgcttgactattgatggttttttactgagtgtttaaatttgattaaactcttaagatcctcctaagtgccaggaagacactctgctttctctccctcttttttctcc

SEQ ID NO: 514 - DNA, 173 bp, Homo sapiens
ctatagggcgaattggagctccccgcggtggcggccgaggtacttcagttgaaaagttgaccaaagccaaaaaatgtctatctggtggtcagtagtttgataggttcaaggagttgaaagaagcctaggatggctgggacatgtagatcatagtgctaagagatggaaagcac

SEQ ID NO: 515 - DNA, 454 bp, Homo sapiens
  misc_feature 6, 353, 404, 421, 430: n = A,T,C or G
acactncttagggcgaattggagctccccgcggtggcggccgaggtacttcttaattagaatttagggctaacaagagatattataacatcaatacttgcattatatagaggaggcctttaaactactgtctagggaattcagagagccatgttcctttacaacattccttctcgtgcaattcaaagacaattgatagctaagaaaatgtcaaggaaccaaagattcttgaccaacttgaaaagcaagacttggataaatggcattatgagatatatttgcactaattgtttcaatttgactgaagttatgtcatctctgctagattgtaattaccacaaggggctgaggctncatgtctgcatatcaccccttatttttatacctccagaaaggggtcccctnatttaccctaagtgggncccctcaanaaaaataattatggattgggattc

SEQ ID NO: 516 - DNA, 463 bp, Homo sapiens
  misc_feature 191: n = A,T,C or G
ctatagggcgaattggagctccccgcggtggcggccgaggtacgcggggtgatcaagctggaagattgaagaaggaatggggatggattggagtcagcattgtattctggtcatggtaaacttgccagtgtatataaatcatccaaatggacatggtgatgaggagttggacctgtagatctgaagcgtanagaggaaggcagagttggagatgtagatatgggagcctctggcctgtggagagagtgtatgatcaccatcctggactacacgtggagaagaaaagatgaccagcgacagagggctgggtagagccagcaaaggagacctcaaaaggatggcagacagggtgaggtaaggtcaggaatgtgtgctgtggcattactgaaacctaaagagaaaaaaatcgtgtttcaggaagaaatcaacttataaatgctgaggaagaaaggctagtagtgat

SEQ ID NO: 517 - DNA, 375 bp, Homo sapiens
  misc_feature 152, 284, 295, 314, 353: n = A,T,C or G
agatggtgtctcacttcgttgcctaggctggtctcacactcctggcctcaagctgatccttccacctcagcctcccaaagcactggggttgctggcgtgagccaccatacccagctgaaaagtgatttcttataagccaagcaatcagcctntgcagagaagacaggaccctcagcacatatctagctctgtaattcctcaactcaagttgggcattactatcacccctacattaacatgttcccattaggaatatgaccaagaccaggacagagtcacaaganaaacagtcagnggatcatgtgacacatganatttattggtccaataaggtgaactgggtcaggaaccanatctgctatgccccttgggaat

SEQ ID NO: 518 - DNA, 452 bp, Homo sapiens
  misc_feature 40, 55, 66, 69, 95: n = A,T,C or G
gggcgttttggagctccccgcggtggcggccgaggtactnaatggacaggtgttntgagcagaggnttnatagctcttagaactttaaatgaggnctccagggaagttgattacaatggaatgagccaaacaaggcccgcagagttcacctccacttaataactcactaatgctgtccttcaaaagtccgaagattacagctctgaaccagagcagcacacagagggaaaacacaaggtaatctctcatctaaatgagggagtcagaggctgcaatctcagccatctaagaacttgccatccactagcaagcaggtttgtccctgaaaattcctgagcagtggacttgaaattaaacacagacccagtaaaaaatgaatatcagtaacaaataaaggggaaaacaaggtctatttttccagatatagaatctagggaaagtgttttaaaaac

SEQ ID NO: 519 - DNA, 361 bp, Homo sapiens
ccgggcaggtactgttttagtagcttacttgtgttttttaaagttcatttctccacccacaggatagctccatatcttccagcaccactaatgagtaagtattagggccaagctggtatctgcagagtgctgactggccaagagtctgcctgtgactcatgccttaggctgtccagcattggggtgctggggggctgtagccataacatttgcaggatttggaaattccacctcaagctccaatcccagggtgttgattctggctaaccatgtttatgcaaagcaatccaagcactttgactcactttggggaatctggcattcttggggccttttggatattgagacagtgggaacactt

SEQ ID NO: 520 - DNA, 340 bp, Homo sapiens
  misc_feature 8: n = A,T,C or G
atctactnctatagggcgaattggagctccccgcggtggcggccgttttttgataaattttaaacttctggtttgaaacttttgtttcctgtgcttaaaaggagacagttaaaaacactctgatttggactgacagaatgttttttagatgttagatagatctagctttgaatatttatttgcagagaagtagcagggaggactaggaatgactttttcttaggaggtgctatgcattccatcaggtgactgacccctttgtgagctgtagtggtcagtcccagcatggcccacacttgttggctgtcttagccatggtggctgtggttggcgggtacct

SEQ ID NO: 521 - DNA, 340 bp, Homo sapiens
  misc_feature 167, 171, 203, 223, 227, 237, 250, 253, 282, 284, 286, 289,293, 298, 311, 323: n = A,T,C or G
aggtacgcggggacatcaatgcagagtccctctgtgaatttacaacacccaacacccatgagttcagtccttaagaaggaaaattgagcaagtatttaattggttggacattgcataaaagaggtccatattccaggctaactctatgaaattttattctcaaaacnttantttggcctctttttttcttactggtcaggaangaaccattttctttaagtgnggcnacttggtggnaaaatcttgggcntcncccagtaaagaaaattttcaaaccttggngncnttncaanatggnctaaaaaaaattnaccaatttgggnccctaaccattttgggg

SEQ ID NO: 522 - DNA, 347 bp, Homo sapiens
actcctatagggcgaattggagctccccgcggtggcggcccgaggtactgggattataggcgtgagccacccgcgtctggcctctaacgagatatttctaaaggttaggccttcagtcaagaattttaaagctggatcttagaggttatctaaactaacctctccatttcatagataaggaaagtgagtcccagaaaagcactggtttggacaagttcagaaagctaaacagtgactgtggatgtatgattctgtctcttaactcctaatccaaatgtcttctcactagataaggctgtgccttctacatttgaaggctcaaaccccatggatggatggagggaagg

SEQ ID NO: 523 - DNA, 406 bp, Homo sapiens
  misc_feature 1, 365: n = A,T,C or G
nattggagctccccgcggtggcggccgaggtacatacttcagaggctagttggcgggagtcactaagttaatccatgcacagtgttcagcccagtgcctggcacacagtgggtgctcaaacaacagcttctctccctgcatgttggtcattagggtcacaggctctgaagtcaggctcctagggtaatatcctgtccctatcactttcaattgtaggaagatgggcacattacatacccccataagctttaattttcttactataaaacagagataataattgtatctaccttatgggttattgcaagcagcacatacagtcacccaaataaagtatataaagaagtatcttgtaagttcccagntaagtgctcactcctatgaattttgatgttcccccatttga

SEQ ID NO: 524 - DNA, 456 bp, Homo sapiens
  misc_feature 7, 390: n = A,T,C or G
acgactnctatagggcgaattggagctccccgcggtggcggccgcccgggcaggacagctaagaacacagggttgcctctaatctcagctccaggtcagagtgctattctcctaggaagggcaggacattagcatttctcatgctgctcctagctacttgttctgaggttaaattctgtgtaagtataatttggagaagatgagagctccttccttcccacccccacaacctcaagccccccatgcatggaacagagactctaactccttgagcataactgcactagaatattggagcctgtctttcccttggcttgtaaggtagagattccaggctaagagaggcaagcttataaggcctgaagctactgcctgtgcccttctattcantattcagcttccaaaacagtggaactgctactcagagaggggaaatgcacattatccctatgcccc

SEQ ID NO: 525 - DNA, 432 bp, Homo sapiens
  misc_feature 7: n = A,T,C or G
acgactnctatagggcgaattggagctccccgcggtggcggccgaggtactggttcatgtgtaactcatacatcccacaagcatctactgtgtgcagaatgtctcgtatgtgaaagacactgtgggcatataactgtggcttagatgggcttctaacccctgagaagataatatatcagcagaaaaaaaggaacatgtatatgaactgccatcacacaacctatccagaattccacaagaaaagtatggtcaaagagctaggaggtgttgaaggaaagattacctgcaggagaggcaatgcgagatgatagaagattctgagctatagagcgaggcggacccagatggggaatttcaggttttctcggggatgtgggaccctaaccaagcttcttatactttccaagcatccattttctcattttaaaaaag

SEQ ID NO: 526 - DNA, 618 bp, Homo sapiens
  misc_feature 519, 554, 586: n = A,T,C or G
ccgggcaggtactagacaacagctgtttccctggtgtatgatggagccaacaccagtcaggggtatattattacatctgattatcagtcaggataaggtaggcaattctctggtaacaaaccatcctcaaatctcagtgcttatataggcactatttcttgctccactagatggttcatacttgctcacactacccatcatgggtcgttaggagatctctgcttatggtcactcaggaattcatctgacaaaggagccaccaccttgaatatcatgggtcactgtgcctcgagggactgaggcagctctctctgtgagattgctgatatgcaactgggcttggcctctttattcttcttggaccgacttgacttctcactttcctgtttctcctgggaacactcgtaaggaatggctcagtggaatttccttctcaaggtcggcatatggtgtgctggtcctggacctgtttgcactcagatccatccttctgctctgccttgttctggggtgaagaanttgatcctcggcagggtgactttttcaggctccanaaaaatttctgaaaggacccccgcgtacattncatcaaccagaattctacttcagcaattaaaa

SEQ ID NO: 527 - DNA, 419 bp, Homo sapiens
  misc_feature 2, 31, 408: n = A,T,C or G
tnctatagggcgaattggagctccccgcggnggccgggccgagggtccaaaactgtctgggatgcaaaaacattatagcacaattgatgagagagaatttactaaaaaattaataaattgatcaaagaaatgggattcctgtgcttcttcctattagtattacaaagtttgacctcatgacttctgcttggaaatactcaaactcccaaatccagtgcttactgactcagtttacctggctgtgtttcttttgtaggctcttattggcgggaggcagtgggaggtggtgttaatgctaccctgaacatacagaggactttctaaaacactgtctcctgtggatgcccacccagccagggcagggagaagttgtccatttgttaaatcaatttattttctattttttgncagaatgaaag

SEQ ID NO: 528 - DNA, 312 bp, Homo sapiens
ccgggcagtatttggttttcaaaagaatcttatggagagcatttttgaaagtagatgtttggaaatctttccaacattatgtgatttttgtctctaaaaatgatgtatattgcttataaaaactcatatctgcacacttatcttagaaactgaaattcctaacctcttttagaaatcttccaaatggagaggttgagttttaaatatattgaggaattctaaggaggacagtggcgcagttctggcttacttaaggcgtgcgaagggaagagagtcagcagagctcgtccagaggcagcaagcctcatatgc

SEQ ID NO: 529 - DNA, 415 bp, Homo sapiens
ccgcggtggcggccgcccgggcaggactattcttagccactgttttattacaaataaaaccttcacaggaaacagaaggttagaagaatctgaaaatcattctttcccttataattcttgacttttagatgataaatccagtttttctagcagtatgttaaaattagaagattcatctgaatatatttaggcttaaaacaaactttattcacaaaacacagctatatctatataaaaaaagctaacttcacctcaaaataattcagattatattcttttttttttcctgtttctccttcccttttttttcctttttttttaaagtgatggggtctcactctgttgcccaggctggacttgaattcctggtcttgagggatcctcctgcctctgcctcctaagtagctgggacttc

SEQ ID NO: 530 - DNA, 370 bp, Homo sapiens
cctatagggcgaattggagctccccgcggtggcggccgaggtactaagttgccatttaagaacctcttcaggttccccgtctccttgagctatgaaagttttcatgaacacttcagttttaatggcatgccaaacattttgttccatgagcaacgcaacagttttaaaaattgccattgagtgttttaatagaatttagccagttgtttttaaatatatttctatgagccaaggcttacaaaaatgtataaagaggaagtgcccagatataaagaagctttgaaatggttgctgttgcctccttaaaaatcatcattaaacaatctttcaaacagtcagtgtttggcctcagtaatttaatcaaaatttg

SEQ ID NO: 531 - DNA, 347 bp, Homo sapiens
  misc_feature 272, 333: n = A,T,C or G
ccgcggtggcggccgcccgggcaggtacatgcatcaggccatggtgaccaattgtctgtggagggtgaggcagaaggaattgttgaggatgactgaggtgtctgggtaacgctttcaactgaaactgggaaaggggatcaactgaaactgggaaagggtttggtgtggcaggtataagtaatgagttcaagttgtatattctgagatggaagtgtcatgaggacattcaggtggagaaatcctgtaggacactggaaacggatccagagttnacagaagtcaggataaaggttagggctcattagcatctgggtgatgaacgaaggcttggantagaatggggtccc

SEQ ID NO: 532 - DNA, 358 bp, Homo sapiens
  misc_feature 350: n = A,T,C or G
ctatagggcgaattggagctccccgcggtggcggccgaggtacataaatatgaatatattctaccagatgtcaatcacagggaggaactagatagagacccaaactatgaacacttatttagtatcctttgggttgaagtttgggcagaaaaagggtgaaaggagatactgtcttttgatacaaatgcttctgtttgcttgaatctcttgcgtgcaaatgtagccatgtatcatttcagtaattaaacatagaaaaagcaaaacaagccgaactggtgctttgttttttgaacctggagttaagaaggtaagaaagaagcattgtcagtatctgcattcccaagctgttnccaaagga

SEQ ID NO: 533 - DNA, 420 bp, Homo sapiens
ctacttagggcgaattggagctccccgcggtggcggccgaggtacaaatagactcgatcctcaaagactgaacaacttggaatcttcacaatcctgggatcatttgttagagcacttgttcttaaataatgtaacaatgatgcagttctcaacatgaaagtctgtgaattttagcaaaagaaatggagaggcttctggggttctgaattccataactcacagctctgaaggcgagactactgaaacattccaagtagagaaaggtcactagcaatatcagggtggtcccttgtaaaaggcccacaggctggcttccaagaggacttataccggtgacattttattatcttgatgattttacccaggtctgggctctttagccttttcagggtttcaggaaacccgattttaaattcaagg

SEQ ID NO: 534 - DNA, 421 bp, Homo sapiens
  misc_feature 377: n = A,T,C or G
ccgggtgggtcccgcactcttgattcccttgcattcaatgccttaccactctacaactgtcttctaacagagctctattccttaatcaccagtgtaatctatccaccttctgcatccctgtcactgagtagctgggtgattctgggaaaaacaaatgctcagagttgtcttcccaaaacccagctgagctcccaacacaccttccaatccctctcagtttcttcagcaatcatcataccctaataccatgaaattcactatgcacaactctttcccctaactgcagcccaagaaaagctgaaaaactcaaaaatcctgttatagcttcccactaacctcatctatatccacatctttccagacctctttcctgtcangttcagagggatttttcctctgcttgctctttattctatcccta

SEQ ID NO: 535 - DNA, 399 bp, Homo sapiens
tcctatagggcgaattggagctccccgcggtggcggcccgaggtacatttgttgggggcgtgacattaacatataaccacttagagtggacatgcagttagagaaaagtcaatgagctgaaaccaaactgggaattccaacatgtagaagttaaacacaagaggaggagccagcaaaggaaacagaaacagagcttccagcaggtggggggcatttggaagaaaacgatgccatagaagccaagatgaaatagacatcaaggagaaggaagtagtcaattgttttgaatgctatgaagaaagataagaataggtaaatagtccttatatttgataacagaggtcactagtgatcttgatgaggggtttcaatagaatggtgggattatatcctcctgga

SEQ ID NO: 536 - DNA, 259 bp, Homo sapiens
  misc_feature 169, 190, 212, 237, 240, 241: n = A,T,C or G
aggtacgggttaacatttaaagaatctacattatagataacattttattgcaagtaaatgtatttcaaaatttgttattggttttgtatgagattattactcagcctacgttcattatcaagctatattattttatctaatgtacgtttgatgatcttacacgcataanctgaaagctgtcattcttcanaaaatatgtctattatgactanaaaagcaagtttattcaaacactgnagnntatttattctattggaaa

SEQ ID NO: 537 - DNA, 433 bp, Homo sapiens
  misc_feature 367, 402, 412: n = A,T,C or G
tatagggcgaattggagctccccgcggtggcggccgcccgggcaggtacgatcttggctcactgcaacctctccctcccgggttcaagtgattctcgtgcctcagcctcttgagtagctgggattacaggcgcgtgccactgcgtccggctaatttttgtatttttagtagagatggggtctcaccatgttgggccaggctgatctcaaactcctgacctcatgtggtccacccaccttggcctcccaaagtgctgggattacaggcgtgagccaccacgctcagcctacaagcaattttttaaaaactgacacctattactgataaaatttctctgtttaaaaatcctatttacctattttaaagnataagtattaggttttttttaaattacaaattaanttcttgtttntttgattaaaaaatttttaag

SEQ ID NO: 538 - DNA, 425 bp, Homo sapiens
  misc_feature 210: n = A,T,C or G
ccgcggtggcggccgaggtacaagtgctgtatgaacatgtgggaatagtatcatcacacaactatctgtcctttttgctgaaagttctgaaatctccacctaagaatgttggaaaatggatataatgtgtaggctaaatgtgttgtatccaaagttgtgtaaggcagtggttttcaaaacttttaatagaagcaagtaaattaggatctntttggattcttattaaaatgttgatttctgggctccacaccttagatcatcttcattagaacctctcagacccgaatatgtgtattttacgtgaccctatggtttcctgtgcaaaccaaagccagagactcactgctgcaggggagtcaagcttttggttcttccttcctagtcactcaaggacctagaaaagcagctctagtattagtcaaatt

SEQ ID NO: 539 - DNA, 468 bp, Homo sapiens
  misc_feature 1, 15, 134, 141, 160, 167, 174, 178, 182, 186, 192, 193,198, 208, 218, 264, 287, 299, 301, 304, 322, 344, 345, 349,361, 362, 369, 375, 380, 383, 388, 400, 403, 405, 406, 420,435, 437, 439, 442, 444, 445, 468: n = A,T,C or G
nactcctatagggcnaattggagctccccgcggtggcggccgaggtactatgaaggaaaagtatgctaaaaaatatataacagaggcaccagatgggaggagagaagtgggtggtggatggaggtgagggtggnctgcccnggctagaaggacattccangctgctnaagcatncatntgcnaacnccctgnnctggnaaggccccantcacactcanggaacataagggtcggctagtgtgggttatgaatggcaggaaaggntgtcagatcacaggggaccttanaagccttggtanancanctgaatatttggattcanggtgttgactgagcccttgctnnccantctccaactctnntattgcncccatnaaaanctnttttncctcccccttcnatntnnaatggaaggttttncaaccaaccccactnananttnannctttcctttccccccttttgggn

SEQ ID NO: 540 - DNA, 467 bp, Homo sapiens
  misc_feature 179: n = A,T,C or G
actacttagggcgaattggagctccccgcggtggcggccgaggtacatgagatgggagctcgacacattttatttggagaataaaagaaaatatgccgtcatcaaactagagcgtgttggggggcatctggtttacagaactaagtcaaggagaagaactctcaagcaatggtgacatntgccagctcttgcaaagtgggccctgccttgtcacacaagtctccttgggcaaatgttttctatgtagattttagacactttcctgtgactttctcaaggtcttttggtgacacatgcagcttgaagcttttgcaaggggctggagtctaatctcttcttgcccagcttggctgcaggagaagaagggagatatgttaggactttggctttgactgaggtggtgtagcctggggttgcaaggggctgttgccaaggctttctggtggcatcacatgcttcaggagttg

SEQ ID NO: 541 - DNA, 422 bp, Homo sapiens
ccgggcaggtacagaaaacagagtctgttgctgctattgttgtcacttcccttggagaggacatgtaaggccagcagggagccaggctcaaagacaaagaatagatgcagagagaactgggtttacagtcttccctggttccctcagggctgcgcttgaagctccctaaatcccagagcacgagagctatacgttcttccagctgtcagtccagatagagaatacctgcagctaaggagctatgggacttccattcagcctggcctggttaacacatggaactggcctgagtaaatgccctttgtgttcagctacaggaaacccctatgtcttatggaaaagctgctcaagctgagcatccttcaattcctgctcaaaggcagcagaaacaaagatatgtgcatgtggaagaatagagcatt

SEQ ID NO: 542 - DNA, 417 bp, Homo sapiens
ctacttagggcgaattggagctccccgcggtggcggccgaggtacttgcaggtggtttggcctggaaaatctagatgagtggtttttaaatttagttgcttattagactcaagaaagaaatttaaaaaacaatactgattactgagaccagcttttctagattcttcattcagtaggagtaaggaaaggccaatgaatgtgtattgataaaaaggttcctggccgggtgcggtggctcacgcctgtaatcccagcactttgggaggccgaggcaggtggatcacctgaggtcaggagttcaagaccagcctggccaacatgggtgaaacccccatctctactaaaaaatagtaaaaaattagttcaccgttgttgggtggcagggggccctggtaattctcagcctaccttggggga

SEQ ID NO: 543 - DNA, 462 bp, Homo sapiens
  misc_feature 1, 140, 159, 166, 200, 221, 225, 257, 277, 279, 292, 294,302, 308, 312, 317, 324, 332, 339, 341, 349, 362, 368, 372,389, 393, 399, 400, 426, 437, 443, 448, 451: n = A,T,C or G
nccgggcaggtacgcgggaaggacagattctcagtcttgaagaggcagcacggtaaaggggaaagatcatgagttttggggccaggttcccttggatattgtggggtccccacacttctggattgatgtttggataaacntctttgagactttaggctnttacatntgtaaaatgggaaatacttattatttcaagaagntgtcataaacacacttataantganttttggacctttattattcaaacccttaaatntccttacctgggactttcantntgaaacctttcanancttcaagnccttgntacnccccntccctgntattccgngtaaatngnctcttttnacctcccaagttngggggnggcnttttatgtttttaatgnggcntaattnncccctttggcctttgggggaaattanccccccttggnccctanaaggntcnttctttttaac

SEQ ID NO: 544 - DNA, 440 bp, Homo sapiens
  misc_feature 9, 427: n = A,T,C or G
gcgaattgnagctccccgcggtggcggccgcccgggcaggtacgtataacaacatgaattcatctcaaagacattatgttgaagccagatttgacataactcattctttgtcattccatttatgtgaactttgggaatagtcaaaacttagctatggtgacagcagtcagggcaagtaattatctatcgagtgtggagattgactgaaaagggcacaggagaactttctgaaataataaaaatgtcctatatcttgttttgcatcgtagttacacaggtgtagacagttgctaaaacgctaaaaactaaatgtgtaagatttatgcattttagtgtatttaaattataacccccagaaagcattgcctcatttttttctggagggtaaatatgctcgttaggaagccataaggggggatggattttngagaaacccttgc

SEQ ID NO: 545 - DNA, 426 bp, Homo sapiens
  misc_feature 192, 231, 270, 335, 357, 372, 395, 403, 407, 421, 424: n = A,T,C or G
tagggcgaattggagctccccgcggtggcggccgaggtacatttgttggggacgtgacattaacatataaccacttagagtggacgtgcagttagagaaaagtcaatgagctggaaccaagctgggaattccaacatgtagaagttaaacacaagaggaggagccagcaaaggaaacagaaacaggggcttncagcaggtggggggcatttggaagaaaacgatgccatanaagccaagatgaaatagacatcaaggagaaggaagtaantcaattgttttgaatgctatgaagtaaagataagaaataggtaaaatagttcctttatattttgnataaccaggaggtcacttaagntggatcttttgatgnaggggggttttcaaattagtaanttgggtgngggnattattattacccnttncc

SEQ ID NO: 546 - DNA, 357 bp, Homo sapiens
cttagggcgaattggagctccccgcggtggcggccgcccgggcaggtactttcacttttgtgaataattttattttccaaccatggaagcatcatcgtgaggttgaaagaggatcattcttggaaaatacaattacttaacagttatgtgacctgggacaagttgagcctaaatgtcctcatcataaaatggaactaagtaaccctcataagaatgacgtagtgtatggacactgtttggcccagagtaggcagtgaaaaaattgtggccattctggaataatcttatagtctctatggtgggggagatctgaaagcccgttttctttccccttcccattttgtgtacgtatctgcc

SEQ ID NO: 547 - DNA, 297 bp, Homo sapiens
  misc_feature 114, 136, 149, 157, 183, 184, 192, 206, 220, 257, 284, 297: n = A,T,C or G
gcaggaagagcacctgaggacagatcatgacttgcagacactgaatttcaaaaaatattggtgatgtgggatcagatttgttttaggaagatgaccctgggcttggtcttttgnaggacagaattccttggggacnaccaagttgaagnttaagganaccaggttggggaatatgcgggcgcnnaagtttcngtgagatacaaaanagcccacggtcaanaatttatgtcatcaggaggtgaacgagggaggacggngggtcctcccactggtatgtgggccangggaagagggatn

SEQ ID NO: 548 - DNA, 440 bp, Homo sapiens
cctatagggcgaattggagctccccgcggtggcggccgaggtacccctcgtttggggttccaaaaaagagtcctctcactttaaaaaattaattaattaattaaaaaggcccagcctagaaactggaaggaaagaattctcatgtaatgtgtgtctatgatatgccaagcatagcagtgctctatttatatcatttatttaactcttatagtaaacccctgttttacagatgcaggggacgtaacttagtaggaagttacttatgcacagtataagtaggaaccaggaagagatggaacggaaattcaaattcaggtcagcctggcactaaaattcccatgtccttttctagtagattcctttacctctctcagagaatccttcaaaattcaaacctcagaagtagattcatttggttctcctacataaggcaatatcgg

SEQ ID NO: 549 - DNA, 431 bp, Homo sapiens
  misc_feature 291, 337, 345, 361, 367, 392, 407, 413, 417: n = A,T,C or G
ctacttagggcgaattggagctccccgcggtggcggccgaggtacttttttttttttttttttttttttgagacagggtttcaccgtgttagccaggatggtctcgatctcctgacctcttgatccgcccacctcggcctcccaaagtgctgggattacaggcgtgagccacccatccggcctaacgagacttatttttactcaactagatggcgttcattcatttgcttactcagctgtgccaggaattaagttgggcactgggaattccaaaaccaacaagacattctntgtcatcagggaactcacagcctagtatgagaggataaacaaatgnaacattgnaaattataatttcagntaacanaagaaatggagttgtttattgggcnagaaggggaaatgtngtaaanaagncttgggcagggggt

SEQ ID NO: 550 - DNA, 610 bp, Homo sapiens
  misc_feature 164, 170, 188, 194, 196, 205, 210, 218, 233, 248, 259, 262,270, 285, 297, 308, 356, 358, 371, 380, 396, 403, 416, 418,433, 438, 453, 459, 474, 478, 507, 524, 525, 526, 539, 547,572, 580, 583, 592, 595, 601: n = A,T,C or G
aggtaccctataattttttaaaaatctcgcccctcattactcctccacctgacatccttttagacaaaggctcaaagtcaattatgcagacaatggcacctttctcttctgtagctgacaacccggctcttgccttctgcaacccaaaaacagccctcgctccncatcanaatggaaaaggaacctancgccangngggaaaaanatctnagataaangggtcccttccaatngaaagccaccaatanttttaaaaaanggncccttaantggttgccccctttnaaaccattgtgncttttccaagncaacaaacttggggggcttttttttttttcccttttccaccttttaangnaattgtaagtaanattttttgnaagtaaaagaaaattncccaacnttccggggtgaanantaaccccttttttcnttggncttacggccccaaanaacccnttcccttttttaagnttcnaaaaaaaaccttgggaaattaaggaaagnaaccccttggggggaannnaaaaggaattaanctttttcntttcccaaaaccaacctttgggggnggcctttnggnaaaaggggnttngccatntggcccttt

SEQ ID NO: 551 - DNA, 422 bp, Homo sapiens
  misc_feature 5: n = A,T,C or G
gactnctatagggcgaattggagctccccgcggtggcggccgcccgggcaggtacctaacaaagaccccaatatatgaagcacaaatggcagaatggtagaagtagaaaattctcaatgtgaactgctgactttaatataccaactagacctaacggacaaattcagaaacacctaatcaaaaaccttgaaatgagcaaaaattgattgcattttcacattgttttcaagcaagcaatttaaccaccttgctattttatggcatgcttattttttaaaaaaaagttatgatgaaatatgcataacatcatactcagtacaaagtttctggtatatttataattattgcaactatagccatggtataactttaaaatatttccactatcagggactagacaatcattactggatttccctttt

SEQ ID NO: 552 - DNA, 364 bp, Homo sapiens
  misc_feature 301, 324: n = A,T,C or G
aggtacccattcttaccagggagagctgggtgcaattaaagtttttcctgttaggtgcaagactttttgaatgactcatcatagttcctgcttaagacgtgtcaaagaggcccaaggctatatttaggaacttactatgaaattgcctgtcagttccaaccaatttttccaatatagtatatatgaagagttagtagcaagtaactttaaatacatgaaaaggtttttgttgtcattttttgttgttgctgtaaactggtattgaagattttcttaaacggatggacattcctttcattgngaaatgatttaacacccattcancatacacatgactatactggaatgaccctcatatgaccat

SEQ ID NO: 553 - DNA, 336 bp, Homo sapiens
  misc_feature 1, 22: n = A,T,C or G
ntggcggccgcccgggcaggtncacttggaaaggattaaaaccttaaatttattcattagaaatggattaactacctgttacttaatataaaaaggatttacaatgttattcacaatgatatgcaatacttgaaaattgaaaataggcctggccgcctgtaatcccagcactttgggaggctgaggggagtgcatctcttgagctcagaagttaaaggccagcctaagaaatatggtgacgatccgtctctacaaaaaatacaagaagtagccgggcatggtggcgcacgcctgtagtcccagctacttgggaggccgggaggtgggcctggtctc

SEQ ID NO: 554 - DNA, 378 bp, Homo sapiens
  misc_feature 83, 84, 161, 318, 323: n = A,T,C or G
tactatagggcgaattggatctccccgcggtggcggccgaggtactttttttttttttttttcttttttttttatttttagtnnagacagggtttcaccgtgttagccaggatggtctcgatctcctgacctcttgatccgcccacctcggcctcccaaantgctgggattacaggcgtgagccacccatccggcctaaacgaagacttattttttactcaactaagaatggcgtttccattcattttgctttacatcagcttgtgccagtgaattaaagttgggcacctggggaattccaaaaccaacaagacattntctgncatcagggaactcacagcctagtatgagagataaacaaatgaacatgaaatttat

SEQ ID NO: 555 - DNA, 442 bp, Homo sapiens
  misc_feature 172, 175, 181, 191, 263, 311, 319, 350, 377, 421, 425, 430,442: n = A,T,C or G
cggccgaggtacatacttcagaggctagttggcaggagtcactaagttaatccatgcacagtgttcagcccagtgcctggcacacagtgggtgctcaaacaacagcttctctccctgcatgttggtcattagggtcacaggctctgaagtcaggctcctaagggtaatatcntgntccttntcaacttttnaaattgtaaggaaagattgggcaaattacataccccccataaagctttaatttttcttacctataaaaacangagattaataaatttgtattctacctttatggggtttattgcaaagcnagcacatnaccaggtcaccccaaaaattaaaagttttanttaaagaaggtatttcttttggtaaangttcccccaagttaagggtggcctccaccttccttaatgaattntttngaatngttttccccccn

SEQ ID NO: 556 - DNA, 360 bp, Homo sapiens
aggtacctttagtccttctttttgcctggaacatggactcaggaggtggaagagccaggatgtgttcatgagaacatgcagtgacacgccaaggagagcagaacaagactctagaaggctcccaagcctgtgatgaattgtaagtgcatgtttattagcccaggacctcctcctctggagttgttccatgagaaaaacagtatctcttttggttaaaccactctagggtttctgtggcaaggagaatgtcatcgctaattgacacaactcaggttttgtcttttatttttatattcaacaaatattagcacatatgcctgtagttatgtgccagtaactacgacagatactaaaagacag

SEQ ID NO: 557 - DNA, 436 bp, Homo sapiens
  misc_feature 172, 361, 391, 392, 421: n = A,T,C or G
ccgcggtggcggccgcccgggcaggtactatcttgcactttgcttcttcttcttaatgttttgactcaggcttcaccctagttaaagctcctttggcattttctccagttttatggcgccctttttttttccagttcagctggcctttgagctcctcttttgatgttcaagnatgtttgtctagacagtctggccccaactctttgtcactaatttattttcgtattgtgatccatgatatacccccacaggctttaaataatttcaagaatgctgtttatagttgagcaaattataacctgcataaaggtggaaaatgagggagtaatggagagggtggggggtggggggggggacctgnttgaaatccagcctggaggaaaagggttgnntttttctaaattgggtcaaatgggtagcncctttaaaaaaaaaa

SEQ ID NO: 558 - DNA, 384 bp, Homo sapiens
  misc_feature 3, 371: n = A,T,C or G
ctnctatagggcgaattggagctccccgcggtggcggccgcccgggcaggtacagatctgcgttaatttttgacagctcatatatacagatttttagaaatgtaatagaaaatgattttgcacatatggtgcaagtcttgctggtgtatgtttaatgtggcaacacagtgccacaactgtttggcaaaacatgtcaaatggaggtgctttgagtcagaactctaatgtaaatgtgtctaaacagcagtatgtatcattatgatgtatttttgtaaacatagtgatggctgctttcagtcatgtaagtgctggataaaaataaccacttcagttggagtaatgtaggaaaacgtcacccagcagatgggtantcctctgcaaagt

SEQ ID NO: 559 - DNA, 422 bp, Homo sapiens
ggtggcggccgaggtacttctttctttctttctttctttctttctttctttctttctttctttctttccttctttctttctttccttctttctttctttctctccttccttccttcctttctttctttcttgtcttgccaggctggagtgcagtggcacgacctcagctcactgcagcctctgcctcccaggttcaggtgattctcctgaccttaggtgatccaccctcctaggtctctcaaagtgctggaattacggtgtgagccactgcgcccggcccttagtagcatcttttaatggaggtagagttgagatttcagtgactaacaactaaaggtattaaaggtaggggtttatatgatacatttgcattttaagaaaactgatctaagcttcaatgtgaagaaacaagattgaaatgg

SEQ ID NO: 560 - DNA, 447 bp, Homo sapiens
  misc_feature 186, 187, 188, 192: n = A,T,C or G
aattggagctccccgcggtggcggccgcccgggcaggtacagcatggagatcaactaattgtattaaaaattattaggaagatcagttatcttttatctttactaggttaagttgatgaatttgaggaacaaagtttcttcgttattgatagtaggatggattcttgttggtttttaataatcttnnnctanggattttagtaggaatgttaatacaaaattgctttcatagaaccttttgaaaaaaataattctattcattggaacaccaaaggaattctaaatattcaaaattgttttaatcaaattctgttttaaaaacgactacagtggctcacacctgtaatcccaacactttgggaagccaaggcaggagggatcgcttgagctccggagttcaagacctgcttgggcaacatagcgagacaccatccctaaaatataaaa

SEQ ID NO: 561 - DNA, 430 bp, Homo sapiens
cactccttagggcgaattggagctccccgcggtggcggccgcccgggcaggtactgcatggacaggagatgcttagatctgaggtgaggaaatccagagatgaatgttttgtttacctcatgggattgtggcattgttagccactcaatccaaccagattataatgtattaagaatttgaaacatcagccattgtggtttcacatacacagatgtatattattttgttagccgggtaatgacagtcattgtcaagtggaagatctaatcagactgaatattcattcatgccttgctttgtcaatagggaaaaaaatttcaaggacaatcggatattctctcagatgactgaacctttctttccatctacctgaaggcgaggaaaggaggagggaggggaggcttggacagcacatcctcccccgattaga

SEQ ID NO: 562 - DNA, 475 bp, Homo sapiens
  misc_feature 86, 150, 151, 158, 163, 164, 166, 211, 214, 216, 222, 223,235, 240, 247, 249, 251, 260, 276, 279, 312, 316, 321, 327,329, 333, 340, 355, 368, 377, 385, 390, 392, 401, 417, 419,421, 422, 436, 438, 465, 474: n = A,T,C or G
ccgggcaggtaccagcaaagatggatgtatacacatacacgagtcaatttactgtaatcctgtttcattagtgaaacacagagaangaaaaaacaagaaaccacatgactgtccatcaacagatgatggcctcgactaaactattgaatnnaatccanttttnngngaaaacttgctttgaaatttttaaaacttcggttttccaaaaacnttntngccaanncaaaacttgtanctctnaaaaatntngnattaatacncattaaccaactctgnagnaaatagaaaggttaaataaaaattcgctcttanccanaaaanaggcancnttanttaattnatggaaggggccttnaattcttcaaccnttaatttanccttacanttcangncctacttgnaattcccttacaattntntnntttaaatttaaaananaaaaacctctctaatataaaaaccttnatttaaccnt

SEQ ID NO: 563 - DNA, 410 bp, Homo sapiens
  misc_feature 187, 315, 341, 394: n = A,T,C or G
gggcgaattggagctccccgcggtggcggccgaggtacatttgttgggggcgtgacattaacatataaccacttagagtggacatgcagttagagaaaagtcaatgagctggaaccaagctgggaattccaacatgtagaagttaaacacaagaggaggagccagcaaaggaaacagaaactgagcntttcagcaaggtgggggggcattttggaaagaaaaacgatgccatagaagccaaggatgaaaatagacatcaaggagaaggaagtagtcaattgttttgaatgctatgaagaaagataagaataggtnaaatagtccttatatttgataaccangaggtcactagttgatcttgatgaagggggttttaataagaatgggtgggaantatataccttcccctg

SEQ ID NO: 564 - DNA, 433 bp, Homo sapiens
  misc_feature 367: n = A,T,C or G
ctacttagggcgaattggagctccccgcggtggcggccgaggtactatatgctagaaacttggctgaatgatttgacattatcctatttaatgttcatgacaatccaataacgtaaccactcatatctcccttttgtgcagataacaaactgaggcccagagaaatcaaatatgttgtcaaaatctacatcgttgaagagatgggtttcaaatccaggtcggcttggcccttgccacgacttcataatgaaattccatgggtgagtgttaccagtttctggtccatccttgcttatttcaagggtctcatcatcccatccactgtatcactttttttgttacaggctttactcttttctaccatggnaaaagactaatgatatttttttttctccataaggcttgggaaaatattatcaatcaccataaaaat

SEQ ID NO: 565 - DNA, 352 bp, Homo sapiens
aggtactaggaactgagtaatttggaaataacattaaccactttcatataccacacacctatcttgttaagtccaaaatgtcagtagtaataaggcttaatcattaagattaagaatattgttatatgtttggaatatgctaaatttatatgctcttctttgaccaaattcagtgtcaaacaaatgtcaatcacgtatctgatttattccctggtcggcattactgaaagaaaaatgtttatttaaatcagcatgtttcaatttattttattatttttttatactttaagttctgggatatatgtgcagaacttgcaggtttgttacataggtatgcatgtgccatggtggt

SEQ ID NO: 566 - DNA, 336 bp, Homo sapiens
ccgcggtggcggccgaggtacctgaacaaatcccatcaaggacagattctcagtcttgaagaggcagcacggtaaaggggaaagatcatgagttttggggccaggttcccttggatattgcggggtccccacacttctggatgatgttggataactcttttgaggacttaaggcttcacatctgtaaaatggaaatacttatttttcagagttgtcataaacactaaatgattttgacttatatcaacctaattcctactggctcattgaactcagctcagctgtcccctctgttcggatgccttccccagtggggccttagttagggtatacctg

SEQ ID NO: 567 - DNA, 296 bp, Homo sapiens
  misc_feature 258: n = A,T,C or G
aggtacatttgttgggggcgtgacattaacatataaccacttagagtggacgtgcagttagagaaaagtcaatgagctggaaccaagctgggaattccaacatgtagaagttaaacacaagaggaggagccagcaaaggaaacagaaacagggcttccagcaggtggggggcatttggaagaaaacgatgccatagaagccaagatgaaatagacatcaaggagaaggaagtagtcaattgttttgaatgctatgaanaaagataagaataggtaaatagtccttatatttgataa

SEQ ID NO: 568 - DNA, 427 bp, Homo sapiens
  misc_feature 234, 235, 268: n = A,T,C or G
ctatagggcgaattggagctccccgcggtggcggccgaggtacttttttttttttttttttttttttaatagagacagggtttcaccatgttagccaggatggtctggatctcctctgacctcatgatccacccacctcagcctcccaaagtgctgggattacaggcgtgagccaccgcgcctggccgggtcaggctctttctaatctgtttaaaaccatatcacccagaaggnnttcagtatatacttatttaaatgaattgaaagncatatgagcagcatggacttactactttaaaaaccacattattagaaacctaacaccttggaagctctgcatattctgaatgaagaatatactaaaccactcagagggaaatagttattaaccattttaccacaggacgactaaacaactaccatggcc

SEQ ID NO: 569 - DNA, 411 bp, Homo sapiens
ccgggcaggtactttatcacaaggaaaacttattctacattatcctgaccatggggaaagacttgtattttggtaagccaattgttgcttacttattctctgacctaacacactctccttctagcaccccaagctggtttcacagggctataatgcaaattcggatacatttctttatggaccttgaaatcagactgtttggcagagaacatagtccacattattttggaaagccagctgtatcaccggagtctacttttatttaatcttttacagccaagaaatctatggcatgtttttgccagtctccctgatatttacatggatgatgaaatgtccccaaatttcactgaaccacagcaaacactttgactactattgtggcaggactgtaataacattgagtgcccc

SEQ ID NO: 570 - DNA, 398 bp, Homo sapiens
  misc_feature 164, 189, 203, 207, 222, 226, 230, 234, 235, 236, 239, 242,246, 248, 255, 256, 260, 264, 269, 272, 273, 274, 276, 282,289, 293, 295, 298, 310, 316, 318, 373: n = A,T,C or G
aggtacagttattatactgcatcttaaatagtggggtgatattaaatggttatattctggaagctcatgcccacactgcctttgaagttcaggctgcccagccacattcaggcattgattcaggaaactcccttggcctttcagtaagagagaagctccctttntgccagaacttgctttgaaatagantccagaaacgttgntggngcaccggtttctganctcnatanccgnnnggntcncatnancagcacnngctntgtnatggntannngnaatgtncagagtnaccnanctnaaacatttgcangaccgnancatctctcatctatagcattggtaaaaaagcctcctaacaggcctccccaatttncatactttgcctacctaaaaatatt

SEQ ID NO: 571 - DNA, 643 bp, Homo sapiens
  misc_feature 516, 580, 611, 622, 623: n = A,T,C or G
cgcccgggcaggtacaaaattatctttattcagaagatcacatagcagcatgttcataatcaaaaacattttaccttagcaataaacaccagtcatttatgcaagagcttcccagggttggtagatatttttattgcttcattttgctctagttaaagaaatggaaaagatgcttttaacttattatcaatcctacatcaggtgtcaagaaatgcaaagcattagaaagagagagggaaagagggatcttcaatattctctgtaaaggagcaaattctgacatggtcatctcagacaccctcttttaattccaaagtctaaccttacaaaagcagagaaaggccgggcacggtggctcatgcctgtaatccaagcactttggggagactgaggcaggcggatcatgaggtcaggaatttgagaccagcctggctaatatggtgaaaccctgtctctactaaaaataaaaaaattatctggacatggtggtggtgtacaatattttttggctgtttncatgtggatatcaaattttattttttaatcctattgcattttacatgagtcaagggcatgaagnttcttgtgcttccattgaatgccgatgattnctaggcaagtnnacttggtcattttgctttag

SEQ ID NO: 572 - DNA, 364 bp, Homo sapiens
ggtacttacgttgcctcgtgtcaccaaaattggtgtggctgctgtggtgcggggggctgcactgatggcaccccttcctgtcttcatcaagcagctgcccttctgccgctccaatatcctttcccattcctactgcctacaccaagatgtcatgaagctggcctgtgatgatatccgggtcaatgtcgtctatggccttatcgtcatcatctccgccattggcctggactcacttctcatctccttctcatatctgcttattcttaagactgtgttgggctttgacacgtgaagcccaggccaaggcattttggcacttgcgtctctcatgtgttgtgctgtgttcatattctatgtacctcgg

SEQ ID NO: 573 - DNA, 434 bp, Homo sapiens
  misc_feature 2, 331, 364, 377: n = A,T,C or G
cnctacttagggcgaattggagctccccgcggtggcggccgcccgggcaggtactcagctaagaagaggattgctttgggcataggaagcagaatgacgagttcagtcttcctcagtagttggagcacagttctcaaagcccatcaacactttggaatggatttgttgttttatttatgccatcaagggagagttgatatttgtgtattgctaaaaactactaaagtatgtcgatgcttaggtaggaacatacaaaccatatatcctctgggatctgcccaggtttctgtataaggcttgacctacgtaagatcctatgatgaagaccagnaaaactttttttaaaaggtagggtaaaatttanaaatttaaaaatncaccgaaggtttgtttcaacattttgtcccattagggtttccctagttgccaaaaaa

SEQ ID NO: 574 - DNA, 384 bp, Homo sapiens
  misc_feature 16, 21, 23, 26, 27, 44, 46, 51, 55, 56, 57, 70, 82, 90, 115: n = A,T,C or G
aaacccgaattggttntcccngnaanngcccggcccgagggacntngttcntttnnngagatcgaggttnagggagctcacntttccaanacagcaggacccaggattcagaccnggaaaatttttatttcctggctggtttgtgtgccctcatgcatgttatttacagtgccatgttctttcacatgggaacactgacacaggtgaaatgggagggttccataggatgatagtgcaaaaaacattaaagacaatcctagcagatgcagtgagttcaagggagagtccttgtggagtaacaccgaaaggcctggtggatgagatgtatgaaagatctaaatgcctgccagatagtgagctgtctgcaactaccacaaagcaaaa

SEQ ID NO: 575 - DNA, 561 bp, Homo sapiens
  misc_feature 395, 421, 502, 533, 537: n = A,T,C or G
cgaggtactttcacttttgtgaataattttattttccaaccatggaagcatcatcgtgaggttgaaagaggatcattcttggaaaatacaattacttaacagttatgtgacctgggacaagttgagcctaaatgtcctcatcataaaatggactaagtaaccctcataagaatgacgtagtgtatggacactgtttggcccagagtgggcagtgaaaaaattgtggccattctggaataatcttatagtctctatggtggggagatctgaaagccgttttctttccccttcccattttgtgtatgtatctgcctccactgatctgcacagggaagggaagtggttggtaactctctgggcactcaggatctctacacttggtagttgcccagcancccatcactgtgtctttcacccctanggcttacaagggccattttctgccccatcagggtgtgctgcacacctgtgtggagtctttgccaggtgagctcttcccatnccatccctgccttcatcaataaaaggctgantcanggaaagggaagtacctgcccgggc

SEQ ID NO: 576 - DNA, 418 bp, Homo sapiens
  misc_feature 391: n = A,T,C or G
ccgcggtggcggccgaggtacaggttctttgaatgcagtatttattcacatagttttcattttctgtcctgacaaaaacttggtgatgtttgaatgattacagaacaaataggattgtggtttatgtttcctattatgcatatttggcagttgaattatgacattagattgggacatggtgagagggggcaggatacggggtaggaggaggggagcaagttacaaaaggccccagttccgggaagctgggctgagttgttctgtttaacttcttcttcctttattcctatggttttatgattgcaaattggcagtggcagggcagctctgactatatttgctagaagcagatgtccaccattaatttaagatgttttagggattaaaaatnatagaggggtggccgctagggaaaata

SEQ ID NO: 577 - DNA, 405 bp, Homo sapiens
  misc_feature 27, 393, 395: n = A,T,C or G
cactactatagggcgaattggagctcnccgcggtggcggccgaggtaccaggagggtattgatgtttgaggtccaaactgaaaacccatcacctccttcccactgctatagcagcgttagccctggggttcattatctagccagttcacaccttctaaagtggggctctgaaaatgtcttacttccctcacagacaaaagcaattctcaagcctccttgagatcacccaccaaccaggagcaactgctgtcacttggaggtgcagctgaattcttctaattgtgacacaaaactcttgaaactgtaaaatgctgaaaagattaaatgaggttattaacactcagtaaggttttttacaagttaaaaaagtaaagtcataattcaaatagggtncntttttatttt

SEQ ID NO: 578 - DNA, 234 bp, Homo sapiens
ccgggcaggtacactattatgtgctataaacggaaaccattgcaacaagaaaatgtcttggaaatttggctcccaagtttggtgaatctggagaatgtattttaatatggaaaatatggacagtcttctaatttttcagtttactttctctcctcttaaaaatatcactctattgtattattacgattttttttctttttttgtgatggagtcttgctctgtcacccagggtgg

SEQ ID NO: 579 - DNA, 397 bp, Homo sapiens
cccgcggtggcggccgcccgggcaggactactggcttcccagtggttgggttgagtataagcccccaaatatgagtaaaagaagaaaaagttaattcaatcaccaagtcttgctcgcatattaaaaattggatagatgaatgttcaatcatatggtttggcttttggccagccagacgaggtcaatttttagatttgaactgcttagaattcttcaggcaagtcttgatggagcacttcttggacagttagaactttaccaggttcacaggaagagctcaagatgaaagcgaacaccctcatccacactgggttttcctttgggagaccttttactggttgaagagggtgggtttttcataagcccgcaaaaaatgaaccaagtggccaagtttgag

SEQ ID NO: 580 - DNA, 436 bp, Homo sapiens
  misc_feature 50, 412: n = A,T,C or G
ttagggcgaattggagctccccgcggtggcggccgaggtacaaaaggacnctatcaacggtatacgaaggaagagtcagggtctagacttcaggcccgccttcaccacctaccatggaaccttgatctagtcagtgtgtctccttgggtttactaatttataaaagaggtgggcagggcaggtattattcctatatttatgattatgatcaactaactagatgcttttgaaaatgtgtagcaccgtgcccaccttagttttgtttttctctctcctttctagtttatggtagtaattaatggtagatgttgtgggttctccaggaaggtattgttaagataacagtttctgaagactgataagtctgacatgacagatgactacttgcaagtcacattttaaacatactttngaactgatgaaaaatcattttcaa

SEQ ID NO: 581 - DNA, 343 bp, Homo sapiens
  misc_feature 123, 170, 172, 331: n = A,T,C or G
ccgcggtggcggccgaggtaccttcctccttaaatccacattccacatgagtttgtcatctttttagatgtatatttgggaagttgctccttgctgacaatccttgaaaagtgcccagttctnaggacccagttgaaataaattttcgcctggggcttgggcgcggcggntnacgcctgtaatcccagcactttgggaggccaaggcgggcggatcacgaggtcaggagatcgaaaccatcctggccaacatggggaaaccccgtctctactaaaaatacaaaaacttagccgggcgtggtgggcgggtgccttgtagtcccagtctactngggaggctgagg

SEQ ID NO: 582 - DNA, 440 bp, Homo sapiens
ccgcggtggcggccgcccgggcaggtacgcggggacacttcctgggctctgtgactctgacaaggcactgaatttagctgctactatcagttaaggctcagctcatatgtaatcagttccaggaccaccggtccccaggaagaggatggagaaattgaagctccaaatggctaaagcaatctacccaagatcacacagccagattggtggcatctaaaattcgaacccagtcctgatgtgctgaacttcgcatctggatttctcaaaatgaagatgtggccaaggagaaacaacttcctattcctatcctgtagcctgccaagcctgagaagctacctccctgaaaatcttcctaggactcctcagcttcctcaatgctaccaaatacccactatctccatagacacacacaaatcccctccacccacaatgatgtcctg

SEQ ID NO: 583 - DNA, 332 bp, Homo sapiens
  misc_feature 281, 319, 332: n = A,T,C or G
aggtacaagaagaaaggtcaatagactgttgtcatggaacaaaattcaaaacaggatgtataacagataggagagagaaaaacctgctggcagcctgggaatcgtgaatcttgcaggcatatttttggggtaaacaaatcagttggcagctgataaagagatcagtctgggcgttctgggtaggacaactagtatcaaagaaaacaattaagtgtggacagatttttcgaaccccctgatggtatggctgaggagcatatgaggcttgctgcctctggacnagctctgctgactctcttcccttcgcacgccttaagtnagccagaactgcn

SEQ ID NO: 584 - DNA, 409 bp, Homo sapiens
  misc_feature 151: n = A,T,C or G
ccgggcaggtaccctttatgatctagataaaccattgtgttcttctatagtttttccaactatatttgaataggtgaagttaatatgtttaatcataaaatgctctcagatgcttgcaaaaacaattactccatcagataagaacacatcnaaaaattttggaaaatttaaaaaaagtcattccagctatatgcaaataacttttagtatatgcatctgaaaagctaccaaacgtaacaatgaaactctaaacttgtagtagaaaggtaaatgcactgtgatcagctttcacatcacttcagagtatattctaaaacttcttagattctacattatttatagagtgaactctaaattcaaacatttctcaggaacaaaacgactcccatccaattatttaattagggaa

SEQ ID NO: 585 - DNA, 349 bp, Homo sapiens
  misc_feature 162: n = A,T,C or G
atagggcgaattggagctccccgcggtggcggccgcccgggcaggtactgggattatatggcgtgagccaccgcgtctggcctctaacgagatatttctaaaggttaggccttcagtcaagaattttaaagctggatcttagaggttatctaaactaacctntccatttcatagataaggaaaaggtgagtcccagaaaagcactggtttggacaagttcagaaagctaaacagtgactgtggatgtatgattctgtctcttaactcctaatccaaatgtcttctcactagataaggctgtgccttctacatttgaaggctcaaaccccatggatggatggagggaagg

SEQ ID NO: 586 - DNA, 391 bp, Homo sapiens
aggtacattgcttctgttctctgtcactctgtttctgtgccagaagacacattgcttctcctcattctcttatgcagtgctgtttaagtggtggtccacaaattgttgctggatggtgatgagatcgattaggagtttatacctcaatgtaaattaatgcacttccttccttccttaagaatgtcttgccatgaaaatatcagcatgcctgtggatgtcattgatttaaatgagggcacaagttccgtatttccttgcagatgggtccagactgtttgcagactggccatggtccttgggccacactggaagaagaactgggctaagtattttttatgcctgtgatttaactttctccaataaaacccgcagcctcttgttagggatatga

SEQ ID NO: 587 - DNA, 345 bp, Homo sapiens
  misc_feature 23, 29, 58, 76, 92, 96, 178, 188, 206, 211, 235, 249, 250: n = A,T,C or G
ccgcggtggcggccgaggtactncttgantacactggccaccattgtttacctgttangggacaggcaagatgggnaagcaaaggaattatngccntcaaagagagaataacagcttacctggaaagttccactatttctaagaattacataatgttcatttgcctgatcatggaatnagatcccccngtaagaatgggaatctgntcccntatactgatggctgctgggggcanaaagaatgatgttnnatttatctaggtttattagacaaagaaaagctacagcgttggtgagaacaacaaatccaggtaagactgcctaatcaagtagcctggcccttgaa

SEQ ID NO: 588 - DNA, 267 bp, Homo sapiens
  misc_feature 16, 18, 22, 57, 64, 75, 88, 135, 144, 151, 161, 167, 183,198, 201, 256: n = A,T,C or G
ccgcggtggcggccgncnggcnggtactgcttcaaaaggcatgtataactaagacanatgaaanctaaaatgacncatgggttatttncaacaggaacactttgaaaggaaaaagaaaacaaacaagaactttangatattctntttgaangcaacctgcntgatgntaagattgtgtccatnggactaacatttctnaanggccatctaaaatacatttttaaatacttattcctttcacaggtaatatcttacnaagtttgatta

SEQ ID NO: 589 - DNA, 439 bp, Homo sapiens
  misc_feature 3: n = A,T,C or G
ctncttagggcgaattggagctccccgcggtggcggccgcccgggcaggtacagtcatatgcagtaaaggcaacaaatgcttgtccttgaatctgaacaatttctcaaggcattcaccgtctgcctttttcctagtttattcaatttgggataaaatgtgttgaatggaagttaccgttacttttgcattaaaaagaagtctaaaaaaatcacaatttcttttttcaagaatcaagttctaattcaattcatcaagcattaattaagcataaagttatattcaaagaagcactgggctaagagtttacggaacaaaggagacacaggtatctcacgagcttaaaatgagggatgaagaaaatatattcacaaataattacagttaaagacaacatgcgggctgggcgccggtggctcatgcctgtaatccaagcacttt

SEQ ID NO: 590 - DNA, 431 bp, Homo sapiens
  misc_feature 187, 188, 354, 411: n = A,T,C or G
ctatagggcgaattggagctccccgcggtggcggccgaggtacaaggagggcatgtcaaattcacagtaaaggagtctaaagcgaggccattatatgcttctcttctacctatctcatatatgccatttatgagcccacttaatataggacctgccctcaccataacgctcaggcctataagaactnntcatacctacaaagaacttcctcacacctttgccttctgctctataactggccatgtctgtattctgttcagattagagagaggtccactgaagctttccccaaaagttaggagacaaaataacaatgcccctagtaagctgacaaagggaaaacattgaaaacantaaatgagggcccaggtgccggttggctcacgccctgttaatcccagccctttgggnaagccgaggctggccagatc

SEQ ID NO: 591 - DNA, 356 bp, Homo sapiens
ccgcggtggcggccgaggtacagtttcaataatatgtttttttaattgatgttaaatatgctcctagaagctgcactgcaacaaagtaatttcagagaaaggcaaactggattcagttttcagataataaatatatatgtgcataattaaaagagattgatgtttccagaaaggagcacaatggaatgaagaaggtggtgcagaaaggctgagccctgtgctattagtgatgagtttcaccggaggtcttttttttttaaataaaaacttaatttctctgtctttgaattctatgagatctctttcagacaaacacaacattctgaaaatcaaagacttggggattacttgggaaa

SEQ ID NO: 592 - DNA, 421 bp, Homo sapiens
ggcgaattggagctccccgcggtggcggccgaggtacaagttctacaagttgccttttaataatgaatcacaactattactagggcatgcatggctttgtctagttctaaaaatgttaaaggatggaatataagatacagactgagatatgcttgattacaattagtctaccatatttaaatatgccgcagtgtattcatttaccaggtgaattattttccttcaaagtggtcttttttttttttttttgagacggagtcttgctctgtctccaggctggagtgcagtggcgtgatctcagcttactgcaacctccgtctcctgggttcaagcaattctcctgcctcagcctcgagagtagctgggactacaggcatgcaccaccaagcccagctaatttttttgtatttttagtagagat

SEQ ID NO: 593 - DNA, 423 bp, Homo sapiens
  misc_feature 70, 82, 92, 105, 126, 143, 155, 202, 208, 229, 240, 242,252, 258, 260, 312, 323, 346, 353, 360, 373, 374, 375, 383,407: n = A,T,C or G
catagggcgaattggagctccccgcggtggcggccgaggtactttttttttttttttttttttttttttngaaatggagtcncactctgtcncccaggctgaagngcaggggcacaatctcagctnactgcaacctccacctnttgggttcaagngattctcctgcctcagccttccaagtagctgggattacaggggtccngccccnaaccttgggctaaatttttgnaatttttaagnanaaaaacgggnaatttncnaccattgtttgggccaaggcctgggtcctcgaaaacctccctgaaccccttnaaaagggaatncaagccccccgccctaaaacccncttcccnaaaaggnggcctgggggaannnaacaaagnttggggggaaacccaatttaaagncccccgggcccaaaaa

SEQ ID NO: 594 - DNA, 452 bp, Homo sapiens
  misc_feature 5, 396, 414: n = A,T,C or G
cactnctatagggcgaattggagctccccgcggtggcggccgaggtacgcggggtcccagaagacaggtattattgtatttagcacaaagcaaagggaagaagaaacactgtttatgtccaaaactatggggcagtggtcttctcttttacttttctttgctgctgttcatgaagctttgttaccttttcgctgtcttttttttgagacggagtcctgcattccagcctgggtgacagagcgagactccatctcaaaaaaaaaaacaaaaaacaaaaacaaataaataattgtcgatgacacattgatggctttgaatatggtccagattttgccaccatttctaatcatgattagtagagggcttattgtgaaccacccttaatgagaagaaagnaaagaactggggtggggnaagaggggatgggcaaggaaggaaagcatggggaaaaa

SEQ ID NO: 595 - DNA, 522 bp, Homo sapiens
gcgtaatacgactcctatagggcgaattggagctccccgcggtggcggcccgaggtacagatttgctacatcatatagcattttttagaccataatttagatctttccatcctccaactaagatttacctttttatatgaagctttaattactttccgcaacacttttgtcaaaatctgaagtctttaagaaccaagatgtttctgatgtttattttaatgttcagggattttggaggtgaggggctagaaacactgactcctgcccctgactcccgcccctgactcccgcatttattttcataaatgaaaatagtaaaataaattcattaagggtattatgtggagaatagaaacaagagtaaaggactgagagtatattagagaaaactatcataattttggcaagagataatggacatcgaagcttgagtgaaaataactgttagagaaaggagtagaggacctcgagatataaggagaaagtaaagtctaaacttgctaaatggactggatttgtggg

SEQ ID NO: 596 - DNA, 372 bp, Homo sapiens
  misc_feature 274, 311, 336, 357, 362: n = A,T,C or G
ccgcggtggcggccgcccgggcaggtacaggttctttgaatgcagtatttattcacatagttttcattttctgtcctgacaaaaacttggtgatgtttgaatgattacagaacaaataggattgtggtttatgtttcctattatgcatatttgggcagtttgaattatgacattagattgggacatggtgagagggggcaggatacggggtaggaggaggggagcaagttacaaaaggccccagttccgggaagctgggctgagttgttctgtntaacttcttcttcctttattcctatggttttatgatntggcaaatttggccagttggccagngggcaggctccttgacttatnatttngctaagaaaa

SEQ ID NO: 597 - DNA, 251 bp, Homo sapiens
  misc_feature 201, 208, 232: n = A,T,C or G
tatagggcgaattggagctccccgcggtggcggccgaggtactgcctgtccttctattcacagcacatgtggcagcaaaccccatattacagtgatacatccctgcatcccttataagaatatatataagctttgtttcctcattgaagcaacaagacatggtttctcactcgtccttatgttcctcataagctcatattntgctacntgtggtttttaagtaaggaatggntgcataatggtcaaaatgt

SEQ ID NO: 598 - DNA, 444 bp, Homo sapiens
  misc_feature 355: n = A,T,C or G
tagggcgaattggagctccccgcggtggcggccgaggtacaggcaacaaaagcaaaaatacacgaacgagatgccataaaactaagaagcttctctgcacagcaaaagaaacagtaatagattgaagagacaacccacaaatgggaagagaatgtttttaaaccatatctcaggtaaggggtttcataccaataatatgtaagggaactcaacccagaaatgagaaaacaagcttactaaaaaataagtaaaggagttgaatagacattttctaaaaacagacatacaaaaggccagatttttatcaaaaatgttgataaaaaacatcaacattcctaattatcagagaaatagnatgtcaaaaccatggaaggatattatctcacaggatggttacctggagggttattattaaaaaaagaatggtgggcggggggcaccggg

SEQ ID NO: 599 - DNA, 619 bp, Homo sapiens
  misc_feature 14, 35, 57, 61, 71, 76, 83, 88, 95, 125, 144, 146, 148, 168,177, 181, 186, 200, 207, 216, 228, 239, 248, 276, 278, 282,293, 299, 301, 331, 344, 346, 349, 365, 374, 386, 398, 407,409, 439, 444, 460, 461, 462, 467, 475, 497, 501: n = A,T,C or G
  misc_feature 514, 538, 549, 554, 560, 561, 564, 578, 580, 583, 584, 590,604: n = A,T,C or G
taccgtaacccttncaaccttaatttaaagggggnggcccggaaataatttgggggnaagncccttccccnacccnccggccnggggntttgggnggcccgggggccaccggtaaggggattaanccccatccaaagttttttntngnccctttttaaaaaccacaantttttccancccnccttnaacctttaaaaatngaaaggnaaagtttangtggttattccnctcaatttaangtggttccnccctccaattccaatttccaaccaattncncctnttgtttaatgnaggggncncccccttccttgtaagaccaaggtggtggnaattcaagtaacnangtntcccccaaccttcccntctccttgngggtaagaaagnggggtggaaccngtccgtggngntaaggaataaatttttttaatttttcttcnaaaanactttttatagttttnnnggccncctccctnttttttatcttttccatgggtntcanggtaaaggggtancccctaattttcttttaaggtttngagactaaacnttgcngagcannatnaaaatttctttttngnganntatccnccctatgttaatanatctaaaattttttt

SEQ ID NO: 600 - DNA, 456 bp, Homo sapiens
  misc_feature 188, 191, 195, 198, 206, 217: n = A,T,C or G
tagggcgaattggagctccccgcggtggcggccgaggtactttcacttttgtgaataattttattttccaaccatggaagcatcatcgtgaggttgaaagaggatcattcttggaaaatacaattacttaacagttatgtgacctgggacaagttgagcctaaatgtcctcatcataaaatggaactnaanttanccntcataagnaatgaccgtantgtatggacactgtttggcccagagtgggcagtgaaaaaattgtggccattctggaataatcttatagtctctatggtggggagatctgaaagccgttttctttccccttcccattttgtgtatgtatctgcctccactgatctgcacagggaagggaagtggttggtaactctctgggcactcaggatctctacacttggtagttgcccagcagcccatcactggtgtctttcacccc

SEQ ID NO: 601 - DNA, 415 bp, Homo sapiens
  misc_feature 161, 174, 186, 270, 368, 389, 412: n = A,T,C or G
ccgggcaggtacctcaccattccacctcattattcaaagctcaatgttgcagcccactttaagctgacaatattgatgactgcctctaaaatacaggacagggttacttataaacctttatacaggccggagtttcagatatatctgtggtagattatggnttcaactttggangttgagaagaantaaactgaaaataaatttccctacccctcacccccttgccccctgctttttttttttgagacagggtctcattctgtcacccangctgcagtgcagtggtgtgatcacggctcctacaagcctcgacctcctgggcttaggcaatcctcctgcttcagcctctcaagtagctggaaccacangtaccttcggccgcttctagnaactagttggatcccccgggctncag

SEQ ID NO: 602 - DNA, 535 bp, Homo sapiens
ccgcggtggcggcccgcccgggcaggtaccgggccttgtgccaaacaccttagatgggttatctctgaacttcacatcagtcatatgaggtgggtaatatcattatctacattttacaagtatggaaactggggattactgaggttatttgcccaaggtaacacagatggtagattctggagccagagttggaaactgggtagtttgctccagacccaatgatctagcatcctagatgtggtccattagggctctctcttttcatccgtttgtaaaagagaagttttcactttcttctcaaaccattgagaaacaacttggaactggaagtgcaaagggagaattctaaagaaagcgttttaaaaaggagaaagaacaagaaagcaggacaccatttcctacctttggtattctccaaatagttggcaccaattctcataaaaaaaaaatggcacaaaatggtgcatatttttacacacacacttttgtaatgttcatttaagatttgaccacaatttaattaattaaaatgata

SEQ ID NO: 603 - DNA, 144 bp, Homo sapiens
  misc_feature 144: n = A,T,C or G
aggtacctaaggaggcaacatctaaactggtcttgaggaacagccgaagatggcgaacgggacagttcctgaaaagggaatgtgagatttggcaatcaggatagctgtagcctttactacggaaaagtcagtggtggagacagn

SEQ ID NO: 604 - DNA, 335 bp, Homo sapiens
  misc_feature 228: n = A,T,C or G
aacatacttagggcaattggagctccccgcggtggcggcccgagaagggcattctccctacttgtgtgtcatcttagggactctcactttgaccctgagtgtgataggaaccatggggaagtctgagctgaggttggacgtgaaaggtctcatgttttaacagggtcactctggccccctccactgagaacaggctgaaggtggcaagggactgagtggagagacctnttgggagaccactgcagcaagtcaggtgagagctggaggtggcttggcccaatgggtagctgtgaggtcgagagcaatggctggagccaggaaacctctgagtacct

SEQ ID NO: 605 - DNA, 412 bp, Homo sapiens
ccgcggtggcggccgcccgggcaggtaccatttggaacttatttttatttaagttttagctcaaggttctccagaatctgggagttgagaaaatgccaatggaaataggaaatatgaaatatccaggatcaatggtagacttttcttcttactgtaacagtgctctggggcacatttcttaccttgctatttttttggagaccaagaaaatattgcatctatgtccatccctacatagacctcacaaagcataggtcaaattctaataggcagccatgattctccaattttttgttcacaaataagtcgactgacttcctaattggagtcattgggggtaaggagcaacggacaatgtcaggagaggaccacctcacaggtggacttgtgagggggctgggaaaagaaaaga

SEQ ID NO: 606 - DNA, 417 bp, Homo sapiens
ccgcggtggcggccgcccgggcaggtactttgtttttcaatgcaggacttctgcctacttcaaagaaaggggttcaaaagtttctcaaatgatttttaagtaaaagtctgttagattttttaaattagtaactgaatatgtatagatttcaaaagttctatacacatatatatatacacatatctgtgtgtatttttttaaaacctaaacgagaatattctgcatccttacgttgtcatttttacttaatactttgtgttacttcttacttttgataaggtagaaacttgcttttggtaaaaaacaatttgaccattaatttggtcataagaaaacaaatgctgctaccctgtgatgcccagtgtctaataaagattttttttttttgaggccaggctggtatgatcttggctcact

SEQ ID NO: 607 - DNA, 423 bp, Homo sapiens
  misc_feature 16, 19, 25, 26: n = A,T,C or G
cactactatagggcgnatnggagcnnctccgcgggtggcgggcccgaggtacgctccagcattacctctaagcaaaccttcaaatatggctactgtagaagcacttctctcagcagcacccctcactctttcctcaatgagaaaagaagttgaggccccaattgcatcctctttactgatccacccaaaacaaactccctgcaggaaagtagagggataagatttccaaaggagatgctgaagagtaaaaagcaatcacacttcaaaataggactttacaaataattaacaacagctccagatccatcctgttctcttctctagaaccactagaaactctcagatctgaaactgtatcatagattacacacctacatatcccactccatgatacacatgttgaacttcctatgtccatatcca

SEQ ID NO: 608 - DNA, 407 bp, Homo sapiens
ccgggcaggtaccctgagaacagcaataatgcacaaacattactattccaacagctgcattgaaacacccttggtaggattgggaaaaagatggattattgccatttggacactccaggactgtccattaatactcctgactaatggaagatgataaagattgggcaagaaaaatgactgcagcaaacgccttggcatcttcaacttgtcacctttagcaagaggcctcttcaacagttcttggactgtgtttggcagccaggcactctcagaacggcaaggagacacagctaacatgatctttgcaatgcaacaaaacaagcgatcttgaggcgacagagtccaaaagatgacagaaaattcatccaacttcctgaagcatgtgatgccaccagaaagccttggca

SEQ ID NO: 609 - DNA, 415 bp, Homo sapiens
  misc_feature 14: n = A,T,C or G
ttagggcgaattgnagctccccgcggtggcggccgaggtacctactttgtggggttattctgagagttaaataagaaccaaggagatcctaaatatattcatccaaccaataggtatgtcatttttgtagttgcttaggagttatttctagatgaaacagacaaaactctgtgcttttatagaacttattttctaagtgggggcaataaatataaaaaagttaccatgacttccacaatggcagcatgaggacctctgtagacctacttctcagtgaagtgagcataactgattaaaattatgtaggtctttgggatcccagagcacctttagtctcgggagacgctcttgccagccagaaatgatgggaagaattgcataagcctggacccacgacggcagggaattattggag

SEQ ID NO: 610 - DNA, 432 bp, Homo sapiens
  misc_feature 375: n = A,T,C or G
ctacttagggcgaattggagctccccgcggtggcggccgcccgggcaggtactttattattccgagagagaaaggctagcccgaaaaagctgttacctaagcagctttagcataattgctctctgcacagaagaaatctctagaaatccaattttctctttggataagactaaagaaccaattaaagaaatttgagcctccaaaattcctgtggatcacagcccacatggcacacggggcagcccagtctgcattgctgagggctgaatatctgttttcccaatcacctttctttgcttctttctctttcttgagctgcttgccttttagctgctttattgctcattaatatgtccactgggaaattgaaagagnggaagggaaagggggctcttaactcttggcattttctacttatttagtgggcttttg

SEQ ID NO: 611 - DNA, 435 bp, Homo sapiens
  misc_feature 331, 361: n = A,T,C or G
atagggcgaattggagctccccgcggtggcggccgaggtactagacctccctgtctcattctcattgaaacattttcttttggctttcataaacctttcagaccaatcttccctcctccttctacttgctccttaaatgtcaatgttttccagggttccattcctacattttgctcatttcttcatccaaccctcattcgctcttgactaaaatttgaccctctcagaatcaagaggagtttgagatcctctttgctacccacacttgttttcaaaccattacttcccctcatcttaaaaagccctctgggctgggcacagtggctcaacnctttgggaggccaaggtggcagatcacttngaggccaggaagtttgagacaagcctgggtgacagagcaaggattctgtctcaaaaaaaaaacaaaaaaccaaa

SEQ ID NO: 612 - DNA, 421 bp, Homo sapiens
  misc_feature 222, 250, 378: n = A,T,C or G
ccgcggtggcggcccgaggtaccaccatgcctgactaatttttatatttttagtagagacgggatttcaccatgttggccaagctggtctctaactcctgacctcaagtgatccgctcacctcggcctcccaaagtgctgcgattatagctgtaagccaccgcgcctggccaggagggtctatatttaatgtcagacatgggcccctctcttacaagagcanggtcccacccaagtccaagaagggtttngagatggcacagaagggacacacataacgaggcagagactccgatccagtccactctgaaaaaaatccagctccccagagttaaggaccctcacaccccccttggaacaaggcctgggtgttctgggnaatattcaactcgaggtctgcttcctcgctcgggccttcctct

SEQ ID NO: 613 - DNA, 434 bp, Homo sapiens
  misc_feature 1: n = A,T,C or G
nctatagggcgaattggagctccccgcggtggcggccgaggtactggtagtttaaaatatctcaatatgaaatggctgaataaaatcatcacattttcattttatatcaatggttctgaaagaatgatgcaagaaaaatctctaaccttagtgagatgaattttgtaaagttcagtgaattccttccatgcacatttgaagccagtccaggtttttcgacctaagtggcctcagtcatgttcagcacctaacgaacaaatcatctcctgtctccaatgtcattaacaactctatgggtgaatgaggatcactaactgtggagtaagaaggaagcaggcagccctgtttccaataacatgttgtgattcaacccacaatcaaatgttataaaaacctaatgtcttaaagttaattttggacccttggaaatgttc

SEQ ID NO: 614 - DNA, 429 bp, Homo sapiens
  misc_feature 177: n = A,T,C or G
tagggcgaattggagctccccgcggtggcggccgaggtaccctggagccttgagcaacgttcttttgcattatgccaggaagaactgctggcaaatgtaagtgggcttagaattcatgactgcagtcagcagcagttgtgtaaatctagggagagactggtatttgacacctgcaanttcctcaaggttaacagaagtctcaaaaagcccaagccccagattttgtaaaatacatggtttcaccccaacctaatcaatgtcaccaagaaaacttgtaagtccaataagacaaacaatagttaagtctgcagaatatttccatatagatttcagcaagtatatttaactcttaattctctgctttcaatatcaattttgtttttggagccttttttcttggggttaaaggttacccggaatggctttttt

SEQ ID NO: 615 - DNA, 470 bp, Homo sapiens
  misc_feature 65, 197, 201, 204, 422: n = A,T,C or G
aattggagctccccgcggtggcggccgcccgggcaggtacacagttaatagtagtattgtataangccatgacagtgtagctccctttcattgttttaaacatgtctgtcttacttgagatcttcctatttaaagcgaaaaaagaaatttttttaatttccaaggataaaagctggggtgataatttttaaaaaacntggncantaatttttgcgtattattttcaggaaacgaaagccagcattgtaataaattccgttcatgaagataatttaggctttcaaatatggaagcaaagttctaactaataacctttaataaaaaatattcatggtagcacattaaaacatttgttttaggatatattattgaaaatggctttttaacttttcttgccttcactgggggaagaggaaaatggnaagttgaaagcacattattcctgtaaaaaacagctaagcattcaattt

SEQ ID NO: 616 - DNA, 434 bp, Homo sapiens
  misc_feature 166, 191, 252, 304, 370: n = A,T,C or G
ccgcggtggcggccgcccgggcaggtacgcggggagtagtaatgccacattactcagttgtgagggggaaggtagactctttccagacctttgataaaggggctgctcaaaaaagccacgaccttgggcctctgctaaaaccatggctttaagtaaggagggagcntgattttttaaaaaaccttatcccntctttctaatctcttatgtcctgtgagtgtcacccattgagtaaacccaagtggaagtcancaggaaagtagctgggatgatgcagtctttacagggtctctctgtcacccangctgaagtgaaatggtgtgatctcggctcactgcaaccttctgcctcctgggttcaagtgattctncagccccagccttccaaatagataccagtaaaagatgtcatctggccaatttgtgtggaaaaaa

SEQ ID NO: 617 - DNA, 361 bp, Homo sapiens
  misc_feature 151, 272, 276, 292, 298, 302: n = A,T,C or G
aggtactactattttggttatgttgtttattgctttattttgcagatgaaaactccgctattgagagaggtgaaatattctatcccagcagaaaatcttccagtgagtcaaacatctgctagtgagttgacaaaaaaaaatcttaggagcntctttccgtcagcacttggaaatattcttattgttactgttggatgacccctggtttgtagacaccgcctatagggcaatggttgggttcagaattacagagcgagaggcataagcatcanaccncagagaaacatattantaaaancctntgagaaataaaaatgagatcccaaatccaccaactgactgaacagaaccccttttggcc

SEQ ID NO: 618 - DNA, 407 bp, Homo sapiens
  misc_feature 5, 379: n = A,T,C or G
gactncttagggcgaattggagctccccgcggtggcggccgaggtacagaagggggaaatatgccccaaatgtcaatttcctcttgcagcactatatgtggctctcacagtggaagacggaagcaccatgaaatgtgggatacacaagataactgaaaatgtgagatgttcttgatgagttggtggtgacctttgcaaatttctccagttttgaggaattgtccttgagcaagtcagtccaagcagattttattttattattttgagacaaggtttcgctccatcacccagagttgagtgcagtggcacagtcatggctcactgtagccttgacctcctgggctcaggtggattctcctgcctcagccccctgaccagntagcctgggaacctacagggcaccatgc

SEQ ID NO: 619 - DNA, 331 bp, Homo sapiens
aggtacatttgaatgagtaaataaagcaaagtcatatacatatatcactcttactagcagtcctggtaactcccacctgtttgttattggagtaggggtggcaataagctgctgttttataaatttaaggagtctcaggggtcatatcaccagttccaaaaaataaacgaattatgagattaacagtaaaatgtccattttaatgaaaatcctatgctaattcaaatgaggaccctactgttgaagaaacatttgctcttcacacataaacatgaaatataccctaactcatttatgagctgcagtcttgaatccaggcacaatatatcac

SEQ ID NO: 620 - DNA, 114 bp, Homo sapiens
  misc_feature 17, 33, 39: n = A,T,C or G
aggtacttgagggcatnattaaaatcagccagngttcantgagagacttaatgatggatttaatagtattaaatgggcaaaaatgcccttggcctttacatgctcatttaaaaa

SEQ ID NO: 621 - DNA, 591 bp, Homo sapiens
  misc_feature 159, 167, 183, 190, 193, 196, 225, 262, 271, 272, 279, 283,287, 293, 307, 319, 321, 328, 330, 343, 353, 359, 361, 366,374, 380, 390, 391, 412, 414, 417, 423, 429, 433, 436, 438,445, 457, 471, 490, 496, 501, 523, 530, 542, 543, 546: n = A,T,C or G
  misc_feature 551, 553, 568, 573, 578, 582: n = A,T,C or G
cgcggtggcggccgaggtactccttcatatagtagtaggttcagaaactcaggctaaggaaagcatccagaaaacattgtctgcctctgcaacagtttgtggatagctctgtaatatgtagtttctgatcttgtcaatctgtcttataaactctaaatngtgttggntcctcaccttggcttngtattancantanaaaattactctattcttctttattagcantgcatgggcattttcacttcaactcctcatttaattngaagttatnngattttnctcngagnacaatntccactcctaaatnaaagtatactgncncaagttntnttgctcttcactngaattattgnttatgncncttgnttcttggntctcanttttcttcannactagggttcaaccttaattntncantttcanccttangtanggngnaagtggnacctttttctangataaaaaaaaagntttttcccctttttggttncaaagnctaanaaggttcctattccccaaccgnccatacnaattattttttnngtnttttncnccaggggttctcttnaattngtggncaanattttcccc

SEQ ID NO: 622 - DNA, 456 bp, Homo sapiens
attggagctccccgcggtggcggccgcccgggcaggtaccgcgggaaggacagattctcagtcttgaagaggcagcacggtaaaggggaaagatcatgagttttggggccaggttcccttggatattgtggggtccccacacttctggatgatgttggataactctttgagacttaggcttcacatctgtaaaatggaaatacttatttttcagaagttgtcataaacactaaatgatttgacttatatcaacctaattcctactggctcattgaactcagctcagctgtcccctctgttcggatgccttccccagtggggcttagttaggtatccctgctggataccctgccaagctcttacacattccctctgccataacactcattctttgttactgaattataatttcatgttcatttgtttatctctcatactaggctgtgagttccctga

SEQ ID NO: 623 - DNA, 292 bp, Homo sapiens
  misc_feature 262: n = A,T,C or G
gttctcaagaaatattcatgtaataagtgaataattgaatgaatgaatgactaagtgaaacttctctttacaacaagcaaatgtaatagccctttctaagctctcatcatcctattgtccttggtggattcccaccacactcagaattccttttcacctttccatgcatatgaggccccacctaatcaggtgctggtcttcttagctttctgtctcctaccactttttgtcttgcttcgggaactccactgtcttttctgtnataggaacatgctaagggtattcttcatag

SEQ ID NO: 624 - DNA, 444 bp, Homo sapiens
cactacttagggcgaattggagctccccgcggtggcggccgaggtacaaatttgatcattttattatatctgaaacagactaaaggcaggttgactgtgaggggtggcaggaagcttttgggtgatagatggtgagtggtctgtagtgctggttattccatatagacttctgtcaaagctcatggaagtgtttgtttaaaatgggtaaatttattacatatgttatacttcactagtgaaatctttaaaaactatgctggtggcttcctgtcatcttctgaataaaccctgattcttctttttcaaggtaaacaagaacttctggtgtgccttccacctttcccatacctccctccatcctcacctctaacctctccacttcaaattgccatctgcacctcagttgcgagctgccccctactcgtgtgctcttgcctctgggtc

SEQ ID NO: 625 - DNA, 906 bp, Homo sapiens
  misc_feature 460, 484, 490, 497, 502, 520, 522, 524, 535, 544, 570, 574,575, 582, 586, 613, 653, 656, 661, 663, 693, 697, 724, 732,768, 777, 790, 795, 815, 816, 820, 822, 831, 840, 881, 891: n = A,T,C or G
tagggcgaattggagctccccgcggtggcggccgcccgggcaggtacaatgtcctatatttacgaggaccttactactcttaaatcgctgtcgttcaaaaacaaaacaatttttttcagcgtgttcttatatgcccattactgagctggtccctggggatgcaaagacacatggacctcattgttttcctccaggaattcacttggaaaaagaaacacgggagatgctgcctagaatccttgatgcctccgaagttagactggagttggattaacccggcctctctctgtggaaataggagatggctagaagaagtgacatcaatcagccacaactgcttcagcctcataacgtcggagcaatggtatcagacttgatgcaaagactccccggcatatgtggcttttttttttttaaaatgtagtgaaaaaattcaagtcacagccccaccactggactntcaaagaacatttcatggtttggntggatnaaagccnttgcncttgctttggtaaaaaangntnggaaaatttanaaataaggnggggttaaaaaaaatcactggtttanaacnnggacttnaaanaaacatccttggccccctatttccctncccttttggattttaaaaaaacactttaaaatggaagaanagnctttntntaaaagaaagggccaaacttcaaccggggnaggnggaccctttcctttttttttttttttnccccaaanccggggaattgcctttgggcctggaaacaaaatttnttggggganaaattttggcaanggacntttctggagccccctttggnnaaananacctggtgnaaaggcccnccggcccaatttggggggaaacgggttctttttaagggagnccaaaacccnctttttaaggggggg

SEQ ID NO: 626 - DNA, 396 bp, Homo sapiens
ccgcggtggcggccgcccgggcaggtaccctacctgtaatatttgtattaataatatcttattagcattttaattagaaatttaatattaatgatttggaatcagtagttttcaacaattttaatagtgcaaatttatttgtagtatttgatggggagatatggtgttttgtgactatatttacaactggatgtatctgggaatatctcaaagtttctcccaaaaggaaaacatttctattacaaatatgtgacttgtgaaaataatttgtaattcttttcaatatatctcatttttttttttttttttttgagacagaagtcttgctctatcacccaggctggagtgcagtgggggcgaatcttggctcactgcaacctccgcctcctgggttca

SEQ ID NO: 627 - DNA, 590 bp, Homo sapiens
  misc_feature 590: n = A,T,C or G
ccgcggtggcggccgaggtacgcggggacagagagaaggttaagagcaacaagatgggaggcagctgcatggaacctgtcccactgaggaagtaaaacagagttttactcttgttgcccaggctggagcgcaatggtgcgatctcggctcaccgcaatctctgcctcctgagttcaagcgaggagcaagtgagtagctgggacaacagccctacctgatggactggacttctgcctggattggagtttgatcatgcctccatatgggtgtttaccaggcgtatgcattgaacctgagtttgtcccttcaatacaaggaaaatctctgccgcttagtgattttccaagaaacatgagcttctgcctttcaatgaggaagatactcagaagtcatgttcgagcactccggaaaatgtccttggagtttcaacatttctttggtcttccacatttcattttgtcctgattaaagaggaagccagttgctgtttgtgtggccatgtgagcaggcaggggagatggtggctgcctaaaagccaagagaagtggccctcaaagatgaaatctaccttgctggtacctgcccgggcn

SEQ ID NO: 628 - DNA, 409 bp, Homo sapiens
  misc_feature 56, 342, 394: n = A,T,C or G
ccgcggtggcggccgaggtacttttttttttttttttttttttgtatttttagtanagacagggtttcaccatgttagccaggatggtctggatctcctctgacctcatgatccacccacctcagcctcccaaagtgctgggattacaggcgtgagccaccgcgcctggccgggtcaggctctttctaatctgtttaaaaccatatcacccagaaggtattcagtatatacttatttaaatgaatttgaaagtcatatgagcagcatggacttactactttaaaaaccacattattagaaacctaacaccttggaagctctgcatattctgaatgaagaatntactaaaccactcagagggaaatagttattaaccattttaccacagacgacntaaaccaactaccat

SEQ ID NO: 629 - DNA, 414 bp, Homo sapiens
ccgcggtggcggccgcccgggcaggtactaacattcaaaaaaccataaatatacatccacttaaaaagacacattccagttacgatacccttcttaaaacagaagtctgattattttatatattatctgatactgttactggcttgctattttgtgagctataagaagtaaactgatggttaaaatactataaccttgaaaatatacactaaccttcattatccaaaagaactgtcaaaaaacatagaaaaacagaaaacaaaccttttgaaagctttgtttcttctaccgctttggttagatgcccttcgacgatcagcttctctgccaaggaaaataaaccgttaccatccaagcccaaactgagcagcatttccctggagctgggcagtgtaacacattccatgaccaaat

SEQ ID NO: 630 - DNA, 587 bp, Homo sapiens
  misc_feature 571: n = A,T,C or G
ccgcggtgggcggccgcccgggcaggtacatttgttgggggcgtgacattaacatataaccacttagagtggacatgcagttagagaaaagtcaatgagctggaaccaagctgggaattccaacatgtagaagttaaacacaagaggaggagccagcaaaggaaacagaaacagagcttccagcaggtggggggcatttggaagaaaacgatgccatagaagccaagatgaaatagacatcaaggagagggaagtagtcaattgttttgaatgctatgaagaaagataagaataggtaaatagtccttatatttgataacagaggtcactagtgatcttgatgaggggtttcaatagaatggtgggattatatacctccctggattcaactgaggtaaggaaggcatacagaatagagacaggcactataaacagctctcataattgcattctagcaattagcacactgtctgatgggggaggtggctcaatcttttcttgcataactgaatgaaatgagtaaactatctatccatccatctatccatccatcccttcacccatcctttcnttcatccatccatggg

SEQ ID NO: 631 - DNA, 409 bp, Homo sapiens
  misc_feature 13, 15, 20: n = A,T,C or G
ccgcggtggcggncnggggncctttgggcttttggtttctagaacaccaatgagtatatgctcattaagatagtttgatgcaataaatccttattttacttgcctctattactgcattgtaaactgttgtctactttgtcttcttgaaatcctacacctcccccagcccccacatttggcctatggaacattactttatcctgattttccccctaaccttctggcaatgcctctcagactccttccagaactacttttctctgttttccttttaatgatgacagtttatgcaattgtgtcttcaaacttataacgacccagacaatagtaataacagtcaacatttactgaattcttacttgtgttaagtgctgttatatatgatattttaatctttgtaaaatcttat

SEQ ID NO: 632 - DNA, 425 bp, Homo sapiens
ctatagggcgaattggagctccccgcggtggcggccgcccgggcaggtaccataatttagttattgctcagtggttgaacatttaggttgcctctagatttttctatttattagaaacattcagggtttctagatttttcagttttataaggaacattccagtgaacactttcgtggaagacttttgcaggaatttcaacacctaattttgttacaaccctaactttctccatttgttttgatgagtagtaaatttttattttgaaaaagtcttaaggcaaaataaatgtaatgcacttatatttcaaaaatataattgccatatactacctataaaataggagtatttcagggaaatcaaacaaaaacaatggatttttctcaaggcataaagaactatgcctggtatgacctgctccttttgg

SEQ ID NO: 633 - DNA, 418 bp, Homo sapiens
  misc_feature 8, 334, 382: n = A,T,C or G
tacgactnctatagggcgaattggagctccccgcggtggcggccgggcacgatggctcacacctgcaatcccaaagtgcaaggattacaggtgttgagtcaccgtgcacggccccaagagatggtggtggtggtttgtttttttttttaacagtagaactgtttttttcgtttccattatttatttcctgattcacttataaatgttggagctattgaagcaattggaatttttttgaattatagttaacaatagtaaagatgtatcttaaaagatatagtagctttatttatcatttaatagtaatgtaatataaggccttacttgtgtgttnccataatttttacttttctgcccagtatgaaaatagcccaaaaagtgnactggaaaggccagtaaatttttcattattccccgt

SEQ ID NO: 634 - DNA, 408 bp, Homo sapiens
  misc_feature 345, 378: n = A,T,C or G
ccgcggtggcggccgcccgggcaggtacattacagagcatatgatctttcaaggttttgttccacatgtgttatgcatagtaactgctcatttctattaaaaatactcataaattgaatcacattacaaataagtgccatatacttaactgagcaatatacacacatacgcattcctgataggtgatacaaaggcaagaaattctgagaaattttaagattgtgatctgtatcatttggatggtatagcaggagtggcagagggaggaacgtttcctaagttcttcacttactggctcctgcacttaggtaggatcatgtcactagtgctggccaatgagccaanaagtatggtgtgccattttctggaagtaagggnaaaacgctatgtagcaatttcctaatttta

SEQ ID NO: 635 - DNA, 416 bp, Homo sapiens
ggagctccccgcggtggcggccgcccgggcaggtaccgtaaaatacttgttttcttaactatatctcccactgggctcctggaggacgtgatcatcattgttccccaagtgcctctcatatatttggtggtctataaatatgaaataacaaatgaatgatggtgctatgaattcaaccacacccacacttcttttcaccatctgagagaaacagaaggatccaaatcttggtaatctaaatgcatgcctccaatacaaagatctttaataatcaccaggcctgaaccacttcttagcaattggccaggctgcaaggagccgtatcaactccttactaggacagcttaagcccctgaagaaattatctcatgcactaaggaatgaccttgacataaaagcctacttgaaaataaagc

SEQ ID NO: 636 - DNA, 425 bp, Homo sapiens
  misc_feature 15: n = A,T,C or G
tatagggcgaattgnagctccccgcggtggcggccgaggtacatttgttgggggcgtgacattaacatataaccacttagagtggacatgcagttagagaaaagtcaatgagctggaaccaagctgggaattccaacatgtagaagttaaacacaagaggaggagccagcaaaggaaacagaaacagagcttccagcaggtggggggcatttggaagaaaacgatgccatagaagccaagatgaaatagacatcaaggagaaggaagtagtcaattgttttgaatgctatgaagaaagataagaataggtaaatagtccttatatttgataacagaggtcactagtgatcttgatgaagggggttttcaatagaaatggtggggatttatataccctccctgggattcaacttggagggtaaggg

SEQ ID NO: 637 - DNA, 535 bp, Homo sapiens
  misc_feature 160, 182, 205, 228, 230, 234, 255, 284, 285, 305, 307, 317,322, 324, 329, 337, 346, 351, 357, 373, 382, 390, 407, 416,443, 448, 478, 483, 499, 505, 520, 524: n = A,T,C or G
aggtacattttacactgtcagctatgggttcagtcagatatgcccataaattcatttatgaagaagagctccctaaacttctaatgattttttcctggtggttcttatttagctccaaaaacttatgttttttttcttaaaaaaatcccataaaatatanttccatttatcagataacattnactaatttggatggatattcacntccaaggaaagggaggaatgttncntcancttcttaaggcacttatttantaaaaaaaattccaccaggggccagttcnnacttttttcttaggaaaaanantattgcccangttgnanttccnttcttagnccctttatntggcnattccncttgggggtattttanttttaaaancccagggncttgcttggaggtcatntccctttgnacaacccctggcttctttgatggaacncaaantggccttcccaagggccttgccttttaatnttttnggggccacttaattanaacctntttacaaaaaaggtnttgnaattggggggc

SEQ ID NO: 638 - DNA, 337 bp, Homo sapiens
  misc_feature 9, 53, 64, 77, 150, 160, 168, 185, 187, 191, 214, 216, 263,280, 303, 311, 314, 318, 319, 326, 328: n = A,T,C or G
gctccccgnggtggcggccgaggtactggatatttttgcatataaacttgcanttatatttcanaaattaatagttnttgacaggtggcttttctgagaagagaaattgaaagtgtcacaaaataaaaaaagatgaaatgaagcataatntaattgtcanattttttnaattttctagccaacananaatngaaggattctgttcaaatattantnaaaattgaaaataaacttgtgcttatattttgtttgcaacacactanttaaatttgaaccctgngactagattatctttaccgaaangatggaangtngtanntttactngntttttaaaa

SEQ ID NO: 639 - DNA, 288 bp, Homo sapiens
  misc_feature 19, 79: n = A,T,C or G
ctactatagggcgaattgnagctccccgcggtggcggccgaggtacccagacctgcaagagttgtctcaaacaataacnacagtatacaaatgttaacccaatcttaattcagaacagcttaaatgtaataaggtaaccttggaaactatggcgagctctcaggtagaagctagaactctgtttcacgtgacagaagcagacagattgttaagaatctgttatgagtggagtcccatgccagggcttaccctggccaccacttactagcggaagccttgagcaaattc

SEQ ID NO: 640 - DNA, 431 bp, Homo sapiens
  misc_feature 1: n = A,T,C or G
ncatacttagggcgaattggagctccccgcggtggcggccgcccgggcaggtacaataattagatcatggtatcaattcaaacaaagaaattgatgtcctgggaactggttatacaaatacattatttcttctctttgaaatgagtagaaggaaagggaactaataataaaatatcacattattgcctacccactaaaggcagcctgaaattttacaaaacagtcttcctggggtcgtctcgatggtgagatataactgcctttcataatactagaagtactgagacagaagaagaggctgggacccatctggattggctgtaggtaaatttgtttgtgctgggggctgcgttgggactgcttgacgcaaaaacacaacattggtctgagtccgaggtgtcccatttgatattgggggcctggggactggc

SEQ ID NO: 641 - DNA, 389 bp, Homo sapiens
aggtacaaaagcctgacgatatggtcttgaggggtaatcctaaggctgttagaccgaaattaaaacaaaccttaccagtagatctgtgtttttaagacagctctatttaagaggaccatgctgattataccaagagataagccccacagaatgtaagggtgatcacttcagcaaacatgggcatggcattgcaattttctagtttttcacctcacagaagagcaaagatctcacaatcacttcgttaaatagcagcggattcctcaagacatacagtccgtggtatgcatgagcctgagtaagaggttgactttaattttttcagccttgaaaataaaaaaagttaaatgctcacgtatataattggttcaattatcactaaaataaag

SEQ ID NO: 642 - DNA, 438 bp, Homo sapiens
  misc_feature 2, 177, 195, 371: n = A,T,C or G
tncttagggcgaattggagctccccgcggtggcggccgcccgggcaggtacatttgttgggggcgtgacattaacatataaccacttagagtggacatgcagttagagaaaagtcaatgagctggaaccaagctgggaattccaacatgtagaagttaaacacaagaggaggagccngccaagggaacaagaaancagagcttccagcaggtgggggggcatttggaagaaaacgatgccatagaagccaagatgaaatagacatcaaggagaaggaagtagtcaattgttttgaatgctatgaagaaagataagaataggcaaatagtccttatatttgataacagaggtcactagtgatcttgatgagngggtttcaatagaattggcggggattatatacctccctgggattcaactgaggttaaggaagggcat

SEQ ID NO: 643 - DNA, 430 bp, Homo sapiens
  misc_feature 358, 378, 417: n = A,T,C or G
cttagggcgaattggagctccccgcggtggcggccgaggtacatcatcgggaattcatgattaagtgactaaatgatttgtttctaaaacagagatgtatgctgtctgtggcaagggctgggagctgggcaacagctgggcagggggcacatcgccttaaagcctcatgcaccaaagagccaaacccgtgaagggcttttcttcagaaaagcaaaatacagcgctcacacttgcaggggtggcggcgcaggtgtggaaccctgtcttgatgcctaacgtgggggtcacagctatccgaaggcaggctccagagagcaccttgaccatttctgcttgttttctcccgtctatgccccancctgggcagtcactggcctntgatttaaagagttcgagtttggcggggttggttttgcntaattattgaccc

SEQ ID NO: 644 - DNA, 449 bp, Homo sapiens
  misc_feature 161, 257: n = A,T,C or G
ccgcggtggcggccgaggtactcctactcatatgcttcagttaattatatatgttgaacaggtaggaagcagtgctgtttttatttattttaatatgttattcatacatttgaagaattatgttctttctgtaggcagctgaattttttttttttgagacnaagtcttggtattgtcccccttgctggagtgcaatggcatgatctcggctcactgcaacctctgcctcctgggttcaggcaattctcctgcctcanactcctgagtagctgggattacaggcgcctgccaccacgcccggataattttttgtatttttagtagagacagtgtttcactatgttggctgggctggtctcgaactcctgccctcaggtgatccgcctgcctcagcctcccaaagtgctgggattactggcgtgagccactgctgccagccgggcagttga

SEQ ID NO: 645 - DNA, 210 bp, Homo sapiens
ccgcggtggcggccgcccgggcaggtactgacctccccactcctcccttaggtgtgtagaatatgagagaacgatttagccttcatttagcaagttccacagggaaaccagtatcttcaaggaacagccaggttttagtgaaggcgaggtaaaggcaggaatgttcagtaaagatgttgaggagtagaggagctggttcacagtggaatg

SEQ ID NO: 646 - DNA, 567 bp, Homo sapiens
  misc_feature 397: n = A,T,C or G
ctatagggcgaattggagctccccgcggtggcggccgaggtctccagcctgggcgacagagcgagactccatctcaaaaaaaaaaaaaatagctggtcatagtggcacacacctatagtccagacatttgggaagctcaggcagaaggatcacttgagcccaagaattcgaggctcggtgaccatgattatgtcactgcattccaacatgggtgcagaacaagactcccaactccaaagaaagaaaaaggattatgggtttaaaacacttggaaaggatgtaagcttgtaggaaataaaatatcactgtcctcttttgctcagggtcagcaacatggtaaaatgaggaattttagaaattaacttccaggaaaaaaaaaaggggagagagagagcangaagaaacacaaatatttacagttttgaaattatctactaattaggtgataagtagtgtgtagatagtggaaacagaataggatgcacagaagaatgttttgaatatagaaatgatcaaaacttgagcactgatcacaaatgctgaggcagacctgaagatggcacttca

SEQ ID NO: 647 - DNA, 408 bp, Homo sapiens
cactacttagggcgaattggagctccccgcggtggcggccgcccgggcaggtactttgaaagaattgatccagctgaattggaaaatgtgggaaggggatggggaagaggctgctccacctgagatctggctccaggacttacagcaaggggaacttgggcaagttaccagactgtctatgcctcagtttctttatcagcaaaacagaatcatcccataaactataaggtcgatggtatcagcgggtccccaaactgactgcacatctgagtcatgttaacaaacacattccaggccccacctgagccctctgaatcagaatccctgtaaggaggatgatgaacttgaatttgcactgactttcccagctgtttcttactctgatcaacttgggggtaggacccattg

SEQ ID NO: 648 - DNA, 423 bp, Homo sapiens
ccgcggtggcggccgcccgggcaggtacgtcatttgggccaattgttcagactctttcttccctctgaaaccattaaccaaagccactaataagtagaaatgcagagttaagagccccttcctccctctttcaatttccagtggacatattaatgagcaataaagcagctaaaaggcaagcagctcaagaaagagaaagaagcaaagaaaggtgattgggaaaacagatattcagccctcagcaatgcagactgggctgccccgtgtgccatgtgggctgtgatcacaggaatttggagctcaatttcttaattggttctttagtcttatccaaagagaaaattgggatttctagagatttcttctgtgcagagagcaattattgctaaagctgcttaaggtaacagctttttttcggctagc

SEQ ID NO: 649 - DNA, 398 bp, Homo sapiens
ccgggcaggtacgcggggccgggcgcggtggcgcgtgcctgtagtcccgagtaggtgggattacaggcatgtgccaccacccgggctaattttgtatttttggtagagacggggtttctccatgttggtcaggctggtcttgaactcccgacctcaggtgatctgcctgctttggcctcccaaagtattgagattacaggcatgagccaccgcacccggcaaaagccacatgttcttagcagttcttagtagtggtagagttaagtttgtctctggggctctttgttaccaccgctccagagttgcccattgaggactatcaattggaaatatgtccctgaggaaaaaatgatataccagttgattgtgtgttaccactcaagatacacaggcaacag

SEQ ID NO: 650 - DNA, 403 bp, Homo sapiens
cttagggcgaattggagctccccgcggtggcggccgaggtactataaaccaatgccatgtttttgtaaaggccggaatgaaagaaccacctggaatccgactcatggtgctaatactgaactcatttggcacaagttatttagattcaaaaaggccaccccaagagcactctctttcagtttgagcagaactcctgaaaatcatactaactacctttcattgtgttcttattatgagcaggatattgggataaagaacactggtttctctcatttaattccaacagcagtctggtggctcaggagctattaggattttttttgtatcgataaggagactgagggtcaaagaggttgacgtcacttgcccagggtcatagcaccaggaaagcagggagagttta

SEQ ID NO: 651 - DNA, 344 bp, Homo sapiens
  misc_feature 290: n = A,T,C or G
ccgcggtggcggccgcccgggcaggtacatgcatactcaatgtttagttcccacttataagtgagaacatgtggtatttagttttattcttttttatactcagtccagatttgtggctcacaggctgggtagataaagacttttgtgtccaaatttccaaccagtagctgctatacacacatatctgggcctgccgattttcccatttgcttgttgaagaatcgacttttatgaaagaatcaagatctgtttattttcctaaaacaacagtaatgacggaatcataagtngaagtgggtaaccatgggtccctgaatccagcttttctagggaacacactttct

SEQ ID NO: 652 - DNA, 301 bp, Homo sapiens
aggtacaaagcaaaatcaacatgctttttattttacctcattattacataaaaaatttttttgtagagacagagtcttgctttgttgcccaggctggtctcaaactcctggcctcaagcaatcctcccaccttggcctcccaaagcactggaattatagctatgagccactgtgctgggcccactacaccttttaaacaactcttctcctgtcacctctcaggtgttttattttagtttggtattatatttaagaattctttcttagtggcatacatttcatttctgtgatcagaaatcag

SEQ ID NO: 653 - DNA, 434 bp, Homo sapiens
tatagggcgaattggagctccccgcggtggcggcccgcccgggcaggtacatccattctcataatagaggtatctttcattaagggatgggacttcgaaagtaactgaaacacctgtgtgaagggatgtgtgtgcctgtttatggggaaggggttaagagaagaagaaagggattaaaatatctttctctttatatccagactgaaaacagtcaaaactaatacatttatacataaaagagattctcaaatacaccctgccaaatataatttataaagaagaagaatggcttataaataagtcaaatataataaaattgactcattgcaaagtaataaagctccatctgatagcattgggaataccgacttatgatttcagcaaatatttctgatttcactttagaaacagccttatattcccttaattatctt

SEQ ID NO: 654 - DNA, 437 bp, Homo sapiens
  misc_feature 14, 21, 77: n = A,T,C or G
cgaattggagcttnccgcggnggcggccgaggtacctgaacaaatcccatcaaggacagattctcagtcttgaagangcagcacagtaaaggggaaagatcatgagttttggggccaggttcccttggatattgtggggtccccacacttctggatgatgttggataactctttgagacttaggcttcacatctgtaaaatggaaatacttatttttcagagttgtcataaacactaaatgatttgacttatatcaacctaattcctactggctcattgaactcagctcagctgtcccctctgttcggatgccttccccagtggggcttagttaggtatcccagctgggataccctgccaagctcttacacattccctctgccataacacccattctttgttactggaattataatttcatgttcatttgtttatct

SEQ ID NO: 655 - DNA, 532 bp, Homo sapiens
  misc_feature 138, 141, 157, 224, 236, 255, 256, 274, 314, 318, 333, 336,353, 399, 403, 404, 414, 416, 436, 464, 489, 497, 500, 523: n = A,T,C or G
aggtacgatcttggctcactgcaacccctccctcccgggttcaagtgattctcgtgcctcagcctcttgagtagctgggattacaggcgcgtgccactgcgtccggctaatttttgtatatttagtagagatggggtnttnaccattgttggccaangcttgatctcaaactcctggacctcatggtggttccacccaccttgggccttcccaaagtgctgggngtatttaccagngccgttgagccccactcanngcttcagccctaccaaancaaatttttttaataaaactggacaacccttatttacctngaantaaaaaatttcctcntgnctttaaaaaattccctnatttttacataatttttttaaaaaggaattaaaggttattttacgntttnnttttttttananatttaccaaaattaactttncttggttttaattttggaattaaaaaanattttttaaaagtggccaatttttnttccaatnttnggcccctttttttttggccaggnattttttaa

SEQ ID NO: 656 - DNA, 451 bp, Homo sapiens
  misc_feature 141, 202, 342, 433, 435: n = A,T,C or G
ggcgaattggagctccccgcggtggcggccgaggtacttttttttttttttttttgagatggagtcttgctcagtcgcccaggctggagtgctaacctctcctttcatgtggagatggacagggatggcaggagcactgantgctcttgacaacaccattgaagatgatgctgacgatcagctaccctgtggagaaaggcangcccaggcttgggtgagaaggggagctcctttggaaagtcagggggtcttgtaaggacagcaaggatctctttgtcccaacctccagcagcctttatgggtgcttctgtgttggccttgtttctgggatggccatctcantgctgtttgctggctagcgattttcagaaaacctagatttttctaggcctgagccctgtttttgagaaagaagcttccctcctggttttgnancctcaaacattaatga

SEQ ID NO: 657 - DNA, 430 bp, Homo sapiens
cactacttagggcgaattggagctccccgcggtggcggccgaggtacagtggcatgaccataacttgctgcagccttgaactccaggattcgagtgatcctcccacctgagcctccaagtcgctgggattacagacatgtgtcaccatgctcagctatttcacatcttttgatgtgatgtgacacaaagtatacaacatcacctatgggtgtccatgccaaaaacgggaaatgtttaacagtgagttattatatgtaacatccagcttacaggaatgataggaagagaggaactagtgaaatgatgccacaaggaagcacacagataaatccagaaagttagaaattctgtaggacaaatggcctggtctcttcaacaactgttgctgataatatgacaaaaaagagagtaagaagagcatgaggcatgg

SEQ ID NO: 658 - DNA, 412 bp, Homo sapiens
  misc_feature 280, 305, 329, 353, 359, 398: n = A,T,C or G
ccgggcaggtacagaattgattgaggtggtgggtctagaattaagagagctggatgagaaattactatagtcatctaagaatgaacggtagagcagtcagaatgaaaagagaaaactaggtcttaagaccaaatgacatgaggccatgtgtggtggctcaaacctgtaatcccagcactttgggaggccgaggcgggcagatcacgaggtcaggagatcgagaccagcccagccaacatggtgaaaccctgtctctactaaaatacaaaaaaaaaattanttgggcatggtggcgcgcgcctgtngtcccagctgctcgggaggctgangcaggaagaatcgcttgagcccangaggcngaggttacagttagctgatatcgcgccactgcactccancctgacgacagagc

SEQ ID NO: 659 - DNA, 428 bp, Homo sapiens
  misc_feature 377: n = A,T,C or G
cttagggcgaattggagctccccgcggtggcggccgcccgggcaggtacctaacttattagggccctgataatcaaattagccaataagtaagaaaatgttttcttaaccacactgtaaattaagaggattcatattgaaatcacttttccattattgctgtcttagcctgctaaagttatatttagtgtagtgcaactaggcagggttgtgagagctgggaaggtagactgttgtattgggcagggtcagggcagataaaggaccaaaataatgcctgaaatgctgtattaacctgctctaccttgaactgctgtcttgaattggggggaaaaatgaagctctgaggggatggtgcacagggagaaaagagagaanctcaggaattgaaagtctcgatggagaagaggtgggagaaagaataggagg

SEQ ID NO: 660 - DNA, 250 bp, Homo sapiens
ctacttagggcgaattggagctccccgcggtggcggccgcccgggcagtatttggttttcaaaagaatcttatggagagcatttttgaaagtagatgtttggaaatctttccaacattatgtgatttttgtctctaaaaatgatgtatattgcttataaaaactcatatctgcacacttatcttagaaactgaaattcctaacctcttttagaaatcttccaaatggagaggttgagttttaaatatatt

SEQ ID NO: 661 - DNA, 365 bp, Homo sapiens
  misc_feature 41, 48, 55, 57, 58, 62, 64: n = A,T,C or G
aggcccgccgaggtacctgaacaaattccatcaaggacagnttctcantcttgantnngcancncagtaaaggggaaagatcatgagttttggggccaggttcccttggatattgtggggtccccacacttctggatgatgttggataactctttgagacttaggcttcacatctggaaaaatgggaaatacttatttttcagagttgtcataaacactaaatgatttgacttatatcaacctaattcctactggctcattgaactcagctcagctgtcccctctgttcggatgccttccccagtggggcttagttaggtatccctgctggataccctgccaagctcttacacattccctctgcc

SEQ ID NO: 662 - DNA, 411 bp, Homo sapiens
  misc_feature 173: n = A,T,C or G
actacttagggcgaattggagctccccgcggtggcggccgaggtacaaatatctatgagaagtcagattcagtggaaagtctgtgattatggttttgttttttaaatgaaattgaacatttaaactgcaaaacgtggggaatgaaaaagccatctgtcaggcactatatcccncaaaagaatccacccacttacaaataatccctgaatgtcaccactcttctttctattcatcatcctggtgttgtaaatggaatactcacaataaagctgccattagcagagtatccctgtgatctatccttaccaaccatgttgatctaaagttggaggtcactgtgattagaaaactcaagacaccaccccctgccccaccagggttgaaagggactgaaaagtagatttttaactg

SEQ ID NO: 663 - DNA, 206 bp, Homo sapiens
  misc_feature 2, 20, 25, 49, 54, 59, 68, 77, 86, 101, 174, 202: n = A,T,C or G
tncacttttaggggccgaanttggnagctccaccgcggtgggccggccncggangggtnacttatttnaaaattttnaattgaagnagggtaaaccccatngccacccgggcaagggaaagtttcaaagggggggaacaagaaaggggggctttggcttcccacttcttggganccccttattcttccttcttcaaccttcntttt

SEQ ID NO: 664 - DNA, 412 bp, Homo sapiens
  misc_feature 290, 332, 337, 393: n = A,T,C or G
ccgcggtggcggccgcccgggcaggtacttctattttttttttttttttttttttgtatttttagtagagacaagatttcactctgctagccaggatggtctcaatctcctgacctcgtgatccacccgcctcggcctgccaaagtgctgggattacaggtgtgagccaccacgcctggcctccagtatttttaaattaattttcttgctcaaaccagaattaagtttctcttaccctaactaagggaactttggctaagacaaaaaaacgacctgttacttaccttaanaaaaccaattttatttctgattattgcaaaagccacacaaanaaatntgcttggttgtttagcccctattatttttgcaaaaacccaaccattttaaaaggtnttttgacaaacctttttta

SEQ ID NO: 665 - DNA, 418 bp, Homo sapiens
  misc_feature 5, 17, 39: n = A,T,C or G
aggtnctttcaaatganaatggagttcagttttaccatntttaaaccccatgtagggcaaagtggagtcacaactcagcttgaattataaatataattgttcttgtaatggtgaggagatctacctttgaggtttcccagagtcaagatgaaaatcatcttttcactctggagaaaaacagctccttactggactgaggctgtcagacgtagacttgggtcattgctgggaagaaacatagaaaagcagcacagctcccgagggtccttttttcatcaagatgtgtaaaatatgggccttctctcttcagaagcaagattgcctgggcaagtcatcatccctcctgtctgtctccagcccggctgctcatgccagtggtctcaagcttcttgcatttgctgtgttatgtggtttttga

SEQ ID NO: 666 - DNA, 386 bp, Homo sapiens
  misc_feature 97, 279, 341, 357, 365, 374: n = A,T,C or G
ctatagggcgaattggagctccccgcggtggcggccgcccgggcaggtacagtggatatggtgagcactggttagagtctggatatattttgaaggngaactttactgaaggattacgatgtgaggtgagagagaaaaagagtcagggaatataacacagtttggagcctaagcagcttggaaggacggagttcccatttattttggtaaggaaagatggtttggggaaagagataagttttggacatgttatttttgaggtgcctattatacatgcangatgcatgtcatgttgagggcagaggtctgaacaggatgtgtaaatgtgagacatcaccaanggagtgagtctacttnaaggaaanatctgggantggaactggggt

SEQ ID NO: 667 - DNA, 385 bp, Homo sapiens
ccgcggtggcggccgcccgggcaggtacagtaagtgcactcttggctcactgtagcctcgacctccggggctcaagtgatcctcctgccttggccccacaagtagtgggactataggcacacagcaccatgcccatctaagtttttgtattttatgtagagacaaggtttcaccatgttgcccaggctgatcttgagctcctgagctcaagtgatctgcccaccttggactcccaaaatgctgggattataggcgtaaaccaccatgcctggccttaaatcaactttagagtcaacatctcttatcactgggagcttctgggagaaaactccatcaccgtggtggctctcttttcctggatgtggttgtggccccaaaataggct

SEQ ID NO: 668 - DNA, 272 bp, Homo sapiens
  misc_feature 241, 254, 270: n = A,T,C or G
ccgcggtggcggccgaggtaccacaatgctagggctgaggtctccgggatcctctgggcctttttcatggttgaaaaatgacagtggcagcttcattccttgtgcccagttccagagaggaggaatgagaaaggagcaaggagaaaaggctgacatctatgggaagccaaactttttcaggaatcccctgctcaggtttgctcaggcttgtttgacatcttactggtaagagcaccattgnatggccagccctntattcaagggaggctnaa

SEQ ID NO: 669 - DNA, 542 bp, Homo sapiens
  misc_feature 8, 301, 303, 313, 333, 335, 341, 356, 363, 365, 369, 371,415, 427, 456, 474, 482, 499, 524, 526, 540: n = A,T,C or G
atcgactnctatagggcgaattggagctccccgcggtggcggccgaggtaccctggcaaggtttgtcctgtcttggtagcagaaagaacttctcaaagtaagggcttcacactaggggagagttcaatggcccaacccagccatggccaccctgacaccatgccctgatgctagtccctgtggcctggcccacactgaaaatactgtggggacaacagaatggatttgcaagttaccactatctcttaccaactgtaaaaccctgggcacattgttgatctaaccctaatttcctaatctngnaaaggggganatttaaatggtcctggcccncnaaactnttttggaaaattaancagaaantngccntnttccaaacttttaccaaaagttgtctgggctttgaaaaccaganacctcattttantttcccggggaaccaatttttgggttttntttgggaaaaaccaggtngaagggcntttgggccatttgggtnggggcttcaaccacccttggtaaantncccttatttttttntt

SEQ ID NO: 670 - DNA, 342 bp, Homo sapiens
  misc_feature 3, 38, 73, 74, 111, 112, 120, 158, 168, 183, 254, 287: n = A,T,C or G
ggnactactggcttcccagtggttgggttgagtataancccccaaatatgagtaaaagaagaaaaagttaatnnaatcaccaagtcttgctcgcatattaaaaattggatnnatgaatgntcaatcatatgttttggctttggccagccagacgaggncaattattanatttgaactgcttanaattcttcaggcaagtcttgatggagcacttcttggacagttagaactttaccaggttcacaggagagctnagatgaagcgaacacctcatccacactggtttnctttggagacctttactgttgagaggtggttttcatagccgcaaaatgacaagtg

SEQ ID NO: 671 - DNA, 405 bp, Homo sapiens
  misc_feature 31, 43, 46, 127, 164, 219, 246, 253, 285, 301, 317, 364: n = A,T,C or G
tcagtggctttgcttttattaagctctgcantagagagcaccnaantgatggatatatttaaaagctgcatatttttagaaacagcaaaaatctagggcttgttccttggtgaaagaggtagggcantggttagaacctcctggctgactgtgggaattgattngctgctagaggagggtagattgggttttccaaagtctttttaagacccagaccanctgaaacaagggaagggccatggtagntgtttantcgcctgtggtaaaatggttaataactatttncctctgagtggttcantatattcttcattcanaatatgcaggagcttccaaggtgttaggtttctaataatgtggtttntaaagtagtaaagtccatgctgctcatatgactttcaattc

SEQ ID NO: 672 - DNA, 388 bp, Homo sapiens
  misc_feature 134, 138: n = A,T,C or G
taggcactgaagacttgagttttccaagctcagagagaaaaacagtcctcaagcacacattaacccttcctgcaccaaaggtggggtgcagccttctcaactctggcttctcctctattccagtctcttttggntttntatcccctagaaattgcattaacatttcttttccatattggctgtaaacattagaggtaaacccatgaaatggtgtttaaatggaaatcggtcctgcaggcttgtaaagtgcttttgtgctttctctcttactgctagagattcaactgctgtaatttcctcagaaaaactgactctctctttaattctcaaagctaatttggttataacataattctttcctttaaaaatcatatttttgtttgctctt

SEQ ID NO: 673 - DNA, 369 bp, Homo sapiens
  misc_feature 56, 215, 366: n = A,T,C or G
gcgaatttttctccccgcggcggcggccgaggtactcttgtgtatgtgcacatatntcatacatgtgtttgcacatgggtgcgcatatatatgtttgcatgggcatgtgtgtgtatttgggaatgtgcatgatatgttcatagaactgggtaatcatgatcttgactagtttttttagctgtccagttttggacattaaatttgaggtgcctgtngaagaagagagagggggccgggcacagtggttcacacctgtaaagccagcactttgggaggccaaggtgggtggatcaccgaggtcaggagtttgtgaccagcctgaccaacatggtgaaaccccatctttactaaaaaaataccaaaaanatt

SEQ ID NO: 674 - DNA, 386 bp, Homo sapiens
  misc_feature 335: n = A,T,C or G
ttagggcgatttggagctccccgcggtggcggccgaggtactgatctcctgttggcctgcttcatttgtcctgcagttgtcaatccagaacaatatggaataatttccgatgctcctattaatgaagtagcaccgatttaatctgatgcaggtaggccgccttttgcagcagttagcaatgactggcttctgaaagagggagatccccgaacaaagagcagccttggaaagtttgacaaaagctgtgttgccgctttccttgatgttgtgattgggggccgtacagtggagacccctccattgtcttccgtcaatcttctggaaggattgagcanaactgtggtttatataacctacagtcagcttattactctggtgaattttat

SEQ ID NO: 675 - DNA, 433 bp, Homo sapiens
ccgggcaggtacctaggggaatttctgagttcatgatatcgtaggtggtgtggaaacaagtcccagcataaacccacacagctggctgaatgaagttcaagtgaaggtcatgcagcatcaaagtagatgtgtgtcactgaaacttatggcagtggagtgagaataattttgaaattacttagattgtgagaaaatctggctgatgattagaagtgttgatataagaggtcagtttggagttccactcaaaattcatactaattttaatgttatggtattctaaactactagatgggtaaggggaagttataggattctgaacaataccattaagaattaggataggattttctactgtggtgtcacagaagaatcagagctagcaaattcttaaaaagaaaattttgattccccaagcccagggtaaaaatcc

SEQ ID NO: 676 - DNA, 365 bp, Homo sapiens
  misc_feature 133, 137, 158, 159, 197, 202, 208, 220, 222, 225, 229, 255,258, 262, 273, 279, 280, 310, 320, 326, 334, 338, 343, 345,348, 351: n = A,T,C or G
aggtaccttctcactagggttactgtgaaaattaagtgtatgtgtaaactgttcctcacaacccaagatattaaacactcagtgaatggtagcttacagcatcatttttattattaatagaaattctctcagncggngcacagtgggcttcacgcctnntaattcccatcaccttttgaggtagtgcccaatggttngtggntcgaanttatcactgtanantcngggnagatttcataggactcatacacttgnacncatnctttggggatntaaaanncccacgtttcttcttacctaaagaaaatancaaaaatatnccaatntttgcgcnccanttggntnggnccnaccattggcccctt

SEQ ID NO: 677 - DNA, 306 bp, Homo sapiens
  misc_feature 264: n = A,T,C or G
aggtacacaaaccataaggtcatgtaaatatcacaaagagagtatgcctgtgtaaccaccatgcaatctctgtttatcattgtaggtgatagccacctctgcccaagttggctaatacttgaaaaaaagtggcccagaactcacgtgctgcacattttctgaaattactcttgacttctgatttcatggcaactcttcttattttccagtgttgcttaaaattttgtcttattttttggtattcatttatttcagaggtctttnaggagacattaaaacaaacaaacaaacatgggttcattatta

SEQ ID NO: 678 - DNA, 443 bp, Homo sapiens
  misc_feature 12, 27, 29, 34, 42, 45, 51, 58, 389, 439: n = A,T,C or G
tactatagggcnaattggagctccccngnggggncgggccgnggncccggnaggggtnttggatgtttgaggtccaaactgaaaacccatcacctccttcccactgctatagcagcgttagccctggggttcattatctagccagttcacaccttctaaagtggggctctgaaaatgtcttacttccctcacagaccaaagcaatttctcaagcctcctgagatcacccaccaaccagagcaactgctgtcacttggaggtgcagctgaattcttctaattgtgacacaaactcttgaaactgtaaatgctgaaagattaaatggaggttataaccactcagaaaggttttacaagtaaaaagttaagttcaaatcaatagggtccttntattttcataatcctgtaaatgggttttaagccttctggcggggaaaagntggt

SEQ ID NO: 679 - DNA, 517 bp, Homo sapiens
  misc_feature 221, 396, 469: n = A,T,C or G
ccgcggtggcggccgaggtactcaaattggcttagatatccttgcctttaaaggctttgtatccgcaataactgctctctattgtccttgttaataaagtattattttcaccttattattactaatcttttctttgtaagtaaccacacctggttctatccaaaaaaaaaaaaaaagtgcctaagtatttgccctttgtggtaatacaatgcataatttanttaatctaggctatctttccgtgagaggtgattgtttctgtattatgaaatgtgttcacagtaaagcaaaatccacgccagatacctagaggcagacggagagccacttaccaagcaccgaagctgcttcaaactaaccctgacgcgactgtatagccactcccacacacaaggnattactcatgccaacttagcctctgagttataaccgcacctttcttttacaaacatggccctttattaagttnacattacacacagccaggcccgagagtccacccccaaaccccatgaaa

SEQ ID NO: 680 - DNA, 327 bp, Homo sapiens
  misc_feature 6, 8, 160: n = A,T,C or G
ccggtntngtactgtcttgggggagtttgggggctttccatgcccacgacaaagtgtaacatctggatcaggagacaggaaaccaaataacaggttctcctctcagccccaaatgagttataactgtaagcccgtgcatacaactttagagtttgctcancagaactgcccctagcagttggcactcatacatagaaattactttatagagattttggctaaggcctgacggtgttcagagctcctgattgaggttgcgtaaacccaccgagtgtccaagaagcacaacagaacaggccctcacatattctaccactatactgcaaa

SEQ ID NO: 681 - DNA, 415 bp, Homo sapiens
  misc_feature 59, 136, 384: n = A,T,C or G
aattggagctccccgcggtggcggccgaggtactttggcttttgtttctagaacaccantgagtatatgctcattaagatagtttgatgcaataaatccttattttacttgcctctattactgcattgtaaactgntgtctactttgtcttcttgaaatcctacaccttccccagcccccacatttggcctatggaacattactttatcctgattttccccctaaccttctggcaatgcctctcagactccttccagaactacctttctctgttttccttttaatgatgacagtttattgcaattgtgtcttcaaacttataaccgacccagacaatagtaataacagtcaacatttactgaattcttacttggtgtttaagtngctggttattatatggatatttttaaatctt

SEQ ID NO: 682 - DNA, 405 bp, Homo sapiens
cttagggcgattggagctccccgcggtggcggccgcccgggcaggtacgggacttgtctccaggagacatgtctgggaagaagagctagactggagaatcatgagcatgttcaggtgaaaacatgtgagtggataagagcaagagggtgagaacacagaccaagggggccaagggacagactgtgttcagtatttgggtatggaacttgtttttgctacttgctagttctaagaccaggctcagactctaacttctctgtaatgtgggaataatgacagcacttaccttataagattttacaaagattaaaatatcatatataacagcacttaacacaagtaagaattcagtaaaatgttggactgttattactattgtctggggtcgttataagttttgaagac

SEQ ID NO: 683 - DNA, 418 bp, Homo sapiens
ccgcggtggcggccgcccgggcaggtacattattcatacactgtaatggcagtaaaagaaccctagacacatggactcccttgctaataagtgcaccttcaaagcgatagtcattatttagcatttatcggaagaggctggccccagctctggtgaagggcagagaaggtgtgggtggcctcacgtgttctcaatgtcacaaaatgatagcattaaacagacccactccctcatggaaggcaatttgacgaccttctattgatattgcaacatgtgtctctggcagcagatctcaatccttatgtaagggatatgggaagacttcctccacttcatgtatatgctttccctaagcagatctggcagatgcaaatttatccatatcttttcatttccattgaaagttttaagtatcccc

SEQ ID NO: 684 - DNA, 400 bp, Homo sapiens
aggtacagatttgctacatcatatagcattttttagaccatattttagatctttccatcctccaactaagatttacctttttatatgaagctttaattactttccgcaacacttttgtcaaaatctgaagtcttttaagaaccaagatgtttctgatgtttattttaatgttcagggattttggaggtgaggggctagaaacactgactcctgcccctgactcccgcccctgactcccgcatttattttcataaatgaaaatagtaaaataaattcattaagggtattatgtggagaatagaaacaagagtaaaggactgagggtatattagagaaaactatcataattttggcaagagataatggacatcgaagcttgagtgaaaataactgttagaga

SEQ ID NO: 685 - DNA, 378 bp, Homo sapiens
  misc_feature 161, 182, 203, 216, 218, 234, 267, 283, 288, 295, 302, 311,317, 325, 334, 338, 357: n = A,T,C or G
tcgcggtggcggccgaggtacgcgggggcctcagggacgggtcttttgaagtgcctggtgtgacccatcttccgtgcttgaaatcgacgtagtggaccctggctagcatatttttccctgccaagattattgcaaaaaaggaccgattgtggttggtttanattattccggaaaaggaatgnttgttgggttatatagtcacngcaaagtaatcancnttgtaaaatgcgtagnaatttttcagggggcgtaacaattttctatgtnttttgtctcactgganaaaancaatcgnggcaatngttctctanaaaaangatggtcngcctcctgnttgnccccccattcaattctttnttccaagggcctttgggggga

SEQ ID NO: 686 - DNA, 451 bp, Homo sapiens
  misc_feature 4: n = A,T,C or G
actnctatagggcgaattggagctccccgcggtggcggccgcccgggcaggtacgggacttgtctccaggagacatgtctgggaagaagagctagactggagaatcatgagcatgttcaggtgaaaacatgtgagtggataagagcaagagggtgagaacacagaccaaggggctaagggacagactgtgttcagtatttgggtatggaacttgtttttgctacttgctagttctaagaccaggcccagactctaacttctctgtaatgtgggaataatgacagcacttaccttataagattttacaaagattaaaatatcatatataacagcacttaacacaagtaagaattcagtaaatgttgactgttattactattgtctgggtcgttataagtttgaagacacaattgcataaaactgtcatcattaaaaggaaaacagagaaaag

SEQ ID NO: 687 - DNA, 383 bp, Homo sapiens
  misc_feature 191, 274, 282, 350: n = A,T,C or G
cttagggcgaattggagctccccgcggtggcggccgaggtaccagggcaaagtgttatggaacgttttatccattttctcttatgtgctaagcagtcccgctagctgcttcatcctggaaatatagatgggagactgaagtcaaggactccaactgtgtgtttaacatctcccttgactcccaggaacctncaggtttggcatgtccaaaatgaaacacatgtctgtcttctatcaatatgttttgcccaacccctgcaacactcccacttccngaaaaatnacacaaacaaaaaaccacacacacaaccattgtgcctttcctctctcagggagtgccaagaaaccatntggttcatgccagaaacttggggagtcaacctt

SEQ ID NO: 688 - DNA, 594 bp, Homo sapiens
  misc_feature 518, 539, 561, 569: n = A,T,C or G
ccgcggtggcggcccgagggtaccaggctcagtggaagccaggaactggcaacttaatcctgttaatgagattttgggcaagtcgctcaatacccccttagcctgattttcctcatcagtcaagtggcaacaatcatttaccttccctgactcccagggtggttgggagaatcaatgaaatgatgcacatgaaaaagctttgcaaattactaagggctatctatgtataagcatatgtgtgtgtgcatccaaacatacacaacctaaacataccccaaaatgaacatcaaattacagagaaagactgaagtctgttaagcaaatttctgctcatcttttatgatccagttgaaatgtccctgcttctatttatttggctcagtgcctaaaataattagcttgaattttttttttaaaaaaagaatatagtcaaacaaagggaattgcacttatggcaagagtgggtgatcactgaacagtgagcaatgagactgaccaagggaagaaagcagttttgngtttctatccatcttcactgnggatatcaaatgctcatggagngaacaggnggcataataccctacccgcctaaaa

SEQ ID NO: 689 - DNA, 420 bp, Homo sapiens
  misc_feature 399: n = A,T,C or G
ccgcggtggcggccgcccgggcaggtacatctggcaaggggcacttttactctgatgtcgggtgttttagggatatgagttcagtgaataagtagctagagggaggagctagttaggtctcgattttaggcaaatgctaaatctacctcattttccatacctgtcttttgattgggatagctaaagaatttataccagatgaaccaagcaagccaccttcttacgacattaaatttggtggaccaagcccccagtagaagccgcttggggcccagcacggccaggctctcaccttttaggagcagcacccccgactaatccagcgaatggaatctggctatgaaagcagtgagaggaacagcagcagccctgtcagcctggatgcagccctgcctgagnagctcaaatgtctacaggtat

SEQ ID NO: 690 - DNA, 406 bp, Homo sapiens
  misc_feature 173: n = A,T,C or G
ctatagggcgaattggagctccccgcggtggcggccgcccgggcaggtacaagaaaaaatcaaacaatcacatcaaaaagtgggcgaaggatatgaacagacacttatcaaaagaagacatttatgcagccaacagacacatgaaaaaatgttcatcatcactggtcatcagnagaaatgcaaatcaaaaccacaatccgggaggtcttgccaaagaccacccgggctttccgggcaatgtgctagagcttctgggaagcagtcgtggccctttggagattccacggcttcggatccctactgcaggatgctccactgtgtctgctggcctctggcgttttgctgaggggtaacctccggaatggctagaaacaaggaacattgagatggcccagtcgtgccccag

SEQ ID NO: 691 - DNA, 419 bp, Homo sapiens
cgaattggagctccacccgcggtggcggccgcccgggcaggtacatgaaaggagattgagggcagggagctcacagaaccaagacagcaggacccaggattcagacctggaaaatttttatttcctggctggtttgtgtgccctcatgcatgttatttacagtgccatgttctttcacatgggaacactgacacaggtgaaatgggaggttccataggatgatagtgcaaaaacattaaagacaatcctagcagatgcagtgagttcaagggagagtccttgtggagtaacacgaaaggcccggtggatgagatgtatgaagatctaaatgcctgcagatagtgagctgtctgcaactaccacaaagcaaaatcatgggcgataactccccagggtagggatctggcctgagcatcccc

SEQ ID NO: 692 - DNA, 446 bp, Homo sapiens
  misc_feature 395: n = A,T,C or G
actccttagggcgaattggagctccccgcggtggcggccgaggtacatttgttgggggcgtgacattaacatataaccacttagagtggacatgcagttagagaaaagtcaatgagctggaaccaagctgggaattccaacatgtagaagttaaacacaagaggaggagccagcaaaggaaacagaaacagagcttccagcaggtggggggcatttggaagaaaacgatgccatagaagccaagatgaaatagacatcaaggagaaggaagtagtcaattgttttgaatgctatgaagaaagataagaataggtaaatagtccttatatttgataacagaggtcactagtgatcttgatgaggggtttcaatagaatggtgggattatatacctncctggattcaacttgaggtaaggaaggcataccagaatagagacaggcact

SEQ ID NO: 693 - DNA, 445 bp, Homo sapiens
  misc_feature 6: n = A,T,C or G
cgactnctatagggcgaattggagctccccgcggtggcggccgcccgggcaggtactgtttgttctccaaaatccagctttccgttgaaagtcaatgaaacatctctaaaatgcagacatacccaggttcattgggaacacagtcactgtgagtatacatgattatgtcctgctaaccctattgggaaagaatgctgggcttggccctagtaagtagacttgggttaaagttcacctccgccactaactagctgggaagttcaacttccctgagctgagtttgtcacgttagagaatattaataaatatgaaaattgtggagcagtcttaagtttaaaaggaactttcatggacattagctcattttgctgtgcccaccctgggaaggaagcaggacaggcaggcagtggcatccctgtcgtcaagcagcctgaggactgctgtg

SEQ ID NO: 694 - DNA, 259 bp, Homo sapiens
acttagggcgaattggagctccccgcggtggcggccgcccgggcaggtacccactccctcaattttctctaaagatctcatttcagacatttaaatgaatattatgctacacaacagggaaactcagatgtccatcccctccttattcattcaaacatttccactgccataatatggcagctgcaacgccaagaaagaagaaaggaaaaaagactaaaagaggtgaagaatgaaaaagacctcaaaagaaatttttttt

SEQ ID NO: 695 - DNA, 154 bp, Homo sapiens
agctccccgcggtggcggccgcccgggcaggtacttcttggagtgccattttccttgtaacccttagattaattcagattgactgagttctgtgtcagtggaaattgccagaattacatcattgtgctttgcatctagtttcacttttccaaaa

SEQ ID NO: 696 - DNA, 400 bp, Homo sapiens
  misc_feature 151, 159, 172, 193: n = A,T,C or G
aggtacaagaaacagaaatcaatgaggcttacttaagcaggaaaggaatctattggaagaatgtccaacagaattgatggggagcccgcagacacaaaatctcatatacgataaaaacttgcagacagggctacttctatcatcaaaatgntgttttcnacctttataaacncgtgtgaatagccaaccttangccaagcctggagggtaggtatataaaaggagtaaaggtcctgacagtaggaaaatggattgaattaaaattaaagtccgggtgtggtggctcatgcctataatccctgcactgtggaaggccaaggtgggttggatcacctgaggtcaggagttcgagaccagcctggctgacatggtgaaaccctgtctctagtaaaaaataaaa

SEQ ID NO: 697 - DNA, 448 bp, Homo sapiens
  misc_feature 2: n = A,T,C or G
tnctatagggcgaattggagctccccgcggtggcggccgcccgggcaggtaccaggagggtattgatgtttgaggtccaaactgaaaacccatcacctccttcccactgctatagcagcgttagccctggggttcattatctagccagttcacaccttctaaagtggggctctgaaaatgtcttacttccctcacagacaaagcaattctcaagcctcctgagatcacccaccaaccagagcaactgctgtcacttggaggtgcagctgaattcttctaattgtgacacaaactcttgaaactgtaaatgctgaaagattaaatgaggttataacactcagaaggttttacaagtaaaagtaagtcaaatcaaataggtcttttatttcatatctgtaatggttttagctctgcggggaagtgttagccagcttatattgaattagga

SEQ ID NO: 698 - DNA, 528 bp, Homo sapiens
  misc_feature 61, 230, 245, 270, 290, 308, 315, 384, 385, 415, 429, 442,443, 462, 472, 498, 515: n = A,T,C or G
ggcggccgcccgggcaggtacatgggactacaggcacgccccaccatgcccagctcatttntgtatttttagtagagacagggtttcaccatgttggccaggatgatcttgatctcttgacctcatgatccgcccctcttggcctcccaaagtgctggggatcacagggccgttgagccaccacaccctggcccctctatttatatctcctttaaagaagagcagtaaanactaatggagaggcncaaaaacttatttaatctaaaatcntttacccttaagccaccaanggggaaaacaaatggganatttgcnctaaatattaagggttgaatgaaagcattaccaccaaatggaaaccaggaaaaaccaaattcaaccatnntttaagttaaaaaagggccaaaaaaaattnttggaagcaccctntaattaaaagccnnattaattgggggtaaggcntttaattttntcttggggggtgggggggggaaaagnaaaaactggaaggaaanaaaaggaaaatta

SEQ ID NO: 699 - DNA, 424 bp, Homo sapiens
  misc_feature 4, 381: n = A,T,C or G
actnctatagggcgaattggagctccccgcggtggcggccgcccgggcaggtactaatcatactgaccattatgagcagtcatttctggatttctccactgtccctttgctatttggaatgattttgggcttcactttctttattaggttgactgagctgctcttggttaaaaaacaaaatttaaactttaaagaaaatatcatatcagcatttaattaagtttattgcaaattgttgcaataaacctagaatgctttcaacagttttgcaggattttgttgtggttgaaatgttagtttcatttggtttacttttagctttaattttaattttaccataatattttcacccaggatattttcataaatccattttttagnatggaatggtcaattttcatgaaaagggataaccattttccag

SEQ ID NO: 700 - DNA, 410 bp, Homo sapiens
ctatagggcgaattggagctccccgcggtggcggccgcccggggcaggtaccctacctgtaatatttgtattaataatatcttattagcattttaattagaaatttaatattaatgatttggaatcagtagttttcaacaattttaatagtgcaaatttatttgtagtatttgatggggagatatggtgttttgtgactatatttacaactggatgtatctgggaatatctcaaagtttctcccaaaaggaaaacatttctattacaaatatgtgacttgtgaaaataatttgtaattcttttcaatatatctcatttttttttttttttttgagacagagtcttgctctatcacccaggctggagtgcagtggggcgatcttggctcactgcaacctccgcctcctggg

SEQ ID NO: 701 - DNA, 376 bp, Homo sapiens
  misc_feature 89, 96, 132, 149, 165, 195, 217, 227, 234, 256, 259, 261,278, 347, 365: n = A,T,C or G
gactcctatagggcgaattggagctccccgcggtggcggccgaggtactttttttttttttttttttttttttttttttttctttcacnagtgttnatttgctttccaggaacttcagggaaaaaggttaantaatggagggaggaaanagggaggggttggcanatcaaacacaggacttaaaagtcctagatntaaaccttgaaatccccaaatnttttatgttntaaaaanatgtcccactttcaaaatccanttntntaaatagttttcaaaantcgggggacttgcaaaaatttaatttgcctgacaaaaattttcattggcattttctatatttcctagcnccaccctctatgattttnaatccctaaac

SEQ ID NO: 702 - DNA, 447 bp, Homo sapiens
cttagggcgaattggagctccccgcggtggcggccgaggtacatttgttgggggcgtgacattaacatataaccacttagagtggacatgcagttagagaaaagtcaatgagctggaaccaagctgggaattccaacatgtagaagttaaacacaagaggaggagccagcaaaggaaacagaaacagagcttccagcaggtggggggcatttggaagaaaacgatgccatagaagccaagatgaaatagacatcaaggagaaggaagtagtcaattgttttgaatgctatgaagaaagataagaataggtaaatagtccttatatttgataacagaggtcactagtgatcttgatgaggggtttcaatagaatggtgggattatatacctccctggattcaactgaggtaaggaaggcatacagaatagagacaggcactataaaca

SEQ ID NO: 703 - DNA, 349 bp, Homo sapiens
ccgggcaggtaccacaggacacctggtgggtagtcctgggatggggtcctaggtctctggagcctcctttctctcccagtggtcatcccaggatgggccgaggattctacacgctgtcagaacatgtctctctggttgcacagaacaaggacgtctgtctcgttcttacaggagtggggaccatttcacttgtcaaactgcctttctcttagaagcttctcaacctcaggccacggagattttaaagtgctctttggcaccagcaggggattgattttctgagttgggttttgttttgggtgtcagattcaaatatttggtgtgccttctgagggaattttgatgtttg

SEQ ID NO: 704 - DNA, 374 bp, Homo sapiens
  misc_feature 127, 299, 371: n = A,T,C or G
ctatagggcgaattggagctccccgcggtggcggccgcccgggcaggtactttttttttttttttttttttttttttgagacagggtttcaccgtgttagccaggatggtctcgatctcctgacctnttgatccgcccacctcggcctcccaaagtgctgggattacaggcgtgagccacccatccggcctaacgagacttatttttactcaactagatggcgttcattcatttgcttactcagctgtgccaggaattaagttgggcactgggaattccaaaaccaacaagacattctntgtcatcagggaactcacagcctagtatgagagataaacaaatgaacatgaaattataatccagtaacaaanaat

SEQ ID NO: 705 - DNA, 436 bp, Homo sapiens
  misc_feature 341, 361, 371, 398, 399, 402, 403, 412, 422: n = A,T,C or G
ccgtatcactactacttagggcgaattggagctccccgcggtggcggccgaggtactccagcctggatgacaaagtgacaccctgtctggtaaaataaattaccacgggcagataaagtgctcagtgagcccacactaatttgccacagaagggtggaagcaaattcaaggctgaaatctagctcttcatttcctgaaatcattcatgcccactctctcctggcatgaaatgctgataacctggtttcaattttaagcttaaatttacagcaaacagtgcaggtatctcagttcaatgccttggaacctcctctaaagatgattctactaacactcatttnaaaagtgagttgcaaaatanttttttacantttaacaaccccagttttatttcccannggnnccttgcttnaccttatttntaacttcaaaaaaa

SEQ ID NO: 706 - DNA, 443 bp, Homo sapiens
ctatagggcgaattggagctccccgcggtggcggccgaggtacaataatcttggaatattagatgccaatataagtggagcagtgtgtaattatttggaaagagaataaaagtataattcaataacttctatgcccagtcaagttgtcattcatgagattaagttcgcgagccaagacaacaaaaagacattttaaatatacaaccatttatgaattatacaactcaagcatgcttcctaaaagtggttgtgtcttatattccaaacaattgaaaaataaacaaaaataaagaactcgtatagggaagttatgaaatgataggagaagaaacacctgttttgcaagacagagacagagagaaacagagaactcctaatgttctttgttgaggccagaaaggactaacaggagctacttaagccaattaacattcacttattga

SEQ ID NO: 707 - DNA, 389 bp, Homo sapiens
  misc_feature 283, 368: n = A,T,C or G
ccgcggtggcggccgcccgggcaggtactctcacctgttttccgataagcacaaatgtgcacctgaaatttaagtttaggtttttgttgaacatattgcatgttgtaggtgggtaataagtgaatgtcattttaaaaacctagttaactgtatatatatattagcttgcactgcagtgtgttacttaggtatacagtgggctaaaaagtcaaagtaagctaaaatatgtgcaaagtatacattttattgtccctgacattaattactagaaaattgcatggcntgggtataaatccttacagtggggggtttattaggagcccaaaaattacctgaagggggatgcctggggtgaacctggttccgcnatgccccaccatctctttttc

SEQ ID NO: 708 - DNA, 433 bp, Homo sapiens
ttagggcgaattggagctccccgcggtggcggccgaggtacagaatttgatattaagataatttcctaatttaaaaactactctgccaactatggatactgaacaaaataaaagactatatgctctaaaccctaaaagttgtccatctaaattacagaacactatgtcgacaatgtgtaaccatagcaacattttcaactgtaatcagggtctaatcattgcaaatgtcatattgatctaaaagggtatgttttttcttccaacaacttactgacatttcacccatttcccaaaataagaacaatgaaaaggaaatagctgacaattgttaagttgccttacatcattcataatgtgcacagggacattgggagtcttaccttatggacccaaaatcacactttttgcgccaatggaaaacctttccaatcat

SEQ ID NO: 709 - DNA, 397 bp, Homo sapiens
ccgcggtggcggccgaggtacgagtagagtcagtagcttctcttgtcttatcccaaaggagatggtgcctgctcctgaagctgatcctggaatttggttggatttattaactctgtgcccagagctggccttctgatgggcagacttgtgccgggcttgttattaagacagggttttatgtctctagtcgtttcattcccattttctgttctatttggccagtctccattttgtgggtcttacctctccatgctgactctagatatttgagagcaaggttaactaagaccacattttagttctagttcattgtgcctgacacttcagttaggagggtttcaataaaggaatggtatctaccctgtccctaactggtgcaggaacctcaccttctttt

SEQ ID NO: 710 - DNA, 375 bp, Homo sapiens
ccgggcaggtacgcggggagaatcctttgcgctctcggtgcccccctccacgcccaggagcgtgggaaccctgcttaagggctttactagggaaaacggtgctggttcactggggcgcgtttccgggaaggtgaataccggtgaaagttatgctgagggtgaggtaggctctgacgacgcacttgcaggttgaatactggcacatcatttacttgttactcccgtgtggtgagtgcacctgtgggttttgatgccggatcaaattcctggaaagaggcgcgcattaagactgcggattgctgagctgcgcgacactccgtatttttccaaaacgtatttgtaatattctttcaacctgtttgcataatgggacat

SEQ ID NO: 711 - DNA, 409 bp, Homo sapiens
  misc_feature 357: n = A,T,C or G
ttagggcgaattggagctccccgcggtggcggccgaggtactattaaatttaatgagaggtaacccatgcaccggcaggaagttcaaggggacagaaggggcttgctccactctggagccctatctcctctcacctccttccttctagtttgacatgcgatcttgtctctctcttttataaagtgcttccaggcccttttgattaggatgctgtcctaaatccttcctaaagagaggttttggagccaccaacactgcttcactgtggaataaactttccttattaagattcttcattcactcataatcatctcctttttcctcactgctcattcatttatggagatagcacccatnatcatagcctactttgggtcaaatcatggtggatactccccacttagggaga

SEQ ID NO: 712 - DNA, 420 bp, Homo sapiens
  misc_feature 176, 180, 181, 185: n = A,T,C or G
ggcgaattggagctccccgcggtggcggccgccgggcaggtactgttcattcaatttttctgaatatttgaaaaattttaacataaaatcttgagaaaaagtaaactgtagatgctaatagcatacaaagtgcagtcagtgtggagaacagaagagaaagatgaattccaatgaanaagnnttcnccaggttttgtggaaggagatgggattgagcagaaacttaacagatttgggccttttaggtggaggagacaatataggaaaggcacaaacctggggaaatgcacaatgtatgctgaccaagaagtggtctggcgggtagagtaaggctggaagagactctgggagaggaacatgagaggtcccagggctctgaaccagggcaaccaacagtataaggaaggacagactggggctg

SEQ ID NO: 713 - DNA, 224 bp, Homo sapiens
  misc_feature 21, 31, 33, 44, 61, 124, 159, 188, 201, 203, 207, 210, 211: n = A,T,C or G
ccgcggtggcggccgcccggncaggtacaananatatggggtgnatacctggagaacgctntgaccacactatcatattacaagacactgaatggcttgccacccattgggtgccaatgatcanttatttattggctagctccaaatgggacatatttngcttttgtgggcacttaacttatggccgnggttacctccacnanttgnctnngacaatgttccct

SEQ ID NO: 714 - DNA, 316 bp, Homo sapiens
  misc_feature 2, 183, 190, 277: n = A,T,C or G
anacagggtttcaccgtgttagccaggatggtctcgatctcctgacctcttgatccgcccacctcggcctcccaaagtgctgggattacaggcgtgagccacccatccggcctaacgagacttatttttactcaactagatggcgttcattcatttgcttactcagctgtgccaggaattaanttgggcnctgggaattccaaaaccaacaagacattctttgtcatcagggaactcacagcctagtatgagagataaacaaatgaacatgaaattntaattcagtaacaaaaaatgagtgttgtggcaaaaggga

SEQ ID NO: 715 - DNA, 386 bp, Homo sapiens
  misc_feature 54, 61, 62, 74, 88, 89, 90, 195, 276, 293, 306, 332: n = A,T,C or G
gggcgaattggagctccccgcggtggcggccgcccggcaggtacagtaatctantatagtnngtgataactatncacttcataacatnnncttaatatttatatgaataaaatatagctccttttcaaaactgttttcaaaatataacttgtgcatttcttccaaattttaacaaactgtattccaaggtggatnatatcttcagagttaaattgaaatattttgataaatatgataagcttatattttagctagaaaccagaaaatattcatgantaacttttctaaggaangatcttaccctanagggaatattttgttaagaaagtgtnctctggctggcgtggtggctcacacctgtaatcccagcactttaggaggcccga

SEQ ID NO: 716 - DNA, 434 bp, Homo sapiens
  misc_feature 3: n = A,T,C or G
ctnctatagggcgaattggagctccccgcggtggcggccgaggtacctcaattatctctcataacacacagggtcccatgttggccattgcctcagcacatagtcaggtagccagcctctctgaatgcctggtagccaggattaaaataaataccctaggtattatctgcatatctcagggtcaggatatatcccatgactaagcccacaatcacagtaaattctttgagccagaccacattttggactcacatttaatgtaaatccacatcactccaatcctgcatgatggcacaggtagatttttgggagctggacaataaacaactattgagtgcatccccacggaccccaaaattcaattttataaagaagtatctcaaggcattaataaggtggcatcaaaggatggtcaatgtgggcattattttggg

SEQ ID NO: 717 - DNA, 669 bp, Homo sapiens
  misc_feature 536, 582, 589, 601, 609, 613, 637, 640, 649, 652, 655, 661: n = A,T,C or G
tatagggcgaattggagctccccgcggtggcggccgcccgggcaggtactctgtgttccgcctgctcaagttctagacttctggtgtccatagcaacccagcagaaaacatctgcatagcctttgggctgacgtgagttaaacttgagcagtgaagcagcataagttttatggtgcaaggcacactacagatcctcccttacccctcacatctgatccctctgcctatgctcagagccactgctatttctacaaatctacaaggcccagactgaggtgatgaccgggccaatctctggaatagtgtcagacaattagatactctttcctgtcttcaggagcccatctggaataaagctacttatcaagtttcaaaaacaacagaaaagaaatgagattgaggtggaaaacaacccaagtgttcatcaacagatgaatggagatgcaaaatgtggtctctccatattacagaacatgattcagcctcgaacaagaaggcaatgttgatgcaagccgtcaacacagatgaaccatgangatattatgctaagtgaaatgaccagtcttaaaaagcaattactgnatgattncacttatatganggacctanagtngtccaaaatcatagagacccgaantgnaatggtggntgncangggctngggaaaaa

SEQ ID NO: 718 - DNA, 414 bp, Homo sapiens
aggtaccctcattgtagccatgggaaaattgatgttcagtggggatcagtgaattaaatggggtcatacaagtataaaaattaaaaaaaaaaagacttcatgcccaatctcatatgatgtggaagaactgttagagagaccaacagggtagtgggttagagatttccagagtcttacattttctagaggaggtatttaatttcttctcactcatccagtgttgtatttaggaatttcctggcaacagaactcatgactttaatcccactagctattgcttattgtcctggtccaattgccaattacctgtgtcttggaagaagtgatttctaggtttcaccattatggaagattcttattcagaaaagtctgcatagggcttatagcaagttattttatttttaaaagttccat

SEQ ID NO: 719 - DNA, 330 bp, Homo sapiens
  misc_feature 330: n = A,T,C or G
aattggagctccccgcggtggcggccgcccgggcaaggtacacatttgacattgcataactaatttacttacttcacatttaaaaaacagatttgtgtatgtctgtgaaaaagacaatgtgttgatagtagaactataaggtagaaagttcctctttctccttctgatccttcccctgcccttttcctcaaatgtgactacaaactgttaacagtttgaagtcccctaagttttaaaatcaaatggaatgaaatggcatttaggaacttggaagaagtggaaaccttttttccagacctatgctaccaactgagtttatattttcaggcn

SEQ ID NO: 720 - DNA, 352 bp, Homo sapiens
  misc_feature 166: n = A,T,C or G
ccgggcaggtacctgatttgaccaagtcttcacactttaccttgaatgatcactaaccacaaatattctccagtgaatctctttaaattaaaaaaaaagcactatagtagcccacatatgcaagatttatcctcctgaagctgaaactactctttccttttcattnaaagtcactagtatatgtttcttccttgtaaactactcatttctaaaaagtcttatcagagttcctgaaacaggaggacaacaagtagagaaataagcaatttaataaacccagatgtgagcagatgttatgttcaggaatagtcttaagaagtggcttccatgcattcacttgacaagtattatc

SEQ ID NO: 721 - DNA, 369 bp, Homo sapiens
  misc_feature 308, 320: n = A,T,C or G
ggcgaattggagctccccgcggtggcggccgaggtaccccctggctgattccaagcctgtctttggctgttgcgggaccatagaaaccttgaacatctggctgtgactcccatttggtattggcctgaacattccaccttgcaaaccttattctaaagctacctcaatttatggcagtgatttccctctgagaagcttcctggcaagatttttagtttagatctgggttggttctaccctgcacagtaatctggcactgttcaggaatgctaaaactctgtatctcctctgcctgaccacattgtggnttacattgatgngactccacccccagtgttaggggtagcctaagactctccaatggaaaat

SEQ ID NO: 722 - DNA, 318 bp, Homo sapiens
  misc_feature 153, 157: n = A,T,C or G
ccgggcatggtactgggattataaggcgtgagccaccgcgtctggcctctaacgagatatttctaaaggttaggccttcagtcaagaattttaaagctggatcttagaggttatctaaactaacctctccatttcatagataaggaaaggtgnagtncccagaaaaaagcaacttggtttggacaagttcagaaagctaaacagtgactgtggatgtatgattctgtctcttaactcctaatccaaatgtcttctcactagataaggctgtgccttctacatttgaaggctcaaaccccatggatggattggagggaa

SEQ ID NO: 723 - DNA, 410 bp, Homo sapiens
ccgcggtggcggccgaggtacaatggtgcgatctcagctcactgcaacctctgcctcctgggttcaagcgaactcctgcctcagtctctcaagtagctgggattacaagtgtgcaccaccacggccagctaattttttgtgttcttcgtagagacggggtttcaccatgttggtcaggctggtctcgaactcctgacctcaggtgatccacctgccacagcttcccaaagtgctggcaatacaaccgtgagccactgagcccggcccctttgtccaccttggttgaatgtcaggcgttatttgtctcctaccacattagaaacatcctgcagacaaagccctgagctgaatcttctttggggccctaacacccatctggacaggtaagaggacaggcagtgaatgtttac

SEQ ID NO: 724 - DNA, 349 bp, Homo sapiens
  misc_feature 172, 199, 313, 323: n = A,T,C or G
ctcctatagggcgaattggagctccccgcggtggcggccgcccgggcaggtactacgagggactagctgtgcaactctgggcacggtgcttaatctaggccttagttttcatatttgtaaaatgtggtcaattgataaagacctctctcatagagttgttacgaggattaantaagataataccgtagaaagcatttancacagtgtctaaaaatagtaagttcttaaaaactgcaacctgttattatcatccaacttacttgtgactacatcccagatatttaaacactttggaaggtaaaagcaaaatatnaaatggtaanctctgaaatcacaccataggaaaaaa

SEQ ID NO: 725 - DNA, 428 bp, Homo sapiens
ctatagggcgaattggagctccccgcggtggcggcccgcccgggcaggtactatagtccaagattgaaatctgtcttattaatcattttccccttctgtctcccctaattgccttactgtatggttcctaatgacttctagttattcttttgttttccttccattaacttaaaggatatgtgtatcctctttttatgtattcatagaagatacctaaaggagatattgtatacatatatataagatgttcatatgttcctaattttacaataattgttaaatgttatgtagatacataccctgtaatatgtatatgtaatatgtaatacagagaagtgtgatatacggggaaattacccatttagtaaatcctttcaccagttggtttttctgtctttctgtgctatgtcctgtcttctctgaaattc

SEQ ID NO: 726 - DNA, 395 bp, Homo sapiens
  misc_feature 68, 83, 181, 239, 273, 275, 303, 312, 339, 341, 351, 365: n = A,T,C or G
aattggagctccccgcggtggcggccgaggtactttttttttttttttttttttttttttttttaaanatgggatgttgcagngttgtctgggctggagtataatggctattcacagatgtgatcatcacatattatagtatccaactccgagactcaagcaatcctctagcctcagcctntcgagtagctgggactacaggcatgtcaccatgcctggctcttacaattacacattgntattttttgactccacttaaaatagctgagattntnttgatcaaataaagcatcaattaaaggnttaaaaagncatacatttgtttttgggagggattancnccatttaagncattaaaaaggagnaacaggaaaaaattaagcccaaggtgcccc

SEQ ID NO: 727 - DNA, 391 bp, Homo sapiens
  misc_feature 350, 380: n = A,T,C or G
gggggcggccgaggtactaaccttagctaggtaaggtagggaaggcttggaatcgaccccagctcttctggcttcaaagctcctatacatggtgccaggacatataatccagtcctcctatcttcccacccagtggctctttgctgttataatgtccatcatccctaccctgtctttccttctccaccttctacttaggctggattcagtcctaattatttaccaagcaacagtgatgatgaagctaataatcatcatacatgtttgtgtgtagccctagttcaacctttaattactgctctctccccagcacctaggaataggtgccccagccccatttatttggggcntgaataaaaataattttgtctggaattaanatggaaaatac

SEQ ID NO: 728 - DNA, 436 bp, Homo sapiens
  misc_feature 82, 435: n = A,T,C or G
ctatagggcgaattggagctccccgcggtggcggccgcccgggcaggtacatgaaaggagattgagggcagggagctcacanaaccaagacagcaggacccaggattcagacctggaaaatttttatttcctggctggtttgtgtgccctcatgcatgttatttacagtgccatgttctttcacatgggaacactgacacaggtgaaaatggggaggttccataggatgatagtgcaaaaacattaaagacaatcctagcagatgcagtgagttcaagggagagtccttgtggagtaacacgaaaggcctggtggatgagatgtatgaagatctaaatgcctgcagatagtgagctgtctgcaactaccacaaagcaaaatcatgggccgataactccccagggtaggatctggccctgagcatccccactgggna

SEQ ID NO: 729 - DNA, 382 bp, Homo sapiens
  misc_feature 286, 366: n = A,T,C or G
ttagggcgaattggagctccccgcggtggcggccgaggtacttctagaatccacagctctgggagggctaccttaaattaacactggcagttctttgcaattagggtgccataaaagcagcacagttgactccaaaatggactgagttttggaaagatgtctgccagcaaaatcatatagactctcttgctgaagggatgaaaaattaataatgccttgaggtatattaatataaaaatatgtgaccaagcagtgtaattaattcccctttttcctcaaaatgtancctttttttttgagatggagtttcactctgtcacccacgctggagtgcagatggtgccgatctcagctcactgcaacctnaaccttctggggttca

SEQ ID NO: 730 - DNA, 388 bp, Homo sapiens
  misc_feature 81, 229: n = A,T,C or G
ttagggcgaattggagctccccgcggtggcggccgaggtacttagtgtagatatttaaggctgatcatttggatggatcangacagaccatgtctcaaagcatgctggttgtatgagctaaggcaaataatgtcaaatttttagcactgacttgagggttcttgtgagagttaaaggagataagggaggccaggccgcagtggctcaagcctgtaatcctagcactttnggagcccgaggcaggtgggtcacgaggtcaggagtttgagaccagcctggccaatatggtgaaaccccatctctactaaaaatacaaaaattagccagtcatggtggtgtgcgcctataatcccagctactcagggaagctgaagcagggagaaatcac

SEQ ID NO: 731 - DNA, 320 bp, Homo sapiens
  misc_feature 159: n = A,T,C or G
ccgcggtggcggccgcccgggcaggtactgaccttatacaataaattgggtagttttccttctccctttattttctgaaagtttgtataagagtgttagttcatttgttggtgttccattgatataaatatatcttaaagttttcatagaatttaccantgaccttttgagtattataaaatgtccttttttgcctcttatactctttgtcttgaagtctatgtggtagcattaatatgggcacgaatcagctttcttatgcttattatttacataggtttatcttttctgtcttctggctgtcttaaagatttttcttt

SEQ ID NO: 732 - DNA, 415 bp, Homo sapiens
tagggcgaattggagctccccgcggtggcggccgcccgggcaggtactactggcttcccagtggttgggttgagtataagcccccaaatatgagtaaaagaagaaaaagttaattcaatcaccaagtcttgctcgcatattaaaaattggatagatgaatgttcaatcatatgttttggctttggccagccagacgaggtcaatttttagatttgaactgcttagaattcttcaggcaagtcttgatggagcacttcttggatagttagaactttaccaggttcacaggagagctcagatgaagcgaacacctcatccacactggtttcctttggagacctttactgttgagaggtggttttcatagccgcaaaatgacaagtgcaagttgagtagatcagtgtttatcaaccca

SEQ ID NO: 733 - DNA, 377 bp, Homo sapiens
  misc_feature 3: n = A,T,C or G
ctnctatagggcgaattggagctccccgcggtggcggccgcccgggcaggtacagcattattagctggggctttcactgaaaaccccagggtctctttctattgtccccatatggttggagtcacaagagtgggagagatggccaagctctctgcagaggatcctggcagcagcctgaaccctcttgctacttccatcaaaggaaaaaaaaatcaaatatttacccccacgagcttataatattacagagaactccaccatcctgccctgcaaaatatcctgggatttgactaatactagagctgcttttctagtccttgagtgactaggaagggaagaaaccaaaagcttgactcccctgcaagcagtggagtctc

SEQ ID NO: 734 - DNA, 430 bp, Homo sapiens
  misc_feature 14, 380: n = A,T,C or G
gcgaattggagctncccgcggtggcggccgcccgggcaggtaccaagaggagagagctgtccaaaagtggaagagatcgtttctggcttaaggtgcgatgaaacaaaacaggagacaccaaaaagaagtgcggaaaagctaggtctcagagtagggcggcaggctgaggagggccgcgctgaggaggaagtggatgggtgccagggggtgaactcacagggagaccctttagaaggggatgactgcctgatctgtttccatggactcttctatttttattaggattatccatttctcttcctacaagctcttttgctttttgtccacccttaagttataatgtatattactgtttaaaaacattttaaggtgaatacagnaaggtattattcaagggaaaaaatgatgactattaaggtagttttgggta

SEQ ID NO: 735 - DNA, 188 bp, Homo sapiens
tagggcaattggagctccccgcggtggcggccgaggtcctgccctcaatggagctcacagtctagtgggggttgaaagacaggatatagacaataaaataaatatgtaaaatatttgtcatgttacattttgatatacaacatgaagaaaaattaagcaaggaagagagatagggagtaaagggtgga

SEQ ID NO: 736 - DNA, 629 bp, Homo sapiens
  misc_feature 233, 249, 252, 254, 255, 265, 285, 287, 300, 315, 322, 325,331, 336, 338, 343, 359, 390, 396, 401, 404, 406, 408, 417,432, 442, 471, 475, 479, 486, 500, 501, 514, 526, 539, 545,548, 568, 571, 577, 590, 591, 600, 604, 606, 610: n = A,T,C or G
aggccgaggtactttctccattttaatcctggaaattaggcaaccttctgggttaaagcaagcgttctccgccactgactaacagtgagtgtataatggatctgtttccccacagatagccagctgtctgcattaattacaggactgccatgcattttctgggtgaagagacctttttattttctgtgttcaggcctttgtttcctccatttccctaaagtaccttaaaaagnttggccaacttcctcnttntnncaaattggcntttggaaccaccttttatgncncaaaagtaaaccncaaaataccatttanttctctnttncaaccncccananttttnaaggaaaaacaaccanttggttaattttaaaaaaccaaggtttccangccaanctaantantngnggaaggganggggccaatttcccntggacctttncgtttggccttcccttggggggccttggnaagnaacnccccaanaaccaccccctttnncctagggattttntaatttttttgnggcaaaatttaanaattgnaanttaaaaaattatccaaaaanggnccaatnaggtaaggtttannggggcctantttngngttnggaattctttaaaaaacca

SEQ ID NO: 737 - DNA, 413 bp, Homo sapiens
  misc_feature 8, 145, 153, 398: n = A,T,C or G
ccgggcanggtactgggaccttcacactgcacaggggagcaagaacctcttctcttgcctctgctttgtgggattttccaaaatcctcctggcttcttttcccttcccttccttcttcccagagcaggggccagctttacctcanttggtaanggccacacaccattggggtgggaagatggtcaaaggtcctctgcttggacaagttgctccctgtcttcattcctctggccaaggccagtgttaggtggggactggtgagctgtctggccccacagggctaagctttcctttaggtgggtttatcccacttctcaacagtctaacaaagaacagattccacaagcccacttcgtctcttgctgcaagctatgccttccgattctgccttcattagnaaataagggtgatat

SEQ ID NO: 738 - DNA, 418 bp, Homo sapiens
  misc_feature 357: n = A,T,C or G
ttagggcgaattggagctccccgcggtggcggccgcccgggcaggtacacctataaaatggaatgttaagtaacattaaaaattatgtggaaaattaaataaatgttcatgaaaaaaaaaactacggaactgtagcctggtctcacacagggcctttgccttgtttgcccagggtccaggttaccaaggttagggagagactgagcacaaagaccgtgaaccccttaccacttaaccctgatgcagggcaagggggcatcggctggactgagcgcagtgtgggtgggaggccttgcgttccatgagcctgatgctcaggagcttgtgagctgccggtgaagtgtccctctatggggnatgccagcctggaggaagtttttttccaccagagggagtggttttaattaaccctacaggg

SEQ ID NO: 739 - DNA, 244 bp, Homo sapiens
  misc_feature 213, 223, 225, 231: n = A,T,C or G
ggcgaattggagctccccgcggtggcggccgaggtactcaggctttcaaagggttgaggaaaggtcttttgtttgaaggaaggagtatctgaacatgtttaaatgcaaagctgtatgtgccaggagtgtgaggctgtagctagatcaagtcatttatcaagggagaggtcctagggcacaggaaaaggggttcgtctttgggcaggacaggcncttggcaagnanggtaanggaagcgtgtgtg

SEQ ID NO: 740 - DNA, 416 bp, Homo sapiens
aggtacctacctgcggtatctgatcagtttctgcctagtcagatgtgccctgttgctgagcctgcttgggtggggagcatgggaaaatggggcaagtgcttcatgagggagctgttctcagccgccccctctcccaactccccagctctctctccttgtcctgtctcctgtttctgggctctaatcctggtcaggcccaatgccccttgcctgtgatgctgggtctgcagttttgctcgccgtcctcgctttgccttcttgcccgccacttccagcattcctcctctgctcagcttctgagctggtgtcaggtttctacctgcctggccactgagcccacctgaagatgtctggccaattccttttagcctctgccttctcaccatgccagggatgcttattcatggtgggaccac

SEQ ID NO: 741 - DNA, 414 bp, Homo sapiens
  misc_feature 3: n = A,T,C or G
ctnctatagggcgaattggagctccccgcggtggcggccgaggtacatttgttgggggcgtgacattaacatataaccacttagagtggacatgcagttagagaaaagtcaatgagctggaaccaagctgggaattccaacatgtagaagttaaacacaagaggaggagccagcaaaggaaacagaaacagagcttccagcaggtggggggcatttggaagaaaacgatgccatagaagccaagatgaaatagacatcaaggagaaggaagtagtcaattgttttgaatgctatgaagaaagataagaataggtaaatagtccttatatttgataacagaggtcactagtgatcttgatgaggggtttcaatagaatggtgggattatataccttccctggattcaactgaggt

SEQ ID NO: 742 - DNA, 210 bp, Homo sapiens
  misc_feature 171: n = A,T,C or G
tcgcggtggcggccgcccgggcaggtactttaggctgagaaataaatagaaggtgagaaaaaagaacagtctttatagtcagtaagagtgaaaagagaaagatggtagttggggaaagacagatggggagaaaggttggctggttgttaataaaacagtataaaggatgangcaatgtattataaatgcttggatgggaaagaaaacctt

SEQ ID NO: 743 - DNA, 153 bp, Homo sapiens
  misc_feature 1: n = A,T,C or G
nctatagggcgaattggagctccccgcggtggcggccgaggtacttgcccctttcaaagtatatcattttccaaattatcttatatttgtggagaatatagctgaatggcacataaactatcttgcttatatacttttagatcactgtctttt

SEQ ID NO: 744 - DNA, 414 bp, Homo sapiens
aattggagctccccgcggtggcggccgcccgggcaggtactttgagaaggaaatactgggttgtaatcatggataaaatatgcaggggaggggaggagattatagatattaatatagagtttagggtggcattaggcaaggatgacatctgaatatctaacttccattttacattgccatgtaagtctttttgcccagtgggtttgggggacattgaggcagaactcctggaaaatagaaggaagtgaaaggtcactggtctctccaataatcttgatgggaaggactagacaacaccattagcaaaatgtgcctcttaaaaactcaagacacaagcattatcttcatctcactgaaataacagctacatcctttattaacatgagaaaatcgaaaagcttaagaaaattgtcc

SEQ ID NO: 745 - DNA, 365 bp, Homo sapiens
  misc_feature 171: n = A,T,C or G
ccgcggtggcggccgcccgggcacggtgagagcaaagaaatgtgatgagccagctaagctgaccagacttgtctggcaacctgcatggagtagaaaatgggagagcattttcacattttcatatttccccccttggtcattctctctgtggccagagcagagttattatanttttgggggttgcactgaagaaagggtttttgaggctgggcgcagtagctcatgcctgtaatcctagcactttgggagaccgaggcgggcagatcacctgaggccaggagttcaagaccaacctcaacctggccaaaatggcaaaaccccatctccactaaaaatagtaaaaaattagcagggtgtggttggtg

SEQ ID NO: 746 - DNA, 352 bp, Homo sapiens
ccgggcaggtacccactccctcaattttctctaaagatctcatttcagacatttaaatgaatattatgctacacaacagggaaactcagatgtccatcccctccttattcattcaaacatttccactgccataatatggcagctgcaacgccaagaaagaagaaaggaaaaaagactaaaagaggtgaagaatgaaaaagacctcaaagaaatttttttttaagaggctgggtcttactctgtcacctagggtggagtccagtggtaggatcatagttcattgtaaccttgaactcttgggctcaggcaatcctctcacctcagcctcccaagtagctgtgactacaggcct

SEQ ID NO: 747 - DNA, 479 bp, Homo sapiens
  misc_feature 3: n = A,T,C or G
ctnctatagggcgaattggagctccccgcggtggcggccgaggtactggtagtttaaaatatctcaatatgaaatggctgaataaaatcatcacattttcattttatatcaatggttctgaaagaatgatgcaagaaaaatctctaaccttagtgagatgaattttgtaaagttcagtgaattccttccatgcacatttgaagccagtccaggttttttgacctaagtggcctcagtcatgttcagcacctaacgaacaaatcatctcctgtctccaatgtcattaacaactctatgggtgaatgaggatcactaactgtggagtaagaaggaagcaggcagcctgtttccaataacatgttgtgattcaaccacaatcaaatgttataaaactaatgtcttaaagttaatttgaccttgaaaatgtcttttgagttaagattagtcacaccctaatgtattaattcctcgaaaaattt

SEQ ID NO: 748 - DNA, 464 bp, Homo sapiens
  misc_feature 183, 186, 292, 419, 423, 434: n = A,T,C or G
ccgcggtggcggccgaggtacttcattcctttttgtgctgagtaatagtcagttataaggatacaccacgttttgtttatgcattcatcagttgatgaacatttgggttgttttcactttttggctattgtgactaatgctgctgtaagtattcttgtatgagtttttgtatagatgtgtggnttnaattcccttttgagtggtatacctaaggaaggagaaactgctggggtcggtatgggtaactctatattcaaccattttgaggaaccaccacacttttttcaaagtnggccacaccattttacaatcctggctagcaaccgtattgataatcctatttctctgcattcctaccaaacacttgccatgtctgtctttttttattttagcccatcttttggtggggtatgaagggngggnatctgcttggnggtttttgaatttataatttccccttaatg

SEQ ID NO: 749 - DNA, 334 bp, Homo sapiens
ctatagggcgaattggagctccccgcggtggcggccgcccgggcaggtacaaatattactataccaaggtgtagaggagtatgtctaagcctgtaatgatagcaggtggcaaggtggaggtagatggccttctgtggtagttcacggggaggaagacagtggatccaagcaaataagaaaggccacattttttttttaattttgcatctcaaggtattttagtcaaaattttttttttagttttccacaagcaaacgattaccgtaaaatataaacctaatgtattctttaggactaagtgtgccttttctctatatgctaagaggtgtaaagt

SEQ ID NO: 750 - DNA, 336 bp, Homo sapiens
  misc_feature 203, 279, 283, 284, 303, 305: n = A,T,C or G
gggcgaattggagctctccgcggtggcggccgcccgggcaggtacaagggttcccttttctccacatactcaccaccatttgttattgcctgtctttggatacaagccattttaactggaatgaaatgatatctcattgtagttttgatgtgcatttttctgatgatccagtgatgttgagcaccttttcatatgccctgtangccatttggaatgtctttctttctgagaaagtatctattcatatctttcacctatttttttgatgaagattattangatnntttttcctgttagagttgntntaaactccttataattctggtgattaattcc

SEQ ID NO: 751 - DNA, 383 bp, Homo sapiens
ccgggcaggtacaaaattatctttattcagaagatcacatagcagcatgttcataatcaaaaacattttaccttagcaataaacaccagtcatttatgcaagagcttcccagggttggtagatatttttattgcttcattttgctctagttaaagaaatggaaaagatgcttttaacttattatcaatcctacatcaggtgtcaagaaatgcaaagcattagaaagagagagggaaagagggatcttcaatattctctgtaaaggagcaaattctgacatggtcatctcagacaccctcttttaattccaaagtctaaccttacaaaagcagagaaaggccgggcaccggtggctcatgcctgtaatccaagccactttgggg

SEQ ID NO: 752 - DNA, 424 bp, Homo sapiens
cgactacttagggcgaattggagctccccgcggtggcggccgcccgggcaggtacatcagcgccacaccgcagggctgtccacggtgagctatgaggctggagatggttctggagcagtgaactgcagaggaaagaaggctgccctacccctgggccaccaatcactagcagtgtgacctccggcagcttcttctcctgccaaatggggatgtttgcttcactgacagaaacacagtgggtgaaccgggagtgagcggcccacttggctgaccacttaccaacatttcggcggggcctcgtgctgagacctctccccaccctgacggaacagtcagttggaaaacagccagtagttccattcccactaacatcttatagtgaccaataatactcttaccataactgtcgaaaatcctaaaaact

SEQ ID NO: 753 - DNA, 595 bp, Homo sapiens
  misc_feature 16, 28, 37, 57, 61, 66, 74, 80, 86, 88, 96, 104, 116, 118,120, 122, 128, 140, 142, 158, 181, 190, 219, 221, 236, 237,239, 251, 283, 286, 317, 319, 370, 382, 402, 435, 458, 463,469, 475, 484, 485, 489, 498, 499, 502, 514, 515, 521: n = A,T,C or G
  misc_feature 522, 523, 565, 576, 582, 588: n = A,T,C or G
ttaattacgactcacnttattagggggnccggagatntggggtagggcctacccacnccgncgggntgggggcnggggcncgggcncnccgggggnccaggggnttaacgacccangngncnccaggngtctaaccaagntngtgtttttccatctanctccttggttaaaaattctcccnaaaccaacnttttttgggggtaaagagacattgtacgngnccggaggggttgggnnanttccaacaaaangtgattccacgcggaaaggaaattccgtaagnacnccaattctccttgggtctcaaatccaattgngntgggaaaaaccttccttggttccttcttaacttaaaaaaaaaaaattaccnaaggaaaaaaanatttttattccccaaggctnccaatttgggttgggggccaaccgggttttacnccttcttttaagtttttcccccnaaggnctttancctttncgggggggnnaagngggcctttnntangggggcccaggnnaaaaannnaaaaattataaaccttttttccaataacccaatttggggtgntaaattgggtnggcggncaaggnggggttt

SEQ ID NO: 754 - DNA, 430 bp, Homo sapiens
  misc_feature 3: n = A,T,C or G
ctncttagggcgaattggagctccccgcggtggcggccgaggtaccaacatttttctctacaaaaacttcccacatgctggatgcagtggctcactggaagcaacttgagagcctgaggtgagaggatgtcttgagcctgggaggttaaggctgcaatgagctatgatagcaccactgctctctagccggggtgatagagcaagaccctgtctcaaaaaaacaaaaacccaaaaaactcccacaaggtcaaaagattgtttattttaaacaagatcaacattctttgtttattatgaaaattacttgtttctccatagaaactgaccgaagtctgaactttttatatatacctattcactttttcttacccgtgggggaatctaaatgaatggaccgtttggctattttaaaatcttttgagggaaaagg

SEQ ID NO: 755 - DNA, 431 bp, Homo sapiens
tacttagggcgaattggagctccccgcggtggcggccgcccgggcaggtacttttccactttgtcttctttcctgtcacacaccctatcctttcaggctgtgttgggatggacaaaagcagttctggagtcctaaggagaagatgagtgggatatgtttctgtgacctgcagtcattttaaagtttagctgttgctagctgactccatgtaagaataccttccaggaatttgatggctgtgcactctggcagtgcagctggcatggttatagggtgcttggccgaaggtttgcatagcaatatgaacgcatcctacgacacatctagccaacactggaagactgtgggtaatggacgaagaaaccaagattgactttttgcaagtttttaaaaaataatcttctttgtaactcacatgtgaaaagaaaaca

SEQ ID NO: 756 - DNA, 436 bp, Homo sapiens
  misc_feature 198, 204, 205: n = A,T,C or G
atcactacttagggcgaattggagctccccgcggtggcggccgaggtacttagcagctgtgtgacctagagcacagtgctttgagtttttgagtcttagcttctgtgtctataaaatggggttcacacaactcaccttacagggctgtgagattagattacacagaaaatatattttttggctgtgggggctgggaangtgttnntgattagccatttgaaatcccatcctgtgggtgagaaaaccccaccttatgacttggtgggaaacaaagccaacctcccactgatgaagctgaaagtagcagaaccttgcttctactgcctcccttgcagctagaggcaggcacaggactagcctgtcaattgggatgcaaatgctccaggccttgaatcacaaccctggttgacttgcacccaaggttctattactattg

SEQ ID NO: 757 - DNA, 420 bp, Homo sapiens
  misc_feature 20, 21, 49, 158, 177, 338, 401, 405, 413: n = A,T,C or G
ccgcggtggcggccgcccgnncaggtacgcgggttaataacaaaagctntcgtgttacttttaaacaaggtaaaacttaaacagttttttcctccgtttctttttttatggaaataagaggcaagtgatagcaagtgggtaattcaatggcaggtggnaactgaagcactgacctgntacaagagagacggaagcttctacttgagcagatacaaatactgtcatccgtggagatttgaaagaagtctttctatcactgggtagtttgagagctcattagtcttctttagaatgggtttaaacttggaaacatcaaagcaagttacaaggaaacttantttttacagtgttggcagcctaggcgccaggaatttgttataaagtgtactgtaaagttggcnccangttattcnactttaa

SEQ ID NO: 758 - DNA, 412 bp, Homo sapiens
aggtactatatgctagaaacttggctgaatgatttgacattatcctatttaatgttcatgacaatccaataacgtaaccactcatatctcccttttgtgcagataacaaactgaggcccagagaaatcaaatatgttgtcaaaatctacatcgttgaagagatgggtttcaaatccaggtcggcttggcccttgccacgacttcataatgaaattccatgggtgagtgttaccagtttctggtccatccttgcttatttcaagggtctcatcatcccatccactgtatcactttttttgttacaggctttactcttttctaccatggaaaagactaatgatatttttttctccataagcttggaaatattatcaatcaccataaaattcagccttcctctggtaactttgga

SEQ ID NO: 759 - DNA, 396 bp, Homo sapiens
  misc_feature 325, 353: n = A,T,C or G
ccgcggtggcggccgcccgggcaggtacatatctgcaaggagacatatacaaggacgttcatgccatgggttagaaacaacctaaatatccaccaataatagaatagtccatctttagaaactctttagaaaaattaaaatatactaaatatatattaatttgcctaaatttcaatagcaatgttgagtaaagatggaaattacaaaatgataaaatgggaatactttatgtagtttgttgttgttgttggttttgttttgttttgtttttggattttttttggaaatgaaggcttgctctgtcacccaggctggagtgcaagtnggtgccaatctctgctcactgcaacctncacctcctgggtttcaagccaattctacagggcgccatgcctg

SEQ ID NO: 760 - DNA, 419 bp, Homo sapiens
ccgcggtggcggccgaggtacaataataaaactaagcttatgcctaaaatattctcactgagtgcctgtgaatccacgactattagcactgtggagcaatttctccttgcagaagagtgctaactctatccattaaagccttggaaattgccggtaaatatgtaaaaaatcaagtgcttaaatggatagcaattattggcaggacctaaactgatacaaaagtgttccactgtctcaatatcaaaagcccaagaatgccagattcccaaagtgagtcaaagtgcttggattgctttgcataaacatggttagccagaatcaacaccctgggattggagcttgaggtggaatttccaaatcctgcaaatgttatggctacagccccccagcaccccaatgctggacagcctaaggcatga

SEQ ID NO: 761 - DNA, 405 bp, Homo sapiens
  misc_feature 10: n = A,T,C or G
aatacgactnctatagggcgaattggagctccccgcggtggcggccgaggtacttcttgggagaaaagcagactcctctagaatcccacaatttataaggcagagaacaaaaccattgtttaacaaacaggaaaaaaaaaacctcacagaataaccatcactgaagctaatgaaggagaaagtttcaaggaggaggaggtaaacattgctgaaagttgagatgagggagagaaaaacaaatctgagattagacttttggacttggcatgtagaaaatcacgggtgacatcatttggaggattttcagagccattagggaaagaattcagattgttactgaaggtgaaggaataataaaccaaaagcaggactgtttctccaaagggaatttttatccttataaaa

SEQ ID NO: 762 - DNA, 455 bp, Homo sapiens
  misc_feature 362, 366, 376, 434, 439: n = A,T,C or G
actacttagggcgaattggagctccccgcggtggcggccgcccgggcaggtacatgccaccatgcctagctaagttttgtatttttagcagagacagggtttcaccatgttggccaggctggcctcgaactcctgaccttaggtgatccaccctcctaggtctctcaaagtgctggaattacggtgtgagccactgcgcccggcccttagtagcatcttttaatggaggtagagttgagatttcagtgactaacaactaaaggtattaaaggtaggggtttatatgatacatttgcattttagaaaactgatctaagcttcaatgtgaagaacaggattgaaatgggaaggggggaggaagnactngaaagccagnaaaccattacctcattttaaaggtaatctggggacccatggaaaccttgaaaaaaaanttatnagggggactcccaaaa

SEQ ID NO: 763 - DNA, 456 bp, Homo sapiens
cttagggcgaattggagctccccgcggtggcggccgaggtacttgcaggtggtttggcctggaaaatctagatgagtggtttttaaatttagttgcttattagactcaagaaagaaatttaaaaaacaatactgattactgagaccagcttttctagattcttcattcagtaggagtaaggaaaggccaatgaatgtgtattgataaaaaggttcctggccgggtgcggtggctcacgcctgtaatcccagcactttgggaggccgaggcaggtggatcacctgaggtcaggagttcaagaccagcctggccaacatggtgaaaccccatctctactaaaaatagaaaaattagtcacgtgtggtggcaggggcctgtaatctcagctacttgggaggctgaggcaagagaattgctggaacctgggaggcagaggttgcaagttgagcccgaaat

SEQ ID NO: 764 - DNA, 425 bp, Homo sapiens
  misc_feature 218, 319, 334, 338: n = A,T,C or G
ggcgaattggagctccccgcggtggcggccgaggtactgttttaactcatttatcttgtggtaaacttgtagcagccgccgtaggaagctaattcaccctcatccctcacattcacaccacaatctccttctcctcaccggcattccatctcctctgcctcccaagtcacagagccccaggtgcccacaatggctgtggaagtctgcggtgcaacctnattgcaaatatttgtatgctcggaagaaaaacacgagttaagcagtggtaacaagcagagtcccgggaagcagtggtaacaacgcatagtcccgggaagcngtggtaacaacgcanagtnccgggaagcagtggtaacaacgcagagtcccgggaagcagtggtaacaacgcagagtcccgggaagcagtggtaacaacgcagagta

SEQ ID NO: 765 - DNA, 393 bp, Homo sapiens
  misc_feature 2, 49, 183: n = A,T,C or G
anatccggcgaatttttctccccgcgccggcggccgaggtaccttcctncttaaatccacattccacatgagttttttatctttttagatgtatatttgggaagtgggctccttgctgacaatccttgaaaagtgcccagttctcaggacccagttgaaataatttccgcctggggctgggcngcggcggctcacgcctgtaatcccagcactttgggaggccaaggcgggcggatcacgaggtcaggagatcgaaaccatcctggccaacatggtgaaaccccgtctctactaaaaatacaaaaaacttacccgggcgtggtgggcgggtgccttgtagtcccaagctactccggaggctgaggcaggagaatggcgtgaacccgggaggcg

SEQ ID NO: 766 - DNA, 446 bp, Homo sapiens
  misc_feature 358, 410: n = A,T,C or G
cttagggcgaattggagctccccgcggtggcggccgaggtacaggcaacaaaagcaaaaatacacgaacgagatgccataaaactaagaagcttctctgcacagcaaaagaaacagtaatagattgaagagacaacccacaaatgggaagagaatgtttttaaaccatatctcaggtaaggggttcatacccaataatatgtaagggaactcaacccagaaatgagaaaacaagcttactaaaaaataagtaaaggagttgaatagacattttctaaaaacagacatacaaaaggccagtatttttatcaaaaatgtttgataaaaaaaccatcaacattccttaatttatcaggagnaaattaggatggttcaaaaaaccattggaaaggatattttatcttcaccagnatggtttacccttggagggtttattttaataaaaaa

SEQ ID NO: 767 - DNA, 355 bp, Homo sapiens
  misc_feature 223: n = A,T,C or G
ggcgaattggagctccccgcggtggcggccgcccgggcaggtactgggattatatgacgtgagccaccgcgtctggcctctaacgagatatttctaaaggttaggccttcagtcaagaattttaaagctggatcttagaggttatctaaactaacctctccatttcatagataaggaaagtgagtcccagaaaagcactggtttggacaagttcagaaagctnaacagtgactgtggatgtatgattctgtctcttaactcctaatccaaatgtcttctcactagataaggctgtgccttctacatttgaaggctcaaaccccatggatggatggagggaaggatgggtggaggg

SEQ ID NO: 768 - DNA, 333 bp, Homo sapiens
  misc_feature 15, 47, 65, 72, 258, 297, 308, 325: n = A,T,C or G
accggcgaatttttntggaaagcgccggcggccgcccgggcaggttnacagccaagcgcttaggntgcagcntttaatggacccaagccccagctttcacagggttgatactacagccactcaaaacagggatgtcatgaggctgcagcatcttaaatatcttagaggaaaacattctttaaaatttctttaacaacaagcctaataaaatgaagaacattttgcaggggtaaggggttgatgttgaggaggaagatnatatgttaggcattaacaattggatttgttcataacaantattaatattnaaaacacattgttaatnattttaag

SEQ ID NO: 769 - DNA, 411 bp, Homo sapiens
ccgcggtggcggccgaggtacatactcccattccacagcttagtctaacatgcaaaaagggcatgattagagattgttggtcattaagaagaacaggaggaaacgttctggagccttggcactatgcctggggaagagaggatctcaacacccctcagccatctctgggccagaggaaagtcacctaggggttgtcctaaagagttccacgggagaagagattatgctgtctgatgaccccttactgttttctccagtatgtccctacttttttttgtccagctgagtttattaaacttgtcctgcttctgaggtcggtttcttttctaccatgtgaaggtttaaatctgctttactgtctttgctctcttttcttactttttcccagaattcctacacttactacataac

SEQ ID NO: 770 - DNA, 440 bp, Homo sapiens
gcgaattggagctccccgcggtggcggccgcccgggcaggtacggcttctatgtgtgaacaacacagaccactaagagatgtgacaaagctgttccatcagaggaaacatagtctgggggacaaatcctcccattcctgataggacaggagggagcggttggctggggaagacctgagtgagggagctttcttgaggacgggttttgtcggagtgtagttcatataccatgcacagcctgtcagcatacagcttgaatgaactcacgtgtgtaaccagatcaagaggcagaatattactagggtggcagttttgagtcccatgaaaacaaacacatttactctgtctagctccatctctagttaattctaatgcagtttaaatgctcacaaaatccttatttgaatggatgagtcagtggttttgaattgaatagttttt

SEQ ID NO: 771 - DNA, 431 bp, Homo sapiens
ccgcggtggcggccgaggtacctcagaatgataaatcagaatctctgaggaatgggcccaggcatcagtatttttcacacgaacaagcagaggtggatcctttaccttctcctaaaaaactgtcacaagggacaggtcacttggaaggcagtttaagagaaaaccagaaggagaaaatctggtgacacatgtaacactgtgattaatctattgcttacgatgttttatatgttgaaagtctggaattctgaatattttattatgtaagagatccagttctccaatgtcacagcctctataatttgaataataataaaggagcacaacaattcacttatgatacccaacagaagactgcaagggatatgctgggggcacagagcccaattagggttttaataagacagggtttattgggttgaagcaatctt

SEQ ID NO: 772 - DNA, 434 bp, Homo sapiens
actacttagggcgaattggagctccccgcggtggcggccgcccgggcaggtacaatcttaaaagaatattagttacaagtaactaacaaaaagatttttaaaaggacactaaaattactttctacactattcaaacatctgatacgagctgtgcatcagttaaccactgctctatagcaaacttaccccaaactcagtggcttacaacaaccatggatgatttacacatctctacaggtcagccagtgggtgattcaggtaaccctggccgacctagacctgctcaggagacagcacacagctgacaggtcagatggcattggctggtctatgatgaaatcggcaagcacaaacctggccccctccactgggctagcctgggcacgatctcatggaggtggccggggtctgaaggtgcaagcccagtcctgtaa

SEQ ID NO: 773 - DNA, 403 bp, Homo sapiens
  misc_feature 233: n = A,T,C or G
tcctatgggcgaattggagctccccgcggtggcggccgaggtcatttgttgggggcgtgacattaacatataaccacttagagtggacatgcagttagagaaaagtcaatgagctggaaccaagctgggaattccaacatgtagaagttaaacacaagaggaggagccagcaaaggaacagaaacagagcttccagcaggtgggggggcatttggaagaaaacgatgccatanaaccaagatgaaatagacatcaaggagaaggaagtagtcaattgttttgaatgctatgaagaaagataagaataggtaaatagtccttatatttgataacagaggtcactagtgatcttgatgaggggtttcaatagaatggtgggattatatacctccctggattcaac

SEQ ID NO: 774 - DNA, 395 bp, Homo sapiens
  misc_feature 1, 46, 53: n = A,T,C or G
nctatagggcgaattggagctccccccgcgggggcggccgcccggncagggtnctgggattacagggcgtgagccaccgcgtctggcctctaacgagatatttctaaaggttaggccttcagtcaagaattttaaagctggatcttagaggttatctaaactaacctctccatttcatagataaggaaagtgagtcccagaaaagcactggcttggacaagttcagaaagctaaacagtgactgtggatgtatgattctgtctcttaactcctaatccaaatgtcttctcactagataaggctgtgccttctacatttgaaggcttcaaaccccatgggatgggattgggaggggaaggatggggttgggaggggatgggattgggattaggatt

SEQ ID NO: 775 - DNA, 350 bp, Homo sapiens
  misc_feature 5: n = A,T,C or G
ccggncaggtaccattcttatctcagaatgctgtaaaccatcagtagaagcagtttagatttggactgcatggtaaaatgaaaagtaataaccctccaaccacaacctagtcagggtattaataattatatgtagcaagaaaacaaagaagaaaataatattgaaaaaatggagattccccaaccagtttcatatttgaaggatctgagttgtatttttattaaggaaattttttttctgaatactgtcttccaaaatgttaacattaaaatctgaatcagaggactctgaatggaaaagaagtttgatcactgacacctagggctctgaagcgtgtgtggccacatgga

SEQ ID NO: 776 - DNA, 406 bp, Homo sapiens
ccgcggtggcggccgaggtacatgacgagggaacgtccagtctggcctgccaaagaagaaaagagtaagctcagatttgagaatgtaaaccctaacaaaaacaaaagctgctctcttgctgtgaagtcgctacagctgtcttcactggtcaagtgggtgattttgacatgttcaaacctggactgctttgtgatgaagggtttgattttcctctaactaggacaaggatgggacaaagacaatttggtagcttggtatctctaaagtcaggaggcaaggattacaaacagccggcctgtaacagcaacacagtctgcgcaccagccacaagaacacaggcatcttatctggctggtgacgcacagtaactgtgcggggcacagcagccagcaagcgggtcagacat

SEQ ID NO: 777 - DNA, 460 bp, Homo sapiens
aggtacttcaatggtggaaagaggcatcaatgattaaccataatcatttctgatcatgaccaagtcacccctgagactagtaactgcaggtgctcacaaaaaaatatgcagctgtccttcctgccttcaggggatcattcatgaaagtaatttctcacctgaccaaaatgatcgcttaacatttattgcatcattgcccctgtttctgtagactactctaccgaagttttaatttgtcactagtttaaagggccaaaagatctgttttcttcagatattagagacacaaaccaagcatctcccactttcttggaattccttctcaaaaatgactaaagtctgagactgttttcttatttaatgtctattgaattctgttttacagaatttcaaaagagcaggttcttagcttacttttcaatgggaacattttagccaggtagtataaagtacctgcccg

SEQ ID NO: 778 - DNA, 416 bp, Homo sapiens
  misc_feature 276, 328, 383: n = A,T,C or G
ccgcggtggcggccgaggtacagttttgtaagcaagatgattgaaagatctactgagtgccgtggagtcacagagaggaacaactaccctcaggctatggagttcagtgaaggctgcctaaagagaggatgagttgtcagctgagacttacagaatgaaagaaatgtcctagttgtttagcttgactgtaaacaaatggggcttattacaggattctgtatgcatttttaagtctgatgtattttcctcaaaagatgaggatggtaaggatgatantggggggaagggcactaagcagaaggttctttattcttcttactgccctgtntctcccctgcctgtcttatttataaccctcttgtttaatggacaagaaatttctntagaaacaaatttatatatttttattataaaat

SEQ ID NO: 779 - DNA, 400 bp, Homo sapiens
  misc_feature 57, 217, 370, 390: n = A,T,C or G
ccgcggtggcggccgcccgggcaggtactttttttttttttttttttttttttgganatggtgtctcactttgttgcctaggctggtctcacactcctggcctcaagctgatccttccacctcagcctcccaaagcactggggttgctggcgtgagtcaccatacccagctgaaaagtgatttcttataagccaagcaatcagcctctgcagagaanacaggaccctcagcacatatctagctctgtaattcctcaactcaagttgggcattactatcacccctacattaacatgttctcattaggaatatgaccaagaccaggacagagtcacaagagaaacagtcagtggatcatgtgacacatgganatttattggtccaataaggngaactggtca

SEQ ID NO: 780 - DNA, 376 bp, Homo sapiens
  misc_feature 353: n = A,T,C or G
ccgcggtggcggccgaggtactttgttcttttactactcaatgagactgagagcctgctggattcactaagaccaggtgaacccagagggctctcggtctcattgactcaattgggtttgaatctcaattctgcaacctacgtggctttgggcaggtttcctcattttcaaaattatacaataatatttaccttttaaacttattgaaggattggaaagctgtaacacctagcatgctgtcgtggcataaggtgggggttaagtaaaaagtagctactattaacatttttgaaaagtgctccttcattttccctgctccctttcatactcttcatcctactttcctgggtagnttcattttcttcttagttgggct

SEQ ID NO: 781 - DNA, 551 bp, Homo sapiens
  misc_feature 174, 193, 198, 203, 213, 215, 218, 234, 242, 253, 262, 297,313, 315, 319, 321, 372, 373, 383, 410, 416, 428, 442, 451,456, 461, 479, 499, 517, 526: n = A,T,C or G
attggcagctccaccgcggtggcggcacgcccgggcaggtacctactaaacagcaaagaaaccatcctagaggaaacaaagagcctgactcagaagcgctcaacaagcagcaaattaagccagagcctaatttggtctgtggtctcttaactgtggaagccaagaacaaaggantaaccaaagtttggggggngcaangagangagacaacangnacnatggagggagcacaanaatatttngccaattcttncaaggccanaaagctcacctttaaggctattggaaatagggcangcacatttgtttttgnanaggngntataaatggcattccattcccccaggccttcgctaactttaaagtaccagnnggaagcaaantttagtgccgcaaaaaggatttggtanttcggnatttttgctttntttgtgggaaaaantgttgactnttttnttggncccgtagattccaaaagnttaaaaaccaatggggaaancaaaaaagggccaaccancggcctttngtttggttaaaattaaaaccccaac

SEQ ID NO: 782 - DNA, 501 bp, Homo sapiens
ccgcggtggcggccgaggtcccaaattaccttgatttaaaccccagctcgcccatttattggccgtatgaccttggacaagttatagaatctctttgggtctgttgtaacatggtaataataatacctacctacctaacacacagggtggttgtagattaaaggagttgccacatgttggaagcatgcttatgctaacaggcatactcatgaagtatcagctatttaaattatcatcctccctcaacaggattctataaactggttccaagataaggtaacctgggataataaagttttctgatttggttagaaatacacctagaaaacttagaaaccaggcaaatgtgaaacataaagagtagatatctgggaacaaaaaagtatattataaaatgccaatctgtcaattcatataaaaggcatcttaatcaatctcccactccccacaaatggaaagccggaggatggtacccgggattatcattattattattttttt

SEQ ID NO: 783 - DNA, 147 bp, Homo sapiens
  misc_feature 16: n = A,T,C or G
ctatagggcgaattgnagctccccgcggtggcggccgaggtacttgagggcatcattaaaatcagccagtgttcagtgagagacttaatgatggatttaatagtattaaatgggcaaaaatgcccttggcctttacatgctcattta

SEQ ID NO: 784 - DNA, 417 bp, Homo sapiens
ccgcggtggcggccgaggtaccttcttggctatgtctgccagcaggaacaaagaggcatccaaagcatgtcctttgggccatggcattgtctttttccttctaagtctaggatgggtgtgtctgctgaagctacatcattgtgtggaacctgagctgtggtccagctttccagcctctagtgagcagtaaggcacactgcaaggggaatgtggcagaggtgagtggatccacatggagtatttactacatccacttcattggattctacctggatcactgtgttggaggtggaaggccatctgtgatttgtggtgcttctaaaacattctaagggacgtgccctatttcagttaagacacacatttgatttctagctatgccaacctttacaactgacctggatactttcctgaact

SEQ ID NO: 785 - DNA, 649 bp, Homo sapiens
  misc_feature 115, 479, 490, 515, 517, 532, 561, 604, 616: n = A,T,C or G
agggcgaattggagctccccgcggtggcggccgcccgggcaggtaccctacctgtaatatttgtattaataatatcttattagcattttaattagaaatttaatattaatgattnggaatcagtagttttcaacaattttaatagtgcaaatttatttgtagtatttgatggggagatatggtgttttgtgactatatttacaactggatgtatctgggaatatctcaaagtttctcccaaaaggaaaacatttctattacaaatatgtgacttgtgaaaataatttgtaattcttttcaatatatctcattttttttttttttttgagacagagtcttgctctatcacccaggctggagtgcagtggggcgatcttggctcactgcaacctccgcctcctgggttcaagcaattctcctgcctccgctccgagtagctgagattacaggcacccccccacgcctgtctaattttttgnatttttagtanagatgggggttcacgaatgtggccnanactgggctggaactnctggcctcaagtgatctgcccgtctcggnctccaaaagtgctgggattacaggccgtgccccatcccccccngcccaaacgtgncattcctaatacatggcttcctttttatttttt

SEQ ID NO: 786 - DNA, 834 bp, Homo sapiens
  misc_feature 457, 473, 498, 512, 535, 538, 614, 642, 666, 672, 678, 703,720, 735, 737, 750, 756, 761, 796, 798, 802, 825: n = A,T,C or G
ccgggcaggtactgggaactctggcaggatccttgatgtcctcttaatctcttttaattttcataatactgtgatgcaggtatcattatcccccctctccactaccttgttttatcccagagggaagtaaagctcagagaggctaagacactttctccaggtgacagactctggaaggggcaaggttaggatttgattgtctgtcagattccattatgctgtgtgcctcaaatgcctggtgatcctatacgctaccatgggcactatgtggggcagtgccactaagctctgctgtgacctcgaggttacctctgaagtttatgagccactgccagaggctcagggtggatgatccaagatagctgggctagggtattaaaagggccctatcagaacaaagatcattcacttttgaagtctaatctctttgggttctagatgggaaggaaacatattnaaggtggatgaagganggaggtacctcggccgccccggcangtactgccaccatntcgtttccaggagtcttctgctnggnctttctggcttcctcacgggatcctgaagggggggttctttggagaagcgacccaccccatttttcctgggaagangctggttcaaagaattttttttgctggngggaccaaccttgtcttttttttnctggangagggncccctcttaattttaactttctctncaatggtggcttctaanatgggttttttgaanantcttttttttttncaaaantgctntcccccgaggttggaaaacccttcttttttggaantnaatnaaccctgttttttttccaaccanaattttcct

SEQ ID NO: 787 - DNA, 551 bp, Homo sapiens
  misc_feature 16, 425, 440, 494, 517, 542: n = A,T,C or G
ctatagggcgaattgnagctccccgcggtggcggccgaggtacaaaatatgagagaattcatttccagtaggcctacactacaataaattgacaaagaaaatttgtcaggccacagggtaataatatgagatggaagctcaaacctacaagaagaaaatatttataggaaataataaatatgtgggtaaatctttttttaattaatgtaagaatcaaaatattattttgtgggatttgtgatgtatgcagatgtaaaatatataacaaaatagcacaaacaataagggaaggcaagtggaattctacacaactgcaaagtttttacattttatgtgaagtgatatgacattaaatctaaatagactgaggataagataaagatgtgtggtataatacccagagaaaccctaaaaacaaatatccnaaagcagcagagctnagaagtcattgtaggaattaaaataaaatactaaaaaaatggattaacataaanagatggcgggaaagaaagaccanaaattgaaaaacagaaggttcaatnagaaaacaa

SEQ ID NO: 788 - DNA, 415 bp, Homo sapiens
ccgcggtggcggccgaggtactgtttttacagtcattttggattcctgctgtcttatacaccaaataagtagttaaagtgacacagttcatagaataaaatgaatgaaaacacagacatggaaatggaaggaaagtgcagagctgctttctaaatcaaccaaattaattaaatcctgaccacaaatactgaaatgcagagatgcaaagtcctttttgagtagcctggatcaattgtttcctaagagcagatgggcactactttagctgtgttgtctacaaagaaatccagttggcgagaaaatatttcatccacagaactatgattcacggggttagttcctagaggtatctgccccaaggccacctgggatgattaccaagagtcactttaaaccaagattctaagcctaatac

SEQ ID NO: 789 - DNA, 177 bp, Homo sapiens
  misc_feature 25, 48, 52, 63, 68, 78, 81, 94, 101, 103, 118, 127, 139, 169: n = A,T,C or G
tttaaaaattaacccggaaactttncaaactttaattttaaagggggnggtncccgggaaaanaattnttgggaggtnaanggaccctttgccnccaaacnanccgtcccgggggganttggggggncccgggggggtnccgcccgggcccaccccccggggggggggncccaaagg

SEQ ID NO: 790 - DNA, 603 bp, Homo sapiens
  misc_feature 4, 5, 27, 36, 50, 131, 178, 180, 216, 219, 263, 308, 324,391, 415, 418, 455, 507, 534, 541, 543, 551, 556, 573: n = A,T,C or G
atannactcactatagggcgaattggnaagcctccnacccgcggtgggcnggcccgccccgggcaggtacgcggggggcatcacggacctaccaatatgtggatgtcacccctggtgggcccagctgtgtnatgggagaaaacttccagccttgggcccaagaagaattcttgcaagncngggaaaaaatcccaaagggctttaatttatgcccangcntgaagtgggattttggccaggtcaagggaaagctttcttgcccngtttagactggccaccgatatcaactatttggcttttgttcaggntggaagggaaacagcnatattttaaagttcctttttctgtgggaaaaaacttccataaaattcgagtcttgttgggggaaagncacccttcctagggaacaagtaancantgttttggaattggggtgggaaagccacccttttttnttaattaaccgaactttaaccaaggaaaccaagccaaggaattggggggggnaaaattttcaattgggccttggttttngggaagncnaaattaanaaaancccccccaaatttttcnttacccaaagcccttggccttggaattcca

SEQ ID NO: 791 - DNA, 411 bp, Homo sapiens
ccgcggtggcggccgaggtgcctcagaatgataaatcagaatctctgaggaatgggcccaggcatcagtatttttcacacgaacaagcagaggtggatcctttaccttctcctaaaaaactgtcacaagggacaggtcacttggaaggcagtttaagagagagcagaggagaaatctggtgacacatgtaacactgtgattaatctattgcttacgatgttttatatgttgaaagtctggaattctgaatattttattatgtaagagatccagttctccaatgtcacagcctctataatttgaataataataaaggagcacaacaattcacttatgatacccaacagaagactgcaaggatatgctggggcacagagcccaattagggttttaataagacaggggtttatg

SEQ ID NO: 792 - DNA, 651 bp, Homo sapiens
  misc_feature 131, 137, 140, 141, 147, 168, 172, 194, 209, 231, 260, 281,309, 314, 322, 351, 354, 360, 363, 370, 389, 394, 407, 417,419, 423, 425, 427, 437, 458, 460, 469, 474, 476, 478, 485,487, 491, 512, 536, 549, 559, 574, 577, 582, 593, 595: n = A,T,C or G
  misc_feature 627, 628, 647: n = A,T,C or G
aggtacatgggactacaggcacgccccaccatgcccagctcatttttgtatttttagtagagacagggtttcaccatgttggccaggatgatcttgatctcttgacctcatgatccgcccctcttggcctnccaaangtnnctgggngatcacaaggccgttggagcncacncacacacttgggacccttactnatttatttactcgtntttaaaagtaggaggagtaaanatacctaatcgatgtagggcacatcatantttatctttacattttaacantcctttgtaacgccttttagtccaccanatggngtaaatanaaatattggggaaaattttttggcccctnaanttattnatngggttgnaattgaatatggccattancctanctaaaattggtanaaccatgtananaacnananttctatccanttttttttaatgcgttacaananaagggggcnataanananaattttntngganggaacctttttaattaaaagnaccttacccaattgggggttaagnccttttaattttntttcttgggngggttgggggggggnaanatganaaataatcgtnangggaaaaaaaaagggaaaattaatttaaaccnntttcgttccttttaacctngggg

SEQ ID NO: 793 - DNA, 620 bp, Homo sapiens
  misc_feature 190, 238, 254, 301, 323, 412, 522: n = A,T,C or G
atcactacttagggcgaattggagctccccgcggtggcggccgaggtacgcggggatcaatgcagagtccctctgtgaatttacaacacccaacacccatgagttcagtccttaagaaggaaaattgagcaagtatttaattggttggacattgcataaaagaggtccatatccaggcctaacttctaanaaaattttttaatttccttcaaaaacctttaagttttgggccccttcnttttttttttcctttncttgttccaaggaaggggaaccccaattttcctttaagttggggccnaccttggggggggaaaaaattnctttggggccaccccccaaggaaaaggaaaattttccaaaacttggccggccttccaccttggcaaaaaaaaaattaccaaaattgggncccttaccaattttggggaatttttggtaaggaaggggaggaaaaaaggggaggcccccctggttaattttggttggaaggccttggtggccttaatggaaggaaaaaantttcctttttaaccccccccttggaaattggttggggttccggaattggccccaaaaaggggaaaaggaattccccttttgggaaagaaaaggttcca

SEQ ID NO: 794 - DNA, 475 bp, Homo sapiens
tagggcgaattggagctccccgcggtggcggccgcccgggcaggtaccctttatgatctagataaaccattgtgttcttctatagtttttccaactatatttgaataggtgaagttaatatgtttaatcataaaatgctctcagatgcttgcaaaaacaattactccatcagataagaacacatcaaaaatttggaaaatttaaaaaaagtcattccagctatatgcaaataacttttagtatatgcatctgaaaagctaccaaacgtaacaatgaaactctaaacttgtagtagaaaggtaaatgcactgtgatcagctttcacatcacttcagagtatattctaaaacttcttagattctacattatttatagagtgaactctaaatttcaaacatttctcagggaacaaaacgactcccatccaattatttaattagggaagaaggaggatcccaaattttcttgctaattt

SEQ ID NO: 795 - DNA, 443 bp, Homo sapiens
  misc_feature 429: n = A,T,C or G
ccgcggtggcggccgaggtaccacccctttgaatacccacatgcaccgtggtccagaggagagagcctgaatccagagctgacagctgaggtttggatcctgtccccaccactcactcaccttgagaaggtgagcaatcttcctgtcctcacagcacatcacttagaggctcacttgcttcacatacacagcaaggacaatgatatccaccttagagtcagagtgcactattatttgacactgttgtaaccatgcctagcacaagatcgggccctaagaattcctattgtcgctaagaatttcctatgacaccttcacacttccagtctaccctggagagctctgggcagcctggatactccaagtatttggaatttttggccactactgaagcctggacttcaaagttgtgcccacaccattctgcanagaacgcctttcaa

SEQ ID NO: 796 - DNA, 251 bp, Homo sapiens
  misc_feature 5, 31: n = A,T,C or G
ttaancacaatagaaaatagtttatttttgnatccaacgaaactagttaaatatagcagagaagtagatgtcagtagacatttgaaatgtgtgttcagattagtagaataaacatatcagcaagatccctagaagcccaaggaaagaagcaggaaacttgttaagtcacatatctttgataaaaagtaagcaccaagctaactgaatcactctctaatttcttggatttaagtagattattttaataggat

SEQ ID NO: 797 - DNA, 445 bp, Homo sapiens
  misc_feature 209, 253, 276, 315, 339, 345, 378, 389, 410, 411: n = A,T,C or G
gactacttagggcgaattggagctccccgcggtggcggccgaggtactggggaaggcggctggaggaaatgtgagcaggtgcagcgccctgtcctgccctgcccctgcaggagtcctcattagtgaatggactgagagtggcctgggcagtgttctatctggacatacagatacattatttttaggctttaaaaacagtattgatttgncaaatgggacccaccaagttgaatcacaatctctaaacccaggnagcatttcctgggttcctgtggnagcagttcctctgtctgggtaagggaggactggagacantaccctgccacatatgagttgggngacaangggagtataaggttggtgttggaaaaagttttngcttggttaancaccgggggacctgtttattnngatccaactcttaaagcccagtgggttaagtttc

SEQ ID NO: 798 - DNA, 424 bp, Homo sapiens
  misc_feature 398, 403, 410, 419: n = A,T,C or G
cctatacgactcctatagggcgaattggagctccccgcggtggcggccgcccgggcaggtacaaaataaatttgctcattgggttagagtatggttattgattagggggctaagcatttagttactgcatggggcagccaataataaaatcacagccctgtgtatttacctccacagtgtgtgctgataagtgcaaaaggtttgtgcaaattcttttgaagttatactgtaaccatggtatatgtattgaaaacttggccattttaccccattcctatgaatgaaaactatttggtgaatcagaggatagtctgaattgggatatgaaggccagtataagtgtcagttagcaaagtcagcctctagtttattattttttttttttcttttaaggcgtngcatntactaanaagtatagntttgg

SEQ ID NO: 799 - DNA, 949 bp, Homo sapiens
  misc_feature 8, 10, 32, 36, 40, 42, 44, 48, 52, 54, 62, 72, 80, 88, 90,92, 119, 137, 142, 158, 162, 172, 182, 184, 192, 194, 196,236, 247, 253, 265, 269, 275, 277, 279, 282, 321, 330, 347,366, 376, 378, 402, 405, 425, 427, 444, 446, 462, 485: n = A,T,C or G
  misc_feature 510, 520, 531, 553, 554, 557, 570, 572, 573, 580, 583, 588,589, 593, 607, 615, 620, 632, 657, 663, 666, 668, 681, 702,706, 708, 730, 739, 749, 759, 769, 770, 790, 798, 806, 816,821, 828, 840, 869, 878, 883, 886, 908, 910, 912, 922: n = A,T,C or G
  misc_feature 930, 934, 936: n = A,T,C or G
ccgaaaantntggggtaagtcctgccccaacnccgnccgngntngggnccgngncgcggccncgccgggggnccaggggnttacccangntnagcttaatttttaaaaccaccttaagnaaaccgttggtaaagggnaaaangagtaagcttatgggnaaanaatttttttncttgggggtngnaaaattancnangtaagagggaaggcccaaaaaggtataaccaggtctatgnggtttcaaagnccaagngcaaaaataggnaccnttaaantngnttnttttttcttaattggccattggtttttaaaattgggggnaaataaatnttccggttggtttaggnggaattaattttttttggnaagttaaggngnttaaaaattattgggggaatttanaanttccaaggaccaattttttngntaaaaaccttttgggcnanttccaccttaaggttnaagatttcttggaaccttccctnccaaccctttaaaatttaaaaaggnaaaccttttnggttccaaaanaaagggaaattccccaaaaagnnaanaatttcccccgcnannaaaaggnttnggggnnattngggaatttaaaacnactttggnttccncccaatttgggntgggattaaatttccaaaacccccnaatttnctncnaatttgggaaccncccggaaaaaaaaaaatttcnaacntnctaatttcctcccaaaccgaangaaaatatnccaacccaangggaaaaaanttttgggggnngtaaccccaagggaaatttnggaaaaancctttttnaaaaattaanggaanttaaaanaaaggcaaattnggaaaaaattaatttcccgggggaagggntttttggtnattcnccntttccttttcaagggggggaanantngggaaattancccttccntacncnaatttgggaaacc

SEQ ID NO: 800 - DNA, 459 bp, Homo sapiens
  misc_feature 9, 443: n = A,T,C or G
atacgactnctatagggcgaattggagctccccgcggtggcggccgcccgggcaggtacaatttcttattactgcatctaaaaatgaggacaacattctttaaatatcacgcttatataaaaacttgcagaaactcaatccacatgtcttaattagaagccaccataaagaaagacatttcattgttttaataacttatgttcagaaataaaactgctcttacttaagcactgcttagcagaaacgttaaaatcaagtctagagaaaaagtagaagatggtaatgttcctaagatacatgagaactgagtttggttacagttagagagaaacagaattttttccactcccaaaccagatctattgaatttacttggtttatttttgtatatatttggcatctaaagaatgaattgccttttagacaaaacccttctcggttgnaagttggtttcttttg

SEQ ID NO: 801 - DNA, 482 bp, Homo sapiens
  misc_feature 301, 316: n = A,T,C or G
cctatagggcgaattggagctccccgcggtggcggccgaggtacaatgtgattttcatcagtgtttatgtttttgaaaggaaaaaaaatggctgaagtattattttagtccatgtgcaaagcaaattctgttttgtctgttaaaaaaataaatgagcaataatctccaagaaatcatcttgaccagcattaatgactagtttggtagttaacagcccgaggcatagccagaggctattaaggctctgggggaaagaaaaggttggtagatttgtgggtttaccagtaattaactataggtntggaatcaaaacttnctaaagaaaagagatttaaggttactttggaattatttttatgtgtatgcttatcttttcatacatccccctcccacaccttttctaataaggaaaaagaaagatgatgccattatttcacaaaacccaagtttgaaattgggaaaattaatttcacgtaatggaa

SEQ ID NO: 802 - DNA, 415 bp, Homo sapiens
  misc_feature 282: n = A,T,C or G
ggcgattggagctccccgcggtggcggccgaggtactgtgttgtaacgagatgcaggttagcatgaaaccctccacatgagatctgctttaagactgacccaagcctgaaacgctctctccctaagtgatccatgtccctgcagtaataccataaccactaagctaacacactcactgtaaaagtgtttgcttctccatgaggcaccaagacttgatgaccatttgcagttctcattaactccactaagaccctaaaggctaaatgacaaccaagcctctgncactctgcctgagtggatttaccacaaatatcaaatctgttcaatctattataagagctaaaaaggagaagcacatgaaatcacatttcattcttagctcttttatcttcccatttttcatttagacattgaa

SEQ ID NO: 803 - DNA, 399 bp, Homo sapiens
actacttagggcgaattggagctccccgcggtggcggccgaggtacgcgggggggcggagcaatccacactgctgagcctgggggggtttggaattcttcggcgaagtggagcgggccgagagtgggtttcccgtccccgagccctccctcatctcggagatgccgcacttgtgagcgacagggcttcatttgaattttcgcacctcgcgagttgcggagcctgcatctctgaagctgcctcggtgaagagccacagcattattttttttctctttgggagagtagctgtctgggatttgagatcctatcttccctgcaaattaccaggttgcatcttcactggataggaatacatttcttcaccaaaggacatggatgaaaatgaaagccaaccagtc

SEQ ID NO: 804 - DNA, 309 bp, Homo sapiens
aggtactgcccagatagaaccttctgcctctttggggtaaaattcgatttcaaagagagagaactgtggggtgagaaaggaagactgggacccaaggggccaaactagtgacaatgactgctgtcatgaagggtgacaaggacaatacctgctgagctcaaaccaccctttggacccagtgaagctcagatgttgcttccagtgcaggagtagttaagctcaactgttttacaatatccagttatttggcttgggtgtgatggctcacacccacactcctagcactttgggaggccaaggtgggtggat

SEQ ID NO: 805 - DNA, 357 bp, Homo sapiens
ccgggcaggtactacctcttccataggttgtgtcacccagttctgagatctttcaaagcactggaagagaaccgccaagttctcagctgtcagtgcaaactggtgtcactgagatatccattgtcctagctcatataatgtccaggtcagtgtctttctgttcctctgagccctgttttgacactagaatctttgccgtagctgcctgcggctccatctgccaaggagacgcccctaacccctctaaggtgacgttttccagcagcactgccagagaacagggtgaagggccctgcattccaggacccacaatagctctgtttttctttcctgtctctccatttccaggagaattgt

SEQ ID NO: 806 - DNA, 336 bp, Homo sapiens
ccgcggtggcggccgcccgggcaggtactgggattataggcgtgagccaccgcgtctggcctctaacgagatatttctaaaggttaggccttcagtcaagaattttaaagctggatcttagaggttatctaaactaacctctccatttcatagataaggaaagtgagtcccagaaaagcactggtttggacaagttcagaaagctaaacagtgactgtggatgtatgattctgtctcttaactcctaatccaaatgtcttctcactagataaggctgtgccttctacatttgaaggctcaaaccccatggatggatggagggaaggatgggtcgga

SEQ ID NO: 807 - DNA, 418 bp, Homo sapiens
  misc_feature 356, 361, 400: n = A,T,C or G
ccgcggtggcggccgccgggcaggtacctgaagcttgaattcctgaacttttttttttttttttttttgtatttttagtagagacagggtttcaccaaattgaccaggttggtctcgaactcctgacctaaagtgatccgcccaccttggccccgcaaagcgctgagattacagacctgaaccactgtgcctaacctccctgaacttctcaacattctgagttagtcactttccctttggtttaagccagctcgggttacttgcaaccctagttatacagccacttttctacaacacaaacaaaccacctagaataaaattcattttcctccttttttttttttttttttaatggnagggnggggggaattcagagagccagaaatctgtcctggaccangagaaagagttcttaaca

SEQ ID NO: 808 - DNA, 447 bp, Homo sapiens
  misc_feature 50: n = A,T,C or G
cttagggcgaattggagctccccgcggtggcggccgaggtactaaagtcngcaagacctaatgtctaatttacttatacctatgatgaaatctagtgccaaggatcatccatggccattgccccacttcaaatattcatgagcctccacaatccaaaatgcattaaatgtgggcaggttgccaataacacacaatcttcctaatgacagggagctttctcagatcaaaggagcaagatgttaaagacttcaaactaaactgtctttgtaagagacacccagaaaagaaatgccagatcccacaccctgtttcagttatgaaacatcaatgaaatagagaaaataataaacattcattcattcctctttggaactcatttttttgcaacaactttgcttctttcctttctttaccattgcactcaatcactaagggatgttattacac

SEQ ID NO: 809 - DNA, 438 bp, Homo sapiens
ctatagggcgaattggagctccccgcggtggcggccgaggtaccatcaactatgcgttcattatattgagaaactaatgaatggttggtctctactaaacaaacatcatgtgtttacagctaaatattgtatatccaaaatgtgaacaggaagatgaaaccaattgataaaggttcttacttcacattttccaagtatagtattaattcaaatttctgagaaaaatcaagagacatatatcacataagggcaataaatactaccatagaatttcatggtatggaagttcctacatacttatggttctgtccttcactctcttttttgaacacgtttgtggtagaaaaaaataaatacaaaaagaatcatttccaaaataattggatttgaattcttaaaaatagtttggtatttacttatgtgtttgttcatgaatga

SEQ ID NO: 810 - DNA, 396 bp, Homo sapiens
  misc_feature 160, 181, 196, 236, 269, 294, 361, 370, 383: n = A,T,C or G
ctatagggcgaattggagctccccgcggtggcggccgcccgggcaggtacttttttttttttttttttttttttttttcgagacggggtctccctatattgccaaagctggtgtcaaactcctgggctcaagtctctccttagcttcctaagtagctganaccaaaggcacaggccaccgngcctggctctacttntcaccttaactaaataaccatccacctgagaaataacatntacatgtaagcttaattcaaattttcaggtttngtgatcctcaaacgtgaatgatcanaatcacctagggagctttttgaaaaaaattaaatcccccctttacatcagttttctacaggggaaantctgggaanttcattgtctttnaaaaaaaaaaaaa

SEQ ID NO: 811 - DNA, 341 bp, Homo sapiens
  misc_feature 91, 93, 96, 129, 273: n = A,T,C or G
aaggctgagcatttcaaatccctgtgaaacctagggttttgaaaacagtatgtttcggcaacagcaagtggttcagtgtgatttggagccntnaanggggccagtggaaagatgaggctgagcatttangggaggtgccagattgccccaaaggcagtgttctcaatactaaactaatgttcttccaccataaatgagctccccctggcaacttctcatttctatcaatggaactttcgttcttcatatgtccaaaccctgaagtgccatctntcaggtctgcctcagccatttgtgattcagtgctcaagtttttgtatcatttctatattcaaaacatt

SEQ ID NO: 812 - DNA, 232 bp, Homo sapiens
aggtactgtccccatggccctgataggaaacagatggcatattcaagctggataatttgaagaggattaaatgaaacaagtattcacaaataggtgggcagagtttagaaaatcaacaagagatattgtagtatcctgggctagcaacagagaggatgggaatattgccccatagacctgaagtgcaaagagaaggagtgctacctcaaaaagagagctttgtggagaaggc

SEQ ID NO: 813 - DNA, 410 bp, Homo sapiens
  misc_feature 352, 357: n = A,T,C or G
ccgcggtggcggccgaggtaccatactcttttggttgctgtaattctgtggtataatatgaagtcagaaaatataattcctcccaaagtgctgggactacaggcgtgagccagcgcgccaggccaagaatttctttccatctcctgtgtcattgctttggcaagtgggaaacgcacgtggcctctaaagagtgggtcccaaggtcatgaaggcctgtggggtggagggcaaggtatctctttccaggctggaatggcagaagacgcggcggcagaggggctgcatgtcctcctcacagcaggcccctgagggacctttatcctcctgagccatggaatgtccctcagggagntgtcntaaagccacccccggtggggggcagggggggacccccttataagggcctttaa

SEQ ID NO: 814 - DNA, 457 bp, Homo sapiens
ggcgaattggagctccccgcggtggcggccgcccgggcaggtacatcatcgggaattcatgattaagtgactaaatgatttgtttctaaaacagagatgtatgctgtctgtggcaagggctgggagctgggcaacagctgggcagggggcacatcgccttaaagcctcatgcaccaaagagccaaaccgtgaggctttctcagaaagcaaaatacagcgctcacactgcaggggtggcggcgcaggtgtggaaccctgtcttgatgcctaacgtgggggtcacagctatccgaaggcaggctccagagagcaccttgaccatttctgcttgttttctcccgtctatgccccagcctggcagtcactggcctctgatttaaagagtcgagtttgcggggtggtttgctaattatgacccaacgagcacttctggcttcggttggagtgagtgggggtg

SEQ ID NO: 815 - DNA, 391 bp, Homo sapiens
  misc_feature 391: n = A,T,C or G
ccgcggtggcggccgcccgggcatggtacgcgggagaataacaaaagcactcgtgttacttttaaacaaggtaaaacttaaacagttttttcctccgtttctttttttatggaaataagaggcaagtgatagcaagtgggtaattcaatggcagtggttactgaagccactgacctgttcaagagagacggaagcttctacttgagcagatacaaatactgtcatccgtggagatttgaaagaagtctttctatcactgggtagtttgagagctcattagtcttctttagaatgggtttaaacttggaaacatcaaagccaagttacaagggaaacttagttttacctggggttggcagcctagggcgcccaggaattttgtttataaaan

SEQ ID NO: 816 - DNA, 415 bp, Homo sapiens
  misc_feature 2: n = A,T,C or G
tnctatagggcgaattggagctccccgcgggtgggcgggccgcccgggcagggtacaaagcgcaaataggcaatttggttcaatatctcccaacttaaacccactgctttttcaacagaaatgttttttacatcaagtgttgcctctgttctcactctccctccttcttgatcttttaatctaaccctgtcttcttgacttctttctagcccctgccccattgccattggtttataggtcaaattgcttgagttaaatgcatagaagatgcaactatttcagacctcactttaaacaatgtggtaagtgttaagacagaataaaagataaaccaaaatattgtagaagatgattctaatggcatatccaggagctaacctgctctgcattgatgagtttagctatcataattcca

SEQ ID NO: 817 - DNA, 185 bp, Homo sapiens
aggtactttttaaatgacaaagagtaatttcaacaaaaccaaatgctgcagtgtggcactcagctataacagtgtattttctttatccaaataaacacaataaaagctttgctttgcattgttcattataaaaaactgaatttttcttttgcaactatttatttttaaataaggaagtaaaattc

SEQ ID NO: 818 - DNA, 465 bp, Homo sapiens
ctacttagggcgaattggagctccccgcggtggcggccgcccgggcaggtactttggcttttgtttctagaacaccaatgagtatatgctcattaagatagtttgatgcaataaatccttattttacttgcctctattactgcattgtaaactgttgtctactttgtcttcttgaaatcctacacctcccccagcccccacatttggcctatggaacattactttatcctgattttccccctaaccttctggcaatgcctctcagactccttccagaactacttttctctgttttccttttaatgatgacagtttatgcaattgtgtcttcaaacttataacgacccagacaatagtaataacagtcaacatttactgaattcttacttgtgttaagtgctgttatatatgatattttaatctttgtaaaatcttataaggtaagtgctgtcattatttcccaca

SEQ ID NO: 819 - DNA, 181 bp, Homo sapiens
ccgggcaggtacgattatggttgggcaagtttcctgcccagtggtgcttacattctaaaggaggcaggcagttagtaagcctgtaaacaagtaaataaacatggcttctttaaagacgtaacatttcaactgattctgaatgatcacagagaaccatcttatatccagggtaacggcattt

SEQ ID NO: 820 - DNA, 410 bp, Homo sapiens
  misc_feature 166, 236: n = A,T,C or G
ggcgaattggagctccccgcggtggcggccgaggtacatttgttgggggcgtgacattaacatataaccacttagagtggacatgcagttagagaaaagtcaatgagctggaaccaagctgggaattccaacatgtagaagttaaacacaagaggaggagccagcnaagggaaacaagaacagagcttccagcaggtggggggcatttggaagaaaacgatgccatagaagccaanatgaaatagacatcaaggagaaggaagtagtcaattgttttgaatgctatgaagaaagataagaataggtaaatagtccttatatttgataacagaggtcactagtgatcttgatgaggggtttcaataggaaatgggtggggattatataccctccctggatttcaactggag

SEQ ID NO: 821 - DNA, 444 bp, Homo sapiens
  misc_feature 109: n = A,T,C or G
tatagggcgaattggagctccccgcggtggcggccgaggtacttttttttttaatttttttttttttttttatgtagaggtagggtcttgctatgttacccaggctggncttgaactcctggccccaagcaatcctcctgtctctacctcccgacaagaaaacattttaaaattcacattatattctctagcttttgtgctgaacctcttgaaatataagatgaaacagaaactggccctgccttgaaggaatttacagtagtgtggggtgggaagcatgttcatgtagagatataaagagatataaagaattaagtgccaattggaaggtgaagtttttcttcggagtaattaattctaactgcaggttaggccgtaagggggataaaggcttctcagagaaggtatcattttagctgactcttgaatcaggattttttagta

SEQ ID NO: 822 - DNA, 428 bp, Homo sapiens
ctatagggcgaattggagctccccgcggtggcggccgaggtactttcacttttgtgaataattttattttccaaccatggaagcatcatcgtgaggttgaaagaggatcattcttggaaaatacaattacttaacagttatgtgacctgggacaagttgagcctaaatgtcctcatcataaaatggaactaagtaaccctcataagaatgacgtagtgtatggacactgtttggcccagagtgggcagtgaaaaaattgtggccattctggaataatcttatagtctctatggtggggagatctgaaagccgttttctttccccttcccattttgtgtatgtatctgcctccactgatctgcacagggaagggaagtggttggtaactctctgggcactcaggatctctacacttggtagttgcccag

SEQ ID NO: 823 - DNA, 365 bp, Homo sapiens
  misc_feature 178, 267, 274, 304: n = A,T,C or G
cttagggcgaattggagctccccgcggtggcggccgaggtacctcagttggaaatgcagaaatcacctgcctactgcattgatctcgctgggagctgcagaccggagctgttcctattcagccatcttgccagcaggtatttctttatagcaacacaagaacagcctaatacaatttncagtatcaacgggctgttacaaagttccccctaccccttcccagttgggatggagacagtggagtgtctaaactttcaacatcgtccanaagtttnagaggccactcgctccctcttccctctggngtcaatggaggccatgtggagaacaagtaatgagacactcctatttcttttccaactaagg

SEQ ID NO: 824 - DNA, 432 bp, Homo sapiens
  misc_feature 355, 385, 388, 399, 403, 413, 420: n = A,T,C or G
ctacttagggcgaattggagctccccgcggtggcggccgcccgggcaggtacctttatctctttacctcttcctttctttctacctgaaggttacagtaagtcagccatcatgtgactatgaagcagcaagcatttgccaaggcaggttaagcagaaagataaaaggaacctggggctttgatatcataaaggcaacaacattattgtcaactgtattaggagaaaaataaagtcttccattgattcaagctactgttttcagctttttattacaaatagctaaatattatttctaactgatataccatcagaaaactttacctggacaactttctattaatgacctgaaaaagncgtgtgttctttcccagttttccctttacnttntggttaggagnttgnagggacttangacctcntgggattattaa

SEQ ID NO: 825 - DNA, 425 bp, Homo sapiens
  misc_feature 8, 138, 150, 152, 155, 171, 179, 193, 210, 219, 227, 231,241, 254, 265, 271, 274, 278, 287, 289, 294, 295, 304, 320,327, 331, 337, 343, 344, 351, 352, 356, 388, 403, 407, 408,413: n = A,T,C or G
aggtacanaggtggctcagacactgcctgccctctggagcatatagtccagtagagagggaggaggctgggcttagatggatatggagttagacaggactagctaatgcagtcaatgagggaaacacgagggttgcanaaatatgacctnanaangaccaggccccccttnactcaggncttttaccaccagngaaaaacaacactcctnggtatgagngggttggnttangccttttagncttggagtactcncacaggacatngtaagntgngaantggcctttngncttanngcctttttnattgaggtttaaatancccaatnaaanatgggnaaatannttaattnnttanttggaaaaaaattttttaaaattttaaaaganaaaatcaattccttnaatnnctaanaaccaaaaaaaa

SEQ ID NO: 826 - DNA, 410 bp, Homo sapiens
ccgggcaggtacaggccaggtgagccaccgcgcccggcctacacagtttgcattttaaaagattactttgtatacccctagagaggttcccccccatggaattctatattgtctaactgttttctgatgacataaaatttcttctgagtctttggaaatcaattgaaaggaaggaaagaattgcaatggccattcagattcctctcaccatttggattgggtggttctgaccactttaccattttttatgttgattctgatcagaggaagatggctgaggattagtaaacagaaacctggataactgtaggtgggcctaggttaagagcaaggacagtagagccagaccacctgagtttgaatcctgcctacactgtctaatctctgtgcctcagtttcctcttctgtaa

SEQ ID NO: 827 - DNA, 376 bp, Homo sapiens
  misc_feature 169, 170, 192, 201, 216, 278, 321: n = A,T,C or G
cccgcggtggcggccgaggtaccggctgggcaatgatggggacatgtgtttgctatcagacagctcactaatgtagaaaaaaagaaaagtggagtgggagactataaatgagaccacagggttaaattgcaatgcaagaggaaaacaataaaatacttttagaggctanntatgtttttgcccacataaaancccaaatantaatttacccttgancagtaagcatctaacatgggatttgttattcctcccctttaaaatacaaaaatgagactggncgtggtggctcacacctgtaatcccagcactttgggaagtcanggttgggtggattgcctgagcttcccggagttcaaagaccagcctgggcaacatg

SEQ ID NO: 828 - DNA, 260 bp, Homo sapiens
  misc_feature 42, 206: n = A,T,C or G
ccgcggtggcggccgcccgggcaggtactatagtccaagatngaaatctgtcttattaatcattttccccttctgtctcccctaattgccttactgtatggttcctaatgacttctagttattcttttgttttccttccattaacttaaaggatatgtgtatcttctttttatgtattcatagaagatacctaaaggagatattgnatacatatatataagatgttcatatgttcctaattttaaaataattgttaaatg

SEQ ID NO: 829 - DNA, 436 bp, Homo sapiens
  misc_feature 422: n = A,T,C or G
tatcgactcctatagggcgaattggagctccccgcggtggcggccgaggtacttcagttgaaaagttgaccaaagccaaaaaatgtctatctggtggtcagtagtttgataggttcaaggagttgaaagaagcctaggatggctgggacatgtagatcatagtgctaagagatggaaagcaccttgtgctatttggccgtttcagttgtgatgttttttaagtagagtgttgtgatcagaagggccctttagaaagattgtggctagaatatggagaacaaagaggagaccaccagagtggatgtgggaggccaatatgtaggttattctagtagctttgcagtgacttacacaaaggcagttttagcggacttgttcatgagttacctaagagataaaattgacagggacttgagaatganttagatgatggggg

SEQ ID NO: 830 - DNA, 366 bp, Homo sapiens
  misc_feature 20, 314: n = A,T,C or G
ttagggcgaattggagctcnccgcggtggcggccgcccgggcaggtaccaggagggtattgatgtttgaggtccaaactgaaaacccatcacctccttcccactgctatagcagcgttagccctggggttcattatctagccagttcacaccttctaaagtggggctctgaaaatgtcttacttccctcacagacaaagcaattctcaagcctcctgagatcgcccaccaaccagagcaactgctgtcacttggaggtgcagctgaattcttctaattgtgacacaaactcttgaaactgtaaatgctgaaagnatttaaaatgaggtttataaccactcaagaaagggtttttacaaaggtaaaa

SEQ ID NO: 831 - DNA, 419 bp, Homo sapiens
  misc_feature 167, 188, 322, 323, 378, 385, 417: n = A,T,C or G
cttagggcgaattggagctccccgcggtggcggccgcccgggcaggtaccattcttatctcagaatgctgtaaaccatcagtagaagcagtttagatttggactgcatggtaaaatgaaaagtaataaccctccaaccacaacctagtcagggtattaataattatnttgtagcaaggaaaaacaaangaagaaaataatattgaaaaaatggagattccccaaccagtttcatatttgaaggatctgagttgtatttttattaaggaaattttttttctgaatactgtcttccaaaatgttaacattaaaatctgaatcannaggacttctgaatgggaaaaggaagtttggatcacctggaccacctaggggctcncgaaagncgttgtgttgggccaccatgggaaaaagttcnga

SEQ ID NO: 832 - DNA, 404 bp, Homo sapiens
ccgggcaggtactcagctaagaagaggattgctttgggcataggaagcagaatgacgagttcagtcttcctcagtagttggagcacagttctcaaagcccatcaacactttggaatggatttgttgttttatttatgccatcaagggagagttgatatttgtgtattgctaaaaactactaaagtatgtcgatgcttaggtaggaacatacaaaccatatatcctctgggatctgcccaggtttctgtataaggcttgacctacgtaagatcctatgatgaagaccagaaaactttttttaaaagtaggtaaattaaaattaaaatcacgagtttgttcacatttgtcccataggttcctagtgcaaaaatgcagggagataaaagcaaacatttgaactcagt

SEQ ID NO: 833 - DNA, 442 bp, Homo sapiens
  misc_feature 7: n = A,T,C or G
tcgactnctatagggcgaattggagctccccgcggtggcggccgaggtacccaagtgacatgactaattacagtaaccatgaattcagtgcctggccatttatcctagcaatttcaagtctcaggaatctcttgcagcattaagaaaccagagagacaactatatgtttaacttctaccttctgtcccctgagaagtcactactcatcttgcttccctcaggatgaactttctgtttctatgtttaaaagtctgcaaaatagatttaaaaaacaaacaaaaaaagcagactcagtatgagatcaaaccttacgaatcattgtcaaggtcattttttacctcttctatacctagactactgggtgggatagtgcattcataaaattccagattcaatgctctcatttccatcgtgacaaaatgctactttatgaagaattatg

SEQ ID NO: 834 - DNA, 441 bp, Homo sapiens
ccgcggtggcggccgcccgggcaggtacttggatttccttcctttgttgactcaacttgagagctctcattgtttccagaagcactttgttgaggcttgcttttggccgctgcatctggaagcttagaggcaatattcctgggtgggagtaacatccgagttggatttgatgtgattaaactcaaagggggaggaggctgatcacggaaaacagatgtcaagcagagctgcacagtctctttcattgctttcatctgtgactccctgtcaagagctgctttctccagttcatttttggctacagctaatttttgttccagatcagtaagctgctgcgccttaaataataaatccttcttcccataaccgaagctccttcagctgggcttggattttttttgactcttcttgcgtgaatgccacaagagcttgtttcctgac

SEQ ID NO: 835 - DNA, 364 bp, Homo sapiens
  misc_feature 32, 256, 257, 270, 316: n = A,T,C or G
attggagctccccgcggtggcggccgcccggncaggtacttcagagctaagatagctctttgggttctaaattctgcgatcttctttttgatttctcttggagcaataatgaaggcaaaacatcaataaacataacaaactgggtaagggagaccattgagaaggactaaggacaccttcaaagttctgagtgagtttaaaaagaagaatgatgaaaactttgatagaaataggaaaaaaagtaagaggaacttgnntggcttgaaactncttaatgttcaggctcattatattgaagatgacagtggtcattganaaaacaaaatccccaaagcaattttggaaataagggccaacatttaat

SEQ ID NO: 836 - DNA, 434 bp, Homo sapiens
  misc_feature 175: n = A,T,C or G
ggagctccccgcggtggcggccgcccgggcaggtacttctctgctgaattaaatagaatccattgattttcatttaacttttacttaatgatttggtattgtcattatgagcataaattattataatgtaatgaataaaaataatataatacaaatatatgccctctaggttatnaacacttggaggacagggcccagtatgttattcatcaatgtatccctactactgcaagcatcataataatggcttgcatacagtggtggtcacttatgaattataattaagtattgcattaaaatgctgaacgtgtatatctagctcatctccacctgaaagtcactgggaatatatacatgtgtgtatacacacatatacacctgtgtgtccatatgtaatatatgtccttaagtgtatatatacattatatatatac

SEQ ID NO: 837 - DNA, 428 bp, Homo sapiens
  misc_feature 18: n = A,T,C or G
ctacttagggcgaattgnagctccccgcggtggcggccgaggtacatttgttgggggcgtgacattaacatataaccacttagagtggacatgcagttagagaaaagtcaatgagctggaaccaagctgggaattccaacatgtagaagttaaacacaagaggaggagccagcaaaggaaacagaaacagagcttccagcaggtggggggcatttggaagaaaacgatgccatagaagccaagatgaaatagacatcaaggagaaggaagtagtcaattgttttgaatgctatgaagaaagataagaataggtaaaatagtccttatatttgataacagaggtcactagtggatcttgatgaagggggtttcaatagaaatggtggggattatataccctccctgggatttaacttggagggtaagga

SEQ ID NO: 838 - DNA, 606 bp, Homo sapiens
  misc_feature 183, 404, 413, 480, 484, 492, 501, 511, 521, 527, 537, 589,592, 599: n = A,T,C or G
ccccgcggtggcggccgcccgggcaggtacgcgggctccacataattgctgttctcagagatagagataagaagttttgatagcaagttttctgtttaatgtgtaataagcactttctctttttttaattctcataggtgaatcatctctaatcatgaacaagttaaaatgccctcattgtanctatgtagccaaatacagacgaacactaaaaaggcacttgctcattcacacaggagtgagatcatttagctgtgatatttgtggaaaactgtttactcgaagagaacatgtaaaaagacattccctggtaagtaactttaaatacagctgatctttgagataaactatatttatgtcagtgaagtttaaagggatttaaacagttaattgtgaatttaaangaaaaatgnctcctaaattgctttaaacagttttgactttattaaccgatagtgagccttttacaaaaaaactggnggantcacctcnttattaatngtgggggttnaatttggagngggtcnaaaagccttntattatatataaaaatcctatttttggatttttttccccctccaattaaggngcnttaaaangggttaa

SEQ ID NO: 839 - DNA, 350 bp, Homo sapiens
ccgcggtggcggccgcccgggcaggtacggttataagggaattgggaagtcttcgtcatgggagacgtatcagaattccggaggtgactttaacttcagattagattctagaatcagtttgcaaaatagagtcatttatgaatttgtattttgacaaaaagttcatcaacaccttttataatattctatgttgtggaaaaaagttaggagcaacctgactctgtatgtgatattatgacttcaaaggagcttggtttctctctctctctctctcagaggaaaattttagtgtgctcataacttaatatagacccttttcagacatttcggttgtttcctgcttctgattt

SEQ ID NO: 840 - DNA, 412 bp, Homo sapiens
ccgcggtggcggccgcccgggcaggtacacatagctcaggaactactgatgcactgccttccattttagtggcagtttgaatttaagaatttctagtttgtcttaagcttttctgtaatctctcacatatatattcttaatttcaactgataatttctttcttaatgtctaatatagcctatttgccctctgaacagcattgagatgctttgaaattttaatgcccaaaaagttggctttggtaaggtggtcttcatttctgcagtagaaccatggttgaggctaatggtcccatcagcattagcaggcccttggctagttgcacagtaaactggcatgtttcccactagtaaaaaggagataaccccaaaccaggttttaggggattaaatgcttgagtttgtaggtgttc

SEQ ID NO: 841 - DNA, 301 bp, Homo sapiens
  misc_feature 84, 149, 183, 190, 196, 204, 222, 237, 247, 249, 255, 259,272: n = A,T,C or G
tagggcgaattggagctccccgcggtggcggccgcccgggcaggtacttttttttttttttttttttttttgtatttttagtanagacagggtttcaccgtgttagccaggatggtctcgatctcctgacctcttgatccgcccacctnggcctcccaaagtgctgggattacaggccgtganccccccntttccngcctaacnagacttaatttttacttnaactagatggcgttnattcatttgntnactcanctgngccaggaattaanttgggcactgggaattccaaaaccaacaa

SEQ ID NO: 842 - DNA, 357 bp, Homo sapiens
ccgggcaggtacggttgctatttatagccactatcataacatactgctgcctctaactcctggcctcaagcgatcctcccacctcagcctcctcggtagctgggactataagcacatgccatcacacctgaattaaggacactttttgttgttagtattaatgcattggttcagctgagcaaatatttaacaaaattctactaagcaccaggctttcttttctaatatacaggtattaatagtcattagcctgaggcacatataatacacagactatttgaatgaatcagactgatgatacaaagtataattgatgagagacatgtagtccaaccagaagattgaggacaatcatcc

SEQ ID NO: 843 - DNA, 201 bp, Homo sapiens
  misc_feature 3, 4, 21, 35, 61, 83, 88, 90, 94, 95, 96, 110, 118, 136,140, 149, 159, 163, 175, 178, 189: n = A,T,C or G
gannaaaaaaaaaattttttnttgggggggggganaaaagggaaaccccctttttaccctncccaaaacccctcccggggtanccggngngggnnntttggggtgggganccccgggnggggtacccacccgggtncctncaacccggnggggggggancccnaaaggggggggnttnaaaaccccttnatttgtttaatt

SEQ ID NO: 844 - DNA, 399 bp, Homo sapiens
  misc_feature 34, 46, 201, 279, 338, 351: n = A,T,C or G
ggcggccgcccgggcaggttccgggccttgtgcnaaacaccttagnttggttatctctgaacttcacatcagtcatatgaggtgggtaatatcattatctacattttacaagtatggaaactggggattactgaggttattttgcccaaaggtaacacagattggtagattctggagccagagttggaaactgggtagttntgctccagacccaatgatctagcatcctagattgttggtccattagggctctctctttttcatccgttttgtaaaagnagaagttttcacctttcttctcaaacccatttgagtaaaaacaactttgggaacctggnaaggtgccaaaanggggaggaaatttcttaaaggaaaaagccgttttttttaaaaaaaaag

SEQ ID NO: 845 - DNA, 413 bp, Homo sapiens
  misc_feature 4: n = A,T,C or G
actnctatagggcgaattggagctccccgcggtggcggccgaggtacacagagacacgatccacagttgtgtaggaataacttcctaaacatctttaggatctacctctttttcctgttcccactgttatttctttgtttcaggcccttaacatctctaatatacactagtatttctgtcttcacactgtttttttttctttacacagctcttttcatagcccctccattagcacacagattggaattgtgtctccttgttacccacagaataaaacccaatgttcttaatatgtagtcttaatatagactctataaatagcccctttgttaatctatcttgaattactcacttttaggtttcagctccctactgagaccccaactggctttacccttctggttccctccctg

SEQ ID NO: 846 - DNA, 546 bp, Homo sapiens
  misc_feature 153, 156, 160, 185, 190, 196, 197, 199, 218, 223, 224, 225,244, 261, 275, 277, 285, 294, 296, 298, 303, 304, 309, 312,330, 333, 344, 347, 351, 353, 385, 387, 389, 391, 393, 395,401, 404, 406, 410, 412, 416, 421, 429, 439, 452, 453: n = A,T,C or G
  misc_feature 455, 462, 483, 489, 492, 497, 502, 506, 514, 518, 520: n = A,T,C or G
tcgaggtacttgtccttcaattttgggaaatgctattatttgataatttctctttttgtattttctttgtttctctagattcttagttttcaattttgtctttcaaaccttgtatttaatttttattcctgctttcatatgtatatataaatntgncatntgaatgtttctttttttataacccntttanctttannanttccaatgggaatggcaanataannntttaccccttccttttgtntgattaaaataagtttntctaaatttggaananaaatatanaaaattttngnangttanntaatntgngccctggtggacctttgngangggccatccancgncccntngttaaaattccgcgcagtccacctttttgggngncngngncnccaaantgncngagngntggngaatntttgctcnttgtaaggcntccaagtgtaagnntnttcaatnggaaccccaaggcccctgggngaccanaancaacnaaggnttgnaaaaaacncccncnaattctttcttaaccttaaaaaaaat

SEQ ID NO: 847 - DNA, 653 bp, Homo sapiens
  misc_feature 156, 171, 173, 182, 211, 212, 236, 238, 240, 243, 245, 253,255, 271, 279, 287, 290, 322, 325, 337, 361, 364, 365, 372,374, 376, 400, 408, 410, 412, 413, 420, 432, 436, 437, 443,474, 480, 481, 513, 516, 518, 521, 523, 531, 533, 536: n = A,T,C or G
  misc_feature 543, 553, 564, 570, 589, 592, 599, 616, 618, 639: n = A,T,C or G
aggtacgcgggcacccacacacatcttactagaccaaaaaagaaaacttgtcaagcaaataatctcccatttcttgggtcatttggagagataacacaggccaggttatatgtcctgaaagatgagaatgtgttgaagtccccagagagtcttganacgaggcccttcttncnagggaagtnagttggttctggcccggcttgcaacccannccttggccccccctttgccccatngncnccntngaacttcnancccttggcaccaattncattgggngattgccntgnctttgaattggcccccaaggggccttttcaantgngaccttggaagnccaattggggctacccctcttttnagnncaacccncncntccaacctcttggttttaaccccnccaaaacngngnnaggtaantttttggcctgngggnntcctgngcaagtggccaattttttccaaaaattttgngtaagnnaaatggggaaattgggggcaaaatttggggcnttngnaantnggggccangntgnaaaaaanaaccttttanaaccaaaaggnccaagngggaaaaggttccttggcnacnccccatnggggccttggccaaccnanttggaaggaaaatcccccccnttaattgggggcca

SEQ ID NO: 848 - DNA, 359 bp, Homo sapiens
cgcccgggcaggtacacacatataattcagctgtgatttttaaaaatgtgaacttcatactggcagtcacggatcctcatcatttctcagcttgatttattctctctctccaggcctggccgtctccaagtcatcctctacaaagcactcatgataccttttgtaaaccacaaatcagacgtcataactcagaattttcggtctgcttggggcacaagaccatttttgtatcctctgtgagctgaacaatgtctctgcacccttacactcaactggaacactctgcaactacagaaggccaaagaggcttccaagttctctcttctgggcctcttctcactcactctcttttctaaggt

SEQ ID NO: 849 - DNA, 376 bp, Homo sapiens
  misc_feature 1: n = A,T,C or G
nggagctccccgcggtggcggcccgcccgggcaggtacaaaaattaagattttacaaaataacagatgcaagatctggcaaatgattaatttggggaaaccatgtcatttactacatccaagtaagtctagtatttccttgaaatttggaagacagaacaagttctgcggccctcgtgaacatttctcaacagggttacgggaaaactctgttatttgaatgtgtaggggacagggcgtggcaaaggtgccagtggaatttaatacagtcaagcaggaggcttcttttgaaaaatacccacgaggctgccagcggagttcaccaaggggctaaaggcagcaatcaaatgaaaaaaaaaaaaattaaaaaagtacct

SEQ ID NO: 850 - DNA, 386 bp, Homo sapiens
  misc_feature 313, 381: n = A,T,C or G
aggtacaagaaaaaatcaaacaatcacatcaaaaagtgggcgaaggatatgaacagacacttatcaaaagaagacatttatgcagccaacagacacatgaaaaaatgttcatcatcactggtcatcagagaaatgcaaatcaaaaccacaatccgggaggtcttgccaaagaccacctgggctttccgggcaacgtgctagagcttctgggaagcagtcgtggccctttggagattccacggcttcggattcctactgcaggatgctccactgtgtctgccggcctctggcgtttttgctgaggggtaacctnggaatgggctagaaacaagaacactgagatggcccagtccgtgccccaggcattccctcaccaccgtnggtgg

SEQ ID NO: 851 - DNA, 627 bp, Homo sapiens
  misc_feature 528, 563: n = A,T,C or G
ccgggcaggtacatctggcaaggggcacttttactctgatgtcgggtgttttagggatatgagttcagtgaataagtagctagagggaggagctagttaggtcttgattttaggcaaatgctaaatctacctcattttccatacctgtcttttgattgggatagctaaagaatttataccagatgaaccaagcaagccaccttcttacgacattaaatttggtggaccaagcccccagtagaagcgctggggcccagcacggccaggctctcaccttttagagcagcacccccgactaatccagcgaatggaatctggctatgaaagcagtgagaggaacagcagcagccctgtcagcctggatgcagccctgcctgagagctcaaatgtctacaggtattgtttggcctttgaacagcaacattgtctcttgcagcaatgtgagccacctacttggggctttcaggcatggctgagacaagtggagggatggcctttgctattatctctatgtgctctttcaacttnctataacaacagcaccctctgctggaagaacagangcactttgaagaaaggagagagaactttctatttgaaatcaagttatcatgtataaaataattt

SEQ ID NO: 852 - DNA, 432 bp, Homo sapiens
  misc_feature 5: n = A,T,C or G
gactnctatagggcgaattggagctccccgcggtggcggccgcccgggcaggtacagttgtagtttatctgcatagataatatcaaccaagttagacccaataaagagtaatatatagaatgactatttaaaatactatagggaaaagttggattttttttttttttaagctagattacccaaagttaaatttggcccaaagtgggatatcaattcctagacttgggttttaacttaaatggatttatttatggcctctaagacaatcattttattctcactgcattcatgaaataattcactaacacatttctcccagagttgctaatgcaatgctctttccctcagtggagtcatctgattgttttagcgcaggcactatcatctcaccatcagaatatataagaaatgtttgaccttcaattaaagttg

SEQ ID NO: 853 - DNA, 421 bp, Homo sapiens
ggagctccccgcggtggcggccgcccgggcaggtacgcggaattacatcacatctatatgaaaaatcaatctgtttttttagttgctgaagcacttggagactccaaagtaaatcaaatctttacatcaattttccaggaaaagaaaatgataaaaatctttgtccttgaggttccacttgacagggtcaaaagcaattctttcattgcattataccataacacaaatgagaaaatgcaaagatttcagaattgctctatttcacatattagcttcttagtttgcctctgcagctgagcaagtgttattaggcacaagaaattttattgaattcttaaactggtctcgagaatttcgtgatggatggtttactcaatttaaaacagatcatctggtgaaattgctttcaggttaaaaggga

SEQ ID NO: 854 - DNA, 304 bp, Homo sapiens
  misc_feature 33, 115, 129, 148, 202, 207, 252: n = A,T,C or G
ctatttgtaataaaaagctgaaaacagtagctngaatcaatggaagactttatctttctcctgatacagctgacaataatgttgttgcctttatgatatcaaagccccaaggttnccttttatctattntacttaacctgccttggcnaaatgcttgctgcttcatagtcacattgatggcttgacttactgtaaccttcangtttnaaagaaaggaagaggtaaagagataaaggtacctgcccgggcggncgaggtacaaagtccctgaggcaaaagcatgcttgctgtgttctaggaaaag

SEQ ID NO: 855 - DNA, 419 bp, Homo sapiens
actacttagggcgaattggagctccccgcggtggcggccgaggtacatggtgtttcttgtgccccaggagagagcctcccaatcaactctcctgttgatcattttcccttcttcagcactaatcatgaagctgtctccaaaatgagaccaaaacaaacaaacaaaatcagactcaacctaaaagccttttttgttttgttttgttttgtttttgagacagagcctcgctgttgtcgcccaggctggagtgcaaaggtgtgatgatttcggctcactgcaacctctgcctcccaggttccagcaattctcttgcctcagcctcccaagtagctgagattacgggcccctgccaccacacgtgactaatttttctatttttagtagagatggggtttcaccatgttggccaggctggtctt

SEQ ID NO: 856 - DNA, 371 bp, Homo sapiens
  misc_feature 1, 15, 21, 43, 49, 364: n = A,T,C or G
nggcggccgcccggncaggtncaagatttcttatggcgaattnaatttnatcaatacctggggaaacacaaaaacctggtgcagctggaaggctgctgcactgaaaagctgccactctatatggtgttggaggatgtggcccaggggggacctgctcggctttctctggacctgtcggcgggatgtgatgactatggatggtcttctctatgatctcacagaaaaacaagtatatcacatcggaaagcaggtccttttggcgctggaattcctgcaggagaagcatttgttccatgggggatgtggcagccagggaatattctgatgcaaaagtggatctcactgctaaggctctgttgggatnaaggcct

SEQ ID NO: 857 - DNA, 439 bp, Homo sapiens
  misc_feature 376: n = A,T,C or G
ttagggcgaattggagctccccgcggtggcggccgcccgggcaggtacggttgctatttatagccactatcataacatactgctgcctctaactcctggcctcaagcgatcctcccacctcagcctcctcggtagctgggactataagcacatgccatcacacctgaattaaggacactttttgttgttagtattaatgcattggttcagctgagcaaatatttaacaaaattctactaagcaccaggctttcttttctaatatacaggtattaatagtcattagcctgaggcacatataatacacagactatttgaatgaatcagactgatgatacaaagtataattgatgagagacattgtagtccaacccagnaagattggagggacaattcatccttgatgttaggatttttcatttggactttttagtcttggg

SEQ ID NO: 858 - DNA, 449 bp, Homo sapiens
tacttagggcgattggagctccccgcggtggcggccgaggtaccattcttatctcagaatgctgtaaaccatcagtagaagcagtttagatttggactgcatggtaaaatgaaaagtaataaccctccaaccacaacctagtcagggtattaataattatatgtagcaagaaaacaaagaagaaaataatattgaaaaaatggagattccccaaccagtttcatatttgaaggatctgagttgtatttttattaaggaaattttttttctgaatactgtcttccaaaatgttaacattaaaatctgaatcagaggactctgaatggaaaagaagtttgatcactgacacctagggctctgaagcgtgtgtggccacatggaaaagtccgaaggatgcgctgtccgaatctcctttgtcttcactccatagacaattgggttgagcacag

SEQ ID NO: 859 - DNA, 469 bp, Homo sapiens
agggcgaattggagctccccgcggtggcggccgcccgggcaggtaccacatttgtgaatttatgccacagacttatttacgtagtgcactaaaattataaatagagataatgattgcagcatggtttagagtagtaaaggactggaaacaatctccatggcactgataaggcaagatgtagggaggagaaatggggagtgactgctcagatacagtgcctccttttgggggtgatgaaaatgttttggaacttgatagaggtgctagttgcacagctttgtgagttttctacatgtcacttaattgcacactgaaaaatgttaaatgtgggctggggacaatggctcatgcctgtaagcccagcatttttggaagccaaggtgggaggatctcttgaggctagcaagttcaagaccagcctgagcaaccataagtgagactgcattctcttaccaaaaaaatttaaaac

SEQ ID NO: 860 - DNA, 342 bp, Homo sapiens
  misc_feature 1, 258, 342: n = A,T,C or G
nctatagggcgaattggagctccccgcggtggcggccgaggtaccctgagaacagcaataatgcacaaacattactattccaacagctgcattgaaacacccttggtaggattgggaaaaagatggattattgccatttggacactccaggactgtccattaatactcctgactaatggaagatgataaagattgggcaagaaaaatgactgcagcaaacgccttggcatcttcaacttgtcacctttagcaagaggnctcttcaacagttcttggactgtgtttggcagccagacactctcagaacggcaaggagacacagctaacatgatctttgcaatn

SEQ ID NO: 861 - DNA, 382 bp, Homo sapiens
  misc_feature 366: n = A,T,C or G
ccgcggtggcggccgaggtacaactattttcacatccaagaaaatttgaggagttctagggcaaatgtaaagagataacattccttgcatacctgaagagaagaaatatggacagactgagaaaatgatttttaaaatgacaaaataggctgggcagagtagctcacacctgtaatcccaacactttgggaggctgaggcaggcagattgcttaagctgagaagtttgtgactagcctgggcagcatagcgagatcccatctctacaaaaaaaaaccacaaaaattagctgggcatggtagtgcatgcctgtagtcccagctactctggaggctaaggtgaggagggatctccctggagccttggnaaggtcaagggctgca

SEQ ID NO: 862 - DNA, 440 bp, Homo sapiens
  misc_feature 1, 335, 376, 388, 409, 420: n = A,T,C or G
nctatagggcgaattggagctccccgcggtggcggccgaggtactatatgctagaaacttggctgaatgatttgacattatcctatttaatgttcatgacaatccaataacgtaaccactcatatctcccttttgtgcagataacaaactgaggcccagagaaatcaaatatgttgtcaaaaatctacatcattgaagagatgggtttcaaatccaggtcggcttggcccttgccacgacttcataatgaaattccatgggtgagtgttaccagtttctggtccatccttgcttatttcaagggtctcatcatcccatccactgtatcacttttnttgttacaaggccttttcttcttttctaccatgggaaaaangacttaatgganatttttttttacttcataagncttgggaaatnttatcaaattcacccattaa

SEQ ID NO: 863 - DNA, 402 bp, Homo sapiens
  misc_feature 195: n = A,T,C or G
ggcgaattggagctccccgcggtggcggccgcccgggcaggtacacccaaagaaaattaggaaaacttaaaaataagccagataatattcagtgataggacaccttttgttttaacattaccgtgttaaacatctatccctctattgtgggtatatgtccttgctctcacactactctgtgtttctcgaggtaangacagctagtattttattcctgaatagtgcctacactgagaatttatagaaaggacagcaaaattatttgaaacatgaaaaatgttttaaaatgaaaatagtagtccaccataacaagttctatcacagttaatataaattgagcaccccaatctaaaaattcaaaatccaggaatgttccaaaatctgcagtttttggagcagtga

SEQ ID NO: 864 - DNA, 439 bp, Homo sapiens
actccttagggcgaattggagctccccgcggtggcggccgaggtacagtatgccttaaatgtataggaccactgagttcaggaagaaaagcataggtattctgtaggtgaattacactaacaaaatcacaactgcagaatgtgatctgatacttttgttggacagtaaagctaatacattttatatacacagtcatacctttttttttttgtaatgtgtttcgttaaccgtaagcacacagtcatcacagactgagacaggactttgttagaccagatcttgtgagctaaatatttaagagcttaacatatataaatgattttaattgggtattgggcgaaggaaacctaaaaaatgctttaaaatttgacagatcttacaatttggcttactggaaaaattcagaaaagcctttttatgaaaactttggttatttttt

SEQ ID NO: 865 - DNA, 386 bp, Homo sapiens
  misc_feature 123, 181, 349, 357, 363: n = A,T,C or G
gtatgccttaaatgtataggaccactgagttcaggaagaaaagcataggtattctgtaggtgaattacactaacaaaatcacaactgcagaatgtgatctgatacttttgttggacagtaaanctaatacattttatatacacagtcatacctttttttttgtaatgtgtttcgttaacgnaagcacacagtcatcacagactgagacaggactttgttagaccagatcttgtgagctaaatattaaagagcttaacatatataaatgattttaattggtattgggcgaaggaaacctaaaaatgcttaaattgacagatcttacaattttgcttactgaaaaattcanaaaagctntttatnaaaaactttgtattttaaaatat

SEQ ID NO: 866 - DNA, 426 bp, Homo sapiens
  misc_feature 284, 305, 333, 402: n = A,T,C or G
atcactacttagggcgaattggagctccccgcggtggcggccgaggtacaagcagtgttctgagtagtgagacaagacctctctactaaggtcatcctttcaatagagcccctgcagggaatgagggggtgagccacacgtgtatctggggtaggcttggggtgtggtgattgtgcaacaacagtccaggcaaaatgaacagcaaggggacaagactggtggaccctcactgggccattggtggaacagcaaggaagctagtgtggctgggatggactgatgangagtgtggtagaaatgaagtnaaagaggcaggatttaatccctgatttnccaagagagaagcaaagacacaggtgttaatttcaatcagtcctggaacccagactcaaacccaggtcncctggttcttcatgcacagacttg

SEQ ID NO: 867 - DNA, 444 bp, Homo sapiens
cgactacttagggcgaattggagctccccgcggtggcggccgaggtacctcaattatctctcataacacacagggtcccatgttggccattgcctcagcacatagtcaggtagccagcctctctgaatgcctggtagccaggattaaaataaataccctaggtattatctgcatatctcagggtcaggatatatcccatgactaagcccacaatcacagtaaattctttgagccagaccacattttggactcacatttaatgtaaatccacatcactccaatcctgcatgatggcacaggtagatttttgggagctggacaataaacaactattgagtgcatccccacggaccccaaaattcaattttataagaagtatctcaaggcattaataagtgcatcaaagatggtcaatgtggcattattttggtaaaatcaagaagc

SEQ ID NO: 868 - DNA, 410 bp, Homo sapiens
ccgcggtggcggccgcccgggcaggtacgaccttggctcactgcaacctctccctcccgggttcaagtgattctcgtgcctcagcctcttgagtagctgggattacaggcgcgtgccactgcgtccggctaatttttgtatttttagtagagatggggtttcaccatgttggccaggctgatctcaaactcctgacctcatgtggtccacccaccttggcctcccaaagtgctgggattacaggcgtgagccaccacgctcagcctacaagcaattttttaaaaactgacacctattactgataaaaattctctggttttaaaaatcctattttacctatttttaaagataaagttatttagtttttttttttaaaatacaattaatttcctgttatttggataaaaaat

SEQ ID NO: 869 - DNA, 250 bp, Homo sapiens
  misc_feature 3, 49, 151, 155, 165, 188, 228: n = A,T,C or G
ganctccccgcggtggcggccgcccggccaggtactgaggtgggtctanaggattagtctgtgaattgcagcctggattctgcagttgtggggtctgcctggtgctgagttttactgtggtggactcagtgttgggatccagcggaaaatnctgngcttactttnctctcttcctgccaagtggagantatgtcttttcatgctctgctgcctggaattggaaaagangtgatttggataatgtaaaact

SEQ ID NO: 870 - DNA, 428 bp, Homo sapiens
  misc_feature 219, 384: n = A,T,C or G
aattggagctccccgcggtggcggccgcccgggcaggtacgcgggtatacgcgcacatatatacgcacacacacgcacatacccctcaagaagcaattaaaccgttgatatgtaatcttccaattaaagtagcttgatgcccatcttaaactgtaaattgaggaaaataacatttgtggctgtaatagatgattttatgtaggggctctagggcagtcnggagtctacattttagccagccttgtaaacttgtgtatggaattcataggtttgaacctatagagagctgaacccctctaaggtctttgagcagctaagtggcagctcatcttgtaattttaaggttaaacaaggatgtgtgatgtgtgcacatgcatctctctnctttagagacgttattcccagttgatgggcttttacttgaaaaa

SEQ ID NO: 871 - DNA, 362 bp, Homo sapiens
  misc_feature 360: n = A,T,C or G
atagggcgaattggagctccccgcggtggcggccgaggtactttaaaataatagaccttacaaagttttctagacagacttcctgtgaagaacaaggagcagggggaaaggggaaggggtagaatttaccaatctgaatatttcagcaagggagaatgcatgagttttactataaaaccacactgaacattgcaacaatactaaattccatacatatataataatcactgagctataaggttgctgatgtatttgttcttgaaagtgaattagagttactttatgcagaatcagctagttttatggtttcataatggtctttcccttttttgaactttttttttaaagtcctaaaggtangg

SEQ ID NO: 872 - DNA, 573 bp, Homo sapiens
  misc_feature 188, 233, 251, 274, 278, 295, 328, 341, 346, 395, 416, 419,434, 452, 471, 508, 517: n = A,T,C or G
ccgggcaggtactatgtgcccactctttcatagtcaactaaaaaaaagcagcttcaattctagctagttttccttttcctttcaaatagaaaaaagaaaggccagaagtcagcagtttctcttcccctgagtccctgtcctcatataaagatatttttcccaagcccccttctggaaaaactttctgntgaaaatatcatcaagaccaaaaaaacaataattgcataagtcangactttaaataagccaanagggaaggctgtaaacaccaacntttntttattcttaaaggcancttttacttacttaccaggccaaaaaattcagnaatttccttaggntaggntaaaaaaaaaaaggaaatgggggaggggattaggaatccttttattagnccaaaccccataaaaaaggcnttnggaattccattaaanaggggaagaaagtaaagnaaggccttaggggaattcntaaaaaggccaaaaggatttttttccttaaattggtncaaaaaacncccaaggggggcaaggaattaaattccaacttaaccctttttaccagggaaaccaa

SEQ ID NO: 873 - DNA, 678 bp, Homo sapiens
  misc_feature 177, 533, 548, 655: n = A,T,C or G
cctatgggcgaattgagctccccgcggtggcggccgccgggcaggtacaggaatttgtttaaaacctgagaataatacatcagatgttcttagatatgtttttatatcatttattgtagttttagaagctgtaaatcttccattactggtttctgcgttattagaaagctattaggnatttgggtggagaggacatctaccctccgccaccaagtgtaagaaagctgtgagggaatttgaatttatgtaatttcaaaggagacattcactttcagagaataactcattaggctcgaaatttaatagtttcagctactgaagaggctgaggtagaaggattgattgagcccaaagggtgacagtcaggtatgatgaggccactgctctccagcctgggtaagagagcaagactctgtctcaaacaaacaaacaaacaaacaaaaaagaaagtctatatatcttttaactggtatttatttatctatttataagcctgcagtggtttctggtgtgcataagaaaatgaacattancctatggaaggcggnatcaattagtcttggattttggagaccccaagctgatctcctgaactgcaaagatagcatcatttcaaatgccaatggtaaggaattctgggatggttttgaagaantttccaagtatggtggggtttta

SEQ ID NO: 874 - DNA, 274 bp, Homo sapiens
  misc_feature 216, 219, 257, 266: n = A,T,C or G
ccgcggtggcggccgcccgggcaggtaccctgagaacagcaataatgcacaaacattactattccaacagctgcattgaaacacccttggtaggattgggaaaaagatggattattgccatttggacactccaggactgtccattaatactcctgactaatgggaagatgataaagattgggcaagaaaaatgactgcagcaaacgccttggcttnttnaacttgtcacctttagcaagaggcctcttcaacagttnttggactgngtttgggc

SEQ ID NO: 875 - DNA, 403 bp, Homo sapiens
  misc_feature 331, 353, 359, 367, 370: n = A,T,C or G
tagggcgattggagctccccgcggtggcggccgaggtacaataataaaactaagcttatgcctaaaatattctcactgagtgcctgtgaatccacgactattagcactgtggagcaatttctccttgcagaagagtgctaactctatccattaaagccttggaaattgccggtaaatatgtaaaaaatcaagtgcttaaatggatagcaattattggcaggacctaaactgatacaaaagtgttccactgtctcaatatcaaaagcccaagaatgccagattcccaaagtgagtcaaagtgcttggattgctttgcataaacatggttagnccaggaatcaacacccctgggnattggnagccttgnagngtgggaatttttccaaaattcctggcaaatggt

SEQ ID NO: 876 - DNA, 367 bp, Homo sapiens
  misc_feature 130, 136, 137, 143, 339: n = A,T,C or G
gcattttttagaccataatttagatctttccatcctccaactaagatttacctttttatatgaagctttaattactttccgcaacacttttgtcaaaatctgaagtcttttaagaaccaagatggttccnggatgnntatttntaattgttcaggggatttttggaggtgaggggctatgaaacactgactcctgcccctgactcccgcccctgactcccgcatttattttcataaatgaaaatagtaaaataaattcattaagggtattatgtggagaatagaaacaagagtaaaggactgagagtatattacgagaaaactatcataatttttggcnagagataaatgggacatcgaagcttgag

SEQ ID NO: 877 - DNA, 423 bp, Homo sapiens
  misc_feature 14, 176, 341, 379: n = A,T,C or G
actactatagggcnaattggagctccccgcggtggcggccgaggtacaggttctttgaatgcagtatttattcacatagttttcattttctgtcctgacaaaaacttggtgatgtttgaatgattacagaacaaataggattgtggtttatgtttcctattatgcatatttggcangttgaattatgacattagattgagacatggtgagagggggcaggatacggggtaggaggaggggagcaagttacaaaaggccccagttccgggaagctgggctgagttgttctgtttaacttcttcttcctttattcctatggtttttatgattgcaaaattggncagttgggcaggggcagctctgactattatttgctagnaagccaggatggtccaccatttaattttagatggtctaggggga

SEQ ID NO: 878 - DNA, 428 bp, Homo sapiens
  misc_feature 27, 30, 31, 36, 37, 45, 47, 51, 54, 68: n = A,T,C or G
atagggcgaattggagctccccgcggnggnnggccnnggtccccntntttnaanatccaaaaaaattngaggagttctagggcaaatgtaaagagataacattccttgcatacctgaagagaagaaatatggacagactgagaaaatgatttttaaaatgacaaaataggctgggcagagtagctcacacctgtaatcccaacactttgggaggctgaggcaggcagattgcttaagctgagaagtttgtgactagcctgggcagcatagcgagatcccatctctacaaaaaaaaccacaaaaattagctgggcatggtagtgcatgcctgtagtcccagctactctggaggctaaggtgagaggatcgcttgagcctggaaggtcaaggctgcagtgaactgtgattcgtgcaactgcactccaggc

SEQ ID NO: 879 - DNA, 382 bp, Homo sapiens
  misc_feature 337: n = A,T,C or G
ccgcggtggcggccgaggtacaacccagaatatgtcccacagggggttatgtggggcacagtatatataacagggggatatgtgtggtccaggaggtgagagaagcagggagagaagcaattgttgcattcctttgcttctgctgggcgctctgtgatgctatatataaaataaggtaagtgtgcagttgagtgggtagggagaaaagtgaggcatcttaaggcctggtggagggtgactgatttcatcctgtctttgttatgtatctgagaagcaggtttataaccagtaactgtcagtgttcaatatttaacaaactccagttacacaggtaagnaggtcagcagtaggcttataggtctcacttatattatccaccgtg

SEQ ID NO: 880 - DNA, 389 bp, Homo sapiens
  misc_feature 105, 138, 234, 249, 277, 296, 310, 315, 316, 321, 329, 384: n = A,T,C or G
cgagatggagtctcgctctgtcgcccagctggagtgcactggtgcaatcttggctcactgcaatctctgcctcctgggttcaagcgattttcctgccttagcctntcgagtagctgggactacaggcacccccccacnatgcccaggcttatttttgtatttttagtagagacagggttttcaccatgttggccaggatgatctttgatctcttgacctcatgatccgcccctnttggcctcccaaagntgctgggatcacaggcgttgagccaccnacgcctggccctctggttnattctctttaaagnggagnngaaancttttganagggcccaaaaatttatttaaattaaaatcttttaccttaaggccccaaaggggnaaaaa

SEQ ID NO: 881 - DNA, 110 bp, Homo sapiens
ccgggcaggtactttatagtttaggctggacattggaaaaaaaaaaagccagaacaacatgtaatagataatatgattggctgcacacttccagactgatgaatgatgaa

SEQ ID NO: 882 - DNA, 655 bp, Homo sapiens
  misc_feature 208, 280, 484, 521, 550, 563, 577, 604: n = A,T,C or G
ccgggcaggtacactctaaaagccaaaaacagcatgagctgaggcaatacagagcataagctggtatcaccaatgcatcctggaaataaaacctgtgctacctactatcttgggaatttcactgagagtatagaacattctaaatgaaaaaaagaaacgaaaagggaatgggttataaattgtttaaatgtgtaaacaaacacaatanatgtaagttacaaaaatgttcagagtaacagaatgcactgataacatttaaattaaatataaagaaaagcanatctacttccaacaaatacatggatacatctttgtttcatacagcagatgcagaaatgtagcttctattttaaaaagtctgaatgtccataaactgttcccaagatttgtctttaacttatatattaaaggaaaatttcttctcttgcatattcagaaaaggtaaaggttattatatttagaagagagggggagagagaaaaanagtgagaattggcagaaatgccagagagagcccaaanttcagaaaaccaaaagactgagttatccntatttccaactgntttggagaagcatnactgggcaagtgcattaaccagccagncatccgccagccttccaaatttttttgcctccttaagaccccccggccttc

SEQ ID NO: 883 - DNA, 770 bp, Homo sapiens
  misc_feature 770: n = A,T,C or G
cttagggcgaattggagctccccgcggtggcggccgaggtacatttgttgggggcgtgacattaacatataaccacttagagtggacatgcagttagagaaaagtcaatgagctggaaccaagctgggaattccaacatgtagaagttaaacacaagaggaggagccagcaaaggaaacagaaacagagcttccagcaggtggggggcatttggaagaaaacgatgccatagaagccaagatgaaatagacatcaaggagaaggaagtagtcaattgttttgaatgctatgaagaaagataagaataggtaaatagtccttatatttgataacagaggtcactagtgatcttgatgagggggtttcaatagaatggtgggggattatatacctccctggatttcaactgaggtaagggaaaattggagctccccgcggtggcggccgaggtactgggattataggcgtgagccaccgcgtctggcctctaacgaggtatttctaaaggttaggccttcagtcaagaattttaaagctggatcttagaggttatctaaactaacctctccatttcatagataaggaaagtgagtcccagaaaagcactggtttggacaagttcagaaagctaaacagtgactgtggatgtatgattctgtctcttaactcctaatccaaatgtcttctcactagataaggctgtgccttctacatttgaaggctcaaaccccatggatggatggagggaaggatgggttggagggggattn

SEQ ID NO: 884 - DNA, 456 bp, Homo sapiens
gggcgaattggagctccccgcggtggcggccgaggtacaaaggagcatatcatttaaaaataaataaataaatatcacagggagagaaagcatacgcgctcacctgagtcttttctttgttttcaggttcctcattccacattcagtattagccagtatacccagacctccgtcttctatgtctacaatccttatttctacatctaactgtagaattcttgacctgttttgtcaagctgcctactgatagtctctatcaggataataacctgtctcaatcccacactggagacaaaataaattatcttctctactccaaaccaattcttttttgtggtcccaatctcaatttatcttctcaatcacccaaaaaagaagccatgagattgccttgaccacagctcctcccttaccagtatatgtagcctgttactaaagcctgttaattctactgca

SEQ ID NO: 885 - DNA, 317 bp, Homo sapiens
  misc_feature 49, 51, 72, 73, 81, 103, 107, 112, 127, 165, 221, 228, 229,235, 237, 274, 280: n = A,T,C or G
ctatagggcgaattggagctccccgcggtggcggccgcccggcccggtncncaactaagaagaggattgctnngggcatangaagcagaatgacgagttcagncttnctcantagttggagcacagntctcaaagcccatcaacactttggaatggatttgttgntttatttatgccatcaagggagagttgatatttgtgtattgctaaaaactactaangtatgtnnatgctnangtaggaacatacaaaccatatatcctctgggatctgnccaggnttctgtataaggcttgacctacgtaagatcctatgat

SEQ ID NO: 886 - DNA, 420 bp, Homo sapiens
tatcactacttagggcgaattggagctccccgcggtggcggccgcccgggcaggtaccatggacaataccatcagagtttccaaaaggctggttctcactcttctcctgccacatgctttccctcacacccctggtgtggaataaatgttaaggaaagctaagacacagttgggaggaggggacacaggcctttccactcaagcgcaaatacttgcaaaatgcctgggtgccaacaaaggaatttggcagagaacctgtatcagcggcagcggcgcatcaaaaaagaatgtctaccttacaaggtgaaagaaatggggggtccaaagatggttttgggtgggaaatctggcacattagacacggaatagcctgtggctgagattcatattatacaacatcctaataaaaaaatttcaaat

SEQ ID NO: 887 - DNA, 400 bp, Homo sapiens
  misc_feature 42, 47, 49, 82, 216: n = A,T,C or G
ggcggccgcccgggcaggttcttttttttttttttttttttngggantnacaaggtttcaccatgttgtccaggctagtctnaaactcctgacctcaagtgatcctcctacctcagcctcccaaagtgctaggattacaggcatgagccaccacgcctagccctagttcaaccattttaattcctgtatagtattccattgtttgaatatattgcnagtttattcattctcatttagtctgtttctaaattttgttacaaacaattatgtaattaatattcttatacacacctcctattcataagagtttctttaatgatatgctcctatcaagctgtggggaatacacagctttatgagatggtagcacattgttctccaaagtagttaaaacaattta

SEQ ID NO: 888 - DNA, 469 bp, Homo sapiens
  misc_feature 7, 426, 433, 437, 458: n = A,T,C or G
atcactncttagggcgaattggagctccccgcggtggcggccgcccgggcaggtacctaggggaatttctgagttcatgatatcgtaggtggtgtggaaacaagtcccagcataaacccacacagctggctgaatgaagttcaagtgaaggtcatgcagcatcaaagtagatgtgtgtcactgaaacttatggcagtgggagtgagaaataattttgaaattacttagattgtgagaaaatctggctgatgattagaagtgttgatataagaggtcagtttggagttccactcaaaattcatactaattttaatgttatggtattctaaactactagatgggtaagggggaagttataggattctgaacaataccattaagaattaggatagggattttctactgtggtgtcacagaagaaatcanagctagncaanattcataaaaagaaaattttnatttcccccaa

SEQ ID NO: 889 - DNA, 295 bp, Homo sapiens
ccgcggtggcggccgcccgggcaggtactgggaactctggcaggatccttgatgtcctcttaatctcttttaattttcataatactgtgatgcaggtatcattatcccccctctccactaccttgttttatcccagagggaagtaaagctcagagaggctaagacactttctccaggtgacagactctggaaggggcaaggttaggatttgattgtctgtcagattccattatgctgtgtgcctcaaatgcctggtgatcctatacgctaccatgggcactatgtggggcagtgc

SEQ ID NO: 890 - DNA, 329 bp, Homo sapiens
  misc_feature 206, 237: n = A,T,C or G
cgaatacgactcctatagggcgaattggagctccccgcggtggcggccgaggtacttgtccttcaattttgggaaatgctattatttgataatttctctttttgtattttctttgtttctctagattcttagttttcaattttgtctttcaaaccttgtatttaatttttatttctgctttcatatgtatatataatttggcatcntgaaatggtccttttttcataaaccttactnatatttcatggatgcagtagcttacctctttgtgataatagttttaattgacaaataaaaattgtgtatattggctgggcttggtggctcac

SEQ ID NO: 891 - DNA, 424 bp, Homo sapiens
  misc_feature 1, 407: n = A,T,C or G
ncactactatagggcaattggagctccccgcggtggcggccgaggtacccagacctgcaagagttgtctcaaacaataacaacagtatacaaatgttaacccaatcttaattcagaacagcttaaatgtaataaggtaaccttggaaactatggcgagctctcaggtagaagctagaactctgtttcacgtgacagaagcagacagattgttaagaatctgttatgagtggagtcccatgccagggcttaccctggccaccacttactagcggaagccttgagcaaattctgcagccgttgtgagcgtcacagagtggtgattgtaaagattatataaacattatctatggtcagtgtctcccgcatctagccaccctaaagaaaaaatccaaaatgccaaactgtnttttggtgacaggggga

SEQ ID NO: 892 - DNA, 399 bp, Homo sapiens
tacttagggcgaattggagctccccgcggtggcggccgcccgggcaggtacaatccccagattttttcatgtgtatgcttcttatcacatagggagtccaaacatcactttctctgtgagggctttctctccaaagcactgttctgcggtccaaccctaccactgtcactggcaactcatacacaggcatacacatacacaacgcatacacatgatcactattcaaaatgaccattttccttatttattgtttatcatctacctctcccacctcgccacaccttccccccaaggcgaaggtaggcttcgtgaaatcttaaccttgcctgtcttattcactgctgtattctggtatagcgtctccaacatacttactgatgaataaatatctgtttaaca

SEQ ID NO: 893 - DNA, 390 bp, Homo sapiens
  misc_feature 373, 377, 378, 383: n = A,T,C or G
cgactacttagggcgaattggagctccccgcggtggcggccgaggtactgtgaggcactctttccccactctcccacaaccctcagcttaacacaactgtggtgattgctttgtccgttttcccatgaggaccctgagatttcaacaaggttcagtaactcacacatcgacacttccagggagctgtggttggccagggaactgggcccaggtctttccctcctgggcccatcttgtccttaatctctgcttgacattgatgggtttagttaccttgtcgtatttcttcagtgttttatgccatacagtctcccttgagtagatgttctgtataggggatatcacagcttcctgagaggaactgggtttaagntccnncaggntgccctg

SEQ ID NO: 894 - DNA, 444 bp, Homo sapiens
cgactcctatagggcgaattggagctccccgcggtggcggccgaggtaccatactcttttggttgctataattctgtggtataatatgaagtcagaaaatataattcctccagttttatttatttatttatttttgcttaggatagtattatttcttatagtgaaagcattctatgttatttattattagtctaattttgtagttttacaatgctatcctcttttacaaagctatgatcaactcagtgtgtccagatcaggatcatttgcagctatttgcaaaagtagcaatattctggctgggcatggtggctcatgcttatattcccagcactttgggaggccaagacgggcagatcacctgaggtgatctggtcaacatggtgaaaccctgtctccaataaaaatacaaaaattagccggggatgatggcaagatgcctgt

SEQ ID NO: 895 - DNA, 366 bp, Homo sapiens
ccgggcaggtacccagtgtctcatttcaggccctcctcatctttattggaccattgcagcagtctcctaactgggcttaatgctctagtctctccttccttcagtgtgccctctacactgcagccagtttcaggaacactaattgagtcatccccctgtttaaaatcattcagtgaccaggtgctgtggctcacacctgtaaccccagaactttgggaggccgaggagggcaaatcgcatgagtccaggagttcaagaccagcctggtcaacatggcaaaccccatctctacaaaaaattagccaggcatggtggcatgcatctgtagtcccagccactcagggaggctgaaaatggggaggatca

SEQ ID NO: 896 - DNA, 277 bp, Homo sapiens
  misc_feature 252, 263: n = A,T,C or G
ccgcggtggcggccgcccgggcaggtaccctaggtgatgcctgttcttttgaaacagcagagattttattttaaaaatacgtttttgtgtttattacctaaaggagctattctgaaatttttatgtagaaaaatcttcttctgctccatccacagaagattttttatccataagatatttttgccatctcctttctcctctttcctttgttgtagatgatatgaaaagactgcttttttcaaaaattgtgtntttaaattggngaatttttgccatg

SEQ ID NO: 897 - DNA, 579 bp, Homo sapiens
  misc_feature 471, 545, 551: n = A,T,C or G
ccgcggtggcggccgaggtacaaatatctatgagaagtcagattcagtggaaagtctgtgattatggttttgttttttaaatgaaattgaacatttaaactgcaaaacgtggggaatgaaaaagccatctgtcaggcactatatccacaaaagaatcccccacttacaaataatccctgaatgtcaccactcttctttctattcatcatcctggtgttgtaaatggaatactcacaataaagctgccattagcagagtatccctgtgatctatccttaccaaccatgttgatctaaagttggaggtcactgtgattagaaaactcaagacaccaccccctgccccaccagggttgaaagggactgaaaagtagatttttaactgatgcaaagcttgggctcaggctctggaagtccccatggtagtggggctctgccctagtcccccaactctttctttcgagcttcacangattttaatgtcatttgccctctctttatgactttggtgagcaaaagactttatacaggttcacactggtcatnccaganggcaagcaggttcaggaaccaaaaggaa

SEQ ID NO: 898 - DNA, 410 bp, Homo sapiens
  misc_feature 348: n = A,T,C or G
tagggcgaattggagctccccgcggtggcggccgcccgggcaggtaccagcttttgcactttcctcactgtaaagatgttgtatgggttacttaaccagttggggtttaatttccttggctgtatagtggacttagtgtcacatgcctacctcaggatttctgtgacaattaaatatgatattttaaggcttctaacttactggatctaaataaattattcctggaaaaaaaaagtttgctgtgtaataaagcacctaaacagtaatgaaaaagcaggtatagaacttcaggtgttttgtcaccctccctcccccagtggtgtgtgtaaggaaaactttgcttctttntgtaaatctgatgtctaatctcttctgactttacgttcaatcagttgattattttcatttca

SEQ ID NO: 899 - DNA, 465 bp, Homo sapiens
  misc_feature 16, 402, 427, 429, 453, 454, 456, 461: n = A,T,C or G
ctatagggcgaattgnagctccccgcggtggcggcccgaggtacatgagatgggagctcgacacattttatttggagaataaaagaaaatatgccgtcatcaaactagagcgtgttggggggcatctggtttacagaactaagtcaaggagaagaactctcaagcaatggtgacatctgcagctctgcaaagtgggccctgccttgtcacacaagtctccttgggcaaatgttttctatgtagattttagacactttcctgtgactttctcaaggtcttttggtgacacatgcagcttgaagcttttgcaaggggctggagtctaatctcttcttgcccagcttggctgcaggagaagaagggagatatgttaggacttggcttttgactgaggtggtgtancctggggttgcaagggctgttgccnangctttctggtggcatccatgcttnnangagtnggat

SEQ ID NO: 900 - DNA, 438 bp, Homo sapiens
ctatagggcgaattggagctccccgcggtggcggccgcccgggcaggtaccctttatgatctagataaaccattgtgttcttctatagtttttccaactatatttgaataggtgaagttaatatgtttaatcataaaatgctctcagatgcttgcaaaaacaattactccatcagataagaacacatcaaaaatttggaaaatttaaaaaaagtcattccagctatatgcaaataacttttagtatatgcatctgaaaagctaccaaacgtaacaatgaaactctaaacttgtagtagaaaggtaaatgcactgtgatcagctttcacatcacttcagagtatattctaaaacttcttagattctacattatttatagagtgaactctaaattcaaacatttctcaaggacaaaacgactcccattccaattatttaa

SEQ ID NO: 901 - DNA, 849 bp, Homo sapiens
  misc_feature 453, 454, 455, 456, 457, 458, 459, 460, 461, 462, 463, 464,465, 466, 467, 468, 469, 470, 471, 472, 473, 504, 521, 559,591, 605, 612, 631, 640, 656, 673, 683, 688, 715, 718, 720,729, 741, 744, 756, 767, 772, 774, 775, 776, 793, 838: n = A,T,C or G
gctgggtcccgcactcttgattcccttgcattcaatgccttaccactctacaactgtcttctaacagagctctattccttaatcaccagtgtaatctatccaccttctgcatccctgtcactgagtagctgggtgattctgggaaaaacaaatgctcagagttgtcttcccaaaacccagctgagctcccaacacaccttccaatccctctcagtttcttcagcaatcatcataccctaataccatgaaattcactatgcacaactctttcccctaactgcagcccaagaaaagctgaaaaactcaaaatcctgttatagcttccactaacctcatctatatccacatctttccagacctctttcctgtcaggttcagaggatttttcctctgcttgctctttattctatccctagggagaccctctgcacctctgctcatcccgcgtacttnnnnnnnnnnnnnnnnnnnnnttttgggaagaccacttctgcccgccttttnagaagttcacttttgcnccatttacaggaaaaaagccaagaacattgggcaattnaaggccccacccccaaacaaaaattttagggngatcattaaaaccnggagaantaccatatgcaatcttaanaagtatggnccctggattttatggnaaaaaacccaattgcanaaaaaaggcnggcantttttaattaaaaaaaatttgccgagnggntnttttatgtnccatggaaaaangtnctccctggaaanaggaattgggnaaaantnnncctgccccctctttganaaaaaaatttttttaccaaaggtcctaaaccaattgggggctggncattttaaaaa

SEQ ID NO: 902 - DNA, 424 bp, Homo sapiens
  misc_feature 398, 409: n = A,T,C or G
actactatagggcgaattggagctcaccgcggtggcggccgaggtacttacgttgcctcgtgtcaccaaaattggtgtggctgctgtggtgcggggggctgcactgatggcaccccttcctgtcttcatcaagcagctgcccttctgccgctccaatatcctttcccattcctactgcctacaccaagatgtcatgaagctggcctgtgatgatatccgggtcaatgtcgtctatggccttatcgtcatcatctccgccattggcctggactcacttctcatctccttctcatatctgcttattcttaagactgtgttgggcttgacacgtgaagcccaggccaaggcatttggcactttgccgtctctcatgtgtgtgcctgtgttcatattcttgnaacctggcccngggggccggccgccc

SEQ ID NO: 903 - DNA, 481 bp, Homo sapiens
  misc_feature 95, 105, 106, 123, 145, 148, 173, 186, 193, 242, 252, 267,285, 287, 290, 296, 305, 348, 351, 364, 374, 401, 405, 422,432, 451: n = A,T,C or G
atggagtcttcctctgtcgcccaggctggagtgtggtggtgtgaatctcagctcactgctaccttctgccttccgggtttaaagtgaatttcttnccttgccctnnggcctccttgaaaaaancttggggaatttaacaaggcantgncgcccacccattcccttaaagcttnaattttttttggnaattttngtaatatttaatttttaattttttaaattttttttttggaagaacaagnaagttccttnaaactttcttggtcngccccccaacggccttgngnaanttgccnaagtttggnaaaccgaattccttcaagcttcaacttgttaaaaccccttaanggncctttccttgggntttttcaaancccaaattttttttcccttggcccttnaaanccccctttttttggaangtttagcccntgggggaaattttaccaanggggcctttcaaataactttaacccaaaaa

SEQ ID NO: 904 - DNA, 391 bp, Homo sapiens
  misc_feature 389: n = A,T,C or G
ccgcggtggcggccgaggtacatttattacaaaggagtgaatattgatatattattaactaattttatagtttactttgtgttatgtattctatggactttaacatgtgtaatgacatgtatcccctattaccagtatcatacaggatagtttcacttccctaaaaatctttgatgttctacccactccttcctcgttccctctcctcactcctccctccctccatcttaagcccatggcaacccctgatctttttactgtctccatcgttttgccttttccagaatgccatgtagttggagtcatatagtatgtagcccttttcaattgacttctttcacttaccagtgtgcatttaaggtttctccatgtctttttgtaatttgagnaa

SEQ ID NO: 905 - DNA, 443 bp, Homo sapiens
ctatagggcgaattggagctccccgcggtggcggccgaggtactgcttcaaaaggcatgtataactaagtcatatcaaaactaaaatgacaaatgggttattttcaacagaacactttgaaaggaaaaagaaaacaaacaagaactttaggatattctttttgaaggcaactgcatgatgctagattgtgtccacggactagatttctaaaaggccatctaaaatacatttttaaatacttattcctttcacaggtaatatcttacgaagtttgattatttttgaattgtcataatatggacttaatatgggaggaaggtagttccaaaatgacagaagtaatcgcttccacatcacttttgtttttctatttacatatacaaacacatttttctcttgtcacaatagtatctgaaacattaaagaggtgctcataaatattt

SEQ ID NO: 906 - DNA, 351 bp, Homo sapiens
ccgggcaggtacttttctcttcttggccaaattctcctcttatgggtatggagatgacatgctctaaatgctttgggagcaagcactcattagagaagacttttgatgtatccttatcttgttagtagtttaagcttgtcagatccttaaagaatgacaggcttaggaccatatcccctagacttaagaggattctcattgaccatttgttcagtgtccatcactgaatcacttaccaaatacagtcgacactctgtatccacaggttccacacccatagattcaaccaaatgctgattggacatattcaggaaaaaaatgcattaacactgcaacaataaaaaataatac

SEQ ID NO: 907 - DNA, 357 bp, Homo sapiens
ccgcggtggcggccgaggtaccaggagggtattgatgtttgaggtccaaactgaaaacccatcacctccttcccactgctatagcagcgttagccctggggttcattatctagccagttcacaccttctaaagtggggctctgaaaatgtcttacttccctcacagacaaagcaattctcaagcctcctgagatcacccaccaaccagagcaactgctgtcacttggaggtgcagctgaattcttctaattgtgacacaaactcttgaaactgtaaatgctgaaagattaaatgaggttataacactcagaaggttttacaagtaaaagtaagtcaaatcaataggtctttatttca

SEQ ID NO: 908 - DNA, 390 bp, Homo sapiens
  misc_feature 282, 295, 304, 365, 388: n = A,T,C or G
ccgggcaggtacacaaatcaaaggaataccatatttagcaccataggtgactaattaggcaaatgagcaagttttaagagtctggcccaatttttaaagtgtgtgtgtgtgtatcacaatctctctaatgctatatgtagtctaggcaatctggcaacagattcctaactattgttaggaaaatgcaagtatgatcctgttattgctactgctttcaacccagaggtaatgaggaaaagtccaagttccttaacatagacttcataggcctgcatgatttangactggttatcancaccacctnagagaaactcctgacctttaatcaaaatgtgcctttgtggtaaactactttttcatttaanccatgatttgcgatttataattncc

SEQ ID NO: 909 - DNA, 356 bp, Homo sapiens
  misc_feature 321: n = A,T,C or G
aggtacgcggggacagagagaaggttaagagcaacaagatgggaggcagctgcatggaacctgtcccactgaggaagtaaaacagagttttactcttgttgcccaggctggagcgcaatggtgcgatctcggctcaccgcaatctctgcctcctgagttcaagcgaggagcaagtgagtagctgggacaacagccctacctgatggactggacttctgcctggattggagtttgatcatgcctccatattgggtgtttaccaggcgtatgcattgaacctgagtttgtctcttcaatacaaggaaaatctctgccgcttantgattttccaagaaacatgagcttctgcctttcaa

SEQ ID NO: 910 - DNA, 433 bp, Homo sapiens
  misc_feature 6: n = A,T,C or G
cgactnctatagggcgaattggagctccccgcggtggcggccgaggtacttttttttttttttttttttttttggatttttagtaaggacagggtttcaccatgttggccaggctcgtcttgaactcctgacctcatgatccacccgcctcggcctcccgaagtgctgggattacaggtgtgagccacgcatgccaggcctggccaagtttctgaagggctggcgggcatctctgcttcttcccgactttactgaaaatgtttccaacaattcatcactgagcatgaaactggctaactttgggaaagcgacagatttccttactttgaagggtgccactaagagtctcctgtcctaaggatttttaatcaagaattatttttataaaatatatttttaacacataaggagacagatgattggaatgtttttt

SEQ ID NO: 911 - DNA, 327 bp, Homo sapiens
ccgggcaggtactgggattacatggcgtgagccgccgcgtctggcctctaacgagatatttctaaaggttaggccttcagtcaagaattttaaagctggatcttagaggttatctaaactaacctctccatttcatagataaggaaagtgagtcccagaaaagcactggtttggacaagttcagaaagctaaacagtgactgtggatgtatgattctgtctcttaactcctaatccaaatgtcttctcactagataaggctgtgccttctacatttgaaggctcaaaccccatggatggatggagggaaggatgggtggagggatgg

SEQ ID NO: 912 - DNA, 461 bp, Homo sapiens
  misc_feature 2: n = A,T,C or G
tnctatagggcgaattggagctccccgcggtggcggccgcccgggcaggtactactggcttcccagtggttgggttgagtataagcccccaaatatgagtaaaagaagaaaaagttaattcaatcaccaagtcttgctcgcatattaaaaattggatagatgaatgttcaatcatatgttttggctttggccagccagaccagggtaatttttaagatttgaactgcttagaattcttcaggcaagtcttgatggagcacttcttggatagttagaactttaccaggttcacaggagagctcagatgaagcgaacacctcatccacactggtttcctttggagacctttactgttgagaggtggttttcatagccgcaaaatgacaagtgcaagttgagtagatcagtgtttatcaaccaggtgccacattgtgccccaggagacatttgacaatgatggg

SEQ ID NO: 913 - DNA, 401 bp, Homo sapiens
  misc_feature 16, 39, 40, 49, 52, 81, 83, 132, 138, 154, 290, 299, 300,311, 347, 358, 366, 380, 388: n = A,T,C or G
cctaatgcatataganggcaaataaatggacaagcagcnnttgagcatnagngaaatactctgagactcactagccatgcntnatttggcagctttgtaagcatacaaatgttcatggctatgattttcatnttccanaccttctaagaaaatntgttttatagtgctttgaaaaataaaaatattccttaaaacaaaccaacgaaccaacctacaattatccagtgccctttacccatagtttgacaatcactgtatccaggaaatctattttaatggttctcagttgngcaaaagtnnaaggtcataanagcaagtttaatttcaacaagagaaaaatatcattntatgataactngggactgncccactggggaatngggatgtngaaccaaagttga

SEQ ID NO: 914 - DNA, 675 bp, Homo sapiens
  misc_feature 134, 157, 160, 183, 194, 196, 200, 203, 205, 209, 229, 230,234, 240, 245, 247, 257, 259, 267, 270, 312, 313, 315, 323,327, 345, 347, 348, 360, 370, 378, 384, 391, 400, 410, 413,416, 420, 428, 430, 435, 445, 456, 459, 461, 468, 473: n = A,T,C or G
  misc_feature 484, 490, 493, 497, 509, 513, 523, 528, 536, 538, 541, 548,558, 564, 571, 577, 579, 581, 585, 602, 607, 614, 624, 633,637, 640, 644, 653, 654, 662, 668: n = A,T,C or G
cgaggtacccttcactgactaggaagtgacccacttttcaggtatcatccaatcatacaaaccgggcatcagtagtcagtcagaagcccacacatgttcatctcaagactcaacaacataaacacgtctatgtnttccaagaaagcctcgttgcaanttnggggtggaccaaaatttttggtntatatttaaantntctnctngnttcnttccggcctccttatatttnnacanattttnaccangnaccagtggancntttttacnacnaattttttggagacattcttcacaaaaaattatttaattttnngnattaattngggnggctttttaaaagcaaananntatccccaaccnaacttatttnttggttgngttcanccaaaangaaggtaangtgatggttnttnctntaanaaaaaatncnccagntctgatttgntttttcttggnaangnaaaaagntttcnccaattaaccnccttgnccntttncctttttggggngtgnaaaacccttnaatancccaaaangnggntcttttnggttaagaancaaaanccttggnaaaaantncnttcntttttttaagtaaaagncaacntttgttnttaaaaccancctctttanggcnttntaanaagaggcgnnaggtttanaaaaanaaaattt

SEQ ID NO: 915 - DNA, 408 bp, Homo sapiens
  misc_feature 14, 76: n = A,T,C or G
agggcgaattgganctccccgcggtggcggccgaggtactgtttttacagtcattttggattcctgctgtcttatncaccaaataagtagttaaagtgacacagttcatagaataaaatgaatgaaaacacagacatggaaatggaaggaaagtgcagagctgctttctaaatcaaccaaattaattaaatcctgaccacaaatactgaaatgcagagatgcaaagtcctttttgagtagcctggatcaattgtttcctaagagcagatgggcactactttagctgtgttgtctacaaagaaatccagttggcgagaaaatatttcatccacagaactatgattcacagggttagttcctaagaggtatctgccccaaggccacctgggatgattacccagagtcacc

SEQ ID NO: 916 - DNA, 387 bp, Homo sapiens
  misc_feature 141, 155, 170, 288, 301, 327, 332, 335, 345, 380: n = A,T,C or G
aattggagctccccgcggtggcggccgcccgggcaggtactatatggctaacttatttggggagcaaagctgacttaccataagtctatctcaaatagaaatgaaacactcaatttgtgaaatatgctgagttttaatgcntgtgggggcagggngaattaacattttgngatgcaaggagaagagcaatctatacttaccactgtctatttgacattggggactactgctacactctaagtcattttaccttataacgcagagttgtaacacgctactctgagcagntcatgacatctgnttgaaatttaagttgggcccctaatnatggngtntattataaanattttgatgctgcttttcagagatgggtaacctantttaccc

SEQ ID NO: 917 - DNA, 391 bp, Homo sapiens
  misc_feature 386: n = A,T,C or G
ccgcggtggcggccgcccgggcaggtccgggcaggtacatagaatatgagcacagcacacacatgagagacgcaagtgccaaatgccttggcctgggcttcacgtgtcaagcccaacacagtcttaagaataagcagatatgagaaggagatgagaagtgagtccaggccaatggcggagatgatgacgataaggccatagacgacattgacccggatatcatcacaggccagcttcatgacatcttggtgtaggcagtaggaatgggaaaggatattggagcggcagaagggcagctgcttgatgaagacaggaaggggtgccatcagtgcagccccccgcaccacaagcagccacaccaatttttggtgacaccgaggcaacgntaagt

SEQ ID NO: 918 - DNA, 279 bp, Homo sapiens
cactacttagggcgaattggagctccccgcggtggcggccgcccgggcaggtaccactgcactccagccagggcgacaatgagactccgtctcaaaaaaaaagattattaatttaaaaatattttaagtgatcagctgttactctaccccaatctcattggagaataagattctactgcggttctaagtcattgtgtgctgagtaaagtggttaactagtgatttgaaagaatacaggatagagggtaggagagtgagtatcaggtggagcccctgttt

SEQ ID NO: 919 - DNA, 416 bp, Homo sapiens
  misc_feature 335: n = A,T,C or G
ccgcggtggcggccgcccgggcaggtactgggaccttcttggtctcacttactgctgcgtcccatgcacctaggcaagtctggcacattataaaccatcaataaacatttgtttaatgaacaaatgaaggaagaaacaggaggcacggggcacagaaagatgatacaactgcccctctatttaatccagtccactacccttactctgaatgcttcacatcacattgctcgtcttaattgttttcaaacaaacaagtccagacgcctgctcacaggggtccctagtgggctcctgctgtccagccttgctccacgtgaagatgccctcttcacagnagcagtggatccccctctcctggttccagctctaggagtctcaccacaatcccaccagcaaaacctctatctcctgcctca

SEQ ID NO: 920 - DNA, 113 bp, Homo sapiens
aggtacgcggggaaaaaaagggtggggagtgccctttcttgaaggaatcccttaagtgcacgtctcccgttttcttttcacatcaatgcagagtccctctgtgaatttacaac

SEQ ID NO: 921 - DNA, 458 bp, Homo sapiens
actacttagggcgaattggagctccccgcggtggcggccgaggtaccctgagaacagcaataatgcacaaacattactattccaacagctgcattgaaacacccttggtaggattgggaaaaagatggattattgccatttggacactccaggactgtccattaatactcctgactaatggaagatgataaagattgggcaagaaaaatgactgcagcaaacgccttggcatcttcaacttgtcacctttagcaagaggcctcttcaacagttcttggactgtgtttgggcagccaggcactctcagaacggcaaggagacacagctaacatgatctttgcaatgcaacaaaacaagcgatcttgaggcgacagagtccaaaagatgacagaaaaattcatccaacttcctgaagcatgtgatgccaccagaaagccttggcaacagcccttgcaacc

SEQ ID NO: 922 - DNA, 402 bp, Homo sapiens
  misc_feature 51, 156, 300, 335: n = A,T,C or G
ccgcggtggcggccgaggtactttttttttttttttttttttttttagtanacacggggtttcaccgtgttagtcaggatggtctcgatctcctgaccttgcgatctgcccgcctcggcctcccaaagtgttgggattacaggcgtgagccaccgngcccagccccacctcaattttataatataattttctacacagagaacacagaaaatagttgtcttttgtttacaatagagaatcaacgttttttttttactacttatagtttagaactaaagtttcagcttcacaactattggngatgctatgtaaatgtctcaaattactgaatttgngaaaacctctcatgtttctttcacatgtgagttacaagaagattatttttaaaaacttgcaaaaagt

SEQ ID NO: 923 - DNA, 329 bp, Homo sapiens
  misc_feature 325: n = A,T,C or G
ggcgaattggagctccccgcggtggcggccgaggtacgcggggaaacagctaagatttctccataaagaaaaggaaaattaactctagttgcagagtgtaaaaaagtatttccaaagatagaaaatgtcaagcaaatatgtttctattgtaggttctgggaaatatcttgctgtagcatcccatgacagctttatagatatatacaatgtaatgagtagtaaacgagtaggaatatgcaaaggagctaccaagtttacataacccatatttgattgggatattaagaggtaaagactttaaataacttaatactttgataaaagntttc

SEQ ID NO: 924 - DNA, 356 bp, Homo sapiens
cttagggcgaattggagctccccgcggtgggcggcccgaggtacgggacttgtctccaggagacatgtctgggaagaagagctatgactggagaaacatgagcatgttcaggtgaaaacatgtgagtggataagagcaagagggtgagaacacagaccaaggggctaagggacagactgtgttcagtatttgggtatggaacttgtttttgctacttgctagttctaagaccaggctcagactctaacttctctgtaatgtgggaataatgacagcacttaccttataagattttacaaagattaaaatatcatatataacagcacttaacacaagttaagaattcagtaaatgtt

SEQ ID NO: 925 - DNA, 286 bp, Homo sapiens
  misc_feature 7, 111, 124, 218: n = A,T,C or G
ggtactntggcttttgtttctagaacaccaatgagtatatgctcattaagatagtttgatgcaataaatccttattttacttgcctctattactgcattgtaaactgttgnctactttgtcttnttgaaatcctacacctcccccagcccccacatttggcctatggaacattactttatcctgattttccccctaaccttctggcaatgcctctcanactccttccagaactacttttctctgttttccttttaatgatgacagtttatgcaattgggtcttcaa

SEQ ID NO: 926 - DNA, 446 bp, Homo sapiens
  misc_feature 24, 49, 63: n = A,T,C or G
aaacccttagggctttttggagcnccccgcggtggcggccgaggtactngatatttttgcatntaaacttgcagtatttgttcaaaaattaatagtttttgacattggcttttctgagaagagaaattgaaagtgtcacaaaataaaaaaagatgaaatgaagcatatataattgtcaattttttcaattttctagccaacagagaatcgaaggattctgttcaaatattagtaaaaattgaaaataaacttgtgcttatattttgtttgcaacacactagtcaatttaacctgtgactagttatctctaccgaaggtggatgtgtagtttctggttttaaaattcaagcaaactggaaaataatccatctaattatgctttctttcccaagaagttttttaatgatatgccagcttcctaattttggagaccaaaagccttaatt

SEQ ID NO: 927 - DNA, 383 bp, Homo sapiens
ccgcggtggcggccgaggtacattccagctttgacctacttcccaagctgtatttgaattggcttttatagagagttaactgttggcaatatttttgcaatgtgagctttgctgcttaatcctgatactatttattctttaatgatgaattcactaaaaaaaattgagtgccagacagtgttgagaacaatagaaatgtggcagtgaacaaagtccctgccttcatgagcttaccttccagtaaatatgaataaaaatctttcccttactttacttagaaattttactttttttttttttttttttttttgagacggagtctcactctgtcacccaggctagagtgcacaatcttggcttgctgcaacctccacctcccaggt

SEQ ID NO: 928 - DNA, 352 bp, Homo sapiens
aggtactggttcatgtgtaactcatacatcccacaagcatctactgtgtgcagaatgtctcgtatgtgaaagacactgtgggcatataactgtggcttagatgggcttctaacccctgagaagataatatatcagcagaaaaaaaggaacatgtatatgaactgccatcacacaacctatccagaattccacaagaaaagtatggtcaaagagctaggaggtgttgaaggaaagattacctgcaggagaggcaatgcgagatgatagaagattctgagctatagagcgaggcggacccagatgggaatttcaggttttctcgggatgtgggaccctaaccaagcttcttata

SEQ ID NO: 929 - DNA, 116 bp, Homo sapiens
aggtacatcaaccctaacttattataaaagatcgttaaacctttgaaaggtcaatgtatatactgctatctatcacaggcgggcaccattcattatgtcctgtcaagtggctctcc

SEQ ID NO: 930 - DNA, 619 bp, Homo sapiens
  misc_feature 169, 173, 174, 187, 194, 215, 221, 224, 226, 230, 233, 254,258, 263, 267, 277, 282, 284, 310, 313, 325, 330, 334, 336,338, 369, 371, 385, 392, 394, 403, 421, 432, 453, 456, 458,461, 473, 482, 484, 492, 494, 496, 502, 508, 518, 520: n = A,T,C or G
  misc_feature 531, 538, 541, 557, 565, 570, 575, 579, 601: n = A,T,C or G
cgaggtactaagttgccatttaagaacctcttcaggttccccgtctccttgagctatgaaagttttcatgaacacttcagttttaatggcatgccaaacattttgttccatgagcaacacaacagttttaaaaattgccattgagtgttattaaattaggaaaatttancccnngtctggttttttntaataanattaatttttcttattggaanccccanagngncctntancaaaaaaaaaatggttattanaaangaagngganaaggttgccncccangnaaataatttagagaagcaaaaggctnttnttggaaaaaatnggcgntctngncnttggattatggactcatccccttttcaaaananaaaaattacaattncaaatcntnaaaaaaccnagatttccttttattccnaaaaaacccangctttccaatggattgggccnttntnggnggcctttccaantattaacantntttttaanantncccaanaacaanaattttattngnttcaaaacggnaaaacgnttnacggacctttaaggcnacaacttnggaanaaccnaaantaaaaggggggaatttgggaanccaatttggggggccttt

SEQ ID NO: 931 - DNA, 401 bp, Homo sapiens
  misc_feature 342: n = A,T,C or G
aggtacacttccatcccaccagctttgttgctgttgaaccgcccccaaattgttgcgcaccatccacaagctgagctgctgctacatcctatttcttggggccaagctgcagtggagatgctccacccacccctccaagttgcttttggccctgccccgtgaaggcttgagctgaaatggcactcagcctcctaaagaattggctccttggctgctcagggcagtcatgcacccccattcctgaatggaagcagcaccttgcctccaggaaatcagtgtcatggccaaacccaatcagttgcacatctcagggatgagatgacatggtattttacatcttanctaaacaagagcactgactgagctgggtcaccttaccctacaggttgaataattgtaag

SEQ ID NO: 932 - DNA, 368 bp, Homo sapiens
aggtactctggcttcttctgaaatcagattccagctcctagtcaccataaagtatgcctgacccttactttatcattggaaactaggtattccagagcaagaaattcatgtattcattatttattatgcactgtatctgattcctaaattactcctttttttgcaaaaaaggaaaaaaaattatttttccatcacatgtgcactctcataaaactgaggttatatttttaaacactgtatgtattcaagaaaaatatatcatttataaacctcatgttttatatatttcatgaaatcagtgtcctgtgcttgaactctgacaaggtaggggaaatacctgctcttataaaagctatgggaattttaaa

SEQ ID NO: 933 - DNA, 467 bp, Homo sapiens
tactatagggcgaattgggagctccccgcggtggcggccgcccgggcaggtacatgccttaactgggagttcaagctaattcttgatttctttctcaaaagacgatttaaatataaggcaaaaaaaaaaaaaaaatttccgatactgtaactaccttaactgtttgagtatatagaaatgagtatgttttatgagttaacaatgaatcatagaaggcaatttatgaagaactagaatgattctgtctagctgccttcagggatcagaaattcaaattaaacttctggcagacatttaaagaatgctagcatacaaaactgaatttaaaaaaacgcacacagttaacactcctcagtggagtttcaagaggaaatcatgaattaaaaaaacacacggcatgatacactgttgactgataccaactgggtgtggtcgatcccaggtgcacccaaacctgcgggaatggc

SEQ ID NO: 934 - DNA, 388 bp, Homo sapiens
ttagggcgaattggagctccccgcggtggcggccgcccgggcaggtacagtggcatgaccataacttgctgcagccttgaactccaggattcgagtgatcctcccacctgagcctccaagtcgctgggattacagacctgtgtcaccatgctcagctatttcacatcttttgatgtgatgtgacacaaagtatacaacatcacctatgggtgtccatgccaaaaacgggaaatgtttaacagtgagttatttatatgtaacatccagcttacaggaatgataggaagagaggaactagtgaaatgatgccacaaggaagcacacagataaatccagaaagttagaaattctgtaggacaaatggcctggttctcttcaacaactgttg

SEQ ID NO: 935 - DNA, 421 bp, Homo sapiens
  misc_feature 47, 408: n = A,T,C or G
cactacttagggcgaattggagctccccgcggtggcggccgcccggncaggtccgggcaggtacgatcttggctcactgcaacctctccctcccgggttcaagtgattctcgtgcctcagcctcttgagtagctgggattacaggcgcgtgccactgcgtccggctaatttttgtatttttagtagagatgggggtttcaccatgttggccaggcttgatctcaaactcctgacctcatgtggtccacccaccttggcctcccaaagtgctgggattacaggccgtgagccaccgcgctcagcctacaagcaatgtttttaaaaactgacacctattactgataaaaattctctgtttaaaaaagcctattttactatttttaaaaggataaaggttattaagttttnttttttaaataac

SEQ ID NO: 936 - DNA, 428 bp, Homo sapiens
  misc_feature 33, 36, 51, 62: n = A,T,C or G
cactacttagggcgaattggagctccccgcggnggncggccgaggtccctngaacaaatccnatcaaggacagattctcagtcttgaagaggcagcacagtaaaggggaaagatcatgagttttggggccaggttcccttggatattgtggggtccccacacttctggatgatgttggataactctttgagacttaggcttcacatctgtaaaatggaaatacttatttttcagagttgtcataaacactaaatgatttgacttatatcaacctaattcctactggctcattgaactcagctcaagctgtcccctctgttcggatgcccttccccagtgggggctttagtttaagggtatccctggctgggatacccctgccaaggctcttacacatttccctctgcccattaacacccattcttttg

SEQ ID NO: 937 - DNA, 468 bp, Homo sapiens
  misc_feature 421, 442, 461: n = A,T,C or G
cgaggtacatctgaactttagaaatttacatttgagtaaacctcaaactccaaaatgtatccctcctccccaaaaagggacattttactgaaataaaatctgttgctggttgcttctggtatgttatgtcaaagttgttaaccggatacagcaaaggcagctgcattgtatttcagaattagtttgaggtagattttattgttataaagcaagacgcaattgaagccacactctgggaaaatagcagtaacacaaaacatagtaatttaggcagaattacttagccacagatgtccagagaggtataggaaaaggccatatgcactttttgtaggcaaacaagtcaaggttaaataaaagccctattttgagtcttaggctggatgtcaagaaattgcctcacaggtgaaaacaggtccanccacagaagaggctctgttgntacttgagtcactaaaccnttttgga

SEQ ID NO: 938 - DNA, 421 bp, Homo sapiens
ccgcggtggcggccgaggtacagtggcgccatcttggctcactgcaacctccgcctcccaggttcaagcgattctcgtgccttagcctctcaagtagctgggattacaggcgcctgccaccacgcccagctaatttttgtattttagtagagacggggtttcaccatgttggccaggctgatcttgaactcctgacctcaagtgatccacccgcctcagcctcccaaagtgctgggattacaggcgtgagccactgcacccggccttcagtgaaaatcttttacatgtccaataatgtgttaaatgtgggatacaattgtgagcaaaatggatggttcctgccctcttaatactcattctgatggacatttatcacaagataggggaattataaaatcgcaatcatggcttaaaatgaaaa

SEQ ID NO: 939 - DNA, 367 bp, Homo sapiens
aggtaccatactcttttggttgctataattctgtggtataatatgaagtcagaaaatataattcctccagttttatttatttatttatttttgcttaggatagtattatttcttatagtgaaagcattctatgttatttattattagtctaattttgtagttttacaatgctatcctcttttacaaagctatgatcaactcagtgtgtccagatcaggatcatttgtagctatttgcaaaagtagcaatattctggctgggcatggtggctcatgcttatattcccagcactttgggaggccaagacaggcagatcacctgaggtgatctggtcaacatggtgaaaccctgtctccaataaaaatac

SEQ ID NO: 940 - DNA, 383 bp, Homo sapiens
  misc_feature 139, 176: n = A,T,C or G
acttagggcgaattggagctccccgcggtggcggccgaggtactttggcttttgtttctagaacaccaatgagtatatgctcattaagatagtttgatgcaataaatccttattttacttgcctctattactgcattgnaaactgttgtctactttgtcttcttgaaaatcctacncctcccccagcccccacatttggcctatggaacattactttatcctgattttccccctaaccttctggcaatgcctctcagactccttccagaactacctttctctgttttccttttaatgatgacagtttatgcaattgtgtcttcaaacttataacgacccagacaatagtaatacacagtcaacatttactgaattcttacttg

SEQ ID NO: 941 - DNA, 453 bp, Homo sapiens
actacttagggcgaattggagctccccgcggtggcggccgcccgggcaggtacctttgagaccagatgctgcttatccaacagcccttatctcctttcttgctagtagacatgactgaactttctagtctacacgactcaaaggataattcattaatctaagccactcctgatggatgatcttacttgctttgccaatgacaggagtgagatgacccatttctagcaaagccatgaggccgtatctgctggagcttccaggggaagacttccttgctttagaaggacacagaaaaatctgtctctcttttgccagacacggttctgtcagcatttccttcccagaattacagtagccatattgggaccatgaggcgaactggccgtgaggataaacatggagggatggcagaagcaaaaaaatttcaaggaaacctggagtctttggtgttat

SEQ ID NO: 942 - DNA, 437 bp, Homo sapiens
  misc_feature 214, 227, 249, 286, 296, 300, 313, 322, 327, 344, 345, 355,362, 363, 368, 379, 392, 397, 406, 407, 411, 422, 426: n = A,T,C or G
ccgggcaggtacttccccaccgcatctggagtctgtaattacatgtatatttggctgcttgaagtagtcatacaactcactgatgcactgttatgttttttagtcatttgattctctttgttttgggtagtttctactgatcttcatttcactagttctttatctttccccattgttaaatcttgttaactctttatcccagaaatttataacncttttttataccnttaaaaaaaatgacaaggtctntttttgcttattttttttggagaaaccggtaggtacntccaatttcnttgnttcaaccccccanggatcttgnaaagnttggcaagtttgggtcnnattgaattcntttgggnncttcngtcttggctanaacactttcccgnctttntcaccccannggtnttccaaaaggnccgnaattttattcc

SEQ ID NO: 943 - DNA, 409 bp, Homo sapiens
  misc_feature 155, 341, 349, 362, 369, 376, 388: n = A,T,C or G
cactacttagggcaattggagctccccgcggtggcggccgcccgggcaggtactttttttttgtttttttatttttcctttagtgtgagtgtatatttcatgctacctaagttattaatttttttgtaatattagttatttttcaaatacctaangaattgcaaaacatttcccaggcacaaaagaaacatacaaacaaaactcagcagccttttcaactatgaacaagaaagaaagaaagaaagaaagaaagaaagaaaggggacatgcattctttcctatttacccagctcagatttcaaattcagcatgggtatttagcatctgtagaggatattgtnataatcanggagtaaaatggntttcatnttctcanggcttttggctngatcaattttttccagggtaa

SEQ ID NO: 944 - DNA, 387 bp, Homo sapiens
ccgcggtggcggccgcccgggcaggtacaaagcgcaaataggcaatttggttcaatatctcccaacttaaacccactgctttttcaacagaaatgttttttacatcaagtgttgcctctgttctcactctccctccttcttgatcttttaatctaaccctgtcttcttgacttctttctagcccctgccccattgccattggtttataggtcaaattgcttgagttaaatgcatagaagatgcaactatttcagacctcactttaaacaatgtggtaagtgttaagacagaataaaagataaaccaaaatattgtagaagatgattctaatggcatatccaggagctaacctgctctgcattgatgagtttaactatcataattcca

SEQ ID NO: 945 - DNA, 198 bp, Homo sapiens
  misc_feature 19, 27, 47, 108: n = A,T,C or G
gggggcggccgcccgggcnggtacttnggcttttgtttctagaacancaatgagtatatgctcattaagatagtattgatgcaataaatccttattttacttgcctcnattactgcattgtaaactgttgtctactttgtcttcttgaaatcctacaccttgccccagcccccacatttggcctatggaacattactt

SEQ ID NO: 946 - DNA, 536 bp, Homo sapiens
  misc_feature 43, 50, 56, 57, 61, 62, 65, 66, 74, 76, 83, 87, 88, 92, 94,96, 97, 105, 106, 110, 114, 115, 116, 123, 125, 128, 131,132, 135, 139, 167, 196, 209, 213, 223, 288, 329, 362, 380,402, 444, 448, 454, 458, 464, 474, 485: n = A,T,C or G
tacttagggcgaattggagctccccgcggtggcggccgccctntcgggtnctcaannagcnnaannctgtgccngncatcgcntgannagcngngnnattaaacnnggantatnnntacactntnaangannggncacnataacatgtactgaaatcgcttactgantataacgcagatatccccttaaaacagtnattgctcaaatgnaaancaattccccntcgcaagaggagacacaacacctaagaatgagtctcccctagcttttgacaataccatagcacanagtcaaaattcgacaatacacacgaatagacagtaaagcgntcgtcaacgcatggggggcatgggaggataaangagcggggggggcattgnagggagttccaagggaatttcntggggcccccttgccttgcccctaaaaaacttggttggccgntttncattanaacnccaaanaattcatttntcattaatttnttcttaaaacccccttcaaaaaaacaaaaagccttggtttggttaaatatt

SEQ ID NO: 947 - DNA, 424 bp, Homo sapiens
ggcgaattggagctccccgcggtggcggccgcccgggcaggtacctgaacaaatcccatcaaggacagattctcagtcttgaagaggcagcacggtaaaggggaaagatcatgagttttggggccaggttcccttggatattgtggggtccccacacttctggatgatgttggataactctttgagacttaggcttcacatctgtaaaatggaaatacttatttttcagagttgtcataaacactaaatgatttgacttatatcaacctaattcctactggctcattgaactcagctcagctgtcccctctgttcggatgccttccccagtggggcttagttaggtatccctgctggataccctgccaagctcttacacattccctctgccataacactcattctttgttactgaaattataat

SEQ ID NO: 948 - DNA, 408 bp, Homo sapiens
ccgcggtggcggccgaggtaccaatttaacatttaatcatcaaggagaactggatgacaaaggcaatgccaggcatgagtcgagtgtgtcccttaactttccaaatggtatttacttagagaaaaggaatttgtttactttcaacagatactacatctcaattgtcttgaccttcctcaacacattaattgtaaagtgattaatgaagtttgaatggaggctctgcttacaccaaaagacaactatacacctctgcaatgttttaattaacagctaacacttcaaattagtttgttgttgccacagtaattacctgattcaatgactgcatggaggaagcatttttatgagatatttttagtgcttggtccttgagtgttccattttgtttgtgaccagcacaggcct

SEQ ID NO: 949 - DNA, 413 bp, Homo sapiens
  misc_feature 281, 346: n = A,T,C or G
ggcgaattggagctccccgcggtggcggccgcccgggcaggactgaggtgggtctagaggattagtctgtgaattgcagcctggattctgcagttgtggggtctgcctggtgctgagttttactgtggtggactcagtgttgggatccagcggaaaatcctgtgcttactttcctctcttcctgccaagtggagagtatgtcttttcatgctctgctgcctggaattggaaaagaggtgatttggataatgtaaaactgtccttcctatcctcttcaacgnatcttttattattattgtgctacaaccagacactgtgatctttcatctggttttcttagatgttngtaaagatattgtgtgcatggaccaggtatggtggctcatgcctgtaaatcccatttttgggaggcc

SEQ ID NO: 950 - DNA, 370 bp, Homo sapiens
  misc_feature 5, 362: n = A,T,C or G
cactncttagggcgaattggagctccccgcggtggcggccgcccgggcaggtactttaggctgagaaataaatagaaggtgagaaaaaagaacagtctttatagtcagtaagagtgaaaagagaaagatggtagttggggaaagacagatggggagaaaggttggctggttgctaataaaacagtagaggatgagcatgtattataaatgctggtgggaagaaaccttgtggcaaggagggtggtagtgttggagaagaaagagaggatatagtagaaagttaaagaggaactggaagcaggtgggatccaggacatatgaaggggaagagccttgggccacgaggtgaagaccatcttgcnagggaggg

SEQ ID NO: 951 - DNA, 628 bp, Homo sapiens
  misc_feature 165, 183, 271, 350, 361, 384, 405, 441, 454, 455, 462, 471,478, 531, 537, 565, 571: n = A,T,C or G
aggtacagtttggggttactgccttgatttctgctaaggcaccagccatttggcccacgtgcattgaaaatggcaaataatatattattatgaaaataagtctgaaattgcagaccacctgaaatggtctcagggactcctaaggggcccagggaccacactttngggaatgactaccccctnagagaattatggtgcttttccccaagttatttcacccagggtttattcttcaccttctaatcaaggttaagttttccaaaggggggtngaagggaattaaattttaaattcctttttaaaaagggttttcttgttttaaattaccaattcctaagtaagtttgaacnttgggaagggnaaaaaatttaaggaaaatttttnctttcaaccttcaatttaagnggtaattaatttacggaaaatttttaatttcaaccnttccaattttagnnaaatttntaagaaaanaatttanggaaaattttttccttccaccttccaatttaaggggttaattatttaaaattnagggcnttaccttaataaccttaattaattttantttttntcccccttttttcttggttcaatttccaaaagggtaaaggggttggccttttttttt

SEQ ID NO: 952 - DNA, 371 bp, Homo sapiens
ccgcggtggcggccgcccgggcaggtacaaatctaaaacacaaacatcacctttacaaaacaaaattgttgattaataattatctttttcataactatctcataactttatgactacaggcccaccatttaacaactacaaccttcacataaactaacatgtgcttttaatgctgaccttagtttaaaaagcctgccagtatggaatgacattcaaataaaataaaaccaaatttaaaaagaacagaaatgcaaactcaacaatattcccatcttttgaatcctgacaatgtagaagtcaaattcataatcatcctaaaaaccaagggagtcatacgaccactgtatgtctcttcagtctaggaataatgc

SEQ ID NO: 953 - DNA, 214 bp, Homo sapiens
ctacttagggcgattggagctccccgcggtggcggccgcccgggcaggtactttaaaagttataatgctgatgaacaaaaaggtatgtaaaaactcaggatttaattaattagatatattttccaccattagaacatttctgctcagaggtcttattacaaagctacatttctgatagtctactacggtgcagcttctgccaaagccactcaat

SEQ ID NO: 954 - DNA, 344 bp, Homo sapiens
ccgcggtggcggccgcccgggcaggtgcacgccaccaggcctggctaatttttttttttttttttttatttttactagagacagggtttcaccatgtcagccaggctggtctcgaactcctgacctcaggtgatccacccaccttggccttccacagtgcagggattataggcatgagccaccacacccggactttaattttaattcaatccattttcctactgtcaggacctttactccttttatatacctaccctccaggcttggcctaaggttggctattcacacgtgttataaagttagaaagcacatttgatgatagaagtagccctgtctgcaagttt

SEQ ID NO: 955 - DNA, 346 bp, Homo sapiens
  misc_feature 325: n = A,T,C or G
ccgggcaggtaccccaggcctctgtccagaatggagcttgacatctatgctaaaacctttcttaaggctccaattaactgcctaagagcactagcaaatctttgcagcagttcaacatctatttagaaatgccctttggtctccctgtttcagatacacatcagagcaggtgactttcactttcccaggactcaaaatggagactggggaatccttgtcagaataaacattaatggagggccgggtgcggtggctcacgcctgtaatcccagcactttgggaggctgaggtgggtggatcatgaggtcaggagatcgagaccatnctggctaacatggtgaaaccc

SEQ ID NO: 956 - DNA, 450 bp, Homo sapiens
  misc_feature 16: n = A,T,C or G
ggcgaattggagctcnccgcggtggcggccgcccgggcagggtacagttaaataggtgcatcttaaatagtggggtgatattaaatggttatattctggaggctcatgcccacactgcctttgaagttcagggctgcccagccacattcaggcattgattcaggaaactcccttggcctttcagtaagagagagctcccttatgccagaactgctttgaaatagaatgtggcagagctgtaaagtgggtccaattctacaagtcagcacactctgtggattttccattgtgaatagttctcagatctatatcttcagaccctccaccaatagtatattttcagcccttaggtatctctcatctatagcattggaaaaaagcctcctaacaggcctccccaattccatacttgcctacgtaaaatatttcttcttgcacagtcagaatatt

SEQ ID NO: 957 - DNA, 279 bp, Homo sapiens
  misc_feature 1, 103, 117, 132, 156, 251: n = A,T,C or G
ntctgactaccattatgcaagtaggtgaggagatacatatacaggagtttctgagtgttctttcctaaaacttgtgcacattatgtttgtatattgaaaatanaaggcagtgtttanaatgaacgtggctgngctatacttcttgatttcagtgtnacaacaaagattagattaaaggaacaacaaacagcatgttacaagaagcattccaattttccagtaagaactgagtcatgcaagagagaccattncaggttccacaattaattctaaatgcca

SEQ ID NO: 958 - DNA, 367 bp, Homo sapiens
  misc_feature 36, 48, 50, 100, 255, 269, 362: n = A,T,C or G
ctatagggcgaattggagctccccgcggtggcggcncgaggtaccgtncnatgtgataaactataagattgtataatgtcgtctttcttgtgggtaactntaataagctttttatgatatgtggattgttctcaattggcttattacagcctgcagccatggaatgttcctgatgctgacatcacagtgacaggcacacttgtagttgaggtgtttgttgggatatggatttttttttttttaagtaacaaaggngcaccagcattcanctgtctgacagaacgatgtcttcattacaagcaaccatcactaaatcaactttaaaattatttgacaaaacaaaactaaaatggcttattttnaaact

SEQ ID NO: 959 - DNA, 437 bp, Homo sapiens
  misc_feature 8, 353: n = A,T,C or G
atagggcnaattggagctccccgcggtggcggccgcccgggcaggtacttttatctgacagaggcttcatttttctcaaatattcctttgaatcaaagacatccatcatattaaaaagagtaaaatcatttcagggaggattgctagaggatacagagggcagggatttagccttccaggtgacctctgctggggtcccaaggggtgggacagggtttttagtcactaatttaaaagtataaaaaggtttccaatgctttataagttaacaaacccatatcctgagaattcaaagaatactgaatggcaacattataaatagtaaccatttgctattaaaaaaggcagtaagnactctagcctacctggaaacccaaaaaataagccagtttaaggcccgggccacccgtgggctcactcctggtaatcccagcact

SEQ ID NO: 960 - DNA, 221 bp, Homo sapiens
  misc_feature 176, 180, 185, 187, 190: n = A,T,C or G
ttagggcgaattggagctccccgcggtggcggccgaggtaccttctgctgttccctgggtcttcaatgactcaatttcccaccagcagtatcctttaaagccatcctgcatcctgagacaagagattgacaattcattgataagtagtcttaattgtcactattacagggctgtanggtnctttngncanccatgcctttcattcctaaatggtcttcaag

SEQ ID NO: 961 - DNA, 286 bp, Homo sapiens
  misc_feature 23, 54, 189, 200, 228, 280, 286: n = A,T,C or G
gtgtctacaaggcaccaccttanacctttctgaattcttaaaaggttgtgcagnttcaccctgggtttgatttttgctctgaaaccatttcttggctcaagaattgtttgatgtgtggagagattgggaatgagaaacaggtttatatttaacagtttattctttagctcatctctctctgctcacatnttataggcagngagcatcaacccaggtgtcactttaagntggctgcctggaaatctctttagatagatcattgagttcattaggtgcattnccgctn

SEQ ID NO: 962 - DNA, 429 bp, Homo sapiens
  misc_feature 5: n = A,T,C or G
gactncttagggcgaattggagctccccgcggtggcggccgaggtaccaggagggtattgatgtttgaggtccaaactgaaaacccatcacctccttcccactgctatagcagtgttagccctggggttcattatctagccagttcacaccttctaaagtggggctctgaaaatgtcttacttccctcacagacaaagcaattctcaagcctcctgagatcacccaccaaccagagcaactgctgtcacttggaggtgcagctgaattcttctaattgtgacacaaactcttgaaactgtaaatgctgaaagattaaatgaggttataacactcaggaggttttacaagtaaaagtaagtcaaatcaatagggtctttattttcatatctgtaatgggtttagcctcttgcggggaagtgtttagccag

SEQ ID NO: 963 - DNA, 106 bp, Homo sapiens
ccgggcaggtaccaagtattttatctcagtagaaagtcttgactgggtataattattaacttgaaaatgaccttttctctggctcgggtctcaaggtagacttagc

SEQ ID NO: 964 - DNA, 415 bp, Homo sapiens
  misc_feature 14: n = A,T,C or G
aggtaccacaatgnctggctaatttttttttcttttttttttctggtagagacacggtcttgctatgtcacccagactggtctcaaacttctggcctcaagcaatcctcccacgttggcctcccaaagtgctgaaatttcaagcatgaacccactatgcctggccaaaagcttgtttttaatacagctccatttttaagtggaaatgattatttgtcctataaaagggagataatcctgttttatctgatgaaaatgcagagaatctaaaataatatttggaaatacgttgtataatcaagataaggatggtagaaagggatgcttactttgaaaagcatggcaaagagagtgtctaaagaaacattggcaacaatctttccactcaagtcaccatgggtaaagaagggaacatt

SEQ ID NO: 965 - DNA, 954 bp, Homo sapiens
  misc_feature 24, 47, 105, 107, 127, 133, 138, 142, 144, 174, 180, 184,186, 187, 210, 212, 220, 228, 249, 257, 262, 266, 308, 338,345, 380, 392, 395, 396, 397, 402, 414, 417, 422, 435, 436,438, 441, 442, 457, 465, 469, 478, 481, 491, 499, 538: n = A,T,C or G
  misc_feature 559, 569, 581, 586, 630, 648, 658, 663, 702, 707, 714, 725,735, 748, 776, 779, 814, 817, 830, 836, 844, 854, 884, 889,893, 910, 913, 924, 934, 942, 945: n = A,T,C or G
tttggggggaaggccctaccccanctccggccggggggatgggtggnccggggccccccgtaagggggtttaacccacccaacccaatttgggaaagtaaaaccntnggtaaaaaaattgggggccnccctanaaaancccncnaagataaaaagggaaaaaagggcccccccnaaaacnttangnnaattcccctttccaaagaaaaangnaaaccggncctttttncttaaggggggtgggaaccanaatttaanatccnccgnaatttgggaagggggaaaaaaaaaaggaattgggggcccccnttccccttttgggtgggccccaaccacggnttccttnggtttttaattgggaaattttattccttcctttcnccaattttgggnaannnccaanggaaaaaaaggntcncccgntttttccttttcnntnaannggcccaaggtaaacnaagggccnaaangggtttggnaantgggaaattngggggccnaaaaaaaaatttaagggaaaccccaaaccaacctttccnatttttttgggcccaattccntttttttttnggaaaaaccaanaattnttggtttccttttttggggggggaaattcccccaatttttgggntgggaaattgggaaaccnaattaccttnggttnccttttttttaatttttggggggaaagggggggaaaaanaaggnaaatttnaaaaatttttntttccctttntggggaaattccnaaaaccctttcccccggtttttttattnttnaaattttttaatttatttcctttcccaaattgggnttnccttttggggaancccggnaaattaancccaaatttncctttggggtgggggttttcccttattttngggtnaccncccaaggtttggggaanccnttttttttttncttggggggnccaaaccnccnggtttttaa

SEQ ID NO: 966 - DNA, 509 bp, Homo sapiens
  misc_feature 66, 204, 222, 231, 240, 243, 246, 252, 255, 258, 280, 283,298, 307, 332, 335, 346, 357, 370, 374, 379, 406, 413, 426,428, 435, 440, 447, 451, 457, 458, 473, 475, 477, 483, 493: n = A,T,C or G
ccgggcaggtacatctgtaaagatcaggcctcaggccaaccaatgaattactctagagaaatgtanctgaagaaagcactgtagatctgccgggatagcctgctttgtggggaatgaatgacttttggacaggatcgtgttaataataatgtaacatagtattgttgaacgggcagaatttcatgggcatagctgtccaatcantggaccttttgtttttgnctttatcangtgttaccncgntgnaaattntanttnctcttagcggaaccctctttanaantctgaacttctcagncatcgggtntttgtggacctcttttctttaaggnagnaaattatgaanaaatctttaancaatttggttcantatntttgnaggaaaaaaacattcaattcttccagnttttaangaaaaattagggnanattgttngttgngccacangggnccgttnnggttgggccttcaancngncccctngttaaaattncccccaaaccaccttt

SEQ ID NO: 967 - DNA, 743 bp, Homo sapiens
  misc_feature 1, 20, 24, 63, 77, 82, 109, 158, 162, 187, 189, 200, 212,231, 237, 266, 280, 296, 308, 326, 332, 335, 336, 343, 353,381, 384, 387, 390, 418, 427, 429, 464, 506, 546, 548, 552,558, 566, 567, 574, 580, 581, 593, 597, 608, 610, 613: n = A,T,C or G
  misc_feature 618, 626, 635, 648, 664, 679, 682, 683, 684, 696, 698, 702,707, 709, 720, 721, 728, 740: n = A,T,C or G
ncgcccgggcccagggttcncccnttcacgttggcccaaaaacacgtttttctgggaagaatngggaaggagtaaanccaangggaacaaggaggttttcccttggccnttaaaaggccaaaccccccaccccattcccaattttaggggggccgggnaaangaaacaaggaccttaatttaaaaantnacccatttaanattggccaaaangaaataaaattttttcctnggaatnggggtggggccaaaaagttggcctttccnaaaaaaggaaccantttttttggaaccaangtttttaaaaantttaaaaaaagcccaaanccttgnaanntttaagnaagggggggnaggaaagggggggaaaaaaaaaaggccnaanccnttngggggggaaagggaagggggaaaaccanttttttaantngggggcttttggaaggaaaggaattccaagggggnaaaaaaagggggcctttttctttttttgggggccggaaaaanaaaaggaacccaaccctttgggggtaaagtccccttggananaaangccccnttggtaannagggggnaaaagnnaaaaagggggcnttgnaaattttgggngnttngcccnggggccanagggggggncccttggggggtnaaaggtttttggcccnatgggggaaaatggnaannnccttttaatccnangttnaatangnccccccccccnnttttttngaaattgggggnggg

SEQ ID NO: 968 - DNA, 418 bp, Homo sapiens
  misc_feature 177, 321, 365: n = A,T,C or G
ccgcggtggcggccgcccgggcaggtacgatcttggctcgctgcaacctctccctcccgggttcaagtgattctcgtgcctcagcctcttgagtagctgggattacaggcgcgtgccactgcgtccggctaatttttgtatttttagtagaagatggggtttcaccatgttggccangctgatctcaaactcctgacctcatgtggtccacccaccttggcctcccaaagtgctgggattacaggcgtgagccaccgcgctcagcctacaagcaatttttttaaaaactgacacctattactgataaaaatttctcttgtntaaaaatcctattttactattttttaaaggataaagtatttagnttttttttaaaataccaattaatttcctggtttatttggaattaaaaattttt

SEQ ID NO: 969 - DNA, 453 bp, Homo sapiens
  misc_feature 193, 196, 211: n = A,T,C or G
ctatagggcgaattggagctccccgcggtggcggccgcccgggcaggacgcgggggagttacccagaactagcaacagtagtaagcctcattactcagttgtgagggggaaggtagactctttccagacctttgataaaggggctgctcaaaaaagccacgaccttgggcctctgctaaaaccatggcttttnaantaaaggagggagcanatatataaaaaaccttatccctctttctaatctcttatgtcctgtgagtgtcacccattgagtaaacccaagtggaagtcagcaggaaagtagctgggatgatgcagtctttacagggtctctctgtcacccaggctgaagtgaaatggtgtgatctcggctcactgcaacctctgcctcctgggttcaagtgattctccagcctcagcctcccagatagataccagtaaagatgtcatctg

SEQ ID NO: 970 - DNA, 390 bp, Homo sapiens
  misc_feature 244, 281, 342, 367, 370, 387: n = A,T,C or G
ccgcggtggcggccgcccgggcaggtacaccccaccccatgtcattttaaagggcaatgtgacttgcaccaggaagcaaaagactgggagcactgctttccatcgctctgtggcatgatttctagtggtgcccttctcacccccagacacccccatgatgcaggaggtcccttcccctggctgctcctggaccaggccacagctcaggctgaaaccaggctgtctctgaaaatagaggacgtangcagagaggttggctggattccttccgcgccaagcangcacagttgccgccccctccttgaagaactctgcctattttcctttcttcttcagacccanttggggcgaaaaggaaagttttganatnttttccagggcaaaatntct

SEQ ID NO: 971 - DNA, 656 bp, Homo sapiens
  misc_feature 146, 159, 165, 174, 189, 197, 251, 254, 257, 267, 271, 278,288, 292, 296, 303, 305, 309, 322, 328, 341, 369, 373, 386,392, 395, 405, 406, 417, 431, 446, 455, 459, 468, 489, 501,509, 522, 538, 550, 559, 586, 588, 599, 608, 623, 639: n = A,T,C or G
  misc_feature 644: n = A,T,C or G
aggtacggagtctcactctgtcgcccaggctggagtgcagtggcgccatcttggctcgcagcaacctctgcctccctggtttaggcaattctcctgcctcagcctcaagtagctgggattacaggtgtgtgccaccatgcccggcntaatttttttttngggtantttttttgnaagttaaaaagaacngggggggntttccaccaatggtatgggttcaaggggtctgggtttctttggaattccttccntgnacnccttccgatngaantacttgncgcccaacancttncagnactcatncnctcnaaatagattggcnttgggnggaaattctaacnatggggactaatggaatgtccacaactncacnccggtctccccgnaacccnccnaaaaggtatnnacccttttttntttaaaattcaagnctcttttaaaaaaanaaaaaaaancttnggcctgatnggccccaacaattaaaccaanaattttattccnggggtaanaatttccaattanattaaaaaaattttanccttgggaaccnccaaccttntgggttcccaacccaaggggggaattntnttttaacccanaaaaaggtnaagggcctttttctnacaaaaattttttaanggggnaaaaaggaaaat

SEQ ID NO: 972 - DNA, 189 bp, Homo sapiens
ccgcggtggcggccgcccgggcaggtaccaaacacaattcctgctctcagggaaacatggataagacttaaacaagtgaaatgttaaatagccctgtgagacaggagggaatgcatatcaagcaagacagtgtggtcattgggttttgagggggaaaatgagggaaaggcctttgtgtgtgaggtaggg

SEQ ID NO: 973 - DNA, 603 bp, Homo sapiens
  misc_feature 22, 170, 174, 176, 190, 192, 205, 215, 232, 251, 267, 291,307, 308, 312, 347, 349, 350, 352, 371, 380, 381, 388, 443,465, 471, 488, 497, 510, 519, 532, 534, 536, 549, 586, 603: n = A,T,C or G
acgcgggggaaaattctgattnatgatactgcccttcccctttataggttttctgtaggagttaaaatacactttttcaattgcttgacataatgctcaacactggtaggggagctaaaaatgtcagctattgtcctatgtgccaaaaaaaaaaaccacacagaacagancacncncaccacacaaaagnancaccacattggangggaagaagngaagttaaaagtattangaaaaagccagccaccatnagtggtattcgggtanggccaaatggagacccacctaagntgaatcttttcaatannttcnttttttttattttttcctctccttttaattacctngnntntaccatttatatccaaganggtttaatnnataaaantggaggccattggttattttaactttttcttggttaaattccagtaaatggaaangggttggggttaattaaaaaancccttnggaccccttttaaattnatataattnaaaaaaaccaaanaaattttanccttggggcccangngncaaccgggattgntccttccaattggcccttgggtggaattccccttaangccaaccttttttgggn

SEQ ID NO: 974 - DNA, 509 bp, Homo sapiens
tagggcgaattggagctccccgcggtggcggcccgccgggccggtacctatagaaatgccttcctcaggaaccccgccattgttaaacaagagtgagcgcctagtgggcagaaatgtagtgattgtggaacaaccttttccaagaaatcaagcctttgtagttaatcaggaatttgacagagaataagcctcacaaatgaagtgaatgtggccccatcagtaataaattatatcttgtatcttacagatattgtatcagaataaatcttctgataccagaaaggtgggaaaatctttagtaggaatcctccagccattatattccaagagagctcatttagggctgaaacactgtggaggcagtggttgtgggaggacatttctgtgagaagtcaaacctgttaaacaccattgaaatcatgttgggtagaaatgcagctgttatgaggaagtctttacctggagatgatatctcaattggtatcaaaagaattcttacaggaatattt

SEQ ID NO: 975 - DNA, 362 bp, Homo sapiens
  misc_feature 146, 151, 338: n = A,T,C or G
ccgggcaggtactggacttgcctaatttctaggcatggagttggggcttgtaacaatggtgggagatgggcagtgctttgggaatgtagctgaccactgcatgggtgctaactagcccagggatcttaaagaatttgtgtaggccnatganggatcccactccagccacttgaatagtcatagaattgaatctaggacatcaccgtatgctactaccatgcagttttatcccttctaagaatccaaatgccctagtttaatttctaaatttttgttttggttattttcactaaagcaacatgttagtggactgctggagggggaagtgaattcatggnctgggtcctcatcttgattattct

SEQ ID NO: 976 - DNA, 484 bp, Homo sapiens
  misc_feature 5, 30, 63, 429: n = A,T,C or G
ccccncggtggcggcccgcccgggcaggtncttctatctaaatctcatttttattaatagctncattttattaaatttcttgactcatgtttcatgcattaactggattcctcctcaaaggacgtgtgcacttgatccacatcatcgtaatgcctgtgccatcttaactacatttttctagcttgaaggtcaggattagggggaggaacaccttccgagttgtattaaccgggttggtgaggtggttcgtcatgatatccatcctgtgtttcaaaatcaagaaaaaatgaaaatctctttccacaagcagtagcagaagatattgtcagggcagggctgtcgcaggagtgtccacctgctgtgagctcatcacagataaccgtcacctctgctccatctccagcctactgttcagtctggagagctgancaaagttaggagtggatgctggtcactgatgcaagcagattctttccaaaaagag

SEQ ID NO: 977 - DNA, 381 bp, Homo sapiens
ccgggcaggtacccagcacaacctcacacagttatcaacccgggcagttggactctcgaatccatgcttgcgactgtgatgctacactgcccttttacccagcacttaacttcacacacagaggcacctcataaatatgtattaaataaaagattgatcacacattcctttttacaatcctgaaaaagtcatctccgtgtttggatgaggggaaatacaaaatcactcctctgggaatgaggcagcagaatgaaagaggttgttctgaaaaaacagagttttctggaaagaagtgttctttttcagacagcagtgcttgactctgaagaaaaatgccccatacatggttcacacaagtcctaatgtttttaatttttctga

SEQ ID NO: 978 - DNA, 347 bp, Homo sapiens
ccgggcaggtacaggttctttgaatgcagtatttattcacatagttttcattttctgtcctgacaaaaacttggtgatgtttgaatggttacagaacaaataggattgtggtttatgtttcctattatgcatatttggcagttgaattatgacattagattgggacatggtgagagggggcaggatacggggtaggaggaggggagcaagttacaaaaggccccagttccgggaagctgggctgagttgttctgtttaacttcttcttcctttattcctatggttttatgattgcaaattggcagtggcagggcagctctgactatatttgctagaagcagatgtcc

SEQ ID NO: 979 - DNA, 589 bp, Homo sapiens
  misc_feature 559: n = A,T,C or G
ctatagggcgaattggagctccccgcggtgggcggccgcccgggcaggtacaacaccaatgtagcctcaaaaaagaacacagcagagcaccgcaggggatccctttctgaacacagtcttctcccacttccctcagtcaccactcagtgtttatggtaatgacttctcgattttctttcctgttgatcatttaagacaaaatacgtccctaagcagtatcacttggttttgtctgttttgaattttatttaaatggatcatgcttcctgaatttttttttttgttgttgttgttcgagacagagtcctgctctgtcgcccaggctggagtgcagtggcgtgatttcagctcactgcaacctccgcctccgggttcaaagcacttcttctgcctcagcctcctagtagctgggattacagatgcccaacaccatgcctgactaatttttgtatttttagtagagacaggttttcaccatgttggccaggctggttttgaactcttgacctcaggtgatccacctgccttggcctcccaaaagtggtaggattacaagtgngagccaccgagcctggccaagataggttaa

SEQ ID NO: 980 - DNA, 474 bp, Homo sapiens
  misc_feature 26: n = A,T,C or G
actactatagggcgaattggagctcnccgcggtggcggccgcccgggcaggtaccccatatatgctggtggtttctaaacctaaattgttgtcccagcccattcctacttgcagctcggatgtgccttgctagcctggcttctctacctggcacctcacactcaggatgccaaaaaaagttctgttttctttccccgaaatcctgttctctgctgctgctccactgccacctgttttcttttcttttggttgctggttcccaccagccattcagattccagccggacacacgggattgtcctggactcctctgaattcctcatcctcttcccctggcccacatccagtgggaggacccccgtcctccctcgttcacctcctgatgacataaattcttgaccgtgggctctttgtatctcaccgaaacttcttgcgcccgcatattccccaactggtctccttaacttcacttgt

SEQ ID NO: 981 - DNA, 418 bp, Homo sapiens
  misc_feature 8, 132, 253, 278: n = A,T,C or G
ttagggcnattggagctccccgcggtggcggccgaggtacagactttcattcaacaaatatttatgcatcagctacatgccaggatctgtaatagattctgggtgtgcagtagtgattactgcagaatgcanacatggtccctgcattcttgagagggagacagcaaccaaataaacaattacaaaaaagtatgtaactaattaacaagtgggagaagggagtgggattacacagcataagtggaaggaaggncccacttagagtggtcaaaggcttnttgaaggtaacatgtaagctgagacctgaagaaggatgcaaaaagggccagcatgtaaggaacagagaataaacatcccagaaatagaaaataacacacaaaaacctaaagtcattaaagaacatgatcatctttcaaga

SEQ ID NO: 982 - DNA, 451 bp, Homo sapiens
gactacttagggcgaattggagctccccgcggtggcggccgaggtacacttagattgatttttttctaccagaagaaatttctatgtaaaatgcttaaaaacctgtcatcaatttgatttctgtagcattggatatagagtgtgagcttttaaggtttttaatgtgttgccaaatgttatttcccaaaaggcttcatcggtttcataccctgctggtgagctctgtcctgttttactagctttcagcatgtgtgtgtgtgtgtgtttgagatggggtcttgctctgtcacccaggctggagtgcagtggcgcaatctctgctcacccgcaacctccgcctaccccagttggagcaattgtcctgcctcaagccttctgagtagcttggcattacaggctgccttgccacccacacccaagcttaagttttgaatttttttaatggaagaat

SEQ ID NO: 983 - DNA, 402 bp, Homo sapiens
  misc_feature 400: n = A,T,C or G
aggtacttcagggctctggatttcttttctgtaatgctgaagtctcaaagcttcacaggaaaaatttggaaaagtatgacagttctctgtctggcatctgcttcaatgtcatttctactagggatacccctgagcattctaatgcttataaattaccttacaatatagccaacaaagctttagctattgccaaactcatgtctcaatcgcctgaatatgagtctagtagtcacaattacagaagctttctagcaatctgcaagctctggagaaagtaaatttccaacccaaagaaaaaggatgccatcttccagaaaatactgcaaattacactcttattcaatgatcattgttttttttcctctaaagggttaaatttgtctttccctaaaaacctggnat

SEQ ID NO: 984 - DNA, 438 bp, Homo sapiens
  misc_feature 241, 249, 257, 258, 276, 279, 280, 288, 316, 326, 334, 347,359, 365, 370, 378, 385, 386, 388, 417: n = A,T,C or G
cactcctatagggcgaattggagctccccgcggtggcggccgcccgggcaggtactttaggctgagaaataaatagaaggtgagaaaaaagaacagtctttatagtcagtaacgagtgaaaagagaaagatggtagttggggaaagacagatggggagaaaggttggctggttgttaataaaacagtagaggatgagcatgtattataaatgctggtgggaagaaaccttgtggcaagganggtggtantgttggannaagaaagagaggatatantannaaagttanagaggaactggaagcatgtgggatccangacatagganggggacanagccttgggcaanaggtgagacatnttgcangaagnggtaaggnaactgannanaaagggaagggtgttgcaaaatgtgggcnattgagggagtttttgagtta

SEQ ID NO: 985 - DNA, 345 bp, Homo sapiens
ccgggcaggtacagtaaaacctgttgtaatgttggttactgaaaatggtctttagagctagtgttggtttaaatggagttttgtaattatttgagctgcaactagagtgacaattctccatttttagaatctgtgcctcttgtctggcagcacttttagttatttcctttctattgctttttgttccacactcaataagctttggttggtgtgtgctttatcagaccttcatgtttacttgccaaatgaatatggggttttgttactaaagttagtatttttaatctatttattttatttttctttctttagaaaactcagaatggactcgttttctagtcctga

SEQ ID NO: 986 - DNA, 412 bp, Homo sapiens
  misc_feature 190, 353, 397, 405: n = A,T,C or G
ccgcggtggcggccgcccgggcaggtacatgaaaggagattgagggcagggagctcacagaaccaagacagcaggacccaggattcagacctggaaaatttttatttcctggctggtttgtgtgccctcatgcatgttatttacagtgccatgttctttcacatgggaacactgacacaaggtgaaaatngggaaggttccataggatgatagtgcaaaaaacattaaagacaatcctagcagatgcagttgaagttcaagggagagtccttgtgggagtaacacgaaaggcctggtggatgaagatgtatgaagatctaaattgcctgcagatagtggaggcttgtcttggnaacctacccacaaaagcaaaaaatcatggggccgaataaacctncccccaangggttag

SEQ ID NO: 987 - DNA, 149 bp, Homo sapiens
  misc_feature 137: n = A,T,C or G
tcgaggtactaacaaatgcagtagccaacaagattaccatgcaatcattaaggagaaccaaagtaagagagccactcaaaccagattttgaacgctactaaaattaaagtagttctttgatgaatatgaatgagtanggaaaggattct

SEQ ID NO: 988 - DNA, 442 bp, Homo sapiens
cgactcctatagggcgaattggagctccccgcggtggcggccgcccgggcaggtaccctaggtgatgcctgttcttttgaaacagcagagattttattttaaaaatacgtttttgtgtttattacctaaaggagctattctgaaatttttatgtagaaaaatcttcttctgctccatccacagaagattttttatccatagatatttttgccatctcctttctcctctttcctttgttgtagatgatatgaaaagactgcttttttcaaaaattgtgtttttaaattggtgaatgttgccatgcctaaagtgatctctgagatatcctccttttgggtataaacatttctgttaaatgttgtaaagagctttctataatagacacagtagactgtatttaatttttttctcccttcttggtagatctcttttggttaaaaga

SEQ ID NO: 989 - DNA, 388 bp, Homo sapiens
  misc_feature 372, 377, 378, 386: n = A,T,C or G
ctatagggcgaattggagctccccgcggtggcggccgcccgggcaggtacctgaagcttgaattcctgaactttttttttttttttttttgtatttttagtagagacagggtttcaccaaattgaccaggttggtctcgaactcctgacctaaagtgatccgcccaccttggcccccgcaaagcgctgagattacagacctgaaccactgtgcctaacctccctgaacttctcaacattctgagttagtcactttccctttggtttaagccagctcgggttacttgcaaccctagttatacagcccacttttctacaacaccaaaccaaaacccacctagaaataaaaattcatttttcctccttttttttnttttnnttttaaangg

SEQ ID NO: 990 - DNA, 392 bp, Homo sapiens
  misc_feature 127, 228: n = A,T,C or G
ccgcggtggcggccgaggtacaccccaccatcttggtatcaaggtccacctggatatgccgaatttcatctatctttattcatcttgagcagagcccctactatatgtaagaaatcaaaaatcttanccaggcacagtggctcatactgataatcccagcattttgggaggccgaggcaggcagatcacttgaggccaggagtttgagaccagccttgccaacatgtngaaaccccatctctactaaaaatacaaaaaattagctggtcatagtggtgcacgcttgtaatcccagcttactcgggtggctgaggcacgagaattgcttgaaactggaaggcagaggttgcagtgggttgagatcatgccactgcacttcaggctgggtgaca

SEQ ID NO: 991 - DNA, 629 bp, Homo sapiens
  misc_feature 130, 131, 132, 153, 188, 191, 198, 258, 266, 272, 288, 321,335, 342, 353, 356, 363, 370, 384, 393, 398, 406, 411, 417,423, 437, 445, 450, 462, 463, 481, 487, 490, 515, 519, 526,560, 586, 587, 608, 609, 617: n = A,T,C or G
aggtacccctgaacctaaaagttaaatttttaaagtgggtttagtatgacacatacacatacacacatttatggtttcaaattaaatgtttcttggtctctacttagttgttctttttcaatttttaaannncccccccaaaaaccttcaccnaattttaaaaaaaagggcaaaaaaaaaagcccaanaanaaaaagnaagccaaaaggaaatggtttttttttaaaaaaaattaataattccttccaaaagggttanttcccaanaaaaanccaaaattttaacccnttgggctttaaaacccaatttttcaaaaaccanccttgggaattaanaacccantttaaggtttnttnggaaaanaaggggntaaatttatttttnccttaattnttttnaaggaccnttggngggggncccaantttttgggggtttngggggccnttccnaaaccggccctnnttgggttaaaaatttccntttccnaangcccaaccctttttttttggggggngggncctttgnaagtgggcccgggggggccaaggaaattccaaancccctttggtaagggggttcccaatnngggaaaggttttttccgggannggaaaccnccaaaaaacccc

SEQ ID NO: 992 - DNA, 390 bp, Homo sapiens
  misc_feature 338, 370: n = A,T,C or G
gcccgaggtacgcgggctgtttgttcactgtcatccactgagtgcttgcctcatgttctgctgagcacattccctgtgtgatttcttcttattctcaaaactgcatttggaataccttgttgttttaaagaggagggaacggaagcattgccatttgctcaagatctcacggctagtgggtaagagagcccactccagcaccaccactgcgtgtttgcattttcacagacatttggaggtgggatggagaatggatctgaggagacaagactgggaggtggaagggaacagccatatttttaagttcttttctgtgggaaaactcagaaaatttgagntctgtggggaagcaccctcgagggacaggaancatgtttgggatgggtggga

SEQ ID NO: 993 - DNA, 412 bp, Homo sapiens
  misc_feature 63, 202, 327, 363: n = A,T,C or G
ccgcggtggcggccgcccggtcaggtacttttttttttttttttttttttttttttggtaganatggggtttcactatgttggccaggctcgtcttgaactcctgacctcaggtgatccacccgccttggcctcccaaagtgttggaattacaggcatgagccactgtgcccagcatacagagggttttgagtgcctttcanaaggacaggaaaccctggccacttaggggaaaatgggggagggagaaggctagaggctcaacacatgacatttggttctttcaaatttaaggggatttcttccaaaaactttacctccaagaagnacaggatggcctttctctaacatcgagaaggggaanacaataaccccttacccagggtaatttctggcaaaaaataaattttttt

SEQ ID NO: 994 - DNA, 419 bp, Homo sapiens
ctacttagggcgaattggagctccccgcggtggcggccgaggtacgcggggcagacagattacctcatttcagctcaataaaacatcaccaaattcccttaggcagaaaaagggtggggagtgccctttcttgaaggaatcccttaagtgcacgtctcccgttttcttttcacatcaatgcagagtccctctgtgaatttacaacacccaacacccatgagttcagtccttaagaaggaaaattgagcaagtatttaattggttggacattgcataaaagaggtccatatccaggctaactctagaaattttattctcaaacttagttggcctcttttttttctgtcagagggaccattcttagtggcacctgggggaaatcctttggcacccagaagaaattcaactgcgcttcactg

SEQ ID NO: 995 - DNA, 367 bp, Homo sapiens
  misc_feature 1: n = A,T,C or G
nttagggcgaattggagctccccgcggtggcggccgcccgggcaggtactgggattataggcgtgagccaccgcgtctggcctctaacgagatatttctaaaggttaggccttcagtcaagaattttaaagctggatcttagaggttatctaaactaacctctccatttcatagataaggaaagtgagtcccagaaaagcactggtttggacaagttcagaaagctaaacagtgactgtggatgtatgattctgtctcttaactcctaatccaaatgtcttctcactagataaggctgtgccttctacatttgaaggctcaaaccccatgggatggatggaggggaaggatgggtgggaggggattg

SEQ ID NO: 996 - DNA, 369 bp, Homo sapiens
  misc_feature 177, 260: n = A,T,C or G
ccgcggtggcggccgaggtacaaggggactgggaaatgtggggaggcttcccacaggaggtgaagctggagcagaggcctgaagggtgaaaagttggtatttacaggcaggcaaaggcaggcagtggaaaggagagttgatattctaggacaggaattctttcagcctaccttccanaaagattttcataaccacttggctctcactggtcagcatcccttaatcatagctagttacccaaattgtagcacataacttanaagtttgagatctctatcgtgctgtattattcatgcttatttttctaatgtttggctttattctctaagaagatgaagtcagtggtgcaaagtgaggagcaattcctac

SEQ ID NO: 997 - DNA, 380 bp, Homo sapiens
  misc_feature 88, 155, 326: n = A,T,C or G
ccgggcaggtacactgacagagatcgaccactaaaatcttctgaggcgcatttatctttctctttgagagagaaaccccattttcctnaagaaaaggcaaagctgttccagcacatgttttaaatgattcatattatctgacaatggaaagggtnaaattctctcccaggatttagggtataattctcagccatctgagaattctgtttatcccaccttgtctccttgctcagagaattacaattagatggaaacatctaatgtcaaggcatctgatagctccagcataggatactgtgactgctccagatagattttctccatgnaaaaccaaagttgatggttaattaccatgtccccttctcattatggcactatca

SEQ ID NO: 998 - DNA, 423 bp, Homo sapiens
  misc_feature 361, 370: n = A,T,C or G
acttagggcgaattggagctccccgcggtggcggccgcccgggcaggacagcagcccggatctcagctcactgcaacctccaccccctgggctcaaccgatcctgccacttcagcctccagaggagctgggaccacagacacgcactaccaagtcaggctaagtttttggttttttttggtagagagggggtttcatcatgttgccaggccggtcttgaactcctgagctcaagcgatcctcaggctcccaacgtgctgggattataggcatgagccactgcacccagccaaattgcttcattttttattactccatacttcctacataagatacttcctacaccctgggccaaaattggnttcattttnttttaaaaaatattatttttattttaatggtagttctcacttctggtttggcc

SEQ ID NO: 999 - DNA, 307 bp, Homo sapiens
ccgcggtggcggccgaggtaccaggagggtattgatgtttgaggtccaaactgaaaacccatcacctccttcccactgctatagcagcgttagccctggggttcattatctagccagttcacaccttctaaagtggggctctgaaaatgtcttacttccctcacagacaaagcaattctcaagcctcctgagatcacccaccaaccagagcaactgctgtcacttggaggtgcagctgaattcttctaattgtgacacaaactcttgaaactgtaaatgcttgaaagattaaatgaggttataacac

SEQ ID NO: 1000 - DNA, 407 bp, Homo sapiens
  misc_feature 7, 349, 356, 358, 365, 373, 376, 380, 383: n = A,T,C or G
acgactnctatagggcgaattggagctccccgcggtggcggccgaggtacatgagactaccattaatattgcagtgtgtgtcttttgtattaagttggtttctgaaaatatctctgacagatgctgctaggccaaagtgcctcccacagctgcagctctagagaaatccgcggtggatgttctcctctaacagttttctggtccctgtgacagtgcccactgcttcactactgctctcaggtggtgtgcttggtggcagtgccgtgggcatgggaggttgcggagggggctgggctatgcaaactgctgaagccagaaccatccctgtggttggagcctggggacccancacccancncaagcanccagccanggnagcnttnagcctgggccaaattggggaagaa

SEQ ID NO: 1001 - DNA, 433 bp, Homo sapiens
aggtaccctggcaaggtttgtcctgtcttggtagcagaaagaacttctcaaagtaagggcttcacactaggggagagttcaatggcccaacccagccatggccaccctgacaccatgccctgatgctagtccctgtggcctggcccacactgaaaatactgtggggacaacaagaatggatttgcaagttaccactatctctcaccagctgtaagaccctgggcacattgttgatcctaagcctcagtttcctaatctgtaaaagggtgatattaattgttcttgctcacagaactgttatgagaattaacagaaatagcatattcagactatagcagagtgtctggcatgaaacagagactcaataaatacaggaacaattttggttattggaaacagtgaggcttggcatggtggctcacacctgtaatcc

SEQ ID NO: 1002 - DNA, 445 bp, Homo sapiens
ccgcggtggcggccgaggtactccagcctggatgacaaagtgacaccctgtccggtaaaataaattaccacgggcagataaagtgctcagcgagcccacactaatttgccacagaagggtggaagcaaattcaaggctgaaatctagctcttcatttcctgaaatcattcatgcccactctctcctggcatgaaatgctgataacctggtttcaattttaagcttaaatttacagcaaacagtgcaggtatctcagttcaatgccttggaacctcctctaaagatgattctactaacactcatttcagaagtgagtgcaaaataatttttacataaacaaccaagtaatcccacaagcgcctgcatacctattataactcaaaaactaccctgcacacctgagcattgatgttttaaatacccaagccactgggtatgtctggga

SEQ ID NO: 1003 - DNA, 245 bp, Homo sapiens
  misc_feature 172, 201, 203, 232, 236: n = A,T,C or G
ccgggcaggtacaataattagatcatggtatcaattcaaacaaagaaattgatgtcctgggaactggttatacaaatacattatttcttctctttgaaatgagtagaaggaaagggaactaataataaaatattcacattattgcctacccactaaaggtcagcctggaaanttttacaattaccagtctttcctgggggntncgttctccgatgggttgaagaatataaanctgncccttttca

SEQ ID NO: 1004 - DNA, 361 bp, Homo sapiens
  misc_feature 266, 300: n = A,T,C or G
ccgcggtggcggccgcccgggcatggtacaaaaagcagggaccaagataaagcatcttgactcagtgagcttacaatctttgaaagctagggaggggagaagcacttagatcttatgctgcccccacgcaaccactatagcaggatgtcattcagcagaaagcactttcagattcatcaccacaggtgtgtggcagtggtgcttttttttttttttttctaaatccaatgatcaaggaaacatttacttgtaaatctttccgcctnttttccacatcactaaactgcatgactgcacttntacccaaataaaacctgtcttccctaaaccaccaggttaagacctagggatttatgattta

SEQ ID NO: 1005 - DNA, 414 bp, Homo sapiens
  misc_feature 186, 384, 402: n = A,T,C or G
tacttagggcgaattggagctccccgcggtggcggccgaggtacaccagtttgaaccttagtattatcactaatgcaaatatgagcctaggctcaatttttccagttatgaaatggggctggcattattccgtgatgtgcatgttaagagaggggaaagctcacatttttgaggtcctcttgtggnttctattttgggtaggaactcacgctttgtttattcagcaatcattcctccagaaataaccttaatagcaacaagaaaaaagaataggtgttttttgagctctatctgccagtttctctatatatgaacattatatattgcaacataacactcacaatgcctttaaacatcatccccgttatacagataaagaaaacngaattttcaaagtaaggntagggggacttg

SEQ ID NO: 1006 - DNA, 161 bp, Homo sapiens
cttagggcgaattggagctccccgcggtggcggccgcccgggcaggtacagaaagctactatttatgtaaaaagctaaaatataaaaaaggtatactcacacacatagagtttggtcacagtggctatccctggagagtgaaaatggtaggagggagacaa

SEQ ID NO: 1007 - DNA, 590 bp, Homo sapiens
  misc_feature 62, 197, 204, 212, 231, 234, 248, 284, 287, 296, 299, 342,349, 352, 367, 375, 376, 381, 397, 412, 417, 418, 446, 447,461, 466, 475, 480, 503, 538, 542, 563: n = A,T,C or G
ccgggcaggtactctggctatctgggataaacagaaacaagatgctgggcaccagctgtctncagcaggcaggaaggagggggctgtgcgaggatggggatgtgagaaactaccaccaacaatggggtcaaggctacctgccccaacctccagtctccatcccacattgaaaaaattttaggggggggagccccttnaatgggnatgtgcanaaagtaaaggcttgacaantgncaagggggcaagcnggctccttgggggtcccattgcagttctcttaccantgnatgggtgcncanttggaaggggcaaaccaccttggatgacattgaacttgctccncgatggntgnaaagaagggaaccanggtctcannaaaanctcagtacttgccctnggggtcccacaatancttgnncaacccaaccaacttcaccttaggcccnnggggccaaaaggcnattantttttcctnttttncccttgcccacccctttaaagtnccttccttctttttttaattaaaaaaccccaaggngggnaattcaccacgggggaagttnttccctttaccccttccaataaggggg

SEQ ID NO: 1008 - DNA, 416 bp, Homo sapiens
  misc_feature 328, 382: n = A,T,C or G
ccgcggtggcggccgaggtacagttcagtagtgttaagtatattcatattgttgtccaacagatttctataactttttcatcacgcagcactgaatcgctatacccactaaacacaagttctccctcctacctcctctgggcccttgggaaccacctttctactttctatgattttgactactttagacacttcatatgagtggaatcatacagtatttgtccttttgtgacttttattgtatacttttatttcacttagcataatgtccttgaggtgcaaccacgttgtagtatgtgacaagtttttccttctttattaaggcttgnataatattccattgttaattttcattcttttttaacggcaacatattttcattngtatggaaaagggcttaggtaaccttttttattt

SEQ ID NO: 1009 - DNA, 462 bp, Homo sapiens
actcactataggggcgaattggagctccccgcggtggcggcccgaggtacaaattcaatcacatttattgggtaaatattgcactggctccaagagacagcaatgtaataagtcccaagcctactcctcctaacactctaatggaggtgggagacacccccgcaatcatccctaactcatcttaataaagatcagcagtgcacatggtgccagagattggcgccactgctgtaattatctccagggaacttgagtttctttatgaggggagtaatcagaagggttgttgaatgagtctcctgattttgagaagtcacttatttgagctttagtttccacatttgtcaaattaaattgctagagtcagtagatgatccccaagctctcttccagttctgagagtcatagaacatgcacattaacagagatggctgcagacaatgactttgtacctgccccggc

SEQ ID NO: 1010 - DNA, 412 bp, Homo sapiens
  misc_feature 365, 378: n = A,T,C or G
ctatagggcgaattggagctccccgcggtggcggccgcccgggcaggtacaataaatgtttgataaatactggttgacttagtgacagaatgaatgaggacagttaggatctaaaataggatagagagcaccatggagaggcaggaagggcctgaaaggaaccactttcagcttttatagttttccattagtctttaagttgaaggcaaagtagagggtatacatatatggttttgtcctctgcagttataagctttattaaatagaaatattgcccttgagctctctggcccaggacaaaactactgtatgtaattgaaaaacattttaaaatctaagtgacagaggaattttactctgtgagngatggttaatggnagaaatcactacaatctaactagggaattttccc

SEQ ID NO: 1011 - DNA, 457 bp, Homo sapiens
  misc_feature 156, 189, 194, 216, 227, 234, 261, 292, 295, 298, 310, 322,354, 355, 365, 392, 405, 406, 451: n = A,T,C or G
cgaggtacgcgggaaaaaaagggtggggagtgccctttcttgaaggaatcccttaagtgcacgtctcccgttttcttttcacatcaatgcagagtccctctgtgaatttacaacacccaacacccatgagttcagtcctttaagaaggaaaattgnagcaagtattttaattgggtttggacatttgcnataanaaagaggtctcataatccaggnctagactgctnaggaaanttttattctacaaacctttaggctggnccttctttttatcttcctggtcaaggaaggnacncantctctctaagtngggccaacgtgnggggcaatatctttgggccaccctcagtaaannaaatttccanacgtggcgccttcacctggcagataanataccatattggnncttaccatttggggattttttggtaagaagtgcaggcaaaagggnaggccc

SEQ ID NO: 1012 - DNA, 443 bp, Homo sapiens
  misc_feature 7: n = A,T,C or G
atcactncttagggcaattggagctccccgcggtggcggccgaggtacaatggcttcattattgccaacttggaataagaagtagcagaggctcaaaatagtaatgtgaatgctcaatgttacataataattcaatggcgaggccaagattgggattccaattctcacatttctagccactgctcttcttttacacaataaagatggggaaaaaacatttaagcaagtttgacaggagagtgccctctccaccaacaaaaattattgaggctcaaaagttcagggatttgcagagaccattcaaatgggaaagggcaagtctcttcaacatggtggtggaaaaactggatatccacatgcaaaagaatgaagtttggacccttaccttataccatatacaaaaattaattcaaaatagattaaagatctaaacagaagatcta

SEQ ID NO: 1013 - DNA, 399 bp, Homo sapiens
  misc_feature 58, 63, 90, 117, 190, 233, 257, 303, 306, 332: n = A,T,C or G
actacttagggcgaattggagctccccgcggtggcggcccgaggtacttgcccccagncccanataatttatttaaaaactttttttgtngagacagggtctcactatgttgcccangctggtctcaaactcctggcctcaaacaatcctctacctcaacccccctaagtgctggcattacaggcatcanctgccatgcctggctacaaatcttaatgttttccccatggctnctttttctggcgttcttttctcangtaatggaagtgggcagagaatgatcctttccctaggctccagtgngtnagaattaaagaaagaggaaagaaacncaatggcttgatggtcgaggacaggtttattttaaagaaaacaaacccaaccagtggcttctggctg

SEQ ID NO: 1014 - DNA, 778 bp, Homo sapiens
  misc_feature 2, 35, 64, 74, 76, 99, 106, 114, 116, 118, 120, 136, 138,144, 170, 207, 244, 254, 281, 285, 297, 307, 311, 324, 336,365, 384, 422, 431, 436, 440, 443, 449, 491, 519, 527, 536,547, 556, 558, 566, 570, 575, 583, 587, 594, 596, 619: n = A,T,C or G
  misc_feature 628, 632, 636, 650, 709, 726, 733, 747, 749, 761: n = A,T,C or G
gnacttcaactttattaaagtgggtggcccggaangaatgtggggataagggcctaccccaacnccgccggggntngggggccggggccccggggaagngcttaancgccaagntntnanaagggaatactgaggncntcttcnttcgggggtcttaaccaattttttcncgttcgccttctccatttgttagccagggtgggagcnaattttattaagtccaattagcgtgtgtcgatgtgtnggtttttggncgccccacgattattgaatagatgccnccancaccataatacntatcggatangacnaccaattaagggnccacaactcctngtaaggccttggccagggttgggtttttnaggggaaatgaaattaaanggggggaaaaaaaatgggaaaaagaaaccaaaattgcncaaggttgnaaggncaanccnaaggcntttcttggaaaaaggttaaaattttccttttaattaaagggncccttggaaaaaaaacccccaaaacttnttttttcncttttgccnaggaaaaaccngggggtgtncntccacttncttnggaantaaggttnggtnaaaaccntnggggggaaccaattttacgtacntgggttaantccntttngggtcatccattcnccaagggaaaggcccaaccccaatttcttttttttccaaaaagggggaagggggggttnccttaaagaaaaaaggnaattttnggtttttggtaagngnaacctcaaaaanaacccccggtaaaaaga

SEQ ID NO: 1015 - DNA, 411 bp, Homo sapiens
ccgcggtggcggccgcccgggcaggtactgaatccctcaaacgagatgattccttccatgtgtttctttttgcctgctcattcccaaatttagtgacaagaacacccaacttttcaagccaaatagatatggatttgaatcccagattgaccacttatcagctaagtgattctagaagttactgaacaaggcttcattttctcatcagaaatacagtaaccactttgaaaggctagtgtgaagattaacaataatatgcacaacgcatgcctgctatcagcattattattcattatgtgcctgacacattcttttttgatgttgctgctggtttgtaatatcactattaaatagcataaagaagggatacctctggtttctcactggcaaatcgggaagccaggcaacaaa

SEQ ID NO: 1016 - DNA, 427 bp, Homo sapiens
  misc_feature 386, 394, 404, 415, 418: n = A,T,C or G
tatagggcgaattggagctccccgcggtggcggccgaggtactttgcatacagaaacatttttcatcacttactaagtgagaataggaccctggcctagggggaaaaacaaccacagacaaaccatacttccctgagaagcaggagcatagtgctggctagtgaattgctttcacaaaccgacctcataactctgtgccttagaaaaattagaaatgggaacatttggagatcacttgggaaaacttgaaattatgaatgttaatctgtgattgctaagggaacgtggtatttcctgcctattttgtctgtagtttgtcctctttctcttctagttcattttttaaaacctctgctagatttaaatttttgcttaaaaaataaacngttttttngccaccttcncttccattttnccnttgttttta

SEQ ID NO: 1017 - DNA, 381 bp, Homo sapiens
  misc_feature 179, 220, 254, 305, 343: n = A,T,C or G
ccgcggtggcggccgcccgggcacggtaccttccatgatgttgaggagagactctcctatcctcaccacaccagagagtaggtatgcaggttgccaccagtgttctcctccctacccactccctcacttttcttttcattggttcagtagaaggaggggctgtgcaagtaagtcttgcngcttgagcacagggacaagccgtcactgcagtgctggtctnctgttcttggaggcacctcagtctccttgacctnttagacaccctcctacccccaaggtggggaaggagcaagcagaggcaaaancccagccctccttgttaagactacaagtgactttcctnctttcccttcttccgtgtccgtaatgcatagctggaag

SEQ ID NO: 1018 - DNA, 447 bp, Homo sapiens
  misc_feature 182, 193, 197: n = A,T,C or G
ggcgaattggagctccccgcggtggcggccgcccgggcaggtactaaaaatacaaaaaattggccaggcatggtggcacatgcctgtaatctcagctactcaggaggctgaggcaggagaatcgcttgaacccaggaagcggaggtggcagtgagccgagatcgcgccattgcactccagantgggccaccangagntgaaactccatgaaaaaaaaaccaaaaaacaaaaaaaaatgtgtatcttattacagttgagtccttttgtgagacgaacattcagtgtttgctagattattctaattagctacctttgtatggttaggttagcatggagctgaagataaatgtcccgtttgaaaaaatgacagcccttcagaaaactctggcagtttacagaagaaatacaaatggccaataggtatataaaagttcctaacaagtgaat

SEQ ID NO: 1019 - DNA, 408 bp, Homo sapiens
ccgggcaggtaccctgagaacagcaataatgcacaaacattactattccaacagctgcattgaaacacccttggtaggattgggaaaaagatggattattgccatttggacactccaggactgtccattaatactcctgactaatggaagatgataaagattgggcaagaaaaatgactgcagcaaacgccttggcatcttcaacttgtcacctttagcaagaggcctcttcaacagttcttggactgtgtttggcagccaggcactctcagaacggcaaggagacacagctaacatgatctttgcaatgcaacaaaacaagcgatcttgaggcgacagagtccaaaagatgacagaaaattcatccaactcctgaagcatgtgatgccaccagaaagccttggcaac

SEQ ID NO: 1020 - DNA, 404 bp, Homo sapiens
  misc_feature 328, 354, 362, 401: n = A,T,C or G
ccgcggtggcggccgcccgggcaggtacagtagtgcactcttggctcactgtagcctcgacctccggggctcaagtgatcctcctgccttagccccacaagtagtgggactataggcacacagcaccatgcccatctaagtttttgtattttatgtagagacaaggtttcaccatgttgcccaggctgatcttgagcttcctgagctcaagtggatctgcccaccttgggactcccaaaaatgctgggattataggcggtaaaccaccatgcctgggccttaaatcaaactttagagtcaacatctcttatcacttggaagctttctnggagaaacttccatcacgtgggtgcntcttcttntcctggatgtgtttggtgccccaaaatgggctttggttnctc

SEQ ID NO: 1021 - DNA, 406 bp, Homo sapiens
ccgcggtggcggccgaggtacgatactacatcatgtgtggcttgagtaacagctggcatagttggacttttccttctttgtgccaccaactccatctttggataatattctttaatcttattgttctttatttacctttttttgtttgttttttgttttttttcttgaagagtgcaggcttctgaatctctgtcctcaaaccacctgaaattttctaaactttttctaattagagcattttagaattcttttttttttaagtaaagatgttgctgggtgtggtggctcaacctgtaatctcagcactttgggagtctgaggcaaacagatcacgaggtcaaggagatccagaccatcctggccaacaatggtgaaacctcccatctttacttaaaaaataccaaaa

SEQ ID NO: 1022 - DNA, 423 bp, Homo sapiens
  misc_feature 5, 196, 217, 221, 235, 368, 371, 384, 385, 403: n = A,T,C or G
gactnctatagggcgaattggagctccccgcggtggcggccgaggtacttttttttttttttttttttttttttaaatagagatggggtctcactttgttgcccaggctggtcttgaactactgggatcaagcaatcttgctacctcggcctcccaaaatgctaggattacaggggatgaactactgtgcctggcnttatcaactaatttttttggncaanaaactctttgaggntattgaagataacctcatatgaagattatccaaaaccatctacatgttctgatgcctgctccaagcatccagtgcaatcccctcccttctggagactgaattccctttttaaacagaagcaaagcatgcacanccntccccctgttttnnaaccccccacagagcttnttcctccaggtgaaagatgg

SEQ ID NO: 1023 - DNA, 375 bp, Homo sapiens
  misc_feature 3, 17, 20, 62, 75: n = A,T,C or G
aanccggcgaatttttnctncaacgcgccggcggccgcccgggcaggttcaagtcagtgctnttttggtttcccntttttcagaggctgcctccagatgtcccatatctctgcaaggacaaccaaccttgggcgacagagtgctcagaagcccagccaagtgagggaggagctcatccttcatctcactcaagccactgctggtgtttacatggcacatctgctgacacccgtgggaagaacacagaatggagttcctggggagggttaaaggggcctggccatccacagcagcagttctggctgtggctctactacaggtggctggagctaaattggcccttctgagcttcagtctcactgttgggaaaatggg

SEQ ID NO: 1024 - DNA, 394 bp, Homo sapiens
  misc_feature 138, 384: n = A,T,C or G
ggagctccccgcggtggcggccgaggtactgtgttgtaaagagatgcaggttagcagaaaccctccacatgagatctgctttaagactgacccaagcctgaaacgctctctccctaagtgatccatgtccctgcggtnataccataaccactaagctaacacactcacttgtaaaagtgttgcttctccatgaagcaccaagacttgatgaccatttgcagttctcattaactccactaagaccctaaaggctaaatgacaaccaagcctctgtcactctgcctgagtggatttaccacaaatatcaaatctgttcaatctattataagagctaaaaaggagaagcacatgaaatcacatttaattcttagctcttttatcttnccattttttt

SEQ ID NO: 1025 - DNA, 403 bp, Homo sapiens
  misc_feature 4, 5, 39, 53, 160, 290, 368, 392, 401: n = A,T,C or G
gcgnnggcggccgcccgggcaggttcccagaggacacanttgaaatgaggctnaattaggaaaaactaggctgtttaatatccatattgagtagctttgcaagttactttcacaaacttccctacagaattggttctaacagaactgttcaagggccaanggatttgttttttctgggtctgggggagtcatctttataattttaatattccattagaatgccttgacgctagaaggagggtccatctcaatcacatcaataaattgatcccaacctttataaaaataangcttggatagaaaggaaaatccgaagactaagggtagtctggtaggaatactagcaagggaggaccattcttttaagnaggagggacaaggaaaaggcatgnaaaaacagnag

SEQ ID NO: 1026 - DNA, 341 bp, Homo sapiens
cgaattggagctccccgcggtggcggccgaggtacttcatgtccatcatttctatttcacatttggatcttgctgggttgaaaaggatctgtcaatcttttgaattctttaacagtggtttcgatttcaacttggcctactgaaatcaaagccaagtgtctgcagagacagcgggctctttcatgactgtgaagggatgataaagggaaacctgtcattttacctcttataaatggaaaaaacagatgaatctggccttctcttgtttatccattctttcttttcattcctcacgtccttttgcttcacttcacaacccaggaattcctttccctaaaggg

SEQ ID NO: 1027 - DNA, 405 bp, Homo sapiens
ggagctccccgcggtggcggccgcccgggcaggtacaataattagatcatggtatcaattcaaacaaagaaattgatgtcctgggaactggttatacaaatacattatttcttctctttgaaatgagtagaaggaaagggaactaataataaaatatcacattattgcctacccactaaaggcagcctgaaattttacaaaacagtcttcctggggtcgtctcgatggtgagatataactgcctttcataatactagaagtactgagacagaagaagaggctgggacccatctggattggctgtaggtaaatttgtttgtgctgggggctgcgttgggactgcttgacgcaaaaacacaacattggtctgagtccgaggtgtcccatttgatattggggcctggg

SEQ ID NO: 1028 - DNA, 527 bp, Homo sapiens
  misc_feature 203, 237, 238, 246, 249, 257, 267, 293, 307, 310, 316, 321,326, 329, 332, 342, 356, 372, 373, 378, 398, 404, 409, 421,424, 435, 470, 474, 478, 512, 524: n = A,T,C or G
aggtaccaagtggagagatgggcagctatagagctattttaagcaaaacaaagtttccctccaaaatgtccgcatcctaatctggaacctgagagcgcgttatgttatagggcatagaggaattgaggttgcaagatggaattaaaagtttgctaattaagcttaaccttaagaatcagcaagaggatcccttggatttttcntggaggtggggcccagcgtatatccaccaagggnntcttttgnaancaattaanaggaccaggnagtacagcagtctgcaatccaggagntcaaagaaaagggnagngtgctngatgngccanganaanagggagtatntgtacataagatgngggaaaagattgttgnnaaagnctttaaattctttccactgncttggnccacntggtttgctcanacngaaaaaggaancccttcttaagtaaaggcctgggaaaaaaggggcnatangggnaaaaaaacaaattaaccttccccccctggggagnccccttcttaanaaa

SEQ ID NO: 1029 - DNA, 671 bp, Homo sapiens
  misc_feature 367, 439, 451, 461, 496, 519, 527, 568, 570, 577, 619, 640,647, 649, 653, 657, 659: n = A,T,C or G
tatagggcgaattggagctccccgcggtggcggcccgccgggcaggtacctttctatatttagattctatctttgtcaagcaagatgacttgtttgacagggctctggtttttcatctctgaaaagctactcatccacagagcttgggattgaggggagaggaaagggggaggagattggcttctctccccaactctgaacagatgggatcagaatagggcccttctacatccctagccaagatgcctgggccttggcagttgtcccaggacatagacaatggggtctgatggcagcttctcagacctggctttccctgggcaaggggcttttcctgaggctggcaatgccatttcttcagactcanaaaagggatttagggagagggaaatggggactgcaatgaggcaactcttgacagcttaccctggaaaactangacacagcttgngggagcccancccacagctctgccatctgacccttcttctgcctntgcaggactactgtcctggaaanacagccanaaatggcccaagggacactggtcttctgggggcttaaaaananaaaccanggtctgggaaaaagggttaaggaattaagggaaaaaggaccngtttcttgggatgggcccggnacctaantngggntttntntttttgggaacc

SEQ ID NO: 1030 - DNA, 449 bp, Homo sapiens
  misc_feature 5: n = A,T,C or G
cactnctatagggcgaattggagctccccgcggtggcggccgaggtacatgtcacccagtaattccctgcacagttaagattgcagcagaagaagccagggctgagactgggccctctgagtatctgctgtgggacacaggctagcatgcccatcacaccgacccagacaaatgcatgtatcttttgtgagacatagtgagtttgagggattctgtggcatatccaggtgatgtttacttactaggccactggaaatacaagaataaagcctatagtagatctttgagtgaacgatgtaaattttgaaatcatcaatatatgagagataggtaaaacagtataagcagaggagaccactaggggaataaatgatagaatcagaagaatagaaagacattgctttaagggcaaaacaactttttagtgggataggagagaggaaaaaagg

SEQ ID NO: 1031 - DNA, 415 bp, Homo sapiens
  misc_feature 304, 410: n = A,T,C or G
ccgcggtggcggccgaggtacctctggaagtgtgggtgaagaaggcagctaaaataaggaaagctagttaaacctatttaaaagccagtcagatataatagtaaaattgtataattagtatactcagagataaaagatcacgtatccatgaagcaagaacagactactttaaaatagaaattcagggtgggcgcagtagctcatgcctgtagtcccagcactttgggaggccgaggcaggaggaacaaacacttcagctcagaagttcaagaccagcctggtcaaggtggcaagaccccgtctntacaaaaaaaagaaacaaagaaagaaaaatagtagggcatggtggttgcttacctgtggtcccagctacttaggaggctaaggtgggaggatcacttgaggacaanaaagt

SEQ ID NO: 1032 - DNA, 416 bp, Homo sapiens
  misc_feature 364, 385: n = A,T,C or G
ccgggcaggtactaagattctatggtaactgcttgtatttaagtttttctcccacctgaaagagtataaagaaatgttggctctaggtttatctttttgctgattatatcatacactcattcatttaaaacatttttaacagtatacattggagcccttattttctggccagacaccttttaaattcttcaggttcttcagtgaacaaaaagaccaaaattcctgctctggtgatgtttgtggaggcagagaaaaaacactacaggccaggtggggtggctcacgcctgtaatcccagcactttgggaggctgaggtgagttagatcacaaggtcaggaaatcaagagtatcgtggccaacatnggtgaaaccccatctctgctngggaatacaaaaaattagctgggcatggggt

SEQ ID NO: 1033 - DNA, 614 bp, Homo sapiens
atagggcgaattggagctccccgcggtggcggccgaggtacatcagcgccacaccgcagggctgtccacggtgagctatgaggctggagatggttctggagcagtgaactgcagaggaaagaaggctgccctacccctgggccaccaatcactagcagtgtgacctccggcagcttcttctcctgccaaatggggatgtttgcttcactgacagaaacacagtgggtgaaccgggagtgagcggcccacttggctgaccacttaccagcatttcggcggggcctcgtgctgagacctctccccaccctgacggaacagtcagttggaaaacagccagtagttccattcccactaacatcttatagtgaccaataatactctaccataactgtcgaaaatcctaaaaactctttcaaccctgagattctacttctaagagttctgggccaggttcggtggctcacatctgtaatcccagcactttgggaggctgagatgggtggatcacctgaggtccggagttcgagctcagactgaccaacatggtgaaaccccgttttcactaaaaatacaaaaaattagctgggcatggtgggcgggtgcctgtaatccca

SEQ ID NO: 1034 - DNA, 446 bp, Homo sapiens
  misc_feature 2, 346: n = A,T,C or G
ancactacttagggcgaattggagctccccgcggtggcggccgaggtactgatgctattttcgtgcatatgtctagtgtatatgttttaaggcaaactttctttgtgtgttgggtgtgtatgtgacacgaatggggacagcatctgtatttctgagcatggattgatgtgtggtgtctgtatgtatcttggaatggaggagggagattgaaagaaagtctggttgtgagcagcagaaataattttccaaaagttgagtgacattgactctaaagatgcccagttttctcggcctggggtcagcctgggtgatagctcagtctgtcagaatgaaaggaaacaccggngcttccttgctccaccttttcacaggccaagaccacacctttctttcatcctgaaacaccaagggatttcaaggggctttttgttaccctcttcctacat

SEQ ID NO: 1035 - DNA, 369 bp, Homo sapiens
  misc_feature 100, 138, 159, 171, 269, 279, 283: n = A,T,C or G
acagagtgttgccgtgtcacccaggctggagtgcagtagtgtgatcttggttcactgcaacctctgcctcccaggagaatggcgtgaacccgggaagcanagcttgcagtgagccgagattgtgccactgcagtccgnagtccagcctgggcgacagancgagactccgtntcaacaaaaaaaaaaaaaaaaagatgaagggttttgtaaagatgttcactttaaaagagtgtttctttaaaaggtaggttaacatatttagtaacaangaaattttantaangacttaacccaaagaagtaataaaaaaattttttattggaaaacattttcccagtcttatctttaatttagctttttacctttaaa

SEQ ID NO: 1036 - DNA, 391 bp, Homo sapiens
  misc_feature 349, 370: n = A,T,C or G
ccgcggtggcggccgaggtacattttacactgtcagctatgggttcagtcagatatgcccataaattcatttatgaagaagagctccctaaacttctaatgattttttcctggtggttttatttagctccaaaaacttatgtttttttttcttaaaaaaatcccataaaaatattcattatcaatacatcatattgatgatatcactcaagaaggagatgtctcactctaagcattattataaaaattcacaggcagtccacttttctagaaaaatatgccagtggatccttctagcccttttgcatcctggggatttattaaaacccagggcttgctggaggcaggcncttgacaccctgccttctggnggaccaaaatgctcccagggc

SEQ ID NO: 1037 - DNA, 278 bp, Homo sapiens
aattggagctccccgcggtggcggccgcccgggcaggacacatacatgtccttactttacagggagactttcagcatatttgttagccaatgtagcacctcattgatacttcaaactaggaaataattatgctagcactttcatatctatgaaatgttttgtgcttaaactgaagttactgaatgtttataaacaaaaacaaaaagttcagtaaggggtgaagatcctattgagatgtcttaagcaattaagaatatgtctttgcagaacacttcaat

SEQ ID NO: 1038 - DNA, 168 bp, Homo sapiens
ctatagggcgaattggagctccccgcggtggcggccgcccgggcaggtactaagttcaggagacactgatttgtatattgaaaaataaagtattattgtctacaatggtagttgtgaaagttggcagctgattggaatcactgagggcattttttcaaatagtggtgc

SEQ ID NO: 1039 - DNA, 399 bp, Homo sapiens
  misc_feature 346, 352, 365, 366: n = A,T,C or G
ccgcggtggcggccgaggtacctgaacaaatcccatcaaggacagattctcagtcttgaagaggcagcacggtaaaggggaaagatcatgagttttggggccaggttcccttggatattgtggggtccccacacttctggatgatgttggataactctttgagacttaggctccacatctgtaaaatggaaatacttatttttcagagttgtcataaacactaaatgatttgacttatatcaacctaattcctactggctcattgaactcagctcagctgtcccctctgttcggatgccttccccagttggggcttagttaggtatccctgctgggatacccctgnccaagnctcttacaacatnnccctctgcccataaacacctcatttcttttgtt

SEQ ID NO: 1040 - DNA, 435 bp, Homo sapiens
cttagggcgaattggagctccccgcggtggcggccgcccgggcaggtacatcattagaatcctacctcaaacatgcaatggtgggaaaagatttacaatttaaaatttaaatagtagttaagctaaatttattttggaataatttaggtttccctggataatttttccacgttcatctcaacattatataaattcattcacagtcactcaggatgagtaagtaatgcctccaaaacagcctggtcgtgggttcttctgagtccatctggcttctggctagaagactggaatgactcataaaaatgaagcaacctgaggtcacctactccaggtcttttaaacagaattgccaactgcttaccaggtggttccaatttccgagaatacttaaaataagggagaaactcattctagatacaccattttattttcata

SEQ ID NO: 1041 - DNA, 489 bp, Homo sapiens
ctgtgttttcctattgtgctgatgtgagcttgcactgcttttgtaattaaggataaattttatttatgcatttatgtatttatgtatgtatgtatttaaaaaaattaagggtgatataaaaatagttattaagtggagacacttaagaataatacacacttctctaaataaaacggaaaagcctacttgctgcttgcttgttgcaggtagaattgacccgatcccctgcagaaatccctgccctctcctctctgcccaggaatgccacgctgcccttcacgctggcatgctgcctgtcggttctgtgctattccttagtgacctgtagattcattatctgtgtcgccacaaccttgccttttagatttgcatatgcgttaagtccaatcattaaatccagtgatttttcaaaatagcaaaagtaggtgtataaagtttccaacatgtgtataatttgaagctgaggaatgactaagaatgaaagaaact

SEQ ID NO: 1042 - DNA, 248 bp, Homo sapiens
  misc_feature 52: n = A,T,C or G
ccgcggtggcggccgcccgggcaggtactacgtcaggtgctaaggttaaganagtattttccttcactgactcctcactccgagaatccattttacagcttcattggtttgggttattccaattttttgatgtgagtaaataaatgacttctatttgcccaaaataaagcttatataggccttataaccatgcaaatgtgtccattaagttggactcggaatgagtgaatgagtattactgccagtgt

SEQ ID NO: 1043 - DNA, 368 bp, Homo sapiens
gtaatacgactcctatagggcgaattggagctccccgcggtggcggccgaggtactgggattataggcgtgagccaccgcgtctggcctctaacgagatatttctaaaggttaggccttcagtcaagaattttaaagctggatcttagaggttatctaaactaacctctccatttcatagataaggaaagtgagtcccagaaaagcactggtttggacaagttcagaaagctaaacagtgactgtggatgtatgattctgtctcttaactcctaatccaaatgtcttctcactagataaggctgtgccttctacatttgaaggctcaaaccccatggatggatggagggaaggatgggtgggagggga

SEQ ID NO: 1044 - DNA, 214 bp, Homo sapiens
  misc_feature 13, 161: n = A,T,C or G
tagggcgaattgnagctccccgcggtggcggccgcccgggcaggtacatttgttgggggcgtgacattaacatataaccacttagagtggacatgcagttagagaaaagtcaatgagctggaaccaagctgggaattccaacatgtagaagttaaacacangaggaggagccagcaaaggaaacagaaacagagcttccagcaggtggggggca

SEQ ID NO: 1045 - DNA, 385 bp, Homo sapiens
  misc_feature 11, 24, 40, 67, 69, 77, 195, 199, 229, 238, 247, 321, 354,357, 363, 364: n = A,T,C or G
gggcgaattgnagctccccgcggnggcggccgaggtactntttttttttttttttttttttttttananatggggtnttgctgttttgcccaggctgatcttgaactcctggcctgaagcaatcctcctgtataggcctcccaaaatgctgggattataggcatgagctactgcaccctgcctcttgtttttaanatanattcctcatgctaacagaataagctattanccacatttntacaaaggngattttaagtcaggtttattctctaaaaatgagaggcattaaaacaaagatagttctttaacaacaacaaactnataatttaaatttttttgctgtttactttatgnaanaggggnngaaatgtcacccatttaattt

SEQ ID NO: 1046 - DNA, 899 bp, Homo sapiens
  misc_feature 9, 16, 36, 41, 45, 48, 50, 54, 56, 62, 64, 68, 70, 77, 79,89, 94, 100, 107, 109, 127, 131, 149, 167, 173, 179, 183,187, 198, 208, 227, 262, 266, 283, 297, 314, 320, 332, 344,377, 378, 384, 387, 391, 401, 405, 414, 454, 465, 485: n = A,T,C or G
  misc_feature 497, 527, 534, 535, 572, 585, 596, 603, 606, 608, 611, 616,638, 650, 681, 683, 690, 693, 706, 710, 737, 747, 754, 756,763, 802, 807, 829, 837, 842, 845, 848, 849, 862, 874, 876,881: n = A,T,C or G
acacttatnagggagnccgaaaattgcgtagccctnccacnccgncgngntggngnccgggncnccgncncccgggngnccaagcgttnaccgnccgtgngcgtaangngtccttctccttgggggnggtngggtaagtttctccatanaattccaaccttccaatnttggtntattgnttgnaaanaagtccttggnaagcccttcnaccaagtccatacaaatcnagaggtcgccactccaattgtaaaagtcctcggtncagngctggttgatacattcncctaggccttgggntttccaaccgtccttgnggcccnccttctttggcnttggcctttaancccaaggggcccccaaaattggccccggaaagnnttttcnttnggcnccccaaggcnttcnttttgggtnttttccttggaaagcccttggtttttaaggaaaccttttnctttttccttntccaattataagggtttggnaaaaaccccttnctttggttttaccaaaaagctttttaaaanggtttcnntttgggccccaaaaaaattatatgggaaattgggccnccccccttcaccnggtaaaaaggnccttggnttntnggncaatntctccaaaaaggtttttaatgnggaaagcttcgnaataaggtaaggtaatttggccaatccagtngnaaattcnaangaaaattggattncacncctttttccaaggtaaaaaaaaccggnaagaagttcntcctacnantttttgncccggaggcaaaaaggtttccccttgggggatagggaanaaaanaattaatttttgggaaaaagtnaaaaaaantaggnttnatnntttgggttgggtnggaacccaattngntttanaaaaaaaaaacctttttt

SEQ ID NO: 1047 - DNA, 421 bp, Homo sapiens
ccgggcaggtacctcctttctgtgggttttcccttgactagaatacccttgccctagcttcttgtcccaccttgcctggatatgtggactactcattcttcacttccaggatgctcctacccaataaactgacagcagttgtgcctgttaaaccctctcacagcacatgaacctttctttcaaagcatttatacgagtttgtaattgtcattttggcctccatcattagatataagcttcacgaagaaagaaaccatttcattccacactgtcactgcagtgcctacacggtgcctacatcccaccaccgtaaccctggtgcctacatcccaccactgtaatcctggtgcctacccagtgcctacattccccactgtaaccccagtgcctagcagggcacttggcatacatctaccactgg

SEQ ID NO: 1048 - DNA, 478 bp, Homo sapiens
  misc_feature 392, 408, 455: n = A,T,C or G
tcactacttagggcgaattggagctccccgcggtggcggccgaggtacacaggccgggcacagtggttcacacctgtaatcccaacactttgggaggctgaggcgggtggatcacaaggtcaggagatcgagaccatcctggccaacatggtgaaactctgtctctactaaaaaatacagaaaattagccagtcatggtggcacgttcctctagtcccagctactcgggaggctgaggcagaagaattacttcaacatgggatgtggaggttgcagtgagccgagatcgcgccactgcactccagcctggtgacagagcgagaccccatctcaaaaaaaaaaaaaagttgtatgtgacagctaaccataataaaaaaaaaagaatgaaaaanaagagaggagaaagtngggaccaacactaaatcattagtaattttgagcacatttcctccaanggcattatgctattttttcaact

SEQ ID NO: 1049 - DNA, 437 bp, Homo sapiens
  misc_feature 2: n = A,T,C or G
tnctatagggcgaattggagctccccgcggtggcggccgcccgggcaggtacgggacttgtctccaggagacatgtctgggaagaagagctagactggagaatcatgagcatgttcaggtgaaaacatgtgagtggataagagcaagagggtgagaacacagaccaaggggctaagggacagactgtgttcagtatttgggtatggaacttgtttttgctacttgctagttctaagaccaggctcagactctaacttctctgtaatgtgggaataatgatagcacttaccttataagattttacaaagattaaaatatcatatataacagcacttaacacaagtaagaattcagtaaatgttgactgttattactattgtctgggtcgttataagtttgaagacacaattgcataaactgtcatcattaaaaggaaa

SEQ ID NO: 1050 - DNA, 342 bp, Homo sapiens
  misc_feature 9, 22, 23, 25, 26, 27, 34, 35, 58, 62, 65, 66, 85, 87, 91,96, 105, 111, 120, 121, 122, 126, 129, 131, 132, 134, 150,151, 152, 159, 162, 177, 181, 196, 203, 209, 214, 219, 220,228, 242, 246, 258, 264, 279, 285, 286, 287, 289, 295: n = A,T,C or G
  misc_feature 296, 298, 303, 306, 320, 321, 322, 323, 325, 326, 334, 335: n = A,T,C or G
caccgcggnggcggccgagggnntnnngaggggnncaaaaacccccacaccccgaagnccanganngagccccaccacggagatntngaanaaganaaaacaggnaaggcncaaaagaannnaaanacnanngngagggggccaacaccnnncaaaganggntgaaaaaaaaaaagngttntgcaggggcggcacnccctcanaaaaanaaaangaagnnggggaggnaagaaagaacccanacanaagaaaaagganaaaggngcagggaaaaacccnacaccnnngnaaggcnncngaggnggngcgaggagagaccnnnncnnaggcagcnncacaaca

SEQ ID NO: 1051 - DNA, 312 bp, Homo sapiens
  misc_feature 15, 21, 169, 182, 184, 218, 219: n = A,T,C or G
gcggtggcggccgangtacanctaaactccaccgcagagcaagcaaacccaatctggcacacagcttttgggggtttcctctcctactatggcccctagccctgtgcccaggacatagtgaagggtcagtaaatgtttggctacattgatctgcaaaatcctcaactancaccccctccaancncaagcacaggtcttgttgaacaaacatccccatnntaacccaacgggatctgccctaaagcccaaagagccttggcccctcacctattgggaacatctttccaaaaataccaccacttttcaaaggga

SEQ ID NO: 1052 - DNA, 190 bp, Homo sapiens
  misc_feature 133, 137, 147: n = A,T,C or G
ccgggcaggtacaggccaggtgagccaccgcgcccggcctacacagtttgcattttaaaagattactttgtatacccctagagaggttcccccccatggaattctatattgtctaactgttttctgatgacantaanatttcctccngaggtctttggaaaatcaatttgaaaggaaggaaagaattgca

SEQ ID NO: 1053 - DNA, 350 bp, Homo sapiens
  misc_feature 89, 126: n = A,T,C or G
aattggagctccccgcggtggcggccgaggtactgggattataggcgtgagccaccgcgtctggcctctaacgagatatttctaaaggntaggccttcagtcaagaattttaaagctggatcttanaggttatctaaactaacctctccatttcatagataaggaaagtgagtcccagaaaagcactggtttggacaagttcagaaagctaaacagtgactgtggatgtatgattctgtctcttaactcctaatccaaatgtcttctcactagataaggctgtgccttctacatttgaaggctcaaaccccatggatggatggagggaaggatgggtggagggatggatg

SEQ ID NO: 1054 - DNA, 436 bp, Homo sapiens
  misc_feature 66, 260: n = A,T,C or G
ccgcggtggcggccgcccgggcaggtacttttttttttttttttttttttttttaattttttgtanagatggaggtcttggtcttgccattttgcccaggctggtctcaaactcctggcctcaagtgatcctctcgccttcgtcttccaaagtgttggatgggattacaggcgtgagccatcatgcctggcctacgcattaatatttaaactgtttttagttctgttggtcacttccataaagattaatatggttgtatntatagctcatgagataccagctttaagagctcttagttcccctttccttccaacttttatttaatttaattcttttagtggttaccttcgtaacattagatattatgttttcgtccaacaaacagaatatcattatcaacagtatttctggcagtccagcttccatgcctattttt

SEQ ID NO: 1055 - DNA, 411 bp, Homo sapiens
acttcttagggcgaattggagctccccgcggtggcggccgaggtacaagaaaaaatcaaacaatcacatcaaaaagtgggcgaaggatatgaacagacacttatcaaaagaagacatttatgcagccaacagacacatgaaaaaatgttcatcatcactggtcatcagagaaatgcaaatcaaaaccacaatccgggaggtcttgccaaagaccacctgggctttccgggcaacgtgctagagcttctgggaagcagtcgtggccctttggagattccacggcttcggattcctactgcaggatgctccactgtgttctgcccggccctcttggccgttttttgcctgaggggggtaaccctcgggaatggcctaggaaaccaaggaaaccacctggagatgggcccaagt

SEQ ID NO: 1056 - DNA, 320 bp, Homo sapiens
  misc_feature 10, 14, 16, 141, 169, 212, 237, 249: n = A,T,C or G
atttttcggncaancnccgcggtggcggccgccaggtacgcgggagaataacaaaagcactcgtgttacttttaaacaaggtaaaacttaaacagttttttcctccgtttctttttttatggaaataagaggcaagtgatngcaagtgggtaaatatcaatgggcagtngtaactgaatgcactgacctgttacaagagagacggaagcttntacttgagcagatacaaatactgtnatccgtggagantttgaaagaagtctttctatcactgggtagtttgagagctcattagtcttcttttagaatggggtttaaac

SEQ ID NO: 1057 - DNA, 386 bp, Homo sapiens
  misc_feature 328: n = A,T,C or G
ccgcggtggcgccgcccgggcaggtacttgcccccaggcccagataatttatttaaaaactttttttgtagagacagggtctcactatggtgcccaggctggtctcaaactcctggcctcaaacaatcctctacctcaacccccctaagtgctggcattacaggcatcagctgccatgcctggctacaaatcttaacgttttccccatggcttctttttctggcgttcttttctcaggtaatggaagtgggcagagaatgatcctttccctaggctccagtgtgtaagaattaaagaaagaggaaagaaacacaatggcttgatggtncgaggacaggtttatttttaaaggaaaaacaaacccaagagttggctttctggctgag

SEQ ID NO: 1058 - DNA, 355 bp, Homo sapiens
ccgggcaggtactttggcttttgtttctagaacaccaatgagtatatgctcattaagatagtttgatgcaataaatccttattttacttgcctctattactgcattgtaaactgttgtctactttgtcttcttgaaatcctacacctccccagcccccacatttggcctatggaacattactttatcctgattttccccctaaccttctggcaatgcctctcagactccttccagaactacttttctctgttttccttttaatgatgacagtttatgcaattgtgtcttcaaacttataacgacccagacaatagtaataacagtcaacatttactgaattcttacttgtgttaa

SEQ ID NO: 1059 - DNA, 453 bp, Homo sapiens
  misc_feature 5: n = A,T,C or G
cactncttagggcgaattggagctccccgcggtggcggccgaggtacgcggggacagtcacagttaacatcctcattctcaatcctacccatgatgcagacagattgcctcatttcagctcaataaaacatcaccaaattcccttaggcagaaaaagggtggggagtgccctttcttgaaggaatcccttaagtgcacgtctcccgttttcttttcacatcaatgcagagtccctctgtgaatttacaacacccaacacccatgagttcagtccttaagaaggaaaattgagcaagtatttaattggttggacattgcataaaagaggtccatatccaggctaactctagaaattttattctcaaacttagttggcctcttttttttctgtcagaggaccattcttagtggcactgggggaaatcttggcacccagaaagaattcaactggcg

SEQ ID NO: 1060 - DNA, 410 bp, Homo sapiens
ccgcggtggcggccgcccgggcaggtactctcaggctggccacagtgactcatgcctgtaattactgcactttgggaggccaaaggaggaggatcacttgagcccaggagttcgagaccagcctgggcaacatatagagaccatgtctctacaaaaaacacaaaaagtagccagatgtgatggaggctgagatgggaggatcatttgagcctggaagtcaaggctgcaataaattatgatcatgtcactgcactccagcctggatgacagagcaaagctctatcccaaaaaactctcaagacaaccacaaacatctcacaccatctatatatgatgaagtaatacatataaaccagttgtttaaaacaatttcaaaattttgggtaatctctgattgcctggattatttc

SEQ ID NO: 1061 - DNA, 372 bp, Homo sapiens
  misc_feature 330: n = A,T,C or G
ccgcggtggcggccgcccgggcaggtactggtttggagaacttagttctctagtatcatcttcatcatcctcagttacaaatgctgacagagcatctacaacctgtgacataccatccaaacaccaatcccaaaaatgtgctatcccaaggatataagacacggtccttgcaaactaggtaaagagacaggacttaaacaatgatgtaggccggacactgtggctcacacctataatcctaccacttttggagactgaggcaggaggatcacttgaggccaggaatttgagaccagcctgggcaacacagtgagacgccagctgtattantccattcttacagtgctataaaagaatcgctcaagactgggt

SEQ ID NO: 1062 - DNA, 388 bp, Homo sapiens
  misc_feature 133, 182, 209, 241, 257, 274, 275, 283, 290, 303, 316, 338,339, 340, 349, 371: n = A,T,C or G
ccgcggtggcggccgcccgggcaggtactggagggtagactgctataacaacttttggttttggatgggaataaacagaaaaagtctcatctccagttcatttctggggagggtcaggaggtggggggtgctnggctctactcccttcatatgattttcccttctttatctccaggatcttncccatttcacggagagacatgtatganaatgaaggctgctgagttgggaggggcttatngggccagtttttgaanaggcctcataccttttnnccacattncatttgnccagaactttgtnatatgactgcacnctaacttacaaggaaagactgnnnaaattgtantctagttgccatgtccgggtanaaaagggaacacttttt

SEQ ID NO: 1063 - DNA, 375 bp, Homo sapiens
  misc_feature 76: n = A,T,C or G
ctatagggcgatttggagctccccgcggtggcggccgaggtacttttttttttttgctccagctgtcaggacctgnttattgttgaaactggtcagactatcagtctatgggttaattttctccagcattatttagtagctccagaaggagaatggataaagtaggcattgaaataggcttaaactttggttctgctggtggattcaagaaaagggaaaaattggaagagttgagagaatgggcaagaaggaggtccaaacgctggagcataaacagagaaaaaagacagaagaaagagggggtgtggataaaaacaaagggagcaaaaaattgtagatcctgatgaggttgaggaatagtggttgtaaaaacta

SEQ ID NO: 1064 - DNA, 269 bp, Homo sapiens
  misc_feature 1, 6, 13, 105, 107, 112, 146, 213, 216, 222, 228, 238, 243,260: n = A,T,C or G
ntcgangtacccnaaatgaaatggctttaaaaagataaaggacagaaatcatgtgatttgctggaacaacttccagggcagcacagtctaaatatggccaggcangngtgcngccaggtccccagccatgaacaccaagaggcttncaggcaccgctggctcccttgggcttcccaggggttgtttttatgggtggaggaaggggccaaaaanccnacgaangaaggnaaaaacaatngaagnaaaaaaaccgaaccacnccggaaccc

SEQ ID NO: 1065 - DNA, 400 bp, Homo sapiens
  misc_feature 170, 343, 351, 358, 373, 377: n = A,T,C or G
ccgcggtggcggccgaggtacctttaggtatttgaagaactgatgatatgtagctgtgactctgtttctgaaggttgagaacctcctttttctgaggacaattcgtgccccctttcaaattgtaattgtaatcacccaaagtgctgggattacaggcgtcagccacccgngcctggcccgttattttgtctttcattcatgatattggttaatctgtatttatcaagtttgttaattttttttttttttgagatagggtcttgctgtcacccaggcttaagtgcagtgatgtggtcatagctacactgtaaccctccaactcctggggctcagggcaatcctnacaccctnacactcntggagttagctgggnactncagggcgccacaccaattggtgc

SEQ ID NO: 1066 - DNA, 391 bp, Homo sapiens
  misc_feature 52, 53, 358: n = A,T,C or G
cgcggtggcggccgcccgggcaggtacccagaggacacagttgaaatgaggnncaattaggaaaaactaggctgtttaatatccatattgagtagctttgcaagttactttcacaaacttccctacagaattggttctaacagaactgttcaaggccaaggatttgttttttctggggtctggggggagtcatctttataattttaatattccattagaatgccttgacgctagaaggagggtccatctcaatcacatcaataaattgatcccaacctttataaaaataagcttggatagaaaggaaaatccgaagactaaggtagtctggtagaatactagaaggagacatcttttnagaggagggacaagaaaagggcatgaaaacaga

SEQ ID NO: 1067 - DNA, 336 bp, Homo sapiens
ccgcggtggcggccgcccgggcaggtacaaaattatctttattcagaagatcacatagcagcatgttcataatcaaaaacattttaccttagcaataaacaccagtcatttatgcaagagcttcccagggttggtagatatttttattgcttcattttgctctagttaaagaaatggaaaagatgcttttaacttattatcaatcctacatcaggtgtcaagaaatgcaaagcattagaaagagagagggaaagagggatcttcaatattctctgtaaaggagcaaattctgacatggtcatctcagacaccctcttttaattccaaagtctaacc

SEQ ID NO: 1068 - DNA, 317 bp, Homo sapiens
ccgcggtggcggccgcccgggcaggtactctgctactgaacgatgaactttagggcctaggttacacctatccactttatctcctcagacctaattctatgccttatgatatacaagggctcaaataactagagtgtcatatatgaagagcaaatataaagcactcaaaaaagccaagcgctacctctttagaacttggaacactgctgtgatctttctccattatcagccatctgagaacatttggaatagaggggtttttccatgttggccacggattcacaaatctcccatcttttcctttcttggatttagtt

SEQ ID NO: 1069 - DNA, 519 bp, Homo sapiens
tccaccgcggtggcggccgaggtactgtgaggcactctttccccactctcccacaaccctcagcttaacacaactgtggtgattgctttgtccgttttcccatgaggaccctgagatttcaacaaggttcagtaactcacacatcgacacttccagggagctgtgttgccaggaactggcccaggtctttccctcctgggcccatcttgtccttaatctctgctgacattgatgggtttagttaccttgtcgtgtttcttcagtgttttatgccatacagtctcccttgagtagatgttctgtataggggatatcacagcttcctggtgagaactgggttaagtccagcaaggatgcccgggcttagtggcactggagttgtggggtggccttgagccccaagcaagtcccctgagagcccttcccgatggaatgtttgaagtcactgagtgtgttccttcttctttctggtcaggctgtcctggccgctgcacttacaattgcaccccatccccctac

SEQ ID NO: 1070 - DNA, 393 bp, Homo sapiens
ccgcggtggcggccgcccgggcaggtacacgtagctctagcatttcatcacaaagtgtcaggggagagaatagctttcacttttttgtcatccctctcactttctggcctgtctttacggatgctgtcttacagctgcttatccaaagataagtggggttgttggtgatactgattacagctgcttatcagaagataatgggttgtagtgatactgattagcctacggcataaattaagtaaaagggggaggaaaaacagttttgtcatgactcaggaggaagatgaggcacactgtcacttttgagctctgtgttttggcaggtctgccatgacccacgtgggaaataaagggctcccttccgcttgtgtttcaggactactcaccaggggg

SEQ ID NO: 1071 - DNA, 391 bp, Homo sapiens
  misc_feature 163, 174, 206, 258, 356: n = A,T,C or G
ggcgaattggagctccccgcggtggcggccgaggtactttaattttttttttttttttttaagcagagatggggtttcgccatgttgaccaggctggtcttgaactcctgacctaaggtgatccacctgcctcggcctcccaaagtgctgggattataggttngagccaccacncccagctgtgttatgttttaacacatgtgctntgtcgctaagtggttggaaatatgaaaatgagtagatgtgttcttataatangacatctgctttagtatacattattaagcatgctcttccactttggaatttttattttatattttcacttaggcaaaaatactttcaaccattaaagngggtataaaagcaacagttgcttttagaaatttac

SEQ ID NO: 1072 - DNA, 435 bp, Homo sapiens
  misc_feature 161, 174, 347, 390, 422, 435: n = A,T,C or G
aggtacattttattcatccgtcgtttgggtcagggtctgcgggcagacacaggtagctactgccctgttgtgagaagcaatacctcaattggtgccccatgtgaggagagctgtgtgaggacagtcaggggtctgcagaaacagaccttccgcagtcggancccccttgttaangcaagcttttgaaaggaagtgtaaggaccgctttcatgaggaaagctgcaaaggaagcctgaggaatgcgacgggcccccgggaaacaaaggtgaagaaaaaccgctgtggtcaagtcaagtgagtaactagtaagtcattggtgcccactcaaggttaccaagttctggggnaaagtttggttcaaagctgagaatttcatcatggggacaacangtttattagcacaagccaagaaaaaccatttnttattaaaaagtn

SEQ ID NO: 1073 - DNA, 434 bp, Homo sapiens
  misc_feature 195, 198, 215, 286, 298, 366, 417: n = A,T,C or G
cttagggcgaattggagctccccgcggtggcggccgcccgggcatgtactcttctctcctcccccaaaagccctgtatgagtgtgtctctggctgcgcatatttaagtattaactgagataaagcatgagctcagcaggggctttctaatggctaatccacagtaacccatttaaaaaattttttttttttcccncangaaaaaagaactagtanggaaaggacattttggtggttgtttgaaagaagtgtcactcgggtatttgggggaggaagagtggtgtctnaccattgagttntttgtttggtggatgcctcttttccaggtccagtttgctgaattccaggacatggagtggagacaggntagttgggtacggaggtgccatcaaagttttctaaggccaagttcagccantgtttgaaaaggaattt

SEQ ID NO: 1074 - DNA, 598 bp, Homo sapiens
  misc_feature 133, 161, 173, 174, 178, 222, 227, 236, 239, 243, 272, 286,293, 302, 306, 315, 331, 332, 342, 346, 348, 354, 368, 371,383, 385, 387, 393, 395, 406, 416, 449, 452, 454, 477, 485,502, 515, 525, 528, 533, 540, 542, 566, 567, 572, 580: n = A,T,C or G
  misc_feature 590: n = A,T,C or G
ccgggcaggtacatgggactacaggcacgccccaccatgcccagctcatttttgtatttttagtagagacagggtttcaccatgttggccaggatgatcttgatctcttgacctcatgatccgcccgtcttgngcctcccaaagatgcttgggattcacanggcgtgagccanncacnacctggcccttctaatttaatatcctccttttaaaaggagtagnagtanaaaaccttnatngagnaagggctcaaaaaaatttattttttaaantctagaaattcttntttaccncttttaagnccgnccaaagggngtaaataaatacattnngtaaaatttnttgncncctaanaataaattaagagnttnggtattgtaaangncnaattancnaccaatattgngacaaccagntaaataccatatttccacctattttttttcaangtnanaaaaaaggggccaaataaaaaantatttggnaggaacttttaattaanagaccttaattanttggggctanggnccttntaatttntntttgggggggttggggggggaaannaaaanatttgtangtaaagaaangaaaatta

SEQ ID NO: 1075 - DNA, 631 bp, Homo sapiens
  misc_feature 90, 505: n = A,T,C or G
ccgcggtggcggccgcccgggcaggtactttttttttttttttttgagacggagttttgctcatgttgcagtgagctgagatcatgccgntgcaccccagcctgggtgacagagcaagactgtatctcaagcaaacaaacgaacaacaacaacaaaaaacctctaagtaataagtctgtaactttacaccaaaggggatttttcttcagtaattctataggatttttgggttctttacattaagttgaatacaaacataacatgagttacaaaagattaaaacacagaagtaatattaaggagcaataaatgtcatatgaaatccctaagtggaaaataatagatattctattttaccattattttaaattagaaattatttacattaaattattttaaaacaattattaccactaccagtatgactcgactgcctatgatcagaaaggacagaaaaaagatgtctgaaacaactgctgatttagacttccattctttttgagtnatattcctgctaatgatatgtgtttaacattatatgagtaagaactaaggaatttaatctaagaaatgggaagttcaggtgcattaaaaggaaattagtaggtgttttttcagcctaaaaaaaaaa

SEQ ID NO: 1076 - DNA, 144 bp, Homo sapiens
  misc_feature 140: n = A,T,C or G
ccgcggtggcggccgcccgggcaggtacacacagtggcagggcagccggaaaggaggatgtggttttccttttccttttggaagaaaagggctcagtcagcctaattgtcccttgaagtgcttccaacttttcttttaanagct

SEQ ID NO: 1077 - DNA, 943 bp, Homo sapiens
  misc_feature 43, 59, 68, 75, 79, 85, 87, 91, 97, 99, 103, 106, 108, 110,113, 115, 119, 134, 139, 141, 146, 148, 150, 152, 156, 158,162, 168, 172, 192, 198, 230, 240, 253, 271, 275, 293, 307,309, 332, 335, 337, 341, 344, 385, 386, 388, 400, 410: n = A,T,C or G
  misc_feature 411, 419, 440, 442, 447, 469, 475, 491, 496, 500, 512, 520,526, 527, 557, 564, 583, 606, 634, 651, 677, 679, 687, 690,700, 707, 712, 736, 741, 746, 756, 761, 779, 801, 803, 844,846, 858, 867, 877, 913, 914, 927: n = A,T,C or G
ccgttaaaattacccggaacttccacctttattaaaggggggnccggaaaatttggggnaaagtcctncccaacnccgnccgggntngggnccgggncnccgnagngntnacncnttcnaagggaaaggtggtncttgncnaaagntngntnggtngnggtnttaggnggtnaaaaaaaaaaccttggaagnccttgnttggccaaaaaaccttccaacctggttaaatnccccaaaagncttccttttcctncaaattggaaagaaaagnaagnccggggaaaactataacncctttgggtccaangnccttttaaaaaaaggggccaaanggntnggtnttntttccggatattccttttttttaaaattttaaaaaaatttnnangggggcctttgntttggaaccnnaaaaaaanttttttaaacccaaattttananaaaancctttaaggcccccccccaaantaaaancccaaaaacccccaantcccncccnggggttaaaaanggttttgnttaccnngtttgggcccaaaaaaatttcttttttggnccaaagntttataaccccaaaaaaanaaggtaaccccaatttcttttgntaaggtaagtaaactttaacccaacccntttttttgggggtttcnttccccaaagttttcccccttaaggncnaaaaaggnccngttccccccnaattttnccttnctttctcccaacccaaatttttcnttttnaattnccaaaaattnttggntttaaggccctttttggnaacccaatttggtttatttaantnccttccccttttggggggccaaccaatttttccccaatttnanggggtaaaaagnccccaaggncccccttctntttttttcctttccccaatttctttcccggttaaannttcccgggttttncccccccccctttcaa

SEQ ID NO: 1078 - DNA, 376 bp, Homo sapiens
  misc_feature 234: n = A,T,C or G
ccgcggtggcggccgaggtacacttgaggaagcttgggctcagaggctttatgttaattccaacagtttttgcaacaggaggaggagaatatctgtccaggagccctaatcaagactcagcaggaagctggtggcttcctttccttccttcttttgcttccttcctgttcttcctgtgcttcctttcagtccttccttctacatatggggcccatcgcattcccactgactcanatgctgaggggccagactgaagggacagtggccattgcatcaagtcagagaacggatctgacccatctagtagaagcttattgttttggcagaagcacaagctcttagaggtgcagctgcagggtgtgacctattggggaca

SEQ ID NO: 1079 - DNA, 422 bp, Homo sapiens
ccgcggtggcggccgcccgggcaggtacacaaatcaaaggaataccatatttagcaccataggtgactaattaggcaaatgagcaagttttaagagtctggcccaatttttaaagtgtgtgtgtgtatcacaatctctctaatgctatatgtagtctaggcaatctggcaacagattcctaactattgttaggaaaatgcaagtatgatcctgttattgctactgctttcaacccagaggtaatgaggaaaagtccaagttccttaacatagacttcataggcctgcatgatttaggactggttatcaccaccacctcagagaaactcctgacctttaatcaaaatgtgccttgtggtaaactacttttcatttaaggccatgattgcgatttataattccctatcttgtgataaatgtcca

SEQ ID NO: 1080 - DNA, 409 bp, Homo sapiens
  misc_feature 348: n = A,T,C or G
tatagggcgaattgtagctccccgcggtggcggccgcccgggcaggtacgcggggaaaaagggtggggagtgccctttcttgaaggaatcccttaagtgcacgtctcccgttttcttttcacatcaatgcagagtccctctgtgaatttacaacacccaacacccatgagtttcagtccttaagaaggaaaattgagcaagtatttaattggttggacattgcataaaagaggtccatatccaggctaactctagaaattttattctcaaacttagttggcctctttttcttctgtcagaggaccattccttagtggcacctgggggaaaaatcttgggcaccccagnaaggaattcaacctggcgcttcacctggcaaaaaattaccaattgggcctaccatttggga

SEQ ID NO: 1081 - DNA, 586 bp, Homo sapiens
  misc_feature 475, 519: n = A,T,C or G
tatagggcgaattggagctccccgcggtggcggccgaggtactaaccttagctagtaagtaggaaggcttggaatcgaccccagctcttctggcttcaaagctcctatacatggtgccaggacatataatccagtcctcctatcttcccacccagtggctctttgctgttataatgtccatcatccctaccctgtctttccttctccaccttctacttaggctggattcagtcctaattatttaccaagcaacagtgatgatgaagctaataatcatcatacatgtttgtgtgtagcctagttcaacctttaattactgctctctccccagcacctagaatagtgcccagcccattattgggctgataaatatttgttgaataaatgaatacatgaatatattcgtatgcctttgcagacccctcttctccccagtaggccttactcagaacaagaggagcggtagctaaattangggaaggaatgccaagggctgaaaatctctgggttggcaattgnaatcctgtggacattgggtaatacccgaggatgccaaaatttccccaaaacaagcagaaaattttcc

SEQ ID NO: 1082 - DNA, 380 bp, Homo sapiens
  misc_feature 370: n = A,T,C or G
aggtacagttttgtaagtaagatgattgaaagatctactgagtgccgtggagtcacagagaggaacaactaccctcaggctatggagttcagtgaaggctgcctaaagagaggatgagttgtcagctgagacttacagaatgaaagaaatgtcctagttgtttagcttgactgtaaacaaatggggcttattacaggattctgtatgcatttttaagtctgacgtatttttcctcaaaagatgaggatggtaaggatgatatgggggggaagggcactaagcagaaggttccttattcttcttactgccctgtttctcccctgcttgtcttatttataacctcttgtttaatgacaagaatttctatagnaacaaattat

SEQ ID NO: 1083 - DNA, 332 bp, Homo sapiens
  misc_feature 105, 107, 113, 114, 175, 263, 276, 277, 283: n = A,T,C or G
gattctgctttgctgcctgatttcaaaagagttgccctatactggctttcagtcacagcttgatgtaaccactgcttgtttgcatgcatccccaacaattttcanantgggcnnctttttttttctttcttcaagttaaggaagcaaaaaagaaatcagggagcatttttatatngataaaagatttatataaggccagctagaatcaagccaaatgaaattcagctggaagggatggtaaaaaggctcacagaacttgtggntgccatagaagtnngtgttntttaaattaaagagggtttcagctagcagccggcaactctgactttgca

SEQ ID NO: 1084 - DNA, 409 bp, Homo sapiens
  misc_feature 403: n = A,T,C or G
ctatagggcgaattggagctccccgcggtggcggccgaggtactattgatgtttttttcagtatttcagtcaacctttctttctttccttctctccttctctctctctctctctccagcctgggcaacacagcaagactctgtctcaaaaagaaaagaatttccatcccctaaaatgtttccttgtgccctttgcagatgatctgtgcccacacgctatagtttgataccacctgtagtgaacacagcaatatgtgttcgcaaaatgaaaagggtgcaacatgtaaacaaaatggagaaaaggccaaaaagtcagtcagggaatggaggacttgaggtaggaaaacttgtgtgcaggccagcaaaggacgatggcaatgaaggcagagttgaatagcgcccanaggaat

SEQ ID NO: 1085 - DNA, 426 bp, Homo sapiens
  misc_feature 344, 353, 405: n = A,T,C or G
atcactacttagggcgaattggagctccccgcggtggcggccgaggtacaaatttgatcattttattatatctgaaacagactaaaggcaggttgactgtgaggggtggcaggaagcttttgggtgatagatggtgagtggtctgtagtgctggttattccatatagacttttgtcaaagctcatggaagtgtttgtttaaaatgggtaaatttattacatatgttatacttcactagtgaaatctttaaaaactatgctggtggcttcctgtcatcttctgaataaaccctgattcttctttttcaaggtaaacaagaacttctggtgtgccttccacctttnccatacctncccccatcctcacctctaacctctccacttcaaattgccatctgcacctcanttgcgagctgccccctactcg

SEQ ID NO: 1086 - DNA, 464 bp, Homo sapiens
  misc_feature 1, 14, 66, 294, 432: n = A,T,C or G
nggcggccgaggtnctgcctgtccttctattcacagcacatgtggcagcaaaccccatattacagngatacatccctgcatcccttataagaatatatataagctttgcttcctcattgaagcaacaagacatggtttctcactcgtccttatgttcctcatagctcatattatgctactgtgtttttagtaggaatggttgcatatggtcaaatgtatgtctgtgtgttcttatgtatgcatatatatttggatggctggcggatggctggctgggtgagtgcactgctcagngatgcttctccaaagcagtttggaatatggtataactcaagcttttgttttctgaaaattttgggctctctcttggcattttctggccaaatttcctcaacctcttttttttctcttcttccccccttcttcttcttnaaaaataataaataaacccccttttaacccct

SEQ ID NO: 1087 - DNA, 449 bp, Homo sapiens
  misc_feature 7, 402: n = A,T,C or G
acgactnctatagggcgaattggagctccccgcggtggcggccgaggtactgtgaggcactctttccccactctcccacaaccctcagcttaacacaactgtggtgattgctttgtccgttttcccatgaggaccctgagatttcaacaaggttcagtaactcacacatcgacacttccagggagctgtgttgccaggaactggcccaggtctttccctcctgggcccatcttgtccttaatctctgctgacattgatgggtttagttaccttgtcgtgtttcttcagtgttttatgccatacagtctcccttgagtagatgctctgtataggggggatatcacagccttcctggtgaggaactggggtttaagtccagcagggatgccctggggccttagntggccacttgggaagtttgttggggtgggcccttttgaagccccaag

SEQ ID NO: 1088 - DNA, 392 bp, Homo sapiens
  misc_feature 17, 45, 338: n = A,T,C or G
ggccgcccgggcaggtnctgttcattcaatttttctgaatatttnaaaaattttaacataaaatcttgagaaaaagtaaactgtagatgctaatagcatacaaagtgcagtcagtgtggagaacagaagagaaagatgaaatttccaatggaagagattcagcaggtttgtggaggagatgggattgagcagaaacttaacagatttgggccttttaggtggaggagacaatataggaaaggcacaaacctggggaaatgcacaatgtatgctgaccaagaagtggtctggccgggtagagtaaggctggaagagactctgggagagggaacatgaanaggtcccaggggctctgaaccaggggcaacccaacaggaaaagggaagggacag

SEQ ID NO: 1089 - DNA, 391 bp, Homo sapiens
  misc_feature 352: n = A,T,C or G
ccgcggtggcggccgaggtacacattaatccaatacagacaccaaaaaactcatctggtctgagtctacttccatctccggaagcacaggtggctgaccttaaatgggaccagctgtcactaggatgtttttgtgtcgaacccagcaacagaattagagagatgccagagttaacttgcactgaggatactttccagccaggtgtctggctggaaagtcacagagctacgcatctagcaagaatcaaagcctggcctgtgagaaccacgcacagttgtggactcaggtcagggacacttgcatgatggacaagggctttctgaattccttgaattcaccagggaattatgtncttagtccacctttcccacacaccagcaagggggagggg

SEQ ID NO: 1090 - DNA, 376 bp, Homo sapiens
ccgcggtggcggccgaggtacacccaagatactcaataaatgcttctcaggtggatgaagataaagcctctatcttttccacctctgcatactcagcatatagtaggagctcaataaaaagctggtgggaaaaaaaaataaaaaggaagacatgtaataagaatgacacgtattggccaggcgtgatggcgcacgcctgtaatcccagcacttttggaggccgagacgggcagatcacttgaggtcaggagttccagaccagtctggccaacatcgtgaaaccccatctctactaaaaatacaaaaattagacaggccgtggtggtgggtgcctgtaatctcagcttactcgggaggccggaggcaggaagaattg

SEQ ID NO: 1091 - DNA, 443 bp, Homo sapiens
  misc_feature 16, 45, 84, 123, 250, 291, 364, 383, 390, 401, 402, 417,424, 428: n = A,T,C or G
gccgaggtacgcggtntgtttgttcactgtcatccactgagtttnttgcctcatgttctgctgagcacattccctgtgtgattncttcttattctcaaaactgcatttggaataccttgttgntttaaagaggagggaacggaagcattgccatttgctcaagatctcacggctagtggggtaagagagcccactccagcaccaccactgcgtgtttgcattttcacagacatttggaggtgggatgganaatggatctgaggagacaagactggaggttggaaggaacangcatatttaaagttcttttctggtggaaaactcagaaatttgagttctgtgggaagcaccttcgagggaccanaaacatgttttggatgggnggagccncccttttcttnntaccgactttaacanggacaancaangatggggggaaattc

SEQ ID NO: 1092 - DNA, 414 bp, Homo sapiens
  misc_feature 224, 230, 315, 350, 388: n = A,T,C or G
ccgcggtggcggccgcccgggcaggtacaagaaaaaatcaaacaatcacatcaaaaagtgggcgaaggatatgaacagacacttatcaaaagaagacatttatgcagccaacagacacatgaaaaaatgttcatcatcactggtcatcagagaaatgccaattaaaacccccattcctggaggtcttgccaaaaaccacctgggctttccgggcaatgtgctanagcttntgggaagcagtcgtggccctttggagattccacggcttcggatccctacttgcaggatgctccacttgtgtcttgctggcctctnggcgttttgcttgagggggtaaacctccggaaatnggcttagaaaaccaaggaaacacttgagatggcccaantccgtgccccaaggccattcccgcac

SEQ ID NO: 1093 - DNA, 330 bp, Homo sapiens
  misc_feature 309, 316: n = A,T,C or G
ccgcggtggcggccgcccgggcaggtacgcgggggccgttagctgtgtctcgatgcaaaagagaatttaaatttaaattctttttatttaaataaagatcattctattcttacattttcttttattagtcaatctgttcaaatgactgactttttattttattagtcaaatttttaaaaaatcttccatttcaaaatatttgtctcctaaagcttatagaaaaaggcaggccaggcatagtagctcatgcctataatcccagcacttttgggagcccaaggtaggaagggattactttaagccccaagnaatttcnaagacccagcccta

SEQ ID NO: 1094 - DNA, 442 bp, Homo sapiens
  misc_feature 424: n = A,T,C or G
tacttagggcgaattggagctccccgcggtggcggccgcccgggcaggtacaccaattttgtttattcattcattcgtcggtgggatgcctgggttactcctaggccattttaaagtaggtcttcattattctcttagaaatatcttatttttctttaaggcctttatcacagattataattctaatatcaaagttgtttcatatctcttttgttcaatattttgtttagtctctatctctcatcacactctcaacaaccccataagctccctgaggggaagggcatgtctgctttgctcctcactgtgtttactgccagcacctggcaaccgtagtggggtatttaataagtaattgttgaatcactgaatggaaaggaaaatcacctagggccacctggaaggccccttgtcttttagagtncacctgtggacccatggt

SEQ ID NO: 1095 - DNA, 401 bp, Homo sapiens
  misc_feature 17, 382: n = A,T,C or G
ccgcggtggcggccgangtacgttcatctacctactttgcacttggatggaagtcctagattgggtcttaaaaggagggaacattctagaacccaccaacccttcctgatactgtcacaagatttttttcccttaattcttttaaaatcagggccacatttcaactccctgcccgctgccatttgatgatatttttgtttctctttaggtatcgtcctattttctttttctttaccactgacagcggcttatttcatatgaataatatattaaatacatatgcatttaaaatattgttttgatttgtttgcgaattgtttctcttaaagggtctatctggggaaatgagtaatttttcattatcctgttcttgcagggaagnaatttttaaaatcgttttc

SEQ ID NO: 1096 - DNA, 409 bp, Homo sapiens
  misc_feature 181, 403: n = A,T,C or G
ttagggcgattggagctccccgcggtggcggccgcccgggcaggtacaggggacaaacagaagaggagacatatgtatactctcaatgtgtttatatgcctttgtgagacatcgagtcatcactgtgaagtagctagaataacagatatgaatgcataaatatggggaggggagggtagcnaaaggggaaagtttttgagaagggtgggtggtgatgaagaaaggctgaagtgttgccttgtaaaatggagacatattctcgggaagctaatattctaataaagcagaaaaaaagagcagcaatctaaaggtcccatccttgccttgttaggaaagctatccccatatcagctaagaacacaccaggcaaccagtttccactcaatgcaatctggaaaatcancattat

SEQ ID NO: 1097 - DNA, 431 bp, Homo sapiens
  misc_feature 365, 408: n = A,T,C or G
aattggagctccccgcggtggcggccgaggtactaaaaattctatttaaaaaagatactgtgatattagtatcttaaacagccattatgtatcaaatatctgctattcacagacccctgacaaattattatttgtttagtcactgtaacaatgaaataacaccgaagcctgtcctgttttcagtatgctactttgcttctatatgcacataaagtgtattgaatatttgtccagacaaatgctataacctgtaacaaattaatataaaccagagaattgtatttatttgtatgaactagggctgtttctttgagtttactgggggaaagaacctgagtttcaatcagatacagatttataatttnatgtaagagacacttggatcttggactagcatcccttctcagncgtgaagccttcttcattctgtg

SEQ ID NO: 1098 - DNA, 905 bp, Homo sapiens
  misc_feature 25, 30, 49, 55, 57, 59, 65, 75, 83, 111, 127, 148, 154, 168,172, 176, 178, 186, 188, 192, 194, 208, 227, 232, 243, 255,257, 263, 287, 310, 343, 350, 388, 401, 405, 407, 409, 415,431, 434, 439, 447, 456, 464, 470, 484, 488, 509: n = A,T,C or G
  misc_feature 512, 515, 535, 540, 550, 556, 567, 571, 573, 580, 592, 601,610, 611, 638, 643, 646, 651, 654, 660, 668, 673, 707, 720,724, 740, 764, 790, 802, 808, 813, 825, 837, 851, 864, 869: n = A,T,C or G
acttattagggggaccgcaaatctnggganagtcctacccaaccccggnccgggntngngaccgngtcaccgtcncaccgggngtccagggggttaccgaaaatacctttnggggccttcaaacctnggccaaaaactccttcttccncctacnccggggggttttcnaaangatngnaatattcntncggntngaccccttcaaagnccgccttcattttgaaagnttagnccttgtggggnaattttaaccangnggccgnccgattggctccacattggccggntccccgtggccttaaaatttttntttcggtcaatttttttattaaggttaagaaangattggngggggggttttcttttaaaccccaaattgtttttgggncccccaaggggcncttngnantccttnaaaaaaaactttcccnttngaaanccctttcnaattggttnggggtacncaaccncccaaacccttttngggncccctttcccccaaaaaaagnatnggnccttgggggggaaattttanccaanggggggccgnttttgnaagggccaccnaacncnaaacggncccttccaaagncactttaancaataaagnnctaaaaattttttttttttttaaaaanaatanaanctttnggnaaccancccccttnaattnttaaccctttggaaattaaaaaaaaaaaattttncctttccttgggntctnttaaaaaaaaaaaatntcccccttaaatttttttaaaccntttaaattttttttttaaaaaaaagntaaattaaaaanggtttnaattnttaaagtttttnttctcttttttnaaaaaaaatttaanccaaaaaattaanaattnttcctttggtttattaaatattgggaattaaaaaaa

SEQ ID NO: 1099 - DNA, 382 bp, Homo sapiens
ccgcggtggcggccgcccgggcaggtactttcatcctccaatggcctcccattacatatggaataaaaccccaaacacttaccattgcctaaaaagccctacataatttgaaccatagctgcctctacgagatcattttctctcactcttgctttcttataccagtgcctcacaacttccctgcctccttgctgccctttattattgtggtaagaacacttgagatctaccctcttcacaaaattgtaaatgcacaatacagtattgttaactataggcatgatgttgcacagaagatctctacaacttattcatcttgcataactgaaactttattccttaaataggctaagcaaatgcccgtgtcatggcctttgccctt

SEQ ID NO: 1100 - DNA, 385 bp, Homo sapiens
  misc_feature 159, 335: n = A,T,C or G
ccgcggtggcggccgaggtacagtagtgcactcttggctcactgtagcctcgacctccggggctcaagtgatcctcctgccttagccccacaagtagtgggactataggcacacagcaccatgcccatctaagtttttgtattttatgtagaagacaanggtttaaccatgttgcccaggctgatcttgagctcctgagctcaagtgatctgcccaccttggactcccaaaatgctgggattataggcgtaaaccaccatgcctggccttaaatcaactttagagtcaacattctcttatcactgggagccttctgggaggaaactccattcacngtgggtgcctctcttttccttggatgtggttggtgcccaaataggcttgg

SEQ ID NO: 1101 - DNA, 339 bp, Homo sapiens
  misc_feature 158: n = A,T,C or G
attggagctccccgcggtggcggccgaggtacacgaccttgaagggtcatgaacagctcatgagctgagtctgacaaattctgccaagtaacaagctaagttacaggcaagctacccaccctcttcaaggaccagtttcctagtttctataatggggnaacacctaccttataaatttgtgaaagaattaaatcatataatcatgtctgcctcgaactgggtggctcgtcaatgctctgctctgttccctcctcttccctctcctacatcaagcaagaacgtccgcacagacttgacctgggcacctcattattacaatgcaccctttgacatgatctt

SEQ ID NO: 1102 - DNA, 835 bp, Homo sapiens
  misc_feature 20, 27, 48, 53, 61, 67, 71, 73, 75, 81, 97, 99, 106, 114,116, 131, 149, 153, 165, 169, 180, 186, 190, 200, 208, 238,242, 270, 274, 287, 305, 312, 330, 334, 362, 370, 386, 389,392, 418, 422, 427, 433, 450, 466, 468, 475, 485, 487: n = A,T,C or G
  misc_feature 501, 503, 524, 529, 531, 544, 560, 569, 574, 578, 585, 589,594, 596, 606, 619, 644, 661, 678, 692, 719, 728, 744, 752,773, 775, 794, 796, 821, 823: n = A,T,C or G
ttaattacgactcacttatnagtgggnccggagatttggggtaggctnccacncgccgggntggggnccgngncnccggcncccgggggggccaggngnttaccgnccgggggngncattcttctgtaagnttcgccggggggccccgncganaggttgccctcnaagnaccggcatagncccccnaatngggtaagagnccgattcnccaagggccgaaaggaccccggcacagacnttgngaaaattggccttacaagtttctccganaatngtttccaccccanaacaccatgaccttttgnttaaagnaaattttttttccaaganttgnggggaaaaaaaccttggggggggtttanttgggggnctttggttgggaaggnccnttncaaaagaaacccaacctttttggccnaggnaattnctttcnttttaaaaaaggttaanttccccttttaaaccngnttttggnccaagggttngnaaattggcctttananaaaaagattggggaccaaagnaaatncnaattttttccaanggggccactacatgtnttaaaaaanggaanctcnaaaaggnttgnccttntnttggtaaganactgggaaaccgnaaattttccccaaccaacgatattntccaaaaggaaaaattntttttcataaccgaagnaaaccaaaggtttntactaaaagggggaaacataattattngacctttgnccaaggatataaattntagtaaanaaacccgcgctagtttggaanangaaaaccaggggcaatttncnttttttgggggattatggcaattananaattttgggcct

SEQ ID NO: 1103 - DNA, 510 bp, Homo sapiens
actcctatagggcgaattggagctccccgcggtggcggccgaggtacgtaaatcgtgccaaaaggaattggatgttgcatgccttcaatctgtttttgaattatttgtagatacaggcaacatctgttccactggacagagatatactacaagtgctaataactttggaaagacctgactttaaaagtttgtgcttgggagttaaatatttttaaacatatacattttgaagttctcttctacataaacttaaaaattttaaattgcaaaataataaagaaaatatttcacaaagtaaaccaaagtctgaaacttaaggaatttttttgaatctatttaattatgtgttaagtgtgcctactggcaaaatatattattgcagctccactctgttaaacatagatggggaggggagaagaagaactaagagacctatctgtaactatgtaaaaagaaattcatttggggcaaaagctgtgtaagtcttgtgaggagatgaatataagtaaa

SEQ ID NO: 1104 - DNA, 451 bp, Homo sapiens
  misc_feature 206, 328, 393: n = A,T,C or G
ggagctccccgcggtggcggccgcccgggcaggtactagagccagtaggtatctcagcaatcagaagactgtagatcctcaatatgtgttaaaatgagaataatgtagctcccaagaaaacataagatctaaaatgtaggctcattggccatattaaatttagaatattcagtggcactttgaaattagcccaaaatccttctctnggccctaagatatcaaaattattttgttacatggggttatattcttctctggttggaattccatgactgaaaagattagatggcaaatgccagcgtatagcaaacatcatctgttgccaaancataactgattcatttgtaactatgggcttcaaagaggaaggcaggtgaaggctctcattcattngaaggcaagctctttgtgcctttttttcttttaaaatctgaattgcttacctgttcct

SEQ ID NO: 1105 - DNA, 287 bp, Homo sapiens
  misc_feature 266, 274, 279: n = A,T,C or G
ccgggcaggtacagcacacctgcagtaaggaggcagaagtgggcacaggagtgtgctgcctgatgaatgctcacttgcacataagctcatgcaaccagtgcccagatggaaacggggagcatgctgtctcccacccacgacatcttatggaaacagcgtgttgcggccaccagttctcactccttcctgtgccagcattgcctgtccacggcattcattcttcccaccctgttggcccctcttggagaatctttttgatgcatatntctgatgnttttncagcctct

SEQ ID NO: 1106 - DNA, 359 bp, Homo sapiens
aggtaccaagaaaattagccagccatggtgggacacgcctgtattcccagctacccgggaggctgagaggcaggagaattgcttgaacccgggaggcggggcttgcagtgagccaagatcccaccactgcactccagcctgggtgacagtgagactctgtgtcgaaaaaaaaaaaggcaactagtcacaaataatttgttttcttctattaaaaattttaagaccattattgaaattgagagtattattctcctaatccctttaattgatcagttaagagttcctagaacaacttgatattccgattaaaatctttgggttaagtcctaccttttgaaatagggataatgttttgaaat

SEQ ID NO: 1107 - DNA, 433 bp, Homo sapiens
gactacttagggcgaattggagctccccgcggtggcggccgcccgggcaggtacatgagatgggagctcgacacattttatttggagaataaaagaaaatatgccgtcatcaaactagagcgtgttggggggcatctggtttacagaactaagtcaaggagaagaactctcaagcaatggtgacatctgccagctctgcaaagtgggccctgccttgtcacacaagtctccttgggcaaatgttttctatgtagattttagacactttcctgtgactttctcaaggtcttttggtgacacatgcagcttgaagcttttgcaaggggctggagtctaatctcttcttgcccagcttggctgcaggagaagaagggagatatgttaggacttggctttgactgaggttggtgtagcctgggggttgcaagggctg

SEQ ID NO: 1108 - DNA, 438 bp, Homo sapiens
tagggcgaattggagctccccgcggtggcggccgcccgggcaggtactttatgatattctaccaataggacagatcccatttatagtattaaaatgtgaaaaaagtatatattactagctaataaaatttctaattatttcatccctgaacggtctgagaaaagaaggaaaaattcctaatatttttatttgctcatttgcaactttactggagtttaatctttagaaaaagaaattttaatttaatatcagaatacaatgtttaatatattcaagttaagtttttgacaacttgacagtttatttttaattcatgtgtttcagagaagtttttgttacctaggcttgggcttttaacataatatcaaatttttatatatggattttatatttttttactttaggaaaatgggttatagattgcacatctagcacaaa

SEQ ID NO: 1109 - DNA, 306 bp, Homo sapiens
  misc_feature 2, 173, 195, 203, 275: n = A,T,C or G
cnccgcggtggcggccgcccgggcaggtactccagcctgacagcctgggcaacatgagtgagaccctgtctaaaaaacagaaaagtaaagaaaaaaataaaataattaattaagatggctgagtgctggctggtgttgtctcctcagcaagacagaagctccctgagggccancgcccaccctgatttattcctnctagtgtncttgggtccccagctgcctggcacaagagcttttggtccttggtgctcggtagaagtgtctggctgatgtanaggagggagcctgagttacaaatcccccctc

SEQ ID NO: 1110 - DNA, 331 bp, Homo sapiens
attttacattcccatcaacaatgcacagagactccaatttctgcacatcattaccaacactaaactttctgttttcctgatagtagccgtcctaatgtttgtggtttataatttgattaagatagcatatctgaatattttcttattttttccatctttgaaaattaaaatagactgaatttttgttacattgtctttaataactaagttgcttgcctttttactaagcagattttttttgaagggatttatgtgatagtctctgtctttttatcttgctggaagtttgatccactcaactgacagctttatttttctttcctcaaaagct

SEQ ID NO: 1111 - DNA, 409 bp, Homo sapiens
  misc_feature 65: n = A,T,C or G
attttagctccccgcggtggcggccgcccgggcaggtacaaaaattagctgggcatagtggcacntgcctgtagtcccagctactcaggaggccaaaatgggaggatcacatgagcccagggaggtcgaggctgcagtgagctgagattgcaccactgcactccagtctgggtgacagagtgagaccctgtctcaataaagaaataaagaaatagaagacaaaatcgtggtgtaattattttgtccctccctatgcaatttacctcttctcatatactgtatattatttctcataggagtctaaatcagaggtcatatctctgctctttcaaaattcaaaacatcttgaaaacagccagatttccttctcaaaaagttacatgatttggccaggatgtgggtgactcat

SEQ ID NO: 1112 - DNA, 433 bp, Homo sapiens
atagggcgaattggagctcaccgcggtggcggccgaggtacctacctgcggtatctgatcagtttctgcctagtcagatgtgccctgttgctgagtctgcttgggtggggagcataggaaaatggggcaagtgcttcatgagggagctgttctcagccgccccctctcccaactccccagctctctctccttgttctgtctcctgtttctgggctctaatcctggtcaggcccaatgccccttgcctgtgatgctgggtctgcagttttgctcgccgtcctcgctttgccttcttgcccgccacttccagcattcctcctctgctcagcttctgagctggtgtcaggtttctacctgcctggccactgagcccacctgaagatgtctggccaattccttttagcctctgccttctcaccatgccagggatgct

SEQ ID NO: 1113 - DNA, 399 bp, Homo sapiens
  misc_feature 34, 35, 48, 50: n = A,T,C or G
gcggccgcccgggcaggtactgcatggacagganntgcttagatctgntntgaggaaatccggagatgaatgttttgtttacctcatgggattgtggcattgttagccactcaatccaaccagattataatgtattaagaatttgaaacatcagccattgtggtttcacatacacagatgtatattattttgttagccaggtaatgacagtcattgtcaagtggaagatctaatcagactgaatattcattcatgccttgctttgtcaatagggaaaaaaatttcaaggacaatcggatattctctcatggacttgaacctttctttccatctacctgaaggccgaggaaaggaggaggggaggggaggcttggacagcacatcctcccccgattagat

SEQ ID NO: 1114 - DNA, 425 bp, Homo sapiens
  misc_feature 89, 223, 263, 298, 299, 374, 381, 382, 383: n = A,T,C or G
tacttagggcgaattggagctccccgcggtggcggccgcccgggcaggtactttttttttttttttttttttttttgtatttttagtanagatggggtttcatcatgtcagccaggttggtcttgaactcctgacctcaggtgatccatccgccttggcctcccacagtgctggcattacgggtgtgagccaccgtgcctggactgataagcacaaattttanacagtggtcatccctgtgggagggggacaagaggataagngatggacacccaaaggagtgaaaggtgtggtgagnnatagactaggtagttgagggtccacacatatccactggatcttggagttaaaactttaaatactttatgcatatncctttannnttcaacctaaaaaaaaaacaaaaccaaaaaaccaaaaaagga

SEQ ID NO: 1115 - DNA, 357 bp, Homo sapiens
  misc_feature 25, 178, 179, 189, 191, 193, 194, 207, 221, 223, 225, 238,240, 243, 244, 249, 259, 260, 265, 288, 296, 308, 315, 316,317, 323, 335, 341, 349: n = A,T,C or G
ctactatagggcgaattggagctcnccgcggtggcggccgcccgggcaggtaccagctagctggaaaagcacctacaatgatctagtggatttggcatggatatggcctacagatctgtagtggggacggagaaagggacgtggtgtcagtgtgagctgtgtggaagctggggctctnnacttgctcangnanntctaaccatactngctatggtgccctnangngatagaagagcgntntannttttnttataaaaannatatnttcttactgtcattgcaaagaantagacacntattttcattcntcacttnnnattgangacagcatactnctaaangttgtaantttgatta

SEQ ID NO: 1116 - DNA, 358 bp, Homo sapiens
  misc_feature 154, 156, 168, 240, 270, 294, 309, 333: n = A,T,C or G
ccgcggtggcggccgaggtacttttttttttttttttttttttttttttttattttttttctggagtaaccagtgtgacataagatctgtttgtgttcccccattttacaaaagaaaatttaagtctgcaacttcccctaggcatttgcagcananagtggatttgtnaacatgcaaagctgctgatctgcccctgcatgctgctccctgccctaagtgtgaggaggatgaactgccctnttttcacctgcacctccctggatggaacanagcatctccataatactttatgcngaagtatcacttttntttaacaccagaaaccccaggccnccaactttaaattttaaataaaggg

SEQ ID NO: 1117 - DNA, 420 bp, Homo sapiens
  misc_feature 174, 375, 397: n = A,T,C or G
cactacttagggcgaattggagctccccgcggtggcggccgcccgggcaggtacagcattattagctggggctttcactgaaaaccccagggtctctttctattgtccccatatggttggagtcacaagagtgggagagatggccaagctctctgcagaggatcctggcagcangcctgaaccctcttgctacttccatcaaaggaaaaaaaaaatcaaatatttacccccacgagcttataatattacagagaactccaccatcctgccctgcaaaatatcctgggatttgactaatactagagctgcttttctagtccttgagtgactaggaagggaagaaccaaaagcttgactcccctgcaagcagtgagntctctggcttttgggtttgcancagggaaaccattaggggttcca

SEQ ID NO: 1118 - DNA, 321 bp, Homo sapiens
  misc_feature 186, 191, 192, 249, 250, 261, 277, 288, 292, 300: n = A,T,C or G
gctcctatagggcgaattggagctccccgcggtggcggccgaggtacctgagaataatccatgacattttttcctccctagtccccatagccagtccatcaacacatcctattggttattacttaaataaattagatatattaaatatctataaaaatgtatctttgaatttttctactacatttntgacnngcccccatcctacttcaaacctgggtcacctctcccatggtctatgaaggcaagccnntaacccatctntctatttttgcattgntacctgctttncatntaactctnatgccacattccctatccttt

SEQ ID NO: 1119 - DNA, 424 bp, Homo sapiens
  misc_feature 206: n = A,T,C or G
actacttagggcgaattggagctccccgcggtggcggccgcccgggcaggtacttctctgcagccttaaactcctgggctcaagcaatcctcccaccttagccctccaaatagctgggactacggacatgcaccattaaattaaaaaaaatatatatatatatacacacacacacacacacacatagtggatggtgggtctcactntgttgcccaggctggtctcaaatccttggccttaagctatcctcccaccttggcctcccaaagtgctgggattacaggtgtgagccactgtgcctggcctgataaggtgatatttgagcagagacatttaaaaagtgaagagaagcagccatgtggtttatctacagtccaatatttcccagcacaaggggacagaagggggggaacatacttggtgt

SEQ ID NO: 1120 - DNA, 325 bp, Homo sapiens
  misc_feature 22, 36, 48, 182, 215, 267, 290: n = A,T,C or G
gcggccgcccgggcaggtactnggattataggcgtnagccaccgcgtntttcctctaacgagatatttctaaaggttaggccttcagtcaagaattttaaagctggatcttagaggttatctaaactaacctctccatttcatagatagggaaagtgagtccccagaaaaagcactggtttnggacaaagttcagaaagctaaacagtgactgtnggatgtatgattctgtctcttaactcctaatcccaaatgtccttctcactanataaggctgtgccttctacattncgaaggctcaaaccccatggatggatggagggaag

SEQ ID NO: 1121 - DNA, 427 bp, Homo sapiens
  misc_feature 304: n = A,T,C or G
cactacttagggcgaattggagctccccgcggtggcggccgcccgggcaggtaccgggccttgtgccaaacaccttagatgggttatctctgaacttcacatcagtcatatgaggtgggtaatatcattatctacattttacaagtatggaaactggggattactgaggttatttgcccaaggtaacacagatggtagattctggagccagagttggaaactgggtagtttgctccagacccaatgatctagcatcctagatgtggtccattagggctctctcttttcatccgtttgtaaaagnagaagttttcactttcttctcaaaccattgagaaacaacttgggaactggggaagtgccaaaggggaggaattctaaaagaaaagccgttttaaaaagggaggaaaaggaacaaggaaaggca

SEQ ID NO: 1122 - DNA, 420 bp, Homo sapiens
ccgcggtggcggccgcccgggcaggtacacaattagtaaaattcaacctaaaaaaaactgtcgattttattgtatataaactatacctcaataaaaatagatagggtaaaaaaaatatgacactagaatttcattcccatccctttggccatgttcaggcagaggttgggcagtgtatcaatacacaaccataacgctaagagatgatctcctcaggtgcattgagggtgggaaagggcaaatgtgagaactaatggtaaccagcccatgtgccctagaacaaaaatggctcctgatccatgtttgatacgtgtcccataggtggctggccctctgctgcgatgcacaagcggcactatcggcttcgtgactcaaccgcaaatgagaggagaacacctaagtcaatgaacccagggaaag

SEQ ID NO: 1123 - DNA, 376 bp, Homo sapiens
  misc_feature 269, 319, 342, 361: n = A,T,C or G
ccgggcaggtactgctgttagtggctgctagtaggttattcagccgacctcttctgattctgctttgctgcctgatttcaaaagagttgccctatactggctttcagtcacagcttgtaaccactgcttgtttgcatgcatccccatcattttcatatgggctctttttttttttcttcttcaagttaggaagcaaaagaatcaggagcatttttatatgataaaagatttatataaggccagctagaatcaagccaaatgaaattcanctggaggggatggtaaaaaggctcacagaacttgtggctgccagaagaantcagtgtttctttaaattaaagnagggtttccagcttagcancggcaactctgactt

SEQ ID NO: 1124 - DNA, 316 bp, Homo sapiens
aggtacctacctgcggtatctgatcagtttctgcctagtcagatgtgccctgttgctgagtctgcttgggtggggagcataggaaaatggggcaagtgcttcatgagggagctgttctcagccgccccctctcccaactccccagctctctctccttgttctgtctcctgtttctgggctctaatcctggtcaggcccaatgccccttgcctgtgatgctgggtctgcagttttgctcgccgtcctcgctttgccttcttgcccgccacttccagcattcctcctctgctcagcttctgagctggtgtcaaggttt

SEQ ID NO: 1125 - DNA, 465 bp, Homo sapiens
  misc_feature 275, 437, 465: n = A,T,C or G
attggagctccccgcggtggcggccgaggtacacttctaaataaaccctgggtcaaagaaattaaaaagaaaatgagaaaatattttaaactgaattataatgaaaacatagcatgtcagtatttgtgggatatacataaagcagtatctagaaacttacggctttgtagcttaaatgtttatattccataagaagaaacattcacaaaatccctatcaaaacattggcaaaaattaaatccactaacatatgtaaaaggataatatattatggncaagtggcatttatccctggaatgcaaggctggtttatatttgaaaaaatcagttcatataattcttcatattaacagaatgaaggtgaaaaaccgtatgattatctcagggaccacaggaaaaagcatttgacaagatccaatgtgataaaaaaaaatctnagcaaactaggactagagggggatcttn

SEQ ID NO: 1126 - DNA, 453 bp, Homo sapiens
  misc_feature 150, 441: n = A,T,C or G
ttttttttttttttttttttaatagagacagggtttcaccatgttagccaggatggtctggatctcctctgacctcatgatccacccacctcagcctcccaaagtgctgggattacaggcgtgagccccgcgcctggccgggtcaggctntttctaatctgtttaaaaccatatcacccagaaggtattcagtatatacttatttaaatgaattgaaagtcatatgagcagcatggacttactactttaaaaaccacattattagaaacctaacaccttggaagctctgcatattctgaatgaagaatatactaaaccactcagagggaaatagttattaaccattttaccacagacgactaaacaactaccatggcccttcccttgtttcagctggtctgggtcttaaaaagactttggaaaacccaatctaccctcctntagcagcaaatc

SEQ ID NO: 1127 - DNA, 374 bp, Homo sapiens
  misc_feature 6: n = A,T,C or G
ttagtnattgctcagtggttgaacatttaggttgcctctagatttttctatttattagaaacattcagggtttctagatttttcagttttataaggaacattccagtgaacactttcgtggaagacttttgcaggaatttcaacacctaattttgttacaaccctaactttctccatttgttttgatgagtagtaaatttttattttgaaaaagtcttaaggcaaaataaatgtaatgcacttatatttcaaaaatataattgccatatactacctataaaataggagtatttcaggaaatcaaacaaaaacaatgatttttctcaagcataaagaactatgcctggtatgacctgctccttttgaattattaa

SEQ ID NO: 1128 - DNA, 389 bp, Homo sapiens
  misc_feature 29, 175, 290, 312, 377: n = A,T,C or G
aggtacttttttttttttttttttttttncgcaataattacttttattgtatactgcacaatataaacagcatgttgcaaagaaatatatatatttgtgtgctttgtgtatgatataaatccatttctgcaaaataaaatacaaaccgatttatctaacaaaatatgaaactcantgaaaaaacaaatcccaaaataatactatttatgtaaaatatagaagctaaacaataaattaataatacatacataaatagcaaaagagtaaagcatagtaaaaaataataagcncccaagtaaagaaaagaaatancgtaaaatttgggatggagtgatttctatgacggggaatagaaaagagatgtggccacccatganaatattcaggct

SEQ ID NO: 1129 - DNA, 411 bp, Homo sapiens
  misc_feature 327, 377, 378, 399: n = A,T,C or G
cttagggcgaattggagctccccgcggtggcggccgaggtacatttgttgggggcgtgacattaacatataaccacttagagtggacatgcagttagagaaaagtcaatgagctggaaccaagctgggaattccaacatgtagaagttaaacacaagaggaggagccagcaaaggaaacagaaaccagagctttccagcaggtggggggcatttggaagaaaacgatgccatagaagccaagatgaaatagacatcaaggagaaggaagtagtcaattgttttgaatgctatgaagaaagataagaataggtaaatagttccttatntttgataaccagaggtcactagtgatctttgatgaggggggtttcaatannaatggtggggatttattattncctccctgggat

SEQ ID NO: 1130 - DNA, 414 bp, Homo sapiens
ccgcggtggcggccgaggtacatgagatgggagctcgacacattttatttggagaataaaagaaaatatgccgtcatcaaactagagcgtgttgaggggcatctggtttacagaactaagtcaaggagaagaactctcaagcaatggtgacatctgccagctctgccaaagtggggccctgccttgtcacacaagtctccttgggcaaatgttttctatgtagattttagacactttcctgtgactttctcaaggtcttttggtgacacgtgcagcttgaagcttttgcaaggggcttggagtctaatctcttcttgcccagcttggctgcaggagaagaagggagatatgttaaggacttggctttgactgaggccggtgtaacctgggggtttgcaagggggcctgttgcca

SEQ ID NO: 1131 - DNA, 383 bp, Homo sapiens
  misc_feature 354: n = A,T,C or G
ccgcggtggcggccgcccgggcaggtacttttttgtctgttagtgtttctctgtgttttcctattgtgctgatgtgagcttgcactgcttttgtaattaaggataaattttatttatgcatttatgtatttatgtatgtatgtatttaaaaaaattaaaggttgtatataaaaatagttattaagtggagacacttaagaataatacacactcctctaaataaaacggaaaagcctacttgctgcttgcttgttgcaggtagaattgacccgatcccctgcagaaatccctgccccctcctctctgtcccaggaatgccacgctgcccttcacgctggcatgctgcctgtcggnatctgtgctattccttagtgacctgtaag

SEQ ID NO: 1132 - DNA, 333 bp, Homo sapiens
  misc_feature 139, 221, 230: n = A,T,C or G
cactacttagggcaattggagctccccgcggtggcggccgaggtacatgcatccatggctcacctggggtcctacctgttacacagtaatgactcaagcagccaaggtcatggggggctgtagaggggggctgcactanctgctcaagttgatgttacagaacctgctcccgtctgagatccggactccacagccctgcatgagggccgctcctccatctnagaatcctnaacctggtagaaaccggtcaggtggtctcctaaccaaggctaaggcaggctcagtccctgagaaacctgtggggtattctttgagtccttggcaccacttaac

SEQ ID NO: 1133 - DNA, 400 bp, Homo sapiens
  misc_feature 167: n = A,T,C or G
ccgcggtggcggccgaggtacattcactctgtgttttattaacgttaaacattaacaacgtcaccataaaaagcatttgctagcataaatgctgatctaccataggaaaaaatattcacttttctttgttattggccaaaccactttaaactatatgttaaaaaatngccttttcaaaggttaactttgtgaaaaaacatttgcaggtttcccattgcagaaggacatagcaatccaataaggactgagatatatactaaaatggtcatttcttgggggctactgagctacagatcccagaggagctcaggcttaaagtcatgaaatggcttccgtggaaccaggcctcaattttatcctgattaaatttactatatccttgagaacacaggtggactga

SEQ ID NO: 1134 - DNA, 431 bp, Homo sapiens
  misc_feature 353, 409, 410, 411: n = A,T,C or G
acttagggcaattggagctccccgcggtggcggccgaggtacaccaccaggctctgagttggttaacaattcgctgagaagacagctctagaattgcttctgcctacgaagggtgaggatgggtatatataagagatttccaacctgacaaatccatttgggaaggctgaatttgcagtttgaggagggagtttgttcaaagagcatctgcatgaacattctgctggagcagcctgtgggccgaaatccacaaggctggcactttgaggttcaacttgattctacaggctctgcggtctcatcccaaagtcacagcccacacaactggcatttcccctggtggtttggattanacaacagtccccaagctctactttggaggcaagatttaaaaaaaaaaaaaaaaaannntttggggggggtgggggggc

SEQ ID NO: 1135 - DNA, 390 bp, Homo sapiens
  misc_feature 27, 336, 373: n = A,T,C or G
cactactatagggcgaattggagctcnccgcggtggcggccgcccgggcaggtactccctttccctgactcagtcttttattgatgaaggcagggatgggatggggagagctcacctggcaaagactccacacaggtgtgcagcacaccctgatggggccagaaaatgtcactgtgagccctaggggtgaaagacacagtgatgggctgctgggcaactaccaagtgtagagatcctgagtgcccagagagttaccaaccacttcccttccctgtgcagatcagtggaggcagatacatacacaaaatgggaaggggaaagaaaaccggctttcanatctccccaccatagagactataagattatttcccanaatggccaccaaatttt

SEQ ID NO: 1136 - DNA, 333 bp, Homo sapiens
cgaggtactgggattataggcgtgagccacccgcgtctggcctctaacgagatatttctaaaggttaggccttcagtcaagaattttaaagctggatcttagaggttatctaaactaacctctccatttcatagataaggaaagtgagtcccagaaaagcactggtttggacaagttcagaaagctaaacagtgactgtggatgtatgattctgtctcttaactcctaatccaaatgtcttctcactagataaggctgtgccttctacatttgaaggctcaaaccccatggatggatggagggaaggatgggtggagggatggatggatagat

SEQ ID NO: 1137 - DNA, 753 bp, Homo sapiens
  misc_feature 9, 14, 22, 26, 32, 40, 47, 57, 67, 68, 69, 79, 86, 91, 114,120, 179, 185, 250, 281, 326, 375, 377, 379, 383, 390, 395,402, 407, 411, 460, 465, 469, 481, 487, 525, 540, 545, 550,575, 580, 582, 596, 598, 622, 638, 677, 680, 727, 732: n = A,T,C or G
gggtaccgnaaaanaaaatcanggcntacttnaagccccnactggtntaaaataatnaggaacggcnnnacccaaattngttaggngaaancagggttcccaaaaatttggggnagccancatttaaaccaaaccaaatcaggtggaattgccattaaatggaagggcttattttgaanccaaangttaaacggggggcttatttttggcccttcaagggggccctgggggggggaaaaaaaatttcaangggaaccccaaggggaaacaaggcctttttnccccttaatttaaattttcaaattttaagaacaaaaggggctttnttaaaaaagaggccccattaattcccttggacctttttggtggggccanangnaatntaaccanaaggnattggcnttggnttcnaaaaaaagggtcttaatttaaccaagggaattgggaacaaaagttgtcncccgnaaanaaaaggggtttnattttngggaagggaaaatttaaaattgggggcccttaattggnaaaaaaaaatgggcnaaaanattcnccaaggtaaaattgggttccaaggntttcngnggccccaatttaananaaggccccaattttaaaaaaaaangggggaaaaaaaaagnttttcccaaggccaagggggaaggttttggggaatgggnttnaaaattttaacccaaggcaaaattaatttgtttggaaaaaggggccnttttngttggggaatttgggggggaa

SEQ ID NO: 1138 - DNA, 431 bp, Homo sapiens
  misc_feature 5, 219, 275: n = A,T,C or G
gactnctatagggcgaattggagctccccgcggtggcggccgcccgggcaggacccagaggacacagttgaaatgaggcacaattaggaaaaactaggctgtttaatatccatattgagtagctttgcaagttactttcacaaacttccctacagaattggttctaacagaactgttcaaggccaaggatttgttttttctgggtctgggggagtcatntttataattttaatattccattagaatgccttgacgctagaaggagggtccatctnaatcacatcaataaattgatcccaacctttataaaaataagcttggatagaaaggaaaatccgaagactaaggtagtctggtagaatactagaaggagacatcttttaagaggaggacaagaaaaggcatgaaaacagagaacatggtcctacaca

SEQ ID NO: 1139 - DNA, 289 bp, Homo sapiens
  misc_feature 49, 80, 114, 129, 130, 141, 156, 159, 165, 168, 173, 180,185, 201, 212, 288: n = A,T,C or G
ggcggccgaggtactgtgttaatcactttacataaattatctcattttntcctcaagacaacccaaagaggaagtataanttttgcctgttactggcgaggacctcatgctcanagaggttaggcagcnngtttcgtgatnaacacaactttattnaangaaggngangggantgtacancccangtgagcttgcctgcanagcctatgctntgatattgctccagctaccacttttaacatttagtgttctgacttactattataatggaagccctaccctatcttnt

SEQ ID NO: 1140 - DNA, 414 bp, Homo sapiens
tacttagggcgaattggagctccccgcggtggcggccgcccgggcaggtacaagaactacaagtcctaaaacttctgtccaaaagagagtcaagaagcagctggacaaacttagggttaaggatgactttgttttgccctatcccttggctctatccttttgcttagcaagggctagcagtcaaatcttcctattgccctttctgagtagggaaacacccacatgcaataaacaatgtaaatacttcaggcatggacatttttaagttttcttcaaaaacgccttagcaaatcaatcattataatcaggcactttgaaaaacctcatttttgagtttttcctcaaatactatatttcactcaaaaatattaaggcggccaggcgtggtggcttcatggctataatcccagcact

SEQ ID NO: 1141 - DNA, 428 bp, Homo sapiens
  misc_feature 401: n = A,T,C or G
gactacttagggcgaattggagctccccgcggtggcggccgcccgggcaggtacacctttttgaggcagcagcccagagctatgaggtatgctggttgtggaaacgctgtgaagctaatgagggttgaagccgtcattaggatctaatgaacactccgtttgattcagctgagcccagctgaccaccggaagcccagtcagtatcctgtgttcacgcccgatattgcttatgtaggagaaccaaatgaatctacttctgaggtttgaattttgaaggattctctgagagaggtaaaggaatctactagaaaaggacatgggaattttagtgccaggctgacctgaatttgaatttccgttccatctcttcctggttcctacttatactgtgcataaggtanaccttcctacctaaaggttacgtcccc

SEQ ID NO: 1142 - DNA, 440 bp, Homo sapiens
  misc_feature 17: n = A,T,C or G
tagggcgaattgggagntccaccgcgggggcggccgaggtacttctctactacttttacattttagaaaatagcaactcttataagggtgagtctctgtgccatttctaaattctaaatttgagtttgctgcagtgaagaataactactaattagaaaccaaatatagtgttctatcagttactaattttcataagggacgcttaatttacattctagcaatggccaaacctactgaatacacgagtttagaagtgaaaaccttaaataagtctaggattagactgtattcctaggaagaagtcacattaaaactaactctgactccaagtctaaagatattataaacctcagaacacttattttgcaaaatatattccaaaactctaagttgtccccaagcctgattccattaaataagtgccccttcttctgactata

SEQ ID NO: 1143 - DNA, 411 bp, Homo sapiens
gctgggtcccgcactcttgattcccttgcattcaatgccttaccactctacaactgtcttctaacagagctctattccttaatcaccagtgtaatctatccaccttctgcatccctgtcactgagtagctgggtgattctgggaaaaacaaatgctcagagttgtcttcccaaaacccagctgagctcccaacacaccttccaatccctctcagtttcttcagcaatcatcataccctaataccatgaaattcactatgcacaactctttcccctaactgcagcccaagaaaagctgaaaaactcaaaatcctgttatagcttccactaacctcatctatatccacatctttccagacctctttcctgtcaggttcagaggatttttcctctgcttgctctttattctatc

SEQ ID NO: 1144 - DNA, 408 bp, Homo sapiens
ccgcggtggcggccgcccgggcaggtaccactcacacttcaaggagagatggaagaaactaagtcaagccgacaggagccatgtctttcaagcaagaaatacagctgccagagaacacaaatgcggactttatataagcgtaaagccagcagggtgtctgaggacatcaaatttcattgcttttgtctgtttactacaagatgtaaaaacagtcatttgccaccggggagatgtttcatgaattgaatgttataatttcataatcagatactatgactttaggggactaaatgaacttttcaggaagattattttttttcatcctgtgttcctagaacaggttctagttgtctttcaataagtgaatgttaattgcttaagtagctcctgttagtcctttctggccct

SEQ ID NO: 1145 - DNA, 427 bp, Homo sapiens
  misc_feature 167: n = A,T,C or G
ccgcggtggcggccgaggtacgcgggtgcttctacttattaagccatccatctacccatcctgctcacgtatgtgtcagacttttagtgcccactgcgtgtgtggctctgcactgtgttcttggggtctaacataatgtaggcaatctgaaggttactgtccagtgngggaaagccaaaaggaaatcacggtataagttttgctttctttaatagcagaaggggctacatcctactgtgggaatgcagaaaagggagtgataagctgccttcatagactgtgctttcattttttgcaaaagtaaatgtaatcaatatgaatttgtggaaagtgtagcatatattgccatgtgttatgactttgagcttattttaaaataaagatggatgccctgtttctgcctaacatggttagtcaagtgttatca

SEQ ID NO: 1146 - DNA, 439 bp, Homo sapiens
  misc_feature 339, 355, 390, 422: n = A,T,C or G
ttagggcgaattggagctccccgcggtggcggccgcccgggcaggtactgctgttagtggctgctagtaggttattcagccgacctcttctgattctgctttgctgcctgatttcaaaagagttgccctatactggctttcagtcacagcttgatgtaaccactgcttgtttgcatgcatccccatcattttcatatgggctcttttttttttcttcttcaagttaggaagcaaaagaatcaggagcatttttatatgataaaagatttatataaggccagctagaatcaagccaaatgaaattcagctggaaggggatggtaaaaaagggctcacagnaacttgtggctgccanagaagttcaggtggttccttttaaaatttaaaagnaggggtttcaagcctagccagccggccaaacntctggacttttggcatt

SEQ ID NO: 1147 - DNA, 389 bp, Homo sapiens
ccgcggtggcggccgcccgggcaggtacaaagaaagacagacccaaactcctatcacagacccaaattcctatcactctctgattaaaggaatcctttgagtaaataggatttgaaaaccaaggctatgtctactcttggaatatgtcatggattttggtgaatttaaatcatattgactcttggtccttgtcttctcaaacaagcaatccagactttttgtgcatcactgggatatatcagtgaatgttagttttaagacattgcaaattaaaacctggttttagaattagtaactaattttatgggcattagattaacctgactatctaaagcatcagttgctcaaaatattttatccttaaataaaatgctatataaagatccaca

SEQ ID NO: 1148 - DNA, 376 bp, Homo sapiens
  misc_feature 188, 337: n = A,T,C or G
actcctatagggcgaattggagctccccgcggtggcggccgaggtactgcatggacaggagatgcttagatctgaggtgaggaaatccagagatgaatgttttgtttacctcatgggattgtggcattgttagccactcaatccaaccagattataatgtattaagaatttgaaacatcagccattgnggttttcacatacacagatgtatattattttgttagccaggtaatgacagtcattgtcaagtggaagatctaatcagactgaatattcattcatgccttgctttgtcaatagggaaaaaaatttcaaggacaatcggatattctctcanatgactgaacctttttctttccatctaccctgaagggcg

SEQ ID NO: 1149 - DNA, 413 bp, Homo sapiens
actacttagggcgaattggagctccccgcggtggcggccgaggtaccgcgggggtagctgggactacaggtgcccgccaccatgcctggctaattttttatattttttagtagagacagtgtttcaccgtgttagtcaggatggtctcgatcttctgacattgtgatccacccgcctcggcctcccaaagtgctaggattacaggcgtgagtcactgcactcagtcaggttttcaggtgctggttccatggctcttcctgagccgaaaataaggaaactccatagaccttgtccactggaactcgttcccatctaccctccactctatccagggtgatggatctctgcagtaagtggaagaagttcttcatggcccccaagggttatatccatctagaacttcagcaccgtaa

SEQ ID NO: 1150 - DNA, 424 bp, Homo sapiens
  misc_feature 7: n = A,T,C or G
atcactncttagggcgaattggagctccccgcggtggcggccgaggtactttttttttttttttttttgtttgttttcaggcctatatggctgatgctcagtaagcagtgagatgagctgcaagatgagtcaggagccagctgatatcagacctttgcaggacacagaaagatctggattttatcctaaatacaaggagcgtccattaaagaattttaaacaaaaagaaaagaagggagcagacgcacacagcgagagtggaacgtgcacaaggccctcagagagagacagacatagacaaggagatgttccggtcctcctggcctgctgggtcccatgaggcctgtgtttcctttagtttttctttatgtctccattaaacttctttctctacttaagattctgttctttataaccaaaatat

SEQ ID NO: 1151 - DNA, 231 bp, Homo sapiens
  misc_feature 2, 19, 34, 88, 139, 140: n = A,T,C or G
cnccgcggtggcggccgangtactaatattcagngtcttgaactttcatataataaaaattactcgaattggtaagaacaatgaaatnttaatatttaaagatatatttctcataatttattgtgttttatttattccnntgtaggagtaggccccatcacaaatctgcatattttatttatgttatacttttaaaatttaagattaaaaaaataaaattacttttaatgt

SEQ ID NO: 1152 - DNA, 670 bp, Homo sapiens
ggcgaattggagctccccgcggtggcggccgaggtacagctgaactaagttgggctaacaaggcagatgatgggctccaaactgtgctgcatctgtctttatggtggccctctttattacaccaagatccccagacacaacctgctggcccagaacactgcctgctgccaactagacataacctgctcattctctccaccaccaagtgctttatgggccaggacacagcctcctgggcagtggtccttgaccttggaatctgaccttgacactgacatcactggaacattaggaaaaacccatgagccttggactccctagagaccagctaaatcagaattgctgcaagtggtgctggggcatttttccaatgacaaaagtctcttttctactcaagaaataaactcaattctgactgagtcagggtttcatgaatcaagcttcatgaatacttatcccaaattatttcacttatatgttgtaagatgttcccatttttgtgagttttatattattaactaagttaatgggaaatgaagtgtatctgttaaaacctaatcaatattaacttggtataaatattccgcaatctaaaactgcttttacatcattgaaaagttataaaaattagcaaatctgatagcaccaattcaataaaagcaatttaaaa

SEQ ID NO: 1153 - DNA, 433 bp, Homo sapiens
  misc_feature 1: n = A,T,C or G
ncactacttagggcgaattggagctccccgcggtggcggccgaggtacttgcaggtggtttggcctggaaaatctagatgagtggtttttaaatttagttgcttattagactcaagaaagaaatttaaaaaacaatactgattactgagaccagcttttctagattcttcattcagtaggagtaaggaaaggccaatgaatgtgtattgataaaaaggttcctggccgggtgcggtggctcacgcctgtaatcccagcactttgggaggccgaggcaggtggatcacctgaggtcaggagttcaagaccagcctggccaacatggtgaaaccccatctctactaaaaatagaaaaattagtcacgccgtggtggcaggggcctgtaatctcagctacttgggaggctgaggcaaggagaaattgctggaacct

SEQ ID NO: 1154 - DNA, 380 bp, Homo sapiens
  misc_feature 247, 260, 299, 328, 337, 357: n = A,T,C or G
aattggagctccccgcggtggcggccgaggtactgatttatgagatttagtaggtggaaggaaagcagagactaacttctgctatttcatctaccatgcagagggttatggggatatcttgttgctttgctttcagcactggcacaagtccagggcccatttgctagcagtgtgggtgttaagaggcaggatgtaaggtatcacctgtgctggtgaggaacacagtgaggagtgtatgatttggganctgagagcagtancagtggggtcagcagcttcctgattgggtggtcccaggnatcaaagtggttagtgatccgctggcttncttgctggngttttgctttctaactgtgngcaaaagcacttgtgggtttatg

SEQ ID NO: 1155 - DNA, 297 bp, Homo sapiens
  misc_feature 150, 250, 264: n = A,T,C or G
gctccccgcggtggcggccgaggtacacacttgcatgagggatggggctggtttacaggaatggaaccagcttggaaagaagacagatggtgagaagtgaatacttgttggtatcatgtaagaacagagtgaagaaaaaggacaggccgnccttgtttatttttaaatttcaggaaaatggattggccaaataatggggatcaaaaataaagggtgtttttattatgagccaagtgaaaattaaatttangataggtatgttgntatggtttgattgtgtcctccaaagttcatgtg

SEQ ID NO: 1156 - DNA, 456 bp, Homo sapiens
  misc_feature 436, 452: n = A,T,C or G
acttagggcgaattggagctccccgcggtggcggccgaggtacatgccaccatgcctagctaagttttgtatttttagcagagacagggtttcaccatgttggccgggctggcctcgaactcctgaccttaggtgatccaccctcctaggtctctcaaagtgctggaattacggtgtgagccactgcgccccggcccttagtagcatcttttaatggaggtagagttgagatttcagtgactaacaactaaaggtattaaaggtaggggtttatatgatacatttgcattttagaaaactgatctaagcttcaatgtgaagaacagattgaaatggaagggggaggaagactagaagcagaaacattactcatttaagtaatctggaccatggaaactggaaaaaaaggtatagggacctccaaaagttcataaangaagttgaaaagcaangatt

SEQ ID NO: 1157 - DNA, 445 bp, Homo sapiens
  misc_feature 20: n = A,T,C or G
ttagggcgaattggagctcnccgcggtggcggccgcccgggcaggtacatgtggcaattgtttgccattccctttccatcattaaaagggccacaaggaaaacttagtaacggagtgtgaaatccaagcttttttacaaggaatcctgtgcaagagctcaggagctacttgttttccatatgtagttaaatcctgtctgtgcaaagaggttgtcaatctgatcccagttctctgccaactcgtttttgtgattttgagcaaacccctttctaaagcacaagggatctatctactgtgggcctgagctctgggactcttcttctcagcaggctgttcactttggctcaagagtgcctccatccatgtagggtgactttgctaatttgcacaaagtcgccctatgggctagcagcgggcctatcccttcccgtttctgagcttcaag

SEQ ID NO: 1158 - DNA, 241 bp, Homo sapiens
  misc_feature 2, 5, 14, 73, 101, 103, 108, 121, 123, 124: n = A,T,C or G
gnagncttcccacncggcggggttgggccgggccccgcccccgggggccagggttactttcttgggttaaagnctttggtttggtttggttcccaaagttngnaaagncttcccccttccnannaaatggaaaggggccgttggttttgggcccaagaagaagccccatttggtcaaacaagccagaagatgcctggttggaaaacttcaattcccccaactttaaacccaaaattatttc

SEQ ID NO: 1159 - DNA, 438 bp, Homo sapiens
  misc_feature 2, 17, 18, 44, 58, 70, 74: n = A,T,C or G
cnggcgaatttttgctnnccgcgccggcggccgaggtactcagnttactgagcatgtntcattctacttntttntaacataagtcagtctacattttataaggacgtttacatattaggtagtataccttgtgtgcttgacgcaaatgtggccaatttagggtgatttagtggaaaatggaatcatctggtatagtaaacagcttttgttttctgttacagacataatgttaggaaaattgaaataaatacaaggggtagttatggtgaaccctgttaaactactgttttaaaaacagtgaatttcagaaaaatctcatctgttctgagtgatttcattcctttgagaagttaaactggctctttttaaaacaaatgcatccaggcgtgcctggttattgctttatttaaagctggaagcaaggctcctttcggttct

SEQ ID NO: 1160 - DNA, 347 bp, Homo sapiens
  misc_feature 127: n = A,T,C or G
tatgggcaacagaaattatcaacagcaacaggaaatcaaaagaacaggaaaggaagatgataaatttaactggggacatgctaaatctaagttcatgatgaaacatccaagggggactaatagccanaaacacaggatacaagctgggaaaatacgaatttgatttagaggggagaggcactagagctaatcattagattcatgagtatagatgaattcaaaatgtgaatgctcaaacagaaaagccaaggataccagtgaaggaatatttacatttaggttacaaggaaggaagaggaaggccaggcatggtggctcataccctcaatcccaccactttgggaggc

SEQ ID NO: 1161 - DNA, 423 bp, Homo sapiens
  misc_feature 238, 401, 413: n = A,T,C or G
tcactacttagggcgaattggagctccccgcggtggcggccgaggtacatttgttgggggcgtgacattaacatataaccacttagagtggacatgcagttagagaaaagtcaatgagctggaaccaagctgggaattccaacatgtagaagttaaacacaagaggaggagccagcaaaggaaacagaaacagagcttccagcaggtggggggcatttggaagaaaacgatgccatanaagccaagatgaaatagacatcaaggagaaggaagtagtcaattgttttgaatgctatgaagaaagataagaataggtaaatagtccttatatttgataacagaggtcactagtgatcttgatgaggggtttcaatagaatggtgggattatatacctccctngattcaactgangtaaggaagg

SEQ ID NO: 1162 - DNA, 412 bp, Homo sapiens
  misc_feature 60, 156, 308, 375, 392, 395, 404: n = A,T,C or G
ccgcggtggcggccgaggtacacgatgtccagtatgacctactggatatgcaggcctgcngctcaggggagagctgggttaagaaccgccaaggcagtaatcatctgcatttagatggcgagtgaagccatgacaggggctgaaatggcccagcangaataaatcaaaaccatgagaaacacatacatttaagaataaggagatgtggtcaggcgcggtggctcacacctgtaatcccagcactttgggaggccgaggcgggtggatcacttgaggtcagtagtttgagaccagcctggacaacctantgaaatcccgtctctgctaaaaatacagaacttagctgggtgtggtggtgcgtgcctatagtcccanctgcttgggaggctgangcncaagaatcnctttgaac

SEQ ID NO: 1163 - DNA, 444 bp, Homo sapiens
  misc_feature 6: n = A,T,C or G
cgcggnggcggccgcccgggcaggtactactgcaaccactagcagctaccatttatgaagcacttatgtgccagctactgtgaaagggactctctttaaattactttgcttacttctcacaaaaatcctgcaaagtattattttaaggaaacttaccagtgtagccattcagtatttgggatgaataataagaaactttttagaaccatttataaagcactctaggtcattctttgagaaatgctacaaactagggaaccaggagattagagatgggctcacgtcttgattttcagaaggaaaatgtagtggattgtgaatgctgtatcattaagcttgacatggattctatgcaaaattcaaaaggatttttttttttttaacaacttacttcttttccatagtcttaccagcactcactggttgcctgccatggattcttta

SEQ ID NO: 1164 - DNA, 390 bp, Homo sapiens
ccgggcaggtacctcattcattccctctttgttcgggcctctctgcttttcgttaattttctcctggccaaccagccaactctggctccctgtggttataggaaattatccgtgcaatgaacttaatttaagaaaactctgctgcataaagaggtggcagaattattcttctcatagtccagtctatgttgactttcatgctacagcatttcaacagtcattgacatagaaatagatgcttaatttaaaatgtttttgcaaaagtcattggacgattgataaataaagcccgagggttaggactccaaattaaaggtggcttaaaaaaagtaaaaattctgggcattcatcttccttattccctttaatggggggaaaaaaacctctcat

SEQ ID NO: 1165 - DNA, 472 bp, Homo sapiens
  misc_feature 212: n = A,T,C or G
ggcgaattggagctccccgcggtggcggccgaggtacatcagcagtatgtaattatattgtgagaacaaggaatattgggcaaaaagcaagtggttaaaacatgcaaacaagcaagggcctgatcagaattttcatttattcagtccttaagaactgcagaatgctgaagtctcaaggggcccggttacaaggctatttggaagtttcgtcnaccctttaaaattgcccttaaatagcttttttgttttgttttttaaaaaattgtttggcccggcgcggtggcttacgcctgtaatcccagcattttgggaggctgaggcaggcggatcacctgaagtcaggagttctagaccagcctggccaacatggtgaaaccccgtctctactaaaaatacaaaaattagccgggcgtggtggcacgcgcctgtaatcctagctactcgggaggctggggcagaagaatcacttgaa

SEQ ID NO: 1166 - DNA, 311 bp, Homo sapiens
  misc_feature 13, 40, 57, 67, 135, 182, 183, 192, 208, 218: n = A,T,C or G
actttttagggcnaattgcagctccccgcggtggcggttnaggtacacagtgtttancacacaagtntttagtaaacatttccttttgataaatgcatgagcagacgttcagtctgaagtggagtcaggagtagncatgtttctgcttgctgccgtgcacagggagcttggcctgcaggcannaggcatttnatctcagaaacactanatgatgggangaggtccatgcctatggggagtcagacctaagcaactccatccacctttctgctaaaatcgcccactttggcagcaaatcatgacctatcaac

SEQ ID NO: 1167 - DNA, 440 bp, Homo sapiens
  misc_feature 6, 347: n = A,T,C or G
cgactnctatagggcgaattggagctccccgcggtggcggccgcccgggcaggtacttttttttttttttttttttttttttagtagggacagggtttagccatgttggtcaggctggtctcgaactcccgacctcaggcgatccgctcgcctcggcctcccaaagtgctgggattacaggcatgagccatcgtgcccagccaatacatttgattttgatctatcagcaaagaggctccaaggtttagtatgtttccattttgtattcagggtttcatttgtgtgctaggtcgaacatctttctgtattcaagccgaagttagagatccaaattgctaaaggacttnagcaggccagagctcagtgaaaggaaggtccacagaagggccactaattagtaatgaatggctaaaagacaagggactttttttttttttttc

SEQ ID NO: 1168 - DNA, 433 bp, Homo sapiens
  misc_feature 421: n = A,T,C or G
ctatagggcgaattggagctccccgcggtggcggccgaggtactgggattacagtcctgagccaccacaccgggcccttcattgtgttttctaaaaacaatttctgatcacctggggattattacaacagatctaactttaggaaagtaagtattaaatttgaataaagattatataatagggggatttaaattaaatgcctaacagagtttcatccaaaattttagaatgtgaattcaaggaactcttgacccttctgaagtaaattgatagcatttccacagtgttcacactaggatgtagctagccaactcacagctgcctgtcctcttttagcttccaatgaaaatgctttgggaaaacatacacatagaaaaaggaaattcttcacagtaatacttaaacctaaagagggctaagncaatcaggcttt

SEQ ID NO: 1169 - DNA, 292 bp, Homo sapiens
  misc_feature 57, 163, 238, 256: n = A,T,C or G
attggagctccccgcggtggcggccgcccgggcaggtactgtatctttaaattaagngagttttagttataatgaaattgatttgtagtctgttttgccgtaaacttgtttttctttaaattgttcttacagtgatatcttactatttttaactgtctggggnttctgatatggggatttcagcccctggttaatcagtcttgtccctacaagtccctgatgcagtatgtttatttgngatgtttaaagaacattncttggctgggcgctgcggcttgcgcctgtaatctca

SEQ ID NO: 1170 - DNA, 436 bp, Homo sapiens
  misc_feature 417: n = A,T,C or G
tatagggcgaattggagctccccgcggtggcggccgcccgggcaggtacatctgtctccttactctctatacctcctgaacacaaaaattttagtttattctcatttatatctccaaatcttaaattgtctgatcagaagtaaactaaaataaaaattaggttgttttccttttaagacttttcctgaaactaggttgatcaaaaaatacaaatgtttttccatgattattctcagtaagagtcagtaattcaggccaggtgcagtggctcaagcctgtaatctcagcattttgggaggctgaggcaggtggatcaccgaggtcaggagtttcaagattcaataattggcaaaggtataagcttccactagagggagaaaaaaaaagtattattgctaaaaagatgggactaatttngggttcccatttttcactc

SEQ ID NO: 1171 - DNA, 392 bp, Homo sapiens
  misc_feature 31, 40, 47, 59, 68, 74, 186, 188, 189, 202, 290, 370: n = A,T,C or G
ggccgaggtacttttttttttttttttttgnatttttagnagagacnttttttcaccgngttagccangatggnctcgatctcctgacctcttgatccgcccacctcggcctcccaaagtgctgggattacaggcgtgagccacccatccggcctaacgagacttatttttactcaactagatggngnncattcatttgctnactcagctgtgccaggaattaagttgggcactgggaattccaaaaccaacaagacattctctgtcatcagggaactcacagcctagtntgagagataaacaaatgaacatgaaattataattcagtaacaaagaatgagtgttatggcaaagggaatgtgtaagagcnttggcagggtatccaagccagg

SEQ ID NO: 1172 - DNA, 436 bp, Homo sapiens
gactcctatagggcgaattggagctccccgcggtggcggccgaggtacatggcacagagtttatttaattcatcaaactcaacatataactttaaagtaatattgatattttaatatgctctgaattcagaggtaaagttgcaaagagggaaggcaagcattaaatgtgttttcaagtgagggtatctcttagtaacgtgcagtagaccgcaaatagttgctacctttttttaaaaaaagggaacttttataactcagtatttgaaaagtggtcatcagtttttcatattaattatggaagttgaggagcagctttagccacagttagaacttaagtttctggggaaattgggagaggttttgtttttattaagtgggacaggaaacccatatcccatccttatactctggattctggaggtattaggaggaaaac

SEQ ID NO: 1173 - DNA, 336 bp, Homo sapiens
cactacttagggcgaattggagctccccgcggtggcggccgaggtaccatactacccctttcagagtcatattgcacagtggatggatcatggcattccagagaacagagtgcttactgggaccagttacagaatcgtatggaatggacccttgtttagggaccccacaggctttcagtgaccgtccagatgaccaggcttcaatgggtgtcccgccccagctggaggcgatcagcccgatgggatactgcagagtgtcataaaggtgacgtccaaagagccagcacactgctgacatgtacctgcccgggcggccgaggtacttttttttttttt

SEQ ID NO: 1174 - DNA, 414 bp, Homo sapiens
ccgggcaggtacttgacctccacagcaagagcttgcacacattagactatctgaaacaaatgcttttttggaaactagtttcttcctacaactcaatgcctgtaggaattatgatgtgaacataatatttgtcactaaattagtttccttgtcttctgagttgaaagaggttacctaggatggcaaagttttggtagttctagactgaacattcttgattgtcaccttcctttagattgatttcctgtgacataatacctcacccctgccagtccgttcagcctgcctgcctccctgactctctccctccctgcctccctccctctctgtgcagctactgcttctggttgtagtcttttgtctctccacgttttgaattacctttgtcagccacctgcacttttcgtatagttg

SEQ ID NO: 1175 - DNA, 338 bp, Homo sapiens
ggagctccccgcggtggcggccgcccgggcaggtaccgtattattttagcttttattaggttacagattattctcaaatatctcattacctcttcaaaatcctatgtagttggcattgctgttatccccaatagacaaatgagaagtgacagtcttaaaggtgaactcatgttcaaacaacagaagaataatgggcctataagccatgtctcctgacacacagctgagtgatcttttcatgtcactatgttgctagtgtgcagcctaagtcccactagctggatatgaaaacagaaatagaatctgggcgctctgattcttcatccattgcttttttt

SEQ ID NO: 1176 - DNA, 438 bp, Homo sapiens
  misc_feature 36, 413, 432: n = A,T,C or G
actatagggcgaattggagctcaccgcgggtggggnggccgcccggccgggacggcggggaaaggtcctcagtaaaatactggcaaactaaatccagcagcacatcaaaaagcttatccaccacaatcaagtcggcttcatccctgggatgcaaagctcattcaacataccaaaatcaataaatgtaatccatcacatgaacagaaccaatgacaaaaaccacatgattatctcaatagatgcagaaaaggccttcgataaaattcagcaccccttcatgctaaaaactctcaataaactaggttttgatggaacatatctcaaagtaataagagcctattttatgacaaaaccccacagcccaattatcatacttcagtgggggcaaaaaactgggggagccatttcccctnttggaaaaacccgggcacnaaggac

SEQ ID NO: 1177 - DNA, 532 bp, Homo sapiens
  misc_feature 39, 151, 154, 161, 162, 163, 168, 181, 203, 226, 229, 243,255, 257, 294, 306, 312, 314, 319, 322, 341, 343, 344, 345,355, 364, 371, 378, 387, 390, 393, 401, 411, 418, 425, 431,441, 445, 453, 463, 485, 487: n = A,T,C or G
tgtgaacatagctcagtgcagcctcaaactcctggcctnaagcaatcctcccgccttagcctccccaaatgctgggattacaggcataagccaccgtgcctggcctaagaaaaagctttttattgtaagtcaacctacaccaaggagacanggngttcccnnncttanaatatgtactccnctgtgttggggcctttaccggngcaagctccctttttatttaggnaanaagggtttttaaanggggccaaagangntgggccgggcttcaccattctattaattgctaaaccnacctttttgggnagggcnantaggncangggccacgaattcactttnannnggtcaagggnaggttttcntagaaancaagccnattggggcncanaanaaatgggnttggaaaaantcccccnattcttntttttntaaaaaaaanttanccaaaaanaaatttaagncctgggtcctttatgccttggncnaattttttttcaaaaaaaatttttttgttttaaaggggaattttt

SEQ ID NO: 1178 - DNA, 327 bp, Homo sapiens
cgccggcaggtctgggattataggcgtgagccaccgcgtctggcctctaacgagatatttctaaaggttaggccttcagtcaagaattttaaagctggatcttagaggttatctaaactaacctctccatttcatagataaggaaagtgagtcccagaaaagcactggtttggacaagttcagaaagctaaacagtgactgtggatgtatgattctgtctcttaactcctaatccaaatgtcttctcactagataaggctgtgccttctacatttgaaggctcaaaccccatggatggatggagggaaggatgggtggagggatgga

SEQ ID NO: 1179 - DNA, 599 bp, Homo sapiens
  misc_feature 160, 167, 197, 200, 221, 232, 237, 243, 250, 285, 314, 322,330, 392, 403, 405, 415, 424, 426, 430, 435, 439, 471, 498,500, 502, 507, 511, 517, 544, 545, 548, 567, 581: n = A,T,C or G
ccggccgaggtactttgttcttttactactcaatgagactgagagcctgctggattcactaagaccaggtgaacccggagggctctcggtctcattgactcaattgggtttgaatctcaattctgcaacctacgtggctttgggcaggttttcccttcantttttcnaaaaaatttataccaattaaataattttanccntttttaaaaactttaatttgnaaagggaattnggganaaggcnttggtanaccaacacttaatccaatggcctgtttccggttgngccaattaataggggttgggggggggttntaaacggntaaaaaanaaaaggttaagggccttatccttaattttaaaaaccaattttttttttaggaaaaaaaaggntgggccttccncntttttcaatnttttttccncncctngggcnttcncctctttttttcaaattaaccttcctttttcnaattttccccttaacctttttttcccntngngggtnaggnttattncaaattttttcctttttcctttttaannatntagggggccttggttttanggaacccttttttncattctttttttttcctt

SEQ ID NO: 1180 - DNA, 409 bp, Homo sapiens
  misc_feature 386: n = A,T,C or G
tcactcctatagggcgaattggagctccccgcggtggcggccgaggtacttctgtaatgctaatcataaaacggaataaaatttctcttggaaaatgcattcagagttccacccttgaatgcatgggggggcatgtcttttttacaatagccatttgccacaggagtgggaaattccacttttcctgatggatatctatgggagctgctcctccaaagtcctggaagtaagaatgtgacaaaataggggaaataaaggagagaaaagaggattgtaagccatcagcagtgcaaagttttccacccctccttctcctaactttcctgcttcacccaagtagcaactgtaagttcttccaataactaccatcacctgggtgagctaangaagtgggaagagaagacaatgc

SEQ ID NO: 1181 - DNA, 343 bp, Homo sapiens
  misc_feature 178, 184, 239, 283, 328: n = A,T,C or G
ccgcggtggcggccgaggtacttaacactatattgagattgttattttaactggaattctaagatttgtgaactgtaaatgaaaaacatactcattaaattttattttttcttgatactcaaaatcatatttataaaaaaaggatttttttttttttttttttttgaaaatggaagtncctgcntctgtcacccaggcttggagttgccagtggcaccgatctcggctcacttgcaagnctccgcctcccgggttcaccgccattctccttccctcaagcctnctgagtagctgggactacaggcgctttgccaccacgcccgggatnaattttttttggtat

SEQ ID NO: 1182 - DNA, 444 bp, Homo sapiens
  misc_feature 206, 224, 226, 356, 432: n = A,T,C or G
ggcgaattggagctccccgcggtggcggccgaggtacatttctcaagggtaaggactatgtcttatgtctttgaacacccttaaaggaacctaggctagtagttgacattgaatagtttctaagtaaactcttgccgactggaattgtatttacggcaaagctacttgcaaattacttgcattgagaccaaatgtaaaacactagnaggagccagacatggttntnctttggacacatcttggacgtgcctgatgtcctccccacctgccttgggcatccctttatgataaaactttaattcagtcaaactggtatcactgcatgtttttaagagacttgcccactttctgaccanaattatccatctacccaaggttctcagtcaagggttcggtgtcactctatcaagggggctatatggaaaatagggnagggttttggtt

SEQ ID NO: 1183 - DNA, 348 bp, Homo sapiens
  misc_feature 26, 54, 74, 129, 313, 334: n = A,T,C or G
actcagggcgaatttagctccccgcngtggcggccgcccgggcaggtactaaancatatcatcagattgggggntccacttgttgttttcaatttaataaacacttattgagctgctacaggaactgtntttaatgcttttccaaaaaaagtgaccttctcaacatgatagaaaacatttccgaaaaactgatagctaaaactatacgcagtggagaaagattgaaggctttccccataagattaggaaaagacaaacacactaaaatcacacacagctagtgtatagttgtgtttcttacattaacaatgancaatccaaaaaagaaattaangagcaatttcactt

SEQ ID NO: 1184 - DNA, 388 bp, Homo sapiens
  misc_feature 60: n = A,T,C or G
agctccccgcggtggcggccgcccgggcaggtacactctaaaagccaaaaacagcatganctgaggcaatacagagcataagctggtatcaccaatgcatcctggaaataaaacctgtgctacctactatcttgggaatttcactgagagtatagaacattctaaatgaaaaaaagaaacgaaaaggaatggttataaattgtttaaatgtgtaaacaaacacaatagatgtaagttacaaaaatgttcagagtaacagaatgcactgataacatttaaattaaatataaagaaaagcaaatctacttccaacaaatacatggatacatcttttgtttcatacaagcagatgcagaaatgtagcttctattttaaaaagtctgaatgt

SEQ ID NO: 1185 - DNA, 401 bp, Homo sapiens
ccgcggtggcggccgcccgggcaggtacctcagactcccaagtctccatattctgtaaagtgctcctatgggtgttgatttattcagctgaaaaactgaaaatccattttaggattgagttgatcttcactgaggaaaaatatcaattttcagagctttgtctaggaccctgcaaagaacttaagaattcttaacagaggttcacgaatggtcccaaggagtccacaagtaccatgaaattgtatgtatacaagtgagagggagagaggatgagagcctctgagaatgtaaattttttggcatgaagatccataactttcctcagatccttatggggttctgtctttcccaaaccacaaagaatctgagctgagagaataacgccaggcctcttgtctgtt

SEQ ID NO: 1186 - DNA, 415 bp, Homo sapiens
tcactacttagggcgaattggagctccccgcggtggcggccgaggtaccactgcactccagtcgggtgacagagcgagaccctgactaaacaaaaaataacaaaaaaggaggcaggggtttagaaaataccatgattgttaacaggaccatcagatttcattttttctaaaatattagatattgtcagtgtggtttttatataggtgctgattctgttctgctcgtcttcaagtaacaaatgcctgcagtggagatatcttattttgatgattaacaggaagcttttaagctttgaagaaagcaaacaacattttccatggacctttaagagctgggctaatatttttgcccacacagaactctaattcatttcagagtcaagggcaacaatagaatactttttcaaggaccttg

SEQ ID NO: 1187 - DNA, 378 bp, Homo sapiens
ccgcggtggcggccgcccgggcaggtactttgagaaggaaatactgggttgtaatcatggataaaatatgcaggggaggggaggagattatagatattaatatagagtttagggtggcattaggcaaggatgacatctgaatatctaacttccattttacattgccatgtaagtctttttgcccagtgggtttgggggacattgaggcagaactcctggaaaatagaaggaagtgaaaggtcactggtctctccaataatcttgatgggaaggactagacaacaccattagcaaaatgtgcctcttaaaaactcaagacacaagcattatcttcatctcactgaaataacagctacatcctttattaacatgagaaaa

SEQ ID NO: 1188 - DNA, 398 bp, Homo sapiens
  misc_feature 4, 72, 74, 92, 162, 178, 179, 186, 187, 189, 190, 207, 237,269, 305, 338, 381: n = A,T,C or G
ggcnattggagctccccgcggtggcggccgcccgggcaggtacctcattcattccctctttgttcgggcctntntgcttttcgttaattttntcctggccaaccagccaactctggctccctgtggttataggaaattatccgtgcaatgaacttaatttanaaaactctgctgcatnnagagggnngnnagaatttattcttcttnatagtccagtcttatgttgactttcatgcnacatcatttcaacagtcattgacataagaaantagatgcttaatttaaaatgtttcttgcaaaagtcntttggacgattgataaataaagccgaggttagnactccaaataaagttgcttaaaaaagtaaaattctggcaattnattcttccttatccctt

SEQ ID NO: 1189 - DNA, 388 bp, Homo sapiens
  misc_feature 200, 241: n = A,T,C or G
ctatagggcgaattggagctccccgcggtggcggccgcccgggcaggtacatgagtctcttttttttaagaattttaattttcctagttccttatctttttaatgattattctttaagtggacatttaagacgtgagcttttaagagcagctgaaaattattggttgtttactatgggttttatccatttgtatactgtnttttttttctcagctatcttcaaaatagccataggaggtangattccattattattttactctaaaaagagaaaactgagttttaaagtgttaaagtggcaggaccaagatgaaggatacgaggtgaaagtaactaaaggttgttagcataacaaattcaaacccaaagatggcaattttgaaaacaa

SEQ ID NO: 1190 - DNA, 632 bp, Homo sapiens
  misc_feature 481, 488, 542, 554, 561, 580, 581, 582, 583, 587, 591, 596,597, 598, 600, 616: n = A,T,C or G
gaatggagctccccgcggtggcggccgcccgggcaggtactacatcttaaactagactgttatcaaataagctaataatactttacaaataaggacggtatttcaaacttcaggaaccatcgtttttaaatgattcatgtagtatttaatcacttggcggtcttcataatttaaccctgtcataaagggaacttttacaaagattaaaatagaatggttacaggggacacacaattgcaatctaagtgcgggatgtaggctattcaacagtatccagactttatctacaacatatatatatatatccacacataaatatgcgtagggaaaaagacttgtgggggtttgggggtggagctaaactatttgctgtgtaagagacataaactagaaagaagggcctgaataggacagatcaaatggaatcaattagctgggtgtggtggcgtttgcctgtagtcccactactcaggaggctgangtagganggtcttggtagcccaggagttggaggcttcagtaagcccgtgattgcaccctgngctccaccaagngacaganccagacctgcttaaaccannnngagnaaanaaaannnangggacccgaaccaagncaggaccccttttccc

SEQ ID NO: 1191 - DNA, 366 bp, Homo sapiens
  misc_feature 15, 24, 84, 135, 184, 198, 242, 254, 287, 319, 344: n = A,T,C or G
ggagctccccgcggnggcggccgnggtaccaaggcctagagagcactaaataaatgtcaattattatttttatccattctggcntttagaaataaaagttacaaaattcactattaaaaataccattgatacatnccatattccagccacactggcctcttttctgtgacaaaatgcccttttncttcttttgccctnaacacctgctcctccctatgcttggaattttcccccagctcctncacggccaactnattttggtccttaaatctcaagtccaatacctntcaattcaaatattccccctttagagagcctncattgagactgctatccccaaaagnctaactttcttataatcttgct

SEQ ID NO: 1192 - DNA, 381 bp, Homo sapiens
  misc_feature 152: n = A,T,C or G
agctccaccgcggtggcggccgaggtacatctgcatgtatgtaattatattgtgagaacaaggaatattgggcaaaaagcaagtggttaaaacatgcaaacaagcaagggcctgatcagaattttcatttattcagtccttaagaactgcanaatgctgaagtctcaaggggcccggttacaaggctattggaagtttcgtcaccctctaaaatgcccttaaatagcttttttgttttgttttttaaaaaattgtttggcccggcgcggtggcttacgcctgtaatcccagcattttgggaggctgaggcaggcggatcacctgaagtcaggagttctagaccagcctggccaacatggtgaaaccccgtctttactaaaa

SEQ ID NO: 1193 - DNA, 382 bp, Homo sapiens
  misc_feature 95, 100, 346: n = A,T,C or G
ccgcggtggcggccgaggtactttttttttttttttttttttttttgtttggttttgttttgtttgtttgtttgtttgatgccgttatcaagtanagcanacctgggaagactggtgcatccttatttctgtcatcttagaaaataacatatataagaaaatatttatatctagggcagaagaaaattagagatatatttttttcctttcagcctcttctctcctccatttttactactgaaaaattatccaaaggcatgaaaatatttcatagaaatgtcttctgagttgtgagggaattcttgcccatttgaacaaatggaatagacatttgaaagcaaatcanaatgccccttactgcttggccaatgtgcaaggattt

SEQ ID NO: 1194 - DNA, 447 bp, Homo sapiens
ccgcggtggcggccgaggtacttcaaatgggtcactgaatatcttcaaattgtatgtaaattttggaggggaagtggtatatgcagattttttttttctggaaagaagaccaatcacttttgccaaattctcaaacaggcccatatttctctcacacacatgcgtgcgcatgcgcacacgcgcgcgcacacacacacacacgttaagatgcgaagaatcactgtcataaaatgtcatatttctaatttctgtaaatggggagaattcctcaagcttatataaaagtgatgtaaataattcagttacaattataaaagaaatggtatcacagcaaatccctttggcaccccactgaaaatttctctctgatgtttaaaacaccatttctatgcttactcttacagctgtattaataatcagataagggggtttatttcttgtctattt

SEQ ID NO: 1195 - DNA, 481 bp, Homo sapiens
  misc_feature 3: n = A,T,C or G
ctnctatagggcgaattggagctccccgcggtggcggccgcccgggcaggtactgtaaggcctctaactttgttgttcttaaagactgttttggctacctcttttggttttctatagagattttagaatctgtaaaaccattttctataaaaatgtcctgcaggtcttttgatcaagattgtgttgaatctatagatcaggatgagaaaaatcgagatgtcaacactatcaagttttccaattcatgaacgtctctccatttagttaggttttaaatttctctcaaagatgttttgtaattttcattatacaagtcttacacttctttggctacatttattcagtttttatgttttttatgtcagtttaaatggaattgctttttaaatctcattttccaattgtttattgttgataaatggaaacacaatagattttttggttatttgacctttataagtttacttactgattctagtag

SEQ ID NO: 1196 - DNA, 563 bp, Homo sapiens
ccgcggtggcggccgcccgggcaggtacaaagcaagaggagctatcagagtcatggagtaggtcagggcacttcaagttcatagaatctttacacgaaaggattattttagagctcatctacccactcatattgcagcagaaagaattgaagctctgggggataaatgacttattcaaggtcacagtgagccaaagctgagatttccagatcctaaccagcgttaaatttctaagctgcattttagcattccacttttcctcattttgcctattaaatcctccaaggcctagttcaggttctttctggtccagaaagtgcccccagtcttctccaattctacagagatgccttccttccctgatgctacaagaatgtatcatctccatcactcattggcaccaataaataaaatgccctttgacatccaagagtcatgaaactttgagctggaaagggtcattggatgtcatttaactcatatttcagtttcaaacttacatagggtcagctcaccaagggtagctgaagttcctttggagaaaaagctcttgtctaacaatc

SEQ ID NO: 1197 - DNA, 390 bp, Homo sapiens
  misc_feature 4: n = A,T,C or G
cgcngcggccgccgggcaggtaccttgaattagagcctgaaatgggggaaaagcagccataaaagacattctcagacaattggagactttcctgagttgtgataatggagttatgaatatgtaggagaatgtctacatagattttatgaagatgcatgtggcaacatatctgcagcttattccaaaaaaggtccaagaaaaaaaggaagggaaagaaaataggattacaggtgtgagccaccatgccaagcctcactgtttctaataaccaaaattgttcctgtatttattgagtctctgtttcatgcccagacactctgctatagtctgaatatgcctattttctgttaatttctcataaacagttctgtggagccaaggaaaccaatt

SEQ ID NO: 1198 - DNA, 444 bp, Homo sapiens
  misc_feature 359, 436: n = A,T,C or G
ctatagggcgaattggagctccccgcggtggcggccgcccgggcaggtacatgccaccatgcctggctaagttttgtgtttttagcagagacagggtttcgccatgttggccgggctggcctcgaactcctgaccttaggtgatccaccctcctaggtctctcaaagtgctggaattacggtgtgagccactgcgcccggcccttagtagcatcttttaatggaggtagagttgagatttcagtgactaacaactaaaggtattaaaggtaggggtttatatgatacatttgcattttagaaaactgatctaagcttcaatgtgaagaacagattgaaatggaagggggagaagactanaagcagaaacattactcatttaagtaatctggaccatgaaactgaaaaaaagtatagggactccaaaagtcataaanaagtgaaa

SEQ ID NO: 1199 - DNA, 434 bp, Homo sapiens
  misc_feature 367, 372, 421: n = A,T,C or G
ccgcggtggcggccgaggtacgtcacaccaatggtctcagtgtggtccttaaaccagctgcagcagcatcacttttcccaggtgcccatcccagacctgctgatttggaaactgactatggagcccaggaagctgttttagcaagccccctaggcgattctgacgcagttgatgtttgagaaacactgcactatctcagactcttttaaatcagagatctggagtcaaattcaaactctactacatctcagctatgtgacctttggcaattgatacacctttctttcttttcttttcttttttttttttttgagacagagtcttgcactgttgcccaggctggagcacaatggcacgatcttggctnactgnaacctccacctgtcagggcgatcttggctcacggcaacctccacctttnaggttcaagcaat

SEQ ID NO: 1200 - DNA, 264 bp, Homo sapiens
  misc_feature 199, 206, 239: n = A,T,C or G
ccacctcgtgtcctaacaagaattgactgtgaatatcttatgcacacagttttcagctcctgctttgcttcagaagaatcagcagtctgttgtgcaaaacagttgaaggaactaccaggattttgtagaccccatttagtgttgttgttgatgacagaggcttgacctgtggaggaaatggtcggtgaagcactgggcnaggagantgtggctgctgaaactgcatttcttgacttttnctgcctcactctggctagtcttaac

SEQ ID NO: 1201 - DNA, 597 bp, Homo sapiens
  misc_feature 13, 86, 94, 126, 130, 134, 141, 146, 159, 161, 194, 201,204, 210, 214, 231, 243, 245, 255, 259, 268, 278, 281, 297,300, 304, 306, 326, 338, 348, 349, 353, 364, 369, 375, 377,390, 397, 401, 406, 408, 448, 457, 464, 466, 483, 486: n = A,T,C or G
  misc_feature 502, 504, 518, 524, 526, 532, 535, 538, 541, 542, 545, 546,547, 550, 555, 568, 570, 571, 581, 585: n = A,T,C or G
cggtggcggccgnccgggcaggtactatatggacaccaacatggagcagaaaatgattggcagcagtgaccaatctcattccaggngagaagtngcacagtgtccaataggtcgcatacatctccntagnaagnaagttgntgaanttaaacaattgananttacaaaattgaaacataacaactcattgttanttcctantantaatgnacgncatttaatacttttttnttcaaggcaaancntaaagtaaangganttggggtangggaaccatnaangtaatttctaaaaatnatngctntngggcgggtacccctaaaaangtaatttttaantaataaactnngganaattgggatcncacgnaattantntatcctttttatnggggccncctnaaagncnccaccaccattggaaaaaaaaaaaaaattccacccttggnaggggtccnccctaananggggggaaaaaaaccanctnggaaaacccttacaangnaaaaggtccccccnttttcntnggaagntanctnccnnggnnntanttccntaccaaaaccttngnntataggtaantggnaaaaagtaaaaa

SEQ ID NO: 1202 - DNA, 458 bp, Homo sapiens
ccgcggtggcggccgcccgggcaggtacgcggggggccaagaaccaacaagggcagcacattgtgggtctgatgatttggtgcaagatggataactggacaggatatgccagaattatactttggatagtgactaaattcatgatcagggcaggtatggctctcagacttgtggactcagatatctaaattttcactcagaaatgttaatgttcacagacaatttacatcctctgaccagtgttttctcttcctagagttgaattgcctgagaagcccagttatactgaggttacttggtaagcctaactagagcatatattctttagatgtttaggacatcaaggcatcgagctaaaacagcctgatgtaaatgtcaacacaatagggattccactgccctcaaattaaggataaataaagtgtccttggctaggacctcctccccaactgtcataa

SEQ ID NO: 1203 - DNA, 355 bp, Homo sapiens
  misc_feature 59, 87, 91, 154, 167, 233, 279, 338, 340, 341: n = A,T,C or G
atcatacttagggcgaattggagctccccgcggtggcggccgcccgggcaggtactttntttttttttttttttttttttttttagnaganacagggtttcaccgtgttagccaggatggtctcgatctcctgaccttttgatccgcccacctnggcctcccaaagngctgggactacaggcgtgagccacccatccggcctaacgagacttatttttactcaactagatggngttcattcatttgcttactcagctgtgccgggaattaagttgggcnctgggaattccaaaaccaacaagacattctctgtcatcagggaactcacagcctaagtntnnagagataaacaaat

SEQ ID NO: 1204 - DNA, 319 bp, Homo sapiens
ccgcggtggcggcccgcccggcaggtactgggattataggcgtgagccaccgcgtctggcctctaacgagatatttctaaaggttaggccttcagtcaagaattttaaagctggatcttagaggttatctaaactaacctctccatttcatagataggaagtgagtcccagaaaagcactggtttgggcaagttcagaaagctaaacagtgactgtggatgtatgattctgtctcttaactcctaatccaaatgtcttctcactagataaggctgtgccttctacatttgaaggctcaaaccccatggatggatggagg

SEQ ID NO: 1205 - DNA, 694 bp, Homo sapiens
  misc_feature 149, 185, 194, 201, 218, 247, 254, 261, 263, 267, 268, 278,280, 289, 310, 316, 322, 334, 341, 354, 356, 387, 404, 406,414, 415, 428, 434, 449, 453, 463, 479, 481, 482, 484, 486,494, 503, 507, 513, 522, 524, 544, 586, 629, 639, 667: n = A,T,C or G
  misc_feature 672, 692: n = A,T,C or G
ccgggcaggtactgtcacgattcaacaacctcttaaaaaatacaatatatgcttaacaaggcttctgttgacctctttctggaagcctgatttctttcctccacttatgttaacagattaaaaatttaaaaaaaaaacataattttttnaagttaaacacaaattaagggaattttggccccccnaaaatggtnaaaatcnttccaaaaaaaaaaatncctgaaaaggttggccgggctaattcaancaagacncaaaggntngaannggccccaaantncacttgggntacttaacctttttcttaacnttggcncccccnttactcaaaacnttggaangaaaccacaaagncnaaaatttccttccaacctaaccaaggtgtcntttctaagggggggccnanttaaaagnnccttaattggttnggttangggggggatcggggntacnccttaaaagnaaaattattggttttngnnananaagggccnccttggggnaacntttccnccttaaccncntttccccttttaaaaaaagngggaaaaaaagggggaattgggttggaaaaaaaacccttggncaaaccttaattgggggaaattaattcccccccccaacattcntttcaaattncaattgggccccccccttaaccttttgnccaanccaaaaggccccaaaaaagncc

SEQ ID NO: 1206 - DNA, 425 bp, Homo sapiens
  misc_feature 379, 393, 394: n = A,T,C or G
ccttagggcgaattggagctccccgcggtggcggccgaggtacttgtgttgtcttcaggattagggaatgctgctttgatcatgttgaaaggaagatagaaaaaagattgaaaagctgggtctctaaggtaggaggtctgggatctgtttattctacttagttcaagttggaattgatgctgttaaaacattgtgagatgaccctaaactactcttcagggttaaggcaggtctgaggcagatggatgaattacgcaaatggactataatgtgtaatctgtgcatgtgtgtaacaataaaatacagttctatcaagattttggttgagaaaagttaatgataaaagggctgggctggaagactgggtcgaggaaggagnagttgatactttannggttttacctcacatccttatcttagggcaa

SEQ ID NO: 1207 - DNA, 442 bp, Homo sapiens
cgactcctatagggcgaattggagctccccgcggtggcggccgaggacactatttttttgctttggaagaaatgaatcctagttttggttcagaaactgtcaacagcattgtgcctcttctatgactactaaatttcaagcaaagagagctgagttgggggtaaaagcagggctattccccgccttcagacaatgctgtcccttatcagggcagactgctgtctggtttcctgtctccagctcgggcatgactgcttaagatgagaaacatggtctaagaaaggaacagagtggtcttgaaaatgagaatgctagcgaccaccataaccctcttccaactcactcccaagaggaattctgactagaatatcacatactagcaaactagatatcaattgttttaagattctagggatttgcttttttaaaaagctagaaacca

SEQ ID NO: 1208 - DNA, 372 bp, Homo sapiens
  misc_feature 144, 262: n = A,T,C or G
ccgggcaggtactttgcacatatcatagtggacttgtcctaggagaatcagaactctagccgaactcatgtaatccttaaagctcgtactgtgattattgattaaaagagaacagctgagacctttgacacttcagaaggccantgggtcttgtgcaggtcagtctggcttctctaacagggaaaggcatgtaaggaaaaggaaatgagacagcctgggacacaagttcaagtatgaacaatactatcacatgttccatagngcctatcaaacaagtgtatgtcgtcatattagtcgcctccttagcctctggccctcccataatactcaaagccatctggctatctgctcttatttgcaaggtaatcaggg

SEQ ID NO: 1209 - DNA, 869 bp, Homo sapiens
  misc_feature 601, 605, 613, 625, 658, 664, 689, 716, 718, 737, 739, 748,750, 766, 814, 817, 839: n = A,T,C or G
ggagctccccgcggtggcggccgcccgggcaggtacatatattttaagtgaaagtgacaggaaagtggaatgagcacttatttttctttatcatttaaattattactttaacattttaatactttgaaattaattttgttatatagtagaatgtaaggttctgctgaagtgtatcattttctaaatgacagcatttttcaataccattttaaacaaatgctttcttttaaggacactctaaagataatgtgcactacactagttttcgtagaactattcatgtgtaggcactcaccttgagaagtaggattttttttttacttaacgcttttgtctcttaaagtattattatatatagttaactgtaaaaacattgagatatattaaaaatattataggacaggtaatacatattcatggtagcaagtgaaataatacaaaggtttatgaataaaaagttactactctcctaggtagccaatgttaccagcttgcatatccttctgctgctttttctctgctcatacaaacatgaacttactcatgcatacacatagggtggttcaaagttttattctgaataccatccgaaccccaaagnggtntaattacntaatatcaatgngaatatataaacctggttattgaatataaatgntaaaangaaccctatttaaacatcactaagncctaagaacacagacctttccaatggngncccggaatattctcatgcngnggccccatntnttttttatttccccgncataaaaaatcactccattcccaaaatttacggtatttctttttttanctnggggcctaataatttttaccangccttacccttttggcaattaaggagggat

SEQ ID NO: 1210 - DNA, 358 bp, Homo sapiens
aggtacatcagcgccacaccgcagggctgtccacggtgagctatgaggctggagatggttctggagcagtgaactgcagaggaaagaaggctgccctacccctgggccaccaatcactagcagtgtgacctccggcagcttcttctcctgccaaatggggatgtttgcttcactgacagaaacacagtgggtgaaccgggagtgagcggcccacttggctgaccacttaccaacatttcggcggggcctcgtgctgagacctctccccaccctgacggaacagtcagttggaaaacagccagtagttccattcccactaacatcttatagtgaccaataatactctaccataactgtc

SEQ ID NO: 1211 - DNA, 468 bp, Homo sapiens
ccgggcaggtacaaaaattctgttatgaatgacctgggtcattctccctgcctgactgacatcctggagtgtgtcattgaaaaccttcactttgctggcatcttcccaaatttctcagacaccctctctttgaacctggagcctcctggggaagtattaagagccaaccagctatgaaaacaatgtgctcttccctgtgctaagtgcctcttcttaggcagtaaaatgcttcagtggtatgaacatatggcatcaacatggcctctgaaaaccatgctgggtgtttaacaagcatggagggatgtggacaggctgtgatgagctctggaggcttacaagaacaggacctcccctcccccaggagcaagaggttcctcaagggatcttgactccacatagaccaaggctttgtgggaaagaaagctaagtgccttgaagctattgcattttttttctttaataaaacac

SEQ ID NO: 1212 - DNA, 443 bp, Homo sapiens
cactacttagggcgaattggagctccccgcggtggcggccgcccgggcaggtaccatttggaacttatttttatttaagttttagctcaaggttctccagaatctgggagttgagaaaatgccaatggaaataggaaatatgaaatatccaggatcaatggtagacttttcttcttactgtaacagtgctctggggcacatttcttaccttgctattttttggagaccaagaaaatattgcatctatgtccatccctacatagacctcacaaagcataggtcaaattctaataggcagccatgattctccaattttttgttcacaaataagtcgactgacttcctaattggagtcattgggggtaaggagcaacggacaatgtcagagaggaccacctcacaggtggacttgtgaggggctgggaaaagaaaagacatgttca

SEQ ID NO: 1213 - DNA, 367 bp, Homo sapiens
  misc_feature 353, 355, 356: n = A,T,C or G
ccgggcaggtacttatttctttttcttttttttttaactggtggatttctttaaatgatatatgtatacaatggagtagtgatataggctacaatatggatgcatctcaaaacattatgcttagtgaaagaagtctgatgcaatatcccacatatggtatgtttccacttacagtccagaaaaggcatatactaaattagcagttgcatgggtctgatgtgaaaacatggattgcctgcagatgggcacaagggatcttttgggggtgacaaaaatgttccaaaactaagttgtaatttttgcacaacttttatgtgtgtgtgtgtgtgtgtgttgtgtgttgtgaaaatggnanntttcactcttt

SEQ ID NO: 1214 - DNA, 408 bp, Homo sapiens
  misc_feature 378, 407: n = A,T,C or G
ccgcggtggcggccgcccgggcaggtacatttctgcattttctgaatttccacaagttgggtcagtctaaaggctcattcttcacactcccacaaactatttattactctatgccctttccaagcaaatcgagataggcagttatcaaagcagatgcattatttgggtccacctgaaaaacaactggttctgcccccccctttctcccaatctgcaagcttctgttcatccctgtgaataaaaatgcagaatgacaaaaagtctgggtgacttacattattctccttatctcaacataaatgtgaaatctgggggtgtcagctagtcaatctccaggtcctcgtaaaaaagataatgtgccctggtgggtttttgttntgcctttttcacaaaacatgggaaaaagng

SEQ ID NO: 1215 - DNA, 510 bp, Homo sapiens
  misc_feature 6, 8, 66, 289, 368, 385, 394, 395, 454, 457, 458, 481, 505: n = A,T,C or G
gaattntngctccccgcggtggcggccgcccgggcaggtacatgggactacaggcacgccccaccnttcccagctcatttttgtatttttagtagagacagggtttcaccatgttggccaggatgatcttgatctcttgacctcatgatccgcccctcttggcctcccaaagtgctgggatcacaggccgtgagccaccacacctggccctctatttattctctttaaagaagagagaaaaactattgagagggccaaaaattattttaatttaaatctttacctttanccacaaggggaaaaaaaatggggaaatttttgcctaaattataaggttgaatgaaaagccattaccaccaatggaaacnaggaaaaccaaatcacnattttttannttaaaaaaggccaaaaaaaatttttggaggggcttttattaaagccttattaattgggntanngcctttaattttttttgggggtngggggggaaaggaaaattggaagnaaaaa

SEQ ID NO: 1216 - DNA, 340 bp, Homo sapiens
  misc_feature 1, 20: n = A,T,C or G
nctactatagggcgaattgnagctccccgcggtggcggccgcccgggcaggtactttggcttttgtttctagaacaccaatgagtatatgctcattaagatagtttgatgcaataaatccttattttacttgcctctattactgcattgtaaactgttgtctactttgtcttcttgaaatcctacacctccctcagcccccacatttggcctatggaacattactttatcctgattttccccctaaccttctggcaatgcctctcagactccttccagaactacttttctctgttttccttttaatgatgacaggttatgcaattgtgtcttcaaactta

SEQ ID NO: 1217 - DNA, 391 bp, Homo sapiens
  misc_feature 223, 322, 332, 337, 339, 357, 390: n = A,T,C or G
ccgcggtggcggccgcccgggcaggtactttttttttttttttttttttttttttttagtagggacagggtttagccatgttggtcaggctggtctcgaactcccgacctcaggcgatccgctcgcctcggcctcccaaagtgctgggattacaggcatgagccatcgtgcccagccaatacatttgattttgatctatcagcaaagaggctccaaggtttantatgtttccattttgtattcagggtttcatttgtgtgctaggtcgaacatctttctgtattcaagccgaagttagagatccaaattgctaaaggacttnagcaggccanagctnantgaaaggaaggtccacanaagggccactaattagtaatgaatggctaaaana

SEQ ID NO: 1218 - DNA, 395 bp, Homo sapiens
  misc_feature 7: n = A,T,C or G
ccgcggnggcggccgaggtacttctccagttgagcctctcatttctttcttaaatggctattgaattctgcctgttctcctgcatgggctttgactttgtccagctttgctacagattaacatcacaagggtttctgagttggttctcagccatcatcgtatcctgacttggcacactgtccttcttttacaaggcctttacacctccattctctttagaacaacaccttcattgtccacattcatttgtttacggatcctgttgggaacagctgctccttcatctttgctctaagagaaatttcttcaaacctctcttattttactatattatcctgaaattccttacatctttatcttattatctatttaccctttatctccttgcccatggt

SEQ ID NO: 1219 - DNA, 285 bp, Homo sapiens
  misc_feature 3, 246, 272: n = A,T,C or G
ctncttagggcgaattggagctccccgcggtggcggccgaggtacttcagttgaaaagttgaccaaagccaaaaaatgtctatctggtggtcagtagtttgataggttcaaggagttgaaagaagcctaggatggctgggacatgtagatcatagtgctaagagatggaaagcaccttgtgctatttggccgtttcagttgtgatgttttttaagtagagtgtttgtgatcagaagggccctttanaaagattgtggctagaatatggagancaaagaggagacc

SEQ ID NO: 1220 - DNA, 487 bp, Homo sapiens
  misc_feature 24, 31, 35, 41, 70, 72, 94, 111, 117, 123, 125, 131, 133,135, 137, 139, 141, 145, 147, 149, 153, 157, 159, 161, 163,167, 172, 174, 179, 183, 187, 189, 193, 195, 199, 210, 216,219, 247, 280, 289, 291, 293, 297, 311, 318, 328, 335: n = A,T,C or G
  misc_feature 339, 342, 347, 361, 368, 372, 377, 378, 386, 388, 399, 417,419, 429, 460, 467, 471: n = A,T,C or G
ttgcaacttaattaaggggggggnccgcaanaatntggggnaaagacccttcccccaacccccggcccgngnttgggggaccgggggcctccgncaccccgggggggccanggggtnaacctntntatatntntntntntntatntntntatntatntntntntctntcctntntaatnggtntatngnaagngngggngaaaaaattgnccttgnganaagataattttggttaaaattggggggnttaatttgggggaagaaaaccaattatttccanttaattaanangnttanaattggccttaagnggggttnggaaagattnggggttnaagnganaaaanattttttttttttncaattanaggnaaaanngggttggntntattttgaaanatttttgggggtttcccntnaaaacaccgngaaaaaatttcccagggggggggggtataanttgcacntttngtttccccgaaaaatt

SEQ ID NO: 1221 - DNA, 437 bp, Homo sapiens
  misc_feature 186, 241, 245, 250, 297, 300, 305, 332, 336, 340, 356, 360,367, 374, 401, 419, 423, 437: n = A,T,C or G
aggtacttgagggcatcattaaaatcagccagtgttcagtgagagacttaatgatggatttaatagtattaaatgggcaaaaatgcccttggcctttacatgctcatttaaaaacatacaaaagagcagtaattcaggcagttatacttctctcaaagattttgctctaaatcacagatggcagcngggtaggccacggcatgtgttgcttggctcacacctccactcacttccaactcgnaagnccagnaagttgccttcgttgggggttcattaattaagacaaactcacccgcnaanactcngacctctttttaaaattcagcagggcncagntggncatgcacaaggactgngggncattagnaccgggnaagaaaaaaacaaaagccaggaaaatnggttccaaagggtgcctnctcntgggaagccctgcn

SEQ ID NO: 1222 - DNA, 341 bp, Homo sapiens
  misc_feature 197, 223, 333: n = A,T,C or G
ctacttagggcgaattggagctccccgcggtggcggccgcccgggcaggtactgggattataggcgtgagccaccgcgtctggcctctaacgagatatttctaaaggttaggccttcagtcaagaattttaaagctggatcttagaggttatctaaactaacctctccatttcatagataaggaaagtgagtcccanaaaagcactggtttggacaagttcanaaagctaaacagtgactgtggatgtatgattctgtctcttaactcctaatccaaatgtcttctcactagataaggctgtgccttctacatttgaaggctcaaaccccatnggatggat

SEQ ID NO: 1223 - DNA, 293 bp, Homo sapiens
ccgggcaggtactgggattataggcgtgagccaccgcgtctggcctctaacgagatatttctaaaggttaggccttcagtcaagaattttaaagctggatcttagaggttatctaaactaacctctccatttcatagataaggaaagtgagtcccagaaaagcactggtttggacaagttcagaaagctaaacagtgactgtggatgtatgattctgtctcttaactcctaatccaaatgtcttctcactagataaggctgtgccttctacatttgaaggctcaaaccccatg

SEQ ID NO: 1224 - DNA, 410 bp, Homo sapiens
  misc_feature 10, 86, 88, 135, 164, 220, 226, 230, 242, 256, 281, 318,320, 362, 376: n = A,T,C or G
ctatagggcnaattggagctccccgcggtggcggccgaggtacttttttttttttttttttttttttttttttaaattttaagtananacagggtttcaccgtgttagccaggatggtctcgatctcctgacctnttgatccgcccaccttggcctcccaaagngctgggattacaggcgtgagccacccatccggcctaaccgaagaactttatttttncctcancttngatgggcggttnatttcattttgctnactcagcctgtgccacggaattaanttgggcactgggaatttccaaaaccaacaagacattntntgtcatcagggaactcacagcctattatgagagataaacaantgaacatgaaattntaattcagtaacaaagaatgagtgttatggcaaa

SEQ ID NO: 1225 - DNA, 442 bp, Homo sapiens
  misc_feature 1: n = A,T,C or G
nctatagggcgaattggagctccccgcggtggcggccgcccgggcaggtacataaggggcccaatacaagcaagcataaataatcttgaaaataagagaaatctgagaatgcataattttttagttgatgataaacaatagttttagaacttaaaccataattttcagatgcttgaaaaaattctgatcatcttcaaccatggtatttacatgaaccacaaaaacatacaataacatacactctccaaataacaaattgcactcctacttactcctatttctctactcagtgcccatttcctcaaaaaacttttcccaattagcaccaatgaaggacaacactcagactaccctattctttaaacagacatgaatttgtccaatatacatatatgtatttcctggactattagggtcctaaaatctttagtaaagaaagcaa

SEQ ID NO: 1226 - DNA, 318 bp, Homo sapiens
  misc_feature 38, 192, 200, 214, 231, 240, 247, 257, 280, 282: n = A,T,C or G
ccgcggtggcggccgaggtacatccaaaatcatttcancatataacctgtaaagactgcatcatcccagctactttcctgctgacttccacttgggtttactcaatgggtgacactcacaggacataagagattagaaagagggataaggttttttattatatctagctccctccttacttaaagccatggntttagcanaggcccaaggtcgnggctttttttgagcagnccctttatnaaaggtntggaaagagnctaccttccccctcacaactgantnatgaggcttactactcccccgcgtacctgcccgggc

SEQ ID NO: 1227 - DNA, 422 bp, Homo sapiens
  misc_feature 240: n = A,T,C or G
ctccaccgcggtggcggccgaggtacaggttctttgaatgcagtatttattcacatagttttcattttctgtcctgacaaaaacttggtgatgcttgaatgattacagaacaaataggattgtggtttatgtttcctattatgcatatttggcagttgaattatgacattagattgggacatggtgagagggggcaggatacggggtaggaggaggggagcaagttacaaaaggccccanttccgggaagctgggctgagttgttctgtttaacttcttcttcctttattcctatggttttatgattgcaaattggcagtggcagggcagctctgactatatttgctagaagcagatgtccacattaatttagatgtttaggggattaaaaatcatagagggtggccgctaggaaatataga

SEQ ID NO: 1228 - DNA, 592 bp, Homo sapiens
  misc_feature 162, 178, 182, 186, 204, 219, 226, 235, 237, 308, 315, 316,323, 325, 335, 367, 371, 376, 384, 386, 423, 440, 454, 455,462, 489, 506, 516, 521, 528, 533, 535, 543, 549, 558: n = A,T,C or G
aggtactatatgctagaaacttggctgaatgatttgacattatcctatttaatgttcatgacaatccaataacgtaaccactcatatctcccttttgtgcagataacaaactgaggcccagagaaatcaaatatgttgtcaaaatctacatcgttgaagagnatgggttttcaaaatnccanggtncgggctttgggccccttngccaccgaactttcnattaaantgaaaaatncncattgggatgaagttgtttacccaggttttctgggttccattccctttgccttttattttttccaaagggngttcttnnattccantncccccatgcncacttggttattcaacctttttttttttttgntttnacaangggccttntntaccttacttttttttccttaaccccaaatggggaanaaaaaggaaccttatanttggaattaatttnntattttnttccttcccaattaaaagccctttggngtaaaaaattattttanttccaaattncaacnccattanaaaanantttccaangccccntttcccttncttggggttaaaacctttttttggggaaggaacc

SEQ ID NO: 1229 - DNA, 506 bp, Homo sapiens
  misc_feature 189, 192, 261, 272, 276, 280, 282, 297, 318, 328, 331, 341,359, 362, 375, 383, 386, 388, 391, 392, 393, 394, 396, 397,407, 408, 410, 414, 418, 421, 423, 424, 426, 428, 439, 451,452, 457, 459, 463, 479, 481, 492, 493, 494, 495: n = A,T,C or G
cttagggcgaattggagctccccgcggtggcggccgcccgggcaggtaccatactcttttggttgctataattctgtggtataatatgaagtcagaaaatataattcctccagttttatttatttatttatttttgcttaggatagtattatttcttatagtgaaagcattctatgttatttaataatnagncccaatttgggagtttttacaatgctatcctcttttacaaagctatgatcaactcagttgtgtccagancaggatcattntgtngctntntgcaaaagtagcaantattcctggctgggcatgggnggctcatgcnttntaattcccancactttggggagggcccnagnacatggcctggantcaccccngangntcnnnngnnggtttctaannanccancccntgngnntnanacaatcggtgnaaaacccccctnnggccntncccnaattaaaaaaaattancnaaaaaaatttnnnnccccggggggg

SEQ ID NO: 1230 - DNA, 351 bp, Homo sapiens
aggtacaaagaaatgaagtaatgtcaaatatagaataatggtttctctggaggagactggaatgtgggtatgcaatcaacagcttctggactgtcactgtttcactgttttatttcttaaggtgaattattcattattctttatattcttttaaaatgttatataactttatagatcaattaactaatgtttggctccttttattttagagatctccagcattttaggttgcctcatcaatagttggcaaaaagaggccaggcacggtggctcacgcctataatcccaacactttgagaggccgaggcgggtggattactcaaggtcaggagttcgagaccaccctggcca

SEQ ID NO: 1231 - DNA, 355 bp, Homo sapiens
aggtacttgtaggttgtgatttttttttgtcaacctgattctgtctgttttttcttaggaactcatcaaaatttccagcctactgataacactccattattttctagcacagcagcactgttaggaaatttttcttaaatatgcacgtagtaaaagtatatatataatgtatatatacacttaaggacatatattacatatggacacacaggtgtatatgtgtgtatacacacatgtatatattcccagtgactttcaggtggagatgagctagatatacacgttcagcattttaatgcaatacttaattataattcataagtgaccaccactgtatgcaagccattattatgat

SEQ ID NO: 1232 - DNA, 268 bp, Homo sapiens
  misc_feature 19: n = A,T,C or G
aattggagctccccgcggnggcggccgaggtactgggattataggcgtgagccaccgcgtctggcctctaacgagatatttctaaaggttaggccttcagtcaagaattttaaagctggatcttagaggttatctaaactaacctctccatttcatagataaggaaagtgagtcccagaaaagcactggtttggacaagttcagaaagctaaacagtgactgtggatgtatgattctgtctcttaactcctaatccaaatgtcttctc

SEQ ID NO: 1233 - DNA, 457 bp, Homo sapiens
gggcgaattggagctccccgcggtggcggccgaggtactggtctgtggcccaggggttggggaccactggattagtcaacaagagtagttgttcacttcttcatcctccctagagcactaattagcaagaaaattaaagaataaatttaacatttacccctggaggttcaaggacaagttagaagttaataccttaactttcaagtttcactcaaatgtgcataaagctccattagtgctgctattggtttcactaactccatccacaattctcccgaaaacagaaaacctcatacaacaaagccaaacctgaaacacaatcaggtttccaccaggcagaagtatggtgactaagcctagtggcctcggcactgctggacactgaattgcaatggggtaagtgaagagttccaaagccaagggaagcctcccaacagcatagcttggaatggagtga

SEQ ID NO: 1234 - DNA, 387 bp, Homo sapiens
  misc_feature 225, 330: n = A,T,C or G
atacactacttagggcgaattggagctccccgcggtggcggccgcccgggcaggtacttttttttttttttttttttttccttctcttcttataagacatctgatttaaaaaaaaaagaataatagatttaagaagaaaaaaattagctaataatgacagcaggcttgtaatattatcataatgtcatttatcatagatatccttattctccagggcagcacttntcaaatccttgacagtatgacattttgggccagctaattccttagggagggacctttcctgaatattcaggccgttgagtggcctgcttggccttgacccgctcnctgccagtagcacacctcccccaggcttcagcagcagaacacctcccagtcacttca

SEQ ID NO: 1235 - DNA, 147 bp, Homo sapiens
  misc_feature 16, 71, 75, 89, 90, 115: n = A,T,C or G
gactcactatagggcngaattggagctccactcgcggtggcggccgaggtactatatgctagaaacttggntgantgatttgacattannctatttaatgttcatgacaatccantaacgtaaaccactcatatctcccttttgtgc

SEQ ID NO: 1236 - DNA, 394 bp, Homo sapiens
  misc_feature 295, 372: n = A,T,C or G
ccgggcaggtacgatcttggctcactgcaacctctccctcccgggttcaagtgattctcgtgcctcagcctcttgagtagctgggattacaggcgcgtgccactgcgtccggctaatttttgtatttttagtagagatggggtttcaccatgttgggccaggctgatctcaaactcctgacctcatgtggtccacccaccttggcctcccaaagtgctgggattacaggcgtgagccaccgcgctcagcctacaagcaatttttttaaaaactgacacctattactggataaaanttctctgtttaaaatcctatttacctatttttaaaaagataagttatttagctttttttttaaaaataccaattaantttctggttattggataaaaaa

SEQ ID NO: 1237 - DNA, 381 bp, Homo sapiens
  misc_feature 2: n = A,T,C or G
anggcgaattggagctccccgcggtggcggccgaggtacgttcagacagatggtgccaggagtgtaaaataatttattgtctaaggaatttcaattttcagttagtggtaaggataatagaatctttaatttggtgcagattttcagaagattctgaaaaacaaaaaaagcccttaaaaattaagagttgtaaggattgaaatttgcagggaggtggatgactttatttttgagtgcattttaaatgaaaattgatgggttttttatgaggtcatgggaacttttgcatgaggtggatagaccagttggccacttcagggggctggcaggggaaccgctggttggtcatcccgcatcttggtgcaactgctttgctgccgt

SEQ ID NO: 1238 - DNA, 346 bp, Homo sapiens
ccgggcaggtacccctcactgccactacgagtatcttagctcacattggtttaatcagtctttagtaaccccagggtgtctaaacatttccatgtctaaaggtgtctttaagaatgggaaaatagtcccccctgcctttcctcttcacacacacagtataccacttctgcagtgttgactctagacccatagccagcagggcatctgctgttaaacctggacgctgctggctgtggctgaaactgagttatctactggacagtgtgtttgtgtcttatagcaatatcagtagttgaatcatgggccatacttcaaatttcagactccctttcccttgtggttttga

SEQ ID NO: 1239 - DNA, 400 bp, Homo sapiens
  misc_feature 118, 179, 217, 261, 308, 326, 337, 349, 382, 391: n = A,T,C or G
cttagggcgaattggagctccccgcggtggcggccgaggtactttttttttttttttttttttttttttttttattttgagacggagtctcgctccttcgcccagcctggagtgcagnggcgtgatctcggctcactgcaagctccgcctcccgggttcgtgccattctcctgcctcancctcccgagtagctgggaccacaggcgccccccaccgngcctagccaatattttgtatttttagtagagagagatgagtgtntataatgccgtaggaataggtaaaattacctagagagcccaagtctntaggaactccaactttanaagtcaggcanagggaaaaaggngttccaaattttttttttttaaaaaagagagtntttcaaagnggaaataaa

SEQ ID NO: 1240 - DNA, 473 bp, Homo sapiens
aggtactatgtgtggttcacccactgtcttactctctaggaacactgaagtgatttgtttgcgtgccctgcagcacagtccttggtcccctctcaacatgccaccccacacgtttttgttacctgaaaattctatttgtatcactttctccaaaatggctaggtgcagcctaggtcagaattaatcgctccctttcccgagtttccacatcttattctttgacttatccaaatttctaccacttttgttattgctcctgcttacattctgtcccatattgaacatgtggtatatgccaggctctatgctttctctttattattttattgccttcttatgtaaccctacaaaatgttttttttttttcttataaagaaatggaagcttaaaggaggtgacattctctatgatttgcttggagtatgtttctgaactaaggctgctgtccatatccagcatgcggtacctgcccg

SEQ ID NO: 1241 - DNA, 375 bp, Homo sapiens
ccgggcaggtacaaaaataaatttgacacagctcttgacctcaaggaatttacagtctgggactatttgacaggacttttatggtcccctttgtggttaagaaagcataaataggttttaaatatcatgtgcagaaacacatagcatgttcctacatgactcacaatttgagcaattatacagacataatccagtatcaaaaatggaataaaaaggaaagaatacagaatgagcttctccaattttcaatttccattgttaagttaggaagtcccaaactacatcagaaaaaaatttagaataaatgaattcactgataaagagaagagagaaaagaaagccaacacaagaaacttactctaagaaaaaaggcag

SEQ ID NO: 1242 - DNA, 330 bp, Homo sapiens
  misc_feature 272: n = A,T,C or G
ccgcggtggcggccgaggtactactggcttcccagtggttgggttgagtataagcccccaaatatgagtaaaagaagaaaaagttaattcaatcaccaagtcttgctcgcatattaaaaattggatagatgaatgttcaatcatatgttttggctttggccagccagacgaggtcaatttttagatttgaactgcttagaattcttcaggcaagtcttgatggagcacttcttggacagttagaactttaccaggctcacaggagagctcanatgaagcgaacacctcattccacactggtttcctttggagacctttactgttgagagg

SEQ ID NO: 1243 - DNA, 406 bp, Homo sapiens
  misc_feature 335: n = A,T,C or G
actacttagggcgaattggagctccccgcggtggcggccgaggtacgcgggggggactacaggtgcccgccaccatgcctggctaattttttatattttttagtagagacagtgtttcaccgtgttagtcaggatggtctcgatcttctgacatcgtgatccacccgcctcggcctcccaaagtgctaggattacaggcgtgagtcactgcactcagtcaggttttcaggtgctggttccatggctcttcctgagccgaaaataaggaaactccatagaccttgtccactggaactcgttcccatctaccctccactctatccagggtgaatggnatctcttgcagtaaagtggaaaggaggttcttcatgggccccccaagggtttataatcccattcttaggaa

SEQ ID NO: 1244 - DNA, 417 bp, Homo sapiens
  misc_feature 6: n = A,T,C or G
tcactnctatagggcgaattggagctccccgcggtggcggccgcccgggcaggtacactacgcaagataatactcttcaaaaagtgcaattactatgagctatgagctttatctcatctgctacttccagtttatacctttgttatttaataaccattgcttccctcactagttacttcaaactatatttcaaaatcaggggagagaaaacgatgacttgtgaaatcacctaacaaagtgaaaaatagactcaaagttttgattccatttatgtgtattcactggatttaagacctgcttaaaagccttagaaaaatgatttaaaaatactggacctctggactattatgtggggctgttgccatcatcattaaacccaccccacccatcattcaactttatattggaaataggtaa

SEQ ID NO: 1245 - DNA, 421 bp, Homo sapiens
  misc_feature 419: n = A,T,C or G
actcctatagggcgaattggagctccccgcggtggcggccgaggtacgcggggattctcaatcctacccatgatgcagacagattacctcatttcagctcaataaaacatcaccaaattcccttaggcagaaaaagggtggggagtgccctttcttgaaggaatcccttaagtgcacgtctcccgttttcttttcacatcaatgcagagtccctctgtgaatttacaacacccaacacccatgagttcagtccttaagaaggaaaattgggcaagtatttaattggttggacattgcataaaagaggtccatatccaggctaactctagaaattttattctcaaacttagttggcctctttttcttctgtcagagggaccattcttagtggcactggggggaaattctttggcacccanga

SEQ ID NO: 1246 - DNA, 360 bp, Homo sapiens
  misc_feature 24, 40, 78, 115, 116, 119, 133, 134, 153, 159, 174, 183,191, 197, 203, 204, 207, 216, 217, 218, 225, 229, 233, 236,244, 259, 261, 268, 277, 278, 281, 293, 297, 302, 310, 313,326, 333, 335, 340, 360: n = A,T,C or G
ccgggcaggtacgcggggagtagnaagccacattactcanttgtgagggggaaggtagactctttccagacctttganaaaggggctgctcaaaaaagccacgaccttgggcctnntgntaaaaccatggctnnaaagtaaagggaggggagncatatnatattaaaaaaaccnttaatcccnctcttttncttaantcaaannttnatgttcccnnnagaagcnggtncacnccnatatgtangtaaaaaccctcatngntgggaanatattcaanncanggggaaaatgtnatgncttgnggcattgnaantggccaagtaccnttttaancnagggncaaccccttaaccaaaattn

SEQ ID NO: 1247 - DNA, 452 bp, Homo sapiens
  misc_feature 3: n = A,T,C or G
ctncttagggcgaattggagctccccgcggtggcggccgaggtacgcgggatattaaaaatatgtaatcccagcactttgggaggccgaggtgggcggattgcaaggtcaggagttcgagaccagcctggccaatatgatggaaccctgtctctactaagaatacaaaaattagccagatatggtggcgcgcacctgtaatcccagctactccggaggctgaggcagaagaattgcttgaacccaggaggcggaggtttcagtgagctgagatcacgccactgcactccagcctgggcaacagagccatactccatctcaaaaagaaaaaaaaaaaggtatattcaggtccagtggattatatgttttcttgctactgaactgtatgagtttttttaaaaataaattttgggtattaaccccttatcagatatacagcttgtaaatattttt

SEQ ID NO: 1248 - DNA, 393 bp, Homo sapiens
  misc_feature 389: n = A,T,C or G
ccgcggtggcggccgcccgggcaggtacaccattagaatcctacctcaaacatgcaatggtgggaaaagatttacaatttaaaatttaaatagtagttaagctaaatttattttggaataatttaggtttccctggataatttttccacgttcatctcaacattatataaattcattcacagtcactcagggatgagtaagtaatgcctccaaaacagcctggtcgtgggttcttctgagtccatctggcttctggctagaagactggaatgactcataaaaatgaagcaacctggggtcacctactccaggtcttttaaaacaggaattgcccaaactgcttaccaggtggttccaatttcccgaggaattacttaaaataagggganaaaa

SEQ ID NO: 1249 - DNA, 313 bp, Homo sapiens
  misc_feature 156, 221, 251, 264, 273: n = A,T,C or G
aggtacatgacgtctcttttttttaagaattttaattttcctagttccttatctttttaatgattattctttaagtggacatttaagacatgagcttttaagagcagctgaaaattattggttgtttactatgggttttatccatttgtatactgnttttttttctcagctatcttcaaaatagccataggaggtagattccattactattttactctaanaagagaaaactgagttttaaagtgttaaanaggcaggaccaanatgaagatnccaggtgaaagtaactaaaggttgttagcataacaattca

SEQ ID NO: 1250 - DNA, 294 bp, Homo sapiens
ccgcggtggcggccgcccgggcaggacccagaggacacagttgaaatgaggcacaattaggaaaaactaggctgtttaatatccatattgagtagctttgcaagttactttcacaaacttccctacagaattggttctaacagaactgttcaaggccaaggatttgttttttctgggtctgggggagtcatctttataattttaatattccattagaatgccttgacgctagaaggagggtccatctcaatcacatcaataaattgatcccaacctttataaaaataagcttgg

SEQ ID NO: 1251 - DNA, 277 bp, Homo sapiens
  misc_feature 149, 161, 212, 224, 238, 244, 245, 260: n = A,T,C or G
ccgcggtggcggccgcccgggcaggtacagtggagacagcatgagcattagagtcagaatacttcatccaaattcaagtatttgtttagttataagggacagaaatcgaactcaaactagtttaacatgaaaggaattagttggctcanctggcacacaanaatcccaaaaggggtgagataactgaaccaggagggtccactttgcaaaanggtcttttgtangcaacaagggcttnagcttnnaaacttacttccctnttcagaaactttaatat

SEQ ID NO: 1252 - DNA, 176 bp, Homo sapiens
  misc_feature 132: n = A,T,C or G
ctacttagggcgaattggagctccccgcggtggcggccgcccgggcacggtacatcattctgcatgattcacggactaggagtccctggtcaaaaacttcaaaaactaagtgatgggtcccaagttactcantggcagaaacttgattcagtaacatgtcagcttgtgggcttgaa

SEQ ID NO: 1253 - DNA, 403 bp, Homo sapiens
  misc_feature 330, 360, 363, 382: n = A,T,C or G
ccgggcaggtacacatccctgacctccagagcagacttagctgtcccttcctggcaccctctcggaaacactctcttctcttggcctccgtgattcttctatctccctaaccagtttttgtctctcttttgggacttctcttctaccagctctgaaagaaagttctgtccttgcttcaggtttctatcttcggcctgtttgtccttcaacacactccccataagggaccccattctctccaagccttcgttcatcacccagatgctaatgagccctaacctttatcctgacttctgtgaactctggatccgtttccagtgtcctacaggnatttctccacctgaatgtcctcatgacacnttncatcttcagaatatacaancttgaaactcattacttatac

SEQ ID NO: 1254 - DNA, 541 bp, Homo sapiens
  misc_feature 144, 188, 190, 205, 236, 240, 256, 281, 298, 306, 328, 338,352, 359, 363, 366, 370, 382, 400, 416, 433, 446, 450, 463,466, 476, 485, 491, 496, 505, 513, 519, 539: n = A,T,C or G
aggtacttctccacccttcttacatttatttatgcctagcactgttactttccagaaatgaattaatacagctatcatcactgagtctcaattacttgatagatgacaggaacatcctctgatctctatgggatgaagaaatgnttagccttttattacccttaaattaccttgcttgttttgccaancncaggagtagtatagncaaaaggtctaatagtcttgtagggttgagnatgntaagtaacacccttgnccctacctaatgttggtgatggganaaaagtttttaagttgngccaatanaacattgtcaaggaattttacnttaattttgntattggaatggagnaaatatngtgnatncagnttaaatttctgngcctccaagtaaattggnattgaagggatgtagnaatttttctgttaaagnccaaacaacaacncagncaattcataaatnccntggaaaaatncaccccttnctgggnatccntattttttntaataaanggtttngttaaccccgccccttggcngg

SEQ ID NO: 1255 - DNA, 382 bp, Homo sapiens
  misc_feature 24, 338, 342, 346: n = A,T,C or G
ccgcggtggcggccgaggtaccangggatcggcaaactttaaaggcccagacactaagtattttaggttttgcggccataaggtcttggtaacaactactcagctgtcactgtagctgaaagcagccacagatgcaatacatagacagatgagtgaggctgcattctaatgaaacatttataaaaagtgggcagggctgggcgtggtgtctcatgcctgtaatcctagcactttgggaggcccaggcaggtggatcacctgaggtcaggagttcgagaccagcctggccaatatggtgaaaccctgtctctactaaaaatacaaaaatcagcttgggntgtnggtngggggcgccacctgtaatcccagcctattttgggaa

SEQ ID NO: 1256 - DNA, 164 bp, Homo sapiens
  misc_feature 2: n = A,T,C or G
tncttagggcgaattggagctccccgcggtggcggccgaggtactgggtacgcacagagatgagaaataatagaaacctttttgttcggttgtttcaagagctaacattgtcaaaagctcaattcctgttttatgtaaggttttggtttatattttctcaaaga

SEQ ID NO: 1257 - DNA, 403 bp, Homo sapiens
aggtacataataggatattatatattagaaataaatgactaaatacgtatatagcaacatggaataaacaaaagacatacagcactatgccatttatatatataaagtatatatacacagagatatgtgaaaccttgaaaaacagaggataatctgaaggatgtatgttaaaaattcaaaagtgggccgggcatggtggctaacacctgtaatccaagcaccttgggatcacaggcgtgagccactccacccagccacctcttttcaagttacccagcctcagtatttctttatagcaacacaaagaactaacccagccataaattaagaaatatgaacactttaggggtgggtggatcatgaggtcaggagttcgagaccagcccggccaacatggtgaaac

SEQ ID NO: 1258 - DNA, 388 bp, Homo sapiens
  misc_feature 280, 321, 379: n = A,T,C or G
aggtacattttacactgtcagctatgggttcagtcagatatgcccataaattcatttatgaagaagagctccctaaacttctaatgattttttcctggtggttttatttagctccaaaaacttatgtttttttttcttaaaaaaatcccataaaaatattcattatcaatacatcatattgatgatatcactcaagaaggagatgtctcactctaagcattattataaaaattcacaggcagtccacttttctagaaaaatatgccagtgatccttctanccttttgcatcctgggattattaaaccaggctgctgagcanccttgacacctgctctgtgaccaatgctccaggctgtttattttggcctataactctnaaagtttga

SEQ ID NO: 1259 - DNA, 306 bp, Homo sapiens
  misc_feature 155, 178: n = A,T,C or G
gcccgagggtaccgtttgaaggtgtctacaaggcaccaccttagacctttctgaattcttaaaaggttgtgcagtttcaccctgggtttgatttttgctctgaaaccatttcttggctcaagaattgtttgatgtgtggagagattgggaatganaaacaggtttatatttaacagtntattctttagctcatctctctctgctcacatcttataggcagtgagcagaacccaggtgtcactttaagtggctgcctggaaatctctttagatagatcattgagttcattagggtgcatttccgctt

SEQ ID NO: 1260 - DNA, 330 bp, Homo sapiens
  misc_feature 261, 301: n = A,T,C or G
aattggagctccccgcggtggcggccgcccgggcaggtacattattcatacactgtaatggcgtaaaagaaccctagacacatggactcccttgctaataagtgcaccttcaaagcgatagtcattatttagcatttatcggaagaggctggccccagctctggtgaagggcagagaaggtgtgggtggcctcacgtgttctcaatgtcacaaaatgatagcattaaacagacccactccctcatggaaggcaatttgacnaccttctattgatattgcaacatgtgtctctggcagcagnatctcaatccttatgtaagggatatggga

SEQ ID NO: 1261 - DNA, 433 bp, Homo sapiens
cttagggcgaattggagctccccgcggtggcggccgaggtactggatatttttgcatataaacttgcagtaatagttcaaaaattaatagtttttgacattggcttttctgagaagagaaattgaaagtgtcacaaaataaaaaaagatgaaatgaagcatatataattgtcaattttttcaattttctagccaacagagaatcgaaggattctgttcaaatattagtaaaaattgaaaataaacttgtgcttatattttgtttgcaacacactagttaatttaacctgtgactagttatctctaccgaaggtggatgtgtagtttctggttttaaaattcaagcaaactggaaaataatccatctaattatgctttctttcccaagaagttttttaatgatatgccagcttcctaatttggagacaaaagcc

SEQ ID NO: 1262 - DNA, 984 bp, Homo sapiens
  misc_feature 21, 28, 34, 37, 48, 55, 59, 65, 67, 69, 71, 77, 83, 96, 100,102, 104, 106, 118, 124, 128, 130, 134, 142, 144, 151, 153,155, 163, 165, 169, 171, 173, 175, 183, 189, 199, 206, 210,214, 216, 227, 233, 241, 249, 257, 263, 265, 286: n = A,T,C or G
  misc_feature 304, 312, 313, 342, 343, 382, 388, 398, 408, 409, 421, 428,438, 446, 450, 454, 463, 512, 524, 528, 533, 549, 551, 558,569, 571, 590, 612, 615, 618, 621, 623, 631, 642, 644, 645,659, 692, 720, 730, 755, 759, 769, 797, 803, 806, 821: n = A,T,C or G
  misc_feature 832, 838, 841, 845, 846, 868, 903, 905, 914, 930, 981: n = A,T,C or G
gttaattacgactcacttatnagggggnccgganatntggggtaggcnttccacnccgncggggntngngnccgggnctccgngagtgcttaccgnccgngngngngggattccgacntcttcncatngnggtncacctacngncacttcncntncaccgtcntngatncntncncccctcgngcaagntctacctttngaccaanggtnccgngnccccaagaganaattgnttctttcnaagagacnttggaagntttttngnaagaaaaaaaagactttgtcnaagataagcggaaagcgnttttatgnnggccacccccttttaaaagggaaccccannaagggcctccattttcgggggaaattgggaagggggaanggaaantttgcccttngtttttccannttcctttaattngggggcncccaaccttnacctaaanaccnatanggccaaaanccttggttgggggggccccggaaaccaatttaaaaaatttaaccccaangaaaaacccggnggcntcccnggggggggaatttggntnttggggnaaacctttttncnacccggaggaggcccaatnaagggggtcctccaaaaagggnttnggnggngnaaattggncccccttgggngnnaaaaatttgggaanggccttttgggaaaaaaaaggggggggggaacncttttttctccaaaaagtggtaaaaagnaaaaattggnccccccaatttgggaaaaaaaaagntccntttttaaccnaatttccaaaaacccaaaaaaaaagggnttaatnggnaaaaaaggcaaaggnccctttaatanaagggnaanatannaaaataaatttaaccccgcggnggtaaatttaattttgtaaagtgtaagggaaaccntngggggaaantttttttggggggttntttaaccctttgggtggggccccccaatttgggtttgggttttttaaattnccc

SEQ ID NO: 1263 - DNA, 399 bp, Homo sapiens
ccgggcaggtactctgtgttccgcctgctcaagttctagacttctggtgtccatagcaacccagcagaaaacatctgcatagcctttgggctgacgtgagttaaacttgagcagtgaagcagcataagttttatggtgcaaggcacactacagatcctcccttacccctcacatctgatccctctgcctatgctcagagccactgctatttctacaaatctacaaggcccagactgaggtgatgaccgggccaatctctggaatagtgtcagacaattagatactctttcctgtcttcaggagcccatctggaataaagctacttatcaagtttcaaaaacaacagaaaagaaatgagattgaggtggaaaacaacccaagtgttcatcaacagatgaa

SEQ ID NO: 1264 - DNA, 301 bp, Homo sapiens
  misc_feature 227, 248: n = A,T,C or G
atagggcgaattggagctccccgcggtggcggccgcccgggcaggtacaaggttacctgtttgttccagtatgtgtagggaggggctgggggttggggagagagaagggtggcaattagtcaatgacatttatgacccatttataaaatacaaatgaaataattggttacaaaatcatgacaagccttcacttgtcttttacaaacttgttctcaacacactgtganacttaatggacaccctttgtngaaagtgaggaacaacagccattctgaagagaccgattcaaagcgttcaacct

SEQ ID NO: 1265 - DNA, 454 bp, Homo sapiens
  misc_feature 6: n = A,T,C or G
cgactnctatagggcgaattggagctccccgcggtggcggccgcccgggcaggtacactgaaaatcggggctcgccaacttggattccaacagcacagaagtgaggagaagaagcacaatgaagcataatgtctggataatggctacaacaaccatccctgagaactgcctggtaatatcagggtgataggatgggtttccacttctcctaaaacagccagcagttcttgtatttctaactagaaggcagaaaaaaagagacaatctacattaatcatgatttggggattattaccaaagtgaaaagaatctcatttccaatcaacttagaaagcttatcctactccattaagtgaaagaaagaaatatctctttctaaaataaagcatgtatccactttgccttggcatagggacaggacacactggggcccaaaatagcttccagtccttcc

SEQ ID NO: 1266 - DNA, 378 bp, Homo sapiens
  misc_feature 337, 344, 349, 351, 352, 353, 354, 356, 357, 358, 359, 361,362, 367, 371: n = A,T,C or G
ccgggcaggtactcagctgccagagttttcctggattactgactttactccctggatccagagagggtgttcccagtatctagtctctgcatcttgtcttctgccttagccttttgtcttgctccttaactaatatgattcttgaggtcctacatctgtccatcttagtggcaatgcctttacaccagaatgcctggtcaagtgctaacttactaggacatctgcagagtggggagacgataaagatcaagcaccatctagtctgccctgccctctctctgacttggatatcattcttagatcttctggtcagctctgttgctttattgcagccaanaaaaaanaaaanannnnannnnannaaaanggtncctcggc

SEQ ID NO: 1267 - DNA, 401 bp, Homo sapiens
aggtacttgggagtagaaggcaaagtgggagaggaaaccattgatacaatgaatgaaacaaacaaatgaaacacacatcaagcaagtcttacacatggtgctcactagaaactgggattcagagttgtattaccacagaagtgctatcatcctcctcttttctaggatcaccaaatatatttactaaaaaagcaagtttgtgaggcattgtatcttttctacttgcttggcattagacaggaaagataaaagggttccagaccacatttaaagggaactccctctgaagaagttaacaaactatgtttgtggcaaccatggggttaagtagctttttcactcaactgaaccccatgggaaatatcgactattcagtttcccctcactgctatgcttgtgaa

SEQ ID NO: 1268 - DNA, 437 bp, Homo sapiens
  misc_feature 212, 399, 408: n = A,T,C or G
ccgggcaggtactgggattacaggcgtgagccactgcgcccgaccatgctttgtcattttcacagccacgtggtgttgggaaggttgcttcctcatcctggccctctccatcccaaagcctgattagttaccggactgccttgaggctgtaactccagagggtggcgccgctttatgcccagcaggtgggatgtgccagagaaaggcatctnttactgccacggttttattttactgcaatttcatcctcacacatcgcacccattttacaggtgaagaaaccgaggggccccactgggggaagtggttttattcagttgactcagaattggtaagaaatgaatggcctcttaagacccacccagggctcttcctttgtcagaacctgttcccctaggntcctgccanggctacgaggcaaggcgagtttttcagcg

SEQ ID NO: 1269 - DNA, 356 bp, Homo sapiens
gactacttagggcgaattggagctccccgcggtggcggccgcccgggcaggtacctaacatttctctgctagaagccactttaaattattgttctttttaaaaggaaaatccaatatagttgaaagcttgtgctttataaatatgtgatgcttccctgcattatctgaaagagggagaaaaaccatgtcttgcttttttgggatttaacctgttttagctgatcacaaaatctttattaattgcatttattaagctatatagcactccaaggtcttttgaaattttttggttgcaaaaatctgatgaaaaaattaaattgtataattattcttgtaatttttgcaaaaaagcatgt

SEQ ID NO: 1270 - DNA, 220 bp, Homo sapiens
  misc_feature 200, 204: n = A,T,C or G
ccgggcacggtacaaatggttaagcagatccctcaaattctgctaaaacaagaggaaagataagaaaaccagaaatgtcgcctccatcctggccaatgtagaagagctaataggtgaatgacagcatatttttaatccataacggaatgttggttttcttttcttgtttaatggcttcctttctttaggagaacctgatntgancaagcagaattctgga

SEQ ID NO: 1271 - DNA, 450 bp, Homo sapiens
  misc_feature 9: n = A,T,C or G
atacgactnctatagggcgaattggagctccccgcggtggcggccgaggtacaaaaaattagccaggcgtggtggcaggcgcctgtagtcccagctactcaggagagtgaggaaggagaatggcgtgaacctgggaagcagagcttgcaatgagccgagatcgcgccactgcactccagcctgggtgacagagcaagactctgtctcaaaacataataataataataaaaggtgttagtgtaactgctgtgtggagaatgaattaggatggctgaaagagtgaacactgatttaccaaataggaagttctcacagtagttgaaacacaagttatggtggctaggactgggaggggactatgaagataaaaaaaagcggtctattttgaaatagaaggggatatgttttgaaaatagagaaacaaaagtgactatgaagttaggttgataa

SEQ ID NO: 1272 - DNA, 232 bp, Homo sapiens
  misc_feature 222, 232: n = A,T,C or G
cgcccgggcaggtacatgtatgtgaggaaaaggaggtaaacaaggagttagaaagatgtgatgagaccaggtggtgatggactgaatataaagcaaagacatctggatttttaattctgtagggaatagctgaccaaggtatatgattacatgtctgctttttaaacagctttgtgatttgaaatgctgggttgttattgtttttttttgtttttggctttntttttaaaan

SEQ ID NO: 1273 - DNA, 618 bp, Homo sapiens
  misc_feature 124, 173, 234, 244, 258, 271, 277, 284, 307, 316, 326, 329,331, 335, 336, 359, 376, 397, 398, 399, 402, 408, 414, 416,428, 445, 453, 473, 486, 491, 506, 509, 511, 513, 516, 523,525, 526, 529, 531, 532, 550, 572, 575, 584, 595, 611: n = A,T,C or G
ccgcggtggcggccgaggtactaacaaatgcagtagccaacaagattaccatgcaatcattaaggagaaccaaagaaagagagccactcaaaccagattttgaacgctactaaaattaaagtangttctttgatgaatatgaatgagtattggaaaggattctttgtgataantgatacctctgttggttaaagggtaaggggttggtaatgttgagtattagttctacaagtntttattgggnaaaaatttcacatngacaaaccaaatnaaaaantgtgtcntaaaggaatttgaccacgatatncaaccaagnattttttacntcntngttnnaaagggttaaaatgttttcaagnggatcaaaaaatttttncaaaagtaaaaaaaccttaannnaanaaaacnccattntncttttttacaangacttggaaaaaattcnttttttcncccttaaaccccaattttgntttaattttttcntcaancttttttttaaaagnttncncntcncaaagcnannaantnnaattaaataaaggggggngaggggttaaatagggcctttnccntttaaatanccaattttttnctttgcaacaaaattngaaaaaa

SEQ ID NO: 1274 - DNA, 301 bp, Homo sapiens
  misc_feature 217, 232: n = A,T,C or G
ccgcggtggcggccgaggtacctcttaattagccaagaataagtgccgtggaagaaggcaggatgactttttagaacccatttttagctcgaagatcactgagggagccatcaaatccatccacctgttcaatcaatattcagccagcaagtggggtgtcaaggtgagcagcttacagtgctgagcacactggaaacacaggtgtgtaagggacagncacggtctcaaattncattctgaaagggaatactaggtaagtggatcccaaacatgcaaatatcattccttggtcctgggatgt

SEQ ID NO: 1275 - DNA, 428 bp, Homo sapiens
  misc_feature 348: n = A,T,C or G
ctacttagggcgaattggagctccccgcggtggcggccgcccgggcaggtactatgcacttcccatgctcctagggttaggaatagtttcaaacatgattggcagacataacaacggcaaatactcggactggggcataggactccagagtaggaaaaggacaaaagatttggcagcctgacacaggcaacctacccctctctccagcctctttatgaaactgtttgtttgccagtcctgccctaaggcagaagatgaattgaagatgctgtgcatgtttcctaagtccttgagcaatcatggtggtgacaattgccacaaggggatattgaggccagtgccaccagnaggggtggttgccaaagtgccacatccctttcccgatccattcccctctgcattcctcgggagccacccccagtttgcct

SEQ ID NO: 1276 - DNA, 251 bp, Homo sapiens
  misc_feature 63, 84, 100, 116, 146, 151, 154, 158, 188: n = A,T,C or G
atgcatagtaactgctcatttctattaaaaatactcataaattgaatcacattacaaataagngccatatacttaactgagcantatacacacatacgcnttcctgataggtgatncaaaggcaagaaattctgagaaattctaanattgnganctgnatcatttggatggtatagcaggagtggcanagggaggaacgtttcctaagttcttcacttactggctcctgcacttaggtgaggatcaatgtc

SEQ ID NO: 1277 - DNA, 405 bp, Homo sapiens
  misc_feature 92, 353, 374: n = A,T,C or G
ccgggcaggtaccatactcttttggttgctataattctgtggtataatatgaagtcagaaaatataattcctccagttttatttatttattnatttttgcttaggatagtattatttcttatagtgaaagcattctatgtaatttattattagtctaattttgtagttttacaatgctatcctcttttacaaagctatgatcaactcagtgcgtccagatcaggatcatttgtagctatttgcaaaagtagcaatattctggctgggcatggtggctcatgcttatattcccagcactttgggaggccaagacaggcggatcacctgaggtcagaggttcaagaccggcctgntcaacatggtgaaaccctgtntccaataaaaatacaaaaattagccggggat

SEQ ID NO: 1278 - DNA, 430 bp, Homo sapiens
  misc_feature 37: n = A,T,C or G
ccgggcaggtacaatccccagattttttcatgtgtancttcttatcacatagggagtccaaacatcactttctctgtgagggctttctctccaaagcactgttctgcggtccaaccctaccactgtcactgtcaactcatacacaggcatacacattacacaacgcatacacatgatcactattcaaaatgaccattttccttatttattgtttatcatctacctctcccacctcgccacaccttccccccaaggcgaaggtaggcttcgtgaaatcttaaccttgcctgtcttattcactgctgtattctggtatagcgtctccaacatacttactgatgaataaatatctgtttaacaaataaactctctctcctctactgaaactattgttggcagtcaccaaggacctattcaaaacagaatcttt

SEQ ID NO: 1279 - DNA, 461 bp, Homo sapiens
  misc_feature 7, 51, 417, 421: n = A,T,C or G
atcactnctatagggcgaattggagctccccgcggtggcggcccgcccggncaggtacattgtgacaatttgatacatgcatacattgtgaaatgatcaaatcaggttcattaatatattcatcacctaatatatttgtcatttatttttggtgagagcatttgaaatccactattttatgacatcagtaagataacctaactagaagctcccaatactcaccaccaccctcccaaagatagccaaaacaataagtaagcaactacatttagaagaaaataactaagggaggatgttagaatacattaaaggtgtattagaaactctgtagtgtgcagaaacccaagatggccacatagtacaacagtaaggaaacaccttacctccaccaccctatccctacatcagggatcagtntggnaacccagggggggaaattctcccttggcagggggaaaaag

SEQ ID NO: 1280 - DNA, 335 bp, Homo sapiens
ccgggcaggtacctgaagcttgaattcctgaacttttttttttttttttttgtatttttagtagagacagggtttcaccaaattgaccaggttggtctcgaactcctgacctaaagtgatccgccaccttggcccgaagcgctgagattacagacctgaaccactgtgcctaacctccctgaacttctcaacattctgagttagtcactttccctttggtttaagccagctcgggttacttgcaaccctagttatacagccacttttctacaacacaaacaaaccacctagaataaaattcattttcctcctttttttttttttttttttaatgg

SEQ ID NO: 1281 - DNA, 413 bp, Homo sapiens
  misc_feature 277: n = A,T,C or G
gggcgaattggagctccccgcggtggcggccgcccgggcaggtacaaaaagcaaagaccccttctccatctctggattttaaaaactggaaaaggatgctgagaggattgagccaaagagccagtcctgggacagtcactgtggccagctagtggtgtgctttgtctggccacgctgggtcctgctgctcgctccaaaggggcaacatacttgatttgcagccctggcagaatcatatgattaaagtgtgggagggcggtggtgagggaagtatctncccaaaggaaaagaaggggtttggaacaggtaaaattaacagatgtttacaaaattgtcttaattattttccccaaaatgcatagccagtttttcccaatcctagttttttctctattttacttaaaatgccatct

SEQ ID NO: 1282 - DNA, 526 bp, Homo sapiens
  misc_feature 181, 231, 234, 245, 264, 324, 364, 366, 422, 497, 506, 508: n = A,T,C or G
ccgggcaggtacgatcttggctcactgcaacctctccctcccgggttcaagtgattctcgtgcctcagcctcttgagtagctgggattacaggcgcgtgccactgcgtccggctaatttttgtatttttagtagagatggggtttcaccatgttggccaggcctgatctcaaaactcctgnacctcaatgttgggtcccaccccaacctttggccctcccaaaagtgcctnggnaatttaccagngcggtgaagcccacccgcngccttcaagccttaccaaaggcaaatttttttttaaaaaaaccttgaacaacccttattntaacttggaataaaaaaattttcttcttggttttaaaaanantcccctaattttttacctaatttttttaaaaaaggaataaaaggtttattttaagntttttttttttttttaaaaaaaattacccaaattaaattttccttgggtttattttggaattaaaaaaatttttnaaaggggcnanttttttttcaattttggc

SEQ ID NO: 1283 - DNA, 378 bp, Homo sapiens
  misc_feature 161, 162, 213, 262, 271, 307, 316, 340, 344, 345, 355, 360: n = A,T,C or G
ccgcggtggcggccgcccgggcaggtactgcatggacaggagatgcttagatctgaggtgaggaaatccagagatgaatgttttgtttacctcatgggattgtggcattgttagccactcaatccaaccagattataatgtattaagaatttgaaacatcnngcccatttgttgggttttcacatacacaggattgttatattattttgttancccagggttaatgacaagttcattggtcaagtgggaagatcctaatcanactgaatanttcattcatgccttgctttgtcaataggggaaaaanaatttcaanggacaattcgggataatttcttcncatnnactgaaaccnttttntttcccatcttaccctga

SEQ ID NO: 1284 - DNA, 431 bp, Homo sapiens
ccgcggtggcggccgaggtacgcgggagaataacaagcactctttggtatgggtagcagcagtttcagtgtcttcctgtggtctgtgaagaagagaaacttaacaacaagaagagggaaagggaaggtcgcctaaggagaagacacaggagtaaatgagaagacacaggaggtagagcagcacttgctgactcagaagcattaacatgaaacttattccactgattgaaatctgtgatacttaatagctcttatgtctaatcatatcaatatgcagctggattgatacactcctgcaggtggttggggctccttcactgccatgtatgtcccttttgttgcagatatttcaagattcagcatcatttcagaccctgaaaaatccctgaaaattgaattctcaatagataatgcaactccacataatatctg

SEQ ID NO: 1285 - DNA, 393 bp, Homo sapiens
cacggtacccagtgtctcatttcaggccctcctcatctttattggaccattgcagcagtctcctaactgggcttaatgctctagtctctccttccttcagtgtgccctctacactgcagccagtttcaggaacactaattgagtcatccccctgtttaaaatcattcagtgaccaggtgctgtggctcacacctgtaaccccagaactttgggaggccgaggagggcaaatcgcatgagtccaggagttcaagaccagcctggtcaacatggcaaaccccatctctacaaaaaaattagccaggcatggtggcatgcacctgtagtcccagccactcaggaggctgaaatgggaggatcacttgagctggttgaggtggagattgctgtgagc

SEQ ID NO: 1286 - DNA, 396 bp, Homo sapiens
  misc_feature 178, 329, 374, 378, 390: n = A,T,C or G
gggcgattggagctccccgcggtggcggccgaggtactaagttgccatttaagaacctcttcaggttccccgtctccttgagctatgaaagttttcatgaacacttcagttttaatggcatgccaaacattttgttccatgagcaacacaacagttttaaaaattgccattgagtgtnttaatagaatttagccagctgtttttaaatatatttctatgagccaaggcttacaaaaatgtataaagaggaagtgcccagatataaagaagctttgaaatggttgctgttgcctccttaaaaatcatcattaaacaatctttcaaacagncagtgtttggctcagtaaatttaatcaaaatttggtaagaagtangctntgaaatggaacnaaaaag

SEQ ID NO: 1287 - DNA, 433 bp, Homo sapiens
  misc_feature 72, 139, 284, 314: n = A,T,C or G
ccgcggtggcggccgcccgggcaggtactttttttttttttttttttttttttttttttgtatttttagaanagatggggtttcaacatgttggccaggctggtctcgaactcctgacctcaagtgatccgcccacctnagcctcccaaagtgctgggattacaggcatgagccccctgcctggcctgaaaatttgtttttttaaatactatattgccaattattgcccataaaaaggaataatccttttacacatctatactgcattgcccaatatttaatgnattattcttcaagatgaaagaaatattatntttgaataaactgccttatcttcctgagtattttccaactcttttctgctaatgggttaaagagaaaagcccacagcattcaaaattaaaagtcttcttaagcttatttgaaaatcctt

SEQ ID NO: 1288 - DNA, 429 bp, Homo sapiens
  misc_feature 28, 383, 393, 401, 424: n = A,T,C or G
cttagggcgaattggagctccccgcggngggcggccgagggtaccagggaggggtattgatgtttgaggtccaaactgaaaacccatcacctccttcccactgctatagcagcgttagccctggggttcattatctagccagttcacaccttctaaagtggggctctgaaaatgtcttacttccctcacagacaaagcaattctcaagcctcctgagatcacccaccaaccagagcaactgctgtcacttggaggtgcggctgaattcttctaattgtgacacaaactcttgaaactgtaaatgctgaaagattaaatgaggttataacactcagaaaggttttacaagtaaaaagttaaagttcaaaatcaattaggggtcnttttattttncataatcntgtaaatgggttttaagcttctngcggg

SEQ ID NO: 1289 - DNA, 219 bp, Homo sapiens
ccgggcaggtaccaggattatagttagaatttaccgggactgggtaggaagactggatagaaatctaaagattgctgactcaaacacaatgtggtttctttgctttattgtcacagctctgaattcacaattattagttaaattcataggcactataactttagaaagcaccttcccaaaccaagtattaagtgatttattataatttctctgacttct

SEQ ID NO: 1290 - DNA, 384 bp, Homo sapiens
  misc_feature 276: n = A,T,C or G
tatagggcgaattggagctccccgcggtggcggccgcccgggcaggtactaaaaatacaaaaaattggccaggcatggtggcacatgcctgtaatctcagctactcaggaggctgaggcaggagaatcgcttgaacccaggaagcggaggtggcagtgagccgagatcgcgccattgcactccagactgggcaacaagagtgaaactccatgaaaaaaaaaccaaaaaacaaaaaaaaatgtgtatcttattacagttgagtccttttgtgagacnaacattcagtgtttgctagattattctaattagctacctttgtatggttaggttagcatgggagctgaagataaaatgtcccgtttgaaaaaaatgacagcccttcag

SEQ ID NO: 1291 - DNA, 383 bp, Homo sapiens
  misc_feature 96, 176, 358, 359: n = A,T,C or G
cccgcggtggcggccgccccgggcaggtacactttatctggctctttgcttctttcccaccctctttcccagctctctctctgtctctctcttgtnccctgacccttttttcttcctatgcatacttttttctttccctttttaatctctatatcttaatcctaccaatggccctntgagaatttattagccatgatagggattcttaggcctgagatttcttatcaaaaaatatttttaaagcattaaccgtgtgctgagccctgtgctggatactttaggagattcaaaaataagaccagtctcttctcttcagaagtttccagtaaaataaaggggtaaccatcactataatatnnggaaaagaagtattttagtgggag

SEQ ID NO: 1292 - DNA, 407 bp, Homo sapiens
ccgcggtggcggcccgaggtactatatgctagaaacttggctgaatgatttgacattatcctatttaatgttcatggcaatccaataacgtaaccactcatatctcccttttgtgcagataacaaactgaggcccagagaaatcaaatatgttgtcaaaatctacatcgttgaagagatgggtttcaaatccaggtcggcttggcccttgccacgacttcataatgaaattccatgggtgagtgttaccagtctctggtccatccttgcttatttcaagggtctcatcatcccatccactgtatcactttttttgttacaggctttactcttttctaccatggaaaagactaatgatattttttttctccataaagcttgggaaatattatcaatcacccataaaat

SEQ ID NO: 1293 - DNA, 377 bp, Homo sapiens
  misc_feature 36, 45, 49, 71, 111, 113, 135, 138, 179, 182, 183, 184, 189,199, 205, 210, 211, 253, 273, 326: n = A,T,C or G
gaggtacgttcatctacctattttgcacttggatgnaagtcctanattntttcttaaaaggagggaacatnctagaacccaccaacccttcctgatactgtcacaagattntnattcccttaattcttttaaaancanggccacatttcaactccctgccccgctgcccatttgatganatnnntgttnctctttaggnatcgtnctatnntctttttctttaccactgacagcggcttatttcatatgaatnatatataaaatacatatgcntttaaaagattgttttgatttgtttgcgaattgtttctcttaaagggtctatnctggggaaatgagtaaattcttcatatcctgttcttgcaggaagaaatttt

SEQ ID NO: 1294 - DNA, 431 bp, Homo sapiens
  misc_feature 391: n = A,T,C or G
aatacgactcctatagggcgaattggagctccccgcggtggcggccgcccgggcaggtgggatatgggcagtgattatggcaggtgggataccgcaatgaatgtggcaggtgggatacggcagtgattatgacaggtgggatacagcagtaaatatgacaggtgggatacagcagtgattatggcaggtgggatacggcagtgattatgacaggtgggatacggcagtgattatgacaggtgggatacagcagtaaatatgacaggtgggatacagcagtgattatggcaggtgggatacggcagtgattatggcaggtgggatacggcagtgattatgacaggtgggatacggcagtgattatggcaggtgggatttggcagtgaatatnacaggtgagatacagcatgaatatgacaggtgtggttcca

SEQ ID NO: 1295 - DNA, 527 bp, Homo sapiens
  misc_feature 149, 151, 165, 172, 193, 196, 203, 220, 227, 232, 233, 264,267, 282, 306, 314, 315, 321, 329, 340, 353, 355, 367, 368,370, 384, 392, 396, 404, 406, 421, 429, 435, 439, 447, 454,461, 466, 473, 490, 500, 520, 523, 526: n = A,T,C or G
ccgggcaggtacacatagctcaggaactactgatgcactgccttccattttagtggcagtttgaatttaagaatttctagtttgtcttaagcttttctgtaatctctcacatatatattcttaatttcaactgataatttctttccttnantggctaaataatancccctantttttgcccctcctgaaacanggncatttgnaggaattgcttttttgnaaaattnttttnnattgcccccaaaaaacagttttgggcctttntgnggtaaagggctgggntttttttccatttttccttggacnaggttaannaaaccncaatgggntttggaagagncttacattgggtncncccaattccaanncnatattaatccaagnggcccctntttnggtcttangnttttgccaaccaagntcaaaaanccttgnctanttggtttnttccccnaaccttncgttnaaaaaanaggaaggaattaaaccnccccccaaancaagggtttttttaaggggnatnttna

SEQ ID NO: 1296 - DNA, 489 bp, Homo sapiens
  misc_feature 410: n = A,T,C or G
cgaggtacaaattgctgaggagaagcaggaaacctgtttccttagtggcttttatcccctcggcatgcgatggggctgatgtttctatgattgcctcagactttcacatttactagtagggctgagagaggctttagtgaggaaggaatattcagaataaaacggttgagaaagctgagaagaccattgagttttgatcagttgtgaatagagtgcaaagccatggccaagctgtttttggaaacgctggccggcgtgtcttcagtggaaaaagcaaatcaaaatggagcgagagcaaaggggcgtcctcagtcctcaacctataatcactgtatggaatcgtcctggcagctgaacataggaggtcactggaacaagtgatagtgcaaaattggctttcaaacatcctnctggcttgagttttatcagctacaatgtgggtcctcttttgaagccttaatttacaacagcagcttttttgggggtggg

SEQ ID NO: 1297 - DNA, 480 bp, Homo sapiens
  misc_feature 27, 270, 461: n = A,T,C or G
aacactacttagggcaattggagctcnccgcggtgggcggccgcccgggcagggtaccttccatgatgttgaggagagactctcctatcctcaccacaccagagagtaggtatgcaggttgccaccagtgttctcctccctacccactccctcacttttcttttcattggttcagtagaaggaggggctgtgcagtaaagtctgccgcttggagccacagggacaagccgtcactgcagtgctggtctcctgttcttggaggcacctcantctccttgacctcttagacaccctcctacccccaaggtggggaaggagcaagcagaggcaaaatcccagccctccttgttaagactacagtgactttcctcctctcccttctccgtgtccgtaatgcatagctggaaggaagtgtctgggtggtgatgccagtagctgtgctggtgccatgccaggtgctnttcatgagcaccaaaggag

SEQ ID NO: 1298 - DNA, 439 bp, Homo sapiens
  misc_feature 386, 411: n = A,T,C or G
ctacttagggcgaattggagctccccgcggtggcggccgaggtacgtgaaagcgctttgaagatcacaaacccatttagaaataggtgggttgctcttcctcaaatctttgaaagctgtctactactataaattcattcattcatatctttccctcattcctttcagttttttaaaaatgtattctatccaacttacatgtaagcactttgcaaacactcactcatttactatgaataacaatcctactatattcacaattatcatttccccgctttacagaagaggaaactgaggcacagagattagacagtgtaggcaggattcaaactcaggtggtctggctctactgtccttgctcttaacctaggcccacctacagttatncaggtttctgtttactaatcctcanccatcttcctctgatcagaaatcaacat

SEQ ID NO: 1299 - DNA, 345 bp, Homo sapiens
ccattcttatctcagaatgctgtaaaccatcagtagaagcagtttagatttggactgcatggtaaaatgaaaagtaataaccctccaaccacaacctagtcagggtattaataattatattgtagcaagaaaacaaagaagaaaataatattgaaaaaatggagattccccaaccagtttcatatttgaaggatctgagttgtatttttattaaggaaattttttttctgaatactgtcttccaaaatgttaacattaaaatctgaatcagaggactctgaatggaaaagaagtttgatcactgacacctagggctctgaagcgtgtgtggccacatggaaaagt

SEQ ID NO: 1300 - DNA, 168 bp, Homo sapiens
  misc_feature 143, 153: n = A,T,C or G
tggactccaccgcggtggcggccgcccgggcaggtacctaggagctttttgaccctgtgttgagatgcctaaacagcttcctgattgacctcctgatatttctgcaaatgtggactaagaggccaggattcctcaaggcccangtgactcagngttattccaaaatta

SEQ ID NO: 1301 - DNA, 276 bp, Homo sapiens
  misc_feature 2, 200, 258, 269: n = A,T,C or G
tncttagggcgaattggagctccccgcggtggcggccgaggtacaaccagaaccaacaattgtatttctctatagttattttaaaatagtaatcaatgctatgtatttgatgtatatgtttctaaattagaaatttcttttggctttgtgtttttttaatgtgcgttaaatatgtaaactgaacctgttccctaaaaatngcattaaaacttgaatgctgtgtctatccaatgccaaaatgctcagaagaaaagtganataattcagtncattcat

SEQ ID NO: 1302 - DNA, 383 bp, Homo sapiens
ccgcggtggcggccggctgggtcccgcactcttgattcccttgcattcaatgccttaccactctacaactgtcttctaacagagctctattccttaatcaccagtgtaatctatccaccttctgcatccctgtcactgagtagctgggtgattctggggaaaaaacaaatgctcagagttgtcttcccaaaacccagctgagctcccaacacaccttccaatccctctcagtttcttcagcaatcatcataccctaataccatgaaattcactatgcacaactctttcccctaactgcagcccaagaaaagctgaaaaactcaaaatcctgttatagcttcccactaacctcatctatatccacatctttccagacctctttc

SEQ ID NO: 1303 - DNA, 427 bp, Homo sapiens
  misc_feature 2, 189, 363, 376: n = A,T,C or G
tncttagggcgaattggagctccccgcggtggcggccgcccgggcaggtacaggaacaaacgaaaatccaaacttaatggttttcttggaggaaagatgattctagttccttgcagttactaggaactcaggggagagttgccatgaagtaaattacacagaactaaaatctgtgttagataacaacangggagatgtcagtttgggactctcctccagggagcggaaggagtttaaacttactagaatgaaggcaattttgaagagtgaagggcacagatgagaaaatggagaacgggacctttggagaacctaagaataaggaaaaagtagaagccgaagggaagcccaagggcaccagcnggaaagttccagnttttaccccttgagggaaagcccaccattccatcacagggggaagggttgt

SEQ ID NO: 1304 - DNA, 406 bp, Homo sapiens
  misc_feature 69, 85, 104, 112, 142, 165, 193, 234, 238, 251, 252, 288,292, 302, 303, 305, 308, 310, 351, 355, 359, 362: n = A,T,C or G
ccgggcaggtaccctaggtgatgcctgttcttttgaaacagcagagattttattttaaaaatacgtttntgtgtttattacctanaggagctattctgaaattnttatgtanaaaaatcttcttctgctccatccacagaanattttttatccatagatattttngccatctcctttctcctctttcctttgntgtagatgatatgaaaagactgcttttttcaaaaattgtgntttnaaattggtgaatnntgccatgcctaaagtgatctctgagatatcctcttntggntataaacatnncngtnanatgttgtaaagagctttctataataagacacagcacactgngttnaatnttnttctcccttcttggtaagatcctcttttggttaaaaagaaaatg

SEQ ID NO: 1305 - DNA, 387 bp, Homo sapiens
  misc_feature 138: n = A,T,C or G
ccgcggtggcggccgcaccgacgacctgttggccggcggcgcgaacgacgagcagtccgaccggggcttccagggcggcggcaaccgccagtccggtcctgcggggaatggccagggcgagcgccaggccgaggcggnccgcagccagcgccgatggcgacgaatacgaccaggggacggcgcgcagccagtcctgatccccaggtcgcgcccggcgctggagggccgccactgttcatgaaaccgcgcacataccgacattcgtcgctttttgataactgagggcaagtttgtgtcaaaaatgtggcaatgaaccatgagctttccaatacacccgcgctcacgcggttcctaccgcggccagtcccagggagcagtcggcgcgcc

SEQ ID NO: 1306 - DNA, 430 bp, Homo sapiens
  misc_feature 381, 389, 396, 402: n = A,T,C or G
actacttagggcaattggagctccccgcggtggcggccgcccgggcaggtacattatctctggaccaggaacacaacacagcggaacaatgagtttagataccccacaaggtgggttctctggaggctgggtatgttgtagatgtggctcatagaatcacagagttaaagggcaactggaactcatctaaccaacttctcatccaagcagtttccctcctataacattatacatagccagtctcctaatatccatttacatactttgagtgacaggaagcctgccacttaatgaagtgatccatttcattttaataaagctcatttttatgtggtaaactgtttcaatatcccaggtaaggcagtagccattttgcacagnacccaagnaaaaagncgttgnaggggatttgcgttcagaagtgccaacc

SEQ ID NO: 1307 - DNA, 357 bp, Homo sapiens
  misc_feature 341: n = A,T,C or G
ccgcggtggcggccgcccgggcaggtacgcgggggactctttccagacctttgataaaggggctgctcaaaaaagccacgaccttgggcctctgctaaaaccatggctttaagtaaggagggagcagatatataaaaatccttatccctctttctaatctcttatgtcctgtgagtgtcacccattgagtaaacccaagtgggagtcagcaggaaagtagctgggatgatgcagtctttacaggcacctacaatgaagtggtttgtttcttggctaaaaacaccagtttagagagagttcgtgcatacttcacgagctgactctgcaataatacactgcanatcttgctggaaggaa

SEQ ID NO: 1308 - DNA, 340 bp, Homo sapiens
  misc_feature 152, 158, 291, 327: n = A,T,C or G
attggagctccccgcggtggcggccgaggtactggacatgatgggagacactggaaagtcccaaacctagtttagggtgttaggggacttcctggaatcggggacatctaagctgagccctaaagtaggagacagtcagatgggagagagtnaagaanaagacatttcaggccaaatgcctgaataccataccctggagtggtcaggttggttctctggtgggaacacgaagattctcctgatcttctcctccctactctcaacactctcaacattcgtagtttttacctncactaaatactctttcctatattatagttgatgttncccctttatctac

SEQ ID NO: 1309 - DNA, 565 bp, Homo sapiens
  misc_feature 419, 492: n = A,T,C or G
cgcccgggcaggtacaatccccagattttttcatgtgtagcttcttatcacatagggagtccaaacatcactttctctgtgagggctttctctccaaagcactgttctgcggtccaaccctaccactgtcactgtcaactcatacacaggcatacacatacacaacgcatacacatgatcactattcaaaatgaccattttccttatttattgtttatcatctacctctcccacctcgccacaccttccccccaaggcgaaggtaggcttcgtgaaatcttaaccttgcctgtcttattcactgctgtattctggtataagcgtctccaacatacttactgatgaataaatatctgtttaacaaataaactctctctcctctactgaaactattgttggcagtcaccaaggacctattnaaaacagaatctttggccaggcactgtgggtcacgcctgtaatcccagcactttgggaggccgaagtgggcanatcactttgaggtcgggagttcaagaccggcctgaccaacatggtgaaacctcgtctctactaaaaaatccaa

SEQ ID NO: 1310 - DNA, 365 bp, Homo sapiens
cactacttagggcgaattggagctccccgcggtggcggccgcccgggcaggtactgggattataggcgtgagccaccgcgtctggcctctaacgagatatttctaaaggttaggccttcagtcaagaattttaaggctggatcttagaggttatctaaactaacctctccatttcatagataaggaaagtgagtcccagaaaagcactggtttggacaagttcagaaagctaaacagtgactgtggatgtatgattctgtctcttaactcctaatccaaatgtcttctcactagataaggctgtgccttctacatttgaaggctcaaaccccatggatggatggagggaaggatgggtggaggga

SEQ ID NO: 1311 - DNA, 759 bp, Homo sapiens
  misc_feature 55, 70, 80, 86, 99, 101, 103, 105, 109, 141, 147, 159, 163,184, 188, 190, 198, 212, 215, 219, 227, 229, 243, 249, 262,274, 278, 287, 294, 301, 326, 370, 379, 400, 412, 417, 420,449, 495, 501, 508, 523, 527, 529, 557, 568, 585, 598: n = A,T,C or G
  misc_feature 603, 609, 610, 618, 641, 646, 651, 654, 662, 666, 681, 732,752: n = A,T,C or G
agattgggtaggctccaccgacggtgggccggggcccgccccgggggccaagcgnttaccgtccgggtgngtaatttcgnaaaaanagagatcatagtntngncntatngctctaccttccttggtaccaagaaatagacnaacttntacagattcttnttangattaaaaaccagtagtgtcnccantngggggcgnaaaaagcaaccganacnccanccaggcgncnccaatgaattaggnttccanaattccttggtcntgggttcccaanattnggaattggntgggaanaccaaanggttctttggaatttccaagggggntgggaaccaaagatttggttttccttttaaaccaaccttttccnctttggttnggggggggccaaggggaaacnccaacctttgcntaggnggncagtaatttttggcccaaggttgggaacnttgggcccccctttaccttacttggggcaatcgtgggaagggaatnaacggngtaatanttaacttaccgattngccncnttttgggcatttggggtgggaaattcgnaggccaatggntaatattacctttaaantttccagtttttnctttncgcctnnggcttccnctttttcggccaacataagggcnttagnttttnttnttggcggnaggnaaaaaaggtttctanggttaatacttttctaaattccgaacccttggtaagaggtaaagtttttancataaaaaaccttcgtctanaaacctt

SEQ ID NO: 1312 - DNA, 458 bp, Homo sapiens
  misc_feature 4, 193, 202, 288, 336, 434, 439, 442, 446, 454: n = A,T,C or G
actnctatagggcgaattggagctccccgcggtggcggccgcccgggcaggtacattggatattcctaaggatacacatttttaactgtggagtgtaacaataggaactaacaataaataattgggttggcattaagttttatgggattcactttgactttaataattttttttgagacaggatcttgctttngtgccctanaattccttaattttcctttccttaataaatatgatatgaggagaaccttcttcattgcttatattggataatagtattaaagttangaaatagcctaagggaaatttacttgattttttttttcaagggaaaantatactaaaagaaaaaaaagctggatatagggatgccttttaaatttattaaaattggtttttcccttcattaattcttaaaccaggtttattagtgnaaaantgnaaantaaaaggnagaa

SEQ ID NO: 1313 - DNA, 466 bp, Homo sapiens
  misc_feature 72, 453: n = A,T,C or G
agggcgttttggagctccccgcggtggcggccgaggtacctattttataccactcaatgaaatctccacctntccattgttccaagacaaacacactgtctttgttagtttctcatgcaaccttgtgcctcacataaatcaatgagaaacaaactacaacagggacttctgatataatgtgccctaaagaaaatttgtttctggcctgttttaataaaaattaaatagcttccttaaattgtgaatattttccattatagtgatattgtaggaacaccagaatttttttttttttgagacagtctcactcttatcgcccaggctggagtgcagtggcactatctcggttcactgcaacctccatgtcccaggctcaagcgattctcctgcctcagcctcccaagtgctgggactacagagtgagactctttgtctcaaaaaagaaaaataaangaaaaagaaatgc

SEQ ID NO: 1314 - DNA, 469 bp, Homo sapiens
  misc_feature 21, 29: n = A,T,C or G
tagggcgaattggagctcccngcggtggncgggccgaggtacttgaagaagacttagatctagaagcagctatgttagatgatcagacctcatacactgccacttggaagatgaggtgtggtcatggggttcagtttcagaaatgtgttctctctgttgatcgtttctggaggaagaaacatggggatgtgtttagaggggagggatatgccagctacttatcataggaagtctagaaaaggcagccatagtgaggtcactatttgaaaaggagtaagaaggaatgtattgggcaggaaagagtgtgcatagactcttctaggtgaatcaggtgagctgtgttctatctgcggagaactagtgatggtggggcagaccaggcatcttcccctccacttgtcataggggtctgagaagggaaacatggggcagaattgggaatcaatctgtaacactgcttttaaactaa

SEQ ID NO: 1315 - DNA, 447 bp, Homo sapiens
  misc_feature 5: n = A,T,C or G
cactnctatagggcgaattggagctccccgcggtggcggccgaggtactaggaactgagtaatttggaaataacattaaccactttcatataccacacacctatcttgttaagtccaaaatgtcagtagtaataaggcttaatcattaagattaagaatattgttatatgtttggaatatgctaaatttatatgctcttctttgaccaaattcagtgtcaaacaaatgtcaatcacgtatctgatttattccctggtcggcattactgaaagaaaaatgtttatttaaatcagcatgtttcaatttattttattatttttttatactttaagttctgggatatatgtgcagaacttgcaggtttgttacataggtatgccatgtgccatggtggtttgctacactcatcaacctatcactacgttaggtatttatcctaatgctatc

SEQ ID NO: 1316 - DNA, 405 bp, Homo sapiens
  misc_feature 17, 81: n = A,T,C or G
tttatagggcgaattgnagcttaccgcggtggcggccgcccgggcaggtaccccatatatgctggtggtttctaaacctanattgttgtcccagcccattcctacttgcagctcggatgtgccttgctagcctggcttctctacctggcacctcacactcaggatgccaaaaaaaagttctgttttctttccccgaaatcctgttctctgctgctgctccactgccacctgttttcttttcttttggttgctggttcccaccagccattcagattccagccggacacacgggattgtcctggactcctctgaattcctcatcctcttcccctggcccacatccagtgggggaggacccccgtcctccctcgttcacctcctgatgacataaatttcttggaccgt

SEQ ID NO: 1317 - DNA, 380 bp, Homo sapiens
  misc_feature 46, 48, 214, 242, 259, 275, 330: n = A,T,C or G
ccgcggtggcggccgaggtacttttttttttttttttttttttttngnagagacagggtctcacaatgttgcccaggctggtatcaaactcctggcctctagtgatcctactgccttggcctcccgaagtgttgggatgacaggtgtgagcaaccacacctggccaataattttgtattttgacatgtatatataatatcatgttatacagatnttacaactggctaaggggctgactccanatttgctcaacggtgtntaagaaggaaattaantgaagcacacagaacaacaaagatactgtccagaagaattcagagaagacagacntagcacagaaagacagaaaaccaactggtgaaaggattactaaatgggta

SEQ ID NO: 1318 - DNA, 380 bp, Homo sapiens
  misc_feature 153, 157, 261: n = A,T,C or G
aggtaccacaaaaagataaaaaaagctaaacagataaatgctttcactaaaattagacaattcctaggaaagagatatataggaggctatttcctgggaggaaatttataccaccatttcagcctgctgtaaggtggagatggtagacagctnattnagggtcctctctataatattgactgatgatggggggttgtgggtttcttacttggctgagtgccttgccaatcatttctgcacctgcggggcctggagattgcntgatgtgcttcaggcataagcaaaccacatcaaaggctcagctcactggcatacctgacggtcaaggacagaagacctgctctgaccaaggaataccccaatgagactggcctggagga

SEQ ID NO: 1319 - DNA, 397 bp, Homo sapiens
cgcgtatacgactcctatagggcgaattggagctccccgcggtggcggccgaggtacccccgaatctaaaataaaagcagaaattatatgaaaaaactggggtgggagttggaaggaactttagatatgtaataaatttgtttgaaaactgttaatttctcatgctttcattaaaaaataattttcctcaagaaaccccaaattctccacctcaggaatgaaaagtgcatttgaatttcaagaaggtatggggcatgagaaccttgcagttttctaatttgtggagacaaaataatttttataacaccaaccagaggtttcctctacaaaccccttgtaattcctttctgagctctcttccttctagaatcttggggcatctgaaaaactcaaagct

SEQ ID NO: 1320 - DNA, 418 bp, Homo sapiens
  misc_feature 98, 120, 145, 151, 158, 170, 178, 182, 187, 191, 192, 199,206, 217, 283, 291, 310, 336, 339, 342, 361, 366, 384, 392,395, 400, 401: n = A,T,C or G
aggtactaaccttagctagtaagtaggaaggcttggaatcgaccccagctcttctggcttcaaagctcctatacatggtgccaggacatataatccantcctcctatcttcccacccagnggctctttgctgttataaatggcgncatcantcccctncccttgtctttnctttctcncacncttcntacnntagggcntggcatntcaagttcctnaatttattttactcaaagacaactagttgattgattgtaaagctaaattaatgcattccaatcacnattgattntgatgttgtaagcccctanatttcaacacttctaaaattacctgnctnctncttccccccagccacgctnagaanattaagttgcccccaagnccccattnaantttgnngccttggaattaaaaaa

SEQ ID NO: 1321 - DNA, 401 bp, Homo sapiens
  misc_feature 342, 376, 377: n = A,T,C or G
tcactacttagggcgaattggagctccccgcggtggcggccgcccgggcaggtacatgccaccatgcctagctaagttttgtatttttagcagagacagggtttcaccatgttggccgggctggcctcgagctcctgaccttgggtgatccaccctcctaggtctctcaaagtgctggaattacggtgtgagccactgcgcccggcccttagtagcatcttttaatggaggtagagttgagatttcagtgactaacaactaaaggtattaaaggtaggggtttatatgatacatttgcattttagaaaaactgattctaaagcttcaatgttgaagaaacanattgaaatgggaaaggggggagaaagactagaanncagaaacattactcattttaagta

SEQ ID NO: 1322 - DNA, 527 bp, Homo sapiens
ccgcggtggcggcccgcccgggcaggtactttttgttccctgctgtggatgcttcttggataggttgataagcaaagaagttcacgttggcgacaacacttccattaaagacgcgtgcagtaaatcctatgatgcaatctcctgcagcttaactagcagacccaagctggtctggcatgatctatgcaccagcttgcagaagcagtcagatgagtcactgtgtggccctccagggagaagcaagtccatactctaaaaaaaatataaatttttattctagaaaatacaaaaaaaaaaaacccgaccttgcctacaactaccttttgtttttaaaggaagtcatattccaggctctccctgtcccttcaaaaaagctcaaaactggacccaacaccaagtctctcccatgaacattcaggcggggtctgaggtggtgaggccagcaggtttgcctcgagagagtttgcttcaagtgaaactccataggcacatgcagcccactgagtggaacaaactgagtttctttc

SEQ ID NO: 1323 - DNA, 374 bp, Homo sapiens
  misc_feature 136, 329, 362: n = A,T,C or G
ccgggcaggtaccacatttgtgaatttatgccacagacttatttacgtagtgcactaaaattataaatagagataatgattgcagcatggtttagagtagtaaaggactggaaacaatctccatggcactgataanggcaagatgtagggaggagaaatggggagtgactgctcagatacagtgcctccttttgggggtgatgaaaatgttttggaacttgatagaggtgctagttgcacagctttgtgagttttctacattgtcacttaaattgcacacttgaaaaatgttaaatgttgggctggggacaatggctcatgcctgtaangcccagccatttttttggaagcccaaggtgggnagggatctcttt

SEQ ID NO: 1324 - DNA, 488 bp, Homo sapiens
  misc_feature 190, 197, 273, 485: n = A,T,C or G
tccaccgcggtggcggccgcccgggcaggtacaacatttaacctctaagccccacccccgaattccttgagcaatgactcatcttgtttctctgggcaccttggcttcatgagtcagtctcagatttgggtagagacgtagtcatttaaatcctctcctaggacagtctttgatagccaaaacttccctngtcaaanttcctggacaccccagaaaattaaactttctaggtcaaaaaatgggcttctttaaaaacacccctggaccaattgnttctttctcttgggcaggcccagttgcaagccctgcacacttaacttgtgccaaagagagtgtcagcatcaggtgaaaaccttccagggcctgcggggagctcaagggcaggggctgcttttgcacataagccagtttatatgcttaagtggactccccgttgaaaccttgggcctggaatgcccaagaagaattcccaaattttatttttngat

SEQ ID NO: 1325 - DNA, 384 bp, Homo sapiens
ccgcggtggcggccgcccgggcaggtacaaatctaaaacacaaacatcacctttacaaaacaaaattgttgattaataattatctttttcataactatctcataactttatgactacaggcccaccatttaacaactacaaccttcacataaactaacatgtgcttttaatgctgaccttagtttaaaaagcctgccagtatggaatgacattcaaataaaataaaaccaaatttaaaaagaacagaaatgcaaactcaacaatattcccatcttttgaatcctgaccaatgtaagaagtcaaatttcataatcatcctaaaaaccaagggggaggtcattaccgacccactggtatgtctctttcaggtctagggaattaatg

SEQ ID NO: 1326 - DNA, 419 bp, Homo sapiens
  misc_feature 386, 389, 397: n = A,T,C or G
ccgcggtggcggccgcccgggcaggtacaagcgattcccctgccctcctgagtagctgggattacaggcatgccatcacgcctggcttatttgtatttttagtagagatggggtttctccatgttggtcaggttagtctcgaactcccaacctcacgtgatccaccccacctcagccttccaaagtgctgggattacaggtgtcagccaccacgcccagccccagaatacaaatttttaacatttagtataattagacagtcatggcattttaaggtcagagcttcttactcaaatgcagctcttttctgtaagggacaataaaatgttaatttttactcagttaacattctaaattagtgttttaaggtcatctcttttacttanaanacaggttntttggccaggaaacgttttact

SEQ ID NO: 1327 - DNA, 387 bp, Homo sapiens
  misc_feature 36, 46, 60, 182, 188, 198, 220, 231, 264, 271, 285, 322,330, 335, 358, 372: n = A,T,C or G
cggccgaggtacttagcagttgtgtgacctagagtncagaagcttngagtttttgagccntagcttctgtgtctataaaagggggttcacacaactcaccttacagggctgtaagattagattgcacagaaaatatattttttggctgtgggggctggaagtgttgcttgattaagccattngaaaancccatcctgnggggtgagaaaaacccccaccntatgacttggnggggaaaacaaaagcccaacctccccactggangaaagcntggaaaaggtagcnagaaaccccttggctttcctactgccctcccctttgncaagcccnagganggccagggccaccaaggggaacnaaggccctgggtcnaaaatttggggaaag

SEQ ID NO: 1328 - DNA, 956 bp, Homo sapiens
  misc_feature 17, 32, 36, 46, 49, 53, 63, 65, 71, 81, 83, 87, 94, 96, 98,100, 108, 117, 127, 129, 139, 142, 154, 170, 182, 186, 196,198, 217, 230, 241, 245, 249, 263, 266, 271, 283, 300, 301,312, 316, 322, 377, 379, 380, 385, 393, 404, 412, 433: n = A,T,C or G
  misc_feature 472, 488, 498, 530, 552, 559, 561, 575, 589, 591, 612, 619,626, 634, 639, 641, 649, 675, 678, 706, 720, 736, 758, 769,771, 781, 786, 792, 796, 813, 817, 822, 824, 841, 852, 874,878, 889, 909, 938, 943, 946, 955: n = A,T,C or G
cgttaattaccgaactncacttattagggggnccgnaaattggggnagncttncccacaccgncnggggtngggaccgtgncnccgncaccatncntntnggggggtnccattccgnattggaaagncnccttccgacnccnttggttgtcccntgggggtacaccccgnccttttggttgnaagnggggaaaggngnaaccaattttaagtaaaanaaaatggaaaatntggaattggtnggtnttcnccttttaaaaaagnggnaattnggggggccatgnggaaaaaaaaaccaagnnaattccccttnggtnttggtngggggaattaattttttaattttttgggaaaaccggggggggaatttttaacccngnnaaatntttttggnaaaaaaaattnggaaaaanttttcaaccaaaaaaagtttnggaaagggccaattttttaaccccaaaatttggaaaggnaaagggggaaaaaaanaacccaagtnaaccggtaaagtaaaaaaaaaattcctttttnggaaattggggggcctttttcnaaccaanangggggccaaattgnccaaaacccaaaanancccaaaaaaaaaattgggggnaaaattnaaccttnggttgggnaattngnaaaccaanttggaaagggggccaaaggcccccanaangggcctttggtggtgggggaaagggggnaaaggaaatttaanaaccccccaacccggnggggggggcccaaagataaagngggggggtttncnaaaggggggnaaatntttctnttgngggcccccccctttggncccnttggncnccctttaaaaaaaaccnttgggttgggncccgggttttttccaaattaanaaancccccaaaaanaatttccaattttttttccnaatttaattttttttcctttaaaaaaccnccccnttncaaaaaaana

SEQ ID NO: 1329 - DNA, 427 bp, Homo sapiens
  misc_feature 199, 279, 281, 285, 293, 299, 305, 319, 340, 391, 396, 397,411: n = A,T,C or G
actacttagggcaattggagctccccgcggtggcggccgcccgggcaggtacaatggaggaatacaaagagggacatgctgcagcctgtctaggttaaggtgtttgatgcttatgatgtggccagttgatgctggttctagaggcttgtccctgaaagcagctttcctctttatgtgtccacttttggatttctttganctaaactttcatgaagacaggagaaatgcttacatcttaataacttcaagaggacattttggttggcaagagacattggntntatncaaacctntggttncttccnagtatggtaaggantctgttgtgtggtgtgcaggncccgtcactttgttcttcactgaaggattccctcttactgagaaatctatnacatnncctgcttgcaacanctgtgcccttttgttt

SEQ ID NO: 1330 - DNA, 217 bp, Homo sapiens
tgagttcattcagatagaattaaacatgaagaaataaaacaaatagtttgacaagcagtgggggtcactaaacacaacattcctaagtaattcagttgtcagaagtgcagttcccaaatgcagttagtatctttagaggagttagaaagttctgattatcaggctctgtagaattttttttcatcctgagagagatgagggtgatcccatgatagag

SEQ ID NO: 1331 - DNA, 396 bp, Homo sapiens
  misc_feature 174, 363, 371: n = A,T,C or G
ttagggcgaattggagctccccgcggtggcggccgaggtacttttaaatgaaattcatataagttgatttatttctctttggcctttagatagcatttgagggttaggtaatgaagataatcactcaaagtttctgtagaaatctttattcttaccagttgttgggtttttatnccatggaggaaaatatttcctcttaatgtctgattcatcatcctaccttttctggttgaataactattattctaattctggccaacatcaaacttgaacattgccatcattctggctggccttccttccttagtgccctcttctgttttgtttctttcagatattattgtcaggtattaatttttaggnatgaatgnaaaataaaaaatggttaaatggctt

SEQ ID NO: 1332 - DNA, 901 bp, Homo sapiens
  misc_feature 40, 43, 49, 55, 61, 65, 77, 95, 100, 117, 119, 121, 125,127, 130, 134, 147, 171, 175, 184, 200, 227, 228, 235, 251,259, 283, 294, 295, 337, 354, 375, 384, 392, 393, 400, 401,402, 422, 433, 446, 478, 484, 488, 489, 493, 497, 502: n = A,T,C or G
  misc_feature 507, 518, 520, 523, 528, 534, 541, 550, 566, 575, 580, 596,625, 644, 665, 667, 680, 685, 690, 694, 706, 709, 722, 725,750, 751, 754, 758, 768, 780, 800, 828, 834, 843, 844, 850,866, 874, 886: n = A,T,C or G
actacttcacttatgagggggaccgtaaatatggcgtagnctncgcacnccgtcngggctngggnccgggcccccgnagagcttaccgtgagcgntaggngtaaaccatgtcagatncncncgtncnctntgtnacctttgccttcnccatcttaagtaacaaagaaaaantcgnacgtaaatngggtccatatgaaacnaaaatcgtataaaaccacgagtccaannagggatnggaaacccaagcaagnacttggcnacagtaaccatatagattttccantggttgggaanngaaggcaaggccccaaggaaaggccattccaccttccaaagncccccatttttcccttnggaaccaatttggttaaaaanacccatggnggcccaanncctttannnaaaaaaatttttttgccaangaaaaaacggngtataatgtccgnaaaatgttttctttcccaatttaaaaaaaggnaatggntttnntttntcanaaaangggtngggaatggccntnttnggaanaaaagnttaattntttttgggngggaagttaaacccanaattttttnccaantggttggggtttttanccaaatttaaaaaaaaaaatttccctttnggcctaaaaaaaatttccntttctttgggggggaatttananaaagggaaaaaangcccnatggnaagngtaatttccccnccnaagggccaaattnggngggggtaaaccaaaaaaaaattggnnggnaagncctcctttcnaaaaaaaaaggnttgggggggtaatagggaanaaagcaacctatgtaagcaaagggaacnccaagnggggccaannaaaatnggccaattccttcctnttcgcctntttcttactttnggggcctttttccct

SEQ ID NO: 1333 - DNA, 321 bp, Homo sapiens
  misc_feature 222, 226, 237, 255, 256, 270, 301: n = A,T,C or G
ccgcggtggcggccgcccgggcaggtactaacatttgtagagaattttgtagtttacagagcactttttcctcattttattatttgtttttcacaaccatctggtgacattaaagggtagcagagaaatatggggaagtgggtgggggatgagactaatggcagagactgtgtgtgttaggaggagtggttgtcggagatacttaaagggatttgaatgcancagntcattcatttnattgaacaaattgaaaanncataaatatcctgnaaccatcaaaagatttcaggtaaggaagcancctgttctctttttggatga

SEQ ID NO: 1334 - DNA, 438 bp, Homo sapiens
  misc_feature 183, 185, 186: n = A,T,C or G
attggagctccccgcggtggcggccgaggtacctaaagtaggattcaagccctattagattttgagatcacattttaagagaaagaatacaaaattaggcacgaaagtgagtatttattcatgtagagaaaataaaacatagcaaaatatgaattttaaaaagttaacaaataccacacaaantnnttaaactgcaggaaaaaaagtaactatattggtgttttgtaaataacatgatcctctagagttttttcattttttaatccatttttggctatatattcttcaattgcctctgcacatgacttcaatttggtaatatcacacaactaattacacggtaaaattattttgggtaataaccccagtattgttctcttccagccctgcagtgaaagctgcccatcagactctgaggaggctgcataattaaactct

SEQ ID NO: 1335 - DNA, 395 bp, Homo sapiens
  misc_feature 151, 198, 328, 357, 361, 377, 383: n = A,T,C or G
ccgcggtggcggccgaggtacaggttctttgaatgcagtatttattcacatagttttcattttctgtcctgacaaaaacttggtgatgcttgaatgattacagaacaaataggattgtggtttatgtttcctattatgcatatttggcagntgaattatgacattagattgggacatggtgagagggggcaggatacnggggtaggaggaggggagcaagttacaaaaggccccagttccgggaagctgggctgagttgttctgtttaacttcttcttcctttattcctatggttttatgattgcaaattggcaggtggcagggcagnctctgacctatatttgctaggaaagcagnatgntccacattaattttangaatgnttttaaggggat

SEQ ID NO: 1336 - DNA, 419 bp, Homo sapiens
  misc_feature 59, 87, 102, 116, 125, 133, 135, 197, 370: n = A,T,C or G
cactacttagggcgaattggagctccccgcggtggcggccgaggtacctttgggaccanatgctgcttatccaacagcccttatctnctttcttgctagtanacatgactgaactntctagtctncacgactnanaggataattcattaatctaagccactcctgatggatgatcttacttgctttgccaatgacangagtgagatgacccatttctagcaaagccatgaggccgtatctgctggagcttccaggggaagacttccttgctttagaaggacacagaaaaatctgtctctcttttgccagacacggttctgtcagcatttccttcccagaattacagtagccatattggggaccatgaggncgaactggccgtgagggataaacatggtaggatggcatgagcaaaaaaa

SEQ ID NO: 1337 - DNA, 642 bp, Homo sapiens
  misc_feature 54, 178, 184, 205, 220, 237, 249, 255, 287, 292, 294, 297,314, 339, 348, 369, 385, 391, 395, 400, 402, 406, 424, 449,455, 473, 479, 484, 486, 507, 524, 536, 538, 542, 551, 559,563, 572, 576, 614, 617, 621, 639: n = A,T,C or G
atcctatagggcgaattggactccaccgcgggtggcgggccgcccgggcaggtnccagttgtaaaattaccaggaaccgccatgcctcaagatcgccctgttttctggcttcatcaatgactgcatgcagtgcaccaccctgtccactacgtgatgctgtaggattaagtctcacagngggggngggcttgagggataccaggcngcccgcgtccttgtngtttgctgggtgaaatnaagacgccccantcgccntggtgggggttagcttgggttaattggggtgncccgntngcntaatttttggggccacnaagagaaccaccaaccccgcttttnggaggggtncttggttaattatggaaaacncctttcttggaaaagnggaagnggcncccgnantaanccttggaaaaggccttcngggggtatgggggccaagaccccgnggttanttttggaattaaaaaacnttaacnccaangnccggggttttgggggggttcnttttaattttttttccntaacctcggggncnttgntattaattnttggtggngganttaaccctnggtnaatttctttgtaagattttgggggcaaattttggcccnggngggnaataaaggaaaggaaccnttc

SEQ ID NO: 1338 - DNA, 426 bp, Homo sapiens
  misc_feature 417: n = A,T,C or G
ttagggcgaattggagctccccgcggtggcggccgaggtacgggacttgtctccaggagacatgtctgggaagaagagctagactggagaatcatgagcatgttcaggtgaaaacatgtgagtggataagagcaagagggtgagaacacagaccaaggggctaagggacagactgtgttcagtatttgggtatggaacttgtttttgctacttgctagttctaagaccaggctcagactctaacttctctgtaatgtgggaataatgacagcacttaccttataagattttacaaagattaaaatatcatatataacagcacttaacaccgagtaagaattcagtaaaatggttggacccgttatttactatttgtctggggtccgtttaataagtttttggaagaccacaatttgncattaaact

SEQ ID NO: 1339 - DNA, 382 bp, Homo sapiens
  misc_feature 376: n = A,T,C or G
ggcggccgaggtacatgagatgggagctcgacacattttatttggagaataaaagaaaatatgccgtcatcaaactagagcgtgttggggggcatctggtttacagaactaagtcaaggagaagaactctcaagcaatggtgacatctgccagctctgcaaagtgggccctgccttgtcacacaagtctccttgggcaaatgttttctatgtagattttagacactttcctgtgactttctcaaggtcttttggtgacacatgcagcttgaagcttttgcaaggggctggagtctaatctcttcttgcccagcttggctgcagggagaagaaggggagatatgttaggacttggcttttgactgagggtggtgtancctggg

SEQ ID NO: 1340 - DNA, 315 bp, Homo sapiens
  misc_feature 24, 25, 94, 145, 178: n = A,T,C or G
ccgcggtggcggccgaggtacctnnctggagtttggcttcatccagaagacaatgaggtcatcttgtttgagaagatgatgagtggctcagatntcaaatctacagacaagcccacgctgtaaaactgtgtctgaacattttttntttttgagatggagtctcgctttgtcgcccagnctggagtgcaagtggcacaatctctgctcactgcaagctcagcctctcgggttcacgccattctcctgcctcagcctccccagcagctgggactgcaggtgcacgccaccacgcctggctgattttttgtgttttta

SEQ ID NO: 1341 - DNA, 361 bp, Homo sapiens
  misc_feature 8, 17, 24: n = A,T,C or G
ggcgaatnggagctccnccgcggnggcggccgaggtacttaacactatattgagattgttattttaactggaattctaagatttgtgaactgtaaatgaaaaacatactcattaaattttattttttcttgatactcaaaatcatatttataaaaaaaggattttttttttttttttgaaatggagtccctgctctgtcacccaggctggagtgcagtggcacgatctcggctcactgcaagctccgcctcccgggttcacgccattctccttcctcagcctcctgagtagcttgggactacaggcgcttgccaccacgcccggctaattttttgggatttttagtaagagatgggggttt

SEQ ID NO: 1342 - DNA, 413 bp, Homo sapiens
  misc_feature 2: n = A,T,C or G
tnctatagggcgaattggagctccccgcggtggcggccgcccgggcaggtacctttagactagcatcagccatacagaatgcagtaaaatatgaggctggctatgtaggatgaagagtaattgcttgaccctaccttacagttattcttagtctcaaaaaagtgaaggtcttatcgggtcctggcaagctactagtaagctagcaaaattacaactttttgtgctggatttagtaaaaaaatgtttaacttcttcttaggcaaagaaaaaaatccctacataaatgcacagacatctataatttataacagaaaggaaagaaatgattcagtgtgtttcatgcaaaatttttcaaaggcgtctaacgtctccatttaatagaagccataaaatactcctaaactgagatttca

SEQ ID NO: 1343 - DNA, 453 bp, Homo sapiens
actacttagggcgaattggagctccccgcggtggcggccgaggtacattgcttctgttctctgtcactctgtttctgtgccagaagacacattgcttctcctcattctcttatgcagtgctgtttaagtggtggtccacaaattgttgctggatggtgatgagatcgattaggagtttatacctcaaatgtaaattaatgcacttccttccttccttaagaatgtcttgccatgaaaatatcagcatgcctgtggatgtcattgatttaaatgagggcacaagttccgtatttccttgcagatgggtccagactgtttgcagactggccatggtccttgggccacactggaagaagaactgggctaagtattttttatgcctgtgatttaacttctccaataaaccgcagctcttgtaggatatgatggtcgctgtcaggcaaggactagatt

SEQ ID NO: 1344 - DNA, 440 bp, Homo sapiens
actacttagggcgaattggagctccccgcggtggcggccgaggtacgcgggattctcaatcctacccatgatgcagacagattgcctcatttcagctcaataaaacatcaccaaattcccttaggcagaaaaagggtggggagtgccctttcttgaaggaatcccttaagtgcaccgtctcccgttttctttttcacatcaatgcagagtccctctgtgaatttacaacacccaacacccatgagttcagtccttaagaaggaaaattgagcaagtatttaattggttggacattgcataaaagaggtccatatccaggctaactctagaaattttattctcaaacttagttggcctctttttcttctgtcagagggacccattctttagtgggcactggggggaaattcttggcaccccaagaaaggaattcaactgcg

SEQ ID NO: 1345 - DNA, 623 bp, Homo sapiens
  misc_feature 133, 144, 153, 158, 161, 184, 195, 218, 241, 244, 256, 293,326, 336, 346, 363, 376, 378, 380, 402, 408, 429, 460, 462,464, 490, 507, 515, 534, 545, 549, 557, 571, 574, 582, 601: n = A,T,C or G
ccgggcaggacgcggggaaagtcctcagtaaaatactggcaaactaaatccagcagcacatcaaaaagcttatccaccacaatcaagtcggcttcatccctgggatgcaaagctcattcaacataccaaaatnaattaatggtnatccatccncattnaancagaacccaattgacaaaaaaanccactatgatntattcttcaattagtatgccagnaataagggcccctttcgattaanaantttcaagtcacnctccttttcatggccttaaaaaaaccttccttcaaantaaaaacctaagggtttttttgtattgggaaancaattattcnttcaaaaagnttaaattaaatggaagncctaattttttantngnaccaaaaaaccccccaacaagnctccanaattaattcaattaaccttcnaaggttgggggggccaaaaaaaaaccttggngngnaaggccaattttccccccttttttgnaaaaaaaccccggggcntaccaaanggaaccaaaaggggaattnggccttggttncttncttcaacnttaaccttttttgnganttttcaanaccaattaattttggtttnggggaaaagttttccttggggc

SEQ ID NO: 1346 - DNA, 450 bp, Homo sapiens
  misc_feature 288: n = A,T,C or G
ctacttagggcgaattggagctccccgcggtggcggccgcccgggcaggtacagctaaactccaccgcagagcaagcaaacccaatctggcacacagcttttgggggtttcctctcctactatggcccctagccctgtgcccaggacatagtgaagggtcagtaaatgtttggctacattgatctgcagaatcctcactaacacccctccagcacaaagcacaaggtctgttgaaccaaacatccccatagaacccaacgggatctgccctaaagcccaaagagcctnggccccccacctattggggaacatctttccaaaaataccaccactttcaaaggaaactcccctgagaatgggggtggggaagtcttaattgcattatattttgctcttgcttatgtgtggaagcatgggttttattccacttacttttatttcagccctttt

SEQ ID NO: 1347 - DNA, 482 bp, Homo sapiens
  misc_feature 206, 208, 210, 212, 217, 224, 404, 414: n = A,T,C or G
atagggcgaattggagctccccgcggtggcggccgcccgggcaggtacatcccagctgattcagtatctccttctctttgaaaactctcacagaaactgccctataacttctactgacatctcatctcaatggctagatcagtgctatataacaaaactttctgcagtgatagaaatgttctatatctgaactatccaagaagttnancntncctanccacttntgactgtttagcatttaaaatgtcacttgtggaactgacaaaatcaacttttaattttacttgattttaataaatttaaatttaaatagatacatgtgtctagtggctaccacaataaatagtgcagggctaggaccttaatcaccattcactacccccatctgccaagaaaaagctggnaaaatggaanggtttgggagctaaacaccgttgcttaccctccacaaaattatgttttttcttaagtaagggaaaaaa

SEQ ID NO: 1348 - DNA, 765 bp, Homo sapiens
  misc_feature 439, 473, 528, 535, 536, 538, 574, 580, 610, 634, 645, 649,670, 677, 692, 699, 703, 714, 719, 726, 728, 732, 736, 743,752: n = A,T,C or G
cgccgggcaggtacttggttctcgtcctcagttctctttgcactctctctctctttacagatatatgaagtcaacttgccctcttctgatgccaccaatacttccagtgctaacctctcatgttaagtctgagaccctctgttaactgctccctaccttctccacctgcgggtctcattcaaccttcatttcaaaggttctaaaatggaactcattaatttcctactaaacttgtccctttgccagagcccttgggacctagctaatatcctctgccactccaggtcttgttggacccacgttccatcaaccagtcatttgttgtctgcttagtcctgatgtttatattgccttaattcttctcacatccatctccctccttcccatcctcatctcttacctaagccattaattaccatgtttatcccacctgcaaagncctccattcattctattctaaagcaagggtaaanagttcaaaatcatcctcctattcagaagtctttaacagcttctgcatggccctgnggattanntnccggttttcccattgctataaaagaactaccctggngaatgncgtaaatttaataaagaaaaagaaggtttnaattgacttaccgggtcttccatngggtagggganggcntcaggaaacttattaattaanggtgggnaagggcaaagggggnagcaagncacnatttttaatantgggngggcccngnggangaanaaaaagnaataagttntttaagggggggg

SEQ ID NO: 1349 - DNA, 436 bp, Homo sapiens
  misc_feature 339, 369: n = A,T,C or G
actacttagggcgaattggagctccccgcggtggcggccgcccgggcaggtactgaaacaggaggctgatacaggacttgtgcttagctgactgagcagcccatgaagcagtgacccgtggttcttcctctatccctccctatactcaactcctctcaaagtcttttgttctatgtcattttctcccttcacttttctcatgccttctcctcctctgctctgcctctgctataagcctgtctgtgcaatccaggctcactgcaaggtcttcatgttgggacaccgagctactagggtttctcatctttgacagagaaaacggggatgattgacatatancaacctttaaactggggcctccccaaagtnccaaatctgaatgtctttaaaaaccaatggaaggaatcaaggttaaatggagtcaaggtctgttcta

SEQ ID NO: 1350 - DNA, 423 bp, Homo sapiens
cctatagggcgaattggagctccccgcggtggcggccgaggtactatggatccactcaaccagaatttctagggtctggataatttgcacattatcaagtctcctgggtgatcttatacaacccaagtttgagaagcatcaatataggtcataaggaattactaagctttaagcagatcaattttgtattttagggtgattattgtaatagcagtgtgaaagcagtgttaatctccccccagtctcttccatacagcctatttataatagcacacacacaaaattctgctatttacctgacaatttttacagcagtgtggaaagtaaaagaggagagtagaaaggtagaaggacaggtagggacagtaaagtgaaatgagaaaggaataaactaaggcagtgattatgagaaaagatggggct

SEQ ID NO: 1351 - DNA, 462 bp, Homo sapiens
gaatacgactcctatagggcgaattggagctccccgcggtggcggccgaggtacacacttaatgggttttcaagaagatgggattgttttttcttggccatataatataaatgtataataaatttgctctctttgtaattaaaattaagagacagtagctcagctaggccttttaaatgtctatataacccaacaccaccataagtccagctcaattttttgtgacctgtttttctcatgggctagctcaaagatttttttttttaaggcagcagcaagatgaggttttaaaaaggctttgttagggcaattagacattttcatttttcaagctgattatagcatttatcacttacattgaaatttagtatttgcatttttgcctctacgcttagaatgttacccaacaatatggtcaccacacaagttgattcacagggtgtgttttgcacattttctcca

SEQ ID NO: 1352 - DNA, 258 bp, Homo sapiens
  misc_feature 142, 225, 231, 232: n = A,T,C or G
aggtactttaggctgagaaataaatagaaggtgagaaaaaagaacagtctttatagtcagtaagagtgaaaagagaaagatggtagttggggaaagacagatggggagaaaggttggctggttgttaataaaacagttagangatgaagcatgtattataaatgcttggtgggaagaaaccttgtggcaaggagggtggtagtgttggagaagaaagagaggatntagtannaaagttaaagaggaactggaagcagg

SEQ ID NO: 1353 - DNA, 449 bp, Homo sapiens
  misc_feature 6, 18, 40, 45, 54, 58, 71, 73: n = A,T,C or G
ctatanggcgaattggtnctccccgcgggtgggcgggccnagggnccatttttntttngggtaggtttttntnaaatatgggagttttagattgcattttaaaaattgcctattgttactacattcctaagctctttcaatatctcaaggatactgatacacctatggaatcccttgatatctccttgcagattcgcccctcctgttagctcctctcttccctatgttgccctcctgctttacgagactgattgctttccacatcactgcacagtggacattctggcattgactttcattgtcatcctgcgttggagaccatatatctctttttttcttagttaattccctcattttgcttatcacactgtcagtaactttgtataaaaggacaaattaaggttaaaattttttggaagttttttttttttggccccagcttttctata

SEQ ID NO: 1354 - DNA, 461 bp, Homo sapiens
  misc_feature 189, 392, 417: n = A,T,C or G
atagggcgaattggagctccccgcggtggcggccgaggtacaggttctttgaatgcagtatttattcacatagttttcattttctgtcctgacaaaaacttggtgatgtttgaatgattacagaacaaataggattgtggtttatgtttcctattatgcatatttggcagttgaattatgacatttgantggaaaccatggtgagaagggggcaggatacggggtaggaggaggggagcaagttacaaaaggccccagttccgggaagctgggctgagttgttctgtttaacttcttcttcctttattcctatggttttatgattgcaaattggcagtggcagggcagctctgactatatttgctagaagcagatgtccacattaatttaanatgtctaggggattaaaaatcatantagggtggccgcctagggaaaatatagaaaatgcccaatgaaaa

SEQ ID NO: 1355 - DNA, 371 bp, Homo sapiens
aggtactatggatccactcaaccagaatttctagggtctggataatttgcacattatcaagtctcctgggtgatcttatacaacccaagtttgagaagcatcaatataggtcataaggaattactaagctttaagcagatcaattttgtattttagggtgattattgtaatagcagtgtgaaagcagtgttaatctccccccagtctcttccatacagcctatttataatagcacacacacaaaattctgctatttacctgacaatttttacagcagtgtggaaagtaaaagagggagagtagaaaggtaggaaggacagggtaggggacaggtaaagtggaaatgaaggaaagggaataaacctaagggc

SEQ ID NO: 1356 - DNA, 948 bp, Homo sapiens
  misc_feature 23, 32, 52, 63, 65, 67, 83, 89, 94, 100, 121, 126, 128, 135,141, 149, 163, 165, 167, 169, 173, 177, 179, 181, 184, 188,195, 212, 230, 238, 246, 247, 297, 346, 355, 366, 370, 384,392, 396, 423, 426, 442, 447, 449, 473, 493, 506: n = A,T,C or G
  misc_feature 515, 541, 557, 562, 570, 585, 598, 600, 619, 622, 632, 642,651, 663, 665, 667, 673, 690, 695, 716, 719, 745, 751, 763,778, 781, 784, 787, 795, 799, 803, 818, 840, 852, 868, 871,879, 886, 908: n = A,T,C or G
tacgactcactttataagggggnccggagatntggggtagggcgtacccacnccgccgggctngngnccgggtccccgggagngcttanccgcnccgggngcgggaggtaaacaatttttnttatntncttccanataacnttttaagntttgggggcccctncntntntctntctntntnctnggtnccaaganaagggaaaaccccaatnttccttttaagattgggnccaacctngggggcgnnaaaaattctttttggggctaccccccaagcaaaaagggaaaattttcaanacccttggcgggcctgccaaccttggccaaaaaaaaaaattaaccaaanttgggggcnccttaaaccantttngggggaattttttnggttaaanaaanggggaatgtaaaaaaaagggggaatgnccnccccttggttaaattnttggntngggaaggcccttcggtttgggccnttaatttgggaaagcaaaanaaatttttctttnttttggccnccccccctgggaaaaattgggttggnggggtccccggaaatngggcnccaaaaanaggtggtaaaatgtnaaccccccccttntnggggcaagggcaaaatggnttncaattttccnaaaattgggnccgggtttntggggaaaaaanancnaagaanaaccctttttggggggnccaanttgggttttctaacccccttnggnttatttttttgggcttggggtagggnttgggnttaaaggccccnccgttggggttgggnggnaanaanaaggtccncccncaantttttccccgggggnaaaaaacccaaaaattgggttnttgtttttattnccaacccttttttggnggnaaaggggngaaattngggggtttggggaaaaaccccncctttaacctttgggtgggaaagggaaaccttgggaattt

SEQ ID NO: 1357 - DNA, 646 bp, Homo sapiens
tcctatagggcgaattggagctccccgcggtggcggccgcccgggcaggtactgacacaatatgaactggagtttagaaggagagggtctcattctgaatggtgaaatagaacaaataactggctactgaaaaatagagttggaaattgtatgtgattaggtgtgaatattttgggaaattagttctgaaataggccatcttcagaggaactgatgtcctttggaggcttattggtgaagggagagaaggaagtaaatgaaggtaagtgtcgtttaacaagatatcaaagaatccaaaaatatcctccataaaggtgtgtgatttttttaaaggaaatcgtgatttattttacaaataaagcactgtgctcctgaatgaaaaaaacagcccccctacacttgtccataagattgtttactattgtaacgtgaatagtttataccacatgtgaaaaaaaaatcccacaaatttactctcaaaacgtttctttgaacatacaaaaacacgctaggccaggtgccagtggcccagttcctgtaatcccagcactggaaggcccaagcaagaggattgcttgagcctaagagttcaagaccacctgggccaccataggaagacccccatcttttacaaataattttaaaa

SEQ ID NO: 1358 - DNA, 536 bp, Homo sapiens
  misc_feature 469, 476: n = A,T,C or G
ctcctatagggcgaattggagctccccgcggtggcggccgcccgggcaggtactttataatagtgataagatctgtttcattgtggatttttttttggttaatctttattactattcagtaatattatctgtgactagaattattcttctgtagaaaaaacatcatttgtgataagggatcaaatagtttttttgaaaaagactttttaaaaatttagttttaaaaaaatataacttaaaatgtgtagacatttaatgcttatctttctccatattcctgctgatctgatatgtatgttttaatttattcacttatcgaacatgtgttaatcatttagaggtgatggaggttcagagttggaaaggcatcatcatagtctagacaatgaaacccacataattaataatgtataacccaattattgttagtttagcaaataggatttcaagaagccagtgcatttctcgngacatgntactggaaatcaaatacttccctcatgatggatatccttctaacgccaggaacaagaaaa

SEQ ID NO: 1359 - DNA, 455 bp, Homo sapiens
  misc_feature 201, 222, 300, 430: n = A,T,C or G
aattggagctccccgcggtggcggccgcccgggcaggtacctttctatatttagattctatctttgtcaagcaagatgacttgtttgacagggctctggtttttcacctctgaaaagctactcatccacagagcttgggattgaggggagaggaaagggggaggagatctggcttctctctccaactctgaacagatgggnatcagaaattagggccccttntacatcccctagccaagatgcctgggccttggcagtttgtcccaggacatagacaatggggtcttgatggcagcttcncagacctggctttccctgggcaagaggcttttcctgaggctggcaatgccatttcttcagactcagaaaagggatttagggagggggaaatggggactgcaatgaggcaactcttgacagcttaccctgnaaaactaggacacagcttgtgggag

SEQ ID NO: 1360 - DNA, 637 bp, Homo sapiens
  misc_feature 554, 575, 632, 633: n = A,T,C or G
ccgcggtggcggcccgcccgggcaggtacatgagtctctttttttttaagaattttaattttcctagttccttatctttttaatgattattctttaagtggacatttaagacatgagcttttaagagcagctgaaaattattggtgtttactatgggttttatccatttgtatactgtttttttttctcagctatcttcaaaatagccataggaggtagattccattattattttactctaaaaagagaaaactgagttttaaagtgttaaagtggcaggaccaagatgaagatacgaggtgaaagtaactaaaggttgttagcataacaattcaaccaaaagatgcaattgaaacaatatgtctttgctgtcatgtctagacaatgagatggccagattgcaggcagcatatttgcagtgactctccaaggcctgcaaggttagagctggtctaggtagatgtttgcagctggaagtgggaaaacatccaggcaagcagggggttaatcctggtattcttgcaaaaagttcagatccatggtattgaaggcangtatgaaaagatatgggcaangatagtggccccagaaaggcttaacaattgtctacagggcccaacccatggcaactnntcct

SEQ ID NO: 1361 - DNA, 414 bp, Homo sapiens
cgcccgggcaggtaccatggtgccttatacctaccaggtatccagtaaacagcaatggctggttgactggttggttggtgtgtatcagaaggtgaggagacgggtcaaaagtcctccacttaaaaaaaaaacctttttattttggaatattagagttacaggacagctgcaaagataatgcaaaggtttcctatacagcctcacctccacctttgaaaattggtgatggtagaagaaaaataaccctgaaccagtgtgcccttgggcaggtcacaccaccttagcaggctccagttttatcactgaaagcaagataacagggttcgcctcactgtcttagtcagcttgaactgctataacaaaataccatagctgggcacggtggctcgcctcgcggcgcccgcgtacctcggc

SEQ ID NO: 1362 - DNA, 410 bp, Homo sapiens
ccgcggtggcggccgaggtactgaggtgggtctagaggattagtctgtgaattgcagcctggattctgcagttgtggggtctgcctggtgctgagttttactgtggtggactcagtgttgggatccagcggaaaatcctgtgcttactttcctctcttcctgccaagtggagaagtatgtcttttcatgctctgctgcctggaattggaaaagaggtgatttggataatgtaaaactgcccttcctatcctcttcaacgtatcttttattattattgtgctacaaccagacactgtgatctttcatctggttttcttagatgttgtagagatattgtgtgcatggaccaggtatggtggctcatgcctgtaatcccattttgggaggccaaggccgggagggattgtttt

SEQ ID NO: 1363 - DNA, 279 bp, Homo sapiens
ccgcggtggcggccgcccgggcaggtacattttaatcccattagtagatatgtggtgactatcatttttctattttgcatatgctttatgtaagattatataactacagattttagtgacttaaggaaaagaaaagggaaaacactaaaagaaaggccttaaagtcagaagacctggttttaaattccagtccctccatgtgaggtcctcaatttcctcctttataaaacacagatgaaaatgagatgtccttcaagtctacagtggatctgaagggag

SEQ ID NO: 1364 - DNA, 418 bp, Homo sapiens
  misc_feature 11, 43, 49, 63, 199, 229, 378, 388: n = A,T,C or G
gcggccgaggnacttttttttttttttttttttttttttgganacacanacacagtctccctntgtcgcccaggttggagtgcagtgccacagtcttgactcactgcaacctccacctcctgggttcaagcgattcttgtgcttcagcctcccaagtagctgggattacaggcatgcaccactgcgcccagcctgcttnacatttctttatgggatctttattttcagngttgatgaattgcaagaggatgtgctcatgggcggggcccttccttcatcctcttctggggtgagctggttccaactgagccttacctgcctcagcaagggcctgctcttcctttccttgggttgctttcccagtcctggacttcacanacctgtcttntccctcctttcaactctgtttgcatatgtt

SEQ ID NO: 1365 - DNA, 482 bp, Homo sapiens
  misc_feature 81, 82, 246, 279, 362, 391, 405, 412, 427, 436, 459: n = A,T,C or G
gcggcccgaggtacattttcttttggggaagtttttcttaaatatggagttttagattgcattttaaaaattgcctattgnngctacattcctaagctctttcaaatatctcaaggatactgatacacctatggaatcccttggatatctccttgcagattcgcccctcctgttagcttctctcttccctatgttgccctcctggcttttaccagactgattgcttttccaccatcactgcacagngggacatttctggcatttgaccttttcattggncaatccctggcggttggggagaacccaatattattcctccttttttttttctttaagtttaaaatttcccccttcaatttttngctttaattccaacaacctgggccaaggntaaaccttttggtnataaaangggaaccaaaaattnaaagggggnttaaaaaaatttttttttgggangtttttttttttttttttggggc

SEQ ID NO: 1366 - DNA, 364 bp, Homo sapiens
ccgcggtggcggccgcccgggcaggtacgtgccaccatgcctagctaatttctttcttatttttgatagacacagggtgtcactgtgttgctcaagctaatttcaaactgtttatctgaagcaatgtccctgcctcagcctctcaaagcggtggaattataggcatgagccagagctctattattctaagctgcgggctgaattagttggatacaatagtgatgactgtattcagggcaaagaagaaagtaattgcagaattattcaataaaattttatgaagggttctcatacagagatatcatgattaagagatgggagaattatctttactattagtgacctttgggcgtttttccaaggc

SEQ ID NO: 1367 - DNA, 444 bp, Homo sapiens
  misc_feature 372, 383, 419: n = A,T,C or G
tacttagggcgaattggagctccccgcggtggcggccgcccgggcaggtaccacattgtttggatcgccatagctttggactaaacttccccattaaactttttcaaaacttgcctagtatattgtgcaggccgggcatggtggctcgcgcctgtgatcccagcactttgggaggccaaggtggatggatcgcctgagatcgggagttcgagaccagcctggatagcatggcgaaaccccatctctactaaaaatacaaaaaaaaaaaaaaaaaaaaaaaaattagctggctgtggtgataggaacctgtgatctcagcctacttgggaggcctgaggcagtgaaacccggggaggcgggaggtttgccagntgagcctgaanataggcaccagcctgggggcaacgggagcgagactnttgtcttcaaaaaaaaacaggaaaa

SEQ ID NO: 1368 - DNA, 273 bp, Homo sapiens
  misc_feature 178, 236: n = A,T,C or G
aggtacaaaaggatccgctactgtgtgcctttctctagctagctcattttattcttgttatgcatttcccagacaatgcatgctgagggcctactatgcatgagacactgtcctaggaacagaggtggttccctggtggccctactacgtcattatcattgtggattttggattgcanaatattgaactgacacattttttgatggcacatgtcttgagggagagactgcaattanggcaggtgaatctttgccacctgttgcaagaccctaa

SEQ ID NO: 1369 - DNA, 435 bp, Homo sapiens
  misc_feature 4, 353, 390, 420: n = A,T,C or G
gctncttagggcgaattggagctccccgcggtggcggccgaggtaccatactcttttggttgctataattctgtggtataatatgaagtcagaaaatataattcctccagttttatttatttatttatttttgcttaggatagtattatttcttatagtgaaagcattctatgttatttattattagtctaattttgtagttttacaatgctatcctcttttacaaagctatgatcaactcagtgtgtccagatcaggatcatttgtagctatttgcaaaagtagcaatattctggctgggcatggtggctcatgcttatattcccagcactttgggaggccaagacaggcangatcaccctggaggtcaaggaggttcaaaggatccanccctggttcaaccatgggtggaaacccctngtctccaaataaaaa

SEQ ID NO: 1370 - DNA, 429 bp, Homo sapiens
  misc_feature 428: n = A,T,C or G
tacttagggcgaattggagctccccgcggtggcggccgaggtactagacctccctgtctcattctcattgaaacattttcttttggctttcataaacctttcagaccaatcttccctcctccttctacttgctccttaaatgtcaatgttttccagggttccattcctacattttgctcatttcttcatccaaccctcattcgctcttgactaaaatttgaccctctcagaatcaagaggagtttgagatcctctttgctacccacacttgttttcaaaccattacttcccctcatcttaaaaagccctctgggctgggcacagtggctcaacactttgggaggccaaggtggcagatcacttgaggccaggagtttgagacaagcctgggtgacagagcaaagattctgtctcaaaaaaaaaaacana

SEQ ID NO: 1371 - DNA, 365 bp, Homo sapiens
  misc_feature 345: n = A,T,C or G
ccgcggtggcggccgaggtaccttcctccttaaatccacattccacatgagtttgtcatctttttagatgtatatttgggaagttgctccttgctgacaatccttgaaaagtgcccagttctcaggacccagttgaaataatttccgcctggggctgggcgcggcggctcacgcctgtaatcccagcactttgggaggccaaggcgggcggatcacgaggtcaggagatcgaaaccatcctggccaacatggtgaaaccccgtctctactaaaaatacaaaaacttagccgggcgtggtgggcgggtgcctgtagtcccagctactcggggaggctgaggcaggnagaatgggcgttgaacccgg

SEQ ID NO: 1372 - DNA, 356 bp, Homo sapiens
  misc_feature 60, 61, 201, 306: n = A,T,C or G
cggtggcggccgcccgggcaggtactttttttttttttttttttgtatttttagtagatnnagggtttcaccgtgttagccaggatggtctcgatctcctgacctcttgatccgcccacctcggcctcccaaagtgctgggattacaggcgtgagccacccatccggcctaacgagacttatttttactcactagatggcngttcattcatttgcttactcagctgtgccaggaattaaagttgggcactgggaattccaaaaccaacaagacattctctgtcatcagggaactcacagcctagtntgagagataaacaaatgaacatgaaattataattcagtaacaaagaatga

SEQ ID NO: 1373 - DNA, 414 bp, Homo sapiens
  misc_feature 328: n = A,T,C or G
aggtaccggaattgacggaggcttttgtcattgtcgcgatctggaagcaggtggagggttatgggaaggatgtaagtcactggatatatcttcatatgcaccgcgaaaccatagaatacagctgcacacgcgacgagtcttttctttatcaagtagaggaccatcaggaccagggaggcgacaatagagtccgcattaccgcggctggatactgccataggcagggggttaagaagccaaaagacacagtagccacaagcctggcggcgccccagccccttcagcagcagcaggcggtataagaggaaaagcggtgaggaggtcgcanctgatgaagagaaactttccaaagagctcgctgaggtagatgttgggagtgaggagccaacccaaccagcgggggtgtaaccggta

SEQ ID NO: 1374 - DNA, 145 bp, Homo sapiens
  misc_feature 39: n = A,T,C or G
cgaggtacacaagtagaactgttaaaaccgtgtggcttncaactgctctaataactttaagattcacagtcttcaactttcttacagtggaagccatgggggcattgtcctgttgccttctctctcattcctcataatgagaaag

SEQ ID NO: 1375 - DNA, 373 bp, Homo sapiens
ccgcggtggcggccgcccgggcaggtacatatattagaacgatatttttatatgcaagaaaaccgagactgagagaggttaataaacgcgtttgaaagcacataactggtaagtggcagctcaggattcaagagggcccatgttctttctgctacataacactgctttaagtcctcattatccatgggattgaaaaagtgaaaaatagatcctttaaattactctccacactcctcccacccataaattttttttttttttttttgagatggagttttgcttcttgttgcccagtctggagtgcaatgacaccgatctcagctcactgcgacctccacctccctggtttcacgcgattcttcctgcttcagcc

SEQ ID NO: 1376 - DNA, 413 bp, Homo sapiens
  misc_feature 28, 188, 338: n = A,T,C or G
acactactatagggcgaattggagctcnccgcggtggcggccgaggtacctacctgcggtatctgatcagtttctgcctagtcagatgtgccctgttgctgagtctgcttgggtggggagcataggaaaatggggcaagtgcttcatgagggagctgttctcaaccgccccctctcccaactccccanctctctctccttgttctgtctcctgtttctgggctctaatcctggtcaggcccaatgccccttgcctgtgatgctgggtctgcagttttgctcgccgtcctcgctttgccttcttgcccgccactttccagcattcctcctctgctcaancttctgaagctggtgtcaaggtttctacctgcctggccactgaacccaccctgaagaatgtctggccaaatttcc

SEQ ID NO: 1377 - DNA, 617 bp, Homo sapiens
  misc_feature 186, 192, 196, 210, 212, 227, 243, 244, 247, 263, 268, 276,293, 307, 313, 320, 331, 335, 339, 350, 351, 376, 377, 379,381, 402, 405, 416, 423, 429, 457, 466, 486, 494, 505, 518,534, 549, 553, 562, 576, 601, 610, 616: n = A,T,C or G
tggcggccgaggtacagtgacaacagtaaggccagaaatccagtttggaatcaatatgttgttttcaaaatgactgattataatcaaaatatttcataaaaattgattctaatgtagctaactaagattctagaggatgttaagaagtcttttttttcttttctttctttttttttttttttggangaaganttgnctttgcttttagtnangccccaaggccttgngaagttgccgggttgnnctncaaattccttccaggntttanaaccttgncaaaacactacccgccncctacccttggggngttttngccaagnccaaaattttncatncccnttggccccttnnaaggccccttccccccaaaggttanngncnttgggggaattttggccaagnggncaattggttgnccccaanccctanctacccccccaaggccttgggaattttnttttttggntaattttatttttaaggttnatggaagnaaccaaggggngggggttttccancccccaattggttttngggccacaaggggcnttgnggtccttcnggaaaaaccttccnctttggaacccctttcaaggggttnggaattccntggccnc

SEQ ID NO: 1378 - DNA, 416 bp, Homo sapiens
aggtaccgcagtgcctgagtcaggtatccatttgcattgtgaaaggagcctgaggtgtgaaacagttctgggttctttgcgcacccagctggctggcttcctgtgaactggctgcatttcagatttcattctctagccagaagctgaaaggcaggagccctttgaagagatacagggaagcaaagagggttatccagatgagaaggaagggaaagggggcgtgacaactccttggagggaatttccccagtgggaactgcctctggaggagcttacacagggcacatcaatgggaaaccacgtcctggtctgctcggaagccctggggggcctcttgcaacatgcaggcaggctccccagactcaaccctctcttctctaccagaggcgcatggactgcgcctgctttcccccttc

SEQ ID NO: 1379 - DNA, 443 bp, Homo sapiens
  misc_feature 7: n = A,T,C or G
atcactnctataggggcgaattggagctccccgcggtggcggccgcccgggcaggtacacacacacgtgcacaaatacacagctaaagagggggaattcatcaatggccttctgaaatacttcgcacaccaagaggaaagaagaggcagcccacagcaaggcaatgtatcttcctctgccttctctgaagtttgctcccaaatctgaaggctgaccttgaggagggccaacctcaaggctgtttgtgaaacccagggaggcattctgggggaaagacagggctcataattagtgttcagtgggttcctttcaaagtccaggccacagaggcagtgtggggccgggcactggttctgcccttttccccactgattgtaaacaaccgagcactgcgccgtagtgtcagaccagctgctgtaaagtctattaacttaatttcaaac

SEQ ID NO: 1380 - DNA, 395 bp, Homo sapiens
  misc_feature 190, 305, 315: n = A,T,C or G
acttagggcgaattggagctccccgcggtggcggccgcccgggcaggtacattatttgcctaattacctatgtcgttgagtcattgagaaaattaaatgaaatgatcagaactcatcttaatgacagaggagactctccaaacataatgcaaagaagatataatccactgataaataattttaagttganttttttttttttttaccagggaagtatttggggttttttcgattgggcattgttaaataataccacataagtgtttcttttaccatttaatatttgaggggggtaatagaacatntacagaaatntgggtgggtggatttgcatatatgtgatatttacagaaggaaagaaatggattttttttgtgtgtgtgtgtggtgaaaat

SEQ ID NO: 1381 - DNA, 381 bp, Homo sapiens
  misc_feature 118, 123, 124, 125, 128, 131, 132, 133, 139, 144, 147, 157,180, 212, 213, 215, 226, 232, 241, 287, 315, 380: n = A,T,C or G
cttagggcgaattggagctccccgcggtggcggccgaggtaccactgcactccagcctgggtgacagagtgagactccgtctccaaaaaaaactttgcttgtatattatttttgcctnacagnnnaanatnnntagacngcccncanatgggaaganaatgtttttaaaccatatctcangttagggggtttcatacccaattaattattgnnangggaactcaancccaantaaattgangaaaaaacaaagctttacttaaaaaaaataatgtaaaagggagttngaatagacaattttcttaaaaaaccagnacatacaaaaaggccaggatttttatcaaaaaatgtttgatataaaaaaacatcaaccatttccnt

SEQ ID NO: 1382 - DNA, 406 bp, Homo sapiens
ccgcggtggcggccgcccgggcaggtacctaagatagagctgttagaatttagatagacattagatagacagtgaaaatattttagtctacagttgaaactgtaacaatattggtattgttctcaactacccctggtctagttaagggctttcaagtatgtgtttggacccaaggtattttcatgtccaccatctagatagtccttggtctatttcccaccccatgtgctttctggtgggatgatcacatctgcacctctagtccccaagctgttcctgagctctgtgtcctcactgtctccacatgggaggtgtccccttccacctcaaacttgacaaggggttgtgtcttccacaccaccctgctcctcctgggattccagcccaggtctgtccttcctttttt

SEQ ID NO: 1383 - DNA, 495 bp, Homo sapiens
ccgggcaggtacagtgacgtgatcccggctcactgcaacctccgcctcccgggttcaagcgattcttctgcctcagtttcccgagtagctgggactacaggcatgtgccaccatgcccggctaattttttatttttagtagaggtaaggtttcatcatattgaccaggctggtctcgacctcctgacctcatatccacccaccttggcctcccaaagtgctgggattacaggtgtgagccaacgcacctggcctaaaaaaatagatttttaaagagctgttttaggcccacagcatctgattccattgtaagcctgattttcccagtctgctctgaagcggaaccaggtaactctaatatgacttttaaaataaatgcatgctaacaggcaaaaatagatgttgcttttgaagctaaaatttgtttcacgtcttccttctagactgaaagcttcacaagggcagggttgcaatctgttttaagttacccctgaat

SEQ ID NO: 1384 - DNA, 467 bp, Homo sapiens
  misc_feature 183, 224, 294, 384: n = A,T,C or G
ggcgattggagctccccgcggtggcggccgcccgggcaggtacttggaatacctctttcctctagaatacagtgatcctattccccaaagtgcaagctttcatgtggaagcatcctaagtgatcgtcctgggtgatgccatatttcactaaagtgggaaaagaagaggtgaactttgctcttncaacaaggcttgcactttatactttgggcagtgcatggganaaggggggcccttagaggtgagcaggatcactgtagctagaggagaggtctcactgaaacagaacgcatntgtgactgtagcttgcatggagagcctagacagccaaccatggatttgcctttatgttttgaatggaaacatctatttcaattgggatanaaacctttacctatgtcatatctgtaagagaatttagctttatagatatgtaggatacgtgtgtgtgtttgctgggtggggga

SEQ ID NO: 1385 - DNA, 460 bp, Homo sapiens
  misc_feature 23, 29, 47, 290, 315, 329: n = A,T,C or G
ttagggcgaattggagctcaccncggggncggccgcccggccaggtnccgaaggaaggccaggtgcagtgggctcacgcccagcactttgggaggctgaggtgggaggatcccttgaggccaggagttcaaggttacagtgagctatgatagtgccactgcactccagcctgggtgacaagattttgtcttaaaaaaaaaaaaaaaagttgaatatgagttttaattttctgtccgtttgaaaaaaatttttggtaatatttccctgcatttctctgtccgtctgccctnttccacaacaaatggtccttttgcntttcaatgtttggntatccttcttttttcctgtttccactcaagaaggtcaattcaaaattttctttttcttcttcccggtccccttttaaatttggggaatttaattttttttttcctttttttggggccccttttttgggggg

SEQ ID NO: 1386 - DNA, 407 bp, Homo sapiens
  misc_feature 249, 400: n = A,T,C or G
cgaggtccagcccgctaagcatacaaagattcaaggttaaaaaaatcctctcttcattcaaaaagttcagcgtctagtaggatgaataaatgaatgaatgaataaaccaagtgaaacactgccaagtgctttgtttagatctaaaccaaagcctgcagagggaacagtggactctacctgggaagattaagaagatcttacccaagtggggacagggaacaaggtctcaaggtgtgagatgtcttccangtgaagaagcgagagagggccattctaggcaaggagaaccccagagatgggtcaaacaagaggttggaagtagtaggaaaaaatagtgaagggtgaaaagatatctgtcattttaaaatattaataaaagacagattattgttggattganaaatggg

SEQ ID NO: 1387 - DNA, 357 bp, Homo sapiens
  misc_feature 208: n = A,T,C or G
ccgcggtggcggccgcccgggcaggtacatctggcaaggggcacttttactctgatgtcgggtgttttagggatatgagttcagtgaataagtagctagagggaggagctagttaggtcttgattttaggcaaatgctaaatctacctcattttccatacctgtcttttgattgggatagctaaagaatttataccagatgaaccaancaagccaccttcttacgacattaaatttggtggaccaagcccccagtagaagcgctggggcccagcacggccaggctctcaccttttagagcagcacccccgactaatccagcgaatggaatctggctatgaaagcagttgagaggaac

SEQ ID NO: 1388 - DNA, 418 bp, Homo sapiens
  misc_feature 387: n = A,T,C or G
agggcgaattggagctccccgcggtggcggccgaggtactccttttataaaacttggagttgatgtaaaggcacagacaacacaagttaccttaataataaatgcacttttctttgtaattttgggtaattcagtgtgatttgtaattcttttaaaagacacacaatcacttgtatttttgcatggttctttttttcctaatttcccactatagtgaaatatctgtttttccttctctattgggtttggattggaatgatcaggtagaattaaatgtaaaataacaaaaggaaaatactttatagatcttctcaaaatactttgaagggtataatctctttaagatggctttattcatatttaagccaaaaacaaaaagcaacccanaacactactgttttatacaaaaaggcagctt

SEQ ID NO: 1389 - DNA, 427 bp, Homo sapiens
  misc_feature 43, 50, 61, 79, 158, 164, 166, 180, 197, 200, 267, 312, 320,329, 339, 348, 361, 383, 388, 399: n = A,T,C or G
ccccgcggtggcggcgcgaggtacaaggcttcctggttttttncatatgnctgaaactgtncatcattaaacactgganagaaaaaggctattcaggtatctgcctagtccctgttgtgatttgcttttacaaccccttctcagaacatacacacatncacccntngaaaatctcccacnaaggagctacatcgcanagnaattagtgttactttaacacatttaatacaaccgttattcctccagccccggaacaactcatggttngtctgtgaaccatgcatgtagggagcattgtagacactgtgtggntgaccctnatgatccantccaaatctntcccactgngtagaaacacagntagaagcttggggggagttaantcatntgcttgccagntgaaaaataaatatatgaaaaatgaatg

SEQ ID NO: 1390 - DNA, 352 bp, Homo sapiens
aggtacgtgaaagcgctttgaagatcacaaacccatttagaaataggtgggttgctcttcctcaaatctttgaaagctgtctactactataaattcattcattcatatctttccctcattcctttcagttttttaaaaatgtattctatccaacttacatgtaagcactttgcaaacactcactcatttactatgaataacaatcctactatattcacaattatcatttccccgctttacagaagaggaaactgaggcacagagattagacagtgtaggcaggattcaaactcaggtggtctggctctactgtccttgctcttaacctaggcccacctacagttatccaggt

SEQ ID NO: 1391 - DNA, 436 bp, Homo sapiens
ccgcggtggcggccgaggtaccaataattttatgccctcatcgagttactttaattgattttttattgatttattcaatcaatcaatcaacatgtttattaagtgcttattgtgttaaaggcaatgagtggaagtagctgaaaaatacccttaaacatatttgaactgccttgggccacattctatctcttgactgtcgtgggttctcaaaggtatggcatgtttctcataatgaagttaagtagattaagggatttctgttacagttaacttttagccttcagaagatttgactatgattaaatgggtgagcagtataaattctggaaggcagaactgcatagtaaagaataaaaactctggtatcagagacaactgggtttgagtcctcggtttgctatttggatgtaacctcagggaaaacatttatcttttt

SEQ ID NO: 1392 - DNA, 458 bp, Homo sapiens
  misc_feature 338, 404: n = A,T,C or G
ggcgaattggagctccccgcggtggcggccgcccgggcaggacccagaggacacagttgaaatgaggcacaattaggaaaaactaggctgtttaatatccatattgagtagctttgcaagttactttcacaaacttccctacagaattggttctaacagaactgttcaaggccaaggatttgttttttctgggtctgggggagtcatctttataattttaatattccattagaatgccttgacgctagaaggagggtccatctcaatcacatcaataaattgatcccaacctttataaaaataagcttggatagaaaggaaaatccgaagactaaggnagtctggtagaatactagaaggagacatcttttaagaggaggacaagaaaaggcatgaaaacaganaacatggtcctacacaaggcaactggcttcagtgctaccctacaatttcttatt

SEQ ID NO: 1393 - DNA, 383 bp, Homo sapiens
  misc_feature 321: n = A,T,C or G
ccgggcaggtacaaatctaaaacacaaacatcacctttacaaaacaaaattgttgattaataattatctttttcataactatctcataactttatgactacaggcccaccatttaacaactacaaccttcacataaactaacatgtgcttttaatgctgaccttagtttaaaaagcctgccagtatggaatgacattcaaataaaataaaaccaaatttaaaaagaacagaaatgcaaactcaacaatattcccatcttttgaatcctgacaatgtagaagtcaaattcataatcatcctaaaaaccaagggagtcatacnaccacagtatgtctcttcagtctaggaataatgcaaacagcagaagttactcaatgaggctt

SEQ ID NO: 1394 - DNA, 418 bp, Homo sapiens
atagggcgaattggagctccccgcggtggcggccgaggtacctgctcccttcactgagtgcttcctgtgtgcctggcaccattgctcagggctttacatggacttactcatttcattttcactgcagcctagagcgtaagtaagtatttgctttatccccatcttatagatgaggcatttgattctcaaaaaggtttcatagcttgcccatgttctagcagctagtaaaaggagaagccagagttttcatttaggtgggagtcctcaacctgctttcttaactgctgtgatctgcactgtggcatgagagtttgtcttaatgtaaatgcacatgtaatagcattattcacattgcctgagactgtggaagcctcctttggcaaccagatgccacaggggactcattttcatgctttta

SEQ ID NO: 1395 - DNA, 437 bp, Homo sapiens
  misc_feature 36, 86, 87: n = A,T,C or G
cggtggcggccgaggtacaaggcactaggctcacanttaaagatataaatttaaaccaaactccatacttgttcttgaagcacccnnagccagtgagggaccttctgtgtgatgagttttccctctctcaacacctatacacacacagacaccaaaagctcctggaccacccaaaaaacagtttgactctgaaagtcatctcaatagaggtgccactaacacttcatagcatggagaggcaagagtgacccacacacactccttgctgttagaaaagtgtgtcgcgtgtatgtgcgcatgcctgctcatttaggaagaaggtggcttcaaggaggagtagggagggaaaggcattgcaggcagagagaacagcaggcaccgcctaaggatgctgtgtcacatgagaggacacccgagtggtcagtgatggctagtgt

SEQ ID NO: 1396 - DNA, 378 bp, Homo sapiens
ccgcggtggcggccgcccgggcaggtacctagctctgggccgttttgccatatttggtcagaagcgaccctgccagattcatctcaggggactccagtggattttctgcagccaatctgaattactccaaccatgtgctcttaatttattcgtattgtaaatcatggtcttcagattaggagagttaaaatgaaaccaaaacaaaaaagtatgcacatacatgcatgcacacacagacttctataaaacatctagggtccttctgtcactttctttgctgatcagggccctcagagatcatgagctaaatcctagattgtaattgtgcatttcagaaacttagagtgtgacaaatactgaacaaataaagagggatga

SEQ ID NO: 1397 - DNA, 408 bp, Homo sapiens
ccgcggtggcggccgaggtactccagccagggcaagagagcgagaccctgtctcaataaataaataaataaataaataaataaataaataaataaaaacaaagttgattaagaaaggaagtataggccaggcacagtggctcacacctgtaatccttgcattttggaaggctgaggcaggaggatcactttaggcctggtgtgttcaagaccagcctggtcaacatagtgagacactgtctctaccaaaaaaaggaaggaagggacacatatcaaactgaaacaaaattagaaaatgtaatttatgttcctaaggtgcctccaaggttcaaaaacttattgggaatgttggaggaggttgttgggttaccgaaaataccgtttaggggaggggacaaaagggaaatgt

SEQ ID NO: 1398 - DNA, 550 bp, Homo sapiens
  misc_feature 46, 75, 78, 79, 130, 183, 195, 196, 199, 202, 217, 220, 234,243, 244, 252, 255, 256, 268, 269, 289, 291, 306, 315, 316,338, 352, 355, 366, 404, 408, 409, 414, 428, 442, 460, 465,481, 489, 490, 513, 524, 531, 544: n = A,T,C or G
ctatagggctttttggagctccccgcggtggcggccgcccgggcangtacctggagaccattaactggaccaacnttnngaaaaaaaaatacaacttatatttagtcttcctgaacagtgttagtatttntcagatgtgctggtttatcatttaggtattgggaaattgaaaaaggaagaatncctattacttanngtnttnggaaatttgaaaatnaanaatggaagaaaagnagggagggnnaaataaanctnntagttgtttttnntggagaacaaacattttggngngcccttggactttangattttcanntgggggggaccttccaaaaaangggaaaaaaaattnggnaaagggggaantttacttgaaaagtcctttaaagggtgggggccttatncttnnaaaanttttgggaattccncttggggttggaanaaaaagaattttttattnaattnttttaagaattgaaanttttgaannaggaaacccaaattggtggaaantttaaaaaagncttggancttgggccttttnaaaaaa

SEQ ID NO: 1399 - DNA, 407 bp, Homo sapiens
  misc_feature 178: n = A,T,C or G
acttagggcgaattggagctccccgcggtggcggccgcccgggcaggtacgcggggacataacagggatttttttttatgccttggggttctgtttctgattttctttctgtgtgtttctccattatgttgttgcatttttctctatttacgttatctccctttcccttttttttttntgtccctccctccttcttcctctctattcttcccctccccttgtttttatgcctgattatgtggacacagacaaggattaaaacagggcacctgcccttgaggagtttacaatctgctgggctgaggatcaacacatgttcaaaaagagaggaaagaagtcaaggggagatcatgccagatggacttaatttcaatgaagaacaggcatttccatgggaaagagacaag

SEQ ID NO: 1400 - DNA, 470 bp, Homo sapiens
aatacgactcctatagggcgaattggagctccccgcggtggcggccgaggtactgttcattcaatttttctgaatatttgaaaaattttaacataaaatcttgagaaaaagtaaactgtagatgctaatagcatacaaagtgcagtcagtgtggagaacagaagagaaagatgaattccaatgaagagattcagcaggtttgtggaggagatgggattgaacagaaacttaacagattgggccttttaggtggaggagacaatataggaaaggcacaaacctggggaaatgcacaatgtatgctgaccaagaagtggtctggcgggtagagtaaggctggaagagactctgggagaggaacatgagaggtcccagggctctgaaccagggcaaccaacagaaaaggaaggacagactgggctggaatccaggaggagcagggtggtgtggagacacaacccttgtcaagt

SEQ ID NO: 1401 - DNA, 439 bp, Homo sapiens
  misc_feature 6, 17, 77: n = A,T,C or G
actatngggcgaattgnagctccccgcggtggcggccgcccgggcaggtactttggcttttgtttctagaacaccantgagtatatgctcattaagatagtttgatgcaataaatccttattttacttgcctctattactgcattgtaaactgttgtctactttgtcttcttgaagtcctacacctcccccagcccccacatttggcctatggaacattactttatcctgattttccccctaaccttctggcaatgcctctcagactccttccagaactacttttctctgttttccttttaatgatgacagtttatgcaattgtgtcttcaaacttataacgacccagacaatagtaataacagtcaacatttactgaattcttacttgtgttaagtgctggttatatatgatattttaatctttgtaaaatcttataa

SEQ ID NO: 1402 - DNA, 409 bp, Homo sapiens
  misc_feature 167, 170, 171: n = A,T,C or G
ccgcggtggcggccgaggtacctcctaatttgctcaaagatgctgtccgtatgccaagcgtgctgccttgggatgacatcagctcagaggagctgccatttctaattttcccacaggtgccttagggtctagctgcagccctgcctagtttgggaagattccccatnccnnttcccactggttatgaaaaagaaacatccaaggccgggcgtggtggctgacacctgtaatcccagcactttgggaggccatggggggcggatcacctgaggttgggacttcgagaccagcgtgaccaacattgcgaaatcccgtctctactaaaaatacaaaattagccgggcgtggtgatgcatgcctgtaatcccagctactctggaggctgaggcaaggagaattgcttgaacct

SEQ ID NO: 1403 - DNA, 237 bp, Homo sapiens
  misc_feature 184, 203, 205, 211: n = A,T,C or G
aggtacctgtcagtgttcaatatttaacaaactccagttaaacaggtaagaggtcagcagtagcttataggccttggttctattatccatgtgcccaactgcagccatcgtgggctggtgttaaaattttcctttcaattgtcatttttctaataattgcattcagtgagaggagaagaaaaangttcaagggaatgacctgncntttcancatcctacacattgagatgacttgaa

SEQ ID NO: 1404 - DNA, 459 bp, Homo sapiens
  misc_feature 5, 388: n = A,T,C or G
cactnctatagggcgaattggagctccccgcggtggcggccgcccgggcaggtacatcagaatttcagatctagagcctacatctctgcattatttttatgcaaaagatttgtgatctattaaatctattttgagttctgcccatgaagatatatattttaaataaatattcttcttttacattgggagtatctcccagatcccccacaccaaaaagagaactgtgagatataccagttattaataccagttattaaatcaacaactgggccaggcatggtgtctcatgcctgtaatcccagcactttgggaggcccgaggtgggcagatcacaaggtcagggagatcaagaccatcctggccaacatggtgaaaccccacctctacntaaaaaatacaaaaaattagctggggccgtggtgggccgttgtgcctgttaattctcagctactaggggga

SEQ ID NO: 1405 - DNA, 302 bp, Homo sapiens
gggcgaattggagctccccgcggtggcggccgaggtacatgagatgggagctcgacacattttatttggagaataaaagaaaatatgccgtcatcaaactagagcgtgttggggggcatctggtttacagaactaagtcaaggagaagaactctcaagcaatggtgacatctgccagctctgcaaagtgggccctgccttgtcacacaagtctccttgggcaaatgttttctatgtagattttaaacactttcctgtgactttctcaaggtcttttggtgacacatgcagcttgaagctttt

SEQ ID NO: 1406 - DNA, 412 bp, Homo sapiens
  misc_feature 169, 178: n = A,T,C or G
cttagggcgattggagctccccgcggtggcggccgaggtacctgacatgtggggcactcaatgaacatttatcagaggggagcatatcaaacagtattggggcagtgactgccaaagaacagactgtgatctagcggggtggggaaaccaatagtgggtggtgaaagcnaccaagttnggtattgaaactgggtcatcattggcacacacacaaaaacaaaacaaaaaacacaggtgggcacggtggctcaagcctgcaatcccagcactttgggaggctgaggaggatggatcacctgacgttgagagttcgagaccagcctgatcaacaaccttgctaaaaatacaaaaaaaaattccccaggtattggtggcgcatgcctgtaatcccagctactcaggaggctgaggc

SEQ ID NO: 1407 - DNA, 431 bp, Homo sapiens
  misc_feature 15: n = A,T,C or G
cctatagggcgaatnggagctccccgcggtggcggccgcccgggcaggtacataaagacagatatatagattaatgaaataaaattccattaatatagaatatagagcacacaaataagctcatgagcttatacaagtcagtcaagtgatttttttacaagggtgccaagacactcacaggtgaagggaacaggctgaaaggaaacagtgctatgtcaactggatagtcacatgcaaaggagtgaaggtggaccccctatatcacaccatattcaaaaattaactgaaaattgatcaaagacctaaatgtgagagctaaaactataaaacccttagaagaaaacacaagggagtaaatctttgtgactttgggattacacaaccgatttcttagcctattgtgataccaaaagcattggagtaaaaaaagg

SEQ ID NO: 1408 - DNA, 401 bp, Homo sapiens
  misc_feature 319, 398: n = A,T,C or G
ccgcggtggcggccgcccgggcaggtaccaggagggtattgatgtttgaggtccaaactgaaaacccatcacctccttcccactgctatagcagcgttagccctggggttcattatctagccagttcacaccttctaaagtggggctctgaaaatgtcttacttccctcacagacaaggcaattctcaagcctcctgagatcacccaccaaccagagcaactgctgtcacttggaggtgcagctgaattcttctaattgtgacacaaactcttgaaactgtaaatgctgaaagattaaatggaggttataacactcagnaagggttttacaagtaaaaaggtaaggtcaaaatcaaatagggtctttattttcataatctggtaaatgggttttagcntct

SEQ ID NO: 1409 - DNA, 437 bp, Homo sapiens
  misc_feature 85, 87, 134, 142, 191, 258, 282, 338, 356, 361, 387, 406,417, 422, 425: n = A,T,C or G
cttagggcgattggagctccccgcggtggcggccgaggtactttttttttttttttttttttttttttttttttatttttagtananacagggtttcaccgtgttagccaggatggtctcgatctcctgacctnttgatccncccacctcggcctcccaaagtgctgggattacaggcgtgagccccccantccgggcctaaacgaggactttatttttactcaacttagatgggcgttcattcatttgcttactcanctgtgccaggaattaagttgggcnctgggaattccaaaaccaacaagacattctctgtcatcagggaactcacagcctantttgagagataaacaaangaacntgaaattataatttcaagtaacaaanaatgtaggtgttatggcanaggggaatgtngtaanaancttggccagggg

SEQ ID NO: 1410 - DNA, 407 bp, Homo sapiens
  misc_feature 5, 26, 42, 53, 55, 350, 369, 383: n = A,T,C or G
aggcngccgaggtacactctacaagnggaagtggggcacttnatggactgggntngcaggtcaggagtagcccaaggtatgcatgtgcaagaggaaaacttgataaactcaagtttatcaagaaattgttgatttcttgttcaactgttgatttgaaccaggcttctggttcaaagggccaggccatagctacagctgctctggtgggccaaaccaaaagcatcactgagtttgggcacttgaagtttcagacagctgggagtctccatagaaccggaagggaaaacacttccaagggatatgagcatgtcttgtccctgcctttgggccacccatggcacaccagcttncacagcagcctgaagcagnagccaagatccagnagggaggcttgttcgggaggggac

SEQ ID NO: 1411 - DNA, 638 bp, Homo sapiens
  misc_feature 602, 613, 619, 626, 631: n = A,T,C or G
tatagggcgaattggagctccccgcggtggcggccgcccgggcaggtactttttgtagagacaggggttttgccgttgcccaggctggcctccaactccttgagctcaggtaatccgccccccttggcctcccaaagtgctaggattacaggtgtgagccccacgaccagcatctccatagtgtcttctacctttacattaatgcttttaatctacctaaaatggatctatgtatagagactgagatagggcatcaattttaattttttccattgcataactaatgggccagataattattgaaaaatccatccttctctactgatctacaatactccgctgcatatatcaagtgtctacatatgtggttagtctgctgctgactctctattctggtccatgattaatttgcccagatttgtgccaatatgccttttaaatgttcaaggtcttaattgaagcttaagcaaaaaaatttttaataccctggattgaaatatttacaaataaaatcaaacttttaacatcactattttctaaccagtaagaatttaaaggttcttttaagaatcctatttaatatcattaaaaattaattggcntgccttggtanggaagngggtagnaaagnaaaaaaa

SEQ ID NO: 1412 - DNA, 378 bp, Homo sapiens
  misc_feature 250, 315, 327, 339: n = A,T,C or G
cgtatcactcctatagggcgaattggagctccccgcggtggcggccgcccgggcaggtacagaggagaaaaataataataacagtaatacctgacaggttgggagagattgtgctggtgtcacagagtctgtgacggcacttgtaagggagtgctgcataaatgagagtggctgctgttgttgtattattatttgttttacatggttataaaactttcctcaagccccgtttgaaaagagaaatcagtanttggcaaacaaattcgaagaacaatggtttctttctttttttcttttttttttttttttgggacngtcttgctctanaatgcagtggcngggatcctggctcactgcaacctcacccttctggattca

SEQ ID NO: 1413 - DNA, 399 bp, Homo sapiens
ccgcggtggcggccgaggtacctcaattatctctcataacacacagggtcccatgttggccattgcctcagcacatagtcaggtagccagcctctctgaatgcctggtagccaggattaaaataaataccctaggtattatctgcatatctcagggtcaggatatatcccatgactaagcccacaatcacagtaaattctttgagccagaccacattttggactcacatttaatgtaaatccacatcactccaatcctgcatgatggcacaggtagatttttgggagctggacaataaacaactattgagtgcatccccaccggaccccaaaattcaattttataagaagtatctcaaggcattaataagtgcatcaaaagatggtcaatggtggcatt

SEQ ID NO: 1414 - DNA, 455 bp, Homo sapiens
  misc_feature 1, 423: n = A,T,C or G
ncttagggcgaattggagctccccgcggtggcggccgaggtacgacatgaggcaggggttaaagttttatttttgtctccacataaacagccaccaccacttattgaaatggccaccctttctccagagctccatagcgctgcctctgtaatgcatcaagtgtccatttatgcctgggtctgttttggtctctgtatcctgcttcattcacctatttttcctctatttttctatctgctatttctatctatctatatttctatatttcatctatatttctattattcacttatctattttttatcttaataactgcagctttataataaatattgatagagcaagtctgaccaccacattcttttacaagagaaaattgtctattcttcgcctttggcatttcccttttcggggggggtttgntctttgatttttgaacccaagggtcttgtttc

SEQ ID NO: 1415 - DNA, 288 bp, Homo sapiens
ggagctccccgcggtggcggccgcccgggcaggtacctaggggaatttctgagttcatgatatcgtaggtggtgtggaaacaagtcccagcataaacccacacagctggctgaatgaagttcaagtgaaggtcatgcagcatcaaagtagatgtgtgtcactgaaacttatggcagtggagtgagaataattttgaaattacttagattgtgagaaaatctggctgatgattagaagtgttgatataagaggtcagttttggagttccactcaaaattcatactaatt

SEQ ID NO: 1416 - DNA, 620 bp, Homo sapiens
  misc_feature 422, 589, 605: n = A,T,C or G
ccgcggtggcggcccgaggtactatatgctagaaacttggctgaatgatttgacattatcctatttaatgttcatgacaatccaataacgtaaccactcatatctcccttttgtgcagataacaaactgaggcccagagaaatcaaatatgttgcaaatctacatcgttgaagagatgggtttcaaatccaggtcggcttggcccttgccacgacttcataatgaaattccatgggtgagtgttaccagtttctggtccatccttgcttatttcaagggtctcatcatcccatccactgtatcactttttttgttacaggctttactcttttctaccatggaaaagactaatgatatttttttctccataagcttggaaatattatcaatcaccataaaattcagccttcctctggtaactntggagaccctcagagcttttcttatttccagagacaggcggtttggatgagaattattctcttttttcacacaaattggccagatgacatctttactggtatctgtaaaagactgcatcaccccagctactttcctgctgacttccacttgggtttactcaatgggngacactcacagggccntaagaaattagaaag

SEQ ID NO: 1417 - DNA, 427 bp, Homo sapiens
gggcgggccgaggtactgtaaataaacaggagagaacggagaaaagtcatgactcaggggtcttcttctcacagggctgagtaatcacaggagctttggatgcaggcaggctggcgctctgatcctgactctttcaattacagactgtgttaccttggacaatttggctaagtccttatgcaaaaaaagtatgatgccatctacttaataggattgtgaggattaaatgagataattcatataaagcccatagcggaaggcctggcaggtagcaagggcccagcaaatgagagctattcacgttgccattaatgcatcatcatcgttacaattatcatcttttttttttacgttccaaagattcttccttctatctattatctcatcatatctcatctcatcatatcatatctcatcattttatcca

SEQ ID NO: 1418 - DNA, 253 bp, Homo sapiens
aggtacgaaatgttttggaaagacttgctaaaggtgagttctttcaaaaagtgtatgaaattagctgtggaagaaacaactacaaattatttggggaaaaactgaaaaatcaagaagtttatgttgatattactttaagggtgtttaagtctccattctacttggaaaatcacaaataatattattaaaattagagtgttactttaaatggaaagcttagggccagccacagtggctcatgccctgtaatccc

SEQ ID NO: 1419 - DNA, 378 bp, Homo sapiens
  misc_feature 308, 312, 316, 317, 318, 320, 323, 326, 330, 353, 367, 370: n = A,T,C or G
ccgggcaggtactagacaacagctgtttccctggtgtatgatggagccaacaccagtcaggggtatattattacatctgattatcagtcaggataaggtaggcaattctctggtaacaaaccatcctcaaatctcagtgcttatataggcactatttcttgctccactagatggttcatacttgctcacactacccatcatgggtcgttaggagatctctgcttatggtcactcaggaattcatctgacaaaggagccaccaccttgaatattatgggtcactgtgccttgagggactgaaggcaccntctntccnnngnganaanctgnatattggcaacctgggcttaggnccttttttaatttnttncttgggaa

SEQ ID NO: 1420 - DNA, 614 bp, Homo sapiens
  misc_feature 61, 65, 99, 140, 147, 150, 171, 172, 206, 207, 211, 244,249, 251, 253, 255, 256, 260, 268, 273, 284, 289, 293, 302,303, 323, 327, 331, 337, 353, 356, 358, 376, 391, 413, 420,427, 437, 448, 450, 457, 463, 468, 472, 473, 480, 482: n = A,T,C or G
  misc_feature 492, 498, 543, 546, 549, 555, 556, 563, 575, 582: n = A,T,C or G
aggtaccaaggcccaatcaccccaaacagtgacaggaacataatttcctgttgggaccagntctnggaattttgcaccaacatgatcccatagttccanatctaacgttcccttttcaggaaaccaaggacagtgattcnttccacntgncccttaaatagggggtgaacnnatatttttttcccatgggggaaaccctgaaactnncccncaattttataaaccagggaaatgttacataatnagccnangnannaatngaggccantaaanttgtatttaangtacntttnttgccgttnnaacacccaataaggtcttanctcnctcngggtanccaaaatttaccaacnaangnaccagaaccattctaacnccaaatttccgtttnccgtgggggggaaggcccccgnaaaaacnaaaaagnccaattttcnttccttgggtngngggaacncttggnggaancccnngaaattngnaaaaacccantttttntttttttcccgggcaaacccccttaacctccaaaaaaaggggggnaanaanttctgnngggtttnttccccccaaancaaattnggcccaaccctttttaaagggggaaaaaaaaa

SEQ ID NO: 1421 - DNA, 377 bp, Homo sapiens
ccgggcaggtaccttcaattccagtcacatggctcgacctagcctcaaacttcttaaatgtgtagctttcttcttcaatagtgagaagtcttgctcctattgtctttaatatatttatatgttttcttattctactttacaaaaccaatattttgatacacatgccataaccttctcagctttaacattgctagtcatctctaatcataccctcagatttgactctgaatggtccttgttgtctcttcagccccagttgtttctttggcactggccgtcctcctgacctctactgtctccttggccctcaccctgaaagtccttccagactcacttgcctctggctctataagatcctgggtatcaccagggcctct

SEQ ID NO: 1422 - DNA, 419 bp, Homo sapiens
  misc_feature 152, 197, 322, 323, 365, 367, 372, 397: n = A,T,C or G
ccgggcaggtacttttttttttttttttttttttccttctcttcttataagacatctgatttaaaaaaaaaagaataatagatttaagaagaaaaaaattagctaataatgacagcaggcttgtaatattatcataatgtcatttatcatanatatccttattctccagggcagcacttctcaaatccttgacagtntgacattttgggccagctaattccttagggagggacctttcctgaatattcaggccgttgagtggcctgcttggccttgacccgctcactgccagtagcacacctcccccaggcttcagcagcannaacacctccagtcacttcagtgggggactgggtaggtggggnanacaanaatcgcacccagttaaagtgttctntgcggcagggttgaaccgggaa

SEQ ID NO: 1423 - DNA, 354 bp, Homo sapiens
  misc_feature 188, 214, 216, 294, 309, 335: n = A,T,C or G
ctatagggcgaattggagctccccgcggtggcggccgaggtactgggattataggcgtgagccaccgcgtctggcctctaacgagatatttctaaaggttaggccttcagtcaagaattttaaagctggatcttagaggttatctaaactaacctctccatttcatagataaggaaagtgagtcccanaaaagcactggtttggacaagttcananagctaaaccgtgactgtggatgtatgattctgtctcttaactcctaatccaaatgtcttctcactagataaggctgtnccttctacatttganggctcaaaccccatggatggatgganggaaggatgggtggaggga

SEQ ID NO: 1424 - DNA, 390 bp, Homo sapiens
  misc_feature 183, 335, 363, 376, 389: n = A,T,C or G
ccgggcaggtactgggattacaggcgtgagccaccgcgtctggcctctaacgagatatttctaaaggttaggccttcagtcaagaattttaaagctggatcttagaggttatctaaactaacctctccatttcatagataaggaaagtgagtcccagaaaagcactggtttggacaagttcanaaagctaaacagtgactgtggatgtatgattctgtctcttaactcctaatccaaatgtcttctcactagataaggctgtgccttctacatttgaaggctcaaaccccatggatggatggagggaaggatgggtggaggggatgggatggatngatggatggataggatagtttacctcanttcattcagtttntgcaaagaaaagnt

SEQ ID NO: 1425 - DNA, 384 bp, Homo sapiens
  misc_feature 158, 198, 220, 238, 270, 299, 330, 336, 359, 363, 373: n = A,T,C or G
ccgcggtggcggccgaggtacagtaaggtggggccctgattacggagcatcttgaaggctggactgtggtatcgatactttattctgtggtatgggatgctggcgagaactttgagctagggagatgtggggtttgagtggtgctgtgaacacataanggccaaaatatatattgtgttgggaccgactgggccccanagaccaggatgtgggttggcanatgcttcttgttatccanctgggagaccgtggctccatgtaggaaggtanggaaggcagggatgaatgtggagactganaatgaaatgtgggtgaatggggactgttganaatgantgtaaatgtgtaatgttttgcangcanaaagtttaanagagaaattct

SEQ ID NO: 1426 - DNA, 316 bp, Homo sapiens
  misc_feature 60, 289: n = A,T,C or G
caccgcggtggcggccgcccgggcaggtacatgagatgggagctcgacacattttatttngagaataaaagaaaatatgccgtcatcaaactagagcgtgttggggggcatctggtttacagaactaagtcaaggagaagaactctcaagcaatggtgacatctgccagctctgcaaagtgggccctgccttgtcacacaaagtctccttgggcaaatgtttttctatgtagattttagacactttccttgtgactttctcaaggtcttttttgggtgaacaccatgcnagccttgaagctttttgcaaaggggct

SEQ ID NO: 1427 - DNA, 477 bp, Homo sapiens
  misc_feature 445, 458: n = A,T,C or G
ccgcggtggcggccgaggtactcaaggagagagtttcaggagtgcagccatcaacactcaagattccatgaaactttcagcctaactgatggtcccactgattactcactcagaacaaaacatatttcaccaaatatcactttcaggacttcattcctgatccttctggggtagaaggtgcaaaaacctggtttgtattagagacattaggaatatttcaataaggccaacagatttccatgctgaagggcacaagaaatggaagagctaatcccattccctttggagttcagtttagatagtttaattgtcataaatcctatttgttaaacaggtatcctttccctaaatccatagtatacccttgttttttaaatcccatgtgtcaaagtaaagaaccgaaagggagcctttgcttcccagcttttaaataaaaggcaataanccagggcaccgcnctggggatgccatttgttt

SEQ ID NO: 1428 - DNA, 402 bp, Homo sapiens
  misc_feature 4, 380: n = A,T,C or G
actnctatagggcgaattggagctccccgcggtggcggccgaggtactttaatttttttttttttttaagcagagatggggtttcaccatgttgaccaggctggtcttgaactcctgacctaaggtgatccacctgcctcggcctcccaaagtgctgggattataggtttgagccaccacgcccagctgtgttatgttttaacacatgtgctatgtcgctaagtggttggaaatatgaaaatgagttgatgtgttcttataataagacatctgctttagtatacattattagcatgctcttccactttggaatttttatttttatattttcacttaggcaaaaaatactttcaaccatttaaaggtgggtattaaaaagncaacagtttgctttttaaaaaa

SEQ ID NO: 1429 - DNA, 382 bp, Homo sapiens
ccgcggtggcggccgaggtacggaagatacggcagtgagcaaaaccaatcatgttccttgtcctcatggggcttacagtggggggagaaaattataagcaaaaagaaaatacaaagaaatacaacacagaaagcacaggcatgaggaaggagggcacggttctgggaaggcttcttggccgaagcaaccagacagcaaaacaggcttggccaggacagacatgggcctgttatccagctggctaacggtggagctacaagtgccttcgcctccagaatcattggaggtgggtaatgagccatttaccctccagtgaagcccatcctaaaattaagtgctctctaactaaacaaagagttgtttacttttttctataaagaaa

SEQ ID NO: 1430 - DNA, 160 bp, Homo sapiens
  misc_feature 4: n = A,T,C or G
actnctatagggcgaattggagctccccgcggtggcggccgcggtaccctggagccttgagcaacgttcttttgcattatgccaggaagaactgctggcaaatgtaagtgggcttagaattcatgactgcagtcagcagcagttgtgtaaatctagggag

SEQ ID NO: 1431 - DNA, 430 bp, Homo sapiens
  misc_feature 2: n = A,T,C or G
tnctatagggcgaattggagctccccgcggtggcggccgcccgggcaggtaccactgcactccagccagggcgacaatgagactccgtctcaaaaaaaaagattattaatttaaaaatattttaagtgatcagctgttactctaccccaatctcattggagaataagattctactgcggttctaagtcattgtgtgctgagtaaagtggttaactagtgatttgaaagaatacaggagagagggtaggagagtgagtaacaggtggagcctctgttttctttatagaaaaaagtaaacaactctttgtttagttagagagcacttaattttaggatgggcttcactggagggtaaaatggctcattacccacctccatgattctggaggccgaaggcactttgtaagctccaccgttagccaagctggga

SEQ ID NO: 1432 - DNA, 331 bp, Homo sapiens
  misc_feature 165, 174, 178: n = A,T,C or G
gcggtggcggccgaggtactgggattataggcgtgatgccaccgcgtctggcctctaacgagatatttctaaaggttaggccttcagtcaagaattttaaagctggatcttagaggttatctaaactaacctctccatttcatagataaggaaagtgagtccccnaaaaaagcnctgntttgggacaagttcagaaaagctaaacagtgactgtggatgtatgattctgtctcttaactcctaatccaaatgtcttctcactagataaggctgtgccttctacatttgaaggctcaaaccccatggatgggtggagggaaggatgggttgg

SEQ ID NO: 1433 - DNA, 414 bp, Homo sapiens
  misc_feature 8, 252, 365, 397: n = A,T,C or G
aggtacangttaattgatcaattttaaggagaaactgttttcttgtaaaatgtttctaagcccaaaaattatttgatcgcaaaatgttcgtattgaaatataagtgcctaatttcaaaaaggaagctctttagcaacaaagttgtttccttttttttccaatttaaagatatttccatctctatttcaaatgcttgcttctaaaaaaaagtttagtgaaataagaggataaattttatgtttttattgattngaatgacattttcccttggatgaattatgaaatgtctggttaactttagcattagtgaagcttgaatagattttaatattaaagcaagtgtttagttgcttgacatgatcagntttacactattgcagagccttaattaaagttnctattaaactgtgtaaa

SEQ ID NO: 1434 - DNA, 300 bp, Homo sapiens
  misc_feature 271, 281: n = A,T,C or G
ccgggcaggtactactggcttcccagtggttgggttgagtataacgcccccaaatatgagtaaaagaagaaaaagttaattcaatcaccaagtcttgctcgcatattaaaaattggatagatgaatgttcaatcatatgttttggctttggccagccagacgaggtcaatttttagatttgaactgcttagaattcttcaggcaagtcttgatggagcacttcttggatagttagaactttaccaggttcacaggagagctcaagatgaancgaacacctnatccacactggtttccttt

SEQ ID NO: 1435 - DNA, 443 bp, Homo sapiens
  misc_feature 345: n = A,T,C or G
ccgcggtggcggccgcccgggcaggtacttttttttttttttttgagacggagtctcgctctgtcgcccaggctagagtgcagtggcgcgatctcggctcacttcaagctccgcctcccgggttcacgccattctcctgccccagcctcccgaatagctgggactacaggcgcctgccaccgcgcccggctaattttttttgtatttttagtatagaccttgcttttttatccattctggtaatcttttccttttattcagtgtgtcttgttccattaacattcaatgaagttattgatatgattaagattcaggctctatttactttttggttttctatttgtnccttctgttttttgttcctcctttcctgctttcttttggattaaatgatcccaaaatgattttttagaaataattggggtaaattttatctattaagc

SEQ ID NO: 1436 - DNA, 325 bp, Homo sapiens
  misc_feature 96, 106, 122, 145, 156, 182, 197: n = A,T,C or G
aaatttaatgagaggtaacccatgcaccggcaggaagttcaaggggacagaaggggcttgctccactctggagccctatctcctctcacctccttncttctagttngacatgctgatcttgnctctctcttttataaagtgcttncaggccctttngattaggatgctgtcctaaatccttnctaaagagaggtttnggagccaccaacactgcttcactgtggaataaactttccttattaagattcttcattcactcataatcatctcctttttcctcactgctcattcatttatggagatagcacccatatcatagctactt

SEQ ID NO: 1437 - DNA, 358 bp, Homo sapiens
aggtacatttaaaagtctatcttatatatttgttatgcaaatcaatagatatgtatcaggtaaactagaaattctagttagaaaaaatcctttttgtgtcttggtttttgaagatacttaaaaggtgaaaggaatttctgattaccattttaacatgtttagatatgggctttttagtttcaatagaaacatcttttcctagattatcttgctggtattaagttgttaaattttgctacgctttattttgaagttttactgtcttgtaaaactccatatttttacatagttttactgtcttgtaaaattccctatttcttaggttgatagaaatggcaaaacaagttaacttgcttaa

SEQ ID NO: 1438 - DNA, 420 bp, Homo sapiens
  misc_feature 170, 359: n = A,T,C or G
ccgcggtggcggccgaggtacaaactggaggtagggaatgggcaggaacactagctacattaaaaataatttcattaaacttatacagaaaacattattaatatacttaggattcccagagtaacttatttccctttccagtattggtatatcaataataataatatttnatttactttatcgtggtatttcatattaaaaatactttttaaagcatgactaaataaacacatgtatatgtttatgaacataaacactactgaaacaaaagtttcagaaaacgtttttcttactgcactctgatattttttatcatatttctttttttttttaaatgctagtaataactcactaaatanattttatcatgggagttatcaaatacctaccttagggtcatgtgatacctttagtaaataa

SEQ ID NO: 1439 - DNA, 378 bp, Homo sapiens
ccgcggtggcggccgaggtactggacttgcctaatttctaggcatggagttggggcttgtaacaatggtgggagatgggcagtgctttgggaatgtagctgaccactgcatgggtgctaactagcccagggatcttaaagaatttgtgtaggccatgaggatccactccagccactgaatagtcatagaattgaatctaggacatcaccgtatgctactaccatgcagttttatcccttctaagaatccaaatgccctagtttaatttctaaatttttgttttgtttattttcactaaagcaacatgttagtggactgcggagggaagtgaattcatggctggtcctcatcttgatatcttttaataggatcatgagg

SEQ ID NO: 1440 - DNA, 431 bp, Homo sapiens
  misc_feature 380: n = A,T,C or G
ccgcggtggcggccgaggtacttttttttttttttttttttttgtatttttagtagagacagggtttcaccgtgttagccaggatggtctcgatctcctgacctcttgatccgcccacctcggcctcccaaagtgctgggattacaggcgtgagccacccatccggcctaacgagacttatttttactcaactagatggcgttcattcatttgcttactcagctgtgccaggaattaagttgggcactgggaattccaaaaccaacaagacattctctgtcatcagggaactcacagcctagtatgagagataaacaaatgaacatgaaattataattcagtaacaaagaatgagtgttatggcagagggaatgtgtaanagcttggcagggtatccagcagggatacctaactaagccccactggggaag

SEQ ID NO: 1441 - DNA, 424 bp, Homo sapiens
  misc_feature 422: n = A,T,C or G
ctacttagggcgaattggagctccccgcggtggcggccgaggtactttggcttttgtttctagaacaccaatgagtatatgctcattaagatagtttgatgcaataaatccttattttacttgcctctattactgcattgtaaactgttgtctactttgtcttcttgaaatcctacacctcccccagcccccacatttggcctatggaacattactttatcctgattttccccctaaccttctggcaatgcctctcagactccttccagaactacttttctctgttttccttttaatgatgacagtttatgcaattgtgtcttcaaacttataacgacccaggacaatagtaataacagtcaacatttactggaattcttacttgtgttaaagtggctggttatatatgaatatttttaatnct

SEQ ID NO: 1442 - DNA, 448 bp, Homo sapiens
  misc_feature 232, 408: n = A,T,C or G
cttagggcgaattggagctccccgcggtggcggccgcccgggcaggtacacgccaccacaccagctgatttttttttattttgtgtggagtcagggtctcgccatgttgtccaggctggtctcaaactcttgggttcaagtgatcctcccaccttcgccccacaaagtgctggaattacaggcatgagccactgcacctggccatgttgtcttctttttcattacccacctnttaatcctacacatgcacatgtctagatagtatacagagataaacgtgtataaaacaacacaaatagaaaaagtatgcatatgtataagggatctacaaaaacagaaaagtcagaaaacccaaattaagagcacagtgtggctcacaggctaatccctgcagaggcagctttgggnttcagaaccaagtgaagctgcctatatgttcaaccaactg

SEQ ID NO: 1443 - DNA, 460 bp, Homo sapiens
  misc_feature 4, 409, 429, 460: n = A,T,C or G
actnctatagggcgaattggagctccccgcggtggcggccgaggtacttttttttttttttttttgtatttttagtagagacagggtttcaccgtgttagccaggatggtctcgatctcctgacctcttgatccgcccacctcggcctcccaaagtgctgggattacaggcgtgagccacccatccggcctaacgagacttatttttactcaactagatggcgttcattcatttgcttactcagctgtgccaggaattaagttgggcactgggaattccaaaaccaacaagacattctctgtcatcagggaactcacagcctagtatgtgagataaacaaatgaacatggaaattataattcagtaacaaagaatggagtgttatgggcagaggggaatgttggtaagnagctttgggcagggggtatnccagcaggggatacctaactaagccccactn

SEQ ID NO: 1444 - DNA, 446 bp, Homo sapiens
  misc_feature 397, 420, 429, 433, 435: n = A,T,C or G
actccttagggcgaattggagctccccgcggtggcggccgaggtacagaccatgtcagaattcctagtcttttacttctaaattttattacatcgtgtgaaatttagaaaaatataagctgtttattttcttgatcaagataggtgaagaaatacagaaaagaaagaaataatgaaagcaaaccccaactttcagatttggacacacctttgctaaaaactatcaacattttccccttgaaattctgagtggaaagatatgtgcttccctaagtcaggagctgtatatgcactccccaccccgaaacattttttgggcaaatggaatcattaaaggaatgagaggtatctactcttcaagttcccacttcattggccacaaaaccagaaaaccgctncttgcagccttttcaagaaggtngacagcctnctgncnttcaaaagggg

SEQ ID NO: 1445 - DNA, 403 bp, Homo sapiens
  misc_feature 202: n = A,T,C or G
ccgggcaggtaccttcaattccagtccaaagccacatggctcaacctagcctcaaactttttaaatttgccgctttcttcttcaatagtgagaaatcttgctcctattgtctttaatatatttatatattttcttattctactttataaaaccagtgttttgatacacacggcataaccttcccagctttaacattgctagncatctgtaaccataccctcagatttgactctgaatggcccttgttgtctcctcagccccagttgtttctttggcactgccaccctcctgacctctactgtctccttggccctgaccctgaaagtccttccagactcacttggttctggctctgtaaggaccctgggtatcaccagggcctctgctccctccatagaaccct

SEQ ID NO: 1446 - DNA, 356 bp, Homo sapiens
  misc_feature 6, 50, 56, 62, 102, 119, 126, 132, 139, 142, 152, 166, 171,174, 179, 204, 221, 305, 314: n = A,T,C or G
cgactnctatagggcgaattggagctccccgcggtggcggccgaggtacngaaganacggcngtgagcaaaaccaatcatgttccttgtcctcatggggctnacagtggggggagaaanttataancaaaangaaaatncanagaaatacancacataaagcacangcatnaangaaangagggcacggttctgggaaggcttnttggccgaagcaaccanacagcaaaacaggcttggccaggacagacatgggcctgttatccagctggctaacggtggagctacaagtgccttcgcctccanaatcattgngaggttgggtaatgagccatttaccctccaggtgaagcccat

SEQ ID NO: 1447 - DNA, 368 bp, Homo sapiens
  misc_feature 4, 340: n = A,T,C or G
actnctatagggcgaattggagctccccgcggtggcggccgaggtactaagttgccatttaagaacctcttcaggttccccgtctccttgagctatgaaagttttcatgaacacttcagttttaatggcatgccaaacattttgttccatgagcaacgcaacagttttaaaaattgccattgagtgtttcaatagaatttagccagttgtttttaaatatattttctatgagccaaggcttacaaaaatgtataaagaggaagtgcccagatataaagaagctttgaaatggttgctgttgcctccttaaaaatcatcattaaacaatctttcaaacagncagtgttttggctcatgtaatttaatca

SEQ ID NO: 1448 - DNA, 391 bp, Homo sapiens
ccgcggtggcggccgaggtacctacctgcggtatctgatcagtttctgcctagtcagatgtgccctgttgctgagcctgcttgggtggggagcatgggaaaatggggcaagtgcttcatgagggagctgttctcagccgccccctctcccaactccccagctctctctccttgttctgtctcctgtttctgggctctaatcctggtcaggcccaatgccccttgcctgtgatgctgggtctgcagttttgctcgccgtcctcgctttgccttcttgcccgccacttccagcattcctcctctgctcagcttctgagctggtgtcaggtttctacctgcctggccactgagcccacctgaagatgtctggccaattccttttagcctctgcc

SEQ ID NO: 1449 - DNA, 444 bp, Homo sapiens
  misc_feature 3, 219: n = A,T,C or G
ctnctatagggcgaattggagctccccgcggtggcggccgcccgggcaggtacaatgaaaggtaaaagtaatgctctcagaggaaatgtttccattctagttctatttggaagtccttgggacaatttgtgttttgattatatttagaaatcttcagtattttgtcttggccaggtgtagttgctcaggcttgtaatcgcagcactttgggaggctaangcgggtggattacctgaggtcaggagtttgaatcaccctggccaaaatggtgaaaccctgtctctactaaaaatacagaaattagctggatgtggtggtgggtgcctgtagtccaagctacttaggaagctgaagcaagagaatcgcttggacctaggaggcgaaggttgcagtgagtcttgattgcgccactgcacttccagccctggtggacaaagagaaacc

SEQ ID NO: 1450 - DNA, 594 bp, Homo sapiens
  misc_feature 126, 188, 247, 259, 278, 281, 334, 341, 342, 357, 371, 380,383, 387, 409, 421, 436, 437, 449, 461, 465, 469, 470, 471,475, 490, 494, 508, 516, 526, 527, 550, 553, 580, 582: n = A,T,C or G
ccgggcaggtacatcactgaagcagtgggttcttcaagctcacttggaagccactgcaaatctcaggcttctccagaaatctcttctgcaactgtcctgatatgtagcatttaagtgagaggtttngcaaagggccacttttaaagctgcagtgaatcttcatgtctgctcatgcaatatggctgcanctgccctcttgggaaaattatgaatctttccttgggcaccttgtaggtcaattctttgntaaaaaatgaanattgaatccttccaccccncanaattttggatattgaaataattcaaaggactatattgattattcccattggcnagggttnnttcatagtaaggagnttattaaaaaaaangggtttttngtnttancaattaaattggaatgaacctnttttggttgggnaagtaggaaggccannggggccaattgnccttttccccanaagnccannnattnctctaaatataaaantttnggcttttggaaaanggggaagnaaaattaagnnaaggaaccttggttttttggggnccntttttttaatttggtgggggttttaangnggaaggggttaa

SEQ ID NO: 1451 - DNA, 424 bp, Homo sapiens
  misc_feature 194: n = A,T,C or G
cgactacttagggcgaattggagctccccgcggtggcggccgaggtaccttctgctgttccctgggtcttcaatgactcaatttcccaccagcagtatcctttaaagccatcctgcatcctgagacaagagattgacaattcattgataagtagtcttaattgtcactattacagggctgtaggtcctttggcnagcccatgcctttcagtcctaaatggtcttcaaggttgggctgtgttgtccaagagctgaggaccttacatttattgttccaatatttattggctataatgatttctgtgggagcagtcagctgtcagaaaattttgtctcctttgtaggtaacctgtcattggtctttggatttttttatagttctccctttgtattctggtgtaaattttaagtttcaatctgttgtt

SEQ ID NO: 1452 - DNA, 417 bp, Homo sapiens
  misc_feature 367: n = A,T,C or G
ctatagggcgaattggagctccccgcggtggcggccgcccgggcaggtacttttttttttttttttttttgtaaagacggggtctggctttgttgccctggctggtcgcgaattcccggactcaagcaacctttctgcctcggcctcccaaaatgctaggattataggcataagccactgtgcctgtccaaaactttatttttaatgacaaaacctattttcctatagctctgcttggaatgctgtatttatcctaagcaccagttttggccctagctggcctgtatacagctttaggtaggctcttgatctagttttgctataggcagggtagatctcagtatttcatattttacttgtggcaganacagtgttaacctttctctcatggatagcggattcattgagacagatttt

SEQ ID NO: 1453 - DNA, 240 bp, Homo sapiens
  misc_feature 48, 52, 73, 74, 75, 77, 103, 165, 167, 172, 174, 179, 181,192, 195, 198, 206, 207, 213, 229: n = A,T,C or G
ttagggcgaattggagctccccgcggtggcggccgaggtacctcattntgtnccttgactttagtgtagtggnnntntctgcttttcgttaattttctcctgnccaaccagccaactctggctccctgtggttataggaaattatccgtgcaatgaacttaattnanaaaantntgctncntaaagaggtgncangantttaattnnttcttnatagtccagttctatngtatgactttt

SEQ ID NO: 1454 - DNA, 443 bp, Homo sapiens
cgcccgggcaggtacgcgggcgtctgctaattttttgctttctctaaagcgcttctgctcactgccatatggtaaattcctcagtgaattattcagggtcttgtcctgatgcaaaagacactttaaaaaaaagcagaacattccttatccctcttggaaaaagaaataacaaataattaaggccacagcgctcagggacccaagtttattggcaataaaaggtagctgtgctgacaacgctaccaattaatctgccaaaagcgagctcagtggtgttgccataaagatcatgtgttggaaaacaggactggagacatccagggatctatataaagcatagacaacagtcttagcgatcatggggcagcaatgtgggcaccctaccttcagcagatatggtagcggtctgcgttctttctgtaacaaaactcctcactacgtgg

SEQ ID NO: 1455 - DNA, 258 bp, Homo sapiens
tggcggccgtccacaaatgtctgcagctacgatggaccctcagctgctggacaggaaagaggatcaagctaagaaggcccagagtgtgcaagcagagagagggtgtggacagaaaaccttgccttctccagggctagtggcgaaagctatctcaggctggctcaagtggagagaaaaaagcatgagatcaagcaatggacagctggggaagggctggcttttatttcctcagctcccaagctcaatccctggcactgg

SEQ ID NO: 1456 - DNA, 415 bp, Homo sapiens
  misc_feature 24: n = A,T,C or G
ccgcggtggcggccgcccgggcanggtacatggcatcaggtgtgatcagatggtgtccatctggctttaggctttgccgctgaagattttaattcagtagtcagagtctcctctttgttccttctctcttctcatgacttctgcaggtggatatgctgggtgacaaagaaagaagcatttgcagggtttctggttctagtgccttcattcttcccaccctggtaattgagttttctcttcaaccctgatctgggtagcccctttagctgctctaaagaaggaagtgagaacttctccacttgctgggagggtatcatctctgggggacaagggcaagacgcccagcttgcctgatccctttgatgccttctttccagttttgtctaaagggctccagcgatctgaagagttgggt

SEQ ID NO: 1457 - DNA, 576 bp, Homo sapiens
  misc_feature 46, 81, 159, 160, 162, 188, 198, 222, 230, 231, 238, 244,246, 250, 261, 271, 272, 296, 303, 331, 340, 345, 352, 353,356, 359, 361, 362, 381, 382, 383, 386, 390, 397, 410, 415,454, 456, 462, 463, 468, 482, 503, 510, 517, 524, 535: n = A,T,C or G
  misc_feature 540, 548, 559, 569: n = A,T,C or G
aggtacctgggtgacgtttacgttctgggatttcgggagatgcggntttctgcacgccaggggccaagcctgagtacgtanatggacggcagggataggagctctctccgcgccacaaacgccctttgctcatacctggggtttcctttggatttatcnntnccctaatattaaaccgaagcccttcnccaatgggcncggggccttcttgaagcttcatcnatatcctnnctgggancttgtngnaacnaatagggtggntataaacctnntttgaattgaagtcatttttggtnataaaanccccccaagtgtaatttcctgtcaatcnttttgtccnccaanaagggtnncgnaangnncctgtccatataatttcannnaanatanccttaanccggtccaaccanaaccnttggaaatccaaaccccggtatgtaaattccaagggggntnggaagnntttcnccttgggaagtttnggttccttctaacctggaacnaattaanaaaaaantttcccnttttaacccgnaaatnttttttanaaccaataagngaaggttttngttaaat

SEQ ID NO: 1458 - DNA, 530 bp, Homo sapiens
  misc_feature 14: n = A,T,C or G
atagggcgaattgnagctccccgcggtggcggcccgaggtacgcgggatactatgactaattatttttgttattattaccacttgtattgcatatatcagctcagtatgaatttatccactacttgctgaataatccctgaatgaagagacaatatagtgcaatatttgacaatgtgtgctctaaatcacactttgttttaatcaagctcactcagtatttattagctgagggatgtcagcaagtaatttaaccagtctgatgctcaatttttctcatttgtaaaattgtgatgttaatcctaattataatatgggattgttgagaatcatgtattttgaaagaatccaaaacatttttaatcagtaatcaatcaaataaaaaactagagcctggccgggcgcagtggctcacgcctgtaatcccagcactttgggaggccgaggcgggtggatcacgaggtcaggagatcgagaccatcctggctaacatggcgaaacccccgtttctactaaaaaaaaatacaaaaaa

SEQ ID NO: 1459 - DNA, 433 bp, Homo sapiens
  misc_feature 378: n = A,T,C or G
ccgcggtggcggccgaggtacgacaatggaaagtttttaaacaagcaaatgtcactatcaaattcctgttttagaaagataattctgagaaggcacatcctgagacagcctggggccaagatgctgtggcgtaaacagatcgctgagcgatgataaggtcctgaatccaaagggcattggtagaaaccaaaaagtgaaagggacacattcaagaagctttttcccaaagagaatgcctgggtgaccaattagataaagtagatgaaggaaacagaagaaacaaagatgattccacagtttgttcttggacaggagggtagatggcaaagtcattaactgagaaagtgaagataggaaaaaaagagcaggtttggcagnagaatgtgacaccctcagtttggacctgctgaaatcttgagggtatgtttggaag

SEQ ID NO: 1460 - DNA, 444 bp, Homo sapiens
gaatacgactcctatagggcgaattggagctccccgcggtggcggccgaggtactgatctaaccaagatattttgtttttctcatccaccagtcactttctcagtcctttctgtatcccttgcaatttgaacaaagcttggtgaatagtgtgcacacaaaaagcacactaggtgaaagacagatacataaaaagggtaaagtcaggatattttaacaaacctatcaagctctaaatataagcctccttggtagttttctctttaaccctctctccactgttggatgaaatttgctgcattcaattccagttcccaccccaacttccttcttaacacaaggtcagggttaagccttcggtgctttaatccaagaggaaaattacttattttaaaaagcagtgaaaaaacaccgcattcctttggcacaggaatgaaagaccagct

SEQ ID NO: 1461 - DNA, 342 bp, Homo sapiens
  misc_feature 128, 319: n = A,T,C or G
aggtacgcgggggagccagcgatgggtccaccttgcctttgttgttgttgttgtttttgtttcttgttttggtgactgagtgaagggacttgaccctggttctcccagcttgagcaggagcgtcactngcggtgatcagggaagctgcctggaccagctggcctggggcagccaccaccccattctctcgcccctcttgagaatccagcctgtggacccaggtgtgtcagcctgcagtcagaccacagtctgtctcgggctggtgctgggggtggcagaaagggggtcctgacgcaacccctgctcccccgagtctctnagtctcctggggaagagatgaca

SEQ ID NO: 1462 - DNA, 199 bp, Homo sapiens
gctctccgatgcccagccctcctggaaccacctcgcctgtgacgtaggtggagcgcgcactgcctccgggcccgtctttctcaattgggaccggaaaacgttgtcgctcatcctatgacgcgaaagtaaccgagactatcaggatccggagacggaaatgtcccgaaggccgcaatacctcggccgctctagaactagt

SEQ ID NO: 1463 - DNA, 313 bp, Homo sapiens
ccgggcaggtacgggggagataggcaggggacatctcccactgctccagcatccccaacccccatcccgggcagccccatcccacacccggaggaaaccctgtgtgcctgttcacagagccgacaacagtagccagcgtccaggcagaagctgacgcacagggaactcgaggaactttccataaggctagtgtgcagcccctggggacgggccaactgtgggctggtggttggtgaagcctgtctttgcaagagccctggcagcaaggtggtgtgtaagccaagaccatcttcctaagttctccttcctcgtc

SEQ ID NO: 1464 - DNA, 197 bp, Homo sapiens
gggctcaggctccttgcagattcctaaccagcataatgctggagccgggagccaccaacctgcagtcttcagaatggccgtgttggacactgatttggatcacattcttccatcttctgttcttcctccattctgggctaagttagtagtgggatcggttgccattgtgtgttttgcacgcagctatgatggagact

SEQ ID NO: 1465 - DNA, 381 bp, Homo sapiens
  misc_feature 19, 22, 119, 153, 203, 236, 241, 244, 354, 365, 370: n = A,T,C or G
ccgcggtggcggcccgaanccngcttttaagtgagctcagcatattataaaggaatgaaagcaattagagcgtggactctaaaggtaggtgagacttgctgttccacttagaaacatanaaacataggaaactaaggactcgatggggacatnaatagtaggatggcttttaagagggctgaagtgtgtaaatatacacattnagctttgcagcaactctgtgccaaatcgaagtntgttncanacctggaattttagtttggtaaaggataactgtagttattttttaaataaaatgattcattagaattctttggttctctcatgataatttagcaagtttgtctctttcangaaagaaaagnttaantggggttaatg

SEQ ID NO: 1466 - DNA, 454 bp, Homo sapiens
tcactacttagggcgaattggagctccccgcggtggcggccgcccgggcaggtacaggccctcatgttctctggacacagcatggatggtgaatgttctcgtggtgtgagacagaatggagtcaaggagaaaccaagtataggcacagggtgggtgagactttgtttccgctaagaaggtcatgctggagccctccatcacctcaaccacctccccactggcaacaccagactccaatttgatttcaacaggatcaggaccatacttcacatccaggaagatggggtcgctcctctggctcagaagggcatctcgagcttcacattggtaagtccctgagtcctcccgctggacaatgagaatggtgaggatcttgccatccgtggacagctgcatgcgctcatggaacacaatggagaggttgttggaaacccagtggatggtaatgttgacg

SEQ ID NO: 1467 - DNA, 414 bp, Homo sapiens
  misc_feature 96, 253, 277, 388: n = A,T,C or G
cttttaagtgagctcagcatattataaaggaatgaaagcaattagagcgtggactctaaaggtaggtgagacttgctgttccacttagaaacatanaaacataggaaactaaggactcgatggggacatcaatagtaggatggcttttaagagggctgaagtgtgtaaatatacacattaagctttgcagcaactctgtgccaaatcgaagttgttgcagacctggaattttagtttggtaaaggataactgnagttattttttaaataaaatgatncattagaattctttggttctctcatgataatttagcaagtttgtctctttcagaaagaaaagtttaagtggggttaatgggtactactcgattgtcaacgtcaaggagtcncaggtcgcctggttctaggaataatg

SEQ ID NO: 1468 - DNA, 405 bp, Homo sapiens
cgcgtaatacgactcctatagggcgaattggagctccccgcggtggcggccgaggtacatcaataagtgactggttaaatacgttactccacctacaaataatgcaatgttgtgtggccataaaaaaaaagaataaagtagatatttagttgcagatatagaatgagctctacaatatattaagaggctgaacaacgtgctgtttacagaaaatatgctctagttgtatataaaggaaaaaggatttaaattcacatttaaacttggtaacacattgaaaaattgcagaaaggtaaataaaaaaatccaaagctaggccaggcagagtggcttatgcctgtaatcccagcactttgggaggccaaggcgggcagttcacaaggtcaggagatagagaccattctg

SEQ ID NO: 1469 - DNA, 215 bp, Homo sapiens
ccgcggtggcggccgacgtcggatgacatgttaccatgacacaaaacgacaatgaccacggcaccacaccaagaatcatctacctctattacaaccagacatttgcactcaaataaggaggtgctgccgtatacttatccgttgctggaggcagcatgaatgggaaccagacacagctgggaagcaatcggtaacagagcgccaaccctgtacct

SEQ ID NO: 1470 - DNA, 348 bp, Homo sapiens
tccacaaatgtctgcagctacgatggaccctcagctgctggacaggaaagaggatcaagctaagaaggcccagagtgtgcaagcagagagagggtgtggacagaaaaccttgccttctccagggctagtggcgaaagctatctcaggctggctcaagtggagagaaaaaagcatgagatcaagcaatggacagctggggaagggctggcttttatttcctcagctcccaagctcagtccctggcactgggccgttgcctttgtaggtccctctgtgcccaggtcttgctatgggggttgtttcttggcattaaggtctcagttcaaacgccaccgtctccaagaagcc

SEQ ID NO: 1471 - DNA, 317 bp, Homo sapiens
ccgggcaggtacgcggggaattaactggaacttaccattcattctgctttgctaaattactatgctactgcttagtgatttttctaataccattataaatgctttgaattctcctgcccctagaaaagataaattgatctgaatctcttatagtttgtttgtgcctgtatctgggaagttctggatgacctttgactgtatcaacgtagattataatcgagaatataaattacagctgagggggaaaagtggttactcctggtagatcaatctggatgcaatcaggaggacagaaatcacaaaataacttagagtct

SEQ ID NO: 1472 - DNA, 421 bp, Homo sapiens
  misc_feature 289, 359: n = A,T,C or G
aggtacgggacttgtctccaggagacatgtctgggaagaagagctagactggagaatcatgagcatgttcaggtgaaaacatgtgagtggataagagcaagagggtgagaacacagaccaaggggctaagggacagactgtgttcagtattttggggtattggaacttgtttttgctacttgctagttctaagaccaggctcagactctaacttctctgtaatgtgggaataatgacagcacttaccttataagattttacaaagattaaaatatcatatataacagcncttaacacaagtaagaattcagtaaatgttgactgttattactattgtctgggtcgttataagtttgaanacacaattgcataaactgtcatcattaaaagggaaaacaagagaaaagtagtttctgggaaa

SEQ ID NO: 1473 - DNA, 519 bp, Homo sapiens
  misc_feature 330, 338, 355: n = A,T,C or G
tacttagggcgaattggagctccccgcggtggcggccgcccgggcaggtaccctggagccttgagcaacgttcttttgcattatgccaggaagaactgctggcaaatgtaagtgggcttagaattcatgactgcagtcagcagcagttgtgtaaatctagggagagactggtatttgacacctgcaagtcctcaaggttaacagaagtctcaaaaagcccaagccccagaattttgttaaaatcatgggtttcacccccaacctaatcaatggtcacccaagaaaaccttgttaaggtcccaattaaggacaaaacaattaggtttaaantctggcanaaatatttttccattantaagaattttagaaagtattattttaactcttaaatttctctgcttttcaatatcaaattggttttttgaagccctttttctttggggtaaagttaccggaatgcttttttcaaaagtaaggtcttacgggggaacttattttatgtattaccaaacagactca

SEQ ID NO: 1474 - DNA, 419 bp, Homo sapiens
  misc_feature 202, 283, 352, 365, 376, 380, 389, 391, 406: n = A,T,C or G
ccgggcaggtacccaaattaactaaccttaaatgcaagacttagcagcaggtattatccatgttgaaccacagagttgtggttataggatgatctatccaggttgaaaaagaattctggccagcagtttgaagaagtgaaaatcaagattaggcacagaggcagagggtggtggggccacagggcggggaaggattccaatncatgagactgcagaaggggaagtgagcagcctctacccatacagactagggtctcatggatgccactggagagcattccantctcactggatattggtagttcactaacttgtgtcagtcatgattgttgacctctgatatatttgctantattttggctttncatttataccnaaangctgccgtntnttccttgatcccaanatgttttttgttg

SEQ ID NO: 1475 - DNA, 335 bp, Homo sapiens
ccgggcaggtacgcggggagggcatttaacttcaaggtaagacccattccaggacggcagagatcatgtctgtcttgcgtatccctgtgtgaattttgcctgacatgttgcaaacactcccgtatggaagtcttgagggtcttctgccccagtcagaaaacctctgggagaacagttatccccagacctcagacgctcgacggatacatgagaagctttctttgatggattcgatgtcaggatctccatgtgaacttccacttagaggtgtcatgctatggggcctcagcgtcaccacatcgtttggacgtctgaccagtttcctgactttgaga

SEQ ID NO: 1476 - DNA, 314 bp, Homo sapiens
aggtacatatactactctcttctttagtaacaaggttgtaagtttcccacaaggacaagacttttatgttgaagcagtaactgggacttctaaggagtgcaaaatgtaatagttctttaattgggtaagttacaacatcatctatggtttttctttttttttttttttagcgactcatgagcagatattcgccccatattacagacgggggaaaaaagacttgcacaagctcaaaatgtgcgagctggaattaccatgaaaaccttggcatatagctattgtttgaggccattgtcttggcaggattcctttgg

SEQ ID NO: 1477 - DNA, 275 bp, Homo sapiens
  misc_feature 59, 87, 181, 197, 219, 232, 246, 249: n = A,T,C or G
ccgggcaggtacaatcacgcagtagtcagagcaggagtatgaggaagagcaagaacctnccaaagttgaaagcaaaccaaaggtccnccttaaaagtgccccaccacccatgaacttcactgatttactcaggctggctgagaaaaagcagtttgaaccagtggaaatcaaggtagtgaanaaatcagaagagcganctatgaccgcagaagaacttanggagcgagaattncttgaacgaaagcntangagaaaaaaacttgagacagatggaa

SEQ ID NO: 1478 - DNA, 201 bp, Homo sapiens
aggtacagggttggcgctctgttacccgattgctttccagctgtgtctggttcccattcatgctgcctccagcaacggataagtatacggcagcacctccttatttgagtgcaaatgtctggttgtaatagaggtagatgattcttggtgtggtgccgtggtcattgtcgttttgtgtcatggtaacatgtcatccgacgt

SEQ ID NO: 1479 - DNA, 457 bp, Homo sapiens
  misc_feature 70, 235, 237, 332, 336: n = A,T,C or G
cttagggcgaattggagctccccgcggtggcggccgaggtacttttttttttttttttttttttttgganacagtgtctagctctgtagctcaggctggaatgccgtggtgcggttatggcttactgaagccttgaatttatgggctcgagtgatctcgcctcagcctcctgagtagctgggactacaggcacataccaccacgtctggctaattttaaaaatgttgtttttaananacaaggagttcaactttgttgcccaggctggtctcaaactcctgggctcaagctgtcctcctaccttagcctcccaaagtgctgggattacatangganaatcactggggcctgtcctgtcctgtcattctttaaacaaaatttcatttgaatgcacatcttattatacaaaagactataatttcctggacaaagttgcttacttcacataggatttaac

SEQ ID NO: 1480 - DNA, 440 bp, Homo sapiens
  misc_feature 17, 241: n = A,T,C or G
tatagggcgaattgganctccccgcggtggcggccgcccgggcaggtacctccaagaagcttacaggatggaaccagggaaggttttggacactccacatcactcaaagttccactggctcgatccctgcagattagtgaagaactactgagcagaaaccaattgtccacagctgccagccttgggccatctggattacagaaatcatggacaacactttaatattatccagggaagcctnttgggcaaaaccacattaccgagttcaacctcagccgtatgaagttcaggggaaatggtgcactcagcaacatcagtgaccttccttttcttgcagaaaactctgcctttccaaaaatggcacttcaagcaaaacaagatggaaaaaaggatgtgagtcattcatctcctgtagatttaaagataccacaagttcgagg

SEQ ID NO: 1481 - DNA, 201 bp, Homo sapiens
acgtcggatgacatgttaccatgacacaaaacgacaatgaccacggcaccacaccaagaatcatctacctctattacaaccagacatttgcactcaaataaggaggtgctgccgtatacttatccgttgctggagacagcatgaatgggaaccagacacagctggaaagcaatcgggtaacagagcgccaaccctgtacct

SEQ ID NO: 1482 - DNA, 337 bp, Homo sapiens
  misc_feature 184: n = A,T,C or G
aggtacttttagtagagatggggtttcaccatgttggccaggctggtcttgaactcctgacctcaggtgatccactcgcctcggcctcccaaagtgctgggattataggcatgcgccaccatgcccggccgaggtacagggttggcgctctgttacccgattgctttccaactgtgtctgggtnccaattcatgctgcctccagcaacggataagtatacggcagcacctccttatttgagtgcaaatgtccggttgtaatagaggtagatgattcttggtgtggtgccgtggtcattgtcgttttgtgtcatggtaacatgtcatccgacgtcggc

SEQ ID NO: 1483 - DNA, 350 bp, Homo sapiens
aggtacactgaagtaggaaggagggacagaaatagcaagtcttaggaaatgcctgggtataaaataaggagaaaaattacacttaatagcatatcataataactgcatttaaaggtgggaggagagtcaacatgtagtaagtgttatttgatttaagtatttctattgctaaatttaagtgtagttaaaatttcatagtttactttctttacataatgcactatccgcatcattgaaaatttctgtgaatatgtttctaataacattataatttttcaatgtgtagatatttcataatttgcataaacaatgccatgatattgaaatcagttacttacaatgccaaggga

SEQ ID NO: 1484 - DNA, 661 bp, Homo sapiens
  misc_feature 18, 26, 31, 48, 49, 56, 60, 71, 75, 89, 94, 100, 116, 127,170, 182, 194, 198, 213, 216, 222, 230, 231, 249, 255, 264,266, 268, 286, 302, 309, 312, 316, 318, 322, 330, 354, 366,368, 380, 385, 407, 409, 415, 420, 422, 423, 429, 440: n = A,T,C or G
  misc_feature 442, 450, 456, 459, 466, 478, 499, 501, 507, 511, 516, 518,531, 558, 560, 573, 576, 584, 588, 593, 617, 620, 623, 631,650, 657, 661: n = A,T,C or G
tatagggccgaaattggnagcctcanccggngggagggcgggccggannaggcaangccncccggtaagcnaccnccggcgggcccgcnggganaatgcntgggtgggtctgcatnaccacccggantcaactttcggacaaaataccacccaggctactttggggaaangtttggtaatgnaagccatatacncacnttaaaagaagtgaanccnagaagnctttctgnnccaacatggtcaaaaccntttgancaaaaaatntngnggggaaccttttggggtncaaggtggaaaccaangaaccanccngggntngganatttggcnttggctttaaaaaaaaaaccaaangggaaccttggngnggggcctttgcntttcncccaattcaaatattggaaatngntagggnttggncnngaaatnccgggggggcntnaaccttanccaaanaangtttttnctttgggggggnaaaaaaggggggaaaaaaagncntttccncccnaaaangngccagggcacctnggtttcaaattccaggttgggaaaagngncctcaaaaaaatnttnccttttcnaatntccanttaaatgtaaggcctttgtatggnggnagntaaaaggnaattttacaagtaagggtnggttttngggn

SEQ ID NO: 1485 - DNA, 569 bp, Homo sapiens
  misc_feature 566: n = A,T,C or G
tatagggcgaattggagctccccgcggtggcggcccgcccgggcgctgactcctgtgagacgcagcccgaggcgagcagaacccgaggggaagggatgcagaccagagccgagagctactaagttcctggcctcccccgagtgagtgactggcgatggacggagagcaggacttcccttcctgcattcagaatgtgtgtgcaggtcattattcatcaacacatgtcaagataaaacatacagagctcttcttggaagggctgggtttggtccatctcaaatgacacttttgtcacctccataaattccaagatggaatgtcagtccactggggttgttatagacggctaggctagactaggcagtccggggcggggaggggagttaagtaggtaagtgttcttccttccacgaggctgtcttgttgaggtcatttctgcctgagtgtgacacaagtcctctgtaaatatacctgtaaggaacgttttccttgcaaagatacaacaggtctccgtttttttccgatttcaacacgtgtgttctgagtgtgaactcggtcacagaaanggg

SEQ ID NO: 1486 - DNA, 354 bp, Homo sapiens
  misc_feature 330: n = A,T,C or G
aggtacacaataaacacacaattttatctttcaattcaaaaataatgtttaatgaaattaagaaatgaaagaaaaacagtctgatgaaagattacatttgattatgaagaaagtaaatgacctactgtcgttcactatgacctatccgataaaacggtctgctttttcttgttgctgttcttaacttagggtgtattgcctcttgtttccttttcttaaacaatttttcattttcactctatattcagtgtgctggagttgcaaatttgtcatgtagccatactgttgatttatttatttatttttttttgagacggagtctcgctctgncacccaggctggagtgcagtggct

SEQ ID NO: 1487 - DNA, 319 bp, Homo sapiens
aggtacctgcgatgtcaggaagaggaacccactagatgaccatccttgggaaagagtcaaccatgccagcccagacacatatagccagctgctggcattggattctgcatataacctaccatgacagaggtttctacaggcctttttccctacttccttatgcaggaatattcatctggataatgaagatcccctgtcctaaatctgagatttggcttgcatttaaacatgaaattaaacatgtatttaaactgaaaatctgctgcaaactgtttctctcatcccgcgtacctgcccgggcggccgctctagaactagt

SEQ ID NO: 1488 - DNA, 331 bp, Homo sapiens
ccgggcaggtaccattctggcctgctctacgttgccatttttaatccaacttgttaattctgcctttagactctcttcatatttcctagcatccatctttttaatgactaatttattgttaaaatgaatgaagttttctgggcacagttcctgggcccgaggccaacttttccaaatttgaaacatggcatcatacagctggatgctttctcgaggtgaaaggggtaagatcaggagggaatccatacctttcaatatgatctgtttgttagtgcagcacatgggtgaaaatgatcaaaatgaatgtcacccatgttttattgaacataca

SEQ ID NO: 1489 - DNA, 442 bp, Homo sapiens
  misc_feature 8, 364: n = A,T,C or G
ggcgaatnggagctccccgcggtggcggccgcccgggcaggtaccatcaaaagaatatattccaagaaggttagcatctaactgaaggaaacttaggtgtgacactgagagacttcatagcaggagatgaaagctttgaaggaaggcattctgctagaggggtcagcaaactccagcctgagagccaagtgcagtctgcccctgttttggtatgactggtgaggaaagaaaggggaaaatgattttatacttttaaatggaaaaaaaaattaaaagatcttcataacatgtaaaattgtatgaaattcaaatttcagtgtgcagaagttaagtttaaggattgtttaggtattggctgtctacngctgcttcccactcaatggcagaattgattaagttgtgatggagactgtatggcccacaaagccaaaaatatgtacct

SEQ ID NO: 1490 - DNA, 215 bp, Homo sapiens
  misc_feature 181: n = A,T,C or G
ccgcggtggcggccgcccgggcaggtacaagctcagtttctatgattatgtccatcagctcatccatgaaatcaagtcccagatggcagttctgcagaagtgcccatcctccgttcgccatggtctgctgcaagagcttccgagcatggacttcctggccctggcccatggacacataacngggtttctatttttaatctcttccccaaggcaat

SEQ ID NO: 1491 - DNA, 432 bp, Homo sapiens
  misc_feature 411: n = A,T,C or G
aggtacctgcggtagtagcctggctttgctctgacggcgatctcgcggcccgagagccttttatagacagctccttcagtgtctctgtttccaaaccgcaaccgagaagagacagacggagaaaagagagttacttttccaggttgcttttcccggggatgtgaaggatacagaaatgactgtgaatcaacccatatcatcaaggagctgataatctagtggaagagttagacgttgtgcatacttcactatgatatgaaggcaagtctctgagcttatattctctgtggaagatgtgacatatccaggcggaacatcatgatgcagggaaacacatgtcacagaatgtcgttccacccgggacgaagggtgtccccgaggacgaaggaggacattggagccagacccttnagcaccattccttttaggccc

SEQ ID NO: 1492 - DNA, 226 bp, Homo sapiens
ggagctcaccgcggtggcggccgaggtacacgggttggcgctctgttgcccgattgctttccagctgtgtctggttcccattcatgctgcctccagcaacggataagtatacggcagcacctccttatttgagtgcaaatgtctggttgtaatagaggtagatgattcttggtgtggtgccatgggtcattgtcgttttgtgtcatggtaacatgtcatccgacgt

SEQ ID NO: 1493 - DNA, 179 bp, Homo sapiens
ccgggcaggacgtttaacgtcggcccggcgcgcgcgtccgggaggttgcccgtaggccgctaactggtggttcccagtccccgccgactcggcctctttcttctgcggccaccagatcgcgggatatcggagacttcgaacaatccgctggagtcctttacagtttaaaaacagaggac

SEQ ID NO: 1494 - DNA, 305 bp, Homo sapiens
  misc_feature 44, 71, 116, 122, 127, 128, 157, 169, 210: n = A,T,C or G
gaaatgaacaaatatttatttatcttttataacaagtaaggcantgttgcttaaaggaagacaaacaaacntaaaagattccgttgacaatgcattttttcatctgttcggcacantgcttnttggnnataaatggagatgtgacatgcaaactttncaggacattcantcttcggcggcagcacttagggcagatgactggccgctcanattctctatcttgtttcaggacagtggaaaagcttatagatgaggccaaagcaccaggtaggtggaaggttcttgtatcggttcgaaccccgaca

SEQ ID NO: 1495 - DNA, 319 bp, Homo sapiens
  misc_feature 198: n = A,T,C or G
ggcgaattggagctccccgcggtggcggccgaggtacgcgggggcccctttctgtgaccgagttcacactcagaacacacgtgttgaaatcgggaaaaaaacggagacctgttgtatcttgcaaggaaaacgttccttacaggtatatttacagaggactgtgtcgcactcaggcagaaatgacctcaacaagacagnctcgtggaaggaagaacacttacctacttaactcccctccccgccccggactgcctagtctagcctagccgtctataacaaccccagtggactgacattccatcttggaatttatggaggt

SEQ ID NO: 1496 - DNA, 458 bp, Homo sapiens
  misc_feature 6, 69, 221, 236, 241, 246, 249, 258, 267, 270, 271, 281,304, 338, 393, 401, 422, 424: n = A,T,C or G
ccccgnggtggcggccgaaaccagcttttaagtgagctcagcatattataaaggaatgaaagcaattanagcgtggactctaaaggtaggtgagacttgctgttccacttagaaacatagaaacataggaaactaaggactcgatggggacatcaatagtaggatggcttttaaaagggcttgaaagtggtgtaaatattaccacatttaaagcttttgcngccaacctccttgtnccaanatccnganagtttgttngcataaccntgnnaattttaagntttggtacaagggataactgtancttattttttttaaataaaaatgattacattacnaattctttgggttctctcatgataatttagtcaagttctgtctctttcagaaagnaaaagttntaagctggggttaatggggtnancctcggccgcctctagaactagttggatcccccc

SEQ ID NO: 1497 - DNA, 608 bp, Homo sapiens
  misc_feature 9, 51, 225, 528, 552, 574: n = A,T,C or G
ggggggggntgggaattattacaatacacatcatagacaaatgaaaatagntaattattttactttgtatgagagagaagatttatcccatataagattcatttcaagatgtgtcccaacataggttgtttgaagactttaagatttacaaaaatatttttgcgtgtctacagcaaagatggcgaaggactaagctataataagtgataatggagggccccttantagaaaagacttgcactcaattctcaacaaatttaatttatcaagttcttaggctatgaaccatatttcccctaccactaaagtgagaaaaactatgttaactagtagggttaaccacattaaattaatcaacctgtgtaaagtgactctcatataataagtgtctatgatgtggccactaaattttctgtaaaatttttcaagttctttaagtcaccgtatcaagtgatgccttactaccataagaacataaataatggtggctctttttgccgtaaggaatctatgagggggtctattcangtaataccagaaaggccttcttgnatctaaatattctatgcactgntacatgctatcagcattgccatcatttctttctt

SEQ ID NO: 1498 - DNA, 425 bp, Homo sapiens
  misc_feature 192, 230, 247, 368, 408: n = A,T,C or G
tcactacttagggcgaattggagctccccgcggtggcggcccgaggtacctctttttctatgctgaaaagttatgtaaaaaatccctaagctttgttggatagtctgtcatcaccccagttgctcccaaatcaaaagctcttttgtattcttgttcttcatttaatacccaaatatacacttgaatgcctcnagcagttaggtggtcaaacaaagctttcctcattagtnagagatcagaaagccanatgagaaacttttgacttctggacatggtgtgtggttcttttagcttcagtataatagaaggcattgggatttcaaaaaactgttctcgaatgggcacaaagggcaagaggccatgtgaanaaaaggccaagaatgagcaggacacgttgtaagactgaanagtttaggaatatcttg

SEQ ID NO: 1499 - DNA, 317 bp, Homo sapiens
aggtacacgccgccacgccgggctaattttttgtatttttagtagaaatggggtttcaccgtgttgtcaatgctggtctcgaactcctgagctcaggcaatccgcccgcctcggcctcccaaagtgctgggattacaggcgtgagctaccgcacccggcctgcatatattttttaaacatttattttagcgttaccaaattgtcttgaagcattcatttaaaaacacaaaaactcactgcagctgtctgaacacttttctacttcaccaaagagtgccgaacaagttaaaatgaatctgtttttaaacacttctcct

SEQ ID NO: 1500 - DNA, 734 bp, Homo sapiens
  misc_feature 433, 455, 502, 585, 589, 648, 673, 679, 690, 720, 734: n = A,T,C or G
cgcccgggcaggtactgggagagtgaacgaccacattaagaactgggcaatgaccagcctgggcaacatggtgagaccctatctttacaaaaacaacagtaaaaaaaaatgagccaggtatgggggcacaaacttgtatttctagctactctggaggctgaagcaggagaattgcttcaactcaggaggtggaagttgtagtgagccaagatcatgccactgcactccagtctgggcgacagagtgggaccctgtctcaatgaaataaaataagataaacatgagaacaatagaaaactgaaggacaacaaaaggaggtaaggagataagggggtagaggctgaaaaacttcctactgaggactatgttccactgaggactactgaggactatgttcaatactagtattgacaatatcaataagaagccttancatcacacaatagacccttgtnacctacacatgtactcaaagatatacttgatatatgtaagttattgnaggaaggggctttaacacatgcttctcaagtgaaagaatgggaaagaaacagacaaaagggaaagaaaggaatggaaaggatngaanggacatatttaagaaatagcagggtcatgttttttataacaatctacttgagattggtnactggaaaaaaaggaaaaagggaangaatantggccagtcancccaaaggaaaagagtaccttgggccgttntaaaactagtggan

SEQ ID NO: 1501 - DNA, 237 bp, Homo sapiens
atagggcgaattggagctccccgcggtggcggccgaggtacaagggttggcgctctgttacccgattgctttccagctgtgtctggttcccattcatgctgcctccagcaacggataagtatacggcagcacctccttatttgagtgcaaatgtctggttgtaatagaggtagatgattcttggtgtggtgccgtggtcattgtcgttttgtgtcatggtaacatgtcatccgacgt

SEQ ID NO: 1502 - DNA, 344 bp, Homo sapiens
  misc_feature 37: n = A,T,C or G
ccgggcaggtacttttttttttttttttttttttttngagatgggagtctcactatgttgcctaggctagtctcgaattccccagctcaagcgatcctcctgcctcagcctcctgagcagctgggactacaggcacgccccaccatgcccagcccttaaactattttggattaggtttctattacttgcagccaaaagttctgaattaacaaagggcctcaccctggctcttccttggtatatattactatggggatgggatgaccgaggtcccatagaaatctcaactgatccattcttcccatctatttttccaggtctcatgaaaagttgccattttccct

SEQ ID NO: 1503 - DNA, 239 bp, Homo sapiens
tacttagggcgaattggagctccccgcggtggcggccgaggtacagggttggcgctctgttacccgattgctttccagctgtgtctggttcccattcatgctgcctccagcaacggataagtatacggcagcacctccttatttgagtgcaaatgtctggttgtaatagaggtagatgattcttggtgtggtgccgtggtcattgtcgttttgtgtcatggtaacatgtcatccgacgt

SEQ ID NO: 1504 - DNA, 401 bp, Homo sapiens
ccgcggtggcggccgaggtacccacagcattggctgttcttcataggagactcagagaagacttcataggagactcattattgtttactggacatcaggtgctatattgtatagcattcacattccacaggtgaggaaacaggctcagaggaataagtggcatgccaagatcattgagtatatcaagtagcagaattaaggattcagactttgttaggcctaactccaaagccctggcttttttttttgagatggaatcttactctgtcaccgggctggagtgcagtggcatgatctcagctcactgcaatctctgcctcctgggttcaagtgattcccctgccttagcctcctgagtagctgggactacaggcatgcaccaccacgcccagctaattttt

SEQ ID NO: 1505 - DNA, 485 bp, Homo sapiens
  misc_feature 426, 485: n = A,T,C or G
ggagctccccgcggtggcggccgcccgggcaggtacccaaattaactaaccttaaatgcaagacttagcagcaggtatcatccatgttgaaccacagagttgtggttataggatgatctatccaggttgaaaaagaattctggccagcagtttgaagaagtgaaaatcaagattaggcacagaggcagagggtggtggggccacagggcggggaaggattccaatccatgagactgcagaaggggaagtgagcagcctctacccatacagactagggtctcatggatgccactggagagcattccagtctcactggatattggtagttcactaacttgtgtcagtcatgattgtgacctctgatatattgctatattttggttttcattttatacaaaagctgcgttcttctccttgatccccagntgttttggttggtcttttgtgcatccagggaaaagtaagggctttgagggaaaaagaan

SEQ ID NO: 1506 - DNA, 392 bp, Homo sapiens
  misc_feature 14, 21, 49, 75, 104, 194, 331, 336, 340, 383: n = A,T,C or G
ccaattggagcttnccgcggnggcggccgcccgggcacggtactgtgtnctcaccgtcgcggaggtttgtggatntttgataaagcttcactttgatgggtatnctgattgctatgacttctgggtgaatgcagacgctctggatatccacccagttgggtggtgtgagaaaaccggccacaaactccatcctncaaaaagggtataaaagaagaagaaattcaattggcagacctatcttaagacatgtaaagctcaagctgctcctaagtcattatttgaaaatcagaatataaccaggtgatcccatcgggctttccgagtttggtantgaancttngaggcagtaagacaaaaaaaggaatcccctcattcatctgtgnttgctaccg

SEQ ID NO: 1507 - DNA, 180 bp, Homo sapiens
gctctccgatgcccagccctcctggaaccacctcgcctgtgacgtaggtggagcgcgcactgcctccgggcccgtctttctcaattgggaccggaaaacgttgtcgctcatcctatgacgcgaaagtaaccgagactatcaggatccggagacggaaatgtccgaaggcccgcagtacct

SEQ ID NO: 1508 - DNA, 378 bp, Homo sapiens
ccgcggtggcggccgaggtacccattaaccccacttaaacttttctttctgaaagagacaaacttgctaaattatcatgagagaaccaaagaattctaatgaatcattttatttaaaaaataactacagttatcctttaccaaactaaaattccaggtctgcaacaacttcgatttggcacagagttgctgcaaagcttaatgtgtatatttacacacttcagccctcttaaaagccatcctactattgatgtccccatcgagtccttagtttcctatgtttctatgtttctaagtggaacagcaagtctcacctacctttagagtccacgctctaattgctttcattcctttataatatgctgagctcacttaaaag

SEQ ID NO: 1509 - DNA, 334 bp, Homo sapiens
  misc_feature 160, 188, 199, 300, 302, 304, 308, 331: n = A,T,C or G
ggagtagaatattgattgtcctatatcccattttcttgaagagattctggcttctaatatatgttcctaaaaaaaaatttatccgtctagtagtgatgtcttcatgtttcacccagctgtctcataggcattgactaagcatctatttcatcacctggcnctggatgcctcctctctttaccatttgngaaaggcattngcctgattccttttgatatacctgaagtattgatgctagagaaaatcacttccaatataaacagcatcgtcttgcaagatttttcacttcctgtgctgccncnanaatnaatgggtcagtgagccgaaaggnaaa

SEQ ID NO: 1510 - DNA, 518 bp, Homo sapiens
  misc_feature 172, 188, 198, 215, 224, 227, 267, 283, 307, 316, 343, 363,386, 390, 401, 404, 416, 432, 469, 478, 485, 486, 489, 494: n = A,T,C or G
ccgggcaggtactaaactaagccgtcaactaccagcaagcagaatgaaaaacagggacagatcagcatccaattagtatgtctaagtttttaaacaggaaaagggttgaggggaatcagtaaaactggaaactcatacttcaccatttttgccaaatcctcactgattaaanaggagggaaattgtgntgtttttatncaatactttgcttgtgnagttgtcancangtttccatttgtgaggtcctgttaaacaattcgccttggnctgcccacttttcaanatggcatgtgtaaaattctttggnagattcaanaaggcattcattattttcagccaaagncaaaggggtccattttctangttggattgccccctttaaaccnaagntttctaaaaangcntcattaaggagnattcctttcaaacccntcaattaactcttttcaaccatatttggggtggtaanccccttcgnggcccgnnttnttatngaaaccctaatttggggattcccc

SEQ ID NO: 1511 - DNA, 431 bp, Homo sapiens
ccgggcaggtacacgtataagccaccacacccagcccttaacatgctttcgtagctttccattacccttagaatcaagactctattgaggcaaatgcaccatgacttgcctcaagcccagcactttcctattcttgccaggcctccagcttttcctgagccctcgcctctccctcacctccctccagctacataagccttctttcagttcctcatctttcccttttagtgatcttatggaatcaaatatttatttgcttattttttcaatgtctgtctctactagctaaaggcagtggaaagtttgttccacacagcttacctagcatttgacagagcctctggtatgtcgcaggcacttaaataaaataaatataactgatgaaaaagctccttttccccaagtcctctctcttcatctaaaatggaccc

SEQ ID NO: 1512 - DNA, 440 bp, Homo sapiens
ccgcggtggcggccgaggtacttttttttttaattttaattttagtagcctgtctttattgaatcctagttgtctttccttaatgcctcttcacatttgaaccactgtcaaccttctcagacataaattttagccactccccttcccccacaaaagaatctaagaaaagatacacttgctgtctgtttttgttagtttacatattcagttgactacagcttaccgtttttcaacttctgagaaattagttcttaattttggaaaatgtagtaattcagttaatacatctctaactttttttttatggaaattttctgacataccaaaagcagaataaggccaggggccggtggctcacacctgtaatctcagcactttaggaggccaggcgaatcacgtgaggccagggagttagagaccagcctggccaacatggtaaa

SEQ ID NO: 1513 - DNA, 718 bp, Homo sapiens
  misc_feature 54, 71, 82, 84, 86, 94, 107, 115, 121, 129, 147, 164, 181,201, 214, 218, 226, 236, 242, 246, 249, 254, 261, 267, 302,307, 330, 381, 385, 409, 413, 426, 428, 448, 475, 493, 516,521, 523, 535, 550, 567, 582, 607, 615, 621, 626, 627: n = A,T,C or G
  misc_feature 628, 638, 648, 649, 658, 666, 669, 670, 671: n = A,T,C or G
ccgcggtggccggccgttaaacatgtgtcactgggcagggccgggtgcctctanattactgggttggtatngcttagtaagngntngtaatggnttttttttggggnttatatanccaagngtccgtgngtggttataagtaatttnttgctccgtaaggtttncccttttgttacctttnttttttgttaaaaccctttntgccttttattgnaagnccaattgnccccttggtnggtttngggnggntttgnaaccaangctggnaagggggggttaaaaattaaaaattgggaaccttnttggnttttggggtttttgggaaatttngggttaaaggaaattaatttttgggggggggccctggttttaaaaattttnggtnccaaagttttccaagttggttttntttnaaaaattcctggnanccgcccaaaggggccttttnatttggcccggggtaagggggaaaggnaaaaattgggtttttttntccaaattgggttttaaaccttnttaantnaacccttaaaanccaaatttttaaggntccttcccttttccttnaattaaagcgggggntgggaaattaaggaaaatcttgggnctcccccnaaatcnctggnnngggtttgggnttggcaaaanngggaaaggntttttccnaannnttttaaattaaattggttttttttggggggggggaaatttttttttt

SEQ ID NO: 1514 - DNA, 284 bp, Homo sapiens
  misc_feature 178, 192: n = A,T,C or G
tacttagggcgaattggagctccccgcggtggcggccgcccgggcaggtacgcggggagctgacctgtggttcatttattcccagttaggtgaagaggcactctcaggggaaagaaaatacagtggtctagtccaatgctgctgtagcctgataactggacttcaagttttcattcangatgcctcttaatngacaaaaaactaaattgtcaagccacatctcaacaagggactgtttggagagtcttactgaaggatcataagatggagtcttgctgtgctgc

SEQ ID NO: 1515 - DNA, 443 bp, Homo sapiens
  misc_feature 217, 225, 259, 273, 307, 389, 414, 432, 437: n = A,T,C or G
ctacttagggcgaattggagctccccgcggtggcggccgagatgctgaccggcggcgtgggcatcggcttctgggtgtgggacgagtggaacaacctgaacgtagcgaacatcatcatcgccatcgtcgtcatcggcgtggtggggctgctgctcgaacaggcgctggtggcgctggcgcgggcgctgacgcacgaacaagtggctaactgattaangaagcgcnatcatggaagaccttcaaaccaggttcatcgacntcaccggcttgganatggcgtttcatacgaagaagggcgttgttccangcactgcagggggtcgacctggcggttgccgcaagggggaagttcattacgcttgatcgggccactctgggtgccggccaanttcgaccttgctgaacctgattgcntggcttgttgaaacccgnacggnggggcc

SEQ ID NO: 1516 - DNA, 293 bp, Homo sapiens
  misc_feature 77, 113, 235, 260, 272, 290: n = A,T,C or G
tagggcgaattggagctccccgcggtggcggccgaggtaccatgtggccagaggacctgctcaaacctgaccttatnctgctgctcactgtgagtcctgaggagaggttgcanaggctgcagggccggggcatggagaagaccaggaaagaagcacaacttgaggccaacagtgtgtttcgtcaaaaggtacaaatgtcctaccagcggatggagaatcctggctgccatgtggntgatgccagcccctccagagaaaangtcctgcagacngtattaagcctaatccanaat

SEQ ID NO: 1517 - DNA, 627 bp, Homo sapiens
  misc_feature 3, 27, 559, 568, 591, 626: n = A,T,C or G
ctntagggcgaattggagctccccgcngtggcggcccgcccgggcaggtacgcgggtatttcctactggattttgctttcactggtgtttagaaaataaacttgatttctctaggagcactcctttggttagagggatgcaagaaggagaggtgaaggtggcgtgtggtggctcatgcctgtaatccagcactttggggaggcccgaggcaggcggatcacttgaggccagcagtttgagaccagcctgccaacatgatgaaaccccatctctactaaaaatacaaaaaattagctgggcatggtggcaggcacctgtaatcccagttacttgggaggctgaggcaggagaattgcttgaacccaggaggtggaggttgcagtgagctgagattgtgccacttgcacttcagcctgggcgacagagtgactctgtcaaaaaggaaaggcaaaaaccggaccctggactctgtgggccctgattgcaggcccctccctgtgtgatgagggatgagtcagcttggggagccacttggccagcctgcatgcctggtcatcangaggttganaaaaaccttgaaagtttgtgaancactgagcagatacaagtgtttggtaattttgtana

SEQ ID NO: 1518 - DNA, 547 bp, Homo sapiens
  misc_feature 15, 25, 32, 36, 39, 45, 56, 75, 87, 99, 107, 120, 134, 143,145, 161, 174, 181, 182, 186, 195, 224, 239, 250, 260, 265,281, 291, 301, 304, 321, 326, 351, 361, 372, 375, 389, 406,430, 442, 443, 452, 453, 455, 458, 485, 491, 499, 510: n = A,T,C or G
  misc_feature 511, 516, 530: n = A,T,C or G
tgtgaaattggatantccggttcanaattttncccnaancaaacnatacggagccncggggaagccatttaaaanggtggttaaaanccccttgggggnttggcccntaaaatggaagtnggaggctttaaccntccaaccantntaaaatctggccggtnttgccggccttcnaccttgnnctcncggcctttnttccacaaggttccgggtgtaaaaaaccncctggtttccggatnggccccaaggncttgggccanttttnaaaattgggaaaattnccggtggccnccaaaacccnccngtccgtgtggtgtaagntaagnggcccgggggttttttggcccggtnaattttaggnggggccgggcnttnctttttccccgacntttttcacctttccggncattccaacctttggaacctttcnggcctttggccnncccttcctnngnttncgggttttccgggggcctttggccggngcccgnaagggccngggtttaattnnaagtnctttccaacctttntataaaagggggccggg

SEQ ID NO: 1519 - DNA, 597 bp, Homo sapiens
  misc_feature 62, 596: n = A,T,C or G
cggtggcggccgcccgggcaggtgcgcgggcaggtaggttttagactcctatgcttttaatnttcatgtaatttccttgtctcttaaataaccataataaaacaacagttttgatataggacagtaaagagccctttgatatactactggttttgaatgtgtatagagacctcatatatactcttcagccattaagaaattgtagtaatattttgctcccaaattgtggagtctgtaaattttctcaataacatcatctttatgaaaatccacagaggccagggatggagtaggaacagaactaagtttcaaaggcaaatggtgatctgggcttgaggaagtaacagtgaggtcagagggaagaagggaaggagagagggatggccagcagacccaagtgcagagttcagaggggtagggaacaaagggagacatggggaaagactggatgtggccacagcagcagtgtactgcaggcccgagtcgcaccatggctgggtgggatcacagaggatgggatactcataaactgggtcaaaaaagttttgtctgctgtacctcggccgctctagaaactagtggatcccccgggctgna

SEQ ID NO: 1520 - DNA, 355 bp, Homo sapiens
  misc_feature 38, 49, 96, 97, 106, 159, 274, 343: n = A,T,C or G
gcgaattggagctccccgcggtggcggccgacgcggcnaggtacatcanacaaggaagtcccacggcactgagagctgaattgtgggctctcattnngaatatttncagccaacctgaggatgtcttgtattatgagcagcttaagaccaatgtgatcnaacttgaccttttggggacagtctaatctataaagatgtgaagttgacagcaagcaatgatgattattattttgtatttgaagattatttatatcaaggtattactttgtttttnccgggatacatctgtgttgagtcactttgcattcaacaagtgcctcgccaccaaaatcatacataagangaaaactaggac

SEQ ID NO: 1521 - DNA, 388 bp, Homo sapiens
  misc_feature 9: n = A,T,C or G
cttagggcnaattggagctccccgcggtggcggccgcccgggcaggtacgcggggggagactgaggcaggagaatcacttgaacccgggaggcggaggttgcagtaagtggagatcgcgccactgcactccagcctgggcgacacagtgggagtctgtctcaaaaaaaagaaaaaaaaaagctactgagaaggagccaccattttgctttaaaatagtgggtttttttcctttttaatgaacactggagctgaggatgcagattacatgagttatttaataagttgattcaagagagagagggtatattagaaatggtaagatgatttggtgggcaaaaatgctttctataatttgaatatgggtttaatttaattattaactataga

SEQ ID NO: 1522 - DNA, 382 bp, Homo sapiens
  misc_feature 207, 223, 265, 271, 338: n = A,T,C or G
tacttagggcgaattggagctccccgcggtggcggccgcccgggcaggtacgcggggggtattaaaatgttctttcagttagggccaaagggcatttaacttcaaggtaagacccattccaggacggcagaagatcatgtctgtcttgcgtatccctgtgtgaattttgcctgacatgttgcaaacactccgtatggaaatcttgangggtcttctgccccantcaaaaaaacctcttgggagaacagttatccccagacctcanacgctngacggatacatgagaagctttctttgatggattcgatgtcaggatctccatgtgaacttccacttanaggtgtcatgctatggctctctctgttgaaaactgaaaacctgt

SEQ ID NO: 1523 - DNA, 448 bp, Homo sapiens
  misc_feature 84, 112, 176, 178, 190, 195, 197, 206, 207, 229, 250, 253,261, 283, 290, 296, 306, 307, 309, 315, 316, 319, 321, 335,337, 343, 364, 383, 396, 397, 405, 411, 420, 429, 430: n = A,T,C or G
aggtacgacaatggaaagtttttaaacaagcaaatgtcactatcaaattcctgttttagaaagataattctgagaaggcacatnctgagacagcctggggccaagatgctgnggcgtaaacagatcgctgagcgatgataaggttcctgaatccaaagggcaatttggtttgaaancnaaaatttgaatnagggncncattttcannggattagtcttttttccctcanaagtatgaaaattgcccttgnggnttggatcncatattttaatgtaattaatangttacgnattggnaaaggggaanntnccaagnnaangnaaatacccataaangntattgntatttttctcaaccaacgctnttttggtttttcctttttnggggaacccaagnngtaagtgngggttnatgtaattnggggcatannaaagcttccaattttaaa

SEQ ID NO: 1524 - DNA, 495 bp, Homo sapiens
  misc_feature 84, 108, 118, 212, 247, 267, 366, 374, 387, 437, 446, 452: n = A,T,C or G
ccgggcaggtacccactccctgctataaacccaaagaagaaacttttcaagttcgaaggccccaaagtttggccccatggggtntcaaaaaccaaaggccttcaaagnaagccttagnaaagaaagggagctggctgtgttcaagaagggagccccctcgttcatcccaagaagggccctgggtccgggccctggcaccaagttcacccttnttggtggttgggggaaccccaaggttggccgaaantaagttcaaggttgccccanggttggctcctgtcttttctcttcaagtcccgtgggctggaccctgccctattggaccgaagtggtgaaaggggccccaagcccagccaattccccaancgttgccntgtttattggcanggcccaatgccagcgggggggaaaatttccctggaggtttcaaaccccangaacggagnaccagnaatgggggctcttttttgggttgggcccctggcaaggggaatt

SEQ ID NO: 1525 - DNA, 643 bp, Homo sapiens
  misc_feature 93, 121, 127, 128, 137, 188, 207, 213, 247, 261, 265, 272,293, 315, 322, 324, 361, 383, 409, 424, 457, 460, 464, 479,498, 553, 554, 558, 589, 591, 595, 599, 600, 603, 607, 611,627, 632: n = A,T,C or G
atgtggctctggaaggcgtgagccacttcttccgcgaactggccgaggagaagcgcgagggctacgagcgtctcctgaagatgctaaaaccancgtggccggccgcttctaggaaacctangtgggnntcccccccnggggcttgcaagggaaattttcgaaataatcaaaaggctttaattcgaatnaccccgtcggaaccctctnaagggnggggggggccccccgggttaacccccaagccttnttttggtattcccncttntttaagntggaaggggggttttaaaatnttggcggccggcctttggggcnggtaaantnccaattggggttccaattaaggcctttggttatttcncctgggtggttgggaaaaaatntttggttttaatttccccggccttcnaaccaaaaattttcnccaaccaccataatccaattatccggaaggccnccngggnggaaggccaattaanaaaagttgggttaaaaaanggccccttgggggggggttggccccttaaaattggggaaggttgggaagtccttnnaccntccaaccaattttaaaattttggccggtttngncgtncctnncancttngganccccgcctttttttcncaagnttccgggggaa

SEQ ID NO: 1526 - DNA, 505 bp, Homo sapiens
ccgcggtggcggccgcccgggcaggtacataattgttcaaagcagttttatttacaacaaaaatccgtatacaacaaaaagcttcaaccaacaatggtgaatggttaaaaaatattatggtgcatacatccatgaaatcctagttagctgtaaaaaaggaatgaaatattgacatacacaataatctggatggatctcaagagtgttgtgctaagtaaaaagtgtctccaaaggtcatgaatggtttatttcatttacacagaatttcagaaatgacaaatttattgaaatggagaactaatttatggttgccctgggtgaggacaccactggactggaagcagagggatggctgagcccacgaggttagtgtgagggagatcctcacagtaagtgcaacagttctgcactttgactgcgttgatggtgataggaacccatatttaagatgaaataacacagccccatgtgcacacactgtacctcggccgctctagaactagtg

SEQ ID NO: 1527 - DNA, 431 bp, Homo sapiens
tcactacttagggcaattggagctccccgcggtggcggccgaggtacacggccctcatgttctctggacacagtatggatggtgaatgttctcgtggtgtgagacagaatggagtcaaggagaaaccaagtataggcacagggtgggtgagactttgtttccgctaagaaggtcatgctggagccctccatcacctcaaccaccttcccacttggcaacaccagactccaatttgatttcaacaggatcaggaccatacttcacatccaggaagatggggtcgctcctctggctcagaagggcatctcgagcttcacattggtaagtccctgagtcctcccgctggacaatgagaatggtgagggatcttgccatccttggacagctgcatgccgctcatgggaacacaatggaagagggttgttggaaac

SEQ ID NO: 1528 - DNA, 361 bp, Homo sapiens
  misc_feature 187, 191, 197, 210: n = A,T,C or G
ccgcggtggcggccgcccgggcaggtacgcgggggcgcgacgttcggttcgctgtgtgtgtcgccggctccttgagggtccatgtgatttttacgccagtgctgctgaactgtgcagggtagggagctggcacagtccgattaattgtccttgggtcgaggtgtctcgtcggaccctttggggcctnaagngaaaanttaaggcagaagncactgtaaattatttctaaataccaatttccaaaatagtgactcttggacaatagttgcaattatatggaattatggctggttataagcctgtagctattcagacatatcctatacttggtgaaaaaatcacccaagtatacactgtacct

SEQ ID NO: 1529 - DNA, 454 bp, Homo sapiens
tatagggcgaattggagctccccgcggtggcggcccgcccgggcaggtacaaaagaaatgagtatcctagaaattgattataatattgatgtctcaaattttatgtaagttacacataaatataaaatcccaaaaacatgcacctaccaaaacaggtggagaaaagagtgttttcaacaaatgatgctggaacaactgcacatccatatgcaataaaaggaagctggacacagactttaccctcttttaaaaaaaactgacccaaaaatggaacacagacctaaatgtaaaatgcaaaactatgaaactcctagaagataacacaggagagaatctaagggaccttgagtttggcaatgactttttagatacaacaccaaagacacaatccatgaaagaaataagaagtaacctggacctcacctattagaatggccaaaacccagagcactaa

SEQ ID NO: 1530 - DNA, 316 bp, Homo sapiens
  misc_feature 78, 85, 200, 220, 298, 307: n = A,T,C or G
ggtctgggtgtgctcagcgggcacaggcctgtggttttgctccccagtgccctgcctctcacagacctgcttgcttanacatccncccaccccaggaggctgaggctgattccaggtgaccctttgggatgcttggaagcgctcgcggtgatttaaacagaattaaccagcaaaaacaatcctttgcggaggtgcaaaanggcagcgaggaaaaggctanagcacacctcagattggacccagatgactaggacctgccagccgcagcatagggattgggatacaacagatacctaanaagcatcantcctgcccg

SEQ ID NO: 1531 - DNA, 320 bp, Homo sapiens
  misc_feature 26, 211, 239: n = A,T,C or G
actactatagggcgaattggagctcnccgcggtggcggccgaggtactttcgtgctgccgccggggagtgacaaagagcatgcgggtggggcgggcactactggcatctgggtgggcactccaaggcttggcatagctatgatccagaaaaaccaggtccagctcccgttcatgcactgaaagctggaagagcagcgaggtgcccatgccnttgagctgaagttctgggaaagtccctntccccaccccggtgggccatgtcagtggaggggcagaaagtcagagcatgggtatctgcatgctagtcacccgcggtctta

SEQ ID NO: 1532 - DNA, 430 bp, Homo sapiens
  misc_feature 118, 183, 193, 244, 266, 368, 409: n = A,T,C or G
ccgcggtggcggccgaggtacttccatcccctcatctgtggtagtagtgaaggctaggtgagtaagcgtgggctgttctacccaccagaagtccaggagctgttgtatacctcatttntaactcgtgaccgagtgacttgctttaactttctcgaaatcctacagagttgccaagttttgccntcccttcctnaagtcattgttaaacttctggcctataagcatcatgggacctgtagcctangggtgggaccccctaaagcctntgaatgtcgctgcttaaaagctactgcaaactgagggcaaattgcaatcttctattcctttttgttgcaaggggtcttcacaggtcttttaacatctgcttntccctgccaccctgccttttagggggctggcccagctattncacacccctaaacccaccctg

SEQ ID NO: 1533 - DNA, 637 bp, Homo sapiens
cttagggcgaattggagctccccgcggtggcggccgcccgggcaggtacgcgggcgcacgcacatacacaggatttacacattcagagtagaaaatctcaacgttaagcagtgaccatttcttggtaatcacatctatgtttatttcagcaaagcaataaaaaaaatttgatgtttttgtagcaagctttcaaaatcaatcaatttgaccaggagaaaaaccattctgaccaaacaaggattctgagtctttaatttgatggtagctctgtcatgtgtgttagataattaatgttaacaacacaggtttctaggctatcaagtcttttggaacgctgaagtgatccactttttattctgttaccctccctccctctatgctgcctgtatgattttgaaatccagtcctttcttcggagcatctggcataaatctccatcagacatgaagaagaaggggcgaattctatggtctgcatgggaacagcctgacagctgcctgtttaatcccttgcaatgcaaaaatttcttcaaggagggaatctcacttaacatgcaaacagagaggcccacacatttggtcccgttccatattaagtgatattaattagaatggaataaaactgcattttttttttt

SEQ ID NO: 1534 - DNA, 201 bp, Homo sapiens
acgtcggatgacatgttaccatgacacaaaacgacaatgaccacggcaccacaccaagaatcatctacctctattacaaccagacatttgcactcaaataaggaggtgctgccgtatacttatccgttgctggaggcagcatgaatgggaaccagacacagctggaaagcaatcgggtaacagagcgccaaccctgtacct

SEQ ID NO: 1535 - DNA, 155 bp, Homo sapiens
  misc_feature 3, 17, 39: n = A,T,C or G
ggngctaattggagctngccgcgcggtggcggcccgtcncctcagaggacggaaagacgatgccggcctcacgcttcaccgccacggccgccgcctagagtagcactcgtcgacccgaacagtcaccgtctctcattcccccgcgtacctgcccg

SEQ ID NO: 1536 - DNA, 356 bp, Homo sapiens
  misc_feature 182, 310: n = A,T,C or G
aaaacaaccagcttcaatattagaatatagcactgacaatctacttagacacataagcattaatagttgcctatcactgttgatggaatgttaggcttactcttaatttttctacatatagaagacaatgtggacactttattaaaaccatcttacagataagtttccctggtctgcctgtnggttgtttctcatgcttctataggctatatttcattaaaaatcaaaaatcaataacaaaggcctatgtgccagctgtagggaatgagtgagtggctagggggtgtgaggatagctcagagactatttnaaacaacaggaaaccttcaacttccctggtgctctttaaataatag

SEQ ID NO: 1537 - DNA, 711 bp, Homo sapiens
  misc_feature 65, 98, 101, 106, 133, 149, 165, 211, 318, 337, 369, 401,443, 458, 464, 481, 533, 535, 556, 573, 592, 593, 595, 596,602, 604, 606, 637, 644, 652, 657, 666, 667, 678, 686, 698: n = A,T,C or G
ctatagggcgaattggagctccccgcggtggcggcccgaggtacttgacttttccccttaagttngattccatttcctaacattatccttccctcttnctnctcancaactagtcttctaaattagaacttanacacaatgaccagatntgaccctgcaacagancatgcccttctgcattgagcatgcaatcatgtatcacaggtataanaccccttgaacagacatggttttggtgattctgtgtaggacttattgcttttacccaagaagatgatcaggcatcctaagtagatcaaaaagttttctggagctctngaatgtgtataggcaaganagattaagcaacctgttgccttatatgaggcnaactatcttctcatattttcttttgaattcangatttcaaggttggggaaggaaggccgggcgcggtggctcangcctgtaatcccagnactttnggaggcccaggccggcngatcacgaggtcaagagattgagaccattccggcttaaacggggaaaccccntntttactaaaaatacaaaaaantagcccgcctaatggcnggcccctttaatccagctnntnnggaagntnangcaagaaaaaggcctgaacccggaggcgggncttcaangagcccanaaacnggccttgannttaaccctggngaaagaangagactccgttnaaaaaaaaaaaaa

SEQ ID NO: 1538 - DNA, 302 bp, Homo sapiens
  misc_feature 195, 205: n = A,T,C or G
ggagctccccgcggtggcggccgaggtactttcgtgctgccgccggggagtgacaaagagcatgcgggtggggcgggcactactggcatctgggtgggcactccaaggcttggcatagctatgatccagaaaaaccaggtccagctcccgttcatgcactgaaagctggaagagcagcgaggtgcccatgcgtcnagcctgaaantcttgaaagtccctctccccaccccggtgggccatgtcaagtggaggggcagaaagtcagagcatgggtatctgcatgctagtcacccgcggtctta

SEQ ID NO: 1539 - DNA, 141 bp, Homo sapiens
  misc_feature 42, 111, 131: n = A,T,C or G
tatagggcgaattggagctccccgcggtggcggccgcccccnccagtgttctggggctgacatgagatttgaattctcccaggtatgcagttcttggttcttgaggtcccncccagtgagggttctcctanctggggcctc

SEQ ID NO: 1540 - DNA, 365 bp, Homo sapiens
  misc_feature 33, 36: n = A,T,C or G
ccaccgcggtggcggccgcccgggcaggtacgnttngcatttattctgcctgtttcaagtcagagcaaatactcctggaatgaccctctcctgtttcctgagtttgagccgatcctatttggcactgcagacagtgagaagtggatgtttgaggacagatgggaggtgcaaagtggagacaagtattggtcctttcttccactatgagactagcagggcccagttctcttagctattgtctctattttgtagattaggaaatttcaagtttagagaagttgagttaactcaccgaaggtctcggggcttggtgggaagagggacggaaaattaaattcaggtctgtgtgtctccaccaccatgtt

SEQ ID NO: 1541 - DNA, 476 bp, Homo sapiens
  misc_feature 461: n = A,T,C or G
ccgcggtgggcggcccgcccgggcaggtacgcgggagagctacaggttagatattaacagaatcttactctagagtaaaatcactagtaaaaaaaaaaagaaagaaagaaagaaagaaaaagaaaatgccaaagcatttaaataatcctatcacgtaaactgacaacaaaaaatggtatctggattcatgtagcagcatttaaaattcagttgtggccaggtgtgtggctcacccctgtaatctgaatgctttggcaggttgaggcaggaggattgcttgagcccaggagttcaagaccagcctgggcaacatagtgagaccctgtctctatttttaaaaaataaaggccaggtgcggtggctgacgcctgtaatcccagcacattgggaagccaaggtgggcagatcacgaggccaggagttcgagatcagcctgaccaacatggtgaaaccctgtcttntactaaaaacacaaa

SEQ ID NO: 1542 - DNA, 450 bp, Homo sapiens
  misc_feature 196, 203: n = A,T,C or G
tatagggcgaattggagctccccgcggtggcggccgcccgggcaggtacccaaattaactaaccttaaatgcaagacttagcagcaggtattatccatgttgaaccacagagttgtggttataggatgatctatccaggttgaaaaagaattctggccagcagtttgaagaagtgaaaatcaagattaggccacanaaggcanaggggtggtgggggccacagggcggggaaggattccaatccatgagactgcagaaggggaagtgagcagcctctacccatacagactagggtctcatggatgccactggagagcattccagtctcactggatattggtagttcactaacttgtgtcagtcatgattgtgacctctgatatattgctatatttggttttcatttatacaaaagctgcgtctctccttgatcccagtgttttggttggt

SEQ ID NO: 1543 - DNA, 700 bp, Homo sapiens
  misc_feature 161, 163, 169, 175, 177, 181, 187, 188, 194, 210, 231, 232,250, 255, 278, 287, 295, 299, 309, 313, 334, 345, 352, 354,359, 361, 373, 378, 395, 402, 406, 407, 410, 417, 437, 446,457, 458, 473, 474, 481, 489, 491, 493, 498, 500, 513: n = A,T,C or G
  misc_feature 541, 543, 545, 555, 557, 562, 577, 586, 594, 600, 636, 657,679, 681: n = A,T,C or G
aggtacttttattctttaagaatatagtctttagccaggtgcagtggtgtgtgcctgtggtctcagctatttgagaggctgaggtgagaggatcacttgagttcaggagttcaagaccagcctgggcaacatagcaggtccctggctcaaaaaaaaaaagntntcccanttcaanantaancctccnnttcttntttaaaaaaaatggtnattgaatttaccaaaaaggtnnaaaaaatgaattttgggnctttntctttaggaagggccttccaaantcaaccaangaagggtngtanaaaaggttgnaacnccttttggggaaaaattccantttatttaccntccctantnccccncnccaatgggtttnaaccnaccaagggaattttaanggaaaanaaannacnttggtangtggtttttatttggggacnaaccttggnacccttttaannggcccaacccccccnnccaaggncaaaaggngncnaaaancnccccaaggggggnaacccttaaccaaaacccttggggtccnananttccccccananccttncccctgggggggccnttaaggggnggccattntttatnttccttaaccccctttttttttattttggccaattntgggggccccttccttcttanaaaaggaagggggccaaaattngnaataattaaccttaaaaat

SEQ ID NO: 1544 - DNA, 345 bp, Homo sapiens
aggtactagataaaggaaagagcaaaacaaagtgcaggatcgagagaaaatcgattgcttgaaaaactgggtattttacttgctgcaagtcccgactgtgtcagccgatgagtttaacactatgacagcacagtcctcacctgcctgctcgctgctgtaatccccacactgttgtgtgccctatagcacctggcacacgggaagcgctcaagagatgtgtgtgaatgaaggagccacatcttgacttgcgacgcggagcagtaagctgcagttatttggtagcggtggaagaataaattctacctcctgcttgcctcgctgcagtggggatgagggagaggggac

SEQ ID NO: 1545 - DNA, 563 bp, Homo sapiens
  misc_feature 64, 66, 73, 89, 97, 101, 123, 151, 159, 163, 169, 175, 195,200, 214, 221, 242, 283, 284, 286, 292, 297, 305, 315, 331,364, 367, 374, 386, 391, 408, 410, 412, 414, 416, 423, 446,453, 465, 472, 481, 489, 501, 508, 513, 515, 525, 527: n = A,T,C or G
  misc_feature 539, 548, 549, 551: n = A,T,C or G
ccgcggtggcggccgaggtaccgataccccacatgcatgggctgtcaatccttaaacttttggnangtatggnattaccttcccaccanataagganaaantgggggtttgctcttttcaagnttgggccccttctttcaattcttggggnaacaaaanaatnataatncttggnattcaaggggaattatgggngggtnggggttttccgggngtaaaanaaaattttaaaaccttggganaattttggggccaattttgccaattaataagcccccaaggnncnttaaanaattngggttganaacccttggnaaagggggcctttaantttaatttgggttggggggaaaccccccccaanggnaatttanaaaaagggtccnaaagnaaaaaaaaagggggttngntngncnaaggccnccctttggttttccccaaaaagnccccccnaaaaccaaaggnaaaaggnaaaccaaanaatatttnttcccctttaanaaaggcnccttnantttcccaagntntagtggggccancttacctannanaaaaagggaaaa

SEQ ID NO: 1546 - DNA, 584 bp, Homo sapiens
  misc_feature 572: n = A,T,C or G
ccgcggtggcggccgaggtacttttttttttaattttaattttagtagcctgtctttattgaatcctagttgtctttccttaatgcctcttcacatttgaaccactgtcaaccttctcagacataaattttagccactccccttccccacaaaagaatctaagaaaagatacacttgctgtctgtttttgttagtttacatattcagttgactacagcttaccgtttttcaacttctgagaaattagttcttaattttggaaaatgtagtaattcagttaatacatctctaactttttttttatggaaattttctgacataccaaaagcagaataaggccaggggcggtggctcacacctgtaatctcagcactttaggaggccaggcgaatcacgtgaggccaggagttagagaccagcctggccaacatggtaaaaccggtctctacttaaaatacaaaattagagagcatggtggctcaggcccatgatcccagctacccgggaggctgagacacgagaattgcttgaacctaggaggcagagtcttgcctggcagaacaaggactcangggaaaaaaaaa

SEQ ID NO: 1547 - DNA, 422 bp, Homo sapiens
  misc_feature 168, 173: n = A,T,C or G
ccgggcaggtacgcggggggtattaaaatgttctttcagttagggccaaagggcatttaacttcaaggtaagacccattccaggacggcagagatcatgtctgtcttgcgtatccctgtgtgaattttgcctgacatgttgcaaacactccgtatggaagtctttgangggcnttcttgcccccagtcaagaaaaccttttgggagaacagttatccccagacctcagacgctcgacggatacatgagaagctttctttgatggattcgatgtcaggatctccatgtgaacttccacttagaggtgtcatgctatggggcctcagcgtcaccacatcgtttggacgtctgaccagtttcctgactttgagagtctcttactttaaacatgagggatcagccctagaaaggaaaggaaagaca

SEQ ID NO: 1548 - DNA, 411 bp, Homo sapiens
  misc_feature 193, 280, 371, 406: n = A,T,C or G
ccgggcaggtaccacgcgggctgtcctctaacagcgacggctgcacgctgggcacgctgggcacgctggcgggatgcacgggcctttgtcctgctgcctctgaggtagcagagtcggcacagggtggactgaggggcgtctcgcttttctgtccaccctctgagacagcagggacaggttcatttggcttctncaggtgcagcagcttgagtttgctctttggccctgatgctccagtctggttcttaatcttcttctcatagtccaggagttggcccanaaaattgaagtttggagatatagtaggtcttttttctttcacaaatctgtaagcttcatctaaagacatgtccatcctcttcatgatgtangcgatagcgatggtggcggagcggggagatcccanctaaa

SEQ ID NO: 1549 - DNA, 462 bp, Homo sapiens
cttagggcgaattggagctccccgcggtggcggccgaggtacgcgggaaagagatgaaaaacagagaagaatcttaaaatcagtcaggaggacaaatcatctttaaaagataaattaacagttgacttccccataccaacagaaggtgttagactaatagtgttaatgtcttgaaataaaatcattaccaacctagaatttcatatccaatccaaatattcctcaacataaaaggtaataaacttacctgtatattatgttaaaattataatccacgtaacaagaagaattaattcaacagactttagaacatggtgttttgactatacgttcttagcaggatatactctaaggatgaaatggaagtccaaagacctcttaaaatttattcagtggcatgattgttagtaataatattggtattttatattggaattattgtatgcatacttatgataaata

SEQ ID NO: 1550 - DNA, 372 bp, Homo sapiens
cgaaatcagcttttaagtgagctcagcatattataaaggaatgaaagcaattagagcgtggactctaaaggtaggtgagacttgctgttccacttagaaacatagaaacataggaaactaaggactcgatggggacatcaatagtaggatggcttttaagagggctgaagtgtgtaaatatacacattaagctttgcagcaactctgtgccaaatcgaagttgttgcagacctggaattttagtttggtaaaggataactgtagttattttttaaataaaatgattcattagaattctttggttctctcatgataatttagcaagtttgtctctttcagaaagaaaagtttaagtggggttaatgggtacct

SEQ ID NO: 1551 - DNA, 356 bp, Homo sapiens
tccacaaatgtctgcagctacgatggaccctcagctgctggacaggaaagaggatcaagctaagaaggcccagagtgtgcaagcagagagagggtgtggacagaaaaccttgccttctccagggctagtggcgaaagctatctcaggctggctcaagtggagagaaaaaagcatgagatcaagcaatggacagctggggaagggctggcttttatttcctcagctcccaagctcagtccctggcactgggccgttgcctttgtaggtccctctgtgcccaggtcttgctatgggggttgtttcttggcattaaggtctcagtttcaaacgccacccgtctccaagaagccctcact

SEQ ID NO: 1552 - DNA, 416 bp, Homo sapiens
aggtaccttcctaactggtctccttgcctctgttcttactctatttttcacacagcagtcggagtgatttttacttattctcctgttccagtggattctcattacactaagaagtaaatccaaactttatctgcatgtcagcgaattgtttatttttattttattttatttttaaaatagagatgggatcttgctatgttgctcaggggtcttgaattcctaggctgaagcaatccacccatctcagcctttatttatttttattaaattttcctttatctgtcataatctgtttgagtgctaaaaaaataaataaaataaaaaaatttggccggacacggaggctcacgcttgtaatcccagaactttgggaggctgaggtgggcggatcacctgaggtcaggagttcgagacca

SEQ ID NO: 1553 - DNA, 388 bp, Homo sapiens
tacttagggcgaattggagctccccgcggtggcggccgaggtacctatttactggtttatatccccattgcttcctccttcaaactctataccatggttcacaaaatcctgcattccattattcccaaattaatccatattattctttgcctcttcaaagaacatttctttaccaactcttaacagctgaaactagattttccccaagccctgggctttcctgtagcccttgttggtgatgggttccttacaagcacttgcccactgcctggggcagatactgcgttcatcaggactgcatttttgccagagaggagtgaaaaaagaaaaaaagagcttagggttttgacaaggacatccctgcaacaatacatgatgtacctgcccg

SEQ ID NO: 1554 - DNA, 425 bp, Homo sapiens
  misc_feature 413: n = A,T,C or G
ttagggcgaattggagctccccgcggtggcggccgcccgggcaggtacaattataactgtttttgtatattgggttattttttcagaagtaggccagtagctctaacaggagcctctttagcctgaattcatccaagtagtgcagtgttgcactagttgtccctcgggacatgctccccaatacgtaactcacttccaggttgcaactggacacttactggtagtcagaaatagctattgcatggagcttaaaatgaacttgatcttcgtgaaagatgagtctgcagctaagagactttactgtatatcatagtgttttttttgttttgttttgtttttgtttttgtgaccggagtctcactctttcacccaggctggagtgcaatggcgagatcttgactcactgcaacctncgccccctaggt

SEQ ID NO: 1555 - DNA, 412 bp, Homo sapiens
  misc_feature 142, 390: n = A,T,C or G
aggtacacacacctatggtgcccacaggtccagctaggaataaatgcacaaagagctccaccatctgagattaccactcaacttttaaagacaaattcttatttcatccctccaaagataaacatcacatggaaaaatgttncacatcaattctttattatgccagtgaagggatgcctttcttcaggagatgcaacatggagaaagttttaaaggcaggcagtgaagagaaggacaagacgtctcaacccagctccttagatggagaataagtctgcccatccccacacacacatgcagtgggaatgccagccgctgcctgttcctcggtataatctcacctgtgcttcaagcctgattattaacaaccttagctcagatcatgaggcncgagcctaattttccgacgttg

SEQ ID NO: 1556 - DNA, 808 bp, Homo sapiens
  misc_feature 37, 54, 61, 65, 73, 81, 107, 112, 114, 131, 133, 142, 153,159, 170, 182, 186, 188, 192, 198, 205, 206, 213, 216, 218,226, 234, 239, 240, 243, 256, 288, 295, 298, 300, 336, 342,431, 432, 451, 462, 464, 470, 497, 509, 510, 520, 523: n = A,T,C or G
  misc_feature 537, 542, 549, 568, 573, 576, 581, 589, 598, 612, 613, 651,658, 680, 692, 702, 704, 724, 730, 741, 750, 772, 774, 781,784, 791: n = A,T,C or G
ccgggcaggtacccggctgtgccggtatcgtgtgggnggaaattaccatagggnaccatantggnctcctggncttggggnccttcaagtccttatattcgccaagnggacnanatgtccttccggattgncncctaattanatagtcctggnaattgnattctccatanccataatggggngggngnaagngggtcnccccaannaaccaanagngnccaaccgnccttcccnccaannccnttcctccttgggnaattcccctttgggggaattccgggaaggggnccttttnttngnaaccccccccccaaagggcctttcccccccctttgnttgggncccttccccaattggaaaaaattttggaaacctttttttttcaaaggggccttaatttggaaagttttaatttggaattcctttggccnntggcccccttaattcccgnaaaaaaaaaantngggaantgggttaaattaaccaaaaaaggtttnatttgggaaagnnaacccccaanggncccggggggccaantttcnggggggngggggaaaggggggcccancccgnggngggtnttggtaanaaagggggnaaaagggggttggnnccctttcctccttgggggggaacccgggaaaggggggnaacccgnaaacccggaaaccccctttggngttggggggggnaaatttaaangncccaaccctttggtccgggntttccnaacccaaaaangggcccaancccaaattttccgggtccaaantnaaaaggnggngttgggntttccccccccaaaggg

SEQ ID NO: 1557 - DNA, 283 bp, Homo sapiens
ccgcggtggcggccgaggtacccattaaccccacttaaacttttctttctgaaagagacaaacttgctaaattatcatgagagaaccaaagaattctaatgaatcattttatttaaaaaataactacagttatcctttaccaaactaaaattccaggtctgcaacaacttcgatttggcacagagttgctgcaaagcttaatgtgtatatttacacacttcagccctcttaaaagccatcctactattgatgtccccatcgagtccttagtttcctatgtttc

SEQ ID NO: 1558 - DNA, 467 bp, Homo sapiens
  misc_feature 251, 253: n = A,T,C or G
tacttagggcgaattggagctccccgcggtggcggccgtcccaaatgtctgcagctacgatggaccctcagctgctggacaggaaagaggatcaagctaagaaggcccagagtgtgcaagcagagagagggtgtggacagaaaaccttgccttctccagggctagtggcgaaagctatctcaggctggctcaagtggagagaaaaaaagccatgagaatcaagccaatggacaagctgggggaaggggctngnctttttatttcctcagcctcccaagctcagtccctgggcactgggccgttgcctttgtaggtccctcttgtgcccaggtcttgctatgggggtttgtttcttggcattaaggtctcagttcaaacgccaccgtcttccaaagaagccctcactggtcaccctatctaaaggtaaaccctcacttcctaaggacaaaacctgtttttttctttcc

SEQ ID NO: 1559 - DNA, 415 bp, Homo sapiens
  misc_feature 8: n = A,T,C or G
tacgactnctatagggcgaattggagctccccgcggtggcggccgaggtacccattaaccccacttaaacttttctttctgaaagagacaaacttgctaaattatcatgagagaaccaaagaattctaatgaatcattttatttaaaaaataactacagttatcctttaccaaactaaaattccaggtctgcaacaacttcgatttggcacagagttgctgcaaagcttaatgtgtatatttacacacttcagccctcttaaaagccatcctactattgatgtccccatcgagtccttagtttcctatgtttctatgtttctaagtggaacagcaagtctcacctacctttagagtccacgctctaattgctttcattcctttataatatgctgagctcacttaaaagctggttt

SEQ ID NO: 1560 - DNA, 457 bp, Homo sapiens
ggagctccccgcggtggcggccgaggtacacacgaaagggaggtgtcaacaaaagaagataagcccatacagtgcacacctcagaaagccaagccaatgcgggcagctgctgacctggggagggagaagatcctcaggccaccagtagaaaaatggaagagacaggatgacaaagacttaagagaaaaacgttgttttatttgtggaagagaagggcacattaaaaaggaatgcccacagtttaaaggctcttcaggtagcctttccagtaaatatatgactcagggaaaagcctcagcgaagaggacccagcaggaatcatgagggaaggaaaatgcagcactctaaatggccactcaggcgttcctattcactcggaaaattaggttcatttcacaggacacagcagtgtagatcaggcttcaacttaacatttaagggaaatgtcagatttttt

SEQ ID NO: 1561 - DNA, 380 bp, Homo sapiens
ccgcggtggcggccgaggtacctccccgtggagctcacacccttttagaggagatacaataaaagccaggatggggcagagcagtggggaagaaggggaggtaatgttgaaccacctgcccatggttacagaggcagcaggcctgggactcccgacgcttccctcctgccttatacctgatctaagaaggccctgctgggcacacagtagatgctcagcaaatgttcggttgaagggctggagcctcacaaaaccctactgatgcaaacaggctcagcgaggctgagtgacttgcccaagatcctaagaggtggtggaggaatcgcctttcacaaaaaagaacaagcgcttcggagccgccgcccccgcgtacctgcccg

SEQ ID NO: 1562 - DNA, 408 bp, Homo sapiens
cttagggcgaattggagctccccgcggtggcggccgaaaccagcttttaagtgagctcagcatattataaaggaatgaaagcaattagagcgtggactctaaaggtaggtgagacttgctgttccacttagaaacatagaaacataggaaactaaggactcgatggggacatcaatagtaggatggcttttaagagggctgaagtgtgtaaatatacacattaagctttgcagcaactctgtgccaaatcgaagttgttgcagacctggaattttagtttggtaaaggataactgtagttattttttaaataaaatgattcattagaattctttggttctctcatgataatttagcaagtttgtctctttcagaaagaaaagtttaagttgggggttaatgggtacct

SEQ ID NO: 1563 - DNA, 609 bp, Homo sapiens
  misc_feature 1, 8, 21, 35, 68, 70, 78, 82, 89, 93, 98, 103, 149, 151,156, 166, 172, 173, 180, 183, 195, 199, 231, 234, 237, 256,260, 293, 294, 319, 320, 322, 331, 334, 358, 368, 370, 384,385, 396, 409, 414, 415, 420, 456, 463, 466, 470, 485: n = A,T,C or G
  misc_feature 490, 506, 512, 525, 530, 531, 538, 539, 544, 560, 561, 563,565, 586, 590, 592, 593, 595: n = A,T,C or G
nttttagnggattagttttanaagaaaaatagtcntggtctccttatttggggtcttggggtaagggngnagataagngtcnttttaangggnccagntaaangtccccccttaattttaacctttttttggccaaaaggggggggggncnccccnttttccaaanaaaaanntttccgnccntggggggggccnttcnaaaaaaaaaaagggggccctttcttttaaaanttnccngttggcccttttgggaaanaaanttgggaaagccccttttttcggaaaaaggaaannattaacctttctgggccccccaaanncnccccaaaangcncctttttccggggggggcccccancccccccaangnctcctttgtttggnngtaaaggggcnttttgggggtttnccaanngggtntggggggttccaacccccccaaattcctttttcccntttgggnaantaanaaaggccctttttcnaaccnttttttcccccttccnaatttntttaaagggggcnaaaanngtttggnnaagantttccttcccccatgnngntnaaaaaggttttccacccaaantaanannantttgtggggggggg

SEQ ID NO: 1564 - DNA, 454 bp, Homo sapiens
ccgcggtggcggccgaggtactgttttagtagcttacttgtgttttttaaagttcatttctccacccacaggatagctccatatcttccagcaccactaatgagtaagtattagggccaagctggtatctgcagagtgctgactggccaagagtctgcctgtgactcatgcgttaggctgtccagcattggggtgctggggggctgtagccataacatttgcaggatttggaaattccacctcaagctccaatcccagggtgttgattctggctaaccatgtttatgcaaagcaatccaagcactttgactcactttgggaatctggcattcttgggcttttgatattgagacagtggaacacttttgtatcagtttaggtcctgccaataattgctatccatttaagcacttgattttttacatatttaccagcaatttccaaggctttaatg

SEQ ID NO: 1565 - DNA, 351 bp, Homo sapiens
aggtacctaacaaagggcactgtccaaaccgagctggtgccacacaactccctcaggtgtgcaccacgggcagttcacccacagccccttgcatgcgtgtggacattgcccactgtgacgtgccaacgtgcccatgtgccgattccagacaccggcctgccggcggcccccccacctacaccccgggccactgtttccgtcacgctaatcctatcacctggggatgaagagatcatacagtgtgcaccccttgaaaccagcttcttcactcgccatcatgctgccgagatcacccagggtgtggcagggacccagcgttcatgcctgttgctgaggaggacaccgagggga

SEQ ID NO: 1566 - DNA, 513 bp, Homo sapiens
  misc_feature 339: n = A,T,C or G
ccgcggtggcggcccgccgggcaggtacacaaaaccaggactgtctgagtgtaaagcctgccgtctttcactaagttacactggggctgagtgatttccctgccactcaggtgtctttgctgtggaggaattaacgggtctgaagactgaagctgggaagaagcagcagggaagactgatctgagctttcagggaaaagagtgaagttggactttaaggtttttatattgtcaagacaatttacaaacacaggaagagaaagaatgacaaagaggagaactcctagctggaaagaagagaaaaaaaaattggatgcaagtaactgcatttatatatctngagaatttaaataatcagcaacagttagaggtgcaaatgcaacagaagctaaaaagaaacttagtatctggaatagttgacaagataaaaccccaaaatctgagagctgcaatcaaagagccatcttctctactaaattgaattagctcaagttatatagccgcttctcaacaa

SEQ ID NO: 1567 - DNA, 467 bp, Homo sapiens
  misc_feature 412: n = A,T,C or G
actacttagggcgaattggagctccccgcggtggcggccgcccgggcaggtacatatgcattgagcacctgtgtgccagtcagccgagctatcacattgcacaattctaagaagcaccattcatgtctcatcatatttctatgctctgggagttgcctttcacatagaatatgtgtgattgttatccctagaattgtgcagtgaggcaattggctaggtgctgtgctgctttttctttctttcttttttttttaagagacggagtcttgctgtgttgcccagtctggagtgcagtggtggcatgatcttgcctcactgtaacctctgcctcctgggttcaagctgttctcatgccccattctcccttgtagctgggattacaggcttacaccatcgcacttggcaaatttgntgtatttttagtagagacaggaattcaagacagccaggctggtcttgaactcctg

SEQ ID NO: 1568 - DNA, 396 bp, Homo sapiens
  misc_feature 9, 16, 31, 32, 34, 47, 146, 168, 239, 260, 281, 294: n = A,T,C or G
gcggccgangtacatntccctgctgaggganntncaggacaaggttnccacactctacaaaggcagtcaactacatgacacattccgcttctgcctggtcaccaacttgacgatggactccgtgttggtcactgtcaaggcattgntctcctccaatttggaccccancctggtggagcaagtctttctagataagaccctgaatgcctcattccattggctgggctccacctaccagntggtggacatccatgtgacanaaatggagccatcagtttatnaaccaacaagcanctccagcacccaacacttctacctgaatttcaccatcaccaacctaccatattcccaggacaaagcccagccaggcaccaccaattaccaagagggaacaaa

SEQ ID NO: 1569 - DNA, 395 bp, Homo sapiens
  misc_feature 387: n = A,T,C or G
ggtaccgcaaacccagtcaatgaagggagcatgctgggaaaatcagagtgatgaattgtgagagcagcagatgaatcaaatactggtgacctacctctgtgtttccaggtgtggatatggtcaaaagccaagttcatcaataggaaattcctaatgcaggaactttaccagcgctttctagatggagatcacggccctgtggctcgagatgacgaccctttctgggatcctgtcgaggtcgtccgcttgggctcagctcacatctggctccagtcgctggcctactgcatgaagctgacactggagctgggccgactgggatgttcctttctttgactgtgtctctccccattacagaaggctgcacccgagctgagctgctctcanctgggcct

SEQ ID NO: 1570 - DNA, 392 bp, Homo sapiens
ccgcggtggcggccgcccgggcaggtacccaaattaactaaccttaaatgcaagacttagcagcaggtattatccatgttgaaccacagagttgtggttataggatgatctatccaggttgaaaaagaattctggccagcagtttgaagaagtgaaaatcaagattaggcacagaggcagagggtgggtgggggccacaggggcggggaaggattccaatccatgagactgcagaaggggaagtgagcagcctctacccatacagactagggtctcatggatgccactggagagcattccagtctcactggatattgggtagttcactaacttgtgtcagtcatgattggtgacctctgatatattgctatattttgggttttcatttatac

SEQ ID NO: 1571 - DNA, 420 bp, Homo sapiens
ccgcggtggcggccgaggtactatggcttatttctgacagaatgaaacttttgtatcaaaggagcttcagctaaagttgaatgtttttctttctcagtttttatggccttattaaacatgtttagctagccaaagcttcctcctcctcaccatgctcagtgttagcatggtggtgaggctataaagaggcaccacaggaaggagcctgcacttcccccatgggatttaaaaaagaaccaatttgggccatgcttggtgcatctagcataatcttgggacaaatccacatgattcaggtcaaagttttggagttaattctcccattattatttgctcctttccaaagccttaatgtgaaattcagtcagggtctggccatggtggcaaggtgtccctacactctttcattcagagaaggag

SEQ ID NO: 1572 - DNA, 305 bp, Homo sapiens
ccgggcaggtacctggggtctcagggttgctctgggcctgatcatccactcagatctgtaaggaggatttgcaggatccatttagaaagatcctcccttacttccacaagcatggcctttggctcttaaatacctgtgctggggttttgtaattatagaaacaacaggaaccaaaactcattaatgttgagctacaaaccagagggaagcttctttctcaaaacagggctcaggcctagaaaaatctagttttctgaaatcgctagccagcaacagcactgagatggccatcccagaaacaaggc

SEQ ID NO: 1573 - DNA, 125 bp, Homo sapiens
ggcaaaggagaaagaagatccaggccctcatggtgctgggaaccctcagtggcaggcaggcaggcggcaggcagagcgcgctctccgggcggtctgaaggaccgcgggaatgtccccgcgtacct

SEQ ID NO: 1574 - DNA, 238 bp, Homo sapiens
  misc_feature 182, 188, 216, 222: n = A,T,C or G
aggtacctagcagtagtagccttggctttgctctgacggcgatctcgcggcccgagagccttttatagacagctccttcagcgtctctgtttccaaaccgcaaccaagaaggagacagacggagaaaagagagttacttttccaggttgcttttcccggggatgtgaaggatacagaaatgnctgtgnatcaacccatatcatcaaggagctgatnatctantggaagagttagacgt

SEQ ID NO: 1575 - DNA, 346 bp, Homo sapiens
ccgggcaggtacgcgggggccattctcctgcctcagcctcctgagtagctgggactacaggtgcccgccaccatgcctggctaattttttatattttttagtagagacagtgtttcaccgtgttagtcaggatggtctcgatcttctgacatcgtgatccacccgcctcggcctcccaaagtgctaggattacaggcgtgagtcactgcactcagtcaggttttcaggtgctggttccatggctcttcctgagccgaaaataaggaaactccatagaccttgtccactggaactcgttcccatctaccctccactctatccagggtgatggatctctgcagtaagt

SEQ ID NO: 1576 - DNA, 365 bp, Homo sapiens
  misc_feature 196, 283, 305, 332, 333: n = A,T,C or G
attggagctccccgcggtggcggcaacatgatgaaaccccgtatctactaaaaatacaaacattagctgggtgtggtggcatgtggctgtaatcccagctactcgggaggctgaggcaggacaatcgcttgaacccgggaggcagaggttgcagtgagccgagatggcactacttgcactgcagcctgagcaacanagtgaaactccatctcaaaaaaaaaaaaaattctaagtgtttatgcacctactaacaaatatctgaaacaaatcctggtataaccgntaaataaaaaattcttatgggnatagaccaaaatttgcaatttattagnncagtcgattcttcaacaccttttcttcattaa

SEQ ID NO: 1577 - DNA, 448 bp, Homo sapiens
ctatcactacttagggcgaattggagctccccgcggtggcggccgcccgggcaggtacgacctgtctcaggaacggtgccatgtgtgtgactaggactgcaaagcagcttgtgttcgtgggggaaatgacaggcacaggaaggaaaagctgagaacactgaaacggttcctaatcgtgcagtggggaaaggagggcgactgccgcgcagagtggcacgttggctggaagaggggattgatcagcagtgctggcaggaacagcataggcttgtcgtgtgatctaacagaagaggcagcaatctggaggcgccccagatcagagaagagacatcaagccccaggagaaatggatttcctttctccccacccatcagctgggtaggaagcccgaaggagcctttcatggaactatgggaagggctcctctgacgcagaggggatgaactgg

SEQ ID NO: 1578 - DNA, 361 bp, Homo sapiens
  misc_feature 3, 16, 30, 87, 92, 125, 144, 186, 209, 239, 270, 280, 291,300: n = A,T,C or G
ggngggacagggccangcctcacaaccaanagccccgggaagagctgcatgcacacggctggagagaggctctgcacccgagcacancctgntgcgactcctcatagacccggaaaactgattanaaggcagaggtgagtttcngagggtggcttgttgcacaaaattcatgagtcaggaatcaancatctttcaaattcaagcacttncagttaggagagacaatgaagaaagaaaanggaccattcccaacagcaacaaaaattgtanaatttctagngagcaaacggngggcacatntatacctgttatagagggtctgaggcctgactgaggaccacagaccatcaacaagcccggt

SEQ ID NO: 1579 - DNA, 451 bp, Homo sapiens
ctatcgactacttagggcgaattggagctccccgcggtggcggccgcccgggcaggtacataattggagatgaataatgattctcttagataaagaaacttgtccacccacctctaccacaaatgaaaatcctttttcttatagaactttttggccaagcaaaggctcatgatatctgtaatatctgtgatagagaaagcagtggagggatagttcttattccacagtccagcatgaaattctagaatgatgattggccttttctgttcactttcactctcttggagggaaggaggaatgtgaataattgaaaaaccgagttacaactcaaacaaaacacatatgaatttggctttgctctgtggtgaatcccacaactcgatagtgccctccactctttttctggtctatccttaactcaaaccttctgtctaagtttggacccaagacc

SEQ ID NO: 1580 - DNA, 364 bp, Homo sapiens
ccgcggtggcggccgaggtactagataaaggaaagagcaaaacaaagtgcaggatcgagagaaaatcgattgcttgaaaaactgggtattttacttgctgcaagtcccgactgtgtcagctgatgagtttaacactatgacagcacagtcctcacctgcctgctcgctgctgtaatccccacactgttgtgtgccctatagtacctggcacacgggaagcgctcaagagatgtgtgtgaatgaaggagccacatcttgacttgcgacgcggagcagtaagctgcagttatttggtagcggtggaagaataaattctacctcctgcttgcctcgctgcagtggggatgagggagaggggactcag

SEQ ID NO: 1581 - DNA, 529 bp, Homo sapiens
  misc_feature 186, 187, 199, 207, 223, 234, 270, 272, 276, 310, 365, 395,407, 415, 436, 449, 478: n = A,T,C or G
ccgggcaggtactttgcctcccaaattcacttttgtgcaaaacatgcacataacacacaaatatgaatatatgaagtattaatttgctcatcttctggctcctttcccgcaaaagccctttttatttaggaaaccacatattttactcattcctttctgaccataccgtttagctaagaagcttannaacagcttctanttcacacncttcaaaccttcgggntcacacctggncaaaaccttcaggtgggtttatcattttcacaagcnangcancacatggctcgttctctggccccagacctaaaanatggaaagggattgtcttgggaaaaaaacccccctagtcatgccagggggaaagnatgggttctggaaattcacttcactggggnagggacctaacnctcaaccncaggaccaagtttgcccattncttcccttttttntttattttggtttcctaaaattggccctnaacctttttaattccccaacctggccattggaccaaccttgaaaccttttc

SEQ ID NO: 1582 - DNA, 451 bp, Homo sapiens
ctatagggcgaattggagctccccgcggtggcggccgaggtactgttttagtagcttacttgtgttttttaaagttcatttctccacccacaggatagctccatatcttccagcaccactaatgagtaagtattagggccaagctggtatctgcagagtgctgactggccaagagtctgcctgtgactcatgccttaggctgtcccagcattggggtgctggggggctgtagccataacatttgcaggatttggaaattccacctcaagctccaatcccagggtgtttgattctggctaaccatgtttatgcaaagcaatccaagcactttgactcactttgggaatctggcattcttgggcttttgatatttgagacaggtggaacacttttgtatcagtttaggtcctgccaataattgctatccatttaagcactttgattttttaca

SEQ ID NO: 1583 - DNA, 345 bp, Homo sapiens
ccgggcaggtacgcggggagcggcggcggctccgaagcgcttgttcttttttgtgaaaggcgattcctccaccacctcttaggatcttgggcaagtcactcagcctcgctgagcctgtttgcatcagtagggttttgtgaggctccagcccttcaacagaacatttgctgagcatctactgtgtgcccagcagggccttcttagatcaggtataaggcaggagggaagcgtcgggagtcccaggcctgctgcctctgtaaccatgggcaggtggttcaacattacctccccttcttccccactgctctgccccatcctggcttttattgtatctcctctaaaagg

SEQ ID NO: 1584 - DNA, 388 bp, Homo sapiens
  misc_feature 375: n = A,T,C or G
acttagggcgaattggagctccccgcggtggcggccgaaaccagcttttaagtgagctcagcatattataaaggaatgaaagcaattagagcgtggactctaaaggtaggtgagacttgctgttccacttagaaacatagaaacataggaaactaaggactcgatggggacatcaatagtaggatggcttttaagagggctgaagtgtgtaaatatacacattaagctttgcagcaactctgtgccaaatcgaagttgttgcagacctggaattttagtttggtaaaggataactgtagttattttttaaataaaatgattcattagaattctttggttctctcatgataatttaagcaagtttgtctctttcangaaagaaaagttt

SEQ ID NO: 1585 - DNA, 494 bp, Homo sapiens
cgaggtacagcctttctcacatggtagtctaagggctcctgtaatccaagcactttgggaggccaaggcgggtggaccacttgagctcaggagttcaagaccagcctgggtaacatagtgagaccccttctctgttggcagtaattccctctacacagcaggtgctctggcagctctctggagacgaggaaggagaacttaggaagatggtcttggcttacacaccaccttgctgccagggctcttgcaaagacaggcttcaccaaccaccagcccacagttggcccgtccccaggggctgcacactagccttatggaaagttcctcgagttccctgtgcgtcagcttctgcctggacgctggctactgttgtcggctctgtgaacaggcacacagggtttcctccgggtgtgggatggggctgcccgggatgggggttggggatgctggagcagtgggagatgtcccctgcctatcttccccgtacctgcccg

SEQ ID NO: 1586 - DNA, 195 bp, Homo sapiens
ccgcggtggcggccgcgctctccgatgcccagccctcctggaaccacctcgcctgtgacgtaggtggagcgcgcactgcctccgggcccgtctttctcaattgggaccggaaaacgttgtcgctcatcctatgacgcgaaagtaaccgagactatcaggatccggagacggaaatgtccgaaggccgcagtacct

SEQ ID NO: 1587 - DNA, 352 bp, Homo sapiens
aggtactgggattacaggcgtgagccaccgttcccggcctaagcgtgttttaaaattatatactgaagcccctatggagacatagaatatggccattgtcacagcaagctcccaaatgcacctgcccagtcacatcttgcctttactcccctggaggctaccactcttctgatattattattttttcactatagactaatttcaactgttctgggacttcacgcaagcagaatcataaactctcagaaaactgaactctcctctctggcttcttccactcagctcaaagtttctgagattcacccgtgctgctgtgtgtgtccacagtccgttcattttcactgcggggcag

SEQ ID NO: 1588 - DNA, 310 bp, Homo sapiens
  misc_feature 296: n = A,T,C or G
aggtacctgccaccacacccagctaatttttgtatgtttagtagagacagggtttcaccatgttggccaggctggtcttgagctcctgacctcaagtgatccacctgcctccgcctcccaaagtgctgggattacaggtgtgagccaccaaggagtaattattattaaaaggtaaccagcagcagtcagtttatagataaaggacctatactcattctcagcaccttgcccaaagtaggcattcaaactcaagtgtagccaaggtctgcactagatactaggaaacaacaaacgtnactgtacctgcccg

SEQ ID NO: 1589 - DNA, 106 bp, Homo sapiens
ccgcggtggcggccggtcgcctacctgccttccacttccccggccgcagagcagttcgctgccggctcggttcgccgccaacctcacctccccgcgtacccgcccg

SEQ ID NO: 1590 - DNA, 421 bp, Homo sapiens
ccgcggtggcggccgaggtacccattaaccccacttaaacttttctttctgaaagagacaaacttgctaaattatcatgagagaaccaaagaattctaatgaatcattttatttaaaaaataactacagttatcctttaccaaactaaaattccaggtctgcaacaacttcgatttggcacagagttgctgcaaagcttaatgtgtatatttacacacttcagccctcttaaaagccatcctactattgatgtccccatcgagtccttagtttcctatgtttctatgtttctaagtggaacagcaagtctcacctacctttagagtccacgctctaattgctttcattcctttataatatgctgagctcacttaaaagctggtttcggccgctctagaactaggtgggatcccccgggctg

SEQ ID NO: 1591 - DNA, 274 bp, Homo sapiens
  misc_feature 220, 225, 229, 232, 233, 238: n = A,T,C or G
cactacttagggcgaattggagctccccgcggtggcggccgcccgggcaggtactgtattcttcactgttacacacttagagttaaagacagtttcattgaagagtgttgttgatgagggagtaaaaaatatttattgaatttcaacctgtgactacacaactttaatctgtatgatgaaatgggaagtatgtataaaacacttctgctgtgaactttgntgttntttnttnntattnacatgggtgaagacaaaacaaggatttatttgcctt

SEQ ID NO: 1592 - DNA, 279 bp, Homo sapiens
  misc_feature 228, 263: n = A,T,C or G
aggtactgttttcctgatcttactgtttaattcgaatcagataagagaaaaataaagaccctgactatctccatctctatcatttaggtttaactgcgtaagaaacaactgcaaaaccagtggctaaaaacaataaagaattattaggtaatgatgtcgggttggaaattttcctgggatctgctggaccttgctttgctgctgttgccttgactcacttgtgcagcnccactctgcttggaacttccctgataagctagcanatggcttgggcattca

SEQ ID NO: 1593 - DNA, 410 bp, Homo sapiens
ccgcggtggcggccgcccgggcaggtacatattgctatgttggatgatttggagcatgcagaggcagatacagtagtagaatcagctttctgcctccatcttttactccgctccctgtcgctctttaactcagcagtttttctctctcagtctcccaacttgtgtgaagtgttttatattctacataaattgagggtggagggcaacttctggttgtgttgaatgaggagattggcagaattgacaaaagcaaaatgaaacaatctcagcattctggaaaaactgagcaggggcatacaacaatctgagaagtatttatgccctgtaactgctgaatttcaggtgaagaacagtgaagactgtatggcatttggcctggaagctattcctatgccctctcccatctgttt

SEQ ID NO: 1594 - DNA, 583 bp, Homo sapiens
cgaggtacgcggggttcgagagagaggagaggcccagggcagacactctaggagaaaaacttgagtggtataagtggagttttaatttttattctgtgaatgtagtgaataatacatgcaaattagaaacgtgaaagtaaaatggaagtaaaactttccatttggaagcctgttggatgttgagcaggtctgccaggagttagaagaccattccggaagagctgactccagcctgtccatgcacggctacaatgtttaggattgggaggagacagctctggaagcagagcgtcactcgagttttaacgcaaagactgaagggagaggaggaagccaagcgggctcttttggatgcgaggcataactacttatttgcaattgtggcttcctgtttggacctgaacaaaaccgaagtggaggatgccattcttgaagggaatcagattgaaagaattgatcaactttttgctgttggaggtctccgacacctcatgttttactatcaagatgtggaggaagcagaaacaggacaacttggctctctaggaggggtaaatcttgtttctggaaagattaaaaaacc

SEQ ID NO: 1595 - DNA, 364 bp, Homo sapiens
ccgcggtggcggccgaggtacccaaattaactaaccttaaatgcaagacttagcagcaggtattatccatgttgaaccacagagttgtggttataggatgatctatccaggttgaaaaagaattctggccagcagtttgaagaagtgaaaatcaagattaggcacagaggcagagggtggtggggccacagggcggggaaggattccaatccatgagactgcagaaggggaagtgagcagcctctacccatacagactagggtctcatggatgccactggagagcattccagtctcactggatattggtagttcactaacttgtgtcagtcatgattgtgacctctgatatattgctatatttg

SEQ ID NO: 1596 - DNA, 399 bp, Homo sapiens
  misc_feature 174, 353: n = A,T,C or G
aggtactcaggcttgcaacataatggccatttttccccctttggttcctggtgctaattaaacacagcacaacccaatactctaaaagtgatttcaaatataagggaggaaggctattagaactgggcaagcctcagggactttagtctgatgcttccgttttgcaagatgaancccagagaaggtaaagtgacccagcccaaaagtcactcagccaactcatggcagaacaggactatcatccactcccaatccagtgctctttcttttcacttcacagttgaatccccaactcatttgtattcacaaaatcatttcacagaagagtatgggtcacagctgcaagggataangagatctctgttattaaatacacagccaccattcattcactctcac

SEQ ID NO: 1597 - DNA, 316 bp, Homo sapiens
aggtacctcggtgaggaggcacagattttgcctcctgttgaccagcctggtttcataccgaaaagacattgaaggactgcagaaatgtatgggtgcaccgggccgagggaagggtggctgagtgagaggcgtataaaatggggctgtgtgcatgcaggcccatgtttcagcctcagcccacgccaggtgaaaggatcagcaatgctctgttgccatcgtgctgggacgacaccagctctattgccaccgatgagtagctgaggtcagtgtgcacagagtttgaaattaagttaatagactttacagcagctggcct

SEQ ID NO: 1598 - DNA, 384 bp, Homo sapiens
  misc_feature 53: n = A,T,C or G
ctatagggcgaattggagctccccgcggtggcggccgcccgggcaggtactanggtaacattgtttcgactatgtgtgttgtattaataatatgtatctcatgttatccagactggtgactggacatggttgaaagagttttatcaaagactcattgatcagaagtggcagaggaagaaaaagagcaaagagcactggtatcaaaaggcaattctttccaagtttttatattacagtatcaatggtgatggagccgctcagcctgtctcatccactcgcagaacagcaggaatcgtccagttcagatcagacaaatgattcggaaggggcttcatggcctgctcccttcgaaatgccttcttcagtttctgaagatcccagtgc

SEQ ID NO: 1599 - DNA, 250 bp, Homo sapiens
  misc_feature 219: n = A,T,C or G
tacgactcctatagggcgaattggagctccccgcggtggcggccgaaaccagcttttaagtgagctcagcatattataaaggaatgaaagcaattagagcgtggactctaaaggtaggtgagacttgctgttccacttagaaacatagaaacataggaaactaaggactcgatggggacatcaatagtaggatggcttttaagagggctgaagtgtgtnaatatacacattaagctttgcagcaactctg

SEQ ID NO: 1600 - DNA, 321 bp, Homo sapiens
  misc_feature 232: n = A,T,C or G
aggtactcccacaaatttccatgaaataacataatgcttcaatggcttgacattgaaacaatatgtaggaagcatgtgttccaatgggatattgattatggctcaactaaagataacagaatctgctgtagctattttaagaagaaaaacatttaagacatataattaaatggcttagagaatcactggggagggctgaatacatctaagttgagccttcagaaatagttcncaagcaacaccacagaaatgggctgctggaggaactgctgcctcttctgggatcaggaagctacctgccaccttgggtcactgccagtt

SEQ ID NO: 1601 - DNA, 326 bp, Homo sapiens
  misc_feature 53, 67: n = A,T,C or G
ttctttctgaaagagacaaacttgctaaattatcatgagagaaccaaagaatnctaatgaatcattntatttaaaaaataactacagttatcctttaccaaactaaaattccaggtctgcaacaacttcgatttggcacagagttgctgcaaagcttaatgtgtatatttacacacttcagccctcttaaaagccatcctactattgatgtccccatcgagtccttagtttcctatgtttctatgtttctaagtggaacagcaagtctcacctacctttagagtccacgctctaattgctttcattcctttataatatgctgagct

SEQ ID NO: 1602 - DNA, 182 bp, Homo sapiens
cgcgctctccgatgcccagccctcctggaaccacctcgcctgtgacgtaggtggagcgcgcactgcctccgggcccgtctttctcaattgggaccggaaaacgttgtcgctcatcctatgacgcgaaagtaaccgagactatcaggatccggagacggaaatgtccgaaggccgcagtacct

SEQ ID NO: 1603 - DNA, 582 bp, Homo sapiens
  misc_feature 175, 181, 185, 188, 191, 200, 201, 229, 231, 238, 257, 264,269, 293, 307, 312, 317, 319, 327, 340, 353, 355, 363, 372,388, 391, 401, 402, 405, 407, 416, 423, 425, 431, 441, 442,448, 454, 468, 473, 479, 481, 492, 512, 513, 514, 524: n = A,T,C or G
  misc_feature 526, 530, 540, 544, 546, 569, 572: n = A,T,C or G
ccgggcaggtacgcggggcattttgtagagaaacaagcggagttaaccgaagagggggtcgaggagagccggagtcggggacccaggagtttcctgtgtccagcgctgccggagccgctctgaggtgccatgttttcagaacagagtaagacccctggttaaataaagaaactgnaatatntttnttncangaattcccnnattattagctcttaattttaccaaaaangnaaaagcnatttaaacccttgcccttncttgaanggtgnatcttaaaatgggggggaaaatanaattgggttggaanttttntggcngnccccgtgngactttcggggcntccggctttcttnantaaaatcntttaggttngggaaattcccccccnccngggggccatnnccnanggggaaaantttttcngnaattanttttcaaagnncctttnaattcngtatttacccccgnttccngaaccncnttactgaaagngggggagggggggggccccnnnggtggttaancncccnaaggcctttntttntngtttttccccccctttattaagnttnggaaaggggg

SEQ ID NO: 1604 - DNA, 321 bp, Homo sapiens
  misc_feature 81, 83, 119, 169, 220, 246, 254, 256, 261, 262, 263, 264,267, 270, 282, 288, 303: n = A,T,C or G
aggtacgcgggatgttatttattacttctgataaataggcttgcttcatctgaatgcaaagtaatatatacacctggaatntntaaagttttttttgtttttggcacggagagtatcanaggaaattcaaaaggttttaactgcgtaaagaaacaacctgcaaaaaccngttggctaaaaaacaattaaaagaaatttatttaggttaaattgaatagtnggggtttgggaaaaaatttatttctncttggggnantcctnnnnttnggnactcttttgccntttttngccttgccttggtantggccccttttggaacct

SEQ ID NO: 1605 - DNA, 323 bp, Homo sapiens
  misc_feature 290: n = A,T,C or G
aggtacgcgggggaattctagaggcggcggagggtggcgaggagctctcgctttctctcgctccctccctctccgactccgtctctctctctctctctctctctcccctccctctctttccctctgttccattttttccccctctaaatcctccctgccctgcgcgcctggacacagatttaggaagcgaattcgctcacgttttaggacaaggaagagagagaggcacgggagaagagcccagcaagatttggattgaaaccgagacaccctccggaggctcggagcanaggaaggaggaggagggcggcgaacggaagcca

SEQ ID NO: 1606 - DNA, 357 bp, Homo sapiens
gccggggacctcccagtctgcggccatgaacgcgagcagcgagggcgagagcttcgcgggctcggtgcaaattccaggtggcacaacggtgctggtggagctgactcccgacatccatatctgcggcatctgcaagcagcagtttaacaacctggatgcctttgtagctcacaagcaaagtggctgccagctgacaggcacatccgcagcagcccccagcacggtccagtttgtatcggaggaaacagtgcctgccacccagactcagaccaccaccagaaccatcacctcggagacccagacaatcacagatggagcctcactctgttgcagtgggccgagattgtgtcactgcac

SEQ ID NO: 1607 - DNA, 265 bp, Homo sapiens
  misc_feature 22, 46, 52, 138, 155, 157, 163: n = A,T,C or G
cctactggatatgcaggcctgnagctcaggggagagctgggttaanaaccgncaaggcagtaatcatctgcatttagatggcgagtaaagccatgacaggggctgaaatggcccagcaagaataaatcaaaccatganaaacacatacatttaanantttggngatgtggtcaggcgcggttggctcacacctgtaatcccagcctttgggaggccgaggcgggtggatcacttgaggtcagtagttttgagaccagcctgggca

SEQ ID NO: 1608 - DNA, 462 bp, Homo sapiens
  misc_feature 23, 354: n = A,T,C or G
ccgcggtggcggccgcccgggcnggtacaatcacgcagagtcagagcaggagtatgaggaagagcaagaacctcccaaagttgaaagcaaaccaaaggtcccccttaaaagtgccccaccacccatgaacttcactgatttactcaggctggctgagaaaaagcagtttgaaccagtggaaatcaaggtagtgaagaaatcagaagagcgacctatgaccgcagaagaacttagggagcgagaattccttgaacgaaagcataggagaaaaaaacttgagacagatggaaaactacctccaactgtgtccaaaaaggcaccctctcagaaagaaagtgtgggcacaaaacttancaaaggttctggaagacaggcatccttcttccaaaggaatgccccttcctcatgctgagaagaaatcaaggacccagcatggccaatgagaaacacctcgctttgtct

SEQ ID NO: 1609 - DNA, 408 bp, Homo sapiens
  misc_feature 164, 205, 356, 395: n = A,T,C or G
tgtaatgaacaaatatttatttatcttttataacaagtaaggcaatgttgcttaaaggaagacaaacaaacataaaagattccgttgacaatgcattttttcatctgttcggcaatgcttttgtcataatggagatgtgacagcaaactttccaggacattcantcttcggcggcagcacttagggcagatgactggccgctcanattctctatcttgtttcaggacagtggaaaagcttatagatgaggccaaagcaccaggtagggggaaggttcttgtatcggttcgaaccccgacagcgcgccaacagacaacacgaaggcagtggggagcacaatgctgttttaatgagcncctgggtgcaggcgtgctgaggctgaaaatgggcatcancccccgcgtacct

SEQ ID NO: 1610 - DNA, 361 bp, Homo sapiens
  misc_feature 349: n = A,T,C or G
ccgggcaggtacttttttttttttttttttttttttttttgaggaaatatttgcttttaaacatttgattttcatcaatctttggatgatttgactttattgtcaatatctagtaaatttgccaaaatattttttttattccttgctccttttatccaactaaaaactgggcaggtagaattttctgttttcctaaacaggaaggaggcaaagctggtttcaccttgtcgtctaactgtaagcacataaaggaaatattggtcccaaaatattgcttgagcaaagttctataaattcattaagactcaagaaattaattcaagaaactagaaaatgtagtgaaagaaanaaaatagtaatt

SEQ ID NO: 1611 - DNA, 449 bp, Homo sapiens
  misc_feature 135, 158, 165, 170, 177, 186, 187, 197, 207, 209, 222, 231,233, 234, 256, 264, 298, 302, 311, 319, 321, 334, 348, 355,362, 377, 380, 382, 384, 387, 391, 398, 403, 417, 438: n = A,T,C or G
aggtacctgaacaaatcccatcaaggacagattctcagtcttgaagaggcagcacggtaaaggggaaagatcatgagttttggggccaggttcccttggatattgtggggtccccacactctctggatgatgttngataactctttgaggacctttanggcttanacatngtggaanaaaatgggnnaatttctttnattttttttnangtagtttttgttnaattaaaancnnctaaatattgattttttggacntatattantcaaaactcttaaattttcccataacttgggtcnttcnattttgtanaactttcnangactttcaagtcntggttccctcccanacattgnattactntgtaatagtcccctntcncncncanttgnggagggnccttntaaattctaaaggngtttattaccccttggccttnggggaattaac

SEQ ID NO: 1612 - DNA, 222 bp, Homo sapiens
  misc_feature 177, 202: n = A,T,C or G
ccgcggtggcggccgacgtcggatgacatgttaccatgacacaaaacgacaatgaccacggcaccacaccaagaatcatctacctctattacaaccagacatttgcactcaaataaggaggtgctgccgtatacttatccgttgctggaggcagcatgaatgggaaccagacacagnttggaaagcaatcgggtaacagagngccaaccctgtacctgcccg

SEQ ID NO: 1613 - DNA, 480 bp, Homo sapiens
  misc_feature 174, 179, 182, 210, 218, 219, 222, 241, 251, 254, 260, 266,270, 279, 285, 286, 290, 296, 307, 313, 320, 325, 327, 329,335, 346, 356, 365, 373, 381, 385, 396, 402, 413, 431, 436,443, 444, 448, 451, 453, 455, 458, 470: n = A,T,C or G
cgacgtccggatgacatgttaccatgacacaaaacgacaatgaccacggcaccacaccaagaatcatctacctctattacaaccagacatttgcactcaaataaggaggtgctgccgtatacttatccgttgctggaggcagcatgaatgggaaccagacacaagcttggaaangcaanttngggtaacaagaagcgcccaaaccccttnttaccttnnggnccggcttcttaagaaaacntaaggtgggnatncccccncggggncttngcatggganattttnngtantaattnaaaaggccttntattcnggattancccgntncngtaacncttcctgtagngggggtgggnggacccccngggttaancaccccangacntattttttggnttttcnccccttttttnaaggttggaaaggggggntttanaaatttnngccnggncngnccntttggggtccgnttaaaaattc

SEQ ID NO: 1614 - DNA, 447 bp, Homo sapiens
tcctatagggcgaattggagctccccgcggtggcggccgaaaccagcttttaagtgagctcagcatattataaaggaatgaaagcaattagagcgtggactctaaaggtaggtgagacttgctgttccacttagaaacatagaaacataggaaactaaggactcgatggggacatcaatagtaggatggcttttaagagggctgaagtgtgtaaatatacacattaagctttgcagcaactctgtgccaaatcgaagttgttgcaggcctggaattttagtttggtaaaggataactgtagttattttttaaataaaatgattcattagaattctttggttctctcatgataatttagcaagtttgtctctttcagaaagaaaagtttaagtggggttaatggggtaccctcggccgctctaggaactagtgggatcccccggggct

SEQ ID NO: 1615 - DNA, 119 bp, Homo sapiens
  misc_feature 44, 46, 52, 65, 112: n = A,T,C or G
ccgcggtggcggccgaggtacagactggggttgttaacataagntnttcccnattggggtttggncccccttgcagccccttcattggtggggggggttgccctgggttttngtccctc

SEQ ID NO: 1616 - DNA, 371 bp, Homo sapiens
aaacccgcttttaagtgagctcagcatattataaaggaatgaaagcaattagagcgtggactctaaaggtaggtgagacttgctgttccacttagaaacatagaaacataggaaactaaggactcgatggggacatcaatagtaggatggcttttaagagggctgaagtgtgtaaatatacacattaagctttgcagcaactctgtgccaaatcgaagttgttgcagacctggaattttagtttggtaaaggataactgtagttattttttaaataaaatgattcattagaattctttggttctctcatgataatttagcaagtttgtctctttcacaaagaaaagtttaaggggggttaatgggttacct

SEQ ID NO: 1617 - DNA, 336 bp, Homo sapiens
tctgacacagacaataaaaactgcacaagccagaatgcaaaacttcagtgagtggccggaaggaacatttctgcatttgacaagaaacataagcttttttttttctttttttaaatggctggaacaaaaggttaaaaaacagaaaagcaacaagaacaaagcagacccttacatttgacaaagcgcacttcacttggctccatgatctatttcttagaaagactaaacaaaagtcaagtcctacggtgtcgcgaggggtcagagggtttcaccctgtaacgtccggcccttttggtcccccttggggcagcatccctttcccaggtgtgtgctgga

SEQ ID NO: 1618 - DNA, 353 bp, Homo sapiens
ccgcggtggcggccgaggtactagataaaggaaagagcaaaacaaagtgcaggatcgagagaaaatcgattgcttgaaaaactgggtattttacttgctgcaagtcccgactgtgtcagctgatgagtttaacactatgacagcacagtcctcacctgcctgctcgctgctgtaattcccaacacttgttgtgtgccctatagcacctggcacacgggaagcgctcaagagatgtgtgtgaatgaaggagccacatcttgacttgcgacgcggagcagtaagctgcagttatttggtagcggtggaagaataaattctacctcctgcttgcctcgctgcagtgggggatgaag

SEQ ID NO: 1619 - DNA, 546 bp, Homo sapiens
  misc_feature 31, 33, 36, 37, 39, 43, 49, 50, 55, 58, 65, 68, 71, 74, 75,84, 104, 123, 136, 137, 162, 163, 173, 183, 185, 186, 187,189, 190, 195, 197, 201, 202, 214, 230, 235, 276, 314, 315,326, 334, 341, 354, 446: n = A,T,C or G
ccgcggtggcggcccgcccgggcaggtactncntcnncntgantaatgnngcatnatngcacacnaanggnttnnactgagctnaaagatgaaccaaggttgtnatacctgtctaccacagtnaatgatattgccnntgacagcagaaataacataccttgnnaaatccaganataatatctnannnannatacngntgtnnttactaagcatnttgaatttgcgtgatncgctnacatctgatgtggaaatgcgaccatgaaaaagttcatccanccaatcctggatctggtggagctcttggggttggagtnngaacttttaanatgcattnatgttangtaagcaacatangatggtatctggaacttaacaggagtccataattgctgccagaattattagcatagaattcggttttaaacattgactaaattgaatgggcnaggtgggggaggcatggcgccagttaaatagccaggagaggctggactggggacagaaaagtgtgcttgactgcacaagaaatcagagataatggtacct

SEQ ID NO: 1620 - DNA, 354 bp, Homo sapiens
ccgggcaggtacctggggtctcagggttgctctgggcctgatcatccactcagatctgtaaggaggatttgcaggatccatttagaaagatcctcccttacttccacaagcatggcctttggctcttaaatacctgtgctggggttttgtaattatagaaacaacaggaaccaaaactcattaatgttgagctacaaaccagagggaagcttctttctcaaaacagggctcaggcctagaaaaatctagttttctgaaatcgctagccagcaacagcactgagatggccatcccagaaacaaggccaacacagaagcacccataaaggctgctggaggttgggacaaagagatc

SEQ ID NO: 1621 - DNA, 122 bp, Homo sapiens
  misc_feature 67: n = A,T,C or G
ccgggcaggtacataattggagatgaataatgattctcttagataaagaaacttgtccacccacctntaccacaaatgaaaatcctttttcttataggactttttggccaagcaaaggctca

SEQ ID NO: 1622 - DNA, 396 bp, Homo sapiens
  misc_feature 179, 187, 193, 217: n = A,T,C or G
ggagctccccgcggtggcggccgaggtacccattaaccccacttaaacttttctttctgaaagagacaaacttgctaaattatcatgagagaaccaaagaattctaatgaatcattttatttaaaaaataactacagttatcctttaccaaactaaaattccaggtctgcaacaacttncgatttgngcacanagttgctgcaaagcttaatgtgtntatttacacacttcagccctcttaaaagccatcctactattgatgtccccatcgagtccttagtttcctatgtttctatgtttctaagtggaacagcaagtctcacctacctttagagtccacgctctaattgctttcattcctttataatatgctgagctcacttaaaagctggtttt

SEQ ID NO: 1623 - DNA, 191 bp, Homo sapiens
  misc_feature 148, 157: n = A,T,C or G
gccaggtttccttctcagctcaggagagggacttcttcctgcggatcttgggcttcttcaccggtcgcagataagggttatcgatgatgttctcctccccattccggctacccgacaaggaggggttctgctgcaggacagaggtgtnctccttctnggctccagaatcctccatgctgatatgaagagca

SEQ ID NO: 1624 - DNA, 347 bp, Homo sapiens
aggtacccattaaccccacttaaacttttctttctgaaagagacaaacttgctaaattatcatgagagaaccaaagaattctaatgaatcattttatttaaaaaataactacagttatcctttaccaaactaaaattccaggtctgcaacaacttcgatttggcacagagttgctgcaaagcttaatgtgtatatttacacacttcagccctcttaaaagccatcctactattgatgtccccatcgagtccttagtttcctatgtttctatgtttctaagtggaacagcaagtctcacctacctttagagtccacgctctaattgctttcattcctttataatatgc

SEQ ID NO: 1625 - DNA, 387 bp, Homo sapiens
  misc_feature 18, 21, 49, 77, 82, 87, 224: n = A,T,C or G
aacccaattggatttccngcnaaggccgccgcccgggcaggtactggtngtgctatgctggacttttaggcaagaanttttnataanaagaaataaaagattgggaggctgaggcgggtgatcacctgaggctaggagttcaagaccagcctggccaacatagtgaaaccctgtctctactaaaaatacaaaaattagccaggcatgaaggccccgtgcctggnagtcccagctaccttggggaggctgggggccaggaaaaatcccttgaacctggggaggtgggaggttgtggtgaagccaagattgtgccactgcactccagcctgggtgacaagaccaagactccatctcaaaaaaaaaaaaaaaggaaaaagaaaagtacct

SEQ ID NO: 1626 - DNA, 201 bp, Homo sapiens; identical to SEQ ID NO: 1478

SEQ ID NO: 1627 - DNA, 139 bp, Homo sapiens
  misc_feature 1, 16, 76: n = A,T,C or G
naggggccgaattggnagccttccaccggccggggtggggccgggcccgttcatgggttgttggccgcccttggtnaattccccaggcttacccaaaagaaagaattcactgggaaacccgggaaagcagaaggttttc

SEQ ID NO: 1628 - DNA, 371 bp, Homo sapiens
ccgcggtggcggccgcccgggcaggtactaaactaagccgtcaactaccagcaagcagaatgaaaaacagggacagatcagcatccaattagtatgtctaagtttttaaacaggaaaagggttgaggggaatcagtaaaactggaaactcatacttcacattttgcaatctcactgataaaaggaggaaatgtgtgtttatcaaacttgctgtgagtgcacagttcatttggagtcctgtaaacaatcgcctggctgcccactttcaaatgcatgtgaaaatcttggagattcagagcatcatattcagcaagcaaggtcattctagtgatgcccttaacaagtttcaaaagctcatagagatcttcaacc

SEQ ID NO: 1629 - DNA, 382 bp, Homo sapiens
  misc_feature 43, 45, 51, 55, 129, 144, 161, 167, 191, 214, 226, 240, 246,247, 306, 307, 318, 319, 344, 355, 360, 369, 373, 380: n = A,T,C or G
ctatagggcgaattggagctccccgcggtggcggccgcccggncnggtacncggntatcctgtcttacggtgtttattcgtggttatctattgacagtgaataacttgaacaagtatttcttgaagatntgcattttatttttntaaaaagcatggttccnaccggncgcggtggctcacgcctgtaaatnacccgggcaactttgagaaggcncgaggcgggcantatcacaaggccangagacnngagaccatcctggccaacatggtgaaaccccgtctctactaaaaaatataaaaattagnntgggccgcggnnggctgcatgcctgtacattcccagntccttcggggnaggcntgaaggcangganaaatccnct

SEQ ID NO: 1630 - DNA, 564 bp, Homo sapiens
ccgcggtggcggccgcccgggcaggtacaagatgagacagaattagaggatgaaaatcaagaaggcatgactgtgcacagttctgttcacagcaataacctcaactctatgccagctgctgaaaagggtaaagacacattaaaatcagcttatgatgatacagaaaatgacctaaaaggagcagctattcatatctcaaaaggaatgctccacgaagaaaagcctggagagcagattttggaaggtggctcagagagtgaatctgcacagaaagctgcagggaatcaaatgaatgacagaaagattcaacaggaatccctgggtagtgcaccactcatgggagatgaccaccctaacgcatccagagacagtgtggagggagacgctttggtaaatggggccaaactgcacacgctttcagtggagcatcaacgcgaggaattgaaagaggaattagttcttaaaactcaaaaccaacctagattctcctctccagatgagattgatttgcccagagaactggaagacgaggttcccattctgggaagaaatcttccctggcaa

SEQ ID NO: 1631 - DNA, 454 bp, Homo sapiens
  misc_feature 184, 185, 429: n = A,T,C or G
ccgcggtggcggccgaggtacttagaattttgtggccagatcattttgttggaaaatgggaaaatctgtgaaaatggaactcacagtgagttaatgcagaaaaaggggaaatatgcccaacttatccagaagatgcacaaggaagccacttcggacatgttgcaggacacagcaaagatagccnnagaagccaaaggtagaaaagtcaggcttctggccacctccctggaagagtctctcaaccggaaatgctgtgccgggagcatcagctcacacaggaggaggagatgggaagaaggctccttgagttggagggtctaccaccactacatccaggcagctgggaggttacatggttctctttgcataaatttttcttctttggtggtgcctgaatcgtcttcttaaccgatcttcagctttctggtnggcttgagcctactgggttggaagc

SEQ ID NO: 1632 - DNA, 350 bp, Homo sapiens
attttcttctaacaccgacattgctgcagaagaatctgcggcggtctttagttggatccaagtctcaaatgtgcctggctctcgtccgggatgctcctgaacagctggtcctggaaattgggaacctgtcagctgtctggggaattcagcatctggctgagtcccctctccctcatccccactgcagcgaggcaagcaggaggtagaatttattcttccaccgctaccaaataactgcagcttactgctccgcgtcgcaagtcaagatgtggctccttcattcacacacatctcttgagcgcttcccgtgtgccaggtgctatagggcacacaacagtgtggggattaca

SEQ ID NO: 1633 - DNA, 437 bp, Homo sapiens
ccgcggtggcggccgcccgggcaggtaccatcttttacaaatcatgcttcttcttctgcactcattctactttgatccaactgaaccgttcataggcaggtccgggttttatcatccccatttacacataagaaaactgaggcctggaggctgggcgcagtggctcacgccttgcaatcccaacactttgggaggccaaggagggcggatcataaggtcaggagatcgagaccatcctggctaacatggtgaaaccccatctctactaaaaatacaaaaaattagccgggtgtggtggcgggcgcctgtagtcccagctactcaggaggctgaggcaggagaatagcatgaacctgggaggcggagcttgcagtgagccgagattgcgccactgcactccagcctgggtgacagagcgagactccatcagctgccaa

SEQ ID NO: 1634 - DNA, 319 bp, Homo sapiens
aggtacacatagtgacattgcaaagggagactttggggtcgggcggatatcttaggatcaactctggctaggtcgcagaagacaggacttgttcccacagacaccagaaggtggaagttttgtcttccctgataacttgctcttcggtatcttggtttggttcactgggtgtttaatgagaatgtcttaccaacgtgctatgtcgtcgttcatcctgacaacattaaacatcagtatagaaaatactggaaagaacaaaagaaaaaaagaaccagggaggtgatcttgccacccccaattcttttcagtaacatccttg

SEQ ID NO: 1635 - DNA, 429 bp, Homo sapiens
  misc_feature 3: n = A,T,C or G
ctncttagggcgaattggagctccccgcggtggcggccgaaaccagcttttaagtgagctcagcatattataaaggaatgaaagcaattagagcgtggactctaaaggtaggtgagacttgctgttccacttagaaacatagaaacataggaaactaaggactcgatggggacatcaatagtaggatggcttttaagagggctgaagtgtgtaaatatacacattaagctttgcagcaactctgtgccaaatcgaagttgttgcagacctggaattttagtttggtaaaggataattgtagttattttttaaataaaatgattcattagaattctttggttctctcatgataatttagcaagtttgtctctttcagaaagaaaagtttaagtggggttaatgggtacctcggccgctctagaactagtg

SEQ ID NO: 1636 - DNA, 709 bp, Homo sapiens
  misc_feature 137, 143, 181, 195, 208, 236, 240, 248, 259, 266, 283, 286,289, 293, 316, 323, 324, 329, 347, 349, 351, 356, 360, 362,364, 378, 380, 382, 390, 401, 418, 431, 459, 474, 479, 484,521, 530, 532, 552, 557, 559, 561, 566, 581, 586, 598: n = A,T,C or G
  misc_feature 603, 604, 605, 610, 646, 647, 657, 673, 688, 708: n = A,T,C or G
cggcggccgcccgggcaggtactcttcaaattggtaaattttatttgtctagtaaattatatctctgtaagtcctattttaaaataaactgtaaagaaacctattaagttggtaacagcgattagcttttgaatagngaaatntatggtcgattcttttacttttcttaaacccttctctngcattttttccccnaaattgccaagangaaatggccattttttattttttttcantaangaaccagnaacctttttancaatttncaaccataaaaggtggnggnaanaaancaacccaaaattttttcccccanaattggnnataanaaaatccaaaaaattaangncnccttntggngntnaatttttttccttnangngggaatanttccccaaaancctttttaacccaaaangggggggtaattnggtttgggaaaaggggggaacccccttncttttttcaaatggnggaangtaanaacccttggcccataaaacctccaaccttttgggctnttccaaaantnggtaataaaaattaaaaaanaaagntnanggggnaattaaccaaaatanccaantataattcatgntagannntaaancaatttttccccaaaagggcctttccaaattggggnnggttttatgnggaaaaaggtaaaaanttccaaaattaattnctggttgggaaaaaaaaatng

SEQ ID NO: 1637 - DNA, 296 bp, Homo sapiens
  misc_feature 143, 272: n = A,T,C or G
ccgcggtggcggccgaggtacgcgggggagccagcgatgggtccccttgcctttgttgttgttgttgtttttgtttcttgttttggtgactgagtgaagggacttgaccctggttctcccagcttgagcaggagcgtcactgnggtgatcagggaagctgcctggaccagcttggcctggggcagccaccaccccattctctcgcccctcttgagaatccagcctgtggacccaggtgtgtcagcctgcagtcaagaccacagttctgactngggctggttgcttgggggtggcag

SEQ ID NO: 1638 - DNA, 188 bp, Homo sapiens
ctatagggcgaattggagctccccgcggtggcggccgcccgggcaggtacgcggggatatagacagagttgagatcaggaaatagctgtttggtgtttcttggggttgtcttcttacagttcaggagacccttcctaaagccggtcttttctcacttccagtcattcctgtattccatcaaccacaca

SEQ ID NO: 1639 - DNA, 290 bp, Homo sapiens
  misc_feature 269: n = A,T,C or G
ccgggcaggtaccagcagggcagggacagagttgggagtctacagccgtccttgaatttgtcctcctagcgatgaggaggtttccttgatgaaagccactctatgactctggcgggtgagcatagtcacctgctcgcctgcagatgggtctctgggaagccgctgaagcctggagaagtccacagcccatgccttctggagacccagagctgagtggggaggacaggacgagatatgccacactcaagttgccaaggaatagctaaganagcacttgtatgggggagtga

SEQ ID NO: 1640 - DNA, 353 bp, Homo sapiens
ccgggcaggtacaatcacgcagagtcagagcaggagtatgaggaagagcaagaacctcccaaagttgaaagcaaaccaaaggtcccccttaaaagtgccccaccacccatgaacttcactgatttactcaggctggctgagaaaaagcagtttgaaccagtggaaatcaaggtagtgaagaaatcagaagagcgacctatgaccgcagaagaacttagggagcgagaattccttgaacgaaagcataggagaaaaaaacttgagacagatggaaaactacctccaactgtgtccaaaaaggcaccctctcagaaagaaagtgtgggcacaaaacttagcaaaggttctggaga

SEQ ID NO: 1641 - DNA, 351 bp, Homo sapiens
aggtacttcggggaaagattgcatttgaacagaggagtgtctagaaacagacatctgttgttttggcagcagcattcatttcctgtctttgataaccagatccaggggcctccagggaaactaactcctccctaggctccagggaggcagtgcctcaagcctcacaccccgctggcaacagaaaccgcttgatggatgtgtgcacgacccctaagaactaatgagctacatcgagtcttcagcaaagacttccaggacaaagatgacaagcttctccacctatacttggggaaagagaatcaggctagcacccactttacagccacaaggagagaagttttgagaactcag

SEQ ID NO: 1642 - DNA, 450 bp, Homo sapiens
  misc_feature 307: n = A,T,C or G
atacttagggcgaattggagctccccgcggtggcggccgaggtacagggctgggtcctggggacaaagcagtgggcaaggcagagtgccatgttatagctggcgcaacagccaagggcagcagatgactgggagaacaaggtgatttcagagagtggtctatgctaggaagaaaaaacaggtttgtccttaggagtgaggggttacttttagatagggttgaccagtgagggcttcttggagacggtggcgtttgaactgagaccttaatgccaagaaacaacccccatagcaagacctgggcacanagggacctacaaaggcaacggcccagtgccagggactgagcttgggagctgaggaaataaaagccagcccttccccagctgtccattgcttgatctcatgcttttttctctccacttgagccagccttgaagatagctttcgc

SEQ ID NO: 1643 - DNA, 669 bp, Homo sapiens
  misc_feature 22, 25, 26, 34, 45, 47, 50, 51, 86, 94, 96, 113, 115, 126,137, 147, 157, 162, 220, 225, 231, 263, 266, 274, 310, 333,364, 388, 397, 406, 407, 433, 439, 440, 448, 449, 458, 475,476, 477, 480, 487, 490, 534, 542, 549, 565, 571, 596: n = A,T,C or G
  misc_feature 600, 634: n = A,T,C or G
attagggagctccaccgcgcgnagnncagagctncaagaatatcntngtnntcaagtggaatggaacttcaaggggggggctaccnccttccantnttggaaaccgtgtggtnanttctaagggtnggttttttggnaaacttttangaaaaaaccngggtnccttttttggtttggccctcttcacaatgggaacttttaaggttatttcccttttttnaagcntttcangtcaacttttttgcctttttctttaattgggnttngcccccgnaatttaaaaaggcttgttgggccatgggccaagggnaaaccccaagctggaatttgttnatttgaaaagccccccaatcctttaccaggnccaagggggaaaatcccttttttntttggaagnacccggggnnggggccaaaggcaacccaattcccanattaanncccttggnnccccccccngccggttaaccccttcnnngcnccggaanggntaaccaatttttttttggggggttttaaccccgaaagaaaggcntttttttngccttgnggggggaaaagaaccngggcanaaaaaccaaaaaagccttggaattngganattggccccccttaaaaaaagggggaaactttcnccggtaacccctttcctttgccaaccttgggggaa

SEQ ID NO: 1644 - DNA, 533 bp, Homo sapiens
  misc_feature 186: n = A,T,C or G
acttagggcgaattggagctccccgcggtggcggccgaggtcaacaccgtgcccagctaattttttctattttttgcagagatgaggcctcaccatgtctgcctcagcctcccaaagtgctggaatcacaggcatgaaccaccacacccagccctactgtattttagaacttctgttcttgaaaanaaagtcaagttccctgtaagtgcataatatattctcattttcaatgagaacagaagatggtttgtaaaagctatttttaagtgtccctatttgcccagtaattcctcttctagaaatctatgagaataattcaaaatatagcccaaaacacaaaggcattaagtgttcagcaaaacactgagaatctaaataaccaatataaagagattggttaggccgtgcagcgtgctcacgcctgtaatcccggcactttaggaggccgaggcgggcagattacctgaggtcaggagcttgagaccagtctggccaacatggtgaaaccccgtctctagtaaaaatcaaaaatt

SEQ ID NO: 1645 - DNA, 349 bp, Homo sapiens
aggtacatagtgtttataatattgtaataatatattttacctgtggtatgtgggcatgtttactgccactggcctagaggagacacggacctggagaccgttttaatgggggtttttgcctctgtgcctgttcaagagacttgcagggctaggtagagggcctttgggatgttaaggtgactgcagctgatgccaagatggactctgcaatgggcatacctgggggctcgttccctgtccccagaggaagccccctctccttctccatgggcatgactctccttcgaggccaccacgtttatctcacaatgatgtgttttgcttgactttccctttgcgctgtctcgtg

SEQ ID NO: 1646 - DNA, 348 bp, Homo sapiens
ccgggcaggtacaggagtctggagttggcacccgtaatctacagagggaggcccatcaggacttcggtcttgatctcagtgggctccatcctcgtccctaaccagcctcatataggcagcagggctgcagtggcagtgatgtttatggaaggacccattattcccaaacacatctttggggaattaccttaccgttagagaaatgggacttctaggtgtctggaattggaacatggggaatttgagagcatagacgatctctgcctctgacctcccccttttctggggaaatgtgttcttggtcctcagcctgctggtgcagcccctcccaggaatccctgccagtgt

SEQ ID NO: 1647 - DNA, 344 bp, Homo sapiens
  misc_feature 259, 316: n = A,T,C or G
ccgcggtggcggccgaggtacgcgggggcccctttctgtgaccgagttcacactcagaacacacgtgttgaaatcgggaaaaaaacggagacctgttgtatcttgcaaggaaaacgttccttacaggtatatttacagaggactgtgtcgcactcaggcagaaatgacctcaacaagacagcctcgtggaaggaagaacacttacctacttaactcccctccccgccccggactgcctagtctagcctagccgtctatnacaaccccagtggactgacattccatcttggaatttatggaggtgacaaaagtgtcntttgagatggaccaaacccagccctttc

SEQ ID NO: 1648 - DNA, 417 bp, Homo sapiens
  misc_feature 208, 210, 214, 241, 245, 406: n = A,T,C or G
actacttagggcgaattggagctccccgcggtggcggccgaggtactatgataaaggaaagagcaaaacaaagtgcaggatcgagagaaaatcgattgcttgaaaaactgggtattttacttgctgcaagtcccgactgtgtcagctgatgagtttaacactatgacagcacagtcctcacctgcctgctcgctgctgtaatcccccncncttnttgtgtgcccctattagcacctggccncacngggaagcgctcaagagatgtgtgtgaatgaaggagccacatcttgacttgcgacgcggagcagtaagctgcagttatttggtagcggtggaagaataaattctacctcctgcttgcctcgctgcagtgggggatgaggggagtagggggacttcagccagnatgcctgaatt

SEQ ID NO: 1649 - DNA, 254 bp, Homo sapiens
  misc_feature 223: n = A,T,C or G
cgaggtacttttttttttttttttttttttggagactgagtctcactccagcctgggtgacagagcaagaccctgtctcaaaaaaaaaaaaaaaaaaaaaaaaaatggaagttgtggtcacaatgcccaggcttctttgttatagtggcacgctgggttacttgccacacacagatcactcctcccagggctgctggcacacactgattgtggggagttcaanaggccttttccccttgagggtgtggctgtcc

SEQ ID NO: 1650 - DNA, 216 bp, Homo sapiens
ccgcggtggcggccgacgtcggatgacatgttaccatgacacaaaacgacaatgaccacggcaccacaccaagaatcatctacctctattacaaccagacatttgcactcaaataaggaggtgctgccgtatacttatccgttgctggaggcagcatgaatgggaaccagacacagctggaaagcaatcgggtaacagagcgccaaccctgtacct

SEQ ID NO: 1651 - DNA, 356 bp, Homo sapiens
ccgcggtggcggccgtttgctcaacaattatccaatgtctactttacaatactttcgctgttctgttttaagctttttgtgaaaatcagccttgccatcctcagtcatttctacatagtgaaaggcaaccgcaaggaagcggcaaggatagcagctgaattttatggagtaacccaaggacaaggttcctgggcagatcgatcaccactacatgaagcagcaagtcaaggtcgccttcttgctctgagaacattattatcacagggttataatgtaaatgcagtaaccttagaccatgtcaccccattgcacgaagcctgccttggagatcacgtggcatgtgccagaactctgct

SEQ ID NO: 1652 - DNA, 384 bp, Homo sapiens
  misc_feature 191: n = A,T,C or G
ccgcggtggcggccgcccgggcaggtacaaaaacatcatggaccctgtaggagcatctctctgatggcccgatgagcttctcctcttttctaatccagcatctcttagatttgtaaaggaagccagtgtctgcagagctgaatatgcaatgtcacagcagaggtctaatggacccaccacctaacacactnctgccttttttccgtggcacttctgtctcactttgaataaactgcctcaaaactgaaacccggaaaaacctgacaacactgtatatacaactggcctggtaggttacaaaagaagttcacaacagaggcaacctggtgccacggaggtctggatgctgatcgagagcaagcagaggcgtgccgcgggggagga

SEQ ID NO: 1653 - DNA, 174 bp, Homo sapiens
  misc_feature 136, 146: n = A,T,C or G
gcgaattggagctccccgcggtggcggccgcccgggcagatacaaaataatcttttgtttttgttcccttcaagattctcttttactctttttgttccttatgccatcactccaccacaaccatactacagacttngcaactgctntctcatcctttgaaacacctaaacttca

SEQ ID NO: 1654 - DNA, 354 bp, Homo sapiens
aggtactgttgttgactcgcataatgcgagagatgttgcggaaacgagccaaggagccgtaggatcccagcatgtctgcggcaatcaccactccgccctcgaacttaacgccgaggactgaggtcccggtcaccatggggttctgggtccgcgtgattggacctctgtaaagtgcagacgccggatccatgaaggaatcgggagtggatggaatgcggtaaaactgtcctggggccggaccccccgcccaaagtccggaccgcgaccccaaaaaacgctttccatcttagtcacggtagcagaaaaaaaaaaaaaaaaaaaagaaaagtaccttgccccgggcgggccgctcta

SEQ ID NO: 1655 - DNA, 346 bp, Homo sapiens
  misc_feature 22, 108, 113, 121, 135, 174, 182, 201, 211, 212, 237, 247,259, 283, 285, 286, 288, 297, 311, 313, 323, 324, 331, 337: n = A,T,C or G
acgaagcataacaaaaaatcgnaccgctcaaagttcagaaggtgggccgaaaaacccccgaacagggacctattaaaagaatacccagggccgtttttccccccttgnaaagnctccctcngtggcgcctactcncttgtttccggaccccttgcccgctttacccggtatacnctggtccngcccttttctttccttttnggggaaaagnngtgggccgcctttttcttcattagncttcaccgcnttgttaagggtnattctacaagtttccggggtggtnanngntccgttttncggcttctcaaaancntgggggcctnntggttgncaaccnaaaaccccc

SEQ ID NO: 1656 - DNA, 419 bp, Homo sapiens
  misc_feature 374, 390, 400, 407: n = A,T,C or G
ctaagatgtatgagcacataaacttcttcccctacctaatgttaaatcttttctatggtggctgtgctcagaagctacctgctcctgcctatccccaaagccctgcttcaccaaaaagagaaataccagattagctacctgcaccatcccagcaacctgtcccttctcccctcactcctcaccccttttcccagaccctggtctctcttttcagcacccaggagaccagtgtccctgggccatttctgcctgtcttccaggacagtagtcctggcagaggcagaagaagggtcagatggcagagctgctgggctgggctcccacaagctgtgtcctagttttccagggtaagctgtcaagagttgcctcattgnagtccccatttccctntccctaaatnccttttntgagtctgaaga

SEQ ID NO: 1657 - DNA, 367 bp, Homo sapiens
  misc_feature 47, 187: n = A,T,C or G
ccgcggtggcggctgaggtactttttttttttttttttttttttggnatttttagtagagacggggtttcactgtgttaaccaggatggtctcgatctcctgacctcgtgatccgcccgcctcggcctcccaaagtgctgggactacaggcgtgagccaccacgcccggcccaaaagcatttactgntaaggctgcctcatttttcagctttgttgtagttgagattctgatgttcacctaacaaagtccctgacaaaacagacttccttcaatccaggtcataatttgaaacgttatacaataatgagatttaagtgatgaatggaaagaaaagaaggagactgaaaagatatcagaaatttctat

SEQ ID NO: 1658 - DNA, 387 bp, Homo sapiens
  misc_feature 207, 241, 320: n = A,T,C or G
acttagggcgaattggagctccccgcggtggcggccgcccgggcaggtactttttttttttttttttttttttttttttggtagagatgggacttcctacgttgctcaggctcgtcttgaactcctgagttcaagtgatccacccaccttggcctttcaaagtgctgagattacaggtgtgagccaccacacctggccaaaataatnaaaattttaaatcagttaaaaaaaaaaaaaaaangaaaagtgtaaatgtgttcatccaacaaagcctttctttcacacatatgaaatataaatagatccatttaaatacgatntccagttgaaccagccctgaagggctttctgaattggacatggttctgtcgctaccagtgggggcct

SEQ ID NO: 1659 - DNA, 240 bp, Homo sapiens
  misc_feature 4, 86: n = A,T,C or G
cttnttagggcgaattggagctccccgcggtggcggccgacgtcggatgacatgttaccatgacacaaaacgacaatgaccacggnaccacaccaaggatcatctacctctattacaaccagacatttgcactcaaataaggaggtgctgccgtatacttatccgttgctggaggcagcatgaatgggaaccagacacagctggaaagcaatcgggtaacagagcgccaaccctgcacct

SEQ ID NO: 1660 - DNA, 772 bp, Homo sapiens
  misc_feature 72, 89, 95, 105, 142, 156, 158, 162, 164, 166, 168, 172,180, 183, 187, 191, 207, 209, 213, 219, 225, 229, 234, 236,238, 241, 257, 282, 287, 288, 294, 337, 343, 350, 355, 357,398, 407, 419, 434, 438, 440, 449, 461, 465, 469, 472: n = A,T,C or G
  misc_feature 474, 481, 493, 496, 505, 506, 511, 518, 519, 534, 549, 551,561, 564, 582, 597, 599, 600, 606, 621, 622, 632, 641, 671,674, 675, 676, 683, 709, 716, 717, 723, 726, 731, 772: n = A,T,C or G
aggtacgggttgcccctggcttggcactgcaaggacgtggtctcggtgtttaattcttttttccaatttttncaaagggtggtcctggngtgggngtccattggntggggtccttcggggttccataatttttttggggggnaccccaattcttgntngggnanancnccancccaaatnggntggntggnaattccaaggaaccancnctcnaaatcnatccanctcnccggnangnggnccaacccaaggttggnggttttggtcccaagtaaaaggggnaaagnnccgggnttccttaaaaatttctttttttccccaaagggggggcccaaangggggnggttttnggggnanagggggggaattttaaaaaaagggggtccaaggggggttgnaaccccggnaacctttcaacnaaccaaggggaaacnttcngnccaaggccntggggggaaccngccnttanccntnggttttnccccttggggtnggnccaaaaagnnaaaancccttcnngtctcccggttttcnccaacccccctttcntnaaggaaaggnttngggggcccaacccttggncccaatgggaaaaangnnaaaaangggcctttggcccgnntttctcccgngtttcccgnttcccaaaccctttccctttccgggggggnttnnngggcccnaattttttttaaaaagtcctttgggnaaaaaanntttttnggnaaagncccctttgggggggcctttggggcccccccccccggggggn

SEQ ID NO: 1661 - DNA, 468 bp, Homo sapiens
  misc_feature 1, 344: n = A,T,C or G
ncaccggggtggcggccgcccgggcaggtacaatagcgtgatctcggctcactgcaacctccacctcctgggttcaagcagttctcctgcctcagcctcctgagtagctgggactacaggcacatgccatcacgcctggctaatttttgtatttttactagagacggggtttcaccatgttggccagactgggtctcaagctcctgacctcaggtaatctgcccgcctcggcctcctaaagtgccgggattacaggcgtgagcacgctgcacggcctaaccaatctctttatattggttatttagattctcagtgtttttgctgaacacttaaatgccttttgngtttttgggctatattttgaattattctcatagatttctagaaagaggaattactgggcaaataggggcacttaaaaatagcttttaccaaaccatcttctgttctcattgaaaaatgaagaaa

SEQ ID NO: 1662 - DNA, 294 bp, Homo sapiens
  misc_feature 241: n = A,T,C or G
cacttttctgtccccattccagcctctcctggccatttaactggcgccatgcctcccccacctcgcccattcaatttagtcaatgtttaaaaccgaattctatgctaataatttttgacagcaaattatggactcctgttaagttccagataccatcctatgttgcttacctaacattaatgcattttaaaagttctaactccaaccccaaagctccccagatccaggggctgcttgggantgaccaattttcatggtccatttcccactcagctgtcaggccatcacccaaaa

SEQ ID NO: 1663 - DNA, 442 bp, Homo sapiens
  misc_feature 25, 26, 45, 46, 56: n = A,T,C or G
ccggcggccgaggtacgcggggagnncaaagacagttgcttacannatgcagagcntttctactgtagagctgggaagcagaaggatttggagtttctttttaaagtgattccttccttttccctttcatttttccactgtgggtgttattatcctgacaatttgtcatacatttcctgtctttaaaaaataactgtatactaagcaaaactcaggtcttaaaaataaatatgaatttagattccatacatcgattaattgaggaaacacagatcttccagatgcaacaatcatcaattaagtcacgcggcgacatggtggcccctgcctcaccccccaaggatacctgtaatacctgcttcccacttcatgggctacaatctcatgctgctcacaatttctgtgctcactcatataacaccaacaaatgggatatttgtga

SEQ ID NO: 1664 - DNA, 275 bp, Homo sapiens
  misc_feature 5, 9, 17, 23, 63, 67, 85, 117, 140, 146, 215: n = A,T,C or G
gcggnggcngccgaggnacaaanaaagcaaaaagttggaatcatgatcttaatattggacaanttanaatacaagccaaaaagcnataaccgttagataaagaagaattcttcatantgataaaatagaaacattcatanaatatnaaattacaggagaaacggacagtcacttaaagtttaaaactttaagacaaactttaattgacctatttnagtccacaaaaagccaagaagtatctgaaatggtgggataaatcttcttgtccttaaact

SEQ ID NO: 1665 - DNA, 311 bp, Homo sapiens
  misc_feature 240: n = A,T,C or G
aggtacgcggggttggtattaaaatgttctttcagttagggccaaagggcatttaacttcaaggtaagacccattccaggacggcagagatcatgtctgtcttgcgtatccctgtgtgaattttgcctgacatgttgcaaacactccgtatggaagtcttgagggtcttctgccccagtcagaaaacctctgggagaacagttatccccagacctcagacgctcgacggatacatgagangctttctttgatggattcgatgtcaggatctccatgtgaacttccacttagaggtgtcatgctatggggcc

SEQ ID NO: 1666 - DNA, 458 bp, Homo sapiens
  misc_feature 184, 367, 387: n = A,T,C or G
ggcgaattggagctccccgcggtggcggccgaggtacaagagaaattaagataaatctgtcatcatgttgggcaatttcaacaccctttctcaagtggtaagtcaagcagcacaaaaactcagcaaggtcaagatttgaataatgttaacagtagagctttatctactgaataaatgtaaaatnccccatccaataattagtccactttcttccaaaatgcatgtggaagatgcataaacttgattatgcactaagcaagtgttaacaattttcaaaaactatgcattgtaaaaattacattatctaaccacaatgcaattaagtcaggtgtctataataaaaaggattaaaagacaaaaacacacnccacttccaaatactgtatngaaaacacactttcaatgatgaaaattataatggaaattaaagacactctgataatgaaaacatgatgaat

SEQ ID NO: 1667 - DNA, 639 bp, Homo sapiens
atagggcgaattggagctccccgcggtggcggccgcccgggcaggtaccagcacttttcaaacctacttatatatacaattcaccaggaatcttgttaaattcaaattctgggttgggggttgggggaagcaagagtctgcatttctaacaacctcatctgtgacgcagatgctgacagtcagcagctcactcttttaagtagcaaagttctagtccgccctagaaaatgatggaaagtggtagcaaccctcagaagaaagcagaatttatcctcagacaattaggctaatgaggaatctagagattatcaactactggtttagaaacaactgcttcttttatgatttcattatttttttatttttaaagaagaaagtcaacgaaatcacctgatctcaggttttgctagtcaatatattaatactattaacttgaaactgtaatacatatcccccaatatggcctttcccacatcaagaaactatttattaatacaaatacccccaaatatctccagtatagattcaatctgaacatacactcttaaaatattcgtcagtatatttgggcttcttcctatatggaaagaaattagggggttaagttagaaatccagtcctcggccggtctagaactag

SEQ ID NO: 1668 - DNA, 771 bp, Homo sapiens
  misc_feature 13, 70, 86, 88, 90, 112, 115, 130, 142, 158, 171, 173, 176,187, 197, 210, 222, 226, 231, 241, 251, 258, 261, 265, 267,268, 275, 278, 280, 284, 299, 311, 328, 340, 356, 397, 446,453, 467, 470, 481, 511, 514, 518, 558, 561, 575, 592: n = A,T,C or G
  misc_feature 597, 621, 625, 629, 658, 664, 676, 682, 685, 735, 740, 742,764: n = A,T,C or G
ccgggcaggtacngaactggaggggcttgtgtggttagcttctggtaattggggctatatttggtgtagngtccgggtttaagttngngnttccgttggtcccctggttggntgntttatttcaaagtanaggggggattanggggtaattcttttgncccttctcttttntnctncttccaagggnccaaggtggnccaaaaaattcanccccccttggtngggnaaaanaaaaccccgnaatttggggnaacccanggnggtnannaaggggnaangnttgntttttatcccaaccnaaaccttgggcntttttaacccccccttnggaaattttttnaaatttccaaaagttngggggttttttttgggttttttttcaattttactttggggnaaaccccaattaaccttaatttcaaaaaaatggggggccggaaaccaanggaaacntggtttttctccgnctnccccccaaccnccccccccgggttgggaaaaaggtttaaanttnccantttgggcccaaccccccgggttgggttgggaaaaattaanggnttaaattccaaaangggcccaaggggggaanttttngggccttttttttcccaaattttngggntaanttggggggaaagggcccaaattgggtaancccccnaaggttccgggnttgggnttnggggaaaccctttccaaatttttttccttggggaaaccaaatttttttcnaaaangnaaaatttccccctttaaaaaangaaaaaa

SEQ ID NO: 1669 - DNA, 398 bp, Homo sapiens
  misc_feature 14, 26, 28, 30, 35, 37, 40, 43, 45, 56, 66, 67, 68, 88, 90,92, 98, 99, 103, 107, 109, 127, 129, 134, 142, 167, 168,201, 203, 214, 216, 217, 236, 241, 248, 257, 287, 291, 311,315, 329, 331, 352, 374, 378, 385: n = A,T,C or G
ccgcccgggcaggnactttttttaangnantttancnaanaangnttttaaccaancgcaggggannnaacgagggggggaggggggncncngaaggnnggangcananccggaagcggggaaggcncnggaanaaaacccnccccgccggggggggccaaaaccannaccgaccaccccgggcagaacaccacacggcgnanaaaaggccccnannaccccaccccggcggggancgcgncaccaancacccgccnggccgggagggggaaaacaacggggcgccnaaangccgggcagaaaggggaaangacncaccgcgcaacganangcgaagggcccaccacccggngaaaagcgaagggcccacccanggcnccaaaanggggcccggaaaa

SEQ ID NO: 1670 - DNA, 450 bp, Homo sapiens
  misc_feature 25: n = A,T,C or G
actacttagggcgaattggagctcnccgcggtggcggccgcccgggcaggtacaataataaaactaagcttatgcctaaaatattctcactgagtgtctgtgaatccacgactattagcactgtggagcaatttctccttgcagaagagtgctaactctatccattaaagccttggaaattgctggtaaatatgtaaaaaatcaagtgcttaaatgggatagcaattattggcaggacctaaacttgatacaaaagtgttccactgtctcaatatcaaaagcccaagaatgccagattcccaaagtgagtcaaagtgcttggattgctttgcataaacatggttagccagaaatcaacaccctgggattggagcttgaggtggaatttccaaatcctgcaaatgttattggctacagccccccagcaccccaatgctggacagcctaacg

SEQ ID NO: 1671 - DNA, 269 bp, Homo sapiens
  misc_feature 50, 55, 57, 59, 62, 64, 68: n = A,T,C or G
ttagggcgaattggagctccccgcggtggcggccgaggtacagatggggnttcancnangtngnccangcctggtcttgatctcctgacctcagatgatccacccgcctcagcctctcaaagtgttgagattacaggcttgagccattgcgccagccctacctttgttttcttaatagtaggaaaaatatgcctttatttctgttatgatttttcagagaggtagagataatagatgcaaactcttggaaggaaagctgtacctgcccg

SEQ ID NO: 1672 - DNA, 453 bp, Homo sapiens
  misc_feature 183: n = A,T,C or G
ccgcggtggcggccgcccgggcaggtacccttttgcacgcaccacccatctctgaatgaagaaccaaagattgtcagagttttgatgtcccaccaggcgaagagcaacacttttcactgacaatcaggacagagcagatggatatagaataacaatctggaatccaaggactgagatgcattngccagcaagacaagttaccgtcaaaataacaactgaaaagagaagctagggtagacctattaaaagagagagccagcaaacaggaccaaaatgctggatgaggagtctaaaaagaacagaagaaacaaaaaagatcaggagttactaaaatttgactgtcagttttacaatggagacagacaatttaaagaaggaagcagtttttctgagtgtggcattacttgtgcacgttgagtgtcatatatatagagagagagaaagagagagagt

SEQ ID NO: 1673 - DNA, 550 bp, Homo sapiens
  misc_feature 550: n = A,T,C or G
ccgcggtggcggccgaggtacacatagtgacattgcaaagggagactttggggtcgggcggatatcttaggatcaactctggctaggtcgcagaagacaggacttgttcccacagacaccagaaggtggaagttttgtcttcctgataacttgctcttcggtatcttggtttggttcactgggtgtttaatgagaatgtcttaccaacgtgctatgtcgtcgttcatcctgacaacattaaacatcagtatagaaaatactggaaagaacaaaagaaaaaaagaaccagggaggtgatcttgccacccccaattcttttcagtaacatccttgttagcacatcttcccttggcgattgtaaactccaaactgaattcttaggttgttggcagcctggtaaagtggaaagagcagtggcctggaagtcaggaaccttgcatccagtcttagctcttcagaggagctgtgcatgatcaattttcaggacctcagttttcttgtcgtaaaccagatcttatggttcatggtttaataccacagtacctgcccn

SEQ ID NO: 1674 - DNA, 402 bp, Homo sapiens
atagggcgaattggagctccccgcggtggcggccgcccgggcaggtacaatcatttgaataaataatgctcagtcatctgactgcaagtcttcattacacatgagctatagaaaatagtcactgacagatcaagtttagtagcttcaaaacaaattacgcagaacgatttctatagaatccttcaagtggtttcttcagaggtgatctgaatttcatcttaccgggcattgcacaattttcctttttcatttaagtgggcatttctcttgggtcaatattcactttatgtctttctaattcagcaaataaaggctcagatccaaaatggctttgctgtttgtctagcatgttaacagagcaataattacccgcgtacgcgggcattgatttcttcctggggg

SEQ ID NO: 1675 - DNA, 641 bp, Homo sapiens
  misc_feature 552, 617, 627: n = A,T,C or G
ccgcggtggcggcccgcccgggcaggtacaaattcgtggccagtggagagcccggcctggcagcacccctcaggcttcgccgctgccttgtgtgcatcccaagcaatctttgtcagcatccccatggccacaaaacttccagcaactacatatttgagtggtggattttgtaaaccaagaccagagccttccgtttaccattatggactttatcttgtaatatgggctgattcattcagacttttagagatcttctggggttttgattttgcccttcaatgtattagtattccactcattctctgtgtcaccttctttttctttttgaaaattaagaattacgtatttcccatctctgtggctcggttatttttcataattcctagagatcatccaaaagatttcccaatcacctccacaaattctttccattttctttactatgaaaatattctcataccatctcctcataggtttgatttgttctttttgatttgaaaaatgttagttctgaaggccgagaagttcaacatcaaggtgccaccggattcngtgcctggtgagggccctctgcttcatacagggcaccttcttgctgcattctcacatggtggaanggaggaaaanggcccccgcgtacc

SEQ ID NO: 1676 - DNA, 671 bp, Homo sapiens
  misc_feature 267, 282, 396, 514, 579, 588, 612, 633, 639, 646, 651: n = A,T,C or G
gggcgaattggagctccacccgcggtgggcggccgcccgggcaggtacaaaataaccttttgtttttgttcccttcaagattctcttttactctttttgttccttatgccatcactccaccacaaccatactacagacttcgcaactgctgtctcagcctttgaaacacctaaacttcaacatgctgagattaccgcctattacgctaatgaatttctacaggaacgaacaaacgaaaaggaagtaatgcaccacctcctgtttctnagccatcaccacctnccaggtgcttcccagagcagttccctgctgccacggggctcctgcaggagctcctccctgctaggcatgtcctcaacccctaagtcatcaagtctagctcagcctctgcatttnagctcaaccgtctaatttcccaagcgtagattccaggcaagccgccctgtttcatgtcctcttaacatcctctgcttttctatctcatcttccttcttgacaagttcaaagtcatgangactggatagaagctccatcaaagcagggaatgttgattttatacactggagctgagtgggcagnctggcacanaacaagtggccaggaaggattacngaatgcatgaaccttaatttnctattnctttatncctgngatttactgtccctgggccg

SEQ ID NO: 1677 - DNA, 385 bp, Homo sapiens
ccgcggtggcggccgaggtacccattaaccccacttaaacttttctttctgaaagagacaaacttgctaaattatcatgagagaaccaaagaattctaatgaatcattttatttaaaaaataactacagttatcctttaccaaactaaaattccaggtctgcaacaacttcgatttggcacagagttgctgcaaagcttaatgtgtatatttacacacttcagccctcttaaaagccatcctactattgatgtccccatcgagtccttagtttcctatgtttctatgtttctaagtggaacagcaagtctcacctacctttagagtccacgctctaattgctttcattcctttataatatgctgagctcacttaaaagctggttt

SEQ ID NO: 1678 - DNA, 369 bp, Homo sapiens
  misc_feature 334: n = A,T,C or G
agcttttaagtgagctcagcatattataaaggaatgaaagcaattagagcgtggactctaaaggtaggtgagacttgctgttccacttagaaacatagaaacataggaaactaaggactcgatggggacatcaatagtaggatggcttttaagagggctgaagtgtgtaaatatacacattaagctttgcagcaactctgtgccaaatcgaagttgttgcagacctggaattttagtttggtaaaggataactgtagttattttttaaataaaatgattcattagaattctttggttctctcatgataatttagcaaggtttgtctctttcaanaaagaaaagtttaaagtggggttaatgggtaccct

SEQ ID NO: 1679 - DNA, 203 bp, Homo sapiens
cgaggtacagggttggcgctctgttacccgattgctttccagctgtgtctggttcccattcatgctgcctccagcaacggataagtatacggcagcacctccttatttgagtgcaaatgtctggttgtaatagaggtagatgattcttggtgtggtgccgtggtcattgtcgttttgtgtcatggtaacatgtcatccgacgt

SEQ ID NO: 1680 - DNA, 468 bp, Homo sapiens
ggcaggtacagggtcggcgctctgttacccgattgctttccagctgtgtctggttcccattcatgctgcctccagcaacggataagtatacggcagcacctccttatttgagtgcaaatgtctggttgtaatagaggtagatgattcttggtgtggtgccgtggtcattgtccgtttttgtgtcatggtaacatgtcatccgacgtcggcccgtccacaaatgtctgcagctacgatggaccctcagctgctggacaggaaagaggatcaagctaagaaggcccagagtgtgcaagcagagagagggtgtggacagaaaaccttgccttctccagggctagtggcgaaagctatctcaggctggctcaagtggagagaaaaaagcattgagatcaagcaatggacaagctggggaagggctggcttttatttcctcagctcccaagctcagtccctggcactgggccg

SEQ ID NO: 1681 - DNA, 377 bp, Homo sapiens
ctatagggcgaattggagctccccgcggtggcggccgaggtactagataaaggaaagagcaaaacaaagtgcaggatcgagagaaaatcgattgcttgaaaaactgggtattttacttgctgcaagtcccgactgtgtcagctgatgagtttaacactatgacagcacagtcctcacctgcctgctcgctgctgtaatccccacactgttgtgtgccctatagcacctggcacacgggaagcgctcaagagatgtgtgtgaatgaaggagccacatcttgacttgcgacgcggagcagtaagctgcagttatttggtagcggtggaagaataaattctacctcctgcttgcctcgctgcagtggggatgagggggga

SEQ ID NO: 1682 - DNA, 211 bp, Homo sapiens
  misc_feature 114: n = A,T,C or G
tgaccctctcctgtttcctgagtttgagccgatcctatttggcacttgcagacagtgagaagtggatgtttgaggacaagatgggaggtgcaaagtgagagacaagtattggtnccaccttccactatgagactagcagggcccagttctcttagctattgtctctattttgtagattaggaaaatttcaagtttagaagaagttgagtta

SEQ ID NO: 1683 - DNA, 434 bp, Homo sapiens
  misc_feature 210, 222, 353, 367: n = A,T,C or G
ctacttagggcgaattggagctccccgcggtggcggccgaggtactttttttttttttttgagaaggagtctcgctctgtcacccaagctggagtgcagtggcacaatcttggctcactgcaagctctgcctccctcccgggttcacgccattctcctgcctcagcctccggagtagctggaactacaggcgcccgccaccacacccagnttaatttttttngtatttttaagtagaagacgggggtttcactgtgttagccaggatagtctcgatctcctgacctcgtgatccacccgcctctgcctcccaaagtgctggaattacaggcgtgagccaccgcgcccagcctnaagtgtctattttngatgttcattcactttttcattataagggaagtaaattacttagcacaaggagaaaaactttttttt

SEQ ID NO: 1684 - DNA, 501 bp, Homo sapiens
cttagggcgaattggagctccccgcggtggcggccgcggtacgcgggattttgggttatatctctcttactacttatttctcactcgcttcagatgttgggtggggaagaagggtgctatttgttgagccccccgaaagacctcctaatagagggtctccacttctccagagagattgccacccatttcctcacttacttgttgcctcctttgataccttgttgttctataggtcttttcgcctgttggtgttttgaaatgtagagggaaggactttcacttccaagaaagagtagaagacagcatcaccgcaatgcaacgctgcaacaaatagagaaaagacaaacacatcaggaacacattgtgaagatcttagggagctgtggatgcaatgaagcctagataaactgagatatgagagataaagcgataaagaggcagagacccaccaggcattcagtaaaacatctaggagaaactcggctgaggaacaagaatagt

SEQ ID NO: 1685 - DNA, 383 bp, Homo sapiens
  misc_feature 25, 214, 218, 287, 383: n = A,T,C or G
actacttagggcgaattggagctcnccgcggtggcggccgcccgggcaggtacgcgggggcgcgacgttcggttcgctgtgtgtgtcgccggctccttgagggtccatgtgatttttacgccagtgctgctgaactgtgcagggtagggagctggcacagtccgattaattgtccttgggtcgaggtgtctcgtcggaccctttggggcttcantggnagaaattaaggcagagtcactgtaattatttctaataccaattccaaaatagtgactcttggacaatangtgcaattatatggaattatggctggttataagcctgtagctattcagacatatcctatacttggtgaaaaaatcacccaagatacactgtacctn

SEQ ID NO: 1686 - DNA, 345 bp, Homo sapiens
aggtacctccccgtggaactcacacccttttagaggagatacaataaaagccaggatggggcagagcagtggggaagaaggggaggtaatgttgaaccacctgcccatggttacagaggcagcaggcctgggactcccgacgcttccctcctgccttatacctgatctaagaaggccctgctgggcacacagtagatgctcagcaaatgttcggttgaagggctggagcctcacaaaaccctactgatgcaaacaggctcagcgaggctgagtgacttgcccaagatcctaagaggtggtggaggaatcgcctttcacaaaaaagaacaagcgcttcggagccgc

SEQ ID NO: 1687 - DNA, 559 bp, Homo sapiens
  misc_feature 362: n = A,T,C or G
tccccgcggtggcggccgtccacaaatgtctgcagctacgatggaccctcagctgctggacaggaaagaggatcaagctaagaaggcccagagtgtgcaagcagagagagggtgtggacagaaaaccttgccttctccagggctagtggcgaaagctatctcaggctggctcaagtggagagaaaaaagcatgagatcaagcaatggacagctggggaagggctggcttttatttcctcagctcccaagctcagtccctggcactgggccgttgcctttgtaggtccctctgtgcccaggtcttgctatgggggttgtttcttggcattaaggtctcaagttcaaacgccaccgtctccaanaagccctcactggtcaccctatctaaagtaaccctcactcctaaggacaaacctgttttttcttcctagcatagaccactctctgaaatcaccttgttctcccagtcatctgctgcccttggctgttgcgccagctataacatggcactctgccttgcccactgctttgtccccaggacccaaccctgtacctgccc

SEQ ID NO: 1688 - DNA, 395 bp, Homo sapiens
  misc_feature 2, 181, 183, 269, 287, 364: n = A,T,C or G
gnggtggcggccgaggtacttactgtgcctcttccatgtgatttggaaggtgaggagacaggaatggtccacagagggagagagtgccaggccaagtcctctcatagccacccgccccctccacagaaggggacagcaagagaagagagaggcatggtgaggttccttttgcaaataaccnangatattttccaggattcaaagaccagtccatggttttaggcctctgctgtttattctctgagttctcagaaatgcaaaaagtgtantttagccccagaggcctnaagaaaaagattggggtgcccccaaatgtgtcaaatacagagggaaacacacagagcttagggaaagggcaactganaatgacaagactgataggaattgcttggcag

SEQ ID NO: 1689 - DNA, 423 bp, Homo sapiens
ccgcggtggcggccgaggtacctgaactgtcatcattcctactgtgtttgatagtgaccagtaggacaaagccacgtgccgacttcctggctgcttcacctttgcatagctgggttgcagctgcgaacctcattctgactgtgaactaagcaagctttgaggaggcaggaaattcccgtggggtccctgtgacatattgcattaagatcgtggcacttgcttttttgtctttcacatcggctgtcttgcaaggagcttgacatttccaaattccattgctctgtttggggaagacttaggacagcactccaggaaacagatgacaatttacagacagttgtctcagtggtttccagaatctcaccagcctcccgtatagcttcttgtattgaggctcatgagcgtattcacactctttccttt

SEQ ID NO: 1690 - DNA, 198 bp, Homo sapiens
  misc_feature 148: n = A,T,C or G
aggtacagggctgggtcctggggacaaagcagtgggcaaggcagagtgccatgttatagctggcgcaacagccaagggcagcagatgactgggagaacaaggtgatttcagagagtggtctatgctaggaagaaaaaacaggtttgtncttaggagtgaggggttacttttagataggggtgaccagtggaggggctt

SEQ ID NO: 1691 - DNA, 468 bp, Homo sapiens
  misc_feature 45, 99, 185, 240, 347: n = A,T,C or G
gggcgaattggagctccccgcggtggcggcccgaggtactgtcanacagaacaataataaaataacaacagagatttttttcttatagaaatttcagcncgagttatttgaaccaattctccccatgaaaacgaccaaagctctaatttaaatattctaaatgtctccttaacagtgtcaaatanctgacaaaattgtaggaaactcccaggccaaagcctatggtgaggggaaacaganaaacaagaggagaggagaagctgcttctgcccggcgtcctttgccaagccaggcaagcctggccttcagttttagcaagctttgaggggccagaagttaaggcccantgctgaccaaaggagggaagtctagcaggataccttctccacataagctgggattccagaggtctatacagcctaaggacaatggtgaactagaaataaaaccacctcactttccacctgt

SEQ ID NO: 1692 - DNA, 294 bp, Homo sapiens
gaaatgaacaaatatttatttatcttttataacaagtaaggcaatgttgcttaaaggaagacaaacaaacataaaagattccgttgacaatgcattttttcatctgttcggcacaatgcttttgtcataatggagatgtgacagcaaactttccaggacattcagtcttcggcggcagcacttagggcagatgactggccgcttatagatgaggccaaagcaccaggtaggtggaaggttcttgtatcggttcgaaccccgacagcgcgccaacagacaacacgaggcagtggg

SEQ ID NO: 1693 - DNA, 448 bp, Homo sapiens
atcactacttagggcgaattggagctccccgcggtggcggccgcccgggcaggtacaataataaaactaagcttatgcctaaaatattctcactgagtgtctgtgaatccacgactattagcactgtggagcaatttctccttgcagaagagtgctaactctatccattaaagccttggaaattgctggtaaatatgtaaaaaatcaagtgcttaaatggatagcaattattggcaggacctaaactgatacaaaagtgttccactgtctcaatatcaaaagcccaagaatgccagattcccaaagtgagtcaaagtgcttggattgctttgcataaacatggttagccagaatcaacaccctgggattggagcttgaggtgggaatttccaaatcctgcaaatgttattggctacagccccccagcaccccaatgctgggacagccc

SEQ ID NO: 1694 - DNA, 449 bp, Homo sapiens
  misc_feature 68, 146, 243, 295, 322, 378: n = A,T,C or G
ccccgcggtggcggccgaggtacatgtcctccctgaggtgggcggaatagggcacagccacaagcccnatgccacgggagggagaggcctcagccgcctggaagtggcagccctggttctgggttgcctcatccctctcatcctgncagtaggacaccagcattaaatgttcaaggtccagccttggtccagggccgtttgccatccagtgagaacagccggcacgtgacagctactcacttnctcagtctcttgtctcaccttgcgcatctctacatgtattcctagagtccanaggggaggtgaggttaaaacctgagtnatggaaaagcttttagagtagaaacacatttacgttgcagtttagctatagacatnccattgtgttatcttttaaaaggcccttgacattttgcgttttaatatttctcttaaccctattctcaggg

SEQ ID NO: 1695 - DNA, 375 bp, Homo sapiens
  misc_feature 4: n = A,T,C or G
gctnattggagcctccccgcggtggcggccgaggtacatttagcaaacaataaaattgatacctcaattatattttatattcagttgttggacagaacaaccctggccacagccctcaccaggctcacagctcaggacactgcctgccctccttgctctagattttcggaccatcagccgaccaaagaattgtgatatggcagagcatgagaaaattagctggcccaatctcagcacttagaatgatgggaaaataagccaaagaattgtgagagtagaactaaaagtgcacaagacagcactggagatggaaaggccatagcaattatagacaaaccacaattgataaaggaacagaagaagccatgtggaagg

SEQ ID NO: 1696 - DNA, 462 bp, Homo sapiens
ctatagggcgaattggagctccccgcggtggcggccgcccgggcaggtacccaaattaactaaccttaaatgcaagacttagcagcaggtattatccatgttgaaccacagagttgtggttataggatgatctatccaggttgaaaaagaattctggccagcagtttgaagaagtgaaaatcaagattaggcacagaggcagagggtggtggggccacagggcggggaaggattccaatccatgagactgcagaaggggaagtgagcagcctctacccatacagactagggtctcatggatgccactggagagcattccagtctcactggatattggtagttcactaacttgtgtcagtcatgattgttgacctctgatatattgctatatttggttttcatttatacaaaagctgcgtctctccttgatcccagtgttttgtttggtcttttgtgcatcca

SEQ ID NO: 1697 - DNA, 602 bp, Homo sapiens
  misc_feature 102, 135, 152, 174, 185, 186, 193, 196, 201, 212, 218, 220,225, 236, 237, 262, 266, 277, 285, 310, 331, 339, 352, 375,381, 389, 391, 404, 452, 454, 483, 492, 494, 515, 519, 521,532, 534, 538, 542, 545, 552, 560, 564, 567, 571, 575: n = A,T,C or G
tacttagggcaattggagctccccgcggtggcggccgccgggcaggtacctaaccataccctctttggactgcagtaaaacttgtatggcaacatctcggtngtagttggtctgctctcactcaaaggaggactnctgaggaaagtaaaagnagcataactctggggaaatggngcttactatgnnggggcanagnggtancatgggttgantccggngncatanagtttttgtannaatggggttggttttttccctttgnggtngaaaattgttncttttttncaaaaaaacctaaaccaaccaatancttgttggttagtttggttcntaaacaantggcctggattgnggaagggaaaaccaacttggtcntggggnccccctgnanaaattcccttagnccttttttggaaattcccaatttttttttttttcccccttttttaagntnaatttggttggaagcttagtaaggggggnaaggaaaananattggaaccccctttaatggntttntnttccccccccncnaccngganccnacccaangggtttcnaccnccngttnccanttttaatggggggccttttttccaatt

SEQ ID NO: 1698 - DNA, 480 bp, Homo sapiens
  misc_feature 207, 214, 468: n = A,T,C or G
cttagggcgaattggagctccccgcggtggcggccgcccgggcaggtacatggcatcaggtgtgatcagatggtgtccatctggctttaggctttgccgctgaagattttaattcagtagtcagagtctcctctttgttccttctctcttctcatgacttctgcaggtggatatgctgggtgacaagaagagcatttgcagggtttnttgtttntagtgccttcattcttcccccctggtaattgagttttctcttcaaccctgatctgggtagcccctttagctgctctaaagaaggaagtgagaacttctccacttgctgggagggtatcatctctgggggacaagggcaagacgcccagcttgcctgatccctttgatgccttctttccagtttgtctaagggctccagcgatctgagagttggtaagaaatctttgtgactactggcatctcagataagatgtnagagctgttggc

SEQ ID NO: 1699 - DNA, 448 bp, Homo sapiens
  misc_feature 71, 136, 166, 204, 313, 363, 387, 402, 442: n = A,T,C or G
ctacttagggcgaattggagctccccgcggtggcggccgaggtacatcatctctctggaccaggattctgnggtgaagctggagaattggacagatgcatcacgggtggatggctgttgttttagaaaaagtgcangaggatgagttccgctatcgaatgtaccanactcaggtctcagacgcagggctgtaccgctgcatggngacagcctggtctcctgtcagggggcagcctttggcgagaagcaacaaccagtctctccaatcctattgagatagacttccaaacctcaggtcctatatttaatgcttntgtgcattcagacacaccatcagtaattcggggagatctgatcaaattgntctgtatcatcactgtcgagggancagcactggatccanatgtcatggcctttgatgtgtactggtttgcggtgcactnttttgg

SEQ ID NO: 1700 - DNA, 804 bp, Homo sapiens
  misc_feature 426, 442, 640, 645, 646, 651, 664, 671, 672, 674, 681, 687,693, 701, 747, 757, 766, 771, 778, 784, 789, 792: n = A,T,C or G
cgaattggagctccacccgcggtggcggccgcccgggcaggtacccgagagacccggcggtggggaagtcacttcctcccgaagacgctgtttcctagcaaccgccctccgcctctgttattagcccctcctcctcgctcggtccaggaccggctctgcgggcgccgccaggcccagaccaagctactatcagaagttgaattctaataattagctattttataaaggtaacgagaaaaaatacactatgtctgatgaagtttttagcaccactttggcatatacaaagagtccaaaagttaccaaaagaactactttccaggatgagctaataagagcaattacagctcgctcagccagacaaaggagttctgaatactcagatgactttgacagtgatgaagattgtttctttaggtgattttnctgacactttcagcangatgaaaattcaagttaataaaaaaatgaatgactttcatatatcaagatgatgaagaaaagaatccttcaaaactattgtttttggaaaaccaataaaatcaaacggtgaacataaccaaagatgaagccagtgggtgccatcaaaaaatgaagaggaaaatggcacctggatggggtgtgaaaaacattggttgtnaaaannctttntcttgaattcccngaagggnnanagaatgnccgtanaatgangtgggttnccttggcccgctctaagaaactaaggggaatcccccggggctgggngggaatttcnaatttcaangcttnttcgaancccggntaccnttnaggggggggccc

SEQ ID NO: 1701 - DNA, 402 bp, Homo sapiens
  misc_feature 29, 62, 63, 64, 71, 72, 76, 77, 102, 130, 141, 197, 226,253, 271, 304, 320, 333, 337, 346, 348, 398: n = A,T,C or G
ggcgaaattgggaagctccaccgcgggtngggcgggccgcccgggggccaagggttactttnnnttttttnntttnnttttggtcaacttaacccttccccngggggttcgggggaagtggggggtaaanttttggcggcngcctggcttggccctttccttggggaatggtggggtaagccccgtttttcttcaanggcctccccttctcccggggaaaatccgnaaaccccttgaattttccccccggtcnaccccggttgggggttcnacccaattggggttaaggggcaaccggggcggnaccttaccccattccngaaaaaagttttngaantaagggggncnaagaaccggttttccggaaaattggggggtttcgggttccggcccgggcncccc

SEQ ID NO: 1702 - DNA, 398 bp, Homo sapiens
ctatagggcgaattggagctccccgcggtggcggccgaggtacctctaggcagattctgaaagattatcttcacaattcctgttagctgttcgaaggaacctggggttgtgagatttaaaaaattattaaaaagcaaatgaataacagtaatgaaaaacaaactcatgtagctaggtttagtagtttgcattaattgaaagaaaagagggtgaacaagcattaaaacaagcagaaaccaccctcagcagtcattctgtaagaacacagtgattttaaaatggccaaataaaagtggggacctggaagagtgattactcatctcttgtgcccatgacccctcagggcataagaagtctgcacacctgtctgaacatcaaacatggttggtcgatggaat

SEQ ID NO: 1703 - DNA, 793 bp, Homo sapiens
  misc_feature 33, 64, 74, 76, 87, 111, 115, 119, 141, 145, 147, 150, 165,176, 182, 185, 186, 189, 193, 205, 215, 223, 255, 257, 260,262, 273, 382, 414, 421, 436, 443, 481, 495, 501, 504, 510,533, 541, 548, 571, 583, 587, 604, 609, 624, 656, 663: n = A,T,C or G
  misc_feature 683, 688, 707, 710, 715, 731, 743, 762, 770: n = A,T,C or G
aggtacgcggggagccggagaccaagcctacangcccgcctgcatgctggttattcccaagtcngtctccaagngnttcctccgtcnccaaggttctctccaagtccttgnccgnccgnccggctcctcccccaaggttcnccgncnacnctccggtttccgggnctcccaagggnccttanagnnttnaagnccccccttccanccccaatggnccccgggnttccaaaaaagggggaaggggccaaccccaananggntngggccaatttnaaaaaaaattaacccccttgggccttgggttttccgggggaattttttaaaaacctttttcaatttccttttccttggggccttttggcccccggggggaatttgggcnttgtttccccttttggccccaattttgggggnaaccttnatttggggcctttcncccgganatttccggaaccttccttccaaggaacccccaaaaggnaaaggcccaatttncttttnccngaaggnccaaaaagggaaaaaaacccttnaaaaattnaaaaatnaaaaattaaaaaatttttccccnaaggcctttttncttnaaccaatccaaaggggntttgntaagggggggggaancccgggggggggggaaaaaagggggccctttncaaaagnttggggaaaaaatttttacnaaggnaaccccccccttggggggnccntttcnccaaaaacccaaaaanaagggtttttcncccttgggcccaaaaaccntttttttnggggtaaagggggcccccccccc

SEQ ID NO: 1704 - DNA, 438 bp, Homo sapiens
ggagctccccgcggtggcggccgaggtaccactgtaacagtaatatggaaatgccacaaatactcttcagtaggggattggttaaatgtcactttccttataaaataaaattatacaattgttttaaaaaaacacacatacctccttatatattaatagagaatgatctcagggtaaaattgttgcaaaaaaaagcaaagtataaaacagtgtgggccaggcacggtggctcacgcctgtaatcttagcactttgggaggccgaggtgggcagatcacctgaggtcgggagttcaagaccagcctgaccaacatagggaaacttggtctctactaaaaatacaaaattagccaggcgtggtggcacatgcctgtaatcccagctactcgggaggctgaggcaggagaatcgcttgaactcgggagatggaggttgtgg

SEQ ID NO: 1705 - DNA, 390 bp, Homo sapiens
ggcgcagtggctcacgcctgtaatcccagcactttggaaggccaaggcgggcggatcacaaggtcaggagatcgagaccatcctggctaacacagtgaaaccctgtctctactaaaaatacaataatagtgtattgcacatttttaaactgaaagtaaatttaaaatgtgcttctcacaaaaaataagtatttgaaatgatggattagcttgatgtaattacttcatattgttcataaatcagaacatcactctactctataaatatatgcaattataaattgtcaatttaaaataaaataaaaaataaaaaattgtaaaattgttactaacatgagttacagctgtcaatcatactagtctataacattttttagctattgtggtacct

SEQ ID NO: 1706 - DNA, 427 bp, Homo sapiens
ccgcggtggcggccgcccgggcaggtacacaatatgagggggatcaactcctctctctttgccaatagcacattgggaacaatgtgtggcaggcagcgtcccagcattaacataacgcttttttcactgtctgcaatacgagacacctcgtatcctaaacgactatctgctgacattcgacaaaaagagagtagtgcttggtggaatgcaggagacaatttcctattaggtttatcaaaatgaactgtctttttacttgatagagaagaaggtggcattccttctctttctctcctggggaatgaatttggggaattctctttaggaatagtggaatcagcttcatctgatattgaaagatggatgtctgtgttttttcccttgtctgaactatttacatctggatgctgtccactgtcctcagagt

SEQ ID NO: 1707 - DNA, 384 bp, Homo sapiens
  misc_feature 28, 130, 142, 156, 309, 315, 348, 363: n = A,T,C or G
acactactatagggcgaattggagctcnccgcggtggcggccgcccgggcaggtacagggagttgtaggtgagcagccgttccggcagtgagtatcccagtccatgcttctgggtcagtggggaacgcancacaggccccanctgccgagggtctnctgccagcaccagctgccctcctggatcacctgtttcctttacttccatcagccctgctatagctaccagactctcaggctccatgcagtggccagccctcatcgatgaagatgtgtgtgaagtgatcaatgggaaactgggccgagaccaanctgccngcagtgatgagggtggtaattaagacccggtantcctgcagcttcttnttggcgggaaatacatactcc

SEQ ID NO: 1708 - DNA, 288 bp, Homo sapiens
ccgcggtggcggccgcccgggcaggtacatccaaaatcatttcagcatataacctgtaaagactgcatcatcccagctactttcctgctgacttccacttgggtttactcaatgggtgacactcacaggacataagagattagaaagagggataaggttttttatatatctgctccctccttacttaaagccatggttttagcagaggcccaaggtcccccatttccaccccaaccctgcacactgagcaaaggcagcagatcccaaacccaccccacccgcgtacct

SEQ ID NO: 1709 - DNA, 326 bp, Homo sapiens
  misc_feature 116, 213, 227, 248, 257, 269, 296, 303: n = A,T,C or G
cttagggcgaattggagctccccgcggtggcggccgaggtacttctgggtaaactggagaagagcttcaactctgttcacctgcttgcaggtgggtttgctgagttctctcgttgnttccctggcctctgtgaaggaaaatccactctagtccctacctgcatttctcagccttgcttacctgttgccaacattgggccaacccgaattcttnccaatctttatctnggctgccagcgagatgtcctnaacaagganctgatgcagcanaatgggattggttatgtgttaaatgcnagcaatncctgttcaaagcctgactttatc

SEQ ID NO: 1710 - DNA, 452 bp, Homo sapiens
  misc_feature 123, 268, 276, 289, 295, 296, 357, 359, 374, 381, 384, 392,409: n = A,T,C or G
ccgcggtggcggccgcccgggcaggtaccctgagaacagcaataatgcacaaacattactattccaacagctgcattgaaacacccttggtaggattgggaaaaagatggattattgccattnggacactccaggactgtccattaatactcctgactaatggaagatgataaagattgggcaagaaaaatgactgcagcaaacgccttggcatcttcaacttgtcacctttagcaagaggcctcttcaacagttcttggactgtgtntggcaagncaggcactctcanaacggnnaggagacacagctaacatgatctttgcaatgcaacaaaacaagcgatcttgaggcgacagnantccaaaagatgacanaaaattnatncaacttantgaagtcattgtggatnccaccagaaaagcctttgggcaaacaggtcctttgcaaaaccc

SEQ ID NO: 1711 - DNA, 427 bp, Homo sapiens
ccgcggtggcggccgcccgggcaggtacagtgaaaagagccaaggctgtgtgaccccctcatcacttagccaggcgtatggtcctggtttctgaggctgccagaaagcatcttagcaatttgtgtttggatggtccatgcctgactattctaggctggaggttcctaaagagtaacaagaggaagagaaacaagaatctctgacacttgttgagaatagagcacagtcccatttgtttgaaaagagacaccaggcagccatgtttatgtgccagaaatgcattccacctcaaggaggacttaatttatggacccgtgtgtgccaggctgagctgggcaaggatctttctcaggacaaactctgccatgcagctaaaagcctggaaactaaaggatttcatgtagtaaactatcttccaacccctgta

SEQ ID NO: 1712 - DNA, 277 bp, Homo sapiens
ccgggcaggtacgcgggattctattcctgtagtgctttgtcatttacatctttgtatttgattctcccaacacatatttgaccatggttaggagagcacggattgttttttgtcattttcataggaaaaggctgacattgaaaggagaaacccttgtttgatgtcttctcttggtatcaggcagtgggttccagccctgctctgccaactcctcagtgcagtgacttaccatgatactgtgccatgtttctgggctgatttttggtatatttagtca

SEQ ID NO: 1713 - DNA, 321 bp, Homo sapiens
  misc_feature 160: n = A,T,C or G
ccgggcaggtatttgtttacttctgtgtattttttttttttacataaatggaattgcactatatagttctgtagctcagtttttaaaatttggtattaaaatgttctttcagttagggccaaagggcatttaacttcaaggtaagacccattccaggacnggcagagatcatgtctgtcttgcgtatccctgtgtgaattttgcctgacatgttgcaaacactccgtatggaagtcttgagggtcttctgccccagtcagaaaacctctgggagaacagttatccccagacctcagacgctcgacggatacatgagaagct

SEQ ID NO: 1714 - DNA, 428 bp, Homo sapiens
  misc_feature 148, 311, 328, 332, 337, 340, 353, 366, 368, 426: n = A,T,C or G
ccgcggtggcggccgtccacaaatgtctgcagctacgatggaccctcagctgctggacaggaaagaggatcaagctaagaaggcccagagtgtgcaagcagagagagggtgtggacagaaaaccttgccttctccagggctagtggcnaaagctatctcaggctggctcaagtggagagaaaaaagcatgagatcaagcaatggacagctggggaagggctggcttttatttcctcagctcccaagctcagtccctggcactgggccgttgcctttgtaggtccctctgtgcccaggtcttgctatggggngttgtttcttggcattnaggncttanttnaaacgccaccgtnttcaaagaagccntnacttggtcaccctatctaaagtaaccctcactcctaagggacaaaacctgtttttttntt

SEQ ID NO: 1715 - DNA, 644 bp, Homo sapiens
  misc_feature 142, 169, 187, 201, 205, 206, 215, 219, 251, 253, 274, 298,304, 306, 308, 316, 336, 342, 378, 399, 415, 421, 430, 443,449, 451, 500, 508, 531, 542, 549, 552, 586, 587, 590, 591,618, 628, 630, 631: n = A,T,C or G
ccgggcaggtacccagcaagaggtttgcaaagaggagttattcagtgaagacggggtttcaccatcttggctaggctggtcttgaattcctgacctcgtgatccacccgcctgggcctcccaaagtgctgggattacatgcntgagccaccgtgcccaagccttaaagncatccaaaaaaatgggantaaaggaacatcantttnnaaacctggncagnggagggttgggccttggaaacaaccaccaaananccccttactaggtttcatgcntctaattgccaaggaaaaggaagnaaaatncnangaaaattncaataaccccccttggaggnaggccntatccaaaaggaaaaaccttcccaattttttttttnaaccttggttggcccaagtanggggcccttcctttcnttggcnttggaaaangggggattccaanaaggtngnggaaaaattcctttggggaaaatttcccaaggacccccccaattggttnttttcccnccccaattccaatttcaataagnccccaattggnttggaanagngccttgggctaaggaacccttcccccaaatgtcnnaannccaagtaaggtaaggtaaccaaaaggnaattttttangnnaaaattaaccttg

SEQ ID NO: 1716 - DNA, 201 bp, Homo sapiens; identical to SEQ ID NO: 1534

SEQ ID NO: 1717 - DNA, 700 bp, Homo sapiens
  misc_feature 502, 548, 577, 587, 591, 613: n = A,T,C or G
ccgcggtggcggcccgaggtacttgacttttccccttaagtttgattccatttcctaacattatccttccctcttcctcctcagcaactagtcttctaaattagaacttaaacacaatgaccagatatgaccctgcaacagagcatgcccttctgcattgagcatgcaatcatgtatcacaggtataagaccccttgaacagacatggttttggtgattctgtgtaggacttattgcttttacccaagaagatgatcaggcatcctaagtagatcaaaaagttttctggagctcttgaatgtgtataggcaagaaagattaagcaacctgttgccttatatgaggcaaactatcttctcatattttcttttgaattcaggatttcaaggttggggaaggaaggccgggcgcggtggctcacgcctgtaatcccagcactttgggaggccgaggcgggcggatcacgaggtcaggagatcgagaccatcccggctaaaacggngaaaccccgtcttttactaaaaatacaaaaaattaacccggcgtantggccggcgcctgtaatcccagctactcnggaggctgangcangagaatggcctgaaccccggangcggagcttgcaatgaggcgaaatccggcactggacttcaagcctgggcgacagaagcgagacttccgcttaaaaaaaaaaaaaaaa

SEQ ID NO: 1718 - DNA, 487 bp, Homo sapiens
tcactacttagggcgaattggagctccccgcggtggcggccgcccgggcaggtacatagtttgatgattctctcatcctgcttctggctagtaggcccctttagatgagttgctatttttcactatccacagagtcaaggtcaaatctcatggctgtgaattttaaatgatgagatccccacaggtggtgtcgggcaaagcaccctctaaacttactgacttgtagtataaaacttagcaagctgtaagtcctgcaccatgagcccctgaagccagcatcgtagcactccaatcttcctacacaccgacccacaaaagtttaaggacaagaagatttatcccaccatttcagatacttcttggctttttgtggactgaaataggtcaattaaagtttgtcttaaagttttaaactttaagtgactgtccgtttctcctgtaatttctattttatggaatgtttctattttatcattatgaaagaatt

SEQ ID NO: 1719 - DNA, 632 bp, Homo sapiens
  misc_feature 50, 64, 161, 184, 191, 197, 206, 212, 215, 231, 257, 264,266, 269, 280, 281, 289, 291, 308, 311, 315, 352, 381, 383,392, 398, 414, 418, 424, 428, 430, 431, 440, 444, 469, 470,474, 476, 489, 491, 499, 509, 511, 515, 543, 544, 547: n = A,T,C or G
  misc_feature 548, 556, 574, 582, 583, 587, 591, 592, 595, 599, 603: n = A,T,C or G
ccgggcaggtactttttttttttttttttttttgagtctgccagtgaccntcaggcatgggctntgatggaagcctggtggtgataaggtcatccacagatctcattatgctgtgagctacagccgacgtgattataaaattctgaggtggaatccctganagacaaggaaggggcttgtagcncaaaacncctttnaatgggggntaagtngcntgcaaaaggaagttgnccttgcccgttcccaggccaggggcncttttgngncgnaggccattaannccatgggnancacctcttggaagaccntgntggnattaaaaaaatggttcccttggggtggaattggaacnccaataaaaattcttggccccctggttgncnttttggggnggttanaagggggtaagaaagnggcnttaacncccncnntaagtggangtcnttggggaaaaaaccaaaaaagtacnnattngngggaaaaggcctnanggggttanaaccccttgnanccgnccttaaggggacaacctttctttcaacnnatnnccctttgnggaaaataggaagggggnaagatttnntttncaannttnggangccnctcaattttttctttttttaaaaaggggg

SEQ ID NO: 1720 - DNA, 418 bp, Homo sapiens
  misc_feature 7, 147, 259, 416: n = A,T,C or G
tcgactnctatagggcgaattggagctccccgcggtggcggccgaaaccagcttttaagtgagctcagcatattataaaggaatgaaagcaattagagcgtggactctaaaggtaggtgagacttgctgttccacttagaaacatanaaacataggaaactaaggactcgatggggacatcaatagtaggatggcttttaagagggctgaagtgtgtaaatatacacattaagctttgcagcaactctgtgccaaatcnaagttgttgcagacctggaattttagtttggtaaaggataactgtagttattttttaaataaaatgattcattagaattctttggttctctcatgataatttagcaagtttgtctctttcagaaagaaaagtttaagtggggttaatgggtacctcngc

SEQ ID NO: 1721 - DNA, 417 bp, Homo sapiens
  misc_feature 403: n = A,T,C or G
ccgcggtggcggccgaggtactttttttttttttttttaaagacagagtcttgctctgtcacccaggctggagtgcagtgagccgagatcgcgccatgcacaccagcctgggtgatagagcgagactccatctccaaaaaaaaacaaaaagagagagagaataggggaagactaagcaggaaggctgtgtctcccttccccacactgtattccaaccagacagctcccttctattttatatgttgggctagtatgaaaaacaattctgctaggaaaaaaaaaatttttttaagaagtttgaaagctagtgatttgacccaagttcctcattttacagctggggaaactaaggcctagagagaggcaagtgatatttttgtttcatggcagggctgggcttganatcctgcttttctg

SEQ ID NO: 1722 - DNA, 353 bp, Homo sapiens
ccgggcaggtaccaactgaagcagcacaatattctggcatctgttggagaagatgaagagggcatcaaccccttggttaagatctggaacctggagaagagagatggtggcaatccactctgcactcgaatcttccctgctattccaggaacagagccaactgttgtatcttgtttgactgtccatgaaaatctcaactttatggccattggtttcacagatggcagtgttacattgaacaaaggagacatcacccgggaccggcatagcaagacccagattttgcacaagggcaactatcctgtaactggattggcctttcgccaagcaggaaagaccactcacttgtttgt

SEQ ID NO: 1723 - DNA, 450 bp, Homo sapiens
  misc_feature 386, 438, 439, 449: n = A,T,C or G
ctatagggcgaattggagctccccgcggtggcggccgaggtacccaaattaactaaccttaaatgcaagacttagcagcaggtattatccatgttgaaccacagagttgtggttataggatgatctatccaggttgaaaaagaattctggccagcagtttgaagaagtgaaaatcaagattaggcacagaggcagagggtggtggggccacagggcggggaaggattccaatccatgagactgcagaaggggaagtgagcagcctctacccatacagactagggtctcatggatgccactggagagcattccagtctcactggatattggtagttcactaacttgtgtcagtcatgattgtgacctctgatatattgctatatttnggttttcatttatacaaaaaagccttgcgttcttctttctttggatccccannggtttttggnt

SEQ ID NO: 1724 - DNA, 313 bp, Homo sapiens
ccgggcaggtacgcgggaggaatgccatgttgatccaaggtgccgtttccctaaacctgtgtgtttgtggggcgctcatgaggcccctctctcctggtaaaaacccaaacgacccaggagagaaagatgtgcgtggcctgccagcgcactccacagaatctgtgaagtcaactggacagcagggaagaacagaagagaaggatggtgggctcgggaacgaggagaccctctgcgacctgcaagcccaggagtgccccgatcaggccgggcacaggaagaacatgtgtgccctccggattctgaagactgtcag

SEQ ID NO: 1725 - DNA, 218 bp, Homo sapiens
  misc_feature 46, 106, 185, 189, 190, 204: n = A,T,C or G
ctccccgcggtggcggccgaggtacgtattaccaaagaaaccaaanactgcctttgactaaggggggtgttgaaagagaacttaaccttattaggaaaccctgacnaaatgatggaagactattgccttattttgcactatttgtgaatcatcttacactgcatttttttattgaatgcttattnaaannggcagtcgctttanggtgaaaaaagcct

SEQ ID NO: 1726 - DNA, 341 bp, Homo sapiens
ccgggcaggtaccattttagcaaacaacaacaacaacaacagaaactggatttctttttggtttaaactccatttgattgtctgtatcaatgatcacaggaaatgattaaatgtcgtgcatttaatgtaatttgggttatgaagctcatttgggttatgctcttcacttttctctgtaaaattacaacatgcagtatgcactttcccacgacagaattgtttatgtgttattatggcgtctttgcagacttgtaactttatcctagaacctcagtggtatgacccgctagcatgcatacttcatgggtctgtcattatagggcctttcaaatatcacctat

SEQ ID NO: 1727 - DNA, 202 bp, Homo sapiens
  misc_feature 125, 149, 158, 185: n = A,T,C or G
ctatagggcgaattggagctccccgcggtggcggccgaggtactttgttaacctgggtccctgaatgagaggacatagagaatacagccaatctgaaaaaatctgacccttttaggctgggcacnggtggctcacgccagtaatcccangcactctgngaggccaaggtaggtggatcacttgangtcaggaatttgagacc

SEQ ID NO: 1728 - DNA, 427 bp, Homo sapiens
  misc_feature 181, 191, 192, 207, 317, 330: n = A,T,C or G
tccccgcggtggcggccgaggtacgcatttcctaagaatccagtagactccttcagacactgctcggataactgatagacagataaaaaatacagagattaccaaaattagtctgtaaactccatgaagaaagaaccgacaaccattttattccctgatgttatccccagtgggaaatgcntaaccttggnnttgtaaccactgacnagttatggaacagaacatattttaataatctgctatatcaaattgtaagagagtatcaaaaaatcatagctattttaatattaaataccaggcaaatgggtgtccccatnaaggatctatccncttttttttttattgagatggagtcttgctctttgacccagacttgagtgcagttgggtacaagagtagtggggttccgctgcctgcccacccccca

SEQ ID NO: 1729 - DNA, 355 bp, Homo sapiens
  misc_feature 152: n = A,T,C or G
ccgggcaggtaccagcgggctgtcctctaacagcgacggctgcacgctgggcacgctgggcacgctggcgggatgcacgggcctttgtcctgctgcctctgaggtagcagagtcggcacagggtggactgaggggcgtctcgcttttctgtncaccctctgagacagcagggacaggttcatttggcttctccaggtgcagcagcttgagtttgctctttggccctgatgctccagtctggttcttaatcttcttctcatagtccaggagttggcccagaaaattgaagtttggagatatagtaggtcttttttctttcacaaatctgtaagcttcatctaaagacatgtccatc

SEQ ID NO: 1730 - DNA, 344 bp, Homo sapiens
  misc_feature 151: n = A,T,C or G
aggtactaagagctggtccaggctcagccccaagtgtgccagctgcttcttagacgtggctccatttactcctcaccgcagaccttcctacagttccgtgggtgggaagtgctcagtgggtctcctcgctgggctgaatcaggggggcgcnggagctgcgttgcttctggaggctccagaggaggatgggtttctgttctggactgttggtggacttcacttccttggagctgtgggactgagatcccccttcctggctggctgtctcagccaggggcctctctgcagcctgcacatgacctccgctcagggccagcgtcggggcatggaattctgttcacgtt

SEQ ID NO: 1731 - DNA, 449 bp, Homo sapiens
ccgcggtggcggccgcccgggcaggtacaatcacgcagagtcagagcaggagtatgaggaagagcaagaacctcccaaagttgaaagcaaaccaaaggtcccccttaaaagtgccccaccacccatgaacttcactgatttactcaggctggctgagaaaaagcagtttgaaccagtggaaatcaaggtagtgaagaaatcagaagagcgacctatgaccgcagaagaacttagggagcgagaattccttgaacgaaagcataggagaaaaaaacttgagacagatggaaaactacctccaactgtgtccaaaaaggcaccctctcagaaagaaagtgtgggcacaaaacttagcaaaggttctggagacaggcatccttcttccaaaggaatgccccttcctcatgctgagaagaaatcaagacccagcatggccaatgagaaacacc

SEQ ID NO: 1732 - DNA, 385 bp, Homo sapiens
ctatagggcgaattggagctccccgcggtggcggccgaaaccagcttttaagtgagctcagcatattataaaggaatgaaagcaattagagcgtggactctaaaggtaggtgagacttgctgttccacttagaaacatagaaacataggaaactaaggactcgatggggacatcaatagtaggatggcttttaagagggctgaagtgtgtaaatatacacattaagctttgcagcaactctgtgccaaatcgaagttgttgcagacctggaattttagtttggtaaaggataactgtagttattttttaaataaaatgattcattagaattctttggttctctcatgataatttagcaagtttgtctctttcagaaagaaaagtt

SEQ ID NO: 1733 - DNA, 432 bp, Homo sapiens
cactacttagggcgaattggagctccccgcggtggcggccgaaaccagcttttaagtgagctcagcatattataaaggaatgaaagcaattagagcgtggactctaaaggtaggtgagacttgctgttccacttagaaacatagaaacataggaaactaaggactcgatggggacatcaatagtaggatggcttttaagagggctgaagtgtgtaaatatacacattaagctttgcagcaactctgtgccaaatcgaagttgttgcagacctggaattttagtttggtaaaggataactgtagttattttttaaataaaatgattcattagaattctttggttctctcatgataatttagcaagtttgtctctttcagaaagaaaagtttaagtggggttaatgggtacctcggccgctctagaactagtgg

SEQ ID NO: 1734 - DNA, 306 bp, Homo sapiens
  misc_feature 1, 3: n = A,T,C or G
ngntggcggccgaggtaccgagtttcgtggcagcgcctccgctctgctagcccggggcccgggtcggcctaacgtcacttggctcggctgactcagatgacccggtttctagtgacgaagcaaaagtggggctttttcccttttctagtctgaagctctcaggaggaaagaaaaaaaaaagtctgtattctccagtctcccggggttgaactttgggtcaggaatcaggagggaggaagcaaagagcattgaggggcgcgagactgggccgcatcccgcgctcggaaggtggcgtgtacctgcccg

SEQ ID NO: 1735 - DNA, 434 bp, Homo sapiens
  misc_feature 44, 198, 324, 358, 365, 373, 377: n = A,T,C or G
ggcgaattggagctccccgcggtggcggccgaggtacatatcanaggcattattgccacagtgaaacacaggaaatgacagacactttcggtgagaagacaatgacttagaaaagcagagcagagtggggacagatcacctgaggtcaggagttcaagaccagcctggccaacgtggtgaaaccctgtctcaactaanaatacagaaaattagctgggcattgtggcgggcacctgtaatcccagctgctcgggagactgagacaggagaattgcttgaacccgggaggctgaggttgcatgtgagccgagactgtgccactgnactccagcctgggtgacacagttaagactccgtnccacaantaaaaaanaaantacttaaggttcctgcccgggcggcccgctcttagaactagttgggatcccccgggc

SEQ ID NO: 1736 - DNA, 346 bp, Homo sapiens
  misc_feature 232, 330: n = A,T,C or G
aggtacactgctgctgatagcaccaaaaggaggcttctttctctcaagccaatccttgatgtatcttcggacaatctgtccaatgatgagaggaaccacaacagtcataaaaagctgagaaaaaatagatgtgaaaggcacagaagaagatgaaccaagaaaaagcagcaggagcaggggtgttataacgatgcccaaaaaacttccaaaggctgaattaaatattgcagcntgcctcatttccaccaactgccttggttaaaatcactgcagaagacacaggcggaggcatgcaacctactgtctgcaaaccttttaaaagccattcgntgatgggtgtgattga

SEQ ID NO: 1737 - DNA, 201 bp, Homo sapiens; identical to SEQ ID NO: 1534

SEQ ID NO: 1738 - DNA, 394 bp, Homo sapiens
  misc_feature 201, 326, 332, 347, 348, 353, 357, 362: n = A,T,C or G
tatagggcgaattggagctccccgcggtggcggccgggcgcagtggctcacgcctgtaatcccagcactttggaaggccaaggcgggcggatcacaaggtcaggagatcgagaccatcctggctaacacagtgaaaccctgtctctactaaaaatacaataatagtgtattgcacatttttaaacttgaaaggtaaatttnaaaatgtgcttctcacaaaaaataagtatttgaaatgatggattaccttgatgtaattacttcatattgttcataaatcagaacatcactctactctataaaatatatgcaatttataaattgtncaattntaaaataaacattannacaanatantaaanattgttaaaaattgttacctaacatggagtta

SEQ ID NO: 1739 - DNA, 320 bp, Homo sapiens
  misc_feature 130: n = A,T,C or G
aggtacgtgggggagccagcgatgggtccaccttgcctttgttgttgttgttgtttttgtttcttgttttggtgactgagtgaagggacttgaccctggttctcccagcttgagcaggagcgtcactgcnggtgatcagggaagctgcctggaccagctggcctggggcagccaccaccccattctctcgcccctcttgagaatccagcctgtggacccaggtgtgtcagcctgcagtcagaccacagtctgtctcgggctggtgctgggggtggcagaaagggggtcctgacgcagcccctgctcccccgagtctctca

SEQ ID NO: 1740 - DNA, 442 bp, Homo sapiens
  misc_feature 371: n = A,T,C or G
ccgcggtggcggccgaggtacgcgggacccggaagcctgagcatcgcatcaccaaacactgcctttattcctatccataacccaggtagtttcccaggctctcctgttgctaccacggaccccatcacaaaatctgcatcccaagtggtaggactcaatcaaatggtgcctcaaattgagggaaacacagggacagtccctcagcctaccaatgtgaaggtagttcttccagcagctggcctctcagctgctcagccaccagcttcctaccccttaccaggctctccccttgctgccggcgtgttacccagccagaactccagtgtgctcagcacagcaagcaactttctccccagccagcgagcggcaangtattaagccaggcccaggcaaacttgtttccttcctgcaagtttcttaacccaacaaccccaaggcccct

SEQ ID NO: 1741 - DNA, 364 bp, Homo sapiens
ccgcggtggcggccgaaaccagcttttaagtgagctcagcatattataaaggaatgaaagcaattagagcgtggactctaaaggtaggtgagacttgctgttccacttagaaacatagaaacataggaaactaaggactcgatggggacatcaatagtaggatggcttttaagagggctgaagtgtgtaaatatacacattaagctttgcagcaactctgtgccaaatcgaagttgttgcagacctggaattttagtttggtaaaggataactgtagttattttttaaataaaatgattcattagaattctttggttctctcatgataatttagcaagtttgtctctttcagaaagaaaagttt

SEQ ID NO: 1742 - DNA, 368 bp, Homo sapiens
  misc_feature 30, 168, 175: n = A,T,C or G
gcttttaagtgagctcagcatattataaanggaatgaaagcaattagagcgtggactctaaaggtaggtgagacttgctgttccacttagaaacatagaaacataggaaactaaggactcgatggggacatcaatagtaggatggcttttaagagggctgaaagtggngtaaatntacacattaagctttgcagcaactctgtgccaaatccgaagttgttgcagacctggaattttagtttggtaaaggataactgtggttattttttaaataaaatgattcattagaattctttggttctctcatgataatttagcaagtttgtctctttcagaaagaaaagtttaagtggggttaatgggtacct

SEQ ID NO: 1743 - DNA, 353 bp, Homo sapiens
aggtactgattgctcactgaaagactcagcacccccaatggtgcgcggaagccaggcgggcgattacaatccaattacctattgtcgactcagcccacacaagcttttctcctcctcttgcagggcatggggccaggctccactcccaaatgagactggccccctccacggttcagggtaacagaagggcctgtaggccctggtgaactgaatccagcacaggcctcccctgtaacacaacaggactgagcagaaccaaacacttcttccaactgactctgctccctgccctcaccatctcaaactctgattcccactccactcttcgaggtttctctcagctttttgacctg

SEQ ID NO: 1744 - DNA, 354 bp, Homo sapiens
aggtactttttttttttttttttttttttgaaacatttgaaacaaatttattgatatagtttttttaagttaagttttacatctaacatttaaaatgatagaactaggtatagctggaaacaatgcctgtttattttcttacacagagaatgaattctttcttcccttaaaacagtgttgggtaatgttccagaaaagtaattacaggccagttagtaaatataccctgagatagtagaatgccagatagcaacagctatatgcctgccactactggttaatcagctacagaacagactgattttttgacttaatatggcatagggactccattaaggacagaatctgcatctt

SEQ ID NO: 1745 - DNA, 180 bp, Homo sapiens
gctctccgatgcccagccctcctggaaccacctcgcctgtgacgtaggtggagcgcgcactgcctccgggcccgtctttctcaattgggaccggaaaacgttgtcgctcatcctatgacgcgaaagtaaccgagactatcaggatcccggagacggaaatgtccgaaggccgcagtacct

SEQ ID NO: 1746 - DNA, 355 bp, Homo sapiens
  misc_feature 205, 233: n = A,T,C or G
gataaaggaaagagcaaaacaaacgtgcaggatcgagagaaaatcgattgcttgaaaaactgggtattttacttgctgcaagtcccgactgtgtcagctgatgagtttaacactatgacagcacagtcctcacctgcctgctcgctgctgtaatccccacactgttgtgtgccctatagcacctggcacacgggaagcgctcaanagatgtgtgtgaatgaaggagccacatnttgacttgcgacgcggagcagtaagctgcagttatttggtagcggtggaagaataaattctacctcctgcttgcctcgctgcagtggggatgagggggaggggactcacccagatgctgaat

SEQ ID NO: 1747 - DNA, 408 bp, Homo sapiens
ccgcggtggcggccgattttcttctaacaccgacattgctgcagaagaatctgcggcggtctttagttggatccaagtctcaaatgtgcctggccctcgtccgggatgctcctgaacagctggtcctggaaattgggaacctgtcagctgtctggggaattcagcatctggctgagtcccctctccctcatccccactgcagcgaggcaagcaggaggtagaatttattcttccaccgctaccaaataactgcagcttactgctccgcgtcgcaagtcaagatgtggctccttcattcacacacatctcttgagcgcttcccgtgtgccaggtgctatagggcacacaacagtgtgggggattacagcagcgagcaggcaggtgaggactgtgctgtcataagtgtta

SEQ ID NO: 1748 - DNA, 353 bp, Homo sapiens
ccgggcaggtacatggcatcaggtgtgatcagatggtgtccatctggctttaggctttgccgctgaagattttaattcagtagtcagagtctcctctttgttccttctctcttctcatgacttctgcaggtggatatgctgggtgacaagaagagcatttgcagggtttctggttctagtgccttcattcttcccaccctggtaattgagttttctcttcaaccctgatctgggtagcccctttagctgctctaaagaaggaagtgagaacttctccacttgctgggagggtatcatctctgggggacaagggcaagacgcccagcttgcctgatccctttgatgccttcttt

SEQ ID NO: 1749 - DNA, 537 bp, Homo sapiens
  misc_feature 67, 97, 473, 496, 520, 522: n = A,T,C or G
ccgcggtggcggcccgcccgggcaggtactacatgagccagaataattgagcattttaacacagaanagtatttcaaagagctcaaagatgaagccnaggtttgatacctggctaccaggtgaatgatagtgcccctgacagaaaagaacatacagggaaaatccaagctaatatctaaaaaaagatacggaggtcttttctaagcatcttgaatttgggtgatggctgacagctgagtggaaatggaccatgaaatggtcatccaagcagccctggatctggggagctttggggttggagttagaacttttaaaatgcattaatgttaggtaagcaacataggatggtatctggaacttaacaggagtccataattgctgtcagaattattagcatagaattcggttttaaacattgactaaattgaatgggcgaggtgggggaggcatggcgccagttaaatagccagganaggctggactggggacagaaaantgtgcttgactgcccaaagaaatnanaagataatggtacct

SEQ ID NO: 1750 - DNA, 373 bp, Homo sapiens
  misc_feature 141, 145, 152, 175, 184, 188, 222, 226, 227, 232, 242, 244,251, 257, 274, 281, 302, 309, 313, 328, 339, 346, 350: n = A,T,C or G
aggtactctcagccatagccagtgcccgtccaagggcttgcttttacttcattcactagggccacctgggcatctgtgccactccctgcagcagccaggcttgcgaggaacaggcgggccaaggcaggggtgatccttgtnttangcatacngggtatgtgggggaagcaaggtngggtccaanaaanaaaaaaagcttagggcaacaacttgcaaggaacnctannttatngaattcaagntntaccagnaacctnggacccccaccaagatngtaaatnacctggttaagattttggcgncaaaatncaanggggggttaaggccnaaaaataaccncaaaaanaatnaaggggggaacccctttccaacc

SEQ ID NO: 1751 - DNA, 440 bp, Homo sapiens
  misc_feature 241, 246, 251, 260, 395, 396, 438: n = A,T,C or G
cactacttagggcgaattggagctccccgcggtggcggccgcccgggcaggtactgtggtattaaaccatgaaccataagatctggtttacgacaagaaaactgaggtcctgaaaattgatcatgcacagctcttctgaagagctaagactggatgcaaggttcctgacttccaggccactgctctttccactttaccaggctgccaacaacctaagaatttcagttttggaggttttacnaattngcccnaggcgaaangattgtgctaacaagggatgttactgaaaagaattgggggtggcaagatcacctccctggttctttttttcttttgttctttccagtatttttctatactgatgtttaatgttgtcaggatgaacgacgacatanncacgtttggtaagacattctcattaaacacccaggttgaacnca

SEQ ID NO: 1752 - DNA, 412 bp, Homo sapiens
aggtacccattaaccccacttaaacttttctttctgaaagagacaaacttgctaaattatcatgagagaaccaaagaattctaatgaatcattttatttaaaaaataactacagttatcctttaccaaactaaaattccaggtctgcaacaacttcgatttggcacagagttgccgcaaagcttaatgtgtatatttacacacttcagccctcttaaaagccatcctactattgatgtccccatcgagtccttagtttcctatgtttctatgtttctaagtggaacagcaagtctcacctacctttagagtccacgctctaattgctttcattcctttataaatatgctggagcctcacttaaaagcttgggtttcgggccgcttctagaacctagttgggatccccccggg

SEQ ID NO: 1753 - DNA, 188 bp, Homo sapiens
  misc_feature 5, 48, 67, 74: n = A,T,C or G
ccggncaggtacgcggggagagaatgcaccctcgcagctttgcctgantaaacattaccaagcactnacaaggntgcctagcacgtctgccagaatcatgtgaatttcaggaggaaaatacgtcgttcacacatctcaaggaacggcacaggctcgtgagggagcattcttgccaatgcacatggtaa

SEQ ID NO: 1754 - DNA, 401 bp, Homo sapiens
gtatcgctcctatagggcgaattggagctccccgcggtggcggccgcccgggcaggtacaccgcataggaaggactctcttactagatgagctagatattcaagaactctttatgagatcgtctcagactggtgactggacatggttgaaagagttttatcaaagactcattgatcagaagtggcagaggaagaaaaagagcaaagagcactggtatcaaaaggcaattctttccaagtttttatattacagtatcaatggtgatggagccgctcagcctgtctcatccaccgcagaacagcaggaatcgtccagttcagatcagacaaatgattcggaaggggcttcatggcctgctcccttcgaaatgccttcttcagtttctgaagatcccagtgctt

SEQ ID NO: 1755 - DNA, 483 bp, Homo sapiens
  misc_feature 94, 133, 168, 218, 242, 301, 318, 323, 330, 336, 343, 347,376, 379, 392, 397, 414, 418, 420, 432, 444, 445, 450, 451,461, 462, 465, 475: n = A,T,C or G
cgaattggaagcctccacccgcgggtggggccgggcccgcccggggcaagggtacccttggattgccgcttcgccgttggaagaatcaaccccntgggggccaagaaccaaaccaaagggaataaacccaagnaatttgaatggttgggacccttgtcttcttggganggggtcccgggcccttgggaaagaatattccccgggaaaaacaaagggtngttcaattcaaaagccttgaaagnaaaccaaaccgggttggaatttttcctttcaatttggcccaaatttgaaaggggttttngaaccgggtcccaattntttancaattcngaattngggaacngggncccgccttttttaaaaaaaacttaatttnggnaaattcccccccnggggnctttggaaagggaaaantttncnattttttaaaancctttttaattnngaatnncccgtttttnnacnctttttaaangggggggg

SEQ ID NO: 1756 - DNA, 596 bp, Homo sapiens
  misc_feature 515, 584: n = A,T,C or G
ccgcggtggcggccgcccgggcaggtacgcgggacttgcttatggctctaaccactatcttcatttccttcaagcgttacgactgtaacatgcctcttttctctactgttctttagaaaaccacattctggccagtggctctgtccggattcctaggtcatgcttcttgaatcggggggtctacagatcgcgcccgtcttcatccaggatgccggcaactacacctgctatgcggccaacacagagggctccctgaatgcatcggccacgctcactgtgtggagtaaggagcagccctcgcacgtcggccttctgttagccacggtttaatcatcacgtcatcgtgtgctttggggatgtcagcatgcccttgggcttgctaatttaatcaaaagagaatgattatttttacaactaatttatagaaatctgttgagaaattaaattttcaatgtctaaaagaatacctagaaaatgtattcagagatttaataggggtattgcaggagaagacnaaagattgactttgtaaagtcagtgggagaaattacacaaaactagctcaaatcacaaaaattggatanggttggttaatt

SEQ ID NO: 1757 - DNA, 460 bp, Homo sapiens
ctacttagggcgaattggagctccccgcggtggcggccgggagaagggccttccaaccctgagctctgtgagaggaaatctcatcagcagcaaaccctcacatgtgacctggaaaaaaggaggtatcttttaatagacaatgtctggatctttagtgagggtgatttagatataatatgtccgtttactttcaaaagggaaaaagtatgggtcactcagaaattcctgctgtagcttagatcatcgatcaagttcacagcgagtccgtaatttccaaaattcagacagtttcatcttagccaaaacatagtgtctgcagtgtgggaacgctgaagacagccggcccaacaccctgctcagggaatcccaaagcctccctgcgatcaggagaaggaagcctagatttctaggttagtgcagcccactagcaagagaataaaagtcttcggtgtcaagctct

SEQ ID NO: 1758 - DNA, 723 bp, Homo sapiens
  misc_feature 527, 553, 575, 713: n = A,T,C or G
ccgcggtggcggccgcccgggcaggtacagattagtgtgcacagagatctctgtagaaagagtagctgccctttctcagggcagatgatgctttgagaacatactttggccattacccccagctttgaggaaaatgggctttggatgattattttatgttttagggacccccaacctcaggcaattcctacctcttcacctgaccctgcccccacttgccataaaacttagctaagttttgttttgtttttcagcgttaatgtaaaggggcagcagtgccaaaatataatcagagataaagcttaggtcaaagttcatagagttcccatgaactatatgactggccacacaggatcttttgtatttaaggattctgagattttgcttgagcaggattagataaggctgttctttaaatgtctgaaatggaacagatttcaaaaaaaaaccccacaatctagggtgggaacaaggaaggaaagatgtgaataggctgatgggcaaaaaaccaatttacccatcagttncagccttctcttaaggagaggcaaanaaaggagatcagtggagacatntggaaagttttcttcactggaaaactgctactatctgggttttatatttctggtaaaaatatattgaggcttccagaactaaaaattaaaacctttttgggtccccttgggtcctggaacatttattgttcctttttnaaagaaacca

SEQ ID NO: 1759 - DNA, 343 bp, Homo sapiens
  misc_feature 338: n = A,T,C or G
aggtacgcggggagctctagtccaggaggctgagacttcgagagggacttagagaaggcagacgcatcccgaactcgctggaggacaaggctcagctcttgccaggccaaattgagacatgtctgacacaagcgagagtggtgcaggtctaactcgcttccaggctgaagcttcagaaaaggacagtagctcgatgatgcagactctgttgacagtgacccagaatgtggaggtcccagagacaccgaaggcctcaaaggcactggaggtctcagaggatgtgaaggtctcaaaagcctctggggtctcaaaggccacagaggtctcaaagaccccanaggct

SEQ ID NO: 1760 - DNA, 131 bp, Homo sapiens
aggtactactcttttccttatatgatatatgaagaaacagaggctcagagaagttaggcactcactctgagtaaaatgccaggagcagacccacgtggtgaggaactgaggcctcttaccaagagccatgg

SEQ ID NO: 1761 - DNA, 521 bp, Homo sapiens
  misc_feature 399: n = A,T,C or G
gggcgaattggagctccccgcggtggcggccgcccgggcaggtacaaactcgggcctcactttttttctgggacagctgtttgccctgtgttacagaatgcatgtgaggactagatatttaaacatatgatgcctggccacagagaaggtatttgtaattggattctcctggacagcccagcctctgaagttctagaattaggtgcctcctttgcccaaaggctatcagctattggaggggagggtggcagtatgtccctcactgggtagctgtgaacactaactgacttcaccagtgtaaagtgcctggcacagggcctggcacagaggaagccagagtcaatgttgtctagtatcactttggaaggagaataagtctatgaaatgcattaaactcancagggaaagtcctaaggagtagtttctccaggggccacagaagaccctttgggtctctatgagaggccccaaggcaacacagggcagagaggtctttccggtgagggcttgttcaagtacct

SEQ ID NO: 1762 - DNA, 552 bp, Homo sapiens
  misc_feature 174, 198, 237, 256, 260, 306, 323, 351, 372, 404, 489, 494,515, 550: n = A,T,C or G
gtgggcgggcccgaggtacttttgcttggaattctttaagaagggtggggggtcgggagaggcttggcagcataaaggcaggcccgctctgggctgaccgtgctcctgacctggatgcagaactgtgggaagttgccctcctttgttcttgcttccttgctccctctttttaanccccgtgtggtccaagggggaagnagggatgggggttgttcccgtggaagccaccaatgggcncattggtcaacaagccaanccangcctttcttgggccaagttttccctggaaagggaccaaggccaaanggtttttggaaccaagnaaggaataattttaacccccccaaggcnttgggggggccttaaggaagnccaagtaggggaaaaccaagttttggggtttngttggttgccttggccccaatttttgggaccaaggttaattccccttaaaattttccccttggaaccccccaacccttgggttgnaaggnccaattttttaaaaccaaggncccccccaaaaaaaattaacccaatttaatttccntt

SEQ ID NO: 1763 - DNA, 421 bp, Homo sapiens
ccgcggtggcggccgaggtactactgctgtcccacatgctctccaggatcctgaagaaaacttctgtcaatggctccatccatttcctggctcctttttgtgaaaacagggtgactatccattagtcaacacccattgggaggctgaggcagcagaatcgcttgaacccgggcagcggagattgcagtgagcagagattgcaccattgaactccagcctgggcgatgagtgaaattccatctcttccagggtggtgcctcctttccttccctgctggtttcttggcacaagggattctggaagactcaggctgtttctcgttccatacaaaatggctgaccaagtccattactgggagctctgcccatccagaaagtttttcctctcgctcgggaatacagccactgaagggaggtaaaag

SEQ ID NO: 1764 - DNA, 504 bp, Homo sapiens
  misc_feature 6, 16, 20, 31, 36, 40, 42: n = A,T,C or G
ggcganttgggagctncacngaggtggcggncgccntctngngtcatcgatgagcctcgccctgtgcctggtcccgcttgtgagggaaggacattagaaaatgaattgatgtgttccttaaaggatgggcaggaaaacagatcctgttgtggatatttatttgaacgggattacagatttgaaatgaagtcacaaagtgagcattaccaatgagaggaaaacagacgagaaaatcttgatggcttcacaagacatgcaacaaacaaaatggaatactgtgatgacatgaggcagccaagctggggaggagataaccacggggcagagggtcaggattctggccctgctgcctaaactgtgcgttcataaccaaatcatttcatatttctaaccctcaaaacaaagctgttgtaatatctgatctctacggttccttctgggcccaacattctccatatatccagccacactcatttttaatatttagttcccagatctgtacct

SEQ ID NO: 1765 - DNA, 350 bp, Homo sapiens
ccgggcaggtaccccccgaatggccttgtgcctccaaaagcctcacgctgcaactttgctgctcctgtctgttgcccagagaggcctcacacaggcctcagaaatgtttcttgtcacacaaagcttttggtagccgattccaagcgagggatttaatccttacatttttgcccatttggctccaaggaaggcttattagacctgtttttttgttgttgttgtttttttttcttaaaaacaaaatgaatgaatgaatgaaaagagaagcaatggtgagccctctcctgctggggcgccctgggtgggccttgcccgtcctgcagcagagaaatcagtcagcagcgaagagc

SEQ ID NO: 1766 - DNA, 567 bp, Homo sapiens
  misc_feature 2, 27, 31, 33, 38, 44, 46, 51, 53, 58, 66, 68, 76, 90, 92,98, 109, 118, 126, 138, 169, 186, 214, 260, 262, 268, 270,295, 304, 309, 311, 313, 323, 330, 352, 358, 360, 364, 374,377, 382, 384, 392, 419, 428, 429, 462, 465, 482, 495: n = A,T,C or G
  misc_feature 506, 545, 547: n = A,T,C or G
gnaagccctgccactccggccggggtngggncngggcnccgcgngncaatntntactnccccaagngngtaattcnttcttaggtgggcntntacctntttttggttgncctttcccntgggtggnttggttggtggnggaataattttttaaaaaggggggggggccntggggaaaaaaattggnttggccaaaaaaaaaaccaatttggttncaaccttaacctttttaaggaaaccaatttttaatttaattttggntncaattncntttcggcctttgggttttttccttnaagggtggnaaatngntntaaaaatttnaatttcnttccccaatttttttcccaaancccaangnaaanttgggttggnttnggggncnccctttcnaaggaaattggggggttaaaaaaaagnttccaaagnnccaagggcccccttttttcctttttaatttttnacnttccaacccccttccantggctaaatttcnaaattccaaanggggtggcccctttttccccccaaaccccaatttggccnangaaaattccctttttcccct

SEQ ID NO: 1767 - DNA, 530 bp, Homo sapiens
ccgcggtggcggcccgcccgggcaggtacataagatttatagatttgatgattgatgatagatagatgatatagttacataatagctaaactagataaccgatgcacaacagagaaataacagatgatatacatagataataaatgatcggtattcatagataagagatagattagctgggtgcagtggctcacgcctgtcatcccagcattttgggaggccaaggcaggcggatcatgagttcaggagttcaagaccagcctggccaacatggtgcaatcttgtctctactaaagatacaaaaaattagctggacatggtagtgtgcacctgtaatcccagctactcgggaagctgaggcaggagaagcgcttcaaccagggaggtggaggttgcagtgagccaagatcacagcattgggctccagccttggagacagggcaagactccatctcacttgataggtcacgttgagtcccaatgcatcttgtaatacctcggccgctcttagaactagtggatccccccgg

SEQ ID NO: 1768 - DNA, 439 bp, Homo sapiens
  misc_feature 204, 220, 222, 231, 249, 264: n = A,T,C or G
tcgactacttagggcgaattggagctccccgcggtggcggccgcccgggcaggtacttttggtgattctaaggtggatccagggttgagaaccactactgtaattttatctggtcattgccaccaacttgactgaatcctctctcttccccacccccaatctattttaaacagcctgtgtcttcccaaggctatagtttcccangttttcggaattttcngnctatatttnttcccaaagtatgatttngggggaaggaggcanaaaccctggtaatttaccatgttggcaggaactaagaattctccctcatgttgtttgtcttcacaggaggtctcagcatgaaacaagcagcagtggtgtgggatgactgccaaaatgggcaccgtgttgtcaggggtcttcaccatcatggccgtagacatgtatctcatctttg

SEQ ID NO: 1769 - DNA, 249 bp, Homo sapiens
  misc_feature 124: n = A,T,C or G
cgcccgggcaggtaccacttgggattcctggggtgtattgatatgcggagccagcagggctggcgatactttcaccagcctctttctgactctgtctccatgtcccaaggccacagaggggacnaggcagagagcagaccgggggcactgccctcagaggaacttttggctgcattgttagcacagggccactccaaagaggacagatctattttaggacatagagcagtcaagcccccaaatgtacct

SEQ ID NO: 1770 - DNA, 257 bp, Homo sapiens
ccgggcaggtactcattactcctttgagggaggtctgaggggtgttgtcacctgtgcctcttgtgtccagctaagaaccgggcgccgcgagaggtctgggagggcctgagcccaggggaactgccattcctgagtcagcatgcccagggcttgctaatgaaatccagatgttagacagaaaacaatcatcgcccccacccatctggcagctcgggtttcttggagattgcaaaaaaaaaaaaaaaaaaaaagtacct

SEQ ID NO: 1771 - DNA, 546 bp, Homo sapiens
ctcctatagggcgaattggagctccccgcggtggcggccgcccgggcaggtacagagctactgtcttcatcttttattgagagccaaaccaggtcttatctaaatgacaaaaaatattacagctaacaaaagcaaaagtggtgcttttatcaaggaaaccaatattttaaaggttaatttagatagatatataaccggaaagacatttattagcatgctgaaaataacactgatgacactcagaatacacctggtctcttactttatttaacagagaaccatggcatccaggtaaccagttccaacttttcctaccattgattttatggttttctaaacaattatctttttccctaagtgggctagaaactctttcatttgaaagacctgagtttaatggcacctataaataggctcatataaaaatgtagtaaattgcaacaaatacattggcaccacaggaagtaagctctggagttagatgtgaacataataatattgctgtcaccaaaaagggggagaactctactggcagaaaatgtccct

SEQ ID NO: 1772 - DNA, 349 bp, Homo sapiens
ccgggcaggtacttttttttttttttttttttggtagagatgggtttttgccgtgttatccaggctggtctcacaagctcaagaagatccacctccctccgcctcccaaagtgctgggatcacagacatgagccactgcactcagccaattttcacgaaggtttaattttagttaggaaaaaatgaaatcacaaggaagcaaaaaaataaagaaggtaattacattttgtgaaatgtggttaatggaacaatggagatataagaggtggagaaaatcaagatatagttaaagaaatgacaaggttcactaataggttcaatgggacgagtgaaagagggttaatggaag

SEQ ID NO: 1773 - DNA, 166 bp, Homo sapiens
  misc_feature 6, 142: n = A,T,C or G
ggcggncgttgcggcgcgcgcggtccatcgcatggcgcaggcggtcgcgcagcaggcgccggttcaggaggcccgtcagctggtcgcgctggaagccgtcggcgccgtccagcggcgcgcgcgcgtccgtcagcggcgccgncaggggcccttggcgacttcgggc

SEQ ID NO: 1774 - DNA, 218 bp, Homo sapiens
  misc_feature 199, 202: n = A,T,C or G
atcgactacttagggcgaattggagctccccgcggtggcggccgttgtttttctccacatcatagccggcggcagccaacgcttttttcagagcagccagagaaactccgctacgctctttagaggcggccacagccttggtgatgagctctgacaccgggggaccggacgccttacgaggcgtacctgcccgggcggnccnttttaaactagtggga

SEQ ID NO: 1775 - DNA, 358 bp, Homo sapiens
  misc_feature 37, 89: n = A,T,C or G
ccgggcaggtacttttttttttttttttttttttttnggggagagacaaggtcaccctatgttgtccaggctggtctcaaactcctganctcaagggatccccctgcctcagcctcccaaaacgttgggattacaggcatgagtcaccatgcctggcttaaattaacttttaggttcaataaatcccaataaaaatcccagcagactttttttttttgtggaaattgacaccgtagattctaaaatttaaatggaaatgaaaggactaaaaagaacaaaagacaaacttgaaaaataggaatttggaggacttcagttaccaaatatcaaggtattacaaagctccggttatttaaaa

SEQ ID NO: 1776 - DNA, 794 bp, Homo sapiens
  misc_feature 472, 499, 515, 572, 636, 660, 662, 672, 689, 692, 697, 776: n = A,T,C or G
ccgcggtggcggccgatgagaagaagaaggggcccaaagtcaccgtcaaggtgtattttgacctacgaattggagatgaagatgtaggccgggtgatctttggtctcttcggaaagactgttccaaaaacagtggataattttgtggccttagctacaggagagaaaggatttggctacaaaaacagcaaattccatcgtgtaatcaaggacttcatgatccagggcggagacttcaccaggggagatggcacaggaggaaagagcatctacggtgagcgcttcccgatgagaacttcaaactgaagcactacgggcctggctgggtgagcatggccaacgcaggcaaagacaccaacggcccccagttcttcatcacgacagtcaagacagcctggctagatggcaagcatgtggtgtttggcaaagttctagagggcatggaggtggtgcggaaggtggagagcaccaanacaggcagccgggataaacccctgaangatgtgatcatcgcanactgcggcaagatcgaggtggagaaaccctttgccatcgccaaggagtagggcacanggacatctttcttttagtgacccgtctgtgcaagcccctgtagtccgccacaagggcttctgancttcacttgccccggtgctggcantntggtggaacngacccattccccttacnttncacangcccatggacttacttttgtaacaacttctaccaacacttgcccattaaaaaaaaatgtgggtttttttttttttaatnaaaaaaaaaaaaaaaaaa

SEQ ID NO: 1777 - DNA, 293 bp, Homo sapiens
  misc_feature 182: n = A,T,C or G
ccgcggtggcggccgaggtaccagtgcgaatcatcgggctatccaggtccgagatcctagtctcctgtcggctctgaggaggatggatccttctgcggatacatgggacctcttctcacctttaatatcattatggataaacaggtttttacatttatttgggcttttgctggttagcattnagccctttggatttgtgtccagatttgtcatcaaagaccgcagggcaaggaacttacaggaaaaatcttgttccaaaaagcagctcagggatttgatgaccaaatggttat

SEQ ID NO: 1778 - DNA, 633 bp, Homo sapiens
  misc_feature 53, 118, 150, 151, 170, 185, 189, 216, 222, 227, 228, 257,258, 264, 275, 298, 304, 321, 323, 325, 333, 335, 342, 363,372, 378, 380, 387, 395, 401, 459, 461, 483, 491, 504, 506,508, 512, 524, 531, 535, 538, 552, 559, 563, 574, 577: n = A,T,C or G
  misc_feature 583, 585, 598, 609, 613, 622, 625: n = A,T,C or G
gtatacgatcactatagggcgaattgggagctccccccgcgggtgggcgggcncgcccgggcaggtacattagaaataaccttttcaaaaatatgcaatttctgtccttgaagcctanggagtggggatgcagccacattaagactcatnnattaagccaccttatttgngtttaatcatgatantaanagaagccctttgttattaaccaccaanaaagcncggannatccggcgccccacctggcaacttttaannccctgnggttggaccangaagttggggtattttcctggtncccgtnttcccccgtcccaaaanananataaaagngnaggaaangggtttcttacccccctggcnaatggaagnggttgngnaggaagnaaggaagncctcanggttggggccttttgggtaattcctttattgggggggggttggccaacccatttgggngnaaaaattttggttggggggtcnccccaacnaaggttaggtttncntngggnttggaaaaaagnaaaatgnaagnggnaatggggccaaggngggaagngggnccctttttttnttncctttncntttccaattaatnggggggcgggntttnggaaggttnggntttggggg

SEQ ID NO: 1779 - DNA, 408 bp, Homo sapiens
  misc_feature 330, 375, 390: n = A,T,C or G
ccgcggtggcggccgcccgggcaggactttatagtttaggctggacattggaaaaaaaaaaagccagaacaacatgtaatagataatatgattggctgcacacttccagactgatgaatgatgaatgtgatggactattgtatggagcacatcttcagcaagagggggaaatactcatcatttttggccagcaagttggttttgatcaccaaacatcatgccagaaatactcagcaaaccttcttagctcttgagaagtcaaagtccgggggaattttattccttggcaattttaattggaccccttatgtgagagcagcggctacccanctggggtggtggagccgaacccgtcactagttgggacattgcagntggcagagctcctgntaatcaccactacagtca

SEQ ID NO: 1780 - DNA, 530 bp, Homo sapiens
  misc_feature 16: n = A,T,C or G
cactatagggcgaatnggagctccccgcggtggcggccgaggtacaaaagaaatggctctcacttcctggattggcaccagacatcctaccagctgcaattacatcattttttatctatcttctgcttttactttgtgtagggtagggatggggacttacaaatgggccaaagacacttcaacctcaaaaccaaagagaaatccctgcttgcagagatacaaagaaagtaactctccctcttatgaaaagcaaccaggaactctactccagttatgagggccactgatggtgtgggagagctatcaagaagattcttcatagacgtggtgcaaagacagtgagaacccgggaaatcacattcatgggacacttgctcttaccgtcatcaccctctattctatctcaactttggccccatcaaatctaatgataaacaaaagaaggtaattacatgtagaaaatcaaagtgaatgggaatgtggtggtgtgaacatcccgcgtacctgcccgggcggccgctctagaacta

SEQ ID NO: 1781 - DNA, 683 bp, Homo sapiens
  misc_feature 64, 83, 105, 152, 247, 323, 361, 402, 414, 499, 508, 532,536, 548, 572, 580, 582, 610, 612, 620, 627, 638, 658, 672: n = A,T,C or G
gccggtgggcgggcccgaggtaacgcgggggggttcctttaaaagaaggtaaagaagcaaaccntgccttttggggaagccangaagaaagaaggggaagaaaangccagccattctttggccctgggaatggaggccccagggggggaacnaccaagaaaagaagaaaagcccccactttattctcaattttaaaatccttttaaccaaaccttcttctttggccaaaggggtttcccccttgggntttggttgaaaaaaattaccattggaaggaattaaaaaattccaatggaaaagggcccaacttaattcaattcccnttccctttccttggcctttggccaacaaaagttttttnccttggggggccttggggaaccccgttttttccaaaccaangaaggaggggcntttaatttttggaacctttttttattgccttaggaaaaggaattgaaggggcttttttttgggggaaattaaggggccccccaanaaaagtttncccttgggaatggaaccccggccnaaanttttccgaaagncccccctttcccccttaaagggcncccaagtngnttggcccccccttttccccgggctttgntnccaaattngccccantctttttccgnaagttggggttccccaagtnggttacctggaatntttgggggggt

SEQ ID NO: 1782 - DNA, 476 bp, Homo sapiens
  misc_feature 443, 444, 445, 449, 451, 452, 456, 458, 459, 460, 461: n = A,T,C or G
ccgcggtggcggcccgaggtacgcgggatcactcaatttctctgaggacacagataggatggggtgtctgtgttatttgtgggatacagagatgaaagaggggtgggatccacactgagagagtggagagtgacatgtgctggacactgtccatgaagcactgagcagaagctggaggcacaacgcaccagacactcacagcaaggatggagctgaaaacataacccactctgtcctggaggcactgggaagcctagagaaggctgtgagccaaggagggagggtcttcctttggcatgggatggggatgaagtaaggagagggactggaccccctggaagctgattcactatggggggaggtgtattgaagtcctccagacaaccctcagatttgatgatttcctagtagaactcacagaaataaagagctgttatactgcnnnaaanannaaanannnnaaaagtacctgcccg

SEQ ID NO: 1783 - DNA, 398 bp, Homo sapiens
  misc_feature 3, 19, 40, 92, 111, 115, 134, 324: n = A,T,C or G
tanggcgaattggagctcnccgcggtggcggccgcccggncaggtacatgggagttgtaggtgagcagccgctccagcagcgagtatcccantccatgcttctgggtcagngganaacgcaccacaggccccanctgccgagggtctcctgccagcaccagctgccctcctggatcacctgttccctttacttccatcaagccctgctatagctaccagactctcaggctccatgcagtggccagcctcatcgatgaagatgtgtgtgaagtgatcaatgggaaactgggccgagaccaacctgccggcagtgatgagggtggnaattaagacccggtattcctgcagcttcttcttggcgggaaatacatactcccccttctttgcgtcccaattgc

SEQ ID NO: 1784 - DNA, 644 bp, Homo sapiens
  misc_feature 4, 58, 73, 107, 147, 152, 154, 165, 167, 184, 198, 212, 216,225, 238, 252, 259, 263, 283, 287, 297, 300, 311, 319, 320,324, 340, 342, 346, 347, 348, 349, 361, 382, 383, 385, 396,400, 402, 407, 415, 422, 431, 450, 456, 462, 464: n = A,T,C or G
  misc_feature 482, 484, 492, 499, 516, 534, 538, 548, 550, 558, 579, 582,596, 600, 602, 613, 616, 628: n = A,T,C or G
cggnggcggccgcccgggcaggatacatgggactacaggcacgccccaccatgcccanctcatttttgtattnttagtagagacagggtttcaccatgtttggccangatgatcttgatctcttgacctcatgatccgccccttctnggccncnccaaagtggcntngggaatccacaggcggnggaggcacaccaancaccccttgggcancatnctaaattgnatttacctccttntgtaaaacggagtnagcagcnaaanaatccttaattgcaggtagnggcnccaaaaaaanttntaatgtcttanattcttannaaanttcctttttaaccccntntaannnncaacccaaaagnggggaaaaaaaataaaattgnngnaatattttttnggcnanttaanaattaatnaacgcgngttgtaatnggaaaacgcccaatttaanccaacnaacaantnggaaaaaccacggcaaananccaaaaantgccagncgaattctttgctaaanggttaaaaaaaagggggncaanaataaaaaantntttgggangaaacctttttatttaaaagnccncacttattgggggntaangncttttaatatnttntttggggggttngggggggggaaaaaga

SEQ ID NO: 1785 - DNA, 221 bp, Homo sapiens
atagggcgaattggagctccccgcggtggcggccgcatcctgactaccaggatccatgagcttaaacaggccaaaatgagcacagtcatggataccgttggccggaggcttcgggactccctgggccgaactgtggacctggggctgacaggcaaccatggagttgtgcaccccagtcttgcggacagtgccaacaagtttgaggagaacacctactgctt

SEQ ID NO: 1786 - DNA, 376 bp, Homo sapiens
ccgcggtggcggccgaggtacatagtcttcaagtttcaaaaatctcttcctataatttgattccaaatgcttagcaaaatcaaagtcacagtctcaaatttgaatgtatgtccccagcgtcattcctagtatcacattttatactaatcagaaaatcaaaagccacactaagttatgtaaagagagaggaattaataccaggacttggttacacggtattgtcaagctgaaggaggaaaaatggaatgctgagctcacacacagataaatgtctgcaggaagcaactcacctgctaagtctgttggcacagaagggaacaggtgggcttcatgaaacaaaagagcacagaggagggcgctgtgattgctggagctt

SEQ ID NO: 1787 - DNA, 365 bp, Homo sapiens
  misc_feature 354: n = A,T,C or G
aggtacttacgttgcctcgtgtcaccaaaattggtgtggctgctgtggtgcggggggctgcactgatggcaccccttcctgtcttcatcaagcagctgcccttctgccgctccaatatcctttcccattcctactgcctacaccaagatgtcatgaagctggcctgtgatgatatccgggtcaatgtcgtctatggccttatcgtcatcatctccgccattagcctggactcacttctcatctccttctcatatctgcttattcttaagactgtgttgggcttgacacgtgaagcccaggccaaggcatttggcactttggcgtctctcatggtgtgtgctgtggttcatattnctatggtaccc

SEQ ID NO: 1788 - DNA, 384 bp, Homo sapiens
ccgcggtggcggccgcccgggcaggtacgggggacctccttcagtggctgtattccgagcgagaggaaaacttctggatgggcagagctcccagtaatggacttggtcagccattttgtatggaacgagaaacagcctgagactactactgctattcagtcttccagaatccttgtgccaagaaaccagcagggaaggaaaggaggcaccaccctggaagagatggaatttcactcatcgcccaggctggagttcaatggtgcaatctctgctcactgcaatctccgctgcccgggttcaagcgattctgctgcctcagcctcccaagagccaggaaatggatggagccattgacagaagttttcttcaggatcctggagagca

SEQ ID NO: 1789 - DNA, 125 bp, Homo sapiens
gggctggcgcggtgcatcgtgggcactgtagtttccgccgcgtttatggccgcgttaagtctgagtgccgctttgagttgttgaatgaagtgaacttcatttgtcagcgttcggtacctcggccg

SEQ ID NO: 1790 - DNA, 301 bp, Homo sapiens
actacttagggcgaattggagctccccgcggtggcggccgaggtacgccaaaggatccgatttgcatagcggagctccagctgttgtgggaagagaggaccagccggcaacttttatccagctctaaactttatttcctcccagaagacactccccagggcagaaatagcgaccatggcgaggatgaagtcattgcttgtttccgaaaaggtgattgtgaagcttgaagacctggtcaagtgggtacgcgggataccaagtttatataatttgaaaaaaaaaaaaaaaaagtacctgcccg

SEQ ID NO: 1791 - DNA, 392 bp, Homo sapiens
cactacttagggcgaattggagctccccgcggtggcggccgcccgggcaggtacgtttgctcatacacgcacatccaaaagcctgtgcctcattcctggccatgggtgaggacttggtctgtcacggctgatgaggactcccacaaccggccaagttatgtcttattatacacccccagaaagagagaaagctgccttctggaggactgattccacatgctatattcagctgagttgatttctgtgtctatttcaacccataacctgaagaatgatcaccttattccttattcattaattttcttgattaatagggaaacttgggaatagctataaagtaaaacttgggtggaacctggggccctggcatcacacaagtgtgattaggatgg

SEQ ID NO: 1792 - DNA, 362 bp, Homo sapiens
ccgggcaggtactgcttcaaaaggcatgtataactaagtcatatcaaaactaaaatgacaaatgggttattttcaacagaacactttgaaaggaaaaagaaaacaaacaagaactttaggatattctttttgaaggcaactgcatgatgctagattgtgtccacggactagatttctaaaaggccatctaaaatacatttttaaatacttattcctttcacaggtaatatcttacgaagtttgattatttttgaattgtcataatatggacttaatatgggaggaaggtagttccaaaatgacagaagtaatcgcttccacatcacttttgtttttctatttacatatacaaacacattttt

SEQ ID NO: 1793 - DNA, 446 bp, Homo sapiens
tatagggcgaattggagctccccgcggtggcggccgaggtaccattctctaactccgtgtgtgatgaaaacgcctccttttctgaccttcaaagtcccctgtagagaccatgcatgctctaagccttagggagtgagaccaacacccatccctgcccagccaacagtggccggggcttgtcttatgtttccatctggtttcttcgtggcattcaatttcatttttttccttttcattttcatgttattttcattattggcaaagaaaatcaaaatgtttatagccaaataacaaatgtgccatgtaaaagtaagtctggacttaagagtttaaaatttttaaacatcagtttccaagtttatatcatattaatacatttcaggtggataattttatttaaaaaaaaaactatgccttaaaatatcccttatttgcaatatttcagt

SEQ ID NO: 1794 - DNA, 448 bp, Homo sapiens
  misc_feature 234, 238, 326, 364, 377, 392, 398, 402, 403, 410: n = A,T,C or G
aggtactttcacttttgtgaataattttattttccaaccatggaagcatcatcgtgaggttgaaagaggatcattcttggaaaatacaattacttaacagttatgtgacctgggacaaagttgagcctaaatgtcctcatcataaaatggaactaagtaaccctcataagaatgacgttagtgtgtgggacacctgtttgggacccagtagtggggcagttgaaaaaaatatgntggnccatttctgggaaataaatcttaataggtcttctaatggggtggggggaggatctggaaaaaggcccgttttttctttccccctttcncccatttttggtggtattggtattcttgccttcccacntggatcttgccancaaggggaaaggggnaaagangggnntatgggntaaacatctcttgggggcacctccagggattcttctta

SEQ ID NO: 1795 - DNA, 583 bp, Homo sapiens
cgaggtacacctgaagccggccctgattttcataattctcactcaggttattcatggccattaaggctttttccttaatgtgtggatcagttttgttgatcatgtttgcaataattgggaggcctcccaatttgcggattgtctcttgattgcatgaataattggcattgttgctcagagtgagcaaagctacctgttggatgaaaggatcatcagatttctgaagcaaggcaaggaccttcctgagatcgcggacacccagaatctcatcaatttcataaggaaaggggcgcttctgcatggcaacgggtcttcttcccctccctctgcgctgggtctcgggctcagagtctgaatctgactctgtgtcagtccacccggactccccttcctcagaatcagggacctctgccaggaaagcctgtccgccattagcagaggctgcagcagctgctgcagccccatctccaggacggaagcccatccccagttcgtctacttcaactttgcttttcttgcccttgcccttgcccccattccgggacctggttacacccttgccttcactttgggtacctgcccg

SEQ ID NO: 1796 - DNA, 177 bp, Homo sapiens
  misc_feature 164: n = A,T,C or G
actacttagggcgaattggagctccccgcggtggcggccgcccgggcaggtacttttttatttcagatccatataattgaactattttgtctagtttttcctacctttcttctccacacttctgctaaagggatccttctaaaacccaagtataatgaccccgngtacttcttgccc

SEQ ID NO: 1797 - DNA, 328 bp, Homo sapiens
ggcatttctcccagggatctctgtgcttccttttgtgcttcctgtgtgtgtggatatttaaaggggctggaaatgtgcaaaaacatgtcactacttagacattatattgtcatcttgctgtttctagtgatgttaattatctccatttcagcagatgtgtggcctcagatggtaaagtcagcagcctttcttatttctcacctctgtatcatcaggtccttcccaccatgcagatcttcctggtctccctcggctgcagccacacaaatctcccctctgtttttctgatgccagcttctcggcacttgctatttctccccgcgtacct

SEQ ID NO: 1798 - DNA, 418 bp, Homo sapiens
  misc_feature 96, 119, 130, 131, 143, 144, 163, 183, 188, 195, 208, 231,242, 250, 266, 285, 295, 299, 304, 306, 320, 322, 324, 326,361, 391: n = A,T,C or G
tggccgcccgggcaggtacagcgggggttctcttaaaaggcagtgtgggaagacacttgacagagtgttttgagaaagaagtggtgggacgtcacntgtctgtggaaaattttcaaggnaaaacctgaanngattcattggannatgaaacaagtgtggcaanaatttgtataacctctttgnattgnttttcangttggagactttntaaatgggtagtgaaaaaaatcnttgttccaatntgtccagntgtaatccattttaanttttgtttccaccaagacnccaaccaagnaaanttggntntcccttaaaaccgngngnantttccgtccaaggcctccatttccaatttttgttnttaaatattttttggggtttgtttttaacntttggcccttaacctttcccccttggg

SEQ ID NO: 1799 - DNA, 355 bp, Homo sapiens
ccgcggtggcggccgaggtaccatggacttcaaagattgggaacaggtgggaattgccttaaaacaagtttgtaaggaaggaaaatttatccccctaacagcctggtcaaactgggctatagttaaagcagcctcggaaccgtttcaatcggaaaatgaggcttatcctccagcagaaagaatttctgcagaggaaggtggtgatgctgctgaaggaggagaggatagttgaagaagattttgaggaaaatacagacaaacctggagatgagttaatttcttttgaggagcacgtgggaccttcagctgctcctaaaatagagaagccatatatgccaaagatgtttaaaacaaa

SEQ ID NO: 1800 - DNA, 164 bp, Homo sapiens
aagccactgcaatgacgccggcattggcggcgccgaagaaagcctgctcgaccggatcggtgagggtggtgccgccgctgatcgagaagttgatcacgtggacgccgtcagcgacggccttctcgatggccgccacgctgtcgccaacgtagcagctgttgcgc

SEQ ID NO: 1801 - DNA, 485 bp, Homo sapiens
ccgcggtggcggccgcccgggcaggtacgcgggatcaaaatgttaagtcaaatctgtaatactttggctaaaattcataaagtaagccctagagaaaatacttgaccaccaaatttttgcccaactatcatcacctcccttccccgcctctgttcttgccttttgacatctacatggaagacaagttctttacagcaaatggtaagaggcaggtgacctggtgtgtttgctgtgttgtagttcattgcctgtggcttgggactccttttttaatggagagactagctgtgcaggtgtgtgttggatagggataaagtgctcacccctgccctctctacagtagttggtggtagatttctctctcattttgcctcataatcactttcgagtgcatgtatttacctaagggctgtagctctgtgggatgctaccagcatattggactgacagaaattgattaccttgccactccaacctacgtacct

SEQ ID NO: 1802 - DNA, 260 bp, Homo sapiens
  misc_feature 144, 150, 205, 223, 226: n = A,T,C or G
ccgggcaggtacaaactcgggcctcactttttttctgggacagctgtttgccctgtgttacagaatgcatgtgaggactagatatttaaacatatgatgcctggccacagagaaggtatttgtaattggattcttctggaccangcccancctctgaagttctagaattaggtgccccctttgcccaaaggctatcagctattgngaggggagggtggcagtntgnccctcactgggttagctgtgaacactaactgact

SEQ ID NO: 1803 - DNA, 414 bp, Homo sapiens
ccgcggtggcggccgaggtacgcgggggaaacaaatcaaatgtttgttctcaaattcttactctgtcatttattattctccatgtttttgtaactgcttccttggagatatttaaacataaatatatacagagagggtgaagatggaggagtgctttttacagttcacagttggtcttttttcatgtgtgacaaggtttttgctgtgttgcccaggctggagtgcaatgccacaatcttggctcactgcagcctcaacttcccgggctcaatcgatcccccacctcagcctcccgagtagcaaggactacaggcgcacaccaccacacctagctaatttttgtatcttttgtagagacagggtttcaccatgttgtccaggcctggtcttgaactcttgggctcaattgggtcc

SEQ ID NO: 1804 - DNA, 787 bp, Homo sapiens
  misc_feature 9, 11, 25, 30, 32, 34, 39, 41, 46, 59, 77, 95, 122, 140,143, 157, 168, 180, 183, 196, 198, 202, 218, 219, 230, 248,259, 305, 312, 319, 326, 347, 381, 382, 383, 387, 388, 411,452, 458, 460, 481, 482, 485, 490, 492, 497, 504, 525: n = A,T,C or G
  misc_feature 540, 542, 572, 581, 595, 607, 630, 645, 678, 697, 723, 725,734, 745, 754, 758, 768, 772, 773: n = A,T,C or G
cgggttggngncggggcccggaagngttancngncgggngnggaangcccccaacaaangttattccccaagttccnaagttccttgaagggccntggtggaatggggaagggaattggttngccttggaagaacccttnttngggaaaaccaaagngcccattttgngaaaagaacttngcncggttgggcccancnaccnaaagggaaaagcccannggttattgttngaattggaacaattcaangcctcggaacnggcccttgggccaacctttggccttgggcaaagggggggaaccaangtttggnggggccnttggggnaaggggaaaaaaggtttggtnccaaaattaaccccttggttaaaaaagggaaaannnaagnnaaattgggggccttcttaccttngggtttggcccaaagggaaaggccttttttccaaaaggccnccaacncngggggttggggggggaacccnnccnaaggncnaaggnaatttgnaaaccaatttccccaaacccnggctttccccccttncnaattgggggttttggaaaccccaatttggnttggaaacntttgggaaaggggnttccaaggtttncatggttggggggaaattggggnttaaagggggaaagntttttaaaaaaaaagtaattttaaaatttttgncccatgtaaaaaaaaaggnaagggggaaggtttccttgggttttntnttccaaagnaaagggggaangggccaagncccnaaaattgganaaannaaagaaaaaaattt

SEQ ID NO: 1805 - DNA, 432 bp, Homo sapiens
  misc_feature 2, 253, 358, 363: n = A,T,C or G
tntagggcgaattggagctccccgcggtggcggccgaggtacgcgggtgactaccagcatccatactaatctgggagatccagggatgtgccttgttatggaggggactgtgactcctttaagacctagaccatcacttgggagatttgttttggtctctgggtggattgtggatggtagacagatcacaggcccagcaggacctggctttggccttgctggttatagaatttctattctgcagagctaagantgcaaactaggaccaacattaccaagaggacagaagctatctggggatcctggctggcagtgctcaacttacagctcaagcctgtgataacaggagaggtggagngtgtntttgttgcttcattgtgcattgtgtttcaagcagtaaactaagacttggagggcttaaaatagaaaaca

SEQ ID NO: 1806 - DNA, 156 bp, Homo sapiens
ccgggcaggtacctgcaggcctcctacacctacctctctctgggcttctatttcgaccgcgatgatgtggctctggaaggcgtgagccacttcttccgcgaactggccgaggagaagcgcgagggctacgagcgtctcctgaagatgcaaaaccag

SEQ ID NO: 1807 - DNA, 369 bp, Homo sapiens
  misc_feature 4, 30, 106, 203, 259, 264, 335, 338: n = A,T,C or G
gganctccccgcggtggcggccgaggtacncggggcttgggaagatggcggctgtgtcggtgtatgctccaccagttggaggcttctcttttgataactgccgcangaatgccgtcttggaagccgattttgcaaagaggggatacaagcttccaaaggtccggaaaactggcacgaccatcgcttggggtgggtctataaangatggcatagttcttggagcagatacaagagcaactgaagggatggttgtttgctnacaanaactgttcaaaaatacacttcatatctcctaatatttattgtttgaggtgctgggacagctgcacacacanacntgacaacccagcttatttatttccaaccctg

SEQ ID NO: 1808 - DNA, 223 bp, Homo sapiens
  misc_feature 8, 108, 200: n = A,T,C or G
tttatttntgtgagttctactaggaaatcatcaaatctgagggttgtctggaggacttcaatacacctccccccatagtgaatcagcttccagggggtccagtccctntccttacttcatccccatcccatgccaaaggaagaccctccctccttggctcacagccttctctaggcttcccagtgcctccaggacagagngggttatgttttcagctccatcc

SEQ ID NO: 1809 - DNA, 420 bp, Homo sapiens
gggcgaattggagctccccgcggtggcggccgcccgggcaggtacgcggggagcggaggtgcgtctgtggtgtcagacacctgtgtctcagctctgtcttcctcgggctggctcctgcggatccttcctgggccagaaccgtgcctctaggccacctcccccaagccaccaagcccccgcggtgggccagccttggcccagtgtcacgcaggacagaaatgaccaacagataactgaggacaatggacctgcctgggcatagacttccttaaggtaagtccattttaaaccaacgatttctcgatgacattatttctccgtcgatgttggcagaaatgccagcattgggaaggtaaactaaagagaggtagggaaagttgttcaagttaggcctttgtgatgaaatcaccaaggttttgg

SEQ ID NO: 1810 - DNA, 301 bp, Homo sapiens
  misc_feature 174, 177, 181, 195, 236, 239, 290, 293, 300: n = A,T,C or G
ggcgattggagctccccgcggtggcggccgcccgggcaggtactttcaataaagagaccaatattatttataaaagtagctaaataaataaaagtttctgaaatttatagccaaaagcatacgttcaaaaaataacatttcttcctgattagaagagcccgcgtactttttttntcnattntttcaattcttttnggagggtttttaaatgtttcatgactgggtaacagaggtanttntcgagggggatccttggagaacctgttcttgactttagaagcacttcctgnggncaatggng

SEQ ID NO: 1811 - DNA, 117 bp, Homo sapiens
ctgcgggccccagacatcaaccaaaaactgtatctatcctatttggtgcttagttcattattacacatctagggaaggaacagtaaaattgtaatgctcatggtttaagcatagcat

SEQ ID NO: 1812 - DNA, 381 bp, Homo sapiens
  misc_feature 7, 54, 70, 72, 103, 105, 111, 153, 172, 176, 196, 211, 220,238, 295, 298, 304, 308, 318, 321, 326, 338, 347, 350, 356,367, 381: n = A,T,C or G
cgaaaanatggggtttctccatgttggtcagggtggtcttgaactcccaacctnaggtgatccgcccgcntnaccctcccaaagtgctgggattacaggcgtnanccaccntgcctggcttaaagagataaataattaagggatccttaaaanaaatggaacagtttgtaanaaanataaatttcaaactttttgntaggagggaaaactnttagggctncatactctataattctanaaccatttccttcaaaatgcttttgggtgaccttttcaaataaaatttttaaaaatncantaaaanatancagttgtcanttntttgnggggtgaaaatntaaacccancanctgganttaataccacnatcaaaaaattttn

SEQ ID NO: 1813 - DNA, 411 bp, Homo sapiens
  misc_feature 2, 143, 167, 222, 282, 305, 320, 332, 341, 375, 397: n = A,T,C or G
tntagggcgaattggagctccccgcggtggcggccgaggtacgcggggaagaacaatgtgaactatcaaaccagcaggacctattactataaatgagagggaggaaggaccaaggatgcttcttatgtaactgccttctattnctgggtgactggttgcacagtctncttagagaatccaggaacagagaagaatatataccttccactggaagaatctcanacagcgctgcttactcaggatcagtggcaccagccaactcagcttttgggacaaacccanccaagtgaccaaggacactttangtgcaaagagctgancacatttcatcngggaaaccnaaactccaatgtgcgcccattgtaaccacggttnatccaaaaagacccattcttanatgggcactggggg

SEQ ID NO: 1814 - DNA, 416 bp, Homo sapiens
  misc_feature 291: n = A,T,C or G
acttagggcgaattggagctccccgcggtggcggccgaggtacttttgcttggattctttaagagggtgggggtcgggggaggcttggcagcataaaggcaggccgctctgggctgaccgtgctcctgacctggatgcagaactgtggaagttgccctccttgttctgcttcctgctccctcttttagcccgtgtgtccagggggagaggatgggtgttccgggaagcacaaggccatggcacagccagcagccttctggcagttcctgaaggacagcaagtttgacaganatattaccccagctggggctagagcagaggaacagttggttgttgtgctgccatttgacagtatcctaattcctgacccactgtgagcattaacaagcccaaatacatatcttctagacagtctg

SEQ ID NO: 1815 - DNA, 399 bp, Homo sapiens
aggtactactgctgtcccacatgctctccaggatcctgaagaaaacttctgtcaatggctccatccatttcctggctcttgggaggctgaggcagcagaatcgcttgaacccgggcagcggagattgcagtgagcagagattgaccattgaactccagcctgggcgatgagtgaaattccatctcaggctgtttctcgttccatacaaaatggctgaccaagtccattactgggagctctgcccatccagaagttttcctctcgctcggaatacagccactgaaggaggtaaaagatatctacaagtagaactttgatattattacttcttctactgaacttcatatatattattgcaattgcctattttctccttaaattcttccttcccgcgtacct

SEQ ID NO: 1816 - DNA, 326 bp, Homo sapiens
  misc_feature 69, 99, 288: n = A,T,C or G
aggtacttttttttttttttttttttttttttgggatttttttttttcttttttttttttttttttaanccacactggtttttgttaaaacctcatcantcctgggtgcttgccctcaattcctccatagctatgttagcatatttaatatcttttgctattaatccttaactagttaatccttaaagggctagttaatccttaactagtcccttcattttgtgcattatcttccagtattctccttctctttttttacttcttccctgctacccatgtgctcttggngggtagttacccaacatatacagaatctgcttcccttt

SEQ ID NO: 1817 - DNA, 388 bp, Homo sapiens
  misc_feature 170, 193, 201, 248, 264, 287, 301, 304, 322, 346, 354, 380: n = A,T,C or G
cactacttagggcgaattggagctccccgcggtggcggccgcccgggcaggtacttttttggatacaattttcatagaaaacagcaaacaacagttttataggaaaatctactgctctccacacttctttgtatttagaagagtcttgatgcttctaatcaggcacccanaattccccaaatactgacaaatnagggcagnctatgagatctggctcttgtccccacagtcagtcctcatggggcggngggcagggatcatgangtttactccccctctgatatcangagaaatgtcacanacnttgggggaagggagcaanggatcacttggtaaaccgaggctntcaagatngaccttgttaagtggaaactactctnaagtcacc

SEQ ID NO: 1818 - DNA, 446 bp, Homo sapiens
  misc_feature 402: n = A,T,C or G
ccgcggtggcggccgcccgggcaggtactttttttttttttttttttttttggagagacaaggtcaccctatgttgtccaggctggtctcaaactcctgagctcaagggatcccccagcctcagcctcccaaaacgttgggattacaggcatgagtcaccatgcctggcttaaattaacttttaggttcaataaatcccaataaaaatcccagcagactttttttttttgtggaaattgacacgtagattctaaaatttaaatggaaatgaaaggactaaaaagaacaaaagacaaacttgaaaaataggaatttggaggacttcagttaccaaatatcagggtattacaaagctacggttatttaaaaagtaaaagcaacagcatggtattggtgcaagcntaaaaaaatagagaaagaaaaacagttttataccccgcgtacct

SEQ ID NO: 1819 - DNA, 406 bp, Homo sapiens
  misc_feature 27: n = A,T,C or G
ccgcggtggcggccgcaatattggcanggtcttcgtcggcgaaacgcggtggggcgacggcggcggcaaccggctcctgcagcggcggacggtggccggtcagggccgaatggcatagcagggccagttcattcagatcggcgggaatacgcgcgaccaggcagccttgcgcacgcagggtgcggatagtggcgctggagcaaaagcggtacagcacaacgaccgcagccacgccgcttgcctcgcgcgcggcggcaatggccggcatcacccgttcatcgagttcggactgctcgatcaccagcacgtcggcgcctgtatcacgcggtaactcctgcgccatcgcaaggccagcgctgtggccgcgcacatccagtccaagggcgctctgccccatggcggcaac

SEQ ID NO: 1820 - DNA, 430 bp, Homo sapiens
  misc_feature 17, 40, 41, 52, 59, 67, 78, 93, 107, 114, 124, 154, 175,222, 234, 243, 262, 308, 321, 364, 371, 375, 376, 379: n = A,T,C or G
gttgggccgggcccganggtaccgggccaagccacttcanncccatttggcnaaggttngacaaacngcaaaaacacngcttcttacgggaanggccctggcttgantaaaaanggggctcaancccttgcccgttgtggccttgctttcttcnatcacttgcaaccaccaaaanttgcccaatggccttttgcccaccaaccaacccaaagcccacaattnttggtgggaatnccttgaaanggggccgggccccgcttcntaaaaaaacctaagtggggaattcccccccccggggccttggcaanggaaaattttcgnattaattcaaaaggcctttatttccgaattaaccccggttccnaaacccnttcnnaanggggggggggggccccccggggttacccccaaagccctttttttggttttc

SEQ ID NO: 1821 - DNA, 339 bp, Homo sapiens
  misc_feature 112, 331: n = A,T,C or G
tggacttcaaagattgggaacaggtgggaattgccttaaaacaagtttgtaaggaaggaaaatttatccccctaacagcctggtcaaactgggctatagttaaagcagcctnggaaccgtttcaatcggaaaatgaggcttatcctccagcagaaagaatttctgcagaggaaggtggtgatgctgctgaaggaggagaggatagtgaagaggattttgaggaaaatacagacaaacctggagatgagttaatttcttttgaggagcacgtgggaccttcagctgctcctaaaatagagaagccatatatgccaagatgtttaaaacaaanaagggcct

SEQ ID NO: 1822 - DNA, 449 bp, Homo sapiens
ttagggcgaattggagctccccgcggtggcggccgccgggcaggtactataagctcctacctagaagacataatactgaataccgaagcgaatactgcagaagaacaagccagggcagaaatagagaagatggctgagaaaatcaatgacattgcttatgaaatggaaagccgccgaacctatttcagtcagaggagattgttgctgagttggtttatagttttctgatcccagaggtgcaaaaatactttgtcaaagaaaaagtgaggaaccgcacagcggaaacatattcttgcagcccatcagatcatccacagttacaccggaaagcatggttcaaaaagaaattaactgagggagagcaagatgaggcctcaaatgctgccatgttacttgagaaagaaactcaaaatgagaacaacagctaagattgtgatttttttgtaaaa

SEQ ID NO: 1823 - DNA, 420 bp, Homo sapiens
ccgcggtggcggccgaggtacacatttgacttactgcacagtatattgatcattttaatgggaaactttagctttctactttttatttttgttttttcactttctatgccattatttttgtattctttttcttagtgtgagctctaaaatcaatgttcttgaaaaagaaattattttgcagaagtttggggaatcatgtttgttgaatatgtataaaatagaaacataggctgggcgcggtggctcacgcctgtaatccctacactttgggaggctgaggcaggtggatcacctgaggtccagagtttgagaccagtctggccaacatgatgaaaccccatctctactaaaaatacaaaacattggctggggattacaggtgtgagccgcagcgcccggctcaaaaaaaagggaattttt

SEQ ID NO: 1824 - DNA, 426 bp, Homo sapiens
  misc_feature 193: n = A,T,C or G
aggtactttgggaggccgagacgggcggatcacgaggtcaggagatcgagaccatcctggctaacacggtgaaaccctgtctctactaaaaaaaaataaaaaataaaaaataaaaacatttctgggcatggcggcggaggcctgcagtcccagctactcgggaggcttgaggcaggagaatcgcttgaattcnggaggcggaagttgcggtgagccgagattgcgccactgcactccagcctgggcggcagagccagactctgtctcaaaaaaaaaaaagaaaagaaaaaagaaaaagccactccaggctcactgcatcaggatttgcactgcaacagcatgcccagggcacagtcatgtttgagaaatacggaggacctctgaagtgcttgattctgtgaactcacactgctgtaagcagacttg

SEQ ID NO: 1825 - DNA, 120 bp, Homo sapiens
  misc_feature 5: n = A,T,C or G
ccggncaggtacacaataggatatggggatatacaatgaggaatcaaacagagaagtagctctgctctcagagaatttatattttagggggagaagacacaaaataattaaaattaataa

SEQ ID NO: 1826 - DNA, 276 bp, Homo sapiens
ccgcggtggcggcccgaggtcgccaaaggatcccgatttgcatagcggagctccagctgttgtgggaagagaggaccagccggcaacttttatccagctctaaactttatttcctcccagaagacactccccagggcagaaatagcgaccatggcgaggatgaagcattgctgtttccgaaaaggtgattgtgaagcttgaagacctggtcaagtgggtacgcgggataccaagtttatataatttgaaaaaaaaaaaaaaaaaagtacctgcccg

SEQ ID NO: 1827 - DNA, 491 bp, Homo sapiens
  misc_feature 378, 404, 473, 474: n = A,T,C or G
gcgaattggagctccccgcggtggcggcccgaggtactggggtgagatgatctgaagggtgtttccaatgagaatgacacaaataccaaggactggagaagcccttggaacaattgataaagcttcccacatttttttttttttgagatggagtctcactctgtcacccaggctgaatgcaatcgcatgatctcggctcactgcaacctctgcctcctggaatcaaggaattctcctgcctcagcctcctgagtagctgggattacaggctcccaccacacctggctaatttagtatttttagtagagacagggtttcaccatgttggtcaggctggtctcgaactcctgacctcaggtgatccacctgcttcccctnccaaagtgctgggattcaggcatganccactgcgcctggtcaatttcccacattttcttaagattatgtttggcctacaaaaagctcaacccaanngctatcttatcaagctg

SEQ ID NO: 1828 - DNA, 392 bp, Homo sapiens
  misc_feature 45, 48, 101, 103, 119, 162, 197, 206, 226, 235, 249, 263,289, 304, 341: n = A,T,C or G
ccgtaaaaaagggcccgcgttggcctgggccgttttttttcccantanggccttcccgtcccccccttggaccggaggccattccaccaaaaaaaatttcngnactgcctttcaaaagntttcaaggaaggggtggggccggaaaaaaccccccggaaccanggggaaccttattaaaaaaggaattaaccccaagngccgggttntttccccccccccttggggnaaaaggccnttccccctttccgntgggccggccttcnttccccttgggttttccccggaaccncccttggcccccgcnttttaaccccggggaattaaccccttggttccccggncccttttttctttcccccttttccgggggggaaaaggccggttggggccgg

SEQ ID NO: 1829 - DNA, 295 bp, Homo sapiens
  misc_feature 229: n = A,T,C or G
tgtccctgaaaaaatcactttctttctagaacagtcaaggcttatttcacctcagcccctggttgtatgatactaatacgctctgatactccagggaagcaaccagtgactgagatttgaggattaaaatcaaagcacaatgaactatcatttggctgccccaggcccactaaatccagacagcaaagtgttctcaccattctgagacaccttcggctacacatttctncagccaaaaacctaggaagatgtccggctgacagatgcgcctgttacatgattcagagaagacagt

SEQ ID NO: 1830 - DNA, 664 bp, Homo sapiens
  misc_feature 3, 34, 121, 265, 271, 286, 290, 296, 311, 357, 365, 380,389, 397, 406, 426, 455, 456, 464, 472, 474, 485, 498, 500,508, 510, 511, 536, 541, 564, 573, 592, 594, 649, 655, 661: n = A,T,C or G
tanggcgaattgggagctccaccgcgggtgggcnggccgcccgggcaggtacagtagtagcactcttggctcactgtagcctcgacctccggggctcaagtgatcctcctgccttagcccnacaagtagtgggactataggcacacagcaccatgcccatctaagtttttgtattttatgtagagacaaaggttttcacccattgttgcccagggcttgatccttggagccttcccttggagcttcaaggtggatctgccccacncttggnactccccaaaaaacngccntggggnatttataagcgccgntaaaaccccaccccattggccctggggccctttaaaaattcaaacnttcttaangaaggtccaaaaccnatttctttnttttaatncaacctagnggaaggccttttcttggggnaagaaaaaacctttcccaattttatccgnntggggttngcccttcntnccttttttcgnctttggaattggntnggttttgntnngccccccaaaaaattagggcctttnggttntccttccaattccaaggaattangaacccttntaattttttggccttaatngnaaataaattaattaattaaccttttccaaaaggaaggccctggcccttaattaantgggtnattttnaac

SEQ ID NO: 1831 - DNA, 259 bp, Homo sapiens
  misc_feature 1, 42, 45, 66, 72, 73, 92, 96, 97, 120, 124, 131, 132, 139,148, 154, 157, 163, 173, 197, 224, 228: n = A,T,C or G
ngaccctttgaccaaaatgctaagatgaaaatatagacactnganagaaatccccaaatgatcacnctgtgnnaattaccaaagaaggactnaatnntcagcagatgattgatgttaatnttancatgaanntagacantaaaatgcngaaaanatnggatanttttgtcagngaatctggaattttaaaaaatcanataaaaattttagaagttaaaaacatngtanctaaagttaaaaacaaatgggttttatagca

SEQ ID NO: 1832 - DNA, 440 bp, Homo sapiens
  misc_feature 65, 71, 154, 175, 192, 197, 207, 253, 267, 289, 291, 293,297, 299, 301, 333, 386: n = A,T,C or G
ccgcggtggcggccgaggtactttgggaggccgagacgggcggatcacgaggtcaggagatcganaccatnctggctaacacggtgaaaccctgtctctactaaaaaaaaataaaaaataaaaaataaaaacatttctgggcatggcggcggangcctgcagtcccagctactcnggaggctgacgcagganaatcntttgaattcnggaggcggaagttgcggtgagccgagattgcgccactgcactccancctgggcggcaganccagactctgtctcaaaaaaananangaanananaaaagaaaaagccactccaggctcactgcatnaggatttgcactgcaacagcatgcccagggcacagtcatgtttgagaaatacngaggacctctgaagtgcttgattctgtgaactcacactgctgtaagcagacttg

SEQ ID NO: 1833 - DNA, 311 bp, Homo sapiens
aggtactttttttttttttttttttttttggcaataggagatatgtgagtctgtagacctaggttttattatacaaatatgcagaacaaaatgtgtgtgtccatgtgaactttaaaaattgttatctgttttttaattgtatgctcacatgccggttgtaagtaataatacagggagggtttttgagtatatctctttgtttagcctttttgatgttgctaaatgagtaaagctgtttaagtatttaagtccttattgataagggagccgaggtatttctaagcattactgcatgcccgcgtacttttttt

SEQ ID NO: 1834 - DNA, 443 bp, Homo sapiens
ttagggcgaattggagctccccgcggtggcggccgaggtacacgttgccatggctgggccctgtagacaattgctaagcctttctggtgccactatccttgcccatatcttttcatactgccttcataccatggatctgaacttttgcaagaataccaggattaaccccctgcttgcctggatgttttccccacttccagctgcaaacatctacctagaccaagctctaaccttgcaggccttggagagtcactgcaaatatgctgcctgcaatctggccatctcattgtctagacatgacagcaaagacatattgtttcaattgcatctttggttgaattgttatgctaacaacctttagttactttcacctcgtatcttcatcttggtcctgccactttaacactttaaaactcagttttctctttttaggagtaaaataa

SEQ ID NO: 1835 - DNA, 486 bp, Homo sapiens
  misc_feature 12, 14, 16, 24, 29, 33, 36, 87, 127, 138, 149, 152, 157,164, 177, 178, 194, 212, 230, 242, 273, 278, 282, 301, 309,313, 319, 327, 334, 345, 347, 348, 349, 353, 356, 376, 380,401, 402, 408, 412, 427, 429, 433, 440, 442, 444, 454: n = A,T,C or G
  misc_feature 475: n = A,T,C or G
gcgtggcggccngncnggactatnttttntttnttnctttttgagcacagggtctcacttgctctgtcacccaggctggagtgcacntggatgcaatctcggctcactgcacgccttgacctcccangctcaagaganccttccaactnatnccccncaagtgntctgggggacttnncaggggcacaacatcntaccaacaccttggggcntaaaatttttatggcctnatttcttggaancaagaaatgcggggtcttttttacttcaacnatttnggcncccaaacgccttgtaatcncttcaaanaacntttttngtgggcancttccanaaggtggaatncnnntttnccntgggcacgttcggcaacccntttnccactggaaaagaattgcccnntttggngtgnccccaaccccaattngngccnccttggngntncgaagggggnaaaaaaaaaatttaatttttnttttatttttc

SEQ ID NO: 1836 - DNA, 148 bp, Homo sapiens
  misc_feature 139: n = A,T,C or G
ccgcggtggcggccgcccgggaaggacgcggggattcccaggaggcctcagaccccgtcacctgagatgagagctggatcccggagaagctcaggtctgacccagcattcattgctgtaggaagggctcgtctagactncaagggagc

SEQ ID NO: 1837 - DNA, 411 bp, Homo sapiens
  misc_feature 3, 361, 371, 386: n = A,T,C or G
ctncttagggcgaattggagctccccgcggtggcggccgcccgggcaggtacgcgggggacgcggaacccggcgcggcggcggcacgatggtcatggcgtatttcgtcgagaatttttggggggaaaaaaatagtggctttgatgtcctctaccataatatgaaacatggacagatatcaacaaaagaactagcagattttgtaagggaacgagctaccatagaggaggcatactccaggtcaatgacaaaactagcaaaatctgcaagcaattattcacaacttggaacatttgcaccagtatggggatgtattcaaaacattctacagaggaaattagccaaattgtcactttgggatncttgtttagnaaaaatttacatagnaattaattaaaggggaaggttcaag

SEQ ID NO: 1838 - DNA, 350 bp, Homo sapiens
aggtacagcatcctggagtggtgtcaagggaaagaaacatgctgcttctgccacagacggaccatgcatgggaagaaactatttgagaatggctctccaaggggctggtcggccttgtctgcccactccctctacctttctttgttctgtttctttctcttcagtgttggtccattttccttttttcactgttgcgtgttagcacatcattactcttatctccatatatttggatgtttcctgcattatggtgagcttcagtaggtcttggatgagttagttgttctcattccaaaatgtaaatttctggtgtttagtaggtgctcagtaaagcttgagaaagatgaaag

SEQ ID NO: 1839 - DNA, 436 bp, Homo sapiens
cactacttagggcgaattggagctccccgcggtggcggccgcccgggcaggtactttaacaagtaaaactaagttggttataatgtgacaaaaatacaagcaataataatagcaaaattatccaataggaaccatgcagagagttttatattataactcatgtcccctttcctgcaatgttattaacttctatccccattttccacatcaaggaaattaagtttggagacacagagtgacttacctaagtcacaggtctggtaggtggagagtttctctcactccagggaccacaatctacaaaataaacttgcatattctacaaaatatttgttaccattggaagtaggtaggcagagtgttacctagcattcaaattatgggcaggaataaaaaagaaagggtggtgggctggtcttgcttctgcagtttaagg

SEQ ID NO: 1840 - DNA, 439 bp, Homo sapiens
  misc_feature 167, 183, 192, 196, 234, 355: n = A,T,C or G
ggagctccccgcggtggcggccgaggtacgcgggtgactaccagcatccatactaatctgggagatccagggatgtgccttgttatggaggggactgtgactcctttaagacctagaccatcacttgggagatttgttttggtctctgggtggattgtggatggtanacagatcacaggccanccaggaccntgtnttttggccttgctggttatagaattctattctgcaganctaagagtgcaaactaggaccaacattaccaagaggacagaagctatctggggatcctggctggcagtgctcaacttacagctcaagcctgtgataacaggagaggtggagtgtgttttgngcttcattgtgcatgtgtttcaagcagaaactagacttgagggcttaatatagaaaacatctcaaacaatccatgaaatggtaa

SEQ ID NO: 1841 - DNA, 360 bp, Homo sapiens
ccgggcaggtactggtgctacaccatgcgctcgtggttcctgagggcacaattcattcattcgtgaaacagggcaaatttgagattcagacctccaaggctccaagctacattgctttattggaggcggccactccggatgatcccaatgaggagccgactgctcctcaaggcccttctttgttttaaacatcttggcatatatggcttctctattttaggagcagctgaaggtcccacgtgctcctcaaaagaaattaactcatctccaggtttgtctgtattttcctcaaaatcttcttcactatcctctcctccttcagcagcatcaccaccttcctctgcagaaattctttctgct

SEQ ID NO: 1842 - DNA, 355 bp, Homo sapiens
  misc_feature 353: n = A,T,C or G
aattggagctccccgcggtggcggccgcccgggcaggtactgcaatgggcactgaaggagactgtggaggtcatttaaaaatagtccctgaactctccaaagtgggattataagtgcaaaaacagtgcccaggatgagtaggaaagccacattacagattgaaagaaagggaagaaagttgcatgccgatctggggacaggcaaatgtgcagggagtaggggacatggcaatggactacagaattaggaattttggtaggtaggagtaggtagacatgggataattgaagaattccaggtggaaataataaaatataaaagaaatggggaaaggagggcattttttgaggggnag

SEQ ID NO: 1843 - DNA, 157 bp, Homo sapiens
cgccacgctggttttgcatcttcaggagacgctcgtagccctcgcgcttctcctcggccagttcgcggaagaagtggctcacgccttccagagccacatcatcgcggtcgaaatagaagcccagagagaggtaggtgtaggaggcctgcaggtacct

SEQ ID NO: 1844 - DNA, 393 bp, Homo sapiens
ccgcggtggcggccgaggtacttttgcttggattctttaagagggtgggggtcgggagaggcttggcagcataaaggcaggccgctctgggctgaccgtgctcctgacctggatgcagaactgtggaagttgccctccttgttctgcttcctgctccctcttttagcccgtgtgtccaggggagaggatgggtgttccgggagcacaaggccatggcacagccagcagccttctggcagttcctgaaggacagcaagtttgacagagatattaccccagctggggctagagcagaggaacagttggttgtgtgctgccatttgacagtatcctaattcctgacccactgtgagcattaacagcccaaatacatatcttctagacagtctgggt

SEQ ID NO: 1845 - DNA, 453 bp, Homo sapiens
  misc_feature 7, 411: n = A,T,C or G
acgactnctatagggcgaattggagctccccgcggtggcggccgcccgggcaggtactcatacaataagaccctatacaagcatttaagtaacgatgcaatacaatatttaccaaactgacgacatgtccatgttatattgctaagctacaaaaaaaagtcatataatacatactctaagattccctttttaaaataaatataaacatgcccatatacaaaagaataggaagataaatatatcactgcatggtattatagattactattttcttcttttcatttatgtatatcgtctccattttcacagtgaatatatacctattagtaagagaaaatccaatgaatatcttttttctttttttttgagatgggaatctcactggctgcccaggcttggagttgcagtagncggtgatctcagctcactgcagcctccacctcccaagttcac

SEQ ID NO: 1846 - DNA, 399 bp, Homo sapiens
aggtacatgactccaggaaagtgattctcacccctctgagccccagttcccccacctctggcagggagataataatacctaactcacaaggttgttgagagggttggaaacaaagcctgcagagaacctaacacatgatatacgtttaacaaagggcatccatctaagacattcaaccagcatcggcatttgcaacaagtcaacctttacttttcaggatttcatttggggaaaaattaaacattcaccagcatatttttgtatagtgtttaagaacatgaagttagattattcaaacctcaccttataagttctgtgcatttttcctcttttatgtctctgctccctcactataaaaagtagaaacaaggagtgcttaccttgcatgggttgttgtgc

SEQ ID NO: 1847 - DNA, 312 bp, Homo sapiens
  misc_feature 5, 72, 81, 91, 119, 149, 200, 203, 229, 252: n = A,T,C or G
gactnctatagggcgaattggagctccccgcggtggcggccgcccgggcaggtacattttggattagaattnaagtatcangtctgttgtntcttcatttcttctttttctatgctctntttacaatttcagctactccagaagctcanattttccctattccaagctatgagatgtgatgccacatttggaattgcctnctngatatccccttctgagaatgcattgnctgctttttaactcattatattnaaaactaaattcatcatcattctctccttacaccagttctcaccctgactttgccatttt

SEQ ID NO: 1848 - DNA, 138 bp, Homo sapiens
gcaggtattcctcgacgatcacgcgccggccatgcttgcgcgcgaactcgaaggcgcgcgccacggcgtcaggggagacgcagtcgacggtcacgcccttgccctggttggcgtccagcggcttgatcgccaccggcc

SEQ ID NO: 1849 - DNA, 333 bp, Homo sapiens
aggtacttgaaaagaagcccggcctctgagcagtcactcattcctggtaaagcccctcgaagtctgcagacttcatggctggcagaaagtcacaactggtgttttgctgtgtcagtggcctgggagaaaaccagcagctgatgaggctggagaccactacataagatgctatcatcatccccgacatggcgagtgatacgaagcccaaaccacagaggatgcagagcagtgagaagccacccacagagatgaccaatccttccaatattatgacccccagcagagcagccagggtggtaagcaccacgatgagcaggaagaatccaacaggaa

SEQ ID NO: 1850 - DNA, 318 bp, Homo sapiens
  misc_feature 242, 262: n = A,T,C or G
tatcactacttagggcgaattggagctccccgcggtggcggccgaggtacttttgcttggattctttaagagggtgggggtcgggggaggcttggcaacataaaggcaggccgctctgggctgaccgtgctcctgacctggatgcagaactgtggaagttgccctccttgttctgcttcctgctccctcttttagcccgtgtgtccaggggagaggatgggtgttccgggagcacaaggccntggcacagccagcagccttntggcagttcctgaaggacagcaagtttgacagagatattaccccagctggggctag

SEQ ID NO: 1851 - DNA, 529 bp, Homo sapiens
  misc_feature 130, 191, 207, 220, 223, 226, 252, 290, 311, 339, 348, 369,397, 413, 420, 428, 430, 445, 449, 460, 463, 472, 475, 480,488, 493, 496, 517, 525: n = A,T,C or G
ccgggcaggtacctaataaatatttttggcatatgtgaatgaatgagtgagtgaataaataatcagattagttgatgaaagattctaagggaagattaggtaatgtgattataagagaaagatcctgaanaatgctttgggaaatgggatcccttttacctcatacatgatttttgtttcatcaagccttnattattgttagggatncaacagtttcatnttnggnaaaaatatttggttccatttgaaaanttttattaccatattttctcaaaatgtgtgtacatcanctttcatttattaccagtttntcaaaaaaaggtttaagccactttccantggacctantcaacccaacttgtattcttncaattccatgggaaaggtatttttaaangttaatctggggaatnaagcctnaattaaangnccttccaacccatanttgnggcaagtttcnccntaagaaatnatngttgnccaagacnccgtntgnggaatttgggaaaaaaaaagntggttttnctta

SEQ ID NO: 1852 - DNA, 426 bp, Homo sapiens
  misc_feature 373, 374, 424: n = A,T,C or G
acttagggcgaattggagctccccgcggtggcggccgaggtacgcgggggaaacaaatcaaatgtttgttctcaaattcttactctgtcatttattattctccatgtttttgtaactgcttccttggagatatttaaacataaatatatacagagagggtgaagatggaggagtgctttttacagttcacagttgtctttttcatgtgtgacaggtttttgctgtgttgcccaggctggagtgcaatgccacaatcttggctcactgcagcctcaacttcccgggctcaatcgatcccccacctcagcctcccgagtagcaaggactacaggcgcacaccaccacacctagctaatttttgtatcttttgtannagacagggttttcaccatgttgtccaggctggtcttgaactcttgggctnaa

SEQ ID NO: 1853 - DNA, 417 bp, Homo sapiens
  misc_feature 161, 172, 173, 189: n = A,T,C or G
ccgcggtggcggccgcccgggcaggtacttttttttaaatacttagtatatagactggggctgggcgcggtggcgcatgcctgtaatcccagcactttgggaggctgaggcaggccgatcacttgaggtcaggagttagagaccagcctggccaacatggngaaacccccgnntttactaaaaataganacacgtcactgcactccagcctgggtgacagagtgagactccatctcaaataaataaatacttagtgtatgataaaagctagaataaacatactgttttaagtagaattctgaaacaacttcaaattcatttaaacatacatcaattgacagttaagcaagctaagcttaagcaagttaacttgttttgccatttctatcaacctaagaaatagggggaattttacaa

SEQ ID NO: 1854 - DNA, 385 bp, Homo sapiens
aggtacagtagtgcactcttggctcactgtagcctcgacctccggggctcaagtgatcctcctgccttagccccacaagtagtgggactataggcacacagcaccatgcccatctaagtttttgtattttatgtagagacaaggtttcaccatgttgcccaggctgatcttgagctcctgagctcaagtgatctgcccaccttggactcccaaaatgctgggattataggcgtaaaccaccatgcctggccttaaatcaactttagagtcaacatctcttatcactggagcttctggagaaactccatcacgtggtgctctctttcctgatgtgttgtgcccaaatagcttgttctcatcagatgacttcccgcgtacctgcccg

SEQ ID NO: 1855 - DNA, 378 bp, Homo sapiens
  misc_feature 128: n = A,T,C or G
ccgcggtggcggccgcccgggcaggtactaggattccagttccccctctcacagctcccctaggtttctgctcgtaagatgacaaagttgtgactgtatgctgacatgattattttattaatgattgntgctcagctgaactgtcagctctgaaagaaacagtgacatgtggtctttccattgtatcatcttcactgaaaggaaataaataaacaaatgaagagttctaatatatttggcttaaaatcatattacttcaggccaggcacggtggctcatgcctataatcccagcactttgggaggccgaggcgggtggatcgtctgaggtcagaaagttcttagaccagcctggccaacatggtgaaaccctgtctct

SEQ ID NO: 1856 - DNA, 761 bp, Homo sapiens
  misc_feature 601, 605, 608, 620, 683, 688, 735, 737, 753: n = A,T,C or G
ccgcggtggcggccgcccgggcaggtactctatttcagatttcctcaaagctgggcagttgttagcgagaatgaccaatttcgctttgccttgtctgatcatcttcagagtctgcttgtaccactgcgaggcgactgtttatcatgaaagcatccatgatgaggttgtaaacagacttaaaaaggcctatgcacagatccgagttgggaacccatgggaccctaatgttctctatgggccactccacaccaagcaggcagtgagcatgtttcttggagcagtggaagaagcaaagaaagaaggtggcacagtggtctatgggggcaaggttatggatcgccctggaaattatgtagaaccgacaattgtgacaggtcttggccacgatgcgtccattgcacacacagagacttttgctccgattctctatgtctttaaattcaagaatgaagaagaggtctttgcatggaataatgaagtaaaacagggactttcaagtagcatctttaccaaagatctgggcagaatctttcgctggcttggacctaaaggatcagactgtggcattgtaaatgtcaacatttcaacaagtggggctganattngangtgcctttggangagaaaagcccactggtggtggcaagggagtctggcagtgatgcctggaaacagtacctcggncgttntaaactagtggattccccgggctgagggaatttggatatccaacttntngatcccgttaacctcnaggggggg

SEQ ID NO: 1857 - DNA, 481 bp, Homo sapiens
  misc_feature 120, 185, 199, 219, 220, 231, 232, 259, 271, 292, 295, 308,311, 367, 390, 396, 412: n = A,T,C or G
acttagggcgaattggagctccccgcggtggcggccgcccgggcaggtacgggggagggtatgagtgagaagcaccagcaggcagtaacagccaacccttagccattgctaagggcaganaactggtggagcctttctcttactcccaggacttcagcacctaagacagctccaaaacaaaccanaacagtcattttcngggggagcaccgactggtcnnagaggcaccannaaatggacaccagtaaataaggcccanctccttgtgctnctgactcttttcagtgcgctnttnttacagactttcngcntggcctttttacagggcaccttctgctctcaacgttgggtgacagaataccctttnagggagcaaatgaacctgatcanagtttnaattaaaagaagacanttgacatgttgcaaaatgcattttcttaaaatgaccacaccctaataattgaatggtatccaggaaaat

SEQ ID NO: 1858 - DNA, 613 bp, Homo sapiens
  misc_feature 1, 161, 173, 186, 193, 220, 226, 245, 272, 285, 289, 303,310, 317, 335, 337, 347, 351, 354, 366, 367, 372, 391, 393,400, 405, 438, 463, 498, 503, 536, 541, 549, 563, 576, 590,599, 601: n = A,T,C or G
nggccgcccgggcaggtacagtagtgcactcttggctcactgtagcctcgacctccggggctcaagtgatcctcctgccttagccccacaagtagtgggactataggcacacaccaccatgcccatctaaggtttttgtattttatgtaagaagacaaagngttttcaccatnttttgccccaggnctggatnctttgaaccttcctggagcctcaaagntgaatnctggctccactcttctggnactacctcaaataaattgacatggggnattttattagggnccgntaaaaactcaaccnattggcncctgggnccttttaaaaattcaaancnttttataggnaagnttncaaaaccaattnnttgcnttttaattccaaccttggngnaagtccnttttncttggggtaagtaaaaaaaccttcctcaatttncaaccgggttggggtttgggccttncattccttttttccacttgggaattgggttggttntaggnttggccccccccaaaaaaattaaggaccttttngggtnttgccttnccaatttccaaagngaattgggaaccnttttaatttttttnggccttaantnggaattaaatta

SEQ ID NO: 1859 - DNA, 376 bp, Homo sapiens
  misc_feature 5, 77, 79, 148, 372: n = A,T,C or G
cactnctatagggcgaattggagctccccgcggtggcggccgaggtactttattttttttttttttttttttagtananacggggtttcactgtgttaaccaggatggtctcgatctcctgacctcgtgatccgcccgcctcggcctnccaaagtgctgggactacaggcgtgagccaccacgcccggcccaaaagcatttactgttaaggctgcctcatttttcagctttgttgtagttgagattctgatgttcacctaacaaagtccctgacaaaacagacttccttcaatccaggtcataatttgaaacgttatacaataatgagatttaagtgatgaatggaaagaaaagaaggagactgaaaagatntcag

SEQ ID NO: 1860 - DNA, 417 bp, Homo sapiens
  misc_feature 86, 174, 185, 192, 193, 203, 205, 232, 236, 249, 268, 276,285, 293, 310, 346, 392, 393, 397, 407: n = A,T,C or G
tacttagggcgaattggagctccccgcggtggcggccgaggtacgcggggagggtagagtgagaagcaccagcaggcagtaacagncaacccttggccattgctaagggcagagaactggtggagcctttctcttactcccaggacttcagcacctaagacagctccaaaacanaccagaacagncagcttnnggggagcacnantgggcgagagggcacagaatatggacnccanaaataaggcccanctccttgtgctcctgactnttctcaantgtgctctnctcacaanacttcggcattggcctntttcagggcacctactgctctcaggttgggtgacanaataccctttgagggagcaaaatgaacctgaatcaagttttcattnnaaanaagacatttnaccatgtttg

SEQ ID NO: 1861 - DNA, 635 bp, Homo sapiens
  misc_feature 622: n = A,T,C or G
ctcctatagggcgaattggagctccccgcggtggcggccggggacccgagccgaaaagttatcgtcagaatgtcgggcaaagaccgaattgaaatctttccctcgcgaatggcacagaccatcatgaaggctcgtttaaagggagcacagacaggtcgaaacctcctgaagaaaaaatctgatgccttaactcttcgatttcgacagatcctaaagaagataatagagactaaaatgttgatgggcgaagtgatgagagaagctgccttttcactagctgaagccaagttcacagcaggtgacttcagcactacagttatccaaaatgtcaataaagcgcaagtgaagattcgagcgaagaaagataatgtagcaggtgttactttgccagtatttgaacattaccatgaaggaactgacagttatgaactgactggtttagccagaggtggggaacagttggctaaattaaagaggaattatgccaaagcagtggaactactggtggaactagcttctctgcagacttcttttgttactttggatgaagctattaagataaccaacaggcgtgtaaatgccattgaacatgtcatcattccccggattgacgtacctcggncgctctagaacta

SEQ ID NO: 1862 - DNA, 279 bp, Homo sapiens
  misc_feature 265: n = A,T,C or G
cacggaaggtggtctcttagctgggccttaaagataagaaagacttgttcaacaaggaaaaggattttccaaggagtgggaatggcctaggtaaaagtgcagaggtggctgggctacttggaagggaacagcaggaagctggtggggctagagctcaggcaggagcaaaagtgaggaaaagggtgagcacacgtggcaggtggtgtgggccagcttccagcagctttggctgctaaggggcccgggactttattcattgggcggnggggatgcttatag

SEQ ID NO: 1863 - DNA, 449 bp, Homo sapiens
ctacttagggcgaattggagctccccgcggtggcggccgcccgggcaggtacgcgggtctgaacaaaatagatgatttgatgcaagagatcacagagcaacaggatatcgcccaagaaatctcagaagcattttctcaacgggttggctttggtgatgactttgatgaggatgagttgatggcagaacttgaagaattggaacaggagggaattaaattaagaagatgacaaatatccgccttccaaatgtgccttcctcttctctcccagcacagccaaatagaaaaccaggcatgtcgtccactgcacgtcgatcccgagcagcatcttcccagagggcagaagaagaggatgatgatatcaaacaattggcagcttgggctacctaaactaaaacacatttttgatacctaaattaatgagctatagataaaatataaaaaatgtt

SEQ ID NO: 1864 - DNA, 401 bp, Homo sapiens
  misc_feature 3: n = A,T,C or G
gcnaattggagctccccgcggtggcggccgcccgggcaggtactcccaagggaacgctgtccacctctatgaacttctgaagaaaatgactggcaaacctgaacccaaggttgtttattttggtgacagcatgcattcagatattttcccagctcgtcactatagtaattgggagacagtcctcatcctggaagaactcagaggggatgaaggcacgaggagtcaggggcctgaggagtcagagcctctagagaagaaaggaaaatatgagggaccaaaagcaaaacctttaaatacttcatctaaaaaatggggctctttttttattgattcagttttgggactggaaaatacagaagaccccttggtttatacatggtcttgtaagagaatcagtacct

SEQ ID NO: 1865 - DNA, 623 bp, Homo sapiens
  misc_feature 541, 545, 551, 559, 562, 571: n = A,T,C or G
ccgcggtggcggcccgaggtacgcgggggaaacaaatcaaatgtttgttctcaaattcttactctgtcatttattattctccatgtttttgtaactgcttccttggagatatttaaacataaatatatacagagagggtgaagatggaggagtgctttttacagtacagttgtctttttcatgtgtgacaggtttttgctgtgttgcccaggctggagtgcaatgccacaatcttggctcactgcagcctcaacttcccgggctcaatcgatcccccacctcagcctcccgagtagcaaggactacaggcgcacaccaccacacctagctaatttttgtatcttttgtagagacagggtttcaccatgttgtccaggctggtcttgaactcttgggctcaattggtcctagcacctcagcctcctaggtgctgggattacaggtgtgagccgctgtgttcagccaatactcttaacgtttttacttttcacttttaaaaattaactctttttatgaaaaaagtagaattttttaaagagcngagnaaagcncaatgganacngaaagaacnccctggatattcttattggcccaagatgatctatttgggggtaaatcctttt

SEQ ID NO: 1866 - DNA, 406 bp, Homo sapiens
  misc_feature 14: n = A,T,C or G
gcggccgaggtccntttgttgggggcgtgacattaacatataaccacttagagtggacatgcagttagagaaaagtcaatgagctggaaccaagctgggaattccaacatgtagaagttaaacacaagaggaggagccagcaaaggaaacagaaacagagcttccagcaggtggggggcatttggaagaaaacgatgccatagaggccaagatgaaatagacatcaaggagaaggaagtagtcaattgttttgaatgctatgaagaaagataagaataggtaaatagtccttatatttgataacagaggtcactagtgatcttgatgaaggggtttcaatagaatggtgggattatatacctccctgggattcaactggaggtaaggaaggcataccagaatagag

SEQ ID NO: 1867 - DNA, 305 bp, Homo sapiens
  misc_feature 3, 12, 40, 41, 43, 67, 70, 98, 103, 106, 123, 130, 133, 135,141, 142, 152, 158, 166, 168, 178, 199, 203, 237, 279, 280,285, 291, 296: n = A,T,C or G
acntacccggtncagcttatggggaggctgtagggtttgnntnattgactataccattctattcttntgngtcacatgcatgaacgcaccaacagcgncccanctnctctgagggtctcctcnccaccancancncccctnntcggatcacntgtttnctttactncnatcatccctnctatagctaccatactcttangctncatgcaatggccagcctcatcgatgaatatgtgnttgaattgatcaatgaaaaactgtgccgagaccaacctgccnncagtnatcganggtgngtaattaaa

SEQ ID NO: 1868 - DNA, 336 bp, Homo sapiens
  misc_feature 14, 39, 80, 81, 96, 136, 321, 323: n = A,T,C or G
cgaaattgggtagnctccactcgcgggttgggccgggcncgcccggggccagggttaccgccggggggcctttcaacccnntcttgccttgaagantattggggggaagggggaagccttgggaagaaaaagaaanggaaggggggggaagaagaacttgccccaggaagaagggaaaggaagaaaaaaggaaaaggggaaaggaaaaaccatttaatgaaaaagaaaaaaagggaaagggaaaaaaaccgggtattaaaaaggaagaagaatcaaatttaccccaccccctttaaaaataagcctaagaaatttgggggngngggggggaagggg

SEQ ID NO: 1869 - DNA, 521 bp, Homo sapiens
cgcccgggcaggtactcgggggagagagatgagggcagggaccactctgcaaagacgagcccagggcgcagcagcgagccccctcctagtccttctcttctccgtgggtgatgatgtgcaccaggttcttgtagtccaagttgccagtcacgtcaggggggaaggcggcgaacatctggtcaacctcctccttggaaaacctctccgcctgcgtggtcagcatttcccgaacgtaatcagccttcagcacccctttgccttcagggtcaaacactttgaatgcgttgagaatggtttcctcagggtccgctcccttaagtttctccccaaacattgtgaggaacacagtaaagttaattggacccggagcctccttgatcatttcatcaatttcttcatttttcacgttcactcgcccaagggcagcaaaggtgtctctcagatcgttcttgtcgatgaagccatccctgttctggtccatgatagtgaaggcctccttaaattcctggatttgggtctgt

SEQ ID NO: 1870 - DNA, 479 bp, Homo sapiens
  misc_feature 4: n = A,T,C or G
actnctatagggcgaattggagctccccgcggtggcggccgaggtacagtggcacacacctgtagtcccagctacttgggaggctgaggtgggaggaaggcttgagcccaggagtttgagtccaggctgggcaagatagcgagacctcatctctaaaaaaataaaataaaataaaataaataaataaaacaagccttttaatagtctggatcatatagaagattaatattatgatggattgcacattaatgtctcaaaggacaccccccgccaaaatcaccctactaaaaatcacactgggtttctaatcttggggtttagaaattttcttcttatgctttaaaaactcattttacttcctttatcctctgattttttgggaagacagagggtgcttcttcttggactcttgagtcctggacactaaattcctccctcagttctagtgcccaggctaagcagagacactaaatccctta

SEQ ID NO: 1871 - DNA, 308 bp, Homo sapiens
ccgggcaggtacagggagttgtaggtgagcagccgctccagcagtgagtatcccagtccatgcttctgggtcagtggagaacgcagcacaggccccagctgccgagggtctcctgccagcaccagctgccctcctggatcacctgtttcctttacttccatcagccctgctatagctaccagactctcaggctccatgcagtggccagcctcatcgatgaagatgtgtgtgaagtgatcaatgggaaactgggccgagaccaacctgccggcagtgatgagggtggtaattaagacccggtattcctg

SEQ ID NO: 1872 - DNA, 295 bp, Homo sapiens
  misc_feature 71, 87, 150, 154, 201, 216, 229, 231, 248, 250, 255, 262,271: n = A,T,C or G
aattggtttccccgcggtggcggccgcccgggcaggtacttttttttggtcttgatccatgtggcccattngactctacattaattnttattttccacttcttgaatatacaatgatatatcaagatcgagtgttggagagtaattagtnttgnttctaattctaagggatacagaggctgacagataccccccttctttntctgaagttcatagnggctttgtctatngngtcttgctgctaatgtngnatagnaaatgtntaacaaaantatcccaaacttccaaacacacta

SEQ ID NO: 1873 - DNA, 387 bp, Homo sapiens
ccgcggtggcggccgcccgggcaggtacgtttgctcatacacgcacatccaaaagcctgtgcctcattcctggccatgggtgaggacttggtctgtcacggctgatgaggactcccacaaccggccaagttatgtcttattatacacccccagaaagagagaaagctgccttctggaggactgattccacatgctatattcagctgagttgatttctgtgtctatttcaacccataacctgaagaatgatcaccttattccttattcattaattttcttgattaatagggaaacttgggaatagctataaagtaaaacttgggtggaacctggggccctggcatcacacaagtgtgattaggatggtcaaggtcatcaggagtacct

SEQ ID NO: 1874 - DNA, 516 bp, Homo sapiens
  misc_feature 30, 178, 454, 456, 457, 458, 459, 460, 461, 462, 464, 465,467, 468, 469, 470, 471, 473, 475, 476, 477, 504: n = A,T,C or G
aggggtcgagcggcccgccgggcaggtacngccggggggtttcattgaatgtcaatgttatttgttctgcacgtaaactttgtttccttctgaaaaaataacatgtaagtcattaagttatctaaaaacacaaaaagtaattagttgaaattctaaattaccagatgaaataatgttntattgctacataatcaatgtagcaatatcatttgtgaaaaattcactgaaaagtttttgagctgcaatttaaagcacaattaattagcagtcaagacaatatgataaaacttagccaatgaaggtaatcattatgagactttggttatggcttttttaaacttaggccttagatttctcaaatatgaaataaatgtttttcttcatgatattgagattatttccagctatgtctttctagccttcaaaatagcccaatgatctctaattttttcanannnnnnnannannnnnanannnggtccctcggcccgctctagaactagngggatcccccgg

SEQ ID NO: 1875 - DNA, 272 bp, Homo sapiens
aggtacccaaaccctccaatccccaacgcggtctcaagttcagactgggctccagcttctgtccacagccacccccacattttctttttgtatttgtctgccaacttcagaagaacttccagataagaatttctgcctgcagctccagtatcaaggatatggggcagcacagccacaacacagagctggtgctcctcacacgtcctcttggcaatgtcctcgttgataatctcaagcagctcaggaggtggggcgttatcccccgcgtacct

SEQ ID NO: 1876 - DNA, 460 bp, Homo sapiens
  misc_feature 198, 208, 320, 333, 367, 408, 410, 412, 440: n = A,T,C or G
gagctccccgcggtggcggccgaggtaccaagaggaacgacagttgtccctggtttcaagctatcattcaaaactttgggattcaggactcctctgaatcaaaaatcatggaattctagatacagaggaatacagataggttatctaattcaaatcactcaatttacagatgaaaaacctggaataccttgaatgtantccactccanctaaatatgtttgacttgttagaaaaacccaaaaaaagttcttttaattacagtccatatgttagtttttcttctccaatgttgtcattacttaactgtatgtgaatcagtnagactagcatgtnacaatgatgtaattttctttctttaatatgccgntgatgttgaactttttttctttcccagggaagagagtttcntnancccaaagaggatgttaaccttttttgtncaaacaagccttcccataat

SEQ ID NO: 1877 - DNA, 338 bp, Homo sapiens
ctactataggggcgaattggagctccccgcggtggcggccgcccgggcaggtactccaggaggcccgtgtatttaatgaaactcccatcaaccctcggaaatgtgcccacatcctcaccaagattctttatctcataaaccagggggagcacctggggaccacggaagcgaccgaggccttctttgccatgaccaagctctttcagtccaatgatcccacactccgtcggatgtgctacttgaccatcaaggagatgtcttacattgcagaggatgtcatcattgtcaccagcagcctaacaaaaggcatgactgggaaagaagacaactaccgggcc

SEQ ID NO: 1878 - DNA, 386 bp, Homo sapiens
agtacttctagaattaattaacgcgggttgactttaatagatactaacagttttccaaagtggttacaccagctcttttaccatctccaccttgctcaccaggagagtacgagcgtcttccttgctccacattcagaccagctttgtgttggtttggtttgtcagtctttcaagttttatccattctgtgaggtgtgtacaggtattgcattttgagtttaatttgcatttgtctggtgactaatgaggttgagacatttgtctatctcctgtgaagtgtctgttcaaatctcattttctgttggattatctttacctcgatatgtataataaattttaaaaaccacttatgatttcctcttctctaaattttttaaattcttcac

SEQ ID NO: 1879 - DNA, 393 bp, Homo sapiens
  misc_feature 191: n = A,T,C or G
agtacttctagaattaattaacgcgggcattgtgtgcagaagacctggactggaatctaacactgtgagtactccccaggatccgtgttcctctctttagcccaggcatgcagttacattacattttccaaccttccttgcagtttagctacgatcaccgtgactgcattctggccagtggaatgtgtgtnggaagtgatgtgggccaattccaggcctggcctataaaaatcccccactttttgttctctttctccatccaccatctgcatggagagctcccagcactagagggagaaaaagccaccagagggaaggagcctgggtccctgaatcactgtgtagactacctgccaaacatacaccctgaattgttatggcaattaacaaata

SEQ ID NO: 1880 - DNA, 330 bp, Homo sapiens
agtacttctagaattaattaacgcgggggcgctaggacctggagggctagtcggcgggctgcgcgtccggccgctagctgagctggaggccaccggccagagccgaccccaggagtgagagagacaggggcgtgcgtgagttccggcggcctgcaccgggcaaaccccgtaccttcccagcatcggctcagcaacccacgtgcatccaggccggtcaatgtcattgagtcacctccgcgccttggccaccctggagtcccgagaatccgaagttccagacaaatgcccaaactacatttcctgcatgttcgaaagcgtaaattgcaaagc

SEQ ID NO: 1881 - DNA, 432 bp, Homo sapiens
  misc_feature 28, 41, 43, 44, 54, 58, 60, 73, 75: n = A,T,C or G
tcactaaagggtttaaagctaggtcccnggcccccccctcnanngtccttctanaatnanttaacgcgggggntnaaaaaaaagaaaagaaagcgccttcaaggccatctgtttctctgctactaccctttttggaaagacaaatctccttcccctccctgtcctccttccttctacattcccctagggctgtgtacctctctctcagcgtgccctgcctcggtgcctctgtggcagggccaggtctgacttcccagatgagcttgctctcctaagctgcatcattgcatgactctcctctttcctaacctccctcactcctccagctcccttctgctggtgaatgacatctcttcacgccacacaagtcacagggacggctgctccaccaccggcatcacatctcctttccagggcagggaagaagaggaa

SEQ ID NO: 1882 - DNA, 357 bp, Homo sapiens
  misc_feature 48, 85, 88, 121, 135, 164, 183, 190, 193, 210, 223, 261,349, 352, 357: n = A,T,C or G
ccgcggtggcggccgcttttttttttttttttttttttttttttttanatggagtcttactccgtcacccaggctggagtgtggnggngtgatctcagctcacagcaacctgacctcaggngattcacccgcctntgtctcccaaagtgctgggattacaggcntgagccactgcgcccggcngtctttnaantttttaaactgaagttnaattgcctttgantttgatcattcactatttggcatttgtatttcttttgntaattatctgctcaagctctaatttcataatggaaatttaatggattaacatataacacccactatcacccgccttaattaattctanaantactn

SEQ ID NO: 1883 - DNA, 546 bp, Homo sapiens
  misc_feature 477, 505, 508, 540: n = A,T,C or G
ccgcggtggcggcccgcttttttttttttttttttttttttttttttgaagcgacggggtctccctatgttgcccagactggtcttgaactcctgggctcaagcgatcctcccatgttggtctcccaaaatgctgggattacaggcgtgagccaccatgcccagccagatgtaacaatttttaaagtcagtccgtagggttgaatttacctgtcatttctaatttgtcgacattaaaaacatcctagatgtgtttcttggcacacttgcctgatcgtttccataaggtcaagttcctaaaaatggaatcattgtgccagggtttgtacatttaaaatattgatccattttgccagactgccatccagcagggctctagcaatttacacatttaaggaggcacttaccctcatatgcccactttgtacttacatggccctgaaagtgacagcctccttaaattttgcatccttccttntccccatcttactccaagccctgctaangangatggcaaagtttcatgtccactgggctttgnattaat

SEQ ID NO: 1884 - DNA, 356 bp, Homo sapiens
agtacttctagaattaattaacgcgggttgactttaatagatactaacagttttccaaagtggttacaccagctcttttaccatctccaccttgctcaccaggagagtacgagcgtcttccttgctcccacaattcagaccagctttgtgttggtttggtttgtcagtctttcaagttttatccattctgtgaggtgtgtacaggtattgcattttgagtttaatttgcatttgtctggtgactaatgaggttgagacatttgtctatctcctgtgaagtgtctgttcaaatctcattttctgttggattatctttacctcgatatgtataataaattttaaaaaccacttatgat

SEQ ID NO: 1885 - DNA, 460 bp, Homo sapiens
cgcttttttttttttttttttttttttgaggtggagtcttgctctgtcaccaggctggagtgcagtggtgcaatcttggctcactgcaaccttcccctcctggctgagttaacttaggagagcttcctggagagggcacctttgaagataggaaggatttcatgaagtctttactaggccactagagtagaagcagtgggagacttcctggagaagagctcatggaaagaaaaacctaccgctggccctttgggaactgctttgggcctctttagtcctaggctcacacgccccttagaaacaaagtaagaataaagccagggataatacagtgagtggccaagaacacagactctggaccagactacctgggtttgaatcccagttaccagccatgtgactttgatcaagttgcttaacctttgtgtgcttcagtttcctcatctgtaaaataagggga

SEQ ID NO: 1886 - DNA, 280 bp, Homo sapiens
  misc_feature 47, 173, 190, 229, 249, 257, 273: n = A,T,C or G
gaagaatcaacagactctatatttgatcacaaagcaaaagtttaagngtattacttaaaattttaagacaaaatctggaataattataactaacacaaattttgaggtagaggaagagaattctagagataggtgagataaaattttcatctttgataatgagtagacaaaancactacctttaacaagngaagaatttaaaaaatttagagaagaggaaatcataagnggtttttaaaatttattatncatatcgnggtaaagataatccancagaaaa

SEQ ID NO: 1887 - DNA, 453 bp, Homo sapiens
tttttttttttttttttgagatggagtcttggtctgtcgcccaggctggagtgcaatggtgcagtctcagctcactgaaacctctgcctcccgggttcaagtgattctcctgcctcagcctaccgagtagctgggattacaggggcctaccaccatgcctggctaatgtttgtatttttagtagagatggggcttcaccatgttggccatgctggtctcgaagtgctgacctcgtgatctgtccgcctcggcctcccaaagtgctgggattataggcgtgagccactgctcccggccacaatctacaactggatttgtgctttgcaatttacgctttcgaacatgcaggaatgtagtttgggcatttgtctggaacttcggattctcgggactccagggtggccaaggcgcggaggtgactcaatgacattgaccggcctggatgcacgtggg

SEQ ID NO: 1888 - DNA, 331 bp, Homo sapiens
agtacttctagaattaattaaatgtgaaaagcaaatttgaaagcatcttagtctgtaaaactacttcatgtataaaaaataaacatttgacagaactctcagagcaaagctatctgagggattctttaaagcttccaatttatcaaattacctttttttttttggtcggcagggggaagtagtctcactctgttgcccagggtggagtgcaatggcaggatctcagctcactgcaacctttgtctcccaggttcaagtgattctcccacttcaacctcccgagtatctgggactactggcatacaccaccacaccccggctaattttttgt

SEQ ID NO: 1889 - DNA, 284 bp, Homo sapiens
  misc_feature 8, 243, 262: n = A,T,C or G
agtacttntagaattaattaaggcgggcacccagggatcgcaggtggccgaatactgcaggtggcttttgaaggcatcgatgcacactttgagggcctgccttggctcctgcaccccaccacagttcgtgtttccttccttttattcttttccacccagaaaggtgacaaatccaagccctggatgtgaggggggtccacaagagtaattctggagagatggggtcaggtgaggaatggttanagacccagggagccaagtnacgggacctcagtgaccccatg

SEQ ID NO: 1890 - DNA, 429 bp, Homo sapiens
actacttagggcgaattggagctccccgcggtggcggccgcttttttttttttttttttgagatggagtcttggtctgtcgcccaggctggagtgcaatggtgcagtctcagctcactgaaacctctgcctcccgggttcaagtgattctcctgcctcagcctaccgagtagctgggattacaggggcctaccaccatgcctggctaatgtttgtatttttagtagagatggggcttcaccatgttggccatgctggtctcgaagtgctgacctcgtgatctgtccgcctcggcctcccaaagtgctgggattataggcgtgagccactgctcccggccacaatctacaactggatttgtgctttgcaatttacgctttcgaacatgcagggaatgtagtttgggcatttgtctggaacttcggattct

SEQ ID NO: 1891 - DNA, 368 bp, Homo sapiens
agtacttctagaattaattaacgcggggaggattgagaaaagccaagtcctcagcaaatacaacttaacatagagaagaaaccaataaatacacacacaaaagtcagatattaagcccactgcacattcactgccaagaatgctcaggccctgggtctagtaaccaaaacatggcactcactgtgggcctttcactctgtgggtacagccccagctctgccatttccaggatcatgctattaccagtgactatctcctaaagggattgtggggaaagccaaaatacaaaaaaaagggcaatagagttccaagtctgttgctttattcagcacataaagaaacagcaatattgaaatagctctccccaa

SEQ ID NO: 1892 - DNA, 421 bp, Homo sapiens
  misc_feature 91, 175, 229, 276, 301, 344: n = A,T,C or G
ctatagggcgaattggagctccccgcggtggcggccgcttttttttttttttttttttttttttttttgaaggattacttatggaggtttnattatttttatttatttttgagactgagtcttgctctggtcatcaggctggagtgcagtggctcactgcaacctccgcctccangttcaagcaatttttctgccttaaccctcctagtaacctgggattaccaggttntccaccaccatgcccaattaattttttgtatttttgggtaccaaacnggggtttcacccattgttggccagnatggtctcaaatctccgttgaccttggtgatcccgcctgcctnggcctcccaaagtgctgggattacagggcgtgagcccacccgcccctggaactacttatgggagggtttttaaaaaa

SEQ ID NO: 1893 - DNA, 530 bp, Homo sapiens
  misc_feature 14, 39, 71: n = A,T,C or G
ttttgctgggtccngcccccctcgagagtacttctaganttaattaaggcgggtgatcacaaggtcaaganttcaagaccatcctggctaacatggtgaaaccccgtctctataaaaatacaaaaagttggccgggcgtggtggcgggcgcctgtagtcccagttactcgggaggctgaggcaggagaatggcgtgaacccgggaggcggagcttgcagtgatccgagatcacgccactgcacgccatcctaggcaacagagcgagactccatctcaaaaaacaaacaaacaaaaagttaaattccagtgatacagagactgccactgggaatttttagttttctgttattctttttttttccaaaaccaaggatcctaagaaagaatatttaagcagcctaagccaggcgtggtggctcacgcctgtaatagcactttgggaggccgaggctggcagatcacttgagatcaggagttgacaccagcctggccaacatggcgaaaacccgtctataccaaaaatacaaaa

SEQ ID NO: 1894 - DNA, 306 bp, Homo sapiens
  misc_feature 295: n = A,T,C or G
agtacttctagaattaattaacgcgggggaaaactgtcttacttaaacaaaatgtattttaggaaaatgcctgtttcaagggtttattactgttttataactaagagacttgggactttagtatacgaaaaggtgtcatttcaaatgggggaaaatgaattattcaacaaatgatcttgggacaactggatagccattcagaaaaaaagtgaagctggaacactataacatgctttaccccacaataaatcagagttaaatgtaaaaaaaaaaaaaaaaaaaaaaaaaaaaaaangcggccgccac

SEQ ID NO: 1895 - DNA, 349 bp, Homo sapiens
  misc_feature 75, 134: n = A,T,C or G
agtacttctagaattaattaacgcggggaggattgagaaaagccaagtcctcagcaaatacaacttaacataganaagaaaccaataaatacacacacaaaagtcagatattaagcccactgcacattcactgncaaagaatgctcaggccctgggtctagtaaccaaaacatggcactcactgtgggcctttcactctgtgggtacagccccagctctgccatttccaggatcatgctattaccagtgactatctcctaaagggattgtggggaaagccaaaatacaaaaaaaaggggcaatagagttccaagttctgttgctttattcagcacataaagaaacagca

SEQ ID NO: 1896 - DNA, 359 bp, Homo sapiens
  misc_feature 275: n = A,T,C or G
agtacttctagaattaattaaggcgggggaagggatagcatgatattcatatacagacttgaaacaaagaaaaatcacagaatacataggttttctatataaataagctgtcatattttttctttctttgctagcaaatataccttcttaaaaatgtttgattatcaattcacccaagaatttcttttagacttcctctataaaaggacattactatttatatttccccaatgcaatgtaattcatttaaaaatactgtgaagtctgactatgantcaggcattatattttgttttaggatgaataaggggaactcaaaaaacgaaggcaaataaagatgaatagttagatggataagc

SEQ ID NO: 1897 - DNA, 312 bp, Homo sapiens
  misc_feature 70, 126, 136, 205, 211, 270, 274, 312: n = A,T,C or G
ccgcggtggcggccgctttttttttttttttttttttttttttttttaacataaaactctgatttattgnggggtaaagcatgttatagtgttccagcttcactttttttctgaatggctatccanttgtcccaanatcatttgttgaataattcattttcccccatttgaaatgacaccttttcgtatactaaagtcccaagtnttttanttataaaacagtaataaacccttgaaacaggcattttcctaaaatacattttgtttaanaaanacagttttcccccgcgttaattaattctagaagtactn

SEQ ID NO: 1898 - DNA, 311 bp, Homo sapiens
  misc_feature 70, 111, 178, 207, 274: n = A,T,C or G
ccgcggtggcggccgctttttttttttttttttttttttttttttttaacatttaactctgatttattgnggggtaaagcatgttatagtgttccagcttcactttttttntgaatggctatccagttgtcccaagatcatttgttgaataattcattttcccccatttgaaatgacnccttttcgtatactaaagtcccaagtctnttagttataaaacagtaataaacccttgaaacaggcattttcctaaaatacattttgtttaagtaanacagttttcccccgcgttaattaattctagaagtact

SEQ ID NO: 1899 - DNA, 148 bp, Homo sapiens
agtacttctagaattaattaaggcgggggcaagatttgtccttcctgcggctgcgaacccaccgcgggtttgcgtatttcccttgattcctggaggacagagctgggatggacttgacccaagactcagggatgacgaaaggggaaat

SEQ ID NO: 1900 - DNA, 357 bp, Homo sapiens
  misc_feature 119, 156: n = A,T,C or G
ttttttttttttttttttttttgggatgctcaacctataatacccaaaggctctatttcagtagaatttattggtttgctgattatagcagtgacatagttgcattctagagaccttanaaaatgcagaaaatttcaagaaaaacatttaaattgngctcatagtgaaactgagaggtgaccactcttaatattttgtggcataagcattccagtcttttatctttctcaaagtttcacataaactttctcaaaggccattaaatacttttccatagcctgattttttgtgaccacatagtatcctattatattgataataccataatttacctaacccatttttatatatttggat

SEQ ID NO: 1901 - DNA, 588 bp, Homo sapiens
  misc_feature 229, 257, 486, 495, 531, 574, 575: n = A,T,C or G
gaagaatcaacagactctatatttgatcacaaagcaaaagtttaagtgtattacttaaaattttaagacaaaatctggaataattataactaacacaaattttgaggtagaggaagagaattctagagataggtgagataaaattttcatctttgataatgagtagacaaaaacactacctttaacaagtgaagaatttaaaaaatttagagaagaggaaatcataagnggtttttaaaatttattatacatatcgnggtaaagataatccaacagaaaatgagatttgaacagacacttcacaggagatagacaaatgtctcaacctcattagtcaccagacaaatgcaaattaaactcaaaatgcaatacctgtacacacctcacagaatggataaaacttgaaagactgacaaaccaaaccaacacaaagctggtctgaatgtggagcaaggaagacgctcgtactctcctggtgagcaaggnggagatggnaaaagagctggtgtaccactttggaaactgttagtntctattaaagtcacccgcgttaattaattctagaagtctcctnnggggggggccccg

SEQ ID NO: 1902 - DNA, 390 bp, Homo sapiens
agtacttctagaattaattaacgcgggttgactttaatagatactaacagttttccaaagtggttacaccagctcttttaccatctccaccttgctcaccaggagagtacgagcgtcttccttgctccacattcagaccaagctttggtgttggtttggtttgtcagtctttcaagttttatccattctgtgaggtgtgtacaggtattgcattttgagtttaatttgcatttgtctggtgactaatgaggttgagacatttgtctatctcctgtgaagtgtctgttcaaatctcattttctgttggattatctttacctcgatatgtataataaattttaaaaaccacttatgatttcctcttctctaaattttttaaattcttcactt

SEQ ID NO: 1903 - DNA, 672 bp, Homo sapiens
  misc_feature 125, 195, 260, 272, 317, 347, 446, 450, 460, 467, 502, 550,576, 638, 654: n = A,T,C or G
tttttttttttttttttttttttttgggaaggagtttcactcctgttgccaaggctggagtgcaatggcgcaattaggctcactgcaacctcctcttcccgggctcaagtgattctctgcctcanccctcccgagtagctgggattacagggacccaccacatgcccaagctaattttttgtatttttaataganatggggtttcaccatgttggccaggctggtcttgaactcctgacctcaggtgatccacctgcctnggcctcccaaantgctgggattacaggtgtgagccatggtacccaaccttcctcaancatttctgtctgtccccacacacaggcttnagcaagccaaaaaaaagcccaagggcatataggcaggggcaacaaacaatttgtgcaccttgcggctggcctggctaagtttcctaaaaaacaatattnttanacatgccctnaaaaaanaaaatgcactttgtaagggtgttttaaaaagccanggggttccctgagtttaccaaggataaaaaccccaataggaggtcccnaaaaaaaattttgttcccaaaaaganggaaagcccctttttttactggagggacactttaaaaccgtggtttgggaaaaaaaattaangaaaagggaaaaaacncaggggttaaaaaaaaaa

SEQ ID NO: 1904 - DNA, 577 bp, Homo sapiens
  misc_feature 75, 92, 154, 176, 199, 345, 435, 502: n = A,T,C or G
cgctttttttgttttttttttttttttacttgaattgttgttatagtgcttccgttatttatttttatttttttnattatactttaagttgnaggggcatgtgcacaacgtgcaggtttgctacatatgtatacatgtgccatgttggtggctnctcattaactcgcatttatatnaggtatatatacgtgttcattgnacccttatcgactttgcagcatgcttatccatctaactattcatctttatttgccttcgttttttgagttcccttattcatcctaaaacaaaatataatgcctgactcatagtcagacttcacagtatttttaaatgaattacatngcattggggaaatataaatagtaatgccttttatagaggaagtctaaaagaaattcttgggtgaattgataatcaaacatttttaaaaanggatatttgctagcaaagaaagaaaaaatatgacagcttatttatatagaaaacctatgtattctgngatttttctttggttcaagtctgtatatgaatatcatgctatcccttcccccgccttaattaattctagaagtct

SEQ ID NO: 1905 - DNA, 383 bp, Homo sapiens
  misc_feature 71, 131, 159, 196, 218, 238, 241, 255, 266: n = A,T,C or G
ctatagggcgaattggagctccccgcggtggcggccgcttttttttttttttttttttttttgggatgctnaacctataatacccaaaggctctatttcagtagaatttattggtttgctgattatagcantgacatagttgcattctagagaccttanaaaatgcagaaaatttcaagaaaaacatttaaattgngctcatagtgaaactgagaggngaccactcttaatattttgnggnataagcattccagncttttatcttnctcaaagtttcacataaactttctcaaaggccattaaatacttttccatagcctgatttttttgtgaccacatagtatcctattatattgataataccataatttacctaacccatt

SEQ ID NO: 1906 - DNA, 412 bp, Homo sapiens
gggacaaagctgggtccgggccccccctcgagagtacttctagaattaattaatccacccttgaaccagtctacctccagaattcctggtacatgagataataacatttcctttgtttaagtcacttttagttggattttctgttatttccaaccaaaagcattcaattgatagaaagtgatgaagtaagactgggacagcatttatccacccacatattttgtaaaactatgcctgtctgaccagacgtggtggctcatgcctggtaatcccagcactttgggaggctgctgcaggaggattgcttgaggccaggagttcaagaccagcctgggaaacatagcaagaccttatctctagaataaataaataacaataaaaatttttaaaactattgcctctcagacctaaa

SEQ ID NO: 1907 - DNA, 472 bp, Homo sapiens
  misc_feature 19, 430: n = A,T,C or G
ccctactaagggaacaaangctgggaccgggcccccctcgagagtcttctagaattaattaacgcgggttgactttaatagatactaacagttttccaaagtggttacaccagctcttttaccatctccaccttgctcaccaggagagtcgagcgtcttccttgctccacattcagaccagctttgtgttggtttggtttgtcagtctttcaagttttatccattctgtgaggtgtgtacaggtattgcattttgagtttaatttgcatttgtctggtgactaatgaggttgagacatttgtctatctcctgtgaagtgtctgttcaaatctcattttctgttggattatctttacctcgatatgtataataaattttaaaaaccacttatgatttcctcttctctaaattttttaaattcttcacttgntaaaggtagtgtttttgtctactcattatcaaagatgaaaat

SEQ ID NO: 1908 - DNA, 390 bp, Homo sapiens
agtacttctagaattaattaacgcgggttatctaaaattagatacttaatgtatctttcagaaaatcagataaaatgccctttggatggacccctgtctaaatgggcacagtaagaaatgttatattcaacttgtaaaagatttggttttattaaaattcatatttgaactccccaataaaccaataatttatattctatattttgttacaagttataatggttccagctgggcgtgatggctcacgcctgtaatcccagcactttgggaggccgaggcgggcgtcacctgaagtcagtgagaccctgtctctactaaaaatacaaaaattagctagggcgtggtggcaggtgcctgtaatcccagctactcgggaggttgaggagaaga

SEQ ID NO: 1909 - DNA, 304 bp, Homo sapiens
agtacttctataattaattaacgttggggaaaactgtcttacttaaacaaaatgtattttaggaaaatgcctgtttcaagggtttattactgttttataactaagagacttgggactttagtatacgaaaaggtgtcatttcaaatgggggaaaatgaattattcaacaaatgatcttgggacaactggatagccattcagaaaaaaagtgaagctggaacactataacatgctttaccccacaataaatcagagttaaatgtaaaaaaaaaaaaaaaaaaaaaaaaaaaaaaaagcggccgcc

SEQ ID NO: 1910 - DNA, 307 bp, Homo sapiens
  misc_feature 35, 65, 139, 140, 144, 155, 211, 217, 266, 289, 291: n = A,T,C or G
aaagcaaaactcccgacagccgagccccgttcggngccttttcttttttttttctttaatggagngaaatctactttgctcaggaagcctgcaaatcacattttcaggccaaacgaggcagtattttaaaaggggtccnntganggcagggattnaggaaggctttccactccactcacgcattttcagtgtaggcgaatcgtaaaacggngggcanaacgaaaatgagcggatctgggagtgcaggctgcgcttcgtccccccgngttaattaattctagaagtactntngagggggggcccggta

SEQ ID NO: 1911 - DNA, 424 bp, Homo sapiens
  misc_feature 3, 107, 288, 305, 343, 348, 354, 366: n = A,T,C or G
ctnctatagggcgaattggagctccccgcggtggcggccgcttttttttttttttttttttttttttgagacaagatcttgtcctgtcacccaggctggaatactgnggtgcaatcatagctcactgcagcctcaaacttctgggctcaagtgatcctcccacctcagcctcctgagtagctgggaatgcaggcacataccaccatacctgggctaattaaaaaaattttttttaatctcactgtattactgaagctggtctggaactcctggccttgaacgatcatntcagcctccccaaactntgggattacaggcatgaaccattacacctggcttgaanagaanaggttnttaatattgaanaagtccatttatctgtttttgttttttttcccctcatgtattgggtttttggtattgg

SEQ ID NO: 1912 - DNA, 384 bp, Homo sapiens
  misc_feature 24, 44, 129, 168, 173, 195, 207, 223, 236, 239, 252, 255,263, 266, 302, 308, 312, 321, 324, 337, 340, 342, 358, 370,371: n = A,T,C or G
tgaaaaaacaacctggacttttanggtcaaaattcttgacaaanataaattattgtaaattttagaaaagggcaaaacagggccccttcttaacattctttttgcattcccccacccatagaggcagcncatttatttgatatataaggtaaatttgggaaacaaagnatagnacagccaagttttgccccatantttccttttaanaaaaaatgttgccttnttggttggggccnctnggttggcacaacnccncgtcccanttnaccggccccttttaaaattttaaattttccttaagnaaaaangttnaacctttcnttntgaaagggggggnggngnggcccccccggggttnaacccccaaaannttttttttggttt

SEQ ID NO: 1913 - DNA, 362 bp, Homo sapiens
  misc_feature 252, 282: n = A,T,C or G
ggtggcggccgcttttttttttttttttttttttttttttggagacagggttttgacatgttggtcaggctggtcatgaactcctggcctcaagtgatccacctacctcggcctcccaaagtgctgggattacaggtgtgagccaccgcgcccaaccctgtgtttattcttaggtctgtactacgctttatgcctcagtttccacagttaaaacacgttattttattcctcacgttataggagcaatttgtnttcataaacttggccttcaccttcaacttntgaagattttaatacagcgcaaatgatttggggtctgtgaattcagttttatttatttggctccttcctttaaggagtca

SEQ ID NO: 1914 - DNA, 311 bp, Homo sapiens
  misc_feature 90, 136, 178, 207, 256: n = A,T,C or G
ccgcggtggcggccgcttttttttttttttttttttttttttttttttacattaaactctgatttattggggggtaaagcatgttatagngttccagcttcactttttttctgaatggctatccagttgtcccaanatcatttgttgaataattcattttcccccatttgaaatgacnccttttcgtatactaaagtcccaagtctnttagttataaaacagtaataaacccttgaaacaggcattttcctaaaanacattttgtttaagtaagacagttttcccccgcgttaattaattctagaagtact

SEQ ID NO: 1915 - DNA, 373 bp, Homo sapiens
  misc_feature 303: n = A,T,C or G
agtacttctagaattaattaacgcgggattttctttggtcttatgccaatatttgcaatcagctagtatgatgttttcttattttagtttattgccagtgtgatttagtgcttcattcatcattaattatctttataattttgtctttgaattttccttgtaaaaagagactggtcttactttttttatagtccttactaacaaggacactgtaagacttgtgagttggtgtggactatgccatcagatatatccatcttgttatcccaaagttagatccagttaaggccagctgtgggtagnaaggtcaaagtagatgacgggcgaaggataatttttaaaaggacttttgctaaaagaagtaagatgtatc

SEQ ID NO: 1916 - DNA, 434 bp, Homo sapiens
catgggccacatttttaagacaaacatggaccacaaccatgctgagagaacttagagtgaagtttacatggctatctttcttagtattagaaattttacctgataaacatcaaacatacgaccaacatagcatataaagcagctctacagatattttcctactgcccaaaatatcatataatgcacatgtaggtcacatgtgagtaggcaagagattctggaacacagaagcaagacaacaggatcacagcaatttcagtatgctctgcttgttataggaaatccccagaacattctccaattactgaacaaaaaaagcaataaaactcagatttgtctgcctggggagaaataaacagaaatagaaagtgaatagcaaaacaaagctatctggtgaaaagacattcttacttggaaggagttaagattttgcc

SEQ ID NO: 1917 - DNA, 376 bp, Homo sapiens
  misc_feature 45, 153, 155: n = A,T,C or G
ccgcggtggcggccgcttttttttttttttttttttttttgaggnggagtcttgctctgtcaccaggctggagtgcagtggtgcaatcttggctcactgcaaccttcccctcctggctgagttaacttaggagagcttcctggagagggcagngntttgaagataggaaggatttcatgaagtctttactaggccactagagtagaagcagtgggagacttcctggagaagagctcatggaaagaaaaacctaccgctggccctttgggaactgctttgggcctctttagtcctaggctcacacgccccttagaaacaaagtaagaataaagccagggataatacagtgagtggccaagaacacagactctggagc

SEQ ID NO: 1918 - DNA, 333 bp, Homo sapiens
  misc_feature 162, 269, 286: n = A,T,C or G
tttttttttttttttttttttttttttggagacagggttttgacatgttggtcaggctggtcatgaactcctggcctcaagtgatccacctacctcggcctcccaaagtgctgggattacaggtgtgagccaccgcgcccaaccctgtgtttattcttaggnctgtactacgctttatgcctcagtttccacagttaaaacacgttattttattcctcacgttataggagcaatttgtattcataaacttggccttcaccttcaacttntgaagattttaatacancgcaaatgatttggggtctgtgaattcagttttatttatttggctcc

SEQ ID NO: 1919 - DNA, 276 bp, Homo sapiens
  misc_feature 5, 30, 33, 36, 44, 45, 65, 67, 68, 74, 77, 80, 83, 91, 92,97, 98, 99, 115, 126, 133, 137, 161, 219, 247: n = A,T,C or G
tgatntaaaatcatgtgcttatgacatgcnttnaanaggagaanngctggtctaatatcctaggncnnatgganccnctngcngatatacnnggctnnntacacacactgggatntctaggtacangcccaangttnatatacagactttctaaaatcatngtatttaaaagcagaaaagtgccgggcacagtggctcacatctgtaatcccaatactntgggaggctgaggtgggcgaatcacctnaggtcgcgagctcaagaccagcctggcca

SEQ ID NO: 1920 - DNA, 265 bp, Homo sapiens
  misc_feature 101, 118, 139, 161, 180, 233: n = A,T,C or G
cccccctcctagagtacttcttagaattaattaacgcgggggaaaactgtcttacttaaacaaaatgtattttaggaaaatgcctgtttcaagggtttatnactgttttataactaanagacttgggactttgtatacnaaaaggtgtcatttcaaaatgngggaaaatgaattattcancaaatgatcttgggacaactggatagccattcagaaaaaaagtgaagctggancactataacatggctttaccccacaataaatc

SEQ ID NO: 1921 - DNA, 515 bp, Homo sapiens
  misc_feature 8, 17, 49, 51, 56, 59, 63, 196, 198, 245, 313, 375, 393,408, 478, 506: n = A,T,C or G
tggagctncaccgcggnggcggccgcttttttttttttttttttttttngnttttnaanaccngaggccccaaactagcagcctgtcctcctcagtagccccagcatcccttcatcattttgttgcccttctatgggcctagtttaggtctgagaggcatagttttaaaatttttattgttatttatttattctananataaggtcttgctatgtttcccaggctggtcttgaactcctggcctnaagcaatcctcctgcagcagcctcccaaagtgctgggattacaggcatgagccaccacgtctggtcanacaggcatagttttacaaatatgtgggtggataaatgctgtccagtcttacttcatcacttntatcaattgaatgctttnggttggaaataacanaaaatccaactaaaagtgacttaaacaaaggaaatgttattatctcatgtaccaggaattctggaggtanactggttcaagggtggattaattaattntagaagact

SEQ ID NO: 1922 - DNA, 302 bp, Homo sapiens
  misc_feature 61, 89, 94, 124, 127, 206, 212, 285: n = A,T,C or G
aacctataatacccaaaggctctatttcagtagaatttattggtttgcgtgattatagcancgacatagttgcattctaaagaccttanaaaangcaaaaaatttcaagaaaaacatttaaatnggngctcatagtgaaactgagaggtgaccactcttaataatttggggcataagcattccagtcttttatctttctcaaagtntcacanaaactttctcaaaggccattaaatacttttccatagcctgattttttgggaccacatagtatcctattatatngataataccataattta

SEQ ID NO: 1923 - DNA, 315 bp, Homo sapiens
  misc_feature 38, 48, 51, 52, 62, 74, 77, 79, 114, 115, 132, 161, 194,252, 261, 266, 275, 282, 287: n = A,T,C or G
cgctcgtttttttttttttttttttttttttttttacnttaaactttnatnnattggggggnaaagcatgttanagngntccagcttcactttttttctgaatggctatccagnngtcccaagatcatttgntgaataattcattttcccccatttgaaangacaccttttcgtatactaaagtcccaagtctnttagttataaaacagtaataaacccttgaaacaggcattttcctaaaatacattttgnttaagtaanacagntttcccccncgttaantaatnctagaagtactctcgagggggggcccgg

SEQ ID NO: 1924 - DNA, 337 bp, Homo sapiens
agtacttctagaattaattaaatgtgaaaagcaaatttgaaagcatcttagtctgtaaaactacttcatgtataaaaaataaacatttgacagaactctcagagcaaagctatctgagggattctttaaagcttccaatttatcaaattacctttttttttttggtcggcagggggaagtagtctcactctgttgcccagggtggagtgcaatggcaggatctcagctcactgcaacctttgtctcccaggttcaagtgattctcccacttcaacctcccgagtatctgggactactggcatacaccaccacacccggctaattttttgtattttta

SEQ ID NO: 1925 - DNA, 398 bp, Homo sapiens
agtacttctagaattaattaacgcgggcgtctccctgccaggccttgggctctgcagaggtgcccactgaaagcttgtcctgtgccctctacacctcagaggggttcagagccaagctccaggacccctgctgtcaaaaagtgttccctgggaacaagtgcagggaacagtcctgcaagcaagggactgcttgccctgctttcggacagccttctgagagccagtgaaggccagcagctgggctgaacactacatcatcctcagaaccaccctgcacagccggtgtgctccccgccatcgacaggaaaaacgggcccttagaggcacagggcaacttgctcggggtttaggtgcagcgggtggcaagagtcaaaaatgtgagggacagttgggccact

SEQ ID NO: 1926 - DNA, 423 bp, Homo sapiens
agtacttctagaattaattaacgcggggaagataattagtggcaaacagagaataaattctctctcagtagtgtgtacttgacgttaatgccgatgataattcatctgatctacagaatattcactttaatagagagatgagagtctgaaatgaccagagggaaaatagatactaaagccaatatagtcttgataccaaaataaaattaaaatgagaaactaacatgataggttcaaggccttttgggagcctgttttctttgccagatttcacattcttacagcttcatggtctttttcttctaacaaattaatcagctgagagaagctgtctttcagtgcatccatgtcatccagtgagcagggctgtagaatccagcgttttccacgtgcaagtggttcaagttcaaaatattttttgat

SEQ ID NO: 1927 - DNA, 381 bp, Homo sapiens
agtacttctagaattaattaacgcgggtcccggactcaagcctgactaatgtttttactttttgtggggacaggggtctccctatgttgcccaagctgttctcaaactcttgggcttaagcaatcctcccaccttggcctctcaaggtgctaggattacaaatatgaaccactctgcccagcctctaaacactgttttaaatacaaagaaatagttcttgtttctgcatgtcatagctttgtaagtttacctttttctattttatctaatattgatgtatacataggagaaagggtacttcagaacatgaattttagagcaatctaccaagtctcatgattacaatagttgaaaatttggaaaaattgtctacccagaaaa

SEQ ID NO: 1928 - DNA, 307 bp, Homo sapiens
  misc_feature 31, 62, 188, 277: n = A,T,C or G
agtacttctagaattaattaacgcggggaanataattagtggcaaacagagaataaattctntctcagtagtgtgtacttgacgttaatgccgatgataattcatctgatctacagaatattcactttaatagagagatgagagtctgaaatgaccagaggaaaatagatactaaagccaatatagtnttgataccaaaataaaattaaaatgagaaactaacatgataggttcaaggccttttgggagcctgttttctttgccagatttcacattnttacagcttcatggtctttttcttctaaca

SEQ ID NO: 1929 - DNA, 357 bp, Homo sapiens
  misc_feature 32, 35, 89, 147, 168, 183, 202, 207, 211, 216, 222, 223,261, 271, 275, 323, 327, 328, 342: n = A,T,C or G
ttttttttttttttttttttttttacttgaantgnagttatagtgcttccgttatttatttttattttttttattatactttaagtttnagggtacatgtgcacaacgtgcaggtttgctacatatgtatacatgtgccatgttggngcgctgcactcattaactcgncatttatattaggcntatatacgtgttcattggnccctnatcnacttngcaggnngcttatccatctaactattcatctttattcgccttcgntttttgaggncccntattcatcctaaaacaaaatataatgcctgactcatagtcagacttcncagnntttctaaatgaatnacattgcattgggga

SEQ ID NO: 1930 - DNA, 386 bp, Homo sapiens
  misc_feature 347: n = A,T,C or G
agtacttctagaattaattaaatgaaatcatattgggcattcatatgtgctaaacaccattctaagtgctgaggcactatgatgaatatgacagacagatacctgttcccagagagtttataatgttgaggtaaagagccacataaaagacaattgtgttatcacttatgaagggctttgggatcaatgaggagggatgcctaacacagacaaaaattcaaagaagcctgcatagaagaggtatcatttaggttgaaatgtgagagaaaaacagcattgtagggagaattccgggcattgtagggagaaattctgggcaatgggaacaggcatgtgcagagacctanaggccatgaggggaggggcaaggtattgtttgaagatgg

SEQ ID NO: 1931 - DNA, 473 bp, Homo sapiens
tcgagagtacttctagaattaattaacgcgggggaaaaaaaaaaagaaaagaaagcgccttcaaggccatctgtttctctgctactaccctttttggaaagacaaatctccttcccctccctgtcctccttctttacattcccctagggctgtgtacctctctctcagcgtgccctgcctcggtgcctctgtggcagggccaggtctgacttcccagatgagcttgctctcctaagctgcatcattgcatgactctcctctttcctaacctccctcactcctccagctcccttctgctggtgaatgacatctcttcacgccacacagtcacaggacggctgctccaccaccggcatcacatctcctttccaggcaggaagaagaggaaggaggaagagacaggacaaaggtggtctttcttccagtaaagctttgactttttatctagaaaacattatctctgagcttttcac

SEQ ID NO: 1932 - DNA, 438 bp, Homo sapiens
  misc_feature 386, 411: n = A,T,C or G
ttatagtgcttccgttatttatttttattttttttattatactttaagttttagggtacatgtgcacaaccgtgcaggtttgctacatatgtatacatgtgccatgttggtgtgctgcactcattaactcgtcatttatattaggtatatatacgtgttcattgtacccttatcgactttgcagcatgcttatccatctaactattcatctttatttgccttcgttttttgagttcccttattcatcctaaaacaaaatataatgcctgactcatagtcagacttcacagtatgtttaaatgaattacattgcattggggaaatataaatagtaatgtccttttatagaggaagcctaaaagaaattcttgggtgagttgataatnaaacatttttaagaagggatatttngctagcaaaagaaaagaaaaaatatga

SEQ ID NO: 1933 - DNA, 392 bp, Homo sapiens
agtacttctagaattaattaacgcgggatcctcccaccacacacacagcagcaggcggtgaggacaggcctcatgcagggagacagggagcggccagacagcctggcactcctctgactgctcagggctgggccctgggacggggctcccgcctccatgaaggcttggggtcctcaccccagcatctgaggatcggcttctgccaagcaaaccccacacaagctttgcctcctccggaaatgtccctgaagcacacatggagtcagggagagggccagagccaaatccctcacaatgaccaaccaccagggaggaggctccgccagcccaacagcaagactccgcccaggcagcagggacacagtaagcgtttcaggaaggaagcaaggagc

SEQ ID NO: 1934 - DNA, 340 bp, Homo sapiens
  misc_feature 81, 159: n = A,T,C or G
ttttttttttttttttttttttttttttaagagggagtcttactccgtcacccaggctggagtgtggtggtgtgatctcanctcacagcaacctgacctcaggtgattcacccgcctctgtctcccaaagtgctgggattacaggcgtgagccactgcncccggcgtctttgaattttttaaactgaagtttaattgcctttgagtttgatcattcactatttgtcatttgtatttcttttgttaattatctgctcaagctctaatttcataatggaaatttaatggattaacatataacacccactatcacccgccttaattaattctagaagtactct

SEQ ID NO: 1935 - DNA, 626 bp, Homo sapiens
  misc_feature 329, 430, 432, 514, 521, 541, 576, 607, 614: n = A,T,C or G
ctatagggcgaattggagctccccgcggtggcggccgcttttttttttttttttttttttttgggatgctcaacctataatacccaaaggctctatttcagtagaatttattggtttgctgattatagcagtgacatagttgcattctagagaccttagaaaatgcagaaaatttcaagaaaaacatttaaattgtgctcatagtgaaactgagaggtgaccactcttaatattttgtggcataagcattccagtcttttatctttctcaaagtttcacataaactttctcaaaggccattaaatactttccatagcctgattttttgngaccacataagtatcctattatattgataataccataatttacctaacccatttttatatatttggattttttccaattcatcattattatgaataatggngnatctcaagggggtattacttgcactgcatttcttatgaaagtattgagtaaaaggaagtaaagccctctcagagtgttttgnaggctgncacatttcactccataatgncctaagggttggtgcccccagtgatatatgaaggnacccactggaatgtccacctttttgggtttnctttttnaaaaaaaaaata

SEQ ID NO: 1936 - DNA, 423 bp, Homo sapiens
  misc_feature 23, 41, 42, 43, 52, 53, 58, 80, 88, 102, 143, 147, 149, 150,156, 174, 176, 180, 192, 205, 213, 263: n = A,T,C or G
ctcccaccgggccccccctcgantgtacttctagaatttannnacgcgggtnnaaaancaaaagaaaagaaagcgcctgngaaggccntctgtttctctgcnactaccctttttggaaagacaaatctccttcccctccctgncctncnnccttcnacattcccctagggctgngnaccnctctctcagcgngccctgcctcggngcctctgnggcagggccaggtctgacttcccagatgagcttgctctcctaagctgcancattgcatgactctcctctttcctaacctccctcactcctccagctcccttctgctggtgaatgacatctcttgcacgccacacagtcacaggacggctgctccaccaccggcatcacatctcctttccaggcaggaagaagaggaaggaggaagagaca

SEQ ID NO: 1937 - DNA, 378 bp, Homo sapiens
agtacttctagaattaattaaatgaaatcatattgggcattcatatgtgctaaacaccattctaagtgctgaggcactatgatgaatatgacagacagatacctgttcccagagagtttataatgttgaggtaaagagccacataaaagacaattgtgttatcacttatgaagggctttgggatcaatgaggagggatgcctaacacagacaaaaattcaaagaagcctgcatagaagaggtatcatttaggttgaaatgtgagagaaaaacagcattgtagggagaattccgggcattgtagggagaattctgggcaatgggaacaggcatgtgcagagacctagaggcatgagggaggggcaaggtatgtttggaa

SEQ ID NO: 1938 - DNA, 460 bp, Homo sapiens
  misc_feature 110, 140, 142, 189, 257: n = A,T,C or G
gaccagagaggccccaaactagcagcctgtcctcctcagtagccccagcatcccttcatcattttgttgcccttctatgggcctagtttaggtctgagaggcatagtttnaaaatttttattgttatttatttattctananataaggtcttgctatgtttcccaggctggtcttgaactcctggcctnaagcaatcctcctgcagcagcctcccaaagtgctgggattacaggcatgagccaccacgtctggtcanacaggcatagttttacaaatatgtgggtggataaatgctgtccagtcttacttcatcacttctatcaattgaatgcttttggttggaaataacagaaaatccaactaaaagtgacttaaacaaaggaaatgttattatctcatgtaccaggaattctggaggtagactggttcaagggtggattaattaattctagaagtact

SEQ ID NO: 1939 - DNA, 347 bp, Homo sapiens
  misc_feature 1, 127, 158, 218, 248, 250, 319: n = A,T,C or G
ncttagggcgaattggagctccccgcggtggcggccgctttttttttttttttttttttttttggaaatatgcccacccatttcaggttgagccacggataaggagggcttagctcatgtctcctgngggaattgaggcatctcaggaaacagtatanagttggtacagttagaatgagaagaagcctggggaaagaaaccaagagtgagaaatgcgnggctattttgacttagctggagcaaccctntnataacaggctgggaagtggacccgcgttaattaacgcgggggaaattgatgaacaaacaaaggtcatantaaaagacagacttttggggataaaaaa

SEQ ID NO: 1940 - DNA, 377 bp, Homo sapiens
agtacttctagaattaattaacgcgggcattgtgtgcagaagacctggactggaatctaacactgtgagtactccccaggatccgtgttcctctctttagcccaggcatgcagttacattacattttccaaccttccttgcagttagctacgatcacgtgactgcattctggccagtggaatgtgtgtgggaagtgatgtgggccaattccaggcctggcctataaaaatcccccactttttgttctctttctccatccaccatctgcatggagagctcccagcactagagggagaaaaagccaccagagggaaggagcctgggtccctgaatcactgtgtagactacctgccaaacatacaccctgaattgttatg

SEQ ID NO: 1941 - DNA, 406 bp, Homo sapiens
agtacttctagaattaattaaggcgggcgcctgtaatctcagctactttggaggccgaggcaggagaattgctagaacccaggaggcagaggttgcagtgagctgagatcgcgccactgcactccagcctgggagacagaatgagactccatctccaaaaaaaaaagaaagaaagaaagaaagaaagaaagaaggctctattttgatactgggagcctaaactgaatgattctggagaaattcacagatggggcttgaggctcaccttcatgacaggctgtatcaaaggcctaaatttctaaggctcagaaatcactacaataagcctatcaacaggcatggtgatactctccaagccattttgcaaccttaacatttccatcctttacagtactttgatatcctc

SEQ ID NO: 1942 - DNA, 333 bp, Homo sapiens
  misc_feature 70, 112, 167, 168, 293, 304: n = A,T,C or G
ctatagggcgaattggagctccccgcggtggcggccgctttttttttttttttttttttttttttttttnacatgaaactctgatttattggggggtaaagcatgttatagngttccagcttcactttttttctgaatggctatccagttgccccaagatcatttgnngaataattcattttcccccatttgaaatgacaccttttcgtatactaaagtcccaagtctcttagttataaaacaggaataaacccttgaaacaggcattttcctaaaatacattttgtttaagnaagacagtttncccccgcgttaattaattctagaagtact

SEQ ID NO: 1943 - DNA, 339 bp, Homo sapiens
  misc_feature 135: n = A,T,C or G
agtacttctagaattaattaacgcggggaagataattagtggcaaacagagaataaattctctctcagtagtgtgtacttgacgttaatgccgatgataattcatctgatctacagaatattcactttaataganagatgagagtctgaaatgaccagaggaaaatagatactaaagccaatatagtcttgataccaaaataaaattaaaatgagaaactaacatgataggttcaaggccttttgggagcctgttttctttgccagatttcacattcttacagcttcatggtctttttcttctaacaaattaatcagctgagagaagctgtcttttcag

SEQ ID NO: 1944 - DNA, 574 bp, Homo sapiens
  misc_feature 22, 50, 62, 68, 73, 145, 401, 486, 548, 554, 559: n = A,T,C or G
ttaacgcgggggaaaaaaaaanttaaaagaaagcgccttcaaggccatcngtttctttgctnctaccnttttnggaaagacaaatctccttcccctccctgtcctccttcctttacattcccctagggctgtgtacctctctctnagcgtgccctgcctcggtgcctctgtggcagggccaggtctgacttcccagatgagcttgctctcctaagctgcatcattgcatgactctcctctttcctaacctccctactcctccagctcccttctgctggtgaatgacatctcttcacgccacacagtcacaggacggctgctccaccaccggcatcacatctcctttccaggcaggaagaagaggaaggaggaagagacaggacaaaggtgggtctttcttncagtaaagctttgactttttatctagaaaacattatctctgagcttttcacctacatttccttggccagacctgggtcacgtggncacctctaattgagaagatgaagtatttcaaagggacacatttttgttcccttccaaatcanggctgngttangaagaaagcgggaat

SEQ ID NO: 1945 - DNA, 301 bp, Homo sapiens
  misc_feature 50, 54, 79, 134, 167, 196, 301: n = A,T,C or G
gccgcttttttttttttttttttttttttttttttttacattaaactttnattnattggggggtaaagcatgttatagngttccagcttcactttttttctgaatggctatccagttgtcccaagatcatttgntgaataattcattttcccccatttgaaatgacnccttttcgtatactaaagtcccaagtctnttagttataaaacagtaataaacccttgaaacaggcattttcctaaaatacattttgtttaagtaagacagttttcccccgcgttaattaattctagaagtactn

SEQ ID NO: 1946 - DNA, 440 bp, Homo sapiens
  misc_feature 150, 159, 161, 164, 223, 311, 352: n = A,T,C or G
agtacttctagaattaattaacgcgggggaaaaaaaaaaagaaaagaaagcgccttcaaggccatctgtttctctgctactaccctttttggaaagacaaatctccttcccctccctgtcctccttccttctacattcccctagggctgngtacctctntnctnagcgtgccctgcctcggtgcctctgtggcagggccaggtctgacttcccagatgagctngctctcctaagctgcatcattgcatgactctcctctttcctaacctccctcactcctccagctcccttctgctggtgaatgacatctnttcacgccacacagtcacaggacggctgctccaccaccggnatcacatctcctttccaggcaggaagaacaggaaggaggaagagacaggacaaaggtggtctttcttccagtaaagctttgacttttt

SEQ ID NO: 1947 - DNA, 357 bp, Homo sapiens
agtacttctagaattaattaacgcgggggaaaaaaaaaaagaaaagaaagcgccttcaaggccatctgtttctctgctactaccctttttggaaagacaaatctccttcccctccctgtcctccttccttctacattcccctaggggcttgtggtacctctctctcagcgtgcccttgcctcggtgcctctgtggcagggccaggtctgacttcccagatgagcttgctctcctaagctgcatcattgcatgactctcctctttcctaacctccctcactcctccagctcccttctgctggtgaatgacaatcttgttcacgcccacacagtcacaggaccggctgcttccaccacc

SEQ ID NO: 1948 - DNA, 405 bp, Homo sapiens
  misc_feature 105, 230: n = A,T,C or G
agtacttctagaattaattaacgcgggggaaaaaaaaaaagaaaagaaagcgccttcaaggccatctgtttctctgctactaccctttttggaaagacaaatctncttcccctccctgtcctccttccttctacattcccctagggctgtgtacctctcttctcaagcgtgccctgcctcggtgcctctgtggcagggccaggtctgacttcccagatgagcttgctctnctaagctgcatcattgcatgactctcctctttcctaacctccctcactcctccagctcccttctgctggtgaatgacatcttcttcacgccacacagtcacagggacggctgctccaccaccggcatcacatctcctttccaggcaggaagaagaggaaggagggaagagacagg

SEQ ID NO: 1949 - DNA, 406 bp, Homo sapiens
  misc_feature 14: n = A,T,C or G
ctatagggcgaatnggagctccccgcggtggcggccgcttttttttttttttttttttttttttttttagatggagtcttactccgtcacccaggctggagtgtggtggtgtgatctcagctcacagcaacctgacctcaggtgattcacccgcctctgtctcccaaagtgctgggatacaggcgtgagccactgcgcccggcgtctttgaattttttaaactgaagtttaattgcctttgagtttgatcattcactatttgcatttgtatttcttttgttaattatctgctcaagctctaatttcataatggaaatttaatggattaacatataacacccactatcacccgccttaattaattctagaagtactctcgagggggggcccggacccagcttttgtt

SEQ ID NO: 1950 - DNA, 414 bp, Homo sapiens
  misc_feature 13, 15, 19, 30, 41, 42, 46, 51, 134, 167, 313, 377, 392: n = A,T,C or G
gccccccctcgantngtanttctagaattnattaacgcggnntttnaaaanaaaagaaaagaaagcgccttcaaggccatctgtttctctgctactaccctttttggaaagacaaatctccttcccctccctgncctccttccttctacattcccctagggctgagnacctcactctaagcgtgccctgcctcggtgcctctgtggcagggccaggtctgacttcccagatgagcttgctctcctaagctgcatcattgcatgactctcctctttcctaacctccctcactcctccagctcccttctgctggngaatgacatctcttcacgccacacagtcacaggacggctgctccaccaccggcatcacatctcntttccaggcaggaanaagaggaaggaggaagagacag

SEQ ID NO: 1951 - DNA, 266 bp, Homo sapiens
  misc_feature 142, 147, 170, 235: n = A,T,C or G
agtacttctagaattaattaacgcgggatcctcccaccacacacacagcagcaggcggtgaggacaggcctcatgcagggagacagggagcggccagacagcctggcactcctctgactgctcagggctgggccctgggacnggggntcccgcctccatgaggcttgtgntccttcaccccagcatcttgaggatcgcttctgccaagcaaaccccacacaagctttgcctcctncggaaatgtccctgaagcacacatggagtca

SEQ ID NO: 1952 - DNA, 370 bp, Homo sapiens
  misc_feature 31, 33, 359: n = A,T,C or G
agtacttctagaattaattaacgcgggggantnaaaaaaagaaaagaaagcgccttcaaggccatctgtttctctgctactaccctttttggaaagacaaatctccttcccctccctgtcctccttccttctacattcccctagggctgtgtacctctctctcagcgtgccctgcctcggtgcctctgtggcagggccaggtctgacttcccagatgagcttgctctcctaagctgcatcattgcatgactctcctctttcctaacctccctcactcctccagctcccttctgctggtgaatgacatctcttaacgccacacagtcacaggacggctgctccaccaccggcatcacatntcctttccagg

SEQ ID NO: 1953 - DNA, 334 bp, Homo sapiens
  misc_feature 86, 131, 165, 170, 186, 299, 330: n = A,T,C or G
ggaggaaggcacctacaaaacgaaagtgcctagggcttacaaaagtcatatgtagcctttacaaatattagctcagtcattttcanaaaggtttttccaattatcattttaaagatgaggaaacctgaaanctaagggaggctagggaaacttatccaaagcctnttaanaggctatgttagtcanactgggctaacagctgtaacaaccccagaatttaaatggcttaacacattaggagtttatttgttattgccataacaattcagggtgtatgtttggcaggtagtctacacagngattcagggacccaggctccttccctctggnggct

SEQ ID NO: 1954 - DNA, 403 bp, Homo sapiens
  misc_feature 29, 220: n = A,T,C or G
agtacttctagaattaattaacgcgggcnacctacatgtatatgaagacagtgtttaatctctctttgtcattcctatttatgaatggggatagcaactaaaacctcatgagctgagtattaaagaaggttatatgaattttctaatagctccctaatagcatggtggctcacatatgtaagcccaacactttgggaggccgagatgggtggacggcttnagcctaggaattagagaccctcattaaaaaaaaattaaagaaacaaaaccaaaaacatatgctgatcacttgagcccagagtttgagacaagcctgggcaacacagggagaccttcctctacaaaaaaaatacgaaaattaagtggtgcatgcctgtaatcctagctattcagggagactgag

SEQ ID NO: 1955 - DNA, 351 bp, Homo sapiens
agtacttctagaattaattaacgcgggggaaaaaaaaaaagaaaagaaagcgccttcaaggccatctgtttctctgctactaccctttttggaaagacaaatctccttcccctccctgtcctccttccttctacattcccctagggctgtgtacctctctctcagcgtgccctgcctcggtgcctctgtggcagggccaggtctgacttcccagatgagcttgctctcctaagctgcatcattgcatgactctcctctttcctaacctccctcactcctccagctcccttctgctggtgaatgacatctcttcacgccacacagtcacaggacggctgctccaccaccggc

SEQ ID NO: 1956 - DNA, 650 bp, Homo sapiens
  misc_feature 567, 634, 636: n = A,T,C or G
agtacttctagaattaattaacgcgggggcgctaggacctggagggctagtcggcgggctgcgcgtccggccgctagctgagctggaggccaccggccagagccgaccccaggagtgagagagacaggggccgtgcgtgagttccggcggcctgcaccgggcaaaccccgtaccttcccagcatcggctcagcaacccacgtgcatccaggccggtcaatgtcattgagtcacctccgcgccttggccaccctggagtcccgagaatccgaagttccagacaaatgcccaaactacattcctgcatgttcgaaagcgtaaattgcaaagcacaaatccagttgtagattgtggccgggagcagtggctcacgcctataatcccagcactttgggaggccgaggcggacagatcacgaggtcagcacttcgagaccaagcatggccaacatggtgaagccccatctctactaaaaatacaaacattagccaggcatggtggtaggcccctgtaatcccaagctactcggtaggctgaggcaggagaatcacttgaacccgggaggcanaagtttcagtgagcttgagactgcaccatttgacttcagcctgggcgaaaagaccaagaattcattntnaaaaaaaaaaaaaa

SEQ ID NO: 1957 - DNA, 294 bp, Homo sapiens
  misc_feature 264, 280: n = A,T,C or G
agtacttctagaattaattaacgcgggggaaaactgtcttacttaaacaaaatgtattttaggaaaatgcctgtttcaagggtttattactgttttataactaagagacttgggactttagtatacgaaaaggtgtcatttcaaatgggggaaaatgaattattcaacaaatgatcttgggacaactggatagccattcagaaaaaaagtgaagctggaacactataacatgctttaccccacaataaatcagagttaaatgtnaaaaaaaaaaaaaaanaaatatagaaaaaa

SEQ ID NO: 1958 - DNA, 518 bp, Homo sapiens
  misc_feature 480, 507: n = A,T,C or G
agtacttctagaattaattaacgcgggttgactttaatagatactaacagttttccaaagtggttacaccagctcttttaccatctccaccttgctcaccaggagagtacgagcgtcttccttgctccacattcagaccagctttgtgttggtttggtttgtcagtctttcaagttttatccattctgtgaggtgtgtacaggtattgcattttgagtttaatttgcatttgtctggtgactaatgaggttgagacatttgtctatctcctgtgaagtgtctgttcaaatctcattttctgttggattatctttacctcgatatgtataataaattttaaaaaccacttatgatttcctcttctctaaattttttaaattcttcacttgttaaaggtagtgtttttgtctactcattatcaaagatgaaaattttatctcacctatctctagaattctcttcctctacctcaaaatttgngttagttataattattccagattttgncttaaaaattt

SEQ ID NO: 1959 - DNA, 446 bp, Homo sapiens
  misc_feature 422: n = A,T,C or G
agtacttctagaattaattaacgcgggggaaaaaaaaaaagaaaagaaagcgccttcaaggccatctgtttctctgctactaccctttttggaaagacaaatctccttcccctccctgtcctccttccttctacattcccctagggctgtgtacctctctctcagcgtgccctgcctcggtgcctatgtggcagggccaggtctgacttcccagatgagcttgctctcctaagctgcatcattgcatgactctcctctttcctaacctccctcactcctccagctcccttctgctggtgaatgacatctcttcacgccacacagtcacaggacggctgctccaccaccggcatcacatctcctttccaggcaggaagaagaggaaggaggaagagacaggacaaaggtggtctttcttccantaaagctttgactttttatctaga

SEQ ID NO: 1960 - DNA, 495 bp, Homo sapiens
  misc_feature 79, 154, 175, 358: n = A,T,C or G
ggcacctacaaaacgaaagtgcctagggcttacaaaagtcatatgtagcctttacaaatattagctcagtcattttcanaaaggtttttccaattatcatttagagatgaggaaactgaagctcagggaggctaggaaacttatccaaagcctnttaagaggctatgttagtcanactgggctaacagctgtaacaaccccagaatttaaatggcttaacacattaggagtttatttgttattgccataacaattcagggtgtatgtttggcaggtagtctacacagtgattcagggacccaggctccttccctctggtggctttttctccctctagtgctgggagctctccatgcanatggtggatggagaaagagaacaaaaagtgggggatttttataggccaggcctggaattggcccacatcacttccacacacattccactggccagaatgcagtcacgtgatcgtagctaactgcaaggaaggttgga

SEQ ID NO: 1961 - DNA, 642 bp, Homo sapiens
  misc_feature 15, 85, 117, 121, 167, 293, 299, 331, 397, 412, 426, 436,462, 470, 478, 482, 498, 516, 525, 530, 540, 593, 595, 621,623, 632, 635: n = A,T,C or G
actatagggcgaatnggagctccccgcggtggcggccgctttttttttttttttttttttttttttttgagacagggtctcactntgtcacccaggctggagtgcagtggcgcaatntcanctcactgcagcctctgcctcccaggttcaagcggttctcctgcctnagtctcccgagtagctgggattacaccaccacacctggctaatttttgtatttttggtatagacgggttttcgccatgttggccaggctggtgtcaactcctgatcttaagtgatctgccagcctnggcctnccaaagtgctattacaggcgtgagccaccacncctggcttaagctgcttaaaaattctttcttaagtatccttgggtttggaaaaaaaaagaattacngaaaactaaaaattnccaagggcaggctntgtatcactnggaattaaactttttggttggttggnttttgganaagggaanctcncttttgttgcctaagnatggcctgccaaagggcnttaaacttnggatnaactggaaangcttcccccttcccgggttcaacgcccatttttccttgccttaaaccttcccnangaaacttgggaattaaaagggggccngnaaaaaaaanccnggggaaa

SEQ ID NO: 1962 - DNA, 339 bp, Homo sapiens
agtacttctagaattaattaaggcgggtgatagtgggtgttatatgttaatccattaaatttccattatgaaattagagcttgagcagataattaacaaaagaaatacaaatgacaaatagtgaatgatcaaactcaaaggcaattaaacttcagtttaaaaaattcaaagacgccgggcgcagtggctcacgcctgtaatcccagcactttgggagacagaggcgggtgaatcacctgaggtcaggttgctgtgagctgagatcacaccaccacactccagcctgggtgaccggagtaagactccatctaaaaaaaaaaaaaaaaaaaaaaaaaaaaa

SEQ ID NO: 1963 - DNA, 397 bp, Homo sapiens
  misc_feature 343, 368: n = A,T,C or G
agtacttctagaattaattaacgcgggcgtctccctgccaggccttgggctctgcagaggtgcccactgaaagcttgtcctgtgccctctacacctcagaggggttcagagccaagctccaggacccctgctgtcaaaaagtgttccctgggaacaagtgcaagggaacagtcctgcaagcaagggactgcttgccctgctttcggacaagccttcttgagagccagtgaaggccagcagctgggcttgaacactacatcatcctcagaaccaccctgcacagccggtgtgctcccccgccatcgacagggaaaaacggggcccttagagggcacaggcaacnttgcttcgggggtttaggtgccagncggggttggcaagaagtcagaaatgtgag

SEQ ID NO: 1964 - DNA, 425 bp, Homo sapiens
  misc_feature 70, 224, 226, 348, 383: n = A,T,C or G
acttagggcgaattggagctccccgcgggtgggcggccgctttttttttttttttttttttttttttttnggagtctcgctcttttgcccaggctggagagtgcaatggtgccatctcagctcactacatccctgattcaagtgattctcctgcctaagcctcctgagtagctgggattacaggcacttgccatcatgcctggctaatttttgtatttttgtananacggggtttcaccatgttggccagtctggtcttgaactcttgacctcaggcgatccatccacctcggcttcccaaagtgctggaattataaggcgtgagccaccgcacccagccttctgggngtattttcttatgatgtagaatgagtgataaagcnccataggagtcacctagtgttgccttttccatttttgagttg

SEQ ID NO: 1965 - DNA, 430 bp, Homo sapiens
  misc_feature 230, 250, 342: n = A,T,C or G
cgaatacgactcctatagggcgaattggagctccccgcggtggcggccgcttttttttttttttttttttttttgggatgctcaacctataatacccaaaggctctatttcagtagaatttattggtttgctgattatagcagtgacatagttgcattctagagaccttagaaaatgcagaaaatttcaagaaaaacatttaaattgtgctcatagtgaaactgagaggngaccactcttaatattttgnggcataagcattccagtcttttatctttctcaaagtttcacataaactttctcaaaggccattaaatacttttccatagcctgattttttgngaccacatagtatcctattatattgataataccataatttaccctaacccatttttatatatttgggatttttttccaatttcatcat

SEQ ID NO: 1966 - DNA, 381 bp, Homo sapiens
  misc_feature 59, 61, 183, 192, 282, 283, 297, 310, 371: n = A,T,C or G
agtacttctagaattaattaatccacccttgaaccagtctacctccagaattcctggtncngtgagataataacatttcctttgtttaagtcacttttagttggattttctgttatttccaaccaaaagcattcaattgatagaaagtggttgaagtaagactggacagcatttatccacccncatatttgnaaaactatgcctgtctgaccagacgtggtggctcatgcctgtaatcccagcactttgggaggctgctgcaggaggattgcttgaggccannagttcaagaccagnctgggaaacatancaggaccttatctctaggaataaataaataacaataaaaattttaaaactatgcctctcanacctaaacta

SEQ ID NO: 1967 - DNA, 398 bp, Homo sapiens
  misc_feature 328, 338, 350, 383: n = A,T,C or G
agtacttctagaattaattaaggcgggtggatcaactgtggtcaggagtttgagatcagccaggccaacctggtgaaaccccgtctctactaaaaatacaaaaattagctgggcgtgatggtgggcgcctgtaatcccagctactttgggaggctgaggcaggagaatcacttgaacccgggaggcggaggttgcagttgagccgagatcgcaccattgcactccagtctgggcaacagagtgagattccgtctcaaaaaaaaaaaaaaaaaaaaaaaaaaaaaaggcggccgccaccgcggtgggagctccaaattcgccctatagnggagtccgtntttacgccgccnctcactgggccggtcgtttttacaaccgtcgtngactgggggaaaaac

SEQ ID NO: 1968 - DNA, 339 bp, Homo sapiens
  misc_feature 312, 320: n = A,T,C or G
agtacttctagaattaattaaggcgggtgatagtgggtgttatatgttaatccattaaatttccattatgaaattagagcttgagcagataattaacaaaagaaatacaaatgacaaatagtgaatgatcaaactcaaaggcaattaaacttcagtttaaaaaattcaaagacgccgggcgcagtggctcacgcctgtaatcccagcactttgggagacagaggcgggtgaatcacctgaggtcaggttgctgtgagctgagatcacaccaccacactccagcctgggtgacggagtaagactccatctaanataaaaanaaaagataaaaaaaaaaag

SEQ ID NO: 1969 - DNA, 390 bp, Homo sapiens
  misc_feature 105, 180, 186: n = A,T,C or G
agtacttctagaattaattaacgcgggggaaaaaaaaaaagaaaagaaagcgccttcaaggccatctgtttctctgctactaccctttttggaaagacaaatctncttcccctccctgtcctccttccttctacattcccctagggctgtgtacctctctctcagcgtgccctgcctcgntgcctntgtggcagggccaggtctgacttcccagatgagcttgctctcctaagctgcatcattgcatgactctcctctttcctaacctccctcactcctccagctcccttctgctggtgaatgacatcttttttcacgccacacagtcacaggacggctgctccaccacgcggcatcacattttcctttccaggcaggaagaaagaggga

SEQ ID NO: 1970 - DNA, 581 bp, Homo sapiens
  misc_feature 337, 373, 473, 482, 560, 567: n = A,T,C or G
aatcaacagactctatatttgatcacaaagcaaaagtttaagtgtattacttaaaattttaagacaaaatctggaataattataactaacacaaattttgaggtagaggaagagaattctagagataggtgagataaaattttcatctttgataatgagtagacaaaaacactacctttaacaagtgaagaatttaaaaaatttagagaagaggaaatcataagtggtttttaaaatttattatacatatcgaggtaaagataatccaacagaaaatgagatttgaacagacacttcacaggagatagacaaatgtctcaacctcattagtcaccanacaaatgcaaattaaactcaaaatgcaatacctgtncacacctcacagaatggataaaacttgaaagactgacaaaccaaaccaacacaaagctggtctgaatgtggagcaaggaagacgctcgtactctcctggngagcaaggnggagatggtaaaagagctggtgtaaccactttggaaaactgttagtatctattaaagtcaacccgcgttaattaattntagaagnactctcgagggggg

SEQ ID NO: 1971 - DNA, 392 bp, Homo sapiens
  misc_feature 345, 350: n = A,T,C or G
agtacttctagaattaattaacgcgggggcgctaggacctggagggctagtcggcgggctgcgcgtccggccgctagctgagctggaggccaccggccagagccgaccccaggagtgagagagacaggggcgtgcgtgagttccggcggcctgcaccgggcaaaccccgtaccttcccagcatcggctcagcaacccacgtgcatccaggccggtcaatgtcattgagtcacctccgcgccttggccaccctggagttcccgagaatccgaagttccagacaaatgcccaaactacattcctgcatgttcgaaaggcgtaaaattgcaaagcacaaatccagttngtagnattgtggcccggggagccagttggctcacggccttataaatc

SEQ ID NO: 1972 - DNA, 296 bp, Homo sapiens
agtacttctagaattaattaacgcgggggaaaactgtcttacttaaacaaaatgtattttaggaaaatgcctgtttcaagggtttattactgttttataactaagagacttgggactttagtatacgaaaaggtgtcatttcaaatgggggaaaatgaattatttaaccaaatgatcttgggacaactggatagccattcagaaaaaaagtgaagctggaacactataacatgctttaccccacaataaatcagagttaaatgtaaaaaaaaaaaaaaaaaaaaaaaaaaaaaaag

SEQ ID NO: 1973 - DNA, 406 bp, Homo sapiens
agtacttctagaattaattaacgcggggaaagcggtggacactgcagagtgggcatccagccactgctacttccatgctgggatgagcagccagtgtagaataaaccctgtgtgcagtgaaacagtcagtgtgcagtatcctatggtgcatctaaacgtatgtacttgctgcaaatgcacatctacaaggacactcacgactattttcattcttgataccaccttcttatgacttgacaaagaaaattcaagcttttggctgagggtagtggctcgcacctgtaatcccagcactttgagaggcccgaggtggggtgggtcactttgaggtcaagggagttcgagaccagcctgaccaatattggtgaaatcctgtctttactaaaaatataaaaaatagcccggc

SEQ ID NO: 1974 - DNA, 311 bp, Homo sapiens
  misc_feature 135, 196, 269, 273, 303, 311: n = A,T,C or G
ccgcggtggcggccgctttttttttttttttttttttttttttttttacatttaactctgatttattggggggtaaagcatgttatagtgttccagcttcactttttttctgaatggctatccagttgtcccaanatcatttgttgaataattcattttcccccatttgaaatgacaccttttcgtatactaaagncccaagtctcttagttataaaacagtaataaacccttgaaacaggcattttcctaaaatacattttgtttaantaanacagttttcccccgcgttaattaattctanaagtactn

SEQ ID NO: 1975 - DNA, 394 bp, Homo sapiens
  misc_feature 65, 69, 73, 77, 86, 87, 88, 89, 91, 96, 97, 100, 101, 102,105, 109, 111, 350, 359: n = A,T,C or G
agtacttctagaattaattaaggcgggggcacaggacttgtacttttggtagcgggtgccggggnccgncccnggantttaacccnnnntnaaaannggnnngancctnanttggaacagccattgactgggcacaggccaacactttgggaggcccagaggccgaaggcaggaggatcgcttgaggccaggagtgccagactgcgagactagcctgggtaacatagtgagaccctctcttcaaaaaaaaaaaaaaaaaaaaaaaagcctgtcaccggtggcctgcgcctgtaccccagcttactcgaggaggattcgcctggagccccagttggaaagcttgccagcgnagcctgtgnaggatgccaccgcactccgggcctgggggctaaaa

SEQ ID NO: 1976 - DNA, 428 bp, Homo sapiens
  misc_feature 22, 70, 160, 182, 264, 308, 310: n = A,T,C or G
agtacttctagaattaattaangcgggagcagcccaagtgtccagccacagatgagcagtcaaacgcagngtggccctccacacactggaaagtgacgcagccgtgaacagcagagaggttcggacccaggccacggcgcggatgccccttgaggacagnacactcggtgaagacaagccgnaccaaaaggccacgcggtgtgttgacaccactcgtgtgaaatgttcaggacaggccaaatccagaggcaggaagggaatgcntgggtgccgggactggggagggaatggggagtgatggctgacananacggggttttccttctggggtaacaagaatgttctggaagctgatagaggtgatagtttgtgcaactctgtcaatgtactatatgccactgaaattacacactttaaaaaggtgaact

SEQ ID NO: 1977 - DNA, 516 bp, Homo sapiens
  misc_feature 487, 497: n = A,T,C or G
gagctccccgcggtggcggccgcttttttttttttttttttttttgtagagacagtgttttgccatgttgcccaggcttatcctgaactcctgtactcaagaaattctcctgcctcagccccacaaagtgctgggattacaggcgtgatcccaccatgctcagcccattcttttctaatgggagagtcccgttgccccacctcctttatgaacaagttcttctcattgatgtgaaatgctaccaaataatattttttttctctttgtaattccgattgaccaaataattatttactgggatcttatataaataaagactcttaagactttagctttttagtaaatattaaaattacttttttttgagacaaagtctcactctgtcaccctggctggagtgcagtggcacgatcatggctcactgaacctccttcttgcaagttcaagcaatcctacacctaacccctgagtagctgggaatacaggnggcaccgtgngctcggctaattttttaat

SEQ ID NO: 1978 - DNA, 392 bp, Homo sapiens
  misc_feature 17, 30, 32: n = A,T,C or G
agtacttctagaattanttaacgcgggccntnttctgctgcttcccagctccacatcaacccaaaagggcttcaggaagaggcaaccaggaacccaacaggcttgttctaggtgcctccatccctggggctcttcatggacagcagctgccaaggccatagctctcatacgtgtccttcctgcaggtgttcaagagggcctttcttctctagactgctctcaggtatcctgatgacatctctgctcagaagagtggactgatgagaaattggatgaagatcaaaaagcaagcccatagctggaggaagactgagatgagatcttgattctctggttcctggctcagggagcctgcccctcataccgccacccactagctgcccccgggtggg

SEQ ID NO: 1979 - DNA, 387 bp, Homo sapiens
  misc_feature 134, 229, 329, 332, 358: n = A,T,C or G
agtacttctagaattaattaacgcgggggccactgccagaaccaaagtgacggtgccgacacccctccgcaagcgcaaggccgacttccataagtaattagccagagcaccgtcccgttcctgtcagcaccganccccagccaggacaccggtattcccagcaccatacaatgaactactttttcgatgaggcaacccaaaagctgcgagcggttcccggtgaggccgnccactcacctggccggggcatacaagctccgtgcgtcaagacatatcaggcgcttcttcaggaacttttgctttattccaggcagaataatccttgcggnaanactggagcatatcttgttgaggtgtnaaaccatggcccatgcattggtgacgttt

SEQ ID NO: 1980 - DNA, 363 bp, Homo sapiens
  misc_feature 165, 231, 241, 321: n = A,T,C or G
agtacttctagaattaattaacgcgggcctgcctggagggagctgccaccctcagctgcagccccagacctcgcggttgctctcatccgtcgttcccagtgtgggcagtgacgcagcaccacggtaagttctgtagagtggacgccactcgctggcaaagcccancagggcaaggaataagtgtcactcagtctttatccagaaaaatccaccaatgtacttttagtgcangtattaacanatggtagaaaatgggaattgcctagaaggattttaatctcttgatggattattcttgtacctgtacctgtctgatggtcntgtaagtccatgttaacaaacctgggaccacaggaaaggaga

SEQ ID NO: 1981 - DNA, 272 bp, Homo sapiens
  misc_feature 161, 163, 178, 182, 217, 237, 245, 261, 264: n = A,T,C or G
gactctatatttgatcacaaagcaaaagtttaagtgtattacttaaaattttaagacaaaatctggaataattataactaacacaaattttgaggtagaggaagagaattctagagataggtgagataaaattttcatctttgataatgagtagacaaaancnctacctttaacaagngaanaatttaaaaaatttagagaagaggaaatcataagnggtttttaaaatttattatncatatcgnggtaaagataatccancanaaaatgag

SEQ ID NO: 1982 - DNA, 307 bp, Homo sapiens
agtacttctagaattaattaaggcgggagaccatggggatccccagcatgatcctcctggggcacagtttgggaggattcctggccacttcttactcaatcaagtaccctgatagagttaaacacctcatcctggtggacccatggggctttcccctccgaccaactaaccccagtgagatccgtgcacccccagcctgggtcaaagccgtggcatctgtcctaggacgttccaatccattggctgttcttcgagtagctgggccctgggggcctggtctggtgcagcgattccggccggacttcaa

SEQ ID NO: 1983 - DNA, 424 bp, Homo sapiens
  misc_feature 211, 309, 327: n = A,T,C or G
tatagggcgaattggagctccccgcggtggcggccgcttttttttttttttttttttttttttttggagacagggttttgacatgttggtcaggctggtcatgaactcctggcctcaagtgatccacctacctcggcctcccaaagtgctgggattacaggtgtgagccaccgcgcccaaccctgtgtttattcttaaggtctgtactacnctttatgcctcagtttccacagttaaaacacgttattttattcctcacgttataggagcaatttgtattcataaacttggccttcaccttcaacttcngaagattttaatacagcncaaatgatttggggtctgtgaattcagttttatttatttggctccttcctttaaggagtcaggctaatgcaagaaaatccaataattagatcttttg

SEQ ID NO: 1984 - DNA, 324 bp, Homo sapiens
gaagaatcaacagactctatatttgatcacaaagcaaaagtttaagtgtattacttaaaattttaagacaaaatctggaataattataactaacacaaattttgaggtagaggaagagaattctagagataggtgagataaaattttcatctttgataatgagtagacaaaaacactacctttaacaagtgaagaatttaaaaaatttagagaagaggaaatcataagtggtttttaaaatttattatacatatcgaggtaaagataatccaacagaaaatgagatttgaacagacacttcacaggagatagacaaatgtctca

SEQ ID NO: 1985 - DNA, 414 bp, Homo sapiens
  misc_feature 5, 8, 9, 19, 38, 41, 52, 54, 68, 70, 72, 368, 369, 403, 410: n = A,T,C or G
agggnttnnaagctgggtnccgggcccccccctcgagngtncttctagaatnanttaacgcgggtagntntntgcactccaacctgggcaacatagcaagactccatctctaaaacacacacgtgcacacacacacacgcacacacataacaaaatgctcccaagtttttattagacccaaatgtttgctgtttattaccaaaaagataagattttctttttaataaaaagaaaaatggctgggtgcagtggctcacgcctgtaatccaagcactttgggaggctgaggcggggcaggtgaatcacttgaggtcaaggagttcaaggaccagcctggccaacatggtgaaaccctgtctctgctaaannaaaaaataaaaaaaattagctggggcatgctggncaggtgncctg

SEQ ID NO: 1986 - DNA, 373 bp, Homo sapiens
  misc_feature 304, 316, 337: n = A,T,C or G
agtacttctagaattaattaaggcgggcgcctgtaatctcagctactttggaggccgaggcaggagaattgctagaacccaggaggcagaggttgcagtgagctgagatcgcgccactgcactccagcctgggagacagaatgagactccatctccaaaaaaaaaagaaagaaagaaagaaagaaagaaagaaggctctattttgatactgggagcctaaactgaatgattctggagaaattcacagatggggctgaggctcaccttcatgacagctgtatcaaaggcctaaatttctaagggntcagaaatcacntacaataagcctatcaacagncatgtgatacctctccaagcattttgcaaccttaac

SEQ ID NO: 1987 - DNA, 328 bp, Homo sapiens
agtacttctagaattaattaacgcgggatatagttcttctcattctttgttctcttcctttatatcaacagcctttttctgacatgatataaaatcatgtgcttatgacatgcattaaaaaggagaagtgctggatctaatatccttggtctaatggatccccttgcagatatacagggctccctacacacactgggatatctaggtacaagcccaaagttcatatacagactttctaaaatcattgtatttaaaagcagaaaaagtggccgggcacagtgggctcacatctgtaatcccaatactttgggaggctgaggtgggcaaa

SEQ ID NO: 1988 - DNA, 286 bp, Homo sapiens
  misc_feature 136, 207, 211, 270, 271, 274: n = A,T,C or G
ccgcggtggcggccgctttttttttttttttttttttttttttttttaacatttaactctgatttattggggggtaaagcatgttatagtgttccagcttcactttttttctgaatggctatccagttgtcccaanatcatttgttgaataattcattttcccccatttgaaatgacaccttttcgtatactaaagtcccaagtctnttanttataaaacagtaataaacccttgaaacaggcattttcctaaaatacattttgtttaannaanacagttttcccc

SEQ ID NO: 1989 - DNA, 366 bp, Homo sapiens
  misc_feature 152, 213, 215, 229, 240, 257, 280, 316, 342: n = A,T,C or G
agtacttctagaattaattaacgcgggggaaaaaaaaaaagaaaagaaagcgccttcaaggccatctgtttctctgctactaccctttttggaaagacaaatctccttcccctccctgtcctccttccttctacaattgccctaagggctgnggtacctctctctcagcgtgccctgcctcggtgcctctgtggcagggccaggtctgacttncnagatgagcttgctntcctaagctgnatcattgcatgactctnctctttcctaacctccctcactnctccagcttccttctgctggtgaatgacatctcttnacgccacacagtcacaggacggctgntccaccaccggcatcacatctcct

SEQ ID NO: 1990 - DNA, 407 bp, Homo sapiens
  misc_feature 389: n = A,T,C or G
tatagggagtcgacccacgcgtccggcttgcttgctgcgcttctcctgcagcctggtaggcactggctgctacttcagcttcagccttcgtcgcgacccctattttggctccagtctccgaccctgctccgtcctctctctacttggttgcatcctccctcctagttccagatttgcgccagatcctgctccaaatccggtagccgcatccccaagccatggctggtcccttctcccgtctgctgtctgcccgccccggactcaagctcctggctttggctggagctgggtctctcgccgccgggattctgctccgtccggaatctgtacgagctgccaccggtgaacggaggagactgtatcccccgagcgctgagtacccagacctncgaaagcacaacaactgc

SEQ ID NO: 1991 - DNA, 449 bp, Homo sapiens
  misc_feature 28, 39, 57, 61, 63, 64, 72, 79, 144, 154, 331, 357, 368,402, 430: n = A,T,C or G
agtacttctagaattaattaacgcgggnctgctaacaantagtccatcactatcccntaangnnaaaataangcccatnagacctcaggggcggggtgactacccaagatagccatctgaacgtgacacacggacccaattttnctgtaacctnaaggtggtgtaaaaggggcaaccatctggtcatttcttcgagttttttttatattttgtataactcctgttgcacataataaaatatgtaagcctatttttcttgctaatgtgtgtactatcagtttgttttatggactcacccctaaggagaaaaatgtaaatttacctacatgtnaaatttaattttggagcttggattgncgtggacctanctaaaactgggtggcctgggctcttccttcccanataaaacttctttttttttttctttctnaagatggtaaagggtggaa

SEQ ID NO: 1992 - DNA, 383 bp, Homo sapiens
  misc_feature 20, 35, 46, 49, 367: n = A,T,C or G
taccgggccccccctcgatngtacttctagaattnattaaatgaanttntattgggcattcatatgtgctaaacaccattctaagtgctgaggcactatgatgaatatgacagacagatacctgttcccagagagtttataatgttgaggtaaagagccacataaaagacaattgtgttatcacttatgaagggctttgggatcaatgaggagggatgcctaacacagacaaaaattcaaagaagcctgcatagaagaggtatcatttaggttgaaatgtgagagaaaaacagcattgtagggagaattccgggcattgtagggagaattctgggccaatgggaacaggcatgtgcagagaccctanaggcatgaggggaggg

SEQ ID NO: 1993 - DNA, 186 bp, Homo sapiens
  misc_feature 157: n = A,T,C or G
ttttttttttttttttttttttttttttggaattattatttaatgagaaaaaaatccacgtgtatacaacatttcaaaacagaagttaaatcattaaatagtactttttatttaaatgtttataaggcagatctatgagaatgatagaaaacatggngtgtaatttgatagcaatattttggagat

SEQ ID NO: 1994 - DNA, 325 bp, Homo sapiens
  misc_feature 14, 75, 104, 144, 159, 192, 221, 270: n = A,T,C or G
gaattggagctttnccgcggtggccgccgcttttttttttttttttttttttttttttttttacattaaactttnattaattggggggtaaagcatgttatagngttccagcttcactttttttctgaatggctatccagttgncccaagatcatttgntgaataattcattttcccccatttgaaatgacnccttttcgtatactaaagtcccaagtctnttagttataaaacagtaataaacccttgaaacaggcattttcctaaaanacattttgtttaagtaagacagttttcccccgcgttaattaattctagaagtact

SEQ ID NO: 1995 - DNA, 428 bp, Homo sapiens
agtacttctagaattaattaacgcgggcattgtgtgcagaagacctggactggaatctaacactgtgagtactccccaggatccgtgttcctctctttagcccaggcatgcagttacattacattttccaaccttccttgcagttagctacgatcacgtgactggatttctggccagtggaatgtgtgtggaagtgatgtggggccaattccaggcctggcctataaaaatcccccactttttgttctctttctccatccaccatctgcatggagagctcccagcactagagggagaaaaagccaccagagggaaggagcctgggtccctgaatcactgtgtagactacctgccaaacatacaccctgaattgttatggcaataacaaataaactcctaatgtgttaagccatttaaattctgggggt

SEQ ID NO: 1996 - DNA, 354 bp, Homo sapiens
  misc_feature 28, 29, 163, 165, 214, 240, 273, 308, 310, 313, 340: n = A,T,C or G
agtacttctagaattaattaacgcggtnnaaaaaaaaaaagaaaagaaagcgccttcaaggccatctgtttctctgctactaccctttttggaaagacaaatctccttcccctccctgtcctccttccttctacattcccctagggctgtgtacctctctctnancgtgccctgcctcggtgcctctgtggcagggccaggtctgacttcccanatgagcttgctctcctaagctgcatnattgcatgactctcctctttcctaacctccctnactcctccagctcccttctgctggtgaatgacatntnttnacgccacacagttcacaggacggctgntccaccaccgggca

SEQ ID NO: 1997 - DNA, 610 bp, Homo sapiens
  misc_feature 27, 45, 226, 347, 448, 551, 594: n = A,T,C or G
atgtgctctaaagagttcagcggcgtnaaacaccacatgcgccgnttcccactcccacgtttccagtctgcggtaaggatggcaacgcatagcctgtactgcatcccagacccctaaccctttaagcaatgataccgaagccgcgctgatcagccgagatccgcacgtccggttggctatcagcgacaaacggcgctggttctgcgtgctcgatcaccgttaccgnaaatccgtgctgtgccagccccagcgccagtgcgccgccgaccattcctccgccgacaatggcaatttccgttggttgatttgtcatggtcaatcatcctgttagcaatatgctttaagtntacaggatttttacccctaagggctgataacgctcatactggtcacaacggcagcaaagcattacactatgcgccctgcattcctggctactatttcgcangagcaagtcgatgaccaaaaaactccatattaaaacctggggctgtcagatgaacgagtacgattcatcgaagatggccgatctgctggatgccacccacggntatcaactgaccgacgtggcggaagaagcggatgtgctgctgntgaacacctgctcaat

SEQ ID NO: 1998 - DNA, 488 bp, Homo sapiens
  misc_feature 27, 31, 127, 135, 217, 236, 344, 373, 483: n = A,T,C or G
ttttttttttttttttttttttttttngaanatggaatctcactctgtcacccaggctggagtgcagtggcatgatctcagctcactggaagctctgcctcccaggttcacaccattctcctgcctnagcctctnaagcagctgggactacaggcgccagccgccatgcctggctaattttttttggtattttttagtacagatggggtttcaccgngttagccaggatggtctcnatctcctgacctcgtgatctgcccacttcagcctcccaaagtgctgggattacaggcatgagccaccatgcccggccgatttcacctttcaatggcaattactataanacaggaaagttatttatttttatatattnacctaattttaagttaccttatacaaccctcattaatagtctgttagaactagaatttaaactctatgtgaatatggaccttatttaaacaatgtatccctagcacctanacaat

SEQ ID NO: 1999 - DNA, 137 bp, Homo sapiens
  misc_feature 118: n = A,T,C or G
tcgagagtacttctagaattaattaatccacccttgaaccagtctacctacagaattcctggtacatgagataataacatttcctttgtttaagtcacttttagttggattttcttgntatttccaaccaaaagcat

SEQ ID NO: 2000 - DNA, 304 bp, Homo sapiens
  misc_feature 30, 37, 38, 43, 46, 55, 56, 58, 66, 80, 98, 99, 104, 107,113, 116, 126, 133, 137, 138, 142, 143, 147, 150, 152, 158,160, 164, 166, 186, 190, 195, 200, 201, 205, 210, 214, 251,253, 284, 285: n = A,T,C or G
agtacttctagaattaattaacgcgggttntcatacnngaagnacncagattttnntntccatctntccacctgcttttngaatattggtgcattttnnaatangcncttccnttnatggtccaanataaacntcannaatnnccanggntncatgcntnctcntnttcaccccacactttaaaantatnatttntagtnnaccnatganattngttctgattggactaccgttgatcaagtgtccacccntngaacccatctatgtggccaggaaaaaggaannataggctaggtcatatact

SEQ ID NO: 2001 - DNA, 435 bp, Homo sapiens
agtacttctagaattaattaacgcgggcattgtgtgcagaagacctggactggaatctaacactgtgagtactccccaggatccgtgttcctctctttagcccaggcatgcagttacattacattttccaaccttccttgcagttagctacgatcacgtgacttgcatttctggccagtggaatgtgtgtggaagtgatgtgggccaattccaggcctggcctataaaaatcccccactttttgttctctttctccatccaccatctgcatggagagctcccagcactagagggagaaaaagccaccagagggaaggagcctgggtccctgaatcactgtgtagactacctgccaaacatacaccctgaattgttatgggcaataacaaataaactcctaatgtgttaagccatttaaattctgggggttggtta

SEQ ID NO: 2002 - DNA, 263 bp, Homo sapiens
acatttaactctgatttattggggggtaaagcatgttatagtgttccagcttcactttttttctgaatggctatccagttgtcccaagatcatttgttgaataattcattttcccccatttgaaatgacaccttttcgtatactaaagtcccaagtctcttagttataaaacagtaataaacccttgaaacaggcattttcctaaaatacattttgtttaagtaagacagttttcccccgcgttaattaattctagaagtact

SEQ ID NO: 2003 - DNA, 295 bp, Homo sapiens
  misc_feature 36, 41, 45, 54, 57, 61: n = A,T,C or G
agtacttctagaattaattaacgcgggggaaaactngtctnactnaaacaaaangtntttnaggaaaatgcctgtttcaagggtttattactgttttataactaagagacttgggactttagtatacgaaaaggtgtcatttcaaatgggggaaaatgaattattcaacaaatgatcttgggacaactggatagccattcagaaaaaaagtgaagctggaacactataacatgctttaccccacaataaatcagagttaaatgtaaacaaaaaaaaaaaaaaaaaaaaaaaaaaa

SEQ ID NO: 2004 - DNA, 586 bp, Homo sapiens
ttttcttttctttctttctttttttttttttagacggagtctccctctgtcacccagactggagtgcaatggtgtgatcttggctcactgcaacctccgcctcccgagttcaagtgattctcctgtctcagcctcctgagtagctgggattacaggcgcctgccatcatgtgccggctaattttggtatttttagtagagatgtggtttcaccatatcggccaggttggtctcaaactcctgacctcaggtgatcagcccgcctctgcatcccaaactgctgggattacaggcgtgaggccaccacacccagcccggattacccttaagtaggaggtacattctcttccattgaaaaagagagagagcagagaatagatgcacaggcaagcagatctgtatccattttgttgtgggaagttgcttcctctctgatgttctctctctctctctctctctgtctctctctctctctgtttttctctctcgtgcttcaagtagggaatgattagtgagtgatactgtttgctaagtagtaagaaaataaagaaggggaacacagaaagagtgtttcatagaaaaatgct

SEQ ID NO: 2005 - DNA, 474 bp, Homo sapiens
  misc_feature 74, 207, 233, 236, 237, 239, 240, 242, 244, 262, 371, 405,411, 418, 425, 450, 454: n = A,T,C or G
ctatagggcgaattggagctccccgcggtggcggccgctttttttttttttttttttttttttacttgaattgntgttatagtgcttccgttatttatttttattttttttattatactttaagttttagggtacatgtgcacaacgtgcaggtttgctacatatgtatacatgtgccatgttggtgtgctgcactcattaactcgncatttatatttagggtatatataccngtnncnntngnacccttatcgactttgcngcatgcttatccatctaactattcatctttatttgccttcgttttttgagttcccttattcatcctaaaacaaaatataatgcctgactcatagtcagacttcacaganatttttaaatgaattacattgcattggggaaatntaaatngtaatgnccttctntagaggaagtctaaaagaaattctngggngaatcgattatcaaacattt

SEQ ID NO: 2006 - DNA, 424 bp, Homo sapiens
  misc_feature 157, 169: n = A,T,C or G
agtacttctagaattaattaacgcgggggaaaaaaaaaaagaaaagaaagcgccttcaaggccatctgtttctctgctactaccctttttggaaagacaaatctccttcccctccctgtcctccttccttctacattcccctagggctgtgtacctnttttttaagggngccctgcctcggtgcctctgtggcagggccaggtctgacttcccagatgagcttgctctcctaagctgcatcattgcatgactctcctctttcctaacctccctcactcctccagctcccttctgctggtgaatgacatctcttcacgccacacagtcacaggacggctgctccaccaccggcatcacatctcctttccaggcaggaagaagaggaaggaggaagagacaggacaaaggtggtctttcttccagt

SEQ ID NO: 2007 - DNA, 240 bp, Homo sapiens
  misc_feature 28, 42, 43, 44, 56, 63, 64, 86, 88, 106, 124, 143, 198: n = A,T,C or G
agtacttctagaattaattaacgcgggnctgctaacaattannncatcactatccnctcaagnnaaaataatgcccatcatacctnangggcggggtgactacccnagatagccatctgaacgngacacacggacccaatttncctgtaaccttaaggcggtgtaaaaggggcaaccatctggtcatttcttcgagtnttttttatattttgtgtaactcctgtgcacataataaaatat

SEQ ID NO: 2008 - DNA, 449 bp, Homo sapiens
agtacttctagaattaattaaatgaaatcatattgggcattcatatgtgctaaacaccattctaagtgctgaggcactatgatgaatatgacagacagatacctgttcccagagagtttataatgttgaggtaaagagccacataaaagacaattgtgttatcacttatgaagggctttgggatcaatgaggagggatgcctaacacagacaaaaattcaaagaagcctgcatagaagaggtatcatttaggttgaaatgtgagagaaaaacagcattgtagggagaattccgggcattgtagggagaattctgggcaatgggaacagcatgtgcagagacctagaggcatgagggagggcaagtatgtttgaagatggcagatagttctggagggcagctagtgggggaggaagtgagaaaaggaatgattgtggagaagtagtcaag

SEQ ID NO: 2009 - DNA, 368 bp, Homo sapiens
  misc_feature 186, 310, 357: n = A,T,C or G
agtacttctagaattaattaacgcgggggaaaaaaaaaaagaaaagaaagcgccttcaaggccatctgtttctctgctactaccctttttggaaagacaaatctccttcccctccctgtcctccttccttctacattcccctagggctgtgtacctctctctcagcgtgccctgcctcggtgcctntgtggcagggccaggtctgacttcccagatgagcttgctctcctaagctgcatcattgcatgactctcctctttcctaacctccctcactcctccagctcccttctgctggtgaatgacatctnttcacgccacacagtcacagggaccggctgctccaccacccggcatnacatctccttt

SEQ ID NO: 2010 - DNA, 287 bp, Homo sapiens
  misc_feature 70, 166, 204, 218, 219, 225, 230, 232, 258, 274, 281: n = A,T,C or G
ttcccttgttattgtgtagccagaatgccgcaaaactaccatgcctaagcgaactgttgagagtacgttncgatttctgactgtgttagcctggaagtgcttgtcccaaccttgtttctgagcatgaacgcccgcaagccaacatgttagttgaagcatcagggcnattagcagcatgatatcaaaacgctctgagctgctcgntcggctatggcgtnngcctantccgnangcaggacttttcaagtctcggaaggnttcttcaatctgcatncgcttcnaataga

SEQ ID NO: 2011 - DNA, 291 bp, Homo sapiens
  misc_feature 50, 94, 130, 131, 136, 138, 141, 179, 192, 199, 209, 230,254, 277: n = A,T,C or G
tcgagagtacttctagaattaattaacgcgggcacccagggatcgcaggnggccgaatactgcagctggcttttgaaggcatcgatgcacactntgagggcctgccttggctcctgcaccccaccacagnncgtgntnctncctttattctctccacccagaaaggtgacaaatccaanccctggatgtgangggggtncacaagagtnattctggagagatggggtcangtgaggaatggttagagacccacngagccaagtcacgggacctcagngaccccatggctga

SEQ ID NO: 2012 - DNA, 364 bp, Homo sapiens
  misc_feature 49, 325: n = A,T,C or G
gcgtaccgggccccccctcgatagtacttctagaattaattaacgcggnttgtggaggttgcagtgagccgagattgtgccactgccctccagcctggcaatagagcaagactacgtctcaaaaaaacaaaaaaaaaacaaaaaaaaactgattttgaccagaatggaaagggtgtgtgtattccatttggtttgttgtttgtaataacttaaaaataacaatttgataccaagttatttttttcaatcaaaaaacataaaacaagttacaattccagaatgccatgatttggccaacattgatgacttgaactaaatgacgcanccaaggaggtaggttggtaaaataaaaataattctgtgc

SEQ ID NO: 2013 - DNA, 346 bp, Homo sapiens
  misc_feature 2, 3, 15, 18, 20, 47, 52, 146, 214, 264, 317, 319, 325, 340: n = A,T,C or G
gnnccatgcatcctnatntncaccccacactttaaaactatcataantagancacccctgagatttgttctgattggactagcgttgatcaagtgtccaccccttgaacccatctctgtggccaggaaaaaggaacgataggctangtcatatactccacccttggagcaggggcagagtcagcttctccagaaccagatggagccccgctcanaaatcaggggctattgggtcaagggaagaaaaaaataaatgctgcaagangtaaccaataaaggtatgtgcttgatcatacgaggaacatttgaaggaatagngnccttancttaaagatgaatanacatga

SEQ ID NO: 2014 - DNA, 402 bp, Homo sapiens
agtacttctagaattaattaaatgaaatcatattgggcattcatatgtgctaaacaccattctaagtgctgaggcactatgatgaatatgacagacagatacctgttcccagagagtttataatgttgaggtaaagagccacataaaagacaattgtgttatcacttatgaagggctttgggatcaatgaggagggatgcctaacacagacaaaaattcaaagaagcctgcatagaagaggtatcatttaggttgaaatgtgagagaaaaacagcattgtagggagaattccgggcattgtagggaggaattctgggcaatgggaacagcatgtgcagagacctagaggcatgagggagggcaaggtatgtttgaagatggcagatagttctggagggcagc

SEQ ID NO: 2015 - DNA, 398 bp, Homo sapiens
  misc_feature 2, 23, 39: n = A,T,C or G
tnggtaccgggccccccctcganagtacttctagaattnattaacgcgggcctgcctggagggagctgccaccctcagctgcagccccagacctcgcggttgctctcatccgtcgttcccagtgtgggcagtgacgcagcaccacggtaagttctgtagagtggacgccactcgctggcaaagcccagcagggcaaggaataagtgtcactcagtctttatccagaaaaatccaccaatgtacttttagtgcagtattaacagatggtagaaaatggaattgcctagaggattttaatctctgatggattattcttgtacctgtacctgtctgatggtcgtgtaagtccatgttaacaaacctgggaccacaggaaaggagaactgatgcgaatacaa

SEQ ID NO: 2016 - DNA, 575 bp, Homo sapiens
  misc_feature 495, 498, 502, 514: n = A,T,C or G
ccgcggtggcggccgctttttttttttttttttttttttttttgggagacagggttttgacatgttggtcaggctggtcatgaactcctggcctcaagtgatccacctacctcggcctcccaaagtgctgggattcaggtgtgagccccgccccaaccctgtgtttattcttaggtctgtactacgctttatgcctcagtttccacagttaaaacacgttattttattcctcacgttataggagcaatttgtattcataaacttggccttcaccttcaacttctgaagattttaatacagcgcaaatgatttggggtctgtgaattcagttttatttatttggctccttcctttaaggagtcaggctaatgcaagaaaatccaataattagatcttttggatttcaaataactggaagaggaagtggtgtttatctaatggtttaggcataatgcgtgttttttcccgtaggcctgtgtgtatatgtgtgggtgnggntggncttaacttgaanaattaaacacttgttttccccgttaattaattctaaaagtctctcgagggggggcccggtc

SEQ ID NO: 2017 - DNA, 559 bp, Homo sapiens
  misc_feature 124, 174, 293, 434, 453, 460, 469, 474, 494, 495, 507, 521,525, 543: n = A,T,C or G
acaaattttctctcttgttgcccaggctggagtgcaatggcatggtctcagctcgtggtctcactgcaacctctgcctcccaggttcaaacgattcttctacctcagcctcccaagtagctganattacaggtgcctgccatcatgcccggctaattttttgtatttttagtanagacaggatttcatcatgttggccaggctggtcttgaactcttgacctcaggtgatccgcccaccttggcctcccaaagtgctgggattacagacatgagccactgtgcccgtccttgngttttatttctaaaagataatttttaagttttcattcatatgttattaaaatgccactaaatactagagcaatatatagcaggtatgatagttttgctatttattttattatgccaatggaaaattaaaaatttaataagnttacttatgttatttcagnaccaaanaaaaaatgnaaatngactgattttgaactatagnnaaggatgcattnccactttttaaaangagnactttaaaaataaacagngatcattgaatgaaaa

SEQ ID NO: 2018 - DNA, 325 bp, Homo sapiens
agtacttctagaattaattaacgcgggttctcatacaagaagtactcagatttttctctccatctctccacctgctttttgaatattggtgcatttttcagtaggctcttcccttcatggtccaagataaacgtcaacaatttccccaagggttccatgcatcctcatcttcaccccacactttaaaactatcatttctagttcacccctgagatttgttcttgattggactagccgttgatcaagtgtccaccccttgaacccatctctgtggccaggaaaaaggaacgataggctagggtcatatactccacccttgggagcc

SEQ ID NO: 2019 - DNA, 331 bp, Homo sapiens
  misc_feature 70, 85, 163, 174, 230, 270, 273, 302, 328: n = A,T,C or G
gaggaaggcacctacaaaacgaaagtgcctagggcttacaaaagtcatatgtagcctttacaaatattanctcagtcattttcanaaaggtttttccaattatcattttagagatgaggaaactgaacctcagggaggcttagggaaacttatccaaagcctnttaagaggctntgttagtcagactgggctaacagctgtaacaaccccagaatttaaatggcttaacncattaggagtttatttgttattgccataacaattcagggngtntgtttggcaggtagtctacacagtgattnagggacccaggctccttccctttggnggc

SEQ ID NO: 2020 - DNA, 351 bp, Homo sapiens
agtacttctagaattaattaaggcggttcccagggatcgcaggtggccgaatactgcagctggcttttgaaggcatcgatgcacactttgagggcctgccttggctcctgcaccccaccacagttcgtgtttcctccctttattctctccacccagaaaggtgacaaatccaagccctggatgtgaggggggtccacaagagtaattctggagagatggggtcaggtgaggaatggttagagacccagggagccaagtcacgggacctcagtgaccccatggctgacctaccgagacctccagtcgccagcatcgggtaggcccacacgtgtgggggagggaagtgagtgt

SEQ ID NO: 2021 - DNA, 557 bp, Homo sapiens
  misc_feature 46, 48, 58, 59, 61, 62, 385: n = A,T,C or G
ccccccccctcgagagtacttcttttattaattaacgcgggcattntntgcagaaganntnnactggaatctaacactgtgagtactccccaggatccgtgttcctctctttagcccaggcatgcagttacattacattttccaaccttcttgcagttagctacgatcacgtgactgcattctggccagtggaatgtgtgtggaagtgatgtgggccaattccaggcctggcctataaaaatcccccactttttgttctctttctccatccaccatctgcatggagagctcccagcactagagggagaaaaagccaccagagggaaggagcctgggtccctgaatcactgtgtagactacctgccaaacatacaccctgaattgntatggcaataacaaataaactcctaatgtgttaagccatttaaattctggggttgttacagctgttagcccagtctgactaacatagcctcttaagaggctttggataagtttcctagcctcctgagcttcaagtttcctcatctctaaaatgataattggaaaaacctttc

SEQ ID NO: 2022 - DNA, 598 bp, Homo sapiens
  misc_feature 28, 32, 41, 48, 267, 275, 303, 411, 451, 502, 509, 516, 522,571, 575, 588: n = A,T,C or G
cgcttttttttttttttttttttttttnactngaattgttnttatagngcttccgttatttatttttattttttttattatactttaagttttagggtacatgtgcacaacgtgcaggtttgctacatatgtatacatgtgccatgttggtgtgctgcactcattaactcgtcatttatattaggtatatatacgtgttcattgtacccttatcgactttgcagcatgcttatccatctaactattcatctttatttgccttcgttntttgagtncccttattcatcctaaaacaaaatatantgcctgactcatagtcagacttcacagtatttttaaatgaattacattgcattggggaaatataaataggaatgtccttttatagagggaagtctaaaagaaattctngggtgaattgataatcaaacatttttaagaaggtatattngctagcaaagaaagaaaaaattgacagcttatttatatagaaaacctatgnattctgngattttnctttgnttcaaggctggattatgaatatcatgctatcccttccccgccttaattnattntagaagtcctctngagggggggg

SEQ ID NO: 2023 - DNA, 383 bp, Homo sapiens
  misc_feature 12, 26: n = A,T,C or G
agtacttctagnattaattaaggctngggaagggatagcatgatattcatatacagacttgaaacaaagaaaaatcacagaatacataggttttctatataaataagctgtcatattttttctttctttgctagcaaatataccttcttaaaaatgtttgattatcaattcacccaagaatttcttttagacttcctctataaaaggacattactatttatatttccccaatgcaatgtaattcatttaaaaatactgtgaagtctgactatgagtcaggcattatattttgttttaggatgaataagggaactcaaaaaacgaaggcaaataaagatgaaatagttagatggataagcatgctgcaaagtcgataagggtac

SEQ ID NO: 2024 - DNA, 373 bp, Homo sapiens
  misc_feature 166, 273, 283, 296, 304, 307, 333, 339, 340, 347, 351, 352,357: n = A,T,C or G
agtacttctagaattaattaacgcgggttctcatacaagaagtactcagatttttctctccatctctccacctgctttttgaatattggtgcatttttcagtaggctcttcccttcatggtccaagataaacgtcaacaattcccaaggttccatgcatcctcatnttcaccccacactttaaaactatcatttctagttcacccctgagatttgttctgattggactagcgttgatcaagtgtccaccccttgaacccatctttgtggccanaaaaaaaggnacgattgggctanccatatcnccnccccttggacaagggggaaaaattantttttnnaaaaaancaannggggncccccccccaaaaaaa

SEQ ID NO: 2025 - DNA, 368 bp, Homo sapiens
  misc_feature 15, 19, 31, 33, 40, 42, 45, 47, 58, 78, 85, 90, 93, 94, 129,134, 162, 165, 184, 185, 290, 298, 342: n = A,T,C or G
cccccctcgagagtntttntagaattaattnangcgggcngnttntnccactacactncagcctgggtgacggagtgngactctntcaancanngaagaaaagatgaacacacacaaaaaagaaaatgngacangtctaattctaaaattaatatgaaaatntanaaatttaaaataccaaagnnattttgaaaaataacagaagctggaaactggccttgcctgactttgagacttgtaaagctataaaaattaagacagggtgataataatctcaaactatacaaatngttaaatntgacagaacaggtagacccacatatatatagatagctgattttnaagagacatgcaaagttaattcatgg

SEQ ID NO: 2026 - DNA, 401 bp, Homo sapiens
  misc_feature 5, 296: n = A,T,C or G
gggtnccgggccccccctcgagagtacttctagaattaattaaggcgggggaagggatagcatgatattcatatacagacttgaaacaaagaaaaatcacagaatacataggttttctatataaataagctgtcatattttttctttctttgctagcaaaatataccttcttaaaaatgtttgattatcaattcacccaagaatttcttttagacttcctctataaaaggacattactatttatatttccccaatgcaatgtaattcatttaaaaatactgcgaagtctgactatnagtcaggcattatattttgttttaggatgaataagggaactcaaaaaacgaaggcaaataaagatgaatagttagatggataagcatgctgcaaagtcgataagg

SEQ ID NO: 2027 - DNA, 405 bp, Homo sapiens
  misc_feature 318, 343: n = A,T,C or G
agtacttctagaattaattaacgcgggatatagttcttctcattctttgttctcttcctttatatcaacagcctttttctgacatgatataaaatcatgtgcttatgacatgcattaaaaaggagaagtgctggatctaatatccttggtctaatggatccccttgcagatatacagggctccctacacacactgggatatctaggtacaagcccaaagttcatatacagactttctaaaatcattgtatttaaaagcagaaaagtgccgggcacagtgggctcacatctgtaatcccaatactttgggaggcttgangtgggcgaatcacctggaggtcgcngagctcaagaccagcctggccaacatggtggaaaccccgtctctactaaaaatatgaaaaac

SEQ ID NO: 2028 - DNA, 359 bp, Homo sapiens
  misc_feature 345: n = A,T,C or G
agtacttctagaattaattaatccacccttgaaccagtctacctccagaattcctggtacatgagataataacatttcctttgtttaagtcacttttagttggattttctgttatttccaaccaaaagcattcaattgatagaagtgatgaagtaagactggacagcatttatccacccacatatttgtaaaactatgcctgtctgaccagacgtggtggctcatgcctgtaatcccagcactttgggaggctgctgcaggaggattgcttgaggccaggagttcaagaccagcctgggaaacataagcaagaccttatctctagaataaataaataacaataanaaattttaaaaact

SEQ ID NO: 2029 - DNA, 429 bp, Homo sapiens
  misc_feature 27, 49, 61, 366: n = A,T,C or G
ccagagtacttctagaattaattaacncgggtagtgtctaagggaggtnttttattctatnttaggtgtctcaaaccggtagcagagagcgctaattaattctttagtcaaagctcggtattttctctgagccaggccatatgggacactgggaacattgaggtgactcagactctgaacctccgtgagcagctgatggggagggccatgctattccagcccttggagcttctatgaccaggtgaacagagagctggcattcctattgaacacaagaaaaacgagctctgagaggaggctgcatgcactcagccaggccaaccaggactgggtcccgggccttctgactacagcacaagcgacctncttctccttcaccagctccagagtacctggggctggagccatgttcctggagctggttccctg

SEQ ID NO: 2030 - DNA, 337 bp, Homo sapiens
  misc_feature 4, 51, 180, 334: n = A,T,C or G
ctgngtaccgggccccccctcgagagtacttctagaattaattaaggcggntcccagggatcgcaggtggccgaatactgcagctggcttttgaaggcatcgatgcacactttgagggcctgccttggctcctgcaccccaccacaggtcgtgtttcctccctttattctctccacccanaaaggtgacaaatccaagccctggatgtgaggggggtccacaagagtaattctggagagatggggtcaggtgaggaatggttagagacccagggagccaagtcacgggacctcagtgaccccatggctgacctaccgagacctccagtcgccancat

SEQ ID NO: 2031 - DNA, 306 bp, Homo sapiens
  misc_feature 264, 265, 271, 272, 279, 282, 283, 285, 294: n = A,T,C or G
agtacttctagaattaattaacgcgggggaaaactgtcttacttaaacaaaatgtattttaggaaaatgcctgtttcaagggtttattactgttttataactaagagacttgggactttagtatacgaaaaggtgtcatttcaaatgggggaaaatgaattattcaacaaatgatcttgggacaactggatagccattcagaaaaaaagtgaagctggaacactataacatgctttaccccacaataaatcagagttaaatgtnnaaaaannaaaaaanaannanattaaaaanggcggccgccac

SEQ ID NO: 2032 - DNA, 399 bp, Homo sapiens
  misc_feature 183: n = A,T,C or G
agtacttctagaattaattaacgcgggatatagttcttctcattctttgttctcttcctttatatcaacagcctttttctgacatgatataaaatcatgtgcttatgacatgcattaaaaaggagaagtgctggatctaatatccttggtctaatggatccccttgccaaatttacagggctncctacacacactgggatatctaggtacaagcccaaagttcatatacagactttctaaaatcattgtatttaaaagcagaaaagtgccgggcacagtggctcacatctgtaatcccaatactttgggaggcttgaggtgggcgaatcacctgaggtcgcgagctcaagaccagcctggccaacatggtgaaaccccgtctctactaaaaatatgaaa

SEQ ID NO: 2033 - DNA, 803 bp, Homo sapiens
  misc_feature 11, 28, 37, 40, 42, 45, 47, 48, 50, 63, 81, 88, 89, 93, 94,99, 100, 119, 123, 125, 133, 135, 139, 158, 159, 163, 164,175, 186, 194, 195, 199, 222, 234, 239, 245, 254, 276, 315,373, 382, 386, 392, 407, 410, 415, 416, 420, 424, 425: n = A,T,C or G
  misc_feature 426, 428, 429, 442, 447, 450, 452, 458, 465, 468, 471, 480,481, 483, 487, 489, 492, 497, 501, 504, 508, 533, 538, 540,552, 554, 555, 581, 586, 589, 595, 596, 613, 618, 631, 632,646, 673, 676, 679, 693, 698, 718, 725, 745, 761, 778: n = A,T,C or G
  misc_feature 782, 796, 800: n = A,T,C or G
cccgggcgggnccgccccgggggcacgnggtttctanacnanggngnntnaaaacccccccgntttttgggaaccccgggngaaaccnngaannacccnngggaaggggggggcctggntgangngggggggnantaangggggcccaagaaaacctnngccnnaccccacgccngggagggggangaaaaatnnacanaccaccaatggggaagaaaaaangggaaaaaggcntgganccaagnccccccaanaagaacccccaacggggggggnaaaaaccaagggcccccccgaaggtaaacctgggggaanaaccagggggccaaacccctaaaaaaaaccgggacctggtccccctctgggggacccncaaaccgtnaagntgggangccccaaacaacaanatnccccnncaanaaannntnnggggggaaaaatngggtntantntttctncaagggnggnaanggggcaaanntncctngnaanaaccnaagnaancaangggggagggaaaaaccctttttttnccaantngggcaaaaaaantnnaaccaaaaaaagggggggggggaaanaaaanccngggggnnggccataaaaaaaaaanaaaangggggaaaaatgnntgggcccccaaaanaaaggggggggaaaaaaatccaatggnaanccnccccaaaaggaccnaaaanaggggggcccccgggggaangggccanacccaaaaaaacaacctctngggaacccaaccgggngggaacaatttttaaanccanccccaataacaaancccnggg

SEQ ID NO: 2034 - DNA, 351 bp, Homo sapiens
ccgcggtggcggccgcccgggcaggtacccagaaaaccaaaatgagcttaaacattttgaaagatgtcaacaaagttatgcccttggaaataagtttggtttatgtaagagcattgttcctttaatgtaaagacacaataagtttggctcgcattgtaaaagtttgaaatctcatttaggttttgttatccagagtagaagatatgcaggaaaagattctgatgcatttggtggatatgggagatcatgcctccatatcaagcgtgacaaaactcttactggagttaaataccatagatgtgttaaacccagcagccctaaatcacagctcaatgacctacaaaaaatttg

SEQ ID NO: 2035 - DNA, 307 bp, Homo sapiens
  misc_feature 17: n = A,T,C or G
ccgggcaggtacttttnctgtagtcccagcactcaggaggctgaggcacaagaatcgcttgaacccaagagatgcaggttgcagtgagccgagactgtgccaccgcactccagcctgggcgacagagcgggactccgtctttaaaataaaaaaaaaaataaataaataataaatgaataactgacttctgaagacagactgctgctttcaaactttggttctatcacttactagctgtattatcttgggcaagttactgccctgcacttgagttttgccatctataaagtggaaacatatagtacct

SEQ ID NO: 2036 - DNA, 274 bp, Homo sapiens
  misc_feature 21, 45, 49, 51, 66, 67, 68, 90, 95, 139, 219: n = A,T,C or G
ccgcggtggcggccgcccggncgggtacgcgggctatttctttgngtgngnctggacctcttattnnntttctcttttcctttctgtctngatcntaatctttctttttcttcttatctttcctccctcctccatcttntttccttctcctcctgctcttcctccccctcttctgcttcctccctcctcagaataggactaagctacacaggttattgnggcttacatttaaaatttttttgacatatcctcttgtttttacaaatcaagaaat

SEQ ID NO: 2037 - DNA, 423 bp, Homo sapiens
  misc_feature 13, 43, 69: n = A,T,C or G
gaattggagctcnccgcggtggcggccgcccgggaggtactgnatttttaatttttttaactgtttttntgttttcaaatattttcagtctgcagttggttgaatctgcagatatggaactagtgtatacagagggccaacattctttttaattactaattgtctctgccaacacttaccaaaattatcctgaattctatttttttgtcttgttttgtttcgagataaggcctcgctccattgcccaccctggagtgcagtggcgcgatctcagcttactgcaagctctgcctcccgggttcatgccattctcctgcctcagcctcctgggtagctgggactacaggcacttgccaccacacctggctaattttttgtattttttagtagagacggggtttcactgtgttggccaggctggtc

SEQ ID NO: 2038 - DNA, 454 bp, Homo sapiens
aggtacgcgggagggagagagttgaaatggttggcatcctcccactctgttgctccggctgtgtcccctcgctctgttgttccagctatgtcccctctgttgctccaactgcagctcattctgttagagttcctcattcagctggtcactgtggccagagggtgttggcctgctcccttcctcaagtattcttaaagccatggatttttgtggagcatttttcttcctggctctcccttgagttattttcctttcttcgctatcttgggactcttctttgtgcttgcggtcatcggttgagagaaggacttcttcttccttgtctccttggtgttggctcgtggttgctcttcaacaactggactggaggctcttggttttctcttcatcttcaacaagtcagtctctctcaagggtctcacgttgcagcattcttaccagaggccattgggcc

SEQ ID NO: 2039 - DNA, 360 bp, Homo sapiens
aggtacaggagaaaacagtaaagcctcaaaaggaggaaattcgtaaagagtccttaaaaaccttaaatgatttccaaaaattattaggggaccgttaattggataagacctactttaggaattcccacctaagcaatgtctaaactgtttgctttgctgagatgggatccaaattcatgtagcaaaagaactctgatgcctgctgcagctgaagagttacaaatgattgaggaaaaaattcaaagtgctcaagtccgtagaagagatcctagtgttccattacagctcttagtgttccctactctccattctcctataggggtgattgttcaaaatgttgacttagttaaattgtccttt

SEQ ID NO: 2040 - DNA, 344 bp, Homo sapiens
  misc_feature 183: n = A,T,C or G
ggggccattgagactgccatggaagacttgaaaggtcacgtagctgagacttctggagagaccattcaaggcttctggctcttgacaaagatagaccactggaacaatgagaaggagagaattctactggtcacagacaagactctcttgatctgcaaatacgacttcatcatgctgagttgngtgcagctgcagcggattcctctgagcgctgtctatcgcatctgcctgggcaagttcaccttccctgggatgtccctggacaagagacaaggagaaggccttaggatctactgggggagtccggaggagcagtctcttctgtcccgctggaacccatggtc

SEQ ID NO: 2041 - DNA, 329 bp, Homo sapiens
aggtacctatagaaatgccttcctcaggaaccccgccattgttaaacaagagtgagcgcctagtgggcagaaatgtagtgattgtggaacaaccttttccaagaaatcaagcctttgtagttaatcaggaatttgaacagagaataagcctcacaaatgaagtgaatgtggccccatcagtaataaattatatcttgtatcttacagatattgtatcagaataaatcttctgataccagaaaggtgggaaaatctttagtaggaatcctccagccattatatcccagagagctcatttagggctgaaacactgtggaggcagtggttgt

SEQ ID NO: 2042 - DNA, 344 bp, Homo sapiens
aggtacatgcacaaagctaggaaaggcacatccccagaaaaggagtgagtgttcccacaccctttacaacaggctaattagaaaagatctccctctgaccaagtcttatacaaaacaactgagagaagcagttattttaccaaacctaatccaaaaattacaaggcctatgaaaggaaagagaaatatggctaaaaaataaataaagcccaacctagaaaaagacaggcagctctctaaattactagacaaatatttatttatttatttatttaagacagggtctcactctatcgtccaggctggagtgcagtggtatagtgtagctcactgcagcatctactt

SEQ ID NO: 2043 - DNA, 340 bp, Homo sapiens
ccgggcaggtacattcactctccgcctaggagtaggattttctgagaaccggactactgtgaatgctgctgctcctctgggtctagccacctagtggggctgccacactccaggttggtgctgggaaatgtctgcaagggatccagtgatgtgatctgtcctctagtctcctagcagcagataccagcactagctctggtggagatgtcaggggagtgacgtagaccctataaagttccttggttataaataaccttagtgtgttggctttctcaaatgctggctgaagaagtaatgaactggtcacttgggcagactcaggacctcctggttagccatg

SEQ ID NO: 2044 - DNA, 330 bp, Homo sapiens
  misc_feature 8, 313: n = A,T,C or G
gggcagtntctgacgcgaacgtctcttcctcgtggtttttattgtcagtattcacacgaagtttaagtctcctagtgggcacccagacgggattgacgatctcctggtaaaacacaagcataccctcttccccacgttataattgttccaggttcccaggtattggtttgggagtttttccatgacactggcttgccttcgtttagggagaattttttgcctgtataatggcatttagctgcagtcagagtattgtttttaggaacatttagaaagcttaaacaatgctaaatataattgggagtggggaagnagttaaattattgcttt

SEQ ID NO: 2045 - DNA, 332 bp, Homo sapiens
  misc_feature 67: n = A,T,C or G
ggcgaatttgagctccccgcggtggcggccgaggtacacgatcaatccctatcaaaatccaagatgntttttttttcttgcagaaattggcaattaatcttaaaattcatatggaaatacaagggacccagaatagccaaactaattttaaaaaagaacaaagggacaggaggagaactcatacttcctgatttaaaattgactatcacaggatactatgttaacaccaaaatatgactctgacataaaaattatttctgggaagacagttaaagcagacaattaacaagcagcagcaaacagagaaaaagctctgtctatcctttcccttt

SEQ ID NO: 2046 - DNA, 491 bp, Homo sapiens
gctccccgcggtggcggccgaggtacaatgcaattctcctgccttgacctcccgtttagctgggactacaggcacacacaaccacacctggctaatttttgtatttttagtagagacagggttttaccatgttggccaggctggtcttgaattcctgacctcaggtgatccacctgcctcggcctcccaaagtgctgagattacaggcatgagccaccacacccaatctagtttgacagtttttatatcattatgagcacaccacagatttagttttgtgctttgtttttttacttatctttataacaatttttttttttttagttatagtattataatatcaagcagcttaaatagcaatagggctaaattttttttttttaaggagtgggaaaaagacttagtatcaatctttttatcaatcttagggtcaaactttgattaattcctggtgagtttgctgttaggaatggaccctggaaaaaaatatt

SEQ ID NO: 2047 - DNA, 482 bp, Homo sapiens
  misc_feature 395, 407, 432, 448: n = A,T,C or G
gctacttagggcgaattggagctccccgcggtggcggccgcccgggcaggtaccacctgaagaccctcacactcaacttcaccatctccaatctccagtattcaccagatatgggcaagggctcagctacattcaactccaccgagggggtccttcagcacctgctcagacccttgttccagaagagcagcatgggccccttctacttgggttgccaactgatctccctcaggcctgagaaggatggggcagccactggtgtggacaccacctgcacctaccaccctgaccctgtgggccccgggctggacatacagcagctttactgggagctgagtcagctgacccatggtgtcacccaactgggcttctatgtcctggacagggatagcctnttcatcaatggntatgcaccccaagaatttatcaatncggggccgagtacctnggccgctcttagaactagtgggatccccccgggc

SEQ ID NO: 2048 - DNA, 437 bp, Homo sapiens
ccgcggtggcggcccgaggtacaatgaggatactggagtccggaatctctgagtgcttctctgtgatggacagaacaatgccccgacaaagatgctcatgccctcctccccagaacctgtgaatatgtcacggtgcatggcaaggggggaattaaagttgccggtggaatttaggttgctaataggctaaccctaagatggggagattagcctcgattatcagggtgagcttactgtcatcacagggacccctataagtgagagagggaggcaagagaagtagtgtcagaattagagacgaatttgcagaagctggcttttaagatggaggaagaggccatgagcccgaaggatgccggtggcccctagaaacaggaaaaggcaagaaaaaggttctcctctagagcctcctgaggagcacagccttgccaacactt

SEQ ID NO: 2049 - DNA, 432 bp, Homo sapiens
  misc_feature 15, 375: n = A,T,C or G
cttagggcgaattgnagctccccgcggtggcggccgcccgggcaggtacgcgggagcacagatttgagtagcaattatcaccaggggaacaataacactgactcctatggtgttgcttcttaaaagactgtcctactgctgcagccacgtgctccaccactcctattgcttttaccctgatgtgatgaagctctcatgcacagacaccaggatcaacagtgcagttgggctgactgccctgattaccactgctggggcagattctgtctttattgtcctgtcttatattttgatcattaagactgttctcagcattgcttccccggaagaaaggaagaaagccttcagcacatgtatctcccatattggggctgntgctgtattttacattccattggatcactctgtcctttgttcaccgggttttgggga

SEQ ID NO: 2050 - DNA, 394 bp, Homo sapiens
  misc_feature 219, 296, 361, 385: n = A,T,C or G
aggtaccaatggcccaatcaccccaaacagtgacaggaacataatttcctgttgggaccagttctcggaattttgcaccaacatgatcccatagttccacatctaacgttcccttttcaggaaaccaaggacagtgttcttccactgccctgaatagggtgaccatattttccatgggaacccgaactcccccattttaacaggaatttaatatagcanagataagcataatgtttagactctgcgtgacccatagtttccccgggacaatacacagacaacctcaccaatccgtnggggagccaaaacaagcatttttgtggactggacccgattaacattttttccgcacctaccaaanggggaattcgggttcccacatgcnctttagggg

SEQ ID NO: 2051 - DNA, 377 bp, Homo sapiens
  misc_feature 338, 360: n = A,T,C or G
ggtacaatagagagcatcaatagcaaacttactcaagcaaagaaagataaagagtttgtttggaattaccagtgagagaagaataaataagaatgacaaggagtgaagaaagcctaccagacttattagataacatcaagggaaaaaaatttcatatttttagagttccagaaggcaaagagatgacaaaaggcatagaaaatatatttaacaggtcgggtgcggtggctcacacctgtaatcctagcactttgggaggctgaggtgggtggatcacctgaggtcaggaatttgagaccagcttgggcaacatggcgaaaccccgtctctaccaaaanatacaaaaaaattagccaggcntgggtggtggggtgcct

SEQ ID NO: 2052 - DNA, 403 bp, Homo sapiens
ctacttagggcgaattggagctccccgcggtggcggccgcccgggcaggtacccagaaaaccaaaatgagcttaaacattttgaaagatgtcaacaaagttatgcccttggaaataagtttggtttatgtaagagcattgttcctttaatataaagacacaataagtttggctcgcattgtaaaagtttgaaatctcatttaggttttgttatccagagtagaagatatgcaggaaaagattctgatgcatttggcggatatgggagatcatgcctccatatcaagcgtgacaaaactcttactggagttaaataccatagatgtgttaaacccagcagccctaaatcacagctcaatgacctacaaaaaatttgtgcaggagggaaaccacatgaatgcagt

SEQ ID NO: 2053 - DNA, 386 bp, Homo sapiens
ccgcggtggcggccgcccgggcaggtacccagaaaaccaaaatgagcttaaacattttgaaagatgtcaacaaagttatgcccttggaaataagtttggtttatgtaagagcattgttcctttaatgtaaagacacaataagtttggctcgcattgtaaaagtttgaaatctcatttaggttttgttatccagagtagaagatatgcaggaaaagattctgatgcatttggtggatatgggagatcatgcctccatatcaaagcgtgacaaaactcttactgggagtttaaataccatagaatgtgttaaaacccaggcagcccctaaatcacaggctcaatggaccctacaaaaaaaatttgtggcagggaggggaaaacccaca

SEQ ID NO: 2054 - DNA, 796 bp, Homo sapiens
  misc_feature 43, 58, 73, 76, 82, 98, 138, 159, 170, 182, 195, 230, 260,262, 268, 285, 293, 356, 423, 495, 533, 552, 568, 581, 582,592, 629, 645, 663, 664, 665, 667, 673, 675, 679, 705, 712,717, 729, 755, 757, 760, 764, 773, 775, 780, 783, 786: n = A,T,C or G
  misc_feature 793: n = A,T,C or G
aggtataatgagggatactggagtccggaatctctgagtgctnctctgtgatggacanaacaatgccccgacnaanatgctnatgccctcctccccanaacctgtgaatatgtcacggtgcatggcaaggggggaatnaaagttgccggtggaatttangttgctaatangctaaccctaanatggggagattancctcgattatcagggtgagcttactgtcatcacanggacccctataagtgagagagggaggcaananaagtantgtcagaattagagacnaatttgcngaagctggcttttaagatggaggaagaggccatgagccgaaggatgcccggtggcccctaganacaggaaaaggcaaggaaaaaggttctcctctagagcctcctgaggagcacagccttgccaacactntgaactttgccagtagtttgaacttctgtcttccagaactgtgagataataaatctgtcctgcccgggcggncgcccggcatgtacaaaattgcccccaaaaactatgtngatgtccaaattgacccangaatcctcctgcctgnagacatattttgnnggaggtgaantctattatcggagatcgttaaataaaaggttccaacnccctggaaaagccggnttgatcttttagccccannnangatgcnanaaanccggggagccttggtttggtccaaancccacanggaanttttggacttancctttaggagggggagcttgttttcnanatnttcnggtgtgaangnggaanctnttnttttttnaaa

SEQ ID NO: 2055 - DNA, 451 bp, Homo sapiens
  misc_feature 132, 253, 270, 303, 320, 330, 417, 428, 436, 439, 442: n = A,T,C or G
gcgaattggagctccccgcggtggcggccgaggtacttggtgcatttttgaagatttaataattaattaatagttggtgcaggccaggcatggtggctaacacctgtaatcccagcactttgggaggccgangtgggcggatcacctgaggccaggagttttagaccagcctgaccaacatggagaaacgctgtctctactaaaaatacaaaaaaaattagccaggcgtggtggcgcatgcctgtaatcccanctactctggaggctgangcgggagaattgcttgaacctgggaagccggangttgaggtgagcccganatcacgcccnttgcacttccagccctggggcaacaaggaaccaaaacttccgtcttaaaaaaaaaaaaaaaaaaaaggttggggccaaaagctgaanatagggggctnttggattnccnccnccttaaaaa

SEQ ID NO: 2056 - DNA, 420 bp, Homo sapiens
ccgcggtggcggccgcccgggcaggtactctcatgattaaacatcttcgtttctttttccttttccttaaaattaaaaaaaaaaaaatcccaaagagaatagggagcaacaaccataggataggagtctccctaggactaatactctgcagataactgacgtgcctcaggaattgtttttattttggtttgttgttgttttgttttgttttttagagacagggtcttgctctgtcacccaggctagagtgcagtaagatcacagctcactgcagcctcaaacctctggactcaagtgatcctcccacctcagcctcccaagtagctaggactacaaggcagctaggactacaggcgcacaccaccacatccagctaattctttttcattgagacggagtcttactctgtcgccaggctgg

SEQ ID NO: 2057 - DNA, 340 bp, Homo sapiens
  misc_feature 297, 314, 333: n = A,T,C or G
ccgcggtggcggccgcccgggcaggtacccagaaaaccaaaatgagcttaaacattttgaaagatgtcaacaaagttatgcccttggaaataagtttggtttatgtaagagcattgttcctttaatgtaaagacacaataagtttggctcgcattgtaaaagtttgaaatctcatttaggttttgttatccagagtagaagatatgcaggaaaagattctgatgcgtttggtggatatgggagatcatgcctccatatcaagcgtgacaaaactcttactggagttaaataccatanatgtgttaaacccagcncccctaaatcacagctcantgaccta

SEQ ID NO: 2058 - DNA, 377 bp, Homo sapiens
  misc_feature 281: n = A,T,C or G
ggcgattggagctccccgcggtggcggccgaggtactgatgctttttaaggcatattatcaacatacagccatgacttgtccagagaatctcacctgacaaaaactcagagaagaaagagaaagaagatgaaatggctggttttcagatgtgtattctcattttatggaagacatgttgccagagtaaagcacaatatattcatcttgaaatgtaatactgagaagatatggaagttatggaagttgtggccttcagaattgacacttacggagagactanaacagcgtgggtgagttgtgaggggcaggaagcatgtcttaatggacttaaccaatttttcgtcaactattcacaagtaaaatcttttcaatgtac

SEQ ID NO: 2059 - DNA, 371 bp, Homo sapiens
  misc_feature 123, 130, 166, 178, 185, 191, 210, 212, 224, 233, 240, 241,254, 257, 277, 282, 296, 306, 310, 320, 325, 333, 358, 362: n = A,T,C or G
ccgggcaggtactttgtattacaagaatagctttttatttcaaatatttcttctcctttttcgtatccatgtgttcttttatatgcatattttatttcatgtaatcctgttctttgccatgantttccanttcttttgtcttctttctttggaaaaagtcaacaanatttttaaaaanagatctntttgtncattatttgtagcccaatnanaaaacctggatnttttggccncagtggnnggaaattttaatngtncctagaatgatttttttctntgggnctgggacttttttnctttttttangggntaaaaggtgnttcanaagggggnttataaaaaaaaacaataaccttanaagncctttttaa

SEQ ID NO: 2060 - DNA, 369 bp, Homo sapiens
  misc_feature 189: n = A,T,C or G
ccgcggtggcggccgaggtacgcgggtctctactaaaaatataagttagccaggcctggtggcgggtgtctataattccagctacttgggaggctgtggcaggagaatcgcttcaacccgggagtcagaggttgcagtgagccagatgatgccagtttactccagcctgggcaatagagcgaggctcantctaaaaaaaaaagacaacaacaagatctccttctctctctgacctttgcttccattgtcccattgtcacatctccttctctgtctctgagtccttttttctcttggaaggacctttgtgattatattgggccctccaaaatcattccaggatacttttcccatcttcaaatccataccc

SEQ ID NO: 2061 - DNA, 419 bp, Homo sapiens
ccgcggtggcggccgaggtactggactactgggctcaaaaggagaaggagggcaagagaggtccaaatccagctttttggtgggtgaatggccaaggggatgaagtaaagtggagcttcagagagatgggagacctaacccgccgtgtagccaacgtcttcacacagacctgtggcctacaacagggagaccatctggccttgatgctgcctcgagttcctgagtggtggctggtggctgtgggctgcatgcgaacagggatcatcttcattcctgcgaccatcctgttgaaggccaaagacattctctatcgactacagttgtctaaagccaagggcattgtgaccatagatgcccttgcctcagaggtggactccatagcttctcagtggcccctctctgaaaaccaagctcctggt

SEQ ID NO: 2062 - DNA, 990 bp, Homo sapiens
  misc_feature 17, 27, 38, 47, 73, 81, 85, 93, 97, 99, 101, 105, 113, 119,121, 127, 130, 135, 143, 146, 151, 153, 155, 166, 174, 176,183, 185, 195, 197, 199, 201, 203, 205, 212, 214, 216, 218,220, 224, 234, 236, 238, 240, 242, 244, 252, 264, 268: n = A,T,C or G
  misc_feature 274, 276, 280, 282, 286, 288, 297, 303, 305, 306, 312, 319,321, 323, 349, 356, 362, 367, 369, 391, 407, 414, 439, 466,470, 472, 484, 489, 501, 503, 505, 519, 544, 546, 547, 560,578, 585, 592, 603, 604, 621, 625, 634, 641, 680, 689: n = A,T,C or G
  misc_feature 704, 730, 740, 741, 746, 765, 767, 770, 778, 804, 805, 807,810, 812, 823, 825, 833, 834, 841, 851, 864, 871, 875, 878,886, 889, 897, 905, 915, 921, 959, 965, 983: n = A,T,C or G
ccgcccgttaaattatntgcaaacctncaactttattnaaggggtgnccggaaaaatcttgtgtaagtccctnccccaacnccgnccggggtngggncngnggcnccgcctcnccgggngnccaggnggnttaanctccaagnttnggttncntngtaaaaagtcncctggggngngaaaacntngggtctgagncntngncntnggggttncnanangngacnccacccaatntnangntntnttaatttnggtctaaaaagntggnccacangnggtntnttcntnggggttaanaaccangnnaaaaanttataanangnaaaagtttccaaaatttgggaatttncaattcnaattcnaaaangnaaccccaaaaaattattaattnttttaccttaaaaaanggaattncttaaccccttttaaaaaaattttncaattttctttttttaagcccacgcgnttangnttaaattggcgnccaanttttggttgggngntnttaaaacgtaaaanttttttaaaccaaatttttttgggntnnggaaaaacccaantttttttaactccaacgncctttgnaaattgnaaaccccccgnnaagggggtttggaaagncccnttttccttnggttttnttccccctttcccccttgggccaaatttaaaaaaaaacnttttttggnaaggtaaaatttttnaatttaaaaaaaaaaaaattcccccnccctttaaannttttngggggccctttgggggggncnaanccaagggntttgggggcctttccaacccaaaccnncnttngnttaaaaaattncncctccaanncccaacntttttttggngggggaaaggggncccccgnaagnggncctaaagnggnccaatttnaaacccgnaaaggggttnccaaangggggaaaggaaattccaaaagggaaaccccatttctnctttgngggcccccaaaaccaagngggggtt

SEQ ID NO: 2063 - DNA, 338 bp, Homo sapiens
  misc_feature 61, 106, 145, 156, 157, 159, 163, 227, 261, 270, 286, 288,291, 298, 300, 325, 326: n = A,T,C or G
accgcggtggcggccgcccgggcaggtactgtctgatgacgggtgagggcagagtttttantgaagcctctctcacagtgagaacacctgtaaggcttttcaccantgtgggtttttcggtgggcactgaagtgggagctattgntgaagattttnncncacnctgcacacttgtattgggctctccccattgtggatgcgccggagagcactgaactgggaactgntgttgaatctctttccacagacaatgcactggtnaggcttttncccagtatgggtcctntngtngacaatnangctggaactctggttgaagcttttnncacattgcccac

SEQ ID NO: 2064 - DNA, 342 bp, Homo sapiens
ccgggcaggtacccagaaaaccaaaatgagcttaaacattttgaaagatgtcaacaaagttatgcccttggaaataagtttggtttatgtaagagcattgttcctttaatataaagacacaataagtttggctcgcattgtaaaagtttgaaatctcatttaggttttgttatccagagtagaagatatgcaggaaaagattctgatgcatttggtggatatgggagatcatgcctccatatcaagcgtgacaaaactcttactggagttaaataccatagatgtgttaaacccagcagccctaaatcacagctcaatgacctacaaaaaatttgtgcagga

SEQ ID NO: 2065 - DNA, 160 bp, Homo sapiens
  misc_feature 51: n = A,T,C or G
cttagggcgaattggagctccccgcggtggcggccgcccgggcaggtactntgtattacaagaatagctttttatttcaaatatttcttctcctttttcgtatccatgtgttcttttatatgcatattttatttcatgtaatcctgttctttgccatgat

SEQ ID NO: 2066 - DNA, 478 bp, Homo sapiens
actacttagggcgaattggagctccccgcggtggcggccgaggtaccgtatggagtcctccagctgcagcccagctcaccctcaatgccaacccacttgatgccacccaaagtgaggatgttgttctgcctgtgtttgggacccccaggacaccccagattcatggcagatccagagagctggccaaaccctccattgcaagtcaagcccaggcactgccatagagcagaaggacatggtgaccttctactacaccactaaggacgtcaacattaccatccactgggtttccaacaacctctccgttgtgttccatgagcgcatgcagctgtccaaggatggcaagatcctcaccattctcattgtccagcgggaggactcggggacttaccaatgtgaagctcgagatgcccttctgagccagaggagcgaccccatcttcctggatgtgaagtatggtcctgatcctgttgaaatc

SEQ ID NO: 2067 - DNA, 345 bp, Homo sapiens
aggtacttctgggtaaactggagaagagcttcaactctgttcacctgcttgcaggtgggtttgctgagttctctcgttgtttccctggcctctgtgaaggaaaatccactctagtccctacctgcatttctcagccttgcttacctgttgccaacattgggccaacccgaattcttcccaatctttatcttggctgccagcgagatgtcctcaacaaggagctgatgcagcagaatgggattggttatgtgttaaatgccagcaatacctgtccaaagcctgactttatccccgagtctcatttcctgcgtgtgcctgtgaatgacagcttttgtgagaaaattt

SEQ ID NO: 2068 - DNA, 345 bp, Homo sapiens
ccgggcaggtacgggccacaaagtatttcctgaagccagaagtcttacagaagtatatggttgatccaggcagaatttgcatttctggtgacagtgctggtggaaatctggctgctgcccttggacaacagtttactcaagatgccagcctaaaaaataagctcaaactacaagctttaatttatccagttcttcaagctttagattttaacacaccatcttatcagcaaaatgtgaacaccccaatcctgccccgctatgtcatggtgaagtattgggtggactacttcaaaggcaactatgactttgtgcaggcaatgatcgttaacaatcacacttcacttg

SEQ ID NO: 2069 - DNA, 579 bp, Homo sapiens
ctatagggcgaattggagctcaccgcggtggcggccgctacttctacacgcgcaacgatgggcttgcagaaccaggccgtgctgtacaccctgaagaacctgtacgaccagccgcgcatgctgctcgacccgaacaccctggcgcttgatggcaccgtcgccctggccggcgccgaggtcagccccgacggcaagctgctggcctacagcatcgccgcgtccggctccgactggaacgagatcaaggtgcgcgacatcgacaccggcaaggacctgcctgaccacatcaagtgggtcaagttctcgagcaccgcctggaccaaggatggcaagggcttcttctacagccgctacgacgagccgaaagaagcgaccaagctggccgacgtcaactacttccagaagctgtacttccaccgcatcggcacgccgcaaagcgccgacaccctggtgtacgaccgcgccgaccagaaggaatggggcttcggcggccagaccaccgacgatggccgttacctgatcatcaccaccaccaagggcaccgcgccgaagaaccgcgtttcgtacaaggacctgtcc

SEQ ID NO: 2070 - DNA, 368 bp, Homo sapiens
ccgcggtggcggccgaggtacgcggggaactcaaaacccctggagaagccagtgctgagctagggaaacctgaactataactgacaaattgctacagccttttaaatctctttttaagagattaaaaactccaggggaaccaagtcatggggttacccatccacattttttttttttttttgagacagagtcccactgtgtcaccaaggctggagtgaaatgacaccgatctctgctcactgcaacctccgcctcctgggttcaagcaattctactgtctcagcctcccgagtagctgggactacagtcctgcaccaccacgcctggctaatttttgtatttttagtggagatggggtttccccttgt

SEQ ID NO: 2071 - DNA, 420 bp, Homo sapiens
  misc_feature 4, 385: n = A,T,C or G
gcangtaggacataggcctctgcattgcaggtctgggctacgccgtcagcatcacagtcacacacgcggatggtgagggtgctggtgctgctaagtgagggagatccactgtccacaatgaaaattggcagatagtaaactgattgttcctgtctccggaagccgtttctcctggtcagtattgaggctgtgttgtctttgttatctttcaatgaaaagttgtggttatttgttgcatccgttgttaagctgaagtaaaactggtgtccattggatggctcatctttatccacagcactgattttctggataaccaaactgagattgaactgcactttaattcttagaattgtaagacgcttaaacccggttgggtaaggtaggnaaacagcccaatcaagcgttacctgcccggggccg

SEQ ID NO: 2072 - DNA, 350 bp, Homo sapiens
aggtactcggaggatttctgtcaacctccggactttccctgcctcaagcagctggtggcctacgtgcagctcaacatgccaggctcagacctggagtgccgtgcccaccttctcctggcccagctggagcactcggaacccattgaggcagagcctgaggctctgtcaccagtgccagctctaaaaccaactccagagctcgagctagctctaacaccagctcgagcacccagcccagtgccggctccagccccggagccagagccagctccaacaccagctccaggttcagagctagaagtagctccagcaccagctccggagctccagcagactccagagccagctgt

SEQ ID NO: 2073 - DNA, 318 bp, Homo sapiens
  misc_feature 138: n = A,T,C or G
caagtaagtgtagtatatttaagaaaataatacaagcacaaagttagtattgaagtataatattgatcacaaaataatatttaatttaccatgagcacattaacaatgaaatgtttctctttaaatgctgtgatttanaactagatgatgtggctttttaaatgaataaatagaatgttagaataaggttggaagggcagatatgacttctcccatgaagaaactacaatacacaggtggttaggatcataggatgcagacagtgaaaaatactaggggagcctgggcacggtggctcacgcctgtaatcccagcttt

SEQ ID NO: 2074 - DNA, 422 bp, Homo sapiens
  misc_feature 248, 382, 383: n = A,T,C or G
ccgcggtggcggccgaggtacttctgggtaaactggagaagagcttcaactctgttcacctgcttgcaggtgggtttgctgagttctctcgttgtttccctggcctctgtgaaggaaaatccactctagtccctacctgcatttctcagccttgcttacctgttgccaacattgggccaacccgaattcttcccaatctttatcttggctgccagcgagatgtcctcaacaaggagctgatgcagcanaatgggattggttatgtgttaaatgccatcaatacctgtccaaagcctgactttatccccgagtctcatttcctgcgtgtgcctgtgaatggcagcttttgtgagaaaattttgccgtggcttggacaaatcanntagatttcatttgagaaagcaaaaagcctccaatggatg

SEQ ID NO: 2075 - DNA, 339 bp, Homo sapiens
  misc_feature 284, 310: n = A,T,C or G
aggtactctgtgcagatggtgcactggtagggcgaggcgccgttgtgcgttctcaggtgcttgatcatggccgagtagtcccgggagcgctggtggcagagcttacactcaaagggcttctcacctgtgtgcaccctatagtgcgtctccagctgatgcttgaggctgaacttcttgccacagccattgcactcgtagggtttctcacccgtgtggatgcgttttgtggctcttgagtgtgctctcatcccggaagcagcctgccacagaactcacactcgtangggtggtcgcctgtatgtgagcgcangtggcgtttgagagccgtgtggctgggga

SEQ ID NO: 2076 - DNA, 458 bp, Homo sapiens
actacttagggcgaattggagctccccgcggtggcggccgaggtacgcggggaagtctcggtgggttccccgcaaaatcagagatggcatctcactatgttgcccaggctgatcttgaactcctgacctcaagtgatcctctctccttggcctcctaaagtgctgggattccaggtgtgagccacttcacccagccacatttatccatcttgtaaaatattgctttgttttttggtgcatttcaaacccacaggtcctgacttcaggagcaagacacttcaagtgaggtgaggaggaggttccaggacctggataccatcctttgcagggatgtaattcaccagagaccaagatttctagccagaaattgagggcagctcaaggagagactacagacacagcatcctacttactggctatttcccagtaacaaaagaaaatgatcaagtcccaaggaa

SEQ ID NO: 2077 - DNA, 559 bp, Homo sapiens
  misc_feature 41, 43, 69, 166, 198, 212, 244, 252, 290, 302, 303, 320,325, 349, 374, 376, 395, 431, 450, 451, 460, 475, 522, 530,532, 552: n = A,T,C or G
catcttgggtcatacgatgagcctcgccctgtgcctggtcntncttgtgagggaaggacattagaaaangaattgatgtgttccttaaaggatgggcaggaaaacagatcctgttgtggatatttatttgaacgggattacagatttgaaatgaagtcacaaagtngagtcattaccaatgagaggaaaaacagcacngagaaaaatctttnatggtcttcacaaggacatgccaacaaaccanaaagtggnaatatctgtgatgtacatgaagggcaatccaaagcctnggggggagggannaataaacccaccggggngcagnagtgggtcagagaatttctgggcncctggcttgccctaaaaacttggtngncggtttcattaaaccccanaaatcaatttttcatatttttccttaacccccttcnaaaaaacaaaaagtcttgnntggtaaatnattcttggatcctcntaaccggggtttcccttttccttgggggccccaaaccaattttcttncccattantnatcccaagcccacaccttcnaattttt

SEQ ID NO: 2078 - DNA, 440 bp, Homo sapiens
  misc_feature 8, 16, 373, 375, 391, 425, 428: n = A,T,C or G
cacattgntttgtttnttatatccagagtctagtcctcaactttaaccaaagtaaaggaaactggaaagacacacgctttttcagtcattaatagaaagttgtccaggtaagtttctgatggtatatcagttagaaataatatttagctatttgtaataaaaagctgaaaacagtagcttgaatcaatggaagactttatctttctcctcatacagctgacaataatgttgttgcctttatgatatcaaagccccaggttccttttatctttctgcttaacctgccttggcaaatgcttgctgcttcatagtcacatgatggctgactttactgtaaaccctttcaggtaggaaaggaaagggaaggagggtnanaggagataaaagggtncccttgcccggggcggcccgctctagaactaggnggnatccccccgggc

SEQ ID NO: 2079 - DNA, 468 bp, Homo sapiens
  misc_feature 51, 372, 442, 455: n = A,T,C or G
gccgaggtacgcggggacatcaatgcagagtccctctgtgaatttacaacncccaacacccatgagttcagtccttaagaaggaaaattgagcaagtatttaattggttggacattgcataaaagaggtccatatccaggctaactctagaaattttattctcaaacttagttggcctctttttcttctgtcagaggaccattcttagtggcactggggaaatcttggcacccagaagaattcaactgcgctcactgcaaaaatacaatggcctacattggatttgtagaggagaaaggagccctgtattgtgagctgtgctatgagaaattctttgcccctggaatgtgggtccgatgcccaaagggaagnatccttgggaggaaggtcattcaaattgccgttgaaaccaaacttgggcatgttttcctgttttgggggngtggtagcctggngggaaaggcccat

SEQ ID NO: 2080 - DNA, 483 bp, Homo sapiens
  misc_feature 27, 73, 75: n = A,T,C or G
ctatagggcgaattttagctccccgcngtggcggccgaggtacaagggaatggaatggaatggaatgcaatgntnatggaatcatccgtaatggaatggaaaggaatggaatggaatggaatggaatggaatggaatggaatggaatcaactcgattgcaatcgaatggaatggaatggaattaacccaaatagaatggaatggaatggaatggaacggaacggaatggaatggaatcgagcggccgcccgggcaggacatattgtatctgtgtaacattttgtatattccaggggtagggccgccccctgtatcatacctagcagaggttggagctggcacatggggaggaggttctaataattatttggggctgggaaacttatttattgatagcataggacagaggaaggaggcggggatgggggtcgtggcgccctggtgatgcgactcctgtttattttgcttttttatttcggaata

SEQ ID NO: 2081 - DNA, 429 bp, Homo sapiens
ccgcggtggcggccgcccgggcaggtactcttttttttttttttctgttttttaagatggggtgtcaccatgttgccaaggctggtcttgaactcgtaggctcaagggagccacctgcctcggcctcccagggtgctgggattgcaggtgtgagccaccatgctggtcttttaaattatttttgttctctcatgtcaggcaggtaatgtggggacatggtaacaaggtttgagggaggcacatctcacgcatgagtgtgaaaaaccaataatcatgcttatgagctacaataggatctggatccacatgtttctgactccagggctcatgctcatgccacaaataacattgattccaggacccaaggatgggatcatcaggagcgggaagagcagccagggtttcccatattttttcccttaactttcc

SEQ ID NO: 2082 - DNA, 463 bp, Homo sapiens
ccgggcaggtacatggtaaagattttcatatctcaattcaaataaaataaaaaagaaccaagagcaacaaaatttccatctcagaaacataaagaagaacttaccatatgaacgcccaggacatcttcagatgaagcttcctgcaccaggtcctcatcgtaatctaggaaacacagagtaactgtcatcatgttggttccactgaaggaatcccttaggcaaccttggatgctaaggacagggggctggcatgtgtaaaggaggtgggttaagggtagaaacttggctgccactgggacaccctcctgggtgatgagggaaggcaaatgagaccatcaggaagccacagaagtcaggacctggttctctggctaagcccccacaccactgcaaaaaaggcagagtccacaccagggtggcacacaaatgcactgctgatttatgacagtgtcccatcaccccc

SEQ ID NO: 2083 - DNA, 346 bp, Homo sapiens
ccgggcaggtacatggcagggacattgaaggtttcaaacatgatctgggtcatcttctccctgttggccttgggatttaggggagcctctgtgagcagggtggggtgctcttcaggtgctacacgcagctcattgtagaaggagtggtgccagatctggtggagacaaaagccatatgagcctggcagactcccaatggctggaaaattctcattgacattctcatgctgggagagtgtggcaccatgttacacaggatgggatggatctggagaggagaatggtcagccctggaaatttctgattgacatttaaagggtatactccttctcaacagggccccagg

SEQ ID NO: 2084 - DNA, 344 bp, Homo sapiens
  misc_feature 46, 333: n = A,T,C or G
ccgggcaggtactttttttttttttttttttttttatgtttggtgnggatgacttccagcctctggggccagcagtcgcctcctcagtgtatcctcaccctcttgccctgcactggaatgaccaggactctgggcctcctgggagtctgtagtaggtggttcctgagatgctccagttccgtcactcgcttccttagggagggccacagagctgctccctaagtgtgcatctgctcttcctacctggtcacttggagaatggctgggatctggatccaagggttctttacccaaattttctgaagggaggtgatgcccttttccgccatccanaaaactctgct

SEQ ID NO: 2085 - DNA, 344 bp, Homo sapiens
  misc_feature 5, 17, 21, 22, 23, 24, 41, 42, 72, 86, 87, 96, 102, 109,111, 137, 138, 154, 172, 179, 190, 192, 200, 203, 209, 210,216, 217, 218, 223, 227, 236, 260, 274, 279, 284, 293, 298,304, 308, 318, 323, 332: n = A,T,C or G
gcggnggcggccgaggnactnnnnttttactttggggggtnngaaaacccccaatggccaggagggaacccnaaaggggctcacanngagggcccnatttcnttcaatnanctacaaggacaaacacatctcaaagnngagataagggaccagnatgattggccaaaattcnaaagcgnactcaccatgntntggaaaanggntacctnnggggannngcacngcangaattctgngaaaagctggggggatatgggganagagatagagaaangaagnatatnatataaganactangagggncccngccttggctncacancccaggctnacaaacgggccc

SEQ ID NO: 2086 - DNA, 355 bp, Homo sapiens
aggtactacgaagccatcttggctctgtggaaccagctctacatcaacatgaagagcctggtgtcctggcactactgcatgattgacatagagaagatcagggccatgacaatcgccaaggtatgtcctcagggccacttaggctgcctggagggagggcagcgctgccccccgcagtgcctgtgcccaacagttcaaccttcttgctgtgtagcagtgcttttgtgtctcgtcaagcaagtcagctcagccctccttagaggttctggtctgtccaatagagaacgggagggattagcatatggctgattatgagagaaagaagcaatactaattcaggtggcctgacaagcaa

SEQ ID NO: 2087 - DNA, 355 bp, Homo sapiens
ccgggcaggtacacttgagaataatacctacagaggttcatactgaagggtagtctcaataatgtaaagaatttgacaagcatgatgctattgaaatagttctgtaaggaagtggtgttctttatacatcaattattacaaaaagcagtgaattgtaagtgtgaggcgtgtttacttagatgtgaagagttctccttactgctgtgatggaataacaagggtcagatttcctctcctgccttaaacaactggaagctatacaatacgtataataggtaatggtttttagacataggacaagcacaggtttgtgatcctcaggagactgcagacagagtgaggtgagcaccatggt

SEQ ID NO: 2088 - DNA, 363 bp, Homo sapiens
aggtacgcgggtgagctaaaaaagaattgcaaaaaaaaatctcataatgtttcaagaaagtttacaaatttgtgttgggccgcattcaaagctgtcctgggctgcatgcgtcccgcgggccaagggttggacaagcttgagttagaggtttctgcaggattacagagatgtgggaacttccagccattgacgtgtggaggttaggatatgaactactgtgaggtgcactttcagaggttgaggctaatactccttttcctacttcccaaggaggtgaagtttcctgaagacagtgcttttttacatgtagagttttttgtggttctgttactctgttgtctccattagtcaaggaacacgttt

SEQ ID NO: 2089 - DNA, 352 bp, Homo sapiens
aggtaccctgtggtcagcatagtagataacatagttacagaagaattgacaacaggaaagttgttttatagaggagggaataagggctccgtaacatgacatcataatttctagacaaacgcttaacttccctgaagcagattccgccaagagggattgggccatgttggaaagagaccagtttgcctgtaatattcttcctttctctaatcctgggctcccttcaggtagaacccagatcaccatcaggaaccagagaatgagaaaaagtagagagattgtggaacctctaagccatcttctcacagaggaggaaactagagttcaaagatgcagccacctgcccgctcta

SEQ ID NO: 2090 - DNA, 366 bp, Homo sapiens
  misc_feature 323, 336: n = A,T,C or G
aggtacgcgggtgagctaaaaaagaattgcaaaaaaaaatctcataatgtttcaagaaagtttacaaatttgtgttgggccgcattcaaagctgtcctgggctgcatgcgtcccgcgggccaagggttggacaagcttgagttagaggtttctgcaggattacagagatgtgggaacttccagccattgacgtgtggaggttaggatatgaactactgtgaggtgcactttcagaggttgaggctaatactccttttcctacttcccaaggaggtgaagtttcctgaagacagtgcttttttacatgtagagttttttgtggntctgttactctgntgtctccattagtcaaggaacacgttttgc

SEQ ID NO: 2091 - DNA, 362 bp, Homo sapiens
aggtacttttttttttttttttttttttctaaaaattaattgttttggtccaaagaacaagacctggttactggttctgatctttcctagttttaaatgaacatccataaaaggcaaactgtcatatcacattgaactttaatttcaataaaatgtgtatctcatgctcttcttcacttccctgtgtaatcctggcacctgcaaggcttgtgcttgcttccgtcattgcagcggcagcagcctcattatgaattgttcataatttcatcaaagtctgcatgtttactaactttgggtctgagctacagcattttcatctgtcatttttatatcaaacatattcaaggatcacacaaaactga

SEQ ID NO: 2092 - DNA, 357 bp, Homo sapiens
ccgggcaggtacttttttttttttttttttttggctattaggatcattattatttaaataagaatatcactatttcacatatatcaaatcccagcaggaataattaacattagtaatgtctggtgaaaatactatgagaaattttaactaaaaatgataaattttaaaaattgtgacttcgtcaccaattctgttgtattctgaataatattgggttccagacttgattttaatttaaattgttccataatgcctttcaaaggcagctccactgagttaaggcacatgcctcaaaggaataaatggacttttatcagtagatcatgaaatatatgttagatttataagcagtttgtc

SEQ ID NO: 2093 - DNA, 359 bp, Homo sapiens
aggtacttaatcctggttggtttacccattctaaattatttatgtgagatagctatctatttggaaaaaagtaaagtgaaagtcttacctcaatccacactcaaaaatagtttactatatgacagatctatggcaggcagatttgatggctcaatgaactccaccctcccagtgttcacacctttatgtagttcccacttacagggagccaaaggtccgtgggacgtgaccaactcagcattccactggaggctatatgatcaaacagcaaactgtttatcatgaatgcaggatgtgagcaaactcaccattgctcctgccgacagaaggttttctggaggcaatcactccctggtgct

SEQ ID NO: 2094 - DNA, 347 bp, Homo sapiens
ccgggcaggtactcttaaggcctgaccgctgaagtaatcccagatatcattttccccatatggtattgggtcaaagcactcccagggccatcccaggttggaggggagggcaaaaagactcagaaatggttggtgttcatctttggagactatttacacagtgattgtatattaaaaaaaacagcaattatatctttgaatttgagtaaagttaaagaaatggtatctgtgaaacttcgaataaacaagtggagcttaaaatatttgattcttgcatattaggttaatgtgctctatgctaatcaggttggagaaatattaagctctgctaggaattctattggact

SEQ ID NO: 2095 - DNA, 331 bp, Homo sapiens
ccgggcaggtacagtcatgagagattgagaatgaaaaaggcaaatgacatttcagtattgttacaaaaatagttctaacctatagggacccgttgaaaagtgtctcagtgacccatagatgaccctggaaatcactttgagaactaccattctatattttttaatatgagataattccattgtagaaagcatacttcaaaattcgaagttttgatgtatctttcagttacccaaaaattcaacttgacttttaatggtgcaatgatgccgaaatccccctgtccgtgcatcagtttatttttctactgcctatttgcatgatggttaaaaa

SEQ ID NO: 2096 - DNA, 273 bp, Homo sapiens
gcggccgaggtacaggtttttaaaagccccacagaagtttatattacgtttaaaaacccatattaaaatttgaaaacttaaaaaaaaaactaagaaaacaatggcatatattccttttcttaaacccgtgaagtccattactttttgttcttgttatattctgccaaaaatgggatggggtgggagagatgcatagaaattgttttatctgccttgttaacaaagtgaactcaaggaccagcttttcttttctttcttctttctttttttttt

SEQ ID NO: 2097 - DNA, 347 bp, Homo sapiens
ccgggcaggtactttgaaatattaggggcaggttcccctaatatctggcgcccaacgtggttttctttttcctaagtgcatgtgggaacccgattccctttggtaggtgcggagaaatgttcatcggtccagtccacagaaatgcttgttcggctccccgacgattggtgagttgtctgtgtattgtccggggtaactatgggtcacgcagagtctaaacattatgcttatctctgctatattaaattcctgttaaaatgggggagttcgggttcccatggaaaatatggtcaccctattcagggcagtggaagaacactgtccttggtttcctgaaaagggaacgt

SEQ ID NO: 2098 - DNA, 384 bp, Homo sapiens
ccgcggtggcggccgcccgggcaggtacgcgggggtggctggacccacgtggcaggtgttaaccaccgaagggaggtagaatgtttttccccaccagaggaggcagcgaccacgtctcctctatggaggcattcaagagccgtccagctgaagcagcatcactgtctgagctcggaaggcacaatccacataggtctgcatggtccaccgagctgcatgcccacggggccagcgggaggtgggcagctgctgggctctcttctgaagcagacaggatctcactctgttgctgaggctggatcacagctccctgcaaccttgaactctcccttaagcaattctccccactctgccttccaaagcactagcattataggcctaagc

SEQ ID NO: 2099 - DNA, 375 bp, Homo sapiens
  misc_feature 18, 19: n = A,T,C or G
ttagggcgattggagctnnccgcggtggcggccgaggtactaacagcattatgtgtgttgccttgtgcagttgccccaagagccccacaggtcgttgtattattgtgcccattttacagatgagaaaaccaaagctctgagaggagtgactggcccaaggacacctagggagtggtgaggcagcgattgaaacccaagtctggtgactccagagctcatgctcttctccacttctagaatgtgcctccctgctcagaggaaaggcttggctctgatgagggtctctaaggcagctgtccagcttccagctccatcaacatcctgagataatgcaatgggaggggttctacaactcacaaacctgccataaaaatg

SEQ ID NO: 2100 - DNA, 421 bp, Homo sapiens
  misc_feature 29, 40, 42, 45: n = A,T,C or G
cggccgaggtacttattgactattactgnttttcctttgnanttnacctccatttagagaggaacttgcccagccttaactgattgccactgatttaaacttctatttatgccaaattataaatcacatgcaaaagactgtgtttaaaaatctcaaatatttatcaggtaacaatacttccctatctcaaatgctctgaaagcttctatcgcactaatataaaatccaaatgcttcagatcaccttacaaaaaccttttatgacgtaggtcccagccagtctctccaaacccgtctcataacattgtctcctttcctctctaagctccagccttagtggccccttttttctgttctttgacatgccaaactcattcctggattagtaacttagcacaacctcttccctatctggaaaagcc

SEQ ID NO: 2101 - DNA, 337 bp, Homo sapiens
  misc_feature 307: n = A,T,C or G
cgaattggagctccccgcggtggcggccgaggtacgcgggggaaggaatcccttaagtgcacgtctcccgttttcttttcacatcaatgtagagtccctctgtgaattcacaacacccaacacccatgagttcagtccttaagaaggaaaattgagcaagtatttaattggttggacattgcataaaagaggtccatatccaggctaactctagaaattttattctcaaacttagttggcctctttttcttctgtcagaggaccattcttagtggcactggggaaatcttggcacccagaagaattnaactgcgctcactgcaaaaatacaatggcc

SEQ ID NO: 2102 - DNA, 453 bp, Homo sapiens
  misc_feature 87, 88, 130, 188, 209, 214, 232, 237, 255, 256, 268, 279,286, 299, 304, 310, 318, 320, 338, 342, 344, 347, 348, 351,355, 365, 369, 375, 376, 380, 382, 384, 401, 405, 407, 410,419, 429, 435, 436: n = A,T,C or G
ccgcggtggcggccgcccgggcaggtacttgtgcttatattcgatccttggcacccagcctcctggacggaaataaaactggattgnngggtatattttggaagtgtgccagaattggtgaacggaagantccttatgttgcagtatgctgtatagtaatggccttcagcatcctcttcatacagtanctggggaaaaatgccagaatngtaanttgccctcagattttganttggngaccaaggacttgacttnnaaaaaaaattanttgggaaaggnttgtttnaaacttttttttnttttncccaanctttttgnanttggaaaaaaaatttccnaaangnggnngcncccntttttttttnaagngttttnngggnancnaaatttttttttttttnaaananaantataaaaangggccccccntttttnntttttttttttaaaaaa

SEQ ID NO: 2103 - DNA, 533 bp, Homo sapiens
  misc_feature 12, 13, 14, 16, 19, 21, 26, 46, 48, 67, 82, 103, 125, 145,146, 156, 166, 180, 185, 201, 258, 261, 264, 265, 308, 311,320, 322, 323, 332, 335, 337, 345, 346, 347, 350, 359, 371,382, 385, 391, 392, 394, 395, 396, 405, 406, 407, 408: n = A,T,C or G
  misc_feature 409, 412, 413, 414, 418, 423, 430, 431, 432, 433, 436, 443,452, 454, 462, 465, 468, 470, 471, 481, 482, 485, 499, 501,504, 505, 507: n = A,T,C or G
aacccggcgaannntngcngnccgcnccggcggccgcccgggcagntnccatgcccgagttaaaganccatcttttgacacntctattcacaatggcaggtantagccatgccagtgcccccggnttccacattctttttatttnngagacggagncttgctctgntgcccaggccaggngcggngggctcacaacacttngggaggccgaggctcaggagttagagaccaacctggccaacatagggaaaccccatnttntannaaaaaaaacaaaaaaattggccgaccacgggggggcatgcccntgnaaaacccancnnctggggggnggngnggggacannnaanaatccctgnaaaccccaaaanggggggggggnccntggggnngnnngggaaaaannnnncannngggnccccntgggccnnnnttnaaaaaanaaagggggncncccccccnggnggngnnaaaaaaaatnnggnaaaaaaaacacttnanaanngnccccccccccccccccccgggggggg

SEQ ID NO: 2104 - DNA, 501 bp, Homo sapiens
  misc_feature 88, 89: n = A,T,C or G
cgggcgaattggagctccccgcggtggcggccgcccgggcaggtacttcccaactaggggtgagtttgccacccttacccccattttnntgaatatttgcaattcctaaagacgtgttttgattgtcacacctgggtggggaacatgctactggcatctaatgcatagaggcagtaatgctgctaaacatctttcaacgcacaggatagagccccacaaaagagaattatctagccccaaatgtccataacactgctgttgagaaaacctaccgcaggatcttactgggcttcataggtaagcttgcctttgttctggcttctgtagatatataaaataaagacactgcccagtccctccctcaacgtcccgagccagggctcaaggcaattccaataacagtagaatgaacactaaatattgatttcaaaatctcagcaactagaagaatgaccaaccatcctggttggcctgggactgtcctagttttaagcattgaaa

SEQ ID NO: 2105 - DNA, 528 bp, Homo sapiens
ccgggcaggtacacaggaggatatgttcaggtcatatgcaaatactacaccattttctatcagagacttgattgagtctctgtggattttggtatccttggggatctggaatcagtcccccacggaccctgagggctgatgtgcgtccatcctgggattgatcagtgtctccccagagtctccgagaggctcagtcttgctctctcagtgtgattttgtgatattataagcatgtgactggtctgtgtccccagtccctggcagtagagttcttaagcccttgcagttttctgagacctgtaggggtgacaggagcttctttttttctgaggtgactcttggtaggctcctaggaagcttcagggtggccctggtcagaaagaccacacacatgatgagagggttgaaacaagtctgtgtgacctctgcacccccagggagagaagagggctggagatagagtgagtcaccaagtggccagtgatttaataaatcatgtcacatgatggaacccccataaaagccccc

SEQ ID NO: 2106 - DNA, 624 bp, Homo sapiens
  misc_feature 5, 46, 54, 60, 82, 85, 88, 112, 374, 436, 474, 483, 493,505, 511, 513, 515, 528, 531, 545, 553, 574, 575: n = A,T,C or G
gcganttggagctccccgcggtggcggcccgcccggcaggaacttntttctttntctttnttttttttttttttgagacatnttntcnttctgtcacccatattgtggaggnttctgccagtataaattagctaaatcttatcatttgtgtgtgtgtgctttctcctcataggtgactttacttcctgggacatacaggaatctgaattcagtaatgggtctggaggcagcaagagatgatacgggtggatcttgaaaagattagcctaacagtgagagggtccccaagtcaggcaggaccagccccatagactggggaagaagggctgcttctgctgccaggggaaactcaagtgagggttggggtttagggngcttaagaactatccaaaacaatcctgatgttcctattcctaagtctcaaagggcccattgntccctaaacaagaaccattgtttttgcatatgagaccnggagacccntatgaaatcnaaccggcgttgnaaatcnancnaccctggaagganttngggttttaatggcntgaaattnaagggttgaataagccctggnncctgggaaaaaaaaaaaggattcctttaaaaccaaaaaaaaaaaaaaaa

SEQ ID NO: 2107 - DNA, 585 bp, Homo sapiens
  misc_feature 84, 566: n = A,T,C or G
attggagctccccgcggtggcggccgaggtcaaagaagttaattttttcaaagaataggaattatgactttatattaatctccnttatggttcaataccatatttcacagaatctaaaattccactggctataagacatactattattttatgaataagaaagaaagcctgtaataaaactatgacacagtgctaagacatcactaattgtagcacacatcctaattttagagacattaaaatgtaaaaaaaaaaaaaagtgtcaaaaaagcataccttgtttcatgcaatttgataaaattacagaaaatcttagttatgtaatatgaaatacatgtaaaaatacaaagtatatatgtaagctaagaagtataataggtcacccgtgaacctaccacccatcttaagaactagattactactaaatgccttgaatctatccgtgttccttgacttatccccatgcttccacaagaggtaaccactatcctgaattttgtatgcataattcccttgctttaaaaaatagttatcacataggtatgtatctttaaataaaatactgnatatttttgcttggccaat

SEQ ID NO: 2108 - DNA, 666 bp, Homo sapiens
  misc_feature 3, 18, 55, 87, 635, 664: n = A,T,C or G
ctnccggcgaattggagntccccgcggtggcggccgcccgggcaggtacatcacnctgctgagggacatccaggacaaggtcaccantttttacaaaggcagtcaactacatgacacattccgcttctgcctggtcaccaacttgacgatggactccgtgttggtcactgtcaaggattgttctcctccaatttgggccccagcctggtggagcaagtctttctagataagaccctgaatgcctcattccattggctgggctccacctaccagttggtggacatccatgtgacagaaatggagtcatcagtttatcaaccaacaagcagctccagcacccagcacttctacctgaatttcaccatcaccaacctaccatattcccaggacaaagcccagccaggcaccaccaattaccagaggaacaaaaggaatattgaggatgcgctcaaccaactcttccgaaacagcagcatcaagagttatttttctgactgtcaagtttcaacattcaggtctgtccccaacaggcaccacaccggggtggactccctgggtaacttctcgccactggctcggagaggaagacagaggttgccatctatgaggaattttgcggatgaccccggaatggnacctcgggccgttctagaactaaggggancc

SEQ ID NO: 2109 - DNA, 560 bp, Homo sapiens
  misc_feature 35, 77, 80: n = A,T,C or G
tccccgcggtggcggcccgcccgggcaggtacggngaggaacagagtccctcctttacttctccattagaaagaatnttntggcaagacaatgaaacaggcaaagtgaacagagatgcaagacaaaattcaggtgagagagccagagcatcactcagccattcctgctgtaaaacaggcaactagaaatttgcagaaaggaagcgaagtctccataaagatgtttttaaagtgagcttgaagtatttggagacaattcagtgttacataaaatctgcaaatctctggataaagaagcagagatcccagcatgggacaaatggagcctcaaaagtgggaagaagacagagaagaccagggcagaatgcatctcttcctttctcttggctttcctggataaggactgcatcattcctgtggaaggacaggccatcagctccgaaacactgtatgtattttccagtatatactgctagctgtgtgatgttgggaaaatttgttaccctgtctaacccccacttccctcatctgtaaaatggaaataatgataggtacctcggc

SEQ ID NO: 2110 - DNA, 544 bp, Homo sapiens
  misc_feature 84, 91, 252: n = A,T,C or G
ggcgaattggagctccccgcggtggcggccgaggtcttttttttttttttttttgtcttgaattggcaaatggtttaatttttntgttttnggacgctggccttgctggggcaccatggagcggggccccgtgctggtgggttgttcactgggaccacccttctggaatgtggaggcggcatggcaggacccaccgaatgccttcaaaagccagtggtccatgcccctgtctccttccttagagtcttccanaaaagactggtcagaggtgcagcacagataaacctacaaagcttttcatcaaagcatcacttacaatggtgaaaaggcagaagaatcactgaattccaccaaggtggagcagcccgaggaaatcgtgggtagaacactagggagtcacaagaaacaacatatttgaggggacatttatagcagaggaaaatgctcatgatctaatgctacactaaaagggcaggatacaaaataaggtgtattggaagaaagagggtagcatggttgtccatccactggctttcagggactg

SEQ ID NO: 2111 - DNA, 667 bp, Homo sapiens
  misc_feature 73, 601, 623: n = A,T,C or G
cgttgtggcggccgcccggcaggtaccgaggtcattttgcttcctatagactgcgaccttttggcaaaagctnttctaactccatctcagcatttacaattccatacctggtggtcagaggaggcccgcctgcaggctcagctaaatcgggctgtggatcaattactcaggctcagctcacaggctccgataattactctgatactactgctcatttaggctttgatgctctcaccacggaacaagtaacaaaggtgtgtatgagagcttgggataaattacgcaccccaggccaagcttctgtttcttttactattggtaaacagggtcacaatgaattatatcttgattttttaagctaaattacaagatgctgttgaaaaatctgtctctgatgagcacactcaaggtattcttcttcatatgttagcttttcaaaatgcgaaccatgagtgtaaaatggcccgtgcattccatcctacgtcaaaatttacctgatcatgaggtgttgcctgcatatattaaagcttgtgaaggcgttggatcggagacccacagagctattctgtgggcaccggcatgaagcacgggaaccaaactngctcgactggattctttttttnggagccctggctataaattggggggccaacttgggtcattaccc

SEQ ID NO: 2112 - DNA, 502 bp, Homo sapiens
  misc_feature 3, 18, 29, 74, 86, 136, 460, 473: n = A,T,C or G
ccnggcgaattggatttncaccgcggtgncggccgcccgggcaggtacgcggttacatcaatgcagagtccctntgtgaatttacntttcccaacacccttgagttcagtccttaagaaggaaaattgagcaagtntttaattggttggacattgcataaaagaggtccatatccagctaactctagaaattttattctcaaacttagttggcctctttttcttctgtcagaggaccattcttagtggcactggggaaatcttggcacccagaagaattcaactgcgctcactgcaaaaatacaatggcctacattggatttgtagaggagaaaggagccctgtattggtgagctgtgctatgagaaattctttgcccctgaatgtggtcgatgccaaaggaagatccttggagaagtcatcaatgcgttgaaacaaacttggcatgtttcctgttttgngtgtgtagcctgnggaaagcccattcggaacaatgtttttca

SEQ ID NO: 2113 - DNA, 609 bp, Homo sapiens
  misc_feature 17, 53, 85: n = A,T,C or G
cccggagctccaccttngtggcggccgaggtacaagaaatcgagcacaattgngtcagaagaacagaagacccttccagcgccanttttctgggaggtggtccaaaggaagtcagtggggccagctctctccctcagacagctaacaggagcaaggcttggtcagccttctgactctgcaagtccaaggcttctgagctatttattctatacttactttgaaaacacaaaattgctccaacaggatggatatgttacggaacaattaggcataataggatgtgcatttctgtctactgagaaacaccaggtagaaaactgcaccaagctgaattgagcttcgtggtaatacacaaaaaatgcacacagctcagctcaacaagtgcactgagtcacaccaaacacatttgatgttacaactttccatccaattccagataaccttcctcccactgcttctcaactgctcaaaagcctaactctccaaacccatttccacaaggtaatttgaagactttttcaaataaaatgccaaatttaccatagtaggttatgtatttcttaaccatttaaacatttataaaactatatcattttttattcaggttcc

SEQ ID NO: 2114 - DNA, 452 bp, Homo sapiens
  misc_feature 3, 80, 82, 85, 90, 165, 218: n = A,T,C or G
ccnggcgaattggagctccccgcggtggcggccgcccgggcaggtactttttttttttttttttttttttttttatattntnagnttttnaaaaaactaggttctccttagggaaaaaatacatgcaaatgctcacaaacttttaaattcacactttagcggggnggtgattctgaaggccctttctgtaaccctggtgtctttcaggaaacccaggnggagatcccatgtttaaattactttccgtttcaagagcacttcttagattctttaaaaaaggacatcttaaattttacattactgttacaaaaattagccaggcatggtggtatatgcctatagtcccagctactcgggaggctgaggtgggaggatggcttgggcctgggaggcagaggttgcagtaagctaagatcgcactactgcactgcagcccggccgctctagaacta

SEQ ID NO: 2115 - DNA, 703 bp, Homo sapiens
  misc_feature 2, 14, 29, 55, 56, 68, 78, 81, 99, 101, 137, 244, 339, 403,410, 482, 535, 561, 582, 604, 622, 628, 656, 689, 702: n = A,T,C or G
antcccggcgaatnggatttgccagcggngccggccgaggtacgcggggggagcnnaatgcagtgctngctccctatntgngggccattttatagcagngngcttgggtgctgcgtaagacaattccccccaacgcntccaaaaaataggacatggtccactgcaggagttcataatcaggagtccagagagtccaggctcatcatcccttcagaagaaagaatcttcaggcctctgctcttgngagagtaatttctcttaacaccgacagtgcagcaatacaactaccaccacctttcaattattgagaggcaatcatctaaagcatttgggcaaggngatccacttacggagccaagctaagggagctgaagagaagaggccgccgccccaacccaggtgntggtagntatctaagccttttgcaaagcctcttccatttctactctgctctttaaagctatttcatgccttgaagatgnctctaccagggaaaataaaagagattcagctcttccccccaccctcagcctgncttccaaaacaagaggggggctgaangacctgggaggggggggaaanggactaagagggaagaagcccncaaaaaattaagcaaccngggccnggaaaattcaccaattcaccacccatcnaaaactgggactaacaaggaaaagaaagaattnatggtaagggaang

SEQ ID NO: 2116 - DNA, 723 bp, Homo sapiens
  misc_feature 3, 99, 100, 575, 701: n = A,T,C or G
cantttagggcgaattggagctccccgcggtggcggcccgaggtactgcaataaccccctaatagttcttttacccaccaatctggcccccaacaaagnntcctttgatttctccttcctaccaagacattctcaacattctccctccaccaggtggatctggccattgattatcataaatctaattgccttctgcttaaaatatttcagggagacccattaatgcatttggataaaaattatttattagctgtgtgactttgggtgaaagatttgagctcatctgtaaagtaaggcaatatggcacccttgaagagtggtgtgaggattatggtgtttaatgtccaccacaatgcctactgtcttatagaagctgagtgggaactaacgctatttctacttatttttgacaagctgcacgtgacagtgggaaaagtattgtatttggagtcagataataatgataacaaccacaaactactagcaaatgcttacacaatgcttttctgtgtggtaggtctttttccaaatactttacaaatactaattatttttaatcttcacaacaaccagangtaggtgctggttatcatgcccatttaacaagatgaaaaaagtgaggcatgaagggttaagtaaatagatctctacagaaagtatttaaaagaatcaggacttatcccgtagtagtctggcctcanaatccatgagcttaattaaaat

SEQ ID NO: 2117 - DNA, 455 bp, Homo sapiens
  misc_feature 28: n = A,T,C or G
tctagggcgaattggagctccccgcggnggcggccgaggtactagcctcaaaagaatcaaactaaattttttgtaacttgattgtgtcccagaacaaaggccaaaaatgtttaaaggaatatttaaagatcctgcaacataaagctcagtgtttagcatccaataaaaaattatcaggcatttaaagaagctggaaaatatggcccataattagggaaaaaattaacagagacatagaaataacccaggtaatcaaattagattaaaatgttaaagctacaaataaaagcaagaattactagaacttgtagaattatttcatttgaaaagtatgaaataatcccatcctctctcctactcaaggacttcactcctaataactattttatgtctctcctggatccatttaatggagatattggttactaattccaacaggaactttttttttcctt

SEQ ID NO: 2118 - DNA, 415 bp, Homo sapiens
ctacttagggcgaattggagctccccgcggtggcggccgcccgggcaggtaccatgagacaaagaggcagctttcaacatctgtcaggtctccaacatgtgatgccatcttacgatggcactaattcaggaaaacaaaacaaaactcttttcttcctttcctcaccactttctgtgccttccaatcccagaggagtcaataccaacggctagccagcctggatagccaaggaaggggaagagcaacccagtctcaatgccacccacttactccactgcacacagagactctgtggtgggcccagctgggggaggggagaaaatgtaagttcaatcaagtttagagttttgggttacaatttgaaatggacattctaatttctggatagagtctgagatgatggtttagcatgaat

SEQ ID NO: 2119 - DNA, 460 bp, Homo sapiens
  misc_feature 47: n = A,T,C or G
acttagggcgattggagctccccgcggtggcggccgaggtactttancatacttcgggcaaaatgaaccactggattataagatgcctgaggacacaactccaatttaatagttccttgataccctcccaaagcacctagcacagtgctaagtctagagaatgcttttgaaatatctctcaaagcagaaacttgtgtgtatatattgggggaaagaaaataggtctacttcttaaaaaaaaaagccttgacctacttgaatgcgatgatgttagggtgcttcaacttcctcaaatgcttgatatccgtctcattctgttctctcactttcttgatggccacctcttccgcccggaacttgcccaagaagaccgctccttgggctccactacccagccactgcagctctgagatctcctcaaatggcacttccaagtatctaggcacacaagcaagaaata

SEQ ID NO: 2120 - DNA, 474 bp, Homo sapiens
  misc_feature 65, 445, 449, 458: n = A,T,C or G
aattggagctccccgcggtggcggccgaggtacgcggggacatcaatgcagagtccctctgtttntttacaacacccaacacccatgagttcagtccttaagaaggaaaattgagcaagtatttaattggttggacattgcataaaagaggtccatatccaggctaactctagaaattttattctcaaacttagttggcctctttttcttctgtcagaggaccattcttagtggcactggggaaatcttggcacccagaagaattcaactgcgctcactgcaaaaatacaatggcctacattggatttgtagaggagaaaggagccctgtattgtgagctgtgctatgagaaattctttgcccctgaatgtggtcgatgccaaaggaagatccttggagaagtcatcaatgcgttgaaacaaacttggcatgtttcctgttttgngtgnggagcctgnggaaagcccattcgga

SEQ ID NO: 2121 - DNA, 507 bp, Homo sapiens
  misc_feature 2, 3, 13, 19, 21, 25, 85, 92, 96: n = A,T,C or G
gnnagactgaccntttacnanagcncgaattggagctccccgcggtggcggccgaggtaccagttcatatcatcatcaatgtcgnggctggntttncaggagatgttgactttgtctcctggagtcgctgacatgaatgctggagactgcgtgagtgtcgtttctgccctggtatcagagatccaaaggaggaggaagctgaggaggtgaacctgggaccccataaccttggccctgacctgcatctacaccaagaagagaggacagaggccagacttcacagacaccatcattctccggaaaggggcctcagtggagcacgtgtgccaccgcatccaccggtcactcgccagccagttcaagtacctgcccgggcggccgctctagaactagtggatcccccgggctgcaggaattcgatatcaagcttatcgataccgtcgacctcgagggggggcccggtacccacttttgttcccttttagtggagggttaattgcgcgcttg

SEQ ID NO: 2122 - DNA, 432 bp, Homo sapiens
  misc_feature 70: n = A,T,C or G
agggcgaattggagctccccgcggtggcggccgcccgggcaggtacaaagtccctaaggcaaaagcattnttgctgtgttctaggaaaagcaaggaagacagcatgtctatagcagtgggaggtggaaggataataaacagtaggtgaggttagaggggaccaaatcatgtattttccatccagaggttcccaaccttggctgcacattagatttattctaaggagcttttaaaaaataccaatgactgggtcccagcctagagtgattaaatcagaatctctggaggtagacttgagaatctgatgtttgcaagtttcctaggcaagtcaaggctgaggaagactgctgcaggccattgtaagagccaggcgttgatctcattcaacctttccctcagctcttctagagacagccagcattctcttatggc

SEQ ID NO: 2123 - DNA, 399 bp, Homo sapiens
  misc_feature 76, 77: n = A,T,C or G
cttagggcgaattggagctccccgcggtggcggccgaggtactttaaaataatagaccttacaaagttttctaganngacttcctgtgaagaacaaggagcagggggaaaggggaaggggtagaatttaccaatctgaatatttcagcaagggagaatgcatgagttttactataaaaccacactgaacattgcaacaatactaaattccatacatatataataatcactgagctataaggttgctgatgtatttgttcttgaaagtgaattagagttactttatgcagaatcagctagttttatgtttcataatgtctttcccttttttgaactttttttaagtctaaagtagggggaaccaagcctgctggtggtgattttggagaagtcttgaatt

SEQ ID NO: 2124 - DNA, 428 bp, Homo sapiens
  misc_feature 27, 36, 99, 392: n = A,T,C or G
ttagggcgaattggagctccccgcggnggcggccgnggtacaaactgatggagtcacctgcaatctcatatcctggtggaatgccatggttattaaagngtgtttgtgatagtgtcgtcaaaaaaaggtttttgaatagaaattacattctttgacaccctcagttctttcaaactttcaactctgcattttattgcattttctcatttaactgttagtatatgtttgaatataggctgactttttttctctattgcactttcttctttttttctttttagaaaataagcaattaggggttaagatgcaatatgaatataaaatagttctggaaataccaaatattatttttaagttctggaaagttaaaaatactctccatagtaatgggnggtataataataaatatttcttttggttgacttttt

SEQ ID NO: 2125 - DNA, 494 bp, Homo sapiens
  misc_feature 24, 33, 60, 381, 388, 466, 480, 484, 486: n = A,T,C or G
gggcgaattggagctccccgcggnggcggccgnggtaccaatgaacttcttccctgagtnggtctttctcatataacacaaaaggcaattgatagcatgaacaatacaattttcttgccaaaaatatgtgatttgagtctaataaggtctttaggtttaatttcaagtttcctttgtatgtgtctccactgtgcccggtctcttatgcagcccactgggaaggtagacacagggtctttgtgcccatcccataaagggccaaacagcactgcatgccaggaaaatgtgtagagatcagtgcaacgcaatcctcaccagaaaggagctttgtgcaaattttgaagacagaggcaaataggtttttccatatttcatcgcatnaacttgntacagcaaacaccctggacttgtatctggatctccaagtttagccatcacaaatgaagtcatgttttaaaaaaaaatnttaagcgaaacaangctntntttttttt

SEQ ID NO: 2126 - DNA, 413 bp, Homo sapiens
  misc_feature 66, 402: n = A,T,C or G
aattggagctccccgcggtggcggccgaggtactaatttaaaactatacatttctaagttaatganttcagcatcttgcggccataccagacatggcatggaattaaactttcagtcccactgttcattttattcatacattagggtggcaagggtggtcttgctcattgcaagcaaagtcatcctggttcatgaaatgaagaatgtggactgtgcagttttcccagtcatgaagacttttgatacatcacttgaaatgttcctcctgaagttgagggtcttttgtaatatcaccagggcagtgaatggcagagaccagatcatgaatcgcttcatttagagcctgcctccgggcttccctgcactctgtggctgctaataccacacccctgtgtcccttgnggtcttaaagt

SEQ ID NO: 2127 - DNA, 410 bp, Homo sapiens
  misc_feature 72, 98, 214, 266: n = A,T,C or G
agggcgaattggagctccccgcggtggcggccgaggtactattctttccttttgtgtatgtttgaaattttncattataaaaaggacaaaaaaaaaangagagagaaaactaaaaaagaaaaaatagtgttgcgcttgttagtaaaaccaatcttaaggccagttactaaaaagtaaactcctacaattttgaatagctatttgctaatacagngatttgctgccttcttggggttagtttagcctgtccattccttatttaactngctcccttccttcccttttaataaagtcctgcctaagctccaggctctattttccacctctcccctaagatttaggattgttccgttttaagtcagtggccatatgtcttcctgttctcctagtggaactcttaccttacccag

SEQ ID NO: 2128 - DNA, 376 bp, Homo sapiens
  misc_feature 41, 48, 52, 55, 56: n = A,T,C or G
cgcgggaagccggaccaagctgagggaggtggagccagcancatgcantggnttnntgaagggtgagcagtgcgctaacaaagcccttccattcaccagacattgtctccaacatatcctcttgaaccactctcagcagttctcaagttgcacagccaagtttgcagatggacagcagtgctctgtgccagtttttgacattacacatcagacacctctgtgtgaagaacataccaaaaaaatggataatttcttgagaggagataactcccgtaaagttcagcaccagcagcagaggaaacccaggaaaaaaaccaagcctcctgcactaaccaaaaaaaaaaaaaaaaaggaaaaaaaaaaaagtacctgcccg

SEQ ID NO: 2129 - DNA, 260 bp, Homo sapiens
  misc_feature 26, 27, 33, 39, 40, 48, 54, 97, 99, 104, 106, 110, 125, 160,169, 191, 198, 243, 255: n = A,T,C or G
ccccggcgggcgaggcacacgttttnnccatangtttgnnccctctgnttttanacccgcaggggagagtcttgcacatcatctttgtaaaaacagncncgtgntntacncagaaaatttgaatngagccctgctacatacatgctaggcattagggtcnaaaaagaangaaaataaagcatctcaggganggctttncagaacacatgcccaagcagagacttaaatattgaggctggccanattaaaaggggnagagg

SEQ ID NO: 2130 - DNA, 462 bp, Homo sapiens
  misc_feature 15, 23, 87, 90, 94, 95: n = A,T,C or G
cccactatagggcgntttggagntccacccgcggtggcggccgcccgggcaggttcctatgctgtggatctgtgcaccacgcattgnttntatnnatattacattaaactgtgcctcatctggattgtggcacaaggtaaaatagatgcaggctgtcaaggctgagaaaaatgtataaaaacaagaccagaagactggagggaccaaaagaggtgatgcatacacaaggttctaaagcccaagtctggactccatatgcacattcaaatttgaggaacactgagcagtaacatgcaaatcacctgagaatcttgcttaatcagcttctcattcagcaggtctgggggagaggctgagagtcagcatttcttgcaagttcccaggtgatgccagtctgcggcccacatgttcatctagaccccaaactagtagcaatgtgtgtggacaaggctgggtaacagg

SEQ ID NO: 2131 - DNA, 409 bp, Homo sapiens
aggtacatgatgatttccttgtagtaaatagttttttctaatttttcccatgtagacaaatccaaaatgcatacatgctcatttaaataatttgtccactggtaacctcagctgagcgctgcccttggcagaatatgtttcaggatattaaatgtgtttaaaatattctttcatattacttggttggcatttagatgtcttaagttgttttaataaattagggaaagctagaatataaaaggtagaaaatatatacattttcagtgttccaagacactttggtggactatagaatgctttaaatgcaagttaagatgaatattttatatttggctgggcataatggctcatgcctataatctcagcactttgggaagccgaggtgggaggatcgcttgagcccgggagt

SEQ ID NO: 2132 - DNA, 424 bp, Homo sapiens
  misc_feature 13, 17, 22, 30, 39, 40, 42, 43, 53, 62, 80, 86, 107, 108,110, 111, 119, 125, 126, 127, 137, 151, 152, 162, 163, 166,172, 177, 187, 198, 235, 248, 256, 257, 282, 283, 289, 306,312, 314, 332, 359, 382, 383, 384, 390, 409, 422: n = A,T,C or G
ccgcccgggcagntacngactngggttcancccaatggnntnnaaacccaaanacaggaggnaagaaagcctgaatcagnaaaacnggggggaaggaggcccagaannannggggccancagagnnnagaccacganggccaccaaccccnncgcccgcggnncanaagccngggangccacaaccncaaaggccaanccaggcacagaacccgcaaaaccagccaggagaaaanaaaacccaaccancgggaggnnaacaacaccagccgccagccgcaanncagganccgcccgccccagaggnccaagnanggaacccaggcggggcgncccgggccaaaaagcaaggcaccaaancaacaacccaccggcgagggcgnnngaaccnacgggaccccggccgcccnagaacaaggggancc

SEQ ID NO: 2133 - DNA, 439 bp, Homo sapiens
  misc_feature 14, 66, 69, 71, 76, 292, 317, 328, 338, 343, 428: n = A,T,C or G
acccggcgaattgnagctccccgcggtggcggccgaggtacatgtgatggtgaaaagttgttttanagngnttttntcttacgtaagggttcataagaaagacaaaagtttatgaaactgttactaccagtcataaaagaccttttcctccctcattcacaggctggcttattagctgtaatggcccagatgggttgttacgtccctgctgaagtgtgcaggctcacaccaattgatagagtgtttactagacttggtgcctcagacagaataatgccgggggagtttttgngtccccccttaaagtctcattcagncatttagatgngataaaaganatttngcttcttggatatgagccttttaaatctaatatttgatttttctgggggttactttaaaaacatcctttttaagaactgcatagnctctctctctt

SEQ ID NO: 2134 - DNA, 417 bp, Homo sapiens
  misc_feature 53, 66: n = A,T,C or G
atagggcgtttggagctccccgcggtggcggccgaggtacttaccatcttgtntctcagtaggttnttgataccaaagaggaaaatgtttaatatttgctttatctattagatcagaacctcttcgaaaaaagaagaaggtggatcctaaaaaagaccaagaagcaaaggagcgcttgaaaaggaagatccgaaaactggaaaaggctactcaagagctaattcctattgaagattttattacccctctaaagttcttggataaagcaaggtaaggatccttctctagggatgaagtcctcaggacaaaggagtaatatcaacttcaggtagttgtgtctgtagttcacacctgtgatagtcattggtcagtaggcttgagctgacttggccctaatgagtccttgctccttttgga

SEQ ID NO: 2135 - DNA, 468 bp, Homo sapiens
  misc_feature 24, 239, 324, 334, 382, 389, 397, 424, 425, 430, 433, 440,442, 452: n = A,T,C or G
ctacttagggcgaattggagctcnccgcggtggcggccgaggtacctgcaatgggactctatttctgatattagaaaaccacccaatggaactgataaaaatgagttggaacttgtgaccagcagctggatgagaggagtgtgaatcccccaaatcttatggatatagtgtgctttctttgatgttcctgccaaagtgaggctggaaagctaggaagatctgtaagacgtgtgccagcncaaagtgactacaattcaaaagttccaaaaaccttgctttgaaacaattgcaaatagcttatcattttaaaccaggtgagcccanggcttgagtnttttcaatcaatttaccaggaaaaacccaaggaagaggaaattcttgncagcttnttcccagnggttttgacttaccattggaaatcttnnaaaanaanaaatccncnttttgggttnggggaaaaaaaaaaaa

SEQ ID NO: 2136 - DNA, 473 bp, Homo sapiens
  misc_feature 61, 64: n = A,T,C or G
attgtgctccccgcggtggcggccgcccgggcaggttctcattgaacttgagctccgagtnttnattcacatccaagctcttcatcttctcatcaagagagcccacatcccgaggagacaccaaagggaagggtagagttagaaactggggttcttgagaaagtagggagggaagaactgtcagctgctattctctcaaggcccttccctcagagagcagtggcacctgccccttctctaaagaaggaggctgcagccccaaaactgcaccgccacggggtgcctctccaaggagcaccagcagagaaaggtgggggggcctgagtcctaatgcttgccgttgtgtaaatacttccacgatggctgcttacaaaccacaaacaggttgtcgctgaatacaaagctggaaagaaatccacacaatcttctctcaccagcacaccactgcagctgctgtgggatcggcccaagga

SEQ ID NO: 2137 - DNA, 406 bp, Homo sapiens
  misc_feature 12, 17, 37, 50, 65, 379: n = A,T,C or G
gaatttagctcnccgcngtggcggccgcccgggcagntacctgaaaccanagctggggtcacttngttgcagccaacctgtgcagagagggcaacttctcgttgccttgagttgtggccctccctgtctggtaagagaggaggagacgcctccccgattcagggaaggaggaagagaatgagcggcaggtcgcctacctggacattcttcattgctgcagatccactggctgtttcggcaaatgctgttggagggaaaaagcacaggtcattggtggttctgcaaacacaagggtatgcaaatggatttagagctcatggtagttatcacagtccccaaacgaagggatgtgggaaaagaaaagagctggtgctagcanaatcttcatagggttaaaattgtacct

SEQ ID NO: 2138 - DNA, 345 bp, Homo sapiens
  misc_feature 193, 287, 310: n = A,T,C or G
ccgcggtggcggccgaggtactttttttttttttttttttggctattatccttataccttttattaaaaagtaaagcaattctactctccttatgagtttgtgtttaacaatgatgaaatatgttaatttgtgcatgcataatgagatgaactctggattatttcatctctgcgattacatgtggaatagagngattaatcataaaatgtcttcctcatgattccaaaacttggaaattgaagagagcaacagactatatgttttctaaactgatatatctccttgngatctaaggggattattttcagngtccatatatatataaacagcctgagggggaaaaa

SEQ ID NO: 2139 - DNA, 429 bp, Homo sapiens
cactacttagggcgaattggagctccccgcggtggcggccgaggtacatcagttcagcttctgctggcaggattccactaaaatcaaaatagcaccaaaggaagaaatggttaagggcagccagtggaagatcccactctcccgatggcaaattccagagctgtggtttagctctagtttctgggaagagcaatcattacccaactgtgagggtagggtgcattactaagtaattcattgacatttttcccagtagccttttacttaacagcgaataataagaggaaggtaaagtatttaattaagagccacagccctgtaaacatgaaatcattattccagacatcccttcgaatatgttgcctactttaaaaagaagttatttttctcccatctgggagaaatcctcactattaaaaaaaaaaggaa

SEQ ID NO: 2140 - DNA, 506 bp, Homo sapiens
  misc_feature 30, 33, 34, 37, 44, 50, 81, 85, 113, 121, 131, 134, 135,239, 243, 248, 254, 258, 268, 288, 303, 318, 321, 327, 333,349, 352, 366, 370, 415, 423, 431, 444: n = A,T,C or G
ccgcggtggcggccgcccgggcaggtactnttnnttntttttcntttttntttaaggaaatccacacttttcattactacngttnattatactctcatccagaagctttatanttcaaganatttgaattnatnncttttactggggctaaaggttctaactttgaaaattagtattttttggaagagggggcttaattagacaggtacaaggggaagagaggggtagcttattttaancaanccaanaaattngggngaaaaatcanagagggagaaagaacttggngggggagggaatatntgtctgccgaccatnttnacaggntgccgnactcagtttacattgntgnaatttaaaggcatntatntagccgccgttgctcctctctgtaataccccaagactggtaaatntataaccnctgcattnattttagtgattnaaaacatgataacatattgtgtaactgcaaaccacagaacccctgccaactttttttttttt

SEQ ID NO: 2141 - DNA, 415 bp, Homo sapiens
  misc_feature 215: n = A,T,C or G
ccgcggtggcggccgcccgggcaggtacaaaggaagtggctcacatcatagggtaagaaaaagcaatgttatgcaaagaacaaaataaagaacattccaagaaaagggaacagccagtgtgaaaacccagaggcagaaaaaacttaggtgtgataaaaaaaaaaaatgtaagagaagctggtttacccggaatatcctgagcttgagtgaagtanaaatacaaaagtttggcaaggctggcaggattaaaaacatgaagattttggaggaagactttgttagaaactggaatttatgctaagaacaatggcagtaagccaccaaacatttttttgccaagaaaacatgttctgaattgacagttccaaaacatgactgtcctatggagaatgaattgaaaagatgaaattataga

SEQ ID NO: 2142 - DNA, 489 bp, Homo sapiens
  misc_feature 434, 461: n = A,T,C or G
actacttagggcgaattggagctccccgcggtggcggccgaggtactcagctgaaaacactgtttcagccccctctctggtgacctcagccttctccaggtgtatctcttgatgatcttggagaccagcagccacagctgctgctactcctgcaggagactgtcaggctgtggtggggggcaggggtgttggaggagaagttgaaaatccgtgtgttctctgcccctctgctcctccatcttagcttctggaggagttaaggcaccaagggcaccaagtcaggttggcagttttgttgcccttgcccaagcctccagcaaaactagctggtcccctgctttgctgggtcccagccaggtgtgattttggttgttgattagtaaccacacattgtttttccccacctttttcattagtggaggtttttgttttgntttgtttttggttgtttgagacagaantctcacgctctttttaaactggagtgca

SEQ ID NO: 2143 - DNA, 375 bp, Homo sapiens
  misc_feature 54, 58, 119, 151, 159: n = A,T,C or G
ccgcggtggcggccgaggtacagaacaaaatgaaaagtctcccatgtctacctntttntacacagacatggcaaccatccgatttctcaatcttttccccatctctttaaaaaaaaaangggaatgacaataattatatctgcctcatagngttattgngaggattggttaatacaggtaaaggatttagaaaggggcctggcatatagtaagcagtaattttattaatgcatttaccttaagccctgtcccaacactccttttttaatatgaaaatactcaggccagcactatggctcacacctgtaatcctaatactttgggaggccgaggcaggaggagtgcttgaggccgggagtttgagaccagtctggg

SEQ ID NO: 2144 - DNA, 517 bp, Homo sapiens
cactacttagggcgaattggagctccccgcggtggcggccgaggtacgcgggccaaatcatgtattttccatccagaggttcccaaccttggctgcacattagatttattctaaggagcttttaaaaaataccaatgactgggtcccagcctagagtgattaaatcagaatctctggaggtagacttgagaatctgatgtttgcaagtttcctaggcaagtcaaggctgaggaagactgctgcaggccattgtaagagccaggcgttgatctcattcaacctttccctcagctcttctagagacagccagcattctcttatggcacaaatacagcctttcaccctcacagaaagacacaggacaacaaattcaataaattaattcactggcatggatgattttctcagactaattgtttccagtttgataggagacaattaaaggctggaaggcactggatgcctgatgattgaagtggactttcaaactggggcactactgaaacgatgggatggc

SEQ ID NO: 2145 - DNA, 499 bp, Homo sapiens
  misc_feature 5: n = A,T,C or G
gactnctatagggcgaattggagctccccgcggtggcggccgcccgggcaggtacacaaggattcattatctgtattaatttttctacttttctatgtttatggaaattaccttcaaaatgtaaaatatatgtttggaaacataaaaatatattccaaaatagctcatgaattaaatgtaagtcaccatagaaattacacgttttttggaatagaacagtcatgaattatactatttcaaaacatgtgggatgcaggtaaagcaggacttaagggtaagtttattgacttaagtcttccaaaaaaagatgtaaatgaattaagttcaattcaaaagttagaaaatgaaacacagaaaagctggagggaaaaagaacagaaaaaatagaaataagttaataatgcagtcatcttttattaacaggtagctgagaagattggattgaactaaggcattattctgagggaggttggtctgtaatattcctctctttaatatc

SEQ ID NO: 2146 - DNA, 347 bp, Homo sapiens
ccgggcaggtactattactaggttcattgtttccagaggggtgaaacggggctttggagaggttaaataacttgcccagggtcacacagctattaagtggtaaagctgggatttacatgagcccagacaaagaacccaagaagctaagctattctcttgtaatacctccaacataggaggcaagaagtgaggtattatacaggttgaggagataaaggggagagaggcctgcagtgctaacaggaggagctgggattcatcctggcttgttctgataggtcagttagtcttagagatacccatgaggtcacctactcaaaatggggctcagagtagccttgtcccat

SEQ ID NO: 2147 - DNA, 365 bp, Homo sapiens
aggtacctttcattggattgtccatggtgcatcgctttagcaagcggcgtgactctccgctgcccgtcatcttggccaatatctatctgctggttcctcctgtgctcaacccaattgtctatggagtgaagacaaaggagattcgacagcgcatccttcgacttttccatgtggccacacacgcttcagagccctaggtgtcagtgatcaaacttcttttccattcagagtcctctgattcagattttaatgttaacattttggaagacagtattcagaaaaaaaatttccttaataaaaatacaactcagatccttcaaatatgaaactggttggggaatctccattttttcaatattattttc

SEQ ID NO: 2148 - DNA, 359 bp, Homo sapiens
aggtacgcggggacattaatgcagagtccctctgtgaatttacaacacccaacacccatgagttcagtccttaagaaggaaaattgagcaagtatttaattggttggacattgcataaaagaggtccatatccaggctaactctagaaattttattctcaaacttagttggcctcttttttttctgtcagaggaccattcttagtggcactggggaaatcttggcacccagaagaattcaactgcgctcactgcaaaaatacaatggcctacattggatttgtagaggagaaaggagccctgtattgtgagctgtgctatgagaaattctttgcccctgaatgtggtcgatgccaaagg

SEQ ID NO: 2149 - DNA, 347 bp, Homo sapiens
gccggcaggtacacattttcctgatgtaggaaatagtaaaatttcagagcctatggcattggctttcaccacctatgcaattttctacacatctgaaaattaccagtttatctaactccttaaatgttcctctcttcaacaacaaaaaacacaaacaaaaattgctggaagaaacaggaagcatccaggtccaaatgacagcataacagactatgaagaaacagggcttaagtgcccatctagaacaagatggtctagattacaataaggaccccatgggacagaacatcaaaacattcaactttcaagtaaatgtcttggaagtaaacatttaaaatttataggac

SEQ ID NO: 2150 - DNA, 358 bp, Homo sapiens
aggtacaatcagaatgctgcattctccagccataaagatcgctccctcttcttttcaaacatccctgtccctcaaggcctagctcaagacggtcaccttaagaaaagctccttttgtcgagcagtgactccataccaggccctgctttaaacgctttatctgcattatcttacttgattctcgcaatagccctgggtggtaggtgcaattattatctccagtttataaaagaagatactgagggtcagagaagttaagtgaccggctcaaggtgtcacattcagtaagcgttgaaggggtctgtgttggtctgtccttgaagatgccccctacgactacactttcaatgatttctgcc

SEQ ID NO: 2151 - DNA, 361 bp, Homo sapiens
aggtacgaaaaaatcaggctactaagcccactgttaatatagacgcagaccaattgttaggaacaggtccaaattggagcaccattaaccaacaatcagtgatgcagaatgaggctattgaacaagtaagggctatttgcctcagggcctggggaaaaattcaggacccaggaacagctttccctattaattcaattagacaaggctctaaagagccatatcctgactttgtggcaagattacaagatgctgctcaaaagtctattacagatgacaatgcccgaaaagttattgtagaattaatggcctatgaaaatgcaaatccagaatgtcagtcggccataaagccattaaaaggaaa

SEQ ID NO: 2152 - DNA, 353 bp, Homo sapiens
ccgggcaggacgcgggtcagttaaaaattatttgaatttttccaaacaatcagctgggcaaaaaatattatgtctgaatgtattaaaaatagacaaaacattttttgttaattaattacattgaaagttttagtcagctttattccaaaactggtatttgttacttcttaagtcagttttggtaatttctgatttcttagaaattggtgtatttctgaacatttataatttagtagcataaaattgtttgttttgaatctcttgtttctcacttctatatttaaatataaatatatatctacatatacatacacacacagacccttaatgggtttgccaatgatttatcatcc

SEQ ID NO: 2153 - DNA, 361 bp, Homo sapiens
aggtacgcgggaaccacatatatgtataaattcaccgttactttttagcaatactataaaatccaacagaaaaaaatagcatttactattaaaaaaagaattagtctttgtgggtttggggcaaacaactgcccttctcagttaggatgggggagttctggacatttctagctaaagcccaggggtcaagggaatgataaactcctcggtcttgagcattgagagaaattctaccagctcgccctcagtagaagggtctatagtcctgcccctcacccgcctggcagggagagctgcctttctctcctgccatccccctatatccacggctttctctcagaggagctgctgagtgcatttt

SEQ ID NO: 2154 - DNA, 270 bp, Homo sapiens
  misc_feature 122, 164: n = A,T,C or G
ccgcggtggcggccgaggtactactcgattgtcaacgtcaaggagtcgcaggtcgcctggttctaggaataatggggggggggaaaggcagaggtgaatatggaagagacagttgccctcancttggtccaggaaaaaatgctgtgtgatatgatgattcagancatgggcctgaggccaggctcatattggtgtgaatcctagctctgcctctcatttggtgggaagtttacctctccatatcttatatttcttagctctaaaatggaa

SEQ ID NO: 2155 - DNA, 355 bp, Homo sapiens
ccgggcaggtactaccgcattgcttgaacagctggaagagacaacgagagaaggagaaaggagggagcaggtgttgaaagccttatctgaagagaaagacgtattgaaacaacagttgtctgctgcaacctcacgaattgctgaacttgaaagcaaaaccaatacactccgtttatcacagactgtggctccaaactgcttcaactcatcaataaataatattcatgaaatggaaatacagctgaaagatgctctggagaaaaatcagcagtggctcgtgtatgatcagcagcgggaagtctatgtaaaaggacttttagcaaagatctttgagttggaaaagaaaacggaaaca

SEQ ID NO: 2156 - DNA, 352 bp, Homo sapiens
aggtactgacatgacacttaaagaaaatgctcattgaaccagcattttaggtttcagatttttggatttggaatataacttatacttctggcttacttgtttcttaaggtcatccctttaatgaccttgaaaattagaagaagcaaaattacttttcttatggttagccttctacgctgtgcctcagctctaaatagacattaacaagtagaacatagagatttctggggcttgtagatgtaggaagtattgatataagatgtcgagaaagttctgaatggagcctgttaccaggaggctagaaaaaaatccttccctctaagtaactgctataatgttttgcagaggcaat

SEQ ID NO: 2157 - DNA, 361 bp, Homo sapiens
aggtacttttttttttttttttttaaatttccaccggtgccgaggcctcagtggagcctggctggcggcttgttagagcctgcagcctacctgtcctgcataggaatgaagccgggaggagttacatgatatgccctagttgcaggccggggacacagctaccgcattcagagaccaggaaacagagcaaaagctgttctcagagtgcggctgagcgaggagctacaggggaatggagggggccaagctgcatggaagattgtcccattaacctggctttttaccagggtggtcctctccctaacccctaagaatcacaccctgcatccaaacggcagcaaccccagaaaacgggctaaga

SEQ ID NO: 2158 - DNA, 360 bp, Homo sapiens
ccgggcaggtacttttttctttctttctttttttttttttttttggggggttatgtgaattatatctcaacaaagttgttaaaaagaatcctttctatgtgagcattaacttttgttttttgttttgagacagtgcccaggctggtgtgcaatggcgtgatctcagttcattgcaacctctgggcaaaagagggaaactgtctctaaataagtaaataaaataaaataaaataaaaatttcttaaccctaggtgtgactttcttcaggcctagggtcagtgatagtaatagaatggctacattaagatttttccattttagacaatacattcaggtattcatagatccaaggcaaaaata

SEQ ID NO: 2159 - DNA, 359 bp, Homo sapiens
ccgggcaggaccaaggcccaatcaccccaaacagtgacaggaacataatttcctgttgggaccagttctcggaattttgcaccaacatgatcccatagttccacatctaacgtttccttttcaggaaaccaaggacagtgttcttccactgccctgaatagggtgaccatattttccatgggaacccgaactcccccattttaacaggaatttaatatagcagagataagcataatgtttagactctgcgtgacccatagttaccccggacaatacacagacaactcaccaatcgtcggggagccgaacaagcatttctgtggactggaccgatgaacatttctccgcacctaccaaag

SEQ ID NO: 2160 - DNA, 345 bp, Homo sapiens
  misc_feature 64: n = A,T,C or G
ccgggcaggtactgtcgggacacctttgaccacccgactctcatagaaaacgagagtatatgcngatgagtttgcgccaaatcttaaaggcagaccacgcaaaaagaaaccatgcccacaaagaagagatcattcagtggtgttaaggattccaacaacaattccgatggcaaagccgttgccaaggtgaaatgtgaggccaggtcagccttgaccaagccgaagaataaccataactgtaaaaaagtctcaaatgaagaaaaaccaaaggttgccattggtgaagagtgcagggcagatggacaagccttcttggtggcactttataaatacatgaaagaaagg

SEQ ID NO: 2161 - DNA, 340 bp, Homo sapiens
  misc_feature 62, 81, 112, 119, 258, 304, 312, 320: n = A,T,C or G
ccggccaggtacttgattgttctgaaattccttatgcatgattagagaaagagtaaatgacngtattttaggattgtgttnaacaaaagtgagatgctaattcttgaaaatnaggcctntctatggggactgcacgtaatcacattaccctagatcttgagttagcgagagaatattcactgacaggtgattcactgaccttgcctataacttgaaaccaatagcaaatccagatgtagtttcactggcctttgaagnccagggcaaaaagacaaagcgtgactccctgtctccccattgcatnctgattgnctccctgnccagggacagaataaatatc

SEQ ID NO: 2162 - DNA, 354 bp, Homo sapiens
ccgggcaggtacaatgcagttctaactagcttccttaaatagctaatattaaatgtcgctcatcaactttcacaaaaagtgtttttgggagactctaaaatgcaccatcttaccttaaggatgttttaggagaagctccactacacaaggcagcaaaagttggaagcctggagtgcctaagcctgcttgtagccagtgatgcccaaattgagtgagtatgaaaacagtggcttcacattttatgttttcttggattaaactaatcagactcctgaagcttagttacatgtgcttttaaaaataatgcttgcgtaattgataatttagtgttaatcatttaaatgttaacttagg

SEQ ID NO: 2163 - DNA, 345 bp, Homo sapiens
aggtacctgtcagtgttcaatatttaacaaactccagttaaacaggtaagaggtcagcagtagcttataggccttggttctattatccatgtgcccaactgcagccatcgtgggctggtgttaaaattttcctttcaattgtcatttttctaataattgcaatcagtgagaggagaagaaaaagttcaagggaatgacctgacctttcaccatcctacacaggagatgactgatgacatggattcatacactaatgtatatcgtatattctccaaagaccctcaaaaatcgcaagaagttttgaaaaattctgagatcataaactggaaacagaaactccaaatc

SEQ ID NO: 2164 - DNA, 351 bp, Homo sapiens
  misc_feature 341: n = A,T,C or G
aggtaccccagaacttaaagtataattttaaaagaacaaattttcttttaattaagcttttatcatagaacttgtaaagaaaatcgttttcagtctcttactaccacatcatagctgggacaaactgctgatattttaaaagcaacacaaatatcaaacagaaagaactagacttaggaaccaaactcaggtttctgtagtgaacagggcagaatcttaacattcggtccccaccattactccttcagtttggcctttgctagcaaaagatggccttgttatgtagatgagaccacttatataaaaaaaagttttaaaaaatttccaactggattttctgngttttttttt

SEQ ID NO: 2165 - DNA, 350 bp, Homo sapiens
ccgggcaggtacttgattgttctgaaattccttatgcatgattagagaaagagtaaatgacgtattttaggattgtgtttaacaaaagtgagatgctaattcttgaaaattaggcctctctatggggactgcacgtaatcacattaccctagatcttgagttagcgagagaatattcactgtcaggtgattcactgaccttgcctataacttgaaaccaatagcaaatccagatgtagtttcactggcctttgaagtccagggcaaaaagacaaagcgtgactccctgtctccccattgcatcctgattgtctccctgtccagggacagaataaatatcctcaagacatt

SEQ ID NO: 2166 - DNA, 338 bp, Homo sapiens
ccgggcaggtacgcgggggagccaaatgcagtgcttgcttcctatctgtggtccattgcatagcagtgtgcttgggtgctgcgtaagacaattccccccaacgcctccaaaaaataggacatggtccactgcaggagttcataatctaggagtccagagagtccaggctcatcatcccttcagaagaaagaatcttcaggcccctgctcttgtgagagtaatttctcttaacaccgacagtgcagcaatacaactaccaccacctttcaattattgagaggcaatcatctaaagcatttggcaagtgatccacttacggagccaagctaagggagctg

SEQ ID NO: 2167 - DNA, 331 bp, Homo sapiens
  misc_feature 68, 304: n = A,T,C or G
ccgggcaggtacgcggggagaaaaagggtggggagtgccctttcttgaaggaatcccttaagtgcacngtctcccgttttcttttcacatcaatgcagagtccctctgtgaatttacaacacccaacacccatgagttcagtccttaagaaggaaaattgagcaagtatttaattggttggacattgcataaaagaggtccatatccaggctaactctagaaattttattctcaaacttagttggcctctttttttctgtcagaggaccattcttagtggcactggggaaatcttggcacccanaagaattcaactgcgctcactgcaaaa

SEQ ID NO: 2168 - DNA, 327 bp, Homo sapiens
aggtactcttaaaaatctgttaagagagtggatctcattttaagggttcttaccacaataaaattaaatttttgaaataaatcagtcatatttgagtgaaatgaaacctttccgagtagtttcagacaattgataatacctagtttacagttcctgtagtcattttggagggtgaggacttgatgtgtttagtaaagttgagaaataaatacatgaaagaatgtgtggggaagagaaattgtggggaagagaaattgtctcagaggaccattcttagtggcactggggaaatcttggcacccagaagaattcaactgcgctcactgc

SEQ ID NO: 2169 - DNA, 325 bp, Homo sapiens
aggtactcactctcaagtttacgttaaatactatcccatacaaaaaccactctttctcttgttttcattatttatatgttgtcttgtttaaaggaagaacacaaaaatgccctgctaaagggattctgtttggctgcaggcagcaagagggaaaaacacagagcatattttgcagaaaatgatttattagaagtcagaactatgacacgaagccaagcagggcactctaggactgaatttgctgtgctgccttcatacgctccttgctctttcttttctggtagctgtgactcacacagctcatggagagtatcattccctaaga

SEQ ID NO: 2170 - DNA, 327 bp, Homo sapiens
ccgggcaggtactaggggttaagatgtcaacatatggatttaggggggacacaattcagcccatgacagaaggtggcagagtatacctaaggcaggaggtagaaggagggcaaggagggcctctctgagatgacaatgagctgagatctgaatgaaaagagggagctagccacgcaaatgtctaggagagcattccaggcacaggaacaacaggtgctcaccccgaggtgaggacatggctcaggactacttggcatactccatcttcaacgatagtaagaatgggatgggatgatgggaaaaagggagatgttagtcaaaatgtac

SEQ ID NO: 2171 - DNA, 331 bp, Homo sapiens
aggtacctgcctataggccatatcatacttgacagcaagaagtatcttcatggctaagtaacttcattgtggggcaaatgaaaataggaggactccaaaaaagcccttgccattaacaacctatgccattactgctacaaacttttacaacctaggccactgaggaaaacaaagttactgccaacattaaatactgttgataaagctgaacaaagactataccattttcacttatctggaaacagagttactacacccttctcaactagcacactaaggaccaagtgcaggtgaaagcctctatgaaagtgactggtagaaaaatggggaa

SEQ ID NO: 2172 - DNA, 344 bp, Homo sapiens
  misc_feature 239: n = A,T,C or G
ccgggcaggtacacaaagaaaaataaggcagaggaaggggatggtgactgagaggggaaagggtcaagattctctcaggaggtgctacttaaggagagacgagaataaaatgagggtgtgaaccatgaggatattttggggagaaggcagaggaaacaacaagtgcaaagttcccaaggcaggcacacacttgatctgctctaagaacagcaaaaggatggatggagcagggtgagcanaaggtgtggaaagctagatcacctgaggccatgataaggacttcagcattaattctgaggaaggtggagagccccagagggcactagcaaagaagtgacatgttt

SEQ ID NO: 2173 - DNA, 348 bp, Homo sapiens
aggtacgcggggacacacacacacacacagcacctgcacgcagatgcacacatctctagtcaaatgaggctctcagctttttgataggggctttttgatacgtgtataaccaatactttattctcactgtagtcaaggactcattgcaattcagaaatgagaagctgatccggaactccactacagctcaaagaaattctcgaatgttctcacctattaacagttattaaaatggaagaagctggggatgaaattgtgagcaatgccatctcctacgctctatacaaagccttcagcaccagtgagcaagacaaggataactggaatgggcagctgaagcttctgctg

SEQ ID NO: 2174 - DNA, 483 bp, Homo sapiens
ccgggcaggtacgcggggtagaactgaaagtatattctgattcggtgtgtgtataaggaaatatacaccagtatatgcattaaaacgtcaagaagagctgggcacagtgtcacatgcctgtaaacccagctattcaggaggctgaggtgggaggatcggttgaggccaggagtttgaggctgcagtgagctatgattgcacagctgcactccagcctgtgtgacagagactctgtctcaaaaaataattatttgcctcttctctaatttatttcattaatatatttttattgtaaagatttttttacctccttgtttaaatttgttctcagaaattattttaatgctactgtaaataagattgttttcttaataatcagtttgctttaagtgtatggaaccataacttaaacttgtatgttaattttatattttgctaatttactgaatgtatttattaatttaaacaggttttagtgtacct

SEQ ID NO: 2175 - DNA, 332 bp, Homo sapiens
ccgggcaggtaccgactcctcagaaactggcatgccaaatcaaaatgggtctggttcaatcctccctaatggcaatgtaaacccctctaactaatcccacttctcctaattatctttttctccttacgaacctaaaaatctcaccatttctattagcctgaaaataacatccctctgttcttctcttcctccttcagcactggatctcacttacaataggttttatttaataattatcttccttacactttctgtctcaccagtttccccttaaactgatttacctgctacacaaaattattcttattggggcttaatgtgccttttcctcc

SEQ ID NO: 2176 - DNA, 351 bp, Homo sapiens
ccgggcaggtacaatgaggatacaatgtgtagagcacagcatactgaatggcagggaagtgaacagccaggtcactgtgcacaatcatcaaattcttactcagaagtgcaaagacagttggagatagcgcccacatccctattagtgagtttttggcatttccaattgtagtcagggcactgaggtcaaatttaactacaaattttgcattgtctacattgaacacatgattcttaaaagcctcatgttttatttcagaacaggactcaggaagctgcagactgtgcaggaggttgtttagggcacaagtcatttctcccaatattaacttataggcagtctccaaaaaca

SEQ ID NO: 2177 - DNA, 589 bp, Homo sapiens
  misc_feature 559: n = A,T,C or G
ccgggcaggtacgcgggggactctttccagacctttgataaaggggctgctcaaaaaagccacgaccttgggcccctgctaaaaccatggctttaagtaaggagggagcagatatataaaaaccttatccctctttctaatctcttatgtcctgtgagtgtcacccattgagtaaacccaagtggaagtcagcaggaaagtagctgggatgatgcagtctttacagggtctctctgtcacccaggctgaagtgaaatggtgtgatctcggctcactgcaacctctgcctcctgggttcaagtgattctccagcctcagcctcccaaatagataccagtaaagatgtcatctggccaatttgtgtgaaaaaaagagaataattctcatccaaaccgcctgtctctggaaataagaaaagctctgagggtctccaaagttaccagaggaaggctgaattttatggcgattgataatatttccaagcttatgaagaaaaaatatcattagtcttttccatggtagaaaagagtaaagcctgtaacaaaaaaagtgatacagnggatgggatgatgagacccttgaaataagc

SEQ ID NO: 2178 - DNA, 482 bp, Homo sapiens
aggtactttaggcactaactgtcagcatgtggtataaagttagacgttaagagaaattcctgtgctcctagctgcttcatcatacagtgatgaaagcagaaagcacaaacacagggtcaaagtggagaccggaatcacaggtgtgcatcccaacccaccatgactggcaaaccagcagtgggttcaagggcactgctggcctcttcctctcctttcatacaatgaggagcaacagaaacactgagtcagcgctggtcagggccgaggacacagctcatctacccaaccgtgcccaaaatacagttggtatcacaggcaggtgacatcatgcaggggctttttaactcaagtgagcaaacacgaatgagctgcaaataccccaaatggacaaacgcgcttcccagtggccctgtgtgtgtgctggcgtgtgggcaaacacccatacactctggaggtagatgtggggtataggtacctgcccg

SEQ ID NO: 2179 - DNA, 462 bp, Homo sapiens
  misc_feature 2: n = A,T,C or G
tncttagggcgaattggagctccccgcggtggcggccgcccgggcaggtacgattccttagtgtgggagttcctggaactggaggttgttcactttcctcattatccttctttaaaagggagccaaaatctataccagattttaggaactcagtgtaagtccccttctgcaccattttaccctaaaataaaaataaagaatttcagagagatacatgtgcaggtgataatgttaacctaatctaattctaatccagaaaaagtaactgatcttaagttatgattatacttaggtccggaatcctagttgacaaatctaatacaattcaacttgatacacaactgagtgttctgttctcagccagactctgtgttaggtcctgaagaatatttttaaaatggtaatagtgtgttacaaatggcgattattatcaccagatgttggtgaccgtattgggtaggt

SEQ ID NO: 2180 - DNA, 389 bp, Homo sapiens
ccgcggtggcggccgcccgggcaggtacgggggacatcaatgcagagtccctctgtgaatttacaacacccaacacccatgagttcagtccttaagaaggaaaattgagcaagtatttaattggttggacattgcataaaagaggtccatatccaggctaactctagaaattttattctcaaacttagttggcctctttttcttctgtcagaggaccattcttagtggcactggggaaatcttggcacccagaagaattcaactgcgctcactgcaaaaatacaatggcctacattggatttgtagaggagaaaggagccctgtattgtgagctgtgctatgagaaattctttgcccctgaatgtggtccgatgccaaagggaagatcc

SEQ ID NO: 2181 - DNA, 422 bp, Homo sapiens
  misc_feature 57: n = A,T,C or G
attggagctccccgcggtggcggccgaggtacaattttactgcaatttcctttgaantttcttgccactgtttggaatcttaaaaattcattagccttctcctctctgacataaagctactcttcatcagagatgagttcctatgcatgtcctttgttccttcaatagctaattaatgtgcttgaggatacttcagtggaaaaaaaggtttaaatatgcaaattactaataaatgtgtaaccttatgtaacttgtgttacatcaagtaacaagctaatctagtttgtttcactggactaggcttgtgctccctacttcagtattttgatgctttccttgatctttgtttcacaaaatgttgtgaattttggtatcattcaaaacaaatgacatttattaggtttcattttgaaaccgatgta

SEQ ID NO: 2182 - DNA, 385 bp, Homo sapiens
  misc_feature 81: n = A,T,C or G
tacgactacttagggcgaattggagctccccgcggtggcggccgaggtacgttgaaatattaggggcaggttcccccaatntctggcgcccaacgtgattttctttttcctaagtgcatgtgggaacccgattccctttggtaggtgcggagaaatgttcatcggcccaagtccacagaaatgcttgtttggctccccaacgattggtgagttgtctgtgtattctccggggtaactatgggtcacgcagagtctaaacattatgcttatctctgctatattaaattcctgttaaaatggggggagttcgggttcccatgggaaaatatggtcaccctattcagggcagtggaagaacactgtccttggtttcctgaaaagggaa

SEQ ID NO: 2183 - DNA, 337 bp, Homo sapiens
ccgcggtggcggccgcccgggcaggtaccacttgttctaccccctgtgaagagctgaatactcgttcatggctttcatccaaaatcaaattaatggtctggtcaaaacctttcagtgttcccacaatcattctcccatctgatgtaataacggcaacagttcctgataactgaatcaaagaaagtgttccttagggaatgcaaattgaaaacagactctggcaagggaatgatttgaatttttagaataaatatgacaactaggtataagtattcaacacagccactaagttcactacataaaaacgttaaaagtttcttcgacgccaaggcaggag

SEQ ID NO: 2184 - DNA, 362 bp, Homo sapiens
ctacttagggcgaattggagctccccgcggtggcggccgcccgggcaggtacttttttttttttttttttttttgcccctggtaaaagtcagaacctgggatgaccagaaagtaacaggacagatttctcccagcaaatcagtctccacaaccaaatgaatattgttctccaaggagtcaagctatagactcacaatgacaacgtggccatggctcaaaacactctctgaaattacaaaattgctttctgagccaatttaaaagtcacatgattgaatccaagctattttactttaaatggtccttttgctttgcacctgagacctcgcttggccacagacgtcattcgctggactccctgg

SEQ ID NO: 2185 - DNA, 581 bp, Homo sapiens
  misc_feature 26, 267, 269, 278, 328, 335, 342, 360, 362, 370, 373, 378,380, 382, 387, 388, 399, 405, 408, 413, 414, 416, 428, 429,430, 434, 458, 474, 475, 483, 484, 493, 496, 497, 508, 509,510, 539, 540, 546, 551, 564, 576: n = A,T,C or G
cactacttagggcgaattggagctcnccgcggtggcggccgcccgggcaggtacgcgggtaatgacagtgcccttttgggtcagtaatgtggcttttcctctcttctctcggctcctcacctcaccctacccaccccctctctcgacgctcagtgctcgccaaacccggagtcatcagtgtgatgggaacctaagcgtgggtggccaacatcatatacctcttgaagaagaaggagtcagccatcgccaacttgtttttggtagaancnttccggttntaaaaatcccttggacctgggattaattttaaggcttttgatttacaccnccaaccncggggangggaaaaattcctggttngnatgaaccnaanaaaanantnggggnnttaaaaaattntttttnggnccccnntnttttttttttannnttcnccccccccccccaaaaaaaaaaanaattttttttttttannaaaaaaannggaggctgntgnnggttttttttnnnccccccccccccgggggggccaaaaattnncaaacnaaaangggggggggcccntttttttttaanaaaaa

SEQ ID NO: 2186 - DNA, 453 bp, Homo sapiens
gcggcggcggccgaggtaccccagccgggcgcacgatgtcgtgtaagcagggtatccttgtgccagcatttgcttctctgtgaaaacacagcgccgtcaacattttgcactttccagggcccttcggaattggaagtgcctgtagctaagctgtttcccctggagagtccagctgttctcctgatccggccctgcacacacacacccagccacaaattactaggatgtcaaacccaggtgatcaggatactctcatggactgccctgctcccccagggctctccctacagtgtaatcctaaagccaaacttcctttcagcagtggctgaagcaaactctgcagtcaagagggtcatacccagcaggcttcaccatgcagacttgaatgttgatttgagggcctagctgctcagcacagggcatttggggaagacaatgtgtacctgcccggcg

SEQ ID NO: 2187 - DNA, 300 bp, Homo sapiens
  misc_feature 2, 79: n = A,T,C or G
tntatagggcgaattggagctccccgcggtggcggccgcccgggcaggtaccttagtcttgaggacttatcagcctganggctctcatgaccagcacgcagttatgcagagctcagcactcagatcagagccacctctaggaaccacatggctgagagcagacacagacaggctccgcagcccctgacacagtcccatggctgggtttacttaagacaacagctacacacagaacgatgtcaagccccattctcccatgtttttcttacctaaggtaatgatggcatgtgctctaatcac

SEQ ID NO: 2188 - DNA, 262 bp, Homo sapiens
  misc_feature 25: n = A,T,C or G
ctactatagggcgaattggagctcnccgcggtggcggccgaggtacataccataggttaagtagggcgcctgatattaggaagatcaataattcatctaagtgctgtatgaaacagcatctacaaaagttgctttattcaacaaactttgagggaaccgtggtacatcaccctgctgagggacatccaggacaaggtcaccacactctacaaaggcagtcaactacatgacacattccgcttctgcctggtcaccaacttga

SEQ ID NO: 2189 - DNA, 413 bp, Homo sapiens
  misc_feature 1, 47, 61, 73, 74: n = A,T,C or G
nactcctatagggcgtttggagctccccgcggtggcggccgaggtantctccaaagccctnaggctggaatgnntaagttgcccgaacgggaaagatggcggcctgccccatcttttctctcagagttttatcttgtttcatggaacttaatttttagcctgttgattttactgtctacattagacttgttgagaaagattctgtaatcttttaggttagacaaatgagaattcattgtcttctgtaaataaacctgttcatgtcttgttctctggaaagaagtctctttcagctctctgactttggtcacaatcatgtagagcagtagccagtctacaatgatgtaattgaatttccatttccagtgtttcgtcgttgtgtcttacattgtccagttcagaactgagcattt

SEQ ID NO: 2190 - DNA, 466 bp, Homo sapiens
ccgcggtggcggccgaggtacaaagtccctgaggcaaaagcatgcttgctgtgttctaggaaaagcaaggaagacagcatgtctatagcagtgggaggtggaaggataataaacagtaggtgaggttagaggggaccaaatcatgtattttctcagaggttcccaaccttggctgcacattggatttattctaaggagcttttaaaaaataccaatgactgggtcccagcctagagtgattaaatcagaatctctggaggtagacttgagaatctgatgtttgcaagtttcctaggcaagtcaaggctgaggaagactgctgcaggccattgtaagagccaggcgttgatctcattcaacctttccctcagctcttctagagacagccagcattctcttatggcacaaatacagcctttcaccctcacagaaagacacaggacaacaaattcaataaattaattca

SEQ ID NO: 2191 - DNA, 727 bp, Homo sapiens
  misc_feature 24, 25, 46, 57, 397, 431, 463, 490, 501, 517, 601, 607, 614,619, 632, 636, 644, 661, 682, 723: n = A,T,C or G
gcccgaggtacttggatcaaattnntactttaattggtcagggttngattatgaatnttaactttgtgtggaaatgacccagataaaatcactgttcctttcaacaagcaacaggttagacaagcctttatcaattctggtgcatggcagatgtcttgccgattttgtgggaattattgacaatcgttaccccaaaacaaaaatcttccagtttttaaaattgactacttggattttacctaaagttaccaaacataagcctttaaaaaatgctctggcagtgtttactgatggttccagcaatggaaaagtggcttacaccgggccaaaagaatgagtcatcaaaactcaagtatcacttgactcaaagagcagagttggttgccgtcattacagnggtaacaagaatttaatcagtctattaacattgnatcagaatctgcatatggaggtacaggctccnaaaggatattgagaggagccctaaacnaaaacaatatnggatggacaggtaaancccctggttaaattggtacaaccaaaatggtaagaaaaaagaaaattcccaatttaatattacccaaaattcggcccccccctnaattanccagggnccttnacctaaagcaaanggancagccggncttggtaaggaacaatnggcattaagggaagcccaaanaacttcatgccctggcctcaagggaaaagccaaaagggatnaaaa

SEQ ID NO: 2192 - DNA, 320 bp, Homo sapiens
  misc_feature 20, 35, 36, 38, 46, 48, 55, 58, 60, 90, 158, 159, 169, 171,172, 208, 224, 279, 289: n = A,T,C or G
gaggactcggatcaaatttntcattaatagggacnngntttgactncnaattttnacntngtgcggaaatgacccagataaaatcactgntcctttcaacaagcaacaggttagacaagcctttatcaattctgggcatggcagacgtcttgccgatnntgcgggaaananngacaatcgctaccccaaaacaaaaatcttccagttnttaaaattgactactnggattttacctaaagttaccaaacataagcctttaaaaaatgctctggcagtgtntactgatggntccagcaatggaaaagtggcttacaccgggc

SEQ ID NO: 2193 - DNA, 550 bp, Homo sapiens
  misc_feature 159, 533, 546: n = A,T,C or G
ccgcggtggcggccgaggacctttcattggattgtccatggtgcatcgctttagcaagcggcgtgactctccactgcccgtcatcttggccaatatctatctgctggttcctcctgtgctcaacccaattgtctatggagtgaagacaaaggagattcnagcgcatccttcgacttttccatgtggccacacacgcttcagagccctaggtgtcagtgatcaaacttcttttccattcagagtcctctgattcagattttaatgttaacattttggaagacagtattcagaaaaaaaatttccttaataaaaatacaactcagatccttcaaatatgaaactggttggggaatctccattttttcaatattattttcttctttggtttcttgctacatataattattaataccctgactaggttgtggttggagggttattacttttcattttaccatgcagtccaaatctaaactgcttctactggtgggttacagcattctgagatagaatggtacctgccgggcgggcgntctagaactaggnggat

SEQ ID NO: 2194 - DNA, 403 bp, Homo sapiens
  misc_feature 4, 7, 15, 78, 80, 91, 391: n = A,T,C or G
actnccnggcgaatnggattttaccgcggtgcccggcccgcccggcaggtactgttttatgggcgcagtgggtgacantntggccacatantttttcaaaagccatggccagcagcactgtggattccatgccagataaggagtggatggcaaacatctgtagcagacaagcatcaaactggatggaggaattgaaccagaagatggccagcattttgggcatggatgaggtggagatgaggatgtcaatgcctgaaagcatgcaaagaaatatatacatgggctcatgcaggctgtgctcagtccgcacaatgtagatgattgtcaagttacctagcacagcaataaggtagagggagcacaatgggaaggccaaccagaactgagcctnttctaaaccagg

SEQ ID NO: 2195 - DNA, 601 bp, Homo sapiens
  misc_feature 3, 53, 83, 359, 367, 486, 529, 542, 546, 558, 573, 580, 589: n = A,T,C or G
ccnggcgaattggattttcaccgcggtgccggccgccggcaggtacttttttnccacaagatccaccatcttttgtatgtgantttattaacccttttgaagactgctgctaaccagaggaaggtaaccattcctccttatataaacacatatggctttggcagtctggaaattgctgttaccaagggttaaccatcaaaatcctcacttgctggccctccctccaccctctctttgcctgcagcaaggcagggaagagataggtggtaggggagggagaacaagactgtttagacccacaggccctttttaatggagattaagtgaccagattggtccttctccagttctctatttgntctatggnctcatttcttcctctcattatttttgggttcacaacgggaaacgttgatttcttggtgcaaggctggtttttgaaaattcgacacttactatccaatttttttgcgacgtcagcacctngggcttaagggggaggggggaaaaatttggaggaaaaaaaatnaaacaacccaccngganccaaaacttaantatttaaggggcccnaatggancaaaaaggnttttaaaaaaaa

SEQ ID NO: 2196 - DNA, 364 bp, Homo sapiens
  misc_feature 64: n = A,T,C or G
cggtggcggccgaggtacttttttttttttttttttttttttgaacctcaagggtatggtgttnaagaatagaggtagcagtttggtgccactgccttgatttgtgctaaggcacaagcaggttcacaaaccattgcttttgcaccacaagcagaatttcaaaatgataaaaaggcaaataatggcttagtatgaaaatagttttgacctcttgaaagaatcacctatctctaggatgtcatctttggcctgggtaaccataacaattttctaactactctccctgcattcacccttgcatccaaatccttccctatactgttttctggccgatttttctgggattcattacttgttatttaaa

SEQ ID NO: 2197 - DNA, 639 bp, Homo sapiens
  misc_feature 12, 27, 32, 35, 40, 45, 48, 49, 51, 133, 142, 158, 192, 193,213, 234, 249, 306, 312, 326, 335, 346, 360, 406, 428, 431,434, 441, 463, 481, 483, 484, 495, 505, 516, 517, 531, 537,539, 546, 547, 555, 568, 598, 599, 602, 608, 612: n = A,T,C or G
ggtggcggccgnccgggcaggtacttntattnttnttttntcttnttnnangggagattatttttttattgacgtgttaaaaaaaaatgctggtctgtcagtgaggcatgggtttgtaggggtagcacagaanctttcatcnttcatactgattactntgaatctggctctgtcccccacccagaacattanntaaaactgaaagaaactcantcagagcctgggatgatgaanatgatgatgagaatntcaatcctttctctctatgtccatggagaatttagcaacttccatcgtggaaaaacngaaccntttcattacttttnctaaggggnagacacagttnacaagatttattancacaagaggaaattttttgtaatgtttagagctgaaaggaacctantagaggattatgaggcagcccnctncantttacanaataagggaaactgagcccttnaaaaatggaatgaccttngnnaaagcccattnttgacagganggaagaaagcnnaatttcccctagtnccaagngntaattcnncccctctngttggcctctttngatttcagagccccccctggccacccaggnnttnttaacnccanccaagaaagggggtccttttttttttt

SEQ ID NO: 2198 - DNA, 712 bp, Homo sapiens
  misc_feature 9, 45, 78, 175, 489, 518, 587, 655, 674, 676, 702, 703, 705: n = A,T,C or G
tagggcganttggagctccccgcggtggcggccgaggtacaaganttcgagcacaattgggtcagattaacagaaganttttccagcgccaattttctgggaggtggtccaaaggaagtcagtggggccagctctctccctcagacagctaacaggagcaaggcttggtcagctnctgaagctctgcaagtccaaggcttctgagctatttattctatacttactttgaaaacacaaaattgctccaacaggatggatatgttacggaacaattaggcataataggatgtgcatttctgtctactgagaaacaccaggtagaaaactgcaccaagctgaattgagcttcgtggtaatacacaaaaaatgcacacagctcagctcaacaagtgcactgagtcacaccaaacacatttgatgttacaactttccatccaattccagataaccttcctcccactgcttctcaactgctcaaaagcctaactnttcaaacccattttcacaaggtaatttgnagactttttcaaataaaatgcccaatttaccatagtaggtatgtatttcttaaccatttaacatttatnaaactatatcaattttattcaggtccttttttcaaaagggtcactggcaaaggtttaaaaaattgggnccttaaccaaatttcccgngngaccgggggttaattgggcagtttgnntnaaggggg

SEQ ID NO: 2199 - DNA, 678 bp, Homo sapiens
  misc_feature 396, 437, 464, 482, 486, 494, 511, 515, 533, 565, 585, 591,603, 609, 622, 624, 639, 644, 662: n = A,T,C or G
ccgcggtggcggccgcccgggcaggtacgcggggactctgatgagggctcagacttgataacgcccgtggtgccccatccctataggagctggtgagattgcagcctgctgccccccctccatcagccacagctattggatttcccacccagaattttaggtaaatgaggtaagtcctgatttttaaaacttcttttgaatctggaatccaaacacctgagtggaaagagaagcctgctttaaactggacagatgaaactagaacagactcttggagacggctggcaggaagtgaagctcaccttacctgggcttacctcactgggtcaaatcagaattttattttggagggcgggttggctaccttggatattatctgtgaatttcctgcattgnctggacttctaatctctgtgaattaaaagccccctcgtttncctatgcctgggtggcaaaacccattnccctgggttggaattttntggnacaaaaangcagctagagatagggnggtnttgatataacttaaaaanaagaagtgggttggcttaagtaacctggttanggcttaaaagtaccctcggnccgttntaagaactaagngggatncccccgggcttgnanggaaattccaatttnaagcntaatcgatacccgccganccttgagggggggggc

SEQ ID NO: 2200 - DNA, 486 bp, Homo sapiens
  misc_feature 20, 22, 27, 43, 55, 60, 63, 80, 81, 458: n = A,T,C or G
tggcggccgaggtacacgcntntcttnaccagtctccatgttncagaagactttnttggnttncaggttgcagccttggnnggggtcaatccagtacacaaaagagagaagagccccaagatctcagtgttgaggcagtctgatgcttacagtcaggatgataaggaagaaacaccaaaaaaacagaaggaacagtttggagatgcgggaataaaaccacgagagcgcagggtcctggaagccacctgctggagggttttccaggtggagggagctattggctgagtcagggagaggagccctgagcattggccatgggagttagtaatgcaaaaccattggtgctaatgagagggtagtgctgtggagtcaagtggaataaggtaatagagaatgaaaggagagagaatggagacccgtgggcagacattcacaactctttcatggtatctgactgnaaaagaaagggaaaaaaaaaaaaaaaaa

SEQ ID NO: 2201 - DNA, 579 bp, Homo sapiens
  misc_feature 21, 55, 56, 59, 60, 88, 91, 96, 253, 262, 343, 363, 366,413, 435, 458, 464, 496, 507, 513, 523, 548, 564, 579: n = A,T,C or G
cgaattggatttcaccgcggnggcggccgcccgggcaggtacttttttttttttnnaannccccttttcggtttatttttttgccccnctncctcngccttgccctaaatgttggcatgtcccatgcaatggtcttgagccctcctcattctcttatccacactcttcttaagcatccacatccagatcttcctgatgatgactccccaggggatatctccagtccaggccgcttccctgacccaactaacgngcccacctntctattctacagcaccaccaagatgccttacaggcacctcaaacttaacatgtctaaaacagaacttttttctgcccctgnacctcggccgctctagaacnagnggatcccccgggctgcaggaattcgaaatcaagcttatcgataccgncgacctcgagggggggcccggnacccagcttttggtccctttagngagggntaaatgcgcgcctggcgggaaacaatgggcanagctggttccngggggnaaatggtaanccgctcacaaattcaaaacaaaaanacgagccgggagcaanaaaagggaaaagccn

SEQ ID NO: 2202 - DNA, 385 bp, Homo sapiens
  misc_feature 366: n = A,T,C or G
tacttagggcgaattggagctccccgcggtggcggccgaggtactcacctatctcctctacccaacttgtgttttagatgagtccttttggatctttttccccataatggcctctctccttttgctttacagtgcaatcagggcagaataacagatatgttgagtaactaatttatatttctgaagatctccatagaactcttaagttctaagtcttcatagtctttgcaccttgccaagtttgctttcctttgggaattctgtcataaccacaaggttattccccagacatgcagtttggggaaattaacccggcagtagtaaacagactggattagaaaaggtggcaggtcgtaataagggatnttccaataaccgggggaaa

SEQ ID NO: 2203 - DNA, 479 bp, Homo sapiens
acttagggcgattggagctccccgcggtggcggccgaggtacgcggggcttctgggaatctccacaccctgaagacacagtgagttagcaccaccaccaggaattggcctttcagctctgtgcctgtctccagtcaggctggaataagtctcctcatatttgcaagctcggccctcccctggaatctaaagcctcctcagccttctgagtcagcctgaaaggaacaggccgaactgctgtatgggctctgtaagtaaaactgttttgttcaatgaaaatgcttgactctagatgaattggactttctcacccacagggagtaatttcctcacaatgtgcagaattagattagatgttggtatgggtggggctgaggagggacggtagaatttcagaattatttattcccaggaaataccgtagagaatgggtattttcgttctgcctgatataggttagataacttgtttttagtcaaa

SEQ ID NO: 2204 - DNA, 451 bp, Homo sapiens
  misc_feature 320: n = A,T,C or G
ccgcggtggcggccgaggtacatctacctaaaggactattatgtggaataatacatactaatgaagtattacatgatttaaagactacaataaaaccaaacatgcttataacattaagaaaaacaataaagatacatgattgaaaccaagttgaaaaatagcatatgccttggaggaaatgtgctcaaattactaatgatttagtgttgtccctactttctctctcttttttctttctttttttttattatgggttagctgtcacatacaacttttttttttttgagatgggggtctcgctctgtcaccaggcttggagntgcagtggccgcggatctcggctcactgcaacctccacatcccatgtttggaagtaattcttctgcctcaagcctcccgagtagctggggctggggggaacgtgccaccatgactggctaattttctggaa

SEQ ID NO: 2205 - DNA, 423 bp, Homo sapiens
  misc_feature 21, 40: n = A,T,C or G
ggcgaattttagctccccgcngtggcggccgcccgggcanttacgcggggctctcaacgtggtgtgtttggtagcctgttacagtgctggattcataaaagggcctttatggtttgtgaaagaatatctgtgtgcttagggaggaaactttttgatctgcagaaaagccagaagacatctaggacatccataaaaattcatcagagagcattttactactgagctgcaaagggaaaaacttaaaatggatatgaaaagtgaagaaagtgatcataggagaaaaccatttcagatgacaagagcacctcaaaggcagcagcctcaaggagcagccatggccccagacttgtcgcacggatgcagaaaacttaatggaggaggcttgaggtcagaatgggaaagagtttttaaaaaataaaaagg

SEQ ID NO: 2206 - DNA, 426 bp, Homo sapiens
aattggagctccccgcggtggcggccgcccgggcaggtacttcaaaaatattatctgtttccttccaaccttcatggtttcagatggaaaatctgctgtggtttacattattgtttttctgtaagaaatgtgccattttctctgtttgctttcaagatttttaattttttttttttcatttccagaaattgaatgtatttgggtgtattctatttagggtttgctctgtttcttgaatatttaggtttatgtcctccatctaatttgggaaggttgaagtcattattttttaatagtttttttagtcccacattctatctcctcgtcttctatatctcctgtgattatggaatgttagctcttttattattgttctaaagtttcctgaaatgctgttaaattttttttattcgggtttcttcttct

SEQ ID NO: 2207 - DNA, 336 bp, Homo sapiens
  misc_feature 36, 70, 92, 93, 96, 113, 145, 148, 175, 196, 270, 293: n = A,T,C or G
gggcgaattggagctccccgcgggggcggccgaggnactctttttttttttttttttagttcatcttttncaggaatatttggctcttcaannggnctttaacatcatttttnggggcccccctctctccaaaaataattctttnganattttcactgggttcattttttagttnttaatttcaaattttaaatgnttttctaaatgggattctaaattagctttttatattcattactgaaacacatttctacattaacatgaaatttnattaacatatctgaggactcacngaaaagaattaatgcaccttatttgatctttcctcttttcttt

SEQ ID NO: 2208 - DNA, 394 bp, Homo sapiens
  misc_feature 31, 67, 68, 282: n = A,T,C or G
gcgaattggagctccccgcgggggcgggcgnccgggcaggtacttttttttttttttttacactttnntgagatagttggtcctggatgagggccctgttgaaaatctgataaaaatatgcacaatatacaataccgtgcaaatacataatatttgcctataatttcagaattgaacatgaacatctgaagtcaatttgtggattcccacttcagatctcctccatgtccaatacttgttggtagcccctaatgctcaaaacattcattgacgtgcccaganatctatgggcagctggtggtgtatttttttaaagctggaatattagactgaggatacagcattgagcttcaggtgctgggaagagaatgagtataaatgctctgggaaaaac

SEQ ID NO: 2209 - DNA, 446 bp, Homo sapiens
  misc_feature 15, 45, 191, 372, 434: n = A,T,C or G
ggcggccgaggtacnttgaaatattatggggcaacgttcccccantatctggcgcccaacgtggttttctttttcctaggtgcatgtggggacccgattccctttggtaggtgcggagaaatgttcatcggtccagtccacagaaatgcttgttcggctccccgacgattggtgagttgtctgtgtattgnccggggtaactatgggtcacgcagagtctaaacattatgcttatctctgctatattaaattcctgttaaaatgggggagttcgggttcccatggaaaatatggtcaccctattcagggcagtggaagaacactgtccttggtttcctgaaaagggaacgttagatgtggaactatgggatnatgtttggtgcaaaattccgagaactggtcccaacaggaaattatgttcctgtcactgtttnggggtgattggg

SEQ ID NO: 2210 - DNA, 448 bp, Homo sapiens
  misc_feature 6, 35, 106, 362, 432: n = A,T,C or G
acactnctatagggcgaattggagctccccgcggnggcggccgaggtacgcggggggagtggagattatggttggattagcttcaatttttttttctttgtggganatgcaatttgcaaaagaaagttcttataagagtgagactttgttcatttgaagaatgatggagctggcttttctgtcaatttctgcagctttttcttattctccaaaaaccagaaagtggtaatatttgttaggtgatcaaatcaaagatgatatttaaaaacacatgttgacaggaggacctagaggcattatgagtattagaaagtctgcaaattaggttgtttgctttgtggtgaggtgtgaaacaggatatncatttttgaaaatgtatctttggatttgctgaactgggctcaaaatgtggtcaaattgagagagcttatnatgccagtttttactg

SEQ ID NO: 2211 - DNA, 478 bp, Homo sapiens
  misc_feature 74, 437: n = A,T,C or G
cgactcctatagggcgaattggagctccccgcggtggcggccgcccgggcaggtactattcaaaggacagaganttaaagaataaaaaacaaacagagctgcagaaaaaatgcgggaaattcgtatgttaaaatctaatttccaatgtgatggttttaagagagagggcctttgggagagaattataagggggattagtgcccttataaaaggtgcccttataaaagtggcaaagaacctagaagaattgtttgtgtcctactgttttgtaaaaaagaatttgtaaggaatgatatagaatatttggctgaatacatttctttcttttattttttgagacaggagtctcactctgtcacccaggctggagttgcagtggcgcaatctcggctcactgcaacctctgcctcccaggttcatgcaatttctgtcttcancctccagagtagtttgagattacagggcacgtgccaccacg

SEQ ID NO: 2212 - DNA, 292 bp, Homo sapiens
  misc_feature 95, 234: n = A,T,C or G
aggtacgcgggacacatcaatgcagagtccctctgtgaatttacaacacccaacacccatgagttcagtccttaagaaggaaaattgagcaagtntttaattggttggacattgcataaaagaggtccatatccaggctaactctagaaattttattctcaaacttagttggcctctttttcttctgtcagaggaccattcttagtggcactggggaaatcttggcacccagangaattcaactgcgctcactgcaaaaatacaatggcctacattggatttgtagaggaga

SEQ ID NO: 2213 - DNA, 376 bp, Homo sapiens
  misc_feature 68, 71: n = A,T,C or G
gcgaattgtagctccccgcggtggcggccgaggtacaaccaatctggagcttacttaggattttctanttncatgtagttctaaaatatggtccctggatcagtagtgttagcatcccctgggattttgtgttttaacaagttctctatatgattctgatgcacactaaagcttcagaatcactgctgtagtataaactgtgatggttctcagccttccccactgctggcttaggtgtttgctttcttgggcctactaagtcagttagttctttatctgtttcctttccagtttccaaaatttttgttgctatcttttcctctccagttttcctcatatgtgtgaatttatatctttttttaaaaaaatctcttta

SEQ ID NO: 2214 - DNA, 478 bp, Homo sapiens
  misc_feature 73: n = A,T,C or G
tacggcgaattggagctccccgcggtggcggccgcccgggcaggtacactggaggctggagcctgcagatggnatggctctgcggctcaccttgctgcagttggcggtggtgacagagactgcagcttgactgtagtggtggttaccaggagctctgccactgcatgtccactagtgacgggttcgctccaccaccccagctgggtagccgctgctctcacataaggggtccaattaaaattgccaggaataaattcccccggactttgacttctcaagagctaagaaggtttgctgagtattctggcatgatgtttggtgatcaaacaactgctggccaaaaatgatgaagtatttccccctcttgctgaagatgtgctccatacaatagtccatcacattcatcattcatcaagtctgggaagtgtgcagccaatcatattatctattacatggttgttctggctttttttttttt

SEQ ID NO: 2215 - DNA, 503 bp, Homo sapiens
ctatagggcgaattggagctccccgcggtggcggccgcccgggcatggtacagggcacatgcacagagctttgaagaacatacacaaacctgttgaatcaagttactttcctcatcctcagagactttgacaattcagagctcacagatggcagggggaattctcaggcttcccttcctcctgattgacactttttaaaggaagtgatgtggaagttgttctagaagttagatggacagtgggagcacattcgtgagtggggcttgggagagcccaaaagtggcactttgattttaggctgggcaggcagaagtctcacagtaaaatatatttcactagacgtccaaaccaacactgcattgtagtaacctcttctgaagtaactggttaaattaataactggtcccataagtcagggtcaagccacatttataacccattcgggccggccatgaaggggttctgactcgacattggtatttaaatgctgttactttcccaat

SEQ ID NO: 2216 - DNA, 365 bp, Homo sapiens
  misc_feature 36, 37, 110, 259, 277, 285, 329: n = A,T,C or G
aggtacgcgggacatcaatgcagaggtccctctgtnnatttacaacacccaacacccatgagttcagtccttaagaaggaaaattgagcaagtatttaattggttggacnttgcataaaagaggtccatatccaggctaactctagaaattttattctcaaacttagttggcctctttttcttctgtcagaggaccattcttagtggcactggggaaatcttggcacccggaagaattcaactgcgctcactgcaaaantacaatggcctacattgnatttgtanaggagaaaggagccctgtattgtgagctgtgctatgaagaaatnctttgcccctgaatgtggtcagatgccaaaaggaag

SEQ ID NO: 2217 - DNA, 328 bp, Homo sapiens
  misc_feature 1, 54, 63, 66: n = A,T,C or G
ncgcctacgcccgttctctaccttgtgtgatggtgtttgttcgtcttcccagangccgttctnttncttatgtgatggtgtttgttctgtcttcccagaggctgttctctgccttgtgtgatggtgtttgttctgtcttcccagaggctgtggccctgagaaagatcacgtctacctgcagctgcaccacctgcctccggagcagctggccacgcgcctgcccggcatttcagagacagccatgatcttcgctggtgtggaccgtcacgaaggagccgatccctgtcctccccaccgtgcattataacatgggcggcattcccaccaa

SEQ ID NO: 2218 - DNA, 565 bp, Homo sapiens
  misc_feature 3, 84, 86, 89, 159, 178, 207, 215, 241, 252, 274, 277, 288,295, 308, 317, 332, 351, 354, 361, 370, 382, 427, 446, 453,476, 499, 544: n = A,T,C or G
atnggactccaccgcgggggcggccgggcaggtacggaaaaacaaaataaggtgagtcataaagcgaagcaggtgtccaggtanantgnttctgcttttggaaagccatttgctaaactcatccatcaaaccatcaatgtcgcccaggataagaaactnatgaactatatgataatgntcttgattctcttccagaactctcttttntgtcaagnaagccttgaagttccctcaaaaaacnctttttctaancgttccagtttttgctcccaanaanaattctctagngggaggnttctttcagtctncaatcccancagctttgcctaacntggatggtcttaacaatcntcnttggttnctacccaanaaacctgtgccnacccaatccacccccgggaaaggattagggccccaaaaacctggnggtcctttccccaggggtngttcacnaaaaaccaggggaaaagccaagncttacctttaaaggatttccccnacctttaaaaaggccttgccattaaaaattttggccttcctcctncggttattcctaaatttaaaa

SEQ ID NO: 2219 - DNA, 474 bp, Homo sapiens
  misc_feature 7, 8: n = A,T,C or G
atagggnnaattggagctccccgcggtggcggccgaggtacaaataaatgttaacgaaattacacttttttcacactatctttttccacgattaatatgtatttccttcaattttcagtgaagacttttctaataatactattattaccttcaccccatttcctgtcctcatctactatttagatcacctacatcaaagaaataaaaataggctgggcccagtggcccatacctgtaatcccagcactttgggaggccgagataggcagatcacaaggtcaggagttcgaaaccagccctgccaacatgatgaaaccccatctctactaaaaatacaaaaattagctgggtgtggtggcgcgcgcctatagttccagctactcgggaggctgaggaagaagaatcgcttgaacccgggaggcggaggctgcagtgagcccgagatcgcaccactgcactccagcctgggcaaca

SEQ ID NO: 2220 - DNA, 429 bp, Homo sapiens
ctatagggcgaattggagctccccgcggtggcggccgaggtacatggattcttcacttgttaagagttatttataccaaatcctacaggggattgtgttttgtcactctagaggagttcttcacagagacttaaaacctcaaaatctcttgattgatgacaaaggaacaattaaactggctgattttggccttgccagagcttttggaatacctatcagagtatatacacatgaggtagtaacactctggtacatggattcttcacttgttaagagttatttataccaaatcctacaggggattgtgttttgtcactctagaagagttcttcacagagacttaaaacctcaaaatctcttgattgatgacaaaggaacaattaaactggctgattttggccttgccagagcttttggaatacctatcag

SEQ ID NO: 2221 - DNA, 213 bp, Homo sapiens
  misc_feature 78, 142, 170, 200: n = A,T,C or G
aggtactgctccctgcacgatccagtcagcccccgcccggctggttatgtaacaaacaagtctgtgtctgtgtggagngttgcaggacgagtggaaatgactgtttccaagttcatggcaattcagaaggtccttcagccanactggttccagtgcctctccgatggagnaagtatcttgtaaagggaaagcaaaccttncataaaaaaaggg

SEQ ID NO: 2222 - DNA, 380 bp, Homo sapiens
ccgcggtggcggccgaggtacgcggggacatcaatgcagagtccctctgtgaatttacaacacccaacacccatgagttcagtccttaagaaggaaaattgagcaagtatttaattggttggacattgcataaaagaggtccatatccaggctaactctagaaattttattctcaaacttagttggccactttttcttctgtcagaggaccattcttagcggcactggggaaatcttggcacccagaagaattcaactgcgctcactgcaaaaatacaatggcctacattggatttgtagaggagaaaggagccctgtattgtgagctgtgctatgagaaattctttgcccctgaatgtggtcgatgccaaaggggagat

SEQ ID NO: 2223 - DNA, 402 bp, Homo sapiens
  misc_feature 36, 247: n = A,T,C or G
cgcggtggcggccgcccgggcatgtacttgatggantcatcattacattttactcctcgttggaagggggtatgccttgaagtaagaattgcaaaaggcaatccagctagcaaaagggaataaatgaaaatatcattaaaaaagaaatatcaaaactaattaatggcaataattatcccacagactctgtctaaaaatgcatttgccatgaaaataaatgagagcacatgtaaaaaaggaaatgcancaatgcatgcaacagaagttagaaagattacagctttaagataaagatgttttgtctacagcaaacaaagtgttcaaaatcctctattaaccaatttaacaaaagagttatctttcctttgattctgtccaaaccacactaaatggattttggaa

SEQ ID NO: 2224 - DNA, 455 bp, Homo sapiens
  misc_feature 8, 300: n = A,T,C or G
cgaattgnagctccccgcggtggcggccgcccgggcaggtacaaaagttaatatgcatgttagagttttgatggcagttgttgtttatgaataagcttcattccatcctaataccttaaaataactaatttgctttcctttccaggtattccctgatgacagtctgcctctatcttacagtaagttgtttttcgaattctatgggcctattatctaatagataacttagccattttgatatttgttaccaaagcctgcttaacccataaagttttctggttcctcttgttctctgtaggngatgtttctagatagatgcccactgatatatgccccttttttctcagatagatgcccactgatctgcccagggtcagacgaatgcttgtcaagttgtagctttccaggattctgctccaatgagggaggaaacatcctgccttaccccctgtttt

SEQ ID NO: 2225 - DNA, 477 bp, Homo sapiens
  misc_feature 150, 163, 469: n = A,T,C or G
tagggcgaattggagctccccgcggtggcggccgaggtactttgcacgtgtatgatggacacggtggacctgcagcagctgatttctgtcatacccacatggagaaatgtattatggatttgcttcctaaggagaagaacttggaaactntgttgacccttgncttttctagaaatagataaagccttttcgagtcatgcccgcctgtctgctgatgcaactcttctgacctctgggactactgcaacagtagccctattgcgagatggtattgaactggttgtagccagtgttggggacagccgggctattttgtgtagaaaaggaaaacccatgaagctgaccattgaccatactccagaaagaaaagatgaaaaagaaaggatcaagaaatgtggtggtttttgtagcttggaaatagtttggggcagcctcacgtaaatggcaggcttgcaatgacaagaaagtnttggagat

SEQ ID NO: 2226 - DNA, 471 bp, Homo sapiens
  misc_feature 59, 370: n = A,T,C or G
aattggagctccccgcggtggcggccgaggtacactattcctcccatgtctgtcccctntgctccaagactgcagaggacagtcttgcacatcatctttgtaaaaacagtctttattttactcagaaatttcttattgagtccctgcttcatacatgctaggtgttagggtttaaaaagaatgaaaataaagcctgtcagggatcgcttttctagaacacctgcccaagcagagacttaaatattgaggctagctagattaaaagtggtagagggcaagaaagggtgacagcatgccacgcagcagcaagagcaggagcgaggcctgaaagagtgaaagtatttgcctgcaatagaaggaggagtgagtngggcattaagagccactcagtaatgccagagaaagggcacacagggaaaagggctaaagatgtagaatagggcagaagtcagattatgaaagccttaatgt

SEQ ID NO: 2227 - DNA, 450 bp, Homo sapiens
  misc_feature 2: n = A,T,C or G
tnctatagggcgaattggagctccccgcggtggcggccgaggtattcaaagttcaaatggagcccagcaagccagatctcctttactcctaagttccctcaacagtttctcctctgctttagagactgccttgaaaatattcttgtcctgctgttgtgttttggctttggaatgatgtgatgcagctcaatgggtcctacccccaagttgatcagagtaagaaacagctgggaaagtcagtgcaaattcaagttcatcatcctccttacagggattctgattcagagggctcaggtggggcctggaatgtgtttgttaacatgactcagatgttgcagtcagtttggggacccgctgataccatcgaccttatagtttatgggatgattctgttttgcttgataaagaaactgaggcatagacaggtctgtaacttgcccaagttcccct

SEQ ID NO: 2228 - DNA, 473 bp, Homo sapiens
tacttagggcgaattggagctccccgcggtggcggccgaggtacactagccgcacttcaggtgcccagtgtccacactgactagtggtgacggcgttggacagtgcagatacagaacatttctgtcatcacagaaagttcctttggacagagccatgttaagtgatgttatcacaagatggacagaaacattcctgtttgatttatttttcagacccagtttgtggagaaaaataatgatgctttacatatgtctcttgaatccttaatatgtgaatccagagataagtttatacgggaattatttgaatcatccacaaataacaacaaagatactaaacaaaaagcaggaaaacttagcttcatcagcgtgggaaacaagtttaagacacagttaaatttgcttctggataactttttcggaaagtacctgccccgggcggccgctctagaactaggtgggatcccccgggc

SEQ ID NO: 2229 - DNA, 419 bp, Homo sapiens
  misc_feature 1, 42, 43, 45, 411: n = A,T,C or G
nggcggccgcccgggcaggtacaaagatgctacaccggatanntngggatctggtgatcctaattttgtcaccagctttgaaatctttagctaggcatttcagccctataaaaatccattttctcacttgtaaaaagaagagttgaagttatgtttttccagggcttttttctctgacaaaccgaattgcagaacaattttatgactcaaccgacgtagcagagtccagagagagtttgaaaaaacaccttacaaaacttataactgaagttctccctccaagggcacttaattttttcaagtgaaagcatgcatgcagattcatccagctgttaccctggaagaggacagagtaaaatatactccattttatatgaagcccaaagtgtgattgttaaaaatccccatgcncaatttag

SEQ ID NO: 2230 - DNA, 336 bp, Homo sapiens
  misc_feature 5, 6, 63, 99, 171, 277, 326: n = A,T,C or G
gggcnnattggagctccccgcggtggcggccgaggtacggtattctgtgagctggggaagacnttatacccttttattgggggcagggggaggatgtancaaaggaccaattttcctggagatcctattacgtgaagggacttatactggacacatcatggagaaaatcanaaagaaggctgcttaataagacccactcctggatatggccactctcaattctcagtgtctttgggaagcaaggttcgccatccacttgtctaaacagatgatgacngcagaggtgctgcacaccttctccctgtgacttgagaatgccttacgtnctcccaaata

SEQ ID NO: 2231 - DNA, 343 bp, Homo sapiens
  misc_feature 1, 16, 17, 18, 73, 175, 311: n = A,T,C or G
naactcctatagggcnnnttggagctccccgcggtggcggccgaggtacgcgggggaactgggcgggtgtgantttcacgaggtacacagctgctgctctgcctcagagaaccggacacttcggccccctgagaccagttcacggacggtggcaaatatcacatctgctggtctntgagtcctgaaggaaatgagtgggtgtgtaaggtcaggatacaaacaggaatgctcgacatcaacagagaacaatggtggccagagttagaattgaggccaacctcagacacatggccacagaagacaaagtggcncagctttgtccttcactaaaccactcacctag

SEQ ID NO: 2232 - DNA, 431 bp, Homo sapiens
  misc_feature 323, 419: n = A,T,C or G
cttagggcgaattggagctccccgcggtggcggccgcccgggcaggtacatgttcagctcgatttttttgttcaaatatttgccatgtaaggttgggtgactttatggatgcagaacccatgtatatggagagccaaccgtaatctgtaatacatataaaaaatagtgaatagagcagccatgtgtgtaactgtataccacacagaaaagggcctatgaatttacgcttaaacagagagagacagacagtaaacatcaaaacctgggtaattaaataatataatcatgtctcaccttcagctaacttgggtcatttaacttanaaaggtatgatagataaccaacctgaaaagtgtcagcaactcgatgtaggaactcaattacaaagagaggtggcacttcggtctgtatgacagatncaaagaagagct

SEQ ID NO: 2233 - DNA, 396 bp, Homo sapiens
  misc_feature 73, 207, 217: n = A,T,C or G
actccagggcgaattggagctccccgcggtggcggccgcccgggcaggtacatgcccacagaactgtgagccntttcaatcccttttctttttcaattacccactctcatgtatatctttatagcacgtgtgagaacagattaatacactcctcctcagaaagcattcaatttagctgtgtctaaagtatgccaggtgttctagggngttatcttanccaataattcttcctcttcagcaagatctatttgcctatgacagcttgacctacatttcctaccatacttgtcagtaacaagtagcccataacatctgaatggacttcattgaaatcacagagggtctttagttctctactttattagcaggcattcgggaaacacatcaaccttttct

SEQ ID NO: 2234 - DNA, 447 bp, Homo sapiens
  misc_feature 33, 62, 199, 244, 276, 277, 282, 317, 327, 332, 395, 397,399, 411, 422, 436: n = A,T,C or G
aggtacaacatcatcaaggcagaaacagttttnccaacaggttatattttcttaatggtagncatgaagtcataaataaaaaaatggaatcatttagtatgttctcttgttttgactttttcttttttttggagacagagtctcactctgtccgcccaggctggagtgcagtagaccgcgatctaggctcactgcaacnctctgcctcccaggtttcaagcaaactctcctgcctcaagcctcnttgagatagctgggggattattgggggcaacnncactnacccaacaccccaggctaatttttttgggattttnttaagtaagnagggncaatggttttttccaacccaattttttgggcccaagggccttggggtccttcggaaaaccttncntnggaacccctccnaaaggttggantgcccaacccccanccctttggggc

SEQ ID NO: 2235 - DNA, 327 bp, Homo sapiens
  misc_feature 300: n = A,T,C or G
ccgcggtggcggccgaggtacgcggggcctgtggaggtgagtgaagggtctgctgctgaaatttgggggcaaataaccggagtaggtttgttcctgtgccttggcgagtcgccggtgcgtatcggagtctctgccagccattgatttctacgggtttcaagaagagggagaacaggatggaggagatgttgggctgatggtgtttggtcccctgacacccggagaacggctgcccgggttatcccagttaaattcctgggcctgaacggagtgaaaccgatgtttttgtttcgtgtgcanttgtccatgaggcagtgcttccttcat

SEQ ID NO: 2236 - DNA, 293 bp, Homo sapiens
tatagggcgaattggagctccccgcggtggcggccgcccgggcaggtacatgcttcagtcagggctcacatcttcaaattcagtgtctgttctgtagagaaaccttaataatgtgatatatgtgacagcaaagagttataagatatgaatatgttaattttagtagatacttccgaaaagtatttcaaactggttgtgccactataaactctgaccattattaggcaagaattggctttttttttgtttcttttgagacagtcttgctctgtcacccagactggcatgcagtg

SEQ ID NO: 2237 - DNA, 349 bp, Homo sapiens
  misc_feature 23, 254, 324, 349: n = A,T,C or G
actatagggcgaattggagctcnccgcggtggcggccgcacgggcaggtacactggaggctggagcctgcagatggcatggctctgcggctcaccttgctgcagttggtggtggtgacagagactgcagcttgactgtagtggtaagaggatgcctgtggcagccagatgataggggccttatagggtgggccagtgcattgagggtgacagcagaggtggttgtattggcatcagtgctagtggtggcagcancagcaagtctgggaaaagaaaagatgaaaaagaaaaattcacaactgccagatcttctcctgtctggaantgttgtgtgtgctaccaatacctcn

SEQ ID NO: 2238 - DNA, 507 bp, Homo sapiens
actacttagggcaattggagctccccgcggtggcggccgcccgggcaggtatttcacaaagtttgattactttggtgggcacagtaaagataaaagtaactttctagagcagtgctgctcaaactttcatgtgcatacgaaacagctgggatcttgttaaaatgcagctttagattcagtagggaggagcttaagattctacattcctaacaagctcccagggactgccgaggccacactgccagtccaaggaccacactgtgcatcttaacaaggttctggagaatcttcccctccaggcaaataaagctagaaagtgtgctgggtgcacatgaatgcctcactgaagtgggacgtggggacagcctccagtcactccaggccaggaagactgtagctgcgcccactggacaagaatgggacaaggctactctgagccccattttgagtaggtgacctcatgggtatctctaagactaactgacctatcagaacaagccaggatga

SEQ ID NO: 2239 - DNA, 372 bp, Homo sapiens
actacttagggcgaattggagctccccgcgggggcggccgaggtacacacaacattctggaatggcggcacgttttggttatgagagagttaaatgtcattacactggaacatagtgatgctaaataaaaggagacatcattctacttcaaatgcacctacaactttaaaatggcatctgacaccaacctggattcttcggatgctgacgattgcctctgacaccctctcaatggctgaggggaagaagagggtaaccgccagccgcacagccccatacagcgtcactgccacgaacacgcggctggctgtgatcacactgccgaggagcacgtaggtggtgaaggtcacaaacacgatgattttgcttgca

SEQ ID NO: 2240 - DNA, 462 bp, Homo sapiens
tatcactacttagggcgaattggagctccccgcggtggcggccgcccgggcaggtacgaaaaaatcaggctactaagcccactgttaatatagacgcagaccaattgttaggaacaggtccaaattggagcaccattaaccaacaatcagtgatgcagaatgaggctattgaacaagtaagggctatttgcctcagggcctggggaaaaattcaggacccaggaacagctttccctattaattcaattagacaaggctctaaagagccatatcctgactttgtggcaagattacaagatgctgctcaaaagtctattacagatgacaatgcccgaaaagttattgtagaattaatggcctatgaaaatgcaaatccagaatgtcagtcggccataaagccattaaaaggaaaagttccagcaggagttgatgtaattcagaatatgtgaaggcttgtgatgg

SEQ ID NO: 2241 - DNA, 420 bp, Homo sapiens
ggcggccgaggtacggggaaggaacatgagtccctcctttacttctccattagaaagaatgagatggcaagacaatgaaacaggcaaagtgaacagagatgcaagacaaaattcaggtgagagagccagagcatcactcagccattcctgacatgtaaaacaggcaactagaaatttgcagaaaggaagcgaagtctccataaagatgtttttaaagtgagcttgaagtatttggagacaattcagtgttacataaaatctgcaaatctctggataaagaagcagagatcccagcatgggacaaatggagcctcaaaagtgggaagaagacagagaagaccagggcagaatgcatctcttcctttctcttggctttcctggataaggactgcatcattcctgtggaaggacaggccatca

SEQ ID NO: 2242 - DNA, 442 bp, Homo sapiens
  misc_feature 9, 103, 272, 286, 316, 341: n = A,T,C or G
cttagggcnattggagctccccgcggtggccgtggtcgcggccgaggtacttcttggatcttacataggcctgaaagtttagttgcactactttaggaatctntttttatgcatttgttcaattaaaaggcaacaaagacaaatccttaagaaaataccagcatttttcctacatatgaaatcaagggtccttgtctgacgatggattttactagcgtggtcgcggccgaggtacgcggggggactgacaaccggggatagctcaaggtccnaagaaccagttttnaaacattataagttccaggctttgcaagtntttattctctggggtaatatccagnctttctgttattgtctcttaaaattctcttccatggcccacattaagggagtttgcagagagtgagggaggcaaaacttgaaaagggcctgcaacacttta

SEQ ID NO: 2243 - DNA, 308 bp, Homo sapiens
  misc_feature 50, 206, 239, 241, 279: n = A,T,C or G
ccgcggtggcggccgcccgggcaggtacttttttttttttttttttgctntgtgtgggatcacatccagagttgttgctgctgatctgggcacctgccctggatgtgcaaaagtggtggtgggaagctgagtggaagtctgctctgcctttttgcttgtgggatctggtcttgaaaaagtaactccagagctccttgccattgcanctggtgtgactgcacttgtaatgtgccctatananaagggcaactgtgaggtagctgggctgatcatggtttncaaagatgagttcctggggagttgtggcc

SEQ ID NO: 2244 - DNA, 418 bp, Homo sapiens
  misc_feature 49: n = A,T,C or G
ccgcggtggcggccgcccgggcaggtacgcgggtgtgacagaaatggantcatcagtttatcaaccaacaagcagctccagcacccagcacttctacctgaatttcaccatcaccaacctaccatattcccaggacaaagcccagccaggcaccaccaattaccagaggaacaaaaggaatattgaggatgcgctcaaccaactcttccgaaacagcagcatcaagagttatttttctgactgtcaagtttcaacattcaggtctgtccccaacaggcaccacaccggggtggactccctgtgtaacttctcgccactggctcgggagagtagacagagttgccatctatgaggaatttctgcggatgacccggaatggtacctcggccgctctagaactaggtggatcccccgggct

SEQ ID NO: 2245 - DNA, 407 bp, Homo sapiens
  misc_feature 67: n = A,T,C or G
gggcgattggagctccccgcggtggcggccgcccgggcaggtactaatatgatccacagttttcagntgtggaggatctgagaaacagaggggtcaaatgacttgactagagtcacacagctggaatgtggagccaggatatgaacacaaacagtttgaatccagaagctttactcataaccatgattctatgtcatttccagaaatggtggccggcacataatctccctttgcacataacagatttcacacaagcctttcttgccaagaatcaggttcacttctgtaatgctcttgttagtagaaaagataatttcaatctgacaattctatatttcccaacgttcatgggccctttcaacccatcttatcacccagctaatcaagaatcaagtgttcccagcaat

SEQ ID NO: 2246 - DNA, 443 bp, Homo sapiens
  misc_feature 9, 10, 67, 68, 71, 264, 316, 377, 383, 386, 392, 395, 398,400, 406, 423, 424, 425: n = A,T,C or G
ctatagggnnaattggagctccccgcggtggcggccgaggtaccccacaaataaagcaaaaatatannttntaaattggatgatgaggctgattaaaaagcttgggctcagtggtcagacttgggcaagtggcctaatgtcgtcccctagtaagtggacttagagtgggggtctccaaatacggagaatctttgggttgcagcaggagctttcactgactgctgcgtgagttgctcgttctttttccttcatcaggtgccgtantttctctgaaaagcatcacccaggtcagaatgaaaggaaactctctgtgcanaccgctgtatgtggggacctttgaagacagtcaaaataagtgttctcaattcttataggtnagcccngantttttnccnttngnttcttnttctgggaagaaatacnnntttttttttggggttaaa

SEQ ID NO: 2247 - DNA, 446 bp, Homo sapiens
  misc_feature 68, 152, 413: n = A,T,C or G
ctatagggcgaattggagctccccgcggtggcggccgcccgggcaggtactacaactgattactctgnttgaggaattcatgaatttgtctcagtcaaacaagatgaagaggaagtctccccgcctagcgccttgcctccaggtttgggtangtcgggccctggagagaaaagattcaggtgagcgcaagcccagagaaggcatcctgacctcatcctaatacaatcactaatgagctcatttcttgaagctgtattgattctaatccttgtcttattcagattgtagtttttacggcaatctttcattacgtttcctcttacaagaaaactaatgtatttgagaaacaattaaatttttgcatgatacacaccgcattcaaagggatcttagccaaaaaataccaccagggnttttgttctatcaatttttaatattttaagcaa

SEQ ID NO: 2248 - DNA, 393 bp, Homo sapiens
ctatagggcgaattggagctccccgcggtggcggccgaggtacggggacatcaatgcagagtccctttgtgaatttacaacacccaacacccatgagttcagtccttaagaaggaaaattgagcaagtatttaattggttggacattgcataaaagaggtccatatccaggctaactctagaaattttattctcaaacttagttggcctctttttcttctgtcagaggaccattcttagtggcactggggaaatcttggcacccagaagaattcaactgcgctcactgcaaaaatgcaatggcctacattggatttgtagaggagaaaggagccctgtattgtgaggctgtgctatgagaaattctttgcccctggaatgtgggtcgatgcca

SEQ ID NO: 2249 - DNA, 475 bp, Homo sapiens
  misc_feature 22, 26, 27, 33, 38, 41, 48, 51, 54, 59, 63, 64, 69, 71, 74,75, 261, 263, 267, 269, 272, 279, 281, 295, 297, 309, 312,336, 367, 461: n = A,T,C or G
actacttagggcgaattgggtnccgnncccccnctggnggngcacggngtncangtacntganntcaantnccnnaaacacgtgacgggaacataatttcctgttgggaccagttctcggaattttgcaccaacatgatcccatagttccacatctaacgttcccttttcaggaaaccaaggacagtgttcttccactgccctgaatagggtgaccatattttccatgggaacccgaactcccccattttaacaggaattnantatntnccnaataagnanactgacttaaactntntgtgacccatanttnccccggacaatacacagacaactnaccaatcgtcggggagccgaacaagcatttntgtggactggaccgatgaacatttctccgcacctaccaaagggaatcgggttcccacatgcacttaggaaaaagaaaaccacgttgggcgccanatattggggggaac

SEQ ID NO: 2250 - DNA, 440 bp, Homo sapiens
  misc_feature 328: n = A,T,C or G
atagggcgaattggagctccccgcggtggcggccgcccgggcaggtactgcagacaccatttagttttgcattgaccttactagcaattattattttatactggctttgcccttttcattctgttttttggcactagtctgttttccatcagaatattagacctgcttacttctaaaatatttttgtgagtttgaacacatggatagattttaatggcatttttactctgcattattttgctttctaacacatttaatattcacagtaaccctatgagacagatattattatttccattttagagctaaagaaatataagatatggangaggtaaacttcccaccaaatgagaggcagagctagggattcacaccaatatgagcctggcctcaggcccatgctctgaatcatcatatcacacagcattttttcctggacc

SEQ ID NO: 2251 - DNA, 419 bp, Homo sapiens
  misc_feature 373: n = A,T,C or G
ccgcggtggcggccgaggtacatctacattttcctacactcttaaatatatagtagctgcagaatctgtttgtgtatacttaatagaggtaattttttcttcccctagttatttctttcccattgaatcaagttacatacaagtttctaaccattcctgttataggcttgttggtgattgacttcattttaataatctttttatttcattgcctttcacccagttttttaaactcatgaaattccacacccctttccatctctattttccttccttaaatcaatactttactataagcacctcttatatgtgatcctttgaccatagtcatcttggtttttgattagtcccttccctgcctttcatttactgngttatcaactaagaggtcttgtaggaactggagtaaactttacttg

SEQ ID NO: 2252 - DNA, 440 bp, Homo sapiens
  misc_feature 14: n = A,T,C or G
cactacttagggcnattggagctccccgcggtggcggccgaggtacactaggacttgactggaaaattttacaaaccaagaaagcaagggacttctgttcctcttacctcctagtctttctgtctcctagggaaagagaaaaattacaaagaagaaatctctctctctctccattttaaagcaaaaatagagtcgggtgtggtggtgcatgcagatactctggaggctgaggtggaaggattgcttgatctcaggaggtcgaggctgcagtgagccatgatcgtgccactgcactccagcctgggtgacagagcgagaccccatcttgaatgaatgagtgaaccggaatgaatgaatgagtgaacggaatgaatgaatgaatcattctctgccttctgggtagtaaccctggtttttagcatgtttgtgtaccttgcccg

SEQ ID NO: 2253 - DNA, 507 bp, Homo sapiens
  misc_feature 410, 442, 448, 456, 458: n = A,T,C or G
cttagggcgaattggagctccccgcggtggcggccgaggtacgcggggacatcaatgcagagtccctctgtgaatttacaacacccaacacccatgagttcagtccttaagaaggaaaattgagcaagtatttaattggttggacattgcataaaagaggtccatatccaggctaactctagaaattttattctcaaacttagttggcctctttttcttctgtcagaggaccattcttagtggcactggggaaatcttggcacccagaagaattcaactgcgctcactgcaaaaatacaatggcctacattggatttgtagaggagaaaggagccctgtattgtgagctgtgctatgagaaattctttgcccctgaatgtggtcgatgccaaagggaagatccttggganaagtcatcaatggcgttgaaacaaacttggcntgtttnctgttttngnggggtgtagcctgtggaaagcccatttcggaacaatggttttttcactt

SEQ ID NO: 2254 - DNA, 431 bp, Homo sapiens
ccgcggtggcggccgcccgggcaggtaccaagttgtaaaattaccaggaaccgccatgcctcaagatcgccctgttttctggcttcatcaatgactgcatgcagtgcaccaccctgtccactacgtgatgctgtagaattaagtctcacagtgggcggctgaggatacagcgccgcgtcctgtgttgctggtgaattagacgccatcgctgtgggttgctggtatggtgccgtgctatttggcacaggacacaccgcttgaggtctgtattgaacctctgaaggaggccgatactgaagctcggttggcagccggtattgataaactaccagcggttgggtcttattttctaccggctgatattggggatactgtatctgagttggcattgccgggatagagactctgtccctttctacttgattttctct

SEQ ID NO: 2255 - DNA, 356 bp, Homo sapiens
  misc_feature 346: n = A,T,C or G
cttagggcgaattggagctccccgcggtggcggccgaggtactttttttttttttttttgagatatgtgggattcataagggcatatttgtgactaccaagtcaatttctttaaaggatgttggtttactgaggttttctataactccatcgtcagtaaaatcttaagtattagaataatttacattaaaaatgcagcttgaaatttatgaaacagaagagcatactcattacttgtaatccagtaaaattctacttttgtgtagtttttaagctgaaattatcataaacatatagaaaaatgtatatgtatgattaaagttccatacagcatttattataatgcnaataattttg

SEQ ID NO: 2256 - DNA, 401 bp, Homo sapiens
  misc_feature 14, 33, 54, 55, 57, 92, 202, 286, 384, 386: n = A,T,C or G
tttagctccccgcngtggcggccgcccgggcangtactttcttctttttttttnngnttttttttgggctgatagaatttgacattgttcanctttaactttgtcctcattgaactttatcctgctaaggagctaaaaggtccatatgatcaaaaaggcagctctcaacccagcacgaaattctaggctcattcatttctgnttacctactgccaaataagtcagacaactgcatacttgctttacagacgaatagaggacagcatgttgttcaataattggaagnttaaaaagtatatgtaagatacatccccaagaagaaagatagagggagcataccggcttgtcttctagtataggctccctgcccatgggagatcacanantagaattatgatggg

SEQ ID NO: 2257 - DNA, 446 bp, Homo sapiens
  misc_feature 22, 35, 50, 51, 55, 328, 368, 393, 435: n = A,T,C or G
gcggtggcggccgaggtaccanttgtaaaattacnatggaaccgccattnntttngatcgccctgttttctggcttcatcaatgactgcatgcagtgcaccaccctgtccactacgtgatgctgtaggattaagtctcacagtgggcggctgaggatacagcgccgcgtcctgtgttgctggtgaattagacgccatcgctgtgggttgctggtatggtgccgtgctatttggcacaggacacaccgcttgaggtctgtattgaacctctgaaggaggccgatactgaagctcggttggcagcccggtattgataaactaccagcggntgggtcttattttctaccggctgatattgggggatactgnatcttgaagttggcattgcccgggnatagagactctgtccctttctaccttgattttctttgggggntttggggcttg

SEQ ID NO: 2258 - DNA, 391 bp, Homo sapiens
  misc_feature 8, 39, 52: n = A,T,C or G
tagggcgnattggagctccccgcggtggcggccgaggtnctcaccagacccnatatccctagagttgctccctccattccaacacccttcccagcatattccaactaccgccccaactctgagctctgtcttctcagctcagtaggaccaccactgctgaacttcgttcttcctctgagtcagtcctataagtgattccaggtagacagctggaatcattctagggctcaccttgtttcccatttttaggaattccaatcctatactacctaccttccatccaatgtttgaacgtttttcatatggattttttcctctttttctagttgttttggcaacagagctaatccaggtacctgcccgggcgggcgctctagaactaggtgggatc

SEQ ID NO: 2259 - DNA, 395 bp, Homo sapiens
  misc_feature 4, 32, 50: n = A,T,C or G
ggcnaattggagctccccgcggtggcggccgnggtacactagcccacttnaggtgcccagtgtccacactgactagtggtgactgcgttgggcagtgcagatacagaacatttctgtcatcacagaaagttcctttggacagagccatgttaagtgatgttatcacaagatggacagaaacattcctgtttgatttatttttcagacccagtttgtggagaaaaataatgatgctttacatatgtctcttgaatccttaatatgtgaatccagagataagtttatacgggaattatttgaatcatccacaaataacaacaaagatactaaacaaaaagcaggaaaacttagcttctcaagccgtgggaaacaagtttaagaacacaagttaaatt

SEQ ID NO: 2260 - DNA, 344 bp, Homo sapiens
gagctccccgcggtggcggccgcccgggcatggtacgcggggctacaaaggtctcattgtttaaaagtgtgtagcacctcccccttcgctctgtctctcctgctgtcttgtgaagaagggacttgcttcctctttgccttccaccatgattgtaagtttcctgaggcctcccagccatgcttcctctgaagcctgcggaacttcctgagcctcctacctctgctggaagcccagatcccattgtgtgccaacctagtaccggtgcccatcaccaacgccaccctggaccagatcactggcaagtggttttatatcgcatcggcctttcgaaacgaggagtacct

SEQ ID NO: 2261 - DNA, 567 bp, Homo sapiens
  misc_feature 78, 80, 105, 116, 133, 224, 229, 243, 254, 265, 269, 276,280, 288, 290, 291, 299, 307, 310, 326, 329, 340, 345, 353,356, 361, 363, 365, 366, 389, 399, 402, 424, 428, 429, 448,451, 463, 467, 472, 477, 526, 538, 552, 554: n = A,T,C or G
aggtacagatctgggaactaaatattaaaaatgagtgtggctggatatatggagaatgtcgggcccagaaggaaccgnanagatcagatattacaacagctttgntttgagggttngaaatatgaaatgattnggttatgaacgcacagttttaggcagcagggccagaatcctgaccctctgccccgtggttatctcctccccagcttggcatgccctcatgntcatnacagtatttccatntttgttttgtntgcattgatcnttgntgaaagnccantccaaagnannttttctcngtcctggnttntttcccttcttccacntgngttaaacttgncttcnaacctttntgntggancntnnccattttttccaaaaaattcctngttatatttnccnccgttttccaaaaaattaaaangtanntccccaaccaaaaccaagnggnattcctttggtntttntttcncttgncccccccaatttcccttttttaaaaggggtaaaccaaccaatttctaantttccaattttntttccttaaaaatngnaaccccttttccc

SEQ ID NO: 2262 - DNA, 402 bp, Homo sapiens
  misc_feature 8, 390: n = A,T,C or G
gccggggnccgcggggacacacacaggcacctgcacgcagatgcacacatctctagtcaaatgaggctctcagctttttgataggggctttttgatacgtgtataaccaatactttattctcactgtagtcaaggactcattgcaattcagaaatgagaagctgatccggaactccactacagctcaaagaaattctcgaatgttctcacctattaacagttattaaaatggaagaagctggggatgaaattgtgagcaatgccatctcctacgctctatacaaagccttcagcaccagtgagcaagacaaggataactggaatgggcagctgaagcttctgctggagtggaaccagctggacttagccaatgatgaagattttcaccantgaccgccgatg

SEQ ID NO: 2263 - DNA, 461 bp, Homo sapiens
  misc_feature 30, 42, 70, 81, 87, 150, 176, 210, 214, 219, 238, 240, 291,299, 309, 310, 332, 352, 358, 402, 423, 428, 444: n = A,T,C or G
ccgggcaggtacttaggaagaccacagctngatggacaaacngcattgggaggccttagccctgctcctntcaattccatnctgtanagaacaggagtcaggaagccgctggcgggagacaagcatgtccccaggactctgccggtgcanaatatgaacaatgccatgttcttgcnagaaaacgcttagccccgagttttatagtgaggnaatnaccanacagcttgctagaaattgntnagaacacctgtagttagggaccagctggacctgtcctccctttccacaatnagttccantggtcacccnncaaaatttcactaccataccanaaaaaaggggaggaggggantatttnttttttttgggggtttccaaaaaaaaagaggtttaaatataggnattaaattgggttaagccttngccantttttcttttttaagntttaattttttgggggg

SEQ ID NO: 2264 - DNA, 475 bp, Homo sapiens
  misc_feature 344, 451, 475: n = A,T,C or G
aggcgaattggagctccccgcggtggcggccgaggtacgcgggggttgtatgtgggtcggcattcttgcatgatgggagtggccacctgctttcatattctgaagtcagagtgttccagacagaagaaatagcaagtgccgagaagttggcatcagaaaaacagaggggagatttgtgtggctgcagccgagggagaccaggaagatctgcatggtgggaaggacctgatgatacagaggtctgtaggccatgggaatgggtttggaattttattcaaagagctatgggaagtgactagaaggtttaaagttggggaagaggttttgtgtttctgttatatttngtgttttatacaaattactctggttgctgtgttgataggaccagcagaagggtttggaacagggacaccagttaagtttatttgcaatggtttaaggtgaagaaggntggttgggcttggggccttaggcn

SEQ ID NO: 2265 - DNA, 447 bp, Homo sapiens
  misc_feature 309, 357, 360, 419, 421, 429, 435: n = A,T,C or G
gcgaattggagctccccgcggtggcggccgaggtacatgcatgagtgaacataaagaggatgggattagagaagttctgtagcgaagtcctaaaatgattaaatgctgagaaacatgcaaaaaagcttcttagggcagctatcactgataggtatggtttagtgtgaatcctaataaacagtcgaatggattcaggactggacataaaatgataaaagggaccagaaaaagagaaccaagttttttgcacatagcatttattatcattagggtgtaaacatcatgataaattattgtaaatgataatancacttttgaggccttgccatgtgccagccactttaccagccctctatnttnacaccgagagattccacttttgattcactgccactttaaaaagcaaaaatgctttgccnantatcacangaattnggatttgatttt

SEQ ID NO: 2266 - DNA, 479 bp, Homo sapiens
  misc_feature 1, 66, 68, 407: n = A,T,C or G
nctataggttaattggagctccccgcggtggcggccgaggtacaaaaatgaggcaggtgtattttntnccatctaacaggggatgaccacatgaaaagaactggtggcctgtgtgtcccatggtcttacagggcagtggtggaaggtggcccggtcatccactttctggggaggcagaaccagaagcaccagttggacaactgcatatgatttcatgtatttggaaataaaaactcatggatagtgactggaagtggatcagtggttacccataaattcattgccaagtgcaaagtccaagacgaatatttcctaggttttcttccaggatttttatagtcagaggatgtaatcttatgccaacgggtcttaataatcaaatgactccacagtgagaatcattactntgaaaaattgatttttgttaggaatgatgggaaattttaaaatattttgaaagtgaaaaccaccatgcccac

SEQ ID NO: 2267 - DNA, 354 bp, Homo sapiens
  misc_feature 60, 340: n = A,T,C or G
tgaattggagctccccgcggtggcggccgaggtactggaacagggataagttcttggatnaggtgccaacatacctataaaagctgatttttgagtaaattattgattctaacatatgtaatggatttggtgtgataattttctgatctttaactataagtgactttttattctccaccagaaaagataaatgactgagaatgtaagtctgcgctctgattaacacaatggagaaacggaaaaactatctctgttaaaaactgattcctgtcattcttctgatatcaaataagaggaaggaaaataaacttttttgtgtgtagatagaaaaacatacctnaggccaggtgcagt

SEQ ID NO: 2268 - DNA, 425 bp, Homo sapiens
  misc_feature 414: n = A,T,C or G
cccgcggtggcggccgaggtacgatttacctttacacctcaaagttttttagatgtgagcagcgctggattatggcaatttaccttataataactcaccatagttggctgttataagaataaatattgttcttctaagatttttaattagttgcttcagttactacatttttttctatttttttttttaaatagagatgaggttttgctatgttgcccaggctggtctcctggactcaagcaatctcccacttcaggctaccaaagtgctgggatttacaggcatgagccacctctcccagtctcagttattattttaataaatgagactgaacgtcctcttataaggctcactcccttgttcctactacatttgctctggttaaggatctctttaaattcttcagtttaagancatcccttttt

SEQ ID NO: 2269 - DNA, 393 bp, Homo sapiens
  misc_feature 157, 327: n = A,T,C or G
cttagggcgaattggagctccccgcggtggcggccgaggtacattggtggaacaattcagtatgatgtattttctgtggtttgaatgtattccctccaaaattccagtattgtcaatgtgatagtaataaagaatggggcgtttaagaggtgattangtctgtgaaggctcctctctctccttactggaagtaagaaccttatgaaagaggtgccacgcaacattccactagcttgctctcctgtccgtatgccatgagaaaacatgaagttcctcctctctggaggatgcagccctcaccagacaaccaaacctgctggtgccttnaatcttggactttctggagccttgaatctgggaagttcccagcttccaaagctgtgagggaaataa

SEQ ID NO: 2270 - DNA, 318 bp, Homo sapiens
  misc_feature 110: n = A,T,C or G
ccgcggtggcggccgaggtactatggggaatgtggaagtggaaagtagtgtggagttttggaaagatatttctgcctaggagagtagttgggcatgaggacaggactaanaaagagtgagtgaaggaaaaggtgtgaagggagcagaaaagtggaggggggactcgaggtttggagacttgtccattaattcctacaacagacacctgggaggactgggtggttcctgaaaaattaggtaaagcagagtaggttgcctggtattaatttaaaaatatactggcctacctgccaccatcagggttacccttggcttgga

SEQ ID NO: 2271 - DNA, 355 bp, Homo sapiens
  misc_feature 103, 320, 322: n = A,T,C or G
gcgattggagctccccgcggtggcggccgcccgggcaggtaccaaatgaagtgtgaagacaatggccatccaccactttatagagggtgtaaaaataaaccanaaatcaagggagaaagaaaagatgaaagacaaactgcaaaaaattgccaaaatgcgactttctaaaaatggagcagattctgaggctttgcatgtcttggcattccttcaggagctgaatgaaaaaatgcaacaagcagatgaagactctgagaggggttttgggagtctggaagcctcatcccttcagcatcaagctggaatggggaatgaagaangnagattttggtgcccactaggctactgctgaaag

SEQ ID NO: 2272 - DNA, 274 bp, Homo sapiens
  misc_feature 1, 91, 93: n = A,T,C or G
ncttagggcgaattggagctccccgcggtggcggcccgcccgggcagggtacgcggggcagtctttatgggaaaaagtttgtgaaaatcananaaacctgaacgtggaaaccaccagaatcagccactggaaggattatgtgaatgtaaggctagaagctattaagagctgagtatcagaagatgcctgcatttcatcatgaagaagaaaaacataatttggagatgctgaaaaagaaggggaaagaaatttttcatcgacttcatttaagtaa

SEQ ID NO: 2273 - DNA, 353 bp, Homo sapiens
ctacttagggcgaattggagctccccgcggtggcggccgcccgggcacgttacatgctccttgctagtagtcctagtctttgaaccctcagagcccaggttccaaacatgattgaagccatcttgaatccatcaaaccaacccatctgccagatgagtacgcgggtcctatattccgttcaatgtaagctctatgagaccaagaacctgggcagttttattcaccataagtattccaagccctagtggttcctggcacattttgtattcacaataaatatttgttaagtcaatgaccagatgaatggcttttaaactcaagatagtttttttttgggtttggtatttatttat

SEQ ID NO: 2274 - DNA, 469 bp, Homo sapiens
  misc_feature 2, 11, 350: n = A,T,C or G
tncttagggcnaattggagctccccgcggtggcggccgaggtacatctacctaaaggactattatgtggaataatacatactaatgaagtattacatgatttaaagactacaataaaaccaaacatgcttataacattaagaaaaacaataaagatacatgattgaaaccaagttgaaaaatagcatatgccttggaggaaatgtgctcaaattactaatgatttagtgttgtccctactttctctctctttttcctttctttttttttattatggttagctgtcacatacaactttttttttttgagatgggggtctcgctctgtcaccaggctggagtgcagtggccnccgatctcggctcactgcaacctccacatcccatggttggaaagtaattcttctgccctcagcctcccgaggtagcttgggactagaagggaaccgtgccaccatgactggctaatttt

SEQ ID NO: 2275 - DNA, 287 bp, Homo sapiens
tatcactacttagggcgaattggagctccccgcggtggcggccgaggtacgcgggggagttcagtccttaagaaggaaaattgagcaagtatttaattggttggacattgcataaaagaggtccatatccaggctaactctagaaattttattctcaaacttagttggcctctttttcttctgtcagaggaccattcttagtggcactggggaaatcttggcacccagaagaattcaactgcgctcactgcaaaaatacaatggcctacattggatttgtagaggag

SEQ ID NO: 2276 - DNA, 514 bp, Homo sapiens
  misc_feature 446: n = A,T,C or G
gcggcccgaggtactccagcctttccatgactttttggacagtggcgcttacctcctgaggatatgggtcgcctctgttgaccatctgcagcagagacacaatgggtgttcagccattaacactgggaaggccccgagagcctctgactatgtgctgcacagtgtgagccctggaacaaagccctccctttctgtctcctgcaccaatgatgatatggtctgagttcaatcaccaaacttccttagttccacttcttcatcagccaaagaaaaacaccgcagtcaatcatctctaaggtccctaagagggtggagaattccatgttccacgttattcatgggggactcacaagatctaactaaagaggatggttctctctccctcatccaatagatgaagaaagacacagaaaagcttggcagggatgggaaccttttaccctggnggtcatgtgtgtagttgatttcacaacaaggaactgaaacagtgctgcatggacaatgtacctgcccg

SEQ ID NO: 2277 - DNA, 569 bp, Homo sapiens
  misc_feature 78, 232, 436, 452, 463, 466, 480, 489, 490, 491, 502, 515,526, 531, 537: n = A,T,C or G
agggcgaattggagctccccgcggtggcggccgcccgggcaggtacttcccctttatactcttctgtatatttgattntttttttttttaagacagagtcctggctctgtcgcccaggctggagtgcagcgacatagtctcagctcactgcagcatccgtggaggctgaaacaggagaatcgcatgaatttttaaaaaatctaaacatgtaattttaaaacgggcttaagangaatgataacagttttggtcttcttttttatcaaccatgcttttattttacttgaatctcgtgccaattgctttgtaatattaaagtaggatttacacaagtggaatttagaaaagatgataatctgtcaaatctgtcaataccaattagaatgtaataaagaaattaggatagtggaggtttgagcaagtaaaggctcacccnaattcaaaggccattncttgatgcctnagnaggggaaatatttnttgaaaggnnntttttaaaaanttaaaagtccaantataaatttgnatatntcctantaaaagaaatctcaacttcatggggacaattt

SEQ ID NO: 2278 - DNA, 540 bp, Homo sapiens
  misc_feature 480: n = A,T,C or G
gactcctatagggcgaattgtagctccccgcggtggcggcccgaggtacgcgggataaaatagtatgatcaatcacaatgtccatctttagacagttggttaaataaattatctggtctttgaaaagaccgtgctgggcgcggtggttcttgcctgtaatcccagcactttgggaggctgaggcgggcagatacctgagatcgggagtttgagaccaagcctgaccaatatggagaaaccctgtctctactaagaatacaaaattagctgggcatggtggtgcatgcctgtaatcccagctacttgggaggccgaggcaggagaattgcttgaacccgggaggcagaggttgcagtgaggtgagatagcgccattgcactccagcctgggcaacaagagcaaaactctgtctcaaagaaaaaaaaaaatgatggagctccgaatgtgcttaagtgggaaagatatctattaaaatatggnggttttttaaaacacaaaaattatagaatatgggatcccgtgtgtgtgtgtgtgtgtgtg

SEQ ID NO: 2279 - DNA, 402 bp, Homo sapiens
tatagggcgaattggagctccccgcggtggcggccgaggtacaaccaatctggagcttacttaggattttctagtgcagtagttctaaaatatggtccctggatcagtagtgttagcatcccctgggattttgtgttttaacaagttctctatatgattctgatgcacactaaagcttcagaatcactgctgtagtataaactgtgatggttctcagccttccccactgctggcttaggtgtttgctttcttgggtctactaagtcagttaagttctttatctgtttcctttccagtttccaaaatttttgttgcaatcttttcctctccagttttcctcatatgtgtgaatttatatctttttttaaaaaaatctctttattgtataagagccactgcacc

SEQ ID NO: 2280 - DNA, 610 bp, Homo sapiens
  misc_feature 47, 68, 97, 136, 193, 265, 283, 308, 310, 315, 363, 369,390, 393, 405, 406, 412, 429, 435, 457, 472, 517, 552, 561,565, 587, 595, 603: n = A,T,C or G
ggcggccgcccgggcaggtacgcggggaggggaggggagagcccgancgctggatttgttgctggganacccggtgctaatgttgacaacaggctcnagattgtcctgggtcacataatgccactgagcgtaaaangccaacaagtttggaagaaaaagactctttaccaaacatcaaggaaaatgactgcantgaaaggcggacagtgagcagcatggagaggccaaatgacgatatcaagctcactgccaagaatgaggtcancaaggtccctgaagacangaagaagagactggaagatgataananaaaanaggaagacaaaggaacgcaagaaaaaagacgaataaaaggtgaaggcngaggangaatcaaagaaaaaagaagangangaaaaaaaaganncatcanaggaagagagaaagaancatgangagcaggccaaacgtcagcaangaagaaataagcttntgttcagatgaaagaaaaagaaagaattcatttcagcttcatcangaaagctttggggaaccgacatcattttaagaaanggacctttntaancaaaaacccaaaatgcttccgnacaggccnacccaganggaaaac

SEQ ID NO: 2281 - DNA, 438 bp, Homo sapiens
  misc_feature 1, 31, 33, 163, 282, 292, 299, 378: n = A,T,C or G
ncaggtacagatcctgtattgcccacccttntntattgctttgtccccgcgcgccctctgttttgcctaaatgggttccaggccatagccaccgactctcgctttgccttctggcctctcggcagtgcgcttcagcaccattgcgccaggtgacgctgctganaacagctgagtggccggcactagtgcaactggaagccaaggcccataattctcaggaatctgcactttacccaggcgaaaagcccaaggggctctccccacagcttcccaacatccgtntacagagttnttaaatnttagacttattaaccttgtagagatggagagaatcaaagaaatcacaaggtatctctgagggaaaaagaagagcaccancagtaaatcacttaagagtattgaaccagcaagccagggataggagaatggaatggaaac

SEQ ID NO: 2282 - DNA, 238 bp, Homo sapiens
  misc_feature 51, 55, 67, 70, 115, 120, 135: n = A,T,C or G
gcaatgacttcagtaagccaggcatccttggatgtctccatgataataatnattnccttaggagcanttngtgcagggttgctggttattatgggctatttgcaactaggtgtanccgcnagaagaaagacactngatcctataactgcagggtgggccgaatcaacttaccagcaccacccaaaaaggccatcccggcagattcacaaaggggacatcacattggtgcctaccataa

SEQ ID NO: 2283 - DNA, 556 bp, Homo sapiens
  misc_feature 438, 462, 537: n = A,T,C or G
ctacttagggcgaattggagctccccgcggtggcggccgccgggcaggtacaccactgtgcctgctttgaatcctttacgaagagaaaaaaaaattaaagaaagcctttagatttatccaatgtttactactgggattgcttaaagtgaggcccctccaacaccagggggttaattcctgtgattgtgaaaggggctacttccaaggcatcttcatgcaggcagccccttgggagggcacctgagagctggtagagtctgaaattagggatgtgagcctcgtggttactgagtaaggtaaaattgcatccaccattgtttgtgataccttagggaattgcttggacctggtgacgagggctcctgttcaatagtggtgttggggagagagagagcagtgattatagaccgagagagtaggagttgaggtgaggtgaangaggtgctgggggtgagaatgtcncctttccccctgggttttggatcactaattcaaggctcttctgggatgtttctctggggtgggggctgggagttnaatgagggttatttttagc

SEQ ID NO: 2284 - DNA, 633 bp, Homo sapiens
  misc_feature 388, 417, 492, 498, 509, 515, 543, 544, 549, 552, 590, 594,620, 621, 622, 623: n = A,T,C or G
ccgcggtggcggcccgaggtacgaaaaaatcaggctactaagtccactgttaatatagacgcagaccaattgttaggaacaggtccaaattggagcaccattaaccaacaatcagtgatgcagaatgaggctattgaacaagtaagggctatttgcctcagggcctggggaaaaattcaggacccaggaacagctttccctattaattcaattagacaaggctctaaagagccatatcctgactttgtggcaagattacaagatgctgctcaaaagtctattacagatgacaatgcccgaaaagttattgtagaattaatggcctatgaaaatgcaaatccagaatgtcagtcggccataaagccattaaaaggaaaagttccagcangagttgatgtaattacagaatatgtgaangcttgtgatgggattggaggagcttttccataaggcaatgcttatggcttcaagcaatggaggggggctcacttntagganggacaaggttngaacantttgggaaaaaatgttataattgggggnnaaatnggncattttgaaaaaggagtttgcccaggccttaaattaanccgnattttattaattcaagctttttaccnnnnaaaaaaataa

SEQ ID NO: 2285 - DNA, 483 bp, Homo sapiens
ttggagctccccgcggtggcggccgcccgggcaggtacgttgaaatattaggggcaggttcccccaatatctggcgcccaacgtggttttctttttcctaagtgcatgtgggaacccgattccctttggtaggtgcggagaaatgttcatcggtccagtccacagaaatgcttgttcggctccccgacgattggtgagttgtctgtgtattgtcccggggtaactatgggtcacgcagaagtctaaacattatgcttatctctgctatattaaattcctgttaaaatgggggagttcgggttcccatggaaaatatggtcaccctattcagggcagtggaagaacactgtccttggtttcctgaaaagggaacgttagatgtggaactatgggatcatgttggtgcaaaattccgagaactggtcccaacaggaaattatgttcctgtcactgtttggggtgattgggccttggtacctcggc

SEQ ID NO: 2286 - DNA, 381 bp, Homo sapiens
ctatagggcgaattggagctccccgcggtggcggccgaggtacaccatgaagtgataagtattaatcattcatttcaatatgtccaatggaccaaaaaaggggcagatgggtattaatgattcccaaaataaatatcccctgttttaaaatttggctaaagagtagctttgcattttcctggaaaagaggttggtgggaaaaaaaagataatatttgaacctgtacttaaatgggcggcatttcccaatgactgaattgtagtagaatctgttctcattggcacgacacaatcctctgtctgctggagtgagacaccatgaggggccgtgaaattcaaaaaggctgggaaccttggttgattgcggagtcagggagttatt

SEQ ID NO: 2287 - DNA, 347 bp, Homo sapiens
aggtacgcgggacacacagcacctgcacgcagatgcacacatctctagtcaaatgaggctctcagctttttgataggggcttttcgatacgtgtataaccaatactttattctcactgtagtcaaggactcattgcaattcagaaatgagaagctgatccggaactccactacagctcaaagaaattctcgaatgttctcacctattaacagttattaaaatggaagaagctggggatgaaattgtgagcaatgccatctcctacgctctatacaaagccttcagcaccagtgagcaaggcaaggataactggaatgggcagctgaagcttctgctggagtggaacc

SEQ ID NO: 2288 - DNA, 333 bp, Homo sapiens
  misc_feature 102: n = A,T,C or G
aggtactttttttttttttttttctcaagattatggtataaagttttattttaaataacatacctattaacataccaccacatgggaccaaccttatcccanaaactatattcattactgaccctaacagcaaagctcaggaacttttatcatttattttatgtagtcactcattcatttattccctcattcagcaagcattcaaccaacaaggcacatggaatttactacttatcattaactaggctggcacttgggggtgggggttacaattatggtaaaataaggtaattttctataatgattcaaaatgtagggggagcaagaaagaat

SEQ ID NO: 2289 - DNA, 298 bp, Homo sapiens
ccgggcaggtactgcttttataatttcttcagataaggtcattttaaaatttaatccagtggttttcaactaggggacaattttggtccccagggaacatttggcagggctggagacatttttggttgtcatagcttgggggagagttgctactggcatccagtgggtaggccagaggtgctgctgaacatcccatagagcatagttcctcacagtgcagggttatcctgcccaaaatgccagtggtactatggagaagagaagtgacttgtgagtcctttgccaggggtaagtgggg

SEQ ID NO: 2290 - DNA, 349 bp, Homo sapiens
ccgggcaggtacgcggggagaagaaatggcaagtgccgagaagctggcatcagaaaaacagaggggagatttgtgtggctgcagccgagggagaccaggaagatctgcatggtgggaaggacctgatgatacagaggtctgtaggccatgggaatgggtttggaattttattcaaagagctatgggaagtgactagaaggtttaaagttggggaagaggttttgtgtttctgttatatttgtgttttatacaaattactctagttgctgtgttgataggacagcagaagggtaggagcagggacaccagttaagttattgcaatggttaaggtgagaggtggtggctgg

SEQ ID NO: 2291 - DNA, 530 bp, Homo sapiens
  misc_feature 153, 503, 504, 505, 506, 507, 508, 509, 510, 511, 513, 514,515, 517, 518, 523: n = A,T,C or G
ccgcggtggcggccgaggtcgcggggtttgaccacatatctgggcaccgtggcccagccaagttgacatattaaattaacccttgtagtccctttttaaacttacacccattgcaatttaggtcgctgctatggagcaagccacagaacctgnctttaactcatttacccgggctgacccattaggcctttgagtcaccaacacctcactagagaacaagcataatgaagaagctctgctgtaattcgttaatgttaacacttttttctttaaagatgtctcatgctgagcttcgtggcacacgcctataatcccagcactttgggaggctgagatgagaggatggcttgagctcagaggttcgagaccagcctgggcagcatagtaagattccgtctctacaaaaaagaaaagaaaaaaagttgtctcataattattaaaaaccactattccagatcatggataataataagtcagaacaggtatattgtttaaaaaaaaannnnnnnnnannnannaggtnctgcccg

SEQ ID NO: 2292 - DNA, 671 bp, Homo sapiens
  misc_feature 631: n = A,T,C or G
cgaggtacattttaacagagggatataacaccattaaggctcatgggacttaattcctgtctccagggctatgtatctttcaactgccatactgaggacttttcagcccgtggtcccggatgtctggcatacccatcacttgaaaccaactgtgtgatagtgagagcactgactcctaattttcagagactgaccaaatcaacctcacgtctttgccccataatactcctttttcttaagtcctacaccactggtttccctttctttgaagggcgtctgtattttgccaaggttaactctaagcttgtgctcttaattccatcctcttgtgctttctttgagaatttcaccttcccatttctttcttaccagcttctagctcctctgcctacaaatgtgatttcttcctatcctaaaaacaacaaaacccaaataaccctcctctgactttgcactagctgagctgttctccatcttctttctttttcttcaccatctgatcttaagatatgtctgcattcatgaactgccactactctctcactctcaaatccagtgcctctactctcacaatcctctgatctttaatcctgcatctgccctgaccactttatattcaatagatctggcnaaagatttaactacaacttttcaagtgccacattaacttg

SEQ ID NO: 2293 - DNA, 352 bp, Homo sapiens
aggtaccccctgaccccttcctccgaatatacttttgtctcttgtcttttattcctgtgttcaccccactgtgttcagtccccctaggtctgtgcgggatacaagtggcgcccaaacagggacagaattgggtgctctacaccctctccttgagcagggactggcctagtgacttacctctattcagaatacggcaaaggcgttggagtctcacctccttaattaagctatacatgtttaaaaaaattattcaatgagaattgttaaagcacagtaaaggaagactttattcagggccattatgacaggtatatagacaaatgtaatgggattttgcagtggtagagggtga

SEQ ID NO: 2294 - DNA, 455 bp, Homo sapiens
cgctgcacttacaattgcaccccatcctcctacccactctgatcccagaggagagtgcttctgctgtaacctctaaggcacaagtgggtcccaaagtccttaaatatggagggatgtggggaagcagtggtgaagatgcaggccaaaggtcagcaggcaacactggtctttgttgtaggtaaccttcatctagagattcttctagttctttccagatttatcttctaaaaactaactggtatggacatattacagtcctgtaattctttcttctaggtcatattgaacattccagatacctatcattactcgatgctgttgataacagcaagatggctttgaactcagtaagtgggttaattattaccttcctggccttttctttgttcccttgtcccttctgttattcccaacattgtttggggtcagcaattgcaagggctatttgtagggaa

SEQ ID NO: 2295 - DNA, 459 bp, Homo sapiens
  misc_feature 417: n = A,T,C or G
ctatagggcgaattggagctccccgcggtggcggccgaggtacagcagaactgcatgatcaggtaagtgtgctgagctgttgatcctcctcattcctgagctgggtgtgtagagacaagagcaggagactaggggctgatgatcttttagtcacatccatttaccccagagtgctcttcaaatagcatttttatgtattccccggcatgaaaaagctggaaagcaccaagagaaggttggtgttaaacaacatgaagttttggaatctcagaaagtctgaatgagttaatttttttgagctttagcatacttatcattttataatgaggataattccttaaagcaattctgtccaatagaactttgggatgatagaaatgttctgtatctgagctgtccaatgggtgtagccactantcacatgtggcttttcagcatttaaaaaatggctagtaaggt

SEQ ID NO: 2296 - DNA, 446 bp, Homo sapiens
  misc_feature 164, 328: n = A,T,C or G
ccgcggtggcggcccgaggtacagagtgatgccaggcgttcatctccccactgagctcctgctgagtgtttgcctggggccaggtcctccttccgggaagtcattttagctggaaagaacagggtgggggcgggtggcaagggatcagagcatgagcgtttgangggcttcgtcaggggcagtgaggagcctctaaaggactctacatttaggaatgacagagtcaaacaatttaacaaagccctaaaggtccctgccaggaaagaatgagccccatgtatcaccataagcaacttcttagaaacataacccacccctgtcatcccancactttgggaggccagggagggaggattgcttgaggtcaggagctcgggatcagcctggtcaacatggtgagaccccatcttctgcaaaaaaaaaaaaaaagtcctgcccgggccggc

SEQ ID NO: 2297 - DNA, 396 bp, Homo sapiens
ccgcggtggcggcccgaggtactagttcccataaaatacacaataaataccagttcccattttcactatcactatccatacctacttcaatctattatctccacatagcagacagagtaatcttaaaaatggtaatttatagacctgtggtacggccgggcgcggtggctcacacctgtaatcccagcactttgggaggctgaggcgggcagatcacgaggtcaggagatcgagaccatcctggctaacatgatgaaaccccgtctctactaaaaatacaaaaaagtagccgggcgtggtggtgggcgcctgtagtcccagctactcggaaggctgagccaggcaatttatggctgggcacaagtggcttatacctgtaatcccagtacctgcccg

SEQ ID NO: 2298 - DNA, 512 bp, Homo sapiens
ccgcggtggcggccgggggccattgagactgccatggaagacttgaaaggtcacgtagctgagacttctggagagaccattcaaggcttctggctcttgacaaagatagaccactggaacaatgagaaggagagaattctactggtcacagacaagactctcttgatctgcaaatacgacttcatcatgctgagttgtgtgcagctgcagcggattcctctgagcgctgtctatcgcatctgcctgggcaagttcaccttccctgggatgtccctggacaagagacaaggagaaggccttaggatctactgggggagtccggaggagcagtctcttctgtcccgctggaacccatggtccactgaagttccttatgctactttcactgagcatcctatgaaatacaccagtgagaaattccttgaaatttgcaagttgtctgggttcatgtctaagcttgttccaactatccagaatgcccacaaagaattcaactggatctggaagaagga

SEQ ID NO: 2299 - DNA, 325 bp, Homo sapiens
  misc_feature 19, 53, 59, 188, 247, 253, 266, 290: n = A,T,C or G
ccgcggtggcggcccgagngtacttactaacttttagggctgtgtaagtgtantgttgnttgaagctctgtgtgtgtttctgtaaagactggtctggaaaactgaccagaggaaaacatttccttgcttttcctctgctctcacatgaaaacaacaaacacagtaagagtcaacaccaaagacttcantgacccccatatatgtggggatttccccctaccagcaagcaagcaatcaagttctgcancagacnctaactgtgtatnctccaatttaattctgacactatntgcctggaaatagcatcagatccctcaggttgagg

SEQ ID NO: 2300 - DNA, 360 bp, Homo sapiens
gactactatagggcgaaattggagctccactcgcggtgggcggcccgcccgggcaggacgcgggtgagaatggagtcaaaaaggattcaggtgtttagaggagctgcttttcattaggaccttggagagtcccctcagttttgacacccttgtttcaccacaagaaagcacccgacaccctgggttgcatacttactactcaggggctttccccccagctttcggagcactgaattattgtgagctggtgactctgcaggcctgagtggtattagggttgtggaatgttgttgcatacaccgtttatgagttaaccactatttaaatgatgctgctttttaaagttttttcaaagtacct

SEQ ID NO: 2301 - DNA, 643 bp, Homo sapiens
  misc_feature 619, 632: n = A,T,C or G
ctcctatagggcgaattggagctccccgcggtggcggcccgcccgggcaggtacgaaaaaatcaggctactaagcccactgttaatatagacgcagaccaattgttaggaacaggtccaaattggagcaccattaaccaacaatcagtgatgcagaatgaggctattgaacaagtaagggctatttgcctcagggcctggggaaaaattcaggacccaggaacagctttccctattaattcaattagacaaggctctaaagagccatatcctgactttgtggcaagattacaagatgctgctcaaaagtctattacagatgacaatgcccgaaaagttattgtagaattaatggcctatgaaaatgcaaatccagaatgtcagtcggccataaagccattaaaaggaaaagttccagcaggagttgatgtaattacagaatatgtgaaggcttgtgatgggattggaggagctatgcataaggcaatgctaatggctcaagcaatgagggggctcactctaggaggacaagttagaacattttgggaaaaaatgttataattgtggtcaaatcggtcatctgaaaaggagttgcccaggcttaaattaaacagaatatnataaattaagctntttaacagcaa

SEQ ID NO: 2302 - DNA, 514 bp, Homo sapiens
  misc_feature 361, 476: n = A,T,C or G
tatagggcgaattggagctccccgcggtggcggcccgaggtaccaaatgcggtatggggggcataggcagcactagagacatgagagttgattgtgatcacataaatcacaattacttatttgtcagacggcaggcagaggtcaggggcatggggtatggccagggaaaagagaaagttattggtccaagaagggttgcctcatgtcttggcttctggaacattgaaataggatgtaagagtgaaggacacatatgcacacacacacaaacacacatacatgcacacacatgcatgtatacacccatatacacacactcacatacctgcacttgtggggagaggggagaagcaaataatangtgagaaagattggatcatgggagagaggcttgagaagcttgaagcttttgagacatgagggagtattgaatcaacctgtcataagaaaacccaagagtcattcttccatcttgnttttttccatcaaacactagtttatgtgtaaaaaagat

SEQ ID NO: 2303 - DNA, 563 bp, Homo sapiens
  misc_feature 464, 490, 497, 510, 547, 549: n = A,T,C or G
attggagctccccgcggtggcggccgaggtacctgtcagtgttcaatatttaacaaactccagttaaacaggtaagaggtcagcagtagcttataggccttggttctattatccatgtgcccaactgcagccatcgtgggctggtgttaaaattttcctttcaattgtcatttttctaataattgcaatcagtgagaggagaagaaaaagttcaagggaatgacctgacctttcaccatcctacacaggagatgactgatgacatgggttcatacactaatgtatatcgtatattctccaaagaccctcaaaaatcacaagaagttttgaaaaattctgagatcataaactggaaacagaagctccaaatccaaggtaacaagtctgaagaaatgggcaagcagctgtgcttctcaaattgtgtcttcaactaacagcattagcatcacctgagagctcattanaaatgtaaaattcatagaaactcttntgagctnggaaagggtggancaaatctgtggtgtgccaaggactataagctggattngnggtgtaaactcaac

SEQ ID NO: 2304 - DNA, 503 bp, Homo sapiens
ccgcggtggcggcccgaggtacagttatgcagtaaagccattaaaacatcagatatcgacaatcctagccactttgaaaagcaatatgaatctagttcttctagcactcacagtgatagtagcagtgacaatgagcaagactttgtttcctccattctaccaggaaacagaccaaattcaacaaatattagaccacagctgcaccaaaaaagcataatgaaaaagaaagctggtcacaaagctaactccaaacacaaagacaaagaacagacagtagtagatgtcactgagcagttaggcgattgcaaattagatagtcaggagaaagatgctacatgtgaacttcctttacagaaagtaaatactcagagttcttcaaatagcactttgcctgaaagattaaaagcgtcagaaaattctgaaagtgaatacagtaggtcagaaataactctagtaggcataagtaagaaaagtgcagagcattttaagagaaaatttgccaa

SEQ ID NO: 2305 - DNA, 416 bp, Homo sapiens
  misc_feature 374: n = A,T,C or G
ccgcggtggcggcccgcccgggcaggtacctacacatggggagggttattgcaggggttggggagcagtgcatttaaattttgtttcttccctggatctttcacaaacaattatcggtaaggttcctccttccccttggaagcacagaaaagacactgcctatttgaaattatattatttggggttgtcttgggcttctcttacatggaggtgccaccttcattttgtagaacggtgtaagtggtttccattccagcatgaatgtggtcggtcacatggcagtggagtaaccaaattccaggtgttcctggaaacatttctaggggtttggtatgttccagggaaaatgtcaaagacatcagaactataaactnccctgtgcttgtattggaagctatggccgtgaaaatgtacct

SEQ ID NO: 2306 - DNA, 387 bp, Homo sapiens
  misc_feature 320: n = A,T,C or G
gactcactatagggcgaaattggagctccccgcggtggcggcccgcccgggcagggtacgcgggggatgtgaactcttttaaactataacatggacactttattggaaccaaactttagttttctacattaatgagaaacactggtaactttgcttcattgaaaaaataattgcttgttctctgtcagatgcacttcgtcttagtaacatggccatggggaagacgaccacaggccagatagtcaatctgctgtccaatgatgtgaacaagtttgatcaggtgacagtgttcttacacttcctgtgggcaggaccactgnaggcgatcgcagtgactgccctactctggatggagataggaatatcgagccttgctggggatggcag

SEQ ID NO: 2307 - DNA, 485 bp, Homo sapiens
  misc_feature 255, 256, 266, 269, 273, 286, 352, 357, 379, 393, 394, 404,412, 424, 438, 440, 449, 451, 456, 458: n = A,T,C or G
ctatagggcgaattggagctccccgcggtggcggccgcccgggcaggtacttgggatatattggtgaacaaaacagaaatgtctgtgccttcttggatcgtgtgttttagaattatgagaattaaatgaaaataaatattcaatatggtgccagacacatagaggtgcccacagtgtcttatctcactttcttcctgcttgccatatcttttccatcagggccaaagagaatgggaagtgggaagaaataaactnnatatttcatntgnatanctgtggagagtancaggccctgggtccctttggggaggtcatgcgaactgggcatggccttctgtcaagaattattaanaccangcatggtggctcatgcctgtanatcctagcactttnngaaggctgangcaatgangattgctttgangcccagtagtttgngnaccagcatnanccaancntgggcgaaaaccctgtctctaataaaa

SEQ ID NO: 2308 - DNA, 436 bp, Homo sapiens
ccgcggtggcggcccgcccgggcaggtaccaacaacgcacttacccactgttttaatctaggttattcttgaaagcagagcctgagacaaaggtagacacattctatttatgagtctaacacccaggagcaggaatgagagataggggagtgaactggggaaaagggaaactaagtccgagcaaaaccagatactgctcttatcaagtggtccacccctattaatggctacataatgcagaactttctcaggattcttcttaaactttatctcagaactgtctgcctcagggagaaaggagaagtatttctccatcagcagccacctcctgtgtgttgagggctgctccttttgggcattaacccactgcctccaccaccccaaccctctgggctgcaaagagctagctgacagtccagctggtacctcggccgct

SEQ ID NO: 2309 - DNA, 368 bp, Homo sapiens
  misc_feature 8, 172, 244: n = A,T,C or G
ggcgaatnggagctccccgcggtggcggccgcccgggcaggtacagacagaattaaagacctggagaaacagttcgtaaagcctgatggtgagaatagagctcgcttccttccagggaaagatctgaccgaaaaagaaatgatccaaaaattagacaagatgaatggctatnaaagaaggatcaaaaatgcaactgagaaaatgatggctcttgttgctgagctgtccatgaaacaagccctanccattgaactccaaaaggaagtcagggagaaagaagacttcatcttcacttgcaattccaggatagaaaaaggtctgccactcaataaggaaattgagaaagaatggttgaaagtccttcgaga

SEQ ID NO: 2310 - DNA, 351 bp, Homo sapiens
  misc_feature 184: n = A,T,C or G
aggtactaagaactctttgtgatcaatataaatctcttcatctcactgtatcattatgtctatatggtttccatttgttctaacagaagctgttgggatggaagccaaaaacaccctttgagacttgtattgaacagttttcatatgcaataaagataactttatgcacatgcagggaaataangagagttgaaaatggaaggaaaatatttgccaaattgtttaagtgttttaaggtgattactggtaacacagtaaagtttccaggggaaaattccatctctcaccctccacataaaaactcacagtcactgatcactgcttgccaagtttgagttcagctctattttc

SEQ ID NO: 2311 - DNA, 422 bp, Homo sapiens
  misc_feature 108, 142, 159, 162, 170, 171, 177, 178, 182, 186, 187, 188,191, 193, 203, 213, 214, 216, 244, 276, 279, 280, 284, 288,289, 290, 307, 313, 324, 329: n = A,T,C or G
ccgggcaggtacactcacacacacacacacacacagagctcttaacaactggtcctgagtagctctttgtaaattctttattgccaggagtgaaccctaaagtggctnacaagagtgccctatttttttcaattaacttcanggacaaacacactttcnaanttgagatnngttgannctgntgannnggnantgtttctaanagaatgtcanntncaagagtgtaagcagtcagctgtgcagntgatatctttgaaggccaccaaagaggacagnttnnatgnggtnnntaacattgacatacctncttatnaagaagaactnacttnaaagcagtggggtccggacaaccaaaaatgaagaggagaatgaaaaggaaaaggagctccagcttggaatatctgctgggtgcctttgaaagc

SEQ ID NO: 2312 - DNA, 458 bp, Homo sapiens
  misc_feature 3, 394, 431: n = A,T,C or G
ctncttagggcgaattggagctccccgcggtggcggccgaggtacatatttttaaatccagcagaataaatgtgaatgttttgattacccatcattaaattttttaaaaaactatccctacttcagctgtgtggaaaatattatctggcaacttcaggtgacagattaactctgttgtttgttttaaataaagtttaaaggaaataagtatctaataccattttcaactagccatgcaaaattggcttctctccccaaatcctgtatttgaaaaaataactttaacataacgtttggcattaacttatatttgctcatcataaaaaaccaaaagaaatttttatatctcaaattggtaaactttacaaaatatttaacatatgaggaagaggtntatcttacagaattatttggctatgtcataaggcagnaatgaagatggaatttttcctatcata

SEQ ID NO: 2313 - DNA, 441 bp, Homo sapiens
  misc_feature 349, 417, 424, 441: n = A,T,C or G
ccgcggtggcggccgaggtactccacacctgatcaagtgacagcgtggcgtcatgtcagccagcaaaatgtttgagtgacttttgagtaatggtggcatagaaggtagagggggttgaaggaaataataatgggaatttttttcctttcctatatattttagcatgtataatgcttcaactctctggtggaaatttggaacacaggatagtaaaatattccttttcctagagggtagtaaaagtggagtagaaagtaggagctgttagaatttccatgataaatataatttgattacatatgttggggttgggttccctctgagctgaggattttactttgagagttgnttcacaatggtatatttctttccagttttcagaagcaaatttagccttaagaatttgccctggccagncgcaagnggctcatgcttgaaaan

SEQ ID NO: 2314 - DNA, 413 bp, Homo sapiens
  misc_feature 42, 89, 101, 328, 345, 400: n = A,T,C or G
aaaaaatcatggctactaagcccactgttaatatagacgcanaccaattgttaggaacaggtccaaattggagcaccattaaccaacantcagtgatgcanaatgaggctattgaacaagtaagggctatttgcctcagggcctggggaaaaattcaggacccaggaacagctttccctattaattcaattagacaaggctctaaagagccatatcctgactttgtggcaagattacaagatgctgctcaaaagtctattacagatgacaatgcccgaaaagttattgtacgaattaatggcctatgaaaatgcgaatccagaatgtnagtcggccataaagccnttaaaaggaaaagttccagcaggagttgatgtaattacagaatatgtgaaggctngtgatgggatttg

SEQ ID NO: 2315 - DNA, 485 bp, Homo sapiens
  misc_feature 268, 273, 332, 337, 346, 430: n = A,T,C or G
attggagctccccgcggtggcggccgaggtacatctacctaaaggactattatgtggaataatacatactaatgaagtattacatgatttaaagactacaataaaaccaaacatgcttataacattaagaaaaacaataaagatacatgattgaaaccaagttgaaaaatagcatatgccttggaggaaatgtgctcaaattactaatgatttagtgttgtccctactttctctctcttttttctttctttttttttattatggttangctgncacatacaacttttttttttgagatggggtctcgctctgtcaccaggctggagtgcagnggccncgatctcgnctcactgcaacctccacatcccatgttgaagtaattcttctgccttcgcctccccgagtagctgggactagagggaacgtgccnccatggactggctaattttccggtatttttttagtagagacagagttttcaccca

SEQ ID NO: 2316 - DNA, 365 bp, Homo sapiens
  misc_feature 181, 248, 321: n = A,T,C or G
attggagctccccgcggtggcggccgaggtactattttctaacaatgaagccttcaggggaaataatggatcctagttatgtcaaagaaaacaatgagacaaaatggcaacttcacagtcttcaagtaaatattaatccctgatataaatggaaattaacatgtaattttgggggcaatanaaacaacaacaaaaacctgtgacaactctgtcctactcctttaaaaatgagctttgactctgtagtntcttaaggcacaaaacctgatagacggcatttaactggtggcctgcacctctgatttggattttaaaaaacanctattgacatttaaataaaaataaaccattttgttagagctgga

SEQ ID NO: 2317 - DNA, 266 bp, Homo sapiens
  misc_feature 97, 238, 241: n = A,T,C or G
gcccacagaactgtgagccaattcaatcccttttctttttcaattacccactctcatgtatatctttatagcagtgtgagaacagattaatacactnctcctcagaaagcattcaatttagctgtgtctaaagtatgccaggtgttctagggtgttatcttagccaatacttcttcctcttcagcaagatctattttgcctatgacaagcttgacctacatttcctaccatacttgtnagnaaccaagtagccccataacatcttg

SEQ ID NO: 2318 - DNA, 323 bp, Homo sapiens
ctacttagggcgattggagctccccgcggtggcggccgaggtacgcgggggagttcagtccttaagaaggaaaattgagcaagtatttaattggttggacattgcataaaagaggtccatatccaggctaactctagaaattttattctcaaacttagttggcctcttttttttctgtcagaggaccattcttagtggcactggggaaatcttggcacccagaagaattcaactgcgctcactgcaaaaatacaatggcctacattggatttgtagaggagaaaggagccctgtattgtgagctgtgctatgagaaattcttt

SEQ ID NO: 2319 - DNA, 459 bp, Homo sapiens
  misc_feature 333, 341, 346, 379, 383, 402, 419, 442: n = A,T,C or G
ctatagggcgattggagctccccgcggtggcggccgaggtaccaagttgtaaaattaccagggaaccgccgtgcctcaagatcgccctgttttctggcttcatcaatgactgcatgcagtgcaccaccctgtccactacgtgatgctgtaggattaagtctcacagtgggcggctgaggatacagcgccgcgtcctgtgttgctggtgaattagacgccatcgctgtgggttgctggtatggtgccgtgctatttggcacaggacacaccgcttgaggtctgtatgaacctctgaaggaggccgatactgaagctcggttggcagccggtatngataaacnaccancgggttgggtcttatttttctacccggctgatnttgnggattactggtatcttgantttgggcattgccgggnataagagacttctgtcccttttntacttgattttttcttt

SEQ ID NO: 2320 - DNA, 802 bp, Homo sapiens
  misc_feature 314, 324, 325, 333, 439, 455, 459, 466, 474, 476, 487, 496,504, 558, 560, 564, 565, 579, 581, 595, 609, 614, 643, 645,670, 672, 676, 689, 693, 700, 710, 713, 721, 726, 739, 741,743, 753, 755, 756, 758, 759, 770, 774, 778, 784, 790: n = A,T,C or G
cgaggtactgggattacaggtgtgagccaccacacccgggctctgtgatttgtttgttttttgagatggagtctcgcactgtcatccaggctggagtgcaatggtgcaatctctgctcactgcaaactccgctcctggctcaagtgattctcctgcctcagcctcccgagtagctgggattacaggcacatgccactgcgccaaactaatttttgtatttttagtagaaacggggtttcaccatgttgcctgggctggtcttgaattcctgacctcaaggtgatacttgccttgcccctcccaaaagtgcttgngttacaggcnngagccagngcgcccagcccgcctctgtgattttttaaattgtgtcactcacactaaatttaaacagcaatttttttgaaactcaattttttttggagtctttccagaaacattnaaaccttaggttttcnatangaaaatngcaattcntnttttgtatttnatttaactnaccataanttaaaaataaccacctggccattaaaccagaacttgggggaaaaactttaaacncntggnnagggtttaaaaacntnaaattgaagtgggngtgtggaagttttnccggnaaaaaaaaacccgggaatttggaggaaanancctattaaaacaatgaaaaatttangnggtntttttgggcaatnaganagggtantgcctttacnacngaataagnccccnttgaatttggggnanancttggggggngnnannttaaaaaaaancccntccnattttntgggcnccccccccccaa

SEQ ID NO: 2321 - DNA, 712 bp, Homo sapiens
  misc_feature 156, 386, 415, 450, 451, 505, 515, 562, 582, 620, 632, 636,638, 662, 683, 688, 699: n = A,T,C or G
ccgcggtggcgggccgaggtcgcggggaatgccagatgatctatcattgtctcactttgcccccagataagaccatctagttgcagaaaaataagctcagagcttccactgattctacattatggatatgtgccgcgaagcaagcacaaagccctnttttacacatgcctagtgatgcttcatggacaaggcttggctctgttgagtccagctaacctacctgagattctgagatttctcttcaatggcttcctgtgagctagagtttgaaaatatcttaaaatcttgagctagagatggaagtagcttggacgatttttattatcatgtaaatcgggtcactcaaggggccaaccacagctgggagcccctgctcaggggaaggntcatatgggactttctactgccccaaggntctatacagggatataaaggtgcctcacagtatannatctggtagccaagtaagaagaaaccaaccctgatctctttctgccaccccctntgaccctttnggaacctcctctgacccctttagggacaagcctacctaaatatctgnctagaaaaaaagacccaacnaccggccttaaaaggatcttttaccattgaagggcttnacctaattcttnggtnangaatgtggggttccacattaaggntctgaaaaattgggggggaangggcnaaattggctcnattttgggggggg

SEQ ID NO: 2322 - DNA, 680 bp, Homo sapiens
  misc_feature 480, 486, 495, 541, 545, 549, 568, 589, 602, 625, 628, 640,642, 643, 652, 659, 661: n = A,T,C or G
cgcccgggcaggtacgcgggacacacacacacacagcacctgcacgcagatgcacacatctctagtcaaatgaggctctcagctttttgataggggctttttgatacgtgtataaccaatactttattctcactgtagcaaggactcattgcaattcagaaatgagaagctgatccggaactccactacagctcaaagaaattctcgaatgttctcacctattaacagttattaaaatggaagaagctggggatgaaattgtgagcaatgccatctcctacgctctatacaaagccttcagcaccagtgagcaagacaaggataactggaatgggcagctgaagcttctgctggagtggaaccagctggacttagccaatgatgagattttcaccaatgaccgccgatgggagtctgctgaccttcaagaaagtcatgtttacggctctcataaaggacagacccaagtttgcccgcctntttctngagaatggnttggacctaccgaaggttctcacccatgatgtccttcactgaactntttnttcnaccactttagccgcttggngtaccctcgggccggttttanaactagtgggatncccccgggctgcagggaaattcnatnttaagcttattngnntacccggcnaacctcnanggggggggccccgggaccc

SEQ ID NO: 2323 - DNA, 788 bp, Homo sapiens
  misc_feature 481, 576, 618, 622, 655, 678, 680, 707, 733, 737, 746, 752,758, 764, 782: n = A,T,C or G
cgccgggcaggcacagtggtgcgatctcagctcactgcaagctccgcctcctgggttcacgccattctcctgcctcagcctcccgagtagctgggactacaggcatctgccaccacgcctggctaattttttttgtattttagagagacgggatttcactgtattagccaggatggtctcaatctcctgacctcatgatccacctgccttggcctcccaaagtgctgggattacaggcatgagccactgcgcccagccgagtcattttttaatactactgcatgtgagttaacacaatcattcccaaattgaagttttagatgggccctcaaaatttttaggatatggttttcctacaggtttatattgaaagtatggggtatctcctattactcctctttttatttgtcttaaaggagaaagggagaggccagagaccaaatgtccccatttccctatagctaatctctctggaagacangcagcccagacttgagcttctagatggatacaaccaggtgcatgtccaaaggcacaaaggagggtatttattacccatagtaacattaaatgcantgcccttctctgggcttgaccgggcaaacgggtatctgtagntccnggcattcacacccctattcgtagtatagaattntggcgggaggcattccattccangngagaagggcccaataaagtgggagggnaaaaagggccccatttaaaagccccncccnaaatttttngggggnaaaaanttttanaatttttttttttttttngggggg

SEQ ID NO: 2324 - DNA, 697 bp, Homo sapiens
  misc_feature 484, 496, 521, 535, 614, 618, 639, 643, 645, 652, 654, 673,680, 681, 682: n = A,T,C or G
ccgcggtggcggccgaggtcgcggggagaaaaagggtggggagtgccctttcttgaaggaatcccttaagtgcacgtctcccgttttcttttcacatcaatgcagagtccctctgtgaatttacaacacccaacacccatgagttcagtccttaaggaaaattgagcaagtatttaattggttggacattgcataaaagaggtccatatccaggctaactctagaaattttattctcaaacttagttggcctctttttcttctgtcagaggaccattcttagtggcactggggaaatcttggcacccagaagaattcaactgcgctcactgcaaaaatcaatggcctacattggatttgtagaggagaaaggagccctgtattgtgagctgtgctatgagaaattctttgcccctgaatgtggtcgatgccaaaggaagatccttggagaaagtcatcaatgcgttgaaacaaacttggcatgnttcctgttttgngtgtggtagcctggtggaaagcccnattcggaacaatgnttttcacttgggaggatggtgaaccctcttgtgagactgattattatgcccttttgggaacctgccccggcgggcgttntaanacttagtgggaaccccccggnttgnanggaattngnatatcaaagcttattgganaccggtnnnccctttagggggggg

SEQ ID NO: 2325 - DNA, 575 bp, Homo sapiens
ccgcggtggcggcccgcccgggcaggtacaaagtccctgaggcaaaagcatgcttgctgtgttctaggaaaagcaaggaagacagcatgtctatagcagtgggaggtggaaggataataaacagtaggtgaggttagaggggaccaaatatgtattttccatccagaggttcccaaccttggctgcacattagatttattctaaggagcttttaaaaaataccaatgactgggtcccagcctagagtgattaaatcagaatctctggaggtagacttgagaatctgatgtttgcaagtttcctaggcaagtcaaggctgaggaagactgctgcaggccattgtaagagccaggccgttgatctcattcaacctttccctcagctcttctagagacaagccagcattctcttatggcacaaatacagcctttcaccctcacagaaagacacaggacaacaaattcaataaattaattcactggcatggatgatttttcttcagactaattggttccagtttgataggagacaattaaaggcttggaaggcactggattccctgatgatgaaatggg

SEQ ID NO: 2326 - DNA, 457 bp, Homo sapiens
cttagggcgaattggagctccccgcggtggcggccgaggtaccgactcctcagaaactggcatgccaaatcaaaatgggtctggttcaatcctccctaatggcaatgtaaacccctctaactaatcccacttctcctaattatctttttctccttacgaacctaaaaatctcaccatttctattagcctgaaaataacatccctctgttcttctcttcctccttcagcactggatctcacttacaataggttttatttaataattatcttccttacactttctgtctcaccagtttccccttaaactgatttacctgctacacaaaattattcttattgggcctatgtgccttttcctccacttattcgacctctcacctggatggatgctcctgcagaaatctatactaacgatagtgtgtggatgcctggaactacagatgaccgttgcaccgct

SEQ ID NO: 2327 - DNA, 449 bp, Homo sapiens
cttagggcgaattggagctccccgcggtggcggccgaggtacgcggggagaagaaatagcaagtgccgagaagctggcatcagaaaaacagaggggagatttgtgtggctgcagccgagggagaccaggaagatctgcatggtgggaaggacctgatgatacagaggtctgtaggccatgggaatgggtttggaattttattcaaagagctatgggaagtgactagaaggtttaaagttggggaagaggttttgtgtttctgttatatttgtgttttatacaaattactctggttgctgtgttgataggacagcagaagggtaggagcagggacaccagttaagttattgcaatggttaaggtgagaggtggtggctgggcctaggcctttttggagtgaacaagctatttgcttggcttccatgatccttctccctccactggaatgg

SEQ ID NO: 2328 - DNA, 404 bp, Homo sapiens
  misc_feature 378: n = A,T,C or G
aggtaccagttgtaaaattaccaggaaccgccatgcctcaagatcgccctgttttctggcttcatcaatgactgcatgcagtgcaccaccctgtccactacgtgatgctgtaggattaagtctcacagtaggcggctgaggatacagcgccgcgtcctgtgttgctggtgaattagacgccatcgctgtgggttgctggtatggtgccgtgctatttggcacaggacacaccgcttgaggtctgtatgaacctctgaaggaggccgatactgaagctcggttggcagccggtattgataaactaccagcggttgggtcttattttctaccggctgatattgtggatactgtatctgagttggcattgcccgggatagnagacttcttgtccctttctacttgat

SEQ ID NO: 2329 - DNA, 421 bp, Homo sapiens
  misc_feature 389: n = A,T,C or G
ccgcggtggcggccgaggtaccgcacacaattgtatgcgctgcactttcatctgactggaagcacagtgggcttacaccagcatcaacacaaacacgtgagcagcgccttgcactacaacagacacgatatccctaggggacagcactgttttcagccccattataatctcatgggactactgttacagatgaggtccaccattgaccaaaacatgtggagcacggcaattaattctggatttggatggggacgcaaaataagcacagctctggcaggtctaatcaagattaagagagaaaagcaactaaaacatctgagaaaacagatacagagggcataacaccacacagaaaatactacatacaactgagctataatttttaattngacttgctggaaattactaaattactaaaatt

SEQ ID NO: 2330 - DNA, 443 bp, Homo sapiens
cttagggcgaattggagctccccgcggtggcggccgcccgggcaggtacattatttctccatatgtctgtcccctctgctccaagactgcaggggagagtcttgcacatcatctttgtaaaaacagtctttgttttactcagaaaatttgtattgagtcctgctacatacatgctaggcattagggtctaaaaagaatgaaaataaagcatctcagggatggcttttcagaacacatgcccaagcagagacttaaatattgaggctggccagattaaaaggggtagagggcaggaaagggtgacagcatgcccggcagcagcaagagcgggagcgaggcctgaaagaatgaaagtatttgcctacaatagaaggatgagtgagtagggcactaccagcagctcagcaatgccagagaaagggcacacagggaaaaggggctaa

SEQ ID NO: 2331 - DNA, 418 bp, Homo sapiens
ccgcggtggcggccgcccgggcaggtacttttttttttttttttttttttttggtagagatagggtttcaccatgttggccaggctggtcttgaactcctgggctcaagtgatccacctgccttggcctcccaaagtgctgggattacaggtgtgagccaccacacccagcccaagttcaactttttttttcattctgtttgctgcttgtgtttcttctgctgtgaacactctctgttcatgtcctttgtccattgttctatgggggtgttaacactgttttcttattgatctacaaccacagatattaaggcatttgtttgtcatactttttgcaaatgcttttctcatttgctatttgccttttaactgtacagaaaaggtgaatctgtgttctgtatattctgcctaaggcaaaa

SEQ ID NO: 2332 - DNA, 442 bp, Homo sapiens
  misc_feature 418: n = A,T,C or G
cactacttagggcgaattggagctccccgcggtggcggccgcccgggcaggtacgttgaaatattagggggcaggttcccccaatatctggcgcccaacgtggttttctttttcctaagtgcatgtgggaacccgattccctttggtaggtgcggagaaatgttcatcggtccagtccacagaaatgcttgtttggctccccgacgattggtgagttgtctgtgtattgtccggggtaactatgggtcacgcagagtctaaacattatgcttatctctgctatattaaattcctgttaaaatggggggagttcgggttcccatggaaaatatggtcaccctattcagggcagtggaagaacactgtccttggtttcctgaaaagggaacgttagatgtggaactattgggatcatggntggtgcaaaattcccgagaaactg

SEQ ID NO: 2333 - DNA, 415 bp, Homo sapiens
  misc_feature 375: n = A,T,C or G
ccgcggtggcggccgaggtacttaatcctggttggtttacccattctaaattatttatgtgagatagctatctatttggaaaaaagtaaagtgaaagtcttacctcaatccacactcaaaaatagtttactatatgacagatctatggcaggcagatttgatggctcaatgaactccaccctcccagtgttcacacctttatgtagttcccacttacagggagccaaaggtccgtgggacgtgaccaactcagcattccactggaggctatatgatcaaacagcaaactgtttatcatgaatgcaggatgtgagcaaactcaccattgctcctgccgacaggaaggttttctggaggcaatcactccctggtgcntgaggttatctactggcaacatttagagaatgtagtcttg

SEQ ID NO: 2334 - DNA, 430 bp, Homo sapiens
  misc_feature 90, 145, 159, 269, 383, 423: n = A,T,C or G
ccgcggtggcggccgaggtacatctctagatgatcacgaatgtcaaatatcacactacactgtgatatggggattccccttgggggtttncatgtgtatagggtgcctgcagctacactaaacatcttaaagctaccacaatgtncacttcatattttngctttttataaggctttcttggtctcctcctatgttcccatcattttcttgctttgaatctgtaagaatcgagttgaatcttctccattttaaattttccataggctganaaactgtttagccaagtttggataaaattgtatccaaagtaagagtatacaagctatgggcaagtccaaaatcaagctgttcacaggaccatgttctctctaaaggttctaggnagagaatccctcattttccttccagcttctgggtggctgntggcatt

SEQ ID NO: 2335 - DNA, 411 bp, Homo sapiens
  misc_feature 396: n = A,T,C or G
cttagggcgaattggagctccccgcggtggcggccgcccgggcaggtacattattcctccacatgtctgtcccctctgctccaagactgcaggggagagtcttgcacatcatctttgtaaaaacagtctttgttttactcagaaatattttattgagtcctgctaaatacatgctagtcatttagggtttaaaaagaattaaaataaagcctgtcagagatggcttttctagaacacatgcccaagcagagacttaaatattgagactagccagattaaaaggggtagagggcaggaaagggtgacggcatgccacgcagcagcaagagcgggagcgaggcctgaaagagtgaaagtatttgcctacaatagaaggatgagtgagtaggggcattncccagcagcttcaag

SEQ ID NO: 2336 - DNA, 332 bp, Homo sapiens
  misc_feature 1, 7, 16, 21, 25, 55, 67, 75, 80, 117, 132, 155, 169, 172,187, 190, 223, 250, 255, 259, 262, 263, 267, 274, 313, 318,319, 321: n = A,T,C or G
nccggtnttgcacggnggctnaaancagccacagcgcgctccccagcccgccagnctatatcaaggntgaccaanaaccncacccacagcaccacaaacaaaaacaaactatgtganatccttggaacatgncaggcatacatatatatccttcntgccagagaagctnttncctgacacggaaaantanaaagacgtaaagatttgaaaaagttgactaacnaactccatgcaaagaagggacacatangagantcancannacangagacancaaatactaaaagtgtaattcgaatacaagagtctaganaaatnnangaaatgcaaga

SEQ ID NO: 2337 - DNA, 283 bp, Homo sapiens
  misc_feature 48, 77, 81, 94, 98, 107, 168, 215, 228, 230, 260: n = A,T,C or G
ccgggcaggtacttttttttttttttttttttcctaattgcctttctnctttaccttccctggagttccacctttgnaatngttagagaaaatncctntgggccttnaggatagtcatcatcaaggatttcaacatgcagacttttcctcatctcccctgcttcaaanaggagctcccctgctgcaggaacaaaatccaagcctgcttccgctgncccgctcatcgtntngtggacgcggggacacttcaggtgcccagngtccacactgactagtggtgacg

SEQ ID NO: 2338 - DNA, 353 bp, Homo sapiens
aggtacttaatcctggttggtttacccattctaaattatttatgtgagatagctatctatttggaaaaaagtaaagtgaaagtcttacctcaatccacactcaaaaatagtttactatatgacagatctatggcaggcagatttgatggctcaatgaactccaccctcccagtgttcacacctttatgtagttcccacttacagggagccaaaggtccgtgggacgtgaccaactcagcattccactggaggctatatgatcaaacagcaaactgtttatcatgaatgcaggatgtgagcaaactcaccattgctcctgccgacagaaggttttctggaggcaatcactccct

SEQ ID NO: 2339 - DNA, 313 bp, Homo sapiens
aggtacttaatcctggttggtttacccattctaaattatttatgtgagatagctatctatttggaaaaaagtaaagtgaaagtcttacctcaatccacactcaaaaatagtttactatatgacagatctatggcaggcagatttgatggctcaatgaactccaccctcccagtgctcacacctttatgtagttcccacttacagggagccaaaggtccgtgggacgtgaccaactcagcattccactggaggctatatgatcaaacagcaaactgtttatcatgaatgcaggatgtgagcaaactcaccattg

SEQ ID NO: 2340 - DNA, 305 bp, Homo sapiens
  misc_feature 208: n = A,T,C or G
ccgggcaggtacaaccaatctggagcttacttaggattttctagtgcagtagttctaaaatatggtccctggatcagtagtgttagcatcccctgggattttgtgttttaacaagttctctatatgattctgatgcacactaaagcttcagaatcactgctgtagtataaactgtgatggttctcagccttccccactgctggcttangtgtttgctttcttggggtctactaagtcagttagttctttatctgtttcctttccagtttccaaaatttttgttgctatcttttcctctccagttt

SEQ ID NO: 2341 - DNA, 339 bp, Homo sapiens
  misc_feature 270: n = A,T,C or G
ccgggcaggtacatctctagatgatcacgaatgtcaaatatcacactacactgtgatatggggattccccttgggggttttcatgtgtatagggtgcctgcagctacactaaacatcttaaagctaccacaatgttcacttcatatttttgctttttataggctttcttggtctcctcctatgttcccatcattttcttgctttgaatctgtaagaatcgagttgaatcttctccattttaaattttccataggctgagaaactgtttanccaagtttggataaaattgtatccaaagtaagaagtatacaagctatggggcaagtccaaaatcaagct

SEQ ID NO: 2342 - DNA, 228 bp, Homo sapiens
  misc_feature 157, 160, 180: n = A,T,C or G
ctatagggcgaattggagctccccgcggtggcggccgaggtacatctctagatgatcacgaatgtcaaatatcacactacactgtgatatggggattccccttgggggttttcatgtgtatagggtgcctgcagctacactaaacatcttaaagctnccncaatgttcacttcaatattnttgctttttataggctttcttggtctcctcctatgttcccatcatttt

SEQ ID NO: 2343 - DNA, 422 bp, Homo sapiens
  misc_feature 410: n = A,T,C or G
tattactactatagggcgaattgtagctccccgcggtggcggccgcccgggcaggtacaaaggaatttgagcccaaggggtctgcctcctgaggctggctctcagccaggagacctgtgcttctcaaacgggagcgattgcaccccccggggacatgtgattgtgtcaggaaacatcttccatttgtcacagcttggtcgggtatgggggaatgctactgtcatctcgcgggcagaagctggggatgctgctaatcaccatacaacgcacagggcaaagaattatgcagcccagttccgagcctgagaagccgcatatcacccaacatggcctctctgtaatgccttttaaataaccagctcttaagccctcaagtgagcagaactgtattgaaagttgccacggcacgnactgaagaggtg

SEQ ID NO: 2344 - DNA, 490 bp, Homo sapiens
  misc_feature 88, 157, 170, 172, 173, 184, 211, 217, 221, 263, 277, 282,287, 306, 312, 322, 338, 346, 348, 409, 453, 455, 461, 478: n = A,T,C or G
cggggtacgcggggggtcttgttaagtggaaactgctgctttagagtttgtttggaaggtccgggtgactcatcccaacatttacatncttaattgttaaagcgctgcctccgagcgcacgcatcctgagaacctgagccttttggttaagaccggngctctattaaagntnnaaaagataaanaactctccagatgtcttcccagttaantgtctncaangttttttatccccagtgccaccaaaggggaaacacccaatgnggcttttcccccgncggancaggntttttccaaatgaactctngaaagngccattttancttggaaaagggaagncttgttgntntaaaagatttttttcaattaaaccaatacctggctttaattccggaagggtaaaaaaaccnttggtaaaaggaagggtggggccttttttccttaaaccctcttngnttccgnaaaaaaaaaccccaagnttttggaaggaa

SEQ ID NO: 2345 - DNA, 424 bp, Homo sapiens
  misc_feature 1, 348, 363, 373, 388: n = A,T,C or G
ncttagggcgaattggagctccccgcggtggcggccgcccgggcaggtacttttagcgtgtgctcatggttctttaagggccacgatgccggctctttaaactttttcacaactttcaccaccctccctttattaataaagtcttcaattttttccttctgattataaaaatataactaccgtttggggagaattaaactgttactgaaatatttaaagaaaaatgtttcttaatgagtcatattttagcatatttcctttcagtcctttttttcaggactactcttaagggaagccattgagaaatggaagaggcccatattttgtttaaagaaataaaaaatgtgngccggacaccaagtngacctcacgncctgttaatcccagncaccttttgggggagggcttgagggtggggccggga

SEQ ID NO: 2346 - DNA, 389 bp, Homo sapiens
  misc_feature 349, 366: n = A,T,C or G
ctatagggcgaattggagctccccgcggtggcggccgcccgggcaggtaccgaggtcattttgcttcctatagactgccaccttttggcaaaagctgttctaactccatctcagcatttacaattccatacctggtggtcagaggaggcccgcctgcaggttcagctaaaatcgggctgatggcattccaattactcaggctcagctcacaggctccgataattactctgatactactgctcatttaggctttgatgctctcaccacggaacaagtaacaaaggtgtgtatgagagcttgggataaattaccgcaccccaggccaagcttctgtttcttttactattgntaaacagggtcacaatngaaattatatctttgattttttt

SEQ ID NO: 2347 - DNA, 433 bp, Homo sapiens
  misc_feature 2: n = A,T,C or G
cnctacttagggcgaattggagctccccgcggtggcggccgaggtacgaaaaaatcaggctactaagcccactgttaatatagacgcagaccaattgttaggaacaggtccaaattggagcaccattaaccaacaatcagtggtgcagaatgaggctattgaacaagtaagggctatttgcctcagggcctggggaaaaattcaggacccaggaacagctttccctattaattcaattagacaaggctctaaagagccatatcccgactttgtggcaagattacaagatgctgctcaaaagtctattacagatgacaatgcccgaaaagttattgtagaattaatggcctattgaaaatgcaaatccagaatgtcagttcggtcataaagccattaaaaggaaaagttccagcagggaggttggatgtaatta

SEQ ID NO: 2348 - DNA, 387 bp, Homo sapiens
ctatagggcgaattggagctccccgcggtggcggccgaggtaccaatgtgattgaagcaagggaaattgctatgggatatctgaccaactggatattctgctggaagagcagaatgcacttcaaagactagccaataaaactctcatgtaagatatgtttttctttttgtttctatttaactaatgaatagaacctcagtgatttaaggaaaggcaggcccatgatatggaaagagaaggggatgatgatgatattctggaatggtcgtgcaaggcttcaggaggaagtgagagtggtgattgaatcatataactcctgaataaatatctggaataaacatctccagaataaaacatcttggagggattctcagtatacttagaata

SEQ ID NO: 2349 - DNA, 420 bp, Homo sapiens
  misc_feature 4, 358, 390, 398, 418: n = A,T,C or G
actncttagggcgaattggagctccccgcggtggcggccgcccgggcaggtacgcggggacatcaatgcagagtccctctgtgaatttacaacacccaacacccatgagttcagtccttaagaaggaaaattgagcaagtatttaattggttggacattgcataaaagaggtccatatccaggctaactctagaaattttattctcaaacttagttggcctctttttcttctgtcagaggaccattcttagtggcactggggaaatcttggcacccagaagaattcaactgcgctcactgcaaaaatacaatggcctacattggatttgtagaggagaaaggagccctgtattgtgangctgtggctatgagaaaattctttgcccctgnaatgtggntcggatgcccaaagggaagnat

SEQ ID NO: 2350 - DNA, 433 bp, Homo sapiens
ctccttagggcgaattggagctccccgcggtggcggccgaggtacattattcctccacgtctgtcccctctgctccaagactgcaggggagagtcttgcacatcatctttgtaaaaacagtctttgttttactcagaaatattttattgagtcctgctaaatacatgctaggcattagggtttaaaaagaattaaaataaagcatgtcagagatggcttttctagaacacatgcccaagcagagacttaaatattgagactagccagattaaaaggtgtagagggcaggaaagggtgacggcatgccacgcagcagcaagagcgggagccgaggcctgaaagagtgaaaatatttgcctacaatagaaagggatgagtgaagtaggggcattgccagcagctcagtaatgcccagaagaaaagggcaccgcag

SEQ ID NO: 2351 - DNA, 418 bp, Homo sapiens
  misc_feature 391, 394, 401: n = A,T,C or G
ctacttagggcgaattggagctccccgcggtggcggccgaggtacgttgaaatattaggggcaggttcccccaatatctggcgcccaacgtggttttctttttcctaagtgcatgtgggaacccgattccctttggtaggtgcggagaaatgttcatcggtccagtccacagaaatgcttgttcggctccccgacgattggtgagttgtctgtgtattgtccggggtaactatgggtcacgcagagtctaaacattatgcttatctctgctatattaaattcctgttaaaatgggggagttcgggtacccatggaaaatatggtcaccctattcagggcagtgggaagaaacactgtcctttggttttcctgaaaaggggaacgttagatntgngaactantgggatcattgttggtg

SEQ ID NO: 2352 - DNA, 380 bp, Homo sapiens
  misc_feature 300, 330, 331, 336, 348, 366: n = A,T,C or G
cgcccgggcaggtacttttttttttatttgtttgttttttaagaaagactcaaaaggaaaaaaaaaaaaagaaactatagttattttctcatgatataaaaagattctgtagttgtatatacatttgaactttttgtaagacatctcctacccccctaaaattggaagtcatttattaagactttgtgttctgtaagaggattggaaatgaataattaagaacattaaagaggaaagcagggggtggtgggaaagtgtggtcttgagggggtaataaacctcctacaggccacacacacncaagaaaaaaaaaagggcaataaagttgtnncccantaacataaaggnggggggggataagggttngggggtaagggttt

SEQ ID NO: 2353 - DNA, 432 bp, Homo sapiens
  misc_feature 410: n = A,T,C or G
ttagggcgaattggagctccccgcggtggcggccgaggtacatggtttgccaaccctgtattatgtttatagcatttgttttacaaaatatacctgattctgaaaaaatgaaaaatggttactataggctagatagtaggtagttaagtcctataactactagtaggtagttataggacttaattaacagatagatatgatgtgacaattcagtttaagtgcaactttcagtttctatcttaactataacttgagagattaatttagaattacaaatgtgtgtatatatatatatgagcatatgtatacataacatatttacacacaaggcacacatactatgaagcaccctgcagtttgtagggccatttttacatgccgaatgttattgggaacagattaggccattnacggggaaagaaaattttttgc

SEQ ID NO: 2354 - DNA, 376 bp, Homo sapiens
  misc_feature 351: n = A,T,C or G
ccgggcaggtacttagttttaattgaggaaagctccttaaacacaggatctcagtgaatttgtcttcatccgtgccccatctgttctcaccagctttatagagaatctattcacaagagaatgatattagagacacaattattttcttttttgagaggtgacatgagaagaatcggagttgtatttcagaggtcagtgccatcatctattatctaaatctctcactttcagaagactagaaatcaaaaattgggctgtcaggagccaaggagaatgataactaccactggggcaggcaaaaagttagggttccgatccccaagcttcaggcttctctttcaaacagggaanaaaaaaaaaagaaaaagtcccctgt

SEQ ID NO: 2355 - DNA, 397 bp, Homo sapiens
  misc_feature 1, 8, 9, 12, 16, 22, 31, 36: n = A,T,C or G
ncgggccnnggncccnaccagnccatggctnttgcnactcacctgggcagctgtgtggctgcgcacctgactcactctttctagagggtgccttgaacagcatcagcgtggcccggcgttccctacaaatagcccttgcaattgctgaccccaaacaatgttgggaataacagaagggacaagggaacaaagaaaaggccaggaaggtaataattaaccacttactgagttcaaagccatcttgctgttatcaacagcatcgagtaatgataggtatctggaatgttcaatatgacctagaagaaagaattgcaggactgtaatatttccataccagttagtttttagaagataaatctggaaagaactagaaagaaatctctagatgaaggttacc

SEQ ID NO: 2356 - DNA, 362 bp, Homo sapiens
  misc_feature 357: n = A,T,C or G
aggtacgcggggaagggtggggaagtgccctttcttgaaggaatcccttaagtgcacgtctcccgttttcttttcacatcaatgcagagtccctctgtgaatttacaacacccaacacccatgagttcagtccttaagaaggaaaattgagcaagtatttaattggttggacattgcataaaagaggtccatatccaggctaactctagaaattttattctcaaacttagttggcctctttttcttctgtcagaggaccattcttagtggcactggggaaatcttggcacccagaagaattcaactgcgctcactgcaaaaatacaatggcctacattgggatttgtagcagggagnaaagg

SEQ ID NO: 2357 - DNA, 416 bp, Homo sapiens
  misc_feature 298: n = A,T,C or G
ccgcggtggcggccgaggtacacaattaccttaacttcaaataaagtgttcttttctccatactcttctattcccttaacaatccctgttctcaaaggcctttgtgttttattttctgctttataacaaaacaaaaaaacaaacacccaccgtcctatgacacaggtgtttttggaatccatgtcaatttttgtagttagtatatgctggttaaaccacatagcatatcccccaaaaagccaggaggcaagcaaaaacttaatttgatgcccttcaagtttcgggaaggtcccatttntttttattaaccaaaaggataagatgaaggctcagcatgggctatggctgtgattagataaacttttggatatttttcattttcccttaccgagctgctgcttctaaggctggaactc

SEQ ID NO: 2358 - DNA, 232 bp, Homo sapiens
ggtggcggccgaggtacagatctcatcaggtatgagggcagtctctgacgcgaacgtctcttcctcgtggtttttattgtcagtattcacacgaagtttaagtctcctagtgggcacccagacgggattgacgatctcctggtaaaacacaaacatacccctcttccccaccgtttataattgtttccaggttcccaggtattggtttgtggagttttttccatgacactgg

SEQ ID NO: 2359 - DNA, 428 bp, Homo sapiens
  misc_feature 3, 244, 304, 344, 346, 347, 370, 405: n = A,T,C or G
ctncttagggcgaattggagctccccgcggtggcggccgaggtacttgtagtgaaaaaatatacatttttactttcaaggttaaaatagaccatcagctcattatctctcttagccaatagctatgaagactaaaatggctcttcttgcttctggctcacttgaacatcttatttgtctggaagacaaaaaggatagcagtgctaaagaaaagggtatacccggttcccaagataggtgcggtntgaggttctcgcacaaggtgacttaaaacaaaaataacacaactcagttgatccaatctncacacaatggggttgcataatcaactgttccagccccagnannaagagcctcccttgaaaggagcntttagggatctggccccctgttgtttcaacaaganggccttcagggatgggaactggg

SEQ ID NO: 2360 - DNA, 436 bp, Homo sapiens
ctacttagggcgaattggagctccccgcggtgggcgggcccgcccgggcagggtaccgcggggacatcaatgcagagtccctctgtgaatttacaacacccaacacccatgagttcagtccttaagaaggaaaattgagcaagtatttaattggttggacattgcataaaagaggtccatatccaggctaactctagaaattttattctcaaacttagttggcctctttttcttctgtcagaggaccattcttagtggcactggggaaatcttggcacccagaagaattcaactgcgctcactgcaaaaatacaatggcctacattggatttgtagaggagaaaggagccctgtattgtgagctgtgctatgagaaattctttgcccctggaatgtggtccgatgcccaaagggaagatccttggagaagtcatca

SEQ ID NO: 2361 - DNA, 434 bp, Homo sapiens
  misc_feature 388, 395, 399: n = A,T,C or G
acttagggcgaattggagctccccgcggtggcggccgcccgggcaggtacgcggggaagacacctgtgatttgatgtgagccagtcacagaggaagccatttccagagaggaacaaccgtgtagactgctttcctgggagtcaagttaaaacttctctcctgtgaccttgtcacccggcagtggaaagttacccttggctgcagccacgacttccgcatactcttcagaacttgctctgcccttgagttttccagctttcctttaatgcactaaacctttaatattgtattctcctaaatgagacgtctcgcatttgagcagggagagtcccgtattctcagagtaaaagttgtttctggaaattgatctcgccaaaaaggaccattnttttggnagcncagttgaatcccgtatgttgaaaactttcattgta

SEQ ID NO: 2362 - DNA, 407 bp, Homo sapiens
  misc_feature 371, 404: n = A,T,C or G
ggcgattggagctccccgcggtggcggccgccgggcaggtacatctctagatgatcacgaatgtcaaatatcacactacactgtgatatggggattccccttgggggttttcatgtgtatagggtgcctgcagctacactaaacatcttaaagctaccacaatgttcaccttcatatttttgctttttataggctttcttggtctcctcctatgttcccatcattttcttgctttgaatctgtaagaatcgagttgaatcttctccattttaaattttccataggctgagaaactgtttagccaagtttggataaaattgtatccaaagtaaagagtatacaagctatgggccaaagtccaaaaatcaagnctgtttcacagggacccatgttctctctaaagngtt

SEQ ID NO: 2363 - DNA, 441 bp, Homo sapiens
  misc_feature 375, 407, 408, 430: n = A,T,C or G
ctatagggcgaattggagctccccgcggtggcggccgcccgggcaggtacgcggggctttcttgaaggaatcccttaagtgcacgtctcccgttttcttttcacatcaatgcagagtccctctgtgaatttacaacacccaacacccatgagttcagtccttaagaaggaaaattgagcaagtatttaattggttggacattgcataaaagaggtccatatccaggctaactctagaaattttattctcaaacttagttggcctcttttttttctgtcagaggaccattcttagtggcactggggaaatcttggcacccagaagaattcaactgcgcctcactggcaaaaatacaatggcctacatttggatttngtagaggagaaagggagccccctggtaattgnngaagcctggtgcctattgaaanaaaattctttt

SEQ ID NO: 2364 - DNA, 449 bp, Homo sapiens
  misc_feature 24, 103, 153, 240: n = A,T,C or G
ctacttagggcgaattggagctcnccgcggtggcggccgcccgggcaggtaccgcctgcagagccataatccaaatatatcttttttctttgtaaattactgnctcaggtattcctttatataatgcaaaaatagcctaacataacacgcatntcaataattgccccattgtcacatttcaaaaataccctgtgaaggttgttatacagatattggctttctgggttgttttgttttganaggacagctaacatttgattattaaaaaaaaaaatcctagcacaatggggcttgggcattgtttattgttttctatacaagtcataaaccattattatatgtgctcatgttcctttattattagaaaatccatataaaaaaaaggaatttttgttttaactcttttaaaaaagtttttcatggctggggccgtggattgggctcacttt

SEQ ID NO: 2365 - DNA, 424 bp, Homo sapiens
  misc_feature 3, 386, 401: n = A,T,C or G
ctncttagggcgaattggagctccccgcggtggcggccgcccgggcaggtacgaaaaaatcaggctactaagcccactgttaatatagacgcagaccaattgttaggaacaggtccaaattggagcaccattaaccaacaatcagtgatgcagaatgaggctattgaacaagtaagggctatttgcctcagggcctggggaaaaattcaggacccaggaacagctttccctattaattcaattagacaaggctctaaagagccatatcctgactttgtggcaagattacaagatgctgctcaaaagtctattacagatgacaatgcccggaaaagttattgtagaattaatggcctatgaaaaatgcaaatccaggattggtcagntcggcccattaaagnccattaaaagggaaaaaggttcc

SEQ ID NO: 2366 - DNA, 495 bp, Homo sapiens
  misc_feature 129, 145, 148, 150, 152, 169, 204, 216, 217, 219, 237, 242,249, 270, 272, 276, 288, 300, 309, 319, 321, 334, 338, 347,359, 369, 390, 395, 398, 400, 402, 403, 415, 418, 422, 425,427, 444, 460, 477, 488: n = A,T,C or G
ccgggcaggtactttgcaaatgattattcgagtagttaaccaatttgccagacattatcagactggacagccactgccaaaaaatatggtgtctcgtctttgtgaatctaaaaaggtttgtgctgcaanctgatatgcaactatnatngntntttttattgcccacctntttggtatcaaaaaatccttacccattggggaaangacattcacccnntngaagcgaaatttttcatnctcancaagtancatttttctttcaaaagggananatcnatccatagttangcaaatattttncttaattgngcccccttancnccaatttaattgntttncctcaaaanaattaaccttgntcaccttggnggccaaaggtccttggcccgnaattnttncnannaccccaaccacnttnctgnttngnggggaggttaaattggnggttgggcccttaagnaaattaatttttaaccntcccttttaancccttcc

SEQ ID NO: 2367 - DNA, 413 bp, Homo sapiens
ctatagggcgaattggagctccccgcggtggcggccgaggtacgcgggggaaataaggaatgaacgttatgtaaagaccataatgctagtcagagaatgttccaatggaaaactgatgtttccttctgccaccaggacaaaacttttgtgatctaaaggcaaaacaataacaaaaacagcaacagcaacaaaaaccagcctaacagtcccaagtggtcttcactgtcatgattattaagcattttctccaaagtctgaactacagtttgttgaggtttcattgaaaatgatactaaaacaaatttgcttaaaagtaaaatggagttattggcatcacaaaggatcatagttcacctttcttaagaaattgcattaaccctttaatgactgtaaaagggattttttaaagaccg

SEQ ID NO: 2368 - DNA, 444 bp, Homo sapiens
  misc_feature 8, 82, 83, 416, 433: n = A,T,C or G
tacgactnctatagggcgaattggagctccccgcggtggcggccgaggtacgcggggagagtccctctgtgaatttacaacnnccaacacccatgagttcagtccttaagaaggaaaattgagcaagtatttaattggttggacattgcataaaagaggtccatatccaggctaactctagaaattttattctcaaactttatttggcctctttttcttctgtcagaaggaccattcttagtggcactggggaaatcttggcacccagaagaattcaactgcgctcactgcaaaaatacaatggcctacattggatttgtagaggagaaaggagccctgtattgtgagctgtgctattgagaaaatttctttgcccctgaaatgtgggtcgatgcccaaagggaaggatccttggnagaaagttcatcaatgncgtttgaaaac

SEQ ID NO: 2369 - DNA, 289 bp, Homo sapiens
  misc_feature 47, 48, 59, 69, 81, 129, 153, 154, 155, 174, 211: n = A,T,C or G
ggccgcccgggcaggtactcgaggtcattttgcttcctatagactgnnaccttttggcnaaagctgttntaactccatctnagcatttacaattccatacctggtggtcaagaggaggcccgcctgcangctcagctaaatcgggctgatggnnnttccatttacttcaggctnagctcacaggctccgataattactctgatactactgntcatttaggctttgatgctctcaccacggaacaagtaacaaaggtgtgtatgagagcttgggataaattacgcacccc

SEQ ID NO: 2370 - DNA, 421 bp, Homo sapiens
  misc_feature 192, 314, 335, 347, 349, 350, 355, 360, 373, 376, 382, 387,392, 394, 401, 402, 406: n = A,T,C or G
ctatagggcgaattggagctccccgcggtggcggccgcccgggcaggtacatctctagatgatcacagaatgtcaaatatcacactacactgtgatatggggattccccttgggggttttcatgtgtatagggtgcctgcagctacactaaacatcttaaagctaccacaatgttcacttcatatttttgcntttttaataaggcttttcttggtctcctcctatgttcccatcattttcttgctttgaatctgtaagaatcgagttgaatcttctccattttaaattttccataggctgagaaactgttttanccaagtttggataaaattgtntccatagtaatnanntattncaaancttatggtgccangtncaaaantcaangcctntnttaccanngganccccatttttctctt

SEQ ID NO: 2371 - DNA, 305 bp, Homo sapiens
  misc_feature 175, 177: n = A,T,C or G
ccgcggtggcggccgaggtacgcgggggaaatgacacatgaaaaaaaggttacatcagcccataaagcacatagccaccgtaagtaattgcataatggaacagatataaaaggactgtatgaggcaaaagaagtcttctgggaatcttcaacacccctgaagacacagtgagttnancaccaccaccaggaattggcctttcagctctgtgcctgtctccagtcaaggctggaataagtctcctcatatttgcaagctcggccctcccctggaatctaaagcctcctcagccttctgagtcagcc

SEQ ID NO: 2372 - DNA, 295 bp, Homo sapiens
  misc_feature 176: n = A,T,C or G
tatagggcgaattggagctccccgcggtggcggccgcccgggcaggtactttcttcctcatactgactatagtcatccacctccattcgagactccaagagagaaagaggatcactgcagcacaccccattttcatgaagcccctctgtataagaccccctattttcctcatctcngttttagctggatttttaattttgtagaactactgcctgatcctgagttaaatccattattaagctttgctacatagagattgttattcgtttgtcatggtctttgcttaaacttgatg

SEQ ID NO: 2373 - DNA, 427 bp, Homo sapiens
  misc_feature 5, 191: n = A,T,C or G
gactncttagggcgaattggagctccccgcggtggcggccgcccgggcaggtaccgaggtcattttgcttcctatagactgccaccttttggcaaaagctgttctaactccatctcagcatttacaattccatacctggtggtcagaggaggcccgcctgcaggctcagctaaatcgggctgatggcattncaattactcaggctcagctcacaggctccgataattactctgatactactgctcatttaggctttgatgctctcaccacggaacaagtaacaaaggtgtgtatgagagcttgggataaattacgcaccccaggccaagcttctgtttcttttactattgttaaacagggtcacaatggaattatatcttggattttttaggctaaaattacaagatggcttgttggaaaaatcttg

SEQ ID NO: 2374 - DNA, 332 bp, Homo sapiens
  misc_feature 287: n = A,T,C or G
ctatagggcgaattggagctccccgcggtggcggccgaggtacttccaaaccctcctgttctttcctttttgttttccccaattttaacataaggcaaaagcagtaattgagcaattctatcacctggattggcactccggggaacagtggagctgatcactaactgaattccccctttataaatctgaataaattaccccagtatgaatttggactcccttcaaatttagacttgatctccctcaaaggcctaccctcccttctggcagcgggccatatacccctntaggaatcttttgtgggggctttccaggggagtaaaaaagaccat

SEQ ID NO: 2375 - DNA, 387 bp, Homo sapiens
  misc_feature 180, 184, 190, 203, 224, 229, 253, 256, 262, 263, 270, 278,285, 290, 291, 294, 309, 310, 319, 327, 342, 351, 356, 385: n = A,T,C or G
aggtacgcgtcacagtagatagtgtcctatagccactggaatgtcctaaaccgaatgaatctgactctggtgacctttcaaacagaagtcacatgagctccttcatttggttgtagttcttcttagaaggtgtgataaccacgatctcaggggaaaggaattagaaattggggttgttgngacncattcnttacaaaccaatnacaggaattccacaagcccanattgnccatgcctgttatctttacccttnggnatgctnncaaattntggattgnccattcncaganntanaaaatatcccattgnnagcaaaganagtcccanacctttttgtccatnttttttttntaaanatttttaatttttttggccttttaatttnaa

SEQ ID NO: 2376 - DNA, 306 bp, Homo sapiens
  misc_feature 3, 201, 274: n = A,T,C or G
ctnctatagggcgaattggagctccccgcggtggcggccgcccgggcaggtaccagttgtaaaattaccaggaaccgccatgcctcaagatcgccctgttttctggcttcatcaatgactgcatgcagtgcaccaccctgtccactacgtgatgctgtaggattaagtctcacagtgggcggctgaaagatacagccgccncgtcctgtgttgctggtgaattagacgccatcgctgtgggtttgctggtatggtgccgtgctatttggcacanggacacaccgcttgaggtctgtattgaacctc

SEQ ID NO: 2377 - DNA, 407 bp, Homo sapiens
  misc_feature 345, 369: n = A,T,C or G
ccgcggtggcggccgaggtacgcggggcttcttgaaggaatcccttaagtgcacgtctcccgttttcttttcacatcaatgcagagtccctctgtgaatttacaacacccaacacccatgagttcagtccttaagaaggaaaattgagcaagtatttaattggttggacattgcataaaagaggtccatatccaggctaactctagaaattttattctcaaacttagttggcctctttttcttctgtcagaggaccattcttagtggcactggggaaatcttggcacccagaagaattcaactgcgctcactgcaaaaatacaatggcctacattggatttgttngaggagaaaggagccctgtattgngagctgtgctattgagaaattctttgcccctgaattgt

SEQ ID NO: 2378 - DNA, 293 bp, Homo sapiens
  misc_feature 170: n = A,T,C or G
ccgcggtggcggccgaggtacatctacctaaaggactattatgtggaataatacatactaatgaagtattacatgatttaaagactacaataaaaccaaacatgcttataacattaagaaaaacaataaagatacatgattgaaaccaagttgaaaaatagcatttgccnttgggaggaaatgtgctcaaattactaatgatttagtgttgtccctactttctctctcttttttctttctttttttttattatggttagctgtcacatacaacttttttttttttttttttga

SEQ ID NO: 2379 - DNA, 399 bp, Homo sapiens
ctatagggcgaattggagctccccgcggtggcggccgaggtacaaagtccctgaggcaaaagcatgcttgctgtgttctaggaaaagcaaggaagacagcatgtctatagcagtgggaggtggaaggataataaacagtaggtgaggttagaggggaccaaatcatgtattttccatccagaggttcccaaccttggctgcacattagatttattctaaggagcttttaaaaaaataccaatgactgggtcccagcctagagtgattaaatcagaatctctggaggtagacttgagaatctgatgtttgcaagtttcctaggcaagtcaaggctgaggaagactgctgcaggccattgtaagagccaggcggttgatctcattcaacctttccctcagc

SEQ ID NO: 2380 - DNA, 389 bp, Homo sapiens
ccgcggtggcggccgcccgggcaggtaccaggagggtattgatgtttgaggtccaaactgaaaacccatcacctccttcccactgctatagcagcgttagccctggggttcattatctagccagttcacaccttctaaagtggggctctgaaaatgtcttacttccctcacagacaaagcaattctcaagcctcctgagatcacccaccaaccagagcaactgctgtcacttggaggtgcagctgaattcttctaattgtgacacaaactcttgaaactgtaaatgctgaaagattaaatgaggttataacactcagaaggttttacaagtaaaagtaagtcaaatcaataggtctttatttcatatctgtaatggtttagctctgcgg

SEQ ID NO: 2381 - DNA, 413 bp, Homo sapiens
  misc_feature 4: n = A,T,C or G
actncttagggcgaattggagctccccgcggtggcggccgcccgggcaggtacgcggggacatcaatgcagagtccctctgtgaatttacaacacccaacacccatgagttcagtccttaagaaggaaaattgagcaagtatttaattggttggacattgcataaaagaggtccatatccaggctaactctagaaattttattctcaaacttagttggcctcttttttttctgtcagaggaccattcttagtggcactggggaaatcttggcacccagaagaattcaactgcgctcactgcaaaaatacaatggcctacattggatttgtagaggagaaaggagccctgtattgtgagctgtgctatgagaaatttctttgcccctgaatgtggtcgatgccaaagggaagat

SEQ ID NO: 2382 - DNA, 427 bp, Homo sapiens
cttagggcgaattggagctccccgcggtggcggccgcccgggcaggtacgcgggacatcaatgcagagtccctctgtgaatttacaacacccaacacccgtgagttcagtccttaagaaggaaaattgagcaagtatttaattggttggacattgcataaaagaggtccatatccaggctaactctagaaattttattctcaaacttagttggcctcttttttttctgtcagaggaccattcttagtggcactggggaaatcttggcacccagaagaattcaactgcgctcactgcaaaaatacaatggcctacattggatttgtagaggagaaaggagcccttgtattgtgagctgtgctattgaagaaattttctttgcccctgaatgtgggtcgatgcccaaaagggaagatccttgggagaaa

SEQ ID NO: 2383 - DNA, 553 bp, Homo sapiens
  misc_feature 158, 159, 180, 218, 224, 231, 266, 269, 282, 297, 324, 326,361, 366, 385, 417, 430, 449, 451, 461, 490, 498, 503, 537,543: n = A,T,C or G
aggtactttcttcacaaatggtggaaactcctgagaagacatggcttcttccatggatatcaatgactgccatcaggccagccaggcagactcagtcatcaatttgggcccaccattaaaatcagctttccctgttttgaagggaagaccgcttaatnnctttctttttggaaagggacnacaagtcaagccagctggggggaacttcaagggctgcngggacntataagncttttttaccaaaaggccagctctacctttttttnatngaatatggggtcntcctaattccatatntaatctttatttttttttggaggaacnanggaggttccttttaaccttccttggtacaaccttncaacntggccaaccccttctttgnccttttccccttgggggggtttttcaattaanccggaattttgcntttcccttaggcctccttncncctgggaagntaaaggccttggggtggaattttaaccanggtaattnggttngccccccgcggccggaaaaatattttaccttggntaattnttttttttaa

SEQ ID NO: 2384 - DNA, 450 bp, Homo sapiens
  misc_feature 56, 57, 72, 76, 80, 82, 85, 100, 103, 106, 107, 109, 113,114, 126, 132, 134, 140, 142, 147, 151, 160, 165, 166, 177,186, 193, 200, 201, 204, 205, 207, 208, 213, 215, 220, 221,222, 226, 228, 235, 243, 248, 251, 255, 256, 275, 364: n = A,T,C or G
  misc_feature 377: n = A,T,C or G
cttagggcgaattggagctccccgcggtggcggccgcccgggcaggtacatacatnntatgacagactctanaagntctntnctngacatgcatgatttntancanntnacanntctatgatcgcnaatatntnaaatgntnactgntacnctctgaganactgnntgacagaaagntgtgtgttnacccaangctgcannttnnanntaaantntatannnatangntgggaanatttatanggggnctnctgnnaaagatggtccttctgaangctaactgcggaatgaaagtttctattccaactaaagccttagtaatgagatggacatgcaaacttttcaaaggcagagcctcccgaanaagccatcttgcncttcgagccctgccatttgaaatgccaaaagtctgttcccaaataaaaagccttggaaattggaaagaaatga

SEQ ID NO: 2385 - DNA, 409 bp, Homo sapiens
  misc_feature 211, 212, 247, 319, 344: n = A,T,C or G
acttagggcgaattggagctccccgcggtggcggccgaggtaccatgctgacttcttggtatcttttaaggcctaattttcccttccttgagattactgtagtgtgttccagctaatttctatttggaaacgagttggaacagctgaaaactaggtattattgaaggcaaagcagcctcacgtcatttttttatcagctcatttgggaagnnttttttttttttttttttttttttggggtaattanaaagtaggctgggcacgggggctcatgcctataatcccagcacttggggaggccgaggatctcctctctggnggatcacttgagggcaggagttaanagaccatcccggccaacatgatgaaaaccctgtctctactaaaaatacaaaaaagtagcctgggc

SEQ ID NO: 2386 - DNA, 285 bp, Homo sapiens
  misc_feature 157, 161, 183: n = A,T,C or G
ccgcggtggcggccgaggtacgcggggacatcaatgcagagtccctctgtgaatttacaacacccaacacccatgagttcagtccttaagaaggaaaattgagcaagtatttaattggttggacattgcataaaagaggtccatatccaggctaacnctanaaattttattcttcaaacttanttggcctctttttcttcttgtcagaggaccattcttagtggcactggggaaatcttggcacccagaataattcaactgcgctcactgcaaaaatacaatggc

SEQ ID NO: 2387 - DNA, 419 bp, Homo sapiens
  misc_feature 386: n = A,T,C or G
ccgcggtggcggccgcccgggcaggtaccgactcctcagaaactggcatgccaaatcaaaatgggtctggttcaatcctccctaatggcaatgtaaacccctctaactaatcccacttctcctaattatctttttctccttacgaacctaaaaatctcaccatttctattagcctgaaaataacatccctctgttcttctcttcctccttcagcactggatctcacttacaataggttttatttaataattatcttccttacactttctgtctcaccagtttccccttaaactgatttacctgctacacaaaattattcttattgggcttatgtgccttttcctccacttattcgaccctctcacctgggatggatgctcctgcangaaatctatactaacgatagtgtggtgggatgc

SEQ ID NO: 2388 - DNA, 235 bp, Homo sapiens
  misc_feature 160, 184: n = A,T,C or G
aggtaccggccctccaagtagtgtttgcgaatacacgtcctgttgtgaaagaggtgaggagaaaggagtaggaaggctcataggacataacaggcaaaaagaaacaagagaggtaaataaaaagaattaatctaatggcttcacccggcttaggcgcagntttaaggggcctgacccaggcttngggacccatgtttctagttgggctctgttggcctttttgttgtgggagtga

SEQ ID NO: 2389 - DNA, 380 bp, Homo sapiens
aggtacgcggggacatcaatgcagagtccctctgtgaatttacaacacccaacacccatgagttcagtccttaagaaggaaaattgagcaagtatttaattggttggacattgcataaaagaggtccatatccaggctaactctagaaattttattctcaaacttagttggcctcttttttttctgtcagaggaccattcttagtggcactggggaaatcttggcacccagaagaattcaactgcgctcactgcaaaaatacaatggcctacattggatttgtagaggagaaaggagccctgtattgtgagcctgtgctatgagaaattctttgcccctgaaatgtggtccgatgccaaagggaaggatcctttgggaga

SEQ ID NO: 2390 - DNA, 438 bp, Homo sapiens
  misc_feature 393, 399, 425: n = A,T,C or G
tagggcgaattggagctccccgcggtggcggccgggcatttctcccagggatctctgtgcttccttttgtgcttcctgtgtgtgtggatatttaaaggggctggaaatgtgcaaaaacatgtcactacttagacattatattgtcatcttgctgtttctagtgatgttaattatctccatttcagcagatgtgtggcctcagatggtaaagtcagcagcctttcttatttctcacctggaaatacataccgaccatttgaggagacaaatggcaaggtgtcagcataccctgaacttgagttgagagctacacacaatattattggtttccgagcatcacaaacaccctctctgtttcttcactgggcacagaattttaatacttattttcantggggnctgttggccagggaacaaatgaaagncaatctacattaa

SEQ ID NO: 2391 - DNA, 433 bp, Homo sapiens
attggagctccccgcggtggcggccgaggtaccgaggtcattttgcttcctatagactgcgaccttttggcaaaagctgttctaactccatctcagcatttacaattccatacctggtggtcagaggaggcccgcctgcaggctcagctaaatcgggctgatggcattccaattactcaaggctcagctcacaggctccgataattactctgatactactgctcatttaggctttgatgctctcaccacggaacaagtaacaaaggtgtgtatgagagcttgggataaattacgcaccccaggccaagcttctgtttcttttactattgttaaacagggtcacaatgaattatatctttgattttttagcctaaattacaagattgctgttgaaaaaatctgtctctgatgagcacactcaagggtattcttt

SEQ ID NO: 2392 - DNA, 369 bp, Homo sapiens
  misc_feature 3, 324, 351, 366: n = A,T,C or G
ctnctatagggcgaattggagctccccgcggtggcggccgaggtacgcggggacatcaatgcagagtccctctgtgaatttacaacacccaacacccatgagttcagtccttaagaaggaaaattgagcaagtatttaattggttggacattgcataaaagaggtccatatccaggctaactctagaaattttattctcaaacttagttggcctctttttcttctgtcagaggaccattcttagtggcactggggaaatcttggcacccagaagaattcaactgcgctcactgcaaaaatacaatggcctacattggatttgtngaggagaaaggagccctgtattgtgangctgtgctattgaanaaa

SEQ ID NO: 2393 - DNA, 446 bp, Homo sapiens
acacctatagggcgaattggagctccccgcggtgggcggcccgcccgggcagggtacttcctagaagcactggaagaggactggtgatggtggagggtgagagggtgccgtttcctgctccagctccagaccttgtctgcagaaaacatctgcagtgcagcaaatccatgtccagccaggcaaccagctgctgcctgtggcgtgtgtgggctggatcccttgaaggctgagtttttgagggcagaaagctagctatgggtagccaggtgttacaaaggtgctgctccttctccaacccctacttggtttccctcaccccaagcctcatgttcataccagccagtgggttcagcagaacgcatgacaccttatcacctccctccttgggtgaagctctgaacaccagcttttggcccctccacagtaaaggctgctacatcaagggg

SEQ ID NO: 2394 - DNA, 419 bp, Homo sapiens
cactacttagggcgaattggagctccccgcggtggcggccgaggtaccatgttgtaaaattaccaggaaccgccatgcctcaagatcgccctgttttctggcttcatcaatgactgcatgcagtgcaccaccctgtccactacgtgatgctgtaggattaagtctcacagtgggcggctgaggatacagcgccgcgtcctgtgttgctggtgaattagacgccatcgctgtgggttgctggtatggtgccgtgctatttggcacaggacacaccgcttgaggtctgtattgaacctctgaaggaggccgatactgaagctcggttggcagccggtatttgataaactaccagccggttggggtcttattttctacccggctgatatttgtggatactgtatctgaagttggcatttgcc

SEQ ID NO: 2395 - DNA, 440 bp, Homo sapiens
  misc_feature 371, 400: n = A,T,C or G
ctcctatagggcgaattggagctccccgcggtggcggccgaggtacttggagcttaaatacaaggcaattgtgtgcctgcaaaaacaaaaagagcaatattatccttaagatttcaacaagacacagtgtctcatcacataatccaaagaagtccaggttacaagccccaaaatattcagcattatgaaaaaccagggagatcttaattcacatggcaaagagaatccttgcataacaatattgagaggacacatatgtcaaaatcatctgacacatacattaaagcagttattataacaatgctcctagaattacgggatagcattcattgaagtgaatggaaagttgggaaagtctcaccaaatatttnggaatatgtaaacaccaatttaaacttanggaattaaagtattaaacccaaaactatttaagggggaaa

SEQ ID NO: 2396 - DNA, 423 bp, Homo sapiens
  misc_feature 375, 385: n = A,T,C or G
ttagggcgaattggagctccccgcggtggcggccgaggtacgcgggataggaacttggcttgaaatgttaaaaaggcaggaaaaaacagcagaatctatttttcattgtgggagagcccaggttgtcctgcttatctgaaattaagcccaaatcctaaaatttctgaatacctgctgtcagctttcctgcaaacgggccaggttgcctaaggaatgtcatgagagagctgacagaggcaggggacaggacaggcaccagcaaacaccacttcaccatgcagctattttcatgtcctcccagcccactgaagtgctgataatggcttggatcaattcaacaaacacattttcgtatacctcctttgcaccagacangtgtttcacncgaggcacgccaggggtggccgcaggttttaaaacctt

SEQ ID NO: 2397 - DNA, 421 bp, Homo sapiens
  misc_feature 4, 187: n = A,T,C or G
actncttagggcgaattggagctccccgcggtggcggccgaggtacaagcttcatttgccacaaaactcacaaaaaagtaattgattaaagaatatctcttttatgcaaaatatacattttaggatataatttaattgatattctactatatactgacattgctccttgatcattgaataaaaaaanacctctcattgccagaattatgtttttgtaatatttataattgaggtaataatgataaaagacttaaactatgaataatgttggtgagttccatttaagctataacaatttcccagaactaaacaaatatgtgactaaacataggtcatttttgataaatgaatactaacaatttcacaacataattgacaaggctggattacatcaggtaatttataaggaaaaattattaca

SEQ ID NO: 2398 - DNA, 415 bp, Homo sapiens
  misc_feature 1, 340, 356, 373, 379, 389, 390, 399, 402, 409: n = A,T,C or G
ncttagggcgaattggagctccccgcggtggcggccgaggtaccgaggtcattttgcttcctatagactgccaccttttggcaaaagctgttctaactccatctcagcatttacaattccatacctggtggtcagaggaggcccgcctgcaggctcagctaaatcgggctgatggcattccaattactcaggctcagctcacaggctccgataattactctgatactactgctcatttaggctttgatgctctcaccacggaacaagtaacaaaggtgtgtatgagagcttgggataaattacgcaccccaggccaagcttctgtttcttttactattgntaaacagggtcacaantgaatatatatctctgnattttnttagcttaanntttaccaangantgcttgntttgaa

SEQ ID NO: 2399 - DNA, 401 bp, Homo sapiens
  misc_feature 339, 386: n = A,T,C or G
actacttagggcgaattggagctccccgcggtggcggccgaggtaccggtgccatcacacgctggtcagagtggccatttgtcttgtctttctaccgatgataaaatcaggaattgaaggatatatgcacaacggtatactcttcgaccatcaaacttccggacatcagttcactaccagcaagatggagaaacctgtccatccatagatgaagggatgaagaaactgcagtatatctgcacaacacaatactcttcatccataattaatgtaattttcatttggagccatatggatgaaccatgaaagaaaaacgccccaaagaagctgggccacggnagaagccacgccaaaggcactgttcctcagcagttaatcaccatggnacagggagggtggtt

SEQ ID NO: 2400 - DNA, 423 bp, Homo sapiens
cttagggcgaattggagctccccgcggtggcggccgcccgggcaggtaccatcatgcctcactaatttttttttttgtatttttagtagagatggggtttcatcatgttggtcaggctggtcgtgaactccttacctcgtgatccgcccgccttggcctcccaaagtctgagatgacaggtgtgagccaccgtgcttggctgacatatgattcttttgattatgttgcaaccattgaaaaatataaaatcactcttttttaatatatatttttctttttttaggaaattaaaggaaataagaatggctcctacataggcagagtaggctaaaatcacacttagctgactgtgaagtcatatactgcattatcgttactttcatttggatctccttgtctcacctttcccacttccccttaccc

SEQ ID NO: 2401 - DNA, 640 bp, Homo sapiens
  misc_feature 37, 161, 167, 215, 232, 245, 268, 307, 326, 332, 338, 345,348, 350, 359, 362, 399, 429, 431, 436, 441, 477, 492, 495,517, 520, 524, 550, 553, 560, 575, 582, 595, 604, 607, 614,626, 628, 634: n = A,T,C or G
aggtacccctccaagccggacaacccgggcgaggacngcaccagcggaggacatggccagatactactcagcgctgcgacactacatcaacctcatcaccaggcagagatatggaaaacgatctagcccagcagacacttgatttcaagacctctttgatngaagangaaaagccacagaaaaaatgttccccaagaaacttcgggctttggaangaacccccttgccaaantggttggggttgnaattgggggaaaaaattggaagnaaccttttggcttccttccttggggcccctttttttccncttaattttttttccaagncccccnaattanttttttncantnccgggtggnttnaaaaaaaaccggaaggaaaaaatttccccaacccccnaattcccccttaacccccaaaattgggccnanttggnccaangcccccaacctttgggtgggccttggaaaaattttnccttggccaaaaatnggngtttctttcccctttttttggngtnccantcccaatttttgggtaaaataatttnaanttgggtnggttggggttttttnaaaaaantttaaaaaaaggntaaatttcnaanttggccnattttttccaananaaaaanaaaaaa

SEQ ID NO: 2402 - DNA, 320 bp, Homo sapiens
agggcgaattggagctccccgcggtggcggccgaggtacgcggggcttaagtgcacgtctcccgttttcttttcacatcaatgcagagtccctctgtgaatttacaacacccaacacccatgagttcagtccttaagaaggaaaattgagcaagtatttaattggttggacattgcataaaaagaagggtccatatccaggctaactctagaaattttattctcaaacttagttggcctctttttcttctgtcagaggaccattcttagtggcactggggaaatcttggcacccagaagaattcaactgcgctcactgca

SEQ ID NO: 2403 - DNA, 416 bp, Homo sapiens
agggcgaattggagctccccgcggtggcggccgaggtacgaaaaaatcaggctactaagcccactgttaatatagacgcagaccaattgttaggaacaggtccaaattggagcaccattaaccaacaatcagtgatgcagaatgaggctattgaacaagtaagggctatttgcctcagggcctgggggaaaaattcaggacccaggaacagctttccctattaattcaattagacaaggctctaaagagccatatcctgactttgtggcaagattacaagatgctgctcaaaagtctattacagatgacaatgcccggaaaagttattgtagaattaatggcctatgaaaatgcaaatccagaattgtcaagttcggcccattaaaagccattaaaagggaaaaaagttccagcag

SEQ ID NO: 2404 - DNA, 304 bp, Homo sapiens
  misc_feature 260, 266: n = A,T,C or G
ttagggcgaattggagctccccgcggtggcggccgaggtacgcggggacatcaatgcagagtccctctgtgaatttacaacacccaacacccatgagttcagtccttaagaaggaaaattgagcaagtatttaattggttggacattgcataaaagaggtccatatccaggctaactctagaaattttattctcaaacttagttggcctctttttcttctgtcagaggaccattcttagtggcactggggaaatcttggnacccanaagaattcaactgtgctcactgcaaaaaaatacaatgg

SEQ ID NO: 2405 - DNA, 441 bp, Homo sapiens
  misc_feature 288, 382: n = A,T,C or G
cttagggcgaattggagctccccgcggtggcggccgaggtcatcatatttgcttgttggctttatgataacttagaaataatattctggattaactgtgtgactcatgagaagatttgtgcaactatgtttccaaatttacttgattttcaagacttacactagaaccgtgagaacagggtaataaataagcatatgtattaatatcacctttggtcaactcttgggtagccccaacggtagtgtagggaattaaccgtaatttttcctactaaaagtattggatttngttttgagagaccacagttgaaaatcattgacatacaaagtttaaaaattgttaggttaaaaaattttaaatgcatttggaagtggttttatangaaaaaataattatcttaaacttgggtttatattgacagggttgttttcttggataaga

SEQ ID NO: 2406 - DNA, 409 bp, Homo sapiens
  misc_feature 58, 155, 353, 379: n = A,T,C or G
ctatagggcgaattggagctccccgcggtggcggccgcccgggcaggtaccattcctntaaatttactacctaattctttgcctttaattgtccccatgggggtcactggccctttacctcaaggttcggtgggcctggtgttaggcagggcatncacctcatgatactaaaggtatcatatgttcatactagtctcattaattctgattcctctgatgagattaaacttatgtaaacttatggtgtctgccaaagttcctgtttccattccggccagtgagtcaattgctcaattacttttactacctaacattgttttaaacaaaggagataatgacatggggccctgggnatggggctccagcggttgaaaaagcncgctttattggattaatgtaattttctaaa

SEQ ID NO: 2407 - DNA, 411 bp, Homo sapiens
  misc_feature 369: n = A,T,C or G
actacttagggcgaattggagctccccgcggtggcggccgaggtacgcggggagtgataacattagaaactcattggagcacgaaccctgttgtgaactgcctatccgaaggatctaggttgtgtgcttcgtatgagaatctaatgccagatgatctatcattgtctcactttgcccccagataagacccatctagttgcagaaaaataagcccagagcttccactgattctacattatggatatgtgccgccgaagcaagcacaaagccctacttttacacatgcctagtgatgcttcatggacaaggcttggctctgttgagtccaactaacctacctgagattctgagatttactcttcaatggcnttcctgtggagctaggagtttgaaaaattatcttaaaaatct

SEQ ID NO: 2408 - DNA, 411 bp, Homo sapiens
ccgcggtggcggccgaggtaccatactcttttggttgctataattctgtggtataatatgaagtcagaaaatataattcctccaattttatttatttatttatttttgcttaggatagtattatttcttatagtgaaagcattctatgttatttattattagtctaattttgtagttttacaatgctatcctcttttacaaagctatgatcaactcagtgtgtccagatcaggatcatttgtagctatttgcaaaagtagcaatattctggctgggcatggtggctcatgcttatattcccagccactttggggaggccaagacagggcagattcaccctgagggtcaggaggttcaaggatcagccctgggttcaaaccatggtggaaacccctgtctccaattaaaaaa

SEQ ID NO: 2409 - DNA, 419 bp, Homo sapiens
  misc_feature 328, 343, 393, 400, 401, 412: n = A,T,C or G
ctatagggcgaattggagctccccgcggtggcggccgcccgggcaggtacgaaaaaatcaggctactaagcccactgttaatatagacgcagaccaattgttaggaacaggtccaaattggagcaccattaaccaacaatcagtgatgcagaatgaggctattgaacaagtaagggctatttgcctcagggcctggggaaaaattcaggatccaggaacagctttccctattaattcaattagacaaggctctaaagagccatatcctgactttgtggcaagattacaagatgctgctcaaaagtctattacagatgacaatgcccgnaaaagttatttgtangaatttaatggcctatggaaaatggcaaaatccagaaatgtcaggtcggnccattannaagtccattanaaaggga

SEQ ID NO: 2410 - DNA, 406 bp, Homo sapiens
  misc_feature 335, 341, 371, 388, 393: n = A,T,C or G
ccgcggtggcggccgcccgggcaggtacatctctagatgatcacgaatgtcaaatatcacactacactgtgatatggggattccccttgggggttttcatgtgtatagggtgcctgcagctacactaaacatcttaaagctaccacaatgttcacttcatattttttgctttttataggctttcttggtctcctcctatgttcccatcattttcttgctttgaatctgtaagaatcgagttgaatcttctccattttaaattttccataggctgagaaactgtttagccaagtttggataaaaaattgtatcccaaagtaaggagtattacaagnctatgngggcaaggtcccaaaaatcaaaggctggtntccaccagggaccatgnttctnctcttaaagggtt

SEQ ID NO: 2411 - DNA, 441 bp, Homo sapiens
  misc_feature 382, 386, 400, 412, 415, 418: n = A,T,C or G
ttagggcaattggagctccccgcggtggcggccgaggtacaggttttttttccctctccctcatgtatcatgtttgaaaatgaagaatctttacccagtctctaaactggattcctttgacacagttatggaataaaatctttgatgtttccttctaaacagtgttcacatttgagggttgatggacttaaaacactaataaagataggcataaacagggccttttggaaatagggggaagttgctgttgttgctgaaagaagaaaggtcataggaaggggttggctgatgtgggaaaagtgactattccatagtgaagctttgagtatctcccattaattatgggaccctgtttttcactgaataaaagattatgtttggntggntttaccattgaaancccgaatcccanccnaantgccctggatggatttttaaatg

SEQ ID NO: 2412 - DNA, 419 bp, Homo sapiens
  misc_feature 177, 183, 213, 214, 238, 364, 405, 406: n = A,T,C or G
tacttagggcgaattggagctccccgcggtggcggccgcccgggcaggtaccaaagagggcataataatcagtctcacagtagggttcaccatcctccaagtgaaaaacattgttccgaatgggctttccacaggctacacacacaaaacaggaaacatgccaagtttgtttcaacncattgntgaacttacccaccttttcctccataaggnnggaaaattatcttccccttgcaanagcccggttctacacagatttcacaaattgtgctaagaaccgtccgtgttctcagaaagcccagtgtttttgcaaaataatgaaaagggaccccatatgtagcaaaaatcagggctgggggggagnagcccgggtttcattccctgtcctcattggtcgtccctatnnaaattgtaccctg

SEQ ID NO: 2413 - DNA, 391 bp, Homo sapiens
ccgcggtggcggccgcccgggcaggtactttatacagagtccttgtttgcctttagtctgatgccgtgggtgagcctgagttgtcctgtggtccacgttcctgaccaggtgtctttctcacccactggtttcaaaaaagatgttactgggttatagaaggctgggatggaaacaggataccaagttcgcatgaagacagtatctgaaaagagaggtaatttactttaacattttcaaaagaagatgcatatccatattgtgaagaaacgaagaacaaaaccttcactccaaacttctctacctggttgcaaagtatttgaagggaaagctcactaagggaagctactcccatagatcccaggaactgttactggggtgtggcccaggggga

SEQ ID NO: 2414 - DNA, 449 bp, Homo sapiens
  misc_feature 23, 374, 399, 415: n = A,T,C or G
tacttagggcgaattggagctcnccgcggtggcggccgcccgggcaggtacgcggggctaaggtaaagatttaattaaataattttggcctctcatagttttctctctctttaaagagaataaatagagggccaggtgtggtggctcacgcctgtgatcccagcactttgggaggccaagaggggcggatcatgaggtcaagagatcaagatcatcctggccaacgtggtgaaaccctgtctctactaaaaatacaaaaatgagctgggcatggtggggcgtgcctgtagtcccatgtacctcggccgcccgggcaggtcccgggcaggtacatttgatgggcttggagaagcagggttggccagccttgtttntgcaccagaaaccaagaaattacangaaaaaaagtccaggnaagcttggagaaggcacaaaccattcttccttgg

SEQ ID NO: 2415 - DNA, 421 bp, Homo sapiens
  misc_feature 147, 294, 303, 320, 348, 349, 378, 387: n = A,T,C or G
cttagggcgaattggagctccccgcggtggcggccgcccgggcaggtacaaagtccctgaggcaaaagcatgcttgctgtgttctaggaaaagcaaggaagacagcatgtctatagcagtgggaggtggaaggataataaacagtangtgaggttagaggggaccaaatcatgtattttccatccagaggttcccaaccttggctgcacattagatttattctaaggagcttttaaaaaataccaatgactgggtcccagcctagagtgattaaatcagaatctctggaggtangacttgagnaatctgatgtttgcaangttttcctaggcaagttcataggcctgnngggaaatacctgcttgccaggccttttgntaaagtagnccagggcggtttggattcttcatttcaaaccctt

SEQ ID NO: 2416 - DNA, 402 bp, Homo sapiens
  misc_feature 1: n = A,T,C or G
nctatagggcgaattggagctccccgcggtggcggccgaggtacgcggggacatcaatgcagagtccctctgtgaatttacaacacccaacacccatgagttcagtccttaagaaggaaaattgagcaagtatttaattggttggacattgcataaaagaggtccatatccaggctaactctagaaattttattctcaaacttagttggcctctttttcttctgtcagaggaccattcttagtggcactggggaaatcttggcacccagaagaattcaactgcgctcactgcaaaaatacaatggcctacattggatttgtagaggagaaaggagccctgtattgtgaggctgtgctatgaagaaaattctttgcccctggaatggtgggtccgatgcccaa

SEQ ID NO: 2417 - DNA, 429 bp, Homo sapiens
  misc_feature 366: n = A,T,C or G
actacttagggcgaattggagctccccgcggtggcggccgaggtacctttcattggattgtccatggtgcatcgctttagcaagcggcgtgactctccactgcccgtcatcttggccaatatctatctgctggttcctcctgtgctcaacccaattgtctatggagtgaagacaaaggagattcgacagcgcatccttcgacttttccatgtggccacacacgcttcagagccctaggtgtcagtgatcaaacttcttttccattcagagtcctctgattcagattttaatgttaacattttggaagacagtattcagaaaaaaaatttccttaataaaaatacaactcagatccttcaaatatgnaaacctggttggggggaatctccatttttttcaataattatttttcttctttggtttttcttg

SEQ ID NO: 2418 - DNA, 428 bp, Homo sapiens
ccgcggtggcggccgcccgggcaggtacttccaaaccctcctgttctttccgttttgttttccccaattttaacataaggcaaaagcagtaattgagcaattctatcacctggattggcactccggggaacagtggagctgacactaactgaattccccctttataatctgaataaattaccccagtatgaatttggactcccttcaaatttagacttgatctccctaaaataaggcctaccctcccttctggcagcgggccatatacccctctaggaatcttttgtgggggctttccagggagtaaagagaccatttgggtggaacataaatctactgcggtgctgcctgctgtggccgcgggacaagctgttggattgttgtaattggcttgactcccttgaaagtggtggtatttttctgtaggg

SEQ ID NO: 2419 - DNA, 280 bp, Homo sapiens
cttagggcaattggagctccccgcggtggcggccgaggtaccagttgtaaaattaccaggaaccgccatgcctcaagatcgccctgttttctggcttcatcaatgactgcatgcagtgcaccaccctgtccactacgtgatgctgtaggattaagtctcacagtgggcggctgaggatacagcgccgcgtcctgtgtccgctgggtgaattagaacgccatcgctgtgggttgctggtatggtgcccgtgctatttggcacaggacacaccgcttgaggt

SEQ ID NO: 2420 - DNA, 444 bp, Homo sapiens
  misc_feature 406, 407: n = A,T,C or G
ttagggcgaattggagctccccgcggtggcggccgaggtacttttttttactttggcaacaaatatttatacatacaagatgctagttcatttgaatatttctcccaacttatccaaggatctccagctctaacaaaatggtttatttttatttaaatgtcaatagtcgttttttaaaatccaaatcagaggtgcaggccaccagttaaatgccgtctatcaggttttgtgccttaagagactacagagtcaaagctcatttttaaaggagtaggacaaagttgtcacaggtttttgttgttgtttttattgcccccaaaattacatggttaatttccatttatatcaggggattctattttacttgaagactggtggaagtttgccattttttggtctcatttgnntttcttttgacattaacttaaggggatcccattattt

SEQ ID NO: 2421 - DNA, 262 bp, Homo sapiens
  misc_feature 17, 237: n = A,T,C or G
gggcgaattggagctcnccgcggtggcggccgcccgggcaggtactttctctttttttttttttaaataaatgaaaaattataaataaaattataatttaacttacaatattgaaacaaatacagactttcaggaggttgttaaattaatagtcttgcatgcccttcacccagtgatgacattttttttttttgaggacgggggtctttgctcttgtcacccagggctggagtgcanttggcacgatctcagctcactgcaa

SEQ ID NO: 2422 - DNA, 255 bp, Homo sapiens
aggtacattggatgtgaactcttttaaactataacatggacactttattggaaccaaactttagttttctacattaatgagaaacactggtaactttgcttcattgaaaaaataattgcttgttctctgtcagatgcacttcgtcttagtaacatggccatggggaagacaaccacaggccagatagtcaatctgctgtccaatgatgtgaacaacgtttgatcaggtgacagtgtttcttacactttcctgtgg

SEQ ID NO: 2423 - DNA, 439 bp, Homo sapiens
  misc_feature 388: n = A,T,C or G
ttagggcgaattggagctccccgcggtggcggccgaggtactctgcacggggtgggagaaagacaacaagggcagtgagtgggcaggcatgtgctttggcgaccccaaaaagctggcaaggctgcggaggttcaaacttaccttgaacaccaggggggacaaagatgacagtaatcatgatcactacagctaaggagaatcccatagggagacttctttgggacagggtttctgcattttgccccctgaggaaaggggtattgggaagagcaacacagcaggctcagcttgcaggggaatgttgtgtgctgcagcaccccaagaactcttcagggaccaggggaaatggggagccccacgcctttctttttacttttcatctcccagnattaggtatagggaccaggtcatggattccattagtaattttataagggaa

SEQ ID NO: 2424 - DNA, 431 bp, Homo sapiens
  misc_feature 5, 79, 224, 264, 320, 327, 342, 367, 394: n = A,T,C or G
cactnctatagggcgaattggagctccccgcggtggcggccgaggtacttttttttttttttttttttttttggtaganacagggtttcaccatgttggccaggatgatcttgatctcttgacctcatgatccgcccgtcttggcctcccaaagtgctgggatcacaggcgtgagccaccacacctggccctctatttattctctttaaagagagagaaaactntgagaggccaaaattatttaattaaatctttaccttagcncaagggaaaaatggaatttgcctaatataggtgatgaagcatacacaatgaacagnaaacaantcacatttttagtanaaaggcaaaaaattttgagacttantaaagcttatattgggtaagccttatnttttttggggtgggggggaaggaaaaatggaagaaaa

SEQ ID NO: 2425 - DNA, 404 bp, Homo sapiens
ctatagggcgaattggagctccccgcggtggcggccgcccgggcaggtaccatgacccgttgcagccatcagcagtctccctatcagcttctgtttggggaaccctacatctttgaagaacttctgagcttgaagatccgcatctctccagatgcctttttccagattaacacagctggtgcagagatgctgtatcggactgtgggggagctgactggagtgaactctgacaccatccttcttgacatctgctgtggaactggtgtgattggcctctctctggctcagcatacatctcgggtccttgggattgaattgttggagccaggcagtgggagggatgcaaagatgggactggcaagcccttcaatggcattcacccaactctggaaattttcattact

SEQ ID NO: 2426 - DNA, 444 bp, Homo sapiens
tcactacttagggcgaattggagctccccgcggtggcggccgcccgggcaggtacgcggggacatcaatacagagtccctctgtgaatttacaacacccaacacccatgagttcagtccttaagaaggaaaattgagcaagtatttaattggttggacattgcataaaagaggtccatatccaggcttaactctagaaattttattctcaaacttagttggcctcttttccttctgtcagaggaccattcttagtggcactggggaaatcttggcacccagaagaattcaactgcgctcactgcaaaaatacaatggcctacattggatttgtagaggagaaaggagccctgtattgtgagctgtgcctatgaaggaaattctttgcccctggaatgtgggtcgatgcccaaagggaaggatcccttgggaagaaagttcatca

SEQ ID NO: 2427 - DNA, 361 bp, Homo sapiens
  misc_feature 342, 343, 345: n = A,T,C or G
ccgcggtggcggccgaggtacgcggggacatcaatgcagagtccctctgtgaatttacaacacccaacacccatgagttcagtccttaagaaggaaaattgagcaagtatttaattggttggacattgcataaaagaggtccatatccaggctaactctagaaattttattctcaaacttagttggcctctttttcttctgtcagaggaccattcttagtggcactggggaaatcttggcacccagaagaattcaactgcgctcactgcaaaaatacaatggcctacatttggatttgtagaggagaaaggagccccttgtattgtggaggctgttgctatnnantaaaattctttgcccc

SEQ ID NO: 2428 - DNA, 348 bp, Homo sapiens
  misc_feature 24, 27, 28, 32, 61, 76, 85, 123, 125, 168, 180, 314, 327,333: n = A,T,C or G
ccgcggtggcggccgaggtacaanaanntcangctactaaccccactgttaatatatgacncagaccaattgttangaacaggtncaaattggagcaccattaaccaacaatcagtgatgcanantgaggctattgaacaagtaagggctatttgcctcagggcctgnggaaaaattcangacccaggaacagctttccctattaattcaattagacaaggctctaaagagccatatcctgactttgtggcaagattacaagatgctgctcaaaagtctattacagatgacaatgcccgcaaaagttattgtangtaattatatgtncctatncaaaaatgccaaatt

SEQ ID NO: 2429 - DNA, 404 bp, Homo sapiens
ccgcggtggcggccgaggtacaaagtccctgaggcaaaagcatgcttgctgtgttctaggaaaagcaaggaagacagcatgtctatagcagtgggaggtggaaggataataaacagtaggtgaggttagaggggaccaaatcatgtattttccatccagaggttcccaaccttggctgcacattagatttattctaaggagcttttaaaaaataccaatgactgggtcccagcctagagtgattaaatcagaatctctggaggtagacttgagaatctgatgtttgcaagtttcctaggcaagtcaaggctgaggaagactgctgcaggccattgtaagaagccaggcgttgatctcattcaacctttccctcagctcttctagagacagccagcatttcttct

SEQ ID NO: 2430 - DNA, 446 bp, Homo sapiens
  misc_feature 192: n = A,T,C or G
tcttagggcgaattggagctccccgcggtggcggccgaggtaccaccctcttgctgaaagcactggttcccctgttgaagcttgctagggattacagtgggtttgactcaattcaagtaagtaagcaaacatttaagtatttttcaggcataaatgttagcgttcttatcctgtaatatgcgaagtaaaatnaaatttatatacttactgcctttgttacaatggcatgcaaacacgtggtaaggtgttcataccttaggaagagatctgattctcaagaacagcagaaaataggaagcagagaatgagttaggatgaaattcaaatgggagaaagaaatgaagaagcccagatacttccaggtagttaattttctttaacatgggctactttattaaattaattaggaagaaaatgggtaaggaaaaaggaagggaaaaagccag

SEQ ID NO: 2431 - DNA, 413 bp, Homo sapiens
  misc_feature 303, 339, 344, 395: n = A,T,C or G
ccgcggtggcggccgcccgggcaggtacacataacagaaaaatttaaaaggttagggatcatttaggaaaaaatgcaaatgccaacaaatgtgagaaaatgctcaatcttacttataatttaagaactacaattcagccaggcgcggtggctcatgcctgtaatccccagctactttgggaggctgaggcacgagaattgcttgaacccaagagggagaggttgcagtgagccaagatcatgccactgcactccagcctgggcgacagagcaagacttgtctcaaaaacaaacaaacaaaaanacaaccaaaaaaaatttacccatttaaaaatggagnagganttttttcaatttgggcaaaagttaaaaaaagtaaaagggttgaaaaggaanaaaacccctacctctttc

SEQ ID NO: 2432 - DNA, 403 bp, Homo sapiens
  misc_feature 206, 214, 218, 300, 325, 389: n = A,T,C or G
ccgcggtggcggccgaggtacatcctgactctcaattcttgttttcctttgaagatccttcgaacccaacgtctcaactcacctggactggtttaccccaagggttcagggatagcccccatctatttggccaggcattagcccaagacttgagccagttctcatacctggaccctcttgtcctttggtacgcggggcctctcctntggccgcncgcngcgggagagaggccgagatggcagatgaagattgccaaggctcaggtcgctcggcctggtggccgacacgatctttgggaanaatcatccgctaagggaaataccangccaaaaaatcatttttttgaggggatgacccgggtgcccttgcctttccattgacatttttcncctttaagcaccca

SEQ ID NO: 2433 - DNA, 483 bp, Homo sapiens
  misc_feature 2, 227, 301, 307, 312, 334, 351, 367, 378, 393, 401, 402,403, 410, 418, 424, 436, 446: n = A,T,C or G
tncttagggcgaattggagctccccgcggtggcggccgcccgggcaggtactggaacgtttgtcagtgagtttcatttccaaagtttaccctacatagggaattgtagaagtgagttagtagaagtgagttcgtgtgaaaccctggaaagaaaacaaaagccccatgcaacgcgttccgggctgttgtgtagaatgcttattctagtcactaggggaagcacataanaaacacctgaggttgtgtgtgctgaagggcgaattttgtccttttgggggagttcatgatataaacattctagnaaccanaaaangtcaaaaatcagaagggttcanggtttaggcttttaagntttcttcttttttggngggaaaacagnattttttaaaaaggnccaaattnnntaacctnatttatanttaagntttttacccccncgggttttantgaaccttaaaaaaaataaaattttttgggccccttt

SEQ ID NO: 2434 - DNA, 426 bp, Homo sapiens
  misc_feature 300, 329, 335, 365, 366, 382, 388, 400, 403, 408: n = A,T,C or G
acttagggcgaattggagctccccgcggtggcggccgaggtacaatgaaagtttcacatacggatcactggctccaaagatgtcctttttggcgagatcaattccagaaacaacttttactctgagaatacgggactctcccgagtgttacttgctcaaatgcgagacgtctcatttaggaaaatacaatattaaaggtttagtgcattaaaggaaagctggaaaactcaagggcagagcaagttctgaagagtatgccggaagtcgtggcttgcagccaagggtaacttttccactgcncgggtgacaaggtcacaggagtagaaagnttttanactttggactcccaggcaaagcaagtctannaccgggttttgttttnctctcntggggaaaaatnggnctttncccttcattggtggaacc

SEQ ID NO: 2435 - DNA, 425 bp, Homo sapiens
  misc_feature 3: n = A,T,C or G
ctnctatagggcgaattggagctccccgcggtggcggccgcccgggcaggtacgcggggatgtctcttgtcagctgtctttcagaagacctggtggggcaagtccgtgggcatcatgttgaccgagctggagaaagccttgaactctatcatcgacgtctaccacaagtacacctttcacagcagtcttaaaggtttgcagcagaagaatttaaagttcctgctgcaacaagtgcaattattaccaatgatggaataggaataaatcctgcacagactgctggaaatgtttttctaaaacatggttcagaactgcggattattcctagagaatccgtgtttggaaagtttgttaaatattctggctaccttgggaaccaataccgaattggccttttcagggataaaatattgggtatttttttt

SEQ ID NO: 2436 - DNA, 433 bp, Homo sapiens
  misc_feature 418: n = A,T,C or G
actcctatagggcgaattgtagctccccgcggtggcggccgaggtactaacaaatgcagtagccaacaagattaccatgcaatcattaaggagaaccaaagtaagagagccactcaaaccagattttgaacgctactaaaattaaagtagttctttgatgaatatgaatgagtagggaaaggattctttgtaatagtgatacctctgtggtaagagaagggtggtatgtgagttttagtctacagattatggcaaattcagtgacaacaatcaaatggtctaagattgacagtagcacagttttactctgtgaaggtaatgttcaggacaaatttcaagaaaactagaaaaccattctttacagctgaaatctttccctaaccattgttatttcccactttttaaaggtccctcaagnagaatgaagaaaagg

SEQ ID NO: 2437 - DNA, 413 bp, Homo sapiens
cgctcctatagggcgaattggagctccccgcggtggcggccgaggtactattgcattcatgaatgattacgcacttagtttataggctcttagcctgaatagatgttcagtaaacaaggaacttttgaaaaattacatcatattatcagttacatttaataattaatttctgacattaatttgattcctcaaaagtgttgatgatcctctcttattgagtatgtagttgatgcccatcattttcaatatcagttcattgtaaaagttaaaatagcatgagtctttagtgctatctttaccagttgtgaaattagtagtatttaataacactaaaaattctccatcttcattgtcttcagtgatttttagatttttggttattgactgataattcaatgagatcttttgttaaa

SEQ ID NO: 2438 - DNA, 445 bp, Homo sapiens
  misc_feature 389, 426: n = A,T,C or G
cgaatacgactcctatagggcgaattggagctccccgcggtggcggccgaggtacaaggataagaattattgaaatatgttactagttagctttttcctttgtatttcaattctttttgaaatcttggaagtttggcttagtctttgattacaccaaggatacagggctttgaagacctggagaaactagtgagtattcatttcaaaagcaagtcttaagactggttcagaaccacaagcatgtttttttgggaaaagtgggaggattattgaacccaattgaatcacctttttaactgaagcaaactgaaatgaatatagcaaacccatcagttatatcactatattctttttaaactaatctaccatttccttgctcacctatcagnttcatccatgttgtatgtatgagacagtattgacgtnggtgattaaaagtattgga

SEQ ID NO: 2439 - DNA, 371 bp, Homo sapiens
  misc_feature 332: n = A,T,C or G
aggtacattattcctccacgtctgtcccctctgctccaagactgcaggggagagtcttgcacatcatctttgtaaaaacagtctttgttttactcagaaatattttattgagtcctgctaaatacatgctaggcattagggtttaaaaagaattaaaataaagcatgtcagagatggcttttctagaacacatgcccaagcagagacttaaatattgagactagccagattaaaaggtgtagagggcaggaaagggtgaccggcatgccacgcagcagcaagagcgggagccgactcctgaaagagtggaaaggtatttgccctacaatagnaagggatgaggtggagttaggggcacctgccagcagttt

SEQ ID NO: 2440 - DNA, 420 bp, Homo sapiens
  misc_feature 374: n = A,T,C or G
cactacttagggcaattggagctccccgcggtggcggccgcccgggcaggtacactggaggctggagcctgcagatggcatggctctgcggctcaccttgctgcagttggtggtggtgacagagactgcagcttgactgtagtggtggttaccaggagctctgccactgcatgtccactagtgacgggttcgctccaccaccccagctgggtagccgctgctctcacataaggggtccaattaaaattgccaggaataaattcccccggactttgacttctcaagagctaagaaggtttgctgagtattctggcatgatgtttggtgatcaaacaactgctggccaaaaatgatgagtatttccccctcttgcntgaaagatgtgcctcccatacaattagttccattcaccgtttcatc

SEQ ID NO: 2441 - DNA, 408 bp, Homo sapiens
ccgcggtggcggccgcccgggcaggtacgcggggtgacacacacacacacacacagcacctgcacgcagatgcacacatctctagtcaaatgaggctctcagctttttgataggggctttttgatacgtgtataaccaatactttattctcactgtagtcaaggactcattgcaattcagaaatgagaagctgatccggaactccactacagctcaaagaaattctcgaatgttctcacctattaacagttattaaaatggaagaagctggggatgaaattgtgagcaatgccatctcctacgctctatacaaagccttcagcaccagtgagcaagacaaggataactggaatgggcagctgaagcttctgctggagtggaaccagctggacttagccaatgatgaga

SEQ ID NO: 2442 - DNA, 404 bp, Homo sapiens
ctacttagggcgaattggagctccccgcggtggcggccgcccgggcaggtacaaagtccctgaggcaaaagcatgcttgctgtgttctaggaaaagcaaggaagacagcatgtctatagcagtgggaggtggaaggataataaacagtaggtgaggttagaggggaccaaatcatgtattttccatccagaggttcccaaccttggctgcacattagatttattctaaggagcttttaaaaaataccaatgactgggtcccagcctagagtgattaaatcagaatctctggaggtagacttgagaatctgatgtttgcaagtttcctaggcaagtcaaggcctgaggaagactgctgcaggccattgtaaggagccagggcgttgatctcattcaacctttccc

SEQ ID NO: 2443 - DNA, 441 bp, Homo sapiens
ctacttagggcgaattggagctccccgcggtggcggccgaggtactgggcaaagctttgcagtatagatcgccctgaagaaggaggtctgccaccttatgtgtttgccctgatggccattttctttcttcagcagaggaaagaaccccttttgcctgtatatctaggatcatggattgaaggattctcattaagcaaactagggaatttcaaccttcaagacattgaaaaagatgttgtgatctgggaacatactgacagtgctgcaggggacacaggcataacaaaagaagaggcaccaagagaaacgccgattaaaaggggacaggtggtatcatccctactctgcagataatgatagcgcccattttttgaacactgtgtgccaggcactgtgctaagcactttacagacactatctcactcagtcctcccaacaacc

SEQ ID NO: 2444 - DNA, 404 bp, Homo sapiens
  misc_feature 179, 184, 226, 261, 274: n = A,T,C or G
acgactcacttagggcgaattggagctccccgcggtggcggccgcccgggcaggtactttttttttttttttttttttgtctttgtgccattgctttatctctatttggaatgacactctttcgtccttggtctctcaccaatccctacttcatagtcatcattaaaacccaaattttnctttnacgcccaatttcaaaatgccaggttctaccctgaaagctttntgggttctgccaaataagcactaactacttgtctntctctgtttctgnaatggccatcacatgagaacgacaagtgattttacagctgacaatatatatcctatcagcccttccgaattctttctccatccagctctgtgccctggattgtctcgccattggcactaacttggatggg

SEQ ID NO: 2445 - DNA, 361 bp, Homo sapiens
  misc_feature 165, 280, 333, 342: n = A,T,C or G
ccgcggtggcggccgaggtacttccaaaccctcctgttctttcctttttgttttccccaattttaacataaggcaaaagcagtaattgagcaattctatcacctggattggcactccggggaacagtggagctgatcactaactgaattccccctttataatctnaaataaattaccccagtattgaaatttggactcccttcaaatttagacttgatctccctcaaaggcctaccctcccttctggcagcgggccatatacccctctaggaatcttttngtgggggctttccagggagtaaaaagaccattttgggttggaaacataaaatntactgcggntgctgcctgcttgtggcgc

SEQ ID NO: 2446 - DNA, 415 bp, Homo sapiens
ccgcggtggcggccgaggtacttaatcctggttggtttacccattctaaattatttatgtgagatagctatctatttggaaaaaagtaaagtgaaagtcttacctcaatccacactcaaaaatagtttactatatgacagatctatggcaggcagatttgatggctcaatgaactccaccctcccagtgttcacacctttatgtagttcccacttacagggagccaaaggtccgtgggacgtgaccaactcagcattccactggaggctatatgatcaaacagcaaactgtttatcatgaatgcaggatgtgagcaaactcaccattgctcctgccgacagaaggttttctggaggcaatcactccctggtgcttgaggttatctactgcaacatttagaggaatgtagttcttt

SEQ ID NO: 2447 - DNA, 430 bp, Homo sapiens
  misc_feature 5: n = A,T,C or G
cactnctatagggcgaattggagctccccgcggtggcggccgaggtacgcggggagtgataacattagaaactcattggagcacgaaccctgttgtgaactgcctatccgaaggatctaggttgtgtgcttcgtatgagaatctaatgccagatgatctatcattgtctcactttgcccccagataagaccatctagttgcagaaaaataagcccagagcttccactgattctacattatggatatgtgccgccgaagcaagcacaaagccctacttttacacatgcctagtgatgcttcatggacaaggcttggctctgttgagtccaactaacctacctgagattctgagatttctcttcaatggcttcctgtgagctaggagtttgaaaatatcttaaaaatcttggagctagaagatgggaaggta

SEQ ID NO: 2448 - DNA, 433 bp, Homo sapiens
ctacttagggcgaattggagctccccgcggtggcggccgaggtacttggcctggctgtcgaaataattcattccatttctttggtgattgtcaggaagctcttaatattttctgtaagtttttttcttggtttcaccaacaggcttcatcgatccacctctgtttaatataaatgatgcaatagggatgttgctgagcaagtaattatagtgagttattttgtcaatatatgggcttttgggagtaacaataatattcagatgttctcccactagcaaagccttatggttatcagtccaatcaatataaaggtaactttggctgagagatgagtatgctattgctcggtaaccttccctggccctggattttcttctgggaaggatctgggagccatcagtttttgacatttaaaacctccagccacccggtc

SEQ ID NO: 2449 - DNA, 399 bp, Homo sapiens
  misc_feature 370: n = A,T,C or G
ccgcggtggcggccgcccgggcaggtacccatctacttggttacagtgactacaccgtaagtggacacttcaatcaagaaaggcctatcagagtcttcctctagactaacctatggtctgagggaaaaaaaaattctttctttccattaaaagctatggctgctggcagccattttgcttgtcccttaagaagaggccatctgttgaacagagaccactggattcaaagatggagagacattatctgagctcccagatccagctcagcctaagccctaaccagacttgccaattattacacacattaacttggttttttttgcttaaggttactgaaatcattatttccaaccaccctgcatccaaggantcctatataccacaaggggggggtaaaac

SEQ ID NO: 2450 - DNA, 345 bp, Homo sapiens
  misc_feature 294, 317: n = A,T,C or G
cactacttagggcgaattggagctccccgcggtggcggccgcccgggcaggtacttcagatactcacacaaccatcgtgtttttcacttctggtgaataaagcagcccttatcgatacagtttctactgaatgtgtatcgtgttcacaccatcatcaagtcgaaaaatcatcaagttgaaccgttttaagccggggaccatctgtgttcaactttctgatgactttcacaagctctgcattttatctcccagctctgttgtaaggtattgtcagtgcctttgcagaaaagaatnaaattccttccaagtgacatagncagcaagttttggagagctaaggtcaaa

SEQ ID NO: 2451 - DNA, 414 bp, Homo sapiens
  misc_feature 356, 389, 396: n = A,T,C or G
cactacttagggcgaattggagctccccgcggtggcggccgaggtacatttacacatgaatgggtgcttggcaaggttaagaaacttgcacaaggtcacacagccaataaatgggggatccagaattccagcccaggtctgttgggctctaaagcctttgcacagtcttagctgttatgttgtattatattgcctcctaggttatgtatgtagaatttttggtcacatttaaatattccccttcgattcatagtgttaagaaatatacttaagcagctacgtatttactagggatgaaaatgtttccaattcataagccagaacacttttttcttcagatatttaacacaaagaangggatgtaagaccatttttttattcccatctcncattggnttttcatattttttttat

SEQ ID NO: 2452 - DNA, 420 bp, Homo sapiens
ccgcggtggcggccgcccgggcaggtacgcggggacatcaatgcagagtccctctgtgaatttacaacacccaacacccatgagttcagtccttaagaaggaaaattgagcaagtatttaattggttggacattgcataaaagaggtccatatccaggctaaccctagaaattttattctcaaacttagttggcctctttttcttctgtcagaggaccattcttagtggcactggggaaatcttggcacccagaagaattcaactgcgctcactgcaaaaatacaatggcctacattggatttgtagaggagaaaggagccctgtattgtgagctgtgctatgagaaattctttgcccctgaatgtggtcgatgccaaagggaagatccttggaagaagtcatcaatggcgttgaaacaa

SEQ ID NO: 2453 - DNA, 253 bp, Homo sapiens
  misc_feature 236: n = A,T,C or G
actcctatagggcgaattggagctccccgcggtggcggccgaggtacatctacctaaaggactattatgtggaataatacatactaatgaagtattacatgatttaaagactacaataaaaccaaacatgcttataacattaagaaaaacaataaagatacatgattgaaaccaagttgaaaaatagtatatgccttggaggaaatgtgctcaaattactaatgatttagtgttgnccctactttctctctct

SEQ ID NO: 2454 - DNA, 411 bp, Homo sapiens
  misc_feature 404: n = A,T,C or G
ctacttagggcgaattggagctccccgcggtggcggccgcccgggcaggtactttaaaagttataatgctgatgaacaaaaaggtatgtaaaaactcaggatttaattaattagatatattttccaccattagaacatttctgctcagaggtcttattacaaagctacatttctgatagtctactacggtgcagcttctgccaaagccactcaatactaacctcttacatagcaactctacttacatgactaaaatgtatatcatactttacatagccaaaaagataaagaaccacctgatttctatttccaagctactcaaccctagtaaatggccttatcatttaccctacccaggcactgatgtaaaaaaatctggggaggttaatcataattttttctcnttccctc

SEQ ID NO: 2455 - DNA, 367 bp, Homo sapiens
gttgtaaaattaccaggaaccgccatgcctcaagatcgccctgttttctggcttcatcaatgactgcatgcagtgcaccaccctgtccactacgtgatgctgtaggattaagtctcacagtgggcggctgaggatacagcgccgcgtcctgtgttgctggtgaattagacgccatcgctgtgggttgctggtatggtgccgtgctatttggcacaggacacaccgcttgaggtctgtattgaacctctgaaggaggccgatactgaagctcggttggcagccggtattgataaactaccagcggttgggtcttattttctaccggctgatattgtggatactgtatctgagttggccattgcccggg

SEQ ID NO: 2456 - DNA, 416 bp, Homo sapiens
tatagggcgaattggagctccccgcggtggcggccgaggtacgcggggtaaccacctgggaaaacttcacagaaaatgagagtttcagatgctgagaatagaaccactaagaagcagaaaagagaagatattctcgtgggggagaacaacggctgggaggggaggaagcatggccaaggcaaagaggtgggcattaataagaactgcttcttgctgccgccatatgaagaaggacgtgttcgcttccccttcctccatgattgtaagtttcctgagaccttgccagccatgctgaactgaatacaacatgtttaagaccacagaacatctgcataggctgtaaattttcgttgaatgattgggatgcaaagatgggaagacaggatgggataggagggaaaaaggacagaatcaga

SEQ ID NO: 2457 - DNA, 656 bp, Homo sapiens
  misc_feature 518, 598, 643: n = A,T,C or G
aggtacctacagtcagtgctaccagtagatttacttatcacatggtaagtggaatgtcacagataaataatttacaggacccttcttatcaaagatcattacaatgtaggcctaaggggaaggcttgcccaaggaaattcccaaagaatcaaaaagcccagaagtcttagtctgcggagaatgtgtggctgatactgcagtgtagtacctgcccgggcggccgaggtacgcggggacatcaatgcagagtccctctgtgaatttacaacacccaacacccatgagttcagtccttaagaaggaaaattgagcaagtatttaattggttggacattgcataaaagaggtccatatccaggctaactctagaaattttattctcaaacttagttggcctctttttcttctgtcagaggaccattcttagtggcactggggaaatcttggcacccagaagaattcaactgcgctcactgcaaaaatacaatggcctacattggatttgtagaaggagaaangagccctgtattgggagctgtgctatgagaaattctttgcccctgaatgtggccgatgccaaaggaagaatccttggagnaagtcatcatgcgttgaaacaaacttggcatggttcctgttttgnggggggaacccgg

SEQ ID NO: 2458 - DNA, 406 bp, Homo sapiens
cactacttagggcgaattggagctccccgcggtggcggccgaggtacgcggggacatcaatgcagagtccctctgtgaatttacaacacccaacacccatgagttcagtccttaagaaggaaaattgagcaagtatttaattggttggacattgcataaaagaggtccatatccaggctaactctagaaattttattctcaaacttagttggcctcttttttttctgtcagaggaccattcttagtggcactggggaaatcttggcacccagaagaattcaactgcgctcactgcaaaaatacaatggcctacattggatttgtagaggagaaaggagccctgtattgtgagctgtgctattgagaaattctttgcccctgaatgtgggtcgatgcccaaagggaa

SEQ ID NO: 2459 - DNA, 415 bp, Homo sapiens
  misc_feature 176, 189: n = A,T,C or G
attggagctccccgcggtggcggccgaggtacgcgggtaatctcttgggttatgattactgcaaaatacccatatattcataatattgtctctgttataaacttgtaatttctattggcagaacatatactcaaattatttttctaagtatgggtgatatatttgttttaattcanattttactttttngtccctaagatccaacaatctataatgtgaagagagttaactgggtttaaaagtataatctgttcaacagggtggagtcttagtccacagaaaagtaaattatataaactcaattccttcatttttaagttgggtataacaccaactactcgacacctcatagcattaatatgaggacacaacgacgtaataaagacattagtgttactggaagattggccagcca

SEQ ID NO: 2460 - DNA, 539 bp, Homo sapiens
  misc_feature 20, 136, 155, 175, 185, 190, 197, 202, 203, 230, 234, 240,250, 254, 256, 263, 268, 269, 270, 274, 288, 291, 306, 347,348, 350, 358, 373, 379, 404, 409, 413, 415, 427, 428, 435,446, 453, 460, 464, 466, 468, 473, 475, 477, 480, 493: n = A,T,C or G
  misc_feature 511, 517, 521, 529: n = A,T,C or G
aggtacgttcaatccggggnaatgatgacatgttcaatggcatttacacgcctgttggttatcttaatagcttcatccaaagtaacaaaagaagtctgcagagaagctagcttccaccagtagttccactgctttngcataattcctctttaaanttaaaaccctaactggttcnccccaccttnttggnctaaaancccanntccaagttttcaattaaaacttggtanaaantttccncttttccaantggngnaaaattngattnnnaaanaattaactttgggncanaataggtttaaaacnaacccctggccttaaccaattttaattcctttagtcctttnncnacccttcngcaaaattccttttnccaacnttttgggccgcccttttattaattnttggnaccnantttttttcgggnnaattaanaaccttgggtnaaaggtnggccctngaanangnttccnancnccntggcctttgtagnaaaaacctttgggggccnttttcncaangccttaanggtggaaaaa

SEQ ID NO: 2461 - DNA, 362 bp, Homo sapiens
ccgcggtggcggccgcccgggcaggtaccagttgtaaaattaccaggaaccgccatgcctcaagatcgccctgttttctggcttcatcaatgactgcatgcagtgcaccaccctgtccactacgtgatgctgtaggattaagtctcacagtgggcggctgaggatacagcgccgcgtcctgtgttgctggtgaattagacgccatcgctgtgggttgctggtatggtgccgtgctatttggcacaggacacaccgcttgaggtctgtattgaacctctgaaggaggccgatactgaagctcggttggcagcccggtattgataaactaccagcggttggggtcttatttttctaccggctga

SEQ ID NO: 2462 - DNA, 547 bp, Homo sapiens
  misc_feature 139, 161, 169, 190, 203, 208, 217, 220, 225, 234, 248, 259,262, 272, 282, 285, 309, 315, 319, 338, 346, 353, 367, 371,390, 407, 431, 445, 475, 488, 513, 526, 533: n = A,T,C or G
catcttgggtcatcgatgagcctcgccctgtgcctggtcccgcttgtgagggaaggacattagaaaatgaattgatgtgttccttaaaggatgggcaggaaaacagatcctgttgtggatatttatttgaacgggattncagattttggaaaattgaaaantcacaaanatgtggatgccatttacccanattgaagtagggnaaaanaccagcacngangtaanaaatctttngatgggctttccancaaaagtacantgnccaacaccanaacaaaaaantgngaaattaccttgtggatcgaacantggagngcangccccaaagcctggggtgnagggaagnataaatncaccgggggccaanaagnggtccaaggcatttcttgngcccccttggcttggcnctaaaaaacctgttggccgttttncattaaaaccccanaaattcaatttttccaattaatttttcctnaaaaccccccttncaaaaaaaaccaaaaaaggcctggntttggttaaaatnaatttcntttggaattccttc

SEQ ID NO: 2463 - DNA, 523 bp, Homo sapiens
ccgcggtggcggccgaggtacaggatagttgggaaatgtttctcaaccctcagagaatgctcactaggcacatgcataacatgtagatgcccaaagcatttcagaagtagaattacaaaaaacccccaaaacacttgtcatgaaaggtttgtgaacctaatctcgcctgtatagactgggctaattctgatagtaagaggagttctcccttctcttaagtaaacaaaaactattggctttcatccaatcggttattctaagaccactgcaacttttttctctcacaaaaaggagttgccctaaagaagtttcatttgctttgatcttttttttcctccctcctctaaaggaaaaaaggtatgtgtgtgttgaaatctaaaatatggcaaagtttccatttaaaaatactttttagataaccagatttgctcttcgcacaatgaggtctttggtccctgggagatattttatatcatattcccgaattttgttcctggagtcatctttaacggggcttagggga

SEQ ID NO: 2464 - DNA, 557 bp, Homo sapiens
  misc_feature 426, 428, 436, 444, 473, 485, 491, 510, 538, 544: n = A,T,C or G
ccgcggtggcggcccgcccgggcaggtaccaggagggtattgatgtttgaggtccaaactgaaaacccatcacctccttcccactgctatagcagcgttagccctggggttcattatctagccagttcacaccttctaaagtggggctctgaaaatgctttactttccttcacagaacaaagcaattctcaagccctcctgagaatcacccaccaaccagagccaactgctgtcacttggagggtgcagcttgaattcttctaattgtgacacaaactcttgaaactgtaaatgctgaaagattaaatgaggttataacactcagaaggtttacaagtaaaagtaagtcaaatcaataggtctttatttcatatctgtaatggtttagctctgcgggaagtgttagcagctatatgaattaggaanantttaaaanacattccntaaccacatgaaatggtccaggtaagaanataccatatttntccaanttttaaaggtgaaatgctncaaatatgggaaagcttacagttttcangcaaanctttttaaaaaaa

SEQ ID NO: 2465 - DNA, 603 bp, Homo sapiens
  misc_feature 424: n = A,T,C or G
ccgggcaggtaccggagttggagccacctgggtctgactcttacctcagtcatggcccagctcttgaagtcacagtctcctcagtgcaaacagggatgaatccctgagcctcacagatctttgtgagatgattttcagccctatatgaacaggcctaacatgtttctaactctgtaagtgcttactatactgctatacttctgctatgactagacaagaccattgcagaacacaggaaccgatcattctatagaaaccaagcatctagtgtgctatgctgtgtctgggccacctcaggaaagctctaagcataggcagcatgaggcattccagagatgacatgtgagcagcagtgaaggagagaggcttccgtgtgaaggtggcctgagccaacctagattcttcagtctgaaaagacacatanagaatgtgacaagaatctgtaaaataataaagaaaatggtggaggtaaacatcactgtcccatttgaaatttgaatatagtaatttccaggcacacaataccccaatgagttgtaaaagggaacatgttatattccataagctgtgatagaggctaaacatagaaattaaatcaaaggg

SEQ ID NO: 2466 - DNA, 503 bp, Homo sapiens
  misc_feature 494: n = A,T,C or G
ctcctatagggcgaattggagctccccgcggtgggcggcccgaggtacctgtctcatatgtggcaactacgtggggcagcacactcaaggaatgaaggaagtttcagtgaatgacaactttataaagacagtgttgaggcagcccagtgcagcggtttgggagccaggaacagcgtgtggccggagtgtggctgcaggacaggaggtcaaaaataagggttgagggtggaataggaagaccccggaacgtcatcctgggagcttgagattttattctacatttctcttgttcttaactatttagggtgatggatctctgcagtaagtggaagagttcttcatggcccccaaggttatatccatctagaacttcagcacgtaatttcatctggaaatagtgcctttgcggatataagttaggtaaaactgaagatgagatcatactggattaggatgggatctaaatccaatgaaaatgtctccataaaaaacangaaagaacc

SEQ ID NO: 2467 - DNA, 430 bp, Homo sapiens
  misc_feature 258, 356: n = A,T,C or G
agggcgattggagctccccgcggtggcggccgcccgggcaggtacgcggggacatcaatgcagagtccctctgtgaatttacaacacccaacacccatgagttcagtccttaagaaggaaaattgagcaagtatttaattggttggacattgcataaaagaggtccatatccaggctaactctagaaattttattctcaaacttagttggcctctttttttctgtcagaggaccattcttagtggcactggggaaatnttggcacccagaagaattcaactgcgctcactgcaaaaatacaatggcctacattgggatttgtagaggagaaaggagccctgtattgtgagctgtgnctattgaagaaattctttgcccctggaatgtggttcgatgcccaaagggaagatccttgggagaaagttcatca

SEQ ID NO: 2468 - DNA, 445 bp, Homo sapiens
  misc_feature 1, 267, 315, 329, 330, 349, 354, 365, 376, 411, 423, 424,434: n = A,T,C or G
nttagggcgaattggagctccccgcggtggcggccgaggtacgcggggacatcaatgcagagtccctctgtgaatttacaacacccaacacccatgagttcagtccttaagaaggaaaattgagcaagtatttaattggttggacattgcataaaagaggtccatatccaggctaactctagaaattttattctcaaacttagttggcctctttttcttctgtcagaggaccattcttagtggcactggggaaatcttggcacccanaagaattcaactgcagctcactgcaaaaatacaatggcctacattggnattttgtagagggnnaaaaggagccctgtattgngagcntgtgctatganaaattctttgnccctgaaatgtggttcgattgcccaaaagggaaanattccttgggannaaagtcatcnaatgccgtttg

SEQ ID NO: 2469 - DNA, 418 bp, Homo sapiens
  misc_feature 173, 359, 376, 392, 394, 405: n = A,T,C or G
ccgcggtggcggccgcccgggcaggtacttccaaaccctcctgttctttcctttttgttttccccaattttaacataaggcaaaagcagtaattgagcaattctatcacctggattggcactccggggaacagtggagctgatcactaactgaattccccctttattaatctngaataaaattaccccagtatgaatttggactcccttcaaatttagacttgatctccctcaaaggcctaccctcccttctggcagcgggccatatacccctctaggaatcttttgtgggggctttccagggagtaaaaagaccatttgggtggaacataaatctactgcggtgctgcctgctgtggncgcgggacaagcctgtntgggattgttgtaaantnggcttggactnccttgaagtgggt

SEQ ID NO: 2470 - DNA, 690 bp, Homo sapiens
  misc_feature 209, 300, 325, 331, 339, 350, 398, 532, 546, 593, 627, 629,633, 642, 649, 660, 661, 666, 672, 673: n = A,T,C or G
ggcgaattggagctccccgcgggtggcggcccgaggtacgcggggaatgccagatgatctatcattgtctcactttgcccccagataagaccatctagttgcagaaaaataagctcacagcttccactgattctacattatggatatgtgccgccgaagcaagcacaaagccctcttttacacatgcctagtgatgcttcatggacaangcttggctctgttgagtccagctaacctacctgagattctgagatttctcttcaatggcttcctgtgagctagagtttgaaaatatcttanaatcttgagctagagatggaagtangcttgnacgatttncattatcatgnaaatcgggtcactcaaggggccaaccacagctgggagccactgctcangggaaggttcatatgggactttctactgcccaaggttctatacaggatataaaggtgcctcacagtatagatctggtagcaaagtaagaagaaacaaacactgatctctttctgccaccccttttgaccctttnggaactcctctgancctttagggacaagcctaccttataatctggctagagaaaagaccancaacggcctcaaaggatctctttaccatgaagtntnaacntaattcttnggcttangatgtggggtnncacantaaggnnctgaattttggggggaa

SEQ ID NO: 2471 - DNA, 440 bp, Homo sapiens
  misc_feature 4, 192, 193, 194, 372: n = A,T,C or G
actnctatagggcgaattggagctccccgcggtggcggccgaggtacaatacaccttaattagagaacaaaaatgtaagctcagggttttgaaatcctggcttttcattgagtttttgcagatcataaaatatacttaattcggcaaaatatctaacagtccaaaacatataaacaacattaaaaaagcctnnnggattggggttaaggacaggccaacacatttatcaggttcatctgttttaacaaaatgaaatatattaattgtagataaaaacatagctggagagaaagcaccaaggtaatcaaatagtaagcagcagcagaaccacatgccaagacactaagtgcttcacttgccttacatctcatnttattccccacaaccaacctagggaggacaaacagtattactctgcccccctttatcaactatgaaag

SEQ ID NO: 2472 - DNA, 643 bp, Homo sapiens
ccgcggtgggcggccgcccgggcaggtacccttacaaagaagacaccataccttatgcgttattgggtggaataatcattccattcagtattatcgttgtaagttaaatccacttttccaagtttataacttttgggcacttggcttaattttctgtctcttttaatgcttaaatgtgtaatcctccaaaaacaatgtatgctttttaaacctttaattgatgctttatttgatcaagagaatctcagctattttaagtggagtcaaaaaataacaatgtgtaattgtaagagccaggcatggtgacatgcctgtagtcccagctactcgagaggctgaggctagaggattgcttgagtctcggagttggatctataatatgtgatgatcacatctgtgaatagccattatactccagcccagacaacactgcaacatcccatcttaaaaaaaaacagaaaaaaaacacgaaaagaaccttgctggctatgtatagattttatgctaatcttttccatgtcaccgtgattgttagagctctaattttattgttttaataatcttgtgatcaatagttgaatgttatagcaatatgattctagcatactttatacatagggatatcattttataatttattgga

SEQ ID NO: 2473 - DNA, 421 bp, Homo sapiens
  misc_feature 6, 272, 404, 405, 417, 419: n = A,T,C or G
ctatanggcgaattggagctccccgcggtggcggccgaggtacatttggtggaactgagaaatggcataacaccaaatttaatatatgtcagatgttactatgattatcattcaatctcatagttttgtcatggcccaatttatcctcacttgtgcctcaacaaattgaactgttaacaaaggaatctctggtcctgggtaatggctgagcaccactgagcatttccattccagttggcttcttgggtttgctagctgcatcactagtcatnttaaataaatgaagttttaacatttctccagtgatttttttatctcacctttgaagatactatgttattgtgattaaaataaagaactttgagaagaacaggttttcatttataacataaaaatcaatgtannacgccaaatttntntg

SEQ ID NO: 2474 - DNA, 421 bp, Homo sapiens
  misc_feature 21, 37, 363: n = A,T,C or G
cgaatgggagctccccgcggnggcggccgaggtacangcccacagaactgtgagccaattcaatcccttttctttttcaattacccactctcatgtatatctttatagcagtgtgagaacagattaatacactcctcctcagaaagcattcaatttagctgtgtctaaagtatgccaggtgttctagggtgttatcttagccaataattcttcctcttcagcaagatctatttgcctatgacagcttgacctacatttcctaccatacttgtcagtaacaagtagcccataacatctgaatggacttcattgaaatcacaggaggttctttaagttctctacctttattaagcaggcatttcngggaaacaccatcaactttctaatttaataaaggtgcctgttgcttttgaaaaactgc

SEQ ID NO: 2475 - DNA, 404 bp, Homo sapiens
  misc_feature 352: n = A,T,C or G
ccgcggtggcggcccgaggtacgaaaaaatcaggctactaagcccactgttaatatagacgcagaccaattgttaggaacaggtccaaattggagcaccattaaccaacaatcagtgatgcagaatgaggctattgaacaagtaagggctatttgcctcagggcctggggaaaaattcaggacccaggaacagctttccctattaattcaattagacaaggctctaaagagccatatcctgactttgtggcaagattacaaggatgctgctcaaaagtctattacagatgacaatgcccgaaaagttattgtagaattaatggcctatgaaaatggcaaatccagaaatgtnagttcggccataaagccatttaaaagggaaaagttccagcagggagttggat

SEQ ID NO: 2476 - DNA, 423 bp, Homo sapiens
  misc_feature 76, 99, 310, 408: n = A,T,C or G
tatagggcgaattggagctccccgcggtggcggccgaggtacatcatatttgcttgttggctttatgataacctanaaataatattctggattaactgngtgactcatgagaagatttgtgcaactatgtttccaaatttacttgattttcaagacttacactagaactgtgagaaccagggtaattaataaccatattgtattaatatcaccctttgggtcaactcttgggtagccccaacggtagtgtagggaattaacgtaatttttcctactaaaagtatttggatttgtttttgagagaccacantttgaaaactcattgacatgcaaagtcttaaaaattgttaggttaaaaaaatttttaaatgccattttgaagtgggttttataggaaaaaataattantcttaaccttgggtt

SEQ ID NO: 2477 - DNA, 609 bp, Homo sapiens
  misc_feature 121, 171, 176, 183, 205, 218, 220, 225, 233, 255, 260, 265,286, 290, 299, 305, 337, 354, 375, 378, 397, 418, 421, 423,453, 459, 470, 490, 491, 520, 533, 563, 576, 579, 580, 581: n = A,T,C or G
ggcatttctcccagggatctctgtgcttccttttgtgcttcctgtgtgtgtggatatttaaaggggctggaaatgtgtaaaaacatgtcactacttagacattatattgtcatcttgctgnttctagtgatgttaattatctcccattttcagcagatggtgtggcctcanatggnaaaagtncagtcaagcctttcttaatttnctcacctcctgtnantcatncagggttncctttcccacccaatggccaangaatnctttnccttggggtacttccccttcngggncttggcaanctccanaaccaaaaaatccttccccccttcttggtttntttttccttggaatggncccaaagccttttcttcccgnggncaaccttttggccttaatntttccttttcccccccccccngcngnataaccccttggccccccgggggcccgggnccccgnccttcttaaanaaaacctaaagttggggganntccccccccccgggggcccttggccaagnggaaaaatttccngatattaattcaaaaaggccttttaattcngaattaaccccgngcnnngaaccctttccaaaaggggggggggggg

SEQ ID NO: 2478 - DNA, 441 bp, Homo sapiens
  misc_feature 342, 377, 380, 390, 401, 425, 427, 430: n = A,T,C or G
ctatagggcgaattggagctccccgcggtggcggccgaggtacgtgcaaagcattctatgtatttttagcagaacaggagacttactttacactagctgaactaggtgtccatcagtgcctctgccaaccattggatgttagaggattctgccacctagcttattttatttgtatttaagtgaatataccaaacatttatatgagcaaaccaagttttacataacatgcttttggtatgtattatgactttttacatttctacttggatttcctcttcagatctcagtttccacaaatctgcatccaggttcagggcctctgattctgcacaaatcatatgngccaagtggattggatttacttaggacagatcagnatncttcccccangctaattaaanctctgcctttcttgatttccaagncnctnaaaaataaaat

SEQ ID NO: 2479 - DNA, 407 bp, Homo sapiens
  misc_feature 32, 187, 200, 378: n = A,T,C or G
ccgcggtggcggccgaggtaccgactcctcanaaactggcatgccaaatcaaaatgggtctggttcaatcctccctaatggcaatgtaaacccctctaactaatcccacttctcctaattatctttttctccttacgaacctaaaaatctcaccatttctattagcctgaaaataacatccctctgntcttctcttcctncttcagcactggatctcacttacaataggttttatttaataattatcttccttacactttctgtctcaccagtttccccttaaactgatttacctgctacacaaaattattcttattgggcttatgtgccttttcctccacttattcgacctctcacctggatgggatgctcctgcanaaatctatactaacgatagtgtgtggatg

SEQ ID NO: 2480 - DNA, 420 bp, Homo sapiens
  misc_feature 341: n = A,T,C or G
acttagggcgaattggagctccccgcggtggcggccgcccgggcaggtacatctctagatgatcacgaatgtcaaatatcacactacactgtgatatggggattccccttgggggttttcatgtgtatagggtgcctgcagctacactaaacatcttaaagctaccacaatgttcacttcatatttttgctttttataggctttcttggtctcctcctatgttcccatcattttcttgctttgaatctgtaagaatcgagttgaatcttctccattttaaattttccataggctgagaaactgtttagccaagtttggataaaattgtatccaaagtaagnagtatacaaggctatgggccaaggtccaaaaatcaaagctgtttcaacaagggacccatggttctctctaaaagggttc

SEQ ID NO: 2481 - DNA, 372 bp, Homo sapiens
  misc_feature 300: n = A,T,C or G
ccgcggtggcggccgaggtactttttttttttttttttttttttttttgtctttatctcattgttagaatgggaacaatgttcttttcagctttctacatcttagccagaaacagaaatctctttcctttggtatggctccacctatatgatatcaagataatttaatagtatgtagccacagtgcactaggaaaattaattggcttttaccagctttctgctgataatgccttaacttgaagaagttaaataattttggaaaagtcagatattgggaacaatcaaatttcgaatatacncatccaatataatcagataagtagtaaaatagttaacaacaacaattaaccgtcagaaaatagatccaagct

SEQ ID NO: 2482 - DNA, 372 bp, Homo sapiens
  misc_feature 109, 337: n = A,T,C or G
ccgcggtggcggccgaggtacgcggggaggtgtgctgaggtccctcggcaagggacgctgctttcccctggcagccacactgctgagcataaatgctttaaagtgtcancaattgatgtgtggagagaagtatgactgcattacagcttaaagagctttcacattcaggtctctacaggagaagacgagatcgccccgatagtttgagagtaaatgggttaccagaggaagagctaagcaacatggccaacgccctggccagcgccacttgcgagcgctgcaagggcggctttgcgcccgctgagaagatcgtgaacagtaatggggagcctgtacnctgcccggggcggcccgctctagaactaggtggga

SEQ ID NO: 2483 - DNA, 531 bp, Homo sapiens
  misc_feature 205, 209, 282, 445: n = A,T,C or G
aggtacttaaaatttacagctgactcaaattgcctcacagaattatttgatgtagaaggctagttgtcttacttcagatcagcaggacagttgggctctcagactcatgaccactgagtttgcttgtgttgaaactgtggtttcatccaacattatgcctattggacattgattatttattcccatttcaaatgggatttaccangacnttccttggagggacagggacaaaaccttatctctcatgggtgtttttttttaagaaataccttttttattaancccaagggaaaggaaaaccaatggcccagcctggttacccatttccaacctttctttaaaggcaagaaggaatttaaggccttttttttcatattcttgtttccttaattccctgggaccaatccaggttaggtttttttaaattggccccaagcattcccgntttcccattctttggttaaaccaaaccttccccttggaatggtttttctttaaaaaaaccccaccccttctttcccttattttttc

SEQ ID NO: 2484 - DNA, 410 bp, Homo sapiens
  misc_feature 3: n = A,T,C or G
ctnctatagggcgaattggagctccccgcggtggcggccgaggtacatctacctaaaggactattatgtggaataatacatactaatgaagtattacatgatttaaagactacaataaaaccaaacatgcttataacattaagaaaaacaataaagatacatgattgaaaccaagttgaaaaatagcatatgccttggaggaaatgtgctcaaattactaatgatttagtgttgtccctactttctctctcttttttctttcttttttttttattatggttagctgtcacatacaactttttttttttttgaggtggggtctcgctctgtcaccaggctggagtgcagtggcgccgatctcggctcactgcaacctccacatcccatgttgaagtaattctttctgcctt

SEQ ID NO: 2485 - DNA, 369 bp, Homo sapiens
  misc_feature 22: n = A,T,C or G
ctatagggcgaattggagctcnccgcgggtgggcgggccgcccgggcagggtaccgactcctcagaaactggcatgccaaatcaaaatgggtctggttcaatcctccctaatggcaatgtaaacccctctaactaatcccacttctcctaattatctttttctccttacgaacctaaaaatctcaccatttctattagcctgaaaataacatccctctgttcttctcttcctccttcagcactggatctcacttacaataggttttatttaataattatcttccttacactttctgtctcaccagtttccccttaaactgatttacctgctacacaaaattattcttattgggcttatgtgccttttcc

SEQ ID NO: 2486 - DNA, 379 bp, Homo sapiens
  misc_feature 20, 358, 364: n = A,T,C or G
ccgcggtggcggcgcggggnactaacaaatgcagtagccaacaagattaccatgcaatcattaaggagaaccaaagtaagagagccactcaaaccagattttgaacgctactaaaattaaagtagttctttgatgaatatgaatgagtagggaaaggattctttgtaatagtgatacctctgtggtaagagaagggtggtatgtgagttttagtctacagattatggcaaattcagtgacaacaatcaaatggtctaagattgacagtagcacagttttactctgtgaaggtaatgttcaggacaaatttcaagaaaactagaaaaccattctttacagctgaaatctttccctaacncattgntatttccacttttaa

SEQ ID NO: 2487 - DNA, 419 bp, Homo sapiens
  misc_feature 216, 410: n = A,T,C or G
ttagggcgaattggagctccccgcggtggcggccgaggtaccagttgtaaaattaccaggaaccgccatgcctcaagatcgccctgttttctggcttcatcaatgactgcatgcagtgcaccaccctgtccactacgtgatgctgtaggattaagtctcacagtgggcggctgaggatacagcgccgcgttcctgtgttgcttggtgaattagacnccatcgctgtgggttgctggtatggtgccgtgctatttggcacaggacacacccgcttgaggtctgtattgaacctctgaaggaggccgatactgaagctcggttggcagccggtattgataaaactaccagcggttgggtcttattttcttacccggctgatattgtgggatacctgtatctggagttggcanttgccccgg

SEQ ID NO: 2488 - DNA, 401 bp, Homo sapiens
  misc_feature 203, 217, 244, 267, 278, 280, 320: n = A,T,C or G
tcactacttagggcgaattggagctccccgcggtggcggcccgcccgggcaggtacttattttttttttttttttttttttgcttaagctaaaaaaatatataaactttagggaagagcagaacactcaggaactgcacccatacagactttatattcttcacttcaagaaatacagggtacgggctgggcgtggtggctcangcctgtaatcccancactttatcacttgaggtcagcagttngagaccaacctggccaacatggngaaactccatntntactaaaaatacaaaaattagccgggtgtggtggcaggcncctatagtcccagctactcaaggaggctgaggcagggaggatccactttgaacccaggaggcaaaggtttgcagtgagcca

SEQ ID NO: 2489 - DNA, 439 bp, Homo sapiens
  misc_feature 2, 30, 47, 367, 382, 389, 428, 433: n = A,T,C or G
tncttagggcgaattggagctccccgcggngggcgggccggggtacnaaaaaatcagggctactaagcccactgttaatatagacgcagaccaattgttaggaacaggtccaaattggagcaccattaaccaacaatcagtgatgcagaatgaggctattgaacaagtaagggctatttgcctcagggcctgggggaaaaattcaggacccaggaacagctttccctattaattcaattagacaaggctctaaagagccatatcctgactttgtggcaagattacaagatgctgctcaaaagtctattacagatgacaatgcccgaaaagttattggtagaaattaaatggccctatgaaaaaatgncaaatccagaaatgntcaggtncggcccattaaaagcccatttaaaaagggaaaaagtttnccagncagggg

SEQ ID NO: 2490 - DNA, 389 bp, Homo sapiens
ccgcggtggcggccgcccgggcaggtactattataatatcgattttataggaaattgagacacagatattaagatatcaacgcaaagtcataggggagggaggagagaggggactgtaatttgaacacagtttgtctccagagtttgtgcttttagccactgagtagttgttaaactttagtgtgcatcagaattacttggaagccttgttcaaacattgctgggctccccccgcaatttctgattcagtagccctaggatggggactgagaatttttatttctaacaagttcccaggggatgctggtgctgcaggttcaggggaacacacattgagccagtgcacctaagccctgctgcctcttttgggtaattctgtgcccatgttt

SEQ ID NO: 2491 - DNA, 421 bp, Homo sapiens
  misc_feature 389, 408: n = A,T,C or G
acactacttagggcgaattggagctccccgcggtggcggccgaggtacgttgaaatattaggggcaggttcccccaatatctggcgcccaacgtggttttctttttcctaagtgcatgtgggaacccgattccctttgataggtgcggagaaatgttcatcggtccagtccacagaaatgcttgttcggctccccgacgattggtgagttgtctgtgtattgtccggggtaactatgggtcacgcagagtctaaacattatgcttatctctgctatattaaattcctgttaaaatgggggagttcgggttcccatggaaaatatggtcaccctattcagggcagtggaagaaacactgtccttggtttcctgaaaaggggaaccgttangatgtgggaactattgggnatcatggttggtg

SEQ ID NO: 2492 - DNA, 303 bp, Homo sapiens
  misc_feature 153, 166, 208, 272, 290: n = A,T,C or G
cggggcttcttgaaggaatcccttaagtgcacgtctcccgttttcttttcacatcaatgcagagtccctctgtgaatttacaacacccaacacccatgagttcagtccttaagaaggaaaattgagcaagtatttaattggttggacattgcnataaaaagaggtncatatccagggctaactctagaaattttattctcaaacttanttggcctctttttcttctgtcaggggaccattcttagtggcactggggaaatcttggcacccanaagaattcaactgcgctnactgcaaaaatac

SEQ ID NO: 2493 - DNA, 406 bp, Homo sapiens
tacttagggcgaattggagctccccgcggtgggcggcccgcccgggcaggtactcattttccctcatacttcggattgaccacagttgttacggcactcttataaataggattttcaccctacaacaaaaaaaaagtgagaaaaattatcagttaccctactaaaattatgtagaataatttttataaatcaagactaaaagttgcaatcatcttaagaagtcatttctattttatttgtccagatatcacagttgttttaaaggcattaataatggtttatataaaaatagaaaatggaagctttgctttacaagtctaatgatgccccgttatctggtgctatttcattcttgagtccttcctccactgggaggcttgatttaagaaatgttctccatgggcac

SEQ ID NO: 2494 - DNA, 242 bp, Homo sapiens
  misc_feature 216: n = A,T,C or G
ggcgaattggagctccccgcggtggcggccgaggtacatttttattatccttataccagttataacttcattcatggtcctgatcctggcatccgtgaaagttgcagttttactcctaaggggaaccagacacgggagatgagcctgagcgatcacagcctgccctttatcagcggcaggcacaggcagggacctgcatcgcatggttccctacancgcttttgattccgacaacacagaca

SEQ ID NO: 2495 - DNA, 399 bp, Homo sapiens
  misc_feature 310, 341, 373, 382: n = A,T,C or G
tacttagggcgaattggagctccccgcggtgggcgggccgcccgggcagggtacgcttcccttggcaccatgttataccatctgtgctgggctgaatagtgtccccccaaaattgaataatgtccccccaaaattcgtgtataccctgaacattagaatgtgatcttacttggtattacttggtataggggtgttgtagaaataatcaaataaagatgaggtcatactgcatcagggtagaccctaaattcaatgaccaggatttttataagtgaaaggagaggcggattcagagaaaaagacacagacncacacagagagaagacagccattgtggaagnacacaagccataaaattggaagtgaccacagnctacaaagnccaagggaatgcccaaa

SEQ ID NO: 2496 - DNA, 382 bp, Homo sapiens
ccgcggtggcggccgaggtacgtgcaaagcattctatgtatttttagcagaacaggagacttactttacactagctgaactaggtgtccatcagtgcctctgccaaccattggatgttagaggattctgccacctagcttattttatttgtatttaagtgaatataccaaacatttatatgagcaaaccaagttttacataacatgcttttggtatgtattatgactttttacatttctacttggatttcctcttcagatctcagtttccacaaatctgcatccaggttcagggcctctgattctgcacaaatcattatgagcccaagtgggattgatttactaagaccaggatcaagatcccttcccccaagcttaaataa

SEQ ID NO: 2497 - DNA, 367 bp, Homo sapiens
  misc_feature 246, 257, 287, 299, 303, 309, 331, 341: n = A,T,C or G
gcccagctcatttttgtatttttagtagagacagggttccaccatgttggccaggatgatcttgatctcttgacctcatgatccgcccctcttggcctcccaaagtgccgggatcacaggcgtgagccgccacacctggccctctatttattctctttaaagagagagaaaactatgagaggccaaaattatttaattaaatctttaccttagcacaagggaaaaaatggaatttgcctaatatantgtgatgaagncattacacaaatgaacagtaaaccaatcancattttagtaanaagngcaaanaattttggagaactttataagncttattatgngtaggccttaattttttggggtgggg

SEQ ID NO: 2498 - DNA, 454 bp, Homo sapiens
  misc_feature 55: n = A,T,C or G
ctatagggcgaattggagctccccgcggtggcggccgaggtacgaaaaaatcagngctactaagcccactgttaatatagacgcagaccaattgttaggaacaggtccaaattggagcaccattaaccaacaatcagtgatgcagaatgaggctattgaacaagtaagggctatttgcctcagggcctggggaaaaattcaggacccaggaacagctttccctattaattcaattagacaaggctctaaagagccatatcctgactttgtggcaagattacaagatgctgctcaaaagtctattacagatgacaatgcccgaaaagttattgtagaattaatggcctatgaaaatgcaaatccagaatgtcagtcggccataaagccattaaaaggaaaagttccagcaggagttgatgtaattacaggaatatgtgaaggctttgtgatgaag

SEQ ID NO: 2499 - DNA, 568 bp, Homo sapiens
  misc_feature 4, 7, 21, 82, 181, 208, 263, 269, 277, 282, 314, 327, 331,339, 344, 349, 352, 363, 404, 422, 431, 437, 454, 473, 476,489, 498, 500, 512, 514, 515, 526, 529, 552, 554: n = A,T,C or G
tttnttnatggcctatcatcnttagggcgaattggactccaacgcggtggcggccgcccggccaggtccccggggagtgcantctgggcgatcgcttcctggtcctcgcctcctccgctgtctccctggagttcttgcaagtcggccaggatgtctcaggctgagtttgagaaagctgcanaggaggttaggccaccttaagaccaanccatccggattgaagggagaatgcctgtttcattctatgggcccacttacaaaancaaagncaaacctngttgngggccgaacaattaaaaataaccaagaaaacngggcccccggggnaatngtttgggnacatnttcancgngggccaaaagnggacccaaagttgggagaattgcctcttgggtaaatggaanaccttggaaaaaaggggnaaccttttncccaanaggggaaaagtaattgnccccaattggaaaaaaggnccnttttaaccaattnctaaaaccnanaaaagggtttantnnaaaagtaaagnccntttataagaaggtaaaaaaaaananaattaaacccgggg

SEQ ID NO: 2500 - DNA, 467 bp, Homo sapiens
  misc_feature 195, 299, 309, 337, 361, 372, 400, 404, 407, 408, 424, 443: n = A,T,C or G
ggcgaattggagctccccgcggtggcggccgcccgggctggtacggggaggaacagagtccctcctttacttctccattagaaagaatgagatgacaagacaatgaaacaggcaaagtgaacagagatgcaagacaaaattcaggtgagagagccagagcatcgctcagccattcctgacatgtaaaacaggcanctagaaatttgcagaaaggaagcgaagtctccataaagatgtttttaaagtgagcttgaagtatttggagacaattcaggtgttacataaaatctgcaaatctnttgggataanagaaagccagtagattccccatccatgnggaacaaaatgggaagccctcaanagagttggggnaaggaaaggaccagtatgtaaagaaccnaggngcnnggaaattggccattcntccttcccctttttcttcntttggcctttttcccttggggaat

SEQ ID NO: 2501 - DNA, 416 bp, Homo sapiens
aggtaccagttgtaaaattcccaggaaccgccatgcctcaagatcgccctgttttctggcttcatcaatgactgcatgcagtgcaccaccctgtccactacgtgatgctgtaggattaagtctcacagtgggcggctgaggatacagcgccgcgtcctgtgttgctggtgaattagacgccatcgctgtgggttgctgatatggtgccgtgctatttggcacaggacacaccgcttgaggtctgtattgaacctctgaaggaggccgatactgaagctcggttggcagccggtattgataaactaccagcggttgggtcttattttctaccggctgatattgtggatactgtatctgagttggcattgccgggatagagactctgtccctttctacttgattttcttttgggggtt

SEQ ID NO: 2502 - DNA, 446 bp, Homo sapiens
  misc_feature 343, 349, 414, 432: n = A,T,C or G
attggagctccccgcggtggcggccgcccgggcaggtacatgggactacaggcacgccccaccatgcccagctcatttttgtatttttagtagagacagggtttcaccatgttggccaggatgatcttgatctcttgacctcatgatccgcccctcttggcctcccaaagtgctgggatcacaggcgtgagccaccacacctggccctctatttattctctttaaagagagagaaaactatgagaggccaaaattatttaattaaatctttaccttagcacaagggaaaaaatggaatttgcctaatataggtgatgaagcaatacacaatgaaccagaaaanaatcancattttaagttaaaaagggcaaaaaaaaattttggagacccttaataaagccctattattggggnaaggctttaaattttttnggggggtggggggg

SEQ ID NO: 2503 - DNA, 421 bp, Homo sapiens
  misc_feature 339, 412, 418: n = A,T,C or G
cctatcactacttagggcgaattggagctccccgcggtggcggccgaggtacgcggggacatcaatgcagagtccctctgtgaatttacaacacccaacacccatgagttcagtccttaagaaggaaaattgagcaagtatttaattggttggacattgcataaaataggtccatatccaggctaactctagaaattttattctcaaacttagttggcctctttttcttctgtcagaggaccattcttagtggcactggggaaatcttggcacccagaagaattcaactgcgctcaccgcaaaaatacaatggcctacattggatttgtaggagggagnaaagggagcccctgttatttgtgaagcctgtgcctatggagaaaattcttttggcccctggaattggtgggtncgatgncca

SEQ ID NO: 2504 - DNA, 462 bp, Homo sapiens
  misc_feature 4, 76, 181, 385: n = A,T,C or G
actnctatagggcgtttggagctccccgcggtggcggccgaggtaccatgttgtaaaattaccaggaaccgccatncctcaagatcgccctgttttctggcttcatcaatgactgcatgcagtgcaccaccctgtccactacgtgatgctgtaggattaagtctcacagtgggcggctgangatacagcgccgcgtcctgtgttgctggtgaattagacgccatcgctgtgggttgctggtatggtgccgtgctatttggcacaggacacaccgcttgaggtctgtattgaacctctgaaggaggccgatactgaagctcggttgggcagccggtattgataaactaccagcggttgggtcttattttctaccggctgatattgnggatactgtatctggagttggcattgcccggaatagaaactctgtccccttttctacctggatttttctcttggggg

SEQ ID NO: 2505 - DNA, 504 bp, Homo sapiens
  misc_feature 188, 201, 205, 216, 233, 243, 255, 257, 259, 269, 272, 274,284, 287, 301, 305, 312, 321, 325, 327, 333, 335, 357, 364,367, 369, 392, 395, 407, 427, 433, 452, 456, 492, 499: n = A,T,C or G
aggtactggtgccaatattgccatggtgagctcctctctaatgtcttccagggcaccaatatctgcccatgtcacattagggacagtgacaaagccttcccttttggcagagggttggactgaggatagagcaaccaattgaaaatcattttcaagtttcaaatggcaacaagttcccttggcattcncgcttcccttctngagnaggggggaatncttttgggtacttcctntaaggccaanctccccaagtcnangnccctttatgntanantatcaattcnctngttggttttccaangaangttgggngccttcaantttncncctaancnccttttttccttccccttgggnaccttcnctntntaaggaatggggccaaaaaattnctntcccaatttttncaaggggaatttttttttcntttccntggccttggtttcccctgntaangtcctttccaatttaaaaggaaccttccttaatttnggaaccntggcc

SEQ ID NO: 2506 - DNA, 413 bp, Homo sapiens
  misc_feature 9: n = A,T,C or G
atacgactnctatagggcgaattggagctccccgcggtggcggccgaggtacttccaaaccctcctgttctttccgttttgttttccccaattttaacataaggcaaaagcagtaattgagcaattctatcacctggattggcactccggggaacagtggagctgacactaactgaattccccctttataatctgaataaattaccccagtatgaatttggactcccttcaaatttagacttgatctccctaaaataaggcctaccctcccttctggcagcgggccatatacccctctaggaatcttttgtgggggctttccagggagtaaagagaccatttgggtggaacataaatctactgcggtgctgcctgctgtggcgcgggacaagctgttggattgttgtaattgg

SEQ ID NO: 2507 - DNA, 444 bp, Homo sapiens
ggcgaattggagctccccgcggtggcggccgaggtacactagtatttaacctggacatgaggaaggagtaggaaattttctggtgaatacaggagagcaaagagcagcaggtcagcaggaatgactaatttttttctatgcatgtttaatggaatattcgtgtaggatatttttgagtaggtcattggataatcagcatttataactcacatcctactagtttgattctcagtaataagacttgtcaaagatccaagaatctgaaagtcagtaataaatgtccatgtgcatcatcgtccgtgacagaaagtcagcatccacagaacacagaattgggacagatgaacttaatagataaagatgaatatcggagttgttcctcttagggaatgatactctccatgacctgtgtgagtcacagctgcagaaaagaaagagcaagga

SEQ ID NO: 2508 - DNA, 301 bp, Homo sapiens
  misc_feature 148, 280: n = A,T,C or G
ccgggcaggtacgcgggggcagggcaagctctaggagctggtgagtctagaaggacggactagagagagctggcattggaatggacaatcgctagagggcgccggagcactagcagagtcaacctccgggacccataagcagggcttntaggataaggaatggagtttgacccaaccccaagatatgccctggggatattggttttctcaggtgcatctgactctccggcctggattgcctcgctgcggagaggggacaaaaggttttgccctgagcatntggtgatgtcttccagtgcct

SEQ ID NO: 2509 - DNA, 413 bp, Homo sapiens
  misc_feature 224, 266, 310, 335: n = A,T,C or G
ccgcggtggcggccgcccgggcaggtacaagaaaaaatcaaacaatcacatcaaaaagtgggcgaaggatatgaacagacacttatcaaaagaagacatttatgcagccaacagacacatgaaaaaatgttcatcatcactggtcatcagagaaatgcaaaatcaaaaccacaatccgggaggtcttgccaaagaccacctgggctttccgggcaacgtgctanagcttctgggaagcagtcatggccctttggagattccacggnttcagatccctactgcaggatgctccactgtgcctgccggcctntggcgttttgctgaggggtaacctnggaatggttagaaacaagaacactgagatggcccagttcgttgccccaggccattcccgcacacgtggtgggcaaaag

SEQ ID NO: 2510 - DNA, 434 bp, Homo sapiens
ccgcggtggcggccgcccgggcacggtacatctctagatgatcacgaatgtcaaatatcacactacactgtgatatggggattccccttgggggttttcatgtgtatagggtgcctgcagctacactaaacatcttaaagctaccacaatgtttcacttcatatttttgctttttataggctttcttggtctcctcctatgttcccatcattttcttgctttgaatctgtaagaatcgagttgaatcttctccattttaaattttccataggctgagaaactgtttagccaagtttggataaaattgtatccaaagtaagagtatacaagctatgggcaagtccaaaatcaagctgttcacaggaccatgttctctctaaaggttctagggagaagaatccctcatttcctttccagcttctggggtggctgct

SEQ ID NO: 2511 - DNA, 387 bp, Homo sapiens
aattggagctccccgcggtggcggccgaggtacgcggggacatcaatgcagagtccctctgtgaatttacaacacccaacacccatgagttcagtccttaagaaggaaaattgagcaagtatttaattggttggacattgcataaaagaggtccatatcccaggctaactctagaaattttattctcaaacttagttggcctctttttcttctgtcagaggaccattcttagtgacactggggaaatcttggcacccagaagaattcaactgcgctcactgcaaaaatacaatggcctacattggatttgtagaggagaaaggagccctgttattgtgagctgtgctatgagaaattctttgcccctgaatgtggttcgatgccaaa

SEQ ID NO: 2512 - DNA, 424 bp, Homo sapiens
  misc_feature 221, 354, 367, 408: n = A,T,C or G
ccgggcaggtaccagttgtaaaattaccaggaaccgccatgcctcaagatcgccctgttttctggcttcatcaatgactgcatgcagtgcaccaccctgtccactacgtgatgctgtaggattaaagtctcacaagtggggccgggttgaggatacagcgccgcgtcctgtgttgctggtgaattagacgccatcgctgtgggttgctggtatggtgccgngctatttggcacaggacacaccgcttgaggtctgtattgaacctctgaaggaggccgatactgaagctcggttggcagccggtattgataaactaccagcggttgggtcttattttctaccggctgatattgnggatactgtatcnggagttggcattgccgggatagagaacttctgtcccttttntactttgattttctct

SEQ ID NO: 2513 - DNA, 613 bp, Homo sapiens
  misc_feature 171, 181, 184, 201, 206, 209, 221, 223, 228, 234, 239, 250,253, 255, 269, 276, 278, 279, 293, 298, 307, 309, 319, 331,334, 369, 386, 390, 395, 434, 436, 438, 443, 462, 467, 509,543, 548, 570, 587, 607, 609: n = A,T,C or G
catcttgggtcatcgatgagcctcgccctgtgcctggtcccgcttgtcgagggaaggacattagaaaatgaattgatgtgttccttaaaggatgggcaggaaaacagatcctgttgtggatatttatttgaaccggggaatttccagattttggaacattgaaagctccancaataggtgnagncatttatccatatggangaagnganaatacaagtacngnagtanaaaatnctttngaatgggcccntcnancaaagaaccaatgnccaaacnannaccaaataaatggngaaantatccttgntngaattgaacnattggaggggcnaantcacacagtccttgggggggaagggtaagaattanaccccaaccgtgggtgnccangaagngggttccatgggaatttctttgggccccccttgccttgncncntaaanacctggttggccgttttcnattanaaccccaaaacaatccaatttattccaattattttgtccttnaaacccccctttcaaaaaaaccaaaaaaggcttngtttngttaaaattattccttggaatnctttcttaaccggggtntttccctttttcttgggggncnccca

SEQ ID NO: 2514 - DNA, 411 bp, Homo sapiens
  misc_feature 62, 63, 67, 68, 376: n = A,T,C or G
cgaattttagctccccgcggtggcggccgcccgggcaggtactgagtttcaggaaacagtgnnatannttcagcaaaacagtgggcttcatgctgaaagaagtcactccaagtaaacacacatcacacacacacacacacacacacacacacacatacacacacccgcagacaccctagtggccaatgggtcctctcaccaaaaacctgtgatcaggagagcagaaagcctcccaggggtccatcactgccctttctggagccccttatcagatggccagccccaggacagcactgtctgatcctggtccagtccaaaccgccatcaccctgtgatgtggggagctggccacttcaccaggaacctctgtgtcagnaaaaattttctctttccttttaaaaatgatgaagg

SEQ ID NO: 2515 - DNA, 315 bp, Homo sapiens
aggtaccgactcctcagaaactggcatgccaaatcaaaatgggtctggttcaatcctccctaatggcaatgtaaacccctctaactaatcccacttctcctaattatctttttctccttacgaacctaaaaatcttcaccatttctattagcctgaaaataacatccctctgttcttctcttcctccttcagcactggatctcacttacaataggttttatttaataattatcttccttacactttctgtctcaccagtttccccttaaactgatttacctgctacacaaaattattcttattggggcttatgtg

SEQ ID NO: 2516 - DNA, 355 bp, Homo sapiens
  misc_feature 34: n = A,T,C or G
aatcaggctactaagcccactgttaatatagacncagaccaattgttaggaacaggtccaaattggagcaccattaaccaacaatcagtgatgcagaatgaggctattgaacaagtaaggggctatttgcctcagggcctggggaaaaattcaggacccaggaacagctttccctattaattcaattagacaaggctctaaagagccatatcctgactttgtggcaagattacaagatgctgctcaaaagtctattacagatgacaatgcccgaaaagttattgtagaattaatggcctatggaaaatgccaaatccagaatggtcagtcggccataaagccattaaaaggaaaa

SEQ ID NO: 2517 - DNA, 373 bp, Homo sapiens
  misc_feature 35: n = A,T,C or G
ccgcggtggcggccgcccggtcaggtacaaagtcnttgaggcaaaagcttgcttgctgtgttctaggaaaagcaaggaagacagcatgtctatagcagtgggaggtggaaggataataaacagtaggtgaggttagaggggaccaaatcatgtattttccatccagaggttcccaaccttgggctgcacattagatttattctaaggagcttttaaaaaataccaatgactgggtcccagcctagagtgattaaatcagaatctctggaggtagacttgagaatctgatgtttgcaagtttcctaggcaagtcaaggctgaggaagactgctgcaggccattgtaagagccaggcgttggatctcattcaacc

SEQ ID NO: 2518 - DNA, 402 bp, Homo sapiens
  misc_feature 9: n = A,T,C or G
gcgaattgnagctccccgcggtggcggccgcccgggcaggtactacagattacagtgctatccagaggaagggaggctgaaagtgtctgattttttatagcattaggttcagtctcactggcattactacttttatactgagctgcagccaatgctgccttgtgcttttttaaatggataaaatcagttgtgcctgagaacccagaactgggttgaacaacacttcctgtcttactactggctaatgtaactggtgctgtggtgctgaccttgcattcttgtttttgagccactggctgactgacactttttgaagatacacattctgatgatgtagaggccaaaatggtatttgataaagaggaaattacttctgaaccaccccagctgggaaaacactgg

SEQ ID NO: 2519 - DNA, 432 bp, Homo sapiens
  misc_feature 423: n = A,T,C or G
cccgcggtggcgggccgaggtacgaaaaaatcaggctactaagcccactgttaatatagacgcagaccaattgttaggaacaggtccaaattggagcaccattaaccaacaatcagtgatgcagaatgaggctattgaacaagtaagggctatttgcctcagggcctggggaaaaattcaggacccaggaacagctttccctattaattcaattagacaaggctctaaagagccatatcctgactttgtggcaagattacaagatgctgctcaaaagtctattacagatgacaatgcccgaaaagttattgtagaattaatggcctatgaaaatgcaaatccagaatgtcagtcggccataaagccattaaaaggaaaagttccagcagggagttgatgtaattacagaatatgtgaaggctngtgatggga

SEQ ID NO: 2520 - DNA, 431 bp, Homo sapiens
  misc_feature 281, 350, 419: n = A,T,C or G
aattggagctccccgcggtggcggccgcccgggcaggacgcggggagaaaaacagaggggagatttgtgtggctgcagccgagggagaccaggaagatctgcatggtgggaaggacctgatgatgcagaggtctgtaggccatgggaatgggtttggaattttattcaaagaagctatgggaagtgactagaaggtttaaagttggggaagaggttttgtgtttctgttatatttgtgttttatacaaattactctggttgctgtgttgataggacagcanaagggtaggagcagggacaccagttaagttattgcaatggttaaggtgagaggtggtggctgggcctangcctttttggagtgaacaaagctatttgcttggcttccatgatcctttcttcccttccacttgggaatnggaaaggtaccc

SEQ ID NO: 2521 - DNA, 404 bp, Homo sapiens
  misc_feature 167, 175, 206, 296, 307, 338, 365, 377, 387, 391, 394: n = A,T,C or G
ggcgattggagctccccgcggtggcggccgaggtacgtaacaggacatcaataaatattaggttgaatggaagattaaatcaacaaaatgggtgatggatctctgcagtaagtggaagagttcttcatggcccccaaggttatatccatctagaacttcatccaccntaattttnatctggaaaatagtgcctttgcggatataantttaggtaaaactgaagatgagatcatactggattaggatgggatctaaatccaatgaaaatgtcttcataaaaaacaggaaagaacccntagaaacacanggaagaaggtcatgtgaagatggaggcaganattggagggatgcagccaccggcccangaatgccagccntccaccccanaagnctngaagggaaat

SEQ ID NO: 2522 - DNA, 398 bp, Homo sapiens
  misc_feature 43, 56, 365: n = A,T,C or G
gagctccccgcggtggcggccgaggtacttttggcaatctgcngcaacacaatgcnttgtttaattgattctaccatgctatttgttgtctctttgagagtttcaattttctttctctgttcatcttctttgcagttttgaagcttgtcatcaaaaagctttaattgttcaatcaagatttgtaggtaagcatcagcttctgtaagtttcttatcaaaatcttggacactaggaacaaatcctgaatccaaaccttgaagctggagagtatgtcgaagaattgtttcttctaaggcatggatccacttctctcgctcatcagcatcacgggcctgggaaatggaaggttttctgatcaacagttnttgtgaaggtgctggtccgtcctcatcgtctat

SEQ ID NO: 2523 - DNA, 406 bp, Homo sapiens
  misc_feature 12, 72, 73, 80, 123, 166, 169, 220, 240, 254, 284, 300, 328,380, 389, 390: n = A,T,C or G
aattggagcttnccgcggaggccgccgaggtactttttttttttttttttttttttttgtctgtaaaatttnncattcanatatttgctgagatttttgcttttttatctaacctcatttggngtcctgtaaagcgcatcttgaacagcccctagagctaaagggntantcacttagaccagcagcatcaacatcagctgggagctttactgaattgcanaatatgaggccccagtccanatggactgagtcanagtctggggggatgtgacccagcaatctgngttccaacaagccctntagaagattcgaacacacacgaaagttngacaaccattgctttgaattttgacaccagaaactcaggggaaaggctacanaatggaccnntttgaatggaagaagc

SEQ ID NO: 2524 - DNA, 401 bp, Homo sapiens
  misc_feature 57: n = A,T,C or G
tccccgcggtggcggccgcccgggcaggtacaataaatcttcctgtcccttccaccngaatacacatgtgtgaaggcatcattgacttgcagcgcccaaacaccttcatcatggactcggtatgttgctatacatctctgctggccaagggaccaaaggcgaattgtcccatcagaactgcctgacagggcattggcgtggccatctctgtttaatagccaatgccttcacattatcccgtgtgccctttaagcttcattagttttgcacatgttcttggatcccatacccttaacaccttttcagtggaccctgatacaatgattgttcccagttgattcatggccaggctataaatgggaatctttgtttccacttaaagaagaagttgtgacagtgtt

SEQ ID NO: 2525 - DNA, 362 bp, Homo sapiens
  misc_feature 18, 32, 45: n = A,T,C or G
cggccgcccgggcaggtncatggcgaagcttnagactgtaacctnaagattgggacaaattaaagaaaaaaatgtgatttaacacaattacaaaaactgttacgttagggtcaaacaagaaccattttatgaaactgaattacaacaaatgacattatatctaactcttccgggtctccacagcacttatacttacttaagcagcttaaacacttccgagtctccacagcactctgatacttacttaaacagctcttttaacctgccctagtattcttaagtgcagcatatctaatttttttttttcctcagtagttcgaacacttgctggctattttttctgtccaagttctcagtaacct

SEQ ID NO: 2526 - DNA, 408 bp, Homo sapiens
ccttagggcgaattggagctccccgcggtggcggccgcccgggcaggtactcattttccctcatacttcggattgaccacagttgttacggcactcttataaataggattttcaccctacaacaaaaaaaagtgagaaaaattatcagttaccctactaaaattatgtagaataatttttataaatcaagactaaaagttgcaatcatcttaagaagtcatttctattttatttgtccagatatcacagttgttttaaaggcattaataatggtttatataaaaatagaaaatggaagctttgctttacaagtctaatgatgccccgttatctggtgcctatttcattcttgagtccttcctccacttgggagggcttggattttaaaggaatggtttctcccatggg

SEQ ID NO: 2527 - DNA, 414 bp, Homo sapiens
  misc_feature 387: n = A,T,C or G
ctacttagggcgaattggagctccccgcggtggcggccgaggtacttgcccccaggcccagataatttatttaaaaactttttttgtagagacagggtctcactatgttgcccaggctggtctcaaactcctggcctcaaacaatcctctacctcaacccccctaagtgctggcattacaggcatcagctgccatgcctggctacaaatcttaatgttttccccatggcttctttttctggcgttcttttctcaggtaatggaagtgggcagagaatgatcctttccctaggctccagtgtgtaagaattaaagaaagaggaaagaaacacaatgggcttgatgggtcgagggacaggtttattttaaaggaaaaacaaacccaagnaggtggccttcttggcctggagtttag

SEQ ID NO: 2528 - DNA, 407 bp, Homo sapiens
  misc_feature 348: n = A,T,C or G
ccgcggtggcggcccgaggtacagaacgcaagaagggaataggtggtctgaacgtggtgtctcactctgaaaagcaggaatgtaagatgatgaaagagacaatgtaatactgttggtccaaaagcatttaaaatcaatagatctgggattatgtggccttaggtagctggttgtactgaggctgtatacagccacagcctccccccatccctccagccttatctgtcatcaccatcaacccctcccatgcacctaaacaaaatctaacttgtaattccttgaacatgtcaggcatacattattccttctgccctgagaagcttcttccttgtctcttaaaatcttagnaatggatgttaaaggttttggaaataaagtttgacctatctttacttttcatggcaaaa

SEQ ID NO: 2529 - DNA, 406 bp, Homo sapiens
  misc_feature 355, 361, 364, 389, 406: n = A,T,C or G
ccgcggtggcggccgaggtacgcgggctttcttgaaggaatcccttaagtgcacgtctcccgttttcttttcacatcaatgcagagtccctctgtgaatttacaacacccaacacccatgagttcagtccttaagaaggaaaattgagcaagtatttaattggttggacattgcataaaagaggtccatatccaggctaactctagaaattttattctcaaacttagttggcctcttttttttctgtcagaggaccattcttagtggcactggggaaatcttggcacccagaaggaattcaactgcgcctcacttgcaaaaaaatacaatgggcctacatttggtattttgttangcaggnagnaaagggagcccctgtatttgtgagncctgtggcttattgaan

SEQ ID NO: 2530 - DNA, 418 bp, Homo sapiens
  misc_feature 383: n = A,T,C or G
ccgcggtggcggccgaggtaccttctgctgttccctgggtcttcaatgactcaatttcccaccagcagtatcctttaaagccatcctgcatcctgagacaagagattgacaattcattgataagtagtcttaattgtcactattacagggctgtaggtcctttgccagccatgcctttcagtcctaaatggtcttcaaggttgggctgtgttgtccaagagctgaggaccttacatttattgttccaatatttattggctataatgatttctgtggagcagtcagctgtcagaaaattttgtctcctttgtaggtaacctgtcattggtctttggatttttttatagtctccctttgtatctggtgtaatttagtttcaatcngttgtgcctaccgtgtagacttcttgcttgaaaag

SEQ ID NO: 2531 - DNA, 415 bp, Homo sapiens
  misc_feature 2, 348, 369, 397: n = A,T,C or G
tnctatagggcgaattggagctccccgcggtggcggccgaggtactaacaaatgcagtagccaacaagattaccatgcaatcattaaggagaaccaaagtaagagagccactcaaaccagattttgaacgctactaaaattaaagtagttctttgatgaatatgaatgagtagggaaaggattctttgtgatagtgatacctctgtggtaagagaagggtggtatgtgagttttagtctacagattatggcaaattcagtgacaacaatcaaatggtctaagattgacagtagcacagttttactctgtgaaggtaatgttcaggacaaattccaaggaaaaactagnaaaacccattcttttacagcntggaaattctttcccttaacccattgtntattttccacttttaaag

SEQ ID NO: 2532 - DNA, 411 bp, Homo sapiens
  misc_feature 334, 376, 402: n = A,T,C or G
ctatagggcgaattggagctccccgcggtggcggccgcccgggcaggtacgctgaaatattaggggcaggttcccccaatatctggcgcccaacgtggttttctttttcctaagtgcatgtgggaacccgattccctttggtaggtgcggagaaatgttcatcggtccagtccacagaaatgcttgtttggctccccaacgattggtgagttgtctgtgtattctccggggtaactatgggtcacgcagagtctaaacattatgcttatctctgctatattaaattcctgttaaaatgggggagttcgggttcccatgggaaaatatggtcacncctattcaggggcagttgggaagaaacaactggtccttggtnttccttgaaaaaaggggaacgttagnattgtggga

SEQ ID NO: 2533 - DNA, 419 bp, Homo sapiens
  misc_feature 2, 332, 402, 418: n = A,T,C or G
cnctacttagggcgaattggagctccccgcggtggcggccgaggtacgcggggacatcaatgcagagtccctctgtgaatttacaacacccaacacccatgagttcagtccttaagaaggaaaattgagcaagtatttaattggttggacattgcataaaagaggtccatatccaggctaactctagaaattttattctcaaacttagttggcctctttttcttctgtcagaggaccattcttagtggcactggggaaatcttggcacccagaagaattcaactgcgctcactgcaaaaatacaatggcctacattggatttgtagaggagnaaaggagccctgtattgtgaggctgtgcctatggaggaaattcttttggcccctggaatggtgggttcgnatgcccaaagggaagna

SEQ ID NO: 2534 - DNA, 438 bp, Homo sapiens
  misc_feature 71, 181, 190, 278, 296, 331, 363, 398, 403, 418: n = A,T,C or G
tatagggcgtattggagctccccgcggtggcggccgcccgggcaggtacgcgggggcagacagattgcctnatttcagctcaataaaacatcaccaaattcccttaggcagaaaaagggtggggagtgccctttcttgaaggaatcccttaagtgcacgtctcccgttttcttttcacatnaatgcagantccctctgtgaatttacaacacccaacacccatgagttcagtccttaagaaggaaaattgagcaagtatttaattggttggacattgnataaaagaggtccatatncaggctaactctagaaattttattctcaaacttanttggcctctttttttctgtcagaggaccattnttagtggcactggggaaatcttggcacccagcaanaattnaactgcgctcactgnaaaaatacaatggcctacat

SEQ ID NO: 2535 - DNA, 423 bp, Homo sapiens
  misc_feature 1, 393: n = A,T,C or G
ncttagggcgaattggagctccccgcggtggcggccgcccgggcaggtactaatgtaggttttaggcaaccattgggggtcttggaatgtgtcccctgtggatgagaggggattactatattccatattgaaatcttgtcaaagcaaacgatttgcaacttgtctgtgagagtagatctagcttctggatggtccaaaaacttagactctttagaagcttcttataaaaagaaaagatgctcacttgaagaagtgaaccttcaaattcttctgtgaaatgcttaggccagttatacacggtgtttgaaataacaactccctcccctaaactggaacatccaaaactggaaattttatatttggcaccaaggtctattcaacaccttatttacnctaagaaacctgctttttccctaaaaaaat

SEQ ID NO: 2536 - DNA, 456 bp, Homo sapiens
  misc_feature 6, 14, 51, 54, 56, 104, 110, 182, 190, 193, 198, 235, 246,255, 260, 269, 295, 320, 325, 328, 332, 334, 360, 378, 379,400, 408, 411, 412, 413, 426, 438, 442, 443, 444, 448: n = A,T,C or G
agctcnttcgcggnggcggcccgcccgggcaggtacctcaaggtgcgttgncgnanttatataattccttttttttgaaactgcccaataaatggatgaggacncacttnacccataaataagaaaggtgaacagcacatggggcctgtagatgccttttgcagggccctcttttttctctncctaaaangtngcaantttggagtaatttttctctaagaatggggcaacatcnaataagaaaanctggcccgnccctnagaatcaanaaagcccttggggggaggaagaaganaccagggtggataaatggctttaancaatnttnggcnanaaagtgggggaaaacaaagcccccanaaaaaaaatcaaaaaaanngaattaaaagccagaaagaangccttttnccnnnaacttgggggaanaaaaaaaaaacncaannntggngggaaaaa

SEQ ID NO: 2537 - DNA, 380 bp, Homo sapiens
  misc_feature 73, 79, 118, 218, 311, 330, 331, 358, 380: n = A,T,C or G
ccgcggtggcggccgaggtacaaagtccctgaggcaaaagcatgcttgctgtgttctaggaaaagcaaggaanacagcntgtctatagcagtgggaggtggaaggataataaacagtnggtgaggttagaggggaccaaatcatgtattttccatccagaggttcccaaccttggctgcacattagatttattctaaggagcttttaaaaaataccantgactgggtcccagcctagagtgattaaatcagaatctctggaggtagacttgagaatctgatgtttgcaagtttcctaggcaagtcaaggcntgagggaagactgctgcgnngctcattggtaaggagcccagggcgtntggatctccattcaaccttttn

SEQ ID NO: 2538 - DNA, 388 bp, Homo sapiens
  misc_feature 43, 210, 275, 310, 340: n = A,T,C or G
tacttagggcgaattggagctccccgcggtggcggccgaggtncaaagtccctgaggcaaaagcatgcttgctgtgttctaggaaaagcaaggaagacagcatgtctatagcagtgggaggtggaaggataataaacagtaggtgaggttagaggggaccaaatcatgtattttccatccagaggttcccaaccttggcttgcacattanatttattctaaggagcttttaaaaaataccaatgactgggtcccagcctagagtgattaaatcanaatctctggaggtagacttgagaatcttgatgttntgcaagtttcctaggcaagtcaaggcttgnaggtaagactgctgcaggccattgtaagtaagcccaggccgttgaatc

SEQ ID NO: 2539 - DNA, 279 bp, Homo sapiens
  misc_feature 260, 264: n = A,T,C or G
ggaaccgccatgcctcaagatcgccctgttttctggcttcatcaatgactgcatgcagtgcaccaccctgtccactacgtgatgctgtaggattaagtctcacagtgggcggctgaggatacagccgccgcgtcctgtgttgctggtgaattagacgccatcgctgtgggttgctggtatggtgccgtgctatttggcacaggacacaccgcttgaggtctgtattgaacctctgaaggaggccgatactgaagctcggntggnagccggtattgataa

SEQ ID NO: 2540 - DNA, 400 bp, Homo sapiens
  misc_feature 10: n = A,T,C or G
ctatagggcnaattggagctccccgcggtggcggccgaggtacttgctccatgctggtgcctggacaagctccactgcacaagccaacgtggccccaggaaggtgctgtatgcgagagtttgtaaaaatacagcgcagcatcactcacgatgaggcaaagctcctagtgacttttaaatttccagatagaccagacaacatcacgaatctcctgaggaatcattaatcattactagagaaacagaaacgtcataaaccctgtccaaagctggacaccggacatggagttgccaccgttagagctaaattttattcttggctttctgataccttaaagtattattcaggaagtttttttttttttttttacaaccagcctggttttggtttttaaaacatt

SEQ ID NO: 2541 - DNA, 408 bp, Homo sapiens
  misc_feature 378: n = A,T,C or G
actacttagggcgaattggagctccccgcggtggcggccgcccgggcaggtacgcggggtcacatcaatgcagagtccctctgtgaatttacaacacccaacacccatgagttcagtccttaagaaggaaaattgagcaagtatttaattggttggacattgcataaaagaggtccatattccaggctaactctagaaattttattttcaaacttagttggcctctttttcttctgtcagaggaccattcttagtggcactggggaaatcttggcacccagaagaattcaactgcgctcactgcaaaaatacaatggccctacattggatttgtagagggagaaagggagcccctgtatttgtggaggctgtgcctantggagaaaattctttgccccctggaaatgt

SEQ ID NO: 2542 - DNA, 401 bp, Homo sapiens
  misc_feature 162, 190, 195, 196, 349: n = A,T,C or G
ggagctccccgcggtggcggccgaggtacgcgggacatcaatgcagagtccctctgtgaatttacaacacccaacacccatgagttcagtccttaagaaggaaaattgagcaagtatttaattggttggacattgcataaaagaggtccatatccaggcctnaactctagaaatttttattcttcaaacnttagnntgggccctctttttttcttgtcagaggaccattcttagtggcactggggaaatcttggcacccagaagaattcaactgcgctcactgcaaaaatacaatggcctacattggatttgtagaggagaaagggagccctgtattgtgaggctgtgnctattgaaggaaaattcttttgcccctgaaatgttgggtcgatgcccaaaag

SEQ ID NO: 2543 - DNA, 442 bp, Homo sapiens
cttagggcgaattggagctccccgcggtggcggccgcccgggcaggtacgcggggacacacacacacacagcacctgcacgcagatgcacacatctctagtcaaatgaggctctcagctttttgataggggctttttgatacgtgtataaccaatactttattctcactgtagtcaaggactcattgcaattcagaaaatgagaagctgatccggaactccactacagctcaaagaaattctcgaatgttctcacctattaacagttattaaaatggaagaagctggggatgaaattgtgagcaatgccatctcctacgctctatacaaagccttcagcaccagtgagcaagacaagggataactggaatgggcagctgaagcttctgctgggagtggaaccagctgggacttagccaatggatgagattttcaccaatgac

SEQ ID NO: 2544 - DNA, 398 bp, Homo sapiens
  misc_feature 161, 371, 385: n = A,T,C or G
attggagctccccgcggtggcggccgaggtaccgactcctcagaaactggcatgccaaatcaaaatgggtctggttcaatcctccctaatggcaatgtaaacccctctaactaatcccacttctcctaattatctttttctccttacgaacctaaaaattntcaccatttctattagcctggaaaataacatccctctgttcttctcttcctccttcagcactggatctcacttacaataggttttatttaataattatcttccttacactttctgtctcaccagtttccccttaaactgatttaccctgctacacaaaaattattcttattggggcttatgtgcccttttcctccaccttatttcggacnctctcaccctgggnatgggatgcctcc

SEQ ID NO: 2545 - DNA, 410 bp, Homo sapiens
  misc_feature 1, 2, 29, 331: n = A,T,C or G
nncccgggcaggtactattataatgacantgccaaggaacagagattaatcaatgtgcccaaattcacattattcacagagctgggatttaagcctagtctggctgtggaatctgtattcttaatgaccatgctatattgcttaagattaacctttgagaatttactccagttacaaagattgtttttatttctctgaaactgcccccaatgagccataacaataaattaatcaattatcttggttatctcttttgcccaagtttatatttcaaaaaaaattcaaacataccagaaagatgaaagaatagcacaagaatccaatcaaaagnatcaggcactgcatgtcatgtcttcattttcctttaatctaaaacatgcctctactttctttgatcttccatgacattg

SEQ ID NO: 2546 - DNA, 413 bp, Homo sapiens
ctatagggcgaattggagctccccgcggtggcggccgcccgggcaggtacatctacctaaaggactattatgtggaataatacataccaatgaagtattacatgatttaaagactacaataaaaccaaacatgcttataacattaagaaaaacaataaagatacatgattgaaaacccaagttgaaaaatagcatatgccttggaggaaatgtgctcaaattactaatgatttagtgttgtccctactttctctctcttttttctttctttttttttattatggttagctgtcacatacaactttttttttttttgagatgggggttctcgcctctggtcacccaaggcttgggagtgccagccggccgccgatcctcgggctcactggcaaccctcccaccatccccatgtt

SEQ ID NO: 2547 - DNA, 437 bp, Homo sapiens
  misc_feature 211, 379, 403: n = A,T,C or G
tatagggcgaattggagctccccgcggtggcggccgcccgggcaggtacttccaaaccctcctgttctttcctttttgttttccccaattttaacataaggcaaaagcagtaattgagcaattctatcacctggattggcactccggggaacagtggagctgatcactaactgaattccccctttataatctgaataaattaccccagtantgaatttggactcccttcaaatttagacttgatcttccctcaaaggcctaccctcccttctggcaagccgggccatatacccctctaggaatcttttgtgggggctttccagggagtaaaaagaccattttgggtggaacataaaatctactgcggtgctgccttgcntgtggccgccgggacaagctgttnggattgttgtaaattgggctgacttccctgaagt

SEQ ID NO: 2548 - DNA, 515 bp, Homo sapiens
  misc_feature 115, 149, 158, 194, 224, 234, 256, 277, 286, 313, 327, 336,343, 415, 430, 443, 458, 468, 471: n = A,T,C or G
catcttgggtcatcgatgagcctcgccctgtgcctggtcccgcttgtgagggaaggacattagaaaatgaattgatgtgttccttaaaggatgggcaggaaaacagatcctgttngtggatatttatttgaacgggattacagatttgnaaatgaagntcacaaagtgagcattacccaatgtagtaggaaatnacaggactgattaaaaatctttggatggcnttcacatagnaccattgccaaccatataccanactattgggaattacttgtcnattgaccantgaaggcattctcaaagcctggggggnagggcagtataaanccaccggtnggccacnaagggggtacaagggattttcttggctccatgcctggccctaaaacctggtggccgtttccattaaccacanaattcaattttccantatttttctaaanccccttcaaaaaacnaaaagtcctngtntggtgaaaattattcctggaattcttcttaccgggtttcccttt

SEQ ID NO: 2549 - DNA, 407 bp, Homo sapiens
  misc_feature 158, 211, 242, 360: n = A,T,C or G
ccgcggtggcggccgaggtactttttttttttttttttttttcccttcatcaaggaagttcatcaaagaatttcatcaaagttcaatgatgacctctttttaaaattttcttagtattctatgtaactatcaccgatcttttccccacacactccaanagcttttttaatataattttctacatagccatcagcacagataaccaatcctntttttttccccactagagatgtgccttccgnaacctctgtcctcttcctttaacctggaatattgctcttcaggcctgttgtgcagctaaaagcttcattcctcatcatcctggggttcctttccctctctcttgggctggaatccctnttgcctggatctctcaccttcataaatctagtttactccttttgttt

SEQ ID NO: 2550 - DNA, 417 bp, Homo sapiens
  misc_feature 355, 363: n = A,T,C or G
atcgactacttagggcgaattggagctccccgcggtggcggccgaggtacgttgaaatattaggggcaggttcccccaatatctggcgcccaacgtggttttctttttcctaagtgcatgtgggaacccgattccctttggtaggtgcggagaaatgttcatcggtccagtccacagaaatgcttgtttggctccccaacgattggtgagttgtctgtgtattctccggggtaactatgggtcacgcagagtctaaacattatgcttatctctgctatattaaattcctgttaaaatggggggagttccgggttcccatgggaaaaatatgggtcacccctattcaggggccagntgggaagnaacacctgtcctttgggtttcctggaaaaaggggaaccgtttaggatggtggga

SEQ ID NO: 2551 - DNA, 386 bp, Homo sapiens
  misc_feature 379: n = A,T,C or G
ctatagggcgaattggagctccccgcggtggcggccgcccgggcaggtacaaaatccgtaaacacttccactaatcgaatctaagtcaaagtccactttggattggggtttgagaaaaaattcatttgctgcaacctctgcctcccgggttcaagcgattcttctacctcagtttcccaagtagctgagactacaggtgcgtgccaccacgcccatctaatttttttgtatttttaatagagacggggtttcgccatgttggccaggatggtctctatctcctcctgacctcgtgatctgcccacctcagccttccaaagtgctggggaattacaggccgtggagccaccgtgccctggggtcatccaacccatggagnctttttg

SEQ ID NO: 2552 - DNA, 462 bp, Homo sapiens
  misc_feature 2, 80, 182, 190, 436: n = A,T,C or G
tncttagggcgaattggagctccccgcggtggcggccgaggtacgaaaaaatcaggctactaagcccactgttaatatangacgcagaccaattgttaggaacaggtccaaattggagcaccattaaccaacaatcagtgatgcagaatgaggctattgaacaagtaagggctatttgcctnaaggcccnggggaaaaaattcagggacccaggaacagctttccctattaattcaattacgacaaggctctaaagagccatatcctgactttgtggcaagattacaagatgctgctcaaaagtctattacagatgacaatgcccgaaaagttattgtagaattaatggcctatgaaaatgcaaatccagaatgttcagtcggccataaagccattaaaagggaaaaagttccagcaggagttgatgtaattacangaatatgtgaaggctttggggatggg

SEQ ID NO: 2553 - DNA, 430 bp, Homo sapiens
  misc_feature 15, 19, 20, 26, 28, 63, 79, 83, 85: n = A,T,C or G
gaaaaccggcgaatntttnnggaaancnccggcggccgaggtacactgtttttgcattagcantttgcctcctcttttncctncnctgtccttcatacttgcaaccaacaatctattagcaacctgaatttcagggtttctttcagagggagacacagactggaaaatgtgtatgtaacaacgtgaaaagttgtattgacacacagggctggggtctgggccaggcctctgcattcaccttttctatctttaaccctatcttacagatgtccttcaggacgtgtgtctggtgatgggaccggctcttcatttacatttttctgttgacaaacagagtccatgaatattaattattctgaagtttatttgcagaaaaggcactttctaatccttatcaattatttatttaaaaaacttccccacctaataa

SEQ ID NO: 2554 - DNA, 481 bp, Homo sapiens
  misc_feature 5, 23, 39, 41, 67, 69, 100, 176, 210, 275, 289, 321, 332,355, 365, 372, 385, 389, 398, 446: n = A,T,C or G
ttggntctccccgcggtggcggncgcccgggcaggtacncngggaggctcctggggtggagtccaantnactcattgtttgtgaaagctgagctcacagnaaaacaagccaccatgaagctgtcggtgtgtctcctgctggtcacgctggccctctgctgctaccaggccaatgcncgagttctgccccagctcttggtttctgagctgnttagacttctttcttcattagtggaaccctcttgttcaagttaaaagttctttgcccaaaatttngatggccccttccngggaaagcttgtttgccagccccaagttttanggaagtggaanaaagaattgccacgggattcaanaattgttccnctttcangaaaaaccgaaangccntcatttgcnggaaaggtccttggtggaaaaaaattatttgaaaaaaaaatggttagnttggtgttgaaccattgttaaaaaaaacctttttc

SEQ ID NO: 2555 - DNA, 423 bp, Homo sapiens
  misc_feature 245, 269: n = A,T,C or G
ggcgaattggagctccccgcggtggcggccgaggtacgcgggggcgcagagctgcagccgccgagccggacgtgtccgcgaagatggcgggccggagcatgcaagcggcaagatgtcctacagatgaattatctttaaccaattgtgcagttgtgaatgaaaaggatttccagtctggccagtgagtatctgactttgttttcttttaacctgctaagtggcattcgggaaacttccagagagtnatttttaggaaacgttggaaaatntttttaaaaaattcttgctgaagttggaaaatggagaggatgagaaaaagttatgtatttgaatcattactgtgtcaaacttttgataaatactgtataatgttttaaaaatgttttatgtataaaaactctaatttttcatcagtttttctta

SEQ ID NO: 2556 - DNA, 419 bp, Homo sapiens
  misc_feature 20, 33, 39, 41, 45, 52, 56, 80, 81, 88, 102, 116, 119, 150,153, 162, 163, 166, 228, 358, 359, 376, 398: n = A,T,C or G
cggcccgaggtacgcggggnttgctttgcgacnctttcncncccncactttnccancccgcagatgcacacatctctagnnaaatgangctctcagcttttngataggggcttttnganacgtgtataaccaatactttattctcactgnagncaaaggacnnatngcaattcagaaatgagaagctgatccggaactccactacagctcaaagaaattctcgaatgntctcacctattaacagttattaaaatggaagaagctggggatgaaattgtgagcaatgccatctcctacgctctatacaaagccttcagcaccagtgagcaaagacaaagataactgggaatgggcagcnngaagcttctgctggagngggaaccaggctgggactttanccaatggatggaagaattttc

SEQ ID NO: 2557 - DNA, 366 bp, Homo sapiens
  misc_feature 40, 43, 44, 45, 49, 51, 52, 53, 73, 82, 94, 103, 109, 117,125, 159, 180, 193, 198, 230, 236, 237, 240, 271, 285, 321,326, 329: n = A,T,C or G
cttagggcgaattggagctccccgcggtggcggccgacgngcnnngacncnnngcttttcttgaaggaatccntaaagtgcncgtgattccgtnttctttacncatcantgcaaagnccctctgngaatttacaacacccaacacccatgagttcagtncttaagaaggaaaattgagcnaagtatttaattnggttnggacatttgcataaaagaggaccatatccagnctaacnntanaaattttattctcaaacttagttggcctctntttcttctgtcagnaggaccattcttagtggcactggggaaatcttggcncccanaanaattcaactgcgctcactgcaaaaatacaatggccta

SEQ ID NO: 2558 - DNA, 389 bp, Homo sapiens
  misc_feature 337: n = A,T,C or G
ccgcggtggcggccgcccgggcaggtacgaaaaaatcaggctactaagcccactgttaatatagacgcagaccaattgttaggaacaggtccaaattggagcaccattaaccaacaatcagtgatgcagaatgaggctattgaacaagttaggggctatttgcctcagggcctggggaaaaattcaggacccaggaacagctttccctattaattcaattagacaaggctctaaagagccatatcctgactttgtggcaagattacaagctgctgctcaaaagtctattacagatgacaatgcccggaaaagttattgtagaattaatggcctatgnaaaatgcaaatccagaatggtcaggtcggccattaaagccatttaaaaggga

SEQ ID NO: 2559 - DNA, 412 bp, Homo sapiens
  misc_feature 3, 327, 378, 398, 407: n = A,T,C or G
ctnctatagggcgaattggagctccccgcggtggcggccgcccgggcaggtacgtaacaggacatcaataaatattagttgaatggaagattaaatcaacaaaatgggtgatggatctctgcagtaagtggaagagttcttcatggcccccaaggttatatccatctagaacttcagcacgtaatttcatctggaaatagtgcctttgcggatataagttaggtaaaactgaagatgagatcatactggattaggatgggatctaaatccaatgaaaatgtcttcataaaaaaacaggaaagaacccattagaaacacaagggaagnaaggtcaatgttgaagattggagggcagagattggggaggggatgccagcncaccggccccagggaattgnccagccagnccacc

SEQ ID NO: 2560 - DNA, 373 bp, Homo sapiens
ccgcggtggcggccgaggtacgcggggaatgcagagtccctctgtgaatttacaacacccaacacccatgagttcagtccttaagaaggaaaattgagcaagtatttaattggttggacattgcataaaagaggtccatatccaggctaactctagaaattttattctcaaacttagttggcctctttttcttctgtcagaggaccattcttagtggcactggggaaatcttggcacccagaagaattcaactgcgctcactgcaaaaatacaatggcctacattggatttgtagaggagaaaggagccctgtattgtgagctgtgctatgagaaattctttgcccctggaatgtggtcgatgcccaaaggga

SEQ ID NO: 2561 - DNA, 482 bp, Homo sapiens
  misc_feature 166, 167, 178, 200, 212, 250, 258, 259, 275, 307, 309, 311,326, 351, 360, 366, 371, 391, 408, 417, 424, 433, 440, 454,463, 467, 482: n = A,T,C or G
cgcccgggcaggtacggtattggaaatggatctgtctttggtaaagatcagcctataattcttgtgctgttggatatcacccccatgatgggtgtcctggacggtgtcctaatggaactgcaagactgttgcccttcccctcctgaaagatgttcattcgcaacannattaaagaagnaccgtttgccctttcaaagacncttggaatgatnggccatttctatgtggggccttcccattgccccaaagnaagtgggnnagggctattgggtagnacgaaaaaaaggaattttttaaccttggaaanangncaaataattggttgnaaaaaaaattccttttctaaaaaantaccccccnaggtgnggttngtccaacgtctcctttttangtaattaataaaattancccgcctcnaaaagtnaaaaggttntccaagnttttaaaaaaaggnttttaattntggntttggatgggggggn

SEQ ID NO: 2562 - DNA, 396 bp, Homo sapiens
  misc_feature 362, 375: n = A,T,C or G
ctacttagggcgaattggagctccccgcggtggcggccgaggtacgcggggacatcaatgcagagtccctctgtgaatttacaacacccaacacccatgagttcagtccttaagaaggaaaattgagcaagtatttaattggttggacattgcataaaagaggtccatatccaggctaactctagaaattttattctcaaacttagttggcctctttttcttctgtcagaggaccattcttagtggcactggggaaatcttggcacccaggagaattcaactgcgctcactgcaaaaataccaatggcctacattgggaatttgtaggagggagaaaagggagcccctgttattggtggagnctgtggcttatgnagaaaaattctttgcccctgg

SEQ ID NO: 2563 - DNA, 416 bp, Homo sapiens
  misc_feature 208: n = A,T,C or G
ctatagggcgaattggagctccccgcggtggcggccgaggtacgcgggacatcaatgcagagtccctctgtgaatttacaacacccaacacccatgagttcagtccttaagaaggaaaattgagtaagtatttaattggttggacattgcataaaagaggtccatatccaggctaacttctaagaaatttttatttctcaaaacttangttggcctctttttcttctgtcagaggaccattcttagttggcactggggaaatcttggcacccagaagaattcaactgcgctcactgcaaaaatacaatggcctacattggatttgtagaggagaaaggagccctgtatttgtgagcctgtgctatgagaaattcttttgcccctgaatgtggtcgatgccaaaagggaaggatcct

SEQ ID NO: 2564 - DNA, 408 bp, Homo sapiens
ccgggcaggtacttgatggactcatcattacagaatactcctcgttggaagggggtatgccttgaagtaagaattgcaaaaggcaatccagctagcaaaagggaataaatgaaaatatcattaaaaaagaaatatcaaaactaattaatgggcaataattatcccacagactctgtctaaaaatgcatttgccgtgaaaataaatgagagcacatgtaaaaaaggaaatgcagcaatgcatgcaacagaagttagaaagattacagttttaagataaagatgttttgtctacagcaaacaaagtgttcaaatcctctattaaccaatttaacaaagagtttatctttcctttgttttctgtcccaaacacactaaattgggattttgggaaaaatctcttcttcacgt

SEQ ID NO: 2565 - DNA, 395 bp, Homo sapiens
ccgcggtggcggccgcccgggcaggtactctggtagccaagttttgcaagagccggggtttccagcagggatggtagccagcctgggcacacttttctgtattgtatttgaacctcatttcctgatgctcatccagaagttcctggctgggtgagtaggtgaacagttcaaggctgtgtggatgaaactctggcatctctttacagtgctgtccggcagggcagtgtgaggccactctgtcctcctttgacctctttcttcttcagcagccaaatggaggctctctaaaggtgatgattaacttggcataaacatgccaagctttcctgagccgtttgccctgaattgggctgtctcttgctgctctgagacagggaagactgggctgtctggct

SEQ ID NO: 2566 - DNA, 437 bp, Homo sapiens
  misc_feature 351, 423: n = A,T,C or G
tagggcgaattgtagctccccgcggtggcggccgcccgggcaggtacgttgaaatattaggggcaggttcccccaatatctggcgcccaacgtggttttctttttcctaagtgcatgtgggaacccgattccctttggtaggtgcggagaaatgttcatcggtccagtccacagaaatgcttgttcggctccccgacgattggtgagttgtctgtgtattgtccggggtaactatgggtcacgcagagtctaaacattatgctcatctctgctatattaaattcctgttaaaatgggggagttcgggttcccatggaaaatatggtcaccctattcagggcagtgggaagnaacactgtccttggtttcctggaaaaaggggaaccgttaggattgtgggaacctattggggattcatggttnggtgcaaaaaattc

SEQ ID NO: 2567 - DNA, 393 bp, Homo sapiens
  misc_feature 359: n = A,T,C or G
ccgcggtggcggccgaggtacagatctcatcaggtatgagggcagtctctgacgcgaacgtctcttcctcgtggtttttattgtcagtattcacacgaagtttaagtctcctagtgggcacccagacgggattgacgatctcctggttaaaccaccaagcataccctcttccccacgttataattgttccaggttcccaggtattggtttgggagtttttccatgacactggcttgccttcgtttagggagaattttttgcctgtataatgggcatttagctgcagtcaagagttatttgttttttagggaaccattttaagaaaagctttaaaccaatgctaaaatattaattggggnagtgggggaaggtaattttaaaatttatggcttt

SEQ ID NO: 2568 - DNA, 384 bp, Homo sapiens
  misc_feature 239, 244, 245, 327, 334: n = A,T,C or G
ccgcggtggcggccgaggtactccaacccgttcttaggttttgggttagtgagtggtgtatcagcagcccttactagcaaaagtcctatgtgcacctacctacccttcttcattgatggattggagctatacttacctgggcaggcatgaccttcggcattattccccgcaatcttgactccagcatacaagcaggcccggtaatgggcctccacgatgtccctgccataggctctttnggggnnccacaccacagtaatatggacctacagaagcatcaggacaaaacgctaagagtcaagaaatccagagaatcccaaagtcagnagatcanaaggccctaagccttgccctcttgaatcactatccttgccttcatctgca

SEQ ID NO: 2569 - DNA, 458 bp, Homo sapiens
  misc_feature 14, 15: n = A,T,C or G
tagggcgaattggnnctccccgcggtggcggccgaggtactccagcctgggcgacagaccgagattctgtctcaaaaaaacattaacaaagaatactccagatcatccagaaagtcagtatctgatagtgtttatatggagaactcctgcactggaatgtaaactcctaaccctagatcccatcttcttctcaggtcttcctatcacctcagcctacagcagtcaatccttccctctaaccactccctcctcctaagatttcagcatttaatgcctgtacgcgggggatgtctcttgtcagctgtctttcagaagacctggtggggcaagtccgcgggcatcatgttgaccgagctggagaaagccttgaactctatcatttcgacgtctaccacaagtacctcttcatacctcgttgggatgtgggaaatgcctactggtcccaatcaaaaaaggtt

SEQ ID NO: 2570 - DNA, 406 bp, Homo sapiens
  misc_feature 100, 175, 238, 258, 272, 294, 318, 321, 324, 328, 336, 378: n = A,T,C or G
taatacgactactatatggcgaattggagctccccgcggtggcggccgaggtacttttttttttttttttttttttttgtctgtaaaatctagcattcanatatttgctgagatttttgcttttttatctaacctcatttggtgtcctgtaaagcgcatcttgaacagcccctanagctaaagtgtagtcactagaccagcagcatcaacatcagctgggagctttactgaattgcanaatatgaggccccagtccanatggactgagtcanagtctggggggatgtgacccancaatctgtgttccaacaagccctntanaanattngaacaccncacgaaagtttgacaaccattgctttgaattttgacacccanaaactcagggaaagctacagaatgacgt

SEQ ID NO: 2571 - DNA, 396 bp, Homo sapiens
  misc_feature 361: n = A,T,C or G
ccgcggtggcggccgcccgggcaggtaccctggcaaggtttgtcctgtcttggtagcagaaagaacttctcaaagtaagggcttcacactaggggagagttcaatggcccaacccagccatggccaccctgacaccatgccctgatgctagtccctgtggcctggcccacactgaaaatactgtggggacaacagaatggatttgcaagttaccactatctctcaccagctgtaagaccctgggcacattgttgatcctaagcctcagtttcctaatctgtaaaagggtgatattaattgttcttgctcacagaaactgttatgagaattaacagaaatagcatattcagactatagcagnagtgtctggcatgaaacaggagactcaataaatac

SEQ ID NO: 2572 - DNA, 401 bp, Homo sapiens
  misc_feature 15, 23, 24: n = A,T,C or G
cttttggcgaattgnagctcccnnggtggcggccgaggtacgttgaaatattaggggcaggttcccccaatatctggcgcccaacgtggttttctttttcctaagtgcatgtgggaacccgattccctttggtaggtgcggagaaatgttcatcggtccagtccacagaaatgcttgttcggctccccgacgattggtgagttgtctgtgtattgtccggggtaactatgggtcacgcagagtctaaacattatgcttatctctgctatattaaattcctgttaaaatgggggagttcgggttcccatggaaaatatggtcaccctattcagggcagtggaagaacactgtccttggttttcctgaaaagggaaccgttagatgtggaactatggggatca

SEQ ID NO: 2573 - DNA, 397 bp, Homo sapiens
ccgcggtggcggccgaggtaccagttgtaaaattaccaggaaccgccatgcctcaagatcgccctgttttctggcttcatcaatgactgcatgcagtgcaccaccctgtccactacgtgatgctgtaggattaagtctcacagtgggcggctgaggatacagcgcccgcgtccttgtgttgctggtgaattagacgccatcgctgtgggttgctggtatggtgccgtgctatttggcacaggacacaccgcttgaggtctgtattgaacctctgaaggaggccgatactgaagctcggttggcagcccggtattgataaactaccaagccggtttgggtcttattttctacccggctggattatttggtgggatactggtatcctgagttgggcatt

SEQ ID NO: 2574 - DNA, 414 bp, Homo sapiens
  misc_feature 388: n = A,T,C or G
cttagggcgaattggagctccccgcggtggcggccgaggtacgcggggacatcaatgcagagtccctctgtgaatttacaacacccaacacccatgagttcagtccttaagaaggaaaattgagcaagtatttaattggttggacattgcataaaagaggtccatatccaggctaactctagaaattttattctcaaacttaagttggcctctttttcttcttgtcagaggaccattcttagtggcactggggaaatcttggcacccagaagaattcaactgcgctcactgcaaaaatacaatggcctacattggatttgtagaggagaaaggagccctgtatttgtgagctgtgctatgaggaaattctttgccccttgaatgtggntccgatgccaaagggaaggatccctt

SEQ ID NO: 2575 - DNA, 399 bp, Homo sapiens
cactacttagggcaattggagctccccgcggtggcggccgcccgggcaggtaccagtgaaggacaagaaacttctggaggtcaaactgggggagctgccaagctggatcttgatgcgggacttcagtcctagtggcattttcggagcgtttcaaagaggtcagagcctttggggatgtctgtaaatgaaagcaaatctctgggtcttcagatctcttttttgccatgaattaatttgggcaatgaaggccttgttgtctgaaagcagtaagttatgtagaggatgacagggagggatgctaggccttggacttctgtggttgattggccctttcaaaggctggctctgagatattacagccaagaacatgcttcctgttgcttggaatcagtatgtctg

SEQ ID NO: 2576 - DNA, 408 bp, Homo sapiens
  misc_feature 9, 163, 170: n = A,T,C or G
cttagggcnattggagctccccgcggtggcggccgaggtacagtaacatgctgcacagttttgtaggctatgagcaataggccataccatataggctaggtgtgtagcaggctgtgccacccaggtttgtgtaagtgcactctatgatgcttgcacaacgacnaatttcncccaacaacgcatttctcagaatgaatccctgttgtcaagcgatgcatgactgtgcctttgatagttccttacaaattgatcttgagtgtgtattcatgtgtaacctagttactgaataatgcatctcgaaatgttggattctttttgcatccgcctgtgctgtgctgccttccatggagctctatgatgactggcacctcctggtggaggcatccttcccacattacccccagtaag

SEQ ID NO: 2577 - DNA, 371 bp, Homo sapiens
  misc_feature 21, 41, 147, 155, 173, 185, 223, 238, 243, 276, 278, 295,302, 305, 308, 335, 353: n = A,T,C or G
ccaccgcggtggcggccgatntactcttttttttttttttnttttttttttaataaaaaagaatcttaaaatctggttgagaattatatctggaatataattgtatatttgaatattgctgtcataacttttcagttggagaagggncaactcanaggggttccacttcaaanagaggacagggngggtgaacagcttgcctggccttttttccccaccctgngtctccatattccanccttntaagaaaatggctggtgggtgaggataatgcancnaatacttcttgactggngatcttngangcnccgttgccatttccctgtctctcccantggggggaactttaaacnttaggggcagagcctatt

SEQ ID NO: 2578 - DNA, 415 bp, Homo sapiens
  misc_feature 1: n = A,T,C or G
nggcgaattggagctccccgcggtggcggccgcccgggcaggtaccaggatccaaagagctcctgtggaaccagacttttccccactctgctgaaaaaacctctcctcagagccctgggctgtgcaacgacaactatgaaaatatttgtttctcacttagggaaatttcccaggaatcctgctaagtccagaggggttttctttctcttccttattcataggttccccttgcctttaaaaggaactaaataaacaagcataaaaacaaaacaagaaaatctcccctgctcccttggcttttatctgaccctgaaatgaccccttgcctggcttgcttcatacaggtctttgaaaggcgttctctgcagaatggtgtgggcacaacttttgaagtccaggcttcagtagtggccaa

SEQ ID NO: 2579 - DNA, 417 bp, Homo sapiens
  misc_feature 111, 124, 179, 193, 233, 259, 303, 311, 354, 360, 369, 373,379: n = A,T,C or G
ccgcggtggcggccgaggtactttttttttttttttttttttttggaaacagggtttcaccgtgttagccaggatggtctcgatctcctggcctcgtgatccgcccgcctnggcctcccaaagngctgggatcacaggcgtgagccatcgtgcctggcccctgcttgggttttaaaatnaatcttggatacanggtggccagaactaaatggtctctcaacttgtcttcaagntttaggattttaatttttgatatttntcacttctctctggaaatttgttcaattctcaatttgttggggngagtgccncagctgcttcattattgaggtttactggctgataattcgaatnaaattnttagaaaanattnttaatntgggggtcattgtaagcctatcgccttaaacccagttt

SEQ ID NO: 2580 - DNA, 441 bp, Homo sapiens
  misc_feature 3, 417: n = A,T,C or G
ctnctatagggcgaattggagctccccgcggtggcggccgcccgggcaggtactaacaaatgcagtagtcaacaagattaccatgcaatcattaaggagaaccaaagtaagagagccactcagaccagattttgaacgctactaaaattaaagtagttctttgatgaatatgaatgagtagggaaaggattctttgtaatagtgatacctctgcggtaagagaagggtggtatgttgagttttagtctacagattatggcaaattcagtgacaacaatcaaatggtctaagattgacagtagcacagctttactctgtgaaggtaatgttcaggacaaatttcaagaaaactagaaaaccattctttacagctgaaatctttccctaaccattgttatttccacttttaagtcctcnagagatgagaaaagggaggtaagg

SEQ ID NO: 2581 - DNA, 414 bp, Homo sapiens
atagggcgaattggagctccccgcggtggcggccgaggtacgaaaaaatcaggctactaagcccactgttaatatagacgcagaccaattgttaggaacaggtccaaattggagcaccattaaccaacaatcagtgatgcagaatgaggctattgaacaagtaagggctatttgcctcagggcctggggaaaaattcaggacccaggaacagctttccctattaattcaattagacaaggctctaaagagccatatcctgactttgtggcaagattacaagatgctgctcaaaagtctattacagatgacaatgcccgaaaagttattgtaggaattaatggcctatgaaaatggcaaatccaggaatggtcaggtcggcccataaaggccatttaaaagggaaaaagtttcca

SEQ ID NO: 2582 - DNA, 301 bp, Homo sapiens
  misc_feature 205, 210, 228, 239: n = A,T,C or G
ccgcggtggcggccgaggtacttctgctcctttttttggcagtagtggatgtgtcctagtgcttggtttctctgcaggccttttagggagaaatagctgaatttgttacagtataacttactttttatgttgatctgtttccttccctaatgtaaataggtctaatgctagttgtactttttttttttttttttttttttttttngaggngtttgcaactgcgttttnttgaaagaaanagtggaggggttaacatggggcccaccttacaacccacttttcacccccaaaatcaccccag

SEQ ID NO: 2583 - DNA, 431 bp, Homo sapiens
  misc_feature 413, 427: n = A,T,C or G
cgactccttagggcgaattggagctccccgcggtggcggccgaggtactttgcttggattgctgtgattcttaaaaaaaaaaaaaaaaagtttttttattttcctgaaggcgacagtctgtcttttggcgagtccaattagtgatcgtttccatttatccttaaccctctgtttgtgatcttcctgattccacctaccaagttcattagttctaaataaaagcctgttggcaagtgttggtagattacaactctttttatttgaagttgctcgagaagttagacatgctttagaattatgagtgtggggaaaattttgatgttccttaggattatataactgagggaggggaacatttggcaaatagggtctgagggctttgtttctctccttgcctctgaaaacattttctngaaaaagggcaagngaag

SEQ ID NO: 2584 - DNA, 441 bp, Homo sapiens
  misc_feature 8: n = A,T,C or G
atcgactnctatagggcgaattggagctccccgcggtggcggccgcccgggcaggtacccaacagccatggctcttgcgactcacctgggcagctgtgtggctgcgcacctgactcactctttctagagggtgccttgaacagcatcagcgtggcccggcgttccctacaaatagcccttgcaattgctgacccccaaacaatgttgggaataacagaagggacaagggaacaaagaaaaggccaggaaggtaataattaaccacttactgagttcaaagccatcttgctgttatcaacagcatcgagtaatgataggtatctgggaatgttcaatatgacctagaagaaaggaattacagggactgtaaatattttccataccaggtttagtttttttaggaaaagaataaaattcttggggaaaggaaacttaggaaga

SEQ ID NO: 2585 - DNA, 422 bp, Homo sapiens
  misc_feature 173: n = A,T,C or G
tacttagggcgaattggagctccccgcggtggcggccgaggtaccgactcctcagaaactggcatgccaaatcaaaatgggtctggttcaatcctccctaatggcaatgtaaacccctctaactaatcccacttctcctaattatctttttctccttacgaacctaaaaatcncaaccatttctattagcctgaaaataacatccctctgttcttctcttcctccttcagcactggatctcacttacaataggttttatttaataattatcttccttacactttctgtctcaccagtttccccttaaactgatttacctgctacacaaaattattcttattgggcttatgtgccttttcctccacttattcgacctctcacctggatggatgctcctgcagaaatctatactaacgataggt

SEQ ID NO: 2586 - DNA, 408 bp, Homo sapiens
tacttagggcgaattggagctccccgcggtggcggccgaggtactttgcccactcgtcatgtcaggagcatgaaactcacgaggccttcatttacttttatcctgtaacaccttcaatttttcccacatcctcccttgattcgtggatggacaactatggaggccaatcttgcttgaggtgaggactgcttgagtctaaattcctctctcctcaaacccaattcaaactggcctgagcaaaatgaatgtattgatccataactgaaaagtccagaatgatcaggcatcaggcatggttgcatccaggggcccatgtattagaaccatctccttccagttctgggctctgcttgcctcccagttggttttactgcacagaggcttattcaagtccagagagatcttatc

SEQ ID NO: 2587 - DNA, 374 bp, Homo sapiens
  misc_feature 63, 309: n = A,T,C or G
ccgcggtggcggccgaggtacacgagacaacaagtgacttatcccaagtcacacaggagttangaggcagggccaggacccaaacccaagtttcccttttatgagtcagctcatttcctgtgactccatattaaagatgccactctgaattttgccttggaagctggcgcttcagtttataacacaaattgacactttaggaagacaagagagctttgtattctccctgcaatcatttactcagtcaggaaaatactaaacactgtctttgcgtagaatataatgctactgatgtgaggaaaagaaatncagtgcctggcacatagaaaaggatagatacacttttgtgggaggaaaaacagtggtaaaaacat

SEQ ID NO: 2588 - DNA, 428 bp, Homo sapiens
  misc_feature 390: n = A,T,C or G
gactcctatagggcgaattggagctccccgcggtggcggccgaggtacgcgggacatcaatgcagagtccctctgtgaatttacaacacccaacacccatgagttcagtccttaagaaggaaaattgagcaagtatttaattggttggacattgcataaaagaggtccatatccaggctaactctagaaatttttattctcaaacttagttggcctctttttcttctgtcagaggaccattcttagtggcactggggaaatcttggcacccagaagaattcaactgcgctcactgcaaaaatacaatggccctacattggatttgtagaggaggaaaggagccctgtattgtgagctgtgctatgaggaaatttctttgcccctggaatngtgggttcgatgccaaagggaagaatccttgggaggaa

SEQ ID NO: 2589 - DNA, 383 bp, Homo sapiens
  misc_feature 131, 261, 264, 296, 304, 318, 345, 380: n = A,T,C or G
tggagctccccgcggtggcggccgcccgggcaggtacagagaagcaggttgagtggatggcaaagtgaccggttgaggggccaaaatgataggagggtgaggggctgtggtggatgggggagggcctgcanaattacaggtaaattgtagtttggatggctccggaggcaaagactgtaaaggtttggagagggaagagttagcatagatatggtcctgggctgtctgagttggggccgcaggagctacaagtgtcggctnttngtgaaaagaaataaaatcatcagggggtgatnttaaagcncaaagtcacttggnagttagatattgaatcctcagttatcngttcaggtggggggaagggagttaggcaaaagggnagg

SEQ ID NO: 2590 - DNA, 377 bp, Homo sapiens
ccgcggtggcggccgcccgggcaggtacttagtggacactccgaggcaggcaggggagtgggaagctttacggtggaaaaggggaaggctgcagcagtgctctgattggaggcttctggcctggagaagttggaagcagctgatagaggtaggtgtcttcagtgattggtttgaggagcctatttgtttttctgtggttgattctgagttgcaagagtcctgaccatttggggctgattgctgctgaggttgtggttttcttgcaggacaggcaagccccaaattgggccttagcccatgagggttcctggctttacccaggaaagaattcaagggtgagccagtggtaaggtggaaagaaaacaacttcattaaag

SEQ ID NO: 2591 - DNA, 385 bp, Homo sapiens
  misc_feature 300: n = A,T,C or G
ccgggcaggtacagtggcgtgatcatagctcactgcagcctcaaactcctgggctcaagtgatcctcctgccccagtttcttgagtagttgggactacaggcgtgtgccacatctggctatttttttttttttaatagagaaggggtctttgttatgttgcccaggctcgtcttgaaattctgggctcaagcaatcctttcacctcagccccccaaagcaatggttcacaggttcacaggtatgaactaccatgcctagcctagctatttactcttaaaggaaaaaataattttttattnagttttcaagccctttcatgctatttacacttggaagttttggcccttattattttttggcttagaaatcttttaaatgggtttt

SEQ ID NO: 2592 - DNA, 372 bp, Homo sapiens
  misc_feature 1, 84, 86, 134, 147, 228, 243, 274, 292, 303, 330, 332, 334,345, 354: n = A,T,C or G
nttatagggcgaattggagcttcccgcggtggcggccgcccgggcaggtacttttttttttttttttttttttttttttggtananatttccccatgttgcccaagttggtctcaaactcctggggctcaaganatctgcccacctntgcctcccaaggtgctgggatttttacaggtgtgagccaccacaaccaacctaatctggttttaaaaataatagagagatngaaaagaccagattntttcatgggaaggaggaggaggtggcaaaantcaagccattttccgttntgaggttgcanagggcagctttcacccaagggagcgancntncaggaaagcanatgagtcgncattaaaaggggaaaggg

SEQ ID NO: 2593 - DNA, 411 bp, Homo sapiens
  misc_feature 284: n = A,T,C or G
atgggagctccccgcggtggcggccgaggtacaggccagactcattcatgttcacaggccccatccatctggcccattaatccagcctatgacggtgatgtaactgaaaggctggaccaggtttatagaaggttagaatcactctgtccaaggaaatgggggtggaaaaggggaatttcatcaccttgaccaaagttagtcctgttactggtcctgaacatccagaattaggaagcttactgtggcctcacaccacattagaatttgttctggaaatcaagctntaggaacaagagatcgtaagtcatattatactatcaacctaaattccagtctgacaattcctttgcaaaattgtgtaaaactcccttatattgctagttgtaggaaaaacatagttattaaacctga

SEQ ID NO: 2594 - DNA, 429 bp, Homo sapiens
ccgcggtggcggccgaggtacctgtggatgggaagaatagaaatcaggagtgggcagagggaaaagttaagctgtgatgtaggcccagtgacaagccactgacacttctatggggagctgtaaatagacctttggcattgtcccaagttgggccaatattggccagggccctttacaaggctcacacatcatttattgcttgttgggccactccaggaaggtgcatgactttgggtaaggaggctctctggagctgaggtaatccctgaaaggactaacagctgaagattgtctgctgagaatactgccgaaagactaaggcaacaaattccttccacattacaagggatctgggatggcacatcacagttgcccaaaaataaaggcctggaacttatttagtttataatctggatcaagtttagggaa

SEQ ID NO: 2595 - DNA, 416 bp, Homo sapiens
  misc_feature 178: n = A,T,C or G
tacttagggcgattggagctccccgcggtggcggccgaggtacttcaaatgggtcactgaatatcttcaaattgtatgtaaattttggaggggaagtggtatatgcagatttttttttttctggaaagaagaccaatcacttttgccaaattctcaaacaggcccatatttttttttnacacacatgcgtgcgcatgcgcacacgcgcgcgcacacacacacacacacacgttaagatgcgaagaatcactgtcataaaatgtcatatttctaatttctgtaaatggggagaattcctcaagcttatataaaagtgatgtaaataattcagttacaattataaaagaaatggtatcacagcaaatccctttggcaccccactgaaaatttctctctggatgtttaaaacaccattt

SEQ ID NO: 2596 - DNA, 398 bp, Homo sapiens
  misc_feature 9: n = A,T,C or G
cttagggcnattggagctccccgcggtggcggccgcccgggcaggtacctctgctcagttttgctgtgaatctaaaactactctatataaagtctataaaaaactaaaacaaaaactaaacccctgaagattggaattttgcaagacggagtagctgttcctcaaaaaaacagctatgtccccctcttggccagcactggcttgagacttacagggtgcaacatgaaatttctgtttcgtagcaagtgcatgtctcacagttgtcagtctgccactccgagtttattgggtgtttgtttcctttgagatccatgcatttcctggttgaatctcctggaactccctcattaggtattgaaatagcatgatgcattgcattaaagtcacggaaggtggca

SEQ ID NO: 2597 - DNA, 346 bp, Homo sapiens
  misc_feature 178, 187, 201, 235, 272, 326, 331: n = A,T,C or G
ggagctccccgcggtggcggccgcctgggcaggtacaggttgctgtaggagcccttaatctatgagatcttgacagattgcttgctttcttctttccaccatgggagaatgcaacaaggtcttcaccagatggccgaacagatccaagtgtcatgaccttggactgtccatcctccanaaaccatangccaaataaatttnttttcttcataaatttcccagtctgtgggtatcntggcttaccttgaaaatcaactgaaatcagtcagctnaggaacaaaattcttccaggagaaactgttttacttcctttgaaatcatgaatngcccngacctgtcaaaattc

SEQ ID NO: 2598 - DNA, 299 bp, Homo sapiens
  misc_feature 20, 31, 71, 82, 98, 103, 168, 207, 287: n = A,T,C or G
ttcttttcacatcaatgcanagtccctctgngaatttacaacacccaacacccatgagttcagtccttaanaaggaaaattngaaccaagtattttantttgnttgggacattgcataaaagaggtccatatccaggctaattctagaaattttattctcaaacttantatggcctctttttcttctgtcagaggaccattcttagnggcactggggaaatcttggcacccagaagaattcaactgcgctcactgcaaaaatacaatggcctacattggatttgtanaggagaaaggag

SEQ ID NO: 2599 - DNA, 434 bp, Homo sapiens
  misc_feature 3, 315, 379, 405, 421: n = A,T,C or G
ctncttagggcgaattggagctccccgcggtggcggccgaggtacaaactctgtttagataaagaattaaacaaaacttccatttttattaataattcaagtataatccataatatgattattaggtgttataactaataagttgttattttatatcttaatgtaggtaaagagaactggtcttgtggtggtgaaaaaacatgaaaattgttggtctccactgttctagtgaagatttacatgccgggcagattgctcttattaaacatgggtcaaggctgaaaaactgtgatctttatttttccagaaaaccangttctgcttgtttgaaaatgattgtaaatggtaagtgcagaaaagggtttgttggggattaagnagtatttatctgggatggggcgtggntggttttatgcctgtncatcccagcactt

SEQ ID NO: 2600 - DNA, 402 bp, Homo sapiens
ccgcggtggcggccgaggtacctttcattggattgtccatggtgcatcgctttagcaagcggcgtgactctccgctgcccgtcatcttggccaatatctatctgctggttcctcctgtgctcaacccaattgtctatggagtgaagacaagggagattcgacagcgcatccttcgacttttccatgtggccacacacgcttcagagccctaggtgtcagtgatcaaacttcttttccattcagagtcctctgattcagattttaatgttaacattttggaagacagtattcagaaaaaaaaatttccttaataaaaatacaactcagatccttcaaatatgaaactggttgggggaatctccattttttcaatattattttcttcctttggttttcttgcta

SEQ ID NO: 2601 - DNA, 415 bp, Homo sapiens
ctacttagggcgaattggagctccccgcggtggcggccgaggtacgcggggagctcaataaaacatcaccaaattcccttaggcagaaaaagggtggggagtgtcctttcttgaaggaatcccttaagtgcacgtctcccgttttcttttcacatcaatgcagagtcccttctggtgaatttacaacacccaacacccatgagttcagtccttaagaaggaaaattgagcaagtatttaattggttggacattgcataaaagaggtccatatccaggctaactctagaaattttattctcaaacttagttggcctctttttcttctgtcagaggaccattcttagtggcactggggaaatcttggcacccagaagaattcaactgcgctcactgcaaaaatacaatggcctacat

SEQ ID NO: 2602 - DNA, 413 bp, Homo sapiens
ctacttagggcgaattggagctccccgcggtggcggccgaggtacgcggggatcctcattctcaatcctacccatgatgcagacagattgcctcatttcagctcaataaaacatcaccaaattcccttaggcagaaaaagggtggggagtgccctttcttgaaggaatccttaaagtgcacgtctcccgttttcttttcacatcaatgcagagtccctctgtgaatttacaacacccaacacccatgagttcagtccttaagaaggaaaattgagcaagtatttaattggttggacattgcataaaagaggtccatatccaggctaactctagaaattttattctcaaacttagttggcctcttttttttctgtcagaggaccattcttagtggcactggggaaatcttggca

SEQ ID NO: 2603 - DNA, 398 bp, Homo sapiens
  misc_feature 12: n = A,T,C or G
gtgggcgggccngcccgggcagggtactgatgccattaataggaatcatgggaacatgggaatgagaaatgagctccaaaagaaaagatgcattctcttttggacatattgagttggctatctctaaaagatattcatgtgcagatgtctggcagactattagaaatgctggtttggaactcaaggaaaaagttacaaaaaattggactaggttaatggatggactattttgaagttaaatcctatgcttcagtataaatgaagacatattttttttttctataaccactattgaagttcccctccccctccaaatttatagtattggtcttttgggagtggtttggatccaccattggcaggggactggggatattgggaggaaaagggaggtggaa

SEQ ID NO: 2604 - DNA, 437 bp, Homo sapiens
  misc_feature 402: n = A,T,C or G
gctcctatagggcgaattggagctccccgcggtggcggccgcccgggcaggactatagattatttgtcttgaagaagagctttgatatgtttcaaaattcgacgttggctttggaaggaaactgtaaatttacagatctttgtccttccccacaaagagccttaatctcacaggttggattatgtggaactcactgctatttttcagttctcctttaagtgactaaggaacatccagatacttccaaaaaaaaaaaagtctaagtttttcactttgtccattgccatttaattatcttctgcatattttaaagcatttcctgtgaacataagtattgcccatccagaaaatttgcgtctacattgattttatgtttaatgaaacctgttcttctcaagttcnttatttaatcacataacatagtatcttcaaaggtg

SEQ ID NO: 2605 - DNA, 380 bp, Homo sapiens
ccgcggtggcggccgcccgggcaggtacattatttctccatatgtctgtcccctctgctccaaaactgcaggggagagtcttgcacatcatctttgtaaaaacagtctttgttttactcagaaaatttgtattgagtcctgctacatacaccgctaggcattaggggtcctaaaaagaatgaaaataaaagcatctcagggatggcttttctagaacacatgcccaagcagagacttaaatattgaggctggccagattaaaaggggtagagggcaggaaagggtgacagcatgcccggcagcagcaagagcgggagcgaggcctgaaagaatggaaagtattttgcctaccaatagaaggattgagtgagtagggcacc

SEQ ID NO: 2606 - DNA, 441 bp, Homo sapiens
  misc_feature 297, 391, 402, 408: n = A,T,C or G
ctacttagggcgaattggagctccccgcggtggcggccgaggtaccagttgtaaaattaccaggaaccgccatgcctcaagatcgccctgttttctggcttcatcaatgactgcatgcagtgcaccaccctgtccactacgtgatgctgtaggattaagtctcacagtgggcggctgaggatacagccgcccgcgtcctgtgttgctggtgaattaagacgccatcgctgtgggttgctggcatggtgccgtgctatttggcacaggacacaccgcttgaggtctgtattgaacctntgaaggaggccgatactgaagctcggttggcagcccggtattgataaactaccagcggttgggtcttattttctaccggctgatattgtggatnctgtatcttgnaagttngcatttgcccgggatagagacctcttgtccctt

SEQ ID NO: 2607 - DNA, 401 bp, Homo sapiens
  misc_feature 166, 188, 345, 371: n = A,T,C or G
ccgcggtggcggccgcccgggcaggtacgaaaaaatcaggctactaagcccactgttaatatagacgcagaccaattgttaggaacaggtccaaattggagcaccattaaccaacaatcagtgatgcagaatgaggctattgaacaagtaagggctatttgccctnagggcctggggaaaaaattcangacccaggaacagctttccctattaattcaattagacaaggctctaaagagccatatcctgactttgtggcaagattacaagatgctgctcaaaagtctattacagatgacaatgcccggaaaagttattgtagaattaatggcctatgtaaaatgncaaatccaggaatggtcaagtcggcncattaaagccatttaaaagggaaaaaggtt

SEQ ID NO: 2608 - DNA, 388 bp, Homo sapiens
  misc_feature 319, 338: n = A,T,C or G
ctacttagggcgaattggagctccccgcggtggcggccgcccgggcaggtacccaacagccatggctcttgcgactcacctgggcagctgtgtggctgcgcacctgactcactctttctagagggtgccttgaacagcatcagcgtggcccggcgttccctacaaatagcccttgcaattgctgaccccaaacaatgttgggaataacagaagggacaagggaacaaagaaaaggccaggaaggtaataattaaccacttactgagttcaaagccatcttgctgttatcaacagcatcgagtaatgataggtatctggnaatgttcaatatgacctantaagaaagaattacagggctgtaatatttccataccagttagtttttaga

SEQ ID NO: 2609 - DNA, 418 bp, Homo sapiens
  misc_feature 1: n = A,T,C or G
ncactacttagggcgaattggagctccccgcggtggcggccgcccgggcaggtacgcggggaggctttgtgacacacacacacacacagcacctgcacgcagatgcacacatctctagtcaaatgaggctctcagctttttgataggggctttttgataccgtgtataaccaatacttttattctcactgtagtcaaggactcattgcaattcagaaatgagaagctgatccggaactccactacagctcaaagaaattctcgaatgttctcacctattaacagttattaaaatggaagaagctggggatgaaattgtgagcaatgccatctcctacgctctatacaaagccttcagcaccagtgagcaagacaaggataactggaatgggcagctgaagcttctgctggagtggaac

SEQ ID NO: 2610 - DNA, 419 bp, Homo sapiens
  misc_feature 53: n = A,T,C or G
tcactacttagggcgaattggagctccccgcggtggccgggccgagggtccgncggggatcaatgcagagtccctctgtgaatttacaacacccaacacccatgagttcagtccttaagaaggaaaattgagcaagtatttaattggttggacattgcataaaagaggtccatatccaggctaactctagaaattttattctcaaacttagttggcctctttttttttctgtcagaggaccattcttagtggcactggggaaatcttggcacccagaagaattcaactgcgctcactgcaaaaatacaatggcctacattggatttgtagaggagaaagggagccctgttatttgtggagctgtgctatgaagaaaattctttggcccctgggaattggtgggtccgatgcccaaaggg

SEQ ID NO: 2611 - DNA, 380 bp, Homo sapiens
ccgcggtggcggccgaggtactttttcttttttttttttgtttttttctgggctgttagaatttgacattgttcaactttaactttgtcctcattgaactttatcctgctaaggagctaaaaggtccatatgatcaaaaaggcagctctcaacccagcacgaaattccagggctcattcattttctgtttacctactgccaaataagtcaagacaactgcatacttgctttacagacgaatagaggacagcatgttgttcaataattgtagtttaaaaagtatatgtaagatacatccacaagaagaaagatagagggagcataccgtttgtcttctagtataggctccctgcccatgggagatcaccagagtagaatta

SEQ ID NO: 2612 - DNA, 415 bp, Homo sapiens
ccgcggtggcggccgcccgggcaggtactctggtagccaagttttgcaagagccggggtttccagcagggatggtagccagcctgggcacacttttctgtattgtatttgaacctcatttcctgatgctcatccagaagttcctggctgggtgagtaggtgaacagttcaaggctgtgtggatgaaactctggcatctctttacagtgctgtccggcagggcagtgtgaggccactctgtcctcctttgacctctttcttcttcagcagccaaatggaggctctctaaaggtgatgattaacttggcataaacatgccaagctttcctgagcgtttgccctgaattgggctgtctcttgctgctctgagacagggagactggctgtctggctgaccaagcccttggggcttgagg

SEQ ID NO: 2613 - DNA, 377 bp, Homo sapiens
  misc_feature 190, 240, 364: n = A,T,C or G
ccgggcaggtacttccaaaccctcctgttctttccgttttgttttccccaattttaacataaggcaaaagcagtaattgagcaattctatcacctggattggcactccggggaacagtggagctgacactaactgaattccccctttataatctgaataaattaccccagtatgaatttggactcccttnaaatttagacttgatctccctaaaataaggcctaccctcccttctggcancgggccatatacccctctaggaatcttttgtgggggctttccagggagtaaagagaccatttgggtggaacataaatctactgcggtgctgcctgctgtggcgcgggacaagctgttggattgntgtaattggctga

SEQ ID NO: 2614 - DNA, 400 bp, Homo sapiens
ccgcggtggcggccgaggtacagagtgatgccaggcgttcatctccccactgagctcctgctgagtgtttgcctggggccaggtcctccttccgggaagtcattttagctggaaagaacagggtgggggcgggtggcaagggatcagagcatgagccgtttgagggcttcgtcaggggcagtgaggagcctctaaaggactctacatttaggaatgacagagtcaaacaatttaacaaagccctaaaggtccctgccaggaaagaatgagccccatgtatcaccataagcaacttcttagaaacataacccacccctgtcattcccagccactttggggaggccaagggaggggagggattgcttggaagccagggagctttcggaggatcaaccctggg

SEQ ID NO: 2615 - DNA, 442 bp, Homo sapiens
atcactacttagggcgaattggagctccccgcggtggcggccgaggtactttactgaaaaccaggttatattctaaagaagaaagaaggcaggatagtgcttttgaacaagcctatttccattttgaaagtagatttcaggctaggtgcggtggctcacacctgtaatctcagcactttgggaggccaaggcaggcagatcacttgaggtcaggagttcgagaccagcctgaccaacatggtgagaccctgtctctactaaaaatacaaaaattagctgggtgtggtggcggcgcctgtaatcccagctacttgggaggctaaggcatgaagaattgcttggaacccagggaggtgggaggcttgcagttgagcccggagaatcacgaacactgccactccagcctgtggtggacaagaaatggagacccattctcccaaaa

SEQ ID NO: 2616 - DNA, 234 bp, Homo sapiens
atcactactatagggcgaattgggagctcccccgcggtggcggccgaggtccacctgatcagcaaaaatattatgattaatatgttaactgaggaagtatatcctacaatttagaaagattaatatttaaaatagttaaaattattgaaagttttaacttgcccgaaacagtccctaaccataagggacaattaatgatgctataaaattctatctaacattcctagtctactt

SEQ ID NO: 2617 - DNA, 429 bp, Homo sapiens
ctacttagggcgaattggagctccccgcggtgggcggccgcccgggcaggtacgcgggggtgacacacacacacacacacagcacctgcacgcagatgcacacatctctagtcaaatgaggctctcagctttttgataggggctttttgatacgtgtataaccaatactttattctcactgtagtcaaggactcattgcaattcagaaatgagaagctgatccggaactccacaacagctcaaagaaattctcgaatgttctcacctattaacagttattaaaatggaagaagctggggatgaaattgtgagcaatgccatctcctacgctctatacaaagccttcagcaccagtgagcaagacaaggataactggaatgggcagctgaagcttctgctggagtggaaccagctgggacttaagccaat

SEQ ID NO: 2618 - DNA, 400 bp, Homo sapiens
aggtacgcggggagaaaggaaagcatgaggaataggaaaccttgtgggagtataataacaagagtattggttgagtagtcttttgaaaaatataaattatattttcgcaaatagaactccttgagtccccttatggcagtcaagctgaagcagcatgagcgtcatatcatagtgatgtattttaaggtcacaacggcggaaagacatagaaagtatctgacctcttagaaacaagcagctgctgcctggtggtaacagcaaagggtggaagtcaatagagtctctgtgagactgtttcacagaaggatgtgtgtttacccaaggctgcgcatcaaaaagaaatagataaaaataaatggaaaaattagaaggggtctcctgttaaagaatgggtctttct

SEQ ID NO: 2619 - DNA, 404 bp, Homo sapiens
  misc_feature 50, 177, 217, 359, 368, 375: n = A,T,C or G
ctatagggcgaattggagctccccgcggtggcggccgaggtaccctcagnctttcaacgttagtcaaacgttacattttctttcactcttacccttttttgagcttcatttcctctctttatgttctcgagtatagcttcgaggtgtagggtattcattcccaagatccacaaacanttacctccctagaaaatgtcactccttttaaaggtctttnttggctttcaacaactgaaggagttctagtgacagatgtgtgtattttctgcaaaccatcatcctcttcttgaccagtttctccagcattctcaggctcttgcttctcatttatttgggttctcctcttctgcctcccatgntcccttttntggtttntctaagggggtggtgggcccaaacaactt

SEQ ID NO: 2620 - DNA, 396 bp, Homo sapiens
  misc_feature 64, 65, 69, 72, 73, 75, 81, 82, 83, 84, 87, 95, 97, 98, 103,106, 109, 133, 134, 135, 141, 157, 158, 325, 328, 332, 360,372: n = A,T,C or G
tcactcctatagggcgaattggagctccccgcggtggcggccgcccgggcaggtacatacattnnaatngtnnangaatgnnnnatnaaagatgntnntcaanggntantgaaacacctgtatgaagggatgnnngtgccnctacatgggagatggnntcttaaaaatattttgggaaaaaagctataatttctctttctgaaaaatttaatcttaagtgatatttactacagaaatatatactgcaaaccacaataacaatgatcttctcaaaatttgcctaattgcttcacaaatgagtcaacttacaaagaataaaacacanaanattncttttaaatatataactccttaattttnctgataatcaantgaaaaatttaattccatcccaat

SEQ ID NO: 2621 - DNA, 343 bp, Homo sapiens
  misc_feature 329: n = A,T,C or G
ccgcggtggcggccgaggtaccagttgtaaaattaccaggaaccgccatgcctcaagatcgccctgttttctggcttcatcaatgactgcatgcagtgcaccaccctgtccactacgtgatgctgtaggattaagtctcacagtgggcggctgaggatacagcgccgcgtcctgtgttgctggtgaattagacgccatcgctgtgggttgctggtatggtgccgtgctatttggcacaggacacaccgcttgaggtctgtattgaacctctgaaggaggcccgatactgaagcctcggttggcagcccggtattgataaaactaccaanccggttggggtctt

SEQ ID NO: 2622 - DNA, 403 bp, Homo sapiens
  misc_feature 132, 342, 389: n = A,T,C or G
ggcgaattggagctccccgcggtggcggccgcccgggcaggtacgcggggacatcaatgcagagtccctctgtgaatttacaacacccaacacccatgagttcagtccttaagaaggaaaattgagcaagtntttaattggttggacattgcataaaagaggtccatatccaggctaactctagaaattttattctcaaacttagttggcctctttttcttctgtcagaggaccattcttagtggcactggggaaatcttggcacccagaagaattcaactgcgctcactgcaaaaatacaatggcctacattggatttgtagaggagaaaggagccctgtnttgtgagctgtgctatgagaaattctttgcccctgaatgtggtcgangccaaagggaagat

SEQ ID NO: 2623 - DNA, 590 bp, Homo sapiens
  misc_feature 265, 273, 300, 308, 378, 396, 458, 484, 491, 509, 520, 550: n = A,T,C or G
cgcgggggcgggccgcccgggcaggtactatatgccatggatgtgaatttcccatagaagctggtgacatggttcctgggaagctctgggctacacctggcatgacacttgctttgtatgctcagtgtgttgtgaaaagttttggaaggtcagacctttttctccaagaagggacaagccccttgtgtaaggaaacatgctcattcttgtgaaatttttttgaaaagttcaacaggttcaagggagaagaagaaagggaattttngaagtagnaaaaaaagggaaaaaaatttaaaaatntaacctanatttaaaatttttttaaggaattccaaattattttttattattgggaggtttttttgtaaaaaaaattanattaaggttggggccccntggaaaggggaaaattaaaaaatttttccccaggccttttttaaaaaaaaaaccccaaaagnttctttgggagggggaaaaaatttanttttttnggggcccttttccaattnaaaaaaggttnaaaaaaggaaaaggaaccgcgggttttttnggggcccatttttttaattttaaattttaacctttttttt

SEQ ID NO: 2624 - DNA, 398 bp, Homo sapiens
ccgcggtggcggccgcccgggcaggtaccacccccttgccgaaagcactggttcccctgttgaagcttgctagggattacagtgggtttgactcaattcaagtaagtaagcaaacatttaaatatttttcaggcataaatgttagcgttcttatcctgtaatatgcgaagtaaataaatttatatacttactgcctttgttacaatgcatgcaaacacgtggtaaggtgttcataccttaggaagagatctgattctcaagaacagcagaaaataggaagcagagaatgagttaggatgaaattcaaatggggaggaaaggaaatggaaggaagcccaggatacttccaaggtagttaattttctttaacatgggctaccttattaataattaggaga

SEQ ID NO: 2625 - DNA, 449 bp, Homo sapiens
tcactacttagggcgaattggagctccccgcggtggcggccgaggtacaaagtccctgaggcaaaagcatgcttgctgtgttctaggaaaagcaaggaagacagcatgtctatagcagtgggaggtggaaggataataaacagtaggtgaggttagaggggaccaaatcatgtattttccatccagaggttcccaaccttggctgcacattagatttattctaaggagcttttaaaaaaataccaatgactgggtcccagcctagagtgattaaatcagaatctctggaggtagacttgagaatctgatgtttgcaagtttcctaggcaagtcaaggctgaggaagactgctgcaggccattgtaagagccaggcgttgatctcattcaacctttccctcagctcttctagagacagccagcattctcttatggcacaaatacagcctt

SEQ ID NO: 2626 - DNA, 380 bp, Homo sapiens
ccgcggtggcggccgcccgggcaggtacgcgggctttcttgaaggaatcccttaagtgcacgtctcccgttttcttttcacatcaatgcagagtccctctgtgaatttacaacacccaacacccatgagttcagtccttaagaaggaaaattgagcaagtatttaattggttggacattgcataaaagaggtccatatccaggctaactctagaaattttattctcaaacttagttggcctctttttcttctgtcagaggaccattcttagtggcactggggaaatcttggcacccaggaagaattcaaactgcgcctcacttgccaataaattaccaatggcccttacattgggattttgttagagggagaaagggagc

SEQ ID NO: 2627 - DNA, 449 bp, Homo sapiens
  misc_feature 9: n = A,T,C or G
tatcgactnctatagggcgaattggagctccccgcggtggcggccgcccgggcaggtacagtattgagaagtagggaaagaatagaaggaggagttgaatctgtaattgactgagcaatcagttgagataactcactgcctccacataaccttgggctgtcctatgagtcagtggagagcaacccctctcatgtaggttcagtctgaggtagctcactggcactgggaaagttgatcagggtagtcccatctcatgcacagccccatttccccatgagccgctagagtggctcgtatcagaaagatgccataccaaatgctggcaaggacctggagcaactagaatgcatgtgcatttaccttgtcctgacagccactttggagaactctttggctgtttcttataaagctaaacataatcttcccaaataacatggcaatcccacttc

SEQ ID NO: 2628 - DNA, 401 bp, Homo sapiens
  misc_feature 104, 127, 272: n = A,T,C or G
ccgcggtggcggccgaggtacttttttttttttttttttttttttttttattgacaacaaaattttttagaggggcttcaacttaactgaataggattaaaggnggattctttggtcagtgttcaanaagagaccctatagctacttacaaaggagtccacacctcaaagtaagccactcagtaaagcttatctattttcactggaacgaaaaggagctaaacaaatgacaaattctactaaactacaaggaaggcaatcagcatcagttgngcaactttggttaaaatgtcccagccaaaaaacattctctatcatttcatcattttaatcagggagcttctcattcctatttgctctgggggtttctctgctaaaatgtccaccatggttggattaaaa

SEQ ID NO: 2629 - DNA, 432 bp, Homo sapiens
  misc_feature 9: n = A,T,C or G
atacgactnctatagggcgaattggagctccccgcggtggcggccgaggtacttccaccttctaaggacatccataagtcaggtttgatttcttcactgtcaaagcgttccttcaggaaagtctggaaataaaataagccagatgtggttaaaaaaacaatttcagataactatggaatatttaagaaaatacagagtgatgtcttggactttaaaaaaatagagctgatttcaaatgcttttcaaagatgtttaaaaaaggctatttccacaatcttttttcctgtcgtatattgaaaatcatttaaactgctcaaataatgtttaataattgaaatttaaaataattgtaaagttgactatatcaatttttttttttgagaccgaagtcttgctctgtcacttgggctggagtgcagtggcgcaatctca

SEQ ID NO: 2630 - DNA, 445 bp, Homo sapiens
  misc_feature 357, 363, 379: n = A,T,C or G
actacttagggcgaattggagctccccgcggtggcggccgaggtactttttttttttttttttttttctagtttctacatttcttttaatgttgttataccactgttacctaactaggaaaaaataaatttttttaaatgaccaagctcattttgaagctgctcggtgtcccataaacactgaggcctgcctgcctcaactaaagcagccacttgaaatgcagctccagctgctcattcttctgtttatcaaaacagggcaaagccgcccaggaaactcgcctcagcaaggtgacctgacctcaggcccatcacagtcacaaatctgcattcccaataaaaaataatcacaacgaanaaagcncccaggtaaccagttntggaaaagcaaaggattgatgagttggggggtgacagggacagtggattactggttttgttttttt

SEQ ID NO: 2631 - DNA, 440 bp, Homo sapiens
cactacttagggcgaattggagctccccgcggtggcggcccgaggtacgcgggagaagaaatagcaagtgccgagaagctggcatcagaaaaacagaggggagatttgtgtggctgcagccgagggagaccaggaagatctgcatggtgggaaggacctgatgatacagaggtctgtaggccatgggaatgggtttggaattttattcaaagagctatgggaagtgactagaaggtttaaagttggggaagaggttttgtgtttctgttatatttgtgttttatacaaattactctggttgctgtgttgataggacagcagaagggtaggagcagggacaccagttaagttattgcaatggttaaggtgagaggtggtggctgggcctaggcctttttggagtgaacaagctatttgcttggcttccatgatccttctcc

SEQ ID NO: 2632 - DNA, 443 bp, Homo sapiens
  misc_feature 6, 28, 79, 111, 376: n = A,T,C or G
tatacngcgaattggttttccccgcggnggcggccgcccgggcaggtactaaaaaatcaggctactaagcccactgttnttatagacgcagaccaattgttaggaacaggnccaaattggagcaccattaaccaacaatcagtgatgcagaatgaggctattgaacaagtaagggctatttgcctcagggcctgggggaaaaaatttcaggacccaggaacagctttccctattaattcaattagacaaggctctaaagagccatatcctgactttgtggcaagattacaagatgctgctcaaaagtctattacagatgacaatgcccgaaaagttattgtagaattaatggcctatggaaaattgcaaatccaanaatgtcagttcggccataaagcccattaaaagggaaaaagttccagccagggagtttgattgtaatt

SEQ ID NO: 2633 - DNA, 395 bp, Homo sapiens
  misc_feature 26, 39, 46, 55, 190, 256, 299, 314, 316, 321, 338, 342: n = A,T,C or G
ggccgaggtacatatatatgtatgcntgtaaatgagctnttattanctgtgtttnttaaaggttttctccatcctgtgatctgcttttagattttggaacacatttcattgtgcacattccatttgtattattaatatgacaacatttattactattattattatcatcatcaattcaatcacatctacnatatccctgataatgaccatgatccttttaataaatcacaaaactctcttcccttcatcacggggnaaataacctaccacaatgctgtaagtctccatcagcaccccangctgcccctgctcantnaccanatctgctactttagccngatnaatcatcatgttaatgtcacacccacattcaataatggtgagtctgcgctttt

SEQ ID NO: 2634 - DNA, 444 bp, Homo sapiens
  misc_feature 18, 427: n = A,T,C or G
ctatagggcgaattgganctccccgcggtggcggccgcccgggcaggtaccagttgtaaaattaccaggaaccgccatgcctcaagatcgccctgttttctggcttcatcaatgactgcatgcagtgcaccaccctgtccactacgtgatgctgtaggattaagtctcacagtgggcggctgaggatacaagccgccgcgtcctgtgttgctggtgaattagacgccatcgctgtgggttgctggtatggtgccgtgctatttggcacaggacacaccgcttgaggtctgtattgaacctctgaaggaggccgatactgaagctcggttggcagccggtattgataaactaccagccggttgggtcttattttctacccggctgatattgtggatactgtatctgagttggcattgcccgggataanagactctgtcccttttc

SEQ ID NO: 2635 - DNA, 646 bp, Homo sapiens
  misc_feature 1, 3, 17, 23, 102, 143, 189, 214, 236, 258, 270, 278, 297,318, 320, 322, 323, 330, 337, 352, 355, 369, 388, 401, 446,449, 457, 478, 483, 494, 503, 512, 514, 517, 520, 529, 536,582, 587, 596, 601, 612, 617, 634, 644: n = A,T,C or G
ntnggactccccgcggnggcggncgaggtacgatatatgaaggagcttccaacatccagttgaacaccattgcaaagcatatcgatgcagaatactgacggnctatagggagtgggacccctccctggtgtcacttgctgtanaaattttaaaaccgcggttgttgttcttcgtttggggggaagtaangtgccctttggccgttggggggaantaaaacctttcccacaagccanttccggcaaattattttttaantggaaaagcccnctttaaanttcaaagggggttcccttngggttggttatggggcccctntntnntcggggnatttttncttacttttttttcnaangggccctcgttttnttaaacccttttaaggggnccaccaagggggnaaggaattccccaaccttttttttaaaaaacctttttgggggggnaanaaaaattnaaagggccacccccttgggtnaattnttatttatttnttccccaanaaaaaaccntnggnttntttttttanaaaaagnccttgggttaattaaccgggccaaatcaacccaaattaattaaatnaattnaattctttnttttnaaccattcccntgggntgccttttaaaaccttnccttgggttnca

SEQ ID NO: 2636 - DNA, 413 bp, Homo sapiens
  misc_feature 56, 207, 282, 361, 381: n = A,T,C or G
ggtggcggccgaggtactttttttttttttttttttctttttttctatgaaagctnttgcgtgacctatttttcctctctccattcaaagttaagcctggaaataatacattttattttttagttaaaaaacaagaatagaaaagagcctcatttagtaatgaagggaaccgtaacctttattcaaatgcaaaagggcaatggattntatattcatctatgtgccaagcagccctctgagctttaaaaactaattatagggggagattgtgacttttcagtntttttggctcatgccatattctatggtactggtctcctgagttcactttgtttaaataatttcccctcaccttcccatngcaaggcattcaaaggagcncaacagggcagctgcccacttttgggggaccc

SEQ ID NO: 2637 - DNA, 451 bp, Homo sapiens
  misc_feature 445: n = A,T,C or G
tacgactcctatagggcgaattggagctccccgcggtggcggccgcccgggcaggtaccacccccttgctgaaagcactggttcccctgttgaagcttgctagggattacagtgggtttgactcaattcaagtaagtaagcaaacatttaaatatttttcaggcataaatgttagcgttcttatcctgtaatatgcgaagtaaataaatttatatacttactgcctttgttacaatgcatgcaaacacgtggtaaggtgttcataccttaggaagagatctgattctcaagaacagcagaaaataggaagcagagaatgagttaggatgaaattcaaatgggagaaagaaatgaagaagccagatacttccagtagttaatttcttaacatggctacttataataatagaagaaatggtaaggaaaaggaagggaaaagcaaagnaaaaat

SEQ ID NO: 2638 - DNA, 433 bp, Homo sapiens
  misc_feature 277, 281, 348: n = A,T,C or G
atacttagggcgaattggagctccccgcggtggcggccgcccgggcaggtacggtgaatagaaaattccccatatgatgtcaactaccaggtgcttgtaagtttgagggctctgaaggccatcctagggatacccacatgatttcagcggtgtctgttgggcagtgccagtcttggaaggtgggccaagcataaattccacaaccttataactaatattagatgaagtttctcaaacattcctttgagacatggcaggacatgcgccagggatcctncttnaggaagaaactagattttacattggtacgcgggggttccgggcgtcaccatcgtccgtgcgcaccgnccggcgtccagatttggcaattcttcgcttgaagatcatcatgagctttttccaactccttgatgaaaagggaaggaactcattc

SEQ ID NO: 2639 - DNA, 446 bp, Homo sapiens
  misc_feature 378, 393, 394, 403, 441: n = A,T,C or G
ccttagggcgaattggagctccccgcggtggcggccgaggtacgtaacaggacatcaataaatattagttgaatggaagattaaatcaacaaaatgggtgatggatctctgcagtaagtggaagagttcttcatggcccccaaggttatatccatctagaacttcagcacgtaatttcatctggaaatagtgcctttgcggatataagttaggtaaaactgaagatgagatcatactggattaggatgggatctaaatccaatgaaaatgtcttcataaaaaacaggaaagaacccatagaaacacaaggaagaaggtcatgtgaagatggaggcagagattggaggggatgcaagccaccggcccaggaatgccagncagccacccagaaannctggaaggnaaatgaagggattctctcctagaaacctttagaagagnaacat

SEQ ID NO: 2640 - DNA, 437 bp, Homo sapiens
  misc_feature 79, 80, 81, 212, 355, 381: n = A,T,C or G
tatagggcgaattggatctccccgcggtggcggccgaggtacctaatataaagttaagtggttttatttaatacttttnnnctgaccatgattatgttataaataagaggatttatagtttgcatgcctgatataatctatttaatttcctttacaaaatttttgcacatgaaagataaatgtcttcattttacccagcctcctccttccanaattgaatgcttcagtgcactttggattttcaaattgggctattattttttaatgtaattaaccttcacaatttaaattgaaggatattctgatccttaggttataaatatgtgacttgatggtttatgtaacattcaagtangcatgttttctataacaatatggatnaaaagttttgatacataccttgtaatgttgcttgacagatctgtttttagaaaaac

SEQ ID NO: 2641 - DNA, 445 bp, Homo sapiens
  misc_feature 107, 139, 379, 418: n = A,T,C or G
agggcgaattggagctccccgcggtggcggccgcccgggcaggtacattatttctccatatgtctgtcccctctgctccaaaactgcaggggagagtcttgcacatnatctttgtaaaaacagtctttgttttactcanaaaatttgtattgagtcctgctacatacatgctaggcattagggtctaaaaagaatgaaaaataaagcatctcaggggatggcttttctagaacacatgcccaagcagagacttaaatattgaggctggccagattaaaaggggtagagggcaggaaagggtgacagcatgcccggcagcagcaagagcgggagcgaggcctgaaagaatgaaagtattttgcctacaacagaaaggatnagtgagtagggcactaccagcagctcaagtaatgccagnagaaagggcacacaggggaaaagggct

SEQ ID NO: 2642 - DNA, 368 bp, Homo sapiens
  misc_feature 121, 147, 175, 194, 319, 327, 337, 368: n = A,T,C or G
ggactccaccgcgggggcggccgggcatttctcccagggatctctgtgcttccttttgtgcttcctgtgtgtgtggatatttaaaggggctggaaatgtgcaaaaacatgtcactacttanacattatattgtcatcttgctgtttntagtgatgttaattatctccatttcaancaaaatgtgttggcctcangaatgggtaaaaagttcaagcaaggccctttcctttatttttcttcacccctcctggtaattcaattcaaggggttcccttttcccccaccccaatggccaagaaatacttttcccttggggttncttcctcncttccggggncttggccaaggccccaaccaaccaaaaaatn

SEQ ID NO: 2643 - DNA, 423 bp, Homo sapiens
  misc_feature 180, 188, 189, 192, 196, 222, 223, 224, 226, 227, 245, 275,291, 364, 388, 399: n = A,T,C or G
ccgcggtggcggccgaggtacgcgggggggagtgccctttcttgaaggaatcccttaagtgcacgtctcccgttttcttttcacatcaatgcagagtccctctgtgaatttacaacacccaacacccatgagttcagtccttaagaaggaaaattgagcaagtatttaattggttgggcnttgccttnnaanaggnccatatccaggctaactctcgaaacnnnannctcaaacttaattggccnctttttcttctgtcagaggaccattcttantggcactggggaaatnttggcacccagaagaattcaactgcgctcacttgcaaaaatacaatggcctacattggatttgtagaaggganaaaagggagccctgttattgtgangctgtgcctantgagaaaatttctttgcccctgga

SEQ ID NO: 2644 - DNA, 506 bp, Homo sapiens
  misc_feature 214, 221, 222, 229, 238, 248, 281, 315, 319, 345, 364, 365,384, 387, 388, 415, 419, 466, 496, 504: n = A,T,C or G
gggcgaattggactccaccgcggtggcggccgaggtactccagggaaactgacagtgatcgtaaacttgttgataaagaagatatcgacactagcagcaaaggaggctgtgtccaacaggctactggctggaggaaagggacaggcctgggatatggccatcctggattggcttcatttagaggaggctgaaggccggatgaggaggccccaantgttggnngcctcanggaaagaanccatgcaatnagacaagttccaaaccgaggacctttatcgtanaatgcctgtttcgaaaggagtcaatggttttgcntcgnatattaaaaaggaacctcgtatttanagtaaaaggggaggacctnnttttcccattgggggattntcnnacccttcccctcctttgttattttgcntttngtacttcttcccttttttctttttttggtttaacctggttttctttngcttggccttaagaaaaccttttttttttnaaaaaatnaa

SEQ ID NO: 2645 - DNA, 445 bp, Homo sapiens
  misc_feature 4, 404, 426: n = A,T,C or G
atanggcgaattggagctccccgcggtggcggccgaggtacatctctagatgatcacgaatgtcaaatatcacactacactgtgatatggggattccccttgggggttttcatgtgtatagggtgcctgcagctacactaaacatcttaaagctaccacaatgttcacttcatatttttgctttttataggctttcctggtctcctcctatgttcccatcattttcttgctttgaatctgtaagaatcgagttgaatcttctccattttaaattttccataggctgagaaactgtttagccaagtttggataaaattgtatccaaagtaagagtatacaagctatgggcaagtccaaaatcaagctgttcacaggaccatgttctctctaaaggttctaggagnagaatccctcatttccttccancttctgggttggcttgctg

SEQ ID NO: 2646 - DNA, 434 bp, Homo sapiens
  misc_feature 276: n = A,T,C or G
aacactacttagggcgaattggagctccccgcggtggcggccgaggtacagcagtcgaagtgagctgccatctctgattctgtatccctgatggctctgcacagcctagtcttccctggtgggaagagtgtcccttgtccacagaggtggtggggacccacattgcttgtagctcccgtgagcatgcaaagaaggccattaccaggaggaacccgcctctcaggatctgatcttttcttccctctttcttgacttccttctatttctaatggcagngcttatcttcttctctttgcaggttgtaacctccatttctgacatccccactggtattccagttcacctagagctggccagtatgactaacagggagctcatgagcagcattgtccatcaagcaggtcttttcccgcggtgacttcccttgggctgaa

SEQ ID NO: 2647 - DNA, 450 bp, Homo sapiens
  misc_feature 2: n = A,T,C or G
ancactacttagggcaattggagctccccgcggtggcggccgaggtacgcggggaaaaaagggtggggagtgccctttcttgaaggaatcccttaagtgcacgtctcccgttttcttttcacatcaatgcagagtccctctgtgaatttacaacacccaacacccatgagttcagtccttaagaaggaaaattgagcaagtatttaattggttggacattgcataaaagaggtccatatccaggctaactctagaaattttattctcaaacttagttggcctctttttcttctgtcagaggaccattcttagtggcactggggaaatcttggcacccagaagaattcaactgcgctcactgcaaaaatacaatgggcctacattggatttgtaagaggagaaaggagccctgtattgtgagctgtgctatgaagaaattctttgcccctg

SEQ ID NO: 2648 - DNA, 453 bp, Homo sapiens
  misc_feature 236: n = A,T,C or G
atcactacttagggcgaattggagctccccgcggtggcggccgaggtacctgtctcatatgtggcaactacgtggggcagcacactcaaggaatgaaggaagtttcagtgaatgacaactttataaagacagtgttgaggcagcccagtgcagcggtttgggagccaggaacagcgtgtgggccggagtgtggctgcaggacaggaggtcaaaaataagggttgagggtggaatangaagaccccggaacgtcatcctgggagcttgagattttattctacatttctcttgttcttaactatttagggtgatggatctctgcagtaagtggaagagttcttcatggcccccaaggttatatccatctagaacttcagcaccgtaatttcatctggaaaataagtgccttttgcggatataagtttaggtaaaaactgaagatgagatcatact

SEQ ID NO: 2649 - DNA, 414 bp, Homo sapiens
  misc_feature 4, 78, 171, 245, 253, 367: n = A,T,C or G
actncttagggcgaattggagctccccgcggtggcggccgaggtacttttttttttttttttttttttttttccttanagcctttcattacaattcagccattctgcaattaattgtcacaaatttctggccaatacattcatttcctatcatattcaaagaaaattattngaatttaaaattcttactctaaatgaggtatattgaacatttcgaatcttgacagtttaattctatatttgtgncatgaaancagttcttttctttttacctgtcttatttctttaagttagttataggtaaaattgtaaccctgactgttatctcatgttaacgcaggacaagaaaatatgtatgaatgtcgggnaagagatttgacctggaaacttttcatttattgaaaaggctgctttt

SEQ ID NO: 2650 - DNA, 586 bp, Homo sapiens
  misc_feature 174, 187, 193, 207, 218, 237, 240, 241, 249, 268, 300, 303,318, 319, 321, 357, 358, 375, 379, 388, 399, 410, 424, 425,479, 489, 491, 495, 502, 503, 515, 523, 525, 534: n = A,T,C or G
aggtactgaggctgtatacagccacagcctctccccatccctccagccttatctgtcatcaccatcaactccctcccatgcacctaaacaaaatctaacttgtaattccttgaacatgtcaggcatacattattccatcctgcctgaggaagctctttccttggtcttcttaanatctagaaatgantgtaanagttttttgaatanagttttggacntatctttactttccattgncannagtaaagngggacaacattattgcagnattttcaattcattcacaatggaagtaccagncanatattacttaaaaanngntgttaaatttttggatttaattaaagtagttttcanntaattaaaaattattanttgnaaaaaatgnccaatgtaagncccaaccaagnaaggggggaaaatnnttttttaattggggggggccaaccggttttttggttaaaagtccccttgtgggnattggttggnanaaancaaaaannggccaggggggnaaaacccntnccaattatngttaattccttttattatttaaaattaattaaccttttccaattttttcctt

SEQ ID NO: 2651 - DNA, 450 bp, Homo sapiens
tacttagggcgaattggagctccccgcggtggcggccgaggtaccagttgtaaaattaccaggaaccgccatgcctcaagatcgccctgttttctggcttcatcaatgactgcatgcagtgcaccaccctgtccactacgtgatgctgtaggattaagtctcacagtgggcggctgaggatacagcgccgcgtcctgtgttgctggtgaattagacgccatcgctgtgggttgctggtatggtgccgtgctatttggcacaggacacaccgcttgaggtctgtattgaacctctgaaggaggccgatactgaagctcggttggcagccggtattgataaactaccagcggttgggtcttattttctaccggctgatattgtggatactgtatctgagttggcattgccggggatagagactctgtccctttctacttgattttctcttgg

SEQ ID NO: 2652 - DNA, 421 bp, Homo sapiens
aggtacctaataaatatttttggcatatgtgaatgaatgaatgagtgaataaataatcagattagttgatgaaagattctaagggaagattaggtaatgtgattataagagaaagatcctgaagaatgcttggaaatggatcctttacccatacatgattttgttcatcagcttatatgtaggatcacagtcatttggaaaatattggtccattgaaatttatacattttccaaatggtgacacacttcattatacagtgtcaaaagttagccttcatgactatcaccactgatctcatcaggaagttttaagtattggatagctataagctcacaatggcagtcctagatagtgcagccgtggattgaaaaagtgttctagtttcctctttttaagccaagaatccatccttaaatataa

SEQ ID NO: 2653 - DNA, 438 bp, Homo sapiens
gactacttagggcgaattggagctccccgcggtggcggccgcccgggcaggtacgcggggggcatcgtaaatctcaacatccacatgaacttcacccatatctgcagaagccacaattctatcaaccagtccttggatgagtctgtgatttatggaccaggaaacctgtcaaccaacaacaatactctcaagagaccacttcaaagggatttcttcccatagcagaagctcactcatgcccctgagaaatgatgtggataagagaggggagacgacctcagcatccttgctaaatgctggattaagccacactgaataccagatagtcacagaccctgggggacgtcccagcttttttgaaatggctgtccttagccagcttgcttgtttatgttgctgctttttcaattggtctagggaccaatgccctgggctggt

SEQ ID NO: 2654 - DNA, 472 bp, Homo sapiens
cactacttagggcgaattggagctccccgcggtggcggccgaggtaccaatccttatcatttttattaccaagagttactgaaggaaaacaccaacctttgtgttggctgcaatccaattggaggtttcactgtcatcatcacactttttaatccatttctttaaccactgtttgaaaataacaacggttagggataccaacaaaagacttttaaaaatagcaaattactttagcacttaactatggtcaagcttaaatgtaaaagccaatgaataagattatcactaggctcacatcctcttaagccagggaagtcccatagctacaatgtccagtatatataaaatcaaccaaagcaggattttctttggcagaagctgagtggggaacctagagcttgaagagaagcccaactgcaaggtgtggtattcccctaattacaaagcctgacaaagaggtgccttagccatg

SEQ ID NO: 2655 - DNA, 409 bp, Homo sapiens
ccgcggtggcggccgcccgggcaggtacaaagtccctgaggcaaaggcatgcttgctgtgttctaggaaaagcaaggaagacagcatgtctatagcagtgggaggtggaaggataataaacagtaggtgaggttagaggggaccaaatcatgtattttccatccagaggttcccaaccttggctgcacattagatttattctaaggagcttttaaaaaataccaatgactgggtcccagcctagagtgattaaatcagaatctctggaggtagacttgagaatctgatgtttgcaagtttcctaggcaagtcaaggctgaggaagactgctgcaggccattgtaagagccaggcgttgatctcattcaacctttccctcagctcttctagagacagccagcattctctt

SEQ ID NO: 2656 - DNA, 424 bp, Homo sapiens
ctatagggcgaattggagctccccgcggtggcggccgaggtacaacaccatctggcttctctattttgaaactccacaccaggttaatcttgtccatggctgtggcttaaatctaaagtcaggttctggtgttttctggaatccatgcctagctctttgattctgaaaccaaatctggattctggactcttctgtattgattgctaaagcaagtttttgtttggtagcataacctgggtaaggtttttgagtgaaggtattggtgaggattttcaattgatcttctgtgaatttggtgcaattgcacctatgatttgttgctaccatcttgtgtgaagaggggtcttcaactattgcagaaagtagagtttctggaggctggagctactgtctggggagactgcttacagctcatttttttaaa

SEQ ID NO: 2657 - DNA, 437 bp, Homo sapiens
tatagggcgaattggagctccccgcggtggcggccgcccgggcaggtacgcggggacatcaatgcagagtccctctgtgaatttacaacacccaacacccatgagttcagtccttaagaaggaaaattgagcaagtatttaattggttggacattgcataaaagaggtccatatccaggctaactctagaaattttattctcaaacttagttggcctctttttcttctgtcagaggaccattcttagtggcactggggaaatcttggcacccagaagaattcaactgcgctcactgcaaaaatacaatggcctacattggatttgtagaggagaaaggagccctgtattgtgagctgtgctatggagaaattctttgcccctgaatgtggtcgatgccaaaggaagatctttggaagaagtcatcaattgcgttgaa

SEQ ID NO: 2658 - DNA, 468 bp, Homo sapiens
  misc_feature 10: n = A,T,C or G
aatacgactnctatagggcgaattggagctccccgcggtggcggccgcccgggcaggtacctcaaggtgtgttgtcgtagtcatataattcctttgcttgtaactgcccaataaatggatgaggactcacttcacccataaataagaaaggtgaacagcacatggggcctgtagatgccttttgcagggccctctttttctcttcctaaagttgcaatttgagtatttctctagatgggcacatcatagaaactgtcgtcctagatcagagcctggggagagagatacaggtgtcatgcttacatctgcagagtgggaacaagcccagaaaaatcaagatgattaagcagagagcttccatactggagataaaccagctgtgtaaaaaatcattgcaccaaaaaagcattgcaccatcgacataactgctttaactaagaagtaaaggaactgatgccccagcagagc

SEQ ID NO: 2659 - DNA, 408 bp, Homo sapiens
ccgcggtggcggccgcccgggcaggtacaaatattactataccaaggtgtagaggagtatgtctaagcctgtaatgatagcaggtggcaaggtggaggtagatggccttctgtggtagttcacggggaggaagacagtggatccaagcaaataagaaaggccacattttttttttttaattttgcatctcaaggtattttagtcaaaattttttttttagttttccacagcaaacgattacgtaaaatataaacctaatgtattctttaggactaagtgtgccttttctctatatgctaagaggtgtaagtagagaataggacgttatagtatcctagcaaatgaatattcacaagaaaggctacaaaacttcattatcttggcttattctaaatctacctaaagtca

SEQ ID NO: 2660 - DNA, 423 bp, Homo sapiens
  misc_feature 357, 406, 409: n = A,T,C or G
ccgcggtggcggccgcccgggcaggtacttccaaaccctcctgttctttcctttttgttttccccaattttaacataaggcaaaagcagtaattgagcaattctatcacctggattggcactccggggaacagtggagctgatcactaactgaattccccctttataatctgaataaattaccccagtatgaatttggactcccttcaaatttagacttgatctccctcaaaggcctaccctcccttctggcagcgggccatatacccctctaggaatcttttgtgggggctttccagggagtaaaaagaccatttgggtggaacataaatctactgcggtgctgcctgctgtggcngcgggacagctgttggattgtttgtaattggctgactccctggaagtgngtnggtattttctgtag

SEQ ID NO: 2661 - DNA, 434 bp, Homo sapiens
  misc_feature 39, 202, 400: n = A,T,C or G
gagctccacccgcggtggcggccgcccgggcaggtacanggttgctgtaggaagcccttaatctatgagatcttgacagattgcttgctttcttctttccaccatgggagaatgcaacaaggtcttcaccagatggccgaacagatccaagtgtcatgaccttggactgtccatcctccagaaccataagccaaataaattncttttcttcataaatttcccagtctgtggtatcttgaaatcaactgaaatcagtcactaaggaacaaaattctccagagaaactgtttcttccttgaatctgaatgcctgactgtcaatcatttagcactgaaacaaggagagcctctctgaatgttgagcagccaagagagctgcccacactggacattcaatcagncagcagggcctgtcctcagggtgactccgtttac

SEQ ID NO: 2662 - DNA, 304 bp, Homo sapiens
  misc_feature 22, 266, 290: n = A,T,C or G
acttagggcgaattggagctcnccgcggtggcggccgcccgggcaggtacattggatgtgaactcttttaaactataacatggacactttattggaaccaaactttagttttctacattaatgagaaacactggtaactttgcttcattgaaaaaataattgcttgttctctgtcagatgcacttcgtcttagtaacatggccatggggaagacaaccacaggccagatagtcaatctgctgtccaatgatgtgaacaagttttgntcaaggtgacatgtgttcttacanttttcctgtggggc

SEQ ID NO: 2663 - DNA, 393 bp, Homo sapiens
ccgcggtggcggccgcccgggcaggtgcatggcgaagctagagactgtaacctgaagattgggacaaattaaagaaaaaaatgtgatttaacacaattacaaaaactgttacgttagggtcaaacaagaaccattttatgaaactgaattacaacaaatgacattatatctaactcttccgggtctccacagcacttatacttacttaagcagcttaaacacttccgagtctccacagcactctgatacttacttaaacagctcttttaacctgccctagtattcttaagtgcagcatatctaatttttttttttcctcagtagtttgaacacttgctggctattttttctgtccaagttctcagttaacttcggcctgtgtagtcagtggtt

SEQ ID NO: 2664 - DNA, 451 bp, Homo sapiens
ggcgattggagctccccgcggtggcggccgaggtactttgggaggctgaggcaggtgaatcatctgagggcaggacttcgagaccagcctgcctaacacggtgaaacctcatctccactaaaaatacaaaaaaattagccaggcgtgctggcaagcacctataatcccagctaatttcttctagttttaatagtccaagcttcgggagaaaagatagttttagcataggtagatgaaaggaaaaattattttcttaaagatgttgacactcactgggaagctgattttcctttagacaaattcaactgaagagatgttgaagagtacgcgggggtcagaagctggaggagttgaaggcagaggagccagataacttcagcagcaaagtagtgcagaggggccgagagttctttgacagcaacgggaacttcctgtacctgcccgggcggcc

SEQ ID NO: 2665 - DNA, 422 bp, Homo sapiens
  misc_feature 410: n = A,T,C or G
ccgcggtggcggccgaggtacgaaaaaatcaggctactaagcccactgttaatatagacgcagaccaattgttaggaacaggtccaaattggagcaccattaaccaacaatcagtgatgcagaatgaggctattgaacaagtaagggctatttgcctcagggcctggggaaaaattcaggacccaggaacagctttccctattaattcaattagacaaggctctaaagagccatatcctgactttgtggcaagattacaagatgctgctcaaaagtctattacagatgacaatgcccgaaaagttattgtagaattaatggcctatgaaaatgcaaatccagaatgtcagtcggcccataaagccattaaaaggaaaaagttccagcagggagttgatgtaattaccagnaatatgtggaag

SEQ ID NO: 2666 - DNA, 449 bp, Homo sapiens
  misc_feature 374: n = A,T,C or G
tcactacttagggcgaattggagctccccgcggtggcggccgcccgggcaggtacaaagtccctgaggcaaaagcatgcttgctgtgttctaggaaaagcaaggaagacagcatgtctatagcagtgggaggtggaaggataataaacagtaggtgaggttagaggggaccaaatcatgtattttccatccagaggttcccaaccttggctgcacattagatttattctaaggagcttttaaaaaataccaatgactgggtcccagcctagagtgattaaatcagaatctctggaggtagacttgagaatctgatgtttgcaagtttcctaggcaagtcaaggctgaggaagactgctgcaggccattgtaagnagccaggccgtttgatctcattcaacctttccctcagctcttctagagacagccagcattcttcttatggcacaa

SEQ ID NO: 2667 - DNA, 601 bp, Homo sapiens
  misc_feature 82, 137, 147, 194, 200, 206, 219, 246, 254, 262, 298, 312,313, 319, 322, 340, 370, 383, 395, 397, 404, 408, 409, 420,430, 444, 482, 500, 502, 509, 515, 542, 554, 560, 562, 564,575, 581: n = A,T,C or G
aggtacttttttttttttttttttttttgtatttttagtagagacagggtttcaccatgttggccaggatgatcttgatctnttgacctcatgatccgcccgtcttggcctcccaaagtgctgggatcacaggcgtnagccaccacnacctggccctctattatatttctctttaaagagagtagtaaaaaacntatganagggcncaaaaatttattntaattaaaatctttttaccctataagncggcaagngggtaaanaaaatgggaaatttttggcccttaaaattaataagnggtggattgtatannccattnccnccaaattgtaaaccaagnggaaaaccatattccaccaattttttttantttaaaaaaaagnggccaaaaaaanantttttgnaagnnaccttttaatnaaaaggcctnaattaattggggtnaatgacttttaatttttttttggggggttggggggggnaaaggaaaaaattgggangnaaaaaanggaaantatttaaagccaattcctttttttacnttgggcccattngaaccnancnattttttttgnaataanaaaaaaaaaaattctttaat

SEQ ID NO: 2668 - DNA, 375 bp, Homo sapiens
  misc_feature 7, 374: n = A,T,C or G
tataggncgaattggagctccccgcggtggcggccgcccgggcaggtacgcgggggcttccttccagtaaggagtcggggtcttcctcagttttctcagccaggcggcggcggcgactggcaatgtttggcctcaaaagaaacccgccaagggtgggttggaaaccgaaacgagtcagttgttgaaacgtgtctcatcctattcctgaagccagaatattctggccatgagtcattgtttccgcccatcttgattcttttggaaatggcagctcttgttcaaagaccggaaagggtgggatgtcaatttcaagtggggtcaacctgagttctgtaaatcccagtagcgattttcccgccgcgggtgggtaggcna

SEQ ID NO: 2669 - DNA, 463 bp, Homo sapiens
gactcctatagggcgaattggagctccccgcggtggcggccgcccgggcaggtactccaagccaaagatgatggagagtgaattaagttagtgcaatgggaccaagtctagagctatttagaagtgagaagtgacacggaaaaaaaaaaagattgattggatgtagaacaagttggataagaatccaggacaaccccaggtgtcaggctggggcagctaggtaggtgctattgccatataaagtgttaaaaaagaatagagaaggggctagttgtcgggggaaggagttcagttttagacatgttgaactgcaaggagatttgatactataattaaggaatgtgttttaataaatttaataaacaatgaacacacattattcgcatttcccaaacaatttggatggtagatcaaaaagaatgagagtgaaaataaggggtctgtgaccactcaattaagattg

SEQ ID NO: 2670 - DNA, 412 bp, Homo sapiens
ctacttagggcgaattggagctccccgcggtggcggccgaggtacatgatgtccagtagacctactggatatgcaggcctgcagctcaggggagagctgggttaagaaccgccaaggcagtaatcatctgcatttagatggcgagtgaagccatgacaggggctgaaatggcccagcaagaataaatcaaaccatgagaaacacatacatttaagaataaggagatgtggtcaggcgcggtggctcacacctgtaatcccagcactttgggaggccgaggcgggtggatcacttgaggtcagtagtttgagaccagcctggacaacctagtgaaatcccgtctctgctaaaaatacagaacttagctgggtgtggtggtgccgttgcctatagtcccagcttgcttggggag

SEQ ID NO: 2671 - DNA, 447 bp, Homo sapiens
  misc_feature 2, 82, 443: n = A,T,C or G
tnggcgaattggagctccccttggtggcggccgaggtactttcccgtgtggaggcgcgcccagtcaccttgttgcggtagcntcaaggtgaggaatcgagacccaccaagtatgatgaataaacccagactctcagcaatgcaggaaaggaacaaacgggcagcttgggaaaagggggctcacataccacaagcgactaggtaaactctacacagaccaagattttgatagtttacctgtgcaaattacagttccggagaaaatacggtcaataataaaggaaggaattgaatcgcaggcatcctacaaaattgtaattgaagggaaaccatatactgtgaatttaatgcaaaagtaggtaatcatcattattttatcaattctctttgttctacttataatttttgcttgaaaattgtcccaaaatggtaatttatttttgnattt

SEQ ID NO: 2672 - DNA, 383 bp, Homo sapiens
ctatagggcgaattggagctccccgcggtggcggccgcccgggcaggtaccaccctcttgctgaaagcactggttcccctgttgaagcttgctagggattacagtgggtttgactcaattcaagtaagtaagcaaacatttaaatatttttcaggcataaatgttagcgttcttatcctgtaatatgccgaagtaaattaaatttatatacttactgcctttgttacaatgcatgcaaacacgtggtaaggtgttcataccttaggaagagatctgattctcaagaacagcagaaaataggaagcagagaatgagttaggatgaaattcaaatgggagaaagaaatgaagaagccagatacttccaggtagtttaattttctt

SEQ ID NO: 2673 - DNA, 462 bp, Homo sapiens
  misc_feature 8, 184, 192, 432: n = A,T,C or G
tacgactnctatagggcgaattggagctccccgcggtggcggccgcccgggcaggtacgcggggacatcaatgcagagtccctctgtgaatttacaacacccaacacccatgagttcagtccttaagaaggaaaattgagcaagtatttaattggttggacattgcataaaagaggtccatatnccaggctnaactctagaaaatttttattctcaaacttagttggcctctttttcttctgtcaagaggaccattcttagtggcactggggaaatcttggcacccagaagaattcaactgcgctcactgcaaaaatacaatggcctacattggatttgtagaggagaaaggagccctgtattgtgagctgtgctatgagaaattctttgcccctgaatgtggtcgatgcccaaagggaagatccttggganaaagttcatcaaatggcgtttgaaacaaac

SEQ ID NO: 2674 - DNA, 452 bp, Homo sapiens
  misc_feature 205: n = A,T,C or G
ctcctatagggcgaattggagctccccgcggtggcggccgcccgggcaggtactttttttttttttttttttttgcaataattacttttattgtatactgcacaatataaacagcatgttgcaaagaaatatatatatttgtgtgctttgtgtatgatataaatccatttctgcaaaataaaatacaaacccgattttatctaanaaatatgaaactcaatgaaaaaacaaatcccaaaataatactatttatgtaaaatatagaagctaaacaataaattaataatacatacataaatagcaaaagagtaaagcatagtaaaaaataataagcacccaagtaaagaaaagaaataacgtaaaatttgggatggagtgatttctatgacggggaatagaaaagaggatgtggccacgcatgagaatattcaggctcattgggtaaatgttct

SEQ ID NO: 2675 - DNA, 641 bp, Homo sapiens
  misc_feature 37, 102, 138, 150, 168, 209, 223, 243, 254, 255, 265, 275,279, 284, 285, 297, 316, 320, 334, 341, 365, 381, 394, 397,400, 429, 439, 443, 469, 479, 484, 493, 504, 510, 547, 562,595, 602, 607, 628: n = A,T,C or G
aggtacgagttgaatcattgttcaaataaggtgtaantgaaaagtgatcctctcttcagagatgtcaaaaacaaacaaatccaagtctggatctcgctcttntcgctcaagatctgcatcaagatctccgttctcgtntcattttttccnaaagtcttctggtccccnaaagccccgaatcttctttttctcagttttcaaagggaaangccgccaagggccntgcagttatcctaaggggtncttccggtttnnccaaaaattncattaatttncctncccannccttcaattaanccaatggaaggaaaaatgnaaanaccccaacccccanaggaagnttaattaattccaaggaaaattcngggggggattttttcnccggaaggggttncanccnaaaccaaggaagggggcctttatttaggnaaaaggggcncccntttaatttttatttttttccccgttngggggggccngttanaaccaaagnaaggggccctntttttnaattccccaatttggggggggggccccaaaattaatntaaacccccggaagnggaaggggccttaattggggaaaaaaaccttanaccccgnctttncaaaaaatttgggggccaagnaaaattttaaccc

SEQ ID NO: 2676 - DNA, 420 bp, Homo sapiens
ccgcggtggcggccgcccgggcaggtacaaagtccctgaggcaaaagcatgcttgctgtgttctaggaaaagcaaggaagacagcatgtctatagcagtgggaggtggaaggataataaacagtaggtgaggttagaggggaccaaatcatgtattttccatccagaggtttcccaaccttggctgcacattagatttattctaaggagcttttaaaaaataccaatgactgggtcccagcctagagtgattaaatcagaatctctggaggtagacttgagaatctgatgtttgcaagtttcctaggcaagtcaaggctgaggaagactgctgcaggccattgtaagagccaggcgttgatctcattcaacctttccctcagctcttctagagacagccagcattctcttatggcacaaa

SEQ ID NO: 2677 - DNA, 396 bp, Homo sapiens
  misc_feature 6, 66, 359, 372: n = A,T,C or G
ttggtnctccccgcggtggcggccgcccgggcaggtacagtagtatttaacctggatgtgaggacnaaggaggaaattttctggtgaataccgaagagcaaagagcagcaggtcagcaggaatgactaatgtttttctatgcacgtttaatggaaaattcatgtaggatattttgagtaggtaattggataaccagcatttataactcgcatcctactagtttgactctcactaataagacttgtcaaagatccaagaatctgaaagttgatgataaatgtccatgtgtatcaccatcaatgatcaaaagttagcatccacaacatagaatgggacagtatgaacttaatggataaagnatgaatatcggangtttgttccttttagggaaatgat

SEQ ID NO: 2678 - DNA, 418 bp, Homo sapiens
  misc_feature 117, 135, 145, 148, 157, 234, 292, 303, 339, 384, 393: n = A,T,C or G
cttagggcgattggagctccccgcggtggcggccgaggtacttttttttttttttttttttttttttttttttactttttaagcacatgacctttccccaaatatggcccaagcttntactttggggagattaanatttatctanaanaaatgcatntgcaaagaccaagaaagatgaaatattcaactttttgacattcggaaaataaggatactgcatcaaaacaagagctntgcaaatcaaattatgttgagaacagattgcataaaacttttacccctttatcctctntttcccatctntgccgagctaaattttattagttatacataaagacnacctaggagaaagaagaagagcattctgcccatttttgatattanaatagttgngcgggaaattaaagaggaagaaaag

SEQ ID NO: 2679 - DNA, 448 bp, Homo sapiens
  misc_feature 183, 393, 412, 416: n = A,T,C or G
tagggcgaattggagctccccgcggtggcggccgaggtacttttttttttcaaattttcttttttctcaagcctttgatctctttgtctcatacttcattcagaatgatttacagagaaaatagaggatatcagatggaactttactcaaactcctcctgccacatttgcacaccttcccttntctcagttccttcccttctgcagatgtctcacctctgcccaaggctcttccccttcctatgtcctggatcccacctgcttccagttcctctttaactttctactatatcctctctttcttctccaacactaccaccctccttgccacaaggtttcttcccaccagcatttataatacatgctcatcctctactgttttattaacaaccangccaacctttctccccatntggnctttccccaaacttaccatcttttctcttttc

SEQ ID NO: 2680 - DNA, 427 bp, Homo sapiens
tacttagggcgaattggagctccccgcggtggcggccgaggtaccaggcactggaaacgccagacaaacaaggtctctaaccttgccatctttcaacaggaaacactcccctcgccccaccccaggggaatgtagtagtgtaatggtaaaaacataaagagaactatacggacttcaccgaactgacatgaggtttaaatgcgatatggcagacaaagcatataacggtagaaaaagtgaacacttaagaaatgtttaattcccatcgcctttcccagtgtgatcgctcagcagctaaattactgttaaacactggctatctcatgctatataaatctaagacacgataataagcaaaaaaacaaaataataacaacaaacatttttactacttattcctctctagactcttattagaatattccct

SEQ ID NO: 2681 - DNA, 411 bp, Homo sapiens
  misc_feature 165: n = A,T,C or G
ccgcggtggcggccgcccgggcaggtacgaaaaaatcaggctactaagcccactgttaatatagacgcagaccaattgttaggaacaggtccaaattggagcaccattaaccaacaatcagtgatgcagaatgaggctattgaacaagtaagggctatttgcctnaggggcctggggaaaaattcaggacccaggaacagctttccctattaattcaattagacaaggctctaaagagccatatcctgactttgtggcaagattacaagatgctgctcaaaagtctattacagatgacaatgcccgaaaagttattgtagaattaatggcctatgaaaatgcaaatccagaatgtaagtcggcccataaagccattaaaagggaaaagttccggcaggagttgatgtaatt

SEQ ID NO: 2682 - DNA, 438 bp, Homo sapiens
  misc_feature 10, 72, 191, 376, 427: n = A,T,C or G
cgaattggtnctccccgcggtggcggccgaggtactaaaaataataatctgttgtgagatacaggataattnttatttccattttatagatgagaactgaagcttaaattttaagtaacttgtccgaattattaagtggtgaggtaagggcttatatccaggttttccgtctctaaatacaagattttaancattattccacattgcttcacatgcctcagattgtgaccagctgagggaaattgtaatttttctttctaataggtaatcaggtgctccctttcaatattaattttacataggtaaaacttgtaaaagtaagccaaatagtatatatagatattccaaatgactgttctcacataagaggtctttntggacacactgacaacacaccaggtcattcagaacccagtgggggactcanttaataaaggt

SEQ ID NO: 2683 - DNA, 420 bp, Homo sapiens
ccgcggtggcggccgcccgggcaggacgcggggacatcaatgcagagtccctctgtgaatttacaacacccaacacccatgagttcagtccttaagaaggaaaattgagcaagtatttaattggttggacattgcataaaagaggtccatatccaggctaactctagaaatttttattctcaaacttagttggcctccttttcttctgtcagaggaccattcttagtggcactggggaaatcttggcacccagaagaattcaactgcgctcactgcaaaaatacaatggcctacattggatttgtagaggagaaaggagccctgtattgtgagctgtgctatgagaaattctttgcccctggaatgtggtcgatgccaaagggaaggatccttgggaagaagtcatcaatggcgttgaaa

SEQ ID NO: 2684 - DNA, 402 bp, Homo sapiens
  misc_feature 351: n = A,T,C or G
ccgcggtggcggccgaggtacctgtctcatatgtggcaactacgtggggcagcacactcaaggaatgaaggaagtttcagtgaatgacaactttataaagacagtgttgaggcagcccagtgcagcggtttgggagccaggaacagcgtgtgggccggagtgtggctgcagggacaggaggtcaaaaataagggttgagggtggaataggaagaccccggaacgtcatcctgggagcttgagattttattctacatttctcttgttcttaactatttagggtgatggatctctgcagtaagtggaagagttcttcatggcccccaaggttatatccatctagaacttcagncacgtaatttcatctggaaatagtgcctttgccggatataagttaggtaaa

SEQ ID NO: 2685 - DNA, 450 bp, Homo sapiens
  misc_feature 3: n = A,T,C or G
ctnctatagggcgaattggagctccccgcggtggcggccgaggtaccttttttcatagcatagagctctgctatgaagaatacataacacatacacagtatttaagattacatgtgcacacatgaacacacacacacacacacaccaccccttctttaaagaaaaaagaacccatccccttgatataaacctgttagactcgttttcagaatgtctcttgccattatgtcaattcagcctgcaaacaaaatttaacatttttgtttttttaaaaaaatcaacttttaaccaaaacttcttagaattatttttcaatattagcataaaatatttgttggtgttttgctattattttaactgcagtggtcaggtatctccttcacaaaaaggaaactcaaactggaagcttgatgtagatgaaaatgaaaaccaatcacctttatccaatta

SEQ ID NO: 2686 - DNA, 421 bp, Homo sapiens
  misc_feature 359: n = A,T,C or G
ccgcggtggcggccgaggtacttccaaaccctcctgttctttcctttttgttttccccaattttaacataaggcaaaagcagtaattgagcaattctatcacctggattggcactccggggaacagtggagctgatcactaactgaattccccctttataatctgaaataaattaccccagtatgaatttggactcccttcaaatttagacttgatctccctcaaaggcctacccccccttctggcagcgggccatatacccctctaggaatcttttgtgggggctttccagggagtaaaaagaccatttgggtggaacataaatctactgcggtgctgcctgctgtggcgcgggacanctgttggatttgttgtaattggctgactcccttgaagtgggtgggtattttctgtaaggggt

SEQ ID NO: 2687 - DNA, 449 bp, Homo sapiens
  misc_feature 373: n = A,T,C or G
actacttagggcgaattggagctccccgcggtggcggccgaggtacttaatcctggttggtttacccattctaaattatttatgtgagatagctatctatttggaaaaaagtaaagtgaaagtcttacctcaatccacactcaaaaatagtttactatatgacagatctatggcaggcagatttgatggctcaaatgaaactccaccctcccagtgttcacacctttatgtagttcccacttacagggagccaaaggtccgtgggacgtgaccaactcagcattccactggaggctatatgatcaaacagcaaactgtttatcatgaatgcaggatgtgagcaaactcaccattgctcctgccgacagaaggntttctggaggcaatcactccctggtgctgaggttatctactgcaacatttagaggaatgtggtctttgcaagcctc

SEQ ID NO: 2688 - DNA, 433 bp, Homo sapiens
  misc_feature 186, 346, 384, 412: n = A,T,C or G
atagggcgaattggagctccccgcggtggcggccgcccgggcaggtacttttttttttttttttttaaagaatcagaacaggcttaataggaactttgaattttaatccttctattcatctgttatagattattttccctagtgatttctgtattaataaaacttaaacatggcaagttttttctnataagcaaaataaccaacagcttaaatatatttgtattaaactctaacagtgcactaactttaaatgttgaaatagattacacattttagggcataatggcagaatattttggctacaatagaccataggatttttgttgaagcaaataacaaaattganggattttatcattttaatgcaaactcaaattttattgnttaaaatggggattttttaaattttttnggtccttttgggggaaaattc

SEQ ID NO: 2689 - DNA, 432 bp, Homo sapiens
  misc_feature 390, 405, 417: n = A,T,C or G
ctatagggcgaattggagctccccgcggtggcggccgaggtacgcggggaggaaagaagggcacatgagcaaacatgatggcccctttatgagaggtaatttactgaaatgcacagcgattacctgctcacccagccctgatgtaattaaaaatggcaggctaggggctctgtttcccccggcctctgggcagaagaaaacctggggtttcgacttgtgaagcttgaggttggatgtgggaattggcttggagtcataggcgatgagaggggcattaggatattatgaagcccgtgaactcaactcctgagaaggacacagcagagcgagagaaaagatggaataaaaaggcctacctcattaggctcgtgtgggtgaggagaactgaangagtctgagagcgcnggcacgagccanaggctaccggaaaac

SEQ ID NO: 2690 - DNA, 438 bp, Homo sapiens
acgactacttagggcgaattggagctccccgcggtggcggccgaggtacaaaaggatccgctactgtgtgcctttctctagctagctcattttattcttgttatgcatttcccagacaatgcatgctgagggcctactatgcatgagacactgtcctaggaacagaggtggttccctggtggccctactacgtcattatcattgtggattttggattgcagaatattgaactgacacattttttgatggcacatgtcttgagggagagactgcagtagggcaggtgaatctttgccacctgtgcagaccctaatgtttgccacaatgtttgtatctggttgacagctgagcgtgagattgtccgggacatcaaggagaaactgtgttatgtagctctggactttgaaaatgagatggccactgcccgcatcctcatcc

SEQ ID NO: 2691 - DNA, 437 bp, Homo sapiens
  misc_feature 193, 372: n = A,T,C or G
actacttagggcgaattggagctccccgcggtggcggccgaggtaccagttgtaaaattaccaggaaccgccatgcctcaagatcgccctgttttctggcttcatcaatgactgcatgcagtgcaccaccctgtccactacgtgatgctgtaggattaagtctcacagtgggcggctgaggatacagcgcccncgtcctgtgttgctggtgaattagacgccatcgctgtgggttgctggtatggtgccgtgctatttggcacaggacacaccgcttgaggtctgtattgaacctctgaaggaggccgatactgaagctcggttggcagccggtattgataaactaccagcggttgggtcttattttctacncggctgatattgtggatactgtatctggagttggcattgccggggatagagactctgtccctttc

SEQ ID NO: 2692 - DNA, 421 bp, Homo sapiens
  misc_feature 380: n = A,T,C or G
ctattgggcgaattggagctccccgcggtggcggccgcccgggcaggtacaagggaggccctcaagaaggtctgtcatcccttacactgaatcaggactggcgtagtgtgacctgtggaatacagtagaagtaaagatgtgtgactcccaaagcttggtcatataaggcattgcagcttcagccttgctctcttggatcactttaccctggagaaagtcatctcccatgctctgaggatactcaagcaactctgtggagtgttccacatggagaggaagtgccgaagacccgcaccaactggccaaaaaagtttgtcaaaattgacaaatgggatctaattaaactcaagagcttctgcacagcaaaagaaactaccatnagagtgaacaggccaacctacaaaatggggaagaaaatttt

SEQ ID NO: 2693 - DNA, 580 bp, Homo sapiens
  misc_feature 2, 86, 96, 101, 223, 520, 565, 566, 571: n = A,T,C or G
anggcgaattggagctccccgcggtggcggcccgaggtacgcggagacatcaatgcagagtccctctgtgaatttacaacacccancacccatganttcantccttaagaaggaaaattgagcatgtatttaattggttggacattgcataaaagaggtccatatccaggctactctagaaattttattctcaaacttagttggcctctttttcttctgtcanaggaccattcttagtggcactggggaaatcttggcacccagaagaattcaactgcgctcactgcaaaaatacaatggcctacattggatttgtagaggagaaaggagccctgtattgtgagctgtgctatgagaaattctttgcccctgaatgtggtcgatgccaaaggaagatccttggagaagtcatcaatgccgttgaaacaaacttggcatgtttcctgttttgtgtgtgtagcctgtggaaagcccattcggaacaatgtttttcacttggaggatggtgaaccctactggngaggactgattattatgccctctttggtacctgcccgggcggccnntctanaactagtgg

SEQ ID NO: 2694 - DNA, 570 bp, Homo sapiens
  misc_feature 553, 570: n = A,T,C or G
ccgcggtggcggccgcccgggcaggtaccttgaattgattttctgactttcttttattggttttcagatttcttctgcatctcactaagcttctttaaaattaatgttttgtattttttaggggatgatgaatatgtttattatcatgatagtggtgttggttttatgggtatacatatgtcaaatcttaaccaaattttatactataaacatgtgcagtttattgtatggcaattatacatcaagatgttaaaatagggccacaaactcttttctgtttctctcagtaagagatgcattataattctcttcccactgagtctggggtggccttggtgtatcgtttgaccatttaggatatagccacatactgggacttctgaacataaagtcttaggcattgcatctggccagacgaggtggcttatgcctgtaatcccagcactttgggaggctgaggcgggcggatcatgaggtcagggagatggagaccatcctggttaacatggtgaaaccccgtctctactaaaaatacaaaacaaaaaaaaattanctaggccgtggtgggtn

SEQ ID NO: 2695 - DNA, 540 bp, Homo sapiens
ccgcggtggcggcccgaggtacgttcatctacctactttgcacttggatggaagtcctagattgggtcttaaaaggagggaacattctagaacccaccaacccttcctgatactgtcacaagatttttttcccttaattcttttaaaatcagggccacatttcaactccctgcccgctgccatttgatgatatttttgtttctctttaggtatcgtcctattttctttttctttaccactgacagcggcttatttcatatgaataatatattaaatacatatgcatttaaaatattgttttgatttgtttgcgaattgtttctcttaaagggtctatctggggaaatgagtaatttttcatatcctgttcttgcaggaagaattttaaatcgttgctccaaagacattggacacttggatgatttgctgccgctgacgtttttaagatttcatccaggtaacgttgagagtaatgtcaggatctcaaatggaaaacggaagttcctattttttcaagcccttttcatggggtctgggggt

SEQ ID NO: 2696 - DNA, 530 bp, Homo sapiens
  misc_feature 375, 434, 514, 517, 519, 523, 526: n = A,T,C or G
ccgcggtggcggcccgaggtaccagttgtaaaattaccaggaaccgccatgcctcaagatcgccctgttttctggcttcatcaatgactgcatgcagtgcaccaccctgtccactacgtgatgctgtaggattaagtctcacagtgggcggctgaggatacagcgccgcgtcctgtgttgctggtgaattagacgccatcgctgtgggttgctggtatggtgccgtgctatttggcacaggacacaccgcttgaggtctgtattgaacctctgaaggaggccgatactgaagctcggttggcagccggtattgataaactaccagcggttgggtcttattttctaccggctgatattgtggatactgtatctganttggcattgccgggatagagactctgtccctttctacttgattttctcttggggtttgngcttgtctaacctgcgtttgaggttgtaatgttacaggcatctgaaccgcggggaggaggagttgattggcgatcgtggnttnangctnttnatgg

SEQ ID NO: 2697 - DNA, 565 bp, Homo sapiens
  misc_feature 549: n = A,T,C or G
ccgcggtggcggcccgcccgggcaggtacgcggggaaattcccttaggcagaaaaagggtggggagtgccctttcttgaaggaatcccttaagtgcacgtctcccgttttcttttcacatcaatgcagagtccctctgtgaatttacaacacccaacacccatgagttcagtccttaagaaggaaaattgagcaagtatttaattggttggacattgcataaaagaggtccatatccaggctaactctagaaattttattctcaaacttagttggcctctttttttctgtcagaggaccattcttagtggcactggggaaatcttggcacccagaagaattcaactgcgctcactgcaaaaatacaatggcctacattggatttgtaagaggagaaaggagccctgtattgtgagctgtgctatgggaaattctttgcccctgaatgtggtcgatgccaaaggaagatccttggagaagtcatcaatgcgttgaaacaaacttggcatgtttcctgttttgggtgtgtagcctgtggaaagcccattcngaacaatgtttttcac

SEQ ID NO: 2698 - DNA, 505 bp, Homo sapiens
ggcgaattggagctccccgcggtggcggccgcccggcaggtaccactgcactaccaggttctagcaagaggagaagaaaggaggaaaccacagggaaaaatgttaagaagacacagcatgaattagatcacaatggtctcgttcccttacccgtcaaagtctgcttcacgtgtaacaggagttgccgtgtggctcctctcatccagtgtgactattgccctctcctgttccacatggattgcctcgagccgccgctcactgccatgcccctgggcagatggatgtgtccgaatcacatcgaacatgtggtgctgaaccagaagaatatgacactgagcaatcggtgccaggtgtttgatcgtttccaggacaccgtttcgcagcatgtcgtcaaagtggacttcctgaaccgaatccacaagaagcacccccctaaccggcgtgtgctccagtcggtcaaaagaagaagcttgaaggttcctgatgctataaaatctcagtacct

SEQ ID NO: 2699 - DNA, 276 bp, Homo sapiens
  misc_feature 25, 47, 91, 93, 106, 112, 127, 133, 188, 203, 238, 256, 259,261: n = A,T,C or G
gcggcccgcccgggcaggtactttntttttttttttttttttttttngccgacctcaataaccatttatttctggcacagctttccctctntntctccaggtgaantttgtncaagcgtgagttaanagattngatgaaatattcacccaaatgtaagtgtcggtatgttattaatactttctccaanaacatgcacatcttnacctgggcttgctgctgccccatgtagtaaggatncaacagtttgtggttctntananagctttgccaccatt

SEQ ID NO: 2700 - DNA, 836 bp, Homo sapiens
  misc_feature 122, 141, 307, 310, 397, 425, 489, 527, 531, 565, 570, 609,630, 631, 653, 689, 693, 701, 732, 740, 752, 758, 775, 782,791, 797, 804, 815, 821, 824, 836: n = A,T,C or G
cgggcaggtacgccggggactcgcgtcggttggcgactcccggacgtaggtaagtttgttgggcccgggttctgaggccttgcttctctttacttttccactctaggccacgatgccgcagnaccccaacatgagcatttntattaaaatttctcatcttctgtgccatcttccatgttgctttgaacatgtggaaattcatttcccatgcactcatatacagaccaaaaatttgggagaaacaatattggcgatggaacagcaacactgttgcatgtcttcttattcttctgtgcatataattatnttngaaccagtctgtaacttcattaggcttcttcaggcagatatggctttaactcataaaaagctcaaggaatttccgtcacgctggaangaataccaatgcagacacatgatgcatntttaaactgaagttgtcatctttgcccgtatcacatggccaattcactcatttgaattttctgncaaatgcattgggctgaatggaaaaaacaattattatnggtnacagcttgaattcactttcaaaagccttgactgnatatnattcttaaatcgggcattggggctttgagaatcaattanacattacgaattttagactgnngggattaagactttaaggattntggcctttgggaatttcaacattcaaaatatggcgntcanggatggcntcttttgggaacaattattccaacccccctnggagaaanaccctgggcccntcttanaactaatggaacccccnggcctgnaggaatttngatttnagcctanttggaaccctngacctnggnggggggggcccn

SEQ ID NO: 2701 - DNA, 492 bp, Homo sapiens
cgcccgggcaggtactatagattatttgtcttgaagaagagctttgatatgtttcaaaattcgacgttggctttggaaggaaactgtaaatttacagatctttgtccttccccacaaagagccttaatctcacaggttggattatgtggaactcactgctatttttcagttctcctttaagtgactaaggaacatccagatacttccaaaaaaaaaaaaaagtctaagtttttcactttgtccattgccatttaattatcttctgcatattttaaagcatttcctgtgaacataagtattgcccatccagaaaatttgcgtctacattgattttatgtttaatgaaacctgttcttctcaagttctttatttaatcacataacatagtatcttcaaaggtgagataaaaaaatcactggagaaatgttaaaacttcatttatttaagatgactagtgatgcagctagcaaacccaagaagccaactggaatg

SEQ ID NO: 2702 - DNA, 255 bp, Homo sapiens
  misc_feature 92, 102: n = A,T,C or G
ggagctccccgcggtggcggcccgaggtacttttttttttttttgtgacagggtcttgctctgtcacaaaaaaaaaaaaaaaaaaaggaaangaaaaagaanaagaaaatatgtatattggatatactatgtgccaggcacgattccaagcccctgatacattcttcattttacagatgggggaaggaggtccagagatgttaaatacttgcccaaggtcacacagaaagtggaacactgggatttgaacaaggt

SEQ ID NO: 2703 - DNA, 589 bp, Homo sapiens
gaatggagctccccgcggtggcggccgccggcaggtcgaaaaaatcaggctactaagcccactgttaatatagacgcagaccaattgttaggaacaggtccaaattggagcaccattaaccaacaatcagtgatgcagaatgaggctattgaacaagtaaggcttttgcctcagggcctggggaaaaattcaggacccaggaacagctttccctattaattcaattagacaaggctctaaagagccatatcctgactttgtggcaagattacaagatgctgctcaaaagtctattacagatgacaatgcccgaaaagttattgtagaattaatggcctatgaaaatgcaaatccagaatgtcagtcggccataaagccattaaaaggaaaagttccagcaggagttgatgtaattcagaatatgtgaaggcttgtgatgggattggaggagctatgcataaggcaatgctaatggctcaagcaatgagggggctcactctaggaggacaagttaagaacatttgggaaaaaatgttataattgtggcaaatcgggcatctgaaaaggagttgcccagcttaaataaccg

SEQ ID NO: 2704 - DNA, 585 bp, Homo sapiens
  misc_feature 350, 474, 501, 568, 585: n = A,T,C or G
cgcccgggcagggtacgaaaaaatcaggctactaagcccactgttaatatagacgcagaccaattgttaggaacaggtccaaattggagcaccattaaccaacaatcagtgatgcagaatgaggctattgaacaagtaagggctatttgcctcagggcctggggaaaaaattcaggacccaggaacagctttccctattaattcaattagacaaggctctaaagagccatatcctgactttgtggcaagattacaagatgctgctcaaaagtctattacagatgacaatgcccgaaaagttattgtagaattaatggcctatgaaaatgcaaatccagaatgtcaagtcngccataaagccattaaaaggaaaaagttccagcaggagttgatgtaattacagaatatgtgaaaggcttgtgatgggattggaggagctatgcataaggcaatgctaatggctcaagcaatganggggctcactctaggaggacaagttanaacatttgggaaaaaatgttataattgtggtcaaatcggtcatcttgaaaaggagtttgcccaggcnttaaattaacccgaatn

SEQ ID NO: 2705 - DNA, 457 bp, Homo sapiens
  misc_feature 18: n = A,T,C or G
ttatagggcgaattgganctccccgcggtggcggccgcccgggcaggtacttttttttttttttttttttttggaaactgtaaaaatgtgaagatactagaatgttaatttgactgctctaagaagtaatttttttaactttgcacaaaacatagtatgaatgtcatatattcaattaaaaatgtgcttatgcatctagtaagcaaagctgaactacccttgcggaaatgtgttacctgttcaatggcctaagggataataggtaattttaaagagggtgatacgagcatttgtagagctctatataactgtataacatcatgtaaatttgtatgattttgttttgggaatatagtttcaacttgctaagtaaagcagtaaggggcaaacactaaacttaccagttaaaaagccattaaacagttagactttgtaatggatagtctttcaagggttt

SEQ ID NO: 2706 - DNA, 434 bp, Homo sapiens
acttagggcgaattggagctccccgcggtggcggccgaggtaccgactcctcagaaactggcatgccaaatcaaaatgggtctggttcaatcctccctaatggcaatgtaaacccctctaactaatcccacttctcctaattatctttttctccttacgaacctaaaaatctcaccatttctattagcctgaaaataacatccctctgttcttctcttcctccttcagcactggatctcacttacaataggttttatttaataattatcttccttacactttctgtctcaccagtttccccttaaactgatttacctgctacacaaaattattcttattgggcttatgtgccttttcctccacttattcgacctctcacctggatggatgctcctgcagaaatctatactaacgatagtgtgtgggatgcctgg

SEQ ID NO: 2707 - DNA, 447 bp, Homo sapiens
  misc_feature 5, 363: n = A,T,C or G
gcggnggcggccgaggtaccgcacacaattgtatgcgctgcactttcatctgactggaagcacagtgggcttacaccagcatcaacacaaacacgtgagcagtgccttgcactacaacagacgcgatatccctaggggacagcactgttttcagccccattataatctcatgggactactgttacagatgaggtccaccattgaccaaaacatgtggagcacggcaattaattctggatttggatggggacacaaaataagcacagctctggcaggtctaatcaagattaagagagaaaagcaacctaaaacatctgagaaaacagatacagagggcataacaccacaccagaaaaatacctncatacaactgagctataaatttttttaattggacttgctgggaaaatttacttaaaatttaactaaaaaatttggatttaaaaa

SEQ ID NO: 2708 - DNA, 414 bp, Homo sapiens
  misc_feature 32: n = A,T,C or G
ccgggcaggtacgcggggacatcaatgcagantccctctgtgaatttacaacacccaacacccatgagttcagtccttaagaaggaaaattgagcaagtatttaattggttggacattgcataaaagaggtccatatccaggctaactctagaaattttattctcaaacttagttggcctctttttcttctgtcagaggaccattcttagtggcactggggaaatcttggcacccagaagaattcaactgcgctcactgcaaaaatacaatggcctacattggatttgtagaggagaaaggagccctgtattgtgggctgtgcctatgagaaattctttgcccctgaatgtggtcgatgccaaaggaagatccttggagaagtcatcaatgcgttgaaacaaaacttggcatgg

SEQ ID NO: 2709 - DNA, 450 bp, Homo sapiens
ctatagggcgaattggagctccccgcggtggcggccgcccgggcagttactaagggaggcagttaaagaagttttaaactgagttatttctcagaaccccaaataagagctcagcctatctatggctctgctaatattgattttaaaactataacgttcatctttttcttgctttaaattcaagctgtttttaaaatcaaatctttatccccaaccaaaatgtagattttttagttcaccagagaacttcaactgacctaattaaaactaaaagttcctagctgcttaaatgtttatgtaaaacaaaaagaaaaagttgaagttccggaaaaaatacttagacatttccataatgtagtcactgcctcatttgcttcatcaatactaacagtcgttttttttaagtcaaggatatttcaaggtagaataaaaacacttcatatatgtata

SEQ ID NO: 2710 - DNA, 375 bp, Homo sapiens
  misc_feature 1, 137, 333, 346: n = A,T,C or G
ncttagggcgaattggagctccccgcggtggcggccgcccgggcaggtacgcgggacatcaatgcagagtccctctgtgaatttacaacacccaacacccatgagttcagtccttaagaaggaaaattgagcaagtntttaattggttggacattgcataaaagaggtccatatccaggctaactctagaaattttattctcaaacttagttggcctctttttcttctgtcagaggaccattcttagtggcactggggaaatcttggcacccagaagaattcaactgcgctcactgcaaaaatacaatggcctacattggatttgtagagganaaaggagccctgnattgtgagctgtgctatgagaaattcttt

SEQ ID NO: 2711 - DNA, 364 bp, Homo sapiens
ccgcggtggcggccgaggtacttaatcctggttggtttacccattctaaattatttatgtgagatagctatctatttggaaaaaagtaaagtgaaagtcttacctcaatccacactcaaaaatagtttactatatgacagatctatggcaggcagatttgatggctcaatgaactccaccctcccagtgttcacacctttatgtagttcccacttacagggagccaaaggtccgtgggacgtgaccaactcagcattccactggaggctatatgatcaaacagcaaactgtttatcatgaatgcaggatgtgagcaaactcaccattgctcctgccgacagaaaggttttctggaggcaatcac

SEQ ID NO: 2712 - DNA, 432 bp, Homo sapiens
cttagggcgaattggagctccccgcggtggcggccgaggtacactgtttccatgttatgtttctacacattgctacctcagtgctcctggaaacttagcttttgatgtctccaagtagtccaccttcatttaactctttgaaactgtatcatctttgccaagtaagagtggtggcctatttcagctgctttgacaaaatgactggctcctgacttaacgttctataaatgaatgtgctgaagcaaagtgcccatggtggcggcgaagaagagaaagatgtgttttgttttggactctctgtggtcccttccaatgctgtgggtttccaaccaggggaagggtcccttttgcattgccaagtgccataaccatgagcactactctgccatggttctgcctcctggccaagcaggctggtttgcaaggaatgaa

SEQ ID NO: 2713 - DNA, 385 bp, Homo sapiens
ccgggcaggtacttccaaaccctcctgttctttcctttttgttttccccaattttaacataaggcaaaagcagtaattgagcaattctatcacctggattggcactccggggaacagtggagctgatcactaactgaattccccctttataatctgaataaattaccccagtatgaatttggactcccttcaaatttagacttgatctccctcaaaggcctaccctcccttctggcagcgggccatatacccctctaggaatcttttgtgggggctttccagggagtaaaaagaccatttgggtggaacataaatctactgcggtgctgcctgctgtggcgcgggacaagctgttggattgttgtaattggctgactcccttgaa

SEQ ID NO: 2714 - DNA, 368 bp, Homo sapiens
ccgcggtggcggccgcccgggcaggtacaataaatcttcctgtcccttccaccagaatacacatgtgtgaaggcatcattgacttgcagcgcccaaacaccttcatcatggactcggtatgttgctatacatctctgctggccaagggaccaaaggcgaattgtcccatcagaactgcctgacaggcattgcgtgccatctctgtttaatagcaatgcctccacattatccgtgtgccctttaagcttcattagttttgcacatgttcttggatcccatacccttaacaccttttcagtggaccctgatacaatgattgttcccagttgattcatggccaggttattaaatggaatcttttgttccac

SEQ ID NO: 2715 - DNA, 431 bp, Homo sapiens
  misc_feature 10, 53, 398, 408: n = A,T,C or G
aatacgactnctatagggcgaattggagctccccgcggtggcggccgcccggncaggtacttcaaatcattttgaggatgtatatgtaggttctgaaactgaattcatagtattgcacatagaccccaacgttgattaccagttcagagtctgcgcccgaggagatggccgacaggagtggagtccttggagtgtcccccagctaggtcattccacattggtgcctcatggtatgctgctaaccttttctctcctgaagcctaactatatattagaatacctgtattctgtgctaagggcagcacactgacaaccagctattctaagcatagatcctgaattgataagaacaacatgcaccatgtcttttactcagattacctcatgtggatttttgntttcttcagntcttcagagtccaaaaaaaaatg

SEQ ID NO: 2716 - DNA, 364 bp, Homo sapiens
  misc_feature 158, 166, 285: n = A,T,C or G
atagggcgaattggagctccccgcggtggcggccgaggtactaagaaaaattgttttgccttgagatgctgttaatctgtaactttagccccaaccctgtgctcacggaaacatgtgctgtaaggtttaagggatctacggctgtgcaggatgtacancaaaaaanaaactgagaagcccaaactgctttcttgttaacatccacttatccaaccaatgtggaaacttcttatacttggttccattatgaagttggacaattgctgctatcacacctggcaggtnaaccaatgccaagagagtgatggaaaccattggcaagactttgttgatgaccaggattggaattttataaaaatattgt

SEQ ID NO: 2717 - DNA, 337 bp, Homo sapiens
  misc_feature 17, 30, 96, 240, 262, 327, 329: n = A,T,C or G
ccgggcaggtacgcggngacatcaatgcanagtccctctgtgaatttacaacacccaacacccatgagttcagtccttaagaaggaaaattgagcnagtatttaattggttggacattgcataaaagaggtccatatccaggctaactctagaaattttattctcaaacttagttggcctcttttttttctgtcagaggaccattcttagtggcactggggaaatcttggcacccagaanaattcaactgcgctcactgcanaaatacaatggcctacattggatttgtagaggagaaaggagccctgtattgtgagctgtgctatnanaaattctt

SEQ ID NO: 2718 - DNA, 368 bp, Homo sapiens
  misc_feature 2, 49, 52, 274, 351: n = A,T,C or G
cngtggcggccgaggtacctgtcagtgttcaatatttaacaaactccanttnaacaggtaagaggtcagcagtagcttataggccttggttctattatccatgtgcccaactgcagccatcgtgggctggtgttaaaattttcctttcaattgtcatttttctaataattgcaatcagtgagaggagaagaaaaagttcaagggaatgacctggcctttcaccatcctacacaggagatgactgatgacatggattcatacactaatgtatatngtatattctccaaagaccctcaaaaatcacaagaagttttgaaaaattctgagatcataaactggaaacagaaactncaaatccaagggtaaca

SEQ ID NO: 2719 - DNA, 417 bp, Homo sapiens
  misc_feature 408: n = A,T,C or G
atacttagggcaattggagctccccgcggtggcggccgcccgggcaggtaccagttgtaaaattaccaggaaccgccatgcctcaagatcgccctgttttctggcttcatcaatgactgcatgcagtgcaccaccctgtccactacgtgatgctgtaggattaagtctcacagtgggccggctgaggatacagcgccgcgtcctgtgttgctggtgaattagacgccatcgctgtgggttgctggtatggtgccgtgctatttggcacaggacacaccgcttgaggtctgtattgaacctctgaaggaggccgatactgaagctcggttggcagccggtattgataaactaccagcggttgggtcttatttttctaccggctgatattgtggatacctgtatcctganttggcattg

SEQ ID NO: 2720 - DNA, 438 bp, Homo sapiens
tacttagggcgaattggagctccccgcggtggcggccgaggtaccagttgtaaaattaccaggaaccgccatgcctcaagatcgccctgttttctggcttcatcaatgactgcatgcagtgcaccaccctgtccactacgtgatgctgtaggattaagtctcacagtgggcggctgaggatacagcgccgcgtcctgtgttgctggtgaattagacgccatcgctgtgggttgctggtatggtgccgtgctatttggcacaggacacaccgcttgaggtctgtattgaacctctgaaggaggccgatactgaagctcggttggcagccggtattgataaactaccagcggttgggtcttattttctaccggctgatattgtggatactgtatctgagttggcattgccgggatagagactctgtccctttctacttga

SEQ ID NO: 2721 - DNA, 417 bp, Homo sapiens
cactacttagggcgaattggagctccccgcggtggcggccgcccgggcaggtacgcggggaaaaaagggtggggagtgccctttcttgaaggaatcccttaagtgcacgtctcccgttttcttttcacatcaatgcagagtccctctgtgaatttacaacacccaacacccatgagttcagtccttaagaaggaaaattgagcaagtatttaattggttggacattgcataaaagaggtccatatccaggctaactctagaaattttattctcaaacttagttggcctcttttccttctgtcagaggaccattcttagtggcactggggaaatcttggcacccagaagaattcaactgcgctcactgcaaaaatacaatggcctacattggatttgtagaggagaaaggagccctgt

SEQ ID NO: 2722 - DNA, 379 bp, Homo sapiens
  misc_feature 367: n = A,T,C or G
ccgggcaggtaccagttgtaaaattaccaggaaccgccatgcctcaagatcgccctgttttctggcttcatcaatgactgcatgcagtgcaccaccctgtccactacgtgatgctgtaggattaagtctcacagtgggcggctgaggatacagcgccgcgtcctgtgttgctggtgaattagacgccatcgctgtgggttgctggtatggtgccgtgctatttggcacaggacacaccgcttgaggtctgtattgaacctctgaaggaggccgatactgaagctcggttggcagccggtattgataaactaccagcggttgggtcttattttctacccggctgatattgtggatacctgtatctganttggcatttgcc

SEQ ID NO: 2723 - DNA, 381 bp, Homo sapiens
ccgggcaggtacgcggggagaaaaagggtggggagtgccctttcttgaaggaatcccttaagtgcacgtctcccgttttcttttcacatcaatgcagagtccctctgtgaatttacaacacccaacacccatgagttcagtccttaagaaggaaaattgagcaagtatttaattggttggacattgcataaaagaggtccatatccaggctaactctagaaattttattctcaaacttagttggcctctttttcttctgtcagaggaccattcttagtggcactggggaaatcttggcacccagaagaattcaactgcgctcactgcaaaaatacaatggcctacattggatttgtagaggagaaaggagccctgtattgt

SEQ ID NO: 2724 - DNA, 285 bp, Homo sapiens
actcctatagggcgaattggagctccccgcggtggcggccgaggtaccatgctgacttcttggtatcttttaaggcctaattttcccttccttgagattactgtagtgtgttccagctaatttctatttggaaacgagttggaacagctgaaaactaggtattattgaaggcaaagcagcctcacgtcatttttttatcagctcatttgggaagtttttttttttttttttttggttaattagaaagtaggctgggcacggtggctcatgcctataatcccagca

SEQ ID NO: 2725 - DNA, 391 bp, Homo sapiens
  misc_feature 235, 279, 281: n = A,T,C or G
ccgcggtggcggccgcccgggcaggtacgcggggagaaaaagggtggggagtgccctttcttgaaggaatcccttaagtgcacgtctcccgttttcttttcacatcaatgcagagtccctctgtgaatttacaacacccaacacccatgagttcagtccttaagaaggaaaattgagcaagtatttaattggttggacattgcataaaagaggtccatatccaggctaactctanaaattttattctcaaacttagttggcctctttttcttctgtcanangaccattcttagtggcactggggaaatcttggcacccataagaattcaactgcgctcactgcaaaaatacaattggcctacattggatttgcagaggagaaaagggagcc

SEQ ID NO: 2726 - DNA, 443 bp, Homo sapiens
  misc_feature 7: n = A,T,C or G
atcactnctatagggcgaattggagctccccgcggtggcggccgcccgggcaggtacgcggggacatcaatgcagagtccctctgtgaatttacaacacccaacacccatgagctcagtccttaagaaggaaaattgagcaagtatttaattggttggacattgcataaaagaggtccatatccaggctaactctagaaattttattctcaaacttagttggcctctttttcttctgtcagaggaccattcttagtggcactggggaaatcttggcacccagaagaattcaactgcgctcactgcaaaaatacaatggcctacattggatttgtagaggagaaagggagccctgtattgtgagctgtgctatgagaaattctttgcccctgaatgtggtcgatgccaaagggaagatccttggagaagtcatcaatgcgtttg

SEQ ID NO: 2727 - DNA, 384 bp, Homo sapiens
ccgcggtggcggccgcccgggcaggtacgcggggacatcaatgcagagtccctctgtgaatttacaacacccaacacccatgagttcagtccttaagaaggaaaattgaacaagtatttaattggttggacattgcataaaagaggtccatatccaggctaactctagaaattttattctcaaacttagttggcctctttttcttctgtcagaggaccattcttagtggcactggggaaatcttggcacccagaagaattcaactgcgctcactgcaaaaatacaatggcctacattggatttgtagaggagaaaggagccctgtattgtgagctgtgctatgagaaattctttgcccctgaaatgtggttcgatgcccataag

SEQ ID NO: 2728 - DNA, 373 bp, Homo sapiens
  misc_feature 50, 184, 190, 248, 254, 274, 309, 332, 348, 353: n = A,T,C or G
ccgcggtggcggccgaggtactttttttttttttttttttttttcctganccacccatttcctatttgtttattttgaaagttttcataataaaggttaatttttaaaaatttaaaactaccaagatcactaatcctatactaacaaagcatgagatttctcacatcaaaaaaaaaagtccttntgtganagcccattttttgaatagtttaaaacacaaaacatctgtatttcattatgtgaatgcncttganattttaagaatatatcttancaaggaatagacaatactgaattccctttcccagngatatcctaatttaaaaatagcnccaaaattggcagggngtggnggctcatgcctgtaatccca

SEQ ID NO: 2729 - DNA, 404 bp, Homo sapiens
  misc_feature 391: n = A,T,C or G
atacgactcctatagggcgaattggagctccccgcggtggcggccgaggtacgcggggacatcaatgcagagtccctctgtgaatttacaacacccaacacccatgagttcagtccttaagaaagaaaattgagcaagtatttaattggttggacattgcataaaagaggtccatatccaggctaactctagaaattttattctcaaacttagttggcctctttttcttctgtcagaggaccattcttagtggcactggggaaatcttggcacccagaagaattcaactgcgctcactgcaaaaatacaatggcctacattggatttgtagaggagaaaggagccctgtattgtgagctgtgctatgagaaattctttgcccctgaatgtngtcgatgccaaag

SEQ ID NO: 2730 - DNA, 361 bp, Homo sapiens
  misc_feature 268, 325: n = A,T,C or G
aggtacggggaggaacagagtccctcctttacttctccattagaaagaatgagatggcaagacaatgaaacaggcaaagtggacagagatgcaagacaaaattcaggtgagagagccagagcatcactcagccattcctgacatgtaaaacaggcaactagaaatttgcagaaaggaagcgaggtctccataaagatgtttttaaagtgagcttgaagtatttggagacaattcagtgttacataaaatctgcaaatctctggataangaagcagagatcccagcatgggacaaatggagcctcaaaagtgggaagaagacaganaagaccagggcagaatgcatctcttcctttctcttg

SEQ ID NO: 2731 - DNA, 310 bp, Homo sapiens
ccgcggtggcggccgaggtacgcgggctcctgatctccttaaaaatgaatctagagttggtggctttttccccctcctctttggccagttccacagttcagttcttcctgaaaacagggatgatgaacttgtaggatcaggacaaatgtgtgtttttcaaaaacttaaggctgggtgtgaaacaccttctgtggacaaggatttgtaaacttctctcctccctccagctgcggccccagcctaactgatagttacttgattcagtgtgctagacacttaaatagcatctatgtctctttcaagggaattt

SEQ ID NO: 2732 - DNA, 422 bp, Homo sapiens
  misc_feature 2: n = A,T,C or G
tncttagggcgaattggagctccccgcggtggcggccgcccgggcaggtacagtagtatttaacctagacgtgaggaaggagtaggaaattttctggtgaatacagaagagcaaagaacagcaggtcagcaggaatgactaatgtttttctatgcgtgtttaatggaatattcgtgtaggatattttgagtaggtaattggataatcagcatttgtaacttgcatcctagtagtctgactctcactaataagacttgtcaaagttccaagaatctgaaagtggatgataaatgtccatgtgtatcaccatccatggccgaaagtcagcatccacagaacacagaattgggacagatgaacttaatagataaagatgaatattcggagttgttcctcttaggggaatgatactctccatgagc

SEQ ID NO: 2733 - DNA, 397 bp, Homo sapiens
ccgcggtggcggccgcccgggcaggtaccaggagggtattgatgtttgaggtccaaactgaaaacccatcacctccttcccactgctatagcagcgttagccctggggttcattatctagccagttcacaccttctaaagtggggctctgaaaatgtcttacttccctcacagacaaagcaattctcaagcctcctgagatcacccaccaaccagagcaactgctgtcacttggaggtgcagctgaattcttctaattgtgacacaaactcttgaaactgtaaatgctgaaagattaaatgaggttataacactcagaaggttttacaagtaaaagtaagtcaaatcaataggtctttatttcatatctgtaatggtttagctctgcgggaagtgtt

SEQ ID NO: 2734 - DNA, 416 bp, Homo sapiens
atacgactcctatagggcgaattggagctccccgcggtggcggccgcccgggcaggtacgaaaaaatcaggctactaagcccactgttaatatagacgcagaccaattgttaggaacaggtccaaattggagcaccattaaccaacaatcagtgatgcagaatgaggctattgaacaagtaaaggctatttgcctcagggcctggggaaaaattcaggacccaggaacagctttccctattaattcaattagacaaggctctaaagagccatatcctgactttgtggcaagattacaagatgctgctcaaaagtctattacagatgacaatgcccgaaaagttattgtagaattaatggcctatgaaaatgcaaatccagaatggtcagtcggccataaagccattaaaagggaaa

SEQ ID NO: 2735 - DNA, 356 bp, Homo sapiens
  misc_feature 162: n = A,T,C or G
cggggagtcacagaggaagccatttccagagaggaacaaccgtgtatgactgctttcctgggagtcaagttaaaacttctctcctgtgaccttgtcacccggcagaaggaaagttacccttggctgcagccacgacttccgcatactcttcagaacttgctntgcccttgagttttccagctttcctttaatgcactaaacctttaatattgtattctcctaaatgagacgtctcgcatttgagcaagtaacactcggatcttccccatttcacggagagacatggatgagaatgaaggctgctgagtgggaggggcttatggggccagttttgaagaggcctcataccttttggc

SEQ ID NO: 2736 - DNA, 302 bp, Homo sapiens
  misc_feature 55: n = A,T,C or G
ccgggcaggtactttttttttttttttttttttaagcaagcccccaacaccatanaaaattcttgatttgctcggaggataattggatgaaggattattttcttctttgtttatgtgcaagaaatgaagataaggaattgctttgatcagacaacttcttatctttgtggtagaaacagaactgcccttcttggagtggctctgcctctgagatcactacaggggagacagcatgccctgttcagctggctgaatatttggcaacaatctcctgaagcagctggaattgacaagaagtacct

SEQ ID NO: 2737 - DNA, 321 bp, Homo sapiens
  misc_feature 260, 294, 312, 318: n = A,T,C or G
aggtacatcatatttgcttgttggctttatgataacctagaaataatattctggattaactgtgtgactcatgagaagatttgtgcaactatgtttccaaatttacttgattttcaagacttacactagaactgtgagaacagggtaataaataagcatatgtattaatatcacctttggtcaactcttgggtagccccaacggtagtgtaggaattaacgtaatttttccctacttaaagtatttggatttgttttganagaccccagttgaaaatcattgacataccaaaangtttaaaaaatttggttnagggtnaaa

SEQ ID NO: 2738 - DNA, 365 bp, Homo sapiens
ccgggcaggtacagagacaactatgtgacttatcccaagtcacacaggagttagaggcagggccaggacccaaacccaagtttcccttttatgagtcagctcatttcctgtgactccatattaaagataccactctgaatttgccttggaagctggcgcttcagtttataacacaaattgacactttaggaagacaagagagctttgtattctccctgcaatcatttactcagtcaggaaaatactaaacactgtctttgcgtagaatataatgctactgatgtgaggaaaagaaatccagtgcctggcacatagaaaaggatagatacacttttgtgggaggaaaaatagtggtaaaaaacatg

SEQ ID NO: 2739 - DNA, 435 bp, Homo sapiens
ctatagggcgaattggagctccccgcggtggcggccgaggtacactgtttccatgttatgtttctacacattgctacctcagtgctcctggaaacttagcttttgatgtctccaagtagtccaccttcatttaactctttgaaactgtatcatctttgccaagtaagagtggtggcctatttcagctgctttgacaaaatgactggctcctgacttaacgttctataaatgaatgtgctgaagcaaagtgcccatggtggcggcgaagaagagaaagatgtgttttgttttggactctctgtggtcccttccaatgctgtgggtttccaaccaggggaagggtcccttttgcattgccaagtgccataaccatgagcactactctgccatggttctgcctcctggccaagcaggcttggtttgcaagaatgaaat

SEQ ID NO: 2740 - DNA, 384 bp, Homo sapiens
  misc_feature 191, 193, 194, 196, 214, 244, 270, 274, 279, 288, 300, 304,323, 344, 345, 347, 351: n = A,T,C or G
tcgcggtggcggccgcccgggcaggtacttctgtcttccagttttccacttcaaacttctatcttctccaaattgtttcatcctaccactcccaattaatctttccattttcgtctgcgtttagtaaatgcgttaactagggcttttaaaatgacgcatatttctccctgcgtcaatgggatttcaagggncnntntaattcactcttcaggtntttaaatactttttttttaaaaaggatacnctctttcaaaaattaatttttttaantcanccctnaacataccnttttttttaaanaacntaaaaaatccttttttaanaggccctggtcttttaaaagnntnccanccccctttttccaattttttttaaaaattccct

SEQ ID NO: 2741 - DNA, 342 bp, Homo sapiens
tagggcgaattggagctccccgcggtggcggccgcccgggcaggtacatctacctaaaggactattatgtggaataatacatactaatgaagtattacatgatttaaagactacaataaaaccaaacatgcttataacattaagaaaaacaataaagatacatgattgaaaccaagttgaaaaatagcatatgccttggaggaaatgtgctcaaattactaatgatttagtgttgtccctactttctctctcttttttctttcttttttttttattatggttagctgtcacatacaactttttttttttttgagatggggtctcgctctgtcaccaggctgg

SEQ ID NO: 2742 - DNA, 367 bp, Homo sapiens
  misc_feature 319: n = A,T,C or G
ccgggcaggtactatagattatttgtcttgaagaagagctttgatatgtttcaaaattcgacgttggctttggaaggaaactgtaaatttacagatctttgtccttccccacaaagagccttaatctcacaggttggattatgtggaactcactgctatttttcagttctcctttaagtgactaaggaacatccagatacttccaaaaaaaaaaaaaagtctaagtttttcactttgtccattgccatttaattatcttctgcatattttaaagcatttcctgtgaacataagtattgcccatccagaaaatttgcgtntacattgattttatgtttaatgaaacctgttcttctcaagttctttat

SEQ ID NO: 2743 - DNA, 394 bp, Homo sapiens
cggccgctgagtgaggcgtcggctgtgtttctcaccgcggtcttttcctcccactcttggctggttggaccccgctatggaaaagttggcccctgagccagagctccagcagccttgttagggcgtggcctgaggcttggataagtgggatgtaaaacgaagatcaggagcagatttgaagaattacaaagtgaattggtgccagtcagcatgtcagagacagaccacatagcctctacttcctctgataaaaatgttgggaaaacacctgaattaaaggaagactcatgcaacttgttttctggcaatgaaagcagcaaattagaaaatgagtccaaactattgtcattaaacactgataaaactttatgtcaacctaatgagcataataatc

SEQ ID NO: 2744 - DNA, 401 bp, Homo sapiens
aattggagctccccgcggtggcggccgaggtacaactctggctccatggctcctcacaaatgttccatgtgagatgtaaacatctttatcctcgacaagtcatgttcattccaagaaaccagtctttgttcttaattggacatttgtttctgcaaacagcttaccatacattcaattccaaagttatcagaaacctacactcttatctcacaaatttagaggtgtggtagatcatctccaaagatggccaccaacagttgctctcatcctctgtgcacgtgctatttccaataaggtctatttttttctacagtgagggctgaacttgtgacttgttttgactaataggatatggaagtgatattttggcaagctttccactttttgctcttgaaaaataa

SEQ ID NO: 2745 - DNA, 381 bp, Homo sapiens
ccgcggtggcggccgcccgggcaggtaccctccaacacctcttccataaaatcagcaaacaactgacagagatcatgcagcgggagcccacgatcggtttaatcatcactcacttccattggatcaactacaaatcaactcagatgagagtgctgagtctcagaggatggacatctcaccccttgccatacagataagtagaaaggatggtattcaaaattaatggccagactctaagtcccagatactatacttcatggtcttccaactctcaaaaagttgtgggagttttttttgtttttgtttttgtttttttgagacggagtctcattctgttgcccaggctggaagtgcagtggagtgatctcagctcattgcaac

SEQ ID NO: 2746 - DNA, 417 bp, Homo sapiens
ccgcggtggcggccgcccgggcaggtactcactctcaagtttacgttaaatactatcccatacaaaaaccactctttctcttgttttcattatttatatgttgccttgtttaaaggaagaacacaaaaatgccctgctaaagggattctgtttggctgcaggcagcaagagggaaaaacacagagcatattttgcagaaaatgatttattagaagtcagaactatgacacgaagccaagcagggcactctaggactgaatttgctgtgctgccttcatacgctccttgctctttcttttctggcagctgtgactcacacagctcatggagagtatcattccctaagaggaacaactccgatattcatctttatctattaagttcatctgtcccaattcttgtgttctgtggatgctg

SEQ ID NO: 2747 - DNA, 348 bp, Homo sapiens
  misc_feature 23, 39: n = A,T,C or G
ccgcggtggcggccgaggtacangtagtatttaacctanacgtgaggaaggagtaggaaattttctggtgaatacagaagagcaaagaacagcaggtcagcaggaatgactaatgtttttctatgcatgtttaatggaatattcgtgtaggatattttgagtaggtaattggataatcagcatttgtaacttgcatcctagtagtctgactctcactaataagacttgtcaaagttccaagaatctgaaagtggatgataaatgtccatgtgtatcaccatccatgaccgaaagtcagcatcccacagaacacagaattggggacagatgaacttaatagataaaagg

SEQ ID NO: 2748 - DNA, 377 bp, Homo sapiens
  misc_feature 151, 162, 229, 278, 279, 280, 322, 328, 335, 341, 353, 357: n = A,T,C or G
aggtacttaactagtatgagaataacaggtcgccattatttgaattgtctcctattcgtttttcatttgttgtgttactcatgttttacttatgggggatatatataacttccgctgttttcagaattatttgtatgcagttcagatattnaagaaatgcanatttttaagttttcctatgaatgccttttttccaccactttctatttatcttagcaaaattaaatgnaattaccacgctaaataatttgggcaaaaattaataaattgtaacgcannntttcaaattaaaaaaaatttttttttaagataaaaattcttnggagtntggaganaaattnaaaaaccaattntgcnttttaattggggcctttttt

SEQ ID NO: 2749 - DNA, 428 bp, Homo sapiens
tacttagggcgaattggagctccccgcggtggcggccgggggccattgagactgccatggaagacttgaaaggtcacgtagctgagacttctggagagaccattcaaggcttctggctcttgacaaagatagaccactggaacaatgagaaggagagaattctactggtcacagacaagactctcttgatctgcaaatacgacttcatcatgctgagttgtgtgcagctgcagcggattcctctgagcgctgtctatcgcatctgcctaggcaagttcaccttccctgggatgtccctggacaagagacaaggagaaggccttaggatctactgggggagtccggaggagcagtctcttctgtcccgctggaacccatggtccactgaagttccttatgctactttcactgagcatcctatgaaatac

SEQ ID NO: 2750 - DNA, 463 bp, Homo sapiens
  misc_feature 147, 175, 177, 188, 195, 211, 219, 222, 227, 232, 253, 287,306, 328, 340, 350, 360, 366, 370, 389, 398, 416, 422, 432,434, 435: n = A,T,C or G
aggtactggctggccaccaaagcacacggagattctgtcaggcgctgagacaccacagccttttcaatcttgtccttaagggctttatctttcatccaattcagcagaggctcaaattctttctcaaactgctttcacgaactctcnctttagcttttatcctcacttttcaatncngaaccttcacntcccttnccttgggcaaacaatntcctgggnaanccatnctttnccccaattcaaaaaattttcngtggggaaaggggggccccttggaaattaaccanggtttaattttccaattcnccaccaagggggttttccttgnttggaagggggntaaaaaaatnaaaccctttncaattnaagnccccccttttttttattcnaaagaaaangtttccggcccccaaaancaatanaattgggggnanngaaaagaaaatttccaaggcccccttcc

SEQ ID NO: 2751 - DNA, 412 bp, Homo sapiens
ccgcggtggcggccgaggtacttccaaaccctcctgttctttcctttttgttttccccaattttaacataaggcaaaagcagtaattgagcaattctatcacctggattggcactccggggaacagtggagctgatcactaactgaattccccctttataatctgaataaattaccccagtatgaatttggactcccttcaaatttagacttgatctccctcaaaggcctaccctcccttctggcagcgggccatatacccctctaggaatcttttgtgggggctttccagggagtaaaaagaccatttgggtggaacataaatctactgcggtgctgcctgctgtggcgcgggacagctgttggattgttgtaattggctgactccctgaagtggtggtattttctgtagg

SEQ ID NO: 2752 - DNA, 431 bp, Homo sapiens
tagggcgaattggagctccccgcggtggcggccgaggtacctcaaggtgcgttgtcgtagtcatataattcctttgcttgtaactgcccaataaatggatgaggactcacttcacccataaataagaaaggtgaacagcacatggggcctgtagatgccttttgcagggccctctttttctcttcctaaagttgcaatttgagtatttctctagatgggcacatcatagaaactgtcgtcctagatcagagcctggggagagagatacaggtgtcatgcttacatctgcagagtgggaacaagcccagaaaaatcaagatgattaagcagagagcttccatactggagataaaccagctgtgtaaaaaatcgttgcaccaaaaaagcattgcaccatcgacataactgctttaactaaagaaagtaaaggg

SEQ ID NO: 2753 - DNA, 418 bp, Homo sapiens
  misc_feature 384, 393: n = A,T,C or G
gcgaattggagctccccgcggtggcggccgcccgggcaggtacaagttcagagacattcagttgcaaagacatttaagcatattccctctgcttatgggaacttttctaaaaggtttgtaagaggaaacggcaccgcggagggacaggagtggaaatgtatctgtctggttccctcctgactcttgcttcccattggtcaaattttattccacagagatctaatgcttctatacatttggcaacttggtagctactcaagaagccatttcccaagccctgttttgtggcatttcatctaagaccagaaagtgggaggggagattcagcagggtcagactaccaacccaagaagagaagggagggcagcctgaggggaatgtagnaaagccttncccctaaaaaaaaaaaaaaaaaaaa

SEQ ID NO: 2754 - DNA, 430 bp, Homo sapiens
acgactcctatagggcgaattggagctccccgcggtggcggccgaggtacatctctagatgatcacgaatgtcaaatatcacactacactgtgatatggggattccccttgggggttttcatgtgtatagggtgcctgcagctacactaaacatcttaaagctaccacaatgttcacttcatatttttgctttttataggctttcttggtctcctcctatgttcccatcattttcttgctttgaatctgtaagaatcgagttgaatcttctccattttaaattttccataggctgagaaactgtttagccaagtttggataaaattgtatccaaagtaagagtatacaagctatgggcaagtccaaaatcaagctgttcacaggaccatgttctctctaaaggttctaggagaagaatccctcatttcct

SEQ ID NO: 2755 - DNA, 387 bp, Homo sapiens
  misc_feature 162, 191, 220, 226, 251, 266, 282, 301, 328, 336, 337, 346,357, 358, 386: n = A,T,C or G
aggtacagcatctggtgcaaaatcaatgtggactgaacataaatcacctgatggaaggacttactactacaacactgaaaccaaacagtctacctgggagaaaccagatgatctttaaaacactctgctgaggcaacatcttaattttaaatgccccctggnaaaggtaatacaaatttagatttcttggnaaaagcctctacttattatattaattctncaaacnaaaaagtaatcttcgacttggggcncaaacccctaaatanactttgtagggattcntttgatagggataacccangtaaataccccatttgtttgtcttgtnaaaggttnntttatttancaaaaaattcnnaacccttgtcaattggccaattggaatnc

SEQ ID NO: 2756 - DNA, 430 bp, Homo sapiens
ctatagggcgaattggagctccccgcggtggcggccgaggtacctgtggatgggaagaatagaaatcaggagtgggcagagggaaaagttaagctgtgatgtaggcccagtgacaagccactgacacttctatggggagctgtaaatagacctttggcattgtcccaagttgggccaatatggccaggcctttacaggctcacacatcatttattgcttgtgggccactccaggaaggtgcatgactttgggtaaggaggctctctggagctgaggtaatccctgaaaggactaacagctgaagattgtctgctgagaatactgccgaagactaaggcaacaaattcttccacatacaggatctggatggcacatcacagtgcccaaaataaaggctgaacttatttagttataatctgatcagttaggg

SEQ ID NO: 2757 - DNA, 377 bp, Homo sapiens
  misc_feature 348: n = A,T,C or G
cgggcaggtaccagttgtaaaattaccaggaaccgccatgcctcaagatcgccctgttttctggcttcatcaatgactgcatgcagtgcaccaccctgtccactacgtgatgctgtaggattaagtctcacagtgggcggctgaggatacagcgccgcgtcctgtgttgctggtgaattagacgccatcgctgtgggttgctggtatggtgccgtgctatttggcacaggacgcaccgcttgaggtctgtattgaacctctgaaggaggccgatactgaagctcggttggcagccggtattgataaactaccagcggttgggtcttattttctaccggctgatattgnggatactgtatctgagttggcattgccgg

SEQ ID NO: 2758 - DNA, 312 bp, Homo sapiens
ggcgaattggagctccccgcggtggcggccgcccgggcaggtacttttattagttctgttttatagatgatgaacccaaggctcagagaggttaagtaacttgtctaagatcacacagtaagtggcaaagctgggatttaaacccacaaagtctggctcctgaaagtatgtttactccagctactccacactcatgtatggtgggcatttgagtttttactggagtgaacaaccaatcaaagtctagtttgattccttgcaaacaagcagcctctcattcatttattcagttttcctctttttttttttttt

SEQ ID NO: 2759 - DNA, 450 bp, Homo sapiens
  misc_feature 10: n = A,T,C or G
aatacgactnctatagggcgaattggagctccccgcggtggcggccgcccgggcaggtacaggcggtaatatgagccataaggagtggctgtaaatacagatgaagcttccctggcttgcctgctgctcacctcctcctgtgtggtgtggttcataatagtccatggactggtatgagtgtgtggcctgggagttgaggacccctgctctgcgtggtcctaccatagataaaaaagtaaaagtaaggaatttttgatcacaaaagaacactgaagcacaagtcatgttacatatgcttgtcccaataaggtctcactattattgacttcattcctcctcatttgaagttggaaagagatatatttactttgttggaacaagatgtgttcttctacctgctggttaattgtcatcataacagtaattttgttagaacaagatgctctgcta

SEQ ID NO: 2760 - DNA, 424 bp, Homo sapiens
ccgcggtggcggccgaggtacttcccattgtaaatcacatttttagatagtccagtggccaaagcccccagacgaacaaaaacactcgtatcagccaagacatgccagaggcctagtgattgtttcccagtagctgagggcagaagccagacctctttcaataaggttgatctttcactgtattaacactgtatataaaggacttttataaaagcttgtagttatggtgttattgtcatcatccagtttaatgccctcttttttccagtaagaaaagaaaggtctgggataatcatgttaattgatttgtttacatttttattttaattagtagcacaactgagagtgaaaatggaacccaaatagtccatctttagcataatacttttttttctcctctagtggagcttataccttgccaatt

SEQ ID NO: 2761 - DNA, 426 bp, Homo sapiens
aatacgactcctatagggcgaattggagctccccgcggtggcggccgaggtactttttaaatgacaaagagtaatttcaacaaaaccaaatgctgcagtgtggcactcagctataacagtgtattttctttatccaaataaacacaataaaagctttgctttgcattgttcattataaaaaactgaatttttcttttgcaactatttatttttaaatgaggaagtaaaattctcaaaatgatacagttgctgctgcaaagtatgaataataagactgagggaggtaagagagaaaggactagtgcaagccctaacaaaagccctgtaccagatggaaaatgtttttggtgatctggctgctgcttaaagccagttttccctaagaactccaaaggctaaagtctactaggggccagagtgtgagga

SEQ ID NO: 2762 - DNA, 392 bp, Homo sapiens
ccgcggtggcggccgcccgggcaggtactctgcattggtgttaatgcccttctggatgtgctgggactcctcaataagtctgtcctccagactgttacattatgctcatacttccacatatccccagaacctaacattttgccatatattttagtagatactaaattatgtttgttaattaggatgctgatggaacccattatttagcagtttttcccttacatttttaggaggtggttttgccagataaatataatgtttaattttttttctaatttagcttattgacatgtgtgtgcagaactgtggtccaagtttccagtctctgattgtgaagaaggaatttgttaaagagaatttagttaagcctactgaatcccagatacaacttg

SEQ ID NO: 2763 - DNA, 326 bp, Homo sapiens
  misc_feature 130, 173, 278, 294: n = A,T,C or G
ccgggcaggtacgcggggctgaccacagcatgaaaggacggggatgagcactgactggagcaatctgttgactgtcccctgttgtaaaccacagctgcctaattttgagaaacaggggccgagccatcanatgtaggggaatggaagctgatgccaacggaagcccggaggtnaactagggccccggaaaaacgaagaggaaacagaaattatgagtaagcagcggaagttgatactactcccaagatggaggctaatcactctgaacagctctcagncggaaccgacagtcancacctccaggtgacagttcatcattacccagt

SEQ ID NO: 2764 - DNA, 376 bp, Homo sapiens
  misc_feature 283: n = A,T,C or G
ccgggcaggtacaaaaattagctgggcatagtggcacatgcctgtagtcccagctactcgggaggctgatgaacaagaatcacttgaacctgggaggaggaggttgcagtgagctgagatcgtgccactgcactccagcctgagcgacagagcaagactgtctcaaaaaaataaaaaagaaaaaaataataaaaaggaaaacaaagcctttagaaaaacaaagcctttgaaaaaggatgtaaaattgaatatatagatacaattatttttaaaaagttttatngaaaaatatcctggattgttgatgttgttttaatatattttaatcatttttgtataatgtcatgtataatatgttataatgaaagtaaaaaaa

SEQ ID NO: 2765 - DNA, 339 bp, Homo sapiens
  misc_feature 147, 154, 172, 175, 184, 190, 198, 204, 211, 213, 220, 221,223, 225, 226, 232, 242, 244, 246, 252, 271, 276, 284, 302,311, 318, 320, 332: n = A,T,C or G
ccgggcaggtacgaagaattgcttcattccagtaatgaaataaatctcatttttttctctggttgagtctttcttgggccccttcaaagttgcatacattaacctgacccatccaacccagggctgttagagccaaagttataactncctaggnaaaccatcaagtgcctgnaanaaaaaaggngtctgnggaaaatncctaantctttgngnacctaanngnannaatacnactgaaatgntngntttccntggaagcttcccaagggcnattgncaagatgncacttaccttgcttctcnaagaaatanaggcttnanctttaaccttgnggggttg

SEQ ID NO: 2766 - DNA, 387 bp, Homo sapiens
  misc_feature 372: n = A,T,C or G
ccgcggtggcggccgcccgggtatggtacttgcccaatgtttacccttacgacaacgcaggcaaacagtagcaggagcatttggccgtgtttgttgagccggcttggccgcttttaagtttttaacagtgtagtttttttgggtatgaccaagttggccacaattatagcaggctccaagaaaagaatcagtcgagccagtttggttgccgtgcttcatggccggtgcccacagaatagctctgtgggtctccgatccaacgccttcacaagctttaatatatgcaggcaacacctcatgatcaggtaaatttttgacgtaggatggaatgcacggccattttacactcatggttcgcattttgaaaagctnacatatgaagaagaa

SEQ ID NO: 2767 - DNA, 424 bp, Homo sapiens
ctcctatagggcgaattggagctccccgcggtggcggccgcccgggcaggtacgaaaaaatcaggctactaagcccactgttaatatagacgcagaccaattgttaggaacaggtccaaattggagcaccattaaccaacaatcagtgatgcagaatgaggctattgaacaagtaagggctatttgcctcagggcctggggaaaaaattcaggacccaggaacagctttccctattaattcaattaggcaaggctctaaagagccatatcctgactttgtggcaagattacaagatgctgctcaaaagtctattacagatgacaatgcccgaaaagttattgtagaattaatggcctatgaaaatgcaaatccagaatgtcagtcggccataaagccattaaaaggaaaagttccagcaggaag

SEQ ID NO: 2768 - DNA, 331 bp, Homo sapiens
  misc_feature 129, 137, 138, 139, 148, 151, 152, 154, 155: n = A,T,C or G
ctatagggcgaattggagctccccgcggtggcggccgaggtacaccgccagccatttaagccacaagcttataatgaggagaatctcacactttctcgaaagggtggcactttgctcctggcctgaagntgattctnnntcccggacncgnntnnaccttcaggccaggactgtccagtggaaatggaatgtggactatgaatgcaagctacctatgccattttaaatttcctagtagccacagtcaaagaggaaaaagaaacagactacattaatcttaataatactttttggttttttgtttttttcaatttgagagcaggtaccttca

SEQ ID NO: 2769 - DNA, 445 bp, Homo sapiens
  misc_feature 10, 425: n = A,T,C or G
aatacgactnctatagggcgaattggagctccccgcggtggcggccgcccgggcaggtacgcgggggcctcatttcagctcaataaaacatcaccaaattcccttaggcagaaaaagggtggggagtgccctttcttgaaggaatcccttaagtgcacgtctcccgttttcttttcacatcaatgcagagtccctctgtgaatttacaacacccaacacccatgagttcagtccttaagaaggaaaattgagcaagtatttaattggttggacattgcataaaagaggtccatatccaggctaactctagaaattttattctcaaacttagttggcctcttttttttctgtcagaggaccattcttagtggcactggggaaatcttggcacccagaagaattcaactgcgctcactgcaaaaatncaatggcctacatttggatt

SEQ ID NO: 2770 - DNA, 438 bp, Homo sapiens
ctatagggcgaattggagctccccgcggtggcggccgcccgggcaggtacttccaaaccctcctgttctttcctttttgttttccccaattttaacataaggcaaaagcagtaattgagcaattctatcacctggattggcactccggggaacagtggagctgatcactaactgaattccccctttataatctgaataaattaccccagtatgaatttggactcccttcaaatttagacttgatctccctcaaaggcctaccctcccttctggcagcgggccatatacccctctaggaatcttttgtgggggctttccagggagtaaaaagaccatttgggtggaacataaatctactgcggtgctgcctgctgtggcgcgggacagctgttggattgttgtaattggctgactccctgaagtggtggtattttctgt

SEQ ID NO: 2771 - DNA, 362 bp, Homo sapiens
  misc_feature 226, 237, 271: n = A,T,C or G
attggagctccccgcggtggcggccgcccgggcaggtacttgtatgtgaggaaaaggaggtaaacaaggagttagaaagatgtgatgagaccaggtggtgatggactgaatataaagcaaagacatctggatttttaattctgtagggaatagctgaccaaggtatatgattacatgtctgctttttaaacagctttgtgatttgaaatgctgggttgttattgtntttttttgttnttgtctttttttttaaaaaaaaaaaagatggctnactctgccaaccataggacaaatattgcatactggcatgtggagaaagaaggacaggaattgttagaaagcatttcattatttttccagcc

SEQ ID NO: 2772 - DNA, 503 bp, Homo sapiens
  misc_feature 150, 161, 180, 193, 210, 221, 222, 244, 246, 250, 256, 296,319, 331, 333, 342, 354, 357, 359, 371, 376, 385, 423, 427,429, 434, 448, 470, 472, 482, 486: n = A,T,C or G
ccgggcaggtacgcgggacagaaaatgagagtttcagatactgagaatagaaccactaagaagcagaaaagagaagatattctcgtgggggagaacaacggctgggaggggaggaagcatggccaaggcaaagaggaatacaacatgttntaagaccacangaacatctgcataggctgntaaatttcgttgnaatgatgtgatgcaatngaattgggaannacaagattgggaatcagttggnanaaangacatngaattcatggattaccttgggattgaaggtttatgtaacngccggggaaaggccattttgganggccagccccangnccgtcaagnggggccttttcntgncntggagagggggngccanggggcgggnagccttttgggatggggaaaaaccccggcaagaattanaagntnttttnttttcttccttttntggaaaaaggatttaagtatgnantttaaattancaanacttaccttttaaaaaa

SEQ ID NO: 2773 - DNA, 422 bp, Homo sapiens
cactacttagggcgaattggagctccccgcggtggcggccgcccgggcaggtacttccaaaccctcctgttctttcctttttgttttccccaattttaacataaggcaaaagcagtaattgagcaattctatcacctggattggcactccggggaacagtggagctgatcactaactgaattccccctttataatctgaataaattaccccagtatgaatttggactcccttcaaatttagacttgatctccctcaaaggcctaccctcccttctggcagcgggccatatacccctctaggaatcttttgtgggggctttccagggagtaaaaagaccatttgggtggaacataaatctactgcggtgctgcctgctgtggcgcgggacagctgttggaattgttgtaattggctgactccc

SEQ ID NO: 2774 - DNA, 185 bp, Homo sapiens
  misc_feature 141, 167: n = A,T,C or G
tttggggaaaaaaaatcacattccatttttttttccccatgatatggataataaaggctggatgtctctgacctagggtgactgcagtctcaatttacatcttatgtccggacgtcccattcaatgtcgcattcattccanacaaaagcgtcccagtttagatgacngattatatgactgccctt

SEQ ID NO: 2775 - DNA, 443 bp, Homo sapiens
  misc_feature 3: n = A,T,C or G
ctncttagggcgaattggagctccccgcggtggcggccgaggtacaagcttcatttgccacaaaactcacaaaaaagtaattgattaaagaatatctcttttatgcaaaatatacattttaggatataatttaattgatattctactatatactgacattgctccttgatcattgaataaaaaaatactctcattgccagaattatgtttttgtaatatttataattgaggtaataatgataaaagacttaaactatgaataatgttggtgagttccatttaagctataacaatttcccagaactaaacaaatatgtgactaaacataggtcatttttgataaatgaatactaacaatttcacaacataattgacaagctgattacatcagtaatttataagaaaattatacaatcaagttcatagattcaaccaaaggaagt

SEQ ID NO: 2776 - DNA, 435 bp, Homo sapiens
  misc_feature 311: n = A,T,C or G
tcctatagggcgaattggagctccccgcggtggcggccgaggtacagccatccttgtcttcaagcactttgagaacattttagccattgatgtttacatgtggcacccacccatgcaagataggtttctgtatttatacattaaaataccaaaaaaaaagtatgaaatgccttcaaaaatgttcaaagcttgagagaaaagcttttttcattagtcaaggtgttttgatatggtattaaaataatatctaacaaaatgaaaaaaaaattctcttttctccatgaatgctgacactggggagaatggcaatnttaggctgtcaagagcatactaaataagtaaaatatctagaaatgcaatcgacttgcacgggatattgaaaattactggctttcagtcacttttggctatttcatactggcaggaaagtaaaaa

SEQ ID NO: 2777 - DNA, 428 bp, Homo sapiens
  misc_feature 314, 400, 403: n = A,T,C or G
ccgcggtggcggccgaggtacactagtatttaacctagacgtgaggaaggagtaggaaattttctggtgaatacagaagagcaaagaacagcaggtcagcaggaatgactaatgtttttctatgcatgtttaatggaatattcgtgtaggatattttgagtaggtaattggataatcagcatttgtaacttgcatcctagtagtccgactctcactaataagacttgtcaaagttccaagaatctgaaagtggatgataaatgtccatgtgtatcaccatccatgaccgaaagtcagcatccacagaacacagnattgggacagatgaacttaatagataaagatgaatatcggagttgttcctcttaaggggaatggatactctccatgaagctgtgtngantcacagctgcccagaaaaaagaaaa

SEQ ID NO: 2778 - DNA, 531 bp, Homo sapiens
  misc_feature 160, 166, 195, 202, 211, 219, 236, 237, 255, 258, 274, 284,291, 298, 300, 310, 324, 336, 338, 360, 368, 375, 381, 400,421, 446, 464, 469, 496, 515: n = A,T,C or G
acgcggtggcggccgaggtacagatctgggaactaaatattaaaaatgagtgtggctggatatatggagaatgttgggcccagaaggaaccgtagagatcagatattacaacagctttgttttgagggttaagaaatatgaaaaatgaatttgggtttantgaaancgcacaagttttaggggcagcaaggggcncatcaantcctcgacncctcctgncccccgttggattaatnntccttccaccaagacttnggnatgccctccatggttnattcaccagntaatttncccaatntnttggttattngatctggccaattntacttttgttgnanaaggcccattccaaaaggaatntttttccnttcggtncttggnttttttccctacttacatnttggggttaaaattggccttncaaccttttttgttggaaccatttncaattttttacaaaaaantcatngttaaaattccccccggttttccaaanaattaaaaaaattaattcnccaaccaaaaccaagg

SEQ ID NO: 2779 - DNA, 365 bp, Homo sapiens
  misc_feature 124: n = A,T,C or G
ggcgcacgatgtcgtgtaagcagggtatccttgtgccagcatttgcttctctgtgaaaacacagctgccgtcaacattttgcactttccagggcccttcggaattggaagtgcctgtagctaanctgtttcccctggagagtccagctgttctcctgatccggccctgcacacacacacccagccacaaattactaggatgtcaaacccaggtgatcaggatactctcacggactgccctgctcccccagggctctccctacagtgtaatcctaaagccaaacttcctttcagcagtggctggaagcaaactctgcagtcagaggtcatacccagcaggcttcaccatgcagacttgaatgttga

SEQ ID NO: 2780 - DNA, 409 bp, Homo sapiens
  misc_feature 183, 242, 265, 281, 342, 345, 395: n = A,T,C or G
acactacttagggcgaattggagctccccgcggtggcggccgcccgggcaggtactttttttttttttttttttttttttttggtcttaaataccactccattgtatatttatcaactatactctttgcttattagtggcatgatctttggtttgtttcttaacctctctgaacctctgtctnttcatctgtaaaatggaaaaaataatgcaccttccttgcaggatgacagtaaggataanaagtaaaatgagtaagccatggngcctggcacagagtanaactcaataaatggcatctagcattatttcccttcacacatacagacagattgtaagcttntanaaggcagaaaccagtatgcattttgccctaagcttccacatcaccacagngcctaatacccagt

SEQ ID NO: 2781 - DNA, 382 bp, Homo sapiens
aggtacttccaaaccctcctgttctttcctttttgttttccccaattttaacataaggcaaaagcagtaattgagcaattctatcacctggattggcactccggggaacagtggagctgatcactaactgaattccccctttataatctgaataaattaccccagtatgaatttggactcccttcaaatttagacttgatctccctcaaaggcctaccctcccttctggcagcgggccatatacccctctaggaatcttttgtgggggctttccagggagtaaaaagaccatttgggtggaacataaatctactgcggtgctgcctgctgtggcgcgggacagctgttggattgttgtaattggctgactccctgaagtggt

SEQ ID NO: 2782 - DNA, 403 bp, Homo sapiens
  misc_feature 211, 216, 362, 364: n = A,T,C or G
ccgcggtggcggccgaggtactttatagtttatggctggacattggaaaaaaaaaaaagccagaacaacatgtaatagataatatggttggctgcacacttccagactgatgaatgatgaatgcgatggactattgtatggagcacatcttcagcaagagggggaaatactcatcatttttggccagcagttgtttgatcaccaaacatcntgccngaatactcagcaaaccttcttagctcttgagaagtcaaagtccgggggaatttattcctggcaattttaattggaccccttatgtgagagcagcggctacccagctggggtggtggagcgaacccgtcactagatggacatgcatntnggcagagctcctggtaaccacctaagaggaatacacagg

SEQ ID NO: 2783 - DNA, 396 bp, Homo sapiens
  misc_feature 155: n = A,T,C or G
ggcgaattggagctccccgcggtggcggccgaggtacaatgcttcatttgccacaaaactcacaaaaaagtaattgattaaagaatatctcttttatgcaaaatatacattttaggatataatttaattgatattctactatatactgacattgntccttgatcattgaataaaaaaatactctcattgccagaattatgtttttgtaatatttataattgaggtaataatgataaaagacttaaactatgaataatgttggtgagtcccatttaagctataacaatttcccagaactaaacaaatatgttgactaaacataggtcatttttgataaatgaatactaacaattttcacaacataattgacaagctgattacatcaggtaatttata

SEQ ID NO: 2784 - DNA, 259 bp, Homo sapiens
  misc_feature 246: n = A,T,C or G
ccgggcaaggtacccatactgagaggaaacctataatgtcagtgatataattcatatatggttttcagaaaagactcctgaatgttagtaaacttttgttctttttgttcttccccgcgtactcaccacaggggagtaagttggtgggggggatgctgaagatgggacatggtttgagagcatcccagaggagtgctgggctgtggcctaaaatacaccatgggccctgttcacactgcactgctnagcttatcacact

SEQ ID NO: 2785 - DNA, 380 bp, Homo sapiens
  misc_feature 358, 371: n = A,T,C or G
ccgcggtggcggccgcccgggcaggtacttccaaaccctcccgttctttcctttttgttttccccaattttaacataaggcaaaagcagtaattgagcaattctatcacctggattggcactccggggaacagtggagctgatcactaactgaattccccctttataatctgaataaattaccccagtatgaatttggactcccttcaaatttggacttgatctccctcaaaggcctaccctcccttctggcagcgggccatatacccctctaggaatcttttgtgggggctttccagggagtaaaaagaccattttgggtggaacataaatctactgcggtgctgcctgctgtggcngcgggacagctgntggattgtt

SEQ ID NO: 2786 - DNA, 629 bp, Homo sapiens
  misc_feature 117, 165, 185, 188, 203, 212, 215, 226, 245, 248, 252, 254,256, 271, 281, 284, 292, 301, 304, 307, 308, 309, 311, 315,329, 335, 336, 344, 354, 358, 360, 380, 385, 410, 414, 450,459, 465, 482, 484, 492, 496, 515, 518, 530, 536, 542: n = A,T,C or G
  misc_feature 556, 575, 588, 594, 608, 629: n = A,T,C or G
ccgggcaggtacttgtgcatgaataaatttattcttcttttctgttgcagatataaatatttctgattgtgccattttgattacccaactaggaaaagagacagcagaggacagaanaatacacataagggcttttttggaaatgaaacacccttgaaaattatncaaaaaatggacgccacaanttnacaactttctttttntctttatanaangttttttcctncatcaattacaatatttgnagnccanananggaaggaaaaaaagnccaaaattcnttntagtatangggcattcnagngannngnaaanaatattggccgacncataannaatttggncttggggttnaaancnccaaggaggccaattctttntggcnccttaacccctcaaggttccttttntggnctctttccccgtaagtggaacccaggggtccccaangaaaggggncccttnctcaagggggttccaangnttggttcnaaangggttggatttggtttggnttngaaaattttggnttattngggggnttggttattaaggnggaaaaaaaggggggaagngggttaaaaaaantggggnatttttcaaaaagncccaaggggggggaaaccttn

SEQ ID NO: 2787 - DNA, 676 bp, Homo sapiens
  misc_feature 346, 456, 535, 542, 601, 606, 634: n = A,T,C or G
tcactatagggcgaattgggagctcccccgcggtggcggccgaggtaccaaaagagggcataataatcagtctcacagtaggggttcaccatcctccaagtgaaaaacattgttccgaatgggctttccacaggctacacacacaaaacaggaaacatgccaagtttgtttcaacgcattgatgacttctccaaggatcttcctttggcatcgaccacattcaggggcaaagaatttctcatagcacagctcacaatacagggctcctttctcctctacaaatccaatgtaggccattgtatttttgcagtgagcgcagttgaattcttctgggtgccaagatttncccagtgccactaagaatggtcctctgacagaagaaaaagaggccaactaagtttgagaataaaatttctagaagttaagcctggatatggacctcttttatgcaatgtncaaccaattaaatcttgctcaatttttcttcttaaggactgaactcatgggtggttgggtggtggtaaattcacaaganggacttntgcattgatgtgaaaagaaaaccgggagacgtgccacttaagggattcctttaagaaangggcnctccccaccctttttcccgcgtacctgnccgggccggccgccccggccaggtcctttttttttttttttt

SEQ ID NO: 2788 - DNA, 582 bp, Homo sapiens
  misc_feature 6, 475, 564, 582: n = A,T,C or G
gaaaanagaaaacaaaacaaaaggatgatcaagcagaactttggtaaggaagggtgaagcagagatacttaactcagggtggggacaacagcaatgaccttgtttgaaatgcagctcctgctctgtggctctctgtctctgctggggcatcagttcctttacttcttagttaaagcagttatgtcgatggtgcaatgcttttttggtgcagtgatttttacacagctggtttatctccagtatggaagctctctgcttaatcatcttgatttttctgggcttgttcccactctgcagatgtaagcatgacacctgtatctctctccccaggctctgatctaggacgacagtttctatgatgtgcccatctagagaaatactcaaattgcaactttaggaagagaaaaagagggccctgcaaaaggcatctacaggccccatgtgctgttcacctttcttatttatgggtgaaagngagtcctcatccatttattgggcaagttacaagccaagggaattatatgactaccacacacaccttgaggtcctggcccggccggccgntctaaaactagtgggatn

SEQ ID NO: 2789 - DNA, 468 bp, Homo sapiens
  misc_feature 410: n = A,T,C or G
ccgggcaggtacttccaaaccctcctgttctttcctttttgttttccccaattttaacataaggcaaaagcagtaattgagcaattctatcacctggattggcactccggggaacagtggagctgatcactaactgaatcccctttataatctgaataaattaccccagtatgaatttggactcccttcaaatttagacttgatctccctcaaaggcccaccctcccttctggcagcgggccatatacccctctaggaatcttttgtgggggctttccagggagtaaaaagaccatttgggtggaacataaatctactgcggtgctgcctgctgtggcgcgggacagctgttggattgttgtaattggctgactccctgaagtggtggtattttctgtaggggttggtgnccttgaaaaccctgaggaacaaacagtttaactgggaatgccccaatttgttgggggg

SEQ ID NO: 2790 - DNA, 477 bp, Homo sapiens
  misc_feature 370, 460: n = A,T,C or G
cgaggtacatttggtggaactgagaaatggcataacaccaaatttaatatatgtcagatgttactatgattatcattcaatctcatagttttgtcatggcccaatttatcctcacttgtgcctcaacaaattgaactgtaacaaaggaatctctggtcctgggtaatggctgagcaccactgagcatttccattccagttggcttcttgggtttgctagctgcatcactagtcatcttaaataaatgaagttttaacatttccccagtgatttttttatctcacctttgaagatctatgttatgtgattaaataaagaacttgagaagaacaggtttcattaaacataaagtcaatgtagacgcaaattntctggatgggcaatacttatgttcacaggaaatgctttaaaatatgcagaatataattaaatgggcaatggacaaagtgaaaaacttaanactttttttttttttgg

SEQ ID NO: 2791 - DNA, 521 bp, Homo sapiens
  misc_feature 494, 505: n = A,T,C or G
ccgcggtggcggccgaggtactggactgagtagaaatcaattactttaatattggatgagagagtgattgattgaagatcaggtttttaacctctttttttgttctccttctcacagggagagtcccgtattctcagagtaaaagttgtttctggaattgatctcgccaaaaaggacatctttggagccaggtatgctggctttgtttttatttctgtggacttctgaaaaattgacaagcagttttcaaattcaggcacgcatcagaatcacctggaggacttcttaagacaaagctggctgggccccacctgcagggattctgatttaggaagtgatgctggcccagctggttccaggagcacattttgcacagggcttctggacttaccatcacaacagtagttaacagcctgttcttcacatgggctaatttcatgagaatagcttctggtgttgtattctcaagtagaaaaatcagtggtgggactatngctctgcttantttaatacttcaaaaa

SEQ ID NO: 2792 - DNA, 413 bp, Homo sapiens
gggcgaattggagctccccgcggtggcggccgaggtctcaaatttactacaaaattaataatagtaaatgtaaaatatgtatttatacagccttttgcagacttatgaactatctcaaattcacgaatcctattttttaaatacaggttttaagtttcaaccacttgtatcaccaaattttgagacttaactcccatggttaagagatttccaaagctgtgttcacacctgtagtcccagctacactgaaagctaaggcgggaggaccacatgagcccaggagttccagactagccttgctctatttaaagagcaagactccactgccaaaaaaaaggaaaaacaaagaagagaattccataaattacttggcttcttatattccatctcttcagtgaaacagtacctgcccg

SEQ ID NO: 2793 - DNA, 441 bp, Homo sapiens
actcactataggggcgaattggagctccccgcggtggcggccgaggtacctagcccattccctctagttctccacctattcagtgcatctcattaagccaccctcacaaatttccttttatgcttctcttttataatactatctctgcactgcctttttttttaaggcccagaaaaacaggttctttgtgggtaggacagttcctggtgcacacctttcattcagcactgtaaagatgcaaagtggcaactgagatattaggattcaaaacctcagcactctggatttttaccctgggcttggggaatcaaattttctttttatgaatttgctagctctgattcttctgtgacaccacagtagaaaatcctatcctaattcttaatggtattgttcagaatcctataacttccccttacccatctagtagtttaagaatac

SEQ ID NO: 2794 - DNA, 537 bp, Homo sapiens
cactactatgggcgaattggagctccccgcggtggcggccgaggtcgtccatcttccagctgcttgccagcaaagatcagtctctgctgatcaggaggaattccttccttatcctggatcttggcctttacattttctatcgtatccgagggttcaacctcgagggtgatggtcttcccgtaagggttttcacgaaaatctgcattttggtggcggctccaccgcagatggcggatcgaaaagccccgcgtacattgctttagtgccctgtggttggtttacagtagttcccagaattacctaggccctagacaatccaaagacactgccctagagaaatgaaggcagtgcagggcccatcaccacacattggcatttagagaatatgtgtttcaattactgaggaaaaatcacttcggttacctctatgagctgccataggagcaaataaagtatcactggttttggcactacaggggatacaggaaagtacctgcccgggcggccgaggtacttttttttttttttttttttttg

SEQ ID NO: 2795 - DNA, 429 bp, Homo sapiens
  misc_feature 1, 293, 309, 373, 390, 398, 402: n = A,T,C or G
nggagctccccgcggtggcggccgaggtacagatctcatcaggtatgagggcagtctctgacgcgaacgtctcttcctcgtggtttttattgtcagtattcacacgaagtttaagtctcctagtgggcacccagacgggattgacgatctcctggtaaaacacaagcataccctcttccccacgttataattgttccaggttcccaggtattggtttgggagtttttccatgacactggcttgccttcgtttagggagaaatttttttgcctggtattaatgggccattttancctgccagttcaagangtatttgtttttttagggaaacattttaaagaaaaaggccttaaaaccaattggcttaaaatantaaatttgggggaggtngggggganggtnagtttaaaaattattggcctttttaaa

SEQ ID NO: 2796 - DNA, 350 bp, Homo sapiens
  misc_feature 8, 154, 274, 304: n = A,T,C or G
gtggcggncgaggtacctgtcagtgttcaatatttaacaaactccagttaaacaggtaagaggtcagcagtagcttataggccttggttctattatccatgtgcccaactgcagccatcgtgggctggtgttaaaattttcctttcaattgtcntttttctaataattgcaatcagtgagaggagaagaaaaagttcaagggaatgacctgacctttcaccatcctacacaggagatgactgatgacatggattcatacactaatgtatatcgngtattctccaaagaccctcaaaaatcacangaagttttgaaaaattctgagatcataaactggaaacagaaactcc

SEQ ID NO: 2797 - DNA, 394 bp, Homo sapiens
  misc_feature 131, 142, 164, 168, 202, 295, 307, 313, 323, 324, 343, 368,369: n = A,T,C or G
ggcgaattggagctccccgcggtggcggccgcccgggcaggtactttttttttttttttttttttagcagtcaactcttgtttatcctgtcattttaattgtaatgatggccctgtgtgtttctggctaanaatttgtggtntcagcatattaggatagtattntatntaggttaaccttcaagtaatactaaattttattnaatagcatgaatcaaattggatatccccaaccttatggccagtggggccagtggtatggaaatgcacaacaaattggccagcatatgcctaanggttggcaagtncctgcntatggaatgnntggccaggcatggaaccancaagggatttagatcagacacagtnnttctgcaccatggatgggaccaaat

SEQ ID NO: 2798 - DNA, 348 bp, Homo sapiens
  misc_feature 328: n = A,T,C or G
ccgcggtggcggccgaggacgcggggggcttggggaggagctaggtttgggcttggagttgggccctgaatggcgctttgctgtgaatctccgcggggaggctcttccaaccaggggctgagcttctgcgctgtggagaagccaggctcctgatgtcttattgggggccatatctagagtgatgccctagttcgcgtggctgaagatggcttgccaccctacctgctgattgcattctgactggatgggtcatcagttaaggaagttgaaacctaccaccggacacgtgctttaagatctttgagaaaagatgcacagaattcttcanattctagttttgagaagaaa

SEQ ID NO: 2799 - DNA, 400 bp, Homo sapiens
ctacttagggcgaattggagctccccgcggtggcggccgccatcttgggtcatcgatgagcctcgccctgtgcctggtcccgcttgtgagggaaggacattagaaaatgaattgatgtgttccttaaaggatgggcaggaaaacagatcctgttgtggatatttatttgaacgggattacagatttgaaatgaagtcacaaagtgcactgtagcacagtggtcccaggcatgcatttggggccagagttcctggattgaaaggcgtctctattcaccagccatgtgcccttggggaaaagctcaatcctgctcatctgtaaaatgggggggtgttgacaacaatgacagtgtgtggcaagtattgaataaatgcaccaaagagcacttaaagcagtgctt

SEQ ID NO: 2800 - DNA, 404 bp, Homo sapiens
  misc_feature 394: n = A,T,C or G
cactacttagggcaattggagctccccgcggtggcggccgcccgggcaggtactctttctctatcacaattcccctgtctcgatgaattgactctgtctaggcaggggcaaggtgaaccccttaggcggtaacagaacactgcagaagagtgcagtggggcgcctcagcaagaggactaagtgtgctgccatggatttttctttagaggtatttatggaccttaaggcaggagcttaggatagtaaaaagagtttcggcatggcatttcagagatgtatataaattttagttacttgtaaaagttgaaagaggcctggaaccagactttagatactagggaaagtttaatttacttctgaattcccagaaaagggagtttcgcctccgtctggncccgtttggg

SEQ ID NO: 2801 - DNA, 372 bp, Homo sapiens
  misc_feature 343: n = A,T,C or G
ccgcggtggcggccgaggtacgcggggacatcaatgcagagtccctctgtgaatttacaacacccaacacccatgagttcagtccttaagaaggaaaattgagcaagtatttaattggttggacattgcataaaagaggtccatatccaggctaactctagaaattttattctcaaacttagttggcctctttttcttctgtcagaggaccattcttagtggcactggggaaatcttggcacccagaagaattcaactgcgctcactgcaaaaatacaatggcctacattggattttgtagaggcgaaaggagccctgtattgtgagctgtgctatgagaaantctttgcccctgaatgtggtccgatgcca

SEQ ID NO: 2802 - DNA, 304 bp, Homo sapiens
  misc_feature 3, 128, 130, 153, 238, 265, 279, 299: n = A,T,C or G
ctnctatagggcgaattggagctccccgcggtggcggccgaggtactttttttttttttttttttttttttgggggggggcaatatcaaatgaaagatgaggcaaagaaaaatttcctcacttgtgantncatgtcctgcaaaatgtcactgnttactttaacctaaagcccaaattactcatttcatataggcatttttacttctatacattgctgttgactgacgtgcaatatttngctgctgaaaaagcctgcagaaaaagnattggcatggtgcnataactctgtaatcattaantctct

SEQ ID NO: 2803 - DNA, 401 bp, Homo sapiens
  misc_feature 127, 133, 143, 163, 166, 175, 205, 216, 218, 223, 253, 273,275, 317, 361: n = A,T,C or G
ccgggcacggtacaggagtgatgccaggcgttcatctccccactgagctcctgctgagtgtttgcctggggccaggtcctccttccgggaagtcattttagctggaaagaacagggtgggggccggntggcangggatcacancatgagcgtttgagggcttngtnaggggcatntgaggagcctctaaaggactctacatttangaatgacagantnaaacnatttaacaaagccctaaaggtccctgccangaaagaatgagccccatgtntnaccataagcaacttcttagaaacataacccacccctgtcatnccagcactttgggaggccaaggagggaggattgcttgaggccangagctcgggatcaacctggtcaacatggtgagaccccatt

SEQ ID NO: 2804 - DNA, 376 bp, Homo sapiens
ccgcggtggcggccgaggtacgcggggacatcaatgcagagtccctctgtgaatttacaacacccaacacccatgagttcagtccttaagaaggaagattgagcaagtatttaattggttggacattgcataaaagaggtccatatccaggctaactctagaaattttattctcaaacttagttggcccctttttcttctgtcagaggaccattcttagtggcacttggggaaatcttggcacccagaagaattcaactgcgctcactgcaaaaatacaatggcctacattggatttgtagaggagaaaggagccctgtattgtgagctgtgctatgagaaattctttgcccctgaatgtggttcgatgccaaagg

SEQ ID NO: 2805 - DNA, 400 bp, Homo sapiens
  misc_feature 306: n = A,T,C or G
ccgcggtggcggccgaggtacgcgggggagtgccctttcttgaaggaatcccttaagtgcacgtctcccgttttcttttcacatcaatgcagagtccctctgtgaatttacaacacccaacacccatgagttcagtccttaagaaggaaaattgagcaagtatttaattggttggacattgcataaaagaggtccatatccaggctaactctagaaattttattctcaaacttagttggcctcttttttttctgtcagaggaccattcttagtggcactggggaaatcttggcacccagaagaatncaactgcgctcactgcaaaaatacaatggcctacattggatttgtagaggagaaaggagccctgtattgtgagcccgtgctatgagaaattctt

SEQ ID NO: 2806 - DNA, 414 bp, Homo sapiens
ccgcggtggcggccgaggtaccgcacacaattgtatgcgctgcactttcatctgactggaagcgcagtgggcttacaccagcatcaacacaaacacgtgagcagtgccttgcactacaacagacacgatatccctaggggacagcactgttttcagccccattataatctcatgggactactgttacagatgaggtccaccattgaccaaaacatgtggagcacggcaattaattctggatttggatggggacacaaaataagcacagctctggcaggtctaatcaagattaagagagaaaagcaactaaaacatctgagaaaacagatacagagggcataacaccacacagaaaatactacatacagctgagctataatttttaatttgacttgctggaaattactaaattac

SEQ ID NO: 2807 - DNA, 383 bp, Homo sapiens
cctatacgactacttagggcgaattggagctccccgcggtggcggccgaggtaccagttgtaaaattaccaggaaccgccatgcctcaagatcgccctgttttctggcttcatcaatgactgcatgcagtgcaccaccctgtccactacgtgatgctgtaggattaagtctcacagtgggcggctgaggatacagcgccgcgtcctgtgttgctggtgaattacacgccatcgctgtgggttgctggtatggtgccgtgctatttggcacaggacacaccgcttgaggtctgtattgaacctctgaaggaggccgatactgaagctcggttggcagccggtattgataaactaccagcggttgggtcttattttctaccggct

SEQ ID NO: 2808 - DNA, 386 bp, Homo sapiens
aggtaccaaggcccaatcaccccaaacagtgacaggaacataatttcctgttgggaccagttctcggaattttgcaccaacatgatcccatagttccacatctaacgttcccttttcaggaaaccaaggacagtgttcttccactgccctgaatagggtgaccatattttccatgggaacccgaactcccccattttaacaggaatttaatatagcagagataagcataatgtttagactctgcgtgacccatagttaccccggagaatacacagacaactcaccaatcgttggggagccaaacaagcatttctgtggactggaccgatgaacatttctccgcacctaccaaagggaatcggggttcccacatgcacttaggaaaa

SEQ ID NO: 2809 - DNA, 555 bp, Homo sapiens
  misc_feature 433, 493, 508, 546: n = A,T,C or G
ctatagggcgaattggagctccccgcggtggcggccgaggtacttttttttttttttttttttgtaaatctggaaccaaggattttaataccaatgataatataatgtttgcccaacattaagagtcaaatcaaatcatagtttatctattacggctctaaaccaattacaaaatattacaaaaaataataacgcttttctgtaaaatatctgtattggctgggcatggtggttcacgcctataatcctggcactttcagaggccaaggtgagtgaatcgcttgagtccaggagttcaagacaagcctacgcaacgtagcaaaactccacctctacaaaaaataccaaaattagccaggcatggtgatgtgcacctgtagtcccagctacttaagaggctgaggcgggaggatcgtttgagccctggaggcanaggctgcagtgagccaagatcataccacctggcctcaaaaaaaaaaaaaatctttattanacctgggcatcacanggtagcaacatttgttttcttatgaccaaattaatggncaaattggt

SEQ ID NO: 2810 - DNA, 464 bp, Homo sapiens
  misc_feature 407, 434: n = A,T,C or G
cgaggtacttccaaaccctcctgttctttcctttttgttttccccaattttaacataaggcaaaagcagtaattgagcaattctatcacctggattggcactccggggaacagtggagctgatcactaactgaattcccctttataatctgaataaattaccccagtatgaatttggactcccttcaaatttagacttgatctccctcaaaggcctaccctcccttctggcagcgggccatatacccctctaggaatcttttgtgggggctttccagggagtaaaaagaccatttgggtggaacataaatctactgcggtgctgcctgctgtggcgcgagacagctgttggattgttgtaattggctgactccctgaagtggtggtattttctgtaggggttggtgnccttgaaaaccctgaggaacaaacagnttaactgggaatgccccaatttggtggggg

SEQ ID NO: 2811 - DNA, 613 bp, Homo sapiens
  misc_feature 535, 579, 588: n = A,T,C or G
cgcggtggcggccgcccgggcaggtaccctggtcattgactggcttgttcattctccccatggactctgacttcttgagggcagcgtgtttctgctacaatagggacaatgtaagggaccagagcacacagtaactaatgtcttacaggatctcccccaagctcatggctttgagcatcatccctattctgacaactttcaagtctgtcatttcagttcaggctctgccctgagctgtggcggtcgtaacacaaacatccacctttctcacccagcatctccacttggatgtttgacaggtcaaacttaatgtgcttctgaaccaaactcctggcttcctctccaccctccacccccacccaaatctgcttctcctatatctttcccattttggttagcagtaactccatccttcctgttgcttggaccaagccttgagtcatccttgactcctctcttctttacacttgacatgaaatcctttaggaaatcttgccagcttctaaatatacccaaaacctggccccaccctagngtctggatcactaccaccatgctccaagccacttatcccatctnacctggatngtggcaatggctggaactggcctcc

SEQ ID NO: 2812 - DNA, 605 bp, Homo sapiens
  misc_feature 531, 557, 574, 599: n = A,T,C or G
ccgcggtggcggccgaggtacgaaaaaatcaggctactaagcccactgttaatatagacgcagaccaattgttaggaacaggtccaaattggagcaccattaaccaacaatcagtgatgcagaatgaggctattgaacaagtaagggctatttgctcaggcctggggaaaaattcaggacccaggaacagctttccctattaattcaattagacaaggctctaaagagccatatcctgctttgtggcaagattcaagatgctgctcaaaagtctattacagatgacaatgcccgaaaagttattgtagaattaatggcctatgaaaatgcaaatccagaatgtcagtcggccataaagccattaaaaggaaaagttccagcaggagttgatgtaattacagaatatgtgaaggcttgtgatgggattggaggagctatgcataaggcaatgctaatggctcaagcaatgagggggctcactctaggaggacaagttagaacatttgggaaaaaatgttataattgtggtcnaatcggtcatctgaaaaaggagttgnccaagctttaattaacngaattttattaatcaagcttttacngccaaa

SEQ ID NO: 2813 - DNA, 521 bp, Homo sapiens
  misc_feature 413: n = A,T,C or G
cgaggtcgcggggagaaatagcaagtgccgagaagctggcatcagaaaaacagaggggagatttgtgtggctgcagcccgagggagaccaggaagatctgcatggtgggaaggacctgatgatacagaggtctgtaggccatggaatgggtttggaattttattcaaagagctatgggaagtgactagaaggtttaaagttggggaagaggttttgtgtttctgttatatttgtgttttatacaaattactctggttgctgtgttgataggacagcagaagggtaggagcagggacaccagttaagttattgcaatggttaaggtgagaggtggtggctgggcctagcctttttggagtgaacaagctatttgcttggcttccatgatccttctccctccactggaatggaangtacctgcccgggccggccgaggtacttacaaaagttacaaccatttgcttccttaacattttccatgttaaagttcatcattgtagatatgatcagatttatcattt

SEQ ID NO: 2814 - DNA, 617 bp, Homo sapiens
  misc_feature 431, 483, 496, 503, 530, 536, 546, 580, 584, 596, 598: n = A,T,C or G
cgaggtacttcgaagtttatccagaagcaaatttaactatgtcttaaacttgtttcccacgctgatgaagctaagttttcctgctttttgtttagtatctttgttgttatttgtggatgattcaaataattcccgtataaacttatctctggattcacatattaaggattcaagagacatatgtaaagcatcattatttttctccacaaactgggtctgaaaaataaatcaaacaggaatgtttctgtccatcttgtgataacatcacttaacatggctctgtccaaaggaactttctgtgatgacagaaatgttctgtatctgcactgccaacgccgtcaccactagtcagtgtggacactggggccctgaagtgtccccgcggtacctgcccgggcgggccgaggtactatagatatttggcttggaanaaaaacctttgatatggttcaaaattccacgttggctttggaaaggaaactngaaaattacagantctttgnccttccccacaaagaaccttaatctancaggtnggaatatggnggacctcactggtatttttcagtctcctttaagngacnaaggacctccanancctcccaaaaaaaaaaaag

SEQ ID NO: 2815 - DNA, 538 bp, Homo sapiens
ccgcggtggcggcccgcccgggcaggtacaggttgctgtaggagcccttaatctatgagatcttgacagattgcttgctttcttctttccaccatgggagaatgcaacaaggtcttcaccagatggccgaacagatccaagtgtcatgaccttggactgtctcctccagaaccataagccaaataaatttcttttcttcataaatttcccagtctgtggtatcttgaaatcaactgaaatcagtcactaaggaacaaaattctccagagaaactgtttcttccttgaatctgaatgcctgactgtcaatcatttagcactgaaacaaggagagcctctctgaatgttgagcagccaagagagctgcccacactggacatcaatcagcagcagggcctgtcctcagggtgactccgtttaccagttctggaatgactgaagggccttgcatcagcagacaaatctgattagtggtggtagccatccaggctgacttttatgtctgctcagtcattggtacctcggccgctctagaacta

SEQ ID NO: 2816 - DNA, 371 bp, Homo sapiens
  misc_feature 188: n = A,T,C or G
ccaccgcggtggcggcccgaggtacaaagtccctgaggcaaaagcatgcttgctgtgttctaggaaaagcaaggaagacagcatgtctatagcagtgggaggtggaaggataataaacagtaggtgaggttagaggggaccaaatcatgtattttctccagaggttcccaaccttggctgcacattanatttattctaaggagcttttaaaaaataccaatgactgggtcccagcctagagtgattaaatcagaatctctggaggtagacttgagaatctgatgtttgcaagtttcctaggcaagtcaaggctgaggaagactgctgcaggccattgtaagagccaggcgttgatctcattcaacctttcc

SEQ ID NO: 2817 - DNA, 450 bp, Homo sapiens
  misc_feature 422: n = A,T,C or G
ccgcggtggcggccgcccgggcaggtactctttctcttcatttctcagccggctgacacttacagaaaatagaaagaacgtgcgttgaaatattaggggcaggttcccccaatatctggcgcccaacgtggttttctttttcctaagtgcatgtgggaacccgattccctttggtaggtgcggagaaatgttcatcggtccagtccacagaaatgcttgtttggctccccaacgattggtgagttgtctgtgtattctccggggtaactatgggtcacgcagagtctaaacattatgcttatctctgctatattaaattcctgttaaaatgggggagttccgggttcccatggaaaaatatggtcaccctattcagggcagtggaagaacactgtcctttgggtttcctgaaaaagggaacnttagatgtggaaactatgggatcatgtt

SEQ ID NO: 2818 - DNA, 470 bp, Homo sapiens
  misc_feature 249, 334, 370, 405, 468: n = A,T,C or G
cgaattgaagctccccgcggtggcggccgaggtactttttttttttttttttttttttgcaatggtcatgtttcatgttcttaatcaagaagatcaaaataaagcgattctttcagaatgacagataaaatgatagaggtttgaaggtaaatgtaacacagtaactttggaacccagagcccctaggaactcataggatatttggccactgttcacatgacaaacagaaacatgacccccttttaaatnacatgactgaaatttgaatttcagtcttggttttcattacagtttttaaaaagttgtcaaatactttaaatgtttggttttgcanaaatatagggctaaacaaccagcatattttttgtgngcttttgcaataatccagaaataaaattggttttnttaaggtaagtaaccaggtcgtttttttgtcttagccaaagttcccttagttaggggtaaganaa

SEQ ID NO: 2819 - DNA, 481 bp, Homo sapiens
  misc_feature 63, 257, 479: n = A,T,C or G
ctacttagggcgaattggagctccccgcggtggcggccgaggtactattattcccatttacangataagaaaactaaaacacagcaattctcaaatgtttgtttccttactctctggtttcctttgcttgaacaaaaaagaaaaaagaaaaaggaaaaaaatccacttcatttaggaagtctttcccacgtaatacagacccaaattatttctttgagcttccctccaacattcctccactacaatgtatgattcanaaggggaaaagggctgtgatactacaaataaatttaaaaaagcatcaccaaagaaaactagacaaagaacacaaaaaggctccaacatttgaacgtgctcaaacaaataactggaaaagatttttctgaatggtgaatattgtgccaggtattgtcaagaggtcaggaaatggccactcccattcactattggagggaagtgaaaaatcaacaccaactttnta

SEQ ID NO: 2820 - DNA, 439 bp, Homo sapiens
cttagggcgaattggagctccccgcggtggcggccgaggtaccgactcctcagaaactggcatgccaaatcaaaatgggtctggttcaatcctccctaatggcaatgtaaacccctctaactaatcccacttctcctaattatctttttctccttacgaacctaaaaatctcaccatttctattagcctgaaaataacatccctctgttcttctcttcctccttcagcactggatctcacttacaataggttttatttaataattatcttccttacactttctgtctcaccagtttccccttaaactgatttacctgctacacaaaattattcttattgggcttatgtgccttttcctccacttattcgacctctcacctggatggatgctcctgcagaaatctatactaacggatagtgtgtggatgcctggaactac

SEQ ID NO: 2821 - DNA, 447 bp, Homo sapiens
  misc_feature 9: n = A,T,C or G
cttagggcnaattggagctccccgcggtggcggccgcccgggcaggtactatagattatttgtcttgaagaagagctttgatatgtttcaaaattcgacgttggctttggaaggaaactgtaaatttacagatctttgtccttccccacaaagagccttaatctcacaggttggattatgtggaactcactgctatttttcagttctcctttaagtgactaaggaacatccagatacttccaaaaaaaaaaaaagtctaagtttttcactttgtccattgccatttaattatcttctgcatattttaaagcatttcctgtgaacataagtattgcccatccagaaaatttgcgtctacattgactttatgtttaatgaaacctgttcttctcaagttctttatttaatcacataacatagtatcttcaaagggtgagataaaaaaaa

SEQ ID NO: 2822 - DNA, 424 bp, Homo sapiens
  misc_feature 405: n = A,T,C or G
cttagggcgaattggagctccccgcggtggcggccgaggtacatggtttgccaaccctgtattatgtttatagcatttgttttacaaaatatacctgattctgaaaaaatgaaaaatggttactataggctagatagtaggtagttaagtcctataactactagtaggtagttataggacttaattaacagatagatatgatgtgacaattcagtttaagtgcaactttcagtttctatcttaactataacttgagagattaatttagaattacaaatgtgtgtatatatatatatgagcatatgtatacataacatatttacacacaaggcacacatactatgagcaccctgcagtttgtaggcatttttacatgcgaatgttattggaacaggatagggcatnaccggggaagaaattttgc

SEQ ID NO: 2823 - DNA, 443 bp, Homo sapiens
  misc_feature 367: n = A,T,C or G
actacttagggcgaattggagctccccgcggtggcggccgaggtacttaatcctggttggtttacccattctaaattatttatgtgagatagctatctatttggaaaaaagtaaagtgaaagtcttacctcaatccacactcaaaaatagtttactatatgacagatctatggcaggcagatttgatggctcaatgaactccaccctcccagtgttcacacctttatgtagttcccacttacagggagccaaaggtccgtgggacgtgaccaactcagcattccactggaggctatatgatcaaacagtaaactgtttatcatgaatgcaggatgtgagcaaactcaccattgctcctgccgacagnaaggttttctggaggcaatcactccctggtgcctggaggttatctactgcaacatttagaggaatgtagtcttgca

SEQ ID NO: 2824 - DNA, 440 bp, Homo sapiens
  misc_feature 407: n = A,T,C or G
cttagggcgaattggagctccccgcggtggcggccgaggtacgcggggagtcacagaggaagccatttccagagaggaacaaccgtgtagactgctttcctgggagtcaagttaaaacttctctcctgtgaccttgtcacccggcagtggaaagttacccttggctgcagccacgacttccgcatactcttcagaacttgctctgcccttgagttttccagctttcctttaatgcactaaacctttaatattgtattctcctaaatgagacgtctcgcatttgagcaggtaacactcgggagagtcccgtattctcagagtaaaggttgtttctggaattgatctcgccaaaaaggacatctttggagccagattggataaccgagccgcgactccacttgaacatntggagcagttggcccgccgtgggaaaacagcaa

SEQ ID NO: 2825 - DNA, 439 bp, Homo sapiens
ccgcggtggcggccgcccgggcaggtaccagttgtaaaattaccaggaaccgccatgcctcaagatcgccctgttttctggcttcatcaatgactgcatgcagtgcaccaccctgtccactacgtgatgctgtaggattaagtctcacagtgggcggctgaggatacagcgccgcgtcctgtgttgctggtgaattagacgccatcgctgtgggttgctggtatggtgccgtgctatttggcacaggacacaccgcttgaggtctgtattgaacctctgaaggaggccgatactgaagctcggttggcagccggtattgataaactaccagcggttgggtcttattttctaccggctgatattgtggatactgtatctgagttggcattgccgggaataggagactctgtccctttctacttgattttctcttggggtt

SEQ ID NO: 2826 - DNA, 444 bp, Homo sapiens
  misc_feature 3: n = A,T,C or G
ctncttagggcgaattggagctccccgcggtggcggccgcccgggcaggtacctctccaattcgtcatctgggtggcctgtctcagcccagcttccaagcttgcttttattggtggcatagagcttcaggatatcttccgtaacaaagaggagtgctcccgaatgctctaccttcactgaatttgaaaatgcagctgctcttatcccctcacctaaactttcttgaaaacctgagagaaagccaagaaagcaatattgtcagacatgcagttctctacttacactgctcacacctgattaatgcctcagtgcctagtagttctcaaagttgagtttacaccacaatcagctatagtccttggcacaccacagattgctccacctctcccagctctgagaatttcaagggaatttacatttctaatgaagctcttcaggtgatgc

SEQ ID NO: 2827 - DNA, 487 bp, Homo sapiens
  misc_feature 322, 324, 341, 350, 392, 398, 429, 477: n = A,T,C or G
ggagctccccgcggtggcggccgcccgggcaggtactatagattatttgtcttgaagaagagctttgatatgtttcaaaattcgacgttggctttggaaggaaactgtaaatttacagatctttgtccttccccacaaagagccttaatctcacaggttggattatgtggaactcactgctatttttcagttctcctttaagtgactaaggaacatccagatacttccaaaaaaaaaaaaaaaaagtctaagtttttcactttgtccattgccattttaattatcttctgcatattttaaagcatttcctgtgaaacataantnttgcccatccagaaaanttttgcgtnctacattggattttatgtttaaatgaaaacctgttcttctcnagttcntttatttaatccccataacattagtatcttnaaaggtgagaataaaaaaaattcactgggagaaatgttaaaaccttcnatttatttta

SEQ ID NO: 2828 - DNA, 415 bp, Homo sapiens
  misc_feature 135, 295: n = A,T,C or G
ccgcggtggcggccgaggtacttttttttttttttttcgagtgtgtgtgagagacagacagggtcttatgttgtccaggctggctcagactcctaggattaaggatcttcccatctcagcttccctagtagctgngattctttatctattctttaaaccgcaacaaacgttggctgaacatctacaatgtggcaggagacatgggaaaaaacaaagatgagtaagataaggttccacacccaaggagcttacaatgcagaggaagaaacagacatgttatgtgatggtgctattngttagagagcccctaatccagctccctcagtctgacttaggtgtccacttggaagctgaacataccgaatgggataacagccagacacctatataacaggaaccatggcttaaacaaccg

SEQ ID NO: 2829 - DNA, 464 bp, Homo sapiens
  misc_feature 412: n = A,T,C or G
aattgagctccccgcggtggcggccgcccgggcaggtacttccaaccctcctgttctttcctttttgttttccccaattttaacataaggcaaaagcggtaattgagcaattctatcacctggattggcactccggggaacagtggagctgatcactaactgaattccccctttataatctgaataaattaccccagtatgaatttggactcccttcaaatttagacttgatctccctcaaaggcctaccctcccttctggcagcgggccatatacccctctaggaatcttttgtgggggctttccagggagtaaaaagaccatttgggtggaacataaatctactgcggtgctgcctgctgtggcgcgggacagctgttggatttgttgtaattggctgactccctgaagnggtggtattttctgtaggggttgttgtccttgaaaaccctgaggaacaaaca

SEQ ID NO: 2830 - DNA, 445 bp, Homo sapiens
cactacttagggcgaattggagctccccgcggtggcggccgaggtaccttccattccagtggagggagaaggatcatggaagccaagcaaatagcttgttcactccaaaaaggcctaggcccagccaccacctctcaccttaaccattgcaataacttaactggtgtccctgctcctacccttctgctgtcctatcaacacagcaaccagagtaatttgtataaaacacaaatataacagaaacacaaaacctcttccccaactttaaaccttctagtcacttcccatagctctttgaataaaattccaaacccattcccatggcctacagacctctgtatcatcaggtccttcccaccatgcagatcttcctggtctccctcggctgcagccacacaaatctcccctctgtttttctgatgccagcttctcggcacttgctatt

SEQ ID NO: 2831 - DNA, 442 bp, Homo sapiens
tagggcgaattggagctccccgcggtggcggccgaggtacatctctagatgatcacgaatgtcaaatatcacactacactgtgatatggggattccccttgggggttttcatgtgtatagggtgcctgcggctacactaaacatcttaaagctaccacaatgttcacttcatatttttgctttttataggctttcttggtctcctcctatgttcccatcattttcttgctttgaatctgtaagaatcgagttgaatcttctccattttaaattttccataggctgagaaactgtttagccaagtttggataaaattgtatccaaagtaagagtatacaagctatgggcaagtccaaaatcaagctgttcacaggaccatgttctctctaaaggttctaggagagaatccctcatttccttccagcttctgggtggctgctgg

SEQ ID NO: 2832 - DNA, 449 bp, Homo sapiens
  misc_feature 173, 222, 315, 364: n = A,T,C or G
ccgcggtggcggccgaggtacgcggggggtgacacacacacacacacacagcacctgcacgcagatgcacacatctctagtcaaatgaggctctcagctttttgataggggctttttgatacgtgtataaccaatactttattctcactgtagtcaaggactcattgcaattnagaaatgagaagctgatccggaactccactacagctcaaagaaattctngaatgttctcacctattaacagttattaaaatggaagaagctggggatgaaattgtgagcaatgccatctcctacgctctatacaaagccttnagcaccagtgagcaagacaaggataactggaatgggcagctgaagcttntgctggagtggaaccagctggacttagccaatgatgagattttcaccaatgaccgccgatggggaggtaagcacgaagctctcct

SEQ ID NO: 2833 - DNA, 411 bp, Homo sapiens
gagctccccgcggtggcggccgaggtacatttaatctatagccccacacagataaatagttagaaatggagattactcatcttgtcagataattatggatattattctttgatactaaatttgacaagggaatgcacaatatgggtttgaaatcaagtcaaagaacactttgtacgcggggattccaggctcttctgtgcctgtgggactacattctctgtgccgggcttagagaacacgaagagggagccatctgccacactctggaggctgaagcctgcaccagtgctgctcgcctcactgtggtaggtgggtggtgatgggaactgcagatcggccagagtggtagaaaaagttgctgcagggtttttctggctttgcctgcccagctgctccatgcctggctaggag

SEQ ID NO: 2834 - DNA, 432 bp, Homo sapiens
aattggagctccccgcggtggcggccgaggtactatagattatttgtcttgaagaagagctttgatatgtttcaaaattcgacgttggctttggaaggaaactgtaaatttacagatctttgtccttccccacaaagagccttaatctcacaggttggattatgtggaactcactgctatttttcagttctcctttaagtgactaaggaacatccagatacttccaaaaaaaaaaaagtctaagtttttcactttgtccattgccatttaattatcttctgcatattttaaagcatttcctgtgaacataagtattgcccatccagaaaatttgcgtctacattgattttatgtttaatgaaacctgttcttctcaagttctttatttaatcacataacataggtatcttcaaaggggagataaaaaaatca

SEQ ID NO: 2835 - DNA, 363 bp, Homo sapiens
ccgggcaggtacttcatcgcgtttggagcgatgtgtccattgataggcggttagtaaatgtttgaaaaattggtttatgttatttactcttctttcccttttttcattcttttcaatttctttgcaccctttccccttctttcctttttaatgaaagttttagtaagcaaaattattagcatacccaacaatggtttgctttccctccaacctgttggtagtgagtgagtagttaattcacattttattccataaaacgttttactttttctccagagtaattaagtagaaaatatggctcttggccaggcacggtggctcttgcctgtaatctctgcacgttgggaggctgaggtgggtgga

SEQ ID NO: 2836 - DNA, 411 bp, Homo sapiens
ccgcggtggcggccgcccgggcaggtacgcggggacacatcaatgcagagtccctctgtgaatttacaacacccaacacccatgagttcagtccttaagaaggaaaattgagcaagtatttaattggttggacattgcataaaagaggtccatatccaggctaactctagaaattttattctcaaacttagttggcctctttttcttctgtcagaggaccattcttagtggcactggggaaatcttggcacccagaagaattcaactgcgctcactgcaaaaatacaatggcctacattggatttgtagaggagaaaggagccctgtattgtgagctgtgctatgagaaattctttgcccctgaatgtggtcgatgccaaaggaagatccttgggagaagtcatcaatggc

SEQ ID NO: 2837 - DNA, 487 bp, Homo sapiens
  misc_feature 20, 381: n = A,T,C or G
gccgaggtacgtttgaaggngtctacaaggcaccaccttagacctttctgaattcttaaaaggttgtgcagtttcaccctgggtttgatttttgctctgaaaccatttcttggctcaagaattgtttgatgtgtggagagattgggaatgagaaacaggtttatatttaacagtttattctttagctcatctctctctgctcacatcttataggcagtgagcagaacccaggtgtcactttaagtggctgcctggaaatctctttagatagatcattgagttcattaggtgcatttcccgcttcccactttactgtagatgtcagtgttgctaaactctctgtcactgcacaacagggtcctcctttcctctagcttccangaacatttccctcacttttctttaagccctcactgacaaccttcttaaaacaacagtcatttcattatctcgcactggtgctatgtgtcaggcattcaaaaagggc

SEQ ID NO: 2838 - DNA, 425 bp, Homo sapiens
actatagggcgaattgtagctccccgcggtggcggccgcccgggcaggcaccatatcagtggagagctgcagcaaggtggcccctacggccacgcaccagcctgcacattacctctccatactgcagccctttatatggaaaattcctacatcactttgctgtgtgtgtttacacaggtggattttgctttacttgcactgacagcacacaggagggcagcacacaccccaacccacatcaactgccattaaagaaaagaaatttcagcccataatttcatgtccagcaaaattaggcatcataagtgaaggagaaataagatccttttcagacaagcaaatgctgagggaattcaatatcaccagatctaccttacaagagctcctgaaggaagcactaaatatggaaagaaaaaaccatcacc

SEQ ID NO: 2839 - DNA, 392 bp, Homo sapiens
  misc_feature 374: n = A,T,C or G
ccgggcaggtacgaaaaaatcaggctactaagcccactgttaatatagacgcagaccaattgttaggaacaggtccaaattggagcaccattaaccaacaatcagtgatgcagaatgaggctattgaacaagtaagggctatttgcctcagggcctggggaaaaattcaggatccaggaacagctttccctattaattcaattagacaaggctctaaagagccatatcctgactttgtggcaaggattacaagatgctgctcaaaagtctattacagatgacaatgcccgaaaagttattgtagaattaatggcctatgaaaatgcaaatccagaatgtcagtcggccataaagccattaaaagggaaaagttncagcaggagttgatgtaa

SEQ ID NO: 2840 - DNA, 516 bp, Homo sapiens
  misc_feature 420, 425, 438, 466: n = A,T,C or G
tatagggcgaattggagctccccgcggtggcggccgcccgggcaggtacaagttcagagacattcagttgcaaagacatttaagcatattccctctgcttatgggaacttttctaaaaggtttgtaagaggaaacggcaccgcggagggacaggagtggaaatgtatctgtctggttccctcctgactcttgcttcccattggtcaaattttattccacagagatctaatgcttctatacatttggcaacttggtagctactcaagaagccatttcccaagccctgttttgtggcatttcatctaagaccagaagtggaggggagattcagcaggtcagactaccaaccaagagagaaggaggcagctgaggggaatgtagaaagcatacaaaaaaaaaaaaaaaaaaaaccttcattcnatccncacagaaaaagcnttgcgtgccacttaacacttttttgggngaaaaaattaattaaaagaaaccttttaacccacttagaaagaaagggga

SEQ ID NO: 2841 - DNA, 528 bp, Homo sapiens
ggcgaattggagctccccgcggtggcggccgaggtactgggctctttctttattgctttctctagcattctgcattctggaactttccctacctagctttggcgaacatttgagttttcatgcccaactatgtcccccaggcaactgatatgcagtttagctcttcactgcctttcagcattcaggagggtaggctgaagctgtaggtaggttcagtctttctgccccggagctcagaggaatggggcgaagtaaggccaccagcattccctggctccctggctcctttggcctggtcctcatggggctgcagtggcagcaggccagacactgatttgtgtccccactgttgaaaacagaatgtgtgacattcttctgaatgctcacaatagtggtaaatcttgatctttcaagatgtttaaaaaaaaaacaccggaaaccaccttgatccaaatgtgaatacatatcaacaagctggataataccacttgagggattaagaatgaggttttttttgcaccaagtttt

SEQ ID NO: 2842 - DNA, 506 bp, Homo sapiens
aggtacgaaaaaatcaggctactaagcccactgttaatatagacgcagaccaattgttaggaacaggtccaaattggagcaccattaaccaacaatcagtgatgcagaatgaggctattgaacaagtaagggctatttgcctcagggcctggggaaaaattcaggacccaggaacagctttccctattaattcaattagacaaggctctaaagagccatatcctgactttgtggcaagattacaagatgctgctcaaaagtctattacagatgacaatgcccgaaaagttattgtagaattaatggcctatgaaaatgcaaatccagaatgtcagtcggccataaagccattaaaaggaaaagttccagcaggagttgatgtaattacagaatatgtgaaggcttgtgatgggattggaggagctatgcataaggcaatgctaatggctcagcaatgagggggctcactctagggggacagttagaacattttgggaaaaaatgtt

SEQ ID NO: 2843 - DNA, 535 bp, Homo sapiens
  misc_feature 416, 526: n = A,T,C or G
agggcgaattggagctccccgcggtggcggccgaggtacaggtgacccaagaagagtgattccctgttgcttaaagtgtgccacttttgctgaaatacttaccttactaacaagaatatctgtagcttcaaaatgtcttccaaacattttgggtgactcaccagggataggttctatttttacacaaacttcttgtccttttttgcaacatccacttgtttatggtttatttcaatacttgttactattccgatgtcaacaaactataaaataagaacaaattaaaatgcatgcagaagaattcatgccaatcacaggcgccatggctggatagctgaagtaagaactagagcaaaagcctgttttaaaagtcatggcagtgcgatcctttcatcactcacggtgtaacattttgngtaaactaggctggcaccaccaacaccctattcccttcatgatggttgtaagaatgacaggagataatgtgcttttgcaaaacattccaagtgccctgttgccccaatgncatttccta

SEQ ID NO: 2844 - DNA, 495 bp, Homo sapiens
  misc_feature 14, 34, 481: n = A,T,C or G
cgcccgggcaggtncattagtctgctcaggctcngcagcagagaggtttatgagtgtcccaggaggcaagtcaccatgccagaaaccccccagcatccctcacagacaaagatctgaaactgctctcaagtcagattctagtcttgcctaccccttggtagaagcagagaacagacctgggcagtcacaggcaggcttgtgaaggaagaattaaagtgggctgggagtgagggtcctggttttgcctctagcttgctgtgtgacctagggaaaatcacagaacctctctggacctccacttactcctcccaaatgagcatgctgcaataaatgattccaagggcccttcagctctgactgtgattcttggacacattgagagcccacgcctgcaaagcaggtggagagtgccttcctcaacaggtggcaagaggaggaatggagacagggacacttagaaaacctctctgtgctattcctnaactttccgaaaat

SEQ ID NO: 2845 - DNA, 504 bp, Homo sapiens
  misc_feature 403: n = A,T,C or G
gactcctatagggcgaattggagctccccgcggtggcggcccgaggtacaaagtccctgaggcaaaagcatgcttgctgtgttctaggaaaagcaaggaagacagcatgtctatagcagtgggaggtggaaggataataaacagtaggtgaggttagaggggaccaaatcatgtattttccatccagaggttcccaaccttggctgcacattagatttattctaaggagcttttaaaaaataccaatgactgggtcccagcctagagtgattaaatcagaatctctggaggtagacttgagaatctgatgtttgcaagtttcctaggcaagtcaaggctgaggaagactgctgcaggccattgtaagagccaggccgttgatctcattcaacctttccctcanctcttctagagacagccagcattctcttatggcacaaatacagcctttcaccctcacagaaagacacaggacaacaaattcaataaattaattcactggca

SEQ ID NO: 2846 - DNA, 452 bp, Homo sapiens
  misc_feature 18, 96, 153, 161, 212, 218, 230, 277, 295, 298, 309, 322,326, 332, 360, 362, 378, 379, 380, 389, 391, 395, 404, 410,417, 430: n = A,T,C or G
aattggagctccttcgcngtggcggccgaggtacaaggttgcatggaaaagacacactagcgtaagacatggactgtggccctgagtgacgtgcanccggtttaggcgaattaagatttacatacttgaaaagggacaaacaagtctggacgnggtgactnatacctgtaattccaacactgtgggaggtggaggcaggaggatcccttgangccagnagtttgcaaccngcctgggcaacatggtgaaaacccctgtctctacaaaaattaaaaanaaattagccatgtgtggntgnattgcccatantcccagcctactnacangggctntaggtggggagaatcgcttgagcccagnangatccagggctgcctnnntattgttcncntgtnagccctgtntgtgtnatagccnagtacccctaatntttaaaaaaaaaaaaaaaaaaa

SEQ ID NO: 2847 - DNA, 476 bp, Homo sapiens
  misc_feature 75, 219, 300, 316, 350: n = A,T,C or G
ctacttagggcgaattggagctccccgcggtggcggccgcccgggcaggtaccatccacgtcactgggcacctgnccgaacatggccaggtagggctcgtagatgaccgaacggaatatccacctccagcgctgctcattctgcctaaggatcccttgcctggccacgccaaaggccaccatccacaccgcaaagaggaacaggaagaagaacacatcnatcagcatcctcttgcagcattataatcttgggtcctaagtttctgctttacagtaaaaaaatgtgggatcaatctttaanaagtggaaaaataatngttagttccagaacaagaaaaatgacttccgtcncagaaattacaaaaagaagctttttttatttaagaaagaagttgggaagcccgaaaatacaaattttccctggcttattggaaagttaaaaaaaaaggcccccaagccggttgttccaattcacaa

SEQ ID NO: 2848 - DNA, 416 bp, Homo sapiens
ccgcggtggcggccgcccgggcaggacgcggggctttcttgaaggaatcccttaagtgcacgtctcccgttttcttttcacatcaatgcagagtccctctgtgaatttacaacacccaacacccatgagttcagtccttaagaaggaaaattgagcaagtatttaattggttggacattgcataaaagaggtccatatccaggctaactctagaaattttattctcaaacttagttggcctctttttcttctgtcagaagaccattcttagtggcactggggaaatcttggcacccagaagaattcaactgcgctcactgcaaaaatacaatggcctacattggatttgtagaggagaaaggagccctgtattgtgaagctgtgctatgagaaattctttgcccctggaatgtggt

SEQ ID NO: 2849 - DNA, 438 bp, Homo sapiens
  misc_feature 14: n = A,T,C or G
atagggcgaattgnagctccccgcggtggcggccgaggtactccctaatgaatggttatgcaggcaggagaacttctcaggaagagaaaaggagaagactaactctacagagatttttgaaagactccgtgggatctcagcaatttgttaacactgctagggcccttcactgcatagggaggcatatggactgccatgggtctccaggctcatgttccaagcaagaatagggtaagtaactgtgaattaccctacaagcagtaataagtttattataataatatttttatacatttttggatgcacccaacccactctaaagaatgtcagtgactttatacaaaagaggaagcatctagattggcattgtgaacataatgcataggggccgcggcgggagctctagagcctagtggttaaaaccgtggcctctggaat

SEQ ID NO: 2850 - DNA, 426 bp, Homo sapiens
  misc_feature 62, 64, 65: n = A,T,C or G
atttgtagctccccgcggtggcggccgaggtacaatcacagcagagttaatggtaggttggntnnacttcatcagaggttctggaggaggaaactaagatcttccctgaaaggcaagacctggcatcaggggctactgtgggcactttcctttgaattgcatttatctgccaggaagatgatatcctttattgttttacatgaaagcatttgaaaattctaaaaactgaccatgcctgccttggtcagttcaggttgtaataacaaagtgccatagactggatggctgacacatttatttttcacagttctggaggggagaagtctgagatcatggtgccagcatgggcaggttttggtgagagaacctcctccaactgtctactgctggctctcctatcctcacaaggtaggaagaaaagccagc

SEQ ID NO: 2851 - DNA, 400 bp, Homo sapiens
  misc_feature 21, 22, 33, 34, 36, 386: n = A,T,C or G
ccgggctggtaccagttgtannattaccagganntnccatgcctcaagatcgccctgttttctggcttcatcaatgactgcatgcagtgcaccaccctgtccactacgtgatgctgtaggattaagtctcacagtgggcggctgaggatacagcgccgcgtcctgtgttgctggtgaattagacgccatcgctgtgggttgctggtatggtgccgtgctatttggcacaggacacaccgcttgaggtctgtattgaacctctgaaggaggccgatactgaagctcggttggcagccggtattgataaactaccagcggttgggtcttattttctacccggctgatattgtggatactgtatctgaagttggcattgccgggatagnagactctgtccctt

SEQ ID NO: 2852 - DNA, 418 bp, Homo sapiens
  misc_feature 2, 49: n = A,T,C or G
cncggtggcggccgcccgggctggtacactagtatttaacctagacgtnttgaaggagtaggaaattttctggtgaatacagaagagcaaagaacagcaggtcagcaggaatgactaatgtttttctatgcatgtttaatggaatattcgtgtaggatattttgagtaggtaattggataatcagcatttgtaacttgcatcctagtagtctgactctcactaataagactcgtcaaagttccaagaatctgaaagtggatgataaatgtccatgtgtatcaccatccatgaccgaaagtcagcatccacagaacacagaattgggacagatgaacttaatagataaagatgaatatcgggagttgttcctcttaggggaatgatactcttccatgacctgtgtggagtcacagctgc

SEQ ID NO: 2853 - DNA, 425 bp, Homo sapiens
  misc_feature 1, 22, 27, 29: n = A,T,C or G
nctatagggcgaattggagctnccccngngggggcggccgcccgggcaggtacaagtatactccgactctataaacttactcttctttaaagcagatcatcctatttatcataagattattaaaaatgtatacctttgcttttatttgccataaaaaaagctttctttggaataaaatagatttttatccaaagatgcagaactgttttcaagataaatccaatctgatcaatttgacagattaagactctcttcaatagtaattcctcaaattatttaaataatttatgaaacagtaaaggcttaaaatatgaattacatagccttaaaagttctagatccttcatggattttatttttggtttattattgcaggaaaatacatacaaatcttttgagaaaaataacaaaaccaaggacttttt

SEQ ID NO: 2854 - DNA, 494 bp, Homo sapiens
  misc_feature 152, 248, 301, 320, 330, 333, 336, 361, 410, 417, 438, 443: n = A,T,C or G
ccgggcaggtactgaggctgtatacagccacagcctctccccatccctccagccttatctgtcatcaccatcaacccctcccatgcacctaaacaaaatctaacttgtaattccttgaacatgtcaggcatacattattccttctgcctganaagctcttccttgtctcttaaattctagaatgatgtaaagtttttgaataagcatgactatctttacttcatgccaaaggaaggggacaccattantgaagatttcatcagtcatcattgaggacagtcaaaatactaaaaaaggtgtnaattttggatatataaagnagttttaagnatnaanattattattggaaaaatggcaaagnaagcccaccaggaggggaaatgttttaattgggggggccacgtttttgntaagtcnctgggggaatggttgaaaagncaaanagggcaggggaaaccttcattaaggtaattctttattattaaattaattac

SEQ ID NO: 2855 - DNA, 437 bp, Homo sapiens
  misc_feature 408: n = A,T,C or G
gactcctatagggcgaattggagctccccgcggtggcggccgcccgggcaggtactccaagccaaagatgatggagagtgaattaagttagtgcaatgggaccaagtctagagctatttagaagtgagaagtgacacggaaaaaaaaaagattgattggatgtagaacaagttggataagaatccaggacaaccccaggtgtcaggctggggcagctaggtaggtgctattgccatataaagtgttaaaaaagaatagagaaggggctagttgtcgggggaaggagttcagttttagacatgttgaactgcaaggagatttgatactataattaaggaatgtgttttaataaatttaataaacaatgaacacacattattcgcatttcccaaacaatttggatggtangatcaaaaagaatggagaagttgaaaata

SEQ ID NO: 2856 - DNA, 431 bp, Homo sapiens
  misc_feature 417: n = A,T,C or G
ccgcggtggcggccgaggtacgcggggacatcaatgcagagtccctctgtgaatttacaacacccaacacccatgagttcagtccttaagaaggaaaattgagcaagtatttaattggttggacattgcataaaagaggtccatatccaggctaactctagaaattttattctcaaacttagttggcctctttttcttctgtcagaggaccattcttagtggcactggggaaatcttggcacccagaagaattcaactgcgctcactgcaaaaatacaatggcctacattggatttgtagaggagaaaggagccctgtattgtgagctgtgctatgagaaattctttgcccctgaatgtggtcgatgccaaaggaagatccttgggagaagtcatcaatgccgttgaaacaaacttngcatgtttcctgtt

SEQ ID NO: 2857 - DNA, 948 bp, Homo sapiens
  misc_feature 22, 33, 36, 47, 57, 59, 69, 83, 85, 87, 95, 103, 111, 117,123, 153, 192, 198, 207, 213, 215, 219, 223, 235, 275, 293,296, 311, 320, 328, 340, 355, 356, 361, 375, 384, 386, 418,438, 461, 464, 473, 491, 507, 521, 523, 526, 537, 546: n = A,T,C or G
  misc_feature 565, 567, 571, 582, 584, 599, 608, 609, 616, 618, 621, 640,653, 685, 721, 723, 747, 771, 787, 800, 802, 821, 832, 840,843, 882, 884, 894, 910: n = A,T,C or G
ctgcacttattagggggaccgnaaatttggggnagnccttccccacnccgtccgggntngggaccgggnctccgacaccccgngngnccaggggnttaaccgnccgggggngggggntttttnttctccgtggaaaaggaccccgccccaggnttttccttttttttaagaaaaaaccttccaattccaaanaatttnggaaaaagnccttgntntacnccanacctccaaggcnttcttgactaaagggttggtaattggggaatttttaaaanggggtaaaaaaattcctnttngttttttttttaaangcgggaagnaattttgnaaggtaaaaggnaaaaaacctttttgnnaaaanaaaagggggaaaanggggggggnanaaaccccaaggttttttttggttggaaaaaanaaaaaaaaaaattcccgggnttgggggttaaattttttttttnttngcccccttntcccaaaagggggttggnaaaaaaaggaaaattnggggcccccccttngnggnggggggggttnaaaaaaagnaaagggggccccaaccccntngggnggattgggggntngggggaaattggttnggaaaaagnnaaaattngnaanccaaaaaagggggaaattnccaaaggtttggnccttttcctccttaaaaaccctttccaaaggnaaattaaaaaggaaaatgggggccctttgggaaccntnggtccaacccaaaaatttccaaancccaaaaattggggggccctttgngaaaccctttccaaantaaaccttttttncncctttggggggcccttttntttaaaaaaanttgggaanccnttggggggtttaaaaaaaaaaaatttgggaaaaaatttncnccctttcaangttttccggggggccnccctttttccttttttttccaaaaagggggggcccaaa

SEQ ID NO: 2858 - DNA, 474 bp, Homo sapiens
  misc_feature 122, 137, 141, 157, 161, 169, 171, 190, 205, 209, 220, 224,228, 231, 234, 238, 242, 249, 255, 258, 267, 271, 275, 279,282, 285, 292, 295, 299, 303, 307, 310, 311, 323, 327, 330,342, 343, 349, 350, 368, 372, 377, 388, 406, 407, 413: n = A,T,C or G
  misc_feature 416, 419, 422, 425, 427, 441, 444, 455, 457, 462, 467, 470: n = A,T,C or G
aaaatttaaacccgggaaaaccttttcccaaaccttttaattttaaagggggggggggccccggggaaaaaaaattttttgggggggagaaaaggaccccttttccccccaaaccccccggncccgggggggatttngggngggacccggggggggncccncccgggancnaccccccgggggggggggncccaaaggggggggntttnaaacccctttntttntttnttnttntttntttntttattnttcttnttnttcttcttntttntttntttnttnttnttctttnttntttntttntttntcnnccaaaccccaanaaanaanaaaaaagaaggnngttggnnttttttaaaaaaagggtntttnttggntcccaaacccngcacccaaaaaagttggnnccattnttnttnttntcncnttggggtagggatnggnggataaaattntnggatnaattnggntaaa

SEQ ID NO: 2859 - DNA, 850 bp, Homo sapiens
  misc_feature 12, 41, 66, 70, 74, 81, 85, 91, 93, 97, 103, 105, 109, 113,120, 134, 149, 153, 157, 159, 161, 173, 176, 182, 184, 186,191, 199, 206, 214, 231, 265, 271, 308, 314, 316, 361, 398,409, 411, 422, 433, 441, 451, 453, 482, 495, 498, 560: n = A,T,C or G
  misc_feature 586, 600, 604, 619, 652, 654, 667, 675, 700, 714, 726, 732,734, 748, 769, 820, 831, 843: n = A,T,C or G
gccgccgcgttnaaattaacccggaaccttccaactttatnagggggggcccggaaaatttggggnaagncctncccaacnccgnccgggntngggnccgggncnccgnaagngattaanccaatggtgggggnaaaaaaaaaaaaatnccangctntntnccaaaattaggnttncaaaangntnttagncctttttnggggggnaaaattangaaaaaacctggggggnttttaaaaaacctgggtgggtttttaaaaaaaanggggtncttcctttttaaaaatggcccaggttaaattcccttnaaaagntnctttttaaaaccaatgggccttaaaattacccggccaccttggtnggggccttttttccaaaagggggaaaaaagggggaantcccttaaagntngggtttttttncccaaaaaaancttttttngttttttttncnaaaaaaaatttttttttggaattttaccnagggccaattttnaanccctttccccctttcttttttttttttttttcccccccaaaattgggttccccttggttaanaaaaaaaaaaccaacccttggaaggnaaggaaaaaccttngganccaattttttttttnaaaaccttttttaattaatttggggaaaaaaangnaaaaattccggtnaaaaaatnaatttgggggttgggaaaattcttnggggaaattggttncccttcaatttncaaaancncaaggcctttttcnaaaaaaggaaacctttaattnccaaccccccaaattggcccaaattccttttggtttttacaattccttggnccaattaaggnccccaaccttcnaattttt

SEQ ID NO: 2860 - DNA, 988 bp, Homo sapiens
  misc_feature 8, 18, 30, 42, 64, 75, 116, 132, 141, 160, 170, 222, 230,240, 259, 274, 291, 295, 315, 326, 377, 451, 485, 486, 497,500, 521, 558, 565, 567, 619, 630, 671, 675, 683, 686, 720,728, 745, 762, 781, 835, 871, 908, 911, 950, 986: n = A,T,C or G
accgactncactttattnaggggggcccgnaaattttggggnaaaggcccttccccacccccgnccggtgttggnggcccgggcccccggaaagggggttaacccttttccaaagntttttgggaaaaaaanagggttttnggaaccccccaaaaaaggnccccaaaaanaaaaaaaaaatgggttcctttaatttcccttgggggtttgggggtttccaanggtttaanggtttttttnggaaattaaaggggggttnttccaaaaagggggnaaggtttttggaaaaanaagnaaaaaggccccccttaaggnggaaattgggnggcccttggggggggaaaccaatttggtttaagggaaattccaattaaggnttgggcctttaaaaaggaaaggaaattggggggaaaaaaaggcccaaccccctttttgggttgggccctttaanttttttttgggggcccccccgttttttttccaanntttttgggttnggnaaattggtttttttttttttnaaaaggtttaaggaaagggtttggtttttggtttggnaattccnangaaaaaaggggggcccccctttttttaaagaaaaaaagggaatttttgggtngggggccttanggaaaaatttaattgggggaaaggaaaaacccaaaaaatgnaagntggaaggnaanccccaaccccaaaggaaaggttggggggaaattnggtttggnggggggaaagggggccnccaaaatttaatttggnttaaagggggggttttaantttttcctttaagggtttaaaggccctttttttgggcccaagggtttggggaanccttttttaaccccaaccccaaaaaaaaaggggggncccaaagggttttttttttttaaagggcccggggggnaancccttttttggggtttttccaaaattttggggaaaaggntttttaaacccccccttttaaaaaaggggaaagggnaa

SEQ ID NO: 2861 - DNA, 640 bp, Homo sapiens
  misc_feature 18, 35, 41, 47, 66, 70, 76, 90, 95, 101, 109, 111, 113, 115,123, 136, 161, 233, 238, 259, 271, 320, 339, 345, 368, 376,379, 384, 388, 395, 413, 414, 415, 419, 436, 444, 445, 450,458, 461, 463, 468, 469, 470, 480, 492, 505, 508: n = A,T,C or G
  misc_feature 516, 518, 533, 550, 552, 562, 563, 570, 583, 585, 586, 603,604, 629, 630: n = A,T,C or G
ccggaaatttgggggagncttccacccggcggggntggggnccgggncccggtggcccaggggggntggnaaaacntccccccccttttnccctncccttncaaaattncnangncgccaacntttgggttttttnggaaaaacaaaaaaaccttttcttnggccaagaccaacccctgggcctttcccgggccttttccccttttccttttccccttccaaattccttttcnttttnggccccttttttttaaaaggnttttgggaaatnccaaaaaccccaaggggtttttccaaaaattaaattgggttttttgggntggggggaaaaaggaaacnggccanaaaaaggccccggggggtttttnttttgggnggntgtcnaaantaaaaanttaaaaagtttccccaannngagnggccctttttttttttnaaaaaaannaaaanattttccnaangnttttnnnaatttttttnttttttttgganaaaaaaaaatttnccnctgttaangncccccattttttttnggggggaaaaaaaaatntnggaaaaaaanntttttgngtttggcgccaananngaaattttacaacccannaaaacccgccaaaataaaaaaaagnngggggggttt

SEQ ID NO: 2862 - DNA, 972 bp, Homo sapiens
  misc_feature 15, 49, 60, 66, 70, 75, 83, 87, 100, 107, 114, 116, 126,137, 139, 148, 156, 177, 181, 188, 202, 215, 217, 231, 233,235, 237, 243, 245, 251, 253, 276, 285, 497, 556, 568, 703,734, 749, 782, 783, 786, 793, 809, 827, 843, 845, 858: n = A,T,C or G
  misc_feature 859, 862, 863, 867, 877, 878, 879, 889, 906, 907, 908, 935,938: n = A,T,C or G
cgcccgttaaattanccggaaaccttccaaactttattaaagggggggnccggaaaaatntggggnaagnccctnccccaccnccgnccggggttggggnccggggncccccgncnccccgggggnccagggggttnanccaattccntggggggnaaaaattaaggcccgggaaanaatnggcccanttaaattccaaaanaaagggggccctntnccaatttttttccntntntntgggtntncctttntncaaattgggaaaggggccttttnggtttaagnccaaccaattccaaaaaatttttttttggaaaaatgggttcctttttcttttttttaaaaaaaggcccttaaatttgggttggccggccaaccaaccaaaccggcccaaccggcccaaccaaccaacccaaattaaattgggccgggggggcccaaacccaacccaacccaacccaacccaattttccccctttccccccctttccttgggnaaaaccctttgggaaattggggggttggggttttttttaaagggtttaaatttcccggnaatttaaaaaanccaaaatttttttttttccctttttttttccctttttggggggtttaaaaaaattaaaccccggaaaaggggggtttaaaaaaaaaattggggaaaagggggggggggggggggggccccaaaaaaaaaaaaaanccctttttaaatttgggaaaccctttttccnttgggggaaaggttnaaaaaaaaaaaatggggccccccaaattggggnnccnttttccnataaaaattaaatttnccccccgggggggaaagnccttgggccaaccaangnttcttttttggcnnaanngggnaaaattgccnnncccccaacanttttttccaaaaaaaannnaaaaatttttttgaaaaaaccttgggngtntttaaaaaaaagcccccccaaaaaaaaccccccc

SEQ ID NO: 2863 - DNA, 310 bp, Homo sapiens
  misc_feature 9, 25, 29, 46, 48, 50, 69, 71, 73, 85, 87, 93, 95, 100, 102,104, 108, 110, 112, 114, 119, 121, 128, 132, 134, 142, 194,231, 255, 290, 309: n = A,T,C or G
ggggaccgnaaaatttggggaaagncctnccccaccccggccgggntngngtccggggcccccgtaagngntnacccaaaatttngnaaaggntnattgntngnccangntntntaatntnggccatnggtnanaaaattanacaaccccttttttttaaaaaaaaattttaaaacccccggaattaaccaaanggttttggaccttttaaccatttggaaccccaagggnaaaaaaaggtccttcctttttggnaaaaaaaaaaaccttccttcccctttggttttttnttccttccccccccttaant

SEQ ID NO: 2864 - DNA, 954 bp, Homo sapiens
  misc_feature 48, 63, 76, 79, 81, 84, 92, 96, 109, 114, 116, 118, 128,131, 140, 158, 160, 176, 184, 188, 194, 198, 208, 214, 220,224, 226, 228, 230, 242, 244, 250, 262, 264, 266, 268, 273,277, 281, 285, 291, 296, 317, 333, 335, 375, 397, 407: n = A,T,C or G
  misc_feature 417, 419, 431, 437, 448, 459, 463, 503, 515, 520, 531, 535,540, 544, 549, 556, 562, 569, 602, 605, 609, 626, 642, 675,680, 682, 705, 707, 714, 722, 725, 733, 741, 743, 762, 785,809, 823, 828, 838, 852, 857, 862, 882, 929, 930, 942: n = A,T,C or G
actttaatttaaaggggggggacccgcaaaaaatctggggggaaaggncccttcccccaaccnccgtccggggttnggngnccnggggaccnccgnaggggggtttaanccaantngngggaaaaagnggnccaaccttnccaaaattaaaccaaatngnttcccttaaatctcanaagcttgntggnaaaaanggtnaaaattggtnccaatncctttncacntncntnggtaaatttttncnttaggngggattggcctnanangnaaatntganttanttanttggtnccaanccaaaaaaatcggcctttttnccaaccaatttttttntntaaaaattaccttgggttaaaaaattacttttaaggaagnttacaaaaattggttggttccnttttaaaaancccccccaangngttggaaaaaanatttgnaaaaattaagncccccttttgnaagnaaaaaagggaagaaaaattccaaggaaaaatttttttaanccaccaaaaccnttttngaaaaaaattngccnttaanaagnccaanccaaccnaaaaanaaggggnaagaaaaaaaaccttccaaaagggtttttttcnaantttnttcccctttcctttaanaagtccaaccaaaggnccttttttcttggatgggcccttccttgggaanttttncncccccggttgggttgggcccttnanccaaaanaaaaaacnccnccaaaccncccccaananggtgggaaaaaaaaaaaanaacccaagggcccccccaaaccntttaaaaaaaaagggggggaaagncccttttttccttnccttncctttccccnaaaaaccctttaanttaancccgnaaaaaaaaaaaagggtttgngcccaaagggggggttggggggccctttgggaaacccaaaaaaaagnngggttaaaaaantttttccaaaaa

SEQ ID NO: 2865 - DNA, 524 bp, Homo sapiens
  misc_feature 228, 240, 263, 269, 272, 273, 317, 318, 336, 340, 355, 363,366, 367, 370, 371, 374, 377, 388, 390, 391, 405, 406, 413,432, 439, 456, 482, 486, 487, 495: n = A,T,C or G
ctacttagggcgaattggagctccccgcggtggcggccgcccgggcaggtacgcggggaggctcctggggtggagtccaaatcactcattgtttgtgaaagctgagctcacagcaaaacaagccaccatgaagctgtcggtgtgtctcctgctggtcacgctggccctctgctgcttaccaaggccaatgcccgagtttcttgcccaagcctctttgtttttctgagnctggttagaacntttcttttctttcaatttaggtngaaacnctnntgtttcaaagtttaaagttccttggccaaaaattttggatggcnncctcccgggaaagactgnttgncagccccaaagttangtagttgnaannaannatngcnaccggtattcnannatgttccctttcannaaaacgnaaagcccctcaatttggcnggaaaantccccttgggttgaaanaaaataattttggaaaagaaaaatgnttannttggttgnttggacccaatggttaaaaaaaaaacttt

SEQ ID NO: 2866 - DNA, 963 bp, Homo sapiens
  misc_feature 29, 33, 44, 48, 59, 63, 75, 79, 87, 91, 97, 104, 110, 112,124, 131, 141, 143, 145, 149, 154, 161, 169, 171, 184, 186,192, 194, 196, 206, 208, 210, 212, 218, 224, 242, 255, 270,272, 314, 333, 341, 354, 364, 374, 396, 410, 424, 425: n = A,T,C or G
  misc_feature 434, 439, 447, 457, 458, 474, 478, 481, 488, 500, 515, 559,561, 582, 588, 630, 637, 685, 692, 709, 716, 727, 739, 754,758, 762, 765, 774, 787, 800, 805, 813, 851, 863, 879, 886,893, 896, 922, 925, 944, 946: n = A,T,C or G
aattaccgacttcactttattaagggggncggnaaatttggggnaagnccttcccaacncggncggggttggggnccgngacacggncacncggggnggcccanggggtnanccattggggggnaaacttnaaccaggggncnanccgnccccncccaacncaatttgncnccccaaggccttncnaatatntntntgggtaaatntntntnttaggntaaagnaaagaaaccagggggggntttttaccaaacnccaatgggttttggngncccccaagggaaaattggaaattccttttgggaaattccttncttttgggaaaccccttcnaattgggnaatttcccgggcncccgggttcntttttggggnccccctttcccccaaaaaaaanggtttggccctttnggggggaaaatttnnaaaaaaaanggggncccttttnaaaaagtccnntaaatccaaaaaaaancccnttnggggggnccccccttcctntaaaatttttaaaanattttcccttttccttttttttaaaaaaaaggaaaaggtaaaangnaaaggaaaaaaaaaaaaaccnttttanttttggaaaaaggaaaaaggggggcccccaaaaaaaaaaaantttttanattttttttataaaaattttttttaaaaaaaatttttccctttttttnttaaaancccctttttttaaaagnccccaancccaaaaaaanggggggggggtnaaaaaatatataatnaacnattnatnttggggggngaaaaaaattttntttttttgggggnccccncctttttnaaaaaaaattttaaatttttaaaagggggggggtttgngggaaaattttngggaaaaaaaaagggnccccaanatttttnaanccccaaaaccccaaaaaaaatttttnggnaaaaaaaaattttaaaagngngaaaaaaaaaaaaaccc

SEQ ID NO: 2867 - DNA, 949 bp, Homo sapiens
  misc_feature 28, 46, 62, 71, 78, 82, 88, 90, 94, 100, 102, 106, 111, 113,115, 132, 134, 148, 152, 161, 170, 175, 177, 181, 185, 190,197, 199, 201, 211, 215, 222, 230, 237, 251, 253, 261, 263,266, 268, 270, 274, 283, 287, 289, 295, 297, 321: n = A,T,C or G
  misc_feature 330, 337, 362, 368, 380, 381, 395, 408, 416, 428, 445, 449,467, 488, 496, 523, 528, 557, 563, 582, 592, 620, 639, 659,707, 721, 723, 753, 778, 809, 832, 841, 872, 877, 897, 909,923, 925, 938: n = A,T,C or G
ccgcgcgttaaaattacccggaactttncacctttattaagggggnccggaaaatttggggnaagcccctnccccacnccgnccgggntngggnccgggncnccgnagggntnanccttattaattggtggnanccacctccataacnattngtgtaaggnccagtaaanatatngnaggngggnccagnccagttngntnccccaaaatncctncaatttncccaaggnggttggnaagtaaaggttttngnccaaccangnttngntncccnaaattaggnggtngnccattnanccaattccttcccttttaaaggtnaaaggttanggttttnggttgggaatttttaaaaaccaaantttggnaaaaaaaattanngaaaaaaaatttgnaaaaaaaaaaaanaaattaantttttttttttntaaaaatttttaaattnggtngggtaaatttttaaaatnaattttttttttttccaaaanggcccaangctctttaaaattaaaaaggttttggnggggntaaaggggggaaccaatttaaaatttaantttttntaaaatttttccggttttngggggggggnaaccccttaaaattttttaatttttttnatttaaaaaaatttttggnaaaattggggggtttttaanggaaattaaatttttttcctttttttttgggggccccccttaaaaggncccccaaccccccnanttggaaaaaaaaaaaaaaaatttccaaccntttggaaaagggggcccggcctttnaaaagggggggggaaaaaaaaaacccatttnggaaaaaaccttttaaaaaaggnaaaaaaggnccccccctttttccctttggaaaggtttccnttccntttggggttttttttttccnttccaaaaaccnttggtttaaaaaangnaaatttgggaaanaaggaaaaaaa

SEQ ID NO: 2868 - DNA, 564 bp, Homo sapiens
  misc_feature 184, 221, 247, 308, 317, 370, 392, 453, 465, 549, 552: n = A,T,C or G
ctacttagggcgaattggagctccccgcggtggcggccgaggtacgcgggatggatcctatgaataattactgaataattattgtaattgcttttattggcagtgctgaaaactcatccctttgtgacctcaagtaacccatgacacttttgtgaacctgcaggttttttcattttaagaaaanctttggacaggaatttttcaattttctggacaacagnaaatggttcaagggtcttcccccagnacccccttaggaaaaaattaccatttggacctttaaaagccccttttggattaccaattcntccaaaagncaagtaatcccttttaccagtggtccacctgggaaagaatgggttgccggggncttggcagaagaaggggaatgnctttttcaaaattgggggattaaaccaggtccctcccttcctttcacctttcccaccatgnaatgcctggggncagccccaaggggttcaaacccccacctggcaccccttcaaacctcagggccaaggtcccaggccagcccaaatcctttagggnagnacccttgggggc

SEQ ID NO: 2869 - DNA, 927 bp, Homo sapiens
  misc_feature 14, 18, 33, 56, 58, 63, 75, 77, 87, 93, 102, 133, 141, 143,149, 157, 159, 161, 168, 180, 184, 188, 190, 198, 201, 215,221, 255, 257, 263, 281, 285, 291, 330, 340, 376, 382, 397,422, 445, 464, 476, 479, 504, 506, 509, 517, 524, 539: n = A,T,C or G
  misc_feature 544, 557, 586, 596, 600, 608, 613, 614, 649, 658, 665, 678,689, 707, 728, 739, 744, 747, 755, 764, 818, 834, 848, 857,873, 900, 907, 918, 921: n = A,T,C or G
gcgttaaattacgnactncacttattagggggnccgaaaatttggggaaagacctncncaacnccgtcggggttngngtccgggacnccgacncccgggggnccagggggttaccaaataaaaaattttttgnaaaaaggntnggttgnaaccaaantngnaaaccanaattttattggnaaanaatncnccttggtnggnaaccttggaaaaanggttcnccccccttcgaaaggattggccaaccttccttgntnggggtnggccaaccaattggccgncccnccggcnccccaccaaccaaaaaaccttcttggggccaattggggnaaaaaaccanttaaaaaaccttataattggccaaaaaacccccaangtttgngccttacccccaagnaaaaaggccaaccccaaaaccaccnggttgggttgggtttccttcccnatttttcccaccccaaaanttcaaccaaggnaancccaaggttaaattctttaaccttncnccnaaaaaacnaatttcnccaaaggttttaaancctgnaaaaataaaaccnttaattggggggccaatttcttttttccnccccaagggngggnaaaaaccnaaggnnccaaaatgggggggccaaaggggggccctttttcnttttttaancctttcnaaccgggaaattnggaaaaaaccnccaaaggtccaacccggnaaaaaatttaaaaaaaaaccnccccccaaagncctanaanaaaaaaangggaaaggnaaaaaccctttggcccaaatttaaccttttttaaaaaaaattttttttaaaggngggggaaattaaaggntttcccaaattttncaattgggnaaagggggggaaattnccgggttcccaaccaaaaattttttcnccaaaantttattttaanaangggggg

SEQ ID NO: 2870 - DNA, 971 bp, Homo sapiens
  misc_feature 63, 69, 75, 81, 115, 127, 130, 134, 155, 156, 164, 169, 173,178, 193, 228, 232, 239, 259, 260, 269, 271, 284, 286, 298,303, 345, 359, 365, 366, 378, 393, 416, 422, 459, 463, 468,472, 484, 486, 501, 502, 533, 542, 544, 556, 564: n = A,T,C or G
  misc_feature 587, 623, 657, 701, 706, 721, 727, 759, 789, 793, 814, 817,833, 836, 903, 935, 955: n = A,T,C or G
gcccgccgttaaaattaacccggaaaccttccaaccttaatttaagggggggggcccggaaanattttngggggnaaaggncccttcccccaacccccggcccgggggtttgggnggcccgggtggnccnccgnaaagagggtttaaacccccgnnaggggggnttccnaatnttttnttgggcccttttccnccttaaattaaagaaaacctttggccccccaaccncctnttttttnggggcccaaaaaaaaaaagnnccttggttntnccttaaaaccttncnccaattccttcnaaggnccaaattattttaaccaaaattttccccaattaaaccccttnggggtttggggttnccaagnnaaggggggaagnggccccccgggcccnttggccaaaggggccttccaagnccttanaaaattccgggggggcccttggaaattgggggccaantttncccanaaantttaacctttcnangggggcctttcaaanncttttaaacaaaggggccttccccggaattnaaaattttnancctttctttggnaattaccnttaacctttgggctttccaattnttttaaaagggggcccttttttgggaaattgggccntttctttccaaacccccaacccggggggaaaaanccaaaaaaggtttaaaaaccaaaaaaaaaggggggttgggtttnggttnaatttgggaaaaggnaaaggncccttttgggggggggaaatttaaaaaaaaantttttaaacccgggcccaaccccccccccnaaanggggggcccccaaaaaagggnccntttttcccttgggttnttnttccctttttttttttaaacctttaaatttttgggtttttaaaaaaaaacccaaagggggggggttnccaaacccaaaaaatttgggaaaaaatttttnaatttaaatttccctttttngggaattttttttttt

SEQ ID NO: 2871 - DNA, 828 bp, Homo sapiens
  misc_feature 35, 51, 54, 60, 78, 84, 112, 124, 134, 137, 143, 155, 170,171, 180, 189, 192, 196, 216, 234, 235, 237, 250, 260, 300,306, 317, 335, 342, 360, 416, 423, 459, 468, 478, 479, 497,531, 532, 552, 564, 827: n = A,T,C or G
gcccgtttaaaattaaccgggaacctttaccaacnttaatttaaagggggnggncccggnaaaaaattgttggggggnaaaggnccctttccccccaaccccccggcccggnggtttggggggncccggggggnccncccggnaaagggggtttnaacccgggggggggnnaaccctttnttgggtttnccntttnccccaaaggggggaaagggnaacccaaatttgggtttnncntttgggggggggnaaaaaagggnaaaaaaggtaaaggtccctttaaggtaacccttgggtggnaaaggnaaaaaattccnaattgggaaaggccccantttgggntttttcccaaaggggggnttgggaaaaaaaaaaaccaaattgggtttgggaagggtttgggggaaattaaaaanggaaagnccaaaaagggaaagggggggttgggaaggaaaaccnaaccaaggnaaccccaaanngggggggggcctttaaangggggggaaccaaggaacttgggtgggttccaanntaaattttttggggggttanttggggaaaacnttttggtattttttgcttaccttttgccttaagtatcttaaggaccaaggcctcagacctctaaccttctcttgtaattgtgggaataatgacagcacttaccttataagattttacaaagattaaaatatcatatataacagcacttaacacaagtaagaattcagtaaatgttgactgttattactattgtctgggtcgttataagtttgaagacacaattgcataaactgtcatcattaaaaggaaaacagagaaaagtng

SEQ ID NO: 2872 - DNA, 924 bp, Homo sapiens
  misc_feature 19, 26, 41, 45, 49, 55, 71, 77, 79, 83, 85, 95, 105, 121,125, 127, 135, 149, 158, 164, 169, 173, 177, 179, 193, 195,214, 218, 220, 234, 248, 252, 258, 269, 288, 313, 336, 340,341, 372, 375, 394, 407, 411, 414, 440, 469, 480, 493: n = A,T,C or G
  misc_feature 513, 514, 528, 532, 552, 597, 614, 619, 646, 660, 661, 698,706, 746, 779, 851, 857, 861, 875, 883, 888, 895, 910: n = A,T,C or G
ttacgacttcactttattntgggggncggaaaatttggggnaagncctncccacnccgtccggggtggggnccgggncnccgncnccccgggggnccagggggtnacccaaaagaaatggncctngncttggggnaccattcaaaaagnaaccaccgnttcctnggggnaagnccangngtaagtaattccgncncaaccccttaaccccggcnaagncnccttggccttccgnaggtggggccccangggnaaccgnccccaaaaggnaattggaaattttggggtnttttccccccttttcccttccaagnccaaggggaaaagaccgggttcnaagnncccccccccgggttaagaccaaccccttttnttngtttttaaccccaacccgnaaacttttttttnaagnttnggccccttctttgggtttttaccccnaaccccaaccccttcttttaaaaattggnccctttccttngggggtttccggncccccggccaaacctttttnntttgggaattgggnttcncccggttaaagggggccccnttttaaaaaaattcccttggggccacctttgggggcccggtttcnccccccctttccccccntttcntttgggttccctttttccaaagggccnaaccccccccaaannaaaggggggaaagggggggaaagggaaagggaaaggncccccggnggggcccaaaggggttttttcccccccccttttgggcccnaaggggggaaaaggaaaaagaaaaagggggggnaaaggggggggggggggcccctttggggccctttggggggggaaacccccccccaaaaaaggggggggcccnttttcnaaanattttccccccccntttctttngggcnttttccntttccaaaagggggnaacccccccccccc

SEQ ID NO: 2873 - DNA, 629 bp, Homo sapiens
  misc_feature 3, 21, 38, 49, 53, 57, 68, 72, 78, 84, 90, 92, 96, 103, 111,113, 115, 117, 119, 121, 123, 125, 127, 129, 131, 133, 135,137, 139, 141, 143, 145, 151, 153, 155, 157, 159, 161, 169,178, 180, 184, 192, 204, 206, 207, 211, 234, 236: n = A,T,C or G
  misc_feature 262, 266, 277, 279, 296, 303, 310, 327, 336, 368, 393, 397,477, 493, 495, 516, 575: n = A,T,C or G
cgncgttaaattacgaacttncaactttattagggggnccgaaaatttngggnaagnccttccccacnccgnccgggntggggnccgggncnccgnaaggggntaaccctntntntntntntntntntntntntntntntntntntgtctntntntntntntgtggganaaaaaaatntncttntttaattntggccccaacgngnnaggntgggaaaaccccccttcaaaaangntgggggcttcaacccaaaagaaaagntggncccccctaatntntccttttttccaaattntaaaccntacccanagggggaccaaaacccnccatttttnaaaaagttttgaagaataaagtggaccacgtntgatttgccaaaattctaaagcgcnctcnccatgaaatggataaaggttacctttggggatttgcactgcatgaattctgtgaaaagcttgttggatattgtgataganatagagaaatgaagtntnttatataagatactatgaggntccctgcctttgcttcacatcccaggcttacaaacgtgccccataaacattccctctgnggctcttgcatttcatatatttatctaaactcttataatcaaattacactttta

SEQ ID NO: 2874 - DNA, 932 bp, Homo sapiens
  misc_feature 15, 32, 36, 42, 49, 52, 60, 63, 67, 71, 73, 85, 87, 91, 93,101, 103, 116, 133, 137, 151, 163, 173, 175, 191, 201, 208,214, 217, 224, 226, 229, 250, 255, 266, 299, 322, 326, 362,364, 392, 430, 432, 438, 448, 481, 483, 496, 504, 531: n = A,T,C or G
  misc_feature 551, 561, 575, 590, 593, 606, 608, 625, 635, 651, 675, 681,699, 707, 711, 781, 784, 833, 845, 850, 852, 871, 907, 909,930: n = A,T,C or G
ttaaattaccgactncactttattaagggggnccgnaaattntgggggnagnccttcccnacnccgnccgngntggggtccgggncnccgncnccccgggngncccagggggttanccaaggccaaaaaaatnggtnggccccaacctttnggaaaaattaanttccttaggntnattgggaaaagggccnttggggttanaattggnaaaagnaanaaatttngnccncaattttttccttggaaaagnccagnaaattaattgnaaaaaataaattggattccttggccttttaaanttttggttttaaagggggccaanaccnttggaacccctttttacaaaaaaaaggttggccaananaaggttctttttaattttaaaaaaaaangaaaagggggggggaaagggggggttttatggaaaaangncccaangaaaaaattnaaaatttagggtttcccaattaaatttggtttncnttaaaaacccccnttgggccncccccccaaggtttttaaaaacccttncccctttcctttttgggttnttaaaaaaantttttaaatttaanaaagggccccccaanggnttttaaatttttntntttttttttttttaaangaaaattaangggtttaatttttttntttttgggttcccaaacctttttngggggnaatttaaaaaattccaanccaaaggngggnaaaaaaaattaatttaatttaaaaggtaaaaaaaaaaaagggaaagggcccttttggggggaaccttaanaanccttttgggaagggaaaaaggggtttttgggggaacccaatttgggggnaaaaaaaggccnataangnaacccccaaaagggttttnccccaaggttttggggggggtttttaaaaaattttntnttcccccttcccttttggggntt

SEQ ID NO: 2875 - DNA, 404 bp, Homo sapiens
ccgggcaggtacatccgctgaggcagagctttggagtagggagcagggcgcggcacagtggtgcgcaaaatgaattcccggccagcagggggtgggaagtctgacacggagttctgccttctttcctctggggagcccattctcttcaattcctcctctggtggagtcatagctgcagcctggaaaagaatcaaatgctaaagtcaaaagcaggtcaaatgctaaactcagatgcttttgaaggacagatgaattaacataataaagatatgaaaatgtcccacgttactcagtaatgcagtcagctatatgttaagattactcaaaaaccacataacacagcaaatgcaagaagcttgagacactgcatgagcagccgggctggagacagacaggagggatga

SEQ ID NO: 2876 - DNA, 970 bp, Homo sapiens
  misc_feature 4, 16, 27, 29, 35, 49, 61, 75, 77, 85, 102, 109, 121, 125,141, 145, 153, 164, 174, 176, 178, 184, 236, 252, 258, 265,283, 286, 311, 319, 327, 331, 332, 337, 342, 345, 346, 356,363, 365, 367, 383, 391, 400, 409, 422, 424, 426, 428: n = A,T,C or G
  misc_feature 434, 438, 439, 451, 457, 462, 473, 483, 484, 485, 496, 497,498, 503, 508, 513, 516, 528, 533, 556, 570, 583, 585, 587,588, 591, 597, 624, 631, 641, 643, 651, 656, 665, 674, 679,690, 704, 705, 708, 719, 731, 734, 739, 751, 755, 760: n = A,T,C or G
  misc_feature 769, 779, 783, 802, 807, 811, 816, 826, 840, 845, 862, 867,875, 884, 912, 914, 923, 930, 931, 932, 939, 940, 941, 946,964, 965: n = A,T,C or G
cacnttattagggggnccgaaaatttngngtaagncctacccacaccgnccgggttggggnccgggacaccgacncnccgggggnccagggggttaccattnttattanttggaaccaaanttgnccaccattttaagtcnccanggccaaanggttctttttnttaattatgngntnggggtnttttcaaggccaagaccagaaccgtaattaaaaattaataattggccaatgnaaaattttccaaggcnttctcnaaggccnaccttttttaattttttncanaaatagggaaaaaatttttttctcnttggcccnttccccantttnncaaangatanatnnccaattgggnggtttgnanangggaaagggttaaacncccttttntgggggggngtttttggntttattttttggngnangnaaaaanattnnatttttcctaanagtatnttttnggacataaacntttttttggnnngttttccaaannnccccnccttnttggnccncaaatatttccnttttnttttaatttcccccccccaaagngttttaaaaaattntttaattttaaantntnnttngggccnaattttaatttaagaatttaaatttanaaaaaantttacctttngngccttttnaaggngaaaccccnaatttaaanaatanaattttttaanaaaccccaataggnnccnttttttttttncccaaaaggtgnggngaaancccataaggtanaaanttggngccctcccnttttttgggnatanaaaaaaaaaaaggggggtnaattncccnttttnttaaaagaangggggggggtaaanagggngggggtctttttttttnaaatnaaaaaatnccccaacanaataaaattttttaaatttttttttttngnggtttttanatatggnnnccccccnnnttttnaaaaaaaaaaaaaaaaannccccc

SEQ ID NO: 2877 - DNA, 302 bp, Homo sapiens
  misc_feature 150, 168, 180, 214, 215, 225, 239: n = A,T,C or G
aggtaccagttgtaaaattaccaggaaccgccatgcctcaagatcgccctgttttctggcttcatcaatgactgcatgcagtgcaccaccctgtccactacgtgatgctgtaggattaagtctcacagtgggccggctgaagaaacaagngccgcgtcctgtgtttgntggtgaatttanacgccatcgctgtgggttgctggtattggtgccnngctatttggnacaggacacaccgnttgaggtctgtattgaacctctgaaggaggccgatactgaagctcggttggcagccggtattg

SEQ ID NO: 2878 - DNA, 951 bp, Homo sapiens
  misc_feature 28, 41, 57, 67, 72, 82, 84, 94, 104, 110, 116, 119, 127,138, 140, 179, 186, 192, 202, 206, 214, 230, 259, 269, 273,281, 296, 314, 320, 325, 329, 331, 346, 356, 362, 368, 375,379, 380, 387, 395, 404, 409, 411, 436, 446, 451, 454: n = A,T,C or G
  misc_feature 467, 469, 473, 474, 486, 491, 496, 505, 515, 576, 584, 595,604, 614, 616, 623, 643, 670, 675, 694, 706, 724, 735, 738,751, 752, 773, 775, 776, 779, 797, 798, 805, 809, 832, 850,853, 857, 869, 874, 877, 878, 880, 881, 887, 920, 924: n = A,T,C or G
  misc_feature 936, 944: n = A,T,C or G
cgcgttaaattaaccggaactttccacnttattaagggggnccggaaaatttggggnaagaccttcnccacnccgtccgggntngggaccgggncaccgaccgnttgggnccttgnggnaaaaaganaccattggggncnccaaccttctccaaggtttccggggttgtttttgtaagnccaccgnggccgnaagtccaagnttcntaccaagnggccccttttttaagnttggaattggaattggaattttacaaagnggtcggggtngggncattgttngggacaccttttggnaaaaaaaaccatgattcnaattgnttggnaaananaccttcaattcaacncctttaaaanggggtnggtttnaaaaganttgnnttaaaangggaaatntcttttttnaaatngnaaaattggaaaaaaaattttttccntttggttaanaaaanttnggggttggcccangntatnncaagggcccccntttcnaaagntttttttcncccaaaaaanggccccccggggaaaaaaaaaaaagggggaaaatttcccccttccctttaggggttaaggncccccaancccgggggttnggtttgggngaccaaaagncnctttggnccttttcctttggaaaaaancccccaaaggggggaaaaccccctttnggggnaaaaccacccccggggggnaaacctcccccnaaaaaaaaggattttggncccccaaattnggnttcccttattttnnaaaatttggggtttttaaaangnnccnttacccccccaaagtccnnggaaatnttgntcccccaaagataaattgggggnggggaaaatttccaaagnacncaancccaaaggcccnccccnttnngnncccccnttccatttggtctttgggacctttaaaaaaatntttngggtttttcccnccctttcntttaaaa

SEQ ID NO: 2879 - DNA, 923 bp, Homo sapiens
  misc_feature 25, 29, 40, 47, 53, 56, 62, 64, 68, 74, 76, 80, 85, 94, 109,115, 123, 125, 135, 140, 144, 162, 207, 214, 222, 224, 234,243, 286, 325, 368, 370, 377, 381, 394, 406, 409, 410, 412,422, 427, 436, 458, 521, 533, 536, 548, 555, 557: n = A,T,C or G
  misc_feature 560, 564, 592, 608, 628, 641, 656, 708, 754, 778, 848, 863,866, 874: n = A,T,C or G
tacgacttcactttatttagggggnccgnaaatttggggnagacctncccacncgncggggntngggnccgggncnccgnagggntaaccaagnaacccttcccccttnggggtntgggcatngnaaaaccattnccctnggtnattccttttgggggaatncaattccccaaccaaattaagaccaaacctttttgggtttttttncaattcnccaagggntntaaatttttntaaggggcntttaagtggaaatttttccccttcttcaaaccaaccttggccnaggattttttaaagggggggtgggggccaattttggttnaaaacccccaggccttaattgggggcccaattaaaagggggtngntttttanaaanccccaaaaaaaanggggccttttgnaanntntaaaaaaacnaattngggggggtntgggcccccttcctttgggaangaaaaaaaaattccaaaaaaggtttccttttccaaattacccacccttgggggaaattttttnttttgggttaanggnaatttttttttnaaccccnanttncccncttgggggccggaaattccaaccttggnccaaccctttctttcntttttttaagattccaattngggggtagggggnccaaatttccccttncaacctttgggaaagggggcccccaaccaaccaatttggtttttttttttcnaagggaaaaaaaaaaagggaacctccccggggggaaaaaaggtttnaaaatttaaatttttccaattttncccccctttaattgggaacccccaaaattttccaagttttataattgggggtttgggggcccaacccttngggggttttccccgnaantggaaatnaaaatttgggcccttccaaaaattggggaacccaaggtttaaaaaaaac

SEQ ID NO: 2880 - DNA, 603 bp, Homo sapiens
  misc_feature 15, 52, 56, 59, 69, 74, 83, 86, 93, 103, 116, 120, 122, 124,126, 128, 130, 132, 136, 138, 140, 142, 144, 146, 148, 150,152, 154, 156, 158, 160, 162, 165, 168, 170, 172, 175, 191,195, 198, 200, 204, 209, 211, 214, 219, 221, 225: n = A,T,C or G
  misc_feature 227, 229, 240, 242, 261, 276, 278, 282, 284, 286, 288, 290,294, 299, 301, 303, 307, 314, 316, 317, 327, 354, 371, 379,387, 396, 406, 456, 504, 568, 573: n = A,T,C or G
ttaccgacttcaacnttaatttaaggggggggcccggaaaaaatttgggggnaagnccnttccccaacnccggnccggggttnggnggcccgnggccccccgnaagggggtttaancctntntntntntntntatntntntntntntntntntntntntntnttnttntntnttntcaaccaacctttttntggngantnaatnttttnanttnttaananccanananaaattgggggntnccccaagaaaaaaaaaggngggatttggggaggntnccanananantnttanccaanangnttgnattttanannaaggttatanaaccaaaagggttgttctttatttggnaagtttctgggggggantttaaacnagttcccnaaaagcctngttttttatntcctaaaatagggacttaaatgacatcactcaagtgacagattttaatanaaactcctcctctttccttctgtcaaagcaaaatatagtgaaagtctntgttgttacctcaaacctcctttcctaataagtgtgcatgcctgtagatggattgggattgcantgaanagagaagttaaacaaaaaggttaaaaaaaa

SEQ ID NO: 2881 - DNA, 813 bp, Homo sapiens
  misc_feature 63, 66, 69, 74, 83, 94, 96, 108, 114, 138, 144, 171, 194,198, 208, 243, 247, 267, 315, 319, 337, 342, 352, 357, 360,363, 364, 382, 402, 442, 477, 524, 529, 547, 555, 566, 581,590, 612, 621, 628, 641, 673, 676, 685, 694, 731, 735: n = A,T,C or G
  misc_feature 744, 758, 783, 793, 810: n = A,T,C or G
tacgactcactataggggcgaaattgggaagctccaccgcggtgtgcggccgaggtaaccagnatnctnggggnaaaccttanaattattttananaaaatgggaagnttggtnggggcctgggggattattaattgnggaagnaaaatggttttgggggtccccccaagnaaaaggggaaaaccccggttagnaagnaattccaggnattaattttaaccaaaaccagggccttttttggtntttnttggaaggggggttttatgnaaaaaaattaatttggaaaaaaattgggaatttttttgggggtttttnattngaaaaaacccgcccaccnaaggnttttttaaanggggnccnaannccaaagggggggcccccnaagaaaaaatttcccctttnggaaacccccccttcctttggcccccccccggttgggggnttttaaattcctttcccccttcccccccccaaagncctttttgggggcccttggcccccttccaaattgggtttccaaattnccaanccaaaggttaaatttttncccccaanttttttttttngggtttttttgggtnttgggcccnaattggggttcctttttgggtngggaaaaanggccccnattttccaaaagngaaaatttttttttcctttccgggcccccttnggnttttttttnccccttccnttcaattttttgggggtttaaaaatttggccccttcnaaanccttttttngggttgggaccttnttccatttttttttccaaaaaaaanttccctttgntttaaatttcccccccngtt

SEQ ID NO: 2882 - DNA, 405 bp, Homo sapiens
  misc_feature 65: n = A,T,C or G
ccgggcaggtacgcgggggcatctgccatgtgccaggctttgtgacacacacacacacacacagnacctgcacgcagatgcacacatttctagtcaaatgaggctctcagctttttgataggggctttttgatacgtgtataaccaatactttattctcactgtagtcaaggactcattgcaattcagaaatgagaagctgatccggaactccactacagctcaaagaaattctcgaatgttctcacctattaacagttattaaaatggaagaagctggggatgaaattgtgagcaatgccatctcctacgctctatacaaagccttcagcaccagtgagcaagacaaggataactggaatgggcagctgaagcttctgctggagtggaaccagctggacttagc

SEQ ID NO: 2883 - DNA, 901 bp, Homo sapiens
  misc_feature 27, 40, 51, 55, 61, 67, 75, 92, 98, 100, 102, 107, 117, 119,139, 145, 149, 163, 175, 179, 181, 185, 189, 199, 212, 216,219, 223, 225, 229, 243, 249, 251, 255, 257, 269, 275, 291,303, 312, 375, 413, 423, 434, 451, 468, 472, 484: n = A,T,C or G
  misc_feature 521, 531, 538, 545, 559, 563, 568, 597, 616, 622, 625, 639,649, 659, 676, 680, 692, 695, 707, 712, 714, 722, 725, 733,735, 737, 740, 745, 746, 768, 783, 788, 789, 802, 803, 804,830, 835, 843, 857, 859, 865, 873, 881, 885, 900: n = A,T,C or G
tacttacacttattagggagaccgganatatggggtaagnccttccccacnccgncggggntggggnccgggtcnccggccgcgccgggggnccaagngntnacctncctatggggncntttgggttctccaattaatntgggtnccgnggtaatagtaattnccttctccaagnttgngnttgngtangtgtaattgnatggttggtttgncctnggnaatntngggnaattttaaaatctnccccgnanggtntngtggaaaattanttaaanttggacaattggggtnttacgctaggtnctccttttntttaccttccccggatttggttggtttttttttggaagggggttggttttttaggttcccccnttggaaccaagccccaatttttgggggccaaaaaaatnaaaatccctnggggttttaantccccaaaaaaaaaagnaaaattttttttttggnggantttatttttttnggaaattttataaaaattgggcctttattaaaaaaancctttttttnttccttnttaattntcttttatctattntatnttctnaaacctttttaaattaaaaatttaaattnttaaaaaaacccaattggntttaanaanaaaaagggccccgnaaatcttttnttaaaaaatngggaaaccctttttttntccnaaatttttgggnaanaaagcaaaattnaattnancccccccnttntacctttngncnccntttcnnccaaattaccatttcctccccnctaaaaaaaattggnggtgnnccaaattgggccnnnaaagtaaaaaaaaacccaaatttccnatccntttaatcnttgggaaaaaaccnanggtttnccttgggngtaaaaanattnaaaaagttttttttng

SEQ ID NO: 2884 - DNA, 974 bp, Homo sapiens
  misc_feature 10, 22, 25, 27, 29, 34, 38, 41, 43, 49, 57, 61, 66, 73, 86,93, 95, 101, 103, 122, 152, 169, 175, 194, 234, 255, 270,396, 427, 561, 807, 844, 944: n = A,T,C or G
tattaggggnccgaattggggnagncntnccacnccgncgngntggggnccggggcnccgnagggnttaccgnaaaaaaaaaaatncaagggncnttaccntnaaaagccccccaacttggntttaaaattattaagggaacccgcccaggnaaccccaaaaatttggnttttanggggaaaaaccagggggtnccccaaaaatttgggggaaggcccaccccaattttaaaancccaaaaaccaaattccaggntgggattgcccaagnaaaatgggagggggccttaattttggaaaaaccaaaaggttaaaggggggggccttaattttttggcccccttccaaggggggcccctggggggggggaaaaaaaaaaattttcaagggggaaccnccccaaggggaaaaaccaagggccttttttnccccccttatttttaaaaatttttccaaaaattttaagggaaaccaaaaggggggcctttcctttaaaaaaaaggaaaggccccaattaaattcccccttgggaacctttttttgggttgggggggccaaaaanggaaatttttaaccaaaaagggaaattgggccttttggcctttcccaaaaaaaaaaagggttcctttaaattttttaacccaaagggaaattgggaaaccaaaaaattggggcccccccccgggaaaaaaaaaaagggtttttaaatttttttgggtttaaagggaaaaaaatttttaaaaaaatttggggggccccctttaaatttgggaaaaaaaaaaaaattgggccccaaaaaaaatttccncccaagggaaaaaaatttgggtttcccaaagggtttnccgggggggccccccaattttaaaaaaaaagggcccccccaattttttaaaaaaaaaaaagggggggaaaaaaggggaaagggttttttccccccaaggnccaaagggggggaagggtttttggggaaat

SEQ ID NO: 2885 - DNA, 626 bp, Homo sapiens
  misc_feature 11, 18, 23, 34, 35, 39, 42, 43, 59, 62, 77, 94, 105, 107,113, 126, 134, 137, 139, 147, 150, 152, 155, 157, 169, 172,175, 182, 185, 190, 218, 230, 243, 247, 251, 253, 255, 259,270, 302: n = A,T,C or G
aatgtgggggnaagaccnttgcnccaacccccgnnccgnggnntggggggcccgggggncgnccgcaagggggtttnaccccccagcctttaanttgggcccccntngggggnccttaagaaattnaattgttnttntnttaaattnttntnttntnttttaatttttnttnttnttgggtnaanggaanggaacccagggggggggttccttttggntttaattgggtntggccccccaagnggcntggntntncttncaaaaaacatncccttattcccttcaaaggcccaattcctccncattctcaagccaacctccaaactttggcttgggaaattaccaagcggggaaaggccacttgtggcccaagcccagactcccttttacctagtatatcatgtctaatttctaacaaaaaattaaaaaaacattgtaagaggaaaaaaagaaaccctaaaacaaacaagcaaacaaaaaacccaaaacaacaaaaagtttcaagaaacagagctagctgacagaactatattcagatatggcaggtatattagaattatcagattggtaattttaaacaactatgactaatatggtaagagtgataatggaaaaaatagacaatt

SEQ ID NO: 2886 - DNA, 968 bp, Homo sapiens
  misc_feature 5, 30, 40, 47, 51, 57, 59, 61, 75, 91, 95, 101, 107, 109,113, 115, 120, 122, 130, 132, 139, 141, 147, 156, 171, 177,185, 187, 188, 194, 213, 219, 223, 225, 233, 236, 241, 247,258, 281, 297, 299, 317, 341, 349, 356, 366, 380, 382: n = A,T,C or G
  misc_feature 403, 433, 452, 473, 474, 476, 485, 487, 496, 498, 502, 505,513, 514, 515, 526, 538, 539, 541, 546, 547, 562, 579, 599,616, 617, 635, 639, 647, 655, 667, 671, 676, 697, 717, 730,733, 735, 750, 784, 789, 790, 815, 816, 822, 858, 866: n = A,T,C or G
  misc_feature 867, 875, 884, 887, 891, 908, 911, 923, 927, 934, 949, 953,958: n = A,T,C or G
acacnttataagggagaccgaaaatatggngtaagccctnccccacnccgncggggntngngtccgagtctccgnctcgccgggagtccangggnttaacnccttgncnaggngntaatncnccaaaatntnggtggtncnccaatntcgtaaatnccttctttccaaganaagatngagacctngnnaagggnaatcacacttaagataagntgtctncctntnccttttcnaangaggntacctnctaaaaggggntcggttaataggggccttccttnggttggttaattccancnaattccaaaattccaacngtgggaaaaacctcccccttttcnaaaccaanttggggnaagggggttnggcctttggggttngnggaaatttttccccttggggncccccttgggaaaaattaaatttccaaggnaaattggggggtttttaanttttaaatttccacccggggnncnccctttccnanaataaaaangncccnacngtgggcannntaaatttgggnaaccttttgggnnantttgnnaaacccaaatttggnggtaaaatttttttccnaaattttaaaaccccaaccnaaaaaaaaaaacccggnntttaaaattttaaatttntccnggggtttnaaaatttnggggtttttttncccnttttncccccccaaaaaaaaaaaggncaaaaagggggccctccccnttttcccaaaaanacnanaaaaaaaaaattttncccaaaaagggggaaaaaaaaaggttaaaaaaangggcnnttttttttttttttttggggccaannaaaaanaaataaataaaattttttttttggggttttgggggnaaaagggnntaaaaaantttcccccnggntttntgaaataaaaaaaaaanccnctttttgggggngggnggaaaanaaaaaaaaaaccccncaanagggntaaaaagggg

SEQ ID NO: 2887 - DNA, 931 bp, Homo sapiens
  misc_feature 20, 28, 30, 32, 38, 41, 51, 55, 66, 73, 77, 79, 83, 85, 96,109, 123, 125, 132, 136, 143, 149, 155, 161, 163, 165, 183,186, 190, 192, 204, 213, 221, 268, 277, 290, 292, 327, 344,363, 390, 401, 425, 486, 489, 493, 500, 514, 518, 532: n = A,T,C or G
  misc_feature 534, 596, 604, 613, 634, 650, 667, 679, 682, 690, 708, 729,738, 759, 765, 796, 803, 812, 818, 826, 832, 841, 843, 845,875, 890, 900, 901, 910: n = A,T,C or G
cgcgttaattacgactcacnttattagngngnccgganatntgggggaagncctncccaactccgncgggatngggncngggncnccgtagcgctnaccaattgggggnaaccttaaccaagngncgaccgnctcncccaacncaaatngactcnccaagncntnccaattttttttgggttnatntctntnttaaggttagtnaagtaccanggggggtnttttctaaccccattggttttgggggccccaagtgtaattggaattncctttttgnaattccttccttntnggaacccccttccaaattggaaattccccggcccncccggtactttttgggnccccttctccccaaaaaanggttggcccttgggggggaattcaacnaaggggcccgnttggaaagccccaaccccaacaancccttggggggccccccttctttattttttaattttccttccttttttaaaaaaggaaggnaangganggaaaanaaaccttaatttgnaaangaaggggcccccananaaaattttaattttttaaaaatttttaaaaaaatttcctttttttaaccccctttttaaagnccaaccanaaagggggngggaaaaaaaaaaaaaaaaanttggggggaaaaattntttttggcccccttaanaattaattttantgngggttggngaatttggtaaaaaaggnccaatttaaacccaacccaanaatttgggnaaaatttaaggtaaaaaaaancccaanaaatttccaacccaatttttttttttaaagntttaaanaaaaaaaangggggnccaaaaanaaaaanaaatttttntngngaaaggtaaaccctttttaaatttaaaaanggcccttaattttantttggggggnntaaaagggncccttttaaaatttttttttt

SEQ ID NO: 2888 - DNA, 971 bp, Homo sapiens
  misc_feature 22, 27, 56, 62, 66, 73, 77, 83, 89, 95, 102, 105, 111, 115,117, 119, 121, 137, 147, 151, 155, 168, 172, 178, 184, 193,215, 217, 223, 242, 248, 255, 258, 260, 284, 308, 316, 377,411, 420, 428, 433, 448, 454, 471, 489, 509, 520, 532: n = A,T,C or G
  misc_feature 546, 551, 583, 610, 613, 624, 628, 630, 687, 706, 711, 733,736, 759, 761, 804, 907, 926, 927, 960: n = A,T,C or G
ccgccgttaatacgtaactttncaacnttattaaggggggaccggaaaaatatggngtaagncctncccaacnccgncggggntggggnccgggnccccggnagngcttanccgntncncnaaccggggtaccatgnctcctttagnccgngctnaaaaagccctttnggtnggttgncctctnaagaaaagngcataaccccccaagtggggtnanagccgnaattgcggaggggccaaanaacctnggaacanagntnagaaaatgacttgaccccttcctnttaattccttccaagccctttttnaatattanaaaaaatttaccttttttttaaaaggaaaagggaaggggggggggtaagggttttaaaggnaaggcccttttcttaaaccaaggaaaaaaaattnccttaaaantttttaanccggncctttatttttttcnaaaaancaaaatttaagcaaaanccaaaaattttccttggnccccccaaattggggggttntttcccccaanggaaaaaccaanggggggggaaaaanccttnttttaagggaaattcccttaaaaaaaaaaggnaattttgggggggggaaaaaaaaaaanaanaatttttgggntccnanaacaagggaaaaaatttttaaaaacaaaacccaaaagggcccaaaaaaaattaaggngggggggtaaaaagggggnttaanaaaaaaaaattcccaatttccnccnccaaaccttttttaaaccaaagngnttaatttggaaaaaaaaaatttgggaaatttttgggggggggncccccaaatttttaaattttttaaaaaaaaagggcccaaaaaaccctttttttttaaagggaaaaaacccccaaattttttttcccaaaaaaaaacccaaggnggggaaagggaaaaaaggnnaaattaaatttttgggttttttttttccaaagnctttttttttc

SEQ ID NO: 2889 - DNA, 948 bp, Homo sapiens
  misc_feature 13, 22, 29, 48, 52, 59, 63, 69, 75, 81, 83, 87, 89, 98, 106,108, 114, 116, 118, 120, 122, 124, 126, 128, 130, 136, 138,140, 142, 144, 148, 150, 152, 154, 156, 158, 162, 164, 166,168, 172, 174, 176, 178, 180, 182, 184, 186, 188: n = A,T,C or G
  misc_feature 190, 192, 194, 207, 209, 211, 213, 215, 217, 219, 223, 225,226, 232, 240, 251, 261, 263, 265, 269, 271, 273, 275, 277,279, 287, 297, 299, 301, 303, 313, 322, 324, 326, 328, 330,338, 340, 342, 347, 417, 419, 428, 447, 468, 477, 485: n = A,T,C or G
  misc_feature 492, 493, 496, 500, 513, 516, 520, 525, 553, 562, 566, 568,584, 598, 608, 609, 614, 634, 637, 651, 662, 664, 667, 670,675, 682, 686, 692, 693, 694, 700, 701, 712, 718, 721, 748,753, 760, 776, 795, 801, 812, 814, 816, 828, 832, 840: n = A,T,C or G
  misc_feature 848, 862, 874, 883, 886, 888, 900, 906, 907, 917, 934, 938: n = A,T,C or G
ttaatacgaactncactttatnagggggnccgaaaatttggggtaagncctnccccacnccgnccgggntggggnccgggncnccgncncccgggggnccaggagntnaccctntntntntntntntntntctatntntntntntatntntntntntntctntntntncctntntntntntnananananananaagaggagaccantntntnantntncaangnncgggtnccaccganaattccaaganaacctgggtntnanccantntntnangnccaaaatnccaaaaccangncnanttgggggggnttgggccanananananaaaaaaananantttcnttaaccaattttaaaaaaaaaacccccctttttttggttttgggggaaaaattgggccttttttaaaccnanctttttttnccccaccaaggaaaaaccnaaggaaaaacacccttaaaanaaaattaanaccccctnggttttnnatnaccnaaatttttaaggnttncaanccaanaaaaattaacccaagggtttcccccttncggagaagntttntntattttttgggccccnccaattaaaccaancccaattggnnaaggntttaatttttttttgggttnccnttaaaaaaaaaaanccaaattgggntnccnttntttcnttttttngggnaaaagnnncaaagnncttttaatggngggccnccnccttggggcctcccaaccaccaaaccntttgngtttggnccttttttggggggcnctttgggaaagtttttttnccaaancaaaaaaaaantncntttgggtttttngggntaaaaaancccccttngggttaaaaggccntttattcccccnccttggggntancnaaccttttttancttttnntttggggggnccttttccctttccccntttnttttccccct

SEQ ID NO: 2890 - DNA, 642 bp, Homo sapiens
  misc_feature 9, 121, 127, 134, 170, 186, 203, 206, 217, 226, 228, 255,272, 307, 340, 350, 359, 381, 383, 389, 400, 414, 432, 447,449, 483, 490, 499, 509, 513, 520, 525, 537, 545, 565, 573,596, 597, 621, 639: n = A,T,C or G
ttgagctcnccgcggtggcggccgccgggcaggtaccaggaacagctggtccaggagcaggagctagcaaaacatgcagatgtggccgggacggctggaggtgctgagggtgggcaccgcntctagnaactagntgggatcccccccggagcttggcaagggaaattttncggattaattccaaangccctttaatttcgaantanccccgttcccnaaccccttncngaaggggggggggggggggcccccccngggttaaccccccaggnccttttttttgggttttcccccctttttttaaggnttgtaagggggggttttaaaaatttttgggccngacccggccnttttggggncccggtttaaaatttccaattngngggttnccaattaaagnccttggtttttttnccctttggttggttaggnaaaaaaatattaggntnttaatttccccggccttttaaccaaaatttttcnccaatcnaccaaaacnattaaccggnaagncccccgnggggnaaggccaatttnaaaaaggnttgtttaaaaaaagcccccnttgggggnggttggccccttaaattggaaannttggaaggcctttaaacctttccnaccaattttaaaattttngcc

SEQ ID NO: 2891 - DNA, 948 bp, Homo sapiens
  misc_feature 23, 25, 31, 34, 40, 43, 47, 54, 58, 66, 68, 70, 76, 78, 82,84, 94, 102, 104, 106, 110, 118, 126, 130, 136, 143, 145,150, 153, 155, 157, 176, 182, 197, 203, 217, 221, 238, 240,254, 260, 268, 274, 278, 290, 308, 318, 337, 348, 361: n = A,T,C or G
  misc_feature 370, 389, 400, 435, 438, 451, 463, 466, 480, 483, 493, 506,519, 521, 529, 531, 536, 554, 560, 595, 611, 635, 640, 657,676, 712, 727, 736, 742, 790, 797, 809, 816, 856, 863, 883,900, 926, 927: n = A,T,C or G
aattacgactcacttataagggngnccgganatntggggnagncctncccaacnccgncggggctngngnccgggncnccgncncgccgggggnccaggggntnancgtncttggggncgtgtgcntttnctgggnaaaaatncnaagtnatntncnccaaggccttccattaagnttccanctcaattaaaaaggnttattnggcccctaggaacnctcntttaacatatgtcaatncnaatttgggggaaanaacctnaagtggtnaatatncgcnaagcaaggccanacgcaaaaaatcttccantcggtgaatntaccacttttaaatttttnaattttaaatngccaaccgttggntaaattccnttgggaaattttccccttnaaaaaagtatnaaccttcccctttttttatttttggcccaaaacanaanaataaaagggggnaaaacacaaaanaanaaaattttgagttnttntgttttgccncaattgcaaaccnaattggggttggncnaacccttncnttgcnaattaaaaaaaaaacccnttgggnaagggggggttttaaattaaatttttttttttttnaaaaaaaacccaaccnttgggtttaatttgggtttaattnttccnaaaaagggaaaaaaaanaaaaattaacttaaatttnccaatttttttaaattaacaacaaccccccatttcnaaattgggatcttantttttaaanttaaanttaaattttttctttccaaaaattggggaaaaaaaaatttgcccaaangggtttngggtttcccccntttgggnttggggcccttttttggggaaaaaaccctttacccttggngaaaccncaaaaaagggttttaatggnggggggaaaaaaaaaanttaaaccctttgggcccttttccggnnttaattttaaaaaaaaaaaaa

SEQ ID NO: 2892 - DNA, 895 bp, Homo sapiens
  misc_feature 174, 188, 203, 233, 267, 269, 307, 309, 315, 321, 359, 369,421, 422, 425, 448, 460, 470, 474, 480, 489, 503, 512, 516,530, 564, 575, 599, 652, 669, 675, 691, 719, 731, 778, 803,806, 815, 820, 821, 822, 828: n = A,T,C or G
cactacttagggcaattggagctccccgcggtggcggccgaggtacaacattatgcttactgcatcccatggaaacttaattccctcctagcacatatttgcatactgaaaggtccgaaaagggcatccacggcagcttgagccccttagcaccatggtaagggagccacagcnattcccaaaaaccnggctttcttttggangaaaaaccccattttgggggggggaaaatngggttcctttttttcctttttcccttttcccaancnaatttcccccaaaaatttttgggtttttttttaaaggntngggttncccttnaaattttttttaaattttttccctttttgggggggggntttggggggnccccccaaagggttttttttttttggggaaaaaaaaaccccccctttaaaannaanaaaaagggggggggggaaacccnaaaaattttaanaaaaaagggncccnaaaaanaaaaaaaangggttttaaatttnccaaagggntttnaaaaaagggggggnaaatttaaagggggggtttgggggggcccctttngggaaaagggnaaaaccccccccccaaaccctttnggggcccccccccctttggggaaagggcccctttaaaccctttaaagggtttngggtttgggggggcccntttggntttgggcccccccttngggtttgggggggggggttttccctttnccttttaagggnaaaaaaccccccaaaatttccctttggggcccaattttttggggggnaaacccgggtttggggaaaaaaggnccncccaacccnaaggnnnccaaanggggggtttgggggggccctttgggggggaaaccctttggggccctttggggggccccccctttggg

SEQ ID NO: 2893 - DNA, 940 bp, Homo sapiens
  misc_feature 26, 37, 55, 64, 68, 84, 94, 103, 105, 125, 131, 147, 148,160, 173, 175, 180, 198, 218, 222, 230, 248, 252, 256, 258,275, 281, 309, 314, 317, 324, 337, 342, 348, 359, 372, 385,395, 404, 419, 420, 455, 461, 464, 488, 493, 509, 531: n = A,T,C or G
  misc_feature 534, 554, 558, 561, 570, 576, 584, 601, 612, 615, 627, 632,665, 667, 682, 685, 692, 714, 723, 726, 743, 754, 760, 769,771, 778, 780, 816, 819, 824, 825, 845, 852, 858, 864, 868,869, 871, 875, 912, 923: n = A,T,C or G
taattacgactcacttataagggggnccggagatttngggtagggcctacccacncggccgggntggnggccggggcccgggcnccccgggggngccaggggntnacgcctgtcattgaggaatnggaacnttttccaaccaaaggnnaaggaatgcacnaccttgatcaatnanttacncctgggggaaccacaacnaaatctccaactaaccaacnaatntcttgtcntaggcattccggtagagnaacnaaantngggcccttggttccaantggggnaaaccaattcccccaaccttggttccgnaaaangcnaaaaaantccttcccggggnaaaanttcaangccctttaggnaaagaaaaaagtnatttaattcttcnttggaaaggnccgcccacnttaaatttccaaaanngaaattttccccaaaaaccttttatttgggggttngggggnccnaaaaaggaaaattccccccccccnaattnttgggatgggtttggnttttatttttgggccccccccnaanaatggggggaaggggggttngggnggnaaaaaatantaaggngaaagggnaaccctttttttttggnaaaaaaaaagngancctccaaatttnccaanaaatttgaaccccccttttcccccaattttccnanaataaaaaaaaattnaanaaaaaanaatttttttccgcctttttggntttgggttnganggtttgggggtttgggngtaaaaagggngggccntttccgggngngggcccncnaagggaaattccggccctttggcaatttggtttggnaanttccnncctttaaggcccctttgggntttgggngaaaanaggttngggnnangggnggaattggccccccctttggaaccaattccgttttcntgggcaccggntcccaaaaagggggaaa

SEQ ID NO: 2894 - DNA, 572 bp, Homo sapiens
  misc_feature 139, 147, 159, 167, 181, 186, 223, 239, 246, 261, 270, 281,297, 340, 361, 377, 382, 413, 415, 427, 436, 445, 468, 490,509, 519, 533, 545, 560: n = A,T,C or G
cttagggcgattggagctccccgcggtggcggccgcccgggcaggtactttttttttttttttttttttttttttttatagttagaaacattttatttaaatgtgccaaataaaaacccacattttcagaccatatgangttaatancatttcaacaanaatttatnattaatccttactnggctnggggaaatttttaaccattagggtaaaattccccagnaatccccaattttttngaatttnaaaaattggggtttnggaaaattntaatccttttntcccctaaggggtttnaccaaccttttttaccagggaccaattccaaccaaaaaatccncccttttaataaaataaaatnggtaaacaccaaaganattanacctttttttccccctaaaaaagggggttgnanacctttgggagnaggcctttncagatcccnattttcttttttcaaggggaacntttggcaacctttcctggccgnaggggaccttttcccttgnatgggggggnaaaacgaacctttnttttttttgggnagaatggggagaatncttgggaccttt

SEQ ID NO: 2895 - DNA, 933 bp, Homo sapiens
  misc_feature 18, 27, 38, 44, 54, 90, 98, 112, 116, 127, 131, 134, 157,175, 178, 184, 187, 190, 199, 204, 213, 225, 263, 275, 287,291, 356, 366, 421, 426, 441, 443, 459, 463, 469, 479, 482,503, 513, 515, 541, 545, 563, 582, 593, 597, 610, 634: n = A,T,C or G
  misc_feature 695, 702, 705, 710, 715, 724, 728, 740, 750, 759, 765, 767,768, 784, 785, 797, 801, 805, 813, 818, 830, 831, 854, 862,867, 869, 891, 911, 925: n = A,T,C or G
taatttaaaggggggggncccggaaanaatttgggggnaaaggncccttccccnaacccccggcccgggggtttggggggcccggggggncccccggnaaagggggtttaanccgncccgggggggngggnggncccgggttgggcccgggttgggnttgggtttgggattgggnccnggcccnggnccngggcctttnaaggntttggtttngggttggggggnaaaccaaaaaagggggaaaagagcttagtggaggaggnggaccaaggccntcgtaaagtatnttangtaaagtttccctccaaaaccttacctttagagtaaaccttccccaatgtttgggccttaatttncatacttttnctttttacttcactccgccaccaccccttaattccttggggttggggttgggggntaaanttgggggggcccggntntttaaattaatttttnggcnggtttncccctttttntcnattttccaattttattccttnaaaaaaattncntgccttttaaaaaaaaaaaaattttntatngggggggtttatgggggnggggggggtttaaattatnggagggggggnaaanaagggggccaaangggggaaaaaaacaaggtgggggnaaaaaaaaaagggggcaaagggaaaggattaaaggtttaaagtccctttgggaaaaacganaaagacnaanacggnaaggnggggaaggngggnaaccaatttggngggaaaaagntaaattggnaataangnnaaaaaaggaaaaaagnnaaatttttaaanaacncccnttgggggnaaggntttttaaaaagnngggaaaaaccccaagggaaattncccccccnccggngntaaagaggggaaaaggggggtncggaaacccaaagggaaagntttttaagggtttncccctttt

SEQ ID NO: 2896 - DNA, 414 bp, Homo sapiens
tacgactcctatagggcgaattggagctccccgcggtggcggccgaggtacagacgggatttcactatgttggccaggctgttctcaaactcctggccttgtgatctaccctcctcaatctcccaaagtgctgagattacaagcgtgatccactgcacccggccagttgttttttttggtttttttgtttttttaggttttttttacgaaaatgtttgggaacagaaatgttgtggatttgagattttgttggattttggaatatttgtattatacctactgtttgaacatcccaagtttgaaaatctgaaaccttaagtgttaacatgagcaccttaataaagtttggacagtatttcttttataaacaatattattgatattgctaactattaacattagaaatgaaagtcg

SEQ ID NO: 2897 - DNA, 413 bp, Homo sapiens
  misc_feature 134, 150, 188, 250, 289, 367, 379, 410: n = A,T,C or G
cactacttagggcgaattggagctccccgcggtggcggccgaggtactttttttttttttttttttttttttgtttaagatgacaatatccataatgctaaaagtttactatatccatcactattcaccctcanaatgccaatattctanaattcctttgctctggctcaaggaaatattaatgcacncagggatttgtataggattgacagagccaactcagcatgacaaatgggggaaattccatgcncaacgtttatgggaaacatcaggttagtatgctgctaanaccagctgctccgtgtgctgcggctcccccgtgcagtcccccatgaatcatgcagacacacagttgccctaagcctgnggcatctactgngtgacttgcttaagcaaagacaagacttttnttt

SEQ ID NO: 2898 - DNA, 383 bp, Homo sapiens
  misc_feature 364, 366: n = A,T,C or G
ccgcggtggcggccgaggtacgcgggggtgacacacacacacacacacagcacctgcacgcagatgcacacatctctagtcaaatgaggctctcagctttttgataggggctttttgatacgtgtataaccaatactttattctcactgtagtcaaggactcattgcaattcagaaatgagaagctgatccggaactccactacagctcaaagaaattctcgaatgttctcacctattaacagttattaaaatggaagaagctggggatgaaattgtgagcaatgccatctcctactctctatacaaagccttcagcaccagtgagcaagacaaggataactggaatgggcaagctgaagcttntnctggagtgggaaccagc

SEQ ID NO: 2899 - DNA, 412 bp, Homo sapiens
aatacgactcctatagggcgaattggagctccccgcggtggcggccgaggtacctatggaactatataatggaattactcctgtgccacttagtgggttgatacatattattggccatccatatggagaaaaaaagcagattgatgcttgtgctgtgatccctcagggtcagcgagcaaagaaatgtcaggaacgtgttcagtctaaaaaagcagaaagtccagagtatgtccatatgtatactcaaagaagtttccagaaaatagttcacaaccctgatgtgattacctatgacactgaatttttctttggggcttccggctcccctgtgtttgattcaaaaggttcattggtggccatgcatgctgctggctttgcttatacttaccaaaatgagactccgtagtatcat

SEQ ID NO: 2900 - DNA, 402 bp, Homo sapiens
  misc_feature 278: n = A,T,C or G
ctatagggcgaattggagctccccgcggtggcggccgcccgggcaggtacgcggggagaaaaagggtggggagtgccctttcttgaaggaatcccttaagtgcacgtctcccgttttcttttcacatcaatgcagagtccctctgtgaatttacaacacccaacacccatgagttcagtccttaagaaggaaaattgagcaagtatttaattggttggacattgcataaaagaggtccatatccaggctaactctagaaattttattctcaaacttanttggcctctttttcttctgtcagaggaccattcttagtggcactggggaaatcttggcacccagaagaattcaactgcgctcactgcaaaaatacaatggcctacattggatttgtagaggaga

SEQ ID NO: 2901 - DNA, 340 bp, Homo sapiens
  misc_feature 2, 175, 192, 229, 254: n = A,T,C or G
ancactacttagggcgaattggagctccccgcggtggcggccgaggtacagactggtccaggttcctggaggtcacactctggggctgccagccaaagggtgcccttaagttggagtgtgggtgacttcctgaacagagctggcactggggagggggtgctcggggtcctttctnttctaacaggccccagntttgtctcaatgacagtgtttctacacctgtgggttntgacaaagacaactgccaaagaatnttcaagaaggaggactgcaagtatatcgtggtggagaagaaggacccaaaaaaagacctgttctgtcagtgaatggataatctaat

SEQ ID NO: 2902 - DNA, 348 bp, Homo sapiens
ccgggcaggtacatggggaaaaaatcagtttcaatagtcaagttagctttgggaatagaactgggttaaactgtgtttaaaaggtctctttaatgcagtaatcctaagtctttaacatgctaatacgcactgtggctttcaaggaaaggatctagtgttttccaaactctgttttcaaaattttgattacagcattcacctccctctttttttccccaatgtcctgtagaaaacactgagagaactgacatttttaactttatatggaaagaatcgtaaatatggtgaatctggatgtcctcatcaaccaacttcaaagactatcacccatgcaatcttgtttcatct

SEQ ID NO: 2903 - DNA, 355 bp, Homo sapiens
aggtacagatcaaaatggagtttcttatgtcttccttttctacatagacacagtgaaagtctgatctctcttttccttacatatcccccccttttctttttgacaaaaccaccatcgtcactatggcccattcttgctggttgctgtctctttggagctgctggatacacctgtagactggcgagtcgattggggtgtctccatctccacacttttctttgcatctccagtgagttcattgtagaactttaaatgtctagtgggtatccaaacaggaagctgattttctcctggtgaaacacaagcaaaacctctcccccacgttatcaccttccccatttcccatgttttattt

SEQ ID NO: 2904 - DNA, 355 bp, Homo sapiens
aggtacgcggggcttttcttgaaggaatcccttaagtgcacgtctcccgttttcttttcacatcaatgcagagtccctctgtgaatttacaacacccaacacccatgagttcagtccttaagaaggaaaattgagcaagtatttaattggttggacattgcataaaagaggtccatatccaggctaactctagaaattttattctcaaacttagttggcctcttttttttctgtcagaggaccattcttagtggcactggggaaatcttggcacccagaagaattcaactgcgctcactgcaaaaatacaatggcctacattggatttgtagaggagaaaggagccctgtattgt

SEQ ID NO: 2905 - DNA, 352 bp, Homo sapiens
ccgggcaggtacgcggggacatcaatgcagagtccctctgtgaatttacaacacccaacacccatgagttcagtccttaagaaggaaaattgagcaagtatttaattggttggacattgcataaaagaggtccatatccaggctaactctagaaattttattctcaaacttagttggcctcttttttttctgtcagaggaccattcttagtggcactggggaaatcttggcacccagaagaattcaactgcgctcactgcaaaaatacaatggcctacattggatttgtagaggagaaaggagccctgtattgtgagctgtgctatgagaaattctttgcccctgaatgtgg

SEQ ID NO: 2906 - DNA, 347 bp, Homo sapiens
ccgggcaggtaccagttgtaaaattaccaggaaccgccatgcctcaagatcgccctgttttctggcttcatcaatgactgcatgcagtgcaccaccctgtccactacgtgatgctgtaggattaagtctcacagtgggcggctgaggatacagcgccgcgtcctgtgttgctggtgaattagacgccatcgctgtgggttgctggtatggtgccgtgctatttggcacaggacacaccgcttgaggtctgtattgaacctctgaaggaggccgatactgaagctcggttggcagccggtattgataaactaccagcggttgggtcttattttctaccggctgatatt

SEQ ID NO: 2907 - DNA, 341 bp, Homo sapiens
gagtgaggcgtcggctgtgtttctcaccgcggtcttttcctcccactcttggctggttggaccctgctatggaaaagttggcccctgagccagagctccagcagccttgttagggcgtggcctgaggcttggataagtgggatgtaaaacgaagatcaggagcagatttgaagaattacaaagtgaattggtgccagtcagcatgtcagagacagaccacatagcctctacttcctctgataaaaatgttgggaaaacacctgaattaaaggaagactcatgcaacttgttttctggcaatgaaagcagcaaattagaaaatgagtccaaactattgtcat

SEQ ID NO: 2908 - DNA, 345 bp, Homo sapiens
aggtacttaatcctggttggtttacccattctaaattatttatgtgagatagctatctatttggaaaaaagtaaagtgaaagtcttacctcaatccacactcaaaaatagtttactatatgacagatctatggcaggcagatttgatggctcaatgaactccaccctcccagtgttcacacctttatgtagttcccacttacagggagccaaaggtccgtgggacgtgaccaactcagcattccactggaggctatatgatcaaacagcaaactgtttatcatgaatgcaggatgtgagcaaactcaccattgctcctgccgacagaaggttttctggaggcaat

SEQ ID NO: 2909 - DNA, 328 bp, Homo sapiens
  misc_feature 21, 70, 71, 89, 91, 92, 93, 108, 109, 119, 122, 124, 127,128, 129, 133, 145, 162, 164, 170, 171, 172, 180, 181, 203,240, 283, 300, 301: n = A,T,C or G
taccggcgaattgtttttccnccaaggtcccggccgcccgggcaggtacttttttttttttttttttttnntttttatttttttttttntnnnccctgtttttttttnntttttttttntananttnnnctgngcccagaaattntgcatcgggaaaatctnanggcttnnnatgccaannctgagtaggattatggccaagnccaggaagcttctgccggttagctggccacgatatcnaactattttggctttgtcaggtgttcttctcaaaaattggcanaagtggtgaagaatccnnatgccccgctgaatctccctggctgac

SEQ ID NO: 2910 - DNA, 341 bp, Homo sapiens
  misc_feature 135, 136, 140, 160, 170, 189, 242, 302, 334: n = A,T,C or G
ttttcccctccttgagattactgtagtgtgttccagctaatttctatttggaaacgagttggaacagctgaaaactaggtattattgaaggcaaagcagcctcacgtcatttttttatcagctcatttgggaagnntttntttttttttttttttttttnaattaattanaaagtaggctgggcacggnggctcatgcctataatcccagcacttggggaggccgaggatctcctctctggnggatcacttgagggcaggagttaagagaccatcctggccaacatgatgaaaccctgtctntactaaaaatacaaaaagtagctgggcgtggnggcatac

SEQ ID NO: 2911 - DNA, 524 bp, Homo sapiens
  misc_feature 152, 164, 172, 191, 226, 229, 235, 246, 248, 251, 260, 263,317, 323, 341, 344, 352, 360, 366, 383, 398, 404, 407, 409,420, 423, 433, 456, 461, 491, 509: n = A,T,C or G
ggcggccgaggtacgcgggggggcaaaaaatcaaggtatttggtcccggaacaaagcttatcattacaggtaagttttctttaaattttgcaatgtaaagaagggatgggaggctggcaggcaggagctggctcagaattctaggattcccnccttggtcactnaaatcaangggtggaaaaatctcccanaagagggttcatggttgaactttggggttcattgnccntttagngaggttcaagnantcnttttttccntgncaccttatgccattgggggagtaacattttaccttaaaggggaggcttttaagnacccanaccatggccaaaaattcnttnttaaaagnggaattgnggaagngcccctttaattggttntggtttcccaatttnggggtnatncntccttccttgnttnggaaaaaagntttttttggttggaaaaccaaanggttntttaaggtttttttggaaggaatttttttnattttttcttttccaagnttttccttaaaaaaa

SEQ ID NO: 2912 - DNA, 422 bp, Homo sapiens
  misc_feature 164, 171: n = A,T,C or G
gcggtggcggccgaggtacccttccactcctactccactttgagatatcccacctttttaggttaaaccaatatgtagcctcatgtattgatttatgactttgcctgtaacctctgccacgctgcctttaaaaacccttacctgtgtaagccatctgggagttnagggtcnttaagccatgacctccctgatcctccttgcttggtgccctgcaacaaatgccccactttctctccctgcaatcccgatgtcagtgtgtggctttgctgctctgggtgggcagacccaagttcagcaagtaaccattctaaggagggtgtttacaccttcttcatgatcccttgtcactgtttcatcctaaatcctgattccaacccaattatctgttccttctcatcatctcccctctctttatttcactg

SEQ ID NO: 2913 - DNA, 542 bp, Homo sapiens
  misc_feature 15, 148, 175, 187, 195, 216, 225, 261, 265, 271, 275, 286,287, 306, 308, 315, 333, 336, 340, 371, 377, 380, 387, 401,410, 423, 444, 475, 482, 511, 524, 528: n = A,T,C or G
ccgggcaggtacgtncacggtcagccttgcggtaagcttgtgtgcttagaggaacccagggtaacgatggggcaaactgaaagtaaatatgcctcttatctcagctttattaaaatccctttaagaagagggggagttagagcttttncaggaaaaaattcttaattttaccccntatttttcaaancaattagnaaaccaattttctgccccatnggtttttcncagaaaccaaggcggaaaccttttagcatcctttanaagnattggngtanaaaaaaatttnngctaataagtaaatttaananaccaaangccaaaattaagtggaanagngttnaataaaatttccattctcccacctttaaccnggttanttngaaaaanttggaattttgggnggccccaanttttaatttaaanaaggccaaaaccttttttaangaaaaccccaattttttttcaaaaacccagntggaagnaaaaggcatttattttggttcttttccangctattttccttngganttggcccccccctt

SEQ ID NO: 2914 - DNA, 444 bp, Homo sapiens
  misc_feature 193: n = A,T,C or G
ggcgaattggagctccccgcggtggcggccgcccgggcaggtacttgatggactcatcattacagaatactcctcgttggaagggggtatgccttgaagtaagaattgcaaaaggcaatccagctagcaaaagggaataaatgaaaatatcattaaaaaagaaatatcaaaactaattaatggccattaattnttcccacagactcttgtctaaaaatgcatttgccgtgaaaataaatgagagcacatgtaaaaaaggaaatgcagcaatgcatgcaacagaagttagaaagattacagttttaagataaagatgttttgtctacagcaaacaaagtgttcaaatcctctattaaccaatttaacaaaagagttatctttcctttgtttctgtcccaaacacactaaatggattttggaaaaatctcttctcacgttcttgtt

SEQ ID NO: 2915 - DNA, 660 bp, Homo sapiens
  misc_feature 155, 180, 204, 209, 211, 233, 235, 237, 256, 264, 325, 326,333, 362, 383, 385, 400, 411, 424, 444, 452, 457, 465, 467,475, 477, 478, 482, 520, 546, 554, 559, 569, 572, 582, 589,598, 613, 628, 635: n = A,T,C or G
ccgggcaggtacgtgacaggagttgactatttctttctaactggagtcagccctccatatccttgggatccacatccaaggattcaaccaacctcagatgggaaatattcaaaagaacaaacaaacaatttaaacaaaaaaagaaaaaacaattnggaaccaatttaaaaaaataaatanccaacttttttaaaaaaataaccngttantnaaccaaaccttattcttaacantngngccaatttttaccattttntattttgnggggtaatttaattaaaggctggaattcctaagcagctaaaatttcttaaaaaagttggtnnattgggnggggaaaaaaattgattggccaattaagnggccctaattaattaattaananaattagccttaattngtccttaattntttttaaccaagnggggcaaccttttggaaagnccaattcnccttntccttggntnggggaatntnntttnggggttaaattccccaaaaggggggtttttttctaagngggaaaaaccccaaaatttccccccnccccattnggggnaattaccccnaanaaggaaaggnaattggnaacctttangtaaccttccaattnaattccaaaaaaaanttaattncttttcctttggaaccttttccaaa

SEQ ID NO: 2916 - DNA, 437 bp, Homo sapiens
  misc_feature 176, 180, 183, 186, 188, 190, 198: n = A,T,C or G
ggagctccccgcggtggcggccgaggtaccttccattccagtggagggagaaggatcatggaagccaagcaaatatgcttgttcactccaaaaaggcctaggcccagccaccacctctcaccttaaccattgcaataacttaactggtgtccctgctcctacccttctgctgtccnattnaanacngnanaccagagntaatttgtataaaacacaaatataacagaaacacaaaacctcttccccaactttaaaccttctagtcacttcccatagctctttgaataaaattccaaacccattcccatggcctacagacctctgtatcatcaggtccttcccaccatgcagatcttcctggtctccctcggctgcagccacacaaatctcccctctgtttttctgatgccagcttctcggcacttgctatttcttct

SEQ ID NO: 2917 - DNA, 619 bp, Homo sapiens
  misc_feature 152, 153, 161, 164, 175, 227, 233, 246, 249, 252, 275, 298,318, 372, 374, 376, 399, 401, 427, 431, 448, 451, 480, 484,486, 497, 512, 520, 565, 585: n = A,T,C or G
ccgggcaggtacttgtgcatgaataaatttattcttcttttctgttgcagatataaatatttctgattgtgccattttgattacccaactaggaaaagagagagagagacagagaataacataggcttttgaatgaacgcctgaaatattcnnaaggaacnccnttttaaattcnttttttttaaaaagtttttctccacaataaatttttgaaaccaaaatggagnaaaaangccaaattcttcnaantangccttcagtagggaaatatttgnccagtaaagaaatttgtcttggnttaaccccacgggccattcntttggttccttaccctcaagatactttttggccccttctcggaaggggaaccangngncccaaggaagggccttttccagngnttccaagattggttccaagggttggnttgntggatggaaatctggtnttngggtttggttctaaggggaaaaaaggggnaggngnttaaataattngggtttttccaaaanggccaagnggggaaccttgggccccatttttccccaattggcccccaaccttncaattgggaaggggtttttnccaaggaaattattggttcctttgggggaataaa

SEQ ID NO: 2918 - DNA, 498 bp, Homo sapiens
  misc_feature 111, 148, 163, 169, 171, 204, 210, 226, 231, 246, 257, 265,267, 274, 283, 309, 318, 329, 336, 344, 348, 353, 357, 379,397, 408, 414, 417, 419, 430: n = A,T,C or G
aggtacattagtaattataacaatgcattaaaattttcatttcatgtcatagagaatcagttttcttcatgatgatacattatgttttactgagtgagtttgtccctccanagacctttctgggaacatgccttctccagggactgtnttccttaaggattgnccccangnttgtcttaacccccctaggggttcattcctttnttgggnccaatttttataaaangtcanggttcaaaagtcttngttccttgtgnaacttggncnactcccnttcctttcnaaacctttgtaaaggttttggtaagnccccaacanattttcccccntttttcnttccttanaaanaaccncccnttaaaacccgtccccggtctcnatttccaacctttaaaangaaggaaaaantggggnggncnaattcctttcngggggccttttggggttccaagaaaggccatttttaactttaaaaccaaaaggccttaaaattggttg

SEQ ID NO: 2919 - DNA, 413 bp, Homo sapiens
gctccccgcggtggcggccgcccgggcaggtacaaatgtccctgaggcaaaagcatgcttgctgtgttctaggaaaagcaaggaagacagcatgtctatagcagtgggaggtggaaggataataaacagtaggtgaggttagaggggaccaaatcatgtattttccatccagaggtttcccaaccttggctgcacattaagatttattctaaggagcttttaaaaaataccaatgactgggtcccagcctagagtgattaaatcagaatctctggaggtagacttgagaatcttgatgtttgcaagtttcctaggcaagtcaaggctgaagaagactgctgcaggccattgtaagagccaggcgttgatctcatttcaaccttttccctcagctcttctaggagacagccagc

SEQ ID NO: 2920 - DNA, 341 bp, Homo sapiens
  misc_feature 167, 181, 216, 220, 247, 260, 301, 320: n = A,T,C or G
ccgggcaggcaccagttgtaaaattaccaggaaccgccatgcctcaagatcgccctgttttctggcttcatcaatgactgcatgcagtgcaccaccctgtccactacgtgatgctgtaggattaagtctcacagtgggcggctgaggatacagcgccgcgtcctgtnttggttgggtgaanttaaaacgccatcgctgtggggtttgctgggtatnggtngccgtgcttattttggcacaggacacnaccgcttgaggtntgtatttgaacctctgaaggaggccgatactgaagctcggntggcagccggtattgatanactaccagcggttgggtctta

SEQ ID NO: 2921 - DNA, 528 bp, Homo sapiens
  misc_feature 42, 457, 467, 510, 512: n = A,T,C or G
tagggcgaattggagctccccgcggtggcggcccgaggtacnatgttcaggaaaccaaggacaatattgctctactgttggaaacagagtaatcaaaattttctgtgctagccttaattcctgccctctttaagaggagcttaataaaatgtaaatatgcagaatgtttacttttggattgtctcatggtgtccctggaatgctccgagtgcacaagcttaccgcaaggcccgaccacacgttctcgggagttcctggacagaccgttcttcacaacgaccacgctcaggtgtaacttcacctgggttcgaggagaccgtgttgggtgccaaagatgtaggggaacctgcctgatacaccacccgcaggctctccccttccggtggagacgagggaatgagaaaagaaataaagacaaagacacaaagtttaagagttaacaaaaagtggggtcaanggatccatcncaaccgtggagattgcaaaggcccccgcgtacctgcccgggcngnccgtctagaactagtg

SEQ ID NO: 2922 - DNA, 675 bp, Homo sapiens
  misc_feature 409, 443, 467, 589, 591, 638, 658: n = A,T,C or G
ccgcggtggcggccgaggtacccgaggtcattttgcttcctatagactgcgaccttttggcaaaagctgttctaactccatctcagcatttacaattccatacctggtggtcagaggaggcccgcctgcaggctcagctaaatcgggctgatggcattccaattctcaggctcagcccacaggctccgataattactctgatactactgctcatttaggctttgatgctctcaccacggaacaagtaacaaaggtgtgtatgagagcttgggataaattacgcaccccaggccaagcttctgtttcttttactattgttaaacagggtcacaatgaattatatcttgattttttagctaaattacaagatgctgttgaaaaatctgtctctgatgagcacactcaaggnattcttcttcatatgttagcttttcaaaatgccnaaccatgaatggtaaaatggccgngcattccatcctacgtcaaaatttacctgatcatgaggtgttgcctgcatatattaaagcttgtgaaggcgttggatcggagacccacagagctattctgtgggcaccggccatgaaacacngnaaccaaactggctcgactgatcttttcttggagcctgctataattgngggcaactttggtcatcccnaaaaaaaaaaaaaaaaa

SEQ ID NO: 2923 - DNA, 525 bp, Homo sapiens
  misc_feature 3, 363, 366, 399, 427, 429, 466: n = A,T,C or G
tcntataattcctttgcttgtaactgcccaataaatggatgaggactcacttcacccataaataagaaaggtgaacagcacatggggcctgtagatgccttttgcagggccctcttttctcttcctaaagttgcaatttgagtatttctctagatgggcacatcatagaaactgtcgtcctagatcagagcctggggagagagatacaggtgtcatgcttacatctgcagagtgagaacaagcccagaaaaatcaagatgattaagcagagagcttccatactggagataaaccagctgtgtaaaaaatcattgcaccaaaaaagcattgtaccatcgacataactgctttaactaagaagtnaangaactgatgccccagcagaacaccagagagccncagagacaggagctgcatttcaaacaangncattgctggtgtccccacccttgagttaaagtatctntgcttcaccctttcttaccaaagttctgcttgacatccctttggtttggtttctttttt

SEQ ID NO: 2924 - DNA, 620 bp, Homo sapiens
  misc_feature 170, 208, 270, 318, 333, 334, 345, 356, 379, 387, 394, 444,449, 455, 464, 480, 508, 512, 514, 548, 573, 594: n = A,T,C or G
cgaggtacttgagtcaaagacgacatttagattcttcagctttgaagcatttagtaacatcattgtctagtcaggcagaggaaagaaattcaaaagcactttctttttcttctgtcagttcctttgcagtaagatccatcttctcacgtgagaaatcattaataggggangacccttttaaaccaaactttccaggttcttttatttnctttgaattaccaaaccaggggaaaatggagataagaagcaagaatcaattcagggaaacancccatatgggagtttgccattcagtagaattaaacaacccccattggnaccaacaaaaacctnntcccccttctnggggggtttcncaaaaacccaggaattggtcccncttggacngttgggnttccaccaaggaatggggccttttttggccaagccaagaaccaatggggncaccntggggnattaaggtntttttccggaaggccncttttggattggaaccaaggctatggcngtcncnaaccgcctttggacttggccaaccaaggttctgnttgggaaccaaaaaattttccttcncccctttggaagccccaaggncttggttccaatttcttttttcaagg

SEQ ID NO: 2925 - DNA, 584 bp, Homo sapiens
  misc_feature 166, 179, 188, 217, 235, 244, 245, 282, 295, 298, 300, 311,323, 332, 336, 364, 367, 388, 393, 405, 408, 410, 420, 446,451, 453, 469, 471, 475, 502, 528, 540, 544, 548, 553, 557,559, 569: n = A,T,C or G
ccgggcaggtactttgaacctgttgttcctttacctgatctagttgaagtatccagtggtgaggaaaatgaacaagttgtttttagtcacagggcaaaactctacagatacgataaagatgttggtcaatggaaagaaaggggcattggtgatttaaaagattttnaaccagcaaattnttgaataanttaaaggccaaggtttcggttattaagcnggattgaagtaagggggnaccccaaannttattttaaaaaaaccttttttggtggcctcaaattncaactagggatantananccttccccagnaaccaattggancttttttgnccanaaaaaattaattggaaaaaagggggganccnaagcaaaaaaggaaaggttanttggngttattggtagnggnanccttggctanttggttggaatttttttggccaaggnaattngngggatgcaaaaatggnanaaanatggttatgtaagtccaattttttaangtccttggtgttccggatctttttanaaaaccttaacnaagngcanttggntttngncaacgtaacnttccggttttttaaa

SEQ ID NO: 2926 - DNA, 469 bp, Homo sapiens
cgaattggagctccccgcggtggcggccgcccgggcaggtaccggggtcattttgcttcctatagactgccaccttttggcaaaagctgttctaactccatctcagcatttacaattccatacctggtggtcagaggaggcccgcctgcaggctcagctaaatcgggctgatggcattccaattactcaggctcagcttcacaggcttccgataatttctctgatactactgctcatttaggctttgatgctctcaccacggaacaagtaacaaaggtgtgtatgagagcttgggataaattacgcaccccaggccaagcttctgtttcttttactattgttaaacagggtcacaatgaattatatcttgattttttagctaaattacaagatgctgttgaaaaatctgtctctgatgagcacactcaaggtattcttcttcatatgttaagcttttcaaaatgcgaac

SEQ ID NO: 2927 - DNA, 665 bp, Homo sapiens
  misc_feature 102, 165, 171, 172, 181, 190, 196, 220, 221, 236, 247, 250,255, 259, 271, 274, 280, 283, 284, 292, 296, 298, 302, 316,345, 356, 368, 374, 379, 398, 401, 412, 413, 428, 433, 435,437, 442, 448, 463, 470, 473, 479, 481, 484, 502, 522: n = A,T,C or G
  misc_feature 556, 562, 576, 602, 614, 633, 653, 658, 662: n = A,T,C or G
ccgggcaggtaccgcggggaggcattgaggcagccagcgcaggggcttctgctgagggggcaggcggagcttgaggaaaccgcagataagtttttttctctnttgaaagatagagattaatacaactacttaaaaaatatagtcaataggtttactaagatattnctttanncgtttaagntttttttanccgtanattttttaaaataaagcctttaanngaatttttttaaagnaagaaaaaaanttnttganaagnaacctttaaggnaangaaagntanntccattgnaagngnaaanggggaaaaaaaagnaattacataaaggggtttttaccttaaanaaaccaattgnaaccgcgtaagnggtatnggaanaaatggaaaaggccttttnctnttcaattgggnnagtttaaaaaaaaanaattngntnatttntaaaanaaagcaaaaaaaatnttggaantanggaaananggnaaccttaaccaaggaagnccccccccggaaaattttanattatcccccaaaattaaggtaaaagggggggcnaaaatngcctttttttttanggaattttaaaaaaattggaaaaagngggttggaaccnttttaaaaaaccaagggcnttttaaaaaaaggtttttanggttntttnaaa

SEQ ID NO: 2928 - DNA, 452 bp, Homo sapiens
  misc_feature 206, 222: n = A,T,C or G
ggcgaattggagctccccgcggtggcggccgaggtacgcgggggacatcaatgcagagtccctctgtgaatttacaacacccaacacccatgagttcagtccttaagaaggaaaattgagcaagtatttaattggttggacattgcataaaagaggtccatatccaggctaactctagaaattttattctcaaacttagttggccntctttttttcttctgncagagggaccattcttagtggcactggggaaattcttggcacccagaagaattcaactgcgctcactgcaaaaatacaatggcctacattggatttgtagaggagaaaggagccctgtattgtgagctgtgctatgagaaattctttgcccctgaatgtggtcgatgccaaaggaagatccttgggagaagtcatcaatgcgttgaaacaaacttggcatgtttcctgtt

SEQ ID NO: 2929 - DNA, 654 bp, Homo sapiens
  misc_feature 164, 193, 202, 217, 223, 228, 246, 263, 265, 272, 275, 282,286, 306, 312, 318, 322, 324, 332, 337, 363, 372, 381, 404,415, 423, 440, 448, 450, 453, 455, 460, 465, 470, 486, 495,521, 528, 537, 539, 548, 566, 606, 615, 617, 619, 630: n = A,T,C or G
  misc_feature 644: n = A,T,C or G
aggtactattctatcattattgtataacggttttcaaaccagtgggcacacagagaacctcactctgtaataacaatgaggaatagccacggcgatctccagcaccaatctctccatgttttccgcagctcctccagccaacccaaataggcgcctgctatagntggtagaacatccctgcgggctttcttangccctttgntcccccttcttcctntaagtnggttnctttttaaattcaagtantaaaccttgtcccttgngnaaaggcnccntttttcnattntttttaaccaaccggccccncttggnaaaggncaangntccttttnctttnttggcccttaaggttttggaaaaatnttaattggnttgggggtnggttggttttttttttccccggntaaaatttaanaagggccnaaaaaaaattaaaacanttttttananaananaaaanaattngtaanaaaaaaagggttttgnaaccttttnttttggtaccccaattgggggtcaanttttttnttaaaattntnggggaaatnggaaccaatttccaaaanaattttggaaaattaatttccccaaatggggttaaaaggnaaaaaccangncnaattggggccnaaaattttgggggnccttgggttg

SEQ ID NO: 2930 - DNA, 462 bp, Homo sapiens
  misc_feature 180, 194, 215, 255, 348, 372, 394, 398, 407, 427, 437, 440: n = A,T,C or G
ggcgaattggagctccccgcggtggcggccgcccgggcaggtacagagaagcaggttgagtggatggcaaagtgaccggttgagggaccaaaatgataggagggtgaggggctgtggtggatgggggagggcctgcagaattacaggtaaattgtagtttggatggctccggaggcaaanactgtaaaggtttngagagggaataagttaagcantagattttttcctgggcttgtcttgagttggggcccgcangagctacaagtgtcggctcttcgtgaaaagaaataagatcatcagggggtgatgttaagccaaagtcactggagttagatattgaatcctcantatcgtcaggtgggggaggagtancgcaaagggaggggctgagcanatantgaaggccnagtgggagaggaaagctgangaataggtanagnggtggccagattcagaaaactg

SEQ ID NO: 2931 - DNA, 544 bp, Homo sapiens
  misc_feature 177, 185, 188, 194, 198, 202, 212, 219, 240, 246, 252, 268,271, 294, 300, 306, 330, 340, 343, 353, 364, 366, 382, 401,409, 412, 443, 469, 476, 487, 491, 505, 507: n = A,T,C or G
catcttgggtcatcgatgagcctcgccctgtgcctggtcccgcttgtgagggaaggacattagaaaatgaattgatgtgttccttaaaggatgggcaggaaaacagatcctgttgtggatatttatttgaacgggattacagatttgaaatgaagtcacaaaagttgaagccatttnacccaatngangtaggnaaanccangaacgtaganaaaattntttggatgggctttcaacaangaacantgcaanccaaaaacaaaaaaantgngaaaatacttggtgaatgaccantgtagngcaagnctcatagcttgggggtagggtagnattaacccancgngggtggcagnaggggttcagngnaatttcttggcccctngcttggccctaaaaaactngttggcgnttncattaaacccaatattccattttcatatttntcttaacccctcaaaaaaccaaaagncttggtntgttaaatatnctgnatccttctaccggntntccttttcttggggccccaaaccaatttcttcccatt

SEQ ID NO: 2932 - DNA, 581 bp, Homo sapiens
  misc_feature 171, 178, 190, 205, 207, 219, 236, 241, 249, 267, 272, 280,281, 294, 303, 304, 307, 320, 336, 337, 339, 341, 357, 367,373, 377, 384, 392, 394, 406, 411, 415, 417, 419, 426, 435,437, 443, 446, 467, 473, 479, 488, 496, 503, 509, 529: n = A,T,C or G
  misc_feature 531, 542, 545, 554, 560, 561: n = A,T,C or G
ccgggcaggtacttactttttaagaattagagacagtaactccaaaaataattgtccttttttctttctttttttttttacaataaggctcttgaaaattgtcattacttgtgttttcctatacattcatctgtgtgaaagcctttttcttctttgatttaaacaaaaaanttaactnttaccccgttcnaaatgggtttttaangnaaaccttttatnaaaacttaccttttagnaaatnttaaaatnggccttaaaaagggtggntccangataaaannaaaaaattttaantttttcaannccntctccaacattanaattttggttggaacnntngngtcacctccaatgggnaaaattttcnttcccncttnttcacanccaccgcntnggctccccaacnccttngaancncntttcaanccctttcancnccttcnacntccgacaactcccggccaacnccgtcnaacccnaagggaagncccccatngtaaggnccaagncctttggcctttggttaccntnggccaaggctnatngtggaaccnaaccanngttattccccttaccaatta

SEQ ID NO: 2933 - DNA, 572 bp, Homo sapiens
  misc_feature 159, 182, 209, 225, 270, 276, 279, 292, 294, 299, 315, 340,346, 350, 367, 390, 421, 444, 450, 455, 470, 476, 484, 488,490, 528, 535, 558, 561: n = A,T,C or G
aggtacccctccaagccggacaacccgggcgaggacgcaccagcggaggacatggccagatactactcggcgctgcgacactacatcaacctcatcaccaggcagagatatggaaaacgatccagcccagagacactgatttcagacctcttgatgagnaggaaaagcacaagaaaaaatgntttccccaggaaccttcgggcttttgnaaagaaccccttggcnaaatggtggggttgaatgggggaaaaattgaaggaacctttggcntccttnctngggcccctttttntnccctnattgttttccaggccncccaattaatttttcaattccggtnggtganaaanaccggaaggaaaattcnccaccccccattcccctttaccnccaaaatgggccaattggccaaggcccccanccttgggtgggccttgggaaaanttttcnttggnccaaaattgggtttntattcncctttttngttncnaattccaattttgggttaattaattaattggttgggtnggttttnttaaaaaattaaaaaagggttanttncaattggccaa

SEQ ID NO: 2934 - DNA, 445 bp, Homo sapiens
  misc_feature 51, 199: n = A,T,C or G
aattggagctccccgcggtggcggccgcccgggcaggtacgaaaaaatcanggctactaagcccactgttaatatagacgcagaccaattgttaggaacaggtccaaattggagcaccattaaccaacaatcagtgatgcagaatgaggctattgaacaagtaagggctatttgcctcagggcctggggaaaaattcangacccaggaacagcttttccctattaattcaattaagacaaggctctaaagagccatatcctgactttgtggcaagattacaagatgctgctcaaaagtctattacagatgacaatgcccgaaaagttattgtagaattaatggcctatgaaaatgcaaatccagaatgtcagtcggccataaagccattaaaaggaaaagttccagcaggagttgatgtaattacagaatatgtgaaggcttgtg

SEQ ID NO: 2935 - DNA, 562 bp, Homo sapiens
ccgcggtggcggcccgaggtacaaagtccctgaggcaaaagcatgcttgctgtgttctaggaaaagcaaggaagacagcatgtctatagcagtgggaggtggaaggataataaacagtaggtgaggttagaggggaccaaatcatgtattttccatccagaggttcccaaccttggctgcacattagatttattctaaggagcttttaaaaaataccaatgactgggtcccagcctagagtgattaaatcagaatctctggaggtagacttgagaatctgatgtttgcaagtttcctaggcaagtcaaggctgaggaagactgctgcaggccattgtaagagccaggcgttgatctcattcaacctttccctcagctcttctagagacagccagcattctcttatgggcacaaatacagcctttcaccctcacagaaagacacaggacaacaaattcaataaattaattcactggcatggatgattttctcagactaattgtttccagtttgataggagacaattaaaggctggaaggcactggatgcctgatgatgaagtg

SEQ ID NO: 2936 - DNA, 583 bp, Homo sapiens
  misc_feature 502: n = A,T,C or G
cgcggtggcggcccgaggtacattaacatagggacccctcccctggagcatagcagcccgatgttttgtccaggcaattgattctggttagcctgttgttcacacaattcatcatattctgccctccagagggggtattgactcgcctcctaaagttgttttagctagcactgaccagtcccatggagtcatatggtagttatctgctattgcctcaattaatcctcttgtgaatgggctagtggccccattttctctaatgctttttcttatttccttagaagtgttcaatgtaatgggctcatgcacccaattgccttgttgatcttgcatcactgggcaggccaagagttccccttccaatgctgcttgcctaaggcagggtcccataactgtagtatatcgcttgtcttcttcccagttcattggggggagggggaggaaaacctccgtctcctctttggtatctttagccagtgacggcaaggctgagggaggctgngcattaaagtgggtagtggttccccttcccttatctttttgggctcttctatgaaagagcaagggccaaaagcaacccttt

SEQ ID NO: 2937 - DNA, 711 bp, Homo sapiens
  misc_feature 555, 621, 682: n = A,T,C or G
taatacgactactataggggcgaaattgggagctccacccgcggtggcggcccgaggtaccagttgtaaaattaccaggaaccgccatgcctcaagatcgccctgttttctggcttcatcaatgactgcatgcagtgcaccaccctgtccactacgtgatgctgtaggattaagtctcacagtgggcggctgaggatacagcgccgcgtcctgtgttgctggtgaattagacgccatcgctgtgggttgctggtatggtgccgtgctatttggcacaggacacaccgcttgaggtctgtattgaacctctgaaggaggccgatactgaagctcggttggcagccggtattgataaactaccagcggttgggtcttattttctaccggctgatattgtggatactgtatctgagttggcattgccgggatagagactctgtccctttctacttgattttctcttggggtttgtgcttgtctaacctgcgtttgaggttgtaatgttacaggcatctgaaccacgggaggaggagttgatggcgaatcgtggtttangctctgatggccccaatgattctggactcctttccccaaattttgatgattcaagggtatattatnttctgtaaattgactgtagtcaaacaattttgcgttgacttgagccattacagaattttgnttacatattttaccaatggggaacctttt

SEQ ID NO: 2938 - DNA, 585 bp, Homo sapiens
  misc_feature 533, 570: n = A,T,C or G
tcctatagggcgaattggagctccccgcggtggcggccgcccgggcaggtacgaaaaaatcaggctactaagcccactgttaatatagacgcagaccaattgttaggaacaggtccaaattggagcaccattaaccaacaatcagtgatgcagaatgaggctattgaacaagtaagggctatttgcctcagggcctggggaaaaattcaggacccaggaacagctttccctattaattcaattagacaaggctctaaagagccatatcctgactttgtggcaagattacaagatgctgctcaaaagtctattacagatgacaatgcccgaaaagttattgtagaattaatggcctatgaaaatgcaaatccagaatgtcagtcggccataaagccattaaaaggaaaagttccagcaggagttgatgtaattacagaatatgtgaaggcttgtgatgggattggaggagctatgcataaggcaatgctaatggctcaagcaatgagggggctcactctaggaggacaagttanacatttgggaaaaaatgttataattgtggtcaaatcnggcattttgaaaaag

SEQ ID NO: 2939 - DNA, 651 bp, Homo sapiens
  misc_feature 623, 631: n = A,T,C or G
cgcccgggcaggtaccaggagggtattgatgtttgaggtccaaactgaaaacccatcacctccttcccactgctatagcagcgttagccctggggttcattatctagccagttcacaccttctaaagtggggctctgaaaatgtcttacttccctcacagacaaagcaattctcaagcctcctgagatcacccaccaaccagagcaactgctgtcacttggaggtgcagctgaattcttctaattgtgacacaaactcttgaaactgtaaatgctgaaagattaaatgaggttataacactcagaaggttttacaagtaaaagtaagtcaaatcaataggtctttatttcatatctgtaatggtttagctctgcgggaagtgttagcagctatatgaattaggaagaatttagaagacaatccctaaacacatgaaatgtccaagtaagaagataacatatttatccaaatatttaaagtgaaatgctccagatatgggaagcttacagttttcaagcaaagctttttagaaaaaattatggaactattttaaagagagctaaacatttctttgccttaggcagaatatacagaacacagattcaccttttctgtacctcggncgctctanactagtggatcccccgggct

SEQ ID NO: 2940 - DNA, 558 bp, Homo sapiens
  misc_feature 519: n = A,T,C or G
aggtacgactgtaacaaggaccattctctgcttcccagatggacctctgtgtcctcccatcgtggaggaaacagaaggacaaaatgggcctggttagttccctccagccttctgtaaggacactaatccccttcaggagggctctgccgtagcgacctgatcacctcttagaggccccacctcttaacactgatgctggggtgaacttccaacctgtgaatttagaacaggcatgcccattcaaaccatagcatccactttacacaccatcaccttttcctaagtcgctgtcactcaattgccaggggcaaataatttatatcaccaaggtaaggtcctggcacataatgtatgctcaagtatttgtgtgtttatgaataagttgaaaattaaaataaattggctttgtgagagggcttggcaagaacttgactgtctaagcttttcaaaaatctgctttgttttattcctggttcttaatagagatggatgcccaaggacagactcgagtgaacttanctgacactggctgtgattatttttttatttttatttttt

SEQ ID NO: 2941 - DNA, 462 bp, Homo sapiens
  misc_feature 15, 383, 385, 400, 407, 434, 444: n = A,T,C or G
ccgcggtgggcggcncgcccgggcaggtaccttctgctgttccctgggtcttcaatgactcaatttcccaccagcagtatcctttaaagccatcctgcatcctgagacaagagattgacaattcattgataagtagtcttaattgtcactattacagggctgtaggtcctttgccagccatgcctttcagtcctaaatggtcttcaaggttgggctgtgttgtccaagagctgaggaccttacatttattgttccaatatttattggctataatgatttctgtggagcagtcagctgtcagaaaattttgtctcctttgtaggtaacctgtcattggtcctctggattttttttatagtctccctttgtatctggtgtaattnangtttcaatctgttgngcctacngtgtaaacttctttgcttgaaaaagtngtttggattncttgagtttgaaattttg

SEQ ID NO: 2942 - DNA, 544 bp, Homo sapiens
ccgcggtggcggcccgcccgggcaggtacttccaaaccctcctgttctttcctttttgttttccccaattttaacataaggcaaaagcagtaattgagcaattctatcacctggattggcactccggggaacagtggagctgatcactaactgaattccccctttataatctgaataaattaccccagtatgaatttggactcccttcaaatttagacttgatctccctcaaaggcctaccctcccttctggcagcgggccatatacccctctaggaatcttttgtgggggctttccagggagtaaaaagaccatttgggtggaacataaatctactgcggtgctgcctgctgtggcgcgggacaagctgttggattgttgtaattggctgactccctgaagtggtggtattttctgtaggggttgttgtccttgaaaaccctgaggaacaaacagtttaactgggaatgccccaagtttgttggggggcctgaggcttggcccctcttccctgtttccaaacaatggttggccatctttataa

SEQ ID NO: 2943 - DNA, 606 bp, Homo sapiens
cgcggtggcggccgcccgggcaggtactatcaggacactttgagtttccctgcagaggggaaggtgattgagtagataggaaagatgacaaagctattctcttcaaccatggacacatctgcacatgtaatcccagggccaaggccacacttggcttgcttcgctgatctctcttttacataaattccatttagcattttggctaccagataaatttctttccatttaaatataaaaagtcctatcagaggaatgaaggattgcaattttataaaaggtcataaggagaggttataacaatctttaacaggaatatgaaaaagcctgagtttgggggaaattttctgaacctgaaaaaggaagaaacagtagccataaggggaaatggcttttgaattttaacaaaatgaacttcgtatgttgctaaaaaatatgagctgaaaatatactgctttttttccctgagttatacctatctcctgaaggaccaagagtggcccgtgtgatgtcacttggcaacactaatccgatgagatgtctcgatctaaggcatcttagcaccaataacaaaaacattttaaaatcaatgattatataacctattcc

SEQ ID NO: 2944 - DNA, 385 bp, Homo sapiens
  misc_feature 136, 253, 254, 312, 351: n = A,T,C or G
gtgccgagaagctggcatcagaaaaacagaggggagatttgtgtggctgcagccgagggagaccaggaagatctgcatggtgggaaggacctgatgatacagaggtctgtaggccatgggaatgggtttggaattntattcaaagagctatgggaagtgactagaaggtttaaagttggggaagaggttttgtgtttctgttatatttgtgttttatacaaattactctggttgctgtgttgataggacagcnnaagggtaggagcagggacaccagttaatgttattgcaatggttaatgtgaagaggtgntgggctgggcctaggcctttttggagtgaacaagctatntgcttggcttcatgatccttctcccctccactgg

SEQ ID NO: 2945 - DNA, 547 bp, Homo sapiens
tcctatagggcgaattggagctccccgcggtggcggccgaggtacttgtagtcttttaataaccatagaaagcactaaaagtaattttaaaagcctggaaagttaaatgaaaactgatattatatacaattaatttaaaattatagttttactctgtttatttacaaatttgctagataaaacataatctcagaaaaaaagtgtttctttttgttgcttctgcactatagtaaatatctagatatctataacaggcatataatatagtatatatatagggaatcctagtgaagagtatagcagttatagaaatatatatggagagaaatcttataaaatggttatgttctaagtatccataatgaaatcctataaattttattgcaggagagaacaatgaaaagtgtcagtgtgtgatgatactaaacttttatttccattttgtcacttctaaaacacatttttgaggcattttaaaggaccctctggaaatgaccaatgcatcttataatcaatggtgtgtcaaaccatttggaacaattttttc

SEQ ID NO: 2946 - DNA, 465 bp, Homo sapiens
ccgcggtggcggccgccgggcaggtacatttttaccttaggggatatagcccagctgtgtccagccagggtggagaagcgcatcttccttctgattcagtccgtcctggcttcgtctgctgatgcttaccactcaccatcatctcaaggcagcagtgaggccccagcgtctcagccacccccccaggtcagaggttctgtcatgccctctgtgattagagcacatgccatcattaccttaggtaagaaaaacatgggagaatggggcttgacatcgttctgtgtgtagctgttgtcttaagtaagtccagccatgggactgtgtcaggggctgcggagcctgtctgtgtctgctctcagccatgtggttcctagaggtggctctgatctgagtgctgagctctgcataactgcgtgctggtcatgagagccctcaggctgataagtcctcaagactaaggtacct

SEQ ID NO: 2947 - DNA, 421 bp, Homo sapiens
  misc_feature 49, 73, 287: n = A,T,C or G
tcctatagggcgaattggagctccccgcggtggcggccgaggtactttntttttttttttttttttttttttntttggtttcaagaaattcaggaaatttcaaataacaaaaacaaagcatattataagtagatgtggggaggaatggctaaagaataggaatcctacccaaagggtagatgaggttgtcctgctggaggatgatcacattggagaaagaagctcagaggatcccaggagaagactaagtgcctttctagggagccctgttcatcaggatgtatggngactgctttctttgggcggttgtctcatcaatagcagccatagagactcaatatatatcccaagacttttataatcccattggtattacactttattggcactacactttgaatatttcaaaagaatcttaagc

SEQ ID NO: 2948 - DNA, 672 bp, Homo sapiens
  misc_feature 578, 646: n = A,T,C or G
tatagggcgaattggagctccccgcggtggcggccgaggtactatgaataaggtattgaaatccttttatattttagagcatgacagtgataattttctgaggtaatattttctactttaaaatagtctctgttaaccattataaactatgtagtttaaaaatattctatgcttgttattgagttaaatccaaacaataactgataaacaaggtaagacagatattatcatcaccattggatataggaggatttctcatcctcagcagactcttgagactttgggccagataaatgtctgtcgtaagggctgtcctgcacatggtagggtattttgcagcatcactggcttctacttactgcatgcagtggcatccccattcctcagttgtgataacccaaaatgtttccagacactgccacatgttccctgagtgacaaaatcaccctctgttacctacttaatgtaatgtcagtaaatctacagtgattaatgttttataccttcaatcaatgaatgttaattgagcacatactatgtgtcatgtgttggtctaggcttttgccatataatactgncttactatatggaatttacattcaagttggggagcggaaagcaatatagggtatagattttaggaaangcctctctgaggagatgacatttaat

SEQ ID NO: 2949 - DNA, 745 bp, Homo sapiens
  misc_feature 721, 726, 728: n = A,T,C or G
ccgcggtggcggccgcccgggcaggtaccttttctagaatgtggtcaaagagctgcctgcatccatcacattggggcttgttaccatagaagtgccctggactcccctccagaacctgcaacttgaatctctataacgtgaagtatggggatcttcatttgtagcagccttgtccaaaaattaatcttcacactaacgcataagaaccactgcatactctctgcagggactgccttaaatattaggttaaaatcctagtgttaaagttgtttgattaacaacattggcaatatcacacaatttgtttataaaatcctaatgaataggtctgtgttcaagttattatgatcgtatggaatattgccctttgcatgtttccatcccctacaagaaactacagaaatggatctgctcgtgactcggcctttaaaataaattactatattgtttttaaacgtctccctcctgtcagctattaaccgtatgttatgacctgaagaaaatatgtaaaacatcaaaaggaaaagtcagcattgaaattggaatttcgtaattaaatgatatgtaaaatttgaatattatttgttcagtcttattcttccagaacctcagttactttcttttattaattcagacagttaccacagtaccttgggccgctctagaactagtgggaatcccccgggctggcaggaaatttcgatatcaagcttatcggatnccggngnccttcgaggggggggcc

SEQ ID NO: 2950 - DNA, 459 bp, Homo sapiens
cgcccgggcaggtacagtggtgcgatctcagctcactgcaagctccgcctcctgggttcacgccattctcctgcctcagcctcccgagtagctgggactacaggcatctgccaccacgcctggctaattttttttgtatttttagtagagacgggatttcactgtattagccaggatggtctcaatctcctgacctcatgatccacctgccttggcctcccaaagtgctgggattacaggcatgagccactgcgcccagccgagtcattttttaatactactgcatgtgagttaacacaatcattcccaaattgaagttttagatgggccctcaaaatttttaggatatggttttcctacaggtttatattgaaagtatggggtatctcctattactcctctttttatttgtcttaaaggaagaaagggagaggccagaagaccaaatgtccccatttc

SEQ ID NO: 2951 - DNA, 448 bp, Homo sapiens
  misc_feature 303, 386: n = A,T,C or G
ccgcggtggcggcccgaggtacatctctagatgatcacgaatgtcaaatatcacactacactgtgatatggggattccccttgggggttttcatgtgtatagggtgcctgcagctacactaaacatcttaaagctaccacaatgttcacttcatatttttgctttttataggctttcttggtctcctcctatgttcccatcattttcttgctttgaatctgtaagaatcgagttgaatcttctccattttaaattttccataggctgagaaactgtttagccaagtttggataaaattgtatncaaagtaaagaagtatacaagctatgggcaagtccaaaatcaagctgttcacaggaccatgttctctctaaaggttctaggangagaatccctcatttccttccagcttctggggtgggctgctggcattcctgggcccggtggc

SEQ ID NO: 2952 - DNA, 387 bp, Homo sapiens
  misc_feature 316: n = A,T,C or G
ccgcggtggcggccgcccgggcaggtacagcaatatcatgaggaccagaatctatctaaccatctcatcctttccatgtcaaatacatggcctttgccatgtattttcatcagtatcttcagggcagtgaccttggtaagtcattaaggtggtaagtggagcagcaaagccgatatgtcactaggtagtcagcagacccagactgaagcctgaagagtgaaacaactttcctgctgggtggccctctgttcgttctattcctattttatcctgatggggagaagtgctttttaaaaatgatctttaatatttccanagtggctaacttccaaaaaacataacctaaagagtaaaaacattcttttctaaagaatgagaatcatgata

SEQ ID NO: 2953 - DNA, 356 bp, Homo sapiens
  misc_feature 218, 289: n = A,T,C or G
ccgcggtggcggccgcccgggcaggtacatgaaacggtttcactatgttggccaggctggtctcgaactcctggccttcctcaagtgatccacatgtcttggcctcccaaggtgctgggattttcttttaacttttaataaatgtagcaggaacatctctcctcaattcaacatcaccataaaaagaaaataataataaaatggaagaaatcacctancagagagagaaattatttttgtggtgggggctccccccaaatatcacaagtcacttcacttgtctccaaanacaacattgaatagtgctttgaaggtggtttcaatcatgagactaaagaggtggcatttacccctac

SEQ ID NO: 2954 - DNA, 326 bp, Homo sapiens
cttagggcgaattggagctccccgcggtggcggccgaggtacgcggggacatcaatgcagagtccctctgtgaatttacaacacccaacacccatgagttcagtccttaagaaggaaaattgagcaagtatttaattggttggacattgcataaaagaggtccatatccaggctaactctagaaattttattctcaaacttagttggcctctttttcttctgtcagaggaccattcttagtggcactggggaaatcttggcacccagaagaattcaactgcgctcactgcaaaaatacaatggcctacattggatttgtagaggag

SEQ ID NO: 2955 - DNA, 380 bp, Homo sapiens
  misc_feature 194, 302: n = A,T,C or G
ccgggcatggtacctcagccagcagaacatcgctgggacgtgcctggcctaaggcatcctaccaacagcaccatcaaggcacgttggagctttcttgccagaactgatctcttttggtgtgggaggacatggggtacgcggggattccaggctcttctgtgcctgtgggactacattctctgtgccgggcttanagaacacgaagagggagccatctgccacactctggaggctgaagcctgcaccagtgctgctcgcctcactgtggtaggtggtggtgatggaaactgcagatcggccanagtggtagaaaagttgctgcagggtttttctggctttgcctgcccagccgctccatgcctggctagaggagaaggagg

SEQ ID NO: 2956 - DNA, 487 bp, Homo sapiens
ccgcggtggcggcccgcccgggcaggtactactggcttcccagtggttgggttgagtataagcccccaaatatgagtaaaagaagaaaaagttaattcaatcaccaagtcttgctcgcatattaaaaattggatagatgaatgttcaatcatatgttttggctttggccagccagacgaggtcaatttttagatttgaactgcttagaattcttcaggcaagtcttgatggagcacttcttggacagttagaactttaccaggttcacaggagagctcagatgaagcgaacacctcatccacactggtttcctttggagacctttactgttgagaggtggttttcatagccgcaaaatgacaagtgcaagttgagtagatcagtgtttatcaaccaggtgccacattgtgccccaggagacatttgacaatgatggggtgttactggcatctaatagacagaggtcaagggatgctgcttaacatct

SEQ ID NO: 2957 - DNA, 578 bp, Homo sapiens
  misc_feature 17, 23, 71, 116, 164, 174, 186, 190, 199, 203, 218, 254,270, 277, 279, 281, 297, 302, 303, 306, 312, 318, 320, 323,335, 344, 354, 359, 370, 400, 411, 413, 416, 424, 435, 446,502, 519, 530, 565: n = A,T,C or G
ctccacccgcggtggcngcccgnccgggcaggtactgccaccatctccgtttccaggagtcttctgcttgntctttctggtcttcctcacggatcctgaaggggggttctctgcanagcgaccaccccatcttcctgggagagctggctcaagatttttctgcntgtggaccangcctgtcttttntttncctggaggnaggncccctcctcattttntactttcttctgcaatgggtgccttcttagcttggnttttttttgaaagggncctcctntntntcttgccaatatttgncttgnntcncaccgnagcgtntngangtaaaccccctngctttttcntgggaaactncaatnttcaaaccccncctggtctatttttaatttttgccaaaccncataaccaaantnctntttctctnttccttttttncacccttttcnccaaaagcaaaacccttccccttaaggttgggaattttttccccccaagggaattngaacaaaatcccttttnattaagggaantccttttccttggggggaaatgggggttcctaacncaaaaggggggtt

SEQ ID NO: 2958 - DNA, 406 bp, Homo sapiens
  misc_feature 151: n = A,T,C or G
ccgcggtggcggccgaggtacgcggggagagtccctctgtgaatttacaacacccaacacccatgagttcagtccttaagaaggaaaattgagcaagtatttaattggttggacattgcataaaagaggtccatatccaggctaactctanaaattttattctcaaacttagttggcctctttttcttctgtcagaggaccattcttagtggcactggggaaatcttggcacccagaagaattcaactgcgctcactgcaaaaatacaatggcctacattggatttgtagaggagaaaggagccctgtattgtgagctgtgctatgagaaattctttgcccctgaatgtggtcgatgccaaaggaagatccttggagaagtcatcaatgcgttgaaacaaaacttg

SEQ ID NO: 2959 - DNA, 466 bp, Homo sapiens
cgcgaatacgactcctatagggcgaattggagctccccgcggtggcggccgaggtaccaggagggtattgatgtttgaggtccaaactgaaaacccatcacctccttcccactgctatagcagcgttagccctggggttcattatctagccagttcacaccttctaaagtggggctctgaaaatgtcttacttccctcacagacaaagcaattctcaagcctcctgagatcacccaccaaccagagcaactgctgtcacttggaggtgcagctgaattcttctaattgtgacacaaactcttgaaactgtaaatgctgaaagattaaatgaggttataacactcagaaggttttacaagtaaaagtaagtcaaatcaataggtctttatttcatatctgtaatggtttagctctgcgggaagtgttagcagctatatgaattaggaagaatttagaagacaatccc

SEQ ID NO: 2960 - DNA, 611 bp, Homo sapiens
  misc_feature 575, 600: n = A,T,C or G
ccgcggtggcggcccgcccgggcaggtaccctggcaaggtttgtcctgtcttggtagcagaaagaacttctcaaagtaagggcttcacactaggggagagttcaatggcccaacccagccatggccaccctgacaccatgccctgatgctagtccctgtggcctggcccacactgaaaatactgtggggacaacagaatggatttgcaagttaccactatctctcaccagctgtaagaccctgggcacattgttgatcctaagcctcagtttcctaatctgtaaaagggtgatattaattgttcgtgctcacagaacttgttatgagaattaacagaaatagcatattcagactatagcagagtgtctggcatgaaacagagactcaataaatacaggaacaatttggttattagaaacagtgaggcttggcatggtggctcacacctgtaatcccactatagcgcttctcatgtgaatgtttcattctcatagtgcccaactttagttttttaattttgggaaacttcttatctatagaaaaatttgaaaagaaataaatgtaatgaaatcttnaatatatccttctcttagaaccatngaattttaaat

SEQ ID NO: 2961 - DNA, 344 bp, Homo sapiens
  misc_feature 299, 328, 329: n = A,T,C or G
ccgcggtggcggccgaggtacaagaccccaaatgtgagagggtgtttgtttcagtgttttatagagttcctaatatgccatcatatatacattcagttgttttcaaaatacagtttagtatttggctactcacaaagtaataaaacatttaaatcacttaaccatacaattcttggtaaccaaaaggcttttctttctattcagtaagtttaacatccagctttcttttttagggcaaaggagatagaagtggatgaaatgagagagtatttttttaattgaactctgattaatgccanaagtgttcaatcactatgtgtggggaagnntcctggtcctgcccg

SEQ ID NO: 2962 - DNA, 391 bp, Homo sapiens
  misc_feature 384: n = A,T,C or G
ccgcggtggcggccgaggtacctatgctttcagagtaagagcttacaagggttcaatctgtagttcttgcagcagagaattgattcttcatactcctccagctccagttttcagcttcctctttgatgaaaaatgtggctataataatgaacacctcctgctgaacttgaagagagaccgtgtagagagtagagctggatttaatcttctgcttgctgcagaacgcatccaagtgggttattacacaagcttagactacatcattggagatactggcattacaaaaggaaaacacttctgggccttccgtgtggaaccatattcatacctggtaaaagtgggagttgcttcttagcgataaactacaagaatggcttccgttcntccccgg

SEQ ID NO: 2963 - DNA, 530 bp, Homo sapiens
  misc_feature 292, 294, 297, 298, 303, 305, 307, 308, 309, 310, 311, 316,317, 372, 393, 431, 481, 500, 503, 506: n = A,T,C or G
cccgcggtgggcggccgcccgggcaggtacaacgatttcccaaatgttttcagggcaactaggctatttggatttccttggctgtcactactacctgccaccgatctttattctagggacaaagattagataagtgattccaaagtctcaagattctcccttttcaatcatctccactttttagagcaagcctcctctatttgtatatgctaatttattttctcagattaccctcaagcctctgtcctgggaaatcttcaccttattttgggctctggcccccgcgtacttnanatnnctacngngnnnnnggttnngactccatgaagaagcttcatctcaacctccgtcatgttttaaaaaccttttatnttttccttcctcatgctactnttctaagtcttcatattttctcttaaaatcttaagctnttaaaattaccgttaaaaacttaaccgctaagcaatatcttagtaacctnttgactatattttttaagnagntgnataaatctctatctttcaaagaga

SEQ ID NO: 2964 - DNA, 445 bp, Homo sapiens
  misc_feature 202, 203, 218: n = A,T,C or G
ctatagggcgaattggagctccccgcggtggcggccgcccgggcaggtacggatcctccgcatattatctcaacagaggacagtagctcaggaggcagcttcaaacggtgacctgtggcctgggccatctcttcgtcatgtgcttcacttttccctgtttccctgtgaactggcttccatggttctgtagggtagtgagtcnngggttgtggctgcancagagcaggagatgcttgcccgagtgggagcaacccacccccgtgtccccaatgcctcactcctggcttctagtgcatccctttgtagactcacctcgcaagaaggaagatctgcctggagacctgatcccagtccagctttttgaccataggtcatctttgtccccttgctcctttgcatcatgtcataaaatttgaggatatcaagctgattattttttttcttc

SEQ ID NO: 2965 - DNA, 429 bp, Homo sapiens
aggtacgcggggattctcaatcctacccatgatgcagacagattacctcatttcagctcaataaaacatcaccaaattcccttaggcagaaaaagggtggggagtgccctttcttgaaggaatcccttaagtgcacgtctcccgttttcttttcacatcaatgcagagtccctctgtgaatttacaacacccaacacccatgagttcagtccttaagaaggaaaattgagcaagtatttaattggttggacattgcataaaagaggtccatatccaggctaactctagaaattttattctcaaacttagttggcctcttttttttctgtcagaggaccattcttagtggcactggggaaatcttggcacccagaagaattcaactgcgctcactgcaaaaatacaatggcctacattggatttgtagag

SEQ ID NO: 2966 - DNA, 449 bp, Homo sapiens
gactcctatagggcgaattggagctccccgcggtggcggccgaggtacgcggggacatcaatgcagagtccctctgtgaatttacaacacccaacacccatgagctcagtccttaagaaggaaaattgagcaagtatttaattggttggacattgcataaaagaggtccatatccaggctaactctagaaattttattctcaaacttagttggcctcttttttttctgtcagaggaccattcttagtggcactggggaaatcttggcacccagaagaattcaactgcgctcactgcaaaaatacaatggcctacattggatttgtagaggagaaaggagccctgtattgtgagctgtgctatgagaaattctttgcccctgaatgtggtcgatgccaaaggaagatccttggagaagtcatcaatgccgttgaaacaaacttggcatgt

SEQ ID NO: 2967 - DNA, 312 bp, Homo sapiens
  misc_feature 191, 197, 198, 201, 209, 214, 261: n = A,T,C or G
ccgcggtggcggccgaggtactcagctgaaaacactgtttcagccccctctctggtgacctcagccttctccaggtgtatctcttgatgatcttggagaccagcagccacagctgctgctactcctgcaggagactgtcaggctgtggtggggggcaggggtgtttggaaggaaaaagttgaaaaatcccnagtgannttntgcccctntgctnctccatcttaacttctggaggagttaaggcaccaagggcaccaagtnaggttggcagttttgctgctccttgcccaagccttcagcaaaactagcttg

SEQ ID NO: 2968 - DNA, 328 bp, Homo sapiens
  misc_feature 4, 98, 121, 134, 192, 199, 201, 212, 216, 224, 326: n = A,T,C or G
actncttagggcgaattggagctccccgcggtggcggccgaggtacttttttttttttttttttttttttttttagaggactctgtaactctgagttnattcgttttcattttgttattgnatcagcattaaanaaatgcctaagttgatgaccattgggggatatagtttggccattttcttataaatatntttaagnangcaaaaaaccntgtntttgatcnccagttatcaaaattgcaacctttcacatggggaatataatttatatgatatttaaatcatgtctagtttctatgatcataatttatataatatttctttanaa

SEQ ID NO: 2969 - DNA, 422 bp, Homo sapiens
  misc_feature 8: n = A,T,C or G
tacgactnctatagggcgaattggagctccccgcggtggcggccgaggtactcccatcatagctgatttcaagctatcaaagtggtggaactccagaaaatggaacaactaggtcttatgagccagttccagcacactaagagactaaagccagcataacttataaggtgctatacaacgctggcatcccgtaggagatcttccatcattacatcacagtattttagaatctgcagttaaccaactactgtttccaaactgactcaccttgtaggggactgctgctctgtgtctgagctctgagatcgagcaggagggttagaacttcgcttcacccaagcattctcctttggtggaggggctgggcattacctttaggggcctgatcaaggtttggggaggtttagaaagttgggagagtg

SEQ ID NO: 2970 - DNA, 395 bp, Homo sapiens
  misc_feature 343: n = A,T,C or G
ccgcggtggcggccgaggtaccgactcctcagaaactggcatgccaaatcaaaatgggtctggttcaatcctccctaatggcaatgtaaacccctctaactaatcccacttctcctaattatctttttctccttacgaacctaaaaatctcaccatttctattagcctgaaaataacatccctctgttcttctcttcctccttcagcactggatctcacttacaataggttttatttaataattatcttccttacactttctgtctcaccagtttccccttaaactgatttacctgctacacaaaattgttcttattgggcttatgtgccttttcctccactntattcgaaccctctcacctggatgggatgctcctgcagaaaatctatactaa

SEQ ID NO: 2971 - DNA, 421 bp, Homo sapiens
  misc_feature 8, 385: n = A,T,C or G
tacgactnctatagggcgaattggagctccccgcggtggcggccgcccgggcaggtaccctccaacacctcttccataaaatcagcaaacaactgacagagatcatgcagcgggagcccacgatcggtttaatcatcactcacttccattggatcaactacaaatcaactcagatgagagtgctgagtctcagaggatggacatctcaccccttgccatacagataagtagaaaggatggtattcaaaattaatggccagactctaagtcccagatactatacttcatggtcttccaactctcaaaaagttgtgggagttttttttgtttttgtttttgtttttttgagaccggagtctcatttctgttgcccaggctgggaagntgccggtggaagtgatctcagctcattgcaacctcc

SEQ ID NO: 2972 - DNA, 403 bp, Homo sapiens
  misc_feature 169: n = A,T,C or G
ccgcggtggcggccgaggtaccttcttgttgtgttttcacatggctcagttgttccaaccacattaaaaaaactttccaatagctgaatcgagtgtcagtttttgagtttatttggcaaaaatgcattaaagcttgctgcatttaagagatgtcccattatgcaaaccnggttggaaagaaatattacaaataccgttttggaaaaatacggagtgtcgcgcagctcagcaatccgcagtcttaatgcgcgcctctttccaggaatttgatccagcatcaaaacccacaggtgcactcaccacacggggagtaacaagtaaatgatgtgccagtattcaacctgcaaggtgccgtcgtcaggagcctacctcaccctcagcataactttcaccgggtattcac

SEQ ID NO: 2973 - DNA, 448 bp, Homo sapiens
  misc_feature 185, 293, 294, 295: n = A,T,C or G
gggcgaattggagctccccgcggtggcggccgaggtacatctctagatgatcacgaatgtcaaatatcacactacactgtgatatggggattccccttgggggttttcatgtgtatagggtgcctgcagctacactaaacatcttaaagctaccacaatgttcacttcatattttttgctttttnttagggctttcttgggtctccttcctatggttcccaatcatttttcttgctttggaatctgtaagaatcgagttgaatcttctccattttaaattttccataggctgnnnaaactgtttagccaagtttggataaaattgtatccaaagtaagagtatacaagctatgggcaagtccaaaatcaagctgttcacaggaccatgttctctctaaaggttctaggagagaatccctcatttccttccagcttctgggtggctggc

SEQ ID NO: 2974 - DNA, 427 bp, Homo sapiens
  misc_feature 288: n = A,T,C or G
ccgcggtggcggccgcccgggcaggtaccccctgaccccttcctccgaatatacttttgtctcttgtcttttattcctgtgttcaccccactgtgttcagtccccctaggtctgtgcgggttacaagtggcgcccaaacagggacagaattgggtgctctacacccttttccttgaaccagggactggcctagtgacttacctctattcagaatatggcaaaggcgttggaatctcacctccttaattaagctatacatgtttaaaaaaattattcaatgagaattgntaaagcacagtaaggaagactttattcagggccattatgacaggtatatagacaaatgtaatgggattttgcagtggtaggagggtgaatgggacttaactccaaatattcagcataagtaagtggggaatttatagcc

SEQ ID NO: 2975 - DNA, 396 bp, Homo sapiens
  misc_feature 37, 109, 140, 231, 237, 242, 268, 273, 278, 284, 349, 385: n = A,T,C or G
ccgcggtggcggccgaggtacatgacaggaggctcancacttgtgccaggttagctctgcatggtggtcccactaaggcagtgggaagccaggatccagggaaccctanagcagggggatggcagagcaaaattcatggnctacagctgcctcttgccaaactgcactggattttgtgtctcccattccccagagctgtctgaggtgctttggaccatggtgatccacatnggcctnattcntgaagagcttggcgggaggtttggangctgntcttntttttnactgcctttgccaccctggaccgtaggctcatcctcctgatcatggaagggcctctcggcctttntccacgcactgcgcttacactgggttgagttccatnaataaatttct

SEQ ID NO: 2976 - DNA, 411 bp, Homo sapiens
  misc_feature 1, 235, 302, 305, 316, 318, 347, 369, 403: n = A,T,C or G
ncactacttagggcgaattggagctccccgcggtggcggccgcccgggcaggtacccaacagccatggctcttgcgactcacctgggcagctgtgtggctgcgcacctgactcactctttctagagggtgccttgaacagcatcagcgtggcccggcgttccctacaaatagcccttgcaattgctgaccccaaacaatgttgggaataacagaagggacaagggaacaaagaanaggccaggaaggtaataattaaccacttactgagttcaaagccatcttgctgttatcaacagcatcnagnaatgataggtntntggaatgttcaatatgacctagaagaaanaattacaggactgtaatatttncattaccagttagttttttagtaagataaatctnggaaagaa

SEQ ID NO: 2977 - DNA, 402 bp, Homo sapiens
  misc_feature 173: n = A,T,C or G
ccgcggtggcggccgcccgggcaggtacagcccacagaactgtgagccaattcaatcctttttctttttcaattacccacactcatgtatatctttatagcagtgtgagaacagattaatacactcctcctcagaaagcattcaatttagctgtgtctaaagtatgcccgggngtttcttaggggtgttatcttagccaataattcttcctcttcagcaagatctatttgcctatgacagcttgacctacatttcctaccatacttgtcagtaacaagtagcccataacatctgaatggacttcattgaaatcacaagaggttctttagttctctactttattagcagggcattagggaaacacatcaaactttctaatttaataaggtgcctgttgctttg

SEQ ID NO: 2978 - DNA, 347 bp, Homo sapiens
  misc_feature 205, 206, 270, 314: n = A,T,C or G
ggcgaattggagctccccgcggtggcggccgcccgggcaggtacccccgaatctaaaataaaagcagaaattatatgaaaaaactggggtgggagttggaaggaactttagatatgtaataaatttgtttgaaaactgttaatttctcatgctttcattaaaaaataattttcctcaagaaaacccccaatatttttccaccttnnggaaatgaaaagttgcatttgaatttcaagaaggtatgggcatgagaaccttgcagttttctantttgtggagacaaaataatttttataacaccaaccagaggtttnctctacaaaccccttgtaattcctttctgagct

SEQ ID NO: 2979 - DNA, 459 bp, Homo sapiens
  misc_feature 181, 190, 408, 409, 422, 444: n = A,T,C or G
ctatagggcgaattggagctccccgcggtggcggccgaggacttccaaaccctcctgttctttcctttttgttttccccaattttaacataaggcaaaagcagtaattgagcaattctatcacctggattggcactccggggaacagtggagctgatcactaactgaattccccctttatnatctgaaanaaaattaccccagtatgaatttggactcccttcaaatttagacttgatctccctcaaaggcctaccctcccttctggcagcgggccatatacccctctaggaatcttttgtgggggctttccagggagtaaaaagaccatttgggtggaacataaatctactgcggtgctgcctgcagtggccgcgggacagctgttggattggttggtaaattgggnntgactccctgaantggtggtatttttctgtaaggnggtttggttggtccc

SEQ ID NO: 2980 - DNA, 370 bp, Homo sapiens
  misc_feature 57, 66, 162, 173, 174, 325, 331, 344, 345, 349, 352: n = A,T,C or G
ccgcggtggcggccgcccgggcaggtacctaaaaaagaggaaggttagggaaggttnttgtccttngcttactccttcctttcccagactttgtgtaaaatacctcttacttcccaggctctttactctcccttccaacccagatcctgacgtgtgcatctntttttgtgcanngagaatgtgatccgagaatttaacttaaatgagctataccagcgggccaagaaactatcaaaggctggagacaatatccctgaggagcagcctgtggcttcaacccccaccacagttgtcagatggggaaaacaagaaggataaaataaanatcctnactttggcagtgnntttnctntcctgtcaaattccaggc

SEQ ID NO: 2981 - DNA, 422 bp, Homo sapiens
ccgcggtggcggccgaggtacaaggtaatataaatgagttttatcaatattttgatcaataactatatcaatttattttttaattaagatggggctgaaaattttatcaactactagaaaaagaaaatgttgcttccaatataggagacaaaagcagaagaagggtattatctcacttgagatagccttccttctgagaggggaaatgaaatattaatctgatcttggaactcgcttccaattaattatgcatgccccgagtcagcatacagtgttgccatcatcataatcaaatgcacattagcagctttttctacttggaataggctgccttgcagggttggcgtttccttgacattgcagtcattcagaaagaggctgatgagggccatcctggaggaggacatgttggggttattggg

SEQ ID NO: 2982 - DNA, 417 bp, Homo sapiens
  misc_feature 167, 179, 371, 380, 398, 401, 405: n = A,T,C or G
ccgcggtggcggccgcccgggcaggtacgcggggatcaatgcagagtccctctgtgaatttacaacacccaacacccatgagttcagtccttaagaaggaaaattgagcaagtatttaattggttggacattgcataaaagaggtccatatccaggctaactctaanaaatttttattntcaaacttagttggcctcttttcttctgtcagaggaccattcttagtggcactggggaaatcttggcacccagaagaattcaactgcgctcactgcaaaaatacaatggcctacattggatttgtagaggagaaaggagccctgtattgtggagctgtgctatgaggaaattctttgcccctggaatgtggntccgatgcncaaagggaagatcctggnaangaangtcattcaaatt

SEQ ID NO: 2983 - DNA, 391 bp, Homo sapiens
  misc_feature 37, 116, 126, 143, 145, 148, 152, 156, 178, 190, 212, 220,242, 245, 247, 288, 301, 304, 372: n = A,T,C or G
ccgcggtggcggccgcccgggcaggtaccaacacttncagtgcttgatggtgaccatgataggcctagaaataaataaaaatgtaaatttaaaacatacatatttagactgacttnctaaatactngaataaatgtaaataancnaanttgncttnatattattatcctacttgaganaatccaaacttntacatcgagaattcaggaagtnaactacanatctttctaataatcaacatantangntactgagttagggaacaggcattctaaaaataatacaagtncaaatgacaggtnatnttttcatgagtatacaatgcttgggctcacgggcagacattcaatggatgtgtggacaccggattcanttaaagtcttgatttcaag

SEQ ID NO: 2984 - DNA, 315 bp, Homo sapiens
  misc_feature 169, 172: n = A,T,C or G
ccgcggtggcggccgcccgggcatggtaccctgcacacactaggttctcaagaaatattcatgtaataagtgaataattgaatgaatgaatgactaagtgaaacttctctttacaacaagcaaatgtaatagccctttctaagctctcatcatcctcattgtccttggnggnattcccaccacactcaggaattccttttcacctttccatgcatatgaggccccacctaatcaggtgctggtcttcttagctttctgtctcctaccactttttgtcttgcttcgggaactccactgtcttttctggtataagga

SEQ ID NO: 2985 - DNA, 431 bp, Homo sapiens
  misc_feature 158, 168: n = A,T,C or G
ccgcggtggcggccgcccgggcaggtacgcggggcttgaaggaatcccttaagtgcacgtctcccgttttcttttcacatcaatgcagagtccctctgtgaatttacaacacccaacacccatgagttcagtccttaagaaggaaaattgagcaagtntttaattggntggaccattgcataaaagaggtccatatccaggctaactctagaaattttattctcaaacttagttggcctctttttcttctgtcagaggaccattcttagtggcactggggaaatcttggcacccagaagaattcaactgcgctcactgcaaaaatacaatggcctacattggatttgtagaggagaaaggagccctgtattgtggaggctgtgctatgagaaattctttgcccctggaatgtggtccgatgcccaaagggg

SEQ ID NO: 2986 - DNA, 426 bp, Homo sapiens
  misc_feature 2, 417: n = A,T,C or G
ancactacttagggcgaattggagctccccgcggtggcggccgaggtacttcactgatttttctactgcatctttaccacctgaactctacattattcctccacatgtctgtcccgtctgctccaagactgcagaggacagtcttgagcatcatcttactcacattttactcagaaatttcttattgagtcctgctaaatacatgctaggcattagggtttaaaaacaattaaaataaagcatgtcagggatggcttttctagaaaacatgcccaagcagagacttaaatattgagactagccagattaaaaggggtagagggcaggaaagggtgaccggcatgccacgcagcagccaagagccgggagccgaggcctgaaagagtgaaagtatttgcctacaataggaggatgagntgagtaggg

SEQ ID NO: 2987 - DNA, 390 bp, Homo sapiens
ccgcggtggcggccgaggtacgcggggagctcaataaaacatcaccaaattcccttaggcagaaaaagggtggggagtgtcctttcttgaaggaatcccttaagtgcacgtctcccgttttcttttcacatcaatgcagagtccctctgtgaatttacaacacccaacacccatgagttcagtccttaagaaggaaaattgagcaagtatttaattggttggacattgcataaaagaggtccatatccaggctaactctagaaattttattctcaaacttagttggcctctttttcttctgtcagaggaccattcttagtggcactgggggaaatcttggcacccagaagaattcaactgcgctcactgcaaaaatacaatggcctacat

SEQ ID NO: 2988 - DNA, 384 bp, Homo sapiens
  misc_feature 166, 182, 183, 378, 379: n = A,T,C or G
ccgcggtggcggccgaggtaccaggagggtattgatgtttgaggtccaaactgaaaacccatcacctccttcccactgctatagcagcgttagccctggggttcattatctagccagttcacaccttctaaagtggggctctgaaaatgtcttacttccctcacanacaaaagcaaattctnnaagcctcctgagatcacccaccaaccagagcaactgctgtcacttggaggtgcagctgaattcttctaattgtgacacaaactcttgaaactgtaaatgctgaaagattaaatgaggttataacactcagaaggttttacaagtaaaagtaagtcaaatcaataggtctttatttcatatctgtaattggtttannctctg

SEQ ID NO: 2989 - DNA, 413 bp, Homo sapiens
  misc_feature 367: n = A,T,C or G
ccgcggtggcggccgaggtacaagttcagagacattcagttgcaaagacatttaagcatattccctctgcttatgggaacttttctaaaaggtttgtaagaggaaacggcactgcggagggacaggagtggaaatgtatctgtctggttccctcctgactcttggtttccatttggtcaaattttattccacagagatctaatgcttctatacatttggcaacttggtagctactcaagaagccatttcccaagccctgttttgtggcatttcatctaagaccagaagtggaggggagattcagcaggtcagactaccaaccaagagagaaggaggcagctgagggaatgtagaaagcatacaatantaaaaaaacaaaaaaaacaaaaaaaagacaaaaaaaaaaccttaca

SEQ ID NO: 2990 - DNA, 423 bp, Homo sapiens
acttagggcgaattggagctccccgcggtggcggccgcccgggcaggtacttccaaaccctcctgttctttcctttttgttttccccaattttaacataaggcaaaagcagtaattgagcaattctatcacctggattggcactccggggaacagtggagctgatcactaactgaattccccctttataatctgaataaattaccccagtatgaatttggactcccttcaaatttagacttgatctccctcaaaggcctaccctcccttctggcagcgggccatatacccctctaggaatcttttgtgggggctttccagggagtaaaaagaccatttgggtggaaacataaatctactgcggtgcctgcctgctgtggccgcgagacagcctgttgggattgttgtaattggctgactccct

SEQ ID NO: 2991 - DNA, 361 bp, Homo sapiens
  misc_feature 181, 195, 205, 208, 261, 315, 344: n = A,T,C or G
actacttagggcgaattggagctccccgcggtggcggccgaggtacttttttttttttttttttttttgcagatcctttcctttttgtatttctagtctccctatcaaatttcagcctgccttaagtaaatggaagtttccttcagttgtgaactatctccaaagtttgtttgcctgggantcttctttaaaaantgatttttangtnaaatgacatttgacaaaagtgaatcttccctgaaagtgattcaaagaaattancaaattagttattgaatccttaatgtgatgctaagagctttcttcctgccttgnattattaatttacataacatatatggagngggctctactgttacct

SEQ ID NO: 2992 - DNA, 363 bp, Homo sapiens
  misc_feature 148, 152, 154: n = A,T,C or G
aggtacgcggggagggtggaagaaagtcagagctcagcccaggctgccttttccctgcagcgagcctcagccctctccccagcacgcccagctctctcatcatggattattcttcagctcattgtcttaagtcgtcctgtgacacctnccantngacccgaacgctgttcttccttttcagtggtcagcaagtccatctgggcagcgcagagggaccaaaggtgtccatcgttggcctggacgattctggcttcctccaggttcaccaggagggcggcgagggttgtgactgtgcacccggacggcaactccttccgacatgctgagaaacctcatcctccccaaacgggcggtaatgccggg

SEQ ID NO: 2993 - DNA, 323 bp, Homo sapiens
  misc_feature 182, 190, 215, 249, 287: n = A,T,C or G
tatagggcgaattggagctccccgcggtggcggccgaggtactggagggtagactgctataacaacttttggttttggatgggaataaacagaaaaagtctcatctccagttcatttctggggagggtcaggaggtggggggtgcttggctctactcccttcgtatgattttcccttctttntcttccangaatctttccccattttcaccgganaagacatgggattgaaaaatgaaggctgcttgantgggaggggcttatggggccagttttgaagaggcctcntaccttttggccacattccattggccagaactttgt

SEQ ID NO: 2994 - DNA, 462 bp, Homo sapiens
  misc_feature 407: n = A,T,C or G
ctatagggcgaattggagctccccgcggtggcggccgcccgggcaggtacaggctctctttgaactttactgcccaggtgaacgttctctgcatttagatcttcaggagttttacagactagtgtggagtggacatgtaaggacaagaggaagaggcaggtttcagctgagctcttctcctccttagagcaggacagtgttgggatgggctgattgtgagtatggagttctttctggaggagctccagcaggagctgggcaaatactgggagctttgactaaggggcatgcattgcagatgaggtttgaccagaggttttccaggatccctgaagaactctgcacttctaagcctgtaaggcccaacaggtgagatgaaagggggagttgaacttccagctccttgnggtgtccccttagggttcccctttttggggtcccacaaaaaggcttttttgaagc

SEQ ID NO: 2995 - DNA, 437 bp, Homo sapiens
  misc_feature 4: n = A,T,C or G
actnctatagggcgaattggagctccccgcggtggcggccgaggtacgccaggcactgttcccacactgaacaatggatgaactcattgaattctcatagcaactaacaatgctatgaggtggatgtcattattatctccatttacaaaggaaactacagcacagagaggttaagtaacttgcccaagatcacagagctagtaaatggcagagctgggacggaggtagtcagctgccactctatgctctgaccactgtgttcaagcagtcttccctcaagacactagcaggtcatctaagccagaaacctgggagccagcctcaacttctccctcttcgctccctgtcagtccattatcaattcccagcaatttttatacctcaaatgtcccttcaatgcaaccaactctaccactaactgctttagtacctgcccg

SEQ ID NO: 2996 - DNA, 452 bp, Homo sapiens
  misc_feature 51, 193, 240, 292, 313, 331, 345, 348, 355, 358, 395, 398,403, 435, 439: n = A,T,C or G
ccgcggtggcggccgaggtacttttttttttttttttttttttttcctatnggtttaatgcttagctatctcaaattccgtatgggccaggagtccctgaaacatatacaaattaggtcccctttgtgaccaacgtgctgttaggcagctaatctatttatcatctatttaatgttcatctagatcaatcagncttctcaatcttgacatgcattttgggctgcataattctttgttggnggggactgtcctattccctatagaattaacccctggattctacttatgtcangcagcactccctccaatttgngacaactacaatgtcttnaaaaccattgccanaanttccccnctnggggggcaaaactgatttggaaaaaactggttacttnaanatttnaaggccagggccccacccacttaccccccttnttcnaaaattttttttg

SEQ ID NO: 2997 - DNA, 272 bp, Homo sapiens
ccgcggtggcggccgaggtaccatgttcaggaaaccaaggacaatattgctctactgttggaaacagagtaatcaaattttctgtgctagccttaattcctgccctctttaagaggagcttaataaaatgtaaatatgcagaatgtttacttttggattgtctcatggtgtccctggaatgctccgagtgcacaagcttaccgcaaggccgaccacacgttctcgggagttcctggacagaccgttcttcacaacgaccacgctcaggtgta

SEQ ID NO: 2998 - DNA, 464 bp, Homo sapiens
  misc_feature 353: n = A,T,C or G
ccgcggtggcggcccgcccgggcaggtactacaataatcctcaagatactgaaagtaatgccaagtgaaagaccaagggggtgggtggagggctaatgggctggacgaaatagccacttgattgctagttcatacaagatgtggcagcaactccttttctggctggagatcttggatgtcacatcttagaatcaggtggcaaagcatctgtgaagggcaatgtggcatcccagacagtgggtggtgagatcaggaagaaaaaatggaaatcaacagatggtggatcctacagctgagaactgattcttcaattttgacatggttggcataaaacattttaaatgggagccttnggtaaagaatcaggttattttaccatttgaccaagctcttggctttctaaaaggtcctaaaatttttttgtttccctttgcttttcacgaagtgttttattttgcttttcc

SEQ ID NO: 2999 - DNA, 484 bp, Homo sapiens
  misc_feature 151, 158, 173, 193, 206, 213, 223, 235, 246, 279, 281, 287,295, 309, 311, 314, 327, 333, 334, 343, 357, 365, 416, 425,429, 433, 440, 449, 455, 461, 465: n = A,T,C or G
aggtactgaggctgtatacagccacagcctctccccatccctccagccttatctgtcatcaccatcaacccctcccatggcacctaaacataaatcttaacttgtaattccttggaacatgtcagtgcatacattacttccttcttgcctnggagaanagactcttgcccttngttctgccttaaaatcctangcaaatcgatcgntaaatangctttttggnaaattaaaggtntggaccttacnctttacttttctattggcaaataaggaaagtgngnaccacnaattattngaagggaattttcnantcnaattcatcaattngtaagnnacaatgccnaaaaatggccttanaaaaagtnggttaaaattttttggaatttaatttaaaaggaaaggttttaaggaattanaaaatcaanttanttgnaaaaaanttggcaaangagagnccccanccanggaagggggaaaattggtt

SEQ ID NO: 3000 - DNA, 427 bp, Homo sapiens
  misc_feature 306, 307, 308, 309, 310, 311, 312, 313, 314, 315, 316, 317,318, 319, 320, 321, 322, 323, 324, 325, 326, 327, 328, 329,330, 331, 332, 333, 334, 335, 336, 337, 338, 339, 340, 341,342, 343, 344, 345, 346, 347, 348, 349, 350, 351, 352: n = A,T,C or G
  misc_feature 353, 354, 355, 356, 357, 358, 359, 360, 361, 362, 363, 364: n = A,T,C or G
ccgcggtggcggccgcccgggcaggtactccagcctggcaaacagaataagattctatcgccaaaaaaataaataagtaaaataatgttccaactaagtaaataccaatagttttaagttatcccctttcttgtgctttgatcactctccaggttaatgtcagcaaaaagggtggccgctctggtttcagaatccagaggatcagtcacaggcctaagcgcctgtccctggtccctccacggtctctcctgctggggacacgacgggctgtgaagagggtaaaaataatacacgcacttgtacctnnnnnnnnnnnnnnnnnnnnnnnnnnnnnnnnnnnnnnnnnnnnnnnnnnnnnnnnnnncgataccggtccgacctcgaggggggggcccgggtaccccagctttttggttcccttttagtg

SEQ ID NO: 3001 - DNA, 417 bp, Homo sapiens
  misc_feature 4: n = A,T,C or G
actnctatagggcgaattggagctccccgcggtggcggccgaggtaccaaatacattgacagtggatgctttcacggctcagccaacacagttcagaggaatcttttcggcttccagggcattgcttgttaccttttgtcaggatcaacccaaatcctcagggatgctgtttttccacactgtaagtcctaactcattagtgggtcatgaaatcaacttaacagctcaagaccagtatattttaaacgtgaaataataaaaaatagaggaacaatagagcatataaaatggttaagtattggttcctgaaatactgttttcagctaaatattctatttactgtgtatactgggtcacaatataaagtgtttcctgttatgaaattgcaatttaaaaaaaagaaaagctttgaaaagg

SEQ ID NO: 3002 - DNA, 265 bp, Homo sapiens
ccgcggtggcggccgcccgggcaggtactgtttactaaattatagcactgcaataagacatttcaccaatatgatattgaagcataacaagttatttcataaggaatggtaattatctaacattctaagcaaatttggcagtgtgacttggtggggcgcagtgctgtccctgacacaatgacagccttactctctaaattagtaacttccgtaggagaccccagaagcacacctccctcccagcagtgaaagccgaggattcccg

SEQ ID NO: 3003 - DNA, 475 bp, Homo sapiens
  misc_feature 443: n = A,T,C or G
actcctatagggcgaattggagctccccgcggtggcggccgaggtactgggagaaattacatcctgggaagaagccacacattccagaaatggtggcttcactctttgagtccttaactgctgtaaacatgccattagcctacagcaaatgttattaatattacttgcaatggtgctattttatgtttgtctcagagaagggattatctccatcctcaattcatactctcttaagaagatcgttacttttctcttaaggtgtcatggagaaactccagctgggcccagagattctgcagcgggaaaatccaaggcttatttatgccaggctgagtggatttggccagtcaggaagcttctgccggttagctggccacgatatcaactatttggctttgtcaggtgttctctcaaaaattggcagaagtggtgaagaatcccgnatgccccgctgaatctcctggctgactttgct

SEQ ID NO: 3004 - DNA, 481 bp, Homo sapiens
  misc_feature 4, 204: n = A,T,C or G
actncttagggcgaattggagctccccgcggtggcggccgaggtacgaaaaaatcaggctactaagcccactgttaatatagacgcagaccaattgttaggaacaggtccaaattggagcaccattaaccaacaatcagtgatgcagaatgaggctattgaacaagtaagggctatttgcctcagggcctggggaaaaattcangacccaggaacagctttccctattaattcaattagacaaggctctaaagagccatatcctgactttgtggcaagattacaagatgctgctcaaaagtctattacagatgacaatgcccgaaaagttattgtagaattaatggcctatgaaaatgcaaatccagaatgtcagtcggccataaagccattaaaaggaaaagttccagcaggagttgatgtaattacagaatatgtgaaggcttgtgatgggattgggagggagctatgccataaggcaa

SEQ ID NO: 3005 - DNA, 473 bp, Homo sapiens
cttagggcgattggagctccccgcggtggcggccgcccgggcaggtacagaagatgaaatagagtcttacagagcttaggtgagctccccagggtcatatagctagtaataataattgcccacattgattgagtgtttagaatatctgcgactctgttctaaaccatcttaagacatttaatcttctaaggtagttattgacatcatcaccattttacaaataagaaaaccaagtcacaagatttaagagacttgcctacagtcacatagctagaaagtggaaaaccaggatttccacccacacagtctgactttagcaggcagacactgatccactgcactaaattgccttgtctggttccccaaagagctggaactgacacacttgggactctgattccaagttcagttctctttcaagtgaccctgctcattagcagatactgcatccaaatgagaagaaatggtcatgt

SEQ ID NO: 3006 - DNA, 456 bp, Homo sapiens
  misc_feature 189, 424, 432: n = A,T,C or G
ctacttagggcgaattggagctccccgcggtggcggccgcccgggcaggtaccccagtgaatgttcacacgtccagagctagcacaccatctgcagggttgagcagcgagcgctgggacccccaaggattcagaatggacacagaatgcaggtgcaggaggaagcccagcacccaaggcagagcctcantgaacagcaaagaccctaaaactgacttgcatcccccaatagataactctggaccgatgacaaagtttattcagagtgctgctccaaaatccctgctcttcatggtgacctatgacgacggaagcacaagactgaataacgatgccaagaatgccatagaagcacttgggaagtaaagaaatcaggaacatgaaattcaggtctagctgggtattttattgcagcaaaaggcttngggaactnccttccgaaattcagagagaaaaa

SEQ ID NO: 3007 - DNA, 464 bp, Homo sapiens
  misc_feature 4: n = A,T,C or G
actncttagggcgaattggagctccccgcggtggcggccgaggtactaacacaagccaaacaaaaatttctgctcctgttgcctggtttggaaactgttgaaatgatggaggaatccagtggaccatattctgatggaacagaaaattcacaactaaatgtgaagataagtggcatggagagaaaatcaaatggaaaaagagattcatttttggcacaaacaaagaataaaaaagaaaatatgaaaccagcagccaaactgaaacttgaatcttcgtctttaaaagtaaagggtgaaattcttttggaagaggaaaagtctactgactttgtgtttatacctccagaaggaaaagatgcaaaggaaagaatattaactgatcatcaaaaagaagttctcaaaacaaagcggtgtgatattcctgccatgtataataatctgggatgtttcccaagataccctta

SEQ ID NO: 3008 - DNA, 306 bp, Homo sapiens
  misc_feature 63, 65, 163, 258: n = A,T,C or G
ccgggcaggtacgcggggtccgcttccttccagtaaggagtcggggtcttccccagttttctnanccaggcggcggcggcgactggcaatgtttggcctcaaaagaaacgcggtaatcggactcaaccccgccaagggtgggttggaaaccgaaacgagtcantgttgaaacgtgtctcatcctattcctgaagccagaatattctggccatgagtcattgtttccgcccatcttgattcttttggaaatggcagctnttgttcaaagaccggaaagggtggggatgtcaatttcaagtggggtca

SEQ ID NO: 3009 - DNA, 473 bp, Homo sapiens
  misc_feature 1, 457: n = A,T,C or G
ncttagggcgaattggagctccccgcggtggcggccgaggtacgcgggggaaataaggaatgaacgttatgtaaagaccataatgctagtcagagaatgttccaatggaaaactgatgtttccttctgccaccaggacaaaacttttgtgatctaaaggcaaaacaataacaaaaacagcaacagcaacaaaaaccagcctaacagtcccaagtggtcttcactgtcatgattattaagcattttctccaaagtctgaactacagtttgttgaggtttcattgaaaatgatactaaaacaaatttgcttaaaagtaaaatggagttattggcatcacaaagatcatagtcaccttcttaagaattgcataacctttaatgactgtaaagggatttttaaagaccgatccttgcgactagtttattaataccatttttttgaggctgtgggaaatcanataatttttgggccgg

SEQ ID NO: 3010 - DNA, 267 bp, Homo sapiens
ccgcggtggcggccgaggtacatggcagacatttaagtttccggccccagcatctttcttatatcagacctggaattgaatgatggtgcccagcagctggggaactagggtgcccagaccctcattttctccaaccccacttcttcctggatcaccaaaatgcttggtttggattgttaaagtttaggagaggccattgtttttgactcctgcactaggccccagcagaccagaccgaaccaaaatgaagccacttgtacctgcccg

SEQ ID NO: 3011 - DNA, 475 bp, Homo sapiens
actcctatagggcgaattggagctccccgcggtggcggccgaggtacagagcaagcagttcagtccttcactccgatatgaaaggggtgatgtcaacctatccaggaaatattgaattgattttaaaactgctgtaagggtgaataaatcggtggtgctgtgcattagcatgagactgcctgcacccacccatgtctccccgtttatttgtcttaatgctaggattattagaaaccagctgaataggtgcccttcaaaatacagatcgagggatcagagaatgttgattttttttaagcctaaattttgtaacttggcattatcctagacatatttagctccctatttgcgtattttctttccaatttctagtattcggttcatttatgaaaaactgggggaccgtgcttttccatcatctcttttgctcctctctcttcccatctccctctgacaagttttctgaagcatgttt

SEQ ID NO: 3012 - DNA, 482 bp, Homo sapiens
  misc_feature 345: n = A,T,C or G
actacttagggcgaattggagctccccgcggtggcggccgaggtacctcctgctctagttttttggacttggcagtgctccactctactgctaggtcaaaagaacagccagagaaaccccacattcaggctaagttgcaaatggaaaggagctccctgctttcatcattaaaaagcactctgttcatcttaatgcagcccaatggagttgctttagtagcagtggctctccgggcctgtgtgttctcatagttaaaaaaataaaataaaaagcagatgggccggccagccagcctgcagactgtcagcgatgcagctttctgagaagtcagggtggggcaggggnagaaggggaagaacacaggcacacacacagagacagagaaggatgcacgcgaatgcacatgaacacacgttgcacacacacaccagaacgagcatgcctggggcagttaccatgtgccagaacacactggtatttat

SEQ ID NO: 3013 - DNA, 460 bp, Homo sapiens
  misc_feature 4: n = A,T,C or G
actnctatagggcgaattggagctccccgcggtggcggccgcccgggcaggtaccgagttgtagaggtagaagggattcagagatcctgttttccgtcagggtggttgggtgaggctcccagacacagggctgaagtctgaaccttcatcctttcactcccagcccaatgatgtgccactgtgtcatagccacatggtggttatgaatgcatctggaactctacattttaatctgccaggcatccacccattcgttcacataattcacgtgtgtgtaatagtaaccttcagaaaggaatgtcacaatatttttctcattacaacatctttaggctttaagatgaaaagggtgaagaaagaaatcttctctaaatcttgtattcccgctattcatttttttattcaaggaaaaacaaagcctctgttaaagctctgcttacaattgaaatgtaactgaagt

SEQ ID NO: 3014 - DNA, 437 bp, Homo sapiens
ccgcggtggcggccgaggtacgaaaaaatcaggctactaagcccactgttaatatagacgcagaccaattgttaggaacaggtccaaattggagcaccattaaccaacaatcagtgatgcagaatgaggctattgaacaagtaagggctatttgcctcagggcctggggaaaaattcgggacccaggaacagctttccctattaattcaattagacaaggctctaaagagccatatcctgactttgtggcaagattacaggatgctgctcaaaagtctattacagatgacaatgcccgaaaagttattgtagaattaatggcctatgaaaatgcaaatccagaatgtcagtcggccataaagccattaaaaggaaaagttccagcaggagttgatgtaattgcagaatatgtgaaggcttgtgatgggattggagga

SEQ ID NO: 3015 - DNA, 435 bp, Homo sapiens
ccgcggtggcggccgcccgggcaggtacgcggggaaaaaagggtggggagtgccctttcttgaaggaatcccttaagtgcacgtctcccgttttcttttcacatcaatgcagagtccctctgtgaatttacaacacccaacacccatgagttcagtccttaagaaggaaaattgagcaagtatttaattggttggacattgcataaaagaggtccatatccaggctaactctagaaattttattctcaaacttagttggcctctttttcttctgtcagaggaccattcttagtggcactggggaaatcttggcacccagaagaattcaactgcgctcactgcaaaaatacaatggccctacattggatttgtagaggagaaaggagccctgtattgtgagctgtgctatgaagaaaattctttgcccctgaatgt

SEQ ID NO: 3016 - DNA, 433 bp, Homo sapiens
actacttagggcgaattggagctccccgcggtggcggccgaggtactacaataatcctcaagatactgaaagtaatgccaagtgaaagaccaagggggtgggtggagggctaatgggctggacgaaatagccacttgattgctagttcatacaagatgtggcagcaactccttttctggctggagatcttggatgtcacatcttagaatcaggtggcaaagcatctgtgaagggcaatgtggcatcccagacagtgggtggtgagatcaggaagaaaaaatggaaatcaacagatggtggatcctacagctgagaactgattcttcaatttgacatggttggcataaacattttaaatggagcttggtaaagatcaggttattttaccattgaccaagctcttggcttctaaaaggtcctaaatttttgtttc

SEQ ID NO: 3017 - DNA, 470 bp, Homo sapiens
tccttagggcgattggagctccccgcggtggcggccgaggtactatagattatttgtcttgaagaagagctttgatatgtttcaaaattcgacgttggctttggaaggaaactgtaaatttacagatctttgtccttccccacaaagagccttaatctcacaggttggattatgtggaactcactgctatttttcagttctcctttaagtgactaaggaacatccagatacttccaaaaaaaaaaaaaagtctaagtttttcactttgtccattgccatttaattatcttctgcatattttaaagcatttcctgtgaacataagtattgcccatccagaaaatttgcgtctacattgattttatgtttaatgaaacctgttcttctcaagttctttatttaatcacataacatagtatcttcaaaggtgagataaaaaaatcactggagaaatgttaaaacttcatttat

SEQ ID NO: 3018 - DNA, 415 bp, Homo sapiens
aggtaccttctgctgttccctgggtcttcaatgactcaatttcccaccagcagtatcctttaaagccatcctgcatcctgagacaagagattgacaattcattgataagtagtcttaattgtcactattacagggctgtaggtcctttgccagccatgcctttcagtcctaaatggtcttcaaggttgggctgtgttgtccaagagctgaggaccttacatttattgttccaatatttattggctataatgatttctgtggagcagtcagctgtcagaaaattttgtctcctttgtaggtaacctgtcattggtctttggatttttttatagtctccctttgtatctggtgtaaatttagtttcaatctgttgtgcctacgtggtagacttcttgctttgaaaaagttggttggg

SEQ ID NO: 3019 - DNA, 474 bp, Homo sapiens
  misc_feature 103, 464: n = A,T,C or G
actacttagggcgaattggagctccccgcggtggcggccgaggtacgcgggacacacacacacagcacctgcacgcagatgcacacatctctagtcaaatgangctctcagctttttgataggggctttttgatacgtgtataaccaatactttattctcactgtagtcaaggactcattgcaattcagaaatgataagctgatccggaactccactacagctcaaagaaattctcgaatggttctcacctattaacagttattaaaatggaagaagctggggatgaaattgtgagcaatgccatctcctacgctctatacaaagccttcagcaccagtgagcaagacaaggataactggaatgggcagctgaagcttctgctgggagtggaaccagctggacttagccaatgatgagattttcaccaatgaccgccgatggggagtcttgctgaccttcaagnaagtcatgtt

SEQ ID NO: 3020 - DNA, 322 bp, Homo sapiens
  misc_feature 23, 44, 93, 104, 153, 159, 164, 173, 295, 303, 308: n = A,T,C or G
ccgaggacctggcatatactcancatgtattttttcccctttcnttacaatgttccttgccccgaacacttgaatagtggagagaggaatgtntgcttttcctntccattgaaccaacactcgcccatccactgagcccaagattcaccttangattgnctgtnggactcggntcttttgtgacctaacagtgcaggggccttgtgctgagctgcacatgctcgctctcgctggtgctccctctctctctctctctctgtctgcattatttatagtaaaccatattagaacagantgttaaanagganggatgagtcattcc

SEQ ID NO: 3021 - DNA, 452 bp, Homo sapiens
  misc_feature 14, 26, 29, 218, 408: n = A,T,C or G
ctatagggcgaatnggagctccccgnggnggcggccgaggtacacaattaccttaacttcaaataaagtgttcttttctccatactcttctattcccttaacaatccctgttctcaaaggcctttgtgttttattttctgctttataacaaaacaaaaaaacaaacacccaccgtcctatgacacaggtgttttgaatccatgtcaatttttgtagtnaagtatatgctggttaaaccacatagcatatcccccaaaaagccagaggcaagcaaaaacttaatttgatgcccttcaagtttcggaaggtcccatttctttttattaaccaaaagataagatgaagctcagcatggctatggctgtgattagataacttttgatattttcatttcccttaccgagctgntgcttctaggctgaactcattttattcacctgcccatttttaaa

SEQ ID NO: 3022 - DNA, 470 bp, Homo sapiens
  misc_feature 3: n = A,T,C or G
ctnctatagggcgaattggagctccccgcggtggcggccgcccgggcaggtacgaaaaaatcaggctactaagcccactgctaatatagacgcagaccaattgttaggaacaggtccaaattggagcaccattaaccaacaatcagtgatgcagaatgaggctattgaacaagtaagggctatttgcctcagggcctggggaaaaattcaggacccaggaacagctttccctattaattcaattagacaaggctctaaagagccatatcctgactttgtggcaagattacaagatgctgctcaaaagtctattacagatgacaatgcccgaaaagttattgtagaattaatggcctatgaaaatgcaaatccagaatgtcagtcggccataaagccattaaaagaaaaaagttccagcaggagttgatgtaattacagaatatgtgaaggcttgtgatgggattggagga

SEQ ID NO: 3023 - DNA, 592 bp, Homo sapiens
  misc_feature 1, 170, 225, 227, 234, 253, 282, 338, 343, 345, 353, 364,390, 467, 495, 498, 516, 548, 572, 580: n = A,T,C or G
ncgcccgggcaggtacgcgggagaaaaaacagaaggggagatttgtgtggctgcagcccgagggagaccaggaaagaatctgcatgggtggggaaaggacctgatgaatacagaaggttgagaaaataagaaaagggcttgctgactttttaccatctggaggcccacancatcttgcttgaaaatgggaagaataatttaaccattcacctaggaaaccaggcnanggaatgnacaattataattggtcctnaaggttaggttgaaccaattgtttttttngcaccatttttcccaggccccccttttaaaaatattccccaccaccaccaccaagngaaangncaacaaanaaggggaaagncacaagaagaatccccttggggaagnaaaaatgccccgggcccgcttcctaagtaaacctaagttgggaattccccccgggggcctggcagggaaatttccgnaataattcaaaagccttttaattcggantancccggtccgaacccttcngagggggggggggggccccccgggttaccccncaagcctttttttggtttcccccntttttagnttggaggggggg

SEQ ID NO: 3024 - DNA, 451 bp, Homo sapiens
  misc_feature 441: n = A,T,C or G
ccgcggtggcggccgaggtactatatgctagaaacttggctgaatgatttgacattatcctatttaatgttcatgacaatccaataacgtaaccactcatatctcccttttgtgcagataacaaactgaggcccagagaaatcaaatatgttgtcaaaatctacatcgtttgaagagatgggtttcaaatccaggtcggcttggcccttgccacgacttcataatgaaattccatgggtgagtgttaccagtttctggtccatccttgcttatttcaagggtctcatcatcccatccactgtatcactttttttgttacaggctttactcttttctaccatggaaaaagactaatgatatttttttctccataagcttggaaaatattatcaatcaccataaaattcaagcccttcctctggtaactttggagaccctcanagcttttctt

SEQ ID NO: 3025 - DNA, 293 bp, Homo sapiens
  misc_feature 2, 14, 17, 23, 252: n = A,T,C or G
tnggagctccccgnggnggcggntcgaggtacgcggggacatcaatgcagagtccctctgtgaatttacaacacccaacacccatgagttcagtccttaagaaggaaaattgagcaagtatttaattggttggacattgcataaaagaggcccatatccaggctaactctagaaattttattctcaaacttatttggcctctttttcttctgtcagaggaccattcttagtggcactggggaaatcttggcncccagaagaattcaactgcgctcactgcaaaaatacaatgg

SEQ ID NO: 3026 - DNA, 407 bp, Homo sapiens
  misc_feature 241, 305, 387, 396, 403: n = A,T,C or G
ccgcggtggcggccgaggtacgcgggacatcaatgcagagtccctctgtgaatttacaacacccaacacccatgagttcagtccttaagaaggaaaattgagcaagtatttaattggttggacattgcataaaagaggtccatatccaggctaactctagaaattttattctcaaacttagttggcctctttttttttctgtcagaggaccattcttagtggcactggggaaatcttggcncccagaagaattcaactgcgctcactgcaaaaatacaatggcctacattggatttgtagagganaaaggagccctgtattgtgagctgtgctatgagaaattctttgcccctgaatgtggtcgatgccaaagggagatccttgganaagtcatcnatgcgtngaaa

SEQ ID NO: 3027 - DNA, 428 bp, Homo sapiens
  misc_feature 113: n = A,T,C or G
ccgggcaggtacgaaaaaatcaggctactaagcccactgttaatatagacgcagaccaattgttaggaacaggtccaaattggagcaccattaaccaacaatcagtgatgcanaatgaggctattgaacaagtaagggctatttgcctcagggcctggggaaaaattcaggacccaggaacagctttccctattaattcaattagacaaggctctaaagagccatatcctgactttgtggcaagattacaagatgctgctcaaaagtctattacagatgacaatgcccgaaaagttattgtagaattaatggcctatgaaaatgcaaatccagaatgtcagtcggccataaagccattaaaaggaaaagttccagcaggagttgatgtaattacagaatatgtgaaggcttgtgatgggattggagga

SEQ ID NO: 3028 - DNA, 461 bp, Homo sapiens
  misc_feature 7, 414: n = A,T,C or G
gcgaatnggagctccccgcggtggcggccgaggtaccttgctctaaaggaactaatgatatatgctactattattaaccaagataagattttcccattccagttggccaatattccattttaagtgatcagtccagattctagattatgacctttcctgtctctcaatcgtatgctcttttcaacatactacttgacttcctcttccgaaaaagagaacagatgtaaaatgctaaaataagaacaataaatgtattgaaacatattactctatcccatccattactgtgatgaaaaattacaaacgaaaaattatttgacctgagaaatgagaacacaaagaagatttgaattatatgagattaagaaagttaaagtaaaaaataatcaactagtccttccttattatatggtnttcataatacaattatgaagggtcattcaatgatttaaatggcaggt

SEQ ID NO: 3029 - DNA, 392 bp, Homo sapiens
  misc_feature 9, 70, 372, 373, 374: n = A,T,C or G
tatcgactnctatagggcgaattggagctccccgcggtggcggccgaggtacgcggggacatcaatgcanagtccctctgtgaatttacaacacccaacacccatgagttcagtccttaagaaggaaaattgagcaagtatttaattggttggacattgcataaaagaggtccatatccaggctaactctagaaattttattctcaaacttagttggcctctttttcttctgtcagaggaccattcttagtggcactggggaaatcttggcacccagaagaattcaactgcgctcacttgcaaaaaaatacaatgggccctacattggattttgtagaggaagaaaaggaagccctgtatttgtgaagcctnnngctatgaagaaaatttct

SEQ ID NO: 3030 - DNA, 472 bp, Homo sapiens
tacttagggcgaattggagctccccgcggtggcggccgcccgggcaggtactatactgaggtgacgtttccaccaccaaccatctgcttgggcccctcttaattctccaccggagactggggctgccttcctcagggatcccagctatctctcaacacctcgtcttcctccaagactggagtcttcgtggagttctgaggaattcactttccaagcaagaaggttttgggtcctcatgtcatcttcctccaagactggagtctttgtggagttctgaggaattcactttccaagcaagaaggttttgggtcctcatgtcatctttctccaagactggcatcatctcggaattctcaggaattcactttccaagcaagaaggttttgggtcctcatgtcatcttcctccaagactggcatcatctcggaattctgaggaattcactttccaagcaagaaggtcttgggtcctt

SEQ ID NO: 3031 - DNA, 360 bp, Homo sapiens
aggtacgcggggacacacacacacagcacctgcacgcagatgcacacatctctagtcaaatgaggctctcagctttttgataggggctttttgatacgtgtataaccaatactttattctcactgtagtcaaggactcattgcaattcagaaatgagaagctgatccggaactccactacagctcaaagaaattctcgaatgttctcacctattaacagttattaaaatggaagaagctggggatgaaattgtgagcaatgccatctcctacgctctatacaaagccttcagcaccagtgagcaagacaaggataactggaatgggcagctgaagcttctgctggagtggaaccagctgg

SEQ ID NO: 3032 - DNA, 348 bp, Homo sapiens
ccgggcaggtacgcgggcattttctaaatcaattatgacagtgttaacaatcaaccttttatttttctctactgaataacggcgtattaaatggtttgaagactttttcttcctctacctctctcctaaattcctcatttacaaaagaaaacccaaaacaaaacaaacaaccccaacaataccaattgtaactccccagaccagttagatcatagatccagatctcattgaaaattatccttttggctaggcatgggtggctcatgcccgtaatcccagcacttttggggagaccaaggtgggcagatggcttgagcccaagagtttgagactagcctggggctacct

SEQ ID NO: 3033 - DNA, 357 bp, Homo sapiens
ccgggcaggtacgcggggactcaagctcgggttcttctcctaggcggaagccagaccagagagcgtgcgtgtttttcccagggtgccccgcgctgctgttatggccgcctccttgaggtagtatccgcacatggaattctagggccgcaggtgtatttacggtaactgtcgccactagatttcagcgcctttggactctcctgttttcactttcttttgttgactcccgtgtggccctcgtgggagcctgttttggctgcagcggtgtctggggtgatgtggaccccggagctggcaattctgaggggattccccactgaggctgagcggcagcaatggaaacaggagggggtcgtc

SEQ ID NO: 3034 - DNA, 374 bp, Homo sapiens
ccgcggtggcggccgcccgggcaggtacaagaaaggcgagaacccagtatcttatgctggaatgttaggaaccgaagatctcctaaaatttatccagctcaacaggatttcatatccagtgaatataacatcgatccaagaagcagaagaatatttaagtggggaattatataaagacctcatcttgtattctagtgtgtcagtattgggactatttagtccaaccatgaaaacagcaaaagaagattttagtgaagcaggaaactacctaaaaggatatgttatcactggaatttattctgaagaagatgttttgctactgtcaaccaaatatgctgcaagtcttccagccctgctgcttgccagacacacag

SEQ ID NO: 3035 - DNA, 371 bp, Homo sapiens
ccgcggtggcggccgcccgggcaggtactcgggaaactgaggtgggcaaatctgttgagtccaggagttcgagacaagcctgggcaacatagcaagaccatatcaaaaatataaataaataaataaaaaataaaagataaaagttgggtccacaaaaaattgctaaaacaaaaaataaaaggactggtccttaagtaagaaaagagattttcattgctacctatacaaattataagatataaggaaggaagtcaatatagttacatgtagatatagctctggagggactgagaagtttagggagatgcagcctgatgaatctttcatgtggttttagcaactttatctaaagaaggaaagataagtccaag

SEQ ID NO: 3036 - DNA, 321 bp, Homo sapiens
ccgcggtggcggccgaggtacgcggggactgtagtcaaggactcattgcaattcagaaatgagaagctgatccggaactccactacggctcaaagaaattctcgaatgttctcacctattaacagttattaaaatggaagaagctggggatgaaattgtgagcaatgccatctccctacgctctatacaaagccttcagcaccagtgagcaagacaaggataactgggattgggcagctgaagcttctgctgggagtggaaccagctggacttagccaatgatgagattttcaccaatgaccgccgatgggagtctgctga

SEQ ID NO: 3037 - DNA, 360 bp, Homo sapiens
ccgggcaggtaccaaacacaattcctgctctcagggaaacatggataagacttaaacaagtgaaatgttaaatagccctgtgagacaggagggaatgcatatcaagcaagacagtgtggtcattgggttttgagggggaaaatgagggaaaggcctttgtgtgtgaggtagggtaaagtggatgaatttgaatcacattttgaaaggcattgcaggtgggatggatgagcagatgttcccaataggaacgcctgtagactgttcagaagaaattgcccaaatgagctagatgagaaggctgagggcagggctgcttttggctctgaggactatagatttatcctctaggtgatgaggggc

SEQ ID NO: 3038 - DNA, 503 bp, Homo sapiens
  misc_feature 191, 231, 234, 258, 271, 281, 300, 310, 313, 316, 326, 344,384, 435, 436, 440, 443: n = A,T,C or G
cgcccgggcaggtacagatctgggaactaaatattaaaaatgagtgtggctggatatatggagaatgttgggcccagaaggaaccgtacagatcagatattacaacagctttgttttgagggttagaaatatgaaatgatttggttatgaacgcacagtttaggcaagcatgggcccaagaaatcccttgnacccttcttgccccgtgggttatctccctcccccagctcnggnctgccttcatggtcatcaccaagntaattccattttngtttttgttngccatgtcttgttgaaagncccattcaanganttntttcttcggnctgtttttacctcctcanttggggtaaaatgcctacaacttttgttggactttccatntttcaaaattcttgtaaattcccccgttttcaaaattaaaaatattctcannaacnagngattctgttttattcacttggccccattcgctttttaaaggggaaaacaaccatttcaaa

SEQ ID NO: 3039 - DNA, 431 bp, Homo sapiens
ccgcggtggcggccgcccgggcaggtaccagttgtaaaattaccaggaaccgccatgcctcaagatcgccctgttttctggcttcatcaatgactgcatgcagtgcaccaccctgtccactacgtgatgctgtaggattaagtctcacagtgggcggctgaggatacagcgccgcgtcctgtgttgctggtgaattagacgccatcgctgtgggttgctggtatggtgccgtgctatttggcacaggacacaccgcttgaggtctgtattgaacctctgaaggaggccgatactgaagctcggttggcagccggtattgataaactaccagcggttgggtcttattttctaccggctgatattgtggatactgtatctgagttggcattgccgggatagagactctgtccctttctacttgattttctctt

SEQ ID NO: 3040 - DNA, 724 bp, Homo sapiens
  misc_feature 9, 15, 178, 189, 221, 253, 302, 319, 326, 330, 332, 341,343, 355, 373, 389, 401, 414, 422, 434, 443, 475, 493, 495,499, 500, 509, 530, 546, 571, 572, 579, 587, 611, 616, 625,642, 644, 652, 657, 686, 689, 698, 720: n = A,T,C or G
agctccacncgcggngggcgggcccgcccgggcaggtactgaggctgtatacagccacagcctctccccatccctccagccttatctgtcatcaccatcaacccctcccatgcacctaaacaaaatctaacttgtaattccttgaacatgtcaggcattacattatttcctttctgcncttgagaaagnctctttcctttggtcctctttaaaattcctangaaattggattgttataaagtttttttgtaantaaaagctctggaacttaatccttttaacctttccattgcccataaagnaaaagggtggaaccaancaattanttgnangcaatttcnantccaatttcaancaattggaaggaaccaangcctatatattaaccnttataaaaaagnttggttaaaattntgtgggantttttaattaanaagaaaggntttcttaagggaattcaaaataatttaattanttgggaaaaaaaattggncnaaannggaagtccnccaacccaaggaagggggggnaaaaattggttttttnaattggggggggggccaaccgggtnntttggtntaaaaggncccccttgggggggtaattggttnggaanaggcccaanaaaggggtccaaggggngntaaaaccnccttncaattaagggtcaattccttttaatttanttnaaatttaanttaacctttttcaaattttttntttc

SEQ ID NO: 3041 - DNA, 433 bp, Homo sapiens
tagggcgaattggagctccccgcggtggcggccgaggtacgcggggagtcacagaggaagccatttccagagaggaacaaccgtgtagactgctttcctgggagtcaagttaaaacttctctcctgtgaccttgtcacccggcagtggaaagttacccttggctgcagccacgacttccgcatactcttcagaacttgctctgcccttgagttttccagctttcctttaatgcactaaacctttaatattgtattctcctaaatgagacgtctcgcatttgagcaagtaacactcggatcttccccatttcacggagagacatggatgagaatgaaggctgctgagtgggaggggcttatggggccagttttgaagaggcctcataccttttggccacattccattggccagaactttgtcatatgactgcac

SEQ ID NO: 3042 - DNA, 407 bp, Homo sapiens
  misc_feature 223, 399: n = A,T,C or G
ccgcggtggcggccgcccgggcaggtaccatgatcataatattgctcattccttaacaagtattatgattctgatgttagcacaatgtctgtaatatttcactgtgggtgtcctttcctttctctaataccttggcagctctgtagaaaaaaacctcatgctccctttacgttcgcttctgctttgattttcctactctaggtttatattcgaagcacagacnttgaccggactttgatgagtgctatgacaaacctggcagccctgtttcccccagaaggtgtcagcatctggaatcctatcctactctggcagcccatcccggtgcacacaagttcctctttctgaagatcaggtcagtatactgggaaaaccaggagatttcagatgggacctaanaatggagg

SEQ ID NO: 3043 - DNA, 565 bp, Homo sapiens
  misc_feature 20, 35, 36, 37, 41, 52, 60, 104, 105, 106, 144, 159, 164,186, 203, 210, 240, 243, 249, 260, 265, 272, 284, 291, 308,311, 328, 339, 348, 379, 385, 398, 419, 441, 471, 527, 538: n = A,T,C or G
gccgcccgggcaggtacaantttagaagaaaattnnnagancgaaacatttntagaaacngaaaatattgtcaagagtttcagatagaaaatgaaaaacaagcnnnggacaagtattgggagaagtatagaagatagaaaaatnttaaagcccaaaaantgggntaaaatagcccctggaaaaaangggggggaaatttattnggggtanccaaatttaaatttttaaaaagccccaccnaanttaaanttcctgggggnggggncagaaangttaaggaaagnggaaaancctttgggggaaagaanggnggggggggggttaccgngatgaccccanaaccccatnttaagaaaagaaatacctttggaaagccttnaggaangggggggaaaggntttgggttttaaaaaaatccnaccattcaaaaaaaaaggcctnaccttaaaaaaaggggaacccggggtgggntaaaatttttaaaaaaaaaaaaaccccaaaggggccaggaaaaagggccttttttnggggaaagganggttaaggaaaaggaaaattttgggga

SEQ ID NO: 3044 - DNA, 470 bp, Homo sapiens
  misc_feature 18, 43, 59, 72, 113, 195, 196, 199, 200, 204, 206, 212, 215,216, 218, 251, 360, 365, 411, 428, 433, 435, 457: n = A,T,C or G
atagggctttttggagcnccccgcggtggcggccgcccgggcntgtacaaccaatcttnagcttacttaggnttttctagtgcagtagttctaaaatatggtccctggatcantagtgttagcatcccctgggattttgtgttttaacaagttctctatatgattctgatgcacactaaagcttcagaatcactnntgnnagtnanaacctnggnnangggttctcaggccttccccgctgctggcttaangtgtttgcatttcttgggtctactaagtcagttagttctttatctgtttcctttccagtttccaaaatttttgtgtgctatcttattcctctccagttttcctcatatntggtngaattttatatcttttttttaaaaaaaaaaatctctttttatttgnaataaagaaagggccanggaantnggtgggctttcaccgccccttntaaattcccccag

SEQ ID NO: 3045 - DNA, 139 bp, Homo sapiens
  misc_feature 31, 47, 57: n = A,T,C or G
gcccgggcaggtaccgttcctgagaccttcntgcaggcaatctcttntgcccgctgngtttttgacatgggggtgagtatacgtgaccctgttagggaagggcgggacacaactgacaataactagtcttaattctaga

SEQ ID NO: 3046 - DNA, 453 bp, Homo sapiens
  misc_feature 379, 414: n = A,T,C or G
attggagctccccgcggtggcggccgaggtacatctctagatgatcacgaatgtcaaatatcacactacactgtgatatggggattccccttgggggttttcatgtgtatagggtgcctgcagctacactaaacatcttaaagctaccacaatgttcacttcatatttttgctttttataggctttcttggtcctcctcctatgttccccatcatttttcttgctttgaatctgtaagaatcgagttgaatcttctccattttaaattttccataggctgagaaactgtttagccaagtttggataaaattgtatccaaagtaagagtatacaagctatgggcaagtccaaaatcaagctgttcacaggaccatgttcntctctaaaggttctaggagaagaatccctcatttncttccagctttctgggtggctgctggcatttcctgggcc

SEQ ID NO: 3047 - DNA, 400 bp, Homo sapiens
  misc_feature 190, 198, 245, 381, 385: n = A,T,C or G
ccgcggtggcggccgcccgggcaggtacttccaaaccctcctgttctttcctttttgttttccccaattttaacataaggcaaaagcagtaattgagcaattctatcacctggattggcactccggggaacagtggagctgatcactaactgaattccccctttataatctgaataaattacccccagtntgaatttnggactcccttcaaatttagacttgatctccctcaaaggcctaccctnccttctggcagcgggccatatacccctctaggaatcttttgtgggggctttccagggagtaaaaagaccatttgggtggaacataaaatctactgcggtgctgcctgctgtggcgcgggacaagctgttggattgnttgnaattggctgactccc

SEQ ID NO: 3048 - DNA, 447 bp, Homo sapiens
  misc_feature 78, 137, 160, 161, 166, 193, 195, 197, 199, 201, 215, 235,240, 251, 273, 279, 294, 297, 304, 306, 309, 311, 335, 361,366, 372, 408, 412, 415, 419, 422, 431, 433: n = A,T,C or G
aggtacacactgccatttttgtattttaaaggaaaaatgactttcattcccaactgattatgacctttcaggatgttngtcaagtgatgctttcagttgtaacacgtgacttggtgctgtccctgctggtctaaganagaactgtagaattcatatgggnnctggntggtatccctggtggccccttttttgngntntngnttggaatttaaaanctcctggggcatttttttcntaacncactaataggnttttttttggggtgccatggcnttgaantctttgtccttgacnccnttggtancnttncnattctttttaaccttgttttaacntttttttaatttcaaaattatcctcnttggngcccanaaaacctttgtaacctccaaggaaaaattttaaccncttnttncccnttnatttgggtncnaaaaaagggggggg

SEQ ID NO: 3049 - DNA, 396 bp, Homo sapiens
  misc_feature 173, 184, 199, 200, 297, 344: n = A,T,C or G
ggagctccccgcggtggcggccgaggtactcctactcatatgcttcagttaattatatatgttgaacaggtaggaagcagtgctgtttttatttattttaatatgttattcatacatttgaagaattatgttctttctgtaggcagctgaattttttttttttgagacgaagncttggtattgncccccttgctggganngcaaatgggcatgaatctcgggctcactgcaaaccttctgcctcctggggttcagggcaaattcttcctgcctcagactccttgagtagctgggatnacaggcgcctgccaccacgcccggataatttttgtatttttagtagnagacagtgttttcactatgttggctgggctggtctcgaactcctgccctcag

SEQ ID NO: 3050 - DNA, 477 bp, Homo sapiens
tacttagggcgaattggagctccccgcggtggcgggcccgaggtacctcagttggaaatgcagaaatcacctgcctactgcattgatctcgctgggagctgcagaccggagctgttcctattcagccatcttgccagcaggtatttctttatagcaacacaagaacagcctaatacaatttccagtatcaacgggctggtacaaagttccccctaccccttcccagtgggatggagacagtggagtgtctaaactttcaacatcgtccagaagtaaagaggccactcgctccctcttccctccggtgtcaatggaggccatgtggagaacagtaatgagacactcctattctttccaactaggatgggatcagcagaggcctagtggggagccaaaactcctagtcccaccatgcagtaacaaggaggcccccatccctggtgccagtaaaggctgagtgggaacctagacttctac

SEQ ID NO: 3051 - DNA, 707 bp, Homo sapiens
  misc_feature 31, 34, 40, 48, 67, 78, 85, 184, 188, 189, 191, 192, 208,223, 231, 245, 249, 251, 291, 293, 296, 305, 310, 314, 321,331, 336, 345, 367, 399, 401, 405, 416, 425, 435, 438, 448,454, 466, 473, 474, 476, 490, 492, 493, 501, 506, 508: n = A,T,C or G
  misc_feature 512, 517, 527, 540, 545, 547, 549, 550, 555, 561, 567, 573,581, 586, 587, 590, 594, 596, 603, 612, 615, 626, 630, 645,649, 655, 670, 673, 675, 678, 681, 689, 692, 693: n = A,T,C or G
tcctatagggcgaattggagctccccgcggnggncggccncccggccnggtccccgggaggctttgnggcagccagcncaggggnttcttgctgagggggcaggcggagcttgaggaaaccgccagataagtttttttctctttgaaagatagagattaatacaactactttaaaaaaatatangtcnnannagggttacttaaaaanttttggccttaaccngtttaaanttttttttaaaccngtanantttttaaaataggcctttaaaggaattttttacatgaagnanaanaattattgnacacnaacntttaagnaaagcaggtnatgcnaattgaagnggaaaaggggaaaaaaaaggantaaaaaaaagggttttttccttaaaaaaaacnanttgnaaccgaggaangggttttgnaaggaattgnaanaggccttttntttttncaattggggganggccacnncntactatatatatananngatacatngatananacanatatnatagggggtntgcccctttccgnggtcncngnnttttnttaagnaaaacntaaagntttggggnaattnnccncccncnggggggncctttggcnaangggggaaattnttcncgaattatttccaanaggncttttnatttctggaattaanccngnttnctncaaccctnccnnaagggggggggggg

SEQ ID NO: 3052 - DNA, 460 bp, Homo sapiens
  misc_feature 168, 258, 458: n = A,T,C or G
ctatagggcgaattggagctccccgcggtggcggccgcccgggcaggtaccagttgtaaaattaccaggaaccgccatgcctcaagatcgccctgttttctggcttcatcaatgactgcatgcagtgcaccaccctgtccactacgtgatgctgtaggattaagtctnacagtgggcggctgaagataccacgcccgcgtcctgtgttgctgggtgaattaagacgccatcgctgtgggtttgctggtatggtgccgngctatttggcacaggacacaccgcttgaggtctgtattgaacctctgaaggaggccgatactgaagctcggttggcagccggtattgataaactaccagcggttgggtcttattttctaccggctgatattgtggatactgtatctgagttggcattgccgggatagagactctgtccctttctacttgattttctcttngg

SEQ ID NO: 3053 - DNA, 423 bp, Homo sapiens
ccgggcaggtaccaggagggtattgatgtttgaggtccaaactgaaaacccatcacctccttcccactgctatagcagcgttagccctggggttcattatctagccagttcacaccttctaaagtggggctctgaaaatgtcttacttccctcacagacaaagcaattctcgagcctcctgagatcacccaccaaccagagcaactgctgtcacttggaggtgcagctgaattcttctaattgtgacacaaactcttgaaactgtaaatgctgaaagattaaatgaggttataacactcagaaggttttacaagtaaaagtaagtcaaatcaataggtctttatttcatatctgtaatggtttagctctgcgggaagtgttagcagctatatgaattaggaagaatttagaagacaatcccta

SEQ ID NO: 3054 - DNA, 473 bp, Homo sapiens
  misc_feature 4, 67, 452: n = A,T,C or G
actncttagggcgaattggagctccccgcggtggcggccgcccgggccagggtccccgggggccagnaaaatgagagtttcagatactgagaatagaaccactaagaagcagaaaagagaagatattctcgcgggggagaacaacggctgggaggggaggaagcatggccaaggcaaagaggtgggcattaataaagaactgcttctttgctgccgccatatgaagaaggacgtgttcgcttccccttcctccatgattgtaagtttcctgagacctcgccagccatgctgaactagtgaacaggaaacctacagaataggagaaaatttttgcaatctactcatctgacaaaaggctaatatccagaatctacaaagaactcaaacaaatttacaagcacaaaacgaacaaccccatcaacaagtgggcgaaggacatgaacagacacttntcaaaagaagacatttatgca

SEQ ID NO: 3055 - DNA, 468 bp, Homo sapiens
  misc_feature 45, 47, 57, 62: n = A,T,C or G
tacttagggcgaattggagctccccgcggtggcggccgaggtacncngggggccttnaatgncagagtccctttgtgaatttacaacacccaacacccatgagttcagtccttaagaaggaaaattgagtaagtatttaattggttggacattgcataaaagaggtccatatccaggctaactctagaaattttattctcaactttagttggccctcttttttttctgtcagaggaccattcttagtggcactggggaaatcttggcacccagaagaattcaactgcgctcactgcaaaaatacaatggcctacattggatttgtagaggagaaaggagccctgtattgtgagctgtgctatgagaaattctttgcccctgaatgtggtcgatgccaaaggaagatccttggagaagtcatcaatgcgttgaaacaaacttggcatgtttcctgttttgtgtgtgtag

SEQ ID NO: 3056 - DNA, 469 bp, Homo sapiens
  misc_feature 2, 55, 57, 61, 65, 79, 205: n = A,T,C or G
tncttagggcgaattggagctccccgcggtggcggccgcccgggccagggacctncntggntatnagggactgaagttnggattagaatccttttcaatgaagatcagatgtcctgagtagaattcttactattgggtcctgaatcttacattaaatattctctcaaattccttgaggcatagcaacgtgagccacccgtgcccnggcctgtcctctgtggttttctgggcttatgttaaaattataactcaatcaccagtctttataaatttgcttttttatatttaaaccaaacctaatgctaattgtgatatgttatttattctcacctgatttgaatcattggattcaattaaatgagtttaattatcattaaataattctaagagaaataatgtctattcggatggtgggaattttctttctacatgcagccccattctgaatgaaatcaaatcacgtgaagat

SEQ ID NO: 3057 - DNA, 467 bp, Homo sapiens
  misc_feature 2, 336: n = A,T,C or G
tnctatagggcgaattggagctccccgcggtggcggccgaggtacgcgggtagtggaaacaaataactgtttcactcttgagtgttagcatggaagagattctggttgaaatcctagtcctgccactttctggttacagaaacttacattacttttcttttgatgtttcaaggaggtaggagttaaagaaaaatgaaacaccagaattactagaaccattcttatagagttgcccaaagatggaatggacaccttccagagtggaggggagggagtaggattggacagtagtcctcaactgggagcacttcttccccctgaccccacacctgcctnccagggacgtttgacagttttggattgcacaaaactgaggggtgagagttgctgctatatctagtgagcagaaagccagagatgctttccaaataccttacgaagcataggacagccctcacggaaagaat

SEQ ID NO: 3058 - DNA, 473 bp, Homo sapiens
  misc_feature 13, 54: n = A,T,C or G
tatagggcgaatnggagctccccgcgggtggccgggccggggacctttggtttnttcttgactgaaatttcttactgaattctctggctgatatttttcattgtgagttgcttatctcgatgtcctgctttgaaaagtatgtgtttagggaatgtttttatttgcatacttactatgtttgctatggaaaatttagaaaagtaatgtttaagtaaaaatgaagaaaataaaaaccatctgtactcatttgtattcactgtcactttttctcatgttctaattataaatgaccaaaatcaagattgctcaaaagggtaaatgatagccacagtattgctccctaaaatatgcataaagtagaaattcactgccttcccctcctgtccatgaccttgggcacagggaagttctggtgtcatagacatcccgttttgtgaggtagagctgtgcattaaacttgcacatgactggaa

SEQ ID NO: 3059 - DNA, 443 bp, Homo sapiens
  misc_feature 1, 22, 198, 405, 426: n = A,T,C or G
ncttagggcgaattggagctcnccgcgtggcggccgaggtcgaaaaaatcaggctactaagcccactgttaatatagacgcagaccaattgttaggaacaggtccaaattggagcaccattaaccaacaatcagtgatgcagaatgaggctattgaacaagtaagggctatttgcctcagggcctggggaaaaaaatnaggacccaggaacagctttccctattaattcaattagacaaggctctaaagagccatatcctgactttgtggcaagattacaagatactgctcaaaagtctattacagatgacaatgcccgaaaagttattgtagaattaatggcctatgaaaatgcaaatccagaatgtcagtcggccataaagccattaaaaggaaaagttccancaggagttgatgtaattacanaatatgtgaaggcttgt

SEQ ID NO: 3060 - DNA, 452 bp, Homo sapiens
ccgcggtggcggccgaggtacttcccattgtaaatcacatttttagatagtccagtggccaaagcccccagacgaacaaaaacactcgtatcagccaagacatgccagaggcctagtgattgtttcccagtagctgagggcagaagccagacctctttcaataaggttgatctttcactgtattaacactgtatataaaggacttttataaaagcttgtagttatggtgtcattgtcatcatccagtttaatgccctcttttttccagtaagaaaagaaaggtctgggataatcatgttaattgatttgtttacatttttattttaattagtagcacaactgagagtgaaaatggaacccaaatagtccatctttagcataatacttttttttctcctctagtggagcttataccttgccaattattgaatcttgaactcctgacctcgtga

SEQ ID NO: 3061 - DNA, 463 bp, Homo sapiens
  misc_feature 180, 350, 434: n = A,T,C or G
ctatagggcgaattggagctccccgcggtggcggccgaggtaccaggagggtattgatgtttgaggtccaaactgaaaacccatcacctccttcccactgctatagcagcgttagccctggggttcattatctagccagttcacaccttctaaagtggggctctgaaaatgtcttacttncctcacagaccaaagcaaattctcaagcctcctgagatcacccaccaaccagagcaactgctgtcacttggaggtgcggctgaattcttctaattgtgacacaaactcttgaaactgtaaatgctgaaagattaaatgaggttataacactcagaaggttttacaagttnaaagtaagtcaaatcaataggtctttatttcatatctgtaatggtttagctctgcgggaagtgttagcagctttatgaatcagngaagaatttataagacaatccctaaacac

SEQ ID NO: 3062 - DNA, 492 bp, Homo sapiens
  misc_feature 204, 286: n = A,T,C or G
cactacttagggcgaattggagctccccgcggtggcggccgcccgggcaggtaccaaggcccaatcaccccaaacagtgacaggaacataatttcctgttgggaccagttctcggaattttgcaccaacatgatcccatagttccacatctaacgttcccttttcaggaaaccaaggacagtgttcttccactgccctgaatangggtgaccatattttccatgggaacccgaactcccccattttaacaggaatttaatatagcagagataagcataatgtttanactctgcgtgacccatagttaccccggacaatacacagacaactcaccaatcgtcggggagccgaacaagcatttctgtggactggaccgatgaacatttctccgcacccaccaaagggaatcgggttcccacatgcacttaggaaaaagaaaaccacgttgggcgccagatattgggggaacctgcccctaatattttcaacgta

SEQ ID NO: 3063 - DNA, 412 bp, Homo sapiens
tacttagggcgaattggagctccccgcggtggcggccgaggtacttgcccaatgtttacccttacgacaacgcaggcaaacagtagcaggagcatttggcagtgtttgttgagccggcttggccgcttttaagtttttaacagtgtagtttttttgggtatgaccaagttggccacaattatagccgggctccaagaaaaagaatcagtcgagccagttttggttgccgtgcttcatggccggtgcccacagaatagctctgtgggtctccgatccaacgccttcacaagctttaatatatgcaggcaacacctcatgatcaggtaaattttgacgtaggatggaatgcacggccattttacactcatggttcgcattttgaaaagctaacatatgaagaagaataccttga

SEQ ID NO: 3064 - DNA, 434 bp, Homo sapiens
cactacttagggcgaattggagctccccgcggtggcggccgaggtacgcggggacacttcaggtgcccagtgtccacactgactagtggtgacggcgttggacagtgcagatacagaacatttctgtcatcacagaaagttcctttggacagagccatgttaagtgatgttatcacaagatggacagaaacattcctgtttgatttatttttcagacccagtttgtggagaaaaataatgatgctttacatatgtctcttgaatccttaatatgtgaatccagagataagtttatacgggaattatttgaatcatccacaaataacaacaaagatactaaacaaaaagcaggaaaacttagcttcatcagcgtgggaaacaagtttaagacacagttaaatttgcttctggataaacttcgaagtacctgcccg

SEQ ID NO: 3065 - DNA, 497 bp, Homo sapiens
  misc_feature 25, 197, 236, 277, 349, 381, 382, 413, 435, 454, 455, 483: n = A,T,C or G
ctactatagggcgaattggagctcnccgcggtggcggccgcccgggcaggtacttgcccaatgtttacccttacgacaacgcaggcaaacagtagcaggagcatttggcagtgtttgttgagccggcttggccgcttttaagtttttaacagtgtagtttttttgggtatgaccaagttggccacaattatatgcangctccaagaaaagaatcagtcgagccagtttggttgccntgcttcatggccggtgcccacagaatagctctgtgggtctncgatccaacgccttcacaagctttaatatatgcaggcaacacctcatgatcaggtaaattttgacgtagganggaatgcacggccattttacactcatggttcnnattttgaaaagctaacatatgaagaagaatnccttgagtgttgctcatcaganacagattttttcaacaagnnttcttgttatttaagctaaaaatcaaanatataatttcattg

SEQ ID NO: 3066 - DNA, 447 bp, Homo sapiens
  misc_feature 5, 176, 187, 236, 301: n = A,T,C or G
tatanggcgaattggagctccccgcggtggcggccgcccgggcaggtaccgcctgcagagccataatccaaatatatcttttttctttgtaaattactgtctcaggtattcctttatataatgcaaaaatagcctaacataacacgcatctcaataattgccccattgtcacattncaaaaataccntgtgaggttgttatagagatattggctttctgggttgttttgttttganaggacaataacatttgattattaaaaaaaaatcctagcacaatgtggcttgtcattgtttattgnttgctatacaagtcataaaccattattatatgtgctcatgttcctttatatagaaatcatataaaaaaaggattttgttttactctttaaaaagttttcatggctgggcgtgattggctcacttttgtaatttccagcacattggg

SEQ ID NO: 3067 - DNA, 492 bp, Homo sapiens
  misc_feature 29: n = A,T,C or G
tcactccttagggcgtttggagctccccncggtggcggccgcccgggcaggtacacagttaatagtagtattgtataagccatgacagtgtagctccctttcattgttttaaacatgtctgtcttacttgagatcttcctatttaaagtgaaaaaagaaatttttttaatttccaaggataaaagctggggtgataatttttaaaaaactgaccattaattttgccgtattattttcaggaaacgaaagccagcattgtaataaattccgttcatgaagataatttaggctttcaaatatggaagcaaagttctaactaataacctttaataaaaaatattcatggtagcacattaaaacatttgttttaggatatattattgaaaatggcttttaacttttcttgcctcactgggggaagaggaaaatgggaagttgaaagcacattatcctgtaaaaacagctaagcattcaattgtttgtctgttttcc

SEQ ID NO: 3068 - DNA, 486 bp, Homo sapiens
  misc_feature 4, 16: n = A,T,C or G
actnctatagggcganttggagctccccgcggtggcggccgcccgggcaggtaccagttgtaaaattaccaggaaccgccatgcctcaagatcgccctgttttctggcttcatcaatgactgcatgcagtgcaccaccctgtccactacgtgatgctgtaggattaagtctcacagtgggcggctgaggatacagcgccgcgtcctgtggtgctgggtgaattaagacgccatcgcttgtgggttgctggtatggtgccgtgctatttggcacaggacacaccgcttgaggtctgtattgaacctctgaaggaggccgatactgaagctcggttggcagccggtattgataaactaccagcggttgggtcttattttctaccggctgatattgtggatactgtatctgagttggcattgccgggatagagactctgtccctttctacttgattttctcttggggtttgtgcttgtctaacctgcgt

SEQ ID NO: 3069 - DNA, 482 bp, Homo sapiens
  misc_feature 210, 336, 372: n = A,T,C or G
tagggcgttttggagctccccgcggtggcggccgaggtacatgaaagcccaaacattaacctagtgaaaataaccctcattttatttaaaagaaatagtcagaaaataaatcaaaaggaccagaaaataagggagaaaatggttaaagaagtaaacatttcatttgggaaagatttcaactgctatagtgatattctttaatggcctttnaaaagtatttttattcaagaaaatgaccatatgcttatgcacataattgcaatatttatctttcacagtcaacttacctataaaaggatacaaaaactgaagaacagagaggagcagataccctgnaaagccgaaagttttattgaccaaagactggtaggnatctgttccagagagggcccctccttttatcaataaaacaagggaaaagtctgtggcaagaacatcaattaaatgtcagattacatgtaatacaaatatttttcatgttt

SEQ ID NO: 3070 - DNA, 421 bp, Homo sapiens
  misc_feature 182, 192, 212, 258, 332: n = A,T,C or G
ccgcggtggcggccgaggtacatctacctaaaggactattatgtggaataatacatactaatgaagtattacatgatttaaagactacaataaaaccaaacatgcttataacattaagaaaaacaataaagatacatgattgaaaccaagttgaaaaatagcatatgccttggaggaaatgngcctaaaatnactaatgattttaggggtgnccctactttctctctctttttttcctttcctttttttttaattaanggttagcttggtctcaaaagcataaaaatgggaaataaccatattcaaaatgaaaacaaggggaaaaatgaagnctgacaatttatgggaagccaggggcttgtcacagtctctactgttattatgcattacctgggaatttatataagcccttaataataat

SEQ ID NO: 3071 - DNA, 394 bp, Homo sapiens
  misc_feature 283, 385: n = A,T,C or G
ttagggcgaattggagctccccgcggtggcggccgaggtaccatgttgtaaaattaccaggaaccgccatgcctcaagatcgccctgttttctggcttcatcaatgactgcatgcagtgcaccaccctgtccactacgtgatgctgtaggattaagtctcacagtgggcggctgaggatacagcgccgcgtcctgtgttgctggtgaaattagaccgccatccgctggtggggttgctgggtatggtgccgtgctatttggcacaggacacaccgcttgaggnctgtattgaacctctgaaggaggccgatactgaagctcggttggcagccggtattgataaactaccagcggttgggtcttattttctaccggctgatattgnggatactgt

SEQ ID NO: 3072 - DNA, 308 bp, Homo sapiens
ccgcggtggcggccgaggtacgcgggataccaaaacacaaagaaacaacaggaagtaagaacaaaactcaagaggtctgagtgacatcttgccttgcttcacaacttcagagtttgcattgctttaaaaacattggttataagtgaagtgtggaaacagtgtgttcactatttttatgctgtggctgtgctgtgcaggagctgggcttttccgtgcattttagacagaattgaccttggttaatgcttgacttggggaactatgcagaaacatccaggaaagtggtgggtggctgatcctgaccgtcc

SEQ ID NO: 3073 - DNA, 479 bp, Homo sapiens
  misc_feature 29, 145, 158, 160, 168, 174, 210, 245, 246, 265, 304, 317,328, 372, 422: n = A,T,C or G
ctttcctatagggcgtttggagctccccncggtggcggccgcccgggcaggtacagcccacagaactgtgagccaattcattcccttttctttttcaattacccactctcatgtatatctttatagcagcgtgagaacagattantacactcctcctnanaaagcatncaattnagctgtgtctaaagtatgccaggtgttctagggtgntatttttacccaataattctacctgtttcagcaannatctatttgcctatgacancttgacctacatttcctaccatacttgtcagtaacaagnagcccataacatntgaatggactncattgaaatcacagaggttctttagttctctactttattagcangcattcgggaaacacatcaactttctaatttaataaggtgcctgttgctntgaaaaactgctcaaaagaagataggagaggcttacttaaagatatcactataggca

SEQ ID NO: 3074 - DNA, 468 bp, Homo sapiens
  misc_feature 23, 26, 220: n = A,T,C or G
tttactatagggcgaattggagntcnccgcggtggcggccgcccgggcaggtacttccaaaccctcctgttctttcctttttgttttccccaattttaacataaggcaaaagcagtaattgagcaattctatcacctggattggcactccggggaacagtggagctgatcactaactgaattccccctttataatctgaataaattaccccaagattgantttggactcccttcaaatttagacttgatctccctcaaaggcctaccctcccttctggcagcgggccatatacccctctaggaatcttttgtgggggctttccagggagtaaaaagaccatttgggtggaacataaatctactgcggtgctgcctgctgtggcgcgggacagctgttggattgttgtaattggctgactccctgaagtggtggtattttctgtaggggttgtttgtccttgaaaaccc

SEQ ID NO: 3075 - DNA, 463 bp, Homo sapiens
  misc_feature 206, 208: n = A,T,C or G
gggcgaattggagctccccgcggtggcggccgaggtacttgcccaatgtttacccttacgacaaccgcaggcaaacagtagcaggagcatttggccgtgtttgttgagccggcttggccgcttttaagtttttaacagtgtagtttttttgggtatgaccaagttggccacaattatagcaggctccaagaaaagaatcaagtccngnccagtttggttgccgtgcttcatggccggtgcccacagaatagctctgtgggtctccgatccaacgccttcacaagctttaatatatgcaggcaacacctcatgatcaggtaaattttgacgtaggatggaatgcacggccattttacactcatggttcgcattttgaaaagctaacatatgaagaagaataccttgagtgtgctcatcagaagacagatttttcaacagcatcttgtaatttagctaaaaaatc

SEQ ID NO: 3076 - DNA, 479 bp, Homo sapiens
  misc_feature 210: n = A,T,C or G
ggcgaattggagctccccgcggtggcggccgcccgggcaggtacgaaaaaatcaggctactaagcccactgttaatatagacgcagaccaattgttaggaacaggtccaaattggagcaccattaaccaacaatcagtgatgcagaatgaggctattgaacaagtaagggctatttgcctcagggcctggggaaaaattcagggacccanggaacagctttccctattaattcaattagacagggctctaaagagccatatcctgactttgtggcaagattacaagatgctgctcaaaagtctattacagatgacaatgcccgaaaagttattgtagaattaatggcctatgaaaatgcaaatccagaatgtcagtcggccataaagccattaaaaggaaaagttccagcaggagttgatgtaattacagaatatgtgaaggcttgtgatgggattggaggagctatgcataaggcaat

SEQ ID NO: 3077 - DNA, 424 bp, Homo sapiens
  misc_feature 20, 210: n = A,T,C or G
ttagggcgaattggagctcnccgcggtggcggccgcccgggcatggtacttccaaaccctcctgttctttcctttttgttttccccaattttaacataaggcaaaagcagtaattgagcaattctatcacctggattggcactccggggaacagtggagctgatcactaactgaattccccctttataatctgaataaattaccccaagnatggaatttgggacctcccttcaaaatttaagacttgatctccctcaaaggcctaccctcccttctggcagcgggccatatacccctctaggaatcttttgtgggggctttccagggagtaaaaagaccatttgggtggaacataaatctactgcggtgctgcctgctgtggcgcgggacagctgttggattgttgtaattggctgactccctg

SEQ ID NO: 3078 - DNA, 407 bp, Homo sapiens
ccgcggtggcggccgcccgggcaggtacatctctagatgatcacgaatgtcaaatatcacactacactgtgatatggggattccccttgggggttttcatgtgtatagggtgcctgcagctacactaaacatcttaaagctaccacaatgttcacttcatattttttgctttttataggctttcttggtctcctcctatgttcccatcattttcttgctttgaatctgtaagaatcgagttgaatcttctccattttaaattttccataggctgagaaactgtttagccaagtttggataaaattgtatccaaagtaagagtatacaagctatgggcaagtccaaaatcaagctgttcacaggaccatgttctctctaaaggttctaggagagaatccctcatttcc

SEQ ID NO: 3079 - DNA, 435 bp, Homo sapiens
ccgcggtggcggccgcccgggcaggtacatggggaaaaaatcagtttcaatagtcaagttagctttgggaatagaactgggttaaactgtgtttaaaaggtctctttaatgcagtaatcctaagtctttaacatgctaatacgcactgtggctttcaaggaaaaggatctagtgttttccaaactctgttttcaaaattttgattacagcattcacctccctctttttttccccaatgtcctgtagaaaacactgagagaactgacatttttaactttatatggaaagaatcgtaaatatggtgaatctgggatgtcctcatcaaccagcttcaaagactatcacccatgcaatcttgtttcatctgcatagccactcatttcccacacacacccacttgagttttttaagttatttcatgcaccatatcatcca

SEQ ID NO: 3080 - DNA, 423 bp, Homo sapiens
actccttagggcgaattggagctccccgcggtggcggccgaggtacacacttgcatgagggatggggctggtttacaggaatggaaccagcttggaaagaagacagaaggtgagaagtgaatacttgttggtatcatgtaagaacagagtgaagaaaaaggacaggccggcccttggtttatttttaaatttcaggaaaatggattggccaaataatggggatcaaaaataaagggtgtttttattatgagccaagtgaaaattaaatttaagatatgtatgttgttatggtttgattgtgtcctccaaagttcatgtgttggaaactgaagcgccagtgcaacagtattgagaggtagaaactttaagaggtgatcagtgctgggtgcagtggctcacgcctgtaatcccacactttgggag

SEQ ID NO: 3081 - DNA, 448 bp, Homo sapiens
atcactacttagggcgaattggagctccccgcggtggcggccgaggtaccatgttcaggaaaccaaggacaatattgctctactgttggaaacagagtaatcaaattttctgtgctagccttaattcctgccctctttaagaggagcttaataaaatgtaaatatgcagaatgtttacttttggattgtctcatggtgtccctggaatgctccgagtgcacaagcttaccgcaaggccgaccacacgttctcgggagttcctggacagaccgttcttcacaacgaccacgctcaggtgtaacttcacctgggttcgaggagaccgtgttgggtgccaaagatgtaggggaacctgcctgatacaccacccgcaggctctccccttcccggtggagacgagggaatgagaaaagaaataaagacaaagacacaaagtttaagagttaac

SEQ ID NO: 3082 - DNA, 465 bp, Homo sapiens
tcactacttagggcgaattggagctccccgcggtggcggccgcccgggcaggtaccagttgtaaaattaccaggaaccgccatgcctcaagatcgccctgttttctggcttcatcaatgactgcatgcagtgcgccaccctgtccactacgtgatgctgtaggattaagtctcacagtgggcggctgaggatacagcgccgcgtcctgtgttgctggtgaattagacgccatcgctgtgggttgctggtatggtgccgtgctatttggcacaggacacaccgcttgaggtctgtattgaacctctgaaggaggccgatactgaagctcggttggcaagccggtattgataaactaccagcggttgggtcttattttctaccggctgatattgtgggatactgtatctgagttggcattgcccgggatagagactctgtccctttctacttgatttttctcttggg

SEQ ID NO: 3083 - DNA, 425 bp, Homo sapiens
  misc_feature 350: n = A,T,C or G
ccgggcaggtaccagttgtaaaattaccaggaaccgccatgcctcaagatcgccctgttttctggcttcatcaatgactgcatgcagtgcaccaccctgtccactacgtgatgctgtaggattaagtctcacagtgggcggctgaggatacagcgccgcgtcctgtgttgctagtgaattagacgccatcgctgtgggttgctggtatggtgccgtgctatttggcacaggacacaccgcttgaggtctgtattgaacctctgaaggaggccgatactgaagctcggttggcagccggtattgataaactaccagccggttgggtcttattttctaccggctgatattgngggatactgtatctgagttggcattgcccggatagagactcttgtccctttctacttgattttctcttgggggtt

SEQ ID NO: 3084 - DNA, 385 bp, Homo sapiens
ccgggcaggtacgcgggtccttccaccatgggaggacacagcgtttgtctcttctgccatgtgaaggctgagcaacaaggtgctatcttgaaagcacaaactgggtcctcaggatatagtaaatcttttgaggtcttccagcccctaaaactggcaatgagggcttccattctggctcttcaccatgataaccttgggggcttcctggatttaaaacccaggaaagcaggggttgagaagggagagcctttgaccatggtctctagcagtttttcactctcctaaatgtccacgttcaagcctccagcaagttgtcgaagtcaccagacaaggttttgctgtattgcctactacacttggagtgcaagtagtgccatcatagctt

SEQ ID NO: 3085 - DNA, 454 bp, Homo sapiens
  misc_feature 327, 334, 349, 424, 451: n = A,T,C or G
tcactacttagggcgaattggagctccccgcggtggcggccgaggtacaccaccacaccccactaattttgatttttagtaaagacggggtttctccgtgttggtcaggctgtctccaacaccctaactcaggtgatctacctgcctcggcctcccaaagtgctgggattgcgagcgtgagccactgcacctgcccttgtttttaactcctcttactataattcccagtcacgcagtttgtttttgactgtgatttagcctccataggttggggtgaaacacggcactctgtctgcaaactggcagcagagttttttttgtttttgnttttgtntttttttttattcangaaaatcccttagttgctgttgggattgaagacctgtatcttacttattaggacctattttgatttttagaagangtaggcaaaatatattgcaaatgactnggg

SEQ ID NO: 3086 - DNA, 375 bp, Homo sapiens
  misc_feature 11, 353: n = A,T,C or G
gtatacgactnctatagggcgaattggagctccccgcggtggcggccgaggtacatctctagatgatcaccgaatgtcaaatatcacactacactgtgatatggggattccccttgggggttttcatgtgtataggggtgcctgcagctacactaaacatcttaaagctaccacaatgttcacttcatatttttgctttttaataggctttcttgggtctcctcctatgttcccatcattttcttggctttgaatctgtaagaatcgagttgaatcttctccattttaaattttccataggctgagaaactgtttagccaagtttggataaaattgtatccaaagtaagagtntacaagctatgggccaagtcca

SEQ ID NO: 3087 - DNA, 399 bp, Homo sapiens
acctttcattggattgtccatggtgcatcgctttagcaagcggcgtgactctccactgcccgtcatcttggccaatatctatctgctggttcctcctgtgctcaacccaattgtctaaggagtgaagacaaaggagattcgacagcgcatccttcgacttttccatgtggccacacacgcttcagagccctaggtgtcagtgatcaaacttcttttccattcagagtcctctgattcagattttaatgttaacattttggaagacagtattcagaaaaaaaatttccttaataaaaatacaactcagatccttcaaatatgaaactggttggggaatctccattttttcaatattattttcttctttggtttcttgctacatataattattaataccct

SEQ ID NO: 3088 - DNA, 414 bp, Homo sapiens
ccgcggtggcggccgcccgggcaggtaccgactcctcagaaactggcatgccaaatcaaaatgggtctggttcaatcctccctaatggcaatgtaaacccctctaactaatcccacttctcctaattatctttttctccttacgaacctaaaaatctcaccatttctattagcctgaaaataacatccctctgttcttctcttcctccttcagcactggatctcacttacaataggttttatttaataattatcttccttacactttctgtctcaccagtttccccttaaactgatttacctgctacacaaaattattcttattgggcttatgtgccttttcctccacttattcgacctctcacctggatggatgctcctgcagaaatctatactaacgatagtgtgtggatgc

SEQ ID NO: 3089 - DNA, 412 bp, Homo sapiens
  misc_feature 388: n = A,T,C or G
aggtacttgatctatatttagacttcgtaaaatttataggtgaaaaagtagattcataccctaactgttccaaacatacttgaaagttttcaaaaaactaaattatcagcttttaagtttaactggattaaacttagtaaatggattaaaatagtaaaatgaaaaatgcagtttctcgatgatactagtcacatttcaagtgttcatgtgcacagtgtgcctggtggctacctcagtggacagttttagcaatgggggggagggtctctccaatagctccttgccttttgtgacacctgcagaaagcagggccaaaggaatttggctttgctagttaaaccagcctcacttttttgtgctagaagtttgtggggaaagagagtgaccnaggtgattcagcacagtctcccca

SEQ ID NO: 3090 - DNA, 412 bp, Homo sapiens
aggtacgcggggattctcaatcctacccatgatgcagacagattacctcatttcagctcaataaaacatcaccaaattcccttaggcagaaaaagggtggggagcgccctttcttgaaggaatcccttaagtgcacgtcttcccgttttcttttcacatcaatgcagagtccctctgtgaatttacaacacccaacacccatgagttcagtccttaagaaggaaaattgagcaagtatttaattggttggacattgcataaaagaggtccatatccagactaactctagaaattttattctcaaacttagttggcctctttttcttctgtcagaggaccattcttagtggcactggggaaatcttggcgcccagaagaattcaactgcgctcactgcaaaaatgcaatggcc

SEQ ID NO: 3091 - DNA, 434 bp, Homo sapiens
ccgcggtggcggccgaggtacttccaaaccctcctgttctttcctttttgttttccccaattttaacataaggcaaaagcagtaattgagcaattctatcacctggattggcactccggggaacagtggagctgatcactaactgaattccccctttataatctgaataaattaccccagtatgaatttggactcccttcaaatttagacttgatctccctcaaaggcctaccctcccttctggcagcgggccatatacccctctaggaatcttttgtgggggctttccagggagtaaaaagaccatttgggtggaacataaatctactgcggtgctgcctgctgtggcgcgggacaagctgttggattgttgtaattggctgactccctgaagtggtggtattttctgtagggggtggtttgtccttgaaaac

SEQ ID NO: 3092 - DNA, 418 bp, Homo sapiens
  misc_feature 391, 394: n = A,T,C or G
ccgggcaggtaccaagttgtaaaattaccaggaaccgccatgcctcaagatcgccctgttttctggcttcatcaatgactgcatgcagtgcaccaccctgtccactacgtgatgctgtaggattaagtctcacagtgggcgggctgaggatacagcgccgcgtcctgtgttgctggtgaattagacgccatcgctgtgggttgctggtatggtgccgtgctatttggcacaggacacaccgcttgaggtctgtattgaacctctgaaggaggccgatactgaagctcggttggcagccggtattgataaactaccagcggttgggtcttattttctaccggctgatattgtggatactgtatctgagttggcattgccgggatagagactntgnccctttctacttgattttctcttg

SEQ ID NO: 3093 - DNA, 415 bp, Homo sapiens
ccgggcaggtactctaggggaattgagaaaaacgaaggcattatctttgtaagaagaaaaaatcaagatgatctggcacacctggaggggtagtggaatgggagttgatcactgaacatgtatgcaatgtgcataggcacagggggattgggaaagacatcccaggcgagaagtaagagtaatcacaaaggtgggaataaatatggcatgctacagtgtggcatgggctttgtgttcctattatttgcagaatgttcgcatagctgggtgtcttagtctgggatgctataccaaaataccatagattggtttataagcagttctagaagctggggaagtccaagatcaaggcaccagcagattccatgtctggtgattctgtttcctggttcatagacagtgcctttttgctgtg

SEQ ID NO: 3094 - DNA, 433 bp, Homo sapiens
  misc_feature 164: n = A,T,C or G
ccgcggtggcggccgcccgggcaggacgcgggggagtgccctttcttgaaggaatcccttaagtgcacgtctcccgttttcttttcacatcaatgcagagtccctctgtgaatttacaacacccaacacccatgagttcagtccttaagaaggaaaaattggancaagtatttaattggttggacattgcataaaagaggtccatatccaggctaactctagaaattttattctcaaacttagttggcctctttttcttctgtcagaggaccattcttagtggcactggggaaatcttggcacccagaagaattcaactgcgctcactgcaaaaatacaatggcctacattggatttgtagaggagaaaggagccctgtattgtgagctgtgctatgagaaattctttgccctgaatgtggtcgatgccaaag

SEQ ID NO: 3095 - DNA, 415 bp, Homo sapiens
ccgggcaggtactctccttcattttgccttttgtttcctgattttccaactcttgaatatttcccattctgttttgcatgtatttatttcttcttgcatatttattgttttttcctcttctagttttccttactaatacctactctagtaaacctggcctccaataattcctgccgtcgtgggtccaggctatgcaattcttccatcatttctggctggcagagcgtctcccgagactaaaggtgctctgggatcccaaagacctacataattttaatcagttatgctcacttcactgagaagtaggtctacagaggtcctcatgctgccattgtggaagtcatggtaactttttatatttattgccccactaggaaaataagttctataaaagcacaggagtttttgtctgttt

SEQ ID NO: 3096 - DNA, 478 bp, Homo sapiens
  misc_feature 231, 277, 422: n = A,T,C or G
cctatagggcgaattggatctccccgcggtggcggccgaggtacgcggggacatcaatgcagagtccctctgtgaatttacaacacccaacacccatgagttcagtccttaagaaggaaaattgagcaagtatttaattggttggacattgcataaaagaggtccatatccaggctaactctagaaattttattctcaaacttagttggccctcttttttttttctgtcanaaggaccatttcttagtgggcactgggggaaatcttgggcacccangaagaattcaactgcgctcactgcaaaaatacaatggcctacattggatttgtagaggagaaaggagccctgtattgtgagctgtgctatgagaaattctttgcccctgaatgtggtcgatgcccaaaagggaagaatccttggnagaaaggtcattcaatgccgtttgaaaaccaaactttggcaatgtttcctggtttt

SEQ ID NO: 3097 - DNA, 431 bp, Homo sapiens
  misc_feature 7, 215, 343: n = A,T,C or G
ccccgcngtggcggccgaggtacggggaggaacagagtccctcctttacttctccattagaaagaatgagatggcaagacaatgaaacaggcaaagtgaacagagatgcaagacaaaattcaggtgagagagccggagcatcactcagccattcctgacatgtaaaacaggcaactagaaattttgcagaaagggaagccgaagtctccttaaanatgtttttaaagtgagcttgaagtatttggagacaattcagtgttacataaaatctgcaaatctctggataaagaagcagagatcccagcatgggacaaatggagcctcaaaagtgggaagaagacangagaagaccaggggcagaatgcatctcttccttttctcttggctttccttggataagggactgcatcattcctgtgggaagggaccag

SEQ ID NO: 3098 - DNA, 447 bp, Homo sapiens
ccgcggtggcggccgcccgggcaggtacgcggggacatcaatgcagagtccctctgtgaatttacaacacccaacacccatgagttcagtccttaagaaggaaaattgagcaagtatttaattggttggacattgcataaaagaggtccatatccaggctaactctagaaattttattctcaaacttagttgggcctctttttcttctgtcagaggaccattcttagtggcactggggaaatcttggcacccagaagaattcaactgcgctcactgcaaaaatacaatggcctacattggatttgtagaggagaaaggagccctgtattgtgagctgtgctatgagaaatttctttgcccctggaatgtggtccgatgccaaagggaagatccttgggaagaagtcattcaatggcgtttggaaacaaaccttgggcatggttttcc

SEQ ID NO: 3099 - DNA, 421 bp, Homo sapiens
  misc_feature 37, 376, 385, 393, 410: n = A,T,C or G
aggtaccatgttcaggaaaccaaggacaatattgctntactgttggaaacagagtaatcaaattttctgtgctagccttaattcctgccctctttaagaggagcttaataaaatgtaaatatgcagaatgtttacttttggattgtctcatggtgtccctggaatgctccgaagtgcacaagcttaccgcaaggccgaccacacgttctcgggagttcctggacagaccgttcttcacaacgaccacgctcaggtgtaacttcacctgggttcgaggagaccgtgttgggtgccaaagatgtaggggaacctgcctgatacaccaccccgcaggcttctccccttcccggtgggagacgaggggaatgagtaaaantaaataaangacaaagnacacaaagttttaaagnagtttaacaaa

SEQ ID NO: 3100 - DNA, 438 bp, Homo sapiens
ctatagggcgaattggagctccccgcggtggcggccgaggtacgcggggtagccacacttcaggtgcccagtgtccacactgactagtggtgactgcgttggacagtgcagatacagaacatttctgtcatcacagaaagttcctttggacagagccatgttaagtgatgttatcacaagatggacagaaacattcctgttttgattaatttttcagacccagtttgtggagaaaaataatgatgctttacatatgtctcttgaatccttaatatgtgaatccagagataagtttatacgggaattatttgaatcatccacaaataacaacaaagatactaaacaaaaagcagggaaaacttagcttcatcagcgtgggaaacaagtttaagacacagttaaatttgcttctggataaacttcggaagttcctgcccg

SEQ ID NO: 3101 - DNA, 435 bp, Homo sapiens
  misc_feature 187, 387, 418: n = A,T,C or G
ccgcggtggcggccgaggtacgcggggacatcaatgcagagtccctctgtgaatttacaacacccaacacccatgagttcagtccttaagaaggaaaattgagcaagtatttaattggttggacattgcataaaagaggtccatatccaggctaactctagaaattttattctcaaacttaagtttngcctctttttcttctgtcagaggaccattcttagtgggcactggggaaatcttggcacccagaagaattcaactgcgctcactgcaaaaatacaatggcctacattggatttgtagaggagaaaggagccctgtattgtgagctgtgctatgaggaaattctttgcccctggaatgtgggtccgatgcccaaagggaagnatccttgggagaaagtcatcaatggcgttgnaaaaccaaacttgggca

SEQ ID NO: 3102 - DNA, 420 bp, Homo sapiens
  misc_feature 405: n = A,T,C or G
acttagggcgaattggagctccccgcggtggcggccgaggtacttccaaaccctcctgttctttcctttttgttttccccaattttaacataaggcaaaagcagtaattgagcaattctatcacctggattggcactccggggaacagtggagctgatcactaactgaattccccctttataatctgaataaattaccccagtatgaatttggactcccttcaaatttagacttgatctccctcaaaggcctaccctcccttctggcagcgggccatatacccctctaggaatcttttgtgggggctttccagggagtaaaaagaccatttgggtggaacataaatctactgcggtgctgcctgctgtggccgcgggacaagctgttggattgttgtaattggcntgactccctgaaagt

SEQ ID NO: 3103 - DNA, 460 bp, Homo sapiens
  misc_feature 201: n = A,T,C or G
ccgcggtggcggccgcccgggcaggtactaacaaatgcagtagccaacaagattaccatgcaatcattaaggagaaccaaagtaagagagccactcaaaccagattttgaacgctactaaaattaaagtagttctttgatgaatatgaatgagtagggaaaggattctttgtaatagtgataccctctgtggtaagagaangggtggtatgtgagttttagtctacagattatggcaaattcagtgacaacaatcaaatggtctaagattgacagtagcacagttttactctgtgaaggtaatgttcaggacaaatttcaagaaaactagaaaaccattctttacagctgaaatctttccctaacccattgttatttcccacttttaagtccttcaaggagatggagaaaaaggggaggttaaggctttccttattacatttcctggcaccaatggaaac

SEQ ID NO: 3104 - DNA, 429 bp, Homo sapiens
ccgcggtggcggccgcccgggcaggtacgcgggctttcttgaaggaatcccttaagtgcacgtctcccgttttcttttcacatcaatgcagagtccctctgtgaatttacaacacccaacacccatgagttcagtccttaagaaggaaaattgagcaagtatttaattggttggacattgcataaaaagaggtccatatccaggctaactctagaaattttattctcaaacttagttggcctctttttttcttgtcagaggaccattcttagtggcactggggaaatcttggcacccagaagaattcaactgcgctcactgcaaaaatacaatggcctacattggatttgtagagggagaaagggagccctgtatttgtgaggctggtgctattgaagaaaattcttttgcccctgaaatgtgggtccg

SEQ ID NO: 3105 - DNA, 530 bp, Homo sapiens
  misc_feature 153, 170, 172, 177, 182, 202, 204, 205, 213, 234, 240, 249,250, 284, 310, 313, 318, 320, 326, 335, 376, 400, 421, 425,426, 436, 442, 444, 452, 471, 481, 485, 498, 516: n = A,T,C or G
aggtacggttcacgcctgtgatccttcattccaatcaatttatggggccgagacttgttacaacaatggcatgcagagattactatcccagcctccctatacagccccaggaataaaaaaatcatgactaaaatgggatagctccctaaaaanggacttgggaaaagaantncccanttganggctgaaaaaattcaaaaanannaaaaaggnaatggggcatcccttttttanggagcnggtcacctnntagaagccttccaaaaaccccattcccatttaanctttggggaaaaaaaaaaaaaaaacnaancttgntnttgggntaaaaatcnagccatgcggcctttcccaaaaaccaaaaaaacctgggaangggccttttaccacctttaatttnagccaaaaaggaaaaaccaantttnngaaaaaaaanggggancnattttgangccccttttcatttttttnccgccccttngggnaaattttcttggntttttggttaaattttcnaaaaaaaaaaaaaa

SEQ ID NO: 3106 - DNA, 506 bp, Homo sapiens
  misc_feature 13, 15, 50, 66, 80, 210, 219, 225, 256, 323, 450, 474: n = A,T,C or G
actcctatagggntnattggagctccccgcggtggcggccgaggtacgcngggacatcaatgcttnagtccctctgtgantttacaacacccaacacccatgagttcagtccttaagaaggaaaattgagcaagtatttaattggttggacattgcataaaagaggtccatatccaggctaactctagaaattttattctcaaacttaanttgggcctntttttntttctggtcagaaggacccatttcttaagtnggcacttgggggaaaatcttggcacccagaagaaattcaactgcgctcacttgcaaaaataccaatnggcctacattggaatttgtagaaggagaaaaaggagcccctgtattgtgaggctgtgcctattgaagaaaattcttttgccccctggaatggtgggttcgatgccaaaaaggaaagaatcccttggnagaaagtcatcaaatggcgtttgnaaacaaaaccttggggcattggtttttccctg

SEQ ID NO: 3107 - DNA, 511 bp, Homo sapiens
  misc_feature 206, 209, 211, 224, 318: n = A,T,C or G
actataggtttattggagctccccgcggtggcggccgcccgggctggtacagagacagatgaaggggggctcctaagccaagagagggaaccccacctgccacagataccagctaggtatatatacagaggctggaggaggcagtgtctgatttgcacaggcccaggggattggtttgactaggcatgtcattcaccgtaaccccnaangnaaaagctggcttnttccaccttaccctttttaatatgccaaatgcaggggcaccatgatcttctacacaggtgggggatacttcgggggtgtccattgtatccaggnaatgtggggaaagggcaaggaaatccacaaggaatccgcccatgttttgggggtgggaccccactttctaatggcttggccattttgggatatcggggttaaactggccctggcttttaaaaagcctgggaagcctttttacaaaggaaaaacctttttcccaagaacgttgcctttttaaaaaaaaaacaaa

SEQ ID NO: 3108 - DNA, 436 bp, Homo sapiens
  misc_feature 84, 387: n = A,T,C or G
acttagggcgaattggagcttcccgcggtggcggccgaggtacgcgggggacatcaatgcagagtccctctgtgaatttacaanacccaacacccatgagttcagtccttaagaaggaaaattgagcaagtatttaattggttggacattgcataaaagaggtccatatccaggctaactctagaaattttattctcaaacttagttggcctctttttcttctgtcagaggaccattcttagtggcactggggaaatcttggcacccagaagaattcaactgcgctcactgcaaaaatacaatggcctacattggatttgtagaggagaaaggagccctgtattgtgagctgtgctatgagaaattctttgcccctgaatgtggtcnatgccaaagggaaagatccttgggggaagtcatcaatggcgtttgaaaa

SEQ ID NO: 3109 - DNA, 411 bp, Homo sapiens
  misc_feature 2: n = A,T,C or G
tncttagggcgaattggagctccccgcggtggcggccgcccgggcaaattcccatgatgtcagaccactggagtttccaggggcaacaccccataaccgtcccgctgcagaagagcatcagaagttcagaagaatgcaaaggatctcagtgggaacgcggacaggagagccccaaaccaacacatgctagggctctctaggccctttcaggctagatcttgacgagagaagagtaaagatctttctgaggttggtgcaactgaggaaacgaaagtttcggcctctgctgtcagatctatgaaaggaaagaactgtgaacttgtccccttttgttttctttgacttaaaacaaaagaaaatcactgggaacaaagtcttaaagtaataacagaaatgtcagaaaaagttgaa

SEQ ID NO: 3110 - DNA, 489 bp, Homo sapiens
  misc_feature 211, 416, 428, 429, 455, 485: n = A,T,C or G
cgtatacgactcctatagggcgaattggagctccccgcggtggcggccgcccgggcaggtactaatttcctgaaaagtatgttccgatagatgaacagatcattaatgcagaatgagaatcactcctaaaataggtaatggtaaaaattaaattgacaattacctctctctatgcagaaggaaatatcacctatatgacatcatcatcatntattggataacttggctggcagtggctaattattgtttttttaatgcccaattttgtaagaaagtttttatctctctgtcactggacatcctacagagtcacttccccaggcctcccattagaagtttgggtgccatcaacataggggaaataagaaaagcttaaatgtaagggaaggggtcttggtcttttttctggtgccagnaaaaaaaccaannaatggcaatcaccagatgccagtaanaaaatagaagcccaggagccacctttttangggg

SEQ ID NO: 3111 - DNA, 430 bp, Homo sapiens
  misc_feature 184, 407: n = A,T,C or G
ccgcggtggcggccgaggtacagatgtccagtagacctactggatatgcaggcctgcagctcaggggagagctgggttaagaaccgtcaaggcagtaatcatctgcatttagatggcgagtgaagccatgacaggggctgaaatggcccagcaagaataaatcaaaccatgagaaacacatacntttttaaaaattaaggaagatgtggtcaggcgcggtggctcacacctgtaatcccagcactttgggaggccgaggcgggtggatcacttgaggtcagtagtttgagaccagcctgggcaacctagtgaaatcccgtctctgctaaaaatacagaacttagctgggtgttgggtgggtgccgtgcctattagtcccagctgcttggggaggcttgaggcacaangaattcgcttggaaccccgggga

SEQ ID NO: 3112 - DNA, 591 bp, Homo sapiens
  misc_feature 68, 121, 225, 230, 234, 238, 241, 277, 301, 317, 327, 332,338, 350, 356, 373, 387, 428, 432, 441, 445, 453, 467, 469,472, 478, 489, 521, 531, 535, 536, 540, 562, 573: n = A,T,C or G
gcggccgcccgggcaggtacgcggggtctctcttcctcggcgctgcctacggaggtggcagccatctncttctcggcatcatggcacgccctcagaccccttgtgaagcccaagatcgtcnaaaagagaaccaagaagttcatccggcaccagtcagaccgattttgtcaaaatttaaaccccttaaccttgggggggaaaaccccaagaagggcaatttggacnaacangggntttncgnaagaaaaaaatttccaagggggcccaagaattcctntgaattggcccccaaacaatttgnggtttaattgggaaangccaaaccanataanaaaaancaaataggccanccaatngccttggccccccaagntggggccttttacncggggaaaggttttccccttggggttccccaccaaaaccgntttnaaaaggggnaagnccttgggnaaaaggtttggccntngcntttggnaattggtttgnccaaaaccaaaaaatttctttttaaccttggnttggccccgnaagnnaaanccggcctttccaaccaaaattnggttttttttnccttcccccaaaaggaaa

SEQ ID NO: 3113 - DNA, 611 bp, Homo sapiens
  misc_feature 29, 49, 50, 63, 403, 483, 495, 507, 519, 534, 551, 572, 580,604: n = A,T,C or G
ctccccgcggtggcggccgaggtactggnttcaacaagataaggtttcnntggagctgccatnatttttctataacgctgcccctaggccagaattggttggtctacaggtagatacctgatccaaactatgacaaccacaatattccagcccttgacaatgattgactcttccaggacgggcacttaactcaagctaggccaatcatagtcatttctcaactagatcctgccccactggtcatagctaattggtgcaggactggaactggatgcaagctgactctctggattgagaactagaggtcagaccattccctgtcccatgtctgaaactgaaatatgcagcactggaaaactgctcatgctcatggccatgggatcagccttccccttagcctcanaaagccttggagtggaaacaacaggtatctgggaggggtaaatgccacctttttaatcttcatgattggaaccacccttnaagcactatttnatggttgctttngagaccaagtgnaatgacctggtgatnttgggggggagcccccncccaaaaaataattctctctnggtaaggngattcttccatttaataataattncctttaa

SEQ ID NO: 3114 - DNA, 427 bp, Homo sapiens
  misc_feature 18, 39, 41, 53, 54, 256, 293: n = A,T,C or G
cgcccgggcaggtacatnttttagatgatcacgaatgtntnatatcacacttnnctgtgatatggggattccccttgggggttttcatgtgtatagggtgcctgcagctacactaaacatcttaaagctacccaatgttcacttcatatttttgctttttataggctttcttggtctcctcctatgttcccatcattttcttgctttgaatctgtaagaatcgagttgaatcttctccattttaaattttccatangctgagaaactgtttagccaagtttggataaaattgnatccaaagtaaagagtatacaagctatgggcaagtccaaaatcaagctgttcacaggaccatgttctctctaaaggttctaggagagaatccctcatttccttccagcttctgggtggctgctggcattcctgg

SEQ ID NO: 3115 - DNA, 325 bp, Homo sapiens
cgccgggcaggtaccctggaatatgacggtgatcacaagcctgcaacaggaactctgccccagtttcctcctcccctctgctccagctctgggacgctgctttccgtggaccaacattactccaccggcgctcccagggatcaccaatgacaccaccatacagcaggggatcagcggtcttattgacagcctcaatgcccgagacatcaagtgttaagatctttgaagattttgcccagtcctggtattggattcttgttgccctgggggtggctctggtcttgagcctactggttatcttgcttctgcgcctggtggctgggcc

SEQ ID NO: 3116 - DNA, 715 bp, Homo sapiens
  misc_feature 50, 51, 563, 566, 595, 606, 675, 689: n = A,T,C or G
cgaggtactgggagagaccacatttggggtcataaaacaagaagcaacanntatgaaaggaatgaaataatacagagtatgttctctgaccacagtggaattaaatgacaataacaataagataactaggaaaacaccaactatctggaaattaatgcatgtccaaataatcattgggtcaaagaagaagtcacaagaaaaactagataacattttgaactaaatgttaatgaaaatacaacatatcaaaattttgtgagatgcaacttaagctgcactttgagaaaacgatataattttacaatcttagctcttacatgtagaaaccaaatgctttattcaaccaattttgaatgtgcacaaatatggggtatatttttcacgagcctttctgaataaactagaagacaagctccagccaaccaagagatggggaaatttttggtaaaaggaccagagataaacaattattaataacatacttaactggagatataagccagtaacaaagctgcggatatgagttgtaaaggggtatatgttctgcaggtgtagaaaccatnttncccacaaaaactgggaaaggaatgagganggaaaaggggnaaagtgaccagcttgttgactgcttcagtactggcagtcaaagatatcttacagtgactatcaggtgtngatgtttttccatngaaccaaagggaacctttaaaaaaaa

SEQ ID NO: 3117 - DNA, 720 bp, Homo sapiens
  misc_feature 23, 43, 58, 59, 90, 468, 554, 559, 562, 613, 624, 643, 655,676, 695: n = A,T,C or G
ccggtggcggccgaggtacctgntcaaatcccatcaaggacantttctcagtcttttnnaggcagcacagtaaaggggaaagatcatganttttggggccaggttcccttgaatattgtggggtccccacacttctggatgatgttggataactctttgagacttaggcttcacatctgtaaaatggaaatacttatttttcagagttgtcataaacactaaatgatttgacttatatcaacctaattcctactggctcattgaactcagctcagctgtcccctctgttcggatgccttccccagtggggcttaagttaggtatccctgctggataccctgccaagctcttacacattccctctgccataacactcattctttgttactgaattataatttcatgttcatttgtttatctctcatactaagctgtgagttccctgatgacagagaatgtcttggtggntttggaattcccagtgcccaacttaattcctggccaactgaataaacaaatgaatgaaccccatctaattgaagtaaaaaataagnctcgntangcccggatgggtggctcacgccctgtaaatccccaccctttgggaaggccnaaggtgggccngaaccaagaaggtcaggangaaacgagaccnatccctgggcttaacaccggngaaaccccggcctctactnaaaaagccaaaaaaaaaaaaaaaaa

SEQ ID NO: 3118 - DNA, 477 bp, Homo sapiens
  misc_feature 48, 93, 442: n = A,T,C or G
tacgactcactatagggcgattttggagctccacccgcggtggcggcncgcccgggcaggtacttgcccaatgtttacccttacgacaacgcntgcaaacagtagcaggagcatttggccgtgtttgttgagccggcttggccgcttttaagtttttaacagtgtagtttttttgggtatgaccaagttggccacaattatagcaggctccaagaaaagaatcagtcgagccagtttggttgccgtgcttcatggccggtgcccacagaatagctctgtgggtctccgatccaacgccttcacaagctttaatatatacaggcaacacctcatgatcaggtaaattttgacgtaggatgggaatgcacggccattttacactcatggttcgcattttgaaaagctaacatatgaagaagaataccttgagtgtgctcatcanagacagatttttcaacagcatcttgtaatttagct

SEQ ID NO: 3119 - DNA, 327 bp, Homo sapiens
  misc_feature 14, 241, 249: n = A,T,C or G
ccgcggtggcggcncgaggtacatatatatgtctgtgtgtgtgtgtgtgtgtatatatatggccatataaagtgtgaaaaagcatgtttgagagagaataccaagggtgtggtcaagtgaccatttgctaaagagattaccctggatagaagggaaccagatgctattcaagataatgggagaaagatcctgaatacattccagagatctttgagtcttccccacccatcacaagccccanagatctangagggcagaatgatttcagaggatggcctggggtgccctccagaggcttgctgcctaaagctgccttggtccctgttt

SEQ ID NO: 3120 - DNA, 569 bp, Homo sapiens
  misc_feature 26, 59, 60, 361, 438, 521, 549, 551, 553, 555: n = A,T,C or G
cgcggcccgcccgggcaggtacgcgngagattacctcatttcagctcaataaaacattnncaaattcccttaggcagaaaaagggtggggagtgccctttcttgaaggaatcccttaagtgcacgtctcccgttttcttttcacatcaatgcagagtccctctgtgaatttacaacacccaacacccatgagttcagtccttaagaaggaaaattgagcaagtatttaattggttggacattgcataaaagaggtccatatccaggctaactctagaaattttattctcaaacttagttggcctctttttcttctgtcagaggaccattcttagtggcactggggaaatcttggcacccanaagaattcaactgcgctcactgcaaaaatacaatggcctacattggatttgtagaggagaaaggagccctgtattgngagctgtgctatgaaaaattctttgcccctgaatgtggtcgatgccaaaggaagatccttggagaaatcatcaatgccgttgnaacaaacttggcatggttcctggtttgngngngnagcccggggaaagc

SEQ ID NO: 3121 - DNA, 502 bp, Homo sapiens
cttagggcgaattggagctccccgcggtggcggccgaggtactagagtaggtgagtgttaatgaccagaaaaaaatagtaattatccatgacactgtatacaatgttacagtgtaaaaatcacacccagaaccactgccctctgaagcaactgtattatacccatggcagaaaagttaatcaagtcactcttcacaaatgccccattgctggagcatagaggctgttcaaagtggagcatggaggctcctgctgattgggagcctgataagtgttgcctggcagaggcagatacaaggaaagccagcacttggggctgggaagcactgggcattttctacccaggcccatgggatctgttgcctcagagactgactcgcctttcctgagcattagacatccatcacctgggattagtctgagtagttgagcaatttgttaacagattagagatatacattcttttcttccagtggacttggaatctgatggccctggaattg

SEQ ID NO: 3122 - DNA, 454 bp, Homo sapiens
  misc_feature 55, 69, 170, 191, 222, 241, 245, 261, 264, 274, 278, 291,298, 313, 319, 356, 397, 419, 425: n = A,T,C or G
cactcttagggcgaattggagctccccgcggtggcggccgcccgggcaggtactntctttttttttttnttttttttttgctacaagtgtttgtgctgttcagaaggggttctgttgttcaaatgctgtcaaagtaatcccccttcatttattttctgcccttgaagttnatccccaagaatataggaacnctcaaaaattcattttttgaggaaaggattntgtctttggaatggctatnagcntaaagagaaaaaacantantttgacctantttnacaataacccatntccccangaggcaaaatgcatngctttnctgtgaagtcaggggagcagaggaaagctgaccccanttccttaaaatactttctcttggtattaaaaaataggttgnaatggctcaccagatgagaatnatgccnaatgtgcatttgatccatgcttacgggat

SEQ ID NO: 3123 - DNA, 216 bp, Homo sapiens; identical to SEQ ID NO: 1650

SEQ ID NO: 3124 - DNA, 468 bp, Homo sapiens
  misc_feature 4, 405: n = A,T,C or G
cacnctatagggcgaattggagctccccgcggtggcggccgcccgggcaggtacaatcctctttagcttttttgttttatagacagtgtggacgtgcatatattgcaagcatcactttgttaaactatgcttaaccctgcaaatgattttaagagctctgtgtgggtggctttcttgggtttactattaaatatctgtgtttatcatagttctataacatttcaactttgtaaatatgtagtttgttgataaagaggatagagacatttttcttttgttgatagattgttctttcccctttgcttagtcttcattgtgttgctgggattgtaaaagacaaattacttgcacatatttaagcttatatattaaatgtatatatgctgtcatgttagaagagggagnaggtggttccctcccccacattttggatttaaaagtaaaaaattaatttttattaaaattggt

SEQ ID NO: 3125 - DNA, 402 bp, Homo sapiens
aggtacttctgctccacgaggaaggggatcgccaggcactaccgcatcaagcacaataatgtccgagcccagccagaaggcaagaacaacctcttcaagtgtgccctgtgtgcctacaccaaccccatccgcaaaggtctggcagcccactaccagaagcgccacgacattgatgcgtattacactcactgcttggcagcctccaggaccatcagcgacaagcccaacaaagtgatcatcccatccccgcccaaggacgactcccctcagctgagcgaggaactccggcgggcagtggagaagaaaaagtgctccttgtgctctttccagttcgttcaagcaagaagggcatcgtgtcccattacaatggaaaccgccacccagggggtgtttcccaaaaga

SEQ ID NO: 3126 - DNA, 421 bp, Homo sapiens
ccgcggtggcggccgcccgggcaggtacaggcccacgccagacacgacgtctggcaggaacctcggcctcagaggtgggtcacttatatctctcacgcagatttactatcatgggtcacttaacccgtggatcacacgggttcctcattcttgagttttgggctagtgaggtgccgacttcggggtctaggaggggagacctgatgtggctgtgtgtgcgcacgcgggggtgttgagagtggatgagtgggaggagttggcgaatagaatagagactaggactgaagtaggaaagactccccggtgtttaggaggtttagagagatccaaaactgagggcgggaagacaaactgagctgataaaatgagggcatggaaaaggaaccggcagtggcaggactagtgggaaaacgtcggattt

SEQ ID NO: 3127 - DNA, 467 bp, Homo sapiens
actctatagggcgaattggagctccccgcggtggcggccgcccgggcaggtacaaaaattagctgggcatagtggcacatgcctgtagtcccagctactcgggaggctgatgaacaagaatcacttgaacctgggaggaggaggttgcagtgagctgagatcgtgccactgcactccagcctgagcgacagagcaagactgtctcaaaaaaataaaaaaagaaaaaaataataaaaaggaaaacaaagcctttagaaaaacaaagcctttgaaaaaggatgtaaaattgaatatatagatacaattatttttaaaaagttttatagaaaaatatcctggattgttgatgttgttttaatatattttaatcatttttgtataatgtcatgtataatatgttataatggaaagtaaaaaaaaaaaaagtaccctcggccgctctagaactaggtgggatcccccgggct

SEQ ID NO: 3128 - DNA, 406 bp, Homo sapiens
  misc_feature 11: n = A,T,C or G
ccgggcaggtncagcatggctcaaggcctcaggcaaacaaaagcactcttaccagatagaacattatgagagctcagttcccagagctgcccaaaggctagtcaggaaaacaggaccttctggggaacttacagagtttgagcaataggcctgttatgtcaaccccaagcagagtggatgaagacaaggcaagggacaggctgacagctgattcctgggttcctctgatgtttacaggagagatcaagcaaaggagacaaaaaaaggactgttaacacagggggaaaccaacactgaaaactcctggaaatgaagagttttcagaatgggttgttgctatccttggagctgaatggctatcataatgatgataacattaattcagattttaaaaattaatcattag

SEQ ID NO: 3129 - DNA, 408 bp, Homo sapiens
  misc_feature 367: n = A,T,C or G
ccgcggtggcggccgaggtactctgcgtggggctccacctcacacccacccctgggcatcttaggactggaggggctccttggaaaactggaagaagtctcaacactgtttctttttcagaagttttgtttttgatatttatattacttggtatggatttccttaggtcagaggagagcatcgcatctcacgtttttaggtttatcactgccatcccacttctgggatgggaggtagcaagggcttctgtattttcttgtgttcattctagcaacccagacatttccggatcagatcctgctggtctccactcactggaaagtctgccagaagcccgattttgagagcctgcctgtccctgctttcnagggaggagccgggggagaaaaactccaatggtctttaaat

SEQ ID NO: 3130 - DNA, 340 bp, Homo sapiens
  misc_feature 9, 114, 162, 172, 226, 281, 294: n = A,T,C or G
gcaaataanaaagttgaagagcaaaacgacgtgtctaacgtcacacattgagctttaaagacagatgggatctggcatgcgtttgtcagttaacagtgctagcacaaatacaanttcttgttaaaatcgtaaggattttatgtcgtgagacactcaggactnacctgatctnggtgttcaattgtgcgtagtttttgatttgcgcctcgcccttgggcaagtgcanaatcctggggttatacaaagctcatcacagttaacccctttgtcccagtccgcanaatgagagctcanagcccggccatgggaggctcggttatataggcaggaaaatcaagga

SEQ ID NO: 3131 - DNA, 343 bp, Homo sapiens
  misc_feature 238: n = A,T,C or G
ccgggcaggtaccgggaaccaaactctcattccccaggggcctaagccccccgtggccaggcccttctcaagtcagggttcctgcacattcacagttacgggtggccctgggagtaacacctggcacccaaacaggtcaccagagtccacacatagtccacctgccctccctgcgtaagatcagctcttcctcctcccgacgaatagatcagggtcaatgatccctgccaagatggcngactgctccagcctgctggtccaacctgtccagccccagctgttgctcgaaggcttgaagttcaatgggaccctctcccgctttctacaaactagattcctttat

SEQ ID NO: 3132 - DNA, 574 bp, Homo sapiens
  misc_feature 309, 315, 344, 353, 366, 412, 418, 440, 463, 481, 523, 526,527, 529, 538, 556, 565: n = A,T,C or G
actatagggcagaattggagctccaccgcggcgcccgggcaggtacacccttctcaacaacttccttcacatctgcaggctgcacaccaggagaatgctcagttcctgtttctctccaatcccaagtccgactaccccctggccatactttgcagtccttataggttgtattagagccttttactttcatttgcccccatggataaagggaaggcaatttcagggggaaaggtcataaagggaacttcacctggaagttcaggatggcggagccaacctgggtctttgggaccttcccaagccttccangaaacncacccgcacttgtctccctccaaaagttngccgtttcnccaaaaccgggcngcaagttggcttcctggcccccgccacctttacggccttcccccangccggncttgccttttccgaggggaatncttgggcggcttcccccccaaanccttggcgcccccccggncggttaccccttcggggccccggtgttccttaaggaaaactntanngnttggggaantccccccccccggggggnccttgggcnaagggggaa

SEQ ID NO: 3133 - DNA, 553 bp, Homo sapiens
  misc_feature 140, 182, 210, 224, 231, 294, 341, 343, 361, 365, 369, 372,396, 404, 416, 418, 465, 468, 477, 544, 552: n = A,T,C or G
ccgggcaggtacgcggggaagcttccaagatgccgcccaaaggaaaaagtggttctggaaaagcggggaaagggggagcagcctctgggagtgacagtgctgacaagaaggctcaaggtcccaaaggtggtggcaatgcngtaaaggtcaagacacattctatgtgaaaaaacatggtcaanaatccatgggaaaagcccatggtataanagttaaaaagtctngggcatngaagatttcaattggaaagttggccccgccactaggtattatgttgaaaatattaaaagccanggccaaaggggggggtggacctttgggggtttggggattgaacccangnagggggttccccatgggnttgngggnacncattttttctaaggaaaagccatnccattttngccccttttggncncttggtttaaagtttgggtggaattggggaataataaggccccttgnttnggtttttanccaagggaaccccccaacctcggggtttttaaaaggaaccaaaaaaaaatttttggggaattaattncaattaant

SEQ ID NO: 3134 - DNA, 434 bp, Homo sapiens
ccgcggtggcggccgaggtacttctcatctttcaggaagacgacagtgatcttagttctgtggttctctgcattcagtccctcatatagagatttgttgaaagatatttcaccaaggatctgcagttcagttacatcttttagtaactgaaccgaactgtacgcgggtattgtttacatataatgccgtcttgccaagaggggtgttctcatggaagtgaggcacagaaagtcaaaatgacttgcttaaagttcagagtctcacaaatcctgatcagttgtaggcttttcttggaagggagtgaggaggactcagccgaggcacacttgacccaggtctcctggatgtagaggcatcagggaactccaagggtccctccggggaccttctggagcccagcttcatggtggaatagcagtgtctgccgaaagctg

SEQ ID NO: 3135 - DNA, 439 bp, Homo sapiens
cttagggcgaattggagctccccgcggtggcggccgcccgggcaggtacgcggggaggtaagaaatgaattttgttgttttggtttcaaattgtggaaaaataccaagagattgatgtattgtctggatatgtgtgcagcagaggagacaacatttgcttctttacagctttgcaagtgcattaaacaaaaattgtagaagagggtgtccttgtcctctcctagtcaccacttgtgcaaacagcgaaagtttagaaaggaaaatcagcaagtcttgcatagagtgtaaggacattcagattgagaatgaagaacttgtcctttcagtctcttcttccctattaatatgagataaaaacataataaaatcacttgtaaatctagagaaatagaaagtgatttttttttccacataccaattttgacagtgctgggcctaa

SEQ ID NO: 3136 - DNA, 428 bp, Homo sapiens
ccgcggtggcggccgcccgggcaggtacgcgggggctgatgccattttcagcctcagcacgcctgcacccaggcgctcattaaaacagcatgttgctccccactgcctcgtgttgtctgttggcgcgctgtcggggttcgaaccgatacaagaaccttccacctacctggtgctttggcctcatctataagcagcttttccactgtcctgaaacaagatagagaatctgagcggccagtcatctgccctaagtgctgccgccgaagactgaatgtcctggaaagtttgctgtcacatctccattatgacaaaagcattgtgccgaacagatgaaaaaatgcattgtcaacggaatcttttatgtttgtttgtcttcctttaagcaacattgccttacttgttattaaaagataaataaatattttgtt

SEQ ID NO: 3137 - DNA, 439 bp, Homo sapiens
  misc_feature 399: n = A,T,C or G
cactacttagggcgaattggagctccccgcggtggcggccgcccgggcaggtacacgcagacatcttgtgaccatgaggtgacaaaccagcatgctgtagaggacagagtggaaagagaaaaagtctacgtccttgatagcaccaatgagccactgtcccaaccctatactgcctaattctaggctataaataggataggccttttttttttttgcttaagctaatattaaatatttgtttaactagtttactgtcacctgcaagcagaacatattctgaaatgagagacagcaagattgacagtgagcaaattagcctgaaggctattacagtaacccagaaaagtgatgatgatgacttgagggagagtaattataggattagagaagacagaatanatttgaaggagcgggaggtagagacaattttgttttaggc

SEQ ID NO: 3138 - DNA, 355 bp, Homo sapiens
  misc_feature 143, 188, 295: n = A,T,C or G
ctatacgactacttagggcgaattggagctccccgcggtggcggccgaggtactttttttttttttttttttttttttttgcttttttattttcttccatcagtgggacaaagttgacatcattgcctaaaagtaatttctgngattatctgtgtatttcagttaaccatgttctttggactcactgnggtcttcagcaggggatggtggccaaactatgtttagaaagataaaaattaaaatgacatctgcatccttcatgtaaacccataaaaaatagcacgtgaccctgaanatcctctgcctctcattccaggcattacaattgaaaatgctatctgggatgttaaaaact

SEQ ID NO: 3139 - DNA, 447 bp, Homo sapiens
  misc_feature 133, 134, 186, 190, 240, 270, 292, 303, 329, 332, 347, 391,429, 440: n = A,T,C or G
ccgggcaggtacgggggagatgaagttggagcccttgtttttgacattggatcctatgctgtgagagctggttatgctggtgaggactgccccaaggtggattttcctacagcctgttggttatgggtggtannaaagagatgaccggaaggcaccatttaattgggaaataggattggccgatantagngcaaaaccaaagggcggggtccccaccctacttacaatatgatacctaantggctcttgcgttgttcccggagggggagnaattattgggagggccattttnacccttctaanaaaaatgggggattgggtttgaaagnacntggggggattaggtnttcccaaagcttattttttgggattcaattaccttaccaaaaanatggccattggttcaaaaattcaaggaaaagccccagntccttccaatncccttgg

SEQ ID NO: 3140 - DNA, 451 bp, Homo sapiens
ctatagggcgaattggagctccccgcggtggcggccgaggtactgatcgtcttgttatcactccattaacagatagatgctatatcacgttagctcaggccttgggcatgaacatgggaggtgctcccgcaggacctgctggcactggcaaaacagaaaccacaaaagacatgggaaggtgtttgggaaaatatgtggtcgtgttcaattgctcagatcaaatggatttcagaggcctaggaaggattttcaaagcaagaaaagaaagaaagaaacagttcattttttctgatggtgattgtgttgatttaaatccagaatttggaatcttcttaacgatgaaccctggatatgctgggcgccaggaactaccagaaaacctaaaaatccagtttagaactgttgctatgatggttcctgatagacaggatcattatgagagttaaacttg

SEQ ID NO: 3141 - DNA, 373 bp, Homo sapiens
ctatagggcgaattggagctccccgcggtggcggccgcccgggcaggacgcgggggcgcagctcttagtcgcgggctgactggtgtttatccgtcactcgccgaggttccttgggtcatggtgccagcctgactgagaagaggacgctcccgggagacgaatgaggaaccacctcctcctattgttcaagtacctaaatctttgtctgagattctatttcctctagacagatgcctagaagtaaaattaatgggtcacgaggacatatttttaaagcaaggttctggataacataatgctacattactttgcagaattttgtgtcaatatatagatatccactatcactatgagtgtctatttcactgtacct

SEQ ID NO: 3142 - DNA, 358 bp, Homo sapiens
  misc_feature 237, 243, 250, 265, 300: n = A,T,C or G
ccgcggtggcggccgtcgctcccctgctcctccttggtggctctctcaaggactccagagttgtatccccaggccgtcttccccgcgtacctcggccgaggtacgcgggggagaacaaagaggaagcagccatgttagcattactgaaggcagagccagccttgcatttaactgcatggtggtagagggcagtgtaattccctggttattctgtagactatatcaaatcctttttgnctcttntcatttnactaacagaattcancaaggagctagctgaaataacccttgatcctcctnctaattgcagtgctgggcctaaaggagataacatttattgaatggagatcaactatac

SEQ ID NO: 3143 - DNA, 413 bp, Homo sapiens
ccgggcaggtacatttttgttgtagattattttaaacataatgctatagtaatattttgaagatttgagctgttatttccatttgtttttacactgtgactaaatgattaggttttagttttagactctaaacggaacctgaattaataggaaataaacacggtacgggggattattatctgcttccatggataaaaccatgattctctgggctccagatgaagagtcaggagtttggctagaacaggttcgagtaggtgaagtaggtgggaatactttgggattttatgattgccagttcaatgaagatggctccatgatcattgctcatgctttccacggagcgttgcacctttggaaacagaattcagttaacccaagagagtgggactccagagattgtcatttcagga

SEQ ID NO: 3144 - DNA, 439 bp, Homo sapiens
  misc_feature 437: n = A,T,C or G
aattggagctccccgcggtggcggccgaggtacttagtctctcaaggacgattccccttggtgaacctgaccgatatgctgagcgttgctgtgcagcaccgtgagaaagaggtgttggcctggatgattctgcacagcttataccaggcacggattgtgagccatgccaatacgggtgaggacaccctggggtgaacatcagaaacaggaatagatctgcctgctgttgcttttaagttgcacttgagttctcaacttaaaaattagtttagtgcttattgacacaggttaggccttctggtgccaaatgaggagtaacttggatagaaattaacagttatagctcacaacatccactttttggaaatgaggatggattctttcgaggggtttttgttttctatttggctctgtagaccctcacagttacaaacaangt

SEQ ID NO: 3145 - DNA, 284 bp, Homo sapiens
  misc_feature 190, 222, 224, 237: n = A,T,C or G
ctacttagggcgaattggagctccccgcggtggcggccgcccgggcaggtacgcgggagaggagggggaggaagccggcggccagaaacggcagtggcagcagcgtccggagcagccgcagccttctggaagctccaggcggtctttctgccgagcctcggtcccggcccccatcctccccgccccatcngttgtttgtctgggcggatttaaacagtcaantnaaatcaagctggntaatcatggcagaaggtggatttgatccctgtgaatgtgtttgctct

SEQ ID NO: 3146 - DNA, 423 bp, Homo sapiens
  misc_feature 2, 400, 404, 405: n = A,T,C or G
gnctatagggcgaattggagctccccgcggtggcggccgaggtacaaagctgaaacgcagagattttcatattatttgggagactcagaaatgagcttttaaggttgttccttgacttgcgggtcaataagcgcacaatggtgaagaaaaggctgccttctagtgacacggtgttccggtttgagactccgggcagcccaaggaaggccaacgtggaggcctcacgcagctccacagacagccccagaccagaagaaaatcattagcctatggtcaaaatccagttttgatggtgcctctttagcaagtgataagaacgactgtaaaacagaaagcaaaaatgaccctaagactgaaagaaaaaagtcttcatcttccagccagtacctgcccgggcggncgcnntagaactagtggatcccc

SEQ ID NO: 3147 - DNA, 429 bp, Homo sapiens
  misc_feature 197: n = A,T,C or G
ctatagggcgaattggagctccccgcggtggcggccgaggtacgcgggggctgatgccattttcagcctcagcacgcctgcacccaggcgctcattaaaacagcatgttgctccccactgcctcgtgttgtctgttggcgcgctgtcggggttcgaaccgatacaagaaccttccacctacctggtgctttggcctnatctataagcttttccactgtcccgaaacaagatagagaatctgagcggccagtcatctgccctaagtgctgccgccgaagactgaatgtcctggaaagtttgctgtcacatctccattatgacaaaagcattgtgccgaacagatgaaaaaatgcattgtcaacggaatcttttatgtttgtttgtcttcctttaagcaacattgccttacttgttataaaagataaataa

SEQ ID NO: 3148 - DNA, 364 bp, Homo sapiens
  misc_feature 2, 25, 26, 27, 37: n = A,T,C or G
gnggcggccgaggtacgcgggggannnattcgttgcncacctactcttgcacaaagccctgcttttccctctggaatgtgctgaccctggccccgagatggttccactgtttcttctgtgggcttgtctcactcgtgaaagagtgtcccaaatagtgactactgaagctgcaccaagtaataggaacaaatctcgttctgtctcctaatctttcttcctctctccctccttttgttttttacaactccacctcccaggccatgtggaagcctgcgtatgacttcttactcacctggagccatcagatcggggacagctaccgggatgtcatccaggaagcttgcacctgggcctgggacaagat

SEQ ID NO: 3149 - DNA, 415 bp, Homo sapiens
ctatagggcgaattggagctccccgcggtggcggccgcccgggcacggtacgcgggggctgatgccattttcagcctcagcacgcctgcacccaggcgctcattaaaacagcatgttgctccccactgcctcgtgttgtctgttggcgcgctgtcggggttcgaaccgatacaagaaccttccacctacctggtgctttggcctcatctataagcttttccactgtcctgaaacaagatagagaatctgagcggccagtcatctgccctaagtgctgccgccgaagactgaatgtcctggaaagtttgctgtcacatctccattatgacaaaagcattgtgccgaacagatgaaaaaatgcattgtcaacggaatcttttatgtttgtttgtcttcctttaagcaacattgcctt

SEQ ID NO: 3150 - DNA, 409 bp, Homo sapiens
  misc_feature 348: n = A,T,C or G
ccgcggtggcggccgaggtactttttttttttttttttttttgcgttgggggcttcactatgttgcctaggctggtcttgaactcctaggctcaagtgaccctcccaccttggcctcctagtagctggcactacaggtatgcgccagcacacctagctgtatcttattatctattcctatcttctttagagttctacttcttactagccaatccttcattactccaattccactatggttaataatttcttatattgaactttagttattcaaattactacgtgatttctgtctcctggttacagatacagattgatagagcaagtgtgagatccaacagcacagctntcacaaaaagcagaaactgcccgaaaccttgtatcgatacaatataaggaagaagtgtcag

SEQ ID NO: 3151 - DNA, 349 bp, Homo sapiens
  misc_feature 44, 47, 48, 53, 63, 343: n = A,T,C or G
tagggcgaattggagctccccgcggtggcggcccgaggacttgntcnntttgnttctattctnttatttaaaggatatgtttttagatcaatgccttttgttggggagggttatggagtgagaggttcaatgtggaaacttccagcctggctgattgtatggtgctgtctatgaccgtggctttctgtggccagcacagtggtgccacctgtgagctggaagtcatcacctgttccactgtggcagttggcctggtcgtcatcacattcatccaccaagttcccgttgggagtggtcggtccagctgtaggggcttccacttcacagcccagcagctccattntgagcc

SEQ ID NO: 3152 - DNA, 510 bp, Homo sapiens
  misc_feature 129, 179, 222, 229, 281, 301, 308, 330, 344, 416, 461, 472: n = A,T,C or G
tatagggcgaattggagctccccgcggtggcggcccgcccgggcaggtacgcggggagagaagtttccgggactggtgagtagtgggcgatttaaaaacccgcgagtgtagttgtgaccttcgcggtangtgccggttggggccggctgtgattgttatcttggtgctgcacaggacanagaagaggagattgggtcagaaaactgccctgccgcaccatancacagcncactagtgggacaggggtcctgactcagacttaactggctgtgtctcgtggnttttcactgtcctggaaaangcctgangtggcactgaaatgaggcatanatgaggtaaccgtntagggagccggtttgcaggttgcaaaggggccctactgatgctgcttaatagtaaacagtcgcttactctangacgggagttgtttccagctttacgtgtaaatctcgcgatattgncggcctgggcncctatttccattaacggaggaaactgcacaggataagt

SEQ ID NO: 3153 - DNA, 570 bp, Homo sapiens
  misc_feature 472: n = A,T,C or G
tatagggcgaattggagctccccgcggtggcggccgccgggcaggtacccagggacacaaacactctgcctaggaaaaccagagacctttgttcacttgtttgtctgctgaccttccctccactagtgtcctatgaccctgccaaatccccctctgtgagaaacacccaagaatgatcaattaaaaaaaaataaaattaaaaagaaaacaacaacaacaacaaaaaaaagtcctcccataaggaaagatgatcaattcttatgtatcgttctagggatataaatattcaggaggcttttcagaataaaagttaaatcatttatgtcgcacaaacaaatttactattcggacaaatacgatgacaaggagtttgagtatcgacatgtcatgctgcccaaggacatagccaagctggtccctaaaacccatttgggtgtctgaatctgaatggaggaatcttggcattcagcanagtcagggatgggtccattatatgatccatgaaccagaacctcacatcttgcttgttccggcacccactacccgagaaaacaaagaaatgaagctggc

SEQ ID NO: 3154 - DNA, 542 bp, Homo sapiens
  misc_feature 227, 370, 449, 469, 491, 516, 523: n = A,T,C or G
ccgcggtggcggcccgaggtacaaccacttgacttgctctttaacatagtcctgtgagatgccagctgccatgaccaagcagtattcccactcctcctctacactctggcaaggctttcctggaacatccccatgcccacatctttacccagtaactcactaaagccactcttgactcaagcaggtgcccgttccttgatcacggaatctacctttgatttcatcangccagattcacaaacagaatgggagtgctttatctatacctttgagaggatggagagtgaaataactggaaacactgggttatcacagcttaatttcatccaggcttggtgtctttaccaaagatggttggggaaaggaaggnagattcatcttgttcaggcagtgatttgctcagaattttacaagacgtaccctatacagacctatttgaattctactgngggtttattgaaccagtgtntggaacaactttgcaaaacagnaccaggccaagttaggtacctgccngggcggncgctctagaactagtggat

SEQ ID NO: 3155 - DNA, 561 bp, Homo sapiens
  misc_feature 507: n = A,T,C or G
cgaggtacctgcctagacaatcacagtgctgggacccctgcctggcaccctctggctctgagcctcgcactcctgaccgcagctcagtcccacccacctgctcagcaaggcgtccccagcaaggcacccagaacccgcatgtgtagagagactctcggcagggctgatggagcgacaggtcggggtttctctaacaagcactttcctggaaacttcattttaacatgttcccatctccctcagaaaaagggcatcgagaagaacctgggcatcggcaaagtctcctcttttgaggagaagatgatctcggatgccatccccgagctgaaggcctccatcaagaagggggaaagatttcgtgaaaaccctgaagtggagccggttgtgacgggtgggccagtttccttaatttatgaaggcatcatgtcactgcaaaagccgtacagataaaactttgtattttaattgctttggtgatgattactgtattgacatcatcatgccttncaaattggtgggtggctctgtgggcgcatcaataaaagccgtccttgattttat

SEQ ID NO: 3156 - DNA, 463 bp, Homo sapiens
  misc_feature 186, 196, 441: n = A,T,C or G
ccgcggtggcggccgcccgggcaggtacgcggggggggctgggcttcgtgtcctgcgttccgggagcgccaacccctccagcagaggggacgtggctggtggctggagaagctggatttgccctttgatggtggccctcttgatccccggcttgctgaagtcaaaggagaggctgtcgatgctgangcacgaaaanaatttgctcctgctcctccagagaaaatggctgggacaggctgttgaggaataattctgcagggaaaagtggaagatggctgtgaaagactgggaggaggctggctgtgttttcaggggttcttcctgcacagtcggtagaagctgagctgctggggaaggggctggaagaaagcccacaccgcaggtatcagtagcaaaattcaaaaactacagaatcaagctccagaggactttgttaacaanaaagagaagattgaaaacagcc

SEQ ID NO: 3157 - DNA, 536 bp, Homo sapiens
  misc_feature 46, 54, 122, 183, 235, 247, 307, 322, 335, 342, 352, 354,361, 389, 395, 436, 437, 447, 450, 454, 457, 476, 481, 495,496, 512, 513, 516, 521, 536: n = A,T,C or G
cgaggtaccattgatagaagtccagtagtcttgccacattggtttntgagggcntcttggagtggaaaagagcgattatcgggggctttgaaaacagctgcaaaccagggaggaaaatcatnttggcccctgcttctgaggacaggacattgttgctaccaggcccactggcctgggacctgnaaaggccaagccacgcccccgctttggcccttgaaggtgcattgggggtgtngcaacacacccntaaccctgtgcttattcaacccttgggccaacaccagcccagaacccccacaagccttanaaaaaccacccaacnccattacttggcnaatttgnttgggggaancncaaaaancccaggctttttttggggggccccccangtttanaaccaaaaaaaattttttccttttgggggaaaaaccccaanngccccaccgnggngttnttntttttcccctttttttttnggggntttttttaaaaaannaaaaccccccgggggnnggnccttnttttttttttttttn

SEQ ID NO: 3158 - DNA, 103 bp, Homo sapiens
aggtacgcggggagacgccgcgccgcgctgcgacgctgtagtggcttcgtcttcggtttttctcttccttcgctaacgcctcccggctctcgtcagcctcccg

SEQ ID NO: 3159 - DNA, 468 bp, Homo sapiens
ccgcggtggcggccgaggtactctcttaatggcatttttatggtaagttgagttacctcagaacctgccgtgcccctcctggatgcaccaggaaagtcacagatgggaaaggacactctctcacagcagctttgctccagtcaccaagcccaacactgcgaaccataaagcagcacacagggactttctttacaccaaaggggcccgatccagcccttccttctgtgcctgccacttccgggttggtgctttacagcgcttgaagggagaacaatgttctgtagtctgcaacacactccagaccatgttgacgctatgatcactatgtttgcatgattgcatagagcttaaaagaagaaacagaacaccaagtttcttgcactgaattcacatatgaaaactggaagagcacaactgttagttttcaaggtctttggctaaagcttcacgaatgaattgtaaagtacc

SEQ ID NO: 3160 - DNA, 491 bp, Homo sapiens
  misc_feature 19, 257, 321, 395: n = A,T,C or G
actatagggcgaattgganctccccgcggtggcggccgcccgggcaggtacccccagcatctagcagtgttggcatgtagtaggcactcaagaaatgtgtgttgaatgaacgatgcctgtgacaagcaagcggactttattctttcctgacccttgctcctatgacacacctcctcctgactaccactgtcactccttcagagcagaactcctctagggaacctggatggggaacaagccattggccaaggaccatnctggggtgaaagcaggggctacacttttgaatgaaacttgaacaaagcttgaagggggtggttnggaccccagaaggtttaccccagccagaaccatagaagcttggaaagggaaagaagtggcaaaagacttttgtnggaccaaaaattgggccaagtttcaagaaaaatagtttgggtgggttttaaattggagccttgtttgatcaacctttgccaaaagaaagccagaaa

SEQ ID NO: 3161 - DNA, 267 bp, Homo sapiens
  misc_feature 12, 14, 15, 17, 21, 24, 25, 55, 57, 61, 62, 63, 64, 70, 74,77, 78, 82, 86, 87, 96, 99, 105, 107, 110, 111, 124, 127,132, 138, 142, 143, 149, 153, 154, 155, 160, 164, 175, 183,193: n = A,T,C or G
aggtactttttntnntncatnatnntaaccaagccgtacccttaccagcatgagncntggnnnncccagngccnctnncatnattnncatgactantgnggacangncgnncactgtagggaanccnacacncattancatnnaccagntgannnaatgntggncccaatagacnacggtctntggaagcccngaacgtcatattgaaggcacagtaagcttattctggggacccaaagaaggctcggacaatgggtgactggaaga

SEQ ID NO: 3162 - DNA, 473 bp, Homo sapiens
ccgcggtggcggccgaggtacgcgggggagcgcagagcggtttggtcgttcgttgggcggtgttggtttttcgctcgtcgactgcggctcttcctcgggcagcggaagcggcgcggcggtcggagaagtggcctaaaacttcggcgttgggtgaaagaaaatggccagaaccaagcagactgctcgtaagtccaccggtgggaaaacccccccgcaaacagctggccacgaaaagcccgcccaggaaaaagccgcttcccttttacccggcgggggttgaaagaaagccctcatcggcttacagggccccggggaacccgtgggccgctttcgaagaagaattccgtccgtttattcaagaaaagttccgaccccgaagccttgctttaattcccgggaaagccttgcccctttccaaaaagggttttgggttggaaggggaagaatccgccgccaagggaatttttcaaaaa

SEQ ID NO: 3163 - DNA, 476 bp, Homo sapiens
  misc_feature 3: n = A,T,C or G
ctnctatagggcgaattggagctccccgcggtggcggccgaggtacctgaaggttttgtctcttaattttctttgaaccacacctcttctccttattataagaaaaaccctcttagggtaagggaagcccaaattaactgtcctgaaattttgcattatatttaaaccataatatttgatttacttctgtcaaacaaaacactaccatttgggttctcatttgtagattatttaaaaacatgttttttcctgttaattatcaatgcatttactatcacaagggattaaaaagatcacttcaggtgggtggggatggtttcatgaaaacacccatgggtgggggagtagggtagtggggccaggccagaagtggacaatcaagcttaacctccctttcacctagctgttctttaggaaaaacaaaaataaaaagtcaaattgctttcagtttttcaaagaagtggaaaaatgggaga

SEQ ID NO: 3164 - DNA, 721 bp, Homo sapiens
  misc_feature 33, 43, 139, 284, 312, 369, 419, 422, 429, 432, 499, 504,542, 548, 552, 577, 590, 610, 629, 650, 661, 676, 698, 708,713: n = A,T,C or G
gtaatacgactcactataggggccgaaattggnagcctccacncgcgggtgggccggcccgcccgggcaggtaccgccggggaagaagcttgaagccgaaccccagccccgcgaagccgaaaagttgaagaatggcccnggtgggcccgtggggttccccttacgggaacaggttccccaagcccaaagcttgctttcgaacccgtgttcaaaaaattggggctttcggtgaatggggtttgcgcccgtggggcattggcgggcccgctctaaaaacctaagtnggaatcccccccggggcttgcaaggaanttccgaatatcaaagccttattcggattacccgtccgaaccttcgaagggggggggncccgggtaccccaagcttttttggtttccccttttaagtggaaggggttnaanttggcgncgnctttgggccgttaaattcaattgggttcaataagcctggttttcccttggtggtggaaaaatttggnttaanttcccgctttcaacaaatttttcccaccaaccaaccanttaccnaaanccccgggggaagccattaaaaaagntggttaaaaaagncccttgggggggttggcccntaaattggaagttggaagnccttaaaccttcaacaatttnaaatttggccngtttggccggctttnaacttggcccccggcttttttnccaagtttcnggggnaaaaaacc

SEQ ID NO: 3165 - DNA, 428 bp, Homo sapiens
ccgcggtggcggccgcccgggcaggtacagatatttttgacctataggtgcctttatgagaattgagggtctgacatcctgccccaaggagtagctaaagtaattgctagtgttttcagggattttaacatcagactggaatgaatgaatgaaactttttgtcctttttttttctgttttttttttctaatgtagtaaggactaaggaaaacctttggtgaagacaatcatttctctctgttgatgtggatacttttcacaccgtttatttaaatgctttctcaataggtccagagccagtgttcttgttcaacctgaaagtaatggctctgggttgggccagacagttgcactctctagtttgccctctgccacaaatttgatgtgtgacctttgggcaagtcatttatcttctctgggccttagtt

SEQ ID NO: 3166 - DNA, 417 bp, Homo sapiens
  misc_feature 183: n = A,T,C or G
ccgcggtggcggccgcccgggcaggtactgtgtttagaagggattaccaaaggctggagcgatttaagctatgcactagccttgccctcttaggttgcattctctttaggccactggttctcaaacattagggtgcactgtaaccattacagagcttgtgaaaagtgcagaaacctgagcctnaccttatgagattcagccagggggaggacaggaatctgtatttttcatagcaacctcaagtaatctttattctgagggtctcgggattgcaggttgaaaaacacaaccttaatcagcagtaaattcttctctactcggccaggcgcagtggctcatgcctgtaatcccagcactttgggaggccgaggtgggtggatcacaaggtcaggagttcgagaccagcctgaccaacat

SEQ ID NO: 3167 - DNA, 401 bp, Homo sapiens
aggtactcttaaaaatctgttaagagagtggatctcattttaagggttcttaccacaataaaattaaatttttgaaataaatcagtcatatttgagtgaaatgaaacctttccgagtagtttcagacaattgataatacctagtttacagttcctgtagtcattttggagggtgaggacttgatgtgtttagtaaagttgagaaataaatacatgaaagaatgtgtggggaagagaaattgtggggaagagaaattgtctcagaggaccattcttagtggcactggggaaatcttggcacccagaagaattcaactgcgctcactgcaaaaatacaatggcctacattggatttgtagaggagaaaggagccctgtattgtgagctgtgctatgagaaatt

SEQ ID NO: 3168 - DNA, 321 bp, Homo sapiens
gaagagcaaccgagatgaaggtgaagatgctgagccggaatccggacaattatgtccgcgaaaccaagttggacttacagagagttccaagaaactatgatcctgctttacatccttttgaggtcccacgagaatatataagagctttaaatgctaccaaactggaacgagtatttgcaaaaccattccttgcttcgctggatggtcaccgtgatggagtcaattgcttggcaaagcatccagagaagctggctactgtcctttctggggcgtgtgatggagaggttagaatttggaatctaactcagcggaattgtatcc

SEQ ID NO: 3169 - DNA, 367 bp, Homo sapiens
cggtggcggccgaggtacgcgggggcttgaaacggcagtagcgcagcgagaaggatcgccatcacacggcgcactggtgcggcttctcccccgagtggatgaacatgtgcttggtgtcgtttttccttgagctgaacgtcttgcaacagtggccgcacgcataggtcatcactgatcagaggcctaacccaaggagggggtcatgtgcagacccagctgtggggaggaaagatgctgcagaggagacggatgcccacagaggcccctgagtggatacaatgctcactaagtgggctgaccccacattggacaccgctgcatccatgtccatcacacaacacagctgccgtttcttctgcctgcttat

SEQ ID NO: 3170 - DNA, 374 bp, Homo sapiens
  misc_feature 3, 4: n = A,T,C or G
gcnnattggagcctccaccgcggtggcggccgaggtacagatctcgcccacccagagaagacctggagtcgtaagactcataaggtccaaacctgctacccccaccaccaccactgtgattgtccatgccatatgactggtttaggtaggaatccatggatctctgacccccataggatccatggccatagtcacgatccatccctccataagatccagggccataatcacgatccattccattaaagccctgataagtattcctgcaggcggagtgtgtgtaatcgtcctcgaagtccatggcagaggctgagggccgtcggccttggcggcgctaggctgagctatggccggcggcgagcgtccgcgacccg

SEQ ID NO: 3171 - DNA, 258 bp, Homo sapiens
ccgggcaggtacgctggggctaaacctagccccaaacccactccaccttactaccagacgaccttagccaaaccatttacccaaataaagtataggcgatagaaattgaaacctggcgcaatagatatagtactgatcatggaataaacacatctctctttttttaatgctggcgtctccctgacatttctttgtgaaccaactgttgcctaggctaggcccaggggacccctggaccccagaccaccctctgtacct

SEQ ID NO: 3172 - DNA, 348 bp, Homo sapiens
aggtacaatccatcctgaggcaaaattcctctccagctgtgaatctgtgaaaccagatgagttacgtgcttccaaaatctaagggtagggcaggtatagaagagacatccccactccaataggagaaacaggaaaaaaagggtgatgatcccaaggaagtcaaaacctagcaaggtcgagcggccgcccgggcaggtaccagggaaacaaacatgaataaaatactggctctttgctgagcaagcttggagatcagtttcagggaaagccaaaatggtcttaataacaacagagaataatagtgctgcaataaagtaagtgaggggagacaaataattgtcctccagt

SEQ ID NO: 3173 - DNA, 144 bp, Homo sapiens
aattggagcctccaccgcggtggcggccgaggtacgcgggggtcggcgccattttgtctcggcagcggtggccgtagctccatcgcattttatgtttctggcgagaaagggaacggagttttcatcagggagattggtttttgt

SEQ ID NO: 3174 - DNA, 436 bp, Homo sapiens
  misc_feature 70: n = A,T,C or G
cgaatttgagctccccgcggtggcggccgaggtactttttttttttttttttttttggtattaagccttnagttttgacttaaactcgaaggatgctcttagattggtaactactctgagatactaagagtgtttccactctcctcccagttagagtggggggtttcctcctcagtgctgcccctgcatggctggttcatttctctgtgccttctctgacccctcgttaggacctgtcttccagaccttcttaccagggtggaaagaatagggttcatgtagagaatggatctgaaggttaaacacatggagttctagtctcaaagagacacaacagacagtgtcctccttgttgaggtcagagaataggaacatcaagaaatgagagatatcagagagccagaggggtttggacaaatgcattgcctggaacaat

SEQ ID NO: 3175 - DNA, 387 bp, Homo sapiens
  misc_feature 132, 148, 155, 158, 160, 297, 300, 359, 364: n = A,T,C or G
tatagggcgaattggagctccccgcggtggcggccgcccgggcaggtacttttttttttttttttttttttttttttattaacaacaaaattttttagaggggcttcaacttaactgaataggattaaaggnggattctttggtcagngttcaanaananaccctatagctacttacaaaggagtccacacctcaaagtaagccactcagtaaagcttatctattttcactggaacgaaaaggagctaaacaaatgacaaattccactaaactacaaggaagacaatcagcatcagntgngcaactttggttaaaatgtcccagccaaaaaacattctctatcatttcatcattttaancaggnagcttctcattcctatttgctct

SEQ ID NO: 3176 - DNA, 346 bp, Homo sapiens
  misc_feature 19, 29, 51, 216, 237, 283, 327: n = A,T,C or G
ccccgcggtggcggccgangtacaggctnatggttgggagctgagcggaangctgagaatcctcccggaacctactggattctgacgccccaggggttcttcacacaggctggccggtctcgggattgaagccggagacgtcagacgctaaggttgcttaaactgcggcccacgtggaaggctcttagccaccctgcctggcccgaggtaatcgcnctagggacgctttttctgcancaatgatataccccgccgaactgtcccacgtcctggttgggacctnttggtttcgcttggctgggctcaatccatccgtacctgcccggncggccgctctagaactaga

SEQ ID NO: 3177 - DNA, 332 bp, Homo sapiens
  misc_feature 183: n = A,T,C or G
ctatagggcgaattggagctccccgcggtggcggccgaggtactttttttttttttttttttttggtattaagcctatagttttgacttaaactcgaaggatgctcttagattggtaactactctgagatactaagagtgtttccactctcctcccagttagagtggggggtttcctcctcantgctgcccctgcatggctggttcatttctctgtgccttctctgacccctcgttaggacctgtcttccagaccttcttaccagggtggaaagaatagggttcatgtagagaatggatctgaaggttaaacacatggagttctagtctcaa

SEQ ID NO: 3178 - DNA, 389 bp, Homo sapiens
  misc_feature 299, 319, 331: n = A,T,C or G
ggggtggcggccgaggtacacgctgccagtattgctcgtttgtttctgctttcaggcacaatttggatcgccatatgcaaacccaccacggacaccataaaccattccgatgcaaactctgctccttcaagtcctcctataacagccggctgaaaacacatatactcaaagctcatgctggtgagcatgcctacaagtgttcttggtgctcattctccaccatgacaatcagccagctgaaggaacactccctcaaggtccacggaaaagccctgaccctccccaggccacggatcgtnagtctcctcttcttacactnccaccactcctnccaaaaagctaccccggctgaagaagtggaagactccaatgactcatgatattcagag

SEQ ID NO: 3179 - DNA, 454 bp, Homo sapiens
  misc_feature 3, 14, 76: n = A,T,C or G
tanggcgaattggngctccccgcggtggcggccgaggtaccagtggccagaggacctgctcaaacctgaccttatnctgctgctcactgtgagtcctgaggagaggttgcagaggctgcagggccggggcatggagaagaccaggaaagaagcagaacttgaggccaacagtgtgtttcgtcaaaaggtagaaatgtcctaccagcggatggagaatcctggctgccatgtggttgatgccagcccctccagagaaaaggtcctgcagacggtattaagcctaatccagaatagttttagtgaaccgtagttactctggccaggtgccacgtctaactagattagatgttgtttgaaacatctacatccaccatttgttatgcagtgttcccaaatttctgttctacaaggcatgttgtgtggcagaaaactggagaccagggcatcttaattt

SEQ ID NO: 3180 - DNA, 398 bp, Homo sapiens
  misc_feature 25, 40, 41, 44, 55, 56, 64, 67, 68, 104, 107, 123, 159, 171,172, 183, 185, 186, 187, 226, 255, 259, 261, 264, 276, 295,304, 307, 342, 373, 375, 384, 385: n = A,T,C or G
acccgcggccgcccgggcaggactntcctacccggagctnnaancaaaagcggcnngaaacccnggnnagggggcagaaagaagggcagaggcccggaacaganaangcaggaggcagagagngaggaggaaaaacccgacaggacggacagggacagngaaaacacaganncaaaacacaancnnngcaaacaaagggccgagagaaaagagggaagccccagcngggagaaggacacaaagccgaaagagccnaggnanacnccccgggagcanccacgaggaaaaagcagcngcccaagangcnggaagcacggcccggggccgcagccaagacgcccngaagcccggagaccgaaacgcaaaccagagngncaagacaanncgaaaaagggaaa

SEQ ID NO: 3181 - DNA, 435 bp, Homo sapiens
  misc_feature 4, 242, 325, 407, 410, 416, 420, 429: n = A,T,C or G
atanggcgaattggagctccccgcggtggcggccgcccgggcaggtacaatgaaaggtaaaagtaatgctctcagaggaaatgtttccattctagttctatttggaagtccttgggacaatttgtgttttgattatatttagaaatcttcagtattttgtcttggccaggtgtagttgctcaaggcttgtaatcgccagcactttttgggaggctaaggcggggtggattacctgaggtcanggagtttgaatcacccttggccaaaatggtgaaaccctgtctctactaaaaaatacagaaatttagcttgggatgtgggtggntggggttgccctgtaagttccaagtctacttaaggtaagcctggaagtcaagtagtaatcgcttgggaccttaagaaggcgnaangtttgncagntggagtctntgattg

SEQ ID NO: 3182 - DNA, 336 bp, Homo sapiens
  misc_feature 27, 28, 29, 30, 31, 33, 44, 45, 46, 52, 54, 61, 70, 86, 96,117, 122, 123, 124, 125, 126, 135, 144, 145, 146, 152, 164,168, 172, 174, 175, 177, 182, 188, 189, 194, 196, 206, 208,215, 218, 220, 229, 236, 248, 250, 252, 254, 268, 276: n = A,T,C or G
  misc_feature 289, 292, 318, 322, 323, 324: n = A,T,C or G
cggcggccgcccgggcaggtacttttnnnnngntaattaacccnnntttttngnaaagggngaagagccngaacgccggcgtaaangggggctgcnttgaggcccaccaaggggggnaaaannnnnacccccccnacaaggggnnncccaangggccaaaaganccgngccncnngnggacnaacagnnaaaancnacaaggggancnaaagggnccngngggcaaaancaaaggngaaccaaaaaancnancnggggacaaccagcnaaaaccangcccggaaggaanggngccccaacccaaaaaaaccgccccanaaannnagccaaaaaaaa

SEQ ID NO: 3183 - DNA, 585 bp, Homo sapiens
  misc_feature 154, 167, 171, 190, 212, 239, 243, 249, 254, 273, 287, 299,320, 344, 365, 372, 415, 424, 455, 470, 487, 498, 499, 513,529, 537, 543, 549, 557, 563, 573: n = A,T,C or G
gcgtgccgcccgggcaggtacactcacacacacacacacacacagagcttttagcaactggtcctgagtagctctttgtaaattctttattgccaggagtgaaccctaaagtggctcacaagagtgccctatttctttcaaattaactaccaanggacaaaacacantctnaaaagtttgagataaggtngaccccagttattgatttttgnccaaaaattcttaaaaagcgccacctncacncattgnaaaantgggaataaaaaggggttnacccttttgggggnatttttgccacntgccatggaaatttcctggtngaaaaaaggctttggtatgggatnattttggtggaataaggaagnattaggnaggaaaaatggaaaagctaattaatttaattattaaaggaatnaccttaatngaaggggttttccccctggccccttttttgnctttttcaacaattncccccaagggccttttnaccaaaaaacnngttggcccccccanttaaaaaaccaatttncccccttncttggnggggcntttctttnggccantttttccggntaattaattttt

SEQ ID NO: 3184 - DNA, 275 bp, Homo sapiens
  misc_feature 27, 32, 53, 109, 164, 197, 198, 203, 206, 208, 212, 235,237, 238, 245, 250, 258, 259: n = A,T,C or G
aggtacgcgggggattttttgattttncaatntccacaatgtgacggtgtttncgacagaagttcctcagtggtccctggataagaatgttaagcgaaattggtgtctnaactttggtgctatctgtagcattcttgtccaactcaggcattgaaggcaagccnggctacaatggggccttttttgcttaagggggnnccatngcnangaangcctttgaagggaaaaaacccgnannaataaangtttntttttatnncttctttttggaaaaa

SEQ ID NO: 3185 - DNA, 95 bp, Homo sapiens
tggccgtggctcacgtggcccctaagtttccgggtcttcctcagtctggatggcatgttggcagcccagacgaaaaagccccgcgtacctgcccg

SEQ ID NO: 3186 - DNA, 475 bp, Homo sapiens
  misc_feature 88, 96, 99, 120, 122, 135, 143, 152, 157, 182, 189, 193,203, 207, 222, 227, 233, 234, 253, 259, 267, 275, 282, 291,331, 333, 337, 342, 351, 358, 366, 378, 385, 391, 397, 406: n = A,T,C or G
aggtacacgactcccatctaggctgaaaacctagaagtggaccttgtgtgtgtgcatggtgtcagcccaaagccaggctgagacagtnctcatatnctnttgagccaaactgtttgggtntngttgctttatggnatggtctngatttgtgngaacnggctttcccgttgacaacttggganagataanttgnttttattaancaantttcgacccgtatcntgctncattcnnggaaagccttgcccctttntcaaanaggtttgngttgtagngggaagnatccgctgncatggaatttttcataaaaacccgtaacccttgtagggtntntcanaaagnccgcaagantcaatcngtattgcngcatgccatggnagggccntatgcngaaatnccgttcctntggcccgctttagaaacttagttggaatcccccggggcctgccaatgaaatttcgattattcaaagcct

SEQ ID NO: 3187 - DNA, 447 bp, Homo sapiens
  misc_feature 14, 164, 174, 179, 237, 292, 348, 406, 410: n = A,T,C or G
ccgggcaggtacangggcacaatgtgctgggctcgggctcttgatttcttttcggcttgagaaggtgcgggcgatccaaagccccccggggactgcgtgtagccgccggctcccccgtatgaggagctgccatagctttcgaatccactgttccacatcttggncaacgaattntccgncaaaagaggccgaataaggtgcggggtcttggggggaaataagccggaaaaaccacanaacgccggcccgaggtacgcggggggggtttctgggaaaaggcttgtgaacggcnttttattgcgtctgccgatggacagcgaagctgcttgcggttcctgagcccggaangagtgcctgtgaaagtaaaacgggggttattgccctgaaggcttaataatttctgccntcanttggtcttttttcttggaaaattaatttattaaaatt

SEQ ID NO: 3188 - DNA, 449 bp, Homo sapiens
  misc_feature 182, 418, 449: n = A,T,C or G
ccgcggtggcggccgaggtacgcgggggtggcgcattctcagtgaggagggccgccctgcatccgtcgccggccccggtctccaggggcctcacccgagtcatgccccgctattgcgcagcgatttgttgtaagaaccgccggggacgaaacaataaagaccggaagctgagtttttattcngaaaaggacccttctaaaaaaaaatcccagaagaaaaacttggaagatgagaaagaagtatgcccaaaagccaagtcagaagaatcatttgtattaaatgagacaaagaaaaatatagttaacacagatgtgccccatcaacatccagaattacttcattcatcttccttggtaaagccaccagcctcccaaaacagggaagttatacaaaataaccatgttaactcttaatctangttaaacaaccatactgggggaaaacccagn

SEQ ID NO: 3189 - DNA, 670 bp, Homo sapiens
  misc_feature 21, 22, 27, 30, 32, 37, 38, 41, 45, 46, 53, 58, 59, 60, 62,64, 67, 68, 70, 72, 73, 78, 83, 87, 89, 93, 95, 99, 104,107, 112, 113, 117, 119, 127, 134, 143, 145, 146, 150, 151,154, 159, 168, 173, 174, 175, 177, 178, 183, 184, 185: n = A,T,C or G
  misc_feature 187, 190, 194, 196, 197, 198, 201, 204, 207, 210, 221, 223,227, 229, 232, 247, 255, 258, 259, 261, 263, 277, 282, 283,285, 287, 290, 299, 309, 323, 349, 353, 362, 370, 381, 563,601, 638, 644, 652, 658: n = A,T,C or G
gcggccgccgggcaggtacanntatgncanangctannttncatnntataacngtcannntncntgnntngnncatcnggatnaganancacntnagtngaacncanattcnnatgnanatgcgacncacacanaaactgcgnannttgnnggnacacnctggcccantcgcnnntnnagcannngnctntacnannnccnagntcntgngtcaacatggngnctananagntgcgggaactctgtnggagccanggnntnanttcactgagccttncccgnncntnacntgtgtagangctggaattnttattattagtttnttgctcgaagatgctcttggtctganagtngaatcgganccataaancaatggcatgngacagcaatcccggcaagccagaagatgaagttaaatccgaacagcaggtatttgatgcacttggtgcctcctttgaccggcatggtgagggctaacttagcctgggccgaacgggtgcgggactggggggcgcgcgcagctgggactggcgggacctggcgctggatacaaatgcagcggntgtaggctggtcttcggcttcccgcgtaccttgggcgntctagactagtggatcccccgggctggagaattcatntaagcntatcgttncgccanctcgaggggggc

SEQ ID NO: 3190 - DNA, 424 bp, Homo sapiens
  misc_feature 357: n = A,T,C or G
ccgcggtggcggcccgcccgggcaggtactaaaatcacgagaacacctaaacaacaaccaaaaatctattgtggtatgcacttgattaacttataaaatgttagaggaaactttcacatgaataatttttgtcaaattttatcatggtataatttgtaaaaaaaaaaaaaaaaaaaagtacgcgggggcaggcgccgtgtggcactcggcggtcgaaaggggagttcaaggagacgggggcgacgcggctgagggcttctcgtcggggtcggggctgcagcccgtcatgccggggatagtggagctgcccactctagaggagctgaaagtagatgaggtgaaaattagttctgctgngcttaaactgcggcccatcactatggagctcaatgcgataagcccaacaaggaatttatgctctgcc

SEQ ID NO: 3191 - DNA, 645 bp, Homo sapiens
  misc_feature 48, 70, 71, 72, 180, 440, 475, 499, 541, 584, 625: n = A,T,C or G
ggcgaattggagctccccgcggtggcggccgcccgggcaggtactttntttttttttttttttttttttnnnatgtagtccacccatttaattgttttggagttataggccaatggaaaaaaaaaacaattctccatcttattaaaattaagaactctttgggcagtaagttaaaaacantgaacaaaaacccttcgaacttggcaggtggctaggactcctgaggaatcatgtcacagctatgtctccaaaaaatatttgaaattaaggtttagagatttcaaaggtctcttctgagtccaaacttttggcagatgtcaaaattttaggaaatcattttggaagagaggaaactagcccaaactttttttttgccccccttccacagacaggattgaagcaaggactaaatcattaatggagtttgaaagaaaggaatnctaccataataacatagaaagatcttcatttctgnggcctgataattgaggggtaagangtgacctggtgcaatttggaatcatgttggcaagaattctantcttaactttttgaatcactttttggattcctttagcaaactnccttatcttctttgggcttcagtttctccatgtgtctgatntagatcccaccattaaaaat

SEQ ID NO: 3192 - DNA, 459 bp, Homo sapiens
ctatagggcgaattggagctccccgcggtggcggccgcccgggcaggtaccctgcacacactaggttctcaagaaatattcatgtaataagtgaataattgaatgaatgaatgactaagtgaaacttctctttacaacaagcaaatgtaatagccctttctaagctctcatcatcctcattgtccttggtggattcccaccacactcagaattccttttcacctttccatgcatatgaggccccacctaatcaggtgctggtcttcttagctttctgtctcctaccactttttgtcttgcttcgggaactccactgtcttttctgttataggaacatgctaaggttattcttcatagtcaagagcacaagctctgaacccagccaaatctgtttttgaactcaagttccacttattgctagctgtgtgatattgggaaattctttatgttctgtaaccc

SEQ ID NO: 3193 - DNA, 630 bp, Homo sapiens
  misc_feature 10, 29, 42, 66, 204, 225, 261, 280, 281, 304, 320, 332, 334,360, 375, 385, 399, 407, 424, 437, 438, 456, 458, 498, 514,527, 558, 584, 591, 599, 603, 611, 616: n = A,T,C or G
gcgggccganggtaccccggggtttttanttttcggccatcnttttgtctttccgtggaagctgtncgctcatgaaaggtcgagctgtgcagttttagcgggtacgcgggtgaagatcctcaccgagcgcggctacagctttcaccaccacggcccgctctagaactaagtgggatcccccgggggcttgcagggaaatttcgnataattcaaagcttattccgnataccccgttccgtacccttcggagggggggggggncccccggttacccccaagnnctttttttggttttccccctttntaagctggaagggggntataaattttgncngccggccttttggggacggttaaaantacaaattgggggtncaattaaggncttggttttttacnccttggtngggttggaaaaaaaatnttggttttaattnnccggccttccaaccaaantntttcccaaccaacccaaaaccaatttaacccctaaggccnccgggggggaaggccnaattaaaaaaggntgggttaaaaaaaggcccccttggggggggnttgggccccttaaaaattgggaaggnttggaanggccttanaacntttctaancaatntttaaaattttggg

SEQ ID NO: 3194 - DNA, 371 bp, Homo sapiens
  misc_feature 358: n = A,T,C or G
tttccaagccctacatttgcatctttcaagcttctaagaaaactccctcaataagaattggaatgtaaatatgcctaccgttcctcttatccacatccttttaaactaattatagaacctatgacaataagatgggctccttagttaactaatgtttccaggtatagtccatggtttaactatgtggcaaaaagttgacactcttcttattaagaaggagggtctatgtccttaccctgagattgccatgtaggtaaagttcacttgtaggtgctccaactgggaaagtcctagcctaacacttgggtgaagaatgcctttcacacggatctggaaactctggccaataaatttattncccagcctttttg

SEQ ID NO: 3195 - DNA, 420 bp, Homo sapiens
  misc_feature 161, 239, 323, 410: n = A,T,C or G
gattggagctccccgcggtggcggccgaggtacaccgattggaaaaaggataatgtgtgagccactggagaagcagcacgagaaggagaggaaacaggaggagggggaatcctagcaggacacagccttggatcaggacagagacttgggggccatcctgnccctccaacccgacatgtgtacgccggggctcttttttcctggctggaaccatggagggttgtatgaagaagaagaanaaggaggttcctgctgtgccagaaacccttaagaaaaagcgaaggaattttcgcagagctgaagatcaagcgcctgagaaagangtttgcccaaaagatgcttcgaaaggcaaggaggaagcttatttatgaaaaaagcaaagcactatcacaaggaatataggcagatgnacctgcccgg

SEQ ID NO: 3196 - DNA, 112 bp, Homo sapiens
  misc_feature 45: n = A,T,C or G
aggtacaatttctgccactggtctaggtgtctgaggagcatcttnctggctcagagaccttttgctccaggtgctcatgccgcagatggcaatctgccgcgcgaactaattc

SEQ ID NO: 3197 - DNA, 455 bp, Homo sapiens
tcactacttagggcgaattggagctccccgcggtggcggccgcccgggcaggacaaggctcagaagattgaagtatcaaagtcacgtcctctgtttctaacactgtttgatagacagctttctggaaatctgtcaaagaacaatacaccatccggtcttccttcttaggcaactgatccttgataagagtcttggtgcgcctgagaaaccagccagacatctttttggcaagtctttgcatggcctttcggccagtggctagttctctctttgttgccgtgtgtctctgaccatgttctactgggtcagaaaactgcttcttgaagtaggtcccactccctaaaaggcctggcacagcccagtccataacacaccacagttccttcatgttgttctgaaggatggttccagtgaggccaatgcggacattacatttcaaagctttcataacttct

SEQ ID NO: 3198 - DNA, 593 bp, Homo sapiens
  misc_feature 168, 193, 223, 236, 285, 286, 326, 339, 365, 368, 382, 389,400, 424, 451, 457, 459, 466, 481, 495, 498, 534, 535, 539: n = A,T,C or G
cgcggtgggcggccgccccgggcagggtacgcgggggtggaagcccggccctgcaggctggagaggatttgattagactacgcgtttcgacttgcagggtgtttaatcgtcgccaagcgggacttactgcaagctatcaaatctgaggtcttatttttgttgaagtcnaaagtgaaaatttttccttttggcnaaccgttggacagctatttttgacattttntgccagccaaaanaaaatgggttaatgggaagaaagccccaagtcccgcttgcttttgttanngggccggggaagtttttgttggaggggccaaattatttantaacctttttggncttggaaaataaaaagtccttcccgnggnaattaatttttaancaaccanggggttttttnattggggccatggggaaatttccntttccccttaattggttttccaattgngttggngnagttaanaaattggccttaagnttgggggaaaaagnccnccccaaggggaaaagccttggttttttaattggggnnccanaaaaaattgggatttattatccaccccacccaaaaaaggtgattttaattcctt

SEQ ID NO: 3199 - DNA, 418 bp, Homo sapiens
  misc_feature 153, 156, 288, 298, 330, 345, 385: n = A,T,C or G
tacttagggcgaattggagctccccgcggtggcggccgaggtactttttttttttttttttttttttttgcaattgcttttggcatcttcctcatgaaatctttgccttacactttttgatagtgtctccctctttggaatttcttttgctgnctntcctttgggtgacttcagaaaaaaataaaaataaaaaataagcctttccagctctctgttctcagcatgtttaaaaactgggaatagcttttgagcactcaggtgcctaggagtgaatttaggaactgaggngttgtcttantccatttgttctgcaaagacaaaatacctganactgggtcatttatnaagaacagaaatttatttctcacagttttggaaatccaanatcaaggaactggcaggttcagtgtcttgtgag

SEQ ID NO: 3200 - DNA, 430 bp, Homo sapiens
  misc_feature 55, 188, 234, 241: n = A,T,C or G
ccgcggtggcggccgcccgggcaggtactttttttttttttttttttttttttgnaattttgattaaattctttatatcattcttgcaacttttccatgcttttgaaattatttaagaaagttaacaaataagcaaacaaactacaaatcaggaatggaaagtgaattttacaaaatgccattttcanattcacaagacgcttgcattcaccttccttcgacgattactacttnttacacnctatgatttctctcctttttccaccacaccggctccaggtctacttgtctttactctccccgcttcatcgctgtctgcccccttccaaaacctgttctttggtttcattctctctttttcttagttggattcatttctgcttttgtctttaaagaacacagtaattcttcaacttactttggttctttg

SEQ ID NO: 3201 - DNA, 409 bp, Homo sapiens
  misc_feature 324, 397, 409: n = A,T,C or G
actacttagggcgaattggagctccccgcggtggcggccgaggtacaaaagccttcatgtgcttgtattgaacggatacaattccgctgagttagattccaaattctaacctctccatcacacgccccagaaaggacagtagccagcttctctggatgctttgccaagcaattgactccatcacggtgaccatccagcgaagcaaggaatggttttgcaaatactcgttccagtttggtagcatttaaagctcttatatattctcgtgggacctcaaaaggatgtaaagcaggatcatagtttctttggaactcttctgtaagntccaacttggtttcgcggacataattgtccggattccggctcagcatcttcaccttcatctcggttgctcttncggccgctctan

SEQ ID NO: 3202 - DNA, 410 bp, Homo sapiens
  misc_feature 313: n = A,T,C or G
atcatacttagggcgaattggagctccccgcggtggcggccgaggtacatctggcgcagaccagcagtggcacgattccaaacaaatgtcagacgagagcgcttcatggggagaaactgaaaattatcccgcgtacctgcaggcctcctacacctacctctctctgggcttctatttcgaccgcgatgatgtggctctggaaggcgtgagccacttcttccgcgaactggccgaggagaagcgcgagggctacgagcgtctcctgaagatgcaaaaccagcgtggcggccgggggcagctggaggtgcctcanaaggtgcattctgcttcctgcaggggcttgaaacaccaaggcactccaggggatcctggagtcaaagcagcagccccggttgttgcactccttgggg

SEQ ID NO: 3203 - DNA, 416 bp, Homo sapiens
  misc_feature 202: n = A,T,C or G
gggcgaattggagctccccgcggtggcggccgaggtacgcgggatcctcattactattctgcctagcaaactcaaactacgaacgcactcacagtcgcatcataatcctctctcaagcaattctcctgtctcagcctcctgagtagctgggattataggcatgtcccactattcctggccaatttttgtaagttttaagtangggacggggtttcgccatgttggccaggctggtctcgaactcctgacctcaggtaatccgtccgcctcagcctcccaaagtgctgtgattacaggcatgagccaccgcgccaggcctcaataaaatattttataaatacctttaaggaataatacaaacacaaccagagcttaaataaataaatgtaaatcagtctgcttgctggttaagtaat

SEQ ID NO: 3204 - DNA, 397 bp, Homo sapiens
  misc_feature 147, 361, 366, 372, 391: n = A,T,C or G
cacgctggttttgcatcttcaggagacgctcgtagccctcgcgcttctcctcggccagtccgcgatgatgtggctctggaaggcgtgagccacttcatcgcggtcgaaatagaagcccagagagaggtaggtgtaggaggcctgcangtacgccgggtatattcaggtgaatgagccctggaagcggattaaaggcagtgagactgacaggcaacgggcaggaacagtgactggcttggcagtgaatatagctgccttgctctctgtcatgcttcagccttacatgcccacggttagtgccacaatccaggcccagctgcagctcccacctccagcctgcagtatcctgctgacaaacttnctgtntacctnggccgctctagaactagtnggatcc

SEQ ID NO: 3205 - DNA, 376 bp, Homo sapiens
  misc_feature 22, 216, 217, 218, 235, 238, 239, 244, 261, 270, 282, 287,320, 344: n = A,T,C or G
ctatagggcgaattggagctcnccgcggtggcggccgtggctgcccagacgtatttggcgtcgcagtagccgacaatggcggcctcctggcagcagccatcgcacatcaggttatccacgtagctctgccaaccggccatcttcgagcccttcgcactgcagcgcggacggcgaggagcccccgcgtaccctcgggccgcccgggcaggtaccctnnnttttttttttttttttnttnnatttntttttttttgccttaanaaataaaanaatctttattgntttanaagcaattttgagcaaacagacaggcaaatatntaaagataccatacatcaactagnggtttaaacatttgaagaaaaaacatgggaaa

SEQ ID NO: 3206 - DNA, 449 bp, Homo sapiens
  misc_feature 88, 330, 388: n = A,T,C or G
ccgcggtggcggccgaggtacgcagggagccacacttcaggtgcccagtgtccacactgactagtggtgactgcgttggacagtgcanatacagaacatttctgtcatcacagaaagttcctttggacagagccatgttaagtgatgttatcacaagatggacagaaacattcctgtttgatttatttttcagacccagtttgtgggagaaaaataatgatgctttacatatgtctcttgaatccttaatatgtgaatccagagataagtttatacgggaattatttgaatcatccacaaataacaacaaagatactaaacaaaaagcangaaaacttagcttcatcagcgtgggaaacaagtttaagacacagttaaattttgcttntggataaacttcgaagtacctgcccgggcggcccgctctagaaactagtggatcccccggg

SEQ ID NO: 3207 - DNA, 614 bp, Homo sapiens
  misc_feature 70, 137, 145, 156, 162, 163, 171, 189, 224, 228, 245, 250,254, 291, 305, 317, 326, 341, 342, 344, 345, 350, 361, 395,411, 420, 428, 431, 437, 438, 440, 466, 473, 476, 488, 500,518, 525, 534, 545, 549, 558, 560, 563, 571, 574, 579: n = A,T,C or G
  misc_feature 603, 606: n = A,T,C or G
aggtacagactacaatgccagtgtttcagtcccagacagcagtggccccgagcgcatattgagtatcagntgctgatattgaaacaattggagaaattctgaagaaaatcatccctaccttggaagagggcctgcanttgccatnacccacttggnaacccnngtcccagntcccccgcttcgaaatcntgattgcttggtgggaaatggctttaaaaatttancccnaaaccaccttatttaanagggnaaangttggaacttttttggaacttggccgaaagtttttgnaagtgccttggttntgtaattttcanatttcaagnaagggttccttaagnncnnggtgnatggggaaaantttaattttgggggggggtttccaaaaaaggggnttggccttaaaaaaanatttccaanaaagttanaancttttnntntagtaaggtaaaaccaaccttcctanaagaccnccnacccccaatttncaaaagaccttntttttttccccaaggggnaaaaatnggcctttgnatccccttccnattnttccccaancnttnggaaccanggnaaagnttttggttttcccttttaattttnggnggaagggg

SEQ ID NO: 3208 - DNA, 555 bp, Homo sapiens
  misc_feature 96, 109, 141, 158, 191, 223, 237, 246, 263, 285, 296, 298,312, 316, 318, 319, 325, 345, 368, 376, 380, 389, 392, 394,405, 410, 417, 428, 433, 435, 439, 441, 448, 450, 468, 472,479, 483, 486, 496, 500, 501, 504, 524, 530, 536, 538: n = A,T,C or G
  misc_feature 541: n = A,T,C or G
aggtacaaacattttacaaaaaagaacattaccaatatcagtggcagtaagggcaagctgaagaataaatagactgagtttccgggcaatgtctgncctcaaagacatncaaactgcgttcaggcagctgaaacaggcttnttttcccagtgacaaancatattgttggtttcagttaattacaaaaaccngattggtaaaaaatgtagggcttacttaaccnatatgggctcccangtttaaaancaaaaaaccttcccttncttttctttccacttccggggngattaaggggncncaattggtaataanccananngtttgnggtaaaaccctttcaatttncaaaaaaattataattttttaanaaaaaccncccnaaaaggggnccngnaattaaatccnaaaanccggccnttaattttttnccccncnattncnttaaaanancctttccaatttttttanaagnccccttnttcnacnaaaaattggntttnngtncaaaaattgggggaaatttntccaangttttnanccnttttggccaaaaaa

SEQ ID NO: 3209 - DNA, 575 bp, Homo sapiens
  misc_feature 148, 156, 165, 208, 212, 218, 262, 263, 266, 271, 310, 321,327, 333, 335, 339, 343, 354, 362, 373, 376, 389, 397, 400,401, 406, 409, 418, 421, 423, 427, 430, 439, 440, 442, 444,451, 453, 462, 472, 478, 479, 481, 502, 517, 519, 521: n = A,T,C or G
  misc_feature 530, 540, 554, 556, 564, 575: n = A,T,C or G
tcgccatcttgggtcatcgatgagcctcgccctgtgcctggtcccgcttgtgagggaaggacattagaaaatgaattgatgtgttccttaaaggatgggcaggaaaacagatcctgttgtggatatttatttgaaccgggatttacantattttgnaaatgaaantcacaaaagttgaaggcaatttaccaaatggaggagggaaaanaccngtaccnatgaaaaattctttgtattgggcttttcaacaaaggaacaattnncanactantaacaaaaataatggggaaaattaaccttggttgtattngaaccaattgnaagggnccaagncnccanaagncctttgggggngtaggggnaaggaaattanaanctccaaccgtggngtggtccnaanntaagnggngggttccanggngnaatnttntctttgggnncncnccttggncnttggtctcnttaaaaaaancatcgnntnggccggttttccaatttaaancccccaaaaaaattncnantttttttcnaatttaattntttttccttaaaancncccctttncaaaaaaaaan

SEQ ID NO: 3210 - DNA, 362 bp, Homo sapiens
  misc_feature 24, 34, 42, 43, 59, 72, 81, 95, 99, 100, 108, 120, 127, 133,136, 141, 144, 211, 219, 224, 240, 241, 261, 266, 274, 284,286, 289, 290, 300, 307, 311, 337, 340, 343, 355: n = A,T,C or G
cgcgcttggcgtaaacatggtcantagtctgttnaccttgtnntgaaaattgtttatcncggattcacaaanttttccacnaccaacaataaccnaagnncgggggangccattaaaagntgtaaanaagtcnctnggggngtngccctaaattggaagttggatgccttaaacctcaaccatttaaatttggccggttttgtcggccttnacattgancccgnccttttttcacaagtnncgtgggtataaaccccttgnttcgnatgccccnaggcctttgncnaannttaaaaattnggaaaanttcnggggacaccaaaacctgtccgtccgnggnggnaaggaaaggggnccggggt

SEQ ID NO: 3211 - DNA, 420 bp, Homo sapiens
  misc_feature 62, 232, 261, 287, 315, 373, 380: n = A,T,C or G
tatagggcgaattggagctccccgcggtggcggccgcccgggcaggtactctcaagacttanaagccatatggatagaatgaaataggaattggtggtgtcttggaatatctgcttcaggacgataatgaaactaatgatttagggcagtagaagaagccgtgggaggaactttcacatttggcgaagcatggaaatcccctctgcagttatgttttgccctgtgcatctcncggcagctggaggacgaaattcacatcangctgatgagttgtgtcaccgctcttnatcccccaagagctgtgatgaagaccangacaaacagtagattaacagtgctacctttttataaggctgattatgtttcctaaaanatgcttnaaagggaaaccaaaaccaaaaaaagaaaaaagagtggaaa

SEQ ID NO: 3212 - DNA, 477 bp, Homo sapiens
  misc_feature 103, 163, 177, 183, 198, 210, 218, 246, 253, 295, 304, 312,320, 335, 352, 373, 411, 424, 429, 441: n = A,T,C or G
aggtaccttctggacaatttccagaacattgaatttgcctatcactaagatgtcaaataccgcatttaaacccagcacagtgatcccttgctctttgcacagnatggccactgctcccagaaagatactcagcagccacccagaagggggaaggaaatgcgcntccccttccttggnttactnttcttcttaaaaatngccttttaacangttagccncaaaggggaaataggaattaaaccaaangaaaagnaaaaccagggggccaaccaaccaaggggaaggggtttcttgncaaccgggnccccggcnttccttangtaaaaccttaaggnttggggaattacccccnccccggggggccttggcaaanggggaaaaaatttccgggaattaatttccaaaaggccntttaattcccggnattancccccggttccngaaaccccttctgaaaaggggggggggggggccccc

SEQ ID NO: 3213 - DNA, 429 bp, Homo sapiens
  misc_feature 401: n = A,T,C or G
aggtacttctgctccacgaggaaggggatcgccaggcactaccgcatcaagcacaataatgtccgagcccagccagaaggcaagaacaacctcttcaagtgtgccctgtgtgcctacaccaaccccatccgcaaaggtctggcagcccactaccagaagcgccacgacattgatgcgtattacactcactgcttggcagcctccaggaccatcaagcgacaagcccaacaaagtgatcatcccatccccgcccaaggacgactcccctcagctgagcgaggaactccggtgggcagtggagaagaaaaagtgctccttgtgctctttccagtcgttcaagcaagaagggcatcgtgtcccattacatgaaacgccacccaggggtgttcccaaagaagcancacgccagcaagttggggggctacttca

SEQ ID NO: 3214 - DNA, 488 bp, Homo sapiens
cgcccgggcaggtaccccagctgttccggaggctgaggccaggaggatgggtggacgctgggaggtggatgctgcagtgagcagtgattgcaccactgcactccagcctgggtgacagagccagaccccgtcccaaataaataaacataaaaataaaggaaccagtttgtagaaagcgggagagggtcccattgaacttcaagccttcgagcagcagctgtggctggacaggttggaccagcaggctggagcagtcgccatcttggcagggatcattgaccctgatctatcgtcgggaggaggaagagcttatcttacgcagggagggcaggtggactatgtgtggactctggtgacctgtttgggtgccaggtgttactcccagggccacccgtaactgtgaatgtgcaggaaccctgacttgagaagggcctggccacggggggcttaggcccctggggaatgagaagtttggttcccggtacctt

SEQ ID NO: 3215 - DNA, 416 bp, Homo sapiens
  misc_feature 1, 105, 136, 171, 390, 398: n = A,T,C or G
ngaaatgaacaaatatttatttatcttttataacaagtaaggcaatgttgcttaaaggaagacaaacaaacataaaagattccgttgacaatgcattttttcatntgttcggcacaatgcttttgtcataatgganatgtgacagcaaactttccaggacattcagtcttnggcggcagcacttagggcagatgactggccgcttatagatgaggccaaagcaccaggtaggtggaaggttcttgtatcggttcgaaccccgacagcgcgccaacagacaacacgaggcagtggggagcaacatgctgttttaatgagcgcctgggtgcaggcgtgctgaggctgaaaatggcatcagcccccgcgtacctgcccgggcggccgttctanaactagtnggatcccccgggctggca

SEQ ID NO: 3216 - DNA, 348 bp, Homo sapiens
  misc_feature 244, 250: n = A,T,C or G
ccgggcaggtacttttttttttttttttttttttttttggaatgaacaaatatttatttatcttttataacaagtaaggcaatgttgcttaaaggaagacaaacaaacataaaagattccgttgacaatgcattttttcatctgttcggcacaatgcttttgtcataatggagatgtgacagcaaactttccaggacattcagtcttcggcggcagcacttagggcagatgactggccgctcanattctntatcttgtttcaggacagtggaaaagcttatagatgaggccaaagcaccaggtaggtggaaggttcttgtatcggttcgaaccccgacagcgcgccaa

SEQ ID NO: 3217 - DNA, 350 bp, Homo sapiens
  misc_feature 39: n = A,T,C or G
ccgggcaggtacaatgaaagtttcacataccggatcacntggctccaaagatgtcctttttggcgagatcaattccagaaacaacttttactctgagaatacgggactctcccgagtgttacttgctcaaatgccgagacgtctcatttaggagaatacaatattaaaggtttagtgcattaaaggaaagctggaaaactcaagggcagagcaagttctgaagagtatgcggaagtcgtggcttgcagccaagggtaactttccactgccgggtgacaaggtcacaggagagaagttttaacttgactcccaggaaagcagtctacacggttgttcctctctggaaatgg

SEQ ID NO: 3218 - DNA, 351 bp, Homo sapiens
aggtactccattctccagcattttctacatctggcaagctcgaaagtgaaaccctagtgggccatcatgcaggttttgagttatttactgttacagatgaggaaactgcgaagctacatggccacagtcaacaaccgacaacagaaggcaacatagtatggtggttaagagcaccgactctgaagccagcctgaatcctagagccagagctgtgcaacagcaggtaaatgacttatcctgtgcagtttcctccttaatggaaatagtgcccaggccacaatatcgcgagatttacacgtaaagctggaaacaactcccgtcctagagtaagcactgtttactattaagcag

SEQ ID NO: 3219 - DNA, 140 bp, Homo sapiens
aggtacgcggggatcttattctggccttggcggagttggggatggtgtcgcctagcagccgctgccgctttggcttgctcgggaccatttggctggacccagagtccgcgtggaaccgcgatagggatctgtcagggccc

SEQ ID NO: 3220 - DNA, 636 bp, Homo sapiens
  misc_feature 49, 109, 150, 163, 168, 179, 185, 190, 193, 207, 220, 254,259, 271, 296, 299, 307, 314, 319, 321, 323, 329, 331, 334,340, 346, 348, 364, 366, 373, 375, 379, 403, 406, 418, 424,431, 437, 442, 469, 473, 477, 478, 483, 495, 500, 508: n = A,T,C or G
  misc_feature 517, 524, 527, 538, 557, 561, 562, 576, 577, 602, 607, 610,613, 614, 615, 617, 622, 628: n = A,T,C or G
ccgggcaggtacaatcggtgccatcagcatctccaggtctccattttancttcctgctgatctgccgtttctgaatgagtctcatcctgcacttgcagaatggtgcagnttgggcagatatagtattccccattcctttccaaaagcctncctcgagccttantaaanttgcccacacnaaattntgtcnatngaaaaacccatttntttttcacaaggncgggtttcacaaggcaaaaaattcatttaaaacncttgntatggtaagatngaagggccttggccagggcaaaaanttngctaattnacaaaanggggncngnttttgngnggnttccgntaaaancnccctttcaaacaattntncaagggncntttncggggattcggggggctccccaanaanttactttcccangggacntttcccnttccanttccntttttgaaattgggttccacttggaanggcncccnnctccntttttactcccntttcncaaaaacntttaaaccnttccttnacnttccttgggancaaattcctttttttcccncaanncccccttggggggnnaccaaaccaaaacccccccccttgnaattncgnttnnncnttccngggggncctttccc

SEQ ID NO: 3221 - DNA, 283 bp, Homo sapiens
  misc_feature 14, 19, 20, 23, 25: n = A,T,C or G
ctactatagggtanatggnnaantnccgcgcggtggcggccgtgcagacctcctgtgtgccctgttcttcttgttatctttccttggctactgtaaagcatttagagaaagtaacaaggagggagcgcattcttccaccttctgggtgctgctgagtatctttctgggagcagtggccatgctgtgcaaagagcaagggatcactgtgctgggtttaaatgcggtatttgacatcttggcgataggcaaattcaatgttctggaaattgtccagaaggtacct

SEQ ID NO: 3222 - DNA, 362 bp, Homo sapiens
ccgcggtggcggccgcccgggcaggtacatgcccatttatgggtctggttggtctctacaggggcagcaaagggaaaggaggaagactttttcccagatctctctaccttaaagcatggagccaagtagcttgtattagtcctaggattccttttctcctgcaaaactggtggtagaaacagtggcatgcgggggatggtacatcacaaaatacattttgatatcccaaagaagcaagacttgcaagtaggcgttttaaacataactaatctacagctacaaagttctactcttgatagcatttacctttttggggagtctcccaggctccaaaggataaaagcagagtagaatcagtataa

SEQ ID NO: 3223 - DNA, 466 bp, Homo sapiens
  misc_feature 9: n = A,T,C or G
atacgactnctatagggcgaattggagctccccgcggtggcggccgaggtacgcggggagtgataacattagaaactcattggagcacgaaccctgttgtgaactgcctatccgaaggatctaggttgtgtgcttcgtatgagaatctaatgccagatgatctatcattgtctcactttgcccccagataagaccatctagttgcagaaaaataagctcagagcttccactgattctacattatggatatgtgccgccgaagcaagcacatagccctacttttacacatgcctagtgatgcttcatggacaaggcttggctctgttgagtccaactaacctacctgagattctgagatttctcttcaatggcttcctgtgagctagagtttgaaaatatcttaaaatcttgagctagagatggaagtagcttggacgattttcattatcatgtaaatcgggtcact

SEQ ID NO: 3224 - DNA, 565 bp, Homo sapiens
  misc_feature 132, 178, 219, 228, 244, 246, 257, 271, 283, 289, 290, 292,296, 307, 310, 343, 364, 383, 385, 404, 408, 414, 423, 429,433, 447, 454, 473, 477, 478, 481, 494, 500, 521, 525, 544,548: n = A,T,C or G
tatagggcgaattggagctccccgcggtggcggccgaggtactttttttttttttttttttttttttttgctgtcttcaggtttccctaagggactcctaaacaatctgagccttacagttattttagttgngattccctgttattatttatgagccatgttgatgtggcagtaaggngtgggacagggaggaatcattctttcatcctgtaattaggntttaaaggntttaagtgggccctgngncctttttgggncttgcaaatctttngggggctttttnaaggtnnancccnttccttaggtnganacaaaaaaaccaggggaagggggtctaaaattngggtattttccattctccctnacttttgggtttaaaaccncngattaaaaccccccccgcnttanccttgncccgggggncgggcncggnttcttaaaaaaacntaaggtnggaatccccccccggggcnttgnnaangggaaatttttcntatttnttaaaagccctttaattcctnattnccccgtcccaaaccccttntaangggggggggggcccccg

SEQ ID NO: 3225 - DNA, 155 bp, Homo sapiens
  misc_feature 20: n = A,T,C or G
ttagggcgaattggagctcnccgcggtggcggccgagccctgcaggcctctgccctgaaggcctggggcgggaagaaggagaacctgaaggctgcgcaggaggagtatgtcaagcgagccctggccaacagccttgcctgtcaaggaaagtacct

SEQ ID NO: 3226 - DNA, 119 bp, Homo sapiens
acttagggcgaattggagctccccgcggtggcggccgaggtacgcgggagaagagtcaggccggagagccagccggtaggtgaggttggcggcgaaccgagccggcagcgaactgctct

SEQ ID NO: 3227 - DNA, 605 bp, Homo sapiens
  misc_feature 218, 226, 227, 229, 260, 268, 290, 320, 343, 359, 368, 378,379, 395, 401, 406, 413, 417, 423, 434, 438, 442, 448, 456,468, 479, 485, 487, 495, 520, 526, 536, 537, 562, 575, 577: n = A,T,C or G
aggtacctattctttgcagtctcaggaattgttgacatgctcacctatctggtcagccacgttcccttgggggtggacagactggttatggctgtggcagtattcatggaaggtttcctcttctactaccacgtccacaaccggcctccgctggaccagcaaccaatccactcacttccttgctggtaatgccttctgtttccgggaagggggtggtnggttttanntnattcttcccccttaagaaagggttggaattnctttttcnccgggggaacccaaccaatttngtgggccttgggaaaaccttttttttcccngaaacccaagtttccttcaattnaatttttcttttcaanggggtaaanccccttgggnnctcctttgggccaatngaaatnttggngggaatntttnggttgnccttggttttnctcncaanctcttnttttttgnggtaaaacaacncccccgcaaantggggngnaaccccangaaaagtgggaattgggaattggtnccccanaaaccccttnnatttggtttttccaatttcaaaccncaattggtttggncntttttcttggccttggggccaaccttaa

SEQ ID NO: 3228 - DNA, 561 bp, Homo sapiens
  misc_feature 235, 269, 272, 291, 307, 331, 359, 370, 392, 396, 481, 533: n = A,T,C or G
ctacttagggcgaattggagctccccgcggtggcggccgaggtacatggctgtatttatagctctttgcaggtaaagcattatatctcttgcctctattttatttacaaaggctattttcttgcccattttaagtgcccctagtctgtggttctataccatcctatgtatagctttatcatagcactttctatacctgcttcctttactgaactctaagttctttaaagtaaggnatcacaaatttaattctcatatttacactgaaanaangggaggaaaggatgggaanggaagaaaaaaagttngcccatggccccgggtgccaagtngggctcaccacccttattaattccttangccattttttnggggaagggcccaaaaagccanggtngggaatccacctttttaaaggttcaagggaagtttcaaaggaacccaggcccttggggcttggtcctttggaaatttccctggtncttcttaccttaaaaaaaaattaccaccaaaaattttttggccccaaaggtngccgaattggggttgttaaaggccctgg

SEQ ID NO: 3229 - DNA, 351 bp, Homo sapiens
ccgggcaggtactctctggggcaagcaataagtaggaccttgtgtgcagtttcattgtagagacatgtatatctgaggaataaaacagcttgttctgtgtcagtctgagatatgtggagattttgttcctatcctatagctcttttgtattctttggcatattttatatcctggtagaagaaaacaagtgcttgtttccaattttcttttttcttatttgctctcaggtagttcttactccatacaacaaagactttttgtttgttgggctttttttttttttttgctctgtttcattttgttttagagacggggtttcaccatgttgtccaggctggtctcaaactcctg

SEQ ID NO: 3230 - DNA, 326 bp, Homo sapiens
ccgcggtggcggccgcccgggcaggtactatatctattgcgccaggtttcaatttctatcgcctatactttatttgggtaaatggtttggctaaggttgcccgcgtacgcggggtgagctccgagtcctctgctgctttgccttcagcctctcccaggactgggagctccctgcgaagagagagctggggctgcagagctgtattcaggtccaaggttctgcccttccttgagtggtctagaaggcactgcgtggcccctcagatgctgggacacaacagacccgggacccaagctgagctacccaccccttccatggactgaata

SEQ ID NO: 3231 - DNA, 345 bp, Homo sapiens
aggtacaggtggtagatgaagaaggggaccaacaacatcaagaaggaaaaagacttcggagggtagcttgcacctgtcccaactgtaaagaaggtggtggaagaggtactgccttctgtgactgggtggcacctccagggcacatttacacaaggccctgaatctgcagaggctgtttctcaagatgcccgtcatggtgtggcctgggccagctctggcttccacaggtccctgactgtcctcagagtggaacatgctcaacctcccgcccactgctctctctctgcccagatttcaggggtgccggtccccaaggcctgcccccttctttaagactgaactcaa

SEQ ID NO: 3232 - DNA, 495 bp, Homo sapiens
  misc_feature 5, 286, 481: n = A,T,C or G
gaatnggagctccccgcggtggcggccgcccgggcaggtaccccagctgttccggaggctgaggccaggaggatgggtggacgctgggaggtggatgctgcagtgagcagtgattgcaccactgcactccagcctgggtgacagagccagaccccgtcccaaataaataaacataaaaataaaggaaccagtttgtagaaagcgggagaagggtcccattgaaacttcaagccttcgagcaacagcttgtggctggacaggttggaccagcaggctggagcagtcnccatcttggcagggatcattgatcctgatctattcgtcgggaggaggaagagctgatcttacgcagggagggcaggtggactatgtgtggactctggtgacctgtttgggtgccaggtgttactcccagggccacccgtaactgtgaatgtgcaggaaccctgacttgagaagggcctggccacggggggcttangcccctggggaatg

SEQ ID NO: 3233 - DNA, 592 bp, Homo sapiens
  misc_feature 41, 57, 142, 145, 148, 171, 175, 180, 184, 190, 194, 197,198, 201, 211, 212, 224, 229, 238, 242, 246, 249, 253, 261,263, 268, 270, 295, 298, 301, 317, 322, 327, 339, 349, 350,355, 374, 377, 383, 394, 401, 403, 409, 414, 420, 427: n = A,T,C or G
  misc_feature 437, 442, 444, 455, 466, 477, 481, 483, 489, 493, 495, 496,515, 555, 562, 575: n = A,T,C or G
aggtacgcggggccctttcatcagtcttcccgcgtccgccnattcctccttcttggncgccgcgtccttggctggcgtcaagccttgggatgatgagacggacatggctcagctggaggcctgtgtgcgctctatccagctngantgngctggtcttggggggcttccaanactnggttncccntgggcnttanggnnttncctgtaaatnntacataatttcnacttngttttgggnttgntaanggnaacnaaccaatngntttgngngaacaagaaacttttgcctttgganggnaangggaagaatcatcccnaacgnttttngaaatgggaagnaacctgtttnncaatnaagattgtttccaaattanttngacaantctttttttcnaaacaanangaaatncttgnaaaagncccttgnaagtttgttngttgntnaccccctgganccccggggggnctggggacccnaagngntaaccnaccnannctttaacgaaaaaaccccnagaatttaaccaaggttattttcaaggttttccaaaattnccttttnattttaatttttncaattccaaccccaaaa

SEQ ID NO: 3234 - DNA, 518 bp, Homo sapiens
  misc_feature 72, 213, 217, 233, 274: n = A,T,C or G
ctatagggcgaattggagctccccgcggtggcggccgaggtacgtcatgtcttggtttagactacactttanaggggatatgacggtaggaaaacctggttggatgtattacagagacataaacatataaatgagtaagacccgagaccagaatgagggtaatggagatggaaacaaaaatcaaacagaaagagcttttaagtgaaaaattanattntttttaaaagggaccntgtaattttaaaatggacctctaaatgaatttgtattccanacaccctgaatgattgatgggattaatacaccgagatgggtattgggatattggcttatgacagaagatgatgcatttaattttagaaccatagtagacaaggtaacaagatttaaatcaggaagaatttaattgtaaaatcttatagaaaaatatggaagaagtcagctacacagagacagcagttgaaaatgaatcattcggctgggcatggtggctcacgcctgtaatcccagcacttcgg

SEQ ID NO: 3235 - DNA, 469 bp, Homo sapiens
  misc_feature 3, 31, 213, 221, 240, 250, 298, 437: n = A,T,C or G
ctncttagggcgaattggagctccccgcggnggcggccgaaaccagcttttaagtgagctcagcatattataaaggaatgaaagcaattagagcgtggactctaaaggtaggtgagacttgctgttccacttagaaacatagaaacataggaaactaaggactcgatggggacatcaatagtaggatggcttttaagagggctgaagtgtgtnaaatattncccattaagccttttgcancaactctgtnccaaaatctaaagtttgttgcagacctgggaattttaagttttggtanaaggataactgtagttattttttaaataaaatgattcattagaattctttggttctctcatgataatttagcaagtttgtctctttcagaaagaaaagtttaagtggggttaatgggtactactcgaattgtcaacgtnaaggagtcgcaggtcgcctggttctaggaata

SEQ ID NO: 3236 - DNA, 423 bp, Homo sapiens
  misc_feature 156, 268: n = A,T,C or G
aggtacttctgctccacgaggaaggggatcgccaggcactaccgcatcaagcacaataatgtccgagcccagccagaaggcaagaacaacctcttcaagtgtgccctgtgtgcctacaccaaccccatccgcaaaggcctggcagcccactaccanaagcgccacgacattgatgcgtattacactcactgcttggcagcctccaggaccatcagcgacaagcccaacaaagtgatcatcccatccccgcccaaggacgactcccctnagctgagcgaggaactccggcgggcagtggagaagaaaaagtgctccttgtgctctttccagtcgttcagcaagaagggcatcgtgtcccattacatgaaacgccacccaggggtgttcccaaagaagcagcacgccagcaagttggggggctac

SEQ ID NO: 3237 - DNA, 348 bp, Homo sapiens
  misc_feature 123, 164, 167, 213, 219, 227, 234, 259, 262, 273, 276, 311,312, 323: n = A,T,C or G
ccgggcaggtacaatatttttttggcaacatgctcgcattacaatgaaaacttctccacacagccacttcccaaatgccccttggtagcagaaatttcttttgaaaagtaattcactgtaganaacctcacatttaccttggatttttcccttctccccaaaanatnttgactactgaataggcaataagcaaaaaatttgggaaaagaaggncaacancattttgnaaaaccncccattttttttctgccttaaaagnagnagtatggcagnacnacccttggttaaaacttcaaacccacctctttacnnttattctgggncaaaccacaaaaggaaaccttaggg

SEQ ID NO: 3238 - DNA, 355 bp, Homo sapiens
  misc_feature 57, 174, 199, 291, 319, 329, 348, 351: n = A,T,C or G
ccgcggtggcggccgcccgggcaaggtactttttttttttttttttttttttttttnggaatgaacaaatatttatttatcttttataacaagtaaggcaatgttgcttaaaggaagacaaacaaacataaaagattccgtcgacaatgcattttttcatctgttcggcacaangctttttgtcattaatgggagatgngacagcaaactttccaggacattcagtcttcggcggcagcacttagggcagatgactggccgctcaaattctctatcttgtttcaggacagnggaaaagcttatagatgaggccaaagcnccaggtaggnggaaggttcttgtatcggntcnaacc

SEQ ID NO: 3239 - DNA, 363 bp, Homo sapiens
  misc_feature 189, 224: n = A,T,C or G
cgaattggagctccccgcggtggcggccgaggtacgcgggggctgatgccattttcagcctcagcacgcctgcacccaggcgctcattaaaacagcatgttgctccccactgcctcgtgttgtctgttggcgcgctgtcggggttcgaaccgatacaagaaccttccacctacctggtgctttggcctnaatctataaagcgggccaagtcatctgccctaagngctgccgccgaaggctgaatgtcctggaaagtttgctgtcacatctccattatgacaaaagcattgtgccgaacagatgaaaaaatgcattgtcaacggaatcttttatgtttgttttgtcttcctttaagcaacattg

SEQ ID NO: 3240 - DNA, 419 bp, Homo sapiens
  misc_feature 75, 89, 92, 96, 169, 187, 240, 286, 303, 386, 391: n = A,T,C or G
ccgcggtggcggccgcccgggcaggtacttttttttttttttttttttttgcttatcttttctcatgtaatgtanaaagtagcctcctnttntcanagggtaaatacaagggtcaatccctgatttactctaggttcttggtggagaacatacatactggatagagaanaaaccccttttcaccttnttgccctcaataaccatgaagatgcatcctaccaccgtcagggcaatcattanatagctgatcttcactcgcatcttgttctttgcagcatcaagcatntccaacgagacagtctntgggatttcatcttcctttttgaagcgacctgaccatatgaggatctttttctgccaatccgtaggtttgtgtaaaggcactntgttntaagtgcgggatggagcctccgggactt

SEQ ID NO: 3241 - DNA, 417 bp, Homo sapiens
  misc_feature 330: n = A,T,C or G
ccgcggtggcggccgaggtacgcgggagtgacgtctgccaggagccagaagacagaacctctaagtggctctggggaccagccactcttccgtggagctgatcgatatgactttgccatcatgatacctccaggaggcacggaatgcttttggcaatttgcccaccagactggatacttctatttcagttacgaggacggcacacaaaaggtgcagaacaatatctttcacatgtggcgatactacaactttgcccggatgaggaaaatggctgactttttccttatccaatcaaactataactacgtgaactggtggtcgacagcccanagccttgttattattctttctgggatcctgcaactgtattttcttgaagcgtctcttcaatgttccaacaactacagatacaaagaa

SEQ ID NO: 3242 - DNA, 447 bp, Homo sapiens
  misc_feature 40, 346, 419: n = A,T,C or G
cgcggtggcggccgaggtacaatattatcatccttggctngagaattgtaattaaaataatttgttgtttctcctaaccttgttgctactgttaaagattgttcatgattataaaatataataacatttcaagatacctaaaattcttctactactgtaggagcatgatgctattttaaaattatgttatgtcaaaagaaagaactttaatgtgtgtgtgtatatatatatatccaaaatggattctacagtgaaataaaacaatgagtaccttttttctgagctctggtttgcctttctttgactgtggccatcaccatgtcacccacaccagcagcgggaagtntgttcagccgtcccttgatccccttcacggagatgatatacaggttttttggctcctgtgttgtcagcacaanttgattacaagctcctaccggaagaccc

SEQ ID NO: 3243 - DNA, 482 bp, Homo sapiens
  misc_feature 45, 76, 100, 119, 146, 162, 164, 166, 173, 180, 207, 214,220, 224, 228, 235, 251, 256, 267, 274, 283, 285, 292, 302,305, 309, 358, 365, 367, 369, 382, 386, 390, 392, 399, 406,408, 409, 422, 427, 434, 440, 458, 463, 464, 469, 471: n = A,T,C or G
  misc_feature 473, 479, 480: n = A,T,C or G
agaagcgagatgacgaagggaacgtcatcgtttggaaagcgtctncaataagacgcacacgttgtgccgccgctgnggctctaaggcctaccaccttcanaagtcgacctgtggcaaangtggctaccctgccaagccgcaagganaaagtaatatactggnantngcccaangggcttnaaaggaccgaaaaattacccacccggnaacctgngtacgnaatngagngccaccnctaaaaaaaaattggnattanccccgccaagnaatatcnacgagccantngggatantcccggtggnaangggnaaacaaaaccaaccccttaaaaaccccccaaaggaaggggggccatgancctggtntngncgagggcaattcnccangatntncaattcnttataanannaaaattggtccanaaccngaacttnaagatnccaattggccacaatcanaaaannggttntncntggggnntt

SEQ ID NO: 3244 - DNA, 439 bp, Homo sapiens
  misc_feature 174, 224: n = A,T,C or G
ccgcggtggcggccgcccgggcaggtactccaaagattcaggtttactcacgtcatccagcagagaatggaaagtcaaatttcctgaattgctatgtgtctgggtttcatccatccgacattgaagttgacttactgaagaatggagagagaattgaaaaagtggagcattcanacttgtcttttcagcaaggactggtctttctatctcttgtacgcgggatntcataaatctcaagaggacctgggagaagcttctgctggcagctcgtgcaattgttgccattgaaaaccctgctgatgtcaagtgttatatcctccaggaatactggccagagggctgtgcttgaagtttgctgctgccactggagccactccaattgctggccgcttcactcctggaaccttcactaaccagatccaggcagccttccgggagc

SEQ ID NO: 3245 - DNA, 284 bp, Homo sapiens
cactacttagggcgaattggagctccccgcggtggcggccgaggtacgcgggtggaatgaatgaacgaaagggagagttggagttaataacaccttgcatagaataaaccccgtcggttcttaacccgaagagagtcgagacccagagcccttttccttccctgccacctatcacaccccatcctaaagtaaggtcagctaaataagctatcgagcccatcccccgaaaatgttgggttatacccttcccgtacctgcccgggcggcccgctctagaactagtg

SEQ ID NO: 3246 - DNA, 386 bp, Homo sapiens
  misc_feature 7, 186: n = A,T,C or G
tagggcnaattggagctccccgcggtggcggccgaggtacaaagagaagcagcaaaatatgaaaaaaggccagagctgtattctccccagtggctagcctaaccaaccccggagtgtccagacctagaaaagaaaaggctaacggtcctgggctcacccagcacaagtgcgagcctcaagggcacngaaacagcttacaaaaggccatttggtactatgtctggtgctggtattcttgtagactcattcttgatcatataattgaaaaaagacctctgcaagtgatgggggagaaaaaacaaacccacattctagggaaaggtgagttggtgactcagcagctcccgtctagtgtgacacttctggagaagagtagggggccatgg

SEQ ID NO: 3247 - DNA, 352 bp, Homo sapiens
ccgggcaggtacgcgggggagtcaggactgagcagagaatcctccaccacacacagcaggcactatctgccacagttcctttccccgatagcttcaaattctctgccttttgaaataagtctacttttaactggaataaataattggtcaatctctacctcaggtgaagaggaaccaagcctctggaaacacttaggaacaaactgtaaaaaccaaaggcaattgtgtaaccggttaaataagcttgctggactttgtccctgtgtatgagttagacaattctttcagctagtttgagtgacgcactgaccagtgaagcgcagtgaagcagtgggaaccggaatatccaaag

SEQ ID NO: 3248 - DNA, 347 bp, Homo sapiens
ccgggcaggtacagctaaggaagaaaataaactggaaggacccagagaaaaacactgaataacaatggatatgtgcaaagcactaaaatgggattaataagtatacaacactagggctgagttccacccaactagaaactaaaaacaatgaggctgcctctcactgttagctactaacctcttaaaaaaaaaaaaatcataaattctaggacctgggaaattgaaatacagattagcaaaaatccctcaaggaaacagatcatagattcaaatagttaatataatcaagtcttttttttttttgagaaacgtaacatctgatggctctcaaaatgtcacacgattat

SEQ ID NO: 3249 - DNA, 551 bp, Homo sapiens
agggcgaattggagctccccgcggtggcggcccgcccgggcaggtactttgttcttgctaggtatttcaaaactcattctaagaggaagactaagaggacaatgacacactgtagtgctgtcccaaataagcagagagagagtagaaaagcaagcagtgttgggaagggacagcagggagcagtggccaagtggagaaactgccaggatagaggaaaggagaattacctggaatggggaggagatggggaagacttccagaagagcagaagctaggaagcccctggggtggtgcaggcccacagtgggaaatggttcacggtgtgtctacatagcgatcttgtctctagacttcaaagagatgctgtagaggattggactgcagtttttcctcatagccaaacagctggaagccagttcccagaagaccaaactgcatgccccaatcgccaaggtaatttattcttattacttgatgtcctaaagcttctttgagatttgctataaaatttcctatgatggtagaacgcaaatgtccaaccatgaaatttt

SEQ ID NO: 3250 - DNA, 546 bp, Homo sapiens
  misc_feature 531: n = A,T,C or G
ccgcggtggcggcccgcccgggcaggtacatctctagatgatcacgaatgtcaaatatcacactacactgtgatatggggattccccttgggggttttcatgtgtatagggtgcctgcagctacactaaacatcttaaagctaccacaatgttcacttcatatttttgctttttataggctttcttggtctcctcctatgttcccatcattttcttgctttgaatctgtaagaatcgagttgaatcttctccattttaaattttccataggctgagaaactgtttagccaagtttggataaaattgtatccaaagtaagagtatacaagctatgggcaagtccaaaatcaagctgttcacaggaccatgttctctctaaaggttctaggagagaatccctcatttccttccagcttctgggtggctgctggcattcctgggccggtggctgcatcccttcaatctctgcctccatcttcacatgaccttcttccttgggtttctatgggttctttcctgtttttaatgaanacattttcattggga

SEQ ID NO: 3251 - DNA, 364 bp, Homo sapiens
cgaggtaccttgcttggtcactcagtgctcatggggattgttagaagctttactttagatcccacttctgatgccatctttcagtccagaggaaataagcatccttccatgcaaggggttcttaaattttgttgttacttttatttgtttgctttcttgcttgtttttatcttttggccttttggtgacttggtgctccttggagtcactggagttctactttgaatcccactctgacatcaatcgactgccttaattcctggtccagctgcccgaccctgactctctcccgctcttttcctcaggtcgaaggtttcctttaagatcacgctgacgtcggacccacggctgccgtacctgcccg

SEQ ID NO: 3252 - DNA, 392 bp, Homo sapiens
atttggcgaattggagctccacccgcggtggcggccgcccgggcaggtacggtccactagcacagaaactatggtatgggcatctgagagtgccctgtaagcaggtgtggccaggctggggccctgggagaggcaagcagactaaggagtgctgagacaaagtgtctcacaagggcaagtggagcctagagagatagctgtccctgccctctgggctccacatcacctgacttgctgctccaccactttgcttgtctcctgggtgctccatcccagagacatgtgagttagcaatcacttagtgtaatcagcccaggatggagggtctgtgctgtgggcccaagccagggttccctgtctggtgatgagtaagtggagggtgtgtggtacct

SEQ ID NO: 3253 - DNA, 517 bp, Homo sapiens
ccgcggtggcggcccgcccgggcaggtactttttttttttttttttttgagaccaggtctcactatgttgcccaggatggtctcaaactcctgagctcaagtgatcctcccgccttggcctcccaaagtgctaggattacaggcgtgagccaccacacccagccaagttccatccacttttgaaaacaagacatttatgtataggaagagaattatggaaacactttgtaaaacatccatttattatatccaatgctaaacactaccacttggactctaagatatgtttatgcctctctgtttattctagttttttaaaaatcaaatatatatacctacgggcataaaacctctatcgttattacttttatgtgtttaaacaaacccctacactttgagtctaactttctactcatctgagctgttttctactttatgaaaaagtggcagactgggattaaaatttggtctaatacaaaacctcatcccgcgtacctcggccgctctagaactagtg

SEQ ID NO: 3254 - DNA, 516 bp, Homo sapiens
  misc_feature 332, 383, 436, 469, 493: n = A,T,C or G
ccgcggtggcggccgaggtacagcatggctcaaggcctcaggcaaacaaaagcactcttaccagatagaacattatgagagctcagttcccagagctgcccaaaggctagtcaggaaaacaggaccttctggggaacttacagagtttgagcaataggcctgttatgtcaaccccaagcagagtggatgaagacaaggcaagggacaggctgacagctgattcctgggttcctctgatgtttacaggagagatcaagcaaaggagacaaaaaaggactgttaacacagggggaaaccaacactgaaaactcctggaaatgaagagttttcangaatgcgttgtttgctatccttggagctgaatggctatcataatgatgatnacattaattcaagattttaaaaatttaatcattagatgtgatacaagagaccnggaattaggatcttaaggggttgcactcagtantacctgcccgggcggccgctctangaactagtgggatcccccgggcc

SEQ ID NO: 3255 - DNA, 602 bp, Homo sapiens
  misc_feature 591, 602: n = A,T,C or G
ccgcggtggcggcccgcccgggcagggtactttttttttttttatcttagagcactataactgaatgtctttgttgtatcattgtaaacacagcaataaatatgcagttcttccctccctttttctccaccagatgttaacagggaacgacatgaagacttttacgcagagcttaaaacagtcaaccctctctgttcttacaagtttttgccccatcaatggctaaataaaagatgttgaaaactgtggaaaaaagtagaatgtatttaattagcaaacatttgatgagtggtatcatgctatcgagttggaatttaaggaagggaaattgaagatgtgttagatgtggtggtttcttcctcaagaagctcatggtctaatggtcatgctaaaaatgtgtatcactgagtaatgtggtagctatcagacttaaagcactgtaggcttggcatggcggctcatgcctataatctcagcacttcgagaggctgaggtgggagaaaagctttaggccaggagtttgagatcagcttgggcaacacagtgagatctcatctctcaaaaaataaagcaaaaatagttaggtatggngggacctcggn

SEQ ID NO: 3256 - DNA, 656 bp, Homo sapiens
gagtgaggcgtcggctgtgtttctcaccgcggtcttttcctcccactcttggctggttggaccccgctatggaaaagttggcccctgagccagagctccagcagccttgttagggcgtggcctgaggcttggataagtgggatgtaaaacgaagatcaggagcagatttgaagaattacaaagtgaattggtgccagtcagcatgtcagagacagaccacatagcctctacttcctctgataaaaatgttgggaaaacacctgaattaaaggaagactcatgcaacttgttttctggcaatgaaagcagcaaattagaaaatgagtccaaactattgtcattaaacactgataaaactttatgtcaacctaatgagcataataatcgaattgaagcccaggaaaattatattccagatcatggtggaggtgaggattcttgtgccaaaacagacacaggctcagaaaattctgaacaaatagctaattttcctagtggaaattttgctaaacatatttcaaaaacaaatgaaacaaaacagaaagtaacacaaatattggtggaattaaggtcatctacatttccagaatcagctaatgaaaagacttattcagaaagcccctatgatacagactgcccaagaaatttatttcaaa

SEQ ID NO: 3257 - DNA, 187 bp, Homo sapiens
tatacgactactataggggcgaattgggagctccacccgcggtggcggcccgtggtgggtgaagctgtagcccgcgctcggtgaggatcttcacccgcgtacccgctaaaactgcacagctcgaccttcatggtgacagctccacggaaagacaaaagatggcgaaaaaaaaaagccccgcgtacct

SEQ ID NO: 3258 - DNA, 769 bp, Homo sapiens
  misc_feature 21, 618, 649, 673, 680, 700, 728, 743, 744, 751, 753: n = A,T,C or G
tatatggcgaattggagctcnccgcggtgggcggccgcccgggcaggtacccctctccccttaacgcatacacacactctccctcacacacacacacaccccacatggaaaggtgctgtgctacaggcgggccatggccaccttgaagcataaccacacatttgcactgcatatcactttgggatggggtccccccccagaaggagaagtgggcatctccccttgcccagcctgcacactgggctggcagcaggggatgagaagcccaggtcagctcccagggtgcccacggtcaactgcttctgggtcctgggtaaatccagcccggcccgggttccctgtggggatgtgaggcggccacggctctctcggcccaaatgtggatccgtggtggatgaagtccgttcttcttcaagtgctatcttgatttcttcccaggccgggttccctccaggagtggtgaacattgtgccaggattcgggcccacagtgggagcagcaatttcttctcaccctcagatcaacaagatcgccttcaccggctccacagaggtaaccctcccacagggtgctggggaaagtgaaaggggcgtgttatttgacacccgtgagcttttnctttgacaggctttaatatgatttggttttnttctaaatttgaccatgttttaantaccttnggccgctcttagaactaagnggatcccccgggcttgcaaggaatttcnatatcaagcttaatnnataccgncnaaccttcgaggggggg

SEQ ID NO: 3259 - DNA, 487 bp, Homo sapiens
  misc_feature 130, 267, 437: n = A,T,C or G
cgcggtggcggcccgaggtactttaaagtttttggttagcaactgtttttgtctgttgtgggtagatccattctaccttcagccttcgggtcctacagttaggctctacttccctgtcagctcgcctcangtggggatagtcagtgggacagcaggtgcacatcctggccaggcctcctgcactgccctgaagggccaccctggtggcactgaccgtggatggcctgtggtcgtggccctttctcctttctctgtctcatgtcttgnctgtatgctgcatgttccttgaagattgcctctttttaataaacttatttttttaatgataaacacttatttaacagtttaatgtttatgtttcctttttactcattagggtgaaaatgggatggaggattgtgtcatggccctagaaaccttgtttaagtgttctgctntctctttgcagacttatggtaagatgattggcttctttctagtacctgcc

SEQ ID NO: 3260 - DNA, 499 bp, Homo sapiens
  misc_feature 355, 411, 464: n = A,T,C or G
ccgcggtggcgggccgcccgggcaggtacctgcacgatactattcatttcagtttcacacaaaccaacggataggtttgaacactatttttatccccatttcattcacccggaaacttgcttcatgaatttaagaaatttggcaaagtcatgcactactgagtggcaaagtagggaacagaaaccaagtttttgggctcaaagccacactcatgaccactgaccccgactatgtctctgcctcccctgctatcctacccaaaacctgcctgatgatgcccttaagtccaagcagaagaagttctaattcattccttttcttcttggttttttttttttttttttgagacggaatnttgctctgtcacccaggctggagtgcaatggtgcggtctcagctgactgtaacctncgcctcctgggttcgagattctcctgcctcagcctcccaagtagctgggactncaggcacccaccaccacacctggctaatttttttt

SEQ ID NO: 3261 - DNA, 651 bp, Homo sapiens
  misc_feature 567, 583, 611, 637, 640: n = A,T,C or G
cgaggtacttccagggagacaccgattataagaagagaaactcagcgctggggaagaagacaaataaaaagaagtgttaagaattgcctttgggactctgaaggctgaagaattgatgaattgcaagtttgtgccccatagctgcacagaatgtttcatcattactaacaggatattcctcatgacattgctgtctgatctttgaccatcagtctgtgacctgccccttctctttacgtaagtaaaagtgatttctttacctttaaaaaaaaaaagtaccaacgcagggctgagccccagctgtccttgacagggtgtctctgccagcctctgcagggaagcaggactgaccaaaatcagccccggggcccccctctggctgccctgcagtcctggtgtcactgccgagtgctccggggaaaggactgtcaggcacaatgtcactgacaaagtctgtggagttctgggggctgttacaagtcctgggcgtaagtggcggaggcatgtcacccataaattctgcattctctgcacttgacctgttcgggacttgctgaatggcatggncattgaccaaggcttntggggagatactattattcgccaccatnttttaaaatagcttgaatatccaggnggnccgtttttttt

SEQ ID NO: 3262 - DNA, 457 bp, Homo sapiens
cgcggtgggcggcccgcccgggcaggtacgcgggggaagtggttggtgccttagcaactaaagctggcaactgggacatcgtccggtgctgcaggtctcagccgaagggcgtcggaaactgcgctcgcatcgagcagtttccagcctcctgggtaaaggagcagtctcctcccttgcttgggactctggacgcatctcattccggtgaaagtaagggacagcttaggaccagaagcctttcgcggagaaaaggctgacatgcccgtcctatatgacaggttactgaagctaaaggagatgtttaactccaagtttggatctattcccaagttttatgttcgagcaccaggaagagtcaacataataggagagcatatagattattgtggatattctgttcttctatggctgtagaacaagatgtgctaatagctgtagaacctgtgaaaacgtacct

SEQ ID NO: 3263 - DNA, 471 bp, Homo sapiens
  misc_feature 171, 185, 263, 299, 358, 373, 406: n = A,T,C or G
ccgcggtggcggcccgaggtactgctgattggttggggatgcaaccatcggggtgtggaagctggtcctggtgcactcagttggcttctgggtgggagccacggaagagttgctggtcccggtgggtccatctgactttgaagcatcttttgcagtttgaatgtttccagngatgtctgagcagntcacagcaacaggcacaaaagttgtccatacgtaagctgtggtggtgagttctctttaagtctagattaagttgtccngcttcagcttgcagggcttccggaaaagggcagttnttgttctgtaatgccaataggtttggaatgaattcttctctttcttcagatctttaaantatatttaaagtttntgggcctttttttcataaggctaaaaaacccantagtctatgcacattttcaaatatgatgctccagccaaagccttgggtaaaataaccaatgtttc

SEQ ID NO: 3264 - DNA, 551 bp, Homo sapiens
  misc_feature 533: n = A,T,C or G
ccgcggtggcggccgaggtacagggctgggtcctggggacaaagcagtgggcaaggcagagtgccatgttatagctggcgcaacagccaagggcagcagatgactgggagaacaaggtgatttcagagagtggtctatgctaggaagaaaaaacaggtttgtccttaggagtgagggttactttagatagggtgaccagtgagggcttcttggagacggtggcgtttgaactgagaccttaatgccaagaaacaacccccatagcaagacctgggcacagaggggcctacaaaggcaacggcccagtgccagggactgagcttgggagctgaggaaataaaagccagcccttcccagctgtccattgcttgatctcatgcttttttctctccacttgagccagcctgagatagctttcgccactagccctggagaaggcaaggttttctgtccacaccctctctctgcttgcacactctgggccttcttagcttgatcctctttcctgtccaacagctgagggtccatcgtanctgcaaacatttgtggac

SEQ ID NO: 3265 - DNA, 386 bp, Homo sapiens
cgcggtggcggcccgaggtacagggctgggtcctggggacaaagcagtgggcaaggcagagtgccatgttatagctggcgcaacagccaagggcagcagatgactgggagaacaaggtgatttcagagagtggtctatgctaggaagaaaaaacaggtttgtccttaggagtgagggttactttagatagggtgaccagtgagggcttcttggagacggtggcgtttgaactgagaccttaatgccaagaaacaacccccatagcaagacctgggcacagagggacctacaaaggcaacggcccagtgccagggactgagcttgggagctgaggaaataaaagccagcccttccccagctgtccattgcttgatctcatgcttttt

SEQ ID NO: 3266 - DNA, 515 bp, Homo sapiens
ctatagggcgaattggagctccccgcggtggcggccgcccgggcaggtacaccgactacggcggactaatcttcaactcctacatacttcccccattattcctagaaccaggcgacctgcgactccttgacgttgacaatcgagtagtacccattaaccccacttaaacttttctttctgaaagagacaaacttgctaaattatcatgagagaaccaaagaattctaatgaatcattttatttaaaaaataactacagttatcctttaccaaactaaaattccaggtctgcaacaacttcgatttggcacagagttgctgcaaagcttaatgtgtatatttacacacttcagccctcttaaaagccatcctactattgatgtccccatcgagtccttagtttcctatgtttctatgtttctaagtggaacaagcaagtctcacctacctttagagtccacgctctaattgctttcattcctttataatatgctgagctcacttaaaagctggttt

SEQ ID NO: 3267 - DNA, 479 bp, Homo sapiens
  misc_feature 59, 81, 123, 371, 373, 449, 464: n = A,T,C or G
ccgggccaaacccacagcgcagggccagggacacagggagtcagcccgggcaggagctngtcctcaccctgtccgggcggntgtgagacagcatgtcaggggatgaggagtaaccaggcctantgtcaaggccaaactgtgtcccccaaaatgcataaagtcctaacccccaggacctcgggatgtgactaattgaaaacagggtctttacagaggcaattaagttaaaatgaggccatcggggtgggcactaatccaatctgcctggtgtccttataagaagggagatgaggacacagacacagtcagcgggaagactctgtgagggcacagggggaaggcggctgtctgtagcccaggaacgaggtctnangagagcccagccctgcccacaagcttgatattggacttctggccttcagactgtgagaattctccatttctgttgnttaaggtgcccagtntgtggtgctttgtta

SEQ ID NO: 3268 - DNA, 390 bp, Homo sapiens
ccccgcggtggcggccgcccgggcaggtacgcggggaggtcccggaagagccgcttggagcgcggcacgttcagccctgagagcgcagcggggacggaggaagtgctgtggaacatcagatagaatggatagcacagcccaaattttacaaaaaggattttaaaggaagatctcaatggtggaacactagaggctttcctgctaaagttaagaacaagcaaaggctgacgcagttttggcatacaggaagtgttggagctgagactcgaaactgtcccccaggccttggccatgctgataaatatctaggccctacaggagttcgtgtccatgaacccagtaaacgcaattcctcagccaaaaaaaaaaaaaaaaaaaaaaaaggtccct

SEQ ID NO: 3269 - DNA, 494 bp, Homo sapiens
ccgcggtggcggccgaggtacccccattctctgattataaacagataaacccaaatgtggatcatccttggaatacccccattctccttgcctcttagcatgtttgatttaagaaaagcctccaggaaatcttgagagcctgtcttggcataatgcagtgtcacctgtgccaaccatggggtgtcccgtgagtgtgagtgtggcagtgagaagaagcatcgagggcgaggggaatatgaaagttggtcttcacctaattacctgtttggtttggattttcaagagatgattgggcttcttagcttttctgaattctgcagtattttctaaacaggatagattatgatctcggtccccatccatcctaacttctgagttcatctctgtctctgctttacagtctttaattttttgttgttccttcatttttttctttttaataagacatagcagaattccttaggtatgggatttatgagaccagtacctgcccg

SEQ ID NO: 3270 - DNA, 508 bp, Homo sapiens
  misc_feature 491: n = A,T,C or G
ccgcggtggcggcccgaggtacacagcagtgctgtatcaaagaaaaaccaacacacacaccagcattctcaaatccagttcagaaaaataaggaagagtgacggtaaaatgaggcctatgattaacggtaagtttgtgagtaaataatctcaaggaggcaagtctttgcaaatgaagaacaggggaaaaaaaactgtgaaccaatcaagcctcttttcttaaaaattacccagtctcaggtatttctttatagcaatgcaagaatggcctaataccactgtcctatggggaactccagcgggaggcctgggacacagagctgccaatcagagtcccagggatttgactggttcaggaatgggcaggtgacccaacttgggaatggtgaaactctggaagaggctcggctgtaaggcagctcagctaatggcaatggctgaaagtgctgaagccactccaaggatggattcttcctgaggactgcaacccanaggaaggtacctgcccg

SEQ ID NO: 3271 - DNA, 676 bp, Homo sapiens
  misc_feature 581, 599, 653, 657: n = A,T,C or G
ctatagggcgaattggagctccccgcggtggcggccgaggtacagatggctggttaggattctcggcaccattttccgtttctgcgaccggtcggtgccccctgcccgggccctcctgaagaggcggcgctcagacagcactctgttttctacagtggacactgatgaaataccagccaaaagaccaagattagattgctttattcaccaagtgaaaaacagtctctacaatgctgccagcttatttggattcccattccagctgaccacaaagcccatggtaacttctgcttgtaatggaacacggaatgtggccccttcaggagaggtattttcgaactcttcatcttgtgaactgacaggttctggatcctggaacaacatgctgaaactgggtaataaatctcctaatggaataagtgactatccaaagatcagagtgacagttacccgagatcagccacgcagagtcctgccttcctttggttttactttgaactcagaaggctgtaatagaagaccaggtggcccgccgccatagcaaaggtaatccagagagttctttaatgtggaaacctcangaacaggctgtaacaganatgatttctgaaaaaaagtggcaagggtctgaggcgtcccattgtacctgcccnggcnggccgttttagaactagtg

SEQ ID NO: 3272 - DNA, 817 bp, Homo sapiens
  misc_feature 222, 260, 420, 520, 527, 555, 653, 668, 677, 690, 692, 694,701, 713, 767, 771, 786, 792, 796, 799: n = A,T,C or G
ggcgaattggagctccccgcggtggcggccgaggtactgtaggggatcgcacaccttggggtggaaacagcagctctccggagttgcatgggagccatgggcagtggtcctggctggtgaaatgattctagccacgtggcccacccagggggcaaaacaatagaaaccttcagaaatgaaacgtcacctggctgcaagaagatagtcccacaggcgccctanagatggggatgccaagtggcttctcgggaagctgtaanaatccacagggcattgtaagatggagggaaatattaagttttcttcgtaaagaggtgaggggggcgagagcagcaaaggacactggaaaatgagaagcatggatgggaagtgtcgcattgagtataatttggaggtaaaatctccaacaccgtaactgantggcctggggacctgatagaaagccttgctcaggactaaggcagagttcccagttatatcccagatacaaagagaccaaggaacacgcttgtaatcacancacttanggaagcttacgcgggtggatgacctgangtcaggagttcaagaccagcctaccaacatggtgagacccccatctctctaaaaatacaaaaattagccaggcgtggtgcacatgccttttattccanctacttaagaagctnaagtggganaatccttgacccngnangcagggnttgcaccagctnaatcgtaactgccgggcggccctttaaaaatagtggatcccccggctgcagganttcnatttcaagctatttnatcccnccanctngagggggggcccggaccc

SEQ ID NO: 3273 - DNA, 643 bp, Homo sapiens
  misc_feature 612, 631: n = A,T,C or G
ccgcggtggcggccgaggtacagaggccggtgggctccctgacatcccttccaggcaacctgaaagcactgaaatagcttatggccctgtgccagggaccttggcccaagctgctgacctccagggtggggagggagctcccccaggagaagagtcactcagacagcagtatgagcaagccagccagcagctccgtgcctgcacccagctcaggggaatcccagggggttcagatgcccaggaaggaaaaggggacagcgctactgctatggaatgagaccaccacttctcctgttgtccttcccagcttctccccaacctccccttttccctagtttataagacaggagaaaagggagaaagcaaaaagctggaaagaaacagaagtaagataaatagctagacgaccttggcgccaccacctggccctggtggttaaaatgataataatattaacccctgaccaaaacgactggtgttatctgtaaatcccagacattgtgtgagaaagcaccgtaaaactttttgtcctattagctgatgtgtgtagcccccaatcacgttcctcacgcttacttgatctattatgaccctttcacgtggaccccttanagttgtaagcttttaaaanggctaggaattt

SEQ ID NO: 3274 - DNA, 491 bp, Homo sapiens
atagggcgaattggagctccccgcggtggcggccgaggtacgtcatgtcttggtttagactacactttagaggggatatgacggtaggaaaacctggttggatgtattacagagacataaacatataaatgagtaagacccgagaccagaatgagggtaatggagatggaaacaaaaatcaaacagaaagagcttttaagtgaaaaattagatcttataaaaggaccatgtaattttaaatgactctaaagaattgtattccagacacctgaatgattgatgggattaatacacgagatgggtattgggatatggcttatgacagaagatgatgcatttaattttagaaccatagagacaaggtaacaagatttaaatcaggaagaatttaattgtaaaatcttatagaaaaatatggaagaagtcagctacacagagacagcagttgaaaatgaatcattcggctgggcatggtggctcacgcctgtaat

SEQ ID NO: 3275 - DNA, 552 bp, Homo sapiens
  misc_feature 552: n = A,T,C or G
ccgcggtggcggccgtccacaaatgtctgcagctacgatggaccctcagctgctggacaggaaagaggatcaagctaagaaggcccagagtgtgcaagcagagagagggtgtggacagaaaaccttgccttctccagggctagtggcgaaagctatctcaggctggctcaagtggagagaaaaaagcatgagatcaagcaatggacagctggggaagggctggcttttatttcctcagctcccaagctcagtccctggcactgggccgttgcctttgtaggtccctctgtgcccaggtcttgctatgggggttgtttcttggcattaaggtctcagttcaaacgccaccgtctccaagaagccctcactggtcaccctatctaaagtaaccctcactcctaaggacaaacctgttttttcttcctagcatagaccactctctgaaatcaccttgttctcccagtcatctgctgcccttggctgttgcgccagctataacatggcactctgccttgcccactgctttgtccccaggacccaaccctgtacctn

SEQ ID NO: 3276 - DNA, 525 bp, Homo sapiens
  misc_feature 297, 496, 497, 499, 500, 505, 508, 509, 510, 511, 512, 513,514, 515, 522: n = A,T,C or G
cgcccgggcaggtacctaagtagacactttttgtctatcttttcgtctgctaaagagagagcattgtgtaggagctctttagagttgctcttagaagcatacttttgtggaagagtgggaagaaataatcataaatttatttcacagttgatgtgtgactactttttcaagtgtatgacttgtaaaagtgggattggtgtatttgagttagtggatgaccattttgtagagttgaatgttggtgtcactggccttcctgtttcagattccaggatcatagctggtcttgtgcttcanaaagatttttctgtgtacgcggggagccaaggagggagggtcttcctttggcatgggatggggatgaagtaaggagagggactggaccccctggaagctgattcactatggggggaggtgtattgaagtcctccagacaaccctcagatttggtgatttcctagtagaactcacagaaataaagagctgttatactgtnnanntactnaannnnnnnnaaaagtncct

SEQ ID NO: 3277 - DNA, 567 bp, Homo sapiens
  misc_feature 32, 146, 159, 166, 169, 178, 185, 208, 210, 219, 225, 236,248, 252, 259, 262, 286, 293, 296, 298, 309, 312, 325, 340,358, 362, 388, 391, 474, 476, 481, 485, 488, 501, 514, 530,534: n = A,T,C or G
ccgggcaggtacctggccgtggtggcctcctnccacaagggcaagaaagacacaagtatcacgggagagctggaaaagcagcttctacaagcaaacccgattctggaggctttcggcaacgccaaaacagtgaagaacgacaactnctcacgattcggnaaaattnatncccgcaatnaattttntgacggtcaacggggtttacatncngtggggagnccaacnattgaagaacnctatctgctaanaaanaatcacnggngcaaattcgcccaaggccaggagnaccgagnagngnacattccacantcnttttacttaccantggatttgcctgggnagcccaaaggtagtaagnatgnaggaaggtggacctttggctttttgngangggggctttcaaaacaaacttaccaccttttccctttttcacaaattgggctttttgtggcccccatcccccaaggccaggcncncaagnggantgnattggaaggaatngttttccccaagnggaaaaaccccggttngggnagggccccattgggccaaatttcaattgggggg

SEQ ID NO: 3278 - DNA, 619 bp, Homo sapiens
  misc_feature 164, 172, 174, 179, 214, 235, 283, 292, 294, 311, 332, 341,344, 370, 392, 397, 412, 418, 436, 457, 495, 502, 509, 524,532, 536, 553, 566, 577, 578, 581, 585, 586, 608: n = A,T,C or G
aggtactgtgggtgatatttgcctttagtgcactcttctccttcagagtaaagtggttggcggtggttatcatgggtgtggtgctacaaggtgccaacctgtatggttacatcaggtgtaaggtgcgcagcagaaagcatttaaccagcattggctactttcantatttttngnaaaangccaagtttttttaaagaacaaaaaccacttgggnagattgattcaagaactttcnctggaaataagaaggaaaaggcctttaatggtggcctttttgttttancattttggngnggaaaccaaaaccttgnaaaggaaggatttccttttgnaccttccanacnccttttttttaagaaggccttttaangttcccaattggttttggctanaccgnaagaggaaggttggntttggnggccttttttggtttttnttttccccaacctttttaaanaaaaaacctttttaaatttttaattagaaaagacatanacatagncatatantgatatttatacaanaaagaganaaanaggggttttccccttgnccccctgtggggnccgagtcccgnnttnttannaaaaccttaagttggggaattnccccccccggg

SEQ ID NO: 3279 - DNA, 702 bp, Homo sapiens
  misc_feature 82, 147, 163, 165, 172, 174, 180, 193, 205, 208, 214, 223,241, 244, 254, 257, 266, 269, 289, 292, 297, 302, 313, 321,324, 338, 361, 366, 384, 393, 442, 446, 447, 468, 476, 490,517, 520, 525, 529, 530, 536, 541, 558, 563, 574, 576: n = A,T,C or G
  misc_feature 580, 594, 597, 609, 619, 642, 648, 671, 680, 684: n = A,T,C or G
ccgggcaggtacttataccagctaagcagcagtaaactgaaagtaaaaagcatagctagctagagagatgaatagacagcantgtttatgtcctgcagccagatgacaatgcactgttgcagaagaatgagtttcagacctttgcanctttgggtcttctctnanctgctgnangtctgnttttccagggggncggggggccctnggntgttcngtgggttgntttccattaagggtaaangantcccccattnccnactttaccncanctcttttctcccaaaaaacnttnggtanacggnaccaaaaccanataaatgnaanaaaccaaatcctgnatgggtaaaattggtaaccatgnaaggncttttaaccaaccaaccnattgggggntggcacccatttaatttctctggttatggggggaaaatttccaattggnaaannataaaaaaggtcctttggccntctccacnccttgggttggccncttaaaaaaaattgggaaggccttccncancctcnatannaaccanccaantttcttgggtttttttntgtcncctttctttgnangganaaggaaaccttggnaanccttggccccanaatttggggnacccttccttaaggttttttccnttggtngggaaaattaatttccctttttnaataccaancaantttcttaaggaaaattgg

SEQ ID NO: 3280 - DNA, 442 bp, Homo sapiens
  misc_feature 207, 214, 218, 221, 232, 248, 250, 289, 442: n = A,T,C or G
actacttagggcgaattggagctccccgcggtggcggccgcccgggcaggtactttttttttttttttttttttttttttttggaatgaacaaatatttatttatcttttataacaagtaaggcaatgttgcttaaaggaagacaaacaaacataaaagattccgttgacaatgcattttttcatctgttcggcacaatgcttttgncattatngganatntgacagcaaantttccaggacattcantnttcggcggcagcacttagggcagatgactggccgctcanattctctatcttgtttcaggacagtggaaaagctgcttatagatgaggccaaagcaccaggtaggtggaaggttcttgtatcggttcgaaccccgacagcgcgccaacagacaacacgaggcagtggggagcaacatgctgttttaatgagcn

SEQ ID NO: 3281 - DNA, 626 bp, Homo sapiens
  misc_feature 140, 173, 174, 180, 182, 222, 256, 260, 265, 279, 283, 288,290, 299, 316, 361, 389, 395, 400, 408, 427, 522, 525, 553,557, 571, 592, 601, 621: n = A,T,C or G
aggtacgtttgggagcctgagctggaactgaagctggggctgcagcctgggccttggtttgatccttggccttggccttggccttggcctttggccggcacagcctgagccccttggcaatacgggcacgagcacgcttnccaagcttggggtgggcaaatggtaaagcaaanntcgatncnaaccttggcgggcttgaacacccccttttggggatctttngggggcctttaaacccttcccttggggccttttnacgnagggngccccttggaatanggcncttcngngccaaccgntggcaaccttccaatgnggctcttttgggccaattttggttttggggcccctggccaattcntttctttttaaggggccccccttttttntgggtntggtnggcctttnccttttgggccaaaaaagnccgccaattggttttcccttccaaggggaaaacctttggggggggttccccaacccccccctttttaaaagtaagaatttcccggttaattcttnttnggttggaattccggggggggttttttcntttnggaattaaccccantttttccttggttggccccanttttttccnggggggaaccttgggttttnggttg

SEQ ID NO: 3282 - DNA, 625 bp, Homo sapiens
  misc_feature 138, 160, 161, 165, 169, 173, 184, 185, 200, 271, 281, 289,314, 316, 324, 333, 338, 343, 357, 392, 401, 404, 408, 421,436, 456, 458, 477, 482, 484, 498, 529, 537, 549, 558, 568,572, 576, 588, 590, 598, 625: n = A,T,C or G
ccgggcaggtactgaaattagtagaagctaggccaatgatccatgaattgttaactgaagggcggagatcgaagactaacaaagcaaaaacccttgctacatgggcaacaaaagaactgaggaaactgaagaaccaancttgatctgttaccattgggannaatnaccntgtnggacccccccnnttggaaaattcttcnccatctttttttgtaaaaaaacctctgggaaaagttgtagggaaggtgttgtcaccggggatggccttganattgtttctnggggtaantggaagcaagagaattgaaggttgnangttcggangggcctttngaaanaaacnactaccccaaccantttggtaaaaaaattctctttgtcccaaccaaggnccaggccangcnccgnccaagaccccggntccaaaaccaagtcnatgtccgtccttggtttcangntcggaaggccttaaaagangggangnccaaccttgtaccnttttccgtttaggaaaaaaaccccatttaanccaattcngtgccccattcnttttggggnaaaaaaaggnaggnaaanaaaaatccaaantnggggaagnttttaaccctttaatttttttaaaaan

SEQ ID NO: 3283 - DNA, 556 bp, Homo sapiens
  misc_feature 172, 211, 221, 248, 270, 282, 319, 333, 342, 359, 368, 369,384, 387, 393, 412, 431, 455, 464, 470, 478, 508, 548: n = A,T,C or G
ccgggcaggtacgcgggggaggaagagtgggggttccaacttttctgcttatctgggaggtgttgggcgcggacagtcgagatgtcagagaaaaagcagccggtagacttaggtctgttagaggaagacgacgagtttgaagagttccctgccgaagactgggcctgggctnatattgaaggattgaaagaatgccacattgttcttgggnagggaataantttggggattggattgaaccaattgtnagaagggaatgaccttttcttnttaattcaagtntaaccggaggcctgaaacctaagaaggaaaaccaatnggttttattaaagnatggggagnacctttcaattatgtcnattcccaannaatgaaaagttggtntgnaaggtnaaccccttaaaaactttgnaccctgctttaaattacanttcctaaggggcaagggaggtaanccccagtgnattggngaaccacnttaaaaaaaaaatggtggtttttatttttncaatttaattccttggcctttgggaatttttaattttttnggtggttt

SEQ ID NO: 3284 - DNA, 637 bp, Homo sapiens
  misc_feature 198, 211, 216, 217, 221, 224, 235, 285, 308, 319, 333, 345,350, 352, 393, 407, 418, 445, 446, 465, 477, 479, 499, 527,540, 544, 559, 596, 598, 619, 621, 623: n = A,T,C or G
cctatagggcgaattggactccaccgcggtggcggccgaggtacttattacatataggaaaagattttccatgacatagtggtaatccgcccgactgctgtctggcagaaaacaggcggcaaacacaatgatggcatttagaccgtccccatagtatcctgaatctcctccgtgagaaatgactctcctgtagggctngatggaccctttnttttnnaatngcngcttgctcttngttctcccaattgacccaacttgtcccttccaaaagcccgggtttggtcncttcccccgttttcccttctttncgggcccggcntccttaagaaaccntaagttgggatnccccncncgggggccttgccaagggaaattttcggattaattccaaangccttttaattcgnaattaacccgntccggaccccttccgaagggggggggnnggccccccgggttatcccncatgcctttttntngttttccccttttttaaggngggaggggggttttaaaattttggccgnccgccttttgggnccgnttaaatttcaattgngttccaattaaggccttggtattttccccttggtggntnggaaaaaatttggtttaattncncnggctttcaaccaaa

SEQ ID NO: 3285 - DNA, 667 bp, Homo sapiens
  misc_feature 162, 168, 171, 187, 192, 194, 228, 233, 257, 270, 286, 289,294, 301, 323, 383, 393, 395, 422, 452, 458, 463, 488, 518,566, 612, 614, 616, 658: n = A,T,C or G
aggtactcttctatttcttcagaagccttcctcctaaacttcgaagccttcacggaatcacctgcccagcctccctgtcggcagcgaggtaatttagcagaggaagtctctccagtcagagtcaaagaggaattcttgccattgaggtgattctcggcctgngcctgnctncctggtttgagccttngggcngnacccccatctttgggccccctggggagggtaagncccanaggccttgttatgccggaaaagcntcccttcggtccncaaaggtttcggaagncanaaatncccttcncaattcttcccggctgggcccngccttcctaaggaaacctaaaggtgggggaattccccccccccggggggccttggcaagnggaaattttncngaattaattccaaaaggccttttaatncggaattacccccggttccgaaccccttcnggaagnggggnggggggggccccccggggttaaccnccccaaggccctttttttggttttcccccnttttttaaggttggaagggggggttttaaaattttggccggccggccntttgggggccgggttaaaatttcaaattgggggttccaattaaggncntnggttttttccccttgggtgggttggaaaaaattttggttttnatttccccg

SEQ ID NO: 3286 - DNA, 630 bp, Homo sapiens
  misc_feature 158, 177, 182, 184, 226, 240, 273, 275, 282, 327, 335, 351,356, 379, 382, 403, 416, 420, 428, 443, 447, 462, 491, 495,503, 504, 507, 512, 523, 543, 608, 615, 629: n = A,T,C or G
ccgggcaggtacttttttaataaaaccagcaagctcagtgctgttgtaacatgggaataccactgacaggtgctcaataatactattgaacggcttttttggagactggcttgaacgcgcagcacgtcctggaggaacaggctgcttccgatcagccncagggcttttgtttttttnacaananccttgccttggccagcccccgtttttggccccttgttcaagncttgaaggtgggcntttcaagggcctggaacccaaggggggggttgngnctccctngggcaaaaccaggccggccaaggaaaaggggaggcccctttcccncttggggnggaaattcaaccccangccangtaaggaaaccaacaaccttaanggnattcccccttggttgaaaagnttgcctttgcccnttgnggtttttncccaagttccaccgnttcnggcctttggccaagnaaaaggttccaccaaaggcccccttttgngtcncaattccnnccngccgntaaccccttcnggggcccggccttcttaagnaaaccttaagttgggggaatcccccccccggggggccttgccaaggggaaaatttcccgaattantccaaangggcctttaattcng

SEQ ID NO: 3287 - DNA, 637 bp, Homo sapiens
  misc_feature 180, 185, 194, 210, 220, 259, 269, 278, 290, 304, 313, 324,332, 351, 361, 368, 371, 374, 375, 376, 393, 401, 403, 405,434, 451, 454, 467, 469, 480, 508, 512, 515, 520, 545, 571,573, 578, 599, 608, 615, 623: n = A,T,C or G
ccgggcaggtacgcgggggcttctttcccgagcttggaacttcgttatccgcgatgcgtttcctggcagctacattcctgctcctggcgctcagcaccgctgcccaggccgaaccggtgcagttcaaggactgcggttctgttggatggagttataaagggaagtgaatggtgaagcccntgccncccccaaanccctggccaggcttgnagcaaaaagngaccaagtttttaccaggccggttcaaattggttcaccncttttcaacncagtcaaantattttcaagtntccttaaaaaaagncaagtccanaggggccccgnctgggganggccatttggggacaattncccttggaantgggggnccngtnnnccccaagatatttcccncttttttncncnccaattttccccttggggaaggccccctnggaattggggttttggntanaatgtaagcttgngnaaaattttaanaaccttggcccccctttaattcccccanatanaanaaggnaccaatatgggaactccttaattangggccgttaaccccttggaaaattananaaccnttaaccccaaggtttggaaanaaaaggccngtaaaantaatttcnccccttccttaatt

SEQ ID NO: 3288 - DNA, 645 bp, Homo sapiens
  misc_feature 161, 164, 166, 177, 204, 224, 226, 230, 247, 263, 266, 305,356, 362, 400, 402, 411, 457, 486, 536, 541, 602, 616, 626,629, 642: n = A,T,C or G
aggtacctggatcctgctcctctgggttgaaacccgggcgccgccaagatgccggcttaccactcttctctcatggatcctgataccaaactcatcggaaacatggcactgttgcctatcagaagtcaattcaaaggacctgcccccagagagacaaaagnatncnagatttttggnggatgaaagccattcctaattactttnaaggggccaaatgttctttntntcanaaaaactattgaaaatntaaatgaaattggaangcntgaattaggggaccctttgaataattataattaaacctncttcttaccatttttccttggaaatggttccttggaaaggaaaaaccttgncaaaanataggttggccaaatttttcccaaaaaaaaggccccananggggttggnagggaaaaaaggaaaaaattggttaatttaacccgcccttgggggnaaaattccaaccttaaaaattttttttcnccccaattttccccttgggggaaggaaggccccctgggggttttttttcnccaanccttttaaaacccggccaaaattttttaattgggccccaaaaaacccccttggggcaatanaacccaaaaaaccnagggggaaanggnaattggaaaaagnttg

SEQ ID NO: 3289 - DNA, 348 bp, Homo sapiens
  misc_feature 109, 183, 219, 316: n = A,T,C or G
aggtacctggattggagttctcactctgttcatgtagcagatgaaaaaaatcaaagcacagagaggctaagtgacttgcccaaggccacacagccaggaagcaatcagntgggatttgaacccacacaaccccgactcccgagcccactgatgatcacccgtgtgttccactgcctcaccccngagtgaacctcactgaccatgaaagatggggtaggnagagggctcacacctgctggatatcctcacccacctgggcaggtaactcgccgagcctctctctcctgcctcagctcttccccccgatccacacggnagatcacgtctggatttggacccaggcagccc

SEQ ID NO: 3290 - DNA, 335 bp, Homo sapiens
ccgggcaggtacgcgggggatgccattttcagcctcagcacgcctgcacccaggcgctcattaaaacagcatgttgctccccactgcctcgtgttgtctgttggcgcgctgtcggggttcgaaccgatacaagaaccttccacctacctggtgctttggcctcatctataagcagcttttccactgtcctgaaacaagatagagaatctgagcggccagtcatctgccctaagtgctgccgccgaagactgaatgtcctggaaagtttgctgtcacatctccattatgacaaaagcattgtgccgaacagatgaaaaaatgcattgtcaacggaa

SEQ ID NO: 3291 - DNA, 341 bp, Homo sapiens
ccgggcaggtactttttagcagagacatggtttcaccactgattcacttcttgccttagtctcagagatctcagacagaagctgtgaccttcttggctaaccatgatgacagtcgggccctctatgccatcccaggtgagtagttagcatttgaatggtgcccgtcaagaaggagtctggtgtgtctcagggagaggattctgatgtcctgtcatccactgggagggattatgatgctgagaggtatgatatcagggttatcccatactggaacaaggccagttaatgtttcttctcaaccccatctctctcctctcctgtgagtttcaccactgtctttt

SEQ ID NO: 3292 - DNA, 342 bp, Homo sapiens
ccgggcaggtaccattatgtgcccgaattccgaaaagtgtccatagcagctaccatcatctatgcctatgcctggctggttcctcttgcactctggggtttcctcatgtggagaaacagcaaagttatgaacatcgtctcctattcatttctggagattgtgtgtgtctatggatattccctcttcatttatatccccaccgcaatactgtggattatcccccagaaagctgttcgttggattctagtcatgattgccctgggcatctcaggatctctcttggcaatgacattttggccagctgttcgtgaggataaccgacgcgttgcattggccacaatt

SEQ ID NO: 3293 - DNA, 192 bp, Homo sapiens
aggtacgcgggtggttggatctcagctggaagttctgtttggagcccatttctgtgagaccctgtatttcaaatttgcagctgaaaggtgcttgtacgcggggaggcgattactgggcaggctcagtctttcgcctcagtctcgagctctcgctggccttcgggtgtacgtgctccgggatcttcagcaccc

SEQ ID NO: 3294 - DNA, 374 bp, Homo sapiens
  misc_feature 181, 190, 194, 195: n = A,T,C or G
ccaccgcggtggcggccgaggtacttttttttttttttttttttttttttttgggagtagtcctttgaaacgacagtcatattgaaacaggaagtcagtaagctgttgcaacatccttagggcaaatgctgtgaattcacctgctggtaactttgattaaggactgagaatggtgtgggtntcgctgtcntttnnaaagtaattatttaaaaggactaattgctcctttggcttcagaggtaaaaatgcccacatggcagccagttctgtggcagtttggggataatgtggttggatgaataagggagctaggaagaaggctgatggcggccttgactctcaatcccctggggctggggacagggaatgcaggt

SEQ ID NO: 3295 - DNA, 352 bp, Homo sapiens
  misc_feature 317, 327, 352: n = A,T,C or G
aggtactttttttttttttttttttttttcccccgccccctatctgtcttcctctccctctttctcgctggtggcgtctgcagctgtgctagacccggctttaacagggagcgagagagcggaaaaagtctctctcctttaaaaaaaaaaaatctgatttaaacccccttctaccagcgctatcaaaacttgaattgcaaactggcttccgttcgccgccctcctcctccttcctctgctccgagcctccggagggtgtctcggtttcaatccaaatcttgctgggctcttctcccgtgcctctctctcttccttgncctaaaacgngagcgaattcgcttcctaaatctgn

SEQ ID NO: 3296 - DNA, 330 bp, Homo sapiens
aggtacttctgtggttaatgtatatttttattatggtttttaaaatgggaatcatttttatgtatctgtgcaaataataaatgcccatttggaaaaagagtaagctcttacataaaatggaccaaaaaatcccccttaattgaaaccaaaattttttctttctagttaggtttttttcccaactccttttaacttttggaatttattaataatttttttcttttttaatgatatgcccataggttcataaattgcttttgttcttttaaaattcatccatttggtttaacttaaaggaaccttttaaatgcctcacccttgaccctcaga

SEQ ID NO: 3297 - DNA, 348 bp, Homo sapiens; identical to SEQ ID NO: 3216
  misc_feature 244, 250: n = A,T,C or G

SEQ ID NO: 3298 - DNA, 350 bp, Homo sapiens; identical to SEQ ID NO: 3217
  misc_feature 39: n = A,T,C or G

SEQ ID NO: 3299 - DNA, 351 bp, Homo sapiens; identical to SEQ ID NO: 3218

SEQ ID NO: 3300 - DNA, 140 bp, Homo sapiens; identical to SEQ ID NO: 3219

SEQ ID NO: 3301 - DNA, 411 bp, Homo sapiens
  misc_feature 195: n = A,T,C or G
ccgcggtggcggccgcccgggcaggtacgcggggagtgggaggtggttgaatcatgggggcagtttcccccatgctattctcatgagagtgagtgagttctcatgagatctgatggttttataagcatctggcatttcccctgctcactctcactccatcctgctgccctgtgaaaaaggtgcctgcactcccancctgggtgacagagcaagactctgtctcaaaaaaaaaaagggacctggaatgcttcgtgggggttgtcgcaaggtctcggagcctatggaatctggttctggagctgggcagggcttccactgggctctgcaggcctgggccgggagctggctcatttgtttatgggacatttgcttcctgggagtctacagtgtggtggtccctgccctgggtgc

SEQ ID NO: 3302 - DNA, 448 bp, Homo sapiens
  misc_feature 24: n = A,T,C or G
ctacttagggcgaattggagctcnccgcggtggcggccgaggtactcggaggatttctgtcaacctccggactttccctgcctcaagcagctggtggcctacgtgcagctcaacatgccaggctcagacctggagtgccgtgcccaccttctcctggcccagctggagcactcggaacccattgaggcagagcctgaggctctgtcaccaagtgccaagctctaaaaccaactccagagctcgagctagctctaacaccagctcgagcacccagcccagtgccggctccagccccggagccagagccagctccaacaccagctccaggttcagagctagaagtagctccagcaccagctccggagctccagcaggctccagaaccagctgtgggactagaatcggctccagcgccagctctggaactagagccagctccagaacagga

SEQ ID NO: 3303 - DNA, 444 bp, Homo sapiens
  misc_feature 211: n = A,T,C or G
tcactacttagggcgaattggagctccccgcggtggcggccgaggtacctgggtgacgtttacgttctgggatttcgggagatgcggttttctgcacgccaggggccaagcctgagacgtagatggacggcagggataggagctctctccgcgccacaaacgcccctgctcatacctgggttccttgattttcctgcctatataacccganccctcccatggcccgggctctgagctctcattctgcggactgggacaaagggggttaactgtgatgagctttgtataaccccaggattctgcacttgcccaagggcgaggcgcaaatcaaaaactacgcacaactgaacaccgagatcaggtgagtcctgagtgtctcacgacataaaatccttacgattttaacaagaagttgtatttgtgctagcactgttaactgacaaa

SEQ ID NO: 3304 - DNA, 500 bp, Homo sapiens
  misc_feature 5, 210: n = A,T,C or G
cactnctatagggcgaattggagctccccgcggtggcggccgcccgggcaggtacaaaaagtctaagccaaaggttctcaggggagaaagcacatgtgcagttttaaaacaaagcagtgctttgtcccattgctgtgatttttagtcagactttactcagtctgaaatgcaattaacattaaaggattaagtgtgagatttcgatttatnctaatttggggtatcccatactcctcccttttaataatcagtttccactgatgatatgaagggccggtataaaagaagtctttaaatgagtaagctttcttggtaagattaaatcttacaaattatttttaaaaccttgtgatatatacaatgtttagctgagttttctaattttctgggatgtaaaacaaaaggtttaacctatacattccttgagctgtttagtgctatttaaatcttttgccctgtttaggtcctaaacacttttaagttgagtagggatatgagct

SEQ ID NO: 3305 - DNA, 447 bp, Homo sapiens
tagggcgaattggagctccccgcggtggcggccgctgagtgaggcgtcggctgtgtttctcaccgcggtcttttcctcccactcttggctggttggaccccgctatggaaaagttggcccctgagccagagctccagcagccttgttagggcgtggcctgaggcttggataagtgggatgtaaaacgaagatcaggagcagatttgaagaattacaaagtgcattggtaccagtcagcatgtcagagacagaccacatagcctctacttcctctgataaaaatgttgggaaaacacctgaattaaaggaagactcatgcaacttgttttctggcaatggaaagcagcaaattaggaaaatgagtccaaactattgtcattaaacactggataaaaactttatgttcaacctaatgaggcataataaattccgaatttggaaagccca

SEQ ID NO: 3306 - DNA, 366 bp, Homo sapiens
  misc_feature 135: n = A,T,C or G
ggagatgcgggttttctgcacgccaggggccaagcctgagacgtagatggacggcagggataggagctctctccgcgccacaaacgcccctgctcatacctgggttccttgattttcctgcctatataacccaancctcccatggccgggctctgagctcttcattctgcggactggggacaaaggggttaactgtgatgagctttgtataaccccaggattctgcacttgcccaagggcgaggcgcaaatcaaaaactacgcacaactgaacaccgagatcaggtgagtcctgagtgtctcacgacataaaatccttaccgattttaacaagaagttgtatttgtgctagcactgttaactgaca

SEQ ID NO: 3307 - DNA, 454 bp, Homo sapiens
  misc_feature 210, 216: n = A,T,C or G
cttagggcgaattggagctccccgcggtggcggccgcccgggcaggtacaaagaagagattctacagcacttagaggctgtatagcttccagaaaaagtagctataatgcattgcagaggccaccaaaaggcaaggatgccacaagccaaaggaaacagaaaagcagacagggaggcaaagcaggcagcaatgatcaccccccatttttnaaaganggaagcccttagctatgcctctcctcccagaacctcctctccaagacgacccaagttatactccaaatcaaagatcctggtgtgccaagaagatataaaatgtatgaaaagaaagtaaaaggaagttcttctataggagactagccattccaaaggatgttagctcctaaggtttgtgaagccaaatccatcaaggaaaaatcattataaggaaaaacaggcattagaaaacatttat

SEQ ID NO: 3308 - DNA, 355 bp, Homo sapiens
  misc_feature 43, 219, 223, 225, 226, 227, 228, 229, 230, 232, 233, 234,235, 236, 237, 238, 239, 240, 241, 242, 251: n = A,T,C or G
actacttagggcgaattggagctccccgcggtggcggcccgangtacgcgggtgaggagtgccagcagtgtgataatttaaacatatttaaacaaaaacaaaaaaaatgaatgcacaaacttgctgctgcttagatcactgcagcttctaggacccggtttcttttactgatttaaaaacaaaacaaaaaaaataaaaaagtttgtgccctgtaaaaanaaanannnnnntnnnnnnnnnnnggttccgcnggggagcccgcctgggataccgcaagctagggaataatggaataggacccgcggttctattttgttggttttcggaactgaggccatgattaagagggaccggc

SEQ ID NO: 3309 - DNA, 660 bp, Homo sapiens
  misc_feature 72, 74, 134, 149, 159, 168, 215, 235, 236, 266, 270, 277,286, 291, 294, 302, 325, 328, 342, 350, 364, 373, 392, 403,434, 436, 437, 452, 463, 488, 491, 496, 514, 517, 520, 526,545, 557, 563, 570, 573, 576, 590, 601, 603, 612, 617: n = A,T,C or G
  misc_feature 626, 643: n = A,T,C or G
acctgtgttcatggagggagccagatagaaaagatgttgcccaagaagatgctgaaaaattaggattttccnanactgatagcaaggaggcctacatctgaaagttctggtcataaacgatcttccagtgtggnggaacgccaccatanctcccttttnacaaaggtncccaattggagcccaagtagggggtgggtggttgaaccaggaagggnagggaaaaaacttaccaaannttggttggaaaaaaagtccccggggtcggnttcncaagggncctttttangtttnggncaaggggntttaattttttattttgggaacnggnaaaacctttccttnggccaaanaacccaattccttnttttttttnggttttagggggaaaaccncaaattggttnggcctttggaaaaaggttttaacccttgggntnnggcccttcctttttnggaaaaaaagntaaaaaccaaaaagggtttttgganttnggccnttttgggttaaaaaaaanggnccnttgggncttttttggggaaattatnaattttttttgnttaagngggccgnccncanttgggaatttaaanttggggggaangnccttttaanccacnatttggtanaattttataaacaaaanggaaaccaatttggggg

SEQ ID NO: 3310 - DNA, 334 bp, Homo sapiens
  misc_feature 255: n = A,T,C or G
ggagctccccgcggtggcggccgaggtacctgcaggcctcctacacctacctctctctgggcttctatttcgaccgcgatgatgtggctctggaaggcgtgagccacttcttccgcgaactggccgaggagaagcgcgagggctacgagcgtctcctgaagatgcaaaaccagcgtggcggccgctctagaaactagtgggatcccccgggccttgcagggaatttcgatatcaaggcttatccgataccgtctnacctcgagggggggggcccggtacccaagctttttgttccctttagtgaggggttaattgccgcgcttggcgtaatcat

SEQ ID NO: 3311 - DNA, 329 bp, Homo sapiens
  misc_feature 3, 68, 161, 219, 241, 309, 313, 325, 327: n = A,T,C or G
cgntttggagctccccgcggtggcggccgaggtacatcttgacccgtggtcttgagcatatggaagancatcttacccagcacctgtgtaaacatcccaggagtttagttcccagagactggccaagggtcattgccatatgggctccggtaatgggcagntccagcctgcggcgtagacagttgccatggagaaagacaggcgtttccagagttgacngttgccgtggagacaaaagccncccgcacgcagtgggggcggggcttacagaacgtattttgcgattgatccacaggaaatagacgcagntgcntggatcgccttntnca

SEQ ID NO: 3312 - DNA, 424 bp, Homo sapiens
  misc_feature 174, 349, 399: n = A,T,C or G
ccgcggtggcggccgcccgggcaggtacccagggacacaaacactctgcctaggaaaaccagagacctttgttcacttgtttgtctgctgaccttccctccactagtgtcctatgaccctgccaaatccccctctgtgagaaacacccaagaatgatcaattaaaaaaaaaatnaaatttaaaaaggaaaccaccaccaccaacaaaaaaaagtcctcccataaggaaagatgatcaattcttatgtatcgttctagggatataaatattcaggaggcttttcagaataaaagttaaatcatttatgtcgcacaaacaaatttactattcggacaaatacgatgacaangggagtttggagtatcgacatgtcatgctgcccaagggacatagccaagnctggtccctaaaacccattttggat

SEQ ID NO: 3313 - DNA, 457 bp, Homo sapiens
  misc_feature 212, 413: n = A,T,C or G
cactacttagggcgaattggagctccccgcggtggcggccgaggtacgcggggggcagtgagcatgcgctccggctccaccacgaacatgtagtagaggttccacatcagcatcgacagcagtggcagaaacgtcaggccgtagccgaagcctcggaaggagcggcccacggcaaagagacatggtcttgctatgttgccagtctgggcttnaaacttctgggccttgagtgattctctcacctcagactcctgagtagctgggattacagatgcgggccaccacacctggctgtacttcataaaatcctcttatagagttactcttgccctagattgtaaattaagtttggcattattgtcagactggatgggagggttgaaagtaaaaataggtatgaaaccaattaaagnaggctctccccctcttgtctttaaagccattatttctcctacat

SEQ ID NO: 3314 - DNA, 447 bp, Homo sapiens
  misc_feature 220, 391, 445: n = A,T,C or G
actacttagggcgaattggagctccccgcggtggcggccgcccgggcaggtactccctaatgaatggttatgcaggcaggagaacttctcaggaagagaaaaggagaagactaactctacagagatttttgaaagactccgtgggatctcagcaatttgttaacactgctagggcccttcactgcatagggaggcatatggactggccatgggttctccnaggctcatgtttccaagcaagaaataggggtaagtaactgtgaattaccctacaagcagtaataagtttattataataatatttttatacatttttggatgcacccaacccactctaaagaatgtcagtgactttatacaaaagaggaagcatctagattgggcattgtgnaaccataatgccattagggggccgccggccggggaagcctctagaagccctaantt

SEQ ID NO: 3315 - DNA, 318 bp, Homo sapiens
  misc_feature 2, 187: n = A,T,C or G
gnggtggcggccgaggtactgcgcagcaaaacaattctatcttcttaatagttcttctatgtctttcccagcgtaaagcacagctcagggaacagacggcagtgacaggcgggcagtgggaggcgggagaacggcttgagcccaggagttcgagaccagcctggggcaatatagcaagaaccgcctntcgcgccgggtcctggccgaggctccagctcgagttgtttgcaggccctcagacccccgcccgcagtaaacgtgttttcttcatccccgtggcaggccgtctactttttaaaaatcccgcgtacctgcccg

SEQ ID NO: 3316 - DNA, 456 bp, Homo sapiens
  misc_feature 217: n = A,T,C or G
ctacttagggcgaattggagctccccgcggtggcggccgaggtactctgtgatttcacctagatttggagaaggtgagggaggaaaggctgtcctctttgatcccataccatgcaggggcaaatggctgccagcataacaaaataagaaggaaagaaagaaaagtgggccaggcgcagtggctcactcctgtaatccccctgattaaatctgcgccnaacagtgctgagcgggaagcagactcatctgagcctgaactggtagagactgggggaggaggggggcctggtggagggggaggaggacctgatccggcagagggtccagatggcagtccgctccccgcgtacctgcccgggccggccgctctagaactagtgggatcccccgggcctgcaggaaattccgatatcaagcttattcgatacccgtcgaccttcgaggggggggggccccg

SEQ ID NO: 3317 - DNA, 572 bp, Homo sapiens
  misc_feature 155, 157, 165, 170, 171, 179, 224, 229, 235, 269, 270, 272,285, 293, 299, 314, 320, 323, 326, 329, 335, 337, 359, 364,370, 382, 388, 408, 425, 437, 453, 477, 489, 507, 556, 561: n = A,T,C or G
ccgggcaggtactattttacctatgacccgtggattggcaagttattgtatcttgaggacttcttcgtgatgagtgattatagaggctttggcataggatcagaaattctgaagaatctaagccaggttgcaatgaggtgtcgctgcatgcagcntngcaccttntttgnnttagccangaaatgggaaattgaaacccattccattcaaaccttgcttattanaaaangaaagnagggtggccttcttggattctggttcacagttgnnangtaggggttttgngaagtacntgtttncatagtatccgtacnaagtgnagntanccnttcggncncgccttcttaagtaaccttagnttgtnattccncccccgggggcntgccangggaaattccgaattaattncaaaggcctttaatccngaattaccccgnttccggaaccctttcngaaggggggggggggggccccccnggggttaccccncaaggccttttttttggntttcccccctttttttaagttggaaagggggggtttttaaaaatattgncccgnccgcctttttg

SEQ ID NO: 3318 - DNA, 507 bp, Homo sapiens
  misc_feature 157, 188, 191, 194, 208, 228, 230, 236, 247, 253, 258, 261,283, 293, 314, 319, 347, 348, 376, 391, 396, 417, 425, 429,430, 436, 447, 455, 466, 476, 490: n = A,T,C or G
ccgggcaggtacgcggggcgtcgggaccctacctgacccatcagcaaaaggtgttgcggctttataagcgggcgctacgccacctcgagtcgtggttgcgtccagagagacaaataccgatactttgcttgtttgatgagagccccggttttgaaanaaccatttaggaattggaaaaagggattatnggncgnaaagggcccacccncaagcttgacttgaaaaggnanggcccngtagagaaagnaatttncttgngtnacccttcaagcccgtcgtcctnagaaaaaccntaagttggggaattactcccncccgngggtccttggccaaggggaaaattttcnncaattaatttcaaaaggccttttaattnctgtaattaacctcngtttncggaaccaccttctcgaaagngagggggngggnnctcccngtgtttaatcnccctaagnccttttttttnggttttcccncctttttttaaggntgggaagggggggtttt

SEQ ID NO: 3319 - DNA, 529 bp, Homo sapiens
  misc_feature 144, 156, 159, 202, 213, 243, 260, 261, 282, 293, 319, 352,388, 399, 420, 422, 440, 453, 465, 484, 496: n = A,T,C or G
aggtaccactggcatcgtgatggactccggtgacggggtcacccacactgtgcccatctacgaggggtatgccctcccccatgccatcctgcgtctggacctggctggccgggacctgaccgactacctcatgaagatcctcantgagccgagggntancagcttttaaccaccacgggcccgcttcttagaacttagtggnatcccccgggnctgcaagggaatttcgcatatcaaagcctntattcgataccccgtcnnacacttcgagagggggatgcnctcggtaaccncagacttttttgttaccccttttagntgtaggggttataaatttgtcgtcgcctttggncgtttaattcattgggttcaataagtcttgtttttnccctggtggtngaaaaatttggtttaattccngncttcaccaaatttccacnaccaaacaattancttaagtcccgngggtaagccattaaaaagnttgttaaaaagncccttggggggggttggccccttaaattggaag

SEQ ID NO: 3320 - DNA, 563 bp, Homo sapiens
  misc_feature 166, 182, 184, 200, 206, 212, 229, 246, 250, 267, 277, 305,311, 314, 315, 328, 362, 400, 418, 423, 458, 472, 487, 496,497, 498, 502, 504, 512, 516, 529, 530, 554, 563: n = A,T,C or G
aggtactgtgctgagaaatgggccccttgccagatgctcccctctccttcctctctgcgaggcagaagtcagaaggtagagattgctggcaaaactgtgaagtcccaccctggggtctcaaccccaactccactgagggcagtctccctgacgtgttgtgacctanggcagttaaagggtgngncgggtttgatgggcgngcccgnatctanaaacctaagttgggatnccccacggggtcttgcnaggnaatttctattatcaagncttatacgantacccgtcgtacacttcgtaggggtggnggttcncgnnttacccccaagcnttttttggtttcccctttttagttagaaggggtntaaaattgccgtcgtctttgggacggtaaaatacaatngggtcattaagtccttgnttttncccttgttgatggaaaaatttgttaaattccccgncttcaccaaatttnctccaccaactaaancattaaccnnnaagncnccgggggnaagnccaattaaaaagnnttggttaataaaagcccccttggnggggggttn

SEQ ID NO: 3321 - DNA, 642 bp, Homo sapiens
  misc_feature 182, 186, 192, 227, 246, 250, 259, 270, 274, 276, 278, 285,289, 324, 330, 339, 343, 356, 361, 363, 367, 384, 405, 427,439, 452, 467, 473, 480, 483, 487, 498, 503, 534, 548, 556,563, 569, 579, 608, 616, 625, 630: n = A,T,C or G
ccgggcaggtactcttgtgagagaagttacatgttcattgttaaggaaattatatgtaaatcacaaagatcatggtctgtgaataatgtgccatatctcacaaaatatggtcattggaatcttattaaaattatctacaggtgacttcagtttttcaatttcttccaacccttttggccttnaagnataccnaaagccctttggacattgaactcaacaattcaccnagttacaaggccaataagnggcnttccctttncttaaggaatngggncngngagaatnattncgttcaagatttcgcctggcctttacaattagacnttaacngatactggngtcncaataggaaaagnttagngnccgnccccaaggttttaattncaaacaaaagtttaaattgcnaaccaatttcaaccccttgggnaattttccaatnccttttgggaaangggggttaaaaaacnttttgngggaatnttncttntttggccttgnttttncaattgggaaggggggttccaaaaccaaaanaaccttcctcattntccatgtnagcccangtccantaaaaaaaanaggggtccttggaaaaccctccttttttncaaaaccntggggcccnccaantttcaaaaaatt

SEQ ID NO: 3322 - DNA, 518 bp, Homo sapiens
  misc_feature 178, 186, 190, 196, 224, 232, 249, 274, 278, 348, 368, 374,391, 394, 402, 430, 435, 477, 481, 487, 495, 496, 498, 499,503, 505: n = A,T,C or G
aggtactgactttaacttgctctgactgaatgctttctggatggaaccctgtataccacttttatctgatttggagatgagacactatgaaatgtgactccacaagctttctgctgcttgctgtgtcttgataacattaatgctatgtttaacaagaaacaatttcttgaaaatgacnctaaaagnggcncttggncaagaaggaaagcccattcctcccagcncctgttgncgcatgcgaagcctttnagtagtaaagggctattttcttggntgcntattttcaggtattatttttcaccgtgggccttttttcttttatccctttctacccaaaggtatttgggntcttttaacccagggggggnataagnaaaatttggttaaaatnccnccttaaanaacatttcttcttggcttaccattttanaaatngggaacctttttttgttaattggttcctttccccttttttgnaaancaaccntgggaatnntnntgtntntgtattttttttt

SEQ ID NO: 3323 - DNA, 444 bp, Homo sapiens
aattggagctccccgcggtggcggccgcccgggcaggtactccctaatgaatggttatgcaggcaggagaacttctcaggaagagaaaaggagaagactaactctacagagatttttgaaagactccgtgggatctcagcaatttgttaacactgctagggcccttcactgcatagggaggcatatgggactgccatgggtctccaggctcatgttccaagcaagaatagggtaagtaactgcgaattaccctacaagcagtaataagtttattataataatatttttatacatttttggatgcacccaacccactctaaagaatgtcagtgactttatacaaaagaggaagcatctagattggcattgtgaacataatgcataggggccgcggcgggagctctagagcctaagtggttaaaaccgtggcctctggaatatgac

SEQ ID NO: 3324 - DNA, 656 bp, Homo sapiens
  misc_feature 150, 157, 163, 167, 178, 187, 194, 199, 207, 229, 242, 248,250, 260, 271, 283, 295, 317, 322, 333, 356, 370, 388, 395,407, 413, 421, 437, 462, 468, 483, 491, 493, 500, 502, 506,524, 531, 540, 546, 554, 568, 581, 593, 618, 621, 633: n = A,T,C or G
  misc_feature 656: n = A,T,C or G
ccgggcaggtactcttgtgagagaagttacatgttcattgttaaggaaattatatgtaaatcacaaagatcatggtctgtgaataatgtgccatatctcacaaaatatggtcattggaatcttattaaaattatctacaggtgacttcangtttccnatttcntccnacccctctggnctttaaagnattaccnaaagncccttttnaccattggatcccaccattccncaagtttcaggcnataagngncttcactttncttagaaatgnggcgggggaatnattccttctagnttttctcttggccttttcaatnagacntaaccggttcngggcctcattggaaaagattatnggccggccccaagnttttaattccagaaaaangattaanttccaaccaatncaaccncttggggnaattttccaattcttntggaaaaggaggttaaaaaaccttntggggnattttccttttttgnccctgggntntccaatngnaagnggtttccaaaaccaaaanaaccttnccccttttncaaggnaaggccanggaccaatttaaanaaaaaaagggggnccttgggaaaanccttccttttttccaaaacccaagnggnccaaccaaattnccaaaaaatttaatttttgggtn

SEQ ID NO: 3325 - DNA, 401 bp, Homo sapiens
  misc_feature 137, 144, 146, 153, 156, 157, 160, 161, 182, 198, 216, 221,233, 238, 241, 242, 271, 275, 280, 292, 297, 311, 320, 322,326, 336, 339, 340, 344, 346, 365, 370, 382, 391: n = A,T,C or G
gagtgaggcgtcggctgtgtttctcaccgcggtcttttcctcccactcttggctggttggaccccgctatggaaaagttggcccctgagccagagctccagcagccttgttagggcgtggcctgaggcttggataantgggatntnataaacnaannatnnagggaagccagaattttgganagaaatttaccaaaangtggaaattttggtttgncacanttccaagccatngttcnaannatgtaccagtatcccaccattatgtcgcntgcntaacntatacgcttgcntgganttaaaaaatactgntttgggggnanacanaccaaccccntgnnacantntatataagcggaaaggganctttnaatcggccatancctttgggngttttttcct

SEQ ID NO: 3326 - DNA, 604 bp, Homo sapiens
  misc_feature 151, 157, 159, 175, 176, 190, 213, 216, 239, 241, 250, 264,268, 278, 282, 285, 308, 314, 335, 360, 370, 403, 404, 432,441, 447, 495, 500, 507, 511, 513, 516, 547, 572, 591, 596: n = A,T,C or G
aggtacgcgggtattaaggcctatcattctggtgaaggacatatgccctttagaactggaactggtggcattgcaacttgttacagtccacggacttcaactgaatcttttgctccacgggattcagtgggactggcaccccaggatagcncaggcnangtaaccaatttttagnnaaatgggaccaacnatgaatttattgaccccccaagnagnatggctcttactcattgggtagncncatgaaagnggggggttccttgnatgnacaggttganaagnagncacctttttttttggattggccncgttgnataggcacattaggtggaatngaagtaaattctcatcaaggaaagngttggaatgnggaagcaaggtttaaccaaaggggaaaagtaannaagggtattgttttaaaatttataccgncatttcttnaagggnaaaaccttaattttttggaatacccttttggattggggccttaattgnaaccnccccatnttgncnaanggggaaggtaagtttttccccaacccaaggnaattggaagggggaaggggttttgnccttttttcccttccaacnttttnaccccccc

SEQ ID NO: 3327 - DNA, 168 bp, Homo sapiens
  misc_feature 23: n = A,T,C or G
tacttagggcgaattggagctcnccgcggtggcggccgaggtacgcgggttttcttttcgccatcttttgtctttccgtggagctgtcgccatgaaggtcgagctgtgcagttttagcgggtacgcgggtgaagatcctcaccgagcgcggctacagcttcaccacca

SEQ ID NO: 3328 - DNA, 464 bp, Homo sapiens
  misc_feature 198, 208, 410, 444, 447: n = A,T,C or G
cttagggcgaattggagctccccgcggtggcggccgaggtacgcagggagccacacttcaggtgcccagtgtccacactgactagtggtgactgcgttggacagtgcagatacagaacatttctgtcatcacagaaagttcctttggacagagccatgttaagtgatgttatcacaagatggacagaaacattcctgnttgatttatnttttaaaacccagtttgtggagaaaaaataatgatgctttacatatgtctcttgaatccttaattatgtgaatccagagataagtttatacgggaattatttgaatcatccacaaataacaacaaagatactaaacaaaaagcaggaaaacttagcttcatcagcgtgggaaacaagtttaagacacagttaaatttgcttntggataaacttccgaagtacctgcccggggcggncgntctagaactagtggatc

SEQ ID NO: 3329 - DNA, 134 bp, Homo sapiens
ctacttagggcgaattggagctccccgcggtggcggccgtggccgtggctcacgtggcccctaagtttccgggtcttcctcagtctggatggcatgttggcagcccagacgaaaaagccccgcgtacctgcccg

SEQ ID NO: 3330 - DNA, 387 bp, Homo sapiens
  misc_feature 164, 165, 169, 171, 187, 219, 232, 246, 274, 339, 352, 375: n = A,T,C or G
gggttggcgctctgttacccgattgctttccagctgtgtctggttcccattcatgctgcctccagcaacggataagtatacggcagcacctccttatttgagtgcaaatgtctggttgtaatagaggtagatgattcttggtgtggtgccgtggtcatttgacnntttngntgtcattggtaacatngtcatccgacgtctggccgaggtactccttcnagcccgctgcacngtttggcctgcagnggactccgtggacttgttccgcctcctnggatccacagaaatgccgatggtccgggccaccttcttgtgaatgccggccaccctgagctcctncaggctgaagccncggccgctctagaactagttggnatcccccgggct

SEQ ID NO: 3331 - DNA, 374 bp, Homo sapiens
  misc_feature 117, 269, 271, 286: n = A,T,C or G
ccgcggtggcggccgaggtacttttttttttttttttttttgggtttgaactgagaccttaatgccaagaaacaacccccatagcaagacctgggcacagagggacctacaaaggcnacggcccagtgccagggactgagcttgggagctgaggaaataaaagccagcccttccccagctgtccattgcttgatctcatgcttttttctctccacttgagccagcctgagatagctttcgccactagccctggagaaagcaaggttttntntccacaccctctctntgcttgcacactctgggccttcttagcttgatcctctttcctgtccagcagctgagggtccatcgtagcttgcaagacatttgtggga

SEQ ID NO: 3332 - DNA, 465 bp, Homo sapiens
  misc_feature 115, 119, 132, 145, 147, 155, 193, 249, 334, 341, 365, 415,419: n = A,T,C or G
ctacttagggcgaattggagctccccgcggtggcggccgaggtactttttttttttttttttttttttcgttctttggtttttctctcctgtgttttttgtttggttggcagctnatcnatgtccacacctnttccctgtaagtntnaaacgatntaatgcccttctcatatcctgctcgtccatttcgatcntttttgggataatggattctgtcttcccagcatccccaaatgagatcagcacactntcaaagatctcggccaagtcattaataaaaagccctgaacagaacaggccaaaggaggtcatcacaaagttgcagggagattcanaccacancagagcagcctgagccagccggantccaggagagccagttggggtgacctgggagccagaaccaaggtcaggcntcanaggggctgggcacatggggaagatacaggctgcatccctggggact

SEQ ID NO: 3333 - DNA, 616 bp, Homo sapiens
  misc_feature 28, 38, 46, 76, 134, 183, 203, 242, 265, 277, 286, 288, 303,313, 317, 323, 329, 347, 351, 363, 364, 369, 386, 387, 388,423, 428, 433, 443, 455, 459, 497, 499, 505, 508, 510, 546,554, 579: n = A,T,C or G
cgcccgggcaggtactgggcaccacctntctcgcctgntgagtgcnttgctttccatgacatttccccctcaagcnccaacacattttctggtgatacccaagaaacatatatcccaagatttcttgtgggcangaagatgattgatgaaaagtcttctttgggaccactttaaatgaatttngttgggccaaagaaaatgtngcttgctggatccttggggcccttgaaattaaaaggggnttaatccgaattggggtgggatngaaaatggaaangggttttcnanagaattggggtgggnaccaaggttncttngatccntaattncacccggttttccaattncttncccaattggttnntcctnttggggaaggggttccnnnggcccaaaaaattggccaattttggggccccttcnccttnggggntttaaaaagncccacccggttntttntggggggggaaattaaaattacttttcccttctttttncntttttntangnggcccaaaaattgggaattttaaaaaggtttttaangggccaanaatttttttccccaagataattggnttttaaaaagttcaaaaccaaccacccttttaatttt

SEQ ID NO: 3334 - DNA, 360 bp, Homo sapiens
  misc_feature 144, 167, 177, 185, 201, 205, 227, 238, 246, 248, 250, 284,285, 293, 308, 325, 326, 339, 348, 357: n = A,T,C or G
aggtactgacagaagtctacataaggggacagcaggggaacaaaaaaaggcacagtcaaaacatctttgactgcaatttggagactttaaacagggattatccctttctacaggccatactgaaattttcttttaaattgcctncaccttgtgcccctattaaaagncaaaaaattnccgtaaantaaccaaaccaccaancccnggaaccaaggaaaagccccttntaacccccttngttggaangncnccgggggcccgccaaggttgggggccttccaacnncccccttnggttaaaagcccccntggaaccaacttttttnngttggaatggggncccaaaagnggttggggngat

SEQ ID NO: 3335 - DNA, 419 bp, Homo sapiens
actacttagggcgaattggagctccccgcggtggcggccgcccgggcaggtactttttgtttatttttcttttttttatttccacattttgaatagcatcccacttttccctggtctgtagggatttgcctgagaaatctgttgatattcttatggaagttccattgtatgtgatgaattacttttttcttgttggtttccgaaattctctccgtatttgacttctgaaagtttgataataatgtggcttggtgaagacttttttgtgtttggcgttctttgggctttattaatctgattgttcatttctctcccagatttgggaagttttctgtcattatttctttaatctttctgaccatctctttttctctgagaatactataatgtgcatacttatacacttgataccccgcgta

SEQ ID NO: 3336 - DNA, 495 bp, Homo sapiens
ctatagggcgaattggagctccccgcggtggcggccgaggtactgacatgcactgacatcagtccagaaccatgctctggttgtgcatggcattgcattccgtggtgctggatcatgctgtgattcctcacacgggctgtagggacagggactgtgattcttagctcatggtctccgaagaggaaggggcaatccaagggtggtgcttcttgcctttcttctatcatccattagcagtgtgtgatgataacagaggctaacgattcataactttatagcccttatgccaaatttttacatctagcagagataaatattaagccactttaccaatgaatctaaacaataatgtatgttgacaattctgaagccatttctaattacatttcacgaatacttttaaaactagcttatttattaaaaatttacttaagtcacataaacttgaaaaagcatttggctcaaagtctgttttttttctgataaagtgtttga

SEQ ID NO: 3337 - DNA, 516 bp, Homo sapiens
  misc_feature 6, 39, 51, 63, 65, 84, 92, 170, 319, 323, 334, 429, 479, 506: n = A,T,C or G
cgcggnggcggccgaggtactaaatggtggtctaggaancagctggccggntagcaccggccntnttttgaaatggatgaggtntggcaccntgagcagtccagcgaggacttggtcttagtttgagccaatttggctagggagggaataggtattgccagcacggttcntgagtcttgtggggatagcttgccattgaagtaaccctgaaggaggtgcttggctgggttagggggttgaattacaaggggtttggggaaacaagcttccgttaccgcgggcccgcttcttagaaacttaggtgggatccccccgggcntgcnagggaaatttncgataatcaaagcctttatccgaataccgtccgacctcgaaggggggggggcccccgggtaccccccaagccttttttggttcccctttttaagntggaggggtttaaatttgccgccgccttgggccgttaaatcaattgggtncataagccttgttttccctggtgttgnaaaatttggt

SEQ ID NO: 3338 - DNA, 650 bp, Homo sapiens
  misc_feature 37, 44, 49, 61, 87, 109, 112, 123, 153, 172, 177, 187, 207,211, 252, 256, 262, 280, 296, 300, 315, 330, 339, 378, 379,380, 381, 387, 389, 408, 417, 445, 504, 512, 531, 534, 535,539, 558, 559, 575, 587, 620: n = A,T,C or G
gcggtggcggccgcccgggcaggtacgcgggatagtnagtttgntttgnggctagtaaaangatatttttctaaatagattggagtnggcatataaacaaatccgtttnctnactaatgacangtcccattgaattcggaaaattttaaagcnccatgaaattcagcccgcnggtcntttaccaccngtggattgcccttggtggtncccngaaggaagaattgggggaaccttggtggccgggccctaggnattnttggcnaccaaggaattaaaaaantaattttggggccttntggntggttatttccccantaattaaaaaaaatnatggccaangttggccaattatttttaatttaccaattccccctttgnnnngaaggncnccaaggaatgggccttggnaaattaagnaaatttttcttttttcccccttaatttnaatttttttcaaggatccccttttttaattaaaaaaaagggggaaaaaaaaaatttaanaaccccanggttttttttttaaaaatnggnnaatngttattaattaaaaatttnnttccccccccccattnttaaccaaaatncccttttccatggttaattttaaaccaattaanaaaaaggggaattttggccttttttttttt

SEQ ID NO: 3339 - DNA, 415 bp, Homo sapiens
ctacttagggcgaattggagctccccgcggtggcggccgaggtactcattttccttgaagtgccaacatgatttatccaaatctgaggaagagaagaaactaaaaaaaggattattcaaattttagatttgtagggaaataatgttttcacttatctcatttggattcccaaaatgctagcttaaaccaagccaagcagtggcataagataatagacccaaaatcagtttatattccagcaggataatagatgagccacagctggatgttctccatttactcatccatgaacaaacatgcactgagtacagtgtggccgtggtgcccacgggcagcttctgcagaacatcctcatccttcagggacttgcccttggggtccaggcggagggactggcgggcggggtacctgcccg

SEQ ID NO: 3340 - DNA, 596 bp, Homo sapiens
  misc_feature 195, 199, 246, 281, 283, 302, 321, 342, 372, 374, 401, 406,413, 445, 448, 479, 490, 505, 506, 513, 515, 519, 535, 569,578: n = A,T,C or G
ccgggcaggtaccagacccgacaggaccagtgcatctataacaccacctacctgaatgtccagcgggaaaatgggaccatctccagatacgtgggaggccaagagcatttcgctcacttgctgatcctcagggacaccaagacctacatgcttgcttttgaccgtgaaccgattaagaaagaaactgggggggcntgtnttgttctaatgccttgaccaaagcccaggagaaccgacccaaagggngccaaacttggggaagtagttttcttaccgaaagncntcttcgaacttgcctttgncgccatttcccccaaaagntacaaggattgttccagttgntaaccccttacggggccccggactttcttnangaaaaccttaaggattgggggaattcnccccnccccggnggggccttggccaaaggggaaaatttttccgnaanttaattccaaaaaggcccttttaatttccgnaattaaccccngggttcccgagaacnnccttccngnaagngggggggggggggggnccccccccgggggtttaaccccccccaaaagtcnttttttttnggtttttccccccttttt

SEQ ID NO: 3341 - DNA, 403 bp, Homo sapiens
  misc_feature 5: n = A,T,C or G
gactnctatagggcgaattggagctccccgcggtggcggccgcccgggcaggtactttttagcagagacatggtttcaccactgattcacttcttgccttagtctcagagatctcagacagaagctgtgaccttcttggctaaccatgatgacagtcgggccctctatgccatcccaggtgagtagttagcatttgaatggtgcccgtcaagaaggagtctggtgtgtctcagggagaggattctgatgtcctgtcatccactgggagggattatgatgctgagaggtatgatatcagggttatcccatactggaacaaggccagttaatgtttcttctcaaccccatctctctcctctcctgtggagtttcaccactgtcttttgcatcttctgtgccaggc

SEQ ID NO: 3342 - DNA, 451 bp, Homo sapiens
  misc_feature 135, 208, 217, 242, 255, 316, 428: n = A,T,C or G
ctatagggcgaattggagctccccgcggtggcggccgcccgggcaggacttgggacagttacaggcatgctgctattgccatgatcttcgggaagctgaagtgatgagcagcagtgtgtgattctgaggacacanagggctggggtctaggagctatctcaggtgggctcagtcagtgccatcctcccgtttggtgcctccctagaantgctgagangatgcaaaaccaaaagcttttactncaacattgcttanccaagctaagcacatgcattccctatgattcagcaattcttgctcctagcatgtatcccanagaattgtcccatgggtccataggggcatataagaaatggccatttgcaagcaaagttctggtttggggtagggggagctgaaagtcatctggttgttccacaaactggagngaatggatgggataaaaatggga

SEQ ID NO: 3343 - DNA, 410 bp, Homo sapiens
  misc_feature 25, 110, 112, 134, 150, 176, 181, 265, 298, 306, 312, 323,324, 353, 383, 388, 393: n = A,T,C or G
aggtacgcgggtgggacgatacctncccagtgtccccaggcagtctaatgatagagacaccttgacgaccacaggcattattatgagagacacactttgccaaacccagncngtctaatgctagagacaattgngcgacaagcattcttngcgggaaaaattcccggctgaccccnaagcnttgtaataaaagaaaagcctgagtgatcccagccatatttcatgggaggagactctttgttcgaccccaggcatttctttatgnggaaggggactactgggccaacaccagtacagntctaatanaaaaanagacattgtannatgaccccatgcatttcttttttttttcncaacatttaaataccttttatttttattanttaanaaaancctcaatttttgttttt

SEQ ID NO: 3344 - DNA, 713 bp, Homo sapiens
  misc_feature 261, 401, 479, 557, 570, 577, 584, 590, 601, 618, 622, 635,699: n = A,T,C or G
tttttttttttttttttttttaacttgtttcactttgacccagactatttttcagaacataaagtcatcaacattcatattacagcaatgctttttcttttctgcccaattagcaccaatataaatcgtttattccatctaaggccctgtattacttcagggaatataaatctaagtcccggccaggtgcagtggcttacgcctgtaatcccagcaccgtgggaggctgaggctgaaggatcacaaggtcaggcgtttganaccatcctgaccaacgtggtgaaaccccatctctactgggaatacaaaaattagtcgggtgtggtgtcacacgcctgtagtcacagctgctcgggaggctgaggcaggagaatcacttgaatccgggaggcggaggttgnagggatccgagatcgcctcactgcactccagcctgggcaagagaccgagactccctcaagcttaaaattaaaatgtanccgtcttaaaacacgagcattgctcctgaatgccacatgccatgaaaaaccgggtatgcactggattggacaaagcanactcccaaagctngaaacanacagaanggcttnttcaggggacncgttccatgggcttganggcnggccgcttttaanaactagtgggatccccccgggcttgcagggaattcgattttcaaagcttatcggatacccgtcnacccttgagggggg

SEQ ID NO: 3345 - DNA, 542 bp, Homo sapiens
atagggcgaattggagctccccgcggtggcggccgcccgggcaggtacaatttgtagttgtttccaggtttggctaataatcattccttaacctagaattcagatgatcctggaattaaggcaggtcagaggactgtaatgatagaattaaattagtgtcactaaaaactgtcccaaagtgctgcttcctaataggaattcattaacctaaaacaagatgttactattatatcgatagactatgaatgctatttctagaaaaagtctagtgccaaatttgtcttattaaataaaaacaatgtaggagcagcttttcttctagtttgatgtcatttaagaattactaacacagtggcagtgttagatgaagatgctgtctacaaggtagataatatactgtttgatactcaaaacatttttcattttgtttaaagtagaagttacataattctatattttaagtcttgggtaaaaaagtagttttacattttataaagtaaagatggtaaatgattcagggttaaagctctatttgacttcct

SEQ ID NO: 3346 - DNA, 386 bp, Homo sapiens
ccgcggtggcggccgaggtacttcgaagtttatccagaagcaaatttaactgtgtcttaaacttgtttcccacgctgatgaagctaagttttcctgctttttgtttagtatctttgttgttatttgtggatgattcaaataattcccgtataaacttatctctggattcacatattaaggattcaagagacatatgtaaagcatcattatttttctccacaaactgggtctgaaaaataaatcaaacaggaatgtttctgtccatcttgtgataacatcacttaacatggctctgtccaaaggaactttctgtgatgacagaaatgttctgtatctgcactgtccaacgcagtcaccactagtcagtgtccccgcgtacctgcccg

SEQ ID NO: 3347 - DNA, 423 bp, Homo sapiens
  misc_feature 4, 95, 339, 401, 414: n = A,T,C or G
aggngtccatggccattcaactcaacaatcaaaccaaagccaaagacatattggcaaaaattttcaaatatgaaaaaacaagaaattactgcacntggcagccgagctgcactttcctttcctaaaatggaaaaatgggtttaaaaaagaaaaggagaagaagtcgaccaggagaccaacagggaagcccccaaaacattgtattccttctttcactaattgggcctgggaacattctccacatagggcaagtccatatagaagaactttggaaatatttcatttcaaagggggaattttgggggttatttccaagttagaactttttttagttttacnttatttaccttaccaaaaaaccttggactttttggtaccctttcgggcccggctttcttaanaaaccttagggtngggattccc

SEQ ID NO: 3348 - DNA, 271 bp, Homo sapiens
  misc_feature 3: n = A,T,C or G
gcnaattggagctccccgcggtggcggccgtgcagacctcctgtgtgccctgttcttcttgttatctttccttggctactgtaaagcatttagagaaagtaacaaggagggagcgcattcttccaccttctgggtgctgctgagtatctttctgggagcagtggccatgctgtgcaaagagcaagggatcactgtgctgggtttaaatgcggtatttgacatcttagtgataggcaaattcaatgttctggaaattgtccagaaggtacct

SEQ ID NO: 3349 - DNA, 237 bp, Homo sapiens
aggtactaggttggcacacaatgggatctgggcttccagcagaggtaggaggctcaggactgtaagaacccaggacagcgccatactgagaccaggaggcacgtggagccaggcagtgctccccgcgtactactcgattgtcaacgtcaaggagtcgcaggtcgcctggttctaggaataatgggggaagtatgtaggagttgaagattagtccgccgtagtcggtgtacctgcccg

SEQ ID NO: 3350 - DNA, 256 bp, Homo sapiens
  misc_feature 250: n = A,T,C or G
aggtacgcgggaacaggagcccactgagaggcccctgaaagggatccagagtcgcctgcggaagaagcgccgggaggagggtcccgccgagactgtgggctccgaggccagtgacactgtggagggcgtcctgcccagtaagcaggagcccgagaacgatcagggggttgtgtcccaggctgggaaagatgacagagagagtaagttggagggaaaggcggctcaggacatcaaagatgaggagcctggngacttg

SEQ ID NO: 3351 - DNA, 241 bp, Homo sapiens
tgcagacctcctgtgtgccctgttcttcttgttatctttccttggctactgtaaagcatttagagaaagtaacaaggagggagcgcattcttccaccttctgggtgctgctgagtatctttctgggagcagtggccatgctgtgcaaagagcaagggatcactgtgctgggtttaaatgcggtatttgacatcttagtgataggcaaattcaatgttctggaaattgtccagaaggtacct

SEQ ID NO: 3352 - DNA, 320 bp, Homo sapiens
ccgggcaggtaccgccacgttcacgcggtccgcaggtttgcccaggatggaggcagcggcggcgcagagtcgtttctccagccccgcggggactcggttggcgggcaaattcgtgtccagctccaggaacggcatggcgggcagaggaacggaaacagctctccccgcgtacagctgatttgccatttcagagtgaaaaggctgcactgtctcaccctgcccccaaagtctaacctatcctattttaactggtattggtaaaaactatttttgcaattccttgccgaaaggaatcaaacggatccctttaacatgtacct

SEQ ID NO: 3353 - DNA, 342 bp, Homo sapiens
  misc_feature 287, 307: n = A,T,C or G
aggtacaggtggtagatgaagaaggggaccaacaacatcaagaaggaaaaagacttcggagggtagcttgcacctgtcccaactgtaaagaaggtggtggaagaggtactgccttctgtgactgggtggcacctccagggcacatttacacaaggccctgaatctgcagaggctgtttctcaagatgcccgtcatggtgtggcctgggccagctctggcttccacaggtccctgactgtcctcagagtggaacatgctcaacctcccgcccactgctctctctctgnccagatttcaggggtgccgntccccaaggcctgcccccttttttaagactgaact

SEQ ID NO: 3354 - DNA, 283 bp, Homo sapiens
ccgcggtggcggccgaggtacgcggggggcgccattttgtagagaaacaagcggagttaaccgaagagggggtcgaggagagccggagtcggggacccaggagtttcctgtgtccagcgctgctggagccgcctgaggtgccatgtttcagaacagagtaagacccctggtaaagaagaactgaagatattatacagataccagatatagcctaattacaaagaaagcattaacctgcctctgaggtgactaaaggggaataatggtgattttgcgccgggct

SEQ ID NO: 3355 - DNA, 353 bp, Homo sapiens
ccgggcaggtacgcgggcaccggtgaaggcaggtgcggtaactgccgcactggaccctaggaagccccaggtattcgcaatctgacctcctcctgtctgtttcccttcacggatcaattctcacttaagaggccaataaacaacccaacatgaaaaggtgacaagcctgggtttctcccaggataggtgaaagggttaaaatgagtaaagcagttgagcaaacaccaacccgagcttcgggcgcagaattcttcaccttctcttcccctttccatctcctttccccgcggaaacaacgcttcccttctggtgtgtctgttgatctgtgttttcatttacatctctcttagact

SEQ ID NO: 3356 - DNA, 348 bp, Homo sapiens
  misc_feature 45: n = A,T,C or G
aggtacgcgggggctgatgccattttcagcctcagcacgcctgcncccaggcgctcattaaaacagcatgttgctccccactgcctcgtgttgtctgttggcgcgctgtcggggttcgaaccgatacaagaaccttccacctacctggtgctttggcctcatctataagcagcttttccactgtcctgaaacaagatagagaatctgagcggccagtcatctgccctaagtgctgccgccgaagactgaatgtcctggaaagtttgctgtcacatctccattatgacaaaagcattgtgccgaacagatgaaaaaatgcattgtcaacggaatcttttatgtttgttt

SEQ ID NO: 3357 - DNA, 348 bp, Homo sapiens
ccgggcaggtacttggacggataaataaaagcctgagtaatattttctaaattcttaaaagtaagaaagagggtctaagaaagtaaactcagagccagggacttggcccatgttaaaccccaagcactacagctggcttttactcaacccgtggaaactgaccagggtatagagcctgatatatcttcttaggtgaaggtgagacaccagacctaaatctgtcatctcaagagtagaaggatgaaccacacatacaaacccatcacagatgaatgcaaataaaaaagtcagctccgaagttgggttctgagcagtgtagattctactgctaaggcttggactacaagc

SEQ ID NO: 3358 - DNA, 268 bp, Homo sapiens
aggtacgcggggggcgccattttgtagagaaacaagcggagttaaccgaagagggggtcgaggagagccggagtcggggacccaggagtttcctgtgtccagcgctgctggagccgcctgaggtgccatgtttcagaacagagtaagacccctggtaaagaagaactgaagatattatacagataccagatatagcctaattacaaagaaagcattaacctgcctctgaggtgactaaaggggaataatggtgattttgcgccgggct

SEQ ID NO: 3359 - DNA, 357 bp, Homo sapiens
  misc_feature 2, 73, 244, 256, 357: n = A,T,C or G
tngggcgattggagctccccgcggtggcggccgcccgggcaggtacttttttttttttttttttttttttttnggagtagaatattgattgtcctatatcccattttcttgaagagattctggcttctaatatatgttcctaaaaaaaaatttatcgtctagtagtgatgtcttcatgtttcacccagctgtctcataggcatgactaagcatctatttcatcacctggctctggatgcctccnctctttaccatnggtgaaaggcatttgctgattccttttgatatacctgaagtattgatgctagagaaatcacttccaatataacagcatcgtttgcagattttcacttctgn

SEQ ID NO: 3360 - DNA, 352 bp, Homo sapiens
aggtacaagccgtccactgcaggaatgacgtgctgtaaaagggatgcagtgtcaagtgtagtcatggatgggtgggaagaccagacaaaggcatccaatgggactgacttacctaaacaaaccagaaggaagtcagaacagtgggaagatctgatagataagcagtattctgcaggcagatgaaggagcaagctttgggcccccaaatcttcaccagtgcatccacattacagaggataatgcctgagggaggggaagatcatctcaggattctggaacactgggccctccctttcttattccaaaaggctggagcagttctgcatgtaggcttctctggaaatggtctagg

SEQ ID NO: 3361 - DNA, 359 bp, Homo sapiens
aggtaccgggaaccaaactctcattccccaggggcctaagccccccgtggccaggcccttctcaagtcagggttcctgcacattcacagttacgggtggccctgggagtaacacctggcacccaaacaggtcaccagagtccacacatagtccacctgccctccctgcgtaagatcagctcttcctcctcccgacgaatagatcagggtcaatgatccctgccaagatggcgactgctccagcctgctggtccaacctgtccagccacagctgttgctcgaaggcttgaagttcaatgggaccctctcccgctttctacaaactggttcctttatttttatgtttatttatttgggacg

SEQ ID NO: 3362 - DNA, 393 bp, Homo sapiens
ctatagggcgaattggagctccccgcggtggcggccgcccgggcaggtaccctttatagaagaagaacagagaaacttttccatgtctgtaaatagcgctgctgtcctgcgattgacaggacgaggaggaggaggaacagtggtgggggctcctagaggtcgaagttcttcaagagggcgaggcagaggcagaggtgaatgtggtttctaccaaagaagttttgatgaagtagagggtgtttttggtcgaggaggtggcagagaaatgcatagatcgcagagcaagagagaagagaggcagaaatgagggcaaaacgggaagaggaagagcgaaagaggcaggaagaactccgaagacaacaggaggaaattcttcggcgacagcaggaagaa

SEQ ID NO: 3363 - DNA, 386 bp, Homo sapiens
  misc_feature 281: n = A,T,C or G
cttagggcgaattggagctccccgcggtggcggccgaggtacctgaaggttttgtctcttaattttctttgaaccacacctcttctccttattataagaaaaaccctcttagggtaagggaagcccaaattaactgtcctgaaattttgcattatatttaaaccataatatttgatttacttctgtcaaacaaaacactaccatttgggttctcatttgtagattatttaaaaacatgtttttcctgttaattatcaatgcatttactatcacaaggattnaaaaagatcacttcaggtggtggggatgtttcatgaaacaccatgggtgggggagtaggtagtggggcaaggcagagtggacaatcagcttaaaccttcctttca

SEQ ID NO: 3364 - DNA, 356 bp, Homo sapiens
aggtactccattctccagcattttctacatctggcaagctcgaaagtgaaaccctagtgggccatcatgcaggttttgagttatttactgttacagatgaggaaactgcgaagctacatggccacagtcaacaacgacaacagaaggcaacatagtatggcggttaagagcaccgactctgaagccagcctgaatcctagagccagagctgtgcaacagcaggtaaatgacttatcctgtgcagtttcctccttaatggaaatagtgcccaggccacaatatcgcgagatttacacgtaaagctggaaacaactcccgtcctagagtaagcactgtttactattaagcagcatcag

SEQ ID NO: 3365 - DNA, 160 bp, Homo sapiens
aattggagcctccaccgcggtggcggccgtggtggtgaagctgtagccgcgctcggtagaggatcttcacccgcgtacccgctaaaactgcacagctcgaccttcatggcgacagctccacggaaagacaaaagatggcgaaaagaaaacccgcgtacct

SEQ ID NO: 3366 - DNA, 371 bp, Homo sapiens
ccgcggtggcggccgaggtactccctagttgtgtctgaattggacgcaccagcacttgagcacacacaaatgcacgtgaacagacggaacatgttatgggcctgttagccaaggaatgacagaattaatccatgggcatttgcggccagtgttgtgttaaactaaagggaaaaagtgaactggaaaaagcaatgtttgttttatgaaaatctcagacccaatccttaggtgacagttctggaaatgaggggtgtctaaaacaaagggcatctgaaacttcggtttttcagcttcctttccttgtctcatgacctctttcctacccgctgcctctgttttctctaatatggaacagtgaaaatgggggccag

SEQ ID NO: 3367 - DNA, 237 bp, Homo sapiens; identical to SEQ ID NO: 3349

SEQ ID NO: 3368 - DNA, 340 bp, Homo sapiens
  misc_feature 314: n = A,T,C or G
ccgggcaggtacttttttttttttttttttttttttttgcatgataagtttccaaggaaccttagtgatggggactgtctcttttaaaattaaattgtgtaaataactcccagagccatgctggtaagaaacaaaacaaaacaaaaagaactagaaacttgaaacaaacgtaggatttctgctggtaaaaggatgcaaagcaggcctgcctgctgcacttccccagagctaatccttgagccaaaagagcttcctggtgaagcctcgcactctccgtaacagggtgtggggggaccgagacatgtgggctccanacttgaccatctttacctagttatgg

SEQ ID NO: 3369 - DNA, 357 bp, Homo sapiens
aggtacccaccagatgtgtctgtcacttccctacatccacctctattgtggttctcatgtttctgcctccctagagaccatttctctgtagagcagcgctttcgaatagaaatacaatgccagacacataagttgttttagattttctagtagtcactttagaaaagttaaaaagaaacaggtgaaattaatgttttatttcacctaaaatgttagcattatccaaaatatcacttcaacatcttatcaaaataaaattattaatgagattggttaccgttccgataaataggtgaactgagagcatacacagtagtattctgttctaatttctgcttcactatgagtgtcttgaca

SEQ ID NO: 3370 - DNA, 342 bp, Homo sapiens
ccgggcaggtacttttttttttttttttttttttttttgcatgataagtttccaaggaaccttagtgatggggactgtctcttttaaaattaaattgtgtaaataactcccagagccatgctggtaagaaacaaaacaaaacaaaaagaactagaaacttgaaacaaacgtaggatttctgctggtaaaaggatgcaaagcaggcctgcctgctgcacttccccagagctaatccttgagccaaaagagcttcctggtgaagcctcgcactctccgtaacagggtgtggggggaccgagacatgtgggctccagacttgaccatctttacctagttatggga

SEQ ID NO: 3371 - DNA, 362 bp, Homo sapiens
ccgcggtggcggccgaggtacaatcagagcctctggaaatttgattcaggcaagtcgggggagtctccggtattcttctctgagaactctgttttcattatacagctggacaatggaatctatgatttgcctgtagaggttagaggtgcatcctttagaaaaatacatattgccagaagcaggctgacttgggcctctcctaccattttcttcatcaaagctgctgtgatgacgttctagcttttctcacaggcagttgttgatgaaaagggtctccttcaggtgctgccactggctctggatctcatctttggctatttccatagccaaggggccttcctgtgcatcaaagaggaaggcat

SEQ ID NO: 3372 - DNA, 819 bp, Homo sapiens
  misc_feature 70, 79, 111, 116, 131, 152, 156, 177, 194, 226, 261, 266,274, 282, 320, 331, 339, 348, 358, 366, 375, 380, 393, 403,414, 418, 438, 458, 503, 507, 512, 534, 554, 557, 592, 595,598, 610, 626, 628, 631, 636, 656, 657, 666, 668, 675: n = A,T,C or G
  misc_feature 680, 698, 699, 703, 726, 729, 736, 749, 765, 779, 784, 787: n = A,T,C or G
ataacttgcgtctgatccaggttgccgaaagggtgcccggttgtagggggtattattgtagggtaagtanaatgtaagngtaagttttttcttggtaagggtactccaatngtcanctccactcctggtcntgtcttggggtaagggttggngtanaaggttgtattatgtaagggngtccaccccccttgtcnaaggtggccccccggggaaaaatcctttgggnaaccggttaaattgggttttccccccccaatttcnaaagncctcccgnccgggggngggaaattccccccccaaaaaccaatttgggcccttgncctttggaaangtttgggnaaaaaaagnaaaagggggnaaaaaaancctttgggnaaagnaaggttttggaanttttggggtnggcccccaagngggnccggccccccaaaggttttnttttttttcccttttgggtnttaaaattgggaaacccttgggttgggttaaattttttttttttngggnttttnggggaaattcccttaaatttanccccccccctttgggttttnttnccccccggaaaaaatttttcctttgggccccccgnttnggntttgggttaaanttccccccccccaaananccnccccnttttgggaatccccccccannaatttgggnanccaaccncccanaaaaaacccaacccaaanntttngggttttttttttttggggaaanggnccctttnccggggggttaantttttaaattaaattnaatttttttttttnttttnccnttccaaattttaaaaaaaaagggggtttttta

SEQ ID NO: 3373 - DNA, 851 bp, Homo sapiens
  misc_feature 92, 110, 114, 119, 121, 140, 143, 144, 150, 152, 156, 158,169, 175, 177, 181, 199, 201, 209, 217, 219, 232, 276, 293,324, 331, 343, 347, 364, 384, 390, 402, 428, 451, 455, 462,474, 495, 510, 533, 546, 569, 589, 591, 616, 638, 665: n = A,T,C or G
  misc_feature 702, 705, 727, 753, 767, 789, 794, 799, 805, 808, 843: n = A,T,C or G
tagggcgaattggagctccccgcggtggcggccgtggcgggggtcacaaggcagccatcatgttcttggggcatcgtagggacctgctgggnggtgtaaggttttcccgngtcnacctngntggtaagtaagtccttcgnatnnccttgncntggngnccttttcccanccgggncnttgngtttgtaagtaagggggngnccatatangtctcagngnccattaaaaaagnaaaaaattggggaagtaaccggttggggggaaaagggggggggnaaccccaattggttttnggaaccttgggcccccaaaaacctttttggnccggggnaaaggggttccnaagncccaattttgggaaggncccttgggggcccccaaagngggggnaaaaaaaaccgnggtaaggggccaaggggttggggttnggaaccaacccccaaccctttcnaatngggggtnggggcccttggnaagtaaaccaaaaggggggtngggggttttccaagnaaattcccccccccgttttaaangggtttttggggntttggtttgggggtttccaaagncctttttcaaaaggaaaggntngggcccgggggaaaaaggccaaggnaaattaatttccaatttaaggnaaagggggggcccccttcccgggtttnggtttccaaaaattggggcccaaaatttaaagggggnttncctttccaaattccaaaggttnaatttttccctttccttaaacccccnaaaaacccttgggnaaattggggggaaacccggggnaagtnaaagngggggnttngggggcccaatttttgggtttaaaggggggggccntttccgga

SEQ ID NO: 3374 - DNA, 931 bp, Homo sapiens
  misc_feature 71, 97, 110, 121, 131, 133, 139, 176, 250, 257, 266, 269,284, 338, 341, 374, 391, 394, 400, 402, 429, 454, 469, 474,481, 488, 489, 490, 493, 494, 500, 510, 516, 518, 526, 527,545, 556, 572, 604, 614, 619, 628, 643, 646, 663, 674: n = A,T,C or G
  misc_feature 690, 704, 729, 734, 767, 772, 775, 781, 808, 817, 822, 836,856, 862, 868, 883, 891, 897, 903, 922: n = A,T,C or G
ctatagggcgaattggagctccccgcggtggcggccgaggtaccccgccatggaaccaaacaccacgtcanactgggtaactctttcttggcaatanaccgtataagggnctgggataggnatgcataggnanattggnaccattttcttcaaccaccccatccaagtcacaaagnccttttaaaaattaaccttgctttttgggaccaaaaaaaattaaaattaaagtgaaaaaattttattaattttntgggaanccttccaanggnaaaaaaaaaattaanaaaatttttcttgggttttccaaggccaagggaaagttgggaacccaggggggnaangggggggttttccccaattttttccaaattttngggccaattttttgggnccnaacccngnaaggggggggggcccttcctttatccntggggtaaagggggggggggcttgnaaaagggggaatttnggggnggttttnggcccannnggnnaaattnggccccccancccaangngttgggtnnacccaaaatggggggggnaaaccaaattngggggggggggggttngggcccggggggggggcccccccccaaaggtnccaaaagtgnccaancccaaaagnggggcccttgggggnaanaaagggtttttaagggnccccttggggnaccccgtcccaatttnggcccttttttttngggggccctttttttttaaatttcnccccnaacccggggggggtccccggggggggttttaanggttnggngggccncccggggtaaacccccccccctttggngggcccttnggttnggggggcccccttngggttccccccccaaaaggngttggngaaggnaaacccttggggccnaaaaaccntttggnttttcnccccccccttttttccccnttccccttt

SEQ ID NO: 3375 - DNA, 744 bp, Homo sapiens
  misc_feature 43, 63, 70, 75, 78, 82, 98, 102, 116, 133, 135, 144, 146,148, 161, 189, 198, 203, 215, 218, 244, 261, 271, 287, 299,305, 327, 337, 347, 363, 375, 380, 385, 412, 422, 433, 439,446, 456, 458, 471, 482, 502, 505, 517, 534, 541, 553: n = A,T,C or G
  misc_feature 560, 563, 570, 572, 581, 604, 629, 636, 679, 682, 684, 692,701, 703, 706, 718, 720, 723: n = A,T,C or G
agctggtttcctgcccagcctgggggcaatacctaagctccgngtaagggctccgtaagtgtncccaatntggtntgngtcngtcttgtaaggttggntacnttgggtctcctggnaaggggttccatattgngntggccatanangngtaagtctccgcnccaccccggggggccaataggttcttgnctcctgggntaagntggtccttgggntgnccttgggttgggttttttaaaaattnccaaggggggggggaanttatccaagnggggcccccccccttnggggggggttantttccntttttttttttttctttttttncccttttccncctttttttnccttttttcccctttnggggccccaaanggaangaaantggggggccttttaacccaaggggccnaatttggggnaaccaattggnccaagnggttttngggggccaananaaacccggggggnccctttttggnaacctttttttgggggcctnggnaatttttttaanaaaaaaaaaaggttggngaaaggnaaaaaaaaaggnaaaacanggnttaaaananaaaaaaaangggggctttaaaaaatttttttnttttccctttttccccttccttggnttaaaanggaaattaatttcctcccccaatgtccgttttaatataataanagnanaataatantaatataanantanaaaatattatangnagnagggggtttaacccccctttt

SEQ ID NO: 3376 - DNA, 367 bp, Homo sapiens
  misc_feature 115, 116, 160, 168, 179, 186, 194, 198, 212, 219, 224, 225,227, 231, 233, 244, 245, 258, 262, 264, 303, 307, 311, 348,351, 364: n = A,T,C or G
acttagggcaattggagctccccgcggtggcggccgccgggcaggtacgcggggaagtgaggcagcggaggacgacctttttccggttccggctctggcgagtagtttgttgtcnngtcgacatggaaacctggcttacccacaatctgcttgtagtctncgcaatgntgtccggtggngggtggnggtttccncgtnggtctttctccccncctggcntcctnncnaggncncaaccccgaanngtttcccgtttantccntngcccccttgttggggaaaaatttcaaacccccccaaacntttnaatngggccgccgttatggattaccccttaaaaagttgggnaanttgggttccgggncgg

SEQ ID NO: 3377 - DNA, 797 bp, Homo sapiens
  misc_feature 2, 46, 61, 70, 78, 84, 88, 90, 96, 100, 102, 117, 123, 138,144, 180, 188, 194, 196, 198, 214, 219, 221, 230, 232, 249,254, 270, 296, 299, 300, 304, 347, 362, 379, 385, 397, 413,417, 424, 431, 441, 448, 458, 465, 468, 469, 476, 479: n = A,T,C or G
  misc_feature 481, 489, 494, 501, 539, 559, 562, 567, 582, 590, 592, 595,610, 623, 633, 660, 664, 668, 670, 673, 681, 689, 697, 703,715, 723, 727, 753, 755, 765, 773, 775, 780, 796: n = A,T,C or G
anctggtttcctgcccagcctgggggcaataccttagcccggtaangggctccggaagggnttcccaatntagttttngtgtcngtcntngtaagnggtngnttcttgggtctcctngtaagnggtttccataatggnggtggnccaaatatgggtaagtctccgtctccaacaccgggngtccaatnggttcntngnctcctggggaagttgnccttngnttgggcctngnttggttttttaaaattnccaanggggggggggaattanccaagggggccccccccctttggggnggnntttnttccctttttttttttttcctttttttcctttttccccctttntttcctttttccccntttgggggccccaaaangaaagnaaaaaggggggncctttaaccaaggggnccanttggggnaaccaanttggccaagnggttttnggggccaaanaaaccgnggnngcctttnggnancctttttnggggnccttggnaattttttaaaaaaaaaaaagggttgggaagtaaaaanaaaggaaaaaaagggtttanaanaaaanaaaaggggggttttnaaaaaatntnttnttttttccccttttnccccttccttggnttaaaaaggnaaattaatttcccccccaaaggccctnttantaananaanattataanataataanaataatanaatganaaaaggtttaancccccttnccgngggggccccccggcctttcctttaangnaaaaaacccnttaaaggngntgggngggtaaatttcccccnc

SEQ ID NO: 3378 - DNA, 859 bp, Homo sapiens
  misc_feature 114, 118, 128, 149, 153, 155, 178, 185, 202, 206, 208, 212,219, 221, 226, 229, 236, 240, 247, 258, 263, 308, 322, 329,342, 365, 378, 381, 400, 405, 421, 438, 439, 461, 462, 468,473, 481, 492, 506, 508, 516, 538, 556, 577, 584, 605: n = A,T,C or G
  misc_feature 659, 662, 670, 681, 717, 750, 752, 753, 772, 788, 789, 807,811, 813, 824, 827, 832, 842: n = A,T,C or G
tagggcgaattggaagctccccgcggtggcggccgtccacaaatgtctgcaagctaccgatggggaccctcaagtcttgctgggtacaagggtaataggtaagggtattcatangtcnttataagtanaaggggctcccagtgaaggtngttngnccataagtccatgtaagtaagtnagggggnttggtggggtaccaagnaaananaacncttttgncnctttnctncgcaagngggncctaagnttggggcccgnaaaanaaggcctttaattccttcaaaggggccttgggggccttccaaaanggtttggggggaanggaaggnaaaaaaaaaaaanaaagggcccatttgggaaaaggnaaattcccaaaanggnccaaaatttggggggaaanccaangcctttgggggggggnaaaaggggggccttggnnggccttttttttaattttttannctttcnaaganttcccccnaaaggcctttncaagtttccccccntnggggccanccttgggggggcccccggtttnggccccctttttgggttnaagggggttccccccctttcnttgggtnggccccccaaagggggttccnttttggccctttattgggggggggggggtttttgggttttttttcttttggggnccnaatttttnataaagggggntcctttccaaagttttttccaaaaaaacccgggccnccaaaccccccggtttgctttttctccaataantnnaaaatggcccccccttttntaaacctttggggttnncccaacccccccctttantttncnttttaaaaaanggntttanaacccccccnttttaaaccctttcccc

SEQ ID NO: 3379 - DNA, 757 bp, Homo sapiens
  misc_feature 44, 70, 96, 113, 117, 141, 156, 164, 174, 175, 182, 188,197, 233, 254, 255, 261, 266, 274, 284, 293, 302, 318, 325,328, 355, 357, 363, 365, 393, 409, 418, 425, 440, 448, 450,455, 482, 484, 489, 504, 511, 512, 530, 543, 554, 567: n = A,T,C or G
  misc_feature 572, 585, 613, 628, 648, 656, 665, 745: n = A,T,C or G
ccgcggtggcggccgaggtacgcggggcttttcacaagtatggngcgcccgtaaatagccgtatatgtanatgtgtataagtccttcctggtctcnccttctcttaaaaatgncatngtatatgtccccatataagtccgnataagtgtccttttnatataagngtctccatanntaaaagngtccangttggtttngtataaaaggggtcggttctccatccaagtctccanccaaataaataagggaaaagnnaaaagnaaatncccccgtnaaaccggttnttaacctcnccaaccccnttttttccggggtccnggggccnccngtctttcctttaaggaaaaacccttanangttggngngaatttccccccccccggggggccttgncaaaggggaaaatttncggaaattnttcccanaaggccttttaattncggaaatnanccccngtttcgggaacccctttctttaagggngnggggnggggggcccccccgnggtttanncccccccaagtccttttnttttggtttttcnccccttttttnaaagttgtaaagnggggnttttaaaattttnggccgggccggcccttttggggtccgtntaaaatttccaattnggggtttccatttaaaaggnccctttgntttttttcncccttggtttgggtggggaaaaaaaatttttggttttttaatttcccccgggcttttcaacccaaaattttttctcccancccaacccaaaa

SEQ ID NO: 3380 - DNA, 645 bp, Homo sapiens
  misc_feature 52, 61, 63, 68, 87, 89, 103, 119, 134, 140, 151, 161, 165,167, 175, 181, 211, 225, 238, 240, 253, 290, 311, 327, 354,384, 400, 416, 418, 427, 467, 478, 498, 512, 524, 574, 596,622, 641: n = A,T,C or G
aggtacacgctggttggacctattcatggcatcttcaccaagcagctggggnagtcaatcntnccacncctttgggggttatttttncntgggggtgggttanaaaatattatcttgtngtaaggccttccttnggtggnctttttggtanataactccanggtntntgggaatnaaaagnttctccttttttaccttataagggggaagnccttcccttggganaagggggggcctngnccccccttggggncccccaaggggggggaagggccccctccccggaaaanttcccttttttccaaagtttnccttcctttccaaaangaaagggaacccccaaacccaaagtcntttggggggggggggttttaattaaaaagngtttttaatttaaggntttttggggggggaanancctttttcncctttttaaccaagggaagggttttttaaatttccaactnaaggggggttnagggccttttttgggttccnaaaaaacccaaaanggaaaccttaanaaaggccctttaattttgggtaagggccttttggtttccccccggaaaancctttttttggcctcctttttnttggggggaaacccccaaccttttcntttttcctgtttttttttngggg

SEQ ID NO: 3381 - DNA, 818 bp, Homo sapiens
  misc_feature 38, 48, 67, 79, 83, 107, 135, 139, 154, 156, 162, 164, 169,175, 190, 192, 213, 232, 234, 245, 297, 306, 344, 379, 386,396, 397, 437, 438, 457, 464, 466, 487, 504, 511, 522, 526,527, 536, 560, 565, 606, 612, 620, 632, 643, 646, 649: n = A,T,C or G
  misc_feature 660, 676, 687, 692, 697, 710, 730, 753, 794, 797, 800, 807: n = A,T,C or G
aggtacgcgggctcctacttggataactggtggggtanatgtctaagnaggcttatattacaatggnctcggaccgggngtcngtccttgtactctctcctttttcngtccgggggggggggggtaatgggccgntggnccatttttgattcangnatgcananaaacncaatanctcccggggttccangnctccccctttctttcccgggnccgcccccgggtcccccgncnttccttaaggnaaaacccttaaaggttgggggaatttccccccccccccgggggggggccttnggcccaaanggggaaaaaattttccgggaatttaatttccaaaaaanggccctttttaaatttccggaaattaacccccggntgccggnaacccctttnnttaaagggggggggggggggggggccccccccgggggttnncccccccaaagcctttttntttgggntnttccccccctttttttaaagnttggggaaagggggggntttttanaaatttttggnccgnncccggcccnttttggggggccgggtttaaaaanttccnaatttggggggttgccaaatttaaagggcccttcgggtttntttccncccttggnttggggttgggnaaaaaaaaatnttnggntttttaatttncccccgggcctttccnaacccaaaaanttttnccccnaaccaaacccaanaacccaaatttaaaccccgnaaaggtccccccggggggggggnaaggggcccaattttaaaaaaaaaggtttgggtttaaaaanaanggnccccctnggggggggggg

SEQ ID NO: 3382 - DNA, 902 bp, Homo sapiens
  misc_feature 58, 61, 69, 81, 105, 115, 154, 162, 186, 190, 196, 203, 211,226, 238, 269, 352, 370, 376, 419, 433, 452, 485, 488, 505,520, 564, 570, 587, 593, 599, 611, 617, 633, 634, 676, 682,684, 699, 711, 720, 734, 738, 744, 764, 781, 814: n = A,T,C or G
  misc_feature 834, 843, 850, 878, 891, 894: n = A,T,C or G
ccgggcaggtacataaagtgccatgtcagggccttctgggcttcttaactctgcaatnctncttctggnatttgctttggncttggccaatggggtctatctcanctccaaccanaattccattgggtgaaaggtgaaaccaatttgtgatttntttctttnaaggttaaaatgatataaaacctncctnaaccanaccaatnggccccgnaattaagggaacctnggttgcctttcntgggaaaagggggccaaaaaaaccttgggtnggtttaaaaaaaaagggttttcccctttttttccttggaaacccaagggccaaagggcccctttccaaaccccctttgggttnaaaattcccccccaaggncaaccnttttttggggggggaaaagggcccccggaaaggggggccaaanggggggcccaaggnaacccccaaaccctttttngggaagggccctttccaaaagggggggaaattnttnttcccgggaaaccaaanccccccaaggggccnccctttgggggggaacccaaaaaacccaaatttggggggggccnaaaaanaaaaaaacccttttccncccggntttccntttccggggggnccgggncccgggccctttgggnnttttggggcccttttccttttccccccgggcctttttttccncccggncntccccgggttttccntttcccccccgngcccggggnaaaaaaggggcccntttncctttnaaattttcccttttcccttncccccccccccccgggncccggggtttaacccccccttttccgggggggncccccccggggccttttccnttaaaaggnaaaaaancccttaaaaggggttgggggggggaaantttcccccccccnccncccggggg

SEQ ID NO: 3383 - DNA, 588 bp, Homo sapiens
  misc_feature 99, 141, 148, 159, 173, 186, 187, 201, 214, 260, 272, 276,285, 305, 322, 336, 341, 356, 361, 364, 382, 388, 393, 409,413, 428, 450, 466, 467, 470, 482, 522, 543, 545, 549, 567: n = A,T,C or G
tgggcgattggagctccccgcggtggcggccgaggtacgcgggaaccgctggatccgagaaattcaaaaagtgaccaaactggtatcgagtatcctgcnattcaggtaacctggtctttacagggaaattagttttttggnctaaacnttggtaatcgntgtcggttattacncggcattcgcagnnagtaatacggggtngtagtccccgggnaaaggttttcttccctggaacttcctggggaattaattctttgganaaaaccaatggnggcnaaaggcggncttttccaatggcccacccngttcaagttttttttgnaacaacctggaacnaccangggttccttttatanaccanggnccttttttggggaaaaancctggnggaanattgtaccctcaccanattnccctttttgggattngcaaataggaattttttccccnttcttggaaaattggnnttntttgcccttggnctccttggctcaaccgggcaatcccttgggggatcccaanaaaaattaattggaaccaagngntccnggcccttttggtttttgncccaatttttttttcaaccgg

SEQ ID NO: 3384 - DNA, 737 bp, Homo sapiens
  misc_feature 75, 87, 89, 91, 93, 98, 107, 119, 135, 184, 186, 188, 192,198, 200, 258, 272, 294, 308, 318, 327, 330, 345, 346, 354,360, 366, 373, 377, 391, 414, 443, 444, 451, 455, 477, 509,510, 524, 544, 545, 546, 553, 556, 560, 568, 577, 591: n = A,T,C or G
  misc_feature 598, 603, 605, 608, 609, 623, 625, 629, 643, 653, 677, 684,688, 689, 695, 702, 730: n = A,T,C or G
ccgcggtggcggccgaggtacagtgaaactgcgaatgggctcattaaatcaagttataggtgtcctttgtggggntcagtcttccgncntncncttcnttcctaacntgtggggatganaccttgggtgggggtnataatttgcttatggaagaccttaaattatccactggtccccggaccgngngnccgncattgnanccccccctcttttccggccggggggggggggggggaattggccgtttgggccaatttntttaatttcaaggnaattccaaaaaaaaaccccaanaacccccccggggnttccaaaggnctccccccnttnctttcccccgggggnncccccccngggggncccggntttcttnaagnaaaaccttaaggtnggggaattcccccccccgggggncccttggcccagggggaaaattttgccgnnacttaanttcnaaaaggcccttttaattccggnaattaaaccccgggttccgtaacccccttttnnaagggggggggggnggggggcccccccggggttnnnccccccnaantccntttttttnggtttttcncccctttttttaanggtttgnaaagngnggnnttttaaaaattttngngccngtcccggccctttnggggggccgntttaaaatttcccaaattgggggnggttccnattnnaaaggnccttggntttttttttccccttgggtggggttggnaaaaaaa

SEQ ID NO: 3385 - DNA, 810 bp, Homo sapiens
  misc_feature 105, 121, 141, 143, 148, 155, 159, 178, 184, 197, 204, 224,230, 257, 271, 276, 278, 283, 295, 297, 302, 303, 308, 322,327, 337, 353, 374, 382, 395, 405, 407, 415, 416, 420, 457,489, 501, 511, 518, 545, 547, 554, 556, 559, 561, 582: n = A,T,C or G
  misc_feature 590, 613, 614, 615, 628, 631, 654, 660, 663, 674, 676, 677,685, 697, 700, 702, 709, 721, 741, 749, 751, 766, 772, 808,810: n = A,T,C or G
atagggcgaattggaagctccaccgcggtggcggccgaggtacacggtctttgcggatgtccacgtcacacttcatggtatggtaagtttggtaaagggttgggnttcttcgttgggtatngtctccggctataggtaatntncccanttactcnccangggtaaaggggtatagggncttggngtatatccagtcngctcctnctccggggaaccaactccgngtaaancaccggccttccaattttggccccaanaattggggggttgnaattngnaaccncctttggggggncncccanntttcngggggggggccaanggccnttccgggttnaaaggcctttcttttntcttttcccccaagggaaggnaaaaagtnaaaggggggaaanggggaatttngncccggggnngggnttgggggccccaatttctttcccttggcctttccggnaaaaggtttcccaagggggggccggaacccgntttaaggccaanccaaaggccntttttcnttcccctttttgggaaatggggttccngnccggccnanccngnaaatttttttttcccccgggnctttccgnggtcccccggcctttcctttaannnaaaaaccctttanggngttgggggggaatttcccccccnccccgnggnggtcccttggncnnaaaggggnaaaaaatttttnccngnaatttantttccaaaaaanggccctttttaaatttccgngaaatttnancccccgggttttctnggaaanccccttttctgttaaagggggggggggggggggggncn

SEQ ID NO: 3386 - DNA, 826 bp, Homo sapiens
  misc_feature 79, 88, 90, 130, 184, 186, 199, 205, 213, 223, 239, 244,253, 262, 269, 274, 285, 287, 289, 303, 305, 308, 311, 322,385, 410, 416, 430, 441, 477, 479, 491, 497, 515, 533, 539,548, 551, 573, 582, 593, 596, 608, 609, 611, 621, 635: n = A,T,C or G
  misc_feature 638, 640, 641, 645, 649, 654, 656, 666, 683, 687, 692, 698,710, 716, 726, 741, 784, 785, 799, 802, 809: n = A,T,C or G
tcactatagggccgaattggagctccccgcggtggcggccgaggtacgcgggatttgatgtagttttcttttttaaatntatatcagnanatactccccacttttcccatttgggttaatttggttcctnggaccaccaatgggccttcttcaaaattataattaaaattaaataatggggggnanaaatgggtgccgnaatttntttccaanaattaaaatnaaggaccttttaattnattgnccaaggggnccttgggtnccggttntttcncccgggggttntnantttgggtttttggntnggnttnaaaaagggttncccaaaaacccttcctttttccaaaaggcccccctttccaaatttttccaaacctttgggttncccccttgggggccttttttttaantttttnaaaaaagggaaaanaaaaaaaaaanaagggggccaagggtttacttttccccccttttttntnttaaaaaattgnaaaggnccttttttccaaaggggnaaaaagggtttttgggcnttgggnaaggaaaanaanttggggggggggtttggggggnaaaaattanagggggggggnaanacccttgggttnnanaaattggggnccccccaacccttnggnannaagncccnacccngntggtaaaggnaagggaaaccccccccnttcnggccnaaaaanaaaaatttgggnaaattnggggttgggnaaaaaaaaggggggnaaaccccccaaagggtttttttttcttttttggggaaaaaagnntttccccccaaggnttngggtttntttttcccccaacccgg

SEQ ID NO: 3387 - DNA, 468 bp, Homo sapiens
tcactacttagggcgaattggagctcaccgcggtggcggccgcccgggccggtaccgcgggagctcgggctcctgagggcgacggtcctctgatggcagatgcgggagaaactctggcgtcaggcggccctcgcgtggagcacacgaagtcgtggcttattctggcttcagtatgtggggtggagaaggcgatccacgcagctgcgtctatttcctgtggatcaatcgcaaaataccgttctgtaagccccgcccccactgcgtgcgggcggcttttgtctccatggcaaccgtcaactctggaaacgcctgtctttctccatggcaactgtctacgccgcaggctggagctgcccattaccggagcccatatggcaatgacccttggccagtctctgggaactaaactcctgggatgtttacacaggtgctgggtaagatgttctttccatatgctcaagaccacgg

SEQ ID NO: 3388 - DNA, 438 bp, Homo sapiens
ccgcggtggcggccgaggtacaaaaaattctacatgctgtggccatagctggcgagccactaggaccttgcacttttcctattaccttaaggcctgatccaaataatccacagcagtttattcatgaacacactccagtaaaatttaaattattgaaagaattaaaagctagtgtggttaataatggaatacagagcccatttactttaggattgttagaatctgtattcagcactatgcgcctcccacccttggatataaagcatttagcttgcacttgtttctctgctagtgcatatttgacatggaatttaaattggcaagaaatgtgtgcagaccaggctagacagaatctcaccgctggacatgggaacattacagaggaaatgctattgggtagtgactcttattcagatctggtgcaacaattgacacttc

SEQ ID NO: 3389 - DNA, 748 bp, Homo sapiens
  misc_feature 37, 84, 93, 103, 111, 113, 114, 124, 139, 145, 147, 151,157, 161, 167, 169, 173, 177, 191, 199, 204, 208, 218, 225,237, 241, 246, 250, 275, 282, 307, 316, 343, 362, 380, 401,414, 441, 453, 456, 460, 505, 507, 554, 580, 636, 647: n = A,T,C or G
  misc_feature 655, 713, 742: n = A,T,C or G
ccgcggtggcggccgaggtactgtgctgagaaatggngccccttggccaaggatggctgccccttcttcctttccttcttctgncgtaagggnccaagtaaanggttccangnnaaaaggggtnatgtaagtattttgncctggngnccanaaaaancctnggtggnanaagntgcncccaccccccttgnggggggtncttcnaaancaccccccanaaccttnctccaaccttgnaagnggggnccangtctccttctccccttgggaaccgnttgggtnggttgggaacctttaagggggccanagtttaaangggggggtttggggggccggggttttnggaaattgggggcccgggnccccggccttctttaagnaaacccttaagttgggggaanttccccccccccngggggcccttggcccaagggggaaaanttttcccggaanttntttnccaaaagggcctttttaatttccgggaattaaacccccggttccngnaccccctttctgttaaagggggggggggggggggccccccccggggnttgaacccccccaaagcctttttttnggttttcccccctttttttaaatttggaaagggggggtttttaaaaaattttgggnccgggcccggncccttttngggggcccggtttaaaatttcccaatttgggggggtttccaatttaaaagggcccttngggttttttttcccccttgggttggggtngggaaa

SEQ ID NO: 3390 - DNA, 435 bp, Homo sapiens
  misc_feature 91, 95, 124, 135, 147, 152, 187, 191, 203, 283, 300, 317,322, 343, 381, 420: n = A,T,C or G
acttgggcgattggagctccccgcggtggcggccgataggcaagcaccggaagtaccccggcggccgcggtaatgctggtggttctgcatncacncacacggtatcaacattcgtacaatatanccactccaggnctacttttgggnaaagnttggtatggaagcattacccactttattaggaggnaacncagtagcttttnttgcccaaacctggtcaacccttggaccaaaaattggtggggaactttttgggtttccaagtggaaaaccaagaccaccnggttggaaaatgggccngccttaaaaaaaaaacnaaagnacctgggggggcctggcttcncccaatccattttggattggtgggatggcccgaatccngggggccttaaccttaaccaaaaaggttttcttgggggnaaaaaaggggggaaa

SEQ ID NO: 3391 - DNA, 434 bp, Homo sapiens
ccgcggtggcggccgcccgggcaggtactggtggccgtgggacccacgaccgagacccgagtgagaaaccaccccggctccagtggtttgaacagcaggcgaagaagttggcaaagcagcaggaggaggacagcgaggaggaggaagaggacctggatggagacgattgggaagatattgattctgatgaagaattggaatgtgaggatactgaagcaatggacgatgtggtggagcaggatgcagaggaggaagaggctgaggaaggcccaccccttggtgccatccctatcacggactgcttattttgttcccatcattccagctcgctgatgaagaatgtggctcacatgaccaaagaccacagtttctttattcctgatataagaatatctttcagatattaaggggactgattaaatacttggggagag

SEQ ID NO: 3392 - DNA, 860 bp, Homo sapiens
  misc_feature 38, 40, 63, 90, 101, 103, 118, 139, 141, 147, 186, 188, 192,195, 205, 227, 239, 253, 277, 291, 316, 330, 336, 337, 387,390, 405, 428, 466, 475, 520, 528, 543, 573, 589, 592, 593,595, 596, 598, 602, 605, 608, 611, 614, 619, 625: n = A,T,C or G
  misc_feature 633, 638, 639, 641, 644, 647, 649, 650, 652, 653, 659, 662,666, 668, 680, 682, 722, 738, 798, 810, 831, 834: n = A,T,C or G
gctgtggtggctcacgcctgtaatcccaagcactttgngngtaagggctggtaaggtcaaggnttagtattcacctcttggtaaggggtncaagggtaagntnttccgtaaggaaccncaagtctcttggggtctccananccaatnggggtgggaaaaacccccctgggtgcttcttaaccttananaaanatnattaaaaaanatattttaagtccccaaggggnttggtttggggntgggggcccggggnaattggcccctttggttaaaattncccccccaaggccnttaaccctttttggggggggaaagnaacccttgggaaangggggnnaaggggggaaaccaaaaattttccaaaccttttttaaaaaccccccaaanggnaaagggggccaaggnaagggggcccttgggcccaaggnttgggaaaggcccccaaaaagggaaattttgggttaanccccccaanttttgggcccaaacccttccccaaaaggccctttttggggggggnccaaaaanttgggggggaaaggnccaaaaaaggggaaaccctttccccccaanttcccttttttaaaanaannannanaaanaanaanacnaanaatantatatnaatataanacaannanaanaanannannaatganggngttnancccccccttggngnccccccccggggggggtccccgggggggccccccggggcnttttcctttaaaaggnaaaaaaccctttaaagtgtttggggggggaaatttccccccccccccccccggggggggnccctttgggccnaagggggggaaaaaatttttnccnggaaaatttaatttcccaaaaaaagg

SEQ ID NO: 3393 - DNA, 769 bp, Homo sapiens
  misc_feature 66, 80, 96, 100, 108, 141, 166, 183, 197, 200, 204, 206,218, 226, 233, 242, 251, 273, 276, 284, 285, 286, 313, 315,326, 337, 350, 357, 375, 443, 448, 485, 487, 513, 525, 536,538, 542, 547, 553, 554, 559, 572, 576, 586, 589, 592: n = A,T,C or G
  misc_feature 617, 632, 634, 635, 639, 640, 642, 655, 661, 664, 697, 706,744: n = A,T,C or G
aggtacttcctgcacacacgcgccactctgaccattgcagggctggcaaatatggttcataagatncaccttagatatanatacctgttcaatgcnagcnccaatctnacatagggaatcggctcatttgtatatataganggccaccttctaagaccatccgagnctagttttagaccgtgncctggggccccttntcncctncnaatggtccaacntttccggntggggtnaaaaggggnaaccaaacnccccttgggggaacccttaacnttnctccaagnnnaaaaccaacccccaattggggggaaantnttccaaggccngcccttttttnaaaaaattatttnggaaggnaaacggttttcctttggnaaaatgggaaagttttttttttttccttttaaaaaaaattggggttggggaaaaaaaaggaaattaanttccncctttttccgggcccgggccctttcccccttgggttntngggaacccaaatttcccaaacccttnggggggtttccnaaaggtttttntnggtnaaggnaaaaannggttnggggggggggggngaangggaaaaatnaanaanaaaggggaaaaaagggcccatcgtnaaaaatcccttgggnannactnnanaaagggaaaaaancccttnttntttttaaaattgggggaaaacccaataaagggnaaaaaaagnaaaccccggggggggccaaataattttttcccaaaccnaaaaaaaaaggggcccccccccttt

SEQ ID NO: 3394 - DNA, 885 bp, Homo sapiens
  misc_feature 80, 105, 127, 138, 144, 156, 187, 197, 206, 224, 229, 242,245, 262, 277, 311, 327, 388, 459, 474, 479, 480, 488, 532,540, 566, 569, 577, 583, 595, 601, 605, 609, 620, 628, 640,643, 647, 676, 706, 716, 726, 729, 735, 745, 766, 773: n = A,T,C or G
  misc_feature 795, 798, 821, 826, 845, 857: n = A,T,C or G
aggtacacggggcccccaagactcgtatttggtggactggggtctccaaagggggtcttggtggggtcttgggcaatggncttggcctttcgggggggggatttnctctttttggccaaggttttcnctgggaagggnaagggnataattcttttncttcccccaccaaccccggggttttttcctngtttttccgntttttgggnaaaggggaagttttttgnaaggnaaccccttggggngtngggttcccccttggggnccctttcaaattccnccaaggtttttccccccgggcctttccccaaagnaaattccctttttccngaaaagggggaaaagaaaaggtttgggaacccaaagggcccccttttcttttccaaagccnggcccttccttcccccggggggcccaaaaattgggcctttccccttggggccaacccccccaaaagggggnccccctttggggggnaaagnnccctttcnccttggggggggggggccccaaggggggaaatttggggggtttnccaaaggnggggaaaaaaccctttgggccctttnccnccaaaggncccaanccccccaaaggnttttanaggncccntttcccccaangggggggnaaatttcccttnggncccnttccccctttttggggggtttggggtttnggggggaaaatttccctttccggggggggncccccctttnctaaaaggtnccncccaanccctttcccnaacccaaagggcccaaaggtnaaaagtncccaaccccccccccggggggnaangttttttggggggtccctttccnaaaanggggggggcccccctttcnttttccgggggnggggggggtttccccaaaaggggggggg

SEQ ID NO: 3395 - DNA, 846 bp, Homo sapiens
  misc_feature 41, 44, 48, 59, 65, 67, 69, 80, 82, 85, 91, 94, 95, 106,126, 158, 168, 182, 191, 196, 205, 210, 217, 221, 225, 233,235, 246, 248, 262, 291, 296, 301, 304, 314, 326, 328, 349,354, 362, 379, 381, 387, 417, 419, 424, 425, 426, 436: n = A,T,C or G
  misc_feature 442, 451, 472, 486, 489, 497, 510, 513, 518, 542, 563, 569,577, 582, 593, 594, 595, 598, 631, 632, 644, 675, 706, 716,721, 725, 739, 742, 783, 790, 804, 810, 833: n = A,T,C or G
gggcgaattggagctccccgcggtggcggccgaggtgcatncantganatatatatgcnaaagangnanactccattgcngnttnctttgntgnntacaagggtgnacacatgtcaccagacaccncaagtacacgatgcaacagtccagcgcattgntccaattganccggtggaggtgcncctgtcacnaggcnatattggcnccgantaacgcnccanactnggctccancnaaaggttgaantngccccccttggttncctccaaccccaaaataataacccttggnggggnggggnccntttcgttttnaacccccaaaananaaccccccttgggcccccccnaaatngcgttccncctttccaaattctttntnggcccnttgcccctttaaaccaagggttttttgggntnccaannnaaaaaaccanaaaggntgggggggnttcccttaaaaaccttttttntaggttgggccaanttnatttaaantttttaaaaaaanccnttgcncccccaagggcccccaagccttantttggtaaaaacccaacccanaaaaantgaacccntgggnaagggggaaannnaanggaaattttgggtttcccaaagctttttttggnnttaaaaaggttntttcccccccttttttttaaaaagcccccgnggaccttttttttttaaatgaattttttttntcttgggttnaattntttnaaattttgttggtnttnaaaaattggggcccaattgggggggcccccttgggtttttnagaaaanaccaaatttaaccntttttnggggggggtttgggccccccaanaaggggggtttgg

SEQ ID NO: 3396 - DNA, 442 bp, Homo sapiens
ccgcggtggcggccgaggtacgcgggggaactttgccaggtaaggaggcagagggatgatgcttggcagaaagagtatctaacaagcttgcatgtttgacagaagcagcagccatgaagaatgaaagttttaaaacacaaggagcaagttcaaaagtctcgctctatcaccagtctggagtccagtggcatgatctcaagattacttgcagccttcacctcccaggttcaagcaattctcctgcctcagcctcccgaggagctgggacaacaggcacatgcgaccatgcccagaaacagcagctatgaagcctgcaaatttgaaaaaaagaaaagaacgtgcaaaagaacacaacctaaaagtggcttcagaggaaaagcaagaaaggctccaaagaagtgaaaataaacagccacaggattctcaaagttacggaaaaaag

SEQ ID NO: 3397 - DNA, 877 bp, Homo sapiens
  misc_feature 3, 83, 90, 97, 99, 111, 117, 120, 130, 141, 143, 148, 157,165, 184, 186, 217, 219, 235, 241, 249, 253, 258, 260, 277,284, 297, 305, 327, 328, 330, 351, 359, 372, 396, 433, 446,455, 463, 498, 505, 514, 516, 561, 594, 623, 633, 640: n = A,T,C or G
  misc_feature 667, 683, 690, 726, 727, 736, 769, 784, 835, 847, 855, 877: n = A,T,C or G
ggngcgaattggaagctccaccgcggtggcggccgaggtacagctctaggccggaagttggggctcttcggtatcgcttaagnatttctnccttctntntgtcttgtcatnttttcnccnctctcacagnttctccttcgntnttctnctcccgtcnggttcatngtctccttgtccgggtacncnccggggaagtaaaagggggtaagtaaaatgngnaaggaagggggggggncctggncaccggcnttcnccttncnttggcccggccccggtnggccttncggcccccccttnccggtttnacctttccgggcccccccccgnngnccccccggcctttctttaaangaaaaaancctttaaaagttngggggaaaaattcccccccccccnggggggccttggccaaagggggaaaaatttttccggnaaatttaatttcnaaaaaaggncctttttnaaattcccgggaaattaaccccccgggtttcccgnaaaaccnccttttctntnaaagggggggggggggggggggggcccccccccggggggtttaanccccccccaaaaggcccttttttttttggggtntttcccccccccttttttttaaaagtttngggaaaaggnggggggnttttttaaaaaaatttttggggcccgncccccgcccctttttnggggggncccgggttaaaaaaattcccaaatttgggggggttnnccaaatttnaaaaggggcccttttgggtttttttaccccccnttgggtttggggttngggaaaaaaaaatttttgggggtttttaaatttccccccgggccttttccnaaaccaaaaaantttttccncccaaacccaaacccaaaaaan

SEQ ID NO: 3398 - DNA, 917 bp, Homo sapiens
  misc_feature 76, 79, 94, 115, 132, 134, 140, 148, 158, 162, 165, 168,178, 199, 211, 213, 217, 219, 238, 240, 242, 247, 256, 266,281, 323, 348, 379, 397, 414, 426, 457, 471, 473, 478, 480,485, 493, 495, 530, 536, 537, 547, 548, 549, 551, 565: n = A,T,C or G
  misc_feature 570, 600, 606, 608, 610, 612, 615, 616, 617, 618, 621, 623,624, 629, 635, 653, 666, 692, 704, 706, 715, 724, 746, 752,754, 773, 778, 785, 789, 790, 805, 862, 868, 877, 884, 896,901: n = A,T,C or G
gggccgaattgggagctccccgcggtggcggccgaggtacaaatggaataagtgacaaactctaatttggttaggnaanaccattttttagggnctcatggtgattataggtttnacccacctgggattttntnttaagnccaacttnaaaggccttnattnatnttntgtaattcancaagtaatgggggggttgcanctcttttaatananaggnanataaaaccttaataggggnangnaaatngggggaaantgggaaaatncctgggaaaaaattncttttttttcctaaaaaaaattaaccaaaaagggggttaagntttttaaaacccaccccaaatttanccctttcaaaaagggcccaagggaaaaaaantttttattttaaaaattncccctgggttatttttnaaggaagggaantaaccctttttttttttttttttgggaaggnaaccaagggaaggntnccttncnaaccnttcccttnanttccaaacctttccaaagggggccccttggggggnaaaggnncccggcccannngnaaccccccgggttnccttnccaaaaaaaaaaaaaaaaaaaaaccccaanaacccnanantnaannnnccnannaaaanaaaaancccaaaaaatttcccaantttaaaggggaancccaaggggcccaaacccttgggttnattttttttttncnaaaggtttnaaggggggnaaaaaaaaaatttaaatttggncccaananagggggggaaaggggggtnaaagnggggtanaggnnaaaaaaaaccccaanaaccccttggggttcccttttttgggccctttgggaaaggggggggggcctttaatngtaaancccggtttngggtttnggggccctttcnctggngaaaaaggaaaaaaaa

SEQ ID NO: 3399 - DNA, 570 bp, Homo sapiens
  misc_feature 125, 160, 166, 169, 178, 182, 185, 191, 201, 204, 227, 238,246, 251, 288, 320, 335, 337, 348, 354, 358, 364, 379, 386,431, 434, 442, 448, 457, 462, 486, 505, 527: n = A,T,C or G
ctattagggcgaattggagctccccgcggtggcggccgaggtcaggcgctttgagaaggagaagctcaagtcccagtgggaacaatgataattccccttttcaagtagtcgtctcactcacgtancggttcatggaactcccaagttttgcctgagtagnttaggnagncactttggntgtnagnacaagngctcgttctnggnaaccccactcaatggtcttggcnccccatttcancgccgggntccgntttctttaggaaaccttaaggtggggtattccccccnccgggggcctgcaaggggaaaatttcgaattnttcaaaggcctttantncggaatacccngttctngacnctttcntaagggggggggggncccccgnggtttacccccaagccttttttttggttttcccccctttttaagntgnaagggggnttttanaatttggcngccgnccctttggggccggtaaaattccnattggggttccattaaagntccttggttttttcccctttgnttggttgggaaaaaaattttggttttaattcccccggcctttc

SEQ ID NO: 3400 - DNA, 841 bp, Homo sapiens
  misc_feature 93, 103, 109, 114, 116, 122, 134, 138, 180, 182, 186, 190,196, 197, 200, 202, 249, 274, 276, 285, 287, 310, 321, 322,360, 393, 399, 406, 423, 429, 435, 446, 461, 475, 504, 528,548, 554, 559, 592, 598, 603, 606, 609, 625, 638, 640: n = A,T,C or G
  misc_feature 647, 654, 662, 669, 672, 682, 683, 697, 730, 737, 740, 771,794, 801, 802, 811, 813, 816, 823: n = A,T,C or G
atagggcgaattggagctccccgcggtggcggccgaggtacataggtttatctcctattgggaatattttctttattattaagggccggtttnattttttttncttttnttttntntggggnaagaaaccaagnaagnttcttttggccttcctgggtttgggcgcccaagggtcctggngnaagnttgnccaagnntgngnccgtccggaacctgggggaaggccttcaaccttggccaaaacccctncgcaaccttttgctccccggggggntnttccaaaangngtgggaatttttgggtgcccccnaaccccctttnnaaggcccctttcccccttgggaaaattaaagggccttngggggggaaattttaaattaaaggggggttggnccaatnggccttnaccccaaataacccctnggttcnttcttnaaccttaaaanaaaaaattaacccanaaaaaaaaattttngggttttttaaaggccctttccttgggtntttttttttccaatttaaaatttnaagggaaaaaaaattaaagnaaaaanaaaangggggttaaaaaaaaaaatttttgggccttttntttttnccttnttnccntggggaaaaaaaaaanggaaaaaaccaanangggtttnatttttngggttttnccaattnccncccaaaaaannaaaaaggggggggnttttttttttttggggtttgggaacccttgggnaaaattnccnaaaggcccaagggggtgggccccccttgggnccccccctttaaaggtttccaanttaaagnncctttgggngnggnccttttnccaaaaaaaaaaaaaacc

SEQ ID NO: 3401 - DNA, 694 bp, Homo sapiens
  misc_feature 33, 43, 53, 55, 57, 102, 106, 116, 122, 146, 153, 177, 188,210, 224, 229, 240, 253, 267, 270, 289, 307, 349, 385, 386,387, 403, 405, 410, 425, 443, 454, 457, 475, 496, 510, 511,525, 526, 527, 547, 553, 555, 557, 558, 561, 571, 573: n = A,T,C or G
  misc_feature 574, 579, 594, 600, 613, 616, 625, 629, 639, 654, 656, 672,677, 680, 682, 685: n = A,T,C or G
acacacagccaggcgctagggctccctgcgggngtacctcagngtgtaagggngngngtatagtagtccgtttctataccatattgttttaccgggtagtgngttnctccaagtcnccgtcntgggggggttcaagtatttggtangtaccanatatctccaatttgggttgttggngttttgggggntttccggggggttccaagtccnaaggggccttgggnaagtnaagggggggtnttccttggttttncctttttttttttnggnaattccaatttttaaattnccggttttttgggggggnggcccccccccaaaatgggggggtaaaaggggggggtttccntttttgggggggaaaaggccccaacccctttggaannnccccccccaaaaaaangnccttnggggggaaaaaaaanttttcccccttccaaggnaaggcctttgnccntccaatttggtttcaaanggggaaaggccccctttttcnttccaaaccttggnntttgggcctttggnnncctggggttttccccaaagngggggntncnnccncccttttggngnnctccngccttttctttaagnaaaaanccttaaaggttgnggnaaaattccncccncccccggggnggcccttggtcctantnggggaaaaattttccnggaanttnanttnccaaaaagg

SEQ ID NO: 3402 - DNA, 775 bp, Homo sapiens
  misc_feature 11, 63, 85, 87, 91, 93, 97, 108, 118, 120, 122, 128, 129,144, 146, 150, 157, 167, 173, 181, 183, 193, 197, 206, 208,216, 219, 223, 228, 243, 252, 258, 259, 261, 268, 271, 291,309, 340, 353, 362, 367, 380, 385, 391, 405, 407, 411: n = A,T,C or G
  misc_feature 455, 464, 487, 498, 499, 508, 516, 537, 550, 554, 566, 576,578, 589, 601, 616, 635, 636, 681, 693, 694, 710, 717, 718,735, 740, 751, 758, 761: n = A,T,C or G
aggtaccgcangggaaagatgaaaaattatagccaagcatatattattatgtcaaggggtacnttatatctctccttatgactcntnttcntngtcnatgataatggnatactcttanancnttatgnnaacaattatatcctntntggncaaaggngtaagtaagnctccanataggtcntnatatgtaacncccncccgtatananctccaagnganccgnaaggnccttaactccttaanagggaaaanccaagnncntttttanaanaagggaaaggcccaaccaancccccccggtttctttantttgggttaaagggccaaaaaaaaatttaanggttggggggggnaaaaagggnaattntttaatttaccgnggttnggcatnggggccggaaccananaacncctttaaccccgggaaggcccccttgggggtttgggaaattatnggcctttgngggttttggttcccccaaaaggnaaattaaaggnnaaaattccnttttaacngtttttccaaaaacccttttntttaaaaaaattntttngggccccccaanccaaggcaananccccccccttnctttaaaaaaanttccccccccccttntgggggtcaaaaaaaattnnttttaaaaaacccttggggtttttaaaggtttccccccaaaaaantgttaagggggnnaaaaaccccaaaggtncctttcnntttttttgggggggaanccaancccttaatggnggggaanaanaaaaaaaaaaaccc

SEQ ID NO: 3403 - DNA, 769 bp, Homo sapiens
  misc_feature 136, 147, 159, 200, 212, 233, 235, 239, 241, 283, 289, 321,326, 342, 377, 388, 410, 467, 514, 515, 518, 533, 536, 555,582, 613, 630, 651, 658, 722, 744: n = A,T,C or G
atactatagggcgaattggagctcaccgcggtggcggccgaggtacgcgggggtgaacacctggggcaagcttctatggcctcccccgggggttctgggttgggtatggttttcccgttggtggttttttgggtcnccaccccggcnaccccgttaatncaaaggtggccttcaaattgggttgggggcctttcccgggnaaaaccttgggncctggaaaaggggaagggggncnccancnccccggggttggaaccaattctccggaaaggcccccctttcnaaccgncccccccaaggaaaacccccggggcccccggntttcnttaaagaaaaaccttnaggtttgggggaaattccccccccccccggggggncctttgggccnaagggggaaaattttccggaantaattccaaaaggcctttttaattcggaattaaccccggtttccggaaccccctttntaagggggggggggggggccccccccgggggtttaacccccccaaannccntttttttttgggttnttnccccctttttttaaagttnggaaagggggggtttttaaaaaatttnggcccggcccggcccttttggggggccgggnttaaaaattccaaattnggggggtgccatttaaaaggnccttggntttttttccccccttgggttgggttgggaaaaaaaaattttgggtttttaaatttccccccggncttttccaacccaaaaattttntctcccaacccaacccaaaaaccca

SEQ ID NO: 3404 - DNA, 560 bp, Homo sapiens
  misc_feature 71, 107, 110, 114, 123, 127, 163, 166, 169, 193, 240, 281,306, 314, 346, 355, 369, 390, 404, 413, 428, 430, 453, 474,483, 487, 489, 506, 525, 559: n = A,T,C or G
cgggaaatcgtgcgcgacatcaaggagaagctgtgctacgtcgccctgggacttcgagtcaggtagtatgngtctcgctcgtctcgtcatgcctcctcttctctggnagnaagnagcctactnagcntgctctcgtatgggcccagggtcattcactcaattnggncanattggaggcgggtttcccgggtgnttcccggggaaggccgccttggtttcccaagcccttttccctttttnccttgggggttaaattggggaaatcctttgccgggcaattncaaccggaagaacccacccttttcnaaccttcncattcaatggaaagttgttggaaccgttgggnaaccatttnccggctaaaaaagnaacccttggtttaccccttcngggccccgctttcntaaggaaanccttagggttggggnantcccccccccggggggccctggnccaagggggaaattttcccgnaattaattncaananggccttttaattccggnaaattaaccccggtttccnaacccctttccgaaaggggggggggggggggccnc

SEQ ID NO: 3405 - DNA, 857 bp, Homo sapiens
  misc_feature 29, 52, 62, 65, 88, 98, 100, 104, 106, 110, 114, 133, 148,157, 179, 203, 232, 309, 316, 323, 357, 364, 383, 385, 389,395, 402, 428, 474, 476, 494, 517, 531, 537, 538, 552, 575,587, 608, 611, 637, 645, 671, 677, 708, 714, 749, 789: n = A,T,C or G
  misc_feature 791, 794, 808, 821: n = A,T,C or G
aggtacccctccaagccggacaacccggngcgagggtaccgcactcaagtcngggtaggggnacnattgggggctccaggattacctnatccttcaangnccgncntggncggnaccaccttaccaattcaanaccccttcaattcanctccagggnccagtaaggattattggggganaaaaaaccggaatgccttaagtcnccccaagggaagggaccaaccttggaatnttttccaaggaacccccttcctttttggaaattggaaaggaagggaaaaaagggcccacccaagggaaaaaaaaatnggttttnccccccnaaaggaaaaaaccttccggggggcctttttgggnaaaaagnaaccccctttggccaaaantnggtnggggtnggaaatngggggggaaaaaaaattgggaaaggnaaaccttttgggccttcctttccttggggggccccctttttttttncncctttaaatttttttttntccaagggccccccccaaaattnaattttttttttcnaaattnnccggggtggggttnaaaaaaaaaaacccgggaaaggnaaaaaaatttcncccaaccccccccccaaattnccncctttaaaccccccaaaaatttgggnccaaattngggcccaaggggcccccaaacccttnggggtnggggccctttgggggaaaaaatttttttccnttgggncccaaaaaaattgggggtttttttttttccccccnttttttttggggtttcccaaattcccaaatttttgggggntnaanttaaatttaaattngggggttgggggnttggggtttttttttaaaaaaaaattttaaaaaaaa

SEQ ID NO: 3406 - DNA, 847 bp, Homo sapiens
  misc_feature 52, 60, 64, 68, 73, 78, 84, 86, 104, 122, 124, 135, 141,144, 162, 176, 188, 194, 212, 252, 264, 292, 294, 363, 388,408, 410, 480, 512, 568, 577, 599, 615, 623, 630, 638, 668,680, 684, 703, 742, 755, 774, 781, 783, 784, 798, 803: n = A,T,C or G
  misc_feature 805: n = A,T,C or G
aggtacctgcaggcctcctacacctacctctctctggggggtcttttttatnttcggacnccgncggnatggnatggntggggncnttcttgggggaaaagggnccgtttgtaagtcccacntntcttttcccgnccgtanacntgggggctccgtaagggnaaggaaaagtccgnccgtaggggggnccttanccggaaggccggtgcttncccttggaaaaggaatgggccaaaaaaaaaaccccaaagncccggttggggnccggggggcccccggcctttccttaaangnaaaacccttaaaaggttgggggggaaattcccccccccccccgggggggcctttgggccaaaagggggnaaaaatttttccccgaattaattcnaaaaggccctttaaatcccngnaattaacccccggtgccggaaccccttcccggaaagggggggggggggggggggccccccccgggggttnaacccccccaaagggcctttttttttggggtnttcccccccttttttttaaaagtttgggaaaaggggggggtttttaaaaaattttngggcccggncccgggccctttttgggggggnccgggttaaaaaattnccaaattnggggggntccaattnaaagggcccttgggtttttttccccccttnggggttgggttngggnaaaaaaaaatttttggggnttttaaatttcccccgggcctttccaaacccaaaaattntttcccccaaccnaacccaaaaaaccaaattnaaacccngnnaagggccccccggnggggngnaagggcccaaatttaaaaaaaaaagggtttgggggttaaaaa

SEQ ID NO: 3407 - DNA, 458 bp, Homo sapiens
acttagggcgaattggagctccccgcggtggcggccgaggtacaaccacttgacttgctctttaacatagtcctgtgagatgccagctgccatgaccaagcagtattcccactcctcctctacactctggcaaggctttcctggaacatccccatgcccacatctttacccagtaactcactaaagccactcttgactcaagcaggtgccgttccttgatcacggaatctacctttgatttcatcaggccagattcacaaacagaatgggagtgctttatctatacctttgagaggatggagagtgaaataactggaaacactgggttatcacagcttaatttcatccaggcttggtgtctttaccaaagatggttggggaaaggaagggagattcatcttgttcaggcagtgatttgctcagaattttacaagacataccctatacagacctatttg

SEQ ID NO: 3408 - DNA, 474 bp, Homo sapiens
  misc_feature 385, 414, 417, 451, 454, 461: n = A,T,C or G
cactacttagggcgaattggagctccccgcggtggcggccgttcctctaagtctccgccacgcaggaaacaaaagcgatagaaggtccgttcctgtcctccggtgctttgatgagttcaggctgaagccgatgggggaggaggagaagctgcaagttaacagctgaagaataagttcatgaaaaaattgccacgtgatgcagaagcttccaacgtgcttgttggggaggttgactttttggatactcctttcattgcctttgttaggctacagcaggctgtcatgctgggtgccctgactgaagttcctgtgcccacaaggttcttgttcattctcttaggtcctaaggggaaaagccaagtcctaccaccgagattggcagaanccattgccacccttgatgtctgatgaggngtnccatgacattggcttataaagcaaaagacaggcnccnacctganttgctggtattga

SEQ ID NO: 3409 - DNA, 574 bp, Homo sapiens
  misc_feature 172, 179, 192, 197, 200, 210, 231, 269, 297, 298, 310, 339,342, 347, 363, 379, 405, 410, 419, 426, 433, 439, 454, 459,468, 474, 476, 504, 507: n = A,T,C or G
aggtacagtgaaactgcgaatggctcattaaatcagttatggttcctttggtcgctcgctcctctcctacttggataactgtggtaattctagagctaatacatgccgacgggcgctgacccccttcgcgggggggattgcgtgcatttatcaagatcaaaaaccaacccgngtcagcnccctcttccggcncccgngcncgctcctagnaacttagttgggtatcccccncggggcctggcaggaaatattcgattattcataggctntaatccggattaccccgtccgaccttcnnaggggggggggnccctcggttaaccccagccttttatggtntcnccttnttaagatggagggggntttaaaatattgccgncggccttgggccgataaattccaatngggtncaataagcnttgaatntcccctngttggntggaaaaatatggtntaatncccggcttncaccananttttccaacaaccaaaccaattaaccgnagnccccggggggaaggccaattaaaaaaggttggttaaaaaaggccccttggggggggttggcccctta

SEQ ID NO: 3410 - DNA, 552 bp, Homo sapiens
  misc_feature 138, 168, 176, 188, 191, 194, 223, 230, 231, 245, 254, 259,263, 269, 271, 276, 291, 302, 304, 311, 314, 319, 322, 324,378, 394, 401, 406, 444, 452, 464, 481, 500, 504, 510, 515,522, 524, 526, 541: n = A,T,C or G
aggtacaccaaggtggtgcattaccggaagtggatcaaggacaccatcgtggccaacccctgagcacccctatcaactccctattgtagtaaacttggaaccttggaaatgaccaggccaagactcaagcctccccanttctactgaccttttgtcctttagggatgngagggganccaaggggtttngcntangggaaaattgtaatattcaatgccagaancaccagnntggtatgaacacancagctggtntttcnctanaaatgngnaggtnaaatattttggttcncttctacatgntngttcccntgnggggnaanantaacctgggacacaattggctcttggggagggaccaattaatttcaccttccanattttttctttcttgnaaggggnaccanccaagaaattaaggggaattggggggggggttggttcnttggttgntttaaatatatngatggggggtggttaanctccttggccacccagggngtcnggggcncggcntttcttnantnaaaccttaagttggnggaattccccc

SEQ ID NO: 3411 - DNA, 574 bp, Homo sapiens
  misc_feature 132, 145, 174, 177, 200, 210, 233, 236, 253, 262, 270, 285,287, 292, 296, 298, 311, 312, 314, 322, 333, 346, 350, 357,360, 371, 398, 402, 404, 421, 423, 429, 431, 440, 442, 450,453, 469, 473, 484, 496, 508, 511, 529, 532, 534, 568: n = A,T,C or G
ccgggcaggtactgatgacacaaacatggcagacactttcaccgagattatgaccatgatgtcgccttcacagttcttgagttcatctcctttgagaatgacaaataatgaagacagtctgagtcccaccangcagcactctgtnaaaacccctgggaaacttggattggccanccngaaaaaaggggaattcggccaangccttttcangggaagtaaataggaagaaaggncanatattccgaaaagtagnccttgtaangtatgggnaaaaccatgggtaancnaatgnaagncnaggaagtggcttnngnttgggganaggatggcttngtaaaaaaattgnccanacctttnggnaggggttttgnaaaaaaaaaccggatgtggggccatgnccangnctaaggccggggccacncnctttgngntaaaaggcncnccaaggcnccnccaagtttggcccccnccanggggttccaantttaccttggtnccaaagggttcnatngtaattccaaggcaaagnccnanccggggcatagggccccttttggggactttcccnttccca

SEQ ID NO: 3412 - DNA, 471 bp, Homo sapiens
  misc_feature 187, 194, 410, 444: n = A,T,C or G
ggcgaattggagctccccgcggtggcggccgaggtacttctatgggaaagtgaacacgttctgtgacaggaaacatctctgtccatgccagcatagtagttgtatggacttctaaccagttgagttttttaaagcattgaggattttttcctcttaccaactcctcttcaggtttttaaagacccanccccttnccaatctcaaaagagaaaaaggaaactgagttatcttgaataacataactttttaatcaaatgtttattttggcttgtggatcttggtgttatttaaaaaattgaggtgatggtcattgcaagctcatctattaagtacgcgggctctcggccttagcgccatttttttggaaacctctgcgccatgagagccaagtggaggaagaagcgaatgcnccaggctgaagcgcaaaagaagaaagatgaggcngaggtccaagtaaacccgctagcttgt

SEQ ID NO: 3413 - DNA, 523 bp, Homo sapiens
  misc_feature 75, 104, 108, 217, 254, 267, 272, 281, 292, 302, 306, 316,329, 337, 339, 352, 353, 357, 372, 435, 442, 446, 502: n = A,T,C or G
ccgggcaggtacgcggggcttctcgcctaacgccgccaacatggtgttcaggcgcttcgtggaggttggccgggnggcctatgtctcctttggacctcatgccngaanattggtcgcgattgtagatgttattgatcagaacagggctttggtccgattggaccttgcactcaagtgaggagacaggccatgcctttcaagtgcatgcagctcactngatttcatcctcaagtttccgcacagttgcccaccantaagtatgtccgncaagnccttggccngtaaaggcatnacatcaatancaantatgggcaanctcacaccgatgnggcccatngnaagtattggaagnncagnaagaaaagggaaaangcccaaggatgacaggatttttgattcgctttttaaaagtttaattgaaagggcaaaagaaanaatggangganaccagaaataattcaaagaaatggaaagtttaaaggaaagccttcaaaaaaggcangcctcttcctggaaaagcctt

SEQ ID NO: 3414 - DNA, 639 bp, Homo sapiens
  misc_feature 70, 73, 107, 179, 191, 194, 222, 225, 229, 242, 261, 270,273, 297, 321, 362, 375, 382, 388, 409, 420, 422, 424, 438,442, 445, 456, 459, 463, 467, 482, 483, 485, 495, 506, 514,515, 519, 520, 524, 526, 538, 580, 587, 589, 599, 617: n = A,T,C or G
  misc_feature 631: n = A,T,C or G
ctgccgcccgggcaggtacttgaccccacagccatatgagccacttctcagccaccatgtcttcaaattnatngacattgaactaggagaagccccatttctttganaagtggatcgtctggcagccagagaacttgaacttggccctgtgcagggccttaattcacaatgcttccctngttcttgcagcnttnggtggcgggaacgggaacatggggaacnttntgcncaaattgtggacnccccttgacccaacaaggnggcccctgnggnggcttttttccaatagggccaccnttcgccattgcccttgtttttganaggcccttaccatttgggggggttaaattggccatacgggntccatggaaggancaattgnaaaacnattaaccaatttcttggaatnaaggggccccntnantttaattccaaaangggnttncccccttttanagnaagnccanaacccctttaattanngnagggggaaanaacaagggggngttggccnntttnncaancnccaaccccaaanggggaaaaggcccttggctttggttttttggccaagggcccnattttgncnaacaaccctnggggggccccccccccanttaaagggggaaanaggggaaa

SEQ ID NO: 3415 - DNA, 557 bp, Homo sapiens
  misc_feature 164, 167, 168, 184, 213, 218, 232, 254, 256, 257, 268, 269,271, 276, 279, 313, 319, 320, 323, 332, 340, 368, 388, 407,411, 417, 436, 456, 495, 529, 531, 540, 543, 556: n = A,T,C or G
aggtactctggatatgggaggagctcagggttgttggctaagatgtaattttaaggaaacactttatatttcataccaagtaagaatttcaatggcaatgaatattaccacatagctgtatactgtaactcagggattctgtcatatgaagtgcaaacattacncgnngcttgtaaccatccanagtcccaggggtcacatttggcatgccanaaagntactctgcccgggncggccgctctagaaacctagtngnnatccccccggnncntgcanggnaatttcgaatattcaaagccttatcagtataacncgttcnnacncttcggagngggggggnccccggttaccccagctttttggtttcncctttttagtggagggggtntaattttgccgcggctttngggncgttanattcattgggttccattangcctggtttttccctgttgntggaaaaaatttgtttattcccggcattcaccaaatttnccaccaacaaaaccattaccggagtccccggggnangccattaanaanttggttaaaaagnc

SEQ ID NO: 3416 - DNA, 545 bp, Homo sapiens
  misc_feature 31, 47, 134, 178, 195, 207, 218, 234, 240, 243, 256, 271,283, 284, 293, 304, 306, 343, 349, 351, 353, 355, 361, 365,377, 378, 381, 387, 390, 392, 407, 436, 438, 440, 466, 481,487, 488, 494, 498, 503, 505, 507, 510, 513, 529, 531: n = A,T,C or G
  misc_feature 534, 536: n = A,T,C or G
aggtaccaaaccaaagccgtcatcattgcantgatcatcactgcggnggtatccatttcagtcaccatcttctgctttcagaccaaggtggacttcacctcgtgcacaggcctcttctgtgtcctgggaattgngctcctggtgactggggattgttaactaagcaattgtggccttntacttttccaaataccnttttacctgggncttcccaacantgccttctaattgccntgcttnctngggggggccccanttttggtgtttcaanccccttggtttnncttgggccntttaaccgacnancaaccatggctttgggttctctttggggggggaaaanccccgngnanangaccancaanctcaattccatnntcnccccgnggnangggaacttaaccaanttcaactttggggccggcccccttggccnangnaattttttaaccatccaagggaccanttccaattcccttanccaatnncctctnccanccccntntntgnttnggccttggccaaggcntnggnantgggggggg

SEQ ID NO: 3417 - DNA, 546 bp, Homo sapiens
  misc_feature 283, 310, 313, 335, 343, 346, 398, 411, 450, 457, 520: n = A,T,C or G
aggtacagtgaaactgcgaatggctcattaaatcagttatggttcctttggtcgctcgctcctctcctacttggataactgtggtaattctagagctaatacatgccgacgggcgctgacccccttcgcgggggggatgccgtgcatttatcaagatcaaaaaccaacccggtcagcccctctccggccccggcccgctctagaactagtgggatcccccgggcctgcagggaatttcgatattcaaaagtccttattcggatactcgttcgaccttcgaggnggaggggccccggttacccaagctttnttngttcccctttaagtggagaggnttaaattngcngccgccttggcggtaaatcaatgggttcaataagcctgtttttcccttgtgntgaaaatttggtntatcccggcttcaacaaaattcccacaaccaaccattanccgaagncccgggggaggccattaaataggtggttaaaaggccctggggggttgccctaaaatggaagtngaagccttaaacttcaacatttaaat

SEQ ID NO: 3418 - DNA, 468 bp, Homo sapiens
  misc_feature 13, 18, 21, 174, 396, 398, 400, 408, 412, 419: n = A,T,C or G
cccgcggcaggcngccgnggnacgcgggggctgatgccattttcagcctcagcacgcctgcacccaggcgctcattaaaacagcatgttgctccccactgcctcgtgttgtctgttggcgcgctgtcggggttcgaaccgatacaagaaccttccacctacctggtgctttggnctcatctataagcggccagtcatctgccctaagtgctgccgccgaagactgaatgtcctggaaagtttgctgtcacatctccattatgacaaaagcattgtgccgaacagatgaaaaaaatgcattgtcaacggaatcttttatgtttggttgtcttcctttaagcaacattgccttacttgtttataaaagataaataaatatttgttcatttctaaaaanananaatcctantaanataaaangtacctgcccgggcggcccgctcttagaactagtgggatcccccgggct

SEQ ID NO: 3419 - DNA, 631 bp, Homo sapiens
  misc_feature 140, 145, 154, 155, 160, 215, 276, 290, 299, 303, 317, 330,340, 343, 354, 366, 379, 381, 382, 387, 391, 403, 410, 419,437, 438, 441, 488, 491, 493, 499, 502, 506, 508, 509, 515,516, 519, 521, 526, 530, 548, 549, 584, 591, 594, 609: n = A,T,C or G
  misc_feature 616, 617, 620: n = A,T,C or G
aggtacgcgggatgaaagcaaagagaaaggatggaggcaaaataaaaaaaaatcacgtttcaagaaatgttaagctcttcttggaacaagccccaccttgctttccttgtgtagggcaaacccgcttgtccccccgcgcncctgngttggtcanngcttnaagggatttttttaccctcacacttgttgcatttttgccacaagcaagatatganaaagacttgttttattattaaacaagctttattttattgtattaaatatttaagcttgggnaaagggacccaagngtcgccaanaagnccttctcctcttgntggaccattggtngaacttcttngtncaaaatctggnaaagtaccaagnggaaccaattttnannatatngaangtaggcccgcanggaaggnaaggaaagnaaaaaaaccaaggttttnncanttaaattttaaacctttggccaacccaattggtttgtgtactttctnttntnttcttnttntccnanntacacnncancnctatnatanaacaatttatggggtttnncccctttgtcccccccgggggcccgggggccccgncctttcnttnaaaaaaacctttagnggtgggnnganttccccccccc

SEQ ID NO: 3420 - DNA, 524 bp, Homo sapiens
  misc_feature 60, 204, 263, 294, 299, 304, 311, 318, 322, 323, 359, 372,394, 430, 448, 457, 462, 472, 473, 481, 486, 488, 491: n = A,T,C or G
aggtacgttcctggcaatggcttcagcctcatcggggcccacacggacagcccctgcctncgggtgaaacgtcggtctcgccgcagccaggtgggcttccagcaagtcggtgtggagacctatggtggtgggatctggagcacctggtttgaccgtgacctgactctgggctggacgccgtcattgtcaaagatgccactacanttaggtccggtttggaagcagcaagcttggtggcacgtgggagccggccccattctttngcattcccacaccctgggctcattcctcatnttgcnagcgnaaaatantcaatcngagnnaaccttttgggggccccaaaccaccaggaagaatgncattcttagttcnccccatttctttggcccaccangcccaattctcaaaggaagggaaggccttgggaagnaaagggggggaaccttcncttggaagncccanggggcccctnnttcaaaantgccntngtnggggattggaagccgggccaacccattttccgg

SEQ ID NO: 3421 - DNA, 120 bp, Homo sapiens
agccctgcaggcccctgccctgaaggcctggggcgggaagaaggagaacctgaaggctgcgcaggaggagtatgtcaagcgagccctggccaacagccttgcctgtcaaggaaagtacct

SEQ ID NO: 3422 - DNA, 477 bp, Homo sapiens
gcttttggagctccccgcggtggcggccgaggtacgtcggaaataaactatttccagactgatacttcagtgtttccttttattttttatagcgtataaaagtttctgaggtgggggcaatattttgataagagtagtcgtttagctaaaactaagtaacattaaggaaacacattgtctggtcttaatatgttagtgcaacacacagtatatatatgtttaagcaactattggtgagtgggggctacagggattaccaggagatgatctctcaattcagaatggcattattgtgacaaaggccaccagatacccactcctcatagacccacaaactcaaggcaaaacttggattaaatcaaaggaaaaagaaaatgatttacaggtgacatctctgaaccataaatattttcgcacacacttggaggacagcctttccttgggccgaccccttctcattgaggacattcatgaaga

SEQ ID NO: 3423 - DNA, 672 bp, Homo sapiens
  misc_feature 190, 193, 211, 237, 244, 246, 248, 263, 270, 276, 304, 308,316, 318, 343, 344, 358, 362, 372, 381, 383, 388, 401, 416,424, 428, 435, 441, 456, 458, 461, 469, 472, 486, 491, 501,505, 507, 517, 529, 533, 544, 550, 555, 557, 575, 581: n = A,T,C or G
  misc_feature 583, 586, 606, 637, 643, 655, 657, 658: n = A,T,C or G
aggtaccttctggacaatttccagaacattgaatttgcctatcactaagatgtcaaataccgcatttaaacccagcacagtgatcccttgctctttgcacagcatggtccactgctcccagaaagatactcagcagcacccagaagggtggaaagaaatgccgcctcccttcccttggttaactttttcntcnaaaaattgccttttacangttaggcccaaaggggaaaaggaatnaatccanangnaaatggaaaccaagnggggccnaccaancaatgggggaaggggttctttggacaanccgngggctccngncataccttaaggaaaaaccttaagnntgggggaaataccncccnctccgggggnccttggccnanggggnaaatttttccggnaattaatttccaaangggccttnttanttcctgnaattancccccggttgccggnancancctttcantangggggggggggggnggggncccccccggngatnancccccccaantccttatttttngttnttccccccttntttaangactngnaaagggggggatattaanaatttngnccngtcccgggcctttttggggnccggttaaaataccaattggggggttaccanttaagntccttggtattntnnccttggttggttgg

SEQ ID NO: 3424 - DNA, 541 bp, Homo sapiens
  misc_feature 161, 173, 180, 212, 223, 262, 265, 274, 289, 294, 297, 299,300, 303, 305, 314, 333, 336, 341, 347, 362, 381, 386, 395,397, 403, 411, 431, 436, 440, 454, 456, 475, 492, 494, 503,505, 514, 518: n = A,T,C or G
ccgggcaggtacggaaagttcccctgttccacaggcaatgcaattacctcggccacttcgtaagggtgcacagaacgaacaaaatctgtcaaagctgggaccaaggaactttgggttttaatcatcatcagcacctcactgtcttcctcgatctttccttntccactcataanattggantgtaaattctgaggggaatgaaggtttgtacnccagggcttgnattaagggcagcttttctcccaacacaccggggacactnggncgaatgctnccattgggccgaacncattnctncnntgngngggggccanaggttataaccaaaatagnggncttgnctaagnaagaaccccggaagnctctcggggaaaaccgttnagccnccagtaagncnccgggnaaattccncggaaggggccccggaccgnagggngccntgggggtttcccgngnaagggggccttttcacagngaaggggcccagtgggntnccaggccananggaccttcngggnggggttaggccaaaaccaaaaaa

SEQ ID NO: 3425 - DNA, 596 bp, Homo sapiens
  misc_feature 74, 147, 170, 173, 179, 187, 190, 201, 203, 214, 227, 234,253, 264, 271, 277, 280, 283, 288, 292, 297, 300, 311, 313,318, 347, 357, 371, 375, 382, 398, 429, 438, 441, 443, 446,450, 452, 456, 458, 475, 482, 490, 497, 499, 508, 510: n = A,T,C or G
  misc_feature 537, 544, 547, 573, 577: n = A,T,C or G
ccgggcaggtaccactgcactccagcttgggagacagagtgagcagagtgagaccaattcctgggaagccacanggaaaccaaattctagtagcaactcagagtcagcattcattagcaggtcacagggccataagggatgcccaanaaggaaattctggttcccttctnccnttggtncctgttangtncccccagctancntcaaaggaagnacctggaagggcnaggggangaaattttggcttttaaanaccccccaagngaaaggnccgtgnagnggntttgncaanttggnagnccccgtagggntntctgncggcctcaattttggccaaccttttccangtctccttgnccgtcaataccaanaggnaaggggnaattgaaccttccttncttttccaaaaaagggccccaactccttttntttcccctnttntnctncctncntacntncttgggggaaccttggntgcaacnaggtaatnccccttncnccttcttgntnaacccctttcggggactccgtctttcnttatggnaancccttaaggttggggaatttcccccncccngggggcctttggccaaggg

SEQ ID NO: 3426 - DNA, 491 bp, Homo sapiens
  misc_feature 456: n = A,T,C or G
ctacttagggcgaattggagctccccgcggtggcggccgcccgggcaggtaccatctcctcgaacataaaaattttcaagataaacaatgtccctttttaaaacgaagctgagtcttatcatatcttccatagtctcgaaataacagcattcccccaggtttcagtaacttggacagtcggtttacaacaccttgcatcctgtccgggatgaatagaagagagcacaaagacaaggagaatgacatccaggatcccatctggaaaagggtaaggtaagccatcatcacatacatcatgaacaaaggcaaaacactgggttgctctgtaggacgagtgtgactttacgagctccacagctccagaagcaaaatcacaacaatacagaaaggactccggagagttctccaaagtgttcaaaattggaaacacactattttcagctccacaaccaaccnttagtatcctgaaagtggcattgctaccagggaaa

SEQ ID NO: 3427 - DNA, 417 bp, Homo sapiens
ctacttagggcgaattggagctccccgcggtggcggccgaggtaccgcgggggctgatgccattttcagcctcagcacgcctgcacccaggcgctcattaaaacagcatgttgctccccactgcctcgtgttgtctgttggcgcgctgtcggggttcgaaccgatacaagaaccttccacctacctggtgcttttggcctcatctataagccggccagtcatctgccctaagtgctgccgccgaagactgaatgtcctggaaagtttgctgtcacatctccattatgacaaaagcattgtgccgaacagatgaaaaaaatgcattgtcaacggaatcttttatgtttgtttgtcttcctttaagcaacattgccttacttgttataaaaagataaaataaatatttgttcatttcta

SEQ ID NO: 3428 - DNA, 324 bp, Homo sapiens
ccgggcaggtacgcgggatttttaaaaagtagacggcctgccacggggatgaagaaaacacatttactgcgggcgggggtctgagggcctgcaaacaactcgagctggagcctcggccaggaccggcgcgagaggcggttcttgctatattgccccaggctggtctcgaactcctgggctcaagccgttctcccgcctcccactgcccgcctgtcactgccgtctgttccctgagctgtgctttacgctgggaaagacatagaagaactattaagaagatagaattgttttgctgcgcagtacctcggccgctctagaactagt

SEQ ID NO: 3429 - DNA, 328 bp, Homo sapiens
  misc_feature 13, 128, 132, 276: n = A,T,C or G
agttttccaaganataacttcaccaagatgtccagtgataggcaaaggtccgatgatgagagccccagcaccagcagtggcagttcagatgcggaccagcgagacccagcccgctccagagccctgangaancaagaggaaagaaaaccttctgccacccagcagaagaaaaacaccaaactctttagcaaaaccactgctaagttatccactagtgctaaaagaattcagaaggagctagctgaaataacccttgatcctcctcctaattgcagngctgggcctaaaggagataacatttattgaatggagatcaactatacttggt

SEQ ID NO: 3430 - DNA, 404 bp, Homo sapiens
gtatcgctcctatagggcgaattggagctccccgcggtggcggccgaggtactttagcatgttgcataatatatgcttatgtagctttccaggactaacagataaatgtgtaatgaacaaagatatgttgtatgagtcgtcgtttctgtcagatttgtattgtttccaagggaaaagcttgggggaggactcagttcacaaaatgcaaaactcaacgatcagattcacggacccagagcttttccatgtgtttatattgtaaatatttttgatttcatcaaattatttattcattaaaagaaatttttgtgaagcacagtgagtgacaatcatttttcttaaggcctggaaacgattttctgtatgatgttactttatgtgaattctcatctcaataaatgatg

SEQ ID NO: 3431 - DNA, 336 bp, Homo sapiens
aggcacctgtggtggatttccaggctgaactgaggcaggcattcttagctgaggcaccaagaggtggttaaagccatattggagtagcgaggaatctgattccaagcaaaaaccaggctccatctactctttgaagcttctgcccagcttgcattgtttctaggagaacctgcgtcatacctttatctatagccttcccctaggtcttcagaagcatcaagttttaactgtggacattggatttggtggaacagcaatcatgactgttggcaagagtagcaagatgctgcagcacattgactatagaatgagatgtatcctgcaagatggcccgaa

SEQ ID NO: 3432 - DNA, 121 bp, Homo sapiens
gggcaattggagctcaccgcggtggcggccgtgaccgtggctcacgtggcccctaagtttccgggtcttcctcagtctggatggcatgttggcagcccagacgaaaaagccccgcgtacct

SEQ ID NO: 3433 - DNA, 363 bp, Homo sapiens
  misc_feature 321: n = A,T,C or G
ccgggcaggtaccggaagcagcgaatggaagagatgcggcagcagcttcacaaggggccccaattcaagcaggtttttgagatctccagtggagaagggtttttagacatgattgataaagaacagaaaagcattgtcatcatggttcatatttatgaggatggcattccagggaccgaagccatgaatggttgcatgatctgccttgccgcagagtactgtttgcattaataaattaaagctccatagggtcttctcgtctttgctgtgtcatgcccgcctcttcacgggcaggtcaattttcacttggttaaaagtaangggacagctgacccctcgtggagcccattcatacaggtcccc

SEQ ID NO: 3434 - DNA, 285 bp, Homo sapiens
  misc_feature 2, 26: n = A,T,C or G
cnctacttagggcgaattggagctcnccgcggtggcggccgcataatttaataacatcgtccttccatttggccgcgactgctctggaaaattggttcagtagtaaacagaattctagcaggtggaacaagaacaggcgaggcatcctgggcctggtctctcctggaggtctgggtgttgcagcctttcaggactgcggctgctgtggcctacacacctgggcctgtgtgcctgtcccgggctttaggctgctttccctacccggctcccccgcgtacctgcccg

SEQ ID NO: 3435 - DNA, 105 bp, Homo sapiens
aggtacgcggggggaggcgaagaacgcaaagctgagaacatggacgttaatatcgccccactccgcgcctgggacgatttcttcccgggttccgatcgctttgcc

SEQ ID NO: 3436 - DNA, 541 bp, Homo sapiens
  misc_feature 174, 194, 218, 256, 287, 295, 297, 300, 320, 322, 324, 328,336, 342, 345, 351, 367, 371, 386, 406, 411, 413, 420, 427,431, 457, 464, 469, 479, 511, 512, 519, 533: n = A,T,C or G
aggtacctccttcagcggaaggcctcaccacccacagtgtgaatcctgaggtgccgtcattggcggttctgctgcttcgctgcagggataaggtggagctaccgaacagctgattcatatgccaagaattttggggagtcttctttcaaaccagtggggggtttgggacaatgnaattgttagtttaacatggnttcctgcctcaccacttccagaantttaaatttctatttgtaaaaaagggaaaatattcatnctagatttccaggccaataatatattattantatatacngnatnaatacagataatatatatanananaganatataganagtttntcnccttgnccccccgggggaccgnggcncggcttttctttaanaaaaaccttaaggtttgggntattncnccccccnccggggngtcnttggtccaaggggaaaaatttttccngaaattnaattncaaaagggcnttttaatttccggaaattaacccccgggtacnngaaaccnctttccgtaggggngggggggg

SEQ ID NO: 3437 - DNA, 157 bp, Homo sapiens
ccgcggtggcggccgcccgggcatggtacaggggaaaagagctctccatttctcagcaggggacaccccggtccccactgccactttgtttgccctccaagggaaaaacctctcaataccaggtccaggagcagctggatgggatcactcagaaccc

SEQ ID NO: 3438 - DNA, 274 bp, Homo sapiens
  misc_feature 152, 155, 171, 178: n = A,T,C or G
ggagctccccgcggtggcggccgaggtacgcggggactgactggttgagccgggtagggaaagcagcctaaagcccgggacaggcacacaggcccaggtgtgtaggccacagcagccgcagtcctgaaaggctgcaacacccagacctccanganagaccaaggccccagnatgcctngcctgttcttgttccacctgctagaattctgtttactactgaaccaattttccagagcagtcgcggccaaatggaaggacgatgttattaaattat

SEQ ID NO: 3439 - DNA, 427 bp, Homo sapiens
  misc_feature 133, 160, 179, 192, 196, 202, 224, 230, 242, 259, 273, 276,291, 306, 316, 343, 350, 360, 405, 415, 422: n = A,T,C or G
aggtacgcgggggccacgtccaagcaaaccgggaaaggagaggatcccggagccgcgtgatggccagaggcctgggggccccccactgggtggccgtgggactgctgacctgggcgaccttggggcttctggntggcctggaactccgggggggttattnacttacccttgcaacgacngattctgcaaagnaggnactttncattggccacagtccacaaggncacgtnaacatggaaagnattttcacccattggtncaccagcacattgnccncaatggccatgggtncacacttcatcgtantaagccattnttgggcattgggacaataccccaacgnattcacngaaccattgngaccattttcacattggaggggatttttaccaccccattggggcncaataaggcncaattgnggctt

SEQ ID NO: 3440 - DNA, 474 bp, Homo sapiens
  misc_feature 140, 157, 161, 183, 199, 203, 212, 299, 323, 342, 347, 348,372, 380, 385, 405, 418, 427, 441, 455: n = A,T,C or G
aggtacgcggggaaagagcctagtaaagaagtcacagcctgcaatgaaagcagagaattctgatgaagaatagatctgacttctttcatttaggacccaacttaccatatctgatttatttctaggtaacacttgggagncttgacctcccttgggnaagnagaaggcccaaaatggttacanatgcaacttaatgggnatgncacccaagnatattattgacccctgtcctgtgggggacctgtatggggaaaataacttttattccccaaatgaaatggccctggttaatgtttttntggaaaaaaattcgggaaaaacgncccaggacatttcttattnccttnnaatttcaaaaaaaatcttggggcnctttggcntgganaaacccaaagggttttttgnaaaattcccccantcaagggtncaacccggcgtagngcccttggacctgngccttttatttggtttgga

SEQ ID NO: 3441 - DNA, 472 bp, Homo sapiens
  misc_feature 18, 109, 127, 149, 150, 152, 162, 169, 172, 173, 177, 192,211, 215, 223, 226, 255, 260, 261, 264, 282, 286, 289, 294,296, 304, 307, 312, 315, 324, 332, 333, 338, 350, 357, 361,371, 372, 374, 381, 385, 411, 413, 418, 419, 428, 430: n = A,T,C or G
  misc_feature 441, 443, 445, 454: n = A,T,C or G
aggtacgcggggacgtcnctcgctccttgacggctgaccgacactgggtctgaggtgtaagcgctttccaggcccttccctggggcttggaggggaatggcgcaaaggnactttttcttacaagcangagtccacttgcagtttaccannanaagttatgtncgccttnatnnggtnctaagaaaggtttgngactttccttgaaaaatcncttngtacaagntgntacatccaattcttttcatccttgaaaangaagnntgngtaaaataaatttttcanaggncanaaagnangttttctnctncaagnggnaataattgnaaccccannatttnaaaaaacaccanttccttngggnagggtaaaannantccaagnccanggcggaatttttcaaaccaagtttgnanccttnnccccccccncnaaaacccccangncnttgggggtngggggtgggttttttcct

SEQ ID NO: 3442 - DNA, 176 bp, Homo sapiens
tacttagggcgaattggagctccccgcggtggcggccgggttctgagtgatcccatccagctgctcctggacctggtattgagaggtttttcccttggagggcaaacaaagtggcagtggggaccagggtgtcccctgctgagaaatggagagctcttttcccctgtacctgcccg

SEQ ID NO: 3443 - DNA, 676 bp, Homo sapiens
  misc_feature 4, 172, 212, 236, 257, 258, 273, 281, 294, 309, 314, 328,354, 374, 423, 427, 437, 453, 473, 499, 509, 511, 514, 516,522, 538, 539, 574, 599, 602, 643, 654, 659: n = A,T,C or G
gganctccaccgcggtggcggccgcccgggcaggtacaagttccactctgctacagatgcgtctgtgaagagccttgtgccatccaactagtgactgaatgatgtcccatcttcttatccgagccagagcacacatcttccatgctgtccgctgattgcctccaaaattccnagaaaagaccaaaattaattccttttattcccccaaaagntagggcttcaaaaaaccagttttnggttttcaagggcatttcccnngggattcctgcgacnccccttcnttttaaaaattcnccaaggggttaaaantctancaaatggaaggggnattataaaggcccccccaaggccggnaaattggggcaaaaaccttnggggctttctcccccttttggaaaagaaaggccttggccttggttaagnttcnttccttggcnttttgggggccccttncttttttggcctttcaaagnctttttcaaccccaattgggggccgnaaccgggggncnccngnctttcnttaaggaaaaccttannttgggggaattccccccccccggggggccttggcnaagggggaaaattttccggaattanttncaaaaggccctttaatttccggaattaacccccggttccgnaccccttcccntaagngggggggggggggcccc

SEQ ID NO: 3444 - DNA, 407 bp, Homo sapiens
  misc_feature 4: n = A,T,C or G
actnctatagggcgaattggagctccccgcggtggcggccgcccgggcaggtacatttccaaagtcaagagtcaaataaaaaaatcccatggaatttggagcctatttagaactcaaaataatgagaatgctgcaaatcaaaacttgtgacatcccactaaagctgttcttagagggaaatctatccaacacactaaatgcttacattagcaaagaagaaaggctaaaatgaacgagcatccaagttaacatgttagaaaaggagcaacagagaagactcaataaagtaaaaggaaggaaacaataaagataagattagaaatcaatgcaacaagaaaacaaagataaatgctggagaggatcttggttttctgaaaagacaaattaatgggtctcttggcaagact

SEQ ID NO: 3445 - DNA, 557 bp, Homo sapiens
  misc_feature 171, 175, 178, 182, 196, 197, 201, 205, 224, 268, 293, 297,299, 319, 332, 361, 365, 366, 391, 469, 481, 534: n = A,T,C or G
ccgggcaggtaccagggcagcaacccaatcagtgacatttgggctatccacgcgctgcggatcgtggctaagtatctgaagagggctcgtcaacagcactgacaaatgaagaagaagaatgagtctcagggcacctttcttggaagtggggccccttccgcccattcccangggnacncagncgccgtttgctctnncccncggncgccttttttacaattcancattggagacaagcctggacaagtctggccttggttcatgaaanatcccccgaatggattctttgaaangcanangggttcttcattattgccanctttggggccaanggttggccttttttggcttgggccattcngggnnttttttggggaaaaaatggccttgnggtaatttttcaaatccttggttggccccaattgggggaaaattgggttcctttaaacccccaaaattttttccaagngggtttttaagnttggaaaaagtaattggttatttaaaaaaaggccaaaaaaggggaaattttancccaaaattgggttgggggaatt

SEQ ID NO: 3446 - DNA, 174 bp, Homo sapiens
  misc_feature 100: n = A,T,C or G
tagggcgaattggagctccccgcggtggcggccggggctggcgcggtgcatcgttgggcactgtagtttccgccgcgtttatggccgcgttaagtctgantgccgctttgagttgctgaatgaagtgaacttcatttgtcagcgttcggtacctcggccgctctagaactagtg

SEQ ID NO: 3447 - DNA, 345 bp, Homo sapiens
  misc_feature 132, 207, 262: n = A,T,C or G
ggagctccccgcggtggcggccgcccgggcaggtacctatgctttcagagtaagagcttacaagggttcaatctgtagtccttgcagcagagaattgattcttcatactcctccagctccagttttcagctncctctttgatgaaaaatgtggctataataatgaacacctcctgctgaacttgaagagagaccgtgtagagagtanagctggatttaatcttctgcttgctgcagaacgcatccaagtgggttattacacnagcttagactacatcattggagatactggcattacaaaaggaaaacacttctgggccttccgtgtggaaccatattcatacct

SEQ ID NO: 3448 - DNA, 379 bp, Homo sapiens
ccgcggtggcggccgcccgggcaggtactgggcagggcttgggagataagacaggacatctgaagctaaacatggatcccctctgaaagctacaatcaaagtgtcatccacaaaatcttatctcaagccttgactagagaaggacccacttccaagaccacagagttgaatgaattcagtccttgcagcccgttgaactgagggcctccccaacatgctcacctgcttcatcaaagcctgcgagagagagagtccactagcaagaggacattgcagtcttatctaatgcaatcactgaagtgacatcctgtcaccttggtcaccttttctattctattcattataaatgagtcccaagtcctgccacactcaagtggag

SEQ ID NO: 3449 - DNA, 499 bp, Homo sapiens
  misc_feature 95, 137, 159, 169, 216, 221, 243, 306, 328, 341, 363, 397,399, 408, 412, 441, 443, 456, 465, 471, 497: n = A,T,C or G
gtggcggccgcccgggcaggtacgcggggagaaatagcaagtgccgagaagctggcatcagaaaaacagaggggagatttgtgtggctgcagccnagggagaccaggaagatctgcatggtgggaaggacctgatgnatacagagcgttgagaaataangaaaaggctngcttgactttaccattctgaggcccacaccattcttgctggaaatgnggagnataaattaaccatccacttagnaaaacagcaaaggaatgtaccaaataataactggtcttagggtacgctggacaatggtttttntttgccaaccattttttctcangcccccccttttnaaaaataattcccaccaccacnaccaagggaaaggccatcaaaaaaaaggggaaangnccaccaagnaagnaattcccccttgggggaaggaaaaattgncncccgcgccccggncttccttangaaaancttaaggttggggaattccccccccncg

SEQ ID NO: 3450 - DNA, 311 bp, Homo sapiens
ggatcttcggcaagactcacgtctccaacaaccaagctccccaaagtcctgacctcaagcaatccgcctgcctaggcctcgcaaagtgctgggattacaggagtgagccaccgtgcccagccaagaaagattttggaagagtgaatgaatacaaggatttccactagactgagaattagtttgtcaacagcatttcagtgtcttgagaagtatttacatttggcgtggacaaagctggcagatgacgtagaaagtaaaaagttgcctcttcaaagtttcccttcttgttaaagaataaatcataaatgtta

SEQ ID NO: 3451 - DNA, 635 bp, Homo sapiens
  misc_feature 135, 138, 152, 297, 306, 313, 318, 348, 358, 388, 392, 417,445, 491, 507, 515, 530, 543, 571, 587, 597, 614, 633: n = A,T,C or G
gcgtatacgactcactataggggcgaaattgggagctccacccgcggtggcgggccgcccgggcaggtacgcggggatttatgcaaatttgaactagcttctttgttcacaattcagttcctcccaaccaaccangtncttcactttcaagnagggccaccacttgcaactctcagccttaaacgtggaataaacaaaaggaacttggcttcaagggagccagggggcttgcccccagggccatgggttggaattcacccgggaaggttcaagtaagttttcaaaggaccccagacncttgggccncaaccantgggntggaaaaaaccccccaccccttcttacctnaaaaaaaatntggtggtaattaattctttttggttggttnggtncttttcccttggtttttaattggtngatggcccccaaagggggggaaggttanttttttttcaacccaaaaaaggtttttccaaaaaaaaccaaggccnccaaccaaaattaaanttccaagnaaggaaatggggganggccaaaaaaccnccaggtttgggccccaattccccaagtntccttttttaattggnccaaaaaatngaaaaaaattggccttngcccaaaaaaggggggggnaa

SEQ ID NO: 3452 - DNA, 544 bp, Homo sapiens
  misc_feature 149, 160, 225, 248, 258, 259, 294, 335, 339, 359, 393, 469,472, 473, 487, 492, 494, 511, 516, 521, 522, 527, 528: n = A,T,C or G
aggtacgcggggagaaaaacagaggggagatttgtgtggcttgcagccgagggagaccaggaagatctgcatggtgggaaggacctgatgatacagaggtgagaaataagaaaggcttgctgactttaccattctgaggccacaccatntgctgaaaatngggagataatttaaccatcacttagaaaacaggcaaggatggacaattattaaatgttctaaagntaagttgacatggttttttttgncaccaatttnncaggccccctttttaaaattattcccacaaccacnaaccaggggaaagcccaccaaaaaaaagggaaaagaccacnaagnaggattcccccttggggggnaggaaaaaaatggccccccggggctccggcttcnttaagaaaaaccttaagtttgggggaattcccccccccggggggccttggccaagggggaaaatttatcggaattnatnncaaaaggccttttnattcngnatttaccccgggttccnaaccnccttnnggaanngggggggggggggccc

SEQ ID NO: 3453 - DNA, 543 bp, Homo sapiens
  misc_feature 1, 94, 106, 109, 125, 135, 144, 152, 162, 171, 175, 196,228, 233, 260, 267, 270, 280, 282, 288, 296, 302, 304, 310,328, 334, 336, 357, 373, 375, 380, 381, 393, 416, 432, 453,454, 457, 488, 492, 496, 502, 524, 538: n = A,T,C or G
ncgcccgggcagggtacgagtgagtgggctcatcggttgacctctgttgtgagatggcacgtgggtcctaccctgcagaagtcagagccaccanaattcccaagtntanccaccaggttgtgggnaaatttccanaaatgagcnatccttgntcaaaaccancattctttnaagngggcaaccagaaccccccccntttattcaatggccccaaggccttgggggaangaagngccccactttccctggttattttttgngccaagngtntgggcctttngntaggcnccccaagntagggncnatttcnaaaaggggccttaattgngccaangnggggttaattaaggccaaggnatgtattcccttaaangnggccnnaaaaggttgggnaaaatgttaataaaggcccttgntccggccttatatggnaatttttttggaaaaaaattnnaanaaatgggaaaattggggccccttttttaccnaaanaacnttttcncaaccccccaaccaaattttcnttttttgtaaaaanaaggg

SEQ ID NO: 3454 - DNA, 549 bp, Homo sapiens
  misc_feature 18, 181, 191, 259, 270, 307, 310, 339, 342, 353, 383, 397,463, 480, 510, 521: n = A,T,C or G
gtatacgactcactatanggccgaattggagctccacccgcggtggcggccggcccgggcaggtacagagatgaaagaggggtgggatccacacttgagaagagtggagagtgacattgttgcttggacacttgtcccattgaagcactgagccataagcctggaggcacaaccgcaccanaacacctcancagcaaagggattgggaagcttgaaaaaaccataacccacctcctgtccttggaaggccacctggggnaaagcccttanaagaaaaggccttgtggaagcccaaaagggaaggggnagnggtccttttcctttttggccattgggggnatnggggggattgnaaagttaaagggaggaagggggaacttggnacccccccttgggnaaagccttggaatttcaacttattggggggggggagggttgtattttggaaaagttcccttcccangaccaaacccccttcangaattttgaatggatttttccttaagttangaaaacttccnacaaggaaaaattaataggaagccttgg

SEQ ID NO: 3455 - DNA, 741 bp, Homo sapiens
  misc_feature 27, 102, 159, 166, 173, 176, 186, 189, 193, 198, 224, 242,244, 247, 269, 275, 279, 296, 319, 321, 354, 369, 375, 378,389, 392, 395, 402, 409, 415, 418, 421, 425, 427, 444, 456,458, 459, 478, 484, 486, 502, 509, 526, 536, 543, 554: n = A,T,C or G
  misc_feature 556, 557, 558, 588, 598, 600, 610, 625, 626, 630, 642, 647,662, 673, 680, 682, 688, 690, 705, 735: n = A,T,C or G
tcactatagggcgaaattggagctccnaccgcggtggcgggccgaggtacgcggggtttgagtcactggtgcgccatgatccccgctttgaaatctgtgtgngaagtcattctggggcttgtctcgctttcggcctaaaggggttccaacaaaaggtgnaattganagcctcnttntgccaaaagnaantaanaccangttgcccaaaaaaaaaaatttccacntttgggtttcccaatggntncancccttcaagggggaacaaaagntatttnggtncccttggccggcctttntgccccaattccttggatttccntncggccaacccggggattggtgaaaaattccttngactccccaattggnttggcnaanggccggggggnccnccnttggggnggtaaanccaacncanttncaananaatgggaaagtcccttngtggcccggggncnnccgggcatttcctttaagnaaaaancnttaaggtattgggggnaatttcncctccccccggtgtggnccttgggctnaaggggnaaaaatttttncnnnaaattaattccaaaaagggccttttaaatnccggaaattnancccccggttnatgaaaccccttccnnaagngggggggggggnggccncccccgggggttaanccccccaaggnccttttntnttgggntnttccccccttttttnaaaggttgggaagggggggttttaaaattntgggcc

SEQ ID NO: 3456 - DNA, 482 bp, Homo sapiens
  misc_feature 180, 200, 204, 213, 216, 239, 249, 273, 278, 314, 317, 326,337, 355, 364, 390, 431: n = A,T,C or G
ccgggcaggtacctccccacccaggcctcgctccttctccacggtttgcagggcccacatggcagctgtggtgcggggttccagccagcgggcgttgacagtggccagcgtaaggctcagggaacaagcaaggttaaagcctggctggccctcccagaaatgttgagcctgagcccaagncattgctgtgaagcccaagnatgncagtaggtntgnattgaaagggcaccagccccatnggaagatgtngggaaagtatgaaagggggaaagnagttntgcttcttgcaacttagttcccgaaagggtattgtncgnggggaaagnggctttccggnaaaaagccaagggaaagnccttggagnaccgaaagggtcacccccacattttnggccattgccccccaagggcaaccctggacaaggaaccagnttagaaatgggacccattcttttaaattcagggcctccttaagggtttccc

SEQ ID NO: 3457 - DNA, 126 bp, Homo sapiens
ggggaaaagagctctccatttctcagcaggggacaccctggtccccactgccactttgtttgccctccaagggaaaaacctctcaataccaggtccaggagcagctggatgggatcactcagaacc

SEQ ID NO: 3458 - DNA, 260 bp, Homo sapiens
ggcgaattggagctccccgcggtggcggccgaggtacgcggggagggaaagcagcctaaagcccgggacaggcacacaggcccaggtgtgtaggccacagcagccgcagtcctgaaaggctgcaacacccagacctctaggagagaccaggcccaggatgcctcgcctgttcttgttccacctgctagaattctgtttactactgaaccaattttccagagcagtcgcggccaaatggaaggacgatgttattaaattat

SEQ ID NO: 3459 - DNA, 506 bp, Homo sapiens
  misc_feature 167, 175, 181, 203, 207, 210, 227, 243, 255, 268, 278, 300,314, 317, 346, 352, 366, 367, 381, 394, 405, 417, 430, 442,462, 464, 474: n = A,T,C or G
aggtacgcggggtttctacctaataaatacgaagggctgtagaagctcagggcccttgctcactagaaggagccccctgaccccttcttccaaaaatactttttgtctttgtcttcgtttctgcattcatcccccttcgttcacttcccattaaccaacccaacagncggacaanctgggncaccctaagggacaaggggacnttgnagntgaaagggtctgtcttngaagccaagtagtaanacctgtacaacntggactaaggaantaaccgaggnaattgtagtaaactcctggcgnaccgtaggttctgnctntaccaagcttgataataaaaggttcttgncaaaanattcaagccttgtnnacccactcataacnggccaaattttgnagtaggcttgntaccaatccctngccatattttacnctttttattttncaaaatttaaattggcaaananaaccaaaaanaaattgggggggtaggaatggttttaccaggg

SEQ ID NO: 3460 - DNA, 607 bp, Homo sapiens
  misc_feature 17, 54, 127, 141, 167, 168, 171, 175, 199, 202, 205, 206,222, 223, 229, 230, 232, 235, 241, 242, 252, 253, 255, 262,288, 292, 298, 301, 306, 332, 351, 361, 363, 374, 376, 387,397, 400, 421, 429, 432, 445, 449, 453, 455, 459, 476: n = A,T,C or G
  misc_feature 480, 482, 502, 509, 520, 523, 546, 553, 581, 600: n = A,T,C or G
aggtactgtattctcanccaccatcaaagcccattcgtaggaaattcagaccanaaaaccaagctacagaaaaccaagagccttccactgctgcaagtgggccagcttctgcggcaaccatgaaacncgcatccaacagtncaaaaagcaagtccttcacaaaacannaanaaanggctcattttcacaacttgcttanttncgnnaaaaaaattataaagnnagtgcnnanacngccatnntgacttgggnntncttggcntgtaaatcaagattggagtccttccncaantctatnacnaaggnctttctaaaggtggatggggtttacnattccaaaagtaaaaccgnaaaattttgncnaattttggggnanaaaaaatcccnaaaatttttnggngaaaaacccaaaatccttttnccgttttnccngagtttccaaccnttgnttgntnttgntttgaaaccaccccccncccncnaattgggggttttccaaaangattggnaaccaagtttnggnggggtttggaacccccttttggntaccttngccccaaaagggaatttcctttttaccntttttttttgggaaaattnggttttt

SEQ ID NO: 3461 - DNA, 344 bp, Homo sapiens
  misc_feature 92, 190, 191, 193, 200, 208, 263, 267, 281, 285, 297, 301,324: n = A,T,C or G
cgcggtggcggccgaggtacagatctgggaactaaatattaaaaatgagtgtggctggatatatggagaatgttgggcccagaaggaaccgnagagatcagatattacaacagctttgtttttgagggttagaaaatatgaaaattgattttggtttattgaaacgccaccagttttaaggtcaagccanngngcccagnaatcctgnacgccttcttgcgccccgtgggtttattcttccttcaccccaagccttttgggcntgcnctccattggttcantcancaagttatttcncatnttttgttctgttgccatagttcntttggtggaaaggcccattc

SEQ ID NO: 3462 - DNA, 368 bp, Homo sapiens
  misc_feature 353: n = A,T,C or G
aggtacattagaataaccttttcaaaaatatgcaatttctgtccttgaagcctagggagtgggatgcagccacattaagactcatgattaagcaccttattgtgttaatcatgatataaagagccttgtataacacaaaagccgagatcgcgccactgcactttagcctgggtgacagagtgggattctgtccgctcccgccaaaaaaaaaggagaaggtctaccctgcaagaggtggagagagagctagtggcttggatctttggggtgcacatgggaattgtgggcccacagtgtctggtgaaagaagaggaggcaggaggcctttttcttctcatatgggggttgagtgntggggggtgctactg

SEQ ID NO: 3463 - DNA, 569 bp, Homo sapiens
  misc_feature 26, 27, 65, 175, 191, 214, 218, 240, 241, 248, 265, 304,321, 326, 330, 335, 337, 342, 382, 407, 411, 418, 431, 433,449, 463, 509, 518, 520, 534, 539, 540, 543, 556, 563: n = A,T,C or G
atcctatagggcgaattggaacctcnnccgcgggggcggccggggcagaagttgagaccacccancagaggagctaggccagtccatctgcatttgtcacccaagaactcttaccatgaagaccctcctactgttggcagttgatcatgatcttttgggccctacttgcagggcnccatggggaaattttngggtggaaatttttcccacaagnaatngattcaaagtttgaacgaacanngaaaagnggaatgcccgccacctncaggtttattgggcttttcttaatgggcttgccacaacntgttgggccggttgggngttgngccngtaangnaatcnccccccaaagggaatgccaaaaccgggaattccggcttgnccttgttggtacaaccttcaattgnaacntggtttngcctaaccaaaanancggttccttggggagnaaaaaaccggttgngggaattgtttggggccaaccccaaaaaattttttccttgggaagnccttaaccnanagggttttttaagnccaannccnttccggggggggnaaggccnaaggaa

SEQ ID NO: 3464 - DNA, 621 bp, Homo sapiens
  misc_feature 30, 35, 54, 61, 173, 224, 239, 268, 277, 282, 283, 286, 307,309, 321, 328, 341, 343, 376, 383, 390, 401, 405, 406, 429,462, 477, 486, 488, 520, 523, 525, 531, 536, 538, 540, 551,555, 557, 561, 564, 572, 574, 586, 589, 594, 608: n = A,T,C or G
  misc_feature 610, 612, 617: n = A,T,C or G
ctctcgactcactatagggcgaatttggancctcncccggggtgggcgggccgnggccgtnggctcacgtggcccctaagtttccgggtcttcctcagtcctggatgacatgttggcagcccagacgaaaaagccccgcgtacggatgctacttgtccaatgatggtaaaaangggtagcctttactgggtttgtccttcccgatttcaggtttatgaaattgnagggagggtcctgcnggcttagggaagttcaaattaacagttgnatttggccnttaanntgngggccgaaaataatttaatgncnttttggttggtntctgggnattattactgggnanggggattgggggggcattttattttggcctaangggaatnggaaggngcattgggggnattnnggtttaaattaagggggggcaanaggggaaccggcccctttccccttaagtttttntggttttaagagggnaaccggggnanttccggggaagtaaaattttgggtgggtaatnggncnggaaanttaangngnaaaaaaattcncccngnccgnttnaccccttncnggggccccggcnttncttangtaaaacctttaangntnggggnaatt

SEQ ID NO: 3465 - DNA, 503 bp, Homo sapiens
  misc_feature 17, 22, 212, 215, 239, 256, 334, 341, 417, 486, 490: n = A,T,C or G
tatagggcgaattggancttcnaccgcgggggcggccgaggtacacagcaggcttttcaggcagggcacatggctcagggccccatgatgtgataccttgaagcacaccattacagacaagtggacccccagaatcccccccacaagtgtctttaccacctgtccagaagcccagccaccacaacatgaaacttctgtcacccttctcaagnagntaagcctcttagccaccacattgntcatttgggaccagggnagaatgggaagggctcacaacaacttggaagtacctcaccttccttctgggtatcggaatgcttgcccccccagcccntgagggncgttagacaagggttggggtccccccaagttggcttgggccttccctggggggtgggggccaggggcccccaaggnaaccctttcaccaaacaatcttgttggattcttttgggccagggccttctggacaaggggcggggaagncaantcattggaagggg

SEQ ID NO: 3466 - DNA, 375 bp, Homo sapiens
ccgggcaggtactcctttaaactgcttaatcatgttctgatggttttcaatggcttccttcaagatcatttcaggctggtccatcttccaccgccactcagtgcccacggggttggtgtggtgccgccaacagaagacacatttattaagcacacgccaagctcggggtggtttccatgcagcgatggctctcaattccatagaatgtgtgtttgtaacaacctcctctccctcggagcatggactttgtccacctgcaaagcttcacccccgagtggctcccaatcaactgataaccttgtttagtaagggcttctcggagagcaggagttatcatagctcttctttcaccatctttcattcctccccatgttc

SEQ ID NO: 3467 - DNA, 509 bp, Homo sapiens
  misc_feature 214, 221, 226, 236, 255, 272, 284, 313, 316, 333, 338, 345,350, 351, 396, 404, 407, 414, 427, 441, 450, 467: n = A,T,C or G
ccgggcaggtacgcgggatatcaggtagtagaatgtgccatgcgagcacttcacttctcttccaggcacaataaagacattgccctggtcaacctggcaaacgttctacacagagcacacttctctgctgatgcttgctgtcgatggtccaatgccagcctcttgggatggacagttgaacttctttcaccaggctaattacactttggggggnaatatantaatngcaaattgcntttggggggaattattaanccaccttcaggtggctnctggtttattgnaccaaccgtccttttgtcaaggcccaagnacncctgggggttttggagncaagncctaatnaaaannaggggaaaggccatggcctggttcccttaattggtcaagtccaanaaaacctnggnaagccangaaaattttgggnaaggggcttcaagnccattaagnattcctttttcccaagnccggaaaaccaccctgggaaattggaagggtttaaaaaaaaa

SEQ ID NO: 3468 - DNA, 550 bp, Homo sapiens
  misc_feature 1, 23, 25, 123, 188, 212, 218, 219, 232, 268, 269, 302, 312,314, 330, 349, 371, 389, 395, 402, 412, 436, 440, 450, 454,460, 465, 478, 510, 516, 546: n = A,T,C or G
ngcgggtgggcgggcccgaggtncncgggggtcagcccgccgcgccgccgggctgctccttcttcctcctcgggcgcccgcggcgatgttcaacacgcgccgtgagccggctgagcaggaagncggcccgctctagaaacttagtggaatccccccggggcttgcaaggaaatttccgaatatcaagnctttattccgataacccgttccgnaccctnngaagggggggggnctccggggtacccccagcctttttggtttccccttnntaagatgaagggggtttaaaatttgccgccgcntttgggccgntnaattccaattggggtncaattaggccttggttttncccttgatgttggaaaaaatanggtttaattccccgcctncaacanattttcncaaccaccanaccattaaccggaagccccggggnaagnccattaaaanagtngtttanaaagncccttgggggggnttgccccttaaaattggaaggttggaaggccnttaaanccttccaaacaattttaaatttttggccgntttt

SEQ ID NO: 3469 - DNA, 545 bp, Homo sapiens
  misc_feature 156, 165, 182, 213, 238, 250, 255, 271, 274, 322, 346, 362,363, 365, 371, 419, 424, 447, 470, 487, 501, 504, 542: n = A,T,C or G
acctcccacccgcgggtgggcgggccgaggtactccttagggcgcttcaggaagctcaggggcctcctgggattcctcatcttggtttttccgtcggcatttctgctgcttccgagtcagggctttccttcgtttgttttttccgcctgctttggntgggacttncccgcctgcctttcagncttcctttcaagcttttttttctctttggcnttcttcaataccttgttttttcaangccaaggtttcnttttncttgcttttcctggcntgngttaaccttaatttggccgggcccggccttccttaagaaaacctaagnttggggaattccccccccccgggngtccttggccaagggnnanattttncggaattaattccaaaagtcccttttaatttccggaattaacccccgnttccngtaacccctttcggtaggggggngggggggggcccccccggggttnaaccccccaaagggccntttttttttgggtnttncccccctttttttaaaggttgggaagggggggtttttnaaa

SEQ ID NO: 3470 - DNA, 518 bp, Homo sapiens
  misc_feature 23, 149, 184, 190, 205, 225, 256, 270, 287, 345, 352, 355,363, 382, 389, 406, 443, 493: n = A,T,C or G
agctccacccgcggtggcgggcncgaggtacgcgggggctctaagctgcagcaagagaaactgtgtgtgaggggaagaggcctgtttcgctgtcgggtctctagttcttgcacgctctttaagagtctgcactgggaggaactcctgcncattacccagcttcccttcttgcagaaaggggagngggggnaaacaataccatttntatttcattgcccaggtctngttgcaatgccagggctttttttgggctttncctaacctttggcnaaccaaaaaattaattntggcaacccaaacctccctttaagttggcccggaatttccccgccccccacaagtagnaggttcnctnggtagccncaccaagttcctttttttntttggcnttttggccattttggtnaggggaggaagggggaccttaaaggttggccttaagnaggaccttaatggttccggcctttttccttggaggccttaccccggaagnaggcggccttccggtggaaaacctt

SEQ ID NO: 3471 - DNA, 573 bp, Homo sapiens
  misc_feature 212, 220, 278, 302, 317, 320, 378, 382, 391, 405, 445, 447,478, 484, 541, 544, 573: n = A,T,C or G
acgatcactatagggcgaattgggagctccacccgcggtggcggcccgaattcaagacttctccaaaatcaccaccagcaggcttggttccccctactttagactttaagttttcgaccttttcttcaaatgatttaaaagttggggagtttttttacatcttccagcttttttggtgattgacctgaagcccaaccagaccgaaaaaaagncagcctgnagggcccttctggtctcaggccctggggaattaagggttttcaaggatggttctttcnttgtaaagccaggatggtttggcntgtcaccgttctttngcncacccccttttgggccaaatggttttcttgttttttttaaggttttccctggttaggnaagnaaattttgnaatttcccaaaagnttttttccccggccttttggaattccttccttgggcttangnaattggcctttttcttccttttttttgggcnttggcntttaaaaccaacctttttggaagtaaccaaaggaaaggttccttggggggaattttnttncttttccttttccttaaccccttttttgn

SEQ ID NO: 3472 - DNA, 550 bp, Homo sapiens
  misc_feature 48, 193, 197, 207, 222, 253, 327, 334, 342, 363, 385, 394,403, 432, 444, 445, 464, 479, 486, 500, 504, 510, 523: n = A,T,C or G
tcatatagggcgaattggagcttcccccgcggtgggcggccgcccggncaggtactgacgaccagggccagcttgttctagagcgggaattagaggctagagcggctgaaatggttgtttggtgatgacactggggtccttccatctctggggcccactctcttctgtctttccccatggggaaagtgccacntggngatccctctngcccctgtcctcctngaataccaagcctggacttgaccatttgacntgtgtctggtggaaaaaaatgggggagcctccttggtttggtggggaggaagccattagttaaaaattttttcnaggaagnaacctttngaaaaacccaaaaaagggganttttaaaaaaccccggcttggntcttaaaangaaaaaaangtaaaaaaaaccttgggtaagggccttgngggccggccaannttgggccttcaaccggccnctttattaaaattcnccccagntaagggggccttgnaagngggccngggggcccggggnaattccaacccctttgggaaggggttc

SEQ ID NO: 3473 - DNA, 384 bp, Homo sapiens
ccgcggtggcggccgaggtacatgaaacgtcgggggcctatatcttccccagtgtgctcccaaattctgtccaattgatggaagcaagcttgcaggtccatgttcccacaagcaactttcagcccaggattctgcagatctttccagctctacatcccatgtcatatactccatattagaggctgttggatacacctgacttcgtaatttattatgaaggtccaaaatactctgcatgtcattgtctgtgatggcccttttccctcgttgtttggctatccaccactcaccatcctcatccatgtatttttccaaaagtttctccaataaagtggcattgggaaccaccatggctggaattgctctagccatgaacagcactgt

SEQ ID NO: 3474 - DNA, 408 bp, Homo sapiens
  misc_feature 135, 147, 165, 186, 192, 193, 212, 218, 240, 242, 247, 253,283, 295, 305, 317, 326, 329, 331, 334, 337, 344, 346, 348,351, 355, 359, 361, 363, 366, 381, 386, 390, 392, 393, 399,401: n = A,T,C or G
cgcggtggcggcacgtgtggcgcagggaggaccccttacagcaaccacagcgtcgggaatccgaaagggaaaagaggtgcgcaggcgccacacacggcctttacccccgcgtacctcggccgctctagaactaantgggatcccccngggcctgccagggaattncgattattcaaagctttatcngattanntcgttcgtacgctcgagtngggggngcccctggataccccagacatntntttgntttccnctctttagattgtaggggggtttaaatttnggtcagccgacnttggggccgntaaaaattccanttggggttncantnaanacntttgttntntnccnttgnttgntngnaanaaaatttttggtttnaattncccngnntttccnancaaaatt

SEQ ID NO: 3475 - DNA, 576 bp, Homo sapiens
  misc_feature 110, 152, 178, 213, 241, 270, 296, 306, 327, 342, 353, 355,372, 375, 382, 420, 422, 433, 436, 440, 441, 444, 452, 454,456, 481, 501, 526, 559, 560, 562: n = A,T,C or G
ccgggcaggtacgcggggaggaagactggacaaagggggtcacacattccttccatacggttgagcctctacctgcctggtgctggtcacagttcagcttcttcatgatnggtggatcccaatgggcaattgaatcccaggtggcttaccantaccttcatcccttaaattagggccntccctgggttttagtaaaggagggctcaggttctnggatttgggcactttccccatttgttgncttccccttcttaccctttaatgtggctngtcggccttagggttagacctatagnaccaaattcnattttttaaccatttttgatngtccgggaaccttgnaagtccaccangnccacctggccaattggnagnccccccnaattggttaattaattaatttttttccttttctgggcnanttggccctttnttncaannggncaattttngngnctaattccccttccaattccttccncaaccccttccaattccccnattggaccccccaaaaaataattgnccttgggggccccaattcctttttcctttgggnntntttccaaaattttc

SEQ ID NO: 3476 - DNA, 222 bp, Homo sapiens
aggtacgcgggggcagcctaaagcccgggacaggcacacaggcccaggtgtgtaggccacagcagccgcagtcctgaaaggctgcaacacccagacctccaggagagaccaggcccaggatgcctcgcctgttcttgttccacctgctagaattctgtttactactgaaccaattttccagagcagtcgcggccaaatggaaggacgatgttattaaattat

SEQ ID NO: 3477 - DNA, 387 bp, Homo sapiens
ccgcggtggcggccgaggtacgcgggggttggagaaaactaaacaatttgttataaaacatccttaaaagcatcagaaagttaatacagcaatgaagaattacaggaccaaattaagaatgcaaccaggttgccaagaactgagtgatgtgtccacatcccgggagagagaagccaccagaagctggaagagctaaatcagactgctccctagagcttcagaaggagccagaactgatgactccaagatcttagcccagtgaaactgatctggacttctgaactatgagagattccattcctgttgtttgaagcctacccacattattgagaacttgttacagtagccccgaggaccactaacacaaaatggggggctccggggaaa

SEQ ID NO: 3478 - DNA, 231 bp, Homo sapiens
ccgggcaggtacttttttttttttttttttttttgtctttttcaccaaaattgggtgatgaggtggtggtgtctttcctctgagatgtctcttttttcccacaggattctttgctggacatccctaattccaagtcaagctggatggacaggcaagctcgtcagctgctagtaaaccgccgcggcccgcgggctccgcacgaaccgaccagaccccaacccccgcgtacct

SEQ ID NO: 3479 - DNA, 386 bp, Homo sapiens
  misc_feature 181, 182, 218, 253, 294, 299, 311, 329, 354, 356, 375: n = A,T,C or G
cactacttagggcgaattggagctccccgcggtggcggccgcccgggcaggtactttttttttttttttttttttttttttttattctgggcaacggcatttgcactcatgacgtctcatatgctccaaactcagggacccgggggaaggtaatacctacctcagtggcaggatccgtagnngggcagttgtgcgaatggccttggtattactgccgnggcttaattcggtcagagcaaaacatccaaaaatntaaatgtcaaagcacaaaatgatggaaagcaagaaaagttntttgngcacattcccanaaggacctcactgccatntttcctttaaagatgaaaccacatntnaaagccccaaatttccatntacccaactag

SEQ ID NO: 3480 - DNA, 424 bp, Homo sapiens
  misc_feature 147, 182: n = A,T,C or G
actacttagggcgaattggagctccccgcggtggcggccgcccgggcctcccaaagtgctgggattataggagtgagccaccacacccggacccacagtcatatatattactaaagccaaccgacaaaaagaaatattgtaacagtnagacaagattgacaagagcaaacatttcacgcaantcaccgttaacagaaaacggcaacaagaaataattaaaatcccacaatcttattttcaagtcagtgaaataaaaaatactcccaactcacccttgaatcaccaacggcaaatactttaggttttctttcttcccaaactgttttggcctcgctgctagggctgtcgcccgagcttacacggactccaggtgaatgagtttttcttgagtcactgcaaaggcagttttcactaggcttcactt

SEQ ID NO: 3481 - DNA, 373 bp, Homo sapiens
ccgcggtggcggccgaggtacactggaggctggggcctgcagatggcatggctctgcggctcaccttgctgcagttggtggtggtgacagagactgcagcttgactgtagtggtgattaccaggagctctgccactgcatgtccactagtgacgggttcgctccaccaccccagctgggtagccgctgctctcacataaggggtccaattaaaattgccaggaataaattcccccggactttgacttctcaagagctaagaaggtttgctgagtattctggcatgatgtttggtgatcaaacaactgctggccaaaaatgatgaagtatttccccctcttgctgaaagatgtgctccatacaaatagtccatc

SEQ ID NO: 3482 - DNA, 178 bp, Homo sapiens
cactacttagggcgaattggagctccccgcggtggcggccgaggtaccgaacgctgacaaatgaagttcacttcattcaacaactcaaagcggcactcagacttaacgcggccataaacgcggcggaaactacagtgcccacgatgcaccgcgccagccccggccgctctagaaacta

SEQ ID NO: 3483 - DNA, 285 bp, Homo sapiens
cactacttagggcgaattggagctccccgcggtggcggccgaggtacgcggggtggttgagccgggtagggaaagcagcctaaagcccgggacaggcacacaggcccaggtgtgtaggccacagcagccgcagtcctgaaaggctgcaacacccagacctccaggagagaccaggcccaggatgcctcgcctgttcttgttccacctgctagaattctgtttactactgaaccaattttccagagcagtcgcggccaaatggaaggaccgatgttattaaattat

SEQ ID NO: 3484 - DNA, 366 bp, Homo sapiens
  misc_feature 34, 195, 348: n = A,T,C or G
aggtacttttttttttttttttttttttttttgntgctatacttttaaaaagtttaaaagaaaataattagtatctttgtcagcaagtttccagtgcggcaggaaaacctaactaatacaaataaaggaaagggagaaatcagaacctcctggcatttactgaccaattattttgaaagttattctttaaaaatntgtaaaacagagatcacagaatgatcagtaagaaatctttttacctgagggaaaataaaactgccaaatcttcaaggcaaaaaaaacatgactatattttttgaatctttcatttaaataacccagtccatccctcatgggccacaagtctanaaaaccctcccttaccct

SEQ ID NO: 3485 - DNA, 376 bp, Homo sapiens
ccgcggtggcggccgcccgggcaggtacatctacctaaaggactattatgtggaataatacatactaatgaagtattacatgatttaaagactacaataaaaccaaacatgcttataacattaagaaaaacaataaagatacatgattggaaaccaaggttgaaaaataggcatatgccttggaggaaatgtgctcaaattactaatgatttagtgttgtccctactttctctctcttttttctttcttttttttttattatggttagctgtcacatacaactttttttttttttgagatggggtctcgctctgtcaccaggcttggagtggcagtgggcgccgatctcggctcactgcaaccctccacatcccat

SEQ ID NO: 3486 - DNA, 396 bp, Homo sapiens
  misc_feature 7: n = A,T,C or G
ggagctncccgcggtggcggccgaggtacaaagatttcctgtggtaaaccatctagtataaacactcaaataatcacttcaatccttagactatctaattcaagtgccactaaagtatgcctaaaactctcataggaaactgatgactctaccctaaatggtcctgcatgtctccagtttatctgatggagctgaactaatctgagtatattatgaacacaagcaaaaattgtgccatccttcatcaacaaagatacagaaaccataaatatgatgtcagaatttgttgctaatttgccacaggagctgaagttaaccctgtctgagatgcagccagcattaccacagctacaacaaccatggtacctcggccgctctagaactaggtgggatccc

SEQ ID NO: 3487 - DNA, 289 bp, Homo sapiens
  misc_feature 31: n = A,T,C or G
atacgactactatagggcgaattggagctcnccgcggtggcggccgcataatttaataacatcgtccttccatttggccgcgactgctctggaaaattggttcagtagtaaacagaattctagcaggtggaacaagaacaggcgaggcatcctgggcctggtctctcctggaggtctgggtgttgcagcctttcaggactgcggctgctgtggcctacacacctgggcctgtgtgcctgtcccgggctttaggctgctttccctacccggctcaaccccccgcgtacct

SEQ ID NO: 3488 - DNA, 364 bp, Homo sapiens
  misc_feature 166: n = A,T,C or G
cttagggcgaattggagctccccgcggtggcggccgaggtacgcggggtgctcttgtgatcttgattgacacgagtggcacccttctgcagaagtaaattgtctagcttagagaacttctgcctgagtgctggtttcactttgctgcaccaagcatttattcctanaacattttttatattcagcaattctgggggctcatccgggatccccattctccttcaagaaggggtcttcagtcaccctacccaggggagatgtgtcccactgccccattgtggtggcctcagggagggggagatcaagacccaccccgttgttatgaataaacttggactctcagcaacacgggggagggagaggct

SEQ ID NO: 3489 - DNA, 398 bp, Homo sapiens
  misc_feature 396: n = A,T,C or G
atcgactacttagggcgaattggagctccccgcggtggcggccgcccgggcaggtacggggacagcaaaggcaagaaacacttttccgaccccttggccatggagcagagccaaaataaatactggctgggcggtaaggaacgcggggccttggtagagcaaagtgcggaccaaagactttgcgtctggttgcttttaccttgcctagtagggtcttcgttctggcgccatcttcatgaagcctcacgaacccgaagagacggctgtagagagagagacacagagcttgttaatggtctgagaaagccagtgacttgctccttcccgagtccaagagcgacagcgacagattggtgagtgccaagctgaggatgaccccgtcatcaacgtggggcnaa

SEQ ID NO: 3490 - DNA, 288 bp, Homo sapiens
tatcgactacttagggcgaattggagctccccgcggtggcggccgaggtacgcggggtggttgagccgggtagggaaagcagcctaaagcccgggacaggcacacaggcccaggtgtgtaggccacagcagccgcagtcctgaaaggctgcaacacccagacctccaggagagaccaggcccaggatgcctcgcctgttcttgttccacctgctagaattctgtttactactgaaccaattttccagagcagtcgcggccaaatggaaggacgatgttattaaattat

SEQ ID NO: 3491 - DNA, 229 bp, Homo sapiens
ataatttaataacatcgtccttccatttggccgcgactgctctggaaaattggttcagtagtaaacagaattctagcaggtggaacaagaacaggcgaggcatcctgggcctggtctctcctggaggtctgggtgttgcagcctttcaggactgcggctgctgtggcctacacacctgggcctgtgtgcctgtcccgggctttaggctgctttccctccccgcgtacct

SEQ ID NO: 3492 - DNA, 433 bp, Homo sapiens
  misc_feature 197, 303, 342, 379, 391, 408, 411, 420, 432: n = A,T,C or G
cactacttagggcgaattggagctccccgcggtggcggccgaggtactctggtaacgcttgttgttgtccaagtgaagctccctcagatgaggcgtgttggccagagagccattgtcaacagcagagatgctgttgaaactcaatcccaacttagccaaattattcaagtcctttcaagctactgcatcaacctctncttgattttgttgcccatcaaagaatgtaattttccgtaaagggaaagggagggaaagaacctttggagggaaatggcttgggtggaatatttggggtaattcaangcaaaatggccgggaattggttagggaagaaggcctttnttttcaattttcccccttgggaaaaaggcccccccanttttttccaaantttccccttggaagccnttnttttcaaanccggggaatttng

SEQ ID NO: 3493 - DNA, 250 bp, Homo sapiens
  misc_feature 247: n = A,T,C or G
ggagctccccgcggtggcggccgcataatttaataacatcgtccttccatttggccgcgactgctctggaaaattggttcagtagtaaacagaattctagcaggtggaacaagaacaggcgaggcatcctgggcctggtctctcctggaggtctggggtgtttgcaagccctttcaggactgcggctgctgtggcctacacacctgggcctgtgtgcctgtcccgggctttaggctgcccccgcgtncct

SEQ ID NO: 3494 - DNA, 250 bp, Homo sapiens
cgaggtacgcggggactgactggttgagccgggtagggaaagcagcctaaagcccgggacaggcacacaggcccaggtgtgtaggccacagcagccgcagtcctgaaaggctgcaacacccagacctccaggagagaccagcccaggatgcctcgcctgttcttgttccacctgctagaattctgtttactactgaaccaattttccagagcagtcgcggccaaatggaaggacgatgttattaaattat

SEQ ID NO: 3495 - DNA, 842 bp, Homo sapiens
  misc_feature 635, 639, 667, 689, 707, 717, 725, 734, 747, 767, 770, 779,786, 799, 802, 812, 827: n = A,T,C or G
ctatagggcgaattggagctccccgcggtggcggccgaggtcgcgggggtctgtgaaagctttaataaaaccacgtttgtttttctggcgaaagaggcgcaagatgaatgcttcttgacaagactcgattattctgtgggctctatacaccaagatgcctgagggggagaaacataatttaaactacagaacaggtggcgggtgctcatgcctgtaatcccagcactttgggaggccaaggcagatggatcacttgaagtcaggagttcaagaccagcctggccaacatagtgaaaccctgcctctaccaaaaaatacaagaattagcccagcatggtggcgtgcacctgtagtcccagctactcaggaggatgaggtgtgagggtaaaatctgacccccgttccttccatcttggcttggaaagtggaagtcccgggtggacatttttgagcccctgatgtatgccaggcactgctgtaagcactgagtattcaaagatgaacaaaatgatgtggccccagtctcctaaaatttactatcaagagaagaagacaacagtgaagcatctgttgaaatggaggtgcccagaatggaagcaaccatggcacggagggcaagcttcccagaaaactgnccanactcacagaggtcttttgtgggaggaanggaataaacctatgtaaagctnccgagatttttccattgnttattactgnaacattanttggtctgntccagccaacggnagcattaagatgtgtttgcntgngccaacttnacatctngatttgaaaaaantcngtctgaaaangaaaccaattcccgnttttcaattttaatt

SEQ ID NO: 3496 - DNA, 422 bp, Homo sapiens
  misc_feature 57, 145, 162, 196, 214, 245, 251, 254, 256, 276, 279, 288,298, 380, 388, 395: n = A,T,C or G
actacttagggcgaattggagctccccgcggtggcggccgcccgggcaggtactttnttttttttttttttttttttttttttggaatcacagacctttaatttttaaagcttaggaagtaaagagagagaggacactgcaaatnacccaagaagccagganaaagaagcagatgtgctcaagtcacgacttcttnttcacctttggatccagnggcttggaaagccctggttattttctggaanatcctnttntncatccatcacaaactttctnatnttttaaggnaggagccagnaaacctttcctgccaccgctggggaggcacatagctcgccagcgtccctggagtcccctcaggaatccccgcgtacctcggncgctctanaactagngggatcccccgggctgcagggaattcg

SEQ ID NO: 3497 - DNA, 371 bp, Homo sapiens
  misc_feature 216: n = A,T,C or G
tcactacttagggcgaattggagctccccgcggtggcggccgaggtactttatagtttagagctggacattggaaaaaaaaaagccagaacaacatgtaatagataatatgattggctgcacacttccagactgatgaatgatgaatgtgatggactattgtatggagcacatcttcagcaagagggggaaatactcatcatttttagcccagcanttgttttgatcaccaaacatcatgccagaatactcagcaaaccttcttagctcttgagaagtcaaagtccgggggaatttattcctggcaattttaattggaccccttatgttgagagcagcggctacccagctggggtggtggagcgaacccgt

SEQ ID NO: 3498 - DNA, 266 bp, Homo sapiens
  misc_feature 59, 105: n = A,T,C or G
tcactacttagggcgaattggagctccccgcggtggcggccgaggtacgcggggagcancctaaagcccgggacaggcacacgggcccaggtgtgtaggccacancagctcgcagtcctgaaaggctgcaacacccagacctccaggagagaccaggcccaggatgcctcgcctgttcttgttccacctgctagaattctgtttactactgaaccaattttccagagcagtcgcggcaaaatggaaggacgatgttattaaattat

SEQ ID NO: 3499 - DNA, 268 bp, Homo sapiens
ataatttaataacatcgtccttccatttggccgcgactgctctggaaaattggttcagtagtaaacagaattctagcaggtggaacaagaacaggcgaggcatcctgggcctggtctctcctggaggtctgggtgttgcagcctttcaggactgcggctgctgtggcctacacacctgggcctgtgtgcctgtcccgggctttaggctgctttccctacccggctcaaccagtcagtccccgcgtacctcggccgctctagaactagt

SEQ ID NO: 3500 - DNA, 287 bp, Homo sapiens
ctacttagggcgaattggagctccccgcggtggcggccgcataatttaataacatcgtccttccatttggccgcgactgctctggaaaattggttcagtagtaaacagaattctagcaggtggaacaagaacgggcgaggcatcctgggcctggtctctcctggaggtctgggtgttgcagcctttcaggactgcggctgctgtggcctacacacctgggcctgtgtgcctgtcccgggctttaggctgctttccctacccggctcaaccagtctccccgcgtacct

SEQ ID NO: 3501 - DNA, 245 bp, Homo sapiens
ccgcggtggcggccgcataatttaataacatcgtccttccatttggccgcgactgctctggaaaattggttcagtagtaaacagaattctagcaggtggaacaagaacaggcgaggcatcctgggcctggtctctcctggaggtctgggtgttgcagcctttcaggactgcggctgctgtggcctacacacctgggcctgtgtgcctgtcccgggctttaggctgctttccctccccgcgtacct

SEQ ID NO: 3502 - DNA, 286 bp, Homo sapiens
catacttagggcgaattggagctccccgcggtggcggccgcataatttaataacatcgtccttccatttggccgcgactgctctggaaaattggttcagtagtaaacagaattctagcaggtggaacaagaacaggcgaggcatcctgggcctggtctctcctggaggtctgggtgttgcagcctttcaggactgcggctgctgtggcctacacacctgggcctgtgtgcctgtcccgggctttaggctgctttccctacccggctcaaccagtccccgcgtacct

SEQ ID NO: 3503 - DNA, 288 bp, Homo sapiens
tacttagggcgaattggagctccccgcggtggcggccgcataatttaataacatcgtccttccatttggccgcgactgctctggaaaattggttcagtagtaaacagaattctagcaggtggaacaagaacaggcgaggcatcctgggcctggtctctcctggaggtctgggtgttgcagcctttcaggactgcggctgctgtggcctacacacctgggcctgtgtgcctgtcccgggctttaggctgctttccctacccggctcaaccagtcagtccccgcgtacct

SEQ ID NO: 3504 - DNA, 234 bp, Homo sapiens
  misc_feature 20, 158: n = A,T,C or G
ccgcggtggcggccgataantaataacatcgtccttccatttggccgcgactgctctggaaaattggttcagtagtaaacagaattctagcaggtggaacaagaacaggcgaggcatcctgggcctggtctctcctggaggtctgggtgttgagcctntagactgcggctgctgtggcctacacacctgggcctgtgtgcctgtcccggctttaggctgctccccgcgtacctc

SEQ ID NO: 3505 - DNA, 441 bp, Homo sapiens
  misc_feature 210, 230, 280, 303, 378: n = A,T,C or G
ccgcggtggcggccgcccgggcaggtacgcagccgctgacgtcggaaagaacctgctgggcccctgtgctcaggccctaaacaaacttggtgtcccgaaggggaggcgcgaccaaaagaaatcaaaggtctttagggcggagatcacagaatcattggagatattaatgcaaaacgggaggcctgtccaataatcctgctaatgctaatngggttactggaaagatgaanaagagaggaaagatcccaacgatcccgtcaacacgaaaatcccaggaatnagagaaatgctgagccgattatnaggattagcaaatgttgttttgcatgaattatcaggagatgattgacactgatcagaatatgagggctcccctanaccctgaattacaccaaggaatcttgacatgggaatttaataatactacacaaggaaagatgt

SEQ ID NO: 3506 - DNA, 230 bp, Homo sapiens
  misc_feature 186, 199: n = A,T,C or G
aggtacgcggggagggaaagcagcctaaagcccgggacaggcacacaggcccaggtgtgtaggccacagcagccgcagtcctgaaaggctgcaacacccagacctccaggagagaccaggcccaggatgcctcgcctgttcttgttccacctgctagaaattctgtttactactgaaccaattttncagagcagtcgcngccaaatggaaggacgatgttattaaattat

SEQ ID NO: 3507 - DNA, 355 bp, Homo sapiens
  misc_feature 178: n = A,T,C or G
ccgcggtggcggccgaggtacactctaaagaaagccatgaggatgataatccactttgatacttccaatctgctggccttgctgaactctttggatcatggatatcataagttcgacaaaatattttttttgtagaagcacaaatgtgaagtgtcactcgttctgagacttcctcctntgtgaaattccacaatctctttctatttatagacttttccacagcaaacattagtctacgcagggcattttgaaaatcatttgccagttctaaagtagtaataataaatactccaagaactaaaagtccccctggtagcattctggatacctggcaggcatgttctgtggcccattc

SEQ ID NO: 3508 - DNA, 420 bp, Homo sapiens
  misc_feature 301, 396, 399: n = A,T,C or G
ccgcggtggcggccgcccgggcaggtacctttcattggattgtccatggtgcatcgctttagcaagcggcgtgactctccgctgcccgtcatcttggccaatatctatctgctggttcctcctgtgctcaacccaattgcctatggagtgaagacaaaggagattcgacagcgcatccttcgacttttccatgtgggccacacacgcttcagagccctaggtgtcagtgatcaaacttcttttccattcagagtcctctgattcagattttaatgttaacattttggaagacagtattcanaaaaaaaatttccttaataaaaatacaactcagatccttcaaatatgaaactggttggggaatctccattttttcaatattattttcttctttgnttncttgctacatataattattaa

SEQ ID NO: 3509 - DNA, 360 bp, Homo sapiens
atcatacttagggcgaattggagctccccgcggtggcggccgaggtacaaaagttaagctccatttaccactcacttgacagtgtcctttaaatctgaacttgctcttgctcatgcggagcttggctaagagaaaccagatcagaatgcaagctgtaggtgggtgggtgagtgtgtcccctcccacactgctctctggtgggtttgggcagtccctggctctagtctctgctgcagattctcaggaccaaaatgtgggtgatttgtctgggtccaggcaggagacagaaatcacacaagcctcttttattaagagataatataaagaatgattaaccaggtgacagtaaagggcaggaag

SEQ ID NO: 3510 - DNA, 468 bp, Homo sapiens
  misc_feature 204, 245, 247, 272, 276, 299, 302, 326, 341, 360, 378, 390,409, 411, 423, 446, 453: n = A,T,C or G
ccgggcaggtacgcggggtctgtgcctggaggggactcgccgccatctcaggtctcttggctttgccagggcccaccggagaaaactgacgacccgtttctgtaatccttatgggaggaccaaccttgtgcctccgggagatccactctcccacccgggaaaccgccaccgggggaaggccaaggccctccaaaaaaaaggcgnctggccttccttcggcttccgcggtttgggggaatttattncncggggaaaagggaaaccttcccccnaacnggggaaggggttaaggttaaccnccngggggaaggaattggaaaattggnaaattgttggggccnttaattggtttccccaaanttaaaacccaattttttntaattttttaanccaaaaaaaaaaacccaangnaagggggggttnggggttccctgggttaattttancccaaanaaaaaaaaaccaagg

SEQ ID NO: 3511 - DNA, 259 bp, Homo sapiens
  misc_feature 88, 90, 91, 98, 101, 104, 109, 119, 125, 126, 127, 131, 133,149, 153, 195, 197, 246, 259: n = A,T,C or G
aggtacctcaagatcatggcaggcagcaagtgaagccccagctggactcatggatgtgcaccctttgctccctgctcttattgcctangnnctcatgnatntgngcagntatggtactngatccnnntttntnttagtggctgggggcntttnttgcctataaatctataccatgaaaagcctgcctttattttntnccaagctgagtgccatttgctgttaaaagtaccttgcccgggcggccgntctagaactagtn

SEQ ID NO: 3512 - DNA, 158 bp, Homo sapiens
  misc_feature 24: n = A,T,C or G
atacttagggcgaattggagctcnccgcggtggcggccgaggtaccgaacgctgacaaatgaagttcacttcattcaacaactcaaagcggcactcagacttaacgcggccataaacgcggcggaaactacggtgcccacgatgcaccgcgccagccc

SEQ ID NO: 3513 - DNA, 400 bp, Homo sapiens
  misc_feature 351, 381: n = A,T,C or G
ccgcggtggcggccgaggtacgggggttatttccaatgacgtgtgtgcgcaagttcaccctcagaaggtgaccaagttcatgctgtgtgctggacgctggacagggggcaaaagcacctgctcgggtgattctgggggcccacttgtctgtaatggtgtgcttcaaggtatcacgtcatggggcagtgaaccatgtgccctgcccgaaaggccttccctgtaccattaaccaaatagcgtaactattttatgtccacatttcacttctgtatttacaaacatatcagtaaagagttaacaatgagatgcgatcaaacatccatattatctgttttgtagacagcaatgtanatgattttgtaatcacctttcatcggagtnaccttatataaaaaataag

SEQ ID NO: 3514 - DNA, 260 bp, Homo sapiens
acttagggcgaattggagctccccgcggtggcggccgcataatttaataacatcgtccttccatttggccgcgactgctctggaaaattggttcagtagtaaacagaattctagcaggtggaacaagaacaggcgaggcatcctgggcctggtctctcctggaggtctgggtgttgcagcctttcaggactgcggctgctgtggcctacacacctgggcctgtgtgcctgtcccgggctttaggctgcccccgcgtacct

SEQ ID NO: 3515 - DNA, 313 bp, Homo sapiens
  misc_feature 26, 201, 202, 215, 224, 254, 257, 271: n = A,T,C or G
cactacttagggcgaattggagctcnccgcggtggcggccgaggtacgcgggtcagctgtccgggctgctttcgcctccgcctgtggatgctgcgcctctccgaacgcaacatgaaggtgctccttgccgccgccctcatcgcggggtccgtcttcttcctgctgctgccgggaccttctgcggcccgctctaagaactanntgggatccccccnggccttgcnaggaaatttcgaataatcaaagccttatcnaanaccgcccgacctcngagggggggggccccggtacccaagcttttgttccctttagt

SEQ ID NO: 3516 - DNA, 141 bp, Homo sapiens
actacttagggcgaattggagctccccgcggtggcggccgaggtacgcgggggtaaaggccgtgtgtggcgcctgcgcacctcttttccctttcggattcccgacgctgtggttgctgtaaggggtcctccctgcgccaca

SEQ ID NO: 3517 - DNA, 243 bp, Homo sapiens
  misc_feature 199: n = A,T,C or G
actacttagggcgaattggagctccccgcggtggcggccgcataatttaataacatcgtccttccatttggccgcgactgctctggaaaattggttcagtagtaaacagaattctagcaggtggaacaagaacaggcgaggcatcctgggcctggtctctcctggaggtctgggtgttgcagcctttcaggactgcggntgctttggggcctacacaccttgggcctgtgtccccgcgtacct

SEQ ID NO: 3518 - DNA, 321 bp, Homo sapiens
  misc_feature 167, 175, 183, 192, 212, 302, 303: n = A,T,C or G
ccgcggtggcggccgccacgctggttttgcatcttcaggagacgctcgtagccctcgcgcttctcctcggccaattcgcggaagaagtggctcacgccttccagagccacatcatcgcggtcgaaatagaagcccagagagaggtaggtgtaggaggcctgcaggtncctcgggncccttctnaaaactaantgggatcccccggggcttgnagggaatttcaatattcaaagccttatttgatacccgtcgaccctcgaagggggggggctcccggtacccaagctttttgttccctttanntgaagggttaattgccgc

SEQ ID NO: 3519 - DNA, 451 bp, Homo sapiens
  misc_feature 206, 211, 215, 253, 259, 429: n = A,T,C or G
cttagggcgaattggagctcaccgcggtggcggccgcccgggcaggtaccagcttcagcatcactgggaagcttattagaaatgcagaacctcaggccctgcttactgaacaaaaatccacagagtctccaggctgctcatgacttacttcctcatgtctgcctctccagctttctggaggagggactgggcttgggctggggccnaattnttcntgttttcagccccttggtgccaggggtttgtaagcagnacaccngaggcttgctcttgaaaccaactgatttagcttgagctatcaatattgtgtggctcagctgggggtccccttcctcctctgtctgcaatggttgtttgttttttgaggcagagtctcactctgtcacccaggctggagtgcagtgggcacaatcagctcactgcaacttntgcctttccggattcaaagcaa

SEQ ID NO: 3520 - DNA, 393 bp, Homo sapiens
  misc_feature 181, 187, 190, 199, 206, 248, 284, 366: n = A,T,C or G
ggagctccccgcggtggcggccgaggtacttatcattccatctgcgtgcttctccgcattactctggtctttggcaatctgcagcaacacaatgcagtgtttaattgattctaccatgctatttgttgtctctttgagagtttcaattttctttccctgttcatcttctttgcagttttgnagcctngcntcaaaaaanggctttnaatttgttccaatcaagaatttgtaaggtaagcatcagcctnctgtaagttttctttatcaaaatcttggacactagngaacaaatcctgaatccaaaccttgaagctggagagtatgtcgaagaattgtttcttctaaaggcatggatccacttctctngctcatcagcatcacgggcctggaaat

SEQ ID NO: 3521 - DNA, 460 bp, Homo sapiens
  misc_feature 205, 220, 232, 233, 235, 236, 282, 316, 335, 402, 418, 425,439: n = A,T,C or G
gactacttagggcgaattggagctccccgcggtggcggccgaggtactcacacagtcatcacccctacccgtgcacagatggccacttctgcctccatccactcaatgccaacaggcacgattcctccactgacaacgctcacggccacagggtccacacacacagcctcaccaatgacggggaccaccattcggacccacccancccacagcttcattnaggcatagcccnngnngaaaaaaaaaaaaaaaaaaaaaaggtccagagatttaaatgaaatnttcgaaagaataaatttgcttttcagtccactgnattttcaaaattgattatnaccaagcttggatgaaagctgtgaaccacaaaccatttgtttatttaatagaaaaaagaatgtgtanacccgcgtaccttcanaaacttnttcaagatacccgngttgaacttccatttgcatat

SEQ ID NO: 3522 - DNA, 516 bp, Homo sapiens
  misc_feature 5, 29, 32, 43, 47, 50, 61, 73, 74, 82, 101, 102, 113, 160,192, 206, 226, 229, 232, 237, 241, 254, 260, 270, 271, 279,288, 297, 316, 320, 325, 327, 329, 333, 335, 336, 344, 349,362, 367, 368, 369, 370, 371, 373, 374, 390, 399, 401: n = A,T,C or G
  misc_feature 411, 414, 416, 417, 421, 425, 430, 432, 437, 438, 439, 442,443, 444, 451, 456, 461, 462, 463, 465, 466, 467, 468, 480,498, 516: n = A,T,C or G
aacangaacgctgtcaccttctcagagtnagnactagcacacntgtnaanggacaggaganggaggctcacanncggaattntcctggggcgcaagaactnntttggttcgangccgccccagcctgaggcgtagcaggtgggccccagtgctggctccngggggggcaggcccaagaccttcacaacatcngggaacttgggcangctctgacaggcgaaagcancanganggcanggcnggaaggcctaaancggggncaaaaggctnngaagcctnaaaaaaagncccaaaaangggaaaaaaccgggggggngganaaaanancngggncnnaaaaaaangaccnccccgggggcccnggggnnnnnanngggggaaaaaaaaagnggggggggncncccccccccnaananncaanaccnggggnanaattnnnttnnnaaaaaanaaaanggggnnncnnnnaaaaaaacaccnccgggggggggggggggnaaaaaaaacccccccccn

SEQ ID NO: 3523 - DNA, 450 bp, Homo sapiens
  misc_feature 23, 70: n = A,T,C or G
tacttagggcgaattggagctcnccgcggtggcggccgcccgggcaggtaccatgttgtaaaattaccanggaaccgccatgcctcaagatcgccctgttttctggcttcatcaatgactgcatgcagtgcaccaccctgtccactacgtgatgctgtaggattaagtctcacagtgggcggctgaggatacagcgccgcgtcctgtgttgccggtgaattagacgccatcgctgtgggttgctggtatggtgccgtgctatttggcacaggacacaccgcttgaggtctgtattgaacctctgaaggaggccgatactgaagctcggttggcagccggtattgataaactaccagcggttgggtcttattttctaccggctgatattgtggatactgtatctgagttggcattgccgggatagagactctgtccctttctacttgattt

SEQ ID NO: 3524 - DNA, 273 bp, Homo sapiens
aacactactatagggcaattggagctccccgcggtggcggccgcataatttaataacatcgtccttccatttggccgcgactgctctggaaaattggttcagtagtaaacagaattctagcaggtggaacaagaacaggcgaggcatcctgggcctggtctctcctggaggtctgggtgttgcagcctttcaggactgcggctgctgtggcctacacacctgggcctgtgtgcctgtcccgggctttaggctgctttccctccccgcgtacct

SEQ ID NO: 3525 - DNA, 292 bp, Homo sapiens
  misc_feature 248: n = A,T,C or G
gactacttagggcgaattggagctccccgcggtggcggccgaggtacgcggggactgactggttgagccgggtagggaaagcagcctaaagcccgggacaggcacacaggcccaggtgtgtaggccacagcagccgcagtcctgaaaggctgcaacacccagacctccaggagagaccaggcccaggatgcctcgcctgttctttgttccacctgctagaattcttgtttactactgaaccaattttncagagcagtcgcggccaaatggaaggacgatgttattaaattat

SEQ ID NO: 3526 - DNA, 457 bp, Homo sapiens
  misc_feature 215, 376: n = A,T,C or G
cactacttagggcgaattggagctccccgcggtggcggccgcccgggcaggtaccccactcccagacaccattgaccagatgctaagagtcaaaggaatgaaacacagaaaaactccaagtcacacaaggatgttaaaagatggtcaagaaaggcccacaatccttaaaagcacagccttctaacatcgctttcagttagggaagaaactgaaanaggaaagactggtcttgccagaaatggccagcttgtgcagactccgagtccttcagtgacaaaggcctttgctgtttgtcctcttgacctgtgtctgacttgctcctggatgggcacccacactcagaggctacatatggccctagagcaccaccttcctntagggacactggggctacctacagacaacttcatctaagtcctaactattaccaatgatggactcagcaccttcaaagcag

SEQ ID NO: 3527 - DNA, 181 bp, Homo sapiens
cactacttagggcgaattggagctccccgcggtggcggccgcccgggcaggtacaggggaaaagagctctccatttctcagcaggggacaccctggtccccactgccactttgtttgccctccaagggaaaaacctctcaataccaggtccaggagcagctggatgggatcactcagaacc

SEQ ID NO: 3528 - DNA, 553 bp, Homo sapiens
ccgcggtggcggccgaggtaccaggagggtattgatgtttgaggtccaaactgaaaacccatcacctccttcccactgctatagcagcgttagccctggggttcattatctagccagtccacaccttctaaagtggggctctgaaaatgtcttacttcctcacagacaaagcaattctcaagcctcctgagatcacccaccaaccagagcaactgctgtcacttggaggtgcagctgaattcttctaattgtgacacaaactcttgaaactgtaaatgctgaaagattaaatgaggttataacactcagaaggttttacaagtaaaagtaagtcaaatcaataggtctttatttcatatctgtaatgggtttaagctctgcgggaagtgttagcagctatatgaattaggaagaatttagaagacaatccctaaacacatgaaatgtccaagtaagaagataacatatttatccaaatatttaaagtgaaatgctccagatatggggaagcttacagtttttcaagcaaagctttttagaaaaaattatggaa

SEQ ID NO: 3529 - DNA, 553 bp, Homo sapiens
  misc_feature 158, 463, 490, 521: n = A,T,C or G
ccgcggtggcggcccgaggtacttgcccccaggcccagataatttatttaaaaactttttttgtagagacagggtctcactatgttgcccaggctggtctcaaactcctggcctcaaacaatcctctacctcaacccccctaagtgctggcattcagnatcaagctgccatgcctggctacaaatcttaatgttttccccatggcttctttttctggcgttcttttctcaggtaatggaagtgggcagagaatgatcctttccctaggctccaagtgtgtaagaattaaagaaagaggaaagaaacacaatggcttgatggtcgaggacaggtttattttaaagaaaacaaacccaagagtggcttctggctgagttagatcagaggcatgctctcttacagactaagagttttttaagggattcagggtgggagagtttaccagagcttggactgcttctgngtctctttaagtgtgcttatctgggangggagtttgtgtgtctgtttcccatacatcnttcctgcagctgcaaggcatacccccaaggtc

SEQ ID NO: 3530 - DNA, 173 bp, Homo sapiens
ccgcggtggcggcccgcccgggcaggtacaggggaaaagagctctccatttctcagcaggggacaccctggtccccactgccactttgtttgccctccaagggaaaaacctctcaataccaggtccaggagcagctggatgggatcactcagaacccggcgttagaactagtg

SEQ ID NO: 3531 - DNA, 409 bp, Homo sapiens
  misc_feature 107, 260, 365, 382, 396, 399: n = A,T,C or G
tagggcgaattggagctccccgcggtggcggccgaggtactgaaccaaaacaaacaactgtgtatagactgctgttttcttttttatttgaaatgaggcattttggngttctttcccctaccatacggcctgtctgcccttccctccccacattggctccagcagagtagccgaaggtcctgccgccgccgccaccaccaccactgcagcaacaacagcagcagcagcagcagcgcctgcatagctccactctgacctgngaaggaatggggatgaggccaggagctagtgtctaccacggccacacagggagcagtgttgggcccttagcccccaaggggcctgctatgcatgtggcttttttntttttttaaacacagtnaactagattagtcngtnagggttttta

SEQ ID NO: 3532 - DNA, 534 bp, Homo sapiens
  misc_feature 40, 199, 218, 226, 227, 234, 252, 264, 273, 279, 292, 313,330, 345, 349, 372, 378, 387, 409, 427, 454, 472, 491, 495,497, 504, 522, 531: n = A,T,C or G
ccgggcaggtacccaatcctgtccttgccggtccctcctngccgggtgggaatcttcgtggattatgaggcccatgacatttctttctacaatgtgactgactatggctcccacatcttcactttcccccgctatcccttccctgggccgcctcctgccctatttttagtcctttgctacagcatttggaaccaacaancactgctcctctggccatnttgctccnntggatgnggtgagggactaaagganaaagcttaccancctataacncaccantaagggctttggnaatttggggtcctgggtcccnccatgggggcctttggnagggaccccgagtcncacntgaccaaggttattcccccttgnaaaacnttggaggcntgccgcccccaagttattcccnaagggaatttcccttctngtactggaatcccctttttgggttccntttttggctttacacaangggccttggaaaagtttcnttgntncaattgnaaaaaaccccaacttttnatttttttnaaa

SEQ ID NO: 3533 - DNA, 482 bp, Homo sapiens
  misc_feature 23, 25, 29, 106, 203, 207, 209, 226, 247, 263, 264, 266,275, 286, 295, 297, 341, 347, 383, 386, 394, 414, 422, 423,460: n = A,T,C or G
caccgcggtggcggccgcccggncnggtnctttcttttcctttccactgccgtgtctgtgggaataggtggctaggcattgaacaaagagctccgtggccttggcncgtgagcaccaacgcctcctggttgatgctggacacctcgggggagctcttcatgatcgacccggatgcggggatagaggcagcgagatgaagcccnctgntnccccccccttgggcttnacccacggaccaccgttcacnccatctttcccgcccnncnacgccgggngttccttcgcngtacccttngngaaacgcttctaagaaaacctaggtggggattcccccccggggncttgcnaaggggaaaatttttccggaatatttccaaaggccnttnaattttgnattaaccccgtttccggaanccctttcnnaagggggggggggggccccccggggttaccccccaanaccttttttttggttttacccc

SEQ ID NO: 3534 - DNA, 391 bp, Homo sapiens
  misc_feature 23, 27, 48, 63, 80, 84, 241: n = A,T,C or G
aaccgcgaattggtttccccgangtgncggccgcccgggcaggtactntctttcagttacccntgtgcctccagaatttnatgntgctccacctgggggcggatataaattacctctagattgtccaaagcccagtctttcccttccctgtgcagccttagaaactaagtagcagtaccagcatggttaggttctgttgagggctctcttctgggttgtagacttccagctttctcactgngtcctcatgtggcctttagttagtatgtgtaggattcaagcagtgtaaccaggatttctccgggtctcttatctctgttggtctcatttactttcactccagataagctttcttcatgttgcaaatgacatggtcataaatagcctcctt

SEQ ID NO: 3535 - DNA, 273 bp, Homo sapiens
tatcactacttagggcgaattggagctccccgcggtggcggccgaggtacgcggggagggaaagcagcctaaagcccgggacaggcacacaggcccaggtgtgtaggccacagcagccgcagtcctgaaaggctgcaacacccagacctccaggagagaccaggcccaggatgcctcgcctgttcttgttccacctgctagaattctgtttactactgaaccaattttccagagcagtcgcggccaaatggaaggacgatgttattaaattat

SEQ ID NO: 3536 - DNA, 404 bp, Homo sapiens
  misc_feature 228, 348, 389, 394: n = A,T,C or G
ccgcggtggcggccgcccgggcaggtacgcgggggcggcgcgggtcctccatatgctgagcgccggtcccctgggcccacttttctttctctatactttgtctctgttgtctttcttttctcaagtctctcgttccacctgaggagaaatgcccacagctgtggaggcgcaggccactccatctggtgcccaacgtggatgcttttctctagggtgaagggactcttngagtgtggtcattgaggacaagtcaacgagagattcccgaggtgaaggtacctcaaatttgagcagtttttgtgttttgtgtaaattaaagtaaaaagcaagtccacaataatgttttgnaatactgcacaccagttctaccagattttgtaactatcaanatttnaatgaaaaaa

SEQ ID NO: 3537 - DNA, 580 bp, Homo sapiens
  misc_feature 81, 242, 314, 398, 403, 413, 435, 442, 485, 492, 512, 551: n = A,T,C or G
gaattagttcgcgcgcagattgccatttgcggcatgagcacctggagcaaaaggtctctgagccaggaagatgctcctcanacacctagaccagtggcagaaattgtgccatccttcatcaacaaagatacaggaaaccataaatatgatgtcaagaattttgttgctaaattttgccacaagggagcttgaagtttaaccccctgtctggaagatgccagcccagccatttacccaccagncttacaaacaaacattgttaccctccggcccgcctctaagaaacctagttgggaatccccccggggcctgcnagggaaattttccgaattattcaaagcctttaattcggaattaccccggtccgaacccttccgaagggggggggggggcccccngggtnaccccccagnccttttttggtttccccctttnttaaggntggaggggggttttaaattttggccggccgcctttggggcggntaaattncaattggggttcattaaggncttggtttttcccttggttggttggaaaaaaatttgggnttaattcccccgcctttcaaccaaaattt

SEQ ID NO: 3538 - DNA, 464 bp, Homo sapiens
  misc_feature 168, 175, 191, 206, 219, 233, 240, 274, 279, 280, 286, 305,312, 316, 327, 330, 332, 335, 339, 342, 345, 348, 368, 370,381, 386, 392, 394, 414, 423: n = A,T,C or G
ccgggcaggtaccatgaacaagctggccacagccatgcaggagggggagtatgatgcatgagcggccccccagcaagcctccaccggttgaactgcgggctgctgcccttcgtgcagagatcacagatgcttgaaggcctgggtttgaagctccgaagatccgagagnacagttnttaaggtagttgaagnaagttcacttcaagnatttaaggggagnagggtagtctaagntgaaggnccaatgttgccggcctgaagctcttccttgggangaaannaaggtntgggaccagttgccttgcncaaaggnattnccaggaattgnagncngcnattncgnagnaanagttccaaggaccttcggtntngggagggaagnacccnagggcnancttggcttgccggaaaaagnaaagggagnaaaagaagttttttgtaggggaggaccaaaatggggaattg

SEQ ID NO: 3539 - DNA, 625 bp, Homo sapiens
  misc_feature 164, 178, 239, 282, 291, 322, 330, 355, 365, 377, 533, 543,548, 579, 593: n = A,T,C or G
ccgggcaggtacttgtggaacaacatcaaaaggtggcaggccatatacaaacagttcgacactgaccgatcagggaccatttgcagtaagtgaactcccaggtgcctttgaggcagcagggttccaccctgaattgaggcatctcttataaccatggatcattnccgaacgcctaacntcaagaatgaaaaagtgggggaaaccattgggattttttggacaaactttcattcaaggcntggcattggggtcaagggcttgggaccgccccattggtttccncggtggccntttcaaaaattcttcttttggaccaaaaagnatggggcnaccttgggaaccaaaaattccccangggttggaanccattcccaagngaagttgggccttgcaaggcttggacctaattggtaattttcccctggaaaccttggggaaggcccccccaaggaacccccggccccccttttcaaccccggcccttttggccttattaaggggaaggttcaaccccttggggaaggccccttccnggggttcttnctttnccccaagggggccccggaattcccttggttncttgggcaaagttncaaccaatttcttttttggttggggggggccc

SEQ ID NO: 3540 - DNA, 554 bp, Homo sapiens
  misc_feature 10, 132, 172, 195, 208, 212, 218, 220, 236, 242, 251, 295,301, 314, 322, 335, 347, 360, 374, 382, 384, 387, 395, 410,437, 455, 472, 479, 502, 503, 512, 519, 520, 524: n = A,T,C or G
aggtaccagncaaacgtcactcagatgcagtcttcactgacaactatacccgccttagaaaacaaatggctgtaaagaaatatttgaactcaattctgaatggaaagaggagcagtgagggagaatctcccnactttttcagaagagtttagaaaaaatgattgaaaaaaanaccctttttggaagccaaaagcntgaattgacaacnttcnccagtngnaattttctttgaaggnaaaaantgaataccnccaaccaattaaattaaaaaatttttttggagttttccttaccnttaaangttaaaattttcnaaggaaanaaacatacctttnccaaataattcnccaaaaaccccanaaattaaaaaaaanttaatttngntgntctagttngaaaattggttatgnatggaattggttatttttcttaagccnttaaaattggttaaattnaaaccctggttggaaanctttttnaccaattttggtaaaaaattaannttatttatntggaagnnaagntttccttaaaaatttttattggttcctttt

SEQ ID NO: 3541 - DNA, 134 bp, Homo sapiens
ccgcggtggcggccggggctggcgcggtgcatcgtgggcactgtagtttccgccgcgtttatggccgcgttaagtctgagtgccgctttgagttgttgaatgaagtgaacttcatttgtcagcgttcggtacct

SEQ ID NO: 3542 - DNA, 455 bp, Homo sapiens
  misc_feature 407: n = A,T,C or G
ctatagggcgaattggagctccccgcggtggcggcccgaggtacatgttgtgggtgccgctccgggagtcatagcgcagccagatcccgaagttcttcacccgcacgggggacttctcaaacacctgcccacagtagacaatctcccctgaagacttcttcatcttctttaactgagatacaaagtactgtgaagatattgtaaacacagctgcatggggaggtcagcttgagctaagagctctgtctcacattttacaaacaccaatagagataatacaggcagattctcctcccattatagttggtgaagaatattcaaaaaaaccactaatacttgtatatatgagacatgcatatggcttatgagaacattataattcggttacaccggttggtaaacatagntactgaaaattgcagctaatttatacaatgttgtacctgcccgggcgg

SEQ ID NO: 3543 - DNA, 239 bp, Homo sapiens
cgcggtggcggcccgcataatttaataacatcgtccttccatttggcccgcgactgctctggaaaattggttcagtagtaaacagaattctagcaggtggaacaagaacaggcgaggcatcctgggcctggtctctcctggaggtctgggtgttgcagcctttcaggactgcggctgctgtggcctacacacctgggcctgtgtgcctgtcccgggctttaggctgcccccgcgtacct

SEQ ID NO: 3544 - DNA, 353 bp, Homo sapiens
  misc_feature 16, 214, 227, 240, 291, 297, 349: n = A,T,C or G
cgcggtggcggcccgnccgggcaggtactttcataaacaaataggaaaatgtgatctattgcttcttttcttggtccgtgcccctcgccttgctaagtcagtttttcgactgcctgtgtgtgtgtgtgtgtgtgtgtgcatgtgtgtgtgcgtatgtgtgtccagaggccactgatccaagtccaagtgtatttagaaattatttcagtggctnacaaaggtcttanaggccactactgngctggggaaatccattgagcttggcttgttctctcttgctcttgccaatgngcactntgcttacatgcaaacactccttaggaagatgccagtaatctctattttatgnacct

SEQ ID NO: 3545 - DNA, 553 bp, Homo sapiens
  misc_feature 4: n = A,T,C or G
attntagggcgaattggagcttcccgtggtggcggcccgcccgggcaggtacgcggggaagaaggacatttctggtagctggtcgaggttggtgacgttgaggatctaaattaagacagtattataggaatggggaagaggaggcaaagtcaagaacaatgtgaactatcaaaccagcaggaccttactataaatgagagggaggaaggaccaaggatgcttcttatgtagctgccttctattcctgggtgactggttgcacagtctccttagagaatccaggaacagagagaatatataccttccactggaagaatctcaaacagcgctgcttactcaggatcagtggcaccagccaactcagctttgggacaaacccagccaagtgaccaggacactttagtgcaaagagctgagcacattccagcagggaaacgaactccgatgtgcgcccattgtaaccaggtcatcagaggaccattcttagtggcactggggaaatcttggcacccagaagaattcaactgcgctcactgcaaaaatacaatggcct

SEQ ID NO: 3546 - DNA, 257 bp, Homo sapiens
  misc_feature 158: n = A,T,C or G
gtggcggccgaggtcgcggggactgactggttgagccgggtagggaaagcagcctaaagcccgggacaggcacacaggcccaggtgtgtaggccacagcagccgcagtcctgaaaggctgcaacacccagacctccaggagagaccaggcccaggatnctcgcctgttcttgttccacctgctagaattctgtttactactgaaccaattttccagagcagtcgcggccaaatggaaggacgatgttattaaattat

SEQ ID NO: 3547 - DNA, 421 bp, Homo sapiens
  misc_feature 180, 307, 378, 382, 393, 404, 419: n = A,T,C or G
ccgggcaggactgggctaaaaaatagccctcagcatcgcaattcctgatgagggtgtcccggttggagaccatgccccaagctgctatgccaatggccacaatattctcctctgaactcctgctgatggtgttatctctcaccacctccccgatgtacaagaagaacataggtaaatttnaagaggaagccaatatttatgctgccaaaacagctgtcactgctaccaatgtgtcagcccatggaagccaaactaactcgccctcaactcccaactcggctggttcttccagttcttttaacatgtnaaactctggagatttgttcatgagccgtgcagttcactttaatggggattctttaccaaggggcccaggtntggnagccaacgttncaatcacaggngggataccccttcgnca

SEQ ID NO: 3548 - DNA, 406 bp, Homo sapiens
  misc_feature 347: n = A,T,C or G
ccgcggtggcggccgcccgggcaggtaccgcctctgtccctaccttgtctgttagccatgtggctgccccatttatccacctccatcttctttgcagcctgggtggctatgggtacacaaatacaaacatgcactcccccacacacacacatacatggacacacacagaggcatatcatgcattatcttccctcattcatcgatattctcaaatggcttattacacagatttacattcacaaatattctattatgtaaatgtaaatctattctattatgtgaatgtaaacctatataatatatttagccattttctcagttggatattttggttatttctatgttgncacaattttaaatcacattgaaataaactaggcccctttggactcctttctttctctct

SEQ ID NO: 3549 - DNA, 382 bp, Homo sapiens
ccgcggtggcggccgcccgggcaggtaccctagttccacacccaaatcccataaaacaattatctccagcctctcatcctcatcccatccatttttggttagaccccaggtaaagggtagggtgcccaaatacttccttgctgagctgggaggaaggcagaggcagaaaatgtaaagctccagattcattttatacaggtccttctgggctctcactgccagtctctgagcttgatccatctccccaagccgaagcccaaagggaaatgcaatgaggtatttcaaaggcttattcttagcttctgagcttctgaatgaattgcattctattcatccagggagccctggatgcccctgttttcttgagggatgtcttggtccc

SEQ ID NO: 3550 - DNA, 349 bp, Homo sapiens
  misc_feature 25: n = A,T,C or G
ctactatagggcgaattggagctcnccgcggtggcggccgaggtacgcgggggcagacacccagccactctgagcagaactgacagcatgaaggcactcctggccctgccgctgctgctgcttctctccacgcccccgtgtgccccccaggtctccgggatccgaggagatgctctggagaggttttgccttcagcaacccctggactgtgacgacatctatgcccagggctaccagtcagacggcgtgtacctttagtggttgccaatctgggcatgtctgaacaactgggttataaaactgtatcaggttcctgtatgtccactggttttagccgagcagtacctgc

SEQ ID NO: 3551 - DNA, 449 bp, Homo sapiens
tcactacttagggcgaattggagctccccgcggtggcggccgaggtacgaaggcagtttggagctggggctaagcagctgtcgcacggtcagatcatgggctccaccaagcactggggcgaatggctcctgaacttgaaggtggctccagccggcgtctttggtgtggcctttctagccagagtcgccctggttttctatggcgtcttccaggaccggaccctgcacgtgaggtatacggacatcgactaccaggtcttcaccgacgccgcgcgcttcgtcacggaggggcgctcgccttacctgagagccacgtactataaggaattcaagttaacagaggcttgatttatataaaagaaagctgcagttttaaagttgtgttccttaaagaccagattatagcttatctgaatgggcttgacactttcaaatggaataaaagttaca

SEQ ID NO: 3552 - DNA, 435 bp, Homo sapiens
gaagctccccgcggtggcggccgaggtaccggcggatgtcggtggtctacgggatcggcacctggtctgtgttgggctcactgctttactatagccggacaatggcgaagtcgtcagtagaccaaaaggatggctcagcaagtgaagtactttcaggatgctttttgtatgtatatcacatagagtaggttggttttcctgagtaattgggattccaactagatagtcattggtgtgaccataataaaaacaaaagctaaaataaaagcatcagatttagactggcgctgtgccctctaccactatatgccaaaaaattgcttctctagtgccattttgatattatatctagctataaataatacatggactattgttttctattgaatgtcaaagacttactgggtctttacacctctgtaaagtggaggtttt

SEQ ID NO: 3553 - DNA, 173 bp, Homo sapiens
  misc_feature 18: n = A,T,C or G
agggcgaattggagctcnccgcggtggcggccgcccgggcaggtacaggggaaaagagctctccatttctcagcaggggacaccctggtccccactgccactttgtttgccctccaagggaaaaacctctcaataccaggtccaggagcagctggatgggatcactcagaacc

SEQ ID NO: 3554 - DNA, 406 bp, Homo sapiens
  misc_feature 98, 129, 134, 136, 139, 140, 201, 286, 307, 328, 330, 379,381: n = A,T,C or G
aggtactgttacttccttttgctgtcagagggttgttgacaatggcaaggggggatgttagtgagatccaggtggtggtggcttcttggtccactcancttgcacacatgcaagaggagggtctgtggnccctnanccnngctggtggcctccttcctcaagctttaacttgtgccctccctggcaacagggagtcatggnttaatgtcacctgtcatgcctctttcttcagggaaaatattaaaaggctcaaatccaagctgtgacttcccttagacagtgtaancctgtagggtgcacccccaantttatgtccaaaggctgcctnanaaccctggagggagcagcgcccagctggcagctcactctccccttgcantncactggccttttcgcaacccaggct

SEQ ID NO: 3555 - DNA, 404 bp, Homo sapiens
ccgcggtggcggccgcccgggcaggtacaggtgaatgactggcccactctcccttgctccacttccacatgtttctcagcggtcggtcatgtttcaagctgcttgtgcagctcaccgacatttcttactgggttaatctcttcagagacattcaacttgctgacatccccacattttcccaggagattataagctgccccagcagcagggtttggggcagaagtgagaggggcaggctatctcaccaatctcctcttggactcaggaactcttgcaaaggtttcaaagatgaggaagaatctaaaagaaaagatcattaagctgtgcccagtgttcctcttgcaacaattctggaacaaaactttaccctgtttccaaatttaagctaaattcgttgtattatg

SEQ ID NO: 3556 - DNA, 460 bp, Homo sapiens
  misc_feature 4, 54: n = A,T,C or G
actnctatagggcgaattggagctccccgcggtggcggccgaggtactctgaanatggatagcaatggtgtgatcacagtaaagcctgacttcacgggcctcaaaggaccctacaggattgagacggagggggagaagcaggagctgtggaaatatacgatcgacaatgtttccccccacgcacagccggaggaggaggagcgggaacggcgagtgttcaaggatctttatggccggcacaaggagtatctcagcagcctcgtaggcaccgactttgagatgactgtcccaggtgccctccggctctttgtaaatggagaggtcgtttcagcccaaggctatgagtatgacaatctctacgtccacttctttgtagaattgccaactgctcactggtcaagcccagcattccagcagctctcaggagtaacacaggacctgcaccaccaagtccctggca

SEQ ID NO: 3557 - DNA, 388 bp, Homo sapiens
  misc_feature 272, 341, 366, 369, 378: n = A,T,C or G
ccgcggtggcggccgcccgggcaggtaccatggtggtgggagaaaatgaccactggccaagaggactgctgacctgtgcaccagatggaaaaactgcaactcagaaatgtaaagtgagtcgaccaaggctaaagcggcaaaaccactatactttataacacagagtttggcactatttccactttgttctctctcaaagatgaaggctcaggaggagggaagataaaaacaaatcactggagagtcctggcatgccggaacatggactctanctagcaagaagggctcaaggaggtggccttctcctagacctcaactttgatgcaaaagctgttttgcancctgaacaaagacaatccaatcctncancaaatggcngtcatttttc

SEQ ID NO: 3558 - DNA, 458 bp, Homo sapiens
  misc_feature 6, 407: n = A,T,C or G
ctatanggcgaattggagctccccgcggtggcggcccgaggtacatctacctaaaggactattatgtggaataatacatactaatgaagtattacatgatttaaagactacaataaaaccaaacatgcttataacattaagaaaaacaataaagatacatgattgaaaccaagttgaaaaatagcatatgccttggaggaaatgtgctcaaattactaatgatttagtgttgtccctactttctctctcttttttcttcctttttttttattatggttagctgggactagaggaacgtgccaccatgactggctaattttctgtattttttagtagagacagagtttcccatgttggccaggatggtctcgatctcctgaccttgtgatccacccgcctcaagcctnccaaagtgttgggattacaggtgtgaaccactgtgcccggcctgtgtacct

SEQ ID NO: 3559 - DNA, 285 bp, Homo sapiens
  misc_feature 4, 15, 16: n = A,T,C or G
atanggcgaattggnnctccccgcggtggcggccgcataatttaataacatcgtccttccatttggccgcgactgctctggaaaattggttcagtagtaaacagaattctagcaggtggaacaagaacaggcgaggcatcctgggcctggtctctcctggaggtctgggtgttgcagcctttcaggactgcggctgctgtggcctacacacctgggcctgtgtgcctgtcccgggctttaggctgctttccctacccggctcaaccagtcagtccccgcgtacct

SEQ ID NO: 3560 - DNA, 225 bp, Homo sapiens
  misc_feature 188: n = A,T,C or G
aggtacgcgggggcagcctaaagcccgggacaggcacacaggcccaggtgtgtaggccacagcagccgcagtcctgaaaggctgcaacacccagacctccaggagagaccaggcccaggatgcctcgcctgttcttgttccacctgctaagaaattctgtttactactgaaccaattttccagagcangtcgcggccaaatggaaggacgatgttattaaattat

SEQ ID NO: 3561 - DNA, 422 bp, Homo sapiens
  misc_feature 20, 82, 116, 154, 168, 172, 211, 213, 341: n = A,T,C or G
ttagggcgaattggagctcnccgcggtggcggccgaggtacaggaagcatggcggcttctggggaagacttacgaaactttnactcatggtggaaggcaaagtgggagcaggcgtnttacatggctgacgaggaccttgccttcctcccgcctnatcttttcaaactntgtngtgctcttgatgctctggccaccttgaccttccttttgntncatgaatcccccagtatcattcttgctgggggacgcttttctcttgctgtctcccacggttggaatgcactttccctggatcttacaatggctggtgttttctcatcacatgtcacatccttaatcanacggtttttcttgacccctgtctccaagtatggagtgtcctgcacccatcttcctctggtcctatcacccccgcgttacct

SEQ ID NO: 3562 - DNA, 298 bp, Homo sapiens
  misc_feature 11: n = A,T,C or G
ctaatacactnctatagggcgaattggagctccccgcggtggcggccgcataatttaataacatcgtccttccatttggccgcgactgctctggaaaattggttcagtagtaaacagaattctagcaggtggaacaagaacaggcgaggcatcctgggcctggtctctcctggaggtctgggtgttgcagcctttcaggactgcggctgctgtggcctacacacctgggcctgtgtgcctgtcccgggctttaggctgctttccctacccggctcaaccagtcagtccccgcgtacct

SEQ ID NO: 3563 - DNA, 252 bp, Homo sapiens
  misc_feature 42, 155: n = A,T,C or G
ataatttaataacatcgtccttccatttggccgcgactgctntggaaaattggttcagtagtaaacagaattctagcaggtggaacaagaacaggcgaggcaccctgggcctggtctctcctggaggtctgggtgttgcagcctttcaggactgnggctgctgtggcctacacacctgggcctgtgtgcctgtcccgggctttaggctgctttccctacccggctcaaccagtctccccgcgtacctgcccg

SEQ ID NO: 3564 - DNA, 624 bp, Homo sapiens
  misc_feature 339, 356, 507: n = A,T,C or G
ccgcggtggcggcccgaggtacagaacagtaaagttaaaacggatgtctccattgatctgccaaatcgttatagagagcaatttgtctggactagaaaatctgagttttacaccatactgttaagagtccttttgaattaaactagactaaaacaagtgtataactaaactaacaagattaaatatccagccagtacgcggggggctatttaggacggaagctcggttggtgtttctccagaagtttcccccttgggcggtggtggaggtggtaaccgtgatagtagcagctccggcggcagcaacagcgactacgagggatggcggcggctgcagcangaactgcaacattccanaaggtttttccagagcttctcggatgccctaatcgacgaggacccccaggcggcgttagaggagctgactaaggctttggaacagaaaccagatgatgcacagtattattgtcaaagagcttattgtcacattcttcttgggaattactgngttgctgttgctgatgcaaagaagtctctagaactcaatccaaataattccactgctatgctgagaaaaggaatatgtgaataccatgaaaaaaactatgctgctgcctagaaactt

SEQ ID NO: 3565 - DNA, 269 bp, Homo sapiens
  misc_feature 265: n = A,T,C or G
tatagggcgaattggagctccccgcggtggcggccgaggtacgcggggagggaaagcagcctaaagcccgggacaggcacacaggcccaggtgtgtaggccacagcagccgcagtcctgaaaggctgcaacacccagacctccaggagagaccaggcccaggatgcctcgctgttcttgtcacctgctagaattctgtttactactgaaccaattttccagagcagtcgcggccaaatggaaggacgatgttattaaattatgcngccg

SEQ ID NO: 3566 - DNA, 542 bp, Homo sapiens
  misc_feature 362, 469: n = A,T,C or G
ccgcggtggcggcccgcccgggcaggtactttttttttttttttttttttttttggatttttatgggactctttattagggtattaagatattgaaaataatacacgtaaaccacaaaagagtagcattccattttcttgaagtgcacatgatattatgaacaatcaaatgcattatttttatcattaatagtttaatcattaattatctcataagtcaatgcagagagtgaaattactatgaattaaacttctgttcacaatgtactgggcgggtgaaacgattaccacccatagtgcgaggaggagccatcgacagatactggcccaccgccgacgggcgcctggttgaatatgacatanatgaagtggtatatgacgaagattcaccttatcaaaatataaaaattctacactcgaagcagtttggaaatattctcatccttagtggggatgttaatttggcaganagtgatttggcatatacccgggccatcatgggcagtggcaaagaagattacactggcaaagatgtgcctcggc

SEQ ID NO: 3567 - DNA, 620 bp, Homo sapiens
  misc_feature 325, 379, 405, 459, 510, 537, 563: n = A,T,C or G
aggtacgcgggggaaacaaatcaaatgtttgttctcaaattcttactctgtcatttattattctccatgtttttgtaactgcttccttggagatatttaaacataaatatatacagagagggtgaagatggaggagtgcttttacagttcacagtccgtctttttcatgtgtgacaggtttttgctgtgttgcccaggctggagtgcaatgccacaatcttggctcactgcagcctcaacttcccgggctcaatcgatcccccacctcagcctcccgagtagcaaggactacaggcgcacaccaccacacctagctaatttttgnatcttttgtagagacaggggttcaccatgttgtccaggctggttttgaactctngggctcaattggtcctagcacctcancctcctaggtgctgggattacaggtgtgagccgctgtgttcagccaatactctnaacgtttttacttttcacttttaaaaattaactctttttatgaaaaaagtngaattttttaaagagcagagaaaagcncaatgaagacagaaagatcacctgtntattcttattgaccaaagatgatctatttggggtaaaatccttttttttttttttga

SEQ ID NO: 3568 - DNA, 792 bp, Homo sapiens
  misc_feature 2, 115, 410, 573, 578, 609, 621, 666, 670, 689, 695, 702,722, 725, 729, 735, 736, 737, 738, 739, 740, 741, 742, 743,744, 745, 746, 747, 748, 749, 750, 751, 752, 753, 754, 755,756, 757, 758, 759, 760, 761, 762, 763, 764, 765, 766: n = A,T,C or G
  misc_feature 767, 768, 769, 770, 775, 776, 777: n = A,T,C or G
angtatcagtctgttgtttcttcatttcttctttttctatgctctttttacaatttcagctactccagaagctcagattttccctattccaagctatgagatgtgatgccacatntggattgccttcttgatatccccttctgagaatgcattgcctgctttttaactcattatattcaaaactaaattcatcatcattctctccttacaccagttctcaccctgactttgccatttttccttactaagtacgcgggggttttttttcttgctgcagcaacgcgagtgggagcaccaggatctcgggctcggaacgagactgcacggattgttttaagaaaatggcagacaaaaccagacatgggggaaatcgcagcttcgataaggccaagctgaagaaaacggagacncaggaaaagaacaccctgccgaccaaagagaccattgagcaggagaagcggagtgaaatttcctaagatcctggaggatttcctacccccgtcctcttcgagaccccagtcctgatgtggaggaaagagccacctgcaagatggacaccagcccacaagctgnactgngaacctgggccttcccgcccatgccaccggnctgtgggtcttntgaagggaccccccccaatcggactggccaaattcttcggtttgncccngggatattatagaaaattntttgtntgaaatnatgaaaaataaacacacccnggnggcnaaaaannnnnnnnnnnnnnnnnnnnnnnnnnnnnnnnnnnnccccnnnaaaaaaaaaaaaaaa

SEQ ID NO: 3569 - DNA, 559 bp, Homo sapiens
  misc_feature 497, 501, 504, 510, 512, 520, 530, 534, 540, 547: n = A,T,C or G
aggtacatacatagttacatgaatagaacagatcaaaatttatgaacatttccaaaaagctgtccaaatattcttgtatattgccttacataaaatgaaacaaacgaaagttgataacactcagtctcttaatataatataaattaaaacctaataacatataatagataataggttcccgcgtacatgacaaggtgcggctccctaggcccctcccctcttcaaggggtctacatggcaactgtgaggaggggagattcagtgtggcgggggactgagtgtggcagggactccccagcagtgagggtctctctcttctcttgtgctcttgctggggctggtggtccaggggtcttactccttggaggccatgtgggccatgaaggtccaccaccctgttgctgtagccaaattcgttgtcataccaggaaatgagcttgacaaagtggtcgttgagggcaatgccagccccagcgtcaaaagtggaggaatgggtngtgnttnttgaantnagaagganacaacctggngctnaatggnagcccangatgccctttga

SEQ ID NO: 3570 - DNA, 236 bp, Homo sapiens
  misc_feature 188: n = A,T,C or G
ctatagggcgaattggagctccccgcggtggcggcccgcataattaaataacatcgtccttccatttggccgcgactgctctggaaaattggttcagtagtaaacagaattctagcaggtggaacaagaacaggcgaggcatcctgggcctggtctctcctggaggtctgggtgttgcagcctttcanctgcggctgctgtggcctacacacctgggcctgtgtccccgcgtacct

SEQ ID NO: 3571 - DNA, 475 bp, Homo sapiens
ctatgggcgaattggagctccccgcggtggcggcccgaggtacgcgggggtccctgaggagcgacctgccggggccacctggctggacgaaaaagacacaccttggacttaagccgtgagaaaaaacttcatcagtaagaagaatgaataaacagactaggttgaatccatacaatggaatgttgcagcaataaaaagaaaatgaactattgatgtcccctactgcacagcagaagctctgaatcgtgttcctgaatgaaagaagtcagagatgaaaagatgggccaggagtccagtttctggaaggccaagaatcgaagtagcaagctgcagcccgttttccagacaagcaggatgtggggatgcagaagaattcaggactggaggggcaaactccgtaagcaggggctgtcaccgattcccatctccctctataaacctctctcttttcatgtcgtacctgcccgggcggccg

SEQ ID NO: 3572 - DNA, 407 bp, Homo sapiens
ctatagggcgaattggagctccccgcggtggcggccgcccgggcaggtacatttccaaagtcaagagtcaaataaaaaaatcccatggaatttggagcctatttagaactcaaaataatgagaatgctgcaaatcaaaacttgtgacatcccactaaagctgttcttagagggaaattcccaacacactaaatgcttacattagcaaagaagaaaggctaaaatgaacgagcatccaagttaacatgttagaaaaggagcaacagagaagactcaataaagtaaaaggaaggaaacaataaagataagattagaaatcaatgcaacaagaaaacaaagataaatgctggagaggatcttggttttctgaaaagacaaattaatgggtctcttggcaagactgagaaa

SEQ ID NO: 3573 - DNA, 481 bp, Homo sapiens
tactatagggcgaattgggagctccccgcggtggcggccgcccgggcaggtacgcgggaggccactggttctcaaacattagggtgcactgtaaccattacagagcttgtgaaaagtgcagaaacctgagcctcaccttatgagattctgattcagccagggggaggacaggaatctgtattttcatagcaacctcaagtaatctttattctgagggtctcgggattgcaggttgaaaaacacaaccttaatcagcagtaaattcttctctactcggccaggcgcagcggctcatgcctgtaatcccagcactttgggaggccgaggtgggtggatcacaaggtcaggagttcgagaccagcctgaccaacatggtgaaacgccatctctactaaaaatacaaaaattagccgggcgtggtggtgctcacctgtaatcccagctacccaggaggcttgaggcaagagaatcacttgaaccc

SEQ ID NO: 3574 - DNA, 527 bp, Homo sapiens
  misc_feature 23, 463: n = A,T,C or G
ccgcggtggcggccgaggtacangctgcccaagggcgttcgtaacgggaatgccgaagcgtgggaaaaagggagcggtggcggaagacggggatgagctcaggacagagccagaggccaagaagagtaagacggccgaggtacgggttctccaccaaaattgggcctgagaaatttgttatatcctgctgtgaggttctcaaagccaggcagggaaagcttgtcacttctgccgacctcgacgttgaactgactcccctggatgcacatcctctcagtgaagagactcagacacacgaaggccaagtggaggctgtagttcatgttgagaagctgctcacaccaaggggctgaagtaggaatcaccaggtagttgttgaggctctgttagggcaaagtccttcaggcctacaggcaggacttccaggcaaggcacggtcttctgggtccccaaggttcttctnatcctcaccctgtcccctcgtatgtggacacgcaccaccctcagatggagtccccgcgtacctg

SEQ ID NO: 3575 - DNA, 400 bp, Homo sapiens
  misc_feature 13, 175: n = A,T,C or G
gaattggagctcnccgcggtggcggccgcccggcaggtacgcggggggaatgatgcgtatatgattctggcacaaccagttctttccccgaagcagctgttgccaccaccctcttcctgccaggcagtggaggaaggtgcttgcaggagctgcggacacactgttgtgtgttagnatctacttagctggcctcatgttctgcttttgctggcagaattccttgctgaagctgtaagccctcgaatctgatctgtgctctgcatttttaacaaaccaggaagaagctgctcaggtgcatggagtcaaggacccggcgccagcatcaacccagagcgtgcttgccgatgggacagattctgcaggtaagatacagggctgggggttgtcccaaattgtacct

SEQ ID NO: 3576 - DNA, 292 bp, Homo sapiens
  misc_feature 3: n = A,T,C or G
ctnctatagggcgaattggagctccccgcggtggcggccgcataatttaataacatcgtccttccatttggccgcgactgctctggaaaattggttcagtagtaaacagaattctagcaggtggaacaagaacaggcgaggcatcctgggcctggtctctcctggaggtctgggtgttgcagcctttcaggacttgcgggctgctgtggcctacacacctgggcctgtgtgcctgtcccgggctttaggctgctttccctacccggctcaaccagtcagtccccgcgtacct

SEQ ID NO: 3577 - DNA, 451 bp, Homo sapiens
atcactacttagggcgaattggagctccccgcggtggcggccgaggtacaatcagtatctgccatatggctggtctctgtagacgccctttgctgtcctcgctgaaggtgccttgtgtcttgagttagtccactcttcttgcccgtaggaatcataagtctcctcactgagtccatgtccgtaatcatagtaatcaagcacccactgcaagtgccaccttgggagtgtggcttccacgtgggagtcttcctgttcatctgccaaatcaggggctggtctagacgccgctcaggtctcctggcagctctaacatcttccatggctctttcacagcatctagctccacagtagtcaacataatttctcatttttgttgaaaataaactggcaaatgcttcttggaaactcagtgctaaaattaaaatgaacctcagtcttctttccaaggggt

SEQ ID NO: 3578 - DNA, 264 bp, Homo sapiens
  misc_feature 82: n = A,T,C or G
actactatagggcgaattttagctcaccgcggtggcggccgaggtacgcggggagcagcctaaagcccgggacaggcacacnggcccaggtgtgtaggccacagcagccgcagtcctgaaaggctgcaacacccagacctccaggagagaccaggcccaggatgcctcgcctgttcttgttccacctgctagaattctgtttactactgaaccaattttccagagcagtcgcggccaaatggaaggacgatgttattaaattat

SEQ ID NO: 3579 - DNA, 240 bp, Homo sapiens
actacttagggcgaattggagctccccgcggtggcggccgcataatttaataacatcgtccttccatttggccgcgactgctctggaaaattggttcagtagtaaacagaattctagcaggtggaacaagaacaggcgaggcatcctgggcctggtctctcctggaggtctgggtgttgcagcctttcaggactgcggctgctgtggcctacacacctgggcctgtgtccccgcgtacct

SEQ ID NO: 3580 - DNA, 451 bp, Homo sapiens
atacttagggcgaattggagctccccgcggtggcggccgaggtacacatatcctgagctatccacagtccccgaactctgcaacattgctttcaggtgatagagacaagatggtccatgcaaatgagctgacacaagtcatgtcgtgtgcaatcaagataggatcccagacatcttcagaatggtttacagtcacaagaaataaagttccaatgaagtggttggcatttggaagcacactgttttaaatatatctccctgaaggtatgtttatatattagtgcactggtcaatatctgacactatctgtcattttattgcaaaaggatatcagggcaattaataggagggatcttagcactactttaggacaatctttaaagcctgggtaagattcattagctacccaagtggcatttctgacttcaaattgtagtatcatgccaagattt

SEQ ID NO: 3581 - DNA, 341 bp, Homo sapiens
ccgggcaggtacgcggggaaggctcttctgtgtcttcctgaccagctgctctgttcccagcttagaggaccagagggagaagccacctgctacacgctggatgctgcagcctgtgccactgtggcttacatcgctgtggtggtggcagcaacggagactgcagccagctggagtgctgtgatgacagtgcttatcaatcctgtccccgccacaccaccaacatacacagaaaaaaagcaggcaatgagttggctccgggatgacctcgtatgaagacgtttcattccttaatcttggcaattgacatcacaaacttgggtacctcggccgctctagaacta

SEQ ID NO: 3582 - DNA, 485 bp, Homo sapiens
  misc_feature 153, 273, 306, 374, 408: n = A,T,C or G
cgcggtggcggcccgaggtactgttacttccttttgctgtcagagggttgttgacaatggcaaggggggatgttagtgagatccaggtggtggtggcctcttggtccactcagcttgcacacatgcaagaggagggtctgtggcccctcaccngctggtggcctccttcctcaagctttaacttgtgccctccctggcaacagggagtcatgggttaatgtcacctgtcatgcctctttcttcagggaaaatattaaaaggctcaaatccaanctgtgacttcccttaaacagtgtaagcctgtanggtgcaaccccaagtttatgtccaaaggctgcctcaaaaccctggagggagcaacgcccaactggcanctcactcttcccttgcagttcactggccttttcncaaccaggctaaaataggcaatgcaaggagctttccactggccaaaacaactgcctttgtaaaatgtggggctggct

SEQ ID NO: 3583 - DNA, 258 bp, Homo sapiens
cgcggtggcggcccgcataatttaataacatcgtccttccatttggcccgcgactgctctggaaaattggttcagtagtaaacagaattctagcaggtggaacaagaacaggcgaggcatcctgggcctggtctctcctggaggtctgggtgttgagcctttcaggactgcggctgctgtggcctacacacctgggcctgtgtgcctgtcccggctttaggctgctttccctacccggctcaaccaccccgcgtacct

SEQ ID NO: 3584 - DNA, 422 bp, Homo sapiens
  misc_feature 5, 66, 70, 151, 250, 408: n = A,T,C or G
gccgnccggcaggtacaaagcaacctggttggccaatagttgaattgacaaatgagatcaattaancagnggctacttgtcaagccaaagtatttattcaggtgttcataaaatcttgaaattactcatattcacaaactttttggaacanaatttgcataaagaggaatatatttgtaaacaagacctctgacttgtataagttccttggaaaacaggcaaagcacttttatatatgcagaattatttnaattatttcaaagatcaaagttcccactcttggctccccaacttgcctgttcatgtttataggactcattcaagaattttctatatctctttcttatatactctccaaggtcataatgctgctccatgcccagctgggtgagttggccaaatccttgnggccatgaaggatt

SEQ ID NO: 3585 - DNA, 239 bp, Homo sapiens
  misc_feature 67, 87, 90: n = A,T,C or G
ataactaataacatcgtccttccatttggccgcgactgctctggaaaattggttcagtattaaacanaattctagcaggtggaacangancaggcgaggcatcctgggcctggtctctcctggaggtctgggtgttgcagcttaggactgcggctgctgtggcctacacacctgggcctgtgtgcctgtcccgggctttaggctgctttccctacccggctcaaccaccccgcgtacct

SEQ ID NO: 3586 - DNA, 414 bp, Homo sapiens
ccgcggtggcggccgaggtacctttgccctcaggcgaggaaggggaatatgtcctggcactgaagcaagagctacgaggagccatgaggcagctcccctacttcatccggccagctgtccccaagggagatgtggagcgttattcagacaaatatcagatgtaggtccgattgacaatgccatcgattggaaccctgattggcggcgtctaccccgggagctaaagatccgagtgcggaagctacagaaggaacggattacaattctgctccccaagaggccccctaagaccacagaagataaggaggaaacaatacagaaactagagaccctggagaagaaggaagaagaagtaacttcagaggaggatgaggagaaagaagaagaagaaaaaaaaaaaaaagtacctgcccg

SEQ ID NO: 3587 - DNA, 518 bp, Homo sapiens
agggcgaattggagctccccgcggtggcggccgagggtacaccaatcaaacatagtgtgtccagaattggtgggttcttggtctcactgacttcaagaacgaagctgcggaccctcacggtgattctaagcacattaaaatctggatgacacttatctgaatcatttcgcaacttggagagagatggagaagacacgcatggtgtaactgggcatcaccagaatgtgcactgccatctgtggctgtcttcctgctggcaaatccttttcattccaagcaaataagattccctaaattagacaaaaaggaagaaacacaacagagtccataattctgagaggaagagaagagtgatcatcagcagcaaaaggcaattgcagagaagcaccaccaagagccagcttcatgctcaggagtgaatgctgagcccgctcctcgtggtttccggtgctccacatgttcaagaagaaacttctctggtaagaaactatagaaatggtgcatggaagtgttactag

SEQ ID NO: 3588 - DNA, 349 bp, Homo sapiens
  misc_feature 336: n = A,T,C or G
aggtacgcggggtccgccctcccttaagatcacggaagtatcacgcttgcctcttacacaactttttttccttagtctgtatactttctgctgtcactagcataacagaaaagacgaatggcttttgttttaaactgagggcacttttacaaaagtcatctttccatttatttttctttcagaaaaaagaatttgggttttgagcttttttaaaaaaaaaagacaaacactttccttgactttgagaaataatttaagttcaaagaatctgctctatgctaaccaagagatagagcacagcaaagatctgccagccccaggcctttacctagtggnctggaaattcaag

SEQ ID NO: 3589 - DNA, 500 bp, Homo sapiens
  misc_feature 487: n = A,T,C or G
ccgcggtggcggcccgaggtactttttttttttttttttttttttttgggggaaatgaactcattcctgtaaagagtctgctctgacagtagcatttgagacattactgctttaaatgcattttcatggttcaaaataatagcactattaaaaaatgtttctcaacaaggatttgttttctccctaagaagcttaatgtggacactacaaataatgaccaaagctgctgagtatggcataacaaagagaaaacaaagcactcatcctgtcctccagatcatgcccagaacactgtctaccaacatgtggcttgccaactggaatgatgcaaatgtcagacccacatctgtggaaaaggggctcgcccacaggaaacaagctattggggaatggggagaatgatataattagaaatttaagacacagtataactcagaaaaatgttggctgggcagcacattgctaagacttgaaatctttattttgntctcttttcaaaa

SEQ ID NO: 3590 - DNA, 485 bp, Homo sapiens
  misc_feature 24, 36, 37, 65, 67, 69, 71, 75, 76, 80, 88, 111, 147, 193,211, 217, 218, 258, 263, 282, 306, 325, 327, 332, 366, 383,397, 400, 402, 435, 447: n = A,T,C or G
cgcggtgggcggccgaggtccgtnttccagtaaaannggacattataattaaacatcttcaagancntntnaggnncgtntgcacgtntactgtggggcgcacagcacagntggacgcaggggctggggctccagggcagttgctgnacacccgcgggtctaccacactacactcagaaacgtcacaccgganttggaaaaaagccacagnttgctnncttccgacaaagagcggattcacagtccgttcgatctcanagaantgagtggggcacccacttnatggggccaaccccactaaaaaanaaaaggcaacgcaaccaananctaanacaaaaaccaaaaacccacacaaccccccgattnttttgaaaactccccgngtcctgcccgggcnggncnttctagaactaagtggatcccccgggcttgcangaattcgatatnaaagcttatcgatacccgtcgaccttgagggggggccc

SEQ ID NO: 3591 - DNA, 296 bp, Homo sapiens
  misc_feature 178: n = A,T,C or G
tatagggcgaattggagctcaccgcggtggcggccgcataatttaataacatcgtccttccatttggcccgcgactgctctggaaaattggttcagtagtaaacagaattctagcaggtggaacaagaacaggcgaggcatcctgggcctggtctctcctggaggtctggatgttganctttcaggactgcggctgctgtggcctacacacctgggcctgtgtgcctgtcccgggctttaggctgctttccctacccggctcaaccaccccgcgtacctcggcccgtctagaacta

SEQ ID NO: 3592 - DNA, 266 bp, Homo sapiens
  misc_feature 29: n = A,T,C or G
atcactactatagggcgaattggagctcnccgcggtggcggccgaggtacgcgggggcagcctaaagcccgggacaggcacacaggcccaggtgtgtaggccacagcagccgcagtcctgaaaggctgcaacacccagacctccaggagagaccaggcccaggatgcctcgcctgttcttgttccacctgctagaattctgtttactactgaaccaattttccagagcagtcgcggccaaatggaaggacgatgttattaaattat

SEQ ID NO: 3593 - DNA, 155 bp, Homo sapiens
ccgcggtggcggccgcccgggcaggtacaggggaaaagagctctccatttctcagcaggggacaccctggtccccactgccactttgtttgccctccaagggaaaaacctctcaataccaggtccaggagcagctggatgggatcactcagaacc

SEQ ID NO: 3594 - DNA, 139 bp, Homo sapiens
tagggcgaattggagctccccgcggtggcggccgaggtacgcggggggaggcgaagaacgcaaagctgagaacatggacgttaatatcgccccactccgcgcctgggacgatttcttcccgggttccgatcgctttgcc

SEQ ID NO: 3595 - DNA, 254 bp, Homo sapiens
  misc_feature 22, 196, 221: n = A,T,C or G
acttagggcgaattggagctcnccgcggtggcggccgcccgggcaggtacgcgggggacgccactgcgcacgcgcggccccttctaccgttcccgactccgcggctcttagagggtgggctgtgtcccggctgcggaaacgccaactccaggcgattggcgcgaaggaggcgaaaagggcggatttcccttttccnggttcgggccccgggctgcaaggtnctttatcccgaagctggggttactaggtgaaca

SEQ ID NO: 3596 - DNA, 383 bp, Homo sapiens
  misc_feature 191, 196, 203, 208, 209, 223, 238, 254, 279, 280, 292, 306,309, 310, 350, 374: n = A,T,C or G
ctacttagggcgaattggagctccccgcggtggcggccgctctgggagtgtctgtcctatgtggttgagataaggactgagatacgccctggtcgcctgcagtacgcggggggggtgccgccgaccgttccgctcttccggccaggtgcttttctgtcaatttctatggaatgcaaaaggaggtttttgtnttatntttgtcnttttnntaaaagctttaaanaaaaaaaattctacnattctttatactttanagcctccataacttaaataaaaaannaaaatgtaaaangtaaatcaataaanaannaaacttggggctcaaattaaaaaaaaaaaaaataaaaaanttcctcggccgctctaaaactagntggatcccc

SEQ ID NO: 3597 - DNA, 413 bp, Homo sapiens
ccgggcaggtaccagttgtaaaattaccaggaaccgccatgcctcaagatcgccctgttttctggcttcatcaatgactgcatgcagtgcaccaccctgtccactacgtgatgctgtaggattaagtctcacagtgggcggctgaggatacagccgccgcgtcctgtgttgccggtgaattagacgccatcgctgtgggttgctggtatggtgccgtgctatttggcacaggacacaccgcttgaggtctgtattgaacctctgaaggaggccgatactgaagctcggttggcagccggtattgataaactaccagcggttgggtcttattttctaccggctgatattgtggatactgtatctgagttggcattgccgggatagagactctgtccctttctacttgattttct

SEQ ID NO: 3598 - DNA, 244 bp, Homo sapiens
ccgcggtggcggccgaggtacgcggggagggaaagcagcctaaagcccgggacaggcacacaggcccaggtgtgtaggccacagcagccgcagtcctgaaaggctgcaacacccagacctccaggagagaccaggcccaggatgcctcgcctgttcttgttccacctgccagaattctgtttactactgaaccaattttccagagcagtcgcggccaaatggaaggacgatgttattaaattat

SEQ ID NO: 3599 - DNA, 440 bp, Homo sapiens
  misc_feature 4: n = A,T,C or G
actnctatagggcgaattggagctccccgcggtggcggccgaggtacatcctcatagagaatctcagtggattaaggcagctgtaacttgttttggactgcagttacagaggccaaggtatagaagaaaggtaacgagagtgccaggataggaaagttctgagatgaagacaacctggcagctcaaagtcacagttcatgccctgttgcttcagaccaaattccctctacagcctgaagcaagctggccttgcccacagagaactgcctttctccatatgcagccacctccctcagggcaattccttgccttggatcctcactgcacctgcttcaccagcatcttggctcttcatctccctacccccagagaagctttccatttaggagctcgcaacgcccttcctaggccatgccagtgttttaatttgctggagacta

SEQ ID NO: 3600 - DNA, 249 bp, Homo sapiens
  misc_feature 46, 48, 63, 65, 68, 92, 93, 94, 99, 109, 135, 141, 148, 152,153, 154, 155, 157, 162, 163, 171, 172, 176, 191: n = A,T,C or G
ccgcggtggcggccgcccgggcaggtactttttttttttttttttntntttttttattaattntnctnttactatgacctgctttgatcatnnncaacnaaacagcctnagggattatgcctacacgaaagcttnggtaangacatgntggnnnntncgctnnacgagggnnaccnaacacctaacctaanagcccgtgacactgcagcaaggtgctgcccacacttgcaccgtcacgaagaaaagcgc

SEQ ID NO: 3601 - DNA, 437 bp, Homo sapiens
  misc_feature 426: n = A,T,C or G
acttagggcgaattggagctccccgcggtggcggccgaggtacgcggggccatcgcaaagttgttaaccccagagtcttctggctgtgctgcctcctctgcttttaatcttctgtggatatttctccgatttcccccaaaagcccacagatcctgggggaagccaccccattcggccaccgatcatggaagaaagtattactttttatttaccaaacattttaaagatgttggaagatccatatgctgcctggaggctgttgtttctagggacacaagtatccagcctatattgttacaatttttttcaagaactgccgtcttctttgtctgcactaatggaacatcatcttcagcgggctatttcagcacagcaggtgtatggcgagaagagggataatatggttataccggtcccagaggcagnaaagtaatatt

SEQ ID NO: 3602 - DNA, 261 bp, Homo sapiens
tacttagggcgaattggagctccccgcggtggcggccgaggtacgcggggagcagcctaaagcccgggacaggcacacaggcccaggtgtgtaggccacagcagccgcagtcctgaaaggctgcaacacccagacctccaggagagaccaggcccaggatgcctcgcctgttcttgttccacctgctagaattctgtttactactgaaccaattttccagagcagtcgcggccaaatggaaggacgatgttattaaattat

SEQ ID NO: 3603 - DNA, 321 bp, Homo sapiens
  misc_feature 266, 321: n = A,T,C or G
ttagggcgaattggagctcaccgcggtggcggccgcccgggcaggtacggcttcggaggctaggccgccgctccagctttgcacgtttcgatcccaaaggccctttttagggccgaccacttgctcatctgaggagttggacacttgactgcgtaaagtgcaacagtaacgatgttggaaggcttatgattttactgtgtattgtatttgggagaagaaattctgtcagctcccaaaggataaaccagcaagttgctttattggtnttcagatgtggctgcaaacacttgagactgaactaagcttaaaacacggtacctn

SEQ ID NO: 3604 - DNA, 237 bp, Homo sapiens
  misc_feature 23: n = A,T,C or G
actatagggcgaattggagctcnccgcggtggcggccgaggtacgcggggacacaggcccaggtgtgtaggccacagcagccgcagtcctgaaaggctgcaacacccagacctccaggagaggccaggcccaggatgcctcgcctgttcttgttccacctgctagaattctgtttactactgaaccaattttccagagcagtcgcggccaaatggaaggacgatgttattaaattat

SEQ ID NO: 3605 - DNA, 467 bp, Homo sapiens
  misc_feature 225, 257, 258, 281, 318, 323, 354, 406, 434, 456: n = A,T,C or G
ccgcggtggcggccgaggtacgcgggggaagccgcccagtgccctgagcgtctccatggcctgcctgagcccctcgcagctccagaagttccaacaggatggattcctggtgctggaaggattcttgtctgcagaaaagtgtgtggccatgcaacaaaaggatttggcgaagatagtggcttgaaaatgggattgttcctctccacttggccgcaccagaaattnttccacccaaggaaaagaaggaagcagctttnnaagccccagggcaagcacaaaancttatttttttgagccagtgggtgacaaagaatttcnatttnttttttttaaaaaaagggccttttttttganttgaaaaaaagggaaaattttccttgggtccccttcccgggaaaaaattccnattcaaccaaaaaaatttgggcccaccnctttttggaaccgccccaacanaaccccctttt

SEQ ID NO: 3606 - DNA, 263 bp, Homo sapiens
ctacttagggcgaattggagctccccgcggtggcggccgcataatttaataacatcgtccttccatttggccgcgactgctctggaaaattggttcagtagtaaacagaattctagcaggtggaacaagaacaggcgaggcatcctgggcctggtctctcctggaggtctgggtgttgcagcctttcaaggactgcggctgctgtggcctacacacctgggcctgtgtgcctgtcccgggctttaggctgcccccgcgtacct

SEQ ID NO: 3607 - DNA, 239 bp, Homo sapiens
ctacttagggcgaattggagctccccgcggtggcggccgcataatttaataacatcgtccttccatttggccgcgactgctctggaaaattggttcagtagtaaacagaattctagcaggtggaacaagaacaggcgaggcatcctgggcctggcctctcctggaggtctgggtgttgcagcctttcaggactgcggctgctgtggcctacacacctgggcctgtgtccccgcgtacct

SEQ ID NO: 3608 - DNA, 469 bp, Homo sapiens
  misc_feature 131, 135, 140, 266, 274, 278, 285, 311, 315, 339, 341, 358,363, 374, 379, 380, 384, 388, 389, 394, 409, 410, 411, 412,413, 418, 419, 420, 423, 447: n = A,T,C or G
ccgcggtggcggccgcccgggcaggtacgcgggggagtttcacgcgcgtatgctttgcccgctatggccgcagtcaaggagcctttggagttccatgccaagccggccttggcgccccgaggaggcagtanaaanatccngacgaggaggatgaggataatactagtgaagccgagaatgggtttctccctggaggaagtgttaccggctcggaggcaccaagcaaggattaccttattgctggctacttttggatgaaaaatgangaaaattnatanattgganggcaaaaaaagggagccaatttcgtntganccttttaaccaaggggggaatttngnaagcctttttttttttnaaaanttttttttttnggggnnaaantttnnaaaanccttttttttttttnnnnnaaaannnaanacccccttttaaaaaaaaaaattnccccccaaaaaaaaaaaaaaaa

SEQ ID NO: 3609 - DNA, 156 bp, Homo sapiens
  misc_feature 20, 36, 38, 39, 46, 47, 51, 57, 59, 60, 62, 63, 64: n = A,T,C or G
ttagggcgaattggagctcnccgcggtggcggccgncnngccaggnnctcncaagangnngnnnacttcattcaacaactcaaagcggcactcagacttaacagcggccataaacgcggcggaaactacagtgcccacgatgcaccgcgccagccc

SEQ ID NO: 3610 - DNA, 292 bp, Homo sapiens
  misc_feature 186, 202: n = A,T,C or G
cttagggcgaattggagctccccgcggtggcggccgcataatttaataacatcgtccttccatttggccgcgactgctctggaaaattggttcagtagtaaacagaattctagcaggtggaacaagaacaggcgaggcatcctgggcctggtctctcctggaggtctgggtgttgcagcctttcangactggcggctgctgngggcctacacacctgggcctgtgtgcctgtcccgggctttaggctgctttccctacccggctcaaccagtcagtccccgcgtacctcggc

SEQ ID NO: 3611 - DNA, 290 bp, Homo sapiens
  misc_feature 108, 114, 115, 184, 189, 190, 204, 209, 236, 241, 243, 244,245, 262, 271: n = A,T,C or G
tacttagggcgaattggagctccccgcggtggcggccgaggtactttttttttttttttttttttaatcaatcacaggagcaattcctgtgaactaatagggagaggnccaggnngagctatctgattgcaatgtaattctgaccctgagtgaaggaaaaaaggaaggaagactggggaagagncccanncctgtcttacaggnccaangaaagtttggtttggcaaggccatccnggagncnnnaatcaaaaaccagctgncaggggagncccatttgtctcccaaata

SEQ ID NO: 3612 - DNA, 254 bp, Homo sapiens
  misc_feature 27, 197: n = A,T,C or G
cactactatagggcgaattggagctcnccgcggtggcggccgtgttcacctagtaaccccagcttcgggataaggacctgcagctcgggcgcgacccggaaagggaatccgcccttttcgcctccttcgcgccaatcgcctggagttggcgtttccgcagccgggacacagcccaccctctaagagccgcggagttngggaaccggtagaaaggggccgcgcgtgcgcagtggcgtcccccgcgtacctgcccg

SEQ ID NO: 3613 - DNA, 424 bp, Homo sapiens
  misc_feature 189: n = A,T,C or G
ctacttagggcgaattggagctccccgcggtggcggccgagggacatcctcatagagaatctcagtggattaaggcagctgtaacttgttttggactgcagttacagaggccaaggtatagaagaaaggtaacgagagtgccaggataggaaagttctgagatgaagacaacctggcagctcaaagtcncaagttcatgccctgttgctttcagaccaaattccctctacagcctgaagcaagctggccttgcccacagagaactgcctttctccatatgcagccacctccctcagggcaattccttgccttggatcctcactgcacctgcttcaccagcatcttggctcttcatctccctacccccagagaagctttccatttaggagctcgcaacgcccttcctaggccatgccagtgtttt

SEQ ID NO: 3614 - DNA, 473 bp, Homo sapiens
tcactactatagggcgaattggagctcaccgcggtggcggccgcccgggcaaggtacccaatcctgtccttgccggtccctcctcgccgggtgggaatcttcgtggattatgaggcccatgacatttctttctacaatgtgactgactatggctcccacatcttcactttcccccgctatcccttccctgggcgccctcctgccctattttagtccttgctacagcattggaaccaacaacactgctcctctggccatctgctccctggatggggaggactaagaaagctaccaccctaaccacagaggcttggaattgggcctggcccccatggggcttggagggacccgagccactgacaggtatcccctgaaactgaactgagcccaagtatccaagggattcctctgtctgatcctttggtctttgctaccaaggctgaagtctgtcatgaaaccacttattttaaaaa

SEQ ID NO: 3615 - DNA, 411 bp, Homo sapiens
  misc_feature 175, 185, 311, 315, 319, 327, 335, 336, 387, 397: n = A,T,C or G
ccgcggtggcggccgagtcttcttcatcaacgaggaggccaagagcaccacctggctgcaccccgtcaccggcgaggcggtggtcaccggacaccggcggcagagcacagatttgcctactggctgggaagaagcatatacttttgaaagggtgcaagatactttttttaaaccnttattgaaangggaaagtggacctgcaaacattccagtcacagggacaacccatcacaggacaattgtattttttgtagtgaatgaacagactgtttgcaacccatgacatctgaaaaaaaaaaaaaaaaaaagtncctngggnccgctctnaaaacttnnggattcccccgggcttgcaaggaatttccgatttttaaagctttttttgantcccggtccnaccccccaaggggg

SEQ ID NO: 3616 - DNA, 412 bp, Homo sapiens
  misc_feature 221, 331: n = A,T,C or G
ccgcggtggcggccgcccgggcaggtactttccgccgccgccacagcggccccctctctgaagaatgcagccttcctaggtccaggggtattgcaggcaacaaggacctttcatacagggcagccacaccttgtccctgtacagtggacagcttagcatgttgacaactgagaataaaaatgcttaagttctgaactgggacaatgtaagacacaacgacnaaacactggaaatggaaattcaattacatcattgtagactggctactgctctacatgattgtgaccaaagtcagagagctgaaagagacttctttccagagaacaagatntgaacaggttttatttacagaagacaatgaattctcatttgtctaacctaaaagattacagaatctttctcaacaagtcta

SEQ ID NO: 3617 - DNA, 357 bp, Homo sapiens
  misc_feature 268, 314: n = A,T,C or G
ccgggcaggtaccctaaagctatgtaacttatataaatagtttcaaaatgaagcaaaatatgatagaataaatgaagaaatatataaatctttaaacacagtcaaaacttttaatgctcctctctcaatatttgatagggcaaataaacaaaatttcataaggatatgaaacatctgaataacataattagtgaatcaaaagaaactgacatttatagaacaaagtactttttttttttttttttttttttttttttttctgcctctngggggttccttgagggctttgatgatcagggcagaggcagaaggcnccacctcaatctgggcctgtctgttctgaatggtcagtttcac

SEQ ID NO: 3618 - DNA, 421 bp, Homo sapiens
  misc_feature 104, 115, 180, 195, 199, 352: n = A,T,C or G
ctccccgcggtggcggccgcccgggcaggtacctgtttagccacgatggccgccaggcggcccaggagatggcctcgaccatcaagcaccaggacctgcacctncgccatcttcngcagccgcttggaaaagccccgcgtacagaatggattttggaagagggagtcaccactggacctncaagggaagcccacntgcngacatctacaaccttcgatctcctgacgagtttattgttggccaaaaccaggctttgattgaaccaggatgaatgcgggtgttggaagtagaatatatatatacatataaaattggttgggagccacgtgtacttttcattttggctcaccgnggattttctcataggaagtttggtcagagtgaattgaatattgtaagtcagccactgggacccgaggat

SEQ ID NO: 3619 - DNA, 440 bp, Homo sapiens
ccgcggtggcggccgcccgggcaggtacctgtttagccacgatggccgccaggcggcccaggagatggcctcgaccatcaagcaccaggacctgcacctccgccatcttcggcagccgcttggaaaagccccgcgtacagaatggattttggaagagggagtcaccactggacctccaagggaagccacgtgcagacatctacaaccttcgatctcctgacgagtttattgttggccaaaaccaggctttgattgaaccaggatgaatgcgggtgttggaagtagaatatatatatacatataaaattggttgggagccacgtgtacttttcattttggctcaccgtggattttctcataggaagtttggtcagagtgaattgaatattgtaagtcagccactgggacccgaggatttctgggaccccgcagttgggagg

SEQ ID NO: 3620 - DNA, 442 bp, Homo sapiens
ccgcggtggcggccgcccgggcaggtacgcggggaagaaggacatttctggtagctggtcgaggttggtgacgttgaggatctaaattaagacagtattataggaatggggaagaggaggcaaagtcaagaacaatgtgaactatcaaaccagcaggacctattactataaatgagagggaggaagggaccaaggatgcttcttatgtagctgccttctattcctgggtgactggttgcacagtctccttagagaatccaggaacagagagaatatataccttccactggaagaatctcaaacagcgctgcttactcaggatcagtggcaccagccaactcagctttgggacaaacccagccaagtgaccaggacactttagtgcaaagagctgagcacattccagcagggaaacgaactccgatgtgcgcccattgtaacc

SEQ ID NO: 3621 - DNA, 161 bp, Homo sapiens
  misc_feature 27: n = A,T,C or G
cactactatagggcgaattggagctcnccgcggtggcggccgaggtaccgaacgctgacaaatgaagttcacttcattcaacaactcaaagcggcactcagacttaacgcggccataaacgcggcggaaactacagtgcccacgatgcaccgcgccagccc

SEQ ID NO: 3622 - DNA, 412 bp, Homo sapiens
  misc_feature 121, 136: n = A,T,C or G
gccgaattggagctccccgcggtggcggccgaggtacaaaagttaagctccatttaccactcacttgacagtgtcctttaaatctgaacttgctcttgctcatgcggagcttggctaaganaaaccagatcattantgcaagctgtaggtgggtgggtgagtgtgtcccctcccacactgctctctggtgggtttgggcagtccctggctctagtctctgctgcagattctcaggaccaaaatgtgggtgatttgtctgggtccaggcaggagacagaaatcacacaagctcttttattagagataatataaagaatgattaaccaggtgacagtaaagggcaggaagggaatacaaaggtatccatggaggtagcaccacaggaagcaggcatcacacttgaggcttggga

SEQ ID NO: 3623 - DNA, 406 bp, Homo sapiens
  misc_feature 62, 92, 151, 366: n = A,T,C or G
ctatagggcgaattggagctccccgcggtggcggccgcccgggcaggtaccggtggaaaaanttttatttttttttttccccggagcaattngtaaatgctatgcggtaagaggagttacctgtggaaaggtggttaagagattaggtaangaaaaggaaaggacaccaaaataaagtgctgcggaagaatttttgtccagctgtgagacgacgagtgcgtgaagtgaaggcgattgagaggggctgagggaattgtcctctgtggaagggactttcttttggccctaggccccttcctgcccctgtcgtcagcagagagatggaaaacttgatgactagctccaccctaccgcccctttttgcanatgaagacggttccaaggagagtaatgatctggctaccac

SEQ ID NO: 3624 - DNA, 265 bp, Homo sapiens
ccgcggtggcggccgcataatttaataacatcgtccttccatttggccgcgactgctctggaaaattggttcagtagtaaacagaattctagcaggtggaacaagaacaggcgaggcatcctgggcctggtctctcctggaggtctgggtgttgcagcctttcaggactgcggctgctgtggcctacacacctgggcctgtgtgcctgtcccgggctttaggctgctttccctacccggctcaaccagtcagtccccgcgtacct

SEQ ID NO: 3625 - DNA, 438 bp, Homo sapiens
ccgcggtggcggccgaggtacttaagctcatcggttgtgaaaacaaatctgatgaggtatcgaaggagccgtctcccacctttctttgaagaatttacagcctcatcccactgtttgctcgttatgtagacaggatagttgttcaacagctgcttgcttccctctgtcggctggtcaagctggctgtggtatcaggagttggttgtggtgctgcagaaccatcttcaagtaatctaaaacggtctggcagggcactgggatgctctctaatttccttctgagctcttcattttcttgttgcagtgaaataacctcctgctccagctcttggcatcgaggacaatagccttcctcgtcctcctcctcctcttcttctggcagtgtagatgaagatgggtggccatggggaattcggaccgttgctgggggaaagtccag

SEQ ID NO: 3626 - DNA, 375 bp, Homo sapiens
  misc_feature 347: n = A,T,C or G
ctatagggcgaattggagctccccgcggtggcggccgaggtactccttcttccgccgccgactgtcctgagctgactgcttgttacggattttcctcctgaccttcttgaggaccctctcctctgccttggtgaggggcaggtgagagggcagggaaaccccttcctgccccagcagacgcttctcctcatcggtcaggaacagggtttgacagggcagctgggggtaggggcaggagaagatgcaataggagtgaggagggggtcatcccatttgcagcacccaggctactccccccacatgccttctggagagtgtttcctcactgggagacaactttaatctanaggtggggtgaggggcagagactttaat

SEQ ID NO: 3627 - DNA, 424 bp, Homo sapiens
ccgcggtggcggccgaggtaccatgttcaggaaaccaaggacgatattgctctactgttggaaacagagtaatcaaattttctgtgctagccttaattcctgccctctttaagaggagcttaataaaatgtaaatatgcagaatgtttacttttggattgtcccatggtgtccctggaatgctccgagtgcacaagcttaccgcaaggccgaccacacgttctcgggagttcctggacagaccgttcttcacaacgaccacgctcaggtgtaacttcacctgggttcaaggagaccgtgttgggtgccaaagatgtaggggaacctgcctgatacaccacccgcaggctctccccttcccggtggagacgagggaatgagaaaagaaataaagacaaagacacaaagtttaagagttaacaaaa

SEQ ID NO: 3628 - DNA, 447 bp, Homo sapiens
  misc_feature 22, 44, 50: n = A,T,C or G
ctatagggcgaattggagctcnccgcggtgggcggccgcccggncaggtncgcgggacccatagtaggcctaaaagcagccaccaattaagaaagcgttcaagctcaacacccactacctaaaaaatcccaaacatataactgagcccctccaccccatttgctcacactatcctgtcatctttgtattcttgctgcagttccctttgggttccatgttttccttgttcccttccatgcctagctggattgtagagttaagtttatgaatatgaaataaaatctaaataggccgggcgcggtggctcacgcctgtaatcccagcactttgggaggccgacgcaggcggatcacgaggtcaggagatcgagaccatcctggctaacacggtgaaaccccatctctactaaaaaaaaaaaaaaaaaaaaaaaaaaggttcccgcggggc

SEQ ID NO: 3629 - DNA, 408 bp, Homo sapiens
  misc_feature 32, 34, 38, 355: n = A,T,C or G
cgcgggtgggcgggccgagggtacagaagcanancagnagtgtggtccctgaatctgtctcacccccatgatctttacacacagagaccttcccaggagctgtgacttgaacttcacaatctgcagggtccacccaggagccgtgtcctcctcacaggcaattggatcccctcctctctcaacctgtgtgggaagattttgtgagcagcctcggcgcaccggatgtcgtctttgccatccccagtgggcgctggggccgcgtctggagagacggtggctctccccgcgtactttttttttttttttttttgactgaatgcgaggatttaataccaatgcgggcacaagaattttnttagaaaaggtcagtggggaggggatcatgggacacctttggtttcaacaaac

SEQ ID NO: 3630 - DNA, 371 bp, Homo sapiens
  misc_feature 280, 328, 329, 371: n = A,T,C or G
aggtacaataaagattttagaattcatcaatttgcacacttatgatagatgcactttcctgtatgtatatttcaataaaatcttttaaaaagtaaaatgacaaaaagacactattaacaaaaatgacatattatattaactgttatactaaggaaaatataaaaatgagttctataacaggggctctgcaggtcatgtggtcatgccaaggaccatatgtgctcaagattctcatgacattttggaaggaggttgggctttctttatctttcctttcttntctcccttcccttcccctcccttcccttccctatttttaaacctaggnnttggtattttcctggggtgattggtgactttggaaaattggn

SEQ ID NO: 3631 - DNA, 682 bp, Homo sapiens
  misc_feature 6, 7, 8, 17, 29, 33, 45, 90, 112, 166, 193, 222, 234, 244,254, 260, 261, 263, 266, 270, 289, 309, 312, 326, 336, 339,341, 347, 358, 373, 377, 380, 389, 391, 398, 400, 402, 405,419, 421, 438, 443, 445, 451, 467, 475, 477, 496, 498: n = A,T,C or G
  misc_feature 502, 523, 525, 530, 539, 544, 550, 553, 557, 559, 577, 578,580, 599, 609, 610, 612, 614, 633, 634, 635, 639, 673, 675: n = A,T,C or G
tttttnnnttttttttntttattttaggnttgngctctactatcntatagggcgaattggagctcccaccgcggtgggcgggccgaggtncagatctggggaactaaatatnaaaaatgagtgtggctggatatatggagaatgttgggcccagaaggaaccgtantagatcatgaatattacaacagctttngttttgagtgggttacgaacatattgaanatgaatttggtntattgaaacnccaccagctnttattnncnacnaagngggcccacgaaaatccctngacccctcttgccccccgtnggnttaattcttcctcncccaggcatntgngncttgcncctccatagtncattccaccaagatnattntcnccatatttntngtttatngntntgncaattggttctttngntggaaaagcccccaatncaaangnaatatntttcatccgttccatngatttttncncctgcattccatatagggntnatantggccttccacctctttggtngnaacantttccattntaccnaaaaantancttngntaaaattccccgcgggtnntncaaaaaattaaaaaattanttctccaacnnananccaaggggaaaaccttggnnntatnttccccttgggcccccccaatttccccttttttnanaggggga

SEQ ID NO: 3632 - DNA, 468 bp, Homo sapiens
  misc_feature 52, 146, 156, 203, 210, 246, 258, 261, 270, 288, 293, 297,309, 310, 361, 362, 369, 373, 404, 412, 428, 430, 438, 444,447, 451: n = A,T,C or G
ggccactgtaaccaagaaagtggctaagagcccaaagaaggccaaggttgcngaagcccaagaaagctgccaaaagtgctgctaaggctgtgaagcccaaggccgctaagcccaaggttgtcaagcctaaaaaggcggctcccaanaaggaaatangcgaaacgcctacttctaaaaaccccaaaagggcttcttttttcagnagccacncacctgattctcaaataaaaaaggaggctgggatanatttttcttgtnccnaaggaatancatatgagataaattacnataanattnaagttacccttnngggccccgtttcttatgaaaacctaaggttgggtattcccccctcggggtnncttggcnaagnggaaaatttttccgggatttattctaaaagnccttttantttccggaattaaccncngggtgtcngaaacnccntccnggaaggggggggggggg

SEQ ID NO: 3633 - DNA, 199 bp, Homo sapiens
aggtacgcggggacacaggcccaggtgtgtaggccacagcagccgcagtcctgaaaggctgcaacacccagacctccaggagagacccggcccaggatgcctcgcctgttcttgttccacctgctagaattctgtttactactgaaccaattttccagagcagtcgcggccaaatggaagggcgatgttattaaattat

SEQ ID NO: 3634 - DNA, 260 bp, Homo sapiens
  misc_feature 196: n = A,T,C or G
ctatagggcgaattggagctccccgcggtggcggccgcataatttaataacatcgtccttccatttggccgcgactgctctggaaaattggttcagtagtaaacagaattctagcaggtggaacaagaacaggcgaggcatcctgggcctggtctctcctggaggtctgggtgttgcagcctttcaggactgcggntgctgtggcctacacacctgggcctgtgtgcctgtcccgggctttaggctgcccccgcgtacct

SEQ ID NO: 3635 - DNA, 244 bp, Homo sapiens
actatatggggcgaattggagctccccgcggtggcggccgaggtacgcggggacacaggcccaggtgtgtaggccacagcagccgcagtcctgaaaggctgcaacacccagacctccaggagagacccggcccaggatgcctcgcctgttcttgttccacctgctagaattctgtttactactgaaccaattttccagagcagtcgcggccaaatggaagggcgatgttattaaattatgcggc

SEQ ID NO: 3636 - DNA, 519 bp, Homo sapiens
cgaggtactttttggcagaaagttgacccaagagtttactgaagtcgctggtgaaaactccatcagcatgcctggcatttctggatacatcataatagggtgtgtcattttcagctaatgcattttgcaacatgtcaatgtcttcttttaatgaaacttgatcaggttcatttgctccctcaaagggtattctgtcacccaacctgagagcagaaggtgccctgtaaagaggccatgccgaagtctgtgagaagagcacactgagaagagtcaggagcacaaggagctgggccttatttctggtgtccatttctgtgcctctcgcccagtcgtgctcccccggagctgactgttctggtttgttttgaagctgtcttaggtgctgaagtcctgggagtaagagaaaggctccaccagttctctgcccttagcaatggctaagggttggctgttactgcctgctggtgcttctcactctaccctccccgcgtacctgcccgggcggccgctctagaacta

SEQ ID NO: 3637 - DNA, 457 bp, Homo sapiens
  misc_feature 288: n = A,T,C or G
aggtacgcggggtcctcactcaccccaccctccccaattccagccctttgccctctcggtcagggttggccaggcccagtcacaggggcagtgtcaccctggaaaatacagtgccctgccttcttaggggcatcaagccctgaacggttgagagcgtggagccctccaggcctttgctctcccctctaggcacacgcgcacttccacctctgccccatcccaactgcaccagcactgcctcccccagggatcctctcacatcccacactggtctctgcaccacccctntggttcacaccgcaccctgcactcacccacagcagctccatccactgggaaaactggggtttgcatcactccactgcacaagtgttagtgggacctgggggcaagtcccttgacttctctgagcctcagtttccttatgtgaaagttgctggaaccaaaatggagtcac

SEQ ID NO: 3638 - DNA, 423 bp, Homo sapiens
ccgggcatggcaccatgttcaggaaaccaaggacgatattgctctactgttggaaacagagtaatcaaattttctgtgctagccttaattcctgccctctttaagaggagcttaataaatgtaaatatgcagaatgtttacttttggattgtcccatggtgtccctggaatgctccgagtgcacaagcttaccgcaaggccgaccacacgttctcgggagttcctggacagaccgttcttcacaacgaccacgctcaggtgtaacttcacctgggttcaaggagaccgtgttgggtgccaaagatgtaggggaacctgcctgatacaccacccgcaggctctccccttcccggtggagacgagggaatgagaaaagaaataaagacaaagacacaaagtttaagagttaacaaaagtgggtcc

SEQ ID NO: 3639 - DNA, 281 bp, Homo sapiens
ctatagggcgaattggagctccccgcggtggcggccgcataatttaataacatcgtccttccatttggccgcgactgctctggaaaattggttcagtagtaaacagaattctagcaggtggaacaagaacaggcgaggcatcctgggcctggtctctcctggaggtctgggtgttgcagcctttcaggactgcggctgctgtggcctacacacctgggcctgtgtgcctgtcccgggctttaggctgctttccctacccggctcaaccaccccgcgtacct

SEQ ID NO: 3640 - DNA, 438 bp, Homo sapiens
  misc_feature 189: n = A,T,C or G
cactacttagggcgaattggagctccccgcggtggcggccgaggtacctggtaaagaatcagtgaccttttaccttaacatcaaaatgtagtttaaccagttaatgtatttttcagttttctttccttatgtcatctgtgaacatcttgagctgtgagctattaagtgcatgtttccctcaaggccctntggtccattctggactaatgttgaaagatgggatggattggcatggaactgttggggtgatcagacccaacaccgggctgtgggggctaagaagtccagtggagtcaaaggaatgagaaaagacaagttaagaatgcataaggtgggtccagggggccaacgctagtatggaggctgcaatagacctgagctctggaagcccacactattagtgatcaaacaaagcaccaggtggtgaagggatgtggg

SEQ ID NO: 3641 - DNA, 453 bp, Homo sapiens
  misc_feature 428, 429, 433, 441, 444, 445: n = A,T,C or G
ccgcggtggcggccgcccgggcaggtacgcgggataccagcatcaccacaaacatgaataatgaattgagctgtgacattactaggcaataggaatgtttcagctccattataatcttgtgggatcaccgttgtatatgcagtcctgtgttgactgaaacgttatgtgactgcagttgggtaatggtttcttagccttatgtcagctctatgtatccaattagttcagtcagttgcctcccctcttcagtggaagattttgtttttagttcagtttaggaaggaagatttcctttcaggaggccaggtgtggtggctcacacctgtaatcaatcacagcactttgggaggctgaggcaggaagactgcttgagcccaggagtttgagatcagcctgggcaacatagcaagatcccatttctaccaaannaaanaaacaaanaannaagtacct

SEQ ID NO: 3642 - DNA, 355 bp, Homo sapiens
cgactactatagggcgaattggagctcaccgcggtggcggccgaggtactcagagtgaggattttctgcaacctacgtttgtccctccagcatctgctctggctccatggcggaccctgcaagtcacagtccccggataccagtccgcgcccaagccgttcgttcttaagagccctgcaccgcgccaccagctcccagcacaaacagctccggccgcccgggcaggtacgcgggcacccccaagtagtgcaacaaccggggctgctgctttgactccaggatccctggagtgccttggtgtttcaagcccctgcaggaagcagaatgcaccttctgaggcacctccagctgcccc

SEQ ID NO: 3643 - DNA, 334 bp, Homo sapiens
  misc_feature 18, 63, 80, 197, 201, 263, 314: n = A,T,C or G
aggggaacagtgtgaaancctggttaaagggtttgggtggagacctttgtgagagtagaatangattgggattataggtntcaaagccagtgagcatctcacccctccgttcccttctctacgccaccctgtccctctccgaaccctgcctggagacactggatcatcatttctgggaccatgtcattctacttttncttntgttccttccagtctgccatgcacggactgatcatgggcggcctggaagtgatctcaatcanagacaacaccccaatcccacacaacggctgccgccccaggaaggctcggangctgtgatgggaaggaggcc

SEQ ID NO: 3644 - DNA, 347 bp, Homo sapiens
ccgggcaggtacgatttatattcagctgtatgctgggcaggtccaacttggcatttcttggctgtatctctgaaggaaagtcatcttaatctctatgagcctccatttcctcagctgtaaaatgggaagatcttcctcacactgctgtgaggaagcggattttctgacgcatatgaagagtgagaactgtctacatctaagtcttctttgagaacaataccagctgagcggctatttacattccagcttcttttgagaatctctgaagatgattaagtcattgtcagctggcccagaaccatatcctgctccacaagcctcgtccttggcaagaagttgcacctgcc

SEQ ID NO: 3645 - DNA, 300 bp, Homo sapiens
  misc_feature 209, 233, 237: n = A,T,C or G
gactacttagggcgaattggagctccccgcggtggcggccgcccgggcaggtaccttactgagaaattcatcagctttttcctaccaaaggcagacatctaaccgttccgaaccctcaggggagatcaacatagacagcagtggtgaaacagttggatctggagaaagatgtgtcatggcaatgctgaagaaggagggatcaggggatnaagaagaccaaccgttaggaagtnttgnactgcaggtattagtgagtattttgaaacactgtgatgtctcaggcatgaaggaagacctgtg

SEQ ID NO: 3646 - DNA, 330 bp, Homo sapiens
  misc_feature 222, 318: n = A,T,C or G
cttagggcgaattggagctccccgcggtggcggccgaggtactattttctaacaagaagccttcaggggaaataatggatcctagttatgtcaaagaaaacaatgagacaaaatggcaacttcacagtcttcaagtaaataagaatccctgatcccgcgtacgcggggctcttaccgccatcttggctccttgtgggagggccctgctgggaacgggacttntaaaaggaaactatgtctggaaggctgtggtccaaggccatttttgctggctataagcggggtcctccggaaccaaagggagcggcacagctcttnttaaaattgaag

SEQ ID NO: 3647 - DNA, 389 bp, Homo sapiens
  misc_feature 328, 333: n = A,T,C or G
ccgcggtggcggccgaggtactttttggcagaaagttgacccaagagtttactgaagtcactggtgaaaactccatcagcatgcctggcatttctggatacatcataatagggtgtgtcattttcagctaatgcattttgcaacatgtcaatgtcttcttttaatgaaacttgatcaggttcatttgctccctcaaagggtattcttgtcacccaacctgagagcagaaggtgccctgtaaagaggccatgcccgaagtctgtgagaagagcacactgagaagagtcaggagcacaaggagctgggccctttatttcttggtgtccanttttnctgttgcctctcgcccagttcgtgctcccccggaagcttgactgtttctggttttg

SEQ ID NO: 3648 - DNA, 217 bp, Homo sapiens
ccgggcaggtacccacggcgaggacgaggatgagagcttgtgccgagatgtgccccagagcctcccccacttccttgtggcccactgtggagacccggcctcctggatctactcagaccaaaaatgtgatggcactaacaactgcggggactgttcagatgaaactgagcccagtaactgtgtgcccaccctgcggtcctgggtggtggccgctgtc

SEQ ID NO: 3649 - DNA, 242 bp, Homo sapiens
ataatttaataacatcgtccttccatttggccgcgactgctctggaaaattggttcagtagtaaacagaattctagcaggtggaacaagaacaggcgaggcatcctgggcctggtctctcctggaggtctgggtgttgcagcctttcaggactgcggctgctgtggcctacacacctgggcctgtgcgcctgtcccgggctttaggctgctttccctacccggctccccgcgtacctgcccg

SEQ ID NO: 3650 - DNA, 356 bp, Homo sapiens
ccgggcaggtacgttgaaatattaggggcaggttcccccaatatctggcgcccaacgtggttttctttttcctaagtgcatgtgggaacccgattccctttggtaggtgcggagaaatgttcatcggtccagtccacagaaatgcttgttcggctccccgacgattggtgagttgtctgtgtattgtccggggtaactatgggtcacgcagagtctaaacattatgcttatctctgctatattaaattcctgttaaaatgggggagttcgggttcccatggaaaatatggtcaccctattcagggcagtggaagaacactgtccttggtttcctgaaaagggaacgttagatgtgg

SEQ ID NO: 3651 - DNA, 379 bp, Homo sapiens
cagctccaccgcggtggcggccgaggtacttttttttttttttttttttcctctcgctcggaatacagccactgaaggaggtaaaagatatctacaagtagaactttgatattattacttcttctactgaacttaaaccaattactgtttgctttggtgtctgttgtgatttctcttatttagttggattttgtagttactttaaaagttaacgaaatttcacatttcatcaagtccagaggccagagacacccaaatatgcacagacaggaatcagctgcaattgtccaagccagagctgattaggcctcaactggaatagtcccaccatgtaataaatcttcctgagtattgtgtataaggtcaaatatttccagct

SEQ ID NO: 3652 - DNA, 385 bp, Homo sapiens
  misc_feature 3: n = A,T,C or G
gcnaattggagcctccccgcggtggcggccgaggtactttttggcagaaagttgacccaagagtttactgaagtcactggtgaaaactccatcagcatgcctggcatttctggatacatcataatagggtgtgtcattttcagctaatgcattttgcaacatgtcaatgtcttcttttaatgaaacttgatcaggttcatttgctccctcaaagggtattctgtcacccaacctgagagcagaaggtgccctgtaaagaggccatgccgaagtctgtgagaagagcacactgagaagagtcaggagcacaaggagctgggccttatttctggtgtccatttctgtgcctctcgcccagtcgtgctcccccggagctgactgttct

SEQ ID NO: 3653 - DNA, 356 bp, Homo sapiens
aggtactctgaaggtggatagcaatggtgtgatcacagtaaagcctgacttcacgggcctcaaaggaccctacaggattgagacggagggggagaagcaggagctgtggaaatatacgatcgacaatgtttccccccacgcacagccggaggaggaggagcgggaacggcgagtgttcaaggatctttatggccggcacaaggagtatctcagcagcctcgtaggcaccgactttgagatgactgtcccaggtgccccccggctctttgtaaatggagaggtcgtttcagcccaaggctatgagtatgacaatctctacgtccacttctttgtagaattgccaactgctcactggt

SEQ ID NO: 3654 - DNA, 229 bp, Homo sapiens; identical to SEQ ID NO: 3491

SEQ ID NO: 3655 - DNA, 523 bp, Homo sapiens
  misc_feature 513, 518, 523: n = A,T,C or G
cgcccgggcaggtacgcggggagggtagagtgagaagcaccagcaggcagtaacagccaacccttagccattgctaagggcagagaactggtggagcctttctcttactcccaggacttcagcacctaagacagctccaaaacaaaccagaacagtcagctccgggggagcacgactgggcgagaggcacagaaatggacaccagaaataaggcccagctccttgtgctcctgactcttctcagtgtgctcttctcacagacttcggcatggcctctttacagggcaccttctgctctcaggttgggtgacagaataccctttgagggagcaaatgaacctgatcaagtttcattaaaagaagacattgacatgttggcaaaatgcattagctgaaaatgacacaccctattatgatgtatccagaaaatgccaggcatgctgatggagtttcaccaagtgacttcagtaaactcttgggtcaactttctgccaaaaagtacccttcggccgntctanaactn

SEQ ID NO: 3656 - DNA, 457 bp, Homo sapiens
  misc_feature 408: n = A,T,C or G
ggcgaattggagctccccgcggtggcggccgaggtactttttggcagaaagttgacccaagagtttactgaagtcactggtgaaaactccatcagcatgcctggcatttctggatacatcataatagggtgtgtcattttcagctaatgcattttgcaacatgtcaatgtcttcttttaatgaaacttgatcaggttcatttgctccctcaaagggtattctgtcacccaacctgagagcagaaggtgccctgtaaagaggccatgccgaagtctgtgagaagagcacactgagaagagtcaggagcacaaggagctgggccttatttctggtgtccatttctgtgcctctcgcccagtcgtgctcccccggagctgactgttctggtttgttttggagctgtcttangtgctgaagtcctgggagtaagagaaaggctccaccagttctctgccct

SEQ ID NO: 3657 - DNA, 524 bp, Homo sapiens
ccgcggtggcggccgctttggtgttgtctccacagcggaggccgtcgcagaacccagctcccacagctacgatgttcttaagcgcaccacagagttcaacagtgtctgcatcatcaaccacggtaattcgaaaatttggagtctgcagaagttctttgaagagaaggccgttctccattactttgctgccgatggtggtctcacagaacttctctgcagccacctcattggcaatgttggctcccatcagcacactgatgtcaatacccatcttctcacggatgatgtcagaaatgagcttcagcccctcggggccctcgtctatgcccttgatgagggtgattcccagcgctttcttgggcactctcccagtgatctcatcacagattctgtgaatgaactggtggggaatgacaaacaccagcaggtctgcatcctgcacaagcctcgctaagatttgacatggcaaccacattttctggcagcttgtgtcaggaagatattttacattttcatgggccatt

SEQ ID NO: 3658 - DNA, 467 bp, Homo sapiens
  misc_feature 50, 418, 428, 438, 439, 455, 467: n = A,T,C or G
taggcgaatggactcccgcggtggcggccgaggtacttttggcagaaagntgacccaagagtttactgaagtcactggtgaaaactccatcagcatgcctggcatttctggatacatcataatagggtgtgtcattttcagctaatgcattttgcaacatgtcaatgtcttcttttaatgaaacttgatcaggttcatttgctccctcaaagggtattctgtcacccaacctgagagcagaaggtgccccgtaaagaggccatgccgaagtctgtgagaagagcacactgagaagaagtcaggagcacaaggagctgggccttatttctggtgtccatttctgtgcctctcgcccagtcgtgctcccccggagctgactgttctggtttgttttggagctgtctttatgtgctaaaantccttgggantaagaagaanngccccaaccagttctnttgccctttaan

SEQ ID NO: 3659 - DNA, 633 bp, Homo sapiens
  misc_feature 580: n = A,T,C or G
cgaggtacatgaagttcacattgtcaaagattatcactccttcatggggccaggctggtggtgggcgtttctgatattcccaaggtgcttctttttcaaggtctgtgtattcaatgaccctttctactgagatcatcatattctcaacttcagcactttgtcgaacacaccactgaaacatccccatgagcgtgagggcataggacagtgccaaaccaacctgcccggcatccagagtttttgccagaatcagggacccaaaggcaacgatgatgacaaacatggcacagatggcatccagacggacggcgaaccagcgggacgttgtcaaaaacaagaaccaagcctctgaatgtaaatcctggtgtgcatcaaacagttcctgacacctctcttctgctttgtatgcccggatggtccagagcccctggagagaagatgacaagtgggaaaacactggactccgagttgtagattccaggcgcttcacatctctttgacgtttccaaaaaatatcgcccgaagaaaaatgaaaatgattccaaggggaaccaagggtattgcgatccaaggaatcacnggcccagcccagagaccacaccaaccacttgtagcaatgtctggatgaaatct

SEQ ID NO: 3660 - DNA, 408 bp, Homo sapiens
taatacgactcactataggggcgaattggagctccacccgcggtggcggccgaggtacgcgggggcactcggcctgagaaactcggcaagcgcgcagtgtcgactccccggtctatgccaggcgcatctcagctaatccaaaagtaaatgagaaacttagaaaaggattgccaattccaaatcaacatatttagagaaaattggaaaaggagaagcttactacagctttatttgaggactttttaaagaacgctgggttctatctgtgagctgcaaatcttggagcaaaaaccagagacattgccagagcaaacaagaacagaaatacaaatggagaactggtcaaaagacataacccacagttatcttgaacaagaaactacggggataaataaaagtacctgcccg

SEQ ID NO: 3661 - DNA, 515 bp, Homo sapiens
ccgggcaggtacgcggggatgctgaccactcaccatcatctcaaggcagcagtgaggccccagcgtctcagccacccccccaggtcagaggttctgtcatgccctctgtgattagagcacatgccatcattaccttaggtaagctgtgcttacagcacgaggatctggcaaagaagagcatcccagccctggtgcgagagctcgaggtgtgtgaggacgtggctgtccgcaacaacgtcatcattgtaatgtgcgatctctgcattcgctacaccatcatggtggacaagtatattcccaacatctccatgtgtctgaaggattccgacccattcatccggaagcagacactcatcttgcttaccaatctcttgcaggaggaatttgtgaaatggaagggctccctgttcttccgatttgtcagcactctgatcgattcacacccagacattgccagcttcggggaagttttgcctggctcacctgttactgaagaagaaccctgtcatgttctt

SEQ ID NO: 3662 - DNA, 267 bp, Homo sapiens
  misc_feature 7: n = A,T,C or G
actatanggcgaattggagctccccgcggtggcggccgaggtacgcggggagggaaagcagcctaaagcccgggacaggcacacaggcccaggtgtgtaggccacagcagccgcagtcctgaaaggctgcaacacccagacctccaggagagaccaggcccaggatgcctcgcctgttcttgttccacctgctagaattctgtttactactgaaccaattttccagagcagtcgcggccaaatggaaggacgatgttattaaattat

SEQ ID NO: 3663 - DNA, 403 bp, Homo sapiens
  misc_feature 175, 187, 215, 254, 349: n = A,T,C or G
cctatagggcgaattggagctccccgcggtggcggccgcaaactgacacctcagggacaaagagatctggacagaatcgccggacaggtggcagctgccaacaagaagcattagaacaaaccatgctgggttaataaattgcctcattcgtaagaaaaaaaaaaaaaaaaaaaangaaaaaaaagtncttttttttttttttttttttttttttngggaaatcttgcacaaatggcattttattaaagaaaatntaatttacaaagctttgtaaattttaagaaaaacattcatagatcataaacaaaaatttcaatatgcaatattcaaatttacaagaaaataagcncaaacttttagacagggcagttattgctgcactcctttaattccttatccagag

SEQ ID NO: 3664 - DNA, 508 bp, Homo sapiens
  misc_feature 3: n = A,T,C or G
ctnctatagggcgaattggagctccccgcggtggcggccgcccgggcaggtacattttagaaagtgaaatgctgtggacatttaaggtggagccactgtgagagtctagggggatagatggtagtcgtctcggaatgaaacgaatacacccctctcagagccctttccaaggatcccctccttctttcagctccttccctccacctcaatacacactcctgtcccaggaacctaacctcatctagaaataccagggccagcatgccttacacctagaggtttggttggcttcagagaaacttctggaggctaaaagcagccaagaagaatcagccactacatgctgggcctggatgaacagaagcagtgagctgtgatgggggctggggctggggcccaggaggagcaggcagggagagtttgtatgcaccgtgattaaatattataacaaaaatattcgatcatgtgttaggcactttacagttcccaaagcactttcccatccatg

SEQ ID NO: 3665 - DNA, 481 bp, Homo sapiens
acttagggcgaattggagctccccgcggtggcggccgcccgggcaggtacgcgggggccgttactccgaggagataccagtcggtagaggagaagtcgaggttagagggaactgggaggcactttgctgtctgcaatcgaagttgagaggcccagtatttaggcgacagtgaatttattactctgaagagggttctgcacatatttccaaattatattggtggtcatcagaagtaggtgataggaagaaatacttctcaagggtgcaaaaatgcagagtaataaaacttttaacttggagaagcaaaaccatactccaagaaagcatcatcaacatcaccaccagcagcagcaccaccagcagcaacagcagcagccgccaccaccgccaatacctgcaaaatgggcaacaggccagcagccaaaatgaaggcttgacttattgacctgaagaattttagaaaaccaggagagaagacctt

SEQ ID NO: 3666 - DNA, 413 bp, Homo sapiens
  misc_feature 382: n = A,T,C or G
ccgcggtggcggccgcccgggcaggtactagtcagtatgctgtagtattaatcagtaggtcaagttcagtgaagtaaaggagaattgaattcttgaagttcacatttaggcaaaaatttggcgttttaggaggtgagtataagacatgatctttatagaaaacgctgatgataaaaacagcgctctctgttaggtgcctttatgcttgactccattgtcatcttttcttaagaaactaagctcaggactgggtgcaatggctcatgtctgtaatcccagcactttgggaggctgaggctataggatcagttgagctcaggagttcaagatcagcctgggcaacatagctaggcctcgtcttctactaaaaaacgaaccaacnaaaaaacaaaaaaaaacccccaaaaaaaccc

SEQ ID NO: 3667 - DNA, 501 bp, Homo sapiens
ctatagggcgaattggagctccccgcggtggcggccgaggtactatttttattttacagatgaagaactgtggattttgtttctaagaaaatttccaggctcacagaactaagcctaatttctttttattttttagcaaatacagtttttataagaatttgaattctatgaaaataaatggattactcctaaatctctgatgcctcagtgaacactttttccttattaacaaaattctcacttttggctttggattggctttgcaggagtgcagattgatcatagcttttttcatgtcctaagagttgtcagagttttctcttgtagcatttttttctttactttttttttttactatctttaaatatatgactgtaagagtatgataaatatgctgttttctaatctctgctggtggcacataaactaatatattttgaggtaattttgaaatgatattaataatggcattagattttctttggattttttgaaaaaaat

SEQ ID NO: 3668 - DNA, 457 bp, Homo sapiens
  misc_feature 15, 170, 243, 259, 281, 283, 327, 340, 351, 365, 425: n = A,T,C or G
tagggcgaattggtnctccccgcggtggcggccgcccgggcaaggtactttttttttttttttttttttttttttttttagagatggggtcttgctagcttgctcgggctgaactaaagatatcctcctgcctcagcctcccaggtagttggaactatagtaggagtatntaccctgccctgctagaacttcaagttttgatgggcaaatccaccccagaggacaggacaaatgccagtattntggttaatagccccanatgagccagcttcccacccatntnccgtaagggggcagacacataagggaagccaccttggacctttnaggtcaacccatntaccagggggnatactaccaggagnggaggctttgggattacatggacaatgggaaaacaaatgggcccaggcttggagtcccancttaaaattcccttggatccttaccaaaaatt

SEQ ID NO: 3669 - DNA, 216 bp, Homo sapiens
  misc_feature 10, 50, 55, 58, 65, 83, 140, 144, 146, 149, 157, 164, 178,187, 202: n = A,T,C or G
aatacgactnctatagggcgaattggagctccccgcggtggcggccgccnggccnggnacctcangccctgaggttccctctnttctggggaaaagccacacgactgatgggccacataagctctggtctttttctgccncgantnccnggaccctntgctaanccggttcctattgnacagatgantgcataataccacangaattcaaatgggg

SEQ ID NO: 3670 - DNA, 485 bp, Homo sapiens
  misc_feature 3: n = A,T,C or G
ctnctatagggcgaattggagctccccgcggtggcggccgaggtactaagtcacacccagccagtcaataactgagaaatcaaaataaaataataatttcaaagaattacataaatacagggccttttgagatttttggcaattgtaaacaaaaacgaatggtttttacaattcagtgtaattctacgaatatttatttggcacccatgttaggcactgaggctacacagcagtgaaataggcctagttgttctcaactagagaacatagttggttaatgtagctgcactgaattgtagctgtttagaagataatataccctgaggctttttaaagtatactattactataaggaagtaaaattattttatacttataaattttgttttggattattcaactgaatttgggagtgttcagaattttatggcggttgagacaaggaagaggtataatgctattttttttccttttctttttttttg

SEQ ID NO: 3671 - DNA, 392 bp, Homo sapiens
aggtacaagtcataaacacagtgtgcagcagtgacgatccacaggggcgtgatgacagagcccccgcacaggtggtagccctggaactgaaggctggcctgccagggccactgcgagagcaaggacatgtttccacccacgatgcgtgagctgtagccccttctatgaccacaggctgtgcactgcaaggtaaccacgtggccagaggcacatccctccctcacatatactgagtggtgtaatgcagtcaccttgtcatctggcaagaggtgatcgatggacacaaactcctcccggaactgcccctccagcgagctcactctgaggttatctgaactcacatagcttgggaaacccagctgggcacatgcaacatttgccgtagtgaccct

SEQ ID NO: 3672 - DNA, 477 bp, Homo sapiens
ctatagggcgaattggagctccccgcggtggcggccgcccgggcaggtacactagtatttaacctagacgtgaggaaggagtaggaaattttctggtgaatacagaagagcaaagaacagcaggtcagcaggaatgactaatgtttttctatgcatgtttaatggaatattcgtgtaggatattttgagtaggtaattggataatcagcatttgtaacttgcatcctagtagtctgactctcactaataagacttgtcaaagttccaagaatctgaaagtggatgataaatgtccatgtgtatcaccatccatgaccgaaagtcagcatccacagaacacagaattgggacagatgaacttaatagataaagatgaatatcggagttgttcctcttagggaatgatactctccatgagctgtgtgagtcacagctgccagaaaagaaagagcaagggagcgtatgaaggcagcacag

SEQ ID NO: 3673 - DNA, 391 bp, Homo sapiens
  misc_feature 45, 46, 48, 49, 50, 51, 52, 53, 54, 55, 56, 57, 58, 59, 60,61, 63, 64, 67, 111, 139, 160, 161, 177, 183, 186, 187,188, 189, 190, 191, 192, 193, 197, 199, 221, 224, 236, 243,254, 261, 267, 303, 312, 349, 367, 368, 369, 371: n = A,T,C or G
aggtacttttttttttttttttttgtttttttttttttttaaaannannnnnnnnnnnnnntnnctntctttacttgaaattttatttaattccagttatttagcacatantttagcattaagccctcaaacgatacancaatatgttacattctcttgnnaaaacagttgttgtanactgtnaannnnnnnnaaangnaactccgacttgtgcctaatanganttgacctttaanaggtttnttttgctgtgnatggggnggcttngcttgaacttccattctgtgccttgtagctggagangctgggagnatggatggtcctgatgcccttggcaccttgatttcantgagaccggaggaggcannnanaaggagggggagggagggaa

SEQ ID NO: 3674 - DNA, 362 bp, Homo sapiens
  misc_feature 8, 74, 75, 95, 96, 97, 104, 119, 131, 132, 151, 152, 156,164, 197, 198, 208, 209, 213, 214, 239, 250, 270, 285, 299,303, 308, 322, 323, 329, 334, 335, 337, 338, 339, 340, 341,342, 343, 344, 345, 346, 347, 348, 349, 350: n = A,T,C or G
ggccgaanttgggaagcttcccacccgcgggtgggccgggccccgccccggggccagggtaccactttgggggnnaaaaaaaggggggggggggnnnaaaaaanccccttaaaaaattnttttcattttannaaatgggggatttaacccnncccntggtttancttttaaaaatttaaaaaaaggggggttttttnncccccccccnnaaanngggggggggtttttttttttccccnaaaaaagggantttttgcccaaattcctttngggaaaaaatttggnaaaaaaaagggggncccntggcncccccccctttttnnaaaaanccccnnannnnnnnnnnnnnntttttttttttt

SEQ ID NO: 3675 - DNA, 345 bp, Homo sapiens
aggtacggattgagaagttgcccttcagtatgtcgctgtcataggtgtaatcgatggcaggggagatgtgctgcgagaagatctgggccatcatggtgcggtaggccttcccatccacgttggtcagcgtgtggtgcagcacttcatgcagctctgactcctccatctggggtgggggcagcagctcactcttgagcagttctgtggctgtgggccgttttgctggatcgtggttcaacagccaggagatgactgatttctgctttgcatgctctccatcgtcaaagtcttctggaaacttaggcgaagtgggctaaaaaaatatattcaaatcagcaaggtttt

SEQ ID NO: 3676 - DNA, 112 bp, Homo sapiens
  misc_feature 2, 18, 47, 53, 57: n = A,T,C or G
gnggccgcccgggcaggnacacaaactcctacttccagaagagaatngtttangttnttctggcctaaattttatgcaatgaataaaaatttaaatactcttcatccatgat

SEQ ID NO: 3677 - DNA, 352 bp, Homo sapiens
  misc_feature 352: n = A,T,C or G
ccgggcaggtacatcgagccctcagggtccctgactggttctccagccgccccataggctatgagcatccccgttccctacacaaaggaccactgggatttattaaaggttatgccttgcaatgcagtactgttttcatatgtgtgatattatactactttctccaattttctcttcacatcctacccattctttttgctcaatcttttaagtcttttaatgaaatagttatacaaaaaagtgtatagagtcaggtgcggtggctcacacctgtaatctcagcactttgggaggccaaggtgggcggattgcttgagcccaggagtttaagacccagcctgggcaatgtggn

SEQ ID NO: 3678 - DNA, 352 bp, Homo sapiens
  misc_feature 37: n = A,T,C or G
aggtacatttgaaacattttaccatggcagtaagttngactgggagcaactgttcaacacaactctgtaggaatacaccgattttttataactgtgctgcctaatatggtagccacatgtggtttctgagcacttgaaatgtaggtagtccaaactgagatatgctagaaacataaaatacacaccagacttcaaaggcttagtatgaaaaaaatgtatatgaaaaaatttcatatcgatgatcttgaatatagaggctggaaaaaattatttcatattgattatatactaaaagataacatttcagatacactgggttgagtaaactatattattaagtttaatttctcct

SEQ ID NO: 3679 - DNA, 339 bp, Homo sapiens
aggtacaacttttgattcccccaaaacttaactgctaatagcctactgttgactggtaaccttattgataacataaataattgattaatcccatacttaaactagtatctacatgtattctatgcattcatgacatacctaaccttttcttgatttttttttttatgtttctaggctacatggttcatctgctagttttttcatattgtcacaattcccaaaaaaattttccaatatgtttattgaaaaaagccctacatataagtggacccacacagttcaaacttttgttgttcgagggtcaactgaaatgaaaattaaattaatgaatttttggaa

SEQ ID NO: 3680 - DNA, 133 bp, Homo sapiens
  misc_feature 8, 20, 33, 34, 37, 58, 62, 64, 66, 73, 75, 85, 86, 94, 105,117, 118, 119, 121, 122, 130, 131: n = A,T,C or G
accgcggnggcggccgaggnacagatttgtgannggnatataaaacccgagcgcggcngganananggagaangncgggcccagnnggaaccgnagagagcaganaccacaacagcnnngnngggagggnnag

SEQ ID NO: 3681 - DNA, 345 bp, Homo sapiens
ccgggcaggtactgatataatctaacaaatgaaggtgcacctttacttcctggaacatagacagccacctaagatacatagacataaatcatcacttaattttttgaagaataaaaactgagatggacatgtttttacaatcacaaaaaactaggaaaaggtttaaacacataatattacacataaacaaaaacagcaattaccttgtatggttggggtccaggtgataatacaaagtcattaattttttgcaaatgcaatttatttgcaattgtgtctaaaaaaagagtaaattaaatcagattgatgagagaacctaaaaggaacatgttaaactctgaatac

SEQ ID NO: 3682 - DNA, 475 bp, Homo sapiens
  misc_feature 37, 54, 75, 82, 125, 209, 289, 416, 432, 437, 458, 472: n = A,T,C or G
ccgccgaggactttttttttttttttttttttttganacagagtctttctctgnctcccaggctggatgtgcggnggtgcantctcagttcactgctcactgcaacctccgcctcctgggttcanactgttctcctgcctcagcctcctgagtagttggggttgcaggtgcatgccaccatgcctggctaagttttgtatttttagcanagacagggtttcaccatgttggccgggctggcctcgagctcctgaccttgggtgatccaccctcctaggtctctcaaagngctggaattaccggggtgagccactgcgcccggcccttagtagcatcttttaatggaggtagagttgagatttcagtgactaacaactaaagggtattaaaggtagggggtttatatgatacatttncatttttagaaaactnatctnagctttcaatgtgaagaacanattgaaatgggaanggg

SEQ ID NO: 3683 - DNA, 495 bp, Homo sapiens
acttagggcgaattggagctccccgcggtggcggccgaggtacgcggggtctggcatcagcgttgcggctcgaggcaaagctggtcctgtgcctgctgtccattgccgctaaggcctgctgctgccattcaggcgtgtctccctctctctctctctttcatgccgctctctccaccccatcttgggacggccagctctaagaattcctgctacgacactgaattcaaccaggaggtgatgccacactcaatcagaaactatgctactgctgaagaggtatattgagccctgcctggttaacctccagtgaggttattagagaattgggagaggctcaaatcagcatcctgcacctggttatcaaaccattgtgaagtcttgattcctggatggccagaaaacttgtcattggtcaagagcaacattaagatctgcctgttactcatactgatgcttcctgcccagcaagttcatcagagggcgaggatgaattac

SEQ ID NO: 3684 - DNA, 453 bp, Homo sapiens
  misc_feature 9, 17, 25, 27, 45, 49, 53, 72, 75, 77, 452: n = A,T,C or G
ggccgaggnacgctttncacgcagncnttaagcctaggcttttanagcnaagncaagttgtttggacagaanggntncagggggcggccctggctcttggggcttccgaggcgatcgggcagtgtcagtcttcagctgttaagctgagaagatctgggaaggagtcagtcagagagccttgggccagagttccaggagctctgggagtggctgtcagaaatggccaatttctttcaaatgctgtatactggaaaaatccaaaggactcatcagatgaacacatttcaaagagccgctaccaattttttttcttaagcaaagcatcaagcctctgatttgccgctgataaattctctaaataagcacttggaacagaaagggagctctcccaactacccggaatgcaggcgggcccgggactatggtgactaccaccctctaaaggggggggnt

SEQ ID NO: 3685 - DNA, 336 bp, Homo sapiens
  misc_feature 203, 205, 206, 211, 231, 244, 250, 265, 268, 270, 273, 274,276, 321: n = A,T,C or G
ctatagggcgattggagctccccgcggtggcggccgcccgggcaggtacctataaatgaagttgttttctggccgggcgcagtggctcacgcctgtaatcccagcacttcgggaggccaaggtggagggatcacttgagtccaggagtttgagaccagcctgggcaacatactgagactccgtctctccaaaaaaaaaaaaanannaaaanaaattaaaagaaattgcttnttaagcagctttnatatanacctccttatctcanctntnacnncnctcccacccccatcaccatcttttccagaggttgcctgatgctgnataattcctgagcct

SEQ ID NO: 3686 - DNA, 471 bp, Homo sapiens
  misc_feature 400, 401, 420, 443: n = A,T,C or G
ctacttagggcgattggagctccccgcggtggcggccgaggtactgctgaaacagaaattatgtgtttgggagaaccgagctaaggaaacatttcaaaaccaatgtatgttgatcccacctgagctgctttgatatatgacagcctctcataattactggtgtcactattgttgtaaatgaagaatagttaaatatggagagattaagacacaattcaaaacactttttaaaaaataaatggctgtttcataaacacaaacaaatctttaaaagaaaaataatcacatcaattgcaatatacattggcaaatagtaaaatggtcattttccaaaataggagcttctttattatatgccccatctattataccaatcttgggaatatatcttaaacataanngggggatcatatgaaaaangttccactatttcaatggtgatnaaatttaaattaggttagaatatggatt

SEQ ID NO: 3687 - DNA, 124 bp, Homo sapiens
  misc_feature 68, 81, 94, 105, 113: n = A,T,C or G
ccgggcaggtacctttatactaaattaatgggtaggtttattcctggccttcccagttttttgggggnccctttttttttngggggaattaatnattttttgggnttttgggnattaattttta

SEQ ID NO: 3688 - DNA, 319 bp, Homo sapiens
  misc_feature 177, 218, 248, 267, 269: n = A,T,C or G
aggtacttttttttttttttttttttttttttttgcgacagagtctcgctcttgttgcccaggctggtctcgaactcctgacctcaggtgatctgcccgcctcagcctcccaaagtgctgagattacaggcatgagccactgtgcccagcctgtttggtttggttttagcaattaanataatttggttgttaagccttgcttgtttgcaacaatgaanatggcacttgagattctggaaaggactttntaaactcaaggacctatgngngattgcttttattacctttttgtttattaggttttcaagacttgacattt

SEQ ID NO: 3689 - DNA, 357 bp, Homo sapiens
aggtactttttttctttttcttttttttttttttttttttagtttttgagatcgtgtctcgctcctgttgcgcatgcctgtaatcccagctactcaggaggctgaggcaggataattgcttgaacccgggaggtggaggttgcagtgagccgagatcatgccactgcactccagcctgggcaacggagtgagactttgtctcggaaaaaaaaaaaaaaagatctggcggatgaaaataaccagaatgaaaatagctagaaaactcagcaagcaggaagctccctttctcacccttttgttcccttgccgatagaatcagtcactattggaaaaaatgaaagacgctctgtttaaaac

SEQ ID NO: 3690 - DNA, 301 bp, Homo sapiens
  misc_feature 24: n = A,T,C or G
tactatagggcgaattggagctcnccgcggtggcggccgaggtactaactcatccagtatctgattctgtcttttcctctatccatctgtcttccatctttgcatccatcattcaacgaaatttacagcctatgcagatgttctgtggtcttaaacatgttgtattcctctttgccttggccatgcttcctcccctcccagccgttgttctcccccacgagaatatcttctcttttctgcttcttagtggttctattctcagtatctgaaactctcattttctgtcccgcgtacctgcccg

SEQ ID NO: 3691 - DNA, 466 bp, Homo sapiens
tacttagggcgattggagctccccgcggtggcggccgcccgggcaggtaccttttattcctaaaagaaattacttggccaggtgcagtggctcacgcctataatcccaatgctttgggaggctgaggtggaagccaaggagtttcaggctgcagtgagctatgatcacaccactgtgttccagcctgggagacaaagcaagatcctgtctcttttaaaacaaaaaacaaacaaaccaaaaaaaaaacaaaaaaaaaacctaagaaatgtaattaatcattaagtagctgcaaattgaactgttctattttgatacttcctaagagtgtccagtgtaatcagatcattttataatgggttattgaccccaggtgtcctttagaaccacctggaaagctttacaaaaaaaaaaaaagggtgattttgatttaagttgttatggaataggacccaggtatcaatttttt

SEQ ID NO: 3692 - DNA, 478 bp, Homo sapiens
cttagggcgaattggagctccccgcggtggcggccgcccgggcaggtacctgctgtcccctctctgactagaaaacagtttccctagatacctgcatagttagccccctgagcttatttcaattctctgctcaaatgtcatgtaaatggtgacatcttccctgaccatcttatataaaataatacttccctttcccctgatattctctatccaccttatcctgtttgatttttctgcactgccccatcaaccattgacatataacatgtctacttgtttatatatgtattgtgtttcaccagcattgaaatgtgactttcacgagggtagggatttttgtctgttttatttaatactgtatccccaagaatgccttgcataaattgggactaacaaatatttattgaattgaataaatgaatacatttggggaagggcgcaaaaggagtccttgcccctgaaaattcattttcttttc

SEQ ID NO: 3693 - DNA, 296 bp, Homo sapiens
  misc_feature 36, 37, 41, 42, 88, 98, 133: n = A,T,C or G
ggccgaggtacctctgggccattttgcagaaccctnncctnntttggtttttgaggaaagctcgctccctgcccaggtttttcattgntgatcgaaantaacaccaggtggtgaatagagcccctcctaaggntgctcaggataaatcatttattaaataggtctgcttatcaggaggggcgtgaaggctcccaaaaggaaatgctggcacctgggcccagaagccagggcctctaactcctggggttgatctcttcagtgaagtttgcaccctacaaagggaatatggccaaagc

SEQ ID NO: 3694 - DNA, 398 bp, Homo sapiens
  misc_feature 34, 36, 57, 64: n = A,T,C or G
cctcgcggtggcggccgaggtacgtggagaatangncatatatgccactaggctacntgaactnttcacgtttgtattttgtgttggcctatgtataagccaatctagcatgtttgagggcatgtgtgagagtaggtaagggagctgtaagttacattcaggtgggaatttagggctttctgcacaaaaaattctaatttctctgtccttttgctatgttgcatctcccagtgttgacaggttagtctgcatgattaataactgagcaagctgtagagccatgccagtaagtctccaattcctgaacgtggccacatttgtcttttgatgtgactttcaaccacaagccacaaagtaagtctttcactaggctccgttgacttcagtctttatataaa

SEQ ID NO: 3695 - DNA, 456 bp, Homo sapiens
  misc_feature 318, 361: n = A,T,C or G
tatagggcgaattggagctccccgcggtggcggccgcccgggcaggtacatagacgacgctttctttgcctgccccaacctgagaggagtgttatcggggaacccaggatctcctccatctcctatagaaagcaagttacaaaatatcaaaaaagaaagcccaaattttccatgaagaggttacatatctaggtgtcatattgagccacgaggaacactggtttggctatgagaggaagcaagccatttgtgcacttctaaccccgactacccgatgacaaataggaatttttagacgcagcaacattctgccacatntggattccaagtttttcactgatggctaagctgttatatgacnccacaaaaggaggggaaaaggagccccttttttaaaaaactaaccaaggaaatagccttcaaacagatcaagggaagctttaacccaggccccag

SEQ ID NO: 3696 - DNA, 445 bp, Homo sapiens
  misc_feature 22, 43, 56, 70: n = A,T,C or G
gggcgaattttagctccccgcngtggcggccgaggtacctgtnttggcctcctacngtcctttttacttnttttgttttttagaataagagacagggtcttactatgttgctcagactggtttcaaactcctaggctcaagcaatcttccagcctcagcctcctaaagtgctgggattacaggcatgagccaccacacccggccaagttctttaccatcttcagaaggcttagcttgcacttttggaagaagaatagactcccaggaagactgtgagagagatttggggcccaaattgatattaacaaatacactgaacttgattgtattcaccatgttctggctcttgagaaatgagagtgctagtgaggctggtgccactttgggtattcttctggacctgcccgggcggccgctctagaaactagtgggatcccccgggctg

SEQ ID NO: 3697 - DNA, 476 bp, Homo sapiens
  misc_feature 5, 49, 398: n = A,T,C or G
agttnaattggagctccccgcggtggcggccgagccggtaacggagaangtttacgccgactttggcctgtattagcgcgtatggcctcgggccctcgttccccaaggcgtgccgcctccctgttctcagtcgcaggctgaagccttgtctgctctcctcctttttggtttggttttggaactgactccgagggttgggagagcgcgttggtggcgacggccgagtcagatcactataaacaaaatttccacaagagaaaatgttgaaataggagttgcggatacattggatatactggatgaaatacaagcggttaatttttgtaacgtgagggaaaagcccacattgctggttacatgtgtaaatcactgcgttattgctttagtcattgtctctnttttagcaatgaccaagactggaagaagtaaatagaggaaagtggaaccatgcattctttcagtgcgggtatcttggc

SEQ ID NO: 3698 - DNA, 367 bp, Homo sapiens
  misc_feature 46: n = A,T,C or G
ccgcggtggcggccgaggtactggaacagggataagttcttggatnaggtgccaacatacctataaaagctgatttttgagtaaattattgattctaacatatgtaatggatttggtgcgataattttctgatctttaactataagtgactttttattctccaccagaaaagataaatgactgagaatgtaagtctgcgctctgattaacacaatggagaaacggaaaaactatctctgttaaaaactgattcctgtcattcttctgatatcaaataagaggaaggaaaataaactttttgtgtgtagatagaaaaacatacctgaggccaggtgcagtggatcacgcctgtaatcccagcactttg

SEQ ID NO: 3699 - DNA, 424 bp, Homo sapiens
  misc_feature 63, 108: n = A,T,C or G
cgaggtacgcgggggtgggggactccagccagcctgagtgacatgatccaaagagcccttttnggtaggaaattgccccggtggaatccctcaccagagaagcaggtngcaggccctcgcagaggattaacacagtggctgaacaccagaaggaactggcacttggagtccagacatctaaaatttggtatcgtgccttggatccaccacagtcagctgaaattatcagcccaggaccagtggaccaaccagcaggacatagaccatctgacccgaatgatcctgcaatgagaccacattgccagtggagatgacaacagcactgctctggtcactctggaagatgaccagtctatgcatggtggaagcttgagaaaatagcaagccctgctctagtcacaccaagaactgactagtctatgca

SEQ ID NO: 3700 - DNA, 587 bp, Homo sapiens
  misc_feature 86: n = A,T,C or G
gcgacttggagctccccgcggtggcggccgcccggcaggtactgaggcagacgttgtggcggagaagggcagtggctgtagctgcnttttccgtttccagggttccgaccaggtcgttgaggacttccacatggagattggcacaggaccagactcaagacacacaactcatacgttgatgaaaaattggatatcactactttaactggcgttccagaagagcgtataaaaactagaaaagtcaggatctttgttcctgctcgcaataacatgcagtctggagtaaacaacacaaagaaatggaagatggagtttgataccagggagcgatgggaaaatcctttgatgggttgggcatcaacggctgatcccttatccaacatggttctaaccttcagtacacaagcgtgctgaagtggttggagaagagttcagtgaggacatcatgggtgagaaacttccgtaggttcaagccattctccagaaagaggcggacaaacttgggtctgtcctttatgagagcccgtaaacatgacttcttgaaggtcagcagactcccatcggcggtcattggtgaaaatcccatc

SEQ ID NO: 3701 - DNA, 619 bp, Homo sapiens
  misc_feature 11, 16, 90, 132, 133, 340, 434, 503, 522, 616: n = A,T,C or G
ccgggcgaatnggagntccccgcggtggcggccgaggtactactcgattgtcaacgtcaaggagtcgcaggtcgcctggttctatttttnatgggggaagtatgtaggagtggaagattagtccgccgtagnnggtgtacacaggccaagaaaaaaccgtatcaaaatgtaaaatcaattccacattacagccagttaaagaacaatgggaagaccaagaaggagatggcagtgacagaagaagggagaaggggaaataatgggcactaagaaagcagaaagagacatatttggagggagatggctaccgaaatctgggcttttcttagatcctctccanggaaagttatcactggaaatacccaaggccctgattgtatgcactgtgctagggagaaagacattcagatgctgaaataaaaaactagggaatnagtaaaaattggatctctaagacaaataaattgatcaaactataataataatcaaacttctaataatgnataaccctctccaagagangaacctccaagaacagctcaatggtttggttgaaaaaaaaaaaaaagagaagtaccctgccccgggccgggccgctcctagaaccaaggggganccc

SEQ ID NO: 3702 - DNA, 458 bp, Homo sapiens
  misc_feature 5, 18, 55, 82, 87: n = A,T,C or G
taccnggcgaattggagntccccgcggtggcggccgaggtacgcggggattgttnatcgaaattaacaccaggtggtgaatntagcnttttctaaggttgctcaggataaatcatttattaaataggtctgcttatcaggaggggcgtgaaggctcccaaaaggaaatgctggcactgggcccagaagccagggcctctaactcctggggttgatttcttcagtgaagttgcaccctacaaagggaatatggccaaagcggcactcaactgaaggctgatatcaggcgattagacagccatgcattctgcgtttgtctggaatggattgtagagagatggacttatatgaggactaccagtccccgtttgattttgatgcaagagtgaacaaaagctatctctacttgtctcctagtggaaattcatctccacccggatcacctactcttcagaaatt

SEQ ID NO: 3703 - DNA, 581 bp, Homo sapiens
  misc_feature 183, 556: n = A,T,C or G
ctcttttagggcgaattggagctccccgcggtggcggccgccggcaggtaccataccaactggaatttaggctttaaaaataatgtttcaaggccttttgtggtgattcatgcctgaaatcccactacttggggaggctgcggctggagaattgcttgaggctagtgagctgtgattgactgngaacttgctttggggtgcaattaaacaataaactgattttatttgggagaaacaaggaagggtgcacttaactagcaacctaagcatgatttttcagcttttgcccttagggtttaaattacaattccaaaatgttagacatactgtattttttcgttcagtgtggctttaattttcccctcttgcagtttgttctgtagtgccttttacatttggacacataagtttatgctttttagattttggttgctttcttgccaaaataagtgttaactgtgtttcaaacttgattttctttctcttttctttttttttcttccagaatgtcttatttaaaaagaaagctaaaagcatacttctaagtcagaacctntattttggtggaagacttgggatat

SEQ ID NO: 3704 - DNA, 395 bp, Homo sapiens
  misc_feature 4, 19, 20, 29, 55, 74, 75, 85, 111, 112: n = A,T,C or G
tccnggcgaattggatttnnccgcggtgncggccgcccgggcaggtacgaatttnagcacttacatgagggggnnaagtcagagntttttgaggagctgaagaaggtggcnnaggagctggaggagaagctaaacatgctcaacaataattataagattctgcaggcggccaaactgtagttccagctaactgggcggctgaggcaggagaatggcgtgaacctgggaggtggagcttgcagtgagccgagatatcgccactgcactccagcctgggtgacagagcgagactccatctcaaaaaaaaaaaaaagaatatattgacggaagaatagagaggaggcttgaaggaaccagcaatgagaaggccaggaaaagaaagagctgaaaatgga

SEQ ID NO: 3705 - DNA, 415 bp, Homo sapiens
cgcccgggcaggtacgcaatgtgatgttttcatacagtatacactatgaaacgattactataatcaaattaattcatatgtctaacaccctcatagttgccttttattgttcggtgatgagagcatttaagatccactctcttagaatgtcaagtaggatccttgcttccaaaatgccaaaggaaagaaggaacaatggtcatgccattcacttgcagcctgttcactgcaagaactgtgctcaatgcatgcccaggaataaggctattaagaagtttgtcattaaaaacatagcagaggccactgcagtgagggacatttctgaagtgagccctcaatgctcacagtgtttcccaagctgtatgtgaagctatattgctgtgcgaattgtacctcggccgctctagaactagtg

SEQ ID NO: 3706 - DNA, 416 bp, Homo sapiens
  misc_feature 48: n = A,T,C or G
ctatagggcgttttggagctccccgcggtggcggccgaggtactcatnttcctggtgtagcaacgtgtggtatggctacacttagaacatgagaacataaagccatttttatgcttactactaaaagctgtccactgtagagttgctgtatgtagcaatgtgtatccactctacggggtcagcttttagtagagagcataaaaatgataaaatacttcttgaaaacttagtttactatacatcttgccctattaatatgttctcttaacgtgtgccattgttctctttgaccattttcctataatgatgttgatgttcaacacctggactgaatgtctgttctcagatcccttggatgttacagatgaggcagtctgactgtcctttctacttgaaagattaagaatatgtatcca

SEQ ID NO: 3707 - DNA, 530 bp, Homo sapiens
  misc_feature 5, 65, 72, 77, 78, 91, 92, 100, 110, 111, 122, 137, 143,157, 163, 209, 216, 234, 238, 240, 242, 249, 250, 251, 264,278, 295, 296, 298, 299, 315, 319, 334, 344, 345, 350, 355,356, 372, 392, 399, 402, 405, 406, 409, 436, 442, 456: n = A,T,C or G
  misc_feature 474, 481, 500: n = A,T,C or G
gcganttggagctccccgcggtggcggccgaggactctgctcagcatggccacgtaggtttacangagggtnttganntgttctttttttnngacggagnctcactctgnnacccaggctgnaatgcagtggcgcantcttgnctcactttaacctncacttncctggttcaagcatcccctgcctttgcctcccgagtagctgggatnacaggcncacaccaccacgcccagntagntntnttgtatnnntagtagagacggngtttcaccatgcangcccagctggccacgtnngnnctaaagcaaggggcgngaanaaggcacagggaggnatgtggctgnnctcgnggtanntcattcggcctaaatngacctggtattaaatttcangaagganctngcnnttnctcttctagacccttctctttaaaggntaaaanattaatgtttagantgacaaagatgaattatnacaatanatctgatgacctgcccggncggccgtctagaactaagtggatcccccgg

SEQ ID NO: 3708 - DNA, 762 bp, Homo sapiens
  misc_feature 50, 51, 57, 59, 64, 67, 72, 81, 83, 92, 120, 162, 175, 193,224, 228, 252, 258, 274, 276, 301, 305, 308, 319, 323, 344,347, 362, 380, 395, 400, 407, 420, 449, 460, 473, 507, 508,509, 512, 516, 529, 535, 541, 542, 548, 549, 552, 554: n = A,T,C or G
  misc_feature 562, 577, 583, 587, 588, 592, 593, 602, 604, 610, 625, 649,673, 682, 702, 712, 722, 723, 724, 727, 736, 744, 749, 751,752: n = A,T,C or G
cggccgcccgggcaggtacagagtcaggacaggagctaccccgttatccnnacaaantnagagnganaggancatcatccncnctttacatngtgaggaaacaggggcaaggaaaagcanttgcccagagaggcacagctagacagaggggagcatcaattngaaaatccaggcnttctcactccagggcccnctctagctacataagcagagggttcggcagnaaangaggagcccagctccgaagatggnagggcnggagcccaaacattananccccttgagcacatggggccagccntganagngcaaaagcccngggncaaggaaacccggctctacancangacgtgggggaaccngggcaaggctttaaaccncaccacaccagggcngcgcngggccancaagattccctancagggagagggggacctaagaaaaaccanctggagagcanggctgcaaaccanagggggggccagcccctgcccaaagagcccgaannngcncacnaaacaaggaagangggccnaacaannggaaannggnancaaacccnttaaaaaaggggganaaaaangttnngaannccaagggcncngacccngggggaagggacggnaaaagccaaaagagccccaccccnacccccgaaaagacccgggacccngggccggtnaaaaaaaaggggaccccccnggcgggaagnaaccaaaaannngcnaaaccaacnccccccanccccnannggggggcccc

SEQ ID NO: 3709 - DNA, 563 bp, Homo sapiens
  misc_feature 32, 37, 61, 62, 75, 80, 86, 93, 100, 123, 132, 146, 148,156, 160, 162, 165, 171, 188, 244, 250, 299, 320, 330, 335,343, 347, 358, 387, 404, 423, 425, 428, 429, 434, 455, 472,477, 480, 488, 496, 514, 518, 522, 538, 543, 554: n = A,T,C or G
ccgggcaggtacttctttaagctctattcagnagggntccagccactgtttttttgtgcgnncctagccacgganggggntttctngaaaccngagaaancaggtaataaccaatcatgtcgngctcgtatnaccatcctttcaangnctgcctcngagnanacngatgancaagtaggcaaactacntctactttcaaagagccccaagggcttaatgaccccatttgcaactgagaaatgantctcgntttagaaatcattctataaatgatactgctggattgagggccgggggangatagctggaggaactgaganggacaatacnaacangagaatcnatgncaaagtaaaanaggcagcctggctaaggaaaatgagcctnagcagctacttcacaantaaagggaaatccaagcantnagnnaatantaggtgacataaataaaacancccagactaggagagtnaagtnccncggccccnctagaacnaaggggaccccccgggcngcangaangcgaaatcaagcttanccganaccggccaacncccgagggg

SEQ ID NO: 3710 - DNA, 616 bp, Homo sapiens
  misc_feature 12, 18, 42, 145, 170, 191, 193, 218, 372, 404, 470, 519,559, 571, 578, 603, 607: n = A,T,C or G
cgcccggcaggnactttntttttttttttttttttttttttntctgtcgccaggctggagtgcagtggcgtgatctcagctcaatgcaatctctgcctcctgggttcaagtgtttctcctgcctcagcctcctaagtagctgggntcaggcacgcaccaccacgcccagntactttttgtatttttggcananacggggtttcaccatgttggccaanatggtctcgatctcttgaccttgtgatctgcctgcctcggcctcccaaagtgctgggattacaggcatgagccactgcacccggcccaaaagtcttaaacctctaaatatttgtttctaatctggctcttcaaaataaattttatctgaaaacnaaacaaaacaaaacaaaaaaaaccccaccctncataaaatccctaacagcttgggaaatctactttcataaaataatacttaaactattaacaaggtngaaaggaataaaggaatttcaaaaattaatggaaggaaatgaaagagcnttttttaagccggttaataaccattgtaaaacccaaagtngggggggattangggtganaaaatttgggaataaccgatgtttnaaanttttaaaaa

SEQ ID NO: 3711 - DNA, 373 bp, Homo sapiens
  misc_feature 7: n = A,T,C or G
cgaattngagctccccgcggtggcggccgaggtacattttttcaatgtccttcatttgacaccgtttggtttagctctctttgtatgtgttcaaaaaccaaagcgttttctttcagagcctctcttgtgttatggagctcagttttgaggcacctggacttactctcagctttagaaagttgctgagaaagaatcagaacatgagaattcaaattttcctgtaaatgacgcaatttatctactgtgccctggaaatcaagctcttggtctctttctgttgagtgactttgatcatgatcatgtagagcaacattcagtctacgatggtatgattccatttcgtcagtctttgcctgctttgtttttccttctc

SEQ ID NO: 3712 - DNA, 341 bp, Homo sapiens
  misc_feature 4, 26, 28, 29, 32, 34, 42, 43, 51, 130, 193: n = A,T,C or G
gganctttttttttttttttttttgnanncanantttttatnngagcaganatcacaccactgcactccagcctgggcgactcagggagcctccgtctcaaaaacaactttttttcatccatggacaatngttgtcttgttttggtcctctttaggaggtggttttataatcagctataaaactccaataggngctcttgaatgcaggtttctgataactttggagattgggacaacagaatagaggaagaaccttcaggactcatggagagctaaatgttcatgagtatcaagcaggaattaacaggaattaactgcatggactgaaccaatctttttta

SEQ ID NO: 3713 - DNA, 427 bp, Homo sapiens
  misc_feature 3, 360: n = A,T,C or G
ctntagggcgaattggagctccccgcggtggcggccgcccgggcaggtacgcgggggcacacagatggcattttaaagtttataaatgaataatgtctgatgaaaacatcaaagctactttctagatttgtggagattgcccagataaacgaagtcacggtaaaaggctagtgtgagaaacaccaacagcaggcccatctcagatcttcactatggcaacttatgcaagaaactgttgaattagacccgtttcctatagatgagaaaccatacaagctgtggtatttatgagcctccatttcttatactactgcagtgaaccaacattggatgtgaaaattgccttttgtcagggattcnataaacaagtggatgtgtcatatattgccaaacattacaacatgagcaaaagcaaagttgacaacca

SEQ ID NO: 3714 - DNA, 445 bp, Homo sapiens
  misc_feature 6, 75: n = A,T,C or G
ctactntagggcgaattggagctccccgcggtggcggccgcccgggcaggtacccagtgcggctggaatgtcgtntattgggagtgccaccacctcagatattttggaagaaagaaagtgaatcactcactcacagcactgaccgagtgaggtaagactgcacaatgagaacctgatccttaactgttcagtcctaatgatgtatcaaaagatacattttatatagcatggaaatctatgtgtaaaagccacatagatgttttgatttttgatgaaatcaatcaaagacaaaaaccatgcgttacccaatgtaggattaagcttttagaaggaagctatgggtgtttgatctaatggtgatttcttaaaagtgtttatcattctatctaaaagaaaagatgaattcatttgctttagtgataaaagactattcagtggtttttgt

SEQ ID NO: 3715 - DNA, 386 bp, Homo sapiens
  misc_feature 256, 258, 275: n = A,T,C or G
gcgaattggagctccccgcggtggcggccgcccgggcaggtaccaccccatccccaggaggcccttttataccagaaatcccaagtccattagctacaggctgatattcagggacatcggtgtaaacaaagaagtgggatatgaactatatccctgattttttttcttttttttttttttttgagactaagcctcactcttgtcccccaggctggagtgcaatggcgcgatcttggctcactgcaacctccgcctntnaggttcaagagattctnttgcctcagcctcctaactgggataacagacacctgctaccatgcccggctcatttttttttgtatttttagtagagacggggtttcaccatgttggcctggctggtctcg

SEQ ID NO: 3716 - DNA, 446 bp, Homo sapiens
  misc_feature 72, 73, 81, 88, 111, 238, 291, 305, 317, 357, 360, 375, 399: n = A,T,C or G
acttagggcgaattggagctccccgcggtggcggccgagggaccttttttttttttttttttttttttgggnnacgggagncccactntgtcacccaggctggagtgcagnggcacgatctcagctcactgcaacctccaactcccaggttcaagtgatcctcctgcctcagcccctccagtagctggaatcacaggcacatgccaccacgcccggctaatttttgtatttttagtanagacagggtttcgccatgctggtcaggctggtcttgaactcctgacctcaggngatccacccacctnggcctccaaagngctgggattacaggcatgagccactgctcctggccccagnttntaattaattaaaagngataaagatcatttcaatatcttnttcagttcatagagttctacaatgaaggcttttcatacaaatgaatg

SEQ ID NO: 3717 - DNA, 427 bp, Homo sapiens
  misc_feature 28, 68, 72, 269, 292, 410, 423: n = A,T,C or G
cttagggcgaattggagctccccgcggnggcggccgaggtacttcttttttttttttttaagagatgntatnttgctacattggccaggctggtctcgaactcctggcctgaagtgatccttctgccttggcctcccaaaatgctgagattgtaggcatgagccgccatgcctagcccagcttgtctttttgtttacttaccagtgtttttcagagaacaaaaattttaatttgatgaagtccaattaattaaatttttaaaatagagngtgatttttttgtcatgtctaanaaactattgtctagtcctaggtcctaattctcctttgttttcttctaaatgttttattattttaccatgttaacgtttagatttatgatctattttaagttttttttaagtatgaggnttatgttttttgnttgg

SEQ ID NO: 3718 - DNA, 462 bp, Homo sapiens
  misc_feature 1, 4, 14, 28, 71, 76, 103, 120, 310, 363, 425, 431, 441, 451: n = A,T,C or G
nccngggcgaattngagctccccgcggnggcggccgaggtactttttttcttttttttttttgagacaggnttttnactgtgttgccaaggctggagtgcagngtgtgatcacggcttantgcagcctccacctcctaggctccagcaatccccccacttcagcccctcaagtagctgggactacaggtgcatgccaccatgcccagctaatttttgtatttttttgtagagacagggttttgctctgttgctcaggctggtcttgaactccaggactcagtctaaccaccagccttggcctctcaaagngctaggattacaggcttgagccaccatgctcggcctatatttccttcaaatgngtgttttgcgcttaagtatttcttctgttggccaaatctctgatttcccattttaattaagncttaangtttgcaaantatttttttnatctttttaag

SEQ ID NO: 3719 - DNA, 297 bp, Homo sapiens
  misc_feature 3, 4, 15, 35, 56, 92, 94, 95, 102, 106, 111, 112, 121, 203: n = A,T,C or G
ttnnagctccccgcnggggcggccgaggtactganccaaagggatatgtcaaaacncccttttttttcagggaccaggcaggagaagagagncnnaacaccngggnaatgnngggaaatanatgtcataatgctcctttttggcagaagagttacattaccagggtgtcaaacccagcaatatgtcacaattgcttatgtggncggggaacaggcaggagagtcacataacctgggcatagggctcagagacatgtcccaacgccttccgtaggcagtgccaaggcaggggaggaga

SEQ ID NO: 3720 - DNA, 436 bp, Homo sapiens
  misc_feature 40, 386: n = A,T,C or G
atagggcgattggagctccccgcggtggcggccgcccggncaggtacgcgggaaatcaaggggtcttaagagttgtttccttctgaggctggaagagaatctgttctgtgcctctctcgtagctcctggtggtttgctagaagtctttggcattccttggcttgtgacagcataactctgatattcatatggctttctcactctatctctgtatccaaatctccccttttcacaaggacttgatcatattggattaggcccaccctaatgacctcaccttaactagatcatctgcaaagaccttgtttccaaggtgctagggtggtgggtggagacaggggagagactattcaattcataacacctaagtattgtgtctccttagnccgtttcagtccccacccagccctgacttgactctcagctgctttggggt

SEQ ID NO: 3721 - DNA, 702 bp, Homo sapiens
  misc_feature 20, 32, 47, 68, 70, 71, 78, 80, 107, 110, 113, 123, 171,183, 185, 187, 193, 207, 229, 258, 272, 299, 406, 424, 484,595, 701: n = A,T,C or G
taccaggttttaaaatcccnccaatttttttngaatgccttttggcntaatggggaaaggcccctaangnngagaatngnaaattaccaaaaaaggaaccatttctnggnggnaaaaaaaggnaaagggggggggaaaaagggaaaaagggggaaaaggaggaaatggggncctccaaggtangnangaatgnaaacctccagggtngccaagaaaattccttgaggtnctcaaagcaccaagggggcttacctaatngccaagaaaaggtngggggtaaaaagggggaaattggaggnaaaccacctccaaggggaagccttcggggtggggggccaccaccaagttcaattggggggggacctaaggggccaaggtttcccaaagggggaatttgggaaaaaantaaccggggattaaaagnccaagggttccgaaggaaaaaaaaggccggaccattcccaaggaaggaaaccttttggtnaagaattggaaggttgccttcccggggggggtttttgggtgggaaccaatttttggaaaaaaaaaattggaaggaaccaaaatgggccccttggcccttcaaattaagggnccctaaggggaaaaaaaaccccccccaaattaacccgaaccaagggggggaaggggccaccaaggccccattaaaaagggaagggaaggttccaaaaaaacctttng

SEQ ID NO: 3722 - DNA, 134 bp, Homo sapiens
  misc_feature 1, 60, 69, 108: n = A,T,C or G
ncgaattggagctccccgcggtggcggcccgaggtacttttttttttttttttttttttngattattantttaaaaggggagataggtaggagtagccgtggtaaggncgatgagtgtggggaggaatggggtg

SEQ ID NO: 3723 - DNA, 433 bp, Homo sapiens
  misc_feature 62: n = A,T,C or G
aattggagctccccgcggtggcggccgaggtacgcgggggctcactgcaacctctgccttcntttttcaagcaattcttctgcctcagcctcctgagcagctgggactacaggcccgtgccccactacgcccagctagtttttgtatttttagtagagatggggttttatcatattgaccaggctggtctcaaactcctgacctcgtgatccgcctgccttgtcctcccaaagtgctgggattacaggcatgagccactgcgcccagcccaagactcctatttttaaaacctgaaaaaattttcatgaatgaaatgcagatagaatctgtaagtcacttgctacattaaaatactcaggcaaagggaggtatttctatacattatgatgtgtgcctccaagcttgtttcagaaataaatattttaaaataggt

SEQ ID NO: 3724 - DNA, 372 bp, Homo sapiens
  misc_feature 8, 36, 53, 57, 65, 67, 75, 78, 107, 118, 121, 126, 131, 144,161, 166, 175, 191, 202, 204, 205, 206, 219, 221, 232, 261,265, 267, 269, 276, 280, 281, 299, 304, 310, 319, 322, 327,363: n = A,T,C or G
gggcgaantttagcgcaccgccggggcggccgaggnactttttttttttttgntttnaacccttntnttttttancanagacggggtttcgccaggggggccaggcngggctcgaacnccnggccncaagngatccacctgccncagccccccaaagggcngggantacaagggngagccaccgcaaccgnccctgtatacncnnnacccacacagcananccacattgccnacaacacagggggggcccaaaaaacgccnaaangntngggggcngaanncaaaataaataaagaccngcagnttatangcataaaancanaaacnctaaggggatcactaccacattgccaaatccaccanaataaaagg

SEQ ID NO: 3725 - DNA, 445 bp, Homo sapiens
  misc_feature 82, 100, 140, 143, 148, 191, 240, 331, 375: n = A,T,C or G
ccccgcgggggcggccgaggtacactatacggaggtattaaggcccctttttttttgacttgaagttgttaaaatgatattntagagttttgatgtgctnaaaaactgggaattgagaattttttttttttattttttgnttnaagtnaaaaattaagcacaagatgccaggcatgggaggatcactttgngaggccaaggcgagaggattgcttgagcccaggagttcaagaccagccnggagagcatagcaagaccccatctctgacaaaaaaaattagctggatgtggtgggcatgcctgtaatcccaactacttgggaagctgagangggagcattgtttgaagccaggaggtcaaaactgcagtgagtgntgatcatgccactgccctttcgcctagatgacagagggagacccccacaaaaaaaaaaaaaaggacctgc

SEQ ID NO: 3726 - DNA, 348 bp, Homo sapiens
  misc_feature 61, 67: n = A,T,C or G
cgaattggagctccccgcggtggcggccgcccgggcaggtacaggctatggtgaagttttnttgttnacttggatgccaggtaggcatgtcttcaggttctagtcacggcagtggtaggccaaatattcctttccttgggacctagggcagtgtataatggcattagtgttggctagtccagatagctgattcttgaacctctaggtggcttgcctggttactggtagtgacagcagtaggccagttgggtgggcaggtttttgggctcctgggcatgaagtatgctatgggcaatatcagtagccgtggcaggacaaatctctggcttccgagttgtctatcccggt

SEQ ID NO: 3727 - DNA, 413 bp, Homo sapiens
  misc_feature 2, 67: n = A,T,C or G
gncgaattggagctccccgcggtggcggccgaggtacttaccatcttgtctctcagtaggttcatgntacttaagaggaaaatgtttaatatttgctttatctattagatcagaacctcttcgaaaaaagaagaaggtagatcctaaaaaagaccaagaagcaaaggagcgcttgaaaaggaagatccgaaaactggaaaaggctactcaagagctaattcctattgaagattttattacccctctaaagttcttggataaagcaaggtaaggatccttctctagggatgaagtcctcaggacaaaggagtaatatcaacttcaggtagttgtgtctgtagttcacacctgtgatagtcattggtcagtaggcttgagctgacttggccctaatgagtccttgctccttttgg

SEQ ID NO: 3728 - DNA, 442 bp, Homo sapiens
  misc_feature 2, 40, 172, 288, 310, 311, 314, 322, 328, 329, 332, 347,355, 356, 357, 363, 371, 375, 381, 382, 384, 388, 389, 392,404, 411, 422, 423, 431: n = A,T,C or G
gnagctccccgcggtggcggccgagttgtgatgtttgccncacaacaggggttttttggcaatgtctggagacatttttattgttatagctgaacaggaaagtgctactggcatctgggaggaggctgctaaacatctcacaatgtgttaccctgtcccaaatgtcagtcgngttgaggctgagaaacatggtttaaatgagtcagaggctggccacagtggcacgtgcctgtagtcccagctactcaggaggcttgcggtggaagattgccttaaccccaggagttncaaagactagactggggtgatnntancaagaccntcttgnnttnaaaataaagaaggtnaaaaaatnnnttgganttaaaagncttngtaaanntncccnnccntttcaaaaattnaaagggnttttaaacccnnaaaaaaantttaaaaaaaa

SEQ ID NO: 3729 - DNA, 555 bp, Homo sapiens
  misc_feature 1, 10, 35, 282, 291, 298, 303, 308, 309, 311, 317, 319, 322,328, 334, 337, 340, 341, 365, 370, 378, 380, 382, 407, 408,418, 421, 422, 429, 440, 441, 449, 450, 451, 453, 454, 460,465, 467, 468, 470, 485, 490, 500, 508, 512, 519: n = A,T,C or G
  misc_feature 530, 531, 538, 539, 540: n = A,T,C or G
nccccgcggnggcggccgcctgggcaggtacagtngcacaatcatggtttactgcagcctcgatctcccaggctcaagtgatcctcctacctcagcctcccgagtagctgggaccacagacatatcccatcgcacccagtttttgggttttttttgtttttttgttttttgttttttgtttttgtctttcagagagatggggtctcactatgttgcccaggatgatatcaaaactcttggactaaagcaggtcctcctgccttgggccctcccaggggggtngggaataanagggcantgggnagccnncntaatcnanggngggggnttttanacntcnnaaaaaaaaaaaaaaaaggcttttnccctntttttttngngngtttaaaaaaaaaaaaaaaaaaaanngggggggggnggnnttttttnaaaaaaaaaanngggggggnnnannaaaaanaaacncnntncccccaaaaaaaaantttgngggggggggngggggggncccnccccccnaaaaagaaaannttgtggnnnccccccccccccccc

SEQ ID NO: 3730 - DNA, 496 bp, Homo sapiens
  misc_feature 9, 56, 70, 95, 115, 143, 227, 264, 282, 285, 286, 299, 300,301, 309, 320, 330, 346, 347, 348, 350, 351, 352, 364, 366,367, 379, 380, 387, 388, 395, 396, 398, 418, 428, 432, 435,448, 451, 454, 463, 468, 472, 473, 474, 475, 478, 479: n = A,T,C or G
  misc_feature 484: n = A,T,C or G
ccccgcggnggcggccgcctgggcaggtacaacttgaaacatgagcttttttgggncacatgcctgaggnagtgacaggccagctttggaagagnggaagccctagttccaaatncaagcatgctttgagtataaattaagtntacctctttttgcacagcaacatggccaatctttcctaagctgctcagctaacaagaaaagggaatcaaactgctaagaattcnaaacttcaaccagccaaaagggtaaagtaagggaagncttaataaaacctaattncannccccctaacccannnaaaccctngaaaaattaangcggggggtncttttaaaattttcannnannnaggggggggggncnnccctaagaaacnngggggcnntgcgaanncnggaaaaaaaccccccccccnaaaaaaaaangggnaanggggggccccccnctnctnggggggggngacanctcnnnnggnnaaatngggggggggggg

SEQ ID NO: 3731 - DNA, 265 bp, Homo sapiens
  misc_feature 40, 120, 179, 182, 204, 206, 227: n = A,T,C or G
gtggcggccgagggactttttttttttttttttttttttnggaaatttccctaaaagattcctgcttccttctggaacaacagagcaacagggcagttgtgatgttgggtttagatgacncttatttaggagatggagcaataagatcagaggtcttctaaggattctggggagtcagngtntagatggaaaccaaatatgagngngtagccccagaaactgctcanataacctggtcagaaactaggcaagctggcaggggttg

SEQ ID NO: 3732 - DNA, 269 bp, Homo sapiens
  misc_feature 50, 55, 65, 68, 75, 81, 84, 87, 95, 107, 119, 124, 129, 211,219, 222, 252: n = A,T,C or G
gggcgaattggagctccccgcggtggcggccgcccggccaggtacgcggngtcgntgatgaaatngangccaatnttgaanagntcnacatcagngaggatgacatngatgatggattnagganactgnttgcccagttggcaggagagctcccacggggggccaataactatgctctggttatgtgtccacaggatgcggagatccctgnctttgagntgnagaccatcctgagaaggggtctagcaaagngccaagatatcaagtca

SEQ ID NO: 3733 - DNA, 116 bp, Homo sapiens
  misc_feature 38, 47, 54, 57, 59, 61, 68, 69, 90, 101: n = A,T,C or G
ctatagggcgaattggagctccccgcggtggcggccgnggtacccantacttangtngnantgttggnncgaaagtaaaaacactacctnttttgagactntgcccagggtcctgt

SEQ ID NO: 3734 - DNA, 549 bp, Homo sapiens
  misc_feature 9, 79, 339: n = A,T,C or G
atagggcgntttggagctccccgcggtggcggccgcccgggcaggtacgcgggggcagtttgaatcgcggtgcgacganttttaggtggtgggatctcaccgtgggtccgattagccttttctctgccttgcttgcttgagcttcagcggaattcgaaatggccggcggtaaggtggaaaggactccggaaaggccaagacaaaggcggtttcccgctcgcagagagccggcttgcagttcccagtgggccgtattcatcgacacctaaaatctaggacgaccagtcatggacgtgtgggcgcgactgccgctgtgtacattttcctgaagaagcttanatatagttgtgttaagtattttcccctggaatacgccccattatactttctcatggatagtcagtttggtgctttttaatcctctccttttaaaaaagcattttttggttaaacatttttggagtctgttgtgtaataagtggtgagtaaaacagatctaagtcctggttcttatggaacttatagtctactaccgtttttttttttttt

SEQ ID NO: 3735 - DNA, 658 bp, Homo sapiens
  misc_feature 15, 72, 73, 88, 163, 348, 450, 496, 581, 629, 631: n = A,T,C or G
cccactatagggcgntttggagctccacccgcggtggcggccgaggtacttttttttttttttttttttttnngcattattatgaggntttccttaaaggttggggaacttgggcgactttggctaatgaggagctctgtgccttgagccccccaggccatanaatagtaaatagtctgtgctccagccctgcagtgtgaggttccagtcctgtgggctccacacccatcacctgtatcaggaggctcatgtctcaccctgtcttcttgccagccttgaggatggagtctgagcctccatcgtgcaccacgcagggaggacagcggacttgttctccgtggtcatggnccaacaaaggggaagggcagttcaaccgaagtgctgagggacggttgggagccttgttttgtatcctcatcctcaggaaaaaaacaggaaaagtgcggtggncaaatgggaggagaccaacgtgcaaactgtcggctcaacagactgnggaagtttctgttcttggttatgggcgggggggggcgggctcaaaaatcttattcaaaattttgctttcctcccccactggttgnccttttcatagacatctcacccatgaatagcagggaaatgagtccctntnaactattcttttaagaaccaattaaaa

SEQ ID NO: 3736 - DNA, 543 bp, Homo sapiens
  misc_feature 65: n = A,T,C or G
ggcggccgcccggcaggtacagctcccagtctactgatgtttaaggatggtctcggtgtttaggnccactagaataaactgagtccaatacctctacacagttatgtttaactgggctctttgacaccgggaagaaggtggcggggtttagggtgcaaacttcaatggttatgcggggatgttcacagagcaagctttggtatctagctagtctagcattcattagctaatggtgtcctttggtatttattaaaatcaccacagcatagggggactttatgtttaggttttgtctaagagttagcttatctgcttcttgtgctaacagggctattgctaccagggactttggacatgggggccagcgtttggaaacctcatctagttgttttgagagataggccactggccttggccagggccctacagtctgggttaaaactccaactgccactttttctctttctgacacataagaagtgtaaaaggttttgtcaggtcaggtaagccccagggctggggctgacatggggtttttttctt

SEQ ID NO: 3737 - DNA, 523 bp, Homo sapiens
ttagggcgaattggagctccccgtggtggcggccgaggtacgagatgccacggcacgaagtctacgttctcctgatccgaaacatctttttgaaaatatcaatcattggcattctttgttactattggctcaacaccgtggccctgtctggtgaagagtgttgggaaaccctcattgccagcatctaccggctccttctgatggattttgtgttctctttagtcaattccttcctgggggagtttctgaggagaatcattgggatgcaactgatcacaagtcttggccttcaggagtttgacattgccaggaacgttctagaactgatctatgcacaaactctggtgtggattggcatcttcttctgccccctgctgccctttatccaaatgattatgcttttcatcatgttctactccaaaaatatcagcctgatgatgaatttccagcctccgagcaaagcctggcgggcctcacagatgatgactttcttcatcttcttgctctttttcccatccttcac

SEQ ID NO: 3738 - DNA, 434 bp, Homo sapiens
  misc_feature 2, 4, 19, 22, 24, 33, 74, 77, 178: n = A,T,C or G
ancnccccggagctccacnttngnggcggcccnggtactacctgagtctgggcaatttataaacaaaaggggtncangtgactcacagttttgcatggttggggagacctcaggaaacttacaatcatgacgaacctcggggaacttacaattgtgacgaaaggcaaaggggaagcanccttcttcacaaggtggcaggagagagtgcagggaaaactgccacttttaaaaccatcagatcttgtgagaactccctcactatcacaagaacagcatggggaaacagcccccatgatccaatcacctcccaccaggtccctcccctgacacgtggggattacaattcaagatgagatttgggtggggacacagagccaaatcatatcaagcctcctaacttcacatttggtaaatttgatttctggtcctgcccg

SEQ ID NO: 3739 - DNA, 486 bp, Homo sapiens
  misc_feature 17, 53, 56, 87, 90, 91, 95: n = A,T,C or G
cccggagctccaccttngtggcggccgccggtacatgcaaaaaaaaaaaaaanttnggatgaatctagaaccatgttgagtgaaagnttnnagangcaaaataataaatacggtatgactccatttacatgcaatcccagagcaggcaaactaatctatggtgataggattagaaaggttccctcagcagggtgcagtagctcacacctgcaatcccagcactttgggaggccgaggtgtgtggatcatgaagtcaggagatcgaggccatcctggctaacatggtgaaaccccatctctactaaaaatacaaacaattagcctggtgtggtggtgggcacctgtagtcccagctcctcgggaggctgaggcaggagaatggcatgaacccaggaggtggagcttgcagtgagccgagattgtgccactgcagtccagcctcaaaaaaaagaaagtggttccctcagtgagaaggaaagggggttt

SEQ ID NO: 3740 - DNA, 554 bp, Homo sapiens
  misc_feature 15: n = A,T,C or G
gcgaattggagtttnccgcggtggcggcccgcccggcaggtacttaaatattatatattttccatttcataattgttttcctttctctgtggctttaaagtttttgactattttacaatgttaatcactaggtaacttgccatatttctggttctatattaagttctatccttaatgctgttattataaagctggtttttagcatttgtctgtagcaatagaaattttactaagtctctgttctcccagtaagttttttcttttctcagtaagtccctaagaaaacatttgtttgccactcttactattcccaatcttggattgttcgagctgaaaaaaaatttgatgagaaacaggaggatccttttctggtgaatataggttcctgctttaagaatgtggaaatccattgctttatataactaatatacacacagattaattaaaattgtgagaaataattcacacatgacaaggaggtaacatgcatgagttttgaatttttttaaaaacccaactgtttgacaaaatatagaacccaaattggtacctcg

SEQ ID NO: 3741 - DNA, 472 bp, Homo sapiens
  misc_feature 9, 15, 28, 80, 81, 88, 94, 128: n = A,T,C or G
ccccggagnttcccnttgtggcggccgnggtacggtattctgtgagctggggatagacagataccctttcattgtgggcnnggggttnatgtancaaaggaccaattttcctggagatcctattacgngaagggacttatactggacacatcatggagaaaatcagaaagaaggtgcttaataagacccactcctggatgcggccactctcaattctcagtgtctttgggaagcaaggttcgccatccacttgtctaaacagatgatgatagcagaggtgctgcacaccttctccctgtgacttgtgaatgcctttcatgctcccaaataaggaactcctctcactgctgtctgctctgagctgtatttcattttgatagccatttgcaggagacacctttgaactccatgcaatgtaaaagatgtcgttgagaaattcttcaatggaatttcttccccttttcccccaccc

SEQ ID NO: 3742 - DNA, 350 bp, Homo sapiens
  misc_feature 34, 37, 41, 45, 49, 69, 70, 71, 97, 107, 111, 115, 138, 139,152, 171, 176, 195, 203, 204, 209, 210, 219, 244, 250, 255,260, 277, 321, 332: n = A,T,C or G
ccggcggccgcccgggcagttacttttaaggatnaancccncccntttntttcgcccaaaaacaaaacnnnatggaaaaaccgacaccaaaaaaggngagggccgcngaanaccngacaaaaccaaagggaaagacannagcgggggaaagnaagaagaaaaagggaaatnagganaaggcttccggggagacancacaaaannaaaanncaggaagcngcggaaacaaaaggggggccttctncaaaangaacnccccncggggaggcgggccctncccccgggaggcgggcacaacacgggggaacaacccacacaaanaaccacgggcngagcagggccgaaaaccg

SEQ ID NO: 3743 - DNA, 471 bp, Homo sapiens
  misc_feature 20, 57, 93, 98, 112, 131, 149, 168, 204, 276, 301, 314, 326,348, 380, 397, 410, 417, 449: n = A,T,C or G
gaattggagctccccgcggnggcggccgaggtacttttttttttttttctttgtganggacgtcttactctgtcgtccaggctggagtgcagnggtgngatcacagctcagngcagtgaactcctggactnaagccaccctcccacttnagcctcccaagtagccggnacaacaagcacaagccaccacacctggctaattttnaaaatattttgtagcgatgggggcctccctgtgtttcccaggctgatctcgacctccgaggctcaatctatncccccacctcggtctcccaaagtgntgggattacaggnttgacaactgtncccggcctgggctttttggaangagtcttcctggtcccgacagttctcctgcangtccttgtggaggccantctttgttttttnatgaccnaaattttgcttttttggagtaagaggcctggnacccctgggagctggttttggg

SEQ ID NO: 3744 - DNA, 284 bp, Homo sapiens
  misc_feature 43, 58, 97, 195, 259: n = A,T,C or G
acttagggcgaattggagctccccgcggtggcggccgcccggnccagggtacgcgggngacagaagcttctgggtatggggctggagaagggtcggngagatatttccgttaggacatcgctgaaacacagactgggatcaaactgtgctcatagtcctaaggatctccagcaccctgccggtggcactactganagacgaggtgccagggtggttcctgaaagtgcctgagccccaacttatcagcaaggagctcatnatgctgacagaagtcatggaggttt

SEQ ID NO: 3745 - DNA, 415 bp, Homo sapiens
  misc_feature 7, 10, 38, 49, 57, 81, 396: n = A,T,C or G
tccccgnggnggcggccgaggtacaaactatgcatatnataactaccangttttatnaggtcaagactaaatcaaaaattntcaaggacttttctaaaaatttttttagcataaactgtttcctctaacttaaacttctcttaagtgaacctgtctttccactgggatgactgtctacatgctcaggaatcctgaattcatgactatgttcaactcccacgaccatttttaaatcatcaaaatggcagcaaatgtcattacctggaccaaaaagctgcaggttttgtggcaaatgggaaatgtgttatagaatatgactgggaaagagggatttcttagtgctgcccagaattaattcagcaaacactgaacattactacgtgccacatataggancatactgcatttcgaagcg

SEQ ID NO: 3746 - DNA, 266 bp, Homo sapiens
  misc_feature 2, 35, 42, 47, 51, 72, 74, 75, 121, 151, 155, 168, 171, 177,202, 207, 216, 229, 244, 259, 262: n = A,T,C or G
gncgaggcactaaataatttgatcatggcattgcncacattnttttntaancggagagtgaatattttattngnngatgtattcttcacttattaatgatgaggtcaatgaactgatgcanttattaaaaaaaaaaaaaaacagacaaccntatnaaggaaaaaacanaancaaaancaaaaaaaaccaaacgtccattctnattcngaatctgcngactggagggaanccagtggtcacaatnccaccatcaaataanaancaac

SEQ ID NO: 3747 - DNA, 450 bp, Homo sapiens
  misc_feature 40, 47, 52, 53, 54, 56, 58, 60, 63, 64, 65, 68, 84, 87, 91,97: n = A,T,C or G
cttagggcgaattggagctccccgcggtggcggccgcccnggccggntccgnnnanantnaannnccnggataaacaggttcgnaangccngatggngagaatagagctcgcttccttccagggaaagatctgaccgaaaaagaaatgatccaaaaattagacaagctggaactacaactggccaagaaggaggagaagctgctggagaaggatttcatctatgagcaggtctccaggctcacagacaggctctgcagcaaaactcagggctgcaagcaggacacactgctcttagccaagaagatgaatggctatcaaagaaggatcaaaaatgcaactgagaaaatgatggcttttgttgctgagctgtccatgaaacaagccctaaccattgaactccaaaagggaagtcggggagaaagaagacttcatcttcacttgcaattcca

SEQ ID NO: 3748 - DNA, 274 bp, Homo sapiens
  misc_feature 2, 7, 26, 31, 32, 33, 35, 56, 59, 64, 67, 68, 78, 83, 90,127, 128, 130, 135, 141, 142, 145, 179, 252, 257, 270: n = A,T,C or G
tncattncaacttataaaacgtccanttttnnntnaaaggagaaattatggcaccnggnctttnccnnttctatcagngcgangataaangattatgattcaaactacatttctcttttctaggctnngncccanaaaaanntgngcagtttttcaacattagaattcttaattctatnggaaacaaaacaaaacaaaacaaaacaaaaacaaaaccaaaccagacctcaagggcaacaaatctattggganattgnttacgaacaaagnccac

SEQ ID NO: 3749 - DNA, 366 bp, Homo sapiens
  misc_feature 1, 38, 62, 66: n = A,T,C or G
natttagctcaccgcggtggcggccgcccgggcaggtncgcgggcaaccatcaagcagctcntttncccagcacttctacctgaatttcaccatcaccaacctaccatattcccaggacaaagcccagccaggcaccaccaattaccagaggaacaaaaggaatattgaggatgcgctcaaccaactcttccgaaacagcagcatcaagagttatttttctgactgtcaagtttcaacattcaggtctgtccccaacaggcaccacaccggggtggactccctgtgtaacttctcgccactggctcggagagtagacagagttgccatctatgaggaatttctgcggatgacccggaatggtacct

SEQ ID NO: 3750 - DNA, 336 bp, Homo sapiens
  misc_feature 41, 53, 54, 69, 79, 117, 288, 295, 297, 323: n = A,T,C or G
cgaattgtagctccccgcggtggcggccgcccgggcaggtncgtgtcactttnngtatctcattttttngtagccatgngcatagctaaaaatgggtttagtgagtgggtaactaangagatagaaagggagaaaggatattgggaggaatcgtagtctttgctacaaggtaataccgtataattttttaaatgataaagtcgtataagtaagggtcaaaagtcacttgtagctaactttcattagttccaccttttccttgcctagcacagttagcatggtcttggnatctagngnaaatctgatcttatccaaacatgaanttgttacttttta

SEQ ID NO: 3751 - DNA, 435 bp, Homo sapiens
  misc_feature 3, 26, 34, 35, 45, 59, 60, 62, 63, 70, 71, 73, 82, 96, 97,103, 106, 107, 121, 124, 134, 137, 147, 164, 188, 217, 221,222, 225, 227, 232, 238, 239, 248, 262, 266, 269, 282, 283,291, 292, 297, 307, 315, 317, 320, 321, 329, 330, 331: n = A,T,C or G
  misc_feature 332, 337, 338, 339, 345, 346, 349, 350, 354, 356, 358, 362,367, 370, 380, 393, 401, 418, 419, 422, 433: n = A,T,C or G
gancgcccggcggccgcccgggcagntacagatnnagatgaaaancaccagaatgtagnncnnctaggcnnanatctttggngggagagtcggggnnacaccngannggccagggcgaacntcnaacctcaagnganccacccgccncagcctcccaaaggganaggaacacaggcatgagccaccgngcccactgagaattaaaaacactttatgnaagnnaantntttangaaagnnatctagctntgccagaccaagtntggnagnaaagggaaaacannaaaaaagnnggaancctccaaaanctggggcncnaannaaagaaannnnaaggnnngaaccnnggnncagncnancaanccttnaanaaaaaaaaanggcaagggctttnccaaaagngaaacgggaaacaaganncangggaaaaaagnaa

SEQ ID NO: 3752 - DNA, 427 bp, Homo sapiens
  misc_feature 29, 36, 46, 376, 391: n = A,T,C or G
ggccgcccgggcaggttcggcacagaggntgacttngctgtttttncttctaccaagctggcccggatagaagaaccaaagagagtgctgctctacgttcgaaaggagtcagaagaagtctttgatgccctgatgctcaaaaccccatctttgaagggcttgatggaagctatctcagacaaatacgatgttccccatgacaagattgggaaaatattcaagaagtgtaaaaaggggatcctggtgaacatggacgacaacattgtgaagcattactccaatgaggacaccttccagctgcagattgaagaagccggggggtcttacaagctcaccctgacggagatctaaaggcctgcgggccacagctccccangagttcagtgcaggngtttctagatcttacggtttggcaactgcaggtaac

SEQ ID NO: 3753 - DNA, 452 bp, Homo sapiens
catacttagggcgaattggagctccccgcggtggcggccgcccgggcaggtacattccactgcagtctggttgatggctttggccttgaggctaggtgcaggtgggcgaatccctctggtcataacatgctcaaatgccagagggctatcccccaagtcagtcttggcccaggcagaaatctcataggatgtatgagctgtcagattgccaactttgtgtgacaatatgcttcctcggaagttcaaagttctcctctcttgcttgtgggtgtcaaatgcccagaaaaggttcaccacatagccattcacctgccgagaaccaagaagcatgttagatgaacaggctagtcatggggcacactaaatacaaaaggcaggattaaaaatacacctcttttcctggtctttcttgggtatctcatttttacagtaacaggttggttttttaaaaa

SEQ ID NO: 3754 - DNA, 396 bp, Homo sapiens
ccgcggtggcggccgcccgggcaaggtactcagtttggtcttctttcaggtgtaggataacttttgttccacgacccataggttcacctgcaagagaagaaagaaaaattgacttaataatacattcaatttagtgcccaacgccatgcctaacacccttataacgtgtctataaagcaaggtttgccgttactacagatgcaaaggccaccacagcagaaccttttgggcaaggtgcctcgcccaaaagaaccgcccaccaagtcatgccattacactaattaagtgctctagcttgttcccgatcgttgggcaaacacaaattctgtaggcttcaccgcatccccaggggtccaagggttgcagcaccccacccttccaccgctcacttaacca

SEQ ID NO: 3755 - DNA, 619 bp, Homo sapiens
  misc_feature 5, 28, 72, 122, 236, 249, 271, 285, 293, 297, 298, 312, 330,381, 406, 408, 410, 415, 418, 420, 427, 429, 463, 465, 479,483, 494, 496, 497, 513, 515, 527, 531, 545, 549, 579, 592,599, 602: n = A,T,C or G
ccggncaggtacgatcttggctcactgnaacctctccctcccgggttcaagtgattctcgtgcctcagcctnttgagtagctgggattacaggcgcgtgccactgcgtccggctaatttttncattttttagtatgagatggggttatcaccatgttggccatggctgatctcaaactcctgacctcatgtggtccacccaccttggcctcccaaagtgcttggggtattacaggncgttgagcacacncgcgcctcatgctctacaaagncaattttttttaanaaaaactngacnncccttatttactgnataaaaacttcctcttgntttaaaaaattctcttatttttacctaattttttaaaaaggattaaaggtntttaattttttttttttttttaaantnancaaantantntttcctngntttaatttgggattaaaaaaatttttaaaagggncnatttttttcatttngccncttttttggcnannaaattttaacttccantnaaccttaacccntaanaccaatggggaaanaggnaaaggggttttttaaatttattttttcaanaattgggggattnatttttnatnttctaaaaaaattaaaa

SEQ ID NO: 3756 - DNA, 406 bp, Homo sapiens
  misc_feature 68, 79, 104, 122, 127, 141, 152, 176, 189, 190, 205, 211,216, 221, 227, 250, 255, 259, 279, 287, 288, 291, 306, 322,346, 349, 373, 401: n = A,T,C or G
ccgggcaggtaccgcgggggtgctgggtggaaaaggctttttagttattggctaattacttgaaaagncatcaagagtncatataactagacctgtccttggancaaatttttatctttttncaaanatacctttgatggnttatttcatgngagtacctttgctgaagcagcttngtgatcatatttnngtttatgtaacccantccatnttggnatacnttggcnccctgccaaaaaggtttcaaacnttttncccntattattaacatttattttngtctagcnntgnatattctatttgggnaaacttggctttaacnaattcttaccatctcatcccattnccnccaagtaaattaggggaaaccaantttattttaaaaagaaattatattggcnaccgg

SEQ ID NO: 3757 - DNA, 535 bp, Homo sapiens
  misc_feature 153, 154, 164, 165, 167, 171, 172, 173, 175, 185, 186, 188,189, 190, 193, 201, 203, 204, 208, 212, 214, 215, 216, 218,219, 220, 223, 224, 225, 229, 230, 231, 235, 236, 238, 242,243, 244, 248, 252, 255, 260, 264, 266, 269, 272, 282: n = A,T,C or G
  misc_feature 287, 288, 289, 292, 296, 297, 298, 299, 300, 309, 310, 312,317, 321, 322, 332, 351, 371, 377, 387, 406, 411, 414, 421,428, 431, 436, 445, 447, 450, 458, 462, 465, 469, 478, 479,480, 499, 512: n = A,T,C or G
ccgcggtggcggccgaggtactttttttttttttttttttttttttttttcttttttttttttttttttttttttttttttttttttttttttttttttttttttttttttttttttttttttttttttttttttttttttttttaaaaaaannaaaaaaaaanncntttnnnantttaaaaaanncnnnttntttttatncnnaaanaccntnnnannnaannntttnnngggnngngacnnnaccncccnttnaaaanttgnanaanagncccttttttncgggnnnggntttnnnnnaaaaaaacnntnggggngggnngttttttccngggggggggagtttttttngggggaaattttaaccgccncaaccncaaaaagggngagaaaaaaagggaacttngaatnttnccccccnggggggnccnctttnaaaaaaaangnccncaaaaaangggnccncaancccaaaaannngcccccgggggggggtatnaaaaaaaaaaagnccccccccccaaaaaaaaaaaaa

SEQ ID NO: 3758 - DNA, 354 bp, Homo sapiens
ccgggcaggtactttttttttttttttttttttttaaaaaagagagtatttcaaagtggaaataaataggttgaaactgttgagaggtctaattagatgagaactaaaacatcctttggatttggtaacagagttacaactgcatttttattgaaaatgaaaatgcttaattgagagtgtatataaacttctaggtaaagatggcaaattgaactcatgcatctaattttgcttgttcctgatgcctctcttatacgataaacagatttttttaatggagtctcgctctgtcacccaggctggagtgcaccatctcagctcactgcagcctccgcctcctgggttcaagtgatt

SEQ ID NO: 3759 - DNA, 238 bp, Homo sapiens
acagttttccctcagtttttttccccttccttacccctacccccatcaaatacagcccaaccaaataactgtgttcttaatttaaaggaaaatggcagacttgatacctgctgaatatttcgtgtagacagagtatgacaatgaatgagatccccagtcattgcccttgtaagcctgggcaacaagagcaaaactcagtctcaaaaaacaaaacaaaaaacctgttggtatagtacct

SEQ ID NO: 3760 - DNA, 233 bp, Homo sapiens
  misc_feature 4, 8, 19, 20, 21, 25, 28, 32, 33, 34, 41, 42, 46, 47, 53,61, 62, 63, 64, 66, 68, 69, 76, 77, 94, 95, 132, 137, 138,139, 140, 141, 151, 152, 165, 166, 167, 168, 169, 170, 215,222: n = A,T,C or G
aatnacgnactcacttatnnngggnggngggnnncccgggnnaaanntatttngggggggnnnnanannccctttnnccccccaaccccccggnnccgggggttggggccggggcccgccccgggccagggnacctnnnnntttttttttnnttttttttttttnnnnnntataagggaaagaacctttggaaaaaggggggtttggttaagggntccagangggaaaaaaaa

SEQ ID NO: 3761 - DNA, 331 bp, Homo sapiens
aggtactaacagggtgtctggtcttagaagcctcccttcagatcccagctgaccctggtgactgcctggccttgatgttggctgcagccttctgatagaaccacatggattccacccacagctggccaggcttgttacatgggtcagggaatacaaatggccccccccagggagcaggtgttggcctcagttttcagggacccttggtgttgctccttacctagagcccattaatctaccccatcaactctctgccatgaaagccatcttccaggagccctgttttttggagctgaactgcacagattatagctgctattgtacctgcccg

SEQ ID NO: 3762 - DNA, 363 bp, Homo sapiens
tgtcccttctcccctgattcttccctccgggtaggagggaagaatccgcctgagcagtggcctgccagcacttgagaggctccgcaagcacaagtgtgtttatgggagttgtgcacatgctcagttgaggcattcttcccttaccagtcgagtgtttctagaggaaggtcatagactaatagtctaatagtctatgacctttagtcatactagtgcacatgcctgagcccactcacctgtgaacccccaaaatttgagacaggtctcaattaatttagaaagtttattttgccaaggttgaagacatgcccagtgacatagcctcaagaagtcctgatgacatgtgcccaaggtggtccggcc

SEQ ID NO: 3763 - DNA, 360 bp, Homo sapiens
ccgggcagaactggaaaaggcctttgcagggacagagacggagaaggctcttcggtcgcgtttggaaagcaagctttcagagatgaagaagatgcacgagggggacttggcgatggctctggtcctggatgagaaagacagactgattgaggagttgaagctgtctttgaagagcaaagaagctttaattcagtgccttaaagaggagaaatctcagatggcatgtcctgatgagaatgtgtcatctggagagctccgaggactttgtgctgctccaagggaagaaaaggagagagaaactgaggctgcacaaatggagcatcagaaggagagaaacagctttcaagagaggatccaggc

SEQ ID NO: 3764 - DNA, 281 bp, Homo sapiens
  misc_feature 38, 42, 59: n = A,T,C or G
ccgggcaggtactttttttttttttttttttttttttnaggncttctttattttctttnaataatgttttatcattttcaacatatatattggatggggtcttttgttaaatttatttctaagtagtttataaatttgcttctataaattatttttaaaaattaatgttttattttggggcttactctctccatgattttctgctaatcttcttgctgctctgccaatctcatattgtatcctctgacactttaagctagtaaggctgcagatttttgccc

SEQ ID NO: 3765 - DNA, 155 bp, Homo sapiens
  misc_feature 13, 32, 42, 49, 62, 75, 82, 96, 99, 111, 117, 123, 128, 132,134, 139, 141, 145, 147: n = A,T,C or G
aaaccaccgcggnggcggccgcccgggcaggnacagtaattnggggggnttaaaaacccggnccaaaggaggacngcagggnagagaagcaagttnagngggcgccggggnaggaancgacanagccngcangngcagnanggcngngaaggggc

SEQ ID NO: 3766 - DNA, 252 bp, Homo sapiens
  misc_feature 20, 23, 31, 35, 38, 85, 93, 156, 179, 182, 184, 205, 214,215, 234, 235, 238, 243: n = A,T,C or G
ccggaaactttccaactttnttnaggggggnccgnaantttggggaaagcctttccccaccccccggcccggggtttgggggggncccggggnccccccggcccccccccggggggggcccccaaggggggttaaacccttttttttccttttttntttggggggggcccttttttccnaanantttttttcccccccttccccnaattttttnngggggggaaaaaaaaaaannttnggggnaaaaaaaaa

SEQ ID NO: 3767 - DNA, 385 bp, Homo sapiens
  misc_feature 2, 31, 34, 35, 39, 40, 41, 49, 61, 80, 86, 113, 144, 175,204, 205, 207, 213, 216, 217, 218, 223, 239, 247, 257, 261,274, 275, 277, 278, 282, 285, 295, 307, 310, 312, 313, 315,317, 327, 343, 345, 346, 347, 348, 352, 360: n = A,T,C or G
gnacccaccgcgggggcggccgaggaacgcngcnntttnnntagcgggntgcgaaaacccncccccggaaaacacgtganaggccnggagcgaaccctaaaggggcgccacangagcgccccatctcacctcaattaactacanggacaaacacaaccacaaaggggagacaagngaccaggaagagagagccaaaaagctaanngngcaccnacnnngaaanggagaaaggggacccnaggggaanagcaccgcangaanccagggaaaagcnngnngganatngggaaagagncagagaaaggangcnannananaagacaccangaggcccccagccgangnnnnacancccaggcnaacaaacgggccccaaaaacaaggc

SEQ ID NO: 3768 - DNA, 451 bp, Homo sapiens
  misc_feature 251, 302, 317, 395, 438: n = A,T,C or G
ctacttagggcgaattggagctccccgcggtggcggccgaggtactttttttttttttttttttttttggacatgtgaagtgtgagatgctcgtgggatatccagcaaaggtgaaaggtaggtggttggacaggagtctggagctcagggagccatcagcatggtgacccatgtggacaagcttaactcggtgatttcactgaaagtcccgggactgggcggcgtgattgcccagggcatgggctctcagnggtatcatactgccccctaggggctaccagaaactgcagtctatttttggnggtcagtaatacggngctactggcattggaaggaagggatcagggagggactcttagatgtcctgcagtctccttcgtaatggagaggtactntaaatcctgggactttcaaaagccctgaataacattcatgtanataagaaaaatct

SEQ ID NO: 3769 - DNA, 360 bp, Homo sapiens
aggtaccaaaacagaaagagggtttaaaaaacagctgcacaaaccagaacacccgattcagaatcttttctccctcttgagtttttgtaaaatactttattattgatttttgctttttttctccctttccctcccaggagaagacatttgggtcttggcctgaggcaggggtgttgagcgatgatgctctgatatggagctgtcactctagagctcggccagatggaagacactatagaaccaggttggacagatttggggtcagggttggaggctgagttcttttgaggactggttggagtggcagccagatggtggctgctgacaaggcaagaggaatttcagagattaaacattgtc

SEQ ID NO: 3770 - DNA, 423 bp, Homo sapiens
  misc_feature 11: n = A,T,C or G
tacttagggcnattggagctccccgcggtggcggccgaggtacactcgccagcggttttgccacaagagtatacggaacaaaggagacaggctcatttataatctgacgcggccaccctcctgctgcgttcggtttccattggctgggacgggacctcaccttctgtatttgtcccgactggctagcacttagaactttttaaaagaggcaaaggcataggagaacaaaggaaggaggaagtaacttgtggaatattgagaaaggtaaaaacacctttaaataaggaagaggaacaggctatgacctaatgcttgtttggatcaagtataagccatgttagggcaaatatttaggctaaaattgtgggagctaagaacataaagtatatttgattttttattatggctagcagatatttaaga

SEQ ID NO: 3771 - DNA, 221 bp, Homo sapiens
  misc_feature 46, 54, 62, 73, 77, 83, 85, 90, 104, 105, 116, 123, 141,142, 171, 183, 184, 194, 197, 204, 209: n = A,T,C or G
ttagggcgaattggagctccccgcggtggcggccgcccgggcaggnacaacggntatgcttngaaggccaaangganctggtntntaatncttattcctctccnnactagttttgngacctanggaaattttgcaatcttnntgagatttgttgtctcatcaggaacaggntgctacctaagnnacaggatagntgntagattnaaatntgatcgcatggc

SEQ ID NO: 3772 - DNA, 354 bp, Homo sapiens
aggtacgttcctggagacatgggtgtgtctgtagactaatccttattctccaattattgagtataatatctcttgtttaacatgaggaaagggtcaaatttgaggaaaaatggcctcttgtttgatgtgttttagttcattattctcttctattaagagaaattcactgttaaaaaattgtttcccatttccgtatctgaaataatgactgtagttgaggtgatcttgccctgggtctgaaatcatacttccaaaccaaaaaggactttgaatacaaaacttttaagaaatcttgtatgaatacaagctatatctgaaaaattgtgttttataatattgatgcccagttttgcc

SEQ ID NO: 3773 - DNA, 358 bp, Homo sapiens
  misc_feature 41: n = A,T,C or G
aggtacttttttttttttttttttttttttgtatttttagnagagacgggatttcactgtattagccaggatggtctcaatctcctgacctcatgatccacctgccttggcctcccaaagtgctgggattacaggcatgagccactgcgcccagccgagtcattttttaatactactgcatgtgagttaacacaatcattcccaaattgaagttttagatgggccctcaaaatttttaggatatggttttcctacaggtttatattgaaagtatggggtatctcctattactcctctttttatttgtcttaaaggagaaagggagaggccagagaccaaatgtccccatttccctata

SEQ ID NO: 3774 - DNA, 367 bp, Homo sapiens
  misc_feature 149: n = A,T,C or G
ccgcggtggcggccgcccgggcaggtacgcgggaacaaaatgaaaggaaaaagcctcctgtagccacagaaggagaaagtgcattgaattttaatttatttgaaaaatctgcagctgctactgaagaagagaaagataaaaagaaagancctcatgatgtaagaaattttgactatactgctcgaagttggactggaaaatctcccaaacaatttctgattgattgggtcaggaagaatcttcccaagagtccaaatccttcctttgaaaaagttccagtaggtagatactggaaatgtagggttagggtaatcaagtctgaagatgatgtcctggtagtatgccctacaatcttaacagaagatgg

SEQ ID NO: 3775 - DNA, 156 bp, Homo sapiens
  misc_feature 1, 47, 55, 56, 67, 68, 72, 123, 129, 135: n = A,T,C or G
nggggaaccccaccgcggtggcggccgcccgggcaggacttcctttngggggttnnaaaaccctccnncccntttttttttttaaaaacactactatagtttataaaaacaaaaacaagagcncgtagngagcanattaggattacaggccttcac

SEQ ID NO: 3776 - DNA, 355 bp, Homo sapiens
ccgggcaggtacagaactgaaattcaaatatcgaggatagcaagaaaagctggcaacttctatgtatctgcagaacccaaattggcgtttgtcatcaggatcggaggttatcaattgggtgagcccaaaggtctgaaaggtgttgcaacttctttgcctcatcaaatcttcaatagaaactttgtgaagctcagcagggcttcaataatgtgctgaggtttgtagaaccatatattgcatgggcatacccaaatctgaagtcagtaaataaactaatctacaaatgtggttatagcaaaatgaataagaagctacttgctccaacagataatactttgattgctcgatctcttgg

SEQ ID NO: 3777 - DNA, 364 bp, Homo sapiens
aggtacaatctagttattcttacaagcagtcaaattctaaaaagggaataaacgaattttcagggtatcaagccaagtttaccaagtgggcttattatatgtatttataattcttcctagtatagccaataataaaatgaaaataagtgaagagaaataaaaatgaagggttaatttcagggtagcaatgtaatagttttttatgcagtttataagcaaatgacataggcatcaccatgaagctgacttgataaaatgaagaccacttatagaagacagtgattttcaaacccactcctcagatccaaacaactaaggctctagccaccactaactttaaacagagcagttccacttgttaaaa

SEQ ID NO: 3778 - DNA, 356 bp, Homo sapiens
aggtacctcatcaatatgtgcatttattatttgccaattaaaataatataaaactctttaaaaattaaaaaccatatatttccctagtatttctgggatgatttttttttctcaatgacttttgagaatgcttttgctttgttctcaaacctttgataatctccatcattactggttgggtatcccttatctgaaatgcatgggaccagaagtgtttcagatctcagattatttcatatttgaaaatatttccatacagataatgaaatatcttaataatggaaaccaagtataaacaggaattcatttatgtttcatacacaccttatgcatgtagcctgaaggtaattttatta

SEQ ID NO: 3779 - DNA, 356 bp, Homo sapiens
aggtacaacttaaatacgtccatatatgaccaggttcttcttatgccaagagtgaactctgtgctgaatcagttaatgttctactaaataaaggaaattcacattcgctttcttgttaggttcatgcaaatattgaaaactcttggaatgaggaagaagtttggagaattgaaatgtatatctcctttggcataatgagccttggcttactttccctcctggcagtcacttctatcccttcagtgagcaatgctttaaactggagagaattcagttttattcaggtatgtggggttttgtttggtgaaggattgtgcaggataggatttccttgttaagaacaactgcattttaaa

SEQ ID NO: 3780 - DNA, 360 bp, Homo sapiens
aggtacgcggggtaaccacctgggaaaacttcacagaaaatgagagtttcagatactgagaatagaaccactaagaagcagaaaagagaagatattctcgtgggggagaacaaccggctgggaggggaggaagcatggccaaggcaaagaggtgggcattaataagaactgcttcttgctgccgccatatgaagaaggacgtgttcgcttccccttcctccatgattgtaagtttcctgagacctcgccagccatgctgaactgaatacaacatgtttaagaccacagaacatctgcataggctgtaaatttcgttgaatgatggatgcaaagatggaagacagatggatagaggaaaag

SEQ ID NO: 3781 - DNA, 105 bp, Homo sapiens
  misc_feature 5: n = A,T,C or G
ccggngccaaggtacttcatacaacttaagcctaaactagattagattatgtagaaacttattcttagagaatatatcgccttaatatttcttatcctgaaaaga

SEQ ID NO: 3782 - DNA, 349 bp, Homo sapiens
aggtacattttacccacactaaagaataggcctgagatgctaataaagcctctaagctattttgagggcagctcaaaatcagtgatatggtttggatctgtgtccccacccaagtctcatgttctgtattcatccccagtggtggaggttgggcctggtgggaggggatagaatcatggtggtgattcctcatggtttcacatcactctccttgatgctgtcattggattagtgagttctcctgagatctggtctttaaaagtatgtgacacatcccccactctcttccttctgctctggccacgtgaaatgctagctctccttttgccttcctccatgacagaaagtt

SEQ ID NO: 3783 - DNA, 266 bp, Homo sapiens
  misc_feature 95, 108, 120: n = A,T,C or G
ccgggcaggtacttttttttttttttttttttccttttttctgtgaatagcttaactcaggcctgggacagttgatcttgaaagaagagatgganaaagagagccggnaaaggtcatctntgttagccagtcgctacgattctcccatcaactcagcttcacatattccatcatctaaaactgcatctctccctggctatggaagaaatgggcttcaccgggtaagatttctccccgattcattgtttctgcctttactcccacct

SEQ ID NO: 3784 - DNA, 320 bp, Homo sapiens
agatacgcgggaggaggaaaaagtgaagcggcaggaacgactcaaggaggaccagcagacagtcctaaagccccagttttatgagatcaaagcaggaggagaatttagaagcttcaaagattctgccacaaagcagaaactgatgaacaaaacccttgaagatcgtttgaaaattgaagcaaaaaatgggacattgagtgtatccgacaccaccgccggcagcaaacaattgacattcacgttaaagaggtctgaacagcagaagaagcaacaggaggctgagaaactgcatcgacaagaaaggaaaagactccgtcgtt

SEQ ID NO: 3785 - DNA, 411 bp, Homo sapiens
  misc_feature 221, 223, 270, 295, 319, 330, 336, 392: n = A,T,C or G
gggcgcgcgtatacgactcctatagggcgaattggagctccccgcggtggcggccgggtacccagaaaataagaaagggttccaaaatgaagaatcgctccttttgcaaaccttatggtgacaaatataatatttataaaaagtgaattagggtaatatggttaatgggagaaataaacatcattatggaaatgctatcttaaacaaaaaataagagaaantnttagtttaaaaatagaacttatagtcgatttaaaaaacaagaccaanctcttagctatgcacaagaaagttnctttacacattcacaaatataaanggatgagaaancatggnttatgaaaatatgaaccgaaataaagctatagtagctgtgcaaatttcagacaaantagacatcagaaaagactt

SEQ ID NO: 3786 - DNA, 318 bp, Homo sapiens
ccgggcaggtacactggaggctggagcctgcagatggcatggctctgcggctcaccttgctgcagttggtggtggtgacagagactgcagcttgactgtagtgtccatgttctccagagaagcagaacgagttggatgtatgttttggaagagattatgaggaaccggctcatgtgatgaaggaggttgagaggtcctgtgctctgccatctgcaagctgaagacctggaaagctgagggtgtggctccagtctgagtctgaaggcccaagaaccaggggaaccaacggtgtagattccaggttgaaggcaggagaag

SEQ ID NO: 3787 - DNA, 341 bp, Homo sapiens
ccgggcaggtacaggtttgaggaagcggtgaaggaggctcatgctgtagatcaaaagcttgcagagaagcaggaagatgaagccaccctggaaaataaatggcccttccttggggttcctttgacagtcaaggaagctttccagctacaaggaatgcccaattcttctggactcatgaaccgtcgtgatgccattgccaaaacagatgccactgtggtggcattactgaagggagctggtgccattcctcttggcataaccaactgtagtgagttgtgtatgtggtatgaatccagtaacaagatctatggccgatcaaacaacccatatgatttacagca

SEQ ID NO: 3788 - DNA, 337 bp, Homo sapiens
ccgggcaggtacatagactccattgatctggagaagatcactgaaaccgaggaccctgtgaaatttcatgaagcttggcagaagctatgcaaagctgatggtatccttgtgcctggaggctttggaatcagaggaacattgggaaaactccaggcgatttcttgggcaaggacaaagaagattccttttcagggagcttgtcttgggatgcaactagcagtgatagagtttgcaagaaactgccttaacttgaaagatgctgattccacagagtttaggccaaatgccccagttcctctggtgattgatatgcccgagcacaaccctggcaatttgg

SEQ ID NO: 3789 - DNA, 296 bp, Homo sapiens
aggtactacaccacttttcctcaccaacccccatcctattcttgagttgcaggatacacttgctctctggaagtgtgtccttacccttctgcagagtgaggagcaagctgttagagatgcagccacggaaaccgtgacaactgccatgtcacaagaaaatacctgccagtcaacagagtttgccttctgccaggtggatgcctccatcgctctggccctggccctggccgtcctgtgtgatctgctccagcagtgggaccagttggcccctggactgcccatcctgctgggatggc

SEQ ID NO: 3790 - DNA, 317 bp, Homo sapiens
ccgggcaggtacttttctctgaaaggaatcttgtcttgttaaaccctaaagagagtgtccttaatagcaatcagcacttgtaagcttatatactggtgcatttggttttctgttgggtgaatgcggtgtgtgggccgtttgtggattctgaaagagaaagccgtgtgtcgtgtgccatgacatttctattgcacattctttgtactcagaggaatttttttgttttgttttgtcttttaagaaaggaaagaaaggatgaaaaaaataaacagaaaactcagctcaggcacaattgtcaccaaggagttaaaagcttc

SEQ ID NO: 3791 - DNA, 326 bp, Homo sapiens
ccgggcaggtacctcatgatatggtttggcttcgtgtcctcacccaaatctcatcttgtagctcccataattcccacatgttgtaggagggacccagtgggagatgactgagtcatgggagtggatatttcccatgcttttctcatgatagtgaatgggtctcacaagatctgatggttttaaaagtgggagtctccctgcacaagctctccttttgcctgctgccacccacgtaagacatgacttgctcttccttgccttctgccatgactatgaggcctccccagccatgtagaactgtaagtccaattatacctctttctttt

SEQ ID NO: 3792 - DNA, 317 bp, Homo sapiens
ccgggcaggtacatattttttaaaactggttagcgatagctacatgacccaattatattttctatatttatttgattatcagccagtaaactcataatgaagcagctgcgcactcccccaacaattgagaattgaacaaatttccagagagaagtgaaaaatatcaaaaattaaaatcctaaacttgaagacaagttgagagaccatttagtctggccacctgtatccaagattcatttaaaaccaagcagcggccaggcaccgatggctcacgcctgtaatcccagcactttgggaggccgaggcgggcggatcac

SEQ ID NO: 3793 - DNA, 336 bp, Homo sapiens
ccgggcaggtacgcgggattccagggcaaaacacattgtcctaatgaagttgttgcagctctcttcgttttcttgtgccgctggaattggcttgtgggtcacttgttgtgcaaaagtgaattaatttcaaataggaatcatattgcttttgtgaaacaaagaaaatttaccaccttgtctgatacatagattggaaggcgctcttggtaaagaataacccacaaacacctgatcttgattggaaagcattgtaggtcattagggaaaactgatgatgctgactgttgctccagctgtgttggcaattcaagatgaccttgttactaactgaaagtt

SEQ ID NO: 3794 - DNA, 220 bp, Homo sapiens
ccgggcaggtacagcaatgacttcagtaagccaggcatccttggatgtctccatgataataattatttccttaggagcaatttgtgcagtgttgctggttattattggtgctatttgcaactaggtgtaaccgcgagaagaaagacactagatcctataactgcagggtggccgaatcaacttaccagcaccacccaaaaaggccatcccggcagattca

SEQ ID NO: 3795 - DNA, 338 bp, Homo sapiens
aggtacatatatccaccatttctggtgctcttcatttcatcctgtggattcaggttaccatctggtgtcatttattttctgtgtgaaggatttagtatttcttgtaaggcagacgtccataggcaacaaattgtcttagtatttgtctgggaatgtctttaatttcactttttttccaactttcaacaaaagcttcatatcctggtgatgtctttgttataaggaaaaaaaaatccctaaatccagccttcaaattgaagtaactatctttaatgtgagagcaatcctattcacaaagcccctccccagagtcaatcaagggtttggggaccacatct

SEQ ID NO: 3796 - DNA, 350 bp, Homo sapiens
aggtgtgatgtttgccccacaacaggggtcatttggcaatgtctggagacatttttattgttatagctgaacaggaaagtgctactggcatctgggaggaggctgctaaacatctcacaatgtgttaccccgtcccaaatgtcagtcgtgttgaggctgagaaacatggtttaaatgagtcagaggctggccacagtggcacgtgcctgtagtcccagctactcaggaggctgcggtgggaggattgccttaacccaggagttcaagactagactgggtgatatagcaagacctctgtctcaaataaagaagtaaaaaataaatgaatcagagactagtaaatctacctc

SEQ ID NO: 3797 - DNA, 321 bp, Homo sapiens
aggtacgcggggcccttgctcactagaaggagccccctgaccccttcttccaaaaatactttttgtctttgtcttcgtttctgcattcatcccccttcgttcactcccataacaaccaacagcgacaactggcacctaggacagggacgtgagtgaaggtctgctggagcagagaaactgacactgacaagaagaacgagaatgagaaaccctgcgacgagtctgctgacagctgatataagtctgcaaaatcagctggaccaccaaacggcaattgagagctgcacaacctgcaattacctttattcaattaatgcaaaa

SEQ ID NO: 3798 - DNA, 311 bp, Homo sapiens
aggtactgtccaaagaaagtctgggaagaaactcacaaactctgtggaatcttctactccatcaggccttggggaggactttgccttaattagttctgtgagctccgtcacataatgcagctgctccagggcctggtggttgatggtgctcatgctgttgtagacaaaggtgctgcacaggagcacagccagggcaaagatccaggagtcattcttagggtcaccctgctctatagcaccgcaggtccaagaacagttttcagttgcctcactcacctcttgttttctttcctctccccgcgtcctgcccg

SEQ ID NO: 3799 - DNA, 194 bp, Homo sapiens
  misc_feature 143, 159: n = A,T,C or G
ccgggcaggtacatttcttgttaaccacgttattaaaacttgatcagcatgtaagctttcttctgttagatcttttggcagcaaacaaccttccccccaagcctctgaattttggaggagggtaggcttgatgaattgtttanaaattttgtgtttggnggtggcaggaggggagggatcatgcggccttctgg

SEQ ID NO: 3800 - DNA, 376 bp, Homo sapiens
  misc_feature 46, 51, 80, 86, 114, 154, 173, 207, 217, 220, 226, 231, 246,248, 257, 273, 278, 291, 295, 299, 317, 319, 329, 331, 344,356, 357: n = A,T,C or G
ccgggcaggtacttttttttttttttttttttttttttctttttgnacacnttttacaaatttaattttaaagcatgttncagttnttaaaaagacaaaccattattcacttcnttgctgcggcaccctttttgggccaggttttgtaactttnaaacatcaaaaagggtagngcatcaattttaactaaaaaaatcagtagggccnaatatattanctngggcanaaaanttcttttttttaaananatccaaatncaccatatttttactnttatnaaataatggtttnaaanaaanaatcatcacaatgtttancnacataatccnanatctgggataaanaaatggggatanncgaaattttaaaaattccc

SEQ ID NO: 3801 - DNA, 464 bp, Homo sapiens
  misc_feature 67, 93, 95, 97, 101, 149, 151, 158, 181, 182, 203, 226, 229,247, 255, 256, 261, 262, 263, 264, 265, 270, 271, 282, 284,285, 286, 287, 288, 289, 293, 300, 314, 320, 321, 323, 324,329, 330, 339, 341, 345, 352, 372, 373, 374, 375: n = A,T,C or G
  misc_feature 377, 378, 382, 397, 408, 417, 418, 434, 441, 442, 443, 445: n = A,T,C or G
actttttttttttttttttcttttttttttttttttttttttttttttttttttttttttttttttnttttttttttttttttattttttttnantnaaanaattttttttttcaaaaaaaaaaaaaaaaaaaaaaaaaaaaaaaaaancnaaatttncccaaaaaaaaaaagggggggcnnaaaaaaaaaaaaaaaaaaaanccccccccccccctttttttttnttnaaaaaaaaaaaaaaaaanaacccccnnccaannnnnaaaannaaaaaaacccnannnnnngacngtaaaanaaaaaaaagggggnaaaaannannaaaannaaaaaaagnancccnccccccntaaaaaaaaccccccccccnnnntnnaatnaacccccccccaaanaaaaaaaaaanccccccccnnaaaaaaaaaaaaaaanccccccnnngnaaaaaaaaaaaaaaaaaaa

SEQ ID NO: 3802 - DNA, 491 bp, Homo sapiens
  misc_feature 128, 141, 143, 144, 150, 152, 153, 154, 167, 175, 178, 179,183, 184, 189, 199, 201, 214, 215, 220, 221, 228, 233, 234,235, 238, 241, 246, 247, 248, 253, 257, 258, 259, 260, 268,269, 270, 276, 288, 296, 297, 298, 299, 301, 304, 308: n = A,T,C or G
  misc_feature 316, 317, 334, 345, 346, 348, 349, 352, 368, 371, 377, 380,390, 413, 417, 418, 419, 421, 430, 437, 442, 453, 455, 456,457, 479: n = A,T,C or G
aggtactttttttttttttttttttttttctttttttcttttttctttcttttttttttttttttttttttttttttttttttttttttttttttttttttttttttttttttttttttttttttttnaaaaaacccccgnannccgggncnnnaaaaaaaaaaggnaccccccnggnnggannaaatnaaaaaaaaantnaataaaccccccnncccgnnggggggnccccnnnccnaanttttnnnccctnaaannnnggaaaaannncccccngggaaaaaaaangaaaaaannnntnccngggnaaaaatgnnaaccccaaaaaaatccnaaaaaaaaaanngnnggnaaaaaaaaaggaaaanccngggggnccnaaaggggggnccaacccaaaaaaaagggggggncccnnncnccccctttnaaaaagnaaaanccggggggccnannnaaaaaaaaaaaccccccacccnccgggaaagggg

SEQ ID NO: 3803 - DNA, 350 bp, Homo sapiens
ccgggcaggtaccaagcctcaaaatacttgaactagaagccatctcttaaagttaaaagtaagaagctccaggaaaaataaagattgcatagtaaaaagggatagatggcaggattaattcaactcaacaaatatttatcaaatgtctactctggtcaggtgctgtgttagcagccagcttccctaaagggaggaaaggctagacacgaggacattgaggattgtttatttaaagtcactcataggcatgccataatggatttattaaggggaaattggggtttctgtgaatctttacaggacatagccatggagacaatcactatgttaagtaagttgctgttttccca

SEQ ID NO: 3804 - DNA, 392 bp, Homo sapiens
  misc_feature 155, 164, 169, 189, 207, 208, 214, 215, 221, 227, 274, 275,277, 280, 300, 310, 329, 343, 364, 372, 381: n = A,T,C or G
ccgcggtggcggccgaggtcaggtaagccctggctgcctccacccactcccagggagaccaaaagccttcatacatctcaagttgggggacaaaaaagggggaagggggggcacgaaggctcatcattcaaaattaaaaacaaaattaaaaaaangtttttaanggcgnaagaatttaaaaaaaaaaantttttttggcctttttanncttaanntttttnaccccngaaaaagggccaattgggcttttttttaaattttttccccccctttnngnggngggggaacctttttgggggnaaaaaagggnaaaatttggggggccccanttttttttcccccntttaaaaaaaaaaaaaaaaangggggggnggggggggnttttttttttt

SEQ ID NO: 3805 - DNA, 566 bp, Homo sapiens
  misc_feature 35, 204, 329, 511, 532, 541, 552: n = A,T,C or G
ccgggcaggtactttttttttttttttttttttgnctttgagacagtctcactctgtcgcccaggctggagtgcagtggcaccatctcatctcactgcaacctctgcctcccgggttcaagtgattctcatgcctcagccttccgagtagctgggactacaggcatgcaccaccacacccactaattttttgtatttttagtanagacggtgttttgtcttgttgcccaggctggtctcaaactcctgagctcaagtgatcctcctgcctcggcctcccaaagtgctgggattacaggcttctgaaccaccatgcccagcctagaaggngggttttctttctttcacctgaggtcctcccagcctgtctttgctatagactcaggtatcagatcagctagcccctgtgagtattaacaaaataagactgccaatcttattcgagttcataggctctgagtgaaatgtatatgggcttcaaggggacacgtccagggccttaaagacctttntttcactgccaggatgttttntggaaaaanctaaggggagnctatcctaaaaaaa

SEQ ID NO: 3806 - DNA, 504 bp, Homo sapiens
  misc_feature 459: n = A,T,C or G
ccgggcaggtacatggcgaagctagagactgtaacctgaagattgggacaaattaaagaaaaaaatgtgatttaacacaattacaaaaactgttacgttagggtcaaacaagaaccattttatgaaactgaattacaacaaatgacattatatctaactcttccgggtctccacagcacttatacttacttaagcagcttaaacacttccgagtctccacagcactctgatacttacttaaacagctcttttaacctgccctagtattcttaagtgcagcatatctaattttttttttcctcagtagtttgaacacttgctggctattttttctgtccaagttctcagtaacttcggcctgtgtagtcagtggttctacacagccgacactacttcttacataacacttggtctctctggcttctggaaagggcgaggggttaccttccggagtccagngctctttcggcacttctgcaaccaggcagtggtaaaaggggtgct

SEQ ID NO: 3807 - DNA, 230 bp, Homo sapiens
  misc_feature 26, 102, 128, 165, 202: n = A,T,C or G
ggggccgggaaatatttggggggaanaacctttccccccacccccgggccgggggttgggggggcccggggggccccccggccccccccgggggggccccanggggtttaaacccgtttaaaaaaatnggggggggggggtggggaaaatttttaattttttttnaaccttgggaaccctggggggggaaatggggggaatnggggaaccacccgcctgggggggccttt

SEQ ID NO: 3808 - DNA, 383 bp, Homo sapiens
ccgggcaggtacgcgggaatgtggttaaaactagaaatgaactaagccttgactttgactagcaaggctcctttgcaggagctggtcttaggtatgcgcggtaaggagagtgtgatggagatttcaccttcgagcctctttcaatggctttgttttcctctctcattccttcctactgtgacattctacagttaaggttatggaagaaaagcgaagttgaaaagacttttgtcagtattttgggaaagctgaaaccccctatttagtgccaagataaacaagacagaggagctagattgcaacattctctcacttgcagtagcagagaatcctgcaagtgaatctcagttcaaaatgtgaaaaaaaaaaaaaaaaaagtacct

SEQ ID NO: 3809 - DNA, 328 bp, Homo sapiens
ccgggcaggtacaactttgtgttagagatgccaaaaaatatactttccaggacttcaagttgaattacttcaaatgttgttctacagtgattgtgcaatggaatgaattgggtccttgcaaaattcatatattgaagccctaaccccaaatgtaattgtttttgctgtaaggaagtaattcatattaaatgagctgagaaggtggggtcctgatctgataggattcttgtccttataagaagagccaccagagaggggccacctgcaagccaggaggagaaccctcacgagaagcagaaccctgccagaccttgatctgaaacttcca

SEQ ID NO: 3810 - DNA, 360 bp, Homo sapiens
ccgggcaggtactgtgtctcatctatatgcactctctgatgggcaaggaggtatgaattacgactgaagcccttaccacatgccttacacttatagggcctctctcttgtgtggactctgaggtgaacattaagatctgaattccggctgaagcctttaccacactcatcacatttatatggtttctctctgatgtgatctctttgatgtaagtgaaaatatgaactgtaactgaagcactttccacacacttcacatttatatggtttttctccagtgtgaactctctgatgagtgtgaagaacagagctatacgcaaaatcctttccacacacattgcatttgtatggtttctcccct

SEQ ID NO: 3811 - DNA, 358 bp, Homo sapiens
aggtacgcggggcagaagagatggttgtcaagatcttgttcctatttctgtatatgtgggagaattagaatcactcctcttatgctcgagcggccgcccgggcaggtacttttttgttctcttcttttttctttttttaatagcatcccgctcttatttcagaataaaaaaaattttaaggtatgttgagtacgaatctatagagcaatgaaaatgcaagagcaatagctatgggcaccaaatggtcaatcttcttatcataatgttgagtggaagaagccaggtccaccagacacatgctgctcatttatgcaaagtttggacacaggcaaaacaaaactagtttgatcgtgatggg

SEQ ID NO: 3812 - DNA, 358 bp, Homo sapiens
cgggcaggtacaactctccagggcacaatacgtttacagctgcctttccttcacatacttttctaattcagaactactcacaattctaagcaaattcccattcacgaagtctgcccataatgcgaccttctctttttttaacatatacatcttaaaaaacaaatatataaaaaattcttattttgctggaatgctttcaatttttcacattttacatgatcatcacatttatttcttatattgaaaggcatggtttctgttgacatgtcgtgcaaagccaaaaaaaaaaaaaaaaaaaaaagggctggattgcttttcaattggtctaacacttttccttgtctaggctttggatttt

SEQ ID NO: 3813 - DNA, 360 bp, Homo sapiens
aggtacagaggccggtgggctccctgacatcccttccaggcaacctgaaagcactgaaatagcttatggccctgtgccagggaccttggcccaagctgctgacctccagggtggggagggagctacccccaggagaagagtcactcagacagcagtatgagcaagccagccagcagctccgtgcctgcacccagctcaggggaatcccagggggttcagatgcccaggaaggaaaaggggacagcgctactgctatggaatgagaccaccacttctcctgttgtccttcccagcttctccccaacctccccttttccctagtttataagacaggagaaaagggagaaagcaaaaagctgg

SEQ ID NO: 3814 - DNA, 356 bp, Homo sapiens
  misc_feature 5, 82, 99, 100, 101, 109, 131, 135, 137, 143, 148, 157, 158,169, 174, 178, 179, 180, 188, 193, 255, 257, 264, 266, 267,269, 270, 272, 285, 288, 289, 290, 301, 304, 313, 314, 324,343, 346, 347: n = A,T,C or G
caggnactttttttttttttttttttttttttttcttttttttttttttttttttttttttttttttttttttttttttttnatttaaaaaaaaaaaannnaattttanttttaaaaaaaaaaaaaaaaanaaananacacanaaacnaaaaaaaannaaaaaaaaacntgctnaccnnnaaagcccnaaaancccaaaaaaaactaaaaaaaaaaaaaagaaaaaatcttaaatgaaaaaaaaaaaaaaaaaangnaaacacngnntnncntaaaaaactgggnaannnaaaaaaaaaantgnaaaatttgnnaacaaacttnaaaaaaaaaaaaaaaaaanccnnaaaaaaaaa

SEQ ID NO: 3815 - DNA, 358 bp, Homo sapiens
  misc_feature 29, 32, 189: n = A,T,C or G
aggtacttttttttttttttttttttttnggnattataatttttatggcattttataaatttaccaattttttcttctggggtttttctttttttcttttttttttgtagacacagagtctctctatattgcccaggctggtcaggaactccatggctcaagtaatcgtcccacctaggcctccaaagngactgagtatttttggtcatacttaggcctgttaaaccaaaactatacaaatttttcctgcattttctttaagaactttcatatattcatatttagtatttgactcatttggagtttaattttctcagaaataaggtagaaacccaacctgggtgttttctcagttttc

SEQ ID NO: 3816 - DNA, 536 bp, Homo sapiens
  misc_feature 113, 189, 275, 286, 292, 300, 319, 332, 349, 378, 383, 400,448, 475: n = A,T,C or G
catcttgggtcatcgatgagcctcgccctgtgcctggtcccgcttgtgagggaaggacattagaaaatgaattgatgtgttccttaaaggatgggcaggaaaacagatcctgntgtggatatttatttgaacggggattacagattttgaaatgaagtccacaaagtggggcatttaccaatgagaagngaaaacagacgagaaaatctttggatgggcttcacaagacatggcaacaaacaaaaatgggaattactgtgatggactttgagggncagcccaaagnctgggngagggagnataacccacggggggcagnaggggtccaaggnatttctgggccccctgncttgccttaaaactgtggccgttttcatnaaacncaaaatcatttcatatnttcttaacccctcaaaaaaacaaaaggcttgtttgttaattattcctngatcttcttaacgggtttccctttttnggggccccaacaatttctttcccaatattattcccaggcccacaacttcaatttttttaaa

SEQ ID NO: 3817 - DNA, 299 bp, Homo sapiens
  misc_feature 88, 129, 145, 154, 162, 168, 172, 195, 218, 239, 252, 265,267, 288, 298: n = A,T,C or G
ccgcggtggcggccgcccgggcaggtacttttttttttttttttttttttttttttttccaagaaaacgtttttatggaaaacactantatgccagaaggcaccatctttgaaaacacaaactacaatnattttcctgaggcagnttcccactnggactgcnttcaanttanagccaactgttaaacaaactganacaaaatgggaatacaacaacgngggcactgacctgtcccccgngcccaaaagcttnagttacccattgntntcatccccaggggatcagttngaaattccgnt

SEQ ID NO: 3818 - DNA, 416 bp, Homo sapiens
actacttagggcgaattggagctccccgcggtggcggccgcccgggcaggtaccatgagaaattgtagactttactcctatattctctttccaagccctaggattagccatttttccaagaaatgttgcataccattctgctatgaaaggaaccaaaactcaaatcttgattctgggtgtattttttgttaattttgctgtcttttcttgtagaacctctcaggtaatgactctaggaggtatgtgttgtgtattaacccatatatacacacacatataaactttttatttaatttttatacctatattatgctaaacttggaaatatattgacacatctgccctaagttaataccacatggaatgtttattacctaccttctattcctgcccctaacctcgcactccaaccgtga

SEQ ID NO: 3819 - DNA, 355 bp, Homo sapiens
  misc_feature 97, 142, 158, 213, 226, 244, 265, 308, 313, 340: n = A,T,C or G
ccgcggtggcggccgcccgggcaggtacttggagtttccttgtagtagtaagcatagagtttgatgataagtaaacgtcccttaacaaaaacctcanccttattactatcccattaaaaaacagcaaatacttactgagttnttgtaagagctaatgncattgtaagatttaaaactaagggcttttatcactttgcaaattattttttaaangcattcatcattngacagtgttctctcattncttaaaatgcgagtcatcttncaaaagagttggttttaactgccctaaacattttcggggaagnatgcngggtttaaatttttaagtttaattagntctgaattaaaatat

SEQ ID NO: 3820 - DNA, 400 bp, Homo sapiens
  misc_feature 52, 141, 310, 333, 377: n = A,T,C or G
ctacttagggcgaattggagctccccgcggtggcggccgaggtacttttttntctttttttttttttgatacggagtttcactcttgttgcccaggctggagtgcaatggcgcgatctcagctcactgcaacctccgcctnccaggatgaagccattctccttcctcagcctcctgagtagctgggattacagggctttgtagctgagcatgtttctaaataacacagccactcaactgacataccatggattatgtgaactaacttcaacggttcaggaaggagaactttgtgtgttctttcggaatantcatttttagcaccatgaccaantacaagggtcaactgtatttgtttggtaacggaccaggggtttnttactgaagagaaagtttgtttg

SEQ ID NO: 3821 - DNA, 407 bp, Homo sapiens
  misc_feature 201, 311, 337, 376, 389: n = A,T,C or G
ctacttagggcgaattggagctccccgcggtggcggccgaggtacaattgcatcaccaaaagctgtttaatttggattgtgtagaataaaagaaaactacataagtctttgtggctttgataaaaattttaaaatataaaaatgaaaaaaagaaacccaaaagcagtattcaaaactaacaaatgtcaccttggactattnacagtaagacgcctttttgacaggagaatcttgttctcagcttgttcttttcctcacattttacttacagggattctccctcccccatctgatcccctattcataacctntgttcccatttcctgtctcaccatgnaaacagccatctttccatgcttctcttcactcatctttngaggtctcttctntgacactccttttttcct

SEQ ID NO: 3822 - DNA, 457 bp, Homo sapiens
atagggcgaattggagctccccgcggtggcggccgcccgggcaggacgcggggacactagccacacttcaggtgcccagtgtccacactgactagtggtgacggcgttggacagtgcagatacagaacatttctgtcatcacagaaagttcctttggacagagccatgttaagtgatgttatcacaggatggacagaaacattcccgtttgatttatttttcagacccagtttgtggagaaaaataatgatgctttacatatgtctcttgaatccttaatatgtgaatccagagataagtttatacgggaattatttgaatcatccacaaataacaacaaagatactaaacaaaaagcaggaaaacttagcttcatcagcgtgggaaacaagtttaagacacagttaaatttgcttctggataaactttcgaagtacctcggccgctctagaactag

SEQ ID NO: 3823 - DNA, 524 bp, Homo sapiens
  misc_feature 7, 15, 44, 67, 306, 333, 357, 363, 369, 370, 390, 392, 409,411, 422, 427, 429, 434, 439, 448, 450, 451, 452, 456, 457,465, 466, 469, 470, 471, 480, 481, 488, 490, 492, 493, 510,511: n = A,T,C or G
gcgaatnggagctcnccgcggtggcggccgcccgggcaggtacnatcttggctcactgcaacctctncctttcgggttcaagtgattctcgtgcctcagcctcttgagtagctgggattacaggcgcgtgccactgcgtccggctaatttttgtatttttagtagagatggggtttcaccatgttggccaggctgatctcaaactcctgaccccatgtggtccacccaccttggcctcccaaagtgctgggattacaggcgtgagccaccgcgctcagcctacaagcaattttttaaaaactggcncccattaactggataaaaattctctgntttaaaatcctatttactattttnaaaganaaggtnnttagtttttttttttaaaanancaataatttcctgttantngataaaaattnaaggncnttttnaattngccttttgncnnnattnnctaaaacnnccnnnaagggggannggggggntnannattttttaaaggggggnntttttttttttaa

SEQ ID NO: 3824 - DNA, 803 bp, Homo sapiens
  misc_feature 31, 33, 51, 52, 53, 74, 245, 376, 412, 413, 415, 450, 479,498, 529, 540, 544, 547, 555, 562, 571, 580, 586, 612, 633,643, 658, 665, 698, 704, 710, 720, 726, 729, 749, 755, 757,759, 762, 773: n = A,T,C or G
agctccaccgcggtggcggccgaggtcttgntntttttttttttttttttnnnctttaaaaaaaatagggaatncaaggatttacaaaaaaacctcacacagtgcaataataaaggaaagcagacactagtggaacccctagggccactgcatcttgttcatggcaaagaggaagggaggtgaggtctgggtagagtgcttttcccagtcccctgctggcacttctccatgatgacaaggaagtntctgccatcctggccacagtgctgggctccctgcatgacagtgaaaacagtgacaatgttccagcaaagccaccagacaaagttcttaaggtcacaggagagaagggagcccaggatggaaggcacagcanagccatgagtcctggggcaaaaagtgctgggctganncntattgctttgctagacttccataggaatgggcttnttgcggcgagaaaagggtgccccaccctntacttggactacactactntgaaaccttgtggcaaaggcagaaaaaaatntggtttatcgngagnggncaaactgngctttantttcaacangcttgcccnaaagangggcacaaggggatcaaaggggtttnttgaaaaattaagacttggtnggcaaaaggnaaaggaaaaagtggnctattangcaaatggtgatgccaaaaaggtcaagtggcantcaaantgttgnttgttacctntgaagnaanaaaaatgggggaaagtaaanaatgcntntnccncccttttgaantttcccccaaaaggaaaagggggaaaaaaa

SEQ ID NO: 3825 - DNA, 464 bp, Homo sapiens
  misc_feature 17, 20, 24, 56, 73, 76, 77: n = A,T,C or G
ggccaattggagctccnttncggnggccggcggcccggcaggtacgcgggggcttnctcttgaagtgaccgcnttnnagacggttgttttagagcaaggcccatgtagcatccctggagggcctcatccctgaagataaggttgtgcttctggcaggttctcccttacagaatgaacacctgggtcaagtgtggggtggaagccctgacaaccctggaagtggttggccgcaggctaggagttcacaatgtctaaaagtcagctgattttgtgttaaaattcagtgtctggctttgcttcaaaaattgggaagatcggccggacgcggtggctcacgcctgtaatctcagcactttgggaggccgaggtgggtggatcacgaggtcaggagatcgagaccatcctggctaacatggtgaaaccctgtctctactaaaaatacaaaaaaaaaaaaaaaagtacct

SEQ ID NO: 3826 - DNA, 614 bp, Homo sapiens
  misc_feature 478, 549, 562, 573, 577: n = A,T,C or G
ccgcggtggcggcccgaggtcctcacaggtcctcaaactttttggcttcaggagacttttttcactcttaaaaattattgagggctggccaggtgtggtagctcacgcctgtaatcccagaactttgggaggacatggcgagaggattgcttgagcccagaatttgagaccagtctggccaacataacgagacctcgtatctaaaaataataacccagcctggtggcacacgtctgtggtcccagctacttgggaggctaagatgagggaatcacttgagcccaggcaattgaggcctccagtgagccgtgattgtgccactgcactccagcctgggcaacagagagagtccctgtctcaaaaaaaaaattattgaagacctcaataattttttatgtgagttatatctattaacatgctaggaggccaatacagccttggggaattgagggactataacaaaagatctagtatttgnggtatcacaaaagatggggagagactgaaaagtattggaataaataatgtctggaaaggtaccagttggcnaaaggcagaaagntttagattcangagnctgagccaaatcccaactgggaaaaatccaagggatt

SEQ ID NO: 3827 - DNA, 591 bp, Homo sapiens
  misc_feature 547: n = A,T,C or G
agggcgaattggagctccccgcggtggcggccgaggtacctggaagaccaggcccctttccctccaagcagcaagtagctgatgaagatgaaatatggaagcaaagacgaagacaacaatcagaaatttctgcagcagtagaacgtgctcgtaaacggcgtgaagaggaagagcgaaatggaagaacaaaggaaggcagcttgtgcggagaaactgaaacgattggatgagaagcttggcatcctggaaaaacaaccatttccagaggaaattagggaaagggagcgagaaaaagaacgggagcgtgagaaagaacttgaaaaagaacaagaacaggagcgagagaaggagagggaaaaagacagagagagacagcaggaaaaggagaaagagctggagaaggagcaggaaaaacaaagagaaatggagaaagaaagaaagcaagaaaaagaaaagaacttgaacggcaaaaaaaaaaaaaaaaagtactgcccccatgaggaaagctcttccaaaaaagactgaccccttccctgccttttcctgnaataaagaacagcttgacagcaaaaaaaaaaaaaaaaaaaaagt

SEQ ID NO: 3828 - DNA, 540 bp, Homo sapiens
  misc_feature 2, 27, 50, 52, 83, 85, 505, 514: n = A,T,C or G
cnggcgaattggattttcccgcggtgncggccgcttcgaccaacatgtgntnagcattccacgggcgcatgaagtctgggtgntntgctcgagtctctgaatattttgataggaagcgacaagaaaattcaaactgctctttgctgactactggaaagtgaaaagatgctcaagtttacattcaaagaaaccataggcatttcaaaaacctctttctaaactttggtttaaaaaaaatcagttcaccacaaacagaaatataaatcgaggctgtagccagctgctggtcatgtccttggcagtcttttgtgcaaaataaggcatatttgagctccacattaaccttgcggcaggcgtctacttgctctgcatgctgtagcaagtgcacgtcctccttccccttggtggtgtaagcctgggagaggctgcccatacttatccacacaccagcagaagccccgcttcctgcctttggaagggcgacaccgctttttcttataaaaanccttcttgncacaagttgggaatgtgtacctggcc

SEQ ID NO: 3829 - DNA, 425 bp, Homo sapiens
  misc_feature 406, 410, 417, 419, 422: n = A,T,C or G
cgcccggcaggtacctcaaagctgcaagtcagattctgatattgaaagatggtaaaatggtgcagaaggggacttacactgagttcctaaaatctggtatagattttggctcccttttaaagaaggataatgaggaaagtgaacaactccagttccaggaactcccacactaaggaatcgtacgcggggggttccgggcgttaccatcgtccgtgcgcaccgcccggcgtccagatttggcaattcttcgctgaagtcatcatgagctttttccaactcctgatgaaaaggaaggaactcattcccttggtggtgttcatgactgtggcggcgggtggagcctcatctttcgctgtgtattctctttggaaaaccgatgtgatccttgatcggaaaaaaaaaaaanaaanaaaaaanangtncct

SEQ ID NO: 3830 - DNA, 572 bp, Homo sapiens
ctatagggcgaattggagctccccgcggtggcggcccgcccgggcaggactccaagtaaagctccagtgactaatatgtataaatgttaaatgatattaaatatgaacatcagaattactttgaaggctactattaatatgcagacttacttttaatcatttgaatatctgaactcatttctatttcttgccaattactcacttgggtatttactgcgtaatctggaacatttagctaaaatatacacttttggcttaaaaattattgctgtcaattccaataataattcttagcttataaccaaagagcagtgtttaaaaggagagcttctatacaaaacctattcctggcgttacttttcatacaatttttgttctgttttacctggaaataatttaccaaaataactgagtgttgctgctaaagaacaaaagtggggaggtatcagggaacaagaaaacaagaaagggtatgatcaatcattttcttctgctccaaacagctggagtaaaattcatgggaaatggcccttcatttaaaaaaagatgtacctcggccgctctagaactag

SEQ ID NO: 3831 - DNA, 349 bp, Homo sapiens
  misc_feature 134: n = A,T,C or G
ccgcggtggcggccgaggtacagcatatggaggtcaggaaggctatttgcagcacatgtgattaggggctactgatcttcagggtttagctttcttccaaacagtgtaaaatacccacaattccaagtatgaanggacacagacgatctcctttgaaattccacaggacaatacaggcgccccagctgttcttcatagagcgacagtgcttctgtcagattgacacagttcccctaaatcaaagagagataagcaaatgggattcttgagtccttccaagggccccactcatctgaaggtctttaataaaggagaacaattctagctttagataaaagttcatctttaa

SEQ ID NO: 3832 - DNA, 372 bp, Homo sapiens
  misc_feature 266, 277, 283, 284, 285, 290, 347, 354, 363: n = A,T,C or G
gggcgaattggagctccccgcggtggcggccgaggtacacaaagttataattttaatgcttttcacatccatgctgaaaatctgcaatttggtaaaaatgaaaggaacataaatttttccaaaggaatttttcacgccattatatatacacttcatgagaaagtttcaaacactttctcaatgatcacgagttaccaagaaaataaaagattaaatttgtacttttttttttttttttttttgtaactgaagctttatcttggagngggaggggggnttgtgnnnccagntggggcacccaaagacaaccatgctctcggtgaaggcgcccgaggtcctggcattgnttctggntctcttcgncttggcatt

SEQ ID NO: 3833 - DNA, 524 bp, Homo sapiens
  misc_feature 263, 266, 309, 311, 313, 318, 322, 436, 501, 508: n = A,T,C or G
ttagggcgaattggagctccccgcggtggcggccgaggtacttttttaaattttttttttttggtggagatgaggtcatcgctatgttgcccaggctggccttgaagtccagggcttaagtgatcctcctgccttggcctcccaaagtgctggtgttacaggtgtgagccaccacacctggccaacatgtggctttcaagttcttacttgaagacagctgctctagctagaaactttctatcgggattctgagcccgctgggnaanggcattaccttccccacccccaagaacacttcttgggaagttncncncaatncatnaacttcaatttcaaacagttgcttggtcccactagccatgaagctggatggggacgtaatattctatctgggggtttgtcatgggccaaattaacattttgagaattctgttanggaagatgaagaattggataatgggcaccttaacagtggtctgtcaagagttgacatacattggngtatctnctgcaccaaagcattt

SEQ ID NO: 3834 - DNA, 317 bp, Homo sapiens
  misc_feature 11, 42, 105, 124, 156, 166, 190, 201, 205, 211, 214, 217,219, 235, 239, 249, 257, 264, 269, 272, 292: n = A,T,C or G
gaggtactttnattccagtttaatgacctagacagccttctncctccaaaatatacatgcacatatctacccaaacccaattctttctctagaacgaaacctggncccattttaggacactttntttttgacgcttccagagaactttagaaaagntactatttgngttccttctataatcattcccctncctagggaatntctnttttgntanctngnactataatgaagatgntttnggatcttgcntttggcanattttanaaacnggntccccaaaaaagaatatttnggttccttttaagggggggggtttt

SEQ ID NO: 3835 - DNA, 435 bp, Homo sapiens
  misc_feature 423: n = A,T,C or G
ccgcggtggcggccgcccgggcaggtaccccagctgatgatgttccacaaaagagcaaaacatacacaatctggttccagtctacagaaatcctggaactggactacaaagggaatagacagggtgtggcaggagggggttcctcacggttggagtgcgaggttagggacaggaatagaaggtaggtaataaacattcatgtggtattaacttagggcagatgtgtcaatatatttccaagtttagcataatataggtataaaaattaaataaaaagtttatatgtgtgtgtattattgggggttaatacacaacacatacctccttagaggtcattcctggaggggggttctacaaggaaaagacaggcaaattaacaaaaaatacacccagaatcaagatttgagtttttgggttcctttnatagcagaatgg

SEQ ID NO: 3836 - DNA, 415 bp, Homo sapiens
  misc_feature 58, 117, 214, 224, 227, 247, 248, 249, 251, 258, 263, 265,268, 277, 278, 280, 282, 283, 284, 291, 296, 301, 302, 304,310, 311, 312, 313, 314, 315, 318, 319, 320, 322, 327, 330,334, 335, 343, 347, 348, 349, 350, 357, 358, 362, 363: n = A,T,C or G
  misc_feature 366, 368, 376, 383, 385, 390, 391, 395, 396, 401, 402, 403,405, 406: n = A,T,C or G
gcgaattggagctccccgcggtggcggccgaggtactttttttttttttttttttttngcaagtcttcacaaaattttatattccccaaggccgggcccatcacaatgcctgtgaancttgactggcaaacactgaggcctgaagcttgggggctgcagggggtcactggctcacccggtccccccgtaatctgtaaaacatactgggtgaggnaggctgctgnacnacctgaattctcccttctcnnngncagtacngaggnanatncctgttgannantnnncccattnaagancattnnanacccannnnnnaannntnaaacnctnaagnnaaaaaagnaaannnntttccgnncccnnatntngaaaccanaaaaaantntctcnncttnnaaaannnannaaaaaaaaa

SEQ ID NO: 3837 - DNA, 522 bp, Homo sapiens
  misc_feature 25, 401, 470, 520: n = A,T,C or G
ctactatagggcgaattggagctcnccgcggtggcggccgggcctgatgcctcaagcctgtaatcctagcactttgggaggcagaggcgggcagatcacttgaggtcaggagttcaagaccagcctggccaacacggtgaaaccccatctctctaaaaatacaaaaattagctgggcgtggtggcacacgcctgtaatcccagctactcaggaggctgaggctggagaatcatttgaacctgggagggggaggttgccgtgagctgagcttgcaccattgcactccagcctgggcgacaagagtgaaattccatctcaaaaaacaaaaacagattgacaacaaagacagtttcagaaaatgacagggactgggcaaattaacaaatggtttgtaaacatgnaatgttcaggaactacttgatgtacctcggcccgctctagaaactaggtgggatccccccgggctgcanggaattcgatatcaaagcttatcgatacccgtccgacctcgagggggggncc

SEQ ID NO: 3838 - DNA, 189 bp, Homo sapiens
  misc_feature 14, 21, 166: n = A,T,C or G
cgaattggagctcnccgcggnggcggccgcccgggcaggtactgaatgagtattgcttttgcaccattgtgaagttgacaaatctaagaccatcataagtcggggaccatctgtatacacaaatacacgtaaacacacatgtattttttttttttttgagacaaangtcttgctctgtcggccaggctg

SEQ ID NO: 3839 - DNA, 476 bp, Homo sapiens
  misc_feature 451, 463, 465: n = A,T,C or G
acttagggcgaattggagctccccgcggtggcggccgcccgggcaggtacaggttgagtatcccttatccgaaatgcttgggagcagtggcgttttggattttggattttttaaaattttggaatatttacaaatacataatgagatatcttgaagatgggaaccaagcctaaacataaaattcatttttctttctttaaaaaaagaaaagccagtgtcttgctctgtggcccagctggagtgcagtggtggggtcatagctcgccgcagtctcaaacttgggctcagccaggtgccattgcaccctttttaaaaatgtttattgatacagcctccctatgtttcccagactgatctcaaactcctggcctcaagcaatcctcctgcctcagcctcccaaagtgctgggactacaggcatgaagccaccacacccggctaatttatgtttnatatacatcttngnagttataaccc

SEQ ID NO: 3840 - DNA, 388 bp, Homo sapiens
  misc_feature 47, 57, 70, 175, 188, 199: n = A,T,C or G
acttagggcgaattggagctccccgcggtggcggccgaggtactttntttttttgtnttttttttttttntttgagatggggtcttgtcatgttgcccaggctgctcttgaactcctgggctcaagcaatcctcctgcctcccaaagtgctgggattacaggcataagccattgngcctggccctctnggtaattttgnattactgacccatactctgctccttggctataaattcccacttgcttatgctgatatttggagttaagtccattcaccctctaccactgcaaaatcccattacatttgtctatatacctgtcataatggccctgaataaagtcttccttactgtgctttaacaattctcattgaataatttttttaaac

SEQ ID NO: 3841 - DNA, 481 bp, Homo sapiens
  misc_feature 41, 48, 67, 70, 77, 79, 80, 92, 128, 342, 470: n = A,T,C or G
gagctccccgcggtggcggccgcccgggcaggcactttgtnttttttnttttttttttttttttggnttnttttttntnntcttatcacttnaggtcaggagttcaagaccagcctggccaacacggngaaaccccatctctctaaaaatacaaaaattaagctgggcgtgggtggcacacgcctgtaatcccagctactcaggaggctgaggctggagaatcatttgaacctgggagggggaggttgccgtgagctgagcttgcaccattgcactccagcctgggcgacaagagtgaaattccatctcaaaaaacaaaaacagattgacaacaaagacagnttcagaaaatgacaggactgggcaaattaacaaatgtttgtaaacatgaatgttcagggaactactgatgtaccctcggccgctcttagaactagtgggattccccccggggctgcaagggaaatttncgatattcaag

SEQ ID NO: 3842 - DNA, 527 bp, Homo sapiens
  misc_feature 22, 64, 100, 130, 176, 296, 314, 319, 380, 405, 417, 423,471, 491, 495: n = A,T,C or G
acttagggcgaattggagctcnccgcggtggcggccgaggtactccaagctctgagaccacctnttctgcaaagccttcctgattctgcaaagaacaggnaggcatttcatccttgggacctcacagcanttcaggacacatttgtgtcccaagccctgcttggcttggctgtctncatgaatatacactttgcaacttctgcaccaggcatcataccaagcacacagtaggcactcctgtgttttttgaataagtgactatatcatcaccacatttcaaatgcggaatatatganctactagaaaagacatangggtnggattttacatctttattgtatcctaagatatacaagtctattactgccttttcccatgtntctgccaacataagcataaagaagnggggatttaccngttagnaaattgaataagccggcccgcttctagaactagtggggatcccccggnctgcaaggaattccatatcnagcntattgaaaccgtcgactccaggggggggcccc

SEQ ID NO: 3843 - DNA, 352 bp, Homo sapiens
  misc_feature 21, 128, 195, 204: n = A,T,C or G
cttagggcgaattggagctcnccgcggtggcggccgagggacttttttttttttttttttttttttcggcttccaaaagctttattggcaaatatgctctataaaagaatgatcaatcctgttgcctntaagtcaatggaatgaagagctgtgtccagggacacaccacgccgtgctgaaggagactgctgttgngtccacctnttattcatagacccagtcatgagcacaagacttgtagtcaaccagttcttcaggcttaaaccacccgcgtactggaagcaggagggagccctggctagggcaggccttaaacgcaagggaagctgagcaagagatctgcacactcaac

SEQ ID NO: 3844 - DNA, 522 bp, Homo sapiens
  misc_feature 448, 502: n = A,T,C or G
actactatagggcaattggagctccccgcggtggcggccgggcatttctcccagggatctctgtgcttccttttgtgcttcctgtgtgtgtggatatttaaaggggctggaaatgtgcaaaaacatgtcactacttagacattatattgtcatcttgctgtttctagtgatgttaattatctccatttcagcagatgtgtggcctcagatggtaaagtcagcagcctttcttatttctcacctggaaatacatacgaccatttgaggagacaaatggcaaggtgtcagcataccctgaacttgagttgagagctacacacaatattattggtttccgagcatcacaaacaccctctctgtttcttcactgggcacaggaattttaatacttatttcagtggggctgttggcaggaacaaatgaagcaatctacataaaggcactaggngcagtgcctgacacacaccattctcttggaggtccccttaggaggatcccacanggtcatatgacttcttgggg

SEQ ID NO: 3845 - DNA, 415 bp, Homo sapiens
  misc_feature 130, 131, 342, 349, 357: n = A,T,C or G
ccgcggtggcggccgaggtactttccttgggatggctttctaatttaaagaacagcctgcctcaaaagcttgcagtgactgagcagatatgctagcaccaacttttccaaaaaaaaaaaaaaaaaaaaannggtactcccaactgtggtccgcgctctcaccccttctgctgctctcgtggccccctcgcgatgggcgggcatcctgtttgaggatattttcgatgtgaaggatattgacccgggagggcaagaagtttgaccgagtgtctcgactgcattgtgagagtgaatctttcaagatggatctaatcttagatgtaaacattcaaatttaccctgnagacttngggtgacnagttttccgggttggtcatagctaggaccttgcccgggcggccgctctagaactaggg

SEQ ID NO: 3846 - DNA, 472 bp, Homo sapiens
  misc_feature 1, 49, 63, 80, 90, 93, 100, 102, 132, 149, 206, 209, 252,262, 273, 274, 285, 288, 308, 312, 314, 315, 329, 334, 337,343, 345, 347, 360, 388, 397, 414, 428, 450, 460: n = A,T,C or G
nccgggcaggtactttttttttttttttttttttttttttcctttgganacagggactcactntgttgcccaggctgganaacactgacnccntcacagntnactgcagccttgacctcccaggctgaaacnatcctcccaccttagcntcccacatagctgggactaccagatatgcccaccatgactagcctaattttttgtanaanacagggttctcgccattgttatgcccaaggtcttggttcttcnaactcactgnggctcaagagnnaaataccatcnttnccttggggcctccccaaaangtgncnnggggtatataccangggtngtngaagcncncnaacggctccaagnccatatttttctttttgaattttggggnttcttgttntggacccattcattggncaaaattgaccagnattcattccaatttccatcaanggggaacaantggggggggcct

SEQ ID NO: 3847 - DNA, 319 bp, Homo sapiens
  misc_feature 80, 104, 106, 114, 140, 144, 178, 198, 208, 212, 230, 249,263, 273, 288, 289, 304, 307: n = A,T,C or G
actcctatagggcgaattggagctccccgcggtggcggccgcccgggcaggtacctttttttttttttttttttttttgntttttttttttttttttttttttntntttttacnctttgatatttattaacaaaaatggnccanaaaaggattgagtcaaaattacaaagtgattaanagttaaaacaaaagttgttntttattggantttntgggggactttaaccagnccccaaagctgtttttatntcctaaaatagganttaaatgacnttccctcaagtgacnnattttaatagaaacnccncctctttccttt

SEQ ID NO: 3848 - DNA, 444 bp, Homo sapiens
  misc_feature 24: n = A,T,C or G
attggagctccccgcgggggcggncgcccgggcaggtactaaaagcgggcaccaccatgcttggctaattttcatatttttcatagagacggggttccaccatgtggccttgcttggtctgaaagttctgagctcaagcaacccacctgccttagcctctcaacgtcctggaatgacagcatgagttgccacacctggctgcatgccgaatactttagagttgtttatgcctgacacttccagggcatgcagaactatggtggcattaaccgacacattaaccaactgcctcacttacttttcttttgactcagtttataaattttcttaatttaaattttaatttcaacatgtatacatctttgaaataaataaaataagctctttgaatgtttgacataacgtagaagaaattgacaaatggacatctttacttcattttct

SEQ ID NO: 3849 - DNA, 435 bp, Homo sapiens
  misc_feature 51, 65, 144, 161, 176, 202, 210, 215, 228, 238, 239, 244,247, 271, 279, 280, 319, 322, 335, 337, 355, 358, 367, 371,387, 391, 399, 400, 402, 404: n = A,T,C or G
aagggcgaattggactccaccgcggtggcggccgcccgggcaggtacttancatgctttcaacantaaattctctgacaaaccctaagtgtaactcagaaaaaagctacactaactaaatgcatgattgaattaacataatctnccataatcaagaaagtntcctaaaagactttncatttttcctttgataaccatttatngtctatanatacnctatgtgtccatntactcctaannaaatnccnaactttttaaaaattattaaccanaggcaganntttttttctgacaaatggagaaatctggccagcagttanagnagtcttttatttnanctcaaaaaagggggaatnctnggtggttcnaaanaattaattgcaacatnctcntggcccanntntntggttattcttattggttggaccttggtaaa

SEQ ID NO: 3850 - DNA, 440 bp, Homo sapiens
  misc_feature 99, 353, 369, 413, 421, 436: n = A,T,C or G
atagggcgaattggagctccccgcgggggcggccgaggtacagatttgattatgattttaatgtttgaaagattgcacttgtttgcttttactatatgnggggtaaaatatattttctgttcacagtatatgaaaatatggagtaatttaaacagtaaataaacattctgtggatgcttatttttgtattgacaaagtatcaattaaactatatgtgttctttttcaaaaatgctggatccattcatgattggttcaaatatctaattatttcctcaacttaaatttgctttttaaattgcttaatatgtaggggtaggttaccaaatgatagttggataaggaatcatttanttatcaagagcttcanaggggtcatctgctttccaccaaggaagtttaagcattatgggntcattacntgattttgcttgaanaatt

SEQ ID NO: 3851 - DNA, 310 bp, Homo sapiens
  misc_feature 12, 14, 19, 33, 36, 39, 41, 62, 64, 73, 100, 109, 119, 154,190, 210, 220: n = A,T,C or G
cctatagggcgnantgganctccccgggggggnggncgngncactaaatgcatcctccattncntattttttntcttttctaaatatcaacgggatgggnggataccancttactgggnagttctaaaacttttgctttctttcaaaaactttncagaaacatatatccattctataattgtgatagatnggaagaaatatttcccttangaaattttgnaaaggaatacttccactcttttgtatgtaacatatgataaacgataaaaacccaagttcaggccattattatcatcttgatcaaaaatat

SEQ ID NO: 3852 - DNA, 477 bp, Homo sapiens
  misc_feature 4: n = A,T,C or G
actnctatagggcgaattggagctccccgcggtggcggccgcccgggcaggtacatatttactgtttctctcaactttaagaactctagtctcacttcagatatattatacaaatcctaatcaagaaaaaaaaaaatcaatggattttcacttttaaaaatctttcttccctctccttttaggaaacgcagaaaaactaagctttctttcaataccaacaccaacaatgggctttcaataccataagcacatcaggggaattaaactcttccatggcagaaagaggagataatttaaaatgaaacctcagcctactcctcatagtctaccttaaatagttatactatgtttttaaaaagcaagttattactttagtaaccatttaaaaggaaagtaactagaactattttgttataaagcatagctaagaaaacaaaaatgtcccaatcattatattaacttacaaaagcatactaa

SEQ ID NO: 3853 - DNA, 570 bp, Homo sapiens
  misc_feature 73, 77, 189, 369, 458, 481, 489, 497, 508, 519, 520, 530,534, 537, 542, 549, 570: n = A,T,C or G
tagggcgaattggagctccccgcggtggcggccgcccgggcaggtaccatccacgtcactgggcacctggccnaacntggccaggtagggctcgtagatgaccgaacggaatatccacctccagcgctgctcattctgcctaaggatcccttgcctggccaccgccaaaggccaccatccacaccgcanagaggaacaggaagaagaacacatcgatcagcatcctctgcagcattataatcttgggtcctaagtttctgcttacagtaaaaatgtggatcaatcttagagtgaaaataatgtagtccagacagaaaatgactcgtccagaatacaaagagcttttattagaagagtgggagccgaaanacaatttcctgctatgaagtaaaaaagccccagcgtgtccatcacatttccacagggtcagtaaaaataattcacccccatttaacgtnccttcgggccgcttcttaaactnagggggantccccccngggcctggcanggaaattccanntttaagcttnttcnatnccccngccgganccttggggggggggggccccn

SEQ ID NO: 3854 - DNA, 326 bp, Homo sapiens
  misc_feature 70, 73: n = A,T,C or G
ccggcgaattggagctccccgcggtggcggccgcccgggcatggtacaagaagcactatatagctcattnacncattaactccaatcttgctttgcataaatatggcatttcagaagtcaagcatacaaaatactttccttagagaaataaaaatatatgtaaaagccagacaggccaacagggcgatcacattcctcagaaccgcattgtccaattcaataaccatcattcacatgtggcaattaaacacatgaaatgtggcttgtccaaactgaaatgtgctgtaaatgttaaatagacactaggtttcaaagatcttgtacct

SEQ ID NO: 3855 - DNA, 438 bp, Homo sapiens
  misc_feature 174, 199, 297, 304, 362, 387, 431: n = A,T,C or G
aattggagctccccgcggtggcggccgaggtactttttttttttttttttttttagtttatacaactccattaaagaaacttccaaggtctggtttgccacatgctatatagtctgaatgttagtatcttcccaaaattcataggttgaaaatctaacactcaaggtgacggtnttaggaggtgaggactttgggaggngattaggtcataaaggcagagccctcatgaatggaattagtgcccttataaaagaggcctgatagagaccccctagctccttctaccaggacataggnagaaggngccatctatgaaccagaaagcagatcctcacccctcaccagacaccaaatctgccagngccttgagttcggacttcctagccnctagaactgtgagaaatttctggtatttacaaactacccaattnatgattt

SEQ ID NO: 3856 - DNA, 305 bp, Homo sapiens
  misc_feature 20, 29, 49, 52, 55, 72, 74, 91, 108, 126, 142, 144, 149,152, 161, 175, 179, 188, 199, 200, 202, 239, 241, 262: n = A,T,C or G
ccgcggtggcggccggcctnacacacagngccacctgccacctctaganttnttnttgcacaggaaagaagntncttttaatggagcccangtgctatgagtctctgntatagcaggctgagccangaagtgcgggctaacntntgatnccntgccctatntcttcttctctcanctcngaggctganaccttaaatcnnanaggaggtacgatttactagtctctgaatcatttattncntacttcttaatttgagacaanaggtcttgctatatcacccagtctagactttgaactcctgggt

SEQ ID NO: 3857 - DNA, 468 bp, Homo sapiens
  misc_feature 1, 138, 213, 260, 275, 351, 362, 370, 374, 377, 380, 381,384, 385, 387, 396, 397, 398, 406, 410, 415, 416, 417, 418,421, 422, 423, 424, 425, 434, 435, 452, 458: n = A,T,C or G
ncggcacggttactaacggattttccgagcttaagcctctcacgaagcgggaatgggttgtcttctggcctcagagtatcccttatcagagccttgggcccctgggccccttcactcaatacttggtggaccaccatnacaccctcctgcacaatggttattggcttgcctggctgattcatgtgggagagtccttgtatgccttagtattgngcaagcataaaggcatcacaagtggtcaggctcagctactctggttnctacagactttcttntttgggatagcatctctcaccatcttgattgcttacaaacagaagcaccaaaagtaaacttgaaagatgtctgaanaaaaaaaaaantttttttngganaanaanngtnnanaaaaaaaannngggggggngggnccccnnnnttnnnnnaaaaaaaannccccccccccccccccngggggnggaaaaaaaa

SEQ ID NO: 3858 - DNA, 229 bp, Homo sapiens
  misc_feature 1, 29, 46, 104, 133, 166, 186, 216: n = A,T,C or G
ncagcctgctcccttccctcagagccgtncaggaccaggaactatncctagcatttggcatatatgtgcaggagtgccagcttcctctctcttcagtctcaatntctgtgctgcctcactattgacacttggngttttatctccagagatctgcttaaagtatgtntggtgtattcaatattctgntatctttcagtggagataaaaacaccaagngtcaaaagtgcgg

SEQ ID NO: 3859 - DNA, 270 bp, Homo sapiens
  misc_feature 1, 63, 90, 92, 101: n = A,T,C or G
nctctcaaccttctgaggaatctcgtggtgttgattattctgggttgcgactgtatcctctgnttctctttttataggctcctaacgttngnattacgttntccctattaactaaagttctacccgttactttaaataagaaagttcgttcttttcaccttccttttacagccagatttttcaaaccagtgttgcaggtgggtaggcagatatggttgctggcaggagcttgtgaaaatgaagcagggtttcagctgatgagtgaggagg

SEQ ID NO: 3860 - DNA, 114 bp, Homo sapiens
tatagggcgaattggagctccccgcggtggcggccgaggtactttttactttttttttttttaaaaaaaccttgagctcttaaggattaatgctcttgagttatgagatatccc

SEQ ID NO: 3861 - DNA, 441 bp, Homo sapiens
  misc_feature 68, 82, 104, 140, 239, 255, 262, 298, 310, 321, 325, 326,331, 348, 368, 371, 394, 402, 409, 415, 420: n = A,T,C or G
tatagggcgaattggagctccccgcggtggcggccgaggtactttttttttttttttttttttttttncctttctagggtcnaaagtcaggcaataaatacaanaatatttggaagtttttatttttatcatacaatganactatctttcctaccttggcttcctagtataaaaagctatttgaaaatttatattcaatgtaatttttgttgaggcctttattggaaaaaaaattgtancatttttttgaggaanaaaaacncataatgtgaacagagctataactgctgaattaaanaaaaactatgtngcatttatttnttannaaaanattttgcaagaaaggtntgaggccccacttaggtccnccntgcaagtcaacacatcctgggtnttgctccnacttganctcctnatggnccccttgcttgacaaaaaaat

SEQ ID NO: 3862 - DNA, 431 bp, Homo sapiens
  misc_feature 50, 51, 378: n = A,T,C or G
ccgcggtggcggccgaggtactctttgttttggcacacttttcctgacanncagccagtgttctcaacacataaatactagtccacgttaacaacaatagcatatgagaccgctctccgtaaagatgccagattggatgcaaatggactggaaataccttggagggtttcacaaaaataagacaaagggcaaaggaactttgccaaaggagatggagagcaattctttaaagttagtgggagggaggaagcaaagagctcataaatacaagcctcttaaaatgggacgcatttgcctcgcgcctactgggtgtctgcagctcagcttggtgccccacacaggacaccgactttaagtggctgcctttgcaaggctgangaggccttgagggttgatgcctgaaagtgtcagcgccatcttagtggaaaaca

SEQ ID NO: 3863 - DNA, 342 bp, Homo sapiens
  misc_feature 46, 319: n = A,T,C or G
ccgcggtggcggccgaggtacttacggagtgacaaagggaaaagtntgctttgaggcaaaggtaacccagaatctcccaatgaaagaaggctgcacagaggcctctctccttcgagttgggtggtctgttgatttttcccgtccacagcttggtgaagatgaattctcttacggtttcgatggacgaggactcaaggcagaaaatggacaatttgaggaatttggccagacttttggggagaatgatgttattggctgctttgctaattttgagactgaagaagtagaactttccttctccaagaatgggagaagaccntaggtgtggcattctggatcagc

SEQ ID NO: 3864 - DNA, 345 bp, Homo sapiens
  misc_feature 1, 37, 51, 63, 64, 70, 80, 93, 95, 111, 115, 141, 151, 157,158, 178, 190, 197, 213, 232, 245, 249, 262, 266, 275, 286,291, 293, 295, 302, 303, 308, 311, 316: n = A,T,C or G
nggccgcccgggcaggtaccgtggccagggtcagatngtgcagaaggttanggtgcagcccannaacctnatcttcaganacttacaaaatanancgcggattcaaggtgnggcnctatgagcaagttgaatatgcgcganagaaggctgncatcanntggttctggatgagtatatnaacccttgtatnaggatgnaacgcagtaagcaganttcattcctaaaaaccaanagttcaaagcaanaacnaaacttgggggtnctgngattcaatngcctaaaaaangggangnantgacttnncaccntcnaagcntaccaaaaagtagtccttccccaaaccta

SEQ ID NO: 3865 - DNA, 369 bp, Homo sapiens
  misc_feature 1, 66: n = A,T,C or G
ntagggcgaattggagctccccgcggtggcggccgaggtaccaatttgggttctatattttgtcantcagttgggtttttaaaaaaattcaaaactcatgcatgttacctacttgtcatgtgtgaattatttctcacaattttaattaatctgtgtgtatattagttatataaagcaatggatttccacattcttaaagcaggaacctatattcaccagaaaaggatcctcctgtttctcatcaaattttttttcagctcgaacaatccaagattgggaatagtaagagtggcaaacaaatgttttcttagggacttactgagaaaagaaaaaacttactggggagaacaggagaccttagtaaaattt

SEQ ID NO: 3866 - DNA, 354 bp, Homo sapiens
  misc_feature 199: n = A,T,C or G
ctacttagggcgaattggagctccccgcggtggcggccgaggtacttttttttttttttttttttttgttctttatctggagagattccctcaactttattttccagactgtataccaaatacttttagcagtcttattttattttcaaagagatcttcttattctcagtcttctctttcttttcttgctttttaaganacagggtctcactctgtcccccaggctggagtgcagtggcaccatcatggctcactgaagccttgaactcctgggctcaagtgatcttcccacttcagcctcccaagtagctaggaccacaggcacatgccaccatgcttggctaatttttaaaa

SEQ ID NO: 3867 - DNA, 329 bp, Homo sapiens
  misc_feature 51, 321: n = A,T,C or G
ccgcggtggcggccgcccgggcaggtacttttttttttttttttttggtanaaatgggctctcaacctgttgcccaggctggtctcaaactcctggactcaagtaatccacctgcctcagtctcacacagtgctgggattacaggtgtgagccctggcacccggcctgcaggcactttttatggaattgtattacatgtatagtagggacattgccatcttggcatgtctatttattcaggtttatttttgtgtctgtcggaagtgtttaaagtttctcctatgaaggtattgcatatctcttgttgaagtttattcctangggtttta

SEQ ID NO: 3868 - DNA, 298 bp, Homo sapiens
  misc_feature 293: n = A,T,C or G
ccgcggtggcggccgcccgggcaggtactttccatttttcatctgcgacacagaaggcgggggttgcctctgatccttttgttatttggggcatggaaagtttgggttttccttttgattcagttccaggaagtcagcattaatcacccttaggtttcttgcctccataccctgttctcatacctcatttccccccgaaagacatgatcctcataaatctttatgggaggtaaagggattgatagtctttcttctgtaactgctttatgctgacctgaggcacagtccctacntacct

SEQ ID NO: 3869 - DNA, 467 bp, Homo sapiens
  misc_feature 91, 93, 96, 102, 108, 114, 118, 120, 128, 131, 136, 140,141, 145, 151, 153, 175, 179, 180, 189, 196, 211, 224, 226,227, 237, 238, 240, 245, 254, 255, 261, 263, 268, 269, 284,292, 293, 299, 300, 301, 317, 329, 331, 359, 360, 362: n = A,T,C or G
  misc_feature 382, 391, 392, 401, 405, 406, 410, 411, 412, 413, 415, 416,417, 424, 434, 441, 442, 444, 445, 448, 456, 458: n = A,T,C or G
gggcgaattggagctccccgcggtggcggccgcccgggcagttactttttttttttttttttttttttctttttttttttttttttttttngnaanaaaaancccccnaaattnattnanctaaaacnttnccccngatnnaaanaaaaananggcaaaaaatacctagcatatntgcnnaagcccccnctccaangaacccaaaaaaccnggaaaaaaaaaangnnaaagtttttnncnaactnaaaaaaatnnttttcncnttttnnaaaaaaagttttacnagggcacnnataaannnttttttttttttttgngggggcaatttngnggcctcaaaaaaaaaaaaaaattttttnntncccccccccccccccccccnggggggctnngtttttttntttnntccnnnncnnnaaaaagngggggggggngtttttnnannggngggggggnanaaaaaaaaa

SEQ ID NO: 3870 - DNA, 354 bp, Homo sapiens
  misc_feature 6, 73, 101, 278, 346: n = A,T,C or G
cgactnctatagggcgaattggagctccccgcggtggcggccgaggtacaaaaaaaaaaaatacttttcttantttccagatatggtctaaatgttttatnatccataatgatctaaactaataagattcaccaaaaagtaaaaattcaattttacaatatacattttttttttaactatttggctttacctttttaccttggttctccttactgaagtcctcttgctttcactttgatctggtttttgaagtctcttaattattggctgggcatggngactcatgcctgtaatcccggcactttgggaggccaagggaggtgatcacttgagcccaggagtaaanaccagcct

SEQ ID NO: 3871 - DNA, 542 bp, Homo sapiens
  misc_feature 17, 49, 115, 219, 277, 278, 288, 295, 296, 318, 340, 374,398, 399, 400, 409, 423, 448, 449, 457, 487, 507, 520, 528: n = A,T,C or G
ccgggcaggtacacganaagctccgaggatggctgaagtccaacgtctntgatgcggtggctcatagcacccgtatcatttatggaggctcttgtgactggggcaaccctgcaanggaagcttggccagcccagccctgatgtggatgggtttccttgtgggtggtgcttccctcaagcccgaattcgtgggacattcatcaatgccaaaaccaaatgnagcccccattccattctttccctaccctttcctgccaaagtccaggtgactaattcannccccaagaangccccannttaaactggcgcccttttcccntgcaatattgcctttctggatngggtggtcaacccttggcttccttttccttggtngggcccttttattcccaaaactgnnnattcttttnccttttaacttggntttaattattcttttccaccccctnntaaaattngggttttgggggaaccccaaagagcgcaanatacccccttttctttcccnacctttaaccttnattaaaantggggttttgggga

SEQ ID NO: 3872 - DNA, 323 bp, Homo sapiens
  misc_feature 66, 91, 117, 129, 190, 276: n = A,T,C or G
ccgcggtggcggccgcccgggcaggtactttttttttttttttttttttttttaaacttggctaanttgccctttattaacgaaaacatanagctttcggtcaattccaccacgganaacacaaaccanaaataaaaacccacaccaagggctatttcccaagctggggaatttgagaacacacgggcanagttcacgccacacaactacactgggctcgtccttgggaggcgttcacaggaagcaatcacgagcgccaagccacccacaaggcantgcggcaaggctcccgggatccttacaggcatccaagcgaggtacct

SEQ ID NO: 3873 - DNA, 453 bp, Homo sapiens
acttagggcgaattggagctccccgcggtggcggccgaggtactattattttctaacaggaatttgctatttcaaatatattatctgagatatctatatatttatattttgagatactatacaaatttgagccaatgacatagaattttacaaatcaagaagcttattctggggccatttcttttgacgttttctctaaactattaaagaggcattaatgatccataaattatattatctacatttacagcatttaaaatgtgttcagcatgaaatattagctacaggggaagctaaataaattaaacatggaataaagatttgtccttaaatataatctacaagaagactttgatatttgtttttcacaagtgaagcattcttataaagtgtcataacctttttggggaaactatgggaaaaaatggggaaactctgaagggttttaagtat

SEQ ID NO: 3874 - DNA, 481 bp, Homo sapiens
  misc_feature 8, 67, 470: n = A,T,C or G
atagggcnaattggagctccccgcggtggcggccgaggtacaagcatggcgctggtatctgcttggnttcctggtgaggcctcaggtaggattcagtcatggtgaaaggtgcagcagtggcaggcacatcacatggtgaaagtgggaacaaagagaagggtggaggtgccacacacttttaaacaaccaggtcaggtgtgaactcactcatcgccaagaagacggcactaagccattcatgagggatccgtcctgtccccatgatcaaaacacctcccaccaggccccacctctgacactggggatcacatttcaacatgagatttggaggggacaaatatccaaaacatatcaatatgtttcactatggaaactttacaagtttcagtcccaagatggctgcagaggctccaagtatcacattcacccacaataattggctaaagactgaaaggaggggaaaagggatntttccttttcc

SEQ ID NO: 3875 - DNA, 405 bp, Homo sapiens
  misc_feature 231: n = A,T,C or G
ccgcggtggcggccgcccgggcaggtacagtggcacgatctcggctcactgcaacctgcgcctcctgggttcaggcgattctcttgcctcagcctcctgagtagctgggattacaggcacccatcaccatgtccagctaatttttgtatttttagtagagacagggttttcccatgttggccaggctggtctcgatctcctgacctcaaatgatccgcccaccttggcctnccaaagtgctgggatgacagttgtgagccaccacactcagcctgctctttctaatattttgaaacttgttagacaatttgctacccatctaatgtgatattttaggaatccaatatgcatgggttattattttcttaaaaaaaatattcttttacctgtcacctgaatttagta

SEQ ID NO: 3876 - DNA, 392 bp, Homo sapiens
  misc_feature 119, 317: n = A,T,C or G
atagggcgaattggagctccccgcggtggcggccgcccgggcaggtactttttttttttttttttttgagtaatctttttatctcttccaggcacaggactgatgcagcctgaaatcanacataaaaccaaatcctgcaggttgctgaattacaacgcaggttgaattcataggatctccaggtctcatatgcaaaaacatggctactgattagggaacaatgggaccttgagactaggaataggaacatcaggattgatttggatagatctgagcaccctaaaccccaaccctcactgagtttcccctggcagcanaagcagccctttttccccagtctatggggctggtcctgcctgacttggggaccctctcactgttaggctaacctt

SEQ ID NO: 3877 - DNA, 421 bp, Homo sapiens
  misc_feature 40, 68, 355, 400: n = A,T,C or G
ggcgaattttagctccccgcggtggcggccgcccgggcangtacgcttcccttggcaccatgttattncatctgtgctgggctgaatagtgtccccccaaaattgaataatgtccccccaaaattcgtgtataccctgaacattagaatgtgatcttacttggtattacttggtatagggtgttgtagaaataatcaaataaagatgaggtcatactgcatcagggtagaccctaaattcaatgaccaggatttttataagtgaaaggagaggcggattcagagaaaaagacacagacacacacagagagaagacagccatgtgaagacacaagcataaattgaagtgacacagntacaagccaaggaatgccaaaaattgctggtaaccaccagaagtnggaagaggcaaaggggaattt

SEQ ID NO: 3878 - DNA, 132 bp, Homo sapiens
  misc_feature 90, 99, 111, 114: n = A,T,C or G
ccggcagggactttttttttttttttttttttaatacattctaattaacagtcaacatacagtccttgctggctacagaaaaaaatgganacttttagnccatcaccttgnggnctattccttcatgctaaa

SEQ ID NO: 3879 - DNA, 389 bp, Homo sapiens
  misc_feature 64, 68, 69, 70: n = A,T,C or G
aattggagctccccgcggtggcggccgcccgggcaggtacatacaagtcatccattaaaacaangaannngaatatagagtgccagcagcaacttagtattttctaaaaagaacatttattatttatttttagcctgtcattttaattcttcaagagattttactgctggtattttttaatgcactcctctttgtaatttcattcaagccatttgtctaaagtcatttctttgttttttgggagatggagtcttgctctgttgcccaggctggaatgcagtggccgtgatctcggctcactgcaacctccacctcccgggttcaagcgattctcctgcctcagcctcctgagtatctgggattacaggcgtgcaccaccatgcctggct

SEQ ID NO: 3880 - DNA, 383 bp, Homo sapiens
ccgcggtggcggccgaggtactctttccctttatttctcagactggccgacacttagggaaaatagaaagaacctatgttgaaatattgggggcgggttcccccgatacttttggacatatatccagtagtgggactgctggatcatatagaagttctatttttagttttctcacaaacctccatactgttttccataatggctaaactaatttacattcctaccaacagtatatataagttcctcttctctgcgtctttgccagcatttgttattttttgtctttttgataatagccagtctaactgaagtgtcatggagaaactccagctgggcccagagattctgcagcgggaaaatccaaggcttatttatgccaggct

SEQ ID NO: 3881 - DNA, 202 bp, Homo sapiens
  misc_feature 55, 86, 174: n = A,T,C or G
ccccgcggtggcggccgcccgggcaggtacttttttttttttttttttttttttngggggaaagtaatgctttaaggaggaagctncatatgaataaattgaaagtgtctttctaaggcaactgtgaaacctccaaaacaggaacttctttataacaagaacattctaaaaaanggtcagtatatgcttgactgggccttaa

SEQ ID NO: 3882 - DNA, 422 bp, Homo sapiens
  misc_feature 66: n = A,T,C or G
tatagggcgaattggagctccccgcggtggcggccgaggtacatgtgatgattttcagtgtaaccntttacgtaatgattctgccaaatgaaatataatgatatcactgtaaaaccgttccattttgattctgaggttactctactaacaagcatcacatatttgtattttgccctgattaatatgttggcttcgctttcagggtttttaatgaccacaacaagcaagcatgcagcttactgcttgaaaggtgaggattggaaatgttgggactattataattgcagaatacatgatgatctcaatccaacttgaactctctcactgattacttgatgacaataaaatatctgatattctgcattcccatgtagcattttaattgaagtctgtaaatgtggctaaaagtcttgtcttatttt

SEQ ID NO: 3883 - DNA, 345 bp, Homo sapiens
  misc_feature 68, 120, 214, 310, 319, 322, 330, 332, 333, 334: n = A,T,C or G
cgaattggagctccccgcggtggcggccgcccgggcaggtacttttttttttttttttttgagttttntttttatctcttccaggcacaggactgatgcagcctgaaatcagacataaanccaaatcctgcaggttgctgaattacaacgcaggttgaattcataggatctccaggtctcatatgcaaaaacatggctactgattagggaacantgggaccttgagactaggaataggaacatcaggattgatttggatagatctgagcaccctaaaccccaaccctcactgagtttcccctggcatcanaagcagccnttnttccccanannnatggggctggc

SEQ ID NO: 3884 - DNA, 178 bp, Homo sapiens
  misc_feature 18, 72, 73, 76, 82, 91, 95, 111, 126, 131, 139, 153, 161,170, 175: n = A,T,C or G
ccgggcaggtactttttntttttgttttttttttttgatttttttttttttttttttttttttttttttttnntcngctcanttctttatngatnggggtgccgttttctntggaagcctcttaanaaaanaacacagnggcccaggctgggnggagcccnccccccatnaaatncct

SEQ ID NO: 3885 - DNA, 296 bp, Homo sapiens
  misc_feature 95, 273: n = A,T,C or G
gacttttttctttttttttttttttttttaagaatgtttttatggccgggatggtggctcatgcctgtaatcccagcactttcagaggccaaggngggaggatcacctgaggccagaagtttgagagcagcctgagcaacatagtaagatgctgtctttatttaaaaaaaaagatcttctagagagatctagtaaaatattttatagatgatacaattggattctaaggttggtttcagaatcatcttggggagaagatgggcaggaatgtantagaggtaagtatggccatgaat

SEQ ID NO: 3886 - DNA, 476 bp, Homo sapiens
  misc_feature 21, 22, 61, 70, 96, 127, 169, 209, 214, 232, 247, 289, 335,379, 385, 387, 412, 413, 414, 420, 423, 430, 435, 453, 456,464, 465: n = A,T,C or G
gggcgaatttagctccccgcnntggcggccgcccgggcaggtacttttttttttttttttnttttttttncttccgaaacttcttcaggggcctgntcacatccaacagaactatcactccaagagngatgtttctctccagtaagttggatataaatgtcaagcaggngatcaaccactgccaataggctaggatatctgctctgaanaaccncattcagttctctcttgnccaggttatccaggngaattttggtccaatatttgtctagcaaagtagcatgactgnttagcgggcgataccaatttcctccacagctcaagagtctcctggntgcaaaaaactgaaatccaggggccactttcagacaggcacctnggccgntntaaaactaggggatccccccgggcnnnaggaanttngaaattnaaagntttattcgaatacccgcncgnacccctcnnagggggggggg

SEQ ID NO: 3887 - DNA, 524 bp, Homo sapiens
  misc_feature 4, 20, 93, 106, 232, 236, 287, 329, 360, 365, 402, 405, 424,435, 457, 458, 460, 474, 494, 499, 513: n = A,T,C or G
atanggcgaattggagctcnccgcggtggcggccgaggtactttttttttttttttttttttttttgagacggacttttgctcttttgcccanactggagtgcagnggcgcaatctcgggtcactgcaagctctgcctcctgggttcatgccattttcctgcctcagcctcctgagtagctgggaccacaggagtgcacaattacactcggctaattttttgtagttttggngganacagggtttcaccatgttgcccaggctggtcttgaattcctgagctcaagngatccgcctgccttggcctcccaaagtgctggggattgcaangcgtgagccaccacgcccgcctggcctgctnttggngctttacatttatggacttattttttctgaaccccgngtnccttcccggggcgggccgntttaaaactanggggggatccccccggggctgnnangaaaatttccaatntcaaaactttattcggattnccccntccgaaccctcggnggggggggggg

SEQ ID NO: 3888 - DNA, 371 bp, Homo sapiens
  misc_feature 4, 99, 250: n = A,T,C or G
actnctatagggcgaattggagctccccgcggtggcggccgcccggccaggtactccatgttggttggtagtattttaaatctgaagcattttcagagngctaaggcaattcagactgcacagctgtcaactcaggagtcccattaaactgactctaaaaattcctaaaagaaggcatgatttattataagcaaatggctaacctggcttttttggtaatagaattccaaatgaaaataaaattatacangatacacattgtttggatttttaaaaactctattaaatgtgttaagtggttgtgaatatgaggaataattaaatgttaaccccagctgattagtgaacatataagaaaatggggggaactg

SEQ ID NO: 3889 - DNA, 233 bp, Homo sapiens
  misc_feature 42, 58, 148, 193, 224: n = A,T,C or G
ccaaagacaggtctacaggtaataaaattacctttgatttantttctcagaaacaagnctttattttgccttcatttttgaaaacgtttttgacagtaacagaattctaggttgcagggtttgttgtttatttcattaaggaatttanagataatactccattgtcttatagcttgcatagttctcaccaganatatgctgccattctttgttcatgtgtatgnattatcttt

SEQ ID NO: 3890 - DNA, 416 bp, Homo sapiens
  misc_feature 45, 388: n = A,T,C or G
tttggagctccccgcggtggcggccgaggtacagtgttaagcatntaaacgttagatttccagaggaaggaggagtcccggacaggaatcatagcgttggtgtcactgtttttcatctaaatgaaaaataaaaacaagtcatacatgaaccctggggaagtagatattataattattttagaaatgaataaattaaaatttaatatacataaaagtcacagggaaccttttaaaattcagttccccaggactagagaactgcagtggatctggagaggccaaggacctagagtgataacaagcaccccagttgattgttgagacgtggtcccaaggtcactctctgattacttaggcttggcaatgcttttcaagaatttgaagcaanatggcattctcacaaaagatcaccttag

SEQ ID NO: 3891 - DNA, 350 bp, Homo sapiens
  misc_feature 15, 78, 94, 115, 118, 131, 135, 149, 155, 173, 186, 187,198, 204, 207, 222, 236, 237, 244, 245, 257, 271, 275, 283,290, 300, 307, 312, 316, 318, 332, 336, 338, 342: n = A,T,C or G
gcgaattggagctcnccgcggtggcggccgcccgggcaggtactttttttttttttttttttttttttttttttttantaaaaaccgggatttnaccatgttggccaggctggtntcnaactcctgacctnaggngatcccgccacctnggcctnccaaagtgctgggattanaggcgtgagccannatgcccggccnaaagtnaanaattttttccaaatnttttttctcaaaanntttaaannaaaaaacttttnaaactgcccaaaantttngaaaattnattaaangtaaaaactngcttttnttttnaaantngggggggtaaaaanaaangncccnaaaaaaaa

SEQ ID NO: 3892 - DNA, 494 bp, Homo sapiens
  misc_feature 20, 23, 29, 42, 52, 59, 63, 85, 126, 128, 151, 160, 172,200, 201, 210, 212, 239, 246, 248, 253, 261, 271, 282, 286,288, 290, 296, 319, 321, 333, 340, 363, 366, 377, 379, 384,385, 392, 419, 427, 439, 447, 469, 470, 471, 475: n = A,T,C or G
tttttttttcttttgtccanatnatggtnatcactatgttgncctggctganctcaaangttngacctcaaggggatctttcttncacagcctccttaagttgcctaaggattatattgccatganancacccaatgccctattgggaagnagggattancatttatttttncaaaaagtcctttaatttcctaaagganncccaatttnantttggctctttttggggccctaaaaantagaccntnaaaanaataaaanaattcccttnttgaaaaaacntttntntnttatgnaccaaaaaaatttatattcgcgngnccatttggaatngaaatgnaagaaaggaaaggggggggggtnttntggaaaaaacntntttcnntaaaatnaaaggaaggtgtgaaaaccttttaaanagggcccnttttttaaaaanaaaaaagnggagaagaaaaaaacctcctcnnntctntttttcatcaaaaaaaacc

SEQ ID NO: 3893 - DNA, 148 bp, Homo sapiens
  misc_feature 111, 119, 134, 139: n = A,T,C or G
tacttagggcgaattggagctccccgcggtggcggccgcccggccacggtacaacacttggcaaggtaactaatttctataagtccaggctttctcacctgcaaaattganataataangatattgattgatangtatnggctgattt

SEQ ID NO: 3894 - DNA, 335 bp, Homo sapiens
  misc_feature 62, 301: n = A,T,C or G
aatttagctccccgcggtggcggccgaggtacatatcagttatttatgagatttttttttanttatttcattttttttcacgactttttctgccattgaattagcctttttctcgtgcactggtggtcaagaaatacatgccataataagatggcagttaaacttcatcagtattttttttttttaaataagattatttagccaggcacagtggctcgcacctgtaatctgaacactttgggaaggccaaggcaggaggatcacttgaggccaggagttcaagaccagcctaggcaacatnatgagaccctgtctctacaggaaaaatgaaattt

SEQ ID NO: 3895 - DNA, 482 bp, Homo sapiens
  misc_feature 3: n = A,T,C or G
ctnctatagggcgaattggagctccccgcggtggcggccgaggtacaaatctttggcctttctcttgacattttcgtatgtcaaaaagcaaaaaaccttcatgtatttcaatctagtgattactttttgcaccataatttgtttttttacaccacaaaaggaggcactttcagtatctgtaaaaggtatttaatcctaaaacatacttacctagagaataattaaaacagaattcaatacaatctagtatctattaggaaattaagagttatcacttctaaaagtcatttgaaagtcaatgatgttatctggtcaatggcaggaaatgggaactggaacaaatataagaacttatgggatttcctacacggagacaaaaaaagatattcctttatgttgtttaaaagtggcagctgctctttctttattccattttaatcaatgagtattgtttcaaggttttcctttctatttttccttat

SEQ ID NO: 3896 - DNA, 244 bp, Homo sapiens
  misc_feature 71, 121, 186, 204, 209, 215: n = A,T,C or G
tacttagggcgaattgagctccccgcggtggcggccgaggtactttttttttttttttttttttttctaanacatcttgttatagcatctctgcatttattctaattttatctgtgcacanaaccttagcttcaagctccttgaagggtagcatcgtgtcccagcctacactgtcacactcagganaagcacccagtagatggnggctntgtatntacctacagagtgccactgaggagcacag

SEQ ID NO: 3897 - DNA, 457 bp, Homo sapiens
actcctatagggcgaattggagctccccgcggtggcggccgaggtacttcccatgttaaaagacatttattatcttgttttcctgtcatgggagttccagaaaaagttaaaacagacaatgggccaggttactgtagtaaagcagttcaaaaattcttaaatcagtggaaaattacacatacaataggaattctctataattcccaaggacaggccataattgaaagaactaatagaacactcaaagctcaattggttaaacaaaaaaaaggaaaagacaggagtataacactccccagatgcaacttaatctagcactctatactttaaatgttttaaacatttatagaaatcagaccactacctctgcagaacaacatcttactggtaaaaggaacagcccacatgaaggaaaactgatttggtggaaagataataaaaataaaacatgggaaat

SEQ ID NO: 3898 - DNA, 422 bp, Homo sapiens
  misc_feature 388, 399: n = A,T,C or G
ggagctccccgcggtggcggccgcccgggcaggtactttaactcatgtgctggaagacagcaaatcttggaagtttattataaaaaaaaagatatttcggatagattcctttgttgtcatgggcaaaactgtatatccacacaggactgttagactcctagccaataaaatcagactaagtccatagggataaggtaagtgtaaataaatttccattggggaagacagggctcatggcccgtgtatcaaggtctcaagctgagcactggagaactccagggaacactgttcatacaggctatggtgtgaaggaattcccctgtaggtatgccatacttcagtctcttaagaagctgattagcatgaaagactggaagctgattatggncaattcagttngaattattcctttctattttgct

SEQ ID NO: 3899 - DNA, 246 bp, Homo sapiens
  misc_feature 235, 238: n = A,T,C or G
tttgagctccccgcggtggcggccgaggtacaaaaccattttttcctacaaatagtttgttttttgttgttgtttcttttttttgttttgtttttgtttttttttttttttgcgttcgcggggttgtaaaagaaaagaaagcagaatgttttatcatggtttttgcttcagcggctttaggacaaattaaaagtcaactctggtgccaaaaaaaaaaaaaaaaaaaaaaaaaaangtncctgcccg

SEQ ID NO: 3900 - DNA, 426 bp, Homo sapiens
  misc_feature 64, 68: n = A,T,C or G
cgaattggagctccccgcggtggcggccgcccgggcaggtacaaacctggaagaaggacttacntacnagtcaaacaaaggcacattgcctaatgaaacgttaactttaatgcgtccaaaggttccatacctccaagttttatgtagtctgagctttttcatactgccaaactgggtatatttaaattcattctgtcttcatataacacaatacacctacctcctaagcaacagaagcatccaacctgcttatcaaatatggctatctactcaaaacgttaaagaatctaagaaaaagaaaggtaactagctccaataacaaaatatagatgttagttaaaatttttttgcttagaatctctttggaaaaacaaaagaaaaaactcattagggatgtttcctctttctatatagaatgataagccc

SEQ ID NO: 3901 - DNA, 142 bp, Homo sapiens
  misc_feature 21, 43, 52, 60, 79, 83, 85, 93, 124: n = A,T,C or G
cgaattggagctccccgcggnggcggccgcccgggcaggtacngctcccagnctactgangttttaggatggtctcggngganangcccactngaataaactgagtccaatacctgtacacagntatgtttaactgggctct

SEQ ID NO: 3902 - DNA, 506 bp, Homo sapiens
  misc_feature 13, 71, 403: n = A,T,C or G
ggccgaattgganctccccgcggtggcggccgcccgggcaggtacttagagttttccaagtatgttctaancacagaagtttctaaatggggccaaaattcagacttgagtatgttctttgaataccttaagaagttacaattagccgggcatggtggcccgtgcctgtagtcccagctacttgagaggctgaggcaggagaatcacttcaacccaggaggtggaggttacagtgagcagagatcgtgccactgcactccagcctgggtgacaagagagacttgtctccaaaaaaaagttacacctaggtgtgaattttggcacaaaggaagtgacaaacttatagttaaaagctgaataacttcagtgtggtataaaaccgtggtttttaggctatgtttgntgattgctgaaaagaattctagtttacctcaaaatccttctcttttccccaaattaaagtgcctggccagcttgtcataaaattacatatttcttttgggttt

SEQ ID NO: 3903 - DNA, 362 bp, Homo sapiens
  misc_feature 8, 25, 32, 38, 43, 46, 53, 56, 58, 192, 273, 305, 308, 316,354: n = A,T,C or G
cccgcggnggcggccgcccgggcangtactgnggcccncatgnccnttttttntgngngtggcacctgacagtgctttgtgccactgtggagcaggtgttactccctcataccgaattttaggattattttatttatttcagtgaaaaatgtcaatgaaattttgatagggattgcattgaatctgtagatngtttggggttgtatggacattttaacaatattaattcttccaattcatgaacatgggatgtctttttttttggcacctganctcagatatgggacagctttctaattatttgnatncttcaatntctttcacaaatgttttatagggtttcagcatacaganctttcact

SEQ ID NO: 3904 - DNA, 448 bp, Homo sapiens
acttagggcgaattggagctccccgcggtggcggccgcccgggcaggtacttgcccccaggcccagataatttatttaaaaactttttttgtagagacagggtctcactatgttgcccaggctggtctcaaactcctggcctcaaacaatcctctacctcaacccccctaagtgctggcattacaggcatcagctgccatgcctggctacaaatcttaatgttttccccatggcttctttttctggcgttcttttctcaggtaatggaagtgggcagagaatgatcctttccctaggctccagtgtgtaagaattaaagaaagaggaaagaaacacaatggcttgatggtcgaggacaggtttattttaaagaaaacaaacccaagagtggcttctggctgagttagatcagaggcatgctctcttacagactaagaagtttttaagg

SEQ ID NO: 3905 - DNA, 316 bp, Homo sapiens
  misc_feature 219, 224, 228, 230, 232, 235, 237, 242, 247, 249, 258, 263,270, 273, 313: n = A,T,C or G
ggcgaattggagctccccgcggtggcggccgcccgggcaggtacttgcccccaggcccagataatttatttaaaaactttttttgtagagacagggtctcactatgttgcccaggctggtctcaaactcctggcctcaaacaatcctctacctcaacccccctaagtgctggcattacaggcatcagctgccatgcctggctacaaatcttaaggttgntcccntggntngnttntntggcnttctntngtcagggantggangtgggcnganaatgatcctttccctaggctccagtgtgtaagaattaaanaaa

SEQ ID NO: 3906 - DNA, 390 bp, Homo sapiens
  misc_feature 20, 149, 281, 320, 343, 376: n = A,T,C or G
gaagcccttttgtacgactnctatagggcgaattggagctccccgcggtggcggccgcccgggcaggtactttttttttttttttttttttttttattctcgtatggcttgaagcaagatgatactaataaaaaccagttgggatttanatgctatcacaagacagagcttctgaaattactgaaattttgccattaaaatccctcaaggaattgtctctatttcacagatgatgttcctttaaaaaaaaagcaaaacaaaatatccatttttcaccttgngatctctccctttgtgttttgaatattgttaaaatgtancatggccttagcctggtcatggngcttgatcacctaccctcagtttccctcacagngacctccacccctg

SEQ ID NO: 3907 - DNA, 508 bp, Homo sapiens
  misc_feature 457: n = A,T,C or G
cttagggcgaattggagctccccgcggtggcggccgcccgggcaggtacgcggggcaaataaagccttggaattgaagaatgaacaaacattgagagcagatgagatactcccatcagaatccaaacaaaaggactatgaagaaagttcttgggattctgagagtctctgtgagactgtttcacagaaggatgtgtgtttacccaaggctgcgcatcaaaaagaaatagataaaataaatggaaaattagaagggtctcctgttaaagatggtcttctgaaggctaactgcggaatgaaagtttctattccaactaaagccttagaattgatggacatgcaaactttcaaagcagagcctcccgagaagccatctgccttcgagcctgccattgaaatgcaaaagtctgttccaaataaagccttggaattgaagaatgaacaaacattgagagcanatgaagatacttccccatcagaatcccaaacaaaagggacttttgaaagaa

SEQ ID NO: 3908 - DNA, 391 bp, Homo sapiens
  misc_feature 3, 302: n = A,T,C or G
ctncttagggcgaattggagctccccgcggtggcggccgcccgggcaggtaccaccacgcccagctaatttttttttggtatttttagtagggacggggtttcaccatgttagccaggatggtctcgatctcctgacctcgtgatccgcctgcctcagcctcccaaagtgttgagattacaggtgtgagccactgcactcagcccaaagaatacttttgatgttcctctttgttcatatttgtttttgatgtcccccttgatcatgttctgtgtttaccctcatggccggcctctccatctnctaggcagcctggcatcctcgctacaacctcattgttgtgggccgatacccagatcctaatttcaaaagttgtaccttcggccgctcta

SEQ ID NO: 3909 - DNA, 456 bp, Homo sapiens
  misc_feature 38, 62, 342, 382, 435, 440, 456: n = A,T,C or G
cgaattggagctccccgcggtggcggccgaggtacgcngggggcgaagttctgtgctggtcntttgagtagcaagtggccatggggagcctcagcggtctgcgcctggcagcaggaagctgttttaggttatgtgaaagagatgtttcctcatctctaaggcttaccagaagctctgatttgaagagaataaatggattttgcacaaaaccacaggaaagtcccggagctccatcccgcacttacaacatgagtgcctttacacaaacctacggattggcagaaaaagatcctcatatggtcaggtcgcttcaaaaaggaagatgaaatcccagagactgtntcgttggagatgcttgatgctgcaaagaacaaagatgccnagtgaaagatcagctatctaatgatttgcccttgacggtggtaggatgcatcnttcanggttattgagggcaan

SEQ ID NO: 3910 - DNA, 154 bp, Homo sapiens
gcgaattggagctccccgcggtggcggccgaggtactttttttttttttttttttttgagaagattgagaagtatatgcaatgtaagtgtattttaaaaagaaaagcaacaggtttgacttgaagctatatttttcttttccgttttttttttt

SEQ ID NO: 3911 - DNA, 437 bp, Homo sapiens
  misc_feature 77, 252: n = A,T,C or G
ttatagggcgaattggagctccccgcggtggcggccgcccgggcaggtacttttttttttttttttttttgcttgtnaatacttctaacttaagagcaagcaaacatatttcaggtttaattttatggaacaaacactctgcttgtgaattgtccacaatatttccataataactaacacactatcactccatcaggtttcactacacaaagtattgtgaaacggaggtggaaattttttccaggtgtttanacaagtatttaatgaagctgaagcaatatgttctttgagcatttaaaaatatttgagattaatttcaccagatgatttcttaatcaagtaaactggcttagataagaaaaagtcagaatattattaatgaacctaatgttctctcatgtttgagatcagccaacaggccacttacttatacccta

SEQ ID NO: 3912 - DNA, 394 bp, Homo sapiens
ccgcggtggcggccgggcatttctcccagggatctctgtgcttccttttgtgcttcctgtgtgtgtggatatttaaaggggctggaaatgtgcaaaaacatgtcactacttagacattatattgtcatcttgctgtttctagtgatgttaattatctccatttcagcagatgtgtggcctcagatggtaaagtcagcagcctttcttatttctcacctggaaatacatacgaccatttgaggagacaaatggcaaggtgtcaagcataccctgaacttgagttgagagctacacacaatattattggtttccgagcatcacaaacaccctctctgtttcttcactgggcacagaattttaatacttatttcagtgggctgttggcaggaacaaa

SEQ ID NO: 3913 - DNA, 435 bp, Homo sapiens
agggcgaattggagctccccgcggtggcggccgaggtacgcgggttgaagtcaacttctatcaacttttggccaggcccgtggctcatgcctgtataatcccagcactttgggaggccgaggcaggcggatcacttgaggtcaggagttcaaaaccagcctggccaagatggtgaaaccccatctctactaaaaatacaaaaaaattagccaggcgtggtggcaggcgcctgtagaatcccagctactcgggaggctgaggcaggagaattgcttgaacctgggaggtggaggtttcagtgagctgagatcgtggcattgcactctaacctgggcaaccaagagtgaaactgtctcaaaaaacaacttttatcaatgtctgcaaaaagaaaagtcttctggggatttataggatcaatttaggggagaaatgaca

SEQ ID NO: 3914 - DNA, 390 bp, Homo sapiens
ccgcggtggcggccgaggtacccatcttgtcccaagtgccaagctcttcagttgtttctgctacttaagaaagacaccatctaatctgccatatagagagcttaaatggagctgtaaatatttgggggaaagagtttggtagtgttagcctggcctgtcctccactgtattataagtagctgttatctgaaacaattgagaacacaggggaaaaaaagacccaattatgcaccaggaagtccagtgccccatttttggagaaggaaagtgagagggcattgagtttcattgattgggtctccgtggcaggccagctgccccccaggaaggcctggtattcctgtcctctccgtgaacctgcctgaaagggatataggagttattgggtaa

SEQ ID NO: 3915 - DNA, 332 bp, Homo sapiens
  misc_feature 37, 219, 264, 280: n = A,T,C or G
ccgggcaggtactttttttttttttttttttttttanacagggagatggggtttcaccatgttggccaggctggtttggaactcctgacctcaaaatgatccatccaccttggcttcccaaagtgctgggattacaggtgtgagcgacgatgccttgccaagatatttctgctttcaacatgcttacctgttcaagactccactggaaactagagcttntttaggatggaaatatttgtgatatacatttctaaccacagcatntatgagggaaaaaganaaggaggtatattttaggttagaaataaattcgatattatagactcatacca

SEQ ID NO: 3916 - DNA, 298 bp, Homo sapiens
  misc_feature 16, 61, 73, 101: n = A,T,C or G
aaaggccgaattgganttccccgcggtggcggccgaggtactggcgcgtgtggctgatgtnctgatgccaccntttttcttggaggggacgtgcccgaggngcactgccagtcttctgctgaccccgcagccccagagcacaccttgtctcgttcagtccagttcacaggagggctgaacagtgggaccaggtcgttctgtgaatttcacacttaatttttctctcttttaaaatctttaacatgaagatggcttttctaaactttaaaaaaaaaaaaaaaaaaaaagtacctgcccg

SEQ ID NO: 3917 - DNA, 428 bp, Homo sapiens
  misc_feature 25, 55, 73, 83, 102: n = A,T,C or G
cccgcggtggcggccgccgggcggntacttggtattgtattttttataaattttntttttatgtaaagcttanaatttgattnacagggaccttgctgcagnaaataccatctcaattttgtgccactggttcagctgttagcacagtaaaaaaatcatttgtatcaaaggggcaaatgctttattaaggtagtaaaagggaacattacttctgcttttaggaagttactgcaagcacaagcatttgtgcttttaagcaaattaaagtagtaaaagaaaaacttaagtgaaacctttgccatcttcatgttttataatataaagcttacccaacaccagttaagccatggttaaccctaaatgcctcatgccccagttcagcaaaaggaggaaaatgtgcctgcctcacagcatcagtctttttaaat

SEQ ID NO: 3918 - DNA, 478 bp, Homo sapiens
  misc_feature 443, 453: n = A,T,C or G
aggtacttagggtaagcactaacaatattattcaaaatgttatatagagttcaactgtatacaatagagcatttattaaagtgtgtccaaagcgcttataaataaagcatcttcgaggcaggcggctcacttgaggttaggaggaaagcagactggccaacatggtgaaaccccgtctccactgtggtcccagctacttaggaggctaaggtgggaggatcacttgaggacaagaagttgaggctgcagtgagccaagtgtttgtgcaattgctctccagcctgggtgacagagcgagactctcaggaagccgcagtgttagttgcctctgatttttgacaaagcatgggaagatggggggctgttcatacagggcaagcttcaagtgtcagtcaaataaaaacatccttgcaccgtccttttaggggaactacccagcaggntcaaataatngacagttctctggggaatggggcat

SEQ ID NO: 3919 - DNA, 386 bp, Homo sapiens
ctatagggcgaattggagctccccgcggtggcggccgcccgggcaggtaccagggcagcaacccaatcagtgacatttgggctatccacgcgctgcggatcgtggctaagtatctgaagagggccgtcaacagcactgacaaatgaagaagaagaatgagtctcagggcaccttcctggagtggccctcgccatccagggaccagcgcgttgcctcccccggcgcttttacatcacatgagcagctgacagcgtatttattatgcctttgctgaaacagttgatgagaaatatgtttcccttcagttttcatttagaagacaagggcggtcgtttgaataacttgcctgatttttcttcctacccgagtagcatttcttttttttt

SEQ ID NO: 3920 - DNA, 233 bp, Homo sapiens
  misc_feature 126, 171, 233: n = A,T,C or G
ttagggcgaattggagctccccgcggtggcggccgaggtacttttttttttttttttttttttttttttacttttttaacttctttttaagtagcccaaatgacacaagaccagtattgacacatntcacataaatacaattcttgacagatacacttttttttttactgngtaacttttttttccaatttagagaaccgcatcctattccatgctgcttacccgcgtacctn

SEQ ID NO: 3921 - DNA, 501 bp, Homo sapiens
  misc_feature 8, 67, 134, 181, 448, 481, 487: n = A,T,C or G
ttagggcnaattggagctccccgcggtggcggccgcccgggcaggtactttttttttttttccttanagacatggcctcgctatgtttcccaggctgcagtcagtagctattcattcacaggcacgatcactgngcactacagccttgaactcctgggctcaaaagcgatcctctcgcctnagcctcaccacatctggctactgtttatatttggtgtaaggacgggatgtttactttctggaaataagttagagttgttcataattgaagttgcagaatgaggaattattgtcaataataaacattaactcaaaatcccttcattaactgtttattgccttagaattaaaaggtgaaatgtatagttaaaaaaaatctacacataaactggatggtgcaatccctatacttcacttcaaagcctgttgcatcccaggagttaaagtntaattaccaaaatcagtaccttgggccgtctanaactanggggatcccccggg

SEQ ID NO: 3922 - DNA, 377 bp, Homo sapiens
  misc_feature 235, 256, 266, 274, 276, 302, 309, 314, 315, 321, 328, 332: n = A,T,C or G
aattggagctccccgcggtggcggccgcccgggcaggtacccagtgaaacccaaccttcaggcctaaaacagcctgaaggctgaaagattggactgctggtcccagatgaaaaacacgacccagagggagaactgcccctgtttgtccaccctttcccaactgattctttctgaataatgcccacatgtgcactggaaggaatggggtggaggtgaccatggaatttgcaccttntgccaggggggagggagtctnggctcttcanctcatgtngnggggggccctggatatttcaattctntgaaggnggggnnggcccnttgggcnaggnacaccccctcacttttgctgaaaagtttttttttttttttccttt

SEQ ID NO: 3923 - DNA, 244 bp, Homo sapiens
  misc_feature 2, 55, 191, 233: n = A,T,C or G
tncttagggcgaattggagctccccgcggtggcggccgcccgggcaggtactaangatgaaagtagaagtcttttttgacaaaattcagttttaaagttgagttaaaaactggttgataagattgagatctatttcttctaaagagtggggaaattcatcctctggttttgctaacttttttttggagggnaagcaggaaataattaaattggggcctctttttgcagtttanggaaaaaattt

SEQ ID NO: 3924 - DNA, 166 bp, Homo sapiens
attggagctccccgcggtggcggccgcccgggcaggtacacccaggtggctcatatttaacttcccccagcttcccaattcaaactggggggaaaaaactaaatcattgggagttacttgccaacttggaagttgatattttctttacttttttccattctaagac

SEQ ID NO: 3925 - DNA, 283 bp, Homo sapiens
  misc_feature 252: n = A,T,C or G
aggtaccaccacgcccagctaatttctatactttttgtggagatgggagtctctccatgttgcccaagctggtctcaaactcctgggctccagtgatctgcctgtcttggcctcccaaagtgctgggattacaggcgtgaaccacgtgcccgtccccaaaaatggttttaaatacatccaacgtatcatcctccctctttaactgcactcattaaattaccgtttcttcatttcaaaaaaggggaattcatnatttcccttttcttccacttccatggcccta

SEQ ID NO: 3926 - DNA, 131 bp, Homo sapiens
  misc_feature 105: n = A,T,C or G
cgcggtggcggccgaggtacattcatttgctttgctctgtcaatatgcttgagttgcaaatgtagacattgaaatgatctgaaattccctctgacagagaggtgntccaccacttgatatacatttctcct

SEQ ID NO: 3927 - DNA, 404 bp, Homo sapiens
  misc_feature 8, 28, 397: n = A,T,C or G
aggtacanggttattatgaatagggaanggaacaccttgggcccaggagtgagtgtttcttcttttacaggtgtaactaaaaagctagttggtctaacttgtgtgtctttgtcctataagcctctgcaggtgtgcgagcaggattgcttctgcaacaatagcctccacccagccacatcttgggaaaagaatggccacttcttggggcacagtctttttcatgctggtggtatcctgtgtttgcagcgctgtctcccacaggaaccagcagacttggtttgagggtatcttcctgtcttccatgtgccccatcaatgtcagcgccagcaccttgtatggaattatgtttgatgcagggagcactggaactcgaattcatgtttacacctttgtgcanaaaatgc

SEQ ID NO: 3928 - DNA, 271 bp, Homo sapiens
  misc_feature 30, 35, 57: n = A,T,C or G
tggagctccaccgcgggggcggccgaggtnctttnacacggatgctaaagttattgngctggccgcgttaagggtcaggcatcaaaatggccgctcaagagaatgaagctttctctttgtgcagatgcaacgggtgggatggggtgcacaattatcacagtgctggttgtaggtgttacctcgacattctgccttacagctgaggggggatttgtttcgtccctgcctaaatgaaaggtgttaaaataaaacttggatgctgttattggaa

SEQ ID NO: 3929 - DNA, 259 bp, Homo sapiens
  misc_feature 9, 25, 39, 40, 110, 180, 190, 193, 238, 244, 248: n = A,T,C or G
gccgagganccctttttaagggcanggcttttgttttgnngcctatgggtaaaggtttaacaaacccctgcccctaaggcatgagaatctaactttaagttgaactctancactgttctccatgttacctgataaactgtcagagtgtcatcaatgtttcttaagacaacccggcttatnggtaaaaatngantccctgccctggtcacttccatctggaacctgaagtatcctatgnagctantttnatggggaaaat

SEQ ID NO: 3930 - DNA, 199 bp, Homo sapiens
  misc_feature 95, 98, 102, 103, 122, 123, 127, 162, 183, 195: n = A,T,C or G
cgaggtacacaaaatccattttccacttaaaggcctgagccaatgcccccaaccagcctatcttacttttattctttatgttaagccccatatcnccnagtnngaacatggtcctctgcttnnaaancggaaataatgaactgtatagtttggcttgtcatnagtttttgaaaagcagtaaanacaacccaaaanacat

SEQ ID NO: 3931 - DNA, 579 bp, Homo sapiens
  misc_feature 31, 79, 95, 117, 129, 168, 171, 185, 198, 202, 213, 220,226, 233, 236, 243, 247, 253, 264, 270, 274, 287, 297, 305,307, 313, 339, 348, 350, 352, 355, 372, 381, 383, 391, 393,402, 405, 414, 435, 442, 446, 455, 459, 466, 470, 473: n = A,T,C or G
  misc_feature 486, 490, 504, 506, 511, 521, 553, 562, 573: n = A,T,C or G
aggccgaggtacttttttttttttttttttnttttggggaggagaggagcacgtcaaacatcacgtaatatcattactnagccagtcaactgaanaagcatgataaaacctgaaatntcccaaggccanatccaaacaagccacggcatttaagattaaggctacacncanggcaccgtgctatntcactacagcatngggnggagcacaacngttcatnagaggnatttgcnagnaggactngggnttctgnaggtctttaanatcaancatnctgtacaagcctnggtcctgtangccccagnangaaagngttaatactaatttattttgtggccnttggttggngntnganccacccctggcccccgntgttacacntntctcccgngngccgggcancgncctccttanaaaaccttagtttgggtaatnccccccnccgngggtcttgnctanaggaaantttnctnaatttttccaaangccntttattctgaattnancccgntctggacccntttcttagggggggggggggcccccagggttnccccccaanccttttttttngttttc

SEQ ID NO: 3932 - DNA, 468 bp, Homo sapiens
  misc_feature 5, 11, 115, 173, 174, 177, 201, 216, 236, 243, 260, 297,308, 312, 322, 332, 348, 359, 373, 385, 394, 403, 411, 420,460: n = A,T,C or G
ccggncaggtncaaagatctgacatgtcacccagggacccatttcacccactgctctgtttggccgccagtcttttgtctctctcttcagcaatggtgaggccggataccctttnctcggggaagagaaatccatggtttgttgcccttgccaataacaaaaatgttggaaanntcngagtgggcaatagtctgtttgccnttggcatctttcacngtggaaccacgtcaaaaagnatccagngggtgccctctctctgntttgggtggatccacaccccaaatttctttccctaanggttaagccancccntcccagttcnaccccattancaaccaagggttttancccaaagttgnttccggaaaacttntggaatcggaanaaaattccnaggttatanttcttttngccccaagntccttctttaaaaaattcaaaattcctggaaaattggggntattccaa

SEQ ID NO: 3933 - DNA, 551 bp, Homo sapiens
  misc_feature 207, 240, 286, 302, 335, 341, 357, 360, 369, 370, 388, 395,414, 427, 436, 438, 444, 455, 456, 520, 541: n = A,T,C or G
ctcgccctgtgcctggtcccgcttgtgagggaaggacattagaaaatgaattgatgtgttccttaaaggatgggcaggaaaacagatcctgttgtggatatttatttgaacgggattacagatttgaaatgaaagtcacaaagtgagcattaccaatggagaggaaaacagaccgagaaaaatcttgatggctttcaccaaggacantgccatacaaaaccaaaaatgggaatacctgtngatggaccatagagggcagcccaagcctggggggaagggagaatanacccaccgggggccancaagggggttcaagggaatttcttgggcccctngcttcncttaaaaactggttgncgntttcattanncccaaaaattctattttncaataantttccttaaacccccttcnaaaaacaaaaaanccttggttngnttaatnattcctcggannccttctaaccgggtttccccttttcttggggggccccaaaccaatttctttccataaataattnccaagccccacaaccttcaanttttttttta

SEQ ID NO: 3934 - DNA, 457 bp, Homo sapiens
  misc_feature 5, 388, 430: n = A,T,C or G
gggcnattgagctccccgcggtggcggccgcccgggcaggacccacacagtttaagcaaactaaaagaacactgacactttctcagagaacagggatgggaactttctatctgcccattagtatctaccccaagctacgaagacttccattcctcttattaagcattcagcaactacatttagtgcctactatgccagtgatgcaagaatggataagacagtccctacactcaaggataacgcctctagtaggtgagagacaaaccgattaattctgcataagggataagtgctgtatgtgggaagcaatccaatgagggctctgaggatggcaaaggaagggttcctggaggatttacatttaactggtgccttgaaaggtgtgtanaaagttggcaagatcaaaagggagtagagtccaaggtggganaagagaaaaggagcaggggccaggctt

SEQ ID NO: 3935 - DNA, 186 bp, Homo sapiens
  misc_feature 35, 56, 57, 69, 70, 120, 147: n = A,T,C or G
ccgggcaggtaccaagtgaaagggctgcaggtctntcatcagacttttcacattanntgtagcctgatnnatgcaaatagagacccctccccacttgaagctccctcctcatcacttccnaaagctaaaaaattatttgataatctnatcattgtgccttcttggacatcgtaatttagcactgac

SEQ ID NO: 3936 - DNA, 606 bp, Homo sapiens
  misc_feature 287, 350, 354, 372, 383, 404, 409, 412, 424, 427, 430, 447,453, 484, 486, 504, 508, 510, 520, 522, 528, 547, 548, 550,556, 561, 566, 571, 573, 574, 582, 588, 590, 592, 593, 594: n = A,T,C or G
ctacttagggcgaattggagctccccgcggtggcggccgaggtactacaggcacacaccaccatgcccagctaatttttttgtattcacgtagacacggggttttgccatgttggctaggctggtctcaagctcctgacctcaggtgatccatcgcacccagcctccttttttatgttgttttttgagacagggtcttgctgtcacccaggctatagccgcaagtggtgcattcatagctcactgcaacctcgaactcctgggcttaaagcactcctcctgccttangcctccccaagtaagtttagggactacagggtgcacaacccacccaccaaccctgggcttaancctnttcgaggcctccaaggtngagcctttttnacccctcaagccttattggangtggnttnggggaaccaacnaangtngccaaaggcttacccgntggccnaggggccttttttttttttttttttttttgnangggggggggggaagaaanaaanangggaattttntnccaacnttcctgggacccctttaanncnaaattnttttnccccnacccntnnagagcccntctccnanannngggggggggggg

SEQ ID NO: 3937 - DNA, 391 bp, Homo sapiens
  misc_feature 11, 70, 71, 163, 344: n = A,T,C or G
ctactataggnttaattggagctccccgcggtggcggccgaggtacggcaaagcagtggaatgttttctnntagctgatgttttttaaaaacttaagttccttgtctttctttttctcttaatcaggattccggagtttgaatccacctttgacaattgtccnaaagacgtttgaatcaacagaaaacccagatgacttcttgccctctgtaatgacttgtgtgaactatcttaagttgccggactattcaagcattgagataatgcgtgaaaaactgttgatagcagcaagagaagggcagcaagtcgttccatctttcctgattatagcaagaaatgcagtntctgcctgttacagcaaaagaaacaaatcatgatttcttttctaatg

SEQ ID NO: 3938 - DNA, 245 bp, Homo sapiens
  misc_feature 102, 123, 129, 149, 159, 169, 177, 204, 207, 213, 218: n = A,T,C or G
ccgcggtggcggccgaggtacgcgggtgctggaattacggtgtgagccactgcgcccggcccttagtagcatcttttaatggaggtagagttgagatttcantgactaacaactaaaggtatnaaaggnaggggtttatatgatacatntgcattttanaaaactgatntaagcttnaatgtgaagaacagattgaaatggaanggngagaanactanaagcagaaacattactcatttaagtaa

SEQ ID NO: 3939 - DNA, 178 bp, Homo sapiens
  misc_feature 159, 161: n = A,T,C or G
ctacttagggcaattggagctccccgcggtggcggccgcccgggcacggtactttttttttttttttttttttttgggagaaggggtcagggagcaccttacctctagtggacaagggccctgagctttacacagccctccgtatttattaggcaaaananataggagggtggggggg

SEQ ID NO: 3940 - DNA, 393 bp, Homo sapiens
  misc_feature 47, 265, 286, 344, 376: n = A,T,C or G
attggagctccccgcggtggcggccgaggtacccaatgctgatttgncatctctctagattttactttttcatattgaaattctttttttagtctattctcttgtagcttttgttacatccaatgatcatttgcctctctccaggcactaccaaactcattactgtggatagtttctgcctttacaggcttagaattgacaaattgagagacacatttttttcaattctcaaaacaactagactctttccagcagatttgctaangcacactactaagaaatgtanaaatctcacattcttgttctagttaatacatgggagaatattactaatacatacattngttttctacatttgtggttgccttatacattnttcctttcacgttttaa

SEQ ID NO: 3941 - DNA, 366 bp, Homo sapiens
  misc_feature 214, 307, 345: n = A,T,C or G
agggcgaattggactccccgcggtggcggccgcccgggcaggtaccaaactaaactgacagtccttcgataatatgaaacattaatttacaaggacccgttagggcttcaatgatgctgagtcttggaaaagggggggagacccttgggaggactccaggcagctgtgctcccagggctcatgttctctaactggattagggatatgtcacctntgaaaatctccacccttgatgatttggaaatgaaaaccggagtggaacattgagccccagcttgagaagaaggaagcaaggaaattgttgtgnaaaaaaacaggcttgcttctcccttttggttcccaagnctttttggttgaatttggaag

SEQ ID NO: 3942 - DNA, 293 bp, Homo sapiens
  misc_feature 8, 44: n = A,T,C or G
ttagggcnaattggagctccccgcggtggcggccgaggtactangggaggctgaggtgggaaggatccctggagcacaggaggtcaaagccgtagtgagccatgatcacaaccactgcactccagcttgagtgacagagagagaacctgtctcaaaaaaaaaaaaactaagtctaaacttgtagatcatctcatgatagattcatagggaaatgatacagttgaccattgttctggcaggttccatgtgctgagtcctcgggtatatatctcacaggaagtgattctagcttg

SEQ ID NO: 3943 - DNA, 336 bp, Homo sapiens
  misc_feature 66, 81, 95, 100, 102, 108, 131, 138, 143, 163, 171, 178,194, 200, 206, 208, 213, 217, 226, 239, 240, 245, 248, 255,263, 270, 283, 284, 321, 329: n = A,T,C or G
aggtactttttttttgtgtttttactacgagacggggtttcacttgtgttggccaggataagtctngatctcctgaccttntgattcttgcccgncttgngncttcgncaactcttttttgaccccttcangggaacnggctnaacttgaaatttttgttccnttgcggangccccantgctttcttggatggncatggnccttangngggangccntgtgaagangcaataccagggnngtgantcnaagctcntttttccngcctggnatcccctcattgnnccccttgtcttgacaaccccttggtgagggggcttgngaaaccanaggcctt

SEQ ID NO: 3944 - DNA, 439 bp, Homo sapiens
  misc_feature 395, 423: n = A,T,C or G
cctatagggcgaattggagctccccgcggtggcggccgaggtgtgatgtttgccccacaacaggggtcatttggcaatgtctggagacatttttattgttatagctgaacaggaaagtgctactggcatctgggaggaggctgctaaacatctcacaatgtgttacccgtcccaaatgtcagtcgtgttgaggctgagaaacatggtttaaatgagtcagaggctggccacagtggcacgtgcctgtagtcccagctactcaggaggctgcggtgggaggattgccttaacccaggagttcaagactagactgggtgatatagcaagacctctgtctcaaataaaagaagcaaaaaataaatgaatcagagactagtaaatctacctcctctcanatttaaagtctcaagccttagagctganaagaagaaagaaatag

SEQ ID NO: 3945 - DNA, 167 bp, Homo sapiens
  misc_feature 19, 60, 76, 84, 123: n = A,T,C or G
tccccgcggtggcggccgnccgggcaggtacctggttttaacattataccaaggaaggangcactgaagagggtangaaagacngtcttgaatggctgatgccacccctcccctatggaggantgtggtgctgagagagaatctgtgcttgggagagggagagcaca

SEQ ID NO: 3946 - DNA, 464 bp, Homo sapiens
  misc_feature 1, 403: n = A,T,C or G
nctatagggcgaattggagctccccgcggtggcggccgaggtacctcagggtctggtggcttctcttctctacccttttcttaagagtcactggtgtcataaagccccagaggatcaactctgtatatcagcctcatgagaactgaccttctcctgacctcattaatgctcttatttaaaagttctctaattaagctttgtattttgatataattagagactcacctgcctgtgtcttaaaaataactctcccagctactatctcacatgatctgtgggcccatcttgtgaagcctagtattaaaaaatatttttgtttttcagtggcgtgcattttaattctcaggccatagctcctaccattgaacagattgaccagtcttttggcgcaacccatcctggnaggtaagccaagtccatctgattcctctggtcatcagtggcagttcatagcaataaacctg

SEQ ID NO: 3947 - DNA, 377 bp, Homo sapiens
  misc_feature 271, 355, 358: n = A,T,C or G
ccgcggtggcggccgcccgggcaggtacctggttttaacattataccaaggaaggaggcactgaagagggtaggaaagacagtcttgaatggctgatgccacccctcccctatggaggagtgtggtgctgagagagaatctgtgcttgggagagggagagcacagtgactatggcactttgtattggaactcagtgtttgttggtctgtctgtcggaatggaaagcaatgcagggcacaatttcgctggtgcccacagaggctgcatttanaacaagccctagccagagaagaatcttccatcctagcaattggaacctgggttccagctagcccacccgctgtgggctaaagtnatntaagctcctaaataaaatt

SEQ ID NO: 3948 - DNA, 175 bp, Homo sapiens
  misc_feature 46, 97, 113, 146, 155, 161, 169: n = A,T,C or G
ggcgaattggagctccccgcggtggctgggccgcggtactcccttnccctgactcagccttttattgatgaaggcatgggatgggatggggagagcncacctggcaaagactncacacaggtgtgcagcacaccctgatggggccngaaaatgtnactgtnagccctangggtga

SEQ ID NO: 3949 - DNA, 186 bp, Homo sapiens
  misc_feature 155, 169, 170, 172, 173, 174, 175: n = A,T,C or G
ttagggcgaattggagctccccgcggtggcggccgcccgggcaggtacaatcatgaggagcagaaccactaagataaagattatgtatatatgtattttaagggatttattatagggatctgaccgcatgccattgtgggagctggttaaacagnctctgtaaggctgnngnnnntgcatctaatg

SEQ ID NO: 3950 - DNA, 125 bp, Homo sapiens
  misc_feature 3, 40, 48, 49, 50, 51, 55, 56, 57, 59, 75, 78: n = A,T,C or G
ctncttagggcgattggagctccccgcggtggcggccgangtgcctgnnnngctnnntnttacttagacatattntanaaattattaaaaagattttcatgtttgaaaacttggggaaaaaagat

SEQ ID NO: 3951 - DNA, 350 bp, Homo sapiens
  misc_feature 36, 44, 133, 138, 210, 222, 243, 273, 338: n = A,T,C or G
gaattggagctccccgcggtggcggccgcccgggcnggtactancggaattaagaaagaaacttgtgtgttgtctggttttaaaactgttttttaaggcatgtaatgttgcttattttacctttttaattctncctgnataacattttctttcttccactcagtgaacatcccaaaatagaattttacttgaaaaactttacatcagccnaagatgttttgnttgccataaaggaagtaggtntcagagggggtaattccaatacaggtaagnagactttgatacctgggatgtaacataggagagggttatcagtgatcagacatgtaaaacagtantatgctatttta

SEQ ID NO: 3952 - DNA, 371 bp, Homo sapiens
  misc_feature 20, 24, 25, 26, 28, 64, 68, 128, 185, 190, 192, 193, 195,231, 243, 269, 326, 329, 356, 358: n = A,T,C or G
gcggcggccgcccaggcacnatcnnnangttacatgtataccagagggggtgaggcactgctanggtnaggaaagacagtcttgaatggctgatgccacccctcccctatggaggatgtgtggtgctnagagagaatctgtgcttgggagagggagagcacagtgactatggcactttgtattgnaactnanngnttgttggtctgtctgtcggaatggaaagcaatgcanggcacaatttcnctggtgcccacagaggctgcatttanaacagccctagccagagaagaatcttccatcctagcaaattggaacctgagttccanctngcccaccgctgtgggctaaagttgatntnagctcctaaaata

SEQ ID NO: 3953 - DNA, 381 bp, Homo sapiens
  misc_feature 20, 156, 325, 367, 374: n = A,T,C or G
taagggcgaattggagctcnccgcggtggcggccgcccgggcaggtacttttttttttttttttctttaggggcacagagctagcaaaagagccaggaatcaacccttattttgtcttattccaaatgatatagtgtttgtattctaccaagtcanataagtaggtggagaaaagacaaagtgacaaaacacaggagggacaaagagattatgccttcatgcttccccgctccttgaaaatgtagtatatgccaagttttcattgattcagtgggtaaggcaagggacactggcctggtgccagttcaaccactctttcagtctntttgtttattcaacaagctgttccactgggtcctgggggaanagggaantattttg

SEQ ID NO: 3954 - DNA, 225 bp, Homo sapiens
  misc_feature 10, 161, 171, 178: n = A,T,C or G
aggtactcanctgaaaacactgtttcagccccctctctggtgacctcagccttctccaggtgtatctcttgatgatcttggagaccagcagccacagctgctgctactcctgcaggagactgtcaggctgtggtggggggcaggggtgttggaggagaagntgaaaatccntgtgttntctgcccctctgctcctccatcttaacttctggaggagttaaggcac

SEQ ID NO: 3955 - DNA, 310 bp, Homo sapiens
  misc_feature 274: n = A,T,C or G
ccgcggtggcggccgaggtactgtggcatggcgcagtgggtgacatgatggccacatagcggtcaaaagccatggccagcagcactgtggattccatgccagataaggagtggatggcaaacatctgtagcagacaagcatcaaactggatggtagtggaattgaaccagaagatggccagcattttgggcatggatgaggtggagatgagggatgtcaatgcctgaaagcatgcaaagaaatatatacatgggctcatgcaggctgtgctcantccgcacaatgtagatgattgtcaagttacctagca

SEQ ID NO: 3956 - DNA, 286 bp, Homo sapiens
  misc_feature 24, 30, 200, 212, 240: n = A,T,C or G
attgagctccccgcggtggcgganatgtcngatttttttttaatttaatgaaattgttaatgaggaaaaatttttaatatagtcttgtctaccacacatccccatagatttaaggattttaatagaaagtcatgatgtatgtatttaagccacgttaaaagaaaaaatataactatggaccggtattcagtgaatacagnttcatggttttnaattctttcaaagcacattaaaaatggngtgctgataaaccccaagtaaattaaccctttttccgtataaatcc

SEQ ID NO: 3957 - DNA, 127 bp, Homo sapiens
  misc_feature 19, 23, 68, 102: n = A,T,C or G
tagggcgaattgggtccancccnccgcggtggcggccgcccgggctggtaccaacgcctcccaggcanagccccccaactcttgatttttgatgtcactaancggccctcaggggtccctgatcgct

SEQ ID NO: 3958 - DNA, 435 bp, Homo sapiens
  misc_feature 2, 26, 164, 196, 313, 315, 324, 327, 341, 346, 348, 355,358, 363, 375, 381, 386, 394, 396, 402, 417, 418, 423, 431: n = A,T,C or G
tnggagctccccgcggtggcggccgnggtacatcaccctgctgagggacatccaggacaaggtcaccacactctacaaaggcagtcaactacatgacacattccgcttctgcctggtcaccgacttgacgatggactccgtgttggccactgtcaaggcattgntctcctccaatttggaccccagcctggtggancaagtctttctagataagaccctgaatgcctcattccattggctgggctccacctaccagttggtggacatccatgtgacaataaatgggagttcttcagttttatcaaccaacaancnagctttcangcncccaagcctctttntaccntnaattttnaancaatnacccaaaacctnaccatnttttncccaaggnanaaaaancccaaatccagggcnnccacnccaatttncccc

SEQ ID NO: 3959 - DNA, 473 bp, Homo sapiens
  misc_feature 23, 35, 137, 155, 157, 223, 372, 373, 393, 400, 444: n = A,T,C or G
ggcgaattggagctccccgcggnggcggccgaggnactttttttttttttttttttttgacggagtttggctctgtcactccagctggagtgcagtggcgtgatcttggctcactacaagttccgactgcctggttnaagcgattatcctgcctnancctcccaagtagctggaactacaggcacgcaccaccacgcccagctaatttttgtatttttagtanagacgaggtttcaccatgttggccaggatggtctccatatcctgacctaatgatccacccttctgggcctcccaaaatgttgggattacagggtgtgagccactgccctggccccatgtctcttcttataagggccttaatcccatttnngaggggcttttgccctcaanacccaantaaccttccaaaaggtcccaattccaagaaccattcacattcanggtttaaagcttcaacatatgaatttggg

SEQ ID NO: 3960 - DNA, 348 bp, Homo sapiens
  misc_feature 230, 328, 340: n = A,T,C or G
ccccgcggtggcggccgcccgggcaggtacaaagatgctacaccggagaaagggggatctggtgatcctaattttgtcaccagctttgaaatctttagctaggcatttcagccctataaaaatccattttctcacttgtaaaaagaagagttgaagttatgtttttccagggcttttttctctgacaaaccgaattgcagaacaattttatgactcaaccaacgtagcanagtccagagagagtttgaaaaaaacaccttacaaaacttataactggaagttctccctccaagggcacttaattttttcaagtgaaagcatgcatgcnagattcatccanctgttacc

SEQ ID NO: 3961 - DNA, 449 bp, Homo sapiens
  misc_feature 352, 395, 420, 436, 438: n = A,T,C or G
acttagggcgaattggagctccccgcggtggcggccgaggtacacgttcagcccttctcgactggaggcggttctgcctattccgctccccacctggacacttagcaatgcctggagacatttttgattgttgtaaatggcatctagcaaggatgctgctaaatatcctataatgcacaggacagctgggaccctccccccgccaacaaggaataatccacccaaggtctccatagcactgaggcgccgacagcttgcagtggctcacgcaggaggaaggagcctggcgctttctagacgcctcctctgagaatattaccgaatgcactacatgctaggcagaaaggattgngcaagatcattatgctaatccgttgtaacccctgtgcactgtnaagatccttggaatatggaatattnccaagtaaaaaatttncncccaccctggt

SEQ ID NO: 3962 - DNA, 290 bp, Homo sapiens
ctacttagggcgaattggagctccccgcggtggcggccgaggtacgcggggggcatttccgggaagatggcggcgcacaagtcaggtccggcacatgtttccgcggagcggacccagcaatgacggatgatatcacctcttcttctctggtgagagtctgaggatagagacttttttctcaccatgaatgccaccccagaggtcaagagtcgtgggatgaagtttgctgaggagcagctgctaaagcatggatggactcaaggcaaaggcctcggccgctctagaactag

SEQ ID NO: 3963 - DNA, 125 bp, Homo sapiens
  misc_feature 41, 43, 95, 100, 110, 116: n = A,T,C or G
ctacttagggcgaattggagctccccgcggtggcggccgangngccggggcctttctcattgactatgctgctggtggggaaaactgcttgtctnatganagggaagggntagatntcatagaga

SEQ ID NO: 3964 - DNA, 361 bp, Homo sapiens
ccgcggtggcggccgcccgggcaggtacaccctagcttcttcagaggaaatggaaatatcttgaactaagcagcattccagggaatcccctagcaaaaatacatacaataatcctgggctgggcagttgctcatgcctgtaatcccttgggaggctgaggcaggcagattgtttgagcccaggagttaaagaccagcctgggcaacacggtaaaaccccatctctacaacaaatacaaaattaggctgcacgcctataatcccagcactttgggaggccgaagcagatggatcacctaaggtcagggagtttcaagaccagcctgactaacatgggtgaaatccctactaaatacaaaaaa

SEQ ID NO: 3965 - DNA, 482 bp, Homo sapiens
  misc_feature 2, 49: n = A,T,C or G
tncttagggcgaattggagctccccgcggtggcggccgaggtacaatangcaaaaatcaaagagcacagactgtattttcaagaacagaaaaatctctaatgctgaaagatatagtagaaagcagatttctttggggacattaatcaattagtttataattcattatgaagatttctcttttttattccggggagagtctgctacatttgaagttaatgttccattcacaccattttctgcaaaaagaaaagaatccatgttactctcttttataaataaatgccaagttataatctttatatgtaaagataccttcagaaaagaaaaatgtaaaatccaattcactcagggggaaatttacttaccagtatttaaccaatcacaaaacctggtaacatttttaacacaatgaactgggaaagtaggcaaattaaaagaaaacttctattaaaagcagaaaaaagtggccagccagaaaact

SEQ ID NO: 3966 - DNA, 633 bp, Homo sapiens
  misc_feature 456, 458, 474, 572: n = A,T,C or G
agggcgaattggagctccccgcggtggcggccgggcaggtacagaagaactgtatgggtatctgaagaagtatcacatagacctagatccacacttcaacgatatcctgggacaacattcacggaaacgctgggaaaactttatccatagtgagaacagacaccttgtcagccctgaggccctagatcttctggacaaacttctgcgatacgaccatcaacagagactgactgccaaagaggccatggagcacccatacttctaccctgtggtgaaggagcagtcccggccttgtgcagacaatgctgtgctttccagtggtctcacggcagcacgatgaagactggaaagcgacgggtaatgcggcattgatgcttgccaataaaaccaaccaaccaaacacaaaccttgaaggaaagctacagtgtgataaaaagaaattcttatcattccttntnaatgcacagaagagtnaaagacctaaaagtctgtcaaaaagcaagaaagaaactccccagtgctagtctccagggagctgtcactgtggcagcatggggatgcacctagttcangatctgaaggagctctgcctttggaatgcatgggagatagaaactcggagttgttgtacct

SEQ ID NO: 3967 - DNA, 471 bp, Homo sapiens
  misc_feature 360, 405, 415, 424, 425, 427, 431, 438, 464: n = A,T,C or G
aggtacaggtttgggggctctttccagcctctactatgttgcccccttccccaaagcccttacaggggcagaagcacattccccgtgaccctgagtctggcctcatttgggaagtcttctgtggtgtatggatgcctgtgtgtgtgagtgagatggtggggggccacggctatctggctctagcacactcatgggagaccagctctgggaacaacaggatggggtgctgggatgggggtttaagaggtctctgctagatatttctgaactgacctccccaggtgcccaacctggccttgggaagagagtgcctagggcagcggggatggaaacccttgcctgcagcataggtcaggcctnatggcctacaccttgacctcttgactttgttgccctggccttaantacctgcccnggccggccnntntaanaactagnggatcccccgggcttgcaggaattcnatatcaa

SEQ ID NO: 3968 - DNA, 620 bp, Homo sapiens
  misc_feature 443, 457, 471, 541: n = A,T,C or G
ccgcggtggcggccgggcatttctcccagggatctctgtgcttccttttgtgcttcctgtgtgtgtggatatttaaaggggctggaaatgtgcaaaaacatgtcactacttagacattatattgtcatcttgctgtttctagtgatgttaattatctccatttcacagatgtgtggcctcagatggtaaagtcagcagcctttcttatttctcacctggaaatacatacgaccattgaggagacaaatggcaaggtgtcagcataccctgaacttgagttgagagctacacacaatattattggtttccgagcatcacaaacaccctctctgtttcttcactgggcacagaattttaatgcttatttcagtgggctgttggcaggaacaaatgaagcaatctacataaagtcactagtgcagtgcctgacacacaccattctntttgaggtcccctntagagatcccacanggtcatatgacttcttggggaagcaagtggctcacacctgtaatcccagcactttgggaggctgaggcangtgggtcacctgaggtcaggagttcaaagaccagcctggccaatatggtgaaaccccatctctactaaaaatacaaaaa

SEQ ID NO: 3969 - DNA, 538 bp, Homo sapiens
  misc_feature 410, 453: n = A,T,C or G
aggaggatggtgcccagatttgtatcaggcactggagaacctcccacctggtccatgcccggctcccggtgagcaccgagacccaaccttgtgcacagccagtcttgtcatcaacaaacagggtagtaaattataaaaaataaaataaaggaatgtagctgggcgtggtggcatgcgcctgtaatcccagctactccggaggctgatgcaggagaatcgcttgaacccaggaggtgaaggttgcagtgaggcgagatcgcgccactgcgctccagcgtggatggcaagagcgaaactccttctcgaaataataaataaaataaaggaaatagggcccgggcatggtggctcacgcctgtaattccagcacttttggtggccgaggcgggcagatcactttgaggtcaaanggttcgagaccagtcttggccaacatggtgaaacccccttctnttgctgagaataaacaattagccaggcatggtggcgggagcctgtaatcccagctatttgtggggcggagacacaaagaatcgct

SEQ ID NO: 3970 - DNA, 835 bp, Homo sapiens
  misc_feature 536, 557, 568, 591, 616, 624, 639, 685, 750, 795, 806, 808,815, 816, 821, 822, 823: n = A,T,C or G
gggcgaattggagctccccgcggtggcggccgcccgggcaggtacaacctttatctttttttcacttcagcaaacaaaaaatgtcaaatgacatgaaaagtggcaagtcttccgacaataaataataaattactttataatttttgcaatgcaagagcaaacaaaaaaagtttccttttttttcctttttatttccatagagagagaaaacagtcattttaaccaataactatacacatctttgggggaaaagttcttggacagacacaagtcaaacacaatcccgagacgcttgtggcaaaatagaggtaaccttgttgcaatgctttataagttggtttttaaatctgaattcaaaaacctttaaagtcgcttcagacttcttgataaaggatggatctcaaaaaaagtggggagggggcaaagtaaaaaataaaccagctcaggacaggccaagagacccaggatttcaattaaccccttggtaaagtcaactttaaacatatcaaaccaatgcagctccaccttcctgaaanggactctttcagcccaaggangccagtctctnttcctgcgcttttgctggagctnctgtttggcaaggcaatgaccaatntagaaacngccccattcagatangatggactagaaaaatttctattttggttttctctaaaggtgccgngaaatggaaatgcttctttgagatccttgaatataatccttccttttaaaaacgtttttttttantccttgggcggtttaaactagtggatcccccggctgcagaattcnttttaagcttntnatcccgnnacctnnnggggggcccgtc

SEQ ID NO: 3971 - DNA, 186 bp, Homo sapiens
  misc_feature 3: n = A,T,C or G
ctnctatagggcgaattggagctccccgcggtggcggccgaggtactactatcatctctgtattgtttaacaaaatatttccacatttgacaataaagtcagtatttgaaaggagaaaaaaaaaaaaaaaaaaaaaaaaaaaaaaaaaaaaaaaaaaaaaaaaaaaaaaaaaaaaaaaaaaaaaaa

SEQ ID NO: 3972 - DNA, 580 bp, Homo sapiens
gcgaattggagctccccgcggtggcggccgcccgggcaggtactattaaaaaaacagtttatgtgcaaggtgtataagaaaagtaaaacatacctttggtaaaaagattataaaggggcataagaatgtggatttttacctacattaaaaggttaaaaacaattattgttttaaaagtttaagcaagttttaaaacgttaattataaagaaaattctgcgtgtaaacatattagctaaagttaaaaaggtatcatccagtttttctgtgaactggacattaaagtaaaaaatgccacaggtttttcttaaagcatcaacctgctctttaacaaaaattataaaaggttaaaaagagtctataaaatcttaccttatggtcaaacatgaaaaattggataaatatgtctacaaggttttattaaaattcagtttaaaattaataacacactaatataaaggtaaaatttagcttatctggtataaaaatcatacaaagaaacattattaaatataaaatgggtgtttaagctttctttggtcttaaaaactaataaaaaattggtgctaaaggaaaccatt

SEQ ID NO: 3973 - DNA, 480 bp, Homo sapiens
ctatagggcgaattggagctccccgcggtggcggccgggcgcagtggctcacacctgtaatcccagcacttttggaaggccgaggtgggcggatcacaaggtcaggagttcgagaccaacctgaccaacatggtgaaaccctgtctctactaaaaatacacaaaaaaattggccgggcatggtggcacgcgcctgtaatcccagctctcagaaggctgaggcaggagaatcacttgaacccgggaggcagaggttgcagtgagctgagatcatgccgctgcacttcagcctgggggacagagagagactctgtctcaaaaaaaagaaaaaaagatgaggaaataatcaatcttcttctgatcaatttgtccatagttctggaaaagctactgcacagagcaggagaggaaactatttgctctctgtaatactgaaaaactgagagtgctattttaacttgtcaataactaaaaggtacct

SEQ ID NO: 3974 - DNA, 636 bp, Homo sapiens
  misc_feature 523, 567, 576, 601: n = A,T,C or G
agggcgaattggagctccccgcggtggcggccgcccgggcaggtacgcggggaagggagagagctgtgcgagcgtgggggagagtttttcgttggaatatacgttgcacatttatggcgattctgagtgtgagggcagacttctgccaggctcagcacagcattttcgctgacaagtgagcttggaggttctatgtgccataattaacattgccttgaagactcctgggcaccgagactgcctcagaaatagttggctttttttttttaattgcaagcatatttcttttaatgactccagtaaaattaagcatcaagtaaacaagtggaaagtgacctacactttttaacttgtctcactagtgcctaaatgtagtaaaggctgcttaagttttgtatgtagtttggattttttggaagtcccgaaggtatccatcttgcagaaattgaggcccaaattgaatttgggattcaaggtgggattctaaatactttgcttatcttgaaaagagaagcttcataangaataaaacaaggttgaatagaaaaaacactgattggataatangcattttantgggctttttaaatgttttctgctnggaaacaatttcaagaatttattggattttttttt

SEQ ID NO: 3975 - DNA, 296 bp, Homo sapiens
cgcggtggcggccgtgcgtagactagtcaagcttctggtgtgtgactagagctgggcttgtcgtcccctccagcttcagctgtgcatagactggtcagcctccagagtgaccagagcagggctgtcgtcctcagcagcagcttggtctcatctcaggatcggctgagttggatgatctgggtcttgctggctgttccacttgtcctgaactgctggtttcagctgactgtggtggacctatggcatgattcctgcaaatttaacagcaagtgggagtggacaagattacagtacct

SEQ ID NO: 3976 - DNA, 346 bp, Homo sapiens
ccgggcaggtacgtgaggaagaaacccggaaggggaagaggaaagcaaaggcgtcaggaatggttcttcctcagggtctattgacattcagggacgtggccatagaattctctcaggaggagtggaaatgcctggaccctgctcagaggactctatacagggacgtgatgctggagaattataggaacctggtctccctgggtgaggataacttccctccagaagtggggatgtgcccttgtggatctttgtattttctcttgtttctcttgggagttgcatccttgcttgactaaaatggaagccgtattgattttgaaatgaaaagcttcatgatgtagcatct

SEQ ID NO: 3977 - DNA, 343 bp, Homo sapiens
ccgggcaggtactgggaactaaatggttgggggggtggtggggagtcaaaactattttgtgatatgttaaaatacatgaaatccacatttcagtgttaataaataaagttttattggaacagagccatactcattcatttatatatcatctatggttgctttcccattataatgacatagttgagtagttgtgacagaaactatgtctcacactttgggaggccaaggcaggtggatcatgaagtcaggagttcaagaccagcctggccaagatggtgaaaccccgtctctgctaaaattacaaaaattagccaggcgtggtggcgggtgcctgtaatcccag

SEQ ID NO: 3978 - DNA, 345 bp, Homo sapiens
ccgggcaggtactttcttaaataaatgtggtcatgttatacatcattttaagcatatttctcacttttttttgctaatgacttattgctgtttatatttattttagactatggaaatgatgttagacaaaaatcaaatttagcgattttctgagttcaaaataggttataaagcagcagagacaacacacaacatcaacaatgcatttggcccaggaactgctgatgaacatacagtgccgtgatggctcaagaagttttgcaaaggagactagagccttgaagatgaggagtgcagtggccagtcatcggaaattgataatgaccaattgagaacatcatcgaa

SEQ ID NO: 3979 - DNA, 445 bp, Homo sapiens
  misc_feature 380, 388, 391, 399, 400, 401, 402, 406, 407, 408, 409, 410,411, 412, 413, 417: n = A,T,C or G
ctatagggcgaattggagctccccgcggtggcggcccgaggtacgcggggggtgtcgcaggagcatatcgagaccgcttaccgcatctggctggaccctgcattcgtggcgtgtgcagacgaaaactgcaaaaagaaatcccgaattgcttggttggtattggtgagcatatttggttaggaaaatagatgaaaatagttttcataacatcgatgatcccaactgtgagaggagaaaaaagaactcatttgtggacctgactaaccttggagccacttgttatgtcaacacatttcttcaagtgtggtttctcaacttggagcttcggcaggcactctacttatgtccaagcacttgtagtgactacatgctgggagacngcatcccnaanaaaaaaannnnaaannnnnnnnggtncctgcccgggcggcccgctctaaaacta

SEQ ID NO: 3980 - DNA, 468 bp, Homo sapiens
  misc_feature 26, 43, 45, 105: n = A,T,C or G
ccgcggtggcggcccgaggtactttnttttttttttttttttntntttgccttgtggttcttaactttctaaaggtcattgactccttgcagcatgtgttactanaaatggatattctggctggacacattggcttacgcctataatcccaacacttgcaaggcccgaggcgagtggatcaagttgaggtggatacattgcaaatagcctagcaatcatgacagatgcacttcatatgttaactgacctaggcgccatcatactcaccctgcttgctttgtggctatcatcaaaatcaccaaccaaaagattcacctttggatttcatcgcttaggctggaatacaatgacaccatcatggcttactgcaccgtcgaactcctgagctctaaaaatcttaccctcgcaacctccaaagtgggctgggactgcatgcatataccaccatacccagctaattttttaatt

SEQ ID NO: 3981 - DNA, 703 bp, Homo sapiens
  misc_feature 378, 488, 513, 532, 573, 596, 623, 631, 641, 645, 664, 685: n = A,T,C or G
cgcggtggcggcccggttttttttgttttttgttttgtttgtttttgagacagagtctcccccgtcccccaggctggagtgtagtggtgctgtcacggctcactgcagcctcaacctgccttcctgccttagtctttggagtagctgggaccacaggtgtgagctgtcacacctggctaagttttaaattttcttgtagagacagattctcgctttgttgccccagctgttctccaacgcctggactcaagcaatcttcctgccttggcctcccaaactgttgggattataggtgtgagccactgtgcctggtctccatgtctgttgtgtttatcactgtgtggctgacatatagtaggtgtttttttgttggtttgntattttgaaacagagtctcgctctgtcacccaggctcgagtgtagtgttgtgatctcggctcactgcaacctccacctcccaaagttcaaagagattctcccaccttaancctcccgagtagcttgggattacangcatgtgccaccacacctngctaaatttttgtatttttaagtagaagatgaaggtttcanccattgttggccaggggtgggtnttgaactcctggcctggttgaatcccncctgttcnttggggcctncccnaattggctggggactaaangttttgagacacccaaacccnggcccaattttttaaatt

SEQ ID NO: 3982 - DNA, 265 bp, Homo sapiens
  misc_feature 9, 28, 38, 76, 152, 158, 195, 244: n = A,T,C or G
tagggcgantggactccccgcggtggcngccgcccggncaggtactaatgaaaggcactatttccatgaaacctcnacatattttatcttagggttgacatgttatttctcacagtaagaatctgcgctttagtggtttcataattaggtanaagcanatgcggttataaatgtaagacagttataattgttagnggtctatgccatcctccatgtgcattacccagatttaaattagcttttnaagaaaaccctgatgataatg

SEQ ID NO: 3983 - DNA, 770 bp, Homo sapiens
  misc_feature 1, 589, 602, 611, 615, 617, 622, 632, 648, 653, 662, 672,676, 680, 693, 704, 720, 735, 753, 754, 755: n = A,T,C or G
ncgcccgggcaggtacaggtaaggcagaaggaaggaagggcaaagaaacaattccagggccctggtttctgggatgacaggcttcccaacactcatgccaggactattttccacctcggttcactatgggttttttttctttttttttttaatataatgaatttttaaaatgtgcgtttgttgcccagattattccagaaagagttgaagggaggaaaggtgtgcttggtgtgctggtgattctagcactctctccagcctgatttctagtttgtgtggtgcatccagacagctcacccaggtgcccgggctctttctggtatccagagccaacccatccagggcaggagggtgaagattaggaggggcaaaggttagcctggaggttgcaattaacaagaatcaaaatgggtttcaggattctcacacccagttgctaatttcagctggtcctgtagaggtgacacgtaataggacaacatggttttgggggcaatgctggggtgctggtctctgcttttctaggggtagaaaggaatcatcatttggaaaattcttaaatcgatggaaatgaattttatgttccctnatgcttccatctntttctgggnttgncntgctnttcctgccanccccttacttgtgganaggtnacccacttncttaaacttntgtntttnggcattttcccangaaaggaaaanttgaaaaggaaagganaaaaaaaccttattntttggtgcccaaaaattnnncaaaaaaaaaaaaaa

SEQ ID NO: 3984 - DNA, 469 bp, Homo sapiens
  misc_feature 260: n = A,T,C or G
ggcgaattggagctccccgcggtggcggccgccgggcaggtacattttactcctgctctaaaacttgcctcagtctctcactgtgccttatgcccctcagctgaattctttcttctgagcaggcaggaattgaggttgctgcagacgtgtatgcatttgccaccagtaacatcttttggtgccacatgactaggatatgttctctagtgctaacatgttcgtttacagttcttaggactccctgatagaaaaaaacacanaaaaacacaaaaaaacccaccaaccaaacaaacaaaaaaaacacaggagtttctcccaaaaagaagtctgcagtgtcttttctgttttctctgaaggtatcccagggtgttagatttctggtggttttcccttatgtggcaccgaaagttggcaagaagaaggaagtgcttatataaataaataggggaaatgaacagagagagtacct

SEQ ID NO: 3985 - DNA, 780 bp, Homo sapiens
  misc_feature 30, 62, 65, 66, 78, 81, 108, 111, 112, 137, 163, 167, 184,201, 203, 214, 215, 217, 219, 243, 252, 271, 276, 280, 285,295, 299, 373, 407, 416, 421, 427, 432, 445, 448, 498, 587,588, 597, 600, 611, 630, 650, 660, 665, 669, 670, 695: n = A,T,C or G
  misc_feature 698, 717, 722, 724, 725, 746, 760, 761, 766, 769: n = A,T,C or G
ttggcggccgcccggcggtccccggggggntcgagagagggatcgtgaccgggttagagaanggnnctcatatcgtantanggatcgcagtccatcaagaagaaaaangcnnagatcgtgaaagggaacgagagcgngaaagagagagggaagaagaccgagngccnagaacctagaaccgggnagcccaagagagagagncnagaggggaccnngnanccgagaaaaggagaaaaaaagacnaaaaaaccngggcccgagaaagaaagancgaanaaanatgcnttccgaaccnaaanaaaaacttggaaagaaaaccttccgagaggaaaagaaagctgcttattcaaggaagccgccttaagaaattggngaaatcagaagaaccgaaagaaaacccgggaatnttgaagaanagaancttgantgganaagaagaaagaanaanagaaattggccaaagaagcttaaccgactaaaagaattcttagaagactnttgatgatgatagagattgccccaaatattacagaggaagtgctcttcaaaaaaggttgcgttgatagaaaaaagggaaattggaagcnnatgaacganatntggaagaagangggaaggaggagctttganggaaattaggcagcgccttnttggccgaangggcnttcnnaatcccgattcccgagcttcccganggntggaaccaagaagcttganaggcncnngcctcccccaaattaaagccnggagcccgaattcnnaaganggngggagaagaaa

SEQ ID NO: 3986 - DNA, 534 bp, Homo sapiens
  misc_feature 471, 474, 519: n = A,T,C or G
cgaggtaccatcctggggtttttgttcaaaaagaaaaagaaaagagggtaaaacagttattataagaattcttagaacagagcaagtaattggcaataatttttttagctctaaaaaagaaaaaaaaaaaaggtggtgtgtgagccgaaagtttaccgggccaccacaaatactttcagtaggaatttaataaaaatttgggtccattttatgaacacaaacggcgagccagttttctttcttttttaaaaaatcaactttctgaagctcttcttaagattttcttctaatgaaccaaaagaacatctgcagcatgacacactggctgatgaagcatgacacttttaacattatttaagtaaaataaagatttaggtaaattagaaaaaaatcagaagttagaaataaaagccatgccctttaaaaagtggaaaacccaactcctgtaattgaactacagtaaaaacagangcnacttttttggatggttggtgtgccccccccaaaaaaaaaaaaaangaaaaaaaagtacct

SEQ ID NO: 3987 - DNA, 385 bp, Homo sapiens
  misc_feature 338, 367: n = A,T,C or G
cgcgtaatacgactcctatagggcgaattggagctccccgcggtggcggccgcccgggcaggtactagaagcaaaatattaatctttgtgattattacttctccaaactagaggagagatatccaaaaaccatttcatgaaaataactagttgattcaggggtatgaaaatcagtcaaactggatatggaattattatcttcgaaggaaccagaaaaccaatcaaatatcttgctttctagatgacagtgccaagatcatattcactgagcaagaaacaggtaacagtgactaagggttaccaggctggagaaataaatttcagggtaacagaaatgntgattattttgtagggtgggcttagatanggctggaacccaaaaaaa

SEQ ID NO: 3988 - DNA, 593 bp, Homo sapiens
ccgcggtggcggccgcccgggcaggtacatgcagattaatgttgttttcatgcctgcaaacacaacatccaatctgcagcccatggatcaaggagtaattttgactttcaagtcttatcaagaaacacatttcataacactatgtatggctgccacagataatgactcctctgatgaatctgggcaaagtaaacaaaaagccttctaaaaaagattcatcggccaggtgtggtggcttacacctgtaatcccagcactttgggaggctgaggtgggcagatcacctgaggtcaggagtttgaggccagcctggccaacatggtgaaatgccatctctactaaaaaatgcaaaaatcagctgggcatggtggcgcatacctgtaatcccagctactcaggaggctgaggcagaattgcttatacccaggaggtggaggttgcagtgagccaagattgtgccgctgcactccagcctgggtaacagagcaagaccctgtctccccctaaaaaagattcatcattctacatgtcattaagaacatttttgattcatgggaggaggtcttaaagatatcaacattaacagaagtttg

SEQ ID NO: 3989 - DNA, 245 bp, Homo sapiens
  misc_feature 210, 245: n = A,T,C or G
ccgcggtggcggcccgcccgggcaggactcaccgtttctcttaggtaaagagctaagagtggaattcctgggttatgggatagatatatgtttaacttggtaggaaattgctaatttttcaaagtgtttatatcattttacacctccattaggaaagtatgagtgatcatttctcatctcaccaacatttggtattgtcaggtgggtttntttttttttcatttaattttggggaattctaattn

SEQ ID NO: 3990 - DNA, 330 bp, Homo sapiens
  misc_feature 102: n = A,T,C or G
tggagctcccgcggtggcggccgaggtactttttttttttttttttttttttcgtaaaaccgtagttcttgtcctgctttcctggcttcctccaactgcctnagggccattcgtagctcttgagagacaattcctggtgagtcccgctccttcatgatccagtccagggccatgtggctgcccatcttttcatctagagaatactgagaatagtaggagatgacttcctgtcgggaacactttgtttcacgaagggcttttaggcttccattccagtgcaatagttggaagatggtcatcagctcctgaaactccagcatagtcttcccc

SEQ ID NO: 3991 - DNA, 576 bp, Homo sapiens
  misc_feature 417, 482, 489, 550: n = A,T,C or G
ccgcggtggcggcccgaggtactgagtataaaacaatataaaacaatatgagaaggtctctctcttccctcaagagtgtatgactttgctgcccaggatgatcttgaactcctggcctcaagctattaatttcttcccaactcagcctcccaaagtgctgggattacaggcatgaaccatagcgcccagcttaacaggatttttcagagagaaaaagttttttaattttaatgaaatccaccaatttatctattttttcttttacggcatgtgcttttggtgtaatgtctaaaaactatacctacgcctaggttgtaaagatagtctgttttcagttttatagctttccattttacatttagatatatgatccattttgagttaagtttgtattacatgtaaggttggggttccttngttttggtctttgacaaatgggaagtccacaacatttattgaaactcttcttcctccattggttntaaaganaaatccgttggccatacttctgaatgtctatttatggatccctatcttattttattgatgngtatttttatctctcctccatgggat

SEQ ID NO: 3992 - DNA, 544 bp, Homo sapiens
  misc_feature 240, 540, 544: n = A,T,C or G
cgaggtaccatgaccctaatgttaatggaggaacagaattagaacctgttgaagggaatccatatagacgcatttggaaaataagttgctggagaatggcagaagatgagctttttaatagatacgagagagcaatttatgcagctttaagtgggaatcttaagcagctgcttcctgtctgtgacacctgggaagacacagtttgggcctacttccgggtgatggtggacagtctggtanaacaagagatccagacatcagtagcaactctggatgaaactgaagaactccctagagaatatctgggagcaaactggacgttagaaaaggtttttgaggaacttcaagctactgacaaaaagagagttctggaagagaatcaagaacattatcatatagttcaaaagtttcttatcctgggagacattgatggtttgatggatgagtttagcaaatggctttccaaaagcagaaacaatctacctggacacctgcttcgctttatgactcaccttattttgttttttccgtacccgcccnggcn

SEQ ID NO: 3993 - DNA, 599 bp, Homo sapiens
  misc_feature 36, 124, 143, 396, 414: n = A,T,C or G
ctatagggcgaattggagctccccgcggtggcggcncgaggtaccagttttgtgctggttggcctcctgccaggaggtgacgctttcaagggagcaacagctgtggtagcataggaagaatcangtggtgagcagggccctanaactcacaagagaatatgacctttgtcttagctaccagggtgggtagaggaggaccatcaggttggggcagggctaggtgcgtctgagttcagactctctatgggcaggtcttgctgtggctgctgtaggggatgggggtggggttcccaggtcactagagttgtgtgcctaggaagattatggctacctctgctgagtcacgcatgttgtcagggaagtgggggaaagctggcagtcacaggcctcacccanctgccatgcaaactgaanggccagtcttacttccaccatggcccccaaaactgttgtgcccgagcgaagttaaaaaaatgccacactttgagatgaaattaagagtcctttattagcccgcgacccgaaaaaatggctaacgctcaaaaattctctcggccccgaggaagggggcttaacttttatatcttggtttaagaagg

SEQ ID NO: 3994 - DNA, 688 bp, Homo sapiens
tcctatagggcgaattggagctccccgcggtggcggccgcccgggcaggtaccatgaaatacatatatttcataaggttcagttacaaaatggattgtttcaaatggcaatttcttacactaacctgattatgaaaaaaagaagtctgtatcatctgcttccaagtctgttatgtccaaatatattttaattatgcatttattttgctacttttataaatattagagatttcaccttaaattatttttgtaactagttctagaacatgttttccaattattatttttctaatggagacgtataattgacctatgtttatgcatatatgttctctacacagtgaaactttttttaaaaagaatagtaaagaaaatgcggaagctctggctctccaaggcaaagtcaaaaaaaaaagcggggggggatgcgaggaacattttattacacctcctgattttcactccttgagttttattttctccccttgtttatttgtttaatgctagaaactgtattcctaagagagcatacctctttcaggtgagcatgataattgggaagattttgatacttaagagtatgaaccatataattaagaagtgattacctaataaaagataacaatggtgactattttaaattattttggtggcaggggagttgggttttacatcacccaaaaaaaaaa

SEQ ID NO: 3995 - DNA, 623 bp, Homo sapiens
ccgcggtggcggcccgaggtaccagctaacgcatctgggaggcaacaaaacaatactctcctgaggttaatgtggaccaaaaactagatttcatataaaagagtttattccttctacttgaggtgtgacatgaaggaaagtaatggaaataattctgccctcccattctcaagggccagggggaattcaaatattgaacggaagtgattttggaattgcatggaattctcactgccatcccaaagaaatgctgatcttgtcactcttacctgtttcattccctgggggcagaacaaaaggacgcactccaaagatcggcatgaaccaagaactgggtttcatataaaatattttattctgtcctcttgagatgtgacatgagaaaagtattgagaatacttctatcacctcatcttcaagaatccgtaggaattctcccatggtgggactttacggttaacctgaacaggtcttggaaaaaggactttaaacattctcctgttctgtggaataagtatacttttttctggacatacaccttgtcagtgagttccatgtgatactagagttgcatagatttttaacctttacgccaatgaagatctgaggcaaacattgccctt

SEQ ID NO: 3996 - DNA, 404 bp, Homo sapiens
ccgcggtggcggcccgcccgggcaggtaccgtgttatgcaaattaagcacttttcttctaaattcacatgaacttttagagacgtagactatgttattgaagtaactcatcctaagtgtctgtagtgattggagatattcttgcttatcaaattgaagtatttataagtgagtgacgtgatgtctgagatctatcttaaagtaatccagtagggcaaagataacttgagattggccagttcttgataatttttgaagtaggctgatgagtacgcggggcttccttttcgatccgccatctgcggtggagccgccaccaaaatgcagattttcgtgaaaacccttacggggaagaccatcaccctcgaggttgaaccctcggatacgatagaaaatgtaaaggcc

SEQ ID NO: 3997 - DNA, 612 bp, Homo sapiens
  misc_feature 1, 401, 494, 597: n = A,T,C or G
nccatgcaatcattaaggagaaccaaagtaagagagccactcaaaccagattttgaacgctactaaaattaaagtagttctttgatgaatatgaatgagtagggaaaggattctttgtaatagtgatacctctgtggtaagagaagggtggtatgtgagttttagtctacagattatggcaaattcagtgacaacaatcaaatggtctaagattgacagtagcacagttttactctgtgaaggtaatgttcaggacaaatttcaagaaaactagaaaaccattctttacagctgaaatctttccctaaccattgttatttccacttttaagtcctcaagagatgagaaaagggaggtaaggcttccttatacatttcctgcacaatgaaacatttttcctnctccaggcaaagattcaagcagaactggcaaatatcttatcttgctcttctcaataataataatggtgttagataataaagttctatagcaantttaaccctagaatctttttgaaaagtaattctttaaagttgagaatcacagctgtctaccagcatttccttgggccccttgaagctggttattcactttggnctttcctcccagggg

SEQ ID NO: 3998 - DNA, 490 bp, Homo sapiens
  misc_feature 442: n = A,T,C or G
tagggcgaatggagctccccgcggtggcggccgcccgggcaggtacttttatttcatgtaaactgcccctctgaggatttgggcatattttttggaaggtgcctaatgcttaggatagtctctagggtgatgcactgcacctgcttccttcccttcagtgcggctgacccatttctgttgaacagatgtctcctgtgtgatgcccctgactcttacatttatctttctaaatcattttctgaagctgacttgctctagggtgcttcatcaccacttccatcttgcatcaccttataactgttctgtcttgttctctcccagcaatttattttaaaacaagggctagcttcaagcatgactgttaatggctcctctgtgacaaaacacaagttggaccaaggagaaagccctttggagaaactggaccctagttcaagtttanatctcaaatataggctgaaatctcttaccaaagtgcgttccagataaa

SEQ ID NO: 3999 - DNA, 824 bp, Homo sapiens
  misc_feature 565, 670, 675, 699, 733, 764, 776, 777, 791, 794, 796, 810,816: n = A,T,C or G
tatagggcgaattggagctccccgcggtggcggccgaggtaccctaaaacctagtatctttttctcttctatggaaaatccgaaggtctaaacttgacttttttgaggtcttctcaacttgactacagttgtgctcataattgtccttgcctttccagcttaattattttaaggaacaaatgaaaactctgggctgggtggagtggctcatacctgtaatcccagcactttgggaggctacggtgggcagatcatctgaggccaggagttcgagacctgcctggccaacatggcaacaccccgtctctaataaaaatataaaaattagcctggcatggtagcatgcgcctatagtcccagctgctcaggaggctgaggcatgagaatcgcttgaacctaggaggtggaggttgcattcaactgagatcataccacttcattccagcctgggcgacagagcaagactctgtctcaaaaaaaaaaaaaaggaaaactctgtgatggacatttgtttagtaaatcccttcagtatttatccctcctttccccacagcagctttctttnctgtcaactagaaaaggagcaggatgtaataaatcattttggtgtgactaggccacccactcttaatcatcttccattttcttaaacatttaaatttcaaggcangtacnccggggggaactcttgcacccttnggctggggaaggctttgggaaagtcctttaaagntggagtcttggcctcttaagaaatttggccnagtgccttaaannccaaaaaacctgantgncnaaattactggcatnttccanggaaaaaa

SEQ ID NO: 4000 - DNA, 475 bp, Homo sapiens
tagggcgaattggagctccccgcggtggcggccgcccgggcaggtacaattgttttagaagataatttgtttttctctcttcagtttcgcatattactaaagacaaatcatggtaggattggtttgtttattatacttggcctaactatttgtatacaatgcagcaagaatgattattttttacttaggcttttaagtaggctctgatggaactttgttccatagcaggaatctcagataagactttgtaaaacccgtaaaacccacccgagccatggatttatgccattaaatacccatgagttgggtgaaatttcctctccttttgagggcccaagataaacctggggcgtctgcacttgtcaaaaagtgatattctttacttacacagtcagaaaccctgttcagggactgtgtatacagaatatgaggccagtttttccaagggctttattggctccgtaagtcaagtttg

SEQ ID NO: 4001 - DNA, 577 bp, Homo sapiens
  misc_feature 315, 466, 478, 539: n = A,T,C or G
ccgcggtggcggccgaggtacttttttttttttttttttgctcccagtggcgggacacggtggcttatttttactcttatttatttatttatttttggagactgagtctcactctatcacccaggctggagtgcagtggtgcgatcttggctcactgcaacctccacctcctgggttcaagcgattctcctgcctcagcctcccaagtagctgggattacaggcgcatgccaccacactcggctaatttatttttacaagcagataaaggtttcttttattttaatggctgatctatgtaatcacggaggccagnatgtcattagttcccgtccggaaaggcggagacagctcaaagcaagaccccctattgggggcttcgaagtaacaggtaggtgagagacagatggttgcattcttttgagtttctgataagtctttccaaaggaggcaatcaaatatgcatntgtctctgtgancaagtggatgacttgaatagaatagaaggcagattttgccctgagcaagttccccatcttngaggggcccaagaattttttttctttcacaattttccc

SEQ ID NO: 4002 - DNA, 389 bp, Homo sapiens
acaacaggagtgagtggcaggtgagtgagcatcaccacccgagctctgcctcctatcagatcagtggcgacattagattctcataggagcacgaaccctattgtgaaccgcacacacaaggccagctccttatgagactctcatgcctgatgatctgtcactgtctcccatcacccacagatgggaccatctagttgcaggaaaacaagctcagggttcccactgattctacatgatggtgagttgtagaattagttcattatgtattacaatgtaataataataaagtgcacaataaatgtaatgcacttgaatcatcctgaaaccacctccacccccagcctggtctatggaaaaactgtattccatgaaaccggttcctggtacct

SEQ ID NO: 4003 - DNA, 413 bp, Homo sapiens
  misc_feature 206, 207, 212, 214, 228, 229, 238, 298, 307, 308, 393, 395: n = A,T,C or G
ggcgaattggagctccccgcggtggcggccgcccgggcaggtacgcgggggggcttggaagcagctctctcctccttccccgctgcttataaacctcagccctgaggctccagctcactctaccccatctccttgccgggtcagccctgacaaaggtcagctagccccttgaggacaatcagctttggcctcaaggggtccttaannggcantnagaaaccacttgannagaagcttngaaggaagtccattggaggacccgtgggtcaccacccttcttcacctttgcaaaggcagngagggggcnnggaaggatagcctcagccgtcaacgaagttcaaaaggagctggttacccagcagttgcccccatctgctcaaggatgccgggctntnttgatgagaagatgaaga

SEQ ID NO: 4004 - DNA, 568 bp, Homo sapiens
cgaggtacatctacttaaagggactattatgtggaataatacatactaatgaagtattacttgatttaaagactacaataaaaccaaacatgcttataacattaagaaaaacaataaagatacatgattgaaaccaagttgaaaaatagcatatgccttggaggaaatgtgctcaaattactaatgatttagtgttgtccctactttctctctcttttttctttcttttttttttattatggttagctgtcacatacaactttttttttttttgagatggggtctcactctgtcaccaggctggagtgcagtggtgcgatctcggctcactgcaacctccacatcccatgttgaagtaattcttctgcctcagcctcccgagtagctgggactagaggaacatgccaccatgactggctacttttctgtattttttagtagagacagagtttcaccatgttggccaggatggtctcgatctcctgacctcgtgatccacccgcctcaagcctcccaaagtgttgggattacaggtgtgaaccactgtgcccggcctgtgtcctgcccg

SEQ ID NO: 4005 - DNA, 425 bp, Homo sapiens
  misc_feature 25: n = A,T,C or G
actacttagggcgaattggagctcnccgcggtggcggccgaggtacttttttttttttttttttttggatccagcgctggctaaaaaatgtcacgttaccctttttttcctttttgtggagatgggggcctcactatgttgcccaggctggtctcgaattcctgggctcaagtgaccctcctgcctctgcctcactgagtgctgggattacaggtgtgcgtcaccacacactatgcaaagaattttcttaacgaacccaaccacgtaaacagcattcagttcaacaaacagaacataaccagtccctagaagccccttttacatctcctccatcactataccctgcatatatatactatacatatacagtatatacatatacagcattatacatgtattacaggtatatacaatattacatatac

SEQ ID NO: 4006 - DNA, 253 bp, Homo sapiens
ctatagggcgaattggagctccccgcggtggcggccgaggtaccactgtgatgcactagagccccatgctcaatcttctttttcatgtcataaatgtgaattgtttcatctttgctcccagtgaccacaaaacgactatttacagctactgctgacaaggaggcagtgtgagcatggtgagtgaagtcagccacaagagtccattgctgttggggagcttggttgttggagacgtgagtcttgccgaagatcc

SEQ ID NO: 4007 - DNA, 429 bp, Homo sapiens
  misc_feature 275: n = A,T,C or G
ttgtttgcttgtttccttgccagcttcacattttacagattctcataataattctaagaatagctctaatatggtttggctgccccacccaaatctcatcttgaattgtaactcccacaattcccatgtgtcatgggaggaaccttatgggaggtgattgaattatggagacaggtcttttctgcgctgttctcatgatagtgagatcagtctcataagatctgatggctttaaaaatgggagcttccctgcacaagctctctctctctctttgnctgctgccattcatgtaagacatgacttgctcctccttgccttctgccatgatttgaggcctccccagccatgtggaatggtaagtccattaaacctctttctttcataaattgcccagtctcagatatgtctttaccagcagcatgaaaaagg

SEQ ID NO: 4008 - DNA, 557 bp, Homo sapiens
  misc_feature 106, 131, 169, 175, 217, 231, 240, 243, 244, 250, 252, 258,259, 269, 273, 279, 289, 299, 305, 319, 334, 337, 343, 353,355, 363, 367, 368, 374, 379, 387, 389, 391, 394, 399, 426,430, 442, 446, 455, 459, 464, 473, 476, 494, 495, 501: n = A,T,C or G
  misc_feature 532, 533: n = A,T,C or G
cactacttagggcgaattggagctccccgcggtggcggccgcccgggcaggtacttttttttttttttttttttgtccaggccacttttatttaaacagaagcagnggccccacagccacggggacatgtnttccagacagtagacacagtgcctgtggctgtaagagnctgacngggaagatttatgcctttcttccttgggccccccatgaaccnaaaggaagaaaaantaaaaaatnacnnctaccntncactgnncacacccatntttnaacccnctttgcccanaaatagtttngaaccncctaggaaatgggnaatttcaatccaggnctnaaaatnctagaaaaananaaaaaagnggtnnttaaangaaancacctttntncntancaagntttttccaagaaaagaagttggaggcnttgnttctcttgggcnttgnaggggggtnttanttttncaaataaangcnaccccttaacaattggtnnttgggnaccaacttaaattgggttggaggtttcattnnaacccaaggaaggggaaaggaatg

SEQ ID NO: 4009 - DNA, 425 bp, Homo sapiens
  misc_feature 180, 183, 186, 246, 255, 274, 311, 326, 337, 362, 373, 377,400, 407, 416: n = A,T,C or G
cttagggcgaattggagctccccgcggtggcggccgcccgggcaggtaccatgagacactattctctcatgaaatagttttggcactcttgtagaaaatcagtaagccacagatgtatgagtttatttctagactcttaattctattccattgatctatatatttatccttctgacacanccnctntattttttaattactgggaactcttaaaagtagtattggttttgaaagtttgggaaaagntgtgaagcncttcctaaacttttccctncttccttttatcaaaagactggtttttttggcttacnttctgggaatctctntggaaatttcncattaccgaattttttaggggatcnaagcctttatnaaanttttcttgcccaaaaccaaaaancccaggnaaggaaatnttttgaatg

SEQ ID NO: 4010 - DNA, 409 bp, Homo sapiens
  misc_feature 196, 210, 217, 226, 229, 244, 258, 274, 286, 293, 297, 302,305, 337, 338, 349, 357, 360, 379, 392: n = A,T,C or G
tacttagggcgaattggagctccccgcggtggcggccgcccgggcaggtacacgacagaattaaagacctggagaaacagttcgtaaagcctgatggtgagaatagagctcgcttccttccagggaaagatctgaccgaaaaagaaatgatccaaaaattagacaagctggaactacaactggccaaagaagggangaagaagcttgctngagaaanggatttttnatnttatgagccagggtntttcagggctcacnagaccaggcttttgcnagcaaaaaactnagggggnttgntaagncanggacaccaccttgctttttttaagccccaaannaaagattgaantggggctnatncaaaaaggaaaggggatcnaaaaaaaatggcntaccttggaagaaaaaa

SEQ ID NO: 4011 - DNA, 349 bp, Homo sapiens
  misc_feature 346: n = A,T,C or G
cggccgcccgggcaggtaccactcagaagccttcactgtcaacttcggggacaccgaagaggccaagaaacagatcaacgattacgtggagaagggtacattggacatcctggactgattctgtaattttcgtatcttttttctcccatgttccctttatttgtcttttggttctgctttttgggagattttcttaacttgatctacctgaggctcagtcctcatctgtaaaatgctgataaaaggacctaccacctagcgttgctgtgaggtgtcagtgaaataaaatgtaaaatgcttagcacagtgaactttaataaatggtagttgtggttgcacataaaanaaa

SEQ ID NO: 4012 - DNA, 643 bp, Homo sapiens
  misc_feature 509, 598, 602, 605, 608, 609, 610, 611, 612, 614, 617, 620,621, 624, 628, 637: n = A,T,C or G
ccgcggtggcggccgcccgggcaggtacagaaaattagcaagagacattttctgcattgtgagaaatcaacatagacaccttaaagacccctttgagagtgtggctttttgaacttttcagattttgctcagtgacctgctaacacttacgtgagaggctccaggtgtaaatagaatctaatggcagaatctgtaagtgtaaacaagcatcttaggagtgagagatcaagaccacaaaatgtccagagctatgaccacagctatacctacccataaaatacgatactggagtagggtatttttgtctttttttcttacctaagagctagctaatcaggacaggtgatgcaggttctggagctctaccagggcagttctattttctttttttgagacagagtctcactgtcgccctgggctggagcgcggtggcacgatcttggtgcactgcaagctccgcctcccgggttcatgtcattctccctcagctacttgggaggctgaggcangagaatcgctttggaggttgcagtgagctgagattgtgccattgcactccagcctgggcgacaaggagcgaaaactccattttacgggnaaanaanatnnnnnanatntannggntccntcggcccgnttttaa

SEQ ID NO: 4013 - DNA, 573 bp, Homo sapiens
  misc_feature 401, 428: n = A,T,C or G
ccgggcaggtactcaaagacgaatcatgaaaaagaaaaaaaactttatttcaaacaggttcagtgatatatgtgtgtgctacagcaaaggctggttgtggcaaagtttcatttcaaactgtatgatgtgggctgggcaaggtggctcacgcctgtaatcccagcactttgtgaggccgaggtggctgatcaccctgaggtcaggagagaccgcctagccaacatgctgaaaccccgtctctactaataatacaaaaaattagccaagtgtggtgggcgcgcacctgtaatctcagctactcgggaggctgaggcaggagaatcgcttgaacccggggggcagaggttgcagatcacgccactgcactccagcctgggtgacagagccagactcaaaaaacnaaacaaaataaaacaaacaaaaaaacngaactgcatgatgtataatttttgacattatgtgggaatgtttaacttctgcccaaatgtagattcaatccaacattatgcccaattttatattaattttagttccttaagttttcattacccaaaaaaaaaaaaaaaaaaagga

SEQ ID NO: 4014 - DNA, 457 bp, Homo sapiens
  misc_feature 343, 397, 404, 406, 415, 421, 424, 425, 433: n = A,T,C or G
actacttagggcgaattggagctccccgcggtggcggccgaggtaccggccctccaagtagtgtttgcgaatacacgtcctgttgtgaaagaggtgaggagaaaggagtaggaaggctcagaggacataacaggcaaaaagaaacaagagaggtaaataaaaagaattaatctaatggcttcacccggcttaggcgcagttttaaggggcctgacccaggcttcgggacccatgtttctagttgggctctgttggcctttttgttgtgggagtgatgaatccaagcaggaattccatccaccttcagaaccgttggcgtcgtgaggatgatggtgttgaggtnccttccaagcaggagtgagtccttctttctggaactttttataacaaacacttngtttccngncttgaaacnatatgngcnnggcccctntctggtcagggaactgggattggg

SEQ ID NO: 4015 - DNA, 198 bp, Homo sapiens
  misc_feature 69, 92, 106, 107, 123, 126, 131, 141, 150, 183: n = A,T,C or G
gaaaagaggttttctagctagaaattcggggcccagaaggtcaaggctccagagatccccttctcatcntccttcagttgtctgaggagacngaggatcacatgtnncacaggtgagtgctgnttncccanaatctgcagncttaagctnccctgctgacgcacacagccagttctctgcttnatattcatgtgaccc

SEQ ID NO: 4016 - DNA, 285 bp, Homo sapiens
acttagggcgattggagctccccgcggtggcggccgcccgggcaggtacttttttttttttttttttttttttttgatttttttatttttatttcgtagaaacggaggtccagccaagttccccaggctggtctcgaactcttggcctcaagtgatcctccatgcctgggctggaaaacataaccttatgggaaagttcctaaaaatggttgaagaacaagactgaaggctagaatatgaaagcttaaattctgattctgccccttcctagttgcatattcctga

SEQ ID NO: 4017 - DNA, 448 bp, Homo sapiens
  misc_feature 177: n = A,T,C or G
ccgccgcccgggcacggtacagttcacattaatattcacatcccactttctgctacttctgtcagctatactctggagaaaaatacaaagaatggacttacacgctgggccaaggaaatagaaaatggtgtttatttgattagtggacaagttaaagatgaagattgtgacctattngaaaggacagaaaaaatcttctagagggaaatactcaagcaactagtcattcttttgatgtcagagtgctaaccgcaagttgctcctgaattcagaccacagatccacagccacagtccagatatgtagcggttctgtaaaccttaagggttgctgtgaaatgcagagcttatatccacagcagtaaacccaaagttaaagatgctgtgcaggcagtaaagagggatatattgaacacagttgctgatcgttgtgaaatgctatttgagga

SEQ ID NO: 4018 - DNA, 216 bp, Homo sapiens
  misc_feature 96, 99, 104, 111, 115, 126, 149, 156, 175, 192: n = A,T,C or G
ggagctccccgcggtggcggccgcccgggcaggtacatgtaatttgatctttatcaagggcatatcctgggaatcagggagaacttctgtagcctnatngacangacctancccncaaggcacccngggaagaaggggaaggcttgttntggggtnttttgggaaagcaatgccnattttctctcttgaatnagggcaccatgcctgggggcacac

SEQ ID NO: 4019 - DNA, 437 bp, Homo sapiens
ccgcggtggcggccgcccgggcaggtaccgaggtcattttgcttcctatagactgccaccttttggcaaaagctgttctaactccatctcagcatttacaattccatacctggtggtcagaggaggcccgcctgcaggctcagctaaatcgggctgatggcattccaattactcaggctcagcttcacaaggctccgataattactctgatactactgctcatttaggctttgatgctctcaccacggaacaagtaacaaaggtgtgtatgagagcttgggataaattacgcaccccaggccaagcttctgtttcttttactattgttaaacagggtcacaatgaattatatcttgattttttagctaaattacaagatgctgttgaaaaatctgtctctggatgagcacactcaaggtattcttcttcatatgtta

SEQ ID NO: 4020 - DNA, 265 bp, Homo sapiens
ccgggcaggtactttttttttttttttttttttgttgtgtgactgtcttatttctgggattccagatgcccatgataagagtgagttgctccttgcctgttcaactcacccactccacaggagtcactgaaggccatgaacaagtcccagtgtgcagtagccctgtgcagggttcccagcttcctcccctttcagcccagcatctgtttcttccttctgcccactctcaatgcctcccttctgaagatctgctaggagtgtacct

SEQ ID NO: 4021 - DNA, 322 bp, Homo sapiens
  misc_feature 250, 280, 307: n = A,T,C or G
gtatactccgactctataaacttactcttctttaaagcagatcatcctatttatcataagattattaaaaatgtatacctttgcttttatttgccataaaaaaagctttctttggaataaaatagatttttatccaaagatgcagaactgttttcaagataaatccaatctgatcaatttgacagattaagactctcttcaatagtaattcctcaaattatttaaataatttatgaaacagtaaaggctnaaaattatcgaattacatagccttaaaagntctagatccttcatggattttatttcntggtttattattgca

SEQ ID NO: 4022 - DNA, 363 bp, Homo sapiens
ctatagggcgaattggagctccccgcggtggcggccgaggtacacgttattaaaaataaaaactcgcattttaggattagggaagtctggaaaaaaatttttttaaacttggagatcacatattgaatagctgtcaaaattcaaactgactagttttgaagaacttcaaaaacgtgttcaaatgaataaagaacaaaaatgatcaaaagaaacccatagctgcctaagagtcttaaaaattattaatgtgacactctcatctctcatcaagtgtatccaaaccacttctcatttgctctttccatttaaagactcacagtagcttcactacacatatatttatactgaacatgtacctgcccg

SEQ ID NO: 4023 - DNA, 383 bp, Homo sapiens
  misc_feature 46, 64, 135, 148, 152, 165, 174, 178, 193, 202, 206, 226,230, 236, 239, 268, 270, 296, 305, 314, 335, 345, 358, 363,364, 366: n = A,T,C or G
tgcggccgaggtaccctgctctgcaaatcctagccatttcagcctnctttgaaccccaatctgnctcctaaattcagcaagatcgccaggcagaaagttcatcctagcgctcatccctttccagtctactaaggnaatgctctttatntatnactctataagtanatacgtatntagnttcacacagaccaanaaattttantatnttcagaagtcgtacaaccantganattttncanactaacaatattataacggggggccctancntgttgatgatcaagagacaacattgntctctcttnaaaatattntgagaaggccttaccaaggcntttatttaanccccatattccanttacnnanaaatcttcccttttccc

SEQ ID NO: 4024 - DNA, 134 bp, Homo sapiens
  misc_feature 87, 106, 131: n = A,T,C or G
ccgcggtggcggccgaggtacgcgggggggcatcacggacctaccaatatgtgatgtcacccctggtggcccagctgtgtcatgganaaactccagctgggcccanagattctgcatcgggaaaatccaangct

SEQ ID NO: 4025 - DNA, 348 bp, Homo sapiens
  misc_feature 299, 312, 313: n = A,T,C or G
ccgcggtggcggccgcccgggcaggtacagaaagctactatttatgtaaaaagctaaaatataaaaaaggtatactcacacacatagagtttggtcacagtggctatccctggagagtgaaaatggtaggagggagacaaacatttcactacatatttgtttaaaccttttgaatgttgtgatatttgcatatattatctgtttaaatatacagatacacacacacacacacacacacacacacacacacacacacacaaagattaagatttagttttcaggttggccttacgaggcanacaagctaattcnncaatattccccccgtttactgcatgggcttggaaa

SEQ ID NO: 4026 - DNA, 823 bp, Homo sapiens
  misc_feature 422, 444, 454, 462, 475, 488, 514, 524, 540, 545, 562, 569,588, 602, 629, 645, 672, 673, 674, 683, 689, 696, 705, 707,711, 717, 720, 725, 735, 736, 747, 749, 756, 771, 781, 783,784, 788, 791, 792, 823: n = A,T,C or G
ccgcggtggcggcccgaggtacagtagtatttaacctggatgtgaggacgaaggaggaaattttctggtgaatacagaagagcaaagagcagcaggtcagcaggaatgactaatgtttttctatgcacgtttaatggaaaattcatgtagatattttgagtaggtaattggataaccagcatttataactcgcatcctactagtttgactctcactaataagacttgtcaaagatccaagaatctgaaagttgatgataaatgtccatgtgtatcaccatcaatgatcaaaagttagcatccacaacatagaatgggacagatgaacttaatggataaagatgaatatcggagttgttccttttagggaatgatactctccatgacctgtgtgagtcacagctgcagaaaagagcgagcaangagcatatgaaggcagcccaancaaattcagncctagagngccctgctttganttcatgtcatagntctgactttctaaaaaatcatttttntgcaaaaaanccctttgatttttttnccccncttgcaggccctgcaanccaaacnagaatccccttttagccanggggcttttttggngggtctttccttttaaaaccaaggctnttttttttaattaccncaaattggaaaaaaaaaaaaaaaaaannncccttgccnggggcngggccgnttttaaaancntatntggggnatnccccnggggctttcnngggaaattttnantaattcnaaagcttttttcggnattcccccgncnnaaanccnncttctcaaagggggggggggggggggggggn

SEQ ID NO: 4027 - DNA, 285 bp, Homo sapiens
  misc_feature 264, 272: n = A,T,C or G
aatacgactcactataggggcgaattggagctccccgcggtggcggcccgaggtactttattgatgatgtaaaaaatgaagctcagctcttgaagagctagaaaatttaagaagtatctttttttaaaccatataaaagatataatgactaagtccattatgatacatccttaacatggaatcttgtagttatttaaaatgttatagaaggtcatttaatgttatggaaatatgttacaggaatatatttctctaaacaaagangatttacngaaatatatagag

SEQ ID NO: 4028 - DNA, 451 bp, Homo sapiens
  misc_feature 3, 401, 434: n = A,T,C or G
tcnccgcggtggcggccgcccgggcaggtacaaagaagagcatccgttcgagaagcgccgctctgagggcgagaagatccgaaagaaatacccggaccgggtgccggtgatagtagaaaaggctcccaaagctcggataggagacctggacaaaaagaaatacctggtgccttctgatctcacagttggtcagttctacttcttgatccggaagccgaattcatctccgagctgaggatgccttgtttttctttgtcaacaatgtcattccacccaccagtgccacaatgggtcaagctgtacgcgggggggcaaaaaaatcaaggtatttggtcccggaacaaagcttattcattacagacaaataaaacaccaaaagctttaagttatttggatttggnggaggcaacagaacttggttatgagcaaaatgnaccggggactgggaacc

SEQ ID NO: 4029 - DNA, 364 bp, Homo sapiens
  misc_feature 48, 50, 79, 90, 101, 116, 258, 263, 271, 309: n = A,T,C or G
ccgcggtggcggccgaggacttttttttttttttttttttttttttancnagaatcatgatttttaatttgaattaaancattttttttngctttgttaanatgaggcaggccttnttgctgacattttaaaaagcaactatttttctttagttacactatgaggcattggctccaactgtcagcattgaaactgtcagcagttccctaccaggaaactggttccaaggtctagggtttccttaggtagaggctggcnctgtnaaaataanggggctctttatccatgtcacctggaatggagttaatnccctgccagtcttagttgatttgacatactaacaggatgggtcttgaacgttttc

SEQ ID NO: 4030 - DNA, 249 bp, Homo sapiens
  misc_feature 70, 80, 151, 189, 203, 209, 219, 222, 241: n = A,T,C or G
ccgcggtggcggcccgcccgggcaggtactatatggacaccaacatggagcagaaaatgagggcagcagngtccaatctnattccaggtgagaagttgcacagtgtccaataggtgcatacatctccttagtaagtagttgcgattaacantgaaatatgaaatgaaaaatatatttttttatttatgngtattatatttttnaagcanctaataagtnggnaggacataatatttaattngttgggga

SEQ ID NO: 4031 - DNA, 401 bp, Homo sapiens
  misc_feature 5: n = A,T,C or G
gactnctatagggcgaattggagctccccgcggtggcggccgaggtaccgtttttgttggtttttttctccctcaaagtgaaatgagagactattgtagggttttgagccaaggagtgatattatctgaattctgttttaaaaggttcattatggctcctgtgtggaggcagggtagctacttagaaaccaagccatctcagcctcccgatttgtagagatgtggtctcactatgttgcccagactggtcttgaactcctggcctcatgtgatcctcccaccttggcctcccaaaatactaaaatgatagatatgagccgccacacctggccataagcttcagccttgagcagatactttctaaacactttatatagggaaaaaaaactaattcttgcgta

SEQ ID NO: 4032 - DNA, 292 bp, Homo sapiens
  misc_feature 45, 110, 245, 260, 263, 266, 274, 278, 280: n = A,T,C or G
ctacttagggcgaattggagctccccccgcggtggcggccgaggnactttttttttttttttttttttttggcttttttgtgttttttgtttttgtttttcattttttgngtgtgtttatttttttatatttttttttatttttattttttgcagccacaggagttttagccatttcagatgccttgctccccacaattttggaagattcctttggatttgaccaaagtcaggaagagatggganaaaagtgaaacaacnacnatnaaaccccnaacntnaaccaaccgaaa

SEQ ID NO: 4033 - DNA, 410 bp, Homo sapiens
actacttagggcgaattggagctccccgcggtggcgggcccgcccgggcaggtacatggatgagagccgcgttagtgcctgggaggaggtccagcagaggcttttgaatgtctgcagtgaagcactaagttacttcctcactctaacatcagaaagtcatcgagaagcctggactaacttactgcttttgtttctaactaaagttctaaagataagtgataatagggtaagtatgaggcttcgaatccagccccacatttctagcccaattcgcattgggatgcggggtcccagagccgccgtgcaagagctcttagagatgaatcaagcagtgcccaggctgcactgctgcttgtgcaaagccaccagtggcctttgctggatcttcctcagtccttgcttttctcccc

SEQ ID NO: 4034 - DNA, 417 bp, Homo sapiens
  misc_feature 315: n = A,T,C or G
aggtacctgtttgttttacaactcaggcatgacattctttctggaaaattgaaatgcccttatgaaacagctgtggaattagctgctctctgtctacaagcggagcttggggagtgcgagcttccagaacacacaccagagcttgtgtctgagtttcggttcattccaaatcagacagaagcaatggaatttgatatcttccagagatggaaagagtgcaggggaaagagccctgcccaggcggaactctcctatctgaataaagcgaagtggctggaaatgtatggggtagacatgcacgttgtcaggggaagnagatggctgtgaatattctcttggactgaccccgacaggcattattaaatctttggaagggagctaaccaaaaatagggcttatttctttttggcctaaaaa

SEQ ID NO: 4035 - DNA, 421 bp, Homo sapiens
ccgcggtggcggccgaggtacctacaggttaagctatcttctaaagctctttagggaggacagctactttttgctttcccatttttgacttccagaaacacttttaattccttaaaaagtattctagttctgaaaatcctaaaaagctttgctacatattctactcacacaattaagctccatcaaagtatgcaagttgtgtttttacttatgcttgaaagttgatgctgcgaagtgaaaatacttcatgttgacagttaacactctgacctgattcaaggccaattctcagtccagcttttcaggaaaaagcactatgtggtgaggaataggagataaaaaagtggcaaacaaaaacaaaacaaaaaaaaaaaaaaggtacctgcccggggcggcccgctctagaactaggtgggatccc

SEQ ID NO: 4036 - DNA, 435 bp, Homo sapiens
  misc_feature 393, 396, 397, 401, 428: n = A,T,C or G
cactacttagggcgaattggagctccccgcggtggcggccgcccgggcaggtacttttttttttttttttttttcgcattttattaaaacttgaaagctatggcttgccgccatcaatgacgcctattgggttccaatagcctcatgttcaaatctgactcgttagcaaatccacccaactcaacatcggtcatcttgacattgcaggatattcagcaagtctgaagtttttaatcgggaaggattttctaccgttactgaacaaataaaggttctttgtagcaatggctggaaatgcaaccccgcgtacaggaccagctcgggggggtgtggcacccgaatggaaatccatgagcagcaccgtaggcaaaacagccaggaggaaggccgatnttnnaaanacccacattccagggaaaagaccaccnaaggggg

SEQ ID NO: 4037 - DNA, 432 bp, Homo sapiens
ccgcggtggcggccgaggtactctggttccagggctcagagtagcaagagtgctgggacctgtctgagaagcagtgctgggctgtggatgcttgcctgtggcaccagatgccttacagtggccaggaatgctgcgggacagtctactttgattgctttctttcctccatggctgagatctgagtgtagtgttaactgggcttaaaaatcaagtccgttgtatctgcatggtcacgtagttcggcacctcatggcttttgcacctagaggtgtgaaccataatacctgaaacacaatttcataacctggctccttgggcttagcctatatggtgggagggttagggtctgtatatcatcaaggactgtgtctttgcatgggttgtcatttctgtttgggaattgaacctttcttatttctgtaggccctaagg

SEQ ID NO: 4038 - DNA, 396 bp, Homo sapiens
ccgcggtggcggccgaggtacgcggggggattatgtgtcttgcagttgacaacggcagtgaccagtgcctttttactagcaaaagtgatcctttcgaagcttttctctcaaggggcttttggctatgtgctgcccatcatttcattcatccttgcctggattgagacgtggttcctggatttcaaagtgttacctcaagaagcagaagaagaaaacagactcctgatagttcaggatgcttcagagagggcagcacttatacctggtggtctttctgatggtcagttttattcccctcctgaatccgaagcaggtaaaaaacttgattattatttgtgcttgtatctctcattcaaaggctctgctcttccttcctttccctaccccctctgtttt

SEQ ID NO: 4039 - DNA, 425 bp, Homo sapiens
  misc_feature 349, 406: n = A,T,C or G
atcactacttagggcgaattggagctccccgcggtggcggccgaggtacgatttcagctcactgcaacctccgcctcctgggttcaagcgattctcctgcctcagcctcccaaagtagctgggattacaggcgcccgccaccagacccagctaatttttttgtatttttagttgagaccagggtctcatcatgttctccaggctggtcttgaactcctgacctcaggtgatccacctgcctcagcctcccaaagtcccaacgtgctgggattacaggtgtgagccactgcgcccagcccacctatcttattttttaaagtgaacaattttaatttctttcatcacattntccatcaatactcttcttctgggtataggttcatttaggattactctgtaaccatgngggaggttaaaatttggct

SEQ ID NO: 4040 - DNA, 429 bp, Homo sapiens
  misc_feature 45, 232, 344, 397: n = A,T,C or G
atcactacttagggcgaattggagctccccgcggtggcggccgangtactttttttttttttttttttttttttttgggagacgggctcactctgtcagccacgctggagtgcagtgacatgatcttgactcatggcaggcttgacctcctaggctcaaggaccacctcccaagtagctgagaccacaggtttgccccatcacacctggccgatttttatttttttgtaaanatgggggttgtccaggctggtctcaaactcctgagctcaagcaatgtgcccgccttggcttcccaaagtgctgggattataaggcgtaaaccactgcacgcagcctaccctntgcctttttaagatgaatgtattttattttaaattttttgccatcatttgggngccttcacctttcctggtggaagggaaaattc

SEQ ID NO: 4041 - DNA, 422 bp, Homo sapiens
  misc_feature 3, 312, 393, 404: n = A,T,C or G
ctnctatagggcgaattggagctccccgcggtggcggccgaggtacgatcttggctcactgcaacctctccctcccgggttcaagtgattctcgtgcctcagcctcttgagtagctgggattacaggcgcgtgccactgcgtccggctaatttttgtatttttagtagagatggggtttcaccatgttggccaggctgatctcaaactcctgacctcatgtggtccacccaccttggcctcccaaagtgctgggattacaggcgtgagccaccacgctcagcctacaagcaattttttaaaaactgtacacnctattactgataaaattctctgtttaaaatcctatttactaattttaaagattaaaggtattaagttttttttttaaatancaattaatttnttgtttatttggattaaa

SEQ ID NO: 4042 - DNA, 400 bp, Homo sapiens
ccgcggtggcggccgcccgggcaggtactgactgctgatctggaggctgggacaaagacttctggtgcacaagcaaaaagaagccttatataccatttacctgtatccaaatttccagcagccaacgatggcgaagagcctcatagcaagatgtggcagtggccgccacttcccatgacaaagggaggtaggcatgattcatctctagtgcatggggacggttgccttttgccccaaatcaactcaagacccctttccaccatatgtctgtatgtaactctaaatgcatctctaaggaccttaaggaataaaaaaggccactgctacctgggcaaggtgggatgaagggcaaaaggagaaggacataccccccaaaggaacctataagcacctctggctt

SEQ ID NO: 4043 - DNA, 403 bp, Homo sapiens
ccgcggtggcggccgaggtacatctgactatattccactggctttacacggctcgctttagggattgccacgctcagccgcacaggcttagaccccagtcccactgctccctggcactccgtcagggctcgcttctgttccagttcatctgtgaatttcacaaaaccataacccttagacacgcctgtctggtccaaaaccaccttgcctccccgacaggaggggtagactttgacgaagaattcatacagcatgccatcatcccacgtccggggtcagggtcccccacaaagaggggaatactcaggggctgttattctgggttggtttcccggtaagtgggcatagttttcaaagtttaaaaaaccgtttcgcccttggcccaaaaaacaatcttcccccc

SEQ ID NO: 4044 - DNA, 383 bp, Homo sapiens
  misc_feature 338: n = A,T,C or G
actacttagggcgaattggagctccccgcggtggcggccgcccgggcaggtactgattggtctttccatccttcttaagatgttacggggtgaaagcccgggacgtgctagcaagctgctccagtgcgggacacagagtctctatcacaggctgctccggtgcgggacgcggagcctctatcacaggctgctctggtgtgggacacggagtctctattacacagccttcttttgtttggggggctagttgttgttgctgctgctgctgtttttcacaatcctttaagaatgtaaagactattattagctgacaagtcatttaaaaaaaaaaaaaaaangtacctcggcccgctctagaactaggtgggatcccccgggctgca

SEQ ID NO: 4045 - DNA, 449 bp, Homo sapiens
  misc_feature 340, 367, 373: n = A,T,C or G
acttagggcgaattggagctccccgcggtggcggccgcccgggcatggtacgcgggggccagtgaccggaggcggcggcggcgagcggttccttgtgggctagaagaatcctgcaaaaatgtctctctatccatctctcgaagacttgaaggtagacaaagtaattcaggctcaaactgcttttttttgcaaaacccttgcccaatccaagcaatttttgtcaagaaagcttcttgcttcctatccctcacgatggaaatctctatcccagactgtatccagagctctctcaatacatggggctgagtttaaatgaagaagaaatacgtgcaaaatgtgngcccgttggtttctggtgcgccacttnaggggnttggttagcaaggccttccagtataaaactattattggtggctcctgtaactggtaattgatgtttggaattcgta

SEQ ID NO: 4046 - DNA, 381 bp, Homo sapiens
  misc_feature 120, 123, 179, 188, 206, 209, 214, 215, 220, 230, 253, 271,275, 280, 293, 317, 339, 357, 367, 369: n = A,T,C or G
ctacttagggcgaattggagctccccgcggtggcggccgcccgggcaggtactttttttttttttttttttttttttctaaaatgaggatttggccattcaaaaaaaaacaacaacaaancanaaccccaccacatacaagaagaaaaagagaggcatgctttacaaaacagctatttnaaagtcatnatttttaaaaaaaaactnttncaaanntgtgngaaccgaagngggaaaaaaagttctcatgtggnttggcgtcggcactgcanctgntcctnattaaaggtcctntttactccctctgggctaggtttncagtaaaaaattttttaaacanaactttgtttttcaaccnactttttttntngccctggggcct

SEQ ID NO: 4047 - DNA, 417 bp, Homo sapiens
tacttagggcgaattggagctccccgcggtggcggccgaggtacaactgttcatagagttcagtttgacaattaacatgtatattagtatggttgcctgtgtttgtgttatgtttcactgtgtttcatcttcctgtgcctgggatcccccatgccctcctttcctatctctctcaaaaccagctgtttttccccatctgctgcattttggttatagatatttatttgtaggtttgctttaaaacaaaactcctctaaatcctacttgataaccatccatgctctttactctctcctgtcctgggagctctcttcctaactcctgcccttcattctcgacgcctgcctggcctccttttggttccttctctacagcattgcttccacccaccaagctgtagtgcccctggtcccttta

SEQ ID NO: 4048 - DNA, 405 bp, Homo sapiens
  misc_feature 166, 169, 370: n = A,T,C or G
ccgcggtggcggccgcccgggcaggtactcagcaaaaagctgagttattagaaaatggacactagcctgtgcttgtgggcataaattctccatctatgagaaggcatgaattgaggcactatattgattacattatgttgtttattctcatataactctctattgntanaaaatgattttctagccccatctttcaagatggggaaatggaatcctagagagacttcatttttctcctatatttgtatttagcaattgctattgctgccataagaaaataacacagggtggcttgaacaacagaaatttattttctcacagtttcttggaggcttgggaagtccaagaatcaagggtgccaagcaaggcntggttttctcctgaggcctctatccttggctttgg

SEQ ID NO: 4049 - DNA, 422 bp, Homo sapiens
  misc_feature 338: n = A,T,C or G
ctatagggcgaattggagctccccgcggtggcggccgcccgggcaggtaccatctatggaaaaagcaatggaaaatgaagtgtcaatcaaataatgcacccttggctgacacaaattaattgaagctaaacctagaacccttctttctcaccaagatggcaacttctcccaattgttctaaatataaaatcccggttatctgtcactttacccactccccctctccccagtccgatctgttgccaaatcctgtagtttctacctccataacggaactcgcaatcatctccttccattttctctccattccaaatctagaaggaaaaaaggaaaccagnattacatttttagtttcatcagccaaggttaggaaccttttctgtcaaaaaattttcaagttgctcatggccctgttaaccccc

SEQ ID NO: 4050 - DNA, 422 bp, Homo sapiens
  misc_feature 29, 61, 63, 123, 125, 172, 180, 225, 259, 261, 276, 289,293, 307, 340, 360, 361, 372, 374, 382, 409, 413: n = A,T,C or G
ccgcggtggcggccgcccgggcaggtacncggggagagaaggcccggaggggctctgcgtncngtagtggcgctgcttgggcccgtggcggattgtaagctgctggttttgctggctgggaanancggcgagagggttcggcatttttcgtctggatccccgcaaagggatnagtgctgncatgagagtctcacccgcatggggtgaagcgttcagcctccccanacgacgatctgggatctagcaattgggaggcagnanacttgggtaatgaanagagaaaacaaangttnttgagacttatggnttgcagtgaaagaaagaaacattactggttcgncttgtttataggtagatcannaaatcaacatntnactttccnaaactcggtccagaaaagttaaaaatntttnattttaaaa

SEQ ID NO: 4051 - DNA, 133 bp, Homo sapiens
  misc_feature 86, 102, 109, 122: n = A,T,C or G
tacttagggcgaattggagctccccgcggtggcggccgaggtacctcattttgtcccttgactttagtgtagtggtggggtctttnccaccaccccactaanccttggnaacctcattttgnggccttattat

SEQ ID NO: 4052 - DNA, 373 bp, Homo sapiens
  misc_feature 81: n = A,T,C or G
aggtacccttccactcctactccactttgagatatcccacctttttaggttaaaccaatatgtagcctcatgtattgattnatgactttgcctgtaacctctgccacgctgcctttaaaaacccttacctgtgtaagccatctgggagttcaggtcttaagcatgacctccctgatcctccttgcttggtgccctgcaacaaatgccccactttctctccctgcaatcccgatgtcagtgtgtggctttgctgctctgggtgggcagacccaagttcagcaagtaaccattctaaggagggtgtttacaccttcttcatgatcccttgtcactgtttcatcctaaatcctgattccaacccaattatctgttc

SEQ ID NO: 4053 - DNA, 415 bp, Homo sapiens
  misc_feature 396: n = A,T,C or G
ccgcggtggcggccgaggtacagaataatgcctgtcacatagtaagtatgtaataagcatttattattacttatcagggtatgatttatgaattgtggaacctgggattatgggagagtctggcttcaatcaagggctgaaattccatttccactgacatctcttccttccccatcccccgattctgtcctgcaacagggtaacaagaaggggcccttaggccgttgggactttgatacccaggaagaatacagcgagtatatgaacaacaaagaagctttgcccaaggctgcattccagtatggtatcaaaatgtctgaagggccggaaaaccaggcgcttcaaggaaaccaatgacaaagcagagcttgatcgccagtggaagaagattaagtngcaatcattgagaaagagg

SEQ ID NO: 4054 - DNA, 353 bp, Homo sapiens
  misc_feature 121, 136, 162, 174, 176, 189, 191, 216, 243, 308, 329: n = A,T,C or G
cttagggcgaattggagctccccgcggtggcggccgcccgggcaggtactaataacaatacctgactacatggttaccacccgtgactactgcattgcagcttaaaacatgctttggtcantaaatttaaaagatntacatcaaataacaaggccagaaaanctggtttaaaantntcctgaccttaantnaactttaaatacattgacaaggcanaaaaaaatatgatcaaatatacagaanggtttctattttttcaaccatttggcattttatattattaatttcgctgggttaaaataatattntatacttcctgtgcactgatnatcatggctctccgaattaaaact

SEQ ID NO: 4055 - DNA, 391 bp, Homo sapiens
  misc_feature 52: n = A,T,C or G
ctatagggcgaattggagctccccgcggtggcggccgcccgggcaggtacangcctgtgtattcatatacccgacctgggctgatgattgggaattcaccaactactccaggtccttgaacttcttccacgtcacccttagcatttgttattctccaatagcgactggccaacttgacaggccttctcaggaagtgcatcttttgacatttcaatcctgattcggtatgtgaagaaatagtggggtgggatgtacccctccaagccggacaacccgggcgaggacgcaccagcggaggacatggccagatactactcagcgctgcgacactacatcaacctcatcaccaggcagagatatggaaaacgatctagcccagagacactgattt

SEQ ID NO: 4056 - DNA, 113 bp, Homo sapiens
  misc_feature 53, 73: n = A,T,C or G
tggagctccccgcggtggcggccgaggtacgcgggggcaccttccttctgtcnatacgatgaaacaaatactncatcctgctctggaaaccactgcaatgacattattcccag

SEQ ID NO: 4057 - DNA, 385 bp, Homo sapiens
ccgcggtggcggccgaggtacggaaacaaaagagataataaactaatagttatttaatatgctgtaacaacaaattagaaacattgagaattaaagtgtgttttctttgtaacaaacttatcaagagtagtttgaacaagggttggccttcttctggtataatttagatacatatcagagcaaacatcttttctgtggctttgcaagttgtcatactgtattttgtttggatcagcttccaacattttatcttttatgctttcagtattgtaaaatacctctcagtttctttagcatgcagttttttttttttgttagcgtctcttcctctagggaccgttgtcattcttttcatcactcccactttcttcattgctaagttggc

SEQ ID NO: 4058 - DNA, 119 bp, Homo sapiens
  misc_feature 56, 58, 79: n = A,T,C or G
ccgcggtggcggccgaggtactacggagaggtcctgtgacctttccagtgcctcananagtgagaatgggaaagaggantggatgaagtatggcttaccctcctgtgggtcacctctct

SEQ ID NO: 4059 - DNA, 428 bp, Homo sapiens
  misc_feature 328, 358: n = A,T,C or G
ccgcggtggcggccgaggtactgatcgtgtaagccctgggacgctattgctggggctttggcttttactctgactaaaatgggaaccaccgagggcttctgagcagagaggcgacatgatccgtctcctgatttaaaagcacgacctggctgccgagttgagaaaagactattgggaagatttgggtagaagcatgggagccaagctgtggcaacatcccggtgggagatgatagtgatcctgacggggttcatggtggtggtgagagatggttagagcctggatacatgtttgaagtcagtcagtagggattttccttgacagactnggatgtgaagcctgttaagagaagggcagntggttcaaaggtttggagttttgaattcttgaatttggaaattatttaaagtaaattttttaaaaaaaaa

SEQ ID NO: 4060 - DNA, 425 bp, Homo sapiens
tatagggcgaattggagctccccgcggtggcggccgaggtacacttagcaatgaggctgtgttgatgaggaagtgcgcagcatcatacttggtatagaagctggccaggagatagagcacaataggagagatgctgaggaacttgcgggaagaggtaaactggagcccatagtccatttgctcccagtggtgtcagtagccgagcctttccttggtcaggagtctcaaagggtgtccctttcaccgtatgaaggaagacatacgtagccaggttatggatgacgttggtcagggtccagacaacaggaatgctgaagaaggggatgctgagtagaaccatatggcagcaatcctacccaaggattgatgttagggccagccagatgccctcggctatttcatcacttcggggtgtttggggggtt

SEQ ID NO: 4061 - DNA, 414 bp, Homo sapiens
  misc_feature 398, 404: n = A,T,C or G
atagggcgaattggagctccccgcggtggcggccgcccgggcaggtactgaatttctgtcagttaaggggttcactgctttggtggaaattggtggaaattgctagcaggttccacgatgtttatttttttctccatgttgtatatcattaccatttcacatacgcgtttctatttttcttcctctccctctgatctccttaaaaaatgaatctagagttggtggctttttccccctcctctttggccagttccacagttcagttcttcctgaaaacagggatgatgaacttgtaggatcaggacaaaatgtgtgtttttcaaaaacttaaggctgggtgtgaaacaccttctgtggacaaggatttgtaaacttctctcctccctccagctgcggcncccagncctaactgga

SEQ ID NO: 4062 - DNA, 448 bp, Homo sapiens
  misc_feature 189: n = A,T,C or G
actacttagggcgaattggagctccccgcggtggcggccgaggtacgatcttggctcactgcaacctctccctcccgggttcaagtgattctcgtgcctcagcctcttgagtagctgggattacaggcgcgtgccactgcgtccggctaatttttgtatttttagtagagatggggcttcaccatgttnggcccagggctgatcttaaaactcctgacctcatgtggtccacccaccttggcctcccaaagtgctgggattacaggcgtggagccaccacgctcagcctacaagcaattttttaaaaactgacacctattactgataaaaattctctgtttaaaatcctatttactattttaaaggataagtattagtttttttaaataccaataatttcttgttatttggataaaaatttaaagggcatttttcatttggccttttt

SEQ ID NO: 4063 - DNA, 429 bp, Homo sapiens
  misc_feature 170, 338, 411, 424: n = A,T,C or G
ccgcggtggcggccgcccgggcaggtacccagagtgcagagccgcatttccagcatgcaggggctgctcagcgtttagtcacatcaagaaatagaacagaattcagccatggccccaagaaagagaggtggacgaggtatttcattcatcttttgctgtttcccgaaatnaatgatcacccagaaatcacgtatcggctgcgaaatgatagcaactttgcgcttcagaccatggaaccagcattgcccatgccccctgtggaggagctggatgtcatgttcagtgaactggtggtgagtcccagttttctatcctgggcattggttgggggagccagnagaaggagtaagaggagagggatgttgaatgagtttggttttggttttggacattgggactttttcctttttnagtggaaatggcncccca

SEQ ID NO: 4064 - DNA, 406 bp, Homo sapiens
  misc_feature 175, 236: n = A,T,C or G
acttagggcgattggagctccccgcggtggcggccgcccgggcaggtacttttttttttttttttttttttttgactttttttcagccttcctatacagccccaggaataaaaaaatcatgactaaaatgggatagctccctaaaaagggactaggaaagaagtcccaatttganggctgaaaaaaatcaaaaaagaaaaggaatagggcatcctttttaggagcggtcactgtanagcctccaaaacccattccattaacttgggggaaaaaaaacaactgtatggtaaatcagcagcgcttccaaaacaaaaactggaggctttacatttattagcaaagaaacaattagaaaaaggacattgagccttcattttcgccttggaattctgtttgtaattcaaaa

SEQ ID NO: 4065 - DNA, 114 bp, Homo sapiens
  misc_feature 33, 88, 92: n = A,T,C or G
ccgcggtggcggccgcccggccaggtacatagnaatatgaacacatcacacacatgagagacgcaagtgccaaatgccttggcctggncttnacgtgtcaagcccaacacagtc

SEQ ID NO: 4066 - DNA, 413 bp, Homo sapiens
  misc_feature 14, 366: n = A,T,C or G
ttagggcgaattgnagctccccgcggtggcggccgaggtactgatactttttattcttttcagggaccgtttatctaaaaaatgttaaggcttatgctttcagatctcagtccaatttctagaaattaacaatgagtccttttatagcacttacctttctcttcctgccttccccacctccaccccaaacttgctttgggtgttctttaatctttcaagggagtgataaatgtcacaaactcttaaataaagggctgaaatggcagcgtatgactgttttgactgtctttaaagtagtattagtcttctagaatactaatctaattcttagaaaacaggaaaacaggaggaagcctcaatggttcnaaggggaaggttaataataatttggattcattcctggcctacccagg

SEQ ID NO: 4067 - DNA, 410 bp, Homo sapiens
  misc_feature 21, 35, 37, 48, 55, 318: n = A,T,C or G
cccgcggtggcggccgcccgntcaggtacatcccntncatcagtatcntttcttnatgaggacagtgacagtagcccgagtcacaaaaaaggagagagcaaacagcaacgcaaagctcggcacagaccacatggccctcttttgcctactattgaagattcttcagaggaagaagaattgagagaggaagaagaattattaaaggagcaagaaaagcagagggaaatagaacagcaacaaagaaagagttctagtaaaaaatcaaagaaagacaaagatgaacttcgagctcagagaagaagggaaaggccaaagacncccacctagtaatctctctcccattggaaggatggcatctcccgacagaaagagtttaccgtcagggctggcagaaaatgggagggagcctc

SEQ ID NO: 4068 - DNA, 420 bp, Homo sapiens
  misc_feature 59, 65, 155, 340, 420: n = A,T,C or G
gcttaccgcggtggcggccgcccgggcaggtacgatcttggctcactgcaacctctccntccctngttcaagtgattctcgtgcctcagcctcttgagtagctgggattacaggcgcgtgccactgcgtccggctaatttttgtatttttagtanagatggggtttcaccatgttggccaggctgatctcaaactcctgacctcatgtggtccacccaccttggcctcccaaagtgctgggattacaggcgtgagccaccgcgctcagcctacaagcaattttttaaaaactgacacctattactgataaaattctctgtttaaaatcctatttactatnttgtaaagataagtaattaaggttttttttttaaataccaataatttctgtttattggataaaaaatttaagggcatttn

SEQ ID NO: 4069 - DNA, 358 bp, Homo sapiens
  misc_feature 186, 210, 242, 252, 254, 310, 312, 315, 322: n = A,T,C or G
attatagggcgaattggagctccccgcggtggcggccgcccgggcaggtacttttttttttttttttttttttttttcattcttctccattacttaaattaaatgctgccaccattgagtatggcattgtataatcatattccttcagcggttaaaatagaaaaaaaatgcagatagagatgtgtntaattggcatgcatagaaatacanaaccagttacatgacaaaagtaaacaaaactntaaaccttcntnttttaaaaacaagattttccatttaacaagaattacattcattaaactggagagtntntcntataganaaaacttttagaggtcagatccaaacatttacctat

SEQ ID NO: 4070 - DNA, 392 bp, Homo sapiens
ccgcggtggcggccgcccgggcaggtactttcttcctcatactgactatagtcatccacctccattcgagactccaagagagaaagaggatcactgcagcacaccccattttcatgaagcccctctgtataagaccccctattttcctcatctcgttttagctggatttttaattttgtagaactactgcctgatcctgagttaaatccattattaagctttgctacatagagattgttatcgttgtcatggtctttgcttaacttgatgcttattttggaagagttcattccatcattctcttggtcatttgttttgctgctgctatcatgaccgccctaccgaaaggaggtcaatttgggggaatccccaggagtttatttttcttaggg

SEQ ID NO: 4071 - DNA, 408 bp, Homo sapiens
  misc_feature 147, 152, 158, 241, 267: n = A,T,C or G
ccgcggtggcggccgaggtacttttttttttttttttttttttttttgatatttttattttacaaatttttaattaaaataagtttatttaaaagttttatttttaatttataaaatagttaattttaaatagtctcagcaaaaaanaaggngggcanaaaccctgctcgttctactttataaatagtagcttatcaaccggcagccagtgaaacactaaacccaaaatttgcctcattgngtcatggagattatgctgcaaggganaaacctgccaagccctttccaagaggtgctgtgtgccagcccaatccccaaaccctgccaagccaccgggagtgctttctagggcttggtgacaggccccagttgcccagctagaatgcccccgtatggctcggggggatg

SEQ ID NO: 4072 - DNA, 424 bp, Homo sapiens
  misc_feature 6, 39, 385: n = A,T,C or G
gggctnattggagctccccgcggtggcggccgaggtacnatcttggctcactgcaacctctcccttccgggttcaagtgattctcgtgcctcagcctcttgagtagctgggattacaggcgcgtgccactgcgtccggctaatttttgtatttttagtagagatggggtttcaccatgttggccaggctgatctcaaactcctgacctcatgtggtccacccaccttggcctcccaaagtgctgggattacaggcgtgagccaccgcgctcagcctacaagcaattttttaaaaactgacacctattactgataaaattctctgtttaaaatcctatttactaattttaaagataaagtattagttttttttttaaaataccaantaatttctgttattggataaaaatttaagggcattttca

SEQ ID NO: 4073 - DNA, 414 bp, Homo sapiens
  misc_feature 4, 139, 208, 279: n = A,T,C or G
tatngggcgaattgtagctccccgcggtggcggccgcccgggcaggtacttttttttttttttttttttttggcttttatcctgtttgttgttctctgagcttcctgaatctgtggtttcgtgtcacatattaatttanaaaaatctcattcattattgctttgaatatttcttctattcctttctctctttcctctccttctggggntccactatgcatacttacatcttttatagttgtcccactgttcttggatattctgttccttttttattcantctttttccctttgctttcatttttggaagtttctcttgaaatatactgaagctccagattctttcctcacccacatccagtctgctaatgaggcttcaacaccatgcttcatttttggttagttttcttggacc

SEQ ID NO: 4074 - DNA, 619 bp, Homo sapiens
  misc_feature 107, 114, 155, 163, 166, 170, 173, 182, 185, 211, 221, 241,248, 264, 281, 295, 310, 322, 329, 354, 356, 384, 385, 386,393, 404, 405, 416, 431, 435, 439, 448, 454, 458, 462, 471,478, 481, 492, 495, 502, 517, 520, 529, 531, 546, 548: n = A,T,C or G
  misc_feature 557, 559, 564, 583, 599, 612: n = A,T,C or G
aggtacttcattcctttttgtgctgagtaatatgtcacgttataaggatacaccacgttttgtttatgcattcatcagttgatgaacatttgggttgttttcacttntttggcntattgtgaactaaatgcttgcgtgtaaagtaattcctttgncatggagnttntttngtnataagaatngtngtgggtttttcaattttccccttccntgaaggttgntattaccccttaagggaagnggaaggnaaaacctggccttggngggttccggtcaattgnggttaaaaaccttnctttaattaattttncaaaaccaattnttttttnggaagggggaaaacccccaaccccnanctatcctttttttttttcaaaaaaaggnnnggggccnccaacccaacnnccaattttttnttaacccaaaaattncccntggncctttaagnccaaanccgntttnatttggaanttaaaanttnccctttaattnttnttctttncttggccaatttttnccntttaccccnanaaccacccttttggncnccaattggntnccttnggtgccttttttttttttnaatttttttttaaggnccccaatttcctntttttgg

SEQ ID NO: 4075 - DNA, 394 bp, Homo sapiens
  misc_feature 229, 233, 367: n = A,T,C or G
ccgcggtggcggccgaggtacattttgcttcttagaaagctaagtcctgggttccgtctgattttaggttccaggaacttcctgagaacacccgatcgcagagggtaattttctggagtttgttttgcagggatagctgggagtatggccaccctgctccacgatgccggtaatgaatccagcagaaggtaatgtttcatggtcccagggaggggcagtaggggatgtncaanggggcacaaaaaatggttgtgggagagtgggagaggactgaaggtgggcagagcggctcctagtctccagtcagagcagacaggagaattgaattttttactacgttatcaaaggcctcaagaaagggacgtgnaacataaagaagtttttggtattcctg

SEQ ID NO: 4076 - DNA, 394 bp, Homo sapiens
  misc_feature 138, 140, 158, 166, 171, 177, 178, 181, 203, 207, 217, 239,249, 250, 253, 254, 295, 298, 333, 343, 346, 349, 353, 355,378: n = A,T,C or G
aattggagctccccgcggtggcggccgaggtacttttttttttttttttttttttgtgttttttgtttttgtttttcattttttgtgtgtgtttatttttttatatttttttttatttttatttttggcagccacagnanttttagccatttcaaatnccttgctncccanaatttnnaanatttcctttggatttgaccaantcangaatagatgngataaaagtgaaacaacaacantaaagggggnnaanngggaacaaacagaaagagttaagcaaaacaaacggggtgcncanttcatatgattactgactgttctaatgctaagganaaattaaaancanctngtgncntaatcttatattttaatccattnaaggaaaaatttttaa

SEQ ID NO: 4077 - DNA, 382 bp, Homo sapiens
  misc_feature 2, 337, 366: n = A,T,C or G
cngggcaggtacttactaaatatatgctctattttttcttttggaaaaagcatggttttttgcttttgttctgtggggttttttttttttttggtgaccgaccaaccattgaacctaaattatatgtgtaacaatttcttaaagtgtaacgttaggtttgaaacacctaacaactttgccaagttaaattttcataccaattttagaattgaatatggggaaattttaagctaccacttatttttgggaaaatgcctttttgttttctattcctggtgggcagattttcttctgaagttgaatttaaaactgaaagattaggacatcgggccaaccnttaaagaggtaaggtggatgattttttgntatggtaagtttgagc

SEQ ID NO: 4078 - DNA, 372 bp, Homo sapiens
ccggggcaggtacttccctcacctggacataattctcaatatctgaaaaattcaataatgttatcatagcaaattcagaaacaacttcagtatctactaataagggaatggttaaatcaaaccacaaataaggagggagactactgttgttacagaaatagtcttcaagaaacaatagcatttcctagaagttataaaatttttactggttccagactgatcctaatatcaggtatgattatttcctttggagtaagaaaaaaaattttttaaggctgaaatttttgcacaaaaagtcttagattaaatatggtatattgattttggggacacaagggaaaagcctataatttaaaaatcttggcttcttat

SEQ ID NO: 4079 - DNA, 421 bp, Homo sapiens
ccgcggtggcggccgaggtaccccaagataggatcagggctattttaatgatcatgtgatttattaaaaacttgagatttccaactactctttcacacgtatgtggaagaaatgtattccaagaagagttgctataatcagtattaatctgtaaaatcacattgatttatcttagaaggataaaaagaacagaaacaaaactctaccagctcatataatttttctttgcaaaaattttttgcttctttactatactgaattagttacatcaattgttgtatcaatgaaataattaggtattattacctgtaactattttgaaaattaataaaagaaccaagaagaatagagtaatatccctaggctaaaactaaaacaaaatctcagcaacccagaactttcgggaaactgatgttcagga

SEQ ID NO: 4080 - DNA, 396 bp, Homo sapiens
aggtaccagctctgggcatccccagggtttatgctcaccggtcagtgctggtgtgacatgatggctgagcaccggcactgtgtccagcgcattgctaggcactagacacgtgctctttcatttattcctcaaattgctttgtgctgtaaatgctacccagaaaggctcatgttcattactcaagtcacttcaccagaaagtgacagagccagaattcaaacccaggtctgccagattccaggtcccttgcttcttctgttgttgctcattgcaagggagtcttcttcaaggttattctcaggagtttgattaagatacaggctcacagctgggcatggtgtctcatgctgtggtctcagcactttgggaggccaaggttgggtggatcacttgagc

SEQ ID NO: 4081 - DNA, 403 bp, Homo sapiens
  misc_feature 5: n = A,T,C or G
ccggncgggtacgcggggagaaacaagcagctgctgcctggtggtaacagcaaagggtggaagtcaatagggtctctgtgagactgtttcacagaaggatgcgtgtttacccaaggctgcgcatcaaaaagaaatagataaaataaatggaaaattagaagggtctcctgttaaagatggtcttctgaaggctaactgcggaatgaaagtttctattccaactaaagccttagaattgatggacatgcaaactttcaaagcagagcctcccgagaagccatctgccttcgagcctgccattgaaatgcaaaagtctgttccaaataaagccttggaattgaagaatgaacaaacattgagagcagatgagatactcccatcagaatccaaacaaaaggactat

SEQ ID NO: 4082 - DNA, 268 bp, Homo sapiens
  misc_feature 44, 57, 90, 122, 161, 164, 215, 228, 231: n = A,T,C or G
ggtggcggccgaggtactttttaattttttttttttttttttgnatttttagtaganacggggtttcaccgtgttagccagggtggtctnaatctcctgacctcgtgatccgcctgtctcancctcccaaaaagtgctgggattacaggcatgggcccgcnacncctggccaagtagatgctttttattgagctctgtgaggtaggatcccagancatccaaagtaanganggggaaggtgaatgggtagggttttttgaagaaaaaa

SEQ ID NO: 4083 - DNA, 402 bp, Homo sapiens
aggtacccaaacctaagagctattatccctaaatttcaaaatctaaaaaaaaaaccttagaacctcagatgatataattaacataaaagcccaggtttttgtataaatgaaaagggataaaaattcatacaaaatccattagtaacattcataagcacccgaaataaattatttagatgtttgcaagtcagctgcaaggtgttcttcctcctcaaatatcctctaaggatgagcttatagacagattaacttaacaacgaaacctaacattccaccagtaagaatcttgtttgtgtgtgaagctgctttttactaagttggaggtaagagctcaaagtagagttttacttaagaaaaattggggcaaacattgattttagtttctacagctataaaatgatg

SEQ ID NO: 4084 - DNA, 402 bp, Homo sapiens
aggtacagattaagcatataaaaaattagagactaactgggatttttaaaagattattccaaattaagagttgctttgttatgccttcagcaaatagcttcattttgccaatactgaataaaagagttatttctacatgtgaattagttttttcaagtcataatcccctaaaaaaactatttctagccagagcctttcacaataaaaatactaagattttacaaaaatactaagttttagaaagagcaacctagtttttaacctggtgtgtatcctgaagtgacttttaataacattgagattcttgcccactgcatagtcttctcctcagctggggattttttggattttttttttttctatttacttatctaaatgtttagcaatatcaagatgtaggct

SEQ ID NO: 4085 - DNA, 417 bp, Homo sapiens
  misc_feature 57, 350, 369, 414: n = A,T,C or G
cccgcggtggcggccgaggtacgcggggggagcggccaacatggcggaacgcattanacacaagaagcggatccaggaagttggtgaaccatctaaagaagagaaggctgtggccaagtatcttcgattcaactgtccaacaaagtccaccaatatgatgggtcaccgggttgattattttattgcttcaaaagcagtggactgtcttttggattcaaagtgggcaaaggccaagaaaggagaggaagctttatttacaaccagggagtctgtggttgactactgcaacaggcttttaaagaaagcagtttttttcaccgagccctaaaaagtaatggaaaatggaaaantatgataaaagacattaanagaaaagaaaaaaggataaagggaaaaagcttgaaaagtgggaanaaa

SEQ ID NO: 4086 - DNA, 447 bp, Homo sapiens
  misc_feature 1, 6, 16, 31, 39, 90, 92: n = A,T,C or G
ntaggncgttttgganctccccgcggtgttngccgaggnactcgcccccaggcccagataatttatttaaaaactttttttgtagagacntnggtctcactatgttgcccaggctggtctcaaactcctggcctcaaacaatcctctacctcaacccccctaagtgctggcattacaggcatcagctgccatgcctgggctacaaatcttaatgttttccccatggcttctttttctggcgttcttttctcaggtaatggaagtgggcagagaatgatcctttccctaggctccagtgtgtaagaattaaagaaagaggaaagaaacacaatggcttgatggtcgaggacaggtttatttttaaagaaaacaaacccaaggagtggcttctggctgagttagatcaggaggcatgcctctcttacagactaaggagttttttaagga

SEQ ID NO: 4087 - DNA, 295 bp, Homo sapiens
  misc_feature 112, 162, 172, 196, 272, 273, 282: n = A,T,C or G
ggcgattggagctccccgcggtggcggccgcccgggcaggtactcctatgaacaaaatttgaagcatgtttatttctctgcctggttcctctagaatttggaaattatctgnctggaagctctgagtttatcttgggacctcaagaggagaggatcaccctncttcacagcnaatcaaactccaaatggtgctatnaactgaaccacacattggacacgtcagtcttccgaggacccttagatcaaccccaggaggagccctagcttgctgnnccccattcnacgcccctttcca

SEQ ID NO: 4088 - DNA, 296 bp, Homo sapiens
  misc_feature 204, 254, 275: n = A,T,C or G
ccgcggtggcggccgcccgggcaggtacatgcagaactgcatgatcagctgtatggtagccttgaaaaccaacaggccacaatcacagtgaaaacctcaggttggcagccactggaggatacaaaatgagtttggatctccttcaatgccccattcccagagaactgtcattatttgacctgctggtagtttccctaaaggacngtgcaagggatgttttttttatttgactgggaccactttgaaagctttgnccctggtaatggaaacaagcncccccaatcttttccccaatg

SEQ ID NO: 4089 - DNA, 424 bp, Homo sapiens
  misc_feature 17, 72, 78, 142, 259, 275, 305, 337: n = A,T,C or G
gggcgatttggagctcnccgcggtggcggccgcccgggcaggtacttttttttttttttttttttttttttncaatgnctcactcttgtcacccaagttggagtgaactggtgccattatataaagcttactgcagcctcanactcctacactcaagcagttctcccacctcggcctcccaaacagctggtattacaggcataagccactgggcccccaacccttactagccatttttttaaaatgctggaaaaagccnacatgtggacttaggnggctacaccatttgggacagctcagatacnagaaacatttctatcatcttcaaagttcttanttgggaccagaaattggcttttaaaggaattatccctcaattataaaaaatggataaggtatggcctaaaagcctcaaaaaaaaatt

SEQ ID NO: 4090 - DNA, 268 bp, Homo sapiens
  misc_feature 168, 169, 197, 199, 204, 206, 210, 217, 219, 231, 239, 244: n = A,T,C or G
atagggcgaattggagctccccgcggtggcggccgcccgggcaggtacatttctctggctccagccttggctaagttgatgacctgagtcgatctccacattcatctacatgaacgtgggggcgttggttttggcggccaaggctgtaaaatgtagggcttgtctcannttgctatttaatcaacatgtggacattntnagcananaaancccccanancaaaataggaantgagaaanctacnctgattaaaatgatgaaaatgatt

SEQ ID NO: 4091 - DNA, 380 bp, Homo sapiens
  misc_feature 79, 213, 239, 242, 277, 320, 338, 344, 354, 359, 363: n = A,T,C or G
tatagggcgaattggagctccccgcggtggcggccgaggtacaattacattattattgaatatagtcaccctattgtgntatcaaatagtaggtcttattaactctctatttttatacccattagccatccccaccttcccacaacaccccctgccgctacctttcccagcctctgataaccatccttatactctctgtgtccatgagtttgnttttgattttagaattccacaaattnagntggagaaacatggtggaacaattttggtcttttcntggtgccctggggttttattttccacctttaaaccaataaatnggattcccaattaattgntttccnattcaaaatngttancttngaccaaatggaacttgg

SEQ ID NO: 4092 - DNA, 424 bp, Homo sapiens
  misc_feature 6, 393: n = A,T,C or G
cgactnctatagggcgaattggagctccccgcggtggcggccgaggtacttagaaaacctagatactgcagtcagattttggaaactgccgtatagtcactgttttaaaaaccccggaggggctgtattaatttgtattgccccatggctgacaaaagccttttttttttggttttgatttttttttttttgtaactgttggggggaaaaaaggctttttaacccatttttgaagagggtgaagtttggagaacaaatttaaaaaccatcagtcatgtgagcagattttttagaagggataggagacacacgcgcacacacacacacacgaaacttgaaatggctttgctttggctgtcgtcttctgccgtgtgccagatgaagcttgtgatntggggaagcccgggggcacccccgtttttgt

SEQ ID NO: 4093 - DNA, 409 bp, Homo sapiens
  misc_feature 2, 58, 60, 90, 91, 111, 121, 162, 257, 362: n = A,T,C or G
tngctccccgcggtggcggccgaggtacttttttttttttttttttttttttggtatnanattgggtttcaccatgttggccaggctagnntcaaactcctggcctcaagngatctgccanccttggcctcccaaagtgctggaattacaggcatgagccanttgcacccggcctgcttattaatcaagattttcaaagttagatgtttaattaaaggataatatgtctataccactcatccaacaattttcactgngaagaccacattagccagctcccagaggagacacattctggtgagcggggtggcttgggttcaccatattcgcttctaccatcctccaatcccagcctttccctntacctgggggattcacttggaaccattccattttgtattcccacatt

SEQ ID NO: 4094 - DNA, 397 bp, Homo sapiens
  misc_feature 9, 59, 81, 90, 103, 110, 112, 131, 159, 164, 166, 171, 188,222, 223, 239, 246, 251, 271, 276, 282, 284, 291, 293, 296,302, 305, 306, 313, 315, 316, 326, 327, 329, 333, 335, 338,340, 359, 364, 370, 379, 388: n = A,T,C or G
caccgcggnggcggccgcccgggcaggtacgcggggaggcattgaggcagccagcttcnggggcttctgctgagggggcangcggagctngaggaaaccgcanaataagntnttttctctttgaaagatanagattaatacaacctacttaaaaaaaantatangnccaantagggttaacctaaagnatatttgcctttaagcggctgcaaagattttatnnaaaccgttaaattttnttaaaanagacntttaaagaaatatttttaanagcancataananttaatgnanaangaaccnttnnactcaananntaagtttatnncnattngnaangnggaaaagggggaaaaaaanggaantaaaanaaaaagtgnggttttccntaaaaaaaa

SEQ ID NO: 4095 - DNA, 491 bp, Homo sapiens
  misc_feature 52, 82, 158, 227, 236, 237, 259, 284, 288, 289, 293, 295,304, 306, 321, 376, 403, 427, 431, 440, 441, 443, 446: n = A,T,C or G
gcggcggcggccgaggtactagtcagtatgctgtagtattaatcagtaggtnaagttcagtgaagtaaaggagaattgaatncttgaagttcacatttaggcaaaaatttggcgttttaggaggtgagtataagacatgatctttatagaaaacgctngatgataaaaacagccgctctctgttaggtgcctttatgcttggactccattggcatcttttcttaagnaaacctaannctcacgactggggtgccaatgngctccatgttctgttaatccccagncacnnttgngnagggctgangnctattagggaatcangtttgaagcctcgggggaggttcaaagaatcaagccctgggggcaaaccattagnctaggaccctcgttctccttacttaanagaaaaccaaatacacataccacnaaanaaccaacannanaanaccccccccaaaaaaaaaacccaaacaaaaccaacgccttgggca

SEQ ID NO: 4096 - DNA, 377 bp, Homo sapiens
aggtaccccagccaggcgcacgatgtcgtgtaagcagggtattcttgtgccagcatttgcttctctgtgaaaacacagcgccgtcaacattttgcactttccagggcccttcggaattggaagtgcctgtagctaagctgtttcccctggagagtccagctgttctcctgatccggccctgcacacacacacccagccacaaattactaggatgtcaaacccaggtgatcaggatactctcacggactgccctgctcccccagggctctccctacagtgtaatcctaaagccaaacttcctttcagcagtggctgaagcaaactctgcagtcagaggtcatacccagcaggcttcaccatgcagacttgaatgtttg

SEQ ID NO: 4097 - DNA, 181 bp, Homo sapiens
  misc_feature 43, 81, 140: n = A,T,C or G
ttttagggcaattggagcttcccgcggtggcggccgaggtacncgggtaatcaggctttttaaatgatgtaattcccactntaatagcatagggattttggaagcagctgctggtggcttgggacatcagtggggccaanggttctctgtccctggttcaactgtgattttggctttcccc

SEQ ID NO: 4098 - DNA, 414 bp, Homo sapiens
  misc_feature 1, 33, 45, 75, 296, 321, 342, 374, 380, 412: n = A,T,C or G
nggccgcccgggcaggttcatgggactacagtncacgccccaccnttcccagctcatttttgtatttttagtagngacagggtttcaccatgttggccaggatgatcttgatctcttgacctcatgatccgcccgtcttggcctcccaaagtgctgggatcacaggcgcgagccaccacacctggccctctatttattctctttaaagagagagaaaactattgagaggccaaaattatttaattaaatctttaccttagcacaagggaaaaaaatggaatttgcctaatataggntgatgaagcatacacaatgaattanaaacaatcacattttagtaanaaggcaaaaatttgagaccttataaagctatnatgggnagcttattttttggggtgggggaaggaaaatnga

SEQ ID NO: 4099 - DNA, 168 bp, Homo sapiens
  misc_feature 34, 73, 95, 120, 127, 134, 137, 154, 155: n = A,T,C or G
ccgggcaggtacgcgggggcgcgcggcccatttnccttttccggtcggcgtggtcttgcgagtggagtgtccnctgtgcccgggcctgcaccatnagcgtcccggccttcatccgacatnattgaanaatgatnatngcctgcttgagcttccnntgcttatctggaa

SEQ ID NO: 4100 - DNA, 441 bp, Homo sapiens
  misc_feature 1, 22, 295, 373, 385: n = A,T,C or G
ntggcggccgcccgggcaggtncgcggggaggacggtcgacttcggctttgcccaggtgagaaaggcccacctgtgtcctggttgagggtctccagggttctttggggcccgaggaatttcagacctgaacaatcaggtggacaacttcttgtgactttgggtattctgaaattactcatcttgactctactgtgcctggatgtagctgtgtgtttttgtgtgtatcctgttcatggtttgtagaatttcttgagtttgccgatggtggcagagtctacatagaactatgcttcntggtgttctggggaaaacctttcgacttgttggctatctatccaatatggctgtatagctcattgggcttttgaaaanccttggtggtgnttgtcaatgtgttctggaaccatcaaatgggagcctacaatttcaaaaaattcaga

SEQ ID NO: 4101 - DNA, 800 bp, Homo sapiens
  misc_feature 3, 17, 18, 19, 20, 45, 55, 71, 86, 89, 93, 95, 98, 114, 115,133, 136, 137, 146, 147, 176, 194, 208, 211, 214, 218, 219,223, 238, 243, 244, 246, 247, 264, 276, 278, 286, 295, 296,310, 321, 322, 344, 383, 384, 385, 397, 400, 401: n = A,T,C or G
  misc_feature 405, 422, 452, 458, 472, 492, 506, 537, 553, 554, 557, 564,565, 598, 602, 604, 612, 613, 624, 636, 638, 644, 659, 661,667, 681, 689, 722, 723, 727, 732, 734, 736, 753, 759, 760,765, 766, 772, 778, 781, 787, 789, 790: n = A,T,C or G
ggnaaaacccggcgaannnntttttcgggcaaaaaaaccccgggngggccgccancaagggggtttattcnaaagaagcccctttntancacncngcnctgggttttccgaccnngcggaggggaaagggacnatnnaagaaaaannggggaatatggaatggaggtaaccccttnaaaaagggaatgggggcnaagggaaaaaaacnagnaancccnngganggggggggaaaaatncaaanntnngaaaccggggggaatcnaaccaagaatcncngaaaaaantggaaaggnnccacaaaaaagggnggaaggccaanngaaccccaaaatgggaaggaanggggaaaaaaaaccaaggaaccgaaggaaaaaaaatccnnnggaatagggccntgnncacnaaaaggaacaagtggcnaaaccaaaaaccaaaaaaaatgggggaaantaaccntggggggaaatggnaccatggggaagggggcaangcccccaaaggccnggggggggaagggggaaggaaataaaccccnaccggggggggccaannaanggggggnncaaaggggaaattatccttgggggccccccctnggcncngggccccnnaaaaaaaaccngggggggccggntngacaantaaaaccccaaaaananacaaanttgagcaaataaantgatgccnataaaacccccctgcaaaaaaaaccaaaaaaanncccnggganangncaaaaaaaaaatccccngggaannccctnnttaacngggggngancccccntnncccagggggg

SEQ ID NO: 4102 - DNA, 443 bp, Homo sapiens
  misc_feature 223, 262, 410, 415, 425, 429, 436, 440: n = A,T,C or G
atagggcgaattggagctccccgcggtggcggccgaggtacatactatggaattcctttcttttttttttttagagggggtgtcactatgttgcctaggctagtcttgaactcctgggctcaagtaatcctcccacctcagcctcccaagtgctagaattacaggtgtgagccaccacacctggcctatggcattctttagggtaagcatttgcagaaaatgncatttctctgaatgaaatcctatatggaaatcctatctncccattctccacaaggcctcagtcaagctttacatagcaagaatttagccgtaatctggtccctacattatttcccacagggagctctgctctggtcatgctaagcttcattataaggggctaatacaatgccttgcattaatgtccngcaanttaattatgntttngaattcnaaanatt

SEQ ID NO: 4103 - DNA, 427 bp, Homo sapiens
  misc_feature 53, 166, 179, 199, 226, 230, 241, 243, 267, 277, 285, 297,310, 313, 320, 340, 346, 347, 367, 371, 375, 380, 398: n = A,T,C or G
aggtacatgatagggaggagtgaggcaggtgggcactggagggctgtttcctntggcacagttgaactagagggtcactttccactcataattggtttcctaggtctaagtcaccacacctggggcttgaagcaagtctatgcctgtgcaccaagctgttgtgccnttggaccctggantagatgtcaatggtcttcantatctaccagttgttggaaagtgggtnaggnacctcccaaancntgtaagggaagaattcttttcttntctccccacncttcccanacttcttttttncccctttaacaanaanttgaacncaagggcggtgtccaaatgntttccnnagtaagggacaagaaagtgncaanctcnttccnttggagttggccaaaacntttcctcaaccccactaagttttcctttt

SEQ ID NO: 4104 - DNA, 443 bp, Homo sapiens
tagggcgaattggagctccccgcggtggcggccgcccgggcaaggtacaatcttggctcactgcaacctccgcctcccgggttcaagcgattctcctgcctcggcctcccgagtagctgggattacaggtgcccgccaccacaaccagctaattttttgtgtttttagtggagatggggtttcactatgttggccaggctgttctcaaactcctgaccttagacgatccacccacctcggcctcccaaagtgctggagttacaggagtgagccaccgtgcccagccccatatactttaaattatctttagattacttataatatctaatacaatgtaaatggtatgttaacagtttgttatactatattgtttagggaatcatgacaataaaaaagtctgtatgtgctcagtttcaagatgcttaaaaaatatatattttcaa

SEQ ID NO: 4105 - DNA, 210 bp, Homo sapiens
  misc_feature 77, 140, 161, 171, 180, 182: n = A,T,C or G
tcctatagggcgaattggagctccccgcggtggcggccgaggtactgaggtgtaaagggatttatatggggacgtangccgatttccgggtgttgtaggtttctctttttcaggcttatactcatgaatcttgtctgaancttttggagggccagacctgncaagtcctgnagaaaaatnantaagatgggcaaggtttgtgggtttttt

SEQ ID NO: 4106 - DNA, 250 bp, Homo sapiens
  misc_feature 17, 26, 37, 77, 85, 87, 99, 103, 130, 132, 135, 153, 166,187, 196, 198, 210, 222: n = A,T,C or G
ccgggcaggtacccctncaagccggncaacccgggcnaggacgcaccagcggaggacatggccagatacctactcantcgcttgntnacactacatcancctnattaccaggcagaagataatggaaaancnatntatcccatagtacactgntttccagaacctnttgatgaagagaaagctacantaaaatgtntnccagaaacatcngctatgaagacnctgcaatggtggatgatggggaaaattg

SEQ ID NO: 4107 - DNA, 457 bp, Homo sapiens
  misc_feature 1, 452: n = A,T,C or G
nctcctatagggcgaattggagctccccgcggtggcggccgcccgggcaggtaccactatgcctggctaatatttttatttttttatttttgtagagacagggtcttgttatgttgcccaggctgttctcaaactcctatcctcaagccatcctcccatctcagccactcaacttgctggaattaccagcggaagccactgtgcccagcccagactcccttttacctagtatatcatgtctaatttctaacaaaaaattaaaaaaacattgtaagaggaaaaaaagaaaccctaaaacaaacaagcaaacaaaaaacccaaaacaacaaaaagtttcaagaaacagagctagctgacagaactatattcagatatggcaggtatattagaattatcagattggtaattttaaacaactatgactaatatggtaagagtgataatggaaaaantagac

SEQ ID NO: 4108 - DNA, 380 bp, Homo sapiens
ggcgaattggagctccccgcggtggcggccgaggtacgcggggctcttccggggacgttgtctgcaggcactcagaatggtccagcgtttgacataccgacgtaggctttcctacaatacagcctctaacaaaactaggctgtcccgaacccctggtaatagaattggtttaccctttataccaaagaaggtttgggaaagcaccaaaatctgcatgtggtgtgtgcccaggcagacttcgaggggttcgtgctgtaagacctaaagttcttatgagattgtccaaaacaaagaaacatgtcagcagggcctatggtggttccatgtgtggctaaatgttgtttcgtgaccagggattcaaagccgtgccttttccttat

SEQ ID NO: 4109 - DNA, 417 bp, Homo sapiens
  misc_feature 336: n = A,T,C or G
cactacttagggcgaattggagctccccgcggtggcggccgaggtacttccctgtgaaaagttcaggggccatatggattggtgtccccacaatgctgcctgacatcatggcctctggcttgcagaatcctaagtcagtgatcttggcacggttctgcttatccagcagcacattttttaagtttgatatcacgatggacaagtccctggctgtgcaggaagcggattccctccaccacatctagtgctatctgcaaacgtgtctccagggtcagcccagccttcagccctgtgtagagatcccggtgtagccgctccattaatgaggagcacagncaattgcctgggagcccaccaccataagtttgttagttcaaaatggacctggaaccatggggaggatcccacccaatcggc

SEQ ID NO: 4110 - DNA, 383 bp, Homo sapiens
  misc_feature 325: n = A,T,C or G
ccgcggtggcggccgaggtacaacccctttacttgctacgactacagctacagggagaaggaactagaagtgcaaaaaagtccactcttccctgtcctttatcccaggagagagtcaggaacaatgagctcctacataaagatcaaaatggtgtttctcattttcctgctttcaagtgtcctctcctatcaaagactcaagcaacttttgctgcagcaactggactatgggctgcactaaccaccgtatcaaatccaagcagagcagatcctgtgacctggagaaaggagccgggctgtccttccctgctgttaaccttagaagnaaaagccccgcggtacctggcccggggcggccgcccatctttgggggtcattcggatg

SEQ ID NO: 4111 - DNA, 401 bp, Homo sapiens
  misc_feature 336, 350, 360, 364: n = A,T,C or G
ggcgaattggagctccccgcggtggcggccgcccgggcaggtggagaacggacacgctgcttttttatatagattaaaagaaatctcaatcttcaaagtttctatttactgtaacagtagatggtttcaaagaagcacttggccgggcacggtggctcacacctgtaatcccagcactcttgggaggctgaggcaggcggatcatgaagttaggagttagagaccagcctggccaacatggtgaaaccctcgcctctactaaaaatacaaaaattagccaagtgtggtggttgcatgcctgtaatcccacctactcgggaggctgaggcagggagnaatttgcttgaatnccaggtaggncggnaggttttggcagtggagcccggagaatcatgccactt

SEQ ID NO: 4112 - DNA, 403 bp, Homo sapiens
  misc_feature 337, 401: n = A,T,C or G
cttagggcgaattggagctccccgcggtggcggccgcccgggcaggtacaatattagatattaaaaatggattcaagagaagttactaagaaatgctgacatactgtatatacaaatttttagttcaatatatgccattatataaagcaccaagagtaatgcctttataaatcaaagccattttttatgactctgtttctaatctttgtaacccttttacatttgttccaatatacacacatcataaatgttacttgctcaacacttcaccgatttggtctcaacttaaaaatatatatggtagggccaaaaaattaatgtcaaaaagggaacctgnttctaaccaggttaccaaaggaggaaaaattaggtaaaatatttttgggaattaaaaactggtnca

SEQ ID NO: 4113 - DNA, 155 bp, Homo sapiens
  misc_feature 96, 114, 131, 137: n = A,T,C or G
cgcggtaggctggccgaggtaccaggcaccacacgaaaggatcactgaacgtcgagaggacatgagaaaagggaagatcagcaccaacagaagcantccagagaccaagtagtnaccattaccactgaccngtgatnactcggaaaaggaaaaag

SEQ ID NO: 4114 - DNA, 152 bp, Homo sapiens
  misc_feature 79, 111, 151: n = A,T,C or G
aggtacctgaacaaatcccatcaaggacagattctcagtcttgaagaggcagcacagtaaaggggaaagatcatgagtnttggggccaggttcccttggatattgtggggnccccacacttcctgtgatgatgttggataactcttttgana

SEQ ID NO: 4115 - DNA, 243 bp, Homo sapiens
  misc_feature 52, 54, 55, 172, 175, 180, 181, 192: n = A,T,C or G
cggtggcggccgaggtactgtttaaaaagaataatcataattttatattatncnnttgaaacatgtattcaatactgtttactgaatatctcaagtatacttatttacttagaaacaaaggaatcaacggatatctgttatataacgtttaaattactaaaaatactttatntancatcnnctccataaatngctagttgtaaatgctgacgaaagtaaaattgtcattccctacatttgcta

SEQ ID NO: 4116 - DNA, 174 bp, Homo sapiens
  misc_feature 51, 109, 149, 159: n = A,T,C or G
acgcggtggcggccgcccgggcaggtacctcatcaatatgtgcatttattntttgccaattaaaataatataaaactctttaaaaattaaaaaccatatatttccctangtatttctgggatgatttttttttctcaatgacttttgancaatgctttngctttgtttctcaaa

SEQ ID NO: 4117 - DNA, 249 bp, Homo sapiens
  misc_feature 21, 50, 62, 71, 81, 104, 127, 136, 141, 145, 152, 153, 164,203, 210, 228: n = A,T,C or G
gccgaggtactatggttaaantatagtaagttagggacgaaattttattncaagtgataagncaactttangatggcatgncaagaaaagacttcactaagatngcgactttagaattaaacactgnaataagcanggaangcanccatgcnnatattgggccnagggaggacattcaagcatgaggcccaatgagagccaanaccgcangaccttattgtgctatancaaggggagaatacaattgga

SEQ ID NO: 4118 - DNA, 246 bp, Homo sapiens
  misc_feature 38, 95, 161, 193, 207: n = A,T,C or G
ccgggcaggtacgcggggacgtcttccgttttcttttnacatcaatgcagagtccctctgtgaatttacaacacccaacacccatgagtttagtncttaagaaggaaaattgagcaagtatttaattggttggacattgcataaaagaggtccatatccangctaactctagaaattttattctcaaacttanttggcctctttttnttctgtcagaggaccattcttagtggcactggggaaatc

SEQ ID NO: 4119 - DNA, 226 bp, Homo sapiens
  misc_feature 20, 78, 102, 113, 117, 121, 152, 155, 179, 195: n = A,T,C or G
ctatagggcgaattgttagntccccgcggtggcggccgcccgggcaggtacatttgttgggggcgtgacattaacatntaaccacttagagtggacatgcanttagagaaaanttantganctggaaccaagctgggaattccaacatgtanaanttaaacacattgaggaggagccancaaaggaaacacgaancagagcttccagcatggtggggggcatttgg

SEQ ID NO: 4120 - DNA, 435 bp, Homo sapiens
  misc_feature 80, 113, 190, 196, 205, 210, 215, 222, 258, 345, 380, 390: n = A,T,C or G
ctatacggcgaattggttctccccgcggtggcggccgcccgggcaggacttaaattttaaaaatttagatttcagattanttgtcttgcaaaaggggcagactaggtgcctcntgactataatcccagcaatttggaaggctgaggcgggaggattgtttgagcccaggagttcgagaccagcctgggcnacatantgagacttnatctnccccnaaattanccacctgccggctatgctagtctatagtctcagctnctcatgaggctgaagtgggaggaccacttatgcccaggaaaccaaggctgcagtgagccatgatcataccactgcactgcacttcancctggggggacaggaacaaggacagaccctgtcgncccacacctnccctatacccccgggaaaaaaaaaaagtgcaaaaaaaaaaaaaac

SEQ ID NO: 4121 - DNA, 458 bp, Homo sapiens
  misc_feature 45, 124, 199, 228, 235, 238, 250, 253, 263, 371, 375, 387,431: n = A,T,C or G
atagggcgaattggagctccccgcggtggcggccgaggtactttnttttttttttttttttttttttctggacacagggtcttgctgttgcccaggctggagtgcaggggcatgaccatagctnactgcagccttgacttccttaactcaagcaatccttttgcctcagcctcctgtagcactgtaggcacacacaacntatgcctgggctaatttttaacatttttntttcacnttnttgacccttatnttntatacccggntaattttttgtagagacagggtcttgctatgttggtccaagctggtcttgaattccttcgcctgcaagcaatccttccccctcagcttcctgagggttaaggattacncgcnttgagccactgnacctggcctccaacaggtaaatttttagaacattttttcccttntacacctaaaatttaccctccctaata

SEQ ID NO: 4122 - DNA, 355 bp, Homo sapiens
  misc_feature 349: n = A,T,C or G
tacttagggcgaattggagctccccgcggtggcggccgaggtactcatggagggcaccaccaagaacttcctcttgaatttctccctgtagccgcccacaccagccctggtcttggaggctgctgaaccacgattatgctgccatcagtgaaggaagctgaaattgtgaaagtgaaacaccatggctggtcatgtgccagatgatgttgtgtttctgcaaagtatctccaatcctgggttggatccagtaggttgcacttgggcacccaaaccggaaacagggattcttgttccttaaacacaagacactccaatgagaaagctgctctcagatgaagttgcagatcangccagg

SEQ ID NO: 4123 - DNA, 316 bp, Homo sapiens
  misc_feature 172, 196, 258: n = A,T,C or G
aggtactcagctgaaaacactgtttcagccccctctctggtgacctcagccttctccaggtgtatctcttgatgatcttggagaccagcagccacagctgctgctactcctgcaggagactgtcaggctgtggtggggggcaggggtgttggaggagaagttgaaaatccgngtgttctctgcccctctgctcctncatcttagcttctggaggagttaaaggcaccaaagggcacccaagtcaagggtttggcaggnttttgcttgcccttgccccaaagccttcaacaaaaacttagcttgggtccccttgctt

SEQ ID NO: 4124 - DNA, 361 bp, Homo sapiens
cgaattgtagctccccgcggtggcggccgcccgggcaggtacgcggggatgcgtgaaaggtgctgtgaccgccctccgggttgtggcttggtggccttcggtgtttcggggtttggcagttcactcaccaaggtgatctgatggagtgcacttcgcacgattccaaagaagggagaagacagaggagaatgccacatgaagacagaaacagagattgaagttatgttggccataattcaaggattgctggcaacaccagaagccaagagaaagatgaggaagaattctcccctagacctttcagaaggagcgtggcccaaccaacaccctgacttcagacttctggcctccagaactgtga

SEQ ID NO: 4125 - DNA, 532 bp, Homo sapiens
  misc_feature 9, 108, 145, 161, 222, 228, 321, 333, 364, 384, 393, 400,406, 407, 422, 432, 435, 445, 466, 468, 497, 519: n = A,T,C or G
tagggcgtnttggagctccccgcggtggcggccgcccgggcaggtacttttttttttttttttttttttttttttgcatgtatttatttctccttgcatatttattgntttttcctcttctagttttccttactaatacctactntagtaaacctggcctncaataattcctgccgtcgtgggtccaggctatgcaattcttccatcatttctggctggcanagcgtntcccgagactaaaggtgctcttggggatcccaaaggacctacataatttttaaatcagtttatgcttcactttcacttgagaaaagtagggtntacaagaggggncctcaatgcttgccatttggggggaaaagtnaatggggaaacctttttttnattattttnatttggncccccnnccttaggaaaaaaanaaaaggtttnttnttaaaaaagncccccaagaaggttttttggncntggggttttcaatttttaaaaaaaaaaancttccctttaagccaacctttnccaaaaaaaaatt

SEQ ID NO: 4126 - DNA, 406 bp, Homo sapiens
  misc_feature 382: n = A,T,C or G
aggtacgcgggatgtctcttgtcagctgtctttcagaagacctggtggggcaagtccgtgggcatcatgttgaccgagctggagaaagccttgaactctatcatcgacgtctaccacaagtacgcgggagatcccagaggctgaacagctcgaccttctctgcacagcaggtccagcatcctttgaagcatgagttcttaccagcagaagcagacctttaccccaccacctcagcttcaacagcagcaggtgaaacaacccagccagcctccacctcaggaaatatttgttcccacaaccaaggagccatgccactcaaaggttccacaacctggaaacacaaagattccagagccagggctgtacctgcccgggcggccgntctaagaactagtgggatcccccc

SEQ ID NO: 4127 - DNA, 386 bp, Homo sapiens
  misc_feature 14, 17, 73, 119, 181, 187, 196, 231, 239, 260, 332, 363, 364: n = A,T,C or G
tggagctccaccgnggnggcggccgcccgggcaggtacaaccaagtagttagagtagttcatttattatggtnggaaataacaagagagaaacagattttgagtgggaaggaaaataantattcttgtttagtcttgttagtttaagatgcatattaaacatccaaataaagacatcaaanaaacanttggatgtntaggtctgaagatctatggtcaagactaactgtanagattttnatcccgaataaaatcatctanactattgcagatattaaggaaataaaggggttgaagatcaatccctgggaatctccacatataagaggtganggggaggactcttaaattcccaagagaggcnnaagaaacattccttgactggct

SEQ ID NO: 4128 - DNA, 292 bp, Homo sapiens
  misc_feature 41, 59, 79, 80, 118, 131, 143, 148, 150, 261: n = A,T,C or G
ccgggcaggtacttgcaggtggtttggcctggaaaatctanatgagtggtttttaaatntacttgcttattagactcannaaggaaatttaaaaaacaatactgattactgagaccancttttctagattnttcattcattangagtnangaaaggccaatgaatgtgtattgataaaaaggttcctggccaggtgcagtggctcacgcctgtaatcccagcactttgggaggccgaggcaggtggatcacctgaggtcangagttcaagaccagcctggccaacatgggga

SEQ ID NO: 4129 - DNA, 407 bp, Homo sapiens
  misc_feature 53, 82, 97, 102, 120, 189, 249, 252, 266, 285, 306, 353,372, 384, 387, 393, 397: n = A,T,C or G
tacttagggcgaattggagctccccgcggtggcggccgaggtacttttttttntttttttttttttttttttatttatttanagacaggttcttgtnctgtngcctgggctagagagcancggtgcaatcctaattcactggggcctcaaattcctgggctcaagtgatcctcctgccccacccttgangttgataggactacaggcacacaccaccatacctggataattaattttattcttatttcnaanaaacggaggtccanccaagttccccaggctggnctcgaactcttggccttaagngatcctccatgcctgggctggaaaacataaccttatgggaaagattnctaaaaaaatggtttgaancaacaagtactnaangctatnaatnatgaaaagct

SEQ ID NO: 4130 - DNA, 275 bp, Homo sapiens
  misc_feature 68, 74, 145, 153, 177, 179, 189, 200, 211, 222, 233, 245,264: n = A,T,C or G
attggagctccccgcggtggcggccgcccgggcaggtacttttttttttttttttttttttttagtanagatgnggttttgccatgttggccaggctggtctcgaactcctgacctcaagtgatctgccaaccatccataatatntaaataangcatattgacttcttcttaaactnanggggtaaatntaatattttanttttaatagtncaggttcatgnatcttcatatnttatgctcaagntaataattcctatttgctntacatttatga

SEQ ID NO: 4131 - DNA, 435 bp, Homo sapiens
  misc_feature 193, 197, 204, 205, 220, 298, 306, 308, 396, 408: n = A,T,C or G
gggcgaattggagctccccgcggtggcggccgaggtacggtggctcacgcctataatcccagcaatttgggaggccaaggtaggcagatcacttgaggtcaggagttccagaccagcctggtcaacatggtgaaaccctgtctctactaaaaatacaaaaattagccgtgcgtggtggcacatgcctataatnccanctacttnngaggcttgaggcagngagaatcacttgaacctgggaggcagaggctgcagtgaaccgagatcgcaccactgcgctccagcctgagtgacaganagaacatntnacacacacacacaaaaaaatccatttctttccttctgtaaatatcacatatatgcaaatccacccacccatatttctgtatatgttcnattacccccctnaaatatttaaatggtaaaaagaaacac

SEQ ID NO: 4132 - DNA, 314 bp, Homo sapiens
  misc_feature 19, 28, 33, 37, 39, 44, 47, 51, 56, 67, 135, 158, 163, 165,168, 171, 181, 184, 200, 242, 272, 273: n = A,T,C or G
cggccgaggtacatcacanttctcagcntcagntcantnactgnggnttgngcaanagaacaatcanaatgcacatgcctatgctttatcctagatgtgttactttagaattttggaggtggtagctggataagngcatctgtggaaaagcttctcantgtantnttnacncactcctttnatngaataggcattgactntaccataaaccctagaaaatacgtcattggcaatgctactgntttaaaggagagaaaggcatctttttgttnnttgacccaataatggcattgcctataacaggttgaaaggga

SEQ ID NO: 4133 - DNA, 355 bp, Homo sapiens
  misc_feature 8, 9, 98, 175, 185, 186, 187, 225, 236, 237, 239, 250, 256,318, 324, 328, 329, 332: n = A,T,C or G
gaattggnnctccccgcggtggcggccgaggtaccaggcaccacacgaaaggatcacgaacgtcgagaggacatgagaaaagggaagatcagcaccancagaagcaatccagagaccaagagaaccattacactgaccgtgattaccggaaagaaagggattctcataggcacantagagggccnnntcatagagattcccattggaagaggcatgaacaggaanataaaccaagnncnagggaccaaanagaaanaagtgacagagtatggaaaagggagaaagatagggagaaatattcccaaagagaacaagaangagatntacnncanaatgatcagaaccgacccagtga

SEQ ID NO: 4134 - DNA, 425 bp, Homo sapiens
  misc_feature 24, 73, 83, 84, 88, 238, 260: n = A,T,C or G
cttttatagggcgaattggagctncccgcggtggcggccgcccgggcaggtacaaaggccgcagacaagttgncagcaacatnngatnactcagggaatatcattcccataaatcttaaggcaatctacttatcagacgaatgagtaacatacaatcaaaatgactggatgatgactggggggacatcaccataaagactatgatgtgcattcaatatttacacgaagaactaggatnaatgaaagatgagagagagaangagagagagcaaacagtatataatggctctgtgctccaacaatgtgggaacaaccttataaagaatgtgtaagggacaggaagaacatatgcaaaaatgtcaggtggtaacagtgttgggtgggtgttattctaagaatgcttttggcgtgtgaatagtaaattg

SEQ ID NO: 4135 - DNA, 413 bp, Homo sapiens
  misc_feature 1, 40, 55, 283: n = A,T,C or G
nctccccgcggtggcggccgaggtacgtatgagaagcggntttcattcccttgtnttctacagagcagtttattagagtgaatgcattttaaggccttgcatttgatatgtcatccagttcataatcaagttgcctttttctggctaaaacataatgattatgtatttttctcatttgggtccctacaaggctgctgggccctttgtccctccacttgtgggaatcagatctagagcaggctgagcctgcagacacagcagtggccaaaaggtcactctaagngttttgtcttgactccttacttgaagtccacccagctagcacacatcttggtttatactgaagccccctgcctagaaatactcatttcagggaaccaccaagtaagcatctgtgaccacacaggcttttt

SEQ ID NO: 4136 - DNA, 417 bp, Homo sapiens
cttagggcgaattggagctccccgcggtggcggccgcccgggcaggtacaacaatgacatcacctaacagggcatttctcagaatgcatcccatcattaagcaatgcacgacggtattatacgctgtaaataactgtatgtgctatacttctatgactggcagcacaggtgtgtttacattagtatcactacaaacatgaatcatatgttgcgctatgatgtcataaggtagcaagtttttcagctcaattatattcttatgggaccactgtcgtagatgtagttcatcactgaccaaaatgtcgttatgtggtgaatgactgcggtaaaattcagggcccaccgatgttttagtgcaattagacaattacaagagataaagctatatcttttattcctttcctcattatggataaa

SEQ ID NO: 4137 - DNA, 336 bp, Homo sapiens
  misc_feature 43, 57, 143, 157, 249, 285, 300, 302: n = A,T,C or G
ccgggcaggtacttttttttttttttttttttttttttttganacaggtctcactgngttgcccagtctggagtgtagtggctattcacagacacgatcatgatgcactacagcctcaaactctcaaactcctgggttccagngatccctccacctnagccttccctagtagctgggactacaggaacaagccactgcacccagctaatcccattcaattttccaattaatcacttactgctttgaagngtcatctctgatactgctattctaccttttacattnctattttcccaactntnttagtaagcttacccttaaggataagtaaggcct

SEQ ID NO: 4138 - DNA, 109 bp, Homo sapiens
aggtactcaaagttcaaatggagcccagcaagccagatctcctttacttctaggttccctcaacagtttctcctctgctttagagactgccttgaaaatattcttgtcc

SEQ ID NO: 4139 - DNA, 106 bp, Homo sapiens
  misc_feature 63, 64, 66, 83: n = A,T,C or G
tggccgaggtacttaatgtttgttctacatagtcactttgcttcttcgtaaataaatactatnntnaaaataagagacaatanaactgaccggccctattgtgtct

SEQ ID NO: 4140 - DNA, 406 bp, Homo sapiens
  misc_feature 50, 57, 114, 150, 162, 165, 170, 180, 186, 203, 211, 213,218, 223, 229, 230, 252, 264, 268, 285, 288, 290, 294, 317,330, 337, 350, 364, 367, 383, 384, 387, 390, 394, 395: n = A,T,C or G
acgcggtggcggccgaggtacttttttttttttttttttttttttttttnatcattnacagctacctgttaaaatattcttttatgtaagttgttttgatttttaacaaatatnttcttttatttcaggaaaaactgtttttctcaaaangtttaaccccanaancccanggaagccaanatgcanttaacccaagatcttgnttctcctntngctcncttgnaccacnnttataggacccataaaaatgcnttatcagggccnccanaaaaattatccattggnctngnaccncagaccccagctttctcctgttnttatggcccacgngaaattnttatccattaacnatattcctcactgnaancaaatttacctttagnncanccntgcnnaaaaaaaaaaa

SEQ ID NO: 4141 - DNA, 343 bp, Homo sapiens
  misc_feature 279, 295, 321: n = A,T,C or G
aggtactgtgcgctgaagtgattaatttacatattcattcttgctctgtgatatttaggtgtttgtttttggttagtgcatttattctgttaaaatttaaaatacatttgtgttttttatcctgttttaagtatatataccgtgggaatgtatatatagggatgtatacacagacacactcagacacatattttaatttagatttctagaagggaaattttaattaaaaataggtgaacatttttaaatgacctaatacatatttagtccacattgaanacttttggcattttgncattgccattaaaaattttgatggcnttaaaatttgatgccatttaaa

SEQ ID NO: 4142 - DNA, 257 bp, Homo sapiens
  misc_feature 47, 50, 108, 119, 131, 136, 143, 205, 224, 230: n = A,T,C or G
ctatagggcgaattggagctccccgcggtggcggccgaggtactttnttntttttttttttttttttttgttcaaggaattacaaagctacttttaatactttggggngagccccacangaataaaaaacnctggnaaggggnaaccccctcacccccgggagtggcccaagggggaaaagaggctacctgaggggaaggaagcncaaaagggacccgctgcanactcanggcaaagggaatgccatcggtgctggg

SEQ ID NO: 4143 - DNA, 458 bp, Homo sapiens
  misc_feature 268, 435: n = A,T,C or G
ctatagggcgaattggagctccccgcggtggcggccgcccgggcaggtactttttttttttttttttttttttttttagtatactatttgtatactattgccatctgctgatgtcgatatagaactacaaatatgtaatccaaatgggaagatttcacctcacagggttaagagcagcacactcataacttggaaaatagttgagattttattttcaaaagtaattattataaaaaaatccttagtggatgaagtttaaaaaaacctntacaatgtttgcaagaatttgtgtgctccatccatcctacataacatagaagttggattactcatcttgattcaatgtaccattggtggccaattgatttgatggtaagggaggggatccgttgacctcgtctgttatgtaaaggatgcgtagggatggggagggcnatgaggactagggatgatggcgg

SEQ ID NO: 4144 - DNA, 107 bp, Homo sapiens
gctggccagcgcttgcctttttgtgctggctcaggcccctttcttgctccaaaagcatgaggggctccctgccttactgacttgcggcgctcctcgaactggctctg

SEQ ID NO: 4145 - DNA, 455 bp, Homo sapiens
  misc_feature 168, 394, 405, 433, 436: n = A,T,C or G
ggcgaattggagctccccgcggtggcggccgcccgggcaggtaccactttgtataatattcaaaatctatacagcacattgctaagcagagtatacactcaagaaatgtagaattggtaatattatactagaaaatgaacttccagtattgctattattttactaatnatgcataggtcactgacctgtgaagagtgaacagtatgtagaagtgcctttgagataggaaattgtgagagtccctaacttttacatacatattagattaatttgagcctacataaaaagaaaacaaatttgtgaggatttgaggggggaaaatcaggggacttcctgtttgcagctcttatcattgggagaacagtaaattagatctagactaatatattggggnctctctaatanatggcaatttgttaacttttgtcattgnagntggaatgctgaacaaaaat

SEQ ID NO: 4146 - DNA, 407 bp, Homo sapiens
  misc_feature 348, 395: n = A,T,C or G
tacttagggcgaattggagctccccgcggtggcggccgaggtacttttttttttttttttttttcttagcatttttttttaagctgttttggggaaaaaaaatcacattccattttttttccccatgatatggataataaaggctggatgtctctgacctagggtgactgcagtctcaatttacatcttatgtccggacgtcccattcaatgtcgcattcattccagacaaaagcgtcccagtttagatgacagattatatgactgcccttttttgtcctcaaggtatgatccaaagggaagcatctttctctgccattgctgtttcccacgcgggccaactgctcanatgttcaagtggagtcacggctcggttatccaatctggcttccaaanatgtcctttttg

SEQ ID NO: 4147 - DNA, 436 bp, Homo sapiens
  misc_feature 392: n = A,T,C or G
ctatagggcgaattggagctccccgcggtggcgccgaggtacgcggggctgcagcgggagctccaggtttatcctcagtgttctgtgtcctgtgcttatagaggcccgtcctctgtggccgtgtgacctgcaagtattgggagagccacagctaaaccccgggacccctggaagcctagaaatgttatgagttctcattttgtccaagacctttggccagagaacatacaaaattctttccaaatagggatgctgagaagatatgaagaatgcagacatgacaatttacagttaaaaaaaggctgtaaaagcgtgggtgagcataaggtgcacaaaggaggttataatgggacttaaccaatgtttggcaactacccagaaagaaatatttnaatgtgataaaatatgggaaaaagtctttcattaaagttttttc

SEQ ID NO: 4148 - DNA, 346 bp, Homo sapiens
  misc_feature 6, 15, 23, 98, 121, 145, 158, 220: n = A,T,C or G
cgaatntttctcccngcggcggnggccgaggtacttttttttttttttttttttttttttgctgaatttaatctgactaccattatgcaagtaggggnggagatacatatacaggagtttntgagtgttctttcctaaaacttgngcacattatgttngtatatgaaatagaggcagtgtttagaatgaacgtggctgggctatacttcttgatttcagngttacaacaaagattagattaaaggaacaacaaacagcatgttacaagaagcattccaattttccagtaagaactgagtcatgcaagagagaccatacaggttccacaattaatctaatgcaaatt

SEQ ID NO: 4149 - DNA, 462 bp, Homo sapiens
  misc_feature 170, 206, 276, 300, 371, 376, 434, 447, 451: n = A,T,C or G
ggcgaattggagctccccgcggtggcggccgaggtacttttttttttttttttttttttgagaaagggtctctcgctctgttgcccaggctggagtgcagtggcgtgatctcagctcactgcaacctctgcctccagggttcaagagattctcccaccttagcctccttngcctgggaccacaggcacctgccaccacaagccggntaatttttctattttttgtagagatggagtttcaccatgttgcccagggtggcctcgaactcctgacctnaagggatccgcccacctcagtttntcaaagtgctgggattacaagtgtaagccactgctccacatttaactccaatgacgctgagcacaacccancactntaattacaaaaatttgttttgttataactgaacattccctttctattttagacttttnttggctgaacatntttnttccccccagc

SEQ ID NO: 4150 - DNA, 237 bp, Homo sapiens
ctatagggcgaattggagctccccgcggtggcggccgaggtaccaaggtcctaaagccttcaattcttcgaaaggaattagaaagaaggccagtttggcttcaatgtgtaaccatgagggaaagaggcaggaggaagagatcaggcaggccctggtaggccatgttagatgaagtgtagtttttattttaagtgcagtggaaagccagataagggtttttttgtttttgtttttgtt

SEQ ID NO: 4151 - DNA, 455 bp, Homo sapiens
gaatacgactcctatagggcgaattggagctccccgcggtggcggccgcccgggcaggtacatggttcttcctcagaaagtggttcttccttaatgtgtttctttttaccccttttcttcttcttcttcacagatgtttcttcttcttctgccactttttcttcttcctcttcttcaactgaatagggtaaggtgtaaaaggcacaacaaattaacactgtatcagatctcattccttccaaaaacgtttgagtcctagtttttttctgccattctcatcaactacccaatgtttgttttgtttattttataattgggaaggttctccaaggcctaccactaactttaacgaatgatatagatagagctcagagcaatcttctcacgatcatgaagtcatgtataaaaatcaggattaaaacaaagggcatctgatctccaatcattattgggga

SEQ ID NO: 4152 - DNA, 349 bp, Homo sapiens
  misc_feature 260: n = A,T,C or G
ccgcggtggcggccgaggtacgcgggggggactacaggtgcccgccaccatgcctggctaattttttatattttttagtagagacagtgtttcaccgtgttagtcaggatggtctcgatcttctgacatcgtgatccacccgcctcggcctcccaaagtgctaggattacaggcgtgagtcactgcactcagtcaggttttcaggtgctggctccatggctcttcctgagccgaaaataaggaaactccatagaccttgnccactggaactcgttcccatctaccctccactctatccagggtgatggatctctgcagtaagtggaagagttcttcatggcccccaagg

SEQ ID NO: 4153 - DNA, 372 bp, Homo sapiens
  misc_feature 140: n = A,T,C or G
ccgcggtggcggccgaggtacttttcttttttttttttttttttaaactctttttctttttaaagataaaaatgaatgctttccttcactacccagaaaacgacttccagccctatacctgtgagtatatactgggcctntgcaggtcactgagcatgagatttacagtgtataatgttttctaaaaagttacttattgttatttttttaattgtaaagaatgttcattgaagtgaacttgggaaacatagggaactcaaacaaataaaatcagtcactctttttttaattttattattattattattttttaccacacagaagtagccaccattagcattttgggtctttttttctttactgaattgagag

SEQ ID NO: 4154 - DNA, 394 bp, Homo sapiens
  misc_feature 65, 94, 149, 160, 181, 294, 297, 337, 340, 349, 352, 353,355, 376, 381: n = A,T,C or G
ccgcggtggcggccgcccgggcaggtactttttttttttttttttttttttttttttttttctgncgttgttgctgtttgttgggtttgcttgngtgcttttgtcctgtaactactcaataaataacacaaaagataaaaggctttganaaccttaactnttttttctattggcttggggngtaaatccactgcaacaactattactacttgaaaagatatgctagagtaaatagaacaatacagttaaattcacctgaagtctttaaaatcttttttttttccgggtattttnaanccatgtggcaaaaaggcattaccatacaattttagctgtnggnaaacaaatnatnntnttttacattgctttcccaacnaattntgcatagcacttt

SEQ ID NO: 4155 - DNA, 423 bp, Homo sapiens
  misc_feature 178, 239, 245, 318, 342, 351: n = A,T,C or G
tagggcgaattggagctccccgcggtggcggccgaggtacttttttttttttttttttttttttaaagacaaggtcttgctctgttgtccaggcctggacaacacagcatgtgcagtggtgtgaacatggctcactgcagcctcgacttcccaggctgaagtgatcctcccgtctcancttgagagtagcctggaaaccacaggtgtgtgccaccatgcccagctagtttttaaacttnttgtanagatggggtcttgtcatgttgcccaggctggtcttgaacttctgggctcaagcgatcctcctgccttggcctntcaaagtgctgggattacaaggcntgagccacntgtgctacaccaaatgttgacaaggcttgtgtgccaaccctggaattgtcattacattttgtggtgaaaagg

SEQ ID NO: 4156 - DNA, 452 bp, Homo sapiens
  misc_feature 65, 67, 85, 103, 144, 148, 152, 157, 175, 176, 180, 185,187, 188, 190, 202, 216, 233, 241, 251, 255, 256, 262, 274,281, 291, 292, 296, 336, 372, 373, 374, 380, 383, 384, 419,420, 436, 437: n = A,T,C or G
ggagctccccgcggtggcggccgaggtacttttttttttttttttttttttttttttttgctgtngntgttgttgttgttgttgntgttttgcctttttttgntttttttggggttttttcttttggctttttttgtgtattantgtntaangtttntaatttttaggggggggnnaaanttttntnnanaatcattaattntaattttaattttnttgcaccccaccaggantttataancccaattttnaaanncccttngcctctttgganacttgcntgcttggttnncctntctgggggctccattcatagccacaatttgtttgcacttngaggatttgttgcaaggcccgtagcaaggtccaaannnggactnaannggagacaaacccaagatcaactttgccacccggtnntgcccaatgcaccccnnattttttttcaaaaa

SEQ ID NO: 4157 - DNA, 382 bp, Homo sapiens
  misc_feature 361: n = A,T,C or G
ccgcggtggcggccgaggtacagcagccggatctcagctcactgcaacctccaccccctgggctcaaccgatcctgccacttcagcctccagaggagctgggaccacagacacgcactaccaggtcaggctaagtttttggtttttttggtagagagggggtttcatcatgttgccaggctggtcttgaactcctgagctcaagcgatcctcaggctcccaacgtgctgggattataggcatgagccactgcacccagccaaattgcttcattttttattactccatacttcctacataagatacttcctacacctggccaaattgcttcattttttaaaaatatattttatttaatgtantctcactctgttgccctggct

SEQ ID NO: 4158 - DNA, 145 bp, Homo sapiens
  misc_feature 119, 133, 138: n = A,T,C or G
ctatagggcgaattggatctccccgcggtggcggccgaggtacttttttcttttttttttttttttttctcccgactcagcttcccaccctgggctttccgaggtgctttcgccgctgnccccaccactgcanccatnatctcct

SEQ ID NO: 4159 - DNA, 387 bp, Homo sapiens
  misc_feature 337: n = A,T,C or G
ccgcggtggcggccgcccgggcaggtacttttcttttcagtcctacccactttctattcccctgggactccaatgaaataaatgttagatcttttgttactgttccaaatgcccctgaagctctgtttgttggttggttggttttcttcccccagttgattttcctctctattgttcttattgggtaatttctattttcaggtccactgattctctcctctccccactcccttctgctgttgaatccatctactaagctttttgttttggctactgtatttttcagttgaaaattttctacctttttttaaaatcattctatgggctttggctgganacctttctattttttggcctggaaaccatttcttaatttttctactttgg

SEQ ID NO: 4160 - DNA, 531 bp, Homo sapiens
  misc_feature 120, 149, 152, 164, 178, 186, 192, 195, 196, 199, 205, 223,224, 233, 239, 242, 243, 245, 246, 251, 253, 254, 260, 269,285, 288, 299, 307, 315, 316, 320, 324, 325, 328, 352, 354,364, 370, 393, 395, 398, 403, 404, 413, 415, 421, 423: n = A,T,C or G
  misc_feature 425, 433, 451, 456, 460, 462, 463, 466, 469, 471, 474, 476,486, 490, 502, 508: n = A,T,C or G
ccgggcaggtacttttttttgttttttttttttttttttgctaaaaatgccctgagatatccttggagatactgaattggacttagtttggggcttcaatatgcctattctgaatacagnactatctccctagggaaaaatttctcttnccntttaaaccaatnaccccaaagtaagnaacctttncatttnttnnttncccaanaagccaaatctctttttnntataagggnatattnttnntnntttangnnccaacnaaggggggnctatctcttttggaanttncccttttattnaaaaaagngttgtccnnatcnaaannggntaaatggtccaatcctcttttaananatgggggttntttttnagtatttttaagaataaaaactngngcnattgnnaattatttncnttgtgnantnctttcaantttttaatgatgatttgnccccnttangnnggnttnanttngngtcccctttncaanggggggtgattnctttgnccaaattttcttactttttaacc

SEQ ID NO: 4161 - DNA, 417 bp, Homo sapiens
  misc_feature 353, 360: n = A,T,C or G
ctatcactacttagggcgaattggagctccccgcggtggcggccgcccgggcaggtacgcgggggaaaacaagatggaggattcggcctcggcctcgctgtcttctgcagccgctactggaacctccacctcgactccagcggccccgacagcacggaagcagctggataaagaacaggttagaaaagggcagtggacgctctcttgacgcattgcaagtccaggaaaaacaattatgggttgcttttgaatgagaatgaaagtttatttttaatggtggtattatggaaaattccaagtaaagaactgaggggtcaggattgacccttgcctcattagtatttcggatcagnattcagnaagatattctgttttattttaccgaaagggatgaaaccccaaatttcaacctcctgg

SEQ ID NO: 4162 - DNA, 373 bp, Homo sapiens
ggcgaattggagctccccgcggtggcggccgcccgggcaaggtacattttcctttgtggcatggtggcctgaaaatactgtgaggtttaacaatgaaggcaggtgactggtgaggagagttccagccactggattctccctcagtcccctgtgctgtggcccttggttgacccctagatttcagtgcccctgcctgacactggagtccctctataaagaagcccctttctagctagctagctgttccatcccgcacacccccacagaagccttttgctgccattagtaagcacgcctctattttctcacctgtgattgatcatgcatggatatggagttttttgtctattaaaagcaatttgttaagttactt

SEQ ID NO: 4163 - DNA, 148 bp, Homo sapiens
  misc_feature 135: n = A,T,C or G
ccgggcaggtaccattcttctagtgggggaggagcatgacatttttgtggtattcacccccagaacaggttggtatggctgggccaccctgttccaggttctttggctttccctgggatgctgttttttgttggngctttgcctgcat

SEQ ID NO: 4164 - DNA, 116 bp, Homo sapiens
  misc_feature 54: n = A,T,C or G
ccgggcaggtactagatacccagtaaagtgcttaactaattctatccctttgtnatctacccaagtgttagttcagtccaaaagagtcaatacattctaaaaaggtgttaaatatg

SEQ ID NO: 4165 - DNA, 407 bp, Homo sapiens
ccgcggtggcggccgaggtacaatcttggctcactgcaacctccgcctcccaggttcaagcgattctcctgcctcagcctcccgagtagctaggattacaggtgcccgccaccacaaccagctgattttttgtatttttagtagagatggggtttcactatgttggccaggctgttctcaaactcctgaccttagacgatccacccacctcagcctcccaaagtgctggagttacaggagtgagccaccgtgcccagccccatatactttaaattatctttagattacttataatatctaatacaatgtaaatggtatgttaacagttgttatactatattgtttagggaatcatgacaataaaaaagtctgtatgtgctcagttcagatgcttaaaaaatatatat

SEQ ID NO: 4166 - DNA, 419 bp, Homo sapiens
  misc_feature 14, 19, 69: n = A,T,C or G
aatttttgctccancgcgntggcggccgaggtactaaaattgtgttgggagcagggatttggaaatttntgagagatgtgtagttaatttagtaattctgtttcatgagatatgatctgttatgctagtggtttaataggcttgctatgtaagtagaacgtggctcaactagatatctttatatgtatgggcattactcttagtgatatttgtttcctgtcctttgttgctcatgctgtttaagtgcaggccgagacccagcctctttgtaagtaccaaaatgatgcaagaatgataagtaaatgtgtaaataatttgcagaggagcgttttagggtaggaatggcgattgctaaaaggtaaatttaataaaaaggtgcttcctttcctcaaatagtttcgcacccctcatcggatcat

SEQ ID NO: 4167 - DNA, 577 bp, Homo sapiens
  misc_feature 18, 26, 34, 48, 63, 145, 182, 185, 192, 204, 219, 226, 238,242, 249, 252, 264, 272, 279, 296, 316, 319, 334, 336, 346,350, 364, 375, 388, 389, 391, 394, 405, 423, 427, 437, 438,440, 442, 444, 449, 452, 454, 456, 464, 467, 468, 471: n = A,T,C or G
  misc_feature 475, 479, 481, 483, 487, 519, 520, 534, 550, 556, 557, 559,561: n = A,T,C or G
ctcactataggggcgganattgggangctccacncgctgggtgggcgngcccgtagcgtactntttttttcttttcttttcttttttttgatacagagtcttagtcacccagactagaggtcagttggcaggatctcaactcacntgcaaccctctgcctcctgggcttcaagtaggaccangcnccacctncgcctcccaagntatgcctgggggacntaccagngctgatgccgcncacncaattgnccncggtctaccttncttttgtnaattttnttttgttagtaagaacnggggaatccggtcaacccanttnatttttactttaagngnctttggggcncttnttttaaaacttttncttggaagccnttcaataggaagnnantgnccaccttcccnccccttcaaggccccttnctcnccaaaaatgnntngncnttggnggntnanttttatcnaannggncggnggcncnangggnccaccttagttttttttccaaaattttttttnnaaaggttaattttnggccaatcaattccantttagnntngnaaaattaaaacccatt

SEQ ID NO: 4168 - DNA, 412 bp, Homo sapiens
  misc_feature 178, 182, 187, 367: n = A,T,C or G
ccgcggtggcggccgaggtacttttttttttttttttttttttttttaatagagacagggtttcaccatgttagccaggatggtctggatctcctctgacctcatgatccacccacctcagcctcccaaagtgctgggattacaggcgtgagccaccgcgcctggccgggtcaggctntttntaatntgtttaaaaccatatcacccagaaggtattcagtatatacttatttaaatgaattgaaagtcatatgagcagcatggacttactactttaaaaaccacattattagaaacctaacaccttggaagctctgcatattctgaatgaagaaatatactaaaccactcagaggggaaatagttnttaaccattttaccacaggacgactaaaccaactaccatggccct

SEQ ID NO: 4169 - DNA, 421 bp, Homo sapiens
ccgcggtggcggccgaggtaccttctctctcttctttgcagaggcctttctgggcttcggctgtggctttggaggagcaggtttagcagacaaccttgtggatcttctctgcagttcctacttaaccttggttttatctcctttagcatccccttcagcctttctctcgggcagggtggcagcgacagtggtgggacataggcactgggcagtggagcacgggctttggtcggtctaggggtcatcgcctcttcttcttcacactgctctgctttgtgcatttctattcttttttgtagccagagaagtaaatgcatatctttgcaactaacacttccagactcatctgcaaaatcaagtgcactaaataaataaataaataaataatcaatcatgggtcctttttagataagtgtttccc

SEQ ID NO: 4170 - DNA, 230 bp, Homo sapiens
  misc_feature 45, 46, 59, 60, 71, 131, 154, 162, 165, 174, 185, 200, 226: n = A,T,C or G
aggtacgtgaaagcgctttgaagatcacaaacccatttagaaatnngtgggttgctctnnctcaaatcttngaaagctgcctactactataaatacattcattcatatctttccctcattcctttcagtantttaaaaatgtataggatccaanttacatgnaancactttgtnaaacactcacnggatttactatgaantaacaatcctactatattcacaattntcat

SEQ ID NO: 4171 - DNA, 386 bp, Homo sapiens
  misc_feature 171, 201, 304, 318, 341, 360, 363: n = A,T,C or G
aggtacttttttttttttcttttttttttcggtttggttcaacatttcttatctgctttctgtcataggaagaacacattgagtgtagtattggtaggatccttcagcaccctgcttctgttatggaagctcaatgggaaaattcctctctccccagcccttggcagacanagctcatgatggtagagtttttgaatgaanatgtggtatgctctggtaatgaagcatccaactgctgtgtggaatgttagtgtcttggcgagaatgttcataatacctaacttccagaatccctttgggcctnacacattttccaanaactacctcccaccaatgtgcangacttttttattctacccnggnaaatttcctttcttgcttggggg

SEQ ID NO: 4172 - DNA, 440 bp, Homo sapiens
ggccgcgtaatacgctcctatagggcgaattggagctccccgcggtggcggccgaggtacagggtgtgaacaatgaaaaattataaaggcatgtaataaaaatgttccataaaaacaaagatacctcaagcaggtccacctatacctctagtttagtttagaaactaattcagtattttaagaatcatataattttaaactttgcactaagcctaacctttttaaaaaatggtcagggccaggtgcagtgcctcaagcctgtaatcccagtgctttaggaggctgaggtgggaggactgcttgagtccaggagttcgagactgcagtgagctgtgattacaccactgcactccagcctgggagagcaagaacctgcccattaaaaaaccaaacaaaaatgggcaggtgtggtgtctcataccttgaaatcccaacacttt

SEQ ID NO: 4173 - DNA, 367 bp, Homo sapiens
tccttagggcgaattggagctccccgcggtggcggccgaggtacaaactctgtttagataaagaattaaacaaaacttccatttttattaataattcaagtataatccataatatgattattaggtgttataactaataagttgttattttatatcttaatgtaggtaaagagaactggtcttgtggtggtgaaaaacatgaaaattgttggtctccactgttctagtgaagatttacatgccgggcagattgctcttattaaacatgggtcaaggcttgaaaaactgtgatctttatttttccagaaaaccatgttctgcttgtttgaaaatgattgtaaatggtaaagtgcagaaaagggttttg

SEQ ID NO: 4174 - DNA, 411 bp, Homo sapiens
tatagggcgaattggagctccccgcggtggcggccgcccgggcaggtacaccaaagtctttatctgacaggagctgagccagcgatttttcaaggcaagacagtgaccagctgaactcctgagataatgagtatatcatttctccttggcaaaggttatggaattaaagagaataaataacttagttcatacttcctccctcaaagttaaaagatattccctttgcagcgaaaaatggagctttgaggctccttcgagaaacgctccttggggttgtagaaaggaggaagaggttagcatgattttaaagcaactggcatctctgcagctaaccaagttggagacattagggcttcttgtggccattaacttttgtgtatctcacatctccttcagaacttacgctggaaa

SEQ ID NO: 4175 - DNA, 180 bp, Homo sapiens
  misc_feature 63, 111, 115, 151: n = A,T,C or G
gaccatccctaatctgaaaattcaaaaccctccaaaatttgaaactttttgagtgccaacatnacacctcaaatggaaaattccacacgtgacacctttgcttctgatggntctntgaaccatcagaaacactgtttatttcaagaacaanaatttatttttaaaatttttggtattaaa

SEQ ID NO: 4176 - DNA, 289 bp, Homo sapiens
  misc_feature 189, 235: n = A,T,C or G
ccgcggtggcggccgcccgggcaggtacctgtctcatatgtggcaactacgtggggcagcacactcaaggaatgaaggaagtttcagtgaatgacaactttataaagacagtgttgaggcagcccagtgcagcggtttgggagccaggaacagcgtgtgggccggagtgtggctgcaggacaggaggtnaaaaataagggttgagggtggaataggaagaccccggaacgtcatnctgggagcttgagattttattctacatttctcttgttcttaactatttatggtg

SEQ ID NO: 4177 - DNA, 384 bp, Homo sapiens
  misc_feature 185, 209, 270: n = A,T,C or G
ccgggcaggtacaactttgctatttattagctggtccttgacatgaccaggttagcaaggtagaaagattacaaaggttggcatgaagaaggtaggcttgtatgagtgatggtggatgataacaaatctggggaaatgaaatgaactacagacaggacacatgcgatgtgcttcagagtatgcancttttccaatcaaggaaagcttcntgcaggaggccaaacagaacctgaacgctgcagtatgacctcagggactcacatcactttntgaaatatctaacaaaaatcgcatttctgctgttgcactctgaattcctagaacctgtgcgtgaaccatttcactgcattcatttttccccatgtttatttcttttaaccagcc

SEQ ID NO: 4178 - DNA, 237 bp, Homo sapiens
  misc_feature 150, 168, 182, 183, 213: n = A,T,C or G
gggcgaattggagctccccgcggtggcggccgcccgggcaggtacatctctagatgatcacgaatgtcaaatatcacactacactgtgatatggggattccccttgggggttttcatgtgtatagggtgcctgcagctacactaaacatnttaaagctaccacaatgntcacttcatatttnngctttttataggctttcttggtctcctccnatgttcccatcattttcttgcttt

SEQ ID NO: 4179 - DNA, 386 bp, Homo sapiens
  misc_feature 328: n = A,T,C or G
agggcgaattggagctccccgcggtggcggccgcccgggcaggtacgcggggaggagaggcgtgaaggctcccaaaaggaaatgctggcacctgggcccagaagccagggcctctaactcctggggttgatttcttcagtgaagttgcaccctacaaagggaatatggccaaagcggcactcaactgaaggctgatatcaggcgattagacagccatgcattctgcgtttgtctggaatggattgtagagagatggacttatatgaggactaccagtccccgtttgattttgatgcaggagtgaacaaaagctatctctacttgtctnctagtggaaattcatctccacccggatcacctactcttcagaaatttggtctgcttga

SEQ ID NO: 4180 - DNA, 373 bp, Homo sapiens
  misc_feature 52, 70, 81, 91, 92, 105, 114, 117, 124, 127, 147, 161, 171,183, 191, 206, 266, 273, 286, 295, 302, 304, 314, 315, 321,322, 350: n = A,T,C or G
ctacttagggcgaattggagctccccgcggtggcggccgaggtactgggaanttgagcattgctatgaanatacctgaaantgtggaagcnnctttggaagtggntaatgggcncangttgtancantttgtagagcttaaaataanacaggaaggcctgnccccggtggntcatgcctgtantcccagcnctttgggagtctgtngtgggcagatctcaaggtcaggatcattgactaccattactggctaacactggtgaaccnccatctntactaaaaatacncttttaatnttgcacnantaggaaagannggaaannaattacccgggtgttggtaggcaatgcncctatggatcctagctgctgggg

SEQ ID NO: 4181 - DNA, 155 bp, Homo sapiens
aggtacgtatcatgtagaccgcaggcagtcttaattttgtagctggtctgacaatcttttccttttaattggagttttttcagtccatgctatagtttggatatggtttgtctgtctccatcaaatctcatgttggaatttgatccccagtgtgg

SEQ ID NO: 4182 - DNA, 120 bp, Homo sapiens
  misc_feature 18, 29, 31, 58, 87, 105: n = A,T,C or G
ccgcggtggcggccgacnggccaggtacncnggattgtcaagtggaagatctaatcanactgaatattcattcatgccttgctttgncaatagggaaaaaaattncaaggacaatcggat

SEQ ID NO: 4183 - DNA, 129 bp, Homo sapiens
  misc_feature 33, 62, 101: n = A,T,C or G
aggtacacgcagtcctaatccgttaaatatttntagctaacaatgcacgtggggctcttcanctctgcatacagtcatgttctgctaaagtccatgcaaantataaccacattttgccctgcttttttt

SEQ ID NO: 4184 - DNA, 409 bp, Homo sapiens
  misc_feature 76, 132, 151, 190, 256, 275, 335, 346, 348, 360, 374, 377: n = A,T,C or G
ccgcggtggcggccgcccgggcaggtactttttttttttttttttttttttttcccattttatgtccaaggttggnggctcagcctaaaaaaacacatttcaaatactcaataattatcacatgtggctagnggctatcataccggcacanatctcaacattattttaagtcttaaataaactgatgganaaagatacctcatatgagagaaacacttaaaagacaactactgaaatgtaaatgaaatggtaacgncaggagtaaagaatctaanatggtaaggaaaaggacagcaaaccatttaattgaaatcgtcactgagaaatgaaagctntcctcggatanancaatagggtttntggaaaaatcaaanttntttttccaattattaaccttggcccctcaaaa

SEQ ID NO: 4185 - DNA, 380 bp, Homo sapiens
  misc_feature 294: n = A,T,C or G
ccgggcaggtactatttaagccaattaattaaccatgatcactcaaacttaggcaatatgatacttatcatcttcatatacaaagaaaaatggataaactgcctataacaatatagcattaaaaatcctattgatgttcaatattctgtggctattaacactgtggggtgtttttaaaagtcaaaaatactgaactgtttagaaaattctgcatagtagtagtattacattgtgaattttattttcaaatttgatcaataaagatgaaaataataaaattaagcagtcaaaagnaagtagcaaaaacaagatagtcattcatatatacaggaacatataggattcatttctagtttgattcaatcctattttatgtattt

SEQ ID NO: 4186 - DNA, 149 bp, Homo sapiens
  misc_feature 45, 130: n = A,T,C or G
ctatagggcgaattggagctccccgcggtggcggccgaggtacanggtagcttccaaatctaatggaaatattatcatgacatactttctagttcgtttgagattcaggggaaatggatgtctcatggtntatgacagtgaaacccctc

SEQ ID NO: 4187 - DNA, 135 bp, Homo sapiens
  misc_feature 117, 124, 131: n = A,T,C or G
ccgcggtggcggccgaggtacgcgggggggcatcacggacctaccaatatgtgatgtcacccctggtggcccagctgtgtcatggataaactccagctgggcccatagattctgcancgggaanatccaangctt

SEQ ID NO: 4188 - DNA, 187 bp, Homo sapiens
  misc_feature 164: n = A,T,C or G
ccgcggtggcggccgcccgggcaggtacctgtctcatatgtggcaactacgtggggcagcacactcaaggaatgaaggaagtttcagtgaatgacaactttataaagacagtgttgaggcagtccagtgcagcggtttgggagccaggaacagcgtgtgggccngagtgtggctgcaggacaggagg

SEQ ID NO: 4189 - DNA, 417 bp, Homo sapiens
tcgactcctatagggcgaattggagctccccgcggtggcggccgcccgggcaggtactttattttcaaaacactcatatgttgcaaaaaacacatagaaaaataaagtttggtgggggtgctgactaaacttcaagtcacagacttttatgtgacagattggagcagggtttgttatgcattgtagagaacccaaactaatttattaaacaggatagaaacaggctgtctgggtgaaatggttctgagaaccatccaattcacctgtcagatgctgatagactagctcttcagatgtttttctaccagttcagagatgggttaatgactagttccaatcccgcgtacccagaaaataagaaagggggttccaaaattgaagaatcgctccttttgcaaaaccttatggtaacaaata

SEQ ID NO: 4190 - DNA, 226 bp, Homo sapiens
  misc_feature 69: n = A,T,C or G
ttagggcgaattggagctccccgcggtggcggccgaggtactttttttttttttttttttttttttggntgcctctataatcattttgactttaaaatgttttctgcagatcctttaataactgcaaatgtagaagtatggtgtaacaagtaattggtatgactaacactaaaaatgtaatgggaaataaggatactattgtaaacgaaaacaagaaaaacctggg

SEQ ID NO: 4191 - DNA, 151 bp, Homo sapiens
ccgggcaggtacatttcaatacagatgcaatattttttctcaaatactttcagtccaaagttcgttgaattcactgatgtggaatcaacaaatatggagggccagtggtgtattttataaaatcacttgtatcaaaagaaaacaattttaa

SEQ ID NO: 4192 - DNA, 441 bp, Homo sapiens
gatacgactcctatagggcgaattggagctccccgcggtggcggccgcccgggcaggtacacatctattattaccatggctgtgagatcatttaagaaacagacaaatgtcatttagaaacagactatagaatcaaatcacaactaaagagaatgctttatgatagctcagacagtggtaggaaatcaaaggcaaattcacatttttgattactcaccctaaaatatgctgaaattgaacatttgtgacccaagtaactaaaaatacattgaagaaaactataacttaactacatattgagttcatttcaatcgcagtagtctattttaaaaacaacctcccataaggaatacaggaatggaatccattgaaagcaacagctgtcaaaaactctgccaagaaactcagagtaacttattgcatcataaaaggtggaggtgt

SEQ ID NO: 4193 - DNA, 435 bp, Homo sapiens
  misc_feature 6, 188, 266, 308, 320, 384, 398, 413, 420: n = A,T,C or G
acttanggcgaattggagctccccgcggtggcggccgaggtacacaggccgggcacagtggttcacacctgtaatcccaacactttgggaggctgaggcgggtggatcacaaggtcaggagatcgagaccatcctggccaacatggtgaaactctgtctctactaaaaaatacagaaaattaagcccngtccatgggtgggcacgttcctctagtcccagctactcgggaggctgaggcagaagaattacttcaacatgggatgtnggaggttgcagtgagcccgagatcgcgccacttgcactccancctggtgacagnagccgagaccccatctcaaaaaaaaaaaaagtttgttatgtggaccagcttaacccataattanaaatataaaaaagnaaagtaataaaaagnagagagnaaagttaggggacaa

SEQ ID NO: 4194 - DNA, 141 bp, Homo sapiens
  misc_feature 21, 119: n = A,T,C or G
cttagggcgaattggagctcnccgcggtggcggccgcccgggcaggtacagtgataaatggagagacgggagtttaaaatgaaggataagccgcaaatgaggatgaagttaatggatanagaaaagatgggaggaagaggt

SEQ ID NO: 4195 - DNA, 362 bp, Homo sapiens
  misc_feature 4, 201, 247, 265, 310, 316, 318, 321, 344, 345: n = A,T,C or G
actnctatagggcgaattggagctccccgcggtggcggccgcccgggcaggtaccttgggtctgaaggggtcactcaagcgctctgctatctctgcagctaaaacgggtgtcaggttttcagctgctactaaagataatgagcataagcgttcactgaccaagactccagccagaaagtctgcacatgtgacccgtgttcntgggggcaccccaaaaaggcgaggcttgtgcttgggaccacacaanattaaagaccatcaacgngggaattctgctgctgtttattaccccatttcaagttgacaactnaggcancncanaacttctcagtctccaaataagnnaactcacgtgttttgga

SEQ ID NO: 4196 - DNA, 418 bp, Homo sapiens
  misc_feature 339, 355, 374, 377, 385, 405: n = A,T,C or G
ccgcggtggcggccgcccgggcaggtacgcgggatcctgaaccatccaggccaaataagcgccggctatgcccctgtattggattgccacacggctcacattgcatgcaagtttgctgagctgaaggaaaagattgatcgccgttctggtaaaaagctggaagaatggccctaaattcttgaagtctgggtgatgctgccattgttgatatggttcctggcaagcccatgtgtgttgagagcttctcagactatccacctttgggtcgctttgctgttcgtgatatgagacagacagtttgccggtggggtgttcattcaaaagtcagttgggacaaanaaggcctgctgggagnctggccaaagggttcaacncanaggtcttnccccagtaaaaggcttcaanaaagggcttaaaa

SEQ ID NO: 4197 - DNA, 415 bp, Homo sapiens
  misc_feature 323, 329, 338, 383: n = A,T,C or G
ccgcggtggcggccgaggtaccatgttttactatcctcagaaaattcccaataaaccagagtttgaggacagtaatccttcccctctaccaccggatatggctcctgggcagagttatcaaccccaatcagaatctgcttcctctagttcgatggataaagtttcatatacatcacattttcttgaaccaactagacaagaaaactggacacctttgaaaaatgacttggaaaatcaccttgaagactttgaactggaagtagaactcctcattaccctaattaaatcagaaaaaaggaagcctggggttttaccaggtaacncaaagngcaatcagnagaaatttggggttggtttattgtttcattgattgtcattaccanggaatccagcccaaaaaggtggattgggaaag

SEQ ID NO: 4198 - DNA, 417 bp, Homo sapiens
  misc_feature 15, 30, 187, 293, 339, 362, 365, 374, 392: n = A,T,C or G
actatagggcgaatnggagctccccgcggnggcggccgcccgggcaggtacatgggactacaggcacgccccaccatgcccagctcatttttgtatttttagtagagacagggtttcaccatgttggccaggatgatcttgatctcttgacctcatgatccgcccctcttggcctcccaaagtgctnggatcaccaggcgtggagccaccacacctggccctctatttattctctttaaagagagagaaaactattgagaggccaaaattatttaattaaatctttaccttancacaagggaaaaaatgggaatttgcctaatataggtgatggaaagncattacacaaatgaacagtaaancantcacatttnttagtaataaagggcaanaaattttggagtacttattaaagct

SEQ ID NO: 4199 - DNA, 402 bp, Homo sapiens
  misc_feature 317, 375: n = A,T,C or G
ccgcggtggcggccgcccgggcaggtacgcggggtcccagagagctcgtaggggaggacagtcaagggactcaagcgtctctcttgactccccttctctcgctgtgcagtggcggcgccgaggggtcgacgctcagggctaatctctatgagtcaccctcgaagggccccgggtaatattgggtggatcacaagaactaatctttcatgatttggaaaccggaaggaaagaagcacttttgtagctgacttacctcaatgacatgaccagtgtctgagcctacaactgcgctatcttccctgggatttttcttcacncttttccttacttcatggagcccagggtatggtgttttttagttccattaaaaaaagnagccccttagcccaaggccgttgggtg

SEQ ID NO: 4200 - DNA, 250 bp, Homo sapiens
  misc_feature 199, 221, 233: n = A,T,C or G
ctatagggcgaattggagctccccgcggtggcggccgaggtacgcggggatactaagccagggcagaatgcttgtgaagtagcaactaaagtggcagtgtttcttctgaaattctcaggcagtcagactgtcttaggcaaatcttgataaaatagcccttatccaggtttttatctaaggaatccccaagaaagactgngggaatggagagacagtcaagnggttattgtcantaaaagggatgagtatt

SEQ ID NO: 4201 - DNA, 111 bp, Homo sapiens
  misc_feature 6, 38, 41, 57, 63, 67, 71, 77, 83: n = A,T,C or G
aattgnagctccccgcggtggcggccgaggtactttanttntaaggttaaattccanaaacanatantttncctttntctttngccccacccctgctcaagatgggctctt

SEQ ID NO: 4202 - DNA, 365 bp, Homo sapiens
  misc_feature 66, 290, 302: n = A,T,C or G
tatagggcgaattggagctccccgcggtggcggccgaggtactttttttttttttttttttttcanagtattttctttcttgtccagattagctaaattggattgttctatgctaaattcacttaatcactactctattatttttgaattttttagttctgtttttttcacttggttctttttttaaaaaaaacttctactacctttctgagacttctacttttttacttttttcaagaagctttataattacttgctaaagcatttttaccatgactgtttttaacttnttcagataaccncaacatttggttaatcttgaggttggcttggttaactgtcttttctcatcctgcttatgattt

SEQ ID NO: 4203 - DNA, 367 bp, Homo sapiens
  misc_feature 190, 213, 324, 330, 346, 348, 364: n = A,T,C or G
tatagggcgaattggagctcaccgcggtggcggccgaggtactttttttaattttttttttttttttttttttttttgagacagtgtttcactcttgttgcccggctggagtgcagtggctcaatgttggttcacggcaacctccgcctcctgggttcaagcagttctcctgcctcagcctcccaaaggnagcttgggattacagggcatgcnccaccatgccccactaattttactagagacagggtttcttccatgttggtcaggctggttctcaaactcccgacctcaggttgatcttgcctgcctcggcctcccaaaggngctganaattaatagggcatgnanaccacacgcttccggncta

SEQ ID NO: 4204 - DNA, 413 bp, Homo sapiens
  misc_feature 383: n = A,T,C or G
ccgcggtggcggccgaggtactcaacaaataatagctgacaagtttgatagccagaaaacggcaaagctgggatgcaaacccaagcagtctgactcccaagcctcttaaccattcttaagagaccacctacctccattcttcttcgaacacatgtttttcctggtttgccacctgaatacgtggaaccaccatccacccagctggttaaaccagaatcactcagaaatctacctctccttcatattattcataactgccagtgttaaaattctaattgctggccaggccaccggtggcctcatgcccagttaattcctagaaactttgggggaggcccgccgggcagggtgggatcaccgaaggtcagtggaggattcgaagnacccattccctgggcttaaccattgggtgg

SEQ ID NO: 4205 - DNA, 302 bp, Homo sapiens
  misc_feature 212, 218, 219, 252, 262, 275, 283: n = A,T,C or G
acgctacttagggcgaattggagctccccgcggtggcggccgcccgggcaggtacttttttttttttttagagaaaatcattatgtcccattcttcttttgaatgctacttttccttctctaaaaactgaccatgaattatattctcattcatcaatttcttatttctttgtcagaaaagcagttaagccattttttaattatttatgcaangtattnnaacattcattgttaaaaaaaataaaaaaaaccnaaacaggcangaactttaaaaanaaaaagtntacagactttttcatctat

SEQ ID NO: 4206 - DNA, 404 bp, Homo sapiens
  misc_feature 36, 39, 52, 74, 75, 186, 194, 202, 242, 248, 252, 260, 263,264, 281, 300, 327, 337, 352, 358, 360, 362, 368, 372, 393,397, 402: n = A,T,C or G
tagggcgaattggagctccactcgcggtgggcgggncgnccgggcaggtacngtgccaccatgcctagctaatnnctttcttatttttgatagacacagggtgtcactgtgttgctcaagctaatttcaaactgtattatctgaagcaatgtccctgcctcagcctctcaaaagcggttgggaaantattacgngccatgangccccaggaggctcttaattaatttcctatagactgccgngggccntggnatttacgnttnnggattacccatttgttngactggacctggttatttncacgggggccataaaggaaactaaatnggttacaatntaggccaagtaaatnttaatntncnaaaatnaaanagattttttgttaattggganaagnggggntt

SEQ ID NO: 4207 - DNA, 239 bp, Homo sapiens
  misc_feature 53, 71, 80, 81, 82, 83, 84, 87, 88, 90, 92, 155, 183, 189,195, 196, 235: n = A,T,C or G
ctatagggcgaattggagctccccgcggtggcggccgaggtactttttttttntttttttttttttctttnctttttttnnnnncanntntncattttttttaaagatggagaggctaacaaactttgcaacctttccaggtaaggattcatgangacctgagcagccagccagccctgaaanggttgngaacanngagaaagaagaagagcttgacagataccctgcctgggcntggc

SEQ ID NO: 4208 - DNA, 186 bp, Homo sapiens
  misc_feature 3: n = A,T,C or G
ctnctatagggcgaattggagctccccgcggtggcggccgcccgggcaggtacttttttttttttttttttttttttttctttttaaataacaaatttatttttcacagttctggaggttgccccaaaaagcttttattatctaaattagggttaatgcacttttaaatcataatgttaacatttt

SEQ ID NO: 4209 - DNA, 437 bp, Homo sapiens
  misc_feature 311, 312, 389: n = A,T,C or G
cttagggcgaattggagctccccgcggtggcggccgcccgggcaggtactatgtcgattcgacagaacattcagaagattctcggccttgccccttcacgagccgccaccaagcaggcaggtggatttcttggcccaccacctccttctgggaagttctcttgaactcaagaactctttattttctatcattctttctagacacacacacatcagattggcaactgttttgtagcaagagccataggtagccttactacttgggcctctttctagttttgaattatttctaagccttttgggtatgattannagtgaaaatggcagccagccaaaccttgataggtgcttttgggtcctaggatgaattttttattcaaaaataaagtnggatttggattagtttaagtttcaggtaaatggttttatggtaaatgg

SEQ ID NO: 4210 - DNA, 381 bp, Homo sapiens
ccgcggtggcggccgaggtaccatcctccaaaagaagtcaattttactgtataataattttaaaaacaagtatacattttttttaaagatggagaggctaacaaactttgcaacctttccaggtaaggattcatgagacctgagcagccagccagccctgaaatggttggaacaagagaaagaagaagagctcgacagataccctgcctgggctggcagctagctgcaccacaagctggccagctgacagcgggcacatcccttcatcacccagtgcctttcttccctcttgtgaaaatggagatatgctgagaaaggtttcttcagctcatccagagaaagccttcttcagctaactaagggctgtagaaaaggggccct

SEQ ID NO: 4211 - DNA, 388 bp, Homo sapiens
  misc_feature 24: n = A,T,C or G
ccgcggtggcggccgaggtactanggaaggcagacggctcgggacttgcccagcatcctcaagctggcaccataccagcgtgactagagtcacctcccttggctccttgtccactgccctttgcatctcatgcgggtctccagaagaccccgctcctgctgtgcaggctcccacgcataccttagacactgctgtggtgttgggtggccacgtgacccacacaggccttttctagttcaccagttttctgcaaggatgctggttagggagtgtctgcaggaggagcaagtctgaaaccaaatctaggaaacataggaaacgagccaggcacagggcctggtgggccatcagggaccaccctttggggttggatattttgcttaatctg

SEQ ID NO: 4212 - DNA, 107 bp, Homo sapiens
tatagggcgaattggagctccccgcggtggcggccgaggtacgcgggggggcatcacggacctaccaatatgtgatgtcacccctggtggcccagctgtgtcatgga

SEQ ID NO: 4213 - DNA, 420 bp, Homo sapiens
  misc_feature 202: n = A,T,C or G
tacttagggcgaattggagctccccgcggtggcggccgaggtacagtagtgcactcttggctcactgtagcctcgacctccggggctcaagtgatcctcctgccttagccccacaagtagtgggactataggcacacaccaccatgcccatctaagtttttgtattttatgtagagaccaaggttttcaccatgttgcccangctgatctttgacctcctgagctcaagtgatctgcccacctcggactcccaaaatgctgggattataggcgtaaaccaccatgcctggccttaaatcaactttagagtcaacatctcttatcactgggagcttctagaagaaaactccatcacgtgggtgctctctttcctggatgtgttgtgccccaaatagccttggttctcattcaagatgactt

SEQ ID NO: 4214 - DNA, 335 bp, Homo sapiens
  misc_feature 54, 156, 181, 215, 258, 288, 301, 310: n = A,T,C or G
ccgcggtggcggccgaggtacttttttttttttttttttttttttttttagcanattgaacgcctttatttttctcaaatataaaatcagagtctcctgaggcagcacatgaactccagagagagaatcaacaacaagaatcacattgctaaaaanaacaggccttatttcttaattccanaattgcttcaatagttattctctgaggctccagngtcttttctgtccaagctactgtcaggcaagtgcccaaaagcnccactcatcacatgtgcgtaatacccgaanaatgtatacaggnttcttttgngtccattgctttttagttctaaaat

SEQ ID NO: 4215 - DNA, 407 bp, Homo sapiens
  misc_feature 302, 310, 324: n = A,T,C or G
ccgcggtggcggccgcccgggcaggtacatgcactgtaggcaagtaaacgaaaccaaaggctggctcccctggccgaggcctgggactgatgcaagacagccagccagtcacctccgcctcccatgaacctcttggaaaacttctcctgtcccacttctgccaccctccagctccttgagagagccagagttgagaagaaaatgagcctgaagttgaaagggaaagttcttgcctgaaacagtgctgggaataagtccagaccatttccctcaagagccacctcttcactccttaagccagnaggacacncacaaagacacagnttaatggccttctcatgcccactcctcaggttggctttgtgaggggcaggccagttggaggggacctggcagggatttttcag

SEQ ID NO: 4216 - DNA, 320 bp, Homo sapiens
  misc_feature 65, 67, 117, 121, 129, 138, 165, 193, 206, 214, 237, 259,269, 279, 309: n = A,T,C or G
gcgaattggagctccccgcggtggcggccgaggtactttttttttttttttttttttttttttananatggggtcttgctgttttgcccaggctgatcttgaactcctggcctgaancaancctcctgnataggcctnccaaaatgctgggattataggcatganctactgcaccctgccttttgtttttaanataaattcctcangctaacanaataagctattaaccacattttntacaaaggtgattttaagtcangtttattctntaaaaatganaggcatttaaaacaaagatagttctctaancaacaacaaac

SEQ ID NO: 4217 - DNA, 404 bp, Homo sapiens
cttagggcgaattggagctccccgcggtggcggccgcccgggcaggtaccaaattttgtaacataaaaaaatactaaatgatcttaaagcttcctaaattgtgaaaagggtatgtgctaacatctcagaactttagacctgcttgttgtcatctttaccgatctctgatgataaatgcagaagggatctgagagtttttaaagcaagtagagtcaatcagagttttgaacatcatagtaatacttccgtgattcagagttagatcatataaatcaaagtaacaatttggattttttttaaacaacaatatcataactgtcattaaaacagatggtccaaccccagggagcaggataattaaccttggggcagcttcttgtggggggaacaaggaccgggggaaa

SEQ ID NO: 4218 - DNA, 411 bp, Homo sapiens
  misc_feature 263, 267, 272, 289, 290, 296, 301, 315, 322, 326, 327, 329,342, 351, 355, 358, 360, 399: n = A,T,C or G
gggcgattggagctccccgcggtggcggccgcccgggcaggtacaggcatatgctcttcagcaaaaatggatttggccgggcgcagtggctcagcctgtaatcccagcactttgggaagctgaggcaggcagatcgcttgaggtcaggagttccagaccagcctggccaacttgatggagccccatctctgctaaatgcaagaattattagctaggcatggtggcgggtttcctgtagtcccaaactgctttgggaggctgangcantcaanaattttcttgaacccanntaagcnggcangtttgcaatttgangcccaangtanncntcgcccatttgcnactttttangccntgngnggtggacaatggaggcataaaaaccttccaattctttcnaataaaaggaaa

SEQ ID NO: 4219 - DNA, 461 bp, Homo sapiens
  misc_feature 191, 282, 356, 397, 423: n = A,T,C or G
ctatagggcgaattggagctccccgcggtggcggccgcccgggcaggtacaaagagtagctgccccttctcagggcagatgatgctttgagaacatactttggccattacccccagctttgaggaaaatgggctttggatgattattttatgttttagggacccccaacctcaggcaattcctacctcttnacctgaccctgcccccacttgccataaaacttagctaagttttgttttgtttttcagcgttaatgtaaaggggcagcagtgccaaaatatnatcaggagataaagcttaggtcaaagttcataggagtttcccatgaactatattgactgggccacacagggatncttttggtattttaagggatttctgagatttttgcttggancaggggatttaaggataaaggggctngttcctttttaaaattggtcctggaaaaatggggaaac

SEQ ID NO: 4220 - DNA, 426 bp, Homo sapiens
  misc_feature 224, 341, 353, 388, 410, 415: n = A,T,C or G
cttagggcgaattggagctccccgcggtggcggccgaggtacagttttatgtgcttaattaaagactgtaaaacgtaaaggatcattctgactttttttatgagttttttttttcttttcccctgtctaaattgtgtgtgggcttccccagttttaaactcctatctttttctttagtgataccttacttgataaatgggacttgggaataggtttaacccagntttgcattctccaaatgtttccagtgatatgttttcctgggaaaagcaaatctgcctgtaataaatatttttaatctaaataaccaaatctgggtgcccaactttttgttgggattnatgctgctagtnaataccatttccataatatctttttggaaaaaagnaaaaaattacccatttgtggtnattgngcttggtgcca

SEQ ID NO: 4221 - DNA, 382 bp, Homo sapiens
  misc_feature 128, 187, 207, 217, 307: n = A,T,C or G
ctacttagggcgaattggagctccccgcggtggcggccgcccgggcaggtactagggcaggtggagttggcatgaacttaacagcagcagatactgtgatttttgttgacagtgactttaatcctcanaacgacttgcaagcagctgccagggctcatcgcattggccaaaacaagtctgttaaagntattccggctgattgggtcngagacactgntggaagaaatagtctataggaaagcagcctccaaactgcagctcaccaacattgatcatagaaggaggccattttactctgggagcccanaaacccgctgccgatgctgacctccagttgagtgaggatactcaaatttggtttgggataaaactgctggccctc

SEQ ID NO: 4222 - DNA, 306 bp, Homo sapiens
  misc_feature 118, 180, 195, 228, 266, 269, 272, 275, 289: n = A,T,C or G
cctatagggcgaattggagctccccgcggtggcggccgcccgggcaggtacttttttttttttttttttttttttatttatttattttctggggagatctgggagtctctagaccganaataaaaatggtcaatatttaatgacagtatcaaatgcccaacatttttccaggggcttttnatggataaatctcantaggaagttttcattccaggcctatgggggagnttattgttattattcccatgatgagaaaatcccaattnganaanaancctaaggcttaaanatggcaagaatggggac

SEQ ID NO: 4223 - DNA, 458 bp, Homo sapiens
  misc_feature 267, 334, 358, 365, 444: n = A,T,C or G
ctacttagggcgaattggagctccccgcggtggcggccgaggtactttctccttgctgtttttttttttttaagacattcctcccagaatactccagggggcagtgttttataacacattttccccactgggtgattgaaggatggaggatttttgaaaatttgacagctacatgaaacatgagaaaacattttcctcacttctgaagtcggtttgcagctggtaacttgttcatccagaaaacattctaaagcaatgagactttgngagctgtgcttacagtttgggagaatcatgaaggattctttctatattttgcatttacttcccaagngcttcataagcctgcatttttgtntttggtnaaccttaaagacaggaaaggaaattttcgtaaaatcccttggaaaaatttggaaaaaaaaaaaaaaaaaatttgggggntttttttaaaaaga

SEQ ID NO: 4224 - DNA, 425 bp, Homo sapiens
ttagggcaattggagctccccgcggtggcggccgaggtacgatcttggctcactgcaacctctccctcccgggttcaagtgattctcgtgcctcagcctcttgagtagctgggattacaggcgcgtgccactgcgtccggctaatttttgtatttttagtagagatggggtttcaccatgttggccaggctgatctcaaactcctgacctcatgtggtccacccaccttggcctcccaaagtgctgggattacaggcgtgagccaccacgctcagcctacaagcaattttttaaaaactgacacctattactgataaaattctctgtttaaaatcctattttactatttttaaaggataagtattagtttttttttaaaataccaaataatttctgtttatttggataaaaatttaagggcattt

SEQ ID NO: 4225 - DNA, 434 bp, Homo sapiens
  misc_feature 390, 414: n = A,T,C or G
ctccttagggcgaattggagctccccgcggtggcggccgaggtacatacaaacaatgaaaacaaatcacatccttaggttccatgattaccgagatgatttcccctgccctaagtgctttattatatttcttaaaaaatataggagcagcagcttatcacaagtctccacaagtgcattaatgatggaatcaaaacaacacaacaggattcataaggatgagagaactgcagaacaaccagaagtcagttttatgcttcttcttgttctggataattcagaattttgcggtgtgcctgtcgtaaatattgctgctgtttgaagtaaactttaaaatgctccttttatggcaacaaacggcaattcccaccctaaaaataataaagggaanaattagccttttttataatggcangattttaagaggaaaccagg

SEQ ID NO: 4226 - DNA, 426 bp, Homo sapiens
  misc_feature 321, 374, 382: n = A,T,C or G
tcctatagggcgaattggagctccccgcggtggcggccgcccgggcaggtacagcaaatgtgccacttgaatatctagtatgaagctggtaatgaagaaattgccatttctgaagcagatatgaaatatgatctgcttaattgttaaggcaactgacctttcaaaagtgcagagtcttattaaaagaggggagggggtagaagcagaataatagtcatatgtctaacctgccccagttaactcctcttgttaaattataagccagttattttttttagatagtatttttgtcacttggataatcacaggaaatatataagnaaaagagccttggactaaccttgaggaaagtttgggacatgggaaaagcaagnacccaagnttcccaggttggggtttaatttttccctcttgggtttatttttt

SEQ ID NO: 4227 - DNA, 440 bp, Homo sapiens
tcactactatagggcgattggagctccccgcggtggcggccgcccgggcaggtacatgggactacaggcacgccccaccatgcccagctcatttttgtattttagtagagacagggtttcaccatgttggccaggatgatcttgatctcttgacctcatgatccgcccgtcttggcctcccaaagtgctgggatcacaggcgtgagccaccacacctggccctctatttattctctttaaagagagagaaaactatgagaggccaaaattatttaattaaatctttaccttagcacaagggaaaaaaatggaatttgcctaatataggtgatgaaagcatacacaatgaataggaaacaatcacattttaagttaaaagggcaaaaaatttgaggaccttattaagcctattattgggtagcttattttttggggtgggg

SEQ ID NO: 4228 - DNA, 388 bp, Homo sapiens
  misc_feature 343: n = A,T,C or G
ccgcggtggcggccgcccgggcaggtaccctgtctcgttgaatttttacaaaaaactgaaagagttagttttgtgttattactacctccatctcaaagatgagtcttggaaagcttaagtaactttaggtcacattgtaatcagtggcagaactgggacttaagaacataattcatgactgcattttcttttctttctttctctttctttctctctctctcttttttttttttttaaagagatagcatctcactcactatgttgcccagactggtcttgaactcttgggctcaagcaattcttccacctccgcctcccaaagtgttagggattattagggcantggagcccctcatgccctgcccccttggcatttttctattttaaa

SEQ ID NO: 4229 - DNA, 404 bp, Homo sapiens
  misc_feature 338, 346, 396: n = A,T,C or G
ccgcggtggcggccgcccgggcaggtactatatggacaccaacatggagcagaaaatgagggcagcagtgtccaatctcattccaggtgagaagttgcacagtgtccaataggtgcatacatctccttagtaagtagttgtgattaacaatgaaatagaaatgaaaaatatatttttttatttatgtgtattatatttttcaagcagctaataagttggtaggacataatatttaattcgttggggacctaattatttataaattgaatggttagatatttcttttggcctaagccaccatggaaaaaatcactgagggcgcctaaggggaaaacatngaacctanagaagccccttctgagttcttctggttttctcaactgtaaggatgaaagnaaaccctg

SEQ ID NO: 4230 - DNA, 375 bp, Homo sapiens
  misc_feature 310, 341: n = A,T,C or G
cctatagggcgaattggagctccccgcggtggcggccgaggtacggaaacaaaagagataataaactaatagttatttaatatgctgtaacaacaaattagaaacattgagaattaaagtgtgttttctttgtaacaaacttatcaagagtagtttgaacaagggttgccttcttctggtataatttagatacatatcagagcaaacatcttttctgtggctttgcaagttgtcatactgtattttgtttggatcagcttccaacattttatcttttatgctttcagtattgtaaaatacctctcagttnctttagcatgcagttttttttttttgttagncgtctccttcctctagggaacgtttggtcatttc

SEQ ID NO: 4231 - DNA, 447 bp, Homo sapiens
  misc_feature 345, 372, 391, 411, 413: n = A,T,C or G
actacttagggcgaattggagctccccgcggtggcggccgcccgggcaggtacacggattttagattctactaatccaacccactctagatggttttcttctgttgatgcgctggcagtcaatactatataatgtctatacttttgaaagaaattcggtggctcaagtagtttggaccaatctgactttccttgaagaatttcatctgtgactgcaagaccttgtttaaattcttctaccattactgttcgagttgatgtggacacattatacgtagaattctgttgtgggtaggcaggggtgattatgggcatgagatgataccctatctgatgggatttaccncgaggatcccaggacagggcaaaaatncaaaaatttgcttttcttnctgggtttgcttcaagcaangncaacaaggggattttgggcacattccccccactt

SEQ ID NO: 4232 - DNA, 291 bp, Homo sapiens
  misc_feature 77, 113, 123, 129, 131, 134, 142, 147, 153, 171, 178, 181,199, 206, 208, 221, 231, 232, 235, 238, 255, 266, 273, 274: n = A,T,C or G
actccttagggcgaattggagctccccgcggtggcggccgaggtacctttttttttttttttttttttttttttttnggtttaaaaaaaaaaaaaaaaaaaaaaaaaaattanctattctggnggatgngnaanagtatctnattgngggttnggttttcatttccctagngactaangangttgaatgtcttctcagngcctatnantggtgatacttantcaaaaaatnnttntgngaaaaacctgaccttgngaaggtaaaancttttgnncaataatgtaattttaa

SEQ ID NO: 4233 - DNA, 433 bp, Homo sapiens
  misc_feature 21, 386: n = A,T,C or G
cttagggcgaattggagctcnccgcggtggcggccgcccgggcaggtacagtagtgcactcttggctcactgtagcctcgacctccggggctcaagtgatcctcctgccttagccccacaagtagtgggactataggcacacagcaccatgcccatctaagtttttgtattttatgtaagagacaaggtttcaccatgttgcccaggctgatcttgagctcctgagctcaagtgatctgcccaccttggactcccaaaatgctgggattataggcgtaaaccaccatgcctggccttaaatcaactttagagtcaacatctcttatcactgggagccttctggagaaactccatcacggtgggtggctctcttttcctggatgtgntttgtggccccaaatagccttggttctcattcaagaatggacttatt

SEQ ID NO: 4234 - DNA, 425 bp, Homo sapiens
  misc_feature 334, 345, 352, 407: n = A,T,C or G
tggagctccccgcggtggcggccgaggtacgcggggctctttctgatctctttttcatgctcctccttgctccaaagaaaagccggatggcagaagagcccagaacctattggtgagttccacgaactgacaaaatcaagtcacggcgcctacaaagatgaggggcagattctggctgccttttaatttcgtccttcacctgatatctgtgccagagaatgataaaaatcataataaaggaaataatggaagaggagacttatgttactggggacatctaacataattattttcctgattcagtggcatggttcagtcttccaggagttctgcntacagagaagnagagtanacccccattccatcatgggccaaaggcaccccaggtcaggggctccggctctggnatccagccccgacaaaat

SEQ ID NO: 4235 - DNA, 339 bp, Homo sapiens
aggtacctgactcatcaactcatctgtcgcaggtgctcagtcgaaatttgttaaataaatggaggcgcttagttaagtttgcctttttcttttgtagcaatgtgaaagctaagggtggaagtctagagtgaagctgagttttcagcttgggcagaggcttaaggaataaaagatggaagagtaattaaggagtgggtcgtgctgtgggaagtgctgtgtcaagacacctgaggatggaattggtagccctctgttttgggactggttcagatggtgttttgggttcctttctatgacctttatctctgaaacttgattgtcttaaaatgtattttgtgg

SEQ ID NO: 4236 - DNA, 259 bp, Homo sapiens
  misc_feature 89, 118, 127, 133, 174, 184, 201, 206, 212, 224, 225, 238: n = A,T,C or G
ccgggcaggtactttttttttttttttttttgaacatattataattatttcaaagtcccttgttaattcaaacatctggatcacttganggtctctttcccggtatccgccttccttnatttttaanctaggncccggcctcttggcaaaagctatttttaaatggggggaaanacattggttnttaaaaaccgggaaggngtccnaaccgngggtttaatttnncccaaaaaagggnccttttttttttttttttttt

SEQ ID NO: 4237 - DNA, 341 bp, Homo sapiens
ccgggcaggtacctcatcaatatgtgcatttattatttgccaattaaaataatataaaactctttaaaaattaaaaaccatatatttccctagtatttctgggatgatttttttttctcaatgacttttgagaatgcttttgctttgttctcaaacctttgataatctccatcattactggttgggtatcccttatctgaaatgcatgggaccagaagtgtttcagatctcagattatttcatatttgaaaatatttccatacagataatgaaatatcttaataatggaaaccaagtataaacaggaattcatttatgtttcatacacaccttatgcatgt

SEQ ID NO: 4238 - DNA, 323 bp, Homo sapiens
  misc_feature 121, 212: n = A,T,C or G
ccgggcaggtacttttttttttttttttttttttttacaattaactaaacttttttttaaattaactaaagttggtatttcactaggacgatttagcagatgaaatgggttttaagtttanaacaccatttcttcttccttattacatttccctttttaatgttagccctctacaaacacacacatatacacacacacacacacacacactntgcatcaaaaaagccttcctacattaatacttgagcatgataaccttacaatgaaaggtaaatcattagttgaatcatgaaacattttcttccccttgtggagaaaaatca

SEQ ID NO: 4239 - DNA, 343 bp, Homo sapiens
  misc_feature 13, 17, 19, 21, 24, 29, 30, 47: n = A,T,C or G
ccgggcaggtacntttntntnaancctgnngactggctggctgctgntcaaggccacattagtttattgttaagtgcaaggtttctggtaacagaaataaagaattcaattgattcatcatcaagaccaaatatatttactaaagatctaccttaaattcattttttagcaggtagtatggcattgtggttaagaatttacatttgtgaacatttaccagctgatgaccgaggtgagcttctgtttcctcctgcataaacttgagattataaaaatcccctagttggctgggcacagtggctcacacctgtaatcccagcactttgggaggccgaggcaggca

SEQ ID NO: 4240 - DNA, 329 bp, Homo sapiens
  misc_feature 137, 139, 151, 155, 157, 158, 159, 162, 165, 167, 168, 170,177, 182, 193, 195, 196, 197, 201, 205, 221, 225, 228, 232,233, 238, 242, 245, 248, 251, 253, 257, 262, 263, 266, 268,273, 275, 277, 278, 290, 291, 292, 297, 298, 305, 307: n = A,T,C or G
  misc_feature 308, 313, 314, 317, 318, 320, 321, 325, 326: n = A,T,C or G
ctccaccgcggtggcggccgaggtacttttttttttttttttttttttttttgtttctgttgagtgtgggtttagtaatggggtttgtggggttttcttctaagccttctcctatttatgggggtttagtattgatngntagcaggtgcgnccgngnnngtnatnanncncaattcnggggnaggtaatatcngnnnaaanagangactacacaaaaccanaccnaanactnnaaccncccnacnccnccnanaccnaaccnnacnanaaaancnannacccaaaacaannncacannaccaaancnncaccnncannannaccnnaac

SEQ ID NO: 4241 - DNA, 344 bp, Homo sapiens
aggtacttcccattgtaaatcacatttttagatagtccagtggccaaagcccccagacgaacaaaaacactcgtatcagccaagacatgccagaggcctagtgattgtttcccagtagctgagggcagaagccagacctctttcaataaggttgatctttcactgtattaacactgtatataaaggacttttataaaagcttgtagttatggtgttattgtcatcatccagtttaatgccctcttttttccagtaagaaaagaaaggtctgggataatcatgttaattgatttgtttacattttcattttaattagtagcacaactgagagtgaaaatggaacc

SEQ ID NO: 4242 - DNA, 150 bp, Homo sapiens
  misc_feature 126: n = A,T,C or G
gggcgaattggagctccccgcggtggcggccgcccgggcaggtacaatttttttaacaggagaaagtttaaaactagagctcaggggggaaaaaaagccgagagagaaaggcactctggacgctantgagtggggacggtggtggaaatg

SEQ ID NO: 4243 - DNA, 166 bp, Homo sapiens
  misc_feature 51, 58, 59, 71, 72, 115, 140, 142: n = A,T,C or G
ctacttagggcgaattggagctccccgcggtggcggccgaggtacacgcanccctaanncgtcaaatattnntagctaacaatgcacgtggggctcttcagctctgcatacagtnatgttctgctaactccatgccactntnaccacttcatgcctgcttttttga

SEQ ID NO: 4244 - DNA, 291 bp, Homo sapiens
  misc_feature 77, 113, 157, 162, 170, 196, 235: n = A,T,C or G
ccgcggtggcggccgcccgggcaggtaccaggaacagtcaaagtcactgaaatgcttggtgagacatatgatcattngctttctgcaataattgccatagacttatttcttangtccccctaccccaaatgctaaattgaaaccctacctttttttncagantatccctnattatgaacttgatgaaagataccanggaaggtatcttttgtaaaggcaaggtggcgtcatcatnacttaccataccaatcaaaggaaaaccattcccaatatgtaaatggaccaaggaag

SEQ ID NO: 4245 - DNA, 411 bp, Homo sapiens
  misc_feature 185, 354, 356, 364, 368, 377: n = A,T,C or G
tatagggcgaattggagctccccgcggtggcggccgcccgggcaggtacatatcaagcaattcagctttttcttgtgatgtcataactttccctgcttcttggggagcagttccagcatcactaatagtgctttgtttgggccacttgttatttaaggtttataataatcgcactaaacacaatngaaaaacaaaaggagaacattgagagatcactttaactttttataatcagtttatgtgtattttatggtagtaaatgataaaatagctagtatctacatacagtttatacatttgtggcatacctttctcttaatttttaaggtatttttaggctacttggctcatctnantttttcanaagngttgcgagntctccaaaaacttctcagtgtgttttactggaaa

SEQ ID NO: 4246 - DNA, 396 bp, Homo sapiens
  misc_feature 4, 190, 340, 365, 388, 389: n = A,T,C or G
actnctatagggcgaattggagctccccgcggtggcggccgaggtactaaaacaacacatacctgttaaaagtgtcaggttttaaccaagcgattttccattaaatattctcccagatgctctggaagttttttcgtgtatctaacaaaaaaagtaaatttcaaacgatgcaacagttcctattcctggnaaatcaaacaggtttactcctttagtttggaaactaagcttaactaagctcttacctttgcatcttcagagctgctccactgtgccacttaagacagcgccattgttcctgcgggaaatcggtatttaagcattctcgcagaaaatgtcncactccaaggcggtttttccacacnaaaaccctttcccctttcatttnnattcccg

SEQ ID NO: 4247 - DNA, 440 bp, Homo sapiens
  misc_feature 359, 384: n = A,T,C or G
tatagggcgaattggagctccccgcggtggcggccgcccgggcaggtactggctgcaaatataccatgaggtgtgtcaactgtataattccaggctcgtaggaaatatccatcctctgtgaacactaatatctttgggatgttatcccctctctgaaggtatacaaaaaataacttcttaggatcagcttaaaggaaaggtaatctgtatcttggcgaagaaaaaaaataactgagaattttactacaaaaaccactttcaaaatctaacatatctttcacattcgaaaccaaaatacttgagaccaactcaaaaataaattgcacaattagcatgatataaacgcatatggtcagttnctacagcaaggacaggaagggctgntacttccttttggtgtttcataattttttttttaaaatcctcttatttttacttta

SEQ ID NO: 4248 - DNA, 277 bp, Homo sapiens
  misc_feature 153, 175, 178: n = A,T,C or G
ccgcggtggcggccgcccgggcaggtactggacttgcctaatttctaggcatggagttggggcttgtaacaatggtgggagatgggcagtgctttgggaatgtagctgaccactgcatgggtgctaactagcccagggatcttaaagaatttntgtatgccatgaggatccactncanccactgaatagtcatagaattgaatctaggacatcaccgtatgctactaccatgcagttttatcccttctaagaatccaaatgccctagatttaatttc

SEQ ID NO: 4249 - DNA, 401 bp, Homo sapiens
atcactacttagggcgaattggagctccccgcggtggcggccgaggtaccttctctaattccaatagatgaaaccttaatacttgtatggcttgaatcatcaagttatccagttctggattagaagaaaatagaggtttttctgcgcgaatctgtttggcgaacacggctatatcttcattgaatgactctgacgagcagacgtccccgcccgccacccccggctcgcggggggtacagcccaagacgttatgaatacccagggtttagcctgatttggtaaaagtgattgagataaaatgtgaacaacaattgtgcatgacatttacttggcattttccagtttccagggggcctgtctcgttagctgtctcacgtggaaagccacttggaactcgccga

SEQ ID NO: 4250 - DNA, 280 bp, Homo sapiens
  misc_feature 3, 66: n = A,T,C or G
ctnctatagggcgaattggagctccccgcggtggcggccgaggtacatttgcttttaaaccaacangatactgggaagggggcactgaatacttacacactgatagaactgcccacgctgacctccagtcacaaagcgcttcccatctggattccaagccacacttgtcaaactgtcttcatgagactggctcatttttgtccttagttctcctgtctataaggaaataaaactgtaaatgagaccttcaagatacccctctaaaggaaatatatgagaa

SEQ ID NO: 4251 - DNA, 628 bp, Homo sapiens
  misc_feature 102, 116, 124, 140, 154, 176, 180, 184, 185, 191, 194, 196,205, 211, 229, 231, 237, 239, 247, 256, 260, 268, 276, 313,322, 330, 352, 356, 359, 361, 362, 366, 376, 394, 399, 404,406, 407, 412, 414, 424, 426, 428, 435, 437, 438, 442: n = A,T,C or G
  misc_feature 453, 454, 455, 456, 465, 475, 477, 479, 484, 489, 501, 503,507, 511, 534, 540, 541, 553, 556, 560, 586, 590, 602, 603,618: n = A,T,C or G
aggtacatgtcagtgaatcaaatatctttgtgtttaagcacagcaagactgtcattgaatgtgataatgctgcctaaaataaaacttcttaagtatgtaganagtatcccattggntagatttncccgttgtttgtcccntctaatatataacncttgttttaaaaggaagaccancaanttannttaacncanantgtatgtcnaaaagntttttttttattcaatgncncccagncnatttttancattttttntatntttatctncatgaatncaagcccacaaacatttaattttatttaacttccttnaagattcgnaatcatgnggcttacaatataattaataantggnggnannaccnccaataattnaagcgtcttctaattttnggggnttttnannccttngngttccttttntngngggttangnnaatntcccccaattnnnnttttattanaccccccccncnanataanttctnccaacccaattntncccnaccnccattggggttaataaccccctnccaagnnaaaaatttgggntgnaaantatccttttaaattttttttgggggnaaanaaattaacaagnnttaatagcttttacnccttttaaaa

SEQ ID NO: 4252 - DNA, 417 bp, Homo sapiens
  misc_feature 3: n = A,T,C or G
ctncttagggcgaattggagctccccgcggtggcggccgcccgggcaggtaccaatgaaaaaactcttctcagtcattaaaacatgagtaacatgacaactacaaagctttctcaggagtaataatagaatggataagatttagagccaaacaagtgactatggggactcacccattttctatttatattgtatagaactcttaaaacaaagcaaaataaaacaaaacctgatttactctttaattcccagaaaaagctttccttttcttccactcatttgtatttccttaaacagctgtaaatcagcttcttgtattgtgctgacagagaaaataaacagtgattgccattactggaaatttaaaaggttaaatatttaggtattttacatggagctttttattgaaggaaaatgg

SEQ ID NO: 4253 - DNA, 381 bp, Homo sapiens
  misc_feature 320: n = A,T,C or G
ggcgaattggagctccccgcggtggcggccgaggtactcctggctggccccaggcagtctaatgatagagacagctgggtgaccacgggtgttctaatgggagagactcctggtcaaccccaggcagtctaattattaaagacacctgggctaccccagacattctaatgggagcaactcccgaccaaccccaggcagtctaatgatagagacatgtgggccatcacaagaattctaatggaagaggttcctggctgaccccaggagagacaccattctaatgggagagactctgggccgtttccaggctgtctaatgantagagaaacctgggcgactgcagggcattttaatgaggagccggctccttgttcccgaaca

SEQ ID NO: 4254 - DNA, 339 bp, Homo sapiens
  misc_feature 2, 317: n = A,T,C or G
cnccgcggtggcggccgcccgggcaggtacctggctcagcacgaacaccttctgctcaacacaagcattgcatcgcctgctgactcgtcagagttgctcatggaggtgcacggaaatgggaagaggcccagtccagagaggtgagcagatgagctttgctgtccttgccttcctggaaccgcactggtcctcccctttgcttataaaagagagagaatttgattgctgtggttgtaatgtctcaaactttttttgagacaaggcctggctctgtcgcccagactggagcgcagtggtgcaatctttgctccctgcancctccattctcctgggctcaag

SEQ ID NO: 4255 - DNA, 372 bp, Homo sapiens
  misc_feature 175, 227, 247, 252, 257, 262, 265, 280, 290, 299, 322, 328,336, 365: n = A,T,C or G
ggcgaattggagctccccgcggtggcggccgaggtacgatcttggctcactgcaacctctccctcccgggttcaagtgattctcgtgcctcagcctcttgagtagctgggattacaggcgcgtgccactgcgtccggctaatttttgtatttttagtagagatggggtttcaccntgttggccaggctgattcttcaaactcctgacctcatgtggtggcacaccancttggctctcccaaagatgnatggncattncaggngangaaaccacctgggcntcagcctacnagcaatttntttaaaaactgacacctatttanctgganaaaaattnctcctgtttaaaaaatccctaaattactnattttta

SEQ ID NO: 4256 - DNA, 123 bp, Homo sapiens
  misc_feature 75, 80, 92, 108: n = A,T,C or G
aggccgaggtacccccgaatctaaaataaaagcagaaattatatgaaaaaactggggtgggagttggaaggaacntttanatatgtaataantttgtttgaaaactgntaattttctcatgct

SEQ ID NO: 4257 - DNA, 393 bp, Homo sapiens
  misc_feature 8, 86, 97, 163, 166, 167, 169, 194, 287, 289, 314, 366, 374,379: n = A,T,C or G
ggcgaatnggagctccccgcggtggcggccgaggtacctgcacaattattacactatgatttgtttgatggatagttcatgtctgntacttcctgtntcacagatatagcttcattaattacctcttgatcatctccatcagtcccaaatccagctcctcgcngcnntngtctggaacatcaggctcatccccngcgtacagagtgtaaacacgcattctttctgaggctccggcgctgatgcgaatacagctcacagagaaacgcatgtgctatttggagaacaangntcttttgtggagatctaaaggcagntgatttgatttcacaggggaggcctcttaatctctgttgatttaccaatggntcccttcnaaacntcccaacccaaaaa

SEQ ID NO: 4258 - DNA, 959 bp, Homo sapiens
  misc_feature 4, 65, 73, 76, 102, 125, 133, 142, 149, 153, 155, 171, 178,193, 195, 198, 211, 213, 220, 222, 231, 233, 242, 254, 256,260, 268, 300, 306, 321, 439, 442, 458, 491, 500, 526, 528,532, 556, 670, 675, 677, 681, 689, 711, 715, 723, 739: n = A,T,C or G
  misc_feature 743, 751, 768, 790, 818, 865, 910, 911, 933, 939: n = A,T,C or G
cgcnttttttaaaattaacccggaacccttccaactttaattaaagggggggtccggaaaaattntggggggnagncccttcccccaacccccggcccgggnttgggggcccgggggccccccgnaagggggnttaacccgnttaaaanccangngggaaccaatttcaanaattaanaaaaattaaattttnanggntttttgtataatngnggaaaangnaaattttananaattcccanaaccaaaaaaanantggngggggttnggaaattgggggaattccttccttggccaggnttaaanggttgggggaaaagnaaggttttccttttcccaattggggccccccccccaaagggggttttaattaattccccaattccttaaggaaaaaccttttccaaggccaaccgggttaaaattttttccaatttcnttnggggaaaaaaaataanggttggcccccttttttggcccgggggaattanttaaaaggnttttagggggtttaaaaaaaaccttngnaaangaaattggaaggaaatcccaattnacccttgggggaatttttaagggggaattgggggggaaattcccttaaaaaattcccccaaaattgggaaaaaaaaaattggttcccttttccaatttaaaaaaaaaaaaaaanccaangngggnaaaaaaanggaaaaaccccccccaatttanaggnaaaaaaancccaacccaaaaaggngggnaaaaaggnaaaaaggggggtttccnaatttgggtttgggaaaaaggnaaatttgggggggaagggggggcccaangggaaagggaaattttttggggggaaaggggggggggaaatttgggncccaaaggcccccccaacccccgggggcccccccccaaagggggnnaaaaatttgggccccccaaagntccaangggcccccaaccccccccaa

SEQ ID NO: 4259 - DNA, 937 bp, Homo sapiens
  misc_feature 4, 8, 23, 29, 37, 45, 49, 55, 61, 63, 68, 80, 82, 87, 96,110, 112, 116, 118, 126, 136, 144, 171, 174, 187, 208, 224,248, 256, 291, 339, 348, 366, 385, 395, 406, 413, 433, 443,467, 522, 525, 535, 538, 540, 552, 555, 591, 623, 632: n = A,T,C or G
  misc_feature 648, 668, 671, 752, 767, 790, 795, 823, 826, 829: n = A,T,C or G
gggnccgnaaatttgggggaagnctttcncaacccgncgggggtngggnccgggncacggncncaatncttttggggggntncaatncggaatggnaagcccctttcggncncccntnggtggccncttgggggtnccccccgncattttgttggaagggggggaaaaggnggnaccatttttatgnaaaaaaaaattggaaaatttnggattggttgggtttncccttttaaaaagggggaattggnggggccanggggaaaaaaaaaccaggaattccccttgggtttnggtgggggaattaatttttttaattttttgggaaaaacccgggggggnaatttttanccagggaatttttttttnaaaaaaatttggaaaaagntttccaaccnaaaaaaagttnggaaggnccatttttttaccccaaaanttgggaaagnaagggggaaaaaaaaaccaaaggnaacccggaagggaaaaaaaaaattcctttttgggaaattggggggccttttttcnaanccaaaagggnaancnaatttggcccanaanccaaaaaaacccaaaaaaaaatttggggggaaaaanttaaccctttggttgggaaatttggaaccaanttggtaaangggggcccaaaggtcncccaaaaaagaccctttggnggnggggggaaaggggggaaagggaaattaaaaaccccccaacccggtggggggggcccaaagtaaaggggggggttccaaaangtgggaaaatttttnctttggggggccccccctttggnctttngggccaccttaaaaaaaaaacctttggnttnggncccgggttttttcccaattttaaaaaaccccccaaaaaaatttccaaattttttttttccaaatttaaattttttttcccttaaaaaacccccccctttccaaaaaaa

SEQ ID NO: 4260 - DNA, 952 bp, Homo sapiens
  misc_feature 11, 21, 24, 43, 57, 59, 79, 91, 95, 123, 131, 133, 135, 137,141, 171, 175, 179, 183, 187, 195, 210, 212, 214, 220, 231,254, 260, 264, 274, 292, 294, 298, 300, 302, 322, 339, 355,356, 361, 364, 375, 377, 410, 436, 451, 459, 461: n = A,T,C or G
  misc_feature 476, 483, 537, 551, 564, 570, 578, 581, 594, 599, 640, 661,705, 706, 714, 720, 725, 727, 728, 739, 762, 804, 826, 829,838, 840, 846, 855, 869, 884, 893, 932, 935: n = A,T,C or G
agggggcccgnaaattggggnagnctacccacccggccggggntggggcccgggacncngaaggggtaaccaatggggntgggggaatggnaatntttttaaaaaattcacccccccttaagntgggtggncntngnaggnaacccttttgggaagaaaaaattaaaaagntggntggnttgnaatntgggggtntttccaattaacctntngnaaaggnaaccggggganttaattaaatagggggaaaaggnaaaatnaatnttttcccctnttttaattgggttggttntntccntncnccaaggaaaaatttgggggntgggccccttgggtttnttccttccttcttggnnggggntcnttcaaaaattngnccccttggggggaaacctttgggggaagggggnttttgggaaattaaaggggttttttnaaaagggttgggttnggtttttncnttttaaacccccggnccccttncccttttttttttttcccctttttttaaaattcccttttaaatttttttttttnggaattgggaaaanccaacccaatttnatttantttagggnggnaagggaaaaaccnaattnccttaatttcccccttaatttgggaaaaaattaaaaagggnaaaaacccccttggggggttncaaattgggccttttttttaaacctttccccttgggttaaattnntgggttantaaaantattntnnttggggttttnccaattttttttccccccaaaanttttggggaaatttttccctttcctttaaccctttttttttncccccccttttttttttttttnggnttaaatttntnaaattnggttggggnaaaccttaaaaaantttttaaaggttttnggggggccnaatttaattttttgggtttttaaaaaaaaaaaagggatnccntttctttccaaaaaaaa

SEQ ID NO: 4261 - DNA, 977 bp, Homo sapiens
  misc_feature 120, 127, 129, 131, 133, 135, 137, 139, 141, 143, 145, 147,149, 151, 153, 155, 157, 161, 163, 165, 167, 169, 171, 173,175, 179, 200, 207, 209, 211, 222, 224, 226, 233, 242, 245,255, 262, 288, 294, 296, 303, 305, 307, 314, 323, 324: n = A,T,C or G
  misc_feature 325, 336, 402, 441, 461, 463, 467, 475, 491, 496, 500, 512,525, 544, 549, 564, 568, 569, 590, 597, 602, 603, 609, 622,633, 645, 648, 658, 666, 699, 709, 731, 738, 745, 748, 761,765, 777, 798, 815, 816, 828, 840, 841, 846, 889, 900: n = A,T,C or G
  misc_feature 937: n = A,T,C or G
ccgttaaattaccgacttccaccttatttaagggggggccggaaaatttttgggggaaggcccttcccccaacccccggccgggggttgggggcccggggccccccggaagggggttaanccttatntntntntntntntntntntntntntntntntctntntntntntntntngggngaaaattggttaaaaaaattntggggtntntnttttaaaattnantnaattttnttaaaaganagngccaacccanccaaganaaagggtttcttttgggaattttttnattaananaaaaaanananttaaaanaattatttnnnttaaaacccanttgggacccaaaaaattttttaaccttgggaattggaattccccttgggggaaggccctttcttgngaaggggggttccaaaaaaaccctttctttttttaaaanaaatgggaaatctccaaggntngggnaaaaaacncccattttaaaaaaanacccntttnccccaatttggnaatttccttgggnttttaaaacccaacccaanccaanccaagggggggaggncccnntttaattttttcccccaaggntttttgngtttnnaataanaaaaaaacccaanaataatttttncccctttttggnaanaggggggccntttccaangtaaaaacccgggaaaaacccaaaaaaaaaaantttccaaggnttccctttttttaattgggggnccaaganaaaaaanggnccaacccaatttnctcnaaaaaaggtccnttatgggggccaaaatttggnaaaaggtttttacaagnnccccttgggggncccccaaaccgnnttggnaaaaccccctttttttccaacccccaagggcctccaagggccnccttaatttanaaccccctttaattggggggaaggcccccaagggggnaacccaggggggaaaaaaaggccaaattgggaaattcccc

SEQ ID NO: 4262 - DNA, 923 bp, Homo sapiens
  misc_feature 19, 26, 30, 41, 44, 54, 58, 64, 66, 70, 76, 78, 82, 90, 92,104, 128, 137, 179, 185, 195, 278, 388, 401, 407, 412, 415,419, 432, 450, 483, 485, 541, 573, 581, 591, 593, 613, 615,652, 658, 665, 676, 683, 686, 688, 752, 758, 772, 777: n = A,T,C or G
  misc_feature 782, 792, 801, 810, 817, 882, 893, 895, 899: n = A,T,C or G
aattacgacttcacttatnagcgggnccgnaaatttggggnagnccttctcacncggnccgggntngggnccgggncnccgnaggggttnanccccaaaaaagnaaggggggccatttaaaattaaanttcaaggtnccttccaaccaggattagggggggttttcaaaccccaattcnccttcnccaaagggtnggaaaaaaaaaaccaattttggttttccccggaaaaattggggggccttttttccccaccagggggccttaaccaccaaccanccaaaaaaaaccaagggggaaaaaccaattggccccaaaaggttttttggttttttcaaaaccggcccaattttggaatttggaaactttttcttttcccaaaagggggnaatccttttcccntttttnggggncantttnggaacccccaccnatttttcaaggggggggnccaaaaaagaaaaattttttcttttcaaattangncaaccaaaggctttccaccaaaatttaacccaaggggggggcctttcccttttttnccttcccctttccttaaccaaaaaaaatttcnccaaaaanttggttttangngggcccccaaattttggggntnaatttttttttttttgggccaaaggtttgggaaaggncccggncccaaanctttttggggnaaaaatnttncnttttttctttgggggggggttgggggcccccaaaaagggaaaattttttttcccccccccaaangggttngggcccccaaaccntttanaaaangaaaaaattngggggtttnccctttctntttgggnaacccaagggaaaaaaaaaaaaaaaaaaaaaaagggaaggggggcccccaaaaacctttaaaaangtttttttggnangggnaaaatttaataaaaaaaatttttt

SEQ ID NO: 4263 - DNA, 980 bp, Homo sapiens
  misc_feature 41, 51, 58, 61, 65, 72, 76, 84, 88, 94, 96, 100, 104, 106,110, 118, 126, 136, 140, 142, 150, 160, 162, 166, 181, 191,201, 209, 211, 213, 221, 231, 239, 245, 247, 250, 255, 266,294, 307, 426, 431, 448, 455, 472, 478, 483, 496, 503: n = A,T,C or G
  misc_feature 510, 522, 528, 532, 544, 563, 585, 686, 697, 709, 724, 798,816, 909, 920, 926, 939: n = A,T,C or G
cgcgcgttaattaaccggaaccttccactttattagggggnccggaaaatntgggggnagncctnccccacnccgncgggggtngggnccgggncnccgnaagngnttanccaaaggnttcaaaanagggggggtnccananccaattgnaattaaccananaatngggaattccaattcnccattagggnaaaattccanaattggtntntnccttaaanaattaaccanaaaagggnaaccananggnaaagnccttttaaggnaattttttaattccttccaaccttggtnttcccaattaggnaaaaccttttaattaaccaattttccaattttggttccttttccttaaggccttttggttaaaaaaaaaaccccaaaattttgggtttgggggttatttaaaaattaaaaaaaaccctnggggnaaaaaaccttggggggnaaaaggnaaattttgggaaggccnaaaggnaaccnttgggctttggtnaattaanggaaaanttcccaaaattncccccnaaanggttccaatttnccttgggcccccccaaaangggggggttaagggaaattttnccaagggttttttttttttcctttcctttaaaggcccgggtttttttggggaatttaaaaaagggtttccaaaggggggcctttgggaattttcctttttnaaaaaaaaggnggtttaaagggnaaaaaagggtttttnggggggaaaaaaaaattttttttttttttttttccaaaaagggggggcccaaagggttgggggggttttttccntttcccaaaaaaaaaggncccaaatttaaagggtttttttcccccccccaaaaaaaaaaaaccaaaaggggcccaaagggttttaaattttttgggggggccccccctttnccaaacccccntttaanttaaaaaaaaaanccctttttggggtttttaaaggggaaaaaaaaaatttaaac

SEQ ID NO: 4264 - DNA, 974 bp, Homo sapiens
  misc_feature 35, 47, 50, 72, 84, 97, 103, 105, 110, 121, 125, 130, 134,136, 145, 148, 167, 178, 186, 197, 201, 204, 213, 215, 217,223, 236, 255, 269, 271, 292, 294, 307, 311, 313, 353, 356,451, 484, 504, 512, 517, 523, 534, 570, 638, 640, 653: n = A,T,C or G
  misc_feature 678, 681, 689, 699, 707, 712, 729, 731, 744, 752, 754, 762,769, 774, 780, 785, 809, 826, 843, 850, 892, 894, 895, 954: n = A,T,C or G
gccgccgttaaaattaacccggaacctttccaacnttaattaagggnggnggcccggaaaaattttgggggnaaaggacccttnccccaccccccgnccgggntnggggnccgggggaccnccgnccccnattncntttgggggnggnttccaaatttccggaaatnggaaaggaccnccttccgncccccccttgnttgnccnccttggggntncnccccgnccttttggttggnaagggggggggaaaggtgnaaccaaatttttangnaaaaaaaaattggaaaaattntngggaattgggttnggtntnccccttttaaaaaaggggggaattggggggggcccaaggnggnaaaaaaaaaccaaaggtaatttccccttgggttttgggttgggggaaattaattttttaattttttgggaaaacccgggggggaatttttaaccncaggaattttttttgaaaaaaaattgaaaaagnttcccacccaaaaaaggttngggaaggncccanttttanccccaaaattnggaaagaaagggggaaaaaaaaaccaaggaaaccgnaaaggaaaaaaaaatttcctttttgggaattggggggcctttttccaccaaaaagggaaacccaattngncccaaaaaccaanaagggcccaaaaaaaaaaattgggnggnaaaatttnaaccctttgnttgggaanttggnaacccaagggggggaangngggccaaaggtcnccaaaaangncctttggnggtgggnggaangggggnaaagnaaattaaaaaacccccaaccccgnggggggggggcccaatntaaaggggggggggttnccaaagnggggaaaatttttcctttgggggccccccccttggcctttgncnnctttaaaaaaaaccttgggtttgggcccgggttttcccatttaaaacccccaaaaaaanttccaatttttttccaattt

SEQ ID NO: 4265 - DNA, 328 bp, Homo sapiens
  misc_feature 74, 129, 142, 153, 155, 157, 159, 162, 163, 166, 172, 176,207, 211, 215, 220, 222, 224, 233, 249: n = A,T,C or G
aggtacttttttttttttttttttttttttgtagtaaaagtgatcagactgtttcctcttttaagaagaaaaanaaagcagaggtcaatattaagcttccaattaatgcttattcatcacaaatagtangtaaataatgacngaaaaaaattncntnantcnnctnttttanccanacttttttgttttatttttaacatttttcantatntganatttncnanatttgtttnattttctgttaccctntaactgcaatacaagctcttgtggactggaaccacacctgtcatattcatgctgaatctcacctgtcatattcactgcc

SEQ ID NO: 4266 - DNA, 976 bp, Homo sapiens
  misc_feature 14, 24, 41, 53, 58, 61, 65, 72, 76, 88, 94, 96, 100, 104,116, 130, 132, 146, 150, 152, 156, 160, 163, 166, 168, 172,176, 195, 199, 212, 214, 216, 220, 252, 277, 340, 350, 383,399, 412, 435, 450, 459, 470, 475, 484, 487, 499, 511: n = A,T,C or G
  misc_feature 519, 541, 547, 551, 553, 589, 602, 612, 622, 636, 643, 655,675, 691, 717, 718, 719, 724, 728, 762, 779, 785, 795, 800,804, 836, 852, 885, 890, 906, 912, 939, 955: n = A,T,C or G
cgcgttaaaattanccggaccctncaactttattagggggnccggaaaatttnggganagncctnccccacnccgnccgggatggggnccgggncncggnaagnggttacccaagnaaaaaaagggggtngnaaaattccttggtnggtntncctnggtnatnatntncctnggcnccttaaaggggggccaaanaagnaaaaaaatgggtntntnaagnccttccttccttttttaaaaaaaattaaggtnttcccaattaaaatttttttttttnccttaaaaaaaaaggcctttttggcctttggaaaaaaaaaccttggttaaaaggccttttccncccaattaanttcctttgggggaaggccaaatttttttccaancctttttttaaaaaanttaatttttttgnggggaaattaaaaaaaattaaanttgggttttaaattnccttttccntttttaaaccnttttngggggaaanccnaatttttttccnaatttggggttngggatttntattaaaggggggggggaaaantttttngggntnccctttttttccctttaaaaaaaaaaatttttcccnttttttccccccntttaaaaaanttttttcccnaaatttaaattttnaaagggnccccttttgggnccctttttaaaaaaaccccnaaaccccttttttttnccccccccccccgggccccaaaaggnnnaaaangggntttttttttaaaaaaaaaaaaaaccccccccccnaaatttttttttaaaancccccnaaaggggggnaaaantttnaaaatttttgggggaaaaaaaaaaaaaaaaantttttaaaaaaaaaanaaaaagggggggaaaaaaccccccccccttttnaaaanttttttttttgggggnaaaaanttttttttttttttgggggggaaaaancccccttttttttttnaaaaaaccccctttttttttt

SEQ ID NO: 4267 - DNA, 973 bp, Homo sapiens
  misc_feature 20, 28, 32, 48, 52, 62, 68, 74, 80, 82, 86, 88, 98, 121,139, 153, 167, 171, 175, 189, 198, 215, 225, 231, 247, 263,268, 276, 299, 337, 344, 348, 373, 377, 382, 383, 386, 388,397, 402, 448, 459, 519, 533, 571, 590, 608, 623, 626: n = A,T,C or G
  misc_feature 628, 641, 644, 655, 663, 668, 688, 696, 703, 734, 753, 765,776, 799, 840, 841, 859, 864, 867, 872, 877, 907, 922, 953,955: n = A,T,C or G
attacgacttcactttattnaagggggnccgnaaattttgggggaagncctncccaccccgnccgggntggggnccgggncnccgncnccccgggggnccagggggttaacccagggaatncttgggggggaaaacctnaaaaatttaatttnaaaaaaaaaatggnaagnttgntgggggcctggggnattaattanttggggaagaaaaaatnggttttgggnggcccnccaagaaaaaggtggnaaaaccccggttaagnaaggnattcaagnaattaattttaccaaaaccaggncctttttttggttttttttggaaggggggttttaaggnaaaaaanttanttggaaaaaaattgggaattttttngggnttttnnttngnaaaacccgncccanccaagtttttttaaggggcccaaggccaaaggggggcccccaaggnaaaattccccntgggaacccccccttcctttggcccccccccggttggggggttttaattactttcccttncccccccccaaagnccttttgggggccttgggccccctttccaattgggttnccaaatttccaaaccaaanggttaaattttttccccnaatttttttttgggnttntnttgggttattggnccnaattgggtttncctttttnggttngggaaaaaggggcccccaanttcccaanaaagggnaaatttttttttttcctttttcccgggtttncctttgggttttttttttncccccctttccnttcccaaattnttggggggtttaaaaaattgggncctttccaacccttttttttgggttgggaaaccctttttcnnaattttttttccaaaaanaaatnccnttggnttaanaatttcccccccgggtttttccaaaaaaanttaaaaaaaaatttnatttccccccaaccccaaaacccaagggggnantttccctttgggtttttt

SEQ ID NO: 4268 - DNA, 404 bp, Homo sapiens
  misc_feature 157, 161, 164, 197, 233, 236, 250, 262, 276, 290, 296, 304,321, 324, 332, 348, 354, 373: n = A,T,C or G
ccgcggtggcggccgcccgggcaggtacttttcattatttaccgtttataatttggaggtaagaccattagacccaaagaacttttgtcttggtgtgttcttgtttaaatatggaatttattttacaaaatagtttatgttttgtatacatgtctantctnaangggcccaaatttgaaattttaatgagtctacanaaatgttctaagtggactgggtggtgcagcagcttnctnccatcgtgatattnacaagaatgccnggtctctcttgacngacaggtcaatggntgttcnatgtgcanctggccaaagtgtctantanaactacanaatgaacctgtatttnatgtgnactgctcaactagaaaatntagccactctctgctttaaggctttggaaaa

SEQ ID NO: 4269 - DNA, 980 bp, Homo sapiens
  misc_feature 8, 12, 24, 28, 43, 54, 58, 64, 78, 82, 89, 91, 97, 116, 127,143, 161, 173, 175, 203, 208, 212, 214, 221, 229, 234, 251,253, 259, 267, 271, 304, 306, 330, 339, 340, 342, 375, 386,394, 400, 406, 408, 414, 415, 418, 430, 434, 454: n = A,T,C or G
  misc_feature 461, 481, 495, 497, 508, 537, 539, 540, 541, 544, 555, 556,588, 589, 592, 597, 601, 610, 626, 633, 643, 646, 652, 664,683, 688, 706, 718, 726, 756, 762, 765, 770, 779, 789, 815,821, 866, 891, 892, 896, 900, 912, 928, 943, 971: n = A,T,C or G
tacgactncacnttattagggggnccgnaaatttgggggaagnccttccccacnccgncggggntggggaccgggacnccgnagggttnanccaagnttaaaaaaaaatttagggnaaaattaattnaaaaaaaaaaaaaatnggccttacccaaccaatngttgggttaggngnggccacgcttttttcaattttattaaanttttnggtncncaatacnttttttgnacctnggaaaaaccaattttantnttaatnttccaagnccgnttattgggaaccttaattaattaattaaccaananggaaaaaaaaccattaaccaaccnaaccaaccnnanccaacccaacccaaccaaaccaacccatttttnacccaccccancccatttntctttngggggntnttatanntanttttttattttntttntgggaaaaaggaaaaatttnggggggnaaaagagttttttttttttncaaaaaccctttcncntttttgggggntaaatgggggcccccccccccaaaaaaangnnnccntttgggggggnnaaaaggattttttgggccccaaaaaaaatttnnggnggggncccngggtccccnggaaaaaatttccccnttttccngggggggggnctntttccnaaaacccttttnggggcccaaaaaaaacccnccccntttcccccttttgggggncccccccctttncccccccncccaaaagggggggggttttttttttcccnaaaaanaanggggnccccggggnaaaaaatttntttccccccttttccccttttttttngggggncccccccccttttttccctaaaaaggggacccccccccctttttncccccccaaaaaaaagggtgttttnnaaangggntccccctttttnggggggggggggggcnaaaaatttttttttnaaaaccccccaaaaaggggggggggggnccccaaaaa

SEQ ID NO: 4270 - DNA, 973 bp, Homo sapiens
  misc_feature 23, 56, 64, 76, 95, 100, 114, 133, 144, 150, 155, 166, 178,185, 196, 198, 207, 219, 231, 236, 241, 247, 255, 259, 260,269, 271, 277, 279, 284, 288, 298, 307, 316, 357, 365, 399,401, 403, 430, 457, 467, 482, 483, 511, 524, 526, 602: n = A,T,C or G
  misc_feature 608, 616, 617, 619, 623, 624, 629, 631, 632, 634, 641, 645,650, 652, 655, 657, 660, 672, 678, 695, 701, 725, 726, 742,765, 766, 776, 777, 792, 807, 817, 818, 844, 846, 851, 853,855, 889, 895, 907, 912, 915, 923, 936, 941, 946, 955: n = A,T,C or G
  misc_feature 969: n = A,T,C or G
cgcccgtttaaaattaacccggnaacctttccaaactttaatttaaaggggggggnccggaaanaattttgggggnaaggacccttccccaaacnccggncggggggtttgggnggaccgggggtccacccgncccaccccggngggggncccangggggtttaancctttcccccanaaaaggnaaatttttccnangggggtttnttttaaaccttnccaaccggtttnccaanttccnccaagnccaaaganaagnnaaaattggngnaaaaananggttnccanaaaaattttnttccccttngcaaaaatnttgggccttaaatcgattgggtacattggggggtttttttnccaattcnccaattccccggaaaccaattttgggaaaaaggntntnggaaaccttttaacctttggaaaaagnaaaaatttgggggtaagtaaggaaggnaaaaatttgngaaaaaaaaaaaggnnttgggggaaaggcccatttttccaaagnaaaccctttgggntnccttttttttccaaggcccaaaaaggggggaacccttggggttccctttttttcccttaaattcccttcccttttngggttnaacccttnntntcanntcttntnntnttttctnttantatantntantnttnttattcttcatnttcttngtggggggggggccccncccggnaaaaagaaaaaaaacccttgggtnncccctttccgggcggnggattgggggaaagggccccaannttgggggggnnaaccccctttttttnaatttttcccggttnttaaaaaggnnaacccaatttcaagggggggcccttncnccaantnanaaattaatttgggaaaaaacccttttttttcaangtcccnaagaaaaaaagncccgnccntttttggnccccccggggggnaaagncccanaaaaaaggnggggggaacccaanggaa

SEQ ID NO: 4271 - DNA, 978 bp, Homo sapiens
  misc_feature 15, 22, 63, 71, 80, 86, 89, 92, 120, 129, 158, 166, 172,187, 194, 213, 216, 225, 228, 236, 241, 255, 258, 264, 287,289, 300, 305, 307, 323, 339, 355, 365, 379, 381, 396, 423,433, 445, 454, 457, 463, 465, 482, 487, 495, 501, 524: n = A,T,C or G
  misc_feature 530, 539, 541, 610, 635, 676, 736, 750, 759, 774, 776, 788,794, 801, 803, 805, 809, 826, 852, 892, 895, 941, 955, 960: n = A,T,C or G
ggccgccgccgtttnaattaanccggaacctttccaaactttaatttaagggggggggcccgnaaaaattnttggggggnaaaggnccnttncccaaccccccggccgggtggtttgggnggcccgggnggccccccggtaaggtggtttaacccaanccaaattntttttnttaaaaaaaaataanaattaancctttaaaaaaggtttaanttnccccccttnccnccaatttnttaanaaaaaattaaaaanggncccaanttttttttttttctttggggggncncccaacctccnggttngnaaagggggggaaaccnccaattgggggggggnaaaaaaacggtttaanttaaaccttnggtttgggtttaangnaaaccaaaacccaanttggtaaaaaccaaccaaatttaattngggaaaaaanaaccaaaaattnttaaaaaanggngggggncnaaggtttgggcccaaanaaggncccaaggnaaaaanaaaaacccaaaatttataaaaanggggtngggaaattncnaaaattttttccaaaaaccctttggcccagtgaaaaattttccaacctttggcccccttaaaaaggggnttttttttgggggccaaaatttaanaaaaaaaaaattaagggggtttaaaaaggtttggttttttngggaaaacccttaaattaatttttttttccctttttttttgggaaattggcccttttttnttgggggaaagatngggggttgnttttttttttaattntnttccaaattttntccttnttaaaantnanttanttttttttttttcccanacgggaaggaaaaaaattttaattcntttaaaattccctaagggttttttaaatttccttaaaaanaantcctttttttttgggaagggaaccaaattttttcccctttaatttncccccggccccttntttcnttaccccccttttttttt

SEQ ID NO: 4272 - DNA, 950 bp, Homo sapiens
  misc_feature 42, 58, 62, 65, 67, 74, 78, 82, 90, 94, 98, 104, 114, 122,124, 130, 157, 168, 172, 178, 182, 188, 195, 207, 209, 213,217, 225, 227, 231, 240, 244, 246, 256, 277, 285, 287, 289,291, 299, 308, 310, 330, 374, 382, 384, 395, 409, 424: n = A,T,C or G
  misc_feature 439, 489, 506, 551, 557, 559, 573, 578, 580, 585, 590, 592,595, 602, 604, 609, 639, 657, 671, 681, 709, 715, 723, 802,815, 820, 826, 834, 836, 845, 865, 876, 918, 934, 936: n = A,T,C or G
gcgttaaattaacccggaactttccacctttattaagggggnccggaaaatttggggnaagnccntncccaacnccgncggngatggggnccgngacnccgtcnccccgggggnccaggggntnacccgnccgggggggaaagggggccaattttgnaggtgggccangtcnccaagnccgnccaggnggggggncctttacattgncntggnaggngggggggncnaggngaccggggnaggncnttttggaagnggaaaaaaaccccggccaagnaattaaangntntntttttttncttcttttngnaaaaaaggaattaggaaggnaattttaaaattaaccaaaacctaaccttttaaaaaaaaaaaantaattaangnttccaaaattnagggggtttaaccnttaaaaagaaattanttttggctttttaangcccgggtttaaaaaggtttttttttaaaaccgggttaaaattttttttnaaattaaaggccttttnaaaagggaatttttttaaaaaggaaggaaaaaaaaattaatttgnaaaaangnaacctttttaaagnaaaangnaaagnttaangnccnaattggnanggggnaaaagggggaaaaaaaaagggaattaaaanaaaaggggggtttttttnctttaaaaaaaaanccaatttggnaacccggggggaaagggggtttttgggnaagggnaaattggnaaaaaggccctttttcccttttttcaatttgggggaaaggtttaaaaaaaaaaaaaaaaatttgggtttaatttttttnaaaaaaaaaaggnaaagnaaaaanttttgggnanggtaaaggnaaaaaaaaggggggaacccntttaacccaanggaaaggccccccccccgggaaaaattttttaaaaatttaancccccaaaaatttaangnaaaaaagggggggc

SEQ ID NO: 4273 - DNA, 709 bp, Homo sapiens
  misc_feature 23, 29, 37, 44, 60, 61, 64, 71, 73, 80, 82, 90, 99, 114,128, 140, 153, 163, 172, 176, 181, 192, 200, 219, 224, 230,233, 241, 244, 254, 256, 259, 264, 269, 272, 276, 281, 285,293, 303, 317, 319, 321, 323, 336, 350, 355, 361, 367: n = A,T,C or G
  misc_feature 369, 373, 376, 379, 381, 383, 386, 387, 395, 399, 402, 404,417, 421, 427, 429, 433, 436, 454, 464, 476, 483, 487, 491,502, 503, 515, 517, 537, 539, 544, 554, 573, 585, 590, 605,607, 620, 628, 633, 648, 656, 676, 683: n = A,T,C or G
aaaatttgggggaaaggcctttnctccancccccggncgggtgnttgggtgtccgggggnnctncggtcancnccggggngncccaaggngggtttaanccaaggaccaaattnttaatattaagggncctttggggggnggtggtccttatnttccaaaacnttgggcaanaaanaaccncccccccaagnggggggtnacgtacattgtattccatnaattntgggtnccncccacaanttnaattgggggntntanggggnaaggnttncaanccaanaagntaagtttngtggggtaangttaagtaattggngncncnaaaggacctttcnttactttgtcaaantatgnggaaanttcccntngagngcnaanancnatnntcacattngtanaancnccccatatatttnaggngtttancntttntcncacaatttcatataaagngggggaaaanaaaaaaaaaaanaattccnaaanattnattttttaacnnccccccccaacngntaggcccttttaattaaaantnatttntaacccaggntagggaaacctttctccanccccaattttcncttgngtcaccccttgggcnanaaaaaaaattaantttcctcnttggngggggaatttttttnggaaaccnttaaaaatttaaacccttanagaaaangtcctttggatccttttttttacctt

SEQ ID NO: 4274 - DNA, 914 bp, Homo sapiens
  misc_feature 1, 18, 46, 51, 55, 69, 77, 79, 80, 88, 102, 105, 136, 185,197, 207, 213, 217, 232, 235, 248, 251, 257, 265, 283, 301,311, 312, 323, 326, 328, 329, 355, 358, 377, 379, 388, 404,410, 414, 425, 435, 437, 443, 445, 457, 464, 465, 466: n = A,T,C or G
  misc_feature 489, 490, 495, 524, 528, 530, 541, 544, 559, 566, 582, 597,600, 609, 610, 621, 623, 625, 630, 644, 645, 647, 651, 654,660, 694, 699, 705, 712, 731, 736, 739, 743, 745, 747, 759,767, 769, 778, 780, 781, 784, 793, 805, 811, 839, 845: n = A,T,C or G
  misc_feature 847, 848, 860, 885, 894, 897, 907, 910: n = A,T,C or G
ncaaccccccggcccggnggtttggggggcccgggggccccccggnaaggngctnaacccaacaaaaanaaaagggntnnattttaanttgggccccccaangcnaaattaaaaaataaccctttttgggccccanaagggtaaatttttgggggtaaatttcccgccaagaggccaaacctttnaatttttttttnttggctttancacggngggncctttttttttggtntcntcttaataaaaanggncccttntttttggncggtggccctttgtcaanaataaattgggtaaaaanataaattggnnaaccctttaanccnannaagggtttttttggggggggattctntanaaaccccccactataaagngnttaaatttntttttttctctaaggnaacccnttgnggggccaaaangggttttttngnccaaantnaaattttttggnaatctcnnngaaaatccaatggaaaaaagttnntttgnaccccctttgtacccccaccttttaaggnccangnaagtttttggnggnttttaaaaaaaaggnaaggttnccaaaatcctaccttnggggcctttccaacnaantaggcccannttcccgccttngngnaaaangaaaaataaggttnntncaanggntttggngggttgggccttcctaaacctttctttcccaggnttccnaatttnctaaganaaatttttggcaataaaanagtanccnacangnanaactttattatnataatttnantttcccggnanngancctttggtnaaaaaagggccncccttngggcccaaattttttaaaaataaaaaantggggncnnaaaaaaaaaaanaaaaaccctttaattttttcccggnaaaaaattnggnttgggggggnccntttt

SEQ ID NO: 4275 - DNA, 984 bp, Homo sapiens
  misc_feature 28, 43, 46, 50, 56, 59, 65, 71, 79, 83, 88, 90, 95, 99, 110,134, 142, 153, 155, 159, 163, 167, 178, 192, 194, 198, 208,210, 214, 216, 225, 229, 231, 235, 237, 244, 252, 279, 377,384, 419, 439, 457, 464, 474, 490, 499, 508, 531: n = A,T,C or G
  misc_feature 545, 609, 648, 676, 783, 816, 892, 907, 938: n = A,T,C or G
taaatacgacttcactttattagggggnccggaaaattggggnagncctncccacncgncggggntggggnccgggacnccgnagggntnacctnggcnaccccaacttncttggggaaaaaaaaaaaaatggncccttttncaagggggttntncccntttncccnattcccccccnaaagggggccaggncnaagnccaaaaaatncncctntncggtgggtnccgntncctncnccttacntgggggcnccaaagggggccagggcccaaaaaagnaattttttgggaaaaaaggttcttttttgggggccttccggtaagaaattggggccccaaggaaatcccccggcctttaagggggaaacctttttttncccttgntttttggaagggcctttccccaaccccttgggggncaaccctttttaaaaccttnaaaaaaattttccccccnaaaaatnggaaaggccngcccttgggggaattnaaccttttnccaaagttnccccaaattgggtttttcccccnttgggggcctttanggcccaagggcccttgggtttaaaaattttttccgggaaattttaaaaatttcccccaaagggnaaggggggggggttcccccctttccaaaattggggtttnttcccttttttttttttttccttttttnccaaaggggggttaaattttccgggggggggcccttttttttgggggggtttgggcccaaatttttttttccaaaacccaaaaaaaaagggggggccctttccgggnaaaaatttccaaaacccggggggtttttttccntttgggaaaccccccgggccccccaaaaaaccccctttggttttaaaggcccaaaggggccccgggaaaatttttntttttttttcccccntttttcccccccccggggggggaaaaaaggnattgggccccttttgggggggccccggggtttgggccctttttttc

SEQ ID NO: 4276 - DNA, 279 bp, Homo sapiens
  misc_feature 13, 24, 27, 71, 78, 140, 155, 165, 171, 172, 175, 183, 190,191, 192, 202, 212, 213, 219, 244, 248, 252, 254, 255, 270,279: n = A,T,C or G
cggaacctttccnaaccttttaanttnaaagggggggggggccccggggaaaaaaaatttttggggggggnaaaaggncccctttaccccccaaacccccccgggacccgggggggatttggggggggccccgggggggnaccctcccggggggncggcccccanaatttnnttntccaacgnttggccnnncccccaaagnccgggggggnnaatttncccttaaaaatttgggatttgggtncccntttntnncccctcctttctttntctttgggn

SEQ ID NO: 4277 - DNA, 963 bp, Homo sapiens
  misc_feature 3, 24, 38, 45, 51, 60, 68, 78, 84, 90, 92, 102, 104, 106,110, 112, 118, 120, 134, 136, 140, 144, 157, 174, 188, 194,198, 201, 203, 207, 215, 219, 232, 243, 252, 262, 295, 296,298, 330, 343, 345, 356, 359, 374, 391, 392, 411, 412: n = A,T,C or G
  misc_feature 413, 429, 433, 434, 439, 451, 457, 459, 466, 471, 500, 503,510, 535, 541, 549, 556, 561, 574, 581, 583, 597, 601, 627,629, 632, 647, 654, 663, 665, 677, 685, 695, 697, 714, 750,770, 773, 789, 792, 807, 820, 842, 848, 894, 914, 923: n = A,T,C or G
  misc_feature 951: n = A,T,C or G
tanttaccgacttcacctttattnaagggggggcccgnaaaattntggggnaaagtcctnccccaacnccgacggggnttgggnccgggncnccgtaagggntnanccancnttggtngncccaagttaaattnanaaanccanaatacctctttcnaagttgggttaaaattnaggtccttccaagnctccanaggnttncngggnttttatanccanataattaataggngggaaaaatcnaaaaccaanctaaaaccanatggccagtccatgtctccccttgtgtaaaagnnangtgggggtatggggtggaaaaaaaaattccanggtttaattttcncngtaagggtttngcnttatccaaaaaaaantaacctttttttccttnnaaaaaaattgggccccccnnngtttttttacccaaancccnncccanaaaaaatttctntttggnanggggccnatttngcccaaaaaatttaaaaaaacccatggcnaanaaaaaangtttattttggtaccaacccaaccnaacgtnaaaaaaanggaaaanggggnggaaaaaaaatanggccaangnggcccaatgcctangggnaaaaaaattttgggttcccccttttngnaanaggggggccccccangtaattngtttccaangnaaaccttttaanggttatgngaaccaaatngngaaaccaaggccaaaanaaaggccaaggccctttaatttttaattaacaaaanttaattttggttttttccanaanagggaaaacccttaanaanaaaggggggcctttngcaaaaatttttnctttaagggcccaaccctttcnttgggngggaaaaaaaaaaaaaaaaaaaaagggggggaacctttaataaaangggggaataaaaaattttcnaaatttggncctttttaaataaaatttaacccccaanaaaaaaaaaatt

SEQ ID NO: 4278 - DNA, 971 bp, Homo sapiens
  misc_feature 52, 58, 62, 66, 73, 77, 79, 83, 89, 93, 95, 97, 102, 106,108, 110, 118, 120, 130, 134, 136, 142, 148, 152, 154, 158,169, 173, 175, 181, 183, 193, 195, 210, 214, 218, 222, 224,228, 236, 246, 256, 262, 275, 279, 289, 291, 305, 336: n = A,T,C or G
  misc_feature 342, 356, 394, 401, 402, 403, 432, 470, 492, 499, 517, 526,528, 532, 540, 553, 578, 586, 605, 608, 610, 622, 642, 654,667, 693, 695, 739, 748, 790, 811, 855, 858, 919, 927, 931,944, 959, 965: n = A,T,C or G
gttaaataaccggaaactttccaactttattaaaggggggcccggaaaattntggggnaagncctnccccacnccgncngggntggggnccgngncnccggnaagngntnacccaaananaaccaggtcncaangngtccanaggggnttgngnccgnccaaccaaccncctngnttaggncnccccccaagntnttaaccttcaaaggngggnttcntttngnaagnggttgggnaaagtaaatnctccccttcnaaaggnccccccaaaaggnaagnggttccaaangnggccttggccaagnttggaaggccccaattggaaattccaaccgnccccanttggccccaattgnggccaacctttcccaaggccccttgggggggccaaaanggaaacnnnagtttggaaaggaaaaccccccccttttnttttaaaaaaaaaatttaaaaaagggtttaaaaaaaanttttttttaaaaaaaaattttnaaaaaanaaaacccaagggccaaangggtttggngngggnaaaaaccntttcaaatccaantttttccaaaaaaggtttttaaaancctttttngtttaaaagaaaaggcccnttnancccccccaaggncctttggcctttaaaaaggnaaaagccccaangtttgggtttggnaaattccccttttttgggggggttgngnccctttccttttttaaaggggggaaaattcccaacctttttttnggggggttnaaatttcctttgggccttttccaaatttttttttttcccccnttttttttttttgggttcccntttaaaccccccccctttaaatttaaaaaaaaaagggccccaanccnaaaaaaaaaaatttccccgaaaaggtttttgggggggggggtttaaaaaaaaaaaaaaaangttttaantttnggaaaaaaaaaanccccccaagggtccnaaaccntttggg

SEQ ID NO: 4279 - DNA, 980 bp, Homo sapiens
  misc_feature 24, 42, 52, 56, 62, 68, 72, 76, 80, 82, 87, 93, 101, 111,115, 122, 127, 131, 133, 139, 143, 145, 155, 165, 167, 171,175, 177, 207, 209, 222, 242, 244, 276, 280, 296, 306, 312,316, 354, 367, 385, 387, 397, 423, 432, 434, 466, 481: n = A,T,C or G
  misc_feature 486, 545, 550, 571, 577, 579, 606, 626, 660, 672, 675, 692,700, 718, 733, 751, 754, 758, 761, 769, 770, 804, 809, 833,842, 845, 867, 911, 933, 962: n = A,T,C or G
ttacgacttcacttataagggggnccgaaaatttggggtagncctacccacnccgnccgggntggggnccgngacnccgncncaatncttttnggggggtncaaatcccgnattnggaaagnccctncggncncccttnggtngncccttggggntacccccggncntttnggtngnagggggggaaaaggggggaaccaattttangnaaaaaaaattggnaaaatttgggaattggtggntntcccctttttaaaaagggggaattgtggggcnaggnggaaaaaaaaccaagnaattcccctnggtttnggtnggggaattaattttttaaatttttttgggaaaacccgngggggaatttttnaccaaaggaatttttttngnaaaaaaattnggaaaaggtttccacccaaaaaaggnttggaaagncnaatttttaaccccaaaaattgggaaaggaaangggggaaaaaaaaanccaanggaaacccgaaaaggaaaaaaaaaattccttttttgggaaattggggggccttttttcnaaccnaaaaggggaaacccaattggncccaanancccaaaaaaacccaaaaaaaaaaattnggggggaaaaatttaaaccnttgggttggggaaatttgggaaacccaatttggnaagggggggccnaangtccctccaaaaaaggncccttggngtggggggaaaggggggnaaagggaaaatttanaaaccccccaaacccggnggngggnggncccaaagnnaaagggggggggtttcccgggggggggaaaattnttacntttggggggccccccctttgggcntttgggccnccnttaaaaaaaaacctttgggttngggcccggttttttccaaatttaaaaacccccaaaaaaaaattnccaatttttttttcccaatttnaattttttttcctttaaaaaccccccccnttccaaaaaaaaaaacaa

SEQ ID NO: 4280 - DNA, 980 bp, Homo sapiens
  misc_feature 20, 31, 36, 49, 53, 62, 68, 74, 80, 93, 105, 107, 129, 135,139, 153, 173, 179, 181, 185, 202, 204, 214, 227, 229, 244,246, 248, 250, 253, 257, 261, 286, 306, 316, 320, 322, 355,385, 418, 461, 471, 476, 486, 502, 508, 518, 522, 544: n = A,T,C or G
  misc_feature 551, 555, 568, 588, 594, 614, 641, 645, 652, 699, 703, 772,778, 790, 829, 855, 878, 916, 924, 945, 959, 970, 977: n = A,T,C or G
attacgacttcactttattnagggggcccgnaaatntgggggaaggccnttcncaaccccgncggggntggggnccgggnccccgccccaatncttttggggggntncaaattccgggaattggaaagncccctncggncccccttggttggncccttgggggtaccccccgncttttngntggnagggggggaaaaggggnanccaattttangtaaaaaaaaatngnaaaaatttgggaatngntngnttncccntttnaaaaagggggaattgggggggccanggggaaaaaaaaaccaaggnaattcccctnggtntnggtgggggaaattaatttttgggtttttttggnaaaacccggggggaaatttttaacccaagngaaattttttttgaaaaaaaatttggggaaaangtttccacccaaaaaaagggtttgggaaggcccaatttttaanccccaaaaantttgnaaaggaaaangggggaaaaaaaaaancccaanggaaacccgnaaanggaaaaaaaaaaaaaatttccnttttttngggnaatttgggggggncccttttttttccaaacccnaaaaanggggaaaaccccaaattttngggcccccaaaaaaacccccaaaaaanaaanccccaanaaaaaaaaaaaattttgggggggggaaaaaaaaattttaaaaccccntttnggggttttgggggaaaaattttgggggaaaacccccaaaattttgggggaaaagggggggggggccccnaaaggnggcccccccccnaaaaaaaggggccccctttttgggggggggggggggggnaaaaagggggggggggaaaaaggggnaaaaatttttaaaaaaaaccccnccccaaaacccccgggggggggggggggggggcccccnaaaagggntaaaaaggggggggggggggntttttccccaaaanggggggggggnaaaaaanttt

SEQ ID NO: 4281 - DNA, 979 bp, Homo sapiens
  misc_feature 16, 19, 31, 39, 44, 85, 89, 103, 113, 125, 129, 146, 173,191, 225, 227, 235, 240, 260, 304, 316, 329, 357, 388, 398,400, 401, 408, 439, 445, 460, 462, 476, 487, 566, 604, 605,612, 613, 623, 643, 645, 675, 686, 695, 699, 700, 712: n = A,T,C or G
  misc_feature 715, 720, 724, 734, 741, 755, 759, 760, 765, 771, 778, 787,794, 802, 811, 838, 856, 859, 886, 920, 922, 926, 931, 944,953, 976: n = A,T,C or G
caactttatttagggnggnggcccggaaaantttggggnaaagncccttccccaaccccggccgggggttgggggcccggggccnccgnccccattgcttttngggggggttncaaattcccggnattngaaaaggccccttacgnccccccctggttcgtccccttgcgctncacaccggctttttggtnggaagggggggtaaaggtgggaaccaattttatngnaaaaaaantcggnaaaattttgggaacttggtnggtattcccttgttaaaaatatgggtaattgggggggcctaggngtaataaaaaanccaagaaaatacnccttgggttttggttggggggaattaanttttttaaatattttgggaaaaacccggggnggaaattttnanncccaggnaatttttttgggaaaaaaaatggggaaaaanttttcntccctaaaaaaaggntngggaagggcccatnttttaaccccnaaaatttggaaaagaaaggggggaaaaaaaaacccaagtaaccctttaaggaaaaaaaaaaattcctttttggaaattngggggcttttttcccaaccaaaaaggaaaatcaatttnnccccaannaccccaaaanaacccaaaaaaaaaaaattngngggaaaaaaattaaaaccttttgggttggngaaatttggcnaaacccaanttgnnaaaagggggggnccnaaagncccncccaaaaaangtccccntttggggggggggngggnnaaggngggggnaaaaggnaaaaatttnaaaaaancccccccnaccccgggngggggggggggggccccaaaaaaaacnaaaggggggggggggatnttncccaaaagggggggggaaaaatttttnttcccccttttggggggggggccccccccccccncntttnggggncccttttttgggnccccccccntttaaaaaaaaaaaaaaaacccnttt

SEQ ID NO: 4282 - DNA, 981 bp, Homo sapiens
  misc_feature 26, 45, 105, 141, 171, 174, 181, 219, 226, 263, 282, 293,300, 303, 313, 316, 346, 355, 361, 389, 395, 417, 421, 429,437, 468, 483, 487, 501, 512, 522, 532, 559, 565, 590, 607,613, 684, 714, 723, 726, 760, 763, 831, 840, 843, 928: n = A,T,C or G
  misc_feature 954, 974: n = A,T,C or G
tgactcccgcggtggcggcgccggcnggtcagagattggggtggnacctggagaaccgctgtgaccacactatcatattacaagacactgaatggcttgcccacncccattgggggtggcccaaattggaattccaaggtnttaattttttaattttggggggcccttaanggnccctttncccccaaaaaaaaatttggggggggggaaaccccaaantttaaanttttttggggggggcccctttttaaattttgggggtnttggggggggcccccaaanccccctttttnaaaaaanccnctttttttanaanatttgggggggggccccccccccgggtttnggggggggntttttnttaaaaccccccccctttttcccccccnaaaagntaaaaagggttttggggggggncccnttttaaangggggggnaaaaaccccaaaaaaatttgggggttttttnccccccccccctttnaaanttgggggttttttnaaaatttgggncccccccttngggggggggnccccaaacccaaaaaagggggggaaancccggnaaagggttttaaaaatttttttccnaaaggaaaacccccttngggccncccaaaaaaaaaaaaccccccaagggcccaaaaaaaaacccccttttttttttttttccaaattttttttnaacccaaaaatttccctttttgggtttttnggggggaanccnaacccaaattttttttgggggggttaaatttttnccntttaaaaaattggggggttttaaatttgggaaaccccccaacccttttttaaaggccccttttttccnaaaaatttnccnttttttttgggttaaaacccccttttcggggggccccccgggccctttccctttaaaggaaaaaacccttaagggtttggggggnaattttccccccccccccgggggggnccctttgggccaaagggggnaaaattt

SEQ ID NO: 4283 - DNA, 447 bp, Homo sapiens
  misc_feature 4, 187: n = A,T,C or G
actncttagggcgaattggagctccccgcggtggcggccgaggtacccatcacgtgccagacacgttatctggagatagagatgtaaacaagacagagttcctgcctcaagcaacccaccatctagtaggcggaagacagactataaatacataatgcaagataatttctgatggtggcaagtgctncaaaagaccattatgacagttaaacaaagcaactgagtagagggagagggaaaaagcaactggggagaggaacatttatggctgagagatcaggaaaggcttctttggcgaaaagacactggagctgaagcctgaaggaagaaggctggagtggtgccggcaggggcttggggagttgcagggaaggagcttgacaggcaagccccgtttttgatggggggggaagcctggttgaaaggattggcaagaagtccatgcag

SEQ ID NO: 4284 - DNA, 426 bp, Homo sapiens
cgactccttagggcgaattggagctccccgcggtggcggccgaggtacttgattttttatcagatggcctggaaaacccagtctcacaaaaatatgaaattatcagaaggattatagtgcaatcttatgttgaaagaatgaactacctcactagtagttcacgtgatgtctgacagatgttgagtttcattgtgtttgtgtgttcaaatttttaaatattctgagatactcttgtgaggtcactctaatgccctgggtgccttggcacagttttagaaataccagttgaaaatatttgctcaggaatatgcaactaggaaggggcagaatcagaatttaaggctttcatattctagccttcagtcttgttcttcaaccatttttagggaacctttcccattaagggttatgtttttccagcccagg

SEQ ID NO: 4285 - DNA, 840 bp, Homo sapiens
  misc_feature 65, 70, 90, 109, 124, 125, 136, 141, 152, 165, 169, 213,222, 237, 245, 260, 263, 305, 324, 340, 342, 357, 363, 387,407, 432, 451, 452, 473, 481, 496, 504, 506, 510, 518, 523,527, 529, 532, 533, 554, 586, 590, 612, 624, 625, 671: n = A,T,C or G
  misc_feature 676, 683, 689, 705, 713, 733, 737, 740, 742, 748, 751, 754,781, 790, 800, 828: n = A,T,C or G
ccgcggtggcggccgaggtactttttttttttttttttttttttttttcccagcatttttccaanatttnattaactcataattaaaatncttccatggctatcctggngtatagtccatttcnncaatgcctgcntatgnaagaaaaaatncccccaagaaatngggncttaaattttaataaaaaaggggaaaaaaaggagggggtttttnaaaaatttntgggacccttccccnccaagggnttttcccttgggccnaanttttggccctttggggggggggaaaagggggcccccctttcnaaagggggggaaaaaaaancccttttttaaacccnanaaattccccaatttngggggnttggggggaaaaaaaagggggggncccaaaaaggggggggaagnaaaaaaaaggtttttaagggggggncccaaaccccccctttttnnccttttttacccaaacccaangggggggncccccaacggggggnaaaaaagnanaaanttgggggnaaaantttntnggnnaggggggggggaaaaaaaaangcccccacggggggggggggaaaaaaaaaaanttgnccccccccaaaaaaaaattggngccccttttttnncccccaaaaaaaaaaacccccccaatttttccaaaggagaaatttnccttncccaaanttgggnccccgaaaaacctttnccaaaacnttttaattttttccccccanaaanggngnaaaaanccnaanggtcccaaggggggggggggggggggnaaaaaaaancctttggggnccccccccccccaaaattgggaaaatcncccccccaaaaa

SEQ ID NO: 4286 - DNA, 437 bp, Homo sapiens
  misc_feature 4, 375: n = A,T,C or G
actnctatagggcgaattggagctccccgcggtggcggccgaggtacgcggggaaggatgaccggaatggagacttctcagagaatagagactgtgacaagctggaagatttggaggacaacagcacacctgaaccaaaggaaaatggggaggaaggctgtcatcaaaatggtcttgccctccctgtagtggaagaaggggaggttctctcacactctctagaagcagagcacaggttattgaaagctatgggttggcaggaatatcctgaaaatgatgagaattgccttcccctcacagaggatgagctcaaagagttccacatgaagacagagcagctgagaagaaaatgggctttgggaaagaatggccttnttgccagagcccgccagttccaggtctgttctccccttgggagaaagccactttgcaaaagc

SEQ ID NO: 4287 - DNA, 408 bp, Homo sapiens
ccgcggtggcggccgcccgggcaggtacaagtgaagaaacaaggaggcacttcctgtaggagcactgatgtgccttgtccacactcccctctgagctttactggtaagagagctccgactgaacatgctgagcagttgagcacttttccatcagcaacaacagcgagggatggaaatggaaaggaaccgaactaaaacgcatttccctttgcagggcagagagctaagctcttaggaatagtgttatagaaataagcaccctaacttcaattcctgaaaatgttggttaatggagagaatttttggagtttcacttaatattttcccatcggtcgccataaataagtcttcagggcgcctcctagaaagaagtcccagccccaagggctcgattaagggacccacact

SEQ ID NO: 4288 - DNA, 411 bp, Homo sapiens
  misc_feature 23, 44, 74, 314, 323, 373, 375, 383, 387: n = A,T,C or G
cgaattgtttctccccgcggtgncggccgaggtactattcacgncattaaaaagaatgtgatcctgtcattttntacatagatggaactgtaagttactaagtgaaataagccaggcacagaaagacaaattttgcatgttctcacttatttgtgaaagccaaaaattaaaacaactgaacctcatgggagatacagagtagaatgatggttaccacagagtagaatgatggttaccaaaggctgggaagggtaatggtggggagaagaagttggaatgattaattggtaccccgaataccaggcacacaaggnaggcgaaanaccaccgaacaccaccctttgagccaggccacccagccaatggggcgccntnttccaggngccnctccccttctggcccttcccgcgt

SEQ ID NO: 4289 - DNA, 397 bp, Homo sapiens
actccttagggcgaattggagctccccgcggtggcggccgaggtaccaccacacccagctaattttttgtattttaagtagagatggggtttcaccatgttggctaggctggtctcgaactactgacctcaggtgatccacctgcctcatcctcccaaagtgctgggattacaggctgagccaccacgcccagccaactgctgttaatcattttagaatctaagctcccacactgatagggagaaaaggcataaaggaggagttagtgttgacatgtgtcaaatgctggtaagtcaagacttttggtaagaggaacagaccattggatttaacaacatgggaagttactggtgacttttgactaggagctgtttttgatggggattgatgggatgca

SEQ ID NO: 4290 - DNA, 446 bp, Homo sapiens
  misc_feature 3: n = A,T,C or G
atncttagggcgaattggagctccccgcggtggcggccgcccgggcaggtactacaataatcctcaagatactgaaagtaatgccaagtgaaagaccaagggggtgggtggagggctaatgggctggacgaaatagccacttgattgctagttcatacaagatgtggcagcaactccttttctggctgggagatcttggatgtcacatcttagaatcaggtggcaaagcatctgtgaagggcaatgtggcatcccagacagtgggtggtgagatcaggaagaaaaaatggaaatcaacagatggtggatcctacagctgagaactgattcttcaatttgaccgtggttggcataaacattttaaatggagcttggtaaagatcaggtttatttttgccattggaccaagctcttggcttctaaaaagggccctaaattttttgttt

SEQ ID NO: 4291 - DNA, 545 bp, Homo sapiens
  misc_feature 155, 160, 166, 172, 177, 186, 205, 213, 223, 235, 245, 261,271, 277, 282, 286, 287, 313, 333, 346, 351, 413, 416, 437,453, 474, 475, 476, 479, 484, 496, 504, 519, 533, 540: n = A,T,C or G
ccgggcaggtacccctccaagccggacaacccgggcgaggacgcaccagcggaggacatggccagatactactcggcgctgcgacactacatcaacctcatcaccaggcagagatatggaaaacgatccagcccagagacaactggattttcaanacctntttggntgtagnagaanagtcacaantaaataagtgtttcccagnaaacttcngggcttttgnaagtacccctgncaaatgttgnggtggaatggggaaanatgaagtacntttgcnttctnctgnnccctttttcacttatatttacaggcnccattattttgcaatccggnggtaaaaaaacgnagganattcccaccctatcactaacccaaatgccattgtcaggccccacctggtggcctggaaaatntcntgccaaattggtttttttccnctttttggtacaattncatttggataataattaatgnnnggntggtnttttaaaaaatnaaaaaagnttaattccaatttgnccaattatcccaantaaaaanaaaaa

SEQ ID NO: 4292 - DNA, 110 bp, Homo sapiens
  misc_feature 46: n = A,T,C or G
cgcggtggctggccgcccgggcaggtacataggccttcctctgtangagagggcttctgatatcttattctttcttatggcggaagagggtgttgagaggggttcccttg

SEQ ID NO: 4293 - DNA, 436 bp, Homo sapiens
  misc_feature 161, 167, 185, 260, 320, 335, 338, 358, 375, 404, 407, 408,419, 428: n = A,T,C or G
ccgcggtggcggccgcccgggcaggtacaagaattgctggaacctgggaggcggaggttgcagtgaaccaagattgcaccactgcactccagccggggtgacagagtgagactccgactgaaaataaataaataaataaataaataaataaataaatattnttggantggtgaagggaatgggtntagaattggagagattatcttactgaacacctgtagtcccagctttctctggaagtggtcgtattttgagcaggnatgtgcacaaggcaatttgaaatgcccataattagtttcttcaagcctttgaatacactnttaactcactggctnaangagggaaaatttttaagaanggaagcctacttaaaanatcttaaatttggaaaaaacttccaaaangcnnttttaaacctntaaaaaagntttttaat

SEQ ID NO: 4294 - DNA, 449 bp, Homo sapiens
actacttagggcgaattggagctccccgcggtggcggccgcccgggcaggtacaccgggaccaccaaagggccatgaactctttgtcagtcaagtcccaaggtcccatagagagcagatggccactttaatgtcacctcaagcccttaggctgtttttagacatccatctccttagtggatgctttttatagacccccatccaagacctcacacatcttgtaattaaatttcatctggtagtattttgactttttttccagcctgtcaacaccttctgtgttcttacttgttgtatctcaaatatttgatacccttttcagtgttgtattaatctaaaatttgttgtttgtgtttatgttttcatgaagttactgttaaaaaatataggaagaagagaaggttaagatttgagcccttcagtgtatagttgagcttgtcctggaagaca

SEQ ID NO: 4295 - DNA, 376 bp, Homo sapiens
  misc_feature 259, 265, 277, 292, 296, 303, 307, 316, 319, 321, 334, 340,341, 356, 359, 364: n = A,T,C or G
ccgcggtggcggccgcccgggcaggtacgatcttggctcactgcaacctctccctcccgggttcaagtgattctcgtgcctcagcctcttgagtagctgggattacaggcgcgtgccactgtgtccggctaatttttgtatttttagtagagatggggtttcaccatgttggccaggctgatctcaaactcctgacctcatgtggtccacccaccttggcctcccaaagtgctgggattacaaggcgtgagccaccacncttaangcctacaagcanttttttaaaaactgncccnttactantganaaaaatttnttntnttaaaaaaacccnttattnncctattttaaaaaanaanaaatnttattttttttt

SEQ ID NO: 4296 - DNA, 314 bp, Homo sapiens
  misc_feature 1, 163, 167, 171, 172, 175, 186, 192, 194, 198, 199, 201,202, 203, 207, 213, 225, 226, 233, 236, 237, 250, 251, 252,257, 259, 268, 274, 275, 283, 293, 297, 298, 314: n = A,T,C or G
nctatagggcgaattggagctccccgcggtggcggccgcccgggcaggtactttttttttttttttttttttttttcttttcttttttttttttttttttttttttttttttttttttttttttttttttttttttttttttttttttttttttttttaaaanttanaaannaanaatcttttatnaaaaananaatnntnnnaatnaaaaangggaaaaaattnnaaaaaanaannaaaggggctaaannnatggnangaagggggnaatttnnttaaaaanaaaaaaaaangggnnaaaaaaaaaaaaaggn

SEQ ID NO: 4297 - DNA, 294 bp, Homo sapiens
  misc_feature 185, 264: n = A,T,C or G
ggcgaattggagctccccgcggtggcggccgcccgggcaggtacgcggggtaatctcagttacttgggaggctgaggcagaactgcttgatcccgggaagtggaggttgcagtgagccaaggtcgcaccactgaactctagcctgggcaacagagtgagactcagtctcaaaaaattaaaaattngaacggactgacaggccatcttccaatgttctgatctcccctgactctgtgggtccaacaggaccattctgagcaggtngcatttctgggcctggacaagtttgactgg

SEQ ID NO: 4298 - DNA, 450 bp, Homo sapiens
  misc_feature 4: n = A,T,C or G
actncttagggcgaattggagctccccgcggtggcggccgaggtacgtaacaggacatcaataaatattagttgaatggaagattaaatcaacaaaatgggtgatggatctctgcagcaagtggaagagttcttcatggcccccaaggttatatccatctagaacttcagcacgtaatttcatctggaaatagtgcctttgcggatataagttaggtaaaactgaagatgagatcatactggattaggatgggatctaaatccaatgaaaatgtcttcataaaaaacaggaaagaacccatagaaacacaaggaagaaggtcatgtgaagatggaggcagagattggagggatgcagccaccggcccaggaatgccagcagccacccagaagctggaaggaaatgagggattctctcctagaacctttagagagaacatggtcctgtgaa

SEQ ID NO: 4299 - DNA, 420 bp, Homo sapiens
ccgcggtggcggccgaggtactcagtctttgcttaaaataaattttacgtttatcaaagtaaaatttaccagctttttttcctaaagaggctagtcatatctcatcagtggttacaaagtatccttacaattgaacctacatttgttaatcctgttcagtgtgtatgaaaatcacttggtggccgggcatggtggctcacgcctgtaatcccagcactttgggaggccaaggcgggcagatcacaaggtcaggagttcgagaccagcctggctaatatagtgaaaccccatttctactaaaaatgcaaacattagtcaggcatggtggcaggtgcctgtagtcccagctacttgggaggctgaggcaggagactctcttcaacccgtgaggcagaggtttgcagtgagtcgagatcatgt

SEQ ID NO: 4300 - DNA, 322 bp, Homo sapiens
  misc_feature 56, 130, 158, 220, 225, 240, 253, 286: n = A,T,C or G
aggtactttttttttttttttttttttttgggtctttgggtggggtatgtaataanaaaaagcctgcaggcttctgaggtaggtagtgggttggaggcaggtgtcctcacccactaaagtgaggactgcnacagtccggcctctgtgccctcctctgnaatggaatggggagtggctaccatacagcctcaagagcatgctgttcaccaagacccttgcnccctnaaaaaaatgccttancaccctggaatgngccatggacaccaatataataaattataatcancgtatgaatatctttttgtaaaacaaacaaattaac

SEQ ID NO: 4301 - DNA, 300 bp, Homo sapiens
  misc_feature 76, 94, 106, 107, 138, 156, 157, 171, 172, 178, 180, 184,195, 196, 200, 205, 209, 212, 230, 231, 235, 236, 242, 244,250, 251, 252, 257, 271, 274, 283, 284, 300: n = A,T,C or G
ccgggcaggtactttttttttttttttttttttttttttttctttttttttttttttttttttttttttttttggngaaaaaaaaaaaaatttnattttaaaaaannaaaaaaaatttaaaagggaaaaaaaaaaaanaaaaattccaaaaaaaannaaattttttcaaannttattnangatnaaaaaaggccnncccnaagtnaatncanttaaaaaaaaacaatttnnaaannaaaaancnggggtnnnaaaanaatttcccaaaaanatnccaaatttnnaaaaaaaaaaaacttn

SEQ ID NO: 4302 - DNA, 144 bp, Homo sapiens
  misc_feature 108, 113, 118, 119, 120, 121, 127, 128, 129, 130, 131, 132: n = A,T,C or G
aggtacctgactcatcaactcatctgtcgcaggtgctcagtcgaaatttgttaaataaatggaggcgcttagttaaagtttgcctttttcttttgtaagcaaaatttnggggnttttnnnngggggnnnnnnaaaaaaaaaaaa

SEQ ID NO: 4303 - DNA, 351 bp, Homo sapiens
ggcatttctcccagggatctctgtgcttccttttgtgcttcctgtgtgtgtggatatttaaaggggctggaaatgtgcaaaaacatgtcactacttagacattatattgtcatcttgctgtttctagtgatgttaattatctccatttcagcagatgtgtggcctcagatggtaaagtcagcagcctttcttatttctcacctggaaatacatacgaccatttgaggagacaaatggcaaggtgtcagcataccctgaacttgagttgagagctacacacaatattattggtttccgagcatcacaaacaccctctctgtttcttcactgggcacagaattttaatactta

SEQ ID NO: 4304 - DNA, 352 bp, Homo sapiens
ccgggcaggtacgtatcatgtagaccgcaggcagtcttaattttgtagctggtctgacaatcttttccttttaattggagttttttcagtccatgctatagtttggatatggtttgtctgtctccatcaaatctcatgttggaatttgatccccagtgtggtggtattgggagctggggcccagagggtggtgtctgggtcatgggcatggatgcctcataaacagattaatgtcctccctgaaggtgagtgagttctcactcttgagataataaattagctctagaggagatgaaagagttcctggaagagtaggttgttataaagccagaccatctcttaggtttccctc

SEQ ID NO: 4305 - DNA, 362 bp, Homo sapiens
  misc_feature 349, 359: n = A,T,C or G
ccgggcaggtactacagaggacatagcagtattaagggataatgaagtcacagcttcagagcctccatcctttctttagcaagttagctctacttgtatctgttctgttttatataatatggttgcatctaactgtttttaaaaaaagttctgttcttcaaaaaaattttaagctatgaaaatcactgattaagtcaaaccctcattttacaaaagaggcaacacaaactcagagcacttatgcctcaccataggtcacaaagccaagtagctccaggccagaaatgggctttaggtcttccgtctgagactggcatttgatgccagtgatttcctccatatttagganaaatgtatanatt

SEQ ID NO: 4306 - DNA, 368 bp, Homo sapiens
  misc_feature 211, 328, 355: n = A,T,C or G
ccgggcaggtaccatacacaaggacatagcacctttgattagaagtatgttcaatacattatttgtgaactacactaaaaataatgatttttttcattaagcaaaatttcttcagagtaaccctgcaaaaacatcccacccagatgaacctggggtttggaaaccatttaaccagttcccctcttctaatggcaaggtggcttctcagtanttgggccaggttttctgtcttgggggtttaagtaaaaaggcatctttttattttggggtaaattccttgcaaccatagtgaatggttgggaagtagttatttttcactactgcccanacaaaaggaaaataaacttttttagtnaatgcttttggaa

SEQ ID NO: 4307 - DNA, 300 bp, Homo sapiens
aggtacatgtttttctacatcaaacaattcttcaactctctgacaaactgggagtagatgaaatcaataaaattctgacactaactcctggagttagtccagaccctaaaggttaaggacttcatcccaggagcctaccccacatcagagatcagccacaaatagggccccaggcaacccaaacttcttcccagctggctaaacaattgtgggagggggtcccaggggccttctcctaggttcataatttcctagaataactcacagaactcacaaagcactttacttataattattggg

SEQ ID NO: 4308 - DNA, 260 bp, Homo sapiens
  misc_feature 18, 82, 100, 132, 135, 145, 186, 202, 205, 227: n = A,T,C or G
aggtaccatttttatctnataatgctgtaaaccatcagtagaagcagtttagatttggactgcatggtaaaatgaaaagtantaaccctccaaccacaanctagtcagggtattaataattatatgtagcanganaacaaagaanaaaatatatattgaaaaaatggagagtccccaacctgtttnatatttgaaggatctnaantgtatttttattaaggaaattnttttttctgaatactgaacttccaaaatgttaa

SEQ ID NO: 4309 - DNA, 140 bp, Homo sapiens
  misc_feature 114, 124: n = A,T,C or G
aggtacttcccataagtttaccttattttttaggaaaaccccattgattttaagtagaattcatgaagttgctttgtagcttggcttcaggatttgtttggttttgttatattnttttctttangatagcaggcacattt

SEQ ID NO: 4310 - DNA, 313 bp, Homo sapiens
  misc_feature 62, 112, 226, 268: n = A,T,C or G
ttgagtagctgggattacaggcgcgtgccactgcgtccggctaatttttgtatttttagtangagatggggtttcaccatgttggccagactgatctcaaactcctgacctnatgtggtccacccgccttggcctcccaaagtgctgggattacaggcgtgagccaccgcgctcagcctacaagcaattttttaaaaactgacacctattactgataaaattctgntgtttaaaatcctatttactattttaaagataacgtattagnttttttttaaaatacaaataattctgttattgataaaattttaag

SEQ ID NO: 4311 - DNA, 308 bp, Homo sapiens
  misc_feature 32, 46, 47, 51, 52, 58, 59, 60, 63, 75, 77, 87, 90, 104,105, 106, 114, 130, 146, 154, 161, 163, 166, 181, 182, 184,199, 220, 226, 227, 228, 232, 233, 234, 235, 236, 239, 250,257, 259, 271, 273, 282, 283, 304: n = A,T,C or G
tcactttagggcgaaacgagccccaccgcggnggcggccgaggttnntttnnggggtnnnaanacccggcccccncnacggaaactngcnctgacacccaggcnnnagggcaanggggcgggcccagccnactgaaacccccgccnccgggggncgagaancnccngccccagccccccanntngcggggacaacaggntcccaccaccacacccggggnaaaaannnggannnnnagnaaagacggggnacaccangnggccaggcgggncncgaaccccnnaccccgggaaccacccacccngggc

SEQ ID NO: 4312 - DNA, 349 bp, Homo sapiens
  misc_feature 43, 56, 102, 190, 253, 287: n = A,T,C or G
atagtagagacagggtttcaccgtgttagccaggatggtctcnatctcctgacctnttgatccgcccacctcggcctcccaaagtgctgggattacaggcgngagccacccatccggcctaacgagacttatttttactcaactagatggcgttcattcatttgcttactcagctgtgccaggaattaanttgggcactgggaattccaaaaccaacaagacattctctgtcatcagggaactcacagcctantttgagagataaacaaatgaacatgaaattatanttcaggtaacaaagaatgagttgttattggcaagagggaatgtgttaagagcttggcagggg

SEQ ID NO: 4313 - DNA, 355 bp, Homo sapiens
  misc_feature 64, 159, 162, 207, 238, 291, 332, 343: n = A,T,C or G
ccgcggtggcggccgaggtacccacctcagggacacgaactccacactatagtgggaaagcttnagggacccctccttttagtgctcagggctcacctatgctactggtccttttggcaaaaaaggaaaatgatagagccagggttgcccctgatgtancanccttactgtggaggggccaaagctggtgttcagagctcacccaangagggaggtgataaggtgtcatgcgttctgntgaacccactggctggtatgaacatgaggcttggggtgagggaaaccaagtanggggttggagaaggagcatcacctttgtaacacctggcttncccattagctngcttttttgccc

SEQ ID NO: 4314 - DNA, 371 bp, Homo sapiens
attggagctccccgcggtggcggccgaggtacacagatctctgcttaattcatttgaatgttcttctgtagtattcatacataatttatgttatcattttcctgttgaagaataggtaggtgttttccagttcttcagtattgcaaacaccactacattgaacatctttgtatccatgtgcaaatattcccgcaacatactgtgctagctgttcggccacatcacctttatgaaattctcacaggaacctgtgaaggctataggtaatttgccacattccacagatgagaaaaaggctaagagagcttacatgtcttgcctgaggtctcacaactcataaatgacggagcctaattggaagtaaagatctg

SEQ ID NO: 4315 - DNA, 330 bp, Homo sapiens
  misc_feature 204, 230: n = A,T,C or G
cgactcctatagggcgaattggagctccccgcggtggcggccgaggtacagctttacccaattgctctttcctgtttgtgttttttgttgttgttgttgatgtttggccactttacacaactcacctccaaacacacactgcatcatcaagggagttgggtcagagcgacattgggacactcactctgctgtgacctaataagngtgatggtgctatacttcagacgcanggaataacttccattttggttcatgccttcacttccagctggttgaatataaactcaatcacaacatcatcttcaaacccaaggatatccgttactcttt

SEQ ID NO: 4316 - DNA, 443 bp, Homo sapiens
  misc_feature 2, 176, 206, 210, 216, 235, 243, 253, 297, 299, 301, 303,305, 322, 334, 344, 348, 357, 361, 405, 408, 412, 413, 415,417, 418, 428: n = A,T,C or G
tngggcgaattggagctccactcgcggtggcggctcgaggtacggtggctctatcttggctcactgcgagctccgcctcccgggttcacgccattctcctgcctcagcctgccgagtggcatgggactgcaggcgcccgccaccacacccggctaatttttttgtatttttagtanagacggggttttcacccttgtttggccagnatgngtctcngatactcctgaacccttcnttgaatancaacactgcnctctgtgctcttcctctaaaagatgcttgcgtaaatttaaccangngncngntgtagactcaactccgntgtccccctggnacccttaagnaatntggaattantttncttataaacgtccaaaattaaataaatggtttttaaaccgtagnggntatnngntnnccctaatttnttggccccaattaat

SEQ ID NO: 4317 - DNA, 490 bp, Homo sapiens
  misc_feature 129, 155, 205, 218, 223, 227, 242, 274, 300, 306, 330, 336,347, 356, 362, 371, 377, 392, 400, 415, 418, 424, 439, 451,467: n = A,T,C or G
aggtactttttttttttttttttttttgaaatttgcttttatttacacgtttgagtcaattacatgcatgttttatttttgaggagtgattagcaaaatgcattaaaattttaaaatagcaattaaatntacaaaaatatagcttacaaaaaaanctgcgaaatgtttaaaaaaatattctgcctgcaaaaatttttaggtggtnacaaaaggacgtnttatnaaanaccctggagggtttnagcaatttcataaaaccctttttttttggagnggaagtttaccatcaaataccctagntgcagngaaaacccccgtagtggtccaaanacttancaagtaccganaaaaaagtntctccncggtttccnctgggnctaattgtattggtncacgaaantacccaagtaggggncgnattagntttaccccaggctanccaccttcttantgaaaggacccaggcntggtcaacccaagaaagggggag

SEQ ID NO: 4318 - DNA, 428 bp, Homo sapiens
  misc_feature 372, 377, 381, 390, 393, 414: n = A,T,C or G
ccgcggtggcggccgcccgggcaggtacttagctaggtgttttctacagtatcttatataattgcatcttacagcatctttacatgcgaaatagtttatcagttatcttcaattgcatattacaaaattctgattaaatttttcttaaataagaaaactatcatttcatatgacaagaaatcctaatttaatgttactccaaggttggttaattcaagtggctcagtgataacaccaaagactcagtttcttgaaatttttttgctctgccatcctccatgtttatcctcacgccagtttcgcctcatggtcccgatatggctactgtaattctgggaaggaaatgctggacagaaccgtgtctggccaaanaagangccngattttttnttngtggtccctttctaaaaggcnaaggggaaagttct

SEQ ID NO: 4319 - DNA, 467 bp, Homo sapiens
  misc_feature 3: n = A,T,C or G
ctncttagggcgaattggagctccccgcggtggcggccgaggtactaacaaatgcagtagccagcaagattaccatgcaatcattaaggagaaccaaagtaagagagccactcaaaccagattttgaacgctactaaaattaaagtagttctttgatgaatatgaatgagtagggaaaggattctttgtaataagtgatacctctgtggtaagagaagggtggtatgtgagttttagtctacagattatggcaaattcagtgacaacaatcaaatggtctaagattgacagtagcacagttttactctgtgaaggtagtgttcaggacaaatttcaagaaaactagaaaaccattctttacagctgaaatctttccctaaccattgttatttccacttttaagtcctcaagagatgagaaaagggaggtaaggcttccttatacatttcctgcacaatgaaacattt

SEQ ID NO: 4320 - DNA, 412 bp, Homo sapiens
ccgcggtggcggccgcccgggcaggtacccagaaaaccaaaatgagcttaaacattttgaaagatgtcaacaaagttatgcccttggaaataagtttggtttatgtaagagcattgttcctttaatgtaaagacacaataagtttggctcgcattgtaaaagtttgaaatctcatttaggttttgtaatccagagtagaagatatgcaggaaaagattctgatgcatttggtggatatgggagatcatgcctccatatcaagcgtgacaaaactcttactggagttaaataccatagatgtgttaaacccagcagccctaaatcacagctcaatgacctacaaaaaatttgtgcaggagggaaaccacatgaatgcagtgtgtgcgggagaagccttctccaggaaagcaca

SEQ ID NO: 4321 - DNA, 461 bp, Homo sapiens
atcactacttagggcgaattggagctccccgcggtggcggccgcccgggcaggtacattactcatgaatggtttagcaccatccccttggtgataagtgagttcttactctgagttcacacaagatctagttgtttaaaagaaccgtggcacctcctccctctgtgtcatgggaggaacccagttggaggtagctgagtaatgggggcagttatccccatgctgttcctgtgatagtgaatgaagttctcatgatatcttgatggttttataaaggggcatttccccctttgcttggcacttctccttcctgctgtcatgtaaagaagaatgtgttttgcttccccttgcatcataattgtaagtttcctgaggcctccccagccattgctgaactgtgagtcaattaaacctctttttcctttataaaattaccccaagtatttcaggccagttctttat

SEQ ID NO: 4322 - DNA, 227 bp, Homo sapiens
  misc_feature 61, 75, 215: n = A,T,C or G
caccgcggtggcggccgaggtacaattcagtggcctaagtaaattcacagtgttgacgcanccatcactactctncatctctagaatcctaaacagaaactctatacccatttaaacaactccccatccctcctctccccaagccctgggtaaagctttttgtaaacacttatttgtcttctatatatttgcctattattaggcaccttttatantaaaaatgggaa

SEQ ID NO: 4323 - DNA, 333 bp, Homo sapiens
  misc_feature 21, 23, 24, 31, 40, 41, 60, 76, 86, 299: n = A,T,C or G
gctccccgcggtggcggccgncnngcccggnactttgcannatgatgcacccttgcacanaaatgcttttctttanatcccttcanacagaaattgtggtcaaaaccattgagatggaagtcctgcaggtgttttccaagctccactggctttctcaggtcgaatgcagtgccttgcactggggcaacttctcctgtaggaatcagggtttcatccacaggcaaataagtatccgcttctatggttgacttcatggtcatttatatttggggaagcctggcctgccaggttgaagtaanaatggttggtcaggttgactggtgtggcctgact

SEQ ID NO: 4324 - DNA, 439 bp, Homo sapiens
  misc_feature 26: n = A,T,C or G
cactacttagggcgaattggagctcnccgcggtggcggccgaggtacagtagtgcactcttggctcactgtagcctcgacctccggggctcaagtgatcctcctgccttagccccacaagtagtgggactataggcacacagcaccatgcccatctaagtttttgtattttatgtagagacaaggtttcaccatgttgcccaggctgatcttgagctcctgagctcaagtgatctgcccaccttggactcccaaaatgctgggattataggcgtaaaccaccatgcctggccttaaatcaactttagagtcaacatctcttatcactggagcttctggaagaaaactccatcaccgtgggtgctctctttccttgatgtgtttgtgcccaaatagcttgttctcatcagaatgacttattttgctatgatatatatact

SEQ ID NO: 4325 - DNA, 441 bp, Homo sapiens
  misc_feature 7, 16: n = A,T,C or G
atcactncttagggcnattggagctccccgcggtggcggccgaggtactccatgttggttggtagtattttaaatctgaagcattttcagagtctaaggcaattcagactgcacagctgtcaactcaggagtcccattaaactgactctaaaaattcctaaaagaaggcatgatttattataagcaaatggctaacctggcttttttggtaatagaattttaaatgaaaataaaattatacaagatacacattgtttggatttttaaaaactctattaaatgtttaagtggttgtgaatatgaggaataattaaatgttaaccccagctgattagtgaacatataagaaaatggggggaactgatcccaaaagatcttctcttctaaggagaacttcacttgaggggcaaacactagaagatacaattgttattgtaaaac

SEQ ID NO: 4326 - DNA, 310 bp, Homo sapiens
  misc_feature 7, 46, 54, 57, 86, 88, 99, 106, 116, 132, 134, 137, 141,167, 175, 184, 207, 210, 214, 215, 230, 231, 248, 250, 284: n = A,T,C or G
tacactnctatagggcgaattggagctccccgcggtggcggccgangtacctgnaanatgcatgaggtgtttgtgagctgcatcantnttgcatcattngcatctntcgaacaatngcctttgggatccatngngangacntctgtctttattggaggaaagataantccttgancaactccgnttttattattctcatgtctgacnatncatnngtgttctttgtccanngacttttctggcaccgngnaccacctaaattatcatgtactgtgtcgaatagncttcaatgggcgttcccctcctggga

SEQ ID NO: 4327 - DNA, 396 bp, Homo sapiens
  misc_feature 334, 381, 384, 388: n = A,T,C or G
ctatagggcgaattggagctccccgcggtggcggccgaggtacagtagtgcactcttggctcactgtagcctcgacctccggggctcaagtgatcctcctgccttagccccacaagtagtgggactataggcacacagcaccatgcccatctaagtttttgtattttatgtagagacaaggtttcaccatgttgcccaggctgatcttgagctcctgagctcaagtgatctgcccaccttggactcccaaaatgctgggattataggcgtaaaccaccatgcctggccttaaatcaactttagagtcaacatctcttatcacttggaagctttntgggaagaaaactcccatcaacgtgggtggcttctctttttcctgantgntgtntgggggcc

SEQ ID NO: 4328 - DNA, 431 bp, Homo sapiens
tcactacttagggcgaattggagctccccgcggtggcggccgaggtaccaaaattcattcaagaagaaatagataccagcctgagcaacatggcaaaatcccatctctacaaaacatcaaaaaaaaaaaaaaattagtcgggcatggtggtgcacacctgtaatcccagcttgtcaggaggctgaagtgggaggatcacctgagcccagggaggtcaaggatgcagtgagccatggtctcaccactgcactctagcctgggtgacaggaatgagaccccgtctcaaaaaaaaagaagaagtagataatctgaatagccctatatctatagaaacttaatagtgctgggagatataggtattattatcctcattttacagatgtgaaaattgagggcctcagagaagtaaaagtctattgcttcaaggtcat

SEQ ID NO: 4329 - DNA, 396 bp, Homo sapiens
  misc_feature 382: n = A,T,C or G
ttagggcgaattggagctccccgcggtggcggccgaggtacattgaaagattttactgtgaatagttgacgaaaattggttaagtccattaagacatgcttcctgcccctcacaactcacccacgctgttctagtctctccgtaagtgtcaattctgaaggtcacaacttccataacttccatatcttctcagtattacatttcaagatgaatatattgtgctttactctggcaacatgtcttccataagatgagaatacacatcataatgtagaatccgtggaaactctgagcttatttttctgcaactagatggtctcatctggggggcaaagtgagacagtgacagatcatcaggcattaagtttctcatattgaaagncacacaacctagaa

SEQ ID NO: 4330 - DNA, 397 bp, Homo sapiens
  misc_feature 378: n = A,T,C or G
aggtacagccatccttgtcttcaagcactttgagaacattttagccattgatgtttacatgtggcacccacccatgcaagataggtttctgtatttatacattaaaataccaaaaaaaaaagtatgaaatgccttcaaaaatgttcaaagcttgagagaaaagcttttttcattagtcaaggtgttttgatatggtattaaaataatatctaacaaaatgaaaaaaaaattctcttttctccatgaatgctgacactggggagaatggcaattttaggctgtcaagagcatactaaataagtaaaatatctaggaaatgcaatccgacttgccacgggattatgaaaaattactggctttcagtcactttttggcttnttttcatactggccagaaa

SEQ ID NO: 4331 - DNA, 403 bp, Homo sapiens
  misc_feature 21, 171, 323, 344, 384: n = A,T,C or G
tatagggcgaattggagctcnccgcggtggcggccgcccgggcaggtacgatcttggctcactgcaacctctccctcccgggttcaagtgattctcgtgcctcagcctcttgagtagctgggattacaggcgcgtgccactgcgtccggctaatttttgtatttttagtanagatggggtttcaccatgttggccaggctgatctcaaactcctgacctcatgtggtccacccaccttggcctcccaaagtgctgggattacaggcgtgagccacccgcgctcagcctacaagcaatttttttaaaaaactggcacctattantgataaaattctctgtttaanaatcctatttaactattttttaaaagataaagctatttangtttttttttttaaaaata

SEQ ID NO: 4332 - DNA, 427 bp, Homo sapiens
  misc_feature 406: n = A,T,C or G
tagggcgaattggagctccccgcggtggcggccgaggtacctagaattgtgtatggaaggaggagtagcaatgactagatttaaacctagaaatacaagcaggaacctggctgtaaaaggctacactttatctaagagacagtgagatattaagatgtagagtgtatctgtttgtaaaaggtttaaacaggtgagagtttatctcatgtaataggaagtccaggacattggaaaaggaagtggcgtaagcagtccaaagctctaagcagctcaacaatgtcgtcatcgacccaagctctttctctctttctacttcatcatccttagcatgtagcttttattgtctttgtcataaaatggctgctacattgccattgactcaagttttcattccaggcaggaaganggagagagaacaaagggttaa

SEQ ID NO: 4333 - DNA, 432 bp, Homo sapiens
  misc_feature 41, 430: n = A,T,C or G
ctatagggcgattggagctccccgcgggggccggccggggnccccccctctaagccactagtaatcaagtgttttaaaaagtagttaaaaaaaaaaaaaagggaaagctcaaattaacataatcaaaatgtttttaaaataaatctatgtaatgagaggtgaccagcaagcctgtatctatgccagagtgtggtagaagagaagaaggcactctcactgaattttataagtatactgaagtcacctaacctcttagtagacatggctcttgccaaagaataccacggaaagagctcttctcttccatgacatcctcaccatatcctgttcttaggtcactgccaaccaataaagcaaagctcccagcaagttgacaaaaagaaagggggaggtctgggggaaaaggggaggagacgaagggacaagagcnga

SEQ ID NO: 4334 - DNA, 412 bp, Homo sapiens
  misc_feature 11, 23, 28, 31, 288, 292, 380: n = A,T,C or G
ccgcgggtggncgggccgagggnccttnatnaggtataccatgctggtataaagagattcttgcctccaaagggactcagaatatttcagggaacctgtattagtccatttttacactgttgtaaagacactaccccacactgggtaatttacaaagggaaggtgtttaattaattcacagttctgcatcgctggggaggcctcaggaaacttacagtcatggtggaaggcaagacagaagcaggcaccttttttcacaaggtggcaggagagagaagtgagtgcccngaanaaaaaaaaaaaaacccacctactcttaaaaccatcagatctcctaagaaattcactcactatcatgaggataacatgaagtaaacttnttcgacacatggccgattacaggtccctctgt

SEQ ID NO: 4335 - DNA, 233 bp, Homo sapiens
  misc_feature 13, 15, 16, 23, 25, 33, 43, 54, 60, 61, 65, 68, 75, 82, 102,103, 124, 129, 167, 168, 183, 195: n = A,T,C or G
ccgggcaggtacncnntgctcanangtcccagnacccgatggnatgacctttgncctgannttgnatngactccntttacgngcttctcttcccctcagganncctctatcccatatgggccantccanggatggtgaggggggctatagcccgattggaaatgggnnctgatgaatatgaanagatggaagaanaggatgaggaggaagaggaggaagacgaggatgatgat

SEQ ID NO: 4336 - DNA, 145 bp, Homo sapiens
  misc_feature 36, 50, 51, 65, 77, 83, 84, 95, 102, 107, 111, 115, 116,118, 123, 125: n = A,T,C or G
ccgcggtggcggccgaggtacaaaagcctgacgatntggtcttgaggggnnatcctaaggctgtnagaccgaaattnaaacannccttaccagtngatctgngtttntaanacanntntattnancaggaccatgctgattatac

SEQ ID NO: 4337 - DNA, 423 bp, Homo sapiens
ccgcggtggcggccgcccgggcaggtacactagacctagagctctgggaacaagtgggaagaaatcttaaacgacgtgcgcaagggcagtaggtcccagtaacatcttaatgttatggtcctaatagggttgctttggccctgctcttcatagaagagcccaaaaaagataaggggaagaggaaccactacccactttaatgcctcagcctccctcagccttgccgtcactggctaaagataccaaagaggagacggaggttttcctccccctccccccaatgaactgggaagaagacaagcgatatactacagttatgggaccctgccttaggcaagcagcattggaaggggaactcttggcctgcccagtgatgccaagatcaacaaggcaattgggtgcatgagcccatttacattgaaa

SEQ ID NO: 4338 - DNA, 191 bp, Homo sapiens
  misc_feature 92, 95, 96, 100, 103, 115, 122, 136, 139, 145, 151, 157,160, 161, 169, 170, 173, 183: n = A,T,C or G
ccgcggtggcggccgaggtacttttttttttttttttttttttatttttttttttttttttttttttttttttttttttttttttttttttnggnnagcnagngatttattaaancaagacnttgaaacctttacnttntgcagngaaaancagggngtnnttgaaaanncanggggaaaccnggatgaaa

SEQ ID NO: 4339 - DNA, 426 bp, Homo sapiens
  misc_feature 365, 401, 419: n = A,T,C or G
cactacttagggcgaattggagctccccgcggtggcggccgaggtacttcatttaatttttgcctcttacagtctgatatcctgttgggcattctggacaacttggacccagtcatgttcttcaaatgcccttccccagagcctgccagcctggaggagctcccagaggtctacccagaaggacccagttccttaccagcctccctttctctgtcagtggggacgtcatcagccaagctggaagccattaatgaactaattcgttttgaccacatatataccaagcccctagtcttagagataccctctgagacagagagccaaggctaatggtgggtagtgaaaaatcgagggaagcacccttntcagccccctcaggagaatggatcaccccctggaanttcattggtcttcaagtngaaaggg

SEQ ID NO: 4340 - DNA, 419 bp, Homo sapiens
  misc_feature 298, 395, 398, 406: n = A,T,C or G
cgactacttagggcgaattggagctccccgcggtggcggccgaggtacttttttttttttttttttttttttttggtcttcatggtatcacatcaccaggtcttatataacttgaacctgtattcatgcaacacttttcttactggattcccaaactctttatatctttctccactccatattacaaattaattttctatgacacaatttttttaaatcaaaacttcaatttcactctcttttactcagtatttaaacctcaaactacagcaactggtaattttaacacctttcctanaaagtcctaacaaatcttacctcccacatgggaaggagggccaacctgttaaactcactgtcccaagaatcccgcgtacctgcccgggcggccgctntanaactaggntgggatcccccgg

SEQ ID NO: 4341 - DNA, 413 bp, Homo sapiens
  misc_feature 76, 375: n = A,T,C or G
ttagggcgaattggagctccccgcggtggcggccgccccgggcagggtacttttttttttttccttttatcatctngatgatgaacttaatgtttccatttgtattaatggaatactaagtccctctgtgatttctgaaccaagctattcctaggcctgagttttattttgttgacacagaaataaattagaaggccaagcgtggtggcatgtgcctgtagtcctagttgctgaggtaagaggattgcttgagcccaggagttcaaggctgcagcaagctttgattgcgccactgcactccagccttggcgacagactaagacgctgtctcaaaaaaaaaacaaaaaccgaccaaaaataaaaccaataaccagnaaaaaaataaacctaaagggcaatggacagtcccctgg

SEQ ID NO: 4342 - DNA, 425 bp, Homo sapiens
  misc_feature 3, 359, 401: n = A,T,C or G
ctnctatagggcgaattggagctccccgcggtggcggccgaggtacagtccacaacacaacccctaagatcctttgtcactattcgactaatccttattatattcttatttttcatatattcaaaaggaatatttgacaatgaaacgtctaatatttatagaatattctctggaatcctttctataataattatgcaaaaccattataaaattatatatacaggcaagggtaattactcaaatctaaagtgccatcacacatttaaaaagccctgacaattactatgacattccagatcataagatgcttcacaatttaagacatgggtagggatgtgaagaagtgaatccatggaaantaaaaaaaataacttatcacctggatggcttttttacccacntttcactgcatttccattaaaaat

SEQ ID NO: 4343 - DNA, 436 bp, Homo sapiens
  misc_feature 351, 357, 413: n = A,T,C or G
ttagggcgaattggagctccccgcggtggcggccgcccgggcaggtacacgcacgtagcagttcatacatatctgatatgctttcacaccaggattcagtaaacaacaataaatataatttcccctcttcaaaacaaaaaatggatttatacggaaaaagggttaatttacttggggtttatcagcacaccatttttaatgtgctttgaaagaattaaaaaccatgaaactgtattcactgaataccggtccatagattatattttttctttaaacgaggcttaaatacatacatcatgactttctattaagaatccttaaatctatgggggatgttgttggtagtataangactantattaaaaaattttttcctccatttaaaccaattttcaatttaaaatttaaaaaanaaaaaaaatcttggaccattttt

SEQ ID NO: 4344 - DNA, 428 bp, Homo sapiens
  misc_feature 2: n = A,T,C or G
tnctatagggcgaattggagctccccgcggtggcggccgaggtactttttatttaaatgtttataaggcagatctatgagaatgatagaaaacatggtgtgtaatttgatagcaatattttggagattacagagttttagtaattaccaattacacagttaaaaagaagataatatattccaagcagatacaaaatatctaatgaaagatcaaggcaggaaaatgagtataactaattgacaatggaaaatcaattttaatgtgaattgcgcattatcctttaaaagctttcaaaagaaagaattattgcagtctagttaattcagaacagtgttaaatggtatcagggataaaagaaacctggaaggggccagaaaaggaatttaatttttcactttcattgtaaccacacccccaggattttacca

SEQ ID NO: 4345 - DNA, 251 bp, Homo sapiens
  misc_feature 1, 26: n = A,T,C or G
nctactatagggcgaattggagctcnccgcggtggcggccgaggtacgcggggacctcattcatttctaccggtctctagtagtgcagcttcggctggtgtcatcggtgtccttcctccgctgccgcccccgcaaggcttcgccgtcatcgaggccatttccagcgacttgtcgcacgcttttctatatacttcgttccccgccaaccgcaaccattgacgccatgtcgggttattcgagtgaccgagacc

SEQ ID NO: 4346 - DNA, 381 bp, Homo sapiens
  misc_feature 124, 126, 127, 129, 130, 134, 135, 136, 139, 140, 141, 142,143, 144, 146, 147, 150, 156, 159, 160, 163, 167, 168, 181,183, 184, 185, 186, 187, 189, 190, 193, 195, 204, 205, 206,208, 210, 218, 219, 223, 226, 227, 228, 229, 230, 231: n = A,T,C or G
  misc_feature 238, 240, 244, 250, 264, 265, 271, 272, 281, 283, 298, 302,308, 314, 315, 317, 322, 325, 330, 339, 346, 347, 353, 358,359, 362, 367, 375: n = A,T,C or G
ccgcggtggcggccgaggtactttttttttttttttttttttttttttcttttttttttttttttttttttttttttttttttttttttttttttttttttttttttttttttttttttttttngnngnngggnnnggnnnnnntnnaantggganggnnaangggnncatttaaaaaaangnnnnngnnggnanaaaaaaaannntngnaaaaaaanntttntannnnnnaaaaaancngggncttttnccccccaaaaaaannaaaccnnccaaaaagncnaaatttaaaaaaaancccngggccnaaaaanngnccctnccnaaaantttttcccnggaaaannaaaaangggannccnttttnaacccccncccccc

SEQ ID NO: 4347 - DNA, 417 bp, Homo sapiens
  misc_feature 47, 63, 89, 132, 150, 180, 200, 205, 212, 220, 221, 222,223, 228, 229, 230, 232, 237, 247, 255, 259, 261, 264, 275,277, 285, 286, 287, 291, 305, 314, 317, 332, 337, 339, 340,342, 350, 360, 366, 371, 381, 382, 402: n = A,T,C or G
acttagggcgaattggagctccccgcggtggcggccgaggtactttntttttttttttttttnttttttttagcctttgatctctttgnctcatacttcattcagaatgatttacagagaaaatagaggatntcagatggaactttactnaaactcctcctgccacatttgcacaccttnccttcttttaaaattgcttncctgntgagatntttaaccnnnntttgnnnanagggnttttaccctnagaaaaanaacntnganccccaccctgngnagccagcnnntagntaaagctttctacntaaataggnctntctatatcctttctncccanannangttttccnaaacccctancctctntcccnaccaaagggnnttttcttttcccccaccgcnaggcctttttttaat

SEQ ID NO: 4348 - DNA, 441 bp, Homo sapiens
  misc_feature 101, 107, 122, 124, 126, 132, 136, 139, 144, 159, 161, 170,173, 214, 230, 233, 247, 252, 292, 300, 315, 317, 328, 336,354, 355, 367, 394, 398, 399, 412, 421, 422, 424, 429, 434,439: n = A,T,C or G
cttagggcgaattggagctccccgcggtggcggccgaggtactttttttttttttttttttttttttttctttttttttttttttttttttttttttttcnggcaanaacttttaataaaanananacgganaggngancaaanccagcatataaaaangngtctgaaanaanctttttttaaaaaaagtttcaaaaagggtttataaaattgngttacaaacatgctanctnttccacaaaaaagngtccnttttttacccggacatgcaacttgactacatttcccagtnttccttgnagttaggggcagtcntntgacaaagttntggccaanggaatggggccaaaaggnntgaggccttttnaaaactggccccataagcccctcccantcannagccttaattctnatccatggnntntccgngaaanggggnaa

SEQ ID NO: 4349 - DNA, 440 bp, Homo sapiens
  misc_feature 1: n = A,T,C or G
nctatagggcgaattggagctccccgcggtggcggccgaggtacgtcttcattaaaaacaggtgaagaatttgaacaaacatttgcaaactaaaatacaaatgaaatacactcaacaccattaaacaagaaaataaaattatgagatattcactaataatcactacatatgcaccacagtgattaaaaattttttttaagttaagccacgtgacccaacaaggtgcattcactcaagagaaacgcaaatatatgtccactcaaagacttgcacatgaatgttgagagcaggtttatactgaatagcgcaatgtgaaaaaaccccaaaatctagcaaaggatgaagggagaaataaactgtggtatatacatacaatagaacactactcaataataaaaaggattatattcctgatacatgcaatatggggtgaacccgta

SEQ ID NO: 4350 - DNA, 452 bp, Homo sapiens
  misc_feature 372, 401, 405, 416, 420: n = A,T,C or G
tatagggcgaattggagctccccgcggtggcggccgggatcattggcagactcgtgtcttaagagccgagctccccgaaaaagaaattcttagcccttttaagggcttacaactctaaggggtctacatgaaaaagtcataatagatcaagtaagcgtgagaaacatgactgggggctacatacatcagctaacagaacaaaaagttttacagtattttctcatacagtgtctggaatttacaggataaacaccaaatagttttgggtcaaggggttaataatatttatttattatttttagccaccaggggccagggtgggtgggtgccaaggtccgtcttaagctattttaatccttaactttctggttnctttttccaacttttttggctttttcttncccntttttctcccntggntcctttattaaaacttaaggggaaaaaaaggg

SEQ ID NO: 4351 - DNA, 415 bp, Homo sapiens
  misc_feature 30: n = A,T,C or G
ccgcggtggcggccgcccgggaggtaccangatcatgaagtcaaaaagggtgaagtccagtttgaaccaggcagcctaagtccagacacatggcatttggccagtcctctccctgcatccaacctgccctctcaaatccttgtcactcaggccgatgcccctgctcactgtgcccttccttttgggggttccttgtagaccacagctagaccagtgggtgccacaatcactgtgtcaagtatagaaagggcagctgagatcacatcaaagattccagaaagaattggcacaggatcattcgggatgcatctctcccttgcccctgttcctggctttccttacagctctcgacttcctcaaaggagtcataaattcggaatttggcttctcttcctgttgaggaagctggaaactg

SEQ ID NO: 4352 - DNA, 428 bp, Homo sapiens
  misc_feature 160, 194, 322: n = A,T,C or G
acttagggcgaattggagctccccgcggtggcggccgcccgggcaggtactttttttttttttttttttttttttgcaaaattaacacaaagctaataagctgaatacacaatgcaaagcatcctaaatcttgggcaataacaaaatctaagatcctaanatcatgatatttaaggtaggaaaaaagtaattanactagaactggggcgcgggtgggctcacgcctgtaatcaatcccagcactttgggaggcagagatgggtggatcacctgacgtcgggagtttgagaccagcctgaccaacatggagaaaccccatctntactaaaactacaaaattagccgggcgtggtgccacatgcctgtaatcctagctactccggaggctaaggcaggagaattgcttgaacccaggaggtgaaggttgt

SEQ ID NO: 4353 - DNA, 437 bp, Homo sapiens
gactacttagggcgaattggagctccccgcggtggcggccgaggtacttagggtaagcattaacaatattattcaaaatgttatatagagttcaactgtatacaatagagcatttattaaagtgtgtccaaagcgcttataaataaagcatcttcgaggcaggcggctcacttgaggttaggaggaaagcagactgggccaacatggtgaaaccccgtctctgtggtcccagctacttaggaggctaaggtgggaggatcacttgaggacaagaagttgaggctgcagtgagccaagtgtttgtgcaattgctctccagcctgggtgacagagtgagactctcaggaagccgcagtgttagttgcctctgatttttgacaagcatgggaagatggggggctgttcatacagggcaagcttcaagtgtccagtcaaat

SEQ ID NO: 4354 - DNA, 429 bp, Homo sapiens
  misc_feature 413: n = A,T,C or G
gactacttagggcgaattggagctccccgcggtggcggccgaggtacatgaattcctacaggagctagccagctggttctctatccctgggaaattcccaagtcaccaccgatagctttgccctaggtcatgaggacagaggggttcccaacagtttggtggtcagcagattgtcagaggggtgaagggagcagaagcagcattcccacctttttttgaacggagtcttgctctgttgcccaggctggggtgcagtggcatgatcttggcccactgcaacttccacctccccggatcaagcagttctcctgcctcagcctcccaagtagctgggaatacaggcgtgccccaccatgccctgtaatggctttgtatgtttactggagacgggggtttcaccacgttggccaggnctggtttctaactcct

SEQ ID NO: 4355 - DNA, 420 bp, Homo sapiens
  misc_feature 352, 360, 370: n = A,T,C or G
ctacttagggcgaattggagctccccgcggtggcggccgcccgggcaggtacgcgggggatcgcttcctggtcctcgcctcctccgctgtctccctggagttcttgcaagtcggccaggatgtctcagtgtagacccttgtctgagaccgagctatgtggggcgacctctggctcctcccgcctgcctctgccaatccgggcactgggacaagaggctgagtttgataaaagctgcaaaggaggttaggcaccttaagaccaagccatcggatgaggagatgctgttcatctatggccactacaaacaagcaactgtgggcgacataaatacagaaaccggcccgggatgtntggacttncaccgggcanagggccaaagctggggatggccctgggaatggagccttgaaaagggggac

SEQ ID NO: 4356 - DNA, 432 bp, Homo sapiens
  misc_feature 195, 217, 262, 327, 343, 350, 351, 382, 390: n = A,T,C or G
ctacttagggcgaattggagctccccgcggtggcggccgaggtacttgggaggctgaggcaggaaaattcttgaacccaggagacggaagttgcagtgagctgagatcacaccactgcactccagcctggtgacagagcaagactccggctcttaaaaaaaaaaaaaaaaaaaaaaaaagagagagagaagagantaaaatagaaaaagaatgtggntgggaattgtgaatcaaaagattataccccccaattgtttttcantccccttttctcaaataataaattagttaaatcagtttctgagttatgccactggcttgatgaanagttgagaaggttctntttgcannaaatgatctttttttgtttcgtttttgttgnctggcttnctgcgattttaaaaaatttaaaaaggatttgggtttttgaag

SEQ ID NO: 4357 - DNA, 408 bp, Homo sapiens
  misc_feature 2, 16, 24, 36, 365, 373, 386: n = A,T,C or G
gncggccgcccggccngggtgganaaggacagctgnttttttatatagattaaaagaaatctcaatcttcaaagtttctatttactgtaacagtagatggtttcaaagaagcacttggccgggcacggtggctcacacctgtaatcccagcactctgggaggctgaggcaggcggatcatgaaagttaggaagtttagaagaccagccctggccaaccatgggtggaaaccctcgcctcttactaaaaatacaaaaaaattaagccaagtgtgggtgggtgcatgcctgtaatcccaccctactcgggaaggctgaggcaggaagaaattgctttgaatccaggaaggccggaaggtttgcaagntgaagccngaagaatcattgnccactgccacttcttaagcccc

SEQ ID NO: 4358 - DNA, 397 bp, Homo sapiens
  misc_feature 22, 349, 368: n = A,T,C or G
cgcggtgggcgggccgcccggncagggtacaggcccatatttgtttactttttctgtagctcatatatctattattactggtggtttcttagtggaaatttttctttcactctcactttggctttacctccaagtgctttcttctcttggctgcaattgagcactataatttgtggctttccggagggggagccttggtggtcaggtggaggaggcaggccacattccaaaagtggagtggtaggtgttccagacagagtgctgattcaagagtgagtaggggtgtagggtgaaaagttggctactaaattcaagcctcacctggaggccagtgtttgcctcaaacagnaaaaaggtgcccctcctcntaaattaagcctgcccccccatattgccg

SEQ ID NO: 4359 - DNA, 178 bp, Homo sapiens
ctacttagggcgaattggagctccccgcggtggcggccgaggtaccaaggcaatgtaacttttgattttcggtcaatttaagttcttttgtcaccaaatattaataaacagttttgacttcaaaaaaaaaaaaaaaaaaaagaaaaaaaaaaaaaaaaaaaaaaaaaaaaaagtccct

SEQ ID NO: 4360 - DNA, 433 bp, Homo sapiens
  misc_feature 365: n = A,T,C or G
ctacttagggcgaattggagctccccgcggtggcggccgaggtacgcggggagaggtgagagtcgcgcccgggagtccgccgcctgcgccaggatggagttcgtgaaatgccttggccaccccgaagagttctacaacctggtgcgcttccggatcgggggcaagcggaaggtgatgcccaagatggaccaggactcgctcagcagcagcctgaaaacttgctacaagtatctcaatcagaccagtcgcagtttcgcagctgttatccaggcgctggatggggaaatgcgcaaccgcagtgtgcatattttatctggttctccgagctctgggacacactgggaagatgacattgacccatcagntgttgggaaaaagaaagggtcccggctgtttacaacaaaccttttcacctctttttcctttttaccca

SEQ ID NO: 4361 - DNA, 392 bp, Homo sapiens
  misc_feature 11, 15, 16, 267, 294, 328, 371: n = A,T,C or G
gcggccgaggncctnnattttttttttttttttttttttattagaggtggggtttcaccatgttggccaggctggtctcgaactcctgacctcaaatgatccacagccatgagtcactgcgcctggcctaaaagaactaaatcttgtagtaggaagttgtatgtaattacactgctatattacctacagctttgtgtatgtgatctgatctttctttgcagggcaaatgcaagaaaataggagacaaaggacaaggtagagcaaatnttcaagcacacagaaataatgtggggnagtaaaaagctgaaactacaggccagggagttanggggggggccaaaaaatcaaaagcctgtcctggccattggatncaaccttgggattagggttga

SEQ ID NO: 4362 - DNA, 357 bp, Homo sapiens
  misc_feature 2, 32, 45, 105, 209, 268, 307, 318, 321: n = A,T,C or G
tncttagggcgaattggagctcccgcggtggncgggccgcccggncgggtactctataaatctagtgggaaacatttctgcacaaactagattctggacaccagngtgcggaaatgcttctgctacatttttagggtttgtctacattttttgggctctggataaggaattaaaggagtgcagcaataactgcactgtctaaaagtttngcgcttattttctttgtaaaatttgaaatattgcatattggaaattttttgttttaatngatcctatgaaatggtttttttcttaaaaattttaacanaaagccttttngtnaaaatttagaatttttttccttttaaataaaaaaat

SEQ ID NO: 4363 - DNA, 424 bp, Homo sapiens
  misc_feature 250, 275, 279, 349, 354, 364, 398, 409: n = A,T,C or G
ccgcggtgggcgggccgagggtaccagtaattgagtaatggtggaaatgtgaaagtcagtcacaggactctcattggtgccagtgtcatagttaagaaagaaagaaagaaagttttatatatcctgtaatctagactggaagctaaataattgctaggaagcaaacttaagtgatagctgttaagtttttttggtttgtttttgaccagagatgatgaagttaggtgatcttttcttggtttgctcctanactcttccattttaacttatatttntagnttggtgcaaaagttaattgctgtttggggaccatgaaattttaagccattaataactagggttcacacanaatgnttttatttanattaaaaaatagggaaacccattttaccaaattnaaaccaccatnttttggcccaattgg

SEQ ID NO: 4364 - DNA, 434 bp, Homo sapiens
  misc_feature 385, 395, 404, 425: n = A,T,C or G
tacttagggcgaattggagctccccgcggtggcggccgcccgggcaggtaccaccacacccagctaattttttaaatttagtagagacggagttttgtcatgttggccaggcaggtctcgaactcctggcctcaagtgatccacctgccttggcctcccaaagtgttgggattacaggcgtcaagccaccacgaccagctaacaaccatattcctaacacatatgctactaggactgtgtggattttataactacatcattaaaattcatcttgcctttggggagcttacaatttaatggaaatactgaattaaaaataacacacatattacaccatgtgaaaaacagcttctaacaccaagccacgggtaaaagatggtaatgncagcttaagnaatgggagnccctatggaaaaacatttttnaaattttat

SEQ ID NO: 4365 - DNA, 436 bp, Homo sapiens
  misc_feature 360: n = A,T,C or G
ttagggcgaattgagctccccgcgggggcggccgaggtactgctagtaaaaccaatgaatgtttaactccttcataagcaaaattatttttatgtgatctctaagaaattcctcctttcacatttttctgttttcatacaggtcctcatgctgataccgccagtggatgccagaatttgcagtgtggttttcgaagcctgctgcccgctctgggcgaatgacccttgacttctggatcttttgtctacttcatttagctgagcaggctttctttcatgcactttactcatagcacatttcttgtgttaaccatccctttttgagccgtggacttgttttgggccccatttctttacaacnttcaggaaaattcttaattttaccaggtgaaattgtaaatggttggttttctcttgcaaaattatacttttttggg

SEQ ID NO: 4366 - DNA, 448 bp, Homo sapiens
  misc_feature 53, 385, 399: n = A,T,C or G
ctactatagggcgaattggagctcaccggcgggtgggcgggccgagggtacgnaaactcccccattatattaggaaaataaataaaaggttaccataagtaagctccagaaaaacaacatattgccgacctcacggatttttaccaaccactcgctttccctgtggccttggcacactggcatgctggtctaggatcctctacgcacaacgcctgctcgcctcctccgtgtggttgccaagccaagccgcctgctaccttcatcaccaaattgcactcgctccttcctggaatcctttttcctagattcaccaccaaatcgttagccgctccttccttcttcctagctttccttcaccaaaatcgcacttggcctccctgggacntctttttccttatnctttcacccaccgaaacctggctggctttggcttcggctttgcttcctt

SEQ ID NO: 4367 - DNA, 436 bp, Homo sapiens
  misc_feature 5: n = A,T,C or G
cactncttagggcgaattggagctccccgcggtggcggccgaggtacaaagagtagctgccccttctcagggcagatgatgctttgagaacatactttggccattacccccagctttgaggaaaatgggctttggatgattattttatgttttagggacccccaacctcaggcaattcctacctcttcacctgaccctgccccacttgccataaaacttagctaagttttgttttgtttttcagcgttaatgtaaaggggcagcagtgccaaaatataatcagagataaagcttaggtcaaagttcatagagttcccatgaaactatatggactggccacaccaggatctttttgtattttaaagggatttctggagaatttttggcttggagccaagggatttaggataaagggcttgttttcttttaaaatggt

SEQ ID NO: 4368 - DNA, 399 bp, Homo sapiens
  misc_feature 3, 222, 241, 267, 269, 321, 331, 336, 386, 399: n = A,T,C or G
ctncttagggcgaattggagctccccgcggtggcggccgaggtacttttttttttttttttttttttttttttttataatcaaatttttttttatttttctacagcaaaataaaaacattattttaaaaagcaatattctacattaaatacattaagatattgacaattttataaatacaatcattttaaacagtaaacatgataaatttctgatacaaggntttacataccgttaattgngaaaatgtaaaaactttacacacttntnttaaaaagcattcaacgtaatcaattttacaaaattatcaatttaaaaaggngttaggatanggctnctattttgttccatttattaagggcaaatggattaggcatattcaggatnctttaaaaaaagn

SEQ ID NO: 4369 - DNA, 310 bp, Homo sapiens
  misc_feature 16, 41, 47, 89, 99, 123, 168, 171, 196, 205, 210, 221, 230,232, 240, 245, 253, 256, 284, 290: n = A,T,C or G
gcgggccgaggacctncattttctttttttttttttttttnattttnttttttttttttttttgggcaaaattttttattatgaagatncagatctaanaacagaaggataattatgtgctancttatatatagttccttgtaaaaataatgatacatgaaaaatttngtngaaaatggaaaatctggcagctatntgatatctnaaaangttaagcaatntcccctgcntntttagctntaatngacttttncangaataatcaagcatatttgggttgaagnagagtntttaaatgcatttccatttt

SEQ ID NO: 4370 - DNA, 421 bp, Homo sapiens
  misc_feature 8, 26, 46, 352, 373, 388, 411: n = A,T,C or G
atagggcnattggagctccccgcggnggcggccgcccggccaggtncttactgtgctaggtgctggaaacacgaagatgaagagccagagcctttgcttttcagaagctcatggtctgttggagcaatagacttgaagaatgtgatgaggagggtattaattaaaagttgtaagccaggcgtggtggctcacacctgtaatcccagcaccctgggaggccgaggcgggcagatgacgaggtcaggagatcgagaccatcctggctaacacagtgaaaccccatctctactaaaaaatacaaaaaattaaccaggcgtagttggcgggtgccctgtaggtccctagctatttnggggaggcttgaaggccaggnagaaatgggtggtgnaaccccaggtagggaggattcgncgcccacttg

SEQ ID NO: 4371 - DNA, 387 bp, Homo sapiens
  misc_feature 16, 32, 292, 322: n = A,T,C or G
ggggcggccgcccggncaggtccaatagcctntgatgctaacatgtagcaaaagtgcctgaaggcaaaggcgaagttaatttctaagtatttgtattttattattattattattttttttattgagacagagcttcgctttgttgcccaggctggagtgcagtgggcacaatcttggctcactgcaacctctgccacctgggtccaagcaattctcccacctcagcctcccgagtagctgggactacaggcaccctccatcgtgcccagctaatttttgtatctttagtagnagaccggggttttgccattgttggccaggnctggttctcgaaacttcctgaccctcaaggtggattccaccctacccttcgggccttcccaaaag

SEQ ID NO: 4372 - DNA, 425 bp, Homo sapiens
  misc_feature 57: n = A,T,C or G
actacttagggcgaattggagctccccgcggtggcgggccgaggtacaaaacagccngggcaagggtgggcgcacacctgtagccccagttactcaagggtcttgaggtggaagatccctcaagcccaagaggtcaaggctgcagtgagtcatgatcacgccatgccatggcactccagcctgggcaagacagtgagaccccgcctcaaaataaagtaaaatataaaataaaaacagcaagtgggaactcagcattcaagttaacttgtagagctacccagctgctaagagcagtgtgatccttggtgctcttaggatcactttggtatctgctcattttcctttttgtctaccctataaagcacaaaatcgaggtgggtaaaaaggtatgaaaaccaggcactgtttctactttcttaagaggt

SEQ ID NO: 4373 - DNA, 397 bp, Homo sapiens
  misc_feature 37: n = A,T,C or G
gtggcgggccgagggtactgtgggagtatattttatntatagaactataatatatagtaacaatagcacaaagcatggaaaggggtaatcgaaatatactacagtaaagttctgacattttacatgaaatgtagaatattatttgactatagactataagttaaagatatatattgtaaaccctaaagccacaactaaatatttaaaataaagatgtatagctaataagggaataattactatgcaatagattaataaaaaattctcactctgaaagagaaaaaaagaagaaaagaacaaacagagcaaatagaaaacaaatagccaagatggtaggtttaaacccaacattattggataattaccatttaaagggctggaatattccaatttaaag

SEQ ID NO: 4374 - DNA, 718 bp, Homo sapiens
  misc_feature 67, 104, 120, 123, 125, 126, 140, 142, 146, 152, 167, 180,186, 197, 204, 208, 224, 229, 240, 247, 251, 253, 260, 265,277, 279, 281, 304, 308, 313, 335, 341, 342, 344, 358, 365,376, 386, 389, 397, 401, 419, 420, 424, 427, 448, 450: n = A,T,C or G
  misc_feature 454, 457, 492, 502, 505, 510, 513, 515, 523, 529, 534, 547,560, 581, 584, 589, 591, 600, 602, 632, 640, 645, 649, 650,652, 654, 662, 663, 683, 695, 696, 700, 703, 706, 707, 709: n = A,T,C or G
cgcggtggcgggcccgaggtacaaaaaaggaaccaatataaattttcacatgaaacccttggctgtnagttgcctttcctagcctccactcttaaggcctaagncattcttcaaaagacngtntnntcccataatgcctngntctntacatntacttttttcagctncaatgtcaacccngtttcnttaccccaaanacattcnttgngccttggggccaattnccttntaccaaaatgnggaagtntctngnaaaggcnttggnttttcacttacncntnaaaaaaaccaaaaatactccttngganccatnttttatcattttatcttggccnccacannanagttcccaaaattnaacctanaattccccttnttgtcggganaantattgtantttnttaattcccttggcccannttanaanaaatttttcttttaaccaagngngaanganaaaaaattaaattggcaaatttccaacaaaaaccncccttttgcnaantattnttntnttaaaaanaacccnccttncctttatcttttnacctttccttttnttggaaacccaaaacaaaaanccnttttncnccttttttnanaaaaaaaaaagacgggaaaaatttaacctnccaagggnaattnacanntnantttaaagnnggcttattaaaaattaaacntcccccttttcnncaantcnttnncnaaaaggggg

SEQ ID NO: 4375 - DNA, 438 bp, Homo sapiens
  misc_feature 2, 419: n = A,T,C or G
cnctacttagggcaattggagctccccgcggtggcggccgcccgggcaggtaccttcattgcgatcaaaccagatggggtccagcggggtcttgtgggagagattatcaagcgttttgagcagaaaggattccgccttgttggtctgaaattcatgcaagcttccgaagatcttctcaaggaacactacgttgacctgaaggaccgtccattctttgccggcctggtgaaatacatgcactcagggccggtagttgccatggtctgggaggggctgaatgtggtgaagacgggcccgagtcatgctcggggagaccaaccctgcagactccaagccctgggaccatcccgtgggagactttctgccataccaaagtttgggcaagggaaccatttattacatgggccaggtggatttcntggtgggaagaagttgcca

SEQ ID NO: 4376 - DNA, 395 bp, Homo sapiens
  misc_feature 58, 123, 178, 198, 243, 278, 317, 325, 326, 344, 357, 374: n = A,T,C or G
ccgcggtggcggccgaggtacttttttttttttttttttttttttttttttttagtanacacggggtttcaccgtgttagtcaggatggtctcgatctcctgaccttgcgatctgcccgcctnggcctcccaaagtgttgggattacaggcgtgagccaccgtgcccagccccacctnaattttataatataattttntacacagagaacacagaaaatagttgtcttttgtttacaataganaatcaacgtttttttttttactacttatagtttanaactaaagtttcagcttcacaactattggtgatgctatntaaatgtnntcaaattactgaatttgngaaaacctctcangttttctttcacattgntgagttacaaggaagatttat

SEQ ID NO: 4377 - DNA, 399 bp, Homo sapiens
  misc_feature 232: n = A,T,C or G
ctacttagggcgaattggagctccccgcggtggcggccgaggtacgcgggggctggaatgctgaggagacaggagtgaagtaaaaagacatggttccggcaggaaacaggcaaggagagccttgacttgacggagtctggctatatcgccaggctggaatgcaatggcgcgatctctccccactgcaacctccgcctcccgggttcaagcgattctcctgcctcagcacctngagtagctgggactacaggcgcgcgccaccacgcccagtaagaggaaataactctacattcaaatttgagcagggcacttggtgacctacttagacatgacattccttggcctccctttcagcaaggatgagaaaactgaggcacagagaggtgaaaataaggcccc

SEQ ID NO: 4378 - DNA, 405 bp, Homo sapiens
  misc_feature 322, 330, 335, 363, 369, 387, 393: n = A,T,C or G
gcggcccgaggtacttgtatggggctgtcactgacttgacatgctgctgcagttccttggtcaactgatccttgtcatgggacaggaactgtggggtcaggacaataaaggccttcaccacccagaggcattaatgatgtcatcactcctccccaggaaacaaatgtagccctcttcatccatctttcctcttgtccccagtgttgtagaagtccccacattccactttagctgtcttctctgggtcaccctcatagcacatgaagaggctcacaggcctgacaggtttgattctgatgccaatgttttccttctgtgttanggtgggcnaaggnatgcctggccccttgttcatcaaaatgnacctgngaccgttcataaggggtngggagntgggccctttcc

SEQ ID NO: 4379 - DNA, 180 bp, Homo sapiens
  misc_feature 21, 32, 70, 75, 78, 92, 115, 129, 158, 168: n = A,T,C or G
ccgcggtggcggccgcccggncaggtacaganaaccatgggctgagccttacttttcagccacaaaatanaaatnctntcattaaatcttanaatctgagttggcagataacctngtctaatacccttntaactaaaactattccacaagaattcctnaatcaactgncctctgttttaa

SEQ ID NO: 4380 - DNA, 374 bp, Homo sapiens
  misc_feature 196, 230, 249, 296, 302, 327, 330, 336: n = A,T,C or G
ccgcggtggcggccgcccgggcaggtaccatgctgacttcttggtatcttttaaggcctaattttcccttccttgagattactgtagtgtgttccagctaatttctatttggaaacgagttggaacagctgaaaactaggtattattgaaggcaaagcagcctcacgtcagttttttatcagctcatttgggaagnccttttttttttttttttttttttaattaattanaaagtaggctgggcacggnggctcatgcctataatcccagcacttggggaggccgaggatctcctntctggnggatcacttgagggcaggagttaanaanaccatnctggccaacatgatgaaaccctgtctctacctaaaaaa

SEQ ID NO: 4381 - DNA, 146 bp, Homo sapiens
  misc_feature 44, 46, 50, 69, 113, 118, 121, 138: n = A,T,C or G
cttagggcgaattggagctccccgcggtggcggccgaggtactntntttntttttttttttttttttgnggcttttatcctgtctgggtgttctctgagcttcctgaatctgnggttncgngtcacatattaatttanaaaaatct

SEQ ID NO: 4382 - DNA, 161 bp, Homo sapiens
  misc_feature 6, 51, 52, 53, 56, 63, 65, 91, 134: n = A,T,C or G
cgactnctatagggcgaattggagctccccgcggtggcggccgaggtactnnnttnttttttntnttttttctgccaaaggcaacatgttntaatgtacatatctttctttaacatctggtaaggcaagttctncattatatcacggccttggaatcttta

SEQ ID NO: 4383 - DNA, 414 bp, Homo sapiens
  misc_feature 2, 60, 284, 288, 379, 385, 390, 395, 414: n = A,T,C or G
angtacatgggactacaggcacgccccaccatgcccagctcatttttgtatttttagtanagacagggtttcaccatgttggccaggatgatcttgatctcttgacctcatgatccgcccgtcttggcctcccaaagtgctgggatcacaggcgtgagccaccacacctggccctctatttattctctttaaagagagagaaaactatgagaggccaaaattatttaattaaatctttaccttagcacaagggaaaaaaatggaattttgcctaatatagggtngatngaagcatacacaatgaatagaaacaatcacaatttttaattaaaaagggccaaaaaaatttttggaagaacctttaattaaggccttattnttgggntaagnctttnattttttttttgggggttn

SEQ ID NO: 4384 - DNA, 138 bp, Homo sapiens
  misc_feature 1, 44, 53, 92: n = A,T,C or G
nctatagggcgaattggagctccccgcggtggcggccgcccggncaggtacangatctgggaactaaatattaaaaatgacgtgtggctggntatatggagaatgttgggcccagaaggaaccgtatagatcagatat

SEQ ID NO: 4385 - DNA, 386 bp, Homo sapiens
  misc_feature 333, 365: n = A,T,C or G
cttagggcgaattggagctccccgcggtggcggccgcccgggcaggtactatagattatttgtcttgaagaagagctttgatatgtttcaaaattcgacgttggctttggaaggaaactgtaaatttacagatctttgtccttccccacaaagagccttaatctcacaggttggattatgtggaactcactgctatttttcaggttctcctttaagtgactaagggaacatccagatactttcaaaaaaaaaaaagtctaagttttttcactttgtccattgccatttaaattatcttctgcatattttaaagcatttcctgtgaacataagnattgcccatccagaaaaatttgcgtcctacanttgattttatgtttaaatgga

SEQ ID NO: 4386 - DNA, 326 bp, Homo sapiens
  misc_feature 191, 194, 196, 199, 201, 203, 223: n = A,T,C or G
tagggcgattggagctccccgcggtggcggccgaggtacgcggggacatactcattgcctactttaacacctgtcagagaaacgtgatatggggtaaggaggtgcttttttaaaatcgttcatagacttctgtaaaatgcaagataaattaaagttattataacagtgattctttcaaaataaaaaaatangananaancntnaaaaaaaaaaaacaaattanaaaaaaaaaaaaaaaaaaaaaaaaaaaaaaaaaaaaaaaaaaaaaaaaaaaaaaaaaaaaaaaaaaaaaaaaaaaaaaaaaaaaaaaaaaaaaaaaaaaaaaa

SEQ ID NO: 4387 - DNA, 439 bp, Homo sapiens
  misc_feature 44: n = A,T,C or G
cgactacttagggcgaattggagctccccgcggtggcggccgangtactgtgtaacacatggcctttcagtaagaaaagcgttgatggcattgcctggcagaaggaagtagagagcagaggcttaggggctgtgtgccagatggcattttgggagaaggagaacatctcacttctttgaaggcttgagatctcaggtccaaaggagactgagtgtgtgggaggagtggtagctactgaccaggaagttgttgctggctgcacttccctcctgatagggaatcctggattgcctacagaggggtctgaggcaattgtatctggtttggggttctaccaagttgaagctggagatttgtaaaagcttgtcatctattgatcgttggtccttgtacttaagtaatccaaagctcgatcctgatctgcatggaattagtatca

SEQ ID NO: 4388 - DNA, 404 bp, Homo sapiens
  misc_feature 367: n = A,T,C or G
agcccgtatcactacttagggcgaattggagctccccgcggtggcggccgaggtactttttttttttttttttttttttttgtttttcatttccctggggacactaagtgatgcctcttcggattatctgaaaatgtgggcactctgtatggcaagatggaactggctgtctttaaggaaatagtttcaactgttcatgcctctgtttctcccttcataaagttggttactgagcctgcattctaaagtgcctgttgtggccgggcatggtccctgtaatcccagcactttgagaggccaaagtgggcagatcacttgaggtcaggagttcgagaccagcctggccaacatagtgaaaccccgtctntactaaaaatacaaaaaattaactgggcatggtggcc

SEQ ID NO: 4389 - DNA, 408 bp, Homo sapiens
ccgcggtggcggccgaggtacaaataaatgttaagacatgatccctgttgaaatccaaaagataaaaagcccttaagttttcttattttatattataaatggacaaggcagcaaatggtattaaggatacttttggtaagagaatagtttttatcagagcaggctgcaggtagaatatttctcaattactatttacagctgagtaacttttttcctatggacataaaaatatacactctgcaaatgattttttaatgaaaaatgacagcctattttctgcaacttggttttttacataataatcatggacatacatctaagaattgcatatgtagatctcctgttttgatgatcaccctagaaattctgttttgttgggttgtgcctttaattggacccaatggtctt

SEQ ID NO: 4390 - DNA, 431 bp, Homo sapiens
  misc_feature 28, 35, 41, 91, 108, 113, 117, 118, 119, 123, 138, 146, 149,151, 158, 159, 171, 175, 176, 189, 195, 197, 200, 202, 203,206, 209, 211, 212, 218, 220, 222, 223, 230, 231, 234, 235,237, 238, 239, 240, 241, 246, 247, 248, 256, 257: n = A,T,C or G
  misc_feature 258, 262, 266, 282, 283, 284, 285, 288, 289, 290, 291, 299,304, 312, 321, 332, 340, 344, 345, 358, 380, 381, 382, 385,402, 403, 407, 409, 412, 413, 415, 417, 418, 419: n = A,T,C or G
aagtactttttttttttttttttttttnttttttntttttntttttttttttttttttttttttttttttttttttttttttttttttttnttttttttttttttttnaaaantttnnntttnggttaaaaaaaaatnaaaaaaanaangntaaaatnnaaaaaaaaaaanaccnntaaaaaaaaaaanaacaananccngnngcncanannaaaaangngnnccccccnnccnngnnnnnccccnnnaaaaaaannngacncccnaaaaaaaaaaaaaacnnnnccnnnnaaggaagngaacncccaaccnagagggggnggccccccccnaaaaaagngggnncccccccctgaanaaaaaactaattcccccccccnnnggngaaaaaaggaaaaacannacgngnccnnanannnaaaaaaaaaaaa

SEQ ID NO: 4391 - DNA, 410 bp, Homo sapiens
  misc_feature 363: n = A,T,C or G
ccgcggtggcggccgcccgggcaggtacacatatactaagctgtaaatagtctgccttccattagtttggtctctaagcactataaatatgtcgacttcatatcagtctatgagacccagtgacccccttttcagaggcatcggtaatacatttggcaaatgtcttgaaaacatgaattgtaaattaacataggtagaaccttgataataagagtcccaaatatgtatttttaaaaatgttaacattaggaaaaaaatattataatcatcagctctatttcctgaaaaagttcagttgaggtaacctctgcaagtcacagctccacatttacatactgttctggaccctctttttggctgggnctgtgggtcaataggaattctggaagatatatctccaggaacccttt

SEQ ID NO: 4392 - DNA, 456 bp, Homo sapiens
  misc_feature 454: n = A,T,C or G
agcccgtatcactcctatagggcgaattggagctccccgcggtggcggccgcccgggcaggtacataacatcaaaaactactgtgtgaaacttgagaatgtctgattaaagatttcaatgtatatctaaaaactaactcaaatcgttgaccagcactttcccagtatcataacaatgcggctgaccctcttctgccttcactttacaccccatcatagcacattatttgtgcacaactagtgaggtctgtgcggctcatcatccccataaccaagtcggtctgtgttgagtcatatcattctgtgctggttttagaagtcaccataggaaacatgaagtcacatcctggtcaaaaaactgtccatttctcaaaaacagagaaaaacctgagataccgaggcagcaacctagcgacacttacagggaaggggaaaggaacaatgacaacaccccncc

SEQ ID NO: 4393 - DNA, 380 bp, Homo sapiens
  misc_feature 148, 150, 165, 293: n = A,T,C or G
aggtacctggaagtgggatgttctgaaaagatatctgaaaatgtggaaacgactttggaactgggtaataggcagaggttggaacagttttgagggctcagaaaaagacaggaaaatgtggaaaagcttggaactttctagagacttngntagaaatggcttttngccaaaaatgctgataaatgatatggacaataagacccaggctgacgtggtctccgatggagctgaggaacttactgggaactggagcaaaggtgactcttgttatgttttagcaaagcgactggcancattttgcccctgccctagagatgtgtggaactttgaacttgagagagatgatttatggtatcctggcagaagaaaattttctaagc

SEQ ID NO: 4394 - DNA, 420 bp, Homo sapiens
  misc_feature 188, 403: n = A,T,C or G
tacttagggcgaattggagctccccgcggtggcggccgcccgggcaggtacaccatttcattaataattactatgttgataacatgttgaaatataacattttggatatattagattaagtaaaatgtgttcttaaatttcacctgcctgtttcctttttattctttttttttttgaggcggagtttncgcttttaatcacccaggctgggagttgcagcggcgcgatctcggctcactgcaacctccgtctcctgggttcaagcgattctcttgcctcagcctcccaagtagctggaattacaagcatgtgccaccatgcccgtctaatttttgtattttaactggagaccggggtttcaccaccatgttggccaggctggtctcaaactcctgacctcagnatgatccgcccgcctca

SEQ ID NO: 4395 - DNA, 376 bp, Homo sapiens
  misc_feature 93, 115, 208, 240, 246, 258, 323, 336, 346: n = A,T,C or G
gtactttttttttttttttttttttttttttttgaggcggagtttcacctgaccttaggtgatctgcccaccttggcctcccaaagtgctganattacaggcgtaagccactgcncctggcctcaattctttttaaattctttttaatgtaaaacaatagaattaggaatccaaaaaagaataaagaaaactggactgacataacaangacaggaagaaaacaaacagaatgcataattntcagtntaaaagatggcntaaaatcaaatgtagcagttattacaaaagaagagtcaaattcccctactaaaaggtaaaaactntagagttaaaagnacaaaagctnttttgagacaattgtaccttgcccgggcgg

SEQ ID NO: 4396 - DNA, 360 bp, Homo sapiens
  misc_feature 175, 185, 193, 194, 198, 242, 243, 258, 260, 262, 267, 268,275, 300, 303, 305, 313, 318, 319, 328, 332, 334, 339, 345,347, 349: n = A,T,C or G
aggtacttttttttttttttttttttttttaagggaaaacatcttttttattattattatttttatttatttatttagagacaggttcttgttctgttgcctgggctagagtgcagtggtgcaatcctaattcactgtggcctcaaatttcctgggcttaaaaggggaatccttnccttgccccnccaacccnntttngaaggttaaggaataagggaaacttatctagggggcaaccaacnncctcaactcaattancncntgggnnataaaantttctatgtctcttaattatttctntantntctcccgnttaanncaaacaacngtgnanggggnttcccnangnccccaaaagtt

SEQ ID NO: 4397 - DNA, 527 bp, Homo sapiens
  misc_feature 462, 480: n = A,T,C or G
ccgggcaggtacttagcttttatcaaatatataagtatttgataaaatactcacgtaagttacaggaaacacttccgcatatgttgtataatcaaggtcactgtctactttgtaattcagtgactattaagttcccaatgagaaaatgaaagaattgctgggttcctactttctgataagaacagttccttgatttccccttttttcttggttgtcaggaagctccacagaaaagtctgtctaatcacagcaaccgtaataattatcatggcttagaaattcatttcttcattctaagatcataattttctattttcattttataaaccagattgttatttgaagcagcttcaaatctgtttgaaaaagagctgctaagatgatgcaatgtctgtgctgaaccaaaaagatattaactaaattttacaaagcaagcttttactgaataccagctaagtgatntattaaataaaacaaatnaaaagattaaccttggacttgccaatctagtcatctttttaaaaaac

SEQ ID NO: 4398 - DNA, 397 bp, Homo sapiens
  misc_feature 139, 153, 154, 159, 170, 173, 176, 181, 188, 191, 201, 205,209, 210, 237, 244, 254, 264, 265, 270, 277, 288, 289, 291,308, 310, 314, 347, 352, 367, 381, 388: n = A,T,C or G
ccgggcaggacaatatggattgggatttcgattctctcatacctgtgaggcaatcagttcaggtcagtttttaaaccctgagttgttataatcagaagttctctacagttttaattggaagtttgggatatggcatacntttaaaagattaanncattnggcttggaaanttnaanttttnagtagantgncaaacctttncaanaagnngggaattaggaggttttccaaaacttnggggttnttccggttcntttgggaagnnagccnatatacnttaaataaagnncncccggttctttggccangnaagnctccacgttaattttcaccccttaagctttccncaatnaagcacggaaaattnctttaaacgtaacncccaccnttttttctt

SEQ ID NO: 4399 - DNA, 366 bp, Homo sapiens
  misc_feature 19, 97, 107, 120, 129, 146, 151, 164, 169, 171, 185, 193,209, 212, 223, 273, 278, 281, 300, 307, 309, 313, 322, 327,336, 341, 355: n = A,T,C or G
ttttttttttttttggccngggatgatccacaatttaacaagtttaattacatatcaagttttgttatcaagttctatacactttacaatcaattanatgttaattnttttatagaaatnttatatcanaatcaagttattggctntcctncaaatttccctgncccananaactcctagctttncaacttantaactgtgtaacgcanaantcactttaaanctctggcatccaaatttcctacaaggttgctataaggatcaaacaagaanatgtngtnaaagcaaatgaagcacccntgccttncntttnttaaagaantcaanaaaaagctnaattnatgtcctttcttcnctctaaagaag

SEQ ID NO: 4400 - DNA, 822 bp, Homo sapiens
  misc_feature 623, 665, 685, 705, 724, 737, 747, 757, 760, 775, 798, 806,810: n = A,T,C or G
ccgggcaggtacgcggggacagctgtgtttggctgcagggccaagagcgctgtcaagaagacccacacgcccccctccagcagctgaattcctgcagctcagcagccgccgccagagcaggacgaaccgcaatcgcaaggcacctctgagaacttcaggtaggagaaaagcaaactccctccaacctcttacttcgggcttaaggcagagaactcgcctccccagaatctcctccctccatgatcccccgctattcctctattttcttttccgcggacctgcagccttgggtcgaccctgccctaggggtgactgcaggagagcagggaggatggtcaggcgtcaccaacaaccccatcacccagtaacaagaaccttgactctctcagtccctctgcatcaagacacttacccatttcccacctcatgcctgctaacttgaatgaaacaatcgctgggaaagcattaagagaattaaggctgggcactgtggctcatgcctgtaatcccagcactttgtgaggctgaggcaggcaaataacttgagcccaggagttttgagaaccagcctgggcaaacatggcaaaaccctgctcttccaaaaaaataccaaaaattagctnggcgtgctggtgtgccctgtattccagctactttggaagctnaaggtgggaaggatgctttnacctggggaggcgaaggctnccagggagccaaaactganccattgcacccangctggggganagagcagaanctntttttaaaatgaatngaaagggagggagaaagagagangaaagggngggnggaaaaaaaaaa

SEQ ID NO: 4401 - DNA, 561 bp, Homo sapiens
  misc_feature 7, 60, 128, 151, 155, 158, 194, 212, 219, 222, 235, 247,248, 251, 252, 257, 258, 270, 272, 278, 285, 292, 311, 318,319, 359, 362, 363, 367, 375, 377, 412, 427, 436, 437, 438,451, 466, 495, 497, 499, 500, 505, 518, 539, 542, 544: n = A,T,C or G
aggtacnatgtgggaagacctttagatttggtttctaccttactgaacaccagagaattnacactggtgaaaagccctattaatgtaacagaatgtggaaggcctttattcgtagagggaatcttaangaacatcctgacaattccatttntggnttnaaaaacccctatgtacttgtaaaggaaatgctgggnaagttcccttttagttcnggccgtngcngccatctttcacntggaaccatccnnaannaaaannccattaccgtgngntgttanacaaacncattacnaaaaattggtaaaacaagnaaaatgnntgtgagtaaagtgccccctatcttaagattccggttaggntgnntatntaaccccntntaaaacaaagtcacccatttccacataaggaaaantttcccaataaaccntggggattnnnaagtaaaacaacncctctttaattgganggcttggttaaaaaccaaaattgttcggngngnnaaagnggccccctttttnaagcaacctttttaaaaattntcncnaccaaccccctttttaa

SEQ ID NO: 4402 - DNA, 526 bp, Homo sapiens
ggcgaattggagctccccgcggtgggcggccgaggtaccccagctgatgatgttccacaaaagagcaaaacatacacaatctggttccactctacagaaatcctggaactggactacaaagggaatagacagggtgtggcaggagggggttcctcacggttggagtgcgaggtagggacaggaatagaaggtaggtaataaacattcatgtggtattaacttagggcagatgtgtcaatgtatttccaagtttagcataatataggtataaaaattaaataaaaagtttatatgtgtgtgtatatatgggttaatacacaacacatacctcctagagtcattacctgagaggttctacaaagaaaagacagcaaattaacaaaaaatacacccagaatcaaagatttgagttttggttcctttcatagcagaatggtatgcaacatttcttggaaaaatggctaatcctagggcttggaaagagaatataggagtaaagtctacaatttctcatggtacctgcccg

SEQ ID NO: 4403 - DNA, 410 bp, Homo sapiens
  misc_feature 396: n = A,T,C or G
tatagggcgaattggagctccccgcggtggcggccgaggtacgcgggggctcagtttgggcttggatggtaacgtttattttccttggcagagaagctgatcgtcgaagggcatctaaccaaagcggtagaagaaacaaagctttcaaaagaaaatcagacaagaagcaaaaagaatctgatttttcaaatactctgagtccaagcaaggaaaaaagcagtgacgacactacagacgcccaaatggatgagcaagacctaaatgagcctcttgccaaagtgtcccttttaaaagatgacttgcagggtgcacagtcagaaattgaggcaaagcaagaaatacggcatcttcgaaaggaatttgatcgaagcccagggagctagctagaaacaagtnaaacaaaaaatgct

SEQ ID NO: 4404 - DNA, 519 bp, Homo sapiens
  misc_feature 125, 495: n = A,T,C or G
cctatagggcgaattggagctccccgcggtggcggcccgcccgggcaggtacgcggggatatgaggggttccgtgactgaggttctgagctgctgttgatgtgctatacctccttcaattctcanctctcaaaggggaaaacaactgcagaggatgggaaatgctatactgcatgcctggaaacacccacaggaaaattaccagttttgagcttgctcaactgcaagaaaaactgaaggagacagaagcagccatggaaaaattaatcaacagagtgggacctaatggtgagagagcacagactgtgacttctgaccaagagaaacggttgctacatcagctccgagaaatcaccagggtcatgaaagaaggaaaattcattgacagattttctccagagaaagaagctgaggaggccccttacatggaggactgggaaggttaccctgaagagacttacccaatttatgacctttcagactgtatcaagcgtangcaagaaacaatcttggtggatta

SEQ ID NO: 4405 - DNA, 357 bp, Homo sapiens
  misc_feature 156, 157: n = A,T,C or G
ccgcggtggcggccgaggtacgtgaatgtttgcctagaagtcctgttccctatataataatactttgataatcatttcaaatgccaacccttccttaatataaaagttttgcgttatgttaaataaactatttttttctttattcttttcttttannctttatcttcaagccaggatgaagggagactgggcaagactcttacgccccacactgcaatttggtcttgttgccgtatccatttatgtgggcctttctcgagtttctgattataaacaccactggagcgatgtgttgactggactcattcaggggagctctggttgcaatattaagttgtaaggtataccagggtcaaa

SEQ ID NO: 4406 - DNA, 389 bp, Homo sapiens
ccgcggtggcggccgaggtactggcatcaacaagataaggtttccatggagctgccataatttttctataacgctgcccctaggccagaattggttggtctacaggtagatacctgatccaaactatgacaaccacaatattccagcccttgacaatgattgactcttccaggacgggcacttaactcaagctaggccaatcatagtcatttctcaactagatcctgccccactggtcatagctaattggtgcaggactggaactggatgcaagctgactctctggattgagaactagaggtcagaccattccctgtcccatgtctgaaactgaaatatgcagcactggaaaactgctcatgctcatggccattggggatcagccttcc

SEQ ID NO: 4407 - DNA, 414 bp, Homo sapiens
  misc_feature 363, 407: n = A,T,C or G
actacttagggcgaattggagctccccgcggtggcggccgaggtaccatttgcctcccgggctcaagcgattctcctgcctcagcctcccaagtagctgggattacaggcacctgccaccatgcccggctaatttttgtaattttagtagagacagggtttcaccatgttgcccaggctggtttcgaacttcctgacctcaggtgatccacccgcctcggcctcccaaagtgctgggattacaggcttgagcccccgcgcccagccatcaaaatgctttttatttctgcatatgttgaatactttttacaatttaaaaaatgatctgttttgaaggcaaaattgcaaatcttgaaatttaagnaagggcaaaaaatgtaaaagggagtcaaaaactataaatcaagntattttg

SEQ ID NO: 4408 - DNA, 327 bp, Homo sapiens
  misc_feature 117, 119, 120, 123, 128, 134, 138, 142, 153, 154, 169, 183,186, 187, 194, 197, 201, 209, 211, 213, 215, 216, 219, 221,224, 225, 227, 229, 235, 239, 244, 245, 249, 253, 255, 259,261, 264, 267, 270, 271, 272, 277, 278, 279, 284, 285: n = A,T,C or G
  misc_feature 287, 299, 302, 305, 307, 313, 314, 316, 321: n = A,T,C or G
cctatacactacttagggcgaattggagctccccgcggtggcggccgaggtacttttttcttttttttttttttttttttttttttttttttttttttttttttttttttttttttnannggnaagcnaccctnaaanaggngtagccccggnnggaacccggggcccnaagggccttcaaanggnnaaaaaanaangggncccgcaantnanannaantntcnnancnagctgngttnttaanngacncacnanccgngnganccnccnnnaaaannngcccnngnacctgcccgggnggncgntntaaaannangggancccccg

SEQ ID NO: 4409 - DNA, 444 bp, Homo sapiens
  misc_feature 79, 81, 84, 86, 182, 212, 266, 295, 296, 319, 356, 363, 370,372, 389, 401, 409, 420, 435: n = A,T,C or G
ctatagggcgaattggagctccccgcggtggcggccgcccgggcaggtacttttttttttttttttttttttttttttnanaananatggggtttcgccatgttggtcaggctggtcttgaactcctgaccttgtgatctgcctgccttggcctcccaaagtgctgggattacaggcgttangccaccgcacccagcctatcatttcttaantgggtaacaagaggcaagtcatccaaaaagacaatgacactactgttgtcatanaggaatagtaaaaccacagaaaatgtaanngtgctccaattcctctgagtcancatttaaagaggaatttttaagggtcatcaagggacntgtgggntataaancntgaaaacatattggcantttgaactgggnggaaaaanaaaaggaaaangcccatatattgccncaaaccatt

SEQ ID NO: 4410 - DNA, 440 bp, Homo sapiens
  misc_feature 4, 367, 438: n = A,T,C or G
actnctatagggcgaattggagctccccgcggtggcggccgaggtactatcaataaaattggctgcttgggcggttttagttaccaccttagcctggttttctgctactgttatttatcatcgtaggttctgagttgctcattgtggttgctctttggaccaataaaaatggcaagtatgagatgaacatgataaaagtatgtttatataacaggaagaagctgggcgcggtgctcatacctgtaatcccagcactttgggaggctgagttgggtggatcaccgaggtcaggagttcgagaccagcctgaccaacatggtgaaactaaaaattcaaaaattagctggggcgtggggtgggtggcgtngtctgtaatcccagctacttgggggagggctgaggcagggaagaattcacttggaccccaaggaggggggngg

SEQ ID NO: 4411 - DNA, 301 bp, Homo sapiens
  misc_feature 51, 95, 148, 159, 185, 194, 215, 216, 234, 271, 291: n = A,T,C or G
ctatagggcgaattggagctccccgcggtggcggccgcccgggcaggtacnggtgggaagcagaagcaatgaatcagaaaggagcagagcaccanaagtagacaggaagggtaggtgtcctctgtgtgtaggcagacgaaaaactagnaggaacaaganataagcgttaagggagagtgacctcnggggcccanggagggcaggggtcacgggannagtattggagctgcacancctgctgcttctgctgatcttagattctgaaagttgnagaagaggggagagacgcantgactgggga

SEQ ID NO: 4412 - DNA, 399 bp, Homo sapiens
  misc_feature 334, 380: n = A,T,C or G
ccgcggtggcggccgcccgggcaggtacagtgcaatgctttcatctgatatgccagtgtggtaagaaggctttccctggaggtagagactcttttatcagaaggttgggggtctccagaaggttttccccaccaggaattggatttgatggctggaatttagagcctacacatttgggtctcacaatcagggcagggcaggtaaggctaatggtgcaaactgtgtctctgcacaggcagtcatctaggggaaggggtgtggtgcagccagtaaaacctggaacctgcaagtggttcagaactttggtggccagtaagggaaaaactcctcaagncatgctacaatattgaaaaggttcaaaaaggcacctgaccaaagtngtttgtttttgccccccgg

SEQ ID NO: 4413 - DNA, 410 bp, Homo sapiens
ccgcggtggcggccgaggtacagtagtgcactcttggctcactgtagcctcgacctccggggctcaagtgatcctcctgccttagccccacaagtagtgggactataggcacacagcaccatgcccatctaagtttttgtattttatgtagagacaaggttttcaccatgttgcccaaggcttgatcttgagctcctgagctcaagtgatctgcccaccttggactcccaaaatgctgggattataggcgtaaaccaccatgcctggccttaaatcaactttagagtcaacatctcttatcactggagcttctggagaaactccatcacgttggtgctctctttcctgatggtgttgtgcccaaataggcttgtttctcatcaagggtgaactttattttgctatggata

SEQ ID NO: 4414 - DNA, 442 bp, Homo sapiens
tacttagggcgaattggagctccccgcggtggcggccgaggtacgatcttggctcactgcaacctctccctcccgggttcaagtgattctcgtgcctcagcctcttgagtagctgggattacaggcgcgtgccactgcgtccggctaatttttgtatttttagtagagatggggtttcaccatgttggccaggctgatctcaaactcctgacctcatgtggtccacccaccttggcctcccaaagtgctgggattacaggcgtgagccaccgcgctcagcctacaagcaattttttaaaaactgacacctattactgataaaattctctgtttaaaatcctatttactattttaaagaataaagtattagttttttttttaaatacaataatttctgttattggataaaaattttaagggcattttttcattggccttttgc

SEQ ID NO: 4415 - DNA, 439 bp, Homo sapiens
ttagggcgaattggagctccccgcggtggcggccgcccgggcaggtacacgaataccgagagtgaatgctgaaggaatgatccccattggtggtgaccctcaggtgagactagggtgcctgtgtttcagcaaagcctgggcaattggaatgcagggctcctaagattccatgacacccctaccttctaattctgttattgcaactgcagacggttacctggcacgctggccacaatctacctcactcttatcagagtctgagcagtgctttcagctctgagttgaggcacctcgaaccttgtttttgtggtgaaggatcctaaagtgctgtgggggagtgatcacatttttcacaacatttaagttaaagaattttttcagttactggacatccctcagttctgattaaacctattttggatttcacccaggtttttaa

SEQ ID NO: 4416 - DNA, 472 bp, Homo sapiens
  misc_feature 23, 175, 179, 197, 331, 373, 379, 435, 472: n = A,T,C or G
tacttagggcgaattggagctcnccgcggtggcggccgaggtactcaaagctcgtgcatccagggaggggaaaccggagataggggtcttcgggccccgggcagaccctctgtgccgctgcaaaccgttgcagcctgaggctgtcaggtcctcccccagacacctgcggaccctncctntcctggctttcccgtctnggtcatgggcgagattctgggtctgcgtagcccggtgctggcttctttcttgcatttttggttttgcattcgcgtttttgtggctctccagttttgaggaactttactttttgcagtttcctggaagaactganaaaattctttaccggcttggatgttggggtttggccctaaancacccnagaaaatattttttaacccggggaaaccaaacattttttggttttggcaaagtttngaacttcccctttaaattgggaattttggggttttan

SEQ ID NO: 4417 - DNA, 457 bp, Homo sapiens
  misc_feature 62, 70, 76, 78, 143, 248, 269, 321, 331, 345, 352, 356, 360,370, 373, 374, 389, 391, 424, 429, 430, 439, 451: n = A,T,C or G
gctccccgcggtggcggccgcccgggcaggtacttttttttttttttttttttttttttttnggattttnagtaananacagggtttcaccatgttggccaggccagttttgaactcctaacctcaagtgctctgcctgcctnggcctcccaaggtgctgggattacaggcgtgagccaccatgcctgaccactgtttttcattctttatccttttttcttcttcaagattggtatgatttcccaatnggcctgtcttctaattaactnaaatcttttccttctgctttgatggaaaccctggtggggttggaaacccccntttatttggnaattttttttcaantttcaanttantacntatttccttnaanncttcttattgaattnancttgggtttgggtaacccctccgggcccgcttnttaannaaaacctangtggggaaattncccccc

SEQ ID NO: 4418 - DNA, 404 bp, Homo sapiens
  misc_feature 79, 171, 191, 239, 354, 372, 391: n = A,T,C or G
tagggcgaattggagctccccgcggtggcggccgaggtacaagttgtgcaaagtgaggaagattactgtgggagtgaangggaatccctcacctggtgactcatgatgctcgaaccatccgctacccagatcctgtcatcaaggtgaacgatactgtgcagattgatttanggactggcaaagattaatcnactttatcaaatttgataccaggcaaatttgtgtatggtgatttggtnggagccaacctcggtcgtgttggtgtgatcaccaacagggaaagacatcctggttcttttgatgtgggtgcatgtgaaggatgccaatggcaacagcttttgccaccaggctttnccaacatttttttttcanttggcaaaaggccaaatanaaaccctttggga

SEQ ID NO: 4419 - DNA, 384 bp, Homo sapiens
  misc_feature 72, 144, 164, 346: n = A,T,C or G
ctacttagggcgaattggagctccccgcggtggcggccgaggtacttttttttttttttttttttttttcanaattgtaaaattttattttccacacatcaatattcttattaacacagcttgattgaaagaattctgaccagnggctggtcattacatgcagnggctcatgcctgtaatccaagcactttgagaggcccaggcgggcggatcacctgaggtccggagtttcaagactagcctgacaaacatggagaaaccccatccctactaaaaatacaaaatttagctgggccgtggtgggcacatgcctgtaatcctagctactcaaggaggcttgaagcanaatcacttgaacctgggaggcgggaggtcgtgggtggg

SEQ ID NO: 4420 - DNA, 449 bp, Homo sapiens
  misc_feature 246, 260, 304, 331, 392, 400, 446: n = A,T,C or G
cctatagggcgaattggagctccccgcggtggcggccgaggtactatttttaagaaaacactgttggcatctaatatatagaaatgtatacattttgaaagtgtaatgtttggctttgaaactcttctcccagttattgagtagcaccaattcagaagcacccatcaggagtataaggaatttttctagacttaatgtatttatttgctttaaccaccagcccgtaagaagggttggatgaatttngagtagggagccgnaacccccagcttaacccttaggcttttgggaagaaatccgaaanggtccataagtcctccaaatgtgcgtngtgaaacaagcagctaaaacgtgagaaaccatgaaggctggagttgacaaccttaagtttnggtccatngattggaggggaaatggatagtggggttgtgtgttgccgttggggnttt

SEQ ID NO: 4421 - DNA, 455 bp, Homo sapiens
  misc_feature 1, 234, 267, 285, 311, 314, 386, 394, 417: n = A,T,C or G
nctacttagggcgaattggagctccccgcggtggcggccgcccgggcaggtacatatatttattttcttttgctagaagtgttaagacagaatccaagtcaggctgagagctcagtcataactattttatttaactacttccccaaggatgtggaccttacacttactttacagccagcctcagaaaacttcctagtggcaacctaagggctagagcagcttgtaagaagtggntctggaggggggctctttccattctcacacgtntggtgcatgaaccctttntcctatcctaaaggcccttcgggaanaanctctaactggtgatgagagcaaggtttgggggcccgctacacttcggcagtgcagtgttgggaaaggtgaanaaacacangtttctaaaggaaaccaaggaanttgtttgagtctggagggaatattggggggtctgggac

SEQ ID NO: 4422 - DNA, 142 bp, Homo sapiens
  misc_feature 92, 125, 130, 141: n = A,T,C or G
gatggccacatagcggtcaaaagccatggccagcagcactgtggattccatgccagataaggagtggatggcaaacatctgtagcagacaancatcaaactggatggtagttggaattgaaccanaaagnatgggccagcnt

SEQ ID NO: 4423 - DNA, 440 bp, Homo sapiens
  misc_feature 80, 184, 195, 253, 255, 372, 394, 415, 423: n = A,T,C or G
cactacttagggcaattggagctccccgcggtggcggccgaggtactttttttttttttttttttttttttcctttattnattttttaaaacagggtctcaccatcgcccaggctggagtgcagtggcataaccacggctcactgcagcctcaacctcctgggctcaagtaatcctcccatctnagcttcctaanaagctgggactacaggtgcacaccaccacatgtggctaattcttgttattttttgtananacgggatttcaccatggttgcccgcccagtttgttcttgaacttctgagctcaagcaatttgcccactttggccccacaaggtgctgggattaccagacatgaagccatggttgccnggccaattttgattttcaaatnccagatgtttttctaagggcncaccaagntttaatttattgaccct

SEQ ID NO: 4424 - DNA, 442 bp, Homo sapiens
  misc_feature 207, 235, 330, 401: n = A,T,C or G
cttagggcgaattggagctccccgcggtggcggccgaggtacgcgggggcagcagagcgaaaggtggtggagtcctgaaggagggcctgatgtcttcatcattctcaaattcttaggacggtcgggccctggaaggaacgctctcggaattggccgcggaaaccgatctgcccgttgtgtttgtgaaacagagaaagataaggcggncattggtccaaccttgaaggcttatcanggagggcagacttcaaaagctactaaaaatgaacggccctgaagatcttcccaagtcctatgactatgaccttatcatcattggaggtggctcangaggtctggcagcttgcttaaggaggcagcccaatatggcaaggaaggtgatgggtccttggactttgttnactccccaccccttcttgggaactagattgggggtctttgg

SEQ ID NO: 4425 - DNA, 456 bp, Homo sapiens
  misc_feature 119, 232, 404, 428: n = A,T,C or G
ctatagggcgaattggagctccccgcggtggcggccgcccgggcaggtactttttttttttttttttttttttttactttcccagagtctcttggaatttaggcattacattcttttanaaactgttcttttatttctttacatcagagaccttgaatatttaatttacttttcagtaaagctgtcagttgtaatctacaaatttttaaaaaaaaacaaatggaaaacaaantcctcgtttcacaattttaaacccttattgagtctaaattcactagagctgcaagtttattattctcctgcagttatgatgtgcctccaattgtaatttggggttgacccttcaatgcattaaatctccccagggcttatcaaactgggaagagaataagtcttacaatttngaaacttcattaaaatatcctcanttttattatttaaaacaggaatggatta

SEQ ID NO: 4426 - DNA, 438 bp, Homo sapiens
  misc_feature 195, 397, 406: n = A,T,C or G
tagggcgaattggagctccccgcggtggcggccgaggtacttcttaggtttttttaagatcctcactggactaaatggaagagaattctaaattctcaacgtgttctaattattctgaactattctccctctcccaaaaacacatacagatacacacaaatttattttgtgtgtaacccttgactttcagaaagnttgggttattctatgcataatttttttaaaaaaccatttggtttaaaataatttcaaacttaaagaatttgcaagaagagtataaagcattcccatatattctttacccagattctccaaatattaacatcttatcacattatttaaccctccttttgtgtgtgtgccgtgtgtggttttcccccccacatgaaccatttgnagagtaagnttgcgggaccctgttgcccctttattcctaaa

SEQ ID NO: 4427 - DNA, 347 bp, Homo sapiens
  misc_feature 56, 64, 69, 71, 208, 252, 290: n = A,T,C or G
ccgcggtggcggccgcccgggcaggtactttttttttttttttttttttttttttngcattttnagtananacagggtttcaccgtgttagccaggatggtctcgatctcctgacctcttgatccgcccaccttggcctcccaaagtgctgggattacaggcgtgagccacccatccggcctaacgagacttatttttactcaactanatggcgtacattcatttgcttactcagctgggccaggaattaanttgggcactgggaattccaaaaccaacaagacattctntgtcatcagggaactcacagcctagtttgagagataaacaaatgaacatgaaattat

SEQ ID NO: 4428 - DNA, 295 bp, Homo sapiens
  misc_feature 35, 80, 148, 271, 273, 295: n = A,T,C or G
aggtacttttttttttttttttttttttttttcancctgggtttctagggcagcctatgcctgcatcatttagtagtcanacaatgacctgggcaggggttgctcatagacctcaaacccataaagctttgccatctgccaatctatntgtatattgcctgaggaatgcattcaaagttacagccagttctcaagtcccctttaatttttactttttattgggttcccttgggtccctcctgcacatgcaggtaacttccctatcagccananatatgtggagagcttatcgtan

SEQ ID NO: 4429 - DNA, 359 bp, Homo sapiens
  misc_feature 26, 33, 56, 94, 117, 137, 153, 166, 188, 228, 231, 249, 253,257, 277, 281, 283, 287, 300, 302, 329, 336, 340, 350, 357: n = A,T,C or G
ccgggcaggtacagcggggagttcantccttangaaggaaaattgagcaagtattnaattggttggacattgcataaaagaggtccatatccangctaactctagaaattttattantcaaacttatttggcctctnttttttctgtcatgangaccatttcttangatggcacctgtgggtaaattnttgtgctcccagaaagcaatttcaaacatgcgctcacctnganaaaaatataacaaattgngccnctancattggggatctttgttatnaggnantaanagggtagtctctntngtattattgttgtaagtcattatggcnttatttnaagntaaaaatgtnctttttngc

SEQ ID NO: 4430 - DNA, 368 bp, Homo sapiens
ccgcggtggcggccgaggtacttactttagcattatcattaaggatgaaggttctagaaccatcaggaacaagggtcccatcttcacacaagttacttaactgctgggaggctctatttcatcttatgtaaactatagataatacctactcacctcaagggtgtatcaagggtttatgtaagctaaatttgtagaaagcagttagcacagtgccaggaaggatccaagaagaaatggtacgcgggcattgaaaagaaaaatactcaactaattattgagtgcccactgtgtataaaatgttagtatccacgaattctgaaaattctgtgagtttcccaaactcatagaatgtttcagaatccgtcctg

SEQ ID NO: 4431 - DNA, 360 bp, Homo sapiens
  misc_feature 73, 87, 145, 310, 316, 332: n = A,T,C or G
ccgggcaggtaccttttttttttttttttttttttttttaaataacattctgttctccatctaaatgccacanaaacttcatggganaaatcaaattaccttctcctaaatcatcagttaaatgacaagatatgtctactatatnttttaagaatttaaagttaatatattaaaactagatatcccaaatccacattttccaagttaatatgcattaaattacttacacggatggatgctcaaccttgtgaacacactaaaaaatattgaattgcccactttaaagaggataaattttggccgggcgcantggctnacacccgtaatcccancactttgggaggccgaggcaggccggat

SEQ ID NO: 4432 - DNA, 365 bp, Homo sapiens
  misc_feature 58, 66, 75, 101, 179, 184, 188, 195, 199, 224, 242, 249,255, 259, 260, 269, 277, 278, 280, 283, 285, 290, 291, 293,302, 305, 322, 327, 335, 338, 340, 341, 344, 348, 358: n = A,T,C or G
aggtacttaacccttgtttttaatatgagttacagatttttttttctggtatgtcatntgtctttngaccttggntgttttgttatggatttttatctttntcagacttatcttttatggcttctgcattttaagtcatacttaggaaaaggcctttccatgtttcagcattttaaggnaaatnttanctaaggnccangccaatggttaaggctttcaccacncttaattattggtttaancaacctntttggnaaanncctgtaagngttggggnngnggncnattcnncntttttgaantcntttattgggaagatttncaaangggccttngcnannttngaangccttaattnaaattgg

SEQ ID NO: 4433 - DNA, 440 bp, Homo sapiens
acactacttagggcgaattggagctccccgcggtggcggccgaggtacaatggcatgatctcggctcactgcaacctctgcctcccaggttcaagtgattctcctgccttagcctccgaagtagctgggattacaggcacccaccttcatgcctgactgattttttgtatttttagtagagacagggttttaccatgttggccaggctggtctcgaactcctgaccttgggtgatccacctccctcgggctcccaaagtgctgggattacaggcatgagccaccacacccggctggaagtttgttttttggacaagccatagtttttgtcctccaggatatatcactgtctactttttaaagctctgtttatttgaatacaaaaaaaaaaaaaaaaaaaaaaaaagtacctgcccggggcggccgcccgggcaggtactt

SEQ ID NO: 4434 - DNA, 491 bp, Homo sapiens
  misc_feature 56, 110, 171, 181, 182, 183, 202, 204, 221, 222, 226, 231,232, 243, 245, 246, 251, 254, 259, 263, 265, 268, 269, 278,284, 287, 304, 307, 313, 334, 340, 359, 370, 383, 406, 408,417, 424, 427, 429, 431, 435, 446, 463, 470, 473, 482: n = A,T,C or G
acgcggttggcggccgcccgggcaggtacgcgggggagttggctatccctaatgtnatcactaaaagtatctagaagatctaaataaaggaatgatcatttcagagcgtntgctagaatgcctgaagttataatagcccccctaagttaactttaaattcctggccatttnttctagaaannnggtttggcacttttggcananaccggatttttctcaannttanctttnntttttttttanannttaancanggggnatgnanttnnttttgtaantgtccnagngtttttaaattaattgngtnaattcnaaaaaaaataaccaccaactnggaaanttttctttataaggttccntttaaaaaaangtatggaaccctnaaaaggaaacctttccatttaantntattccttngaaaaanaancnanaaancccccctaaanaaacccctcggggaaanacctttnaanaaaaattgnaaaattatt

SEQ ID NO: 4435 - DNA, 435 bp, Homo sapiens
  misc_feature 50, 170, 254, 274, 374, 384, 396, 400, 402, 409: n = A,T,C or G
ccgcggtggcggccgaggtactttttttttttttttttttttttttttgnttttttaaaaaattattcttattaaggatgtgttaagggggaggtataaagcaacatcaaagttttcccaaatgggagtctgatgcaaaatcacagtgcaaactttgtgaacaagtgaanaaaactgtcgttttttttatcatctgtcatgctgggtgttacccatccaaaccttgcaagtcaacaaagtgtgaacagaaaatnttttgagaaagaagcttgtntgtgatatccagagggaatgttttaattgacttaattttcattttctagctctcgtctatgtccacaactgggaagttaacagtgtttcagggaccctantcaagttgantgttgggagttntaantntaaactnaaaccgctctccaggggccccccgcg

SEQ ID NO: 4436 - DNA, 420 bp, Homo sapiens
  misc_feature 232, 265, 389, 394, 396, 408, 409, 419: n = A,T,C or G
ccgcggtggcggccgaggtactgggattacaggcgtgagccaccacgccctgccaaaaggtgaaaaagcttgataagtgggtgcctcatgagctgaccaaaaattttaaaaatcgtcgttttgaagtgttgtcttctcttattctacataacgacgacgaaccatttcttagttggattgtgacgtttgacaaaaagtgtattttatacaacaacagtgatgaccagctcantggttggaccgagaagatgctccaaagcacttnctgaagccaaactttcatcaaaaagaggtcagggtcactgtttggtggtctgctcctggtctgatccgctacagctttctgaatcatagttaaaaccaatacatcttgaggaagtatgctcagnaaatntnatgaggtgcacnngaaaactgcng

SEQ ID NO: 4437 - DNA, 497 bp, Homo sapiens
  misc_feature 53, 63, 74, 90, 93, 100, 109, 125, 139, 159, 231, 232, 234,247, 259, 265, 268, 271, 276, 286, 290, 291, 300, 317, 339,342, 343, 365, 366, 375, 378, 382, 398, 410, 411, 432, 435,437, 444, 445, 457, 464, 468, 481, 483: n = A,T,C or G
ccgcggtggcggccgaggtacttttttttttttttttttattttttttttttncacaaatggnattttattaantaaaatttaatttacnaanctttgtnaattttaanaaaaacattcatagancataaacaaaaatntcaatatgcaatattcaaanttacaagaaaataagcacaaacttttagacagtgcaagttattgctgcactcctttaaattcctttatccannancccaaaaaatgtntacaaccccttnaaaatntancanaaaancattttctcncccnnctggttgtncacgaatctaaatttgngcaaaaaaattgttttcccacntannaatttaataaaagtttaccctnngggcccggnatnttanaaaactatatgggaancccccccggggnncttgcaatgggaaaatttccnaanantctaaannctttaaattccnaaataanccgnactaaacccctangnaagggggggggggg

SEQ ID NO: 4438 - DNA, 123 bp, Homo sapiens
  misc_feature 14, 93, 109: n = A,T,C or G
ccgggcaggtaccncggggaactacctacctaagcgatgaaatccaaaggtgaatcttttggtttggtgattttgatgatagccacaaagcangcaggcttgtatggtngccttgaaaaccaa

SEQ ID NO: 4439 - DNA, 290 bp, Homo sapiens
  misc_feature 150, 154, 254, 263: n = A,T,C or G
ccgcggtggcggccgaggtacaagcccaagggagattacagggaactcttgcagcagacaagaatgagattttgttttctgaattcaacatcaactataataatgagccgccgatgtataggaaagggactgtgttgatatggcagaaangtgnatgaaagtgaatgacaaaagaaaattaagcttgccaacagaaaatggaaggaaaaaagatggcaggtgacccggaccaggacaaagccagtgcccttgcnctgcgaatntcatcgggggaatgctttcttggaagg

SEQ ID NO: 4440 - DNA, 398 bp, Homo sapiens
ccgcggtggcggccgtgggggtgggggctgagggaggatgcctataggaatatgcgtgtcaatcgcgcagcgggtcccctcctcctccagaaagcgattcgtgtaagtttaaacctgcggccaccctgcgtgcctcggtgaacactgtctggtgcaaaggaggtatacgaaatgtgtttgttgaattgatccaagccattatcagcacttcagtgggctgggaggacatgaaaatagctgcatggtgaagtggtgtttgctggtgcctgtcctgtcccctgcctctgccagctctctcatgacattccttaggcaacctggcccgtttgcaggaagctgacagcaggtattcagaaattttaggatttgggcttaatttcagataagcaggacaacct

SEQ ID NO: 4441 - DNA, 378 bp, Homo sapiens
  misc_feature 141, 144, 169, 183, 193, 206, 209, 214, 230, 244, 246, 276,279, 288, 290, 292, 323, 352, 356, 365, 368: n = A,T,C or G
aggtacgacatacactatttttcttaagaattctattctctatgtctctatgtaggagaggaaaatgtttcttttcttacccatcagttcgtgggcttgagatccctataacaaaagacagattgacaagagaaaaaagcnttntaaatttattttaatggtaggtttnaagtgacccagganccttcaaaantgaaaacccaaanaancaggnaaatgggtctattttnatgcttaggtctgncnaaaaccagagagttatggggaagtgtgatnggncaatgggantntnatctaatggtaataaattggggaaaacttancaacgcctgttttgttcacattccttctngggnatctcctcntgnctttgaggat

SEQ ID NO: 4442 - DNA, 408 bp, Homo sapiens
atacgactcctatagggcgaattggagctccccgcggtggcggccgaggtacataaaccttggaatgcccctcagttgtttccctgaaggtggccaggtggtcattacattttcccaaagtaaaagtaagcagaaggaggataaccacatatttggcaggcaggacaaagcatcgactgaatgtgtcaaattttacattcatgcaattggaattgggaagtgtaaaagaaggattgttaaatgtgggaagcttcacaaaaaggggcgcaaactctgtgtttatgctttcaaaggagaaaccatcaaggatgcactgtgcaaggatggcagatttctttcctttctggagaatgatgattggaaactcattgaaaacaatgacaccattttagaaagcacccagcccag

SEQ ID NO: 4443 - DNA, 392 bp, Homo sapiens
aggtaccatgttcaggaaaccaaggacaatattgctctactgttggaaacagagtaatcaaattttctgtgctagccttaattcctgccctctttaagaggagcttaataaaatgtaaatatgcagaatgtttacttttggattgtctcatggtgtccctggaatgctccgagtgcacaagcttaccgcaaggccgaccacacgttctcgggagttcctggacagaccgttcttcacaacgaccacgctcaggtgtaacttcacctgggttcgaggagaccgtgttgggtgccaaagatgtaggggaacctgcctgatacaccacccgcaggctctccccttcccggtggagacgagggaatgagaaaagaaataaagacaaagacacaaag

SEQ ID NO: 4444 - DNA, 936 bp, Homo sapiens
  misc_feature 22, 25, 27, 29, 44, 48, 52, 63, 69, 75, 81, 83, 87, 89, 97,99, 107, 121, 129, 131, 135, 149, 151, 153, 174, 182, 184,188, 201, 213, 217, 219, 236, 244, 252, 258, 264, 268, 270,272, 298, 365, 396, 404, 407, 409, 420, 437, 442, 449: n = A,T,C or G
  misc_feature 460, 462, 477, 492, 513, 518, 534, 535, 550, 555, 606, 609,618, 619, 636, 684, 738, 772, 791, 794, 806, 823, 838, 841,845, 847, 859, 872, 874, 879, 905, 921, 923, 924: n = A,T,C or G
cgttaattacgactcacttatnagngngnccggaaatttggggntagncctncccaactccgncggggntggggnccgggncnccgncnccccgggngnccaggggnttaacgccgggggnctcctttngntggnctccaaaaaaccancncnttttaagtaaatgggggggtnttaattcntncttnggaaaaacctttncaaaccaattcnaagntncaaattaattggaaagnggtggggnggttaaanttaatncaaatntaantncntaaaccattttttttaaaccaaaagntaatttggggaaaaaaaccttgggggggggaatttttaaccttggaaggggttttaattttttggcnccccaaagggggttaaacccaaccaaggaanttggggtnaangnaatttttcttngggaaggcccccaaggnaaagnttttggnggaaaaaaccntnggggggatttaaggntttttttgggctttnccccaaagtaaccccccccanaattngggaatttccttaaanncccaatttccccttnaagcnaaattgggtttggggggtttccccccaatttttaaagggggggggcccttnccnttacctttnnttttttttttttccaantttcccccgggttttttttaggattaaaaaaaaaaaaaagggaaaggngaaaaaaagggttttttttttttccaaacccttttttttttccttttttccttnccaaaaaaaaaaacccccaaattttttgggaagngaaaaaaaaaccaaaaaanccntttttggggggnaaaaacctttggggggnaaaaagggatttggnccnaaananaagggggggggnaaggggaaaaaantnttccntttaaaaaaaaggtaaaaaaaggccncgtttttttttttaanannaaaaaaaggggg

SEQ ID NO: 4445 - DNA, 889 bp, Homo sapiens
  misc_feature 16, 21, 26, 28, 34, 43, 46, 56, 65, 71, 77, 79, 85, 104,106, 108, 112, 114, 118, 122, 124, 126, 128, 130, 134, 142,146, 148, 150, 152, 154, 158, 160, 164, 166, 168, 170, 172,186, 194, 229, 233, 241, 243, 249, 253, 255, 261, 267: n = A,T,C or G
  misc_feature 271, 322, 324, 342, 350, 353, 355, 374, 381, 399, 410, 415,424, 433, 453, 463, 467, 473, 483, 497, 502, 505, 512, 523,561, 570, 584, 621, 640, 641, 670, 672, 687, 689, 702, 708,737, 742, 768, 770, 787, 797, 814, 828, 830, 834, 836: n = A,T,C or G
  misc_feature 846, 847, 888: n = A,T,C or G
ttaattacgactcacnttatnagggngnccgganatttggggnagnccttcccacncgccggggntggggnccgggncncggccnccccgggggggccaggggntnancctntntatntctntntntntntatntatctatntatntntntntnggtntntgtntntntntntttcaaaacctatntgccaaanaaaaagaccttaaaatttttctaaaattccaaaanaaanccaaatananactctnggtntngtattnccaatnttanaaccaaaagggttttttaattatatataaccagctgggaattttttaaggntntaacccaattaaaaattnaaaaaaanttntngggattatttccaaaggtngggtaanttcaaaaaaattcttttnaaaattttaanctttnttttcaaanacctttttncaaattgggaaaggcccaantgggtttttntaanccattnggggggggtnggaattgggaaaanttttnaancaaaaanccccctgtgtntctctatttatgccttctattttattaaccccttaatnttatttaanaattacagaattangacaaaattgggggaatgcccgaccaattggaataanaattaaggatcttcttttnntttataaaaccaaaaaaaaaacttaaccncntaatccataaaatcnantttagcccctttntttaanaagggccaattgggatttacctttcattnaatgnttgggaaaaagggggggggaaaaccnanaatggtaaagggaaccnaaccctttgnggggaaccccaaaaaancttttttttttttngntctnanccccccatannaaaaacccatttaaaaaaaaaaaaaaaatttttttggggcnc

SEQ ID NO: 4446 - DNA, 243 bp, Homo sapiens
  misc_feature 21, 31, 67, 104, 108, 110, 116, 132, 136, 140, 144, 164,180, 188, 198, 213, 217, 219, 239: n = A,T,C or G
cgactcactttataagggggnccggagattntggggtagggcgtacgccactccgccgggctggggnccggggccccggccccccgggggggccagggggttanccgntnggcganttaattacccacccanccantggnttgntggctcaattaattggcganttatttaattagccanccaaccantgggttagtnggttaattaattaanccantnaattaattaaccatccaatnggtt

SEQ ID NO: 4447 - DNA, 871 bp, Homo sapiens
  misc_feature 17, 24, 42, 47, 54, 64, 86, 99, 101, 103, 118, 120, 127,131, 133, 135, 137, 139, 156, 160, 172, 174, 176, 181, 187,197, 199, 214, 216, 227, 240, 242, 244, 252, 256, 263, 280,284, 295, 297, 303, 315, 320, 336, 342, 350, 351, 358: n = A,T,C or G
  misc_feature 371, 391, 400, 440, 446, 453, 468, 482, 494, 496, 510, 516,523, 528, 535, 544, 548, 560, 563, 582, 585, 591, 596, 599,601, 606, 610, 621, 660, 663, 683, 691, 699, 710, 713, 720,726, 733, 750, 758, 761, 768, 769, 771, 779, 781, 788: n = A,T,C or G
  misc_feature 798, 828, 847, 852, 855, 858, 862: n = A,T,C or G
ttacgactcactttatnagggggnccggagatctggggtagngcctnctccacnccgccggggnttgggtccggggctccggctcnccgggggggccangngntgaacctttgttatnanaattttnggtntnanananacggtttatacacgagntctnccattaggtctntncntgctnctttanggaatattananaaattacgtaaaaananttaggttctgnccattctttttanananaaaactcngganactcccntttgggaaggggttagnaaantcacccaattnanagtatnaaccaatctttnggttnttaaaaaaagcttaanggggtncctacaannactgaanccctaatttattnccccctttggccaaagtttngtttttaancttttttttccccaaaaaaaaaaaatttggggggttcttngtccanaaaaaanaggtttacaaaaaanaccccctactatanaaccaatttttnancccccaattttaanatcgcnaaaaaanaaaanaccaatntattactantttnatttaagggggncgntttatttttaaaaacccantcntttaanaaaanccnanttaancccntttaaaaagangggaaaaaaaaaaattttttcccatcctttgggaaccantantttttccaaattaaaaattntccctggntttagttntacccaaaaanttncaagttnaaattnaattttntcaaaaggaaaaccaanttaaaaanttnccccctnnanccaaaaangngtttttnggttttttcnaaaaaaaaaaaaaacccaaaaattgggttnttaaatttaaccctttttnaaccnttncantttntttttccaa

SEQ ID NO: 4448 - DNA, 923 bp, Homo sapiens
  misc_feature 2, 7, 14, 18, 20, 24, 30, 36, 38, 42, 44, 46, 49, 59, 61,63, 69, 85, 87, 91, 95, 97, 101, 103, 107, 109, 111, 121,123, 129, 131, 137, 141, 145, 150, 154, 156, 167, 173, 178,180, 184, 186, 188, 192, 194, 200, 208, 210, 224, 226: n = A,T,C or G
  misc_feature 242, 244, 247, 262, 352, 369, 433, 442, 447, 496, 512, 557,626, 632, 640, 657, 676, 684, 690, 783, 841: n = A,T,C or G
gnccctnccccacnccgncngggntggggnccgggncnccgncncnatncctttggggngntnccaatnccggaaatgggaaagncncctnccgncncccntnggtngncncctgggggtncnccccgncnttttgnttgnaagnggggnaaangngggaaccaatnttaagnaaaananaatngnanaatntnggaatnggttggtntnccccttttaaaaangnggaattggggggccangnggnaaaaaaaaccaaggnaattccccttggttttggtgggggaattaattttttaattttttggaaaacccggggggaattttaacccaggaaatttttggaaaaaantggaaaaaggttcccanccaaaaaggttgggaaggccaattttaacccccaaaattggaagaaaggggaaaaaaaaccaanggaacccgnaaggnaaaaaaaaaattccttttgggaattgggggccttttccaaccaaaaggnaaccatttggccaaanccaaaaaacccaaaaaaaaattgggggggaaaaatttaacccttngggttgggaaattgggaaacccaatttggaaagggggcccaagggcctccaaaaaggccctttgggggngggggnaagggggnaaggaaattaaaaaccnccaacccgggggggggggncccaaagnaaaggnggggggtttccaaagggggggaaatttttcccttgggggggccccccctttgggccctttggccccctttaaaaaaaacctttggggttgggnccgggttttttcccaaatttaaaaacccccccaaaaaaaaatttccaaattttttttnccaattttaatttttttttcccccaaaaaacccccccctttcccaaaaaaaaaaaccaaaaaaaaaagggccttttgggttt

SEQ ID NO: 4449 - DNA, 977 bp, Homo sapiens
  misc_feature 7, 83, 92, 99, 107, 111, 113, 115, 117, 132, 172, 177, 191,203, 206, 219, 229, 284, 305, 309, 359, 360, 361, 362, 363,364, 367, 368, 370, 371, 374, 388, 405, 419, 427, 433, 441,464, 471, 484, 493, 527, 536, 577, 597, 614, 632, 681: n = A,T,C or G
  misc_feature 799, 803, 807, 837, 846, 876, 901: n = A,T,C or G
cccccgngtgcggcgaggtcttgattttttatcagatggcctggaaaacccagtctcacaaaaatatgaaattatcagaaggnattatcagntgccaantctctatnggtntngnanacaagggaaaattgnaaaacctttaacccccttccaacccttaagggtttaaggnttttncccaacccgggttngggaaattgggnttnccctttggggaancccaaagggnaaatttgggggttttttggggaaaaggggttttttttttccccaaaatttttttngggggggggggggtttttttntttnggggtttgggggttttgggggttttttttccccaaaaaaaaaaaaatttnnnnnntgnntnnttnaaaaaaaaaaaaanttttaaaattttttttnccccctttgggggnaaaagggnaaaaantttaaaanccccctttttccccttttttttngggggtnttgggggaaaaanggggggggntttttcccccaaaaccccctttttcccccttttnaaaaaaaantttgggggcccccccccccccccttttgggggggggggggnttttgggggccccccccccntttttttgggggggggncccccaaaacccccaaanggggttttctttttttttttttaaaaggggcaaaaaaaaaaaaattttnaaaaccccccccccaaagggggtttttttttgggggaaaaaaaaaaaaaaaaaattttaaaattttttttttttgggggcccctttttccccaaaagggggggggaaaaaaaattttnaaantttnggggcccccaaaaaaaacccccttttaaanggggggggnaaaaaaaaggggggggggggggggcccccnaaagggtaaaaaaaaattttccccnaaaggggaaaaaaaattttttttttttaaaaaaaaggggcccccttttttttttttccccaaattttaaaattttt

SEQ ID NO: 4450 - DNA, 974 bp, Homo sapiens
  misc_feature 33, 40, 79, 94, 99, 113, 116, 128, 132, 146, 165, 170, 172,173, 187, 192, 198, 210, 212, 216, 229, 240, 243, 248, 252,253, 259, 266, 270, 281, 295, 306, 324, 326, 327, 331, 339,359, 362, 375, 381, 387, 395, 406, 474, 493, 503, 505: n = A,T,C or G
  misc_feature 510, 526, 527, 552, 575, 593, 601, 618, 622, 626, 634, 649,657, 666, 697, 698, 700, 701, 735, 797, 822, 827, 866, 882,887, 956: n = A,T,C or G
ccgcccgtttaaattacgtaaacctttcaaacnttaattnaaagggggaggaccggtaaaaatttattggcggtaaagncccttccccaaaccnccggnccgggggtttgggnggnccggggggaccnccgnccacccccgggggngtcccaagggaggtttaanccaangnnttaaagttttgggnccaancctttncctttgttgggngncccnttgccaaaccttnggtttaaaggnccnccttnccgnnaaaccncattccnccgnggggggggtcnttttcaaaaaaggnttgggaaattnccccctttccgccttggncnncctnttaaaggncccccctccaaaccaaaaanggnttaaagcttgggngggggnaaaccnttaatttnatggggggccnagccaaccaaaggaccaaacccccagttggcccccccaatttccttaaaaagggttttttttttgggntaattttttttaatttggntaaaagaaangnaaccnaaaaggggtttttttnnaaccccaattgggttttggcccccnaaggggcctttggaattcctttngaaagccttccccttggnaagccctncaaaaggttgggaattncctnggcncccaaccncttatgggggaaccnttcccccnaaaaaaaanttgggccttgggggggaaatttttaatttanngnnggcccgggtttaaaaaacctcaaaaccccaattnggcccccttggggggccctcctttttaaaaaaaaattccaaaaaaccttttttttaaagggnaagggttcccaaaaacccaaatttnctttncctttttaaatttccaaacccttgggggggaaaggcccnttttccctttgggggnaaagnaaaaaaaaaaccctttcccccaaatttcccaaacccgggttgggggggttggggccttttccctttccnttttttttcccccttggg

SEQ ID NO: 4451 - DNA, 923 bp, Homo sapiens
  misc_feature 31, 50, 54, 61, 65, 71, 77, 83, 85, 89, 92, 94, 96, 105,107, 109, 111, 113, 116, 120, 122, 131, 133, 135, 139, 141,154, 156, 158, 171, 177, 183, 190, 194, 200, 204, 206, 217,219, 225, 229, 241, 245, 251, 261, 265, 285, 287, 302: n = A,T,C or G
  misc_feature 377, 415, 423, 443, 450, 452, 496, 498, 507, 516, 534, 543,596, 709, 735, 750, 766, 781, 787, 788, 844: n = A,T,C or G
gcgttaatacgaacttcacttattagggggnccgaaaatttggggtaagncctnccccacnccgnccgggntggggnccgggncnccgnagngntnacccgcaanananananatncaangngtccttacntnanaagncnccccacctgggtntnanaattaattaaggnaaccgnccaggnaccccanaatnttggtnttangngggaaaaccangnggttcnccanaaaattttgggnaagnccaacnccaattttanaacnccaaaaccaaaattccaagntnggaattggccaaggnaaaattggaaggggccttaattttggaaaaccaaaaggttaaaaggggggcctttatttttttggccccctttcnaaaggggggcccctttgggggggggaaaaaaaaaaaanttttcaanggggaaccccccaaaggggnaaaaccnangcctttttttccccttaattttaaaattttccaaaatttttaangnaaccaaaanggggccttnctttaaaaaaaggaaggncccaattanttcccttgggacctttttttggtgggggccaaagggaaattttaaccaaaggnattgggccttggccttccaaaaaaaaggttcctttaattttaaccaagggaattgggaaccaaaattgggcccccccggaaaaaaaaaagggttttaaatttttggttaaagnaaaaaattttttaaaaattggggggncccccttaatttggnaaaaaaaaaaattggnccaaaaaaaattccnccaagnnaaaatttggggtttccaaagggtttcccggggggcccccaattttaaaaaaaaggncccccaattttttaaaaaaaaaaggggggaaaaaaaaaaaagggtttttcccccaaggcccaaggggggaaaggttttt

SEQ ID NO: 4452 - DNA, 406 bp, Homo sapiens
ccgcggtggcggccgcccgggcaggtactaaagatatacaataaaagggaagaagattttcctagtttaagagagtataatgattttctggaagaagtggaggaaatcgttttcaatttgaccaacaatgtggatttggagaacactaaaaagaaaatggaaatatatcaaaaagaaaacaaagatgtcattcagaaaaacaaattaaagctgacgcgggagcaggaggagttggaggaagcattggaggtagaacgccaagaacatgagcagcgacggctgttcatacaaaaggaagaagagctgcagcaggctctgaaaaggaagaacaagcaggcctttttagatgagctggagagctccgacctccctgttgctctgctcctggcgcagcataaagacagat

SEQ ID NO: 4453 - DNA, 361 bp, Homo sapiens
  misc_feature 43, 50, 88, 109, 117, 218: n = A,T,C or G
ccgggcaggtaccctttagcagtgtcatctggctgtgttctgnagtgtanatgagccattttccaaacgttgacattttttggaccanaagtgagctggatcttttctntggctaangctacagtggaggatggaggaaaaggggatggtctaatggtcttttaggaagtggcatgacgtgggctctgaacgtgaagtggaaggaacacaaaacattntgttgattaggaccaataaaaaaacatgggaaattgcttgggacatgatatttaacatttattaatttttgtgggaaccagtaaaatgttcccttggtgccctatcaaacagatcctttgttgaatctgtcactattctaacc

SEQ ID NO: 4454 - DNA, 852 bp, Homo sapiens
  misc_feature 1, 25, 47, 50, 58, 60, 66, 78, 80, 84, 93, 101, 103, 116,120, 127, 152, 166, 168, 170, 172, 182, 184, 227, 275, 317,334, 347, 351, 354, 363, 388, 409, 422, 426, 442, 454, 464,523, 540, 542, 569, 575, 585, 605, 647, 651, 654, 671: n = A,T,C or G
  misc_feature 672, 679, 690, 693, 698, 744, 763, 768, 772, 833, 838, 846: n = A,T,C or G
ncaagggataaagtcccaagttatnccattaaaccaataacttcctnggnaattaatngncctttnttccaaccaacncnaagngtaaatttnccaagatnanaaaacccaaatcnacanttaaaanaatgagtcaaacttttgtgcgcgcncataccttttccananananccacacacananaattgggagaattttttaattaaccggggaaacataaaagggnggttttaaaattttttaaccttttgggggggggggttttttaatttcnaaaggccaaccaacccccaattttttttttttaaaaattggnttggccttttttgcaanataagggaaaaantttnaanaaaaaaaanaacctccaaattggcaataaaaccnttgggttaaattatttccaancctttgggaagantttnaccccccgggggattnctcccaattaanggggttcttnaaattaagtcctcttttatatgccgttatattttaaaaaaacccggtttgggggggccnttttaaaaaagaaattnancccacttaaacccaatttcccaaattngggaancccttttttnttccctttaattttttaaanaaaaaaaaaattttcgcctttttttaaaaaaaaaatttgccntttnaanttggggggggggggggnnaaatttngggttttgggnttnggggnggctttttaaggggtaaaattttaaaaaaagggaaaaacccctttnaaattttaaattttttttnaaagnaaanaaaaaaaaaaaactttattttttttttggtttccccccccttttccccaaaattttttttnaaaanaaaccccnaaaaaa

SEQ ID NO: 4455 - DNA, 977 bp, Homo sapiens
  misc_feature 19, 109, 121, 136, 153, 158, 169, 183, 199, 209, 216, 226,234, 257, 266, 290, 313, 341, 345, 355, 388, 393, 401, 413,414, 419, 440, 465, 471, 497, 523, 524, 538, 544, 548, 553,558, 574, 579, 631, 632, 633, 656, 657, 670, 673, 674: n = A,T,C or G
  misc_feature 685, 690, 696, 701, 706, 711, 723, 743, 745, 756, 762, 787,798, 808, 819, 830, 841, 845, 857, 877, 893, 923, 928, 952: n = A,T,C or G
ctcccgcggtgcggcgggncgcgggggaaaagggtggggagtgccctttcttgaaggaatcccttaagtgcacgtctcccgttttcttttcacatcaatgcaaggaagntcccgtctggtnggaaaatttttaacnaaaaccaaccccccaanaaccnaaccccccccnaatttgggaaaggntttttgcccaaagggnttcccccccnttttttnaaaaaagggnaaaaaaanggggggggaaaaaaaaaaaaaanatttttttnggggaaagggggcccccaaaaaanggggttttaaatttttttttttnaaaaaaaatttttttgggggggggtttntttngggggggggnaaaacccccaaattttttttgggggccccaaanttttnaaaaaaanaaaaaaaagggnnaaaanggggggggttttccccccccnaaattttaaaatttttccccccccnaagggnggggggccccctttttaaaaaaaaancccctttttcccctttttaaaagggnnaaaaaaaaaaaaantttttntttnttttnttttnaaaaattttttttttnccccntttttccccccaaaaaaaaaaaaaaaacccccctttttttttttaaaaaggnnntttttttttttgggggggggggnnccccccccccccnttnncccccgttttnttttntttttnttttnttttngcccntttttttttttnccccctttttggggggtttntnccccccaaaanggggcnaaaaaaggggggggggggaaaaaanccccccccccnaaaaattttnttttttccccnttttttttttnaaaaaggggantttnggggggggggancccccaaaaacccccttttngggggggggggggggnggggggaaaaaaaaaaaaaaaaaatttttnccccnttttttttggggggggggcccccnaaaacccccccccccccccaaaaag

SEQ ID NO: 4456 - DNA, 980 bp, Homo sapiens
  misc_feature 19, 26, 65, 73, 79, 95, 115, 131, 140, 172, 184, 201, 220,228, 234, 248, 252, 254, 269, 308, 321, 324, 328, 355, 414,478, 492, 543, 695, 786, 823, 856, 879, 925, 959: n = A,T,C or G
aattacgactcaccttatnagggggnccgaaaatttgggggaagcctttcccacccggccggggntggggccngggccnccggaagggttaaccnaaaggggccttaaaaggccnattttttttaaaaccntttttaatnaccctgggggaaaaaaaaaaaaaaaattcaanaaacccaaaaanggggggggaaggggggnaattaaaaagggggaaccntttaaagntccaanttcttttttggccnaccntnggggaaaaaaaaccnaaaaaaaattaaattggttaaaaattttaaaaaaatttncccccaattaagnccnttgnccaattgggttaaaaccaattttgggnaaaattttccttttccccaagggggttttaaaaaaaaaaaaaaaaaaaaaaaaaaaggntttaaaaaattcccccttggttgggaattaaatttttaaaaattgggggggaaaaattgggaanccaatttttttttnggaaaggggggtttccctttttggaaagggaaaaatttggggggggccaanccaaaaaaaaaaagggtttgggggggggaaaaaaaaattggggaaaaaatttttttttccaaagggttaaatttgggggggggcccaaaaaaaagggaaaccaaaccctttggaaaggggggaaatttgggaaatttgggttttttgggaanttttttaaagggaaatttaaaaatttttttccaaaccctttccccccgggttaaaaaattggggaaatttccaaatttgggccctttgggnttgggtttgggccccttaaagggttttaaaaaagggntttaaatttaaaaaacccccccctttggggggnaaaaaaaaaggggaaaattcccntttttgggaaagggaaaatttgggccttttttcccccccccaaagnccccccctttgggtttttcccaaacccaaagggnaatttccccccccccccttgg

SEQ ID NO: 4457 - DNA, 150 bp, Homo sapiens
  misc_feature 39, 61, 67, 107, 143: n = A,T,C or G
aaaccttttaaattaaagggggggggggggacccggggnaaaaaaattttttgggggggtnaagggncccttttccccccaaacccccccgggcccgggggggtttngggggggccccgggggggcccctcccgggaaagggngggttta

SEQ ID NO: 4458 - DNA, 607 bp, Homo sapiens
  misc_feature 16, 24, 34, 72, 77, 84, 87, 92, 101, 118, 123, 137, 141,150, 152, 157, 160, 162, 165, 168, 170, 173, 176, 178, 180,182, 184, 193, 197, 205, 207, 215, 233, 241, 266, 293, 296,305, 313, 324, 332, 338, 344, 348, 368, 386, 414, 416: n = A,T,C or G
  misc_feature 425, 434, 503, 569, 582: n = A,T,C or G
aaaccgaacttcaacnttaaattnaggggggggnccggaaaaaatttgggggataagggccttaccccaacnccgcnccggggnttnggggncccgggggncccccgggaaagcggcnttaancctttgttgttgtnctcnttgttgttntntactnttntnttnttntnttnttntntntntntcggggggngganaattgggngnaaagattncctttattgggccctttnccttgggnttcccttcccccccaaaaagcgccnttgtggaaaagatttggccaaagactnggnggttggtcnttaactcntacgggggccnttcaaacnttggcnaaaacncctnccggcttcttccttgggggnttttcaaaagccaaagcnatctactccttgcctcaagccttccccnangtaagcctngggaacctnaccaagggccaattgccgcccaccaacgcccaagcttaatttttgtatttttcatagagacagggtttnaccatgttggctgggatggtctggatctcctgacctcgtgatccacctgcctcagcctcccaaagngctgggattacanaagtgagtcaccacacctggcctcc

SEQ ID NO: 4459 - DNA, 912 bp, Homo sapiens
  misc_feature 15, 21, 35, 40, 42, 44, 46, 48, 50, 52, 54, 56, 58, 60, 62,64, 66, 70, 72, 88, 95, 99, 105, 131, 149, 155, 165, 174,186, 187, 197, 201, 217, 230, 258, 268, 270, 274, 286, 293,304, 307, 310, 311, 318, 337, 342, 351, 379, 400, 415: n = A,T,C or G
  misc_feature 433, 448, 467, 472, 486, 488, 494, 503, 506, 507, 513, 516,532, 543, 559, 569, 575, 585, 591, 647, 659, 675, 678, 689,703, 704, 710, 719, 734, 739, 742, 746, 774, 775, 778, 802,808, 822, 839, 840, 849, 858, 864, 867, 883, 909: n = A,T,C or G
cgccggggctggggnccgggnccccgggagggctnacctntntntntntntntntntntntntntntgtntntgggaagaaaccgggnaaaaatncttnttggcnttctttgttaccgaccccccaagggnccccgagaaaagtttggnccaagntggagaccgnccggaaatnccttccaagtcnnttcaaacttnggcnaaagtctttcccggcncttcactcggggnggtttttttggccgcccccaattttctncgccttggcncnttcnaaaatccctttncctttgngaaggttaaanccnttnnggggggnaacctttaaaaaaggggcnacccnccggggccnaaaacccaaacaaacccccgggggggcntttaaaatttttttttttttnccgtttatttttttnttttttaaaggtttaaanaaaagaaaacccaanggggggggttttttttacnaaccnttgggttgggtttntnaaaagncccccaagnggnnaaattnggngggttcctttggcaanaatttcctttnccccgttggggaaccnccctttactnaagggngggaaattancctttngtccgcccctggccccctttttttgggggaccaccctttcccctccaataaaaaanactttgggcccnttggggggggcaaatnttnacccaacgggngggcccgggttagnnaaaggncccccaacntccggggccgggccnacccnggngggncaccccccccaaaaaaaaaaagtccccnnttntttttttttttttcaaaaaaaaantttggnggggggaaaaaaanccctttcccggttgggnntttaagggntgggccccnaaattnatncccccccctttttttntttaacccaaaaaaaaaaaaattttncct

SEQ ID NO: 4460 - DNA, 448 bp, Homo sapiens
  misc_feature 7: n = A,T,C or G
tcgactnctatagggcgaattggagctccccgcggtggcggccgaggtacagggtaaacaggaggatccttgctctcacggagcttacattctagcaggaggacaatattaatgtttataggaaaatgatgagtttatgacaaaggaagtagatagtgttttacaagagcatagagtagggaagctaatccagcacagggaggtcacagagacatccctaaggaagtggagtttaaactgagagaagcaagtgcttaaactgaaggatgtgttgaagaagaagggagagtagaacaatttgggcagagggaaccttatagaccctaaggtgggaaggttcaaagaactgaaagagagctagaacagctggagccgttctccggtgtaaagaggagtcaaagagataagattaaagatgtgaagattaagatcttggtggcattcaggg

SEQ ID NO: 4461 - DNA, 983 bp, Homo sapiens
  misc_feature 17, 27, 29, 35, 45, 46, 49, 53, 64, 70, 76, 82, 110, 114,120, 131, 140, 142, 157, 160, 169, 173, 185, 215, 217, 233,245, 292, 299, 321, 329, 350, 362, 402, 406, 452, 500, 560,589, 763, 770, 793, 850, 862, 904, 973: n = A,T,C or G
gttaattacgactcacnttataagtgngnccgganattttggggnnagncctncccaactccgncggggntggggnccgggnccccgggagggcttaacgcctgggtggntttncaaatnaattccccctnggaaaaacntnggccactccataagnggnaaaattagncctncccattggcctnaaaaaacctgggttcctttgggggccttananaaaattaaccaaaacnccaggttgggcnccaattccaattttcccttaaaattcaaggcaaccttataattaaanaccacanaaaatgggttccttttttttanaaggggtnaaaattggaaggttttaaggnaaattggggccnttggtgggttttttaaaggggtttttttgggtttccaaangggnaattttttaacctttttttgggggaaattttccttccccctggccnttttttaaaaagggaacccccccaaaaaaaggaaaaaaaagggttttnaatttaattttggggaagggttttttttttttaaatttttgggaaattggggaaattttnccttaaattggttgggttttttttttttnaaaaaccaaagggaaagggtttgggtttggggaatttaaaagggggggttgggaaaaaattttttaaaaaaaacccaaatttaattttttaaaaaaaaaaaggggaaaaggtttttccctttaatttaaagggcccaaatttccctttgggtttttcccaagggaaaaaaaaanaaagggnaaatttttaaatttaaatttaanccctttaaatttaacccaaaaaaaaaccctttaaatttttttccaaaaaaggggttncccaattttaancccaaaaaaaaaaaaacccccccaaatttttttttttttccnaattttttggggttcccctttttttttcccaaaaaaaaaaaaattggggaagggaaaaaagggaaaaanttcccccctt

SEQ ID NO: 4462 - DNA, 641 bp, Homo sapiens
  misc_feature 26, 29, 45, 62, 95, 126, 152, 175, 203, 236, 238, 267, 287,292, 307, 351, 358, 373, 398, 474, 490, 497, 500, 519, 525,537, 548, 564, 575, 610, 634: n = A,T,C or G
gaattggagctccccgcggtggcggncgnggtaccgcacacaatngtatgcgctgcactttnatctgactggaagcacagtgggcttacactcancatcaacacacaacacgctgcatacagtacncttgcacgtaacaggcgggacggccnaatactccctagtgggggaccantcaccttgtattttctaaggcccccccnattttaattaaaattccttccaattggggggancnttaccttggttttatccaagaaattgtangcgattccccaaccctactnttganaccccaagagaaaanccattggattggggaaaggccaacctggggaccatagttttaanaaatttntccttggggaaaatnttttggagcaaattgtggggggggnaaaccaatccaaaaaaaaatttcacaagtccaacccaaggccctttttttgggggcccacgcggtttccttaaaanttctaaaagaaatttnaataggnaanggtaagaaaaaaaaaaggnccatanccattagaaaanaagccaatttntttggaaagttaaaanacaaccaaggnaattaacccagggcaagggggggcccatttatganccaaacacctaactagccaagggnaaaaaaa

SEQ ID NO: 4463 - DNA, 928 bp, Homo sapiens
  misc_feature 112, 116, 123, 127, 143, 164, 165, 207, 221, 231, 248, 265,285, 289, 297, 300, 309, 325, 354, 366, 385, 389, 390, 394,404, 408, 432, 438, 457, 460, 478, 493, 510, 512, 529, 531,534, 542, 563, 564, 568, 578, 585, 591, 602, 611, 617: n = A,T,C or G
  misc_feature 662, 678, 684, 689, 699, 701, 702, 704, 718, 737, 745, 755,760, 773, 781, 787, 793, 796, 801, 806, 813, 816, 824, 828,837, 853, 858, 889, 892, 900: n = A,T,C or G
ctcccgcggtggcggcgaggactgggctgatcagcccatgcctctccccatccctccagccttatctgtcatcaccatcaacccctcccatgcacctaaacaaaatctaacntctnggttaantgtncacctatggaaaaacnaattggttccaaggggggccnnattaaacccaattttttaatttttccccccttttttcctttngggccccccctttngggaaaaggnaaaaaaaaagggccccntttttcccttttttttnccccccctttttttgggggnttancccttttnccnttttttttnaaaaaaaaaaattttncctttttaaaaggggaaaaaaaaaatttnggggaaaaattnggggtttaaaaaaaaaaangggnntttntttttttttngggnaaaaaaattttaaaaaaagggttntttttnggggaaaacccctttaaanttnccctttttttaaaacccnttttttcccaatttngggccccaaaaaaaaangntaaaaaggggggggggnanccnaacccaanttaaatttgggaaagggaaanntttnccaaattccnagttgcnaaaccnaatttgggaanggaacccangggccnaaaacaatttaacccttaataaaaaaaggatgggttaaaaaactntttttgggaatttttnaattanaaagngaaggggttntnntnaagcaaattaaaanaatttaaattaaatttggnaaaataantgggcccaanacggntaaggcccccaanccaaaggnaaaggngggggnaanaattngggtntttttanttngggggggngggnccaacccgngttttttttgggggtnaaaangggccccccttggggggggggaaattgggtnggnaaaaaggncccaaaaaaaaggggggcccaagggggg

SEQ ID NO: 4464 - DNA, 963 bp, Homo sapiens
  misc_feature 24, 29, 55, 59, 63, 66, 70, 76, 78, 82, 88, 90, 94, 96, 98,102, 106, 116, 122, 124, 126, 128, 130, 132, 136, 138, 140,142, 144, 146, 152, 154, 158, 162, 164, 166, 168, 170, 176,180, 182, 184, 191, 195, 207, 218, 220, 222, 226, 234: n = A,T,C or G
  misc_feature 238, 242, 244, 247, 249, 253, 261, 265, 271, 277, 288, 290,300, 304, 309, 311, 314, 328, 373, 386, 407, 451, 461, 467,469, 478, 480, 482, 502, 518, 543, 551, 554, 572, 573, 581,582, 591, 596, 598, 599, 610, 612, 614, 616, 622, 624: n = A,T,C or G
  misc_feature 633, 636, 639, 688, 696, 701, 703, 715, 719, 729, 768, 776,842, 855, 864, 872, 897, 951, 953: n = A,T,C or G
gccgttaatacggaactttcaacnttatnagggggaccgaaaatatggggtaagncctncccnacnccgnccgggntngggnccgggncnccgncncnccgngggnccaagggatnaacctntntntntntntctntntntntntntgtatntntatntatntntntntntggggncctntnantaacganaagnttttaggggctnaccacactatntncnccanaaaaaagntggncatngnggnangctntcttaatngccnccacangcaaanttttataaggntnggaaccttcncccntgggntntgnccaaggttgggacnccaaaaaattaagtccccttggaaaaattttttttccaaaaaaanggtaaaaattaancttaaaatttttttttgggcnaaaaaaaaaccttttttttcaaattggttaaaaaaacccttccncttttttggncccttngnaaccccaantngncccccctttaaaaatttttnttttttgggtgggaanttttaagggggggaaaaaaatattnccttgggnggncttgctttttaaatttcnnccccaacnnttggggggnagggngnnaaaaaaaaaangngntngggttncntttaacganttnttncaaatttaaattttttcctttaaagaattggggggggaaaaaaaatttncaaatttnccaancntttttggggggngggnaagggggggnttgggttttttttttggccaacccaaaaaaaaaccaaantttctttncctttaccaaaaagtttttttttttgggtttttttttaaaaaaaaaaaaaaatttttaaaattggngttttttaagganaaaaaaaantttttaanaaggcaaaaaaaaaaaaaatttaanaaccccgccaaaaatttggggggaaaaaaaaaaacccaaaaaaaaaaaattccntnaaaaattttt

SEQ ID NO: 4465 - DNA, 974 bp, Homo sapiens
  misc_feature 9, 50, 55, 59, 69, 71, 79, 83, 90, 95, 97, 99, 101, 108,131, 135, 142, 156, 160, 162, 164, 169, 175, 179, 185, 187,189, 199, 203, 207, 223, 227, 229, 231, 233, 239, 243, 245,247, 264, 276, 283, 286, 290, 294, 341, 369, 388, 400: n = A,T,C or G
  misc_feature 406, 407, 453, 459, 460, 467, 473, 483, 492, 517, 527, 537,554, 587, 604, 643, 651, 653, 665, 671, 678, 686, 693, 722,725, 738, 767, 782, 792, 818, 835, 856, 874, 904, 916, 937,941, 943: n = A,T,C or G
gtaatacgnacttcacttatgagggagaccgaaaatatggcgtagccctnccacnccgncggggctggngnccgggacnccgnagcgatnacctntntntntcttgtntatatctcttgtgtgtatgtgtnggtngccaggngaaaaagacattantgcntngnaaatncctggnaatntgcctntncncaccaaggcntatnggcntttacgccccccttanccanancntnttaaanttanangnccgccccttttccaacnttaaaacccccncttggtnatnggtnaatntaaaaaccttggccaaaatttgggccccttaaaggccccccgggggnccaatttttttaaccaacctttctttcnaaaaaaaaagggaattttnttaaaacccggncccaanntttttaacccaaaattcccaaaaaaaaaaaaaaaacccaacccttntgggtnnccaattnaatttnaatttaaaancccaaaccntttttttttttttccaacccaattngggggggaanaaaaattaanaataaatttttgggggnttggggggtttttttaaaaaaggggggtttttnttaaaccaaaaaaattnttaccccccttttttttgggaaaaagttaaagacaaaantttttttncnaacgggtttttnaatttntttaaanggattttnaaccccnaaaaaaaataatttgggccctttaaaganggnaaacccaaagggnaaattttttggggaaagggggggttcccntttccaacaaaaaanggtaaaaaangaaggggaaaaaaccctttttggggnaagggaaaaaaaaaaanttttttaaatttgggtttttntttttaaaaaaaaagggnggggaaacccttttttcccaacccaaaaanaaatttaatttngggaaaaaaggcccaaatttnaaananttttttgggttttttaaggggaaaaaatttc

SEQ ID NO: 4466 - DNA, 904 bp, Homo sapiens
  misc_feature 25, 27, 44, 48, 53, 57, 63, 68, 72, 74, 76, 82, 91, 99, 101,104, 109, 120, 122, 128, 130, 138, 140, 142, 144, 151, 155,164, 172, 184, 190, 221, 229, 237, 240, 246, 267, 287, 291,293, 320, 379, 390, 426, 427, 448, 468, 487, 501: n = A,T,C or G
  misc_feature 525, 540, 549, 599, 611, 683, 693, 715, 837, 838, 841, 843,857, 866, 889: n = A,T,C or G
gtaatacgaacttcacttatagggngnccgaaatatggggtagncctnccacnccgncggggntgggnccgngncnccggcncccgggggnccaggggntnacncaacnttggccacctncnccaagncnccttgggngntngnaaccagnaagnttgtaaggnaaccttcnccggttccttcnccaaanaaaaaaaaaaaacctttgtgggcctttggtnaattaatnttaatttnttnttggcnccttttaaccaaggttggggnaattccaattttccttaagnttangnggaaaaaggggaaccaaaattaaaggnaattttttttttttaattcaaaaaaaaaattggttggttcccaattggccccaaggttnaaaggaaaggnaattgggtttaatttaattttcctttttttcctttnnattttttctttttcccccccnaccccccaaaaaaaaaattnaaaaggcctttaccccaanttaatttaagggcntttaaattaaaaagggttccttcnaaaaaattttttttnttggccccntttttttttaaccttaaaaaaaaattgggttggaaattttggtttttttnccttgggttttnccaatttttggttggggttaattggcccttttccaaattccaaccccctttaaattaaatttttaagggggnccaaaaaaanttttccccaaattttttttttntttttcccccccttttttgggttgggcctttaaaaagggggggttaaaaaaaagggaatttttttaaaaaatttttaaaaaaaaatttaaaaaatttttttttttgggggggccccctttcnnttncnaatttaagggtttnttttttccnttccttttccttccttttttttnaaaaaaaagggaaag

SEQ ID NO: 4467 - DNA, 929 bp, Homo sapiens
  misc_feature 44, 49, 53, 58, 62, 74, 82, 90, 95, 97, 102, 104, 110, 115,118, 122, 125, 127, 131, 137, 142, 148, 152, 158, 160, 162,166, 170, 172, 174, 176, 178, 182, 184, 186, 192, 194, 196,202, 207, 239, 241, 251, 261, 275, 292, 298, 300, 325: n = A,T,C or G
  misc_feature 336, 343, 358, 363, 392, 393, 407, 416, 446, 447, 463, 468,472, 473, 490, 494, 507, 542, 548, 562, 567, 568, 573, 574,585, 597, 603, 605, 619, 621, 634, 652, 660, 662, 667, 674,748, 750, 766, 780, 787, 791, 838, 839, 840, 893, 896: n = A,T,C or G
  misc_feature 899, 915, 917: n = A,T,C or G
gcgcgcgtaatacgaactcacttatagggagaccgaaatatggngtagncctnccacnccgncggggctggggnccgggacnccgggagnccatntnttctncncccagngaggnatncctnctngntggncctatnccctntttatnggtnggcctntncncctnggtngntngntnggtngngnaattantntntcaaanagcgngtggccttgggtaaaaaaatggtcgtccaaananaaaaccaatnggttccaacnttaaccttttaagnaaccaatttaattactnttggtncnaattcatctcggccttgggtttttnccttaagggtnggaattnggttttaaaattttnaattnctttccccattttttttcaaaagcccaannaaattggttggttnggggccccntccaaagaaaattggggggttaaaaaaagnnttccaaaggccaaagnccccntttnntccttttaaattttttncatncaaaccccttacnttggttaattccaaattccaaaggggttacacctntgcccnccaaccccaattgnccaannaaatnnccttttccccntggggggttccntacccncnttccgggggccttngnccaaggcctccanccaaaccaaaaaaaattncctttccncnccccntcccttnggtatttttttcctttcccccccccgggccggtttaacccccttcccgggggccacccggcttttcctttaaangnaaaaaccctttaaagngtttgggggggaantaccccncccncccgggggggggccctttgggccaaaggggggaaaaaattttcccgnnnaatttaaatttccaaaaagggcccttttaatttccgggaatttaaccccccgnttnccnggaaaacacccttccngngaaggggggggg

SEQ ID NO: 4468 - DNA, 959 bp, Homo sapiens
  misc_feature 43, 60, 71, 78, 82, 84, 88, 94, 102, 108, 118, 120, 126,128, 131, 133, 148, 164, 169, 173, 180, 182, 184, 188, 196,198, 200, 207, 209, 211, 215, 218, 221, 225, 227, 239, 265,274, 282, 292, 300, 302, 331, 341, 345, 349, 353, 381: n = A,T,C or G
  misc_feature 386, 405, 415, 421, 434, 437, 444, 479, 492, 496, 499, 502,508, 519, 538, 552, 558, 578, 581, 590, 591, 603, 624, 625,628, 648, 662, 665, 667, 672, 680, 687, 715, 718, 726, 734,735, 777, 789, 790, 796, 798, 808, 828, 868, 869, 872: n = A,T,C or G
  misc_feature 880, 890, 901, 906, 932, 938, 951: n = A,T,C or G
cgccgttaattaccggaacctttacaactttatttaaaggggngaccggaaaattatggngtaagcccctncgccacnccgncngggntggggnccgggtcnccgtcnccccgggggngnccaagngnttnanccacgtgggcaaaanaattaaccttaacctnggggnaaanaccacananantttnacatgatngntnatgcaanananccanganacnccangnaaactccaaganaaactcaattaaccatttgtccttgnaaattttcnccccggtntcatccaatngtaaatangngctactccagcccggcccaaagagtccgngagtccaagngtcnaagnctcnaagtccccaaccaaaaaaaaaaaagggnggaanaaggggggggcccccaaantgaaaggggnaaaagntttgggcctttantgnaaccccnttgaacccgcccttaagggggccaacccccaaagngggggggtaaggngccnggnggnggtaanaatgtgggaangaggtggctaggcaaaggngtccaatggggaangaaagnttttcccaacctttggggtnggnaaggtaagnnccttccgtaacnaaaaaggaggcaaggttaaanntcnttggcctttggccacccaanaaaaccaaatttcnttnanccaanttttaccnatttttnttaacccccccggcccaattttttttcnaanccaaagtnaaacccannccaaagtgggcccttttttgggggggggggggaaaggggggnttttaaaaaagnntttaanancccctttttnggcttttcccccccaaaggnaaaccaaatttaaaaaaaggtttttggggccccaaaaagnnttnaaggttcnccaatggttnccaaagttggnaaatntttctgaaaaaccccaagaccttttnccaaangttggcccccctnaatttaaa

SEQ ID NO: 4469 - DNA, 920 bp, Homo sapiens
  misc_feature 17, 20, 25, 27, 36, 46, 57, 61, 66, 68, 72, 78, 85, 87, 95,97, 103, 107, 112, 114, 118, 120, 122, 126, 128, 130, 132,134, 136, 140, 142, 146, 148, 150, 152, 154, 156, 160, 162,164, 170, 172, 184, 198, 200, 202, 204, 212, 225, 230: n = A,T,C or G
  misc_feature 234, 236, 238, 248, 257, 261, 281, 295, 297, 305, 311, 313,317, 319, 324, 349, 355, 362, 376, 413, 422, 447, 449, 452,456, 464, 466, 469, 478, 508, 516, 520, 525, 530, 539, 559,562, 592, 628, 651, 658, 661, 666, 680, 685, 693, 699: n = A,T,C or G
  misc_feature 704, 706, 714, 724, 737, 743, 762, 770, 775, 788, 796, 797,802, 803, 811, 813, 822, 831, 835, 837, 842, 847, 856, 885,901, 902, 903: n = A,T,C or G
atactgcacttacactnatnagggngnccggaaatntggggtaagnccttcccaacnccgncgggntngggnccgggnccgccgncncgccgggngnccaagnggtnacctntntctntntntctntntntntntntatntntctntntntntntntatntntngggctnanaattaaaatatnttaaaaccttttananantnatccccanccaaccaagatanaaganaaanantnggccttatcnccttaaganaagnccttggaaccttggtttttnttctccacgtttanangagaaagnttccangnccananttaanttttaaccccaaccaaggtttttgngggggnaacccanccaaaaaaatttanttggggggaaaaattcctttttaacccttaaattggnttttttggnccaaaaaagggggggacccccaaananatnatangggggcancnccnttaaaaggnaaaaaaatttataaaaaagggggggaaganaaaaaggngttnggccnaaccnaacctttcnaaaaaaaaaaaaaaaaaacnttnggttccaaatttccaagaaaaatttttttnggataaagggctttttaaaggacccttcttgggggnaaaaaaaataaattattcccttnggtaaanttnttttnttaaaaaaaaaccnttttnaacccttnaaattntcttntncccttaanttgggaaatncccccccacgacnaaaagnagcccaatttttccaaaantttttttnatttnttttttaaaaaanccaaaaannaatgnnaagggggngntttttttanttttttttnaacnanaaagnggggnaaatgtggntttcaaaaaaaaaaaaaaataaaaaaaantttattgtggggaaannnggggggggggaaaaaaa

SEQ ID NO: 4470 - DNA, 971 bp, Homo sapiens
  misc_feature 13, 31, 47, 51, 62, 66, 72, 78, 84, 86, 90, 92, 102, 106,110, 112, 114, 118, 120, 124, 126, 144, 146, 167, 182, 184,186, 190, 196, 198, 204, 208, 212, 214, 216, 222, 228, 240,242, 252, 254, 261, 283, 299, 301, 395, 432, 434, 447: n = A,T,C or G
  misc_feature 449, 453, 458, 474, 519, 522, 541, 561, 585, 627, 633, 658,674, 690, 693, 735, 738, 753, 798, 864, 966: n = A,T,C or G
aatacggaacctncaactttattaagggggnccgaaaaatttggggnaagnccttcccaacnccgnccgggntggggnccgggncnccgncncgccgggggnccangggntnancctngnaagngnccttggttaattaaccangncgccaaccaagggcgccttcnttctcccgcaattcncncnttcnccaagncncctttnaatncctngntnccaatnccaacnccaattccacancnccccccttcncnccattgnccaaccccttaaaaaaccaaanaaaattccttaaaacntnttggttaaaattttcccctttgggaaaaccaattggttccaaggggccaattaaccaattttaaattttccccttttccttgggccccttgggnaagaaaaaaggcccttcctttttcccttttggttccntncttttaaaaaaantncttnaaggnaaaaaattgggaattnggtttaaaaaaagggttttttttttgggaaaaaattaaaaaaggnttnttgggaaacctttaaattnccttttttaaaccttttttnccaatttgggcccaaaaaaagggnaaaaaggggggggggaaacccaaacccaaatttaaatttggnaaaggnaaaatttttccaattttccaaattnccaacccaaattgggnaaaggtaaaaccaaanggnccaaaaaaaatttaatcctttaaaaaaaaaaaagggttgggnttnaaaaaattttttttngggaaatttttaaatttaaaaaagggaaaggggtttttttttaangggaaatttaaaaaaaaaatttaatttaaatttgggaaaaaaaaaaattggggccaaaaaaggggnaaagggccccccaacccaaagggaaaggggggggggaaaaaattggggttttttttaaatttggggggggggggccccaaacccgggttttttttggggttnaaaaa

SEQ ID NO: 4471 - DNA, 963 bp, Homo sapiens
  misc_feature 28, 38, 42, 56, 62, 66, 73, 77, 83, 89, 95, 97, 101, 103,113, 120, 124, 130, 134, 136, 140, 144, 146, 155, 157, 163,167, 169, 171, 173, 177, 179, 181, 200, 207, 211, 219, 229,231, 239, 253, 255, 259, 269, 288, 299, 303, 312, 421: n = A,T,C or G
  misc_feature 458, 479, 495, 533, 584, 603, 630, 632, 635, 643, 653, 679,682, 688, 710, 726, 747, 763, 780, 802, 846, 858, 939: n = A,T,C or G
ccgccgttaataccggaaccttccaacnttattagggngagnccgaaaattttggngtaagncctncccaacnccgnccgggntggggnccgggncnccgncnccccgggggnccagggnttanccaatnccgngnaagnccgntnggcccaagngnccttgnccgntntncnccgntncnccttttaaccggaaattgnaaaaagnaacnccaaccgnaattggccangnttttttcncaaaaaaaccaatntnggcnccaaccttanccaattaaccaattggggnaaaaaggtggnaagnggggggggnaaaggccccaaaaccccccaaggaaaaaaattggggggccttttttccttccttaaaattccccttggggggggaattaacccccaaaatttaaaaggccccaacccanaggaaagggggtttggggcccaatttgggttgggttnggaaaaagtttttgggccaangggggaaaaacccttncaaattaaaggcccttggggggaaaaacctttggaaangggggaaaggggggggggggtttgggaaacctttggggggaaaggaaaggngggggtttggtaagggggnttccaaaccaaacccttggggggcccnanggntttaaggnaaaaggtccncccccaatttaacccaaagggcccanggntttttnccggggggccccctttgggttnttcccccttttttttnccaaaagggggtcccttgggnaaccctttcccaaaanaaaaaaaggggggcccntttgggaaatgtggggaaaggngggccctttttttttaaagggaaattttttcccccaaagggggngggggtaaaggngggggggcccccccgggaaagggcccttttttgggcccaaaaaaaaaatttaattttgggaaaggggggaaagggaaaccnttttttaattttttccccccaaag

SEQ ID NO: 4472 - DNA, 976 bp, Homo sapiens
  misc_feature 16, 118, 130, 136, 138, 154, 179, 187, 209, 226, 229, 230,244, 269, 283, 285, 288, 293, 295, 299, 307, 319, 323, 333,335, 343, 348, 349, 360, 368, 371, 375, 384, 405, 411, 413,418, 427, 430, 434, 435, 450, 480, 503, 534, 543, 552: n = A,T,C or G
  misc_feature 553, 594, 602, 615, 618, 623, 628, 699, 712, 749, 760, 762,767, 774, 776, 779, 781, 794, 804, 823, 824, 835, 862, 874,896, 900, 907, 926, 928, 932, 938, 947, 955, 959: n = A,T,C or G
gcccccgcggtggcgncgaggactttattttttttttttttttttttctttatatataatattcaactttatttcaaatataccaattttaaaatttatccaatgattagcccccatnttaccgaatctncctttntncctcgggaaggttggnaaccaattgaaccccccaacccaanccaaaaanaaattttttcccaagaaatttnaacccggggggggaaanttnntccccctctccccnttaaaaaaaaaaggggaaaaaaaantttccccccccctngnccnttttntnaaangggggggnccccttttaaancccnttttttttancnaaaacccnttttnnccaaaaaaaanaagggggnttncccntttttcccntttgggggccccaaaaggggncccctntnggggnccccccccnttngggnncccaaaacccctttnggggtgttgggaaaaaaaaaaggggggggnccccttttggggcccccaaaaanaccccccaaatttttaaagaaaaaaaatttngcccggttnggggggtcnncccttttatcctttttttttacccaaaaccccttttttttncccttttnccccccccccccnccnaaagnagggngccccccccctttgtttgggggggaaaaaaaaagggggggggggggttttcccccccccaaaccccttttntttgttggggggnccttttttttttttccccaaaaaaattttgaagtttncccaaaaaaananccccnaaagggngnaangngcccccaaatttncccaaaattngaaaaaaaaaaattttttnnccccccccttnggggggggggggaaaaaaatttggggnaaaccccttttncccccccccccccgtttggggncccnaaatttnaaacccctttttttggggntnattngggggntgggggggncccctttngggnccctttttttggggggg

SEQ ID NO: 4473 - DNA, 972 bp, Homo sapiens
  misc_feature 13, 20, 25, 53, 57, 64, 68, 70, 74, 80, 86, 88, 92, 100,102, 106, 108, 110, 112, 114, 116, 118, 120, 122, 124, 126,128, 130, 132, 134, 140, 142, 148, 152, 154, 160, 162, 168,169, 173, 182, 184, 190, 208, 220, 228, 232, 237, 239: n = A,T,C or G
  misc_feature 241, 243, 247, 259, 261, 265, 275, 290, 293, 295, 297, 299,311, 319, 354, 414, 437, 441, 449, 462, 479, 519, 532, 554,559, 564, 572, 577, 609, 617, 629, 689, 706, 723, 727, 728,734, 743, 761, 768, 776, 780, 805, 813, 818, 820, 823: n = A,T,C or G
  misc_feature 825, 834, 836, 849, 855, 862, 876, 885, 891, 913, 935, 963: n = A,T,C or G
taataccggaacnttacacntgatnagggagaccggaaaatatggggtaagcncctncccaacnccgncngggntggggnccgggncnccgnaagcgctnancctntntntntntntntntntntntntntntntatctntntctatntctntngggcgntnaattgnnaacnccaaacgtntnttgcgnctccacccacacttttanttatgcctaggnggccttcnccanaagananananaganaaaattccacgntnccgnaagtccccangtttttttggggatntgncncngntgggccttttcnaattgagnccccggggttggccccccaaccaagaaaaatttanggcccttccttgggttggggggggttccttccccggaattcccaaaaccggcccttttcnaacaaaaggcccttttttaaaantaantaattggnccaagggggccanaaccaacccctttctanttgggaattccaaggggggttaaaaaaattttttttttgnaaacccgcttaanggtggaaattggggggaaaaantgggncccanccgggggnccccnaattttttttaaaccaacccttcccaattggngggttttnccggcccaattntttttttggggaaaaaaaaaaaaggccctttaaaacccaatttaatttgggaaaaaaggnaaaaagggaaaaatttnacccccctttttggggnaagnnttgggnttgggcccnttccaatttcccaaaggnaaaaggnaaacccangggnaattttttttttttttaccaaaaanccaaaagngcccnanttncntttttgggntnaaaaatttttttnaaaacncccttanaaaaaaaaaaattnccacaaggnaaattnatttaaaaatttttcccaattnttggggggggaaaccccccttngtttttttaaaaaaccaaaaatttaggnttaaaaaaa

SEQ ID NO: 4474 - DNA, 976 bp, Homo sapiens
  misc_feature 5, 14, 24, 30, 33, 48, 60, 72, 78, 84, 87, 91, 93, 99, 104,108, 110, 114, 122, 135, 152, 175, 200, 206, 230, 238, 240,244, 247, 289, 293, 306, 324, 381, 393, 419, 445, 458, 529,532, 534, 548, 565, 567, 600, 613, 614, 659, 664, 665: n = A,T,C or G
  misc_feature 671, 684, 690, 842, 845, 872, 877, 889, 931, 956: n = A,T,C or G
tacgnactacactnattagggggnccgganatntggggtaagcccctnccccaccgccgncgggggttgggnccgggncgccgnagngctnanccaaanaaggnaagntnaagnccttggcnccccccttttctnccaaggggggcccaganaattgcaattggcctttttcggnaagaaaaaaccaattaacctttttnggggcnccaattttaaccccccccccaagncctttttngnaagnggnaaaaaaaattggggggccttttggggaattggaattttaatntttntaatcggtttttntaagaggggacccccccnccaaacccctttaagggccaaaatttcccttaacccctttcttttccaacccttggnaccccccttggncccccccccaaccttttgggccccanttaaaaaaaaaaccttttaaaggccnttaaaaaaggttnttttttgggttttcttattgggtttttttttttcccaaggcccgggtttttaaaaaattggggttaaaaanaangngggggggggcccanggtcccaaagttttggncnccaaaaaaaaaaaaatttaatttaaaaaatttncaaagggaaaggnnaatttaaaaaaaagggcccttttttaagggggggtttccaaaaanaaagnntttttnccaatttaaaggnaaaagnttttttccccccccaaatttgggaaaaaaacccttaaatttaatttggggaaacctttgggggcccccccaacccaacccaaaggggggaaatttccctttttttttttggggttaaatttttttttaaaaagggggggaatttttcccttnggnaagggaaattttttttttgggcctttnttggnaaggccccaagnggggaaatttttaaaggcaatttaaaaaggggggcctttggnttgttcctttttttaaaaaaaattngggttccctttgggaaaaaa

SEQ ID NO: 4475 - DNA, 417 bp, Homo sapiens
ccgcggtggcggccgaggtacatctagcctgaggcaacctccacggaagagccagggaaataaatgctctgccttccagtcctgtggggactgttcagtgtgttatggaaggggtcccgaacatcccgggccatggaccagtgagctgcgggcgaactagcactcactgcctgagtattactgcctgagcttcgcctcctgtcagatcagtggcggcatcagattctcacaaaagtgcaaaccctattgtgaactgtgcatgtgcaggagggatctaggttgcacgctccttatgagaatataactaatgcttgatgatttgaggtgtaacagtttcatccccaaacaatccccccaccgcctcacctactcaatctctgtagcattccacagtctttatagcaacagaataccccc

SEQ ID NO: 4476 - DNA, 988 bp, Homo sapiens
  misc_feature 27, 29, 31, 46, 49, 53, 58, 62, 68, 74, 80, 82, 86, 89, 93,108, 112, 114, 125, 127, 135, 137, 143, 149, 153, 157, 161,166, 175, 190, 196, 204, 206, 210, 216, 223, 229, 237, 247,252, 276, 282, 290, 333, 365, 381, 399, 422, 444, 458: n = A,T,C or G
  misc_feature 471, 507, 520, 522, 540, 564, 566, 584, 675, 719, 727, 734,766, 771, 864, 870, 920, 925, 966: n = A,T,C or G
cgcgttaattacgactcacttataagngngnccggaaatttggggnagncctnccacnccgnccgggntggggnccgggncnccgnagngctnaccaaaattaaaatntggncntgggggaaaancnccttgggngnaagggnccgggnaagnggtntggnccagnttggaaacnccaaaaggaaatttnggccanccccaacntnggcnaacctncccaagnccccgnggggggtnggaaccaagnaaagntgggagggaaccttccccgtaacntggganaaaaaatnataaaattaaaaaaccaaaaaattaaaaaattaaaaattaaanaattaaaaaatttaaaaattaaaaaattaaanaatttatttttaattngggaaattggggtttggnaaaaagggggggaaatttggggnttaatttaaggaaaaaattttnggggaaggaaaggnaattttaaatttnctttttaaaccttgggaaaaaccaacccccttgggntaaaggttgcccncnaaggaccttttttttccnttcctttggggggaaaaaaaggantngggggtttgggggggttnaacttttttttggggaaaagggccccaagggggggaaatttgggtttgggccccaacccaaaaaagggggggcccaaaaaattttttgggnaaaaaaaatttgggcccccccccaatttaaaaatttttaaaggntttttttncctttcnaagggcccttttttttggggaaaaaatttaanccaancctttaatttaaaaaaaacccttcccaaaggttttggggggcccctttgggaaaaaaggggggaaagggggggaaaaaaaaaatttttttttnaaagtnaaaaaaggggggaaaaaagggccctttaaccctttaaaaaaaaaaaaggnaattnccttaaaaaattttttttgggaaaaaaaaaaaaacctttancccaaaaaaaaaaagggcccaa

SEQ ID NO: 4477 - DNA, 116 bp, Homo sapiens
  misc_feature 74: n = A,T,C or G
aggtaccagctgaagcacttcagcgtgaacgccacagaagtggctccacggcttgtaaccttagaaatccccanaaatctccttgaacagacctgggacagaatgtgcaatgtcct

SEQ ID NO: 4478 - DNA, 439 bp, Homo sapiens
  misc_feature 18, 19, 79, 80, 341, 342, 349, 359, 371, 393, 417, 431: n = A,T,C or G
atacgactactatagggnnaattggagctccccgcggtggcggccgaggtacggttcagcctgtgatcacttcattccnntcaatttatggggccgagacttgttacaacaatggcatgcagagattactatcccagcctccctatacagccccaggaataaaaaaatcatgactaaaatgggatagctccctaaaagggactaggaaagaagtcccaattgaggctgaaaaaaatcaaaaaagaaaaggaatagggcatcctttttaggagcggtcactgtagagcctccaaaacccattccattaacttgggggaaaaaaaacaactgtttggtaaaannatcagcncttccaaaanaaaaactgggangctttacatttattagcaaaanaaaccttttagaaaaaaagggacnatttgagccccttncatttttc

SEQ ID NO: 4479 - DNA, 392 bp, Homo sapiens
  misc_feature 281, 322: n = A,T,C or G
aggtacactggaggctggagcctgcagatggcatggctctgcggctcaccttgctgcagttggtggtggtgacagagactgcagcttgactgtagtgaatttggaaattatctgtctggaagctctgagtttatcttgggacctcaagaggagaggatcacccaactcacagcaatcaaactccaaatggtgctataaactgaaccacacatggacacgtcagtcttccgaggacccttagatcaaccccaggaggagccctagctgctgttccccattcngacgcccctttccagcaggaagtagccagaagacatcgtcncccaaacctctaacagcagttagtgcggcatctccacagggggaatgttgtaggagttattgataaatta

SEQ ID NO: 4480 - DNA, 284 bp, Homo sapiens
  misc_feature 147, 152, 194, 211, 215, 219, 228: n = A,T,C or G
ccgggcaggtacttttttttttttttttttttttataaaaacagctatattttggcactcaagaggcaaaagctaatacagatgatgaaagaacacaaagaaaataagatttgcctattcaaaatggtgcctcgggcaggtcctgtntccanaagaggatgttcatccagggtctggggctaaggtcatcttancacagcccagctgccancttncctnctctgccgnttcccttgaacacaagccagcttcccttatctaacccttcttggccctgttaaaaa

SEQ ID NO: 4481 - DNA, 351 bp, Homo sapiens
  misc_feature 329, 332, 333, 338: n = A,T,C or G
ggcgaattggagctccccgcggtggcggccgaggtactaaaagaaaatgaaacaggcaaatgatgaaatgtggatctttttcattcaagaatatggaaactcattggactgaaaaacccaaatcttcattataccaaacttctataatgatcttaatggtagttagctttaaaaaaacacaaaataggctgggcgtggcggctcaggcctgtaatcccagcacctcgggaggccgaggtgggtggatcacaaggtcaggagatcgagaccatcccggccaacacagaaaaaccccgtctccactaaaaatacaaataaaaataaaaaanatnnttaanaagtacctgcccg

SEQ ID NO: 4482 - DNA, 463 bp, Homo sapiens
  misc_feature 67, 273, 285, 359, 371, 372, 381, 415, 427, 428: n = A,T,C or G
cgaattttagctccccgcggtggcggccgaggtacccagaaaataagaaagggttccaaaatgaagnttcgctccttttgcaaaccttatggtaacaaatataatatttataaaaagtgaattaggtaatatgttaatggagaaataaacatcattatgaaatgctatcttaaacaaaaaataagagaaaatattagtttaaaaatagaacttatagtcgatttaaaaaagcaagaccaaactcttagctatgcacaagaaagttactttacncattcacaaatnttaaaggatgagaaaacatgggttatgaaaatatgaaccgaaatgaagcctatagttgcctgggccaaattttncagaccaaaatnngacccttcngaaaaagactttttagggacctttaacagggggnatttttccattnngggattaaaaagttttcccactttttttttttaaa

SEQ ID NO: 4483 - DNA, 135 bp, Homo sapiens
  misc_feature 42, 96, 101: n = A,T,C or G
aggtactaagttgccatttaagaacctcttcaggttccccgnctccttgagctatgaaagttttcatgaacacttcagttttaatggcatgccaancattnttgttccattgagcaactgcaacagttttaaaaa

SEQ ID NO: 4484 - DNA, 541 bp, Homo sapiens
  misc_feature 1, 29, 157, 160, 176, 190, 202, 203, 210, 211, 218, 223,243, 244, 252, 260, 267, 270, 271, 289, 292, 295, 301, 316,319, 327, 346, 351, 354, 363, 369, 379, 390, 391, 394, 408,422, 426, 445, 452, 454, 455, 460, 476, 492, 498, 502: n = A,T,C or G
  misc_feature 509, 511, 512, 516, 519, 522, 524, 527: n = A,T,C or G
ncgcggtggcggccgcccgggcaggtacngcgggggggcatcacggacctaccaatatgtgatgtcacccctggtggcccagctgtgtcatggagaaactccagctgggcccagagattctgcagcgggaaaatccaaggtcttatttttatgccanggncttgagttggattttnggcccagttcaggnaaagctttctgnncggtttnngcctggnccacngattatcatacctaatattnngcttttgntccattgntggtaanggnnaccagacattatttctanagnttncttttntcctgttgggaaaanacntcaagganaatttggagttcttgttgnggcanagncatctcttncgtagngaacaagtanaccaattgttnnggnaattggggttgagnaagccacccctttntacntaattaaccggaacctttnaacaagngnnaccangtccataaattggggngggcaaattttccaantgggtncctngttttgngnnaggnccntantnaanaaaaccccccccaa

SEQ ID NO: 4485 - DNA, 384 bp, Homo sapiens
  misc_feature 168: n = A,T,C or G
ctcctatagggcgaattggagctccccgcggtggcggccgaggtacgacatacactatttttcttaagaattctattctctatgtctctatgtaggagaggaaaatgtttcttttcttacccatcagttcgtggctgagatccctataacaaaagacagattgacaangagaaaagcatataaatttattttaatgtaggttttaagtgacccaggagccttcagaaatgaagacccaaagaagcagggaaattggtctatttttatgcttaggtctgacgaagaccagagagttatggggaagtgtgattggacaatgggaatatgatctaatggtaataaattggggaaaacttagcaacgcctgtttgttcacatttcttc

SEQ ID NO: 4486 - DNA, 125 bp, Homo sapiens
  misc_feature 35, 43, 45, 60, 79, 108: n = A,T,C or G
caggtaccacatttgtgaatttatgccacagactnatttacgnantgcactaaaattatnaatagagataatgattgcngcatggtttagagtactaaaggactgganacaatctccatggcact

SEQ ID NO: 4487 - DNA, 313 bp, Homo sapiens
  misc_feature 59, 66, 70, 275, 277, 283: n = A,T,C or G
ccgcggtggcggccgcccgggcaggtacttttttttttttttttttttttttttttctnatatttngaanagatgagttctcactatgttgcctaggctggcctcaaactcctgacctcaagtgatcctcctgcctcagcctcccaaaacactgggacaaggtcacaatatttatcttctcaagtaaggggtctgctctttttgtcttcttcttcttgaccttgcagcagcatctgaaatggttttccctccttcctttctgaaaaacttttctntntggaanattccaggatggcagactcccctgacttac

SEQ ID NO: 4488 - DNA, 361 bp, Homo sapiens
  misc_feature 221, 287, 293, 315, 340: n = A,T,C or G
ccgcggtggcggccgaggtactttttttttttttttttttttttcttaattcattttttttcccttggtataacttggaacaaattttttttcccttggtataacttggaacaaattttatttttaaaaagaaaaaaaaggaaaataatggtccacagctcctaccctcacccccatgagcccatccccaccacaaggacaagcttacagttcctgaaggngaggccaacagctgctgaggagcaaggactcgttccagctgcttctaaacaagggggccaggcctntgccanagccttctccttcctgccctgngtcaagctatccaagcttcctcctnaacctttaccctgccctatgc

SEQ ID NO: 4489 - DNA, 452 bp, Homo sapiens
  misc_feature 28, 29, 90: n = A,T,C or G
atacacttactatagggccgaattgganntcccccgcggtggcggccgaggtacattctttctatgaagatttttcccgtgggatttccncccatttacccaataattcattcataataaacagttgttgaacctagataaaatacacctctgtctcttcccatttgcctataagtttcttgccaagatgtgatacagcagctcaaagaatgcttgccaagtcactaatagtctttgctctctctagttcagtgactttccgatactgtgtaacattcagggcactatgtgaacttgtaagtgtgaccatactgcatgttttatggtgacctggtccagtaccacatcacaaagaaactcaggagtgacagcagcaggaggctccatttgagggatctcagtgacatcctactcggaagggacagtccagagagcccgaggccatccacagc

SEQ ID NO: 4490 - DNA, 435 bp, Homo sapiens
tagggcgaattggagctccccgcggtggcggccgcccgggcaggtaccttgggtctgaaggggtcactcaagcgctctgctatctctgcagctaaaacgggtgtcaggttttcagctgctactaaagataatgagcataagcgttcactgaccaagactccagccagaaagtctgcacatgtgaccgtgtctgggggcaccccaaaaggcgaggctgtgcttgggacacacaaattaaagaccatcacggggaattctgctgctgttattaccccattcaagttgacaactgaggcaacgcagactccagtctccaataagaaaccagtgtttgatcttaaagcaagtttgtctcgtcccctcaactatgaaccacacaaaggaaagctaaaaccatgggggcaatctaaagaaaataattatctaaatcaacat

SEQ ID NO: 4491 - DNA, 444 bp, Homo sapiens
ctatagggcgaattggagctccccgcggtggcggccgaggtactgatgcaacatgttgggtagccaatctgcagacagacactggcaacattgcggacaccctgggggagggaagatttcattttacgtgagattccctacaggaaaggaagtccaagtaagggtgaataaagagaacccttagcagacaataattgccaggttggcagctcagtctcaagagaggccatttcatctcataccaaatgctcctggcagagcaattcagccccatcaaataaattttgcccttattccaaatccaggtcttctgtatccattgttgatggcatttacttccaaagcccctaccacaacagtgaaaagcataaacgactaacgtagccattgagttccatgaacgaaaaatgttcaacgatttccagatgtgaacttcattcactt

SEQ ID NO: 4492 - DNA, 342 bp, Homo sapiens
  misc_feature 302: n = A,T,C or G
ctatagggcgaattggagctccccgcggtggcggccgcccgggcaggtacatgtatgggcaagtgggagttaatttataaccaaggatcagggtggggttggtgggtggaaaaatcacaaagagaaaacatcaagggtaagggggattctggctaaaccaaccaaacaggattcttgctgaagacaggctgggtgatcagacatcacctgtggcacggtggaggctgaggaacccgatcagatatccagagtgatcagatacccgagggtgggaggttctggctaaactgactgatcaaggnttttttgctaaaactggattttacaaggaaatgcacaaga

SEQ ID NO: 4493 - DNA, 192 bp, Homo sapiens
  misc_feature 82, 86, 107, 135, 191: n = A,T,C or G
ctatagggcgaattggagctccccgcggtggcggccgaggtactttttttttttttttttttttttttttcctgcacatctntagnggaaagcgtaagaagcataanattagcataggccagcagtaagtctgtnttggttgcttgccagtcacttttatcagactccaaacactgtaaagactccagatnt

SEQ ID NO: 4494 - DNA, 399 bp, Homo sapiens
  misc_feature 205, 329, 350, 389: n = A,T,C or G
ggagctccccgcggtggcggccgcccgggcaggtacctgaactgtatgcagctgtggccggcatcagagtggagagcctcttctacaactatagcatgctttgaagagtctcgggcaagaaacattcatgcatgagtatatgttcttggaatcaattcctctaagaacagagaatggtctttcccagggacacaaagggagaaangggacatggattcttgatcttcctttacacatttctcgggaaatctgaaatgatgctggatgggactctacacatcctgagctaagacatactgtcagtctcacttctgctgtcccagtcctanaaatcctgggtagaaagtggntggacctgtgcaaaggaggtttttaataactctgcagtnttttgttggg

SEQ ID NO: 4495 - DNA, 546 bp, Homo sapiens
  misc_feature 5, 222, 224, 231, 290, 295, 309, 310, 316, 317, 333, 334,336, 339, 340, 342, 343, 348, 363, 371, 373, 390, 391, 394,399, 405, 406, 409, 415, 432, 445, 452, 456, 466, 467, 472,476, 483, 499, 504, 510, 527, 528, 530: n = A,T,C or G
cactnctatagggcgaattggagctccccgcggtggcggccgaggtacttctttctttctttctttctttctttctttctttctttctttctttctttccttctttctttctttccttctttctttctttctctccttccttccttcctttctttctttcttgtcttgccaggctggagtgcagtggcacgacctcagctcactgcagcctctgcctcccangnttcaggntgattctcctgacctttagggtgatccccctcctaggtctctcaaaagggcctgggaantaccngggggggaagcccnnctggcnnccccgggcccttaaannangcnntnnttttnaaatgggaaagggtnaaaagttngnataaatttccaagtggnnctnaaccnaacctnnaangggggnatttaaaaaaggggganggggggttttatnattgaanaacnatttttggcnnttttntaanaaaaaancttggattcctaaaangcttncaaatngggggaaaaaaaaccannantttggaaaaaatgggg

SEQ ID NO: 4496 - DNA, 437 bp, Homo sapiens
  misc_feature 312: n = A,T,C or G
accgcggtggcggccgcccgggcaggtacgcggggtttacattgacctttacatttaaagctgttcatccatggtgcctccccaaatcataagaccaaagaccaccaaacgcagggtggactctgctcattattctttgacccaaaaagactggagaaggtatgtgctttaagtgctgctctacctgaaaagaaatcctttaaattacctatggaagtgatgtcctcagataatcttaatgactattttggcatttataaatagaaatgattatggactttgatctgccatacggaggttcggaacctgganaacggctgtgataagtaggttttgattgagtgaaagcatgagcttgttcagagtgaggggcatagtgaaaaaggaacagccatgcctcaaaatcaaatcatttgcattcccacagcatcctgaat

SEQ ID NO: 4497 - DNA, 447 bp, Homo sapiens
cactacttagggcgaattggagctccccgcggtggcggccgaggtactcaaatttactacaaaattaataatagtaaatgtaaaatatgtatttatacagccttttgcagacttatgaactatctcaaattcacgaatcctattttttaaatacagttttaagtttcaaccacttgtatcaccagaattttgagacttaactcccatggttaagagatttccaagctgtgttcacacctgtagtcccagctacactgaaagctaaggcgggaggaccacatgagcccaggagttccagactagccttgctctatttaaagagcaagactccactgccaaaaaaaaagaaaaacaaagaagagaattccataaattacttggcttcttatattccatctcttcagtgaaacagtacctgcccgggcggcccgctctagaactagtgga

SEQ ID NO: 4498 - DNA, 391 bp, Homo sapiens
  misc_feature 66, 244, 280, 297, 301, 365: n = A,T,C or G
acttagggcgaattggagctccccgcggtggcggccgaggtacttttttttttttttttttttttncctcttttaaacaggctgatatggtttggttctgtgtccccacccaaatctcatctctaattgtaatccccacgtgtcaaggaagggaccttgtgggaggtgactggatcatggggacagtttcctccatgctattcttgtgacagtaagtgagttatcacaagatctgatggtttanaagtatggcacatccccccctcactctctttctctntcctgccaccatataanatgngtcttgctccccctttgccttccaccttgattataagtttcctgaggcctccctagccatgtanaaccgggagtcaattaaacctctttt

SEQ ID NO: 4499 - DNA, 190 bp, Homo sapiens
  misc_feature 4, 128: n = A,T,C or G
ctcnccgcggtggcggccgcccgggcaggtacgcgggggcttttctttctgttctctgacttgttttctatagtcatccccaattttaatagcctgctttttaaaaggtaatgcctgcgaaatggttntgtcacattttctatgttctgttcctttccattgctcattttgcaagtgtatcctacttgga

SEQ ID NO: 4500 - DNA, 436 bp, Homo sapiens
cctatagggcgaattggagctccccgcggtggcggccgaggtactctctgagaaagatcgtgtcctctgtcttgttgggggtgaagtaaaagaaggttgcttggatctcctgaaccgacttattgtactgcattcttgcttaaatagtattaaccataaaggaggtcaggtttatagggtttggtttacctattaaaccatcattgactatggaaatacttactaagcaatatagagacagacaatattatctttccccttatatcttttaagacagccactcaagttttagaagagtatgatacaacattagagaaagaaagatacaaaggctttattcatgtgtgatagtaaaaatcaggatgagtcttagatatacaaaagataaatgggatatttaaaatagttatatatgcttttttagcaaaaatattca

SEQ ID NO: 4501 - DNA, 301 bp, Homo sapiens
  misc_feature 229: n = A,T,C or G
ctacttagggcgaattggagctccccgcggtggcggccgcccgggcaggtacttttttttcttttttttttttttttgaattgacttttttttttaaactgttgagggttctttaaatattctagatacaatcagttgccagatatgtgatttgcaaatgttcttccagtttgtagcttgtctttgcatcctcttaacagtctttaatcaggtaaaaattcttaatttncatgatgtccagtttactaatatttccttttatggctcatgcttttggcatcaaagttgaaaaaaaacttgg

SEQ ID NO: 4502 - DNA, 449 bp, Homo sapiens
  misc_feature 80, 323, 389, 398: n = A,T,C or G
tagggcgaattggagctccccgcggtggcggccgaggtacttttttttttttttttttttttttttcttttttttttganataaggacttgctctgtcgccaaggctagaatgcagtgctgtaatcacagctaactgcagcctcaacctcccaggctcaagcgaccctcccacctcagtctcccacgtagctgagaccacaggcatataccattataccaggctacttttaaattttctatagagatgtggtctcactatactgctcaggatggtcttgaactcctggcctcaggcaagcctctcatcttgactttacaaagngctggaattacagacttcagccactatgcccaggcttggctaattttttaatgtatgaaattagcnctttcagcnctatttgtatctccctaatttctttgctggaaaagggcagggaaagggaag

SEQ ID NO: 4503 - DNA, 276 bp, Homo sapiens
  misc_feature 14, 32, 61, 175, 197, 230, 239, 245, 251, 255, 265: n = A,T,C or G
aaggttcatcaaanaatttcatcaaagttcangggatgacctctttttaaaattttcttantattctatgtaactatcaccgatcttttccccacacactccaagagctttttaatataattttctacatagccatcatcacagataaccaatcctctttttttccccactaganatgtgccttccgtaacctctgncctcttcctttaacctggaatattgctcttcangcctgttgngcaagntaaaancttnattcctcatnatcctggggtt

SEQ ID NO: 4504 - DNA, 264 bp, Homo sapiens
  misc_feature 77: n = A,T,C or G
cttagggcgaattggagctccccgcggtggcggccgcccgggcaggtacttttttttttttttttttttttggcaanaagcttggagaattaaattgatcttcttaatgttacataatgctgccttgcaacaagtagtatatttattcttcaaagaatgttagaaatctttgctaactaactagcaaatcacgagcgaaaccagcaaggtgtaaagaaggtcgcaaaaagaaatgcaaatggttataacagtatcaatctaaaa

SEQ ID NO: 4505 - DNA, 102 bp, Homo sapiens
cgaggtacctctggaagtgtgggtgaagaaggcagctaaaataaggaaagctagttaaacctatttaaaagccagtcagatataataggtaaaattgtataa

SEQ ID NO: 4506 - DNA, 585 bp, Homo sapiens
  misc_feature 19, 118, 119, 130, 133, 136, 144, 164, 174, 178, 183, 197,254, 257, 261, 275, 287, 291, 300, 306, 343, 344, 352, 357,367, 371, 372, 381, 383, 389, 403, 413, 415, 419, 420, 441,442, 460, 464, 469, 470, 477, 481, 485, 487, 489, 491: n = A,T,C or G
  misc_feature 505, 507, 509, 512, 515, 539, 556, 563, 564, 572, 575: n = A,T,C or G
ccgggcaggtaccaccctnttgctgaaagcactggttcccctgttgaagcttgctagggattacagtgggtttgactcaattcaagtaagtaagcaaacatttaaatatttttcaggnnaataaaatgtntancgnttcttatncctgttaaattattgcccanagttaaaaantacnatttntaataataaccttnaccttggtccttttgatcttacaaaattgtcaattgactaataccaacggttgagantanatgngatggtttacaatnaaccctttttanaggnaatgtaagnaattcntttaattatgcttccaaatgggaaaccaaggtctaanntaataaanattantgtgtaatangtcnncgataagcnanatttgnaaagattttaaagnggaaattggnanaaannttttccaaaaaaatttggtgnngtatgttaaacaatgtanacantttgnnaaaagcnaaancccncnangntaattatccctttncncnaangantaatgcttataaaaatttttttcnattttaaaaaccaaatnggggggnnttaaaccnttntaatttaaaa

SEQ ID NO: 4507 - DNA, 317 bp, Homo sapiens
  misc_feature 30, 73, 96, 105, 116, 137, 145, 148, 150, 155, 166, 168,169, 170, 179, 184, 194, 230, 235, 240, 244, 245, 251, 265,267, 272, 274, 277, 282, 285, 288, 294, 297, 299, 308: n = A,T,C or G
acgcggtggcggccgcccgggcaggtactngtcatggagctggcactgcggcgctctcccgtcccgcggtggntgctgctgctgccgctgctgctngggctctgnaacagcaaggnagcctgtcatttgacatggcncccacaanaangnaaggngcaaatggganannntaattgggngaatntaattgctgnaacgggttaccagcaaagggtattgcccctcaccantgatntcctngggnngggccntacttattttaatngnctcancncanaaacnttntcntgggcnaangnaaaaccttntcattcaag

SEQ ID NO: 4508 - DNA, 221 bp, Homo sapiens
  misc_feature 21, 37, 39, 45, 56, 58, 88, 90, 93, 119, 121, 152, 155, 171,188, 189, 193, 211: n = A,T,C or G
aaggaaaaaaaaaagtcccgnccggggtcaccttaananaagtcnggcccgtaagntntcctttggggtttgggaacctttttggggncnaancccccaacccccggtgggcccaaggncntttgaaattggggggttaaccccccaaaagnccnggcccccaagggccgnaaacctttgggggaaanngaanttggttttctttttgggngaaaaaaaaa

SEQ ID NO: 4509 - DNA, 421 bp, Homo sapiens
  misc_feature 126, 138, 154, 163, 164, 170, 174, 176, 189, 202, 204, 217,218, 226, 228, 230, 233, 235, 237, 240, 252, 253, 257, 258,268, 270, 286, 293, 295, 297, 309, 314, 334, 335, 339, 346,367, 374, 385, 386, 396, 405, 421: n = A,T,C or G
acgcggtggcggccgcccgggcaggtactaaaaatacaaaaaattggccaggcatggtggcacatgcctgtaatctcagctactcaggtaggcttgaggcaaggagtaatcgctttgaaccccatngtaagctggganggttgggacatttgangtcccgaannaattcngctncncattttgcacctntcaagaacttggngnccaaacaaagtannttgtaaanancntcncnantgntaatagataaanngaanncccataatananatccaaacaattaganataattngntngttaattcgttntaatnataaaccaaggttttggaanntttnccctttntcttggtcgaaagggaacccnaaaaacnaattttccaanngtggttattntggtccttncgacaatattaatttn

SEQ ID NO: 4510 - DNA, 219 bp, Homo sapiens
  misc_feature 114, 138, 149, 150, 154, 170, 171, 185, 188, 193, 203, 208,211: n = A,T,C or G
ccgggcaggtactgggattataggcgtgagccaccgcgtctggcctctaacgagatatttctaaaggttaggccctcagtcaagaattttaaagctggatcttagaggttattntaaaactaacctctccattttcantaagaataaanngaanaggtgtagttccccannaaaaagacacttgnttntttgngaaccacagnttttnaanaaaaaggc

SEQ ID NO: 4511 - DNA, 140 bp, Homo sapiens
  misc_feature 12, 83, 140: n = A,T,C or G
acgcggttggcnggccgcccgggcaggtacaattttaaatctctgatttagagatgaagaaactgaggggtagagaggttaantaacatgcccaaagttacacagctgataattggttaggctcaggattttgaaaccan

SEQ ID NO: 4512 - DNA, 401 bp, Homo sapiens
  misc_feature 270, 374, 376: n = A,T,C or G
ggagctccccgcggtggcggccgcccgggcaggtactttcttttttttttttttttttttgagacagagtctcagtctccagcctgggcgacagtgagactttgtctcaaaaatatctaaatcagatatgggtgagacccaaggtttagcttatcctgaggcaaaattcccctccagctgtgaacctatgaaaccagacaagttatgtgcttccaaaatacagtgatgggataggcaggattaggtattccaattccaaaagtgagaaantggaaggaagaaagggatgatgaggctgggtgtgatggctcatgcctttaatcctagcactttgggaggctgaggtgggaggattgcttgagtccaggaagttngngaccagcctgggcaacataggggag

SEQ ID NO: 4513 - DNA, 564 bp, Homo sapiens
  misc_feature 1, 134, 189, 204, 221, 228, 232, 239, 250, 252, 255, 267,269, 274, 287, 296, 314, 321, 324, 332, 334, 339, 344, 347,350, 354, 357, 368, 370, 375, 388, 391, 395, 402, 405, 407,408, 424, 436, 447, 452, 453, 460, 465, 467, 480, 488: n = A,T,C or G
  misc_feature 493, 505, 512, 518, 520, 532, 544, 551, 553, 554: n = A,T,C or G
ncgcggtggcggccgaggtacaagtaattgctggaacctgggaggcggaggttgcagtgaaccaagattgcaccactgcactccagccggggtgacagagtgagactccgactgaaaataaataaataaattcnattaaattaaatttaaaataatttatagggaatgggttgaaaggggaaatgggtnataatgtatatttgngaagcagtatttattantttaacnttgnaaaccanccatgttatgntnccnccaggtcctatntnctacntgtgaaaagatgngttgtggtnaattttttcgcaagactngtgtaantgntttgtccncnaaaantgtcnaanatnttgnaanaaattggcccncnacttnaaaatttttaagngtntttntccttcnaantnnttttttgtcaaaactnatcccagctttnaatgaaaaaanctttnnaagtttngtggncncatagcaataagnggtaaggnggaanaaaaattttttnttaaagntaaatngngggaaaaagacntttaacctttanaaaaaangnnaaattccttt

SEQ ID NO: 4514 - DNA, 198 bp, Homo sapiens
  misc_feature 1, 60, 93, 115, 119, 162, 171, 177, 181, 185: n = A,T,C or G
ncgcccgggcaggacgcgggggagtttcacgcgcgcatgctttgcccgccatggccgcantcaaggagcctttggagttccatgccaagcggncttggctgccccgaggaggcantatnaaagatccgggacgagggagggattgaagggataattacctanttggaaagncccgantaantggngtttctcccttgg

SEQ ID NO: 4515 - DNA, 155 bp, Homo sapiens
  misc_feature 104, 142: n = A,T,C or G
ggagctccccgcggtggcggccgaggtacttgtttttttttttttttttttgttcatttaaatgtttcagagatgttaatatccaatcagcttttgttctggtncccaaccctttggtttttttttttttgaaaactaacancctaaatattaat

SEQ ID NO: 4516 - DNA, 460 bp, Homo sapiens
  misc_feature 285, 370, 393, 420, 440, 446: n = A,T,C or G
ggagctccccgcggtggcggccgaggtacttattggtcatttgcctagagtcaatttcttttttttttgagactaagtcttgctctgttgcctaggctggagtgcagtggtgcgctctcggctcactgcaacctctgcctcccagattcaagcgattctcctgtctcagcttcccaggtagctgggactacaggcgcacaccaccacgcccagctaatttttgtttttgttttttttaagtagagatgtggtttttgccatgttggcagggctggccttgaattnctggcctcgagccatcctctcaccttggcctcccgaagtgctgggattacagatgtgagccaccgcacctggcctttcttaaacnctttatccttttttattctcttnttttcatttttgaaattctttcaggantgatgcacagaaaaatgctnatgttntaaagtctgatctt

SEQ ID NO: 4517 - DNA, 460 bp, Homo sapiens
  misc_feature 382, 394, 399, 431, 446: n = A,T,C or G
aggtacacaggccgggcacagtggttcacacctgtaatcccaacactttgggaggctgaggcgggtggatcgcaaggtcaggagatcgagaccatcctggccaacatggtgaaactctgtctctactaaaaaatacagaaaattagccagtcatggtggcacgttcctctagtcccagctactcgggaggctgaggcagaagaattacttcaacatgggatgtggaggttgcagtgagccgagatcgcgccactgcactccagcctggtgacagagcgagaccccatctcaaaaaaaaaaaagttgtatgtgacagctaaccataataaaaaaaaaagaaagaaaaaagagagaaagttgggacaacactaaatcattagtnattttgagcccnatttncttcaaaggcatattgctattttttcaacttngggtttaaatcatgnatctttattggttt

SEQ ID NO: 4518 - DNA, 440 bp, Homo sapiens
  misc_feature 188, 193, 209, 317: n = A,T,C or G
ggcgaattggagctccccgcggtggcggccgcccgggcaggtactttatggagtatgttcttgagttctgcaaagattagcatcaaactctctcacagctgccctgtctgtattactgatcaatactcagttcgtttcacatgactaacaatttaaaaaaacaccttcatctgctgggccattctttnaaaantcaggattccaaatantctagaggtctgctgcgagctctagactaaaggctcttgtcaatcctggctgcacatcaagaacactcctgaggttccaaacaaagcatggattccaggtcccacctngaagctactgaatccgaatctctgaggggagggcccttgcactgatttaaaaacaaaaactggccagatgatcctaatttcacagccaggggttgagaacctctgcttctagaacatcgggac

SEQ ID NO: 4519 - DNA, 420 bp, Homo sapiens
  misc_feature 174: n = A,T,C or G
ggagctccccgcggtggcggccgaggtacagcagaactgcatgatcagctgtatggtagccttgaaaaccaacaggccacaatcacagtgaaaacctcaggttggcagccactggaggatataaaatgagtttggatctccttcaatgccccattcccagagaactgtcattanttgacctgctggtagttccctaaaggacgtgcaaggatgtttatatttgactggacacttgaagcttgccctgtatgaacagcccccatcttcccatgcttgtcaaaaatcagaggcagctaacactgcggcttcctgagagtctcactctgtcacccaggctggagagcaattgcacaaacacttggctcactgcagcctcaacttcttgtccttcaagtgatcctcccaccttagcctcctaag

SEQ ID NO: 4520 - DNA, 369 bp, Homo sapiens
  misc_feature 189, 192, 195: n = A,T,C or G
ggcgaattggagctccccgcggtggcggccgaggtacttttcagttcaaggatttctgttgcatattataattattgtcaagtttccttaaaacgattattttgaattatttttcagagagttaatatatctctatttctttagggtcaatcgctggaaatttttttgtccttttggtgatgtcaccgnttnttngtaaattgttcttgatccttgtagctgtgtattgatatctgtgcatttgaaaaagtagctatttattcaaatctttacagtttggctttgcattggaaagtcatgtggcaggagcaatgatggggtgtgccagaagcccacggtacctgcccgggcggccgctctagaactagc

SEQ ID NO: 4521 - DNA, 237 bp, Homo sapiens
  misc_feature 168, 172, 182: n = A,T,C or G
ccgggcaggtaccttttttttttttctttcttttttttttttttttttccgtctccccaaagctttatctgtcttgactttttaaaaaagtttgggggcagattctgaattggctaaaagacatgcatttttaaaactagcaactcttatttctttcctttaaaaatncatngcatttaaancccaaatcctatttaaagacctgacagcttgagaaggtcactactgcatttatag

SEQ ID NO: 4522 - DNA, 346 bp, Homo sapiens
  misc_feature 98, 106, 130, 134, 147, 164, 203, 209, 239, 247, 268, 282,283, 291, 322, 332, 343, 345: n = A,T,C or G
ccaaagccacatggctcaacctagcctcaaactttttaaatttgccgctttcttcttcaatagtgagaaatcttgctcctattgtctttaatatatgnatatattntcttattctactttataaaaaccnaggngggttttgttccncaccggcataacccttnccagctttaacattgctagtcatctgtaaccataccctnagattngactctgaatggcccttgttgtatcctcanccccagtntgtgttctttggcccgtgccnccctcctgaccttnnactgtctnccttggcgcctgcacccttgaaaaggtcccntggcaagacntcacttggggntnt

SEQ ID NO: 4523 - DNA, 385 bp, Homo sapiens
  misc_feature 100, 102, 131, 159, 167, 175, 184, 200, 247, 260, 262, 276,280, 285, 290, 297, 303, 306, 313, 332, 349, 352, 362, 372,378: n = A,T,C or G
ccgggcaggtacctgaacaaatcccatcaaggacagattctcagtcttgaagaggcagcacggtaaaggggaaagatcatgagtttttggggccaggttncnttggattattggtggggtccccacacttntggatgatgttggaataactcttttganaacttaangcctttcncatcttgtnaaaaatgggaaaaatncctttattttttttcaagcagatttgttccattaataaccaccttanaaactggaatttntnggacctttaattantcanaaccncttanaattttnctcgtnacnctggggncattctaattttggaaacntttccaagactttcaantcnttggtccccnccctccttgntttacnggggaat

SEQ ID NO: 4524 - DNA, 454 bp, Homo sapiens
  misc_feature 317: n = A,T,C or G
aattggagctccccgcggtggcggccgaggtacgtcccggtcagccttgcggtaagcttgtgtgcttagaggaacccagggtaacgatggggcaaactgaaagtaaatatgcctcttatctcagctttattaaaattcttttaagaagagggggagttagagcttctacagaaaatctaattacgctatttcaaacaatagaacaattctgcccatggtttccagaacagggaactttagatctaaaagattgggaaaaaattggcaaagaattaaaacaagcaaatagggaaggtaaaatcatcccacttacagtntgaaatgattgggccattattaaagcaactttagaaccatttcaaacaggagaagatattgtttcagtttctgatcccctaaaagctgtgtaacagattgtgaagaagaggcaggggacagaatcccagcaaggaac

SEQ ID NO: 4525 - DNA, 461 bp, Homo sapiens
  misc_feature 1, 17, 18, 21, 22, 63, 187: n = A,T,C or G
ncggcgaattgttttcnnccnnggccgcggccgcccgggcaggtacttaaattatgctgggcntagtggcacatgcttgtagtcccagctactcgggaggctgatgaacaagaatcacttgaacctgggaggaggaggttgcagtgagctgagatcgtgccactgcactccagcctgagcgacagancaagactgtctcaaaaaaataaaaaagaaaaaaataataaaaaggaaaacaaagcctttagaaaaacaaagcctttgaaaaaggatgtaaaattgaatatatagatacaattatttttaaaaagttttatagaaaaatatcctggattgttgatgttgttttaatatattttaatcatttttgtataatgtcatgtataatatgttataatgaaagtaaaaaaaaaaaggtcttagcagagcaggcagaaaaatgccaaactcagtgcctttta

SEQ ID NO: 4526 - DNA, 420 bp, Homo sapiens
ccgggcaggtactcttaaggcctgacctctgaagtaatcccagatatcattttccccatatggtattgggtcaaagcactcccagggccatcccaggttggaggggagggcaaaaagactcagaaatggttggtgttcatctttggagactatttacacagtgattgtatattaaaaaaaacagcaattatatctttgaatttgagtaaagttaaagaaatggtatctgtgaaacttcgaataaacaagtggagcttaaaatatttgattcttgcatattaggttaatgtgctctacgctaatcaggttggagaaatattaagctctgctaggaattctattggactgaaggtaagtcatcctgccagtaactacctaagtcaaggtgtgaacaagctggaatttcttcccattctaatt

SEQ ID NO: 4527 - DNA, 364 bp, Homo sapiens
  misc_feature 40, 48, 56, 72, 158, 183, 200, 265, 267, 292, 349: n = A,T,C or G
aggtactttttttttttttttttttttttttttttttatncctttganctctttgnctcatacttcattcanaatgatttacagagaaaatagaggatatcagatggaactttactcaaactcctcctgccacatttgcacaccttcccttctctcanttccttccctcctgcaagatgtctnacctttgcccaaggctnttccccttcctatgtcctggatcccacctgcttccagttcctctttaactttctactatatcctntntttcttctccaacactaccaccctncttgccacaaggtttcttcccaccagcatttataatacatgctcattctctactggntttattaacaaccag

SEQ ID NO: 4528 - DNA, 140 bp, Homo sapiens
  misc_feature 41, 137: n = A,T,C or G
aggccgcccgggcaggtacacttgaggaagcttgggctcanaggctttatgttaattccaacagtttttgcaacaggaggaggagaatatctgatccaggagccctaatcaagactcagcaggaagctggtggcttnctt

SEQ ID NO: 4529 - DNA, 372 bp, Homo sapiens
  misc_feature 58, 296, 322: n = A,T,C or G
ctcagtgatcagaaatgattttctcggatatgaacaccgtttctggctcccctaaagngcatcctcctaatgggacccggttttacacttttcaagaatttgcttgcactgacaaaagaattaaatgcctgcagggaacaacttctagaaaaggaagaagaaatctctgaacttaaagctgaaagaaacaacacaagactattactggagcatttggagtgccttgtgtcacgacatgaacgatcactaagaatgacggtggtaaaacggcaagcccagtctccctcaggagtatncagtgaagttgaagttctcaaggcantgaaatcttttgtttgagcaccacaaggccttgggatgaaaaggtaaggg

SEQ ID NO: 4530 - DNA, 551 bp, Homo sapiens
  misc_feature 106, 120, 130, 144, 159, 176, 181, 182, 184, 199, 205, 213,224, 227, 232, 234, 237, 240, 270, 294, 302, 304, 306, 310,315, 324, 326, 332, 338, 359, 363, 394, 403, 412, 415, 421,425, 428, 430, 434, 440, 447, 451, 452, 454, 455, 466: n = A,T,C or G
  misc_feature 470, 474, 479, 483, 496, 500, 508, 510, 512, 513, 532: n = A,T,C or G
ccgggcaggtactatagattatttgtcttgaagaagagctttgatatgtctcaaaattcgacgttggctttggaaggaaactgtaaattttacagatctttgtccntccccacaaagagnctttaatctnacagggttggattntggtgggaacctccncttgcttattttttttnagatnntncccttttaaacgtgnacttanacgggaanccattcccatngantaccntnttncanaaaaaaaaaaaaaaagttccttaaaaggtnttttattcaaccttttttggtgcncaaatttngncnccanttttntgaaatatnanttcctnttcttngccaattaattctttttaaanaagnccaattttttcaccttggtaggaacaaccanttaaatggnttattttgncgnccccgntgcncangnaaanaaaatntttcgcngctnncnnacccattttgnaatnattnttaantggnctttaaaattggnaaanaccccttngntnntcttttttcttccaaaagntcttccttttttaattttt

SEQ ID NO: 4531 - DNA, 439 bp, Homo sapiens
  misc_feature 292, 297, 308, 426: n = A,T,C or G
ggagctccccgcggtggcggccgcccgggcaggtactttttttttttttttttttttggagatggagttttgctcttgtcgcccaggctggagtgcaatggtgccatcttggctcactgaaacctctgcctcctgggttcaagcgattctcctgcctcagcctcccaagtagctgggattacaggcatgccgccaccacacccggctaatttttgtattattaatagagacgggggtttcatcatgttggccaggctggtctcgaactcctgacctcgggtgatccacccgnctcancctcccaaagngctgggattataggtgcgagcgaccacgcctggcctacaatgtcatatcattctattttttcaaaagcattctccccagaggttaagcaaatgctttctgcaaaaaaaggaaaatggntggaaacccttac

SEQ ID NO: 4532 - DNA, 154 bp, Homo sapiens
  misc_feature 131, 139: n = A,T,C or G
aggtacaatattttattttatgggtgtataataattgattttatttttgccttttttctggatgttttaatagttgccattggggggattgtgtttagctatctggatttatctgcagtctgcctttctgnaaatattnttcgtataaatatct

SEQ ID NO: 4533 - DNA, 514 bp, Homo sapiens
  misc_feature 56, 79, 160, 167, 171, 174, 175, 183, 192, 195, 196, 214,228, 229, 264, 267, 273, 274, 277, 283, 293, 310, 311, 313,328, 333, 336, 337, 343, 344, 352, 373, 395, 396, 407, 409,443, 446, 454, 456, 458, 467, 484, 491, 504: n = A,T,C or G
aggtactttttttttttttttttttttttcctcttttaaacaggctgatatggttnggttctgtgtccccacccaaatntcatctctaattgtaatccccacgtgtcaaggaagggaccttgtgggaggtgactggatcatggggacagttccctccatncttttcntggngannagataaantgagttttnttnnccaaaaaattttttgatnggttttaaaaaaannttatgggacaactatccccccccccctacacatantanatttannctnctcctnccttggcccnccccaattaattaaatnnantggtggtttcatttnggccntcnncccccnnttttttgnctcttttccacaacccttttngaaatataatcataaggctctnntcccacttgtnangggccactttccccctttaatccccaattggttnaanaaaaaccncngngtagaaagnttccaaaatatttaaanaaccccntctctttattctntttttttaat

SEQ ID NO: 4534 - DNA, 151 bp, Homo sapiens
ccgggcaggtacaaaaagcagggaccaagataaagcatcttgactcagtgagcttacaatctttgaaagctagggaggggagaagcacttagatcttatgctgcaccccacgcaaccacctatagcatggattgttcatttcagccattaa

SEQ ID NO: 4535 - DNA, 570 bp, Homo sapiens
  misc_feature 225, 247, 265, 282, 296, 341, 358, 362, 370, 380, 420, 429,450, 468, 483, 502, 509, 524, 537, 542, 553, 557: n = A,T,C or G
acgggaaagaggtgctggagtatctgggtaaccctgctaattacccggtgtccattcgatttggccggccccgcctcacttctaatgagaagcttatgctggcctccatgttccactcgctctttgccatcggctcccagctgtctcctgaacagggaagctcaggccattgagatgctgggagacagacacattcaaaattgcacctgctaccaggacacttgnacagggggattcaaagtttttngtggggttcttaggccanaatccctaaggcaaaangctggggaaataangaattttcttcttttcttccccgaaaaaggaattttaaatggaangaattttaaccttcaangaancttttttngcccccttcnaaaggaaaatccccaatttcttaaattttccccttttaanaaaaaaatnggcccctaattcaaaagggtngggttggaaggccttccntttttggacccccangaaaaacccctgggaaaanccttaangccttcttgggaaangggtgggggcaangtaanaaaaaaggccnttgnggaaaaccttttt

SEQ ID NO: 4536 - DNA, 382 bp, Homo sapiens
  misc_feature 289: n = A,T,C or G
ccgggcaggtaccataacatttaaaagaatggaaaatgactgaaatccaatttagattatttttagagtatttttccagcaaattcaatttattctgaaatttaaatccagatcttttctaatatggtattcaatgaaaagaataaagagaagatttgaattttcagtttcattttcaaaaactatttaccaaaacaaatgggagaagaaacatccaaaagcacatttcatttctccaaactttgtgttttaaattatagttataaattgtaaggtaattttaaattgnccctcgtattatttctcccgtctgttttagtttaatgtctcctaagcttttctctcatagcgtagacctagggaagggatgggaagattgccc

SEQ ID NO: 4537 - DNA, 384 bp, Homo sapiens
ccgcggtggcggcccgagggtaccagccaccaataggagatttgtcaaaggtcaggggcacctccactcagaatcccttggtggttaccaaaatgtgaaccctgaataactgagacaggtctcagttaatttagaaggtttattttgcaaggttgaggaccctgtgacacagcctcaggaggtcctgatgatatgtgcccaaggtggtccaagcacaggttggttttatacattttagggagacatgagacatcagtatatgtaagatgttccttggttctgttgggaacggcaggacaacttgaagcagggagggggcttcgaggtcccaggtaggtgagagacaaacacttggattcttttgagtttctgattagcctttca

SEQ ID NO: 4538 - DNA, 776 bp, Homo sapiens
  misc_feature 513, 574, 582, 586, 592, 595, 611, 624, 629, 642, 649, 660,672, 693, 711, 718, 745, 748, 752, 757, 764: n = A,T,C or G
cgaggtacttttttttttttttttttttgttggaaaggggttaaacttcatagcagcttttgttgaggctgttactgttcatgcaaccttctgctggtctctaaaacatctacgtcattaacctttctcagaagatggtgccttgtctttagaatatgccattgcaaaaaagaatattcagtctcaacttttccctgttaaagaatactccgctcatttaaagtgcagcataagccagaagttaatattctttactttggtttctttactgtatggtcatgaaataaaaagcttatttaaaaatatagtaagaactttaaatgtattttggagaatgtaaaattaatctcaggacagaattgcactatcccttcctttaggaaataactttatgaaaaataccccatcctttgggtgctgcaattttgttggaaacttaaatcctttcacacttgcttttacctatgaactggccacccagaacttctggcaaaatggatctatttaacttcntaagaaaaaaaaatttactttcaaaagcccttttatcatttttggcttaaccctgaaagcntttttcantctnaacagnccnttggaaaaaactgccnccccctgaacatncccanggctgggaatttntattggnaaacaaaaaanagctgggggagnccccttattggattccaagtnggccaccggacattcaangagtagnctttccgcatttcattaaaaagtgcanctnaatnaaagnacccggncccttttttttt

SEQ ID NO: 4539 - DNA, 714 bp, Homo sapiens
  misc_feature 59, 175, 180, 240, 282, 290, 303, 384, 402, 426, 428, 456,459, 462, 465, 477, 510, 522, 529, 535, 542, 552, 559, 564,599, 620, 625, 650, 651, 667, 677, 679, 685, 691, 698, 700: n = A,T,C or G
ggcggcggccgaggtactgtgttaatcactttacataaattatctcatttactcctcangacaacccaaagaggaagtataatttttgcctgttactggtgaggacctcatgctcagagaggttaggcagcgtgttcgtgataacacactttatgaaggaagggagggatgtcancccangtgagctgcctgcagagcctatgctctgatattgctccagctaccacttttaacatttantgttctgacttactattataatggaagccctaccctatcttntgtgtatntgagaggatttgnttttttattcatatcttcgaatgtctgtgaatgactctgacctcaatcctgtgtgtgtctggacctctactagaacgcatntggcatatgggtaagctnacccaacacaaggatacaccaccngnagtggctgagggctacacgagctcttancanaanganaaagttagtgcnaattccttctaaccgccttcctttcactggacntgaatgccaatnaacctantcctgntggttangacaacactnaagaaanggccntctagaatagaatggtaagccacattgcatttaanacctcttttccttaaagggancttgncccgggcgggccgtcttaaaacaannggatcccccggcttcnccgaaatttnanttccancttttngaacccntngacccccagggggg

SEQ ID NO: 4540 - DNA, 485 bp, Homo sapiens
  misc_feature 18, 71, 73, 115, 131, 137, 143, 158, 159, 162, 168, 171,174, 179, 180, 191, 196, 208, 211, 214, 222, 238, 259, 264,265, 269, 273, 281, 282, 292, 293, 296, 298, 300, 318, 319,324, 333, 336, 340, 348, 361, 373, 377, 380, 392, 395: n = A,T,C or G
  misc_feature 404, 413, 432, 436, 443, 446, 471, 484: n = A,T,C or G
tcgcccgggcaggtacanatcttggctcactgcaacctctccctcccgggttcaagtgattctcgtgcctnancctcttgagtagctgggattacaggcgcgcgccacttgcgtncggctaatttttagtnattttntagtantagtatgtgggtttnncancatgtntgngtnacagnncttgatctcanaaacnacctgaaccctncantgntgagtatnactctcaacactttgngcccttccctcagaagtttgncttgnngtgnattntatctaannggccgattgnnagncncnaactccgtttggcctttnnaagantctttaacnaanaagnacaaaaantattttatttttnaaaaaaaaaaancatnggnaactacctcttntanttttaaccnttggaattnataaaaaaattttccattncctngattctngtnaaaaaaaaattccccttcaattttnttaaacccttaant

SEQ ID NO: 4541 - DNA, 236 bp, Homo sapiens
  misc_feature 74, 85, 134, 188, 202, 205, 214, 221, 223: n = A,T,C or G
attggagctccccgcggtggcggccgcccgggcaggtactttttttttttttttttttttttttggggagaggnttgcaaaagtntaccaaatttcaattaagcaggaaaaataaggtcaaaatatatattatngaacaaatggactacagcaaacgtatacttgaaaattgcagagtagatatgtgngagttaatgcttanggntaattagcncaccatngntagtccataatgt

SEQ ID NO: 4542 - DNA, 379 bp, Homo sapiens
aggtacaaaaacaagctgtagcctgaccaccttgggcacatgtcttcaggaccacctgaggcagtgtcacacgtgcatccttaactttggcaaaatacactttctaaactgattgagacctgtctcagatattttgggctaacacaatgaatatgaaaaaacttttttgttggcgggggtgggaggtgggacggagtctctctctgttgcccaggctggagtgcaatggcgcaatttggctcactgcaacctccacctcctggattcaagtgattctcctgcctcagcctcctgagtagctgggattacaggcacacgtcaccatgcctggctaatttttgcatttttagtagagacagggttttcaccatgttggtca

SEQ ID NO: 4543 - DNA, 416 bp, Homo sapiens
ctatagggcgaattggagctccccgcggtggcggccgaggtacagcaaacactatcctaagcttagcctcttcagatatttgatttaaaaatcactgtaaaaaacaccagtcacaaaaagccacattttatatgattctatttatatgaaatgtccaagataggcaaatctacagagataaaaattagatgagaggttgccaggatcaatggtgggggaaacgggaccatgttcacagccagcttccgcaggtcagcattgagctggcctgggaagcgcaggcaggtggtgaccccactcatggtagcagacaccaggtggttcaggtcaccataggtgggcgtggtcagctttagggttctgaagcaaatgtccgtagagagcttcgttattaatgcagtaggtctcgtctgtgt

SEQ ID NO: 4544 - DNA, 103 bp, Homo sapiens
  misc_feature 18: n = A,T,C or G
cgactcctatagggcganttggagctccccgcggtggcggccgaggtacctgggattacacggcacatgtcaccgtgcctagctaatttcttgtatttttacc

SEQ ID NO: 4545 - DNA, 383 bp, Homo sapiens
  misc_feature 70, 117, 157, 234, 242, 247, 371: n = A,T,C or G
ggcgaattggagctccccgcggtggcggccgaggtaccatgttgacaaaaatgccagatcaaatggattngagaaataagcccaattcaaggctggctcagccctccacggggcctnccagggaaaggaattcctttatgttcttggaagccctttnctagaaaagccattccattcatacctttgtagagcagtgggctgggtgtggagggcagcgcggagggtatctgcaanagcctgtnttttncgcctcccttgcccccactccttttatccttttaaaagtcctatcaagccctgccttcgtcccttccgccctaagccctaagagtgggggaggtgtaatacggccaatggatcttgtataaagnctacgttaagtt

SEQ ID NO: 4546 - DNA, 369 bp, Homo sapiens
ctatagggcgaattggagctccccgcggtggcggccgaggtacaaggttgcatggaaaagacacactagcgtaagacatggacagtggccctgagtgacgtgcagccggtttaggcgaattaagatttacatacttgaaaagggacaaacaagtctggacgtggtgactcatacctgtaattccaacactgtgggaggtggaggcaggaggatcccttgaggccaggagtttgcaaccagcctgggcaacatgggaaaacccctgtctctacaaaaattaaaaaaaaattagccatgtgtggcagcatgcccatagtcccagctactcacaggggctgaggtgggagaattgcttgagcccaggagatc

SEQ ID NO: 4547 - DNA, 438 bp, Homo sapiens
aatacgactcctatagggcgaattggagctccccgcggtggcggccgcccgggcaggtacagaaaaggtgaatctgtgttctgtatattctgcctaaggcaaagaaatgtttagctctctttaaaatagttccataattttttctaaaaagctttgcttgaaaactgtaagcttcccatatctggagcatttcactttaaatatttggataaatatgctatcttcttacttggacatttcatgtgtttagggattgtcttctaaattcttcctaattcatatagctgctaacacttcccgcagagctaaaccattacagatatgaaataaagacctattgatttgacttacttttacttgtaaaaccttctgagtgttataacctcatttaatctttcagcatttacagtttcaagagtttgtgtcacaattagaaga

SEQ ID NO: 4548 - DNA, 311 bp, Homo sapiens
  misc_feature 72, 102, 157, 272: n = A,T,C or G
ccgcggtggcggccgaggtacttttttttttttttttttttttttttactggtaaaacttcatttatttaanatgactagtgatgcagctagcaaacccaanaagccaactggaatggaaatgctcagtggtgctcagccattacccaggaccaganattcctttgttaacagttcaatttgttgaggcacaagtgaggataaattgggccatgacaaaactatgagattgaatgataatcatagtaacatctgacatatattaaatttggngttatgccatttctcagttccaccaaatgtacctgcccg

SEQ ID NO: 4549 - DNA, 369 bp, Homo sapiens
  misc_feature 149: n = A,T,C or G
attggagctccccgcggtggcggccgaggtacgcttcccttggcaccatgttataccatctgtgctgggctgaatagtgtccccccaaaattgaataatgtccccccaaaattcgtgtataccatgaacattagaatgtgatcttactnggtattacttggtatagggtgttgtagaaataatcaaataaagatgaggtcatactgcatcagggtagaccctaaattcaatgaccaggatttttataagtgaaaggagaggcggattcagagaaaaagacacagacacacacagagagaagacagccatgtgaagacacaagcataaattgaagtgacacagctacaagccaaggaatgccaaaaattg

SEQ ID NO: 4550 - DNA, 408 bp, Homo sapiens
  misc_feature 271: n = A,T,C or G
ccgcggtggcggccgaggtacctacatcacgagtgttacttgaatggagatgtataaagtgcattttaaattcatttgtttccttaacattttcccttcatttcttatcttttcagagtttcttcttcaaggtctcaaggtctgaagcatcccacagaatgatcctactgaataactcccataagttgctggccctatacaaatccttggccaggagcatccctgagtccctgaaggtcagggaacagtgggaggtcagggtatgggaggngggggtgtttgagggatgagaaaatagcaggcttgtgattctagtccttcctgactgtttgcagagggttggagctgggaaacaggatgggactgggggcacaggctgcatatcaagagctgctgcttctctttggg

SEQ ID NO: 4551 - DNA, 425 bp, Homo sapiens
ctatagggcgaattggagctccccgcggtggcggccgcccgggcaggtacttctgtgagtctgcatgaactacaatgttactggacttggggtgccccctaatgcagatacagtgtcagtcacaacacccaagccatttcaaatacctggaaagccttcccaagaaggacagctacaaacaagcccagactgcaaagactacaataaggacctaattattcggtgcccaaacaccggtgacatctgcaagcatcaacatcatccaggaaaacagcctcaccaaatgaactagataaggcataaggtgccagggactaattctggagaaacagaggtatgtgacagagaattcaaaatggctgttctgaggaaactcaaagaaattcaaggtaacacagaaaaggaattcagaattctatcagata

SEQ ID NO: 4552 - DNA, 519 bp, Homo sapiens
gaattggagctccccgcggtggcggccgaggtgctgtaaaactgcagagaggagcactagcaagaggctctctgccccttccctgcttggtctcgaaacactaacagcctggctcctactccctaaattgggggtggcagtatacctctgggtaaactgagcagtcggaagatgaagtcatgtgggggtgatcctcaaatgaaaaaattcattccttatcttgcccccactcctcacctaactgccagtcaactatttaatgtgaacaaaaagccaggtattgggggaaagcctgtaatataaaagagagcaaaccaagcaaacaaacagaaaaaagggaactcagaggaagcagaaacagtgcagggaactgaagaaaacttaaaaagatccagtccctgggagacatgagggaaggtatttcatcaaaagatgagaataaagtcctataaaatgaaatattcaaaagaaaaaatagcttttggaacttaaaaaacaggatagctggaaaaaaattta

SEQ ID NO: 4553 - DNA, 405 bp, Homo sapiens
  misc_feature 319, 335, 375, 381: n = A,T,C or G
ccgggcaggtacaatcttggctcactgcaacctccgcctcccaggttcaagcgattctcctgcctcggcctcccgagtagctaggattacaggtgcccgccaccacaaccagctaattttttgtatttttagtagagatggggtttcactatgttggccaggctgttctcaaactcctgaccttagacgatccacccacctcagcctcccaaagtgctggagttacaggagtgagccaccgtgcccagccccatatactttaaattatctttagattacttataatatctaatacaatgtaaatggtatgttaacaagntgttatactatattgnttagggaatcatgacaataaaaaagtctgtatgtgctcangttcanatgcttaaaaaatatatattttca

SEQ ID NO: 4554 - DNA, 554 bp, Homo sapiens
acgactactataggggcgaattggagctccccgcggtggcggcccgaggtacttttttttttttttttttttggtttgagacagtttcacttttgttgcccaggctggagtgcaatgggatgatctcggctcactgcaacctccgcctcctgggttcaagcgattcccctgctcagcctcctgagtagctgggattacaggcaatgcgccaccatgcctggctaattttgtatttttagtggagacagggtttctccacgttggtcaggctggtctcgaactcccgacttcaggtgatccgccacctcggccccccaaagtgttgggattacaggtgtgagccactgcactcagccaatatctattattcttaaagtctttaccaggtttaaaggtcttggattataattctgatgctaattgcttggaaatgtattgctatgtatttatgaatattctctttataactaaagatgaatgcctggaatttttgcaaaattttaaaattgtttttcaaaagataaactaagataaaaattacaaggttcatttca

SEQ ID NO: 4555 - DNA, 443 bp, Homo sapiens
  misc_feature 254: n = A,T,C or G
ccgcggtggcggcccgaggtactttttttttttttttttttcttttttgagatggagtctcgctctgtcgctcaggctggagtgcagtggtgtgatctcagctcactacaacctccactccctgggttcaagcctcaagcctcccgagtagctgggtttacaggcatgtgccactatgcccggctaacttttgtgtctttggtagagacagggtttcttcatgttggccaggctggtctcgaactcctggcctnaggtgatctgcctgtctcacctcccaaagtgctaggattataggcatgagcaatcacgcccggcctattggtttatttcaataagcagttatgagtaaagaaagataaaatctagctctatgcattattaaggtaaaatacatagcttctgacacagctactttttgctctcctgtgaagccttttaaa

SEQ ID NO: 4556 - DNA, 526 bp, Homo sapiens
  misc_feature 523: n = A,T,C or G
ctcctatagggcgaattggagctccccgcggtgggcggcccgcccgggcaggtacagtttacaaggtaatacctctaagtgtgcttttagcgttcagtgaattcttaaaactgctgctggagaattgtcccaaacatatttttttaacctttgtaggacatttagcccatcaaaacctgcaaaatctttacatacacagaagaacagacagttcttcaatgaaccagaagaaaatttctggatggtcatggtatttacatacacagtgtatctttctgaaattgtatggtgaagttatgggtgatctttactgttcagaatttaggaaagttctctggctgttgcatccaagtaaaattaaaataaaattggttgcaattttaaaatcaagttcttcctatttgctttattcattcttggggctgttttaagaagctatgtttctgatgctgtagcatgttcaaagtttttaaattaaggcaaaataaacatgggtctaatgaattcattgtataatttcagntta

SEQ ID NO: 4557 - DNA, 506 bp, Homo sapiens
  misc_feature 445, 446: n = A,T,C or G
tacgactcactataggggcgaattgggagctccccgcggtggcggccgaggtactactaggtttaccctctcatttcctttatcttcaacttattttctttgtgtcatctgaatcctccagatatctaacttttcctttttatgcctttcacatttccattggagatcactttgtccccttccttaaggttctgtcgggagagatttaagagttggttctagctaaaaaatatggctgtagctctgaagatgacataaaagtttttccctatgcctaagatttcaaatatatgtatacatttgaaagaaaaaacagggagagcattatttttttgtccagattatttttgctcattgtaggtaaaaaacaatctgtgtatatatgtaaaaaaaaacaaaaacaaaaacaaaaaaaaaacctttcagtccctacataataactcannaaataaagttcttcagccagctatggggatgggggaaacaattcccagggtacctgcccg

SEQ ID NO: 4558 - DNA, 192 bp, Homo sapiens
  misc_feature 21, 29, 35, 43, 51, 54, 76, 82, 95, 151, 160, 179: n = A,T,C or G
ccgcggtggcggcccgaggtncaaagaancctcantccccacnacaccctnccntgcatggtgtcactgacatctntattgncttttgtcacgtnctgtaaatcacaatgaatggggtattcttcttctattatatatttgtaagctttantggcatctntaaaaaaaagtggtaactntatcctatgtaat

SEQ ID NO: 4559 - DNA, 439 bp, Homo sapiens
  misc_feature 424: n = A,T,C or G
aggtacatctgcctatattccttgtgatagtgctttgctttttcatagataagcttcctccttgcctttcgaagcatcttttgggcaaacttctttctcaggcgcttgatcttcagctctgcgaaattccttcgcttttcttaagggtttctggcacagcaggaacctccttcttcttctcttctacaccctccatggttccagccggaaaaagagccccgcgtactatgtggcgttcttcacctcccccttcgtggtcttctcctggaatgtggtcttctacatcgccttcctcctgctgtttgcctacgtgctgctcatggatttccattcggtgccacacccccccgagctggtcctgtacgcggggttgcatttccaagccattgctacaaagaaccttatttgttcaagtaaccggtanaaaaatccttcccga

SEQ ID NO: 4560 - DNA, 488 bp, Homo sapiens
  misc_feature 178, 421: n = A,T,C or G
ttagggcgaattggagctccccgcggtggcggccgcccgggcaggtacttttttttttgttttttttttttttttttgagatagagtctggctctgtcacccaggctggagtgcagtggcatgcaatctcggctcactgcaagctccgcctcctgggttcacgccattctcctgctanctcccgggtggctgggactacaggcgcacgccaccacgcccagctaatttcttcatattttttttagtggagacggggttttactgtgttggccgggatggtcttgatctcctgacctcctgatcctcctgcctcggcctcccaaagtgctgggattgcgggcgtgagccaccgcgcctggcctgcttagagttttttatgtaattattttgtgacacaaacatttaaaatactgtagcttanaatgaaattgtctcaatcctaggagccaaaagtttgatgaatatgaatactaatattaaccattttt

SEQ ID NO: 4561 - DNA, 717 bp, Homo sapiens
  misc_feature 502, 549, 556, 572, 584, 594, 611, 635, 641, 650, 671, 679,692, 697, 699: n = A,T,C or G
ccgcggtggcggcccgaggtactttttttttttttttttttcttttttgagatggagtctcgctctgtcgctcaggctggagtgcagtggtgtgatctcagctcactacaacctccactccctgggttcaagcctcaagcctccgagtagctgggtacaggcatgtgccactatgcccggctaacttttgtgtctttggtagagacagggtttcttcatgttggccaggctggtctcgaactcctggccttaggtgatctgcctgtctcagcctcccaaagtgctaggattataggcatgagcaatcacgcccggcctattggtttatttcaataagcagttatgagtaaagaaagataaaatactagctctatgcattattaagtaaaatacatagcttctgacacaagctactttttgctctcctgtgaagccttttaaaactttctctgaattcctgattatgttctgaaagaataagctgctaaaactggcctccaangatagttactgcaggaaaaaaactgaaggctaaatgaaaagtgttgngtaaggnttatgaccaaaaaaanttactctaaaantaattcaggncaagaaacctttccctntggttaataaccggtttagaattnttcccnttaaaaganggaagaaaaactaatcctccntacggttntcacaaatctaanggacncnttttaaaattcccctttc

SEQ ID NO: 4562 - DNA, 861 bp, Homo sapiens
  misc_feature 68, 77, 103, 127, 128, 129, 131, 133, 139, 142, 147, 159,166, 170, 172, 185, 187, 189, 190, 195, 201, 205, 217, 232,234, 235, 237, 239, 240, 243, 247, 250, 254, 257, 258, 262,277, 281, 283, 305, 316, 319, 320, 329, 333, 339, 348: n = A,T,C or G
  misc_feature 371, 385, 391, 395, 405, 429, 433, 441, 445, 449, 456, 501,514, 515, 524, 527, 548, 564, 574, 575, 576, 579, 581, 593,597, 609, 612, 613, 622, 640, 652, 667, 676, 678, 683, 691,703, 706, 710, 715, 718, 725, 755, 756, 758, 772, 790: n = A,T,C or G
  misc_feature 803, 824, 826, 855: n = A,T,C or G
ctatagggcgaattggagctccccgcggtggcggccgcccgggcaggtactttttttttttttttttnctttctttntttttttttttttttttttttttttntttttttttttttttttttttttnnngnanaaaacnttnaaaanttttttttaaanacaagtntccntntccccgaggtttntncnnctggnggaaangaanaaatgtcccccntaaggaaaaaaagtngnnanannccntttnttnaaanacnngggngccaaacttttttgnaacncntttttatgaaaaaggcctagtntaattttgganggnntaaaaacantttntaaggntttattttntagttaaccctcgactttaaacnttcttaatccctcntttaancggntttttttttntttagccctttgcaaagggaaatntaanaattgaantttngggnccccccncaaaatttttaaattaaaacccagctcccttttcctgggcaaaanaaatgcttacganntttggaggnttnccaaaaaaactttgaccgttnaaccgggttaattttntttaacccannnggngnggaaaaagtttntccntaaaaaccctcnggnnctaaaaaancaaacctggtttaaaaanttgggggggggnaccctggaaaaaaanccacccttngngaaanccttggcncccggggggggnccntggntttcnacnggggggnaaaaaggaaaccccctccaaaaaaaaaacnngnggggatttttttgnccccacggggattttttnggggaagggcaanaaaattttttaaaaaggggcncnccccaaaaaaatttttttttttttttttncccccc

SEQ ID NO: 4563 - DNA, 644 bp, Homo sapiens
  misc_feature 542, 546, 619: n = A,T,C or G
ccgcggtggcggccgaggtacttcgggaaaacaagaactgtgcttcaatgtctttataaccacactatatggctcattgtaaatgttcaacaaatgcttgatgaatgactcaatgagcaaaattacatgaaaacacttgctaacctatctcttttcatcaagtatgtagcaaacacatgcccacacctggcaccagaaactataagtgctatctaaatatcaacattttatttggcctgtgcacttatcagctagtggaaagcataaattattccaataaacagacgggaggtgtggaggcaaaatatcacacctaggtcttcaaaactaatgactttcaaatcaaaaactgcattacctgataaagacttaacttcatgattatttcaacagggactaaaaaaattacaggaaatcttggaaaccagctatctggcccaaagacactaattttagaagatgaagaaactggaggcccagagaagtaatcaatcaaggacacccagttagtggcagaagttttaattaaacctaaaatcttntggncctacccttagtttttggtcttttaccacctggttgccctttggtttctattaaaatcaaatctttttttccncaacttaaaaaaaaaaaaaaaaaaa

SEQ ID NO: 4564 - DNA, 371 bp, Homo sapiens
  misc_feature 154: n = A,T,C or G
cccgcggtggcggccgaggtacaactgatcagcaaaaatattatgattaatatgttaactgaggaagtatatcctacaatttagaaagattaatatttaaaatagttaaaattattgaaagttttaacttgcccgaaacagtccctaaccatangggacaattaatgatgctataaaattctatctaacattcctagtctacttgttgttttggagggcaggctgccattcctgcctattttaatctttcgaaggtggtctctgctcccatttaaaggtataagcaattaagagatacagaaccctcagaactaccttctataacttacctaatttctaagcttaaaatgtaatctaggctgggcatggtg

SEQ ID NO: 4565 - DNA, 412 bp, Homo sapiens
  misc_feature 4: n = A,T,C or G
actnctatagggcgaattggagctccccgcggtggcggccgaggtacacgtggctcatgcctataatcctagcaccttgtggggctgaggcgggagacttgcttgagctcaggagttagaggctgtagtgagctacgactgagccactacactccagtctaggcaacagagcaagaccctgtctcaaaaacaaaaacaaaaacaaaataacagaatatttgttgccagtgataaagttagaccctaaataaaaattagaactttagaaagcatgcattcaccaccatgaactttaaagcaacccaatatttaaagaccttcctgacgaaatcagtggaattattaacaaatgtctttatttaatactgtatgataaaatgtgtcaacatttagaaaatctgcgtaactcaaa

SEQ ID NO: 4566 - DNA, 381 bp, Homo sapiens
ccgcggtggcggccgaggtacacgtggtgcgatctcagctcactgcaagctccgcctcctgggttcacgccattctcctgcctcagcctcccgagtagctgggactacaggcatctgccaccacgcctggctaattttttttgtatttttagtagagacgggatttcactgtattagccaggatggtctcaatctcctgacctcatgatccacctgccttggcctcccaaagtgctgggattacaggcatgagccactgcgcccagccgagtcattttttaatactactgcatgtgagttaacacaatcattcccaaattgaagttttagaatgggccctcaaaatttttaggatatggtttttcctcaggtttatattga

SEQ ID NO: 4567 - DNA, 387 bp, Homo sapiens
cgactcctatagggcgaattggagctccccgcggtggcggccgcccgggcaggtactaaagagacatgtcattaaaaaacaatttggctactaaattttgttcaagaactttactcactactggttaggaaaaaagcttatcattcactatcctacacaaataaaaacaccagttaaaggcgagagatggaagagagagaataggtcatttacttcagtagctacaccttctgtccccaatcacagggacgaaatgacccgagggtgggtgaagctatgcagtaatacagccttcaaaagataatcacatttgcattctcaatagcacagacacaaccatttaatttaacttgacaaatcatttgaatgtatcataattaaataaat

SEQ ID NO: 4568 - DNA, 805 bp, Homo sapiens
  misc_feature 634, 647, 681, 702, 708, 753, 782, 783, 793: n = A,T,C or G
ctatagggcgaattggagctccccgcggtggcggcccgaggtaccaatggcccttccctccagaaaaacacacaaacaaaaaaatgagaagaaactatcagaattaacttcatctgaacgctggaaaatagtcaaaggtttacagcaactaagtaaatagtggctcaagaaagaggaaacatgaattttggtggcatttttacttgcccttgccccaatgccctccctgatttagtggcaatcttgacaatggcagcccacatttccagcgtgggactccagttctacagaaggcagagcagatcttattttcaaagaactgtgtttgtctgttttgacttatctggggacaaccttcaggcctgacaaaagacacttgccttactttcacctaactcaagactttctcaaggcagaaaagtggctatacagagggcattctttgaaaacattgaaaggcaaatgaacaaaccaccgtcacctgaagcaaaagattactgttaaggcacacaaaagatatgctgcagcctgggaagaaagattctttggaagatttagtgcattgaaaagctgccatgtgttactggggaatttagaaagccatatgcatgcccgtggtagggatgcatattcngaaaagacctgangaagacccaaactttcacatctgctgatctttangctcagtttcaagcaggcttntgagangactgtaaattacctgtcttaacttttgaaaaagtgccccatgcnaaagcccatcagcaatttttagaagaatnnatttgggggntaattattttat

SEQ ID NO: 4569 - DNA, 452 bp, Homo sapiens
gggcgaattggagctccccgcggtggcggccgaggtcctgtcccaagaaaaaagaagaagactggaaatgtgtcctcagaaccgactaaaaccagcaaaggtcctttccagtctcagaaaaagaacttattccacaaaattgtcagcaaatataagcacaaaaaggagaagcccaatgttccggaaaaaggaagtggggataaatggtcaaacaagcaactcttcttggatgccattcaccctacagaagccataatttcagaagacagaaacaccatggagcctgttcataaggttaaaaatatcccatccattttcaacactccagagccaacaacaacgcaagaacctttggtgggcagccaaaagagaaaggcaaggaaaaccaagattacacaccttgtcagggacaagcagatggccgggtatcaccagcaggaggtacctgcccg

SEQ ID NO: 4570 - DNA, 673 bp, Homo sapiens
ccgcggtggcggccgaggtctgtttactaaattatagcactgcaataagacatttcaccaatatgatattgaagcataacaagttatttcataaggaatggtaattatctaacattctaagcaaatttggcagtgtgacttggtggggcgcagtgctgccctgacacaatgacagccttactctctaaattagtaacttccgtaggagaccccagaagcacacctccctcccagcagtgaaagccgaggattcccgttttgattagcaggcgccttctgttcacgataaagggataagaatcaggcagtgatggcagcggagttcatgcttcattaaggcaggcattgcaaactagttcagaggagagaatccacgatgacagcacattctgtgccatggagaacattcttaaatcaagcctccagtggaggaaggactcaagaatgaaatagcaccagataacggggcatcattagacttgtaaagcaaagcttccattttctatttttatataaaccattattaatgcctttaaaacaactgtgatatctggacaaataaaataagaaatgacttcttaagatgattgcaacttttagtcttgatttataaaaattattctacataatttttaagtaggggtaactgataatttttctcactttttttttg

SEQ ID NO: 4571 - DNA, 520 bp, Homo sapiens
  misc_feature 491, 496: n = A,T,C or G
aggtactttttttttttttttttttttttttttgagacagtgtctcactctgtcacccaggttggagtgcagtggcatgatctcggctcactgcaacctccctttcccaggttcaagcaattctcatgtccccgcctccaagcagctggaaccacaggtgcacgccaccatgcctggccatttttttttttaatatatatattttcagtagagacggggtttcaccacgctggccaggctggtctcaaactcctgacctcaggtgatccacccgcctcagcctcccaaagtgctgggattacaggcgtgagccaccgcgctgggccatctgtagtcttctgcaaaaaaagggtcctctaacatttttaggctagttttgcaaaaaacttttctgtttttttgaatcctttaaaaaaatttgatgtccattattttaactgcatccttaaatattttacatgcctctatttttaatgacttggggtatagtngcggngataaagataccattagttcaaat

SEQ ID NO: 4572 - DNA, 567 bp, Homo sapiens
ccgcggtggcggcccgaggtacgtaaaatgaaatttaaaacctcaaatggctcactgctcagaaacctcacagatggatgctgggtggtgagcagcagaaggggttgtgggtgagtctacattgttgtagttgtcctctcactacccatttgcaaggaaagcctggcatcaactggatatagaaccgggagctctgatgatgataactcatttcttagagagtcctttttctactttgcctgttttgatctctgcctcaggcatctgatgggtctctttgattctgatgccttgggtcaaatcatacagcataatggagtcatggaattgcaagtttattatgaatgtgatctgagcagacgcctacacatctacccaatagcctttaacctctaaagggctagagtcattgttcttcaaaccgttgcactgttaactggtcaagtctggcaacttcgaatagacctcacctcccacgttgctctctcctggtcagagctgaagcacatggagatagttggggttcacaaagctcatattatcaaccctcttactttacttttcctg

SEQ ID NO: 4573 - DNA, 683 bp, Homo sapiens
  misc_feature 599, 627, 637: n = A,T,C or G
ccgcggtggcggcccgcccgggcaggtacatggcgaagctagagactgtaacctgaagattgggacaaattaaagaaaaaaatgtgatttaacacaattacaaaaactgttacgttagggtcaaacaagaaccattttatgaaactgaattacaacaaatgacattatatctaactcttccgggtctccacagcacttatacttacttaagcagcttaaacacttccgagtctccacagcactctgatacttacttaaacagctcttttaacctgccctagtattcttaagtgcaacatatctaattttttttttcctcagtagtttgaacacttgctggctattttttctgtccaagttctcaagtaacttcggcctgtgtagtcagtggttctacacagccgacactacttcttacataacacttggtctctctggcttctggaaagggcgaggggttaccttccggagtccagtgctctttcggcacttctgcaaccaggcagtggtaaaagggggtgctctccaaaaccatcttctagcagatctttttcagttaagattacttgttcttccatgtattcatatttagccagctncttgatcagccgcaatatgtcactgcantcggcggcantggctgggccggatcacgaaatttagccattttcggcttttgcttt

SEQ ID NO: 4574 - DNA, 384 bp, Homo sapiens
  misc_feature 46, 185, 247, 377: n = A,T,C or G
ccgcggtggcggccgcccgggcaggtacctcctccccactacctanctctagcttctgtccaacctggcctattttccatccttcaaaacaaaccccaatgtgtatggcttactccagctgcttccttaccttcaggtttgtgggcttcatttaagccatgggaatgccagcttaattaatgcanattaagataagaacattaaaccccaaaaatgatgggaaatcactctgtcttcaaaacaatanaaaataataaaatctagttataaagattatataccattgtcactagtaagaagttggcactcttatttacaaaacataaagaaattagggtttaggtctggcatggttggttcacacctataatccccanccacttt

SEQ ID NO: 4575 - DNA, 408 bp, Homo sapiens
  misc_feature 268, 330, 341, 368, 376, 389, 392, 403: n = A,T,C or G
ccgcggtggcggccgaggtactttttttttttttttttttgagacagagtctcactctgttatccaggctggagtgcagtggcatgatcttggctcactgcaaccttggactctggggctcaagctatcctatcactttagcctcctgaatagctgggactacaggcgcatgccaccacacccagctaattttcgtgctttttgtagagacaggatttcaccatgttgcccaggctggttaatcttactttcaaatgttactgatganaaaacaggttctgagaagctaagtaactaaatttaagatgaattagaacagcagatgggacnaagtcaaaaangttctgcatcctactccaagctttttntgcaaaangctatttgtaaangtnatttgggcttnttaaa

SEQ ID NO: 4576 - DNA, 402 bp, Homo sapiens
ggcgaattggagctccccgcggtggcggccgcccgggcaggtacttgccactgttctaggcactggggatacaggaatgaacaaaatcacccaaatctctgccctcccaattttctggtatggagagaaagttcttttgtagatagggatgagaatcccacagaaaactcaggagtgatgtaacaatgcaaatgctcacaaaatctctttcctcatctttcattccctatttggaaggaaaggtttcaaagacattgatgttgtataaatgaccatcttcttcattattttataaacatttgtcctgtgcagagtaaaaacaactggactgcataacaaattatacctattgagagttgggtaaagagttaccattggatccagtccaccaacccaaatgtt

SEQ ID NO: 4577 - DNA, 331 bp, Homo sapiens
  misc_feature 268, 278, 287, 313, 316, 320: n = A,T,C or G
ccgggcaggtactcatctgtttacaaatggtctatggctgcctttgtgctacaagggcagaactaaatagttgtgagataccaaatggactccaaaacctaaaatatatatttggctttttacagaaaaagctagttgaactctgctgaaagttataaactgaatttgcctcatggtaagtattatacataaagaaattcctgcctgttttttcttgatggaagaaagaggcaggacccagactagaaagtattgagagtcctagctnggtaacctgnagaaacaantttcaattaatggagaaggaagttanaancctngggcccattca

SEQ ID NO: 4578 - DNA, 292 bp, Homo sapiens
  misc_feature 94, 198, 276, 284: n = A,T,C or G
ccgggcaggtactgagtttcaggaaacagtgagatacattcagcaaaacagtgggcttcatgctgaaagaagtcactccaagtaaacacacatnacacacacacacacacacacacacacacacacacatacacacacccgcagacaccctagtggccaataggtcctctcaccaaaaacctgtgatcaggagagcanaaagcctcccaggggtccatcactgccctttctggagccccttatcagatggccagccccaggacagcactgtcttgntcctggtncagtccaa

SEQ ID NO: 4579 - DNA, 413 bp, Homo sapiens
ccgcggtggcggccgaggtacttaaacaacttgtctgttttctttaaatcttttcccttaggttagataatgctgctcatgattgtgagagcacagaaagttcttttgttttctagaattaagtctgctcacctggtttgcattctgcatctgcctttctttagtgcagggtaagtgtcaagtcccactgtggcccaaagtttgcattctgcgttaaccaagtcacaattaatgaggttttactataggcacaaatgcttaaaaaaagaaaaaaacgattgttttgtgtggttaaaataaaaacttgtggggattttaatgtatttctttggtgaaaaatacattagttgtttggtctctaatttggatcactttcccttctagactctgaacagggaaagtgcctcctggaa

SEQ ID NO: 4580 - DNA, 146 bp, Homo sapiens
  misc_feature 14, 56, 80, 99: n = A,T,C or G
actactatagggcnaattggagctccccgcggtggcggccgaggtactttctttcntttttttttttttttttgataatnttttttttttttttttttngcatcaaaaagctttatttccatttggtccaaggcttgttaggatag

SEQ ID NO: 4581 - DNA, 379 bp, Homo sapiens
ccgggcaggtacgcgggtctgcgcttgtcatcatggcgacgcggggccatgtgcaggaccctaacgacaggcgcctccggcccatttacgattatcttgacaatggtaataataaaatggcaattcagcaagcagataaactgttgaagaaacataaggatcttcattgtgctaaggttttaaaggcaattggtttacagagaactggaaagcaagaggaagcctttactcttgcacaggaggtggcagcccttgaacccacagatgacaactcactgcaggcactgactatcctttaccgggagatgcaccgaccggagttagttacaaaactttatgaggcaagctgtgaagaaagttcccaatagtgagggagtat

SEQ ID NO: 4582 - DNA, 106 bp, Homo sapiens
  misc_feature 28: n = A,T,C or G
cctccacatgtctgtcccgtctgctccnagactgcagaggacagtcttgagcatcatcttactcacattttactcagaaatttcttattgagtcctgctaaataca

SEQ ID NO: 4583 - DNA, 374 bp, Homo sapiens
  misc_feature 129, 344: n = A,T,C or G
aggtacttgaaaagaaagcatctgtggctgtgcccaaaaaaccggaagccccacgtgcaaaagtgcctgaagctgctcaagaagttgtcccagaaaagaaaattcccaaggcaccaatcaaaaaaccangaagcccccgcagttacagtgccagaagttcctcaagaagccacagaaaaagaaattcccgtggctccacccaaaaaaaccagaagctccaattgtcccagtgcctgaagctcaagaagttgtcccagaaaagaaagttcctaaggctcctcccacaaaaccagaagccccacctgccacagtgccttgaagtcccacaagaaaattgtgccagnaaaagaaaacactggtgcttcctaaaaagc

SEQ ID NO: 4584 - DNA, 955 bp, Homo sapiens
  misc_feature 18, 26, 41, 43, 49, 54, 59, 75, 99, 107, 109, 119, 121, 125,127, 129, 133, 145, 147, 149, 151, 163, 185, 187, 191, 206,209, 216, 225, 227, 237, 265, 274, 289, 313, 319, 329, 336,345, 348, 359, 363, 384, 394, 396, 400, 407, 430: n = A,T,C or G
  misc_feature 446, 453, 455, 462, 463, 492, 507, 510, 515, 518, 521, 525,530, 539, 562, 570, 574, 583, 587, 596, 616, 621, 648, 664,678, 679, 695, 703, 711, 713, 723, 729, 769, 770, 791, 831,835, 849, 858, 873, 882, 895, 906, 917, 942, 953: n = A,T,C or G
aattacgaacttcacttnattagggngtccgaaaatttggngnaagacnttgcncaacnccgtccgcgatggggnccgggtcgcggccgcgccgggggnccaggggntnaccctgtgtntntatntntntatntgtatgtctctntntntntctgggtgaggnccttccttgtgtgggttaaaanantttnctttttttaattgtnggncacaggngcaagtttngnaaaaaccccncttaaaaaaagtttggggctttccaacnaatacgcangtttggccccccttnattttttccttttttccaaaattntaaaancttaaccaanagggggnaacccaaanaancaacccaattntttnaaaaaaggctttggggaaganattaaaaagntngganccccaanatttaattgggaaattttttggncccccaaaaaaaattnttccttnanaaaaagnnccgggccaacctttccaaccccaatttgngaaaaaaaattgggnggnaattnaanaanaggngggtntttaacccncctttttcttggggggggggggnaatttttnttgngccaacccnttgnccctaattnggaaaaaatttattcctttnggatngggaaaaaaaaagaagggccctttttnggctttttgggggggnaatttaattttttnngctttgggaatttaangggaaagntaaaattnangggaaagggnaaaaanaattggggaaaaaaggggttaatttaaatttttaaaattnnatttaacaaaggggaatttancccctttaatttggggaagggggggttttccccccctttnggcncccttttttttggncctttttcntaacccaattttctnccacaaggngggcctttttaanccaaaaaaaanctgggtttgcncccccccccaattaaaaaaacccanttttttccccnct

SEQ ID NO: 4585 - DNA, 408 bp, Homo sapiens
aggtacaaggattcctctagggaggaaatggtctctatctggagagagatcttcatgaggagatggagaggcgtggaggcatgtgatggtgctgcagccaaggccgtggggcaaaggccagcctcctcttcctatttttattaacccgggtcttctgcgcccaaagactcagcctcattcaggaccatattatgttcatacttctgctgcttccaaggagtgttgatgaaaaagtggggccttggaggggtagaggccaagggacagtttcccctctgccctttgaagttcacgatcttccatgcaacaaaattgttttctgtgaaaagcaggaaatgaataacaacagcgtaggtgcgttggctatgtccggtggcatttcttcagaattttcattaatgacacctg

SEQ ID NO: 4586 - DNA, 965 bp, Homo sapiens
  misc_feature 41, 168, 192, 240, 277, 283, 291, 343, 353, 362, 365, 387,389, 391, 402, 403, 414, 417, 447, 451, 454, 499, 506, 510,527, 533, 554, 561, 571, 584, 589, 591, 595, 600, 601, 609,616, 629, 644, 646, 650, 699, 703, 705, 706, 713, 727: n = A,T,C or G
  misc_feature 741, 751, 758, 765, 770, 772, 781, 782, 784, 794, 801, 849,897, 901, 925, 928, 949, 956: n = A,T,C or G
ttgagctcccgcggtggcggcgggactggccttatgtgtcnttatagcagtggactgggctgctcgcaccagaccctccaattcagcaccactgaaattcttggtctccaccggccagttctttaatggtctaccattcagccagaagaggtaacctggaatgccccntcttcaatttcccttggcttggtnggttggggaattggttggaaaaaggaaaattccttgggttaaaggttnccgggggccccctttttttcctttccaaatttccttngggggnccaaaaangggcccccctttaaatttcccttttccccccaaatttttttttttaaaaaancccttttttnccccccaanganttcccctttttttcccccccananangggggtttccnnttttataaagnggnaaaaagggggggggggcccccccctctccnaaantanccctttaaatttcccaaaggagaaattaccctttggggggggggnccccttnaaantttttggggggggtgtnccaaantttttcccccccaaaaaattnggggaancctttaaatngggggggaaaatnggggntntttnggggnntttttttnaaaaganccctttgggggcnttttttccccaaaanangggnccccccaaattttccaaaaaaaattttttttttttttggggggggaaanccananngggcccnaaaaaacccctttngggggggttttttnggggaacccnaaaaaanccccccnggggntngggggtgcnnanattttggggnaaaaaancctttttcccccccccggggttgggggcccttttaaacccccccaaangggcccccccaaattggggcccttttctcccccctttatctttttacntttnggggccctttttttgggcccaaanaanaaaaatttgggggggccaaantttttcnaaaaaattt

SEQ ID NO: 4587 - DNA, 981 bp, Homo sapiens
  misc_feature 39, 63, 99, 129, 143, 149, 173, 182, 188, 197, 209, 220,226, 276, 288, 306, 311, 323, 330, 351, 387, 392, 473, 478,492, 525, 547, 565, 588, 596, 603, 606, 628, 629, 639, 681,692, 708, 764, 773, 807, 814, 821, 827, 829, 855, 869: n = A,T,C or G
  misc_feature 881, 891, 900, 917, 979: n = A,T,C or G
acccggaaactttcccaactttaatttaaaggggggggncccgggaaaaattttttggggggnaagggtccctttcccccaaacccccggccggggggnttggggggcccgggaggcccgcccggcccnccaatttccctttnttgggngggggtttcccaaatttcccgggnaaattgggnaaaggnccccctttncgggcccccccnttgggtttggncccccnttggggggtttccccccccgggccctttttgggttgggaaaggggggggnaaaaaggggggnaacccaatttttaaaggnaaaanaaataattgggnagaattnttgggaatttggtttgggttnttcccctttttaaaaaaagggggaaattgggggggnccaanggggaaaaaaaacccaaggaaattcccctttggttttgggttgggggaattaatttttttaatttttttggaaaacccggnggggnaattttaacccaanggaatttttttgggaaaaaaatttggaaaaagnttcaaccaaaaaaaggtttggnaaggcccaatttttaccncccaaaattgggaaaggaaaggnggaaaaanaaaaccnaangtaaacccgggaagggaaaaannaaaaattccntttttggaaattggggggccctttttccaacccaaaaaaggnaaaccaatttnggcccaaaaacccaanaaaaacccaaaaaaaaaaaattgggggggaaaaaatttaaccctttgggtttgggnaaattgggnaacccaaatttgggaaaaggggggcccaaaggtnccccaanaaaggtncctttngnggggggggggaaagggggggaaaggnaaatttaaaaaacnccccaacccggngggggggggnccaaaaggnaaagggggggggtttcnaaaggggggaaaatttttcctttgggggcccccccccctttgggccctttgggccccccttnaa

SEQ ID NO: 4588 - DNA, 948 bp, Homo sapiens
  misc_feature 1, 19, 36, 40, 44, 51, 55, 61, 67, 73, 75, 79, 85, 87, 93,95, 97, 99, 127, 209, 228, 366, 377, 466, 572, 653, 660,699, 707, 726, 728, 810, 842, 861, 862, 895: n = A,T,C or G
ncaactttattaagggggnccggaaaattttggggnaagncctnccccacnccgnccgggntggggnccgggncnccgnaagggntnaccctntntntntggccttttttaaagcccaaggaattanggaaataaggggggggccaatttccccaaaattaaccaaaaccttgggaaaaaaccaaaacccccttgggaattaaaaaccnaaaaaattttaaaattttntttaaatttttttttttccaaaaatttaaaaaaaaaaaaaaggggggaaaaattgggccctttccttgggggtttttttttttttttaaaaacccttggggggcccttccccctttttgggaaaggggggaaaaaggncccccaaaggnaaaaaaggaaaattggggggcccaattcccttgggccttttccttttttttttaaaaaaaaaccaaagggggccctttttccctttccntttttaaatttcccttggggaaccctttttgggaaagggaaacccaacccaaaaaaaaatttcccccaaccccccaaaaaggggaaattttttccctttttttttncctttttaaacccaaagggtttgggggggaaaaaagggtttaaaggggggccccaacccccccaaaccccccccccctttncaaaagnaaaatttccaaacccgggaaagggggggccccccccccntttaaggnggggaaaaagggaaaaaangncccccctttgggttgggggggaaaaaaaaattccaaaaagggcccccctttggtttggaaatttgggtttgggttggggggnttgggggggtttgggggggggccccccaaggncccaacccccttttaaagnnaaaaaaggaaaccaaacccaatttggggggttnggggggtttttggggttgggccccaacccaattttaaaaaaaaattccccccc

SEQ ID NO: 4589 - DNA, 956 bp, Homo sapiens
  misc_feature 9, 43, 54, 64, 67, 69, 76, 80, 84, 93, 99, 106, 110, 112,121, 123, 125, 127, 129, 131, 133, 135, 137, 139, 143, 145,147, 149, 151, 153, 155, 157, 159, 161, 163, 165, 167, 169,171, 174, 175, 177, 179, 183, 187, 191, 193, 195, 199: n = A,T,C or G
  misc_feature 203, 207, 209, 213, 215, 217, 221, 223, 225, 227, 233, 241,245, 248, 264, 290, 294, 296, 310, 312, 314, 318, 322, 330,334, 375, 394, 403, 417, 431, 433, 453, 471, 496, 499, 504,511, 513, 542, 550, 555, 609, 633, 658, 673, 685, 706: n = A,T,C or G
  misc_feature 711, 717, 746, 749, 798, 874, 881, 886, 887, 933, 945: n = A,T,C or G
ttaaattanccggaaccttcccaaccttaattaaagggggggnccggaaaattntggggaaagnccntnccccacnccgnccgnggttggggnccgggncccccgnaagngnttaaacctntntntntntntntntntntctntntntntntntntntntntntntntntnggnngntnaagncctncctntntnggtnaaanaatntncctntntnaatntngncnccacgngagaaganttgnaanaaccccccttaaaggngggtgggggccttccaaccaaaaganaagntnggccccccttaatntntncctntttncaaaattnttanaaccttaaccaaaagggggaaccaaaaacccaaccaatttntttcaaaaaaaggttttgnaaggaaaantaaaaagggttggnaacccccacggttnanttggaaatttttttgggccnccaaaaaaaaaattttcntttaaaaaaaaggccgggccaaccnttncaacnccaattngnaaaaaaaattgggggggaattaaaaaaanggggggtnttaancccccttttttggggggggggggaattttttgggccaacctttggccaatttgngaaaaatttttcctttgggttggnaaaaaaaaaaggccctttttggggntttgggggggaattnaatttttggggntgggaaatttaagggaagggnaattnatgggnaagggaaaaaaaaaattggggaaaaaggnttnaatttaatttttaaatttaaatttaaaaaggggaaatttaaccccttantttggggaagggggggttttccccccccttggggccccctttttttgggccttttttccaaaccaaatttcccccncaaaagngggcnntttttaacccaaaaaaaaacccgggttggggcccccccccccaaanttaaaaaaaaanccaaatttttt

SEQ ID NO: 4590 - DNA, 946 bp, Homo sapiens
  misc_feature 20, 25, 30, 33, 48, 60, 67, 76, 85, 86, 92, 107, 110, 116,134, 144, 148, 168, 171, 184, 195, 197, 199, 201, 204, 206,208, 210, 212, 214, 217, 219, 221, 223, 225, 227, 229, 231,233, 235, 237, 240, 242, 245, 247, 254, 268, 274, 285: n = A,T,C or G
  misc_feature 288, 290, 313, 325, 326, 334, 336, 345, 363, 398, 416, 422,426, 515, 519, 520, 523, 551, 554, 597, 624, 644, 677, 679,693, 749, 856, 874, 879, 885, 908, 913, 933: n = A,T,C or G
ggccgggtttaaaaattaanccggnaaacnttnccaaactttaatttnaaaggggggggncccgggnaaaaaattnttggggggnnaaaggnccctttccccccaanccncccggnccggggggtttggggggncccggggggncccncccggcccccccccgggggnggncccaaaggggggnttaaacccttntntntnttntntntntntnttntntntntntntntntntntnttntnttntnggggggncctttccttttttnttgggnttaaaaaaaanttntncccttttttttaaatttttgggnccccaacggggnnaaagattngnaaaaaaccncccctttaaaaaaaaggngtggggggccctttccaaaccaaaaaagagaagantgggccccccttaaattntttttncttnttttccaaaaattttaaaaacctttaaccaaaagggggggaaccaaaaaaaaccaacccaatttcttttcaaaaaaaagggtttttggnaagnnaantaaaaagggttgggaaacccccaacggnttnatttgggaaatttttttgggcccccaaaaaaaaaaatttttcnttttaaaaaaaagggccgggccaaacnctttccaaacccccaatttnggaaaaaaaaaattgggggggaaattaaaaaananggggggtttttaanccccctttttttttgggggggggggggaaattttttttgggcccaaccctttgggnccaaattgggaaaaaaattttttccctttgggttgggaaaaaaaaaaaagggccctttttgggtttttggggggaaattaaaattttttggggtggggaaatttaangggaaagggaaaatttanggggnaagggnaaaaaaaatttgggaaaaaaggnttaantttaattttttaattttaantttaaaaaaggga

SEQ ID NO: 4591 - DNA, 964 bp, Homo sapiens
  misc_feature 21, 32, 36, 54, 58, 60, 66, 72, 90, 98, 104, 112, 122, 139,154, 158, 160, 166, 211, 213, 217, 290, 321, 359, 362, 430,440, 455, 470, 481, 499, 555, 563, 572, 584, 602, 607, 612,620, 653, 735, 797, 815, 864, 884, 898, 909, 917, 938: n = A,T,C or G
  misc_feature 960: n = A,T,C or G
gaactacactaattagagggnccgaaaatgtngggnaagtcctgcccaccccgnccgngntggggnccgggncgccgcccccccgggggnccaggggntaaccntttttggnaagccttggntggaacaattccttccnctggaaaaatttttncaangntggggnctttttggcctttttttaatttaaaaagccttccttgggcgaggntnaggnaagaaggccaaccccaaaaaaaatggaattgggggattaattaattttttaaaaaaaaagccctgggcaattnatttttttttttaaaggaaaaaaaccaaggnccaaaaaaaaaaatttcctttaagggggggcccttttnggnttttcccccctttttgggtttttgggaaaaaaaaagggaaaagggggttttaaaggggggggggcccnaaagggtttngggggggtttttttnaaagggaaaaaaaanccccccctttnccccccctttgggggggnccccttttggggaaaaccccttttggggttttggggggggggggggaaaaaaaaantttttttnggggaaaantttttttttttnggggcccccttttggggnccccnttttnaaaagggnaaaaaggggggggaaaaaagggggggggggggntttttaaaaggggaaaaattttttttgggggggggggggggttttttttttttttttccccccccaaaaaaaaaaaaagggnttttcccctttttttttttttttttttaaaaaaaggggaaaaacccccccccccaaaagggnaaaacccccccaaaaggncccctttttggggaaaaaaaaaaaaccccaaaaaaaagggggggggggnaaaaaaaagggggggggggncccccccaaatttnggggggggttnaaaggggntttttttggggtttttttttnaaaagggttttccccgggtttncctt

SEQ ID NO: 4592 - DNA, 928 bp, Homo sapiens
  misc_feature 29, 42, 45, 52, 55, 59, 64, 76, 81, 86, 90, 95, 105, 108,110, 127, 131, 152, 156, 158, 162, 172, 183, 193, 195, 218,233, 269, 283, 340, 352, 354, 402, 437, 444, 489, 500, 510,525, 570, 572, 622, 658, 706, 735, 753, 773, 847, 927: n = A,T,C or G
cgcgcgtaatacgactcactattaggggnccgaaattggggnagnctccacncgncggntgggnccggggcgcggnagggntaacncaanagggncccccaaatncancnccccaaaaaacccaggntggnacccagggggaaaaaccaatnaaantntctncccttgggtntgggggggaancccaagggtntncttcgggggaaaatttttttggnccaccccaaaaccantgggaattcccccattaaggttttcccaccaattcntaaaaaccggtttncccctttttttcaaggggaaaaaacccaaaaaggggaaccagggtgggtttcctttncccaaccttggncncccttggaaaaattaagggggggtgggaacccaattaattttttttcncaattgggggggaaaaaccccccggaaaaccttcnccccccnattttttttaaaaccagggggaaaaatttttaaaattaattaggnccaaggaaagnaattaaaggnccattaaaatgggtntttaaggaaaccttccttggccggttgggaaccccccaattaagntntaaaccccccccgggggacccaaaattaaccaaccaaagggaccaaaccnttccaaccccaaaaattccggttccggggggggggnaaggccccggaaaaaccaaaaggccaattttttttctttggttggggnaaccttgggggggaaccccgggaattggnaaaaccaaattttttttnctttccccgggccaaccccnttaacccccaaaaaaaggggggggaaaatttccgggggggggttttttcccccccaaccaatttggcccaaccntttttaaaagggggaaaaaaaaaaaaaagggaaaaaaaaaacccccaaacccggttttttgggggggggttgggcccccna

SEQ ID NO: 4593 - DNA, 964 bp, Homo sapiens
  misc_feature 9, 11, 28, 44, 47, 51, 58, 62, 66, 68, 83, 87, 93, 99, 101,103, 115, 117, 124, 128, 132, 140, 177, 188, 215, 218, 236,241, 294, 327, 344, 396, 416, 422, 424, 436, 518, 553, 621,630, 648, 660, 807, 844, 875, 919: n = A,T,C or G
ataacgacntncaactttattagggggncggaaaatttgggggnagncctncccaacnccgnccgngntgggggcccggggcnccgnaagggnttaccntnancttaaccctggncncttaggntttnaaancttaaaantaaccaaaattaattttttccaaaaattttaattaanattcccctggnattaaaccaattgggggaaaaattccncgntaattttaattttaattnctttncccttccccaacttgggggaaaaccttgggcttggaattttttttaaaaaaancggccttaaccttttaaaaattttccccttttncaaaaaaaatttccttnctttaaaaaaattttttaaaaaaaaccaacccaattccttttttttccaaanccaaggggttaaattttaanttgggntnccaatttttaanccaattttttaagggaaattaatttgggggttaaattttttgggtttccccccctttaaaaagggcccaaacctttgggccnaacccaatttttaaaaaaaaaaacccaaaaagggncccccaaatttaatttttttttaaaccccccaaaaatttaaatttaaaaaaaatttgggcccaaaaanaaaaagggntttaaggggaaatttggnaaaaaaaaattntttttggggggggaaaaaattttttttttttttccaaatttaaaaaagggaaaaagggaaagggtttccaaaaaaaaaaaaaaaaaaatttttaaatttaaccccccctttaaattttttttccaaaaaaaaaaaaaaaatttgggnaaaaaccccaaaaaggggaaaaaaaaaaccctttaanaaaaaattttttaaaaaatttaaaaaatttnccaaattttttttggggtttaaaaagggaaaaccctttgggttngggggggtttaaatttttcccttttttaaaaaaaaaaacccccca

SEQ ID NO: 4594 - DNA, 976 bp, Homo sapiens
  misc_feature 22, 39, 62, 69, 73, 79, 85, 91, 93, 101, 105, 115, 121, 150,168, 178, 186, 190, 194, 198, 208, 246, 254, 281, 289, 296,319, 424, 450, 476, 484, 504, 530, 551, 590, 625, 683, 771,792, 801, 867: n = A,T,C or G
gccgccgttaaataacgaactncaactttattagggggnccgaaaatttgggggaagacctnccccacnccgnccgggntggggnccgggncnccgggggnccantttttccttncccccnaaggggggaattccttccttgggtggccntttccccttttttttggntggccctttncccttggntggntggntggntgggggaatnattttttaaaaaaggggggggggcttgggggaaaaaantgggttgncaaaaaaaaaaaaccaattggtccaanccttaacntttaagnaaccattttaattaattttggtnccattcctttggccttggtttttccttaagggttgggaatgggttttaaaaattttaaattccttcccccaatttttttccaaaggcccaaaggaaattgggttnggtttgggggccccccttccaaaggnaaatttggggggttaaaaaaaaaggnttcccaanggcccaaagggccccccttntttttccctttttaaaattttttttncctttccaaaccccctttccnttgggtttaaaatttcccaaatttccaaagggggggttncccccttttttcccccccaaacccccaaattgggnccaaagggaaaattcccttttttcccccttgggggggtttccctttcccccccctttnccgggggggcctttgggcccaaagggcccccccaaccaaacccaaaaaaaaattcccttttcccccccccccctttcctttggggttnttttttttttttcctttgggnaaattgggncccccaaagggccccttttttcctttcccggggggcccaacccctttttggggcccttaaaatttntttttccctttccccccccccgggcccggtttaaacccccttttcccggggggcccccccgggccctttcctttaaaggggaaaaaaccctttaaaggggtttgggggg

SEQ ID NO: 4595 - DNA, 411 bp, Homo sapiens
ccgggcaggtacgatatgaaactacagttgttggatagctcgagtaaaataactttttgttgtttttagcctaagagtggtgacgccgctgcagctgctgatgcttctcctagtctcaatcgagaagaagtgatgaaactcctcagtatatttgagtctcggttgtcatttcttctccttcagtccattaaactgctatcttcaactaaaaagaaaacaaggtaaattaagtggttatttgtaggaatttctttcctagcaccctacctataaaaattttctctaccaacatcataaagaaaaactaggggccaggcacattggctcacacctgcaatcccagcactttgggaggccaaggcaggcagatcacttgagttcaggagttcgagaccagcccggccaacatgg

SEQ ID NO: 4596 - DNA, 252 bp, Homo sapiens
ccgcggtggcggccgaggtactggctcctaacgtattcttccaaagcacactgagacttttcctgcaagctttccacatgggctacatcagagagaccacaggcatctggaagaaagtttaaaaacagaagaagaagaagaagaaaaagaagaagaagaagaattcagtcatcagattaagaggtttgaattgggtcacatgaggtgtgtgcacagagctctgtcaaactgccccccccgcgtacctgcccg

SEQ ID NO: 4597 - DNA, 414 bp, Homo sapiens
  misc_feature 128: n = A,T,C or G
ccgcggtggcggccgaggtacgcggggagagacaaaaacagaagaggggaaacatgtttcctactgacgacaggtgattacacgtgtgcttctgatggagggatcaggaaaggatatgaaaaatcccnaagcttaaacaacatagcgggcttggcaggcaatgctctgaggctctctccagtaacatcaccctacaactctccttgtcctctgaggcgctctcgatctcccatcccatctatcttgtaaaccaaacaaccaaactgcatcagtcggctaaattgtattaattcaagtgctgtttaccccataatggaaataattaaatgtagagttactccaggctccattaatacagtataaatcttgcatgatactacaaatttgaagtcagaaaatgccacttgggtagct

SEQ ID NO: 4598 - DNA, 386 bp, Homo sapiens
  misc_feature 26, 28, 33, 37, 40, 45, 51, 62, 63, 64, 65, 76, 77, 83, 86,88, 90, 95, 96, 99, 101, 105, 108, 109, 110, 111, 112, 115,117, 120, 121, 123, 127, 130, 131, 133, 134, 135, 140, 148,159, 160, 164, 165, 176, 179, 218, 222, 223, 239, 244: n = A,T,C or G
  misc_feature 266, 272, 275, 310, 318, 346, 349: n = A,T,C or G
ccgcggtggcggccgaggtaccaacngntatancacnatncaacnggcatncctcatggaannnnctgctatctgnnttcatnaangncngcatnnacngnaccnccnnnnncantnccnnangctnacnnannnactcncacacacncatggctcacnntgcnntccaaaaagcnagnggacattggtagaagaagggctactataaaataaccaangggnnttgaataactcagttntggtnaaagactacatggcacatgctntcattntgntaactaaagaaataactcctctattggaaaattanctgttcangcagattaacggatgtgtccacctgaanggngacccccactgtggccttttactagcaggaaagggct

SEQ ID NO: 4599 - DNA, 212 bp, Homo sapiens
  misc_feature 34, 71, 78, 162: n = A,T,C or G
ccgcggtggcggccgaggtaccatcaactcacanatactaaaaggtttcatgatcaaaatggctactactncccccanaaccaaaacagagtaaagcacaagtctttggctctcctttaaagaaaacagcaggttaccattcttaaccagacctttgtttgnctaccagaagggcaaataccacatttgtgcatcactgagtaataacacca

SEQ ID NO: 4600 - DNA, 482 bp, Homo sapiens
  misc_feature 25, 65, 145, 150, 172, 177, 185, 192, 201, 203, 219, 247,253, 257, 264, 266, 268, 283, 290, 313, 340, 344, 349, 351,358, 360, 364, 368, 372, 379, 405, 412, 414, 416, 421, 429,432, 441, 444, 446, 459, 461, 467, 470, 472: n = A,T,C or G
gcccgcccgggcaggtaccccagcntgatgatgttccacaaaagtagcaaaacatacacaatctnggttccactctacaggaaatcctggaactggactacaagaggggaatagtacaggggtgttggcaaagagggggggtttnccttnacgggttttgggagttggctgnagggnttaagggngaaccangggaattangnaaagggttagcgttanattataaccactttcaatggtggggttnatttanaccntctaagngngncaaggaatagctggntcaaaantgcttatttttctccaaaagggntttttaacgcccaatttataattaatnaagngggtnanttaatananatantttnacanaattaanataaaaaaggcttttttcaattaatnggttggntngnttggntaacttanttnaattggggnggntnttaaaattaaccnanccaaangcnanccaatttaac

SEQ ID NO: 4601 - DNA, 392 bp, Homo sapiens
  misc_feature 342, 345, 376: n = A,T,C or G
cttagggcgaattggagctccccgcggtggcggccgcccgggcaggtacagcgcaaattaaaacaccatgaagataactgttcttgctgatattcagctatttttcttgaataagtgctatgtgtataacgcttttggctaatttccaaagttctgaaaaaagctgattttgactatttttgtccatgttttcattctttttgtgaagatgattttcagaggtccttacttttttttttttggctgatgtcaccaacatgtagctttttaagtttaggttaattaaaagtaaataattaagcctaggcaacatagcaagacctcatctcctgaaaaaaaaanaanaaaggtaccctcggccgcttctagaactagngggatcccccgggctg

SEQ ID NO: 4602 - DNA, 354 bp, Homo sapiens
  misc_feature 49, 74, 76, 114, 157, 180, 322, 334: n = A,T,C or G
ctacttagggcgaattggagctccccgcggtggcggccgaggtactganactttttattcttttcagggaccgntnatctaaaaaatgttaaggcttatgctttcagatctcantccaatttctagaaattaacaatgagtccttttatagcactgnacctttctcttcctgccttcccnacctccaccccaaacttgctttgggtgttctttaatctttcaagggagtgataaatgccacaaactcttaaataaagggctgaaatggcagcgtatgactgttgttgacgtgcctttaaagtagtattagtcttctagaatnctaatctaattnttagaaacagaaaacagagg

SEQ ID NO: 4603 - DNA, 422 bp, Homo sapiens
  misc_feature 1, 4, 9, 77, 98, 100, 134, 138, 139, 149, 166, 169, 185,188, 195, 200, 202, 224, 226, 230, 231, 234, 243, 245, 257,263, 269, 278, 280, 287, 289, 292, 295, 299, 304, 311, 323,337, 339, 343, 356, 375, 378, 385, 389, 399: n = A,T,C or G
ncgnccggncaggcactctggtaagcttgttgtatgtgccaagctgaagctccctcagtatgaggcgtgttggccanagtagccattgtcaacagcananatgctgttagaaactcaatcccaacttagtccanaatnnatttccaagntcccctttttcattgcntancctgccaattcaaacntcntagcttngaatntnatagcttcggcccatcccaaangnattnnttnagagttttncngctcaaaggagngtatangggcangtgaaaaantnacccctntnggnagnggantattngaccttngggttagaaatnacttttgagataantnccantggccacaatagnccgtcggcaattgtttacngtnggaacgnaagnccattttacntttttccaattttcccccccttg

SEQ ID NO: 4604 - DNA, 445 bp, Homo sapiens
actacttagggcgaattggagctccccgcggtggcggccgcccgggcaggtactatagcatctgtggaaaatcttagaaaaaaacattttctcccccaccctctctcttccctgttaagaccatcccaaaatgcttcaagtaaaaaataacaagtttaaggggttaagcacttttaaagtctgattaagggggtggggggaaaaaaagagtaactaccagccatttctccaatggacatctcttccacagacctcaacgtgagaactgctctagtttctataaactgtaaacctgtggtggtctgattatcctgatattggattttcttgttttctgttacaccttgagtcatttgcctttaggattctagacagacctaagggaaaaagaactgaaaacatattttgcccccacccccacaaaaaaaaaattactgaaaactcc

SEQ ID NO: 4605 - DNA, 430 bp, Homo sapiens
cttagggcgaattggagctccccgcggtggcggccgcccgggcaggtacataaattttccagaatcttgcatacagtcgcctgtgctctcttaaatggaactaaatacctggctggtcttttttcttttaacttttttttgtcaacgaatgtctttgttttagaaagaggcattttcaagtgttttgatgtgacccaccgtgacctaaaaccattaaaagattctaagcaaaaataataaggccaaactttagtgtaaatagcatgaaaggcttgaaaactaaataaaaaattattttttcctttaagagtaaatagctaggctaggcatggtagttcatacctgtgaacctgtgaaccattgctttggggggctgaggtgaaaggattgcttgagcccagaattttcaagacgagcctgggcaacatag

SEQ ID NO: 4606 - DNA, 451 bp, Homo sapiens
  misc_feature 4, 438: n = A,T,C or G
actncttagggcgaattggagctccccgcggtggcggccgcccgggcaggtacctcagttttgtcctctttaaaataaggaaaatataccttgtagggttactgtgagacttaaatgaattactaaatgtaaaaaactttataagattcttggcacatggtaactgccatacctattacccataactaactgattttttacacaatttactataatataaccacaattcttattcaaacatcctggacctagctaacagtgacacgtgatgatttctgaatgagttttgagaagaaactgagtcccaaagagtgcaactttctcccactgtcagaaggcctacacaccactcttctcagagaggtggaagaattgagctgtgctttggaactctcgattacatcagggaacagattgctgattggtgaccaggatagncaagtgttaatag

SEQ ID NO: 4607 - DNA, 454 bp, Homo sapiens
  misc_feature 1, 10: n = A,T,C or G
ncttagggcnaattggagctccccgcggtggcggccgaggtactgctatcaattcaggtttccttagcaaataagtgcttcagatatactcgcaagggctcctgaattggagttttctgcatcatctccataaaaatattttttcacctctaaagtcatcaaagaattgaagcaggcccttgggaaatatccttaaggggagagagtggctccaaaaataaccttccttccagcaccacaccaccagctcagagaattcacttcacggtgggacggtcactcaaagtctactgtgaacctcatccccaaaaaggtaatggcaaaggctagaggaaaatcctaaacaatcacctatgccttgtatctttctctagaaacacaatctactagtagaaaaaccaatttgaaattttaaaaatgtggatgctactcatgagggctgtcatcaaccgta

SEQ ID NO: 4608 - DNA, 163 bp, Homo sapiens
  misc_feature 48, 49, 51, 56, 59, 60, 69: n = A,T,C or G
ctacttagggcgaattggagctccccgcggtggcggccgaggtacacnncnaggtnttnnggcaaccancgcaagggcttctgctgagggggcaggcggagcttgaggaaaccgcaaataaagtttttttctctttgaaagatactagattaatacaactact

SEQ ID NO: 4609 - DNA, 424 bp, Homo sapiens
ccgcggtggcggccgcccgggcaggtactggtctacagggacaagcagtctttaaaacgaaactcaccttcagacctcactctacggacagtgccacacatagaaagatgactctgtcacttgcagataggtgttcaaagacacagaagattagaatcttgccaatggctggtcgtgatcctgaatgccaacgcacagaaatgattaagaaagaagaagaacgtttgagggcttccatacgtagggaatctcagcagcgccgaatgagagagaaacagtaccagcgggggctgagcgccagttacctggaacctgatcgatacgatgaggaggaggaaggcgaaggagtccatcagcttggctgccattaaaaacccgatataaagggggcattcgagaggaaccgagccagaaatctattcat

SEQ ID NO: 4610 - DNA, 446 bp, Homo sapiens
  misc_feature 365, 407, 414: n = A,T,C or G
cgcccgggcaggtacaggtgggtgcgatctcagctcactgcaagctccgcctcctgggttcacgccattctcctgcctcagcctcccgagtagctgggactacaggcatctgccaccacgcctggctaattttttttgatttttaagtagagacgggatttcactgtattagccaggatggtctcaatctcctgacctcatgatccacctgccttggcctcccaaagtgctgggattacaggcatgagccactgcgcccagccgagtcattttttaatactactgcatgtgaagttaacacaatcattcccaaattgaagttttagatgggccctcaaaatttttaggatatggttttcctacangtttatattgaaaagtatggggtatctcctattactcctctntttattngtcttaaaggaaaaagggaagaagccaaaaac

SEQ ID NO: 4611 - DNA, 587 bp, Homo sapiens
  misc_feature 440, 471, 479, 486, 493, 501, 508, 516, 522, 528, 535, 556,564: n = A,T,C or G
ccgcggtggcggcccgcccggcaggtacttctctgcagccttaaactcctgggctcaagcaatcctcccaccttagccctccaaatagctgggactacggacatgcaccattaaattaaaaaaaatatatatatatacacacacacacacacacatagtgatgtggtctcactctgttgcccaggctggtctcaaatccttggccttaagctatcctcccaccttggcctcccaaagtgctgggattacaggtgtgagccactgtgcctggcctgataaggtgatatttgagcagagacatttaaaaagtgagagaagcagccatgtggttatctacagtccaatattccagcacaagggacagagggggaacatacttggtgtgtgtgagtaacatggaggaagcatggctaagtggcatgaacaagaaggtatggtangtgcaaaaggtgtaggtgcaacaagtggtangtgcacanggtgtangggcagnggatgtangttcaanggatgtangtgcanacaagnggtaagngcaaacagtggtacgtgccanagcgtgtngatgcaaacggatgtaggtacct

SEQ ID NO: 4612 - DNA, 477 bp, Homo sapiens
  misc_feature 443: n = A,T,C or G
cgcggtggcggccgaggacttttttctttttttttttttttttttttgggggatggagtctcactctgtctccaggctggagtgcggtggcgtgatcttggctcactgcaacctccactttccgggttcaagcggttctcctgcctcaacctccgagtggctgggactgcaggcatgtgccaccacacctggctcatttttgtatttttagtggagacagggtttcaccatgttggccaggatggtcttgatctcttgacctcgtgatccgccaccttggcctcccaaagtgctggattgcaggtgtgagccaccgtgcctggcctaaataaataatttcgtaacatatacaatccacttcccactaaagaattaagggtcaaagacattctatttgaacacttgcaattacctaaatctaagttggcctttggttgatagancctctgcctcggaatttcaatgaagtttttttct

SEQ ID NO: 4613 - DNA, 445 bp, Homo sapiens
  misc_feature 3, 28, 79, 209, 214, 241, 267, 270, 275, 297, 298, 315, 324,349, 366, 369, 383, 395: n = A,T,C or G
tanggcgaattggagctccacccgcggnggcggccgaggtacatactcccattccacagcttagtctaacatgcaaaangggcatgattagagattgttggtcattaagaagaacaggaggagacgttctggagccttggcactatgcctggggaagagaggatctcaacacccctcaaccatctctgggccagaggaaaatcacctangggtngtcctaaagagttccacgggagaaganattatgctgtctgatgaccccttacnganttctncaggtatgtccctactttttgnngtccagctgagtttatnaaacttgtnctgcttctgaggtcggtttcttttntaccatgtgaaggttanaanatctgctttactgnctttgctctctnttcttacttttcccagaattcctacacttactacataactaaaaactgga

SEQ ID NO: 4614 - DNA, 643 bp, Homo sapiens
  misc_feature 3, 475, 547, 623, 637: n = A,T,C or G
tanggcgaattggagctccccgcggtggcggccgcccgggcaggtactgaatttctgtcagttaaggggttcactgctttggtggaaattggtggaaattgctagcaggttccacgatgtttatttttttctccatgttgtatatcattaccatttcacatacgcgtttctatttttcttcctctcctcctgatctccttaaaaatgaatctacaagttggtggctttttccccctcctctttggccagttccacagttcagttcttcctgaaaacagggatgatgaacttgtaggatcaggacaaatgtgtgtttttcaaaaacttaaggctgggtgtgaaacaccttctgtggacaaggatttgtaaacttctctcctccctccagctgcggccccaagcctaactgatagttacttgattcaagtgtgctagacacttaaatagcatctatgtctctttcaagggaatttgncaaataatgctgtttaactaattgttgcaagcaattgcatattaacaagctgtgattttgttggacagcaantattatggccaaaagccagtttctttggcatttcaaaaataatgcaataaaaaactaagttgagggtaaccttgangctggaaaatgccnttttca

SEQ ID NO: 4615 - DNA, 474 bp, Homo sapiens
aggtacttagggtaagcattaacaatattattcaaaatgttatatagagttcaactgtatacaatagagcatttattaaagtgtgtccaaagcgcttataaataaagcatcttcgaggcaggcggctcacttgaggttaggaggaaagcagactggccaacatggtgaaaccccgcctccactgaaaatacaaaaaattagccaggccgtcatggcgcacctgtagtcccagccactttttagtatttttagtagagaccggagtttcaacatgttggccaggctggtcttgaactcgtgacctcaagtgatccgccacctcggcctcccaaagtgctgggattacaggccgcgagccaccatacccggcctcttatacaataaagagatttttttaaaaaaagatataaattcacacatatgaggaaaactggagaggaaaagatagcaacaaaaattttggaaactggaaag

SEQ ID NO: 4616 - DNA, 417 bp, Homo sapiens
ccgcggtggcggccgcccgggcaggtacaaaattaatggtggttttggattacgaattttaaattattataactaggcccaaacacatctttatcaaaataggaaacgttacaatcaacacattttttgccaatgagaaataagtttgtttattcctgtagccgtaaaaatccatgcttcggggattcgatgaactcttggaaagcattttctgcatcctgatggttgtggaagcattttccctgcaaaaaattttctagatgcttggaaaagtggtagtcggttggtgagaggtcagttcaatatggtggatgaggcaaaactttgtagcccaattcattcaacttttgaaatgttggttgtgcaaccatgttgttcggggtgttgtcgtggagaaagaactgggaccctttctgt

SEQ ID NO: 4617 - DNA, 442 bp, Homo sapiens
ttagggcgaattggagctccccgcggtggcggccgcccgggcaggtacgcggggggtatctctagccgggcctgagctgcgctagcaccccccccaggagaccgttgcagtcggccagcccccttctccacggtaaccatgtgcgaccgaaaggccgtgatcaaaaatgcggacatgtcggaagagatgcaacaggactcggtggagtgcgctactcaggcgctggagaaatacaacatagagaaggacattgcggctcatatcaagaaggaatttgacaagaagtactaatatttaaactgaactgtttaatgcctaaattttatatataattctactttaaaaataagccttatgtcttttataccaaatatgaagtagttttctaaagcaatgaaattaggaaaaactatataattttcagtatctgattatactgctt

SEQ ID NO: 4618 - DNA, 447 bp, Homo sapiens
cttagggcgaattggagctccccgcggtggcggccgaggtaccatctgcctcctgcttgcccacagcatggggttaacggctgaagttgggcagcaaagcctgaactgtgttttcctgttggcagggcaaattcatccgcatcaacttcgacgtcacgggttacatcgtgggagccaacattgagacctatctgctagaaaaatcacgggcaattcgccaagccagagacgagaggacattccacatcttttactacatgattgctggagccaaggagaagatgagaagtgacttgcttttggagggcttcaacaactacaccttcctctccaatggctttgtgcccatcccagcagcccaggatgatgagatgttccaggaaaccgtggaggccatggcaatcatgggtttcagcgagggagggagcagctattgtaagcctcaca

SEQ ID NO: 4619 - DNA, 242 bp, Homo sapiens
  misc_feature 3, 21, 54, 118, 133, 157, 196, 220, 224, 226, 235: n = A,T,C or G
tgnggcgggcgccgggcaggnacctttgatcttatagatactggggagtggtangtggtagataatgtcaagtaaccgccctcatggtgtgggtgaggaagtgaggccttagtgttgnttggactgtgctcanccacacattcttcttattgccacnctccccaaacagtggagggttcttttatcattgggacanttctcagatcaataaagcctttgnccananagctaaatntaaggct

SEQ ID NO: 4620 - DNA, 464 bp, Homo sapiens
  misc_feature 196, 217: n = A,T,C or G
ccgcggtggcggccgaggtactaatctgggcattgttctaggcacctgaaataaattatctcaattcatccttcaaataacccagtgaagtagatcatactatatcccactttatagatcatactgtgtatcccattttatggatggggaacctgaggctcagagatgagaaatgatcatcccatccttccacatncactcaactagtaaacaattnggggctaaacttcagctccagctccatgcaattccaagtcctcgttgaaccactttgttattgagcttgctccaactgatctcctgtgtctctggccatcccatcgtttcaagtagtgccccagtttgaaagtccacttcatcatcaggcatccagtgccttccagcctttaattgtctcctatcaaactggaaacaattagtctgagaaaatcatccatgccagtgaattaatttattgaatttgt

SEQ ID NO: 4621 - DNA, 458 bp, Homo sapiens
atagggcgaattggatttccccgcggtggcggccgaggtactaagaaaaattgttttgccttgagatgctgttaatctgtaactttagccccaaccctgtgctcacggaaacatgtgctgtaaggtttaagggatctacggctgtgcaggatgtacagcaaaaaagaaactgagaagcccaaactgctttcttgttaacatccactttatccaaccaatgggggaaaccttcttatactttggttccattatgaagttgggacaattgcttgctatcacacctggcaggtaaaccaatgccaagagagtgatggaaaccattggcaagactttgttgatgaccaggattggaattttataaaaatattgttgatgggaagttgctaaagggtgaattacttccctcagaagagtgtaaagaaaagtcagagatgctataatagcagctattttaattg

SEQ ID NO: 4622 - DNA, 274 bp, Homo sapiens
  misc_feature 1, 95, 96, 106, 133, 135, 162: n = A,T,C or G
ngcgggggcagctgagttagagtcccaactcttggactccatttgctattctcttctttctcccccacacctatctggtggtggtagtgggcgtnnatatttgcgntccttttcattcaattcctaaaatctntnaaaaaatttttggggttgggggggtanttgggggaaggcagggaaaggggaaaaagggagaagtagtagctgaaagagcaagaggaggacatggagaatgaagaagaagattaacctggagttaaggaacagatccccg

SEQ ID NO: 4623 - DNA, 423 bp, Homo sapiens
  misc_feature 19, 31, 32, 37, 39, 46, 78, 79, 86, 87, 88, 170: n = A,T,C or G
cgcccgggcaggtacgctnggggctctcggnnttagngngcatgcntttcggctccaccacgaacatgtagtagaggnnccacatnnncatcgacagcagtagcagaaacgtcaggccgtagccgaagcctcggaaggagcggcccacggcaaagagacatgggcttgcnatgttgccagtctgggctcaaacttctggccttgggtgattctctcacctcagactcctgagtagctgggattacagatgcgggccaccacacctggctaccagtgtgcttttcttggagaaagaagaaaagaagaaagaaggaagaagaagaagaaagaaaggaggaagaaggaagaagaagagccagtgtgataatacattgagtgattttttaaaaagtgcatatatgagcaaaaggttatttttccctt

SEQ ID NO: 4624 - DNA, 455 bp, Homo sapiens
  misc_feature 14, 43, 44, 58, 73: n = A,T,C or G
tagggcgttttggngctaaccccggtggcggccgcccgggcanntacgcgggaatgtntggaaagtctttagnttaatgaaatttacttcataagcattcaataaatatttgctattattactgatggttaatattgtcaacttgattggattgaaggatacaaagtattgatactaggtgtgtctgtgaggatgttgctaaagggagattaacatttgaagtcagtgagctgggaaaggcagacccacccttaatctggtgggcataatctaatcaactgccaacgtggctacaatataagcaggcagaagaatgtgaaaagagagactagcctagcttcccagccgacatctttctcctgtgctggatgcttcctgccctggaacatcagactccaagttcttcaattttggaactcagactggctctccttgctcctcagcctgcagacggc

SEQ ID NO: 4625 - DNA, 446 bp, Homo sapiens
  misc_feature 19, 20, 34, 48, 49, 185, 191, 196, 198: n = A,T,C or G
ccgcccgggcaggtacgcnnaggagtctcctccntatcgcagctgaannatctgttgagcgcttcaggaaaggcggacaggcgacactaacaggtgaagatctcgggagaccatgactaagaaaagaattgctgtgattgggggaggagtgagccgggctctctttccattaaagtgctgcgtanaaaganggctngngaaccctgtctgcttttgaaagggactgatgacatcggagggctctggaggttccaggaaaatcctgaagaaggaagggccagtatttacaaatcagtgatcatcaatacttctaaagagatgatgtgcttcagtgactatccaatcccagatcattatcccaacttcatgcataatgcccagggtcctggagtatttcaggatgtatgccaaagaatttgacctttaaagtatattcgatttaagac

SEQ ID NO: 4626 - DNA, 414 bp, Homo sapiens
  misc_feature 143, 147, 156, 159, 161, 163, 172, 179, 203, 364, 381, 386,390, 395: n = A,T,C or G
actacgaaatgtttattgattatatttccagctttaattttcttgagtaatttaactgaatttacacagtttgcttcattgtattttcaaacaaatagaaaataaacttattaggaagcattttcttaaagtgtttttgctgncttntctatctgntcntnanggttttggnccttttnattgagttttcatcgcttttgatngtcagggcttatttaatctctagtgcatgaaagtctcatatgtaaaaaatgattattctgaatttaatctgtcattggtcatacttctaaggtgttcaaccttataaaaaataatatgactatcaaaaaagaagaaacccttaccattatgttctaggtantaaaagttttccaaggnacagntgtntcacntaggttctaccattagacc

SEQ ID NO: 4627 - DNA, 314 bp, Homo sapiens
  misc_feature 42, 43, 44, 61, 80, 145, 169, 178, 182, 185, 186, 217, 225,251, 256, 271: n = A,T,C or G
cggtggcggccgcccgggcttgtacttttttttttttttgannnaaacatttctgaataantataatttttaatgtccanaatgtgtaatacaagggccagagcttcctcctggactcaattttataaattctcaattggttggngaggccaatagggatactttttcntggcaaatngggnacnnggaaaaagcttccattcaaagtccctcaatnggtcatcngaatcaaaatggaattaagtatcttnatctnctccatctctttctnatattctacaatcctggccttttgagagagacacccactcagc

SEQ ID NO: 4628 - DNA, 139 bp, Homo sapiens
  misc_feature 43, 53, 54, 84: n = A,T,C or G
ctatagggcgaattggagctccccgcggtggcggccgcccggncaggtacttnntttttttttttttttttttttttggagtanagtttaatttaaagctcattgatcatttgagcaaatctctggagggcagaacaag

SEQ ID NO: 4629 - DNA, 392 bp, Homo sapiens
  misc_feature 116, 180, 196, 201, 211, 225, 330: n = A,T,C or G
attggagctccccgcggtggcggccgcccgggcaggtacgacctggacggaaatggctatatcagcaaggcagagatgctagagatcgtgcaggcaatctataagatggtttcctntgtaatgaaaatgcctgaagatgagtcaaccccagagaaaagaacagaaaagatcttccgccanatggaccccaattttnagacngaaaactctnccttggaagagttnatcccgaggagccaaaagcgacccgttcattgtgcgcctcctgcagtgccgacccgagcagtgccggccagttctgagccctgcgcccaccaatcgaatttgtanagctgcttgtgttcccttttgattctttctttttaacaaatttttttttttttttttgccaa

SEQ ID NO: 4630 - DNA, 403 bp, Homo sapiens
  misc_feature 331, 379: n = A,T,C or G
ccgcggtggcggccgaggtactgtaaatgtgttttctcttccttatgattttcttgatacatgttcttttctctagtttactttattgttaagaatatactatataatacacatacaaaatatgtgttattgcctgtttatgttgtgggtagggcttctggtcaacagtgggctacattatcgaacggtcaactgtatccttaactttttttcctcaaatacaactttcaacaattctggctttagctaaaaaactttagctaaactaaagaacttcagccattactctttcagctcctttatgttcacagaccaggaggtagacctcaanaaagtatatttaggtgttcctcctaatattccttccagcccccctttnctacagctttgcctattttcaaac

SEQ ID NO: 4631 - DNA, 151 bp, Homo sapiens
tagggcgaattggagctccccgcggtggcggccgaggtacgcggggctttcctttcagcggagcgcggcggcaagatggcagtgcaaatatccaagaagaggaagtttgtcgctgatggcatcttcaaagctgaactgaatgagtttctta

SEQ ID NO: 4632 - DNA, 411 bp, Homo sapiens
  misc_feature 94, 125, 263, 305, 380: n = A,T,C or G
ccgcggtggcggccgaggtacttttttttttttttttttttttttggagggaaaacatcttttttattattattatttttatttatttatttanagacaggttcttgttctgttgcctgggctanagtgcagtggtgcaatcctaattcactgtggcctcaaaattcctgggctcaagtgatcctcctgccccacccttgagtagataggactacaggcacacaccaccatacctggataatttttttatttttatttcgtanaaacggaggtccagccaagttccccaggctggtctcgaactnttggcctcaagtgatcctccatgcctgggctggaaaacataaccttatggggaaagttcctaaaaatggttgaanaacaagactgaaggctagaatatgaaagctt

SEQ ID NO: 4633 - DNA, 415 bp, Homo sapiens
ccgcggtggcggccgtctccaccagaaaaccatcgccaactcctgcgatcagcttgtggcttacaaaccttgtttaaaagctgcttacatggacttctgtcctttaaaagcttccccttggctgtggccctctgtgtatgcctgggatccttccaagcactcatagcccagataggaatcctctgctcctcccaaataaattcatctgttctggagagcctatctttctgaggttgacacttatcttgcagaatggggttcccacccatctttgatcatgaaggaaatctcagatttagaactatgttgcccaggctgctcttgaactcctggggtcaagcagtctacctcggcctcccagaatgctgggattacaggcgtgagccaccattcccagcccacatttcttaaaaat

SEQ ID NO: 4634 - DNA, 435 bp, Homo sapiens
ccgcggtggcggccgaggtacgcgggcatgcaatcagttgagagttcaaatggaacaaaaagccaaaggaagggcaaattatctctctcttcttgagttgtcacatccatctttttctgcccttggacatcggagcagggcccagtgcaccaggttttctagctctcaaacttgtgaatggtatctcatgggacttctcagcctccataatcatgtgagccagttctcgtaacaagttccctcttacgtctatatacataaaatctatctatatcctctctttatgtctctcaggagaactctaataatgcattaatcaaatattacaaaaatcttacgatgaaaagcaacagtatccctctactttgttctctaactcacatctattcccccaaacaacctcttaaccattctgttttaataactctgaataat

SEQ ID NO: 4635 - DNA, 281 bp, Homo sapiens
  misc_feature 46, 48, 201, 202, 234, 255, 279: n = A,T,C or G
ccgcggtggcggccgaggtacttttttttttttttttttttttttngnatttttagtagagacagggtttcaccgtgttagccaggatggtctcgatctcctgacctcttgatccgcccacctcggcctcccaaagtgctgggattacaggcgtgagccacccattccggcctaacgaagacttatttttacctcaactannatgggggttcaattcaattttgcttacctcancccgtgtcaagggaattaaantttggggccccttggggaaatttncc

SEQ ID NO: 4636 - DNA, 433 bp, Homo sapiens
  misc_feature 7, 409: n = A,T,C or G
ccgggcnggtacaaaccctactttttctagggctgtcataacaaaattaccatgaatgaggagacttaaaactacagaaatttattatctcacatttctagaggctaaaagactgaaattcaggcattagaaaggccacactttctctcaagtttcaaaaggagaattttttcctggggctgttccagcttttggtggctcctgcatgttttggttttagtggcacatctccaatgtctgctgccattttcatatgaccttctgcttgtgcgtcttcccttgcccttcctcttgaggacaccagtcatggatttggggacccaccctcatccagtatgacctcatttttaagtaatttactttattttccaaaattaaggattacattctgagggttccagggtgaatngtggaatttttgggggggtaaaaa

SEQ ID NO: 4637 - DNA, 491 bp, Homo sapiens
  misc_feature 1, 227, 271, 329, 431, 441, 486, 491: n = A,T,C or G
nctatagggcgaattggagctccccgcggtggcggccgaggtacagacttatgcttatagggaggcctcaggaaacttacaatcatggcagaaggtgaaaaggaggcaagcacacattcacatggctgaaaagagtcaggggaggtgctacacactttttaaacaagcagatctcaggagaactttatcatcagacagcacgagggtggttgaggctaaaccattanaaaccacctctatgatccagtcaccttccagcaagcccctcctncaacacttgacaattacaattccatatgagattgggggtggggggggtgccacaaatncaaaccatgtcaaagaagcatttttaaaaatttgagggggaagtttctaattcagaatagcaaatttcagggaccagggggccatttttatttaagtcattnaaccaccttncttttttcaattaaccattggcccaaaaaatttgggggaaaaaanagggn

SEQ ID NO: 4638 - DNA, 461 bp, Homo sapiens
  misc_feature 21, 204, 218, 228, 230, 244, 253, 257, 259, 261, 263, 270,271, 276, 282, 284, 287, 291, 302, 308, 320, 331, 347, 356,359, 364, 365, 368, 380, 391, 400, 405, 410, 413, 424, 431,441, 448: n = A,T,C or G
tactatagggcgaattggagntccccgcggtggcggccgcccgggcaggtactctttccctttatttctcagactggccgacacttagggaaaatagaaagaacctatgttgaaatattgggggcgggttcccccgatacttttggacatatatccagtagtgggactgctggatcatatagaagttctatttttagttttctnacaaaccttccatnacctggtttncnttaatggcttaacntaattttantttncnancnaccaggnnttatnttaagntnccntttncttttgcgttnttttgnccgggcattttnggataattttntttgggcctttttttngaataaatnagncccanntcntaaaccttgaanggttggttcantggggaagnaaaancttcnaanccttggggggnccccaanaaaaaatttncttggcncccccgggggaaa

SEQ ID NO: 4639 - DNA, 458 bp, Homo sapiens
  misc_feature 371: n = A,T,C or G
tatacactacttagggcgaattggagctccccgcggtggcggccgcccgggcaggtactttttttttttttttttttttttgggatggagtctcgctctgttgcccaggctggagtgcagtggtgtgatctcagctcactgcaagctccacctcctgggttcacgccattctcccgcctcagcttcccaaagtagctgggactacaggcacctgccgccacacccggctaattttggttttgtatttttagtagagacagggtttcactgtgttagccaggatggtctcgatctcccgacctcgtgatccgcccgcctcagcctcccaaagtgctgggattacaagtatgagccactgagcccggcctctntgtagcttttaagatgttcttaggtgacttatgagaatgaaaaaatggagaattttccgtcttcctgccatgaaatcaattaatggc

SEQ ID NO: 4640 - DNA, 566 bp, Homo sapiens
  misc_feature 530: n = A,T,C or G
actccttagggcgaattggatctccccgcggtggcggccgaggtaccataattagtttagaattcagtcttttaaattatttgcaccttgagactctgtgaaatgaaaacatttaacagtaaactcttgtcccaagggagcaaagtgagagtaaatgctggtccatagtgtggggaaaaaggactgtgttcaccatgagtttttcaggatgcagcataaagcttatctaaatactacacagatcattatcttttaacccaaccaatcatatattcaaactaagggaaaaatatgtaagcttttcctttggaacctgagacaccaggagccttaaaccacaaataatctactgtagctatggacagggtagtcaaatttatttcaaaacaaaagctttgttgggctgcatcaaatgcaggagaaaaggaatacttaggggcatggttaaattaccagtgtgccgtaacagtgaggtatgcctcaaataagcctttaaaaactttataaactggactagaacttcccatgcngtaatattttttcagggcttctaatggaaaaaaaaa

SEQ ID NO: 4641 - DNA, 363 bp, Homo sapiens
  misc_feature 45, 51, 62: n = A,T,C or G
gggcgaattggtttccaccgcggtggcggccgaggtacttcgttntttttnttttttttttnaggcttcttcaaatatggaaaaggaaggagataaagggccaagaacctccagatggagaccggagctgtttgagtttttaccttgaaggcgccaccacccatgtgcctctggtattcacagcagcacttgctatctctcactatggtggattctgacctttaggcagctcagggtttcattgccctagcgggaaacagattgagagctttctagcctgggatatgttgcacaccttagacattaatgactttaggtaggtgcttttttcacagccagtgctgtctgtgaaagttataacct

SEQ ID NO: 4642 - DNA, 414 bp, Homo sapiens
  misc_feature 42, 65, 169, 187, 189, 218, 278, 283, 293, 339, 347, 378: n = A,T,C or G
ccgcggtggcggccgcccgggcaggtactctgggaggctgangcaggtggatcaccttacgtcangcattcaagactaacctggccaacatggtgaaaccctgtctctactaaaaaatacaaaaattagctgggcagggtggtgcatgcttgtacagcatcgtagggtncccctaaacctggccctngntttttggggtttttaaatggttatccccnttacttgagccggcctctactaggtggctgtgattaaaatgtcccaagcaagggataggngaaangggaatgggntagagcctctggagatcattgtaaccaatcctgccagaccttgttnggggcaantgggggaagccaaacctagataaggaccttntttggggccatcaaggggaagccaaaaaatttttct

SEQ ID NO: 4643 - DNA, 431 bp, Homo sapiens
  misc_feature 190, 196, 202, 203, 207, 322, 405, 416: n = A,T,C or G
ccgcggtggcggccgaggtaccaaatacaatctgtaaataatggccatttcttcccaagcccacagccaagatgagtgttaggctaaattcagagccctggctcttcctcagatgagtggaaaacctgcgcatgacagggccggctcccccttctcaaagggcttccttccactcattccatcccttacnagaatntgccgnngggngttcaccgggccagaagaaagcacaaaacatgggattcaagaagtccaaagaaatgcagttccgttgcgcccaatcagagatagatgatttcattcaacaaggctggaagcccanttgggaagtcgataaaaaatctttgctaactttttttaaatggctttttactttttctaagtcacctggaaaccaaagggaangggcccaccantggcccattttaaaa

SEQ ID NO: 4644 - DNA, 449 bp, Homo sapiens
ccgcggtggcggcccgaggtacactggaggctggagcctgcagatggcatggctctgcggctcaccttgctgcagttggtggtggtgacagagactgcagcttgactgtagtggtggttaccaggagctctgccactgcatgtccactagtgacgggttcgctccaccaccccagctgggtagccgctgctctcacataaggggtccaattaaaattgccaggaataaattcccccggactttgacttctcaagagctaagaaggtttgctgagtattctggcatgatgtttggtgatcaaacaactgctggccaaaaatgatgaagtatttccccctcttgctgaagatgtgctccatacaatagtccatcacattcatcattcatcaagtctggaagtgtgccacccaatcatattatctatcacatgtttggtctggctttttttt

SEQ ID NO: 4645 - DNA, 437 bp, Homo sapiens
  misc_feature 209, 370, 415: n = A,T,C or G
cacttagggcgaattggagctccccgcggtggcggccgaggtacgatcttggctcactgcaacctctccctcccgggttcaagtgattctcgtgcctcagcctcttgagtagctgggattacaggcgcgtgccactgcgtccggctaatttttgtatttttagtagagatggggtttcaccatgttggccaggctgatctcaaacttcntgaccttattgtgggtccacccaccttggcctcccaaagtgctgggattacaggcgtgagccaccgcgctcagcctacaagccaattttttaaaaactgacacctattactgataaaattctctgttttaaaatcctatttactattttaaagataagtanttagttttttttttttaaataccaataatttctggttatttgatnaaaattttaaagggcatttttt

SEQ ID NO: 4646 - DNA, 582 bp, Homo sapiens
  misc_feature 410, 421, 505, 510, 536, 541, 548, 561, 562: n = A,T,C or G
ccgggcaggtacgcgggaaagtgcttaattagtgtccatagctaaggaaagagagaagaagccagcaagtgcatgcagggaatgccaatctatggtccgtagctgaagcagctggacaacaggtgacaagaaatagtgagggaagccagatgaagtgactgagttgtttattaatgatctccatttgtcttttgggaagatacagggtcatatttcttatctactcaaataaaatgttatttaacaccagaagcaatagtatctgtggtgggcagaacaataccccactaaagatgtctacgtcctgggccaggcgcagtggctcacgcctgtaatcccagcactttgggaggccaaggtgggcagatcacgaggtcaggagttcgagaccacctgatcaacatggtganggccccgtctntacttaaaataccaaaaatttacctagccttgtggccttccttttgtattccaacttctcggaagcttgaggcaggaaattacnttgancccgggaggcaaaccttgcaatgaancccanattgtgncccttgacttccnncctgggccaagggaaaaaaa

SEQ ID NO: 4647 - DNA, 470 bp, Homo sapiens
  misc_feature 62, 63, 65, 74, 101, 136, 144, 146, 159, 168, 201, 205, 211,221, 222, 250, 265, 278, 288, 292, 312, 326, 354, 379, 380,383, 419, 431, 461: n = A,T,C or G
tccacccgcggtggcggcccgggcatttcttccagggatctctgtgcttccttttgtgcttnntntgtgtgtgngatatttaaaaggggctgggaaatgtncaaaaaacatgtcactacttaagaacattataatnggcatctngntggttctaagtgnatggttaanttaatcttccaattttcagccaaatggtgtggncctnaaaatnggtaaaagtnnagcaacccttcttaatttttcaaccttntgtattaatcaaggnccttccaccatgncaaaatcttncctnggcttccctcggctggcagnccacacaaaatctnccctctgtttttctgatgccagcttctnggcacttgctatccccgcgtacctnnggnccgctctagaactagtgggatcccccgggcttgcangaaattcgaatntcaacttaatccgataccgtcgacctcganggggggggc

SEQ ID NO: 4648 - DNA, 139 bp, Homo sapiens
  misc_feature 4, 6, 16, 24, 85, 122, 126, 128: n = A,T,C or G
ggcngncgcccgggcnggtacccncgaatctaaaataaaagcagaaattatatgaaaaaactggggtgggagttggaaggaactntatatatgtaataaatttgtggtgaaaactgttaatnactnangctttcattaa

SEQ ID NO: 4649 - DNA, 429 bp, Homo sapiens
  misc_feature 7, 365, 411: n = A,T,C or G
ccgcggnggcggccgcccgggcaggtacaaagcataacaaaattttcaatcttcaccattttaaaatgcaattcagtaatgttcagtatattcacattcttgggaaagagatctgcagaactttttatcttacaaaactggaggtctatgcatattaaagaactctttttccctctccctgcatcctttggtaaccaccactctacttcctatttctgtgaatttgactactttagatactccatataagtggtatcatacagtatttgtctttttgtgactggcttaattaccttagcataatgttctcaagattgtagaatttaagggattttcttccttttcaagactgaataatatttccntcatatttgtatatcacatttttgcttatctgttcatggtttgatngaaccattttggggttac

SEQ ID NO: 4650 - DNA, 438 bp, Homo sapiens
  misc_feature 106, 367, 418: n = A,T,C or G
tagggcgaattggagctccccgcggtggcggccgcccgggcaggtacttcagttcctattgccatgaaaattgtatccagcagctaaaaaaaaaaaaaaaaaaaangactacagttagtcattatccaatttgatgatttatggtccaacactaatgctcatttttttgtttgttttacaaacatttggtggataccacaatgaaaactgcacttaaaaaacaaaaatgctgaaagaggaaggaaatatcaaaaaggtctgaatagacaacaggcaaatatgcttccacctaccgaaagagttttaggttggcagacagatgggtgccttattttctgtgaaactgaagttttaaacactggccagnaaaatgtttgattgccatttcaacacatggaaatagtttaccattggatgncctaaatttaccatttttct

SEQ ID NO: 4651 - DNA, 508 bp, Homo sapiens
  misc_feature 16, 18, 25, 40, 47, 48, 59, 66, 72, 81, 90, 92, 104, 111,125, 134, 139, 140, 176, 190, 241, 281, 449: n = A,T,C or G
gggggcggccgaggtncncgggganagcacatccggtgtnagaagcnntggtaggcctngaaaagncgggtnaggaaaagnggaaactgntncacggactttgnaaccatnaacatatttgatcnaaaaatcanctttnntcccctttaaaaattttcttcaatataacccccgtnaccccagcagcacnctgaaagaaagggtctaatccaaggttttgccccttttgtattgttttggngggcgggcttgcagggggcccttatggtcccataatgggnccacttcattttcattttcaaggcctgggccctggcttgtcttgccctttgggggcttcccttgataatttgaattgaattttggccttggatgggcaaacaccctcaataagcccattgaaaaacttggaaaccagaaaaaaagaacttgggggactttcctttgcntgggaattttgcaatttcccttaccaagggaagtttgggcccttggggccccttgcccc

SEQ ID NO: 4652 - DNA, 391 bp, Homo sapiens
aggtacttcgaagtttatccagaagcaaatttaactgtgtcttaaacttgtttcccacgctgatgaagctaagttttcctgctttttgtttagtatctttgttgttatttgtggatgattcaaataattcccgtataaacttatctctggattcacatattaaggattcaagagacatatgtaaagcatcattatttttctccacaaactgggtctgaaaaataaatcaaacaggaatgtttctgtccatcttgtgataacatcacttaacatggctctgtccaaaggaactttctgtgatgacagaaatgttctgtatctgcactgtccaacgcagtcaccactagtcagtgtggacactgggcacctgaagtccccgcgtacctgcccg

SEQ ID NO: 4653 - DNA, 109 bp, Homo sapiens
  misc_feature 46, 70, 104: n = A,T,C or G
ccgggcaggtacaaaatggtcctctgagaatattgttcctctttgncatttgcaaagagatgcattctanctggatgttttcatttatactcccaaattctaanactct

SEQ ID NO: 4654 - DNA, 200 bp, Homo sapiens
  misc_feature 14, 64, 94, 146, 167, 194: n = A,T,C or G
tggagcttacttangattttctagtgcagtagttctaaaatatggtccctggatcagtagtgtnagcatcccctgggattttgtgttttaacangttctctatatgattctgatgcacactaaagcttcagaatcactgctgtagnataaactgtgatggttctcanccttccccactgctggcttaggtgttngctttc

SEQ ID NO: 4655 - DNA, 502 bp, Homo sapiens
  misc_feature 51, 173, 193, 215, 223, 260, 270, 271, 280, 291, 307, 333,336, 345, 349, 357, 367, 376, 384, 389, 399, 402, 404, 407,412, 420, 446, 447, 452, 456, 473, 489: n = A,T,C or G
aggtacttttctttttttctttctttcttcttttttttttttagacggagntttcttcttgttgcccaggctacagttgcagtaggcatgatctcagctcactgcaactgattcaagcgattctcctgtctcaagcctcctgagtggctgggattaacaggcacccgctcacncatgcccagactaaattttnttgtatttttagttgaaaaaancgagggtnttcaccattgtatgggtgcagatccttggaggcctcngaagcttccnngtacactanggggggtgganttcccaaccccaatcntacgagtcccttctccaaaaaagatngcnttggggggnactntaaccaanggaatggttnggaaggccncaaccccnggagnaacctccttnggncnccnccaantaaaaccnttctgtttaagtaaaaaggtttaggnnaaaanttcncttccatgtgggggttnttggaaaaaaagaaanaatttattttttt

SEQ ID NO: 4656 - DNA, 460 bp, Homo sapiens
  misc_feature 24, 25, 27, 28, 64, 70, 73, 87, 88, 239: n = A,T,C or G
aaatccggcgaattgttttctggnnannggccggcggccgaggtactgatgcttattttttttntttttnganacagggattttctnngtcacccaggccagagtgcaggggcgtgatcgtggctcactgcagcctcagcatcccaggttcaactgatccctctggcctcagcctcctaagcagctgggactagaggtgtgtgccaccatgcccagctaatttttatattatttatagnggcggggttttgccatgttgcccaggctggtctcgaactcctgaactcaagcaatccacccgctgcctcagcctcccaaagtgccaggattacaggtgtgagccactgtgcccagcccctgatgctaatttttaaatggacatttgaattctcaaagaaatttgtgttgcctcttgtcaaaccaggtcactgaaatgataacccacacaataaggcccaat

SEQ ID NO: 4657 - DNA, 649 bp, Homo sapiens
  misc_feature 105, 140, 147, 167, 170, 175, 176, 186, 189, 190, 193, 194,198, 204, 211, 223, 224, 234, 251, 279, 280, 281, 289, 293,295, 296, 305, 317, 325, 335, 336, 338, 341, 353, 355, 362,366, 367, 380, 382, 396, 399, 411, 413, 415, 420, 427: n = A,T,C or G
  misc_feature 445, 446, 460, 477, 479, 492, 493, 501, 522, 543, 557, 569,571, 590, 594, 596, 598, 606, 607, 639, 640: n = A,T,C or G
aggtacattttcttttttctttttctttttttttttttgtttgagatggggccttgccctatcacccaggctggagtgcagtggcacagtcaccactcactgcancctcagcctcctgggctcgatcgatcctcccactncagcctntctagtgggcttgggactancanggcannaacgcctacnacnnccnnaggnttaaanttagttngggaattttttnngggataatanaaggggggggttatttnaaccccaatggtttggcccccaaggggnnntggggttnttanannatacctttnacttggggggcnttcaaagnggcacaattnncnttntccttggccccntnaacctcntttnnccccaaaatagantngccttggggggaanccntggtccaagtgncnantttgnaaagtcnccaacatttggtcaatcnncattaagggccccncttgggagaaaaccccncncaatttttttttnnttttttcncccctttctttccaattccanttggcctttggccccttttanattggggccaaacnttttttttttcncntttcccccaaccaactccntcanananctttaaanntttatacaagggtttttaattgtttaagtaannaaaaaaatt

SEQ ID NO: 4658 - DNA, 138 bp, Homo sapiens
  misc_feature 16, 35, 41, 45, 50, 52, 54, 86, 96, 101, 102, 120: n = A,T,C or G
ccgcggcggccggccngcccgggcaggtactatancctttntttnttaantnangtttttttgacaattccttgaatctgttattnattccccttncacannaacaggccttgggacttnccaacaaccctgctaaag

SEQ ID NO: 4659 - DNA, 344 bp, Homo sapiens
  misc_feature 19, 36, 45, 48, 52, 54, 59, 117, 145, 147, 179, 190, 195,202, 221, 238, 248, 276: n = A,T,C or G
cggccgcccgggcaggtantaagggtgacatatttnaggcgaaanggntttnanaaacntagcctggtgacatgaatgagctgattgtggaactctcagcagcatttcacgtattgntaacatgtatggcatttattagcatatngnatattatataagattgagggatgtcatatttncagctttcttntaaanaaaaatngaggatattctcctatttnatatcaggtaactaaanaatgctaagntatgtggaaaaaattgcaaagatgcttngacagatataatccctttggtgctccatctgatcaaagttgaaaagtttgatgttttttaagagacaa

SEQ ID NO: 4660 - DNA, 403 bp, Homo sapiens
  misc_feature 104, 105, 209, 236, 291, 381: n = A,T,C or G
ggcgaattggagctccccgcggtggcggccgaggtacttaacaatgcagaccatgtgtatgaccacccatcctgaaccaagattcctgggcaaggctcttaatnnatctgttactgaacaaaagcaaaactgctccacacatgggccacataatatagccacttgtttatttaaatttttgacctatgtgataaatccttgatgctcanttgtctaaaaatgtctttgtaagcatntgaatatacctaatactgaaataagagtttaaaaagcttgacaacacaatccaangttttacatttatttactcataattaactcaataaacatactagattatacatttaatatatgttaaaatggctgaacaaaaatatttancgtaatttttcttttttttttt

SEQ ID NO: 4661 - DNA, 441 bp, Homo sapiens
  misc_feature 266, 338, 342, 351, 369, 414, 416, 436, 439: n = A,T,C or G
ggagctccccgcggtggcggccgcccgggcaggtacgatcttggctcactgcaacctctccctcccgggttcaagtgattctcgtgcctcagcctcttgagtagctgggattacaggcgcgtgccactgcgtccggctaatttttgtatttttagtagagatggggtttcaccatgttggccaggctgatctcaaactcctgacctcatgtggtccacccaccttggcctcccaaagtgctgggattacaggcgtgagccaccgcnctcagcctacaagcaattttttaaaaaactgacaccctattactggataaaaattctctgggttaaaaattnctantttacttanttttaaaagaataaagtnattaaggttttttttttttaaaataccaattaaatttcctggttnanttggataaaaaattttaaanggnca

SEQ ID NO: 4662 - DNA, 455 bp, Homo sapiens
  misc_feature 446: n = A,T,C or G
cactacttagggcgaattggagctccccgcggtggcggccgaggtacgcggggggacctaaggagtcgcagttgtgaacaggttagagttacttgttattggtaaatagccactatggagactaaggaccagaagaaacacagaaagaaaaacggtggacccaaagctgcaaagaaaaagaagtggcatctgcaggatctccagctaggagactaagaaaatgcccagaagagaaatgccaatgcttttgcagttcagtctgctgtgtggatgtctcgatcctttcacaggactctggatttgaagacacaaaagcatcatattccagtggttgatggaactccactagagcccgccaccaatacccggtagtggtgacggggccttccaaagtttggaaaggagcacttttgattataatgccttcattcgggaactttcacctnggccagaaa

SEQ ID NO: 4663 - DNA, 460 bp, Homo sapiens
  misc_feature 4: n = A,T,C or G
actnctatagggcgaattggagctccccgcggtggcggccgcccgggcaggtacgcggggacattggagtggggtgggaagcctgagtcctgtattcacatgaacgaattcaggacacccaccatacactcagctcctttctgaaagtgtcctcccttaggcctctagaaacgccatggactttaggaagggccaagtgacaccttccatgatgtttggttctggtccagatggatctggaagacaaagatttggggagagtgaccacatggctggtagcaataacaaggcctctggctctgaattgcttcctatggtcccggtagaaactgcatagttcagagccaaggggagatgagaagccttaacgtggaagagggacaagagagatgaattgctccctctgcaacccaactcttcaaagtaagaaatggttggagagccaatattcaccaatttc

SEQ ID NO: 4664 - DNA, 464 bp, Homo sapiens
  misc_feature 13, 36, 168, 196, 231, 234, 235, 249, 261, 281, 289, 295,300, 304, 309, 312, 319, 323, 333, 335, 342, 346, 372, 389,390, 397, 426, 433, 444, 455: n = A,T,C or G
cgcggtggcggcncgaggtacagtggttgtgatctnagctcactgcaagctccgcctcctgggttcacgccattctcctgcctcagcctcccgagtagctgggactacaggcatctgccaccactgcctaggccaattttttttgtatttcttagttagtaagaccgnggagtttcacctggtaatttaagcccanggattgggttctcagattctttctagaacacttcnatnngactctcacccctngcgcttgggccncttcacacaaaaagatggcntggggggnatttancaagnggcnaatgnaangcccacntggncgcccccaancnacggaanatcnaattttttttttaaattaaccttaancttgccattggtggaannttttaanccaaccaaatttcaatttacccccaaaanattttgnaaaagtttttnttaaggtaatnggggggccc

SEQ ID NO: 4665 - DNA, 391 bp, Homo sapiens
  misc_feature 143, 154, 174, 178, 185, 198, 201, 203, 249, 259, 266, 270,281, 297, 304, 307, 313, 322, 337, 343, 344, 375, 378, 379: n = A,T,C or G
ccgggcaggtactttttttttttttttttttttacactttaaatattcaagtttattgtatgtcaattatacttcaataaagctttttttttttttaaaccctcacaatttagttctgggctctgtgcttgggctcttgaaantcggtggcagnggcctgaatccccatgcccnctgngacagancaggagcaccatnctntnggacaaacaccgccactttaagtgccagctccctttccagcctcangcatttcaanaaaatcncttntcttttaacanccaagcagaccagaangagcagnacngtgaanaacataagnatgagaccaggctcnaggccnncaaaaggggagggtggggggggggaaaagtnctnnttggggtaattg

SEQ ID NO: 4666 - DNA, 396 bp, Homo sapiens
ggcgaattggagctccccgcggtggcggccgcccgggcaggtacatcccagctgattcagtatctccttctctttgaaaactctcacagaaactgccctataacttctactgacatctcatctcaatggctagatcagtgctatataacaaaactttctgcagtgatagaaatgtactatatctgaactatccaagatgttagctactagccacttatgactgtttagcatttaaaatgtcacttgtggaactgacaaaatcaacttttaattttacttgattttaataaatttaaatttaaatagatacatgtgtctagtggctacccacaataaataagtgcaggggctaggaccttaatcacatcacttacccccattcttcaaaggaaaagc

SEQ ID NO: 4667 - DNA, 273 bp, Homo sapiens
ccgggcaggtaccgtcactgctgctccgctaggcttggtggtgtgaggattttcttctgttcctatcgtggactctctctcccctttctctctttttttttattattttctccattttactctgacattattgagtgtctccctctagttctcatctttctctgccttcactgtgggcaatgactcttttccctcctacttgttgactttttcatctccagcttttctgccttcctgcctgagttcactttatttttaatagagtttctcccc

SEQ ID NO: 4668 - DNA, 467 bp, Homo sapiens
  misc_feature 5: n = A,T,C or G
cactnctatagggcgaattggagctccccgcggtggcggccgaggtacctgctgtcccctctctgactagaaaacagtttccctagatacctgcatagttagccccctgaacttatttcaattctctgctcaaatgtcatgtaaatggtgacatcttccctgaccatcttatataaaataatacttccctttcccctgatattctctatccaccttatcctgtttgatttttctgcactgccccatcaaccattgacatataacatgtctacttgtttatatatgtattgtgtttcaccagcattgaaatgtgactttcacgagggtaggggatttttgtctgttttatttaatactgtatccccaagaatgccttgcataaattgggactaacaaatatttattgaatttgaataaatgaatacatttgggaaggcgcaaaaggagtcccttgccccctgaaaatt

SEQ ID NO: 4669 - DNA, 510 bp, Homo sapiens
  misc_feature 175, 223, 231, 265, 273, 276, 296, 299, 354, 365, 372, 385,401, 402, 414, 419, 431, 432, 444, 447, 463, 464, 469, 471,475, 477, 482, 483, 496, 498: n = A,T,C or G
ggagctccccgcggtggcggccgcccgggcaggtaccttttagctctgcctggtttatcgccttgtccccgcagcccctggcagcctctcatctaccctctgcttctgtgggtttgccgattccgggcattttatgtaaatggaatcgtatgatatgtggtcttttgtgatcgtncttttacacttagcatgatgtttttcatgtatattacggtcgggtgtnggtggctnacacctgtaatcccagccgctttgggaggctgangtgggcanatnactttgagcctcaggacttnganaaacagcctgggcaacgtggcaaggaccccttgtctcaattcttttttaattgtnaaaaaaaaaanaaaattnaataaaaaatttncatccctttatttggnnttattttggtcnaatancctttaaatttnnttttaatatttnggnccaaaacaacccctanncttantngggnangccanngttaatataacantnccttcaaaaaaa

SEQ ID NO: 4670 - DNA, 425 bp, Homo sapiens
acttagggcgaattggagctccccgcggtggcggccgaggtaccatgagaaattgtagactttactcctatattctctttccaagccctaggattagccatttttccaagaaatgttgcataccattctgctatgaaaggaaccaaaactcaaatcttgattctgggtgtattttttgttaatttgctgtcttttcttgtagaacctctcaggtaatgactctaggaggtatgtgttgtgtattaacccatatatacacacacatataaactttttatttaatttttatacctatattatgctaaacttggaaatatattgacacatctgccctaagttaataccacatgaatgtttattacctaccttcttattcctgtccctaaccccgcactccaaccgtgaggaaccccctcctgccacac

SEQ ID NO: 4671 - DNA, 442 bp, Homo sapiens
  misc_feature 153, 188, 204, 232, 233, 358, 359, 383, 388, 399, 414, 419,423, 426: n = A,T,C or G
actacttagggcgaattggagctccccgcggtggcggccgaggtactaaggaaggcttttaactatttaagataaaccaacctaattttgattttttacttgcttcaacgtgtttcagttcattaatgtttcaataataaggaatgaattctnttgtcttgacaaaccaagcatggaaatttccccantaagagaaaaagaaangaaatttaaaatgatttccatattcaanntcacagcaccgctgaaaagagaactttgagttcttaggaaaggcatctgttacctccaaagggagggccactcattacagtttttgtgtaatattacaggaaaggtctgccaaagaagggaattnnaagggaaaatttggggaaatgacnacacntgtgatccccnggccacttctttttnaggcncganggntttcccttccccttat

SEQ ID NO: 4672 - DNA, 401 bp, Homo sapiens
  misc_feature 84, 223, 341, 355, 360: n = A,T,C or G
cactacttagggcgaattggagctccccgcggtggcggccgcccgggcaggtactttttttttttttttttttttttttagtanagatggggtttcactgtgttagccaggatggtctcgatctcctgacctcgtgatccgccctcctcggcctcccaaagtgctgggattacaggtgtgagccaccgcgcctggccaaccctgctcttgaaatgtctaaatnttttcctcactagcatatacaattcaaatgcacaggcctccatgacttctttggaatttaaaagaagccttcatttcaaggataggaaatatgtaaaaatttaccaaccatggctaanttttgttatggggnagtantggggaagggaccagttggaaaaaaaaaaaatagggttttt

SEQ ID NO: 4673 - DNA, 419 bp, Homo sapiens
  misc_feature 191, 357, 364: n = A,T,C or G
acttagggcgaattggagctccccgcggtggcggccgaggtacgatcttggttcactgcaacctctccctcccgggttcaagtgattctcgtgcctcagcctcttgagtagctgggattacaggcgcgtgccactgcgtccggctaatttttgtatttttagtagagatgggtttcaccatgttggccagngctggatctcaaactcctgacctcatgtggtccacccaccttggcctcccaaagtgctgggattacaggcgtgagccaccgcgctcagcctacaagcaattttttaaaaactgacacctattactgataaaattctctgtttaaaatcctatttacctattttaanagataangtattagttttttttttaaaatacaataattctgttatttgataaaaatttaagg

SEQ ID NO: 4674 - DNA, 417 bp, Homo sapiens
cactacttagggcgaattggagctccccgcggtggcggccgcccgggcaggtacttttcttcagatgccttgttctgtttagaacaaaaatgcactatagtttttaaagaatcatgcatctttgggttggcccaggatcaaatttgatattgaataatttattccagggcagctttcataaacatacttcatagatgttgttttgaaatgtttctaaatatctaaaatcatttcaacagcagaaatgatttttattttaacaaaagattatgatagcccttgtagtgtttaaaagtggtcatatttattactgactttgagtcaggtgttaaaatagcagttgccacagctcgtctcttgccttagtgtgctgctgtgaggagtcacagtgggaaactgcagggaggaggtgtgttc

SEQ ID NO: 4675 - DNA, 423 bp, Homo sapiens
ctacttagggcgaattggagctccccgcggtggcggccgaggtacatgttccgcatggataacgaccatgtgattgacgcgacgctcacaggagggcccgcaaggtatatcaaccattcgtgtgcacctaattgtgtggctgaagtggtgacttttgagagaggacacaaaattatcatcagctccagtcggagaatccagaaaggagaagagctctgctatgactataagtttgactttgaagatgaccagcacaagattccgtgtcactgtggagctgtgaactgccggaagtggatgaactgaaatgcattccttgctagctcagcgggcggcttgtccctaggaagaggccgattcaacacactcattgggaattttgcagacagtaaaggagatttttgttttctgttttatgacttt

SEQ ID NO: 4676 - DNA, 279 bp, Homo sapiens
  misc_feature 97, 103, 109, 119, 127, 131, 134, 139, 145, 150, 159, 167,169, 176, 187, 191, 204, 208, 227, 231, 236, 250, 252, 254,261: n = A,T,C or G
acactacttagggcgaattggagctccccgcggtggcggccgcccgggcaggtacttttttttttttttttttttttttttttttttttttttttcnaatttngcaaanatgggatctnaacatttngccnaanctggncttganctccngggctcaancaatcctnanacctcancctcccaaagngctnaaataaacaggtngtgngccggcacacccagcccanactnttcanacatgtaaatattngncncttttgnggaataaaggctgaatat

SEQ ID NO: 4677 - DNA, 144 bp, Homo sapiens
  misc_feature 16, 111: n = A,T,C or G
atacggcgaattgganctccccgcggtggcggccgaggtacttttttttttttttttttttttttttgaggaaaacccggtaatgatgtcggggttgagggataggagganaatgggggataggtgtatgaacatgagggtgtt

SEQ ID NO: 4678 - DNA, 410 bp, Homo sapiens
  misc_feature 25, 28, 30, 56, 72, 77, 89, 125, 143, 150, 153, 200, 201,218, 291, 328, 332, 369, 372: n = A,T,C or G
ccgcggtggcggccgaggtacaatngtngngaactgaataattaaaactttggctnctcttaggaaaagacnacttnctagtcataggngtcctatggggaaatttattttttttaatgtcctgntccttaatgctgcaaatnatcagtnttnataaagtaactgattttgcaccacttttttgtaactgtgaccacggnntaaacaatgtattctanactatatctatgtaaagtccattagaatggtatctgttcattttagtgataatgaagatcacaactaacaacncgacaaatacagaagttttgccagcttcaaattgcancatnggcctgctagctgtattaatgaaattgatatgattanatncttatgctagcctctcttactaatgggaattataatac

SEQ ID NO: 4679 - DNA, 163 bp, Homo sapiens
cactacttagggcgaattggagctccccgcggtggcggccgaggtacgcggggggagctagcctggcacctggactctgcccatccacagctgacagattccaacagaagtgtatttaaattctccagtagacaatgctgggtaagggagggggtagggctgg

SEQ ID NO: 4680 - DNA, 388 bp, Homo sapiens
  misc_feature 138, 193, 203, 206, 358: n = A,T,C or G
gcatcttcaagagatggacaagtggacaggagccaacagttggaagtcagattcagagagtagtgagcatggctgccttggccatggtgtgtgaggccatagaccagaagcctgagctgcagctggactctcttcatncctgggcccctgggaaagcttcctttcctctcttcagctcaatcagacgctgcanaagccccacncanaggagcagagcagttatgctcaccccttggagtgcagcagtgttttggaagaatcgtcatcttcccaaggatggggaaaaatagttgcacaatatattcatgatcaatgggtgtgcctctctttcctgttgaaaaaatatcacacccttatnccaaccacagggagtgaaattctggaaccg

SEQ ID NO: 4681 - DNA, 132 bp, Homo sapiens
  misc_feature 58, 71, 120: n = A,T,C or G
ccgggcaggtactttttttttttttttttttttttgcttccctgctgttcatgagctntagaaagctgtanaactattgcttacattttcaccaacatctaggtgttcttatttctttgngctctaaagctt

SEQ ID NO: 4682 - DNA, 427 bp, Homo sapiens
  misc_feature 4, 198: n = A,T,C or G
actncttagggcgaattggagctccccgcggtggcggccgagttacaagtgcttgtatagacaaatgtattaatttcacttgtataaatacctaagagtggaatggtggaatcagaaggtaggtatatgtttaatgtttttagaaactgccagctattttccaagttagttgtataatttttcattcctactaaccantgtatgaaaagcacctgttgctccacctccttgtccacacttggtatgatcagtttttaattttagctattctaacagttgtgcagtggcatctcattgtggttttaacttatatttccctaatgactaatgatattgggcacctttttaatgtgcttattgtctacttctgagtaaatacaaaagtgttttgctaaaaactattgtggggggctgtattgggatgatc

SEQ ID NO: 4683 - DNA, 429 bp, Homo sapiens
  misc_feature 98, 387, 396: n = A,T,C or G
gggcgaattggagctccccgcggtggcggccgcccgggcaggtactttttttttttttttttttttcaaataggttagttaggaacaactttactcanaagacgtatttgagcaaagacatgaaagaggtgaataaagcatgtggatatctagagacagagcattccagacagaaggaacagcaactggtaattagcaggggcaagagtgtgcctgccactggtcagggcagagagtgtgaggaaacaaaggtaaagaagtaaaattttttccagctatcctgtttctaagttccaaaagctatttcttcttttgaatatttcattttataggacttattctcatcttttgatgaaataccttccctcatgtctcccagggactggnatctttttnaaagttttctttcagttccctgcactgtttctg

SEQ ID NO: 4684 - DNA, 449 bp, Homo sapiens
  misc_feature 195, 358, 376: n = A,T,C or G
cactacttagggcgaattggagctcaccgcggtggcggccgcccgggcaggtacttcaaaattcctcactttccagtggttcaaaagcaccacatcagatgactggctccccccaggattcaaagaaggctgcatcgatgctccttctactcttgccacacaggcgacccgatccaagaaagtcactgccacaanggcaccggccacaaaagaagcctttacaaaaggccttgatgtatcttttcacccacccttgtgactgtgccataccctttctcccgctcttcctcggtgagaaggggtaaagtggttattttgtgccctcgcccaatttggccaaaaccccgctgcgcagctnagcccgggggggaaagtncccgcgcaggacccccccccggcgtaccttcggcccgctcttagaaactagttgggaatccccccggggctgg

SEQ ID NO: 4685 - DNA, 366 bp, Homo sapiens
  misc_feature 172, 223, 264, 265, 288, 332, 340, 353: n = A,T,C or G
ccgcggtggcggccgcccgggcaggtaccgtccatggcctgttaggctgcacaacaggtggtgagcagcgggccagcaggcattaccacctgaactccatccacctcctgtcagaccagcagtggcattagattctcatagagcacaaaccctattgtgaactgcgccatgncaagggatctaggtttgtatgctgcttatgaaaatacaatgcctgattatntgaggtggaacagtttcatcccaaagccatcctccagcccnnaccccagtccatgaaaacactgncttccacaaagctggtccctggagccaaaaaggttggggactanctgtactnctataaatctagntggaaacattttc

SEQ ID NO: 4686 - DNA, 245 bp, Homo sapiens
  misc_feature 73, 99, 103, 106, 113, 121, 167: n = A,T,C or G
tcatgagatttaaggaaaaaaagcaatctccataacataaaagtgcaagaagcggcagcaaatgctgatgganaaactgcaacaagttgtccacaaggngtanctnaaaatcnttaaaggntgactacaataaacaacagattttcaatacaggggaaacagccttntattggaagattccacctagggctttcatagttagacagaagttgatgcctggcttcaaagcttcaaaggacaatctt

SEQ ID NO: 4687 - DNA, 145 bp, Homo sapiens
aggtacgcggggtttcagcgcctgcaggttccgggaggtcagctcccagccgaggacgtcggatgtcatcgtccttgctgctttgccaccccattcccgtcaataaagtggtttgaacccaaaaaaaaaaaaaaaaagtacctgc

SEQ ID NO: 4688 - DNA, 607 bp, Homo sapiens
  misc_feature 409, 410, 416, 417, 418, 419, 422, 423, 424, 425, 426, 586: n = A,T,C or G
ccgggcaggtcttgaactcctcacctcgggtgatccacccatctcggcctcccaaagtgctgagattacaggcgtgagccaccacgcccggccagagatccacatctatatttataacacatttatggatgaaaattaaacaggtgtccgggtgcggttactcatgcctgtaatccgagcacttgtggaggccgaggcaggcggattacttgaggtcaggacttcgaggccagcctggccaacatggtgaaatcccatctctgctagaaatacagaattggcccgggtgtgggtgtcacgcacctgtagtcccagttacttgaacctgggaggcagaggttgcagtgagccgagattgcaacactgccactccagcctgggtgacagagcaagagaccctgtcccaaannaaaaannnnaannnnnaaagtacctcggccgcccgggcaggtacgcgggggaattctgcggcaagcgctttgagaagccagacagtgttgcagcccaccgtagcaaaagtcacccagcccttgcttctaagcccctcaagagtcacccagtgggtcccctagagccctgtccccancatcttttgccccctgggcct

SEQ ID NO: 4689 - DNA, 460 bp, Homo sapiens
  misc_feature 84, 125, 199, 228, 263, 281, 296, 330, 343, 348, 367, 410,418, 420, 426, 430, 437: n = A,T,C or G
aggtactttttttttttttttttttgagacagtcttgctctgtcacccaggctgcagtgcagttgtgtgatcttggctcattgnaacctccacctccagggttcaagcgattctcccaccttagnctcctgactatctgggactacaggcacacatcaccacacccaacatggagaaactccatctctacttaaaaaanaaataaataaataaataaacaggcatagnggctcacgtctgaatcccagctactggggaggctnaggtgggaaaatcacttngagcccaggaaggcngaagctgcacttgagccaagaatcaacgccattngccctccagcctnggggnggacaaaagcgagactccntcttaaaaaaaaaaaggaaaagttattagaaaaaaaatatganggatattnanttactnaaancaaagtntcaaaatgcctaaaaaaaaggcc

SEQ ID NO: 4690 - DNA, 567 bp, Homo sapiens
  misc_feature 25, 44, 49: n = A,T,C or G
ggcggccgcccgggcaggtaccagnacatgaaggaaagaactanaacanggatgtgaataacttctaaactggtcagccttggacaaaaggaaatctggaaatctcgacttggcctgagagaaacctcatcctggcccttaaagtgccaattaaggctgagttgaaaaggagctgggcatcatcaaactgcaaacaaacttagcttaggcacccacagtgtgatgatgtgtttatttccatgaaggagcagtctatggagaagtgcaggaactttcaaagttgcatgggcagagctgcttcttatatgacagaattggcaagctgcctgtcacttcacagtgggtcacatgaatatgaagcagagaactggctgtgtgcgtcagcaggggagcttaagactgcagattctggggaatcagcactcactgtgacacatgtgatcctctgtctcctcagacaactgaaggatggatgagaagggggatctctggagccttgaccttttgggcccccgaatttctagctagaaaacctcttttcaagacaaaaaccatgccaaagtacct

SEQ ID NO: 4691 - DNA, 593 bp, Homo sapiens
  misc_feature 53, 56, 80, 141, 145, 148, 199, 204, 205, 211, 215, 216,225, 251, 252, 260, 261, 263, 265, 266, 272, 273, 274, 275,279, 280, 284, 285, 286, 292, 293, 305, 306, 322, 348, 351,357, 364, 367, 369, 370, 389, 390, 402, 407, 408, 414: n = A,T,C or G
  misc_feature 417, 418, 419, 421, 424, 444, 455, 456, 466, 469, 472, 474,475, 476, 477, 480, 481, 486, 494, 507, 508, 512, 516, 525,527, 531, 537, 538, 543, 545, 572, 576, 578, 589: n = A,T,C or G
ccgggcaggtacttttttttttttttttttttttttttttttttttttttttnggnagtttttttttttttttttttttntttttttttttttttttttttttttttttttttttttttatttatttttttaaaaaaaaantttnggnttttttaaaaaaaaaaaaaaaatttttttttagggggaaaaaaaaaaattnaaggnnaaaaanaaannggggggggnttttttaaaaatttttttttaaaaannttaaaaannananngggccnnnnaaanntttnnnaaaagnngggcaaaaaaanngttttttggggggggnaaaaaaaaacccaaaaacccaaaaanatnaaaatntgattgnggngnngaaggggttcaaaaaaaanngggaattttttnatttnncccctnggnnntntgnatttgaagaaaaaaattttngtggggggggnnttttttatantanagngnnnntannccagnggggaccnaaaaaaaaggggnntttntttnggggggggngntttntggaannacaananatgggaaaaaaattttttttttttttngggncnaaaaaaaaaantttt

SEQ ID NO: 4692 - DNA, 504 bp, Homo sapiens
  misc_feature 110, 164, 241, 251, 469, 489: n = A,T,C or G
tagggcgaattggagctccccgcggtggcggccgaggtactttttttttttttttttttttttttggagacaggtctttcaaccaggctgcagtgcagtggtggagtcanagctcactgcagccttgatctacagggctcaagcaatcctcccacctcaggctnttcagtagccagggctacaggcacccaccaccacacccagctaattttttaaaaatttttagtaaaaaggaggtcanactggtctanaattcctgagctcaagcgatcctcccgctttgggttcccaaagcgctgggattacaggcatgagccactgcacccagcccatacataggagttttataacaagcattttgacaaaatatgttgataaggtttggatgtcccctccaagtctcatgttgaaatgtgaactccagtgttaaaggtgagcctggtgggaggtgtttggatcatgggggcanatccctcatggatggcttancaccatccacttggg

SEQ ID NO: 4693 - DNA, 600 bp, Homo sapiens
ccgcggtggcggcccgcccgggcaggtacctgggataaaaagtgcagttcttctgtttatatttgggtctggcatctgtgagagtgccctggggactcaagatatagactggcagaaacagctgcctgttacaggttaaaaaattgtgcctccctcacaagatatgctgaagtcctaacccccagttccttagaatgtgaccttatgtggaaatagaggttttgcagatttaatcaagttaagatgaggtcattagggtgagcctaataaaatgactggtgtccttacacaaaggagaaatttggacatagacacacacagagggaagatgatatggaaacacagagggagaactccatgtgaagacaggcagaggttggactgatgcaactgcaagcaatggaacattcaattgctggacagcaccagaagctagaagagccaaggacagattttatccacagtctcggatggagcaaggccttgctgataccttgatttcagactttgatcctccagaactatgagacgatgaatttctgttgtttctaagccacaccattttgtggtacctcggccgcttctagaactagtggatcc

SEQ ID NO: 4694 - DNA, 113 bp, Homo sapiens
  misc_feature 62, 70, 71, 78, 90, 93, 94, 111: n = A,T,C or G
tcattcatgaaagtaatttctcacctgaccaaaatcgatcgcttaacatttattgcatcatngcccctgnntctgtanactactctaccnaanntttaatttgtcactagntt

SEQ ID NO: 4695 - DNA, 423 bp, Homo sapiens
  misc_feature 212: n = A,T,C or G
ccgcggtggcggcccggcccgggcaggtacttttttttttttttttttttttttgttagaaacagggtttcactgtgttagccaggatggtcttgatctcctggcctcgtgatccgcccgcctcggcctcccaaagtgctgggattacaggcgtgagccatcgtgcctggccgctgcttggttttaaatgaatcttggatacaggtggccanactaaatggtctctcaacttgtcttcaagtttaggattttaatttttgatatttttcacttctctctggaaatttgttcaattctcaattgttgggggagtgcgcagctgcttcattatgaagtttactggctgataatcaaataaatatagaaaatataattgggtcatgtagctatcgctaaccagttttaaaaaatatgtacctcggc

SEQ ID NO: 4696 - DNA, 735 bp, Homo sapiens
  misc_feature 23, 26, 37, 301, 330, 382, 391, 492, 517, 533, 544, 571,574, 577, 579, 592, 606, 632, 634, 635, 643, 644, 652, 672,683, 684, 723, 725: n = A,T,C or G
ttttttttttttttttttttttnggnatttttagtanagacggggtttcaccatcttggccaggctggtctcgaactcctgacctcaggtgatccacccacctcggcctcccaaagcgctgggattacaggcatgggccactgcgcccagcctctttactgttcattcagtggggcttggggatggagcaaacaaaaacaaaaactgcatgtgttcaggctgccacttttacctggatgcctacactccccatgtgacagattagtcccaaatcccatttggtccctccccagtagttcancctctagtccttcaacttcatctcataanagctctcctgctcctggtccttcatttgccaaggttctcataaccacacagngtgctccanacatggccagaccaagccagggcatgaacaggaggtaatccacagggcaggggaccatgcttctacaaatgggctagcagtatttaagtaaatgtttactncgtgcttggcactgtgggaatggtnaagggattccccgagnccaaatttttnaccccttttgggaaaaagaaaaacacnctnttntnaaaaagttaaaantcccaatttatggnttttttccaaggtaggataacccttncnnaaattgannccattggnaaagggaccagaaccatttnaaaatggtggnnaaaaccattttcacaaggcttttaccttttaaaaagccngntttttaaaaa

SEQ ID NO: 4697 - DNA, 604 bp, Homo sapiens
aggtacagagacagaggaaggggggctccaaagccaagagagggaaccccacctgccacagataccagctaggtatatatacagaggctggaggaggcagtgtctgatttgcacaggctcaggggattggtttgactaggcatgtcattcacgtagcccgcaggaaaagctggctctcccaccctagccttttaatatgcaaatgcagggcaccatgatcttctacacaggtggggatacttcggggtgtccatgtatccaggaatgtggggaaagggcaagaagtccacaggaatcgccatgtttgggtggacccactttctaatggctggcatttggatatcgggtaactggcctggctttaagagctggagctttacaagaaacttttccagacgtgctttaaaaaacaaaaacttcctaaggaccccttttcctctctatctgcctaaaataatttatcaataactcctacaacattcccccctgtggagatgccgcactaactgctgttagaggtttgggcgacgatgtcttctggctacttcctgctggaaaggggcgtcgaatggggaacagcagcctagggctcctctggggttga

SEQ ID NO: 4698 - DNA, 371 bp, Homo sapiens
  misc_feature 260, 263, 315, 334, 341: n = A,T,C or G
ccgcggtggcggccgcccgggcaggtactcttttacattcccaccagcagtgtatgagagttccagatgttcctttctctttagttcttggtattgtcagtctttttaaatttagccattgattagatgtgtatttgtatctcattatgattttaatttgtgttttactgatggatgatgttgagtatcttttcatgggcttattgaccaaaaatgagtgagactccatcccaaaaaaaaaaaaaaaaaaaaaataaaangtncgcggggctcttcctgctctccatcatggcgcaggatcaaggtgaaaagganaaccccatgcgggaacttngcatccncaaactctgtctcaacatctgtgttgggga

SEQ ID NO: 4699 - DNA, 347 bp, Homo sapiens
ccgggcaggtacactttgaagactttctcaatggcattaacataggcagctgttctcaggtccaatcccaggttatacttcatggctgtgcgcataatttgcctggcagaacgctccattgtgtatgccaagccagagtgcaccgatgtctttctcagatgcacccgatatcctgtcttggaactctgccgtgggtacccaggggtctgaaaatctctcatttagtagtcgatagcaaaattgttcatcagcattccttaatatgatcttgctataattagatttttctccattagagttcatacagttttatttgattttattagcaatctctttcagaagaccct

SEQ ID NO: 4700 - DNA, 159 bp, Homo sapiens
  misc_feature 65, 77, 83, 93, 104, 117: n = A,T,C or G
ccgcggtggcggccgaggtacgcggggattctggggttcgtttagaggtttgaattttctcgganaaagacaggccngccacnaggaaaacanaaacaagccgnagcaacatctaancccttgaaaggatcctgagagaggggggaaagggaaaacagc

SEQ ID NO: 4701 - DNA, 445 bp, Homo sapiens
  misc_feature 215, 402: n = A,T,C or G
atcactacttagggcgaattggagctccccgcggtggcggccgcccgggcaggtaccagcagggggatgtgtttctggggaattgtggctctggaagcttcacggtttcccagaatgtggaaaatatatctgtgcaggatagaaatcctgcccagaggctgtttctgtctcatttgagctctccttcatgtggcagagctggctgtggcgtttangagcctacattttagaaaagcttacctcaaagttctgcattgagcctgagactggaaaggagatacaataaaacagctgacaggagctttggtagtcacacatgcctgatggggtgcacagggccacagtctctgaaaggcaatttggcattgtctgtccacaatatacttttatccattggtccancaatcctactctaggaatttttcctacatataaacctgtatgc

SEQ ID NO: 4702 - DNA, 416 bp, Homo sapiens
aggtaccgggatgtgatgttggagaactacagcaaccttgtgtcagtggggtatcaagccggcaaacctgatgccttcaccaagttggaacaaggagaaccactatggacactagaagatgaaatccacagtccagcccacccagaaattgagaaagctgatgatcatctgcagcagcccttgcaaaaccaaaaaatactgaagaggacgggacaacgctatgaacacggaagaactttgaaatcatatttagggttttaaccaaccagagcagaaagatacaacataaagggagcctgcttgagtttaatgggagatggagctttttctccatgattaatcatgaacaaattgcctacggaaattgaattccctgaaagtagaaaacccatcaagcacccaagtcacaattcctt

SEQ ID NO: 4703 - DNA, 176 bp, Homo sapiens
  misc_feature 15, 86, 93, 97: n = A,T,C or G
actgctctgccgatncaggttatattactctcacacaatatgttatcacgtaagggctggggaggacatacatacttcagtgggtnaactgangttngggacacagggagcttgactgtgattccaagtatgtggtaagctcacaacccccaagattatcttatcctctaaacggt

SEQ ID NO: 4704 - DNA, 221 bp, Homo sapiens
  misc_feature 25, 62, 146, 156, 159, 169, 170, 179, 184, 199, 204, 209,210, 218: n = A,T,C or G
ccgggcaggtacagttgttccccantatccacaagggattggttccaagacccacctggcanatatcaaaatctgcagatgctcaagtccctgatataaaattttgcatataacctacctacatattcctgtatacttttaaaatnaatctcttanatnaactttatanntggtctaantacanatggttatatattgnctatngccannattacctntta

SEQ ID NO: 4705 - DNA, 483 bp, Homo sapiens
tcctatagggcgaattggagctccccgcggtggcggccgcccgggcaggtacttcccatgttaaaagacatttattatcttgttttcctgtcatgggagttccagaaaaagttaaaacagacaatgggccaggttactgtagtaaagcatttcaaaaattcttaaatcagtggaaaattacacatacaataggaaattctctataattcccaaggacaggccataattgaaagaactaatagaacactcaaagctcaattggttaaacaaaaaaaggaaaagacaggagtataacactccccagatgcaacttaatctagcactctatactttaaatgttttaaacatttatagaaatcagaccactacctctgcagaacaacatcttactggtaaaaggaacagcccacatgaaggaaaactgatttggtggaaagataataaaaataaaacatgggaaatgggggaaggtgataacgtggg

SEQ ID NO: 4706 - DNA, 462 bp, Homo sapiens
  misc_feature 186, 366, 390, 416, 425: n = A,T,C or G
ggcgaattggagctccccgcggtggcggccgcccgggcaggtacgatcttggctcactgcaacctctccctcccgggttcaagtgattctcgtgcctcagcctcttgagtagctgggattacaggcgcgtgccactgcgtccggctaatttttgtatttttagtagagatggggtttcaccatgtntggccatggctgatctcaaactcctgacctcatgtggtccacccaccttggcctcccaaagtgctgggattacaggcgtgagccaccgcgctcagcctacaagcaattttttaaaaactgacacctattactgataaaattctcttggtaaaaatcctatttactattttaaagataagnattagttttttttttaaatacaantaattctgtttattgataaaatttanggcattttnattgccttttgcagatttactcattactaccctaaca

SEQ ID NO: 4707 - DNA, 430 bp, Homo sapiens
aggtacatctacctaaaggactattatgtggaataatacatactaatgaagtattacatgatttaaagactacaataaaaccaaacatgcttataacattaagaaaaacaataaagatacatgattgaaaccaagttgaaaaatagcatatgccttggaggaaatgtgctcaaattactaatgatttagtgttgtccatactttctctctcttttttctttcttttttttttattatggttagctgtcacatacaactttttttttttgagatggggtctcgctctgtcaccaggctggagtgcagtggcgcgatctcggctcactgcaacctccacatcccatgtttgaagtaattcttctgcctcagcctcccgagtagctgggactagaggaacgtgccaccatgactggctaattttctgtatttt

SEQ ID NO: 4708 - DNA, 380 bp, Homo sapiens
ctccttagggcgaattggagctccccgcggtggcggccgaggtactttaaatcatctcttgattactttataatacctaatacaacgtaaatgttatgcaaatcattggtatactgtattgtttggagaataatgacaagaaaaaaaatctctgtatgttcaatacagatgcttttttcttcttgaatatttcctatccacagttggttgaatccatgggtgcagaacccacagatacagagggagaactgtaaggagatttgagaagtttcttcaaaaagttccttcagaaagtgacacttgagctggggtttaaagtataagataatgtcaaagaagggagggaagaggatttatttaaaaaccagaaaaaacaaagg

SEQ ID NO: 4709 - DNA, 452 bp, Homo sapiens
  misc_feature 54, 160, 241, 284, 289, 290, 299, 300, 362, 385, 393, 406,432: n = A,T,C or G
actacttagggcgaattggagctccccgcggtggcggccgcccgggcaggtacnatcttggctcactgcaacctctccctcccgggttcaagtgattctcgtgcctcagcctcttgagtagctgggattacaggcgcgtgccactgcgtccggctaattnttgtatttttagtaggagatggggtttcaccatgttggccaggctgatctcaaactcctgacctcatgtggtccacccacnttggcctcccaaagtgctgggattacaggcgtgagccaccgcnctcannctacaagcnnttttttaaaaactgacacctattactgataaaattctctgtgttaaaatcctatttactatnttaaagataagtattagtttttntttaaatncaaataattctgnaattgataaaatttaaggcatttttnattgccttttgcagatttac

SEQ ID NO: 4710 - DNA, 378 bp, Homo sapiens
  misc_feature 284, 360, 368: n = A,T,C or G
actacttagggcgaattggagctccccgcggtggcggccgaggtacgcgggggctcaaagattgattcaaaagtgtaagacaggccagtggattttaatgtattaacaatataagagtgcattaagttttcggagtctacattgcctttaagaaactatgacttgtagtaagccgggcgcggtggctcacgcctgtaatcccaacactttgggaggccaaggtgggtggatcacaaggtcaggagttcaagaccagcctggccaatatggtgaaagtccgtctntactaaaattacaaaaattagccgggccgtggtggcagatcccttgtagtcccagctactcgggaggctgaggcangagaatancttgaacccg

SEQ ID NO: 4711 - DNA, 409 bp, Homo sapiens
  misc_feature 99, 130, 236, 240, 270, 304, 334, 338, 400: n = A,T,C or G
ctacttagggcaattggagctccccgcggtggcggccgcccgggcaggtactttttttttttttttttttttttcctttttttttttttttaaattganatggggtcttgtcatgttgcccaggctgctnttgaactcctgggctcaagcaatcctcctgcctcccaaagtgctgggattacaggcataagccatcgtgcccggcccttttggtaattttgtattactggacccanactntgctccttggctataaattcccacttgctnatgctgatatttggagttaagtccattcaccctnttaccactgcaaaatcccattacatttgtntatntacctgtcataatggccctgaataaagtcttccttactgggctttaacaattctcattgaanaattttttt

SEQ ID NO: 4712 - DNA, 444 bp, Homo sapiens
  misc_feature 53, 162, 253, 278, 304, 341, 348, 370, 420, 426: n = A,T,C or G
ccgcggtggcggccgcccgggcaggtacttttttttttttttttttttttttngagatggagtctcactctgttgcccaggctggaggagatctcagctcactgcaacctctgtctcctgggttcaagtgattctcctgcctcagcctcccgcgtagctganattacaggcacatgccaccatgaccagctaatttctgtatttttagtagagacggggtttcaccacgttggtcaggctggtctcaagcttntgacctcaggtgatccacccacctnagcctcccaaagtgctgggattacanggtgtgagccatagcacccggccagaatattttcatntggcttngcagtaaactgtcataatcagnagctgtggatgtcaagttcacagtctcacagtcattttcccagaggtctncaaatnaaacacttatgataaatt

SEQ ID NO: 4713 - DNA, 417 bp, Homo sapiens
  misc_feature 103, 124, 132, 142, 150, 155, 161, 165, 170, 183, 184, 187,189, 192, 193, 196, 206, 207, 210, 211, 222, 224, 230, 233,237, 249, 252, 255, 258, 259, 262, 264, 267, 271, 286, 293,295, 297, 303, 305, 306, 313, 324, 325, 337, 340, 346: n = A,T,C or G
  misc_feature 352, 354, 359, 367, 382, 383, 385, 395, 396, 398, 402, 403,405, 409, 410: n = A,T,C or G
ccgcggtggcggccgaggtacttttttttttttttttttttttggggtttttttttttttttttttttttttttttttttttttttttttttttaaaaccggnaaaaatgtaatttatttaatncaaagctncattttttcntatttttnaacanctaatnaaanaaacntttcaaaaaattnnttncntcnnaanaagttaaaannctnnaaaggaactgnangtaaancantttntaaaaaccaaantgngcnaannctntncanaaanaaggccaaagttacnaatttgntnanagggancnntttgcanctttttccaannacctgcccgggnggncgtttnaaaacnangggancccccggnctgggggaattttanntnaagctttatnnanaccnncnaccnnaaggggg

SEQ ID NO: 4714 - DNA, 252 bp, Homo sapiens
  misc_feature 4, 104, 161, 170, 200, 202, 225, 229, 232, 246: n = A,T,C or G
actnctatagggcgaattggagctccccgcggtggcggccgcccgggcaggtacttttttttttttttttttttttttttaatttgataattaatatctggcanaagtttcacatgatcactttactctacccatttcctggaaatgtccccagtttccancttcttaangctgtttactcctgagcgttcttcaatctntntcccaggaggtagaatctaatanaatntangcactgaccacttntaaaaa

SEQ ID NO: 4715 - DNA, 385 bp, Homo sapiens
  misc_feature 310, 321, 330, 345, 363: n = A,T,C or G
agggcgaattggagctccccgcggtggcggccgcccgggcaggtacttttttttttttttttttttgtaaagacggggtctggctttgttgccctggctggtcgcgaattcccggactcaagcaacctttctgcctcggcctcccaaaatgctaggattataggcataagccactgtgcctgtccaaaactttatttttaatgacaaaacctattttcctataactctgcttggaatgctgtatttatcctaagcaccagttttggccctagctggcctgtatacagctttaggtaggctcttgatctanttttgctatangcagggtangatctcaagtatttnatattttacttgtggcanaaaacagtgttaaacctttctt

SEQ ID NO: 4716 - DNA, 472 bp, Homo sapiens
  misc_feature 158, 273: n = A,T,C or G
tagggcgaattggagctccccgcggtggcggccgaggtacttttttttttttttttttgggatggagtctcacttcttgcccaggctagagtgcagtggcacgatctcggctcactgcaacctccacctcccagattcaagcaattctcctgtctcancctcccaggtagctgggattacaggtgtatgtcatcatgcccagctaatttttgtgcttttagtagagatggggtttcaccatattggtcaggctggtctcgaattcccgacctnaggtgatccacccacctcggcctcccaaagtgctgggattacaagtgtgagccactaggcccgacccaattctttaaaccagaataaaataattgatttaaagaaagttaaatatggaggaaacaggggagcctttagcacctttgagttagttgaaaagattgtagattttagagacagaaaaacattgagttcaaat

SEQ ID NO: 4717 - DNA, 577 bp, Homo sapiens
  misc_feature 175, 194, 289, 305, 313, 329, 334, 338, 343, 351, 353, 362,366, 416, 417, 425, 427, 449, 460, 469, 471, 473, 478, 498,506, 519, 521, 541, 549, 576: n = A,T,C or G
ctccccgcggtggcggccgcccgggcaggtaccatccacgtcactgggcacctggccgaacatggccaggtaggggctcgtagatgaccgaacggaatatccacctccagcgctgcttcattctgcctaagggatcccttgcctggccacgccaaaggccaccatccacaccgcnaaaagaaggaacagtgaanaaggaacacattcggatcagcatcctctgcaagcatttataattcttggggtccctaaagtttttctgctttaccagataaaaaaaattgttggnattcaaattctttaanaagttganaaaattaaattgttantttcncagnacaangaaaaaantngaccttccnttcncaagtaaattaccaaaaaaggaggcctttttttattataggaaaggaagnntgggtaancncccgaaaaaattaaccaaattntccttggcttnattgaaaantntnaaaanaaaaaggccccccccaaggnccgtttgnttcccaattccancnatttttcccaacaagggttncaaagatnaaaaaaattaaatttttcaaccccccna

SEQ ID NO: 4718 - DNA, 463 bp, Homo sapiens
tagggcgaattggagctccccgcggtggcggccgcccgggcaggtactggctcctcatctactcgggcttatgccaaagatgtaaaatttggtgcagatgcccgagccttaatgcttcaaggtgtagaccttttagccgatgctgtggccgttacaatggggccaaagggaagaacagtgattatttgagcagagttggggaagtcccaaagtaacaaaagatggttgtgactgttgcaaagccaattgacttaaaagataaatacaaaaacattggagctaaacttgttcaagatgttgccaataacacaaatgaagaagctggggatggcactaccactgctactgtacctcggccgcgctctcttccaggacatcaagaagccagcttgaagatgagtggggtaaaaccccagacgccatgaaagctgccatggccctggagaaaaagctgaaccaggcc

SEQ ID NO: 4719 - DNA, 463 bp, Homo sapiens
  misc_feature 72, 108, 148, 202, 208, 229, 231, 234, 236, 243, 261, 300,308, 309, 313, 316, 322, 323, 325, 346, 348, 350, 355, 382,384, 392, 417, 419, 442, 444, 446, 451, 453, 455: n = A,T,C or G
actactcactatagggccgaattggaagctccacgcgcggtggcggccgcccgggcaggtacggtgtggcantgcccacctaaagccccagctactgaggagactganacagaaggattgcttgaactcattaaggctgaacctgcantgagctgtgatcatggcactgcactccagccctgggcgggtaaaaagtgatgancctgtnccaaaaaaaaattaaaattancnaananggacctncattattataatttaaanttttttgtaataaaattttacttcttaaaaagggtaaanttaatttnnaaanagnaattcnncnaataaaatatttataccaacntngnattanttttttaaaggtacccctggttaaaangntttttctncatattattcaattaacaagggtgnanttaattaaaaaggaactccaatngngngtttnangnaaaaaaaa

SEQ ID NO: 4720 - DNA, 466 bp, Homo sapiens
cttagggcgaattggagctccccgcggtggcggccgaggtacagtttttctttgtaattaatattctattagaccaccacatcacacggattcctttttgaggaaggacttgttgctcagttttggtcagtgcagtcagcagatagcttccagcactttctgcatgactcatatcacccaaggtcacacccttcctggtgcagcttgcacacaatgcctgagtgagatggggtggaactgcccacttcagagctccctgccggttgctgaagccaggactacatttcagtgagattgctcccttagcccaattatacctcttcccccttcctttcacatatgctggtccctagtaaatacattgcaccccaaactctgtcttagcatctgattccagagaacccaacctgagtcatttcttattgggagacatttttgaaaccctgtgaataatctgtttgttatt

SEQ ID NO: 4721 - DNA, 475 bp, Homo sapiens
  misc_feature 9: n = A,T,C or G
atacgactnctatagggcgaattggagctccccgcggtggcggccgaggtacatgactctcagtgtctgtggaaacatgattgaagacattataagcgagtgcgtgtgacctataaggaaagtctcattggtagaagagacatgcatggtagaaaggatgatgcacaaaagcagcctgttaaaaatcagcttggattaaacccgcagtcacatctaccagaactgcagctatttcaagctgaagggaaaatatataaatatgatcacatggaaaaatctgtcaacagtagttccttagtttccccaccccaacgtatttcttctactgtcaaaacccacatttctcatacatatgaatgtaattttgtggattcattattcacacaaaaagagaaagcaaatattgggacagaacactacaaatgtaatgagcgtggcaaggcctttcatcaaggcttacattttactatacatc

SEQ ID NO: 4722 - DNA, 327 bp, Homo sapiens
  misc_feature 245, 265, 282, 285, 303, 324: n = A,T,C or G
cactacttagggcgaattggagctccccgcggtggcggccgaggtaccaccatgcctggtttattgttttatttttttggcagagatgggtctcactgtgttgcccaggctgatctcaaactcctggccttaagcgatcctcccatctcagcctcccaaagtgctgggattacagacctgagccaccacacctgggcaacagagtgaaacctgtccctgttttcctgctcttactctcacctctnaggcctcctctgcctggaanagattacagggaaattncangcagcccttgtcaattgnttttatgaattctttacctgntcc

SEQ ID NO: 4723 - DNA, 197 bp, Homo sapiens
  misc_feature 63, 83, 132, 145, 152, 158, 185, 188: n = A,T,C or G
ccgcggtggcggccgcccgggcaggtactttttttttttttttttttttttttcctatatcanaagttaggtatcttactcanattcattgttaaatattgtcccttgaagaccacacattctgtatgtcantcctggctacagnaactcanttggtntgcatccttagggaggtgctgtgtctnaantgaaaatgt

SEQ ID NO: 4724 - DNA, 435 bp, Homo sapiens
  misc_feature 376: n = A,T,C or G
ccgcggtggcggccgcccgggcaggtacttttttttactttggcaacaaatatttatacatacaagatgctagttcatttgaatatttctcccaacttatccaaggatctccagctctaacaaaatggtttatttttatttaaatgtcaatagttgttttttaaaatccaaatcaggggtgcaggccaccagttaaatgccgtctatcaggttttgtgccttaagagactacagagtcaaagctcatttttaaaggagtaggacagagttgtcacaggtttttgttgttgtttttattgcccccaaaattacatgttaattttccatttatatcagggattctatttacttgaagactggtgaagttgccattttngtctcattgttttctttgacataacctaggatccattattttcccctgaaggcttcttg

SEQ ID NO: 4725 - DNA, 441 bp, Homo sapiens
  misc_feature 429: n = A,T,C or G
tcactacttagggcgaattggagctccccgcggtggcggccgaggtaccaatatgcattcatcaatgtgcacatcagagaacaaaacacccagtgcagtgtgccagatcccagttgagtcatgataggctgggcacggtggctcatgcctgtaatcccagcaccttgggaggccaaggcaggtggattacccaaggtcaggagttcgagaccagcctggccaacatggtgaaaccccgtctctactaaaaatacaaaaaaattagctggatgtggtggtgggcacctgtaatcccagctactcgggaggctgaggcaggagaatcacttgaacccaggaggcggaggttggagtgagccaagatcgtgccattgcactccggcctgggcaaaaagagcaaaactaaatctcaaaaaaaaaaaaaaaatnggagaaaagagt

SEQ ID NO: 4726 - DNA, 480 bp, Homo sapiens
ccgcggtggcggccgcccgggcaggtacgcggggtcctcagcttccagccaaaatggcggagaacagcgagagtctgggcaccgtccccgagcacgagcggatcttgcaggagatcgagagcaccgacaccgcctgtgtggggcccaccctccggtctgtgtatgatgaccaaccaaatgcgcacaagaagtttatggaaaagttagatgcttgtatccgtaatcatgacaaggaaattgaaaagatgtgtaattttcatcatcagggttttgtagatgctattacagaactccttaaagtaaggactgatgcaaaaaaactgaaggtgcaagttactgataccaaccgaaggtttcaagatgctggaaaagaggtgatagtccacacagaagatatcattcgatgtagaattcagcagagaaatattacaactgtagtagaaaaattgcagttatgccttcctgtgctagaaatgtacc

SEQ ID NO: 4727 - DNA, 627 bp, Homo sapiens
gtaatacgactcactataggggcgaattggagctccccgcggtggcggcccgaggtacacatatcctctgtgggaaaaactgctctcagagtgtgcactctccccacaagccagcgctcaaactggaaaaagtatctcaatgtcctgaatgtgggaaaacctttagccgaagttcttatcttgttcggcatcaaagaatccacacaggcgagaagcctcacaagtgcagtgagtgcgggaagggctttagtgagcgctccaacctcactgcccacctacgaactcacacaggggagaggccctatcagtgtgggcaatgtgggaaaagcttcaaccagagttccagcctcattgtccaccagaggacccatactggggaaaagccttaccagtgcattgtctgtggaaagagattcaacaacagttcccagttcagtgctcaccggcgcatccacactggggagagcccatacaagtgtgcagtgtgtgggaaaatcttcaacaatagctcccacttcagtgcccaccgaaaaacccacactggtgaaaagccttacaggtgttctcactgtgagagaggcttcactaagaactctgccctcacccgtcatcagacagtacctgccc

SEQ ID NO: 4728 - DNA, 619 bp, Homo sapiens
  misc_feature 45, 49, 104, 108, 109, 111, 117, 118, 124, 127, 130, 131,138, 142, 143, 146, 152, 157, 158, 161, 164, 166, 171, 177,178, 180, 181, 182, 185, 187, 188, 200, 206, 213, 217, 220,222, 223, 224, 227, 229, 231, 232, 234, 237, 238, 239: n = A,T,C or G
  misc_feature 242, 244, 246, 251, 256, 265, 274, 279, 281, 283, 289, 298,301, 304, 308, 309, 313, 320, 321, 326, 332, 333, 334, 338,342, 348, 352, 369, 379, 380, 384, 385, 386, 387, 388, 399,401, 412, 415, 419, 430, 431, 462, 466, 467, 477, 480: n = A,T,C or G
  misc_feature 481, 493, 494, 500, 509, 515, 516, 525, 528, 533, 535, 537,540, 541, 552, 556, 561, 569, 570, 579, 589, 592, 593, 595,596, 604: n = A,T,C or G
cgcccgggcaggtacttctttttttttttttttttttttttttcntttnttttttttttttttttttttttttttttttttttttttttttttttaaaaaaacngggnntnaatttnntaaaanagntgnnttaaacntttnnaangggganttccnnctnaantnctggnttaaanntnnnggnannaatttttttaanaatttnaaaaggnctgngcnannnaangngnncnttnnnaantntnatttngaaanaaacccccnttttaaaancttcncnanaagggnttttttttnganggntttnnaaanttttggnnggganttaaannngtcntttnaatttnaaantttttttttttgccccntttaaaaagnnaacnnnnncctttttcaangnttttaccttgnggntttntagggggaatnnaattcggggaaatgcccccccccggctccangggnntttttccggnttnnttaaaaaccctnntttttncccccgggnttttanncaaaattantcntttgngnanaannaaaaacggggntatntaagnacaagaannctccggaanaaaaaaatcntannanncttaaaancacgggttttttttt

SEQ ID NO: 4729 - DNA, 286 bp, Homo sapiens
  misc_feature 5, 48, 51, 59, 61, 62, 64, 78, 99, 103, 107, 146, 160, 194,197, 199, 210, 221, 230, 233, 234, 241, 247, 250, 259: n = A,T,C or G
gaatnggagctcccccgcggtggcggcccgcccgggcaggtactctgnacntttttttntnngntgcttgaaactaangacttaactgtttttttccgnatcncctnagccccatgttttagactattttaccccaaaattgtatntattaatttggctncccatttgaaaaaacaaattgatcttagcatggnggntngcttgaggcantctttactganccagtatanttnnagctaanacagtngtntctcatgtnaaagtatgattttctttaggttttttt

SEQ ID NO: 4730 - DNA, 666 bp, Homo sapiens
  misc_feature 4, 313, 388, 389, 555, 577, 581, 585, 603, 623, 625, 628,646, 648: n = A,T,C or G
atanggcgaattggagctccccgcggtggcggccgaggtactttttttttttttttttttgtaagacgaggtcttgctctgttgtccaggcctggacaacacagcatgtgcagtggtgtgaacatggctcactgcagcctcgacttcccaggctgaagtgatcctcccgtctcagcttgagagtagctggaaccacaggtgtgtgccaccatgcccagctagtttttaaacttcttgtagagatggggtcttgtcatgttgcccaggctggtcttgaacttctgggctcaaacgatcctcctgccttggcctntcaaagtgctgggattacaggcgtgagccactgtgctacaccaaatgttgacaaggctgtgtgcaacctgaattnncatacatttgtggtgaaaggataaaatgatacaatcactttgaaaaaaggtcttaaccagtgtcttacgaaactaaacatagacctacactaggacccagcaatttcacttcccaggtatttatcccaagagaaatggaaagcatatgtttaacaaagaaacaacntttgtccttcccgggccggccngttnttanaactagtgggaatccccncgggcttgcaaggaatttcnanttnaagcttatcgaatacccntngacctcgaggggggggcc

SEQ ID NO: 4731 - DNA, 595 bp, Homo sapiens
  misc_feature 512, 518, 561: n = A,T,C or G
cgccgggcaggtacaaaaatataaattggatctagaagaaagggcaattcaggcaatagaaaaattagtagaaatccctttaaaggttagtttgtaaaatcaggtaagtttatttataatttgctttcatttatttcactgcaaattatattttggatatatatatatatattgtgcttcctctgcctgtcttacagcaatttgccttgcagagttctaggaaaaaggtggcatgtgtttttactttcaaatatttaaatttccatcattctaacaaaatcaatttttcagagtaatgattctcactgtggagtcatttgattattaagacccgttggcataagattacatcctctgactataaaaaccctggaagaaaacctaggaaatattcgtctggactttgcacttggcaatgaatttatgggcgctttgggaatcctgcagatataataatgataattaaacaaaacactcagagaaactgccaaccctaggatgaagtatattgntactgngctttggggattaaaataagtactacagtttatagaacttttntactggatacacagaccactaaaaaagggaaaag

SEQ ID NO: 4732 - DNA, 371 bp, Homo sapiens
ccgcggtggcggccgcccgggcaggtactttggtagaggaactgctgtaaaatctttgttagataattccaacatctctgtcatcttgactttggcatctattaattgtcttttttttctttcaaattgagatgtttctggatcttggcataatgagtgattttctattaaaacctggacattttggatattatgagagtctggatattactttgactttctgttttagctggctttctctgacactgctctaaaagaggcagcgcagggaggcacttcccctgttactaccaactggaggtagaagtctaggttcccactcagcctttactggcaccagggatgggggcctccttgttactgcatggtgg

SEQ ID NO: 4733 - DNA, 359 bp, Homo sapiens
aggtacgcgggggttcctcttggtaggtgcttctctcccagactaaaatctgattctcagcacaaatctcgccttctatttactcagctattcctcctctttagaaacaaaagaaattagtggatgctgggcttcagaaactcctgaccatggatccaaccaagagaattacctcggagcaagctctgcaggatccctattttcaggaggaccctttgccaacattagatgtatttgccggctgccagattccataccccaaacgagaattccttaatgaagatgatcctgaagaaaaaggtgacaagaatcagcaacagcagcagaaccagcatcagcagcccacagcccctccacag

SEQ ID NO: 4734 - DNA, 330 bp, Homo sapiens
  misc_feature 37, 42, 52, 53, 56, 62, 70, 76, 78, 82, 207: n = A,T,C or G
ctatagggcgaattggagctccccgcgggggcggccnagggnccggggaggnnttncccagnaattaatnatggcntngttngatattgaaagcaaagtggacccttccaaggcctggggagaagtgaagagacagatttatgttgcagccttcacagtgcaggcagctgcagagacttttgagtgaaagtagcctaagaaggattnttttagagaaatccgtattgaatttgtgtggtatgtcacttcagaaagaatcgtaatgggtatattgataaattttaaaattggtatatttgaaataaagttgaatattatatatataaaaaa

SEQ ID NO: 4735 - DNA, 440 bp, Homo sapiens
  misc_feature 326: n = A,T,C or G
cactacttagggcgaattggagctccccgcggtggcggccgcccgggcaggtacacagaaagagatcattttggagagtaaggcttttaggagttctgtgccagaaatggggttaaagataaaatatatgtttactagtatcataagggttatgatgtatagagggggctcaaactcactaggaatccaagaatacaaaaataaaagacaggccgggagcagtggctcacacctgtaatcccagcactttgggaggctggggcaggaggatcgcttgaggccaggagttcaagatcagcctgggcaacatagcaagaccctttctntgcaaaaaaatttaaaaattagccaggcatggtggcacatgcgtgtagtcctagctactcaggaggtgagaggattgtttgagcctggaaggtcgaggctgcagtgagccatga

SEQ ID NO: 4736 - DNA, 405 bp, Homo sapiens
  misc_feature 24, 37, 131, 148, 149, 161, 174, 196, 221, 238, 239, 254,258, 260, 263, 285, 290, 302, 319, 324, 326, 333, 334, 338,340, 341, 353, 354, 356, 360, 373, 387, 393, 400: n = A,T,C or G
aaaaagggtggggagtgccctttnttgaaggaatccnttaagtgcacgtctcccgttttcttttcacatcaatgcagagtccctctgtgaatttacaacacccaacacccatgagttcaagttccttaaangaagggaaaaattttannccaaggtatttnaaaatttgggttnggaaccatttgctataaaaaangaaagggtgcccattaatacccagngccttaaacctctttannaaaaattttttaatntgcntncanaaaccttttaggacttggggcncttcntttttaatttanccttgggccaaggaagngaacncnaattttnntttnanngatggggcaacnntngggnggggaaaaaatcnttttggggctaacnccccanggaaaangaaaa

SEQ ID NO: 4737 - DNA, 422 bp, Homo sapiens
ccgggcaggaccccaccatacaagccaagggagcttcaggtattacaacctggatcatagccacggtcttggcttctctcacttttcccctggttttggtcctcacttccagttctccaaaatctacctgtgtcctgactctggctgtgattctactctaagtgccatacacatccctttcaccactgacagattttgcttccctggttgtgacattcagcattctctactgcagggcttctcaaccttggcactattggcatttgggtctgggtaatgctttgctgtggcaactgtcctgtgcattgtaagatgttaagcagcatccctgacctctgtctactagatgccagtaacaccccatcattgtcaaatgtctcctggggcacaatgtggcacctggttgataaacactgatctac

SEQ ID NO: 4738 - DNA, 473 bp, Homo sapiens
  misc_feature 283, 391, 442, 451: n = A,T,C or G
ccgcggtggcggccgcccgggcaggtacttttcgtagagacagtgtttcaccatgttagccaggctgatctcgaactcctgacctcaagtgatccacttgcctcggcctcccaaggtgctgggattgcaggcatgagccactgcgcctggccctaaatacttttctagtaaagaacataaccagttacactgaaggctttgaaagtcttcaactggtatgaatcctaaaaaaaaaaaagagcaccaagtctacagggagctttcaggatggagaaagcccttncaaatgggaaaggaggtcaaaacggatgctgccattactgaaaaccaaatgccttactatgtcattttcctaaataaccagccttcttaaccctttgggacttaaccntaaaaccccagggaaattccaggaaaccattttataaaattaaatggccangggcttggnttaggggaaaccattttggaaa

SEQ ID NO: 4739 - DNA, 471 bp, Homo sapiens
  misc_feature 193, 197: n = A,T,C or G
acttagggcgaattggagctccccgcggtgggcggccgcccgggcagggtacccccagctacctcccatgtttccaggtatcattggctcttaactcccacaagcccgccttttggctacccatcccaacaatatcaagagggaatgactaagtatcagctagaaacttagccatgtctcaacattcctggantatntgaaaaagctgtccgatgcccttttacaggtttattggtgacagacccgtatcatcttaaagtatgttcatagttaaggcttgacttaagaaaataagagaaccagacataatggaaagacctcttcaataatgttgtcatgcctctcagtgaacgtgctcacagtcacgcttggtttggctccccaaacccacaatagaaaaggaaaaatgagtattttgtttttcatctgttttgtatttaaaggcattgggttacttcctcctgccctctt

SEQ ID NO: 4740 - DNA, 397 bp, Homo sapiens
  misc_feature 108, 190, 207, 275, 294, 311, 327, 335, 340, 357, 388: n = A,T,C or G
ggagctccccgcggtggcggccgcccgggcacggtactttaaacaattgctttgctgagatgttgttaatttgtagctttgccccagccactttgccccagccatttngacccaacctggagctcacaaaaacatgtgttgtatgaaatcaaggtttaagggatctagggctgtgcaggacatgctttgntaacaaaaaagtttacnaacagtatacttggtaaaagtcatctgccattctctagtgtcaataaactaggggcacaatgcactgnggaaagccgcggggacctntgcccttgaaagcaggntattgtccaaagtttntccccatntgatngtctgaaatatggcctnatgggatgagaaagacctgaccgtcccccancccaacacc

SEQ ID NO: 4741 - DNA, 554 bp, Homo sapiens
  misc_feature 541: n = A,T,C or G
cgcccgggcaggtacgcgggggggtgctcttgtgagctgctgctcctgcggttggtgagattacctgggtctagagtgcggagctgctccgtggccacgaggacgtcaccatgcccaaagcaccaaagggaaaaagtgcaggacgggaaaaaaaagtcatccatccatatagtagaaaagcagctcaaattacgagagaggcccacaaacaagaaaaaaaggaaaaattgaagaatgaaaaggccttgcgtctcaaccttgttggtgaaaaactgcaatggtttcaaaatcatcttgatccccaaaaaaagagatattcaaagaaagatgcttgtgaactaattgaaaggtactgttacaatgagacagcaaagttatcccgtttattcatccgatcatttaattgacatttatggagtgcctagtattttctcaatactgcgctagaagtgctgggaagagagagataaaaataaatgatactctcttgttctcaagttgcttgcaaatttgcatgcattggttctagtttggattttgncaaatcccaagga

SEQ ID NO: 4742 - DNA, 452 bp, Homo sapiens
ccgcggtggcggccgcccgggcaggtacgcgggaaggcagtggtaacaacccagactacgcggggatattatcagaaactaattgacctcagaaaaggaaatacccaattccagcctactctagttgtcctgtctccctaaagggataggggagaaactgagaagcacttgtgtaagtttacagtccaggaacacaggctcacttaaagattgagacctaagcaagcatgggtctatagaatgttttcccctgcccctaaaccttagcaacacattactaaaagcccatacaaagcagttccttttacctggtccatcatatctggttatcaagaaaatattacaaaacatactaaaggcaaaaaaaaaaatccacaagtagaagaggcaaaagaagcattaaaaccagaatcaggatatggcaagggatgctggaattattagaaagaaaa

SEQ ID NO: 4743 - DNA, 478 bp, Homo sapiens
  misc_feature 198, 203, 207: n = A,T,C or G
cgctacttagggcgaattggagctccccgcggtggcggccgcccgggcaggtacgcgggaaggcagtggtaacaacccagactacgcggggatattatcagaaactaattgacctcagaaaaggaaatacccaattccagcctactctagttgtcctgtctccctaaagggataggggagaaactgagaagcacttgntggangttnacagtccagggaacacaggctcacttaaagattgagacctaagcaagcatgggtctatagaatgttttcccctgcccctaaaccttagcaacacattactaaaagcccatacaaagcagttccttttacctggtccatcatatctggttatcaagaaaatattacaaaacatactaaaggcaaaaaaaaaaatccacaagtagaagaggcaaaagaagcattaaaaccagaatcagatatggcaaggatgctggaattattataaaggaaa

SEQ ID NO: 4744 - DNA, 186 bp, Homo sapiens
ccgcggtggcggccgtccacatcccgaaggccatagcgtcgagcaaggtcacaggatggcagcaccttaccactcaggctcaggatattgggatctgcttcaacacaggatcctgcaggacctcctcctttgccatatgctccttcagcagttctgtctgcacaatcccccccgcgtacctgcccg

SEQ ID NO: 4745 - DNA, 244 bp, Homo sapiens
  misc_feature 174, 177, 187, 200, 201, 202: n = A,T,C or G
tacactactatagggcgaattggagctcaccgcggtggcggccgagccctgcaggcctctgccctgaaggcctggggcgggaagaaggagaacctgaaggctgcgcaggaggagtatgtcaagcgagccctggccaacagccttgcctgtcaaggaaagtacctgcccggcggncgntctagaactngttggatcccccnnncttgcaaggaatttcgatatcaaagcttattcgatacccgtc

SEQ ID NO: 4746 - DNA, 237 bp, Homo sapiens
  misc_feature 33, 76, 91, 96, 131, 147, 177, 186, 202, 222, 229, 231, 234: n = A,T,C or G
cactacttagggcgaattggagctccccgcggnggcggccgaggtacgcggggatcttattctggccttggcgganttggggatggtgtcncctancaacccgctgccgctttggcttgctcgggaccatntggctggacccagagnccgcgtggaaccgctatagggatctgtcangggcccgcngccgctctagaactanttggatcccccgggctgctngaaattngnatntta

SEQ ID NO: 4747 - DNA, 506 bp, Homo sapiens
ccgcggtggcggccgaggtacaaattctaactagagtaagagttcctggatgtgtcaaaaatcgtcaccttcccaactcttacatatgtaggacagtgacatgactcctgcccacagaagaacacacctgtcctgccctctcccaacaatggaatgttacaaagcaggacacgcctgagttaaaatgagtatccctgaggttgataattcccaccatgcaccttgaagatggttcttgaatctttcattcagcccgatgaagagaagattcattgtagccagtgtcacattaggtgagaaaaattcagaaggcaacagatttgcgctgctgcaccagcgacccaaaccagcccgtgagtgcatagctactgccagcacttaaagaaaggtgagccgttggatactctgggaaaccgagaaagcaccttctactgcaagcgtgaagaacatgatgcccacagaaaacacaacagaaacaagaagtgagactcttgaaggtaatttcc

SEQ ID NO: 4748 - DNA, 496 bp, Homo sapiens
  misc_feature 3, 212, 222, 372, 431: n = A,T,C or G
ctncttagggcgaattggagctccccgcggtggcggccgaggtacctcaacaaataacttaaagatttccgtgtggcgtgaaaccatttcaatttgaactaatatccttgaaaaaaatcacattattacaagttttaataaatacagtaagaagagctggcatttttctaaaatactgaatttcagatctggagtttattccataaataggnttcttttcanttgctgctttcttgggatacatttgctcaagtatttattctctatgaagtgaactctttcatagataccatataaaaactgtattaatatgtgcctcattatagaagcagctggaagaactggatcacacagttacctaactgaaaagtnacttaggaaaaagctctgctttttgtaaaactttaaatcacaggctgaagaataccaangaaacatttatatagaactcccactagaaattttataaatatatatgtagcatatttatatatat

SEQ ID NO: 4749 - DNA, 457 bp, Homo sapiens
  misc_feature 232, 258, 273, 421, 427: n = A,T,C or G
ctacttagggcgaattggagctccccgcggtggcggccgaggtactctgccacaaactgatcacactgcttctggtaagggtctggcaggaagctgcagcctttctcaagagcagccaggatctcctgcttggtgctgtttttctccaggttgcgatccaaataacccaccagcttcttgcacacttcgcagaagccaccgtcctttggctgagtcacgtgaaacgggtcantgcatgcagcccgcgtgccagagcanaggtgcagcatgctncacaccagctcagggctgacctcctccagcaggatggacaggatggagctgccgtacgcgggtatctgtctttcacctagtgtgctttttgtgtgcacactattcaccaagctttgttcaaatttgcaagggatacagaaaggactgngaaagngactggtggatgagaaaaacaaaatatctt

SEQ ID NO: 4750 - DNA, 164 bp, Homo sapiens
  misc_feature 76, 151: n = A,T,C or G
ttagggcgaattggagctccccgcggtggcggccgaggtacttttttttttttttttttttttttttttttgaaanaaggggtcacgggggctccttgatattagggaacagggacctgagcttttacagcccttcatatttattaggtanagtgaatagggag

SEQ ID NO: 4751 - DNA, 387 bp, Homo sapiens
  misc_feature 36, 94, 101, 117, 120, 131, 135, 142, 165, 359, 362: n = A,T,C or G
taggcccaccgctgcttctcaggcggcaaagactantatggcaataggcacaatattggctaagagggagtgggtgttgagggttatgagagtngctatantgaacagccgatagtnttntttccttctangcantagtacnggaggatatgaaggtgttgagcnatatactagtattcctagaagtgagatggtaaatgctagtatgatatttatgtaaatgaggggcatcccgcgtacggatgctacttgtccaatgatggtaaaagggtagcttactggttgtcctccgattcaggttagaatgaggaggtctgcggttaggagtcaataaaagtgattggcttagtgggcaaaanatnatgctttgttgtttggatatatgga

SEQ ID NO: 4752 - DNA, 290 bp, Homo sapiens
  misc_feature 228, 255, 269, 273, 277, 287: n = A,T,C or G
ctacttagggcgaattggagctccccgcggtggcggccgcccgggcaggtacgcgggtctgatcgctaatgacagttggttctgttatcagccaccaatcatgttaaatacagtatgtagaatggttcaaatctaggaagcatttcgtttgcaaagaaacctgtatatttacagactttaaaagatggatttttttttttttagagagagaccttgtataattttttnaaaacaaagcttttttgaaaaaaggtngggcagttttcttngggngtgngggggggagngga

SEQ ID NO: 4753 - DNA, 516 bp, Homo sapiens
ctacttagggcgaattggagctccccgcggtggcggccgcccgggcaggtacgcatttacttcataatttcttttttctgaagataacttgttgctttcagttgtgaaattaaagtccaatgagaccaagttagtataattctccaacatcacatctctgtactgggttcatctcactagggagtgccagacagtggacgcaggacagcgggtgcaggggcaccgtgcgccaagctgaaagcaggggcgaaggcatttgcctcactcggggaaagcgcaaggggtcagggagttccctttccaagtcaaagaaaggggtgacagacggcacctggaaaatcaggtcactcccacccaaatactgcgcttttccgacgggcttaaaaaacggcacaccaggagattatatcccgcacatggctcggagggtcctacgcccacggagtctcgctgattgctagcacagcagtctgagatcaaactggaaggcagcagtgaggctgggggaggggcacc

SEQ ID NO: 4754 - DNA, 459 bp, Homo sapiens
  misc_feature 216: n = A,T,C or G
cttagggcgaattggagctccccgcggtggcggccgaggtacgcggggtctctcggccttagcgccatttttttggaaacctctgcgccatgagagccaaggtgagcggttcctggtagtaagcttgggaggtaggagttggcgagtagtagcgaggagacgaaggcaagtccgccatacctcctgaactactgggtttcaagggtgcccaaaaanctgttgggagagagaaaggtagtttgtgagagagctagcggttaagtgctatgggtagagagggtgggcttagaaaagggtggaattctgatcttatgttgggagggtgtccaagttactgatgtaagttgttacgaccaatctttcatacttcttggttaagaatctgtccggttctaaagagtgcatttcatatccttgctaagcctactaataagcttcatccctttttttttttttttt

SEQ ID NO: 4755 - DNA, 172 bp, Homo sapiens
ctacttagggcgaattggagctcaccgcggtggcggccgtcactttcctgcgcccgctctcctgcgccagcttgaaggcatactcggcaatgcgcagggacttggccttggtgatgatcttcaggctctccaccactcccgccacactctcatgctccaggctgctgtacct

SEQ ID NO: 4756 - DNA, 499 bp, Homo sapiens
  misc_feature 465: n = A,T,C or G
ccgcggtggcggccgtcgctcccctgctcctccttggtggctctgtttggagacagggcaggtgaatgctccctggatctgttgctctttttccttcagccttcgggctgacactgactccccgcgtacctcggccgaggtactcaggacttttgcggttctgtaaaatctgtttgtcagtttctttgttagcaaagtatctagtgcagcctcgggtttaaataccgaaaaattatctgggtgaactcaaatgaagtttttctctaatatcttcagaagcaccagcacacaacctataaaagatatgataatttctttcctctttgccttgaacacagatcctagatttctctaggagataatgtgaaacaaatcctccaacaactgagctcttttcattaaaatgtatttctacaaatttcccaaatcgactgctattattgttgcgaacagtcttcgcatttncaaaggcttctaggagtgggttagcttcaacaat

SEQ ID NO: 4757 - DNA, 455 bp, Homo sapiens
  misc_feature 270, 362: n = A,T,C or G
acttagggcgaattggagctccccgcggtggcggccgaggtactttttttttttttttttttttttggagacagagtttcacttttgttgcccaggctggaatgcagtggcacgatctccgctcactgcaacctccacctcccaggttcaagtgattctcctgccttagcctcccaagtagctgagactacaggcatgtgccaccatgcctggctaattttgtatttttggcagagacggggtttcgcgatgttggccaggctggcttcnaacccctgacctcaggtgatccacctgcctcggtctcccaaaatgctgggattacaggcaataagccaccgtgcctggccggctctggcctntttttttaaaactcactagattttatggaagtttcctgacaccgcagcagtctcaagacaccagtgcctgagtcactccctgttcctgacagg

SEQ ID NO: 4758 - DNA, 336 bp, Homo sapiens
cccgcggtggcggccgcccgggcaggtacaactgaataatatgagtcctgccatttcttttatttacactcttgactcagcaagaattatgacagaagtccgcatggttatctgcagcttgttaagtcttctacaatggcttggactttataacccactcagcatttgggttaaagctgatataaatccttcatgtaagtgtcatcatcaaggcagcgttccccaatatttcctcccccgcgtacattcgtggtcataaaatctgcaatctgctgtaatgccaataggcctgtggggttcttccccttcttaaattgctcctgtatcattgattcc

SEQ ID NO: 4759 - DNA, 460 bp, Homo sapiens
  misc_feature 11: n = A,T,C or G
attggagctcnccgcggtggcggccgaggtacagaaaaacattccgcccacgacgccaccgaagctgtggcccagaatggagaatcgattccatttcaaggctgccacaactcttcggatctcactcacaaaagtctggaagtaatatgggacacctgggctgtaatgggacgagagcccatgacctccgaaatccatggcaacgtaataaaagtcttgcgggagaagagggatgagtctgtcgaaggagctggcattgtccagccagccgtgcaggcagagaactggagggccctgcagggagccccaggctttggctgcgatgtggccccagggcacagccagcttcagctctgagatcagaccttctagaatgtgctggggcgggggcgctggtcaggcctggaccccatcacttgctggctgggtaaccttggagaagttactaaaacgtcttgag

SEQ ID NO: 4760 - DNA, 386 bp, Homo sapiens
cctatagggcgaattggagctccccgcggtggcggccgcccgggcaggtacctcagtcctatagctgcaaggaattgaaacctgccaacaacctgaatgaacttggcagaggactctgagcttgtgatgagaacacatccccagcttgaaatcaaatcgacatattgattttagcactgtgagatactgagctgagaacacagttcagctgttcctggacttcagaaccacagaactgagatgataaatgagtggtgtttcaagttgctaagtttgtggtcatttgcttacagtaattgtaaactaatgcacaagtgtaagtttgttttcttaaagaagaaaaaaacggggaaggaggtaaggtgttaaagggatcaaaacttctt

SEQ ID NO: 4761 - DNA, 102 bp, Homo sapiens
ggcgaattggagctccccgcggtggcggccgaggtacacaatggtttattaaacggaatgtatggcccacatcaacctagcaaggattctactggtaaacct

SEQ ID NO: 4762 - DNA, 280 bp, Homo sapiens
  misc_feature 29, 277: n = A,T,C or G
tcgactactatagggcgaattggagctcnccgcggtggcggccgcccgggcaggtacgcgggggcggcgacgacccattcgaacgtctgccctatcaactttcgatggtagtcgccgtgcctaccatggtgaccacgggtgacggggaatcagggttcgattccggagagggagcctgagaaacggctaccacatcccaaggaaggcagcaggcgcgcaaattacccactcccgacccggggaggtagtgacgaaaaaaaaaaaaaaaaaaaaagtncct

SEQ ID NO: 4763 - DNA, 439 bp, Homo sapiens
  misc_feature 404, 405: n = A,T,C or G
ccgcggtggcggccgcccgggcaggtacaaggaccggtgagctttcaaaaggagacacttcgggagactcgccaggggccctcgtatccccggcagcgcgagttttggaggtcagtggagggctctcgcatcatgcatgtaactttcatactcaaagacttaccttcatcctgcatccctcacccccctgcagaaacttggggcttgaattcatttaaaaacatttgcggtttcagaagccttctttttattatgaagctgccaaggagatcttagaatgaaaggcatttttagagatgagaaagaaggaagccaggccaaggctgggccggctctcagccgtgggtctgtaaaggtgacacgtgggacatggccacctgcataccctgcaggcggctgggcannaggcacccacagggaccttgggtttgaatccctg

SEQ ID NO: 4764 - DNA, 356 bp, Homo sapiens
ccgcggtggcggccgaggtacgcgggattgtagagactatccgggttagtttgcaagggaagccaatgatgagtaatttgaaagaaattcacctggtgagcaatgaggaccctactgttgctgcctttaaagctgcttcagaattcatcctagggaagagtgagctgggacaagaaaccaccccttctttcaatgcaatggtcgtgaacaacctgaccctccagattgtccagggccacattgaatggcagacgatgtaattgttaattctgtaaacccacatgatattacagttggacctgtggcaaagtcaattctacaacaagcaggagttgaaatgaaatcggaatttcttg

SEQ ID NO: 4765 - DNA, 164 bp, Homo sapiens
actatagggcgaattggaagctccaccgcggtggcggccgaggtacgcgggggcaggctcccagccgagtccgttatggccgctgccgtcccgaagaggatgagggggccagcacaagcgaaactgctgcccgggtcggccatccaagcccttgtggggttggc

SEQ ID NO: 4766 - DNA, 361 bp, Homo sapiens
  misc_feature 6, 197, 217: n = A,T,C or G
caactnctatagggcgaattggagctccccgcggtggcggccgaggtactccacacgggggtagtatgcaggcaaacttcatcctgtagccatcctcgtcctgcagaccccgctccagggcgcgacgctggcgagggcacttcccctcagcacactggcagacttcagcagaacacaaggtggccaagagtctgctnttactttggtgcccccgtanaacacaaaaacatctgcgctcggggtttgtagtagtcgtactgcggcgggtaggcctaggattgtgggggcaatgaatgaagcgaacagattttcgttcattttggttctcagggtttgttataattttttatttttatgggct

SEQ ID NO: 4767 - DNA, 457 bp, Homo sapiens
  misc_feature 75, 145, 166, 182, 188, 200, 218, 248, 250, 272, 276, 277,278, 282, 287, 291, 292, 296, 298, 300, 306, 309, 317, 319,321, 348, 349, 367, 368, 369, 371, 382, 384, 388, 390, 391,392, 393, 397, 404, 406, 416, 417, 423, 428, 431, 435: n = A,T,C or G
ccgcggtggcggccgaggtacttttttttttttttttttttttggcttgactcaggatttaaaaactggaacggngaaggtgacagcagtcggttggagcgagcatcccccaaagttcacaatgtggccgaggactttgattgcncattgttgtttttttaatagncatttccaagtatganaatccntttgtttacagngaagtccctttgccatcntaaaagcccaccccacttactttctaatgnanaaatggcccactcactatttcnaaannnccanacccngggnnaggnananagacanctncttttccntngnaaaatctattgtttaatgccacaaaannttttttttaaatccttcnnncnggccaaaatgnanaagngnnnnattntctcganantaattttttnnacattncattnaancccnttacgttgcccccccccctttc

SEQ ID NO: 4768 - DNA, 373 bp, Homo sapiens
  misc_feature 4, 15, 78, 185, 201, 206, 212, 214, 280, 293, 333, 336: n = A,T,C or G
atanggcgaattggntttccccgcggtggcggccgcccgggcaggtactgagagggcaaaccaaggacagaatagagntatgtggcagtggcaacccttacaaaatcaaacactggacatgatacatgcctgcccttcttgcttacatgtgaagtataaccaagtgccaaatgcttttataattnactaagcagcccccancctcnccctgntnagaaacagaaagctacttgcaaggcccctacaaagtgagtgagagtgtgtgagctcctgcttgaanaggtgagacccanatcatagttctacttgtttctctatgaagtggaaatacanaanaagaagcaaattgtaagcataaaattgtctatgtttt

SEQ ID NO: 4769 - DNA, 421 bp, Homo sapiens
  misc_feature 284, 325: n = A,T,C or G
ccgcggtggcggccgaggtacctggaaaataacttctttcttttcctctagattttcgaagaagcaaataaatcaagaatagaaacctatatataggaggttgggcctcctgcaaagaatgaagcactttttgttaaatacaggagaggctacttggctgcactaatatgtgcttttttgggaatcttaatagaagtgtcaccaaagttgaacttttgggaatgggcttgaatcatccctgggagcatctgtgccgggcagtcaggaagtgagtgcaccgcctnccacccagccccattgggcctcacaccctcttcattccttntccccatgaggcaggcaaacacggtcatgaccattttgggggttcactttcaaccatggtcttcttggcagggcatacactctttggctcccaaat

SEQ ID NO: 4770 - DNA, 192 bp, Homo sapiens
  misc_feature 161, 174: n = A,T,C or G
tggctgcccagacgtatttggcgtcgcagtagccgacaatggcggcctcctggcagcagccatcgcacatcaggttatccacgtagctctgccaaccggccatcttcgagcccttcgcactgcagcgcggacggcgaggagcccccgcgtacctttggccnggtctagaactangttggatcccccggggct

SEQ ID NO: 4771 - DNA, 160 bp, Homo sapiens
  misc_feature 6, 14, 38, 43, 75, 87, 111, 112, 113, 133, 134: n = A,T,C or G
ctatanggcgattnggagctccccgcggtggcggccgnccggncaggtacccgagccccgcttaccctgcctttncatgtgggtcangatatgtgatctccaaggacatcnnnaagtggctggcaagcaactnngggaggttaaagacctatcagggtga

SEQ ID NO: 4772 - DNA, 462 bp, Homo sapiens
cctatagggcgaattggagctccccgcggtggcggccgaggtacagcagcaacagcaaaggaatctctcactacatgaatacatgagtatggaattattgcaagaagctggtgtctccgttcccaaaggatatgtggcaaagtcaccagatgaagcttatgcaattgccaaaaaattaggttcaaaagatgtccgtgataaaggccaggttttagctggtggtaggaggaaaaggaacatttgaaagtggcctcaaaggaggagtgaagatagttttctctccagaagaagcaaaagctgtttcttcacaaatgattgggaaaaaattgtttaccaagcaaacgggagaaaagggcagaatatgcaatcaagtattggtctgtgagcgaaaatatcccaggagagaatactactttgcaataacaatggaaaggtcatttcaaggtcctgtattaataggga

SEQ ID NO: 4773 - DNA, 414 bp, Homo sapiens
  misc_feature 13, 74, 82, 178, 221, 240, 266, 356, 392: n = A,T,C or G
gggcgaattgganctccccgcggtggcggccgcccgggcaggtactttttttttttttttttttttttttcagnctttccanctcccgctgtctctgtcgttcctctctttggcgcttcactactttctcataatcattaggaaacatagggtcatattcgtcagctaagggaatcanaacttccccttcaaaaaaacccactgggaacaggatccttcancccagctgctacatgcggnggagtgtccacaatttgccggtcatntgaggagccacctcgcttcaggtcaatgactggggcgaggactgtactgcggcgggtaggcctaggattgtgggggcaatgaatgaagcnaacagattttcgttcattttggttctcagggtttgntataattttttatttttatggg

SEQ ID NO: 4774 - DNA, 480 bp, Homo sapiens
  misc_feature 421: n = A,T,C or G
cgctcctatagggcgaattggagctccccgcggtggcggccgcccgggcaggtacttccaacagtaagtggaaacacagatattcaagttgagatagcactggccatgcaaccattaagaagtgagaatgctcagttacgaaggcagttgagaattttgaaccagcaactcagagaacaacagaaaactcaaaaaccatctggtgctgtggattgcaaccttgaattgttttctcttcagtcattgaatatgtcactgcaaaatcaattggaggagtcactaaagagccaggaattactgcagagtaaaaatgaagagctgttaaaagtgattgaaaatcagaaagatgaaaacaaaaaatttaatagtatatttaaagacaaagatcaaactatacttgaaaataaacagcaatatgatnttgagataacaagaataaaaattgaattggaggaagccctagtcaatgtgaaaagctcc

SEQ ID NO: 4775 - DNA, 203 bp, Homo sapiens
  misc_feature 42, 67, 72, 80, 85, 124, 144, 145, 159, 180: n = A,T,C or G
gggcgaattggagctccccgcggtggcggcccgaggactttntttttttttttattttttttctttnctttntttttttnttttnttttttttttttttttttttgttcaaaattcatccaatntttattgaatcgggaacggnngcaaacgttgccanaatcaaaaacccacccatccngatccttttttggcttccccttg

SEQ ID NO: 4776 - DNA, 423 bp, Homo sapiens
  misc_feature 119, 122, 133, 135, 137, 138, 139, 147, 153, 156, 160, 161,162, 171, 177, 182, 188, 192, 193, 195, 200, 202, 204, 205,206, 208, 209, 211, 213, 357, 367, 371, 380, 381, 382, 390,391, 393, 401, 402, 405, 407, 423: n = A,T,C or G
ccgcggtggcggccgcccgggcaggtacgcgggggagacttctccgccgcctccgccgcagacgccgccgcgatgcgctacgtcgcctcctacctgctggctgccctagggggcaactnctnccccaacgccnangnnnttaaaaanaatttngancagnnngggtttcanggcggncaacnaccggntaannanggttntnannnanntnantggaaaaaacattgaagacgtcattgcccagggtattggcaagcttgccagtgtacaggtgaaatgatatgttactggtattcgcttcaaaatcatctgagtgtggggtaattgagtacctcggccgttttaaaataagtggantcccccggcntgangaatttcannntaaacttnntnattcccgnncancntcaaggggggccccgn

SEQ ID NO: 4777 - DNA, 352 bp, Homo sapiens
  misc_feature 170: n = A,T,C or G
atgggcgaattggagctccccgcggtggcggccgaggtacaatatgatggagtctttctctgtcgcccaggctggagtgcagtggcacgatctcggctcacttagaaacagggtttcgccgttttggccaggatggtctcaatctcctgacttcatgatccaccctcctnggctccaaagtgctgggattacgggcatgagccaccgcgcccggccagaataagtcctaatttttaactcttcagagagtgaaggaataactccaaatagactcccagaagttatgttcagataagtaaaccatcatgcttacattcagaaagttctgcttctcaggtaacttaaatggaaa

SEQ ID NO: 4778 - DNA, 578 bp, Homo sapiens
  misc_feature 14, 45, 61, 108, 116, 129, 143, 147, 210, 240, 258, 260,282, 284, 287, 289, 294, 309, 322, 325, 327, 336, 353, 368,374, 380, 389, 403, 410, 429, 444, 459, 462, 468, 479, 481,499, 507, 516, 519, 521, 537, 539, 543, 553, 555: n = A,T,C or G
ccgggcaggtacangatcccagactggttcttgaacagacagaangatgtaaaggatgganaatacagccaggtcctagccaatggtctggacaacaagctccgcganagacctgnagcgactgaagangattcggcccatanaggntggtcacttctggggccttcgtgtccgaggccagcacaccaagaccactgctcgacgtggccngcaccgtgggtgtgttcaagaagaaataantctgtaggccttgtctgntnataaataagtttatatccccangncananaaggncacctggaaaacggnccttttttttttnttntnttttttgcnctcctgctgcttcttgnatgtggtaccatttntgaagnttcttntacggaatncaaccctgattccnttcaccnctggtcaccatggttggcncggcactaccattgnaagttgattgggccnacnttcaantgggttgtcgncnccccccgagttccttggncgatttanaactaatgnatncnccggtcttgcaggaantncatntcaaacttantngatccgccccctcaagggggggc

SEQ ID NO: 4779 - DNA, 539 bp, Homo sapiens
  misc_feature 114, 177, 218, 325, 326, 391, 405, 433, 471, 477, 489, 533,538: n = A,T,C or G
ccgcggtggcggcccgcccgggcaggtactgtggcatggcgcagtgggtgacagatggccacatagcggtcaaaagccatggccagcagcactgtggattccatgccagataangagtggatggcaaacatctgtagcatgacaagcatcaaactggatggagtggaattgaaccanaagatggccagcattttgggcatggatgaagtggagatgangatgtcaatgcctgaaagcatgcaaagaaatatatacatgggctcatgcaggctgtgctcagtccgcacaatgtagatgattgtcaagttacctagcacagcaatanngtagagggagcacaatgggaaggccaccagaactgaacctcttctaaaccagggaggcctattangatgaaatatgtancactggattcattgccattgggatccancatcatgaagaagctgaactgtgaccagcaccaggcangtagangctcaacccgtntggaaagaatgtgtgacccccttttgtcagtctttctcccccgngtacnt

SEQ ID NO: 4780 - DNA, 129 bp, Homo sapiens
ccgcggtggcggccgaggtacgcgggggtcggcgccattttgtctcggcagcggtggccgtagctccatcgcattttatgtttctggcgagaagggaacggagttttcatcaggtagattggtttttgt

SEQ ID NO: 4781 - DNA, 170 bp, Homo sapiens
  misc_feature 95: n = A,T,C or G
actataggggcgaattggagcttaccgcggtggcggcccgggcaaaggagaaagaagatccaggccctcatggtgctgggaaccctcagtggcangcaggcaggcggcaggcagagcgcgctctccgggcagtctgaaggaccgcgggaatgtccccgcgtacctcggcg

SEQ ID NO: 4782 - DNA, 209 bp, Homo sapiens
  misc_feature 17, 154: n = A,T,C or G
gggcgaattggagctcnccgcggtggcggccgcccgggcaggtaccgggctcctcacagctccactaggcactgccccactggggactgtgtgggggctccgaccccacatttcccttctgcaccttcctagcagacgttctctatgagggctncacctctgcagcaaacttatactgaacatcaaggcatacatcaaggcatttccat

SEQ ID NO: 4783 - DNA, 515 bp, Homo sapiens
  misc_feature 79, 219, 423, 447, 465, 497: n = A,T,C or G
cgcccgggcaggacttgggacagttacaggcatgctgctattgccatgatcttcgggaagctgaagtgatgagcagcantgtgtgattctgaggacacagggggctggggtctaggagctatctcaggtgggctcagtcagtgcctcctcccttttggtgcctccctagaagtgctgagaagatgcaaaaccaaaagcttttactccaacattgcttanccaagctaagcacatgcattccctatgattcagcaattctgctcctagcatgtatcccagagaattgtcccatgggtccataggggcatataagaatggccattgcagcaaagttctggttggggtagggggagctgaaagtcatctggtgtccacaactggaggaatggatggataaaatgggatggatgcacaagtgggcanacagatgggtgaaaggatggtcantccttacattggccaagnttccttattcttaggctaaggattagcatctncaggccaaaaagaaaacg

SEQ ID NO: 4784 - DNA, 893 bp, Homo sapiens
  misc_feature 155, 179, 183, 184, 189, 190, 191, 194, 195, 201, 210, 211,212, 218, 219, 224, 225, 239, 244, 248, 250, 255, 256, 257,261, 262, 267, 269, 273, 275, 276, 277, 278, 279, 309, 311,312, 313, 314, 330, 332, 347, 351, 354, 356, 360, 362: n = A,T,C or G
  misc_feature 365, 371, 379, 380, 381, 385, 387, 389, 395, 419, 434, 438,441, 463, 465, 468, 470, 482, 488, 490, 498, 501, 507, 518,520, 524, 529, 542, 550, 558, 562, 565, 566, 574, 575, 576,592, 597, 598, 608, 625, 626, 627, 630, 631, 632, 633: n = A,T,C or G
  misc_feature 636, 643, 644, 645, 650, 654, 656, 659, 660, 667, 694, 707,712, 725, 727, 735, 739, 746, 748, 750, 751, 765, 778, 779,794, 799, 811, 823, 825, 827, 832, 834, 835, 854, 873, 878: n = A,T,C or G
agggcgaattggagctccacccgcggtggcggcccgcccgggcaggtactttttttttttttttttttttttttttttttttttttttttttttttttttttttttttttttttttttttttttttttttttttttttttttttttttttttttntttttttttttttttttttttgtngggnnaaaannnaanntttttnaaaaaaaannntttttnnaaaannaaaaaaaaaaaaanttttnaaananaaccnnngggnnttttntntttngnnnnngggggttttttttttaaaaaaaaaaaaaantnnnntaaaaaaaaaaaaaangncaaaaaaattttttntttnccnanaaananttngggggntttaaaannnggtntngnaaaaanttttttttttttttttaaaaaaangggaaaaaaaaaggntttnggnaaaaaaattttaaaaaattttngnggngnaaaaaaaaaaanaaaaancncccccccncanaaaaanttttccccctncncccnggggnggccccccccccngtttttcnatttaaanaaanccnncccccccnnncacaaaaaaaaaaaanggggnntttttttttnaaaaaaaaaaaaaaaannnacnnnnccnaaaaaannnttttngccncnctnnaaaaaantttaaaaaattttttttttcaaaaaanaatatttttattnttttnccccccccccctntnaaaaaaanaaanacccccngngnnaaaaaaattttaanttttaaaaccccnncaagggggggggccnccacnaatttttttttntttaaaaaaaanananccccntnnaaaaaaaaaaaaaaaaatntttattataaaaaaatttncccanaaaaaaaaaaaaaaa

SEQ ID NO: 4785 - DNA, 551 bp, Homo sapiens
  misc_feature 1, 28, 49, 60, 520: n = A,T,C or G
nccggcaggtacatttttgtaaaacttnaaagatacttacctagtaatntagtatagaanttaattctgaaagctgtgtccactaaaagattaacagtggttatctctgggtgattttttctgttcttttttgttcatctgtccatttttcctaaaaacagatttctttagtcataaaaataataaaatataaagtattggaaaacagtgaatatttgaatttcattcatttgaataagcattcaaatgaactgcccagtgaacttataaagacagtggatatacttaaaattcttgttgtgaggacataaaatgataggtaaaagttgcattacctctgggactggaagctggaggagtcaactcgatggttattacagagccattgctgtaaggggacagccttgacatctgtgaaatggggataaaattagcctagacatgtggagaagatcaaatgaggtattgagtgtgtgagctgtgttaggctggctcctactctctccccttgcactagcanaaccagtgcccagtcagatcttgggaagggc

SEQ ID NO: 4786 - DNA, 165 bp, Homo sapiens
acgatacactactatagggcgaattggagctcaccgcggtggcggcccgcccgggcaggtacgcggggagctgcccgctgagcccgccggacggacgctcgtcttcgcccgccatggccgagagcgactgggacacggtgacggtgctgcgcaagaagggcccta

SEQ ID NO: 4787 - DNA, 674 bp, Homo sapiens
  misc_feature 568, 587, 627: n = A,T,C or G
ccgcggtggcggccgcccgggcaggtacaattcatagggacgaccaatgaggacagggaatgaacccggctctcccccagccctgatttttgctacatatggggtcccttttcattctttgcaaaaacactgggctttctgagaacacggacggttcttagacatttgtgaaatctgtgtagaacccgggctttgcaggggagataattttcctcctctggaggaaaggtggtgattgacaggcagggagacggtgacaaggctagagaaagccacgctcggccttctctgaaccaggatggaacggcagacccctgaaacgaagcttgtccccttcaatcagccacttctgagaacccccatctaacttctactggaaaagagggcctcctcaggagcagtccaagagttttcaaagataacgtgacaactaccatctagaggaaagggtgcaccctcagcagagaagcccgagagcttaactctggtcgtttccagagacaacctgctggctgtcttgggatgcgcccagcctttgagaggcactaccccatgaacttctgccatncactggacatgaaactgangacactgggcttcaacactgagttgtcatgaaagggacangcttttgtcctaagccggttgagggcaacaaccacttttcttccctt

SEQ ID NO: 4788 - DNA, 396 bp, Homo sapiens
  misc_feature 224, 242, 273, 286, 312, 321: n = A,T,C or G
ccgcggtggcggccgccatcgccgtcgcttggcttcttctggactcatctgcgccacttgtccgcttcacactccgccgccatcatggtgaagctcgcgaaggcaggtaaaaatcaaggtgaccccaagaaaatggctcctcctccaaaggaggtagaagaagatagtgaagatgaggaaatgtcagaaagatgaaagaaagatgaattgcagtggagaaaganggtcgtcaataccttaanaagaaaaggcaaggaagggcttgcttgcaancctcagcaaaaanaagggtgggtccggttttccccaacnaaaaaaaangggtttgcaagtttgccacacccagcccaagaaaagccagcttgtcacttccaaggcaaaaagggcagcaagcaa

SEQ ID NO: 4789 - DNA, 442 bp, Homo sapiens
  misc_feature 24, 46, 61, 76, 404, 434: n = A,T,C or G
cgaattggttttccgccgaggtgncggccgaggtaccatatcctanggctgcacagagcangaggcccagcctttnaaacgatttttccctcctagacctctgggcctgtgatgggaggggttgccatgaaggtctctgacatgccctggagacattttccccattttcttggtgattacttactcaaatttctccagtgggtttgaatttctccccagaaaatggatttttcttttctatcgcattgtcaggttgcaaatcttccaaactttaatgttctgctttctcttgaatgctctgccacttagaaatttcttccactaggatatcctaatcatttctctcaagttcaaagtttccacagatctctaggtacaaggcaaatgctgccagtctcttttgntaaagcataggaaaggagtcacctatgctnccagttcc

SEQ ID NO: 4790 - DNA, 493 bp, Homo sapiens
  misc_feature 221, 261, 433, 452: n = A,T,C or G
ttagggcgaattggagctccccgcggtggcggcccgaggtacttttttttttttttttttttgatagagatgaggtctcactgtgttgtccaggctggtctcaaattcctggactcaagcaatcctcccacctcggcctcccaaagtgctgggattacaggcatgagccaccacgcccggccacagtattttttaaatgccagttagggtttattaaaatngtagaattcttataacctccaacacaaagaaatgacaggntgatgcttgcatgacttttggcaactaacttccaggaagccctaggatttacaagatgctttgagtgacattagtcacaaagagattgtttgcaactaaacagaacacagggattgataaagaatgaatgaggaagaatgaagaccactggtgagatggcacttctgaccangggcctactcctgggaggncaagtccttgagtcccattgggagggagggagtaacccctc

SEQ ID NO: 4791 - DNA, 510 bp, Homo sapiens
tatagggcgaattggagctccccgcggtggcggccgaggtacatgacgcaagccgtcacacctggttagcttcatttttttgcagagacgagttctatgttgcccaggcaaatctgttaactcctgagctgaagaaagcctcatgcatcgacctcccaaagtgttaggattacaggatcttgccaacacaggagtatctcctgatcaatttttttttgagacgaagcctcgcctttgtcgcccaggttagaatgcaaaagcgccatgtcttttcactgcaacctttgcttgctgggtttaagtgattctcctgcggcagcctcccgagtctctgggatgacacgcgactgccccacgcccggctaatatttgtatttttagtagaaacgagatttaaccacgttagccaaactggtctcgatccgcacgcctcggcctcccaaagtgctgggattacaaaatcggaaaaattattccctagaaaacggcgaaattcaatattaaagctct

SEQ ID NO: 4792 - DNA, 406 bp, Homo sapiens
  misc_feature 233, 277, 337, 372: n = A,T,C or G
ccgggcaggtacaccaaggtggtgcattaccggaagtggatcaaggacaccatcgcagccaacccctgagtgcccctgtcccacccctacctctagtaaatttaagtccacctcacgttctggcatcacttggcctttctggatgctggacacctgaagcttggaactcacctgggcccgaagcttcgagccttcctgaagttcctactggacctgtggcttttcttggtgtnggaagtccaagggcttgcttaggaaaaaagggaaatggggcaanacacaaggtggtattgccaatggttttctgaaaatgggtataatttcgtcctctccttcngaacactggcttgtctctgaagacttttcgctcanttttcaagttgaggacaccacaccaaagacgttg

SEQ ID NO: 4793 - DNA, 372 bp, Homo sapiens
  misc_feature 22, 23, 27, 47, 98, 181, 220, 294, 301, 317, 328: n = A,T,C or G
ccgcggtggcggccgagggacnnggtncttttttttttttttttttngctgggatatcttacagaggaaggaaaaattaaccttttttactttctttntcactttttaaatcaggccaaagtcaagcccgtttgccaacctgcatgtccatgcctgtaagcccttctcttggccaaggaanaaaggaagaaatgaaaaaaagaaacccagggggtctgtntcccctgattaaacacagcacaggcactccagggcagacatgcccgggggcggctcctttgcaccattgacctnaggccanacacctaagcgccaanaatgggacctnggccttccggctaggtttgccccaggctgggcaggaaaccatct

SEQ ID NO: 4794 - DNA, 188 bp, Homo sapiens
  misc_feature 149: n = A,T,C or G
tagggcgaattggagctccccgcggtggcggccgcccgggcaggtacgcgggaaggaagttgtggaagaggcagaaaatggaagagacgcccctgctaacgggaatgctaatgaggaaaatggggagcaggaggctgacaatgaggtanacgaagaagaggaagaaggtggggaggaagaggaggagg

SEQ ID NO: 4795 - DNA, 403 bp, Homo sapiens
ccgggcaggtacatgcccatttatgggtctggttggtctctacagaggcagcaaagggaaaggaggaagactttttcccagatctctctaccttaaagcatggagccaagtagcttgtattagtcctaggattccttttctcctgcaaaactggtggtagaaacagtggcatgcgggggatggtacatcacaaaatacattttgatatcccaaagaagcaagacttgcaagtaggcgttttaaacataactaatctacagctacaaagttctactcttgatagcatttacctttttggggagtctcccaggctccaaaggataaaagcagagtagaatcagtataacatatacaccaggaagtccgtattgtaaaggctataaagatttgcagcacagtgaga

SEQ ID NO: 4796 - DNA, 411 bp, Homo sapiens
  misc_feature 216, 309: n = A,T,C or G
acttagggcgaattggagctccccgcggtggcggccgcccgggcaggtactgttcacagtatagataagaaaattaaagaaacttgcccaaggccacaaagccactaaggggtgaaccatgattcaaacttaggtttgtctgtcttcagaagttaacttcctaaccactgaatcatatttcatctgttccactaaatacatttttctggggcttancaatgccagtttatttacctaagattatcaacaaacgagtggtaataccaggactcaaactcaagccatcaacactaagtcagtgagatcttnatcaccttacactgccccacaataaccccaacagtaaccctgtatacagtcagctgtattcacaggccagacacaaggaggaaaaaggagtagggaaaaggc

SEQ ID NO: 4797 - DNA, 447 bp, Homo sapiens
  misc_feature 415: n = A,T,C or G
ccgcggtggcggccgaggtacgcggggggagctggcagagaccagagctgccaccgctgctgcttccaggagtgtgcaggtggcagctgccgctgagcccgcggcggaggatggcggggcttgttccagaaggcttgagggtccccgagtgcaccgccctcccaccaatttctggtttttcctgttggagcccaaggagcaagggcagaatgaaggaacatgatgtttcttaccgacagttactcatgacgtctccatccaaggactgaaggggggcatccttctccatctaaggaactggggggcatccttcttccatccagtattggggggtctttcctccttccatccaggacttggggggtcatccttcctccattccaggaacctgagggggtgttcccttttctgcgcnttccttggatgggcaagtcttttcccttcaat

SEQ ID NO: 4798 - DNA, 454 bp, Homo sapiens
  misc_feature 21, 77: n = A,T,C or G
ctcctatagggcgaattgganctccccgcggtggcggccgaggtactttttttttttttttttttgttttcatttanaaagaagatgaaagtgaaaacagaatagtcagattactgaaaccaaatgtcatcttaagaagcgaccttgtcagcttagctaaatagtaattccttccagtcatattcctcaatccttatctgcttcataggttatattatcaatgacaaaaagggactgtaactctgacatggacaatgggctacagaaaacactaatttttgatattaaaattattcttgatggaattggttaaatatactataaaacttggcttataatcagggataaatcttaaacttgagggtctttaaaaatacatttttggcacttacctttcatcttatattactaatggatgggaatctcaaacatataaaaaaaaggaattcagttt

SEQ ID NO: 4799 - DNA, 407 bp, Homo sapiens
ccgggcaggtacctaactgccgagatcctggagctggcgggcaacgcagcccgcgacaacaaaaagacccgcatcatcccgcgccacttgcagctggccatccgcaacgacgaggagctcaacaagctgcttggtaaagttaccatcgctcagggcggtgttctgcctaacatccaggccgtactggaatgccatcagccagcaggcccctgccatcatctatgacttctatctgtggctcactggaaggaaacccaggcaaggccaagatggctcaaagagcaaccagccacctctgcagcctgccacctcctgctggcaagatttgtttttgcatcctgtgaagaagccaaggaggcaccagggcataagttctactcacttatatctgtctgggaacataacgc

SEQ ID NO: 4800 - DNA, 406 bp, Homo sapiens
  misc_feature 239, 274, 297, 316, 366, 388: n = A,T,C or G
ccgcggtggcggccgcccgggcaggtacatttaaaattatcatcataaatttatgtgcccaaacccctcccaccccattccccctgaaaccaactgagctattttctgaattaaatttgaataacgaaataaatttgaataatcaagaaaaaatacacagcttgacagaatgccttttttcaaaagcacactttcacaagggttaatggccgccttgccctattttcgaagtttttcangtgggttagttttgcttttgtccaggaagttcaanagactgggaaattgaagtttgtnatccggatagaaaggtcanaattttaataccttaggtttcccattcacttggtttactgggtaaaagcntggaaaacttcctacctgctcntttaaaaccagaatcctt

SEQ ID NO: 4801 - DNA, 466 bp, Homo sapiens
  misc_feature 300, 326, 370, 389: n = A,T,C or G
ccgcggtggcggccgcccgggcaggtacacaatggtttattaaaggaatgtatggcccacatcaacctagcaaggattctactggtaaaccttcctatggccaaaggaaaaacaagcaggagttgagtggctggggtggggtgcaggcaatggagagagggcagaagggtgtagaagctgaaggggtctagaagcttactcctgagttttcttcctttctgtcttcaaaatcttttacttctttatgggcccaaagacccagcttgttttcataaggcttgggaagaatgccacctcttntagaactgctccgagaacaagcccangaagaccaggggggaagggaggggaaagaaaggggatacctgtnggaaaagggatggcggggnaaaacattttagaagcctagaagccactacctggggccaatgctaaaggtttctgtcccttaagccctaaaaaagcc

SEQ ID NO: 4802 - DNA, 418 bp, Homo sapiens
ccgcggtggcggccgaggtactttgctttagaaaatatcttagtattattacttttgttttccagtaaccttgctaagcttctgaagaacttttctctcatgttttctggttcaatttctgcttcattagtatctaagctactgaggttatcaccacccatgctttgagacatcatggaaaaaccacaaaaaatgacccattatcttgaagtgggtgtggctctggagattcacattccattctatcttccatagactgaagctgggtgcctaaagactcctttgcagaatccagagggatcatttcttccatagaaacttcctgcccatatgtgccctgtgagacctgctgtctaggttcatcaagctccctctccaaatcttccagcaaaagtcaccacctcttctccactctcag

SEQ ID NO: 4803 - DNA, 421 bp, Homo sapiens
ccgcggtggcggccgaggtacacgaggccggtgggctccctgacatcccttccaggcaacctgaaagtactgaaatagcttatggccctgtgccagggaccttggcccaagctgctgacctccagggtggggagggagctacccccaggagaagagtcactcagacagcagtatgagcaagccagccagcagctccgtgcctgcacccagctcaggggaatcccagggggttcagatgcccaggaaggaaaaggggacagcgctactgctatggaatgagaccaccacttctcctgttgtccttcccagcttctccccaacctccccttttccctagtttataagacaggagaaaagggagaaagcaaaaagctggaaagaaacaagaaggtaagataaatagctagacgaccttggccgc

SEQ ID NO: 4804 - DNA, 454 bp, Homo sapiens
cactacttagggcgaattggagctccccgcggtggcggccgaggtacctctttgcctgtgggcctttttccccctagacatggtggcatacacaataagtgtgtaggaaaagccagaagtgccacaaagttaatgtcttggaagcatctgtattccaatgttaagcaaggatttggtggatgaaaagcacagtttcctttccccttgatgggaataactcttagttatatctgacactgtcttccagactttcccagcaaaactgagctccagttgcccagatgggtaaccagcttgaaaattcatactttattccttccctgctctgtctactttactactccattcccagtatctaataatttgatgatttttaacttccagtataaactcttttacaagaaagccttgcctcagggatcggtttttagaagtgccaagccaagccaggttg

SEQ ID NO: 4805 - DNA, 387 bp, Homo sapiens
  misc_feature 164, 196, 208, 237, 304, 307, 330, 335, 364, 372, 378: n = A,T,C or G
ggcgaattggagctccccgcggtggcggccgaggtactctggatatgggaggagctcagggttgttggctaagatgtaattttaaggaaacactttatatttcataccaagtaagaatttcaatggcaatgaatattaccacatagctgtatactgtaactcanggattctgtcagatgagtgcaaacattaccgngctgtaaccatncaagagtcccagggtcacatttggcagcncaaaaagtaccctgcccggggcgggcccgctctagaaactagtgggatccccccgggctgcaggganttncgatattcaaggcttatcgatancccgncgaccctcgtagggggggggggccccggnttccccangccttntttggttcc

SEQ ID NO: 4806 - DNA, 317 bp, Homo sapiens
  misc_feature 117, 128, 134, 156, 195, 246, 251, 284, 288, 302, 314: n = A,T,C or G
gcgaattggagctccccgcggtggcggccggcctgggcaagacttatgatgctgtccatagctttgaactcgctgagggcctgcaccgggttcacgtgcttcttctgagatgcccgnttaatcttggnctgtgnctcatcctgtttctctctcttnaccaatggctttttctctggtgccttcatcttccatganacccccgccataccttggcccgctctagaaactagtgggatcccccgggcntgcangaattcgatatcaaggcttatctgataccgtcnaccntcgagggggggccnggtaccccagcnttt

SEQ ID NO: 4807 - DNA, 419 bp, Homo sapiens
  misc_feature 106, 196, 205, 383: n = A,T,C or G
atcgactacttagggcgaattggagctccccgcggtggcggccgcccgggcaggtaccaaggattttctattgcagcagaccatgctacgagtgaaggatcctaanaagtcactggatttttatactagagttcttggaatgacgctaatccaaaaatgtgattttcccattatgaaagttttcacttttactttnttggcttantgaaggataaaaaatgacattcccttaaagaaaaaagatgaaaaaaatagcctgggcgctctccagaaaagctacacttgagctgacacacaattggggcactgaagatgattgagacccagagttaccacaatggcaattcaaacccttgaggtttcggtcatatttggaaatttgntggttccctgatggtatacagtgctttggtaaaaaa

SEQ ID NO: 4808 - DNA, 516 bp, Homo sapiens
  misc_feature 3, 80, 86, 146, 158, 167, 170, 172, 178, 206, 224, 234, 240,248, 253, 271, 282, 286, 290, 292, 295, 298, 300, 306, 313,314, 317, 328, 340, 341, 352, 357, 369, 373, 374, 375, 382,386, 396, 397, 399, 401, 402, 403, 406, 411, 412: n = A,T,C or G
  misc_feature 415, 420, 421, 428, 432, 446, 447, 449, 451, 452, 453, 456,464, 468, 480, 482, 502, 505: n = A,T,C or G
tancactacttagggcgaattggagctccccgcggtggcggccgaggtacttttttttttttttttttttttttttcganagatantcttgttctattggccaggatggagtgcagtggtgcgatctcagctcactgcaacctccncctcctgggttnaagcgattnttntnctttancctccctagtagactgggattacaggcncaccccaccttgctcggntgatttttgnattttnaagtaaanaacanggttttggttgttgcccntgctggtcttnaacncctnanccnaantnaaccgnctgcctnnggncttccaaaaanttttggggattnnaagggcgttgngccanctttaacctggnccannnctttttnaaanttttttaaanntntnnnccnaaaannccnttttnntttgggncccnaaaaaaggggaaannanannnggnggaaaaanccancccctattaaantntttttcaaaaaggggcccanaanttttttttttt

SEQ ID NO: 4809 - DNA, 401 bp, Homo sapiens
  misc_feature 199, 207, 208, 219, 220, 231, 240, 247, 264, 266, 276, 291,293, 311, 321, 344, 345, 368, 379, 380, 387, 392: n = A,T,C or G
atacgactactatagggcgaattggagctcaccgcggtggcggccgcccgggcaggtacgcggggtccagagtgcttgctaccgtgttcggagtctcgctgcctccctcccgcgggggtttctcctctttttgaaaattccgtctgtgggatttttagacatttttcgacatcagggtatttgttccaccttggccaangccttctnngaaaaaacttnngtccccctgtntggaaaggnacgggancccggacttggacaatngntcacttcaantacccttcgggccgntnttataaacttagtttggnattccccccngggccttcaagggaaatttctannatcaaaagcctttaattcggaantaccccggtcnnaaccttnaaaanggggggggg

SEQ ID NO: 4810 - DNA, 443 bp, Homo sapiens
  misc_feature 96, 101, 104, 129, 136, 149, 158, 159, 163, 175, 180, 182,188, 190, 191, 198, 202, 211, 213, 215, 216, 219, 225, 228,231, 234, 237, 243, 245, 247, 250, 255, 256, 263, 264, 265,269, 271, 273, 276, 278, 287, 289, 292, 296, 297, 299: n = A,T,C or G
  misc_feature 306, 313, 321, 322, 326, 332, 354, 360, 362, 363, 368, 378,381, 393, 398, 412, 419, 420, 421, 428, 430: n = A,T,C or G
ccgcggtggcggccgaggtacttttttttttttttttttttttttttttttttacttttttttttttttttttttttttttttttttttttttttnaaaanaancaaattttattaaaggaaaattttncaggttnaaggtttgcaggnaaaattttnnaggngaaaaggtttanttttnancaaatntnntttcggncttngcttttaantnanngtngaaaantcnccnggnaanccaaantnanaanccacnngggggcnnncttntntnaantntttttccananatngctnngnccccaanttaaaanaacccccnntgtnaccttnccccggggcgggcccgttttanaaaaananngggancccccgggcntgnaagaaaaattcnatatnaagccttatttaanaaccccnnnaaacctntnaggggggggggcc

SEQ ID NO: 4811 - DNA, 470 bp, Homo sapiens
  misc_feature 3, 204, 430: n = A,T,C or G
ctnctatagggcgaattggagctccccgcggtggcggccgaggtactcaaagacgaatcatgaaaaagaaaaaaaactttatttcaaacaggttcagtgatatatgtgtgtgctacagcaaaggctggttgtggcaaagtttcatttcaaactgtatgatgtgggctgggcaaggtggctcacgcctgtaatcccagcactttntgagggccgaggtgggctgatcaccctgagggtcaggagagaccggcctagccaacatgctgaaaccccgtctctactaataatacaaaaattagccaagtgtggtggcgcgcacctgtaatctcagctactcgggaggctgaggcaggagaatcgcttgaacccgggggggcaagtaggttgccagaatcacgccactgcactccagcctggggtggacagagcncaggactcaaaaaccaaaacaaaataaaaacaaaacaaaa

SEQ ID NO: 4812 - DNA, 472 bp, Homo sapiens
  misc_feature 6, 190, 211, 459, 460, 471: n = A,T,C or G
cgactnctatagggcgaattggagctccccgcggtggcggccgaggtacaagggaaaaacctgtcttgggcaggctgggggggattcttctggtgagtccccagcccaccctgagtaacacaaccagataacagtcattttacacccaggtgcacatgagcacagcacacaaacacacacacacacactnacacacacacacacacacaanttggcttgagctctcttccaggggagggtcctgggtccagtcacagtatgaggtcctctctcttctgaatatcatcccagtagtggcagcagagagtacactcagtgatctaaaacaccacaatatccaacatacacaaacctcagggaagggttaagtaaacacacacaaggattgggaatcattggtgctctttgctccttgaatgggaatggttcccacagaaaaaagccacaggggattacagnnacaaccataang

SEQ ID NO: 4813 - DNA, 209 bp, Homo sapiens
  misc_feature 140, 164, 165: n = A,T,C or G
gtgatggggcagacatggtgggtcctgacggccttgtcttcaccaagtgctcctaactctcagcaaacttggggttcatgaccgtcgtggtggcgctcttgaaaaggggattatcattgttccactgggacttgagcttntccttctcaaagcgcctgtacctnngccgcttctagaactagtgggatccccccgggcttgcagggaat

SEQ ID NO: 4814 - DNA, 395 bp, Homo sapiens
  misc_feature 155, 166, 210, 214, 218, 244, 249, 250, 259, 260, 262, 265,293, 306, 313, 330, 332, 346, 357, 365, 370, 375: n = A,T,C or G
ccgcggtggcggccgcccgggcaggtacgcgggatgatagacacaatgaaatccacccccaaagaggactacttcggatacaatcacagcaaccctggccttggccctgccctgtccctgccatgcaacttcacaactcagctggcctagacccntgggaggcctncaagtcccttaagcggtttccagttttgtggaaagtccccaggncaanttcnctgttgttccacattgatccgaaacncccanncacgtgggnncnagntatcaatcaagtcttcttctttacagtngctacacaacacngctctcnaagctcccagctgttantnttcttgggccttgngaaacttatgnaaagaacncttangttgnctctccaaggaaccttcaaa

SEQ ID NO: 4815 - DNA, 181 bp, Homo sapiens
acttagggcgaattggagctccccgcggtggcggccgaggtacattgtgcaatgacagtcacaatcaattcctcagcgcacccatcgccacggatacgatacattagatattctgaacttgctcatcttaggacttcacattggtgtcagtgttttctgacaaatcacgtgtatcaggaat

SEQ ID NO: 4816 - DNA, 453 bp, Homo sapiens
  misc_feature 74, 86, 143, 176, 185, 203, 206, 211, 216, 218, 220, 242,244, 250, 256, 264, 270, 303, 313, 327, 351, 382, 389, 405,407, 422, 446, 449: n = A,T,C or G
cactacttagggcgaattggagctccccgcggtggcggccgaggtacttttttttttttttttttttttttttnaatgaacaaatntttatttatcttttataacaagtaaggcaatgttgcttaaaggaagacaaacaaacntaaaagattccgttgacaatgcattttttcatntgttcggcncaatgcttttgtcataanggnaaatntgacnancnaaacttttccaggacatttcantnttcggnggcagncactttangggcanaatgactggccgcttatagatgaggccaaagcnccaggtaggnggaaggttcttgtntcggttacgaaccccgacagcgcnccaacagacaacacgaggcagtggggggagnaacattncctgtttaaatgagcncnctgggtgcaagggcnttgctgaggcttgaaaaatgggcnttnagcc

SEQ ID NO: 4817 - DNA, 475 bp, Homo sapiens
atcactacttagggcgaattggagctccccgcggtggcggccgcctcggcctcccaaagtgctgggattacgggcacaagccactgcacccagccacaaacagatcgcagatccaggtttctcaaactggagcatctgcttaattttcccataaaatcagtcttattctttctgacagctctgagactcctccggccacgactaggtgcttgtcctggaggaaacggtggaggacggccgcacaaaaaccaatctacctgatgaaaactccgttcccttctcgccagaaacataaaatgcgatggagctacgaccaccgctgccgagacaaaatggcgccgacccccgcgtacctcggccgctctagaactagttggatcccccgggctgcagggaattcgatatcaagccttatccgattacccgtccgaccttcgagggggggggccccgggtacccaagcttttggtttccc

SEQ ID NO: 4818 - DNA, 578 bp, Homo sapiens
  misc_feature 178, 180, 185, 193, 241, 250, 303, 305, 362, 367, 382, 391,422, 424, 425, 437, 456, 460, 479, 501, 530, 541, 564: n = A,T,C or G
ccgcggtggcggccgaggtacgaagccatcgacagcagagatggagcatcttgtgcagagttggtgtcttttaaacatcctcatgttgcaaacccacgacttcaaatggcctctccagaggagaagtgtcaacaagtcttggaacccccttatgatgaaatgttttgcagctcatttnanggtgnacttaatncagttgggggaatcatgacttcattagaagggcattacaatgttgccnagacccgtnaataagttcccaaatcaatttcttttgccgaagccattttcccagggccccancnaaaaggaaagaaaaaacctggggggccttctgcccctgttccattgttatttgccangttangccggccttttgganccctttccnaaggtggttttggcccaaattaaattggccnannattccaaaccangttttggggttaaaaaagnaaanagggggaaaaaaaaaggcnaaaaaggtttggggggggaacnattggttttgggaaaaaaaaaaggccaangcccagtaaangttttacctttggatttgaaagnctttgttttttccc

SEQ ID NO: 4819 - DNA, 387 bp, Homo sapiens
  misc_feature 221, 249, 347, 359: n = A,T,C or G
aacgactacttagggcgaattggagctccccgcggtggcggccgaggtacgcgggtgagagggtctgcgtttcttctagagctcctacctcagtggtgtgcacagagttggagacacctgagggctggtccacgtctcacctttgccatacgggtcatttcttgatcaaatatatgactggggtcctggtttactcccgcccaccgtttcttttaaaagtntttcttaacattgaaatccacaaaagcnggaaacaatgaaccattcttgcactttacagaaatcattgtccttagctttagaggttgttaatttcttgtttttaacatgaacagaatgtgtggttntgaaggtgtgtnggggggtctcaagaaaattgtccctttt

SEQ ID NO: 4820 - DNA, 546 bp, Homo sapiens
  misc_feature 14, 16: n = A,T,C or G
cgactcactatatngngctccaccgcggtggcggcccgaggtacctgcccacagccttggtccctgggggctagactgctcaactgtggagcaattcattatactgaaaatgtgcttgttgttgaaaatttgtctgcatgttaatgcctcacccccaaacccttttctctctcactctctgctcacttcagattgactttcaatagtttttctaagacctttgaactgaatgttctcttcagccaaaacttggcgacttccacagaaaagtctgaccactgagaagaaggagagcagagatttaaccctttgtaaggccccatttggatccaggtctgctttctcatgtgtgagtcagggaggagctggagccagaggagaagaaaatgatagcttggctgttctcctgcttaggacactgactgaatagttaaactctcactgccactaccttttcccacctttaaaagacctgaatgaagttttctgccaaactccgtgaagccacaagcaccttatgtcctccttcagtgttttgtgggcctg

SEQ ID NO: 4821 - DNA, 478 bp, Homo sapiens
  misc_feature 7: n = A,T,C or G
tcaactnctatagggcgaattggagctccccgcggtggcggccgcccgggcaggtacccagcacatctcagagagatggaggcaagctgggttcctgatgatttccagctaatacaggtccttcctcctgcatgcaggcgccccgtaacgctttataacagacgcctctagacttctgtgggggtaaagtgaaggacccaaagcgacacaagtagtgtctgttcacacttccactttcaaagctaactactagctgttcaaatatactccatacagctttcagcaaatcaaagtgtttacctctcccacaccaagggaagaaaagatgcagactgcctttaaagcacctgtcagcaaggcgagggttttaaagatcagccttgagaatcaaagcagcagcagaagtgtcattactccagtgctctcccttcccgttcgtgggtcacacagagacaggcaccatccccagcgctttgca

SEQ ID NO: 4822 - DNA, 362 bp, Homo sapiens
aggtacatgctgcttgaattttcatcatcatcctccactccttccacctccaagaaaaaaaaagcgtgcaggaagtagcatttcagatccttctccaccacctctgcttcccttctcccttcttttcctccttgcagcattccctttagtaccgcggggagggcattgaggcagccagcgcaggggcttctgctgagggggcagggcggagcttgaaggaaatccgcagataaagtttttttctctttgaaagatagagattaatacaactacttaaaaaaatatagtcaataggttactaagatattgcttagccgttaagtttttaacgtaaattttaatagcttaagattttaagagaa

SEQ ID NO: 4823 - DNA, 368 bp, Homo sapiens
ccgcggtggcggccgagcctccgctcaggctggcagccccagctctgcacggggaaggcaatgttctgtccttcagcagaagtcatacaaaataaggatccaaagtgaactcaagaaaaaaaaaaacaaaacaaaataaaccccaacccctacagtggcccattctgcagatacggattcgcgaaaggaaaaatcagagggaagaggctaaaatccctcagtctaccccgcgtacgcgggacccactccctcttagccaatattgtgcctattgccatactagtctttgccgcctgcgaagcagcggtgggcctagccctactagtctcaatctccaacacatatggcctagactacgtacctgcccg

SEQ ID NO: 4824 - DNA, 451 bp, Homo sapiens
ccgcggtggcggccgaggtacatgcaaaatcaaccttacatctcaaccaaattttgggagatcagggactctctgcaggggagaagctccacaacctcagcaaattatcctattggtttgggcaattaaaacagcccaggttggtatcaagcaatgagatttatcaaaggtcaggaccacctttgtaatgtccttctcttttttatctttattcgcatagtctgttttgtcaagaaagtaggagtgcaacacctgcttttttctgttttccatttgcttgaaatatttttctccattcctttattttgagcctatgtatgccaccgcatgtgagatgggtttcttgaagacagcatactccagtgggtcttggttctttatccagcttgccccatgtctttcaatgggagcatttagcccattttccccgcggtaccttgcccgggcggcc

SEQ ID NO: 4825 - DNA, 422 bp, Homo sapiens
  misc_feature 50, 57, 58, 59, 63, 64, 135, 221, 379: n = A,T,C or G
tagggcgaattggagctccccgcggtggcggcccgcccggcaggtactcnattattnnntttnnctttttgttttggaggttgaatgcagggttttattgagtggtggaggtggttctctgaaggatggatgcanagctggaagcggggatggcacgggaagataatcttcctgctgggtggcaaacctctccgaccaccctcggctgaactcctctcggngttcaaatgttcctcttctctctttctctgctgtatcgtttcaccattcatctgcttgtctgggatggtgaagacaactgtttgctcatttgcttggcgataggtgattgtctcgccgctcagctataggcgatggtctcaccactcggtgataggcnattgtcccatctaggtcgccaaaatgtgtctggaattggtggg

SEQ ID NO: 4826 - DNA, 198 bp, Homo sapiens
tagggcgaattggagctccccgcggtggcggcccgtcctcttaatcatgggcctcagttcccgaaaaccaacaaaatagaaccgcggtcctattccattattcctagctgcggtatccaggcggctcgggcctgctttgaacactctaattttttcaaagtaaacgcttcgggccccgcgggacactcccgcgtacct

SEQ ID NO: 4827 - DNA, 474 bp, Homo sapiens
actctatagggcgaattggagctccccgcggtggcggccgaggtacagttggaatccatggcagttttatggaggccaaatatatcagatgaataggctaatttccctgagttgctggccttattagtccctactctgttgccccctggttacctaatgcatgttcaaaaggtatagttttcatcacctgcttgatcttgattttcagacagcatcaaatcagttgcaaaacaaatccaagctaaaattttgagtgtatgattaatttactatagcatgtaattatgcagtattttattttttgttttttattttttttgagacaaggggtctcgctccattgcccaggcagaggttgcagtgagctgagatcacaccacttgcactccagcctgggttgaccagaagcgaggaccccttgtttcaaaaaaaataagaaattaaaaagttgagtcttcatattcaaatttagta

SEQ ID NO: 4828 - DNA, 384 bp, Homo sapiens
ccgggcaggtacaatactgaggcagcatactctggtccagcccttctatttgtttcagcttctcacatactgcatccacattcagtgaattcagtaataccactgggcctggggctgggcctgaccctaggccattgttctgatctctgggcaaactcgtttttactgatggacgttgaagatgaagatgttgggagccgccagggtaataccttggcgtgtaaaggtatagggcaaagaatggcctgttgtagaagggatgctgagggcccgtcatgccgctgtaatagctgctgtgaggctgtggtgacaccactccacctgcgaagggcccattgaaggacgtggaagagcacacggatgggggctggctgttacctcggc

SEQ ID NO: 4829 - DNA, 197 bp, Homo sapiens
  misc_feature 189: n = A,T,C or G
tacgactacttagggcgaattggagctccccgcggtggcggccgaggtacgggggacggggaatcagggttcgattccggagagggagcctgagaaacggctaccacatccaaggaaggcagcaggcgcgcaaattacccactcccgacccggggaggtagtgacgaaaaaaaaaaaaaaaaaaaagtncctgcccg

SEQ ID NO: 4830 - DNA, 379 bp, Homo sapiens
ccgcggtggcggccgcccgggcaggtacaagccttgaacatcgtcctgcttcccagtgggttcagacctcacctttcagggagcgacctgggcaaagacagagaagctcccagaaggagagattgatccgtgtctgtttgtaggacggagaaaccgcttgggtaacttgttcaagatatgatgcatgttgctttctaagaaagccctgtattttgtgattgcctttttttttttaagatgctttcattttgccaaaataaaacagataatgtggatggtttaagggttatagtattatagtttaaataataacaacaaaattcttcccaggaactctgctggaaggtaaattaaaatacttgtttttccattggtaaaa

SEQ ID NO: 4831 - DNA, 359 bp, Homo sapiens
ttagggcgaattggagctccccgcggtggcggccgaggtactctcactgttccagcttccagcccaatcctagcagaatgaatgcattttaaaatcagtccacattcacatgtgctgagaaggttgttagtggtccctcatctgggcaaagcagacccaagatggtgctgagtgcagagtgcagagcattcttgtgctctcctctcatgggtgggaactatctgggctttgcgccctggtccagtgctacgtatcaaccccctcaacacgcctgtggctctgacacggggggatgaattaacttgcctctgttcaaatatacagacttggtgaggctgtcttttgttagtacctgcccg

SEQ ID NO: 4832 - DNA, 465 bp, Homo sapiens
  misc_feature 386: n = A,T,C or G
ctatagggcgaattggagctccccgcggtggcggccgcccgggcaggtacttgattctgtctgtgtcataattacacatttacttgaacacagctatcctttatcttgtgctttctttaatagaaaaatgaacagaaactgaatgcagttaaatttttatttttagtaggttgtgaagttacttttactggagaaataaaaatatgttaaacttgattgactttttaagataaattgttaacacttttgcaggattagaattaatatgaagtatctctttaacattattgtatatattacctactgcaaacctatctgttctgtttctttgtgatttaaagaaaaaataggccgggcattgtggctcacgcctataatcccagcanttttgggaggccgaggcgggccggatcacaaggtcagggagttccgagaccaagcctgaccaaatatggatgaaacccc

SEQ ID NO: 4833 - DNA, 146 bp, Homo sapiens
  misc_feature 133, 141: n = A,T,C or G
aggccgaggtacgcgggggtcggcgccattttgtctcggcagcggtggccgtagctccatcgcattttatgtttctggcgagaagggaacggagttttcatcaggtagattggtttttgtgcggccgctctanaactagtnggatc

SEQ ID NO: 4834 - DNA, 393 bp, Homo sapiens
  misc_feature 208, 209, 220, 263, 264, 283, 294, 308, 325, 329, 332, 340: n = A,T,C or G
cccgcggtggcggccgcccgggcaggtacgcgggggttttacagtgtgttgctgttggaagccctattcctcactaccagtggttcaaaaatgaattaccattaacacatgagaccaaaaagctatacatggtgccttatgtggatttggaacaccaaggaacctactggtgtcatgtatataatgatcgagacagtcaagatagcanngaaggtagaantcatcataggaagaacagatgaggcagtggagtgcacttgaannatgaattaaataatcttgntcattgcttgntaatacaaggagcnaacaactggaccaaatntttngcnaaaagaanaacgtgtgccctttttgataggaaaatattgaatttaccggggaggcacccca

SEQ ID NO: 4835 - DNA, 424 bp, Homo sapiens
  misc_feature 234, 246, 254, 259, 273, 308, 319, 321, 323, 335, 355, 358,362, 373, 380, 401: n = A,T,C or G
gtggtaacaacgcagactacgcgggcagctagagcagtgatccatcatggagttattcgaatttatacaagccctggccggctgcagtggcacacacctgtaaccccaccactttgggaggccaaggcaggcagatcacttgagttcaggagtttgagaccagcctggccaacatgggtgaaaccccatctctactaaaaaatacaaaaattaagcttggggccaaggtggcangtgcctgcaatncccagctncttcnggggaaggcttgangcagggagaaatcactttgaacctggggtagggcnggattgttgcnantngaagcccaaagnatttgcaccccacttaccanttnccangcccttggggntaaccangaagccaaaggacttcttgtncttcaaaaaaaaaaaagggggat

SEQ ID NO: 4836 - DNA, 455 bp, Homo sapiens
actacttagggcgaattggagctccccgcggtggcggccgaggtaccgcgggagtttttgatttaagttgcagttatagccaatttaggctaatgcttggttttggagcttttatacacaacgtttttgttaggcatcacagttttgcaacctctgctccaaagagaaaaatagaatgagttttctttcttttttttttggagtcagagtctcgctctcttgtccaggctggagtgcaatagcgcgatctgggctcactgcaacctccgcctccctggttcaagcaattctcctgccttgcctcctgagtagctgggattacaggcgtgtgtcaccacgctcggctaatttttgtatttttagtagagacagggtttcaccatgtcaagctggtcttggactcctgacgtcgtgatccacccgccttggcctcccaaagtacctgcccggggccg

SEQ ID NO: 4837 - DNA, 454 bp, Homo sapiens
  misc_feature 147, 161, 187, 201, 217, 227, 233, 257, 266, 281, 289, 311,337, 352, 353, 378, 381, 396, 401, 407, 409, 431, 433, 435,440, 441: n = A,T,C or G
ccgggcaggtacctgcagtcagatgatgagatggagctggaggagacagaaccgcccctggagcctgaggatgccctatctgacgccgagtttgagggggagggtgactacgaggagggcatgtatgctgactggtggcaaggagcncggaattgccaagnggtgacgaggccgaggcttgagccanagcccttgaacttngtcattgagtaatggngtgactaccncctacnacccctcaaagtcttgggtaagcnctgggtgcncgatgggctcccacnccttcacncaagtcctgggggcaaggcaanacaaaggaaacttaattttaatttanaaaaaaccttaaagnnatgggggccccaagaggtgtccggntgngccttcacaactctngttanaattcncncagtccatttttttggtgggangngncccannggggtgggggttg

SEQ ID NO: 4838 - DNA, 180 bp, Homo sapiens
  misc_feature 32, 81, 90, 106, 110, 116, 126, 128, 136, 166, 172: n = A,T,C or G
aggtactttttttttttttttttttttttttnggaatgaacaaatatttatttatcttttataacaagtaaggcaatgttncttaaaggncaggacataacaaacnatanagaagnatttcgcgtntnacaaatgncatttctttcattctggttcgcgcaccaantgcctnttttgttc

SEQ ID NO: 4839 - DNA, 421 bp, Homo sapiens
ggagctccccgcggtggcggccgaggtacacaattaatttatttgtaaatactaaatgtttccttttttcattactcatatatttttttcttgccttactacactgcctagtaaaatatataaaatatgtgcttcacggaaaggggactttgattaaggacatgcctccttcagagctttttcttttccccctagtatttccaacttggggatgtttggcatcgacgaatttactgcagtgattaaccctcctcaggcctgcattttggcggttgggaggttccgacctgtgctgaagctcactgaggatgaagagggaaatgccaaactgcagcagcgccagctcataacagtcacaatgtcaagtgacagtcgagtggttgatgacgaactggcaaccaggtttcttaaaagttttaaa

SEQ ID NO: 4840 - DNA, 443 bp, Homo sapiens
  misc_feature 392: n = A,T,C or G
ctatagggcgaattggagctccccgcggtggcggccgaggtacatatgtgtcgcgaactcaaatcggcatttagatagatccagtggtttaaacggcacgtttttgcttataaaaaaagtgcaaaaaagatgtggtttacaagttaaagctacagaatccctttttgctgtaattgcaccagttttaaagcctctggacagagcagtatttcgtttaaaactttgtttttcttaaaagcttacagtgtttggctaattctcctcccctttttacaagacgggggccggagggtggacactggtggcaggttaagggatactgtcactttaagaagcctgcagattgaagtgtaaacatggagaaattaggggctgattttttaaactgtgtnagatattaaccagccgccctgttataaaatcaggaaaatccaaacagcgat

SEQ ID NO: 4841 - DNA, 336 bp, Homo sapiens
  misc_feature 308, 336: n = A,T,C or G
ccgggcaggtacctaacaaacccacaggtcctaaactaccaaacctgcattaaaaatttcggttggggcgacctcggagcagaacccaacctccgagcagtacggccatcttccagctgcttgcctgcaaagatgagcctctgctggtcggggggaatgccttccttatcctggatcttggccttcacattttcgatggtgtcactgggctccacttccagggtgatggtcttgccggtcagggtcttcacgaagatctgcataccacctctcagacgcaggaccaggtgcagggtcgactccttctnggatgttgtagtcagaaagagtaccctn

SEQ ID NO: 4842 - DNA, 438 bp, Homo sapiens
actacttagggcgaattggagctccccgcggtggcggccgcccgggcaggtacttttttttgtttgtttgtttttttgtttttgagacaaggtctcactccgttgctcaggctagaatgaagtggagcaatcacggctcactgcacctcagtctcctgggctcaagcaatcctcccgtgtaagctgggcctacaggcatgcaccactaatttgtttgacttttagtaaagacagggtttcaccacattgtgcaggttggtctcaaaactcctgagctcaagtgacccacctgcctaggcctcccaaagtgcagaaccagattcttaactgccacagactcttgtattatgtaatttatatacaggaacacaaagcacttgatttgcttaactgatgtacaagccaaatttgcgttctggttttggccataagctcctt

SEQ ID NO: 4843 - DNA, 384 bp, Homo sapiens
  misc_feature 93, 111, 136, 145, 146, 147, 151, 168, 179, 191, 201, 273,308, 309, 322, 358, 379: n = A,T,C or G
aaaatgataggaagcttttgccgttatctcaaacatgagccccagcaggaagaccatcgccacacaggagacgatgtccgcgtgattctgcangacgaattcgtggctcancactggggggctcttggtgcttttnttgcgaatnnncatngtggggccgccgcccgngcctgcaggtnccgcgtactcanattgcaccangctcttaaactgtcctagggattgggccaggaccagcagacctaatttgacaaagtcactggtcacctaaanctttactaggtggactttgatatgacaaacaaccnntccatcacaagtngtttgaagcctgtcagattctaacaaacaaaagctngaaattttctttcacccaaantttaa

SEQ ID NO: 4844 - DNA, 345 bp, Homo sapiens
  misc_feature 328: n = A,T,C or G
tagggcgaattggagctccccgcggtggcggccgcccgggcaggtacattaagaattttgtgggaactgacagaagaggtcttgctcatgtttgggtgggcatggggaaagaggcgtcagggaacacttcatttctactctgagactgaaaagacaagtatgagttacagagatgatggggaggatatagacacgtgtttcaggtatttgtaaatgctgaggagaaagagggtgattcattcaacaattcaggcttaagtatgagataaagacatagaaagaaaattaatgagtgctgaggaaataggaagggaccagaaaagtcatnttcaaattgcattttga

SEQ ID NO: 4845 - DNA, 434 bp, Homo sapiens
  misc_feature 2, 8, 224, 351, 359, 373, 411: n = A,T,C or G
gncaggtnctttcataattcagaagggaaaagtgaagtctcacattatgcctgcagaattttcttcctgccccttgaactctgatgaagaagtgaataaatggttgcatttttatgaaatgaaagctcctttggtttgtctaccaagtttttgtctccagagacccagggtttggatttgcgacttgggagcacactcattttttttagtcgtcatgggagaangggggacacctaccattatgacactacctccagatatagtgggaataatctttgggattacttctttacctggcagaagttttcttcttattccgcatttggatccaaacccaaaaaagaagaaccnccatttcnaatttggggccgangaatttaaaatccagctggaatacctttaattttaggnaaaaaaaggaaaatttattttaa

SEQ ID NO: 4846 - DNA, 386 bp, Homo sapiens
  misc_feature 170: n = A,T,C or G
ccgcggtggcggccgcccgggcaggtacgcgggatcacgacgcaggtctcgtgccaatcaaaacgtcaacgctgttcacagccattatacacgtgcccaagcaaatagtcccagaccagcaatgaactcccaagctgctgtacacggggaaagatgtcactgtcttgcanaacactgatggaaataacaatgaggcatgggctaaggatttgaagctggcagactttgcgctgctgtgcctcgatggcaaacggaagcctgtgactgaggctagaagctgccatcttgccatggccccgaatcatgcccgtggtgtctcggatggataaggtggaaccgcctgaaacaggttgctgcttccaccaacagggcttaaatttggggga

SEQ ID NO: 4847 - DNA, 420 bp, Homo sapiens
  misc_feature 7, 58, 82, 87, 103, 167, 182, 263, 271, 337, 350, 388: n = A,T,C or G
gcctctncgtttaatgacctggcagcttgtttctcagctgcagatttcttttgttagngtttctgccattgccagaggcatntctgntgaacctggcatctgntagtaaactttctccaaaacaaagctaatttaggttttgtagtatatgaaagcccttctagctntttccacttttgatnttatttcatccctaaattgccatcgtattgaggtcatttttaactatttttttcccaatgatttatttttcctagtgtatntttttttntcttggaatttgacctagggcatgtgtgcatgagttttactcgggacactttctattaataccccntaacttttccaantgtgttctgccctcttcccatcctcccacttcaacttnttggtctaagttgaatatgaactttcctttgc

SEQ ID NO: 4848 - DNA, 461 bp, Homo sapiens
  misc_feature 387, 414: n = A,T,C or G
cactacttagggcgaattggagctccccgcggtggcggccgaggtacttagggtaagcattaacaatattattcaaaatgttatatagagttcaactgtatacaatagagcatttattaaagtgtgtccaaagcgcttataaataaagcatcttcgaggcaggcggctcacttgaggttaggaggaaagcagactggccaacatggtgaaaccccgtctccactgaaaatacaaaaaaattagccaggcgtcatggcgcacctgtagtcccagctactggggaggctgagacacgagaatcgcttgaacctgggaggtggaggtttgcagtgagccaagattgcaccactgcactccagcctgggtgacagagtgggactctgtctnaaaaaaagaaagaaagaaagagaaatnaagcatcttatgtaggaaagtatgggagaaataaaaaaaatgaaagc

SEQ ID NO: 4849 - DNA, 437 bp, Homo sapiens
ccgcggtggcggccgcccgggcaggtacatgctaagacttcaccagtcaaagcgaactactatactcaattgatccaataacttgaccaacggaacaagttaccctagggataacagcgcaatcctattctagagtccatatcaacaatagggtttatgacctccgatgttggatcaaggacatcccgatggtgcagcccgctattaaaggttcgtttgttcaacgattaaagtcctacgtgatctgagttcagaccggagtaatccaggtcggtttctatctacttcaaattcctccctgtacacgacatctgacttgggaatgcgcaagcagtcgagagcttcgtagaactctcccagttgctccttggtcgtctctggcttgtcagcatagacagacagcccccagttcttctcatcgttcacgtcaaaagcaa

SEQ ID NO: 4850 - DNA, 155 bp, Homo sapiens
cactacttagggcgaattggagctccccgcggtggcggccgaggtacgcgggggtcggcgccattttgtctcggcagcggtggccgtagctccatcgcattttatgtttctggcgagaagggaacggagttttcatcaggtagattggtttttgt

SEQ ID NO: 4851 - DNA, 405 bp, Homo sapiens
tcactacttagggcgaattggagctccccgcggtggcggccgaggtacttgtatggttcacagagcagcagctatggcgtcacttggggagctgttagaaaagcagaatctgaggccctactctacacctactgaatcagagcatgtattttataagatccttaggtgattcacatgcaccgttacatttttaatgggttttaataaattatacttgagaaataataaactgcatatatttaaggtgtccagcttggctcagcctggtggttcacacctgtaattccaggattttgagacactgaggtgggaggattgcttgagtagctgagactacaggcgtatgtcacaccaggctaatttttgtatttttagtagaagacggcattttgcccatgttggcca

SEQ ID NO: 4852 - DNA, 144 bp, Homo sapiens
  misc_feature 39, 41, 59, 101: n = A,T,C or G
gttccatgaggctctaaatgaattgactctgcccatcananatctatgacactctcatntcttgcagcaccgctccccgctccagggcgacaattcaatcnttaaaccccacaacccacggccggtctagaactaagtgggatc

SEQ ID NO: 4853 - DNA, 406 bp, Homo sapiens
ccgcggtggcggccgaggtacacagtatcaatatgatttatcactgttgatgttaaccttgatctggcttggtagtatttgtcaggcttctccactgggaagttatttggttttgtccttttctgtattgtattcttgaaagaaagtcactgtgtgcagcccacacttaaagtaggttgtatattgtgctccccctcctttagggtggaaaatctataaattatttggaattcttctgcataggacatttgtttcttcagtttcatttatttattcagtcatttatatgagtgcgtagtcataaatatttattttatactttaacttagaatctaatggtacattttattacccttcagatctttgggaatacttaaaaatcctaaccattaagccttttcttttc

SEQ ID NO: 4854 - DNA, 417 bp, Homo sapiens
aattggagctccccgcggtggcggccgcccgggcaggtacgcgggggtctgccgcggtggccgggtgccgatttgacaagatcaaagctgcaggaaaatggacagtgaggttcagagagatggaaggatcttggatttgattgatgatgcttggcgagaagacaagctgccttatgaggattgtcgcaataccacttgaatgagcttcctgaacctgaacaagacaatggtggcaccacagaatctgtcaaagaacaagaaatgaagtggacagacttagccttacagtactcgtcttggtgagagcgtgagctgctgagatttgggagcctgcgctaggcccgcttggagttctgagccgatggaagagttcactcttgtttgcacccgcggtgatgcgtgcttttcgcaagaaca

SEQ ID NO: 4855 - DNA, 415 bp, Homo sapiens
  misc_feature 17, 19, 22, 23, 26, 31, 33, 368, 386: n = A,T,C or G
ggagtcacactataggncnatnnggngaatngnacgctcaccgcggtggcggccgcccgggcaggtacgcggggaggcctttccttacctccctccatgctgtccacttcctctgtaaagctctcaaccctgtccccttccccctctctcctgggaaagagccctcccatgcctagctgctgctcttagggaccctgtggctaggtgcgcggatggaaatccaggtatgcccaaccccctcccggtggagtaggggttgggtggttatggaatgacggaaagaggcaaaggagtgtataattggagggtcagacaaggctgggagttgaggtccctcctaccccttacctgagccctcaggtccttcnaatgatcttgaagtaatnggctccaagtcttttgacctggggggtcc

SEQ ID NO: 4856 - DNA, 442 bp, Homo sapiens
  misc_feature 190: n = A,T,C or G
tcactacttagggcgaattggagctccccgcggtggcggccgcccgggcaggacgcggggtcaagcacctgtctgccagccagaaggcactgaaggagaaggagaaggcctcctggagcagcctctccatggatgagaaagtcgagttgtatcgcattaagttcaaggagagctttgctgagatgaacanggggctcgaacgagtggaagacggttgtgggcggtgccatgttcttcatcggtttcaccgcgctcgttatcatgtggcagaagcactatgtgtacgcgggcttatgagctgtgacatcgtaaaccatgcacaagggctcttccagggttaaacaaaatgcataacaatcaaatacagcaacatctgccaaaagaaagtaacaccaataaattgcaagtgattgtttaactatctaatgtgggtataatcagc

SEQ ID NO: 4857 - DNA, 408 bp, Homo sapiens
  misc_feature 1: n = A,T,C or G
ntgggtgcagccgagcggtgtggagcggagagaatactcgaagggctctcctgatactagcagttttacgatttaaaacttcgccagaatttcgacagggtctcactgtattgcccaggttggtctcgaactcctggcttcaagcgattctcccacctcagcctcccaaagtgctgggattacaggcgtgagccaccacgcctggcctcactcaaacagtaaacgaggtatgtgacgcattcccagactcttcagccaactgagcatcagcttcttcacagcaattgggtcctgattaatgtcctcccaagacagacttcatttggatccacgatcaagaggactctgccaggtttttctgacccctctacattgctattaaagtgccaaggccttaagacttgggta

SEQ ID NO: 4858 - DNA, 413 bp, Homo sapiens
ccgcggtggcggccgcccgggcaggtacaggtcttgcctaaaatcaagaagagagcaggagaactgagaaactcctccccttcccccaccagaagccttgtgtctagtaacaggtaacaacagccatctactgttggagaaagaacaaaagcatggaaaggatggagcagggaaagagggaaaaaacaacaaccactctccagcactccaggtcttaacattaagcacaaaataggagcagcctagcccaccaccggagggatttcaagtctgttgcacactgaaaataaccatggctacaacaaaacccaattcaccacaaatgctgactaaattgactaatagccccatgctaatagcttgatggaaggatagatattcccactttgaacatttgcttcagtgtctacttt

SEQ ID NO: 4859 - DNA, 452 bp, Homo sapiens
  misc_feature 6, 359, 421: n = A,T,C or G
tcactncttagggcgaattggagctccccgcggtggcggccgcccgggcaggtacggaatagaatggaatggatcgaattgtaatggaatggaattgaatggaatggaatggaatggaatggaatggaatcaacgtgagtgcaggggaatgtaatggaacggaatgcaatggaatggaatcatccggaatggaatggaatggaatggaatggaatggtatcaacccgagtgcaatggaatggagtggaatggaatggaatggaatggaatggaatggaacaacccgaatggaatggaatgtaatggagagtaagggagttgaatagaatcaatccaaacgtaatggaatggaatgcaanggaatggaatggaatggaatggaatggaatgcaatggaatggaatcaacccgagtgcaatcnaatggaatctaatggaacggaacggagtgga

SEQ ID NO: 4860 - DNA, 371 bp, Homo sapiens
cctatcactacttagggcgaattggagctccccgcggtggcggccgcccgggcaggtacgcgggggatttggcagcagcggaagaaggagaccggagggtgtgtgttgggcaaagccggaggcagaggaggacgattgttttacggatcccgtgatcggcccgtccttctcccctttccccccctccctaccgcccctgtcccgccggggagcggcggcggccttggactttgctgtctttcctcgcggagacagatttcaacactacacttgcacaatgtctttgaaaccaagagtagtagattttgatgaaacatggaacaaacttttgacgacaataaaagccgtggtcatgttggaataccgtcgaa

SEQ ID NO: 4861 - DNA, 173 bp, Homo sapiens
  misc_feature 150: n = A,T,C or G
tatcactacttagggcgaattggagctccccgcggtggcggccgcccgggcaggtacttttttttttttttttttttttgattaatgaaaacattcttggcaaatgctttcgctctggtccgtcttgcgccggtccaagaatttcacctntagcggcgcaatacgaatgcccc

SEQ ID NO: 4862 - DNA, 469 bp, Homo sapiens
cactacttagggcgaattggagctccccgcggtggcggccgcccgggcaggtacttatttttttgagacagtctcactctgtcacccaggctggagtgcagtggtgcaaccttgactcactacaacctcctcctcctgggctcaagcgattctcctgcttcagctttccaagtatttgggaccacaggcgcacaccacaggcctggctaatgtttttgttttgtttttggtagagacggggtttcaccatgttgccaggctggtctcgaactcctgagctcaagtgattcacccaccttggcctcacaaagtgtcaggcttacaggcgtgagccactgcgcccggctcacagggtaaggcttctgtctggtgtgttgtattacggattttgcttaataggcacagtgaggcattaaaaagaaaattcagtatgcctgtagaaaggataatccttgtttaaagtctccaa

SEQ ID NO: 4863 - DNA, 449 bp, Homo sapiens
  misc_feature 158, 182, 213, 220, 221, 226, 231, 236, 239, 249, 250, 253,313, 322, 357, 413: n = A,T,C or G
ccgcggtggcggccgaggtacgggttgcccctggcttggcactgcaggacgtgtctcgttttatctttccatttcaagtgctgggggcatgtggctcggtcaattttgggaccatctgtggaaccaccatgtgtgatcagacacccaacacacccgangcacagtggtgcagaaggagcgtntaatctttccagggcaggggtggagggaatnaaagggnnagggngaccnactanaanaggaacttcnnagnttggaacgctactggttcctggtgcaagaaactcgccgtccacctcgagaagttggcacntgcaaaaanaagctgcgtccgtcgtcactctcggtagcatttancttaaagttgagcttggcttgcccccggggcccgcgggccgctctagaactagttngatcccccggggctgcaggaatttcgatatcaagct

SEQ ID NO: 4864 - DNA, 311 bp, Homo sapiens
  misc_feature 140, 188, 212, 233, 274, 278: n = A,T,C or G
actactatcgggcgaattggagctccccgcggtggcggccgaggtactttttttttttttttttttttacaaggttttttcctagtgtccaaagagctgttcctctttggactaacagttaaatttacaaggggatttanagggttctgtgggcaaatttaaagttgaactaagattctacccgcgtncttaaaccagacagcagggttcanaggtggcacaccgggacaaanctgaggccctgcacctcaacagctgactgccaggtgcctgngggngaactgaggggagtatagggagagggcaggttg

SEQ ID NO: 4865 - DNA, 210 bp, Homo sapiens
  misc_feature 88, 185, 186, 190: n = A,T,C or G
ccgcggtggcggccgcccgggcaggtacttcttttttttttttttttttttttttcctgattaaatgttctttatttgatgcttttgngtgcacaacactataaggagttgcccaattcaccaagtcagcccgttcacacccttagttaaggtggccattaaggggccagggggttggcaatcannaaanctgccttcctgcctaacttt

SEQ ID NO: 4866 - DNA, 232 bp, Homo sapiens
  misc_feature 128, 137, 158, 189: n = A,T,C or G
tatcactacttagggcgaattggagctccccgcggtggcggccgaggtacgcgggtatctggggatacccaaaaagcaaagcagttcctgccttttcttcagcgggcaggtcgttctgaagctgtggnggaatacgncttcagtggttctcgtctcanactctatttgccaaaggaaacttgccttatnacctttattgctttgcaggcattgaatgccccaggaggagccc

SEQ ID NO: 4867 - DNA, 452 bp, Homo sapiens
  misc_feature 176, 335, 351, 417: n = A,T,C or G
aattggagctccccgcggtggcggccgcccgggcaggtactttgggaggctgaggcaggcagattatgaggtccagatttgaagaccagtctgaccaacatggtgacaacccatctctactaaaaatacaaaaaaaaatagccagtcgtgttggcaggcgcctgtaatcccagctnctagggaggctgaagcaaaagaaacacttgaacctgggaagcagaggttgcagtgagccaagattgcaccactgcactccaacctgggcgacagagcaagactccatctcaaaaaaaaagaaaagaaaaaatggcactacataatgtttctaatgctgnttttcttatatgattntcttgatggatttgcttcacaaacttaggagctaacatctttggaatggctagtctcctatagaanaacttcttttactttgcttttcatacatttttata

SEQ ID NO: 4868 - DNA, 207 bp, Homo sapiens
  misc_feature 48, 82, 85, 96, 98, 110, 115, 174, 185, 187, 188, 206: n = A,T,C or G
accgcggtggcggccgaggtacaggttcaatcagctgtttttttgatntcaagagttacacttcttcgaaacctctgcacanagntcttcctcagnancaccacactgcnatgtnaataacttttctagcagccgaatgaactgcatataatctagaatctgacagatttttcncacttaacatntnnttttctatggtttccctnc

SEQ ID NO: 4869 - DNA, 384 bp, Homo sapiens
ctatagggcgaattggagctccccgcggtggcggccgcccgggcaggtacaaactgaggctcagagaggttaaggcactagaccaagatcacacagctgtttagtgcagagccaacactcaacccaggtctctgctccctcattctcttcccatttcttgacaccaagaatacgaaagaggttttctacttccctcttccctacccaaacaggattttcttttcactggtccatccacgcacaacctagtcagttccgaacaggaaaaggaacaatttatcaagttaattgtcacaatcccaggtgtggtgcagtgggctggggtaaaacattttgctgtatctttcatgatgttcctgatttctctcttttttttttcttttt

SEQ ID NO: 4870 - DNA, 407 bp, Homo sapiens
  misc_feature 261: n = A,T,C or G
cactacttagggcgaattggagctccccgcggtggcggccgaggtacgcggggacacaccaggattcgagggccacaccgcctcagccagccccggcaagggcctatcaggggtgggtcggggcatccgagcgggtttgacggaaggagcggcggcgacggaggaggaggatggaggcggtggtgttcgtcttctctctcctcgattgttgcgcgctcatcttcctctcggtctacttcataattacattgtctgatttanaatgtgattacattaatgctagatcatgttgctcaaaattaaacaagtgggtaattccagaattgattggccataccattgtcactgtattactgctcatgtcattgcactggttcatcttccttctcaacttacctgttgccact

SEQ ID NO: 4871 - DNA, 139 bp, Homo sapiens
tcatacttagggcgaattggagctccccgcggtggcggccgaggtacctgcctcacagtgcagggcggtatgccgccaaacgcttccgcaaagctcagtgtcccattgtggagcgcctcactaactccatgatgatgca

SEQ ID NO: 4872 - DNA, 447 bp, Homo sapiens
  misc_feature 381, 395, 405: n = A,T,C or G
actacttagggcgaattggagctccccgcggtggcggccgcccgggcaggtacgcggggggaagtggtttgcgttttcaagatggcgactccctatgttactgacgagaccggcggggtgggaaccgccaaacctctcccttctttttgacttcacccttggataccatcaaggccagaggatggaaccaagataacataaaataggtgctcctttgtgataatgggctatttgtatctctgagggcttccacacaggatggccattcaagaagcttctgctctgcctttcattacagtctatctttagtcctcctaaaccttcagctataatctctatgcaatcaacttaaatatatgtttgtagtattgtccctttctnccaaattccatgtnaaacactttncctgaattgaattgtttccaccaaaagttgtttttcccctgt

SEQ ID NO: 4873 - DNA, 432 bp, Homo sapiens
ctatagggcgaattggagctccccgcggtggcggccgcccgggcaggtacagcctgcagaactgccccactcacctcctccaactcctctggggaaacccaagccctgcagctcatggaacagaagaagtggaaccgacgtttctggaacaggactatctgagagcggttcttcctggccctcgggttcatgcaacggcgtaactggaaccgacgcttacggaccaagggaagtggaagatgttttgtttggagtcctcgtcgtcctcctccatgtcattggccaggtagctgaggacaggaatcaggttgctgctcaggggcaccaccaggagagacctccggctgaggtcagcttcccagagaggaagagtaaagaggacaaataggtgaaggaacaaatgaaaggctgggaatcccacttcccccgctg

SEQ ID NO: 4874 - DNA, 447 bp, Homo sapiens
tcatacttagggcaattggagctccccgcgggggcggccgcccgggcaggtacaccgactacggcggactaatcttcaactcctacatacttcccccattattcctagaaccaggcgacctgcgactccttgacgttgacaatcgagtagtacaggtaagccctggctgcctccacccactcccagggagaccaaaagccttcatacatctcaagttgggggacaaaaaagggggaagggggggcacgaaggctcatcattcaaaataaaacaaaataaaaaagtattaaggcgaagattaaaaaaattttgcattacataatttacacgaaagcaatgctatcacctcccctgtgtgggacttgggaggagggactgggccattctccttagagaggaagttgggggtggcttttaggatggcaaggggacttcctgtaacaaccg

SEQ ID NO: 4875 - DNA, 422 bp, Homo sapiens
ccgcggtggcggccgaggtacctgtggcagcccttcttcagacacggctacttctgcttccacgaggctgctgaccagaagaggtttagtgccctcctgagtgactgcgtcaggcatctcaatcatgattacatgaagcagatgacatttgaagcccaagcctttttagaagctgtgcaattcttccgacaggagaagggtcactatggttcctgggaaatgatcactggggatgaaatccagatcctgagtaacctggtgatggaggagctcctgcccactcttcagacagacctgctgcctaagatgaaggggaagaagaatgacagaaagagggacgtggcttggtctcctcgaggaggcctacaccctggttcaagcatcaagtttcagaaggatttaaaggtgccttgaagggaggg

SEQ ID NO: 4876 - DNA, 302 bp, Homo sapiens
  misc_feature 275, 287, 288, 290, 293, 296: n = A,T,C or G
gctcccgggtggcggccgggggcattcgtattgcgccgctagaggtgaaattcttggaccggcgcaagacggaccagagcgaaagcatttgccaagaatgttttcattaatcaagaacgaaagtcggaggttcgaagacgatcagatacccgtcgtagttccgaccataaacgatgccgaccggcgatgctggcggcgttattcccatgacccgccgggcagcttccgggaaaccaaagtctttgggttccggggggagtatggttgcaaaaaanaaaataaaaaannanacnaangtacct

SEQ ID NO: 4877 - DNA, 251 bp, Homo sapiens
  misc_feature 32, 33, 46, 54, 69, 109, 110, 129, 144, 145, 151, 155, 168,198: n = A,T,C or G
gctccccgcggtggcggccgaggtactgcctnntggtaagccacanaccttttnatcttgtaatatcanagtcttggaattctttatcttccctactctatatctacannacagtagcactgacttatnagcatgcagagcttnntaattntatncttgggccggatncagaaaagggggttcctcatgctgggatcngaacaacccagcacaggcatgtctggggagcaaggcatgagcctgcatgtgga

SEQ ID NO: 4878 - DNA, 304 bp, Homo sapiens
  misc_feature 87, 167, 174, 195, 211, 227, 228, 251, 284, 292: n = A,T,C or G
ccgggcaggtacgcgggggaagagtgagggttccaacttttctgcttatctgggaggtgttgggcgcggacagtcgagatgtcaganaaaaagcagccggtagacttaggtctgttagaggaagacgacgagtttgaagagttccctgccgaagactgggctggctnagatganagatgaagatgcacatggtcntgggaggataatttgngatgatgacaattgtnnaggatgactttctctaatcagtntacgagctgaactagagaaacatggtttataanatggaggncttcgtagcatt

SEQ ID NO: 4879 - DNA, 350 bp, Homo sapiens
aggtactttgctgggcactgttctagaagctgggaaatacaagtgatcaaaatataacctaccccacaactcccaaatccagctcgaaaaaacttttagtgtggaggatgggatagtaaagataataagccaatgaataaggaaaacatagcatttcagatctttatattatgataaaaaaaaaagtcctaaattggaacaggaaacacagatggggtggctcaattacaagacagcagttaaagaaggcctcactgacaagatgagttcccagtgtcaggaccccaatatccttccttacaaagagtggggatcccaccctagaaaaggaatagcagttcagccacccc

SEQ ID NO: 4880 - DNA, 441 bp, Homo sapiens
  misc_feature 216, 327, 335, 336, 411: n = A,T,C or G
ctacttagggcgaattggagctccccgcggtggcggccgcccgggcaggtacctaggtttccttcaagacatcgtcttttgaatgagaactttcctgggttttagaggagggtggacattgtttattgatgcctcctgtccattaccgatgtttctcctgattgttattcatatgctcaccacccctccatggagcatccatggcctgtgacaganctctggggactgatatccttccactgactttggcgctggtgagagccctggtcatgtgattcagcttggccttaacccgacccagttgcacatattcctcaggccctttanagttgaanntcgagacctctctgagaacgcttgccagcccatgctcttctaaggctggagcaaacttcctccatctatttccanaacagaggggactgcaggggtttggactca

SEQ ID NO: 4881 - DNA, 430 bp, Homo sapiens
  misc_feature 113, 118, 123, 137, 141, 142, 147, 151, 156, 161, 184, 189,191, 205, 223, 224, 231, 244, 245, 247, 248, 249, 261, 263,266, 268, 269, 277, 283, 305, 310, 326, 327, 328, 329, 341,355, 358, 359, 361, 371, 389, 395, 407, 410, 412, 413: n = A,T,C or G
  misc_feature 418: n = A,T,C or G
tacttagggcgaattggagctccccgcggtggcggccgaggtacttttttttttttttttttttttttttttttctttttttttttttttttttttttttttttttttttttnggctntaaanggggtaaagggggngctnnagggnaaanacggnccctntttaaaaaatttttaggggaatnaattntnggacaatgggcatnaaactggggtttgctccnnaaatttnaaaacattgaccnnannntacccccggtcntntancnngaaaaagnggtttngttaaaacctccgggaatttgnatttnttttaaaacctacccnnnnacctgcccgggnggccgctttaaaanatnntnggatcccccnggctgcaggaattttaanatcaanctttttttgatnccntnnacctnaagggggggggc

SEQ ID NO: 4882 - DNA, 445 bp, Homo sapiens
actacttagggcgaattggagctccccgcggtggcggccgcccgggcaggtacagtagtgcactcttggctcactgtagcctcgacctccggggctcaagtgatcctcctgccttagccccacaagtagtgggactataggcacacaccaccatgcccatctaagtttttgtattttatgtagagacaaggtttcaccatgttgcccaggctgatcttgacctcctgagctcaagtgatctgcccacctcggactcccaaaatgctgggattataggcgtaaaccaccatgcctggccttaaatcaactttagagtcaacatctcttatcactggagcttctggagaaactccatcacgtggtgctctctttcctggatgtgttgtgcccaaatagcttgttctcatcagatgacttatttgctatggatatattatacttcaag

SEQ ID NO: 4883 - DNA, 449 bp, Homo sapiens
ctacttagggcgaattggagctccccgcggtggcggccgaggtaccctgagggctaagtgcaacaaagagagtgatggggtcatccttcatacattctgaagaccgccgcactcgcatccatcgaggcacgattgtccctccacgctggaacacagggatactgcttagagttacaggcaggtacaattcaggcaattttgttttttcacttgggttcagattgcaaattcattgctgtgagaaaaggatggaggcaaattttagcagcaacctccacctgactgcttgactggagtgctctgaattttaacattggacttctcagcaccaccagctgttgctccgggacccattcgctttttaatctcagctgccatcgtcatgaaaggactgttctacattcgttgcatttcttagcactggtttccaaaaaaacgggaattccaag

SEQ ID NO: 4884 - DNA, 395 bp, Homo sapiens
  misc_feature 14, 24, 42, 45, 92, 185: n = A,T,C or G
gtcccggccgaggnactacctacnttgaggttatgggttttntcnttctccctttttttcacctctttctttcccaattcaaaacagccaantgagccctgttctggtattttgaatcattagagaaaagaaagggagtggctgttttgagttgtcctttctttgcagaaaggagaaaatgtgantatgttttttttttttaccagcctacttctaagtgtcactgcctggtttttctctttttcaaggattagaactaagaggacacaccagcatcggagtgtattaagcccctgaaacacatggtagctaggggctgaacacaggaaccgtatgacagcagcacaaacccccaaaggatgttcctgccttgggggggcccctgagccccttgg

SEQ ID NO: 4885 - DNA, 153 bp, Homo sapiens
  misc_feature 54, 60: n = A,T,C or G
cttagggcgaattggagctccccgcggtggcggccgaggtacgcggggagtcantgtcangcccgaaggctgaaggaaaaagagcaacagatccagggagcattcacctgccctgtctccaaacagagccaccaaggaggagcaggggagcga

SEQ ID NO: 4886 - DNA, 338 bp, Homo sapiens
  misc_feature 247: n = A,T,C or G
cttagggcgaattggagctccccgcggtggcggccgagtagcatgccaggaaggagagactgggatggtttttttatctgttgctttcttaaatcaagggccgccgggccggagatggatggagggaccggggatttgggaactcgaaaacgagctgagagaagggagcctgtggaaatagactggagtctgggtagtgtcgtttcctagagaatggtctcgaagtaacttctcggtaaagtcttcncggaatttccagaccacacttgcccactgggaggcttttaggacccgagacgtgtgcaggcttttccagccaaaatgaagtttaatccctt

SEQ ID NO: 4887 - DNA, 391 bp, Homo sapiens
  misc_feature 23, 131, 171, 177, 198, 200, 232, 258, 263, 266, 304, 306,317, 322, 341, 356, 362, 383: n = A,T,C or G
tccccgcggtggcggccgaggtncattgagaatgagaagctcatctcaggaaagcgccaggagctggtcaccaagatcgaccacatcctggatgccctgtagcccctgcccgcatcctccagggggcccanggtgcctgcactttgctgtggcaggcagattgggtggtantgggangttgttgcattggaggccaantngaaagctcgacatcttgtaaaaggccttcaangaagagaaaaccaggccctgcgtcangcatntgngagtttgccgtttgtccttaactttcttttttttattngnttaaaaaaaanaaaantcctaaaaaaactttccanctaaaaacaaaacanctttgntgtttttgaacaaaagggaanttttttca

SEQ ID NO: 4888 - DNA, 359 bp, Homo sapiens
  misc_feature 183, 283, 285, 294, 340: n = A,T,C or G
gcaacatgtaaaattaaacttaagtatattttaatttacctggtgtttccaaaacctattatttcaatttataataaaaaaaattgaggtattttacattttatgttgctaagtccttaatcttgttttttccatttatagcacatcttaattctttgtagctacatttcaagtattcagtanccacatatgactgttgttgactgcattggacggtgcaagtctagaatatagtaggggctcagtagatgtttgttgaatgaatgaaggagaggaagatgantntggttgttnaaggttgattgtagaatcgaggaagggttttgttctcacaagttgnggcaggagtataatttttt

SEQ ID NO: 4889 - DNA, 297 bp, Homo sapiens
  misc_feature 1, 14, 35, 48, 57, 62, 79, 83, 86, 115, 117, 122, 124, 131,142, 143, 171, 181, 187, 197, 201, 209, 211, 212, 221, 230,234, 238, 251, 268, 287: n = A,T,C or G
ngcatcatcatggngttaggtgaggcgctccacantggggacactttncctttggcngaaanccgttttgggcgggcantacncgnccctgcacttgttgaaggcaaagtacctnangcccngntcctaanaaacttagtgnnaatccccccgggtcttgtcaccggaaanttcctattantcaaancctttaatcngaanaccccgcncnnaaccctttngagaggggngggngcancccgggttatccncaagccttttttttggnatcccccctttttatgctngaaggggggt

SEQ ID NO: 4890 - DNA, 197 bp, Homo sapiens
  misc_feature 197: n = A,T,C or G
aacactacttagggcgaattggagctccccgcggtggcggccgcccgggcaggtactgtgccctcttctggctcttgaggctctggagtcccaattgtctgtgttagtcagtgaccaggttccagggaaaatgatgtcatgtggtggtccaacttactggaaccaaagagacagtacctcggccgctctagaactan

SEQ ID NO: 4891 - DNA, 436 bp, Homo sapiens
  misc_feature 260, 423: n = A,T,C or G
actacttagggcgaattggagctccccgcggtggcggccgcccgggcaggtactccagcccggcactccagcctggcgacaagagtgagactccacctcaaaaaaaaaaaagaatccaatactgcccaaggataggtattttatagatgggcaactggctgaaaggttaattctctagggctagtagaactggatcccaacaccaaactcttaattagacctaggcctcagctgcactgcccgaaaagcatttgggcagnaccctgagcagaatactggtctcaggccaagcccaatatagccattaaagatgacctacagtgcttgtgtaccagtgaacaaaggcacgcttggcatacatcaggtcaaacttgtggttccaggccgagcccaggcctcagcaatggctgtggtgttgctcancatgcacacagct

SEQ ID NO: 4892 - DNA, 450 bp, Homo sapiens
ctatagggcgaattggagctccccgcggtggcggccgaggtactttttttttttttttttgctagctatttaatctaggaaatacagctcagaaaaaaaatgcagtcataaaacctgttggtataaagataagcagtttatttaatatctaattaaatgtggtcaccagagaaatcacagcttatgaaactttatcagaaaaagattaatccatttcaggcttaacccaaatgtcataagagaactcatgaatttagataggaatccacttattatccaaagacgttttcatatcaagttaggtgagcctatattactagctatatttatacttacttcaatcaaatttatatactttgtagctatcactgatgtggggcacaattatcgaaccagaataagataatagggagcctttctgtctttatcaaaaatttctagaatgttcta

SEQ ID NO: 4893 - DNA, 203 bp, Homo sapiens
  misc_feature 27, 29, 52, 104, 105, 111, 112, 149, 161, 167, 171, 179,186, 188, 190, 200: n = A,T,C or G
cacacaacattactgagcccgggaagncntataagtggtaaagccctggggntgcccttaattgagatgaagcctaaacttcacattaaattgccgttgccgcnncactgnnccgctttttccagatcggggaaaacgctggtcgatgnccaagtcatgcnatttanatgnaatcgtgncaaacgncncnggggggaagnagg

SEQ ID NO: 4894 - DNA, 147 bp, Homo sapiens
  misc_feature 36, 57, 58, 122: n = A,T,C or G
cactatagggccgaattggtagctccactcgcggtnggcggcccaggtacaagccannagcaacccctggtgcgactgaaaggcggtgcctacattaggggagggctcgcgtggaggtgctnaaaaatggagagtagggggaccgtt

SEQ ID NO: 4895 - DNA, 157 bp, Homo sapiens
  misc_feature 64, 79, 107, 111, 140, 142, 144: n = A,T,C or G
aggcggccgcccgggcaggtacgcgggtattccatctgtggatagaacccctggcagtgttgtnagctcaacctggtgngttcagattctgtcctgaggcttcttgntctnattcattttaagtgctactgcctgcacantntnctacactgtcaag

SEQ ID NO: 4896 - DNA, 142 bp, Homo sapiens
  misc_feature 34, 41, 43, 60, 65, 110, 124: n = A,T,C or G
cactatagggcgaattggtagctccaccggcggntggccgncngtcccgggcagggtccnctgtnttggggcttgttttccctacctttaccccaaacccgggttttaangtgtcattaccaanttctaaagaaattaaagt

SEQ ID NO: 4897 - DNA, 439 bp, Homo sapiens
  misc_feature 26, 41, 57, 115, 128, 161, 163, 165, 170, 171, 174, 197,204, 211, 224, 225, 232, 233, 257, 267, 269, 286, 294, 299,306, 332, 336, 349, 362, 380, 382, 391, 402, 404, 407, 421,423: n = A,T,C or G
gggccgaggaactaattatttttttnttttttttttgggtnctataaattggaaagngaagggctcggactgaaataaatacatttattctgagtaatgacccttttgggagcantgtccgtcaactntgcttcgagagcgtctccaacgtgagccagcancncnctgtnnttngcgccctttcgccgaaggccggnaacccancaacccngggtccctctcanncaggtannggccggctttttttatcccttgtngttcttggtngnaaagggggaaaagttangacccaanggttngcgggtncaaccttggtttttcctataaaaatngggnaaggcccgggaancaaaaattggaanttggccccttctttttcntnccttgtaancaatgtaaaananaanatttgttgccccgngnctttataaaaccttta

SEQ ID NO: 4898 - DNA, 523 bp, Homo sapiens
  misc_feature 15, 32, 151, 193, 195, 199, 214, 216, 225, 237, 254, 264,270, 285, 289, 291, 293, 296, 306, 315, 319, 320, 328, 341,343, 345, 347, 365, 377, 386, 392, 394, 397, 407, 408, 410,429, 434, 436, 443, 452, 462, 470, 481, 491, 493, 496: n = A,T,C or G
aggtacgcggggctnatgccattttcagcctnagcacgcctgcacccaggcgctcattaaaacagcatgttgctccccactgcctcgtgttgcctgttggcgcgctgtcggggttcagaaccgatacaagaaaccttccacctaccctggntgcttttgggcctttaattcttattaaagccggggccaagancnattnctggcccccttaaantngctttggcntgtctcctaaanggacctggaaaattggnttcccttggnaataangttttttggccttgnatcnancnatnccttctcaantttaattgnaacnnaaaaaaangcctattttggtngncncngtatatccaagttaatgnaaaaaaaaaaanaattggtcnaatttngnttncaaaacctgnngnaaaaatccctttatttaantgggntntttggtnttttgtatncttattaccnttttatanaaggtctaaanctaattttgncnccnttttaacattttggtatttaattaaaa

SEQ ID NO: 4899 - DNA, 495 bp, Homo sapiens
  misc_feature 24, 238, 245, 391: n = A,T,C or G
ctacttagggcgaattggagctcnccgcggtggcggccgcccgggcaggacgcggggcctctttccgccatctttccgcgccggtgagtagcactctctgagagctccaatttcatccgtctgccatcggcgccatcctgcaatctaagccacaatggtgcgcatgaatgtcctggcagatgctctcaagagtatcaacaatgccgaaaagagaggcaaacgcccaggtgctttattnaggccgngcttccaaaagtcatcgtccggttttctcacttgtgatgaatgaaagcatgggttacattgggccgaaatttgaaatcattgatgaccacagagctgggaaaattgttggtgaaacctcacaggcaggctaaacaagtgtggggtngatcagccccagatttgacgtgcaaactcaaagacctggaaaaatggcagaaataatctgcttccatccccgccagttttgggtttcattgtacgccggggctt

SEQ ID NO: 4900 - DNA, 410 bp, Homo sapiens
  misc_feature 22, 219, 222, 223, 231: n = A,T,C or G
acttagggcgaattggagctcnccgcggtggcggccgtgcgtttgtggccgtccggcctccctgacatgcagccctctggaccccgaggttggaccctactgtgacacacctaccatgcggacactcttcaacctcctctggcttgccctggcctgcagccctgttcacactaccctgtcaaagtcagatgccaaaaaagccgcctcaaaagacgcttnttnnagaaaaantaatttttcagataagccggtgccaagaaccggggtttggtgggtgacgggaccttaaaagcttgagaagtgtggttcttgagcatcgcagctacttgctcggcaaaggcccgggacagacactttgctggggatgtacctcggccgctctagaactagttggatcccccgggctgcag

SEQ ID NO: 4901 - DNA, 464 bp, Homo sapiens
  misc_feature 205, 221, 233, 237, 291, 293, 315, 334, 335, 354, 355, 395,396, 397, 447: n = A,T,C or G
aattggagctccccgcggtggcggccgaggtacctattctttgcagtctcaggaattgttgacatgctcacctatctggtcagccacgttcccttgggggtggacagactggttatggctgtggcagtattcatggaaggtttcctcttctactaccacgtccacaaccggcctccgctggaccagcacatccactcactcctgntggaatgcccttggtncggaaggggggngttnagtattctccctaagaagggtggatccttcccggggaacccaccatttggtgcntnggaaactttttcccgaaaccangtctcatcatttctttcannggaacctggttcttggcannattgggtttagtgctgtttcccaccttttggaacaccctnnnttgggaccagaaaggatgatgccaacctcatgttcatcaccatgtgcttntgctggcactacctggc

SEQ ID NO: 4902 - DNA, 350 bp, Homo sapiens
  misc_feature 217, 218, 224, 226, 231, 232, 234, 236, 245, 321: n = A,T,C or G
agggcgaattggagctccccgcggtggcggccgaggtaccagacccgccagaaccagtgcttctataactccagttacctgaatgtccagcgggagaatgggaccgtctccagatacgagggaggccgagaacatgttgctcacctgctgttccttagggacaccaagaccttgatgtttggttcctacctggacgatgagaaaaactgggggcctnncttttntnttctnncnangcccataanacgaacccaagggagccaacttgggaagagttcctacgaaagcttctcgaactgcttgtgcattcccaggtcagantgttcatgtacctgcccgggccggccgct

SEQ ID NO: 4903 - DNA, 73 bp, Homo sapiens
  misc_feature 10, 11, 18, 58: n = A,T,C or G
cgaggtactnnttatttnttttttttctctctccctcccccacaccgtagcgggcgcncgagcgggccgggcg

SEQ ID NO: 4904 - DNA, 453 bp, Homo sapiens
  misc_feature 1, 201, 205, 207, 210, 396, 433, 442: n = A,T,C or G
nactcctatagggcgaattggagctccccgcggtggcggccgaggtacttttttttttttttttttttttttttgccacacagactagggaataagagaacaaacagtaataactgagtagtgcaagattatattctttgagtctaaaataaattaaataacttccaaaaaaagtaagtgcttttgtttggaaggtgatancatnangantataaaccaaactgcttcactgatataactcccaccaaatatcttcatggggtaggttactgatttttatcttcctgaataaggaaacaaaggtcagtgacagataccagtaactgattatttttacaatcttaaaaaaaccccaacatatttcattgggaaccataaaaactcatcatttttctnttttatgaataactcgtgttttttatacaacttttanaatgcccgnctttccttttt

SEQ ID NO: 4905 - DNA, 303 bp, Homo sapiens
  misc_feature 6, 166, 178, 207, 210, 225, 252, 263: n = A,T,C or G
acactnctatagggcgaattggagctccccgcggtggcggccggttgtcctggtggaatgtgtccccctcgttccccagcgccacgatgtggatggacctgcacggacagagggggcgaggggagaagggaagcacggtcagcgcgcgggtctctcctcggaacangaagtgccccgngtacctcggcccgttctagaactagttgnatnccccctgggctgcangaaattcgattttcaatgcttaattcnatacccgttcnaccctcttaggggggggggccccggttaccccaaactttt

SEQ ID NO: 4906 - DNA, 439 bp, Homo sapiens
  misc_feature 167, 220, 287, 346, 386, 394, 397, 403: n = A,T,C or G
ccgcggtggcggccgcccgggcaggtacttttttttttttttttttttttttgagactgagttttgctcttgtcacccaggctggagtgcaatggcgtgatctcagctcactgcaacctccacctcccgggttcaagcgattctcctgccacggactcccgagcagntgggattacaggcgcctaccaccacacccagctaatttttgtatttttagcanagatggggtttcaccatgttggccaggctggtctcgaacccctgacctcaggtgatccacccgtctnggcctcccaaagtgctgggattataggccgtgagccaccatgcccagccaggagtaggnaatattaaaatgagggttcagtaaaaagattaaggcttancatttctnacntaactnggccacaatcattttagtgttttctttttggaaata

SEQ ID NO: 4907 - DNA, 408 bp, Homo sapiens
  misc_feature 54, 141, 151, 180, 188, 189, 193, 196, 205, 207, 210, 215,216, 242, 250, 254, 261, 270, 276, 283, 285, 288, 300, 306,319, 320, 322, 326, 330, 340, 345, 355: n = A,T,C or G
atggcggcccgaggtactcacaagcactcacatatgccacagtgcacttgcttntgctgcagtatgagccacagtgtatatctgtgtgattatggaatacacaggtaatccacttcaaaaaaacagcattaagctgccttntttttttatnaaatagttgaactaagggcctgggtattnttttgcanngganatnaaaaaatananacnttaannatggaagggggaccccatttttaatngccaaatngganttattcnttttttttncaggtntcctttngngtnccaattgttgcnaacccnaccttttaaccanngncaantggnccccttggcnttttnctttcaaagntaaaaagtaaccaacccccccttttttttggaaggcccacccaattttaaaac

SEQ ID NO: 4908 - DNA, 340 bp, Homo sapiens
  misc_feature 45, 90, 92, 99, 102, 111, 114, 121, 136, 141, 144, 159, 168,181, 184, 205, 211, 213, 220, 222, 223, 257, 268, 273, 275,286, 290, 300, 305, 306, 314, 315, 332: n = A,T,C or G
tcatggtcataagcatgtttccctgtgtggaaaatttgtttattnccggcgtcactaaatttctcacaaccaaaacattacctgattccncnggtgtangcnattataaanttngttaaanaggccacttgggggngattngcncttaaatttggaagnttggaaggncttaaaacctttnaancaaattttaaaaattttgccngtttangnctggccntnnaaccttggcctcctcgggattttttttctccaantttactgtggnggaananaaccaccttgngttnccgttgggcnccaanncctttggnnaaattttaaaaattggnaaaatttc

SEQ ID NO: 4909 - DNA, 407 bp, Homo sapiens
  misc_feature 172, 189, 391: n = A,T,C or G
ccgcggtggcggccgcccgggcaggtacgcggggactttataccagtcatgtggcagaaatcaggcctgctctgtgaatcggctttgtgcagatcatgaggcgcacctatgttggcagcatgcctggtcgcatcatcaacggcttgaagactgtgggagtgaacaacccaantgttcctattagatgangttgacaaacttgggaaaaagtctacagggtgatccagcagcagctctgcttgaggtgttggatcctgaacaaaaccataacttcacagatcattatctaaatgtggcctttgacctttctcaagttctttttatagctactgccaacaccactgctaccattccagctgccttgtttgggacaggaatgggagatcatttnaaggtttccagggttt

SEQ ID NO: 4910 - DNA, 300 bp, Homo sapiens
  misc_feature 44, 221, 235, 242: n = A,T,C or G
ccgggcaggacttttttttttttttttttttttttttggtaganatgggacttcctacgttgctcaggctcgtcttgaactcctgagttcaagtgatccacccaccttggcctttcaaagtgctgagattacagatgtgagccaccacacctggccaaaataataaaattttaatcagtaaaaaaaaaaaaaaaagaaaagtgtaaatgtgttcatccaanaaagcctttttttnacacatntgaaatataaatagatccatttaaatacgatatccagttgaaccagccctgaagggct

SEQ ID NO: 4911 - DNA, 224 bp, Homo sapiens
  misc_feature 49: n = A,T,C or G
ctacttagggcgaattggagctccccgcggtggcggccgaggtactttnttttttttttttttttttttttggaatgaacaaatatttatttatcttttataacaagtaaggcaatgttgcttaaaggaagacaaacaaacataaaagattccgttgacaatgcattttttcatctgttcggcacaatgcttttgtcataatggagatgtgacagcaaactttc

SEQ ID NO: 4912 - DNA, 300 bp, Homo sapiens
  misc_feature 208, 246: n = A,T,C or G
ccgcggtggcggccgataccttaccgtggctgctgtcttccgtggtcggatgtccatgaaggaggtcgatgagcagatgcttaacgtgcagaacaagaacagcagctactttgtggaatggatccccaacaatgtcaagacagccgtctgtgacatcccacctcgtggcctcaagatggcagtcaccttcatttggcaatagcacaanccatccaggagctcttcaaagccgcatctcggaagcangttcactgccatgttccgccggaaggccttcctccactggtacctgcccgggcc

SEQ ID NO: 4913 - DNA, 147 bp, Homo sapiens
cttagggcgaattggagctccccgcggtggcggccgaggtacaatttctgccactggtctaggtgtctgaggagcatcttcctggctcagagaccttttgctccaggtgctcatgccgcaaatggcaatctgcgcgcgaactaattc

SEQ ID NO: 4914 - DNA, 449 bp, Homo sapiens
  misc_feature 4, 19, 21, 22, 28, 50, 64, 72, 81, 82, 84, 87, 183, 224,226, 230, 258, 286, 310, 315, 345, 348, 359, 431, 436, 438: n = A,T,C or G
ccanagggcgatttggagntnnaccgcngtggcggccgttgggaactgtntctccccagccttngggccggngcctttttnngnctncggcgaatgagacctgcggacctgcccccgcgccccatggaagaatccccggcgtccagctctgccccgacagagacggaggagccggggcccagngcagaggtcatggaagaagtgacaacatgcctccttcaaanancccntctggtcccggcagggaagaatgaccanaggggattaacctaaccgggatccccangccctggcttctacaataaccccnccacnccacgacccttcctgggccctttgcagagnaangccgttccacngaggagagatgaggaatgctctccacctggtgctgaggcgagggttgaggattgggcaaatagggtaccctntggcngnttctagaaact

SEQ ID NO: 4915 - DNA, 470 bp, Homo sapiens
  misc_feature 218: n = A,T,C or G
ttagggcgaattggagctccccgcggtggcggccgcccgggcaggtacttgtctaaggctctggcggctccgcgaatctcatgtgctgggccatcatggacgagagtggtcttcagcaccgcttgtaaagcagtgttaacaaccatcacaccgccagcagcaatgccctcctcagccaccaaggcaggccacaggtaacgagtgatgccccattcttngacgcacccaagcctccggcttccataactcaaccagcagcagggaaaaaagcatgggtcttcaattctcttgacaaatctcaagaggtattatactcttattccaactacatctccctccccaaagaagcgcacacaaaacaattttaaaacttatgtttttctacggaaaccttacctcaaagtgatgcacaaaactgaaatttattatggctgcttaaatgtcacatcctggcttcctagcagggaaac

SEQ ID NO: 4916 - DNA, 120 bp, Homo sapiens
  misc_feature 46, 76, 82: n = A,T,C or G
gggcgaattggagctccccgtggtggcggccgaggtacacaggcantgatcactgtgggccttggaaaagactcantcctgntctggcttgggatttcatccagagcagtcccaatggtg

SEQ ID NO: 4917 - DNA, 495 bp, Homo sapiens
  misc_feature 216, 236, 253, 264, 289, 300, 340, 404, 429: n = A,T,C or G
acttagggcgaattggagctccccgcggtggcggccgcccgggcaggtacgcgggaagccctcaccccacaaggggcaggtgggggcttggttgctgacccggcccaagtccccacagagcaccttctgtagctccagcttgtctccctggcttctctttgaaggagaaaaatgtaaaatatgcactgagaaagccagccccgcctgcttagtcanccccgggcagcaagggccanccattgggaaactcaangaaaaagcaangaacccttttccaaaaagccccaanagaatgccctngggctcagatcttgtaaattctcccaggaagctgtgatangagcaggccacacaaagtcccctaccgccttccctgcttgccctcccccagatgcattgtgatnggcattcacccatttccccaaattngaaatattcagcatgccgggcctggaccaggggacctcttttaagatgcattgaaatttatttatt

SEQ ID NO: 4918 - DNA, 412 bp, Homo sapiens
ccgcggtggcggccgaggtacaataatattatctttatgagcagcatggaaatttcattcctgatctggaagaataaaaggaaagaaaatgtcaggtgaaagagtaagtagcctccaacttaagcagacagaataattttctttaaaatgaaaagaacattttaagctgtcttcccccctaaaagatcagatctagaaagggctggaaatgaactgtgcccaggaatctgggggtgctctccagtaaggcgaactgaggctcatttgcagccaagacttggaactcgggatgagacctaatgggctattgctgccatctggctgccaaaaagtccctaatagatggattttccaggctgacccagctgtggggcggggggggtcctctggcttctgtgtcctctgaagcgtt

SEQ ID NO: 4919 - DNA, 138 bp, Homo sapiens
  misc_feature 9, 10, 17, 118: n = A,T,C or G
aggtacttnnttttttntttttttttttttttctgatgttgaggagtcagttttattgccatctctgggaggggctcaaatccggcccaatctccttcagcttggccaccaggtcctnagtggtctccaccttgacgc

SEQ ID NO: 4920 - DNA, 165 bp, Homo sapiens
  misc_feature 50, 70, 81, 99, 118, 123: n = A,T,C or G
aggtactttttttttttttttttttttttttttgcaaaataatggaaganccttttgaaacttaattatnttcagtttatnaattattactgcattatnggagctagtgcaatcctgncatangcccttgggtcaaaatgaccagggcacaaataaaaaaaaaat

SEQ ID NO: 4921 - DNA, 135 bp, Homo sapiens
  misc_feature 18, 109: n = A,T,C or G
aacgttctccaccgcggnggcggccgaggtaccatatcctaaggctgcacagagcaggaggcccagcctaggaaacgatttttccctcctagacctctgggcctgagangggaggggttgccatgaaggtctctg

SEQ ID NO: 4922 - DNA, 338 bp, Homo sapiens
ccgggcaggtactacaagcagggatgtgctggcctgtgcagagtggaatcccatgtggtgccactgttgttactgtgtaagaaacagggactgttccttgatggagctgatcatgtatgtcaaccatgactgcattctgctggggtggatgagcagcaggatgtagcagacggggagatacattcggagggtggaaggctcgaggctcctctattgcttgctgctgtgcgtaagggagatggtgatagttttcatcttgactaatggaattatgtcgagacagacgatcccttcttcctctctggcgcctgacaggaggacttcttctgttgcgtgca

SEQ ID NO: 4923 - DNA, 343 bp, Homo sapiens
ccgggcaggtacaggctgggtccccgtggtcgccaagcctcctgcctgctcaatgatgtaggccacgggattgcattcatacaggagccggagctgtggaggaacagaggcaggacaaattcaccaagagcctagcaacatgaagagagatgccaggaagaagagagaagccaggaaacaagccaaccgcacaatccccacatcagagcaggagaagatgggggcctgctggcagagctggggcttggctgtggtcactctgaacctgctctttggtgttttcatgagtggtgggaagaatagggaccatatggagcccacacaggaagctctagcagtaaca

SEQ ID NO: 4924 - DNA, 341 bp, Homo sapiens
ccgggcaggtacaaacagaataaaaagtcattgcttttgatggtcagcaaacacccaattctgaggaggaggagaggtgatgcccagcaggtggattaggacccccagtggttggcggggtgcctggctttgcggccctctcccaggaggcagagagcacagctttaggtagtgtaagcctttttccttttatttagaataatcttttttttttttctttttctttttttttaagcaatttccccactcccaagttgggccagtaaagattacatgaaaactggcacacctattggctggaatacagatgcaccaaatgaggatttaaaaactttccgagc

SEQ ID NO: 4925 - DNA, 262 bp, Homo sapiens
  misc_feature 217: n = A,T,C or G
ccgcggtggcggccgaggtacctctgccaccgagttcaagggatcctcctgcctcagcctcccaagtagctgggattacaggcattgcaccaccacacctggcaaattgtcataatttttttgtgaaagatggggtttcaccatgtttggccaggctgcctaggttttgtttttaagaagtaacctgaaatttcctacaacactgaataaaagtggnacctgcccgggcggccgcctctagaactagtgggatcccccgggc

SEQ ID NO: 4926 - DNA, 283 bp, Homo sapiens
  misc_feature 17, 20, 30, 34, 44, 50, 56, 59, 63, 73, 85, 87, 92, 103,113, 114, 117, 125, 136, 143, 161, 171, 172, 173, 184, 186,187, 199, 222, 236, 237, 246, 263, 267: n = A,T,C or G
agcccagaaccagcccncgncgagcttttncacnacaacggggncaccanccccanaanccgngcagcagagnaagagaggcacnangggcnggcagaaggcngggcacccannaantttaaaanaaaattttttngcaacanggggggggcccccccaanaaaaaaagcnnnggagaaggagncnnccgacagcaggngggggccaaacaagcgtgcaaanggggaggggggccnncagacccangagaggccacccgccanggcnggccaagcacagcagc

SEQ ID NO: 4927 - DNA, 348 bp, Homo sapiens
  misc_feature 343: n = A,T,C or G
ccgggcaggtactttttttttttttttttttttttttggggaatcattccccatggtgatatgattgtttaaagagctgggtcaattgtggatcacttgtagaggtctgggttgtcccacagggcaaagaaagtctgtacttgtctggatgggtccacagctcgatctgcgccatcacctggttggtgaaggagttactcatcacgaagctggggtggcccatggcacaacccaggttgaccagccgaccctcggccagcaggatgatgcggcgcccattcttcaaccgataccggtccacctgcggcttgatgttcaccttctccacggcgttctcgttganccact

SEQ ID NO: 4928 - DNA, 149 bp, Homo sapiens
  misc_feature 8, 11, 16, 55, 98, 121, 132: n = A,T,C or G
actatagnttngaagnggaaccccaccgcggtggcggccgaggtacctgaacaanttccatcaaggacagattctcagtcttgaagaggcagcacggnaaaggggaaagatcatgagtttnggggccaggtncccttggatattgtggg

SEQ ID NO: 4929 - DNA, 344 bp, Homo sapiens
  misc_feature 300, 320: n = A,T,C or G
gtataccactcctatagggcgaattggagctccccgcggtggcggccgcccgggcaggtacattaataagacacctcagaagtgaaacaaacctagtttttactaaaatgatgggataaaggtagtgtctatgctgaagagcagcttcacttgtttccccacagaaaaaggcccaaaatttttggaggataatttaaaaactaagccaataaggccaggcacggtggctcatgcctgtaatcccagcactttgggaggccaaggcgggcagatcacctgaggtcaggagttcgagaccancctggttaacatggctgaantcccgtctctaataaaaatataaa

SEQ ID NO: 4930 - DNA, 170 bp, Homo sapiens
  misc_feature 128: n = A,T,C or G
ctatagggcgaattggagctccccgcggtggcggccgaggtacttacatgggttataaatcctctctctggacatcaatgtagagtccatctttcaagcactttaatttttttagctgccaaagggtntgaattacattatctgtatgctaattatccctgaaatcaatg

SEQ ID NO: 4931 - DNA, 304 bp, Homo sapiens
  misc_feature 4, 209, 211, 290, 293: n = A,T,C or G
agtntgaattggagctccccgcggtggcggccgcccgggcaggtacgcggggaatcccgcaaacacaagaagtcaaagaaatcccacaaaaaaaagcagaaaaaaaggtcacacaaaaaacagaagaaaagcaaaaaagaagccacagatataacagcagattcctcgagtgagttctcagaagaaactggggcttctggtacacgacntntgacttgggaatgcgcaagcagtcgagagcttcgtagaactctcccagttgctccttggtcgtctctggcttgtcagcntanacagacagccc

SEQ ID NO: 4932 - DNA, 496 bp, Homo sapiens
  misc_feature 416, 442, 489: n = A,T,C or G
aggtacatgtgggagaaaaacttaagtgtgatgagtgtggtaaggaattcagtcagggcgctcatctacagacccatcagaaagtccacgtgatagagaaaccatacaaatgtaagcaatgtgggaaaggtttcagtcgtagattagcacttaatgttcattgcaaggtccacacggcagagaaaccttataattgtgaggagtgtgggagggccttcagtcaggcctctcatcttcaggaccatcagagactccacactggggagaagccattcaaatgtgatgcatgtggtaagagcttcagtcggaattcacatcttcaatcccatcaaagagttcatacaggagagaaaccatacaaatgtgaggagtgtggtaagggcttcatttgtagctcaaatctttacattcatcanagagtccacacaggagaaaaaccctntaaatgtgaggaattgtggtaaggctttagtcggccttcaagtcttngggccca

SEQ ID NO: 4933 - DNA, 347 bp, Homo sapiens
ccgggcaggacagacatggctaatggaccagggcctctgtggtcagaagagagtcaagcaagcaggcggcagatctgggaccagcatgcccaccacccagtcaggccgctctgtttcgtgatgttttggacacccaacgtgtctgagaaaatcttgatagacatcatcggagtggactttgcctttgcagaactctgtgttgttcctttgcggatcttctccttcttcccagttccagtcacagtgagggcgcatctcaccgggtggctgacgacactgaagaaaaccttcgtccttgcccccagctctgtgctgcggatcatcgtcctcatcgccagcctcgtggt

SEQ ID NO: 4934 - DNA, 327 bp, Homo sapiens
  misc_feature 118, 290: n = A,T,C or G
ccgggcaggtacccccttttcactcaaagatgtcccggattggataataaattacatagctataccctgtccatagtagaacctgactacctttatctacggatttatttatagtttngtcacacggtcgaatagctccttcttctcagtaatacaagcttttttggtttgaaatatggatcctcttcccagcataataatgtgatttttttttattcattttatgttatttatattcacattttttacttaaaggaaaatgctgctatttgtgatgaaaattggctcgncttgaggaaaaaatttcttaaagcaaaagaaaaaaag

SEQ ID NO: 4935 - DNA, 333 bp, Homo sapiens
  misc_feature 222, 246: n = A,T,C or G
ccgcggtggcggccgcctcggcctcccaaagtgctgggattacgggcacaagccactgcacccagccacaaacagatcgcagatccaggtttcttcaaactgggagcatctgcttaattttcccataaaatcagtcttattctttctgacagctctgagactcctccggccacgactaggtgctgtcctggaggaaacggtggaggacggccgcacaaaaanccaatctaccttgatgaaaaactncgttccctttctcgccagaaacataaaatgcgatgggagctacgggccacccgcttgcccgaagacaaaaatggcgccgacccccgc

SEQ ID NO: 4936 - DNA, 259 bp, Homo sapiens
  misc_feature 82, 188, 208, 240, 241, 242: n = A,T,C or G
gctcctttgacaacagtagtctctgctccggcggcggggacaaggcggtggttctgtgggatgtggcatcagggcaggtcgngcgcaaattccggggccacgcaggggtgagtgaaagcctggagaccctcatttgagtggaggggacccgtattagcgcataggtggtgacacggccacccccattncaccggaaggatcccttccncagatgacgatcccccactcctgcatgccatnnntaggcagccaccaaccc

SEQ ID NO: 4937 - DNA, 338 bp, Homo sapiens
atgacatggctcagcttcggtttaaaaaaggtcagtgtctatctggaaatttctatgtgagaggtgatggaaccagagtttacttcttcacacaagaggaactggacacgcttttcaccactgctggactggaaaaagttcagaatctggtggaccgccgactgcaggtgaaccgagggaagcaactgacaatgtacctgcccgggcggccgaggtacagaaaaatcacagtaatccactccaatgtctgtaaagtccacaaaggtagaggacaaaatctggaatgcctgaggattatttttctttagtttttggcacacattaaacccatctacaat

SEQ ID NO: 4938 - DNA, 338 bp, Homo sapiens; identical to SEQ ID NO: 4937

SEQ ID NO: 4939 - DNA, 358 bp, Homo sapiens
  misc_feature 151, 218, 237, 238: n = A,T,C or G
ccgggcaggtacgcgggggcggaagtgcgagggcccaggtggctgaaggggccgttaggaacatccaagcggtggggcacaggcagatccccgacctgacctggaccacccttctcctcttggcccgccccttcaactcgcctccgcttangtcttggattgggccccgccccctgacctgagcctggtccttcttcaggcacttgacccttgacctnccggtggctcccccatctnntcaggcgcgaatggctacgggcgccggatgtaccctcggccggtctaaaaactagttggatcccccgggcctgcaggaattcgatattcaagcttattcgataccgttcgacctcgaggg

SEQ ID NO: 4940 - DNA, 358 bp, Homo sapiens; identical to SEQ ID NO: 4939
  misc_feature 151, 218, 237, 238: n = A,T,C or G

SEQ ID NO: 4941 - DNA, 159 bp, Homo sapiens
  misc_feature 1, 17, 33, 34, 49, 57, 69, 71, 80, 81, 87, 134, 159: n = A,T,C or G
nggccggggtttggggnccggggccccccgggnnatatttttttccttncttttttncccccctttttncnttttttttnncccccntttttttttcccctttttccccccttaaattttttgggaaaaaattngggccaattccggaaggggggggcn

SEQ ID NO: 4942 - DNA, 159 bp, Homo sapiens; identical to SEQ ID NO: 4941
  misc_feature 1, 17, 33, 34, 49, 57, 69, 71, 80, 81, 87, 134, 159: n = A,T,C or G

SEQ ID NO: 4943 - DNA, 216 bp, Homo sapiens
  misc_feature 77, 79, 139, 143, 181, 187, 191, 192, 193, 197, 208: n = A,T,C or G
gcttccccacccggcgggttgggccgggcccggcccccggggccagggttaccgccggggttgggggaacccccgcnangcttcaagcttacaagcaacaagaatcaagccacccattgaaagcttttttcaacggggncctngggttttttcttggcttccctttgggttccctgggggntggttnaaannnaaanccccgaaaaanattttttt

SEQ ID NO: 4944 - DNA, 216 bp, Homo sapiens; identical to SEQ ID NO: 4943
  misc_feature 77, 79, 139, 143, 181, 187, 191, 192, 193, 197, 208: n = A,T,C or G

SEQ ID NO: 4945 - DNA, 309 bp, Homo sapiens
  misc_feature 96, 180, 199, 206, 242, 249, 253, 273, 290, 291, 294: n = A,T,C or G
cgtatcgactcctatagggcgaattggagctccccgcggtggcggccgcccgggcaggtacgcgggtctgatcgctaatgacaggtttggggtttncttggtttatcagccacccaattcatggtttaaaataccaagtattgttagaaatgggttcaaatctagggaaggcattttcgntttgcaaaagaaacctgtntttttancagacttttaaaagatggatttttttttttttttanaaaaagncttngttattttttaaaaaaaacnttttgaaaagggggcannttnttggggggggggggg

SEQ ID NO: 4946 - DNA, 309 bp, Homo sapiens; identical to SEQ ID NO: 4945
  misc_feature 96, 180, 199, 206, 242, 249, 253, 273, 290, 291, 294: n = A,T,C or G

SEQ ID NO: 4947 - DNA, 340 bp, Homo sapiens
ccgggcaggtacttaaatcagaacagaatgatttaaggctacagatggaagcccaacgcatttgcctctctctggtttattcaactcatgtggatcaggttcgtgaatatatggaaaatgaaaaagataaagctctttgcagtcttaaagaagagcttatttttgctcaagaggaaaagatcaaggaacttcagaaaatacaccagttagagctacagactatgaaaacacaagaaacagaggccatggaggacgaggagagacagaagaagctggaggccggcaaagccaagcttgcccagtttcgacaaagaaaagctcagtcggatgggcagagtcc

SEQ ID NO: 4948 - DNA, 340 bp, Homo sapiens; identical to SEQ ID NO: 4947

SEQ ID NO: 4949 - DNA, 403 bp, Homo sapiens
  misc_feature 94, 337: n = A,T,C or G
cgcggtgggcggcccgaggtacatcaccctgctgagggacatccaggacaaggtcaccacactctacaaaggcagtcaactacatgacacattncgcttctgcctggtcaccaacttgaccgatggactccgtgttggcactgtcaaggcattgttctcctccaatttggaccccaagcctggtggagcaagtctttctagataagaccctgaatgcctcattccattggctgggctccacctaccaagttggtggacatccatgtgacagaaatggagtcatcaagtttatcaaccaacaagcagctccaacacccaacacttgtacctgaatttnaccatcaccaacctaccatattcccaggacaaaagcccagccaggcaccaccaattaccaagagga

SEQ ID NO: 4950 - DNA, 664 bp, Homo sapiens
  misc_feature 10, 15, 17, 20, 23, 74, 75, 109, 115, 121, 202, 263, 283,285, 308, 318, 360, 366, 367, 385, 391, 399, 413, 424, 429,443, 451, 486, 493, 522, 524, 569, 572, 577, 583, 591, 592,606, 609, 632, 649: n = A,T,C or G
cgaggtacanggctnanaanatngaagtatcaaagtcacgtcctctgtttctaacactgtttgatagacagctnngtggaaatctgtcaaagaacaatacaccatcctntctttnttcttnggcaactgatccttgataagagtcttggtgcgcctgagaaaccagccagacatctttttggcaagtctttgcatggccttncggccagtggctagttctctctttgttgccgtgtgtctctgaccatgttctactgggtcanaaaactgcttcttgaagtangncccactccctaaaaggcctggcncagcccagtncataacacaccacagttccttcatgttgttctgaaagatggntccagnnaggccaatgcggacattncatttnaaagcttncataacttctggtnctctagctttnggatncttgattctatganccttcatncacaatgacaggctgaccattccaaactgttaagntcatccnggcattaagcgtaagtggtttcataaagntngctagaagcaatttcacaattccctttgcttttaacaccgaattnaantcatnatcctnttctgggnngccattgaaaaaanaantggactctgaaaaaatccccagntgtcccaattcatgccntttttgctggaaaaa

SEQ ID NO: 4951 - DNA, 314 bp, Homo sapiens
aatacgactcactataggggcgaattggagctccacccgcggtggcggccgggaaagggccaggaaagggagtcaagcaggagccgtctgtccgaacggaggctaggtaagaatatttcaccatgaaaatgttaaaagacataaaggaaggagctaaaccatatggacccaactctccttatatgagaacgttattagattccattgctcatggaaatagacttattccttatgattgggaaattttacctaaatcttccctttcaccctctcagtatctacagtttaaaacctggtggattgatggagtacct

SEQ ID NO: 4952 - DNA, 413 bp, Homo sapiens
cgcccgggcaggtaccggaagcagcgaatggaagagatgcggcagcagcttcacaaggggccccaattcaagcaggtttttgagatctccagtggagaagggtttttagacatgattgataaagaacagaaaagcattgtcatcatggttcatatttatgaggatggcattccagggaccgaagccatgaatggttgcatgatctgccttgccgcagagtactgtttgcattaataaattaaagctccatagggtcttctcgtcttgctgtgtcatgcccgcctcttcacgggcaggtcaatttcactggttaaaagtaaagagacagctgaaccctcgtggagccattcatacaggtccctaattaaggaacaagtgattatgctacctttgcacggttagggtacctcggc

SEQ ID NO: 4953 - DNA, 506 bp, Homo sapiens
aggtaccgggaaccaaactctcattccccaggggcctaagccccccgtggccaggcccttctcaagtcagggttcctgcacattcacagttacgggtggccctgggagtaacacctggcacccaaacaggtcaccagagtccacacatagtccacctgccctccctgcgtaagatcagctcttcctcctcccgacgaatagatcagggtcaatgatccctgccaagatggcgactgctccagcctgctggtccaacctgtccagccacagctgttgctcgaaggcttgaagttcaatgggaccctctcccgctttctacaaactggttcctttatttttatgtttatttatttgggaccgaggtctggctctgtcacccaggctggagtgcaagtggtgcaatcactgctcactgcagcatccacctcccaagcgtccacccatcctcctggcctcagcctcggaacaagctggggtacctgcccgggcggcccgctctagaacta

SEQ ID NO: 4954 - DNA, 333 bp, Homo sapiens
ccgcggtggcggcccgggcgcggtggctcacgcctgtaatcccagcactttgggaggccgaggcgggtggatcacgaggtcaggagatcgagaccatcctggccaacacggtgaaaccccgtctctactaaaaatacaaaaaattagccgggcgtggtggcgggccgcctgtagtcccagctactcgggaggctgaggcaggagaatggcgtgaacccgggaggcggagcttgcagtgagccgagatcgcgccactgcactccagcctgggcgacagagcgagactccgtctcaaaaaaaaaaaaaaaaaaaaaaagtacctgcccgggcggc

SEQ ID NO: 4955 - DNA, 458 bp, Homo sapiens
gctccccgcggtggcggcccgaggtacgcggggctcactagaaggagccccctgaccccttcttccaaaatactttttgtctttgtcttcgtttctgcattcatcccccttcgttcactcccataacaaccaacagcgacaactggcacctaggacagggaccgtgagtgaaggtctgctggagcagagaaactgacactggcaagaagaacgagaatgagaaaccctgcgacgagtctgctgacagctgatataagtctgcaaaatcagctggaccaccaaacggcaattgagagctgcacaacctgcaattacctttattcaattaatgcaaaaacaaaaatggggagatgttacaggccgaaagaatgaaggtccgtgaccaactcaagtataccactgaaggctatatgagcaaacagaaaactgttctcatgaaagcaggatgttggaaaact

SEQ ID NO: 4956 - DNA, 466 bp, Homo sapiens
  misc_feature 18, 57, 59, 109, 143, 146, 156, 162, 163, 191, 202, 228,232, 238, 263, 283, 320, 339, 361, 363, 367: n = A,T,C or G
ccgcggtggcggcccgangtaccacaggacaatcccattagatgtatcccccaaatngnaaaagttaatttccccaaccttaaactgctgggcttaaaattgagctcangggaaaggaatccaaaagcctccccgcgtacttnggntttttgttgntttctnnttgggaaattggcatgtattctgcaaanacttgttttangccagttttaccccatctgctaaacncaangcatantctgtatcaaccataagaacccatntgtaaaaacatcaatgttgntagtcaaagaccactgtgttacaaccaaaatcaggtnttgtatgattacatacatnagacagagcaatggtggcacangntgancatgacaatggctcatatgtttgacgcaaaagtaaacaaattcatggatgcattcaggaggaatgccttgcatggacaagggtaaagttcaatttaaaa

SEQ ID NO: 4957 - DNA, 460 bp, Homo sapiens
  misc_feature 451: n = A,T,C or G
cgcggtggcggccgcccgggcaggtacgcgggggctgatgccattttcagcctcagcacgcctgcacccaggcgctcattaaaacagcatgttgctccccactgcctcgtgttgtctgttggcgcgctgtcggggttcgaaccgatacaagaaccttccacctacctggtgctttggcctcatctataagcagcttttccactgtcctgaaacaagatagagaatctgagcggccagtcatctgccctaagtgctgccgccgaagactgaatgtcctggaaagtttgctgtcacatctccattatgacaaaagcattgtgccgaacagatgaaaaaatgcattgtcaacggaatcttttatgtttgtttgtcttcctttaagcaacattgccttacttgttataaaagataaataaatatttgttcatttcaaaaaaaaaaaaaaaaaaanaaggtacct

SEQ ID NO: 4958 - DNA, 413 bp, Homo sapiens
  misc_feature 392, 405: n = A,T,C or G
ccgggcaggtacgcggggggtatgaaggagctggccgtgttccgggagaaggtcactgagcagcaccggcagatgggcaagggcggcaagcatcaccttggcctggaggagcccaagaagctgcgaccaccccctgccaggactccctgccaacaggaactggaccaggtcctggagcggatctccaccatgcgccttcccggatgagcggggccctctggagcacctctactccctgcacatccccaacttgtgacaaagcatggcctgtacttattggcacaaattcgggcagcctccagggctttaagagggacagcttgctcatattcatctgacaccatgtggccacaaagcggaaaactcatcccaacttttttgccctttttttnccgccccaagggntcaaaaaa

SEQ ID NO: 4959 - DNA, 316 bp, Homo sapiens
  misc_feature 42, 53, 76, 79, 115, 119, 137, 143, 158, 165, 185, 190, 200,225, 237, 240, 245, 246, 258, 261, 266, 272, 288, 291, 302: n = A,T,C or G
ctatagggcgaattggagctccccgcggtggcggccgaggtnctataatggtncccatcttaatttgaaagcgttnganaatcttttaggacaagcactgacgaaggcactcgangacnccagcttcctgaaaagangtggcngggacagtggctacngagacanctggtgtcctgaacgtgganaattncttgctcctncaaggcaccataagagagaagattnctttgaaagctnggnctctnntgggctcgaggncantgacnagctgntcctctgcatatcacnttnagaggggggcngtgaaggttttgaa

SEQ ID NO: 4960 - DNA, 422 bp, Homo sapiens
  misc_feature 349, 358, 395, 401, 410, 412: n = A,T,C or G
ccgggcaggtactttatagcatttgccccaccccacagcttaggtttttctgtcatcctcagatcccacaggcattgcgaagaagccgctccctatacccaggtataactcaaaatccaaagggatagggccaggatccctattcctaccccatctattctctgttggctccaagagctaccccagagaccttaaacagaaacagtagctgaggcttcttcctagatacctgactagggaagtttgtctctcctttcttgcccaaccaggtcaaagtaaaatgtgagttgacagctcaaagcacttgtaactgctgccccctccctacctctactccccaaaatggaancattggganaggggaaggcccccatggggtcaagaagggcaccggnaggttnttgcaaatnantttttgtttt

SEQ ID NO: 4961 - DNA, 300 bp, Homo sapiens
  misc_feature 144, 145, 152, 172, 178, 186, 190, 199, 211, 218, 255, 275,284: n = A,T,C or G
ttagggcgattggagctccccgcggtggcggccgaggtactttttttcttttttttttttttttttttgctccaaacagatttattgaatacagcaaaattctatatacaaagggacctggacctgctgcttcaaaacatgatnnttttttnctaatatcttgatagtcggnccatanagcattanaaangcaatttgncctcttaaaatnaaaccanaaaaagtgcctaatgcaccattaaattgaatgggccntaacctactggaacttttangtagttctnataaaggtaatttaac

SEQ ID NO: 4962 - DNA, 126 bp, Homo sapiens
  misc_feature 72, 90, 94, 101, 107, 113: n = A,T,C or G
accgcggtggcggccgaggtactgatgaacccgaacaggagttgcttctgttttaattctactactactggngcatgatttacagctaanccanagaggantctgcnatgccnagtggaggaagga

SEQ ID NO: 4963 - DNA, 400 bp, Homo sapiens
  misc_feature 118, 237: n = A,T,C or G
tggcggccgaggtactgcacgacgtgaatcatgacattggagaagacactgacgtagaggcactcgaagagtcttcgtaagctgtgcagccacagaaatactagcactaagaatgcanacagtgccagctcccctccctggaactgtgccgccccgagaattcttagcaaaccattgaagccagctttggaaaaggtgctcccaggaacaagagattgaagtaaggcaccaaagcangaagccattccacagcactgagatgatataaaagtgggaaaaatatctcttggggacatcaaaggctcggcaggcggcggggccgcgacggctccccacacttggttttcccataagccggatcaggtcctggaagatcgcgcagcccgggagcaggccgggc

SEQ ID NO: 4964 - DNA, 435 bp, Homo sapiens
  misc_feature 137, 138, 139, 180, 354: n = A,T,C or G
gaattggagctccccgcggtggcggccgcccgggcaggtacaagggcatgacaggctgggaggtggctggtgatcacatttacacagctgctggagcctcagacaatgacttcatgattctcactctggttgtgccnnnatttatacctccgcagtcggtgatggcagacacagagaatnaagagggtggccagaatcacatttgtctttgagaccctctgttctgtgaactgtgagctctacttcatggtgggtgtgaattctaggaccaacactcctgtggagacgtggaaaggttccaaaggcaaacagtcctatacctacatcattgaggagaacactaccacgagcttnacctgggccttccagaggaccacttttcatgaggcaagcagggaagtacctcggccgctctagaactagttggatcccccg

SEQ ID NO: 4965 - DNA, 416 bp, Homo sapiens
  misc_feature 177: n = A,T,C or G
ccgcggtggcggccgaggtacacgaaggtacgatttacgaggtgaggggcaataagtaaatgactcgcacagatggtgttcatgctcaatgtttctcttctgaacaattttcagatttggtgttaaagcaccttctggccaggcgtggtggtttatgcctgtaatcccatcactttnaaaaggcggagtccgggtggggattgcttgaggccaggagttcaagactaccctaggcaacatagtgagatgctcgtctctattaaaaaaaaaaaaaaagaaaaaaaaaggggacccaaggccatatatctgtttcattcctagaaactctccacagtgtcagatgaagactgcaaatccagtggtcctacattcacagataattcctagcctttggttagtgagggagaatgggatgg

SEQ ID NO: 4966 - DNA, 194 bp, Homo sapiens
tcactacttagggcgaattggagctccccgcggtggcggccgagctcactgccgccccgccccccccgcgtacgtccaggcaccgccagccactgtcttcatgcaggaaccacagtgccagatccccacagctcgtctcttcatcttggttttgccacagaaagagcaagtgtacctcggccgctctagaacta

SEQ ID NO: 4967 - DNA, 444 bp, Homo sapiens
  misc_feature 139, 140, 142, 144, 179: n = A,T,C or G
ggcgaattggagctccccgcggtggcggccgcccgggcaggtactatgctttactaatagaaatacctctttgctgggggaggggagtgcttctgaatagaaattacccactctgagttacagctttagtggcatattnntngngatttaaatttacagtaaaaacaaaaacaaaaacnaaaaccaacccttttccaattattgacaaatctatttttttttaaaacctatcttagatagaccatctccctacgataagatggcagaacagaatgtcaggaggagaggtttggtctgaagagggttatctgtccaggagacgctttatccccaaagcaatgcgcttcagtttgctgtgcgcagcagagcacctgttggggggagaaaagtagagcacctagaaagtccatgaacaaattccagcagcaaaaaaacttcctaccc

SEQ ID NO: 4968 - DNA, 273 bp, Homo sapiens
  misc_feature 39, 87, 119, 173, 178, 191, 221, 223, 245, 248, 249, 258: n = A,T,C or G
agggcgaattggagctccccgcggtggcggccgcccggncaggtacgcggggaggcttgaagtgtggggagaacttggtctcctctntgctatatgaaatatgggagacgacagaccgnttgtgtgcaatgccccgggctgtggacagagatttacaaacgaggaccacctgncaaantcattaaaaccanccttgatgatgacattgaaaatttggcccngncccgaactgactcacccataantgnngatcaaacncctactccaactaga

SEQ ID NO: 4969 - DNA, 444 bp, Homo sapiens
  misc_feature 383: n = A,T,C or G
ccgcggtggcggccgaggtacaaagggcagccctgcacgctggagggacttccactcagccacaatgctgggaagtcacatgtatgtctttgggggccgtgccgaccgctttgggccattccattccaacaatgagatttactgcaaccgcattcgagtctttgacaccagaactgaggcttggctggactgtcccccgactccagtgctgcctgaggggcgccggagccactcggcctttggctacatggggagctgtacattcctcattagattgtgggtttcaagtttccatttgcaatttgaatgtttccagaaatctcttgtcttaaccaaacctctctctccaggcacgattctgcacatgagtctgatctgtgtanagtagtatcatcaaaaatgccaaattttgatcaggaatatacctggactactctctttcaa

SEQ ID NO: 4970 - DNA, 470 bp, Homo sapiens
  misc_feature 1: n = A,T,C or G
nctatagggcgaattggagctccccgcggtggcggccgaggtacctgtaatcctgaagaaaaggtcctaattccttccatgctgaaatgctagctttggtttcagagagagactttattgcaactgtgaccaccgtcactggtgagcactgctgttcggcccccagcggacttaaaagactggaatgtggtagtggcggtcgttctcggtcagcagggaagatctccggccagtccctgagaggctcctctgggtagcagacttcaaagtctctggagttaaacttgaacagtctgaacacttttatctttacttcaagggagtatccaagtataaacatatcaatctgctctagtccacatgtgtcgcctacagaattcaggtgattcatcatgaagctcaaaggatcagaggatgtctccctggaaaacaggagtctaaaaagactgggaatgacctttttagtcttc

SEQ ID NO: 4971 - DNA, 325 bp, Homo sapiens
  misc_feature 183, 198, 202, 208: n = A,T,C or G
ccgggcaggtacctgtttagccacgatggccgccaggcggcccaggagatggcctcgaccatcaagcaccaggacctgcacctccgccatcttcggcagccgcttggaaaagccccgcgtactttttttttttttttttttttgagcagacacagacacagatgtttattccaggaagaggtntaagaaacgagcttnttanagcatntttcacggggcagccagtcctggggctctcagagccagccccctcccttcagcagctgaagcaatagcgcccccattttacaggcggagcatggaagccagagaggtgggtggggga

SEQ ID NO: 4972 - DNA, 638 bp, Homo sapiens
  misc_feature 36, 47, 88, 96, 110, 148, 174, 175, 183, 186, 188, 193, 194,195, 198, 199, 200, 209, 215, 222, 245, 249, 268, 269, 294,298, 302, 304, 308, 310, 330, 335, 341, 351, 352, 358, 361,380, 381, 390, 412, 414, 418, 423, 440, 453, 477: n = A,T,C or G
  misc_feature 480, 491, 493, 495, 497, 508, 525, 531, 537, 539, 547, 550,551, 559, 560, 563, 569, 570, 597, 599, 601, 604, 612, 632: n = A,T,C or G
aggtacttttttttttttttttttttttttttttgnatttttagtanagacagggtttcaccatgttggccaggatgatcttgatctnttgacctnatgatccgcccgtnttggcctcccaaagtgctgggatcacaggcgtgagccnccacacctgggccctctatttattcnnctttttanagnangaagnnnaannnacttttttnaaaaangggcccncaaaatatttatttttaaatttnaaanattctttttaacccttttnncccgccaaaggggggaaaaaaaaanattngggnanattntntgccccttaaaataataagnggttngaattngaaaaggccnntttccnacnatatttgggaaacccacgnnaaaaaccanattttccaaccatttttttttntnttanaaaanaaggggccaaaaaaaanattttttgggaangaacccttttattaaaaggccttnatnaattggggttnangncntttaatttttnttttggggggttggggnggggtnaatgcnanaaattgtnaannaaaaaaannggnaaattnntttaaaccaatttctttcttttaaccntngnggncaattggnacccaccaatttttttgggnttaaaa

SEQ ID NO: 4973 - DNA, 465 bp, Homo sapiens
  misc_feature 455: n = A,T,C or G
atcgactacttagggcgaattggagctccccgcggtggcggccgaggtacgcgggggaattccggaggcggcattcggtggtcagaggcctgtgcggctgcaggtagagtgtcttaggaacctaggaaataactcggaacctgtaacgtcccactggtttggacatattcctctcctgatctggcctcatctgttccagggaggtgggattgaaacatatgcagtaatgtcacctcaaaagagagttaagaacgtccaggcacaaaacaggacttcacaaggtagtagtagttttcagaccacgctttcagcctggaaagtaaaacaggatccaagcaactcgaagaacatctcaaaacatggacaaaacaatccagtgggagattatgaacatgctgatgatcaagctgaagaagatgctttgcaaatggcagtgggatattttgaaaaaggtnccattaaagc

SEQ ID NO: 4974 - DNA, 737 bp, Homo sapiens
  misc_feature 616, 617, 673, 677, 678, 686, 688, 708, 713, 717: n = A,T,C or G
cgaattggagctccacccgcggtggcggccgaggtacaaactagtggggaaggtttttttaaaaagttttgcagtcttgtaatttacctttttaaaaaatttattttatttttctgagatggagtcttgctctgttgcccaggctggagtgcagtggtgccatctcagctaactgcaacttccacttcccaggttcaagcgattctcctgccttagcctcccaagtagctgggactacaggcgcatgccagcatgcctggctaatttttgtatttttagtagagcgggggttttgccatgttggccaggctggtcttgaactcctgacctcaggtgatccgcctgccctggcctcccaaagtgttgggattacaggcatgagccactgcgcccagccttgtaatttacctttgatggtgacctgaaatgcagtatgatcctatatgtggcaccgtagtaatgttcagtgtttgctgaattaattctgggcagcactaagaaaatcctctttcccagtcatattctataacacatttcccatttgccacaaaacctgcagctttttggtccaggtaaatgacatttgctgccattttgatgatttaaaaatggtcgnngggagttgaaacatagtcatgaatttcagggattcctggacatgtagacagtcatnccanngaaaagancncttcacttaagaagaagttnaagtnagangaaacaggtttatgctaaaa

SEQ ID NO: 4975 - DNA, 327 bp, Homo sapiens
aggtacaaggccaagaacagggagacagggcagctggtggccctgaagaagatcagactggatttggagatggagggggtcccaagcactgccatcagggagatctcgctgctcaaggaactgaagcaccccaacatcgtccgactgctggacgtggtgcacaacgagaggaagctctatctggtgtttgagttcctcagccaggacctgaagaagtactactcgattgtcaacgtcaaggagtcgcaggtcgcctggttctaggaataatgggggaagtatgtaggagttgaaagattagtccgccgtagtcggtgtacctgcccg

SEQ ID NO: 4976 - DNA, 372 bp, Homo sapiens
  misc_feature 157, 290, 331, 371, 372: n = A,T,C or G
aggtacgggttgcccctggcttggcactgcaggacgtgtctcgttttatctttccatttcaagtgctgggggcatgtggctcggtcaattttgggaccatctgtggaaccaccatgtgtgatcagacacccaacacacccgaggcacagtggtgcanaggagcgtctaatctttccagggcaggggtggagggattaaaggtcagggtgaccgactcacacaggactcgcagctggacgctactgttcctgtgcaagaactcgccgtccacctcgagagtggcactgcanaagaagctgcgtccgtcgtcaactctcggtagcatttagcntgaagttgagctggctgccccggggccgcggccgctctann

SEQ ID NO: 4977 - DNA, 696 bp, Homo sapiens
  misc_feature 152, 183, 184, 239, 241, 285, 384, 583, 642, 653: n = A,T,C or G
cgcggtgggcggccgcccgggcaggtacttgccgcccagccacgcccgcgcgccagccaccatgctaggtaacaagcgactggggctgtccggactgaccctcgccctgtccctgctcgtgtgcctgggtgcgctggccgaggcgtactttntttttttttttttttttttttttttaaaggnntaacagatgtatttcaaatacagcatgttttacaggagttcacaagcttttcatntntaaaaaaaaactttcaactacctgactgttccattccaccccanacaaacctgacatgactgaactacttcatgtgttactttcccaaaaataaagttaaaaaaaaaaggaactcatgataaatgcagatctctaatacagtntctaacacaaaagaagctttaaaaagacagtttctttccttatttgattagctagaagtttatctaggtaaaagcaaaaaaaaaatttacaaagcataacataacattggggttctttttatactcaagatgtttaactgttcaaaatgacaacaattacatcttttaagagtataataaaaatggggggaaaacagcnaacccaactgacaaaagggtagatgctaaataaaccaaagtttttttttttaaggggtngggaagaaatncacagcttgggggaaatcttaaaaatttaaaaaaaaaaaaaaa

SEQ ID NO: 4978 - DNA, 488 bp, Homo sapiens
ccgcggtggcggccgcccgggcaggtactttttttttttttttttttttttgcaacctagcagttcaaccaatttctcttttaataaaagctgcacattacagtggtataaatttatcttttaaacactccacataaaaacatgtgcaccctctccttctacatttaatcattagtagtctctaaaatggtaaaataaaactgaatttatattagcaaatgaaagtgcaagtttgtacgcggggggtggcctttggggccgaagtgggcgtgcggctcgcgctgttcgcggccttcctggtgacggagctgctccccccgttccagagactcatccagccggaggagatgtggctctaccggaacccctacgtggaggcggagtatttccccaccaagccgatgtttgttattgcatttctctctccactgtctctgatcttcctggccaaatttctcaagaaggcagacacaagagacagcagacaa

SEQ ID NO: 4979 - DNA, 413 bp, Homo sapiens
ccgggcaggtacccagccccgcagggtcctggaggaggtctcatgtctgttctggggctcctggggctccctcctcctttgggggtggctccaggaaaattggggtgactgagggtggcttcttcactgagtagggggaagccgggacccccaccaccaggaagtggttcttcttccgaaacaatctccacaggccccgatggttgccacgcacatccaggtcccagatatggaggcacttggcaagctgggtccaggtggtgaagtcatcatctttctccattcgaataaaggccacgtaggtgtggccctctgtgtctggcaggaaagagtcttcacaagggttcttgctgtggtccagaacctcagcctcactgagcagcctgtaaactttcacttcatcccgcgtacct

SEQ ID NO: 4980 - DNA, 124 bp, Homo sapiens
  misc_feature 55, 82: n = A,T,C or G
ccgggcaggtactttttttttttcttttttttttttgtgggtgtctttggggttnggttggttcggggtatggggttagcancggtgtgtgtgtgctgggtaggatgggcgggggttgtgttga

SEQ ID NO: 4981 - DNA, 201 bp, Homo sapiens
  misc_feature 65, 71, 89, 155, 185: n = A,T,C or G
acgtcggatgacatgttaccatgacacaaaacgacaatgaccacggcaccacaccaagaatcatntacctntattacaaccagacattngcactcaaataaggaggtgctgccgtatacttatccgttgctggaggcagcatgaatgggaaccanacacagctggaaagcaatcgggtaacagancgccaaccctgtacct

SEQ ID NO: 4982 - DNA, 267 bp, Homo sapiens
  misc_feature 1, 4, 39, 81, 85, 87, 95, 104, 110, 119, 141, 153, 160, 189,197, 215, 220, 222, 234, 240, 245, 250: n = A,T,C or G
naanaaatctttattaaatgaatgaaaggaggaaggagnccttaactgtacctaaccttccactcttaagtatcaattaancttntntgttcagnccagcgttnagggcncctactgcnccccccgccccacacacttttnacaaaaaggtcncctgctntgtgtgacttgccctttccccggccagtntggggcanagggaaataacccccctntgctntntggtctcagttnactcgnaactnaaagngggtcggttcaaacccc

SEQ ID NO: 4983 - DNA, 274 bp, Homo sapiens
  misc_feature 171, 183, 222, 249, 253, 257: n = A,T,C or G
ctccaccgcggtggcggccgctggcccaggagagaacacggggaggtttgtttgtgtgaaaggaaagtagtccaggctgtccctgaaactgagtctgtggacactgtggaaagctttgaacaattgtgttttccgtcacaaggagtcttttgtaaatgctttgtaccctcnggcccgctctanaactagtggatccccccggggcttgcaaggaattccatnatcaagctttatccgatacccgtccgncctncgangggggggccccggtacc

SEQ ID NO: 4984 - DNA, 348 bp, Homo sapiens
ccgggcaggtaccttggctccggctacttcactgccatccagaacttgaggaaaagtgaggaggaagtggctgcccggcgtgcgcgggtcgtgtggtgtgcggtgggcgagcaggagctgcgcaagtgtaaccagtggagtggcttgagcgaaggcagcgtgacctgctcctcggcctccaccacagaggactgcatcgccctggtgctgaaaggagaagctgatgccatgactttgtctgactacaatattcaaaaggagtctactcttcatcttgtgttgagacttcgtggtggtgctaagaaaaggaagaagaagtcttacaccactcccaagaagaataagcac

SEQ ID NO: 4985 - DNA, 412 bp, Homo sapiens
  misc_feature 8, 310: n = A,T,C or G
ggcgaatnggagctccccgcggtggcggccgtccgggcacggtacagtatatttggccaatctcagcttagctcacagtagctacccatcccccacccctcagccctgtagcaggcagctgtgcacatgttcctagagcagcttacttgcagctggcagaaaccagggttgacacaaaagaccccgtcctctaaatatcgtggatctgttctttctgctgattgctgcttcttcactacagtgacacaaacacagaggcaaagcagccattgttgcacatacccataccatgattgcaagcccctctatntttggctgaagttattttcagagggattttaaagagctgacaccgtcaccctcctcatccactttatgtttttcttttccctttttgggagccaggtcatta

SEQ ID NO: 4986 - DNA, 154 bp, Homo sapiens
  misc_feature 23, 45, 55, 75, 139: n = A,T,C or G
tacttagggcgaattggagctcnccgcggtggcggccgagggcangtggacatgnacttggagtggcgccaaggncggatcgcccgggtcgtgctgcaagatgaggacatcaccaccaagattgagggtgactggaagnggctcaacacactga

SEQ ID NO: 4987 - DNA, 312 bp, Homo sapiens
  misc_feature 170, 174, 196, 197, 276, 283, 293: n = A,T,C or G
cttagggcgaattggagctccccgcggtggcggccgcccgggcaggtacgcgggggagtcaaccggatcggtgactgtggagggcgagctgagccctggccgccgccacaatgggccgcgagtttgggaatctgacgcggatgccgcatgttgatcagctacagcttgtnaccngttcgagcaagcgccgcctatnncgcactgtcttcactaaaggaatccccaatgttcttgcgcccgcattcgggagtcttttctttcgcgtggtgcccgcanttttgtngtgtttttanctttatcctacacatgggg

SEQ ID NO: 4988 - DNA, 308 bp, Homo sapiens
  misc_feature 29, 209, 236, 240, 243, 254, 255, 286, 297, 302: n = A,T,C or G
acgactactatagggcgaattggagctcnccgcggtggcggccgcccgggcaggtacgcggggaagtgaggcagcggaggacgacctttttccggttccggcctggcgagagtttgtgcggcgacatgaaactgcttacccacaatctgctgagctcgcatgtgcggggggtggggtcccgtggcttccccctgcgcccccaggccacncgaagggtcccttttttgcccttgtgngaanttnaaacccccaannttcgtggccgccgtattgatacctaaaagtnggagttggtcngcgtncctgga

SEQ ID NO: 4989 - DNA, 149 bp, Homo sapiens
  misc_feature 27: n = A,T,C or G
cactactatagggcgaattggagctcnccgcggtggcggccgcggtacgcgggcggcctcatcgccgtcatcgtggtggtcgtggtggccctcgtcgccggcatggccgtcctggtgatcaccaaccggagaaagtcggggaagtacct

SEQ ID NO: 4990 - DNA, 170 bp, Homo sapiens
  misc_feature 103, 108, 128, 138: n = A,T,C or G
tacttagggcgaattggagctccccgcggtggcggccgaggtactttttttttttttttttttttttttttggtttttttttttttttttttttttttttttnaaagnagttagcatttaatgaaacnccctccatgnggcttcaagccaccaggacacaggccccccca

SEQ ID NO: 4991 - DNA, 466 bp, Homo sapiens
ctccccgcggtggcggccgaggtacgcgggggaggagaggcaggaggcgacggtcctgacatctcacacattgcccgactcgctggtgtatggagccgactggtcctggctgctcttccgttctctgcagcgggccccctcgtggtcctttcctagcaacctaggaaccaagacggcagacctgaaaggttgcaagcgagttgccaacaccctgtcatgaatgcagagaggataacgatggggagggccatgccagaccccagagtggaatgaagccactcacagagggcatgaggaagaatggcacctggctgcaggctacagcagccaccacacgtgactgtggcgtgaacccagaagaagcagactcaagccttcagcctcctggccacctgctccttctatgaccatgcgctccacctctgggagtgggaggggaactgagcttgaaatcatgaagcccctt

SEQ ID NO: 4992 - DNA, 498 bp, Homo sapiens
  misc_feature 205, 207, 212, 214, 393: n = A,T,C or G
tacttagggcgaattggagctccccgcggtggcggccgcccgggcaggtacgcgggatcggattgtgatgtgtgccaaaaggtggattttatacgacaactggcgatgaccagctcagtggctggactgaaagaagctccaaagcacttcccaaagccaaacttgctccaaaaaatggtcatggtcattgtttggtggtttggtngncagtntngatcccacttacagctttcttgaatccagggtggaaaccattacatcttgataagtatgctcagcaaatcaatgagatgcaccaaaaactgcaatgcctgcagccggcattggccaccagaaagggcccaattcttttcacgacaacactgggccgcacgttgcacaaccaacgcttcnaaaattgaactaattgggctatgaagttttgcctcatctgccatattcacctgacctcttgccaacaaactaccacttctttaggcatctcagcaacgtttttgc

SEQ ID NO: 4993 - DNA, 383 bp, Homo sapiens
  misc_feature 50, 56, 62, 64, 93, 102, 110, 111, 147, 187, 194, 211, 216,221, 231, 233, 248, 252, 265, 280, 295, 296, 311, 314, 315,321, 327, 330, 338, 355, 358, 364: n = A,T,C or G
ttagggcgaattggagctccccgcggtggcggccgaggtacgcggggganacggancaggtnanaactcccgtgctgatcattatgtgggctngcgcctgtnatcccagnnctttgggaggcctaggtgggcggatcacgaggtcangagatcgagaccttcctggctaacaaggtgaaatcctgtntctactnaaaattaccaaaaaaantttgncttgnaaaatgggtngncgggccgcctgtaantttncacgcttactctngggaggcttgtatgncaacgaagaattggnntgaacccaggaggcntannttgcantgggcnganatcctgtnactgtaatccagcctgngtnacacancaagactccgtttttaaaa

SEQ ID NO: 4994 - DNA, 219 bp, Homo sapiens
  misc_feature 2, 149, 167, 176, 178, 182, 186, 191: n = A,T,C or G
gnggcggccgaggtacgcgggatgccaaactctaataaaatggagtcggggggccacatagaagccctcacacacacatgcccgtaacaggatttatcacaagacacgcctgcatgtagaccagacacagggcgtatggaaagcacgtnctcaagactgtagtattncaaatgaantngaanattntttancttaccacgggccgctctagaaactagt

SEQ ID NO: 4995 - DNA, 488 bp, Homo sapiens
  misc_feature 21, 179, 191, 193, 226, 270, 293, 308, 310, 342, 374, 385,398, 435, 438, 439, 459, 469: n = A,T,C or G
ccgcggtggcggccgcccggncaggtacgcggggagaaaccctcataaagtagatgcagagggcagtaagatataactcaactttgaaaatgtcagccgttatagttgaagaaatctgacccaagagacctcgctccgctgcaagatggaaggaagcttaagtaagacataaattttgnaatgaacctttngncaccaacaatccgccgccacctgtgacttgcantcatcatccattaccacaaaattagttgcaggatggctactcgnatccctccacacatgatcatcangtatttgcctcctgngncccaaccggcctgagtcaaattcccactctgncacccaaggctggagtgcagtgatgtaatctngggctcactgnaaccttcacttgnccaggttccaagtggattcttcctggcctcagccctncannagttagctggggattacaangggttaacgnacttcacttgattaaaaaa

SEQ ID NO: 4996 - DNA, 314 bp, Homo sapiens
  misc_feature 21, 83, 202, 209, 294: n = A,T,C or G
cttagggcgaattggagctcnccgcggtggcggccgcccgggcatggtaccgcttggcggtgcggcctggtgtcggcttgcangttctttctgtgtttgttctctgccctgccaaggccgtagagctggtgcgtgcgggtagcggggctctccgaggagccgcacgccggcggcaccatggtccacctcactactctccttntgcaaanggctacccgtggggggccactttaaaccaatcccgccttgccctggggtgggcttgcaccaatcggcccgctctagaactagtgngatcccccgggctgcaagga

SEQ ID NO: 4997 - DNA, 459 bp, Homo sapiens
  misc_feature 207, 217, 369, 370, 426: n = A,T,C or G
tacttagggcgaattggagctccccgcggtggcggcccgaggtacttctgatacgctcatcactttctgtgtcagaactttgaaaagcaaagacaggacatcgacttccttcgagattgcctactgattcttctagaagacagagatctactggggtagtccgggactgactgcaaagagcctcaggtaaagcagaggccattggcngccctaaagnttggccagtcaaagaggcttgcggaaaggttgaaaatgaaaaggagagtaagcagagggatgataagacccaaaacctctgatgggatcagggtctgtaggaagagagaaatgaagctggggagaatccagctcaggggaaggtgccagcannaaggcctggttagtaaagcctccagggatgtttgccagtgggagcagtactgtgcnatagcttaatgagctccctggaaaaaacaaatg

SEQ ID NO: 4998 - DNA, 154 bp, Homo sapiens
  misc_feature 3, 23, 63, 64, 69, 80, 136: n = A,T,C or G
tanggcgaattggagctccccgnggtggcggccgcccgggcaggacgcgggggctgcttagcnnggganagatggcaggngacgggctggttggagagtctgcggacagcccagaagactgcgctgctgcaggacnggagaaggaaggttcact

SEQ ID NO: 4999 - DNA, 431 bp, Homo sapiens
  misc_feature 3, 16, 180, 186, 189, 326: n = A,T,C or G
cgnggtggcggccgangtacctggctttttagactctacatagggaattccaccataattaagatgtataaacttgacctacagcctaaagcccaatatgcttccctcaagaacatcaacagtgttcaagcttagctttgttacagaaaatgaggtagggtgcggtggctcacatctgtnattttnaanaggtttggggaggcccaaggcaggcgcatcagctgaggtcaagagtttgagaccagcctggtcaaaatgatgaaaccccatctatactaaaaatacaaaaattagctgggcatggtggcacacgcccgttatcccanctactcaggaggctgaggcactagaaatcaccctgaacccagggagggcgggaggcttgccagtgagcttgagatcacgcccacttgcattccagggggggaaaa

SEQ ID NO: 5000 - DNA, 462 bp, Homo sapiens
  misc_feature 49, 206, 210, 211, 222, 227, 252, 272, 324, 376, 380, 396,402, 430, 432, 437: n = A,T,C or G
ctacttagggcgaattggagctccccgcggtggcggccgaggtactttnttttttttttttttttttcttcttgttctcaaaaaggtcaaagggagcccgacgaggaataaatagcaatgccctgaattccaactgaccttctacagaaaagtgcttgactgccaagtggtcttcccagtcattagtgaggctcttgtaaaattcnccanncctccctcttngggtnaatggtcatcaggggtttcctgggnccaaaataaggctttggggncttgttatagttcttcctgatcaatgtatttctctttgatcttcttagtttncttcttcttatccttaccgctgtcatcctcctcatctgaacccacatcttgnatcntgggcttttcttcatnatcctnttatacttcctcttctttctcacctttntnttccnctgccttcatcatcactaattttcc

SEQ ID NO: 5001 - DNA, 438 bp, Homo sapiens
  misc_feature 214: n = A,T,C or G
actacttagggcgaattggagctccccgcggtggcggccgaggtaccagtaaaagagagaaacacacaggttaaatatcttcttgtggggttaaggggtagaacctatcttgccttcactctcaagataacgactcaaattaagctttttgagcaccactcttgtggggacacacatacgctgatctaggaatgaaatcttcgtgggcctcaanttctagatctactatgccagtttctctctgggctttagcctttgagaacctgtataagaatacgtaagtaatccagagctgtgaagagtttaaaggccaacttctccagtgaactcaacctctgggtcacttgcaaccaggaaattgggatacctcataatgatgcagggaaagaccccgaggttcatgatggagtttcaaaggcccacgtttcattttaggga

SEQ ID NO: 5002 - DNA, 427 bp, Homo sapiens
  misc_feature 195: n = A,T,C or G
ccgcggtggcggccgaggtacgcgggaagcattctcaggtctggattagagacaggaatctgtctccacttccttacatggctagacacagagcccgggagggcaaaggaaaattggaggccccttcttcccatgagccattttctctgcatcccctgcccataagccttcactggcctctgatcacccctcatnggttgactgcagctgctcctttcaagtgccctcatgccctccactgtgctcagcggcacggaaagagtgaatactcagttcttcctgagggaactgaggcacagagaagtggagggcatagaactgccaagtggcagggccatgatagggaactaggcagcctgccttggcaacctgtgtttttaaaatgttgcttatgttcatctgtggacctcttactcaccctctcctg

SEQ ID NO: 5003 - DNA, 438 bp, Homo sapiens
  misc_feature 211, 253: n = A,T,C or G
tacttagggcgaattggagctccccgcggtggcggccgtgaagtatgccccccaacttgctggcgtgctgcttctttgggaacacccctgggtggcgtttcatgtaatgggacacgatgcccttcttgctgaacgactggaaagagcacaaggagcactttttcttctccactgcccgcctgagttcctcgctcagctgaaggggaagtcntccttgggccggggaatgggatgatcacttttgtttggggcnttgtcgcttgatggtcctggaggctgccaagcagtgagtgtaatacgcatcaattgtcgtggcgcttctggtagtgggctgccagacctttgcggatggggttggtgtaggcacacagggcacactttgaagaaggtttgttcttgcccttctggcttgggctcggacatttattgtgccttgat

SEQ ID NO: 5004 - DNA, 380 bp, Homo sapiens
  misc_feature 209, 212, 360: n = A,T,C or G
actacttagggcgaattggagctcaccgcggtggcggccgcccgggcaggtacatctggcaggggactgttcattcaactttcgaaagagttgcttagcctgactctgatactgttgaaggtcccggccagactgttcgtcctcctgcatcgaggcggccagcgggagcccgtccgccactcgggcgatcattgttagcaacaccattnttnacaaactacaggggatccaacactggcccggaaggcccttggcgccgtcctcacttcctccgccgcgacaacagttataccctatgtcccagttaccggagatccagctgcttgcgtccccgcgtacctcggccgctctagaactagntgggatcccccgggctgcag

SEQ ID NO: 5005 - DNA, 383 bp, Homo sapiens
  misc_feature 18, 197, 205, 207, 214, 215, 258, 267, 306, 308, 311, 314,334, 347, 351, 354, 366, 372: n = A,T,C or G
agggcgaattggagctcnccgcggtggcggccgaggtacttttttttttttttttttttttttttggactcctccatgctgcagaacccacagtgctgtccatagaggagaacaagcaacgaagatcatggctaaagatcttagagatccttaaaatgccgattcctaatctcttgctgaaaactactgacttttanaaattttncncactttnncccacttcttgtaatcccaagaaatattaaggaaccaaggttncttaaaacncccgaaggttttacttttttcaactgggtggttttgcantngtngtnggggggggaccaaaaaagtnttattgtgtcatntggnagngccatgggaaanactgtnggggatctgca

SEQ ID NO: 5006 - DNA, 439 bp, Homo sapiens
  misc_feature 129, 136, 138, 166, 180, 181, 184, 189, 194, 196, 200, 201,205, 211, 212, 213, 214, 215, 218, 224, 228, 234, 239, 242,254, 261, 273, 283, 289, 293, 296, 299, 304, 328, 339, 342,349, 362, 365, 367, 372, 373, 375, 378, 382, 391, 392: n = A,T,C or G
  misc_feature 395, 396, 402, 415: n = A,T,C or G
acttagggcgaattggagctccccgcggtggcggccgaggtacttttttttttttttttttttttctttttttttttttttttttttttttttttttttttttttttttgggcgcagctgttttaattnaatcccncncccctgtccagcaggaaaccccttatanaaaacccaaatccnnatntgggngtttntncttnngccnggggannnnnttnaaaaanaggntgattngaaanttntcggggcggggngcagggnacctgcccgggnggccgaggtncctcangggnggnctngttgncccggaagtgcatgggaggataanccccgaaaaanccntccgggnggggttcataaanggncnccccnnancanaggntggaagaannccnncaggtntgccaaaaattcntgacctgccccaaaaaccaaatta

SEQ ID NO: 5007 - DNA, 413 bp, Homo sapiens
  misc_feature 124, 134, 158, 186, 202, 223, 267, 292, 314, 323, 328, 347,349, 378, 394, 403: n = A,T,C or G
ttagggcgaattggagctccccgcggtggcggccgcccgggcaggtactttttttttttttttttttttttcattcttgtataaaccagtttatttcttctatcattagtctgttaaatgccanacctcatttntgtggtctgttgaatgaatcctanacagttctgtgagaaagcagcaattacncagttatatacatggncaagttaaaatttaaaccatnaaatgataatttaagttttaaaaaaaaaaatactgggccaggcncgggggctcacacctgtaataccancactttgggaggccgaggcggntggatcacnaggtntgaggcgggcagatcaccnanatcaggagatcgagaccatcctggctaanatggtgaaaccccatntttactaangatacaaaaa

SEQ ID NO: 5008 - DNA, 456 bp, Homo sapiens
  misc_feature 26, 172, 180, 206, 212, 220, 267, 291, 307, 342, 349, 355: n = A,T,C or G
actactatagggcgaattggagctcnccgcggtggcggccgaggtactcctcgtttcgaaaggccgatgcgatataaaaccacttgccagtgatccggtccagggtggcgttggtgatgggcaccggaactttttttttttttttttttttttggggtctagtcatcctcgncggtcttntgcttcttggtatcgacatcgtcatncttaanaatttttnagcttgcccgctttgcccgtaggcttgacttcagcttcctcatcttnatctccatcctcttcctcaccatnacctttcttcttcctnctcctcttcctccccaccttcttcctcttcttcgnctacctnattgtnagcctcctgctccccattttcctcattaagcattcccgttagcagggggcgtctcttccattttctgccttttccacaaacttcctttctttctcctttta

SEQ ID NO: 5009 - DNA, 419 bp, Homo sapiens
  misc_feature 197, 198, 199, 216, 221, 332, 352: n = A,T,C or G
gggcgaattggagctccccgcggtggcggccgaggtacctgttatcaatataaaataatcttcctgttgaatgcttcatgacttgaattctactttgataaaaacattgccatactgctttttatcttgatgaattcatctggcattgctttgccttatcatctcatctggagtttttaaatgccatttgtttcaannngtcttttaccaccttantaaantagacttttgccatttaacaagggtagctcaaattcttttactaattgttacatcgaaacattctttcatcatatttcctgtgtttatttggttttttcaacttcctctgnttactatctacagtgatttnggaaagggagatttcctttaaaacaaacaagccttattgggaatggcttttatgatttttaaagtaa

SEQ ID NO: 5010 - DNA, 452 bp, Homo sapiens
  misc_feature 20, 183, 190, 195, 220, 286, 288, 302, 331, 333, 343, 430,435: n = A,T,C or G
ttagggcgaattggagctcnccgcggtggcggccgaggtacgcggggggagaaggggcgcaggtggccgccatcttggattgcgaactgggtcgctacgcttcacgccaggggcggagtggcggcccttctgttacccgccacacacgtcgccgctggggactgggaaatcagggcatcgganagtgccncattnatgggatgccattggcttagtccangggaaagataactatagaatgaaaagttataaagaataaagccctaaatcctcaagagatgccgtntnacgaagagaagaanaaggaatacagcttagaaaaaaacaaaananaaaaaaaaangtccctgcccgggccggcccgctctagaactagtgggatcccccgggctgcaggaaattcgatatcaagcttattcgatacccgtcnacctngagggggggggccccgg

SEQ ID NO: 5011 - DNA, 437 bp, Homo sapiens
ctacttagggcgaattggagctccccgcggtggcggccgcccgggcaggtaccactatgcctggctactttttgtgtttttagtggagacggggtttcaccatgttggcccggctggtctcgaactcctgactttcagtgatccacctgcattggcctcccagagtgctgggattacaggcatgagtcaccttgccaggcctacttttggtttttttataagaatgaagccaaagtgtggtggctaaggctacacagagacttgagagtctgaggtgggaggatcacttggtgccaggggtttgagagcagcctgggcaacataagcaacacctcatctgtagaaaaaaagtttacaaaaccttggtttacaaggtgtgagcctccgtgtccagctcccaagttttctagtctctacctgcactgcttatattgcta

SEQ ID NO: 5012 - DNA, 284 bp, Homo sapiens
  misc_feature 11, 44, 76: n = A,T,C or G
cgcccgggcangtacgcggggctgcgcggatcggcgtccgcatngggcggctgctgaggggtgactgttctttcanctcccagcactggagcgctcggcccctgccgcactggatgccagcagttactaaaagtgagcctggcatttcagctgccttgaggtgcagtgttggggatccagagccatgtcggacctgctactactgggcctgattgggggcctgactctcttactgctgctgacgctgctggcctttgccgggtacctcggccgctctagaacta

SEQ ID NO: 5013 - DNA, 373 bp, Homo sapiens
  misc_feature 14, 15, 56, 58, 60, 67, 79, 171, 173, 196, 261, 348: n = A,T,C or G
tagggcgaattggnnctccacccgcggtggcggcccgcccgggcaggtactttatntntnttttttnttttgaatcttncaggttctggctggggcatgagctttcttgtttttttccaaaacttgtaatgggagtcactgcttgcagagcggtctgattcaacttgatcncnactgcctcagggttgtcggtcangtaaatctgtctggagatgttgtttattgcacatatccactcttcattttcctttctgctctcancctggaggattattcccgattttccattgggcgtggtgatctggaagcatgtagcgccggtcttcgcaatccacggccatcactgancagttgtccaggtcccggatcaaac

SEQ ID NO: 5014 - DNA, 547 bp, Homo sapiens
actacttagggcgaattggagctccccgcggtggcggccgaggtacgcggggatgaacctgtgtcttcaggctccctttgtctctgaggtttgggctgtggaggtgagcagaaggtgcctgtctttactaaacagccaggatggaggaatcctgacaagagctgtggtgttctgagccggaccctttcttcctctctgaaaattgttgaggaggccttgcgagcaggagtggtaaagaaaatgatgaaattcctgaagacaggaggtgagactgcatcacgttatgctataaagatactagctatctgcacgaatagttatcatgaagctcgggaagaagtaataagactggataaaaagttgagcgttatgatgaagctgctcagctcggaggatgaggttctggtgggcaacgctgccctctgccttggtaactgcatggaggtgcccaacgttgcgtcttccctgctaaagacggaccttttgtaggtcttgttaaagcttgcaggcagtgacacacagaagacggccgctctaaaactagtgg

SEQ ID NO: 5015 - DNA, 667 bp, Homo sapiens
  misc_feature 49, 415, 419, 450, 563, 585, 587, 601, 613, 624, 659: n = A,T,C or G
ccgcggtggcggccgcccgggcaggtacttttttttttttttttttttnttttgaggtggagtttcactcttgtcgcccaggctggagtgcagtagtatgatcttggctcactgcaacttctacctccagggttcaagtgattctcctgtctcagcctcctgagtagctgagactacaggcacataccaccacacccagctaatttttgtatttttaatagagacggggtttcactatgttggccaggctggtctcaaatgcctgaccttgagtgatccacccgcctcggcctcccaaagagctgggattacaggtgtgagccaccaggcccggcctcctagattaattcttgacattttttggatcaagtaagaaccactggagcctttcctggaaaaaagaacacatactcantctnacacacaatttctgggggctcacagaccctnttgaagcctatccataaaccccctggtgaagtccccctgcccgatagcctgagggaagacatgtgagtggatatatgtgcactaacaggggcgaaaacagacctggatgcttntgcaatcccagaaaagcatgangnaccattttccaaanctttggtttgtnggcctgggctnctcccctaattttattttttttgaaaaacttaacntttttttt

SEQ ID NO: 5016 - DNA, 410 bp, Homo sapiens
  misc_feature 366: n = A,T,C or G
ccgcggtggcggccgcccgggcaggtacgcgggtggaattgggaagggatgaaggaggctgtgcctccgggttgcacgaagagtccgagtcatttctcagaaggttttgataggtgggccttagaggagacgccgccgagcaccgcaagaactggaaaacacacccctctctgtctgcctgggagagccacggaaattggcacttctctgaagtgaagctgaggagaaggctgtaaatctgccaaaacagccttgaagtattcttttgtcatgaggaagtgacggctgctggagggaggtgaacaccacaagggagagatggcatctggcctgggccccgcctagcagcagcctccacctcctaangccagggcccctgtggggatgcgcccactagaccacccatggac

SEQ ID NO: 5017 - DNA, 244 bp, Homo sapiens
  misc_feature 27, 59, 117, 173, 179, 187, 195, 200, 211, 225: n = A,T,C or G
gcggtggcggccgcccggccaggtacncgggatctttggtggctgtggtcgggtgtttnctggtgcccccagctgaagccaacaagagttctgaagatatccggtgcaaatgcatcngtccaccttatagaaacatcaatgggcacatttacaaccagaatgtatcccagaangactgnaaactgtnttgcaccntggtnggaagcccatnccaagtgccttggncatagaccttggaaggcct

SEQ ID NO: 5018 - DNA, 445 bp, Homo sapiens
  misc_feature 199, 281: n = A,T,C or G
actacttagggcgaattggagctccccgcggtggcggccgcccgggcaggtacctcagctggaaatacagaaagcacccaccttctgcgttgatctcactgggaactgcagatcagagctgttcctattcggccatcttgccagcctcctggctgaaggtttttctacatttcttacatttatatgttttttatccagntgggacatctctgattaacagtaggggaattggtgataactaaaggcttggccacatgcactacattcttaaggttcttctncaggtatgacttctttgatgacaaattaaggataactttcttctgaacgcctttcccacatttcaaaacacttgataggggcctttgggccaagtggtggaagtcttttggatgcttgaagcacagggatggagctatcacttaaaaagccttttccacatttc

SEQ ID NO: 5019 - DNA, 443 bp, Homo sapiens
  misc_feature 138, 141, 225, 235, 236, 244, 259, 267, 292, 300, 312, 331,339, 375, 398, 421: n = A,T,C or G
ctacttagggcgaattggagctccccgcggtggcggccgcccgggcaggtacttttttttttttttttttttttttttttggatgcacccaacccactctaaagaatgtcagtgactttatacaaaagaggaagcatntanattggcattgtgaacataatgcataggggcgcggcgggagctctagagcctaattggttaaaaccgtggcctctggaaatatgnactaccttgnnactttgantgcctccactctgcncatttatntaactgcatgacccttttgaaaaanaacttttntatccttcgggnccctcattgttgtagaaanggaggatnataactactttatcttcaccggggttgttctaagtnttaaaattgggataatacaagtnaagtaccttcggccgcttcttanaactagttgggatcccccgggc

SEQ ID NO: 5020 - DNA, 174 bp, Homo sapiens
ctacttagggcgaattggagctccccgcggtggcggccgaggtacgcgggctcctacttggataactgtggtaattctagagctaatacatgccgacgggcgctgacccccttcgcgggggggatgcgtgcatttatcagatcaaaaccaacccggtcagcccctctccggccc

SEQ ID NO: 5021 - DNA, 448 bp, Homo sapiens
  misc_feature 23, 132, 173, 222, 251, 404, 436: n = A,T,C or G
tacttagggcgaattggagctcnccgcggtggcggccgcccgggcaggtacttttttttttttttttttttttttgctgggcgtggtggcgggtgcctgtaatcccagctactcaggaggctgaggcagganaatggcgtgaacccaggaagcagagcttgcagtgagctganatcatgccaccgcactccagcctgggcaatacaagcgagactgcccatncacagatgaagggataaagtaactgtggnggacatacacaaagagaatagtcttcagccagaaaatcagaatgaaatttcatcctttggagccatactgttgaacctggaggacagcatggtaaatgacctgttcaaacacagcttgcagggattgaggaaactgctgtacctcggcccgcntcttaaaactagttggatcccccggggcttgnagggaatttcga

SEQ ID NO: 5022 - DNA, 434 bp, Homo sapiens
  misc_feature 413: n = A,T,C or G
acgactactatagggcgaattgggagctccacccgcggtggcggcccgcccgggcaggtacccgcattcaaggggcaatttcatccatgtctatgccaaggactacttcccttttccctcccaaataatccctcccaacacaaagaaacaaacaaaaaagagctaggcaatggaatgaaatgacacccagtagtgctgtaggaattatgagaatgaatccagtcagtctaatcctcgaacacttccaagaacaaaggggggaagagttctgtggggcattccaccttcatgtgcaggaagcggctggcatggcaggctcctatcatccgcagatctgtcaccttcatcaggagttttggccaaaagtgtgtcacgtggtgttttcggtaattgatatagtgttcaaaggccancaggaaactatcttggtacct

SEQ ID NO: 5023 - DNA, 130 bp, Homo sapiens
aggtacgcgggttttcttttcgccatcttttgtctttccgtggagctgtcgccatgaaggtcgagctgtgcagttttagcgggtacgcgggtgaagatcctcaccgagcgcggctacagcttcaccacca

SEQ ID NO: 5024 - DNA, 373 bp, Homo sapiens
  misc_feature 363: n = A,T,C or G
cgccacgctggttttgcatcttcaggagacgctcgtagccctcgcgcttctcctcggccagtccgcgatgatgtggctctggaaggcgtgagccacttcatcgcggtcgaaatagaagcccagagagaggtaggtgtaggaggcctgcaggtacgcgggtatattcaggtgaatgagccctggaagcggattaaaggcagtgaggctgacaggcaacgggcaggaacagtgactggcttggcagtgaatatagctgccttgctctctgtcatgcttcagccttacatgcccacggttagtgccacaatccaggcccagctgcagctcccacctccagcctgcagtatcctgctgacaaacttnctgtgtacct

SEQ ID NO: 5025 - DNA, 145 bp, Homo sapiens
  misc_feature 38, 45, 58, 63, 70, 74, 107, 111, 145: n = A,T,C or G
aattggatctccccgcggtggcggccgaggtacgcggngagtcantgtcagcccgaangctgnaggaaanattncaacagatccagggagcattcacctgccctgtntccnaacagagccaccaaggaggagcaggggagcgacn

SEQ ID NO: 5026 - DNA, 428 bp, Homo sapiens
  misc_feature 21, 93, 95, 98, 118, 155, 176, 181, 191, 193, 199, 202, 207,229, 233, 236, 314, 318, 325, 340, 353, 374, 382, 393, 398,414: n = A,T,C or G
cttagggcgaattggagctcnccgcggtggcggccgcccgggcaggtactttttttttttttttttttttttttttttttttttttttttaananaanatggcctttattgcagcacnaactgagggggactgcatgtccacagctctccagganctgccaaaggcaacgggcccnccctncccctgcaanangccctncangggcntaaaaccatggcttcccttaangaanggntaaccccgtgcttgtaaacaagggcccaaacaacacatagaggagaggcagcatcatcatgtgcagctttgctacaanaaanatagttnttaatttccccgcgnacctgggccgctntaaaactagtgggatcccccnggctgcanggaattcgatntcaanccttatcgatacccgncaaccttgaggggg

SEQ ID NO: 5027 - DNA, 325 bp, Homo sapiens
  misc_feature 112, 116, 119, 123, 124, 127, 131, 189, 223, 240, 285, 310: n = A,T,C or G
gggtataatactaagttgagatgatatcatttacgggggaaggcgctttgtgaagtaggccttatttctcttgtcctttcgtacttgtctagctcctctcggttcttccganccanctncgtnnatnattngggcccggatgtctgccatgatcttggcgaggtcctgagatttgggggcatttacctncacggtcaacccagagctggcaatctgggcttgnaggccttttacttcctnttcgtggttcttcttcatgaagagcagctcctccttgagagcctngatctctgtctccagctgcagtcgngtgatattggtgtcc

SEQ ID NO: 5028 - DNA, 123 bp, Homo sapiens
  misc_feature 44, 45, 49, 57, 84, 107, 113: n = A,T,C or G
actacttagggcgaattggagctccccgcggtggcggccgtcgnncccntgctcctncttggtggctctctcagaggactccanagttgtatccccaggccgtcttncccgcntacctgcccg

SEQ ID NO: 5029 - DNA, 446 bp, Homo sapiens
ctacttagggcgaattggagctccccgcggtggcggccgaggtacttttatattttaattcaaaacctaagatatgggtaaaagaaacaatccaaattttgacttggcaatcctgaccacatgatgccagtcgaaaaaactgaagaccttgttctccatcagaaactggctgtgaagaaaaatcgcagcaggtaattccaagatcatgtgcttttttcactatgcagacacctcattttatcatcccacactgttaaatcaccacatgaggagccagtgacaaagaagcttccattaggagaaaatgcacatgccgccaaggagccatctttaacactaccacatctatataatttgtatgactgtgcattccacaaaaccacagttccatcagctgcccctgatgccaaaacacgttgggagtctggggaaaaactggcaaaccc

SEQ ID NO: 5030 - DNA, 369 bp, Homo sapiens
  misc_feature 4, 170, 179, 223, 246: n = A,T,C or G
gcgnccgggcaggtactttacgttacttcttgcacttttcccctggtggagaaagccttaacttatcttgaaaaggtgcaaataagcaatagcatatacccatagcctctggcacggggcagttcggtaaagtttataagcaagttttcacaaggcacggctcctaattnttgaaattnttggggctgaagtgggcccctgtcgtgggttattctcagcacangttaatcattgttcacaaacatnttgagtgacagcagagagccacggcacatagaaatggcactttcgtgacccagcgcagtggctcatgcctgtaatcccagtacctcggccgctctagaactagttggatcccccgggctgcag

SEQ ID NO: 5031 - DNA, 328 bp, Homo sapiens
  misc_feature 80, 82, 103, 120, 156, 200, 202, 207, 210, 214, 225, 226,239, 240, 280, 281, 282, 291, 294, 300, 308, 317, 318: n = A,T,C or G
acttagggcgattggagctccccgcggtggcggccgaggtacttttttttttttttttttttttttttggactgagtctntntcgctctgtcacccaggctgnggtgcggtggcgctctntcggctcactgaaacctttgcttcccgggttccagngattcttctttggtagctgggatgacaggcgcacaccataaccngnccctnttnaaancttatttggannccccccgggcctnnaggaaatttcccatatacaaaggcttatccgattacccgnnnaaaccctcnaangggggnggccccgngtcacccanncttttgttcc

SEQ ID NO: 5032 - DNA, 436 bp, Homo sapiens
  misc_feature 247, 268, 269, 345, 386, 395: n = A,T,C or G
ccgcggtggcggccgcccgggcaggtactatgctttactaatagaaatacctctttgctgggggaggggagtgcttctgaatagaaattacccactctgagttacagctttagtggcatattaatggggatttaaatttacagtaaaaacaaaaacaaaaacaaaaacaaacctattccaattatgacaaaatctattttttttttaaaacctatcttagataggaccatctcccttacgattaagnatggcagaacagaattgtcanngaggagaggtttggtctgaagagggttatctgtccaggagaacgctttatccccaaagcaattgcgcttcagtttnctgtgcgcagcatagcaccttgttggggggagaaaaagttnagcacctanaaagtccatgaaccaaattccagcagcaaaaaaaactttcc

SEQ ID NO: 5033 - DNA, 151 bp, Homo sapiens
ttagggcgaattggagctccccgcggtggcggccgaggtacgcggggagtcagtgtcagcccgaaggctgaaggaaaaagagcaacagatccagggagcattcacctgccctgtctccaaacagagccaccaaggaggagcaggggagcga

SEQ ID NO: 5034 - DNA, 426 bp, Homo sapiens
  misc_feature 223, 352, 387: n = A,T,C or G
aggtcggccaaggtacaaagctactttaagtctgctcttaagatcagtttttgctcatattcaaaatacatggaatgttggcacaaaactgaagctgctgtagaaagatcacagatgttctgtgggttactcaaacttccccccgcgtaccgattgtttcattggacatgatgttatggaaacgtgccagctgtccaaacatctgtaggccagcctccttttntcggcgggcttctggagtcagactatcccattcacctcgatccttctcaatttgctgaatctttatcttgctcaaatactgtatggcttcatccaaaaggaagatggcatcattcattagcaggttaanaaagcggaggaaaagtggggggattcatggcttcntaaatccttagaggcatagtcagccaaattccttaatgc

SEQ ID NO: 5035 - DNA, 262 bp, Homo sapiens
  misc_feature 158, 162, 166, 171, 198, 210, 212, 215, 229, 232, 241: n = A,T,C or G
ccgggcatgtacgcgggaggtgcccagtgtccacactgactagtggtgactgcgttggacagtgcagatacagaacatttctgtcatcacagaaagttcctttggacagagccatgttaagtgatgttatcacaagatggacagaaaccattcccatngatngganttaanttttttcagaaccccaatttttgtggnagaaataaattnantgnattgccttttacantantggtcttcnatgaaattcctttaaattatt

SEQ ID NO: 5036 - DNA, 448 bp, Homo sapiens
  misc_feature 180, 181, 188, 354, 369, 439: n = A,T,C or G
aggtacatggtggatgattttaaatcaccctagtgtgctgagaccttgagaataaagtgtgtgattggtttcatacttgaagacggatataaaggaagaatatttcctttatgtgtttctccagaatggtgcctgtttctctctgtgtctcaatgcctgggactggaggttgataggttnnaagtgtngttcttacccgcctccttttttcctttaatcttattttttgatgaacacatatatagggagaacatctatcctatgaataagaacctggtcatgctttactcctgtatttgatattttgttcatttccaatttgattctctacttttccctttttttggtattatngtgactaattagttnggccatattggttaaaaagtctcttcaaaatttaaggcccagaatttcttaaaaacattgcctgcaagcnaaggaggga

SEQ ID NO: 5037 - DNA, 328 bp, Homo sapiens
  misc_feature 14, 183, 193, 238, 312: n = A,T,C or G
ccgcggtggcggcncgaggtacacacatcacagcccagacacgcggtgttgattgagacactctgtgccctgggggctcagtgtcgctggtctgcttgtaacatctactcaactcagaatgaagtagctgcagcactggctgaggctggagttgcagtgttcgctttggaaggggcgagtcanaagatgactnctgggtggttgtaattggaccgctgtgtggaacattggatgggtnggcaaggccaacatgatcctggatgatgggggagacttaacccacttggggtttataaagaagtatccaaaacntgttttaagaaagatc

SEQ ID NO: 5038 - DNA, 447 bp, Homo sapiens
ccgcggtggcggccgcccgggcaggtaccattccgggtcatccgcagaaattcctcatagatggcaactctgtctactctccgagccagtggcgagaagttacacagggagtccaccccggtgtggtgcctgttggggacagacctgaatgttgaaacttgacagtcagaaaaataactcttgatgctgcttgtttcggaagagttggttgagcgcatcctcaatattccttttgttcctctggtaattggtggtgcctggctgggctttgtcctgggaatatggtaggttggtgatggtgaaattcaggtaagaagtgctgggtgctggagctgcctgttggttgataaactgatgactccatttctgtcacatggatgtccaccaactggtagggtggagcccagccaatggaaatgaggcattcagggtcttatctagaaagac

SEQ ID NO: 5039 - DNA, 368 bp, Homo sapiens
  misc_feature 267, 284, 293, 294, 313, 324, 363: n = A,T,C or G
ccgcggtggcggcccgaggtacaaaataaattttcagaaaccaaccctaaagaaaaggggctatattaattacctgacaaggaattcaaaactattgtcataaagatgcttaatgagctcaggaaaattatgcatgaagaaaatgagaattttaacaaagagaatattaacaaagagaaaatataaagaaagaactgaacagaaattttggagaagaatgtagtaacttaactaaaaagttcactagaggagttcagcacaagactnttcaaaaaaaaaaaacnaaaagggcnntccctggagttatcctganccagggtcggnggggtcagacccagacccagcacgaagaccaacaacaanaacgc

SEQ ID NO: 5040 - DNA, 364 bp, Homo sapiens
  misc_feature 360: n = A,T,C or G
ccgcggtggcggccgaggtacttgtggctggttggaagggagccccaaaattaaaccctccagtgccagaggtggagaaagaaaaccctgtagcaggtgtggttgttgccgtctttgcagtgccaaacgtgaacccgcctgtaggggccccagtgcctccaaaattaaacccgctcatggctccggactctggtggcggcagctactctggctcccaaagcaaatccgtcggtgtctgcagccttgggaagatttctgtgggttttcaactgtcctctctctctcctccttaggtcacctggcattctggtcccattttcctccctgatgcctttcaacctacaggcataacccgacttncatt

SEQ ID NO: 5041 - DNA, 759 bp, Homo sapiens
  misc_feature 524, 577, 606, 616, 623, 637, 641, 659, 667, 675, 687, 706,751: n = A,T,C or G
ccgcggtggcggccgaggtacaaataggtgaaagaaagaaacttaactttttgtttagggtgtttgcaaggggacatattttcaatagaaaaatcagcaggttttggcctttggtctgtttctgaagggtgagtattctccatgacagaaaaaggcaaaggtaggtcagaggtggcgagtttcttcattctcaaacaagggagaagacatcctttgattaaagaatgaggcggggtgggggagggaaggacatggaccccctccctttaaaatttcatctgggccttcaaggcacttcaaaagacacagagtgaacagtgctggctgccacttcactcggtattgactggatagtttagactgttgggctagacctggctcacccttaaaaaaaaacaaacacaaacacacaaatacaataaataaaacaaatgtaggctacaaattttaaaccagacctctttcaaataaactgaaagataaatatctccatctgcaaggccagcttgcaattcatcaataancaccaagttcagatttttctttttttaagtgtgctcaaaaagccccatgcttncgagggggcaaaaaagccagaaattgaangccccgttgnaagcacnaaaattttcagggncctnccttctggtgtaccctgnccgggccnggccgttntagaactaagtnggatccccccgggctgcanggaaattcgatattaaagcttatccgataccggtcgaccctcgangggggggg

SEQ ID NO: 5042 - DNA, 384 bp, Homo sapiens
  misc_feature 80, 165: n = A,T,C or G
cgcccgggcaggtacgtgttttccttcaggaccagagctgagaggagctgggatcgcggcggcaatggaacgggcctcanaaaggcgcacggccagcgcgctttttgcggggttccgggccttgggacttttcagcaacgacattccacacgtggtgcggttcancgcgctcaagcgccggttctatgtaacaacctgcgtgggcaagagtttccacacctatgacgttcagaaacttagtctggttgcagtaagtaattctgttccacaggatatctgctgtatggcagctgatggcagattaatctttgctgcttatggaaatgttttctctgcatttgcccgtaataaagagatagtacctcggccgctctagaactagtg

SEQ ID NO: 5043 - DNA, 591 bp, Homo sapiens
  misc_feature 577, 580: n = A,T,C or G
cgaattggagctccccgcggtggcggccgcccgggcaggtaccatgcttcctgtaaagcctgcagagccatgagccaattaaacctcttttctttacagattacccagtcttgtggatcatgaggtcaggagatcgagaccatcctggctcatacggtgaaaccccatctctactaaaaatataaaaaattagccaggcatggtggcgggcgcctgtagtcccagctactcgggaggctgaggcaggagaatggcatgaacccaggaggtggaggttgcatagagccgagatcgcgccactgcactccagcctgggcgacagagcaaggccccgtctcaaaaaaaaccccaaaaaaccaaaaaaccaaattacccagtctcaggtatttctttatagcaatccaagaacggcctaatacaatgggctcccaacacataaaacatacagcagccacaaaataattagaaacaatgttaagtaatgcccactaaattttgaatagcaaaatatagcatagaagtataaaacaaatgtatttcttatccctcaaaaaaggggcatctttttggtttttgntantgctggttgga

SEQ ID NO: 5044 - DNA, 465 bp, Homo sapiens
  misc_feature 142, 260, 284, 340, 347, 352, 355, 357, 363, 377, 426, 443: n = A,T,C or G
ggagctcccccgcggtggcggcccgaggtactgtaatgagtttaggagaggctgggcacggtggctcatgaccgtaatcccagcactttgggaggctgaagcaggaggatcatttgagtccaggagttcaagactagcctgngcaacatagtgagacttacgtctctataaaaagtaaaatgaattaagctgggtatggtgatgcacacctgtggtcccactactcaggaggctgacgtgggaagattgcttgagcctgngacatctaggctgcattgagctgngattgcactactgcactccagcctgggcaacacagcatgaccctgtcccataacanaaaatcntaaanaananacagtncccacgtaaagacnttaggtcaaggtgtagcccatgaggtggcaagaaatgggctacattttntaccccagaagactacnatagcccttatgaaacttaagg

SEQ ID NO: 5045 - DNA, 642 bp, Homo sapiens
  misc_feature 549, 561, 575: n = A,T,C or G
tacgactcactataggggcgaattggagctccccgcggtggcggcccgcccgggcaggtactgcaagtaaaacctactccccaaaaatgtgtggctttgggtctgcattaaacgctgtagtccatgttcatgccaaaaatggctgggaacgtttgctttatttacattcagtcagcgttgctttcagatcacactttatccacacaggaaagccagtcagcctataatgaagtagttattaaaataaatgtaatgaatatgtctacaaagtatagtttagtggtttattttgctaaaatgcacatatatttgatataatttagtttgagaagttcagctagtttttctcctttgtttgactttgtcaatttctatctggtttttaagggtctgagcttagcttgtgcatgcaaggttttggggtttttttatttttttttgagcacagcttttcaccttttaatttgttgggtatttttctcttaataagagaaatattggccatcgatttttacatataatacaaagtgtgtttttccagtaccctcngcccgctctagnaactaagtggaatnccccgggctgcaggaaattctgatatcaagccttaatcgatacccgttcgaccctcgaggggggggc

SEQ ID NO: 5046 - DNA, 494 bp, Homo sapiens
ggtacagggacgtgatgttggagaactacaggaacctcggcttcctggcaggactctgtcttcctgacctgaatattatctccatgttggagcaagggaaagagccctggactgtggtgagccaagtgaaaatagcgaggaacccaaactgtggggaatgcatgaaaggcgtgatcaccggtatctctcctaaatgtgtgatcaaggaattaccaccaatacagaacagtaacacaggagaaaaattccaagcagtgatgttggaaggacatgaaagctatgacactgaaaatttttacttcagggaaatccggaaaaatctacaggaagttgactttcaatggaaagatggtgaaataaattataaagaagggccgatgacccataaaaacaatcttctggtcaaagagttcgacatagtcaaggggacgtagaaaacaagcatatggaaaatcagcttatattaaggtttcagtccggtctgggtgaaattg

SEQ ID NO: 5047 - DNA, 589 bp, Homo sapiens
  misc_feature 449: n = A,T,C or G
aggtacggaatagactggaatggaacgaaatggaatggaatggaattgaatggaatggaatcaacccgagtgcaatggaatggaatggaatggaatggaatggaatggaaataacccgaatggaatgtaatgtaatggagtgtaagggaattgaatacaatcaatccgaatgtaatggaattgaatggaacggaatggaatggaatggaatggaatggaatggaatggaatgcactggaatgaaatcaaacctagtgcaatgggaatggaatggaatggaatggaatggtatggaatggaatggaatggaatggaacgcaaaagaatggaatggaacgaaatggaatggaatgaaatggaatggaatggaatggaatggaatggaatggaatcaacccgagtgcaggggaatggaatggaattgaaggcaatggaatggaatcatcccngaattgaatggaatggaatggaatcaaccttgatttcaatgggaatgcaatggaatggaatggaatggaatggaatggaaatggaattacccgaattagaatggaattgaatgggaatggaatgggaatggaaataaaat

SEQ ID NO: 5048 - DNA, 710 bp, Homo sapiens
  misc_feature 593, 670, 691, 697: n = A,T,C or G
cgaggtacgcgggggacggtcactttttccaacaaaacccactccatagccatgtggatttttatccaaaggctcaacaaccagagggaatggtgagacctgataactaaaatactgttattggcaagggtttgaaatgtgtaagaacctaggagggaaaggaagattgagcaacataggaaaaggggaagagaggctgagtgtcaccaaggtccaaactccatttataaaaatactgcaaaaccaggagttgatggtagaagtgcatatgatccatggcaggagtaaatctctccacctcctctaactctctgaaaactctagagttggagcaagtcttccatttgcttcttatccccttaaaagaatgccttccacttcccaacagcccccatcaagggaccccaagaggccaccatgctcttatctcgcactttctttcctattccccttgcctgaatctggagtggggttgagccctctgccttcaaccttaagatttagggaagttctttccccaactgtctacttggaaaggtagaatgaagtcttgaattttgaagtaacgaatgcaaaattccacttcagcagangcaatgttatttatgtacctgcccgggccgggccgctcttagaactaggtggatccccccggcctgcagggaattcnatatcaaagcttttttgaaanccgtcngaccctcgagggg

SEQ ID NO: 5049 - DNA, 301 bp, Homo sapiens
gtttcccctcacggtggacttaccaagaatttttcagccgctaccgtgtcctaatgaagcagaaagatgtgctgagtgacagaaagcaaacatgcaagaatgtgttagagaaactgatactggacaaggacaaataccagtttggtaagacaaagatctttttcccgtgccggttcaagtgggcctatcttagaaaaatttgagagctgacaaactggagaagctgcctgcatccggatccagaagaccatccgagggtggctgcttgagaaagaagtacctcggccgctctagaactagt

SEQ ID NO: 5050 - DNA, 152 bp, Homo sapiens
  misc_feature 22, 24, 44, 46, 49, 51, 62, 80, 104, 110, 129: n = A,T,C or G
ccgcggtggcggccgaccgggnangacctgttaccatgacacanancgncnatgaccacggnaccacaccaagaatcatntacctctattacaaccagacattngcactnaaataaggaggtgctgccntatacttatccgttgctggaggc

SEQ ID NO: 5051 - DNA, 152 bp, Homo sapiens
  misc_feature 110: n = A,T,C or G
aggtacagggttggcgctctgttacccgattgctttccagctgtgtctggttcccattcatgctgcctccagcaacggataagtatacaggcagcacctccttatttgantgcaaatgtctggttgtaatacgaggtagaatgattcttggt

SEQ ID NO: 5052 - DNA, 173 bp, Homo sapiens
  misc_feature 18, 163: n = A,T,C or G
ctatagggcgaattgganctccccgcggtggcggccgaggtacttttttttttttttttttttttttgggtaaatggtttggctaaggttgtctggtagtaaggtggagtgggtttgaacgctttcttaattggtggctgcttttaggcctactatgggtgtnaaaatttttt

SEQ ID NO: 5053 - DNA, 385 bp, Homo sapiens
  misc_feature 204, 206, 211, 255, 314, 366: n = A,T,C or G
aattggagctccccgcggtggcggccgcccgggcaggtacatgaagtagaaggcccaaaatggagagataaattataatggtaaccttgattgtgacagagcttctttcttcatatttgcattcacagcgtagacagtatgcttctacatcaggcccccgcacaggcatgggctccacaacatgaaggcaatcacaaatctttntngagantatgttcttatttataaatattgcccagaatttttcttttatangggagggcaagatacatttacatctgacatcctcgaaattctgccgcccacagcgcctnctgaccacagcccccgtcggctttctaattctgtgagctgccctcgtgggcntggcctcccccgcgtacct

SEQ ID NO: 5054 - DNA, 412 bp, Homo sapiens
  misc_feature 388: n = A,T,C or G
aggtacgcgggaggagaggcaacatactccaaatagttgggttcttcagggaagctattagaaactcaggtgacttgttagagcactaacttggtcagagccaaatcctggcaaacgctgcctgaccttcactctgtggttggggcagtgagaaccactgaggtccaatgatgaagacttggaggtctggatccagtctctctttgttttaatgtgacttaggtgctgtcaacattagcaagataatggaaatcacgacgccagtgggtgcttacctccctgctaggcatgcaggggctggcggttggcaggggaaggaggcccagtgagccgagtcccttaggggagggagaagtttgtccttctttgcccccacagtctacccttnaggggccctttgtggcagtgccaa

SEQ ID NO: 5055 - DNA, 403 bp, Homo sapiens
  misc_feature 209: n = A,T,C or G
cactacttagggcgaattggagctccccgcggtggcggccgaggtactttttttttttttttttttttttgtatttttagtagagacggggtttcaccatgctggccaggctggtctcgaactcctgacctcgtgatccgcccgcctcggcctcccaaagtgctgggattacaaacgtgagccaccgcgcctggccttccttgctcttnttggttccaaatcctgggaacgcctgaatcaacaggcggacatctgtcaaaccttcctagcaactacgcctgcggatggccaacctgaccctggaagacagtggggtttagttaagcacagattggactttttttttttttttttttttttggggtttttgtttagtttatatccttctttttttttttttttt

SEQ ID NO: 5056 - DNA, 674 bp, Homo sapiens
  misc_feature 122, 162, 178, 181, 182, 185, 212, 240, 251, 264, 271, 279,286, 301, 321, 323, 341, 358, 364, 373, 385, 388, 391, 400,401, 411, 424, 427, 431, 442, 447, 454, 462, 475, 477, 495,501, 508, 534, 539, 541, 562, 564, 568, 569, 573, 579: n = A,T,C or G
  misc_feature 583, 588, 607, 611, 613, 622, 644, 646, 657: n = A,T,C or G
ccgggcaggtactttttttttttttttttttttttttgaaatgaacaaatatttatttatcttttataacaagtaaggcaatgttgcttaaaggaagacaaacaaacataaaagattccgtngacaatgcattttttcatctgttcggcacaatgcttttgncataaatgggaagtangtnnacnaggcaaaaacttttccccagggaacantttccagttcttttcgggccgggcaagncacctttaagnggccaggaattgnactttgngtctcggntttcaanaaattactccttatncctctggtttttccaagggnanccaggttggggtaaaaanaggccttggccttttanttaagnaattggaanggggccccatanatnccntccccaagnngttcatgtgnttgggggaaaagnggntctncccttttggtntattnccggggntttcccgnaaaaccccccccngnaaccatggtccggtccgnccccanatcctangtaactaaaacccatccgggaggggnccaangnttgggggggggaaagcccaananccannttgncccttngttnttttntaaaaattggaaagccccncccncntgggggggntcgtccaaagaggccctgtttngnccttggtaagngggcctttggaaaaaaa

SEQ ID NO: 5057 - DNA, 458 bp, Homo sapiens
ccgcggtggcggccgaggtacgcggggagaacgtgtgcagctcagccagccacagaactggaatttttcaggagcagggggagcatggagtttggactttgctgagcaactgaagtggagcgcagagcttgctcgcttaggagagagcatcatggatggcaaacaagggggcatggatgggaaccaagcccgcggggccaagggactttcctggcatcaggcttctttcaaacccattgatgggcgatgctgtgtctgattggtctcctatgcatgaagctgcaatccacggacatcagctgtctctgaggaacctcatcagccaggggtgggctgtgaacatcatcacggcagatcatgtttccccactccatgaagcctgtcttggaggtcatctctcttgtgtgaagattttattaaaagcatggagctcagcacggagccagcgttcaacctga

SEQ ID NO: 5058 - DNA, 136 bp, Homo sapiens
  misc_feature 83, 115: n = A,T,C or G
ccgggcaggtacttttttttttttttttttttttttttgaaatgaacaaatatttatttatcttttataacaagtaaggcaangttgcttaaaggaagacaaacaaacataaaanattccgttgacaattgcattt

SEQ ID NO: 5059 - DNA, 414 bp, Homo sapiens
  misc_feature 8, 83, 145, 159, 170, 204, 285, 388, 403: n = A,T,C or G
ttgttgtntcatttttttctaatgtctcccctctaccagctcacctgagataacagaatgaaaatggaaggacagccagattnctcctttgctctctgctcattctctctgaagtctaggttacccattttggggacccattatngggcaataacacanttcccaaagcntttggacagtttcttgttgtgttttagaattggntttcctttttcttagccttttcctgcaaaaggctcactcagtcccttgcttgctcagtggactgggctccccagggcctangctgccttcttttccatgtcccacccatgagccctccactggacagctcaggtaagcctggcccttcattctgcgctgtgttcttcctctgtgaaaatccaanacctcttacctcctntgcatgcaaag

SEQ ID NO: 5060 - DNA, 450 bp, Homo sapiens
  misc_feature 196: n = A,T,C or G
ccgcggtggcggccgaggtactttgggcttgctggtgtgacaaaaaatacatttgaggtaattccagtgaattctgcaggctctcctgttggggatgtgccattcatccgatcaggattgctggggtttgtagggccgggtagtttggtgttcgtggttgggaaaatggatggcttactgaagggttaagtggtcngaaagacataatgctgatgacattgttgctactggattggctgtagaatcaataaagactgtttatagaggaagaattgctgtgttttctgtgtctgtattttatgatgagcgcattgtggtggttgcggaacaaagacctgatgcttctgaggaagatagtttccagtggatgagccgcgtgctgcaggcgatcgatagcattcatcaagtgggggtttattgtcttgctctggtgccagccaatacattgcc

SEQ ID NO: 5061 - DNA, 295 bp, Homo sapiens
  misc_feature 59, 131, 154, 162, 173, 183, 212, 221, 246, 255, 262, 268,271, 278, 288: n = A,T,C or G
ggtactttttttttttttttttttttttttttccgaaaaataagacaatttattttgtngatgacatgattgtaaacctagttatgcctctgctccctcatttaaaaattaaaaatcaggccaggtgcggnggctcacgcctgtaatcccaacnctttgggnggcccaagggngggcctatcnccttgagatcagggatttctgaagaccangccttgacncaacaataagttgaaatcctgtctntactataanaacacanaattanccngggcgtngggggtgcantgccttg

SEQ ID NO: 5062 - DNA, 488 bp, Homo sapiens
  misc_feature 208, 279, 324: n = A,T,C or G
gactacttagggcgaattggagctccccgcggtggcggccgaggtacacgtgtgactgcggatggagctccagttttctcccaattttgcgctaggcagagaaaagtagaaacaaccagatgatgtccaccctgctagttctaaatcctcttttgggtgcttggtaaggagaggtggagggaagggaatatgaggaagggtcgtttangggaaattaaattccttggttgagccaatggggcggtggcctctagctgtggtcagcactgcacagagtangggtctggaaaggagaaagaggcagaagaatctggcttgaagtangatgcaaatacttacaacgaggaaactttctctgccagattcaaaggggcacatggcttttgtaacctggagaatgaggtgaggttagagctgtgttttcccttaccactggcttatcaagtggcctggcacagtaccttgcccgggccggccgctctagaact

SEQ ID NO: 5063 - DNA, 366 bp, Homo sapiens
cactacttagggcgaattggagctccccgcggtggcggccgcccgggcaggtactgcagcatgcactggcatactatagcttggtccagctcttccagagccccaaccactttccaaattgaatcctaaagtttttggtgcaggacccaatttaaatccatgtttcttccccgcgtacaaattgctaatcaaaaggaaggtggagatggtagttttaataaacaaattagtaaaacgggtgttgctgaatacagcacccggtagcctctatttgcaaacccggggagggaagggggtgccccaacaacagtggctccgcctcattgtccaggcacaggcaaaccgcagtagtgagctttggtacct

SEQ ID NO: 5064 - DNA, 353 bp, Homo sapiens
  misc_feature 92, 165, 171, 176, 217, 244, 245, 265, 277, 283, 312, 314,337: n = A,T,C or G
aaagttgaagagcaaaacgacgtgtctaacgtcacacattgagctttaaagacagatgggatctggcatgcgtttgtcagttaacagtgctngcacaaatacaactcttgttaaaatcgtaaggattttatgtcgtgagacactcaggactcacctgatctcggngttcantgtgngcgtagtttttgatttgcgcctcgcccttgggcaagtgcanaatcctggggttatacaaagctcatcnnagttaacccctttgtcccantccgcagaatgngagctnagagcccggccatgggaggctcggttatntnggcaggaaaatcaaggaacccangtttgagcaggggccg

SEQ ID NO: 5065 - DNA, 258 bp, Homo sapiens
  misc_feature 78, 80, 134, 158, 176, 197, 199, 218, 238, 247: n = A,T,C or G
ctatagggcgaattggagctccccgcggtggcggccgcccgggcaggtactttttttttttttttttttttttttttngnggaaatatttgcttttaaacatttgattttcatcaatctttggatgatttgacnttattgtcaatatctagtaaattngccaaaatattttttttnttccttgcgccccttttcccncntaaaaactggggcgggggngaattttctgttttcctaancaggaaggnggcaaagctgg

SEQ ID NO: 5066 - DNA, 439 bp, Homo sapiens
  misc_feature 434: n = A,T,C or G
ccgggcaggtaccaatttactgtattagtccgttttcatgctgccgataaagacatacccgagactgggtaatttacaaagaaaagaagtttaattgaacttacaattccatatggctggggaagcttcacagtcatgatggaaggcaaagaaggagcaagtcacatcttacataaatggtagcaggcaaaaagtgagatctcatgcaggggagctcctctttttaaaaccatcagatctcagctgggcacagtggctcacgcctgtaatcccagcactttgggaagctgagacaggcagattatctgaagtcaggacttcaaggccagcctggccaacatggtgaaatcccctctccactaaaaatacaaaaattagccaggcatggtggcaggcaactgtaatcccaactacttgggaggctgagacagganaatca

SEQ ID NO: 5067 - DNA, 323 bp, Homo sapiens
  misc_feature 239: n = A,T,C or G
gccctatcactacttagggcgaattggagctccccgcggtggcggccgcccgggcaggtacttttttttttttttttttttttgagacagcgtcttagtctgtcgccaaggctggagtgcagtggcgcaatcaaagcttgctgcagccttgaactcctgggctcaagcaatcctcttacctcagcaactaggactacagggcacatgccaccacgcttggccttctaatttatttctgngtcaacaaaataaaactcaggcctaggaatagcttggttcagaaatcacagagggacttagtattccattaatcccgcgtacct

SEQ ID NO: 5068 - DNA, 471 bp, Homo sapiens
  misc_feature 144, 163, 202, 207, 234, 295, 296, 334, 364, 423, 431, 441,444, 453, 454: n = A,T,C or G
aggtacgcggggcaccagaaacatatgaagaatatggatatgatgatacatacgcagaacaaagttacgaaggctacgaaggctattacagccagagtcaaggggactcagaatattatgactatggacatggggaggttcaangattctttatgaagcttantgggccaaggtaccgacctgggaattggggtaccaggcncgttngctgaaggcccctcctgctagaccagntggaaggggagcatacagtagagtcacccattatgggacgttattaaaaacaaacattganngggggaaaatattcagtttattgaggcaaaaggtttgnttacttgaattttctttgtaatctcccagngatttcgctgttggctttttaccccactaaccaaggaccaaagttaaattagttcctanagatggtnttttctatcngtnggttccccnnttttctttcttcccccc

SEQ ID NO: 5069 - DNA, 313 bp, Homo sapiens
  misc_feature 74, 76, 108, 119, 162, 174, 177, 188, 190, 194, 208, 224,233, 252, 295, 303, 306: n = A,T,C or G
aggtactttttttttttttttttttttttggtagagatgggacttcctacgttgctcaggctcgtcttgaactncngagttcaagtgatccacccaccttggcctttnaaagtgctganattacaggtgtgagccaccacacctggccaaaaataataaaanatttttaattcntgntaaaaaaaaananaagngcagcaaaagtggnaaaatgttgtttcatncaacaatanctcttttctttcacacatntggaaatataaatatgtatccatttaaattactaactatccangttgaacncanccctgaa

SEQ ID NO: 5070 - DNA, 389 bp, Homo sapiens
  misc_feature 61, 119, 162, 298, 374: n = A,T,C or G
tgggccagtggttgggggcagaaagaaggtcagaggccctgaacagataaagcaggaggtngagagtgaggaggaaaaacccgacaggatggatattgacagtgatacacagattcaancacatctttgcaaacaagggctagagaaaagaggaagcctcanctggagaaggacacaaagccgaaagagcccaggtatactcccgtgagcatctaccgaggaaaagctgctgctcaagaggctggaagcttgtcccggtgctgttgccatgactccggaagctcggtagactgaaacncaaactgattgtcagacaagcgaaaagggataggggattaccactttttgacttggatcaagttgttaatgctgcntcttttgttagtttg

SEQ ID NO: 5071 - DNA, 444 bp, Homo sapiens
  misc_feature 152, 382, 430: n = A,T,C or G
aggtacgcgggggacatatcacctaagctctggattcgcagataggccccaatctcttttttgggcaatgctcgggtaagagagcagagtcacatcaagtggttgatgggcccagagatatatcacattgccccttgtggacagggaccagnccagggggactcacatcacaatagaggtaggacaaggaatacatcacaatacgttttgagagcagaaccaaaaaagagtaacataatctttgtgttgagtgcagcaatatgttacacttttctttgtgggcagaacgtgtaaagaaggaaaaagttggccggacacggtggcctgtaatcccaacactttgggaggtcaaggtgggcagatcacctgaggtcaggagttnaagaccagcctggccaacatggcaaaacgctgtctctactaaaaaatncaaaaattggctgg

SEQ ID NO: 5072 - DNA, 388 bp, Homo sapiens
  misc_feature 2, 7: n = A,T,C or G
tngggcnaattggagctccccgcggtggcggccgaggtacactgggctctcaacgtggtgtggaaggtagcctgttacagtgctggattcataaaagggtctttatggtttgtgaaagaatatctgtgtgcttagggaggaaactttttgatctgcagaaaagccagaagacatctaggacatccataaaaattcatcagagagcattttactactgagctgcaaagggaaaaacttaaaatggatatgaaaagtgaagagagtgatcataggagaaaaccatttcagatgacaagagcacctcaaaggcagcagcctcaaggagcagccatggccccagacttgtcgcacggatgcagaaaacttaatggaggaggctgaggtcaga

SEQ ID NO: 5073 - DNA, 630 bp, Homo sapiens
  misc_feature 78, 118, 122, 126, 139, 151, 164, 165, 174, 177, 178, 185,188, 193, 206, 220, 224, 236, 243, 294, 302, 308, 309, 313,347, 349, 361, 372, 381, 382, 389, 395, 406, 409, 410, 411,422, 430, 436, 451, 455, 462, 463, 468, 473, 482, 485: n = A,T,C or G
  misc_feature 495, 503, 531, 533, 535, 547, 548, 554, 559, 563, 585, 591,598, 604: n = A,T,C or G
aggtacgcggggatgctgccatggctgcaagacctcattcaattgatgggagagtagttgagccaaaacgtgctgtancaagagaggaatctggaaaaccaggggctcatgtaactgngaantaanctgtttgttcggnggattttaaagnaaaatttccttgnngaaccaatncannctttagnagnattancttttagagtganataattgagaaaanaatntgcattacccantttgtantataaatataacttgtattacgtgccacgtatccttggtaataggaaaaangtagggcntttatnngtcntatttgtttatcttttttttgaatgggaacccantngtattcaccttnttggcaattanaaaaattcnngtgaatnttgggnaaagaaaaaanttnnntcaatttaccncaattccnaaattngggggttccatttanattngcctaannaaatntttanaggtaaaanagnggtccttttntcgcttcnttaaggtaaccaaaaggaaaaaaattgncnanagcggaaaaagnntcttcnatagnaatnttttccttaatgggaaggttgngtaaangaagtgnaagggnccaacaccttttttgggccttttttg

SEQ ID NO: 5074 - DNA, 428 bp, Homo sapiens
  misc_feature 211, 268, 312, 335, 360, 393: n = A,T,C or G
ctgagcgccgacccacgccctgcctgctcttccagtccagccaacactctaagcaggcaccgcctccactcgcagcccccgggatgggtcccactccctaccgcagatccccaggccccctccacccagtcggctagccctcgcctttgccatcccgatactaaaatgtctgatgatgctggtgacaccttagccactggagacaaagcanaagttactgagatgcctaatagtgattctttacctgaggatgcagaagtgcattgtngattcagctgcagtttcacatgagccaacaccagctgaccccanaggggaggggcatgaaaatgcanctgtgcagggtgcaggggctgccgncattgggccccctgtgcagcctcaggatgccancgccctggaagcccccttctcaatggaagaccgtg

SEQ ID NO: 5075 - DNA, 662 bp, Homo sapiens
  misc_feature 76, 103, 104, 155, 162, 173, 180, 183, 185, 190, 195, 203,204, 216, 221, 222, 225, 237, 244, 256, 267, 282, 294, 295,298, 300, 303, 305, 313, 321, 323, 327, 331, 337, 348, 350,353, 356, 365, 384, 392, 394, 397, 411, 419, 426, 446: n = A,T,C or G
  misc_feature 449, 453, 455, 470, 474, 488, 491, 555, 558, 569, 571, 578,590, 594, 605, 606, 625, 639, 641, 653, 655: n = A,T,C or G
aggtacatcaaagaaaataagatatacctttttttttgagagggagtctcactctgtcgcccaggctggagtgcantggcgcgatcttggctcactgcaactnntgccttctgggttcaagctattcttctgcctcagactgccgagttagcctngggattnaccatattgtngcacctnacncnaccgngcccntttcttannaaacttaggtgngaatnnccncccggggccttngtcaatnggaaattttctntattattccanaggccttttatttcngaattaaccccnnttncngancnccttcttnaagtgggngngggngacnccccgnagataaccacncnagnccntttttttgntatttcccccttttttaangattggangnggnggtgttaaaaattntggcccgnccggccnttatggggcccgttaaaaanttncaantngggggtttccaattnaagncccttgggtttttntcnccttggttggtttggtaaaaaaatttttgtttttaaattccgccagttcttctaaccaatattnttnctccaacccancnaaaatcnaaattatccggnaagntcccccggggnngtaaaggcccatttaaaanaagtttgggttaananaaggccaccttngnggggggg

SEQ ID NO: 5076 - DNA, 491 bp, Homo sapiens
  misc_feature 141, 164, 165, 167, 169, 188, 204, 225, 232, 241, 243, 245,250, 256, 264, 268, 273, 285, 286, 318, 336, 343, 351, 362,370, 377, 384, 397, 401, 412, 417, 445, 453, 464, 468, 474,476, 481: n = A,T,C or G
aggtactttttttttttttttttttttctgaaatgaacaaatatttatttatcttttataacaagtaaggcaatgttgcttaaaggaagacaagcaaacataaaagattccgttgacaatgcatttttttcattctgttcnggcacaattgctttttcgtccannantnggaagaattgttgaccaanggcaaaaacctttttncaggggaacaatttcaagttnttttcgnggcggggcnangncaccntttatnggggcaangtantgtanctggggccacgnnttttattatgtaattgaaggggcctcaaatangtcaaccccatgtgttantgtgttnggggaaangggtattcctnttggttanttcccgnggttttncggaaaacccccnctgnaaccaaggtcngtccngccccaaatccaatgtaaccaataaccnacctttanggtggtccaantttngtgtgngntaagnccaaaaacca

SEQ ID NO: 5077 - DNA, 516 bp, Homo sapiens
  misc_feature 197, 228, 230, 273, 314, 334, 383, 405, 413, 428, 442, 449: n = A,T,C or G
aggtactgattttaaaaactaataacttaaaactgccacacgcaaaaaagaaaaccaaagtggtccacaaaacattctcctttccttctgaaggttttacgatgcattgttatcattaaccagtcttttactactaaacttaaaatggccaaatttggaaaccaaaaccaggtttctgaagacccgttctttccacncacttgattaagaagttgggggtgggccagngntattaagtgggataaatatttcattttaagccctttctgagcntttcttggggcagactttggatgaacctttgcccagcctcncagccagcctttctttgtcncaccttggcttttggatggacacccccacccggcaaactggttctggtnctcaatattcaacggaaccagncaaatagnccgaccccaaaaagngtggggattaggtnctggagnaaggctcttcaaccaccaccattggggcctttggcccaggggaaacccattattcaaaccaatgggg

SEQ ID NO: 5078 - DNA, 525 bp, Homo sapiens
  misc_feature 156, 159, 163, 206, 229, 234, 242, 263, 266, 280, 285, 293,294, 323, 337, 341, 351, 368, 376, 389, 392, 431, 434, 435,480, 488, 492, 503, 524: n = A,T,C or G
ggtggcgggaggaaccgttacgggaactgaagttgcggattaagcctgatcaagatgacaacctcccaaaagcaccgagacttcgtggcagagcccatgggggagaagccagtggggagcctggctgggattggtgaagtcctgggcaaagaaagnctnggtnggaaaaagggggttttttggacaaaggcccttattgtttgtcnctttgggcccagtttctgggtgnctaanagaaaagnatgatagactctcttccgggnaantgggctggaaaagnacacnttgttggnngcccatacggcccaaggcagtccccgggnacctgcatttccgnggantgccctttcngagtaggtgggttggcngaacgacnctttctttggtgnatngcctccttcttggggtaaaggctcttcaaattcccccangcnncttcaatcccaatagtttttttgccaagctcgtagttaagagggnaaccttcncttncccccctggtnccccttcttaaccggaaaagng

SEQ ID NO: 5079 - DNA, 300 bp, Homo sapiens
  misc_feature 102, 137, 159, 161, 176, 182, 187, 203, 206, 219, 223, 230,249: n = A,T,C or G
ctatagggcgaattggagctccccgcggtggcggccgcccgggcaggtactttttttttttttttttttttttttttagttggttggttggttggtttttgnttgtttgtttcgagacggggctccggctctgccgncgggggctgcagtgcaatggcncnatctcacctcactgnggcctnctggnctcaagcgaatccttncanatgttgcccaggnctgnagacagnctttagagaaagaagcatnggggagttcttccgaggacagacaagatttctggagtttggaaagggtgag

SEQ ID NO: 5080 - DNA, 456 bp, Homo sapiens
  misc_feature 371: n = A,T,C or G
tatcgactcctatagggcgaattggagctccccgcggtggcggccgaggtacttgcaaaagcacttgaagtcattaaaccagctcatatactgcaagagaaagaagaacagcatcagttggctgtcactgcataccttaaaaattcacgaaaagagcaccagcggatcctggctcgccgccagacaattgaggagagaaaaagaagcgccttgagagtctgaatattcagcgtgagaaagaagaattggaacagagggaagctgaactccagaaagtgcggaaggctgaggaagagaggctgcgccaggaagcaaaggagagagagaaggagcgtatcttacaaaaaaaaaaaaaaaaaaaaaaaaaggtncatgctaagacttcaccagtcaaagcgaactactatactcaattgatccaataacttgaccaacggaacaagttaccctagggat

SEQ ID NO: 5081 - DNA, 464 bp, Homo sapiens
  misc_feature 79, 120, 156, 167, 177, 186, 193, 198, 212, 214, 224, 227,230, 234, 237, 242, 252, 255, 265, 270, 287, 290, 300, 303,315, 321, 323, 327, 370, 373, 377, 386, 397, 398, 408, 425,428, 440, 445, 451: n = A,T,C or G
tcggtggccgcgctcaggtatgcgcaactcccgcagaagtcctcgaaaagtgtgcgacggggaccctaaggccgacatngtcctgtccttctcccgcgtaccagacccgacaggaccagntgcatctataacaccacctacctgaatgtttcaacnggggaaaaatnggggacccantctttccangataccnttggngaagggcacaatgnanccatttttcnctncancttngtnttgantccttccagnggnacatcccaangaacncttaccatggcctgtgnctnttttgaacgntgnaaaccgtaatgnatgtanancaancctggggggggccttgtactggtacttattgcttggaccaaangcnccantaaggaccntacctcaatanngtaagtccanaccttgggggaaagtanggntttcttaaccgnaaaangccttncttccggaacctt

SEQ ID NO: 5082 - DNA, 288 bp, Homo sapiens
  misc_feature 53, 64, 74, 90, 94, 98, 100, 102, 107, 112, 115, 121, 131,135, 144, 165, 167, 175, 184, 198, 204, 206, 217, 220, 222,237, 240, 242, 246, 253, 255, 261, 265, 275: n = A,T,C or G
aggtactttttttttttttcttttttttttttttttttttttttttttttttncattgggggcncttttatttncagccaaggaaaaaanaaanctancntntattnaaaanggnaaagcntgtttgtatnaaancaaatattncatcatcacttattttctatncngttggaanctaagtttnacatttttcatttncaacananatttgaatttnaangncccaaaaatataaanaananggcnttaaaangncctatntgtnggcagccctnccctgaaaacttt

SEQ ID NO: 5083 - DNA, 562 bp, Homo sapiens
  misc_feature 119, 147, 153: n = A,T,C or G
aggtacagccacccctctgcaacccgaagagacagggaagggtatatacaatgaaaccccttatatacaacttctgttactcgcattccagactgctacagctttgtgtcacttcaganagcaaatccttttaaaaaacagatggtnaaaganaaaatgagaaagacttccccaaaaaaaggatacttccattccactatactaatgcaggctcttcggatggggttattgagtgataaacagaaaagggcgcgggcaggtcggctgttggacgaagttaccctgttttttgctcttggcgtattgctgacgttttctttgggagagagatcctacaggtggggggtgcagaggtgctcatagtttgggcagccttggcctgtctagcagcatcgattgtagcttgccaagacaggacagtttgcttggagctatgccgctgaagaagttggtccttcaccagaaagaggaagtctggtgcctcttgcataagtttgcctctggggagaaggagaaaaacaaaaattttttttttaaatgaggatccaatgggtaggagaaa

SEQ ID NO: 5084 - DNA, 553 bp, Homo sapiens
ccgcggtggcggcccgcccgggcaggtacattaaataataacagaaaccaagagtttgtttctagtagtagaagtataagtggagagagtgctacatcagagagtgaatttaccttagggggtgacgacagtggtgtgtcaatgaacccagctaggagtgcacttgcactgttggccatggcccaatctggggatgcagtcagtgtcaagattgaagaagaaaaccaagatttaatgcattttaaccttcaaaagaaaagagctaaaggaaaagggcaagttaaagaggaagacaacagtaatcagaaacagctgaaaagacctgcccaaggcaaacgccagaatccaaggggaacagatatttacttaccgtatactcctccttcctcagaaagctgccatgatggttatcagcatcaagaaaaaatgagacagaagatcaaagaggtggaggaaaaacaaccggaagtcaaaacaggatttattgcttctttcttagattttctgaaatccgggcccaagcagcagttttccactcttgctggacctcggc

SEQ ID NO: 5085 - DNA, 357 bp, Homo sapiens
  misc_feature 53: n = A,T,C or G
cgcggtggcggcccgaggtactttttttttcttttttttttttttttctttgnctgtgtttgtttgttggttggttggttggtttttgtttgtttgtttcgagacggggctccggctctgccgccgggggctgcagtgcaatggcgcgatctcacctcactgcggccttctgggctcaagcgatcctcccactgtgcccggcctgaagacagcctttagagaaagaagcagggggagttcttccgaggacagacaagatttctggagtttggaaagggtgagagactgggtcagcgaagggaacattccggtctttatgttgggatgcaacgtatagataccccgcgtacctgcccg

SEQ ID NO: 5086 - DNA, 348 bp, Homo sapiens
ccgggcaggtactgggccaagcacagttggcagggctggggcaaggaattctgacagaaacacaacaagggttaatggtagccagccctgctcagaccctcaatgacacgctggatgacatcatggcagcagtcagtggaagagcatctgcaatgtcaaacactcctacccacagtattgctgcatccatttcccaacctcagactccaactccaagtcctatcatctctccttcagccatgcttcctatctaccctgccattgatattgatgcacagactgagagtaatcatgacacggcgctaacacttgcctgtgctggtggccacgaggaactggtacctcggc

SEQ ID NO: 5087 - DNA, 397 bp, Homo sapiens
ctactatagggcgaattggagctcaccgcggtggcggccgcccgggcaggtacgcggtggtgtcgggttcctgggcctgaggggcctgaactgatctcacttggctccgaaagcctttgctgtgttccctgcagcccctggccccccagccttggggctctggctccccccggcggaattgggggactgtttcctgacatcctggacaagggaagcccactagaggctggaacaggacctctccagcctcctcaccagcaccgtgcccatctcaactggacttcccgccctccttctccacctcctagtgcccgtggccggggattcaaagccgtgtgtgtgtgtgtgtgtgtgtgcgtgtgtgtgtgtgtagtgggtgtgcgtgtgggtgtgggtt

SEQ ID NO: 5088 - DNA, 459 bp, Homo sapiens
  misc_feature 71: n = A,T,C or G
gaattggagctccccgcggtggcggcccgaggtacttttttttttttttttttgtttttttttgaggtcangagtttcgagaccagcccagccaatatggtgagccctcctctctactacaaataaaaaaaattagctgggtgtggtggcatgtgcatgtagtcctagctactcaggaggctgaggcaggagaatcacttgaaccagggaggcggaggttgcagtgagctgagatcacgccactgcactccagcctggacaagagagcgagaccctgtctcaaaataatgatgatgataataataataataataataattctgatctgtcataaatcttgtcttttccttaaagagcatgaaaaaaatgtttcccatgctagatggaaattgcaaactctttcgctgaaaataatcaacgcaacgcaatttcccgtttccaccacctggtcttggaaga

SEQ ID NO: 5089 - DNA, 528 bp, Homo sapiens
  misc_feature 504, 506: n = A,T,C or G
accgcggtggcggccgaggtacttctgcaggatgaaggacttcagctcatccttttgggggcctctgaggcgtctgggcaggtcctgcagagaggggaggcctggtctaggcccaagggcaccagcaggggaaacagatggggataggtaggggttggggcttaacaccaaggtggaatgtagctgaggctacatggtagagggtgctgggaaaagatacctggttggggccctcccaggctgcaggcccctcttcctttccctctaccagcatctgcacagcttcttccaagtccccccgagctttggccagcacccactgggcctgctccaccgaacaggtagggaacacctccaggagtacctcagtccacatctccttcacgttctccagcaccatgttgcagtgcctatcgaaggccttcacgcggcccaggagtttcttattgttgcggcagttgatgagcacttgggtattgttcttgactgactgtgtgagcacananagtggacccggtgttaaaattc

SEQ ID NO: 5090 - DNA, 480 bp, Homo sapiens
  misc_feature 127, 161, 226: n = A,T,C or G
ccgcggtggcggccgcccgggcaggtacttttttttttttttttttttttttttttttggagacggagtctcacccttgttgcccagactgcagtgcaatggcccaatctcggctcactgcagcctntgcctcccaggttcaggcgattctcctgcctcancctcccgaatagctgggaatacaggcatgtgccaccatgctcggctcattttgtatttttagtanagacagggtttcgtcatgttggcccggctggtctcgaactcccgacgtctggtgatccacctcccaaagtgccgggattacaggcatgagccactgcgcctggccctatatagactttttaatgtgactttgtcaaaacagatattcccaactttattattagaattgagaatgcaagcattacttagtaggaaaaatattttgcttgaattcccaatgatttgtggatataaattctactaaatcatgtacct

SEQ ID NO: 5091 - DNA, 468 bp, Homo sapiens
ccgcggtggcggccgcccgggcaggtaccttgatggctgtttgtggtcatacactccgtggaccagtcttgagggatcacagggccaaccagctcagcaaacctctccagaggacagctgggactgccccgcgtacgcggggaaattgagtccttctatgaaggagaagacttttctgagaccctgactcgggccaaatttgaagagctcaacatggatctgttccggtctactatgaagcccgtccagaaagtgttggaagattctgatttgaagaagtctgatattgatgaaattgttcttgttggtggctcgactcgaattccaaagattcagcaactggttaaagagttcttcaatggcaaggaaccatcccgtggcataaacccagatgaagctgtagcgtatggtgctgctgtccaggctggtgtgctctctggtgatcaagatacaggtgacctggtacct

SEQ ID NO: 5092 - DNA, 337 bp, Homo sapiens
ccgcggtggcggccgaggtacgcgggggcacaagctgtaacatggcggcagcgactgcggcctgaactctagggagccgggttgatttttaaagcttcaaaatcctaagactcagcactgttgcggggagcacagggatcagttgtccttgtttttttttggtcttttcttcatttgaagattaagtattggagccatgggaataaaggttcaacgtcctcgatgtttttttgacattgccattaacaatcaacctgctggaagagttgtctttgaattattttctgatgtgtgccccaaaacatgcgagaactttcgttgtctttgtacctgcccg

SEQ ID NO: 5093 - DNA, 587 bp, Homo sapiens
  misc_feature 398, 494, 501, 502, 528, 542, 551, 553, 557, 559, 561, 569,575: n = A,T,C or G
ccgcggtggcggcccgcccgggcaggtacttttttttttttttttttacagtttttgatatgctttattttgggtatgtagtttacaaaatataaaggaaatataaggagtgttctctttttttttaaataaaaagtgtatttttaactgggcatggtggctcactcctgtaaccccagcactgtgggaggctgaggctggtgaatcgcctgagtccaggagtttgagaccagcctgggcaacaaggtgaaaccctgtttctatcaaaaaaaaaaaaaaaaaaaaggaaaaaaataagtcaggcatggtggtatgcacctgtggtctcagcctcctaagtagctggtattacaggagtgtgccattagcccggctaatttttgtatttttaagtaganatggattttcattgggttggccatgctggtcttgaactcctgacctcgagtgatcctcctgccttggcctcccaaaagtacctcggcccgctctanaactagnnggatcccccgggctgcaaggaatttnatatcaacttattngatacccgncnaccntnangggggggncccggnacccaacttttg

SEQ ID NO: 5094 - DNA, 782 bp, Homo sapiens
  misc_feature 345, 381, 383, 435, 470, 473, 476, 501, 520, 544, 556, 571,581, 584, 597, 624, 638, 640, 649, 650, 664, 665, 673, 731,735, 739, 740, 745, 746, 749, 750, 751, 754, 766, 771, 781: n = A,T,C or G
cgcggtggcggcccgaggtacataccccatggcccgttacattaatatgcaactgaaaatccagaacagagaacttgggaaaaacaataataactttagtataagcctctcagctgacaatgacccaaggactgttcagcggcccaggcacctgaggagcaatgacagtctacgaggacatcttctgcagcaacagccatcaggagaccagcagcagcacagcactcagggctcggtgtccacctccctgcagatcactttctccctcactggaatcaaccgcagcacttggagtctactcatggagtagaaacttctttatggggtctggcagaggcagcgaangaatcagatgaagccggtgtttgccaagagctcttntnacaagccacacggcacagacacaagcaaggttctgggaacacttctggcctntttaaagacctgcaagggctcaggggccacttttnttnttnctctcgactctgggcccaacgattnccactttactaagattcanggtggcttccaaattttccaaccngcttaccaaagnttgcttaaaagccgnggggcaaaanaanattccttgacccnccaaaaggggcccctgtaaaatccttntgggtttgccgggncnttggcattnnaagttagggttccnncccccccngaagggccacccgaaacccttggaggttggggtaggcttcccttttttaacctgcccngggnggcnnagggnnttnnnttncttttttttttnttttngggaaaaaang

SEQ ID NO: 5095 - DNA, 389 bp, Homo sapiens
  misc_feature 7, 38, 46, 83, 96, 159, 170, 178, 305, 368: n = A,T,C or G
aacccgngtcttctcagctccgggtccttacactcagngaagactngccctacgaaactttgcattctttcattagcaatgcngtggctccttttnttaagtcctacattagagagtctggcaaggcagacagggatggtgataaaatggctccttcanttgaaaagaanattgcagnaactcgaaatgggactccttcacttgcatgcaaaatattgaaattccggagatcagcctgccgattcatccaatgatcacaaatgttgcaaaacagtgttatgagcgtggagaaaagccaaaagttncagactttggtgataaggttgaagacccaacatttcttaatcagttacaatctggagttaacncgctggatccgagaaattcaa

SEQ ID NO: 5096 - DNA, 137 bp, Homo sapiens
  misc_feature 3, 8, 37, 40, 44, 64, 80, 86, 91: n = A,T,C or G
cgnccggncaggtactttttttttttttttttttganacngagncgcgttgctgaaccaatgtnaaagcttcattgttgnatttgnacatnacaagaaactggatggcaaacccatagtcaccaagctgtataaaaa

SEQ ID NO: 5097 - DNA, 369 bp, Homo sapiens
ccgggcaggtactttcttcatttccacctttgcccaagtcatctgctttttcatggaccaccagtgtgcggccaatgatgcaatggtctcctgagagtgagatcacagaatcttcaatagacacatcggccacaccatctttgtcagcagtcacattgcccaagtctccaacatgcctctcttcatcctttggcccaccgtgttttctggatagaggattaaagtgaggacctgcactggtacgcggggagcactgcctggctccacgtgcctcctggtttcagtatggcgctgtcctgggttcttacagtcctgagcctcctacctctgctggaagcccagatcccattgtgtgccaacctagtacct

SEQ ID NO: 5098 - DNA, 349 bp, Homo sapiens
ccgggcaggtacaggagccctgatagccatactcgcctgtgttttgacattattggtgttgatcctccttatcgtcactatgagaagacggaaaaaagagccccttatttttgacgaagaaagagacatcagagaaaatattgtgagataccgatgacgagggcgggggagaggaggacacggaagcgtttgacatggctgcactgagaaacctcaacgtcatccgagacaccaagacccggagggatgtgactccagaaattcaattcctgagtcgaccagcttttaaaagcatcccagataatgtcatctttagggaatttatttgggaaagattaaaagaagccga

SEQ ID NO: 5099 - DNA, 341 bp, Homo sapiens
aggtacgggaagggtataaccaacattttcggggtatgggctcgatagcttatttagctgaccttactttaggatggggtgtgataggtggcaccccgcgtactgccagctcagggcagccaaaagcatgacaaacgacaggtagatgggggagtagtggcttcgggaaatcagccgacagttgggaagattctgcgtccggatggtggagatgatctgccttgttttgctagaagatgggtctgagtcggggattctatgataaatctcttccatatactgatatatgatggctttgacagctggcatattggtggcatccatcatcagggtcactgctt

SEQ ID NO: 5100 - DNA, 372 bp, Homo sapiens
ccgcggtggcggccgcccgggcaggtactttttttttttttttttttgaaaaaccactgggttccgagttcattactacaggaaaaactgttctcttctgtggcacagagaaccctgcttcaaagcagaagtagcagttccggagtccagctggctaaaactcatcccagaggataatggcaacccatgccttagaaatcgctgggctgtttcttggtggtgttggaatggtgggcacagtggctgtcactgtcatgcctcagtggagagtgtcggccttcattgaaaacaacatcgtggtttttgaaaacttctgggaaggactgtggatgaattgcgtgaggcaggctaacatcaggatgcagtgcaaaa

SEQ ID NO: 5101 - DNA, 312 bp, Homo sapiens
  misc_feature 56, 143: n = A,T,C or G
cgcccgggcaggtaccgggatgtgatgctggagacctacagccacctgctctcagnagggtatcaagttcctaaaccagaggtggtcatgttggagcaaggaaaggaaccatgggcactgcagggtgagaggccacgtcacanctgcccaggagagaaattatgggaccataatcaacatagaaaaatcatcggttataaaccagcttcctctcaagatcaaaaaatttattctggggaaaaatcctatgagtgtgctgaatttggaaagagcttcacctggaagtcacagttcaaggtacctcggccacct

SEQ ID NO: 5102 - DNA, 327 bp, Homo sapiens
  misc_feature 32, 138, 165, 166, 170, 175, 205, 225, 232, 240, 247, 269: n = A,T,C or G
tccccgcggtggcggccgcccgggcaggtacncggggagagcatgctttttcctgtttggctgggaaagggaaggctgaactgctgagtctgacacttaacaggacttcggccttcccctgaatacagactagatcanagattttatttttttaattgaaaaagnnactngggtntcttctttagaaaccctaatttggtgtgcncatcttggctattttcacanaagatgntcatcttntgcaaangaagtccggagttgatttcttncctcagacaagctattggttgttggtgggcaacagaagttgctcagcatagacagggg

SEQ ID NO: 5103 - DNA, 457 bp, Homo sapiens
  misc_feature 19, 32, 33, 49, 50, 52, 54, 57, 62, 71, 72, 74, 78, 96, 97,101, 123, 139, 160, 163, 164, 183, 187, 188, 205, 225, 237,242, 244, 256, 258, 260, 264, 267, 270, 285, 288, 297, 298,299, 302, 303, 308, 316, 356, 367, 373, 377, 381, 382: n = A,T,C or G
  misc_feature 437: n = A,T,C or G
gcggccgcccgggcagtgnacttataagcagnncagacaaccagaagtnncntnacnaaccngaaaaacanngngcangaccgactaccctagccnngccnggaccgagggacgcaagagagnccaagcggaggaaaanacagaccgcaaacaagggcgnggnncccccacacggcccagaancacnngaagcagaagggagcanccagggccaggagaggggcncgcaaaacccanaaccncngaggggaaggcnancnggcnganacngagcagaaacagaanganccgggagcnnngcnngccancgaaggcnaaagacgggaaaaggggggaaccgggcaaaaggccgcccnaacaggagcgnacccangcancccnnggaccaaccagagagagggaaaccaaggcccaaaaaccacccaggggaaggcccnccaaaaaaaaaaaaaaaaaa

SEQ ID NO: 5104 - DNA, 399 bp, Homo sapiens
  misc_feature 63, 79, 169, 173, 205, 216, 250, 278, 281, 296, 305, 316,338, 341, 356, 361, 367, 376, 387: n = A,T,C or G
ttggagctccccgcggtggcggccgaggtacgcgggggggggctggttcagggtctgaaacanagtttggggcttgttngggattagtgaagctactgcctttgccgccagcgcagcctcagagtttgattatttgcaatgtcaggctttgaaaactttaaacacggantttnttaccagacaagttacaagcatctatgatcangtcacagcagncctatgattatggaggaagtggaggaccctatancaaacagtatgctggctatgactattcncancaaaggcaagatttntccctccanacatgatgcanccacaacagccatacacccggncanatttaccagccaacntcatngctttntacttccanctttcaccctnagcccttttcta

SEQ ID NO: 5105 - DNA, 160 bp, Homo sapiens
  misc_feature 1, 3, 20, 43, 45, 74, 93, 94, 95, 101, 115, 127, 150: n = A,T,C or G
ngnaaaacacaaagaagcanggtctgtgaataatgagccatancncacaaaaaatggccacaggaatcctatanaaaacaactacaggggacnnnagaccnccattcaccacccncggccttaaganacgaagccctgacatgaccacancccagccagc

SEQ ID NO: 5106 - DNA, 447 bp, Homo sapiens
  misc_feature 1, 2, 8, 12, 21, 23, 24, 25, 39, 40, 46, 64, 65, 70, 77,83, 104, 106, 107, 108, 118, 121, 129, 130, 131, 138, 139,144, 148, 156, 159, 160, 162, 170, 176, 194, 218, 219, 220,227, 228, 231, 232, 239, 243, 244, 245, 248, 250, 251: n = A,T,C or G
  misc_feature 258, 265, 266, 268, 281, 282, 294, 317, 318, 320, 323, 330,331, 332, 333, 335, 337, 342, 351, 353, 357, 358, 359, 364,373, 379, 380, 381, 382, 395, 396, 397, 405, 414, 415, 416,419, 428, 435, 440, 445: n = A,T,C or G
nncccacncccnggggggggncnnnaaaacccccaaacnncccacnggaagggggccaagcccnnccccnggaaacngggggngggggaacccaaaggggccangnnnaaaggggggnggngcgggggnnngggaaanngggcngggncccgcccnccnnanaaaaaccnaaaggngggggaaacccccccccngggggccggggcaagggggaaaannnccggaannaanncaaaagncccnnnaanannggaaaanccccggnngncgaaaacccccannaaaggggggggngggggggggccccccgggggggnncnccncaaaaannnnananggggngaccccccncnaaannnggggnggggggganaaaaannnnggccccccccccnnngggggggngagaaaaannncanagggggganaaaagangggcnggggncc

SEQ ID NO: 5107 - DNA, 243 bp, Homo sapiens
  misc_feature 6, 44, 57, 71, 90, 92, 126, 149, 153, 161, 162, 186, 187,205, 208, 217, 229, 231: n = A,T,C or G
aacttnctttttttttttttttttttttttacgccatttttttnccgggtcgggagngggtaatttgcgcncctgctgccttccttggangnggtagccgtttctcaggctccctctccggaatcnaaccctgattccccgtcacccgnggtnaccatggnnggcacggcaactaccatcaaaagnngatagggcaagacgttcnaangggtcgtcnccgccaccccgngnacctgcccgggc

SEQ ID NO: 5108 - DNA, 422 bp, Homo sapiens
  misc_feature 1, 21, 35, 40, 65, 70, 73, 78, 79, 88, 94, 99, 108, 115,118, 119, 132, 133, 139, 141, 143, 144, 154, 190, 206, 207,209, 218, 230, 239, 243, 246, 262, 266, 270, 281, 282, 283,284, 286, 291, 297, 307, 308, 309, 310, 317, 327, 337: n = A,T,C or G
  misc_feature 338, 339, 350, 352, 354, 368, 370, 371, 373, 374, 376, 384,389, 392, 393: n = A,T,C or G
nccccggccgcccgggcaggnactctaggggagcnctgtnaaccaaaggaggggcataaaccggnccagnccnccaannccgggaagnggccangacancagaaaagngggcacngcnncaggaaaagaaannggggcncnannacaacagggngcgagaacagggggaaaaaaaaggggggaccaaaangggaaaaagaggaacnncngagggacanaaagaagacccnaaaaccganggcnacnaaaaaagcaagagcanaccngggnaagaccaaaannnncnccccncccccnaaaagagggnnnnagagacnacaccagaanaaaagacagnnngagggggaccncngnagaacaacaagggncnnanngnggggaacnaaaanaanncaagaaccaaacagagagccacccggccg

SEQ ID NO: 5109 - DNA, 425 bp, Homo sapiens
  misc_feature 22, 33, 35, 39, 49, 50, 68, 69, 70, 91, 109, 115, 117, 120,129, 130, 135, 137, 139, 150, 154, 166, 199, 201, 204, 209,217, 228, 237, 242, 254, 292, 298, 299, 300, 304, 321, 343,349, 351, 356, 382, 386, 388, 390, 401, 405: n = A,T,C or G
ggcggccgcccgggcaggtacncaggacagagntntacnacccgagtgnntgccacaccgaccagagnnnggagcagcaggcgtgccagcnggagggggccgcaccatngccaananccnggaggccanngggcngncnacacaagaccngccncagaaacaggcnggggaaccgggaaagggggaccggaccaccacngnggngaaangaggaaangggaaagcccnggggggcangcaanaaaccaccaccngaacaagaaaggcaaacaaaaaggaaaaggcgaagcanggaacnnnagcnggagggggaaaaaaggngggaagcccaaacccccaaacnggcaangnccggnagggagggaagacaaacggccccccngggngnanaccaaccccanaaanccccccgcaaggggcccccc

SEQ ID NO: 5110 - DNA, 440 bp, Homo sapiens
  misc_feature 19, 35, 42, 47, 49, 54, 55, 56, 57, 68, 103, 122, 127, 133,147, 172, 178, 188, 196, 214, 220, 226, 231, 248, 251, 270,271, 281, 322, 327, 337, 345, 356, 385, 392, 395, 404, 418,421: n = A,T,C or G
ggactgagtcttaagcgtnttaccaccccgagggntgaaaanccgcnangagcnnnngggaagggggngctgaaacccggggacagaggacgcacgacagacnaggagggagccgggaggangggcngcagcngcggaggaggggcncaaaagaagagaggccggagagcanaggccngagaagccanaggcaggnggagagagggcggaaagngagcancgggcngggcnggagccgcacacgcgcnccncccaaggaaaaaagcaccnncagaaaaaanacacaaggccccaaaccacaaaaaaaaaagaaaaaaggaanaaaanaaaggacccncggccgcnccaagaaccanggggaaaaccccccggggccgcaggaaanaccgaanaancaaagcccnaacggaaaccccgnccnacccccgaaaggggggggc

SEQ ID NO: 5111 - DNA, 431 bp, Homo sapiens
  misc_feature 23, 186, 289, 338, 358: n = A,T,C or G
tacttagggcgaattggagctcnccgcggtggcggccgaggtacgtttgggagcctgagctggaactgaagctggggctgcagcctgggccttggtttgatccttggccttggccttggccttggccttggcctttggccggcacagcctgagccccttggcaatacgggcacgagcaccgctttncaaagcttgggggtgggcaaatgtaaggcaagttcgatccgagcttgcggctgacaccctttgggatctttgggcttaacctccttgggctttacagagggcncttgatagcctcggcaccgtgcactcatggccttggcatttgttgggcnctgccatctttctttagggncctttttggttgtggcttcttggccaaagcgcattgtttcctaaaggaaactttggggggtccacccccttaa

SEQ ID NO: 5112 - DNA, 410 bp, Homo sapiens
  misc_feature 126, 128, 169, 263, 335, 355, 381, 385, 397: n = A,T,C or G
ccgcggtggcggccgaggtactgaaagagcccaacacaattaccctgtaaactctctgttagggcaaccaccaccacctgtcttccaggacacatttttagatactctgacaggccactgcatctnanattcaggggagaaaataagttgtcacctcccctttcaaagnttccagaagtaaacaaaatggtgccatcattcaaggataacgtgcttgatcaccctcctcccaaaaagcaagagcttgtttatggttgaggaantcggccggattgtctgaatgacacatattacagagcccccacgggatttcttgcaccactcttgggttctgngcttggtgggaacatttgcncaatacagttctttaatggaggcacnctgntgttgtaaatancatgccttggtct

SEQ ID NO: 5113 - DNA, 384 bp, Homo sapiens
  misc_feature 6, 34, 45, 144, 149, 153, 158, 198, 358, 365: n = A,T,C or G
gggcangtacatgttgtgggtgccgctccggganttatagcgcanccaaatcccgaagttcttcacccgcaggggggacttctcaaacacctgcccacagtacgacaatctcccctgaagacttcttcatcttctttaactganattcnaaangttcngcggggagtgaacttgagggccaccctgggaggaagcccnactaggcgaattcacttactgaccggcctgggctgctctgagacatggaaggaagccagtgaaggtggaggaaatgatcgtgtgctggaaaccttgcaaagatgaggtggactgggagttaagaaatatttattgacccccaagaatgttgtaagccggnatcctgncccggggggggaaaaactt

SEQ ID NO: 5114 - DNA, 374 bp, Homo sapiens
  misc_feature 16, 49, 73, 228, 243, 260, 293, 306, 319, 338, 359, 369: n = A,T,C or G
ggagctccaccgcggnggcggccgaggtacaaacctccagctcactcanataaaggaacatgaacgacctatncacagaaatgcctttgtttggccagccacggtggatcatgcctgtaattccaacaatgtcggaggcagctgtgggcggatcatctgaggtcgggaagtttgagaaccagcattgaccaatatggacaaaccctgtctttactaagaaatacaaanctagccaggcatggngctgcatgcctataatnccagctactttgggaggctgaggcaggagaatngctagaacccagngaggttggaaggntgctgtgcagcccgagatncgcaccattgcacctccaggnctgggcaacnaagga

SEQ ID NO: 5115 - DNA, 357 bp, Homo sapiens
  misc_feature 3, 76, 190, 192, 209, 231, 286, 299, 349: n = A,T,C or G
tanggcgaattggagctccccgcggtggcggccgcccgggcaggtacgcgggagagaagtttccgggactgtcccnacgacagtccggtttgtagattccctgatctgcaattcttcccgttccttcatggatttgaaggctctcctttcttccttgaatgactttgcatccctctcgttttgcttgaanangttggggacaaatgttnggattacctgggtgggaaccanagcccaccaccatacttgtaaatacactcttcctgaccaatgacctgactgaggnaagtgatggaggnaggtgctgcaaaagtaaggcagacctcattctcttcctaccatccgcctnatcttccg

SEQ ID NO: 5116 - DNA, 360 bp, Homo sapiens
  misc_feature 327: n = A,T,C or G
aggtactccatcgggatctttttcacctacgcactccagttctacgtcccggctgagatcatcatccccttctttgtgtcccgagcgcccgagcactgtgagttagtggtggacctgtttgtgcgcacagtgctggtctgcctgacatgcatcttggccatcctcatcccccgcctggacctggtcatctccctggtgggctccgtgagcagcagcgccctggccctcatcatcccaccgctcctggaggtcaccaccttctactcagagggcatgggccccctcaccatctttaaggacgccctgatcagcatcctgggccttcgntggggctttggtggttggggacctaattgaagg

SEQ ID NO: 5117 - DNA, 291 bp, Homo sapiens
  misc_feature 33, 38, 39, 41, 42, 94, 153, 163, 254, 259, 272: n = A,T,C or G
aggtacttttttttttttttttttttttgcttnccatnntnnttagcacaaagtataaactctttcacaaatacaaaaattaaccaggcatggnggtgcatgcctgtaatcccaactacccgggaggccgagacgagaatagtttgaaccttngggaacggtnggaggcttgctagtggagccaagatcgtggccacatatactccagtactgggcaacagagccggagactccatcttaaaatacaaaacaanaacangaaaaacttcttncagggcttttcctgcatgg

SEQ ID NO: 5118 - DNA, 435 bp, Homo sapiens
  misc_feature 17, 18, 23, 27, 43, 44, 61, 64, 66, 67, 76, 108, 128, 130,138, 179, 196, 199, 206, 218, 227, 231, 239, 270, 290, 303,308, 312, 326, 339, 341, 346, 362, 370, 374, 394, 401, 416,419, 423: n = A,T,C or G
cggcgaattgtttctcnncaaanggcngcggccgcccgggcanngtacttatccgtaactnttntnncccctgcgnttttgtaacatccctccaggcaaacagcagcngaaaggctgtcaactgctgngngttaaggngcttcttctgcttcctatagagttcaaggtaggactcatcngcgaaagaaagggtttngangaaattnccttggaggcangaatgtccnctgntccgatgncacaccacctgcagctgcacgggctgcccgntgccgcgctcccacatatcnagcctcaattttngggcntagnatataataagcagngtaaatgggggtngngcatnccggggccgtaagccngagcattntcantccgggccagagggccgtanctcttcncaaatcaacaccaanctngaanattgccttgggt

SEQ ID NO: 5119 - DNA, 402 bp, Homo sapiens
  misc_feature 164, 332, 336, 339, 359, 395, 399: n = A,T,C or G
ccgcggtggcggccgcccgggcaggtacgcgggggacctatgagcagaggaaaatcgtggagttcacctgccacacagccttcttcgtcagtatcgtggtggtgcagtgggccgacttggtcatctgtaagaccaggaggaattcggtcttccagcaggggatnaaagaacaagatcttggatattttggcctctttgaagagacagccctggctgctttcctttcctactgccctggaatgggtgttgctcttaggatgtatcccctcaaacctaccctggtggttctgtgcccttccccctactctcttctcatcttcgtatattgaacnaaantcnggaaaaccttcattcatcangggcgaccgcccctgggccggcctggggttgggaanaaangga

SEQ ID NO: 5120 - DNA, 247 bp, Homo sapiens
  misc_feature 81, 95, 130, 165, 181, 190, 193, 203: n = A,T,C or G
ctatagggcgaattggagctccccgcggtggcggccgcccgggcacggtacttttttttttttttttttttttttttttgnggcttattcagtcnctttattaataaaagagatcaattaagctttcctntccccacccaccccggaggtgccgggctttgaatnctcgggaggaaaaaanggccagggntgnaagcttcctnccccaagtttccaggagcaccttgccaccaagccttgaacacct

SEQ ID NO: 5121 - DNA, 450 bp, Homo sapiens
  misc_feature 14, 15, 48, 179, 187, 188, 194, 196, 259, 303, 317, 354,358, 362, 379, 421, 438: n = A,T,C or G
tccggcgaattggnnctccccgcggtggcggccgcccgggcaggtacncggggagcgtcataaactttgagtgctttaaaaccgcaggtaacgatgggaaaggaactcctgtattcacaggggaggttgactgcacctacttcttcacatgggacacggaatacgcctgtgttaagganaaaggaannacctcntnttgcgggtggccacccgacgggaagaagcgctatgacctgtccgcgctggtccgccatgcagnaaccagagcagaattgggaagctgtgggattggcagtcagcacnggaaacagagaaangaagcatttttttcatttaattattttgttcaccacnaagntgcntgcatgggaaagggcanagggcaccgaggggttgtttcccgagggaccgccggcaattngtgttggcaagatgggnattaaaaaaaat

SEQ ID NO: 5122 - DNA, 433 bp, Homo sapiens
  misc_feature 188, 194, 197, 258, 317, 392: n = A,T,C or G
ctatagggcgaattggagctccccgcggtggcggccgcccgggcaggtacaaaagtcccagtccttccgcagttctaggtttacagtcaggctcaaccttacttgccccgctcctgcatgaaaacaagtgcgttttatacagcctctgccacccagtggcatagtttaaggctctatattatattttnaaaatnaanggttttttttcctatcattaccacatcaatttggaacctgctggtgactcttctaccacangagggtaaataaaaagaccagtttttaaagtaagaggatttcagctcatcttattaaanagtataataagttttcggcccagtacgtccattaacattctgttttaaaattagtatacaggacaccaaatgccnaaaatattaggaatcataaaatgttaatttttgggaggata

SEQ ID NO: 5123 - DNA, 377 bp, Homo sapiens
  misc_feature 36, 37, 148, 153, 292: n = A,T,C or G
ccgggcaggtacttctcctccatctcagcatagtgnnggtctttcactttacgcttgtcgctcttcccatcatcctcgccggagccatagtccaggggtgggggctcatccatgtcattcttccgctggtagtttcgatacataaccnaaatnggaagatttccagcttgaagctccttggcccaggagcagtgccagtaggatagtcctacccacttgacaaagaactctcgctctgatctgccttgaagaggacgggggggttggggacatcttggatttccatctgccntgttgagggggctggcactgcatacaaggttgggctccccccaccgcccaatgtaagggatctttctgcacttccgacccttcag

SEQ ID NO: 5124 - DNA, 411 bp, Homo sapiens
  misc_feature 273, 302, 315, 382, 392: n = A,T,C or G
agggcgaattggagctccccgcggtggcggccgaggtacaaaaggcaacatactgtagggttctgtttatatgaaatatccagagtaggcaaatccatagagacagaagacagactagagattgccagagggtgggaggaggaatgagtaactgcttaatggggatggagtttcctctgggatgattaaaaaatgtcctgggactagatagtgggtaatggctgcacaaagttatgaagacacttaacatcactaatgataaatctgacgttntgcatacgtcaccacagtaaacatacccntgcagtggaatangtttctgagacccatttattaggtcacaccagcaaaattagtaaagatttaaaaaggaaaaaattgnatttctcagnacaagggtgcctggaatag

SEQ ID NO: 5125 - DNA, 417 bp, Homo sapiens
  misc_feature 34, 80, 86, 90, 92, 97, 110, 114, 116, 118, 128, 139, 145,151, 164, 168, 170, 182, 193, 195, 208, 214, 219, 226, 228,233, 236, 240, 250, 260, 263, 265, 269, 279, 285, 289, 293,299, 330, 335, 370, 371, 376, 377, 385, 393, 395, 400: n = A,T,C or G
  misc_feature 403, 413: n = A,T,C or G
cccgcggtggcggccgaggtactttttttttttncttttttttttttctttttttttttttttttttcacattgggggcncttttntttncngccanggaaaaaagaaanctancntntttttaaaangggaaagcttntttgtntgaaancaaatatttcatnatcncnttatttttcttntcctggggggnanctaagtttttacntttttnatttncaacacnanatttngantttnaatgtcccanaaatttaaanaananggcnttaaaatggncctatntgtnggcngtcctnccctgaaaacttttttggctatatctttggntctgngctacagtcttcgcagagaactaaattaggggacnnggccnncagtaaanaaaaattngnccctnccnggctaaaaangggg

SEQ ID NO: 5126 - DNA, 205 bp, Homo sapiens
  misc_feature 94, 103, 150, 178, 180, 185, 192, 197: n = A,T,C or G
cttagggcgaattggagctccccgcggtggcggccgcccgggcaggtacttttttttttttttttttttgatgtcattttgtgtaagggcgcanactgctgcnaacagagtggtgatagcgcctaagcatagtgttagagtttggattantgggctattttctgctagggggtggaancngattnattaaanaaaanattcctgc

SEQ ID NO: 5127 - DNA, 359 bp, Homo sapiens
  misc_feature 325, 326, 327, 328: n = A,T,C or G
tccccgcggtggcggccgcccgggcaggtaccacaatagcagggggatgccgatggagggaagggtcatgaccccaaaggctgcccagtccagaaaatgaggggagaatcgcctgtcaaactcccgctgagccaggattcctccctgtccaggtgcactggtagagccaatcacaacgggcccatcctcctgggccaggtaagtaattgttgccgaggtgaagttgacccgcgtacctcggccgcccgggcaggtacggccagggctattggttgaatgagtaggctgatggtttcgataataactagtatggggataaggggtnnnnggtgtgcctttgtggtaagaagtgggctagg

SEQ ID NO: 5128 - DNA, 399 bp, Homo sapiens
  misc_feature 373: n = A,T,C or G
tagggcgaattggagctccccgcggtggcggccgcccgggcaggtacttggaggtggggcccttgggattagtgtcctaaaaagagacacagcgagctccctcactccttccaccatgtgaggacgcagtgagaaaacagctatctacaaacctggaagcagaccctcaccagacaccaaaactgctgggtgccttggtcttgaacttcccagtctccagaactgtgagaaataaatttttgttgtttataagccacccagtttacggtattttgttatagcagcccaaatagaccaagacaatacccaatatatacttactgactgatgctgcttgagcaaccagcacagcttatggttcctaagggcctancacagtgcctggtaccttcggccgct

SEQ ID NO: 5129 - DNA, 457 bp, Homo sapiens
  misc_feature 398, 424: n = A,T,C or G
ttagggcgaattggagctccccgcggtggcggccgaggtacttgcacatttctggactacaaaggcatttcttcctgcaatgacgaagaataaccatggccatattgtcactgtggcttcggcagctggacatgtctcggtccccttcttactggcttactgttcaagcaagtttgctgctgttggatttcataaaactttgacagatgaactggctgccttacaaataactggagtcaaaacaacatgtctgtgtcctaatttcgtaaacactggcttcatcaaaaatccaagtacgagacattgctcacctacagtgaccgtcgtgggcgcggatgtgctggacgaggtggtgactgtgctcagtgacacctgcgtgggaacgcaagagcttgcantggtgagagagcagcgcaaccgtctngtgtgaccttctggggcgtacctgcccggggcg

SEQ ID NO: 5130 - DNA, 202 bp, Homo sapiens
  misc_feature 5, 57, 64, 92, 147, 158, 181, 195: n = A,T,C or G
caatnccgaagcacgttttcaagctggcgcaggaccacgccaaggaaggcgacttcntgatggngctgggctaccctggccgcaccaaccgncaccgcctgccgtccgaagtgggccttcaccttcgactggaactatccggccttngtgcaagcctngggcgagaccctggccatcatcnaccgcgagaccaanaacgacc

SEQ ID NO: 5131 - DNA, 157 bp, Homo sapiens
  misc_feature 5, 16, 57, 61, 66, 69, 70, 78, 84, 108, 118, 127, 140, 148: n = A,T,C or G
gcggnggcggccgacntcggatgacatgttaccatgacacaaaacgacaatgaccanggcnccacnccnngaatcatntacctntattacaaccagacatttgcactnaaataaggangtgctgccntatacttatccgntgctggangcatcatga

SEQ ID NO: 5132 - DNA, 342 bp, Homo sapiens
  misc_feature 19, 49, 78, 89, 103, 122, 238: n = A,T,C or G
cgccgcggcggcggccgangtacatataatttgcctggccgggcacggnggctcacgcttgtaatcccagcactttangaggccgaggngggcggataacgangtcacaagttctagaccancgttgcctaccaagtttagcaattccgggaatgccaactgtccttacaagtcactctcgtatttgcttagctatgagaataatttggggctaacttcaccaaaaaagaaaaacagnggagaacgtcactctagtaacaataaaagccactgtattttgctttcatcaaatgtggcaccttgtgaaccacctttcttaaaattatttattttaacctttaa

SEQ ID NO: 5133 - DNA, 360 bp, Homo sapiens
  misc_feature 19, 64, 68, 73, 76, 79, 80, 82, 93, 103, 113, 119, 133, 139,140, 143, 163, 174, 183, 190, 193, 199, 210, 217, 222, 225,230, 251, 293, 301, 351, 352, 355: n = A,T,C or G
cggcgaattgtttctcccngcggcggcggccgaggtaccttttttttttttttttttttttttngacncacanttnaanntnattgcaagganacacacaaangttgatgtgnaagggncctcccaccatcancacaannatnacaggtcccatcctcctatnttctggaagtnaaagaagtncaaaccngtntcactngcattcatatnacccaangacangantgccnccctgtgggtaaggggcctantcagcaactttaccttcctaacaaacttttatggttcaaganataacacntaaagggggcaaaaaacatgatgggaaccacttttctcaataaaaaactnngtntaggc

SEQ ID NO: 5134 - DNA, 364 bp, Homo sapiens
ccgcggtggcggccgaggtacgcgggggcaaagcggttcagctgtctgctccctagcagccggccttcgggtcgggcgtctccgccggctactgccgcttcagttctcccggtgtggccacgagtcggtagccatcctaatggatatgggttggttcctgttttctatttggaactttaaaaaaaattaaagcaggttgcactgctgtgatccatcctcatctcctaaagatgcatcctgacttatctccacacttgcacactgaagaatgcaaccgtcttgattaacttgcttaaggaatgtcacaaaaaatcacaacattctgaaatttttttggttattgtaatgatgttgatcggggagt

SEQ ID NO: 5135 - DNA, 320 bp, Homo sapiens
  misc_feature 22, 97, 130, 137, 160, 167, 204, 268: n = A,T,C or G
tcttagggcgaattggagctcnccgcggtggcggccgcccgggcaggtactttttttttttttttttttttttttttttttctctttcatatatttnaatgtaaggtagttggcaatgacttttttgaanactgtanaccattattttgtagtatttctntcaaagngaattggtctgttctcatgatgaggagtccatcaatnttttggccaggaatactacatcagggatgttgggttcttcattgctttctaaacagctttgttntcaaaaacttggcggctacaaggaattaaatgtgaatgggaaaggaagaaag

SEQ ID NO: 5136 - DNA, 426 bp, Homo sapiens
ccgcggtggcggccgaggtaccccattaactgtgaatgaatctgagcttggtttcctttattgcttcctctgcaatatgattgctgaaacacattttaaaaattcagaagcttgtcactcctgttaatgggaggatcagtcacacatgtgtagtactctgctatggtgctggcttcctttaaactcaggatagatgccaggtgggctccgtttccgtaagactgacactcgagctcggcatcagaccagttcctcagcttcctgaagtaaccatagcaattggacttgtggtaaaaccatccaggagcacagctgggtctcatgatgatatcacccaggactcctgttttggccaggcagctcagcaataggagcagccgcatgcttctggaagccatcttcctcctaccctgaggatgtagctag

SEQ ID NO: 5137 - DNA, 354 bp, Homo sapiens
  misc_feature 15, 246: n = A,T,C or G
tagggcgaattgganctccccgcggtggcggccgaggtacttttttttttttttttttttggaagtagaatacagttatcaaaacgttaatttctaagcattagcattatgcaagaaaagagctgataaatggcaaggaagtaattcatccatgcatttattcatgcaatgacctttcaacaattttctttttttaattctactctggtgcaaggcctcactgataacttgggggaagatggctgncaaaaaaaaaaaaagaaggaaaggggaaagggaagggcaagcggaagaggaagaggaaggggaagaggaaggggaaggaaagaaaaaaagaaggagggaggaagggga

SEQ ID NO: 5138 - DNA, 188 bp, Homo sapiens
ggcctatacactacttagggcgaattggagctccccgcggtggcggccgcccgggcaggtacgcggggggcatcatggtttttgaaggctttagttctgctttctgcctctcctccacagccccaacctcccacccctgatacatgaaccaatgattatttcttgttcaagggaagaaaaacaattaa

SEQ ID NO: 5139 - DNA, 458 bp, Homo sapiens
  misc_feature 135, 136, 349, 359, 361, 385: n = A,T,C or G
aattggagctccccgcggtggcggccgcccgggctggtacgggggaatggaatggaatggaatgcaatggaatggaagcttccggaatggaatggaatggagtggaatggaatggaatggaatggaataaacccnnttgcaatggactggagtggaatggaatggaatggaatggaatggaatggaatggaatcaactcgattgcagtcgaatggaatggaatggaatcaacccgactgcagggcaatggaatggaatggaatgcaatggaatggattcaacttgaatggaatggaaagaatggaatggaatggaatggaatggaatggaatggaatggaatcaactcnattgcagtcnanatggaatggaatggaattaacccnaattgaatggaatgggaatggaaatggaacggaaccggaaccggaaccggaatggaattgggaatggaaatgg

SEQ ID NO: 5140 - DNA, 665 bp, Homo sapiens
  misc_feature 9, 28, 31, 36, 141, 161, 178, 193, 202, 211, 214, 216, 220,223, 236, 237, 240, 246, 250, 260, 266, 267, 279, 281, 284,288, 294, 312, 315, 319, 321, 340, 341, 357, 371, 385, 387,395, 397, 400, 403, 404, 406, 413, 416, 433, 458, 462: n = A,T,C or G
  misc_feature 463, 464, 467, 471, 476, 479, 481, 490, 494, 504, 525, 528,535, 536, 546, 548, 559, 571, 577, 582, 587, 592, 605, 608,614, 619, 628, 630, 636: n = A,T,C or G
attggagcntccaccgcggtggcggccngangtacnctggggtagtaaacttggaaccttggaaatgaccaggccaagactcaagcctccccagttctacatgacctttgtccttaggtgttgaggtccagggaatgctangaaaaagtaaaatcagcagnacacatggttgtagacncaataagtgttttcnttaaaatgngtgataaanttntnttgntcncttcatcttggannatnccttgngtgngaagttaccntggacnncattgctcatgngnagnacanttattncaactttcaaatttttcnttnttgnancggactaccattaataagnnaattggggggttggtnccttgatcgatatnaatctttgatgggngnattaccangnaancanngnaaaatgnaangggggttgtgagaaatnctctactaacttggttgaaggaagnttgnnnagnaagnttgtnacnanttgatggcnttgngtaacaaccntggttcccaattgaaaagccnacnttgaaanncaaagaaaangncttgggaaggnggccatccaaancctgtncaacnctatntaacnaacttactaccangcnaaaagnggaantggggaatngnctttgntaaataaaaccaattaaaaccccccacct

SEQ ID NO: 5141 - DNA, 438 bp, Homo sapiens
  misc_feature 177, 191, 193, 195, 216, 293, 314, 419: n = A,T,C or G
ctatagggcgaattggagctccccgcggtggcggccgaggtactttttttttttttttttttttttacgtagggacggggtttcaccatgttggccaggctggtcttgaactcctgacctcaagtggtctgccacctcggcctcccaaagcactgggattacaggcatgagccaccntgcccggcgcatcntntnattttatattcttactttcangtttcttattccattcaggcctaagctggaaacaccacttgtcttgataaaacactggccacaccaacgacatggtnggccagggggtgatagcaatnttccagtaaatcagcttttcagtctaaacataccagtcatcctacttgaaagaaatgtgtccctggggacaacctgtgagccttagccttctgtagggagaagcnctcttgatgggaggaaaat

SEQ ID NO: 5142 - DNA, 357 bp, Homo sapiens
  misc_feature 357: n = A,T,C or G
ccgggcaggtacaccatcccttccattggactggctttgttggaagaaaagctcagatatagcaatgagaaataccaaaagtttaaggcagtggaagaaagcctgcgtaaagagctggtggatatgctaggtgatgatggtgtgttcttatatccctcacatcccacagtggcacctaagcatcatgtccctctaacacggcccttcaactttgcttacacaggtgtcttcagtgccctgggtttgcctgtgacccaatgcccactgggactgaatgccaaaggactccctttaggcatccaggttgtggctggaccctttaatgatcatctgaccctggctgtggcccagtacctn

SEQ ID NO: 5143 - DNA, 569 bp, Homo sapiens
  misc_feature 136, 152, 179, 183, 184, 191, 193, 201, 213, 247, 257, 294,297, 304, 306, 313, 329, 333, 352, 363, 364, 367, 370, 410,412, 454, 468, 473, 488, 497, 534, 540, 556, 564: n = A,T,C or G
ccgggcaggtaccactggcatcgtgatggactccggtgactgggtcacccacactgtgcccatctacgaggggtatgccctcccccatgccatcctgcgtctggacctggctggccgggacctgactgactacctnattgaagatccttaancgaagcgccggattacaagctttcaancaanncactggncncgcttctnataacttagttnggaatcccccccggggccttgcaagggaaattcngataattcanagtctttattcgaatactcgtacgaactcttcggagnggngggggcncncggttanccccagtcttttttgnttcncctttttagtggaaggggnttaaattttgnngcngcnttggacgttaaattcaatgggttcattaaggcattggttntnacttggttgatggaaaaaatttgatataattccccggccttncaacaaaattttcncaccnaccaaaaccaataanctgaagtcnccgggggaagccaattaaaaaaggttggtaaaaaagncctctnggggggggttggcccnttaaattngaagg

SEQ ID NO: 5144 - DNA, 457 bp, Homo sapiens
  misc_feature 181, 190, 197: n = A,T,C or G
ggagctccccgcggtggcggccgcccgggcaggtactgaagaagagatgctgtggttgagatttgttttcctctctcctgggttttagatcttaattctcgttccttgttcacaccactggtatgctttatcctggtgttttccaaatgctctgatttgtcagagttgttgcctgtgaatnggagtgatnggagcancttgggattagccttttgcgctgtccttggaaggaaccattttgggtttatttttcgttgcgtctagtgctttgaccttcttggcatgtttacttcctttgtagtgggcctcggcctggctatctgagttaaagcgaagctgacagacattacaagaaataacttgtttcttctttgggggaatggatactccaaatgtattggttaataaccgctttttgcacaggatccattgtgttaaaattttggaaaggagccca

SEQ ID NO: 5145 - DNA, 517 bp, Homo sapiens
  misc_feature 1, 51, 156, 157, 199, 208, 227, 245, 258, 262, 269, 294,298, 307, 343, 352, 373, 396, 398, 415, 474, 491, 496, 509: n = A,T,C or G
ncgcggtggcggccgcccgggcaggtacagagggctggggagaggatgcanagctgcagttggatgaagatgggtttgtggaggctacagaaggtttggggaatgatgctcttggcaagggacaggaagaaggaggtggctgggatgtagaagaannatctgggagctccctccttgagcctgggattatattcccctnggggcaacntgggtggtggcttgaagantggttttcttttgtgccncccaaccaagggnaacnaaagtcncaacttcagaatctgggttgtaaantaancttcttcangctttccagtttggatccaccatccctggtcaggcntcttttctnaaaacagtcacatggccggcntcctttcaatgtacccaaagttngnggggtaaatccccaagnttttgggcccccttacaaatgccaaacctggtttccttaccaggaacattaacggcccncggaagggcccgcaacnaaacncttattcaagggnctttcttg

SEQ ID NO: 5146 - DNA, 428 bp, Homo sapiens
  misc_feature 160, 266, 323, 339, 348, 381, 410, 412, 417, 426: n = A,T,C or G
ccgggcagggtacgcgggtatgcttgactggtgtttcttttgttgttgtttgtttttctttcaattggaattctgtatttaagatgttatgtcagctgacacatgggacactcctgaagaggtgactggccccccaccctgtttggcggtgagtttccgnacccacccggcctcaggaagtgtccctcttgctttcgactcttgttccgcttgctttgtaaatactttggtcccaagctgagacaattgctgtgtaaaacgtgaanagtcaatcccaaagggtgttatttgtcagaagaacttgccgtgtgccttcaccgaangcagtcaagtctgcanttggatttntctcactggtgaatgacaagaaaccaggggatnaatttttgcactgcgggaggattatttancnggganttggtctantt

SEQ ID NO: 5147 - DNA, 432 bp, Homo sapiens
  misc_feature 132, 170, 385, 404, 417, 418: n = A,T,C or G
ggagctccccgcggtggcggccgaggtacgcgggtaaagtatagactaattaacctaagctacctttaacaacgtagaatttagatgggttcatatatgtgagaaaaacctgaatataggacaggggtcccncttttttccccacctctgtcgcccaggctagagtatangtggtgtgatcttggcccactgcaacctctgcttcctaggttcaagtgattctcctgcctcagcctcccaagtagctgggattgtaagagtatgccaccacgcccagctactttttgtatttttagtaagagacagggtttcatcattgttggccaaggatggtctcttaactcctgccctcaagtgatccaccagagaggagatcctcggcctncccaagtgctgggattatnggcatgagccacnngcccagcctacttt

SEQ ID NO: 5148 - DNA, 478 bp, Homo sapiens
  misc_feature 106, 108, 109, 146, 153, 186, 236, 252, 281, 289, 382, 386,408, 419, 423, 464: n = A,T,C or G
aggtactgcagccacgttggccttcttggtattctttgaatacaagggagcttctacttcaaggcatttacattggctgttgccttagcttagaacgctctttctncnnatagccgcagagcccgctctctcacctgactcatgtntctgctnaaatgttaaatgatcaaagaggcaagttccccngcctcccccttaaaattacaacctgttcactctccaatcctttcctcacngatttttctcaaaagncacttactcgctaacccaacattattatnctaaaatntttttttgtctcttttttatttagggaaatggtaaagattttcatgttaaagccaggggaaacctggtaattatcaactggcttatacccctncagncatttttaaaaacaaatgggcntgttaccctcncggngggtgggccggcctggggggttttgggcttccatggaccanaggatctattgggg

SEQ ID NO: 5149 - DNA, 417 bp, Homo sapiens
  misc_feature 150, 162, 179, 219, 237, 275, 288, 301, 341, 344, 349, 356,364, 385, 388, 400: n = A,T,C or G
aggtactaatactcctgttaaaattcaacagctttattgtgaaagaatccagagatctcacactgaaaaaatactaacacagctcatatataaattacttatctataagaacaattatagaaggaatctaaatggggcaatttttaacanacccaggcaatnatatcacaatatacctngaatataaggtaactccaagccatgagtataagattaagngtcagttacttttatttntgaacaaggcaagtggcataaggcatactcaagtgtgntgccccttaaggngtggggagcctcnttcccccttaccactccccaccccaaagggcatcattttntgnggagnaaaaaanaaggtggntcttcttatcctggctaagcntgntgttttatactnagggatttgccaccttt

SEQ ID NO: 5150 - DNA, 352 bp, Homo sapiens
aggtactcaatacatctttcaataaaaatggggatcggcttctctggagtcacgacagttgttaagggcaccccaaaatagttactctcccaggttgcctttgtgatggatggccggggtttgggctttggtttcttagtgttcctccttaggctgcgaagaatattcctcctccgcgggtcttcgtctgtttcgtatggaatgacagcattgtcccctttataaccccgggatgcctgatcctcctctttcttccggatgggccccagctcatcatcactccccacgctgaagctggtccggtaactagcaaaccgccccagccgggtgcatctcgtcctgtacctgcccg

SEQ ID NO: 5151 - DNA, 117 bp, Homo sapiens
cgcagagccgccaggagcagccgctggagtgcagaaaacgctctcaattttcgggtctcaaagacccacaagcccacaccacgcaggccgggacaggaaagagtcccccgcgtacct

SEQ ID NO: 5152 - DNA, 129 bp, Homo sapiens
  misc_feature 11, 89: n = A,T,C or G
aggtacatggncgaaagtgccttatacaggttgaataaaaatcactgccattttcagaatattgatggcacctgaggacttgaaattgngtccagaactggtgggttcttggtctcactcacttcaaga

SEQ ID NO: 5153 - DNA, 181 bp, Homo sapiens
  misc_feature 58, 75, 142, 155: n = A,T,C or G
ccgggcaggtactttacaattcattcgtgaagctttagccaaagaccttgaaaactancagttgtgctcttccanttttcatatgtgaattcagtgcaagaaacttggtgttctgtttcttcttttaagctctatgcaatcnttgcaaaacatantgatcatagctgttcaacattggtct

SEQ ID NO: 5154 - DNA, 498 bp, Homo sapiens
  misc_feature 142, 180, 186, 209, 239, 248, 254, 278, 287, 317, 320, 321,337, 349, 353, 355, 365, 377, 383, 400, 402, 407, 411, 422,429, 447, 450, 473, 490: n = A,T,C or G
cgcccgggcaggtacagggaaggcctttcgggcagggcacatggttcactgccccatgacgtgataccttgaagcacaccattacagacaagtgggcccccattaatcacccgagcaggtgcttttgccccctgtccaagcntccagcacacagcatggaactttggtcaacctttctgnagggtngaactttgcgcacacacgtcatntgggaaataaacatggaggtccacaccacntggaagttntcattntgggggtcaaagtaactcctctgngttcaatgnctagctccccagtccttggagagtcgttancannatgggtcctccagtgncttggcttcctnggtntnggatcaaggnttccaatggacncttcancaggccattcccgttgnangctcngggnaaggccttctngtacagngccgggaagccaagcatnganggtccgttgggcttggggagatnaatcaaccctgggcccntggaggga

SEQ ID NO: 5155 - DNA, 494 bp, Homo sapiens
  misc_feature 107, 244, 254, 277, 283, 310, 333, 433, 437, 469, 490: n = A,T,C or G
ccgggcaggtactgttcctgttggccgagtggagactggtgttctcaaacccggtatggtggtcacctttgctccagtcaacgttacaacggaagtaaaatctgtcnaaatgcaccatgaagctttgagtgaagctcttcctggggacaatggtggggcttcaatgtcaagaaatgtgttcttgtcaaggatgttccgtcgtggcaaccgttgctggtgacagcaataaatgacccacccaatnggaagccagnctggccttcactgcctcaggtgnattatncctgaaccatccagggccaaataaagncgccggtcttatgcccctgtatntggatttgcccacaccgggcttcacattgcatgcaagtttggctggagccttgaaagggaaaaaggattggatccgccgtttcttgggtaaaaaaagctngganaggatgggccccttaaatttccttggaaagtnctggtggatgcctgccatttngttg

SEQ ID NO: 5156 - DNA, 133 bp, Homo sapiens
  misc_feature 7, 54, 101: n = A,T,C or G
ccgggcnggtactgttattatccctatttgccaatgagagaaagaaggcaaganagcttaaggaagttttcctaattgcccagctagaaggcaggacacanttgccagcagggggccgtttgcccccatgtgt

SEQ ID NO: 5157 - DNA, 451 bp, Homo sapiens
  misc_feature 68, 70, 101, 102, 139, 145, 155, 175, 199, 214, 223, 259,287, 328, 343, 350, 361, 363, 372, 390, 409: n = A,T,C or G
ccgggcaggtactttttttttttttttttttttttttaacttttcacttcttttatttgttaaaatantnacatccatatacatgaaaagatttgaccatnntgcattcattgattgtggctcttgccatctcgtggcntccagnatcctggctnaaaggtttttaccaagtagntgctgggaagccactgaggggttnttcctttccaaagtntggagtcanagggcatggccttttaattttgaagtttgaacctgngttggaggcaaggtagttcctcactggntctctttactaagggaggttttttctttttcataaaaaatncttggcttttttatntttgganattcttctctngnagttttttnattcttttagtattttcnctccattagctaaggttgngaggtctttttcttgtttctttctaaatccaaagactttccc

SEQ ID NO: 5158 - DNA, 130 bp, Homo sapiens; identical to SEQ ID NO: 5023

SEQ ID NO: 5159 - DNA, 496 bp, Homo sapiens
  misc_feature 70, 103, 104, 228, 235, 240, 243, 248, 254, 287, 295, 352,375, 383, 416, 417, 421, 431, 472: n = A,T,C or G
aggtacgtttgggagcctgagctggaactgaagctggggctgcagcctgggccttggtttgatccttggncttggccttggccttggcctttggccggcacannctgagccccttggcaatacgggcacgagcacgcttcccaagcttggggtgggcaatgtaggcaaagtccgatcgagcttgcggctgacaccctttgggatcttgggctttaactctccttgggnctttacngaggngcncttgnatagcncttcggcacgtgccactcatggctcttggcatntgttggcnctgcattctttcttttagggcccctttttgtttagtgccttctttggcaaaagccgncatgttcctcagggaaccttggnggtccacnccccttaaaggagattcgtatcttttgtggatnngggngtttttcttngattaccatttttctgtgcccaattttttcggggactgggnttgtggtgtggatggttggtttct

SEQ ID NO: 5160 - DNA, 484 bp, Homo sapiens
  misc_feature 49, 56, 70, 72, 73, 88, 92, 93, 205, 209, 243, 267, 293,321, 324, 329, 340, 350, 352, 356, 358, 371, 379, 395, 398,399, 400, 404, 412, 427, 428, 434, 452, 459, 465, 468, 481: n = A,T,C or G
ccgggcaggtactttttttttttttttttttttttttttttttttaggnattttantattttagctctangnntgtaatagagggggntcannggaattttacctaaatactggcataaatctgagtgctcgtctttccccaaataatgatgtttctaaatgggaaagttcattataaaacattcttctcttcttcatctcttangggngatagctagcaacattaccccttccttatctacnaaaaaattatttcttaattataanaaaattcattcattaaaggtgttatncattttcctttttttttctccaagaggnggnaattnaaaaaaatacngaattttgcngngacntntaaaacacgtaantagggagnaaaagggagtttattnttnnnaaanagtggganatcccgcggtacctnngggatntaacaagggccgtggagnccacttntggccncancccaaaaaatggnttt

SEQ ID NO: 5161 - DNA, 517 bp, Homo sapiens
  misc_feature 79, 81, 111, 138, 141, 163, 180, 229, 235, 240, 245, 269,274, 325, 331, 336, 339, 344, 356, 358, 363, 366, 371, 388,398, 428, 445, 453, 457, 462, 478, 486, 487, 504, 513: n = A,T,C or G
tggcggctcgaggtactttccttgacaggcaagactgttggccagggctcgcttgacatactcctcctgcgcagccttnangttctccttcttcccgccccaggccttcanggcagaggcctgcagggctcggccgangtncgcgggatccttgaggagcggnatgcctcttgccagctncttcactgagccaccagcctccttcagctccacgagtcagagtaaatangccttnaattnaaagnaattgtgggaccgattattattgnaaacncacccgggtccggggtagaagccagtaccctgtaggaagtaatccgtttgnctattnaatgnagnaaggnattacccttggncntgttntgnaaaanaacaacattgttttgcnaaaaaacctntattttccgaaaattataaaggaagggttnaggaaattttttggggnaagggacncctngccancccccacggaggtttncttaaaanncccttggggattgaatntaacctttncaat

SEQ ID NO: 5162 - DNA, 343 bp, Homo sapiens
  misc_feature 272: n = A,T,C or G
ggcgaattggagctccccgcggtggcggccgctggtcttggcgctcctgcttgtgtccgccgctctatccagtgttgtatcacggactgattcaccgagcccaaccgtacttttagtagagacagggtttcaccatgttggtcaggctggtcttgaacacctgatctcaggtggtccacccacctcggccttcccaaaagtggctggggatcacaggccgtgagccaccatgcctggcctatttatcatttttcatacttgcttgtcaaggnccttcaaaggctatgcttctgatttgcccacacactttacttctgagtatttcatattttacgggtaggta

SEQ ID NO: 5163 - DNA, 167 bp, Homo sapiens
  misc_feature 76, 159, 160: n = A,T,C or G
aggtaccggctcagttcccgaggcccagagccccgcgtcccggctccttcagcctcgctcgccacaaccaaccatnctccaacctgcacagaggacccgggagtccggatggcggcggataccggcagtgcgggaaaccacttacctgctgctctccannagacggc

SEQ ID NO: 5164 - DNA, 171 bp, Homo sapiens
  misc_feature 111, 131, 136: n = A,T,C or G
acactacttagggcgaattggagctccccgcggtggcggccgaggtactttttttttttttttttttctgatgttgagagtcagttttattgccatctctgggaggggctnaaatccgcccaatctccttnagctnggccaccaggtcctcagtggtctccaccttgacgc

SEQ ID NO: 5165 - DNA, 539 bp, Homo sapiens
  misc_feature 102, 149, 151, 161, 162, 190, 198, 208, 219, 225, 243, 245,249, 263, 281, 282, 294, 309, 323, 331, 341, 344, 348, 350,380, 381, 382, 390, 396, 403, 409, 410, 417, 419, 441, 446,448, 450, 455, 472, 473, 481, 483, 511: n = A,T,C or G
tggcacgcccgggcaggtacgcggggaaaaaggagagacatggaaagggagacagccaggtggcacctgcagcggctgccctctggggccacttggtagtgnccccagcctacctctccacaaggggatttttgctgatgggttcttananccttaaccannacctggattgggtgggcccataaaaatnaataaggngaacccaagnccccttttcantggggntggggatgaacctttggnanaagntccaccatttgttnaatgggggggataccaannaaaaaaccaatnttgttattgtttacntttaattggggggnggttgganggaaaattanttnaagnanccacgttggcccccccttttgggttggccnnnaagggggnaaatgncccaaantttttnnatataanangggaaaaccttttggtcccccnttggnangncaacntttcacttggggttggnnccaagggntncttttctccaaccccttgggccaaccanttatggggtggttggggggggggccttc

SEQ ID NO: 5166 - DNA, 426 bp, Homo sapiens
  misc_feature 174: n = A,T,C or G
ccgcggtggcggccgaggtacctgcccacagccttggtccctgggggctagactgctcaactgtggagcaattcattatactgaaaatgtgcttgttgttgaaaatttgtctgcatgttaatgcctcacccccaaacccttttctctctcactctctgcctccaacttcagatngactttcaatagtttttctaagacctttgaactgaatgttctcttcagccaaaacttggcgacttccacagaaaagtctgaccactgagaagaaggagagcagagatttaaccctttgtgaggccccatttggatccaggtctgctttctcatgtgtgagtcagggaggagctggagccagaggagaagaaaatgatagcttggctgttctcctgcttaggacactgactgaatagttaaactctcactgcc

SEQ ID NO: 5167 - DNA, 158 bp, Homo sapiens
  misc_feature 26, 50, 52, 56, 77, 81, 85, 147: n = A,T,C or G
ctcactataggggcgaattggagctncacccgcggtggcggccgcccggncnggtncgcggggaggcattgaggcanccancgcnggggcttctgctgagggggcaggcggagcttgaggaaaccgcagataagtattttttctctntgaaagataga

SEQ ID NO: 5168 - DNA, 208 bp, Homo sapiens
  misc_feature 32, 35, 67, 81, 100, 107, 123, 164, 177, 180, 200: n = A,T,C or G
gccgcccgggcacggtacgcggggtggcggcnacnacccattcgaacgtctgccctatcaactttcnatggtagtcgccgngcctaccatggtgaccacnggtgacngggaatcattggttcnattccggagagggagcctgagaaacggcttccacattcaanggaagggcagcangcncgcaaattacccactccccnacccgggg

SEQ ID NO: 5169 - DNA, 267 bp, Homo sapiens
  misc_feature 158, 165, 174, 180, 183, 193, 194, 201, 222, 225: n = A,T,C or G
aggtactcccagacatggatggttcactttccagggctgtcattgatgaaaatgctttgggatgagtactttttttttttttttttttttttttataatataatctgttttattttacacttctctgattattgaaatctaaatagaggtttttgctnacaaacnaaaaaaggnataatnaanaagacagcannggacacnattaaatgttgagtgcaaatnaanggttgtaatgaggccccatcctggggaggctgtacctgcccg

SEQ ID NO: 5170 - DNA, 431 bp, Homo sapiens
  misc_feature 165, 174: n = A,T,C or G
ccgcggtggcggccgcccgggcaggtacagacaaggtaactgagacagtgatgaatggcggcatgaaggaaacgctcagcctcactgtagatgccaagacagagactgcggtcttcaaaagtgaggaagggaaactgtctacctctcaagatgctgcttgtaaangacgcagangaagtgtcccgagactgcagaggcgaagtgcgcggcgcccaaggcctcccagcagcagtcccgagcagaggactggccaaccaagcgcaccaggtgacacttcagtgaatggccctgtatgacgggtgacgtctgctgctgctgactgaggactgcagaccgccaccactcaggggctctggaggggtcaagctggagcccaccaagctgtcactgctgcacttcactctgcaagggatcaaggaccagccaacctt

SEQ ID NO: 5171 - DNA, 208 bp, Homo sapiens
ccgcggtggcggccgaggtacgcggggaggggcgggcgtcggggacattaccggacaggccttgtccggcaataccaagtttcatgcaggctcttgggaaagctggtgctgctgctgcctgattcccgccgacagaccttgggaccggggccaacactggcagctggagatggcggacaccgagatccgtgcacgagactaggtttga

SEQ ID NO: 5172 - DNA, 467 bp, Homo sapiens
  misc_feature 62, 65, 121, 141, 146, 167, 168, 169, 178, 196, 210, 214,220, 231, 235, 238, 243, 248, 249, 250, 260, 269, 274, 278,293, 305, 310, 331, 337, 339, 340, 341, 344, 350, 355, 358,363, 364, 365, 368, 375, 383, 386, 398, 400, 401, 418: n = A,T,C or G
  misc_feature 422, 431, 441, 467: n = A,T,C or G
ccgggcaggtactttttttttttctttttttttttttttgagacagaagtctcgctctgtcnccnaggctggagggcagtggcacgatctcagctcactgcaagctccaacttccgggttnacgccattctcctgcctaanccttncaagtagctggggacctacannntgccctgcnaccgtgcccggctaaatnttttttgtcatttnttantaaganaacagggggtntttnaancattntttannnccggggaagngttcttttngaatncttncttgacccattatgnatactcactccnacccntaaaaacacttccccaaaaangtggtntnnntgnaatttnccaantgncgttnnnagncccatcntgtcggcnccnggggtcataagnannccttttttttttttttntaanatacaaganattatacaanagccctttgcccaatttgcttttttn

SEQ ID NO: 5173 - DNA, 409 bp, Homo sapiens
aggtacatttcctgccccagatctgggatcaccatttcttcagcaaactctggttcctttgagagggaaatggtatttagagatcacaatctgaatgctaggggtgttggttactacttgttattgcttttaggcatttccaggagagagtgctagaaaatatttttactaaggtaaaaaaataaattatgagccaggagtggtggtggtgtaatcccagcactttgggaggctgaggccagtggatcacctgaggttggagtttcaaaaccagcctgaccaacatggagaaaccctgtctctactaaaaatacaaaattagccgggcatggtggcacacgcctgtaatcccagctactcaggaggcttgagacaggagaatcgcttgaactggggaggtggaggttgt

SEQ ID NO: 5174 - DNA, 364 bp, Homo sapiens
ccgcggtggcggccgcgtgggtgagttggctgccggtgagttgggtgccggtggagtcgtgttggtcctcagaatccccgcgtagccgctgcctcctcctaccctcgccatgtttcttacccggtctgagtacgcgggattgaaaaactttttgagcgttatggtgaaaatggaagattatccttttttggtttggagaaacttttaacaaacttgggccttggagagagaaaagtagttgagattaatcatgaggatcttggccacgatcatgtttctcatttagatattttggcagttcaagagggaaagcattttcactcacataaccaccagcattcccataatcatttaaattcagaaa

SEQ ID NO: 5175 - DNA, 401 bp, Homo sapiens
  misc_feature 172, 208, 301, 303, 304, 305, 356, 360: n = A,T,C or G
aggtacgcgggagtctctttggaaacttctgcaggggaaaagagctaggaaagagctgcaaagcagtgtgggctttttcccttttttgctccttttcattacccctcctccgttttcacccttctccggacttcgcgtagaacctgcgaatttcgaataggaggtggcaaantgggagaaaagaggtgttagggtttggggttttttngtttttgtttttgttttttaatttcttgatttcaacattttctcccaccctctccggctgcagccaacgcctctttacctgttctgcggcgcncnnncaccgctggcagcctgagggttaagaaagcggggtggtattttagattttnagcnaaaaattttaaaagataaaatccattttttttttccccacc

SEQ ID NO: 5176 - DNA, 418 bp, Homo sapiens
  misc_feature 13, 27, 51, 66, 67, 68, 69, 70, 73, 120, 153, 158, 169, 200,206, 221, 231, 237, 243, 254, 257, 259, 262, 270, 271, 284,285, 307, 308, 310, 330, 331, 332, 335, 356, 374, 382, 388,391, 402, 413: n = A,T,C or G
ccgggcaggtacncgggggcggcgacnacccattcgaacgtctgccctatnaactttcgatggtannnnncgngcctaccatggtgaccacaggtgacggggaatcagggttcgattccngagagggagcctgagaaacggctaccacattcncaaangaaaggcagcnatgccgccgcaaatttaccccacttcccgantccggngggagggtagtgacngatttatacnaaaagnataatnaaataatatcnacnanaantatggttnncctttcggggccnnattcttatgaaacataagttgnnanttccccacccgggggccgtnnnaangggaaaatttctgaataagtncaaaagccttttaatacnggaattancccggnccngaaccccttcntaagagggggnggggg

SEQ ID NO: 5177 - DNA, 337 bp, Homo sapiens
  misc_feature 268, 279: n = A,T,C or G
ggcgaattggagctccccgcggtggcggccgcccgggcaggtacttgattaaggtagcgtctgctggcttcctccttgtgcagttgccctttttcccttccacaactattttgtggggaggaactttgaaactattaaatattgtggaactgggcacagtggtggctcacgcctgtaatcccagcactttgggaggctgagacggttggatcacttgaggccgggagttcgagaccagcatgggcagcatggcagaaccccatctctncttttttttanaattaaaaaaaaaaaaaaggtaccctcggccgctctagaactaagtgggatcccccgg

SEQ ID NO: 5178 - DNA, 509 bp, Homo sapiens
  misc_feature 454: n = A,T,C or G
ctatagggcgaattggagctccccgcggtggcggccgaggtacgcggggctcactctttgggtccacactgcctttatgagctgtaacaccgcgaaggtccacagcttcactcctgagccagcgagaccacgaaccccaccagaaggaagaatctgtgaacacatccgaacatcagaaggaacaaactctagacatgccgcctttaagaactgcaacactcactgcgagtgtccgcggcttcattcttgaagtcagtgagacgaagaacccaccaattccagacacattttggcgacctagatgggacaatcgcctatcaccgagtggtgagaccatcgcctatagctgagcggcgagacaatcacctatcgccaagcaacaagcagatgaatggtgaaacgatacagcagagaaagagagaagaggaacatttgaacgccgagaggagttcanccgagggtggtcggagaggtttggccacccagcaggaagattatttttcccgtgc

SEQ ID NO: 5179 - DNA, 366 bp, Homo sapiens
tacttagggcgaattggagctccccgcggtggcggccgaggtactctctgagaaagatcgtgtcctctgtcttgttgggggtgaagtaaaagaaggttgcttggatctcctgaaccgacttattgtacgccattgcgttctggaatggcagaaaaaggaaatatcattggcagccgcatctaagaactctgtgcagagtggagaatcagatagtgatgaagaagaggaatccaaagagccccctatcaagcttccaaagattattgaggttggcctttgtgaagtttttgaattgatcaaagagacacgattttctcatccatccctgtgtctcaggagtctccaagccctgctcaacgtgctgca

SEQ ID NO: 5180 - DNA, 446 bp, Homo sapiens
aggtacatgtgggagaaaaacttaagtgtgatgagtgtggtaaggaattcagtcagggcgctcatctacagacccatcagaaagtccacgtgatagagaaaccatacaaatgtaagcaatgtgggaaaggtttcagtcgtagattagcacttaatgttcattgcaaggtccacacggcagagaaaccttataattgtgaggagtgtgggagggccttcagtcaggcctctcatcttcaggaccatcagagactccacactggggagaagccattcaaatgtgatgcatgtggtaagagcttcagtcggaattcacatcttcaatcccatcaaagagttcatacaggagagaaaccatacaaatgtgaggagtgtggtaagggcttcatttgtagctcaaatctttacattcatcagagagtccacacaggagaaaaaccctataaa

SEQ ID NO: 5181 - DNA, 285 bp, Homo sapiens
  misc_feature 22, 38, 50, 55, 84, 98, 105, 106, 118, 127, 128, 130, 139,151, 165, 172, 173, 177, 188, 191, 211, 232, 239, 250, 253,259, 261, 270: n = A,T,C or G
ccgcggtggcggccgaggtacncgggggatcctgcttntcgccaaggcangaagngagtttctcactgcaattccgggcggtgncacgagtgaaaagntttgttnntttttttcggcngagatcctnncnggggctggnaaactcctgcanaactctagaccagnaagccannccgnaccccaccccnacnaaagccacctactcttcttntgtgggaggccagtccacatncgttctnacccgagaganatnttcagntngatccaaantgactgatcaaggga

SEQ ID NO: 5182 - DNA, 129 bp, Homo sapiens
  misc_feature 35, 45, 47, 67, 69, 73, 83, 112: n = A,T,C or G
aggtacgcgggggatcctgcttctcgccaaggcangaagtgagtntngcactgcaattccgggcggngncacnagtgaaaagntttgtttttttttttcggcggagatcctngttggggctgggaaact

SEQ ID NO: 5183 - DNA, 401 bp, Homo sapiens
  misc_feature 9, 84, 99, 202, 203, 219, 227, 239, 275, 282, 310, 318, 334: n = A,T,C or G
cttagggcnaattggagctccccgcggtggcggccgcccgggcaggtacggtgatattggcggacttaaggacatcgaattgtntatcaggaataaagnattatgtgtgttttctgcggccctggataatgttgtagcattcagggtcgattgagtaaaaaaaatgtagagatggtttcctgtttgtttttgcttctagttnncattcatttgctattnattctctnctggctttgctngtgtatgcatatatataaaaccattattattattantattatncttagtatctagtggaaggcttttattnggttctgngaatagtcattttgtntcctaagaacttccagcaagttgtattcattccattcatctagaattcctaggctgccctttggccg

SEQ ID NO: 5184 - DNA, 306 bp, Homo sapiens
  misc_feature 188, 228, 240, 252, 263, 271, 295: n = A,T,C or G
ccgggcaggtactttttttttttttttttttttttggcactctatccttttattccttcccaggctattgcaggaaaagtcttgtttcccaaaaccgctgtgcctttctcctctttgcctttcacccctgggagggggcccaaactacacaagtgggctttatttgggagaggggaatggagggttgnaataaagaaaagctcagcttccagaaacaccacactctcnttgggttttctntgaccttaaggnaactccttctnagtccttngggctgatttcccatttcccaaanagcccaagggc

SEQ ID NO: 5185 - DNA, 356 bp, Homo sapiens
ccgggcaggtacgcgggaccccaacctgagcacatccctcgacgatgccttcctgctgcgcttcctccgagcccgcaagtttgattacgaccgggccctgcagctcctcgtcaactaccacagctgtagaagaagctggcccgaagtcttcaataacttgaagccatcagccttaaaagatgtccttgcttccgggttcctcaccgtgctgccccacactgaccccaggggctgccatgtcgtctgcatccgcccagacagatggataccaagcaactatccaattactgaaaacatccgagccatatacttgaccttagaaaaactcattcagtctgaagaaacccaggtgaatg

SEQ ID NO: 5186 - DNA, 345 bp, Homo sapiens
aggtacaaatcctctgaagcctttgcagttccagtcccaagattacactcatatacttgcaaatgtgcaaaataaactccatacaagtattgtcactggtgcaactacattcactctaattttctttcttgctacctctttagcaagagcacgtgaaaatccaactaatcctcctttactggcactgtaaacggactggccagagttgccttttaagccaacaatgcttcctacattaacaatagaccctccctgttgttgaatcatagtcctcatggcagctttacaggtcagcatggaacccaagaggttagtatgaagctgagataccatatcttcagtttt

SEQ ID NO: 5187 - DNA, 379 bp, Homo sapiens
  misc_feature 2: n = A,T,C or G
cnccgcggtggcggccgaggtacaatgcaaacagtgccgcttccagtgctacccacacgggtgcagcctcacgggagagttgcggagagagggaatgcgttcagttcagccagcggacggccaggggtaagcggcccctagtgggtcacatggcctatgatgtctggagaccgcagatcttcaccctctggagtctcatttgcagagtctcatttgtcgtccggtcactgtggccacctcaccctcgtcaccacgggcctttcctgtgccgtgctcactctgacactgagatgctgccaggcagttttttttttaaaaatcagtggagtaagttctaagggagccccatgtgcttaagataaaaacgtagctggtaaag

SEQ ID NO: 5188 - DNA, 369 bp, Homo sapiens
ggcaattggagcctccacccgcggtggcggccgcccgggcaggtactgtaacaaaaagctggctttaggcgtggcttgtagaatcaatctaactactagacaagttacatctcatatatgtgtggcttctttttcttcttttggggggctacaaggaaggtttggagaaattatttccatcatacctttttgttagcctttttccatttctggccagtaagtaatcccgttcctgacaacagtccctttgttttctcaagtggtctgatgaaggactgcaaaccacagctcttgtgttttttgcaccatgggttttaaaatccgtcctctgcctccccacaaggagctactaccccaaggggaagggag

SEQ ID NO: 5189 - DNA, 351 bp, Homo sapiens
ccgggcaggtactgagtgaagacaccagagtgaaggagagaggccatgctgtgtccgagaagctcctactggggtggaagggacagctccacaaaggctgctcttgcaggggctctcctgcagcaaggtgcctgctgactgtccccagactgtctcccgacacagagggatgcaaaggcagcctcttcctgctcagtggaatagggaaattatatcacctttcacttcccactctcacttctgcccctgctacccttagtctttggcttttgctgacattttcccctcttatcttttctcctgaccaagttctaggtatttcatagggcagtctaggtgagggttggaacc

SEQ ID NO: 5190 - DNA, 361 bp, Homo sapiens
ccgggcaggtacccgattaaaccagagcaaaaaactaccttctgcaggtcagggagctaatgacatggcattggccaaacgttcccgcagtcgaactgctacagaatgtgacgttcgtatgagcaagtctaagtcagacaatcagatcagtgacagagctgctttggaggccaaagtgaaggatcttctcacactggcaaaaaccaaagacgtagaaattttacatttgagaaatgaactgcgagacatgcgtgcccagctgggcattaatgaggatcattctgagggtgatgaaaaatctgagaaggaaactattatggctcaccagcccgactgatgtggagtccactttattgcagtt

SEQ ID NO: 5191 - DNA, 255 bp, Homo sapiens
  misc_feature 64, 82, 111, 116, 167, 171, 176, 184, 192, 213, 222, 227,231, 243: n = A,T,C or G
ctatagggcgaattggagctccccgcggtggcggccgaggtacttttttttttttttttttttnggtttttttttttttttnttttttttttttttttttttttttttggncaatngttatttagtttttatttcataatcataaacttaactctgcaatccagctnggcntgggngggaacanggaaaacntggaacccaaagggaactgcngcgagagcncaaanattntaggatactgcnagcaaatggggg

SEQ ID NO: 5192 - DNA, 316 bp, Homo sapiens
ccgcggtggcggccgaggtacttttttttttttttttttttttccgcctccccaaagctttatctgtcttgactttttaaaaaagtttgggggcagattctgaattggctaaaagacatgcatttttaaaactagcaactcttatttctttcctttaaaaatacatagcattaaatcccaaatcctatttaaagacctgacagcttgagaaggtcactactgcatttataggaccttctggtggttctgctgttacgtttgaagtctgacaatccttgagaatctttgcatgcagaggaggtaagaggtattggat

SEQ ID NO: 5193 - DNA, 285 bp, Homo sapiens
  misc_feature 1, 3, 5, 12, 196, 197, 208, 211, 217, 233, 240, 248, 250,270: n = A,T,C or G
ncngnccaggtncgcggggagacttttgccacacacaaatttgtgaaaattaaaccgagatgtggaaggagaacctcagtgattttattccctagtgaggcctctgagggcctacacacctgcctggcagaacataccactgaactagtatggtgctagaggagggcacaaacatccgctccttccctaggcctgnnggctctggttntcnatgcanatgattcattgggatnggggggngagtgttntngttttttctgggggcaggtnagagcttttgagggt

SEQ ID NO: 5194 - DNA, 359 bp, Homo sapiens
aggtacgcggggtgggcgctaagatggcggcggcgtgagttgcatgttgtgtgaggatcccggggccgccgcgtcgctcgggccccgccatggccgtcaccatcacgctcaaaacgctgcagcagcagaccttcaagatccgcatggagcctgacgagacggtgaaggtgctaaaggagaagatagaagctgagaagggtcgtgatgccttccccgtggctggacagaaactcatctatgccggcaagatcttgagtgacgatgtccctatcagggactatcgcatcgatgagaagaactttgtggtcgtcatggtgaccaaaaaccaaaagccggccagggtacctgcccgggcggcc

SEQ ID NO: 5195 - DNA, 369 bp, Homo sapiens
ccgcggtggcggccgaggtaccaggagctgcggtgcagggacggcaggctgccgttcacctggtccagggcctctgactgctccacttggatcaggggggtgtagcactgtgtccagtcccggtagggaggggttgctggaggggtggcccacgaccgggtcgagtgactcggtgagtacaggggaatggaatggaatggaatgcaatggaatggaatcatccggaatggaatggaatttaatggaatgcaaagcaatggaatcaactcgattgcaatggaatggaatggaatgtaaaggaatacattggatcaacccgagtggaatggaatggaaaaggactggattggagtggaatggaatggaatg

SEQ ID NO: 5196 - DNA, 352 bp, Homo sapiens
  misc_feature 279: n = A,T,C or G
ccgggcaggtacgcgggggtctgccgcggtggccgggtgccgatttgacaagatcaaagctgcaggaaaatggacagtgaggttcagagagatggaaggatcttggatttgattgatgatgcttggcgagaagacaagctgccttatgaggatgtcgcaataccactgaatgagcttcctgaacctgaacaagacaatggtggcaccacggaatctgtcaaagaacaagaaatgaagtgggcagacttagccttacagtactcgtcttggtgagagcgngagctgctgagatttgggagtctgcgctaggcccgcttggagttctgagccgatggaagagttcactcttgtt

SEQ ID NO: 5197 - DNA, 341 bp, Homo sapiens
ccgggcaggtacatggcatcagctctgtcttcaggaatctttggctgtgtgggaggataaaggatgtgatttctttctttctctcacccaacgtgcttattccatttctttgattaaatactggtatcattgaggctgggtgttctgacattaaagccaccagtaactgtagcacatcatgaatattttcatcctcatcctttaggtgtaatgccgctactgtcagctggattaataacccagtagtaatattttaaggtgtgcattatctttaataactgttcctattctgcgtatggtggtgtagatggtagcagttccaataaattcagcagacaaat

SEQ ID NO: 5198 - DNA, 351 bp, Homo sapiens
ccgggcaggtactaaccaggcccgaccctgcttagcttccgagatcagatgagatcaggcgcgttcagggtgatatggccgtagacgtctttacaaaattcctgacaggtggttactgaatctctctatgaactttccattcaaaactttccaagtttttccttatgtggaaccgaaatctttctttctcccgtgaaactttactactatcagataattgaagacagatctctttgtattctcttcaagcccaaaccaattctgttccttcaatctaaatagtggtaatatgaatgtttaagaaatgaaataagaaacatgtgcaggcactttggaaggtgctaagtgact

SEQ ID NO: 5199 - DNA, 387 bp, Homo sapiens
cttagggcgaattggagctccccgcggtggcggccgaggtacctgtgcacatttcaagatagcagcactcagtccatgccctattatccatcttaaaagttcacacattattgtttactgaataatatttctactgtctttacccccaaacattgcaaaacctgcaatggaacaatgctgtgagttataatgtagaaattttttttttttttttttagaaaatcagttacttcattttcttaatattctgaattcaagttatcagatctctatacctaggtcatactcatgaagcaaaaatgctgcacaccactgaaaataataacgttatagatgtctatcaaaattcatgaaaaccagccaggcgcagtggctcgcacctgtaat

SEQ ID NO: 5200 - DNA, 339 bp, Homo sapiens
  misc_feature 244: n = A,T,C or G
aggtacaactgtcccagcatgtcagttacacatactggccctaaatgttcagcataatttaaaagggaaagaaaaaagttggcttttcagacaaaattttgtgtgaactgaacaacgtcagactatgcttctttgggtccaaataattttaactttacagctctcagatgttctggcagctcattctttgtccatttcacctattatacaagtgtttctgggtccaagccacagagcaaaatanacacaaataaatcaaataataaatgtttcatataaaggagaaaatgctaatggtctgttatctataccagcagtccccaacttttctggcaccag

SEQ ID NO: 5201 - DNA, 354 bp, Homo sapiens
aggtactggtcgcagagtctactccttcaacagtcccagcttcttcagggcctcccttctgtgttcattggggacaccctttggggagatcttgacactgacacagggggggcgaggaagcttgtcacggctctgtccttggtaggacaggcgcttggagctctgctcctgctccaggtcagccagcttgcctacctggatacctgcaaaatctttccccgtgcccagggaggccgggcggggccgagaattacgtaagacactgggcgagatcttgtccaagaaggagccctttcccagagaagtgctggttttggggctggcatctttctcagttgaaaggtagctgctcag

SEQ ID NO: 5202 - DNA, 344 bp, Homo sapiens
aggtacgcgggctcctacttggataactgtggtaattctagagctaatacatgccgacgggcgctgacccccttcgcgggggggatgcgtgcatttatcagatcaaaaccaacccggtcagcccctctccggccccggccgaggtacagggtgtgacaacatgacctgcatcatcatttgcttcaagccccgaaacacagcagagctccagccagagagtggcaagcgaaaactagaggaggtgctctctactgagggggctgaagaaaatggcaacagcgacaagaagaagaaggccaagcgagactagcagtcatccagacccctgcccacctagactgttt

SEQ ID NO: 5203 - DNA, 350 bp, Homo sapiens
aggtaccacaaattaatggttaaaatgcatccctcatacgacaatgtaacttcttcctctcactgttgatggcctatcttcctgaaaacattaatctgggggtgagaacttgggagatacacacagttgggttcaccataaatgaggagcctcactgacagtggaagatgcacaggaaaagaaagaagactatgggctgcttccttagaattgtcttcctgcttgctgtgttactgctagagcttcctgtgtgggctccatatggtccctattcttcccaccactcatgaaaacaccaaagagcaggctcagagtgaccacagccaagccccagctctgccagcaggccc

SEQ ID NO: 5204 - DNA, 354 bp, Homo sapiens
aggtacaagagtgattctggcatgcctataaactttccaactccttctttatattctgtcaagacttcatgatgttctgctagggatgacagcgtaagctgagccatggcaggaaccccgtggatattatgcagcgtgtgatgggtgaggtgtggggcggagccagtcttggtatacagaaggcagcctggaatatccatggtgtggtcccctgttttgcccaggttttttatttttcctaggcgacagccattaactaccttggcaagactcagcttcatcctaagggattcttctaggtcctgccaacaaaccattcgactctttcagtcttcagacccctcaaactcctca

SEQ ID NO: 5205 - DNA, 354 bp, Homo sapiens
aggtaccactggtttgcaaatagagaaacctctaagactcttcttactcatttccttgaccaaaataaaactatgagtggaaaatggagtgatgagcagtaagcacactggaaaagtgggatgatcttgaagcaaattgctgataatcacttctgggattcagactgagacttgagcaagcttcaaggttggatgactgaattgaagacttccatgttaaattggttatcttgagaaggatacaagttaatttcagatattgatgatgctcaaatacttccccgctcaactagagtcagacatttttcacaaagtgaagaaactggaaatgaagtttttggtgctttgaatgag

SEQ ID NO: 5206 - DNA, 346 bp, Homo sapiens
aggtactttttttttttttttttttttttttggagtaggtgttgtagtaggagatggcacagtggtgtgtatggtgggtgccactgttgaagttttgtctttatcacacaggaactcatttgtgctcactgtgccattttggacaaaagcttgtacctgcccgggcggccgctcgactgacacccaccctgacaagtgtccatgatgctgggccctgagggaggtgaaggctttgtggtcaagctccgtggcctgccctggtcctgctctgttgaggacgtgcagaacttcctctctgactgcacgattcatgatggggccgcaggtgtccatttcatctacacta

SEQ ID NO: 5207 - DNA, 343 bp, Homo sapiens
aggtacaacagttgatgatgaagaacacgatgataaggaagaagaggaggaggaagatgatgactgctggcttgaagacttgttgttgtttttgctctttcgaccactccgtgagtcggctgctgatgaactggcattctgtgttaatgttgtcataagtgccgaagatgatgaatagccaactgtttccctggccattgaaaattcttttcccaactgaaagtcattattcttaaatgcttcataactggcttttaaacttgatgttcttcgtccctccttcatctgagctgtagcctgaactgcttgagcagctgccatggtaattgcccctgcaccagtt

SEQ ID NO: 5208 - DNA, 222 bp, Homo sapiens
  misc_feature 70, 77, 91, 113, 127, 130, 132, 136, 143, 151, 152, 163,179, 187: n = A,T,C or G
aggtactttttttttttttttttttttttttttcttttttttttttttttttttttttttttttttaaanaggaaancccggtaatgatgncggggttgagggataggagganaatgggggataggngtntnaccntgagggngttgaacnntggtcaccttnggagggtgaacttgcncacacacntcattggaaataacatggaggtccacacactgaag

SEQ ID NO: 5209 - DNA, 259 bp, Homo sapiens
ccgggcaggtacaatgatgttttcatcagccatggcaggcacataggctcctcctgcggtgcaggagcccatgaccactgcgatatttactggttaggaaggatatcataaaggatacagatgaacagccagatgaaaagatacataaggcgagtctgcaaaggtcctgagggctggagcttctgtccccgcggagtgggaatgcaccaccttcctagcacttggatgagtttgccagcacagatgcccccgcgtacct

SEQ ID NO: 5210 - DNA, 357 bp, Homo sapiens
ccgggcaggtacgcggggggagctaaagtggtcgtgattcatgctgtcgcgggaaccccgaaggtggggccccacgtaacaagaagatgacccgaagttgctccgcagtgggctgcagcacccgtgacaccgtgctcagcccgggagcgcggcctctccctccaccaatttccaactgataccatacagcgctcaaaatggatcagggctgttaatcgtgtggaccccagaagcaaaaagatttggattccaggaccaggtgctatactgtgttccaaacattttcaagaaagtgactttgagtcatatggcataagaagaaagctgaaaaaaggagctgtgccttctgtttctcta

SEQ ID NO: 5211 - DNA, 197 bp, Homo sapiens
  misc_feature 109, 111, 117, 137, 167, 170, 172: n = A,T,C or G
ccgggcaggtactttttttttttttttttttttttttttttcgcattcaacttaaatgcttttattgacaatgtcttggaacaataagcaaaccccgcgtacccaactntnagccanagatggtggaggccgtcaanaagcacattttaaacatgctgcacttgaanaananacccgatgtcacccagccggtacct

SEQ ID NO: 5212 - DNA, 362 bp, Homo sapiens
  misc_feature 349: n = A,T,C or G
ccgggcaggactccggtcggtgtcagcagcacgtggcattgaacattgcaatgtggagcccaaaccacagaaaatggggtgaaattggccaactttctattaacttatgttggcaattttgccaccaacagtaagctggcccttctaataaaagaaaattgaaaggtttctcactaaacggaattaagtagtggagtcaagagactcccaggcctcagcgtactgcggcgggtaggcctaggattgtgggggcaatgaatgaagcgaacagattttcgttcatttttggttctcagggtttgttataatttttttattttttatgggcttttggtgaagggaggtaggntggtagtttgtgt

SEQ ID NO: 5213 - DNA, 645 bp, Homo sapiens
  misc_feature 38, 72, 109, 141, 161, 168, 170, 183, 196, 216, 221, 230,232, 241, 249, 254, 255, 265, 266, 268, 280, 282, 284, 294,303, 311, 312, 316, 326, 337, 355, 357, 366, 382, 385, 396,408, 464, 466, 483, 485, 488, 490, 495, 497, 512, 513: n = A,T,C or G
  misc_feature 531, 534, 543, 548, 564, 575, 583, 616, 618: n = A,T,C or G
ctatagggggcgaattgggagctccaccgcggtgggcnggccgccatcaaccgccacccttactggcctagntcacacaccgttcaagggggtagggctggctccttcnagttggtgtaagttttgggggtgttttggtangttaccctctctatgtgggnttggggngnaaccttttctacnatgtttttttggnctcaaggcaatatttcttcntgacncctttcttngnaactttgcnttggctcnttcgnnctatgtaagnnangggtataggggnangntaaggggggnggtaaaggncccattcnnttgngggccaaaanggggggggggnccccccaatttttctttntnttcgaaggncctacccaaaggtttnaancccttttctgnggggccccgggnctttcctttaaggaaaaaccttaaagggttgggggaattcccccccctccgggggngnccttggtcaaacggggnanaantntcccngnatttatttccaaaanncccttttaattccggganttnaacccccgntttcnggtgaacccccttcanttaaggggggngggggggngggggtcccccccggggggttatcccccccaangngcctttttttttggtcccttcccccct

SEQ ID NO: 5214 - DNA, 803 bp, Homo sapiens
  misc_feature 44, 56, 69, 76, 80, 90, 92, 96, 105, 107, 114, 126, 128,141, 143, 154, 180, 188, 196, 210, 220, 237, 243, 245, 276,279, 290, 336, 337, 340, 341, 342, 343, 344, 345, 348, 376,387, 467, 479, 497, 510, 513, 515, 536, 569, 586, 623: n = A,T,C or G
  misc_feature 627, 632, 635, 638, 643, 648, 654, 662, 675, 678, 696, 702,704, 723, 727, 729, 778: n = A,T,C or G
ccgggcaggtactttttttttttttttttttttggaagacaagnagtttttggctnctttggttccgcnccaaagngtcntggggtaagntnggcnaggtggggncnaccaaanttcttgcggggncnttcaacttgggcnanactcttttcgnctcttccctgggggggtttgcaaagnccggaatntgcttgcncaaggccccttttnaagtcccctnctccccaaaaggtttangggccntnggggggggaacctttaacccaagggggggtnggnccccccccggnctttttaacccccaaattggggccccttggggggccctttaaaaanntannnnnnttntttttttttttgggttaatttttttttnaaagttaaagnaaaggaacccgggggggggttttttccaaccccaattggttttggggcccccaagggggccttggggggttccaaccggnaaaaacctttcncttgggaacccccttgcnaaaggaaattaanaantncccccaacccccttggggccnttttttcttggggcccctttcccccccaaaaanaaagggttgggcccttngggggggggaatttttaaacccaagggggggccgggnttgngaaanganccnccaanctccnaatttnggtccccncccggggggggcnttnggggggggggcccttttngggggngnaaattcccttttttttttnaaangncccttttggggttggggttttttaatggtttaaaaaaaaaaaggggggnaattttttcctttaaaggaaaaaaa

SEQ ID NO: 5215 - DNA, 883 bp, Homo sapiens
  misc_feature 3, 36, 38, 40, 54, 79, 84, 95, 115, 122, 130, 138, 145, 154,157, 169, 173, 183, 189, 192, 216, 260, 372, 398, 432, 454,462, 470, 477, 482, 490, 499, 502, 506, 508, 509, 514, 547,562, 565, 573, 589, 625, 632, 638, 677, 720, 750: n = A,T,C or G
  misc_feature 753, 757, 778, 799, 804, 807, 815, 822, 827, 840, 842, 843,873: n = A,T,C or G
agntctgggggtttatattatacctgggtggtaagnananccatccgggggtcnataatggggtaatttttgcccgggnaccgnaccttcggggnattcttttaagtaagtaagnctttggngtaagggnctccgtcnaccccgnccctgggtncancctttttggggnccgnaaccgtccgnccaagnccnttgggggggaaccaagggctttcnccaaccccctttttccaaggggtttccggtttccccaagggccnttgggtttttttgccaaagggcccaaagggccctttcccccctttcccccttttttccttttcctttttccccccccggccggaaaaagggaaattcctttccgggaaaggnccccctttttgggaaattcccttttnggggggccccccaaatttttgggcctttgggccnaacccaaaaagggccccccggnctcccaanaaaccggnccccccngtgtncccggttntccccccgngcntttncnncccgngaagggggggggggaaaaaaaaagggaaaaggnccccccccccccggnccngggtttanccccccctttgggccnccccccggggggggggccccgggggggccccccggnccctttncctttnaaagggaaaaaaacccctttaaagggggttggggggggngaaattttcccccccccccccccggggggggggccccttgggncccaaaagggggggaaaaaattttttcccnggnaaanttaaatttcccaaaaaagggnccctttttaaatttcccgggnaattnaancccccccngggtttnccggnaaacccccctttncnntaaaaggggggggggggggggggggggggngccccccccc

SEQ ID NO: 5216 - DNA, 621 bp, Homo sapiens
  misc_feature 32, 34, 43, 58, 70, 87, 89, 93, 96, 100, 102, 108, 136, 139,145, 149, 153, 155, 156, 180, 184, 188, 208, 220, 224, 228,229, 233, 239, 249, 264, 274, 277, 282, 289, 314, 316, 324,340, 355, 356, 364, 372, 404, 436, 437, 463, 464: n = A,T,C or G
  misc_feature 465, 468, 472, 479, 490, 491, 494, 495, 510, 516, 520, 529,537, 539, 541, 562, 565, 567, 587, 592: n = A,T,C or G
aggtactttctttttttttttttttttttttngncactacctnccccggggtttcggngtaagttggggngtttataatttttggcngnccgnccntggncntgggcncttttctctttgggggaatgggtggggnttnaagtcnccgntttntnnttacaaggggccttccccattctnctcngggnaaaattccgtaaaacccccntgggaatattcncccnccgnnttcnaccccnccgttggggnttccaaccccaaatngggtttaagnggnccaanccggggncgggaacctttaacccccaatttcngnaaaaaaanggtttttgggaattanaggggggggcccaannaaaccgtntttccagnaaaaatggggggttccgggtgccctcccccgncccaaccgggggggggggggggcccggttggnnccggaaatttcaggggggctcccccnnnaangggntttttantttccttaagnnaanntttcaaactcccaanaaaagntccnccggttccntgggtttngncnccccggtctcccccccccagnggncnccggtccttttctttaaganaaaanccttaaggttggggggaaattcccccccc

SEQ ID NO: 5217 - DNA, 288 bp, Homo sapiens
aggtacccatctaggtgagccttgagcaaaaggtaatttcactgcccaactctgcaaagagcaccagggagtcgaggttgccagccacactcaccgctggtagggatgcatggaagccgacttgatgttggtttttattccacttggcattttccctggttgacctgcctgagccatttgtacaatttctgccactggtctaggtgtctgaggagcatcttcctggctcagagaccttttgctccaggtgctcatgccgcaaatggcaatctgcgcgcgaactaattc

SEQ ID NO: 5218 - DNA, 278 bp, Homo sapiens
  misc_feature 94, 198, 200, 201, 203, 205, 217, 225: n = A,T,C or G
ccgggcaggtacttttttttttttttttttttttgtaggttgaatgcagggttttattgagtggtggaggtggttctctgaaggatggatgcancagctggaagccggggatggcacgggaagataatcttcctgctgggtggccaaacctctccgaccaccctcggctgaactcctctcggcgttcaaatgttcctntnntntntttctctgctgnatcgtttnaccattcatctgcttgtctgggatggtgaagacaactgtttgctcatttgctt

SEQ ID NO: 5219 - DNA, 819 bp, Homo sapiens
  misc_feature 77, 108, 127, 129, 141, 147, 156, 160, 167, 197, 212, 216,239, 271, 272, 275, 285, 335, 341, 375, 398, 404, 467, 471,484, 493, 503, 520, 525, 546, 558, 568, 605, 612, 617, 629,631, 636, 706, 725, 761: n = A,T,C or G
tatagggcgaattggagctccccgcggtggcggccgaggtacacacacctatgggtgcccacagggtccagctaggngtatattatatatggccaccatataggaagnccttcgcactccattcctngnaagtaattttanccccanccttccatncctntttttanaaaaggaaccaataattttcttttaatgtntgcattcccccttcnccanaaaaggaattataaaaccaattncaaccaattgggggaaaaaaaaaaattggttnnttncaaccaattnccaaaatttttcctttttttaattttaaatttggccccccaaggtttggnaaaaanggggaaattgggcccccttttttccttttccaanggggaaaggaaattggcccaaanccaatnggggaaggaaaaaagggtttttttttaaaaaagggggccaaggggccaaggtttggaaaaagnaaangaaaaaggggganccaaaaggnaaccggtttntttccaaaacccccccnaaggncctttccccttttaaaggaantggggggaaggnaaaaattaanaagggttccttgggcccccccaaattttccccccccnaaccaanccaanccaacccaattngncccangggttggggggggggaaaaaattgggccccccaaggtccccccggcctttggggccccccttgggttttncccctttcccgggggtttnaatttaaaaatttcctttccaaaccccccttgggtngggccctttttccaaaaaagggccccccttggggaatttttaattttttaaaaaccca

SEQ ID NO: 5220 - DNA, 764 bp, Homo sapiens
  misc_feature 52, 63, 72, 78, 99, 103, 155, 161, 175, 182, 184, 209, 255,256, 269, 282, 284, 293, 311, 322, 330, 341, 354, 355, 380,395, 416, 423, 431, 442, 445, 447, 461, 462, 466, 496, 515,532, 535, 546, 558, 598, 599, 604, 611, 619, 663, 719: n = A,T,C or G
  misc_feature 742, 746: n = A,T,C or G
aggtaccactttgtccagatgggtttatactatacagtggtaaatttttatnggtaggggtanaccaattcntggtcnttttttccttttcttaagggnaagnttcttgggtaagtccttttccaagttgggacctggtactcctttttaattanaaaaanaaccccaatggggnaaccacncnccaagggtttttttaaaggggttgnaagtcctttttctccccttccgtaattggggcccccccccggccgnnttaacccctttgnccccccccggggngncccggggcncccgcctttccttaaaanaaaaacctttnaagggttngggggaatttncccccccccccgnnggggcctttggccaagggggaaaantttccggaaattaanttccaaaaaggcccttttaanttccggnaatttaanccccccggttnccngnaaccccctttcttnnaagnggggggggggggggggggcccccccggggngtttaaccccccccaaagncctttttttttttgggnttntttcccccccnttttttttaaantttggggaaaggggggggggttttttaaaaaattttttgnncccgncccccgncccttttngggggggcccgggtttaaaaaatttcccaaatttgggggggttncccaaatttaaaaagggccctttggggtttttttttcccccccttggggttggggnttggggaaaaaaaaaaatttttngggntttttaatttcccccccg

SEQ ID NO: 5221 - DNA, 355 bp, Homo sapiens
ccgggcaggtacgcgggcagatgcctccggcccacagttccaccaggcagcgggagaggacctgctggccccaccgcacgacaccagcacggatctcacggaggtcatggagcagattcacagcacgtttccatcttgctgcccaaatgttcccagcaggccacaggcaatgtgaagtattcatccggccaaccaatgtttcctgacgtacgcgggggagagagagagagagagttgtcaggaaagctgcaggttactttgagacagtcgtcccaaatgcattagaggaactgtaaaaatctgccacagaaggaacgatgatccatagtcagaaaagttactgcagcttaaacag

SEQ ID NO: 5222 - DNA, 354 bp, Homo sapiens
aggtacttctgctccacgaggaaggggatcgccaggcactaccgcatcaagcacaataatgtccgagcccagccagaaggcaagaacaacctcttcaagtgtgccctgtgtgcctacaccaaccccatccgcaaaggtctggcagcccactaccagaagcgccacgacattgatgcgtattacactcactgcttggcagcctccaggaccatcagcgacaagcccaacaaagtgatcatcccatccccgcccaaggacgactcccctcagctgagcgaggaactccggcgggcagtggagaagaaaaagtgctccttgtgctctttccagtcgttcagcaagaagggcatcgtg

SEQ ID NO: 5223 - DNA, 954 bp, Homo sapiens
  misc_feature 84, 89, 113, 116, 118, 120, 124, 157, 161, 169, 171, 173,175, 186, 196, 223, 229, 235, 276, 282, 285, 293, 299, 312,317, 338, 344, 351, 352, 384, 417, 425, 429, 438, 443, 455,467, 480, 508, 514, 520, 529, 554, 596, 604, 614, 627: n = A,T,C or G
  misc_feature 664, 710, 716, 722, 756, 764, 767, 776, 796, 797, 804, 823,844, 862, 866, 879, 885, 913, 914, 941: n = A,T,C or G
tatagggccgaattggagctccccgcggtggcggccgcccgggcaggtactgtgtagaattaagcaatacataggtggtatgtnttcangtaaggtaaaactcccattttacntgncntntganatataattatatagggcgccttaccattcatanccanccttttanancntncaatataccgnaggggaccanaatttgggtgtgaatttttaaggtttntgtttnaatttntgcaattaaaattccaattaaaaaaccttttaaaaaccttncttggnccnaaaattcnccaagnccctttaaggggnccaanttggggggggaaggggggggnaaaaancccaaanngggggaaaaaaaaaaacccaaatttggggggnaaaaaccccccccaaaaaaagggggggaaaaanccttgggnccangggcccggnaaggnaaagggcccaanccaaaaaaaaanggaaatttttccnttaaagggggggaatttaaccctttggncccggnaaaggncccaaaaanaatttggggggggggggttggggtnaaaaggggggggggggttttgggcccctttccgggccctttnaatttggnttttttgggnccccccccaaagnggggcccttgggggggaaagggtttgggcccaaaggntttgggggggcccctttaaatttttttcccaaacccaaaggggggncccggnccccgngaaaatttcccccccccaaccctttaaacccttnggggaaanttncccaaaggncccaaccccggggggggggnnaaagggntttttttttttttttgggnaaaccccccctttggggcccntttcccccccggtttttnttcnccccgggaaaccncccttnggggggggcccccccggggggttttttnnaaacccccccccccttttccctttttnaaaggggggccca

SEQ ID NO: 5224 - DNA, 721 bp, Homo sapiens
  misc_feature 10, 69, 84, 102, 110, 137, 203, 216, 277, 307, 311, 318,329, 344, 369, 380, 397, 408, 440, 449, 461, 470, 475, 490,514, 518, 532, 550, 558, 559, 569, 575, 581, 592, 605, 622,632, 646, 687, 706: n = A,T,C or G
aagaaagccnagccttgaaagaatggaagttggggggttttaaaaaccccccaaataaccccccaatgnaaaaaaagccttggnccaattggggcccccttnggggaagnaaaaaaaaaagccttgaaaaccccaanggccccccttttttggggaaatcttttcaattggccccccttggggggtttttcttggccccccgncccaacccggggnaacccccccccccaattttcttttctttggtggggaaccttttttccccttggggaaaggnaacccttccaacctttttttccctttaaanaaanttgaaanggggaaaaagntttggaaaaaagccntttttatttccaaaaaggaaaaagnaattggggggnttgggaaccccaacccnttggaaccccnaaaaccccttttccaacaaaaggggcccttgnggggggttngggggccccccnggggaaagnggggnctttgggggggcccnttgggggggcccgaaaagggttanattnctttcctttttccnaaaaaaagggggcctttnaaactttnntttcaaaaangcccancccggnaacttttaaangtaaagccccccntttttttttgggaaagnccccccccangtcccgtaaacccnttttttttttgggaaaaaggggggggccccccccccttttnggcccaaaaaaaggttttnaatttaaaggggggg

SEQ ID NO: 5225 - DNA, 860 bp, Homo sapiens
  misc_feature 53, 64, 103, 122, 136, 138, 142, 178, 182, 190, 196, 200,212, 216, 228, 289, 296, 353, 376, 377, 411, 417, 436, 438,455, 483, 563, 589, 600, 650, 653, 668, 669, 686, 698, 699,704, 746, 755, 768, 776, 778, 790, 799, 803, 804, 805: n = A,T,C or G
  misc_feature 806, 807, 843, 844, 849, 850, 851, 858: n = A,T,C or G
aggtacctgcaggcctcctacacctacctctctctggggggctttcttatttntcgtactccgncggatggtatgggtgggggctttcttggggtaaaagggnccggtggtaaggctcaacnttttcttttcccgncngganaacctggggtctccgtaaggggaagtaaaagtccgnccgnaggggggnccttanccgnaaggccggttcnttcncttggaaaaagnaatgggccaaaaaaaaaaccccaagggccgggttgggggccgggggcccccggcctttccnttaaagnaaaacccttaaaggtggggggaatttcccccccccccccgggggggcccttgggccnaaaggggggaaaaaatttttccnnaattaaattccaaaaaaggcccttttaaattccnggaaanttaacccccccgggtgccngnaacccccctttcccggnaaagggggggggggggggggggggcccnccccccgggggggtttaacccccccccaaaaaggccctttttttttttgggttttttcccccccctttttttttaaaagntttggggaaaggggggggggtttttnaaaaaattttnggggcccgggcccgggccctttttgggggggcccgggtttaaaaaatttnccnaatttggggggggtnncccaaatttaaaagggncccttgggggtnnttttnccccctttgggggtgggggttgggggaaaaaaaaaaaatttnttgggggtntttaaaattttcnccccgggncntttccaaaaccnaaaaaattntttnnnnncccaaacccaaacccaaaaacccaaatttaaacccnnaaaannnccccccngg

SEQ ID NO: 5226 - DNA, 763 bp, Homo sapiens
  misc_feature 27, 88, 111, 113, 131, 133, 138, 143, 155, 161, 163, 171,174, 181, 189, 225, 246, 253, 278, 280, 284, 301, 310, 326,334, 335, 339, 358, 381, 387, 391, 392, 410, 417, 425, 426,428, 431, 456, 458, 468, 472, 473, 487, 489, 497, 504: n = A,T,C or G
  misc_feature 527, 546, 572, 586, 594, 602, 609, 626, 637, 658, 667, 695,700, 706, 723, 733, 735: n = A,T,C or G
gccggccgtggtggtgaaagctgtaancctcgctcaagtggaagggaatctttcatggaaggggtaagttccgggttcaagggtttcncccgggtctcaagtctcaagggntnctcaagtaaccgtcaagngnatggngtcgnttgggggggggnaagggngnccgttaantcncccttcngtttaagnattggggggtccaacccggttggttgggggggtggnaaccccccccccgtttctttntccaagntaaggtttccccatttggaacccanantttnccccaaagttttggggnttggcccgncccccccaaaataaanggggcccnntttnatttgggggggggggtaanccaaaggttccaacccggggggncccttngggnnaatttggggccccaaccnggttaancccctttnngnggncccccgggctttctttaagaaaaancnttaaggtttngggnnaattcccccccccncngggggggnccttggnccaaaagggggaaaatttttccngaaattaattccaaaaagnccctttttaaatttccggaaatttancccccgggtttctngtaaaccnccttttcnttaaagnggggggggggggggggncccccccccgnggtttaatcccccccaaaaanccttttttnttttggttttttcccccccctttttttnaaatntttggnaaagggggggttttttnaaaatttttngntcccggccccggccctttttgggggccc

SEQ ID NO: 5227 - DNA, 842 bp, Homo sapiens
  misc_feature 32, 33, 67, 81, 83, 87, 93, 119, 136, 168, 192, 215, 221,245, 250, 252, 261, 268, 273, 279, 304, 335, 360, 376, 386,392, 457, 463, 468, 469, 471, 483, 488, 495, 500, 502, 513,524, 540, 570, 572, 583, 608, 618, 656, 666, 674, 684: n = A,T,C or G
  misc_feature 685, 706, 724, 737, 745, 747, 777, 795, 799, 808, 817, 820,823, 831, 839: n = A,T,C or G
aggtactttttttttttttttttttttttttnnggcactttttatttttgggccacttatttttggnaaaaggtgcttggnanaacntttttnaaaaaccaagagattttctttggggnacctgggggtgggggtntgcaattaattcccaattcaaaggccttgcgntttgcaaaaccttttttaagtcanccccttgggttgcttccggtgcncccccnaagggtgggggcctttttttttcnccaangnaaaaccttnaaccttngggcncctttncaaccccccaatttgggaaaaaagncccttcccccaattgggaaagggcccttttnttttccccccccaaaattttttccnaaaaaaaacccttttngggggggccntttttnttttccaaaggcccaatttttttttttaaacctttttttttgcttaaaaaccccggaaaaaagtnaacccntttcnnantttggggggaanggaanggggggnaattnanaaaaaatttangggaaattttngggggccaaaaaaggncccccttttttttttcccttaaattggggntnccctttttttnttcccccaaaaaattggggcctttnggtttccttngggggggaaaaatttcccaaaaaattttttttaaattnttggggaaanccccccancccttttttnntttttttttccaaaaaagggntttcccaaattttttttnggggtttcccttnggggcccnancccccctttctttttccggggggggggttncccaaatttggggaaatntttntttcccccnaaattcccnaanttncctttttncctttttnccc

SEQ ID NO: 5228 - DNA, 854 bp, Homo sapiens
  misc_feature 73, 79, 89, 115, 126, 128, 138, 168, 173, 181, 188, 198,210, 214, 216, 236, 240, 254, 274, 302, 321, 323, 342, 358,382, 413, 452, 460, 463, 540, 558, 577, 603, 655, 691, 692,695, 699, 729, 744, 752, 756, 773, 774, 782, 796, 840: n = A,T,C or G
  misc_feature 846: n = A,T,C or G
ctatagggcgaattggagctccccgcggtggcggccgaggtactgatcgtcttgttatcactccattaacagnataggnatggcttatnattcacggttttagggcttcaagggnctctttggggngnccaatggtanaaccattgggggggaaggggtgggctttcncccgnctaagggnactcctnggcctggggnccaacctggggnccananagaccaagtaaataccccanccanaaaaagggaaccanttggggggtaaaagggggtnggttttttggggggggaaaaaaaaattnaattggttgggggttccgntnggttttcccaaaaattttngggcccttcccaaagnaatttccaaaaaaatttggggggnatttttttcccaaagaaaaggggccccttangggggaaaaggggaaatttttttccaaaaaaggccaaangggaaaanaanaagggaaaaaaagggaaaaaaaagggaaaaaaccccaagggttttgccaatttttttttttttttccttgggaaatngggggttgggaaattttnggttgggtttttgggaaantttttttaaaaaaaattccccccaanggaaaaaaatttttttggggggaaaaaattccttttttccctttttaaaaancccggaaattgggaaaaaacccccccccttgggggnnaanttanatttgggccccttgggggggggggcccggncccccccaagggggngaaaaaancccnttaaacccccccaaggnnaaaaaaanaaaaaacccccccntttaaaaaaaaaaaaaaaattttccccccaaagggttttttttnaaaggnaaaaaacc

SEQ ID NO: 5229 - DNA, 958 bp, Homo sapiens
  misc_feature 78, 81, 109, 127, 131, 146, 150, 164, 172, 176, 183, 187,207, 219, 226, 237, 239, 251, 259, 261, 270, 282, 292, 294,312, 313, 315, 334, 348, 349, 357, 365, 382, 387, 399, 407,415, 420, 440, 464, 481, 494, 500, 524, 527, 548, 562: n = A,T,C or G
  misc_feature 566, 579, 586, 611, 617, 643, 655, 659, 744, 763, 766, 777,784, 787, 788, 825, 826, 840, 850, 865, 880, 881, 907, 916,938: n = A,T,C or G
tagggcgaattggagctccccgcggtggcggccgaggtaccaggctgtttgtggatcgtatcaagccgctatggtggnaanaccaggcctttttactctgtatggtagntttttggggtccaagtcnttcnacctccctttggggnaagnctccaggggggggnccccttgnccanatggggncttncccaaggggaaaccaagtcntggttggtaaanggggaangaaaaggaatngnaaggggaaaagnaaaaaaantngggggaagnccaaattccaangggggaaaangngaaaaagggggcccaaannangggaaaggcccaaaggccntttttttccaaagnnaaaaaaancccaaggnaaaaaagggggcccaangtttngggggggggggnaaaaaggnaatttggnaaagncccccaagggggaaaaaaanttgggaaccccccccccaagggtngggaagggaacccccancccccccaaaaanaaaaanggaaaaaagggaaaatttcccaanaanaaggggggggcccccaaaggntcccccccctttgngccncccccaaaaaaanaaaaaanaaggggggggccctttttttttttntttaancccccttttttcccaaagggtttccntttttggggttngggnaaaaaaccctttcccccctttaaatttgggggggaaaaaaacccaaagggccctttggggaaacccaaattttaaaaaaaaattnttttcccaaaccctttttnggnccccaaagggnccctttnggnnaaatttggggggggaaaaaaaaaaaaaaccccttttnnaccctttttttaanaaaaaacccntttcccaaaaaaccntttccttttcccggnnaaatttcccctttaaacccaaacccnttggggggngccccccaattttggggggggnaaatttttgggggggggggg

SEQ ID NO: 5230 - DNA, 584 bp, Homo sapiens
  misc_feature 97, 113, 124, 138, 139, 140, 197, 215, 224, 228, 247, 250,251, 265, 280, 302, 308, 315, 346, 356, 366, 374, 375, 383,387, 388, 397, 402, 442, 443, 448, 456, 464, 468, 470, 471,484, 498, 506, 519, 524, 525, 527, 533, 542, 551, 560: n = A,T,C or G
  misc_feature 572, 583: n = A,T,C or G
ctatagggcgaattggagctccccgcggtggcggccgcccgggcaggtactttttttttttttttttttttttttgcccatgtttattttccttttnccaagaaaaaaaggtntgtttttcaanaattaaggccattnnnctttttaaaggtccaccccattaaaagtaaggggcaaatatcttctataccccaacnccccctttacaatttttnaaatttttnaagnggttccgggtttggtttgnccnnttcccccggccaanaaaacccgggttttnacccttttctcccccccaaagncctttngggtgcnttccaaattgggaaaaaaatttctttttttnggaaaaaaanatccccttgngccccaanngcctttgnaaannctttttttnggaangggaattaaaaaaattttccttcaaaaccttatttaaaannaaccncaattttnttttcttngggntnnccttttaaccaangggggggggggggnagcccaanttttttccggttncctanntncccatnttttttttngaaaggggntttcttggnccccaactttancctttaaaaana

SEQ ID NO: 5231 - DNA, 753 bp, Homo sapiens
  misc_feature 86, 94, 104, 118, 123, 129, 155, 157, 202, 208, 263, 272,276, 295, 321, 359, 385, 410, 440, 468, 484, 501, 506, 540,542, 573, 584, 591, 610, 618, 633, 665, 666, 669, 698, 717,728, 730, 746: n = A,T,C or G
agggcgaattggagctccccgcggtggcggccgaggtaccgcgggtgaagtggtcccgcggggcccgaaagccgtttaactttggnaaaaaaanaaattaaagnaaggtggtgtcaanaaagnccaagngtctccccggaagtctccgtctcctngngtattaaccccggcaaggccttaggggaaaattaaaattgggganaattanggggaaccccggccgggtttttcttatttttttggttttggggttttttttccgngtaaaaccntggnaagggggccccaaattggnaattttaaaaaaggaaaggggggggncccggggcccccggcctttccttaaagaaaaacccttnaaggttggggggaaattccccccccncccgggggggccttggccaaggggnaaattttccggaattattccaaaaaggccntttaattccggaattaacccccgttccngtaacccctttccggnaaggggggggggggggngggcnccccgggggttaacccccccaaaggccttttttntngggtttttccccccttttttttaagtttggnaaagggggggnttttaanaatttttggcccggcccgncccttttngggggcccggttaanaatttccaaattggggggttccaatttaaagnnccnttggtttttttttccccctttgggttggnttgggaaaaaaaaattttngggtttttaantncccccgggcttttccnaacccaa

SEQ ID NO: 5232 - DNA, 813 bp, Homo sapiens
  misc_feature 44, 54, 70, 85, 92, 106, 108, 120, 127, 138, 146, 162, 177,179, 183, 185, 197, 205, 211, 214, 227, 241, 253, 267, 291,300, 303, 305, 332, 344, 349, 350, 370, 376, 391, 397, 440,460, 477, 483, 495, 509, 512, 526, 529, 556, 567, 569: n = A,T,C or G
  misc_feature 572, 585, 590, 592, 595, 604, 645, 650, 661, 667, 681, 691,705, 711, 721, 724, 729, 744, 747, 768, 803: n = A,T,C or G
aggtacttcgggaaagtggctcatggcctccaccaagctacctngccttcccanaaggtgggacaagganataatgggttgcaanatctcanggggggccaagtangnctccttttcggnctccacnggggtgcccgnctcctggnctccaattttcttggnccggggcgcaacaananaaananccaattcttggncttccgcnttaagnccncaaccaaaatttngccaaggaaaaagnaattccccccgnccggggtttttggnttttggggtttggggggggttggncccccggcnccngnaacccggggggggtttaaccccccttngggcccccccgnggggnncccgggggccccggctttcnttaagnaaaaccttaagggtngggggnaaattccccccccccgggggggccttggccaaagggggaaaantttttcccggaaattaattnccaaaaaaggccctttnaaattnccgggaatttancccccgggtttccnggnaaaccccctttccnggnaaagggggggggggggggggggggccncccccgggggntntancccccccaaaagnccttntnttnttggggttnttccccccctttttttaaagtttgggaaagggggggggttnttaanaaatttttggncccggncccgggcccttttnggggggcccnggtttaaaaatttnccaaanttgggggggnttnccaantttaaagggcccttnggnttttttttcccccttgggttngggttggggaaaaaaaattttgggtttttaaattnccccccgggc

SEQ ID NO: 5233 - DNA, 886 bp, Homo sapiens
  misc_feature 38, 63, 70, 85, 98, 114, 118, 133, 141, 147, 154, 158, 160,178, 182, 184, 188, 194, 212, 225, 254, 257, 272, 273, 291,313, 319, 329, 331, 336, 343, 348, 379, 428, 441, 446, 451,466, 489, 532, 548, 581, 584, 592, 602, 612, 627, 629: n = A,T,C or G
  misc_feature 646, 654, 665, 671, 673, 704, 719, 726, 732, 808, 830, 843,849, 873: n = A,T,C or G
aggtacccctccaagccggacaacccgggccgaagggnaccgcaccatgcggggtaggggacnatggggncgcaggtatgacttnatctgcggggtcnggcttggcgggacaancttnacaattgcaaaaccncctcaatncaaccncaagggnccangngaaggattattggggganaaananccgnaatgcncaaaggcgcccaaggagnaaccaaccttggnaatttttttcaaaggaaccccttcctttnggnaattggaagggaagnnaaaaaagggccacccaanggaaaaaaaaaattgggttttncccccnaagggaaaancnttccnggggccnttttngggaaaaaggaaaccccccttggccaaaatnggttgggggttgggaaatggggggggaaaaaaattgggaagggaaaccnttttgggcccttnccttnccttngggggcccccctttnttttgcccctttaaatttttttnttgccaaagggcccccccaatttaaattttttttgccaaattncccggggttggggttnaaaaaaaaaaaacccgggaaaggggaaaaattnccnccaaaccncccccaaatngcctcccttnaaccccccaaaaaantnggggcccaaatttgggnccaaaggnccgcccaaccnttgggntngggcccctttgggaaaaaaatttttcccttngggcccaaaaaattnggggttntttttnttccccccctttttttttggggttgcccaaattcccaaattttgggggtaaattaatttaaattggggttgggttngggttttttttaaaaaaatttnaaaaaaagggttnaatttncaaatttgggcccaattttttccnaaaaaaaaaaaaa

SEQ ID NO: 5234 - DNA, 429 bp, Homo sapiens
  misc_feature 86, 105, 109, 121, 122, 144, 150, 153, 164, 185, 195, 200,202, 218, 231, 233, 243, 251, 262, 273, 275, 288, 298, 299,301, 321, 366, 407, 410, 418: n = A,T,C or G
tagggcgaattggagctccccgcggtggcggccgcccgggcaggtaccaactggaagcaagcacaatattctgggccatctgtttngggtaagtatacgtatggnatangtaagggggtcnnttctaaatctctctctttgggnttttanagnaattcctgggnaaacccctggggtaagtaaanggaagtaagnaatgngnttggggccacacttcnccaccttccttgncnaaccttccgnaaaattcntttttcacccnttggccttaantnttccccaaggggnaaaaccaagnnanggcctccaaaaccttgggtnttgggttaattcccttttgggttttttggggaaccttggtttgcnccaattgggaaaaaaaaaaattctttccaaaccttttttantangggctccnatttggggggt

SEQ ID NO: 5235 - DNA, 832 bp, Homo sapiens
  misc_feature 92, 95, 110, 117, 129, 136, 138, 143, 145, 150, 152, 157,182, 202, 219, 221, 232, 234, 238, 240, 242, 250, 263, 283,342, 364, 372, 377, 396, 400, 425, 466, 496, 540, 552, 557,562, 572, 589, 601, 610, 624, 639, 641, 668, 680, 688: n = A,T,C or G
  misc_feature 694, 700, 714, 719, 746, 752, 788, 790, 796, 817: n = A,T,C or G
ctatagggccgaattggagctccccgcggtggcggccgaggtaccgccgggtcaattcattttcagaagcactttaaagttctgggataatnttncttcgtatgggtggnccacctnggtggtattggnctcctgngnaaaancnctttncncttcntggggaaaaggtgggcctgggaatntttttaatggggaacctggnaaggggacctgggggtngnacctgggggtncntggntngnaattacgnaaaaagtccaaanaattttccccaaaaattttnccccaaaaaaaatgggttaaaaatttttaaagggaacccaaaaaaaaaaaaattccaanttttttttttttttttaaaggnaaaaaatngggtngggttttttttttttaaantttngggttaaaaaaaaaaggttaattcnttttttttttcaaaggcctttttccccttgggtttttcctnaatttggggggccttttttttttttttcancggaatttaacccaaaaacccaattttttttttgggttcccttnaatttggggggntgggnaaaanccctgggccnttgggttaaaaaaattngggaaacccggncccaaaggnaaggggaaaaaaanttgggcccccctttnanaaaaaaaaaagggggggaaccaaaggngggtttgggggntttttttngggaancccttnccaaatgggggggnaattngggaaattgggaaatttggggaaattngggttnccaaacccttggggttggggccccccaaaccctttntngggggngaacccaaggggggggggggncccgggttttttttt

SEQ ID NO: 5236 - DNA, 702 bp, Homo sapiens
  misc_feature 42, 46, 47, 73, 77, 79, 90, 112, 116, 132, 149, 164, 192,200, 212, 218, 230, 238, 253, 257, 258, 264, 299, 302, 310,314, 318, 346, 366, 371, 373, 383, 384, 389, 395, 396, 404,415, 416, 427, 442, 443, 446, 458, 477, 488, 490, 497: n = A,T,C or G
  misc_feature 510, 518, 524, 540, 547, 550, 558, 568, 584, 586, 614, 647,681, 685, 696: n = A,T,C or G
aggtactttttttttttttttttttttttttttaaggcaccntaanntaaccgttccttcgggggggtggggnaagncnattgggggggnaccccctgttaattttcggttntaanaagaaaccaatttcanggggcttccaagtattnttgtaaacttttttncaaggccaaagaaagtccgtccttttgnctccgggnggtaagtccaanataggngggggaacccangggaaaanaaaaggtccctttgngatnnaaattnggaaaacccaaggtttgggccccttggggggcccnagncccaaaantttncaanccaagggcccccggggggggccaaaaanggggggggtttgggcctttnccccngnaaggcccctnntggcnaatttnncccccccngggcccccggnnttttctttaangaaaaacctttaaanngtngggggggaattncccccccccccgggggggncctttgggccnanggggggnaaaaatttttccngtaattantttccnaaaaaggccctttttnaatttcnggnaatttaancccccggttnccggtaaacccccttncnttaaagggggggggggggggggggtccnccccccggggggttaacccccccccaaaggccntttttttttggggtttttcccccccttttttttnaaantttgggaaaangggggg

SEQ ID NO: 5237 - DNA, 769 bp, Homo sapiens
  misc_feature 61, 69, 91, 98, 100, 102, 104, 106, 108, 122, 124, 128, 146,152, 170, 176, 182, 184, 186, 190, 191, 193, 199, 205, 218,223, 225, 229, 236, 247, 249, 253, 256, 258, 260, 271, 274,278, 281, 299, 306, 319, 340, 345, 354, 355, 358: n = A,T,C or G
  misc_feature 363, 367, 368, 372, 373, 378, 388, 405, 408, 420, 424, 433,439, 465, 469, 470, 474, 476, 485, 495, 508, 510, 514, 519,522, 529, 533, 545, 555, 582, 594, 599, 603, 613, 622, 625,631, 648, 654, 679, 687, 704, 713, 722, 727, 741, 751: n = A,T,C or G
  misc_feature 760, 765: n = A,T,C or G
ccgggcaggtactggggtccagcagtcggagcatgcaactggtaagggggccggtccttcntttcccgnttgtaagggtctccgtctccgngtaccgngngngngncntggtcaggggtatncntagncaccaatggggtccttgnccaacntgtctaagtttaatccanccaagnaaccgnancngggnnanctcccnataagnggtatacccgtgntatgngnaagntttttancctccccaacncncccnccntntngtttaacccgnccngggnggnccccttgggggggcccgnaacccancccaattccaaangggaacccttccccggttttnttctntttaaaatnntanaaaanaaannaaanntattntttttaaagnaaggggcccccaaattnaangaaccttggggnaccngccaagggngggggncttttcaacaaccttttgggtttaanaatnncccncnaagtccaanccttttttgngggggaaaggggncncctnaaatnggnccggggntttnggggtaattccnaacctttttnggttggggggttccaatgggggaaatnttttccctaagnaaccnccanagtccccttngggttttcnaanaaaccnccttgggggtttaaaanaaaaanccccccccccaatttcctttttttnaacccttnaaaaaaaaaaaaatttnaacccaaanaaaaatttnatttnttaaaggggggaanccaaaggggngccgttccnaaaanttgg

SEQ ID NO: 5238 - DNA, 820 bp, Homo sapiens
  misc_feature 76, 89, 96, 124, 132, 136, 147, 158, 182, 188, 205, 222,230, 232, 244, 250, 269, 271, 276, 295, 299, 300, 305, 315,332, 344, 366, 368, 370, 389, 391, 392, 403, 407, 415, 418,420, 430, 432, 442, 444, 456, 461, 473, 480, 481, 486: n = A,T,C or G
  misc_feature 488, 493, 500, 515, 530, 540, 552, 553, 561, 582, 584, 587,601, 603, 605, 608, 610, 621, 622, 637, 638, 646, 661, 666,669, 689, 703, 711, 712, 715, 719, 723, 726, 758, 767, 773,785, 791, 797, 798, 800, 807: n = A,T,C or G
atagggcgaattggagctccccgcggtggcggccgaggtaccgcaagggaaagatgaaaaattatagccaagcatnaaattattagtcnaaggggnacttatactcgccttattactctttgcntgtccatnatantgggaaatttnatatcttaagnataaattatacctttttggtccanaggggnaggaagtctcaatatangtccttataagtacccnctctccgnanataactccaagnatccgngaaggcctttaaccccttnanaaggnaaaacccaagggccttttnaaannaaggnaaagggccancccaacccccccggttncttaaatttggntttaaaggcccaaaataaaaantnanggtttgggggggggaaaangnnaattttttaanttangggtttanggnanggggcccggnanccaatataancnccttaaccccgnaaggnccccttgggggnttggaannttaangnccttnggggttnttgggtttccccaanaagggaatttagggnaaaatttccnttttaaagtgtnntccaaaanctttttttaaaaaaaattttntnggncccccccaacccangngnaananccccccccttnntttaaaaaaaattcnncccccccnttttgggtttaaaanaaatnttntttaaaaaacccttggggtntttaaagggttttncccccaannaanaaanggtnaangggggggaaataaacccaaaggggccttttcnttttttttngggggnaaacccaacccntttaangggggnnanaaaaaanaaaaaaaaacccc

SEQ ID NO: 5239 - DNA, 742 bp, Homo sapiens
  misc_feature 12, 54, 58, 69, 96, 102, 108, 114, 127, 131, 148, 171, 180,193, 211, 220, 232, 266, 291, 304, 315, 322, 347, 368, 394,395, 397, 402, 417, 424, 459, 460, 467, 482, 487, 498, 505,514, 540, 541, 547, 559, 560, 578, 591, 595, 604, 609: n = A,T,C or G
  misc_feature 618, 621, 664, 683, 688, 741: n = A,T,C or G
accaccgtcgcnaagtctcaagtaccaagtctcttctcccgtaaataaaagggnccanggttaaacctncgttgccccttttttcaaaagtcttanccgggnggttgnccccanaagggtattatgnttgnccccggcccccttttcnaaggggggttccttcttaaaagnccttggttnaaggggggggggncctttgtttggggcccanggggggtcnccaacccccccnccaattgggggaaagggggccttcctttttgggntttaaaggggggggggggggaaagncccccccgggggntctttgggganccccgcnccaagggggggggaaaagggaaaanaccccccgtttttgggttccnggggggggggggcccggcccggaacnntnggccnttcccctttcccctnggttagnggaacccttcccccttaaaaaaaaaattccaaccnnccggggnaaagttttcccccgnggtcntttggtaaggngggaaangggggaagnggggggtaatttggtttccggggggnncctttncccccccccaanntaaaaattttgggggggnaagttttcccccntggncccaaaaancccgngcccaaagnttnggggggggggccccccccttttttccctttttccttggggttnaacccccttttgggggtcncccgncctttcttttaaagtaaaaaccttaaaggtttgggggggaatttccccccccnc

SEQ ID NO: 5240 - DNA, 935 bp, Homo sapiens
  misc_feature 54, 85, 114, 122, 125, 132, 152, 179, 187, 208, 225, 231,251, 286, 297, 307, 315, 331, 363, 379, 395, 422, 437, 440,449, 482, 494, 499, 536, 552, 556, 585, 607, 608, 610, 623,626, 643, 647, 695, 724, 727, 749, 755, 771, 775, 791: n = A,T,C or G
  misc_feature 803, 805, 806, 812, 816, 841, 877, 879, 900, 918, 928: n = A,T,C or G
tagggggcgaattggaagctccaccgcggtgggccggccgcccgggcaggtacnccggggaaaaagggagaagtacatggggtanaaggggggtaagtaccaggtctcaagggntgggggcnacnctgggcnaaggcggggccttggcctcnctttctggggggggccccaaccctttngggtttanggttgggttccccccaagtcnccttaccccttctttcncaccanaaggggggggaatttttttngcccttgtaattggggggggttttcctttttaaangaaaggccccntttttaaagncccaaagnccccccctttgggggnaaattggggggtttgggggggccccccaaagnaaaaaaaatttaaaanaaaagggggggggaanccccccaaagtcccccccccttttttncaaatttgggggggnttnggggggttnggaaccccgtttgggggttaaaaggtttccaanccttttgggttnaaaanggggggggggaaaaacccaaagaaaaaaaaacccaanttttttttttttgggntttncccttttaaattgggggggggggggttgnaaaggggaaaaatttattttanntnaacccaagggttnggnccccccctttttggggngttnggcccgtaaagggggggggaaaaagggcccaaaaatttttgggtaaanaaaaaaaaaggggggaaaaacctttttgnccnccccccttggtaaaggcccaancctttncccccttgggggtttngggncccaaaaggggggttntcctttcccccnanncccccnttgngcccaaacccaaattttttgggggnggttttggggggggggggcccttccccctttggggngngggaaaggggggggggtaaangaaacccctttccaaaangccccccctnttttccc

SEQ ID NO: 5241 - DNA, 747 bp, Homo sapiens
  misc_feature 35, 92, 104, 115, 118, 125, 127, 134, 138, 150, 155, 163,169, 173, 178, 189, 194, 196, 200, 211, 254, 277, 321, 328,330, 354, 376, 388, 397, 399, 410, 424, 434, 445, 446, 452,459, 464, 465, 477, 481, 491, 496, 520, 529, 531, 537: n = A,T,C or G
  misc_feature 546, 562, 569, 582, 585, 587, 606, 619, 622, 643, 656, 679,695, 707, 715, 742: n = A,T,C or G
aggtacgcggggtcctctggccgctcgctgcgtgngtagtaagtaagggcccgtagtatgggctaggtatggatgtaatttggctccatagngtccttcaaagnggttcgtcttncgngtctctngngttgggnccgnaccaccgtaatnctttntggggggnataggnaatncaatnctccggctatnggggnanaaantatccccaagncccccaaaaaaaattcaaatttttttttttgggaagggggaanttgggaacccccgggggtttggnccccctttttgggccttttttttcccccaatttgggaaaccaanttttttntncccccccctttcaaaaaagggccnaacccccaaaacccaaaccaanttttttctcttnggggtgggnantaaccccccanaagggaaaaaaccnattaatttantttcccccaannaatttnttccttngggtnnggggccaatggnaaanggaaattggnaaatnggaattgggaaaaaaaaggttccnttttccttntngggggnacccaaccnttttaaaaaatttggnaaatttnggtttttgggggnccnanaagggaaaaaaaaattggnctcggcccttggnccnttgggaattcccttggggggnggcccccctcggntaaaaaattaaaaaaaggggggngggttttttaattttnccgggaaaaaanttgggggngttggggggtttgggaaaaatttgggnaaaaa

SEQ ID NO: 5242 - DNA, 821 bp, Homo sapiens
  misc_feature 43, 62, 68, 69, 78, 82, 84, 96, 114, 146, 148, 163, 180,204, 228, 235, 258, 262, 266, 303, 312, 316, 321, 323, 339,341, 346, 360, 365, 366, 371, 382, 383, 399, 439, 443, 449,457, 462, 470, 471, 472, 488, 497, 522, 529, 537, 545: n = A,T,C or G
  misc_feature 560, 568, 590, 627, 629, 633, 637, 645, 665, 670, 679, 690,703, 726, 738, 762, 773, 775, 791, 796, 801: n = A,T,C or G
ccgggcaggtacttttttttttttttttttttttttggatgtncattttgggtggttatagngggtcnnccatatacntggncntggtccgtatanccagataagttggggttngtaattagtccgtccccttaaagtccatttangntgggttttagtaagntttttggggtattttangttgggggggccttaatttttttnccttggccttaagggggggggggnttggggntaaaaagtcccccgggaatttgntaantttnaaaaattaaaaaggaaattttccccctgggccttaanccaaaaccnttantttanantttgggcccctttttngnaaaantttggggggaaaanttaannggggncctttggaaannaaaccttggggggggnttggggggggggggcccctttttccttaaattgggggccnttgngaaagngggggggntaaanttttcaannngggggggggtttgggnggggaaaanaaccccccttaaaaattttgggggnggccccnttgggaanattttttngggccccccttgggnccttgggncctttgggcctttaaggggggnaaggggggaaaggggggccccctttaaaatttaatantnttgngggnggggcttnggaaaggggggccccttttnggggnaaatttttnaaaccccccgnttttttttaaaanaaaaaaggggggggggcccttanattttttttggntttttgggtttgggggggggtttnccttccaattngnaaaaatttttgggggnaaaantttgngtttaaggggggaaaattaa

SEQ ID NO: 5243 - DNA, 850 bp, Homo sapiens
  misc_feature 23, 59, 66, 82, 84, 91, 93, 97, 99, 101, 108, 110, 116, 118,126, 134, 153, 161, 163, 165, 169, 175, 179, 181, 183, 191,202, 208, 216, 241, 245, 257, 258, 279, 299, 362, 376, 387,435, 452, 458, 474, 478, 481, 527, 566, 579, 608: n = A,T,C or G
  misc_feature 626, 674, 677, 691, 697, 700, 705, 709, 718, 719, 721, 725,760, 761, 764, 766, 792, 826: n = A,T,C or G
aggtacgcgggctcctacttggnataactggtgggtatattcttaggagcttatatacnatggtcncggaccgggggtccgncntggtacncnctcncntnttcggcngngtgggngngtgtaatngtccgctngtccaattttttattcaangatgccanananaacnccatanctcncngnggttcaangcaccctcttnctttcnccggggcnccccccgggggctccggcattcctnaagnaaaaaccttaannttggggggaatttcccccccnccggggggggcccttggccnaagggggaaaaatttttccccggaaatttaatttccaaaaaaggccctttttaaattgccggnaattacccccggtnccggaaccccnttctggaaggggggggggggggggcccccccgggggtttaaccccccnaaaggcccttttttttngggttntttccccccttttttnaagnttngggaaagggggggggttttttaaaaaattttggggcccggccccgncctttttgggggggcccgggtttaaaaattccaaaattngggggggttcccnaatttaaaaggccctttggggtttttttnccccccttggggttgggnttgggggaaaaaaaaaatttttgggttttttaaatttccccccggccnttnccaaacccaaaaantttttntcnccaancccnaaacccaannancccnaaatttaaacccgggaaaaagtcccccccgggggnnggngnaaggggcccaaattaaaaaaaaaaangggttggggggttgaaaaaaaagggccccctttnggggggggggggggttggggcccc

SEQ ID NO: 5244 - DNA, 536 bp, Homo sapiens
  misc_feature 65, 78, 82, 108, 119, 138, 142, 144, 148, 163, 165, 178,198, 206, 234, 236, 241, 249, 257, 269, 274, 292, 302, 322,329, 331, 338, 342, 347, 365, 381, 388, 392, 401, 407, 417,437, 438, 445, 462, 473, 477, 483, 505, 518: n = A,T,C or G
ccgggcaggtacgcggggctccaaacttcaccacctggcccgtggggtaccactcttggttgttncaagtctaatggntggngggtactcctgggggttttcttcttnctccattccgnctcctttggttcttgggtngggngnggtngtccacctggtgtananttatgtctcaagnggttctttgggtcctggggnggttccgngtccatccaaaaactccttggttttttngnaaggnccccttgngaaaaggnaccaacccaagnggccnccaaggtaagggggggtncccccccctngggttccaaaggtcccaacncaaaggncnttttttncccnaaacnaaacccccccgggtttcnttaaccaaaaaattanttggaanaccncctttttcnttgggnaaaaggcccnaattctaaaaaaaaagggcnnccttttnaaagggaaacccccaangggaaatttgngaanaaaggnaaaccctttctccaaagggccncccaaatttgggnaacccccctttcaaaatt

SEQ ID NO: 5245 - DNA, 696 bp, Homo sapiens
  misc_feature 37, 50, 54, 56, 89, 92, 112, 140, 148, 154, 177, 182, 203,207, 219, 221, 227, 239, 240, 242, 284, 296, 318, 322, 334,343, 350, 351, 354, 369, 406, 426, 431, 432, 438, 440, 443,460, 462, 467, 492, 502, 503, 506, 516, 519, 553, 558: n = A,T,C or G
  misc_feature 585, 588, 592, 594, 611, 614, 616, 655, 661, 665, 678, 681,682, 683, 685, 689: n = A,T,C or G
aggccgaggtaccttgctgactcagctacatacatanagggcctcaaagncctntngtcttagcgcaggtttcttttaaataagggganacntgggtgggtgttcttctttnttttcaacctttttttgcactggggtcntttattgngggggnccaggtatgtaaggggggttttncccgnactccttccatagaatgggcnccanacttaaccccangngggttnaaggggggttanngnaaaagggggaacccctttttaaggggccctttccaaaaaccnttgggccttggnggccttttcccctttcgggttnaaantttaaaacccanccaaacccnaaccttnnggntgaatttttcttggntcggggtttgggggggttggcccccaacctttccttnggctttcttggccccttggngtggnncccaantnggnttcaaaccccttttttntnccttnaaaatttgccccaaaggccaaccanattccccttnnggncccccccaanaangggaaaaaaaaacccccctttaaatttttttttnggggnggggggttttccaaatttttcaaattnttncttnanctttgccctcttaaatntcntncccttgcttacctttttaaatctttccgggttttccttnggaaantggnttttttttttccnaannntntttngggggga

SEQ ID NO: 5246 - DNA, 786 bp, Homo sapiens
  misc_feature 80, 93, 98, 110, 116, 118, 122, 131, 136, 154, 159, 161,167, 182, 194, 198, 204, 228, 234, 236, 250, 254, 271, 287,310, 332, 335, 350, 353, 354, 363, 380, 383, 389, 396, 411,431, 444, 453, 457, 460, 468, 475, 494, 503, 511, 540: n = A,T,C or G
  misc_feature 543, 549, 573, 577, 596, 604, 607, 635, 639, 642, 658, 670,676, 680, 692, 694, 761, 765, 774, 775, 782: n = A,T,C or G
ccgcggtggcggccgaggtacttttttttttttttttttttttttcgtcacttactcttccctggggttcgggtgtaagntgtgtgtttatanttttntggtccgtccgncccctngncatngtctctttnctctntgggggaataggtggggntatgncnccggtntttccttccaagggnccttcccccttnttcncggggnaaaattcgataaaacccctcttgngatttncncccccccgtttacnaccnccccgggggggggttcnaaccccaattgggggnttaagggggcccacccggggggngggaacctttaaccccaatttncgnaaaaaaagggtttgnaannaaggggggnccaaaaacccgtttttncanaaaatnggggggnttcggttctttcccngctccaacccccctcgggcngattaaccccttnggccccccngggnggncgggggcncccgccntttccttaaaaaaaaaccnttaaggggngggggaanttccccccccccccggggggggcccttgnccnaagggnggaaaaattttcccggaaatttanttcnaaaaaggcccttttaaatncgggaaantanccccccgggtttcggaaacccccttttnctanaangggggggggggggggngggccccccccngggggntaanccccccccaaangncctttttttttttggttttttccccccccttttttttaaaatttggaaaagggggggggtttttaanaatntttggggcnngcccggncctt

SEQ ID NO: 5247 - DNA, 528 bp, Homo sapiens
  misc_feature 90, 94, 110, 128, 139, 158, 192, 196, 223, 233, 245, 249,254, 256, 279, 297, 306, 342, 361, 371, 376, 416, 422, 427,433, 440, 452, 458, 461, 465, 493, 499, 501, 504, 508, 514: n = A,T,C or G
ttgggcaattggagctccccgcggtggcggccgtggtggtgaagctgtagccgcgctcggtgaggatcttcatgaggtagtcagtcaggntccncggttcagtctcaggntccagacgtcaggtatgngtcattggggngaggggcatactccctcgntagtatggggcaccagttggtgggggtgtacccnccgnttcacccgggtagtttcccaattccancggaatggcnccaagttggggnttanccccntngccccccggggtccgggccccgnattggtttaacctccctncgttcccgntttttcggccccctttccaaggggcaattaccaacnccgggaaattggctcaagnccctttgggnccaanattggggccaggctccgtcccggcaatggggttcccctgnggggtnggtanggaaangtaattnggtttgtccaantccttnggnaccncaacctttggttaaccccttttaattcnaactcncnaantggntttggnaaccgtaagggggg

SEQ ID NO: 5248 - DNA, 932 bp, Homo sapiens
  misc_feature 71, 85, 90, 95, 99, 114, 125, 152, 154, 190, 234, 236, 240,242, 244, 266, 268, 273, 304, 325, 335, 369, 374, 382, 398,434, 483, 485, 495, 509, 511, 524, 527, 532, 542, 565, 574,597, 610, 617, 631, 645, 669, 695, 707, 710, 751, 776: n = A,T,C or G
  misc_feature 794, 802, 819, 868, 913, 916, 919: n = A,T,C or G
agggcgaattggagctccccgcggtggcggccgcccgggcaggtacaagcaaggcaggctacttccatggnatacagtggggggnaaggnattanatanaaggggctttcaatntgcaaggtgcncaaggcgccggtgggacccttggtgananatgcgcaaggcctttggctccctgctccgtccaacnccccaaacttgggggaaaaaaaaaaaaaaaattcccaaaaaaancncttntntnttgcccaccccaaggtgttttntnttttnaaccaattgggttccggccttttttctttcnttaaccccaaagggggaaggnaaattttccnttttttgggcccggtttcaaatttccttaaaggnaaatnggaaaaancccaacccaacccttnggggggacctttttaaattaattaacccaaggcctngggggaaccaattgggaaaaaaagggttaaaaaccccccaaaaattttntnaaaaagggtngggccccctttttntnttgcccctttttngcnaaaancccaaaaatntttttttaaaaaaaccctttttnccaaagggnaaattgggcccttttttaaaaangggggggaaattngggaaanttcccgggaagggncccccaaccccccngggaaattggggtttcccaaaaancccaaaaaaaaaaaaatttaaatttncccccccttttnttnaacccccctttttttttaaaaaaaaaatttaaaaggggttnttttttttttttttccttttttttnaaaaattttttaaaaaangggttttnttttaaaaaaaaagggnaaaaaaaaaaaaaccccccttttaaatttttttaaaaaacccgggaaangggttggggaaatttaaattttttaaaccccccgggggggggggnaanaanaaaggggtttttt

SEQ ID NO: 5249 - DNA, 750 bp, Homo sapiens
  misc_feature 8, 20, 24, 26, 28, 32, 38, 48, 53, 62, 91, 101, 109, 158,180, 185, 192, 205, 223, 231, 234, 277, 285, 322, 328, 364,373, 384, 391, 405, 423, 428, 444, 462, 468, 488, 499, 510,546, 549, 566, 568, 571, 605, 611, 631, 637, 640, 649: n = A,T,C or G
  misc_feature 661, 664, 672, 684, 705, 722, 733, 749: n = A,T,C or G
atgcttcnacaacttggganaaanananattnaccttnataaccatcnaggcntgcatgatnattaaaaaatttaacctttgattcttatnaaaaggaaanccaaaatnttaattaggaaaaggggaaaattccttaaaaaattggggggggggccanaattttttttttaaaacccaanaaaancccccangggggcccaaaanaaaaatttaaattccaanccaaattnaantttaaccccccttgggaaaaaatttaatttaaaaagggggggnttaaaaanccctttccccccaaaaggggccccccaatttgggaanggttcntttaaaaggaattttaaaagggggccaggttttaanccttttttnaattttttttngggaaanccaaaagggggganaaggttgggggggcccanttaanaagggcccaaaacccnttcccaaaggttggggtngggttngggccccccccctttttaanggggggggttnggggggggggnaagggcccctttctttttttttccccaacccaaaanccncccaaaccttttctccncnccnaaccccccccccaaaaaggggggccaaatttccnaatttntttttttgggggggaagggnaaaaanaanaaaaaaaanggggtggggttnccntttttccntttaatttcccnttggggggccctttaaagggncccttggggggtggggnttttaaaattncctttaaagggggggna

SEQ ID NO: 5250 - DNA, 804 bp, Homo sapiens
  misc_feature 56, 66, 94, 98, 102, 109, 123, 128, 131, 137, 154, 160, 187,191, 203, 213, 222, 228, 253, 325, 344, 362, 370, 417, 435,447, 529, 547, 557, 563, 571, 585, 593, 605, 606, 615, 631,636, 645, 651, 666, 674, 684, 687, 690, 702, 722: n = A,T,C or G
  misc_feature 734, 741, 742, 752, 753, 784, 791: n = A,T,C or G
ccgggcaggtacatccctggccttttggcatccaagttctggcatgtaagggtctncttcccaagnaccttcaatgggggggggattgggccgnaaanaacncccaagncttttgggggtccncttcnctncttagnccaattcttgggaaagnccaagncctttcccttcccttccgggtttcaanccgnttccgggtccgngggtaagggnaaggggggnaattanggtaagggggggggggggaagggtnggggcccaagggaaattgggtttttgggaaattggaaaaaaaaaaccccctttttcccccctttttttcccnaaaagggggaaaggttttngggggtttcctttttttnaattgggnccaagaaaaaaccccaaagggccctttggaaggggccttgggggaantttttggttggttcccgnaaattttccttngggggttccttgggggtttttgggtttcttggggggggcccttttgggcctttgggggaaaagcccttccccctttttccgnaaaaggggcccccttggnccaaaggccnaaaggnccaaaggnccttccccctttcnaaaaaaanttccgggcccgnncccccccgnaaaaatttccaaaagnccaanccccccggnaaattncccgggccccctttntccccggnccccctttcnggnccntttttaaaaagncccccccccccaaatttttncccccccaaagncccaaannccttttttcnngggggggttttttcccggccccccaatttgnggggccnccccccttggggg

SEQ ID NO: 5251 - DNA, 391 bp, Homo sapiens
  misc_feature 24, 33, 38, 44, 69, 71, 75, 101, 115, 128, 230, 233, 270,275, 298, 307, 312, 315, 316, 334, 337, 355, 372: n = A,T,C or G
cacattcatcccaagtaagtatgngtcagtagnctttnctgcgncaacatgtatttatcttggacatgngnaagncttgatacaggtatgttctcctcctnttttgagaaggaanatatttttccaanacttggtaaggcaactggaaggaatacttaacttttttaaaggccaatttggaaccaggaaaattccttctttcaattgggggaagaaaagccccacttatngtngcaattttggcttttcccatggggtcctcccctgggnaaaantctaattctttttggtcctttgnccttggttnccccnggnnaaattatggggaaaattnatnaaggccccacttggggangtaagtaaaaaaccccncggctagggttttaatttt

SEQ ID NO: 5252 - DNA, 878 bp, Homo sapiens
  misc_feature 104, 114, 120, 134, 137, 145, 147, 149, 157, 161, 207, 226,234, 257, 278, 297, 304, 336, 339, 367, 372, 387, 388, 412,414, 415, 421, 459, 466, 487, 489, 493, 503, 513, 516, 536,549, 564, 599, 619, 623, 630, 648, 650, 651, 670, 694: n = A,T,C or G
  misc_feature 705, 708, 744, 764, 777, 808, 822, 839, 847, 863, 870: n = A,T,C or G
atcgactcactatagggggccgaattggagctccccgcggtggcggccgaggtacagattattcagttccattgtaatgttcccaaaatgaatgttgtaggatntgatgatatntgtgtncaaggaaaaggggnatntttgtttnananccaattcntggncctaagggggccttaaattttccaattcattgattttagggtgatnaatgggaaaaaatttaatncctttttnttcttccccaaggtgttaatttnttaattaaaattgcctttttnttccttaaaaaaaattaanttttttntaaaaaaaaaattaacccaagggtaaatttanttnttttttccaacccaaaacccaaaaaaanttttnttttaattttttttnncccccccccaacccaaacccaaanannggaaantttttaattccccccaaccctttttctttctttaaggnttaaaanttttttccccaatttccgttngnccanaggggaaaanttgggttaanggnaaaaatttaatttaagggancctttaaaaattnaaaagggcccccttnaaaaaaatttaaggggggaaattccctttaaaaanaaaaaaaaggggggccccanaaanggggttntttaatcccccctttaanannaaaaacccccccctttttnccttttggggtttcctttaaaaanccccccaattnaantttttaaaaaagggggggccccccccaaaaaggggnttttttttaaaccccccttnaagggtaaagggnttccaaacccaaaaaatttttgggttttaanggttttttaaaaancccaaaaagggttgggncccttaanttttttcctccctttnggggggnttttgggg

SEQ ID NO: 5253 - DNA, 854 bp, Homo sapiens
  misc_feature 58, 61, 76, 84, 90, 96, 101, 105, 109, 130, 134, 138, 161,177, 184, 193, 201, 206, 217, 221, 237, 238, 245, 276, 282,299, 315, 324, 339, 349, 354, 365, 382, 394, 401, 412, 417,459, 476, 481, 493, 506, 516, 522, 524, 534, 540, 549: n = A,T,C or G
  misc_feature 552, 562, 563, 566, 574, 580, 581, 591, 606, 617, 618, 624,635, 645, 652, 670, 688, 702, 708, 711, 714, 727, 733, 761,763, 772, 781, 824, 838, 844: n = A,T,C or G
aggtacttcttgcccttgtagaatttcctggaagggttttctttctgagtctggggtntanattatatcctgggtnggaagtanaaccanccgggngggcnatantggngtatttttgcccgggtaccgnaacntgcngggtattctttaagtaagtaagncctttggggtaagggnctccgcnactccggcnccttggtnccacntttttgggggnccgngaaccgtcccggccanntccttgnggggggaaccaaggtcctttctcaacccccnttttcnaaggggttcccggtttncccaaaggcccttggntttttttcnaaaggcccaaggccntttccccttnccccnttttcttttcnttttccccccggccggnaaaaagaaatcntttcggnaaggccccttntgggnattccctttgggggccccaatttttgggccttgggccaaccnaaaagggcccccgggcnccaanaaacccgggccncccggtttccggnccccccccgngctttncncccccccccncccggnccggggttnaanccccctttgnnccnccccccgngggggnntcccgggggntctcccgggcctttncctttaaaggnnaaaaancccttaaaggntttggggggnaaatttnccccccccccccgggggngggccctttgggcccaangggggggaaaaaantttttnccnggnaatttaatttccnaaaaanggcccttttttaaattcccgggaatttnanccccccggnttgcctgtnaacccccttttctttaaagggggggggggggggggggggcccncccccccggggggnttgaanccccccccaa

SEQ ID NO: 5254 - DNA, 860 bp, Homo sapiens
  misc_feature 46, 56, 68, 82, 86, 92, 104, 113, 128, 132, 142, 153, 193,197, 225, 231, 245, 278, 290, 298, 299, 309, 316, 321, 366,375, 376, 377, 386, 422, 427, 463, 496, 501, 529, 532, 567,579, 612, 615, 618, 623, 640, 644, 648, 654, 660, 674: n = A,T,C or G
  misc_feature 676, 713, 716, 724, 735, 740, 781, 797, 809, 831: n = A,T,C or G
ccgggcaggtacttttttttttttttttttttttggaacatggggnaagttcttcnacgtccaattcnatctccaagtgtcntggngtaagntggtcaaagttngggtcgtcncaattcttttggggncttncaacttggcnaaagcccttcncggctcttcgccaatgggttttcaaaaaggtgggaattcncctnccctgggcccctttcaaagtccccttcncttggnaaggttaaaggccnttggggggggaaaccttaaaccaaaggggggcnggcccccccggnctccaacnnccaaaccggnccccccnaaagncctttaaatttttttttttttttttggggtaaaattttttttttnaagggttannnaaaaggaancccggggggggttttttttccggcccccaaattggnttttnaaggccccccggggggaaatggggggttcccttccngaaattcctttccccttggggaacccccttttngggtngggaattcccccaacccccccgggcccnttntggggggggtttcctttcccccccaaaaaaaaggngttgggcccttngggggggggtaaattttaaacccaaaggggggnccnccnttggnaaagggcccccaaaccnttgnggtngggccncccccnaagggccccccccntnaaattgcccccctttcaaaaaaattttttttttttcnttnaaaaaagnggcccaatttnaaaanggggggaaatttttttaaaaaagggaaaaaggtttttttanggtttggggggggggnaaaaaaaaaggncccaattttgggaaccttttanccccggggggttttttttaaaaaaaaaaa

SEQ ID NO: 5255 - DNA, 417 bp, Homo sapiens
  misc_feature 406, 409: n = A,T,C or G
acttagggcgaattggagctccccgcggtggcggccgaggtacttagggtaagcattaacaatattattcaaaatgttatatagagttcaactgtatacaatagagcatttattaaagtgtgtccaaagcgcttataaataaagcatcttcgagacaggcggctcacttgaggttaggaggaaagcagactggccaacatggtgaaaccccgtctctactgaaaatacaaaaaaattagccaggcgtcatggcgcacctgtagtcccagctactggggaggctgagacacgagaaccgcctgaacccgggaggtggaggttgcagtgagccaagattgcaccactgcactccagcctgggtgacagagtgggactctgtctcaaaaaaaaaaaaaaaaaaaaaaangtncctgcccg

SEQ ID NO: 5256 - DNA, 355 bp, Homo sapiens
  misc_feature 5: n = A,T,C or G
gactnctatagggcgaattggagctccccgcggtggcggccggacattggtgaagaagaggtggaggaggttgcctggggtctgggagttgatctgctctttgctcccgcgtacctatttcggtttttgttcttaggaagcttggccactctacatgggaagtcactagcttcatgtcggatatcctggtaaatggccgcccagctcccggacttgtcgatctgctcgaactccttttccatctccatgacgggccagggcggctgctgcgcctccttctcggcccactgcgccgtctgccgctctaggccgcgtcgcgctcttagccccgaggcccgctgcaatccccgtacct

SEQ ID NO: 5257 - DNA, 165 bp, Homo sapiens
  misc_feature 26: n = A,T,C or G
actactatagggcgaattggagctcnccgcggtggcggccgaggtacgcgggggccgccgccgccagattctggaggcgaagaacgcaaagctgagaacatggacgttaatatcgccccactccgcgcctgggacgatttcttcccgggttccgatcgctttgcc

SEQ ID NO: 5258 - DNA, 454 bp, Homo sapiens
  misc_feature 426, 429: n = A,T,C or G
tcactacttagggcgaattggagctccccgcggtggcggccgcccgggcaggtaccctcacatcaatcagtcactgaatgtgtggcattctagaaagggacatgaccttgagcaagggggctgtctacagctgaggcaatccttgaaggggctgacagatgaagattgtctgcagagagccttccctgcagctggagcaaaaagtccttcattgaccgtgaatctggacagctcatctggtgcccagcacaaatatattttactttagagtaaaattctgtgggggaagatggacaatatacaagttcaagaaaaaaaaagagatgacaaaattttgactgtaaagaacagcatgttcatgtattttttaaaattgatgatgttgaatagtaaataaatacagtatttaaatcctttggatcaatncanaaaaaaaaaaaaaaaaaaaaaaggt

SEQ ID NO: 5259 - DNA, 146 bp, Homo sapiens
ttagggcgaattggagctccccgcggtggcggccgaggtacacggcatggtagcctcatgtaaattacgacatggagagagctggtggttttacttctttcttttcatctggtaaaagggccctaacaggctcagtctcattagag

SEQ ID NO: 5260 - DNA, 336 bp, Homo sapiens
  misc_feature 140, 209, 251, 301, 325: n = A,T,C or G
ctacttagggcgaattggagctccccgcggtggcggccgcccgggcaggtacgcgggggggctggggcacgtcaccgccgaatggcagcctccagaaagccaccgcgagtaagggtgaatcaccaggattttcaactganaaatttaagaataattgaacctaacgaggtgacacactcaggagacacaggtgtggaaacagacggcanaatgcctccaaaggtgacttcagagctgcttcggcagctganacaagccatgaggaactctgagtatgtgaccgaaccgatccaggcctacntcatcccatcgggagatgctcatnagagtgagtat

SEQ ID NO: 5261 - DNA, 395 bp, Homo sapiens
  misc_feature 381: n = A,T,C or G
cactacttagggcgaattggagctccccgcggtggcggccgaggtacagtagtgcactcttggctcactgtagcctcgacctccggggctcaagtgatcctcctgccttagccccacaagtagtgggactataggcacacaccaccatgcccatctaagtttttgtattttatgtagagacaaggtttcaccatgttgcccaggctgatcttgacctcctgagctcaagtgatctgcccacctcggactcccaaaatgctgggattataggcgtaaaccaccatgcctggccttaaatcaactttagagtcaacatctcttatcactggagcttctggagaaactccatcaccgtggtgctctctttcctgatgttgttgngcccaaatagcttg

SEQ ID NO: 5262 - DNA, 780 bp, Homo sapiens
  misc_feature 16, 33, 41, 58, 65, 68, 70, 73, 78, 80, 84, 91, 102, 114,146, 150, 154, 183, 219, 232, 235, 247, 249, 255, 279, 295,314, 345, 363, 367, 374, 389, 394, 400, 416, 424, 429, 435,438, 441, 444, 449, 455, 466, 500, 532, 543, 563, 576: n = A,T,C or G
  misc_feature 578, 589, 604, 615, 640, 644, 645, 647, 678, 715, 720, 739,742, 758: n = A,T,C or G
ttcaccaagtaaatcnttcaccaccggggtagnaagtaagnacccccttattggggcntgggtgnatngnagntggtngnaagnaaaaagncctttaccttncttaattattgntccttggcacttttggtttaaaaaccatttanaggnaagnaaattaaccacctccaaatggggggaggnaaaaccggggggggggggggaattttccaagatggnaaaaggggttggnggnaaaaaaaattcncnttttcncacccaaggccaaaagggttccanccaaaggccttttaanaaggttccaccttaagggntgggaaaaacccaatttggttggtccaatgngggggggaaaaaaaaaanaggnccccccntttgggtgttaaaanttaanttgggngggttaaaaacccttnggttgggnggccnaaaaanttnggnggnttggnggaccnatggggggggncccaaaggattgggtttgggaaagggtttttttnggcccccccaaacccaatttccccctttgggnccaaatttttnccaatttgggaaattaaaanaaacccaacgggntntttttgggccnttgggtttttttggnaaatttccaanttaatttaaggtccccccttccccnaagnncnggggggggaaaaaattggggcctttgggaangggttttttttggttttccaattaggtttctcccccnaattnggggggggccccctttttnttnggggcctttccccccnttgggcccacccttaaaaaatt

SEQ ID NO: 5263 - DNA, 428 bp, Homo sapiens
  misc_feature 29, 121, 126, 127, 135, 148, 155, 158, 170, 178, 189, 214,220, 222, 237, 241, 246, 254, 282, 287, 290, 306, 321, 325,329, 331, 334, 338, 340, 360, 363, 364, 365, 366, 375, 378,381, 382, 386, 396, 402, 407, 413, 415: n = A,T,C or G
ccgggcaggtactgtgctgttgggcttanaggctgcagcggctccaggggcaggctgaggagcatgcaaagaagttcccattgggcatctgccctgggggtactttattttttttttatantttanntttttttnaactttaattganaacgggntgntataatttcttnaagaacangttataaaatnttcataccttttttatttgttttanacaaantntctatatattttttncctnttttnaaatacantgtattggggttaaacccaaacaactgngctgncangctttttaaaatacanaattatcgggcgccntttnttancnttntcgntntctaaaataatttttttctnacnnnntttccattncgnaanncgcnttaacctccncccaanaattngattgntntcttttttttttt

SEQ ID NO: 5264 - DNA, 334 bp, Homo sapiens
  misc_feature 263: n = A,T,C or G
ccgggcaggtacacagattggtatacacatatatttccttgctctgtctgctgagagggcctagatgcagcaaacagtgattatatgtagcacctagatcctggtttctaataaccattctccaatagaagcaaccagggctcttggagaagtggtcagttctaggactggagtaggaaatatataaattgagctttgaacatattatagtgccaaaaagtaaaagtgctttaaaaaaccccacaatgaagggggcatgtcanagggacacaggagccagctgaagagctcccagtggcccaagctggaaggaactatttgaacaacaaaaata

SEQ ID NO: 5265 - DNA, 152 bp, Homo sapiens
  misc_feature 1, 47: n = A,T,C or G
nctatagggcgaattggagctccccgcggtggcggccgcccgggcanggtacaaaaaaaacaaagctctctttccttctctggtgatggtttggtaggattcttttgtctctggaagcagtgggactgaagttctcttcgtcctgtgcacac

SEQ ID NO: 5266 - DNA, 149 bp, Homo sapiens
ccgggcaggtacgcggggctttcagcgcctgcaggttccgggaggtcagctcccagccgaggacgtcggatgtcatcgtccttgctgctttgccaccccattcccgtcaataaagtggtttgaacccaaaaaaaaaaaaaaaagtacct

SEQ ID NO: 5267 - DNA, 216 bp, Homo sapiens
  misc_feature 29, 78, 179: n = A,T,C or G
ctgactcagtccactataagctagacggncttcttaaagcaccaacattacttgagtctttggataaaatttgataanaggagtctacaaagttatttgtggactctacaaggaggcaaggaggcttgacaactggcagtaaagacaaagatgtcaggcctgcggcccggcactcaagntggaccctgagattgagctttttgtaaaggctggaag

SEQ ID NO: 5268 - DNA, 403 bp, Homo sapiens
ggcgaattggagctccccgcggtggcggccgcccgggcaggtacgcgggtaaaaatgaaagcaccagctggtaaagttttcaaataaagacataaataaggtttgatatgactcagtgtggtatgttccctctcttcctaggaaactgaaaaacagagtagcagctcagactgccagagatcgaaagaaggctcgaatgagtgagctggaacagcaagtggtagacttagaagaagagaaccaaaaacttttgctagaaaatcagcttttacgagagaaaactcatggccttgtagttgagaaccaggagttaagacagcgcttggggatggatgccctggttgctgaagaggaggctggaagccaaggggaatgaagtgaggccagtggccgggtctgctga

SEQ ID NO: 5269 - DNA, 226 bp, Homo sapiens
tatcactacttagggcgaattggagctccccgcggtggcggccgaggtactcagcctggtcgggtggcatgctcgcggcgcagctcgtccatggtaatgtagttcttgtccccagccaggatcttgaaggaagccatgacttggtctgctgtatctgtgtcggctgtctcgcgggacatgaagtcaaattgaaaggcctggaatgtcactcccgcgtacctgcccg

SEQ ID NO: 5270 - DNA, 207 bp, Homo sapiens
  misc_feature 170, 175, 183, 185: n = A,T,C or G
ctatagggcgaattggagctccccgcggtggcggccgaggtacatgtaaaaaatgtgttagataatgggaggcaggacagagagagagccaggtgagtggggagtcacgctgaggcaggacacagaggcaatcagactagcatgtggcgtttcctatggagggcaagatngtcangaacgggnangaagcttgctggtcacagcccg

SEQ ID NO: 5271 - DNA, 415 bp, Homo sapiens
  misc_feature 118, 176, 182, 201, 205, 211, 222, 231, 249, 254, 257, 262,264, 271, 274, 289, 302, 318, 372, 405: n = A,T,C or G
ccgggcaggtacgcgggtcccctgaggaattcaaccacagacattctcaaggaaacacaagagaaattctatggcctaccatatgttccaaatactgcctggcagctgcgattcaagncacctcgtggggttatgggtgctaggatattactttcttaccctcattgttccagagncggttngccctccaatggttttggnaatngcagtngttttttttancaggtatcnctttttcaaatcagggancatgnccnggtgngnagtcgcntantcttcaaggcgaagnatgtcttggtccncacttgatgctagtgncaggggtagcccccactgactccattggttttgaaagggttatgtcttttcatntaaagttgtcccctattcttggtatggatagancttttcggtt

SEQ ID NO: 5272 - DNA, 261 bp, Homo sapiens
  misc_feature 162: n = A,T,C or G
ccgcggtggcggccgaggtaccaacagccccttccctcccaagttatggtgagcccttgggccagtgtatgggcagaaaagcagatttgtgtccttcagaagggaaatgtaaaaaggtgaaagctctagttgaagggcagtgagaggggcttgagtgggaanagaaggtctctctggcccggtggtctgggttgcaacaagggcactctgagaaggcagaaatggaaaccgcagggctggaggggcatgggtacctgcccg

SEQ ID NO: 5273 - DNA, 409 bp, Homo sapiens
  misc_feature 10, 79, 197, 300: n = A,T,C or G
gtatcgactnctatagggcgaattggagctccccgcggtggcggccgaggtacttttttttttttttttttttttttgncgttctacagtctcaatcgtgtatagactaatgagaaaaaatgaaaatgagtttcattagacagaccacttttgttggactcagtcttgagctgatcaaatgaggcagctgaactganactgaatcttccctgtgattagctcaactcttgaagtagccaggcacaaattagctggatgtagtggtgcgagcctgtagtgccagctacccaggaggctganaggcaggaggattgcttccgctgaggagttcggggctgcagtccccgcgtaccacaaaccatagtaacttacacagggggaaaagttactgaaataaaaatgttttata

SEQ ID NO: 5274 - DNA, 600 bp, Homo sapiens
  misc_feature 5, 58, 100, 102, 114, 120, 121, 126, 154, 156, 168, 188,191, 195, 213, 215, 224, 249, 267, 284, 294, 300, 316, 320,326, 332, 335, 337, 338, 342, 346, 348, 366, 372, 374, 379,381, 385, 392, 395, 397, 400, 416, 425, 438, 439, 453: n = A,T,C or G
  misc_feature 474, 486, 490, 497, 500, 505, 519, 528, 531, 539, 547, 560,569, 588, 600: n = A,T,C or G
tcgcnggtggcggccgcccgggcaggtacgcggggagacaaaggtggctttgctttgntgaagttactgatataaagatcagcgcctgaaacagattctncnggatattacccngagacnngatgngtttttattaattaggcctttccttaangngggacaattttncattttttgaaatttaccanagntccntctttagggccctgtggncnctgagttgnccaatgggcccttgttgaaaattcntccaaggcgagctctttngtgcgtaagcgtccttngtagtggccnccttgnaaaaggaattccaacntttngcaagnggcccnaangnncccncttntnggggaagtaaagtccaancccccntnggggngnccanaagtggnccngngtnttatatggaaaaaccncattttggnttcctttctttannccatatgatagaanaaaaaagagggggccgggtgnctttggcctccnattncaatttntgnaattnggttcttccttccnggcctaagnaanaactccanataattgngggctaacccccnttttttggnccctttttataagaactcntttttttttggn

SEQ ID NO: 5275 - DNA, 401 bp, Homo sapiens
cttagggcgaattggagctccccgcggtggcggccgcccgggcaggtacatattttttaaaactggttagcgatagctacatgacccaattatattttctatatttatttgattatcagccagtaaactcatagtgaagcagctgcgcactcccccaacaattgagaattgaacaaatttccagagagaagtgaaaaatatcaaaaattaaaatcctaaacttgaagacaagttgagagaccatttagtctggccacctgtatccaagattcatttaaaaccaagcagcggccaggcacgatggctcacgcctgtaatcccagcactttgggaggccgaggcgggcggatcacgaggccaggagatcaagaccatcctggctaacacagcgaagccctgtt

SEQ ID NO: 5276 - DNA, 426 bp, Homo sapiens
  misc_feature 1: n = A,T,C or G
ncactacttagggcgaattggagctccccgcggtggcggccgaggtactgcagacatctcttctccgttgtcgggtgccgtctctgctccttgtggttattgctcagccctggcatccccaggggaatggcagcagtgaggtagatgggaggacatttctggtcagggaactggcatcccattcagcatctcaggactcacaggccaacatgtgttccatggctgggaattgcctaccacccacatcagcttctgtttacctttttggcatcaaataatgaacagtgtttggaaatctttctacaggcaattacctccccaagagaagccttccttattttggagtaaggtcctaagatagctggatgaatcaggaaaaccatgtcccctctaggtattattaatataagcaggaaggggatctac

SEQ ID NO: 5277 - DNA, 361 bp, Homo sapiens
ctacttagggcgaattggagctccccgcggtggcggccgaggtactttagttctcctttcctcatcagggctaaaactgctattgttgctcaagcctgaatcgctgtgaatatagtgaagagtggagtccatattcctcacactccagagtccagataatgtcactggccctccgcaacatggcctcaagtcccgatcttctgctcagaatactgtgttgcttgctgcagtgaaatggtccgatcagaaacaaagcacctctcaacagcatcgctgattaaaggcacagaatcttcttgatttattttacaatttggtagctcatttatatccagttcatcttgcaaatcacttctctttt

SEQ ID NO: 5278 - DNA, 447 bp, Homo sapiens
  misc_feature 3, 5, 12, 14, 70, 205, 207, 229, 239, 257, 259, 267, 288,308, 313, 314, 323, 330, 345, 352, 354, 361, 366, 370, 404,415, 418, 420, 426, 443, 447: n = A,T,C or G
ccngncaggacncnggggttgaaaacctttgctcattttttaatgcgaaggctaagtgtcaccccctttntctgcctctggcttggccttgctaagggccaaggaaagaaagacatttttttagggggcaggccaagtcccaaatgccaaaagaagaaccagtttcttgcccctgaattgtatcgaaaaatttgaccatttctgngncaccttattttttttttattgnggcccaattncaggaatattgtcttatngnttccttanagggaccaattggcccttgcnttgttaagcaaaataagtcnaccannttaccgttngggtatnggaataaaataattntatttcncnccccagnaaaanggcnaaggccaattggaacccaaggaaaaatgggcccntttcggggggnggnanggccanctttttggggaaaaagngggn

SEQ ID NO: 5279 - DNA, 343 bp, Homo sapiens
  misc_feature 308, 343: n = A,T,C or G
ccgcggtggcggccgcccgggcaggtaccagctactcactacctgggaggctgtggtgggagcatcttttgagcctggaaggtcgaggctacagtgagttgtgactgtatcactacactccagcctgggaaacagactgtctcaaaaaaaaaaaaaattaaaccaacaattggctgccttctgaccttcacatcctgtataggaatggaaatggtggctaaagtcagcactgaaggtcccacaagctctccctgcctcccctctatctactgcatgatccttcaactgaggccagcccaggtgcagantagcttgcaaaacccaagggaccccgcgtaccttn

SEQ ID NO: 5280 - DNA, 282 bp, Homo sapiens
  misc_feature 1, 12, 145, 152, 181, 183, 222, 225, 239, 244, 246, 247,248, 257, 260, 261, 262, 272: n = A,T,C or G
ncgcgggtggcngcccgcccgggcagcgttacagggtaagtgcctttcgggcagggcacaatgggttcactgccccatgacctggataccttgaaagcacaccattacaggacaagtggggcccccaataatcaccccgaagcangggtgcntttttgccccccttgtccagccgttcctngncaacaccaggccaatggaacctttggttcatcccttttntgnaaggggttggaaanctatngnnnacaaccacnacnnnttaattttgnggaaaaaaat

SEQ ID NO: 5281 - DNA, 403 bp, Homo sapiens
  misc_feature 92, 254, 328, 365: n = A,T,C or G
ccgggcaggtacgcggggaggcccttcgacggagaacaacaagaaaggcgcttccggtgtctgttgccaggcgcgggcccagtgggccgtangggcgacattgttgccgtcgttatttccccccccagtcccggggatggagatgtcgggactcagcttttcagagatggagggctgccgtaacctacttggcctactggacaacgacgagatcatggccctatgcgacaccgtcaccaacccgcctggtgcancctcaggaccgccaagatgctgttcatgcaatattagcatacagtcaaagtgcagaagaacttctgaggcgtanaaaagtccaccgagaaagttatattttaagtacctcnggccgctctagaactaagtggatcccccgggctgcaag

SEQ ID NO: 5282 - DNA, 331 bp, Homo sapiens
  misc_feature 7, 53, 139, 149, 169, 180, 190, 204, 216, 234, 253, 257,261, 267, 272, 295, 309: n = A,T,C or G
gcgggcncgcccgggcaggtacttactacaaagcttccaaagggaaaattgcnctattaaatgggatgggctccagaagtcaatcaaattttcgaacgtttttaccttccagcctagtggaccgtaatgggatgttttngggtgtgtgntaatggttggggaaagaatnaccttggaatncccattgggntggttggaaaaggnccttttttttcnaaaggggagtttgaaaanttaacccaaaattgaattngtanaatnccgggntccgnaaaattttggaaaaaaatggggngggtaaaaagggantttacccccaaaatggcccctt

SEQ ID NO: 5283 - DNA, 358 bp, Homo sapiens
  misc_feature 5, 9, 43, 94, 95, 115, 120, 168, 174, 175, 182, 207, 215,224, 226, 227, 244, 247, 252, 270, 273, 277, 304, 311, 320,324, 334, 336, 339: n = A,T,C or G
gagcntccncccgctggtgggcgggccgaggttaccaaagganggtttttaatttcacagcatcttcccaacagtgcaactttggggtgaatgnnggacccattctggtatttgnagcanaaaatttttcttaatgggaaagggaaagggttcccttctggccagaanacaaanntaccagnaagggattttttcaacctttaaacnaccttggntaagccaantnntcttgggtattgaaaantcnttggngatccaaatggattttcnttnaagnttcatcccccaaaggggggggccttcnaatgggngggcccccnaccnaatgggcccnanggnaaaccaattcccttttttg

SEQ ID NO: 5284 - DNA, 544 bp, Homo sapiens
  misc_feature 103, 126, 147, 154, 164, 187, 214, 217, 222, 224, 230, 232,239, 252, 253, 266, 278, 290, 303, 304, 307, 309, 322, 333,337, 339, 345, 353, 357, 366, 380, 381, 390, 400, 406, 421,431, 436, 439, 441, 443, 452, 454, 462, 464, 469, 471: n = A,T,C or G
  misc_feature 476, 483, 503, 518, 529, 531, 534: n = A,T,C or G
cgcggtggcggccgcccgggcaggtaccctggtgttcttctgattggcactgactcccacacccccaatggtggcgtgccttgggggcatctgcattgggaanttgggggtgcccgatgcttgtgngatgtcattggcttgggatcnccctggnggaagtttgnaaagatgcccaccaaaggggtgnatattggctgttgaaagtcttggaacnggngcctncntcttcntntccgcgntttgggttccctnnaaccccctaaaangaaattggttgnaattccctttgnaatggggttgggnntangnggcccaattcccnttctaccgtgnttgnanaaaagnggttgggntcanccaaggggntggccaaatttccnnttggggtanaatttaactncaaacngggggaccccttggngttggttaantaacnttncncnattcattancnttggccancntttgngnccaanttggggnccggaacctaaaattccttngaccaaaaccaattnggggggtttgncnaangaaaaaaatt

SEQ ID NO: 5285 - DNA, 350 bp, Homo sapiens
  misc_feature 100, 123, 126, 146, 156, 174, 176, 206, 213, 216, 222, 248,251, 256, 275, 287, 314, 340: n = A,T,C or G
cgcggtgggcggccgaggtacgcgggggcctgcgcggctgtcggttgatggggaggtcaggtctgggaaactaggccctggggttttccctgagcaggancggtgcccgagggcactcaggcngtnagtccaggccctgaatggantggtctccanccggttggcgtcacattntngcacttgtgggccgtctatgcgtcccacantaagtancanactggnaagcatcttagtggttcccacctcangcncaagnccaagtacttacttaatgnaaatcaaaggangacatccttttcccagtcatgttccantttggtaaaggggggccatcccttgnaggggaaaac

SEQ ID NO: 5286 - DNA, 386 bp, Homo sapiens
aggtacctgcctgctggacccctccacctggaggccagcccatgtctcaggcccagccctagcctcttctcctcaaattctaagtgttttctctttaggtttccctggctttgtgaatggatcatgtgtctctaggtataaacctgacatcatctttccacccggcttacctccaccagatctccccagttctgtctccatcttctacctgcagctgctctgttctcatggtcactgctgcatcactgagtctggacccttgttatcattttcaaactggcctccacgccctgctccctcctccacctccccatcctcttgtctcccctcccctctgaatccagcccagcggggcttctcctgcctccatcacatcacagaagtcc

SEQ ID NO: 5287 - DNA, 352 bp, Homo sapiens
  misc_feature 112, 262, 286, 289, 294: n = A,T,C or G
aggtactcctccatggcgctggcgtctggccgcgcagtcaggccacgcccccagcgtagacgcacaccggcgtcggagctttccgcctattaccgggcagcgattgggtcgntataccgcatgtcacgccaaggacgcactctcattggccaatcgagtttcttgccatttgttcattgcctcctgagcgtagtccagttactttcaggctcggggagtgaaggcctcgttgagagaaggtctcattcggtgttttgggaanagagtcgtgtgggcccaggtatcntancggcnacacgagagagacgggcggtgtgacagccttccactacctgcacgagtgtattggtct

SEQ ID NO: 5288 - DNA, 398 bp, Homo sapiens
  misc_feature 168, 324: n = A,T,C or G
ccgcggtggcggccgcccgggcaggtacgttgaccatctttgcagcagggctgttttgtctatatgatgaaaacgagaaacagcgcccgacacctggcccttcgcagctctcgcctttcgcagctctcgcctaacaggaaagggaagaaagagccccgccgtactttnttttttttttttttttttgcaaatgacttagatttaatcatcggaagcaaactaaatggaaaccttacaatagagaagaattacatgtcagtgtcttttggaaaactgagctgggacagaaagggactgggggctgccccccaacctgatcccttntgaacaaagacgtccacagtgttcctggcactctggctcaggaaaaggggagactctgctgattctgtgcattg

SEQ ID NO: 5289 - DNA, 575 bp, Homo sapiens
  misc_feature 24, 30, 88, 107, 134, 148, 153, 159, 176, 185, 187, 198,204, 208, 233, 248, 252, 255, 285, 286, 301, 306, 322, 327,337, 349, 363, 380, 388, 399, 406, 417, 459, 473, 482, 499,500, 512, 516, 518, 530, 534, 555, 559, 567: n = A,T,C or G
caccgcggtggcgggccgcccggncaggtnctttttttttttttttttttttttttttgagggggaatgctggaaattgtaatgggtntggagacatatcatataantaatgctaagggtgagtggtacggaanttttttttataagngaggngtattnaagttttggtccgttanccgggaaantncggggggtgtnattgcnttgncttccgaaatttccattaaaagaanaccagggggtagggntttnaanaaaagataagggggtttcttttggggttgnnaccaacaaaaatttntttgnttttgctggtttaagnaaagntttttccaantgggggggaaanaaaagtttggcccnttcccaattaaatttgngttttggnttttccccttnaaggggnaaaaagaaatntttggtaaattttggcgtttggaaagggggggttggctcttntaatttttaatttnacaattaanaattggtttttcggggnnggggttaaattnttcngngccctttttttngaanaaagcaaaattttatgggggntctnaaaaaggngggggggc

SEQ ID NO: 5290 - DNA, 210 bp, Homo sapiens
  misc_feature 1, 3, 23, 27, 46, 97, 137, 148, 175, 198: n = A,T,C or G
ncngcggtgggcgggccgaggtncagntttttagtttgagaagatnaaaaagttctggagctggatgatggtgttggtatgcacaacattatgaaangcacttaatacccacttgaaactatataagaacagtttanaaatggaccancattttggtgtttattattttttaacncaccaaattaaaaaaatggtttntttgaattaaaa

SEQ ID NO: 5291 - DNA, 709 bp, Homo sapiens
  misc_feature 32, 123, 124, 164, 192, 239, 260, 263, 309, 316, 321, 325,341, 354, 367, 370, 405, 407, 410, 423, 427, 428, 442, 488,491, 517, 522, 525, 536, 557, 565, 578, 589, 616, 631, 634,659, 667, 674, 691: n = A,T,C or G
agcctccacccgcgggtgggcgggccgaggtncggcgggggcaaaatgcaaatgcaaagtttgaccagaaagtccggtcaccatccaggggagacttccacctctcatcaccccaggctcagnnccaaagcttgattgagggacagaccagcttgaaaatttgnggttgggaagggaacccgtttcttctgntccccccaagggttcccttggtccttcttgccaaccaaggaaaaacntttggaaaaccttccccaagnggnaatgggggaaaattttccttttccccttcccctttccttggccctnggggggnaaccnttcnccttttttgggccaanttgggggaccaangggggggcccccnttncaaattccctttccaaccccctttccttttccggncnaanaagggaaaggggnggtnncctttccctttttnttggttttttccaaaaattattattttcttattatttttttaaatnccnttaaaaaaaaaatttgggaaattttnggttnggnccccctttccnttggggccccccccaaaaggnccaagggnctcccttgggggnaaaggaaaccntttttcccccttaaattgggttggttnggcccaatttttggnggngggggttgggggggggggccttttngggggggngggccancccccaattggtaaggnaaaagggggtttttgggg

SEQ ID NO: 5292 - DNA, 648 bp, Homo sapiens
  misc_feature 11, 33, 52, 87, 183, 197, 200, 206, 242, 244, 259, 262, 263,287, 289, 295, 296, 328, 334, 337, 340, 363, 389, 391, 393,398, 406, 426, 432, 435, 437, 440, 445, 456, 478, 486, 510,517, 525, 526, 545, 559, 564, 566, 568, 578, 592: n = A,T,C or G
  misc_feature 599, 604, 610, 615, 622, 624, 625, 627, 629: n = A,T,C or G
agcctccaccngcggtgggcgggccgaggtacncgggggagacggaacttcngcacgctgcctctgttctcagctgtcagtgccgcncactgcccccgccagagcccaccggcccagcatgtccttctactcacttcaaccgaggccctgcctacggggcttgtcaagcccgaaggattaaangaaaccaaagcctnggnccccantaaaagttattgtaactcaacccattcgggtgtagncnagtgtaggccctggnagnnagtaagatggggtaatccgtaagngnggggtnntggaaccaagggtccgccggtttctgaccaanttttgnggntanagccaaaacctttttccaattgnggtaaccagggtttcctttctaaaanangngaatntgggggcnaatttcccattttttccttntttggnccngnaanaattnttctaattccnaaaattaaaaaagtccttgggnctaacggncccaatgcgtaccttccccggttnggtaaanaggaaaanngtaaattccaaaacttggnaagggttactaaanacccncnanaaaaaatttntgggggcccaaccnccaaggnctttnggggtnaggtnaaaaacnanntncngtggtcaaaaacccttttt

SEQ ID NO: 5293 - DNA, 495 bp, Homo sapiens
  misc_feature 16, 26, 91, 92, 97, 115, 147, 152, 162, 193, 209, 224, 227,286, 320, 321, 338, 375, 380, 396, 408, 409, 414, 426, 443,465, 467, 469, 475, 483: n = A,T,C or G
cgcggtggcggccgangtactttgtnctttttttttttttttttttttaaagacaaggtcttgctctgttgtccaggcctggacaacacannatgtncagtggtgtgaacatggntcactgcatcctcgacttcccaggctgaaggngatcnctcccgtctnaagctttggagaagtagctggaaaccacagngtgtgttgcccacccntggcaccagcatagnttntttaaaactttttttggtaaaaaaatgggggggtcttgggcatggttgccccaaggtcntgggtccttggaaactttcttgggggctcaaagnncggattccttccttggnctttggggcacttcttcaaaaagttggccttgggggnatttnaccaaggggcccgttntaggccccaacnntggtngccttaacaacncaaaaaaattggttttngaccaaaagggcctttggttgntngnccaaanccccttgnaaaattttggtt

SEQ ID NO: 5294 - DNA, 222 bp, Homo sapiens
  misc_feature 95, 123, 174, 181, 189, 203, 211: n = A,T,C or G
ttatatgtggatttttaactatgcagtgtcagcaccccaacactactcaagggtcaactgtaaagtatttttttaatccaagaatgaacaatgtntttcaaagacataatgctatttatcacnttaacattacttatagttgcaaacaataaacctttttataatggccattanggtaaanccataaantatttcaatggtgnaactttgnctttttaatat

SEQ ID NO: 5295 - DNA, 378 bp, Homo sapiens
aggtacagtagtgcactcttggctcactgtagcctcgacctccggggctcaagtgatcctcctgccttagccccacaagtagtgggactataggcacacagcaccgtgcccatctaagtttttgtattttatgtagagacaaggtttcaccatgttgcccaggctgatcttgagctcctgagctcaagtgatctgcccaccttggactcccaaaatgctgggattataggcgtaaaccaccatgcctggccttaaatcaactttagagtcaacatctcttatcactggagcttctggagaaactccatcaccgtggtgctctctttcctgatgtgttgtgcccaaaataggctttgttcttcatcaagatgacttatt

SEQ ID NO: 5296 - DNA, 393 bp, Homo sapiens
  misc_feature 321, 341, 356, 371: n = A,T,C or G
ccgcggtggcggccgaggtacagcctttccgtttagtgaggttctactaaagggaatgccaactttgtggttgacatgggtgatccttgggtttcgtcacgcatgaaattaacaaataaaaaatgttcaaggccaggtgtggtggctgatgcctgtaatcccaatgctttggagtctgaggtggaaggattgcttgaggccacaaatttgagaccagcctgggcgaaagagcgcaaccctgtctctaccaaaaaaaaacaacaacaaaaaacttagctgagtgtggtggtacctgcccgggcggccgctctaagaactagntgggatcccccgggctgcangaatttcggatattnaagcttattcgattnccgttcagacctcgaggggggg

SEQ ID NO: 5297 - DNA, 379 bp, Homo sapiens
  misc_feature 292, 363: n = A,T,C or G
ccgggcaggtacgcggggagagctctcggactttcggaagctctcggtgtgggtgcgacccgagagaaggagcggggctggtggggctgctgcagccgtcacaggaaataagtaatcatggtgctcaacagtttggataagatgattcaactccagaaaaacactgccaacatcaggaatatttgtgttttggctcatgttgaccatggaaaaactactctggctgactgtcttatatctagcaatggaatcatctccagccgcctagcaggcaagttaaggtacctcggcncgctctagaactaggtggatcccccggggctgcaggaatttcgatatcaaaagcttatcgataccgtccgnacctcgaggggggggg

SEQ ID NO: 5298 - DNA, 163 bp, Homo sapiens
  misc_feature 111: n = A,T,C or G
ccgcggtggcggccggaccttagaaagtcacacatctgcgcgcctgtgcggcccctgcttctgcggatgctgaggcacgtaaaaaaatttgaagaagggaattcgagcggncgcccgggcaggacgcgggatttttggtttggtattttctctggttttgggt

SEQ ID NO: 5299 - DNA, 284 bp, Homo sapiens
  misc_feature 64, 79, 124, 191, 214, 262: n = A,T,C or G
ccgcagaggcaagaaagggaccccacttgctcccatgcccacctcaagaaaaaacataaaacanttttttttaaaaaangaaaagaaatctacctcagttgacaggattccacctttagggttncttcaacttttaagtcttacctgttgagtgtaacttttgtagcatcttgcttttccaagcaagctantgaggcatgacagagcagaagtntgtaaatgtccctgtgatggacctctttctagcatgtacgcaagtttnattttttaataaaatttgggta

SEQ ID NO: 5300 - DNA, 425 bp, Homo sapiens
  misc_feature 176: n = A,T,C or G
ctatagggcgaattggagctccccgcggtggcggccgcccgggcaggtacgcgggggagaacatcatgaaatccaacattgacaagaagttctctgcgcactacgacgcggtggaggcagagctcaagtccagcaccgtgggtctcgtgaccctgaatgacatgaaggccaagcangaggctctggtgaaggagcgggagaagcagctggccaagaaggagcagtccaaggagctgcagatgaagctggagaagcttcgagagaaggagcgtaagaaggaagccaagcggaagatctccagcctgtccttcaccctggaggaggaagaagagggaggccgaggaaggaagagggaggccggccattgtatgaagggagggagatggaaaggggaaaagaagatcacccaccgaaagaaagagaaa

SEQ ID NO: 5301 - DNA, 355 bp, Homo sapiens
  misc_feature 344, 350: n = A,T,C or G
tcacggtctgcgcgatcatccagctcaccacgatgtgcgtgttcttggggtcggggagcatgcccttggccgtatcgtactttttttttttttttttggtataacagctctttatttctgtgagttctactaggaaatcatcaaatctgagggttgtctggaggacttcaatacacctccccccatagtgaatcagcttccagggggtccagtccctctccttacttcatccccatcccatgccaaaggaagaccctccctccttggctcacagccttctctaggcttcccagtgcctccaggacagagtgggtttatgttttcagctccatccttgctggtgnagtgtnctggt

SEQ ID NO: 5302 - DNA, 316 bp, Homo sapiens
  misc_feature 1, 127, 133, 156, 178, 200, 201, 297: n = A,T,C or G
nctccaccgcggtggcggccgcggtacacgtatgagatcattaatacttttaaaagttctacattaattgacttggaatccttagaaatggagtggtgacatgtcagtatgagaacaggcaaaaggnaaattnttttttttttacaaccttaagtnaatctccaaataataaaaactntctgatctgtattatatccagnngttgggtcttatattttcacccacaaacaactgacactgctatcttttactgtatttttaaaaatttaatttgaaaaggtcacccagaagcatttntgaaggaaatggttctaga

SEQ ID NO: 5303 - DNA, 176 bp, Homo sapiens
  misc_feature 44: n = A,T,C or G
ccttagggcgaattggagctccccgcggtggcggccgaggtacncggggagggagctggagaaagaaggagggggagagactgccagagaggaagagaaaagaaaggaagaaacattagaaagaaaaaggagggaaaacggtttaaagagagatcaattacccacccttaaatagc

SEQ ID NO: 5304 - DNA, 413 bp, Homo sapiens
  misc_feature 347, 348: n = A,T,C or G
actacttagggcgaattggagctccccgcggtggcggccgcccgggcaggtacgggggagctggccggggctcacggtgtttgacccgtcggtcgtgcgtgagaggaaagggaaggaggaggtcccgaatagcggtcgccgaaatgttccggtgtggaggcctggccggcgggtgcttttgaaagtagaagcctggtgcccttggtgcggacccgtgtgcgtccgaagcccgaggcagaggaaccggctcccaggcaacttgttccagcgatggcatgttcctctagaactccagatgacaagacaaatggctagctctggtgcatcagggggcaaaatcgataatnnctgtggttagtccttattgtggggcttatcaaacagtaggaggctggtgccctatgcctacaaga

SEQ ID NO: 5305 - DNA, 371 bp, Homo sapiens
ccgggcaggtacttgcttctgccacctccgctgagtaacctgtaggcataggtgtcagatgggcagggagtccagtggtcacatttttgccttttggggactggagctttgaggacaggcctctccccgatgcttgccggatgctataaggcaggcactggacaggggtgcatctggaatgagctctgcgagcaggtacatgctgcacgcacacaaaagacactgagaatatttttaagaagccacacatcacagaatttgatagtcaacttcatgcaatgagttccttttatatttcatcaaaaggtttacttgcccctttacttgttccaaatttccaaggattaacttcttaaaatttgaaaaaagta

SEQ ID NO: 5306 - DNA, 259 bp, Homo sapiens
  misc_feature 25, 102, 153, 161, 198, 204, 217, 221, 224, 225, 230, 236: n = A,T,C or G
ccgcggtggcggccgaggtactttntttttttttttttttttttttttggcttacttaacacatattttatttattggaaaaggcattgacacttagctcanattcttaaccttgccatccatatctaagtaagctattttatttttttattntaattttngggtggagtcttgctctgtcgcccaggctgcaacctntgcctntcaggttcaagcnattntcnngcctnagcctnccaagtagctaggatcataggca

SEQ ID NO: 5307 - DNA, 361 bp, Homo sapiens
  misc_feature 48, 56, 129, 134, 135, 153, 162, 167, 173, 188, 193, 215,217, 227, 228, 229, 246, 268, 284, 340, 342: n = A,T,C or G
gactacttagggcgaattggagctccccgcggtggcggccgaggtacncgggatanagtttgcttctgagtgtctgctttgtttagtagaggtgggcaggaggagctgaggggctggggctggggtgtngaagnnggctttgcatgcccagcnatgcgcctncctgngggatntcaatcacccctggnaaccnggagtggcccttggctcactgngntctgcatggnnnggatctgaattaattgncctttcttctaaatcccaaccnaacttcttccaacctncaaactggctgtaaccccaaatccaagccattaactacacctggacagtagcaatngncctgattaatcatctggcc

SEQ ID NO: 5308 - DNA, 316 bp, Homo sapiens
  misc_feature 297: n = A,T,C or G
ccgcggtggcggccgcggccactgtaaccaagaaagtggctaagagcccaaagaaggccaaggttgcgaagcccaagaaagctgccaaaagtgctgctaaggctgtgaagcccaaggccgctaagcccaaggttgtcaagcctaagaaggcggcgcccaagaagaaataggcgaacgcctacttctaaaacccaaaaggctcttttcagagccaccactgatctcaataaaagagctggataatttcttacaaaaaaaaaaaaaaaaaaaaagtacctcggccgctctagaactagntggatcccccgggctgcag

SEQ ID NO: 5309 - DNA, 188 bp, Homo sapiens
  misc_feature 40, 77, 85, 97, 98, 99, 116, 149, 152, 176: n = A,T,C or G
ccacgtccgaggacagcaccatctcttcaactggccagtnacatgatccaataaattcccctttgaggctttgtggntaacgttnagttgggctgcnnnacttctggggccttcgngtccgaggccagcacaccaagaccactggccgncgnggccgcaccgtgggtgtgtccaanaagaaataagtc

SEQ ID NO: 5310 - DNA, 377 bp, Homo sapiens
ccgcggtggcggccgaggtacagcagaactgcatgatcagctgtatggtagccttgaaaaccaacaggccacaatcacagtgaaaacctcaggttggcagccactggaggatacaaaatgagtttggatctccttcaatgccccattcccagagaactgtcattatttgacctgctggtagttccctaaaggacgtgcaaggatgtttttatttgactggacacttgaagcttgccctgtatgaacagcccccatcttcccatgcttgtcaaaaatcagaggcaactaacactgcggcttcctgagagtctcactctgtcacccaggctggagagcaattgcacaaacacttggctcacttgcagcctcaacttctt

SEQ ID NO: 5311 - DNA, 413 bp, Homo sapiens
  misc_feature 1: n = A,T,C or G
ncactacttagggcgaattggagctccccgcggtggcggccgaggtactcagtggcttgagctccagggtcactttctgcccagaggctgactgatagtgcccatcactgcaagggcctagatgggctgggcgcaagcttcccagcatgctctgcagctttttggtcttcacctttcccttactctcaaggaggctggttaatctatccaggaattccagaagttgttgctctcgttgccggggctctggccaggcagggtccagggctgcagcccgagagaagccctccagggcctccccataactctcttcatatttatgcaacgtcgccctgttcagatgaaggtcaggattgctagacgcttttctgtcaactttctctgcttgggcataggcactgagggcttgctgg

SEQ ID NO: 5312 - DNA, 395 bp, Homo sapiens
  misc_feature 5, 188, 275: n = A,T,C or G
cactnctatagggcgaattggagctccccgcggtggcggccgcccgggcaggtacctgcattaaattttcattttagaagagaatcttggttttggtaattcatttttttttaagatcattatgtgcaaaacaccaagttttaaaaataactcacagaatggccttagttttcaatgtcttgatggtntatttgtgagttgtgttatctgtaatatacatcccagaataaaggagtgaattaaatagtctaaaaaaaaaaacaaaaaaaaaagtncaagttgtgcaaagtgagaaagatctttgtgggcacaaaaggaatccctcatctggtgactcattgatgcccgcaccatccgttaccccgatcccctcatcaaggtgaatgataccattc

SEQ ID NO: 5313 - DNA, 100 bp, Homo sapiens
ccgcggtggcggccgaggtacgcggggagctttgctcactcagctaatgggatggcaaaggtggtggtgctttcatcttcaggcagaagcctctgcccat

SEQ ID NO: 5314 - DNA, 415 bp, Homo sapiens
  misc_feature 1: n = A,T,C or G
ncactacttagggcgaattggagctccccgcggtggcggccgaggtactcccctagcgcaaagtggcacgtcgccagctggatgagcgccctctgatgctccagggtcccctgccctgtgatctgtggctgagaaatggatccctggagagctgctaagtgatgcgggctggctatcgcctttttatattgaccctgatagatgatcatatcagtgaggaagattcttaaccaaagccaagtatccgtcttccaggccaagcaaatccttgtaaattctttgtcaaggaattctagggaatagagcaactcccagctctccctggccaatttaaagctttctaacacttcagtgggagttagcaagttcggctttattgactacaatgtgacgatttcttcctttcgccgaacag

SEQ ID NO: 5315 - DNA, 415 bp, Homo sapiens
  misc_feature 379: n = A,T,C or G
tcactacttagggcgaattggagctccccgcggtggcggccgcccgggcaggtacgcggggagagcgaccaaacgtcccgcgccttccaggccgcactccagagccaaaagagctccatggcggcggcggccaagcccaacaacctttccctggtggtgcacggaccgggggacttgcgcctgggagaactatcctatccctgaaccaggcccaaatgaggtcttgctgaggatgcattctgttggaatctgtggctcagatgtccactactgggagttatggttcgaattgggaattttattgtgaaaaaagcccatggtgcctgggacatgaaagccttcgggtaacaagttcgaaaaaaagtggggatcaatcggntaaaagccaccttaaaaccagggtggatcgttgttt

SEQ ID NO: 5316 - DNA, 190 bp, Homo sapiens
  misc_feature 23: n = A,T,C or G
tacttagggcgaattggagctcnccgcggtggcggccggcaccttggccgcgttcagagtgccgatgagctcccccagactctgcttccgcccgttcatcttccagtttcccccaacgaagaacttcctggagggcgccatggcgctggagccgaggcgctgaaggtcaagtgtctgcccccgcgtacct

SEQ ID NO: 5317 - DNA, 381 bp, Homo sapiens
  misc_feature 158, 171, 174, 217, 219, 257, 273, 311, 339, 345, 350, 355,366: n = A,T,C or G
ccgcggtggcggccgaggtacttcttgtggtgcagcagcagaaccaagccgccccctagcagcatgagccctggggcacccagggccactgccatgatgtccaggactagtggggacaagccgtccactggagggaagcccacacccaggaagcatcnacccagcttgagntantgtttggtcccaatagccagggcctgtggaagccccgaacgtnanatttgaaggcacagaaagttattcttgggacccaaaanaaaggcttcggacaantggggtgacttggggaaagaagagtattgcttaaggcngggattgaaatagggggaaagcttttgncaaggngcaanggggncttgatttctncgggcccccccccgg

SEQ ID NO: 5318 - DNA, 409 bp, Homo sapiens
cactacttagggcgaattggagctccccgcggtggcggccgaggtacaccaaggcgaccacagcagctgcaacctcagcaatgaagatgaggaggaggatgaagaagaacgtcacgagggcacacttgctctcagtcttagcaccatagcagcccaggaaaccaagagcaaagaccacaacgccggctgcgatgaggaagtagcccacgttgacaaactgcatggcactggacgacagtggcccgaagatcttcagaaaggatgccccatcgattgacacccagatgcccactgccaacagggctgcaccacacaggaaaggatgagccaaattgaaggagggatcatcatgggtctttaatggaaagcttgaagcactgccatgggtgggctcctggttcaggggctc

SEQ ID NO: 5319 - DNA, 271 bp, Homo sapiens
  misc_feature 1, 36, 60, 110, 116, 117, 123, 125, 127, 175, 185, 247, 259: n = A,T,C or G
nagacagcagattgggcctgacccccaccaaatcancaagctcttccatggtattctatntaagtctcccctgaatgggtattgggcgtttgagcttcatccacattacnctattnnttcaantntncctcttggagcctttacgatatttctgccatcatttcactctagtganggcaattgtntttagacctttaaatacctgagtggcccagcgtccttggtaggctctgaaatgggcatgaanggcctcctaagnggcctgaatcaa

SEQ ID NO: 5320 - DNA, 146 bp, Homo sapiens
  misc_feature 14, 15, 19, 67, 93, 101, 120, 130, 133, 139: n = A,T,C or G
gaagccaagcccanngttnaaaaggcgggcggaaccaaacctaataagccagttggggcagccaacnaagcccaagaaggcggctggccggcngcaactcngaataaagaagcgcttaanaaaacacccnaanaaagcnaaaaagc

SEQ ID NO: 5321 - DNA, 250 bp, Homo sapiens
  misc_feature 108, 128, 204, 217, 237: n = A,T,C or G
ccgggcacggtacatggttcgaagccactatgtaacaagaaacactctctgaagaagaggctgggttccctttagcttacacagtgaccatccacaaagacttcggcncttttgagaggctcttcagnggcgatttatatgccccaaaatgtctactgtgtgcacctggatcacaaggcgacggatgcctttaaaggtgcagtngaaacagttactnagctgcttcccaaatgcttntctggcttccaag

SEQ ID NO: 5322 - DNA, 462 bp, Homo sapiens
  misc_feature 6, 162, 270, 299, 319, 429, 437: n = A,T,C or G
cgaatnggagctccacccgcggtggcggcccgaggtacgcgggcaatgacatgtgtgctagagcttactctgagaaggtgacagagttcatgttgtgtgctgggctctggacaggtggtaaagacacttgtggggtgagtcatccctactcccaacatctgnaggggaaagcataattcacccattcctgtgttgagcacatgcttactgggcacctgctacgtgaccagcattgccgtagaccctgggaagcacgcactgaacagtcangagctgtggatggtgctggacagaaaaangacagggcctgctcagggtnattctgggggtccacttgtctgtaatggtgtgcttcaaggtatcacatcatggggccctgagccatgtgccctgccttgaaaaagcctgctgtgtacctgcccggtcggncgttctanaaactagtggatccccggggcttgc

SEQ ID NO: 5323 - DNA, 279 bp, Homo sapiens
  misc_feature 71, 75, 88, 90, 96, 102, 121, 122, 124, 125, 152, 159, 176,178, 188, 196, 198, 199, 220, 224, 225, 234, 248, 254, 262,267: n = A,T,C or G
ctccaccgcggtggcggccgcccgggcaggtacgcgggggagattagaattcctggaggctaatccactgngctnttgatctgatgtncngagtgnagtggncctcctggctccatgctgnntnncaaggactgagaatgcacatatggatngaacaantctagaaattcaagctncntctattgctnaacaagtntnnagttcatataaacctaaattnatannaaaggtctnaacggcaagagttnctaccnaaagattntgttnaaacacctggca

SEQ ID NO: 5324 - DNA, 435 bp, Homo sapiens
ccgcggtggcggccgaggtacagagacagaggaaggggggctccaaagccaagagagggaaccccacctgccacagataccagctaggtatatatacagaggctggaggaggcagtgtctgatttgcacaggctcaggggattggtttgactaggcatgtcattcacgtagcccgcaggaaaagctggctctcccaccctagccttttaatatgcaaatgcagggcaccatgatcttctacacaggtggggatacttcggggtgtccatgtatccaggaatgtggggaaagggcaagaagtccacaggaatcgccatgtttgggtggacccactttctaatggctggcatttggatatcgggtaactggcctggctttaagagctggagctttacaagaaacttttccaagacgtgctttaaaaaacaaaaactt

SEQ ID NO: 5325 - DNA, 128 bp, Homo sapiens
cactacttagggcgaattggagctccccgcggtggcggccgaggtactcctccatttatccgccatgataagtgccagccgagctgcagcagcccgtctcgtgggcgccgcagcctcccggggcccta

SEQ ID NO: 5326 - DNA, 416 bp, Homo sapiens
  misc_feature 345, 355, 358, 401: n = A,T,C or G
gctatcactacttagggcgaattggagctccccgcggtggcggccgaggtacaccaaggtggtgcattacccggaagtggatcaaggacaccatcgtggccaacccctgagcacccctatcaactccctattgtactgttcaaaaaggaatgccccacaagtgttaccatggcaaaactggaagagtctacaatgttacccagcatgctgtttggcatttgttgtaaacaaacaagttaagggcaagattcttgccaagagaattaatgtgcgtattgagcacattaagcactctaagagccgagatagcttcctgaaacgtgtgaaggaaaatgatcagaaaanaaaaaaaaanaanaaaaaaaaaatgtacctgcccgggcggccgctctagaactagntgggatcccccgggc

SEQ ID NO: 5327 - DNA, 214 bp, Homo sapiens
  misc_feature 212: n = A,T,C or G
ctacttagggcgaattggagctccccgcggtggcggccgaggtacgcgggggctcctcagcggatgtggcagccccgagccatggctctcgccgtccgagtcgtttattgtggcgcttgaggctacaagtccaagtatcttcagctcaagaagaagttagaagatgagttccccggccgctctagaactaagtggatcccccgggcctgcanga

SEQ ID NO: 5328 - DNA, 404 bp, Homo sapiens
cactacttagggcgaattggagctccccgcggtggcggccgcccgggcaggtacctaccagaacctcgacatggtggtgtcatctgccattggatgccagctgggcagagacccccacgggctccgagtcgtggtggtcaccgccgagaaaattgttcacatccacattctggctgtgtagccactccacagatgggtggtctcttggggatcagaatgcccctccactcatgagactcttcattttgtccactttgacaggaaaagtgggaatgtatgcagagctctcaaaagaaacaaaaaaggccaaaacggtgccttcagccacatcctctgaattggccctgacttggactaaatgcactaatgcaaaatcccttgacaaaagcgcataggttatttca

SEQ ID NO: 5329 - DNA, 428 bp, Homo sapiens
  misc_feature 235, 281, 309, 316, 390: n = A,T,C or G
tggagctccccgcggtggcggcccgaggtacgcgggcctcccagatggctgctgctgccccttcagtccaggcctgtgatggttaattttataggcttaactgggctaagggtatccagatagctggtattatttctgggcgtgtctgtgagagtgtttctggaaaagaatagcattttaatcaatggactgagtaaagaaggttgctcttaggccaggcgtggtggctcacatntgtgatcccagcactttgggaggttgaggcaggtggatcacttgangtcaggagttggagactagcctggccantatggcnaaaccccatctctactaaaaatacagaaaattagcagggcatggtggtgcatgccttgtaatcccagctacttngggggcttatgcagggagaaatctctttaacctgggaa

SEQ ID NO: 5330 - DNA, 303 bp, Homo sapiens
  misc_feature 51, 52, 129, 175, 191, 193, 195, 255, 279, 303: n = A,T,C or G
ccgcggtggcggccgcccgggcaggtactttttttttttttttttttttgnnaattgctttattcagaggatcccccaaggatgcaacggatcgctgctgtgtcactcatgactgttgctacaaacgtntggagaaacgtggatgtggcaccaaatttctgagctacaagtttancaacttcggggagcanantnaccttgtgcaaaacaaggacttctgcaaaagtcaactgtgtgagtgttgataaggctgcngccacctgttttgctagaaacaanacgacctacaataaaaagtacctn

SEQ ID NO: 5331 - DNA, 231 bp, Homo sapiens
  misc_feature 33, 47, 89, 168, 169, 198, 200, 201, 206, 207, 217: n = A,T,C or G
cactacttagggcgaattggagctccccgcggnggcggccgcccggncaggacctgccctgccctctgctatgaaggtctctgccttgnggatcatgggactccccttggaggatctgtgcaaaggggggctgggacacaaaggatcaatgtcctatttgggagggcnngaagcaaaggaacttggacagggattggngnnctttnnggaacttgangttttattcttgga

SEQ ID NO: 5332 - DNA, 137 bp, Homo sapiens
  misc_feature 24, 37, 98, 116: n = A,T,C or G
atagggcgaattggagctccccgnggtggcggccgangtacatggtggccaatcaaacaggccacacccttgttgcaagtcccgcgagaggttcaganaactctcccgtttcactnctgcctcaggcctcaaccacc

SEQ ID NO: 5333 - DNA, 440 bp, Homo sapiens
  misc_feature 423, 425: n = A,T,C or G
tacttagggcgaattggagctccccgcggtggcggccgcccgggcaggtacagtagtgcactcttggttcactgtagcctcgacctccggggctcaagtgatcctcctgccttagccccacaagtagtgggactataggcacacagcaccatgcccatctaagtttttgtattttatgtaagagacaaggttttcaccatgttgcccaggctgatcttgagctcctgagctcaagtgatctgcccaccttggactcccaaaatgctgggattataggcgtaaaccaccatgcctggccttaaatcaactttagagtcaacatctcttatcactggagcttctggagaaactccatcaccgtggtgctctctttcctgatgtgttgtgcccaaataagcttgtttctcattcaagatgacttantngctatgatatatata

SEQ ID NO: 5334 - DNA, 368 bp, Homo sapiens
  misc_feature 24, 26, 48, 63, 105, 107, 117, 125, 140, 159, 164, 175, 188,190, 203, 209, 218, 224, 227, 231, 245, 248, 249, 252, 260,275, 281, 289, 293, 308, 317, 322, 337, 341, 352, 354: n = A,T,C or G
ccgcggtggcggccgaggtacttngntttttttttttttttttttttnggacttctaaaaaanaatggctatactaattcatgtttccatgaacatgtgtgcaananttcccttttntctacatntttgccaacatttgntatttattatgattatttnttttnttgagaaggantctttgctcttgntngcccagtactatnagtgcnaattggacncaaatnttngggnttcactacaacctntgnnctnccgggttnaagcaatttttctgnctacancctcccgngggngctgggattacaggntgttcaccncttgnacccaggtaaatttngtgntttttagtatnanatggggtttttaac

SEQ ID NO: 5335 - DNA, 326 bp, Homo sapiens
  misc_feature 230: n = A,T,C or G
ccgggcaggtactccagggtgccccccaactcctgcagccgctcctctgtgccaggccctggaaggaactttcgctccacctcaatcaagccctgggccatgctacctgcaattggctgagcaaacgtttgctgagttcccaaggatgcaaagcctggtgctcaagctcctggggcgtcaactcagtacttgcggtcagtggcgttgctgatctgggggaaatacgcgtngaccaccaagaagaaggccgaggccaggaaggccagcaccccgatggcactgccatagcggcaggcatcctcgttgcggttgaacacgcagtacct

SEQ ID NO: 5336 - DNA, 399 bp, Homo sapiens
  misc_feature 39, 64, 82, 115, 130, 335, 380, 381: n = A,T,C or G
attggagctccccgcggtggcggccgaggtacaaatccnggtgcaactacattcactctaattntctttcttgctacctctntagcaagagcacgtgaaaatccaactaatcctnctttactggcactgnaaacggactggccagagttgccttttaagccaacaatgcttcctacattaacaatagaccctccctgttgttgaatcatagtcctcatggcagctttacaggtcagcatggaacccaagaggttagtatgaagctgagataccatatcttcagtttttgttcttactaaaagaccatccctgttaataccagctgcatttaccangaaatttactcgacctaaatgtttctccatctcttcaaatgtatnnggaacatcatgttcttta

SEQ ID NO: 5337 - DNA, 328 bp, Homo sapiens
  misc_feature 158, 180, 215, 301, 327: n = A,T,C or G
tacttagggcgaattggagctccccgcggtggcggccgaggtacttttttttttttttttttttttttgcaaatgggccctttatttctgaactgccaccactgcacggataaggccacttgggttgcaggcacactgtggagtgtcaggggacaganaggagaggggctgcacaccaanactgccctgtcctcacggagaggaaaagcggcccnaggtacggggggcctgtggatgctgcgcctctccgaacgcaacattgaaggtgctccttgccgccgccctcatcgcggggtccgtnttcttcctgctgctgccgggaccttnt

SEQ ID NO: 5338 - DNA, 453 bp, Homo sapiens
cgactacttagggcgaattggagctccccgcggtggcggccgaggtacatttcttcaatcacaaaatttttcaccaatctatttatgtctagtatcagaaagttaagcaaggagattgcaaaccaacacaacacctttagtctggattttcccggagccccatttgtgttagtgtcctcgggctactgtaacaagttctcaataatgtggtagcttcaaacaacaggaatggaatctctcatagttcagaagtccagatcagtttcactgggctaagatcttggagtcatcagttctggctccttctgaagctctagggagcagtctgatttagctcttccagcttctggtggcttctctctcccgggatgtggacacatcactcagttcttggcaacctggttgcattcttaatttggtcctgtaattcttcattgctgtattaactttctg

SEQ ID NO: 5339 - DNA, 233 bp, Homo sapiens
  misc_feature 2, 25, 225: n = A,T,C or G
tnactatagggcgaattggagctcnccgcggtggcggccgcccgggcaggtacacttttcaccccacttcctctgccatcttggtcctgctgtcctgaggagctacctgtgcaccctgcctccggctctcctgagcagagagatcctgatggctgactcagaagcactcccctcccttgctggggacccagtggctgtggaagccttgctccgggcccgtgtttnggggtttg

SEQ ID NO: 5340 - DNA, 456 bp, Homo sapiens
  misc_feature 427, 431, 432: n = A,T,C or G
actacttagggcgaattggagctccccgcggtggcggccgcccgggcaggtacttgctgaggcaactgcaacgcgcagcatggctgtttcaaatattagatatggagcagcagttacaaaggaagtaggaatggacctaaaaaacatgggtgctaaaaatgtgtgcttgatgacagacaagaacctctccaagctccctcctgtgcaagtagctatggattccctagtgaagaatgggcatcccctttacggtttatgataatgtgagagtggaaccaacggattcaagcttcatggaagctattgagtttgcccaaaagggagcttttgatgcctatgttgctgtcggtggtggctctaccatggacacctgtaaggctgctaatctgtatgcatccagccctcattctgatttcctagattatgncagnngcccccattggcaagggaaagcct

SEQ ID NO: 5341 - DNA, 391 bp, Homo sapiens
  misc_feature 341: n = A,T,C or G
ggtacgcggggggaagtccttgcagggtggcctgggtgactgctcaccagcccggccctccccagggttctgggccagagcctccctggccgttggagcgggagctgtgggtggaacacttctgaattgggagattgcctcggacctccagacgccgaacatctcagcacatcccgctctgggctttaaacgtgacccctcgcctcgactcgccctgccctgtgaaaatgttggtgcttcttgctttcatcatcgccttccacatcacctctgcagccttgctgttcattgccaccgtcgacaatgcctggtgggtaggagatgagttttttgcagatgtntggagaatatgtacctcggccgctctagaactagttggatcccccgggct

SEQ ID NO: 5342 - DNA, 383 bp, Homo sapiens
  misc_feature 199, 326, 366: n = A,T,C or G
ctccaggaacgccgaccactccactttaggtatcatacgcgccacgaagttggggttgaattccacagggcagatacggacctcggtggcctggaggcgcagggggaagccacgggaccccaccccccgcacatgcgagctcagcagattgtgggtaagcagtttcatgtcgccgcacaaactcccccgcgtacctcgngccggggcagaagttgagaccacccagcagaggagctaggccagtccatctgcatttgtcacccaagaactcttaccatgaagaccctcctactgttggcagtgatcatgatctttggcctactgcnggcccatgggaatttggtgaatttccacagaatgatcaanttgacgacaggaaagga

SEQ ID NO: 5343 - DNA, 392 bp, Homo sapiens
cttagggcgaattggagctccccgcggtggcggccgaggtacgcgggggcagttccttggagagcttggagccgcgcgccggagggaataggaaagcttggttacaacccgggacacccggagcttcaggatggttcgtaccttactagttacccagcaagtcactaacatacagaaacattcatcatgagaagcaagaaacactacccatcccttctgcattttagcaacttgttactcctaagcaacagtgctcacatcactgaggtctgtgaacaaagttcacattttacatccttaaagagcatttgttgttatctgaacctctgctctgctcttcccaaagcataaactagtgtttttatgaataataaaatcttcgtacctgcccg

SEQ ID NO: 5344 - DNA, 241 bp, Homo sapiens
  misc_feature 2, 5, 53, 87, 92, 93, 98, 118, 176, 188, 202, 222, 224, 240: n = A,T,C or G
gncgnccgggcaggtacgcgggggagaaccccaataataacccgatccacccnaacctgcggtccaccgtctactgcaacgctatcncccanngcggngaggaggagtgggacttcanctgggagcagttccgaaatgccacactggtcaatgaggctgacaagctccgggcaagnccttgccttgangcaaaagagttgtnggatcctgaacaggtacctngncccgctctagaactant

SEQ ID NO: 5345 - DNA, 262 bp, Homo sapiens
  misc_feature 35, 37, 49, 133, 157, 164, 165, 172, 179, 180, 215, 247,248, 249: n = A,T,C or G
gggggggttccggttgtctggagcccagcggcggntntgagagtccgtngggagcagcttccaggatcctgagatccgtatcagccggggtcggacccggctcctcaagagttactgatctatgaaatggcanagaatggaaaaaattgtggacccnagacgtnntaccaantgaacanngaacatcataagtgggaaatttcacagaccccttntttagttgaatgaaaagaagaggaagggagcnnnaaagaaaggcaag

SEQ ID NO: 5346 - DNA, 328 bp, Homo sapiens
  misc_feature 2: n = A,T,C or G
tnctatagggcgaattggagctccccgcggtggcggccgcccgggcaggtacaaggttaatattattttgatgaattctgtattcattcaactgctaaatcacaggatacaagacctgggttgaactttttcttaaatagtttacatgggcagtccctggtttgctgggcagtttcctgtctcatcaaatccctggcaagctgggagggagggaggagatgctgagcagcctctatggtccttcttgaaccaagctgctccctgctggatatgacaatggctcagaagcagactagcaattctcaaaggacagggagaaaaatcacca

SEQ ID NO: 5347 - DNA, 257 bp, Homo sapiens
ccgcggtggcggccgcccgggcacggtacgcggggcctttccgggctgtctgacacgatgcaagtgtcagcttgtgttggccggttgcctttctttcgcaagaggggaaaatatcctcacagactttctgtgttctcagagacgatcttcttccctagaaagaagtcgcttacggttggcgtttccctcaggcagcgcccgtgggcaagcccacaggcccttgtaaggcgcgcgccgcggtcccgcctctttccttt

SEQ ID NO: 5348 - DNA, 320 bp, Homo sapiens
  misc_feature 37, 40, 62, 87, 119, 135, 137, 182, 188, 195, 202, 213, 229,254, 271, 290, 298: n = A,T,C or G
ctacttagggcgaattggagctcaccgcggtggcggncgnccgggcaggtactgctcgcctncgttcttttgatgtaagcgccctgngagctttattatgaatgttcctgttcctcttncctttgtgccttccgntnctttccctttttggaaggtgctctgtcatctacatcttcttccantgtttntctttgntcttcangttttgcaaanatacttttcactcaanaccccttggatattcatgactgcangaaaactttttggcttnggctttgtctagaaacttntgatattnggcaatcttctcatccagtgct

SEQ ID NO: 5349 - DNA, 126 bp, Homo sapiens
  misc_feature 48, 52, 72, 81: n = A,T,C or G
atacttagggcgaattggagctccccgcggtggcggccgaggtacttngttnttttttttttttttttttgntgctccagncaatgaaagggacactttattgaggctccagggccacggggcctg

SEQ ID NO: 5350 - DNA, 426 bp, Homo sapiens
  misc_feature 296, 299, 301, 379: n = A,T,C or G
tacttagggcgaattggagctccccgcggtggcggccgaggtacgcgggggatcacctgaggttgggagtttgagaccagcctgaccaacgtggagaaaccatgtctctgctaaaaatacaaaattacctgggtgtggtggctcatgcctgtggtcccagctacttgggaggctgaggcaggagaatcacttgaacccgggaggcggaggttgcggtgagctgagatcgtgccattgcactccagcctgggcaacaagaacgaaactccatcacataaaaaaaaaaaaaaaaaaangtncncgggggaggcgaacaatggcggagctgggcgaagccgatgaagcggagttgcagcgcctggtggccgccgagcagcanaaggccgcagtttactgcacaggtgcatcacttcatggagttattgt

SEQ ID NO: 5351 - DNA, 463 bp, Homo sapiens
  misc_feature 2, 7, 15, 25, 26, 32, 39, 60, 83, 91, 97, 105, 106, 108,114, 116, 117, 122, 124, 128, 133, 134, 136, 137, 138, 143,144, 173, 183, 189, 194, 199, 212, 217, 219, 230, 232, 241,255, 285, 298, 359, 364, 387, 448: n = A,T,C or G
gnccggncaggtacncgctgtggcnnctgcancgcgcancatggctgtttcaaatattanatatggagcagcacattacaaangaagtatngaatgnacctaaannanatggcntnntaaanangggngcttnngnnntatanntaggctggggagcacttaattttttccanttttaaaaangggaantgctnctggnggctttaaactcnccctntnccctttttggncnaaaggattngggaacaaaaagcncattcttggggcaggtcaaggggggccaangggactggtttgngagggaagaagtttagcccaaagtatagggctcttgcccagatgccatcacatccctgatnctgcnatatgctttgaagcaccttttcntgagaaggggaaaagggggaatcttttggactaagggttccttggctccagacctggaatncacaaaagccaaacc

SEQ ID NO: 5352 - DNA, 441 bp, Homo sapiens
  misc_feature 202, 210, 237, 274: n = A,T,C or G
cactacttagggcgaattggagctccccgcggtggcggccgcccgggcaggtactggcttctttaacatgcgatgaacgttcttttccctcctgggttgttcatccacgacagtctctccctgtgctccttcatcacctttccctctctctttgatggctacagagtggtagggcctggtgcttagtcgatgaaggaatggnaacccatnttcagtgctggttggaagaattttccnccagagcggctggagaaccttgcgctcaaatcttctntggttgatgaagaggcgaggaatcaagtgactgatctggaagaaatatctcgcagcactgcagctaacatcacagaacttaagttgtgttttgtgttgtgtgcccacacgtagacaaatggtgtacctcggcccgctctagaactagtgggatcccccgggctgcag

SEQ ID NO: 5353 - DNA, 389 bp, Homo sapiens
  misc_feature 44, 48, 61, 63, 64, 65, 71, 72, 119, 132, 144, 159, 163,172, 175, 187, 196, 214, 225, 229, 233, 234, 244, 247, 254,272, 327, 375: n = A,T,C or G
ttagggcgaattggagctccccgcggtggcggccgaggtacttncttntttttttttttcntnnntgcttnnttcagccttgacaactcccttttttgctgcatcaggctttcctttanctcgatatgcagnaatatccttttngtatttttccttcancttngcagccttnttntcataaggctgnttgtcatcntgcagcagaggtaatttncacatattatnccantttnnttcgtaaacntcnccaaatnggacaggcccaggagtgntctacctttgatttttgggccgatactcacgagcagaataaaggaaggaaggccngaaggaggcctttttgggtgcatttgggatccttgaacttcttttttnggctcccctttggg

SEQ ID NO: 5354 - DNA, 471 bp, Homo sapiens
  misc_feature 219, 221, 260: n = A,T,C or G
atacttagggcgaattggagctccccgcggtggcggccgcccgggcaggtacttttttgattcttcttttttccctggctctcatcatcctgcccagcttcagtccattccagagtcgaccagaagctgggtctgaggattaccagcctcacggagtgacttccagaaatatcctgacccacaaggacgtaacaagaaaaattctgggagacccaagtngntagaagtcccagactgaggggagccaccttggagccaanggatgcaaattggcttcaacaaggacacttgcttgagaagatgggagggaagccaagacccagtgggcgcatccggtccgtgctgcatgcagatgagatgtgagctggaacagaccttcctggcccacttccctgatcacaaggaatcctgggcttccttatggctttgcttcccactggggattcctactttaggtgtctgccctcaggg

SEQ ID NO: 5355 - DNA, 444 bp, Homo sapiens
  misc_feature 216, 237, 256, 266, 300: n = A,T,C or G
actacttagggcgaattggagctccccgcggtggcggccgaggtacagtgccatttcttagaaatcactcctcacgggaacacacacttatgagtgacgtgtagagattttagttagttagttagttagttagttattatgtgcgcggggaggtggggggacggagtttggctcttgctgcccaggctacagttgcaatggccctaagggggactnaaaggagttcaaccctattgncagaagagggacaacgttnattctgagcngtaagggcccgcagccgaaaggtggcagggcccncgcttttaaaggctgaaatcccggcggctcaggccttgtcgtttccagcactttgggaggcccaggaaggtggatcatttgtggtcaggaagttcgagaccagcgtggcccaacgtgggagaaaccccgttcttctactaaaaa

SEQ ID NO: 5356 - DNA, 460 bp, Homo sapiens
  misc_feature 205: n = A,T,C or G
actacttagggcgaattggagctccccgcggtggcggccgaggtactcctaggcctctctgggagtggccttctgcgtttttaaattttatttattttaaatttttctttttcttttttttttaagacagagtcttgctctgtcacccaggctggagtgcagtggcgcgatcttgactcactgcaacctccgccttctaaggttnaagggaattcttctgcttcaagcctcctgagtagctgggattataggcgcctgccattacgccaggctaattttttgtatttttagtagagacggggtttcaccatgttggccaggtggtcttgaactcctggccttaagtgatctgcctgccttggcctcccaaagtgctgggattacaggcatggagccaccacgcccagccttctttatttttaagatggggtcttcgctctactgtccaggcttgcagctt

SEQ ID NO: 5357 - DNA, 357 bp, Homo sapiens
  misc_feature 86, 115, 132, 169, 193, 203, 205, 208, 212, 222, 224, 230,280, 297, 302, 314, 345: n = A,T,C or G
atcgactacttagggcgaattggagctccccgcggtggcggccgcccgggcaggtactttttttttttttttttttttttttttgntttgctaattgctttattcaaaagttganaccacccagcagagganctaggccagtccatctgcatttgtcacccaagaactnttaccatgaagaccctcctactgntggcagggancnttnaatntttgggcccnanttgcangcccatggggaaatttgggtgaatttccacaaaaatgatcaaagttgacnacaggaaaggaagcccncactnagttatggcttntacggctgccactgtggcgtgggtggcaaangatcccccaagg

SEQ ID NO: 5358 - DNA, 376 bp, Homo sapiens
  misc_feature 162, 176, 184, 199, 201, 221, 228, 376: n = A,T,C or G
ccgcggtggcggccgcccgggcaggtacaatatttaagacacaaattcattaggtatgggctcaggacagcttgctcttatttaatacttgcgtgcttgtggttttgcacaatggatgggtattagagtttgccttggatacttggcattgattagactgtnctgaaatttggttntgcctaantcaaaaaaaattctngnttattggttctttcaacaanaaatagnatgtagccactttaaaaatagttacattgttttccagattaagtaaatatttcagttaggaagaatacatatttttatttttattttcagtttttgagatggagtctcactctgtcacccaggctggagtgccagtgggtgtaatctn

SEQ ID NO: 5359 - DNA, 124 bp, Homo sapiens
ccgcggtggcggccgaggtactttttttttttttttttcccggggagtcggcctcggggctctgctctcctacctcagtctgccctaccctggaatggggaaaatgcggacatgccactcagtc

SEQ ID NO: 5360 - DNA, 458 bp, Homo sapiens
  misc_feature 326, 392, 418, 420, 438: n = A,T,C or G
atcgactacttagggcgaattggagctccccgcggtggcggccgggcgcggtggctcatgcctgtaatcctaacactttgggaggccaaggcgggcagatcacaaggtcaggagattgagaccatcctggctaacacggtgaaaccccgtctctactaaaaatacaaaaaaaattagccgggcgtgatggcgggcgcctgtagtcccagctactcggggaggctgaggcaagaagaatggcgtgaacccgggaggcggagcttgcagtgagccgagattgcgccactgcactcccgcctgggccacagagcgagactccgtctcanaaaaaaaaaaaaaaaaaaaaaagtacctcggccgcccgggcaggtacttttttttttttttttttnaagtaactggtctgtaagtgcatatntntagaaaccgtccccgcanatgaatgagggccagtggcc

SEQ ID NO: 5361 - DNA, 448 bp, Homo sapiens
  misc_feature 147, 194, 195, 196, 303, 333, 414: n = A,T,C or G
ctatagggcgaattggagctccccgcggtggcggccgcccgggcaggtacgcggggcgcttgcgcgggttgagggcggtggctcaggctcctggaaaggaccgtccacccctccgcgctggcggtgtggacgcggaactcagcgganaaacgcgattgagagcagtgtgtggattacactatcactggaaaaannnccaatttgagaaataaagggaaaaagaacttgggaagaatgcaggacctttgggttcctgttagtgggaaacactgtaaggtcccagaaatggaaaagaaaatgaantaaatcagcagttatgaggcagagcctaangagaactatggcaacatcaggtgactgtcccagaagtgaatcgcagggagaagagcctgctgagttgcagtgaggcgggtntcctgcaggagggagtacctcggccgctctagaa

SEQ ID NO: 5362 - DNA, 461 bp, Homo sapiens
tcgctacttagggcgaattggagctccccgcggtggcggccgaggtacttctgcctcagcatctcggagaatgtagttctgctcatctggaaaacagaacagcacatactctgaaaagtgtggacacgtgaagtgtggcaagtgtgacccacaaaattctcgcccatattcagcgtatggaccagtttgctgactgctgggccagggaccacccacatcatgacagaaaatgcagggatctgttcaccaacggccagaaatacaaaatcaatccctgagtcaaccagcagatagaaaggctgctttttaggtgaaaggagaaaaagaatgtctataatttggaaaaacaaaaaatgatgaataaaaaaaaaaaaaaagtccgcgcggtaactgggtttttaaaatagctggaatgtaatatttcatcaatataacctttcccccattctttgtggttgggt

SEQ ID NO: 5363 - DNA, 433 bp, Homo sapiens
  misc_feature 2, 181, 184, 236, 287, 332, 401, 404, 421: n = A,T,C or G
gnggcggccgaggtactttgtttttttttttttttttttgcttcgggtgaatcactttaatgctgttaacggcaagtctgtaaaaggttcaggacaaagttcttttttctttcttttttaattataaaactaacagctgttagaatctttttttctttttttccttttttctttttcccanctncaaaaaatacttttgggggagatgcattattaattttaaaaatatattaatnttgcaccaaaccaaccaaaaagggttaaattaaactaaaaggaaataattncaaagagaaaaaccccatcccgtcaaaaaaagattcagcattctntccatccccaccccccccttcactgaaagggttttgaagtgggaaaagtggaccctcactctctcgggnggnccccttgaccccacgancccctttttcaa

SEQ ID NO: 5364 - DNA, 385 bp, Homo sapiens
  misc_feature 80, 134, 173, 212, 219, 340: n = A,T,C or G
cactacttagggcgaattggagctccccgcggtggcggccgcccgggcaggtacttttttttttttttttttttttttgnattttttaatagagatagggtttcaccaggttggccaggctggtgtcacaactnttgacctcaagtgatctaccacccttggcctcccaaagngctgggattataggcgtgagccactgtgccccggccaanattaaanaattttttattagctactacagcttaaaagtagctgctatgggagtgtggcctttttgattaaatactagctgatcaaccctagaatataaattcttgttttataacatttagatttaaanaacaataagaatgtaagctccatgaaggcaagaatgcctttttat

SEQ ID NO: 5365 - DNA, 386 bp, Homo sapiens
  misc_feature 163, 197, 240, 252, 259, 266, 270, 287, 294, 295, 296, 297,307, 310, 321, 332: n = A,T,C or G
ccagtgttactttaattggactgccttcgtaattcattgcctctgcttcaacaatgtgcaactcatcctttgcaccagcccctaaactgaccgttcttaaagataactggtgctcattttcatcattatccaccttaaagtgataatctttgtcggcctttanttcacaacccgaaaaagataagttctgggggccntaaagggggctcattgttccattgtccatcgaatcttccatcngggtggggcggnccccccncttaagnttangaaaaaaaaagggcggnccgggannnnaaaaaaacgntgntccaaaaaaanaacccgcgcangacggaatcacaccaggggaaaggacgcaggctccccgcgtacctgcccgggcg

SEQ ID NO: 5366 - DNA, 438 bp, Homo sapiens
  misc_feature 30, 106, 110, 155, 178, 180, 181, 192, 228, 229, 241, 288,294, 309, 325, 337, 339, 344, 363, 406, 421, 431: n = A,T,C or G
gagggacgcgggggaatccagaagggaaanattgcactggataatttaaaaacacgctggggagaaaactggggaaacaaaggatttatcctcatggctcgaaatntttnacaacgcctgtggcattgccaacctggccagcttccccaagatgngactccagccagccaaatccatncnngctctaccatnactttccacgatggcgcagtgtcaaccgatgcactnncggaagggagtnggtgtgctatttttgaagcagatgtggtgatactgagattgactgtncagatnccccatttgttgtgngcaaacaaatgatccntcccactttgcntnctctncacccatgacctttttcantgtggccatcaggactttccctgacaagcgagcgtacctaccnggaactggccgttcnacgaactagnggatccc

SEQ ID NO: 5367 - DNA, 448 bp, Homo sapiens
  misc_feature 33, 35, 38, 51, 73, 83, 93, 97, 114, 116, 130, 158, 164,173, 180, 191, 216, 221, 229, 245, 246, 250, 251, 260, 264,265, 273, 275, 291, 336, 342, 358, 360, 382, 384, 389, 394,414: n = A,T,C or G
cgggcaagggacgcggggaaggccagcttgaanancanccggtgggaaacngaggcccgcaacgccctacagngggagctttntaaacgggancccnccgcacttttgaggcanancgggcacagacccnggcagagggacagcgccaggcccaggangaggangcccccgcngaacaanaaagggcaaancccggaggccggagaaacgccaccnaccgncgccagcngggaagaaaggccganngacnncaaaaaccngggnngaagcccnanggacagccagcaaccnccaaggcaaaaccagccaaaaaagaccaccacccgcccggaaaangggganaggcaaaagaggacgncnggagaccaacggacaccaaaancnccgangcacnaagccagcaaaaagcagggnaccccgggccgcccaaaaaaccagggggaacccc

SEQ ID NO: 5368 - DNA, 472 bp, Homo sapiens
  misc_feature 164, 169, 175, 195, 224, 239, 254, 256, 276, 278, 280, 294,304, 319, 320, 325, 329, 334, 335, 338, 341, 350, 360, 373,378, 386, 392, 398, 407, 408, 412, 416, 419, 420, 421, 425,433, 443, 450, 455, 462: n = A,T,C or G
gggcgaattggagctccccgcggtggcggccgaggtacactgtgtctctatgtgaatatggacagttagcatttaccaacatgtatctgtctactttctcttgtttaaaaaaaaaaaaaaaaaaaaaaaaaaactgtacgcgggggaggggctctgccttctgnagtgncgctgnttgggcccctggcggattgnaagctgctggtttttgcgcttggaaaaancgccaagaagggttngcttttttttgtcangnattcccccccacggataatntncngccaaaaagagtcntcacccccantggggttgaaaaccnnttcangccnttccnnaanaanaaaaaaatntgggggattnttaaccaaatttnggggnaagggaanaaaaanctttgnggggttttnngaanaaanggnnnaaancccaaaangggttttttnccaatanttttnagggggncccaaaaaaa

SEQ ID NO: 5369 - DNA, 784 bp, Homo sapiens
  misc_feature 1, 6, 15, 19, 20, 22, 23, 36, 40, 49, 51, 54, 56, 66, 83,84, 92, 96, 97, 100, 104, 113, 117, 120, 124, 126, 143,151, 160, 161, 163, 164, 168, 169, 171, 172, 174, 208, 210,215, 222, 225, 226, 227, 233, 234, 235, 236, 237, 245, 253: n = A,T,C or G
  misc_feature 256, 263, 265, 294, 295, 296, 303, 304, 312, 313, 321, 326,330, 334, 337, 348, 350, 354, 355, 369, 370, 371, 373, 391,394, 402, 411, 412, 413, 429, 430, 433, 440, 441, 455, 463,465, 466, 467, 468, 471, 487, 488, 489, 490, 497, 498: n = A,T,C or G
  misc_feature 518, 521, 522, 525, 535, 536, 553, 554, 555, 558, 584, 585,590, 591, 592, 593, 594, 596, 597, 599, 600, 606, 607, 609,623, 624, 630, 643, 645, 651, 660, 679, 692, 698, 699, 700,701, 708, 709, 710, 711, 712, 725, 726, 727, 728, 729: n = A,T,C or G
  misc_feature 730, 731, 735, 736, 743, 747, 748, 749, 753, 758, 759, 760,761: n = A,T,C or G
nggaantcttgaagngggnngnnggccatatagaancaanggacacttnangancncagggaacgnggggaagaaaggcccannggaagggngggnngtntttntaagacttncccnacnaggngnggggggttttttttttngaaggaanggggaaggnncnncacnncnngncaaccccggggggccaggaaaagggggccaaaancngcaanaggaaanccnnngggggnnnnnaccggggnaacccccnccnggccccngncccggggggaaaaacaaaagggggaaaannnccacccnnggccccannaagccccnccccngggnaggnaangcccggggggngnaaannaaaccaaggggccnnncncccaaccccaaccaaccnccngggggccnaaaaagggnnnaaaggaaaaaggcccnnccnaaagggnnaaggaaaggaaccnaagggggngnnnnggngcaaaccccaaaaggnnnnggggggnnccaagggggcccgggggggnccnnccnggaaaaaccnncccccggggaacccccnnnaangggggggggaaagcccccaacccccnnggggnnnnncnncnncccccnncncccaaaaaaaaggnnggcccnggggggggaaaananaaccangggggccanggggaaaggcccccaaccnggggcgggccccngggggnnnnaaaaaannnnncccccaacaaaannnnnnncccnnaaaaagnaaannnaaanggggnnnngggggcccccaaaccaaaaaaaa

SEQ ID NO: 5370 - DNA, 216 bp, Homo sapiens
  misc_feature 4, 15, 16, 202: n = A,T,C or G
atanggcgaattggnnctccccgcggtggcggccgcccgggcaggtactttttttttttttttttttggtaatcattgttatcgtttattaaacaacagggccacattcaaacgctttccaattctctctaaataacagcctaacgctgacgtttttgttggcctgtatctcataattatttttatttagaggaatttgggnattggccggggttt

SEQ ID NO: 5371 - DNA, 404 bp, Homo sapiens
  misc_feature 21, 45, 205: n = A,T,C or G
cttagggcgaattggagctcnccgcggtggcggccgcccgggcanggacgcgggggcctcgacggcatccccttcacagtggatgctacgagccagatccactgcattgaggactttcacaggaagtttgccccaagatgctcagtgtgcggtggggccataatgcctgagccaggtcaggaggagactgtgagaattggtgctntggatcgaaatttttcacattggcttgttacaaagtgccgaaggaagtgtggggctgcttgctctcctcttgagggcgaagtgtcagggctgctacccgctggatgggcacatcttgtgcaaggcctgcagcgcctggcgcatccaggagctctcagccaccgtcaccactgactgctgagtcttcctaagaagtacct

SEQ ID NO: 5372 - DNA, 605 bp, Homo sapiens
  misc_feature 571, 572, 574, 575, 576, 577, 587, 589, 590, 591, 602: n = A,T,C or G
tagggcgaattggagctccccgcggtggcggccgaggtactatttaatatatttctccatgaactttttgtgaaattcagatcgcagtgtgtcatttacaaatcttttgtctttcttctggtcatctacaccttttgcacagttcttgaagacaacgtcatcatcccaccttcttttaactttgaagttggcctgaggctgggatggggaaaaggagaaggtgatttgagccaactttcaaagcagtattcaagcagagacctaccctctcatacaaagataaaatacagacagactactcaggatgcccctgaagaggttcgtaaccgtgacttcaggagagagttggaagaaagagagagagctgctgcaagagagaaaaataggggatcgtccacccgagaacatcaacctcctctttagtgtcaaaaaagccacggttagaccagattcctgcgccaaccttgatgcagatgaccctctaacagatgaggaagatgaaagattttgaagaaagaaagtggatgatgatgatactgcagctcttcttgcagaactggaaaaaatttannannnncaggaaaatnannntgggtacctgnccg

SEQ ID NO: 5373 - DNA, 350 bp, Homo sapiens
  misc_feature 196, 336: n = A,T,C or G
caattggagctccccgcggtggcggccgcccgggcaggtacattcccctctgcgttgaatgataagcgtgtgcgtgttccaccactgtgccctgttcaaagttagctgggtggctgtgccctgctcaaagtcacttgggtgaggggcgcccgtgggagccaaaaatcccatcttacacccaccccctgccactgtnggagttgggctgtgacatgctggagaaaggtgtctttgtctaattattctgcctaagggcatgccttttgttaattagtaaaaggaagccttatttgtgctctgcaaaatgggggtgctggttaggaaggtaatttcgtngattttgaaccccc

SEQ ID NO: 5374 - DNA, 464 bp, Homo sapiens
  misc_feature 308: n = A,T,C or G
actacttagggcgaattggagctccccgcggtggcggccgcccgggcaggtacctctctgcattatcccgccagacactgtattttatgcattcatgtctaggatacagtgtgaaaattaaaaagtttagagggcagatgcaattgtggcaagtgacctgccaataaagcaggtgcagctatagaagctggcataggtatatccttaaatggtgctttctccctgggcttgtctttttgttgtttttttccccctatattcagagctccttgagaagtgataaacacctccagctttctaacatcctncccacaccatctcaccatatccatctcccagcatccatctgcattcagctaagggcgggaaactgacccagtgcctgtgttgcagaccatttctgaggtctccaccatccaaggaggcacaagccgtcattactgtcctccatgccttcagcagcc

SEQ ID NO: 5375 - DNA, 168 bp, Homo sapiens
ggcgaattggagctccccgcggtggcggccgcccgggcaggtacgcgggggagactgtcccaagggtgctgaagaatccagtggcaggggttctggctgctttccatctgagtgtgggatgggaggggtgttcatgatcatttggatatagcaatctacttcttgaga

SEQ ID NO: 5376 - DNA, 432 bp, Homo sapiens
gagtggcaaagcaggcaaacacgtcgtcggtgcaggagaagtgggtgaggtgcgggaggatcacggactgaccccggcactggccccacatgtacctcggccgaggtacgcgggtcacacatgacgggtttggcttcatgctggcgtttggggacatggcctgggtgcccttcacctacagcctgcaggcccagttcctgctgcaccacccgcagcccctggggttgcccatggcctctgtcatctgcctcatcaatgctattggttactacatcttccgtggggcgaattcccagaaaaacactttccgaaagaatccttctgaccccagagtggctgtgcttgagaccatcttctacagccacagggcggaaactgcttggtgtctgggtggttggggtatggtccgccatcccaactatcttggagacc

SEQ ID NO: 5377 - DNA, 374 bp, Homo sapiens
  misc_feature 27, 206, 210, 220, 230, 237, 245, 258, 264, 278, 305, 307,308, 317, 341: n = A,T,C or G
acactacttagggcgaattggagctcnccgcggtggcggccgaggtacgcgggggccgccttcgccgctggctccgtctgttggggggcgaacacgccgcggtcctcgtcgtgatggctctgagagattcctctgcgaatctgtttttagctatcaagtggcatccacgcttaaacaggtgaaacatgatcagcaagtttgcttcngatngaaaaaactnagctggtttngggtagnaagaagcntggaggcttgacnagtggnggtttaagcccatntaagcagctgcttgggatttcaccccntnnttcaggttngatactgcctggatggttcacctntggtgcgcagcaagtgcaaagccagttggggga

SEQ ID NO: 5378 - DNA, 444 bp, Homo sapiens
  misc_feature 201, 215, 240, 256, 270, 303, 311, 343, 352, 379, 388, 401,412, 423, 426: n = A,T,C or G
cttagggcgaattggagctccccgcggtggcggccgaggtacttttttttttttttttttttttttttatggcaaaaatatttattattgaacaactgagtgtttcattcacttcacattttacacatacttaacacaagcagaaggggaagtttcagtgtcagaagcaggggtcgttctccttaactgaaagactatcangagaggagcctttngtgattaggcaatccaaattttganattttttaaaacaccnttaaaaataaaggntgcctataaaatatggaaacacataatattttntgaaaatntttttggaagaatgtctttttatcttcattgntactatctnagacattttgagggttatttaacacancaatgccanctgcttaacattnaaatttagacncactgattatntgntctactctcctgaaatag

SEQ ID NO: 5379 - DNA, 266 bp, Homo sapiens
  misc_feature 29, 127, 130, 148, 171, 177, 191, 194, 217, 233, 242, 251,259: n = A,T,C or G
ccgcggtggcggccgcccgggcaggtacncgggcatcttcaataccagcaagaagctattcagaagaatgttgaacagtcatcggatctacaggaccagttgaatcatctgttgaaatagaatgacntgnaagagtgctgtaggactncttttgcctaatgctgaggagtnaatacnttacacagcttgtnctnttggggttttgggtttttctatnttcttctccaaaagtntaagttatnaaaaagttntgtgttangggccgg

SEQ ID NO: 5380 - DNA, 158 bp, Homo sapiens
  misc_feature 28: n = A,T,C or G
acactactatagggcgaattggagctcnccgcggtggcggccgcccgggcaggtacgcggggaccaagattaaacgggcatctcagaagaagcacgtgaacccggtgcaggccctcagcgagttcaaagctatggacagcatctaagtctgcccaggc

SEQ ID NO: 5381 - DNA, 873 bp, Homo sapiens
  misc_feature 1, 5, 245, 250, 251, 253, 254, 255, 409, 421, 434, 501, 512,579, 584, 587, 589, 602, 635, 656, 664, 669, 678, 679, 730,731, 745, 750, 756, 792, 804, 820, 832, 833, 834, 837, 846,847, 854, 855, 856, 857, 859, 862: n = A,T,C or G
nggcnaattggagctccccgcggtggcggcccgcccgggcaggtacctgattctttgaacatattattgaactccaaaatgaattcgacctccattcaggcttcctgaaatctctgaagttgctgaaatttgtatattattttccttttccaatgcaagatctgctggtgacgggaaatgctgtctggttttattatggtttataaattaataaatgggctatttaattctggaaaaaaaaaatnaaaanntnnngttccgcggggtcctggaacatttatgttccttttaaagaaacaaaaatcaaactttacagaaagatttgatgtatgtaatacatatagcagctcttgaagtatatatatcatagcaaataagtcatcttgatgagaacaagctatttgggccncaacccaatcanggaaaagagagcnccacgtgatgggagtttctccagaagctccagtgattaagagatgttgacctctaaaggttgatttnaggccaggccntggtgggtttacgcctattaatcccagcatttttggggagtccgagggtgggccagatcacttgganctcangangntcaagatcagccntggggcaaacatgggtgaaaccttgtcttttcnttaaaattccaaaacctttanattgggcnttggngggtggtgnncccataaggccccactacttgtgggggcttaggcagggagggataccttgnnccccggaggtcganggctnccaggngagccaagaagtgccctactggaccttgggccggtntaaaacttaatnggatccccccgggctngcaggaaatttnnnttnaagcttttnnatacccnnnnanctnaagggggggcc

SEQ ID NO: 5382 - DNA, 447 bp, Homo sapiens
  misc_feature 392: n = A,T,C or G
ccgcggtggcggccgcccgggcaggtacgcgggagatccgtgcactgccttcagctctgggttgaacttacagctggactagaggatgggaaggcatcaaaaggaacccagcccaccaggaactaccagcttaggctctgaccaggaaagacaagtgttcaaagctttggggaaacttaaacccaacacgccatttgccgcgacgtcttcaatgggtttggaaacagaggaacaggagcccagcatcatcgggaagctgaaggtcgctggcatgctggcaagtaggcaaagaagtcaacctggtcctactgctcaaaaacctgagcagggatacgaagacagtgacagtgaacatgacagcctggaccatcatctacaacggcacgcttgtncctcggccgctctagaactagtgggatcccccgggctgcatggaattcgatatca

SEQ ID NO: 5383 - DNA, 497 bp, Homo sapiens
  misc_feature 1, 25, 26, 27, 28, 29, 93, 94, 203, 228, 263, 277, 278, 297,326, 345, 346, 347, 422, 479: n = A,T,C or G
ntgggcgaattggagctccccgtgnnnnngccgcccgggcaggtcaatttgataagttttgacatacactcttgaaaaaccattaccacagtnnaaacaaacaagcaaaaaaactaaacattgtctatcacctcctacttttttctctataatccgtctcacctgcccaagccccatataccttggtatgctttgttacttanattagtttgggattttctaaaactntatgtaaatagaataatacattatgtattatttgntgtctggattctgnnggctcagcataattatttngaatttcacgtttttgcatacatcagtangttcattttcatattacgnnntggtgttatattgcatacaaatattacaatttgtttatccatttcacttgctgatgggatatttggggttggttnccagttttagctatttcaaataaaaaataatggggaacatttattttacaagtcttnatatgggatgtatgcctt

SEQ ID NO: 5384 - DNA, 432 bp, Homo sapiens
  misc_feature 71, 73, 79, 80, 83, 89, 111, 123, 131, 158, 211, 236, 244,312, 347, 371, 389, 401, 412, 432: n = A,T,C or G
ccgcggtggcggcccgaggtcttttcttttctaaaaaaagtttttggttagggatttggtttttgggtttngngtttgnnttntctttnctctctcagaaaaaaaaatttnatgctttaaatnaaatccanagacacaccctttcactgctgatgcanaaaaagggaaagggttcttgttcttgagaatttgtttctgatttaaacaaacnagacttagtttaataaaagaaaganaaaaacanaagattcccaggttgttatgtgcttcttctgcaagcagagaggcaaatgttaatgacaattccatatnccaaaagacacattttttacttaaagttttgtccntgtgttaggcaagtctgagcaccnagtgatccacaacgcagncaacaaaagcanccagatagcantgtaccttgccccgggcggn

SEQ ID NO: 5385 - DNA, 490 bp, Homo sapiens
  misc_feature 37, 158, 160, 351, 406, 407, 420, 468, 479: n = A,T,C or G
cgcggtggcggccgaggtacgcgggggggtggcctgngcggcgttggtcccggtgcgtcctgttctacagctatggcccgggccagctgcagctttccgcccgcttgggcgccttgtccggagctgcggccttaggcttcgcttctacggggcgcacngncccaattcccaaatgcctacgggaaaggagctgtttgacaaggccaacaaacaccacttcttacacagcctgccctgttaggggtgccccattgcagaaagccactctgggctgggttattgctagcttccggaacgaccttattctgcaccaacttttactaccaggctctgagtggagaccccagcatncagactttggcccctgcgggaagggacccttgcttctcttgggctggcttgcctnngctctttgagctnccttttgcttaattactgggttttctgggcaagtttttttttttaaanagtttggagtnaaaaagaagga

SEQ ID NO: 5386 - DNA, 440 bp, Homo sapiens
  misc_feature 386, 404, 427: n = A,T,C or G
cgcccgggcaggtacattgagctctctctggcatgctccccactctagttaagaggggctggggtatggagaagaccgtcccagcccggccgctgcagcctcctactcctgggcctccttgcgggtcaacttgtagatctcagtgggtccgtcacatgggtgataagtgggtgggtgagctggagttcttccccactatggacacccagatcgccattggactggtcttctcatagtttttatgggatggtgcatacaagaacatcagagcaaagacatacagattccacatcccatagatgcctgtgaaaaaggcacttgtcacttggactgtgatgccgccccatttccaatggccttccgttacctgactaacgatgaaaaanatgacagtcatggcaacncaggccaaggtgataagcatgangaacttgaaccta

SEQ ID NO: 5387 - DNA, 504 bp, Homo sapiens
  misc_feature 480: n = A,T,C or G
aggtacgtgtccaggggatgtcgccaaagcctttggagctggagcagattttgtcatgctgggaggaatgttttcgggtcatacggagtgtgctggagaagtgattgagaggaacggacggaagctcaagctctttacggatgagctctgacaccgccatgaacaagcacgcaggaggagttgctgagtacctttctcggggtgtctgcgtaactgcccagacttgccttggtttggtcagatgacacctcctctgggactggctagccagcgttcatgtctacattattgatctcgtcttccggtgtgtgagtcactcacctgtgagctcctagaggtcagcgactaaatctggttccatggggtccttgggccctcggagccctaacacaaggcccactactcagttggctcttaatcaaatctgtgaaaccaaattataaaagttgcttttctactagaccttgttgggacaccaangagcccgcgtcggttgcttaactt

SEQ ID NO: 5388 - DNA, 433 bp, Homo sapiens
  misc_feature 393, 398, 407, 409, 411, 416, 433: n = A,T,C or G
cgccccgtccaagactatttgtctttgagctctgttctctcacacgtgtccggcctgggctggctggcctcctacctgccctccttcctccgtgtgcccaagtggattattgccctctacactagcaagttctaaccctctggctgacactacgtctctgcttgtcttcccatttggacttggtggtttgtcctgtctcagtgaaacagcagcctttcttgtttacccatacccttgatatgaagagaagccctctgctgtgtgtcccgtggtgagttctggggtgcgcctaggtcccttctttgtgccttggttttccttgccttctttttactttttgccttaatattgaaaaatgctcttggagctaataaaaagtcttatttctctttnggaanaaaaaatgnangnataanataagtacctgcccggn

SEQ ID NO: 5389 - DNA, 425 bp, Homo sapiens
  misc_feature 372: n = A,T,C or G
ccgcggtggcggccgaggtacgcggggctccctgcctcaggctctcaccctcctctcctgcagctccagctttgtgctctgcctctgaggagaccatggcccagcatctgagtacgcggggacaattatgtgtcttggagttgctcttctcgaggagtatctttcagaaagttaagaaggatacccaggaattgaactcagctccacaccaagcagacggtaatagacatctacagaactctccaccccaaatcaacagaatatacattcttttcagcagcacaccacacctactccaaaactgaccacataggtggaagtaaagttctcctcagcaaatgtaaaagaacagaaattataacaaactgtctntcaagaccacagtggcaatcaaacctagaactcaggattaagaaactcactca

SEQ ID NO: 5390 - DNA, 386 bp, Homo sapiens
ccgcggtggcggccgagagctaattccctcttggcttcaaaatccatcctatgcttggagatgctggggctgggattctacaaaccacattctggctttgtgccctgataggctcagcccccagggggagctagaaggaatctgctaggctaaaggaggaagtaggaagtggccccttgctcacttcctgtttgcttcctgttcactttctatcagcttcctgtcccttgccagacaggttgctaaccctagcagtgctttttcttcacccaggcaagtggcaaactcctcccagaaaacattttcaatgcagtttttggttttttccaacactcacaaaaagccagccttaatgggggggtcccccttcagagacacccaaacaa

SEQ ID NO: 5391 - DNA, 453 bp, Homo sapiens
  misc_feature 285: n = A,T,C or G
ggcgaattggagctccccgcggtggcggccgaggtacacctgcaaggctgtcaacagtcttggagaagccacctgcacagcagagctcattgtggaaacgatggaggaaggtgaaggggaaggggaagaggaagaagagtgaaacaaagccagagaaaagcagtttctaagtcatattaaaaggactatttctctaaaactcaaaaaaaaaaaaaaaactcaagatagtaaaagcacctagtgtgatagattatcggttaggtcatttgtgggttgattcttcanaaacagcagttgatacctagcagcgttattgatgggcattaatctatgttagttggcaccttaagatactagtgcagctagatttcatttagggaaatcaccagtaacttgactgaccaattgattttagagagaaagtaaccaaaccaaatatttatctgggcaaag

SEQ ID NO: 5392 - DNA, 453 bp, Homo sapiens
  misc_feature 187, 434: n = A,T,C or G
ccgggcaggtaccatcatccgatgtatagcctttccagcgaactttgtaaagaactttaccctcctcggtcttcatgtccaggatcttctccacctcgaacacatcctctccgtcctcctcactgtcgccaaaggcctccgctcctctcgcggctgcgtcattatctttcgcccactactccaactncttcttcgacttcggccaactcctcagtgctgtcggcagctgacacagggactgcggtcacccttgctccctccgcaacctgctccatcctagcagctccgcaaaccgccgagaaaaaaccccgctgcgacaaacaccccaagcagcccccgcgtacctcgggcccgctcttagaactagtgggattccccccgggctgcagggaattcgatattcaaagcttaatcgatacccgttcggaaccttngaaggggggggggccccgg

SEQ ID NO: 5393 - DNA, 238 bp, Homo sapiens
actactatagggcgaattggagctcaccgcggtggcggccgaggtacttttctcgtcctttccccagggtgcacgtaaccctcaagcactaggaccgtgcggaatccaggctgcgatggcaccttcatttaccgcccgcattcagttgttcctcttgcgggagctaggctttctcataggcttagtaggccgagcagctttagtcttagggggcccaaagtttgcctcaaagacccct

SEQ ID NO: 5394 - DNA, 471 bp, Homo sapiens
  misc_feature 272, 312, 436, 437, 446: n = A,T,C or G
ccgcggtggcggccgcccgggcaggtactgacatcaaggactcaaaagcttattaccacctgcttgagcaggtggctccaaaaggagatgaagaaggtgttcctgctgttgttattgacatgtcaggactgcgggagaaggatgacatccagagggcagaatgcatgctgcagcaggcggagaggctgggctgccggcagtttgtcacaaccacagatgttgtccgagggaaccccaagtttgaaccttgcttttatttgccaacctttttnacaaaatacccttgcccctgcacaaaaccagaagaaccanggacatttgactggggggggctctttgaaaggtgagaccaagagaaagagcggacatttttaggaactggatgaaactcccttggggtgttaacccttcgagttcaaattcattttgttacctnnggccgcttntagaacctagtgggaatcccccggg

SEQ ID NO: 5395 - DNA, 398 bp, Homo sapiens
  misc_feature 145, 155, 219, 225, 252, 258, 339, 347, 354, 364, 371, 378,383: n = A,T,C or G
ccgggcaggtacgcgggtgataccttccgagtggagtttctggtggtccctgtgggaggcctctcatttttagttaatcacgatttctctcctcttgagatcctctggaccttctccatctacctggagtccgtggctatccttncgcagctgcntatgatcagcaagactggggaggccgagaccatcaccacccactacctgttcttcctgggcctntatcgngctttgtatcttgacaactggatctgncgcttntactttgagggcttctttgacctcattgctgtggtaggccggcgtagtccaagaccaatcctaatactgttgacttctttntaacttgnaaccctncgggcccggnttcttangaaaccntaagntgggaatcccccccc

SEQ ID NO: 5396 - DNA, 556 bp, Homo sapiens
  misc_feature 247, 283, 426, 508, 515, 532, 553: n = A,T,C or G
acttagggcgaattggagctccccgcggtggcggccgaggtacagattagtgtgcacagagatctctgtagaaagagtagctgccctttctcagggcagatgatgctttgagaacatactttggccattacccccagctttgaggaaaatgggctttggatgattattttatgttttagggacccccaacctcaggcaattcctaccttcttcacctgaccctgcccccacttgccataaaaacttnagctaaagttttgttttgtttttcagcgttaattgntaaagggggcagccagttgcccaaaattttaaatccagaaggaataaaagccttaaggttcaaaaagtttcaataagaagtttcccccattggaaccttattattgaacctgggcccaccaccaggggatccttttttgttanttttaaagggattttcttgaggatttttttgcctttggagccaagggaattaagaataaagggctggtttcttttaaaaatngtcttgnaaaattgggaaaccaanaatttcaaaaaaaaaaaaaanccc

SEQ ID NO: 5397 - DNA, 493 bp, Homo sapiens
  misc_feature 104, 217, 268, 282, 288, 292, 296, 308, 334, 337, 347, 357,409, 448, 481: n = A,T,C or G
ccgcggtggcggccgcccgggcaggtacttttttttttttttttttttttgagacggagtttcgccctttcacccaggctggagtgcagtggggcgatctcggntcactgcaaccttcaccctccagtttcaagcgattctcttgcctcagcctcccaagtagctgggattacaggcacccaccaccaagcccagctaatttctgtatttttagtanagatggggtttcgccatgtttggccaggctggtcttgaactttttgacctnaggtgatccacccngccttnaagncttncccaaaagtgcntgggattacaaggggaaaaaggcacncgnggcccaagcnctgcacagtnactatttttgaggactttacttaatttttgaaacatggattttttttctttnaattcttcacttccaactttttaccctaaaataaattcnattttttaaaaaaaattgcaaaaaataaatcanccccttttttaa

SEQ ID NO: 5398 - DNA, 189 bp, Homo sapiens
ggcccaggtgtgtaggccacagcagccgcagtcctgaaaggctgcaacacccagacctccaggagaggccaggcccaggatgcctcgcctgttcttgttccacctgctagaattctgtttactactgaaccaattttccagagcagtcgcggccaaatggaaaggacgaatgttattaaattatgcggc

SEQ ID NO: 5399 - DNA, 559 bp, Homo sapiens
  misc_feature 34, 37, 41, 42, 74, 78, 79, 84, 87, 88, 98, 110, 147, 174,200, 329, 334, 344, 424, 430, 437, 438, 449, 450, 452, 463,469, 501, 504, 506, 507: n = A,T,C or G
gggcgaattggagctccccgcggtggcggccgangtncttnnctcgaaaaaagcggagtaaggagaaactaacngttnncttanctnnagccattcanaataggacagtntcttttttccattatgtaaagaatccagagtatatcncaataaccggaataaattcttacaacnggaatatacaaaaacattttgaaatnttttttcatctactgattttttatataaacaggattttttaggaataatttatacacagaaagtcattttatgtaacaaattggccatgttattacctttttttttcttacttaaaaaaattttttttnaacangaaaactcanaaaatgcattatttgcggtgcatccattccataccgccttctggtttgattttttttatcccaggacgaagggatcccanaggtanacaaacnntggcaaacctnntnacctaaacctnactggnttagaaagcagacaggtgttttcacccgggcngtntnntccaccggtgggatgtgtgtgcaacgcccaaacatccaaatgaaaaagttgg

SEQ ID NO: 5400 - DNA, 343 bp, Homo sapiens
  misc_feature 23, 149, 171, 184, 192, 309: n = A,T,C or G
ataggcgaattggactccaccgnggtggcggccgcccgggcaggtacctgatttttcatgagccttacagacacacagagacacatacacattgatcttaaaattattctcagtcactgatatgcaaaggaccacactgtctctgcttncaggagtattttagaaatgttncacaatttactgnagacatanagatgatgctgctgcttaggtgccttttagcaagctatgcaaacaatcctgataaaacaagatacatagatgagtcaatctggcttctgagaatttaccaagtgaacagagtacgcngggggatgaatcgtggactacaaggcgttcatcc

SEQ ID NO: 5401 - DNA, 619 bp, Homo sapiens
  misc_feature 330, 363, 431, 543, 603: n = A,T,C or G
ccgcggtggcggccgcccgggcaggtacggccaagggctattggttgaatgagtaggctgatggtttcgataataactagtatggggataaggggtgtaggcgtgccttgtggtaagcccgcgtaccatcttttccagagagagaaagtggaggtccagctgccagagctctaccacaaaataggtgttggcgcaatggcatggtctccacttgcctgtggaatcatctcaggaaaatacggaaacggggtgcctgaaagttccagggcttcactgaagtgctaccagtggttgaaagaaagaattgtaagtgaagaagggagaaaacancaaaacaagctaaaagacctttccccaattgcngagcgtctgggatgcacactacctcagctagctgttgcgtggtgcctgagaaatgaaggtgtgagttntgtgctcctgggatcatccactcctgaacaactcattgaaaacctttggtgccattcaggttctcccaaagatgacatcacatgtggtaaatgagattgataacatactggngcaacaagccctacagcaagaaggacttttggatcataagggcaatgcatgaaccacaanaagctgcatgggttaa

SEQ ID NO: 5402 - DNA, 435 bp, Homo sapiens
  misc_feature 14, 54, 85, 89, 119, 132, 133, 163, 194, 202, 224, 229, 260,271, 289, 307, 317, 345, 395: n = A,T,C or G
ccgcggtggcggcncgcccgggcaggtacgcggggacacagggctcttgctctngcagaatccacaggtctttcttgaggaaatntgtngacagaactttgtgctgcgtttttatctanggaaggaacagannagtgtcgctcctagaaatctagcactgganaaacgaggaaaattcttccagcgatggtctnccactcanagctgaggaagcttttctactnagcanatgctgtgtgttttgatgttgacagcacggncatcagagaanaaggaatcgatgagctanccaaaatctgtggcgttnaggacgcggngtcagaaatggagctggtgaatatgcangttttgatgagacgcagccaacagctgaatctggtggaaaaggaaaagtnattaaacttttaaaggaaaaatttcattttaagaaaataa

SEQ ID NO: 5403 - DNA, 134 bp, Homo sapiens; identical to SEQ ID NO: 3541

SEQ ID NO: 5404 - DNA, 420 bp, Homo sapiens
  misc_feature 62, 95, 125, 137, 161, 183, 305, 333, 387, 410: n = A,T,C or G
aggtacgcggggagagaccagagctgccaccgctgctgcttccaggagtgtgcaggtggcanctgccgctgagcccgcggcggaggatggcaggncttgttccagaaggcttgagggtccccgantgcaccgccctnccaccaattctggtttttcctgtnggagcccaaggagcaagggcanaatgaggaacatgatgtttcttaccgacagttactcatgacgtctccatccaggactgaggggggcatccttctccatctaggactgggggcatccttctccatccagtattgggggtcttnctcctccatccaggacttgtgggtcatnctcttcatccaagaacctgaagggtgtccttttctgcgcttccttggatggcantctttcccttcatgtttataagngacttaccat

SEQ ID NO: 5405 - DNA, 889 bp, Homo sapiens
  misc_feature 21, 185, 578, 589, 617, 678, 719, 729, 734, 744, 745, 774,786, 811, 827, 842, 851, 858, 867, 872, 877, 878: n = A,T,C or G
tatacggcgaattggagcttnccgcggtggcggcccgcccgggcaggtactgagtataaaacaatataaaacaatatgagaaggtctctctcttccctcaagagtgtatgactttgctgcccaggatgatcttgaactcctggcctcaagctattaatttcttcccaactcagcctcccaaagtntgggattacaggcatgaaccacagcgcccagcttaacaggatttttcagagagaaaaagttttttaattttaatgaaatccaccaatttatctattttttcttttacggcatgtgcttttggtgtaatgtctaaaaactatacctacgcctaggttgtaaagatagtctgttttcagttttatagctttccattttacatttaagatatatgatccattttgagttaagtttgtattacatgtaaggttggggttcctttgttttggtctttgacaaatggaagtccacaacatttattgaaactcttcttcctccattggttttaagataaatcccgttggccatacttctgaatgtctatttatggattccctatcttattttattgatgngtatttttggnctctcctccatggatacatgaaggaaanggccttggaccaaggcaatggggaaaggggctggggggccccccagagaaaggagaaggcnctaagatcaggctcaacagcttctggatctgaggccccggnaatatttatngggtnaacttggcannccctgggcctaagtaggactggttaacantgaaaaggcgtnctgggggcaacccaaaaggtacctnggcggtttaaactagnggatcccccggctgnaggaattcnatttaancttttgatnccgcnacctnnaggggggcccg

SEQ ID NO: 5406 - DNA, 409 bp, Homo sapiens
tggagctccccgcggtggcggccgcccgggcaggacaccatcccttccattggactggctttgttggaagaaaagctcagatatagcaatgagaaataccaaaagtttaaggcagtggaagaaagcctgcgtaaagagctggtggatatgctaggtgatgatggtgtgttcttatatccctcacatcccacagtggcacctaagcatcatgtccctctaacacggcccttcaactttgcttacacaggtgtcttcagtgccctgggtttgcctgtgacccaatgcccactgggactgaatgccaaaggactccctttaggcatccaggttgtggctggaccctttaatgatcatctgaccctggctgtggcccagtaccttcggcccgctctagaactagtgggatccc

SEQ ID NO: 5407 - DNA, 218 bp, Homo sapiens
ccgcggtggcggccggcatgctgcagacccgtcagggcgatgtacgcggggctcttcctttctccgccatcgtggtgtgttcttgactccgctgctcgccatgtcttctcacaagactttcaggattaagcgattcctggccaagaaacaaaagcaaaatcgtcccattccccagtggattcggatgaaaactggaaataaaatcaggtacctgcccg

SEQ ID NO: 5408 - DNA, 208 bp, Homo sapiens
ccgggcaggtactacttctccaaactcatagaatttatggacactttcttcttcatcctgcgcaagaacaaccaccagatcacggtcctgcacgtctaccaccatgcctcgatgctgaacatctggtggtttgtgatgaactgggtccctgcggccactcttattttggtgccacacttaatagcttcatccacgtcctcatgtacct

SEQ ID NO: 5409 - DNA, 824 bp, Homo sapiens
  misc_feature 561, 660, 665, 710, 715, 719, 724, 737, 758, 772, 779, 781,791, 802, 811: n = A,T,C or G
ccgcggtggcggcccgcccgggcaggtactcagaattgaccaattcaggaggtgtaaaaataaacagtgttctcttctctaccccaaagccactactgaccaaggtctcttcagtgcactcgctccctctctggctaaggcatgcattagccactacacaagtcattagtgaaagtggtcttttatgtcctcccagcagacagacatcaaggatgagttaaccaggagactactcctgtgactgtggagctctggaaggcttggtgggagtgaatttgcccacaccttacaattgtggcaggatccagaagagcctgtctttttatatccattccttgatgtcattggcctctcccaccgatttcattacggtgccacgcagtcatggatctgggtagtccggaaaacaaaaggagggaagacagcctggtaatgaataagatccttaccacagttttctcatgggaaatacataataaaccctttcatctttttttttcctttaaagaattaaaactgggaaatagaaacatgaactgaaaagtcttgcaatgacaaganggttcatggtcttaaaaagatctttatgtggttgaagatgaaatcattcctaaattaacctttttttaaaaaaaaacaatggatattatggtcccgggnggtgnaattaaaaaaaaaatctttacttggatattcatgtaatatataanggttngggnaatgnacttttattaggnaaaactggcttaactttcatntgtgtaagtggaancaaaggngncataatttcnttattttgggnaataatggntttataaaatttt

SEQ ID NO: 5410 - DNA, 440 bp, Homo sapiens
  misc_feature 164, 231, 238, 309, 336: n = A,T,C or G
ctacttagggcgaattggagctccccgcggtggcggccgcccgggcaggtacttttttttttttttttttttttttttgggacaagatcttgctgtcacccaggatggagtgcagtggcatgatcatggctcactgcagccttgacctcccaggctcccacctnagcctcccaagtagctgggaccacaggcacgtgccaccatgcccagctaatttttattttggtaganacaaggnttcaccatgttgcctaggtaggtttcaaactcctggactcaagtgatcctcctgcctcggccttccacagngttgggattacaggaataagccactgngcccggccctttttctcttctgtaacagagtttattactgcctagctagcaggttatttggccctcacatgtgttgaggcaaactctatactatattcttactc

SEQ ID NO: 5411 - DNA, 432 bp, Homo sapiens
ggagctccccgcggtggcggccgaggtacgcgggggtaaccacctgggaaaacttcacagaaaatgagagtttcagatactgagaatagaaccactaagaagcagaaaagagaagatattctcgtgggggagaacaacggctgggaggggaggaagcatggccaaggcaaagaggtgggcattaataagaactgcttcttgctgccgccatatgaagaaggacgtgttcgcttccccttcctccatgattgtaagtttcctgagacctcgccagccatgctgaactgaatacaacatgtttaagaccacagaacatctgcataggctgtaaatttcgttgaatgatgggatgcaaagatggaagacagatgggatagaggaaaagacagaatcagatactggatgagtttagtacctgcccggggcggccgc

SEQ ID NO: 5412 - DNA, 446 bp, Homo sapiens
ctatagggcgaattggagctccccgcggtggcggccgcccgggcaggtacgcggggggctgaggcaggagaatcgcttaaacttgggaggcagaggttgcaataagccgagattgctccactgctctccagcctgggcaacacgagcgaaactccatctcaaaaaaaaagaagaagaaaagaaaaatggcaacccaggtatgcaactagaaaaatccagactatggaaaaaccctgcaggataaaagatcaatttcttcagcaaataaattgtctatggtgtgtgtgtgtgtgtttgaagtggggagttagaggcgtgagtgagcataagccaacatattcattattattattattattgttaaacttttaagttcaggggtacctcggcccgctctagaactagtgggatcccccgggctgcagggaattcgatatcaagcttat

SEQ ID NO: 5413 - DNA, 476 bp, Homo sapiens
  misc_feature 272, 379, 410, 439: n = A,T,C or G
ttagggcgaattggagctccccgcggtggcggccgaggtactcgcccagctccttatagagggtctccatgttagaatgcatcatccgcagcttgttatactgttcctgtgcatccttcacaaagctggtcattttttcaacaaacttgtctttttcatctgtggcagctgggaaattctgaacatcacgttccacatcaagaaatttgtttcttcatctgatctaggttcttttgcaaagtttttcaagcagaaactcggctggctttctncacatgggcaaagctcgtctggaaacttgaggacatcggggatagtcaattcttccccgcgtcctgcccgggccggcccgcttcttagaactaagtgggatcccccngggctgcaagggaaattccgatattccaagnctttatcggatacccgtccgacctcgaangggggggggccccggtacccagctttttgttcccttt

SEQ ID NO: 5414 - DNA, 440 bp, Homo sapiens
  misc_feature 382, 406, 417: n = A,T,C or G
actcctatagggcgaattggagctcaccgcggtggcggccgcccgggcaggtacgcgggtggttgggggaattggaggcttctaggagaggagctggaggccacggttcaggaagtcctggggagactgaagagccaccagtttttccagtccacatgggacactgttgccttcattgttttcctcaccttcatgggcaccgtgctgctcctgctgctgctggtcgtcgcccactgctgctgctgcagctcccccgggccccgcagggaaagccccaggaaggaaagacccaagggagtggataacttggccctggaaccctgaccctgtgtctcctgcccggtggcagtaacaaagccttctgtctgcccagaaaaaaaanaagaaaaaaaaaaaaaggttcctnggccgctctanaactagtgggatcccccgggctg

SEQ ID NO: 5415 - DNA, 358 bp, Homo sapiens
  misc_feature 175, 199, 218, 230, 235, 240, 245, 252, 253, 256, 259, 262,264, 275, 276, 278, 281, 288, 289, 291, 292, 298, 303, 306,308, 316, 321, 328, 335, 346, 348: n = A,T,C or G
actactatagggcgaattggagctcaccgcggtggcggccgcccgggcaggtaccaggccgcccattgtgtccttgcccaggaccccgagaaccaggcgctggcgaggttttactgctacactgagaggaccattgcgaagcggctcgtcttgcggcgggatccttcgtgaaaangaattttttgccaaggtgctcttnccttcttgtcccgggcctnacctgcacccancgccnaaaanccttnaagggannacnctngancntaccttggccnntntanaactaanngnntccccnggctngangnatttcatnttaancttattnatacccntccgacctttnanggggggcccg

SEQ ID NO: 5416 - DNA, 454 bp, Homo sapiens
  misc_feature 4, 347, 368, 374, 401: n = A,T,C or G
actnctatagggcgaattggagctccccgcggtggcggccgcccgggcaggtacgcgggggggaatgtaagggccacttcagcaacagaaaggagtggtggagcggcttctcatcagaaaaacagaactttcagtgcctgacttgagatgtaaacttgatgggaaaaattattttagttttggaaagatcctcttcagaaataccactatcttcctgaagtttgatggagaaccttgtgacctgtctttgaatataacctggtatctgaaaagcgctgattgttacaatgaaatctataacttcaaggcagaagaagtagagtttgtatttggaaaaacttaagganaaaaagaggctttgtctgggnaaaatntcaaacatcatcaaaaaattggttccnagaaactgccagttggaacttcttttaaaaccacaagacctttttcttggaga

SEQ ID NO: 5417 - DNA, 206 bp, Homo sapiens
ctacttagggcgaattggagctccccgcggtggcggccgaggtactcagagtgaggattttctgcaacctgcgtttgtccctccagcatctgctctggctccatggcggaccctgcaagtcacagtccccggataccagtccgcgcccaagccgttcgttcttaagagccctgcactgcgccaccagctcccagcacaaacagctc

SEQ ID NO: 5418 - DNA, 387 bp, Homo sapiens
  misc_feature 22, 302, 312, 370: n = A,T,C or G
ccgcggtggcggccgaggtacnagggcatccctgggtggccgagcccatcaggcccaccccaggctctagtgaggagtgcggtggctgtccaggacatctgaggacatcgctgtggggcaggcattgtgggatgtgtgtagctcagtggaggtggggaggaacggggagagcaggtgctggcagggaatgaaagccctacagtgtaagagctggatgaaacttcagagctcatctagtcaaagtccctcattttacagatggggaaactgaggcactgagtggggaacatgactccccctcngagacaaaanccagggctggaaagctgtgtcttcagagcctcaagccctatgctttttttctccttanagtattgctgccttcca

SEQ ID NO: 5419 - DNA, 230 bp, Homo sapiens
aggtacaaagatgaatgcaacacggtgcccgccctgaagagcacatagttcagctgccggccccgcggcggcagcgcgctgcagcccaggctgatgtagacaggcagcttctcctgggtcagcgacagccggtacttttttttttttttttttttcggcctaaaagcggtagaaatttaataaatagatatgaattgattgattcattaatagtataaaaagaaaatttg

SEQ ID NO: 5420 - DNA, 157 bp, Homo sapiens
cactacttagggcgaattggagctccccgcggtggcggccgaggtacacgctgcccaagggcgttcgtaacgggaatgccgaagcgtgggaaaaagggagcggtggcggaagacggggatgagctcaggacagagccagaggccaagaagagtaaga

SEQ ID NO: 5421 - DNA, 321 bp, Homo sapiens
tatagggcgaattggagctccccgcggtggcggccgcccgggcaggtacgcggggggttctgccctgcctgaggaggaggacacagcacaagggcacattgcccatggctgggaacatgacccagcctgaaagatacaggggatcatgttaaaaatagcagtattatttttcgtctcaatggtattgtaactaagttatttactcctcctgctcctcacccctgtagggaaaccttggagaggagaagtggcaggtgggctgcctgctgtgttaagaggacttaatttgtgatgtaaggcacttgtcaggaatgggggggg

SEQ ID NO: 5422 - DNA, 445 bp, Homo sapiens
  misc_feature 146, 150, 153, 154, 155, 156, 159, 160, 164, 167, 170, 174,184, 185, 187, 188, 190, 191, 199, 200, 209, 212, 217, 219,220, 226, 237, 238, 239, 241, 244, 245, 251, 262, 267, 268,274, 276, 280, 283, 284, 289, 295, 308, 310, 312, 316: n = A,T,C or G
  misc_feature 317, 318, 319, 320, 321, 325, 326, 327, 328, 329, 340, 341,342, 344, 354, 356, 358, 365, 369, 380, 388, 396, 412, 418,419, 420, 421, 422, 423, 424, 430, 434: n = A,T,C or G
gggcgaattggagctccccgcggtggcggcccgaggtacttttttttttttttttttttttttttttttttttttttttttttttttttttttttttttttttttttttttttttttttttttttttttttaaaaaaaaaaaaaantttnttnnnnaannaatngtnaantttnaaaaaaaaanngnntnntaaaaaanntcccttttnggnttaangnntttttnttaaaaaaaannnanccnnaaattnggggaaaaaanttttnngggccntnattnaannatttngggggnttttttttttttnancntggnnnnnnaaannnnntttttttttgnnntngggggggaancnanttttccnaaangttaatttttnaagggggngggttttnaaaacaaaaggggggnaaaaannnnnnntttttnttgnaactttttaaa

SEQ ID NO: 5423 - DNA, 625 bp, Homo sapiens
  misc_feature 16, 19, 22, 27: n = A,T,C or G
gactactatagggcgntcnganctggnggcggccgaggtacgcggggcactcctctctctcttcctctctcacacgttctccaacccaaggaggccagacagagggacgtggtcactctctgaaaagttcaacttgagagacaaaatgcagtggacctccctcctgctgctggcagggctctttcctctcccaggcccagtatgaagatgaccctcattggtggttccactacctccgcagccagcagtccacctactacgatccctatgacccttacccgtatgagacctacgagccttacccctatggggtggatgaagggccagcctacacctacggctctccatcccctccagatccccgcaaggactgttggaggagagttagcccaagtataggctctgcccagatgccatcacatccctgatactgtgtatgctttgaagcaccttccctgagaagggaagaggggatctttggactaggttcttggctccagacctggaatccacaaaagccaaaccaagctcatttcaacaaaggagctccgatgtgaggggcaaggctgcccctgccccagggctcttcagaaagcatctgcatgtgaacaccatcatgccttta

SEQ ID NO: 5424 - DNA, 467 bp, Homo sapiens
  misc_feature 61, 439, 455: n = A,T,C or G
cactataggggcgaattggagctccccgcggtggcggcccgcccgggcaggtactaagctngacagcttcctaataattaaaaactcttctgatgctatcagtggttatgttcaaaaatgtcaatttttaaatattatagaataaaatgtgccaacattttagaagatttgcataactcagtgaccaatacttttcaaatgaccaaaacataatgttacaaaatcatgcatggataaaaggtgcattgaaaatgcaaatgaggccaggtgtggtggctcatgcctctaatcccagcattttgggaggcagaggctggaggatcacttgaggccaggcatttgagaccagcctggccaacatagcaagatcctatctctaaaaataataagaagtaagaagaattagccaggcatggtggcatgcgcgtgaaagtcttanctcttgggaggctacngtgggaggatgg

SEQ ID NO: 5425 - DNA, 502 bp, Homo sapiens
  misc_feature 57, 58, 64, 87, 95, 127, 158, 188, 204, 205, 208, 211, 219,220, 222, 224, 229, 230, 232, 233, 263, 264, 276, 286, 343,344, 349, 363, 378, 380, 384, 388, 398, 407, 425, 449, 482,483, 485: n = A,T,C or G
agggcgaattggagctccccgcggtggcggccgaggactttttttttttttttttgnntcactngggaaggccaggacagacagggnttcaccangttggccaggctggtctcgaactcctgacctnaactgatccacccaccttggcctcccaaagngctggattacaggcgtaagcccgcacccanccaatataggacatannttnagnatataagnncntnctgcnncnnccagtaaagcaatgtaatctatcctaccannaagtagagactncctacacagnagtgaaagatctagccatttcaagagggcaagggacaattctgtaaataaattgcanntaagnagttccttactacncacaacatgctctantngtgnggangaaattaatncttatcccnaagaaatatacttttccnagtaatgataggcttcatataagnggaatctaaaaatgctttaacaattctaccatnncngcgtacctgcccgggcg

SEQ ID NO: 5426 - DNA, 165 bp, Homo sapiens
ccgcggtggcggcccgtcgctcccctgctcctccttggtggctctctcagaggactccagagttgtatccccaggccgtcttgtttgttctgcactcctgctccccttaaatagctcctccctctccccgcgtacctgcccgggcggcgctctagaactagtgat

SEQ ID NO: 5427 - DNA, 340 bp, Homo sapiens
ccgcggtggcggccgcccgggcaggtaccggagccccagccctggccctgagggagaaggaagtcagggccggggctgccccaatcctgtctcctgtgcgcaggtgaacggattcaacacccttggggaaaacattgctgacaacggaggggtgcggcaagccttaggcctacctcaagtggatggcagagggtggcaaggaccagcagctgcccggcctggatctcacccatgagcagctcttcttcatcaactatgcccaggtgtggtgcgggtcctaccggcccgagttcgccatccaatccatcaagacagacgtccacagtcccctgaagtacct

SEQ ID NO: 5428 - DNA, 451 bp, Homo sapiens
ctatagggcgaattggagctccccgcggtggcggcccgaggtacttttttttttttttttttttgagatgggagttttgctcttgtcaccaggctgaagtgcagtggccgtgatcttggctcactgcaacctctgcctcctgagtagctggaattacaggtgcccgccaccatacccagctagtttttgatttttagtagagacagggtttcaccatgttggccaggctggtctcgaactcctgaccactgatccacccacctcggcctcccaaagtgctgggattacaggcatgagccaatgtgcctggccattcctgtgattttttagaatttttcacttttcatataaagttgcattttatcatgaggaaaatgttttggctgaaaaacatatgcccaaaaaaaaaaaatcagttttcactatttttccagcttgcctagggaaacgt

SEQ ID NO: 5429 - DNA, 696 bp, Homo sapiens
  misc_feature 520, 550, 632, 637, 654, 667, 668, 686: n = A,T,C or G
gtggcggccgcccgggcaggtacccccagctacctcccatgtttccaggtatcattggctcttaactcccacaagcctgccttttggctacccatcccaacaatatcaagagggaatgactaagtatcagctagaaacttagccatgtctcaacattctgattatctgaaaagctgtcgatgcccttttacaggtttatggtgacagacccgtatcatcttaaagtatgttcatagttaaggcttgacttaagaaaataagagaaccagacataatggaaagacctcttcaataatgttgtcatgcctctcagtgaacgtgctcacagtcacacttggtttggctccccaaacccacaatagaaaaggaaaaatgagtattttgtttttcatctgttttgtatttaaaggcattgggttacttcctcctgccctcttttcttccctgaacaagagtttacaactcctcatggcttcttaataggtgaaagtaggtgaaaagcctgagaagctcacagcanggtttgcccgtcccaactatgcactgagangtcgcccagcttctgtgccttcccagccccactataatttggcagtatgtttgggtcatgtttcctgaaaacattttctttnaaaanggaaaagaaaaaaatgnccaacaacccccnncccaaaaaaaaaaaaaangaaaaaaaaa

SEQ ID NO: 5430 - DNA, 585 bp, Homo sapiens
gcggcccgcccgggcaggtacccagacaggatcatgaacacgtttagtgtggtgccttcgcccaaagtgtcagacacagtggtggagccctacaacgccaccctctcagtccaccagctcgtagaaaacacagacgagacctactgcattgataacgagctctctacgacatttgcttcagaaccctaaagctgaccacgcccacctatggtgacctgaaccacctggtgtctgctaccatgagtggggtcaccacctgcctgcgcttcccaggccagctcaatgctgacctgcggaagctggctgtgaacatggtcccgtttccccggctgcacttcttcatgcccggctttgccccactgaccaagcccggggcaagccagcagtacgcggggtagaagacattgctatttgagctttaaaatgtagtaatttctgaattaccaacaagaccttatttaaatgctgagagctgcattatgatgaagcattagtctagctggatgatttccagatggatttttaaacattaataaatgtttcacatttatttgatcaataaatgcatatatatgcttttaaaaa

SEQ ID NO: 5431 - DNA, 868 bp, Homo sapiens
  misc_feature 647, 661, 694, 700, 705, 715, 729, 738, 741, 750, 762, 767,775, 783, 784, 787, 799, 800, 801, 802, 821, 834, 836, 837,839, 843, 845, 856, 857, 858: n = A,T,C or G
ccgcggtggcggcccgaggtacttggcacacacaggatggtgttttaaagagtgggctgcaccccccacacgccatttacatcagcttcataaacacttttcttcctccctgtaacttaaccttttttcccttttatgaagttgagaggctttatgaaataagttgcattgcacatccgtgcagaaatctttctgactttgaaatttttaggacgtcagctgtcagatacgaaaggtagatatcaggtaagaatctggacttaggaaatagtcacaaaactgtcataggttgtaattttatcaacattcgcttctagtaaaattaaagtcaattaagaaatagaacttgggtcaaaattctgttacaaagcttcataatttgtcccgaagcatatggtggagcattctgagaaatttgctttttgtgtgtttgacattcctaatttgggagtccttcagctgaattactattcttttagaagttgagacagcaggtaagcaaaggacctagttcatgtaaacatggacatcatgatggctatttaaaaaatatttggtctacaccttctccctgaggcttggggagtgtgttcagccgctgcagtttctctgctcatggaggtcttggttggatctgtgctggcggntgagcatttagtgngagccagtgacccatgaacttgccgtctgtganggccanagcanggccagcatngtaatgggcctgangcccttccnaancctttatgntttgggagccantggtnaaaacgtntttttggnnggntggaggccaccnnnnctttttgggaaccttttgnggctttccaagtntnncnggcnangggggggcccnnnccctgggggg

SEQ ID NO: 5432 - DNA, 462 bp, Homo sapiens
cactacttagggcgaattggagctccccgcggtggcggccgaggtacattatactacttaaagcaaccactaaaaaaattaatacaaaaatacaaagaaatatatttaaaaaacactacaaatatatcaaatggaattctaaaaaatgttaaagacaaaaaaaaaaaaaacccaaacaaaccaagaaagaagcaacaggaaacacaaaaaactaatcataaaatagcagacatagcactaacataattattgtaaactttaaatggtctaaatacaccaataaaagacagaaatatgcaaactggggccagacacagtgacacatacctgtaatcccagcactttgggaggctgagactacaggcacgcgccaccgcgcccggcccccgcgtacctgcccggggcggccgctctagaactaggtgggatcccccgggctgcagggaattcgatatcaaggct

SEQ ID NO: 5433 - DNA, 422 bp, Homo sapiens
ccgcggtggcggccgaggtacttcactgctctaagtaggtgccccactttgataaagtgctgtcccagtctgtgctgtcccagtctggaagggtcgctacccatgaacgtagcagccatcctgctattgggtaagtcatctgcatgatgactgtagcctgttctgccatgctcttatgaagtctgaagggcagcatatgcagttactaactgcttcccagtccagggggtcattatccatgaacatacccatcctgctattactaactgcttctctatcaataaagacaagctcagctccatagttggggccaaaagcctactggcatactcaagcactccgtgcactgctataggccctaactgaaactatcttgtggtcacatgcacatctagcctaaatgggcacctctgatcaactac

SEQ ID NO: 5434 - DNA, 455 bp, Homo sapiens
ctccttagggcgaattggagctccccgcggtggcggccgcccgggcaggtacaaacaaatccagaatatgaagactgcaataaatatctaactttttaatgcccagacactgacaaacatccacaagcatcaagactatccaggaaaacatgacctcaccaaacaacctaaataagtcaccagatcccaattctggagcaacggagatatgtgacctttcagacataattcaaaatagctatgttgaggacactcaaagaaattcaagataacatagagaaggaatatagaattttctcagagaaactcaacaaatatattgaaataattaaaaagaatcaagcagaaatcttggaattgaaaaatggcaattgacatactgaaggaagacatcaggaggattttaaataacaggaatttgatcaagcaggaattaaaaattactaagcttggaa

SEQ ID NO: 5435 - DNA, 397 bp, Homo sapiens
  misc_feature 74, 148, 223, 225, 231, 278, 288, 291, 327, 346, 368: n = A,T,C or G
acggcgaattggagctccccgcggtggcggccgaggtacttttttttttttttttttttttttttttcacactnggaagtcacagcacagcccacacttaaggaacagagagtcaggctccccttgctccttaatggcagagtagctncataaattatttggaatgctacatggcaaatttatctctttcccccctctttttagttatctatcactaattatntntcagtntggactcatggatatttattttatatttcgggttacaacttgttagnatttaatttngtngttcaaatagttccttccagcttgggccactggganctcttcagctggctcctgngtccctctgacatgcccccttnattggggggggtttttttaaagcccttta

SEQ ID NO: 5436 - DNA, 329 bp, Homo sapiens
ccgcggtggcggccgcccgggcaggacgcgggggggggaagctgagggctgagaccaagggctaaagctgggagactgaaaaaatgcagaccgccggggcattattcatttctccagctctgatccgctgttgtaccattattttatgttgtgccagtgaatccggttgccagaaaataagtctgaatgttttcatgcatctttttcttaaatgcaagagcttctactgactcttaacaagcatgcttacccaaattttgttgcatgcttttaagtagcattagctatgcacacttgacatttttaaatatccctttcctagtgtacct

SEQ ID NO: 5437 - DNA, 450 bp, Homo sapiens
tacttagggcgaattggagctccccgcggtggcggccgaggtacattaataagacacctcagaagtgaaacaaacctagtttttactaaaatgatgggataaaggtagtgtctatgctgaagagcagcttcacttgtttccccacagaaaaaggcccaaaatttttggaggataatttaaaaactaagccaataaggccaggcatgggtggctcatgcctgtaatcccagcactttgggaggccaaggcgggcagatcacctgaggtcaggagttcgagaccagcctggttaacatggcgaaatcccgtctctaataaaaatataaaaattagccgggcatggtggcatgcacctgtaatcccagctactcagggaagctgaggcagggagaaatcatttgaactcggggaggtgggaggctgcagttgagccaaggatcacaccattgc

SEQ ID NO: 5438 - DNA, 443 bp, Homo sapiens
  misc_feature 412: n = A,T,C or G
acttagggcgaattggagctccccgcggtggcggccgcccgggcaggtacactggaggctggagcctgcggatggcatggctctgcggctcaccttgctgcagttggtggtggtgacagagactgcagcttgactgtagtgaatttggaaattatctgtctggaagctctgagtttatcttgggacctcaagaggagagggatcacccaactcacagcaatcaaactccaaatggtgctataaactgaaccacacatggacacgtcagtcttccgaggacctttagatcaaccccaggaggagccctagctgctgttccccattcgacgcccctttccagcaggaagtagccagaagacatcgtcgcccaaacctctaacagcagttagtgccggcatctccacaggggggnaatgttgtaagcgagttattgataaattatt

SEQ ID NO: 5439 - DNA, 207 bp, Homo sapiens
  misc_feature 1, 3: n = A,T,C or G
ncnagggtacggcgggggacacagggcccaggtgtgtagggccacagcagccgcagtcctgaaaggctgcaacacccagacctccaggagagaccaggcccaggatgcctcgcctgttcttgttccacctgctagaattctgtttactactgaaccaattttccagagcagtcgcggccaaatggaaggacgatgttattaaattat

SEQ ID NO: 5440 - DNA, 320 bp, Homo sapiens
  misc_feature 14, 77, 80, 88, 104, 134, 141, 156, 175, 182, 197, 211, 214,216, 220, 222, 225, 228, 235, 244, 245, 247, 248, 251, 252,254, 256, 261, 266, 267, 276, 281, 306, 307, 311: n = A,T,C or G
tatagggcgaattngagctccccgcggtggcggccgcccgggcaggtactttttttttttttttttttttttttttngancttattanaacatttatttttttntgaatgacaggccgggagtgggagtagctnaacaggncatgttagtggtgtnagtgctggcttaaacgaangagctgnaatgggggtttttgntttcgggagaaagntgngnttgngnaanacntgaacanaacttcccnnannctnngntnggatnatacnnatgaatggncactngatcaaataaaggcaaacactggannctcnaaaaaaaaa

SEQ ID NO: 5441 - DNA, 133 bp, Homo sapiens
  misc_feature 45, 47, 48, 61, 71, 79, 95, 97, 98, 100, 108: n = A,T,C or G
tatcactacttagggcgaattggagctccccgcggtggcggccgncnngccaggtacacanaacccattantaatgtantatagacaccaaaatntnnanagagatanaatacattactgatgtgtggattaa

SEQ ID NO: 5442 - DNA, 444 bp, Homo sapiens
  misc_feature 20, 33, 51, 59, 62, 68, 70, 72, 76, 87, 92: n = A,T,C or G
tataggcgaattggagctcnccgcggtggcggncgccccggcaggtacccnggaaaatnttnttggantnangttnattagggactnacatntaatacgtgtatttttgtttcctcacctttaggcacagaccccacaggctcctcggacactgggtccatcacctcctgccccatcatccactccaacaccaacagcccctattgccactctgaaccagcctccaccacttcttcgtccaacactgcctgctgccccggctcttcaccggcagcctcctccactccagcagcaggctcggttcatccagccccggccaactttaaatcagcctccaccacctcttattcgccctgctaattccatgccaccccgtctaaacccaagaccggtggttgtccacggttgggtgggtcaacagccaccatcactttattgggaaat

SEQ ID NO: 5443 - DNA, 431 bp, Homo sapiens
tcctatagggcgaattggagctccccgcggtggcggcccgaggtacgcggggatgctgcattgtgtcgggagttgctgacagccatggcgccgcaggtctggcgtcgacggaccctggagcggtgtctgacggaagtcggcaaagccacgggtcggcccgagtgcttcctcacgattcaagagggattggcatcaaagttcacttctttaacaaaagtgctttatgactttaataaaatattagagaatggtaggatccatggaagccccttgcaaaaacttgtgatagaaaattttgatgatgagcagatttggcaacaactggaattgcaaaatgaaccaattttacaatactttcagaatgcagttagtgaaacaattaatgatgaagatatcaagtcttctcccagagagtgaagaacaggaaccgt

SEQ ID NO: 5444 - DNA, 407 bp, Homo sapiens
  misc_feature 15, 27, 29, 380: n = A,T,C or G
gcgaattggatctcnccgcggtggcgngnccgcccgggcaggtactttttttttttttttttttttcccgttccctagcacgctctctttctagttctctctctttttctctttcccgatcccgttcacgttccctctctctctcccgctccctgtctcgttctcgttcccgatctctctctctagccctttcatctctcctatcatccactctgtctactcttcgttcctctcttctttcatcacgctcaagctcgtcattccttccctgatgtcgaattggtgagcttggtctttgatctctctctctgttgtcacgacggtctcgctctccatgtcttctctcaaagggaagaaatcccttgcttgatctctgttgnctctttcaagggatatctatcctcttt

SEQ ID NO: 5445 - DNA, 653 bp, Homo sapiens
  misc_feature 618, 622, 632, 642, 643: n = A,T,C or G
cgcccggcaggtacttttttttttttttttttttttagagatagggtcttctctgtcacccaggctggagtgtggtggcacgatctcagctcactgcaaccactgcctcccgggttcaggcgattctcctgcctcagcctcccgagagctggggttacaggcgcccaccaccacgcttggctaatttttgtgtttttagcagagacgggggtttcaccatgttggccaggctggtcttgaactcttgacctgaagtgatccgcccgcctcggcctcccaaagtgctgggatgacgcgtgagccaccatgcccgacgtgaagacaggaatttatacccatggagtgcaagaagggaccttgtaatttttaacacgtgacacttaagtggcagatgagacctaatgaagccaggcccaccttcacaccaagattataaattcccctggagcagagattaaatgttttattcaccaacatgcccaagatccctcgcaatgcctacgctttgacaaacacctgttggtcaaacaaagtgcacgaagcaagcctagggaggaaaaattagcttccaccaagagaaataactcgggccctaacagctaagaagtttttcgaggncatnctaactgggntccacttttnnaattttgggt

SEQ ID NO: 5446 - DNA, 420 bp, Homo sapiens
  misc_feature 36, 43, 46, 55, 59, 65, 70, 71, 74, 79, 83, 89, 94, 96, 106,108, 113, 118, 124: n = A,T,C or G
atagggcgaattggagctccccgcggtggcggccgnccgggcnggnaccccgggnaacntaaggnttccnnggnccccnaggncctccnggatncngggatttttntnagggngccancatccnatacaacggggcaaagctatccaggttccggctaacacattttctaagtcgccagtgctgcttacagtttgaatacatgaaaatcctgtttctgagatgtttgcgcacgtgcttattaggaaatgagtctgtatggaaatctcaccacagataatggttaacgaaccgggtcgacatcacaaaggagggtggagactctttttactaacttgaatgagacaaaagcagtgggtgtcagttttataatcctgatgcatttcaggtaattaatgtagaaaaaaccattattttaaaaa

SEQ ID NO: 5447 - DNA, 460 bp, Homo sapiens
  misc_feature 377, 394, 460: n = A,T,C or G
gcgaattggagctccccgcggtggcggccgaggtctggggtgagatgatctgaagggtgtttccaatgagaatgacacaaataccaaggactggagaagcccttggaacaattgataaagcttcccacatttttttttttttgagatggagtctcactctgtcacccaggctgaatgcaatcgcatgatctcggctcactgcaacctctgcctcctggaatcaaggaattctcctgcctcagcctcctgagtagctgggattacaggctcccaccacacctggctaatttagtatttttagtagagacagggtttcaccatgttggtcaggctggtctcgaactcctgacctcaggtgatccacctgcttccgcctnccaaagtgctgggattncaggcatgaccactgccctggtcaatttcccacatttttcttaagattatgtttggcctacaaaan

SEQ ID NO: 5448 - DNA, 751 bp, Homo sapiens
  misc_feature 5, 498, 526, 536, 549, 552, 553, 564, 570, 592, 593, 599,642, 649, 651, 654, 658, 660, 665, 668, 672, 676, 677, 683,686, 703, 704, 712, 714, 723, 730, 731, 735, 737, 741: n = A,T,C or G
gaatnggagctccccgcggtggcggcccgcccgggcaggtactgattccaattgatgggatacatgcccttaatacagaaagtttccattatttattcaaatatcaaaattaagattattgagaagtttattgctttatggctgggcaagatgctactagcacattttaggtaaatatattctttattaaaaactatgaggtcattctgtttaaaactttcaagataattcacggaaaacagatatatctattcaaattaaacattaaagggccaggctactagctatagacatttatatgtgaagcagctcttttttttttttttttctgagaccgagtctcactctgtcgcccagggtggagtgcagtggcccaatctcagctcactgcaacctccgcctcctgggttcaggcaattctcctgcctgagccccccaagtagctgggattacaggcgccgtgacaccacacccggctaatttttttgtatttttagntaagatggggtttcgccatgtttgccangctggtctcnaactcctgacccnaannaacccacccgncttggncttccaaagggctggggattcnngacctnagccatggggcccggccaatgaagcaacttttttaagaaattngccctgnanatngggncngcccnggntccncccnnaattgnaanggggttacccccggaannccattttntncccctttgntcttgtnnggancnttanaaaaaaaaaa

SEQ ID NO: 5449 - DNA, 355 bp, Homo sapiens
ccgggcaggtaccatgttattttagatgaaagccattacaaagagttgctcacacatcatgttagtcctcctcctgctagcccaagttctgaatgctcacttattcgtatgggatttcctcagcacaccattgcttctttatctgaccaggatgcaaaaccctctttcagcatggcgcatttggatggcaatactgagccagggcttacattagggggctatttctgcccacagtgtcgggcaaagtacgcgggaatgttcaagctttagaaagatcagagcaatttttctctttcagtccaaactaagactctctgtatttaaatctctctggggcaagagggctagatttcct

SEQ ID NO: 5450 - DNA, 361 bp, Homo sapiens
  misc_feature 18, 24, 217, 222, 292, 327, 342: n = A,T,C or G
tcactatagttttgaatnggaacnccaccgcggtggcggccgcccgggcaggacgcttttgaggataaatcatttattaaataggtctgcttatcaggaggggcgtgaaggctcccaaaaggaaatgctggcacctgggcccagaagccagggcctctaactcctggggttgatttcttcagtgaagttgcaccctacaaagggaatatggccaaanttttnactcaactgaaggctgatatcaggcgattagacagccatgcattctgcgtttgtctggaatggattgtanagagatggacttatatgaggactaccagtccccgnttgattttgatgcangagcgaacaaaagctatct

SEQ ID NO: 5451 - DNA, 631 bp, Homo sapiens
  misc_feature 384, 438, 472, 492, 505, 517, 576, 584, 591, 596, 599, 608,619: n = A,T,C or G
actactatagggcgaattggagctcaccgcggtggcggccgccgggcaggtacagagagcagaggctcctgttctgtcctcgccacccacgagggtgacactgcttgtaaatggtggctgtgctctcccagcaagaaaaaagcacaactaaatccacactgcacacagacgcagacagaaagcttagtggctctgttttctgctccctgccttgccaggtccacaagcagagaggagtgtcaggcacatggccccgctgtcaggctccccagtgagctgcgggctcaagcaggagctgcccactgacacacaggggacacccactcctgccaccttgggaagcggttgccagacagagccccactgggtgctggtgtcatccanggaccccacacacttccttaaatgtgatcctgcttcctctgcacaagctgcatnctctcttctgcaggactgtctggaaacttggctntcaatttgctcttccttctnttcttttgcctgncccaagcccctntttctaaaaaaagtgatgccatgttcatgggggtatttttgaaaatacttggcgggctncatgcttntgttttntttgnccnggtggtcangagggcttacnaaaaaatgcctg

SEQ ID NO: 5452 - DNA, 481 bp, Homo sapiens
  misc_feature 161, 457: n = A,T,C or G
cgcggtgggcggccgcccggcaggtacgcgggggcctttgcaatctccacgttgcgatggatccttggacccacttttgttaactcttaaactttgtgtctttgtctttatttcttttctcattccctcgtctccaccgggaaggggagagcctgcggtgngtatcaggcagggtcccctacatctttggcacccaacacggtctccttgaacccaggtgaagttacacctgagccgtggtcgttgtgaagaacggtctgtccaggaactcccgagaacgtgtggtcggccttgcggtaaagcttgtgcactcggagcattcagggacaccatgggacaatccaaaagtaaacattctgcatatttacattttattaagctcctcttaaagagggcaggaattaaggctagcacaaaaaatttgattactctgtttccaacagtagagcaatatcgnccttggtttctgaacatggtacct

SEQ ID NO: 5453 - DNA, 167 bp, Homo sapiens
  misc_feature 1, 16, 20, 30, 44, 47, 57, 80, 87, 97, 102, 112, 113, 119,124, 132, 134, 161: n = A,T,C or G
nggttttcgggggacncacncactcaaagnttttgagggggganacnccaccgcggnggcggccgcccgggcaggaacgnttttganggggctgaanagccnaaaaccaatnnacccancaggnccagcctncnctcaaggagaggcaaagaaaaggaganacagcg

SEQ ID NO: 5454 - DNA, 399 bp, Homo sapiens
  misc_feature 79, 81, 83, 85, 88, 100, 103, 112, 119, 135, 176, 192, 342: n = A,T,C or G
tagggcgaattggagctcaccgcggtggcggccgccggcaggtactttttttttttttttttttttttgaaacggagtntngntntgncgcctaggctgnagngcaggggcncgatctnagctcactgcaatctntgccgcccgggttcaagcgattctcctgctagcctccccanagttgggattacaggngtgtgccacaacgcctggctaatttttgtatttttaagtagacacgaggtttcagcatcttggccaggctggcttgaatcctgacctcgggatccacccatctcggcctccaaaggcagaaccagattcttaactgccacagactcttgnattatgtaatttatatacagaacacaaaggcacttgatttgcttaactgatgtacct

SEQ ID NO: 5455 - DNA, 250 bp, Homo sapiens
aggtactgtttgtcctgcatcccggcagtggcggtgtgccaaacagtttgaaaacccaatcattaagtcttgtccagaatgccgtgtgatatcagagtttgtaattccaagtgtgtattgggtggaagatcagaataaaaagacgagttgattgaagctttcaaacaggggatggggaaaaaagcctgtaaatactttgagcaaggcaaggggacctgcccatttggaacaaatgtctttatcgcatgct

SEQ ID NO: 5456 - DNA, 356 bp, Homo sapiens
aggtacgcgggggcctgagccaaggccacgtgatgatgacagacggcactctggctttcctggagctgtctctatggtattcttcccagcccacccgtccctttggtagcggcagtcacgtgacagactccggggtgggtgctaccaaatacagccatgaagaaaaaggtgctgttgatgggtaaaagtgggtctggtaagaccagcatgaggtctattatctttgcaaattatattgccagagacacacgtcgccttggcgcaacaattgatgtagaacattctcatgttcgatttctgggaaacctggtattgaacctgtgggattgtggtgggcaagacaccttcatggaaaa

SEQ ID NO: 5457 - DNA, 452 bp, Homo sapiens
cactacttagggcgaattggagctccccgcggtggcggccgaggtacatagtggccgtggcagcctccgtgtctgtcttccatgtcactccactttatagctctgaggtttccagtccaggatgcatttggcatagagccaggaacaccgggaatcctgttgagtgtcacccagaaatgttcgtcggggcttgtaggtgtccttggaccaggagagtaagtcaagtgcgagctggtcttggaggacgaagttagcaaagtcccttgtgagagccacgtaggccgtgccaaagtaaatcaccatgtcatgaggaggaggagtttttaatttttgttgttttaatcaccgtaggaatttttgtggtttaacagttcttggtggacgtatttagtccgtccaacagccgtggtcagggaggcaagcactccgggggtgatatttttccctttaaa

SEQ ID NO: 5458 - DNA, 160 bp, Homo sapiens
  misc_feature 19: n = A,T,C or G
tagggcgaattggagctcnccgcggtggcggccgcccgggcaggtacgcgggaaccccagctttccctcccccttctttcgatcagagatcggcggagaccctcgaagtgcgcaaacttgacactcaccctgaccggactggggttttaaggggtgtggc

SEQ ID NO: 5459 - DNA, 336 bp, Homo sapiens
  misc_feature 163, 177, 204, 226, 227, 228, 325: n = A,T,C or G
cttagggcgaattggagctccccgcggtggcggccgtgagcagtgagagagctgacgggcagagcatgactgcatgacagcaaagggcagaccaaactcctgcagctgctgaccaccaaatcttgatcagatggagccctcgcccttagccagctctttgtcngatacaaaacaaanactccacagggtagctgccttgggttntgggtcttacacatggaacctnnntcaagggagaaagcataaaatttttgcacagacttctttgcaaggacagcagttcccctgtgggacttggccaagtttaacaagcaggaagccacangcaaaagaact

SEQ ID NO: 5460 - DNA, 423 bp, Homo sapiens
  misc_feature 63, 141, 146, 186, 205, 224, 232, 344: n = A,T,C or G
agggcgaattggagctccccgcggtggcggccgaggtacttttttttttttttttttgttagnggaatggtaattttctgatgatatctgtgttcagaagggactgaaatttatacatttacctctttgaactcagaaagnatcanaggactgcaacataaaaccgccccatacaagagggccccngcctcgaagacaaggggtnttgccccacgcttcgcctnccttccancttttgccgggaacgccgtcccactcaggggttcaatgcaggaaacaccctcctaagggaaaacgggacgccactccctacccaggagacgcccccacagggctggagcttntattcgaagcccatttctaaggacaccacacgcaggcctcaagccaacctaagaggcaggatgatgccctccgtcctga

SEQ ID NO: 5461 - DNA, 180 bp, Homo sapiens
  misc_feature 124: n = A,T,C or G
agggcgaattggagctccccgcggtggcggccgcccgggcacggtaccgcgggatttaaagacctgacagcttgagaaggtcactactgcatttataggaccttctggtggttctgctgttacngtttgaagtctgacaatccttgagaatctttgcatgcagaggaggtaagaggtatt

SEQ ID NO: 5462 - DNA, 291 bp, Homo sapiens
  misc_feature 186, 204, 205, 210, 236: n = A,T,C or G
tagggcgaattggagctccccgcggtggcggccgaggtacaaagaaaaattcctctgtcttgagatactgttaatctgtaaccctagccccaaccctgtgctcagaagcgtgtgctgtgttggctcaaggtttaatggatttagggctgtgcaggacgtgctttgataaaatgtgtttgtaggcantaatgcttgggtaaaaanntaatnaccattttccagtcttcaaagttctncggggggcctttgcaatgccatgtttggtgcatgtgctctaactcccggagagca

SEQ ID NO: 5463 - DNA, 474 bp, Homo sapiens
  misc_feature 200, 208, 242, 308, 451, 453: n = A,T,C or G
ttagggcgaattggagctccccgcggtggcggccgaggtacgcgggggcccttgctcactagaaggagccccctgaccccttcttccaaaaatactttttgtctttgtcttcgtttctgcattcatcccccttcgttcactcccataacaaccaacagcgacaactggcacctaggacagggacgtgagtgaaggtctgntggagcanagaaactgacactgacaagaagaacgagaatganaaaccctgcgacgagtctgctgacagctaatataagtctgcaaaatcagctggaccaccaaacggnaattgagagctgcacaacctgcaattacctttattcaattaatgcaaaaacaaaaatggggagatgctacaggccgaaagaatgaaggtcgtgaccaactcagtataccactgaaggctatatgagcaaacagaaaactgttntnatgaaagcaggatgttggaaa

SEQ ID NO: 5464 - DNA, 419 bp, Homo sapiens
  misc_feature 1, 313, 395: n = A,T,C or G
nctatagggcgaattggagctccccgcggtggcggccgaggtacactgttaaccaagtaaaaatggtatgctgaaataggttaactagggcatatttgaagaattttgtttacttttaaaagaggaaaaatcacttccaatcttcccttccacacattcctaacaagcctgcactatacctgcttaaaactgaaaatataaacaattacatgggccccacttcattacagaatgcattttcctgtacttgaaaactggaacagcttgggaatgccatggggtttgataatctgccagggacatgaagaggctnagcttcctggaccatgactttggctcagctgatcctgacatgggagaacaaccacatttttctttgtgtgtgcttctagcangctgttcgggaggaccttgaccca

SEQ ID NO: 5465 - DNA, 473 bp, Homo sapiens
  misc_feature 387, 424, 427, 438, 451: n = A,T,C or G
ttagggcgaattggagctccccgcggtggcggccgaggtacaataatattatctttatgagcacgcatggaaatttcattcctgatctggaagaataaaaggaaagaaaatgtcaggtgaaagagtaagtagcctccaacttaagcagacagaataattttctttaaaatgaaaagaacattttaagctgtctttccccctaaaagatcagatctagaaagggctggaaatgaactgtgcccaggaatctgggggtgctctccagtaaggcgaactgaggctcatttgcagccaagacttggaactcgggatgagacctaatgggctattgctgccatctggctgccaaaaagtccctaatagatggattttccaggctgaccccanctgtggggcggggggggggggtcctttggctttctgngtnctctgaaagcntttgctgcccctnacccttttcttgaactgacccc

SEQ ID NO: 5466 - DNA, 258 bp, Homo sapiens
  misc_feature 107, 137, 191, 203, 206, 257: n = A,T,C or G
ccgcggtggcggccgcccgggcaggtacttttttttttttttcttttttttttggaaccgcggttgtttaaaagcctgagggaacctggaggggggctcccactctntaccttctttcctccgagtttgtgactccnagatggacaaagtgtgtgctgtttttggaggcttcccgaggcatttggcagaanctgtggcccaanttnatgggcccggaaaaggctacccgactggcgggtcattgccaagaaacctgna

SEQ ID NO: 5467 - DNA, 378 bp, Homo sapiens
  misc_feature 130, 181, 237, 267, 309, 354: n = A,T,C or G
ctatagggcgaattggagctccccgcggtggcggccgaggtacgcgggcaatatcctgccgggcatgcaagccatacagcccaggcctctcccgcccataccaaggccagcatccttcagaaaaagcatncccgaggaggaagacgaatcgttaaacatctgaaagggtcaggccagcatncttcagaaaaaaagcatccccgaggagggaagacgaatctgttaaaacatctttangtcagctctagcctctcggaatttgtcttnttcagtggaaaccccgagaagactgatcagtttcttcagttntaaaacaatggcccagggttttggttgacgtttcgcacgacgtanccatagacttttctcaggaggagt

SEQ ID NO: 5468 - DNA, 344 bp, Homo sapiens
  misc_feature 171: n = A,T,C or G
ccgcggtggcggccgcccgggcaggtaccttccccgagatggtggataaacttatcttgctggacacgccgctctttctcctggaatcagatgaaatggagaacttgctgacctacaagcggagagccatagagcacgtgctgcaggtagaggcctcccaggagccctcgncacgtgttcaagcctgaagcagctgctgcagaggttactgaagagcaatagccacttgagtgaggagtgcggggagcttctcctgcaaagaggaaccacgaaggtggccacaggtctggttccgaacagagaccagaggctcgcctgggcagagaacagcattgacttcatca

SEQ ID NO: 5469 - DNA, 442 bp, Homo sapiens
ccgcggtggcggccgcccgggcaggtacaaatggacaatatatatggtatgtgaccattgtgtaaaaaactgtaatagataactccagagggatagaaaacttgatggtgactgcctttagggagtggcagtgggcatggacctgggaaggcagatgtagttgtcatggtacaagatcgcggtgctggtgctgctgaacgagatgagccgcacaggcgagggcgccgtcagcctcatggagcggcggaggctcaaccagctgctcctgcccctgctgcagggcccagatattacactgtcaaaactttacaagttaattgaagagtcttgtccacagctggcaaattcagtgcagatcagaatcaaactgatggctgaaggcgagttgaaggatatggaacagttttttgatgacctttcagattctttctctggaactgaa

SEQ ID NO: 5470 - DNA, 359 bp, Homo sapiens
ccgcggtggcggccgaggtacacagtgaaagggccctgacaagaggatgggactgcagttgtggctgccagagtcttgctttgtcgcccaggttggagtgcagtggcacgatctcggctcagtgcaacctccgcctcctgagttcaagtgattctcctgcctcagcctccctagtagctggggattacaggacaaggagagggacaaattccttcttggcatccttatggccctgtgacctgctaatgaatgctgactctgagttgctactagaatttggtttccttgtggcttcccaggaattggtctcactctgctcactctgtctcccaagctggagtgcagttggtacctgcccg

SEQ ID NO: 5471 - DNA, 457 bp, Homo sapiens
gactcctatagggcgaattggagctccccgcggtggcggccgaggtacgcggggaaaattcagcaaaacataggtgtgattgcagcatttacagttgcagtccttgctgcgggtatctcctttcattacttcagtgattagggtgaggcacaaagagtttcttgatcatccagagaacattgacagacaattatgaataataaagatgttaacaatccatctgtatttaaaacactagcagccagatctgctgccatgatgcctatttggtgtgtttctgattaaaatgaaatcacaagctgccttgtttagcctgctttacattgtaggtggcccgcatttccagaaataacgttatgcatctagatggaagctgcatgtaacaaatcattattatctatttttaaaagcttcaaaatgatgggatatgatcatagattttagtcttactaatctg

SEQ ID NO: 5472 - DNA, 439 bp, Homo sapiens
ccgcggtggcggccgaggtacacgtcccagaaagaaatacgctataacacccaccagcctgagggctgcattgctgtggaagcaggaatggatacccttatcatgcatctctgcgaagaaactgccccagagaatcagaagttcatcttgcaggaggatggatctttatttcacgaacagtccaagaaatgtgtccaggctgcgaggaaggagtcgagtgacagtttcgttccactcttacgagactgcaccaactcggatcatcagaaatggttcttcaaagagcgcatgttatgaagcctcgtgtatcaaggagcccatcgaaggagactgtggagccaggactctgcccaacaaagacttagctaagcagtgaccagaacccaccaaaaactaggctgcattgctttgaagaggcaatcattttgccatttgtgaa

SEQ ID NO: 5473 - DNA, 411 bp, Homo sapiens
  misc_feature 343, 369: n = A,T,C or G
ccgcggtggcggccgaggtacctctgagtgtcgatccagctgccttgtgaccaggacacttagaagaagcatggaccctgcaagaggatgggctcaaggacagcttgcctgactgcagccataagggtgaagcctcttcaggtagagaaggactccaggtcatttggcccaatttaatggccgacagaagaggccaccatctgaatgtaatttatctcctctttcatctcctttcattcccctcctcctttttttttttttttgggacagagtctcactctgttgcccaggctggagttgcagtggcgtgatcttggctcactgcaagctctgcctcccgggntcacgccattctcctgcctcagcctnctgagtagctgggactacaggcacccgccaccacgcccagct

SEQ ID NO: 5474 - DNA, 437 bp, Homo sapiens
  misc_feature 397, 420: n = A,T,C or G
ccgggcaggtacctaaaccagtctgcgtgaactgcaccatgttagagaacagcaggaacaaaataggctacaaggtcacaataagaagccctggatggtagcatcaaagacgaaacatttaaaaaaccacagaatgaaatcccccaagatggcagctgctcattgtcaagattatttacccgcgtaccttcagtcctggccaagctttgaggctctgtcactgagcaatggtaactgcacctgggcagctcctccctgtgcccccagcctcagcccaacttcttacccgaaagcatcactgccttggcccctccctcccggctgcccccatcacctctactgtctcctccctgggctaagcagggggagaagcgggctggggggtagccgggatgtnagccaagtccactgtccttcttngcgggcaaaagccccat

SEQ ID NO: 5475 - DNA, 134 bp, Homo sapiens
ctatagggcgaattggagctccccgcggtggcggccgaggtacgcggggcttttctttctttttcgtccttttccccggttgctgcttgctgtgagtgtctctagggtgatacgtgggtgagaaaggtcctggt

SEQ ID NO: 5476 - DNA, 100 bp, Homo sapiens
  misc_feature 82, 94: n = A,T,C or G
aggtacgcggggtcagccgccgcgccgccgggctgctccttcttcctcctcgggcgcccgcggcgatgttcaaccgcgccgngagccggctgancaggaa

SEQ ID NO: 5477 - DNA, 435 bp, Homo sapiens
  misc_feature 197, 211, 371, 408: n = A,T,C or G
ctacttagggcgaattggagctccccgcggtggcggccgggcgtggtagctcacgcctgtaatcccagcactttgggaggccgaggcgggcggatcacaagggcaggagatcgagaccatcctggttaacacggtgaaaccccgactctactaaaactacaaaaaaattagctgggcgtggtggcgggcgcctgtantcccagctactcangaggctgaggcaggagaaaagtgtgaacccaggaggcggagcttgcagtgagccgagatcacaccactgcactccatccagcctgggtgacagggtgagactctgtctcaaaaaaaaaaaagtacctcggcccgaggtacgcgggatccgcatagttggnagaagctgtcaatcttggttataccttttcagggganaaccaagaccagaattaactttggaag

SEQ ID NO: 5478 - DNA, 135 bp, Homo sapiens
ttagggcgaattggagctccccgcggtggcggccgaggtacgcggggctctctctttcactgcaaggcggcggcaggagaggttgtggtgctagtttctctaagccatccagtgccatcctcgtcgctgcagcga

SEQ ID NO: 5479 - DNA, 109 bp, Homo sapiens
tatagggcgaattggagctcaccgcggtggcggccgtgcgtttgtggccgtccggcctccctgacatgcagccctctggaccccgaggttggaccctactgtgacacac

SEQ ID NO: 5480 - DNA, 125 bp, Homo sapiens
gcgaattggagctccccgcggtggcggccgaggtactcacatcacaatgtcattttgataggagcgttttgttatttttacaaggcagaatggggtgtaacagttgaattaaacttagcaatcac

SEQ ID NO: 5481 - DNA, 422 bp, Homo sapiens
tacttagggcgaattggagctccccgcggtggcggccgaggtacacaatgaaggatctggccacggagcactgcatagttccaaaggggcacgtgggcattcctcctatgggcattcagcagaccgtccacagaccagtagtggtttgcatccatgaatgttagctgaaaggccaacaacccatacagataggagtggttgttccatgatgtcttgtccaggagaaacacataccagtatggcagcaggaataacacacagcttatccggtagcacaggcccagcatcatgcccagtgcccctgggatttgtagggagaggattaaagaggtcaagagatcaccacaggcccagtttccatccagtcaagtggcagtgggcgtagggcatccagcaagggggaagcggcacccgcgtacctg

SEQ ID NO: 5482 - DNA, 137 bp, Homo sapiens
ttggagctccccgcggtggcggccgcccgggcaggtacaagaaacatggcaccagcatctgcttcttccccggctgcttccactcatggtggaaggtgaaggggagccggatgtgcatagatcatatggcaagagag

SEQ ID NO: 5483 - DNA, 428 bp, Homo sapiens
  misc_feature 15, 242, 366, 396, 397, 400, 403: n = A,T,C or G
gcgaattggagctcnccgcggtggcggccgcccgggcaggtacaactgatggttcccccattcacaccagtgtccagttccaagccagctacctgcccaaaccaggagctcggctctaccagttccgatatgtgaaccgccagggccaggtgtgtgggcagagcccccctttccagttccgagagccaaggcccatggatgaacaggtgaccctggaggaggctgatgggggctctgacatnctgctggttgtccccaaggcaactgtgttacagaaccagcttcgatgagagccagcaagaacggaatggcctgatgcagcttgaagctacagctggagggacaggtgacagagctgaggagccnagtgcaggatctcgagagggctctggcaanntgncangcaggagcacacggagcttgatgga

SEQ ID NO: 5484 - DNA, 429 bp, Homo sapiens
  misc_feature 408: n = A,T,C or G
tagggcgaattggagctccccgcggtggcggccgaggtacgggggagttaccagctttggctgctcgcgcctccccaactcgggtaaagctcctcggcctcggcgtgctgcgcctccgcggctgccctgcgccagaattcggttccctcaaaattataaaagcaggaaagctcaagacaaagaaatccaacaaggctagtgatttcagtgatatggagaattggccaacaccaagtgaattagtgaacactggatttcagagcgtcctcagccaaggaaataaaaagccacaaaatagaaaagaaaaagaagagaaggttgaaaagagaagtaacagtgacagcaaagaaaaccgggaaacaaaattaaatggtcctggtgaaaacgtcagtgaggatgaggctcagncaagtaatcaacgtaagagag

SEQ ID NO: 5485 - DNA, 252 bp, Homo sapiens
  misc_feature 100, 120, 139, 147, 149, 182, 196, 211, 217, 228, 231, 242: n = A,T,C or G
ccccgcggtggcggccgcccgggcaggtacgcgggtgaggggacccctgcctgtttcccccatactgagttctagggaggtgctcaccccagactcttangaagggtctagagaaatganaggagcccaagccaggggncagctccnanaaagggtaacctatcacgcttctctctttccanaattggaaatgaanacagggttttcaaangcacangctccccctancancttataggatnttccttggtg

SEQ ID NO: 5486 - DNA, 420 bp, Homo sapiens
  misc_feature 16, 28, 32, 38, 48, 57, 59, 66, 71, 72, 80, 84, 85, 94, 127,149, 171, 195, 211, 223, 239, 240, 241, 264, 289, 307, 316,319, 339, 347, 358, 373, 391, 392: n = A,T,C or G
ccgcggtggcggccgnccggccatggtncgcngggttnaatcctgaanacacacgcnangtatttnagggnnaggcacancttnncacacccgntctgcgatatgatgcctcctgaagaatcgattnctcaggccatggtgatgacttncagccacgacctcatgctgctncgcctgtcagagcctgccgagctnacgagatgctgtgaangtcatggacctncccacccaggatccannnctggggaccacctgctacgcctnatgctggggcagcattgaaccagangagttcttgaccccaaanaaacttcantgngtggacctccatgttatttncaatgacntgtgtgcgcangttcaccctcataangtgaccaagttcatgctnngtgctggacgctggacagggggcaaaag

SEQ ID NO: 5487 - DNA, 378 bp, Homo sapiens
  misc_feature 35: n = A,T,C or G
cctaatacgactactatagggcgaattggagctcnccgcggtggcggccgcccgggcaggtaccggggcagacagcccggcgaaccgcgcaatgcgcttcttctgcctgcagcagagaaaaggaaagaaaactccgcaggggctccgttggcttctccacgagtgacgaccatgttttcccagatagaagaccggagccctgctcctttgcgatccgccgagggctgcagagagcatcctcatccatttgggcacccctgcccaggaagagcccggccatccctttccggactggatccttaagaggtgaattttcttccgtggattccgatttgctccgtctgaccagcctaggcaatccagcatcgcgtggtacct

SEQ ID NO: 5488 - DNA, 259 bp, Homo sapiens
  misc_feature 187, 218, 223, 224: n = A,T,C or G
ccgcggtggcggccgcccgggcaggtacaaatacagcttcaaggggccgcacctggtgcagagcgacgggaccgtgcccttctgggcccacgcggggagtaaacatatggtgaatccaagagaataagagaattatttgctcaaagtcacacagctgaactgagactaggaacaagtcttttgattnctagtgattgcttattccaagttcagatcanatttnnagtagcaccatctttaaaaagccaaagaggctcag

SEQ ID NO: 5489 - DNA, 422 bp, Homo sapiens
  misc_feature 417: n = A,T,C or G
ccgcggtggcggccgaggtacgcggggcagtcaccgtgggtggtgtggcagctggaattgggggcctcgagctggctgccatgattgtgtccatgtatctgtacaaacgagtcctggccttgtctgtggagacggattacaccttcccacttgctgaaaaggtcaaggccttcttggctgatccatctgcctttgtggctgctgcccctgtggctgctgccaccacagctgctcctgctgctgctgcagccccagctaaggttgaagccaaggaagagtcggaggagtcggacgaggatatgggatttggtctctttgactaatcaccaaaaagcaaccaacttagccagttttatttgcaaaacaaggaaataaaggcttacttcttcaaaaaaaaaaaaaaaaaaaaaaaaggtncctgc

SEQ ID NO: 5490 - DNA, 136 bp, Homo sapiens
ccgcggtggcggccgaggtacaaaagttaagctccatttaccactcacttgacagtgtcctttaaatctgaacttgctcttgctcatgcggagcttggctaagagaaaccagatcagaatgcaagctgtaggtggg

SEQ ID NO: 5491 - DNA, 273 bp, Homo sapiens
cactacttagggcgaattggagctccccgcggtggcggccgcccgggcaggtacaagaatgtagaggaaccttggcggtcaacattccaccacccccgactgaccgagtatggtatggtttccgaaagccaccacatgtggagctgaaaggctcggccaaaacttggagaagagagaagtgactttagttcattgtgacagactggatagagaaagaaactggagcaagaagtttcagctgttctttaatatcttcctacagaaagttttttg

SEQ ID NO: 5492 - DNA, 279 bp, Homo sapiens
  misc_feature 23, 155, 160, 192, 193, 245, 252: n = A,T,C or G
ctacttagggcaattggagctcnccgcggtggcggccgcccgggcatggtacgcggggggcgcggagcagcgacggctgcgataatagcgaggcagcagtgcagctttcagagggtccgggctcagaggggctatgattcggagggttctgccgnacggnatgggccggggcctctttgacccgaaggccanncacgcacagaaggaggcttttctcttggactggggatggaaagggtgtctgngattaanaaagaagatcaagtcgatcctgcctgg

SEQ ID NO: 5493 - DNA, 443 bp, Homo sapiens
  misc_feature 77, 80, 130, 149, 204, 243, 276, 291, 344, 355, 365, 372,391, 394, 402, 412, 414, 417, 422, 438: n = A,T,C or G
actacttagggcgaattggagctccccgcggtggcggccgaggtacttctttttttttttttttttttttttttttnccntctccccaaagctttatctgtcttgactttttaaaaaagtttgggggcanattctgaattggctaaaanacatgcatttttaaaactagcaactcttatttctttcctttaaaaatacatagcnttaaatcccaaatcctatttaaagacctgacagcttganaaggtcactactgcatttataggaccttctggnggttctgctgttacntttgaagtctgacaatccttgaaaatctttgcatgcaaaggaggtaagaggtnttggattttcncagaaggaanaacacancccaaaatgaagggccagngcnttactganctgtcccagngngangggcncatgggtggggacatnggaaa

SEQ ID NO: 5494 - DNA, 451 bp, Homo sapiens
atcactacttagggcgaattggagctccccgcggtggcggccgaggtactgcactggacactgctcatccctgggtgtcaggcaggtggctgcaccctaggccaggcgcagaggcctggcaggcaggcttggcatggttggccggggcgggacgtacttcggaaatttcaattcctgctgatcttgataaaacttttaccagaactagccgactggctgggtattaatcgaccagatgctgaagtccaacattgtcactgttggggatgtagaagagatcaataagaccgtttcccgaatgaaaattacaaaggctgacttagaacagcgccatcctcagctggattatgtttttacattggcacagaatttgaaaaataaagcttccagttcagatatgagaacagcaattacagaaaaattggaaagggtcaagaaccagtggggatgg

SEQ ID NO: 5495 - DNA, 479 bp, Homo sapiens
  misc_feature 4: n = A,T,C or G
actncttagggcgaattggagctccccgcggtggcggccgcccgggcaggtactccagccagggcaagagagcgagaccctgtctcaataaataaataaataaataaataaataaataaataaataaataaaaaaaaacaaagttgattaagaaaggaagtataggccaggcacagtggctcacacctgtaattccttgcatttttggaagggcttgaggcaggaggatcactttaggcctggtggtgttcaagaccagcctggtcaacatagtgagacactgtctctaccaaaaaaaggaaggaagggacacatatcaaactgaaacaaaattagaaatgtaattatgttctaagtgcctccaagttcaaaacttattgggaatgttgagaggtgtgggttacgaaatacgttagggaggacaaaagggaagggggtaaagtctttaatgccgatatcttcaagaaaacctaagcaaa

SEQ ID NO: 5496 - DNA, 409 bp, Homo sapiens
  misc_feature 173, 175: n = A,T,C or G
ccgcggtggcggcccgcccgggcaggtacagtcccattgtaagtgttgtttctaattatagatgtaaaatgaaatttcatttgtaattggaaaaaatccaataaaaaggatattcatttagaaaatagctaagatctttaataaaaatttgatatgaaaagcacaatggtgcnanaagttatggaaaacctatagaggattacaacaggtaaacgttaaagagaatacattgctgacttatagtgatgtggctaagaagtacgccttgcaagaggagtctgcagaaggagagcccacctttcacctccagtttgcattcaatctccactgtcccaaggtcattgactgctttgcagcagtaagtgcctccatcatagggggctgggcttgcgaatttccagggtacctt

SEQ ID NO: 5497 - DNA, 303 bp, Homo sapiens
  misc_feature 164, 169, 170, 178, 181, 185, 193, 205, 206, 209, 216, 219,220, 229, 230, 233, 236, 246, 252, 265, 272, 279, 281: n = A,T,C or G
ccgggcaggtactgatgtaaggggcgtcgcacctccttcccctctcgtcctccgaggtcagtttagcaacagcggctgggaaaggtgctgagagcagagttcggtctctccggaaaccctgactccattctcggtgatgggggtgggggaaagaagggtgaaanttgtnnggagacgncanggtnggtttctnaaaaataactcnnaanagtaaanaannaaggggtannctnggncgtttctaanaactantggatcccccggnctgccanggaattncnatatcaagcttatccatacccg

SEQ ID NO: 5498 - DNA, 405 bp, Homo sapiens
  misc_feature 24, 200, 237, 243, 246, 249, 281, 300, 310, 320, 393: n = A,T,C or G
ctacttagggcgaattggagctcnccgcggtggcggccgcccgggcatggtacgcggggggccgatcgcacgccccccgtggcggcgacgacccattcgaacgtctgccctatcaactttcgatggtagtcgccgtgcctaccatggtgaccacgggtgacggggaatcagggttcgattccggagagggaagccttganaaaacggctaccacatccaaggaaaggaagcagcccncccaanttnccnattcccgacccggggagggtagttgaccgaanaaaaaaaaaaaaaaaaaanaaaaggagtncctcggccgnttctagaactagtgggatcccccgggctgcaggaaattcgattttcaaacttattcgatacccgtcgacctcngagggggggccc

SEQ ID NO: 5499 - DNA, 432 bp, Homo sapiens
  misc_feature 191, 192, 225, 301, 370, 379, 391, 409: n = A,T,C or G
ctacttagggcgaattggagctccccgcggtggcggccgaggtacttcaggccctgtaggatctcaggggcgatatagtcaggggtgccgcagaaggtgctggcccggctctccccgaatatgttctctttgcacatcccaaagtcggcaatcttgatgtggccatcccggtccaacagcacattgtccannttgaaggtccctgtaaatgatgcccttgctgtngtagaaactgcagtccacacattatctcagcggcataaaacgtggcacggtagagttcaaagcggcctttgtcctnggatgtggtacgcggggtattatatctgggaaatttgctaagactaaaagatttttcggtacctgcccnggcggccgntctagaactagntggatcccccgggctgcnggaaattcccatatccaaagctt

SEQ ID NO: 5500 - DNA, 303 bp, Homo sapiens
  misc_feature 192: n = A,T,C or G
ccgcggtggcggccgcccgggcaggtacctctgggtcatattgcagaaccctgcccttctttgttgactgaggaaagctcgctccctgcccaggtttttcattgttgatcgaaattaacaccaggtggtgaatagagcccctcctaaggttgctcaggataaatcatttatttaaataggtctgcttatcangaggggccgtgaaggctcccaaaaggaaatgctggcacctgggcccagaagccagggcctctaactcctggggttgatttcttcagtgaagttgcaccctacaaagggaat

SEQ ID NO: 5501 - DNA, 466 bp, Homo sapiens
  misc_feature 199, 365, 379, 448, 450: n = A,T,C or G
cttagggcgaattggagctccccgcggtggcggccgaggtacttttttttttttgtttttttttttttcgaaagcaaataaatttaatctttcattttcaattaatctttaatatttcagaagtatatcaacattgcctaacatgctattttacacacaatagatatataatcaatgtttattgacttaaaaatctttnggttaagccagataaattttgtaatattttatgaactagttaaccctgagtcatgaatttacctttttttttttttttctggagacggagtcttgttctgtcgcccaggctggagtgcaatggcgcaatctcggctcactgcaacctccatttcccaggctcaagngattctcctgcctnagcctcccgagtagctaggattacaggtgcctgcccaccatgcccagctaattttttggatttttaagnanagatgggggggtttac

SEQ ID NO: 5502 - DNA, 362 bp, Homo sapiens
  misc_feature 185, 195, 214, 222, 223, 230, 231, 232, 243, 259, 264, 270,271: n = A,T,C or G
ttagggcgaattggagctccccgcggtggcggccgcccgggcatggtacgcggggagagcaatcatgggagacggctccccggccagacttggctgatgttttcttgtttctgtttcagccttcaggataattccttcagcagcaccactgtaacagagtgtgacgaagatccagtctctctacntgaagaccanactgattgctccagtctcngagatggnnacctttnnngagaactaccncgacacaagggctctngtttnaattanncacgcgccgccctcttgggagcccgcagtagcagaatgtagaggcgaccgtgctggtggacagcgtattgcgacccagcatgggcaacttc

SEQ ID NO: 5503 - DNA, 381 bp, Homo sapiens
ccgcggtggcggccgaggtacacgacccctaggcgtcctgacaggtggatttcgacaaggtcattgtgccctgccaaggcacagcgtagatctggaaagagcagaatgctttccttttcagatgtggctggtcatggaaggggcagttgtccaagttgggctgggtcttggtactcaaagctttttcaagttcctcaaaagcagctctttcggacttttctttctgttcccgtaattcctctccctgggtagtcatctgtttgatgcgactacggagttgagcaatttcttcttctttcatttccagggtttcatgcatctgacgttttgtctctgcgattaccattcccttatcttgttcaagctgttcaattaaagttc

SEQ ID NO: 5504 - DNA, 387 bp, Homo sapiens
ccgggcacggtaccagccagcaacaccaaccaaatgctactctctttaaagtccattttccttcttcttttttttttttttggagacagcatctcaccatgtcctggctggtctcgaactcctgacctcaggtgatccgccggcctcaccctcccaaagtgctgggattacaggcatgacccaccatgccagacttcccattttactttctgcaagctgtttccctagcagctccctctaggggagaggtgaaatcttgcaagttgtagcaagagcacacaggaaacccctaactttcctataccccacccgcctcttcccctttctgtcccgggatacctggcggcaagagacttcttggctattgtccatgctcccagaatcaag

SEQ ID NO: 5505 - DNA, 104 bp, Homo sapiens
  misc_feature 25, 65: n = A,T,C or G
ccgcggtggcggccgaggtactganttcaaaaactagctaacttagaaactgccacacagcaaanaagaaaaccaaagtggtccacaggaacattctcctttcc

SEQ ID NO: 5506 - DNA, 393 bp, Homo sapiens
ttacttagggcgaattggagctccccgcggtggcggccgaggtacaaaaaggaccttgaactcttaaattggaccagcaaactgctgcagcgcaactctcatgcagatttacatttgactgttggagcaatgaaagtaaacgtgtatctcttgttcatttttatagaacttttgcatactatattggatttacctgcggtgtgactagctttaaatgtttgtgtttatacagataagaaatgctatttctttctggttcctgcagccattgaaaaacctttttccttgcaaattataatgtttttgatagatttttatcaactgtgggaaaccaaacacaaagctgataacctttcttaaaaacgacccagtcacagtaaagaagacacaaga

SEQ ID NO: 5507 - DNA, 457 bp, Homo sapiens
  misc_feature 8, 142, 220: n = A,T,C or G
atcgactnctatagggcgaattggagctccccgcggtggcggccgaggtaccactcgattgtcaacgtcaaggagtcgcaggtcgcctggttctaggaataatgggggaagtatgtaggagttgaagattagtccgccgtantcggtgtacgcggggaattttatctggaagaaatgatcctccctctcatggtagctagtgcccagagtggggaacggnaatgtcatatagtggtgcttacagatgatgatgtggttgattgggatgaagaatatccaccacagatgggagaagaatattcacaaattatttatagcacaaaattatatagatttttcaagtatattgaaaacagagatgtggccaagtcagttttgaaggacaggggtcttaagaagattagattgggaatagaaggttatcctacctacaaagaaaaagtaaagaaaaggcctg

SEQ ID NO: 5508 - DNA, 553 bp, Homo sapiens
  misc_feature 170, 172, 221, 235, 246, 247, 258, 262, 274, 279, 292, 299,301, 304, 311, 318, 337, 339, 342, 346, 351, 361, 363, 372,376, 378, 386, 389, 391, 398, 401, 405, 410, 411, 421, 423,446, 471, 473, 477, 539, 542: n = A,T,C or G
ccgcggtggcggccgaggtactacacatttaattactatagctttgtaataagttttatttatttatttttttttttttgagatggagtctcgctctgtcgcccaggttggagtgcagtggtgccatctcagctcactgcaacctctgcctcccagatttcaaacaattntnttgccaaggccccccgagtagctggggattacagggtgccctgccaccntgccccaagttaanttttttttttnntttttttaagnaganaccgggggtttnaaccnattttttgggccnaggcctngnttnttaaaanttcttgnacccttaaaggggtggaantnttncccncaaanttttgggccntncccaaaaantgcntngggggatntancnaagggcnttngaancccannttggcccccntnggcccttggtaaattaaaagttntttaaaaaattcaggggaaaagccngnggtnggtaatttccttttcctaaaaaccaaaattggaaggaaaaaccttaaaaggcccaccagganggnccttaaaagtt

SEQ ID NO: 5509 - DNA, 376 bp, Homo sapiens
  misc_feature 45, 52, 57, 62, 63, 68, 76, 77, 94, 134, 135, 147, 186, 205,213, 216, 243, 244, 283, 294, 360, 365: n = A,T,C or G
ctacttagggcgaattggagctccccgcggtggcggccgaagcgnccgtccnccgcntacannctganaaatgccnntggcctgacagcagcanacattgcacaaacccagggtttccaagagtgtgcccagtnnctcttgaacctncagaattgtcatctgaaccatttctataacaatggcatnttaaatggggggtcatcanaatgtatnttnctaatcatattagtgtgggaacaaatnnaaagagatgcttggaagactcaacaagactttggagtanaagaaagctanaactgataggtgagaccgctttgccgggtgggaagaagcaccacttatttttcctttcttgtaatnatggnctttctttttt

SEQ ID NO: 5510 - DNA, 361 bp, Homo sapiens
  misc_feature 17, 24, 28, 33, 36, 37, 40, 100, 102, 114, 130, 135, 139,165, 174, 181, 189, 205, 207, 246, 259, 266, 292, 307: n = A,T,C or G
ccgcggtggcggccgangtacttngtgntccgnatnnaanatggaaatgggctgacgggcgtttattggaattggcttattgggaccgaggtgatgcctntnacttcaatgttncattgcaggaccattncaagngtgngaaacagcactgtgaatttgcaaaanaatgcccanaacccanaccaaggncctaaactggacctgngnttcaaggagggccaggaccatcaagctaaacatcaacantgaagtaactaangaaggancaggctgggaatccccgagatccggnctgccagcacaggangggcttgagcctgcttccccctcccccaggggggaaaacctccaccctgatccc

SEQ ID NO: 5511 - DNA, 339 bp, Homo sapiens
  misc_feature 252, 269: n = A,T,C or G
ggcgaattggagctccccgcggtggcggccgaggtacagctcaaaaggcagttattgaggagtttgtccagacacttctggtgctcttgctttacttcctctgaggccatggagtctcccacctcaaaatcagagctaatcctcttcttgaggaagcgtaagtatagctcactgcgggcattcatcagggtgacctcagtcaggatggggtccagttctcttggtttcgattttttctgttgtagaattttntcatcaaggttgttctngaacattgcccggaactgctggtggtaagtccctttttgctttgatgaacttgtcttacccaccttcttc

SEQ ID NO: 5512 - DNA, 346 bp, Homo sapiens
  misc_feature 179, 189, 206, 212, 244, 306, 334, 336: n = A,T,C or G
ggagctccccgcggtggcggccgcccggccaggtacgcggggggcattgaggaagccttcaccagcaaggctgacctgtcagggatcacaggggccaggaacctagcagtctcccaggtggtccataaggctgtgcttgatgtatttgaggagggcacagaagcatctgctgccacagnagtcaaaaantcaccctccttttctgnatttanttggaagacaagggaccatttgtggcgttttnaacaaggccctttcctgatgatcattgtcccctacagacaccccagaaacaatttttctttnattgagccaaagtcaccaatcccaaggnangcctagaagc

SEQ ID NO: 5513 - DNA, 433 bp, Homo sapiens
  misc_feature 179, 183, 188, 192, 204, 212, 250, 341, 348: n = A,T,C or G
ccgcggtggcggccgaggtacatgggactacaggcacgcgcctgtaatcccagctactcaagaggctgaggcacgagaatcacttgaacccaggagacggaagttgcagtgagctgagatcacaccactgcactccagcctggtgacagagcaagactccggctcttaaaaaaaaaaantttnttaantgtncgggagagagantaaacagnaaaagaatgtggctggggaattgtgaatcagaagattntaccccccaatttttttcaatccccttttctcaaataataaattagttaaatcagtttctgagttatgccactggctgatgaaaagttganaggtctntttgcagaatggatctttttgtttcgttttgtttcttcttctgcatttaaaaattaaaagattggttttgaggatgtgatgaaaa

SEQ ID NO: 5514 - DNA, 432 bp, Homo sapiens
  misc_feature 353: n = A,T,C or G
ccgcggtggcggccgcccgggcaggtacaccagctttcccatcacccctgcaaccataggagtggtcttggcttcctagttatgttcctatcagggttgcctcactatcttctgggcttctctgctctttcgtcaccagtggaattctttatattaaatttcctctgttttaaagacttcgagtgggttatattttccttgctggacccgagttcaaatgaaaagtctgagttgtaaggggaaaacatcttttttattattattatttttattttatttatttaagaagacaggtttcttgttctgttgccttgggctaagagtgcaagtggttgcaatcctaattcactgtnggccctcaaattcctgggctcaagtggatcctcctgccccacccttgagtagataggactacaggcacacaccaccata

SEQ ID NO: 5515 - DNA, 489 bp, Homo sapiens
  misc_feature 23, 24, 28, 31, 33, 35, 49, 53, 59, 69, 74, 87, 89, 96, 113,128, 136, 168, 199, 211, 226, 231, 253, 284, 294, 299, 309,330, 331, 362, 363, 367, 372, 386, 392, 401, 440, 447, 449: n = A,T,C or G
ccgcggtggcggccgaggtaccnngtgnacnangnttaccagaaagcgnttgntacaanaaaataaganctcangatgagggaaaananaaagatngagagaatttgtgcccncaaccatttcctcanactctaanaaagaacaccctctctacatgcaggtcatgangctcaactctcttattgcctcacttcatgtntacctgactttncacaatataattatnactgnaaagaagtttggggacacatgntatttggagatcacattttaaacacattagnaaaagttgcnctttngaactttttnattgatttttgggggggaggnnaagaattaatttttgcgatgcaacataaatnntccntttgnatttggagtcgacntttgcncaaaatatntaagatttatggtggtggcaatcaagggcgtatcctttnttttttncnttttttttttaaggaggaaaggttttcaaattattaaagc

SEQ ID NO: 5516 - DNA, 353 bp, Homo sapiens
aggtacctcaaagccggaaaggtcagccccccgctgcaagttcttagattcctggaggatctgcagagtcaacattaggagtatccatccattcaccaaggccatcaggaatgtgctgaatgtgctgtaaagaagagttgtcaattgtgcacagaagataagaaatatatgatgaatagataattgaaaagagatcctccagaaagagcagaaggaagtttcttcaatgttctggcactaagatatggtgaacagacagatggaggccacaacattcaagctttattaaacttgccacagataccagtaacagcaattcaaagatgtgaatgggattaattcagggctgttgc

SEQ ID NO: 5517 - DNA, 356 bp, Homo sapiens
aggtacacaagtatatgagttttgtttaaagcactactgaagccaagataaactctggcttagcatgcccctgacggatcagtctagtaatcttatcagaaccaagattacctaaaacattaaccaaaggaaaagctccctcaccccaacctatggctgcccacatttttcagattgaatcatttcaattgtattttaaggttcattgactcttttccacctccaagctgctcctgaacacagattattattttttaattttgaaaactttctcacttctagaatttccacttgagcctgttattattgtagtttcttcttctctgctgtgatttcctatccatttattttaaggg

SEQ ID NO: 5518 - DNA, 288 bp, Homo sapiens
ccgggcaggtacgcgggggctggtcggtgggcgcatgcgcagcgcgcgctctacggcgctgaaccggggcgagcagagagctgtcagatactatagccatatgaagttgaacatggcagaagaagaggactatatgtctgattccttcattaatgtccaagaagatatcagaccaggattgccaatgctaaggcaaatccgagaagcccgtcgaaaagaagaaaagcaacaggaagccaatttgaaaaacaggcagaagagtttaaaagaaaaaaaaaaaaagtacct

SEQ ID NO: 5519 - DNA, 131 bp, Homo sapiens
  misc_feature 3, 5, 6, 25: n = A,T,C or G
aantnngactaccaggatccatgancttaaacaggccaaaatgagcacagtcatggataccgtaggccggaggcttcgggactccctgggccgaactgtggacctggggctgacaggcaaccatggagttg

SEQ ID NO: 5520 - DNA, 144 bp, Homo sapiens
  misc_feature 26: n = A,T,C or G
cactacttagggcgaattggagctcnccgcggtggcggccgaggtacgcggggaggcgaagaacgcaaagctgagaacatggacgttaatatcgccccactccgcgcctgggacgatttcttcccgggttccgatcgctttgcc

SEQ ID NO: 5521 - DNA, 449 bp, Homo sapiens
  misc_feature 174, 182, 273: n = A,T,C or G
gcgaggtactttgggaggccgagacgggcggatcacgaggtcaggagatcgagaccatcctggctaacacggtgaaaccctgtctctactaaaaaaaaataaaaaataaaaaataaaaacatttctgggcatggcggcggaggcctgcagtcccagctactcgggaggcctganggcagganaatccgcttgaattcgggaggcggaagttgcggtgagccgagattgcgccactgcactccagcctgggcggcagagccaagactctgtctnaaaaaaaaaaaagaaaagaaaaaagaaaaagccactccaggctcactgcatcaggatttgcactgcaacagcattgcccagggcacagtcatgttttgagaaatacggaggacctctgaagtgcttgattctgtgaactcacactgctgtaagcagacttgtttctagatagggga

SEQ ID NO: 5522 - DNA, 440 bp, Homo sapiens
ccgcggtggcggccgcccgggcaggtacgggggagggtagagtgagaagcaccagcaggcagtaacagccaacccttagccattgctaagggcagagaactggtggagcctttctcttactcccaggacttcagcacctaagacagctccaaaacaaaccagaacagtcagctccggggaaagcacgactgggcgagaggcacagaaatggacaccagaaataaggcccagctccttgtgctcctgactcttctcagtgtgctcttctcacagacttcggcatggcctctttacagggcaccttctgctctcaggttgggtgacagaataccctttgagggagcaaatgaacctgatcaagtttcattaaaagaagacattgacatgttgcaaaatgcattagctgaaaatgacacaccctattatgatgtatccagaaa

SEQ ID NO: 5523 - DNA, 417 bp, Homo sapiens
  misc_feature 51, 384: n = A,T,C or G
ccgcggtggcggccgcccgggcaggtactttaatagttaagagaaaataangtttgcagatttttaataatctgtttgtaaaaggctatctctaagcctagtatgtgggtaattttacaggtgtgttttttgataactttaatataaaataaactcattttatttgtgccaaaaaaaaaaaaaaaaaaaaggtacagcaatgagcaaatccaacctcagatctgaagtgtcttccagtctggccctgacccagccattctctgcccttccttctccctttagggtagcccaaatcccattgccacacaacatctcaacttaccatccctttcctctatccccatcccctctgtctgcgtcacagaaagtctgtgtgttctgaanagttcagccttcctctaaccaaacctacacttt

SEQ ID NO: 5524 - DNA, 454 bp, Homo sapiens
  misc_feature 210, 318, 348, 381, 394: n = A,T,C or G
cactacttagggcgaattggagctccccgcggtggcggccgaggtacacgggggtgagcggaggagggtgctgcttatgcgagagcaggttttgggagctcactaaagcaggtccctgattctggtcttgaatagcggaggaggaaaagaagatgatgggggaaaagaaaagaagccatttatgcatccctccctaattcagtatccganccattgaggggagttgtcaagctagtgggggaagaagagagggtttaagttttgaatgaagttgggagtttttattattgcactgaactaaataggcattttattaanaaaaaaaaaaaaaaaaaaaaaaaaaaggtncctgcccgggcggccgctcgaagctcgatggtntacaggcattcanagctcttggggtaagggtttgggaagtcagggctggtgatcaccccagtcctttgagtga

SEQ ID NO: 5525 - DNA, 426 bp, Homo sapiens
  misc_feature 17, 25, 34, 41, 52, 55, 62, 153, 168, 217, 226, 264, 302,326, 339, 358, 367, 373, 389, 392, 400, 403, 411, 424: n = A,T,C or G
aggtaccgcggggggantcaagggnccccattcngtgggcnaaccccttgangcnccccttntccaactccctattgtagtaaacttggaaaccttggaaatgaccaggccaagactcaagcctccccagtttctactgacctttgtccttangtgtgaaggtccagnggtttgcctagggaaaaagaaaatcaagccaagaccacaaggttgttantacccaagnagttgtttttcttaaaaaattgggttgctaaaattttntggtcccttcttcttgtggtcccctggggggaaattancttgtgcccaatggcccttgggangaccattattcancttccaaattttttccttnttggagggnaaccancaatggaatatggggnatnggggggtnggntcctggtnggtttaatttttngg

SEQ ID NO: 5526 - DNA, 395 bp, Homo sapiens
  misc_feature 72, 153, 231, 280, 291, 294, 317, 394: n = A,T,C or G
atacttagggcgaattggagctccccgcggtggcggccgaggtacttttttttttttttttttttttttttngaagctgggatatcttacagaggaaggaaaaattaaccttttttactttctttctcactttttaaatcagccaaagtcaancccgtttgccaacctgcatgtccatgcctgtaagcccttctttttggccaaggaagaaaggaagaaagaaaaaagaancccaggggcctgtatcccctgattaaacacagcacagcactccaggcanacatgcccggnggnggctcctttgcaccattgacctnaggccaaacacctcagcgccaacaatgggacctcggccttccggctaggtttgccccaggctgggcaggaaaccagnt

SEQ ID NO: 5527 - DNA, 456 bp, Homo sapiens
  misc_feature 37, 39, 40, 42, 50, 66, 68, 69, 70, 74, 76, 77, 85, 120,195, 261, 347, 383, 389, 398, 450: n = A,T,C or G
atatatagggcgaattggactccaccgcggtggcggncnncngggccaancctaaatggcttgatnannnctgngnncaccttanccactggaaacaaagcataaagttactgagatgcntaatagtgattctttacctgaagatgcattaattgcattgtgattcagctgcagtttcacatgagccaacaccancttaaccccagaaggggagggggcatgaaaatgcagcttgtgcagggatgcagggggctgcccgcncattgggccccctgtgcagcctcaggatgccaacgccctggtagccccctctcaatggaagacgtgacttgagggatacacttgcntgaaatggtatttgatttcccgtcaggcctttgganggcaanaaccccaantatccgaaaataccccctgcgaagaaaccaagaatttatcttggggcttgtngggaat

SEQ ID NO: 5528 - DNA, 275 bp, Homo sapiens
  misc_feature 46, 64, 110, 131, 132, 228: n = A,T,C or G
ctttaggcgaattggagctccccgcggtggcggccggtggtggccnggccggccccggccttancccccgcgtactttttttttttttttttttttaattcaaagccagntttactgcaaagtttgccttnngccctatacttggagttttacaagttacgtccctacatttgcataatacaacgaatttagcttaaatttggaaacagggtaaagtttttgttccanaattgtttgcaagaggaacactgggcgcagcttaatgatcttttctt

SEQ ID NO: 5529 - DNA, 313 bp, Homo sapiens
ccgcggtggcggccgggccgagaggtggttacattcgttgaaggacaccagctgcggaatttgcggctttggcagattgaaatcatggcaggtccagaaagtgatgcgcaataccagttcactggtattaaaaaatatttcaactcttataccctcacaggtagaatgaactgtgtacgcgggtttaagaagcggacggagctgttcattgccgccgagggcattcacacgggccagtttgtgtattgcggcaagaaggcccagctcaacattggcaatgtgctccctgtgggcaccatgcctgagggtacct

SEQ ID NO: 5530 - DNA, 331 bp, Homo sapiens
tggtggccgccgagcagcaaaaggcgcagtttactgcacaggtgcatcacttcatggagttatgttggggataaatgtgtggagaagccagggaatcgcctagactctcgcactgaaaattgtctctccagctgtgtagaccgcttcattgacaccactcttgccatcaccagtcggtttgcccagattgtacctcctcctgctcctcaagagtggtggtctattttgccatcatcacctgctgtctgcttagaagaacggctttctgctgcaatggagagaaatcataacaggacggtggcacaaggaggccatcttttcctcatcggtt

SEQ ID NO: 5531 - DNA, 341 bp, Homo sapiens
  misc_feature 86, 95, 101, 107, 118, 121, 126, 129, 309, 311, 315, 317,318, 321, 326, 327, 328: n = A,T,C or G
cactacttagggcgaattggagctccccgcggtggcggccgaggtactgtaaataggtcaaggctcattttaaaaaatatgttganggcgggtgngggggnctaatncctgtaatccnaanacttnggnaggctgaggtggttgggtcacctgaggtcaggagttccagaggagcctggctaacatggcaacagaatgaagactgtctcaaaaaaacaaaaaaatcagtgttcatgtgaaaacctgtgcgtcaatgcttatatcaactttatttgtaaaaaataaaaataaaaaactggaaactgaaananaaantnnacnaacannnaagtacctgcccg

SEQ ID NO: 5532 - DNA, 201 bp, Homo sapiens
  misc_feature 188: n = A,T,C or G
ctatagggcgaattggagctccccgcggtggcggccgaggtacgcggggcttttcacaagatggcgccgaaagcgaagaaggaagctcctgcccctcctaaagctgaagccaaagcgaaggctttaaaggccaagaaggcagtgttgaaaggtgtccacagccacaaaaagaagaagatccgcacgtnaccccaccttccg

SEQ ID NO: 5533 - DNA, 471 bp, Homo sapiens
  misc_feature 194: n = A,T,C or G
ttagggcgaattggagctccccgcggtggcggccgcccgggcaggtactatgaagacacaccaagacctcctctgctggaaatgtccaggcatgttatactctttgtatgaattctggaaaaagtagtatatggtgccaaaaacttagaagatgcattttcctttggacatgaaatatgaatgcttttctttgnttattttcattcacaagtaaatccttctgaagctgtaacctctgggatgccatctaggccaattccttgacaagtcaggctgccatacaaagatggtttccctgggggatgacagctcagccaggcctccccttcatccttcctgagggcttgcgcccagtcgctctgaatcctcaaaggcgccgccatcttcgaccccgcctccaccagcccccccgcgtacctcggccgctctagaactagtgggatcccccgggctgcagggaatttcgatatc

SEQ ID NO: 5534 - DNA, 474 bp, Homo sapiens
  misc_feature 25, 34, 42, 45, 50, 52, 432, 435, 438, 440: n = A,T,C or G
cttagggcgaattggagctccccgnggtggcggncgggcgtngcngccgngnttctggagactgaggcgggagggtcacttgagcccaggaattgtgagattaacctgggcatatagggagatcctgtctctatttaaaaaaagaagctatgtttacactacactatagtctatttaaagtgtgaaatggcgttatgtccttaattttaaaactcttgatgctggctgggttcggtggctcatgcctgtaatcccatcactttgggaggccaagacaggttgattacttgaattcaggagttcaagaccagcctggacaacatggcaaaacacgtctttaaaaaaagaaaagaaaaaagaaaaacagaaagaaaaaggaagaaaaactacttgctgcccttacttgaagctcaattatttaaaacatagaanaanatncncaagaacaaaaaaaaaaaggtacctgcccgggcg

SEQ ID NO: 5535 - DNA, 559 bp, Homo sapiens
  misc_feature 101, 155, 163, 214, 218, 265, 270, 275, 283, 296, 320, 323,353, 356, 365, 371, 377, 380, 394, 436, 447, 452, 462, 467,510, 514, 526, 532, 537, 538, 540: n = A,T,C or G
aggtacgcggggaagcccaataaacctctcattctagctaaccgcgtcggggagcggcgccgggagaagggcgaggcgacttgcatcacggagatgtcggngatgatggcttgctggaagcagaatgaattccgcgacgatgcgtgccagaaaanaagatccnagggctttccctcgattggtgcccgccgaggggcttcagggaagccccganaagnatgaagaatcaattaccaggaaaaccctggggaggaagttctggggnagttntactntcccaaantaaaatttggaantaaagtttggtttaccaagaaggnttntccctaaacaaaaccctttaaccctccaangcntgaaaaaantgggancaaagntantttttttcaaactnggacctggaaaattattaaggcctttccttggaaccaaaacntaattggccancaagngcccgttttntttangcaagaaccaatttggggccaattttggccccaattggccccncttncttttttgggtnaggggngtttnngnggaaagcaaggggccaaaa

SEQ ID NO: 5536 - DNA, 396 bp, Homo sapiens
  misc_feature 140, 147, 186, 193, 198, 201, 229, 349, 356: n = A,T,C or G
gagtaagttctcacaaggtctgatagttttataagggacttttctcccttttgctcaatacttctccttgctgctgccatgtgaagaaggatgtgtttgcttctccttctgccatgattgtgacattcccaagaacctgnaggccangctatgacacagagtcaatcaataaccagggagatctgngatatancccantangtggggccttgctgccatctgccatatnacccttccagtcccaggcttctgaagagacccggtaagtgcggtgcaaatttcaactgaccttatggacgcagaacttcagccatgaaggtaacaggcatctttcttctcagtgccttgngccctgntttgagtctatcttggtaacactggagctgacttccctgg

SEQ ID NO: 5537 - DNA, 329 bp, Homo sapiens
  misc_feature 37, 48, 69, 124, 148, 160, 168, 189, 210, 212, 237: n = A,T,C or G
ccgggcaggtacttttttttttttttttttttttttngctggggtcanagttttaatcctgggaaaaanaatctggccgctgggccatgccctgggactagcccgctggtccctggtgtgtccnaatcagtgctccagtgcccgcctnttctccagcttnttctgtanctctgccgtcatgtctgccanccctgggggttcaggaccagnanctgcagctggctcagggatccccantccatgcccaccgccctgacagccacccaggaccagctacagatttgcagggccccgtgcaacaggacagtgtgctcgaaggcattaagaat

SEQ ID NO: 5538 - DNA, 468 bp, Homo sapiens
  misc_feature 86, 148, 185, 239, 275, 346, 380, 450: n = A,T,C or G
ctatagggcgaattggagctccccgcggtggcggccgaggtacacacggccgggcacagtggttcacacctgtaatcccaacactntgggaggctgaggcgggtggatcacaaggtcaggagatcgagaccatcctggccaacatggngaaactctgtctctactaaaaaatacagaaaattaanccagtcatggtgggcacgttcctctagtcccagctactcgggaggttgaggcanaagaattacttcaacatgggatgtggaggttgcagngagccgagatcgcgccactgcactccagcctggtgacagagcgagaccccatctcaaaaaaaaaagttgtntgtgacagctaaccatagtaaaaaaaaaaggaangaaaattagagagagaaagttgggacaacactaaatcattagtaatttgagcacatttcctccaaggcanatgctattttttcaactt

SEQ ID NO: 5539 - DNA, 306 bp, Homo sapiens
  misc_feature 210, 254, 306: n = A,T,C or G
ccgggcaggtactcctgcttggtgatccacatctgctggaaggtggacagcgaggccaggatggagccgccgatccacaccgagtatttgcgctccggcggggcgatgatcttgatcttcatggtgctgggtgccagcgcggtgatctctttctgcatgcggtcagcgatcccagggtacttttttttttttttttttttttttttattnaaaatgttctttttttatttgtcgtttaaaaacaaacttggaanaagcaaaatccaaaacttaccctttgcctttcgcaacataaatatgtacctn

SEQ ID NO: 5540 - DNA, 119 bp, Homo sapiens
  misc_feature 25: n = A,T,C or G
cgcgggtgggcgggccgtgtggcgncagggaggaccccttacagcaaccacagcgtcgggaatccgaaagggaaaagaggtgcgcaggcgccacacacggcctttacccccgcgtacct

SEQ ID NO: 5541 - DNA, 434 bp, Homo sapiens
  misc_feature 242, 360: n = A,T,C or G
ccgcggtggcggccgcccgggcaggacgcgggtgccatttggagggtaggggatctgcttcccactgtgactgggctatgggattctgactaccttgcttacagattcatggtttgataaatttgttgtattcaaaaacttgaaatgcaggacgccattaagtgtctgtttatatttttggaatatttgtattacttacaattaattaataaaagtgggaaaaaaaaaaaaaaaaaaaaaangttcctcggccgcccgggcaggtacgcggggggaatgtcttacgcaagctgacagtggatgtgcaattcttaaagaatgggcagattgcattcacaggaactacttttattggctatntaggattatggactggccagagcccacacaagtttacagtttctggtgatgaacgagataaaggctggtggtgg

SEQ ID NO: 5542 - DNA, 365 bp, Homo sapiens
  misc_feature 5, 17, 44, 99, 159, 306, 352, 356: n = A,T,C or G
gtggncgggccgagganctttttttttttttttttttttttttnctggggtggttatttttcttttctgtgtccttccccaacagcagttggaattttnttttgaacacaaagtaaattaatgtttatactgttttttcacctgagtcatgtaaaaggngactcctttcattttaaaaagttatatttaatttttgggggccttaattaaaatttaacatttaaccatgtgttttttttttgtaaacacgtctacatgtcaacaaatggataagggttaacaaaggcaaatactgacttcatttgngttttaaacacgattatatgaatttttcttttttaattaaaaaaangacntaaaaccat

SEQ ID NO: 5543 - DNA, 373 bp, Homo sapiens
  misc_feature 347, 349, 351, 358, 367: n = A,T,C or G
ccgcggtggcggccgcccgggcaggacgtctacagtgagccttgtggtaagcttgggcgctcggaagaagccagggttaatggggcaaactaaaagtaaagtctctcattccacctgatgagaaacacccagaggtgtggaggggcaggccaccccttcagggtagggtcccctccatgcagaccatagagcacaggtgtgccccaaagaggagcagagagaaggagggagagggcccacgagagacttggaaatgaatggcaggattttaggcgctggacttgggttcggggcacctggcctttccttgtgtatttctcctactgtctgcctaactatttaatacnantnaaaaaanaaaaaaaangtacct

SEQ ID NO: 5544 - DNA, 366 bp, Homo sapiens
  misc_feature 17, 50: n = A,T,C or G
atcactactatagggcnaattggagctccccgcgggggcggccgcccggncagggtcccttgcctgtgctggggtccacccctgccagtggcaccatgacctcgccaatgacatcatcccgagagaagcggtcaaagctgaggacaaggaagtgcagcaccaggtcctgcagctggctgtaggggatgccatagaaggtgaaggtctcgtcaaacacagggtccagggtcttccgcagcactctggtcttcacccgatgccgtttgtcaggaaggatggtcattttgatgtaggggtcaaatccctgggtctggtcatccatcactggcagcccgtgggcctcctggattgtcaccaccagggctt

SEQ ID NO: 5545 - DNA, 521 bp, Homo sapiens
  misc_feature 36, 40, 43, 47, 55, 58, 65, 68, 91, 276, 325, 343, 348, 355,379, 381, 389, 396, 416, 418, 428, 437, 451, 453, 460, 465,482, 491, 495, 512: n = A,T,C or G
actatagggcgaattgggactccccggggtggcggnccgnggncctnggccaggncanaaagggncanttgggcaggaaaataaattaaangtcttctaggtgggaagggaagaagtattaactaaatagagatgggagacgatatggtggttttgtgcatagtaatccaagggaaaaactatagaaaatccaaaggcatgatttattaataaataaaattccagcaaagtttacagggatacagggattaaatattgcacgaaaatttggttatnctttcaaatattagctattccaatggaataaaaatgcaaaaaaatgatngtttaaaggaaaaaccanatttntaaattnttttcaaaccaaatgggttcaaangnctctgggntggggcntttgttgcccctggttatantntcccataccncctttttgngggaagattcttgnangggcacngaaanaggaacctggccttatnaaggggccncaanggaaggacccccacggncccttgggg

SEQ ID NO: 5546 - DNA, 286 bp, Homo sapiens
  misc_feature 48, 59, 73, 81, 83, 88, 108, 109, 110, 115, 139, 153, 156,165, 212, 259: n = A,T,C or G
tcactacttagggcgaattggagctccccgcggtggcggccgcccggncaggtactttntttttttttttttntttttttncnaaaanatggggtttctccatgttgnnnagggnggccttgaactcccaacctaaggngatccgcccgcctnatnctcccaaantgctgggattacaggcgtgagccaccatgcctggcttaagagagatncaataattaggggatccttaaaaaaaatggaacactttgtaaaaaanatcaaatttcatactttttgctaggag

SEQ ID NO: 5547 - DNA, 305 bp, Homo sapiens
  misc_feature 172: n = A,T,C or G
aggtacaatatgctgcagcataatttgtcaggccaaccttcacaccatattttggcagttcgtgtgcatacgctgcgcagactatcatatccccctctatacgggcataagcaatctgacaaatgatatctctgtttgtcacacgaactatcatcctgtcccgcgtactttnttttttttttttttttttttacgaatgaggcaatttattaacccagcatggtttgttctaatgcttcttgttggcagctgccacctgtccggcgattctgtccagatctctttgtccctgaggtgtcaagttt

SEQ ID NO: 5548 - DNA, 417 bp, Homo sapiens
  misc_feature 307, 396: n = A,T,C or G
ccgcggtggcggccgttgctgagctggtgtggaacgtctgtgatcagattcattgggcttttgccagctctttttagattgtcctcttgagacctgtttacagaggaatggccagaggccacaggcactgcctcctgagaccatccacctgatgcgaagaaagctagaaaagcccaaccctgagaaaaatgcttgggaacacaacagcctcacaattccgagtccagcatgtgcttcggaggccagcctgggaagtgactgatttattgctcactgctttggaaaatccagtaaaatatgctgaggncaatatggaacaaaaggacacagacagaattatttgttcaactaacattcttcataaaaactgatcaggacactcccaagggattggtnttctcaagaacaatgaaagga

SEQ ID NO: 5549 - DNA, 215 bp, Homo sapiens
aggtacttctcctcttaaagaattggccattttcatttatcatgtaaattatccacttttatgcataacatactttccggcacgccggagccgcaaaagcctcgaccgctacgactcctctgtccgctactgccccgcgtacgcgggggtagtggcttcgtcttcggtttttctcttccttcgctaacgcctcccggctctcgtcagcctcccgc

SEQ ID NO: 5550 - DNA, 548 bp, Homo sapiens
  misc_feature 51, 113, 115, 116, 118, 125, 126, 135, 136, 139, 146, 149,152, 154, 155, 157, 159, 161, 172, 175, 179, 182, 183, 191,192, 195, 200, 209, 214, 220, 221, 226, 229, 237, 238, 240,241, 242, 245, 247, 252, 255, 259, 261, 264, 265, 267: n = A,T,C or G
  misc_feature 270, 274, 277, 284, 292, 293, 294, 302, 305, 307, 309, 318,321, 334, 335, 352, 365, 368, 371, 373, 376, 378, 381, 382,384, 392, 393, 394, 398, 402, 405, 406, 412, 418, 421, 424,432, 436, 440, 457, 460, 465, 474, 475, 477, 485, 488: n = A,T,C or G
  misc_feature 496, 502, 522, 528, 544: n = A,T,C or G
ccgcggtggcggccgaggtacttttttttttttttttttttttttccattntttttttttttttttttttttttttttttttttttttttttttttttttttttttttttttngnnanaaaaaanntttttttcnnttnggcccanggnttntnngnanantaaaaaaaccnccntttnggnnggggggannggnttagncaaaacccnttttnttttgnnggggnccnttaaaaanncnnnggncnaaaanggntttnanccnncnttnaaanggnccctttnaaaaaaannnttccccanccnancnttggggccnccnaccctgggggggnnggtcagggggccccccnttttttggaaaanctnccntnccncnttnngnaagggggnnnccanaaanccnnaaaaangggggnccnggngggcaaancccngggnttaaaaacccaaagggnccnggtanaattttttnncnagggccanggnaattttangggggnggggggttttcccccccccnttttanagggggctttttgaancccc

SEQ ID NO: 5551 - DNA, 306 bp, Homo sapiens
  misc_feature 1, 126, 138, 149, 177, 187, 193, 195, 197, 205, 206, 207,232, 233, 241, 247, 253, 256, 258, 264, 268, 286, 294: n = A,T,C or G
ntaagcgccgtcaatctcaagctcactgcaagctttgcctcctagattcaagcagttctcctgccttagcctcctgagtagctgggattacaggcgcctgccaccattcccagcttaatttttggnattttttagtanagaccggtttnaccatgtttgggttaaggctggtctttnaaacttcttnaccctnangnttattccnnnttgccctccgttcttccccaaaaanngctagggnttaacnaggcantanantccacngggnccccggcccgcttttagnaactagtnggatcccccggg

SEQ ID NO: 5552 - DNA, 310 bp, Homo sapiens
  misc_feature 258: n = A,T,C or G
aggtacgttgtttagctgaaagggtcttcttagattttctgtgagcaccaatttgttcttcaagatacttctgctgcatttgaagcagctgttgggtctcctggagccactcttcatactgcttacgctgtgaaatcattgacaaagcctggaccaaaatttggaggattcccgcgtacatggtgccaaccgcctcgggggcaaactcgcttcttggacctggttgtctttggtcggggcatgtgccctgagcatccnaagaagtcatgcaggcctggagataaagtccctccaattaaaccaaacgctg

SEQ ID NO: 5553 - DNA, 296 bp, Homo sapiens
  misc_feature 16, 71, 89, 91, 97, 108, 121, 124, 157, 186, 210, 243, 251: n = A,T,C or G
gggccttagacagcanatggtggggtgtgtgtgaggggtggtatgcgtgctgctctgagtttagggctgantgtgcaagctaggagcanangacagntccaagcctgncttctcaccagtncgnctgaggtggaaaagaatccagcactctccccancactattccgacgtggtctcccatccctnggatgccagctcctattaggaggnggagaaagaaacgcgtgccttataccaaaggcncaattaanagaactttgaacggtaatacgcccacgaataaaatttcattacta

SEQ ID NO: 5554 - DNA, 142 bp, Homo sapiens
ctacttagggcgaattggagctccccgcggtggcggccgacaacgagactctcggggtccccgcggtcggaagccaccatgcccaagaacggatggctgctgattacacccgcttgcccgccgaatccttccccgcgtacct

SEQ ID NO: 5555 - DNA, 378 bp, Homo sapiens
  misc_feature 188, 226, 245, 290, 308, 318, 359: n = A,T,C or G
tacttagggcgaattggagctccccgcggtggcggccgcccgggcaggtaccctcatcagaaaaagagcccgcgcattctcctgccgatgccttgtcggtcgtagaggacattgaacttgttcacaaactggttcatggtgttgcacgttttggtgatggtgccgaggtaggccatgagccccacgtngttgcatttgatcataaaaaaatctgtcttgaaccttngtcctgtgctgagccaccngggagacagttgacacaagagtcataggcctcccgcagggatctnatgattaaaggggacctntcccgctttnagaggccttgaccgttacctcggcccgctctagaaactagntggatcccccgggcttgca

SEQ ID NO: 5556 - DNA, 128 bp, Homo sapiens
  misc_feature 96: n = A,T,C or G
cttagggcgaattggagctccccgcggtggcggccgaggtacttgagcaaaataacttaaaaaaaatcttaagaggaggaggacaatgatattttntaaaaacatatttgaggctgggcatggtggct

SEQ ID NO: 5557 - DNA, 340 bp, Homo sapiens
  misc_feature 7, 154, 199, 259, 275, 287, 300, 307, 308, 310, 333: n = A,T,C or G
ccgcggnggcggccgaggtacctatgactctggcatcagattcctggcaccccagtcccactagctgtggtcccaagaatgaacctgcattttaacaagattcaaaaccattgcagaggccaggcgaggtggctcacacctgtaatcccagcangtttgggaggccgaggtgggttggatcacctgaggtcaggagttnaagaccaacctggccaacatggcgaagtcctgtctctactaaaaatacaaaaattagccnagtgtagtggcaggcncctgtaaatccntagctactcgggnagggctnnangcaggaagaatttgcttgaatcncggggag

SEQ ID NO: 5558 - DNA, 422 bp, Homo sapiens
  misc_feature 341: n = A,T,C or G
tacttagggcgaattggagctccccgcggtggcggccgcccgggcacggtacgatcttggctcactgcaacctctccctcccgggttcaagtgattctcgtgcctcagcctcttgagtagctgggattacaggcgcgtgccactgcgtccggctaatttttgtatttttagtagagatggggtttcaccatgttggccaggctgatctcaaactccttgacctcatgtggtccacccaccttggcctcccaaagtgctgggattacaggcgtgagccaccgcgctcagcctacaagcaattttttaaaaactgacacctattactgataaaattctctgtnttaaaatccctatttacctattttaaagataaagtaattagttttttttttaaaatacaagtcccgccgttactttttttt

SEQ ID NO: 5559 - DNA, 304 bp, Homo sapiens
  misc_feature 156, 200, 247, 264, 276, 298, 302: n = A,T,C or G
ttagggcgaattggagctccccgcggtggcggccgaggtacgcgggattgagggtgcttaaaaatgctgaagaaactttaaaacatgattcttcttataattttatgtgattcttatagcacaatcatttttgaaaaaggaaaactaggctgggcngtggtggctcacgcctgtaatcccagcacttttggggaggcctnaggttggggttggatcaccctgaggtccaggaagtttgagaccagcnctgactaacattggaanaaaccctgtctntactaaaaatacaaaattagcntggngc

SEQ ID NO: 5560 - DNA, 403 bp, Homo sapiens
  misc_feature 127, 244, 293, 319, 382, 384, 385: n = A,T,C or G
ctacttagggcgaattggagctccccgcggtggcggccgaggtacgcggggtttgagtcactggtgcgccaggatccccgctttgaaatctgtgtggaagtcattctggggcttgtctgctttcggntaaagggttccaacaaagtgaatgaagctcttctgcaaagaataaacagtgccaaaaaaatccacttggttccatgtcacctcagggacaagtttgtcctgcgctttgcccatctgnttctcgcacggtggaatctgcccatgtgcagcgggcctgggaacacatnaaaagaggctggcggcccgctctagnaactagttggaatcccccggggctggcaggaattttcgtataatcaaagcttatcgatacccntnnaaccttccgagggggggg

SEQ ID NO: 5561 - DNA, 433 bp, Homo sapiens
  misc_feature 53, 214, 223, 233, 262, 274, 293, 304, 317, 318, 346, 373: n = A,T,C or G
actactactatagggcgaattggagctcaccgcggtggcggccgcccgggcanggtacgcgggtcctgcaggaagccgcgtgactcccgcctcctccctgtgctctctggctctggactgtgactgcgcctggattctgccattgcgacacatttttgtgcctttcagcccctggtgtctgcagtgggggatttaaggcacccgcttccacttntttcttgtntggagttttntgttggaaccgccggcgttggctccgaanacttaacgacanccactggcggcaccttctnctgcgcccagntgatgtatccacnngtgcctgtaacctcggccgcatctaagnaactagttggatcccccgggcttgcanggaatttccgatattaaaggctttatcgattacccgtccgacaccttgaggggggggggg

SEQ ID NO: 5562 - DNA, 278 bp, Homo sapiens
  misc_feature 20, 43, 58, 80, 221, 263, 265, 268: n = A,T,C or G
ttagggcgaattggagctcnccgcggtggcggccgcccgggcnggtacgcggggactnacaagcttggaccgcatcctanccgccgactcacacaaggcaggtgggtgaggaaatccagagttgccatggagaaaattccagtgtcagcattcttgctccttgtggccctctcctacactctggccaagagataccacaagtcataacctggagccaaaanaggacacaaagggactctcgacccaaactgccccagaccctntncanaggttggggt

SEQ ID NO: 5563 - DNA, 406 bp, Homo sapiens
  misc_feature 6, 68, 224, 266, 282, 301, 331, 343, 358, 372: n = A,T,C or G
ttgganctccccgcggtggcggccgaggtacacatggtaggctaaaaattaaaactgcttttccacanaactgataaattactagattcttggttctttcatgatatcataacattaaatcattaaaaatataaggcaatttaatgtaaactactagcatttacaaaacaagtaaagttataaaaaaaactgtaattaccaagcaaaatgcaccaaataccagntgaacatgaaaccagggagttgaagtttgctggagaacattnaaaatcacttttcagngggtttcacttcacaattncatgctgcactgggcctgacacgttcagcnaccatgaagcanacacttttggcaacntagaaaatgttaancttttctgttttgactttttttatcttaaaaatg

SEQ ID NO: 5564 - DNA, 421 bp, Homo sapiens
  misc_feature 146, 148, 149, 188, 264, 332, 340, 351, 381, 386, 389, 393,403: n = A,T,C or G
atacttagggcgaattggagctccccgcggtggcggccgcccgggcaggtacccacagctggtattacaggctacaggagtttcaaggtagggaaggatggctgtgcatgggcccagccctgtggagggtggtggtcttcagccantnnaaggccaccagatctgccactgaagtaggaccttgcttncaatggtgacaagccctacagcaagatctacaggcagaccttaacaagatacaagggcaattttctcttctttcgnaattttcctaagttttaagttgggttgacccgttttttacaaaacttcaacaaactggacagtttccnacaagacnctgggaggaanaggatcctaacccttcttctgcttgggaantcatnaangccnaggtttttanttatttttcctttggtcc

SEQ ID NO: 5565 - DNA, 370 bp, Homo sapiens
  misc_feature 1: n = A,T,C or G
nccgcggtggcggccgcccgggcaggtacacagggaaagataatagggaagagatgagggggggagttctccatgactaaagaagaaaaatatatgtaatttatgggtagaaaggaggaattctgcaaaattttgcaagtgaaatgaaaaacagtactcgaagtattcactatagggaagctcctcactaatggcctcttctaccagcagcgatgtctcatatgtccagcagcgggcaacatttcggacagtataaccaccaccacccagcacgagtagagggatattgaagctcttgacatattcaacgcattccccatgccctcggatgctgaggttaaagcagcccaatcgatcacagcccagagag

SEQ ID NO: 5566 - DNA, 357 bp, Homo sapiens
ggtggcaggccgcccgggcaggtactgttgacatcagatctgctgggctggtgccactggagctgatgtggtccttgtgactcttactgcccccagcatggctctgctggctccagctggatggcccatctcctgtcagtaacctggtcccatctgttttgcagatgacccgttggcttcctgaccacctggccgcccactgctatgcgtgcgacagtgccttctggcttgccagcaggaagcaccactgcaggaattgtgggaacgtattctgctccagttgttgtaaccagaaggttccagttcccagccagcagctctttgaacccagtcgagtatgcaagtcttgctatagca

SEQ ID NO: 5567 - DNA, 381 bp, Homo sapiens
  misc_feature 3, 35, 50, 64, 66, 82, 111, 154, 343: n = A,T,C or G
ggnggagtgacctggggctgtggagagcgacccgnggccttgtgtttcanagtttaccacctangntgactttagtgactanatcggagatcatagatgaaaaaggaccantgatgtctaagactcatgatcatcaattggaatcaagtctcantcctgtggaagtgtttgctaaaacatctgcctccctggagatgaatcaaggcgtttcagaggaaagaattcaccttggctctagccctaaaaaagggggaaattgtgatctcacccaccaggaaagacttcagtcgaagtcccttcatttgtctcctcaagaacaatctgccagttatcaagacaggangcaatcctggcggcgagcaagtatgaaagaaacgaacc

SEQ ID NO: 5568 - DNA, 449 bp, Homo sapiens
ccgcggtggcggcccgcccgggcaggtacgcgggggctgtctgggctcggggcgcggcggcagtcagctctatgttcgcggtcttaacctctcctctggccgagtccttgcaagaagtgaattacccgaccctgcaaaacacttactattttggagtttaaagtatgtcatcatggcaaagtttcggagaaggacttgcatcattttggcactttttattctatttattttctctctgatgatgggtttaaaaatgctgagaccaaatacagctacttttggagctccttttggacttgaccttcttccagaacttcatcaacgaactattcatttggggaaaaattttgatttccaaaagagtgacagaatcaacagtgaaacaaataccaagaatttaaaaagtgttgaaatcactatgaaaccttccaaagcctctgaacttaact

SEQ ID NO: 5569 - DNA, 621 bp, Homo sapiens
  misc_feature 458, 478, 500, 501, 515, 516, 538, 556, 569, 595, 597, 599,600, 603, 605, 609: n = A,T,C or G
cgaattggagctccccgcggtggcggccgcccgggcaggtaccatgttgacaaaaatgccagatcaaatggatttgagaaataagcccaattcaaggctggctcagccctccacggggcctcccagggaaaggaattcctttatgttcttggaagcccttttctagaaaagccattccattcatacctttgtagagcagtgggctgggtgtggagggcagcgcggagggtatctgcaagagcctgtattttccgcctcccttgcccccactccttttatccttttaaaagtcctatcagccctgccttcgtcccttccgccctaagccctaagagtgggggaggtttaatacggccaatgggatcttgtataaagtctaccgtaagttttaatttaccagagctataaagatggttaaggtagactagtgggggactggctacagataaaatgagatncaaaagaacatttgcaaatnaatgccctaaaaattacaagtnngcttgggaattttnntgaaatcaatggccccttgggnttttttagaatggctaantttttcaagctgnttccttaaactttaattttgacaatntnannatntnaaanctttgggggggg

SEQ ID NO: 5570 - DNA, 309 bp, Homo sapiens
  misc_feature 99, 192, 274: n = A,T,C or G
gaataggactccccgcggtggcggccgagtacatattgtatctgtgtaacattttgtatattccaggggtagggccgccccctgtatcatacctagcanaggttggagctggcacatggagaggaggttctaataattatttggggctgggaaacttatttattgatagcataggacagaggaaggaggtcnagcggccgcccgggcaggacattcattctctcaggaaaaaaaacaaggtccccacagcaaagaaaaggaataggatcaaganatacgtggctgctggcaagagcaagcatgaattcg

SEQ ID NO: 5571 - DNA, 674 bp, Homo sapiens
  misc_feature 618, 648: n = A,T,C or G
ccgcggtggcggccgcccgggcaggtacgcggggattgtggcagctggaggtctctgcatcgcttatccgtttattagccggaccaagattgcacagctaaagtctggcagagactccacggtatgactgtcctcactgggcctgtccacagtgcgagcgactcctgaggggaacagcgcggagttcaggagtccaagcacaaagcggtcttttacattccaacctgttgcctgccagccctttctggattactgatagaaaatcatgcaaaacctcccaacctttctaaggacaagactactgtggattcaagtgctttaatgactatttatgcgttgactgtgagaatagggagcagtgccatgggacatttctaggtgtagagaaagaagaaactgcaatggaaaaatttgtatgatttccatttatttcagaaagtttgtatgtaacaattaccccgagagtcatttctacttgcaaaaggattcgtaacaaagcgagtataattttcttgtcattgtatcatgcttggtaaattttaatgcagcatcttcagaacttgtcctgatggtgtcttattgtgtcagcaccaaatatttgtgcattatttggtgggncgtccttggtcacaggaagaatcttcttcnggtgccttaatggtttttttttttta

SEQ ID NO: 5572 - DNA, 465 bp, Homo sapiens
  misc_feature 23, 99, 102, 231, 244, 259, 260, 261, 269, 273, 275, 326,332, 339, 340, 433, 441, 454: n = A,T,C or G
caccgcggtggcggccgcccggncaggtactgtgaggaaggaaggaccactccacaagatctgtgttttgaacaatgatgcctgttagggaatgtgcantancaaaaatcaaaatttggggtggggccaagtgatctattctatttacttgtgctgaccgaattttttcttcaattaatttaatttctttagttgcctctggagttaacgttctttcactatttaattccnagtcccctcttangaaagagaacaaatnnnacatggcntaantnggaatgcctagagttggccaaatccaattaatatctccaaatccaattacntatctnctagcanncttttgaaactcatttaatgcttttaatgtgtcttttcttatttctattttttgtggtttaattttcctttcctctacctgcattcccaagtnacggaaangagtagaggtttngaatcttatca

SEQ ID NO: 5573 - DNA, 364 bp, Homo sapiens
  misc_feature 152, 169, 178, 180, 247, 288, 322: n = A,T,C or G
gccccccctcgagagtacttctagaattaattaacagcgggtttatcaacaaagaacccttaacacaccatactatattgcaatccctatggtaccagactgtcgcaaagaacatcttttgggaatgaagtcatgaaagaacaagtttgctngtgaccacctcagagtntcaaaaccntncctcctccagcaagacccaaccacaaaaactgtctaaaggcgccctgagtttgagaattttagtgtnctgctctgggtttttccaggctgccttttttttgataccangcttgccctgcctgtaccattttttactgcatangcaggctgacagctcagactgactgatggcggagcctgcctc

SEQ ID NO: 5574 - DNA, 358 bp, Homo sapiens
  misc_feature 184, 260, 273, 283, 358: n = A,T,C or G
agtacttctagaattaattaacagcgggtttatcaacaaagaacccttaacacaccatactatattgcaatccctatggtaccagactgtcgcaaagaacatcttttgggaatgaagtcagaagaacagtttgctgtgaccacctcacaagtctcaaaacccttcctcctccagcaagacccanccacaaaaactgtctaaaggcgccctgagtttgagaattttagtgtcctgctctgggtttttccaggctgcctttntcttgataccagncttgccctgnctgtaccattttttactgcataaggcaggctgacagctcatactgactgatggcggagcctgcctcacaaatgtn

SEQ ID NO: 5575 - DNA, 330 bp, Homo sapiens
agtacttctagaattaattaacgcgggtctatcaacaaagaacccttaacacaccatactatattgcaatccctatggtaccagactgtcgcaaagaacatcttttgggaatgaagtcagaagaacagtttgctgtgaccacctcagagtctcaaaacccttcctcctccagcaagacccaaccacaaaaactgtctaaaggcgccctgagtttgagaattttagtgtcctgctctgggtttttccaggctgcctttttcttgataccaggcttgccctgcctgtaccattttttactgcataggcaggctgacagctcaagactgactg

SEQ ID NO: 5576 - DNA, 307 bp, Homo sapiens
  misc_feature 15, 29, 30, 33, 86, 154, 170: n = A,T,C or G
agtacttctagaatnaattaacgcgggtnnatnaacaaagaacccttaacacaccatactatattgcaatccctatggtaccagantgtcgcaaagaacatcttttgggaatgaagtcaggaagaacagtttgctgtgaccacctcagagtctnaaaacccttcctcctncagcaagacccaaccacaaaaactgtctaaaggcgccctgagtttgagaattttagtgtcctgctctgggtttttccaggctgcctttttcttgataccaggcttgccctgcctgtaccattttttactgcataggc

SEQ ID NO: 5577 - DNA, 530 bp, Homo sapiens
  misc_feature 520: n = A,T,C or G
agtacttctagaattaattaaggcgggagaccatggggatccccagcatgatcctcctggggcacagtttgggaggattcctggccacttcttactcaatcaagtaccctgatagagttaaacacctcatcctggtggacccatggggctttcccctccgaccaactaaccccagtgagatccgtgcacccccagcctgggtcaaagccgtggcatctgtcctaggacgttccaatccattggctgttcttcgagtagctgggccctgggggcctggtctggtgcagcgattccggccggacttcaaacgcaagtttgcagacttctttgaagatgataccatatcagagtatatttaccactgcaacgcacagaatcccagtggtgagacagcattcaaagccatgatggagtcctttggctgggcccggcgccctatgctggagcgaattcacttgattcgaaaagatgtgcctatcactatgatctacgggtccgacacctggatagataccagtcnggaaaaaagg

(The sequence listing continues in the following parts.)
